United States Patent Application Publication US 2025/0084491 A1 - sequence listing, part 43

SEQ ID NO: 824333 - DNA, 75 bp, synthetic construct
  source 1..75: mol_type = other DNA
aattgacgatcttggcttcatgacaggtattacaggttcttcaggttcttttgctcttggtgcagatattcgtag

SEQ ID NO: 824334 - DNA, 75 bp, synthetic construct
  source 1..75: mol_type = other DNA
aactattgcggaaatgcaggttaatgacccgcagggcttccagcacttcgcaggtaatctggcactattttctct

SEQ ID NO: 824335 - DNA, 75 bp, synthetic construct
  source 1..75: mol_type = other DNA
gctccttctgatgccattctatttcaggaaggagtgtccgttaaactcaggctacctcataatggtggtcctgaa

SEQ ID NO: 824336 - DNA, 75 bp, synthetic construct
  source 1..75: mol_type = other DNA
catgtacgaatatctcatcactctggttaaaggtaagccctggtacgataactgctatttctataatttcgatga

SEQ ID NO: 824337 - DNA, 75 bp, synthetic construct
  source 1..75: mol_type = other DNA
gttgatcaccttgggatggctgctcttggtccgattgattacttcaatgttcaggacaagatggttggtcgtgaa

SEQ ID NO: 824338 - DNA, 75 bp, synthetic construct
  source 1..75: mol_type = other DNA
atgcaaaaaatcgacctcggcaataacgaatccatggtgtgcggcgtgttccccaaccaagatggaacgttcact

SEQ ID NO: 824339 - DNA, 75 bp, synthetic construct
  source 1..75: mol_type = other DNA
gcgatgacgtataccaaaagtaaaacgtttaaaaccgaagctgccgcgcatcgctggttagccagaaacgctaac

SEQ ID NO: 824340 - DNA, 75 bp, synthetic construct
  source 1..75: mol_type = other DNA
atggatatgctcaatcttggcaacaatgaatctctggtgtgcggagtattccccaaccacgacggcacgtttacc

SEQ ID NO: 824341 - DNA, 75 bp, synthetic construct
  source 1..75: mol_type = other DNA
cgaggcaggctggcagagacaatccgcagcaatcaggctggcgaggcgctaacagcacgaggtcagaacatcacg

SEQ ID NO: 824342 - DNA, 75 bp, synthetic construct
  source 1..75: mol_type = other DNA
ttggtaaatctcagcggcagcaatctcaacctgcacaggtatcacagccagcagccagcagtaacttttcttcac

SEQ ID NO: 824343 - DNA, 75 bp, synthetic construct
  source 1..75: mol_type = other DNA
attggctcgatcaggtgcaaataacgttggtctgaccgcgttacgtggtctggctggagttgctgatatttacaa

SEQ ID NO: 824344 - DNA, 75 bp, synthetic construct
  source 1..75: mol_type = other DNA
gattgatgcttgtcgtgaaaaaggcattgccagtgggaatgattgcgaaccgttgtggcgggtattgagttgctt

SEQ ID NO: 824345 - DNA, 75 bp, synthetic construct
  source 1..75: mol_type = other DNA
atgatgctgaaaattaaacccgcagagggaaaaaccatccgtgacccgctcacgatggaattactggcgcctgag

SEQ ID NO: 824346 - DNA, 75 bp, synthetic construct
  source 1..75: mol_type = other DNA
acaaatcattacatgcatcactttcaccgctttcaaaaaatatatcgatgggtaaagaaagtatcagtataaaat

SEQ ID NO: 824347 - DNA, 75 bp, synthetic construct
  source 1..75: mol_type = other DNA
attcttaaagttgataagtatatcgcaatgccgggacaggagataacactacatatagacagaagtgaaggtgtt

SEQ ID NO: 824348 - DNA, 75 bp, synthetic construct
  source 1..75: mol_type = other DNA
catctgaagaaagcgaagttggactgcaaattaccggataaggcgatggactatctgaagcgaaatggactgata

SEQ ID NO: 824349 - DNA, 75 bp, synthetic construct
  source 1..75: mol_type = other DNA
gtataccgtaaagcagagcaagtcagaaaaatgttgatgactctgccagccttaaaacatattttgcctcatgga

SEQ ID NO: 824350 - DNA, 75 bp, synthetic construct
  source 1..75: mol_type = other DNA
attttggttgttctggtgataagggagatcagcttacacagatgctttcattcctcacgaaagacgaacgagaac

SEQ ID NO: 824351 - DNA, 75 bp, synthetic construct
  source 1..75: mol_type = other DNA
tagctgtagttttcattactgcttgttctgacaaatattctgagcaggataaaatgcaggccattaataatgttg

SEQ ID NO: 824352 - DNA, 75 bp, synthetic construct
  source 1..75: mol_type = other DNA
aaaaatgctgtcagcatatccgtacaacaatttcagaagtgaatcgtacgattacctgcaaacggtgtggattgg

SEQ ID NO: 824353 - DNA, 75 bp, synthetic construct
  source 1..75: mol_type = other DNA
tcgggctggtgtgatacaaaagcaggtgggagccgcagtattttttgagcgtatggcagtacctaatgactgggc

SEQ ID NO: 824354 - DNA, 75 bp, synthetic construct
  source 1..75: mol_type = other DNA
acaagtttaaactcactaaataatatatccaatagttgtacgttattgttcttacaggcttcagataaaaaatca

SEQ ID NO: 824355 - DNA, 75 bp, synthetic construct
  source 1..75: mol_type = other DNA
tagctatgtttttttttattacttcttgttctcctaaattctctgagcaggatataattcaggctattaataatg

SEQ ID NO: 824356 - DNA, 75 bp, synthetic construct
  source 1..75: mol_type = other DNA
actgacacacaattaaactcacttaacgagctaccaaatagctgcgcattattatttttacaggcttcaggtaaa

SEQ ID NO: 824357 - DNA, 75 bp, synthetic construct
  source 1..75: mol_type = other DNA
ttcaccgcgatgacgtataccaaaagcaaaacgtttaaaaccgaaactggcgcgcatcgctggttagccagaaac

SEQ ID NO: 824358 - DNA, 75 bp, synthetic construct
  source 1..75: mol_type = other DNA
agcttctgacgcaggtcgtaaaggtggccaacaaagtggtggtaattttaaaaacgatccacaaagagcatcaga

SEQ ID NO: 824359 - DNA, 75 bp, synthetic construct
  source 1..75: mol_type = other DNA
ataagccgagtccaacaattacaactctttgttatggtttcggaaatggacgttttggacatccagaacagcata

SEQ ID NO: 824360 - DNA, 75 bp, synthetic construct
  source 1..75: mol_type = other DNA
tatatctttgtagaagacaaagacaagtttgttataagaagtattgggaaaatgataggtaatgctgttcctgtg

SEQ ID NO: 824361 - DNA, 75 bp, synthetic construct
  source 1..75: mol_type = other DNA
cgctaaatggtgtcttgataaattaccaagtgattgtcagattgtcggtgaagatggtaattattatctggttag

SEQ ID NO: 824362 - DNA, 75 bp, synthetic construct
  source 1..75: mol_type = other DNA
ttcaccgcgatgacgtataccaaaagcaaaacgtttaaaaccgaatctggcgcgcgtcgctggctggaaagaaac

SEQ ID NO: 824363 - DNA, 75 bp, synthetic construct
  source 1..75: mol_type = other DNA
tttcgattacggccgtaactacggtgtggtttatgatgcactgggttacaccgatatgctgtcatgcatacagcg

SEQ ID NO: 824364 - DNA, 75 bp, synthetic construct
  source 1..75: mol_type = other DNA
ccccaaccaggacggtacgttcaccgcgatgacgtataccaaaagcaaaacgtttaaaaccgaaaatggtgcccg

SEQ ID NO: 824365 - DNA, 75 bp, synthetic construct
  source 1..75: mol_type = other DNA
gccatgacatataccaaaagcaaaacgtttaaaaccgaagctggcgcacgccgctggttgcagaagcacacagta

SEQ ID NO: 824366 - DNA, 75 bp, synthetic construct
  source 1..75: mol_type = other DNA
atgttgagttttctcatcaaaaacacttgaccaagcgccatgagaaaactaaattacaatccatcaagacaccgc

SEQ ID NO: 824367 - DNA, 75 bp, synthetic construct
  source 1..75: mol_type = other DNA
gcggagcaggtggcttaactcatggtttgcaacgagcagggttgaatgtggttgcaggctatgatattgatgcta

SEQ ID NO: 824368 - DNA, 75 bp, synthetic construct
  source 1..75: mol_type = other DNA
cgtgttccccaaccaggatggaacgttcaccgcgatgacgttaccagaagcaaaacgtttaaaacggaagctggc

SEQ ID NO: 824369 - DNA, 75 bp, synthetic construct
  source 1..75: mol_type = other DNA
acgaatctctggtatgtggcgtattccccaaccaggacggtacgttcaccgcgatgacgtataccaaaagcaaaa

SEQ ID NO: 824370 - DNA, 75 bp, synthetic construct
  source 1..75: mol_type = other DNA
acgcaagattccaaagtggtgtatcgaccgtatcccttccgatgctcaaattataggtgaaacggaactacatta

SEQ ID NO: 824371 - DNA, 75 bp, synthetic construct
  source 1..75: mol_type = other DNA
agtatgcagccggccggtgaagggctgctgcaacagaagtacgaacagctcaaagcgaagttgcaggctgaaggt

SEQ ID NO: 824372 - DNA, 75 bp, synthetic construct
  source 1..75: mol_type = other DNA
gcgatgacgtataccaaaagtaaaacgtttaaaaccgaagctggcgcgcgtcgctggttagcaagaaactccgac

SEQ ID NO: 824373 - DNA, 75 bp, synthetic construct
  source 1..75: mol_type = other DNA
atgtttattgttcgcacagttagtcagggaaccggtggcttaatatcaggattggggcagcagactacaaaggga

SEQ ID NO: 824374 - DNA, 75 bp, synthetic construct
  source 1..75: mol_type = other DNA
gcgatgacgtataccagaagcaaaacgtttcaaactgaagctggcgcgcgtcgctggttaaccagaaacactgac

SEQ ID NO: 824375 - DNA, 75 bp, synthetic construct
  source 1..75: mol_type = other DNA
gcggttaacacagcggctgaatcagcaaaatccacagccgaagattcatcgcgcgcaaacgcgcattcagcaact

SEQ ID NO: 824376 - DNA, 75 bp, synthetic construct
  source 1..75: mol_type = other DNA
gcaagagttactgcgccaggtgcaatcgacccgtcaacggctggagatggcgatggattattatctcgccaaccg

SEQ ID NO: 824377 - DNA, 75 bp, synthetic construct
  source 1..75: mol_type = other DNA
cttcaacttgcttggatagttgccgccagtgtccgtttagttctttcgattgataaaatattttctcaaatgaaa

SEQ ID NO: 824378 - DNA, 75 bp, synthetic construct
  source 1..75: mol_type = other DNA
aataaaatctggtataacctgcgccctttaactgaccatgaagcagtcatgttagggaaatgtgtttctgactta

SEQ ID NO: 824379 - DNA, 75 bp, synthetic construct
  source 1..75: mol_type = other DNA
ctccagcttgcctggctggtagcagtcagttctcgcttcattctttctgttgatgaagtcttttcccggatgaaa

SEQ ID NO: 824380 - DNA, 75 bp, synthetic construct
  source 1..75: mol_type = other DNA
tttgaaaggtaaagagccgtatgatattctttttattagtcaatccactaaggctgattatgaaaaaaagcacaa

SEQ ID NO: 824381 - DNA, 75 bp, synthetic construct
  source 1..75: mol_type = other DNA
ctccagatggcctggattattgctgttgcttcacgattgattacgtcgattggtgaaatatcttcccgaatgaaa

SEQ ID NO: 824382 - DNA, 75 bp, synthetic construct
  source 1..75: mol_type = other DNA
aatcaaatctggcatcactttcgtcctttaactgatcgtgaagccatcatgttggggaaaacaatttcaaacatt

SEQ ID NO: 824383 - DNA, 75 bp, synthetic construct
  source 1..75: mol_type = other DNA
acggggcttcctgaatgggcctggactcgggcaaccccctataccggaagcgacgagcagctacggaagttaaaa

SEQ ID NO: 824384 - DNA, 75 bp, synthetic construct
  source 1..75: mol_type = other DNA
tgccgttcacacaagctatcagcccaatgaagagcatatacaggaacagaattacaagcttgaacttgaactgag

SEQ ID NO: 824385 - DNA, 75 bp, synthetic construct
  source 1..75: mol_type = other DNA
tctggctcagggcatcgctggtctggaaagccatagccgtcgccctaaacattcaccatcaacgaaaaccggcgc

SEQ ID NO: 824386 - DNA, 75 bp, synthetic construct
  source 1..75: mol_type = other DNA
tgaatgggcagagaaacatgcaataaaactggagtttatccagccgggtaagccgacgcagaacgctttcattga

SEQ ID NO: 824387 - DNA, 75 bp, synthetic construct
  source 1..75: mol_type = other DNA
gtagtggatgattttaaccgtgaagcgctggcgatcgaaattgacctgaatatcccggcgcagcgggtcgtaaga

SEQ ID NO: 824388 - DNA, 75 bp, synthetic construct
  source 1..75: mol_type = other DNA
ccatcaggtgggacgattatgccgtccgggttatgaatggtggacgtatggtgcagctatataataaatcgaaac

SEQ ID NO: 824389 - DNA, 75 bp, synthetic construct
  source 1..75: mol_type = other DNA
gtgaaccttattcttttgagcctatcgagttcaaaaaaggaattaatcttattttaggtgagcaggatgattcat

SEQ ID NO: 824390 - DNA, 75 bp, synthetic construct
  source 1..75: mol_type = other DNA
atggcagtgatttatatcgccggccccatgaccggatacgaagactgcaatagaacggcgttttgcctggaggat

SEQ ID NO: 824391 - DNA, 75 bp, synthetic construct
  source 1..75: mol_type = other DNA
ctgaaacttcggtgcgccggaaacatcgttcttaatcctgccgtgctgcctgacggattaagccagcagcagtac

SEQ ID NO: 824392 - DNA, 75 bp, synthetic construct
  source 1..75: mol_type = other DNA
aatggcagcattactataactgggaacgtcctcatagcgctcacaacggtaaaactccgatggaacgctactttg

SEQ ID NO: 824393 - DNA, 75 bp, synthetic construct
  source 1..75: mol_type = other DNA
gatagaatctggcgaaacatcactggagaagctggaaaatcagatgcgtcatgccggcgctaaacttctgcgtgc

SEQ ID NO: 824394 - DNA, 75 bp, synthetic construct
  source 1..75: mol_type = other DNA
tatggaagtttgctgttaagtcggaagacaatgaaagagtttgcgatagatggattaatatatttgatgagcaga

SEQ ID NO: 824395 - DNA, 75 bp, synthetic construct
  source 1..75: mol_type = other DNA
cccgcacgaatcactgaataacatgacaccggaggaataccggctacaacatcacaaggccgggatctcaaaaag

SEQ ID NO: 824396 - DNA, 75 bp, synthetic construct
  source 1..75: mol_type = other DNA
actaaagcagaacaacagctggataaggattcggccattgttcctgtttattactacgtgaatgcgcgtctggtg

SEQ ID NO: 824397 - DNA, 75 bp, synthetic construct
  source 1..75: mol_type = other DNA
atcccaccggttactactgccgtcagacttccttcagacttccttcagtgtcccgggtaagccactggttaataa

SEQ ID NO: 824398 - DNA, 75 bp, synthetic construct
  source 1..75: mol_type = other DNA
ttgtttatatgaacgcatcccgtttgcaaggcttccgtgtttttgacgttgacggtagattgctgctctatatcc

SEQ ID NO: 824399 - DNA, 75 bp, synthetic construct
  source 1..75: mol_type = other DNA
tgcaatggcggtgaaatggcaaagcgggctgaacggtggcctcgtggtagcgaacccgatcccggaacagtttgc

SEQ ID NO: 824400 - DNA, 75 bp, synthetic construct
  source 1..75: mol_type = other DNA
aaattaacaagaacagtatctcgaatggcagttatcgtggatattattccaatattcactggcttaatatactct

SEQ ID NO: 824401 - DNA, 75 bp, synthetic construct
  source 1..75: mol_type = other DNA
tgggtacgcaagagccgttaagcagctggggtgcattgctgagtgatggcgcgaactcgatggaagtctctccat

SEQ ID NO: 824402 - DNA, 75 bp, synthetic construct
  source 1..75: mol_type = other DNA
gaataggtgctcagtctgtaactcaagctcaaaaacagagggttatagctgttcaagctgcccttgaattagtta

SEQ ID NO: 824403 - DNA, 75 bp, synthetic construct
  source 1..75: mol_type = other DNA
gagcgctggctgacggaatataacagcgagcggcctcatgaatccctgaaggatctgacgccggaagagtaccgg

SEQ ID NO: 824404 - DNA, 75 bp, synthetic construct
  source 1..75: mol_type = other DNA
ctaaacaatatgatgccagaggaatatcgtcagcaccattatttggccgggatctcaaaaaatgcatggaactaa

SEQ ID NO: 824405 - DNA, 75 bp, synthetic construct
  source 1..75: mol_type = other DNA
atgactcaccgtattccctgtaaaagccccgcttgtacatcaaccattcttccggaaaccgcagcgcgtactaac

SEQ ID NO: 824406 - DNA, 75 bp, synthetic construct
  source 1..75: mol_type = other DNA
cattcgacgaaatgagccccgaacaacggagggcaattcttgaggtcggcaaagtcttcattcaacccaaaccaa

SEQ ID NO: 824407 - DNA, 75 bp, synthetic construct
  source 1..75: mol_type = other DNA
tgcgcctcgtttccaccatcagtggttgccggacgagctgcgtgtcgaaaaagggtttagcccggatacgatcaa

SEQ ID NO: 824408 - DNA, 75 bp, synthetic construct
  source 1..75: mol_type = other DNA
gactacggtttacctcaaacacgcttaagaagcgtaggtatttttaggttaaacgaagacagtttttttaaaaag

SEQ ID NO: 824409 - DNA, 75 bp, synthetic construct
  source 1..75: mol_type = other DNA
aagagtttccagctatcactctttactacgcagcagaagccctgcattccggtcaacctaccctcccccagaact

SEQ ID NO: 824410 - DNA, 75 bp, synthetic construct
  source 1..75: mol_type = other DNA
tcactttaatctttttgaagatgatgggtcccgtgtcattatcaaaaagcatgtaccgagacataacataaatac

SEQ ID NO: 824411 - DNA, 75 bp, synthetic construct
  source 1..75: mol_type = other DNA
gttgttactcacaattatttgcggtttccgtttccaggaaataatgttgctgaaaatgacttctttggttaagcg

SEQ ID NO: 824412 - DNA, 75 bp, synthetic construct
  source 1..75: mol_type = other DNA
atgaaccagaaaacacttgaagatgtaatcaaaactgttcgcgttgctgttgtggccgacgtttgtggtgtcagc

SEQ ID NO: 824413 - DNA, 75 bp, synthetic construct
  source 1..75: mol_type = other DNA
taatcaaaactgttcgtgtttctgttgtgtccgacgtttgtggtgtcagccaaagagcaatctacaaatggatta

SEQ ID NO: 824414 - DNA, 75 bp, synthetic construct
  source 1..75: mol_type = other DNA
cttggatttggagcctgtacgagggacgtagttcgctggggttgcccttatgcgcttaagtgtcagtctggcctg

SEQ ID NO: 824415 - DNA, 75 bp, synthetic construct
  source 1..75: mol_type = other DNA
tgagtgaagaagctaaagctgttgagatcgcccaaaaaaaactttctgctgcacaatctgaagtggtgaaaatgg

SEQ ID NO: 824416 - DNA, 75 bp, synthetic construct
  source 1..75: mol_type = other DNA
cacttggtttctgggggatggctattattactggtattgtatctgcatatattggaaaagaagaattagaaaagc

SEQ ID NO: 824417 - DNA, 75 bp, synthetic construct
  source 1..75: mol_type = other DNA
ctggtaaagcagttaacctggcaactgaggaaaacgaagccggactgtaaattgccgggtaaggcgatggactac

SEQ ID NO: 824418 - DNA, 75 bp, synthetic construct
  source 1..75: mol_type = other DNA
tgcgcttaagtgtcagtctggtctaccttgtggctacttcactcttacaggggctttgttgaataaatcgaactt

SEQ ID NO: 824419 - DNA, 75 bp, synthetic construct
  source 1..75: mol_type = other DNA
aggtatttggggtattgctattgttacaggaattctatgctcctatattgataagaataaactcaatactataaa

SEQ ID NO: 824420 - DNA, 75 bp, synthetic construct
  source 1..75: mol_type = other DNA
atcagaaacgcgtattaaccaacttaatgctgagataaatggaattcagggggctatgtctcaggctaataataa

SEQ ID NO: 824421 - DNA, 75 bp, synthetic construct
  source 1..75: mol_type = other DNA
aaatcatcctgatgataagcaggcgcagcagttaggtgagtggctgatggcggatgataaaaaccagcgcgagaa

SEQ ID NO: 824422 - DNA, 75 bp, synthetic construct
  source 1..75: mol_type = other DNA
aattagtgccggtaaagagtcgctaaccgacctggtggagcagatgcgccaggcaggcgcgaaactgctgcgcac

SEQ ID NO: 824423 - DNA, 75 bp, synthetic construct
  source 1..75: mol_type = other DNA
gtccctctgctcacggtattcgggctagaggatgggcaggaactggtaattggctcttcgtctgcaactcagttc

SEQ ID NO: 824424 - DNA, 75 bp, synthetic construct
  source 1..75: mol_type = other DNA
ctctcttttgcatacactccgccgcgaaaaggatgtgtctcgcgttcaacaactcgcggtgcagtattcgcggca

SEQ ID NO: 824425 - DNA, 75 bp, synthetic construct
  source 1..75: mol_type = other DNA
aagtgagaatagagttttatctatatatgaaatagcacaactacaaggcattgatatagatgaggtaatctggaa

SEQ ID NO: 824426 - DNA, 75 bp, synthetic construct
  source 1..75: mol_type = other DNA
gacatatcggaaaatgtggaaaacataatcgatagaattaataaaatactagaacaaaaaaaagaagataaactt

SEQ ID NO: 824427 - DNA, 75 bp, synthetic construct
  source 1..75: mol_type = other DNA
ctcctgctgcactggccattcagtcgctacgtcagggcggtgaccttcgccgcatagatgcgattaaagcgctgc

SEQ ID NO: 824428 - DNA, 75 bp, synthetic construct
  source 1..75: mol_type = other DNA
agcacgatgcaaatcaggcaaaagaattaatcactactctggcgaatattaaacctttacctgcgctgcatttaa

SEQ ID NO: 824429 - DNA, 75 bp, synthetic construct
  source 1..75: mol_type = other DNA
tggcggtaaagccacgctgcggctgacgctattcagcgaaagctcccttcagcacgatgcgattaaggcaagaga

SEQ ID NO: 824430 - DNA, 75 bp, synthetic construct
  source 1..75: mol_type = other DNA
aaaatttattgcgccatttgtcgcaaacggttccagcgacacccggcattcgggttttcgatattcctttccccc

SEQ ID NO: 824431 - DNA, 75 bp, synthetic construct
  source 1..75: mol_type = other DNA
caatcttcaggcattactggcatggctgcgagagcaaattgcccagcaaacctctccaaatgacgcgcgagaaaa

SEQ ID NO: 824432 - DNA, 75 bp, synthetic construct
  source 1..75: mol_type = other DNA
tttgcttgcatcagttgcagccaacggcagccgtagcaggcttaccgcgcgatctggcgcggcagtttatcgcgc

SEQ ID NO: 824433 - DNA, 75 bp, synthetic construct
  source 1..75: mol_type = other DNA
tggcgaatcatcccgatgataaacaggcgcagaagctgggtgactggctgatggcggatgataaaaatcagcggg

SEQ ID NO: 824434 - DNA, 75 bp, synthetic construct
  source 1..75: mol_type = other DNA
tgaccgtctttaaatgtgccagtcattcgtgcgaacagtttggtatcgggcattacattaatcactgtattggtt

SEQ ID NO: 824435 - DNA, 75 bp, synthetic construct
  source 1..75: mol_type = other DNA
aaacaagtgccagtgattattaatgcattgcgagactcagcagaattaaaaaacaatgaagtatttaaaccgaag

SEQ ID NO: 824436 - DNA, 75 bp, synthetic construct
  source 1..75: mol_type = other DNA
agtcttacatgagaaagccgaacgggctggtggcagacccaagtgttgggggtggctctagcatcgacgttgcca

SEQ ID NO: 824437 - DNA, 75 bp, synthetic construct
  source 1..75: mol_type = other DNA
acaagacaggacgccaatataaaccaccagcaggagggcgtgactcaatcagtcacccgatacatatatcactac

SEQ ID NO: 824438 - DNA, 75 bp, synthetic construct
  source 1..75: mol_type = other DNA
cagagataccgctgtcaatgacgcattttgtcggacgttaagaggaagtctggctattccgcaatgccatcttct

SEQ ID NO: 824439 - DNA, 75 bp, synthetic construct
  source 1..75: mol_type = other DNA
tggcctggattggtgagattgcaggagaaatgcgacacgatcttagaaaagatttaaaaaaacaaggtcaggggc

SEQ ID NO: 824440 - DNA, 75 bp, synthetic construct
  source 1..75: mol_type = other DNA
cgggaacaagacctttacggttattgtccgtggtaatgacagtaactcgttcgatacgccagaggataaccaccc

SEQ ID NO: 824441 - DNA, 75 bp, synthetic construct
  source 1..75: mol_type = other DNA
ggagtgagaacgggggtgtcacgaacggtgcaatagtgatccacacccaacgcctgaaatcagatccagggggta

SEQ ID NO: 824442 - DNA, 75 bp, synthetic construct
  source 1..75: mol_type = other DNA
cgggagtgagaacgggggcgacggtgacgcattcgtcagggaagaacgcgaagcaatggacgttgtgttacaggg

SEQ ID NO: 824443 - DNA, 75 bp, synthetic construct
  source 1..75: mol_type = other DNA
ggagtgagaacgggggattcgtcagggaagaacgcgaagcaatggacgttgtgttacaggcgctggacggggagc

SEQ ID NO: 824444 - DNA, 75 bp, synthetic construct
  source 1..75: mol_type = other DNA
gcgccatatggctcaggactggaacctgtcagacgatgagctggaaaccgtcatgcagcggctggacgatgcttt

SEQ ID NO: 824445 - DNA, 75 bp, synthetic construct
  source 1..75: mol_type = other DNA
actgctgaaagtgctggggcgcggtatctccctgcttgatgcgtttggcgccgcgaacgatgtgctgaaaggcgc

SEQ ID NO: 824446 - DNA, 75 bp, synthetic construct
  source 1..75: mol_type = other DNA
tgaagtggcaaaagatttgggtatcctgaccgttgctgtcgtcactaagcccttcaactttgaaggcaagaagcg

SEQ ID NO: 824447 - DNA, 75 bp, synthetic construct
  source 1..75: mol_type = other DNA
ggacctacgaatcctgatacgtaaggagactttagataatcatgatagtcttagtagagacgtacttcaaaagcg

SEQ ID NO: 824448 - DNA, 75 bp, synthetic construct
  source 1..75: mol_type = other DNA
tgcctgtgagcgcgatacggtgtccatcaccatacgtaagccatcgaaggtacaaatcccgcatcagtcatatat

SEQ ID NO: 824449 - DNA, 75 bp, synthetic construct
  source 1..75: mol_type = other DNA
ttacccggaatttgctggcctgttccgtactcaattgcgggcgattttgcgcgctgccagtttcggcaacgccca

SEQ ID NO: 824450 - DNA, 75 bp, synthetic construct
  source 1..75: mol_type = other DNA
tatgacccagtatctgtatgcagtcgatcgtaataacccgcgcgtatcgccgctgtataacccgattacgccatc

SEQ ID NO: 824451 - DNA, 75 bp, synthetic construct
  source 1..75: mol_type = other DNA
cagctggcgcaaagagtttaccaaaagttttgcaccgcatgagattgctgatgtgcagcgcattagcggcaaagt

SEQ ID NO: 824452 - DNA, 75 bp, synthetic construct
  source 1..75: mol_type = other DNA
tttttatatatctcagccgttttataaaacgccaaggaaactatgtgttgtcaatagtgattatgattgcttaga

SEQ ID NO: 824453 - DNA, 75 bp, synthetic construct
  source 1..75: mol_type = other DNA
ggtacggtgcgttcacgtatcttccgagcgagggaagctattgataacaaagttcaaccgcttatcaggcgttga

SEQ ID NO: 824454 - DNA, 75 bp, synthetic construct
  source 1..75: mol_type = other DNA
tggacgctgctgatgtcgtggatgcgattaaagcgtgctcatctttggttaacgatgcccgtgcagagctggtaa

SEQ ID NO: 824455 - DNA, 75 bp, synthetic construct
  source 1..75: mol_type = other DNA
tacaaaatcccaggaagcagaagcagcctcgcaatccagagaccggtcaatttttgaaaacaaaaaaaggcgctc

SEQ ID NO: 824456 - DNA, 75 bp, synthetic construct
  source 1..75: mol_type = other DNA
cccgattcattcgtagcgaaacgctacggtgcgaaaagtgtctggattcgactggctcgcggaggaatcgaagag

SEQ ID NO: 824457 - DNA, 75 bp, synthetic construct
  source 1..75: mol_type = other DNA
gatccaaaaagcgatcgttgagcttaagcgcgatggcctgcgtcatgcagagacgattacgctgggtatcatggt

SEQ ID NO: 824458 - DNA, 75 bp, synthetic construct
  source 1..75: mol_type = other DNA
tttagcaataaagagcaggcgatccagttcctgtgcggtaacctcggcgttaacgggcgcactgaacatccgttc

SEQ ID NO: 824459 - DNA, 75 bp, synthetic construct
  source 1..75: mol_type = other DNA
ccggcgttggttttggcgtagcgatcccgcacaccaaatctcagtggatccgtcattccagtatcagcattgccc

SEQ ID NO: 824460 - DNA, 75 bp, synthetic construct
  source 1..75: mol_type = other DNA
gaaatgaagcgcctgtatgccgtcgggagtgagaacgggggcgacggtgatgcgttcgtcagggaagaacgcgaa

SEQ ID NO: 824461 - DNA, 75 bp, synthetic construct
  source 1..75: mol_type = other DNA
tcatacctgtcagtttactgattttgagctaaccgacggcagagacgctgaacggctggatcgatttgcgcaaac

SEQ ID NO: 824462 - DNA, 75 bp, synthetic construct
  source 1..75: mol_type = other DNA
gcaaattgattacctgctttgccagtaaaattccagcatcttcagttgaagaactgaccaaggggatcattgact

SEQ ID NO: 824463 - DNA, 75 bp, synthetic construct
  source 1..75: mol_type = other DNA
gcataccgatgcacttcatgccacgcgggatgaacctctggcatttgtgccgccgggaatggcgttccgtgtctt

SEQ ID NO: 824464 - DNA, 75 bp, synthetic construct
  source 1..75: mol_type = other DNA
gatgttgatggaatccttcgtggcgattatggcactggtttctgcctgtatcatcgatccgggcgtgtacttcgc

SEQ ID NO: 824465 - DNA, 75 bp, synthetic construct
  source 1..75: mol_type = other DNA
ctggctccgcgtgactacctctctaccttcctgaaaatcgggactatcgtcggtctggcggtaggcattttgatt

SEQ ID NO: 824466 - DNA, 75 bp, synthetic construct
  source 1..75: mol_type = other DNA
ccgggaacggcgttccgtgtctctgccagtgtggcagccgaaatgacagaacatggcctggccagaatgcaataa

SEQ ID NO: 824467 - DNA, 75 bp, synthetic construct
  source 1..75: mol_type = other DNA
atttattttagttcaactaccggaaccttttaatcataaaaataaagaacaagaaatagcttataatttttgtga

SEQ ID NO: 824468 - DNA, 75 bp, synthetic construct
  source 1..75: mol_type = other DNA
catatcccttattgctaatactaacaatccaaaaggacggtctgacgataaattcatagcaacagctcatgaata

SEQ ID NO: 824469 - DNA, 75 bp, synthetic construct
  source 1..75: mol_type = other DNA
gttgatgaaatctgcgattttgtggcgaatcagcaggcggttttcctgggcggtcactacatcttacagggcagc

SEQ ID NO: 824470 - DNA, 75 bp, synthetic construct
  source 1..75: mol_type = other DNA
ggcgcgtggtttatcgctcagtcacgcgtccacttgccgaacaaacgcaggcgctgcaacgcttactggacggtg

SEQ ID NO: 824471 - DNA, 75 bp, synthetic construct
  source 1..75: mol_type = other DNA
cctgttattactggggatagtttcactttgtgcattgattctgatcctctggcgcgtggtttatcgctcagtcac

SEQ ID NO: 824472 - DNA, 75 bp, synthetic construct
  source 1..75: mol_type = other DNA
gttgaacagcacggcccgtactttgtgctcgcacccggcctggcaatgccgcacggtcgcccggaagagggcgtt

SEQ ID NO: 824473 - DNA, 75 bp, synthetic construct
  source 1..75: mol_type = other DNA
gcacgggcgtccggaagagggcgttaagaaaaccggtttctctctggtaacgctgaaaaagccgctggaatttaa

SEQ ID NO: 824474 - DNA, 75 bp, synthetic construct
  source 1..75: mol_type = other DNA
atgaaattacgtgattcgctggcggaagctgagacatggcaggacgcagtgaaaatcggcgtggacctgctggta

SEQ ID NO: 824475 - DNA, 75 bp, synthetic construct
  source 1..75: mol_type = other DNA
gagcggacgggtgaaagatcgcccaattcgcctggcaacggcaattgccgacgatgtaccaactgcgttaatggg

SEQ ID NO: 824476 - DNA, 75 bp, synthetic construct
  source 1..75: mol_type = other DNA
cagtagccgtctggcccaggcgatgggcggcgaactgagcgccaccagcacgccggaggttggaagctgtttttg

SEQ ID NO: 824477 - DNA, 75 bp, synthetic construct
  source 1..75: mol_type = other DNA
acccgtggggatgtgcgccatatggctcaggactggagcctgtcagacgatgagctggaaaccgtcatgcagcgg

SEQ ID NO: 824478 - DNA, 75 bp, synthetic construct
  source 1..75: mol_type = other DNA
gatgaaccgtatgaaccacgcccgctactggaaagtaccctgcaattaatgagcgggcgggtgaaaggtcgtccg

SEQ ID NO: 824479 - DNA, 75 bp, synthetic construct
  source 1..75: mol_type = other DNA
cgcctgcaaactctcacccaaaataacatcgcccagttcgcgcagtttagtagcgaagtcagtcagctggtcgac

SEQ ID NO: 824480 - DNA, 75 bp, synthetic construct
  source 1..75: mol_type = other DNA
cgccggaggttggaagctgtttttgtttacgcttgccgttacgtattgccactgcacccgtgcccaaaacagtca

SEQ ID NO: 824481 - DNA, 75 bp, synthetic construct
  source 1..75: mol_type = other DNA
agcatcagcaacaccgacctgacgagttagctctcactgtgacggtggagcagattcaacaagagttagcgcaaa

SEQ ID NO: 824482 - DNA, 75 bp, synthetic construct
  source 1..75: mol_type = other DNA
acaacaatcgcttaactggttaacgcgtctggatgaattgcaaaaagacgccagccgccgtcagcaggcactgca

SEQ ID NO: 824483 - DNA, 75 bp, synthetic construct
  source 1..75: mol_type = other DNA
tctcaggtgtctgaaacgctgacacaacatcagcaacagccgcctgccgggctggatctcactttaacagtggaa

SEQ ID NO: 824484 - DNA, 75 bp, synthetic construct
  source 1..75: mol_type = other DNA
cgactaataccaccaaaacgcgggtttacggtaagccttgccagcagtaagggatggaatactgcccactcaaca

SEQ ID NO: 824485 - DNA, 75 bp, synthetic construct
  source 1..75: mol_type = other DNA
tatgctatctataatttgccgttcttatttaaagatcaggctcacttcaacaaagttgtttttggtgaagttggt

SEQ ID NO: 824486 - DNA, 75 bp, synthetic construct
  source 1..75: mol_type = other DNA
aaagccgtgcaacccctttttgacgactttaaaaaagatccaaaacaagctgcattgttagaaaaattcgacaac

SEQ ID NO: 824487 - DNA, 75 bp, synthetic construct
  source 1..75: mol_type = other DNA
acgacatgaattacaagggcagattgctgcgcataatcaacaaattatccagtatcaacagcaaattgaacaacg

SEQ ID NO: 824488 - DNA, 75 bp, synthetic construct
  source 1..75: mol_type = other DNA
cgctggaagtcgaggttgttgatacctggcaggcagatgcggtacgcgatacccgtaccctttccggcggcgaaa

SEQ ID NO: 824489 - DNA, 75 bp, synthetic construct
  source 1..75: mol_type = other DNA
cagattcagcaagagttagcgcaaactcagcaaaagttgcgtgaaaacaccaccagtcagggcgagattcgccag

SEQ ID NO: 824490 - DNA, 75 bp, synthetic construct
  source 1..75: mol_type = other DNA
cgctggaaaacgaagttaaaaagctcggtgaagaaggtgcggcgctacgtgggcaactggacgccttaacaaagc

SEQ ID NO: 824491 - DNA, 75 bp, synthetic construct
  source 1..75: mol_type = other DNA
caacttgccgatgtgaaaaccatttgcgagcaggaagcgcgcatcaaaacgctggaagcccagcgcgcgcagtta

SEQ ID NO: 824492 - DNA, 75 bp, synthetic construct
  source 1..75: mol_type = other DNA
agcgttacgcaggaacagacacaacgtaacgccgcgctcactgaaatgcgccaacgttataaagaaaagacgcaa

SEQ ID NO: 824493 - DNA, 75 bp, synthetic construct
  source 1..75: mol_type = other DNA
gcaaattttatctaaagagctttctgaaattgctacgaagaaagcgtctgtaaatgcagccatgaatctaactcc

SEQ ID NO: 824494 - DNA, 75 bp, synthetic construct
  source 1..75: mol_type = other DNA
acatatgagcgttgcaggttttgtaacgggtattaatgaaggagcattacgcaagaaattaggagagttgttaac

SEQ ID NO: 824495 - DNA, 75 bp, synthetic construct
  source 1..75: mol_type = other DNA
tttgtaacgggtattaatgaaggagcattacgcaagaaattaggagagttattaactgaattagcaaatagctaa

SEQ ID NO: 824496 - DNA, 75 bp, synthetic construct
  source 1..75: mol_type = other DNA
tcatatgagcgttgcaggttttgtaacgggtattaatgaaggagcattacgcaagaaattaggggagttgttggt

SEQ ID NO: 824497 - DNA, 75 bp, synthetic construct
  source 1..75: mol_type = other DNA
tatatgtatcaggcacaaagtaatctgtcgattgcaaagtttgctgatatgaatgaggcatctaaagcgtcaacc

SEQ ID NO: 824498 - DNA, 75 bp, synthetic construct
  source 1..75: mol_type = other DNA
ccagatgtcgaacgtcactggcggttgcccggatctggcgagagcgattacttttgctcattcaaccgggatggt

SEQ ID NO: 824499 - DNA, 75 bp, synthetic construct
  source 1..75: mol_type = other DNA
gatttgttgccagaactgatcacacctcgtagtcgaattcttgctctgggacaaatgtcgaacgtcactggcggt

SEQ ID NO: 824500 - DNA, 75 bp, synthetic construct
  source 1..75: mol_type = other DNA
tccggaatggcctgatggcacttccgttactgatatccccgtttgtgctgcatgctgacgaactgatgaagtggg

SEQ ID NO: 824501 - DNA, 75 bp, synthetic construct
  source 1..75: mol_type = other DNA
atgaagctgaaacgtcatctgacggcctgtgcgctcggggcggcaacggtgttttctgcggtttcactgccgctg

SEQ ID NO: 824502 - DNA, 75 bp, synthetic construct
  source 1..75: mol_type = other DNA
atgaagctgaaacgtcatctgaccgcctgcgcgctcgggatttcggcggtgttttctgcggtttcactgccactg

SEQ ID NO: 824503 - DNA, 75 bp, synthetic construct
  source 1..75: mol_type = other DNA
ccgctgcccggtgtgcattccatttcgctggcattgccagacaagctcacgtcattgctgccgtcagagtctgtt

SEQ ID NO: 824504 - DNA, 75 bp, synthetic construct
  source 1..75: mol_type = other DNA
cacctgcccggacgcatcatcaccctgtatccgtcagcccccctgaccgtcacgccactggcggcatggggagcc

SEQ ID NO: 824505 - DNA, 75 bp, synthetic construct
  source 1..75: mol_type = other DNA
aactgggaccttctgagccggtacgtattgtgtatgacggtgaggtcagcacggtcagtcaggcgactgacctga

SEQ ID NO: 824506 - DNA, 75 bp, synthetic construct
  source 1..75: mol_type = other DNA
caggtactcactgacgaagaaaagctgttactcgccgcacagcagcaagagcaacaatcgcttaactggttaaca

SEQ ID NO: 824507 - DNA, 75 bp, synthetic construct
  source 1..75: mol_type = other DNA
tgcatgtttcgaacataaaggtgatggtaacgttccaggcattaaagaagaagctgagattgatggaaaggccaa

SEQ ID NO: 824508 - DNA, 75 bp, synthetic construct
  source 1..75: mol_type = other DNA
accccagagtggcagcgtaactgcgccttacgctctgactacagtcgtcgtcaggcgctggtggaaatcgacgta

SEQ ID NO: 824509 - DNA, 75 bp, synthetic construct
  source 1..75: mol_type = other DNA
ccctatcaagtgaatactccgagctctggcaatcctgctactcctcagacttcaacactcagcgttggagccgcg

SEQ ID NO: 824510 - DNA, 75 bp, synthetic construct
  source 1..75: mol_type = other DNA
catcggaagttaaggcgctggtcattgatgaaaataatgaaatagtcgccacacatagcgcgccactgactattc

SEQ ID NO: 824511 - DNA, 75 bp, synthetic construct
  source 1..75: mol_type = other DNA
ctttaacgtcgacagcccggagtggaccggcggtgactgcaccgatcaagccatcggctgggatgatgtcaaaca

SEQ ID NO: 824512 - DNA, 75 bp, synthetic construct
  source 1..75: mol_type = other DNA
aaatgctgccattattggcagcatcatataactcgatagtttttgatttttttgtgaaaagtaccggaaaaggcc

SEQ ID NO: 824513 - DNA, 75 bp, synthetic construct
  source 1..75: mol_type = other DNA
caaatgatcacggtcgaatgaaatttgggacacatgtttactctatgaccaaatcgaacgacgtggagtttatta

SEQ ID NO: 824514 - DNA, 75 bp, synthetic construct
  source 1..75: mol_type = other DNA
ggtttggttaccagctgcactgcggtaactcgctggtgggcgcgcgccgtcaggtgttcaacaagagtgaactga

SEQ ID NO: 824515 - DNA, 75 bp, synthetic construct
  source 1..75: mol_type = other DNA
caggggcaatatttctccaccgtcatgtttgatgaaacatatgctcaagctgacggaacgactaaacggcatacc

SEQ ID NO: 824516 - DNA, 75 bp, synthetic construct
  source 1..75: mol_type = other DNA
ggaagcggcctggcgcagcgagtatgaaggctgtgaagggatgcaaaacttcctcaatgcgcagcagaactaccc

SEQ ID NO: 824517 - DNA, 75 bp, synthetic construct
  source 1..75: mol_type = other DNA
aagagattgggtgatttgcaagggcagtatttttcaacggttatgttcgatgaaacatatgcgcagagggatggg

SEQ ID NO: 824518 - DNA, 75 bp, synthetic construct
  source 1..75: mol_type = other DNA
agcgattgtcgggcggaattagtaaaaattttaccaatgctttcagatatagggacaaggctatttgctcggggc

SEQ ID NO: 824519 - DNA, 75 bp, synthetic construct
  source 1..75: mol_type = other DNA
gcgatgctgaacgccatcaggctttgatgcaacgttatcaacagtttaacgcgctatacaacaacgatcttaact

SEQ ID NO: 824520 - DNA, 75 bp, synthetic construct
  source 1..75: mol_type = other DNA
atctgaaagaactttggagtaatctgacgtgtgatgaatgtgaaatgtttgaagtcatcagtaaaaaattactgg

SEQ ID NO: 824521 - DNA, 75 bp, synthetic construct
  source 1..75: mol_type = other DNA
acggtctggtattacggctttatatccagccgaaagccagccgtgattctattgtcggtttacatggcgacgaag

SEQ ID NO: 824522 - DNA, 75 bp, synthetic construct
  source 1..75: mol_type = other DNA
cgccgcctttgccattgcggggctggtgatacccggcgttaccctgacggtgctgagccggagctgttaccgcgt

SEQ ID NO: 824523 - DNA, 75 bp, synthetic construct
  source 1..75: mol_type = other DNA
agtttgaagtcaaaggtgaagcgtaccgtgcgttctggagccagaatcgggcgcgtaaccagccggacggtaatt

SEQ ID NO: 824524 - DNA, 75 bp, synthetic construct
  source 1..75: mol_type = other DNA
accagcgatcgcgagcatctgcggcaatggcagcaacagttaacccatgctgagcaaaaacttaatacgcttgcg

SEQ ID NO: 824525 - DNA, 75 bp, synthetic construct
  source 1..75: mol_type = other DNA
ggtataaatcactcagtatatatggttcttgccatattatccatggaagagcagcattgcctgtcaccttcagag

SEQ ID NO: 824526 - DNA, 75 bp, synthetic construct
  source 1..75: mol_type = other DNA
aaaatggggaacaaatatgacgcgattgtttttatcgatgacgggcaagcaaacattcatgcgatgacgaagatg

SEQ ID NO: 824527 - DNA, 75 bp, synthetic construct
  source 1..75: mol_type = other DNA
caaactgaaaggccgcgtagaagaatttgccgctcaattgggttccaatatcgttctgcaatgcgatgttgccga

SEQ ID NO: 824528 - DNA, 75 bp, synthetic construct
  source 1..75: mol_type = other DNA
gcgaacgtaatcgaaccaatgcgtaatggtgatgtgaagggaatgatccataaagccacactacgcaaactagaa

SEQ ID NO: 824529 - DNA, 75 bp, synthetic construct
  source 1..75: mol_type = other DNA
ccgtgtttatacactatgtgggacctacaaaaccctggcatgagtgggctgactatccggtgtcacgtagttttt

SEQ ID NO: 824530 - DNA, 75 bp, synthetic construct
  source 1..75: mol_type = other DNA
catttgttgatgcaactctgtattcgcacaaataaaagaatgcaggataatatatctgaatttctgggggtgtat

SEQ ID NO: 824531 - DNA, 75 bp, synthetic construct
  source 1..75: mol_type = other DNA
actggcataaaagtttgaaggctggcaaagatactgtctgctatttccttgatgacgcatttgaaaataacgttg

SEQ ID NO: 824532 - DNA, 75 bp, synthetic construct
  source 1..75: mol_type = other DNA
acaatgcaccggtgctgttcagggaaggtacaggtaaaaatggtaagcctacggcttttaatgttcacattcttg

SEQ ID NO: 824533 - DNA, 75 bp, synthetic construct
  source 1..75: mol_type = other DNA
aactgtttctcctataccggtggtttcgccgtatcggcactgatgggcggttgcagccaggttgtcagcgttgat

SEQ ID NO: 824534 - DNA, 75 bp, synthetic construct
  source 1..75: mol_type = other DNA
cctgccctgctgccgattgaagaacacggcatgaaactgctggtggatattcagcacggacacaaaacgggctac

SEQ ID NO: 824535 - DNA, 75 bp, synthetic construct
  source 1..75: mol_type = other DNA
gacctctaaatcgtgttcaggcgctggcgaagatcgcagaaattaaagctaagttaggactgaaaggagcaagtg

SEQ ID NO: 824536 - DNA, 75 bp, synthetic construct
  source 1..75: mol_type = other DNA
aaaatgaaagtaaagaaaaacaaaaaagccgccagtgtcacccactgacggccaacgccgggagccgtgattatg

SEQ ID NO: 824537 - DNA, 75 bp, synthetic construct
  source 1..75: mol_type = other DNA
tcacgataaatgcgaaaactttagctttcgcgcttcaaatgaaacagcagtattaattactgctttttattcatt

SEQ ID NO: 824538 - DNA, 75 bp, synthetic construct
  source 1..75: mol_type = other DNA
tattaaatgtttgagatgttctgaggaattctcgacaacccattttggggccgtcgagaaaatcaatgacttagg

SEQ ID NO: 824539 - DNA, 75 bp, synthetic construct
  source 1..75: mol_type = other DNA
tgtttgggtgaaaaggtgttctgcggctacggattgccagggggcttcaacatcggacatcatcaatgaattact

SEQ ID NO: 824540 - DNA, 75 bp, synthetic construct
  source 1..75: mol_type = other DNA
ctctggcaatcaccactccccaacctgttcgtggttcctgtcagtttactgtttacaattattgcagtgcattat

SEQ ID NO: 824541 - DNA, 75 bp, synthetic construct
  source 1..75: mol_type = other DNA
atcgcggtgaaaaatttgacgttatcgtgatgtctttaaattgctgcgtacttatcgcgatcgcggtgaaaaatt

SEQ ID NO: 824542 - DNA, 75 bp, synthetic construct
  source 1..75: mol_type = other DNA
atggcaacggttaataaacaagccatcgccgcggcatttggtcgggcagccgcacactatgagcaacacgcagag

SEQ ID NO: 824543 - DNA, 75 bp, synthetic construct
  source 1..75: mol_type = other DNA
gcaatctcgcggtgcagtggtgcggtaatttatccacggcactccgcgagctatacagggtggtgcgccccggag

SEQ ID NO: 824544 - DNA, 75 bp, synthetic construct
  source 1..75: mol_type = other DNA
tgtgttcagccagctgcttgcgacatttccggcaagcctcgcgaaccgcgaccagaacgagctgaacgaaatccg

SEQ ID NO: 824545 - DNA, 75 bp, synthetic construct
  source 1..75: mol_type = other DNA
aacggcgtgcattatcaacatcatattcagcccatcacgctgtggtttgatgatgcgctcagtgccatgcgttcg

SEQ ID NO: 824546 - DNA, 75 bp, synthetic construct
  source 1..75: mol_type = other DNA
ctgcaactggcctggccgcaacaacaggggcgatatcctctgacgtattatctttttataggagtgattgttcgt

SEQ ID NO: 824547 - DNA, 75 bp, synthetic construct
  source 1..75: mol_type = other DNA
tgatgggcggctgtagccaggtagtcagcgtggatacctcgcaggaagcgctggatattgcacgacaaaacgttg

SEQ ID NO: 824548 - DNA, 75 bp, synthetic construct
  source 1..75: mol_type = other DNA
gtgttagccaaagggcgcgaaaaatcattacttcgtcgccatccgtgggtcttttccggtgctgtggcccgtatg

SEQ ID NO: 824549 - DNA, 75 bp, synthetic construct
  source 1..75: mol_type = other DNA
gtacccggaatgtgcgatttacgatcgcagcgacgttgcggtacgtaaaaaagaagggatggaactgacccaggg

SEQ ID NO: 824550 - DNA, 75 bp, synthetic construct
  source 1..75: mol_type = other DNA
atctatcgacattgctttttttacccgccgtttgcaacaagcacaaaaatggcgtgactggctggcgcaaaaaga

SEQ ID NO: 824551 - DNA, 75 bp, synthetic construct
  source 1..75: mol_type = other DNA
gaaggtaaagccagcctcggtgaaaccatcgatattgttgatcatcagggaaaatggttagcacgcggcgcttat

SEQ ID NO: 824552 - DNA, 75 bp, synthetic construct
  source 1..75: mol_type = other DNA
tttcctgtgcggcaaaggttcatttcaaagagcaggtacacgctatgaaatattctaccgttgttaacggcattg

SEQ ID NO: 824553 - DNA, 75 bp, synthetic construct
  source 1..75: mol_type = other DNA
tgacagtgtcaccattcgtgactcattagtttgcggtcaatgtagaatatttggtcacgccttaattgatcaaca

SEQ ID NO: 824554 - DNA, 75 bp, synthetic construct
  source 1..75: mol_type = other DNA
gttcatgtccgtggtccaaaagtcattaacggcgaggagcgcattacgcgaacgccgctggcagggttattatga

SEQ ID NO: 824555 - DNA, 75 bp, synthetic construct
  source 1..75: mol_type = other DNA
gtcgtccggtatgcatttattgagcatcgcgccgaagtttttgattttgcccgtattgaaggcaatgaagaaaac

SEQ ID NO: 824556 - DNA, 75 bp, synthetic construct
  source 1..75: mol_type = other DNA
aaatacactgattgaatatatttcaaagacaaatggctcatttatcaatataataaaaaactggaacgatatcaa

SEQ ID NO: 824557 - DNA, 75 bp, synthetic construct
  source 1..75: mol_type = other DNA
ttatatgttgggtcatagtttgggcgaatatgctgcgctgacctgtagtggtgcgctgagcttttcccaagcact

SEQ ID NO: 824558 - DNA, 75 bp, synthetic construct
  source 1..75: mol_type = other DNA
atatggatttagagggtgagaataaacataaatacagcgacggcacctatattgaaggtggactggagatgaagt

SEQ ID NO: 824559 - DNA, 75 bp, synthetic construct
  source 1..75: mol_type = other DNA
cagcaggcgctattgcataagctcggggtgcaatatctgcaagggtatttgattggtcgcccgcagccattagct

SEQ ID NO: 824560 - DNA, 75 bp, synthetic construct
  source 1..75: mol_type = other DNA
gacacgattcatgtccgtggtccaaaagtcattaacggtgaggaacgtattacgcgaacgcctctggcagggtta

SEQ ID NO: 824561 - DNA, 75 bp, synthetic construct
  source 1..75: mol_type = other DNA
cgctggcggctggatcgatcgcgaaacggtgttagcacaggaaggaaattgctggatttacgaccagaacgctat

SEQ ID NO: 824562 - DNA, 75 bp, synthetic construct
  source 1..75: mol_type = other DNA
aacagcgagcctttagttatcaggaagatggcgataaaaagagtgtgttattacggcagattattgccgtagccg

SEQ ID NO: 824563 - DNA, 75 bp, synthetic construct
  source 1..75: mol_type = other DNA
aactggcggcagcactggtcagcatgaaaattcgcggcgagcacccgaacgaaatcgccggagcagcaacggcgc

SEQ ID NO: 824564 - DNA, 75 bp, synthetic construct
  source 1..75: mol_type = other DNA
atgcgatgccggttcgccagcaactgaaaacccgcaccctgttcaatgtgctggggccattgattaacccggcgc

SEQ ID NO: 824565 - DNA, 75 bp, synthetic construct
  source 1..75: mol_type = other DNA
aactggcggcggcgctggtcagtatgaaaatccgcggcgaacacccgaatgaaatcgccggagcagcgactgccc

SEQ ID NO: 824566 - DNA, 75 bp, synthetic construct
  source 1..75: mol_type = other DNA
caatactctgagtgcgattaatatctggacgccgcaaatcctacagagtttcaatactggcagtagcaacatcat

SEQ ID NO: 824567 - DNA, 75 bp, synthetic construct
  source 1..75: mol_type = other DNA
atggctaatttatgcaaagcggcacgcggccgcgattgtcaggtgcggatccccggcgtatgcaacggcaatcct

SEQ ID NO: 824568 - DNA, 75 bp, synthetic construct
  source 1..75: mol_type = other DNA
gaaacgtctgtactggcacatatccggctggctggattgtgcggtaccggtatcaaaccgccagacctgattgcc

SEQ ID NO: 824569 - DNA, 75 bp, synthetic construct
  source 1..75: mol_type = other DNA
atgctggctgggcgtgatcttaaagcggtgttcgccctcggcgcaggcgttgattccattttgagcaaattacag

SEQ ID NO: 824570 - DNA, 75 bp, synthetic construct
  source 1..75: mol_type = other DNA
aagcggttgagtacatttctcgcaccattgcacaactcgaaaaaggggaggcggcttgtggtcaagtcgaccgcg

SEQ ID NO: 824571 - DNA, 75 bp, synthetic construct
  source 1..75: mol_type = other DNA
gaaactacagttctggcacattaccggatggctggaatttgcggaacgggaatgaagcctgacgacatgatcggc

SEQ ID NO: 824572 - DNA, 75 bp, synthetic construct
  source 1..75: mol_type = other DNA
gcgggcgaaattcttcacggtaaagcctccagcattgaacacgacggtcaggcgatgtttgccggattaacaaac

SEQ ID NO: 824573 - DNA, 75 bp, synthetic construct
  source 1..75: mol_type = other DNA
gtcgcacagagcttgcagacctggcgttttccgctgcgttgctggagccgtagccataaaagctggcccggtgta

SEQ ID NO: 824574 - DNA, 75 bp, synthetic construct
  source 1..75: mol_type = other DNA
taccggtatgggcgagcaaatgcaggaatatgctgtcagtcaagtgctccattggttcagacgttttgacgatta

SEQ ID NO: 824575 - DNA, 75 bp, synthetic construct
  source 1..75: mol_type = other DNA
gagcgggtggcggatattctgccgctggcggaaagctttttgaaaatgtctctggcggcactctctgtccctttt

SEQ ID NO: 824576 - DNA, 75 bp, synthetic construct
  source 1..75: mol_type = other DNA
actgggcaaaattaggtatccttgtcggttcaatttcttcggcggtaattggatatagctggttacgcgttcgtt

SEQ ID NO: 824577 - DNA, 75 bp, synthetic construct
  source 1..75: mol_type = other DNA
gtatcagttgtcggaataccgcgccgggcaatatattcgcttacaacgtcatgatgatttctggcgtggtaagcc

SEQ ID NO: 824578 - DNA, 75 bp, synthetic construct
  source 1..75: mol_type = other DNA
gttgaacagtttggtccttatttcgttatcgcaccgggactggcgatgccgcacgggcgtccggaagagggcgtt

SEQ ID NO: 824579 - DNA, 75 bp, synthetic construct
  source 1..75: mol_type = other DNA
aaaaaaactggatttgctctcgtcacgctgaaaaaaccgctgacgttcaaccacgatgataacgatccagtggac

SEQ ID NO: 824580 - DNA, 75 bp, synthetic construct
  source 1..75: mol_type = other DNA
catcatgcagatcgttaacctgtttgaagatgaagagaatttcgaccgtttacgtgcctgccgtaccgagcagga

SEQ ID NO: 824581 - DNA, 75 bp, synthetic construct
  source 1..75: mol_type = other DNA
gcatgggcgctctccggctaaacgtctggagcatgttttgcatccgtgggtggcatatctgattttgccgttgtt

SEQ ID NO: 824582 - DNA, 75 bp, synthetic construct
  source 1..75: mol_type = other DNA
ctggcacaactgacggcgaagacgctgaagctgggtctggatacgctgggtattgagacagtagagcgtatgtaa

SEQ ID NO: 824583 - DNA, 75 bp, synthetic construct
  source 1..75: mol_type = other DNA
acaacccgtggcataacgtcaacggcagtaacttcccctatttcgacagtctgcaatttgccgataacgtgaaaa

SEQ ID NO: 824584 - DNA, 75 bp, synthetic construct
  source 1..75: mol_type = other DNA
cggcgcgacctatcgcttccacctgcgtcgcgatgttccgtttcaaaaaaccgactggtttactcccactcgtaa

SEQ ID NO: 824585 - DNA, 75 bp, synthetic construct
  source 1..75: mol_type = other DNA
acctgttttatcggctgagtattttgcgtctacaactgccgccgctacgcgagcgggtggcggatattctgccgc

SEQ ID NO: 824586 - DNA, 75 bp, synthetic construct
  source 1..75: mol_type = other DNA
ccttcctgaaaatcgggactatcgttggtctggcggtgggaattctgattatgcgccccacgctgaccatgccgg

SEQ ID NO: 824587 - DNA, 75 bp, synthetic construct
  source 1..75: mol_type = other DNA
ctttatgatcatggtgatcattctggcggtgctggcgatgatcgtggtgaaagccctgacacatagtccgtgggg

SEQ ID NO: 824588 - DNA, 75 bp, synthetic construct
  source 1..75: mol_type = other DNA
aactggcgcaactggtgttcaacaaccgtctggatgccgggttaaccatcttctttatggtggtcgtggtggttc

SEQ ID NO: 824589 - DNA, 75 bp, synthetic construct
  source 1..75: mol_type = other DNA
ccaacggcgaaagaaacgccatatgagccgatgccggaaaatgtcgaggagatcgtggcgcaggcaaaaggcgcg

SEQ ID NO: 824590 - DNA, 75 bp, synthetic construct
  source 1..75: mol_type = other DNA
ccgaagatgctggcgaacgaagggcaggcgtgctttatcggctacggtggaatgttgatggaatccttcgtggcg

SEQ ID NO: 824591 - DNA, 75 bp, synthetic construct
  source 1..75: mol_type = other DNA
ccatgaacagcccaatggcggtgctggctccggcagggacggcggatgtggtcgcttctgccgcgcaggtggtga

SEQ ID NO: 824592 - DNA, 75 bp, synthetic construct
  source 1..75: mol_type = other DNA
atcagcccggaaaatgcgctgaccggacatgaaaatgaggttgtatcagcgcagccggataccgtgactgatacg

SEQ ID NO: 824593 - DNA, 75 bp, synthetic construct
  source 1..75: mol_type = other DNA
acccggcggagaagtggccgggtgttttgatctggtggacacgatttttgcctgtcgcgggcagaaaccggtgca

SEQ ID NO: 824594 - DNA, 75 bp, synthetic construct
  source 1..75: mol_type = other DNA
cgctgaccggacatgaaaatgaggtgtatcagcacagcggataccgtgatgatacggctgtctggtcacggttgt

SEQ ID NO: 824595 - DNA, 75 bp, synthetic construct
  source 1..75: mol_type = other DNA
tattggcgaagtgtcggtgattggtctggtgttcctgattttcgccattatctctggcggctgggtggcagaaag

SEQ ID NO: 824596 - DNA, 75 bp, synthetic construct
  source 1..75: mol_type = other DNA
tacgtctgaaggaactggcagaattgctggggcgtgagcctgatatgtcgggaagcgcagcagatattgcgcagc

SEQ ID NO: 824597 - DNA, 75 bp, synthetic construct
  source 1..75: mol_type = other DNA
gatacccctcccggcccggaaaatgtgctgaccgggcatgaaaatgaggtggtatcagcgcagccggacaccgtg

SEQ ID NO: 824598 - DNA, 75 bp, synthetic construct
  source 1..75: mol_type = other DNA
aaaaagtccgtcaggccatgattgcggcaggcgcgcctgcggattgcgaaccgcagggtcgtcagtcagcaaaag

SEQ ID NO: 824599 - DNA, 75 bp, synthetic construct
  source 1..75: mol_type = other DNA
ctcctaaaaaaggattatgtgcaaccatatttaatggggctataagcagagtttgtaagggcgatatcattaacg

SEQ ID NO: 824600 - DNA, 75 bp, synthetic construct
  source 1..75: mol_type = other DNA
tttatcgttacagcgtttgaaaagggattaatgaacggtttaagggagtttttggctgtaaatgaggactacttt

SEQ ID NO: 824601 - DNA, 75 bp, synthetic construct
  source 1..75: mol_type = other DNA
gaagtgagcttgtaccggcgaggcacgggcagcagtttaacggggtcttagtgaatgccacacccgcatcggcca

SEQ ID NO: 824602 - DNA, 75 bp, synthetic construct
  source 1..75: mol_type = other DNA
gctgaggtcaatacaagtgttgatgtttccggtaagaatgactctagaaaagaagaaaataaattgcctgatgtt

SEQ ID NO: 824603 - DNA, 75 bp, synthetic construct
  source 1..75: mol_type = other DNA
caatgaaatcatgaaccatcgccggatggccgcactgacgctgctgatgaagcatatccgtcagcgggatatgct

SEQ ID NO: 824604 - DNA, 75 bp, synthetic construct
  source 1..75: mol_type = other DNA
tggttgatatcactgtcgttgatgacaatgaaatcatgaaccatcgccggatggccgcactgacgctgctgatga

SEQ ID NO: 824605 - DNA, 75 bp, synthetic construct
  source 1..75: mol_type = other DNA
agccctggctattgcgtgccagcttcagaaaatggggatgacgccggagcagattaggcaggctaccgggctttc

SEQ ID NO: 824606 - DNA, 75 bp, synthetic construct
  source 1..75: mol_type = other DNA
ttcccggcgagtctggctaaccgggaccagaacgaactgaatgaaatccgccgccagtgggttctggctttccgg

SEQ ID NO: 824607 - DNA, 75 bp, synthetic construct
  source 1..75: mol_type = other DNA
ccagtactaaacaacaggcaagttacatatttagtaccctttccccgaagcctactgcgaactgccagcttacag

SEQ ID NO: 824608 - DNA, 75 bp, synthetic construct
  source 1..75: mol_type = other DNA
ttggtgatatctatgaacagtttcttgaaaaggacatcctgttacagcgcgcaattcatgaaattgaacggtatc

SEQ ID NO: 824609 - DNA, 75 bp, synthetic construct
  source 1..75: mol_type = other DNA
gccttgtaattaagctgctcttaagtgtttttattgctttcatttttgcattcaaatacaaacaggagctcctgt

SEQ ID NO: 824610 - DNA, 75 bp, synthetic construct
  source 1..75: mol_type = other DNA
gaacccgccacctttgttgagccggacctgcatcagtacgccagcgatatcctctggagcgtgaaaaccaccggg

SEQ ID NO: 824611 - DNA, 75 bp, synthetic construct
  source 1..75: mol_type = other DNA
gcgctgaatggcgcaatattttcgtcgtcggcgatctgcatgggtgctacacgctgctgatgaatgagctcgaaa

SEQ ID NO: 824612 - DNA, 75 bp, synthetic construct
  source 1..75: mol_type = other DNA
ataaccggtgccgatttgttcatcttcggtcatacgccagcacatcacccactagtgtatgcaaaccagatgtac

SEQ ID NO: 824613 - DNA, 75 bp, synthetic construct
  source 1..75: mol_type = other DNA
cgtctgaaactggcacaactgacagcgaagacgctgaagctgggtctggatacgctgggtattgagactgtagag

SEQ ID NO: 824614 - DNA, 75 bp, synthetic construct
  source 1..75: mol_type = other DNA
tgtggcgcaaactggtcgacatcaccatgacgcagaaccagatcacctacgatcgtctcaacgtgacgctgaccc

SEQ ID NO: 824615 - DNA, 75 bp, synthetic construct
  source 1..75: mol_type = other DNA
gaaaatggggatgacacctgagcagattaagcaggccaccggactttccgaagctgaactgaaaaaagtcattca

SEQ ID NO: 824616 - DNA, 75 bp, synthetic construct
  source 1..75: mol_type = other DNA
agacacggcgaatatgcagcgctggaaaatcgcgccagactgggatgtgaaactgactgacgatttacgtttcaa

SEQ ID NO: 824617 - DNA, 75 bp, synthetic construct
  source 1..75: mol_type = other DNA
actgacggacgatttacgtttcaacggttggttatcgatgtataaatttgccaacgatctgggtaatgactccaa

SEQ ID NO: 824618 - DNA, 75 bp, synthetic construct
  source 1..75: mol_type = other DNA
atgcagcgctggaaaatcgcgccagactgggatgtgaaactgactgacgatttacgtttcaacggttggttgtcg

SEQ ID NO: 824619 - DNA, 75 bp, synthetic construct
  source 1..75: mol_type = other DNA
tttgtcgtcgtattgcctgacgtcgttctggatacagcgagtgcggacccgttgcgttataacctggctgccatg

SEQ ID NO: 824620 - DNA, 75 bp, synthetic construct
  source 1..75: mol_type = other DNA
gcgtattaaaggaatgcgcaaacgcgctgaggaaaaaattcgtgatgctgaagatgaaggtattcagattctgga

SEQ ID NO: 824621 - DNA, 75 bp, synthetic construct
  source 1..75: mol_type = other DNA
acgcgccggagctgcgtgacgaacacggtcgcaaagtgcttatcagttatgacattcatgacgccgagcgaatta

SEQ ID NO: 824622 - DNA, 75 bp, synthetic construct
  source 1..75: mol_type = other DNA
gctgatccagtgttaccgcaggcgcggatatgagtttgagaaagccctcagcctcgattatcgtcactggataat

SEQ ID NO: 824623 - DNA, 75 bp, synthetic construct
  source 1..75: mol_type = other DNA
aaatatgactggtatcagcacgatccctgcactgaagaacaggccgaatggctgattcataactaccgcagacgt

SEQ ID NO: 824624 - DNA, 75 bp, synthetic construct
  source 1..75: mol_type = other DNA
gtctcgactatcgtcactggataatctcagtcagactcccttactccgaacgcccacagcgtccgtcccgcacat

SEQ ID NO: 824625 - DNA, 75 bp, synthetic construct
  source 1..75: mol_type = other DNA
acctgctcggcgtaccaggaatgccagccaccacaaaaggcatccgacaggcgttacagcgtttttctcgtgatc

SEQ ID NO: 824626 - DNA, 75 bp, synthetic construct
  source 1..75: mol_type = other DNA
caggcgatgacagagaaaacggccatcacgcaaatccgcattcgtgttgatgaggatgaacagattatttttgaa

SEQ ID NO: 824627 - DNA, 75 bp, synthetic construct
  source 1..75: mol_type = other DNA
gaagcggtacgccgccatccctggagcgtggtattgctggatgaaattgaaaaagcccatcacgacgtccacgag

SEQ ID NO: 824628 - DNA, 75 bp, synthetic construct
  source 1..75: mol_type = other DNA
cggaacgcctgcaacaggccgcagttaacgccaatgcaaaacgtggtgctaatcgcaccatcagtcgtgacccac

SEQ ID NO: 824629 - DNA, 75 bp, synthetic construct
  source 1..75: mol_type = other DNA
gacattcatgatgcagagcgaattacagtgcgccgtaaggatggcagttttatttgtgaggcgatatggaacggc

SEQ ID NO: 824630 - DNA, 75 bp, synthetic construct
  source 1..75: mol_type = other DNA
tgtccaggcaatcgaagcatatcgcggttctccacaactgatggaagaacgcctgaatgcgctgaccgaaaacca

SEQ ID NO: 824631 - DNA, 75 bp, synthetic construct
  source 1..75: mol_type = other DNA
ggatgttgggacttgaaccgaagaacacggcggtgcggagtccggagagtaacggtatagcagagagcttcgtga

SEQ ID NO: 824632 - DNA, 75 bp, synthetic construct
  source 1..75: mol_type = other DNA
tgaacctgacgaagaatacgagcgtaatttccagcggggattgcagctgcttgaagcgaaattaaaagaaaatga

SEQ ID NO: 824633 - DNA, 75 bp, synthetic construct
  source 1..75: mol_type = other DNA
aagccgaacggcaagcattacagcccggcggagttcagaaaaaaacgcctggcggaagaggacacggaaattgaa

SEQ ID NO: 824634 - DNA, 75 bp, synthetic construct
  source 1..75: mol_type = other DNA
aggccgaagatattaactggctacccgattttctggtgcagtatcgccagtcaaacggccgccccatgaccgagg

SEQ ID NO: 824635 - DNA, 75 bp, synthetic construct
  source 1..75: mol_type = other DNA
ggtggctgatgcacgaatcgcgatcgtcagcgaagtgatgaaagtcgcgcaacaacccggtttcagctgcgcgaa

SEQ ID NO: 824636 - DNA, 75 bp, synthetic construct
  source 1..75: mol_type = other DNA
aggaagtatgcaaccagcgaaaccagcagacgccgccaggaaggcagtaaaggttttgaatacagcatcgactgt

SEQ ID NO: 824637 - DNA, 75 bp, synthetic construct
  source 1..75: mol_type = other DNA
ggggcattatcgaacggcttaaccgcacattaccgatgcgcatagcccgtaaataccgcacctatttcgggaaag

SEQ ID NO: 824638 - DNA, 75 bp, synthetic construct
  source 1..75: mol_type = other DNA
ggatgttgggccttgaaccgaagaccacggcggtgcggagtccggagagtaacggtatagcagagagcttcgtga

SEQ ID NO: 824639 - DNA, 75 bp, synthetic construct
  source 1..75: mol_type = other DNA
ggatgttgggtcttgaaccgaagagcacggcggtgcggagtccggagagtaacggaatagcagagagcttcgtga

SEQ ID NO: 824640 - DNA, 75 bp, synthetic construct
  source 1..75: mol_type = other DNA
ggatgttgggtcttgaaccgaagaacacggcggtgcggagtccggagagtaacgggatagcagagagcttcgtga

SEQ ID NO: 824641 - DNA, 75 bp, synthetic construct
  source 1..75: mol_type = other DNA
ggatatgagtttaggaaagccctcaccctcgattatcgtcactggataatctacgtcagactcccttattccgaa

SEQ ID NO: 824642 - DNA, 75 bp, synthetic construct
  source 1..75: mol_type = other DNA
atcccccatgcactgaagaacaggccgaatggctcattcagtgttaccgcaggcgcggatgcgaggttaaaaaag

SEQ ID NO: 824643 - DNA, 75 bp, synthetic construct
  source 1..75: mol_type = other DNA
ggatgttggggcttgaaccgaagagcacggcggtgcggagtccggagagtaacggtatagcagagagcttcgtga

SEQ ID NO: 824644 - DNA, 75 bp, synthetic construct
  source 1..75: mol_type = other DNA
ggggcgctgctggccggggcgtccatgaagggcgaatttgaatcccgcctgaaggcgctgttggaagaggctgcg

SEQ ID NO: 824645 - DNA, 75 bp, synthetic construct
  source 1..75: mol_type = other DNA
caaaaacgccgcgcgttatgcgaagcgcgagtctccacaaccggtgccgaccctcaacgatcaaatggcgcggcc

SEQ ID NO: 824646 - DNA, 75 bp, synthetic construct
  source 1..75: mol_type = other DNA
actgctggcagataaccccgcacttaacgcccagcgtgatgatttgcgcgcgattaccgactctggcgaatcgtt

SEQ ID NO: 824647 - DNA, 75 bp, synthetic construct
  source 1..75: mol_type = other DNA
ctcattgattctgatcctctggcacgtggtttatcgctcagtcacgcgcccacttgccgaacaaacgcaggcgct

SEQ ID NO: 824648 - DNA, 75 bp, synthetic construct
  source 1..75: mol_type = other DNA
cgcacctcagatgtttcttttatggcatgggatgcggcaaatctcagcggctcaggcattgggattggtatccag

SEQ ID NO: 824649 - DNA, 75 bp, synthetic construct
  source 1..75: mol_type = other DNA
cctcttttaccctgaaaacccgcgagggcggggtagcttctgccgatgaacgcgccgatgaagtggtgatcggcg

SEQ ID NO: 824650 - DNA, 75 bp, synthetic construct
  source 1..75: mol_type = other DNA
aatctgccattttgcatataaaagagacgaagtacgtggtcactggcaaaaaaccgcaagaactgcgcgtgacgt

SEQ ID NO: 824651 - DNA, 75 bp, synthetic construct
  source 1..75: mol_type = other DNA
gacggataatggttcatgctaccgggccaatgaaacacgacagttggcctggatgttgggccttgaaccgaagaa

SEQ ID NO: 824652 - DNA, 75 bp, synthetic construct
  source 1..75: mol_type = other DNA
gacggataatggttcatgctaccgggctaatgaaacacgacagttggccgggatgttgggccttgaaccgaagag

SEQ ID NO: 824653 - DNA, 75 bp, synthetic construct
  source 1..75: mol_type = other DNA
gacggataatggttcatgctaccgggcaaatgaaacacgacagttggccgggatgttgggccttgaaccgaagat

SEQ ID NO: 824654 - DNA, 75 bp, synthetic construct
  source 1..75: mol_type = other DNA
tatgaaactggagctggaagagagtgaaaaaaataagaacaggctgcctggtcaattgaaaaacgcccttaacag

SEQ ID NO: 824655 - DNA, 75 bp, synthetic construct
  source 1..75: mol_type = other DNA
tattgcgctatcggttgcgcagttaccgatgattatgggggcgaagtcactgacgaaagtagacgacttacctgg

SEQ ID NO: 824656 - DNA, 75 bp, synthetic construct
  source 1..75: mol_type = other DNA
ccgcggtcgtcacactgatgatacggatgtgcttctccgtatacaccatgttatcggagagctgcccacgtatgg

SEQ ID NO: 824657 - DNA, 75 bp, synthetic construct
  source 1..75: mol_type = other DNA
tgcgccctaaatttatggccaaggccgcgctgtttcacatcaaagaaaccaaacacgtggtgcaggatgctgcgc

SEQ ID NO: 824658 - DNA, 75 bp, synthetic construct
  source 1..75: mol_type = other DNA
gaacgcggatatctgggccgagctgggaaaaaccaaaccaggcgcctgggaccgtatccagttgaccgatgcgat

SEQ ID NO: 824659 - DNA, 75 bp, synthetic construct
  source 1..75: mol_type = other DNA
gagtctggcactttctgaaagtgtggttgctgttgctgatgcgttacgccacggaataaaaaatcacggcaaacc

SEQ ID NO: 824660 - DNA, 75 bp, synthetic construct
  source 1..75: mol_type = other DNA
gcgggtcattggtaaaggcaacaaagagcgcctggtgccgttaggtgaagaggcggtttactggctggaaaccta

SEQ ID NO: 824661 - DNA, 75 bp, synthetic construct
  source 1..75: mol_type = other DNA
tggcgctgtcgctgcacactccaccagcgaatatccagtttctgcgtcaacggctcaaagccgctgaaatggagc

SEQ ID NO: 824662 - DNA, 75 bp, synthetic construct
  source 1..75: mol_type = other DNA
taaaaccggaagaaattagctggctgcctgaatttctggcgcagtatcgtcaggctaacggcaggcctatgtcag

SEQ ID NO: 824663 - DNA, 75 bp, synthetic construct
  source 1..75: mol_type = other DNA
cctgttgtaattcaaaaagcactgcatgaacgctatatagaacagctggtggctacagagaacaatgtttctgaa

SEQ ID NO: 824664 - DNA, 75 bp, synthetic construct
  source 1..75: mol_type = other DNA
caattgaatatcggaatcagacctatatgcctcgtgtttaactgtccaactttttggggtcagtacaccctgggg

SEQ ID NO: 824665 - DNA, 75 bp, synthetic construct
  source 1..75: mol_type = other DNA
gaaataccaggccaaatctgccattttgcatatcaaagagaccaggtacgtggtcactggcaaaaagccgcaaga

SEQ ID NO: 824666 - DNA, 75 bp, synthetic construct
  source 1..75: mol_type = other DNA
gtcaggtaatcgaagacgtgttggcagaaatgcaaaccagcgacaagtccgtgtcatttcgcacacctgtcgccg

SEQ ID NO: 824667 - DNA, 75 bp, synthetic construct
  source 1..75: mol_type = other DNA
cgaggacgatcccagcgcgcatcttgcgtcgccaaaattgccccagcgtttgccgaaagatttaagcgaagcgca

SEQ ID NO: 824668 - DNA, 75 bp, synthetic construct
  source 1..75: mol_type = other DNA
ctgagtgcagtgcgccgattgttccagtatctttatcgcgaaaagtttcgtgaagacgatcccagtgcgcatctc

SEQ ID NO: 824669 - DNA, 75 bp, synthetic construct
  source 1..75: mol_type = other DNA
agtcgaaaggttattgcaggcaccgttggttgatcagcctctggagctacgcgacaaagcgatgctcgaagtgct

SEQ ID NO: 824670 - DNA, 75 bp, synthetic construct
  source 1..75: mol_type = other DNA
ggtaaacgtattcttgaagcaacgaatgaattaagcttatgggattcagatatttcaacaatcctagctgctact

SEQ ID NO: 824671 - DNA, 75 bp, synthetic construct
  source 1..75: mol_type = other DNA
tggttatgttctgtttcctctacggatggccactgcaggcttttcttcctacatggcttaaggttgatatgcagt

SEQ ID NO: 824672 - DNA, 75 bp, synthetic construct
  source 1..75: mol_type = other DNA
ctgcgttagcaccaaaagtgaaggctgagatgatgaagctgagcgagcaattagctgacttgcctgaagaaagat

SEQ ID NO: 824673 - DNA, 75 bp, synthetic construct
  source 1..75: mol_type = other DNA
gatgtgcctgcagcttcactgacggtaaaaggcaccgtgcaactcagcagcgccactaacagcacatcagaaacg

SEQ ID NO: 824674 - DNA, 75 bp, synthetic construct
  source 1..75: mol_type = other DNA
ggaataccaatgccacatggatgatcacttcggagcaaaaagacaccggtaatcctctgtcggtcatcccgaaat

SEQ ID NO: 824675 - DNA, 75 bp, synthetic construct
  source 1..75: mol_type = other DNA
ggataacgttatcgggcaaaccgcttcaggcgcatatatcctcaagtggcagaatggcgggaaagctctggtgga

SEQ ID NO: 824676 - DNA, 75 bp, synthetic construct
  source 1..75: mol_type = other DNA
gcgtttgagcctgataaagaagatccagtatcttctttggggattcgtccccgtgggccgcaaattgaacctgta

SEQ ID NO: 824677 - DNA, 75 bp, synthetic construct
  source 1..75: mol_type = other DNA
actcatcaccgtgcatgaatttggtcatttctgggttgcccggcgttgcggtgttcgcgttgagcgtttctctat

SEQ ID NO: 824678 - DNA, 75 bp, synthetic construct
  source 1..75: mol_type = other DNA
tcatttttgctatcttagcctactggctggtttttattattggtgtgcctggcgtacgtccggtggttggtgaaa

SEQ ID NO: 824679 - DNA, 75 bp, synthetic construct
  source 1..75: mol_type = other DNA
cagctggatgccttgccagcagaggtgagtccacagaaaaacgattcctggctggcaacgcgcgtcaaaaagtta

SEQ ID NO: 824680 - DNA, 75 bp, synthetic construct
  source 1..75: mol_type = other DNA
aaaaatattttactttcatgtgttgcatttgcctgcctgtatatttgcttttcaggtgtcacggctaatgctgtt

SEQ ID NO: 824681 - DNA, 75 bp, synthetic construct
  source 1..75: mol_type = other DNA
aggtgtggtacaaacacttatcaccaaagcagtggaaaatattttcagctgcatggattgggtatttacttgatg

SEQ ID NO: 824682 - DNA, 75 bp, synthetic construct
  source 1..75: mol_type = other DNA
gtcatcaggtacgtacaccccgacgccaggaataaaacggatcagggtcacaataacgggcggcggtggcggagg

SEQ ID NO: 824683 - DNA, 75 bp, synthetic construct
  source 1..75: mol_type = other DNA
tgttcatgcttctgaaaacaaccgatggtaataatttgatcaaaagacagcgtaaatctaagccgaaccgcgttc

SEQ ID NO: 824684 - DNA, 75 bp, synthetic construct
  source 1..75: mol_type = other DNA
ttttgcgtgggcggcagttgagccaacttgagctggattttgccgataacaaacagcaattgtcagtcaagcaga

SEQ ID NO: 824685 - DNA, 75 bp, synthetic construct
  source 1..75: mol_type = other DNA
gcagtatctctggcaaatcaacccggtagtgcagtggctggacgataaaatctcttcggcttttggtcgtcatca

SEQ ID NO: 824686 - DNA, 75 bp, synthetic construct
  source 1..75: mol_type = other DNA
agtggagtggctgacggataatggttcatgctaccgggctaatgaaacacggcagtttgcccggatgatggggct

SEQ ID NO: 824687 - DNA, 75 bp, synthetic construct
  source 1..75: mol_type = other DNA
agtggagtggctgacggataatggttcatgctaccgggctaatgaaacacgtcagtttgcccggatgttggggct

SEQ ID NO: 824688 - DNA, 75 bp, synthetic construct
  source 1..75: mol_type = other DNA
agtggagtggctgacggataatggttcatgctaccgggctaatgaaacacgacagtttgcccggatggtggggct

SEQ ID NO: 824689 - DNA, 75 bp, synthetic construct
  source 1..75: mol_type = other DNA
ccaacacacaaatcctcaccaaccagtacagcaccctcgccagtacagcaatgccgtccggcaaggtgctggcag

SEQ ID NO: 824690 - DNA, 75 bp, synthetic construct
  source 1..75: mol_type = other DNA
aacctgaaccttatccatctgaaaccgctgcgcggcacagggctggtggtgttttcaccgagtctggtgtttatc

SEQ ID NO: 824691 - DNA, 75 bp, synthetic construct
  source 1..75: mol_type = other DNA
cacaaacacaaacggtggttacggaggcgtaccgaatattggcgatatccgcatcactggtggagatggaggcga

SEQ ID NO: 824692 - DNA, 75 bp, synthetic construct
  source 1..75: mol_type = other DNA
gaaaatgcctggtgggatattattgtcattgatgaggcccataacgtcgcagaacgtggaaccagttcgttacgc

SEQ ID NO: 824693 - DNA, 75 bp, synthetic construct
  source 1..75: mol_type = other DNA
ctgaccaaactggaacaaaaagtagagatcctggatcccgcaaaaacgcatttggtggaagatgaatccgccaat

SEQ ID NO: 824694 - DNA, 75 bp, synthetic construct
  source 1..75: mol_type = other DNA
ctgccatatgttgatgctgaacgcattggcgtgctgggtgtgtgtgggggggtggctatgccattaatgccgcgc

SEQ ID NO: 824695 - DNA, 75 bp, synthetic construct
  source 1..75: mol_type = other DNA
aggcgacaggatcgttaaagtcgatggtcagcccttaacgcaatgggtgacctttgtgatgcttgtccgggataa

SEQ ID NO: 824696 - DNA, 75 bp, synthetic construct
  source 1..75: mol_type = other DNA
actaccaggctattttgcctgcttatgtgcaaggtggcagcaatatttataaagtgaccgctcgcgcctatgacc

SEQ ID NO: 824697 - DNA, 75 bp, synthetic construct
  source 1..75: mol_type = other DNA
aaaagtcagcgaagttaatacagaggttaaggctcctgaggtaaaattcttctcagttctgagcattgatagtaa

SEQ ID NO: 824698 - DNA, 75 bp, synthetic construct
  source 1..75: mol_type = other DNA
atttgatttagttaccaaaaatgaaatccctagtaatggaagtaatagtaaggtcgacgtgaaaaaagctaacgc

SEQ ID NO: 824699 - DNA, 75 bp, synthetic construct
  source 1..75: mol_type = other DNA
tctatgataccgaagagatgctggcatttggtcaggtcggagcgcgttacattgactcccgctttacggcaaatt

SEQ ID NO: 824700 - DNA, 75 bp, synthetic construct
  source 1..75: mol_type = other DNA
agatcattttgccactcaaaaaactgtctgttgaatatagtgccttacctgtcttaggttcggcacctgttgttg

SEQ ID NO: 824701 - DNA, 75 bp, synthetic construct
  source 1..75: mol_type = other DNA
gctgcgggaaaagctgttgttagtgccaaggttagcgatgttaattctgaggttaaagcttccgaagttgagttc

SEQ ID NO: 824702 - DNA, 75 bp, synthetic construct
  source 1..75: mol_type = other DNA
gcgggggcggcgttcgcacgtatttaaaactgactggtaccagcatcccccatgcactgaagaacaggccgaatg

SEQ ID NO: 824703 - DNA, 75 bp, synthetic construct
  source 1..75: mol_type = other DNA
aggcgcggatgcgaggttaaaaaagcccttagcctcgactaccgtcactggataatctcagtcagattgccttac

SEQ ID NO: 824704 - DNA, 75 bp, synthetic construct
  source 1..75: mol_type = other DNA
actgatgacgcaaaaagccgacgaatcaccggctccggtggtgacaaaggccagacgctcacctgacgtggttga

SEQ ID NO: 824705 - DNA, 75 bp, synthetic construct
  source 1..75: mol_type = other DNA
ggggggcagctaatcgttatgagggctataaaggtaaaaccacaataacagcatggacccaacaaacaggggatg

SEQ ID NO: 824706 - DNA, 75 bp, synthetic construct
  source 1..75: mol_type = other DNA
agatcattttgccactcaaaaaacttccctttgaatacagtgcactaccacttttaggttcggcacctcttgttg

SEQ ID NO: 824707 - DNA, 75 bp, synthetic construct
  source 1..75: mol_type = other DNA
aggcgtggatacgagattaagaaatccctcagcctcgattatcgtctctggataatctacgtcaggctgccgtac

SEQ ID NO: 824708 - DNA, 75 bp, synthetic construct
  source 1..75: mol_type = other DNA
gtattactgagattaaggctgataaaacaacagcgaaggcagatggttctgatgcgattacctatactgtcagag

SEQ ID NO: 824709 - DNA, 75 bp, synthetic construct
  source 1..75: mol_type = other DNA
gttcaccctgattatgtcgataatcggccatcacgccgcgatttttttgcaatttgcaaccaagcctacaaagca

SEQ ID NO: 824710 - DNA, 75 bp, synthetic construct
  source 1..75: mol_type = other DNA
atgacgaatattactgacatcacctacgggattcctgcagaagtctggccgcgcgattacaccaacgtggagaaa

SEQ ID NO: 824711 - DNA, 75 bp, synthetic construct
  source 1..75: mol_type = other DNA
actggttttgtttttccacgtattctggtttacaattcgctcgtcagcctgaacaactggcacctgctgcgccag

SEQ ID NO: 824712 - DNA, 75 bp, synthetic construct
  source 1..75: mol_type = other DNA
gtcagatggtgttgacgcctgtctagtcacacttaagttagaagacggcagaaaaattcttgttttcttcgattg

SEQ ID NO: 824713 - DNA, 75 bp, synthetic construct
  source 1..75: mol_type = other DNA
ttcctgtaagagtcactctcgaagacggccaagtgttttgcatgtatgtctacgggctattgagcgcaagaaata

SEQ ID NO: 824714 - DNA, 75 bp, synthetic construct
  source 1..75: mol_type = other DNA
atgagaacattggacatcacctacggcataccggctgaagtctggccgcgagactacgaacatgctgagaacata

SEQ ID NO: 824715 - DNA, 75 bp, synthetic construct
  source 1..75: mol_type = other DNA
taagaacgttactggtgacttacctaatatctggttgcaatatggtcagtttaaactgaaggtaagcggtggtaa

SEQ ID NO: 824716 - DNA, 75 bp, synthetic construct
  source 1..75: mol_type = other DNA
ctgaaaaaacgtgtagtattaatagtggtcgtttaccgttatctacgaatgagttaaaggatgtgtatagtaaat

SEQ ID NO: 824717 - DNA, 75 bp, synthetic construct
  source 1..75: mol_type = other DNA
agcacagtcaaaagaactattggccaatatctattcaacatggggtgctgcaaataaatatccttactattctgg

SEQ ID NO: 824718 - DNA, 75 bp, synthetic construct
  source 1..75: mol_type = other DNA
tcagtgctaccgcagacacggatacgagattaagaaagccctcagcctcgattatcgtcactggataatctccgt

SEQ ID NO: 824719 - DNA, 75 bp, synthetic construct
  source 1..75: mol_type = other DNA
cagcaggcacgggctgcgttctcacgcattcaaatatgactggtatcagcacgatccctgtactgaagaacaggc

SEQ ID NO: 824720 - DNA, 75 bp, synthetic construct
  source 1..75: mol_type = other DNA
tgaaagccagtggaggtgatgggaaatatacatggagttcggcaaatactggaattgcttcggtggattccactg

SEQ ID NO: 824721 - DNA, 75 bp, synthetic construct
  source 1..75: mol_type = other DNA
ggcgctcaggagccagcgcccacctgccgggctaatccatcactctgatcgaggttcacagtactgcgcatacga

SEQ ID NO: 824722 - DNA, 75 bp, synthetic construct
  source 1..75: mol_type = other DNA
cctaccatgatggcggcgctcttcggcacactgatgctggcaagttgcaccgaaatggtaatctcccgcgtttta

SEQ ID NO: 824723 - DNA, 75 bp, synthetic construct
  source 1..75: mol_type = other DNA
tagaagagttacagcattatatatacctacattaagtcttatagtttcgttggctgccgcagtagcatctattct

SEQ ID NO: 824724 - DNA, 75 bp, synthetic construct
  source 1..75: mol_type = other DNA
cttcgtaaggagctaaggctacgctgtaagcagaaacgcaagttcagagcgactacgaactcgaaccacaatctg

SEQ ID NO: 824725 - DNA, 75 bp, synthetic construct
  source 1..75: mol_type = other DNA
cgccattgccgaactggcgaagaagcagtccgttgacgcgatgctgatgaccggcgaaagctatgactgcggtaa

SEQ ID NO: 824726 - DNA, 75 bp, synthetic construct
  source 1..75: mol_type = other DNA
ctaccgggctaatccaccactccgatcgtggttcacagtactgcgcatacgattacagggccatacaggagcagt

SEQ ID NO: 824727 - DNA, 75 bp, synthetic construct
  source 1..75: mol_type = other DNA
gtcttgggccatatgaagcgcgagaacgcgcggatgtgttccgccgctttaacattcagatggtggaagagatgg

SEQ ID NO: 824728 - DNA, 75 bp, synthetic construct
  source 1..75: mol_type = other DNA
cggcgttaaaagtggcgggcgcgctggcgctggtggtattgctggggcgctatgtcacgcgtccggcgctgcgtt

SEQ ID NO: 824729 - DNA, 75 bp, synthetic construct
  source 1..75: mol_type = other DNA
ccggagcggcgaaagcggaagtgctgattaacgctattgacgatccgcaaaccaacctgcaactgacggagatgg

SEQ ID NO: 824730 - DNA, 75 bp, synthetic construct
  source 1..75: mol_type = other DNA
tcattggcaaaaaggagccgcactttcaattacatatagtgcgacgggggctgtgcatataattctttttccgtc

SEQ ID NO: 824731 - DNA, 75 bp, synthetic construct
  source 1..75: mol_type = other DNA
ttttttcaatgatgaaatattttttgatgatgcttattcaaatatgccttatctggatacattcataaaccttag

SEQ ID NO: 824732 - DNA, 75 bp, synthetic construct
  source 1..75: mol_type = other DNA
cacttaaagacgaccgactcagaaccatcgcgacagttaatggtaatgtcagtattgttgttttggcgtttgctg

SEQ ID NO: 824733 - DNA, 75 bp, synthetic construct
  source 1..75: mol_type = other DNA
ccagcccgcgctggcctgcctgagtgggaagaagatgctgataatacccctggtctgcatgtgtaccgcccaata

SEQ ID NO: 824734 - DNA, 75 bp, synthetic construct
  source 1..75: mol_type = other DNA
ggcgaggaggagaaccttgcagatcaggaagagtcaccacaggaatctctgggtgagactctgaccgcctcagag

SEQ ID NO: 824735 - DNA, 75 bp, synthetic construct
  source 1..75: mol_type = other DNA
ggcagccgtccgctggatattccggcaaacgccaataccccgaaagcgccaccggcaccgcctgctccggcgcgt

SEQ ID NO: 824736 - DNA, 75 bp, synthetic construct
  source 1..75: mol_type = other DNA
aaattttctcggctgactggtttaagaaaggcgcgggaaggcccaatcaatacggacgttatacgagcttccgcc

SEQ ID NO: 824737 - DNA, 75 bp, synthetic construct
  source 1..75: mol_type = other DNA
tactgttttaattgcaatgaacatttcgctttataccatcaccgtatggataccgaccatatttgtggtaatgac

SEQ ID NO: 824738 - DNA, 75 bp, synthetic construct
  source 1..75: mol_type = other DNA
ttagtgctctgtgcgctggttctctccatttttggcatcgaaacgcggaaggtgtcgttggaagagatttctgag

SEQ ID NO: 824739 - DNA, 75 bp, synthetic construct
  source 1..75: mol_type = other DNA
gggacctcgcgttttgcgtacagagacaactgcgctcaccgccataactgcgctacaagtacgttttggtgatct

SEQ ID NO: 824740 - DNA, 75 bp, synthetic construct
  source 1..75: mol_type = other DNA
tgtcgcaacaagggaatcattacaggaactcgcagagcgtgtcggaatgattaacgcgaatattcagggggggtg

SEQ ID NO: 824741 - DNA, 75 bp, synthetic construct
  source 1..75: mol_type = other DNA
ctcgtggcggtgtgcagttcgacctgcttgcaggcatgaatgataaggcggtgtgcagcagtgtttatgcgggag

SEQ ID NO: 824742 - DNA, 75 bp, synthetic construct
  source 1..75: mol_type = other DNA
ttgctcaatggcttgttggtattgaaagcggtgtgcatttttttgccggtttttgcagacaccgggcatgagcat

SEQ ID NO: 824743 - DNA, 75 bp, synthetic construct
  source 1..75: mol_type = other DNA
catgcactccggtaggtgtaacaccagcgattcctgtggccgctaccatcaactcgtattgcaacccgacatatg

SEQ ID NO: 824744 - DNA, 75 bp, synthetic construct
  source 1..75: mol_type = other DNA
cctgatattgcgcagtttgatacgcaagcgggtatcaaggcggtcatcgacgcgcggcgcaggcataaatcgtaa

SEQ ID NO: 824745 - DNA, 75 bp, synthetic construct
  source 1..75: mol_type = other DNA
tatgatcgtcttttccctgagttaaagcacaacaaaatcaaaggatatcgcgccgccgcctcaaaatggtttaac

SEQ ID NO: 824746 - DNA, 75 bp, synthetic construct
  source 1..75: mol_type = other DNA
gttgcaggtgccaaataaacagcgtcgctggtttgcggtgttgttagggcagggcagtgagtttgcctttgtggt

SEQ ID NO: 824747 - DNA, 75 bp, synthetic construct
  source 1..75: mol_type = other DNA
ggaaaaagaaccgaaagttgaagccgtggcagatgacctcgcctctctggtactggacgcgcgaatggagcaaga

SEQ ID NO: 824748 - DNA, 75 bp, synthetic construct
  source 1..75: mol_type = other DNA
ttgaacaacgtgtattaaatacgctcaatgaattttctggttatacgcatgttatggttataggcggtggcgcag

SEQ ID NO: 824749 - DNA, 75 bp, synthetic construct
  source 1..75: mol_type = other DNA
acacacacagattcgtgatgaacgttttttcaaaaccaataactctcaatatgatttagttaacggggtaatgct

SEQ ID NO: 824750 - DNA, 75 bp, synthetic construct
  source 1..75: mol_type = other DNA
atgagctgggttcgagcgagaaacgtacggcggatatgattccgccattattgttccctcggctcaagaatttat

SEQ ID NO: 824751 - DNA, 75 bp, synthetic construct
  source 1..75: mol_type = other DNA
aaagccgaaagctgcgatgactgcgacacttacctgaaaattctctatcaggaaaaagatccaaaaatcgaagcc

SEQ ID NO: 824752 - DNA, 75 bp, synthetic construct
  source 1..75: mol_type = other DNA
gtggcgcgtttcaacgaaacaggccgcagccaggtgctggcgaaacgcatgaaaggcgatctgtccgagtactct

SEQ ID NO: 824753 - DNA, 75 bp, synthetic construct
  source 1..75: mol_type = other DNA
gggtgctcatcaaggtgcatccggactgccgggttattgtctctgtacctccagaaacaccggagcacgagctgt

SEQ ID NO: 824754 - DNA, 75 bp, synthetic construct
  source 1..75: mol_type = other DNA
caaaaggctgcctgacacttaacccgtggctggtaaaggcttcctcggaatgcatcgactatgtattgctccatg

SEQ ID NO: 824755 - DNA, 75 bp, synthetic construct
  source 1..75: mol_type = other DNA
gggtgctcatcaaggtttatccggactgccgggttgtggcctctgtaccgcctgaaacaccggagcacgaggtat

SEQ ID NO: 824756 - DNA, 75 bp, synthetic construct
  source 1..75: mol_type = other DNA
gaatgccatctcacatcgttgccgagcaccgcgactaccaggcgaccgcaattgcagccgaactactggcgaagc

SEQ ID NO: 824757 - DNA, 75 bp, synthetic construct
  source 1..75: mol_type = other DNA
gaaaagccgttatccccgtagcgggattaggaaccaggatgttgccggcgactaaagctatcccgaaagagatgc

SEQ ID NO: 824758 - DNA, 75 bp, synthetic construct
  source 1..75: mol_type = other DNA
ctatttatttgtcttggactttttggtggtgcttatactgccggacaaaaccgacatctggccattgatcttctg

SEQ ID NO: 824759 - DNA, 75 bp, synthetic construct
  source 1..75: mol_type = other DNA
gctggatgacgaacaggccgcgattaaagccgaaagctgcgatgactgtggcacttacctgaagattctttatca

SEQ ID NO: 824760 - DNA, 75 bp, synthetic construct
  source 1..75: mol_type = other DNA
ataattaactcgcaacacaatacggttgaccaggtgaggagtgtgatggaatatattgcctatcaggggtatatt

SEQ ID NO: 824761 - DNA, 75 bp, synthetic construct
  source 1..75: mol_type = other DNA
ttgaggaagttacctttgctttgaaattgctgtctgattatggcaatgaattaatcagcgactacgaagaagatt

SEQ ID NO: 824762 - DNA, 75 bp, synthetic construct
  source 1..75: mol_type = other DNA
cctgctgctggttaaattaacggtgttttcagcaatggggatagctacccttgaggaagttacctttgctttgaa

SEQ ID NO: 824763 - DNA, 75 bp, synthetic construct
  source 1..75: mol_type = other DNA
gcagatggtgatctgtggcggcctgctggggctgttctgtatgctcctcggtatgcgctggcaagtcgcgggatt

SEQ ID NO: 824764 - DNA, 75 bp, synthetic construct
  source 1..75: mol_type = other DNA
gtgactaaaaatacacaacaaccggtacatgatgcgttatttaagcagtttttaacgcatcctgagaatgcccgg

SEQ ID NO: 824765 - DNA, 75 bp, synthetic construct
  source 1..75: mol_type = other DNA
taaaacgatgctgacaacgattgcagaacaacttgagcaaaaaggtatcgaaaaaggtatcgaaaaaggtatcga

SEQ ID NO: 824766 - DNA, 75 bp, synthetic construct
  source 1..75: mol_type = other DNA
ggatattcacgtactgccgcgtgataagcactggcaaaaactgctgatggcgctgattgctgaactgaaacctga

SEQ ID NO: 824767 - DNA, 75 bp, synthetic construct
  source 1..75: mol_type = other DNA
cgcgctgtttgcctctgatttctcgtccgtcagcagcgataaagcgccgtttatctgggctgcactgtcgctcta

SEQ ID NO: 824768 - DNA, 75 bp, synthetic construct
  source 1..75: mol_type = other DNA
ggtactggacgcgcgaatggagcaagaaggctatgcccgcagttccatcaacccgttcctgtttccgggtgaagg

SEQ ID NO: 824769 - DNA, 75 bp, synthetic construct
  source 1..75: mol_type = other DNA
cgcactgtttgcctctgatttctcgtccgtcagcagcgataaagcgccgtttatctgggctgcactgtcactcta

SEQ ID NO: 824770 - DNA, 75 bp, synthetic construct
  source 1..75: mol_type = other DNA
aattaatatgcgatgcagtaaaaaacacacacagattcgtgatgaacgtttttttaaaaccaataactctcaata

SEQ ID NO: 824771 - DNA, 75 bp, synthetic construct
  source 1..75: mol_type = other DNA
tgtttgcacacttcctctgacagagtattacgacaggaataaccaacccaatacggaaaatattgagcgtaagaa

SEQ ID NO: 824772 - DNA, 75 bp, synthetic construct
  source 1..75: mol_type = other DNA
ggaagtggatattgctgccggtgacaaagcggcggcacgtagccagctggcgaaactgcccgctaccgataacgc

SEQ ID NO: 824773 - DNA, 75 bp, synthetic construct
  source 1..75: mol_type = other DNA
tggcgggtaaagccattcccgaactacaacaggcggtgcgggcgaacccgaaagacagtgaagctctgggggcgc

SEQ ID NO: 824774 - DNA, 75 bp, synthetic construct
  source 1..75: mol_type = other DNA
ggtcatgcagaagaagctgtggcgagttacaacaaactgttcaacggtgcgccgccggaaggtgacattgctgtc

SEQ ID NO: 824775 - DNA, 75 bp, synthetic construct
  source 1..75: mol_type = other DNA
tacgttaatgcgtaacctggcgcaacagaagccgaatgacccggaccaggtttacgcttacggactgtatctctc

SEQ ID NO: 824776 - DNA, 75 bp, synthetic construct
  source 1..75: mol_type = other DNA
tcacactttctctcgggctggcagtgatgccgatggtcgaggcggcgccaactgctcagcaacagctactggagc

SEQ ID NO: 824777 - DNA, 75 bp, synthetic construct
  source 1..75: mol_type = other DNA
ttgtatcgtctggaacttattgatccgaataacccggacgtcgttgccgcccgtttccgttctctgttacgtcag

SEQ ID NO: 824778 - DNA, 75 bp, synthetic construct
  source 1..75: mol_type = other DNA
gcagccttcagggaaaaatatcatcagatggctgtgcttaaaaaaagaacaaatggtagtgtccgctattgccag

SEQ ID NO: 824779 - DNA, 75 bp, synthetic construct
  source 1..75: mol_type = other DNA
ttggtctgaaaacatcaatgtcgcgtaaaggtaactgttacgacaacgctccgatggaaagcttctggggaacgc

SEQ ID NO: 824780 - DNA, 75 bp, synthetic construct
  source 1..75: mol_type = other DNA
accctcagacagaaaacaaagtgatgagcggctaaaactggagattaaggtggcacatatccgcactcgcgaaac

SEQ ID NO: 824781 - DNA, 75 bp, synthetic construct
  source 1..75: mol_type = other DNA
ctaatccaccactctgatcgaggttcacagtactgcgcatacgattaccgggtcatacaggagcagtttggtctg

SEQ ID NO: 824782 - DNA, 75 bp, synthetic construct
  source 1..75: mol_type = other DNA
atgaagccatctcagtaatacgggaatacattgagattttctacaatcgtcagcgtcgtcactctcgtctgggga

SEQ ID NO: 824783 - DNA, 75 bp, synthetic construct
  source 1..75: mol_type = other DNA
acgtctggttcagcagatttggcgcaactggcagattgtggttcgagttcgtagtcgctctgaacttgcgtttct

SEQ ID NO: 824784 - DNA, 75 bp, synthetic construct
  source 1..75: mol_type = other DNA
ggtgggcaaaaagactctccgagcaataccgggaaaaaatggggcggcgtgcgtgccgacggcgtggggctaagc

SEQ ID NO: 824785 - DNA, 75 bp, synthetic construct
  source 1..75: mol_type = other DNA
aaagagttcgggtgtgataatgtcaacgccacgatgtttgaccgttatgggactgcggactatttcctggactgc

SEQ ID NO: 824786 - DNA, 75 bp, synthetic construct
  source 1..75: mol_type = other DNA
gaagcgctggcgatgggctttacccatgctgcatgcggtccgtttgtccgctcttcttaccacgccgatttgcag

SEQ ID NO: 824787 - DNA, 75 bp, synthetic construct
  source 1..75: mol_type = other DNA
cagcaggtgctgggcggcgccccgttcattatcagcggggcctgcggattattccggaaggacgtgctgctggcg

SEQ ID NO: 824788 - DNA, 75 bp, synthetic construct
  source 1..75: mol_type = other DNA
cgttgacgaaatcgtcgtcgccgggatcaaagatattgttctggtgacgcactcctcgaagaatgcggtggaaaa

SEQ ID NO: 824789 - DNA, 75 bp, synthetic construct
  source 1..75: mol_type = other DNA
gtggttcggcaaacccggacgcggagattgctgaatcagttacgctcggcgtcggcaaaatcaatatctccagcg

SEQ ID NO: 824790 - DNA, 75 bp, synthetic construct
  source 1..75: mol_type = other DNA
gctttgttgccgtcacgcaaaaaaacaccggtaaaggtggcgcactaatgcatggactaaaatacgccacgtgtg

SEQ ID NO: 824791 - DNA, 75 bp, synthetic construct
  source 1..75: mol_type = other DNA
cctgacgtcgggtatcgacctgtccgtcggttctctgctggcgctaactggcgcagttgctgcctccatcgttgg

SEQ ID NO: 824792 - DNA, 75 bp, synthetic construct
  source 1..75: mol_type = other DNA
gaatttgttaggtgtttcctcctattaccagatgatcgtcaaagctgtggtgattttgctggcggtgctggtaga

SEQ ID NO: 824793 - DNA, 75 bp, synthetic construct
  source 1..75: mol_type = other DNA
ttatacgtgcgaaattgtcggctacgccatgggagagcgcatgacaaaagagctgacaggtaaagccctgtttat

SEQ ID NO: 824794 - DNA, 75 bp, synthetic construct
  source 1..75: mol_type = other DNA
tgtgcgctgccgtggtggcgtggatagtcctgacgctgcgccgtaaacccagttcgcagctggccagcattgatg

SEQ ID NO: 824795 - DNA, 75 bp, synthetic construct
  source 1..75: mol_type = other DNA
ctgcgagccgggtaaagatgcggtgatgtattgccagcctacctacggcatgtacagcgtcagcgcggaaacctt

SEQ ID NO: 824796 - DNA, 75 bp, synthetic construct
  source 1..75: mol_type = other DNA
acattgagaatttctacaatcgtcagcgtcgtcactctcgtctggggaatatctccccagcagccttcagggaaa

SEQ ID NO: 824797 - DNA, 75 bp, synthetic construct
  source 1..75: mol_type = other DNA
gttcccgactgtccgtggcagcatattgtgttcacacttccctgccagtactggtccctggtgttccacaaccgg

SEQ ID NO: 824798 - DNA, 75 bp, synthetic construct
  source 1..75: mol_type = other DNA
ttgtggagcttgccaagtatgtgcaagatccacaaaacaaacaggagcgcgtgggtgtcattaaagtaactaact

SEQ ID NO: 824799 - DNA, 75 bp, synthetic construct
  source 1..75: mol_type = other DNA
gagaagcttaagaagaatctcaaaagtaaagatcaatacattattgaggaagtaatttcatatatagatgatgct

SEQ ID NO: 824800 - DNA, 75 bp, synthetic construct
  source 1..75: mol_type = other DNA
atccgcttcaagtacggtctgccagaaatcactgttagcagcctttcgctgtataccggggcgattctggaagcc

SEQ ID NO: 824801 - DNA, 75 bp, synthetic construct
  source 1..75: mol_type = other DNA
gccggaaccgtctacgcagacggacgagggcgaggacgagctggcgcaggcgatggcattactgcaggagcaggc

SEQ ID NO: 824802 - DNA, 75 bp, synthetic construct
  source 1..75: mol_type = other DNA
attctcaggaagaacctccgctgatgccggaaccgtctacgcagacggacgagggcgaggacgagctggcgcagg

SEQ ID NO: 824803 - DNA, 75 bp, synthetic construct
  source 1..75: mol_type = other DNA
tatatggtctggcaagtaaggcacttggggaagaacttgaacgggcaaatgccatttataaaaaagaccgacagg

SEQ ID NO: 824804 - DNA, 75 bp, synthetic construct
  source 1..75: mol_type = other DNA
ccggaagtgatcgcccgcaccctgcgtaaactgaaaaaccagccggaactgagcgaagacaccatcaaaaaagca

SEQ ID NO: 824805 - DNA, 75 bp, synthetic construct
  source 1..75: mol_type = other DNA
ctcttgctccgggcagtaatgagaagaagaaactttatctcctgacggacctgattactgctctgctggcaaaaa

SEQ ID NO: 824806 - DNA, 75 bp, synthetic construct
  source 1..75: mol_type = other DNA
gtcgcggctcgggtaaaaaacataagcccagccggtggtcatgagagcaatctcaaactgtaccgactgacagat

SEQ ID NO: 824807 - DNA, 75 bp, synthetic construct
  source 1..75: mol_type = other DNA
ggcatgggaattatcgccaacggcgatctgctcgataccctgcgtcgtgtgaaatgtttcggcgtaccgctggtg

SEQ ID NO: 824808 - DNA, 75 bp, synthetic construct
  source 1..75: mol_type = other DNA
ttccattgccgcctacgtgatctcgatggcaaaaacgccgtccgacgtactggctgtccacctgctgctgaaaga

SEQ ID NO: 824809 - DNA, 75 bp, synthetic construct
  source 1..75: mol_type = other DNA
attacccgtcgtacactgatccacaaaatggtggaagtgaacgcctgtttaaaacagctcgataacaaagatatc

SEQ ID NO: 824810 - DNA, 75 bp, synthetic construct
  source 1..75: mol_type = other DNA
aggcaaggcccggcaagccggggccatgtgggacaccgaaaagaaatcctggtttgtcggtccttacgcaaccag

SEQ ID NO: 824811 - DNA, 75 bp, synthetic construct
  source 1..75: mol_type = other DNA
atgaaagtgacattaacgttcaacgaacaacgtcgtgcggcgtatcgtcagcaagggttatggggcgatgcttca

SEQ ID NO: 824812 - DNA, 75 bp, synthetic construct
  source 1..75: mol_type = other DNA
acgcaacgggctttctgcatggcgtaacagcaccatttttgattggtgctcgcagcgtgttgttagatattttca

SEQ ID NO: 824813 - DNA, 75 bp, synthetic construct
  source 1..75: mol_type = other DNA
gttaccccgcactgcatccggtaaaatacaaaaatttttactcaggaaagatattattcagcgattaagcgaggg

SEQ ID NO: 824814 - DNA, 75 bp, synthetic construct
  source 1..75: mol_type = other DNA
gtgattttcgacgtgacccacgcactgcaatgccgcgatccgtttggcgcagcttccggtggtcgtcgtgctcag

SEQ ID NO: 824815 - DNA, 75 bp, synthetic construct
  source 1..75: mol_type = other DNA
gccgttcgtgctgtttggcggtatgaacgtgctggaatctcgcgatctggcgatgcgcatttgcgaacactacgt

SEQ ID NO: 824816 - DNA, 75 bp, synthetic construct
  source 1..75: mol_type = other DNA
ctgaacatatcgtggtgatcgaaaaattaccgcggactgcatcaggtaaaatacaaaagtttttgttacgcaaag

SEQ ID NO: 824817 - DNA, 75 bp, synthetic construct
  source 1..75: mol_type = other DNA
tacacctatagcgcactcgatcacgccgcgaactgtctggcaagctggttactggctaacggtattgaatcgggc

SEQ ID NO: 824818 - DNA, 75 bp, synthetic construct
  source 1..75: mol_type = other DNA
cgtggtcgataatcatggtgcatcgtacacctatagcgcgctcgatcacgccgcgagctgtctggcaaactggat

SEQ ID NO: 824819 - DNA, 75 bp, synthetic construct
  source 1..75: mol_type = other DNA
gggttgtatccagtgccaaccaggttaatctgaagtttgaagaagctaaacctcatctggaagaccagctggcaa

SEQ ID NO: 824820 - DNA, 75 bp, synthetic construct
  source 1..75: mol_type = other DNA
gaatttaccgttatctatcttgcctgcctgaaaaccggtgcggtttccgtgccgctgttgccttcctggcgggaa

SEQ ID NO: 824821 - DNA, 75 bp, synthetic construct
  source 1..75: mol_type = other DNA
ctgacctggcaggatgtctttatgatgcctgcgccacttggtcacgcaacgggctttctgcatggcgtaacggca

SEQ ID NO: 824822 - DNA, 75 bp, synthetic construct
  source 1..75: mol_type = other DNA
aaacgggtcgcaaaatataaatatcctgaacatatcgtggtaatcgaaaaactaccgcgcactgcctcaggtaaa

SEQ ID NO: 824823 - DNA, 75 bp, synthetic construct
  source 1..75: mol_type = other DNA
agtggagtggctgacggataatggttcatgctaccgggctaatgaaacacggcagtttgcccggatggtgggact

SEQ ID NO: 824824 - DNA, 75 bp, synthetic construct
  source 1..75: mol_type = other DNA
gtcgccgtcggcagagtggcgtatggggaaccgtttgtcgatggtttggcaccagtgacctgggctgggaaaact

SEQ ID NO: 824825 - DNA, 75 bp, synthetic construct
  source 1..75: mol_type = other DNA
tggatacccccggccctaatgaagccggacaaccacagatggaagtgatgatgcgggatcaactgcagaaagcct

SEQ ID NO: 824826 - DNA, 75 bp, synthetic construct
  source 1..75: mol_type = other DNA
tgcaggaaaaactcgccaccccggcaggacagcaagtcgcacagaccctgcagcaaaccggggatacccgcgaac

SEQ ID NO: 824827 - DNA, 75 bp, synthetic construct
  source 1..75: mol_type = other DNA
agtttccagtctatggcaccggattctatcgtgatgattgagcagtgggaaagcatcgcgcatcttgaagcgcac

SEQ ID NO: 824828 - DNA, 75 bp, synthetic construct
  source 1..75: mol_type = other DNA
gttaaacgatgtgatgaccgatatgcaaaaagcctcagtttcaatgcaaatggggattcaggtgcgtaataagct

SEQ ID NO: 824829 - DNA, 75 bp, synthetic construct
  source 1..75: mol_type = other DNA
atgtcagcgatacaggggattgaaggggttatcagccagttacaggccacggcgatgagtgcgcgtgcgcaggaa

SEQ ID NO: 824830 - DNA, 75 bp, synthetic construct
  source 1..75: mol_type = other DNA
gtgtttgagcggattgaggaaaagcgtgatgccatgcagtcgctgattctgccgccaccggcacgccaggcgctg

SEQ ID NO: 824831 - DNA, 75 bp, synthetic construct
  source 1..75: mol_type = other DNA
tgcaggagaaactcgctaccccggcaggacagcaagtcgtacagaccctgcagcaaaccggggatacccgcgaac

SEQ ID NO: 824832 - DNA, 75 bp, synthetic construct
  source 1..75: mol_type = other DNA
ctggctcaaaaatgaataccacggggaagacgaaatctttaccggactggcatcgttaaacgatctggttcgcct

SEQ ID NO: 824833 - DNA, 75 bp, synthetic construct
  source 1..75: mol_type = other DNA
atgcggatacagtcagacagatggttcctaagatgctgaacagtgacgtgttacctgcttcccgcgtttaccccg

SEQ ID NO: 824834 - DNA, 75 bp, synthetic construct
  source 1..75: mol_type = other DNA
gatgagggctttaccgtaaaaatcagttttccggcagtcagccagttacagacccggctcgcggtaaaaataaat

SEQ ID NO: 824835 - DNA, 75 bp, synthetic construct
  source 1..75: mol_type = other DNA
gaggaggttcgtaaagagcttaatgccattgctgatgtgtctgtcggccgcctgtttgtgctggtcaataaattt

SEQ ID NO: 824836 - DNA, 75 bp, synthetic construct
  source 1..75: mol_type = other DNA
tgtgacggtcgggaatatatttcaacggaagagtttaacgcctggatgaaggcaaataatcttcagtggactatt

SEQ ID NO: 824837 - DNA, 75 bp, synthetic construct
  source 1..75: mol_type = other DNA
ctggcttaaaaatgaataccacggggaagacgaaatctttaccggactggcatcgttaaatgacctggttcgtct

SEQ ID NO: 824838 - DNA, 75 bp, synthetic construct
  source 1..75: mol_type = other DNA
gagacttcaggcattaaatgaaagggttcctgagctcattactgacagtaaggcgctgagggaagagctggagac

SEQ ID NO: 824839 - DNA, 75 bp, synthetic construct
  source 1..75: mol_type = other DNA
cacccagatgaactcgaaagccgatgaggacgtccgtaaagagcttaatgccattgctgacgtatcagccggccg

SEQ ID NO: 824840 - DNA, 75 bp, synthetic construct
  source 1..75: mol_type = other DNA
gggtgcaaagccgcattcagcacttggaacatcgtctggctgaacatgtgcattcacgcctgagcgccatgcgcg

SEQ ID NO: 824841 - DNA, 75 bp, synthetic construct
  source 1..75: mol_type = other DNA
gtttatggcacgcgctgacgccgcaatttttccctcgtgagctgttacatgactgcctgacgcgtgctttaaatg

SEQ ID NO: 824842 - DNA, 75 bp, synthetic construct
  source 1..75: mol_type = other DNA
aagcattgcccatcttgaagcgcatttgcagacgccacacatgaaagcgtacagcgaagccgtaaaaggcgatgt

SEQ ID NO: 824843 - DNA, 75 bp, synthetic construct
  source 1..75: mol_type = other DNA
gtgagtgaaattaaagaaatgccggtagttcgtgacgaatatggctactggacacatcctgaatatgaaaaattc

SEQ ID NO: 824844 - DNA, 75 bp, synthetic construct
  source 1..75: mol_type = other DNA
tgcctcctggaaaccggagcgcccggaaggtgaaggctggttcattggttccattcatgacactgaagatggtcc

SEQ ID NO: 824845 - DNA, 75 bp, synthetic construct
  source 1..75: mol_type = other DNA
gacgcatcctgaatatgaaaaattctgtgacggtcgggaatatatttcaacggaagagtttaacgcctggatgga

SEQ ID NO: 824846 - DNA, 75 bp, synthetic construct
  source 1..75: mol_type = other DNA
cacccagatgaactcaaaagccgatgaagaggtccgtaaagagcttaatgccattgctgacgtatcagccggccg

SEQ ID NO: 824847 - DNA, 75 bp, synthetic construct
  source 1..75: mol_type = other DNA
tcgaccgtgaccagcctgcaccgtgaggctgaagcacagttccggcctgagctggagaaaatcgtcagcgggatt

SEQ ID NO: 824848 - DNA, 75 bp, synthetic construct
  source 1..75: mol_type = other DNA
agaactatggatgaagatgattttaatctggacgcagatggtcccgatattgcctcctggaaaccggagcgcccg

SEQ ID NO: 824849 - DNA, 75 bp, synthetic construct
  source 1..75: mol_type = other DNA
gatgagaaagaccgcaatggtgatggtgcagatactgtacgccagaaggtaccggcaatgctgaacagcgatgtg

SEQ ID NO: 824850 - DNA, 75 bp, synthetic construct
  source 1..75: mol_type = other DNA
atattgccatgcatcagtttttactgaatgagggcgcagatccctcgcgctttctgtttgttctcagccatgccg

SEQ ID NO: 824851 - DNA, 75 bp, synthetic construct
  source 1..75: mol_type = other DNA
cgtttgatctcaccttcaagtgccgaaacgataaattgcccagtgctttcgccttcttcctttaaattttctaca

SEQ ID NO: 824852 - DNA, 75 bp, synthetic construct
  source 1..75: mol_type = other DNA
aaaacgtgatggcgatgcggtagaacgtgcaatgacgcaacatttgcaggaaatcagcgaatccgtgcgccagat

SEQ ID NO: 824853 - DNA, 75 bp, synthetic construct
  source 1..75: mol_type = other DNA
gctgcacccgccaggctcatcgtcttaccctgcagctcggtgaacgcagaatgatgctggtcgatctgcccggca

SEQ ID NO: 824854 - DNA, 75 bp, synthetic construct
  source 1..75: mol_type = other DNA
aagaaattcgccagaaaatccttgaacatctccacggtgttattcattacgagcccgtgattggcattatgggta

SEQ ID NO: 824855 - DNA, 75 bp, synthetic construct
  source 1..75: mol_type = other DNA
cgtcttaccctgcagctcggtgaacgcagaatgacgctggtcgatctgcccggcattggtgaaacaccgcagcat

SEQ ID NO: 824856 - DNA, 75 bp, synthetic construct
  source 1..75: mol_type = other DNA
atggtatttgctggctactgaagagaacaagttaaagtcgttttcattagctaaaataaaatggctggatataaa

SEQ ID NO: 824857 - DNA, 75 bp, synthetic construct
  source 1..75: mol_type = other DNA
atattcgtgttcagtttcataaccctgagcacaccatcagggatgatttaagaaaatatcttgatgttcttgaaa

SEQ ID NO: 824858 - DNA, 75 bp, synthetic construct
  source 1..75: mol_type = other DNA
ctactgcgcctcatggtacagctgctggtcgggaaggtttagatgctttactggcaacttccgcattaactgacg

SEQ ID NO: 824859 - DNA, 75 bp, synthetic construct
  source 1..75: mol_type = other DNA
agtgctaccaactggaacaaaatcttcaccagcaacgcattgccattgagcgcaagcaactggatgatttttttg

SEQ ID NO: 824860 - DNA, 75 bp, synthetic construct
  source 1..75: mol_type = other DNA
caggcggttatcccaaccacacactggttgaggatcacctagtatctaaacagcaacagttaatcgatacacttg

SEQ ID NO: 824861 - DNA, 75 bp, synthetic construct
  source 1..75: mol_type = other DNA
ggcattacgctgtcatgcaaggctgcacataaaaatcaaattatcccgttgattttatactggctaccgaatgtt

SEQ ID NO: 824862 - DNA, 75 bp, synthetic construct
  source 1..75: mol_type = other DNA
atgtcattcagccattcttccctctcctcacaagtcaaatcagatctgacgtttcttcctgaagaaattcgccag

SEQ ID NO: 824863 - DNA, 75 bp, synthetic construct
  source 1..75: mol_type = other DNA
gctcatcgcctcaccctgcagattggtgaacgcagaatgacgctggtcgatctgcccggcattggtgagacaccg

SEQ ID NO: 824864 - DNA, 75 bp, synthetic construct
  source 1..75: mol_type = other DNA
gtgaacgcagaatgacgctggtcgatctgcccggcatcggtgaaacaccgcagcatgatcaggaataccggacgc

SEQ ID NO: 824865 - DNA, 75 bp, synthetic construct
  source 1..75: mol_type = other DNA
gctgatgaacgtgcgtatgctgccgatattgccatgcatcagtttttactgaatgaaggcgcagatccctcgcgt

SEQ ID NO: 824866 - DNA, 75 bp, synthetic construct
  source 1..75: mol_type = other DNA
gagtggtttctggggaaagatttgtggagcgtttggcaccagtgactggggctgggaaaactataaggagaatgt

SEQ ID NO: 824867 - DNA, 75 bp, synthetic construct
  source 1..75: mol_type = other DNA
cactgacccgggcatatttcggggagctgcaggcatccattgagcaggatattaaccagcccgtccgccaggaaa

SEQ ID NO: 824868 - DNA, 75 bp, synthetic construct
  source 1..75: mol_type = other DNA
ggttgactctgccgccgcaaaactgatgcagaatgcagaaaatatcagtgaatacctgttgttacgccatcaggg

SEQ ID NO: 824869 - DNA, 75 bp, synthetic construct
  source 1..75: mol_type = other DNA
cggtagcgggattgggtatgaacatgctacctgccacgaaggccatccctaaagagatgctgccgatcgttgaca

SEQ ID NO: 824870 - DNA, 75 bp, synthetic construct
  source 1..75: mol_type = other DNA
atgtcattcagccattcttccctctcctcgcaagtcaaatcaaatctgacgtttcttcctgaagaaattcgccag

SEQ ID NO: 824871 - DNA, 75 bp, synthetic construct
  source 1..75: mol_type = other DNA
atgtcattcagccattcttccctctcctcccaagtaaaatcacatctgacgtttcttcctgaagaaattcgccag

SEQ ID NO: 824872 - DNA, 75 bp, synthetic construct
  source 1..75: mol_type = other DNA
ggggagaaaaccgctctgaacaggcccagaaacacgcacaacagacttttggtgacgccatcgggaaaagctttg

SEQ ID NO: 824873 - DNA, 75 bp, synthetic construct
  source 1..75: mol_type = other DNA
gtttttactgaatgaaggcgcagatccctcgcgttttctgtttgttctcagccatgccgatcgcgtgtttcctgc

SEQ ID NO: 824874 - DNA, 75 bp, synthetic construct
  source 1..75: mol_type = other DNA
ggtgaaaccatcgggaaaagttttgacgtcgccgttgcccgtttcagttttccggcctggatgttacagcttctg

SEQ ID NO: 824875 - DNA, 75 bp, synthetic construct
  source 1..75: mol_type = other DNA
ccgtgaaggacataacgtgaccaaagttagtcgtcgcgatttaccttttgttgttgccgccggaaaaaatggcgc

SEQ ID NO: 824876 - DNA, 75 bp, synthetic construct
  source 1..75: mol_type = other DNA
gaaccgactggtattgagcatgggcggcgacggcgtttattacagcgatatcagcggtgaaaatggctggtctgc

SEQ ID NO: 824877 - DNA, 75 bp, synthetic construct
  source 1..75: mol_type = other DNA
attacacccgcccgacctgtattttaatgggacaggaaaaaacgggcatcacacaggaagcattagaactggcag

SEQ ID NO: 824878 - DNA, 75 bp, synthetic construct
  source 1..75: mol_type = other DNA
ataaacgcgatcagcaggcgcaggaacggcttaccgggcgacttcaggcattaaatgaaagggttcctgagctca

SEQ ID NO: 824879 - DNA, 75 bp, synthetic construct
  source 1..75: mol_type = other DNA
gagggcttcactgtaaaaatcactttcccggcagtcagccggttacagaccaggatcgcggtaaaaacaaatctg

SEQ ID NO: 824880 - DNA, 75 bp, synthetic construct
  source 1..75: mol_type = other DNA
ctgcggtgctggcggtgatggattacacccagatgaactcgaaagctgatgaggaggttcgtaaagagctaaacg

SEQ ID NO: 824881 - DNA, 75 bp, synthetic construct
  source 1..75: mol_type = other DNA
attacatcacatggctgggtattcgtgcagacgaaccccgtaggcctgaaaccgaaatcgggcgtccggtatctt

SEQ ID NO: 824882 - DNA, 75 bp, synthetic construct
  source 1..75: mol_type = other DNA
tttcaggcggtcggacatcggcgtacctcgtccaccttatggagcaacgcagaaaagctggtgaaaacgttcatt

SEQ ID NO: 824883 - DNA, 75 bp, synthetic construct
  source 1..75: mol_type = other DNA
tatacggaatgggagccaaaggatattcagacgcgaatgccggtgcttaaaccgtttatggacatggttaaaaag

SEQ ID NO: 824884 - DNA, 75 bp, synthetic construct
  source 1..75: mol_type = other DNA
ccatggcttcggcagctgcgggtagtaacagctgggtacaggtgaaaacacaccgcaccattggcgatgccgtcg

SEQ ID NO: 824885 - DNA, 75 bp, synthetic construct
  source 1..75: mol_type = other DNA
tggacggcactttattgatgcctgaccatcatttaggtgagaaaacactctctactttggcacgactgcgtgaac

SEQ ID NO: 824886 - DNA, 75 bp, synthetic construct
  source 1..75: mol_type = other DNA
attggacattgccgaaatcaggctgtctctcactatttgacgcactggctggactatccacatctaccttattcc

SEQ ID NO: 824887 - DNA, 75 bp, synthetic construct
  source 1..75: mol_type = other DNA
gaagacgtccgtaaagagcttaatgccattgctgacgtatcagccggccgcctgtttgtgctggtcaataaattt

SEQ ID NO: 824888 - DNA, 66 bp, synthetic construct
  source 1..66: mol_type = other DNA
tttcatccactcaccatcgactgccgctacaacctgacattccgtcaggcaggtaaaaaagaataa

SEQ ID NO: 824889 - DNA, 75 bp, synthetic construct
  source 1..75: mol_type = other DNA
tcaggggctgcagcaaagcattcagtcactacaggcgcatattaccagcctgctggcggatatccaggagattga

SEQ ID NO: 824890 - DNA, 75 bp, synthetic construct
  source 1..75: mol_type = other DNA
gacccggctcgcggtaaaaacaaatctgagtgcgcttatggaggaaagaacggagacagtcacccgtcgccgtcg

SEQ ID NO: 824891 - DNA, 75 bp, synthetic construct
  source 1..75: mol_type = other DNA
taccccggcgttaaggggaaatgaggtcagcatggatactatcgagcttggcaacaacgaatctctggtatgtgg

SEQ ID NO: 824892 - DNA, 75 bp, synthetic construct
  source 1..75: mol_type = other DNA
tgacacggcatacagcgatgacttcttcgttggtcgtgttggcggcgttgctactatcgtaactccaacttcttt

SEQ ID NO: 824893 - DNA, 75 bp, synthetic construct
  source 1..75: mol_type = other DNA
atgcagcaggtttttgttccgctcccccggcgttaaggggaaatgaggtcagcatggatactatcgagcttggca

SEQ ID NO: 824894 - DNA, 75 bp, synthetic construct
  source 1..75: mol_type = other DNA
gcaccgtgaggctgaagcacagttccggcctgagctggagaaaatcgtcagcgggattgaaacaggttttcgtgg

SEQ ID NO: 824895 - DNA, 75 bp, synthetic construct
  source 1..75: mol_type = other DNA
ggcggttgactctgccgccgcaaaactgatgcagaatgcagaaaatatcagtgaatacctgttgttacgccatca

SEQ ID NO: 824896 - DNA, 75 bp, synthetic construct
  source 1..75: mol_type = other DNA
gatgagggctttattgccgcctgtctgatgacgtacagtcatcatgcctgtcgtacggagaattatgccatgacg

SEQ ID NO: 824897 - DNA, 75 bp, synthetic construct
  source 1..75: mol_type = other DNA
aatatctgtcattacgccatcaggggctacagcaaagcattcagtcactgcaggcgcatatcaccagcctgcttg

SEQ ID NO: 824898 - DNA, 75 bp, synthetic construct
  source 1..75: mol_type = other DNA
ccttttgacgaatacgcagaagtgcagaaactgccggtgatcgacgtggaattcagccatctggtggggatggat

SEQ ID NO: 824899 - DNA, 75 bp, synthetic construct
  source 1..75: mol_type = other DNA
gcgacagacctgtgggaaggctccctgatcgaccaactgataacggaagtcatacagagttcacattccagagcc

SEQ ID NO: 824900 - DNA, 75 bp, synthetic construct
  source 1..75: mol_type = other DNA
tttctggcgggagaacatctgcatatcttgttcacctgatggaagaacaaagaaaggctggcaataacgtctgct

SEQ ID NO: 824901 - DNA, 75 bp, synthetic construct
  source 1..75: mol_type = other DNA
taggtctgtgactatagcagtcatgccaattatatatttattcacaagtagttatgcttccagtttgtttttaag

SEQ ID NO: 824902 - DNA, 75 bp, synthetic construct
  source 1..75: mol_type = other DNA
cctggtgttcacttattgcatggtttatatttttgttttttgtgctttcaattaatatttttccagtcagtgcct

SEQ ID NO: 824903 - DNA, 75 bp, synthetic construct
  source 1..75: mol_type = other DNA
gagtctgaagccagcaacgatcaggcaccggtgcagatgcctcgcgactattctgaaggcgcatccggcctgctg

SEQ ID NO: 824904 - DNA, 75 bp, synthetic construct
  source 1..75: mol_type = other DNA
gggattttcgacgacgggctgcgttgtgggggatggctttgccggagacagaatttacacctgctgaacttgccg

SEQ ID NO: 824905 - DNA, 75 bp, synthetic construct
  source 1..75: mol_type = other DNA
accgataaatatactgtattttattccaatagagagggtaaatgggggttcaatgagttgaaatgtaagaaaggc

SEQ ID NO: 824906 - DNA, 75 bp, synthetic construct
  source 1..75: mol_type = other DNA
ggcattagatgtcattctgctaatttatctactccttggttttatacttctcccttataaatatctgtggaaaga

SEQ ID NO: 824907 - DNA, 75 bp, synthetic construct
  source 1..75: mol_type = other DNA
tcggataactccatgcctagaaaatggtaaaacaggatttgttgattttttagatgaaaaagagactgcgtttgg

SEQ ID NO: 824908 - DNA, 75 bp, synthetic construct
  source 1..75: mol_type = other DNA
ctgacagccctccgcgacaccctgctccccaaactcatctccggtgagctatccctggatgatcttccggatctc

SEQ ID NO: 824909 - DNA, 75 bp, synthetic construct
  source 1..75: mol_type = other DNA
tttttaccgttagccgcctgaatcaaacggttcgtctgctgcttgagcatgagatggggcaggtgtggatcagcg

SEQ ID NO: 824910 - DNA, 75 bp, synthetic construct
  source 1..75: mol_type = other DNA
gaatctgaagccagcaacgatcaggctccggtgcagatgccgcgtgactattctgaaggcgcatccggcctgtta

SEQ ID NO: 824911 - DNA, 75 bp, synthetic construct
  source 1..75: mol_type = other DNA
gggtacgtcaactgctggcgaaaaacgatctcacggctatcgcgccgctggtccctgcagtcacgctgcattatt

SEQ ID NO: 824912 - DNA, 75 bp, synthetic construct
  source 1..75: mol_type = other DNA
aaagcatctgttcatgccagaagaagcagaaaggaagcatatgttcaaacaaaacaagagagagatttaacaggt

SEQ ID NO: 824913 - DNA, 75 bp, synthetic construct
  source 1..75: mol_type = other DNA
tggcctgagcgaacccatcggaaaatttccgatgaccgatagctggcatccgtcgcgggattttcgacgacgggc

SEQ ID NO: 824914 - DNA, 75 bp, synthetic construct
  source 1..75: mol_type = other DNA
gtgatggtgtggtgattagtgaagttagcgccgtaacaaaaacccgcaaaccacgtaaaaaaacggctaatccgt

SEQ ID NO: 824915 - DNA, 75 bp, synthetic construct
  source 1..75: mol_type = other DNA
ggaatatcgtttagcggaaaacatgcgcgcgcagcttagtgccatgcgcgaacgctttggtaacacagtgacgca

SEQ ID NO: 824916 - DNA, 75 bp, synthetic construct
  source 1..75: mol_type = other DNA
gagatggtagattgattagtgaagtcagcgccgtaacaaaaacccgcaaatcacgtaaaaaaacgtctaatccgt

SEQ ID NO: 824917 - DNA, 75 bp, synthetic construct
  source 1..75: mol_type = other DNA
aaattgttcgcgccattgaactggcgaatcagcgcaacgagtgtgacgtattgatcgttgggcgcggtggcggtt

SEQ ID NO: 824918 - DNA, 75 bp, synthetic construct
  source 1..75: mol_type = other DNA
tttgccagtcgcattccgatagtcagcgccgtcgggcatgaaaccgatgtgacgattgccgactttgttgctgat

SEQ ID NO: 824919 - DNA, 75 bp, synthetic construct
  source 1..75: mol_type = other DNA
cacaggaatatttgacgcgagcgactcaacgatattatggcaaaacgccaatgcagattattaatgaaatccgta

SEQ ID NO: 824920 - DNA, 75 bp, synthetic construct
  source 1..75: mol_type = other DNA
agcccaagcctgtttattaaaacgtttaagaaactaacatcttttacaccaaatagttatcgtaagaaattgact

SEQ ID NO: 824921 - DNA, 75 bp, synthetic construct
  source 1..75: mol_type = other DNA
acggatattgcgtttgaggccggttatagtagcccgagtttgtttattaaaacgtttaagaaattaacgtccttt

SEQ ID NO: 824922 - DNA, 75 bp, synthetic construct
  source 1..75: mol_type = other DNA
aacggtttggtaatgcagtaacgcacctggaagcagttagcccgctttcgacgctggcgcgtggatacagcgtta

SEQ ID NO: 824923 - DNA, 75 bp, synthetic construct
  source 1..75: mol_type = other DNA
cgttccggcatgagcgccacctggtgtgcgctgttgctgatggtgctggcgaatctttggtatatgccctgggag

SEQ ID NO: 824924 - DNA, 75 bp, synthetic construct
  source 1..75: mol_type = other DNA
agtttgtttattaaaacgtttaagaaattaacgtcctttacgcctaagagctatcgtaagaaattgactgaattt

SEQ ID NO: 824925 - DNA, 75 bp, synthetic construct
  source 1..75: mol_type = other DNA
aattgttcagctaagcagtatcgtccctagtaccagtacaacagaagcagcaacgccatactcagttaaggttgc

SEQ ID NO: 824926 - DNA, 75 bp, synthetic construct
  source 1..75: mol_type = other DNA
gctcatttagtcgcttcaagatgaaagtggggtggatgccaccacacccatcattttatatgaaacgggaatgtt

SEQ ID NO: 824927 - DNA, 75 bp, synthetic construct
  source 1..75: mol_type = other DNA
tgaatcaattgagtcagcgatgtgatgcctggcaatgccaaatttggggaaccggtggaaggctgcggttgatgt

SEQ ID NO: 824928 - DNA, 75 bp, synthetic construct
  source 1..75: mol_type = other DNA
agccgatgattcagtacattgtcgacgaaattgtagctgccggtatcaaagaaatcgttctggtgactcatgcgt

SEQ ID NO: 824929 - DNA, 75 bp, synthetic construct
  source 1..75: mol_type = other DNA
gacctggcaaatagcaaagctgccaccagtcataatcatgcctggaatcagattactggtatccctgatggtaca

SEQ ID NO: 824930 - DNA, 75 bp, synthetic construct
  source 1..75: mol_type = other DNA
taaaaataatgagttaacaaatttaggcaatactagcggaacaaaaggtgcctctggcttcgtaaaaatatcatg

SEQ ID NO: 824931 - DNA, 75 bp, synthetic construct
  source 1..75: mol_type = other DNA
tctggagccctgcacaacagcggtgagcagcccgcagagtaatggcatggccgaacggttcgtgaaaacgatgaa

SEQ ID NO: 824932 - DNA, 75 bp, synthetic construct
  source 1..75: mol_type = other DNA
tcgagttctgctgtgataacggagggagactgcgtgtcacgttcgcgctggactgctgtgatcgtgaggcactgc

SEQ ID NO: 824933 - DNA, 75 bp, synthetic construct
  source 1..75: mol_type = other DNA
atgttaggagcgatagaaaaacgctttggcgataaagtgccggaacagtccatccagtggctgacagataacggt

SEQ ID NO: 824934 - DNA, 75 bp, synthetic construct
  source 1..75: mol_type = other DNA
ctgggttatcgctcgccacgggaatatctgcggcagcgggcttgtaatgggttaagtgataacagatgtctggac

SEQ ID NO: 824935 - DNA, 75 bp, synthetic construct
  source 1..75: mol_type = other DNA
gtaagcttagtcagccgttgtctccgggtgtcgcgtgcgcagttgcacgtaattctcagacgaaccgatgactgg

SEQ ID NO: 824936 - DNA, 75 bp, synthetic construct
  source 1..75: mol_type = other DNA
cggtagcgggcctcgggatgcacatgttgccagccacgaaggcaatcccgaaagagatgctgccaatcgtagaca

SEQ ID NO: 824937 - DNA, 75 bp, synthetic construct
  source 1..75: mol_type = other DNA
aaatcgttgttgcggttcagtgacttacaagtaaataccattgcgctggaactggcataccaggattcaaactat

SEQ ID NO: 824938 - DNA, 75 bp, synthetic construct
  source 1..75: mol_type = other DNA
atgagcccatcgaattagaatccctgcggcagattatctcccagtgtgtggaaaacgctgcgatccatgaagcct

SEQ ID NO: 824939 - DNA, 75 bp, synthetic construct
  source 1..75: mol_type = other DNA
agttaacgcaatcattttgcgatgtggtggatgctattattgctggtggtgggatggtcggtggtctgggcgatc

SEQ ID NO: 824940 - DNA, 75 bp, synthetic construct
  source 1..75: mol_type = other DNA
tggcgtcttatgtgcagtctccgtgctattaccgtgcgttaatagcaggtggcgcccgttacaacctgaacggtc

SEQ ID NO: 824941 - DNA, 75 bp, synthetic construct
  source 1..75: mol_type = other DNA
aaagcctataaaggccgtcgcgtggtagaagacgtcagcctgaccgtcaactccggggaaattgtcggtctgctg

SEQ ID NO: 824942 - DNA, 75 bp, synthetic construct
  source 1..75: mol_type = other DNA
gagtttacactcagtgatttagacatggttgtgaacaaatccgggttcaacagctcattcggcgaccgtgagaaa

SEQ ID NO: 824943 - DNA, 75 bp, synthetic construct
  source 1..75: mol_type = other DNA
agagcttcgtgaaaacgataaagcgtgactacatcagtatcatgggtaagcgtcaacggagcaccgtattgacgc

SEQ ID NO: 824944 - DNA, 75 bp, synthetic construct
  source 1..75: mol_type = other DNA
gtgatgacgaaaccaaagcggctacgccaaaagcggtgaaagcggcgatgattgaggcacgaaatcatcgtcata

SEQ ID NO: 824945 - DNA, 75 bp, synthetic construct
  source 1..75: mol_type = other DNA
cgggtagtcatacgcacccctggggacagattacgagtattcctgacggtaccctgacacaaaaagggattgtga

SEQ ID NO: 824946 - DNA, 75 bp, synthetic construct
  source 1..75: mol_type = other DNA
tttctcgcgcggtgtggatctacggtgaacgcgccattgctgcggcgcaaacaaaacttccgccagcgtttgaac

SEQ ID NO: 824947 - DNA, 75 bp, synthetic construct
  source 1..75: mol_type = other DNA
tgatatccgcagagccattttgcgtactattacccggtttgaaccccggctgaagacctccacactgcaaatcat

SEQ ID NO: 824948 - DNA, 75 bp, synthetic construct
  source 1..75: mol_type = other DNA
cccgctccaggatgagcgccgccagagcggtcataacacattacagtttgaaattcgcggcgagatcctcacgca

SEQ ID NO: 824949 - DNA, 75 bp, synthetic construct
  source 1..75: mol_type = other DNA
ctgcgcgaacataaagtacagaagatgattatcgccaaccgcactcgcgaacgtgcccaaattctggcagatgaa

SEQ ID NO: 824950 - DNA, 75 bp, synthetic construct
  source 1..75: mol_type = other DNA
tgcgtaaaagcctctactggcatcaggataacgacgcggttagccatttaatgcgtgttgccagcggcctggatt

SEQ ID NO: 824951 - DNA, 75 bp, synthetic construct
  source 1..75: mol_type = other DNA
gactgttgcgatcgtgaagccatagactgggccgcaagcacggggggttatgacaaagcaacggtgcaggatgtc

SEQ ID NO: 824952 - DNA, 75 bp, synthetic construct
  source 1..75: mol_type = other DNA
taactgctaaagcgttagcggcccttgaacagggcggtgatgcgcaaaccattatgcaggatctggcatggaaac

SEQ ID NO: 824953 - DNA, 75 bp, synthetic construct
  source 1..75: mol_type = other DNA
tcacttcaacaggccgcccgtgacggggataacgaacgcctgaatattctgcgcgacggcctcgggctggagtag

SEQ ID NO: 824954 - DNA, 75 bp, synthetic construct
  source 1..75: mol_type = other DNA
gatgtgcttctccgtatacaccatgttatcggagagctgcccacgtatggttatcgtcgggtatggacgctgctt

SEQ ID NO: 824955 - DNA, 75 bp, synthetic construct
  source 1..75: mol_type = other DNA
taacaaatggcatccgcatagtgcgttgggttatcgctctccgcgagaatatcgacgtcagcgggtaatgttaac

SEQ ID NO: 824956 - DNA, 75 bp, synthetic construct
  source 1..75: mol_type = other DNA
atgttggggcttgaaccgaaaaacacagcggtgcggagtccggagattaacggcatagcagagagcttcgtgaaa

SEQ ID NO: 824957 - DNA, 75 bp, synthetic construct
  source 1..75: mol_type = other DNA
cgttcgagcattataacgaatggcatccgcatagtgccctgggttatcgctcgccacgggaatatctgcggcagc

SEQ ID NO: 824958 - DNA, 75 bp, synthetic construct
  source 1..75: mol_type = other DNA
tcgctctgcttggtcatcaggttgcaaccggattaggcgtgaacagttctcgtctggcgttgttgcgtgtagccg

SEQ ID NO: 824959 - DNA, 75 bp, synthetic construct
  source 1..75: mol_type = other DNA
aggatgtagcgtggcggtgctgtggctgattttccagtttccaatgctgggaatgttctggcgtccagtggctgg

SEQ ID NO: 824960 - DNA, 75 bp, synthetic construct
  source 1..75: mol_type = other DNA
gatgtgcttctccgtatacaccatgttatcggggagctgcccacgtatggttatcgtcgggtatgggcgctgctt

SEQ ID NO: 824961 - DNA, 75 bp, synthetic construct
  source 1..75: mol_type = other DNA
tacttaccgactttcgcaggatctctggcaggccggacaacgcagccaggccgatacgttaatgcgcaatctggc

SEQ ID NO: 824962 - DNA, 75 bp, synthetic construct
  source 1..75: mol_type = other DNA
ctctaaaatctggtacgggcagattaaagacatgcccgtcagcgatgccagcgtgcaggcgctgaaaaaatatct

SEQ ID NO: 824963 - DNA, 75 bp, synthetic construct
  source 1..75: mol_type = other DNA
ctaaaccagacgggttaacggcagcaaagaaccttgcagaggcgttcgagcattataacgaatggcatccgcata

SEQ ID NO: 824964 - DNA, 75 bp, synthetic construct
  source 1..75: mol_type = other DNA
aaaactgcgagtcacgttcgcgctggactgctgtgaccgtgaggcactgcactgggcggtcactacgggcggctt

SEQ ID NO: 824965 - DNA, 75 bp, synthetic construct
  source 1..75: mol_type = other DNA
cggcagagtggctgtgaaagaaagtaatcagcgatggtgctctgacgggtttgagttccgctgtgataacggaga

SEQ ID NO: 824966 - DNA, 75 bp, synthetic construct
  source 1..75: mol_type = other DNA
ggttaatcgactgcaaagcgatcaggtgctggaaaccgctaaccgcctgcgagaaagcggcaaagaggcagaagc

SEQ ID NO: 824967 - DNA, 75 bp, synthetic construct
  source 1..75: mol_type = other DNA
ccattcttggtctgacggaagtggatattgctgccggtgacacagcggcggcacgtagccagctggcgaaactgc

SEQ ID NO: 824968 - DNA, 75 bp, synthetic construct
  source 1..75: mol_type = other DNA
acggcgtctgggcatcgcttagcggcgaccagttaaccggtaaaaatgtcgaagataactggcgtgtgcgctgga

SEQ ID NO: 824969 - DNA, 75 bp, synthetic construct
  source 1..75: mol_type = other DNA
aatccaacgatggcggcagcagtcagggctttggctatacggcgcgggcattacttgagcgtcgcgtcacatcca

SEQ ID NO: 824970 - DNA, 75 bp, synthetic construct
  source 1..75: mol_type = other DNA
tgcgaagtttgaagcgcaggcgggcgatccaaagcaggcgctggaaacctacaaagacgctatggtcgcatccgg

SEQ ID NO: 824971 - DNA, 75 bp, synthetic construct
  source 1..75: mol_type = other DNA
gtggcggctgcacaatcgcaactggcagaacagcaaaaacagctggccgaccctgctttccgcgctcgtgcgcaa

SEQ ID NO: 824972 - DNA, 75 bp, synthetic construct
  source 1..75: mol_type = other DNA
gtcatctgaagggtttacacgcttcgatgacggaatgaatgcagagtttgagagcctcgctgagaaacgtaaagc

SEQ ID NO: 824973 - DNA, 75 bp, synthetic construct
  source 1..75: mol_type = other DNA
gcttgaggagtgggatcatcagcatccgggtgagcagattgacaacaccacccgctggaaggtgattaccgacgc

SEQ ID NO: 824974 - DNA, 75 bp, synthetic construct
  source 1..75: mol_type = other DNA
tggcgacagcagttatgtgaatttctgcaatggtggcaaacagttcgatgctttgttgcaggaacaaagcgcgca

SEQ ID NO: 824975 - DNA, 75 bp, synthetic construct
  source 1..75: mol_type = other DNA
ctggttctggttgcacgactgcagaaatcgacgctacaggaagtcgcccgcacccatgaagaactggctgcgatt

SEQ ID NO: 824976 - DNA, 75 bp, synthetic construct
  source 1..75: mol_type = other DNA
atgaaattcttacagaatatcccgccttacctgttttttaccggtaagggaggtgtaggaaaaacttctatttcc

SEQ ID NO: 824977 - DNA, 75 bp, synthetic construct
  source 1..75: mol_type = other DNA
cattattgaagactggatttgcccctatatttccagacacctgttatcacttaacccattactggcttgctgccg

SEQ ID NO: 824978 - DNA, 75 bp, synthetic construct
  source 1..75: mol_type = other DNA
attatcgtcttaggcgcaatctggctgttgaacgattaccgtggcgttcccactcctgttctgctgctgacgttg

SEQ ID NO: 824979 - DNA, 75 bp, synthetic construct
  source 1..75: mol_type = other DNA
cagcgatcatcgcaatcatgctgttctttacctggaccaccgatggtgcctacttaagcgcccgtaacgtctcca

SEQ ID NO: 824980 - DNA, 75 bp, synthetic construct
  source 1..75: mol_type = other DNA
cactgacggcacttacttctgcgccaccaacgtggtgcgggtgaaccttatccgacaggtacaggagtcatgcag

SEQ ID NO: 824981 - DNA, 75 bp, synthetic construct
  source 1..75: mol_type = other DNA
tgttgtttatggtctggtttccggcaattgtctatgggctttatcgtgttgttatcgctttgtgggatgcttcct

SEQ ID NO: 824982 - DNA, 75 bp, synthetic construct
  source 1..75: mol_type = other DNA
atgaaaattattaacgtacctgatgcaagaagtgtgagaattgccggaattgaaattatcgatagtgtcaaatcg

SEQ ID NO: 824983 - DNA, 75 bp, synthetic construct
  source 1..75: mol_type = other DNA
gaagcagcacgtctctccgggattaacgttgaacgcaccaaacttgccgtgttcgctattaacggattaatggta

SEQ ID NO: 824984 - DNA, 75 bp, synthetic construct
  source 1..75: mol_type = other DNA
ggggattcatccgtggggctggattatcaatgacagcttttccattgcggatacgcgttcttcgttgctttgcca

SEQ ID NO: 824985 - DNA, 75 bp, synthetic construct
  source 1..75: mol_type = other DNA
tttatcagcctgctgattatcaccctgtcctttattcctatcttcaccctggaagggcaggaagggcgcctgttt

SEQ ID NO: 824986 - DNA, 75 bp, synthetic construct
  source 1..75: mol_type = other DNA
ccattgataacctcagctacaaactcctggaagagtttatcgtagtggctattgtctgcgccctgttcctgtggc

SEQ ID NO: 824987 - DNA, 75 bp, synthetic construct
  source 1..75: mol_type = other DNA
atgggattctggatccggggaaaaattcctgccgagaccagtaaccccctgaaccgggtgctgatcaaagcgtat

SEQ ID NO: 824988 - DNA, 75 bp, synthetic construct
  source 1..75: mol_type = other DNA
aaatgaccaactattcagtgacggatattgcgtttgaggccggttatagtagcccgagcttgtttattaaaacgt

SEQ ID NO: 824989 - DNA, 75 bp, synthetic construct
  source 1..75: mol_type = other DNA
gggcgattttgtttttattccgttaggttcgcaccatcaaagtttttatgagtttggtgccacgcgcatattgaa

SEQ ID NO: 824990 - DNA, 75 bp, synthetic construct
  source 1..75: mol_type = other DNA
tccgcttaccaccaccatgctgtccgtacctggcgcaaaaaccgtgcgtggtttctcacagttcggggattcgta

SEQ ID NO: 824991 - DNA, 75 bp, synthetic construct
  source 1..75: mol_type = other DNA
tttgcgctctccctgtactgaagaaattgccgtgtttcaggccttttccagggtgattcgtgaagcgggtaaacg

SEQ ID NO: 824992 - DNA, 75 bp, synthetic construct
  source 1..75: mol_type = other DNA
ctgatcgtatagcgctcgttccggtgctggcttctgagcccgccgggattgaaaagctcagagagctggtaagtt

SEQ ID NO: 824993 - DNA, 75 bp, synthetic construct
  source 1..75: mol_type = other DNA
accacaccagtgctggaagcggcaaacctgcaggctgaccttgaaagagcggagattcatccgtggggctggatt

SEQ ID NO: 824994 - DNA, 75 bp, synthetic construct
  source 1..75: mol_type = other DNA
gtgcctggcgcgaagactgtgcgcggtttctcgcagtttggcgactcttatgtgtatgtcattttcgaagatggt

SEQ ID NO: 824995 - DNA, 75 bp, synthetic construct
  source 1..75: mol_type = other DNA
agggattcatccctggggctggataatcaataactgcctttctattgcggaaactcgttcgtcgctactgtgtca

SEQ ID NO: 824996 - DNA, 75 bp, synthetic construct
  source 1..75: mol_type = other DNA
atcgaccattccagcagataccctctttcttcaaccggtgaacatggttggcgtgcctgcattaaaaggtctttt

SEQ ID NO: 824997 - DNA, 75 bp, synthetic construct
  source 1..75: mol_type = other DNA
caccgacggcacttacttttgcgccaccaacgtggtgcaggtaaatcttatcagacaggtacaggagtcacgcag

SEQ ID NO: 824998 - DNA, 75 bp, synthetic construct
  source 1..75: mol_type = other DNA
tgcagtttatgctggttctgctggcagcctgggccatagcctggggagccctgtttgtcatggggcaaaccgttc

SEQ ID NO: 824999 - DNA, 75 bp, synthetic construct
  source 1..75: mol_type = other DNA
gacattgccacacaggcgttaagccagaagggaatcatcgccatgcgtgagcgggtggcgcaaattattgcagaa

SEQ ID NO: 825000 - DNA, 75 bp, synthetic construct
  source 1..75: mol_type = other DNA
atgaagcttatattgaattttgcccacaggcatcgctggcgggctggctggcggaatatccgcacctggctattt

SEQ ID NO: 825001 - DNA, 75 bp, synthetic construct
  source 1..75: mol_type = other DNA
attgaagcagcattggctcatgttgacaaaaatgaggttcggcgagcttataatcgtagcgattacctagagcaa

SEQ ID NO: 825002 - DNA, 75 bp, synthetic construct
  source 1..75: mol_type = other DNA
cgaaccggcggcagaccccgtcgtctcacgcaggaacaatacgagcaggtcgggcgtttactggccgggggtgtc

SEQ ID NO: 825003 - DNA, 75 bp, synthetic construct
  source 1..75: mol_type = other DNA
cttggaataacccgccaaacgctgtaccgacatatttcaccggatggtcaattgcgggctgatggaataaaacta

SEQ ID NO: 825004 - DNA, 75 bp, synthetic construct
  source 1..75: mol_type = other DNA
ctgctgaccctggcagaaatgttcctggtggggctgattacatcagctgcccggatcagaagtggcggcctgctg

SEQ ID NO: 825005 - DNA, 75 bp, synthetic construct
  source 1..75: mol_type = other DNA
tggtgggggtgattacatcagctgcccggatcagaagcggcggcctgctgctgccggtattgctgcatatggaag

SEQ ID NO: 825006 - DNA, 75 bp, synthetic construct
  source 1..75: mol_type = other DNA
acgctggcaaacgaagaagtcatcaacctgctaatgaaagtgatcgccccctacccgctctcgacgccggttgcc

SEQ ID NO: 825007 - DNA, 75 bp, synthetic construct
  source 1..75: mol_type = other DNA
ataactggcaactggatttgcaaggcatcgcggacaagcttgatggcgtgaaggtggtctacgtatgcagcccta

SEQ ID NO: 825008 - DNA, 75 bp, synthetic construct
  source 1..75: mol_type = other DNA
tctatgggctggggaaaaatacgctgttcttcagtcatggtgctgtactggtgtacctcctgtgtgttttcctgg

SEQ ID NO: 825009 - DNA, 75 bp, synthetic construct
  source 1..75: mol_type = other DNA
ccggttcgtgaagccttcataaaactggcagaaaacggcctgattcaaattcgcccgcagcgtggcagctacgtc

SEQ ID NO: 825010 - DNA, 75 bp, synthetic construct
  source 1..75: mol_type = other DNA
gcggcggactgaaggagagcgccgactggtttaaacaacgctacggtcagatgttcgacgccatctacgtaccac

SEQ ID NO: 825011 - DNA, 75 bp, synthetic construct
  source 1..75: mol_type = other DNA
gctggtaacggtatggctgctgctgcgcccggccagcaaaaacacgcaggagacttccccgtcccgcaccgtggc

SEQ ID NO: 825012 - DNA, 75 bp, synthetic construct
  source 1..75: mol_type = other DNA
tgatggccaagcgcccggacgatatcccgcccggtctggggctgacgcccggcgaactacctgccgacgttcaac

SEQ ID NO: 825013 - DNA, 75 bp, synthetic construct
  source 1..75: mol_type = other DNA
tgtaatgatcctgtttattaccccgttaacgattgttattgtgttttagttgttaatatttctagtatcaaggat

SEQ ID NO: 825014 - DNA, 75 bp, synthetic construct
  source 1..75: mol_type = other DNA
agcgtcatggagcgcctgaaaatgctcgacacactgcagcaaacacaactgcagagcgccattgtgaaggcgatg

SEQ ID NO: 825015 - DNA, 75 bp, synthetic construct
  source 1..75: mol_type = other DNA
ccggccaggccgttgccatccatatcacccgccagttagctatcgactacgagcctgacggacggcgggtgaact

SEQ ID NO: 825016 - DNA, 75 bp, synthetic construct
  source 1..75: mol_type = other DNA
tcaatgtgcgtatttatcggttgctgtcctccggtttaaccaaactggaaaatgagatgacggtattcccggtca

SEQ ID NO: 825017 - DNA, 75 bp, synthetic construct
  source 1..75: mol_type = other DNA
acaacctggcgcagcgtaaagccgcagcggttgaggcggaaactattgtcgctcaggaaaccagcgaatttatgg

SEQ ID NO: 825018 - DNA, 75 bp, synthetic construct
  source 1..75: mol_type = other DNA
ccaccagatatgttgctgcgccaacacatggatatttttactgcgctacaaaagcatgatgtcactgcggtagaa

SEQ ID NO: 825019 - DNA, 75 bp, synthetic construct
  source 1..75: mol_type = other DNA
acggcttaacgcacagcaggccacgctggcctctcagcttcgggaagacatgcgccgccagcaggaccagatgcg

SEQ ID NO: 825020 - DNA, 75 bp, synthetic construct
  source 1..75: mol_type = other DNA
gcggtccatcttaccgaagcgctggccatcgactacgagccggaaggccgccaggtgaaataccagcaggccacc

SEQ ID NO: 825021 - DNA, 75 bp, synthetic construct
  source 1..75: mol_type = other DNA
gtatgtgccgccgggccacaaggtggcggtccatcttaccgaagcgctggccatcgactacgagccggaaggccg

SEQ ID NO: 825022 - DNA, 75 bp, synthetic construct
  source 1..75: mol_type = other DNA
aatatgtatcaggctgcaaggattgttgcgtctaaaacaagattttacatgcctgaaaaaatacaggctatacgt

SEQ ID NO: 825023 - DNA, 75 bp, synthetic construct
  source 1..75: mol_type = other DNA
gctgggcgtagtggcagggattggcgcatggaactacccgatccagattgccttgtggaaatccgcccccgcgct

SEQ ID NO: 825024 - DNA, 75 bp, synthetic construct
  source 1..75: mol_type = other DNA
gcaggcgggaaagtaaacaaattgtttctggaaatttccgactataatcttcgcaatcgctttgtggaaatgaaa

SEQ ID NO: 825025 - DNA, 75 bp, synthetic construct
  source 1..75: mol_type = other DNA
ggaatatcagtaccggaacaatgggcaacctgatcgcgctggccggagagaggctggggctttttgccaggaccg

SEQ ID NO: 825026 - DNA, 75 bp, synthetic construct
  source 1..75: mol_type = other DNA
gcaggcgacagaccgtgcgcaggggaaaccgtatatgaatccgcgggacaactcggctctgttgcgtctgcggct

SEQ ID NO: 825027 - DNA, 75 bp, synthetic construct
  source 1..75: mol_type = other DNA
tgatcgttttcgacgatgcagatctcgagctcgccgctgatatcgccatgatggcgaacttcttcagctccggtc

SEQ ID NO: 825028 - DNA, 75 bp, synthetic construct
  source 1..75: mol_type = other DNA
gctgggtgtggtggcggggattggcgcatggaactacccgatccagattgctttgtggaaatccgcccccgcgct

SEQ ID NO: 825029 - DNA, 75 bp, synthetic construct
  source 1..75: mol_type = other DNA
cgatgacggcggctgcgcagagtatgccgatgacattcccccgtatgagtacttcgcatatctactcggctatct

SEQ ID NO: 825030 - DNA, 75 bp, synthetic construct
  source 1..75: mol_type = other DNA
cgtcgtttactgcaaggcgcgggtgccatgtggctattgagcgtaagtcaggtcagcctggctgcggtcagccag

SEQ ID NO: 825031 - DNA, 75 bp, synthetic construct
  source 1..75: mol_type = other DNA
tacaacaaaggcgacctcgaaaagcaggtgccgccagcacaaagtggtccacaaccgggtaaagcagggcgcgat

SEQ ID NO: 825032 - DNA, 75 bp, synthetic construct
  source 1..75: mol_type = other DNA
gtccattgtggggggaggtatttgcctgagctgtctgatgaaggcggcaatgaatggcgacacctttgttgtaag

SEQ ID NO: 825033 - DNA, 75 bp, synthetic construct
  source 1..75: mol_type = other DNA
gagccggaaaccgaatctggtgcgttttacgcccggcttcaccacgagcgggaactcaacaggtcggcccgcatt

SEQ ID NO: 825034 - DNA, 75 bp, synthetic construct
  source 1..75: mol_type = other DNA
aattaatggcagtgcagtaaagcctgatgttttgcactttcgcggcagagaagcactgagtgagccgttcagatg

SEQ ID NO: 825035 - DNA, 75 bp, synthetic construct
  source 1..75: mol_type = other DNA
acaggcagcagaccgtgcacaggggaaaccgtacatgaatccgcgagataatagagctctgttacgtctgcgact

SEQ ID NO: 825036 - DNA, 75 bp, synthetic construct
  source 1..75: mol_type = other DNA
cgctgtcgctggcggcacgtattcatgcggaagttccggcagatgaaagcccggaaatgacagaaggctatgaag

SEQ ID NO: 825037 - DNA, 75 bp, synthetic construct
  source 1..75: mol_type = other DNA
tgtcggcaataatgttcacccgggtactgcgaaaggcgtgatggttaacgcgctgtcgctggctgctcgcattca

SEQ ID NO: 825038 - DNA, 75 bp, synthetic construct
  source 1..75: mol_type = other DNA
atatcgcccagcaggcgatgcgcgattgcgatattgaaccggatctgaaaccgatccgtggcggcaccgacggtg

SEQ ID NO: 825039 - DNA, 75 bp, synthetic construct
  source 1..75: mol_type = other DNA
atagggaaaggaatttctgcgctaggatttgaaagagctggtgaaaaacttcagaattttgataccggagatatt

SEQ ID NO: 825040 - DNA, 75 bp, synthetic construct
  source 1..75: mol_type = other DNA
ccattgcaaagaaaaaaactgaatctgtagccctcaaaagtgctgcaaaaataggtgttaaatcagcagcatcca

SEQ ID NO: 825041 - DNA, 75 bp, synthetic construct
  source 1..75: mol_type = other DNA
aggagagggcaccgataaaccaaaccgtggaccgctctatcgttgcaacgaacacaccagaaagtgttcgctccg

SEQ ID NO: 825042 - DNA, 75 bp, synthetic construct
  source 1..75: mol_type = other DNA
ccaaaagttggggtttaagcgtacccactatccttggttgtacgaaatcccagccgagtttgacggtaagataaa

SEQ ID NO: 825043 - DNA, 75 bp, synthetic construct
  source 1..75: mol_type = other DNA
tgcttaacgtcggcgataaagtgaagaaacaggagctggaagataagcacgtactgttcatggaagatggtgcga

SEQ ID NO: 825044 - DNA, 75 bp, synthetic construct
  source 1..75: mol_type = other DNA
gagtcaatggttcgcgctttacgcacaggaaattacagtgtggtgatcggttggttgtcagatgatctgaccgaa

SEQ ID NO: 825045 - DNA, 75 bp, synthetic construct
  source 1..75: mol_type = other DNA
caggtattgcagaaatcatgaccgcgctggcggtattgcaacagaaaaacattccgcatggtgatattcgcgtcg

SEQ ID NO: 825046 - DNA, 75 bp, synthetic construct
  source 1..75: mol_type = other DNA
gaaaggaatggatcaggctcttactgaaaagatatccggcttaaccggtaaatcttttggatttaaaaaagcttc

SEQ ID NO: 825047 - DNA, 75 bp, synthetic construct
  source 1..75: mol_type = other DNA
ctgttgcaaagaaaaaaaccgaatccgtagccctcaaaagtgctgcaaaaataggtgttaaatcagctgcttcta

SEQ ID NO: 825048 - DNA, 75 bp, synthetic construct
  source 1..75: mol_type = other DNA
cgaccctgtccgaagtcatccaggaaatgctgctgaccaccacgtccgaacgacaggggcgggccatcgaccacg

SEQ ID NO: 825049 - DNA, 75 bp, synthetic construct
  source 1..75: mol_type = other DNA
cctcattccatcaaaatgggcgacgtaaccgtccatctgattagctggcgtaataaccacgcagaacttatcagc

SEQ ID NO: 825050 - DNA, 75 bp, synthetic construct
  source 1..75: mol_type = other DNA
gttggcaagccggtggagaccataccgcaggtgttcgtaaatggcgaatctatcggtggctatacggaattcgcc

SEQ ID NO: 825051 - DNA, 75 bp, synthetic construct
  source 1..75: mol_type = other DNA
tatacggacctgctgtgactatgggcatagaccaggttccaaccattcaggaatcagatatcactgttacattat

SEQ ID NO: 825052 - DNA, 75 bp, synthetic construct
  source 1..75: mol_type = other DNA
cggtaacgatgcgcgctatccaaaaagccatcgcgctgattgaactgaaatttactccgcaaggtgaatcccatt

SEQ ID NO: 825053 - DNA, 75 bp, synthetic construct
  source 1..75: mol_type = other DNA
atgccttatgaaaccgcgctgcatcgcgcggggcgttctgacgccctgcttaatgcgcagctcgccttcgccctg

SEQ ID NO: 825054 - DNA, 75 bp, synthetic construct
  source 1..75: mol_type = other DNA
tggccgaacctcatcgcaagacccttaatcgtgaggccatcattcgcgaggtatctacaccgctggagcgatatt

SEQ ID NO: 825055 - DNA, 75 bp, synthetic construct
  source 1..75: mol_type = other DNA
aagtcaatcactgagttcaccgcaagggcagatcgcacagtctgatactgaaattatcgctcaggaatacgacaa

SEQ ID NO: 825056 - DNA, 75 bp, synthetic construct
  source 1..75: mol_type = other DNA
agcgggtatatatatcagtcaattgacaatgccgtaataccctcatcaggctctgttgatgtgcagtttgtcaac

SEQ ID NO: 825057 - DNA, 75 bp, synthetic construct
  source 1..75: mol_type = other DNA
aaagagacctacaacattctgaagaaaaaagaagccgttggtcgtcgtctggactttatgatgcaggagttcaac

SEQ ID NO: 825058 - DNA, 75 bp, synthetic construct
  source 1..75: mol_type = other DNA
gggcagatcgcccagtctgacactgaaattatcgctcaggaatacgacaagcttctttgtttgtttaatcaaatt

SEQ ID NO: 825059 - DNA, 75 bp, synthetic construct
  source 1..75: mol_type = other DNA
tgagggtattggaaaggcacgaattggttcgacgataaatgctggtaaatactatgcccctgttatttcaatatc

SEQ ID NO: 825060 - DNA, 75 bp, synthetic construct
  source 1..75: mol_type = other DNA
ctgatgtaaccatcactgaaaacggtctttcagttcccgacatagcggatgtgctggcgggaagacttacagaca

SEQ ID NO: 825061 - DNA, 75 bp, synthetic construct
  source 1..75: mol_type = other DNA
ttccaggtgttcatgatccagccggtgaacgatgatgaggccaacgccaaaagccttaaccgtaaggttgagcgc

SEQ ID NO: 825062 - DNA, 75 bp, synthetic construct
  source 1..75: mol_type = other DNA
gtggccaccagcgaacaggaagcacgccagcaatccccggctggctgcgtgatggtattcgccgcccgtattcgt

SEQ ID NO: 825063 - DNA, 75 bp, synthetic construct
  source 1..75: mol_type = other DNA
tgccggagcgcctttgtgaacgaatagcctactgcgccatattgcttactgtctacgaggcagattatagcgttg

SEQ ID NO: 825064 - DNA, 75 bp, synthetic construct
  source 1..75: mol_type = other DNA
gatggcgaccagagttatatccgttttggttttaaaggcgaaacacaaattaacgatcaactgaccggttatggt

SEQ ID NO: 825065 - DNA, 75 bp, synthetic construct
  source 1..75: mol_type = other DNA
acagtagaatcaaaccgtcaattgaaatataagcagttcgcgttgagcaatcctgagcgcgtggtggtagatatt

SEQ ID NO: 825066 - DNA, 75 bp, synthetic construct
  source 1..75: mol_type = other DNA
ccaaaggtgcaaccagtactgcggcaaaatatctggcacaaacccagaacgcctcggacttgattggtggcgtga

SEQ ID NO: 825067 - DNA, 75 bp, synthetic construct
  source 1..75: mol_type = other DNA
tgtgttgtcctgcatagcaatgcgccgtaataccttacaccacggcgctgatggtgattactctggttctttggt

SEQ ID NO: 825068 - DNA, 75 bp, synthetic construct
  source 1..75: mol_type = other DNA
gctttgccaataagacacagaactttgaagcggtcgctcaataccagtttgactttggtctgcgtccatcgctgg

SEQ ID NO: 825069 - DNA, 75 bp, synthetic construct
  source 1..75: mol_type = other DNA
ccattgaggccaccagcgaacaggaagcacgccagcaatctccggctggctgcgtgatggtattcgctgcccgta

SEQ ID NO: 825070 - DNA, 75 bp, synthetic construct
  source 1..75: mol_type = other DNA
tggctaataacattggcggttcggaagcccaaatgggggactgttccaaagatgaaaagcctgaacggaaaagcg

SEQ ID NO: 825071 - DNA, 75 bp, synthetic construct
  source 1..75: mol_type = other DNA
gtaaagatggcgaccagagttatatccgttttggttttaaaggcgaaacacaaattaacgatcaactgactggtt

SEQ ID NO: 825072 - DNA, 75 bp, synthetic construct
  source 1..75: mol_type = other DNA
gcgactcctcggcgcagaccgacaactttatgaccaaacgcgccagcggtctggccacttaccgtaacactgact

SEQ ID NO: 825073 - DNA, 75 bp, synthetic construct
  source 1..75: mol_type = other DNA
agcggagagtgatactgcacagcaaaaaacgcgtctcgcttttgccgggttgaaatataaagatttgggttcttt

SEQ ID NO: 825074 - DNA, 75 bp, synthetic construct
  source 1..75: mol_type = other DNA
cggcgcggttagcggcggaaggcgtggcacgctttattgtcgcaggcggtgagacctccggcgtagtcacacaga

SEQ ID NO: 825075 - DNA, 75 bp, synthetic construct
  source 1..75: mol_type = other DNA
atgaccaaccgccaggtagcacattaccgtcaaattgcaccagcccgtgaagttgatgtggcacgctgcctctca

SEQ ID NO: 825076 - DNA, 75 bp, synthetic construct
  source 1..75: mol_type = other DNA
gcaatctgcgtagcgcgattgcggtaagccgtgcggcaaatgcttttgatgtggacggcgaaacggcagccatgc

SEQ ID NO: 825077 - DNA, 75 bp, synthetic construct
  source 1..75: mol_type = other DNA
tgtcgttaatcaagggtggatcacgctgcaggaagccgggatcaatctcgatcgtaatactcttgcggccatgct

SEQ ID NO: 825078 - DNA, 75 bp, synthetic construct
  source 1..75: mol_type = other DNA
ttcactcaagagttctcggcgtatgatgtgattgaatcaaaaataatggcttgttttcatgagactaataatccc

SEQ ID NO: 825079 - DNA, 75 bp, synthetic construct
  source 1..75: mol_type = other DNA
gccgctgtttagcaccgatttttatcgcgaaaagtggctggtagaggttgatggtagccaaattgaaatcgccct

SEQ ID NO: 825080 - DNA, 75 bp, synthetic construct
  source 1..75: mol_type = other DNA
caccacgaacccgttgctggccccgtacgtggttaaggtggtgaaaatgtggcgtaaacttggtgcgtggttgtg

SEQ ID NO: 825081 - DNA, 75 bp, synthetic construct
  source 1..75: mol_type = other DNA
gagctgtcggtgaacaaggtcagtatcaagccgggctgtggtatttcgctggccccgttcgccgatgcctacaag

SEQ ID NO: 825082 - DNA, 75 bp, synthetic construct
  source 1..75: mol_type = other DNA
acggtgagctgccggtgcttaatgatttcagtgaaaccctgatgttcacgccgccgcgctctgatgttgagaacg

SEQ ID NO: 825083 - DNA, 75 bp, synthetic construct
  source 1..75: mol_type = other DNA
ggcgtatgtcgccattggtattgtcgccagctcggatgaacatcttggattgttgcgtcagctaacgcatgtcct

SEQ ID NO: 825084 - DNA, 75 bp, synthetic construct
  source 1..75: mol_type = other DNA
attgccagccggatgttgaactggcgcgactgcgtgacgcaatggtggcgcatcaggcgctggcgctggtatttg

SEQ ID NO: 825085 - DNA, 75 bp, synthetic construct
  source 1..75: mol_type = other DNA
ccgcgcgcatgatgatcaccggcggcgacccgaaagaagaggctgaccttaagcgtgcagacagggcgatgatac

SEQ ID NO: 825086 - DNA, 75 bp, synthetic construct
  source 1..75: mol_type = other DNA
cgggaagtggagcttgtccggcagcttctgccgcagattgacgtcagggcacaggaggtttcggttgccgggtat

SEQ ID NO: 825087 - DNA, 75 bp, synthetic construct
  source 1..75: mol_type = other DNA
acccgaaaaatcagcgcccggagctgtggcacaactataacgggcagattaacaaaggcgaaagcatccgcgttt

SEQ ID NO: 825088 - DNA, 75 bp, synthetic construct
  source 1..75: mol_type = other DNA
aggcctgaaacaggcgctgaataaatacggttttgatgccgccttcggtggtgcgcgccgtgacgaagagaaatc

SEQ ID NO: 825089 - DNA, 75 bp, synthetic construct
  source 1..75: mol_type = other DNA
tccggaaggcgtggcaatggggattaatccattcgtgcacggcagcgccaaacataccgacatcatgaaaactga

SEQ ID NO: 825090 - DNA, 75 bp, synthetic construct
  source 1..75: mol_type = other DNA
gaatcttatggaaaaaaggaatattgaacgtattgataagagcttaatctctgacggttgcttgttatgtagtga

SEQ ID NO: 825091 - DNA, 75 bp, synthetic construct
  source 1..75: mol_type = other DNA
tcacactggtgcagccaaagcgcgatgaagagaagctgctgaacattacagtaactggcagaaaaaactacacac

SEQ ID NO: 825092 - DNA, 75 bp, synthetic construct
  source 1..75: mol_type = other DNA
atttttaggaaatgccggaagccatacctacgatgaagtaaaagtcaaagacattgaggatgcttttgagattat

SEQ ID NO: 825093 - DNA, 75 bp, synthetic construct
  source 1..75: mol_type = other DNA
agccacaattcaccttcccggtttcgatgctctcttgcctgatcctgctgcgtcatcatgacaacatccagcgtc

SEQ ID NO: 825094 - DNA, 75 bp, synthetic construct
  source 1..75: mol_type = other DNA
gttgtcagtgcgccacgactgcgggtaaaaaataatgcctcagcgtctttttcagtcggctctgatgtgccagta

SEQ ID NO: 825095 - DNA, 75 bp, synthetic construct
  source 1..75: mol_type = other DNA
agtgaaagcaacaagactgatattatggtgatgcttcaggtcagaaaggttgaccggagcagggcgacgccccgc

SEQ ID NO: 825096 - DNA, 75 bp, synthetic construct
  source 1..75: mol_type = other DNA
tcaggcttctctgtgggggctgtagttgccgctcaggtttacagtctggtggttccggtctggggctggcgtgcg

SEQ ID NO: 825097 - DNA, 75 bp, synthetic construct
  source 1..75: mol_type = other DNA
cttgtgttaccagggatgcttttgaagttacaaataacgtctatgacgttaaaggtgcttactttccaagagcct

SEQ ID NO: 825098 - DNA, 75 bp, synthetic construct
  source 1..75: mol_type = other DNA
ttctttgtcgttttaactaccgtgtcttccgtggctaactctttcggaatagtgtcttccctggctaaatctatc

SEQ ID NO: 825099 - DNA, 75 bp, synthetic construct
  source 1..75: mol_type = other DNA
cgggcgcaccagcggcaccgggcatcccggctggagcttctttaaccggggcggcggggtgctgacctttgatcc

SEQ ID NO: 825100 - DNA, 75 bp, synthetic construct
  source 1..75: mol_type = other DNA
agatgagttggagaatgtttcagatgaaatagtaaaactccgtaaatctatgaaaacaaaaggtaatggaattaa

SEQ ID NO: 825101 - DNA, 75 bp, synthetic construct
  source 1..75: mol_type = other DNA
ctggaaaacgaactatcacggcaccaagtgatgtgcagatttatgacaacggctacaaggtggttacaggtgagg

SEQ ID NO: 825102 - DNA, 75 bp, synthetic construct
  source 1..75: mol_type = other DNA
gctggcagcatacaatgctgaaaatgataaaacagcaaaagaccgggctaatcagttcaaatcatacgttctgga

SEQ ID NO: 825103 - DNA, 75 bp, synthetic construct
  source 1..75: mol_type = other DNA
gtcagaacgctatctcgtggtgaaacgatcttctgtgacggcaactttacaggcaaagccggacgtggccgtttt

SEQ ID NO: 825104 - DNA, 75 bp, synthetic construct
  source 1..75: mol_type = other DNA
gttttccctggcggcgtggatgtccatacacatttcaatattgatgtcggtattgcacgcagctgtgatgatttt

SEQ ID NO: 825105 - DNA, 75 bp, synthetic construct
  source 1..75: mol_type = other DNA
ggcgcgctgaccaccgtgcacccggaaaatgatgcggctatcgccagcaagcgggcggagtttattgccgcaggg

SEQ ID NO: 825106 - DNA, 75 bp, synthetic construct
  source 1..75: mol_type = other DNA
tccagcttaaccggtaaatcttttggatttcaaaaagcaagccaggtaactgatataagagacgctttacaaaaa

SEQ ID NO: 825107 - DNA, 75 bp, synthetic construct
  source 1..75: mol_type = other DNA
gaccgtcgatgcgattcattctttaggtgagcagctacaaggcgggcgtgatggtgaagatggtgttggtgagca

SEQ ID NO: 825108 - DNA, 75 bp, synthetic construct
  source 1..75: mol_type = other DNA
atatcaccaaatctgtttttggtagccttaaggatacatttttatccactgacgaaaacacgaaacaagtaaaaa

SEQ ID NO: 825109 - DNA, 75 bp, synthetic construct
  source 1..75: mol_type = other DNA
cttacggacgcaatcctgataccagcgacgcaccacaaggacgcgtaagtcgtcgcctggcccgaacagggaaag

SEQ ID NO: 825110 - DNA, 75 bp, synthetic construct
  source 1..75: mol_type = other DNA
gcgtggctgctaaagaaccgttccttgcaatgcctcctcagctaccaaccgtcacggacctcgcacgaagcggaa

SEQ ID NO: 825111 - DNA, 75 bp, synthetic construct
  source 1..75: mol_type = other DNA
cttacggacgcaatcctgaaaccagcgacgcaccacaaggacgcgtaagtcgtcgcctgtcccgaacagagaaag

SEQ ID NO: 825112 - DNA, 75 bp, synthetic construct
  source 1..75: mol_type = other DNA
aactcaacgatgatgaagtgttgcaagcattacgccgcttgcatgagtccggcgccctgaccactgtgcacccgg

SEQ ID NO: 825113 - DNA, 75 bp, synthetic construct
  source 1..75: mol_type = other DNA
gtgcctctctgtcacaggtgatggccgtgcatcgtccccggttgtttattgccgaggcgggtaactcgtttggtc

SEQ ID NO: 825114 - DNA, 75 bp, synthetic construct
  source 1..75: mol_type = other DNA
gccctattccgatccggagaacggggtgtggtggattgatgatctgccacattgtgccgtggtggtggagaagct

SEQ ID NO: 825115 - DNA, 75 bp, synthetic construct
  source 1..75: mol_type = other DNA
cgctgaccatggtgtcgatgaccaacatgatcaataacattgccgaacgtgatcagtatctggggcgtgacatcg

SEQ ID NO: 825116 - DNA, 75 bp, synthetic construct
  source 1..75: mol_type = other DNA
gcgaaaaaactgctcaatatgatcgagtggtgggagttactggtgatgccgcctgaggaggtggaacaggtcagc

SEQ ID NO: 825117 - DNA, 75 bp, synthetic construct
  source 1..75: mol_type = other DNA
cccatcgtcaatatcaccgacgaggcacatatcatcaccgtcaacccgctgctggcgcggtttctgacgaagggt

SEQ ID NO: 825118 - DNA, 75 bp, synthetic construct
  source 1..75: mol_type = other DNA
gcccgaccggcgcaggcaaatccgccaccctgaacgccaaaatcgcgcaactgatggcgctgcgtcgcccgcgcc

SEQ ID NO: 825119 - DNA, 75 bp, synthetic construct
  source 1..75: mol_type = other DNA
taccaagtccacgtcgatcacctgggcaccccgaaggcactgaccgacgtcagcggccaagtcgtttggaaggcg

SEQ ID NO: 825120 - DNA, 75 bp, synthetic construct
  source 1..75: mol_type = other DNA
cagccatagacgacaatctcagctcatcagtcaatcagtcactcggttatgacgcggttggccgcatcacctctg

SEQ ID NO: 825121 - DNA, 75 bp, synthetic construct
  source 1..75: mol_type = other DNA
ctggcgcaacttgccggaaacgccccactctatatcgtccatctgtctaacggcttaggtctggattacctgcgc

SEQ ID NO: 825122 - DNA, 75 bp, synthetic construct
  source 1..75: mol_type = other DNA
cgcccggctcagatggtgatgtggtaattatcgacccacgtcagagtcaacaaattcaacaccgccatctccacg

SEQ ID NO: 825123 - DNA, 75 bp, synthetic construct
  source 1..75: mol_type = other DNA
atgagtacgacgctgcacatcggctggtggcggaaacagatgcacagggcaaccggcgcgagcttgagctcaatg

SEQ ID NO: 825124 - DNA, 75 bp, synthetic construct
  source 1..75: mol_type = other DNA
caaaaatcacagaaccaaccaggatcactgagctcacctacgacactcatctccgggtgataagccgcaaggtca

SEQ ID NO: 825125 - DNA, 75 bp, synthetic construct
  source 1..75: mol_type = other DNA
ggcaaaggggcgaagcattttgatgttgacgccttcgatgcccgctgggcttacaccgttgatggtggtggcgta

SEQ ID NO: 825126 - DNA, 75 bp, synthetic construct
  source 1..75: mol_type = other DNA
cgtcagcagcgttttttcttccacggtcagttcaatcccaaactgtggctggctctgctgagtggtggcattaag

SEQ ID NO: 825127 - DNA, 75 bp, synthetic construct
  source 1..75: mol_type = other DNA
ccaggcagaatcaactcttcaggaacatgaaacacgaatagctcagaatgaaagcgatattgcgtcgcttgatac

SEQ ID NO: 825128 - DNA, 75 bp, synthetic construct
  source 1..75: mol_type = other DNA
gcgctaacccgatcccgatgccgtttgccgaagtctataccgggctggaaacccgcactatcgacgctcaggaac

SEQ ID NO: 825129 - DNA, 75 bp, synthetic construct
  source 1..75: mol_type = other DNA
acaacatgagtcttggggaatatgacccgtgcctcaccgactggctggggatcgctgaaatcaatcacgccctgc

SEQ ID NO: 825130 - DNA, 75 bp, synthetic construct
  source 1..75: mol_type = other DNA
gagatgaccagcggtttctacggtatgcaggcgatacacacccgcgcacatctgttgcaggccatttatgaaggt

SEQ ID NO: 825131 - DNA, 75 bp, synthetic construct
  source 1..75: mol_type = other DNA
tcattgcctggtcgcgcgtttatcttggcgtgcactggccgctggatatgctcggtggattgctggcaggtatga

SEQ ID NO: 825132 - DNA, 75 bp, synthetic construct
  source 1..75: mol_type = other DNA
ttcccaagcgaccacggtacggtgattttcacctttgcactggcatttttatgctggcatcgcctgtggtccggc

SEQ ID NO: 825133 - DNA, 75 bp, synthetic construct
  source 1..75: mol_type = other DNA
acagcacaacggcaactggtgataaaaatcgcaatcgcgctagtcgtcagcctgttagtgtcctggacgatgggg

SEQ ID NO: 825134 - DNA, 75 bp, synthetic construct
  source 1..75: mol_type = other DNA
caggctggtcagggcgcttacgatgctcaggtaaaaaacgatgaacaggacgtcgaactggcagatcacgacgca

SEQ ID NO: 825135 - DNA, 75 bp, synthetic construct
  source 1..75: mol_type = other DNA
ctcacaccggaacggggctccgcgctgttcaacgatgcgatgcagttattggcgaatgggcttggagcagcaaat

SEQ ID NO: 825136 - DNA, 75 bp, synthetic construct
  source 1..75: mol_type = other DNA
atcaaccaactggatagcgataacaaattgaatattaataatgatgatattgtcgcggttgggatgacgtatcag

SEQ ID NO: 825137 - DNA, 75 bp, synthetic construct
  source 1..75: mol_type = other DNA
tctccgcacaaggaaaaggcttgtttttgctggataaaaacaacaagccgctcggtaacgccattttgtcctcgg

SEQ ID NO: 825138 - DNA, 75 bp, synthetic construct
  source 1..75: mol_type = other DNA
tggtaatgtggctaacaaggccaacgaggccggacagggcgcttatgatgcacaggtcaggaacgatgagcagga

SEQ ID NO: 825139 - DNA, 75 bp, synthetic construct
  source 1..75: mol_type = other DNA
caagaagtcagaagttgtttactcgggcgtatcagtaaccatcccgacagcgccgaccaaccttgtcagtctgct

SEQ ID NO: 825140 - DNA, 75 bp, synthetic construct
  source 1..75: mol_type = other DNA
atggctgattcgaatctcaatgagccggtaatcattcaggctacacaactcgacacatcagtccttccgcgtaat

SEQ ID NO: 825141 - DNA, 75 bp, synthetic construct
  source 1..75: mol_type = other DNA
caggcattagaaattattgcaacacagcctcgtggagaagtacgcttacttcgtcaggtcagtgactatagcatg

SEQ ID NO: 825142 - DNA, 75 bp, synthetic construct
  source 1..75: mol_type = other DNA
gcacagttggtgatcactcaacaagaatatctgcgcttgagtatgccaccactcgcaagaaatcagaggttgttt

SEQ ID NO: 825143 - DNA, 75 bp, synthetic construct
  source 1..75: mol_type = other DNA
atggctgattcgaatctcaatgagccggtaacaattcaggctacacgactcgacacatcagtccttccacgcaat

SEQ ID NO: 825144 - DNA, 75 bp, synthetic construct
  source 1..75: mol_type = other DNA
aagtaaagttagcgattatgtagcacctaatgtttcagataaagttcttcggataattctgagttatactgatta

SEQ ID NO: 825145 - DNA, 75 bp, synthetic construct
  source 1..75: mol_type = other DNA
aaccagttggaaacggtggacccgtcatcaccacaccaccaatagccgccatcacggggcgcggagagagccaga

SEQ ID NO: 825146 - DNA, 75 bp, synthetic construct
  source 1..75: mol_type = other DNA
acgatctttatgaaaaggaatttaaaaacatagagcatggaaatagagcacgacatagcctgaaccgtgagaata

SEQ ID NO: 825147 - DNA, 75 bp, synthetic construct
  source 1..75: mol_type = other DNA
gaagcacatgagcgtccagagggctttgaagaagcctctgtcatgatggtgggcctggattgtgaacgtgttcta

SEQ ID NO: 825148 - DNA, 75 bp, synthetic construct
  source 1..75: mol_type = other DNA
ccaaatgtgtcggataaggtcgtcagaatcgttcactcttatacagattacgtcaagagagtcgtctggaaagaa

SEQ ID NO: 825149 - DNA, 75 bp, synthetic construct
  source 1..75: mol_type = other DNA
tgctgaaaccgttaggtttccatgattacaatcacctgcaaaagaattcacgtgcagtgttgtcagacagcggca

SEQ ID NO: 825150 - DNA, 75 bp, synthetic construct
  source 1..75: mol_type = other DNA
tgattctatctggcgtcagggagatgacatcaacctgtatggttccggtacgccggtgcagcagtggatgaccta

SEQ ID NO: 825151 - DNA, 75 bp, synthetic construct
  source 1..75: mol_type = other DNA
tcgactggctgatttcctcggtatcaatgtcgtcgagctggttggcgaaattcatcggtctaacatgacaaaatt

SEQ ID NO: 825152 - DNA, 75 bp, synthetic construct
  source 1..75: mol_type = other DNA
caggtacattccagaatatcactgctcaactgggtcacagaaaaaatgcagcaggcactgagaacgctggatatt

SEQ ID NO: 825153 - DNA, 75 bp, synthetic construct
  source 1..75: mol_type = other DNA
ccaagagataaaagatgcgtttcaacttgtaaattacaatggttctgcctttaggtccgcaaaaataagtgacat

SEQ ID NO: 825154 - DNA, 75 bp, synthetic construct
  source 1..75: mol_type = other DNA
acgaagccgaaatgcgctacttgcgtgaagcggggaaagaatttgcgcaggcttaccccgaccgcgccgcgatgc

SEQ ID NO: 825155 - DNA, 75 bp, synthetic construct
  source 1..75: mol_type = other DNA
ccggagaggtttcgccgacgctgttgacgcaaattgatacccggttaaatcagttgctgaatcgtgatcctaccc

SEQ ID NO: 825156 - DNA, 75 bp, synthetic construct
  source 1..75: mol_type = other DNA
atggcaagtaacgcgaattttatcagccagttcgtcatgggcggcgatccctgtacttataaggaatccggtgaa

SEQ ID NO: 825157 - DNA, 75 bp, synthetic construct
  source 1..75: mol_type = other DNA
cgttgttattgctgctattctcgctggcgaagcggaaaatgattggtgccctggttgtggacgaagcccatctta

SEQ ID NO: 825158 - DNA, 75 bp, synthetic construct
  source 1..75: mol_type = other DNA
tgaacgatactaaatacactcactacacctcttttgggcaacaactcgctgtacgtacggtgcttacgagtgaga

SEQ ID NO: 825159 - DNA, 75 bp, synthetic construct
  source 1..75: mol_type = other DNA
tgaaacatctggaaaagccgctttgtggcatccttgagtcgttctacacgcttgatggttacgccccagagttgg

SEQ ID NO: 825160 - DNA, 75 bp, synthetic construct
  source 1..75: mol_type = other DNA
aaaaccatctgcataaagttttcaacgaaaagcaggtcaataaaattaactcacgaaaagagttttttaacgtaa

SEQ ID NO: 825161 - DNA, 75 bp, synthetic construct
  source 1..75: mol_type = other DNA
ttagcgcggtactgcccgcaggtttgcctttctggtgttcgcttgccgttgatgaagaaaacgcctgctgggacg

SEQ ID NO: 825162 - DNA, 75 bp, synthetic construct
  source 1..75: mol_type = other DNA
atgaccaaattaatttggactgtttattatgttgtcctactcacaattttctgtgtggggatatttactgcaata

SEQ ID NO: 825163 - DNA, 75 bp, synthetic construct
  source 1..75: mol_type = other DNA
ggcgcagagccagctacagcgcctgtcggcgcagctggatgcactggatgagcgtaaggggagatatctgaccgg

SEQ ID NO: 825164 - DNA, 75 bp, synthetic construct
  source 1..75: mol_type = other DNA
accacgaatcacagccgcagcgccgcgctggtcagcagtattatcggctttgtaggtaatgctgccaacttactg

SEQ ID NO: 825165 - DNA, 75 bp, synthetic construct
  source 1..75: mol_type = other DNA
gatatggggattcaactttttagtcctctccggtacccgcattgccgggtcgattaacatcgtcggcacgctggc

SEQ ID NO: 825166 - DNA, 75 bp, synthetic construct
  source 1..75: mol_type = other DNA
tgaagattgttgtcggtgaatgggggaagattatgattatcttgggggtgctgatttcggtgcttaccagctggc

SEQ ID NO: 825167 - DNA, 75 bp, synthetic construct
  source 1..75: mol_type = other DNA
atgcaaaatatcacctttatcccgccaaatcctgagcagcgccgcacccttttagaggagtacggctttaagttc

SEQ ID NO: 825168 - DNA, 75 bp, synthetic construct
  source 1..75: mol_type = other DNA
ctacgtaatccgccagttattgccaaagtgaataacccatacgaaaacgccaaaaagaaaagggagagggaatcc

SEQ ID NO: 825169 - DNA, 75 bp, synthetic construct
  source 1..75: mol_type = other DNA
ctgggggcacagcgcgagtaaggccagtcaggacctaggctctattttctcacaggtaacttcaccgcttagcgt

SEQ ID NO: 825170 - DNA, 75 bp, synthetic construct
  source 1..75: mol_type = other DNA
atggtatacaatatcagatattttgctcttcaaaaaaaatatgataaaaaatttaaaaattataaaaatgcagaa

SEQ ID NO: 825171 - DNA, 75 bp, synthetic construct
  source 1..75: mol_type = other DNA
atggtatacaatatcagatattttgctcttcaaaaaaatataataaaaaattataaaaatgcagaattaatctat

SEQ ID NO: 825172 - DNA, 75 bp, synthetic construct
  source 1..75: mol_type = other DNA
ctttggaaaaagctgatgaaaagatcagattgcgcgaaaaaatcaaccaactaaaaaacgagcaaatccagatgt

SEQ ID NO: 825173 - DNA, 75 bp, synthetic construct
  source 1..75: mol_type = other DNA
cgccaaaagttgatggtgagatcaaggtctcttttgtgaattcgcctccgggtatgcgggttatggaaacgcgat

SEQ ID NO: 825174 - DNA, 75 bp, synthetic construct
  source 1..75: mol_type = other DNA
ctgtttcagaggctatcggacgaggtaagggatttgaatgggatgatttgattactaatcagccgttaaaaaaag

SEQ ID NO: 825175 - DNA, 75 bp, synthetic construct
  source 1..75: mol_type = other DNA
agctttataaactaagaaaaaattgccttgcatacattcatggacactcggctggtggaacaaacccttctttag

SEQ ID NO: 825176 - DNA, 75 bp, synthetic construct
  source 1..75: mol_type = other DNA
tccggtgcggtggggaaatacaaaacacgcgaaaaagacgtggtattgcaaatagctcgccgtctgcgctctctg

SEQ ID NO: 825177 - DNA, 75 bp, synthetic construct
  source 1..75: mol_type = other DNA
cagggtccggatttgcgaagctctgctcaataaccgccagttgcagtccactcccctgcagatccgttatccgca

SEQ ID NO: 825178 - DNA, 75 bp, synthetic construct
  source 1..75: mol_type = other DNA
accggacaaaatttttatgggacggaatgcggctggcgcaggagatcaggccggagggaataagcagcctgtata

SEQ ID NO: 825179 - DNA, 75 bp, synthetic construct
  source 1..75: mol_type = other DNA
tcttgccgtgaccgacccgctgcagcagaacacccggtatcagtatgaccgccacggtcaggtggtgcagataac

SEQ ID NO: 825180 - DNA, 75 bp, synthetic construct
  source 1..75: mol_type = other DNA
ctggagtgtgatgtatgaagtcagcctcgtgcgcacaccgggtagcgcagacgaaaactgcatgacctttgtgtc

SEQ ID NO: 825181 - DNA, 75 bp, synthetic construct
  source 1..75: mol_type = other DNA
tcagggagtgaatgcggttattggcagcatcagtaatctgttcaaaggcgatgacgagccgcccgcagcggaata

SEQ ID NO: 825182 - DNA, 75 bp, synthetic construct
  source 1..75: mol_type = other DNA
gtggggatcacgatggggtgcacagccgtcgtgctgaccggttttgtggcgggtgtggcgatggtgtacaccggc

SEQ ID NO: 825183 - DNA, 75 bp, synthetic construct
  source 1..75: mol_type = other DNA
aacggtgttgcaacctatcgtaacacagatttctttggcatggttgaaggtctaaattttgctctgcaatatcag

SEQ ID NO: 825184 - DNA, 75 bp, synthetic construct
  source 1..75: mol_type = other DNA
ttacgtccgtctttaggctacgtatattccaaaggcaaagatctttatgctcgtaatggacataaaggtgttgat

SEQ ID NO: 825185 - DNA, 75 bp, synthetic construct
  source 1..75: mol_type = other DNA
tcagtacggaagaagggcgttctgaaatggtggatggcgtgacacattttgtgtcggaactatggcagcccacgg

SEQ ID NO: 825186 - DNA, 75 bp, synthetic construct
  source 1..75: mol_type = other DNA
tactgctgcgtcgttaccgctatgacggggccggcgacctgaacggcgtgtacgacagcacggggcacctgctgc

SEQ ID NO: 825187 - DNA, 75 bp, synthetic construct
  source 1..75: mol_type = other DNA
tcagggagtgaatgcggttattggcagcatcagtaatctgttcaaaggcgatgacgaaccgcccgcggcggaata

SEQ ID NO: 825188 - DNA, 75 bp, synthetic construct
  source 1..75: mol_type = other DNA
cccttggtttaagttgttactttaattctaagtctaatcgctggcatgacaggcagacaggtcgttttacaaaac

SEQ ID NO: 825189 - DNA, 75 bp, synthetic construct
  source 1..75: mol_type = other DNA
attgccgctgaaattctcgcggcgttggatggtaccctggacgactttatcgtcgcgcgcgaaaccgaaggtcag

SEQ ID NO: 825190 - DNA, 75 bp, synthetic construct
  source 1..75: mol_type = other DNA
gagcgtattcgttctcgcctgacgcgcggtaaagtggaatgtaccctgcgctatgagccagatgttagcgcgcaa

SEQ ID NO: 825191 - DNA, 75 bp, synthetic construct
  source 1..75: mol_type = other DNA
agcccaggagcaggatctcgacgcgattgccgctgaaattctcgcggcgttggatggcaccctggatgactttat

SEQ ID NO: 825192 - DNA, 75 bp, synthetic construct
  source 1..75: mol_type = other DNA
cgtcgcccgtgaaaccgaaggtcaggcgctaaaagcgttgatcgagcagcgcctggagggcgtcactgccgaagt

SEQ ID NO: 825193 - DNA, 75 bp, synthetic construct
  source 1..75: mol_type = other DNA
gaagtgactaactccgccattgagctgaaagtgttgatcgagcagatgcgcgagcagattcagaatattgaatga

SEQ ID NO: 825194 - DNA, 75 bp, synthetic construct
  source 1..75: mol_type = other DNA
agtctatcaatgccgaagtgacaaactccgcgattgagctgaaagtgttgattgagcagatgcgcgagcagattc

SEQ ID NO: 825195 - DNA, 75 bp, synthetic construct
  source 1..75: mol_type = other DNA
ttaatgggcttattcacagacttataaatgacccgtcatatataaatcacgttgaacctattagaaaagttagaa

SEQ ID NO: 825196 - DNA, 75 bp, synthetic construct
  source 1..75: mol_type = other DNA
gcacggaagggatgttcgggcagggctggagcgtgatgtatgaagtcagcctcgagcgcacgccgggtactgctg

SEQ ID NO: 825197 - DNA, 75 bp, synthetic construct
  source 1..75: mol_type = other DNA
caggctgtgcgtgacggacggtctggggcgcacgcgttatcatcagtgggatgcgcagaaccaggtgacggcgta

SEQ ID NO: 825198 - DNA, 75 bp, synthetic construct
  source 1..75: mol_type = other DNA
gaacagcagcgtccgtgcatccgtctgtattacgaactggcggcgcatccccggcgggtgacacagatttatcag

SEQ ID NO: 825199 - DNA, 75 bp, synthetic construct
  source 1..75: mol_type = other DNA
aatagtaaagtaaaagtagatttatcaaaaataccagataatgaaattattgacgttagtaatggacaggggttg

SEQ ID NO: 825200 - DNA, 75 bp, synthetic construct
  source 1..75: mol_type = other DNA
ggggaataaataccttcagtggaacgaagacgggcagctcatgcggcacacggactgttccggctcgcagacggc

SEQ ID NO: 825201 - DNA, 75 bp, synthetic construct
  source 1..75: mol_type = other DNA
gttatccgtagactacaacattgatggttttggtattgtcggtgtttatggtaaatctgatcgtaccaatgagca

SEQ ID NO: 825202 - DNA, 75 bp, synthetic construct
  source 1..75: mol_type = other DNA
acgcgctgaatgaagtagggcaaagtgcattgtcgttacacggcgatctggagcaacgcgatcgcgatcagaccc

SEQ ID NO: 825203 - DNA, 75 bp, synthetic construct
  source 1..75: mol_type = other DNA
tatgtcgcggtgcgtcaggctgttgctcataaagcatggaaacagctacagggtgggaagattaaaggaaaaacg

SEQ ID NO: 825204 - DNA, 75 bp, synthetic construct
  source 1..75: mol_type = other DNA
cttacgtaaagtttatgattatgaggctcctaatgtttcagaaaagatagttcgtataatccattcctatactga

SEQ ID NO: 825205 - DNA, 75 bp, synthetic construct
  source 1..75: mol_type = other DNA
ggagatagtttgtttatttatcttcgtaatgttaatactctgttgcgactaaagctgtatggaagtcgaaaaaac

SEQ ID NO: 825206 - DNA, 75 bp, synthetic construct
  source 1..75: mol_type = other DNA
tactattggatcaattaactcatttaatagcattgagagagagatctttttttatattttttccatcaaaagagt

SEQ ID NO: 825207 - DNA, 75 bp, synthetic construct
  source 1..75: mol_type = other DNA
gcgataataatttttttaattatggaataaaatcaatatcatacactaacaaaaaaattcaatgcgttgatttta

SEQ ID NO: 825208 - DNA, 75 bp, synthetic construct
  source 1..75: mol_type = other DNA
ggagaaaaatacctatatttcatatggaggcggggaatcgctgttttgaccagcgagttcctgaggaaactaata

SEQ ID NO: 825209 - DNA, 75 bp, synthetic construct
  source 1..75: mol_type = other DNA
aactgcttctgaaactattggcaatttaattattaaagtagatcaggtgcttgaagaatgtaagccagatgcaat

SEQ ID NO: 825210 - DNA, 75 bp, synthetic construct
  source 1..75: mol_type = other DNA
caacgcgtaccggaagaaactaacagaaaaatagttgaccacaccgctgatatcaatatgacatatagtgatatc

SEQ ID NO: 825211 - DNA, 75 bp, synthetic construct
  source 1..75: mol_type = other DNA
cgtgaagcccatgaaagacccgaaggatttgaagaggcatctgtaatgtttacaggtatgaatattgatagaatc

SEQ ID NO: 825212 - DNA, 75 bp, synthetic construct
  source 1..75: mol_type = other DNA
ttgaatgaggtttttttctccgatttaggaattagaaaacccgattactttttgaatgctgcgggtaaaaatgcg

SEQ ID NO: 825213 - DNA, 75 bp, synthetic construct
  source 1..75: mol_type = other DNA
acgtggtgataatgatcgtgaccttcatatggttacagattatcaggcagacaatgtttcaattaaaattcttag

SEQ ID NO: 825214 - DNA, 75 bp, synthetic construct
  source 1..75: mol_type = other DNA
ctgctggatatcaatttgcccgatgaaaatggcctgatgttaacccgcgccctgcgagaacgctgtaaccggctc

SEQ ID NO: 825215 - DNA, 75 bp, synthetic construct
  source 1..75: mol_type = other DNA
cagcgtccttttgatgagcacaccgaccagctatggactgcatggttgaccagttttcagcctgctaaaagctaa

SEQ ID NO: 825216 - DNA, 75 bp, synthetic construct
  source 1..75: mol_type = other DNA
ttcgcgctataggcgctgctaacgtcgatgctgaccatatccgcgagtatctgcaatatggtgaactggatatta

SEQ ID NO: 825217 - DNA, 75 bp, synthetic construct
  source 1..75: mol_type = other DNA
ccgtaaatcaagcaaaacatttctcatttaagaatttaataaactatattactgggcttattttttgccttttat

SEQ ID NO: 825218 - DNA, 75 bp, synthetic construct
  source 1..75: mol_type = other DNA
atgatttatgtttcggtagtttctcatggtcatttcaaaatccttaaggagttaggagcagtaacaaaattaaat

SEQ ID NO: 825219 - DNA, 75 bp, synthetic construct
  source 1..75: mol_type = other DNA
agaaaaaaggatttggagagaataataatgaagttttttcctctatatcctccttaattactaaggaagattttt

SEQ ID NO: 825220 - DNA, 75 bp, synthetic construct
  source 1..75: mol_type = other DNA
ccacatcgatgagaaatacgcgcaactattgtcagaggctcaacagaagggggtagaaattctggcttataaagc

SEQ ID NO: 825221 - DNA, 75 bp, synthetic construct
  source 1..75: mol_type = other DNA
cggtagctatggcagtggtgtcttttggtgcaaatgcagctgcatctatccctcaaggacaaggtgaagtaagtt

SEQ ID NO: 825222 - DNA, 75 bp, synthetic construct
  source 1..75: mol_type = other DNA
ttcatttcactgctctggttaagaaagaccccagcggtaatgcagtaaaagaaggggtgttttctgccgtgacta

SEQ ID NO: 825223 - DNA, 75 bp, synthetic construct
  source 1..75: mol_type = other DNA
gtaaacgtgtgaagtttgatggtcagactgctaccgggacttcaaatctgattgatggtgataacacaattcatt

SEQ ID NO: 825224 - DNA, 75 bp, synthetic construct
  source 1..75: mol_type = other DNA
gcttttttgcccgtatcaatagctaatttttttggcgcaccatatgaggtaggttatctattctctgttttttgt

SEQ ID NO: 825225 - DNA, 75 bp, synthetic construct
  source 1..75: mol_type = other DNA
cgaagcgttactgcgcgatcttatcgatgattcatggaatttagtggttgatggcttatctaaacgcgatcaaaa

SEQ ID NO: 825226 - DNA, 75 bp, synthetic construct
  source 1..75: mol_type = other DNA
gcgcaagcagtgggtcagtggttaagcgccgaaactgtacagacgcaaacctatgaattatgcgatggcgtcgct

SEQ ID NO: 825227 - DNA, 75 bp, synthetic construct
  source 1..75: mol_type = other DNA
atgatcccggaaggaacacagaaaattatttacgaagcgatgccgcgcaatgaaatcggtatgccagcaggatgg

SEQ ID NO: 825228 - DNA, 75 bp, synthetic construct
  source 1..75: mol_type = other DNA
tgaatatcattcaggagattccgggggatattttcgcggcggcagcaacttacgacggtgaagtcattaccattt

SEQ ID NO: 825229 - DNA, 75 bp, synthetic construct
  source 1..75: mol_type = other DNA
acctatctggaacttgagaggctgataagcgatgccaaaccatgtagccgtcacatgatcggcatgtccatcaat

SEQ ID NO: 825230 - DNA, 75 bp, synthetic construct
  source 1..75: mol_type = other DNA
caacgccactggagcgccgactggcgcaaacctgcagcgggatttctgatctgcaggtgccgctgcgtgacttgt

SEQ ID NO: 825231 - DNA, 75 bp, synthetic construct
  source 1..75: mol_type = other DNA
atgagtgattcgcgactgctgccgaccggctcatcaccgcttgaagttgctgccgcaaaagcctgtgcggaaatt

SEQ ID NO: 825232 - DNA, 75 bp, synthetic construct
  source 1..75: mol_type = other DNA
cttcctgccttatctcgcctgggcgttctctgtggatcgctgggacgagggctggacagaaagcgtcaaacgcca

SEQ ID NO: 825233 - DNA, 75 bp, synthetic construct
  source 1..75: mol_type = other DNA
gcacgtttcgtctggatatcggcgtgcaggaccagggcatcactgaagatacctatctggaacttgagcgactga

SEQ ID NO: 825234 - DNA, 75 bp, synthetic construct
  source 1..75: mol_type = other DNA
ccgcggttgtggctgctgttactgtgggcctcggcaccctggctgtggtgttggctgctgtgctggggccgctgg

SEQ ID NO: 825235 - DNA, 75 bp, synthetic construct
  source 1..75: mol_type = other DNA
agcaacctgcgacggtgaatgcagacgggaaagtgatgataccatcgggtggttttccgtcatggggatatggct

SEQ ID NO: 825236 - DNA, 75 bp, synthetic construct
  source 1..75: mol_type = other DNA
agcaacctgcgacggtgaatgcagacggcaaagtgatgataccatcgggtggttttccctcatggggatatggct

SEQ ID NO: 825237 - DNA, 75 bp, synthetic construct
  source 1..75: mol_type = other DNA
gctgggtatcaaaacgttaccttccgttacggcagcagtaacccgaaccagcaacgcgttgtcctggctggcagg

SEQ ID NO: 825238 - DNA, 75 bp, synthetic construct
  source 1..75: mol_type = other DNA
gccagttatgcccgttcgctggaggtgcgcgatcgcatcgcaggagctggagccactaccacggctgcagggctg

SEQ ID NO: 825239 - DNA, 75 bp, synthetic construct
  source 1..75: mol_type = other DNA
cagccgctgatggatattctgtacacggtgaaaagcgtcacgggggcgttgcgtcgctgggtggaagctaacccg

SEQ ID NO: 825240 - DNA, 75 bp, synthetic construct
  source 1..75: mol_type = other DNA
atgaaatttcaggccattgtattagcaagttttcttgtcatgccttatgcgttggcagatgaccagggcggatta

SEQ ID NO: 825241 - DNA, 75 bp, synthetic construct
  source 1..75: mol_type = other DNA
aataaaccgctggatctggtgtgggatggcgaactgctggaaaaactggaagcgaaagaagggaaaccgctttcc

SEQ ID NO: 825242 - DNA, 75 bp, synthetic construct
  source 1..75: mol_type = other DNA
tttccgggcgttgcgctgctgacggaagaatacatcaactttatggccagcaatttcgaccgcctgaccgtctgg

SEQ ID NO: 825243 - DNA, 75 bp, synthetic construct
  source 1..75: mol_type = other DNA
ttgttccgctgggaacggcggcgttaaccaatccggcttttggcgctgatatctactggcgcgggcgcgtatggg

SEQ ID NO: 825244 - DNA, 75 bp, synthetic construct
  source 1..75: mol_type = other DNA
caacgcaggccaacgccgacgcggtggtgaaggtgatgctggatccgaaagaattcaacacctttgtcccgctgg

SEQ ID NO: 825245 - DNA, 75 bp, synthetic construct
  source 1..75: mol_type = other DNA
cgctggaggcatacagtattcccggcgcgctggtgcaaaaactgacagcaaaagatgtgcaggtcgaaatgactc

SEQ ID NO: 825246 - DNA, 75 bp, synthetic construct
  source 1..75: mol_type = other DNA
cagtagcctgtgctctgctgatgagcttttccgcccatgccgctaacgccgacaattataaaaacgtgattaacc

SEQ ID NO: 825247 - DNA, 75 bp, synthetic construct
  source 1..75: mol_type = other DNA
ctggttctccggcaatcagacctggccgtgggatacctggaagcaggcgtttgcgatggcgcatttcaatccgga

SEQ ID NO: 825248 - DNA, 75 bp, synthetic construct
  source 1..75: mol_type = other DNA
atgtttggtattttcaaaaagaaaacccgcaaggccattactgaagtgaagaagatggagaaccgcgacgcagtg

SEQ ID NO: 825249 - DNA, 75 bp, synthetic construct
  source 1..75: mol_type = other DNA
acgcggtaatttgatttctcacaaaggagaggaccgttacgtttttcgcgataagagcggtgaaattaatgttgt

SEQ ID NO: 825250 - DNA, 75 bp, synthetic construct
  source 1..75: mol_type = other DNA
gacctggccgtgggatacctggaagcaagcatctgcgatggcgcacttcaacccggatatcgccaaagagaatat

SEQ ID NO: 825251 - DNA, 75 bp, synthetic construct
  source 1..75: mol_type = other DNA
gtcaggacggaacgttgctgggctactcgctattgcaggagtcggtggatcaggccagctatatgtacagcgata

SEQ ID NO: 825252 - DNA, 75 bp, synthetic construct
  source 1..75: mol_type = other DNA
tgggctgaacaactacacccgcgtggtggagaaaggccagtacgacagtctggaaatcccggcacaggttgcggc

SEQ ID NO: 825253 - DNA, 75 bp, synthetic construct
  source 1..75: mol_type = other DNA
agcaacctgcgacggtgaatgcagacggtaaagtgatgattccatcgggtggttttccgtcatggggatatggct

SEQ ID NO: 825254 - DNA, 75 bp, synthetic construct
  source 1..75: mol_type = other DNA
gcgctattgctggtgctgctggtcgatagcctggtagccccgcatttctggcaggtagtgcttcaggatgggcgt

SEQ ID NO: 825255 - DNA, 75 bp, synthetic construct
  source 1..75: mol_type = other DNA
gtggttcggcagtggatcgctgctgttcctgccaacgccagtcattatcgccgtgctgacgcttctcctgttctg

SEQ ID NO: 825256 - DNA, 75 bp, synthetic construct
  source 1..75: mol_type = other DNA
atagcctggtggccccgcatttctggcaggtggtgcttcaggatgggcgtttgttcggtagccccatagacattc

SEQ ID NO: 825257 - DNA, 75 bp, synthetic construct
  source 1..75: mol_type = other DNA
aaaagcgaaacagacctggctgcacatatcgcggcagttgacccgcatacccagtacgcgacgaaagccagtccg

SEQ ID NO: 825258 - DNA, 75 bp, synthetic construct
  source 1..75: mol_type = other DNA
agtgggaagacggcatctaccagattgaggtctccgaccccgtactgggcgggcctgacggaatttctaaccgtc

SEQ ID NO: 825259 - DNA, 75 bp, synthetic construct
  source 1..75: mol_type = other DNA
cgtcgtcgaaaaggcgttttcgctggccgacgggaatgccgcaactggcggcgctattgctggtgctgctggtcg

SEQ ID NO: 825260 - DNA, 75 bp, synthetic construct
  source 1..75: mol_type = other DNA
gaacgtgcgggttggcaactggccgatgtcgatcttattgaagctaacgaagcttttgccgcgcaggcgctttcc

SEQ ID NO: 825261 - DNA, 75 bp, synthetic construct
  source 1..75: mol_type = other DNA
acagcctcgtgctgacgccagtgtagaaggattagcctgcttagatccgtcatttgatagtcacggctctgttac

SEQ ID NO: 825262 - DNA, 75 bp, synthetic construct
  source 1..75: mol_type = other DNA
ttggcaatagccagttggttgatagtctggtgcatgatgggttgtgggatgccttcaatgattatcatattggtg

SEQ ID NO: 825263 - DNA, 75 bp, synthetic construct
  source 1..75: mol_type = other DNA
gacattcttaaccgtgcggcccccgttgcgctgttggctatcggaatgacgctggtgatcgcaacaggtgggatt

SEQ ID NO: 825264 - DNA, 75 bp, synthetic construct
  source 1..75: mol_type = other DNA
ttttgttaagcgccctgggcaccggcatcctggcgggattgtggaacggcatactggtagcgatcctcaaaattc

SEQ ID NO: 825265 - DNA, 75 bp, synthetic construct
  source 1..75: mol_type = other DNA
gaaccaggtggtgaaagcggtggtggtgctttgcgtgctgattgttcagtcgcaacgctttatcagtctgattaa

SEQ ID NO: 825266 - DNA, 75 bp, synthetic construct
  source 1..75: mol_type = other DNA
cgaccaataaattaccggatttacggggcgaatttatccgtggctgggatgacggacgaggtattgatgcaggac

SEQ ID NO: 825267 - DNA, 75 bp, synthetic construct
  source 1..75: mol_type = other DNA
tgatctgctgacgcccgtaaagtcgacctctgccgaactgcagagtgcagcggcaatggggcggcgattcgggga

SEQ ID NO: 825268 - DNA, 75 bp, synthetic construct
  source 1..75: mol_type = other DNA
cagcctgggcgaaacgctgcgtcagccgctgatggatattctgtacacggtgaaaagcattacgggggcgttgcg

SEQ ID NO: 825269 - DNA, 75 bp, synthetic construct
  source 1..75: mol_type = other DNA
tgatctgctgacgcccgttaagtcgacctctgccgaactgcagagcgcagcggcaatggggcgacgattcgggga

SEQ ID NO: 825270 - DNA, 75 bp, synthetic construct
  source 1..75: mol_type = other DNA
agcaacctgcgacggtgaatgcagacggaaaagtgatgatgccatcgggtggttttccgtcatggggatatggct

SEQ ID NO: 825271 - DNA, 75 bp, synthetic construct
  source 1..75: mol_type = other DNA
agcaacctgcgacggtgaatgcagacggaaaagtgatgatcccatcgggtggttttccctcatggggatatggct

SEQ ID NO: 825272 - DNA, 75 bp, synthetic construct
  source 1..75: mol_type = other DNA
agcaacctgcgacggtgaatgcagacggaaaagtgatgataccatcgggtggttttccatcatggggatatggct

SEQ ID NO: 825273 - DNA, 75 bp, synthetic construct
  source 1..75: mol_type = other DNA
gttatcggtatggtgatgaacccgctggcggcgttgcggggtgggctgacagctgtcggtggcgtattgtgtttt

SEQ ID NO: 825274 - DNA, 75 bp, synthetic construct
  source 1..75: mol_type = other DNA
agtttggcgatgatgcggcaaagctggctaacaacctgccggagctgcagcgtcagctgaaactcacatcaggca

SEQ ID NO: 825275 - DNA, 75 bp, synthetic construct
  source 1..75: mol_type = other DNA
gtgatggcgccagcgcgacggcccgcattacccgtgaaacaatgcgttataacaggcagctttctgaacaggaag

SEQ ID NO: 825276 - DNA, 75 bp, synthetic construct
  source 1..75: mol_type = other DNA
aactgtcatctgtcactgaatacctgcctgactggatgaccggtaataatgcgtcgggtaaaacgcaggtgcagg

SEQ ID NO: 825277 - DNA, 75 bp, synthetic construct
  source 1..75: mol_type = other DNA
acggggccattgattatgccgcgctggttgaaggtggtgcacgtatgggggtgaccaatcaggccgatccttacg

SEQ ID NO: 825278 - DNA, 75 bp, synthetic construct
  source 1..75: mol_type = other DNA
aggtgattctcaatgcggttgataaaatcacccgtccatttcgatccgcgcagaccagctcaaaagagctggctg

SEQ ID NO: 825279 - DNA, 75 bp, synthetic construct
  source 1..75: mol_type = other DNA
caaagcctggaaagcccgtatcagggagggaataaaaccggagaccatgcttgatggcgtgaagcggtatgccgc

SEQ ID NO: 825280 - DNA, 75 bp, synthetic construct
  source 1..75: mol_type = other DNA
ctgtggtagatacagatccacaaatgagcctgacgaactggagcaaagcaggcaaagcagcatttgacgtattta

SEQ ID NO: 825281 - DNA, 75 bp, synthetic construct
  source 1..75: mol_type = other DNA
gcgtacattacgtcatgaacatctcaattggatgtcgacgctcaatggtctgttgcaaatgaaagagtatgatcg

SEQ ID NO: 825282 - DNA, 75 bp, synthetic construct
  source 1..75: mol_type = other DNA
gtccgatcatatgctggtgccggacttccctggcctgtcggaagacggtattaccatcacctttgatcgtgaagt

SEQ ID NO: 825283 - DNA, 75 bp, synthetic construct
  source 1..75: mol_type = other DNA
tgacgaactgaacatgctcggcgagatgatcggcgagcaggatatcgagccgctgttgcaagcagcaaacagcga

SEQ ID NO: 825284 - DNA, 75 bp, synthetic construct
  source 1..75: mol_type = other DNA
ctggtgatttgctcgctggattttgcccgtcgtagcaaacagcgcctggaacatctctgtgaagccgaatgggac

SEQ ID NO: 825285 - DNA, 75 bp, synthetic construct
  source 1..75: mol_type = other DNA
tcgggatgattgtctattttgtttggaatagagacttcaatgaaccttcccttctttttatacctttatttttca

SEQ ID NO: 825286 - DNA, 75 bp, synthetic construct
  source 1..75: mol_type = other DNA
aggcaacctgtacgaatattttttcaatgttgatggtgtacgcagcattgatacaggtacagcaatgactaaacc

SEQ ID NO: 825287 - DNA, 75 bp, synthetic construct
  source 1..75: mol_type = other DNA
ccatcacatgaggaacttattgaacaggccgaatcagagaggcaattattgattaaccaggccaacgaatacatg

SEQ ID NO: 825288 - DNA, 75 bp, synthetic construct
  source 1..75: mol_type = other DNA
cgggcagaatttttattaccgatggctggcgtgtttgtcctgctattaggcattttgatgctgttgtcctggttt

SEQ ID NO: 825289 - DNA, 75 bp, synthetic construct
  source 1..75: mol_type = other DNA
acgcgtgactacaaacggctggcgaccatcgctaacaaattacaaagagataccgattttgattatgtggtgatt

SEQ ID NO: 825290 - DNA, 75 bp, synthetic construct
  source 1..75: mol_type = other DNA
aaattttaacggcctgagcgtcattgctaatcgggaggctattcgttctggtgatgatttgctgggggcaattat

SEQ ID NO: 825291 - DNA, 75 bp, synthetic construct
  source 1..75: mol_type = other DNA
tggaaatccactccaacggtggcgaaaaagcccaggcactggcagaaagcattgaagagcaggatgacgatacca

SEQ ID NO: 825292 - DNA, 75 bp, synthetic construct
  source 1..75: mol_type = other DNA
tcattgccgccgtgtgtgcatttgctgcaaatgcgagtgctgaggaaagtaaaaacgggttttatctaaccggta

SEQ ID NO: 825293 - DNA, 75 bp, synthetic construct
  source 1..75: mol_type = other DNA
cgcccattatgccgccctcgaaacccgcttctggcagttttatccgcggatgatggcgcaggcgtcacgcaaggc

SEQ ID NO: 825294 - DNA, 75 bp, synthetic construct
  source 1..75: mol_type = other DNA
ggctgatgaaagcaaaacaggcttttatgtgaccggtaaagcaggtgcttctgttatgtcacttgcagaccagcg

SEQ ID NO: 825295 - DNA, 75 bp, synthetic construct
  source 1..75: mol_type = other DNA
agtcacggggaatgtacagcaatgtatgagtttcccaaaaaaacggacgttaaaaatatttataaagtttctgtg

SEQ ID NO: 825296 - DNA, 75 bp, synthetic construct
  source 1..75: mol_type = other DNA
attcacgataaaggaatcgttttgggtcagaagcagggggatactattgcccttgtagaggctcctggagttgat

SEQ ID NO: 825297 - DNA, 75 bp, synthetic construct
  source 1..75: mol_type = other DNA
ctttctgtttttgaaagtaattctcagttaccaggtgtttatgatgtcgatattatgcttaatggtaaacttact

SEQ ID NO: 825298 - DNA, 75 bp, synthetic construct
  source 1..75: mol_type = other DNA
gccgaagaagataccggtgcgcaggtgctgctgtgttcggaaatcggttctgaagggcgtaacttccagttcgcc

SEQ ID NO: 825299 - DNA, 75 bp, synthetic construct
  source 1..75: mol_type = other DNA
tcggtactcgcctggatactgaagaagccggcgtggccctgcgcgaagttttccttgatagcaaactggtgttca

SEQ ID NO: 825300 - DNA, 75 bp, synthetic construct
  source 1..75: mol_type = other DNA
agcgcagatcgagaaatctgcccgtgcattgattgatgcagcacgtaacgaagccgacgaaaaactgtctgccga

SEQ ID NO: 825301 - DNA, 75 bp, synthetic construct
  source 1..75: mol_type = other DNA
atgaaaaaggttattgctgtttcagcgcttgctatggcggggggatttttagccccagctctggctgatgagaat

SEQ ID NO: 825302 - DNA, 75 bp, synthetic construct
  source 1..75: mol_type = other DNA
gcgtattggtcgtctggatcgtatcggtcaggcgcacgatattcagatccacgtaccttatctggaaaaaaccgc

SEQ ID NO: 825303 - DNA, 75 bp, synthetic construct
  source 1..75: mol_type = other DNA
cgtgaaggtattcgcgcagctgtgttccacgaaggcatgtcgattatcgaacgtgaccgcgcagccgcctggttc

SEQ ID NO: 825304 - DNA, 75 bp, synthetic construct
  source 1..75: mol_type = other DNA
aaaatccgcattgctggtgaagatggttttcctgcctggggtgatattccgccgccaacgcacgatcaacttgtt

SEQ ID NO: 825305 - DNA, 75 bp, synthetic construct
  source 1..75: mol_type = other DNA
tgacgcgaaagaaatcgcggtactggaaaaaaccattgcagcacttcctgcctttgcgccgttctccggtgagat

SEQ ID NO: 825306 - DNA, 75 bp, synthetic construct
  source 1..75: mol_type = other DNA
ctcgtaaagccgttactgaagttaagaaaatggaaaaccgcgatgcggttgaggcgactgtatggggcgcttact

SEQ ID NO: 825307 - DNA, 75 bp, synthetic construct
  source 1..75: mol_type = other DNA
gcctgtgtctggatatcgctgaccaggatggtattggtccggatgaagaagcacagctcaagaaaattgctcagg

SEQ ID NO: 825308 - DNA, 75 bp, synthetic construct
  source 1..75: mol_type = other DNA
atgatctggcagcctgagttcacagataaaatactctccaggaaacccggggcggttcaccgggaaaatcttggg

SEQ ID NO: 825309 - DNA, 75 bp, synthetic construct
  source 1..75: mol_type = other DNA
gcccgttatgaagcgtcaccgcgttctgccaatgccgaagcccttcgtcagctggctgatgttgccggtactgat

SEQ ID NO: 825310 - DNA, 75 bp, synthetic construct
  source 1..75: mol_type = other DNA
gagaaaaccattgctgcacttcctgcttttgcgccgttctccggtgagattgcccagatgagcgccaatatccgc

SEQ ID NO: 825311 - DNA, 75 bp, synthetic construct
  source 1..75: mol_type = other DNA
aggatgtgggatttgtccccgacctgattgcgtggaaccttagccccgagcgtggcggcgatggcggcaactgga

SEQ ID NO: 825312 - DNA, 75 bp, synthetic construct
  source 1..75: mol_type = other DNA
ggcgagatgctgtttacggtgaaaaaaggcgacaaagaagagacgcagtctgggctgaacaactacgcccgcgtg

SEQ ID NO: 825313 - DNA, 75 bp, synthetic construct
  source 1..75: mol_type = other DNA
gtggagaaaggccagtacgacagtctggaaattccggcacaggttgccgcgtcgtgggaatcgggtcgtgatgat

SEQ ID NO: 825314 - DNA, 75 bp, synthetic construct
  source 1..75: mol_type = other DNA
attccattgcatacgctgacggcacctgtgacgcgaaagaaatcgcagtgctggagaaaaccattgcagcacttc

SEQ ID NO: 825315 - DNA, 75 bp, synthetic construct
  source 1..75: mol_type = other DNA
gtgctaatgcccaggctttacgtgagctggcggatgtggccgggactgatgatgcagtagatgtactgtgtctgt

SEQ ID NO: 825316 - DNA, 75 bp, synthetic construct
  source 1..75: mol_type = other DNA
atgtttggtattttcaaaaagaaaacccgcaaggccattaccgaagtgaagaagatggagaaccgtgacgcagtg

SEQ ID NO: 825317 - DNA, 75 bp, synthetic construct
  source 1..75: mol_type = other DNA
ttcgactatgcaaaacagtttccctcctcacgcaatctggaaaaatttggtgaggcccgacaagatttaaccata

SEQ ID NO: 825318 - DNA, 75 bp, synthetic construct
  source 1..75: mol_type = other DNA
gtgaattgtattaacgacctgaacacaggcgaggtaaaaggtggttccgttcatctggatgcgcagaccgttatg

SEQ ID NO: 825319 - DNA, 75 bp, synthetic construct
  source 1..75: mol_type = other DNA
gtgagttgtattaatgacctgaacacgggcgatatcaggggggggtccgttcatctggatgcgcagaccgttatg

SEQ ID NO: 825320 - DNA, 75 bp, synthetic construct
  source 1..75: mol_type = other DNA
tgtgtgttgctactgaaggcgatacggttgatgggcgagtgctggaacggcaatggattatcgatatgggggaaa

SEQ ID NO: 825321 - DNA, 75 bp, synthetic construct
  source 1..75: mol_type = other DNA
tgattaatcaggtcaacgaatacatatacagtaagcaatggcctggtaaagcagcgattggtcgcctgaaaggtg

SEQ ID NO: 825322 - DNA, 75 bp, synthetic construct
  source 1..75: mol_type = other DNA
gcccgttattcagcgccgatgtaatgagcgaaatgattaaagatattaccgatgcagctgaacaggccaaggcaa

SEQ ID NO: 825323 - DNA, 75 bp, synthetic construct
  source 1..75: mol_type = other DNA
cagctgacacaaacggcggatccgttcatctggacgctaaaacagtaatgcgcctcaagcagtacagaatagatc

SEQ ID NO: 825324 - DNA, 75 bp, synthetic construct
  source 1..75: mol_type = other DNA
atgaacgtgggcgatgtgcaacgtctgtcagtcgcggttgtggtgaattacaaaaccttgccagacggtaaacca

SEQ ID NO: 825325 - DNA, 75 bp, synthetic construct
  source 1..75: mol_type = other DNA
ggcagataatccgtttaaggggatctcgccattaaaggaatcaagaaccattccggatcctctttcgcgggagga

SEQ ID NO: 825326 - DNA, 75 bp, synthetic construct
  source 1..75: mol_type = other DNA
gaaagctttccggaacccccagcctagctgggggttttctgtgcacaaaaacaggcgcgttgcaggtgagctacg

SEQ ID NO: 825327 - DNA, 75 bp, synthetic construct
  source 1..75: mol_type = other DNA
atgcaaaagaaatcgtaacccgctttaacgatctgggtaataaaaacacccgtacaccggggcgtactattaaag

SEQ ID NO: 825328 - DNA, 75 bp, synthetic construct
  source 1..75: mol_type = other DNA
gtcactcaggagtacccctctcctgattttcacgtaataaacaggtcaggtggagaagcctggattgaagctgtg

SEQ ID NO: 825329 - DNA, 75 bp, synthetic construct
  source 1..75: mol_type = other DNA
gtatccgtgaaatatctgataacgatccgcgcgtggtggcgctggtcattcgccagtggataaataacgatcatg

SEQ ID NO: 825330 - DNA, 75 bp, synthetic construct
  source 1..75: mol_type = other DNA
gtgacggacagaacggtcaggacctggattggggaagcggttgcagcagccgctgctgacggtgtgacgttctct

SEQ ID NO: 825331 - DNA, 75 bp, synthetic construct
  source 1..75: mol_type = other DNA
ggattggggaagcggttgccgccgccgctgatggtgtgacgttctctgtccccgtcacgccacatacgttccgcc

SEQ ID NO: 825332 - DNA, 75 bp, synthetic construct
  source 1..75: mol_type = other DNA
ctcctgtagcaaaaccgcaggctgtaccaaacgcggtatctatcgcggagctggtatcgccgattaccggggatg

SEQ ID NO: 825333 - DNA, 75 bp, synthetic construct
  source 1..75: mol_type = other DNA
atgcccgttggcggctacaaacactccggtattggccgcgagaacggcgtgatgacgctccagagttacacccag

SEQ ID NO: 825334 - DNA, 75 bp, synthetic construct
  source 1..75: mol_type = other DNA
cacctggggcgaatcccggcagagatgcccgttggcggctacaaacactccggcattggtcgcgagaacggcgtg

SEQ ID NO: 825335 - DNA, 75 bp, synthetic construct
  source 1..75: mol_type = other DNA
tggcaatgcgtcgtgttgaagagagtgtcgttaatcaggggtggatcacgctgcaggaagcggggatcaatctcg

SEQ ID NO: 825336 - DNA, 75 bp, synthetic construct
  source 1..75: mol_type = other DNA
aatgggcgaaagatgaattcggcagtgaagcccctagcgagcgagtattaaaaaaatacgctaaaggtcagatga

SEQ ID NO: 825337 - DNA, 75 bp, synthetic construct
  source 1..75: mol_type = other DNA
cgggcaaatgagtcatgaagtccgcagagaaatttttgagcgcggtcacgccgcagtcttgctaccctttgaccc

SEQ ID NO: 825338 - DNA, 75 bp, synthetic construct
  source 1..75: mol_type = other DNA
agtacgcgatgaagttgtgctgattgagcagattcggattgccgcctatgacaccagcgaaacgccctggttatt

SEQ ID NO: 825339 - DNA, 75 bp, synthetic construct
  source 1..75: mol_type = other DNA
ctgatgcgacgcggcagcgtcgcatccaacaataaaaagcggcagggatcttctctgccgctttttttgtctgag

SEQ ID NO: 825340 - DNA, 75 bp, synthetic construct
  source 1..75: mol_type = other DNA
ggtttgcagcaatatcgacgatttcagcggccttatcattaaagctcagggccatgttgtggcgggtcaaacacc

SEQ ID NO: 825341 - DNA, 75 bp, synthetic construct
  source 1..75: mol_type = other DNA
aacaccaaccacgcattctgtctggaaaccgaaaaaggcgaggagatcgtcgtccatatgggtatcgacaccgta

SEQ ID NO: 825342 - DNA, 75 bp, synthetic construct
  source 1..75: mol_type = other DNA
agaggaaggcgcgcgcgtactgtgcggcggcgatgtactgaaaggcgatggcttcgataacggcgcatgggttgc

SEQ ID NO: 825343 - DNA, 75 bp, synthetic construct
  source 1..75: mol_type = other DNA
ggatatgtggttcaccctgaaaaaaggggagccctggagcggcatcgtgaaaaatcgccgcaaaaatggcgacca

SEQ ID NO: 825344 - DNA, 75 bp, synthetic construct
  source 1..75: mol_type = other DNA
gatgagctggggctgacattacgcgcggtagggcagcttggcctgatgtgccgttggctaattaacgatgtctca

SEQ ID NO: 825345 - DNA, 75 bp, synthetic construct
  source 1..75: mol_type = other DNA
gaaggtgtttgcgctggatgtggctgcacggcaccgggtgcagttttcgatacctgagtccgatgcggtgtctat

SEQ ID NO: 825346 - DNA, 75 bp, synthetic construct
  source 1..75: mol_type = other DNA
gaaggtgtttgcactggatgtggctgcacggcaccgggtgcagttttcgatgcctgagtccgatgcggtgtctat

SEQ ID NO: 825347 - DNA, 75 bp, synthetic construct
  source 1..75: mol_type = other DNA
ggcagattgtgcgcccgatagaaaatgttgcccatcaggcactgaaggtggcgaccggagaacgtaatagtgttg

SEQ ID NO: 825348 - DNA, 75 bp, synthetic construct
  source 1..75: mol_type = other DNA
cagatggcagcgtcggtaaaacagaactctgccacggcttcggctgccgataaactttctattaccgccagtaat

SEQ ID NO: 825349 - DNA, 75 bp, synthetic construct
  source 1..75: mol_type = other DNA
gatgtcgcttctcacttatgaatctgaggacgaagtgattcgccgcgccaatgataccgactacggcctggcggc

SEQ ID NO: 825350 - DNA, 75 bp, synthetic construct
  source 1..75: mol_type = other DNA
cggcccgctggtcagcttcccgcatcgcgataacgtgctgcgctatatcgccaaaggcaaagaggaaggcgcgcg

SEQ ID NO: 825351 - DNA, 75 bp, synthetic construct
  source 1..75: mol_type = other DNA
cgcgttgagcgcattcgcgcgggcgacgttttcgatccgcaaactaacttcggcccgctggtcagcttcccgcat

SEQ ID NO: 825352 - DNA, 75 bp, synthetic construct
  source 1..75: mol_type = other DNA
gtgacggacagaagtgtcaggatctggattggggaagcggttgccgccgctgatgctgatggtgtgacgttctct

SEQ ID NO: 825353 - DNA, 75 bp, synthetic construct
  source 1..75: mol_type = other DNA
cacgaaggtttttgcgctggatgtggctgcccggcaccgggtgcagtttgcgatgccggagtctgatgcggttgc

SEQ ID NO: 825354 - DNA, 75 bp, synthetic construct
  source 1..75: mol_type = other DNA
aagagtgcccaacaggggcaaaaaatctgggcggcgatgaccgctatggagcgctcgcgcattctgcgtcgggcc

SEQ ID NO: 825355 - DNA, 75 bp, synthetic construct
  source 1..75: mol_type = other DNA
ctggctactggagatggttgccgggatgattgaagagggtgaaagtgtggaagatgttgcccgtcgcgaagcgat

SEQ ID NO: 825356 - DNA, 75 bp, synthetic construct
  source 1..75: mol_type = other DNA
tgacggcattgatgccggtatccgttctggctggcatggtggtatataccgacagccaacatttgcctgaaaacc

SEQ ID NO: 825357 - DNA, 75 bp, synthetic construct
  source 1..75: mol_type = other DNA
ctggtcgctgggcgtgaagaaatatcctgccgtggtgtttgatgacagtgaggtggtttacggcaccactgatgt

SEQ ID NO: 825358 - DNA, 75 bp, synthetic construct
  source 1..75: mol_type = other DNA
ggcgcggcaggcacgttatcaggcatttgcccgcaccttgttgcccggtgaagtgctggttacagcgcaacatct

SEQ ID NO: 825359 - DNA, 75 bp, synthetic construct
  source 1..75: mol_type = other DNA
tgctgggaagcggcattgctaacgtgattatcgccgtcgctatcttttctattcctgcgtttgcccgactggtgc

SEQ ID NO: 825360 - DNA, 75 bp, synthetic construct
  source 1..75: mol_type = other DNA
ggagccggaggactggttgcgcgaagtgatcgagaagctcaatgactggccgtcgaaccaagtgcatgaactgct

SEQ ID NO: 825361 - DNA, 75 bp, synthetic construct
  source 1..75: mol_type = other DNA
ccgggcctgggaactgggcattaaaaaagtcccggctgtggtgtttgatgatcgcgatgtggtgtacggcaccac

SEQ ID NO: 825362 - DNA, 75 bp, synthetic construct
  source 1..75: mol_type = other DNA
gaaacttttaaacaaacttgcggaataccttcagcgtgaaggagagcggacacagtgggaggtcacatcaacggc

SEQ ID NO: 825363 - DNA, 75 bp, synthetic construct
  source 1..75: mol_type = other DNA
gcgacgtgatgacggattaccggaataccacatcataccgtcagtatttgatgaagaaatcctgtgtggcattaa

SEQ ID NO: 825364 - DNA, 75 bp, synthetic construct
  source 1..75: mol_type = other DNA
attcagcgccatgccctgagtcgttttcagccttatacctacgggaaaagcaatggggatatggataaccactat

SEQ ID NO: 825365 - DNA, 75 bp, synthetic construct
  source 1..75: mol_type = other DNA
cagcaccggagaaatggacgttgagacattcctcaaaagtgaggggataaaagttaaggcggggcagcttgtccg

SEQ ID NO: 825366 - DNA, 75 bp, synthetic construct
  source 1..75: mol_type = other DNA
gacggttcgatcattggtgaatctgaaaaaccgatcctgtttaccggaaaaagcgccgcgattaacggttattcc

SEQ ID NO: 825367 - DNA, 75 bp, synthetic construct
  source 1..75: mol_type = other DNA
ttacggtgatcctgaaatgctgaagctttcatgggatgcaaccagatacggccttacggtggaagctgcggcacg

SEQ ID NO: 825368 - DNA, 75 bp, synthetic construct
  source 1..75: mol_type = other DNA
gcactggccatttttctgaccgtgctggctttcaacttgctgggcgatggtttacgcgatgcgctggaccccaaa

SEQ ID NO: 825369 - DNA, 75 bp, synthetic construct
  source 1..75: mol_type = other DNA
tggtgttttgcaataccaaaaaagattgccaggctgtctgcgacgcgctgaatgaagtagggcaaagtgcattgt

SEQ ID NO: 825370 - DNA, 75 bp, synthetic construct
  source 1..75: mol_type = other DNA
agcggcaaaacggcggcatttggcctcgggttgttacagcaaattgatgcgtcgctgtttcagacccaggcttta

SEQ ID NO: 825371 - DNA, 75 bp, synthetic construct
  source 1..75: mol_type = other DNA
atgccttgaatgaggcagggcaaagtgctctggcgttacatggcgatctggagcagcgtgagcgggatcagactc

SEQ ID NO: 825372 - DNA, 75 bp, synthetic construct
  source 1..75: mol_type = other DNA
ttcgctgcaacatgcgccgcatatcatcgtggcaacgccgggtcgtttgctcgatcacctgcaaaaaggcactgt

SEQ ID NO: 825373 - DNA, 75 bp, synthetic construct
  source 1..75: mol_type = other DNA
tgatgaggtgatccgttttgcaccggtttctcgtcagacgcttttgttttcggcaacctggccagatgcaattgc

SEQ ID NO: 825374 - DNA, 75 bp, synthetic construct
  source 1..75: mol_type = other DNA
tgcgattagcggtcgtgtacaacgcgatcctttggcgattgaaattgattcgacagatgctttaccgcctattga

SEQ ID NO: 825375 - DNA, 75 bp, synthetic construct
  source 1..75: mol_type = other DNA
atgccgcgcttagtgttttggttccgctgattacaaaaattagtgaatttgtagctaacaaccccaattttgtgt

SEQ ID NO: 825376 - DNA, 75 bp, synthetic construct
  source 1..75: mol_type = other DNA
gcaacacgctggtgttgaaacagcaaacctttattgagtcagcacgcagtattggtgccagcgatatgaccattt

SEQ ID NO: 825377 - DNA, 75 bp, synthetic construct
  source 1..75: mol_type = other DNA
aggcggtgttaaacgccatgccactggtcaaacctgaccaggtacgtacaccgtggcatgaattctggcgacgat

SEQ ID NO: 825378 - DNA, 75 bp, synthetic construct
  source 1..75: mol_type = other DNA
ttcgttgcaacatgcgccgcatattatcgtggcaacgccgggtcgtttgctggatcacttgcaaaaaggcacggt

SEQ ID NO: 825379 - DNA, 75 bp, synthetic construct
  source 1..75: mol_type = other DNA
ttccggcgatccttgccggaaaagatgttcgcgtgcaggcgaaaaccggcagcggcaaaacggcggcttttggcc

SEQ ID NO: 825380 - DNA, 75 bp, synthetic construct
  source 1..75: mol_type = other DNA
cagccacgcgctatcgaacatctattccgcctctgttttcagctatctggcggatgatctgcgcgagctgcaaca

SEQ ID NO: 825381 - DNA, 75 bp, synthetic construct
  source 1..75: mol_type = other DNA
cctggcaccataccggacgcgccgacgggctggacgtaccgggaagtgaaagtgggatgatggtgagcgccatgt

SEQ ID NO: 825382 - DNA, 75 bp, synthetic construct
  source 1..75: mol_type = other DNA
acggctcctggttcggcctgatttacggcgaaggctggaccgtgcaggccgaccacgacggcaatgcctgggtgc

SEQ ID NO: 825383 - DNA, 75 bp, synthetic construct
  source 1..75: mol_type = other DNA
gagcattacttgctctgccgttttgctacgccttttctgtgaccgctgatgaagcacgtccggcagaacatgacg

SEQ ID NO: 825384 - DNA, 75 bp, synthetic construct
  source 1..75: mol_type = other DNA
attgagcgccgtgcttatgaaatcgcactcctatctctggaagtagaaccagatgaacgcgaagcttatgaatta

SEQ ID NO: 825385 - DNA, 75 bp, synthetic construct
  source 1..75: mol_type = other DNA
atggcatgggatatgactctcggttggatcgtctggcagcaacgagctggtatccatttttcaacaatgtcacag

SEQ ID NO: 825386 - DNA, 75 bp, synthetic construct
  source 1..75: mol_type = other DNA
ctccaccgcttacacctacgccaaacatcgccctgaccacgctgacgatgaaaccacctccttcatgcagtttgg

SEQ ID NO: 825387 - DNA, 75 bp, synthetic construct
  source 1..75: mol_type = other DNA
tctgatgaacagctggcgctgatggatgactggaacgtgcgcacccataccgccagcgggctggtggagcgcgtg

SEQ ID NO: 825388 - DNA, 75 bp, synthetic construct
  source 1..75: mol_type = other DNA
ttaaagggatatcgccattaaaggaatcaagaaccattccagatcctctttcgcgtgaggaatttatccgcctta

SEQ ID NO: 825389 - DNA, 75 bp, synthetic construct
  source 1..75: mol_type = other DNA
ctggtaagctgacgatcagagaattgattgatgccctggtgaaagataaaaattacacagcttccaagtgggagc

SEQ ID NO: 825390 - DNA, 75 bp, synthetic construct
  source 1..75: mol_type = other DNA
tcggtaagcagaagccggaaacctacaatcttgcgatccgtaagcgcatcctcgaaacgcggggcgttaaatcaa

SEQ ID NO: 825391 - DNA, 75 bp, synthetic construct
  source 1..75: mol_type = other DNA
ggaacaccgtggatccagtccgtgctgggcaggcaaaaaccagaaacttacaacctggcgatccgtaagcgcatc

SEQ ID NO: 825392 - DNA, 75 bp, synthetic construct
  source 1..75: mol_type = other DNA
catcctggctatacgcgaacgcatacaggatacaccgggcgttctgtcgattctttccttcgataccaattatga

SEQ ID NO: 825393 - DNA, 75 bp, synthetic construct
  source 1..75: mol_type = other DNA
gtccgttaaactcaggctacctcatatctctggaagtagagccagatgaacgcgaatcctatgaattatttatgg

SEQ ID NO: 825394 - DNA, 75 bp, synthetic construct
  source 1..75: mol_type = other DNA
cctgttccgtggccctcagccacaccaccaactgggtggctgaaatgtaacggtgcagcattttcttctgaaatg

SEQ ID NO: 825395 - DNA, 75 bp, synthetic construct
  source 1..75: mol_type = other DNA
gctttttcttactgtcgcagtaataaccattgctgccggatgtatttccatctacgaaaacagaactcacttatc

SEQ ID NO: 825396 - DNA, 75 bp, synthetic construct
  source 1..75: mol_type = other DNA
caggcggagtcctcagtgtcggtgcagatagacgtttatgccgggactgtgacgcaggcgcgtcagatacgtcag

SEQ ID NO: 825397 - DNA, 75 bp, synthetic construct
  source 1..75: mol_type = other DNA
taacccaaactggcaaaagcttaccccaccaataaattaccggatttacggggtgaatttattcgtggctgggat

SEQ ID NO: 825398 - DNA, 75 bp, synthetic construct
  source 1..75: mol_type = other DNA
cctgttccgtggccctcagccacacccccaacaggttggctgaaatgtaacggtgcagcattttcttctgaaatg

SEQ ID NO: 825399 - DNA, 75 bp, synthetic construct
  source 1..75: mol_type = other DNA
cctgttccgtggccctcagccacacctccaaccggctggctgaaatgtaacggtgcagcattttcttctgaaatg

SEQ ID NO: 825400 - DNA, 75 bp, synthetic construct
  source 1..75: mol_type = other DNA
gaaggcagataatccccgcaatgccttttactggcgttttgtggaaatgggaaccgtgaatatgccaccgcaccc

SEQ ID NO: 825401 - DNA, 75 bp, synthetic construct
  source 1..75: mol_type = other DNA
gtttgtgcgcccggcgtttgatgtgcgcagtgaacaggcagctcaggtggcgattgctcggatgaaccgggccat

SEQ ID NO: 825402 - DNA, 75 bp, synthetic construct
  source 1..75: mol_type = other DNA
gcgtaaagcgacgctggtcgcctcgttgctaacgatggggatttcgaccgtggtgattggtctgctgccaggcta

SEQ ID NO: 825403 - DNA, 75 bp, synthetic construct
  source 1..75: mol_type = other DNA
gcgtcggggagaaattatctcgggtgtccacattcgcggacggaacctgcgaaccggaaacagtgataacagcat

SEQ ID NO: 825404 - DNA, 75 bp, synthetic construct
  source 1..75: mol_type = other DNA
gtctgctggaagcggcagaagaagcgggaattccgctggtcgttaaccatgttggcggcatgttcggtattttct

SEQ ID NO: 825405 - DNA, 75 bp, synthetic construct
  source 1..75: mol_type = other DNA
cgtcagcgtttgaagcgggctttatgtccgtggcgcacagcatggaagatatcaataacaccatcgatgctgcac

SEQ ID NO: 825406 - DNA, 75 bp, synthetic construct
  source 1..75: mol_type = other DNA
aagggactatgatgcagcaaaaaacagtatggcggtacgtgcccttacggcaaaacagcaggaagcggcaagaac

SEQ ID NO: 825407 - DNA, 75 bp, synthetic construct
  source 1..75: mol_type = other DNA
tttttagacaagagttattggtatgtcatgttaaccagaagggaaaaagacatgctaaaacagcaagatatgaca

SEQ ID NO: 825408 - DNA, 75 bp, synthetic construct
  source 1..75: mol_type = other DNA
ctgatcccaaaattttacagaacatcggtaagatggtcactgatggtacccttttaagtctggacgatttttggt

SEQ ID NO: 825409 - DNA, 75 bp, synthetic construct
  source 1..75: mol_type = other DNA
acggaggtttaaaccctaagacaaaactttgccatcatagtaaatggattacttttctatccattgttttttgca

SEQ ID NO: 825410 - DNA, 75 bp, synthetic construct
  source 1..75: mol_type = other DNA
tgactcaatgcgaggcgaccattgcttctgcggtgtctgccgtgacggcggtctactctaccgaaacggcaatgg

SEQ ID NO: 825411 - DNA, 75 bp, synthetic construct
  source 1..75: mol_type = other DNA
cgtctttccgaaacgtttgctgtgatgaatgcgccaggaattaaagatgcttatgtcaatgggcaaaaatatcgc

SEQ ID NO: 825412 - DNA, 75 bp, synthetic construct
  source 1..75: mol_type = other DNA
atttctttgcgggcatccgcgatatcgtcggcggacgctccggggcttacgaaaaagaactgcgtaaagcacggg

SEQ ID NO: 825413 - DNA, 75 bp, synthetic construct
  source 1..75: mol_type = other DNA
gcgtactcatgacgctatcgacggcaaaccatttagcggtgccgtgccgtttggcagcgccaaaaacgatttagt

SEQ ID NO: 825414 - DNA, 75 bp, synthetic construct
  source 1..75: mol_type = other DNA
ggattggggaggcggttgcagcagctgctgctgacggtgtgacgttctctgtccctgtcacaccacatacgttcc

SEQ ID NO: 825415 - DNA, 75 bp, synthetic construct
  source 1..75: mol_type = other DNA
gaagtctacacgaaggtttttgcgctggatgtggctgcccggcaccgggtgcagtttgcgatgccggagtctgat

SEQ ID NO: 825416 - DNA, 75 bp, synthetic construct
  source 1..75: mol_type = other DNA
cgttgcctggacgaggccggctggacgctggccgacctcgacctgatcgaagccaacgaggcattcgccgtgcag

SEQ ID NO: 825417 - DNA, 75 bp, synthetic construct
  source 1..75: mol_type = other DNA
acgttggcgcattgggcggcgcactggccccaatcatcggcgcgttgatcgctcaacgtctggatctgggtactg

SEQ ID NO: 825418 - DNA, 75 bp, synthetic construct
  source 1..75: mol_type = other DNA
aatatcgtaatgacactggcggcggctactgcgctgtggttttgcttcgccggtaacctgcaaaatgccgcgatc

SEQ ID NO: 825419 - DNA, 75 bp, synthetic construct
  source 1..75: mol_type = other DNA
ctttgccgatatccatctttcccgccatgccgctgaactgaaaagcgttttctgccagccgttaggcgatcgcta

SEQ ID NO: 825420 - DNA, 75 bp, synthetic construct
  source 1..75: mol_type = other DNA
acaaccgcgatctgcgtgatttgtcgattgatctcaaccgtacccgcgagcttgcgccgaaactggggcacaacg

SEQ ID NO: 825421 - DNA, 75 bp, synthetic construct
  source 1..75: mol_type = other DNA
ccgtaatggagtggtgatatacgacggaatgacaccttatcgggaaaatcacctgatgctggatgtgtcgcaaag

SEQ ID NO: 825422 - DNA, 75 bp, synthetic construct
  source 1..75: mol_type = other DNA
ttgagttattccaataactggcggcggataagctataccctcgcggcaagccaggcgtatggcgagaatcatcat

SEQ ID NO: 825423 - DNA, 75 bp, synthetic construct
  source 1..75: mol_type = other DNA
tatgttttagacaacggccagggtggaagcgggcaacgtttcgactggtcactgttaaacggtcaatcgcttggc

SEQ ID NO: 825424 - DNA, 75 bp, synthetic construct
  source 1..75: mol_type = other DNA
tttaattctgctgtagagtctcaaccgggcattaaagatgcacgcgttttggcctcggttttccagacactgcgc

SEQ ID NO: 825425 - DNA, 75 bp, synthetic construct
  source 1..75: mol_type = other DNA
tgacggtaatcagcgaatccggcatcaatacttacgctcaggtgcgcgagttaagccacttcgctaacggttttc

SEQ ID NO: 825426 - DNA, 75 bp, synthetic construct
  source 1..75: mol_type = other DNA
ggcgcgcggttaccatctggcgcagggcaatcctgtgcgtgaaatcaaacccactaccattttgcatgttgcggc

SEQ ID NO: 825427 - DNA, 75 bp, synthetic construct
  source 1..75: mol_type = other DNA
ccgggcaacgcattgaaattgaacatttccgtaatgaggcaaacaatcaggaaccgttctggttgcacagcggaa

SEQ ID NO: 825428 - DNA, 75 bp, synthetic construct
  source 1..75: mol_type = other DNA
tggcgggttactatgatcctgtcgtcgcgcaagcctggctggagaactggcaggggctgcatcacgctattgcga

SEQ ID NO: 825429 - DNA, 75 bp, synthetic construct
  source 1..75: mol_type = other DNA
tgacccaatgcgaggcgacgattgcttctgcggtttctgccacgacggcggtctactccaccgaaacggcgatgg

SEQ ID NO: 825430 - DNA, 75 bp, synthetic construct
  source 1..75: mol_type = other DNA
tgacccaatgcgaagcgaccattgcttctgcggtttctgccgtgacggcggtctactctaccgaaacggcaatgg

SEQ ID NO: 825431 - DNA, 75 bp, synthetic construct
  source 1..75: mol_type = other DNA
gttactacgatcctgtcgtcgcgcaagcctggctggagaactggcaggggctgcgtcacgctattgcgaccgggc

SEQ ID NO: 825432 - DNA, 75 bp, synthetic construct
  source 1..75: mol_type = other DNA
ggtggaggtcttaagcgtggactctctggcgatccatgaagagcatctgcgtggtcttatcaccgagcatgtgca

SEQ ID NO: 825433 - DNA, 75 bp, synthetic construct
  source 1..75: mol_type = other DNA
aaacaagcgatgttcagagaaaccctggccctggaaagggcgggacatctgcatatccgaaaaattgcaacgctt

SEQ ID NO: 825434 - DNA, 75 bp, synthetic construct
  source 1..75: mol_type = other DNA
gaaactgaaatcattagaaccgagatggcgcaggaactggcgaaaactcgcgtattgaaagaagaaatagcgcgc

SEQ ID NO: 825435 - DNA, 75 bp, synthetic construct
  source 1..75: mol_type = other DNA
gcctcgctgcatctgcatcagtctctggggtttgtgactacggcacaaatgccgcaagtgggcactaaatttgga

SEQ ID NO: 825436 - DNA, 75 bp, synthetic construct
  source 1..75: mol_type = other DNA
gccgcaggtgggcactaaatttgggcgctggctggatctgacatttatgcagttgcaactcgacgaacgcactga

SEQ ID NO: 825437 - DNA, 75 bp, synthetic construct
  source 1..75: mol_type = other DNA
agcttaaggaatctaaccttatcctgaattcattgctgcttacccctctgggagaatctcatctggttactgtgg

SEQ ID NO: 825438 - DNA, 75 bp, synthetic construct
  source 1..75: mol_type = other DNA
gaaaaccatccgcacagtacgttgggttatcgctctccgcgagaatatcgacgtcagcgggtaacgttaacttaa

SEQ ID NO: 825439 - DNA, 75 bp, synthetic construct
  source 1..75: mol_type = other DNA
attaattcgctaggaatgcgtctggtttcgcatgccaattcggttaagacaccgtttcatttctttctgatcaac

SEQ ID NO: 825440 - DNA, 75 bp, synthetic construct
  source 1..75: mol_type = other DNA
atgttcaggcagttgaaaaaaaacctggttgcaaccctcattgctgccatgactatcggtcaggtagccccggcg

SEQ ID NO: 825441 - DNA, 75 bp, synthetic construct
  source 1..75: mol_type = other DNA
ttcttaattatgatgagttaaacgaaaaggggctggcaaaactcgtcaaagaaatcagcaaaggtggttacaaga

SEQ ID NO: 825442 - DNA, 75 bp, synthetic construct
  source 1..75: mol_type = other DNA
cacgtattgtgcagctgtacgacgggagccgatacggaaactgcgagcaggctgataacgaaggagagcttttta

SEQ ID NO: 825443 - DNA, 75 bp, synthetic construct
  source 1..75: mol_type = other DNA
tgaaggaagactacatcgcgttcatgccgaaaccgaatgtaagaacggcattgcataaccttgcagtggcgatcg

SEQ ID NO: 825444 - DNA, 75 bp, synthetic construct
  source 1..75: mol_type = other DNA
ctcagctacgctgacattgcagaaacggtggtcagccacgtcgagggggcgcgttttgcgctggtggaacgcgtg

SEQ ID NO: 825445 - DNA, 75 bp, synthetic construct
  source 1..75: mol_type = other DNA
tcgcagaactggccaccgacgctgtttaataccgcgttttacagcaataagcaggtggatgaagaccttgctcag

SEQ ID NO: 825446 - DNA, 75 bp, synthetic construct
  source 1..75: mol_type = other DNA
attaaagcccaggtgactgcgatggatgccggacagcgggcggcagaagttgaaggtaaagggcaaaaagagagc

SEQ ID NO: 825447 - DNA, 75 bp, synthetic construct
  source 1..75: mol_type = other DNA
gtggcatttgcaggatatgcaacgccagctaccggtgttgtacctccgagtattgcctacgcgcaaagttatcaa

SEQ ID NO: 825448 - DNA, 75 bp, synthetic construct
  source 1..75: mol_type = other DNA
aaaacctggccagcgagcaggccgcccgtatggtggcgatgaaaggcgcgaccgacaatggcggcagcctgatta

SEQ ID NO: 825449 - DNA, 75 bp, synthetic construct
  source 1..75: mol_type = other DNA
attaacaccatgtctcaggttccgaccatcagccaactgctgccgttaccggcgtcagaggatgatgatctgaaa

SEQ ID NO: 825450 - DNA, 75 bp, synthetic construct
  source 1..75: mol_type = other DNA
aggcggcgcaggatatcatctggcaagagtcgccgtggatcccgctggtggtagaaaaactggtgtcggcacaca

SEQ ID NO: 825451 - DNA, 75 bp, synthetic construct
  source 1..75: mol_type = other DNA
tcctggaaaaaggtctggataaacaacctgttcaggatccaaaaccagatctgttatccacgatggaacacgaaa

SEQ ID NO: 825452 - DNA, 75 bp, synthetic construct
  source 1..75: mol_type = other DNA
cgctggcacagttaattgataaacgctttattcagagccagtatgatgcggcctggcagctccgtctggacaggt

SEQ ID NO: 825453 - DNA, 75 bp, synthetic construct
  source 1..75: mol_type = other DNA
tcaaaattagctggtgttgttcaacgtcaaatagctgcatacgagggtggtgaggctaaaccacggcttcgggta

SEQ ID NO: 825454 - DNA, 75 bp, synthetic construct
  source 1..75: mol_type = other DNA
gctgccaaagatgtggttgtggcggtggggtcgaacttcaccacgctcgatccgtatgacgcgaatgacacgtta

SEQ ID NO: 825455 - DNA, 75 bp, synthetic construct
  source 1..75: mol_type = other DNA
cgctgttaggccagcaactggaagcatggatctccggagaactggtaagactcttcaatcaggggcaggaggttg

SEQ ID NO: 825456 - DNA, 75 bp, synthetic construct
  source 1..75: mol_type = other DNA
gcttgataaacccgcactgaagcctcttcctgaagccagttacagttacaccctggtgaagaaagtcagagttca

SEQ ID NO: 825457 - DNA, 75 bp, synthetic construct
  source 1..75: mol_type = other DNA
ccgatcctgaaattatcgcgctacgcgaaaaaatggccgcgcttgtgaagtcgcatgatttaccggtttttgact

SEQ ID NO: 825458 - DNA, 75 bp, synthetic construct
  source 1..75: mol_type = other DNA
caggtacgtggcagcacgcagcagcgacagggctcatcggtcacatcactgagcggcacctcagccacgcgcatc

SEQ ID NO: 825459 - DNA, 75 bp, synthetic construct
  source 1..75: mol_type = other DNA
aagaactgactctcaatgctgccgttaataatttgctaaataaagacttcagcaatgtgcatttatataatgcag

SEQ ID NO: 825460 - DNA, 75 bp, synthetic construct
  source 1..75: mol_type = other DNA
ttacacactcattcttatcgatggtatacgccagaacggtagtagtgatgttactcctaatggcttttccgccat

SEQ ID NO: 825461 - DNA, 75 bp, synthetic construct
  source 1..75: mol_type = other DNA
agcaagtgcgggcaaaagcggccgcacatggtcgcaaaattcgtttcggtattcgcctccatgtgattgtccgcg

SEQ ID NO: 825462 - DNA, 75 bp, synthetic construct
  source 1..75: mol_type = other DNA
agccagcagcatggctgctgcagaggatgtgatgattgtctcggcatccggctatgagaaaaaactgactaacgc

SEQ ID NO: 825463 - DNA, 75 bp, synthetic construct
  source 1..75: mol_type = other DNA
agatggggttgtccttgccagcacaggtgaaactttccgacagaaaagctggtcggtatttgctgaggatgagtg

SEQ ID NO: 825464 - DNA, 75 bp, synthetic construct
  source 1..75: mol_type = other DNA
cctgctgaaaaagctgcaacaacagtttggcaccgcctgcctgttcatcacccacgacttacgtcttgtagaacg

SEQ ID NO: 825465 - DNA, 75 bp, synthetic construct
  source 1..75: mol_type = other DNA
tttcccatcactatgcgcacggtggatttagcggaaaacatcaacatcaggcggtgctgaataacgtttccctga

SEQ ID NO: 825466 - DNA, 75 bp, synthetic construct
  source 1..75: mol_type = other DNA
aaaagcactctcgcgcggctgctggtaggcttagagtctccctcacaagggaatattagctggcgcggcgaatcg

SEQ ID NO: 825467 - DNA, 75 bp, synthetic construct
  source 1..75: mol_type = other DNA
attattggttccagccggggagtctcacctggttactctgggaggagaattctgggatgcgaaaatgaaggatgg

SEQ ID NO: 825468 - DNA, 75 bp, synthetic construct
  source 1..75: mol_type = other DNA
actatcggtccgtactatgtggttggccctggtattgcgatgcctcatgcgcgcccggaagagggggctaacaag

SEQ ID NO: 825469 - DNA, 75 bp, synthetic construct
  source 1..75: mol_type = other DNA
ggtcgaaccgaaactgctgattctggatgaagccgtttctaaccttgatctcgtgttacaggcgggcgtcattcg

SEQ ID NO: 825470 - DNA, 75 bp, synthetic construct
  source 1..75: mol_type = other DNA
tctctacctcacctggggcgaaccgccggaactggttaaagagaaaatcgaacaagtgcgggcgaaagctgccgc

SEQ ID NO: 825471 - DNA, 75 bp, synthetic construct
  source 1..75: mol_type = other DNA
agccagcagcatagctgctgcagaggatgtgatgattgtctcggcatccggctatgagaaaaagctgactaacgc

SEQ ID NO: 825472 - DNA, 75 bp, synthetic construct
  source 1..75: mol_type = other DNA
ggtgtccgtcagggcgggagcagtgacgtgactcccaacggtttttctgccatgaatacagggttcatgcctcct

SEQ ID NO: 825473 - DNA, 75 bp, synthetic construct
  source 1..75: mol_type = other DNA
tgaatatctgaaagcctggacggtactggatgcgggcatgtcgtggaaagtgacggatgcactgatgctgaatgc

SEQ ID NO: 825474 - DNA, 75 bp, synthetic construct
  source 1..75: mol_type = other DNA
ggtgccagaggggcagcaatttttggttaaaaagggaatgcttcgccaaagtgatattgccgggttcgatagcat

SEQ ID NO: 825475 - DNA, 75 bp, synthetic construct
  source 1..75: mol_type = other DNA
cacaagcggccattatggacttttgcaagagggagggcattccattacggcctgttggaactcagtttattggta

SEQ ID NO: 825476 - DNA, 75 bp, synthetic construct
  source 1..75: mol_type = other DNA
tgccgctgtggtcagaggatgtcacgctgtcactgaattacacctggacccgaagtgaacaacgtgatggtgata

SEQ ID NO: 825477 - DNA, 75 bp, synthetic construct
  source 1..75: mol_type = other DNA
tgctgtgaataatgtgctcaacaaggattacagtgatgtgagcctgtaccgtgccggcagcagcacactttatgc

SEQ ID NO: 825478 - DNA, 75 bp, synthetic construct
  source 1..75: mol_type = other DNA
aaacagcggaaaggcccgcttacatggtgtggaatttgccggcacattgccactgtggtcagaggatgtcactct

SEQ ID NO: 825479 - DNA, 75 bp, synthetic construct
  source 1..75: mol_type = other DNA
gggacgtgacgcctaacggtttttctgccatgaatacagggttcatgcctcctctggccgcgattgagcgtattg

SEQ ID NO: 825480 - DNA, 75 bp, synthetic construct
  source 1..75: mol_type = other DNA
catggtgtggaatttgccggcacattgccgctgtggtcagaggatgtcacgctgtcactgaattacacctggacc

SEQ ID NO: 825481 - DNA, 75 bp, synthetic construct
  source 1..75: mol_type = other DNA
tctgaagttctgccagtatggctacagcctgttggctgagtggcacaagatgtggtgttcgcatcttggagcccc

SEQ ID NO: 825482 - DNA, 75 bp, synthetic construct
  source 1..75: mol_type = other DNA
tggcgcgattctcgccgatggtaaaaccggtgacggttgcggcttgctgttacaaaaaccggatcgcttttttcg

SEQ ID NO: 825483 - DNA, 75 bp, synthetic construct
  source 1..75: mol_type = other DNA
tttgatctattatcagatgagtcaattatcaaaaaattaaagtatccggatcaagatattttaaacttaggtaat

SEQ ID NO: 825484 - DNA, 75 bp, synthetic construct
  source 1..75: mol_type = other DNA
tctgtaagggttcattgaacgagttaatagcattagagtttaaagatgaatatggggctgtggtaattgatgtag

SEQ ID NO: 825485 - DNA, 75 bp, synthetic construct
  source 1..75: mol_type = other DNA
ggtgccagttatcgctatagtggcgctggagtcggttatcaggttgccagtgtggttggcggtggatttacacct

SEQ ID NO: 825486 - DNA, 75 bp, synthetic construct
  source 1..75: mol_type = other DNA
gtggggcgagctttgaagacttccagcaggatctgctgaacctgtcgaaacgtgcctggctggcgcgtaagccca

SEQ ID NO: 825487 - DNA, 75 bp, synthetic construct
  source 1..75: mol_type = other DNA
ttctggcatatttctggcatatttctggcatatttctggcatatttctggcatatttctggcatatttctggctt

SEQ ID NO: 825488 - DNA, 75 bp, synthetic construct
  source 1..75: mol_type = other DNA
tacttcttttaatgcaggtagtaaaaggtttgtcatttatcaatcagcacaagataagaatcttcaggttgatat

SEQ ID NO: 825489 - DNA, 75 bp, synthetic construct
  source 1..75: mol_type = other DNA
cggcctgccgggtaccgtttcagtggtacgcgatacgggaggtgcagacggcacgatagaaggcgaatatgtgcg

SEQ ID NO: 825490 - DNA, 75 bp, synthetic construct
  source 1..75: mol_type = other DNA
agatactcagctactttgaaccggataaccgcgattgggtaacaggtgagattggtgcgccgccgttcgatgtgt

SEQ ID NO: 825491 - DNA, 75 bp, synthetic construct
  source 1..75: mol_type = other DNA
acataacggtgaaatcaacaccatcaccggcaaccgtcagtgggcacgcgcccgtacctataaattccagacgcc

SEQ ID NO: 825492 - DNA, 75 bp, synthetic construct
  source 1..75: mol_type = other DNA
ggcagcctgagttcacagataaaacactctccaggaaacccggggcggttcaggtgacgctgcgtgccattcagg

SEQ ID NO: 825493 - DNA, 75 bp, synthetic construct
  source 1..75: mol_type = other DNA
caggcgcggcatgaaatagaagaaaaggaacggttatcaaaaatacagcagcatctgtccttgctgaaggaagat

SEQ ID NO: 825494 - DNA, 75 bp, synthetic construct
  source 1..75: mol_type = other DNA
cgtgtcgcagcgcaaatataactatatgcgcgccgaacagatctatcgtgatgagcaaggtttaagcctgatgcc

SEQ ID NO: 825495 - DNA, 75 bp, synthetic construct
  source 1..75: mol_type = other DNA
aatcatttaagtcaggtaatggcagatttctggtgatcgggtctgagcagttaaaagattatgaatttaatatgg

SEQ ID NO: 825496 - DNA, 75 bp, synthetic construct
  source 1..75: mol_type = other DNA
gcagactccatgcctccctgatgaagcagggagataaaacctgtcttacaaaaggaacgaacaatgaacaaggtt

SEQ ID NO: 825497 - DNA, 75 bp, synthetic construct
  source 1..75: mol_type = other DNA
accacaatatccgcagatatgtttctccacgccggagaaaccacgcacaactgaaccttatgcaacataccgtgt

SEQ ID NO: 825498 - DNA, 75 bp, synthetic construct
  source 1..75: mol_type = other DNA
atttcattccccaccggtactctgggtgacctgctgggctggttcccttatgccgaacggtttcagtccctgcat

SEQ ID NO: 825499 - DNA, 75 bp, synthetic construct
  source 1..75: mol_type = other DNA
gcaggatctgctgaatctgtcgaaacgtgcctggctggcgcgcaagcccatcagccagggcggcctgctgaaata

SEQ ID NO: 825500 - DNA, 75 bp, synthetic construct
  source 1..75: mol_type = other DNA
acagggaagagtgggacgagaataaaaaatgtgtatgttttcccgctctcgtgaatggtatgcaactgacatgtg

SEQ ID NO: 825501 - DNA, 75 bp, synthetic construct
  source 1..75: mol_type = other DNA
agcgggctctcctggctggcatgggcaactcatatcccggttgtactaataagtggttttacgcttcctgtcagt

SEQ ID NO: 825502 - DNA, 75 bp, synthetic construct
  source 1..75: mol_type = other DNA
ccggcattaataacaactgtccttatgtcactgacagcaatgaaaaatactatgaagactggaaagccggacgca

SEQ ID NO: 825503 - DNA, 75 bp, synthetic construct
  source 1..75: mol_type = other DNA
cgtccggcattgataacaaccatgatgaggatggcaacatggcaaaatattatgaaaactggaaagtcggaggta

SEQ ID NO: 825504 - DNA, 75 bp, synthetic construct
  source 1..75: mol_type = other DNA
tggtttaagggtgatgttgtggaacgttatgattttcgtcatactgcaagtaagacttcacgcggtttgatggat

SEQ ID NO: 825505 - DNA, 75 bp, synthetic construct
  source 1..75: mol_type = other DNA
aaccattataatttcagctattgtaatattttctattgttataataaatttaacgaaacctatattttcaaatct

SEQ ID NO: 825506 - DNA, 75 bp, synthetic construct
  source 1..75: mol_type = other DNA
gaaatctttcccggcgcagaccataagctcgcctaccgactctgctggctcgggcactggctgattcacagccgc

SEQ ID NO: 825507 - DNA, 75 bp, synthetic construct
  source 1..75: mol_type = other DNA
gtttgcgcttattcatcagcatcactggctccccgcaacggttgagcagatgacgcctgctgagatgtctcttgc

SEQ ID NO: 825508 - DNA, 75 bp, synthetic construct
  source 1..75: mol_type = other DNA
gtcaggtgataaattcgatactgtctgggataccgtctgcgaatggggcaacgtcaccacgttagtacatactgc

SEQ ID NO: 825509 - DNA, 75 bp, synthetic construct
  source 1..75: mol_type = other DNA
tcttcgaacttggcaccagcttggttatcccggtatcagcaaagatgtgatcagtttgttggatggctggaggct

SEQ ID NO: 825510 - DNA, 75 bp, synthetic construct
  source 1..75: mol_type = other DNA
tggcttccaattagcaccatacgctcaggcctttgtcggggcacttgtcgattcagagagagacgcgcatcgagg

SEQ ID NO: 825511 - DNA, 75 bp, synthetic construct
  source 1..75: mol_type = other DNA
cgtccaatctccttatgaattccgccaactgcttgctaccgacaaactccatatccccgcagtagagataaccgg

SEQ ID NO: 825512 - DNA, 75 bp, synthetic construct
  source 1..75: mol_type = other DNA
ctgccactgctggcattcgacaaacagcctttgaataaccctcttgaaattgcattatccgaagaagcccccgcc

SEQ ID NO: 825513 - DNA, 75 bp, synthetic construct
  source 1..75: mol_type = other DNA
cgaatgattaacctagttagcaggatgcatgaccggccaatcattgagatccagtcctcgatgagcaaatacaat

SEQ ID NO: 825514 - DNA, 75 bp, synthetic construct
  source 1..75: mol_type = other DNA
tgtatggcgtgtatcgaaacccggacttcggtcgtcagttgcctgacacgctgccactgctggcattcgataagc

SEQ ID NO: 825515 - DNA, 75 bp, synthetic construct
  source 1..75: mol_type = other DNA
tctccttctaatattgcaatggatggcagattaatggattttaacggactcagttgtctgtttccgggagattcc

SEQ ID NO: 825516 - DNA, 75 bp, synthetic construct
  source 1..75: mol_type = other DNA
agtacggcttctgccaaagtgttccatgcagagcgctatggtggcagtggtattcagcgtaatggaggtggtgca

SEQ ID NO: 825517 - DNA, 75 bp, synthetic construct
  source 1..75: mol_type = other DNA
gaaaacttaaagaaattcttaggattaaatacggtgttggactcagccatcgacaaattggtcgtagtcttgcaa

SEQ ID NO: 825518 - DNA, 75 bp, synthetic construct
  source 1..75: mol_type = other DNA
cttccaattggcaccatacgctcaggcttttgtcggggtacttgtcgattcagagagggacgcgcatcgaggtaa

SEQ ID NO: 825519 - DNA, 75 bp, synthetic construct
  source 1..75: mol_type = other DNA
tctcgggattgaattgcaggaagctgaccggcagcagatccctctgtttcctgatcttgatgtgctagcgaccat

SEQ ID NO: 825520 - DNA, 75 bp, synthetic construct
  source 1..75: mol_type = other DNA
caactaaagctactcgtattgacgatatcatgttgattggatataggtcttctttggatgcggctcatgagcatg

SEQ ID NO: 825521 - DNA, 75 bp, synthetic construct
  source 1..75: mol_type = other DNA
tttaatcggcgaaatttgtctgctggaaaaaggcgtcaatacagcggtcgccaaagcacaaaatctgtttcgtca

SEQ ID NO: 825522 - DNA, 75 bp, synthetic construct
  source 1..75: mol_type = other DNA
accattggtaacgaccagaagataacggtggtgaaggggcagacggttcaggtcgggaccagaaaagaagggggc

SEQ ID NO: 825523 - DNA, 75 bp, synthetic construct
  source 1..75: mol_type = other DNA
agcatttgcagccactgaattacagctccagcaaaaacgcgttatgcagttctgtgccaacgccagtcttccatt

SEQ ID NO: 825524 - DNA, 75 bp, synthetic construct
  source 1..75: mol_type = other DNA
atgggtacaacacagcaggtcattctgaccactaccgtgacggccagcgcggcgctgacgcaacagcgctttgtc

SEQ ID NO: 825525 - DNA, 75 bp, synthetic construct
  source 1..75: mol_type = other DNA
tcaccgggcctgcgggagaggaaatcttctgtgatgaacacgggcgggtacgggtgaagtttcactgggacaggt

SEQ ID NO: 825526 - DNA, 75 bp, synthetic construct
  source 1..75: mol_type = other DNA
ttttacagacgatgacgggataccgtattcagaaatacgctacattgccttctttgaggacggtgcgcagattcg

SEQ ID NO: 825527 - DNA, 75 bp, synthetic construct
  source 1..75: mol_type = other DNA
catcgtcgggccgaaaatcagtctcaatagcggcggtagtccggggacgccggtgccggcgctgcaaccggcggt

SEQ ID NO: 825528 - DNA, 75 bp, synthetic construct
  source 1..75: mol_type = other DNA
atgatccgccacatcgttaatttcctgtatcaccgatacaaccattgcccccgtgtggggcagtggttcaccacc

SEQ ID NO: 825529 - DNA, 75 bp, synthetic construct
  source 1..75: mol_type = other DNA
tgaatgtcagaaggtgatttgtgaaccgctgggccgtaattaccgcgtcagtatgccgcttatagccttttgctc

SEQ ID NO: 825530 - DNA, 75 bp, synthetic construct
  source 1..75: mol_type = other DNA
cgtgaaacccgcgagctgatggcacagctgggcgtaacgcgtctggtggatctgattggtcgcaccgacctgctg

SEQ ID NO: 825531 - DNA, 75 bp, synthetic construct
  source 1..75: mol_type = other DNA
ttcttgcgaagcggcctggtcgccaacaggcacatcactaacctcgggatccaatccacggggtgtgggacagga

SEQ ID NO: 825532 - DNA, 75 bp, synthetic construct
  source 1..75: mol_type = other DNA
gtaaaatgcgccaaccttcccgttatggtattagccaccctgttgggagcgctgattggcgagttttgttttctg

SEQ ID NO: 825533 - DNA, 75 bp, synthetic construct
  source 1..75: mol_type = other DNA
ggtgatttgtgaaccgctgggccgtaattaccgcatcagtatgccgcttatagccttttgctccggaaaaatgtt

SEQ ID NO: 825534 - DNA, 75 bp, synthetic construct
  source 1..75: mol_type = other DNA
gagccaaactgctcttcccgccgattcaacagccgtatcctccgctttactttggcggatcgtcagatgtcgccc

SEQ ID NO: 825535 - DNA, 75 bp, synthetic construct
  source 1..75: mol_type = other DNA
aggcgtgcctgctggtgaccagtgcgcagttctatcccatgtatcaacagattcagcaggaagatgccacgcaac

SEQ ID NO: 825536 - DNA, 75 bp, synthetic construct
  source 1..75: mol_type = other DNA
ggtgccgtcttatctggagatcagaaccgatctgccgcgtaattgctcggggaaaataatcagaaagaatctgaa

SEQ ID NO: 825537 - DNA, 75 bp, synthetic construct
  source 1..75: mol_type = other DNA
tgggtaatcacacacttacatccagacggagatggtgttgtaggacgaggcggtgctggctatggtctggtgctg

SEQ ID NO: 825538 - DNA, 75 bp, synthetic construct
  source 1..75: mol_type = other DNA
aatcaacgacagcttcaagatatgcgaatggtattgatgcgcaaaaccgaacggaagccaataccagtggtaaaa

SEQ ID NO: 825539 - DNA, 75 bp, synthetic construct
  source 1..75: mol_type = other DNA
gtatatggcttatatgccacaggatataaagacgaatatttcagatgttattgaggcacacaatgccgcatttat

SEQ ID NO: 825540 - DNA, 75 bp, synthetic construct
  source 1..75: mol_type = other DNA
ggacgtttacggtcataaaacggcgctgatttgtgaatccagcggcggagtcgttaaccggtatagttatcttga

SEQ ID NO: 825541 - DNA, 75 bp, synthetic construct
  source 1..75: mol_type = other DNA
atggatatcattggcggacaacatctacgtcaaatgtgggacgatctggcggacgtttacggtcataaaacggcg

SEQ ID NO: 825542 - DNA, 75 bp, synthetic construct
  source 1..75: mol_type = other DNA
acgatcagcaacaccgcctgcgggaagtgatgttttatctcaactgtcggagcaggaaaaagacgcgttttgtga

SEQ ID NO: 825543 - DNA, 75 bp, synthetic construct
  source 1..75: mol_type = other DNA
gccggatattactccgcctggcagtgcgccctgcgtgacgatgacgtctacctgacggtaatgcctgcatttcat

SEQ ID NO: 825544 - DNA, 75 bp, synthetic construct
  source 1..75: mol_type = other DNA
tggagctcgaaaatatcatcgccacccatccaaaaattcaggatatcgtggttgtgggtattatgaagccatcaa

SEQ ID NO: 825545 - DNA, 75 bp, synthetic construct
  source 1..75: mol_type = other DNA
gcccgcgccttctggggacaggtacagaagtatcgtgccaccgtcaccgaatgtattccgatgatgatccgcacc

SEQ ID NO: 825546 - DNA, 75 bp, synthetic construct
  source 1..75: mol_type = other DNA
cgctggctggacctcggtatcgttcgttttcagccgtcggaaattgccaaaatagccgtaccactgatggtagcg

SEQ ID NO: 825547 - DNA, 75 bp, synthetic construct
  source 1..75: mol_type = other DNA
tcatatattgatgactggttgtgccggttttcctcaataatgtatcaccgttttgatgaaaagcagattaagtgg

SEQ ID NO: 825548 - DNA, 75 bp, synthetic construct
  source 1..75: mol_type = other DNA
gccacattatgtttcagcaggcggggctgattgccgtcacgctgttcatctttggctactccatgtggacgacca

SEQ ID NO: 825549 - DNA, 75 bp, synthetic construct
  source 1..75: mol_type = other DNA
aagggcgggaaaagcgcgatggcagtgcgctgggcgatcgcctgaattactgggatgtgaaaatgagtattcagt

SEQ ID NO: 825550 - DNA, 75 bp, synthetic construct
  source 1..75: mol_type = other DNA
actggcgtttggcgcaggtgcattacgcgcggcagtagcgtcttatgtgcagtctccgcgctattaccgtgcgtt

SEQ ID NO: 825551 - DNA, 75 bp, synthetic construct
  source 1..75: mol_type = other DNA
cgcgctcagacacagattgaagaagcctatcggcagattgaagctcagtttactgccgagaaaatgcaacagtta

SEQ ID NO: 825552 - DNA, 75 bp, synthetic construct
  source 1..75: mol_type = other DNA
caagaatgctggacatgggcatcctgctggaaatggaatcatttttgaaaacacatggtagtgtgtcccggtgca

SEQ ID NO: 825553 - DNA, 75 bp, synthetic construct
  source 1..75: mol_type = other DNA
cggcgccatctctaaaggcgctcaacgttggttagatctcggtatcgttcgttttcaaccctctgaaatcgccaa

SEQ ID NO: 825554 - DNA, 75 bp, synthetic construct
  source 1..75: mol_type = other DNA
ggtcagatcgcaatgggtctggtcattatggtggtaatggcgcaaatccctccgcgcgtttatgagggctgggcg

SEQ ID NO: 825555 - DNA, 75 bp, synthetic construct
  source 1..75: mol_type = other DNA
tggtgccatctctaaaggtgctcaacgctggctggatctcggtatcgtccgttttcagccgtcggaaattgccaa

SEQ ID NO: 825556 - DNA, 75 bp, synthetic construct
  source 1..75: mol_type = other DNA
aagtgcgcagaaaaaatctgcgcagactgcacaaaagcggaacgaaaaatctcaggaaaaaaagccagtattcga

SEQ ID NO: 825557 - DNA, 75 bp, synthetic construct
  source 1..75: mol_type = other DNA
atagtctgcgataataatgattattttttatacaatcttattttttctggggggcgtgttaaatgcatatgtgct

SEQ ID NO: 825558 - DNA, 75 bp, synthetic construct
  source 1..75: mol_type = other DNA
tggcgccatctccaaaggtgctcaacgctggctggatctcggtatcgttcgtttccagccgtcggaaattgccaa

SEQ ID NO: 825559 - DNA, 75 bp, synthetic construct
  source 1..75: mol_type = other DNA
cgatcgccgctgcaatatgatcaaacgcggtggcgagaatgtctcctgcgtggagctggaaaatatcatcgccac

SEQ ID NO: 825560 - DNA, 75 bp, synthetic construct
  source 1..75: mol_type = other DNA
agcataaaagttactggaatcgtgaagaacacacgatagaagaaattcgcgcaaagtacggtacgaccggacagc

SEQ ID NO: 825561 - DNA, 75 bp, synthetic construct
  source 1..75: mol_type = other DNA
gatgttaacggtgaaactaaaacctggaccggtcagggccgtacaccgaagccaatcgctcaggcgctggcagaa

SEQ ID NO: 825562 - DNA, 75 bp, synthetic construct
  source 1..75: mol_type = other DNA
gcacctggctggagctgatgaaagctgacggaattaacccggaagagttattgggtaatagctctgctgctgcac

SEQ ID NO: 825563 - DNA, 75 bp, synthetic construct
  source 1..75: mol_type = other DNA
agcctcacaggatcgctatggctttaaagatttcaaacttaagggcggcgtgttacctggcgagcaagaaatcga

SEQ ID NO: 825564 - DNA, 75 bp, synthetic construct
  source 1..75: mol_type = other DNA
tgtctatgaagttattggtaattgggtctggattagcggagaaactaaagaacacaaagacattttaaaggaaat

SEQ ID NO: 825565 - DNA, 75 bp, synthetic construct
  source 1..75: mol_type = other DNA
agaacacacgatagaagaaattcgcgcaaagtacggtacgaccggacagcgcaaggcgacagggtggcaacgcgt

SEQ ID NO: 825566 - DNA, 75 bp, synthetic construct
  source 1..75: mol_type = other DNA
ggctggaagaagcacccggcaagctcttcgaactgccggaagtcctggcaaccgcgggaagccacacgctgaatg

SEQ ID NO: 825567 - DNA, 75 bp, synthetic construct
  source 1..75: mol_type = other DNA
tataggctggattttcagtagcaaggcaaacagcaatgaacagcgtattatgtatattttgcttacagcacatat

SEQ ID NO: 825568 - DNA, 75 bp, synthetic construct
  source 1..75: mol_type = other DNA
aaaattaccgtcacagatggcatcagaccctgatgattccgataatcagtcttatgacttttttccgccagagcc

SEQ ID NO: 825569 - DNA, 75 bp, synthetic construct
  source 1..75: mol_type = other DNA
ctgggggaggttcacgatatgttgtacgataaatcccttgagagggataactgtggtttcggcctgatcgcccat

SEQ ID NO: 825570 - DNA, 75 bp, synthetic construct
  source 1..75: mol_type = other DNA
aaacgcatcccggttatcgaagctctgttacgacatcccggtgctttcctgaagattattgcgctacgactgtgc

SEQ ID NO: 825571 - DNA, 75 bp, synthetic construct
  source 1..75: mol_type = other DNA
tattcaacccagaatatggggttaccgcgcgaacttttccttaatattggtttgctggtaggtggattaagctgc

SEQ ID NO: 825572 - DNA, 75 bp, synthetic construct
  source 1..75: mol_type = other DNA
cttctccggacgtgaagtgatggcggaatttcgacgggcgaccggcttgcccgtcgcgactaacatgatcgccac

SEQ ID NO: 825573 - DNA, 75 bp, synthetic construct
  source 1..75: mol_type = other DNA
gagcagtttcagaacccctgaaatttcagggagatgtcatggatagggtggacagttgcagccactgcattaggg

SEQ ID NO: 825574 - DNA, 75 bp, synthetic construct
  source 1..75: mol_type = other DNA
tactcaacgcaggccatgagtgaaaactacgcggcgatgtctttgcaagttgtggagcaggacatttgtcgcgcc

SEQ ID NO: 825575 - DNA, 75 bp, synthetic construct
  source 1..75: mol_type = other DNA
gtagaagaagcgtatcgctatattcgcagcggcgtgttgaaacactatccgtcggttctgcattcggaggatgcc

SEQ ID NO: 825576 - DNA, 75 bp, synthetic construct
  source 1..75: mol_type = other DNA
tggtcgggcggggttttgctacgaagcggagatccgcgacgatcacaatcgcccgctcccggcaggtgagatcgg

SEQ ID NO: 825577 - DNA, 75 bp, synthetic construct
  source 1..75: mol_type = other DNA
gtgatgaagccatcaaagcgtttgtggtgctgaatgaaggcgaaacattgagcgaagaagaatttttctgcttct

SEQ ID NO: 825578 - DNA, 75 bp, synthetic construct
  source 1..75: mol_type = other DNA
ctccagtatcagattgccgtcaccgaagcggcccacaatgtggttctgcttcatctgctaaggtgtatggagccg

SEQ ID NO: 825579 - DNA, 75 bp, synthetic construct
  source 1..75: mol_type = other DNA
tttgcctggtggcggaagggcaggctcagctctacccgcgttttgggccaaccaatatttgggacaccgctgccg

SEQ ID NO: 825580 - DNA, 75 bp, synthetic construct
  source 1..75: mol_type = other DNA
gtcacgcagttgcggcagcggccggagcgcacgttcacgactggcagggtaaaccgctggattataccccgcgcg

SEQ ID NO: 825581 - DNA, 75 bp, synthetic construct
  source 1..75: mol_type = other DNA
cgtctgaccaaaaatccactggagattaaaaacggaaaaattgccgttcctgatgcgcccggtctgggcgtggaa

SEQ ID NO: 825582 - DNA, 75 bp, synthetic construct
  source 1..75: mol_type = other DNA
gatgatgagaccatcgctaaagcacaagccgcgtttgcccgcaccgattccgtggggcaacagcgaatggcggcg

SEQ ID NO: 825583 - DNA, 75 bp, synthetic construct
  source 1..75: mol_type = other DNA
cacctaccgttgccgcccgccaggccgccacgcttgaccgtctctctaacggacgtgcgttgtttaacctggtca

SEQ ID NO: 825584 - DNA, 75 bp, synthetic construct
  source 1..75: mol_type = other DNA
gatcgcttatttgttgatgggaacattaatggctggtgaatggctggtgcgccgtcaggtgatgaaaagagatcg

SEQ ID NO: 825585 - DNA, 75 bp, synthetic construct
  source 1..75: mol_type = other DNA
gccatttcactggtcgtggtgttcctcgccctcgccgcactctatgagagctggtcaattccgttctcggtgatg

SEQ ID NO: 825586 - DNA, 75 bp, synthetic construct
  source 1..75: mol_type = other DNA
gcctactcgtctaccgaatggacctatggttcaccgcgattggaacgctacaacggcatcccgtcaatggagatt

SEQ ID NO: 825587 - DNA, 75 bp, synthetic construct
  source 1..75: mol_type = other DNA
cgcggtggctgaactgggtaccgcgtcaggttttgatatggaactgctggacaacggtaacctggggcacgaaaa

SEQ ID NO: 825588 - DNA, 75 bp, synthetic construct
  source 1..75: mol_type = other DNA
tgagcggcgcaaccggggaaatttatcgccagttctccattacgctgatctcctctatgttgctttcggtgtttg

SEQ ID NO: 825589 - DNA, 75 bp, synthetic construct
  source 1..75: mol_type = other DNA
ggctgtcatatcaggaagcgttatcgtccaaccaggcgcctgcgctgtatgccatttcactggtcgtcgtgttcc

SEQ ID NO: 825590 - DNA, 75 bp, synthetic construct
  source 1..75: mol_type = other DNA
tgtttgccgcaacagtgctggcaatttacttcgttccggtctttttcgttgtagtggaacatctctttgcccgct

SEQ ID NO: 825591 - DNA, 75 bp, synthetic construct
  source 1..75: mol_type = other DNA
tggcggttgtggtggttgcagcaacggttgtagtggtggaaacggtggcagcggcggaagtggttcacatatctg

SEQ ID NO: 825592 - DNA, 75 bp, synthetic construct
  source 1..75: mol_type = other DNA
tgatatttacctgaaccacaaatacacgctggaagacctgatggtggctgatgacccctatatggtgattttttc

SEQ ID NO: 825593 - DNA, 75 bp, synthetic construct
  source 1..75: mol_type = other DNA
aggtgcgtgaatttctgaccaccctgcgtattggtaaacagcagctgctctggccggtgcagagtgataacacgc

SEQ ID NO: 825594 - DNA, 75 bp, synthetic construct
  source 1..75: mol_type = other DNA
aaagataatgttcagtcggtgtttaccgttggcggctttggcttcagcggccaggggcaaaacaacggcctggcg

SEQ ID NO: 825595 - DNA, 75 bp, synthetic construct
  source 1..75: mol_type = other DNA
tgcagaatttccgtgccacaatcatcccgacgattgccgtaccggtggttattctcgggacgtttgcgatcttgt

SEQ ID NO: 825596 - DNA, 75 bp, synthetic construct
  source 1..75: mol_type = other DNA
cgcaagggtatcaaaacgctctattacatccgcctgcgtcagatggcgctggaaggcactgaaattgaaggctgc

SEQ ID NO: 825597 - DNA, 75 bp, synthetic construct
  source 1..75: mol_type = other DNA
gcgcgtgatagcggaagataaactgccgccgcaggaagcgacgcataaatcgatggggcaaatccagcgtgcgtt

SEQ ID NO: 825598 - DNA, 75 bp, synthetic construct
  source 1..75: mol_type = other DNA
gacatttctaagtcggctagagctgtttatgaaaaactgactaactgggttgaaaaggaaaaagaacgtgagcga

SEQ ID NO: 825599 - DNA, 75 bp, synthetic construct
  source 1..75: mol_type = other DNA
aacgcttgttacgtctaattttgagcattttaaatcacgctacaacccacaacgaacagcaattatcaaattgtt

SEQ ID NO: 825600 - DNA, 75 bp, synthetic construct
  source 1..75: mol_type = other DNA
gttgaagcttggttacagcccgaagggctgcttggaaaaataatagacctagatgatgtatcgacacgcattcta

SEQ ID NO: 825601 - DNA, 75 bp, synthetic construct
  source 1..75: mol_type = other DNA
atttatttcaaaggggcaggggcagcggtattaccatcttagccatcatgatgacttcattttgatggaaataag

SEQ ID NO: 825602 - DNA, 75 bp, synthetic construct
  source 1..75: mol_type = other DNA
gctacggatacactaggtcttgcgctacgaacaatcggaatatccgctgcaatccagaggttccaaagagatcac

SEQ ID NO: 825603 - DNA, 75 bp, synthetic construct
  source 1..75: mol_type = other DNA
tttatgaaaaactgactaactgggttgaaaaggaaaaagaacgtgagcgattggaagatgaggcattggaacaac

SEQ ID NO: 825604 - DNA, 75 bp, synthetic construct
  source 1..75: mol_type = other DNA
gtaccggtgacgcaatgaaatttatggcggatctggtcgctaaacttccggcgggcgtcggctactcctggaccg

SEQ ID NO: 825605 - DNA, 75 bp, synthetic construct
  source 1..75: mol_type = other DNA
acaacggcaacctggggcacgaaaagctgacccaggcgagaaacgagttgttgtcgctggcagcacaatcacccg

SEQ ID NO: 825606 - DNA, 75 bp, synthetic construct
  source 1..75: mol_type = other DNA
ccggaaggtggtcacaaaccgaacgccttgttcgaacgcttcaaccatctgtttgaaaaatcgactcagcactat

SEQ ID NO: 825607 - DNA, 75 bp, synthetic construct
  source 1..75: mol_type = other DNA
cagacgagcctctggtatgtgccgccggaatgtcggtttgtggcggaacgctgaccggtgtttatttcggggatt

SEQ ID NO: 825608 - DNA, 75 bp, synthetic construct
  source 1..75: mol_type = other DNA
cagatgaacctcttgtgtgtgccgccggaatgccgctctgtggcggaacgctgaccggtgtttatttcggggatt

SEQ ID NO: 825609 - DNA, 75 bp, synthetic construct
  source 1..75: mol_type = other DNA
gccatttcactggtcgtggtgttcctcgccctcgccgcgctgtatgaaagctggtcaattccgttctcggtgatg

SEQ ID NO: 825610 - DNA, 75 bp, synthetic construct
  source 1..75: mol_type = other DNA
gaaaggcacaaagcggagctgcgtaaacacatttatccttatattgggaaaatggcgctcgctgactgcgaaacc

SEQ ID NO: 825611 - DNA, 75 bp, synthetic construct
  source 1..75: mol_type = other DNA
ggtcgaccctcgctacttcaaacaagatgcgggcgtagggcaatggattgatctaatggcgcgtatggaaggccc

SEQ ID NO: 825612 - DNA, 75 bp, synthetic construct
  source 1..75: mol_type = other DNA
cgccgcacgacgtggcattcattgtcggctcatgctcgactccgccggtagtgtggctttctttcgcagtccatg

SEQ ID NO: 825613 - DNA, 75 bp, synthetic construct
  source 1..75: mol_type = other DNA
gttggttggccattctgggatactggttgctcattgcaggcgtaacattacgcattctaatgaaacgacgcgcag

SEQ ID NO: 825614 - DNA, 75 bp, synthetic construct
  source 1..75: mol_type = other DNA
gttcaggacaaagcgtccgctatgtttcgtctcggcataaatgaagaaatggcgacaacgttagcggcactgact

SEQ ID NO: 825615 - DNA, 75 bp, synthetic construct
  source 1..75: mol_type = other DNA
actcatctaccttcagtgaaccaggaagagtttaaattaattttatctgaagttgatgtcggcctgttctccctt

SEQ ID NO: 825616 - DNA, 75 bp, synthetic construct
  source 1..75: mol_type = other DNA
aatgcttaatgctggttccccaatagaacgctactttcgtctttttgaaaaaatatcttatcgtcaggcaaatcg

SEQ ID NO: 825617 - DNA, 75 bp, synthetic construct
  source 1..75: mol_type = other DNA
gaagaacaggttatcggagcgcttctcggaagtcgggctggtcctgaatgcagggaaaacgaatatcgcctacat

SEQ ID NO: 825618 - DNA, 75 bp, synthetic construct
  source 1..75: mol_type = other DNA
tcgaagcttcagctcagaaagccgttaaaggtctctgggtagatcctaatcccgttgctccttgggagtggcgcc

SEQ ID NO: 825619 - DNA, 75 bp, synthetic construct
  source 1..75: mol_type = other DNA
ttcaaccgggaaaaaacccaaccgcttaaagttgagatacctgacgacctgatacaggatatcgccatcagagaa

SEQ ID NO: 825620 - DNA, 75 bp, synthetic construct
  source 1..75: mol_type = other DNA
ggaattattgcctatcttgccgttggcgagctccatttaggcaaacgccgcgctgagcgcgccagagcgatgtgg

SEQ ID NO: 825621 - DNA, 75 bp, synthetic construct
  source 1..75: mol_type = other DNA
tgatgaggttggatatgttagcacatcatattttatccgtaactttaaaagttattttggtataacgccaaaaca

SEQ ID NO: 825622 - DNA, 75 bp, synthetic construct
  source 1..75: mol_type = other DNA
actaatttataacattacttatttgttatctaaagttgatgatattgaatctttggtttgctcattatctgtttc

SEQ ID NO: 825623 - DNA, 75 bp, synthetic construct
  source 1..75: mol_type = other DNA
cggcatcatgctatctacgcgtttgttgaatgatgttaatcagcccgaagaagtgctacgtaaaaaaagggcctg

SEQ ID NO: 825624 - DNA, 75 bp, synthetic construct
  source 1..75: mol_type = other DNA
gagcctcaaagaggcccgttcctcgcgtgataaatgccgccagtggctggcctcaggtaaagacccaaagcacca

SEQ ID NO: 825625 - DNA, 75 bp, synthetic construct
  source 1..75: mol_type = other DNA
ggaggtgccattagcgggcttacgtctcaatgttgatattttgcagttacaggaactgttgatggacattggcga

SEQ ID NO: 825626 - DNA, 75 bp, synthetic construct
  source 1..75: mol_type = other DNA
tccgccacgttatcagaagagattttatgcgcggcagagcggttactggatgtgatggagcgaccgctggatgcg

SEQ ID NO: 825627 - DNA, 75 bp, synthetic construct
  source 1..75: mol_type = other DNA
gaacggcacaaagcggagctgcgaaaatacatttatccttatatagggaaaatggcgctcgctgactgtgaaaca

SEQ ID NO: 825628 - DNA, 75 bp, synthetic construct
  source 1..75: mol_type = other DNA
tctagcacttgcttcatgccttactacaccaggctactgacaatcttaatggtgtttgggtgccgaacgcaggag

SEQ ID NO: 825629 - DNA, 75 bp, synthetic construct
  source 1..75: mol_type = other DNA
tgcagaagagaatcgcgcgaatgttgagcggcataaagcggagctacgcaaacatatttacccttacattggaaa

SEQ ID NO: 825630 - DNA, 75 bp, synthetic construct
  source 1..75: mol_type = other DNA
agcagcctatggcaaagcttcagcgatccgctggtggagctgctctccgaccatcctgaatcacagtatgacttg

SEQ ID NO: 825631 - DNA, 75 bp, synthetic construct
  source 1..75: mol_type = other DNA
aggatatgtgcacgttaatggatatgatgcagaattattgcaatcagctataaaattagctacggaagagaaatt

SEQ ID NO: 825632 - DNA, 75 bp, synthetic construct
  source 1..75: mol_type = other DNA
tgctgaaacacatttatgacatcaacttgtcatatttactacttgcacagcgtttgattgttcaggacaaagcgt

SEQ ID NO: 825633 - DNA, 75 bp, synthetic construct
  source 1..75: mol_type = other DNA
cctcgccgttgcagtatttgaagaattaccgtctgcataaggcgcggatgatgatcatccacgacggcatgaagg

SEQ ID NO: 825634 - DNA, 75 bp, synthetic construct
  source 1..75: mol_type = other DNA
aaaaaatatttagatggagttgaaatttggtattttaaaaaccctcgggttaaagatgttggaaaaataaagcgt

SEQ ID NO: 825635 - DNA, 75 bp, synthetic construct
  source 1..75: mol_type = other DNA
caaaactctccgatgtgattgagcagcaactggagtttttgatcctcgaaggcacactccgcccgggcgaaaaac

SEQ ID NO: 825636 - DNA, 75 bp, synthetic construct
  source 1..75: mol_type = other DNA
ttattactccgccagagaaaccgactcagtccggacctgagggtatccgatatgattttaatgatggggcgcgtg

SEQ ID NO: 825637 - DNA, 75 bp, synthetic construct
  source 1..75: mol_type = other DNA
gcaatggtgggcagattttctggatgcaaacaggaaggagtgtatcagtccgtttgaatatgcaaaagttaacaa

SEQ ID NO: 825638 - DNA, 75 bp, synthetic construct
  source 1..75: mol_type = other DNA
ctcgcagttatgctgaatttactggtttttattcgttccagtgaactcagatatgcccgttggtctgaaattgat

SEQ ID NO: 825639 - DNA, 75 bp, synthetic construct
  source 1..75: mol_type = other DNA
ctagccgttatgctgaatttactggtttttattcgttccagtgaactcagatatgcccgttggtctgaaattgat

SEQ ID NO: 825640 - DNA, 75 bp, synthetic construct
  source 1..75: mol_type = other DNA
ctgatcgaatcaggtttgtggtcccgcgatgctgtggaacgtcagatgagccatcaggaacgtaacggtgtacgc

SEQ ID NO: 825641 - DNA, 75 bp, synthetic construct
  source 1..75: mol_type = other DNA
ggagcgtaatggtgtacgtgctgcgtatatccataaagcagaacatctggaagaacgtcgactgatgctacagtg

SEQ ID NO: 825642 - DNA, 75 bp, synthetic construct
  source 1..75: mol_type = other DNA
ccatgtggactattccagccgaacgcgaacctctgccaggcgtaaaattttcataccggggctccaagatgcgaa

SEQ ID NO: 825643 - DNA, 75 bp, synthetic construct
  source 1..75: mol_type = other DNA
gcattgaccacggtaaaacgccagcatcgcccagctcttgatctttcccgcctgcctgaacttttgtcgcgtatt

SEQ ID NO: 825644 - DNA, 75 bp, synthetic construct
  source 1..75: mol_type = other DNA
gcattgaccacggtaaaacgccagcatcgcccagctcttgatctttctcgcctgcctgaacttctgtcgcgtatt

SEQ ID NO: 825645 - DNA, 75 bp, synthetic construct
  source 1..75: mol_type = other DNA
cgataaagtactcaaaagcctcgagactcacgttttcccctttatcggcaaccgggatatcacaacactcaatac

SEQ ID NO: 825646 - DNA, 75 bp, synthetic construct
  source 1..75: mol_type = other DNA
ctagctgttatgctgaatttactggtttttattcgttccagtgaactcagatacgcccgttggtctgaaattgat

SEQ ID NO: 825647 - DNA, 75 bp, synthetic construct
  source 1..75: mol_type = other DNA
gcattgaccacggtaaaacgccagcatcgccccgctcttgatctttctcgcctgcctgaacttatgtcgcgtatt

SEQ ID NO: 825648 - DNA, 75 bp, synthetic construct
  source 1..75: mol_type = other DNA
gcattgaccacggtaaaacgccagcatcgccccgctcttgatctttcacgcctgcctgaacttttgtcgcgtatt

SEQ ID NO: 825649 - DNA, 75 bp, synthetic construct
  source 1..75: mol_type = other DNA
gtgagttgcgtttcgctcgctgggatgaattcgacttcgataaatctctttggcgtataccggcaaaacgagaag

SEQ ID NO: 825650 - DNA, 75 bp, synthetic construct
  source 1..75: mol_type = other DNA
taaaccaatcagtgaaaatactgtaaataaagccctgagggtgatggggtatgacacaacccaggaagtctgtgg

SEQ ID NO: 825651 - DNA, 75 bp, synthetic construct
  source 1..75: mol_type = other DNA
gttcgtgctgcagaagcaaaacaaatttatgaaatcgccagtcgtctgcagcaaagaatatctgctgtaatgcgt

SEQ ID NO: 825652 - DNA, 75 bp, synthetic construct
  source 1..75: mol_type = other DNA
tatgacagacgttgccaacttgaagatcaactggaatatcagacgttaaaagcgcgtgccgaagctggtgcgaag

SEQ ID NO: 825653 - DNA, 75 bp, synthetic construct
  source 1..75: mol_type = other DNA
cggagcagtggagatcgtactggtggcaaattcggtaattgatatcgccgtcggttcgccgttctctattccgca

SEQ ID NO: 825654 - DNA, 75 bp, synthetic construct
  source 1..75: mol_type = other DNA
ttagcgtggcagcgatcaattcgctaatgaagcaagttgcgctgcgagccgactttgattttctgactcaggttt

SEQ ID NO: 825655 - DNA, 75 bp, synthetic construct
  source 1..75: mol_type = other DNA
aatggtgtaatggcaggggtatttgcccgctatgtctggcttaatcgtctgcattactatgctatctgttacgtg

SEQ ID NO: 825656 - DNA, 75 bp, synthetic construct
  source 1..75: mol_type = other DNA
cgccccgctcttgacctttcacgcctgcctgaacttctgtcgcgtattggcagttataaggggcagtctgtcacc

SEQ ID NO: 825657 - DNA, 75 bp, synthetic construct
  source 1..75: mol_type = other DNA
ttgatattgacaatgccatgtggactattccagccgaacgcgaacctctgccaggcgtaaaattctcacaccggg

SEQ ID NO: 825658 - DNA, 75 bp, synthetic construct
  source 1..75: mol_type = other DNA
catatcgttccgcttagtcggcaggcgatgattttgttagagctgcttaagcagattagtggtgataaagagcta

SEQ ID NO: 825659 - DNA, 75 bp, synthetic construct
  source 1..75: mol_type = other DNA
atgaatatgatgatctcatatcaggaacttgttcgcaccttccctaataaaatctttacgcattccctacctatg

SEQ ID NO: 825660 - DNA, 75 bp, synthetic construct
  source 1..75: mol_type = other DNA
ccgctggtcaatgccgccacgcataacaaccccgaattgcatgtattaagccatgcctggtttaaggcattaccg

SEQ ID NO: 825661 - DNA, 75 bp, synthetic construct
  source 1..75: mol_type = other DNA
ccagtacacctccggcagcacccgttttccccgtggcgtcattatcacccatcgcgaagtgatggctaatctacg

SEQ ID NO: 825662 - DNA, 75 bp, synthetic construct
  source 1..75: mol_type = other DNA
cagtggcttgagatataagcttttttacccgctacgtcgcctggcgcaaaagcgagtcggctgtgtatttgccac

SEQ ID NO: 825663 - DNA, 75 bp, synthetic construct
  source 1..75: mol_type = other DNA
ccattcttggctgcatgattgcgcaaaacctcactggttcgattctcaccacgctggccgtcaactggccgatcg

SEQ ID NO: 825664 - DNA, 75 bp, synthetic construct
  source 1..75: mol_type = other DNA
cgctgaagcggttaaccagcagatcgtctggttcccgccagtgagcattaatctcctgcttacgattttgctcgc

SEQ ID NO: 825665 - DNA, 75 bp, synthetic construct
  source 1..75: mol_type = other DNA
actcgccagcgctattgtgggctggttattggtgcgctatagctcactgcccggaaatactggcgcatggggctc

SEQ ID NO: 825666 - DNA, 75 bp, synthetic construct
  source 1..75: mol_type = other DNA
tacgctggtattgcacttttctttgtggctgcggtactgactctgtggtctatgttgcaatatttgagcgcagct

SEQ ID NO: 825667 - DNA, 75 bp, synthetic construct
  source 1..75: mol_type = other DNA
acgcagcagcgtggccgtatcctggatcggtaaagttaaaactactgctcaaatggtagcgttggcctggctgtt

SEQ ID NO: 825668 - DNA, 75 bp, synthetic construct
  source 1..75: mol_type = other DNA
ttcccacctgtcagtattcatctcttgtataccatcttgctcgcagtgatagccgggacaatgggatgcctgcta

SEQ ID NO: 825669 - DNA, 75 bp, synthetic construct
  source 1..75: mol_type = other DNA
cgctccgcttttctcgccgcgcaagccattcttggctgcatgattgcgcaaaacctcaccggttctattctcacc

SEQ ID NO: 825670 - DNA, 75 bp, synthetic construct
  source 1..75: mol_type = other DNA
acgctggccgccaactggccgatcgtgcttgctattttactggtgacgctgctttccagcgccatcgtgggttgg

SEQ ID NO: 825671 - DNA, 75 bp, synthetic construct
  source 1..75: mol_type = other DNA
aaaacgggccaccgtattaaagaagagcttttctacccttctaacgaagaaaaaatgcgtttgctgcaaacgctg

SEQ ID NO: 825672 - DNA, 75 bp, synthetic construct
  source 1..75: mol_type = other DNA
tgcttacgattttgctcgcagtcgttgccggtacggcgggatgcttgctacgtcttccttccggcacgatgctca

SEQ ID NO: 825673 - DNA, 75 bp, synthetic construct
  source 1..75: mol_type = other DNA
tgctctgctggctatttgtgcaggtatggcgtggggactgacccggtttatgcatattgattttatgactgccta

SEQ ID NO: 825674 - DNA, 75 bp, synthetic construct
  source 1..75: mol_type = other DNA
ttctcctggcggcgcggcggcaatggtcgctatggcgcaagattacggcgcagatattcgcctggtggcgtttat

SEQ ID NO: 825675 - DNA, 75 bp, synthetic construct
  source 1..75: mol_type = other DNA
acgtttactgttgcactggcggcaaaggccctgttaacggaactctcatcaacccttgattcgcttttcgccgaa

SEQ ID NO: 825676 - DNA, 75 bp, synthetic construct
  source 1..75: mol_type = other DNA
taattttggttttacctatggaaagtttgtctgcaacgattctctgattgggcaaacctcagccattaatatggc

SEQ ID NO: 825677 - DNA, 75 bp, synthetic construct
  source 1..75: mol_type = other DNA
tatgccgctctgggtaacgccggaatgaatttttatgacaggcgtagccagcttgaagatgaactggaatatcac

SEQ ID NO: 825678 - DNA, 75 bp, synthetic construct
  source 1..75: mol_type = other DNA
gttttaagccacgcctggtttaaggcattaccggaagccgatgttgcgctccagcgtccagttccgaacgatatc

SEQ ID NO: 825679 - DNA, 75 bp, synthetic construct
  source 1..75: mol_type = other DNA
gggatgcacttttgcgatatcattgatgttacgagcttccataccgatccagaaaaccaatttgaagacatcatg

SEQ ID NO: 825680 - DNA, 75 bp, synthetic construct
  source 1..75: mol_type = other DNA
cgcactcggacgcgtgagatatttgagtttgagtacgataaaaaggcgcttgcagatccttcacttaatttcatt

SEQ ID NO: 825681 - DNA, 75 bp, synthetic construct
  source 1..75: mol_type = other DNA
ttacagtatccacgtagtaaaccacgattctattctgaaaaaaaacatctcctattgataattttacgtgcgttc

SEQ ID NO: 825682 - DNA, 75 bp, synthetic construct
  source 1..75: mol_type = other DNA
tcttgaccgttgcaacgaaatattaggcgcgcgactcaacaccattcataaccttcgttactaccagcgtttgat

SEQ ID NO: 825683 - DNA, 75 bp, synthetic construct
  source 1..75: mol_type = other DNA
ggccgatcctcaccgactccggcggcttccaggtcttcagccttggcgatattcgtaaaatcaccgaacagggcg

SEQ ID NO: 825684 - DNA, 75 bp, synthetic construct
  source 1..75: mol_type = other DNA
gatttatcgccggatcagtggcggattgtcattctgatgggattagtattgacgccgatgatgctgtatcacaaa

SEQ ID NO: 825685 - DNA, 75 bp, synthetic construct
  source 1..75: mol_type = other DNA
gtgtgaatgaaaaagatctcgctgaactggatctctcctgctggcgcgtcgccggtattggcgctgagccaatct

SEQ ID NO: 825686 - DNA, 75 bp, synthetic construct
  source 1..75: mol_type = other DNA
gtgttaagccatgcctggtttaaatccttgccggaagccgacgttacgctccagcatcccgttccagacgatatc

SEQ ID NO: 825687 - DNA, 75 bp, synthetic construct
  source 1..75: mol_type = other DNA
caacgaaatattaggcgcgcgactcaacaccattcataaccttcgttactaccagcgtttgatggcgggtttacg

SEQ ID NO: 825688 - DNA, 75 bp, synthetic construct
  source 1..75: mol_type = other DNA
taaacagcagcaacaaatgagttcgtcagagcgcgaaagcgaactggccgctgaaaatgtccgccttaaacgaca

SEQ ID NO: 825689 - DNA, 75 bp, synthetic construct
  source 1..75: mol_type = other DNA
atgacaaaaacagtctcaaccagtaaaaaaccccgtaaacagcattcgcctgaatttcgcagtgaagccctgaaa

SEQ ID NO: 825690 - DNA, 75 bp, synthetic construct
  source 1..75: mol_type = other DNA
gtcattgataataaaatagagtctatttaccatttagactggccccctgaatctccagacaaccagggtaatgct

SEQ ID NO: 825691 - DNA, 75 bp, synthetic construct
  source 1..75: mol_type = other DNA
gtgaaaaacaatgcacagctgttgatgccgcgcgaaaaaatgctgaagtttggcattggtgcgttaacggatgtt

SEQ ID NO: 825692 - DNA, 75 bp, synthetic construct
  source 1..75: mol_type = other DNA
aatttttacaaagccagcttacgggcgaggagcgggagatctttatggtgatctttctcgactcacaacaccggg

SEQ ID NO: 825693 - DNA, 75 bp, synthetic construct
  source 1..75: mol_type = other DNA
tgaatctcagctctatgcgtggcgcagcaaactgcagcaacagatgacctcgtctgagcgtaaaagtgaactggc

SEQ ID NO: 825694 - DNA, 75 bp, synthetic construct
  source 1..75: mol_type = other DNA
cggcaatcacaacgcaactaacggacaggttgcctcgtcatctcttacctgtagctcgtgtcccacgcattgagc

SEQ ID NO: 825695 - DNA, 75 bp, synthetic construct
  source 1..75: mol_type = other DNA
accggaacatcacaacactcaataccccggacctgcttatccctgttcgtgctgcagaagctaaacaaatttatg

SEQ ID NO: 825696 - DNA, 75 bp, synthetic construct
  source 1..75: mol_type = other DNA
aatccggcttatggtcaagagatgcggttgaacgtcagatgagtcatcaggagcgcaacggagtacgtgccgcgt

SEQ ID NO: 825697 - DNA, 75 bp, synthetic construct
  source 1..75: mol_type = other DNA
tattatcatcaaccgttgcaggctcccgaaattattgcgctttatgatcaaggcgatgagcaggcaagggcgcat

SEQ ID NO: 825698 - DNA, 75 bp, synthetic construct
  source 1..75: mol_type = other DNA
atcgcgggtgagtttggtcatatgcgtttgcctgttgatgcattaacgttgatggggctggattttccgttacgc

SEQ ID NO: 825699 - DNA, 75 bp, synthetic construct
  source 1..75: mol_type = other DNA
cgctgcggctgtggtcagcatggctgcattgaaaattatctgtctggtcgcggttttgcgtggctgtatcaacac

SEQ ID NO: 825700 - DNA, 75 bp, synthetic construct
  source 1..75: mol_type = other DNA
tggcgcagtaaacagcaaaatcagcagacgtcttctgaacgtgaactggagatgtctaccgagattgcacgtttc

SEQ ID NO: 825701 - DNA, 75 bp, synthetic construct
  source 1..75: mol_type = other DNA
tcatggagtgatgtatcgatatcgtatcagggctgatgaaaatttttatagtcttgctccatctgtttcatattt

SEQ ID NO: 825702 - DNA, 75 bp, synthetic construct
  source 1..75: mol_type = other DNA
gcgattcgcattaacccgaatcgcagcggtgaagagacggtgctgcggattttgcgtgagagtattgccagtatt

SEQ ID NO: 825703 - DNA, 75 bp, synthetic construct
  source 1..75: mol_type = other DNA
gcggcgctggtgcagcatacgcgccagcagccgcaggacagctacgtgctggcagatgtgctggcaacgttgcgc

SEQ ID NO: 825704 - DNA, 75 bp, synthetic construct
  source 1..75: mol_type = other DNA
cgcaataacgatggtcgtttatttgtccatctttttatttggactcatcctgattcagatcactgtgatggggta

SEQ ID NO: 825705 - DNA, 75 bp, synthetic construct
  source 1..75: mol_type = other DNA
aaattgctgcatctgcattaggtatggctgaatcatcaagtgctgctgtaaatagacaaggtggtggtggttatg

SEQ ID NO: 825706 - DNA, 75 bp, synthetic construct
  source 1..75: mol_type = other DNA
cacttatgtgcttcaaacgcgccggggcggatggaatactgacttattttgccaatacagtagcccagttgctta

SEQ ID NO: 825707 - DNA, 75 bp, synthetic construct
  source 1..75: mol_type = other DNA
tattggcatggtgatgctgctggggatcgcgataactcacgacctgcgtcatcgtgatgaaaatgacatcgatgc

SEQ ID NO: 825708 - DNA, 75 bp, synthetic construct
  source 1..75: mol_type = other DNA
agctgctgaccgcgctgccggtggatgtattaggtagcctgggggaattaagctcgccggtggtttcagcttttg

SEQ ID NO: 825709 - DNA, 75 bp, synthetic construct
  source 1..75: mol_type = other DNA
agccctgaagcttgctgaacgcatcggtgttactgccgcagcccgtgaactcagcctgtatgaatcacagctcta

SEQ ID NO: 825710 - DNA, 75 bp, synthetic construct
  source 1..75: mol_type = other DNA
tgcatgacgcgcctgtttacccgacgacacgggttattattgagcagatggggctgacgcttattactgttgatt

SEQ ID NO: 825711 - DNA, 75 bp, synthetic construct
  source 1..75: mol_type = other DNA
ctgggccgtccggtacagaaaatggcggcaccggtcgtggcagtaatgatcaccggcatcctgctgaatgttctt

SEQ ID NO: 825712 - DNA, 75 bp, synthetic construct
  source 1..75: mol_type = other DNA
tgccagcatgaagatttttgctggtagtgaagtgtcgatcttcaccctggagaaagcatattccgcaggcgttac

SEQ ID NO: 825713 - DNA, 75 bp, synthetic construct
  source 1..75: mol_type = other DNA
ctggcggttatgctgaatttactggtttttattcgttccagtgaactcagataagcccgctggtctgaaattgat

SEQ ID NO: 825714 - DNA, 75 bp, synthetic construct
  source 1..75: mol_type = other DNA
ctggtcggaaattgatattgacaattccatgtggactattccagccgaacgcgaacctctgccaggcgtaaaatt

SEQ ID NO: 825715 - DNA, 75 bp, synthetic construct
  source 1..75: mol_type = other DNA
atttatgaaatcgccagtcgtctgcagcaaagaatatctgctgtaatgcgttacgccgtacagtctggcatcatc

SEQ ID NO: 825716 - DNA, 75 bp, synthetic construct
  source 1..75: mol_type = other DNA
tccgggcgatggcatgtagtgcgttaatagaatcaggtttgtggtcccgcgatgcagttgaacgtcagatgagcc

SEQ ID NO: 825717 - DNA, 75 bp, synthetic construct
  source 1..75: mol_type = other DNA
gcagattttctggatgcaaacagggaggagtgtatcagtccgtttgaatatgcaaaagttaacaatccactgaaa

SEQ ID NO: 825718 - DNA, 75 bp, synthetic construct
  source 1..75: mol_type = other DNA
aacgtcagatgagtcatcaggagcgtaatggtgtacgtgctgcttacattcataaagcagaacatctgggagaac

SEQ ID NO: 825719 - DNA, 75 bp, synthetic construct
  source 1..75: mol_type = other DNA
gcgaacctctgccaggcgtaaaattctcacaccggggatccaagatgcgaacaccacatcttgtgccactcagca

SEQ ID NO: 825720 - DNA, 75 bp, synthetic construct
  source 1..75: mol_type = other DNA
gcaggtgaaaatggtctgatatttacgggtgcacatgacccgcgtaaaccaatcagtgaaaatactgtaaataaa

SEQ ID NO: 825721 - DNA, 75 bp, synthetic construct
  source 1..75: mol_type = other DNA
tggcagttatgctgaatttactggtttttattcgttccagtgaactcagatatgcccgctggtcggaaattgata

SEQ ID NO: 825722 - DNA, 75 bp, synthetic construct
  source 1..75: mol_type = other DNA
gtgatggggtatgacacaaccaaggaagtctgtggccatggattccgggcgatggcgtgcagtgcattgattgaa

SEQ ID NO: 825723 - DNA, 75 bp, synthetic construct
  source 1..75: mol_type = other DNA
cagattttctggatgcaaacagggaggagtgtatcagtccgtttgaatatgcaaaagttaacaatccactgaaaa

SEQ ID NO: 825724 - DNA, 75 bp, synthetic construct
  source 1..75: mol_type = other DNA
ggatatggctggcgcattgactacggtaaaacgccagcatcgccccgctcttgatctttctcgcctgcctgaact

SEQ ID NO: 825725 - DNA, 75 bp, synthetic construct
  source 1..75: mol_type = other DNA
tccaagatgcgaacaccacatcttgtgccactcagcaaacaggctgtagccatactggcagaactacagacatgg

SEQ ID NO: 825726 - DNA, 75 bp, synthetic construct
  source 1..75: mol_type = other DNA
agtaataaacaatgggcacaatcacacagcgataaagtactcaaaagcctcgagactcacgttttcccctttatc

SEQ ID NO: 825727 - DNA, 75 bp, synthetic construct
  source 1..75: mol_type = other DNA
tgtaaataaggccctgagggtgatggggtatgacacaacccaggaagtctgtggccatggattccgggcgatggc

SEQ ID NO: 825728 - DNA, 75 bp, synthetic construct
  source 1..75: mol_type = other DNA
gcatggttttagaactatggcgcgtggtgcgctaagtgagtcgaaactatggaatgatgatgccattgaaagaca

SEQ ID NO: 825729 - DNA, 75 bp, synthetic construct
  source 1..75: mol_type = other DNA
agaatcaggtttgtggtcccgcgatgcagttgaacgtcagatgagccatcaggaacgtaacggtgtacgtgctgc

SEQ ID NO: 825730 - DNA, 75 bp, synthetic construct
  source 1..75: mol_type = other DNA
ctagcagttatgctgaatttactggtttttattcgttccagtgaactcagataagcccggtggtctgaaattgat

SEQ ID NO: 825731 - DNA, 75 bp, synthetic construct
  source 1..75: mol_type = other DNA
gcattgaccacggtaaaacgccagcatcgccctgctctcgatctttcgcgcctgcctgaacttttgtcgcgtatt

SEQ ID NO: 825732 - DNA, 75 bp, synthetic construct
  source 1..75: mol_type = other DNA
gcattgaccacggtaaaacgccagcatcgccctgctctcgatctttctcgcctgcctgaacttgtgtcgcgtatt

SEQ ID NO: 825733 - DNA, 75 bp, synthetic construct
  source 1..75: mol_type = other DNA
catcgccccgctctggatctttcacgcctgcctgaacttctgtcgcgtattgacggttataaaggccagcctgtc

SEQ ID NO: 825734 - DNA, 75 bp, synthetic construct
  source 1..75: mol_type = other DNA
ccctgatttacaactctcttttgaacatattgcacgacgctggcatgccagtaataaacaatgggcacaatcaca

SEQ ID NO: 825735 - DNA, 75 bp, synthetic construct
  source 1..75: mol_type = other DNA
ttgactacggtaaaacgccagcatcgccccgctcttgatctttctcgcctgcctgaacttttgtcgcgtattggc

SEQ ID NO: 825736 - DNA, 75 bp, synthetic construct
  source 1..75: mol_type = other DNA
tgcctgaacttctgtcgcgtattgacggttataaaggtcagcctgtcacccgactggcagttatgctgaatttac

SEQ ID NO: 825737 - DNA, 75 bp, synthetic construct
  source 1..75: mol_type = other DNA
caggtttgtggtcccgcgatgcagtggaacgtcagatgagtcatcaggagcgtaatggtgtacgtgctgcgtata

SEQ ID NO: 825738 - DNA, 75 bp, synthetic construct
  source 1..75: mol_type = other DNA
gcagtgcattgattgaatccggcttatggtcaagagatgcggttgaacgtcagatgagtcatcaggagcgcaacg

SEQ ID NO: 825739 - DNA, 75 bp, synthetic construct
  source 1..75: mol_type = other DNA
ttctataccatctcaggtcatgaacgatccaaacttcaggcgtatgtactatgttcgatatgctgatgacttcgt

SEQ ID NO: 825740 - DNA, 75 bp, synthetic construct
  source 1..75: mol_type = other DNA
caaaaaactacgccgtcgggatgctcttcctgaataaagatcctgaactcgccgctgccgcacgccgcatcgttg

SEQ ID NO: 825741 - DNA, 75 bp, synthetic construct
  source 1..75: mol_type = other DNA
cgaaggctggaaccgtccgattggtcgacatgatcccaccgcacatgcagaaatcatggccctacggcagggcgg

SEQ ID NO: 825742 - DNA, 75 bp, synthetic construct
  source 1..75: mol_type = other DNA
gctgatgaagctggtcgataaatggctatcccgccagtttaacggaccggaagaagaagacgaaaaaccatgggt

SEQ ID NO: 825743 - DNA, 75 bp, synthetic construct
  source 1..75: mol_type = other DNA
tcgcctcactggcggatgaactgcggcagaagggcgttttcaacatgctgctttcggatgggcgctatgtaatgg

SEQ ID NO: 825744 - DNA, 75 bp, synthetic construct
  source 1..75: mol_type = other DNA
cgcgcgagtttatggttgctggcaaggacgacggcttaagtgatagctgtccggcgctttctgtgcaatttttcc

SEQ ID NO: 825745 - DNA, 75 bp, synthetic construct
  source 1..75: mol_type = other DNA
atgaaattttatgaattatcttctgattcccgatctcaggccaaaatcacactgggtcagttcattgtggctcgg

SEQ ID NO: 825746 - DNA, 75 bp, synthetic construct
  source 1..75: mol_type = other DNA
tgcgtaaagcggcgcaactggcaacacagggtgaatgggtcgcatttatttcgtctggtactggtacatatgcgg

SEQ ID NO: 825747 - DNA, 75 bp, synthetic construct
  source 1..75: mol_type = other DNA
tgcgtgaggtggcggaacgtgcaattccagcaatggaacgtctgttaatgttgccagctgatgatgacttgttaa

SEQ ID NO: 825748 - DNA, 75 bp, synthetic construct
  source 1..75: mol_type = other DNA
ggcgctgctcagtgatttttttcgcatgcgccgccaggaaattaaggcccggaaaaaagcgcaatcatcaacgga

SEQ ID NO: 825749 - DNA, 75 bp, synthetic construct
  source 1..75: mol_type = other DNA
cgccatgatcctactgcgcatgcagaaatcatggccctgcgtcagggcggcctggtaatgcaaaattatcgtctg

SEQ ID NO: 825750 - DNA, 75 bp, synthetic construct
  source 1..75: mol_type = other DNA
ttgtctgaagtcgaatttagccacgaatactggatgcgtcacgcgctgacgctggcgaaacgtgcctgggatgag

SEQ ID NO: 825751 - DNA, 75 bp, synthetic construct
  source 1..75: mol_type = other DNA
ggttcaattcctgcctttattttgggattaagcggatatatcgccaatcaggcgcaaacgccggaagttattatg

SEQ ID NO: 825752 - DNA, 75 bp, synthetic construct
  source 1..75: mol_type = other DNA
atgggactcgatatttttttccttgggcgtgatcgtgttaccgacgcggtagtatcggtaccggaaacgcgggaa

SEQ ID NO: 825753 - DNA, 75 bp, synthetic construct
  source 1..75: mol_type = other DNA
aaaatggattttgacgcttatctggcactacttcgccagtgcgatctcggctactttatttttgcccgtcagcag

SEQ ID NO: 825754 - DNA, 75 bp, synthetic construct
  source 1..75: mol_type = other DNA
ttccttttgccgataaatccgtcgatgtttgtctactggcgcatacgttgccgtggtgcactgacccgcatcgtt

SEQ ID NO: 825755 - DNA, 75 bp, synthetic construct
  source 1..75: mol_type = other DNA
cgtggttgattacttcaaagcgggcaataccattacggatgaacagcttaatggtatgcgcgtgaaggatatcaa

SEQ ID NO: 825756 - DNA, 75 bp, synthetic construct
  source 1..75: mol_type = other DNA
ggcgactattttaccgggccctatatcagcagcctgaccaaaggtaaggctattatcgatattatgaatactatg

SEQ ID NO: 825757 - DNA, 75 bp, synthetic construct
  source 1..75: mol_type = other DNA
attatgctgagagccgtatttctcttgatcagcagataattagacatccttcagcgacctacttcttgagggcag

SEQ ID NO: 825758 - DNA, 75 bp, synthetic construct
  source 1..75: mol_type = other DNA
ctacatgggcctcgggctttgctacagcctggtgaatattccttatggttcacttgctaccgcgatgacccaaca

SEQ ID NO: 825759 - DNA, 75 bp, synthetic construct
  source 1..75: mol_type = other DNA
acctggtcggtactgtggcatcggcaccgctggtgccggggatggtcgcgaggatcggtaaaaagaataccttcc

SEQ ID NO: 825760 - DNA, 75 bp, synthetic construct
  source 1..75: mol_type = other DNA
ttttatccgcttacggataaaaaattcaaagaaatcgtagttgaaattgataatcgcaaacaaatgcagcagcaa

SEQ ID NO: 825761 - DNA, 75 bp, synthetic construct
  source 1..75: mol_type = other DNA
ttttcatctgcttaagattggcaatttaagcgcagaaatcaattgcgaagcgtgcgcggtttctcatcaagtgaa

SEQ ID NO: 825762 - DNA, 75 bp, synthetic construct
  source 1..75: mol_type = other DNA
gggagatattcataatggatattattaatctcacgttacaggaatggtttgaaagtcctgaagagataaagatta

SEQ ID NO: 825763 - DNA, 75 bp, synthetic construct
  source 1..75: mol_type = other DNA
ggttatctgctgttcttctgggtttccgtctggtcactgccggtggcgttggttgcgttggccatcgcttcaatt

SEQ ID NO: 825764 - DNA, 75 bp, synthetic construct
  source 1..75: mol_type = other DNA
atgataattacggaaatcgataaaatggcattcgtttcactggctatcaatttctccaatatgatgtttattgtt

SEQ ID NO: 825765 - DNA, 75 bp, synthetic construct
  source 1..75: mol_type = other DNA
gtcgcttccgcgatgtttgaatatcgttttggcggtaatggcgagctttccgggcataaccttggaaacctgatg

SEQ ID NO: 825766 - DNA, 75 bp, synthetic construct
  source 1..75: mol_type = other DNA
acgcatttgattccaatgtcagagcatcccgtcgatctgatggcgattgacgatcaggggcatgaagtttacggc

SEQ ID NO: 825767 - DNA, 75 bp, synthetic construct
  source 1..75: mol_type = other DNA
ctccggcgatggcaatactggatggcgcacagtcacagatgaagtcgctgtccactgatgcgcagacggcgaatg

SEQ ID NO: 825768 - DNA, 75 bp, synthetic construct
  source 1..75: mol_type = other DNA
gaatatttatttaaaagaagaatgagtagagcttctgtattattaaagctaactcatctaactataactgaaatc

SEQ ID NO: 825769 - DNA, 75 bp, synthetic construct
  source 1..75: mol_type = other DNA
ttatagctattatcacatttagttggctcgttacacacaatacaactgagtccgaaaaaatccctcctgctaata

SEQ ID NO: 825770 - DNA, 75 bp, synthetic construct
  source 1..75: mol_type = other DNA
gataaagaatacgttggttctgtcattgtcaatgagtcaaacgggcgatattacgaaccttcgcccggacgaaat

SEQ ID NO: 825771 - DNA, 75 bp, synthetic construct
  source 1..75: mol_type = other DNA
aatggaaatacagaactaatatcctctgataaggaggaggtcgttaatattagtgtgtttgaacccgatgagttt

SEQ ID NO: 825772 - DNA, 75 bp, synthetic construct
  source 1..75: mol_type = other DNA
gcggcataaagtgaagtcgtttattttcacaccgcctttcggcgataccgcgctgtggcgtgtcgaggctgacac

SEQ ID NO: 825773 - DNA, 75 bp, synthetic construct
  source 1..75: mol_type = other DNA
tgccagtttctttattggtttatccagcgggctctcctggctggcatgggcaactcatatccctgttgtactaat

SEQ ID NO: 825774 - DNA, 75 bp, synthetic construct
  source 1..75: mol_type = other DNA
gcgcaggacaaggcgcagggtcaggtgcgcgaaatggctccggcgatggcaatactggatggcgcacagtcacag

SEQ ID NO: 825775 - DNA, 75 bp, synthetic construct
  source 1..75: mol_type = other DNA
actggccgcggtgaaaaacctccagataaatgcgggaaacaacgccgatatcggcgtagtgaagaatatgtttat

SEQ ID NO: 825776 - DNA, 75 bp, synthetic construct
  source 1..75: mol_type = other DNA
gggagcgaagctgaaacaggaaatgatggcgtttccgatgattgaatctggagaatttaatacccgtttcttttt

SEQ ID NO: 825777 - DNA, 75 bp, synthetic construct
  source 1..75: mol_type = other DNA
ggagaagttctcaacaaaactcaagaagctgtggctgtgatgccgggggggggagtattatcattgcggttttca

SEQ ID NO: 825778 - DNA, 75 bp, synthetic construct
  source 1..75: mol_type = other DNA
caagcaaggtgaaaggattggatattctgattaccgggcatgcccacgtcggaacgccagaaccaatcaaagtcg

SEQ ID NO: 825779 - DNA, 75 bp, synthetic construct
  source 1..75: mol_type = other DNA
aaggatctgcgtaacctactggagcacggggcatcgcttaccaatggcatcctgcaaatgtcaaaaggcgcagaa

SEQ ID NO: 825780 - DNA, 75 bp, synthetic construct
  source 1..75: mol_type = other DNA
cgttactggcggcagaacccggcaacgcgtggtatctcgatctggctaccgatatcgatcttgggcaaaacaaag

SEQ ID NO: 825781 - DNA, 75 bp, synthetic construct
  source 1..75: mol_type = other DNA
tgtgcagtgcgctatacgccgcagataacatgtctgttgacctttgtcaccggtgcggtggaagtcgtactggtg

SEQ ID NO: 825782 - DNA, 75 bp, synthetic construct
  source 1..75: mol_type = other DNA
acgtcgccaggtggagattcaccgaagttctacgcttctgtacgtatccgtcttggtgcatcggtgatgaaggat

SEQ ID NO: 825783 - DNA, 75 bp, synthetic construct
  source 1..75: mol_type = other DNA
tcctgatggacagcccggaggcgctggggcacgcactgtgtaatctggtaccggaaatggtgcagggtttccgcg

SEQ ID NO: 825784 - DNA, 75 bp, synthetic construct
  source 1..75: mol_type = other DNA
gtactgaaatacgctcagcagtatcagcgtgagaaaggcatttcttccggtgaacagaaaaggcagacatcttct

SEQ ID NO: 825785 - DNA, 75 bp, synthetic construct
  source 1..75: mol_type = other DNA
gagcaggagatgaaacaggctgacgggaataagcagtcacaggtggcagagccggaaagagcttatgtggccggc

SEQ ID NO: 825786 - DNA, 75 bp, synthetic construct
  source 1..75: mol_type = other DNA
cattgtcgaatgtactggcttttatacctccgccgagaaatctcaggcgcatctcgatgctggcgcgaagaaggt

SEQ ID NO: 825787 - DNA, 75 bp, synthetic construct
  source 1..75: mol_type = other DNA
atatgccgactggcgacgtttttactgcacgcattattttcaggatacccagctggatatgcatttttccgggct

SEQ ID NO: 825788 - DNA, 75 bp, synthetic construct
  source 1..75: mol_type = other DNA
tggcacaaaaactggtgaccacgttccatctgatggatcttagccagctttacactttattgttttgtctgtggt

SEQ ID NO: 825789 - DNA, 75 bp, synthetic construct
  source 1..75: mol_type = other DNA
gactgatggcacggttgttgaagatatggatgcaagaggccgggtgatatctcaggttctgggtgaatatccgcc

SEQ ID NO: 825790 - DNA, 75 bp, synthetic construct
  source 1..75: mol_type = other DNA
gaggcatataagaccctccaaaatgatttcgacgaatacaaactcaaataccctgaaaaatctcaaataaaaagt

SEQ ID NO: 825791 - DNA, 75 bp, synthetic construct
  source 1..75: mol_type = other DNA
atagtatgggggaattgactgccgagttgaaagctaaagatgacgaattgagatccgccagtgctcagttagcag

SEQ ID NO: 825792 - DNA, 75 bp, synthetic construct
  source 1..75: mol_type = other DNA
attatggcacatgtttatggactcccctgcatttacagaactggccccccgaacccaaaaagattatcgacaaca

SEQ ID NO: 825793 - DNA, 75 bp, synthetic construct
  source 1..75: mol_type = other DNA
gtgagataaaccggataccggcgacgggacgttcatgtgccccttcagaggagcgaaagctcctcctgccgtcca

SEQ ID NO: 825794 - DNA, 75 bp, synthetic construct
  source 1..75: mol_type = other DNA
ctgcctgtcggagtcgggcctgacgaccggatgccgccaggcagccgggagccgaaggtgtccccgcctccggaa

SEQ ID NO: 825795 - DNA, 75 bp, synthetic construct
  source 1..75: mol_type = other DNA
atgttcaggcatcttcacaggagcgaagctccttctgccgtccacttcttcggggtttctcccgctgtggacctt

SEQ ID NO: 825796 - DNA, 75 bp, synthetic construct
  source 1..75: mol_type = other DNA
tcagtgcctgcgaagcagacattatcgcgctggtacttaatgcggacgcaccgtggtcacctttttcgccaggct

SEQ ID NO: 825797 - DNA, 75 bp, synthetic construct
  source 1..75: mol_type = other DNA
ccagccagtgcggaaaaacgtcactcacgcaatgtctgcgtggcgaaaatattcattatcagaaaacgcaggcaa

SEQ ID NO: 825798 - DNA, 75 bp, synthetic construct
  source 1..75: mol_type = other DNA
tggagcgcgcaacgtgttagtgaccagtgcggttaataacatcggagttgcagagctttttgccttgctgcatac

SEQ ID NO: 825799 - DNA, 75 bp, synthetic construct
  source 1..75: mol_type = other DNA
ctgcacgattttatgcagtggaaaggccctatccttactgactccggcggcttccaggtcttcagccttggcgat

SEQ ID NO: 825800 - DNA, 75 bp, synthetic construct
  source 1..75: mol_type = other DNA
tctcgaccgttgcaacgaaatattaggcgcgcgactcaataccattcataaccttcgttactaccagcgtttgat

SEQ ID NO: 825801 - DNA, 75 bp, synthetic construct
  source 1..75: mol_type = other DNA
tggagcgcacaacgtgttagtaaccagtgcggttaataacaatggagtggcagaacttttagccttgctgcatac

SEQ ID NO: 825802 - DNA, 75 bp, synthetic construct
  source 1..75: mol_type = other DNA
ggactgctgcgccatcaggcgcagtttcctcacacaccgtcaggtgtgcagggagcgcaggtcacggcgcgacag

SEQ ID NO: 825803 - DNA, 75 bp, synthetic construct
  source 1..75: mol_type = other DNA
cggcattgaaccgcagccggttgatgttgtggtgacgctgccgctgggcgagtacctggatgaaaacgatcagcc

SEQ ID NO: 825804 - DNA, 75 bp, synthetic construct
  source 1..75: mol_type = other DNA
tgcgtcgcctggcgcaaaagcgagtcggctgtgtatttgccacccgcggtgatttgagtttttttgccaaaacgc

SEQ ID NO: 825805 - DNA, 75 bp, synthetic construct
  source 1..75: mol_type = other DNA
ggtacgccctggctggtcggaaccagccgtattgaaaaatatcagaagacatttcttcgccactgccgccctgta

SEQ ID NO: 825806 - DNA, 75 bp, synthetic construct
  source 1..75: mol_type = other DNA
catcactgccgccggaaaagattcaggttcctttcatgctaacgccaccagtggcaaaaataggggctaactccg

SEQ ID NO: 825807 - DNA, 75 bp, synthetic construct
  source 1..75: mol_type = other DNA
taaaacatgcactggataccagtgtgagcacccgtaccagttcgtattttgccgaccgtctgatccaggcgcgaa

SEQ ID NO: 825808 - DNA, 75 bp, synthetic construct
  source 1..75: mol_type = other DNA
ctggttacatctgcagtaaaagatgccctttctcttgcgagaacaaaaggaagtagctatcttgctgacgatata

SEQ ID NO: 825809 - DNA, 75 bp, synthetic construct
  source 1..75: mol_type = other DNA
atatcgcaccctgccgatggtctggtacgttcctccgctgtcaccgattcagtcctacgctgatgcgggaggttt

SEQ ID NO: 825810 - DNA, 75 bp, synthetic construct
  source 1..75: mol_type = other DNA
gcgccgccacgctcaatcaaggaactcgtctgtgctcccatgacgatacgcaaaaaatttacgcttacctttccc

SEQ ID NO: 825811 - DNA, 75 bp, synthetic construct
  source 1..75: mol_type = other DNA
ctggccattggcaatatcgaactggtgaaacctaaccagaaagagctcagcgcactggtcaatcgcgaactcacc

SEQ ID NO: 825812 - DNA, 75 bp, synthetic construct
  source 1..75: mol_type = other DNA
tgcaaaggagtcagaaaattcacacttaaagcccgtactgtttacatcaccgatgaacagtatgctgcaatatat

SEQ ID NO: 825813 - DNA, 75 bp, synthetic construct
  source 1..75: mol_type = other DNA
atttcctatctctgtgcggcaagactcggtgatgtgcttgagttgaaatggcaggatattatggataaagggatc

SEQ ID NO: 825814 - DNA, 75 bp, synthetic construct
  source 1..75: mol_type = other DNA
aatccatgcaaaggagtcagaaaattcacgcttaaagcccgtactgtttacatcaccgatgaacagtatgctgcg

SEQ ID NO: 825815 - DNA, 75 bp, synthetic construct
  source 1..75: mol_type = other DNA
cgtagcctttacaacgcgttgcaggtcagcgcctgcgaagcagatattatcgcactggtgcttaatgcggacgcg

SEQ ID NO: 825816 - DNA, 75 bp, synthetic construct
  source 1..75: mol_type = other DNA
tgtggtttgcggggcgaggaaccgcccctgaatggcaaatgaaacaggaaatgctatcgccttcgtatacaacac

SEQ ID NO: 825817 - DNA, 75 bp, synthetic construct
  source 1..75: mol_type = other DNA
cacgatcacggtcatgaacacggtggcgaaggttgctgtggcggtaaaggcaacggcggttgtggttgccactaa

SEQ ID NO: 825818 - DNA, 75 bp, synthetic construct
  source 1..75: mol_type = other DNA
ataattttcagattgttgatggtgatgttcatattaagcttcttcatctcaacagagaaacaaagcaaataatac

SEQ ID NO: 825819 - DNA, 75 bp, synthetic construct
  source 1..75: mol_type = other DNA
aagcggcaactggcggagcaggcagaggaactggctatcctccaaaaggccgcgacatacttcgcgaagcgcctg

SEQ ID NO: 825820 - DNA, 75 bp, synthetic construct
  source 1..75: mol_type = other DNA
ttgaagatttttttattgccgttgacccgcaaaccgatctcagcgccgtcactcgcccgcgtgcgttaccgttat

SEQ ID NO: 825821 - DNA, 75 bp, synthetic construct
  source 1..75: mol_type = other DNA
acagtaatgatttgaaaccactacccacatttaatcagttttaccatcaatggctgcaaagcactgagagatccc

SEQ ID NO: 825822 - DNA, 75 bp, synthetic construct
  source 1..75: mol_type = other DNA
aactctggtggtatccgcaatgagatccccgcaggggcgattacgatgggcggcgtcatcagtacgttcccgttc

SEQ ID NO: 825823 - DNA, 75 bp, synthetic construct
  source 1..75: mol_type = other DNA
ggcatggaaatgaagtacgacagcagtaaaccaatcggtcaacgtgtcgtcgagcttacgcttaataataagccg

SEQ ID NO: 825824 - DNA, 75 bp, synthetic construct
  source 1..75: mol_type = other DNA
agtacgacagcagcaagccggttggtcagcgggtaatcacactgactctgaatggcaaacccattgaagatgcga

SEQ ID NO: 825825 - DNA, 75 bp, synthetic construct
  source 1..75: mol_type = other DNA
gaggatttgttatatcaatattaaataatgctacaagtgaaacggcaaatattaatgtgctccgaaaaaacatga

SEQ ID NO: 825826 - DNA, 75 bp, synthetic construct
  source 1..75: mol_type = other DNA
cttattgttaacaacctcaaaagctcatgggggcgggattatagttatttttaaagattttgtaaatgactggtg

SEQ ID NO: 825827 - DNA, 75 bp, synthetic construct
  source 1..75: mol_type = other DNA
cttctttatattcacatgaattatttgatttgattgaagcatatagaaatccaacgtattcgtatttacagaaca

SEQ ID NO: 825828 - DNA, 75 bp, synthetic construct
  source 1..75: mol_type = other DNA
cgtaaacaacatacgcctgaatttcgtaacgaagccctgaaactcgctgaacgcatcggtgtggccgccgcagcc

SEQ ID NO: 825829 - DNA, 75 bp, synthetic construct
  source 1..75: mol_type = other DNA
aaccgaacgctacctgcagtcgtcaatgacaacaacgggaatattttctggtgtgatgcgcatcgacaggttacc

SEQ ID NO: 825830 - DNA, 75 bp, synthetic construct
  source 1..75: mol_type = other DNA
taataatggcatgaacttaatgaatgttccttatttttaccagatggtggttaaaggattagtcattcttgtagc

SEQ ID NO: 825831 - DNA, 75 bp, synthetic construct
  source 1..75: mol_type = other DNA
ataaagaagcggcaatctattcgggtattaatgtaactcgcctaaaaattaaagtctttatgattacggcggtgt

SEQ ID NO: 825832 - DNA, 75 bp, synthetic construct
  source 1..75: mol_type = other DNA
ctacctgcgctggtgtttaactggcgtcaaaggctgtgaagagagcaatatttctgagtccaatctctacaacat

SEQ ID NO: 825833 - DNA, 75 bp, synthetic construct
  source 1..75: mol_type = other DNA
cgcccgcgtcggcaccggagtttatcgcgatttcagcgaagcccaacgtgacttacagcacccggtacgcaccct

SEQ ID NO: 825834 - DNA, 75 bp, synthetic construct
  source 1..75: mol_type = other DNA
tgtgccgtccgggcacggtagtgacctttaagcccaaccagaagaagccggaatatgacgacctggtggcacttt

SEQ ID NO: 825835 - DNA, 75 bp, synthetic construct
  source 1..75: mol_type = other DNA
atgacgatcatccatcctctgcttgccagccgtagcgcaccgaattatcgccagtcctggcggttagcgggagtg

SEQ ID NO: 825836 - DNA, 75 bp, synthetic construct
  source 1..75: mol_type = other DNA
ccgcctgcgcatcctcaaccgcttgcagctgcatggatgcaacgcgcggaggaaaccgggcttttcgggccgctg

SEQ ID NO: 825837 - DNA, 75 bp, synthetic construct
  source 1..75: mol_type = other DNA
aactgctttacttcccaacccggatggacccttctctcaatacgatggcgaacgatcgccaacgtgacgggaaaa

SEQ ID NO: 825838 - DNA, 75 bp, synthetic construct
  source 1..75: mol_type = other DNA
gcgttattatctgctgcgtattacgccgcctgcgcatcctcaagcgcttgccgttgcatggatgcaacgcgcgga

SEQ ID NO: 825839 - DNA, 75 bp, synthetic construct
  source 1..75: mol_type = other DNA
cgaaacgtaccgctgttgcgattgattcgctgctggcgctggggcatacgtcaggggcagatacgctgctggggt

SEQ ID NO: 825840 - DNA, 75 bp, synthetic construct
  source 1..75: mol_type = other DNA
tgattcgctgctggcgctggggcatacgtcaggggcagatacgctgctggggttctggcttggtcaacaattatt

SEQ ID NO: 825841 - DNA, 75 bp, synthetic construct
  source 1..75: mol_type = other DNA
tggtcgtgaatcgttgtcacgttcaggctctgctgacaacttcgcatggagccttggcgcgggtgtccgctatga

SEQ ID NO: 825842 - DNA, 75 bp, synthetic construct
  source 1..75: mol_type = other DNA
gaaattgtgcagacactgtctgcacaattcacccccacaattcgccagacactatctggcgaatcttgccattta

SEQ ID NO: 825843 - DNA, 75 bp, synthetic construct
  source 1..75: mol_type = other DNA
aaatcgcgtgaactggtgaccttagcgaaagggcgcggattaagcgattgtggcattcaggcgcgctggcgcttt

SEQ ID NO: 825844 - DNA, 75 bp, synthetic construct
  source 1..75: mol_type = other DNA
gttggcgttaagtggtgacaagtggcggatttcaccatggttattagtaaccgatgatacggcaaccatcaccgc

SEQ ID NO: 825845 - DNA, 75 bp, synthetic construct
  source 1..75: mol_type = other DNA
ggagcagggcgacagcaaaacgctgttcgccagcccgcagaccagcgaactgaaacagtttatctcctcggtgcg

SEQ ID NO: 825846 - DNA, 75 bp, synthetic construct
  source 1..75: mol_type = other DNA
gaagtgctgaaggtgctggagcaactggcggcggaaggtatgacgctgatcctcgtcacccatgaaatgaatttt

SEQ ID NO: 825847 - DNA, 75 bp, synthetic construct
  source 1..75: mol_type = other DNA
ggtctggagggctaccaggagggaagcatcaagctcgggggcatgaccatcaccaaccgcgattcccaggcccgg

SEQ ID NO: 825848 - DNA, 75 bp, synthetic construct
  source 1..75: mol_type = other DNA
agatttggctcactttatgaatacgtcgcatcattcggaatatttaacggtgcggatgtcggaaaaaccatagac

SEQ ID NO: 825849 - DNA, 75 bp, synthetic construct
  source 1..75: mol_type = other DNA
ataactacattaagattttgcgttttttctggctggtggtgggactggtggtggggttagctgcggttgaaatgg

SEQ ID NO: 825850 - DNA, 75 bp, synthetic construct
  source 1..75: mol_type = other DNA
caaccatgctgtttgtctatattgtgatcattattggcatggtgtggagcattcgctttaaaacgatttcgccac

SEQ ID NO: 825851 - DNA, 75 bp, synthetic construct
  source 1..75: mol_type = other DNA
tttattgatgctcagcaaaagcgcgttggcagtgaaaccgcctggatcaagaaaggggacgaaccgccgctcagc

SEQ ID NO: 825852 - DNA, 75 bp, synthetic construct
  source 1..75: mol_type = other DNA
gacggtcagcgttttcgcctggtgcgttacgccgcagaacctacctgcgataactggcatgggccagacgcctgg

SEQ ID NO: 825853 - DNA, 75 bp, synthetic construct
  source 1..75: mol_type = other DNA
agatagcgccacggctgctgttagatggtgagccgttggcgttaagtggtgacaagtggcggatttcaccatggt

SEQ ID NO: 825854 - DNA, 75 bp, synthetic construct
  source 1..75: mol_type = other DNA
caacaagcgcgcggctcatagtgagttttattcgatgggcggaatggcgattacgccagataacaccattatggc

SEQ ID NO: 825855 - DNA, 75 bp, synthetic construct
  source 1..75: mol_type = other DNA
tcgcccccagccattttcgccgcggcgtgttattgaaggatctcaatcaatattggtttagtgctaacccgattc

SEQ ID NO: 825856 - DNA, 75 bp, synthetic construct
  source 1..75: mol_type = other DNA
atgcaaaaagcacaacggatcattaaaacctatcgccgtaatcgaatgattgtttgtacgatttgcgcactcgtt

SEQ ID NO: 825857 - DNA, 75 bp, synthetic construct
  source 1..75: mol_type = other DNA
ctgagagttgggttaggaaaattggagtgttagaagatgtgtattttcctgactcgcttttgaaaaatattgagt

SEQ ID NO: 825858 - DNA, 75 bp, synthetic construct
  source 1..75: mol_type = other DNA
ccattatgccgttacgttaacgcttactcatcttcatcgtgcgccggttgctctttaacaatgcgaaccagatca

SEQ ID NO: 825859 - DNA, 75 bp, synthetic construct
  source 1..75: mol_type = other DNA
ttgcgcactcgttacgctcgcttcgaccctgagcgtgcgatttatttcacagcgttaataaatcaacaacgggta

SEQ ID NO: 825860 - DNA, 75 bp, synthetic construct
  source 1..75: mol_type = other DNA
ttgcgcactcgttacgctcgcttcgaccctgagcgtgcgatttatttcacagcgttaaatcaacaacgggtagta

SEQ ID NO: 825861 - DNA, 75 bp, synthetic construct
  source 1..75: mol_type = other DNA
gtattccatttgatatttaccagtcgttatgtaaaaaaatatcatcaccgccaagcggaggagttcaagttttat

SEQ ID NO: 825862 - DNA, 75 bp, synthetic construct
  source 1..75: mol_type = other DNA
cgttaactcaactgttataatagaagcaatgcaatacccagttaatatatattcattaggttatggcatttttca

SEQ ID NO: 825863 - DNA, 75 bp, synthetic construct
  source 1..75: mol_type = other DNA
ctgtgaatatgctatctaccagcgtcaatcggcattcagtgaagagtgggatgagtgggaaacattgctcgatgc

SEQ ID NO: 825864 - DNA, 75 bp, synthetic construct
  source 1..75: mol_type = other DNA
cttcgttgtggtcgaaggggatgaaagcggttatcgtggcgcagtttctctctgcgtttggcgataatgccctac

SEQ ID NO: 825865 - DNA, 75 bp, synthetic construct
  source 1..75: mol_type = other DNA
agcttacctatcctggcggtgatgtcccgcaggagcgcggcgtatgttccgatgtggtgatccgcgccctacgca

SEQ ID NO: 825866 - DNA, 75 bp, synthetic construct
  source 1..75: mol_type = other DNA
tgcaagccgctgtactgcgtgtgggggatgccgtagcgttacgcttcgacgaagtgatcaacggtgagattgaca

SEQ ID NO: 825867 - DNA, 75 bp, synthetic construct
  source 1..75: mol_type = other DNA
agcgttaaaaaattgatgatagcgttagggattggtgcgggactcacggcgtttaactacctgtttggtcagtct

SEQ ID NO: 825868 - DNA, 75 bp, synthetic construct
  source 1..75: mol_type = other DNA
gacggtcagcagggagtaataatgaccgaccgtgcgccagaggaagatggctatgtgtgggttaaattagatatt

SEQ ID NO: 825869 - DNA, 75 bp, synthetic construct
  source 1..75: mol_type = other DNA
tggatttatgggctgggacagcagacagcgaacggggcatatctcagcccggttaataccgttcgctatcttgct

SEQ ID NO: 825870 - DNA, 75 bp, synthetic construct
  source 1..75: mol_type = other DNA
attgcccgcccggttcttgaacctgatggacagataatccgcgtcgatataaacctggtttatgctgaggaacaa

SEQ ID NO: 825871 - DNA, 75 bp, synthetic construct
  source 1..75: mol_type = other DNA
cgttcgcaggttaaagctgttcttgatgcagttaagaacaaaagcaaaggtgagatttcgcatgcgaaatctaag

SEQ ID NO: 825872 - DNA, 75 bp, synthetic construct
  source 1..75: mol_type = other DNA
ctatgtgtgggttaaattagatattggtgaaatatccgtcgaggcttcagaggttcgtgtcaagggaatgcggtc

SEQ ID NO: 825873 - DNA, 75 bp, synthetic construct
  source 1..75: mol_type = other DNA
attcgtctacgatctggcgattaaaaaaatggatgcaaaaccagccatctcagaacgactggagattgatggtga

SEQ ID NO: 825874 - DNA, 75 bp, synthetic construct
  source 1..75: mol_type = other DNA
gtggcgctggcggcggtggagatggcgcaaattatcctcaccggcggtagcagtattatggagtcgatttcgaaa

SEQ ID NO: 825875 - DNA, 75 bp, synthetic construct
  source 1..75: mol_type = other DNA
cgcaaattatcctcaccggtggcagcagtattatggagtcgatttcgaaatatctgatttacagcaacagctatg

SEQ ID NO: 825876 - DNA, 75 bp, synthetic construct
  source 1..75: mol_type = other DNA
gcaaagatttggcagacgctgtctgccaaatctttccccttgcccaggtccacctacgtccgtttactttccgtt

SEQ ID NO: 825877 - DNA, 75 bp, synthetic construct
  source 1..75: mol_type = other DNA
tcgaagacagcgccatgtcgcagcagcccacggtgccggatcgtctgcgctggttattgcaaacctttaaatatc

SEQ ID NO: 825878 - DNA, 75 bp, synthetic construct
  source 1..75: mol_type = other DNA
gtgcgtgggaatatggtcgcgattatgtcttttcacacctcggcggtgatgagatcgcattgcagtattccgact

SEQ ID NO: 825879 - DNA, 75 bp, synthetic construct
  source 1..75: mol_type = other DNA
taagatttcgcatgcgaaatctaaggctcagaacaaaaaacctgccaggcctgtagacagcaattcaggtgtaaa

SEQ ID NO: 825880 - DNA, 75 bp, synthetic construct
  source 1..75: mol_type = other DNA
cacaactttatccgcaaatatccggtcataagagtcgttttgccattcgctttatgccactggacagtgagaacg

SEQ ID NO: 825881 - DNA, 75 bp, synthetic construct
  source 1..75: mol_type = other DNA
atgcagacccaggtcctttttgaacatccactaaatgaaaaaatgcgtacatggctgcgcattgagtttttgatt

SEQ ID NO: 825882 - DNA, 75 bp, synthetic construct
  source 1..75: mol_type = other DNA
gtttccagaagtgggatgtgttctgtaatgccgtcaacaacatgatgaataaccctctattacctgcccacggta

SEQ ID NO: 825883 - DNA, 75 bp, synthetic construct
  source 1..75: mol_type = other DNA
atttttcctggttcgcggtgtttttatctctgtggtacatggggaaagtgataaaaatgatgctcaacgcttttg

SEQ ID NO: 825884 - DNA, 75 bp, synthetic construct
  source 1..75: mol_type = other DNA
ctggatgccagtaaatacgtcacttcaaccatgctgtttgtctatattgtgatcattattggcatggtgtggagt

SEQ ID NO: 825885 - DNA, 75 bp, synthetic construct
  source 1..75: mol_type = other DNA
atccactaaatgaaaaaatgcgtacatggctgcgcattgagtttttaattcaacaactcaccgtaaatttaccca

SEQ ID NO: 825886 - DNA, 75 bp, synthetic construct
  source 1..75: mol_type = other DNA
tttcactggctggtctttggggttgactggcaacaggtgaaagggcatgacctggcaaaatgggtataccagtaa

SEQ ID NO: 825887 - DNA, 75 bp, synthetic construct
  source 1..75: mol_type = other DNA
atccgatattgatttggcttacacactaatacaggtaaatgaaagggctcctgaagaagccgagaagcttattgc

SEQ ID NO: 825888 - DNA, 75 bp, synthetic construct
  source 1..75: mol_type = other DNA
atatttatgtcggtaaaccaccacgagaaagaaaagaacgaatcattggtcagctcattgaaaaccttcagcaat

SEQ ID NO: 825889 - DNA, 75 bp, synthetic construct
  source 1..75: mol_type = other DNA
agcacgatggtcgccactggcgacgaataccagaacccatgcgactgttagatgatgctgtggagcgctcatcat

SEQ ID NO: 825890 - DNA, 75 bp, synthetic construct
  source 1..75: mol_type = other DNA
aagatatcactaccttgctgtcaatgacccagccgctcaaactgcgtggtttccagaagtgggatgtgttctgta

SEQ ID NO: 825891 - DNA, 75 bp, synthetic construct
  source 1..75: mol_type = other DNA
caggtgaatggccatgacctggcaaaatgggtgtaccaggaagaacctgcagatgctcagagcaatgcaataact

SEQ ID NO: 825892 - DNA, 75 bp, synthetic construct
  source 1..75: mol_type = other DNA
cgcttgattaatcgtctgcagcaattcgttccggatgccttacccgtggtacgtaaagccagctggcactgcagg

SEQ ID NO: 825893 - DNA, 75 bp, synthetic construct
  source 1..75: mol_type = other DNA
cggaacacggtcatgagtgcccttacgtacaaccggaacacagggaagtacagctgattaaacgtctgcagcaat

SEQ ID NO: 825894 - DNA, 75 bp, synthetic construct
  source 1..75: mol_type = other DNA
tttgaacacactgacgacatgctgacagagcacggtcaacagtgcccttatgtcaggccggagcgcagagaaata

SEQ ID NO: 825895 - DNA, 75 bp, synthetic construct
  source 1..75: mol_type = other DNA
cgcttgattcatcgtctgcagcaattcgttccggatgccttacccgtggtccgtaaagccagctggcactgcagc

SEQ ID NO: 825896 - DNA, 75 bp, synthetic construct
  source 1..75: mol_type = other DNA
cgcttgattaatcgtctgcagcaattcgttccggatgccttacccgtggtgcgtaaagccagctggcactgcaga

SEQ ID NO: 825897 - DNA, 75 bp, synthetic construct
  source 1..75: mol_type = other DNA
cgcttgattaatcgtctgcagcaattcgttccggatgccttacccgtggttcgtaaagccagctggcactgcagt

SEQ ID NO: 825898 - DNA, 75 bp, synthetic construct
  source 1..75: mol_type = other DNA
actattttaaatccttttaaattgaattcaacaaattttactaatgccaacatgtttcaggttaattttgttagt

SEQ ID NO: 825899 - DNA, 75 bp, synthetic construct
  source 1..75: mol_type = other DNA
ctgacgcaggcagaggaacaggccacccggcagaaagcggcgtttatccgccagcttaaagagcaggcaacccgc

SEQ ID NO: 825900 - DNA, 75 bp, synthetic construct
  source 1..75: mol_type = other DNA
ccgccagcgcatggaggcgctgagccagaaaatgcgcgaggaacaggcgcaggccatggctctggcggaggctca

SEQ ID NO: 825901 - DNA, 75 bp, synthetic construct
  source 1..75: mol_type = other DNA
gacggcgctggaaaacgtgatgtttggccctctacgcgtgcgtggcgcaaacaaagaagaggcggaaaaactggc

SEQ ID NO: 825902 - DNA, 75 bp, synthetic construct
  source 1..75: mol_type = other DNA
cgtccacgccttacgaatccctgcttgtgaccatcagtcaggccgtccgtggcgggaaactgcctgctggctggt

SEQ ID NO: 825903 - DNA, 75 bp, synthetic construct
  source 1..75: mol_type = other DNA
cacgattattatggggaacgctattgtacacactgtcatacagggagtttcagtgaggaggctgtggcaggatga

SEQ ID NO: 825904 - DNA, 75 bp, synthetic construct
  source 1..75: mol_type = other DNA
cgcttgattgatcgtctgcagcaattcgttccggatgccttacccgtggtacgtaaagccagctggcactgcaga

SEQ ID NO: 825905 - DNA, 75 bp, synthetic construct
  source 1..75: mol_type = other DNA
aaaacagacctctattgaaatggtcactttacttaacacgttacaacctggtggaaaatgcattatcactggtga

SEQ ID NO: 825906 - DNA, 75 bp, synthetic construct
  source 1..75: mol_type = other DNA
atgtacgcaaaatcctttgtcgctcttgatcgcaacggacgtctgacgggcgcccgtactgtacaggccgcacct

SEQ ID NO: 825907 - DNA, 75 bp, synthetic construct
  source 1..75: mol_type = other DNA
atgtacgcaaaatcctttctcgctcttgatggcaacggacgtctgacgggcgcccgtactgtacaggccgcacct

SEQ ID NO: 825908 - DNA, 75 bp, synthetic construct
  source 1..75: mol_type = other DNA
tttgtcagcaaaccaatcggtaaatctgccgacaatatgtatagctatttggcgctggtgcaggacgatccgacc

SEQ ID NO: 825909 - DNA, 75 bp, synthetic construct
  source 1..75: mol_type = other DNA
caatgccgccacaattattatggggaacgctattgtacacactgtcatactgggcacttcagtgaggaggtggta

SEQ ID NO: 825910 - DNA, 75 bp, synthetic construct
  source 1..75: mol_type = other DNA
tttgaacacactgacgaagggctgacggcgcacggtcagcagtgtccttatgtcagaccggaacgcagggaggta

SEQ ID NO: 825911 - DNA, 75 bp, synthetic construct
  source 1..75: mol_type = other DNA
caatgtcaccacgattattatggggagcggtactgcacacactgccagaccgggcgtttcagtgaggaggaggta

SEQ ID NO: 825912 - DNA, 75 bp, synthetic construct
  source 1..75: mol_type = other DNA
caatgtcaccacgattattatggggagccgtactgcacacactgccagaccgggcgcttcagtgaggaggtggta

SEQ ID NO: 825913 - DNA, 75 bp, synthetic construct
  source 1..75: mol_type = other DNA
caatgtcaccacgattattatggggagctgtactgcacacactgccagaccgggcggttcagtgaggaggaggta

SEQ ID NO: 825914 - DNA, 75 bp, synthetic construct
  source 1..75: mol_type = other DNA
atgtacgcaaaatcctttttcgctcttgatagcaacggacgtctgacgggcgcccgtactgaacaggccgcacct

SEQ ID NO: 825915 - DNA, 75 bp, synthetic construct
  source 1..75: mol_type = other DNA
atgtacgcaaaatcctttatcgctcttgattgcaacggacgtctgacgggcgcccgtactgaacaggccgcacct

SEQ ID NO: 825916 - DNA, 75 bp, synthetic construct
  source 1..75: mol_type = other DNA
atataatcattaaagattatgaaagcgtcaaagaaaatgcttatcttatcgatccaaaaaaaataattacaatac

SEQ ID NO: 825917 - DNA, 75 bp, synthetic construct
  source 1..75: mol_type = other DNA
cgtggaaaataaaacgctgtctgccctgaatatccgggaaagtgacttctggcagccgggaacccgtgccgtgat

SEQ ID NO: 825918 - DNA, 75 bp, synthetic construct
  source 1..75: mol_type = other DNA
ctcagcagcggtggtgcagcggcgcaatcaaccagcggcgatcaaagcggtgcggcggcatcaacgacgccgaca

SEQ ID NO: 825919 - DNA, 75 bp, synthetic construct
  source 1..75: mol_type = other DNA
tcaacttacctgccaaacgccaattattggctgggtcagttaaactacaacaagggtaaaaagatgatgcggcgt

SEQ ID NO: 825920 - DNA, 75 bp, synthetic construct
  source 1..75: mol_type = other DNA
gcaactggcttgggtctgaaagaagctaaagacctggttgaatctgcaccggctgctctgaaagaaggcgtgagc

SEQ ID NO: 825921 - DNA, 75 bp, synthetic construct
  source 1..75: mol_type = other DNA
atgggcacgaccaaacacagcaaactgcttattctgggctcaggcccggcaggatatacagccgccgtttacgcg

SEQ ID NO: 825922 - DNA, 75 bp, synthetic construct
  source 1..75: mol_type = other DNA
tgcagatcagagaagcattacgcaatggaatagcacaaaatgtatataaacaaggcgaacgcttaccttctgaaa

SEQ ID NO: 825923 - DNA, 75 bp, synthetic construct
  source 1..75: mol_type = other DNA
acagaaccggctatcagatgaaggttaaagagttcgttggtgtaccggagttcaaagtggatacagacatcccta

SEQ ID NO: 825924 - DNA, 75 bp, synthetic construct
  source 1..75: mol_type = other DNA
gtcgtctgatggaagaagaaggtattcttgcaggtatctcttctggagcagctgttgccgcggcgttgaaactac

SEQ ID NO: 825925 - DNA, 75 bp, synthetic construct
  source 1..75: mol_type = other DNA
ccgtcatcgggtgagcgttatttaagcactgcattgtttgccgatctctttacagagaaagagctgcaacagtaa

SEQ ID NO: 825926 - DNA, 75 bp, synthetic construct
  source 1..75: mol_type = other DNA
cagttatcgcccaggcgctggcaggtgaagagattaaacctggcccgcataaaattcagggtattggcgctggtt

SEQ ID NO: 825927 - DNA, 75 bp, synthetic construct
  source 1..75: mol_type = other DNA
catcgttgtttcgatgttgatgggggcggtctatggctacttcctcgattactgccgccggctatttaaagtcag

SEQ ID NO: 825928 - DNA, 75 bp, synthetic construct
  source 1..75: mol_type = other DNA
catcgttgtttcgatgttgatgggggcggtttatggctacttcctcgattattgccgccgactgtttaaagtcag

SEQ ID NO: 825929 - DNA, 75 bp, synthetic construct
  source 1..75: mol_type = other DNA
aagaagatgaaagctttaccaacaagaatattgtggttattctaccatcatcgggtgagcgttatttaagcaccg

SEQ ID NO: 825930 - DNA, 75 bp, synthetic construct
  source 1..75: mol_type = other DNA
gcgatagcggcgaatacacttgcgacgcgctgattattgccaccggagcttctgcacgctatctcggcctgccct

SEQ ID NO: 825931 - DNA, 75 bp, synthetic construct
  source 1..75: mol_type = other DNA
gttacagacgcagtaattcaggtaacggtacttttgcaaaagtgatagcagccatcgagcgtctgaaatcatatc

SEQ ID NO: 825932 - DNA, 75 bp, synthetic construct
  source 1..75: mol_type = other DNA
tgaatgcaatggttgaactcgctaaaaataaagtccccctttatcacattatggatgtcgcaaaacgaatggaga

SEQ ID NO: 825933 - DNA, 75 bp, synthetic construct
  source 1..75: mol_type = other DNA
ctatggcaagtttatatcagctatttttatgcagtgggttaaaaatgatgttggtgaaatattcattcgccagtt

SEQ ID NO: 825934 - DNA, 75 bp, synthetic construct
  source 1..75: mol_type = other DNA
gaccatcagccaggctgtccgtggcggaaaattacccgccggctggtatcaggtgcctgtgacaaaggaaaccct

SEQ ID NO: 825935 - DNA, 75 bp, synthetic construct
  source 1..75: mol_type = other DNA
tattcggcggcctgtttttttcctgcaacgtgatggccggagccggtacgctggcccccacagtggtgccaatgg

SEQ ID NO: 825936 - DNA, 75 bp, synthetic construct
  source 1..75: mol_type = other DNA
atggctgaaaaattatccacctggaagttcattcttatctggctggtgtttgtgattatggcctccggttatttc

SEQ ID NO: 825937 - DNA, 75 bp, synthetic construct
  source 1..75: mol_type = other DNA
tgaactcaggctgccagatcatcgtttccgatggaagcataataagctttttctgcttctgcccccagcctttcc

SEQ ID NO: 825938 - DNA, 75 bp, synthetic construct
  source 1..75: mol_type = other DNA
atgggcatgtctgccgtgcagtcttccgcctttaaagcggcatccggggaaatggatatcagtgccctgcatctg

SEQ ID NO: 825939 - DNA, 75 bp, synthetic construct
  source 1..75: mol_type = other DNA
aagaagctaaagacctggtagaatctgcaccggctgctctgaaagaaggcgtgagcaaagacgacgcagaagcac

SEQ ID NO: 825940 - DNA, 75 bp, synthetic construct
  source 1..75: mol_type = other DNA
tgtggtattcggtaagttctacccgctgcataccggacatatctaccttatccagcgcgcctgtagccaggttga

SEQ ID NO: 825941 - DNA, 75 bp, synthetic construct
  source 1..75: mol_type = other DNA
atgagaaaaaataatacggcaataatattcggcggcctgtttttttcctgcagcgtgatggccagaacaggtacg

SEQ ID NO: 825942 - DNA, 75 bp, synthetic construct
  source 1..75: mol_type = other DNA
cgtatggacggggaatcacctgaagatggtccgctttgccgtggaaaataaaacgctgtctgccctgaatatccg

SEQ ID NO: 825943 - DNA, 75 bp, synthetic construct
  source 1..75: mol_type = other DNA
gtagcaaactaagctataaattgcagcgcgaattagaacagctaccacaactgcttgaggatttagaagccaaac

SEQ ID NO: 825944 - DNA, 75 bp, synthetic construct
  source 1..75: mol_type = other DNA
ttgcttgaagatctggaagcgaagctggaagccctacagacacaggtggcagatgcctctttcttcagtcagccg

SEQ ID NO: 825945 - DNA, 75 bp, synthetic construct
  source 1..75: mol_type = other DNA
ctcgatcgcggcaaacttgtgacctatccagggaattacgaccagtacctgctggaaaaagaagaagctctgcgt

SEQ ID NO: 825946 - DNA, 75 bp, synthetic construct
  source 1..75: mol_type = other DNA
catgagcagacacaaaaagtgctcgctgatatggctgctgcagagcaggagctggagcaagcctttgaacgctgg

SEQ ID NO: 825947 - DNA, 75 bp, synthetic construct
  source 1..75: mol_type = other DNA
caatgaactggcgaaagtccaggagcagcttgatcaccataatctgtggcaactggaaaaccgcatcaacgaagt

SEQ ID NO: 825948 - DNA, 75 bp, synthetic construct
  source 1..75: mol_type = other DNA
ggatgcttccttcttcagtcagccgcatgagcagacgcaaaaagtgctcgccgatatggctgctgcagagcagga

SEQ ID NO: 825949 - DNA, 75 bp, synthetic construct
  source 1..75: mol_type = other DNA
aaaactgtgcatttaattggcggctgcgatgtggctatggagctggacgcacgacgggcaattgcccagggaaca

SEQ ID NO: 825950 - DNA, 75 bp, synthetic construct
  source 1..75: mol_type = other DNA
tctggatcagatcttcgtcggcaaagtgacttcgtgtctggtcaatcctcgcgcctgccatgaaaccaaaatgcc

SEQ ID NO: 825951 - DNA, 75 bp, synthetic construct
  source 1..75: mol_type = other DNA
aatctggcggtggtcggcgctggtccggctgggctggcgtttgccattaacgcggcggcacgtggtcatcaggta

SEQ ID NO: 825952 - DNA, 75 bp, synthetic construct
  source 1..75: mol_type = other DNA
gtgatgggtaccgcaaagatgcaggtggaagaagccagccgctccggtaagatcgttttcgaaatggaagacgtt

SEQ ID NO: 825953 - DNA, 75 bp, synthetic construct
  source 1..75: mol_type = other DNA
gcgtacgcgccctgaaagcgatgcgtcgcgagcgtggtgaacgtcgcgaagtgatgggtaccgcaaagatgcagg

SEQ ID NO: 825954 - DNA, 75 bp, synthetic construct
  source 1..75: mol_type = other DNA
aagaggtgatggttaatggcaaaccacgccatgtactgggttatttgcaggacttcctgttccatccgaaacggg

SEQ ID NO: 825955 - DNA, 75 bp, synthetic construct
  source 1..75: mol_type = other DNA
tcgttatgttggcggttatcatgatgcccgtggtcagcaagaacagtatgtggcgcttaaacagcctgtggtgaa

SEQ ID NO: 825956 - DNA, 75 bp, synthetic construct
  source 1..75: mol_type = other DNA
gataatcgtgaaaaattcacccctgcacagaacatgatttacacccgtcgacgcgccggactggccgcgcagtag

SEQ ID NO: 825957 - DNA, 75 bp, synthetic construct
  source 1..75: mol_type = other DNA
tggccgttggtgaaaaaattaattattcggcgcaggacaatgacattttaacggccatcggattcaggcctgacg

SEQ ID NO: 825958 - DNA, 75 bp, synthetic construct
  source 1..75: mol_type = other DNA
tacaaagtcaccgtagaaggtcatgcggacgaacgtggtactccggaatacaacatctccctgggtgaacgtcgt

SEQ ID NO: 825959 - DNA, 75 bp, synthetic construct
  source 1..75: mol_type = other DNA
attcgctgcgtctggaatgagggctgccggttaaccccggccgtcgccgcacaccgtatttttattcttcagcat

SEQ ID NO: 825960 - DNA, 75 bp, synthetic construct
  source 1..75: mol_type = other DNA
ttaacggccatcggattcaggcctgatgcggcttcgtgggatgataatcgcgagaaattcaccccggcacagaac

SEQ ID NO: 825961 - DNA, 75 bp, synthetic construct
  source 1..75: mol_type = other DNA
atccgcgcggtgccgatcgcagaagcgatgctggcgatcgttttaatggatcacctgttacggcagcgggcgcaa

SEQ ID NO: 825962 - DNA, 75 bp, synthetic construct
  source 1..75: mol_type = other DNA
agctggaaaaccgcatcaacgaagtgctggcacagctggggttagatcctaacgttgcgctgtcgtcgctttccg

SEQ ID NO: 825963 - DNA, 75 bp, synthetic construct
  source 1..75: mol_type = other DNA
tcaacgtggcgacaaaattgccttgattggtccgaacggctgcggcaaaaccacgctgctgaaactgatgctaga

SEQ ID NO: 825964 - DNA, 75 bp, synthetic construct
  source 1..75: mol_type = other DNA
ctcgaactgcttgaagagctaatcgacagctaccaggggacggtgttgttagtaagccacgatcgtcagtttgtc

SEQ ID NO: 825965 - DNA, 75 bp, synthetic construct
  source 1..75: mol_type = other DNA
gcgaagaagttgagatgatcaccaaaggccgtcacgatccctgtgtcgggatccgcgcggtgccgatcgctgaag

SEQ ID NO: 825966 - DNA, 75 bp, synthetic construct
  source 1..75: mol_type = other DNA
tcgttgccagtggcgtccccgccggacttggcgagccggtctttgaccgcctggatgccgacatcgcccatgcgc

SEQ ID NO: 825967 - DNA, 75 bp, synthetic construct
  source 1..75: mol_type = other DNA
agatgggcgacattccgctggaaatcaaagactggtcgcaggttgaacaaaatccgttcttctgcccggacccgg

SEQ ID NO: 825968 - DNA, 75 bp, synthetic construct
  source 1..75: mol_type = other DNA
aaaaaaaatctggcggtggtcggtgcgggacctgctgggctggcgtttgccattaacgcggcggcgcgtgggcat

SEQ ID NO: 825969 - DNA, 75 bp, synthetic construct
  source 1..75: mol_type = other DNA
tcacagccgtcgttcaccagaaaacatccggatggtctgattttaccatcgctgcatgtggctaaccgtgagctg

SEQ ID NO: 825970 - DNA, 75 bp, synthetic construct
  source 1..75: mol_type = other DNA
ggcgcggcaactgcatcagagaggcatgcaaagaagggaaattgccagaaaattaggcatgccgctgcgcatagt

SEQ ID NO: 825971 - DNA, 75 bp, synthetic construct
  source 1..75: mol_type = other DNA
gcaataagcaaaggtcgtctgattcgagtaaatcagaacggtaaatttcgttactgcctgtcgggcgataattta

SEQ ID NO: 825972 - DNA, 75 bp, synthetic construct
  source 1..75: mol_type = other DNA
tgaaagtgtggcggtcacagtgcagtcacagccgtcgttcacaagaaagcatcaggatggtttgattttaccatc

SEQ ID NO: 825973 - DNA, 75 bp, synthetic construct
  source 1..75: mol_type = other DNA
ggcgctgatttaccggcagagccggaagctgcatccgtagcggaaacggatggtaaagcctttcctcagccagca

SEQ ID NO: 825974 - DNA, 75 bp, synthetic construct
  source 1..75: mol_type = other DNA
atggaaactgtatttgacgcactgaaagcactgaaaaaagcctcttcacaggtagtggcatcgcgccttggaatc

SEQ ID NO: 825975 - DNA, 75 bp, synthetic construct
  source 1..75: mol_type = other DNA
aagcagatgacctgattctaccatcgctgcatgtggctaaccgcgagctgcgccgggcgaaaagtgatgttcaga

SEQ ID NO: 825976 - DNA, 75 bp, synthetic construct
  source 1..75: mol_type = other DNA
aagcaatgggaaaagccacatccatagaacttgctgcgcgacttgatatcagtcgtgaagaagtgctgaacgagt

SEQ ID NO: 825977 - DNA, 75 bp, synthetic construct
  source 1..75: mol_type = other DNA
gccgcgctgcgggagctgaacaagcaccaggatattgttcgacagattgtcgattcatccggtcgtattgtgtcg

SEQ ID NO: 825978 - DNA, 75 bp, synthetic construct
  source 1..75: mol_type = other DNA
agaacggtaaatttcgttactgcataccgggcgctgatttaccggcagagccggaagctgcatccgtagcggaaa

SEQ ID NO: 825979 - DNA, 75 bp, synthetic construct
  source 1..75: mol_type = other DNA
ggaaagtgtggcggtcacagtgcagtcacagccgtcgttcaccagaaagcatccggatggtctgattttaccatc

SEQ ID NO: 825980 - DNA, 75 bp, synthetic construct
  source 1..75: mol_type = other DNA
tggtaaagcctttcctcagccagcaggtgttgcgttaccagtccgggaagcggaaacacaggaagaaatgaaaac

SEQ ID NO: 825981 - DNA, 75 bp, synthetic construct
  source 1..75: mol_type = other DNA
aatatgcagatggatgttgattatacaggtcctttatccgcatttttggataaaattgcattgaactatgatttg

SEQ ID NO: 825982 - DNA, 75 bp, synthetic construct
  source 1..75: mol_type = other DNA
gcggatcagttacagacgttcgatgaaacgatcctcgccagtgggatcgtgccgcgcgttccgcctatcgacggg

SEQ ID NO: 825983 - DNA, 75 bp, synthetic construct
  source 1..75: mol_type = other DNA
gcttaatctgctgttctgcgtgctggtgattcgcgcacgcgggaacgtttcaaaaatctttgtattacgaaggcg

SEQ ID NO: 825984 - DNA, 75 bp, synthetic construct
  source 1..75: mol_type = other DNA
ctcagctatctgtgtggtcgtctgttagcggcgaactggctggtggtgttttttaatctgctgttctgcgtgctg

SEQ ID NO: 825985 - DNA, 75 bp, synthetic construct
  source 1..75: mol_type = other DNA
gccgagttctgtaatgagtgggggatcgacagcagcctgcaacaggccggaggtttaagtccgcaaggcatgcag

SEQ ID NO: 825986 - DNA, 75 bp, synthetic construct
  source 1..75: mol_type = other DNA
tcaacggcgaaacgcaggtattagcagtggacaatgtggtgatctgcgcagggcaagagccaaaccgcgcgctgg

SEQ ID NO: 825987 - DNA, 75 bp, synthetic construct
  source 1..75: mol_type = other DNA
gcggtgcgtgaacgcgttggcaacgactttatcattatctaccgtctgtcgatgctcgacctggtagaaggcggc

SEQ ID NO: 825988 - DNA, 75 bp, synthetic construct
  source 1..75: mol_type = other DNA
atgactggtgtcactcgtcaggtcggtacggtcagtgccgttgataccgacagggttcaggcccgcgttcgtctg

SEQ ID NO: 825989 - DNA, 75 bp, synthetic construct
  source 1..75: mol_type = other DNA
atcaggcacaagcgaatcaccttgagattgttttgcatctcagggcagatctgttctggttccgcggccattttg

SEQ ID NO: 825990 - DNA, 75 bp, synthetic construct
  source 1..75: mol_type = other DNA
cagtatggtgtaacgctttcagaacttgttggctcaaataatggtttcgatcaggcaactgttaatggaaccgta

SEQ ID NO: 825991 - DNA, 75 bp, synthetic construct
  source 1..75: mol_type = other DNA
tgaatgtggcgttatgcacggttatcgtactgacgctctttttttaccgtcgtcgtgattccagacataaaccgc

SEQ ID NO: 825992 - DNA, 75 bp, synthetic construct
  source 1..75: mol_type = other DNA
ttttaatctgttgttctgcgtgctggtaatacgcgcacgcgggaacgtcacaaaaatctttccattgttgaggtg

SEQ ID NO: 825993 - DNA, 75 bp, synthetic construct
  source 1..75: mol_type = other DNA
cgcgaccatccatggcaatatcgagattaaagggaatgcccactccacaggtagcatgctgtctgacggccagaa

SEQ ID NO: 825994 - DNA, 75 bp, synthetic construct
  source 1..75: mol_type = other DNA
tgttccggcggcattacaacgccgcgtgctggtgtatggcgtgctcggggcgattgttctgcgtaccatcatgat

SEQ ID NO: 825995 - DNA, 75 bp, synthetic construct
  source 1..75: mol_type = other DNA
cattggcgacaagccgctggtgcgctggctgcgcggtcatttgcgcatgaccgacaccatcgacaacgagcattt

SEQ ID NO: 825996 - DNA, 75 bp, synthetic construct
  source 1..75: mol_type = other DNA
ggcctggtcgctggtctgggtgacgctgtcgttactgtttaacgccgctttctggtggtatctggtgcaaaccga

SEQ ID NO: 825997 - DNA, 75 bp, synthetic construct
  source 1..75: mol_type = other DNA
tctgtttgtgccgttggcagatgttgatgatgttgataacgccgacatcaatcagcgccttatggaatccatcga

SEQ ID NO: 825998 - DNA, 75 bp, synthetic construct
  source 1..75: mol_type = other DNA
cttgtctacaaaattttttgcgtttcagaaagtaatgacgcccgcgagtgtgcagctccgggcgtcgtggcgtcg

SEQ ID NO: 825999 - DNA, 75 bp, synthetic construct
  source 1..75: mol_type = other DNA
ggggcgcgaagtcgctgacccgcaggcgctggccttcctcacgggttatctgattgagaaatcgctggcggtcga

SEQ ID NO: 826000 - DNA, 75 bp, synthetic construct
  source 1..75: mol_type = other DNA
tcgttcggcaatcgaagacggggtagtggagccacacgagcagacagcaattaatgatgagttgtatctgtcaat

SEQ ID NO: 826001 - DNA, 75 bp, synthetic construct
  source 1..75: mol_type = other DNA
gatggcgatcagattttcccgctgggatgggcaatgattttacagcgtgctgctggcactcactacattgcggat

SEQ ID NO: 826002 - DNA, 75 bp, synthetic construct
  source 1..75: mol_type = other DNA
agcatcggataccgtccgcgtattctggccgcgccggagctggacacggaggcggtaacaaaatccctgtgcgtg

SEQ ID NO: 826003 - DNA, 75 bp, synthetic construct
  source 1..75: mol_type = other DNA
tatggggcggattcgctgttgttgtcgccattatgctggctatcgacctgttgttgcaggggcgtcgtggggcac

SEQ ID NO: 826004 - DNA, 75 bp, synthetic construct
  source 1..75: mol_type = other DNA
cagcgcctgctggaagtcattgaacagatcggcagttattccagacagattcgttcagcaatcgaagacggtgta

SEQ ID NO: 826005 - DNA, 75 bp, synthetic construct
  source 1..75: mol_type = other DNA
attaccagagatgaaagaattctcatcagaaaaaatatatgattacatcgatataatcattgaagattatgaaaa

SEQ ID NO: 826006 - DNA, 75 bp, synthetic construct
  source 1..75: mol_type = other DNA
agatcggcagttattcaaaacagattcgttcagcaattgaagacggggtggtggaaccacacgagcaggcagcaa

SEQ ID NO: 826007 - DNA, 75 bp, synthetic construct
  source 1..75: mol_type = other DNA
actggtgtcgggcattatcatttagtcctacgaaagcgaagaactatcagcgttataacgaacggataaaaggaa

SEQ ID NO: 826008 - DNA, 75 bp, synthetic construct
  source 1..75: mol_type = other DNA
agctgtcagaaaaactatcgcggcgttgccggggggttacgctgaagctgctgactggctggatgtaacagagaa

SEQ ID NO: 826009 - DNA, 75 bp, synthetic construct
  source 1..75: mol_type = other DNA
ggaatttttctgtattgatgacgacagtcctgatttaatggatgaatactttaatactctcttagaggctctcta

SEQ ID NO: 826010 - DNA, 75 bp, synthetic construct
  source 1..75: mol_type = other DNA
cggcatcgtggttccaacctacaaaagctactttttctttaaatacggctctaaaaacgatgattttcttggcat

SEQ ID NO: 826011 - DNA, 75 bp, synthetic construct
  source 1..75: mol_type = other DNA
gcccgggaacgtatcaacatgatcaccgggaggtaccggcagaatatttttgagcagacgggtggagattactgg

SEQ ID NO: 826012 - DNA, 75 bp, synthetic construct
  source 1..75: mol_type = other DNA
gctggcactcactacattgcggatgctgtcgcacagtctgctggtggggtgtttgtatcgcttcctgaaattgag

SEQ ID NO: 826013 - DNA, 75 bp, synthetic construct
  source 1..75: mol_type = other DNA
gctgtcgcacagtctgctggtggggtgtttgtatcgctccctgaaattgaggaagtggagaacgccgatatcaac

SEQ ID NO: 826014 - DNA, 75 bp, synthetic construct
  source 1..75: mol_type = other DNA
ggcggactgccgaaacgagatgtgaatacggtcagcgaacctgacagccaaattccaccaggattcagagggtaa

SEQ ID NO: 826015 - DNA, 75 bp, synthetic construct
  source 1..75: mol_type = other DNA
taatgagaagggaaagaaattcctcggatggcaaggagaatggaaagggcgaaatagaacgaaagcccgtgtttt

SEQ ID NO: 826016 - DNA, 75 bp, synthetic construct
  source 1..75: mol_type = other DNA
taatgagaagggaaagaagtttctaggatggcaaggagaatggaaagggcgcaacaagacaaaagcccgtgtttt

SEQ ID NO: 826017 - DNA, 75 bp, synthetic construct
  source 1..75: mol_type = other DNA
agttaagaagggtcagggagattgatacgctcgataagattattgagcgtaaggaaaattcattgccgttaacgg

SEQ ID NO: 826018 - DNA, 75 bp, synthetic construct
  source 1..75: mol_type = other DNA
caacgggttccgcttctggggcaaccgcacaccggaaacgaacgcctacatctttgaggtgtatacccgaaccgc

SEQ ID NO: 826019 - DNA, 75 bp, synthetic construct
  source 1..75: mol_type = other DNA
ttaacaattacttgaacagaattagattaccagagatgaaagcattctcatcagaaaaaaatagattattacatc

SEQ ID NO: 826020 - DNA, 75 bp, synthetic construct
  source 1..75: mol_type = other DNA
gaaacatataaaagctcatcgaaaatcaacaattgcttgaacagaattaaattaccagagatgaaagaattctca

SEQ ID NO: 826021 - DNA, 75 bp, synthetic construct
  source 1..75: mol_type = other DNA
gacaagtacgatatccgttctgacttcgctcaaatgctggatgcacatgcaaacttcctgcgtagcaacccgtct

SEQ ID NO: 826022 - DNA, 75 bp, synthetic construct
  source 1..75: mol_type = other DNA
gcgatggcgtggcacactatcagagccgtcgtaaagatgaacgcttttatggcctcggagataaagccggcgatc

SEQ ID NO: 826023 - DNA, 75 bp, synthetic construct
  source 1..75: mol_type = other DNA
cactcttcggtccaaaatggagtcttgggtacagcggttccacgatgcactatacagatgcaccggatactcaga

SEQ ID NO: 826024 - DNA, 75 bp, synthetic construct
  source 1..75: mol_type = other DNA
agacattaccgaagaacaattaaagattatgaaagcgtcaaagaaaatgcttatcttatcgatccaaaaattaat

SEQ ID NO: 826025 - DNA, 75 bp, synthetic construct
  source 1..75: mol_type = other DNA
ttctatgttgaccggtatttccacccctgtacgtctcaccacctatatggtcgtggaaagccttggtggtgagtt

SEQ ID NO: 826026 - DNA, 75 bp, synthetic construct
  source 1..75: mol_type = other DNA
taagcaactgaccaaacggcaaaaagagcgtctggtagcggaaggcgcagggtttgcagagctgttaagcagtct

SEQ ID NO: 826027 - DNA, 75 bp, synthetic construct
  source 1..75: mol_type = other DNA
ttccgcacaggatagcgacattttaacgactatcggattcaggcctgacgcggcttctgtggatgactgcgtatt

SEQ ID NO: 826028 - DNA, 75 bp, synthetic construct
  source 1..75: mol_type = other DNA
accgtgtgcttgagcgtctgaatgctggcaaaaccgtgcgaagctttctgatcaccgccgtcgagcttttgaccg

SEQ ID NO: 826029 - DNA, 75 bp, synthetic construct
  source 1..75: mol_type = other DNA
cgagagctgtattgaagcattccatgaggcagaaaccagcgtgaatcataccgcttttcgccgtaatcaatggga

SEQ ID NO: 826030 - DNA, 75 bp, synthetic construct
  source 1..75: mol_type = other DNA
accagaacatcgtcgacaaaatcgagtacctgaactgctcgcgcgaatttttcacccgcaatttcataccgggta

SEQ ID NO: 826031 - DNA, 75 bp, synthetic construct
  source 1..75: mol_type = other DNA
agagaacgaagtcattgcacaagccagccgggaacaaatgcgggcacagtgtctgcgtcatcgtgcaacttacat

SEQ ID NO: 826032 - DNA, 75 bp, synthetic construct
  source 1..75: mol_type = other DNA
ttattcccaattaaaggaacgggtaaatccaccggacttctgtttgaagatgatggcgaaacttggggatatact

SEQ ID NO: 826033 - DNA, 75 bp, synthetic construct
  source 1..75: mol_type = other DNA
acttgatatcaccaaagcctttgttcgtttgacggggaaaacactcttcggtccaaaatggagtcttgggtacag

SEQ ID NO: 826034 - DNA, 75 bp, synthetic construct
  source 1..75: mol_type = other DNA
tcctcagggagaaagtcgtcaactactgattaacggcattgaagcttatgaatggaatatgaacccatcctgtaa

SEQ ID NO: 826035 - DNA, 75 bp, synthetic construct
  source 1..75: mol_type = other DNA
acgagctgaacgccgcaggcatcaccaccctgatcaaacaggatggttatcgcatctggggatcacgtacctgcg

SEQ ID NO: 826036 - DNA, 75 bp, synthetic construct
  source 1..75: mol_type = other DNA
atcacgcggcctcagtcgatgctcggcaaggcagggaaaacagggacgttgtacaaaacactgaaagctatttca

SEQ ID NO: 826037 - DNA, 75 bp, synthetic construct
  source 1..75: mol_type = other DNA
tgtacaaacacattccattcaccatcccccgccgcgatgacattagcttcggcctgttttatgacaacctcagca

SEQ ID NO: 826038 - DNA, 75 bp, synthetic construct
  source 1..75: mol_type = other DNA
gatgagttcacaccagactcgctgaaagccctggcattgtggatgaagcgcaatgccaggaatgaagtagaaacg

SEQ ID NO: 826039 - DNA, 75 bp, synthetic construct
  source 1..75: mol_type = other DNA
gttgggcattgccggagttccctttgctgagcacggccagttctattttgaggataaaaattgccgggtttgggg

SEQ ID NO: 826040 - DNA, 75 bp, synthetic construct
  source 1..75: mol_type = other DNA
cgtcgcgaagcggaagaagagttgggcattgccggtgtcccctttgccgagcacgggcagttctatttcgaagat

SEQ ID NO: 826041 - DNA, 75 bp, synthetic construct
  source 1..75: mol_type = other DNA
ggatatactgaaggtaatgctctgtggcttgaatgggagctggactgcacagccactacaattgagttaagaata

SEQ ID NO: 826042 - DNA, 75 bp, synthetic construct
  source 1..75: mol_type = other DNA
gtgatggtgttgcacactatcaaagtcgacgtaatgacgagcgtttttatggacttggagataaatccggggatc

SEQ ID NO: 826043 - DNA, 75 bp, synthetic construct
  source 1..75: mol_type = other DNA
cgcgctttgaatgtaagactatctatgagatgaccagcgaactggcaaaacgtcttggcgttgagcaacagttta

SEQ ID NO: 826044 - DNA, 75 bp, synthetic construct
  source 1..75: mol_type = other DNA
gggcgatccggatctggcaaaactgccggtgctttcagctgccgcaccgtttaaagttggtggtcgcaaaaatga

SEQ ID NO: 826045 - DNA, 75 bp, synthetic construct
  source 1..75: mol_type = other DNA
atgaacaccagtggttccagtactgctgtgggttatgacgctatagctgaaggccaatatagctctgccatcggg

SEQ ID NO: 826046 - DNA, 75 bp, synthetic construct
  source 1..75: mol_type = other DNA
ttctgtgaatactgacggtgtgtttaccggtccaacctacaaaatcggtgaaacaaattattataacgtcggcga

SEQ ID NO: 826047 - DNA, 75 bp, synthetic construct
  source 1..75: mol_type = other DNA
gttcttctactaaccaacgccgtatcaccaacgtagctgccggtgttaatgccaccgatgcggttaacgtgtcgc

SEQ ID NO: 826048 - DNA, 75 bp, synthetic construct
  source 1..75: mol_type = other DNA
gcatcattaccaacgtcgctgatggcacgatttcagactccagttccgacgctgttaacggttcgcagttgtatg

SEQ ID NO: 826049 - DNA, 75 bp, synthetic construct
  source 1..75: mol_type = other DNA
cagagtgaatacatggatatttgcctggcaatggtgcgttctgctgatgcgatctatctgcttaagggatgggat

SEQ ID NO: 826050 - DNA, 75 bp, synthetic construct
  source 1..75: mol_type = other DNA
gcgacaccgccaatgcgtcaaaagcgtattcaatggcgctgggagcaagtagcgtcgcatctgaagaaaacgcaa

SEQ ID NO: 826051 - DNA, 75 bp, synthetic construct
  source 1..75: mol_type = other DNA
aatagggtatcaggcaagagctttaggtgaaggaagtactgcattaggttaccaaagcctggcaacaggagatcg

SEQ ID NO: 826052 - DNA, 75 bp, synthetic construct
  source 1..75: mol_type = other DNA
caggaaacgaagcaatacaccgatcagcgcatggttgagatggataacaaactgtccaaaactgaaagcaagctg

SEQ ID NO: 826053 - DNA, 75 bp, synthetic construct
  source 1..75: mol_type = other DNA
cactgacgccgttaacggctcccagctcaaaaccaccaacgataacgtgtcgaccaacaccaccaacatcgccac

SEQ ID NO: 826054 - DNA, 75 bp, synthetic construct
  source 1..75: mol_type = other DNA
tctgggatgcggacgccggtgaaaatggtgcatttagcgccgctcacggaaaagataaaactgccagtgtaatca

SEQ ID NO: 826055 - DNA, 75 bp, synthetic construct
  source 1..75: mol_type = other DNA
gggtggtgccgaagtcaatgcagacggcaccatcactgcgccgacgtacaccattgctaatgctgattacgataa

SEQ ID NO: 826056 - DNA, 75 bp, synthetic construct
  source 1..75: mol_type = other DNA
ggactcttccaaagcggaaggagcaaacgccattgccctgggaaatgccactaaagctactgagattatgagtat

SEQ ID NO: 826057 - DNA, 75 bp, synthetic construct
  source 1..75: mol_type = other DNA
ggcacgggttccgtagcagacgaagaaaatacgatctctgtgggttcttctaccaaccagcgccgtatcaccaac

SEQ ID NO: 826058 - DNA, 75 bp, synthetic construct
  source 1..75: mol_type = other DNA
ccagtaatattgccgataacactgccaacattgctaccaacaccagtaatattgccgataacactgccaacattg

SEQ ID NO: 826059 - DNA, 75 bp, synthetic construct
  source 1..75: mol_type = other DNA
gtaacaccagcgtatcggaagaaggtgttgtgattggttatgacaccacggatggcgaactgcttggcgcgttgt

SEQ ID NO: 826060 - DNA, 75 bp, synthetic construct
  source 1..75: mol_type = other DNA
taggtgctgacagtagcagttcgaacgataacgccatcgcgatagggaacaaaacgcaagccctgggagtgaatt

SEQ ID NO: 826061 - DNA, 75 bp, synthetic construct
  source 1..75: mol_type = other DNA
aacgttaaagcaggtactttatctgaaaatagtacggacgcagttaacggtgcgcagctgaacgcgactaacgcg

SEQ ID NO: 826062 - DNA, 75 bp, synthetic construct
  source 1..75: mol_type = other DNA
atcgccagcaatacggctaacattgcgaccaacaccgccaatattaatactctcaatacgtcgatcgataccctt

SEQ ID NO: 826063 - DNA, 75 bp, synthetic construct
  source 1..75: mol_type = other DNA
acattgtcaccaccggtagcaccaagtacttcaagaccaacaccgatggcgtagatgccaacgcccagggtaaag

SEQ ID NO: 826064 - DNA, 75 bp, synthetic construct
  source 1..75: mol_type = other DNA
taaataccgtcaaatcatcaacgtcgccgatggttccgaagcccatgacgccgttacggttcgccagctgcaaaa

SEQ ID NO: 826065 - DNA, 75 bp, synthetic construct
  source 1..75: mol_type = other DNA
aaccagcaccgatgtagtaaacggctctcaattgtacgacctgcagcaggatgctctgttgtggaacggcacagc

SEQ ID NO: 826066 - DNA, 75 bp, synthetic construct
  source 1..75: mol_type = other DNA
tctggcgaatccagtattgcattaggtagcaccagtgaggccagcgaacaaaatgcgattgcgctggggcaaggt

SEQ ID NO: 826067 - DNA, 75 bp, synthetic construct
  source 1..75: mol_type = other DNA
tttatggcgtagcggattcatttacgtcatatcttggtggtggtgctgatatcagcgatacgggtgtattaagtg

SEQ ID NO: 826068 - DNA, 75 bp, synthetic construct
  source 1..75: mol_type = other DNA
cgataacgtgtcgaccaacaccaccaacatcaccaacctgacggattccgttggcgaccttaaggacgattctct

SEQ ID NO: 826069 - DNA, 75 bp, synthetic construct
  source 1..75: mol_type = other DNA
acgccaccagcaagatcaccaatgtcaaagccggtgacctgacagctggcagcactgacgccgttaacggctctc

SEQ ID NO: 826070 - DNA, 75 bp, synthetic construct
  source 1..75: mol_type = other DNA
cactgacgccgttaacggctctcagctcaaaaccaccaacgataacgtgccgaccaacaccaccaacatcgccac

SEQ ID NO: 826071 - DNA, 75 bp, synthetic construct
  source 1..75: mol_type = other DNA
atgacaccacggatggcgaactgcttggcgcgttgtcaattggtgatgatggtaaatatcgtcaaatcatcaacg

SEQ ID NO: 826072 - DNA, 75 bp, synthetic construct
  source 1..75: mol_type = other DNA
gcgaaagccgaagttacgcttgatggcggtacattttttgaacccaccgcactgagtgatgtttggattgctatt

SEQ ID NO: 826073 - DNA, 75 bp, synthetic construct
  source 1..75: mol_type = other DNA
atggcactaacaccaccagcaaaatcaccaatgtcatggccggtgacctgtctggcaccagtaccgatgccgtca

SEQ ID NO: 826074 - DNA, 75 bp, synthetic construct
  source 1..75: mol_type = other DNA
caaccaatattctggttacgcaaaatagccaaatgattaaccagcttgccggtaacaccagcgaaacctacatcg

SEQ ID NO: 826075 - DNA, 75 bp, synthetic construct
  source 1..75: mol_type = other DNA
actgaagtcttctgaagcaggcggcgttcgctacgacaccaaagctgatggctctatcgactacagcaacatcac

SEQ ID NO: 826076 - DNA, 75 bp, synthetic construct
  source 1..75: mol_type = other DNA
cgctgaaaatgcaacggctgtaggtactaaatcgaaggcaaaaggcaaaaacagtctggcattaggcgcaaacag

SEQ ID NO: 826077 - DNA, 75 bp, synthetic construct
  source 1..75: mol_type = other DNA
gataccgatgcggttaacgtgggtcagttgaaagtcaccgatgagcgcgtagcgcaaaatacccagagcattact

SEQ ID NO: 826078 - DNA, 75 bp, synthetic construct
  source 1..75: mol_type = other DNA
agtgaagacggtcaacgtcagatcaccaacgtcgcagcaggttcggcggataccgatgcggttaacgtgggtcag

SEQ ID NO: 826079 - DNA, 75 bp, synthetic construct
  source 1..75: mol_type = other DNA
ggtaaatatcgtcaaatcatcaacgtagccgatggttccgaagcccatgacgccgttacggttcgccagttgcaa

SEQ ID NO: 826080 - DNA, 75 bp, synthetic construct
  source 1..75: mol_type = other DNA
tcacgatgcggttaactacgcacagctaaaacaaagtatccaggataccaatagctacacagaccagaaaatggt

SEQ ID NO: 826081 - DNA, 75 bp, synthetic construct
  source 1..75: mol_type = other DNA
gctggcggcagttacaacaacgtcggtgacgcgctggaagcgatcgataccacgctggatgatgctctgctgtgg

SEQ ID NO: 826082 - DNA, 75 bp, synthetic construct
  source 1..75: mol_type = other DNA
gtaggttataacgcagttgcctctcatgccagcagtgtagccatcggtcaggacagcatcagcgaagttgatacg

SEQ ID NO: 826083 - DNA, 75 bp, synthetic construct
  source 1..75: mol_type = other DNA
ctttcggtcaggcaggaaaggcagatggtgtaaattctattgcgctgggtaataaaagtcagtcaagcggcgaaa

SEQ ID NO: 826084 - DNA, 75 bp, synthetic construct
  source 1..75: mol_type = other DNA
tcggtcgccttagggcaatcaacggtttccacgggtagccgttcaatcgccatcggcagtgcggctaaagcgacc

SEQ ID NO: 826085 - DNA, 75 bp, synthetic construct
  source 1..75: mol_type = other DNA
tggattgctattggtaaagaggccgtcgcctcatcagatacaatgggtacaggcacaacgggtagcgggagtgtt

SEQ ID NO: 826086 - DNA, 75 bp, synthetic construct
  source 1..75: mol_type = other DNA
gaccaaaccaatggcaaatacagcgctgcccatggcaacaacgccactagcaaaatcaccaatgtcaccgctggc

SEQ ID NO: 826087 - DNA, 75 bp, synthetic construct
  source 1..75: mol_type = other DNA
cactgacgccgttaacggctcacagctcaaaaccaccaacgaaaacgtgacgaccaacaccaccaacatcgccac

SEQ ID NO: 826088 - DNA, 75 bp, synthetic construct
  source 1..75: mol_type = other DNA
ccgctgtgggttataactctgttgcttccaaagccagcagcgtagccattggtcaggacagccgcagcgaagttg

SEQ ID NO: 826089 - DNA, 75 bp, synthetic construct
  source 1..75: mol_type = other DNA
gaccaactacaccgcctacaacatggacgcaccgcagaactctgtgggtgagttctctgtcggcagtgaagacgg

SEQ ID NO: 826090 - DNA, 75 bp, synthetic construct
  source 1..75: mol_type = other DNA
acaccacggatggcgaactgcttggtgcattgtcgatcggtgatgatggtaaatatcgtcaaatcatcaacgtcg

SEQ ID NO: 826091 - DNA, 75 bp, synthetic construct
  source 1..75: mol_type = other DNA
tgaagacgcaggtgcctacaacgccagccatgatggcaatgccagcaaaatcaccaacgttgcggctggtgatct

SEQ ID NO: 826092 - DNA, 75 bp, synthetic construct
  source 1..75: mol_type = other DNA
caacgacgcggtgaactacgcgcagttgaagcaaagcgtgcaggaaacgaagcaatacaccgatcagcgcatggt

SEQ ID NO: 826093 - DNA, 75 bp, synthetic construct
  source 1..75: mol_type = other DNA
cggcaatgactcattaaaacgcaagatcgtgaatgtgaaaaatggcaccatcaaagctgacagcaatgacgccat

SEQ ID NO: 826094 - DNA, 75 bp, synthetic construct
  source 1..75: mol_type = other DNA
agcgcggagcaaatgtatcagttagtgaatgacgttcagtcttatcctcagtttttgccaggttgtaccggaagt

SEQ ID NO: 826095 - DNA, 75 bp, synthetic construct
  source 1..75: mol_type = other DNA
gcgaagacggtcaacgtcagatcaccaacgtcgcagcaggttcggcggataccgatgcggttaacgtgggtcagt

SEQ ID NO: 826096 - DNA, 75 bp, synthetic construct
  source 1..75: mol_type = other DNA
gaagctatttatgacagatacgactattttgaagagaggaaaaaagctctttatgctctttcagatttaatgtgc

SEQ ID NO: 826097 - DNA, 75 bp, synthetic construct
  source 1..75: mol_type = other DNA
gaaattactcttggtaaggtatctcttctgtccctgtccgaagcacgtagtctcgctgaggatactcgaagaaaa

SEQ ID NO: 826098 - DNA, 75 bp, synthetic construct
  source 1..75: mol_type = other DNA
ggcacaggatgattaccaatcgttgtctattcagggaaacggtgcgctgggaataacagaaaatagttatattgg

SEQ ID NO: 826099 - DNA, 75 bp, synthetic construct
  source 1..75: mol_type = other DNA
cgcgaaagcagcgcgcagatgagtgtgaagcgtatggcaagtctgattgagtacacgacagcatgggctattggt

SEQ ID NO: 826100 - DNA, 75 bp, synthetic construct
  source 1..75: mol_type = other DNA
accagaacaatggaaggttttgttgatcagcggtcatgcagtggcaacaaaacaggaagctgatgttttgcccgg

SEQ ID NO: 826101 - DNA, 75 bp, synthetic construct
  source 1..75: mol_type = other DNA
cccattgacctcaatattctcaacccactacttaacatggtctacggcactttggagcagaataagcgaatacta

SEQ ID NO: 826102 - DNA, 75 bp, synthetic construct
  source 1..75: mol_type = other DNA
cggtctgcactgggacggcgatgttctctggcaatcgcaacgtcatgacgcctatcgcgaagcactcgcctggtt

SEQ ID NO: 826103 - DNA, 75 bp, synthetic construct
  source 1..75: mol_type = other DNA
ctggtacgcattgaagatatcgacccgcctcgtgaagttcccggtgccgcagaaactatcctgcgccagctggaa

SEQ ID NO: 826104 - DNA, 75 bp, synthetic construct
  source 1..75: mol_type = other DNA
aagagatgacagacacacactatattgggcgctttgccccctcaccttccggcgaacttcattttggttctctga

SEQ ID NO: 826105 - DNA, 75 bp, synthetic construct
  source 1..75: mol_type = other DNA
gaataacagaaaatagttatattggtgcacactggaatttcaacggttatgatgcagatgatgtcagtgacagta

SEQ ID NO: 826106 - DNA, 75 bp, synthetic construct
  source 1..75: mol_type = other DNA
gaaagttcggcaacgttgtttattaatccgcaatggaattcagctttcgatgcgaagtcattatatttaaatcca

SEQ ID NO: 826107 - DNA, 75 bp, synthetic construct
  source 1..75: mol_type = other DNA
tgtttacctctttctcagggagtttagtctccaggattcccggggcggttcagatcatgcttcaggtgctcgtga

SEQ ID NO: 826108 - DNA, 75 bp, synthetic construct
  source 1..75: mol_type = other DNA
atgaagcaaacaatcttcctccgtggtaaacaacaacagcaagccgcaatcaacgccatcctcgcaacaccactc

SEQ ID NO: 826109 - DNA, 75 bp, synthetic construct
  source 1..75: mol_type = other DNA
cgacgaagaaatcccagcgttccctggatcaggacgatatgttcaatgccctggtgaaacttcagtcacgctctg

SEQ ID NO: 826110 - DNA, 75 bp, synthetic construct
  source 1..75: mol_type = other DNA
ggatgaggacgatatgttcaatgcactggtaaaacttcagtcacgatctgaagaaatatttggtaagaaacagat

SEQ ID NO: 826111 - DNA, 75 bp, synthetic construct
  source 1..75: mol_type = other DNA
ccgaccgccagtgccgtcgtctgcttgcgcgttatcgtgaagatggtccgcttggcatgaccagccgccgtcgtg

SEQ ID NO: 826112 - DNA, 75 bp, synthetic construct
  source 1..75: mol_type = other DNA
caatcaaagtcaggcagtagcggctggcgcaattgccatcggtcaagggaataaagctgacggcgcaaatgctat

SEQ ID NO: 826113 - DNA, 75 bp, synthetic construct
  source 1..75: mol_type = other DNA
taggtgaattttctattgcacaaggggatcacgcagagactggtgctgatgacgccatcgcatttggacgtgaaa

SEQ ID NO: 826114 - DNA, 75 bp, synthetic construct
  source 1..75: mol_type = other DNA
gattgaggacaacgagtacagtcgaagagccatcggcaagtatattgatgtctggcattatcctgacggacataa

SEQ ID NO: 826115 - DNA, 75 bp, synthetic construct
  source 1..75: mol_type = other DNA
atggaaagacaaaggtatcatctgattaatgaatccgtcagagctaacgcattaaacgcagtaaaatccgccccc

SEQ ID NO: 826116 - DNA, 75 bp, synthetic construct
  source 1..75: mol_type = other DNA
gtaagcagcagcaacaatttgccattaacgccatccttgcaacaactctcgataaagacaaacccgttacgatcc

SEQ ID NO: 826117 - DNA, 75 bp, synthetic construct
  source 1..75: mol_type = other DNA
caacgccatcctcgcaacaccactcgataaagaaaagccagttaccatccgcattactgactacaagcgcaatct

SEQ ID NO: 826118 - DNA, 75 bp, synthetic construct
  source 1..75: mol_type = other DNA
ggaccaggacgatatgttcaatgcacttgtaaaacttcagacacgagctgaggagatttttggtgaacgcaacca

SEQ ID NO: 826119 - DNA, 75 bp, synthetic construct
  source 1..75: mol_type = other DNA
tgcagatgcagagaaaagactttctgataaaaccagtgtcgagtatgtaatgtactctagagtttcttcttctat

SEQ ID NO: 826120 - DNA, 75 bp, synthetic construct
  source 1..75: mol_type = other DNA
gataaagacaagccagtcacaatccgcattactgactacaagcgaaatcttgaccagaacgcaaaatttcacgcg

SEQ ID NO: 826121 - DNA, 75 bp, synthetic construct
  source 1..75: mol_type = other DNA
cacaaggcgctaaactttccaagcagaatcatgcgcctgcgttgccgaaaggcgatcctcgcccggtgttaatcg

SEQ ID NO: 826122 - DNA, 75 bp, synthetic construct
  source 1..75: mol_type = other DNA
cccggctggcgcaaatttcgattccggcggtcagtaacattttgcaggagctggaaaacgaaaagcgggtggtga

SEQ ID NO: 826123 - DNA, 75 bp, synthetic construct
  source 1..75: mol_type = other DNA
gctagcgctggcggagaaatggcaaaataattcgcaagtgcgtgatttctgcgtaatatcaacgttgattacggc

SEQ ID NO: 826124 - DNA, 75 bp, synthetic construct
  source 1..75: mol_type = other DNA
cattgagtgtcaggtcgctaatgcctgtttaagtccgaaaggcgaatttgaacgctttcagattgacgctccaac

SEQ ID NO: 826125 - DNA, 75 bp, synthetic construct
  source 1..75: mol_type = other DNA
gattatcgctggccgtcaaattcccgtatcggtaaacgggatgcctttcagtttctcggtgtgggtgaggaaaac

SEQ ID NO: 826126 - DNA, 75 bp, synthetic construct
  source 1..75: mol_type = other DNA
tatcgctggccgtcaaattcccgtatcggtaaacgggatgcctaccagtttctcggcgttggtgaggaaaacatg

SEQ ID NO: 826127 - DNA, 75 bp, synthetic construct
  source 1..75: mol_type = other DNA
tgtatggtcgcagttgcgcctttggcgagaactggcttaataccataattcgccagacgggatttaacccgttcg

SEQ ID NO: 826128 - DNA, 75 bp, synthetic construct
  source 1..75: mol_type = other DNA
cgctagcagtatcactactctgaacgcggacgttgataccctggaaaaagatgccctgctctggaatggcacagc

SEQ ID NO: 826129 - DNA, 75 bp, synthetic construct
  source 1..75: mol_type = other DNA
gccgcaggtagcctggctgatgacagtactgatgcggtaaacggtgcacagttgaaagcgaccaacgatagcatc

SEQ ID NO: 826130 - DNA, 75 bp, synthetic construct
  source 1..75: mol_type = other DNA
cagatagcgactacgcgctttctatggggtatacggcgaaggcgaatggactatacagcctggcaatgggtgcag

SEQ ID NO: 826131 - DNA, 75 bp, synthetic construct
  source 1..75: mol_type = other DNA
ttctcgtcaacagaatacaaatataacggtgatgatgatgatatcattttaactcctaagtatccaggagagcag

SEQ ID NO: 826132 - DNA, 75 bp, synthetic construct
  source 1..75: mol_type = other DNA
agcattgcaatgggtaatggctcacaaactactcgtggcgcacagacaggttacaccgcctacaacatggacgcg

SEQ ID NO: 826133 - DNA, 75 bp, synthetic construct
  source 1..75: mol_type = other DNA
caacgcgcgtgcaaaccatgcaaacagcattgcaatgggtaatggctcacaaactactcgtggcgcacagacagg

SEQ ID NO: 826134 - DNA, 75 bp, synthetic construct
  source 1..75: mol_type = other DNA
aaacaggcggaatcgctcatcggtaaggccggcagtatggcgaccagattcacaggtatgacgggggcgggataa

SEQ ID NO: 826135 - DNA, 75 bp, synthetic construct
  source 1..75: mol_type = other DNA
gtaccgtctgcgttttgcgcggatttgtatggtcagtgcgctgtttttcctgctgtgcgaatacgctattttttc

SEQ ID NO: 826136 - DNA, 75 bp, synthetic construct
  source 1..75: mol_type = other DNA
acaaaaaagggcgttgggactggcttgatagaggatgtgatattagcgaggacgaactgaaacagggtgaatggt

SEQ ID NO: 826137 - DNA, 75 bp, synthetic construct
  source 1..75: mol_type = other DNA
atagagagtgaaggtgatcactctgttgaatcgttcaagaaatctgtaggaaaatatcctcccagtaagattagt

SEQ ID NO: 826138 - DNA, 75 bp, synthetic construct
  source 1..75: mol_type = other DNA
attcatttgccgctggcgcttaacgcacaaggcgctaaactttccaagcagaatcatgcgcctgcgttgccgaaa

SEQ ID NO: 826139 - DNA, 75 bp, synthetic construct
  source 1..75: mol_type = other DNA
tattcaaagcattggcggtatttacgacggtcattgccgggagttgcatcatggaccagacaacgccgcagtgcg

SEQ ID NO: 826140 - DNA, 75 bp, synthetic construct
  source 1..75: mol_type = other DNA
acggctgccttacagcgttttactcagcaaggttctcagcagcattgatgtaatcgcaagtattaaacttgaggg

SEQ ID NO: 826141 - DNA, 75 bp, synthetic construct
  source 1..75: mol_type = other DNA
tcaaatggcaaaacaccagaaagttatcatcatctcaatgccctggcgattgacgagcatatccggctacaacag

SEQ ID NO: 826142 - DNA, 75 bp, synthetic construct
  source 1..75: mol_type = other DNA
taagatttataacaaactttttggcatccatcaataaaaaaacctctatatccaaggatagtttttacgcaaaca

SEQ ID NO: 826143 - DNA, 75 bp, synthetic construct
  source 1..75: mol_type = other DNA
cacttgcataacgcattggataaaggggcactttctattctcagcatcattaagattcataaccaattacttagc

SEQ ID NO: 826144 - DNA, 75 bp, synthetic construct
  source 1..75: mol_type = other DNA
gaagacatacatcacatttttgtaaaaaccagacatactatcagtgaaataactgagttactgagccgtttttta

SEQ ID NO: 826145 - DNA, 75 bp, synthetic construct
  source 1..75: mol_type = other DNA
ggaaggtatgcgcagcggactggaatatcttgcgaaatttatttctcaatactggactacatgctggccatctca

SEQ ID NO: 826146 - DNA, 75 bp, synthetic construct
  source 1..75: mol_type = other DNA
atagaaagcgaaggtgatcactctgttgaatcgttcaaaaaatctgtaggtaaatataatacacgtaaaattagt

SEQ ID NO: 826147 - DNA, 75 bp, synthetic construct
  source 1..75: mol_type = other DNA
tttcaataacatgcctgatcaacctattctggatggtcacatccagatggtcattaacagtcatgagaaaggctg

SEQ ID NO: 826148 - DNA, 75 bp, synthetic construct
  source 1..75: mol_type = other DNA
catcaccgcggaacagctccagccagtggttgaagcgatttctgcgattcacgggttaacggctgatattgagca

SEQ ID NO: 826149 - DNA, 75 bp, synthetic construct
  source 1..75: mol_type = other DNA
ccggattatctggcacgcctttcaatggtattacgtttaaataccatgctgcatgggcaaaccggcgcacagcct

SEQ ID NO: 826150 - DNA, 75 bp, synthetic construct
  source 1..75: mol_type = other DNA
gagcgccttgatggtggtgaaatccagtttcatggttttgttactgatgaggcacctaaatggacttggcagata

SEQ ID NO: 826151 - DNA, 75 bp, synthetic construct
  source 1..75: mol_type = other DNA
tcagagcaatcttgggacgtagatactggagatgctcgggaagaaagaggccagctaatcttcaatctaaagagc

SEQ ID NO: 826152 - DNA, 75 bp, synthetic construct
  source 1..75: mol_type = other DNA
ctcgcgttcactcaacttacggcaacgttgatgtgctgaaagcagcttgccgtcaggaaatgtggatcaacccgc

SEQ ID NO: 826153 - DNA, 75 bp, synthetic construct
  source 1..75: mol_type = other DNA
agaggcgcttaatatccatcaggggcgtatcaatgaggttgctgaatatttacaaatcccgcggaaaaactctat

SEQ ID NO: 826154 - DNA, 75 bp, synthetic construct
  source 1..75: mol_type = other DNA
cagttcttgactacgacaaaccttctcgacgttttcttgatgagctcaacgaaaaccagatgaaggatttgtccg

SEQ ID NO: 826155 - DNA, 75 bp, synthetic construct
  source 1..75: mol_type = other DNA
ggtactggttcagcctggtcagactggcgcgatgaacagcaccctgtgggttggcccggaaattcaggacaaaat

SEQ ID NO: 826156 - DNA, 75 bp, synthetic construct
  source 1..75: mol_type = other DNA
cggtttgtcacgcttcctgtcggcagcaggtaataaaggtcatggcttcggttcattacatatcccgtttgttgc

SEQ ID NO: 826157 - DNA, 75 bp, synthetic construct
  source 1..75: mol_type = other DNA
ttcccgacggcgaatttcgaatcgttaccggttgcgcttgccacccagcgtctgaccgtggcgttagtgcatgtt

SEQ ID NO: 826158 - DNA, 75 bp, synthetic construct
  source 1..75: mol_type = other DNA
acacagaccttttcgcctgattggtattggagacacctcgctggtcgagctggccgccagcaaccatatcatcgc

SEQ ID NO: 826159 - DNA, 75 bp, synthetic construct
  source 1..75: mol_type = other DNA
atgaacttgtttcgttgttgccatctgtttttattttttttatccgttttcttttgttcgttgaactcatatgcc

SEQ ID NO: 826160 - DNA, 75 bp, synthetic construct
  source 1..75: mol_type = other DNA
gcgtatggtgcggaaatcattacagtgggaaaaagcattgcacttcatgtggaacaggcatctacagtatcgaag

SEQ ID NO: 826161 - DNA, 75 bp, synthetic construct
  source 1..75: mol_type = other DNA
gacgacgaacgttctgatgcaatgtacccatctcgatcctgaagtgaaagccgaagcccgatgccaaaaactacg

SEQ ID NO: 826162 - DNA, 75 bp, synthetic construct
  source 1..75: mol_type = other DNA
gaaacccggaaacgggaaatgtatcggggcagctttctttcaccctgaatcaggggatggcagtcagtgtcggca

SEQ ID NO: 826163 - DNA, 75 bp, synthetic construct
  source 1..75: mol_type = other DNA
ctgaggggataaaaccggaatggccttatctttttaaactctcaagagatgcttatcccgatcagtactggatgg

SEQ ID NO: 826164 - DNA, 75 bp, synthetic construct
  source 1..75: mol_type = other DNA
acactgctggataaattacgtgaagaaggtttccagccattttttgcctgtcagtcacgagtaagggatgaggat

SEQ ID NO: 826165 - DNA, 75 bp, synthetic construct
  source 1..75: mol_type = other DNA
ttaatcgaagcccaataccagttattggcagcgccatgcaaggaggggaagtcattacagtattgcctcctgttg

SEQ ID NO: 826166 - DNA, 75 bp, synthetic construct
  source 1..75: mol_type = other DNA
cctgggtagtggatactgctgatgcgcgtacagagaatgggcaactggtttttaatttgcgtgataaaggggcgt

SEQ ID NO: 826167 - DNA, 75 bp, synthetic construct
  source 1..75: mol_type = other DNA
gtaacggacggcctttcgccgtaaaggaaggcagtgacacttcagtgcaacgttttcgcgcctctgtcccggtgc

SEQ ID NO: 826168 - DNA, 75 bp, synthetic construct
  source 1..75: mol_type = other DNA
ttgaggggcatctgttcgaagtggctgagcgcggaggtccaggttttacaccgtttatcacgttcagcagtaatg

SEQ ID NO: 826169 - DNA, 75 bp, synthetic construct
  source 1..75: mol_type = other DNA
gaatcagaattttggaaatggcatgaatgcggtggataacggacaggttatcaaccagggaatattggctgacgg

SEQ ID NO: 826170 - DNA, 75 bp, synthetic construct
  source 1..75: mol_type = other DNA
tgaactgcggttgccggcggagggtacacctgcagcatggcaggcagggctgaatgtgacggtcacggtacagtg

SEQ ID NO: 826171 - DNA, 75 bp, synthetic construct
  source 1..75: mol_type = other DNA
caggatcagtattggtcagtagacgttgcagatgcaaagatagaaaataagcatttagtttttcacttaaatgat

SEQ ID NO: 826172 - DNA, 75 bp, synthetic construct
  source 1..75: mol_type = other DNA
cctgacgagaagtacgagaaatacaagttcgataccattgccgataacgaaaacctgaacatctcttcgaaaggt

SEQ ID NO: 826173 - DNA, 75 bp, synthetic construct
  source 1..75: mol_type = other DNA
tgttattgatggtgtgaattatcagattgatgttacccagcccgcccgttatgacggcgagtgccagatgattaa

SEQ ID NO: 826174 - DNA, 75 bp, synthetic construct
  source 1..75: mol_type = other DNA
ccgtcagataaagccgcagcgtttattaaagagaaagggcaatatccgatgaataaagtcgcgaccgatgatatc

SEQ ID NO: 826175 - DNA, 75 bp, synthetic construct
  source 1..75: mol_type = other DNA
ccggtgctctctgctgctgcgccgtttaaagttggcggtcgcaaaaacgacccagccagctatgttgaagtggaa

SEQ ID NO: 826176 - DNA, 75 bp, synthetic construct
  source 1..75: mol_type = other DNA
cggcggtaatgccgggcatgtggggcgatcatctcggcgtggtcgatctgcaactcaataatgacagcggaaaat

SEQ ID NO: 826177 - DNA, 75 bp, synthetic construct
  source 1..75: mol_type = other DNA
aagcgtatgtcgaacattacatccagggcgatcccgatctggcaaaactcccggtgctctctgccgccgcgccgt

SEQ ID NO: 826178 - DNA, 75 bp, synthetic construct
  source 1..75: mol_type = other DNA
aataaaaaatcccttgcggcggaagatagcaaactggtcgatacgcttaaagccgatcacaacgccacacgccag

SEQ ID NO: 826179 - DNA, 75 bp, synthetic construct
  source 1..75: mol_type = other DNA
cagtgaaattccgggcgttaacgccattatgtttggccatgctcacgccgttttcccaagtaaagattttgctga

SEQ ID NO: 826180 - DNA, 75 bp, synthetic construct
  source 1..75: mol_type = other DNA
ccgctcggtgctggcagcgtggattgctgatgagtcgaaacgtgcgggggaaattcacccggcggcagataacaa

SEQ ID NO: 826181 - DNA, 75 bp, synthetic construct
  source 1..75: mol_type = other DNA
tccgcacctataactttgatgtgattgatggtgtgaattatcagattgatgttacccagcctgcccgttatgacg

SEQ ID NO: 826182 - DNA, 75 bp, synthetic construct
  source 1..75: mol_type = other DNA
agcacgaccgatttacgacatcgctaataaaaaatccctcgcggcggaagacagcaagctggtagaaacactcaa

SEQ ID NO: 826183 - DNA, 75 bp, synthetic construct
  source 1..75: mol_type = other DNA
ttaaagttggcggtcgcaagaacgatcctgccagctatgtagaagtggaaaaaggccaactgactttccgtaatg

SEQ ID NO: 826184 - DNA, 75 bp, synthetic construct
  source 1..75: mol_type = other DNA
gcgagtgccagatggttaatgccaatgcggaaaggattaagaacctgacctttaacggcaagccgattgatccga

SEQ ID NO: 826185 - DNA, 75 bp, synthetic construct
  source 1..75: mol_type = other DNA
ttcgaacacaccgaaacgggtctcactagcaatggtcgacagcattgtccctatgccaatccggatgcgggtgaa

SEQ ID NO: 826186 - DNA, 75 bp, synthetic construct
  source 1..75: mol_type = other DNA
gtaaagccagctggcactgcagacaatgtcaccacgattattatggggagcggtactgcacacactgccagaccg

SEQ ID NO: 826187 - DNA, 75 bp, synthetic construct
  source 1..75: mol_type = other DNA
caatgtcaccacgattattatggggagcagtactgcacacactgccagaccgggcgcttcagtgaggagggggga

SEQ ID NO: 826188 - DNA, 75 bp, synthetic construct
  source 1..75: mol_type = other DNA
tttgaacacactgacgacgggctgacagcgcaaggtcagcagtgtccttatgtcaggccggagcgcagagaaata

SEQ ID NO: 826189 - DNA, 75 bp, synthetic construct
  source 1..75: mol_type = other DNA
aactgatctcggttaagaccgacgtgcttgatctgaccatcaacacccgtggtggtgatgttgagcaagctctgc

SEQ ID NO: 826190 - DNA, 75 bp, synthetic construct
  source 1..75: mol_type = other DNA
gcatgtcaacggcttaaccatcctgttccggaagtgggaaaagagatgctcaaagagatgatgcgccgcatgtgg

SEQ ID NO: 826191 - DNA, 75 bp, synthetic construct
  source 1..75: mol_type = other DNA
agcggctgcagacgcaaagaaaaaagcagaagcagaagccgccaaagccgcagccgaagcgcagaaaaaagccga

SEQ ID NO: 826192 - DNA, 75 bp, synthetic construct
  source 1..75: mol_type = other DNA
gggtaccggatgccttacccgtggtgcgtaaagccagctggcactgcagacaatgccagcacgattattatgggg

SEQ ID NO: 826193 - DNA, 75 bp, synthetic construct
  source 1..75: mol_type = other DNA
tttgaacaccggtctgacgcgctgacggagaacgggcgacaacactgcccgtatgttaaccctgaactgaaagaa

SEQ ID NO: 826194 - DNA, 75 bp, synthetic construct
  source 1..75: mol_type = other DNA
gaaggaatgggcagtgttgcgctgacgtctgatatgcagagtgacctgaaacgagcatatgcagagaattctgct

SEQ ID NO: 826195 - DNA, 75 bp, synthetic construct
  source 1..75: mol_type = other DNA
gtggcagttcgctcagatatcacccgcaatacgacactgaacgtccctggtttgaacacactgacgaagggctga

SEQ ID NO: 826196 - DNA, 75 bp, synthetic construct
  source 1..75: mol_type = other DNA
tcgtcccggatgccttacccgtggtgcgtaaagccagctggcactgcagacaatgtcaccacgattattatgggg

SEQ ID NO: 826197 - DNA, 75 bp, synthetic construct
  source 1..75: mol_type = other DNA
acgtaaaaccagctggcactgcagacaatgcctgcacgattattatggggaacgctattgtacacactgtcatac

SEQ ID NO: 826198 - DNA, 75 bp, synthetic construct
  source 1..75: mol_type = other DNA
tacaacggtgaatcggcagttgctttaggtgtatcgatggtgagcgccaatggtcgttgggtctacaaattacaa

SEQ ID NO: 826199 - DNA, 75 bp, synthetic construct
  source 1..75: mol_type = other DNA
ggcgacgaataccaccaatatcgccaataacacttccaacatctctaacctgactgagacggtgactaaccttgg

SEQ ID NO: 826200 - DNA, 75 bp, synthetic construct
  source 1..75: mol_type = other DNA
tacaccgatcagcgcatggttgagatggataacaaactgtctaaaactgaaagcaagttgagcggtggtatcgct

SEQ ID NO: 826201 - DNA, 75 bp, synthetic construct
  source 1..75: mol_type = other DNA
gtgtgtggcccggacaatgggaaggaaaaatcttatggcctttgtcaaatattgagcccaaaaagaccttacgca

SEQ ID NO: 826202 - DNA, 75 bp, synthetic construct
  source 1..75: mol_type = other DNA
tacgacaccaaagctgatggttctatcgactatagcaatatcaccctcggtggtggcaacggcagtacgactcgt

SEQ ID NO: 826203 - DNA, 75 bp, synthetic construct
  source 1..75: mol_type = other DNA
cacaagctctgatgctgtgaacggctcgcaactctataccaccaataagtacgtcgtagatgcgctgggtggtaa

SEQ ID NO: 826204 - DNA, 75 bp, synthetic construct
  source 1..75: mol_type = other DNA
aatcttggtgaggatgcgctgaaatgggataaggacaatggtgtattcacggcagctcatggcaacaacgccacc

SEQ ID NO: 826205 - DNA, 75 bp, synthetic construct
  source 1..75: mol_type = other DNA
gcgtgatcactgatgtcgcagatggtgaaatttcagactccagttctgacgcagtaaacggctcacaactccacg

SEQ ID NO: 826206 - DNA, 75 bp, synthetic construct
  source 1..75: mol_type = other DNA
gctgtgaacggctcacaactctatactaccaatcagtacattgtcgatgcgctgggtggtgacgcagaagtcaac

SEQ ID NO: 826207 - DNA, 75 bp, synthetic construct
  source 1..75: mol_type = other DNA
ccaaaccaaaggcaaatacagcgctgctcatggtactagtagcccaactgccagcgtaatcaccgatgttgcgga

SEQ ID NO: 826208 - DNA, 75 bp, synthetic construct
  source 1..75: mol_type = other DNA
gcagtgccaacggtattaactctgtcgcgctgggcgcagattccattgcggatttagacaataccgtctctgttg

SEQ ID NO: 826209 - DNA, 75 bp, synthetic construct
  source 1..75: mol_type = other DNA
cgctcacggaaaagataaaactgccagtgtaatcactaacgtcgctaacggtgcaatctctgccaccagcagcga

SEQ ID NO: 826210 - DNA, 75 bp, synthetic construct
  source 1..75: mol_type = other DNA
attgagcccaaaaagaccttacgcagctccgggagcttcgttatatcgcggattaaagaacctgaaacagtcaga

SEQ ID NO: 826211 - DNA, 75 bp, synthetic construct
  source 1..75: mol_type = other DNA
gatgaggctcttgcactcggaaaagaagcccaggcaaatggtttatatagcctggcattgggttcaaacagcata

SEQ ID NO: 826212 - DNA, 75 bp, synthetic construct
  source 1..75: mol_type = other DNA
ctctgttgccgaaggtgatagcagcgtggccatcggttataactctgtcgcctctcatgccagcagcgtagccat

SEQ ID NO: 826213 - DNA, 75 bp, synthetic construct
  source 1..75: mol_type = other DNA
ctgtctttaatgcagatggcacaactaaaagcgtccaggcgaaaagcatcattaccaacgtcgctgatggcacga

SEQ ID NO: 826214 - DNA, 75 bp, synthetic construct
  source 1..75: mol_type = other DNA
gtcatggcagcaacagcatcgttgagacgagtattgcgctgggtagcgaatccgtctccagccgtgtgattgtta

SEQ ID NO: 826215 - DNA, 75 bp, synthetic construct
  source 1..75: mol_type = other DNA
gcactgaagccaccagcaaaatcactaacgttacggcgggtgaactgacggagaccagtaccgatgccgttaacg

SEQ ID NO: 826216 - DNA, 75 bp, synthetic construct
  source 1..75: mol_type = other DNA
tgacagtaaagatgccgttaacggttctcagttgaaaaccactaacgacaacgtggcaaccaacaccactaatat

SEQ ID NO: 826217 - DNA, 75 bp, synthetic construct
  source 1..75: mol_type = other DNA
tgcggaatttatccttttggtagttatgaaggtgaaattatttttgcaggtgaagtaatccaggcgagccatatt

SEQ ID NO: 826218 - DNA, 75 bp, synthetic construct
  source 1..75: mol_type = other DNA
cgagatctacaaattaattaaccaactcgtccagcagggtattgccgttattgtcatctcttccgaattacctga

SEQ ID NO: 826219 - DNA, 75 bp, synthetic construct
  source 1..75: mol_type = other DNA
tgaaccgacagcctcattaaccgagctggaaaccacggttttactggatattattcgcgatctgcaacaacacgg

SEQ ID NO: 826220 - DNA, 75 bp, synthetic construct
  source 1..75: mol_type = other DNA
gcaggcggcgttcgctacgacaccaaagctgatggctctatcgactacagcaacatcactctcggtggtggtaac

SEQ ID NO: 826221 - DNA, 75 bp, synthetic construct
  source 1..75: mol_type = other DNA
gaaactaaaagccaacctgataaatcataacctgactcaggagcaggtgatggaagccgcattgaggagcgaaca

SEQ ID NO: 826222 - DNA, 75 bp, synthetic construct
  source 1..75: mol_type = other DNA
ggtgaaagaattgaccgtgctggaaaatatctttctgggcaacgaaataacccataatggtattatggattatga

SEQ ID NO: 826223 - DNA, 75 bp, synthetic construct
  source 1..75: mol_type = other DNA
tggtatcggtttgaacactctggttctggctgatgcgatcaacggcattgctatcggcagtaacgcacgcgcaaa

SEQ ID NO: 826224 - DNA, 75 bp, synthetic construct
  source 1..75: mol_type = other DNA
cagcacttttttttctgacttcggcgtgtgtgtatgcctcgtctccggccttttttgttgaacgtcttccgctca

SEQ ID NO: 826225 - DNA, 75 bp, synthetic construct
  source 1..75: mol_type = other DNA
ccggactcgaagtctccgcccttgggctcggttgcatgggcttaagccacggctacggcccggcgaccgataccc

SEQ ID NO: 826226 - DNA, 75 bp, synthetic construct
  source 1..75: mol_type = other DNA
tatagtctagtagaaaaatcgctccacaaagctgctgatgcggccttatggagtctagacaatgaacctaaccga

SEQ ID NO: 826227 - DNA, 75 bp, synthetic construct
  source 1..75: mol_type = other DNA
caccgcctacaacatggacgcaccgcagaactctgtaggtgagttttctgttggtagtgaagacggtcaacgtca

SEQ ID NO: 826228 - DNA, 75 bp, synthetic construct
  source 1..75: mol_type = other DNA
tgctgaataagaaggaaatgcagacgtatcgggatttaggcgcagtaggtgtcatttgtggtcgcttctatgaca

SEQ ID NO: 826229 - DNA, 75 bp, synthetic construct
  source 1..75: mol_type = other DNA
agcacaggattatcatttctgcccaaaagctggagtcagaaatctgacgagaagagccgcacggatatggttatt

SEQ ID NO: 826230 - DNA, 75 bp, synthetic construct
  source 1..75: mol_type = other DNA
tagcgccctcggtcatgcatatctgctaccgttcggcaacggaaaagcaaaaaacggtaagaagaacgtacagct

SEQ ID NO: 826231 - DNA, 75 bp, synthetic construct
  source 1..75: mol_type = other DNA
gagcttctttttgaagtggcaggaactcgttatcaggaagggcttgatttgtcgaaagtaatggtcggtgatttg

SEQ ID NO: 826232 - DNA, 75 bp, synthetic construct
  source 1..75: mol_type = other DNA
ggattttgatgactcttccggaagacaccataaccttgttgatctacgcttaatttgtagggcttttagtatccg

SEQ ID NO: 826233 - DNA, 75 bp, synthetic construct
  source 1..75: mol_type = other DNA
gccaggacgcgtgccgtattgagtttcatctcgactttgagtttaccaataagttgattgaactcgcctttggtc

SEQ ID NO: 826234 - DNA, 75 bp, synthetic construct
  source 1..75: mol_type = other DNA
atcagccatcaatgaaagagcaactggcagcagctctcccacgccatatgacggctgaacgaatgatacgtatcg

SEQ ID NO: 826235 - DNA, 75 bp, synthetic construct
  source 1..75: mol_type = other DNA
atggaaattgttatgcctcagattagtcggaccgcactggtgccctacagcgcggagcaaatgtatcagttagtg

SEQ ID NO: 826236 - DNA, 75 bp, synthetic construct
  source 1..75: mol_type = other DNA
ctaatcaacgtcgtatcaccaacgtagccgcaggtaaaaacgacaccgatgctgttaacgtggcacagttgaagt

SEQ ID NO: 826237 - DNA, 75 bp, synthetic construct
  source 1..75: mol_type = other DNA
ccaacctgacggattccgttggcgaccttaaggacgattccctgctgtggaacaaagcggctggcgcattcagcg

SEQ ID NO: 826238 - DNA, 75 bp, synthetic construct
  source 1..75: mol_type = other DNA
caagcatcgaccgcgcttgatggtggtgagtctatcgaaggcattccagggagcagcaatacctggattgccatt

SEQ ID NO: 826239 - DNA, 75 bp, synthetic construct
  source 1..75: mol_type = other DNA
gcagcactgacgccgttaacggctcgcagctcaaaaccaccaacgacaacgtgacgaccaacaccaccaacatcg

SEQ ID NO: 826240 - DNA, 75 bp, synthetic construct
  source 1..75: mol_type = other DNA
agttgagcgggggtatcgcttctgcaatggcaatgaccggtctgccgcagtcttacactccgggtgccagcatgg

SEQ ID NO: 826241 - DNA, 75 bp, synthetic construct
  source 1..75: mol_type = other DNA
ctggatgcgcttgatgagaacgcgctgctgtgggatgcgaccgccaataacggcgaaggggcttacaacgccagt

SEQ ID NO: 826242 - DNA, 75 bp, synthetic construct
  source 1..75: mol_type = other DNA
gtgatgattccctgctgtggaacaaagcggctggcgcattcagcgccgcgcacggcaccgatgccaccagcaaaa

SEQ ID NO: 826243 - DNA, 75 bp, synthetic construct
  source 1..75: mol_type = other DNA
tggctgtcggtgaagactcgctggcaatgggtgcgaaaaccattgttaatggtgatgcagggatcggtattggcc

SEQ ID NO: 826244 - DNA, 75 bp, synthetic construct
  source 1..75: mol_type = other DNA
atgacggtaaatatcgtcaaatcatcaacgtagccgatggttccgaagcccatgacgccgttacggttcgccagt

SEQ ID NO: 826245 - DNA, 75 bp, synthetic construct
  source 1..75: mol_type = other DNA
gcgcttcaggtattggcgctacggctgtgggttataactctgttgccgaaggcgatagcagcgtagccatcggtc

SEQ ID NO: 826246 - DNA, 75 bp, synthetic construct
  source 1..75: mol_type = other DNA
cattgccgatgctttgggcgggaacgctgtggtgaatgcagacggcagtatcactacaccgacttatgccatagc

SEQ ID NO: 826247 - DNA, 75 bp, synthetic construct
  source 1..75: mol_type = other DNA
gcaaaattgctaatatggctgctggtgccataagcaacaccagtaccgatgccatcaacggctcacagctttata

SEQ ID NO: 826248 - DNA, 75 bp, synthetic construct
  source 1..75: mol_type = other DNA
gcaggcggcgtgcgctatgacaccaaagctgacggttctgttgattacagcaacatcactctcggcggtggtaat

SEQ ID NO: 826249 - DNA, 75 bp, synthetic construct
  source 1..75: mol_type = other DNA
gatgaatattcgttcattgcgtgtttttgctcgtgaaattgattttgagcagttgctcgaaatgcaggaaaaact

SEQ ID NO: 826250 - DNA, 75 bp, synthetic construct
  source 1..75: mol_type = other DNA
cgtccgcttgctttacagaagctgcttgatgagggccatttcatggaagatttcctcattgagaagactaagccg

SEQ ID NO: 826251 - DNA, 75 bp, synthetic construct
  source 1..75: mol_type = other DNA
tgaaatacttaaacttactcatgattacaatataattgcatctaaatcatgctttgataattttgagatcttaaa

SEQ ID NO: 826252 - DNA, 75 bp, synthetic construct
  source 1..75: mol_type = other DNA
caaaaagtcggtgatgagtacctctatatctttgacttaacggatcttataaacgggtcctacgcagcgactttt

SEQ ID NO: 826253 - DNA, 75 bp, synthetic construct
  source 1..75: mol_type = other DNA
ctatgactccggatggcgtgtttaagccgacgactaaagtgactttagatgatggcactgagattgatttcaaac

SEQ ID NO: 826254 - DNA, 75 bp, synthetic construct
  source 1..75: mol_type = other DNA
agaggtgcgaatctgtcgataactttgactgagcagatgctggataagcaaggatatgcggcatttgaatacagt

SEQ ID NO: 826255 - DNA, 75 bp, synthetic construct
  source 1..75: mol_type = other DNA
tctccggagatattgcaatgactatgccaataaagaaggaacatactggtctattggcgggatagtccaggatct

SEQ ID NO: 826256 - DNA, 75 bp, synthetic construct
  source 1..75: mol_type = other DNA
gggcgcgcaggcgctgaaaatatttccgtcatcggcttttggtccgcaatacatcaaagcgttaaaagcggtatt

SEQ ID NO: 826257 - DNA, 75 bp, synthetic construct
  source 1..75: mol_type = other DNA
cccacaatgggaacaaagcattcccgccatcgttgatgcgtatggcgacaaggcgttgattggcgcaggtacggt

SEQ ID NO: 826258 - DNA, 75 bp, synthetic construct
  source 1..75: mol_type = other DNA
ttttattgttattatttacatccagcttttcactctatgccaacaatacaatatttgtcgttggcgcaggaaacg

SEQ ID NO: 826259 - DNA, 75 bp, synthetic construct
  source 1..75: mol_type = other DNA
tcgacggccagtaataatttagtattttataaaccaaccggacctggcgttgttaaaacaaatgtaaaactctac

SEQ ID NO: 826260 - DNA, 75 bp, synthetic construct
  source 1..75: mol_type = other DNA
ccggtcccaccgtcagtggttcaacggttaatttaggggagtacactgcgggacaaatatcttcaaattcagcgt

SEQ ID NO: 826261 - DNA, 75 bp, synthetic construct
  source 1..75: mol_type = other DNA
aaagcggtttccgcaaggaatcgccgtactctgaccacacaattaccatacaacccgatcatctcttacaaaaag

SEQ ID NO: 826262 - DNA, 75 bp, synthetic construct
  source 1..75: mol_type = other DNA
gccataagtcatttgagcaaataaaacttcttttggaatcacttgagttatctcgggaggattttgttataatac

SEQ ID NO: 826263 - DNA, 75 bp, synthetic construct
  source 1..75: mol_type = other DNA
agtgtatttaccacacccgcgcgatctgatggtgaggcgaatatacgtgctaaagaagcagagttagtgatgcag

SEQ ID NO: 826264 - DNA, 75 bp, synthetic construct
  source 1..75: mol_type = other DNA
gcaaaatgccgaagctgtccctcaaagatcaggatgtgattctggttgaaccccagggcccgatgatcaacgtgg

SEQ ID NO: 826265 - DNA, 75 bp, synthetic construct
  source 1..75: mol_type = other DNA
tcaaaaatggagagaaaccgggccaaatggagatgtgacagtcgtgttcaggtatggtaccagtacaaataattt

SEQ ID NO: 826266 - DNA, 75 bp, synthetic construct
  source 1..75: mol_type = other DNA
ttcatgcagcacgtccacacagtgaagctattcgcgacgctcaacgaaaaaaacctaaagttccggtacatgctg

SEQ ID NO: 826267 - DNA, 75 bp, synthetic construct
  source 1..75: mol_type = other DNA
tttgatagtgataatgtttttgttgttaatgaccctgttgtggtgaactggtctggtttttcgcagataaaagca

SEQ ID NO: 826268 - DNA, 75 bp, synthetic construct
  source 1..75: mol_type = other DNA
accgtctacgatttatgcccggatgcgttaccttgattccgatgaactggcagaggagtcttcatggaaggaaac

SEQ ID NO: 826269 - DNA, 75 bp, synthetic construct
  source 1..75: mol_type = other DNA
tacagacaccctcaacgtatatacggtgcctgatttcaatattcgagcatcgatggaagtggatgacaaaaaaac

SEQ ID NO: 826270 - DNA, 75 bp, synthetic construct
  source 1..75: mol_type = other DNA
agccttattatcggaaggatcccacttagtactctggtaagcttcaaatctgccagtactgctaactctgacgca

SEQ ID NO: 826271 - DNA, 75 bp, synthetic construct
  source 1..75: mol_type = other DNA
gtccgggctcccccctccatacggtgccaacctgtttgccggtggttatgaaaccgagcgcagcgacggcttaaa

SEQ ID NO: 826272 - DNA, 75 bp, synthetic construct
  source 1..75: mol_type = other DNA
ggtgaacaggcgatgagcggccaggcgaacacctcctctaccaccggtacctttgcccagcaaaaccgccagggc

SEQ ID NO: 826273 - DNA, 75 bp, synthetic construct
  source 1..75: mol_type = other DNA
gctccctgatggaagcgtaaaacagggggggctgcttgataccgtcctgaccgaagacatgttagatgaacgtgg

SEQ ID NO: 826274 - DNA, 75 bp, synthetic construct
  source 1..75: mol_type = other DNA
ggcagcgatctctatcgcgccgggcaatccgtagaacgcaccgcgcagcaggcagcagcatttgttaaggcgtat

SEQ ID NO: 826275 - DNA, 75 bp, synthetic construct
  source 1..75: mol_type = other DNA
agaacagatagctatctctactcattcaaaggatatggtgttggcattggtatcaatgaacacagctattttctt

SEQ ID NO: 826276 - DNA, 75 bp, synthetic construct
  source 1..75: mol_type = other DNA
gattgctatgcgcaaagcggtattaaatcgtggcgtttcggttgtcgttttaccgggcgacgtggcgctaaaacc

SEQ ID NO: 826277 - DNA, 75 bp, synthetic construct
  source 1..75: mol_type = other DNA
gcggttttagcatgttgatgggcgatttcctctcggtagtgcagatgaaactgccagtgaaaattatcgtcttta

SEQ ID NO: 826278 - DNA, 75 bp, synthetic construct
  source 1..75: mol_type = other DNA
ttccggtaaaagttatggtgggcataaactctttaagacatctgtcccaggcctgtattacacattagcaatatc

SEQ ID NO: 826279 - DNA, 75 bp, synthetic construct
  source 1..75: mol_type = other DNA
tttccaggccacattaaaacaagacggtaatattgctatagaaccgggaaattttaaagctaccagtacttttca

SEQ ID NO: 826280 - DNA, 75 bp, synthetic construct
  source 1..75: mol_type = other DNA
tatattggcgattctacgagccaatcttttaactggcgtggcgaaagcgagcaaaccctatattggtcttgcaac

SEQ ID NO: 826281 - DNA, 75 bp, synthetic construct
  source 1..75: mol_type = other DNA
ccgaccgatgccaaaatcattcagattgatatcaacccagccagcatcggcgctcacagcaaggtggatatggca

SEQ ID NO: 826282 - DNA, 75 bp, synthetic construct
  source 1..75: mol_type = other DNA
taccgggcgacgtggcgttaaaacctgcgccagaaggggcgacctcgcactggtatcatgcgccacagccggtag

SEQ ID NO: 826283 - DNA, 75 bp, synthetic construct
  source 1..75: mol_type = other DNA
ggcggtctgtgccggatcgtgcggccccggcaacctgcacttaatcaacggcctgttcgattgccaccgcaatca

SEQ ID NO: 826284 - DNA, 75 bp, synthetic construct
  source 1..75: mol_type = other DNA
taccgggcgatgtggcgttaaaacctgcgccagaaggggcaaccacccactggtatcacgcgccactgccaatag

SEQ ID NO: 826285 - DNA, 75 bp, synthetic construct
  source 1..75: mol_type = other DNA
gtttccataccatgatgaacgccgacacgttagtgctgctcggcactcaatttccctaccgtgctttctacccga

SEQ ID NO: 826286 - DNA, 75 bp, synthetic construct
  source 1..75: mol_type = other DNA
cacagcaaggtggatatggcactggtcggcgatatcaagtcgactctgcgtgcattgctgccattggtggaagaa

SEQ ID NO: 826287 - DNA, 75 bp, synthetic construct
  source 1..75: mol_type = other DNA
atgtcccttaccgacgcgaaaatccgcactctcaaaccttctgataaaccctttaaagtctccgattcccacggt

SEQ ID NO: 826288 - DNA, 75 bp, synthetic construct
  source 1..75: mol_type = other DNA
cagataaagcctccgccaatcgtggcgtgctggtggtgatgaatgataccgtgctggacggtcgtgatgtcacga

SEQ ID NO: 826289 - DNA, 75 bp, synthetic construct
  source 1..75: mol_type = other DNA
acggtaccgacacgatggaagaaacggcttacttcctggacctgacggtgaaatgcgacaaaccggtggtgatgg

SEQ ID NO: 826290 - DNA, 75 bp, synthetic construct
  source 1..75: mol_type = other DNA
acggtaccgacacgatggaagaaaccgcttacttccttgacctgacggtgaaatgtgacaaaccggtggtgatgg

SEQ ID NO: 826291 - DNA, 75 bp, synthetic construct
  source 1..75: mol_type = other DNA
tgatcgccattttgcgcggcattacgcccgacgaggcgctggcgcatgttggcgcggtgattgacgccgggttcg

SEQ ID NO: 826292 - DNA, 75 bp, synthetic construct
  source 1..75: mol_type = other DNA
atcgaagggttaaaaaaccgtgtgagtgaaaaaatggttctcgaacctaacgtgggaacctctgtgtataaagca

SEQ ID NO: 826293 - DNA, 75 bp, synthetic construct
  source 1..75: mol_type = other DNA
gaaaaaaattaacaccgactgcgataaaactgacggcttcgtcattactcacggtaccgacacgatggaagaaac

SEQ ID NO: 826294 - DNA, 75 bp, synthetic construct
  source 1..75: mol_type = other DNA
cacctgttccctttgatatctcgcttcagaattgtattcgtgtgcgtaatattgaaacaaaactcgtcactggaa

SEQ ID NO: 826295 - DNA, 75 bp, synthetic construct
  source 1..75: mol_type = other DNA
aactgttgaattttatacagatactaatttcgatcctacacttaatcagcaagtccagttatccagttcatcaaa

SEQ ID NO: 826296 - DNA, 75 bp, synthetic construct
  source 1..75: mol_type = other DNA
atcggagatccttccaaccaagaatttttcttttccgtcacagacagcgatctacaaactaagggttgcaacaaa

SEQ ID NO: 826297 - DNA, 75 bp, synthetic construct
  source 1..75: mol_type = other DNA
acggtaccgacacgatggaagaaactgcttacttcctcgacctgacggtgaaatgtgacaaaccggtggtgatgg

SEQ ID NO: 826298 - DNA, 75 bp, synthetic construct
  source 1..75: mol_type = other DNA
acggtaccgacacgatggaagaaacagcttacttcctagacctgacggtgaaatgggacaaaccggtggtgatgg

SEQ ID NO: 826299 - DNA, 75 bp, synthetic construct
  source 1..75: mol_type = other DNA
ggccgttggtggcgttatgcaaacgctcacgattgaattttataccgataccgactttaacccgacaacgaatca

SEQ ID NO: 826300 - DNA, 75 bp, synthetic construct
  source 1..75: mol_type = other DNA
cggcgatgctgagttttatttcgagcaatatgatctcaggcagaatgatcctacccacgtaatatggacacaggc

SEQ ID NO: 826301 - DNA, 75 bp, synthetic construct
  source 1..75: mol_type = other DNA
ggctggcaattcgtatgctgcgttgcgaactctgctatgttgcaggtgattatcccgatgaaccggaatcatgga

SEQ ID NO: 826302 - DNA, 75 bp, synthetic construct
  source 1..75: mol_type = other DNA
atgttgatgagtaaagccgaatacgccaaatacaaaggcgtaagccgccagacagtttacgactggctcgagaaa

SEQ ID NO: 826303 - DNA, 75 bp, synthetic construct
  source 1..75: mol_type = other DNA
gaagaagcatttccgcattttatccgccagattgaattgttgctgagcactggtgaactaaaagctagtcatgcc

SEQ ID NO: 826304 - DNA, 75 bp, synthetic construct
  source 1..75: mol_type = other DNA
atgatcctgcacccttctctcgccagcgcaaatcctctgcactatggtcgtgagctgacggcattggacaatctg

SEQ ID NO: 826305 - DNA, 75 bp, synthetic construct
  source 1..75: mol_type = other DNA
ccaaatacaaaggtgtaagccgccagacagtttacgactggatcgagaaaggcgaggtggtcatgtcgggtaaaa

SEQ ID NO: 826306 - DNA, 75 bp, synthetic construct
  source 1..75: mol_type = other DNA
aattgatattcctgaatggagaacgcatgattttaggcgttctctggtaacgaatttatctggggaaggaattat

SEQ ID NO: 826307 - DNA, 75 bp, synthetic construct
  source 1..75: mol_type = other DNA
tcgaaaaaaaagcgtgcgatgctgatatccgggctgaatgctcttcctcccgattctctgaaccgccccggaaat

SEQ ID NO: 826308 - DNA, 75 bp, synthetic construct
  source 1..75: mol_type = other DNA
atgatttacgtaaaagtgaaacgcctacatccggcagcaaaacttccagcttatgccacctccggatcggcggcg

SEQ ID NO: 826309 - DNA, 75 bp, synthetic construct
  source 1..75: mol_type = other DNA
gttatccgtcgtccaatcttcgaacaaattaagccttttctcgaaaaggccatgacaacgtacaatgatgttctt

SEQ ID NO: 826310 - DNA, 75 bp, synthetic construct
  source 1..75: mol_type = other DNA
ctgtgtataacaaacacgattggctggtggaacagaaagaagcatatgaactttatgcagataaaattttttggc

SEQ ID NO: 826311 - DNA, 75 bp, synthetic construct
  source 1..75: mol_type = other DNA
cgccagttgatcccatcgtgcgaggtcctgaagcttagcgttaagaccattggcaaaaaacctgatgtgggtagc

SEQ ID NO: 826312 - DNA, 75 bp, synthetic construct
  source 1..75: mol_type = other DNA
acacggagaagttgaacctctggtcaggaattatgggcaaatcattgtggatgagtgccatcatattggcgcggt

SEQ ID NO: 826313 - DNA, 75 bp, synthetic construct
  source 1..75: mol_type = other DNA
aagatgaagagtacatattcagtgaactgaaaaaggctgaacaaagcaacgaacgtgaaaagagattgcaagcaa

SEQ ID NO: 826314 - DNA, 75 bp, synthetic construct
  source 1..75: mol_type = other DNA
tcgcattttttctacattatgtagaatcagggaaaggccagattcttagtagtgaccgcatattatccatactcg

SEQ ID NO: 826315 - DNA, 75 bp, synthetic construct
  source 1..75: mol_type = other DNA
tcgtcttgatggtgtagccgtccttacaatgcttttgggcgtgtccgcaatcgcattttttctacattatgtaga

SEQ ID NO: 826316 - DNA, 75 bp, synthetic construct
  source 1..75: mol_type = other DNA
gctgctaaaatttcgtcgtgagtttgaccagtacgtcaacctgcgcccggttcgcctttttcctggcgtcccctg

SEQ ID NO: 826317 - DNA, 75 bp, synthetic construct
  source 1..75: mol_type = other DNA
gctgctgaaatttcgccgcgagtttgatcagtacgttaacctgcgcccggtacgcctctttcccggcgttccctg

SEQ ID NO: 826318 - DNA, 75 bp, synthetic construct
  source 1..75: mol_type = other DNA
cctgaatccggaacgcactttcccgtcgctcttcgagccagtccacggttccgcgccggatatctacgggaaaaa

SEQ ID NO: 826319 - DNA, 75 bp, synthetic construct
  source 1..75: mol_type = other DNA
agctgaagaagccatgaaagctttcgggcaggggcgaaaagttctggtactgactgaacgtacagatcatctgga

SEQ ID NO: 826320 - DNA, 75 bp, synthetic construct
  source 1..75: mol_type = other DNA
tttgtggataccgcgtatcctgtgctgctcagaatgtgggataaacgccagcggggttataaggcgatggggtac

SEQ ID NO: 826321 - DNA, 75 bp, synthetic construct
  source 1..75: mol_type = other DNA
gaataagccccgtgttataggttgtgcggagaattacccgcaacacattgcgttgccccggggatgtctggacag

SEQ ID NO: 826322 - DNA, 75 bp, synthetic construct
  source 1..75: mol_type = other DNA
agatgaagagtacatatacagccaactggaaaaggcccaacaaagcaacgaacgtgaaaagagattgcaagcaat

SEQ ID NO: 826323 - DNA, 75 bp, synthetic construct
  source 1..75: mol_type = other DNA
ccgctgaaaatcacgctggcaaaccagatctatttcgaaaaagcgcaattacctcaggtgctgattaaccgactt

SEQ ID NO: 826324 - DNA, 75 bp, synthetic construct
  source 1..75: mol_type = other DNA
ccaaaaggaggatttggtaatcttatcgcgttacctctgcaaaaaagaccgcgtgcatcggggggaagcgttttt

SEQ ID NO: 826325 - DNA, 75 bp, synthetic construct
  source 1..75: mol_type = other DNA
atgtcaggatcattgattttgtggataccgcgtatccagtgctgctcagaatgtgggataaacgccagcggggtt

SEQ ID NO: 826326 - DNA, 75 bp, synthetic construct
  source 1..75: mol_type = other DNA
agctgttggtgaaagaagggatcatggccgaaggcgagtcgttgtattctccggctaatatcatgctgatgcacc

SEQ ID NO: 826327 - DNA, 75 bp, synthetic construct
  source 1..75: mol_type = other DNA
caaccgtccgctgtttgaatttctcggcctgaccgtcggcgtcaacctgccgggaatgcctgcgccggcaaagcg

SEQ ID NO: 826328 - DNA, 75 bp, synthetic construct
  source 1..75: mol_type = other DNA
tggttacgcacagaaagatccaaagcaggagtacaagcgtgagtccttctccatgtttgcagcaatgctggaatc

SEQ ID NO: 826329 - DNA, 75 bp, synthetic construct
  source 1..75: mol_type = other DNA
cgggcatgccagcaccggcaaagcgtgaagcctacgctgctgacatcacttacggtacgaacaacgaatacggct

SEQ ID NO: 826330 - DNA, 75 bp, synthetic construct
  source 1..75: mol_type = other DNA
gaccgtgtttccggcatgatgcgtaaactgggtatgaaacctggtgaagcgattgaacacccttgggtaaccaaa

SEQ ID NO: 826331 - DNA, 75 bp, synthetic construct
  source 1..75: mol_type = other DNA
cagaactgcatgaagagacgctgcgtgagcgcattctggcgcagtccatcgaagtgtatcagcgtaaagaagaag

SEQ ID NO: 826332 - DNA, 75 bp, synthetic construct
  source 1..75: mol_type = other DNA
gctggcgaaagctatgtacgtaaaccgatctactcgcgcgaaggcggtaatgtcaccatttttgatggtaaaaat

SEQ ID NO: 826333 - DNA, 75 bp, synthetic construct
  source 1..75: mol_type = other DNA
ataccaactttgatccaacagtaactcaacaagtttcattatcgcgctcatcaaactatttatattcatttaaag

SEQ ID NO: 826334 - DNA, 75 bp, synthetic construct
  source 1..75: mol_type = other DNA
ggagtcagttagatactgcttctggcggaggctttctttattgtaacagaagcaataacaccagtggcggggcaa

SEQ ID NO: 826335 - DNA, 75 bp, synthetic construct
  source 1..75: mol_type = other DNA
taagcaactgctggaatatgatgacgtggctaacgatcagcgtcgcgccatttactcccagcgtaacgaactgct

SEQ ID NO: 826336 - DNA, 75 bp, synthetic construct
  source 1..75: mol_type = other DNA
tagctggcaggcagaagttgccgcgctggaaaatccgaccgcagagcaaattgaaaaaattaaagccgactggca

SEQ ID NO: 826337 - DNA, 75 bp, synthetic construct
  source 1..75: mol_type = other DNA
acgaagtggactccatcctgatcgatgaagcgcgtacaccgctgatcatttccggcccggcagaagacagctcgg

SEQ ID NO: 826338 - DNA, 75 bp, synthetic construct
  source 1..75: mol_type = other DNA
tcaggttactggcgatataaccactgtcagcggtgatatcacttgtggagatatttctggtgacgtaaccactgt

SEQ ID NO: 826339 - DNA, 75 bp, synthetic construct
  source 1..75: mol_type = other DNA
tttgtctgttatgcccgcgagcaagtgatgacgattttgccggactcaccgccacgttttatcaatctgaacaat

SEQ ID NO: 826340 - DNA, 75 bp, synthetic construct
  source 1..75: mol_type = other DNA
aatagtaaaattctatcgctatggggataattattattgtggtttgggtgaaattgaagggcttaccaaagaact

SEQ ID NO: 826341 - DNA, 75 bp, synthetic construct
  source 1..75: mol_type = other DNA
agggataactcgatacctccatgtatcagtccaactagacgatatggacgactacactagccccaacggagaaac

SEQ ID NO: 826342 - DNA, 75 bp, synthetic construct
  source 1..75: mol_type = other DNA
ttgatgatgtgataaatcagacggttaaccgtgttcttgaccagtttgcgataaatctacccgaagatctctttg

SEQ ID NO: 826343 - DNA, 75 bp, synthetic construct
  source 1..75: mol_type = other DNA
cggtaaaccccggataaaatgtggggactgcgctcaccgtcagttgattcctgtatccgatctcgtcatctacca

SEQ ID NO: 826344 - DNA, 75 bp, synthetic construct
  source 1..75: mol_type = other DNA
gctggcggggtatttctgcgagcagtgtcgtttgcggctggggctctcccgcgtggtattaagtgccggggcgcg

SEQ ID NO: 826345 - DNA, 75 bp, synthetic construct
  source 1..75: mol_type = other DNA
ctacgttgcgaagtcgtatatcttaaggaacatcgatatccgcaacgaaaaccttaagcagaaatcagctaagat

SEQ ID NO: 826346 - DNA, 75 bp, synthetic construct
  source 1..75: mol_type = other DNA
gcgtctaacattgttgagtctgtatattctccgatcccattcatcattgaggacaccaatcaaagcacgcatgtt

SEQ ID NO: 826347 - DNA, 75 bp, synthetic construct
  source 1..75: mol_type = other DNA
tgaacggtggaaagagctggtggtcgcaaactctgttttccatgataccagttatgctggcgaggaattccgcca

SEQ ID NO: 826348 - DNA, 75 bp, synthetic construct
  source 1..75: mol_type = other DNA
taaaagatttagtgcaggtctgacacagatatacagcaaaaatttcccatcactcaatctgactaataaaacagt

SEQ ID NO: 826349 - DNA, 75 bp, synthetic construct
  source 1..75: mol_type = other DNA
ctggaagttatgattgcctccggcgatgacctgacaggcatccgccttactgaagccaggaaaaaatacggtaaa

SEQ ID NO: 826350 - DNA, 75 bp, synthetic construct
  source 1..75: mol_type = other DNA
aatgccctttctcgctttagagttggcgcacatggcgcattggttttcgcaagactaccgaagacaacgatcccc

SEQ ID NO: 826351 - DNA, 75 bp, synthetic construct
  source 1..75: mol_type = other DNA
gtcagtctgccattatcggttttcaatccccaagactaccatccactgctgattaccgtttccggtaaaaacgtt

SEQ ID NO: 826352 - DNA, 75 bp, synthetic construct
  source 1..75: mol_type = other DNA
aaaacggcactgcagtcgtgcgttcttcccgcgtaccgacgggcgctaccactcaggatgctgaagtggatgatg

SEQ ID NO: 826353 - DNA, 75 bp, synthetic construct
  source 1..75: mol_type = other DNA
ccattgccggtggtggtgactccgcaaccaaatctaactacacagcgggtaaagttggcgtagaaaatctggtta

SEQ ID NO: 826354 - DNA, 75 bp, synthetic construct
  source 1..75: mol_type = other DNA
gaacaactccagtcactggccgaccgtcggctttatctcgctaaacaggctgggcgcaatcgggtattcgcgagc

SEQ ID NO: 826355 - DNA, 75 bp, synthetic construct
  source 1..75: mol_type = other DNA
ctctcggtcatgagaagtatttcgatatcaaagatcgaatggaaggccgtcgacttgagcaagggcgactggatg

SEQ ID NO: 826356 - DNA, 75 bp, synthetic construct
  source 1..75: mol_type = other DNA
aaagtatgcgtcaggctgacatggagaacgcgagaggatgggcaaatatccagaacgctcaactagacagggctc

SEQ ID NO: 826357 - DNA, 75 bp, synthetic construct
  source 1..75: mol_type = other DNA
aaacggaagcctttggtgacagtaatgccacgcgaaccacagacgcatttctggaaacggagtgcgtggaaaatg

SEQ ID NO: 826358 - DNA, 75 bp, synthetic construct
  source 1..75: mol_type = other DNA
cagtttgcgctctgagcctttgcctgctgtcaccggctcaggccgaagaacagcgttacatcagtatccgtaata

SEQ ID NO: 826359 - DNA, 75 bp, synthetic construct
  source 1..75: mol_type = other DNA
tctgcgggggctatcgactacgcgttgatgtataacctgccggccgccagccagaacgtctggatgctgctggtg

SEQ ID NO: 826360 - DNA, 75 bp, synthetic construct
  source 1..75: mol_type = other DNA
cggctggataatggcggaaacggtgaaggatttggccccctcaccatcactctgcaactcaaagacaaatatggt

SEQ ID NO: 826361 - DNA, 75 bp, synthetic construct
  source 1..75: mol_type = other DNA
ctggataatggcggaaacgatgaaggatttggccccctcaccatcactctgcaactcaaagacaaatatggtcag

SEQ ID NO: 826362 - DNA, 75 bp, synthetic construct
  source 1..75: mol_type = other DNA
tccgctacaggaatttacctgttatgcccgggagcaagtgatgactattcttccagactcaccgccacgctttat

SEQ ID NO: 826363 - DNA, 75 bp, synthetic construct
  source 1..75: mol_type = other DNA
aggatgttgccgggcgggtcggtggtgaggagttttgtgtgattctgccaggcgcgagcctgacgcaggctgcgg

SEQ ID NO: 826364 - DNA, 75 bp, synthetic construct
  source 1..75: mol_type = other DNA
ctggcatccggtccgctggcgatgctgcgcgttgctctgtatgccgtatctggcctgttaggtgctctgctcagt

SEQ ID NO: 826365 - DNA, 75 bp, synthetic construct
  source 1..75: mol_type = other DNA
caggtgcgccagttgcactgttgcggtctggattatccggtttacgtgcggttgctgtgatgtttatgaatccac

SEQ ID NO: 826366 - DNA, 75 bp, synthetic construct
  source 1..75: mol_type = other DNA
gcaaacggcgcttgtgcgtgcagaactgtaccggacgggaatttctgcgaaagatgatgcgggagcaactgcccg

SEQ ID NO: 826367 - DNA, 75 bp, synthetic construct
  source 1..75: mol_type = other DNA
agtttggtgatgacgcggcgaaactggcaaacaaccttccggaactgcagcgccagctaaagctgacagcgggca

SEQ ID NO: 826368 - DNA, 75 bp, synthetic construct
  source 1..75: mol_type = other DNA
aaccaggaactttcgaaacaggaggcgcggctgaagcggctgggggaagctcagcgcaggatgaatgcagcgcgt

SEQ ID NO: 826369 - DNA, 75 bp, synthetic construct
  source 1..75: mol_type = other DNA
ctttctgctcagtggttgctggtcaaaaccggaacgcagaacaccttcagtagcctgggcgaaacgctgcgccag

SEQ ID NO: 826370 - DNA, 75 bp, synthetic construct
  source 1..75: mol_type = other DNA
cggctgtggtggctgcggttaccgtgggcctcggcaccctggcggtgatgttggctgcagtgctggggccgctgg

SEQ ID NO: 826371 - DNA, 75 bp, synthetic construct
  source 1..75: mol_type = other DNA
atacaccggtaactgaccggttaatcgccgatatccggtggatgctcgaacatcattactatccctcccccggcc

SEQ ID NO: 826372 - DNA, 75 bp, synthetic construct
  source 1..75: mol_type = other DNA
aaaccggtgattatgattttgaacaactccagtcactggctgaccgtcggctttatctcgctaaacaggccgggc

SEQ ID NO: 826373 - DNA, 75 bp, synthetic construct
  source 1..75: mol_type = other DNA
ggagaaggtgaacgcactgccgcaggacaagcgtctgtctgccatgaccatgttgtttggtaaagagtttggcga

SEQ ID NO: 826374 - DNA, 75 bp, synthetic construct
  source 1..75: mol_type = other DNA
acgggcctgaaattgtcaacggtccggcaaacgtgaccagccggagaaataccgctgcactggctgcggttgtcg

SEQ ID NO: 826375 - DNA, 75 bp, synthetic construct
  source 1..75: mol_type = other DNA
tgcgcgatcgcatcgcaggagccggagcaaccaccacggctgcagggctggcagtgggtgcaccagtaatggcgg

SEQ ID NO: 826376 - DNA, 75 bp, synthetic construct
  source 1..75: mol_type = other DNA
ttgtggcactggatcaggttcctgacgaagcattcgccagcaaagcggtgggtgacggtgtggggcgtgaaaccg

SEQ ID NO: 826377 - DNA, 75 bp, synthetic construct
  source 1..75: mol_type = other DNA
tacacgggtagtaatgctgtttttggtgtgatcactcatgtcatcaatgatgcccggagtggggagtttgatgat

SEQ ID NO: 826378 - DNA, 75 bp, synthetic construct
  source 1..75: mol_type = other DNA
atttctcttgatcagcagataattagacatccttcagcgacctacttcatgagagcggctgacagccatcatcgt

SEQ ID NO: 826379 - DNA, 75 bp, synthetic construct
  source 1..75: mol_type = other DNA
attgcagggtgctttgctggtggttgattcctcgcttactccggttgatggttctctgcttgtgtgcgctatgga

SEQ ID NO: 826380 - DNA, 75 bp, synthetic construct
  source 1..75: mol_type = other DNA
ctgatagccatcaccgtgagggaatattgcagggtgctttgctggtggttgattcttcgcttactccagttgatg

SEQ ID NO: 826381 - DNA, 75 bp, synthetic construct
  source 1..75: mol_type = other DNA
gtgacggatcactgcttgtttgcactgacgaaggtgagttcaggattaagcgctaccggacgcaccctcagcctc

SEQ ID NO: 826382 - DNA, 75 bp, synthetic construct
  source 1..75: mol_type = other DNA
gctgtttttggtgtgatcactcatgtcatcaatgatgcccgaagtggggaatttgatgattgtccggtgatttaa

SEQ ID NO: 826383 - DNA, 75 bp, synthetic construct
  source 1..75: mol_type = other DNA
cagaacattggaattcattatgccgaaaaatcgaaagcatctcatattttatttttggatcaagacagtatcgtt

SEQ ID NO: 826384 - DNA, 75 bp, synthetic construct
  source 1..75: mol_type = other DNA
gtacgggtacagtgggcgtgagtcgttgtcacactcagactctgctgacaactttgcatggagccttggggctgg

SEQ ID NO: 826385 - DNA, 75 bp, synthetic construct
  source 1..75: mol_type = other DNA
gatgaagaggaaacgtcaaagtataaaggcggtaatgaccacgatacggtatttagtggtggtattgcggcaggt

SEQ ID NO: 826386 - DNA, 75 bp, synthetic construct
  source 1..75: mol_type = other DNA
tatgacagcgataatattgttgtgagtatttcaaacgatgtttcaacactctggccagtgggggcatctgtagca

SEQ ID NO: 826387 - DNA, 75 bp, synthetic construct
  source 1..75: mol_type = other DNA
acactgaaaaatataacgagtgggtgaaaaattctctgagcagatttttaaaattactggcgacgagaatgtggc

SEQ ID NO: 826388 - DNA, 75 bp, synthetic construct
  source 1..75: mol_type = other DNA
cggcagtatcgacgctcgcccggtgcaggacgctatcatcaacatcatggaaggaggccaggaagccttcaaccg

SEQ ID NO: 826389 - DNA, 75 bp, synthetic construct
  source 1..75: mol_type = other DNA
gattcctcactgactcctgttgatggatctcttcttgtatgtgctctggatggggaatatcgcgtaaaaagatac

SEQ ID NO: 826390 - DNA, 75 bp, synthetic construct
  source 1..75: mol_type = other DNA
ggtttgcagcaatattgacgatttcagcggccttatcattaaagcccagggccatgttgtggcgggtcaaacgcc

SEQ ID NO: 826391 - DNA, 75 bp, synthetic construct
  source 1..75: mol_type = other DNA
ctgctggcactgctgctggtgttgcgtggcgatctgctcgaccgctggcagcagcagctacctccagaaagcccg

SEQ ID NO: 826392 - DNA, 75 bp, synthetic construct
  source 1..75: mol_type = other DNA
tcatgttccttgctccactgttgtaccttctgcatgcattgctgacgggtattagcctgtttgtggcaacgctgc

SEQ ID NO: 826393 - DNA, 75 bp, synthetic construct
  source 1..75: mol_type = other DNA
cggtctgcatcaggtgctgaacaccatcgcctggttccagattggtgaattcaccaacgcggcgggtacggtttt

SEQ ID NO: 826394 - DNA, 75 bp, synthetic construct
  source 1..75: mol_type = other DNA
tcgatgattagcccggtggtttgcagcaatatcgacgatttcagtggcttgatcattaaagctcagggccatgtt

SEQ ID NO: 826395 - DNA, 75 bp, synthetic construct
  source 1..75: mol_type = other DNA
ggtatcattaccggtctggtcggtggtgcagcctataaccgttggtccgcgattaaactgcctgacttcctgagc

SEQ ID NO: 826396 - DNA, 75 bp, synthetic construct
  source 1..75: mol_type = other DNA
taaaagggattgtgctgctggatattaacaaaaacaatctgcggaatatcttttacactcatgaccgccctctcc

SEQ ID NO: 826397 - DNA, 75 bp, synthetic construct
  source 1..75: mol_type = other DNA
gtggaagctgctgcactattacccgcttttgatcaggcagtggaaggcaaccgccaccaggatgattacggttca

SEQ ID NO: 826398 - DNA, 75 bp, synthetic construct
  source 1..75: mol_type = other DNA
tgaaaatatcagtgatgcgatgaccggactgtataatcgcaaaatattaacgcctgaacttgagcagcgtttgca

SEQ ID NO: 826399 - DNA, 75 bp, synthetic construct
  source 1..75: mol_type = other DNA
gcgcagcctataaccgttggtccgatattaaactgccggacttcctgagtttcttcggcggcaaacgctttgtgc

SEQ ID NO: 826400 - DNA, 75 bp, synthetic construct
  source 1..75: mol_type = other DNA
atgcggtgccgcaactgaaggacattgcgaacgttaaaggcgagcaggtagtgaatatcggctcccaggacatga

SEQ ID NO: 826401 - DNA, 75 bp, synthetic construct
  source 1..75: mol_type = other DNA
tggtgcagcactggcattacccaatatcaccattttagcaaccggcgggaccattgccggtggtggtgactccgc

SEQ ID NO: 826402 - DNA, 75 bp, synthetic construct
  source 1..75: mol_type = other DNA
tgccattctgaaacagatacaggagctttccggccatctggatctggtgtttcccggcgaccataatccgtacaa

SEQ ID NO: 826403 - DNA, 75 bp, synthetic construct
  source 1..75: mol_type = other DNA
ttcgcattctaggcgtatcactcgttgcagagtggtatcgcaacagatttgtcgaacaagttcccggacaaaaga

SEQ ID NO: 826404 - DNA, 75 bp, synthetic construct
  source 1..75: mol_type = other DNA
gtatttacctacccagacgcatctgaaaaaagtctttgctggtggtgatgcagttcatggcgcggatctggttgt

SEQ ID NO: 826405 - DNA, 75 bp, synthetic construct
  source 1..75: mol_type = other DNA
cgtctggcttacattcataaggccgaacatatggaagcccgcatggacatgatgcagtggtggtcggattatctg

SEQ ID NO: 826406 - DNA, 75 bp, synthetic construct
  source 1..75: mol_type = other DNA
ttcagatgatattgatactgcaacaaaattattgcattttatatgtgctgaaaacaataacattcaaaacaaatt

SEQ ID NO: 826407 - DNA, 75 bp, synthetic construct
  source 1..75: mol_type = other DNA
gatgcagtggtggtcggattatctggatgtgtgccgcgaggggtatgtcgcgccgtacatttatgcgcggcagca

SEQ ID NO: 826408 - DNA, 75 bp, synthetic construct
  source 1..75: mol_type = other DNA
gccggttgccccacaggcagatatgcagcaacttgcccgtgatctgaaagcagagctggacagacgggatgagga

SEQ ID NO: 826409 - DNA, 75 bp, synthetic construct
  source 1..75: mol_type = other DNA
gccgaatctgcctggatggacatgattaagtgggagaagtgcgaatacattgctccacagcatgagctgaaaaca

SEQ ID NO: 826410 - DNA, 75 bp, synthetic construct
  source 1..75: mol_type = other DNA
aagataactgtttccagatccgcgataaagcctcaacagattacgttattgatgagtacaaaacttttaacgatc

SEQ ID NO: 826411 - DNA, 75 bp, synthetic construct
  source 1..75: mol_type = other DNA
ggataccgctggtggaggttccgcagacggttcgcaatctgtcagaggccatgaaggaaacggaatcactggtct

SEQ ID NO: 826412 - DNA, 75 bp, synthetic construct
  source 1..75: mol_type = other DNA
gtccggtacacaactacatcccgaactggctgaagctcgccaacgaggggcgtatttttgaagcggcggaactgt

SEQ ID NO: 826413 - DNA, 75 bp, synthetic construct
  source 1..75: mol_type = other DNA
aatccgacgcaccctgaccatgctgaaggacagtatcaccactctcagtaacgccattcagaaggatgaggcctg

SEQ ID NO: 826414 - DNA, 75 bp, synthetic construct
  source 1..75: mol_type = other DNA
atcaggcattcccgtccattggcggcattgtgcacacacactcgcgccacgccaccatctgggcgcaggcgggtc

SEQ ID NO: 826415 - DNA, 75 bp, synthetic construct
  source 1..75: mol_type = other DNA
accgtcgtaaatggcagggcgttatcaaagcggtagacggtgaaatgatcacagttaccgtcgaaggtaaagatg

SEQ ID NO: 826416 - DNA, 75 bp, synthetic construct
  source 1..75: mol_type = other DNA
cccaagagcgccagcgggcgtgtggaaattggcgagaagaaatacaccaaatcacagatcgtcgagatgtatcgg

SEQ ID NO: 826417 - DNA, 75 bp, synthetic construct
  source 1..75: mol_type = other DNA
atgattatcggtatcgacctgggtacgacgaatagtctggccgcggtatggcgaaatggacaaagtgaactgatc

SEQ ID NO: 826418 - DNA, 75 bp, synthetic construct
  source 1..75: mol_type = other DNA
tatatgttgcgcgcaatcatcagcggacgcggtgatgaagtgatcgaactggcgaaaacgaactggctaaggtaa

SEQ ID NO: 826419 - DNA, 75 bp, synthetic construct
  source 1..75: mol_type = other DNA
cctggcaacctgcacttaatcaatggtttgttcgattgtcaccgtaatcacgttccggtactggcaattgccgct

SEQ ID NO: 826420 - DNA, 75 bp, synthetic construct
  source 1..75: mol_type = other DNA
ttccgccgcaaatcaaacttgaacaggccaaaggatttagcctgtatatgctgcgggcaatcatcagcggacgcg

SEQ ID NO: 826421 - DNA, 75 bp, synthetic construct
  source 1..75: mol_type = other DNA
ttacggattacaccgaagatgcgcgtttactggatggaatgctggggcagattaactgccttccatccgtaccgg

SEQ ID NO: 826422 - DNA, 75 bp, synthetic construct
  source 1..75: mol_type = other DNA
ctacaacggaatattttaacgataaacctgttagagcagagtcagtactgtactggcgtcgttataaatcccgta

SEQ ID NO: 826423 - DNA, 75 bp, synthetic construct
  source 1..75: mol_type = other DNA
atgcggaaatcaacggtgaatatgagtgggaaaccggtaacgtcatcgttgaaactttcaaaaaacaggggatcg

SEQ ID NO: 826424 - DNA, 75 bp, synthetic construct
  source 1..75: mol_type = other DNA
atattatggaagtacgagccagtgccggggataactttttaggtggtgaagatattgtcgatatcctgatcgatg

SEQ ID NO: 826425 - DNA, 75 bp, synthetic construct
  source 1..75: mol_type = other DNA
aattaacgaaccaaccgccgctgcactggcgtatggtttgcataataaagatgatgaacatcaatttctggtatt

SEQ ID NO: 826426 - DNA, 75 bp, synthetic construct
  source 1..75: mol_type = other DNA
cggggataactttttaggtggtgaagatattgtcgatatcctgatcgatgcatattgctcacgtcgggatcttcc

SEQ ID NO: 826427 - DNA, 75 bp, synthetic construct
  source 1..75: mol_type = other DNA
gcgaaacccacactggggcgactgtttgaattcaataaactggcgatctaccaggagcagacagcatccaagttt

SEQ ID NO: 826428 - DNA, 75 bp, synthetic construct
  source 1..75: mol_type = other DNA
cagtcatccgtctgggattctctgtgctgggcatcaaaacgttaccttccgttatggcagcagtaacacgaacca

SEQ ID NO: 826429 - DNA, 75 bp, synthetic construct
  source 1..75: mol_type = other DNA
atgaactgtcagaaagtctgggaaaaatcgcccagctctacaaaatacctacccgcaatattgaacagctcggtg

SEQ ID NO: 826430 - DNA, 75 bp, synthetic construct
  source 1..75: mol_type = other DNA
attgatgtcatgcaacgcctgggcggtgtggctgatcgtctggattatcgtaaagcggcggcactgggttccacc

SEQ ID NO: 826431 - DNA, 75 bp, synthetic construct
  source 1..75: mol_type = other DNA
gaagcaccgacgcagatcatcatccagacacagccaggacaaattgcgcaggatattgcgcgggaggtggcccgc

SEQ ID NO: 826432 - DNA, 75 bp, synthetic construct
  source 1..75: mol_type = other DNA
aaccaggaactttcgaaacaggagacgcggctgaagcgactgggggaagctcagcgcaggatgaatgcagcgcgt

SEQ ID NO: 826433 - DNA, 75 bp, synthetic construct
  source 1..75: mol_type = other DNA
cacggtgaaaagcatcacgggggcgttgcgttgctgggtggaagctaaccctgaactgacgggcacactgatgaa

SEQ ID NO: 826434 - DNA, 75 bp, synthetic construct
  source 1..75: mol_type = other DNA
cggcaatgggacgacgattcggggaggcactggcggaaggtctgaatatggttatgcatccgctggactccctga

SEQ ID NO: 826435 - DNA, 75 bp, synthetic construct
  source 1..75: mol_type = other DNA
ctggcatctggtccactggcgatgctgcgcgttgccctgtatgccgtatctggtctgataggtgctctgctcagt

SEQ ID NO: 826436 - DNA, 75 bp, synthetic construct
  source 1..75: mol_type = other DNA
tgacgggcacactgatgaaagtagcggctgttgtggctgcggttaccgtaggcctcggcaccttggctgtggcgc

SEQ ID NO: 826437 - DNA, 75 bp, synthetic construct
  source 1..75: mol_type = other DNA
gttacggcagcagtaactcgaaccagcagcgcgttgtcctggctggctggagcaccactggcactgctgcgacgc

SEQ ID NO: 826438 - DNA, 75 bp, synthetic construct
  source 1..75: mol_type = other DNA
caggtgcgccggttgcactattgcggtctggattatccggtttacgtcctgttgctgtgatgtttatgaatcctc

SEQ ID NO: 826439 - DNA, 75 bp, synthetic construct
  source 1..75: mol_type = other DNA
gctgttgctgtgatgtttatgaatcctttggcggtactgcgcggtggactggtcgccgcaggcacggtgctgcga

SEQ ID NO: 826440 - DNA, 75 bp, synthetic construct
  source 1..75: mol_type = other DNA
ggttgaaggtggggcgcgcatgaatgtcgcaaaccctgacgacagctgggaggaccagaaacgtgacctgctggc

SEQ ID NO: 826441 - DNA, 75 bp, synthetic construct
  source 1..75: mol_type = other DNA
gtctggattatccggtttacgtgcggttgctgtgatgtttatgaatccactggcggtactacgcggcggactggc

SEQ ID NO: 826442 - DNA, 75 bp, synthetic construct
  source 1..75: mol_type = other DNA
agtttggcgatgacgcagcgaaactggcaaacaacctgccggaacttcagcgccagttaaaactgacagcgggca

SEQ ID NO: 826443 - DNA, 75 bp, synthetic construct
  source 1..75: mol_type = other DNA
gccagttatgctcgttcgctggaggtgcgcgatcgtattgcaggagccggagccactaccacggctgcagggctg

SEQ ID NO: 826444 - DNA, 75 bp, synthetic construct
  source 1..75: mol_type = other DNA
tctctgcgcgggtgaattttttcacaaaacacatgaatgtgtgggtcactgccgagtctgcctggatggacatga

SEQ ID NO: 826445 - DNA, 75 bp, synthetic construct
  source 1..75: mol_type = other DNA
ttctggagacggcaaccggtgcgcgtctgcaatcgctgcttttcggtatcaccaccgccggtttcaacaaagaag

SEQ ID NO: 826446 - DNA, 75 bp, synthetic construct
  source 1..75: mol_type = other DNA
cgtgcaaatttgctcagtcaggaactgggtgcgatggggccgccttcgcaacgtcaggttgttgctctgggccgt

SEQ ID NO: 826447 - DNA, 75 bp, synthetic construct
  source 1..75: mol_type = other DNA
cgccatgtcgaaaggggcagacattattgatgttatgcaacgtctgggcggtgtggcggaccgtctggattatcg

SEQ ID NO: 826448 - DNA, 75 bp, synthetic construct
  source 1..75: mol_type = other DNA
tcaaagcggcggcaggtcccgtcagtgccgcattcgaaccacttaagcctgtgttccagtggattggcgacaaag

SEQ ID NO: 826449 - DNA, 75 bp, synthetic construct
  source 1..75: mol_type = other DNA
acttctgccgaactgcagagcgcagcggaaatggggcgacgattcggggaggcgctggcggaagggctgaatatg

SEQ ID NO: 826450 - DNA, 75 bp, synthetic construct
  source 1..75: mol_type = other DNA
ggcaaatgtgaccagccggaaaaatacagctgcactggctgccgttgttaccggaatgatgggagttgctgccgc

SEQ ID NO: 826451 - DNA, 75 bp, synthetic construct
  source 1..75: mol_type = other DNA
atgccatcgggtggttttccgtcatggggatatggcttagcggggatgtatgacagcggcggctatatcccgcgc

SEQ ID NO: 826452 - DNA, 75 bp, synthetic construct
  source 1..75: mol_type = other DNA
tgcaggcgctgtggggctggtttactgacctgctgatgcctgttaagtcgacctctgccgaactgcagagtgcag

SEQ ID NO: 826453 - DNA, 75 bp, synthetic construct
  source 1..75: mol_type = other DNA
attgacggtacacgtccgcagtttggccgcaacgatccctgcccttgtggttcaggtaaaaaatttaaaaagtgc

SEQ ID NO: 826454 - DNA, 75 bp, synthetic construct
  source 1..75: mol_type = other DNA
gagtaacgtcacctgcgcttatcgtcgtgatgaagctaacatgccaggctcgaagaaagaggtgaagaacgcccg

SEQ ID NO: 826455 - DNA, 75 bp, synthetic construct
  source 1..75: mol_type = other DNA
cggaagaaccgtttatcaataccgccgggctgaatgtagtggtgttgggcggcggcgatactgcaatggactgtg

SEQ ID NO: 826456 - DNA, 75 bp, synthetic construct
  source 1..75: mol_type = other DNA
gcgtttgtgaatggacctgcccgctgcataaccatattccacagtggattgaactggtgaaagccggaaacatcg

SEQ ID NO: 826457 - DNA, 75 bp, synthetic construct
  source 1..75: mol_type = other DNA
gaccaacaccctgccagaaattaccggacgtgtttgcccgcaagaccgtctgtgcgaaggagcctgcaccattcg

SEQ ID NO: 826458 - DNA, 75 bp, synthetic construct
  source 1..75: mol_type = other DNA
acacggtgtaacggtggataaatgggggcgcatcgtggctgatgttgaaagtcagtaccgttaccagacgacgaa

SEQ ID NO: 826459 - DNA, 75 bp, synthetic construct
  source 1..75: mol_type = other DNA
ggcgagccggatgcccaggggcgtcggcgacctgtaccgattgagggcagtgaatttgtcatgccagccgatgcg

SEQ ID NO: 826460 - DNA, 75 bp, synthetic construct
  source 1..75: mol_type = other DNA
accgcgtgacaccactgacccggtgactggcgagcctgtcaccattatgcagggcagcccgtggcggctcgacac

SEQ ID NO: 826461 - DNA, 75 bp, synthetic construct
  source 1..75: mol_type = other DNA
tgtcgatgaaggaaaaacaggccgctggttccggcaggagctggagccggagctgcagcgtaagggatggtgggg

SEQ ID NO: 826462 - DNA, 75 bp, synthetic construct
  source 1..75: mol_type = other DNA
ctctacagcgccggtcgttgggcggagcagatggaaaacgtcgacgacaagccgtactggatgtataccggcatc

SEQ ID NO: 826463 - DNA, 75 bp, synthetic construct
  source 1..75: mol_type = other DNA
tccgaaaatcttcgctggtggtgacgccgtgcgtggtgcggatctggtggttaccgcaatggcagaaggacgtca

SEQ ID NO: 826464 - DNA, 75 bp, synthetic construct
  source 1..75: mol_type = other DNA
atggtccgcggtggggaaacctgccggatatctattgcgcttatcttcttatcttattagatgtctggtttttcg

SEQ ID NO: 826465 - DNA, 75 bp, synthetic construct
  source 1..75: mol_type = other DNA
tgatatctattgcacttacctgatcaggtgcctggtttttcgtggggaattaatcgggtatggtgatttgttccg

SEQ ID NO: 826466 - DNA, 75 bp, synthetic construct
  source 1..75: mol_type = other DNA
aattcgtttcctgcgtacgcgtcttggcgagccggatgcccaggggcgtcggcgtccggtgccggtggaaggcag

SEQ ID NO: 826467 - DNA, 75 bp, synthetic construct
  source 1..75: mol_type = other DNA
ttgcaatttgactacatcattatcggcgccggctctgccggcaacgtcctcgctacacgtctgactgaagatccg

SEQ ID NO: 826468 - DNA, 75 bp, synthetic construct
  source 1..75: mol_type = other DNA
aggcttacgaagaatacttcgaaggccttgccgaaggcgaagaagctctcagcttcagtgaatttaaacaggcgc

SEQ ID NO: 826469 - DNA, 75 bp, synthetic construct
  source 1..75: mol_type = other DNA
agaaactggctgacagcggcctgaatattattgcagcaaaaggtctgactgatgcagctcagcaggttgttgccg

SEQ ID NO: 826470 - DNA, 75 bp, synthetic construct
  source 1..75: mol_type = other DNA
agccgtgaggaatttgcgtggccgaacattcaataccacttcctgccggtagcgattaactacaacggctcgaat

SEQ ID NO: 826471 - DNA, 75 bp, synthetic construct
  source 1..75: mol_type = other DNA
gcgctggatctcgataactgggcgaaagaacccggcctggaacactggagctacctcgattgcctgccctactat

SEQ ID NO: 826472 - DNA, 75 bp, synthetic construct
  source 1..75: mol_type = other DNA
agccgagaggaatttgcgtggccgaatattcagtatcacttcctgccggtagcgattaactataacggctcgaat

SEQ ID NO: 826473 - DNA, 75 bp, synthetic construct
  source 1..75: mol_type = other DNA
aactacgttgcgctggacggtaacatcggttgcatggttaacggcgcaggtctggcgatgggtacgatggacatc

SEQ ID NO: 826474 - DNA, 75 bp, synthetic construct
  source 1..75: mol_type = other DNA
cgcagcataatttagaggtgcttgcttcccgtggtttgctcatctgggggccagacagtggcagtcaggcttgtg

SEQ ID NO: 826475 - DNA, 75 bp, synthetic construct
  source 1..75: mol_type = other DNA
aggcttacgaagaatacttcgaaggccttaccgaaggcgaagaagctctcagcttcagtgagtttaaacaggcgc

SEQ ID NO: 826476 - DNA, 75 bp, synthetic construct
  source 1..75: mol_type = other DNA
cgcaaccaaagaacgtgtaaccgaagcattcaaaatcatcctctctgacgacaaagtgaaagccgttctggttaa

SEQ ID NO: 826477 - DNA, 75 bp, synthetic construct
  source 1..75: mol_type = other DNA
aagaatacttcgaaggccttgccgaaggcgaagaagctctcagcttcagtgagtttaaacaggcgctttccagct

SEQ ID NO: 826478 - DNA, 75 bp, synthetic construct
  source 1..75: mol_type = other DNA
atcaaacagacgccaatggacaaccggttaaccagattctggttgaagcggcgaccgatatcgcgaaagagctgt

SEQ ID NO: 826479 - DNA, 75 bp, synthetic construct
  source 1..75: mol_type = other DNA
atgctcagccagcttaacttgcgttttcacaaaaaactgatcgaggcgctgaaagtgcgtgccggtcgcgaaaat

SEQ ID NO: 826480 - DNA, 75 bp, synthetic construct
  source 1..75: mol_type = other DNA
tctgtggcaggcgacgcatgcgcatccgtttgatctgactaaatttaacgatggtgatttcctgcgtgccgaaca

SEQ ID NO: 826481 - DNA, 75 bp, synthetic construct
  source 1..75: mol_type = other DNA
tacaaaagaatcaggaaaaacgcctgattgatgagagccccgagccactgaaatctgtcgtcaaatttgcgctgg

SEQ ID NO: 826482 - DNA, 75 bp, synthetic construct
  source 1..75: mol_type = other DNA
gtccgcacgtaccgaacatgcgtttctgccatcatttcaaactgatgaaaacggcaggggcttactggcgtggcg

SEQ ID NO: 826483 - DNA, 75 bp, synthetic construct
  source 1..75: mol_type = other DNA
tttaatgaaaagcaatttcaggaagccctgtcacgccagtggcagcgttatggtttaacttctgcggctgagatg

SEQ ID NO: 826484 - DNA, 75 bp, synthetic construct
  source 1..75: mol_type = other DNA
tatgacaaacaggttcgcatggccaatatgtgtgtggtaagcggctttgcggtgaacggtgtggcagcgttgcac

SEQ ID NO: 826485 - DNA, 75 bp, synthetic construct
  source 1..75: mol_type = other DNA
gctggcggattacgaagtcattcaacttaacgacacacacccgactattgccattcccgaactgctgcgtgtgtt

SEQ ID NO: 826486 - DNA, 75 bp, synthetic construct
  source 1..75: mol_type = other DNA
aatgaatcatgtacatgccggatttaccgcaaagaccgcaatcatccgatctgcgttaccgactggatggatgaa

SEQ ID NO: 826487 - DNA, 75 bp, synthetic construct
  source 1..75: mol_type = other DNA
tgtaagccccatggatgttgcgctggacattggtccaggtctggcaaaagcctgtattgcagggcgtgtaaatgg

SEQ ID NO: 826488 - DNA, 75 bp, synthetic construct
  source 1..75: mol_type = other DNA
ggtttttattacgacgttgatcttgaccgcacgttaacccaggaagatgtcgaagcactcgagaagcggatgcat

SEQ ID NO: 826489 - DNA, 75 bp, synthetic construct
  source 1..75: mol_type = other DNA
tgttgtcagcaaatccatcagtggtatcagatgtggttatctgaaggcggggcgtaccattcctgggactcgctg

SEQ ID NO: 826490 - DNA, 75 bp, synthetic construct
  source 1..75: mol_type = other DNA
actggttgggaaaagcccatcagccttgctggaagcagcaggcctccctttgcccgcaaaagcgccgcgcctact

SEQ ID NO: 826491 - DNA, 75 bp, synthetic construct
  source 1..75: mol_type = other DNA
tgatctggcagcctgagttcacagataaaacactctccaggaaacccggggcggttcagattgccataatcgaag

SEQ ID NO: 826492 - DNA, 75 bp, synthetic construct
  source 1..75: mol_type = other DNA
gtcgaaaacattcagtatcaagacaacaaaatcgcaaaatgaccagtgtaccgacggatttaaggtcagctcctc

SEQ ID NO: 826493 - DNA, 75 bp, synthetic construct
  source 1..75: mol_type = other DNA
cgctgctcgatatcacccatgacctgctggcctggcagatagagcatgagcgtccggtggatggccactacctga

SEQ ID NO: 826494 - DNA, 75 bp, synthetic construct
  source 1..75: mol_type = other DNA
ttcacaaaaaactgatcgaggcgctgaaagtgcgtgccggtcgcgaaaatacttcggtcaaccccctagccgaac

SEQ ID NO: 826495 - DNA, 75 bp, synthetic construct
  source 1..75: mol_type = other DNA
ggctttacgaccttcaccattgcgacaccaaccggagaaggggcaacgtcagcacggacttttgcccgctcacga

SEQ ID NO: 826496 - DNA, 75 bp, synthetic construct
  source 1..75: mol_type = other DNA
tgggcagtggtatcggcaccgccttcgccgcctggattatgaacagctttggctatattcccaaccagccacaaa

SEQ ID NO: 826497 - DNA, 75 bp, synthetic construct
  source 1..75: mol_type = other DNA
gcgcgttattcctttgcgatgagcaatgctgcggaaaacattaaacaaatcgcccgttacgctaccgatgataat

SEQ ID NO: 826498 - DNA, 75 bp, synthetic construct
  source 1..75: mol_type = other DNA
acctgattattcccggtctacataaagcaaacggtatttcgcggttactgaaacgctgggatctgtcaccgcaaa

SEQ ID NO: 826499 - DNA, 75 bp, synthetic construct
  source 1..75: mol_type = other DNA
aaacctatacggctgaactttcgtccattgcaggcacccccatcgaggctggccccttcgatacagtggtgcttt

SEQ ID NO: 826500 - DNA, 75 bp, synthetic construct
  source 1..75: mol_type = other DNA
gaacgccgtatgctctatatcgcattcaaccggtctgtccgggaggaggctcaggcacgcttcccggtgaatgtc

SEQ ID NO: 826501 - DNA, 75 bp, synthetic construct
  source 1..75: mol_type = other DNA
gtttttatggttaccattaccttttgctgtatttagtgcgctttctttctggtcacccgatatcagcatgacagg

SEQ ID NO: 826502 - DNA, 75 bp, synthetic construct
  source 1..75: mol_type = other DNA
ttgttcattcgcctggcagcattggttcaacaccttcagttgaggttcagtcaattcacgctggttttgattggg

SEQ ID NO: 826503 - DNA, 75 bp, synthetic construct
  source 1..75: mol_type = other DNA
ggttaaccagattctggttgaagcagcgaccgatatcgctaaagagctgtatctcggtgccgttgtagaccgtag

SEQ ID NO: 826504 - DNA, 75 bp, synthetic construct
  source 1..75: mol_type = other DNA
catggcgaattgctacaaaccgtggcaaaccgctggcagcgtacagatgtatggtctgccctggagcagttgctt

SEQ ID NO: 826505 - DNA, 75 bp, synthetic construct
  source 1..75: mol_type = other DNA
cttggggtatgagtcaggtggaactgctgttattaacgcaacaataaaacttggagcaggtaatgacactatcca

SEQ ID NO: 826506 - DNA, 75 bp, synthetic construct
  source 1..75: mol_type = other DNA
ttgaagttattgaccttggtgataataatggaggggtgaatataattgcatctgaccttgtgaaaagtggagttg

SEQ ID NO: 826507 - DNA, 75 bp, synthetic construct
  source 1..75: mol_type = other DNA
atcccggggcatcctgacgctaatgatgggtgggtagtacctggtgcgtcgtggataccatcacactggatgccg

SEQ ID NO: 826508 - DNA, 75 bp, synthetic construct
  source 1..75: mol_type = other DNA
ggaagcacaattagcagaacaggcgcttcgcagcggtcacgtagaagcgttaattaacatatgggaaaatgacaa

SEQ ID NO: 826509 - DNA, 75 bp, synthetic construct
  source 1..75: mol_type = other DNA
gtgatgaattgctacaaaaagcagagaagaaaaaaaacattgtctggcgttatgaaaatttttcactggagtggc

SEQ ID NO: 826510 - DNA, 75 bp, synthetic construct
  source 1..75: mol_type = other DNA
tagtaagaaaaaaatgacagctccacgtcttgatttggcaccgctcgaattaacgccgcaagtttactggcaacc

SEQ ID NO: 826511 - DNA, 75 bp, synthetic construct
  source 1..75: mol_type = other DNA
gaagattgcggcagtctgctggtacaaattaaccatccgcaggtcatccgcaccctgctgttagttgctgataaa

SEQ ID NO: 826512 - DNA, 75 bp, synthetic construct
  source 1..75: mol_type = other DNA
actgaaaacgttctgccagccgcaaacgctggcagcttttgcctgggatcttttcaccgcgtggcaacaagctgg

SEQ ID NO: 826513 - DNA, 75 bp, synthetic construct
  source 1..75: mol_type = other DNA
aaagcgattcatgaagcctcgccacgggcggtgaatccgctggtctatctcaactgtgccgcactgccggaaagt

SEQ ID NO: 826514 - DNA, 75 bp, synthetic construct
  source 1..75: mol_type = other DNA
ctacctggctctacggcttaaaagtaatcgcgataacgttagcggtcatcatgttcatcagtgggctggacgatt

SEQ ID NO: 826515 - DNA, 75 bp, synthetic construct
  source 1..75: mol_type = other DNA
ctgttcggcacgccaggcgtacagctgacggatgatgatattcaaaatatgccctacgccagccagtacatgcag

SEQ ID NO: 826516 - DNA, 75 bp, synthetic construct
  source 1..75: mol_type = other DNA
cgaggccttcctcgaccgtgtctatatcgtgaaggtgccgtactgcttgcgcatttccgaagagattaaaatcta

SEQ ID NO: 826517 - DNA, 75 bp, synthetic construct
  source 1..75: mol_type = other DNA
tgaacagattgtctcttatctgaaacacgcggctcaggggctggaagagaagaaacaaatcctgtatctgctggg

SEQ ID NO: 826518 - DNA, 75 bp, synthetic construct
  source 1..75: mol_type = other DNA
atggagaccgtttttgacgcactgaaagcaatgggaaaagcctcttcccaggaagtggcagcacgtctgggaatg

SEQ ID NO: 826519 - DNA, 75 bp, synthetic construct
  source 1..75: mol_type = other DNA
atttggggacgaaaaacacatcgtcgtttgattacggaaccaaatccacgaataacaccggggcgcatacgcaca

SEQ ID NO: 826520 - DNA, 75 bp, synthetic construct
  source 1..75: mol_type = other DNA
aacgacgctatcctcgatccgcttatcgctgcgggtgtgacgctgctgccgaatacttccggggcgaaaacagca

SEQ ID NO: 826521 - DNA, 75 bp, synthetic construct
  source 1..75: mol_type = other DNA
acggggaagatagcgcgcaaatcctgggtgaaagcgccgttcttaaaggtcagaagaatataacgaaagtaaatg

SEQ ID NO: 826522 - DNA, 75 bp, synthetic construct
  source 1..75: mol_type = other DNA
ttcagaaaaaaagccctaagggatgggaccgggttaacgataatttttcaaacgaccgaagctatttgctttatt

SEQ ID NO: 826523 - DNA, 75 bp, synthetic construct
  source 1..75: mol_type = other DNA
ttagcaatgaaaacagctctgagatttagtgatctaaaagatgataatgatagtgggaaggctgaatatataatg

SEQ ID NO: 826524 - DNA, 75 bp, synthetic construct
  source 1..75: mol_type = other DNA
gtagggaaagtcgatatccgtaaactcgaacactacgcgcagaacgatccagacgcctacggatattccggtgca

SEQ ID NO: 826525 - DNA, 75 bp, synthetic construct
  source 1..75: mol_type = other DNA
ctgtgccgcgccaaccaggggatcatggaatttgtcgagatgtttaaagcaccgataaaagtgctgcatccgctg

SEQ ID NO: 826526 - DNA, 75 bp, synthetic construct
  source 1..75: mol_type = other DNA
gactcgttactcatcatagtctgaccattgacacaaagtttagaaccaaggcaacacaagaggtaaaagcccagt

SEQ ID NO: 826527 - DNA, 75 bp, synthetic construct
  source 1..75: mol_type = other DNA
tgatggcaccgataacagcaatctgcctgaaatcctcgtttcaccaccgtggcgtagtaagaaaaaaatgacagc

SEQ ID NO: 826528 - DNA, 75 bp, synthetic construct
  source 1..75: mol_type = other DNA
ctcatttccttctttcccgaactaaagaatgagatctcttttgtggcggaaaacggcgcactggtttatgaacac

SEQ ID NO: 826529 - DNA, 75 bp, synthetic construct
  source 1..75: mol_type = other DNA
cttaacctgccggatgagcagatcccgctggtagttgacaaactgcacgttgcgctcgacggcataatgaaaccc

SEQ ID NO: 826530 - DNA, 75 bp, synthetic construct
  source 1..75: mol_type = other DNA
acatggacggtacttttcttaacgacgccaaaacgtacaaccaaccacgttttatggcgcaatatcaggaactga

SEQ ID NO: 826531 - DNA, 75 bp, synthetic construct
  source 1..75: mol_type = other DNA
gctacaactgggcctatgaaacggaacctgaaccgtttatgaataaccgccgcatggagtgcggacgcggtaaag

SEQ ID NO: 826532 - DNA, 75 bp, synthetic construct
  source 1..75: mol_type = other DNA
aggatgcgttgccgaggagcctggcggcgtattttgtggcgaatgggatgccagtaagagcgaaaaaactgaatc

SEQ ID NO: 826533 - DNA, 75 bp, synthetic construct
  source 1..75: mol_type = other DNA
gctacaactgggcctatgaaacagagcctgaaccgtttatgaataaccgccgcatggagtgcggacgcggtaaag

SEQ ID NO: 826534 - DNA, 75 bp, synthetic construct
  source 1..75: mol_type = other DNA
ccatcaccgtgcgggtgaaccacatgccgaagtacacgcgttacgtatggcgggtgaaaaagccaaaggtgcgac

SEQ ID NO: 826535 - DNA, 75 bp, synthetic construct
  source 1..75: mol_type = other DNA
taaataaaggctttctcaagcgcatgcgtaccggttttccttatgtacagctaaaactcggtgcatcgcttgatg

SEQ ID NO: 826536 - DNA, 75 bp, synthetic construct
  source 1..75: mol_type = other DNA
gccgaaggcgaagaaactctcagcttcaacgaatttaaacaggcgctttccagttcggcaaaatctaacggctga

SEQ ID NO: 826537 - DNA, 75 bp, synthetic construct
  source 1..75: mol_type = other DNA
tgcaaagtgcatatgtcagcgaaaatgcccccgaagcatttgtcgcactgatggcaaaacactaccatcgcctga

SEQ ID NO: 826538 - DNA, 75 bp, synthetic construct
  source 1..75: mol_type = other DNA
ttaggcagcgacgctcgtggattatgtaccctgccagggcttgagaaattagctgatgcgccccattttaaattc

SEQ ID NO: 826539 - DNA, 75 bp, synthetic construct
  source 1..75: mol_type = other DNA
ccggcgaaaaagccaaaggcgcaacggcgtatgtcacactcgaaccctgtagccatcatggtcgtacgccaccgt

SEQ ID NO: 826540 - DNA, 75 bp, synthetic construct
  source 1..75: mol_type = other DNA
aaaaacgatcctgcctttgcttactggctggctgaatggtcagagggggaaaatatgcctgccaacaatcacata

SEQ ID NO: 826541 - DNA, 75 bp, synthetic construct
  source 1..75: mol_type = other DNA
cgctctggaaattatcggcgaaatgctgcgctttacccagggtggacgtttttatagcggactggaacaactgaa

SEQ ID NO: 826542 - DNA, 75 bp, synthetic construct
  source 1..75: mol_type = other DNA
actattttctcagcatcctcggtttggatgcactacccggcctgttgttggctttttcgcatcgtccaaaagaaa

SEQ ID NO: 826543 - DNA, 75 bp, synthetic construct
  source 1..75: mol_type = other DNA
gcgctgatacagctgcatcatatatcgcaacgggctaaatcccgccccttgtatcttggttcttcgttatcatga

SEQ ID NO: 826544 - DNA, 75 bp, synthetic construct
  source 1..75: mol_type = other DNA
taaaaataaacccagcctgcagcgtgttgccaaatacagtaaaaatttcccccatgcaacgctcactgcactggc

SEQ ID NO: 826545 - DNA, 75 bp, synthetic construct
  source 1..75: mol_type = other DNA
cagcaggcaatcaatttgactggcgagcataaaccgtcaatcccagcccttaccatggcggctctgatctgtatc

SEQ ID NO: 826546 - DNA, 75 bp, synthetic construct
  source 1..75: mol_type = other DNA
catgtcgcatgaaaaccgcttcgggtacgcggcctgcgccgcccttttgcgtgaacaaggactggcagccgttcc

SEQ ID NO: 826547 - DNA, 75 bp, synthetic construct
  source 1..75: mol_type = other DNA
tctggcatcgttttgcgggccagcgtaatctggctcgccagtggattttacaatggccggagcatacggctacgg

SEQ ID NO: 826548 - DNA, 75 bp, synthetic construct
  source 1..75: mol_type = other DNA
gtacaaattaaccatccgcaagtcatccgcaccttgctgttagttgctgataaaaacaaacccagcctgcaacgt

SEQ ID NO: 826549 - DNA, 75 bp, synthetic construct
  source 1..75: mol_type = other DNA
aaaatgaatccggcagaggcttaccgactggctgcatgggctgacgatgaagcgttatccctgacacaaaccagg

SEQ ID NO: 826550 - DNA, 75 bp, synthetic construct
  source 1..75: mol_type = other DNA
gttggctttttcacatcgtccaaaagaaacatttccgttaattttaaatttcggcgcaacagaactggccctgcc

SEQ ID NO: 826551 - DNA, 75 bp, synthetic construct
  source 1..75: mol_type = other DNA
gcctgaacatccttaccctgatgaataatgatatgaaccgccccgggtttcctggagagcgttttatctgtgaac

SEQ ID NO: 826552 - DNA, 75 bp, synthetic construct
  source 1..75: mol_type = other DNA
tcgaagacaaaaagctgcctgcacagcaaaaagcacgtgatgaatactggcgtacgctgttacaaacgctgatgg

SEQ ID NO: 826553 - DNA, 75 bp, synthetic construct
  source 1..75: mol_type = other DNA
attgatgctctctcgccacagggcgatgtagcgccgcaagccaacaatgatttactttccgcagggatggaacta

SEQ ID NO: 826554 - DNA, 75 bp, synthetic construct
  source 1..75: mol_type = other DNA
actggcagaacaattgccgaagattattgatgcgctctcaccgcaaggtgaagtgtctccacaagtgccgcgcgc

SEQ ID NO: 826555 - DNA, 75 bp, synthetic construct
  source 1..75: mol_type = other DNA
agccggtgagcggcgagcaactggagtcggcgctcggcacaaacgcggtgtccgatctcgggcaaaaactcggcg

SEQ ID NO: 826556 - DNA, 75 bp, synthetic construct
  source 1..75: mol_type = other DNA
taacggagggagcgccactaatgcaggtacgatcacaggtaaagtgacggaacaacatagcgtatttaacaagta

SEQ ID NO: 826557 - DNA, 75 bp, synthetic construct
  source 1..75: mol_type = other DNA
ctatcaggagcgcaatgccggagactttaacctgaatatgaacagtggcagcgaaacggcggtggacagcatcgt

SEQ ID NO: 826558 - DNA, 75 bp, synthetic construct
  source 1..75: mol_type = other DNA
ttgcgcgacgctgttctaaccatgaagataagcgtattaaagatatcggtgaccagttggggcaatggtgtgaag

SEQ ID NO: 826559 - DNA, 75 bp, synthetic construct
  source 1..75: mol_type = other DNA
tgtatgccgacatgagcggtaaggaagtgattgattacctgaccgccgttgcacaaatgaagccggattccggtg

SEQ ID NO: 826560 - DNA, 75 bp, synthetic construct
  source 1..75: mol_type = other DNA
gaacctgaagaagaaagtgacctgggaagacgggaaaagcgagcgtgtgctttacacccctgaaatcgctgaaaa

SEQ ID NO: 826561 - DNA, 75 bp, synthetic construct
  source 1..75: mol_type = other DNA
tcactgatatcgaatttcgtaagcccgctgatgaagcgaagctggtgattcaggagctgcaacagacagaaaagc

SEQ ID NO: 826562 - DNA, 75 bp, synthetic construct
  source 1..75: mol_type = other DNA
tgctgctggaaaaactgcaaagtggcggtttaggtgccattctctcaacctggttgagtaatcaacagggcaatc

SEQ ID NO: 826563 - DNA, 75 bp, synthetic construct
  source 1..75: mol_type = other DNA
gtggataccagtacagcttccagtttactggcagaacaattgccgaagattattgatgcgctctcaccgcaaggt

SEQ ID NO: 826564 - DNA, 75 bp, synthetic construct
  source 1..75: mol_type = other DNA
ccggggaacgtgcgcgaactggaacatgctattcatcgggcggtagtgctggcgagagcaacccgcagcggcgat

SEQ ID NO: 826565 - DNA, 75 bp, synthetic construct
  source 1..75: mol_type = other DNA
ggagaaatgactgcgcaaattaccatgaatgctggtgctgatagttcgttagtgaacaacaccggaaccatcaat

SEQ ID NO: 826566 - DNA, 75 bp, synthetic construct
  source 1..75: mol_type = other DNA
ccgttgacctgagcgaaagccagagcctgagtctggagtacggtatcgcccgtctggatggcgacggtgcgcaga

SEQ ID NO: 826567 - DNA, 75 bp, synthetic construct
  source 1..75: mol_type = other DNA
cccggatgtacaaaaagcaattcagcatatttttaaccgtgccagtgcgcacggcaaacccagcggtatcctcgc

SEQ ID NO: 826568 - DNA, 75 bp, synthetic construct
  source 1..75: mol_type = other DNA
ataacgttgacgccatcgctgcgaccgaaggcgttgatggcattttcgttggccccagcgatctggcggcggcat

SEQ ID NO: 826569 - DNA, 75 bp, synthetic construct
  source 1..75: mol_type = other DNA
gggtagccttatcaatggcgataatgcgcgggtcgataatcaaggtaccatgagcgttgacggtgagaattccac

SEQ ID NO: 826570 - DNA, 75 bp, synthetic construct
  source 1..75: mol_type = other DNA
tgcctataatggggcattaactaaagccacggcaaccaaccacgagaatggtgtgattactgtctacaacgccgg

SEQ ID NO: 826571 - DNA, 75 bp, synthetic construct
  source 1..75: mol_type = other DNA
gtgataatgcgacatttgttaacgttggtgatatttccgcgaccaatgccggaaccggtgtcagcgttgctgggg

SEQ ID NO: 826572 - DNA, 75 bp, synthetic construct
  source 1..75: mol_type = other DNA
tcgccgggaagggctggcggtttatatgatcaccaaagaaggcgatagctttaaaacctggatgtcgccgcagtt

SEQ ID NO: 826573 - DNA, 75 bp, synthetic construct
  source 1..75: mol_type = other DNA
gcgcaaaatggcgggacgattacgctggagtccggcgccagtttcgacaccacgggaattacgaaacttgatagc

SEQ ID NO: 826574 - DNA, 75 bp, synthetic construct
  source 1..75: mol_type = other DNA
gctgcgtaaaacgctcgatcttaccgaaagccagaatctgagcctggaatatggtatcgcacgacttgacggcaa

SEQ ID NO: 826575 - DNA, 75 bp, synthetic construct
  source 1..75: mol_type = other DNA
atgatcaccaaagaagacgatagctttaaaacctggatgtcaccacagtttaaaagcttccttatcagcgaaaaa

SEQ ID NO: 826576 - DNA, 75 bp, synthetic construct
  source 1..75: mol_type = other DNA
ccgtggtatgaacggtgaaggccagccgtggcgagtggcgattcaaaaaccaaccgataaagaaaacgcggttca

SEQ ID NO: 826577 - DNA, 75 bp, synthetic construct
  source 1..75: mol_type = other DNA
gaagcgatggccgatatcgtcaccacctcgctacgcattggcgcgaagaccgatggcgcgatggatataaccgtc

SEQ ID NO: 826578 - DNA, 75 bp, synthetic construct
  source 1..75: mol_type = other DNA
ggaagacgggaaaagcgagcgcgtgctgtacacccctgaaatcgctgaaaaccagcaaatgatctcgctgttatc

SEQ ID NO: 826579 - DNA, 75 bp, synthetic construct
  source 1..75: mol_type = other DNA
attgagaaggtaatgatcgaatttagagccttgcaggtttctatcagagagaaaatgagcgctatagttgtgtct

SEQ ID NO: 826580 - DNA, 75 bp, synthetic construct
  source 1..75: mol_type = other DNA
ttatggtgattttagccatgcggtacgcgatataaaccagtggattaatggttattacaacgtttatcgacctca

SEQ ID NO: 826581 - DNA, 75 bp, synthetic construct
  source 1..75: mol_type = other DNA
ataattcgccgatggaaagagtctttcgcagccttaaaaatgaatggcttccgaaaggtggttatggtgatttta

SEQ ID NO: 826582 - DNA, 75 bp, synthetic construct
  source 1..75: mol_type = other DNA
tggcgcagaagagaagcgcaagttatccataatcggtcccatttcctaaggttcataaagtcaatggaacgccat

SEQ ID NO: 826583 - DNA, 75 bp, synthetic construct
  source 1..75: mol_type = other DNA
ttatgtgtgggcgctagcatcagcgtttgtcggcacgccgagagcgaaacattgctgcgcatggccgtggttgat

SEQ ID NO: 826584 - DNA, 75 bp, synthetic construct
  source 1..75: mol_type = other DNA
atgagtgacgaagaacagaaaccgaaagggaagggccgaggaacccgaccccgaggccaacgaatagaggtatgg

SEQ ID NO: 826585 - DNA, 75 bp, synthetic construct
  source 1..75: mol_type = other DNA
ggcaattagcactgatacgctggtagcgggtaaccatttccttgcagatatcgatccggccgatctggcatataa

SEQ ID NO: 826586 - DNA, 75 bp, synthetic construct
  source 1..75: mol_type = other DNA
ggcatcggcgacgattgcgctcttctcaatatccccgagaaacagaccctggcgatcagcactgatacgctggtg

SEQ ID NO: 826587 - DNA, 75 bp, synthetic construct
  source 1..75: mol_type = other DNA
tacatcaaaccgggtatgagcgtcgaagcaattcagggcatcatcgccagcatgaaaggcgactatgaagatcgc

SEQ ID NO: 826588 - DNA, 75 bp, synthetic construct
  source 1..75: mol_type = other DNA
ccggtggttgtgctatcgaataatgacggttgcgttatcgcccgaaacgctgattatgtggaattgcaagtaacg

SEQ ID NO: 826589 - DNA, 75 bp, synthetic construct
  source 1..75: mol_type = other DNA
aaagaggatggataataaaagcacatcccgtcaatcaggccggtagctcctcaaaagagatactggacatagatg

SEQ ID NO: 826590 - DNA, 75 bp, synthetic construct
  source 1..75: mol_type = other DNA
cctgaacaggcgttacgctgggccatttcggggggtgaagattacgaattatgtttcaccgtaccagaactgaat

SEQ ID NO: 826591 - DNA, 75 bp, synthetic construct
  source 1..75: mol_type = other DNA
tgccctgtgtctgcattgtgtgccggtgattaacctttttacgcttgaagccgatccactcatcatcaatgggct

SEQ ID NO: 826592 - DNA, 75 bp, synthetic construct
  source 1..75: mol_type = other DNA
tttccgttttttgttggtataaaacgctacataaacttgcactaagcaaagcctatgccttgctcagtatgagtt

SEQ ID NO: 826593 - DNA, 75 bp, synthetic construct
  source 1..75: mol_type = other DNA
ttttggcctggatgcccggatactgttactcgggctgctgggttatctgctttccgtttttgttggtataaaacg

SEQ ID NO: 826594 - DNA, 75 bp, synthetic construct
  source 1..75: mol_type = other DNA
tgacctgaatgaccgttacgctcccccggaagtagtgcgtgagctggcacgaattgtgctggcattgctggaagc

SEQ ID NO: 826595 - DNA, 75 bp, synthetic construct
  source 1..75: mol_type = other DNA
cgcggtgagcggttattatcaggttgcgcagacgctggcggataaacgccaaaaacaacaggcgcaggctgccgc

SEQ ID NO: 826596 - DNA, 75 bp, synthetic construct
  source 1..75: mol_type = other DNA
gcgcagacgctggcggataaacgccaaaaacaacaggcgcaagctgccgcgcagctggcctattcccgtgataaa

SEQ ID NO: 826597 - DNA, 75 bp, synthetic construct
  source 1..75: mol_type = other DNA
atttgtcgctgattcaggatgatgaattcgcgggcaatatccgtcgtctgatgacagaacagcatcaagggctgg

SEQ ID NO: 826598 - DNA, 75 bp, synthetic construct
  source 1..75: mol_type = other DNA
cgctggcgctgtacgactggaccgaaagcgagatgaaccgccgtcgtctggaggcgattgtcgacgttcagcaca

SEQ ID NO: 826599 - DNA, 75 bp, synthetic construct
  source 1..75: mol_type = other DNA
tgatgctcaatcccctcagtgtttcgggcatcactatgaccaccgaacctgacggtcgctctctgctacggatac

SEQ ID NO: 826600 - DNA, 75 bp, synthetic construct
  source 1..75: mol_type = other DNA
agtggcacttaccccggcgctacacgccatgaaaatggcggaagtggtgcctgcagggcttgaagtgtattcccg

SEQ ID NO: 826601 - DNA, 75 bp, synthetic construct
  source 1..75: mol_type = other DNA
gttgactgggtgctcaaagaggcctgctgtgctgtcattctgggtaaagccgacaatccactagcatccagtaat

SEQ ID NO: 826602 - DNA, 75 bp, synthetic construct
  source 1..75: mol_type = other DNA
caactgaaaaaagccaagccggactgcaaattaccggagaaggcgatggactacctgaagcgaaacggactgata

SEQ ID NO: 826603 - DNA, 75 bp, synthetic construct
  source 1..75: mol_type = other DNA
caggtgacgctggacagtaacggctttgccggagaaggtgatatcacgctgtttggtgaactgctgcaccgcttt

SEQ ID NO: 826604 - DNA, 75 bp, synthetic construct
  source 1..75: mol_type = other DNA
accgcgcagcgtttcgtagcggcatcaatacgttgggtaatgactccaacttactgatagtgttttatgttcaga

SEQ ID NO: 826605 - DNA, 75 bp, synthetic construct
  source 1..75: mol_type = other DNA
acacaaacctttcatcgcccattcgatctccataacggtcaccagaccagtatgaccttaagtattggatacgct

SEQ ID NO: 826606 - DNA, 75 bp, synthetic construct
  source 1..75: mol_type = other DNA
gagaaccaggagataccttcagtaatttcattagccgctggctctttccggcccccgtcattcagccgattcgcc

SEQ ID NO: 826607 - DNA, 75 bp, synthetic construct
  source 1..75: mol_type = other DNA
ataagcgccccacgtttaaaagagcattacgcaacatcagcatgaccagcatatttatcactatgatgctgatct

SEQ ID NO: 826608 - DNA, 75 bp, synthetic construct
  source 1..75: mol_type = other DNA
ggctgctgctttccgtgacgtcagtgctaaccctgaaacaatacgcgcaaaaaaacctggcactgacagcagcaa

SEQ ID NO: 826609 - DNA, 75 bp, synthetic construct
  source 1..75: mol_type = other DNA
attgtgtatacccgtctgggcgatgatgtgctggaagccgaaatgccggttgatacccgtactcatcagccgttt

SEQ ID NO: 826610 - DNA, 75 bp, synthetic construct
  source 1..75: mol_type = other DNA
atatttatcactatgatgctgatctggttgctgctttccgtgacgtcagtgctgaccctgaaacagtacgcgcaa

SEQ ID NO: 826611 - DNA, 75 bp, synthetic construct
  source 1..75: mol_type = other DNA
tcaccgcttcgctctcgacttcaacagtctgctggatgaaatggaagagtggcagcttcgtttacaggctaaaaa

SEQ ID NO: 826612 - DNA, 75 bp, synthetic construct
  source 1..75: mol_type = other DNA
gtgctgaccctgaaacagtacgcgcaaaaaaacctggcactgacagcagcaacaatgacttacagtctggaagca

SEQ ID NO: 826613 - DNA, 75 bp, synthetic construct
  source 1..75: mol_type = other DNA
gcgattgcttctggtcgcggcattgcagcggcagcgcagggggagttggctggcgcggatgcgaaaactattttc

SEQ ID NO: 826614 - DNA, 75 bp, synthetic construct
  source 1..75: mol_type = other DNA
gcggtactaaacttgccgccgcgctgattggcgctgacgggcagatccgcgatcgccgagaacttcctacgccag

SEQ ID NO: 826615 - DNA, 75 bp, synthetic construct
  source 1..75: mol_type = other DNA
tacactttccgttagtcaaaacgctggagcaacttaccgatttgccgaccattgccattaacgacgcgcaggccg

SEQ ID NO: 826616 - DNA, 75 bp, synthetic construct
  source 1..75: mol_type = other DNA
ggcaaagctgaattgtccctcaaggatgtgggagagcttctgctggcaacaaagtatctgatgttgtccactgaa

SEQ ID NO: 826617 - DNA, 75 bp, synthetic construct
  source 1..75: mol_type = other DNA
tcggctattagtaccgggttggtattaaataatttatttcctgacttggcaaattttataaatggtttaaacgaa

SEQ ID NO: 826618 - DNA, 75 bp, synthetic construct
  source 1..75: mol_type = other DNA
acagttaactgctcgcgacagctcaatcagccatttcatttggttttcgctcgcggtcctcaccagctgtatcct

SEQ ID NO: 826619 - DNA, 75 bp, synthetic construct
  source 1..75: mol_type = other DNA
tgacttacagtctggaagctgctgtcgtttttgccgatggtctggcagcgacagaaacgctggcggcactgggtc

SEQ ID NO: 826620 - DNA, 75 bp, synthetic construct
  source 1..75: mol_type = other DNA
ttactggcggcgcactaccgccacgatgcaggtttacttggggctgcgctgttggcccagggagaaaaattatga

SEQ ID NO: 826621 - DNA, 75 bp, synthetic construct
  source 1..75: mol_type = other DNA
tacactttccgttagtcaaaacgctggaacaacttaccaatttgccgaccattgccattaacgacgcgcaggccg

SEQ ID NO: 826622 - DNA, 75 bp, synthetic construct
  source 1..75: mol_type = other DNA
ggtgtctgaaggcaaggtacgcggcgtctgccagccgttgcatcttgggcggcaaaatcagagctgggaaatcgt

SEQ ID NO: 826623 - DNA, 75 bp, synthetic construct
  source 1..75: mol_type = other DNA
atgacggcgaaaacagcaccgaaagtcacgctgtgggaatttttccagcagttaggcaaaacctttatgttaccc

SEQ ID NO: 826624 - DNA, 75 bp, synthetic construct
  source 1..75: mol_type = other DNA
ccagtggtggcggcaatctggtttgtcgtttactacgtcatcttccgtttcgctatcacccgcttcaatctgaaa

SEQ ID NO: 826625 - DNA, 75 bp, synthetic construct
  source 1..75: mol_type = other DNA
acgccgggtcgcgatagtgaagccgccagttcaatcgaaaaagccgttgccggtacaccgggtaaatcgggctat

SEQ ID NO: 826626 - DNA, 75 bp, synthetic construct
  source 1..75: mol_type = other DNA
tgttgcagcttttcttgcgcaacagattcgctttacggatattgctgcgctgaatttatctgtactggaaaagat

SEQ ID NO: 826627 - DNA, 75 bp, synthetic construct
  source 1..75: mol_type = other DNA
tggcgtgaagccgctcgatttttgcaagctgagcacattgacatttgccgcaccggattatgagcgttatccgtg

SEQ ID NO: 826628 - DNA, 75 bp, synthetic construct
  source 1..75: mol_type = other DNA
tcacactgtgggaattcttccagcagttaggcaaaaccttcatgttacctgtcgcgttactgtcgttctgcggca

SEQ ID NO: 826629 - DNA, 75 bp, synthetic construct
  source 1..75: mol_type = other DNA
ggcgaagattcggttgtgggtatcctgaccggcgacgatatcactattaataacaacggcgagacggaagttgat

SEQ ID NO: 826630 - DNA, 75 bp, synthetic construct
  source 1..75: mol_type = other DNA
taccgatcagggcgggaacacggcgctgaatggcggtacagtgatgacggttgagggtgacaacatcacccttaa

SEQ ID NO: 826631 - DNA, 75 bp, synthetic construct
  source 1..75: mol_type = other DNA
tacacctgttccgccagatgatggcggtaatacacccgttccgccagatgatggcggtaatacacctgttccgcc

SEQ ID NO: 826632 - DNA, 75 bp, synthetic construct
  source 1..75: mol_type = other DNA
ttgccgtttggtctgcatcacattctggtggcattaattcgctttaccgacgcaggcggcacgcaggaagtctgc

SEQ ID NO: 826633 - DNA, 75 bp, synthetic construct
  source 1..75: mol_type = other DNA
tcgagcggaaccatcaattcggctatcgtcgttaatgcaggcggtacgttaaccaatgaaggtgtattgaatacg

SEQ ID NO: 826634 - DNA, 75 bp, synthetic construct
  source 1..75: mol_type = other DNA
gacgtcacgctggatggtcagttaaccgttgttgctgatagtgaaaccacggcgcgttcctatgcaagttacgac

SEQ ID NO: 826635 - DNA, 75 bp, synthetic construct
  source 1..75: mol_type = other DNA
ttgccatcgcttcaaccggaattattcgcgacggcagcttgctggcgctgaatccgcataatctcggtggattgt

SEQ ID NO: 826636 - DNA, 75 bp, synthetic construct
  source 1..75: mol_type = other DNA
gcgggtcgatgtgcgcgtgctggcggcgactaaccgcgacttacgcgaagaggtactggcagggcgatttcgcgc

SEQ ID NO: 826637 - DNA, 75 bp, synthetic construct
  source 1..75: mol_type = other DNA
cggcgctggcggaaacgctgggatcgatggccggatttatgatgacccgcgacggacagtgtgtggtgggcacgg

SEQ ID NO: 826638 - DNA, 75 bp, synthetic construct
  source 1..75: mol_type = other DNA
tgtcgccgcgcaccattcaaaacccgcgaaggcagagaaatcaccggaccgtggcagtcgcatcccaaacggatg

SEQ ID NO: 826639 - DNA, 75 bp, synthetic construct
  source 1..75: mol_type = other DNA
gaagtgattcttgaggcgcaacattttgcttttcctgaggtgacgttgccgacgccagaagtggcggcggtgccc

SEQ ID NO: 826640 - DNA, 75 bp, synthetic construct
  source 1..75: mol_type = other DNA
catcacaactgggccgcctgcgcgcggatgctggaaaccgacgtcgccaacctgcatcggctggcgaaacgtctg

SEQ ID NO: 826641 - DNA, 75 bp, synthetic construct
  source 1..75: mol_type = other DNA
gggaaaaatatcagcgtatgcttaatgtgtggcatgcctgcccgcgtcagtaccatctgagcgccaacgaaatta

SEQ ID NO: 826642 - DNA, 75 bp, synthetic construct
  source 1..75: mol_type = other DNA
aatgagtcctgtacatgccggatttaccgcaaagatcgcaatcacccgatctgcgttaccgagtggatggatgaa

SEQ ID NO: 826643 - DNA, 75 bp, synthetic construct
  source 1..75: mol_type = other DNA
tcgtagtacaggcacaaagacttcttttgcgtaatttcgttctgactttagatcaacaaaattctcttgataaat

SEQ ID NO: 826644 - DNA, 75 bp, synthetic construct
  source 1..75: mol_type = other DNA
catacaggaagttattgatccagcagtagctgcttatgtaaattccctgccaccaagtcataaagactacatttc

SEQ ID NO: 826645 - DNA, 75 bp, synthetic construct
  source 1..75: mol_type = other DNA
gtcgccagcgagcgtgcgggggaaaaaggtttgttggtctatcggtcggtgattgcccgtccacatgaagccatg

SEQ ID NO: 826646 - DNA, 75 bp, synthetic construct
  source 1..75: mol_type = other DNA
ggagtatgccaacggtgtatcgcatgggcgacaaaccggcggcaggactgtttatcttcagtcagcaggataacg

SEQ ID NO: 826647 - DNA, 75 bp, synthetic construct
  source 1..75: mol_type = other DNA
attatcggcgctatcagatggaagagtacggcggtgtggacgttcgtctgtatcgtattcctgacccgatggcat

SEQ ID NO: 826648 - DNA, 75 bp, synthetic construct
  source 1..75: mol_type = other DNA
ggtctctcgaacagttcaataaagaattaataaggcttagacggcaatgcgctaaaccgcataaagctaacgcaa

SEQ ID NO: 826649 - DNA, 75 bp, synthetic construct
  source 1..75: mol_type = other DNA
aaacttcctgcaaatgagcttattcaccgatccgcttggcgatggttcatttacccgcaactggaccgttttcta

SEQ ID NO: 826650 - DNA, 75 bp, synthetic construct
  source 1..75: mol_type = other DNA
agaagttatctgggggctgatcctcggtagcaccgtcggctgctggttcttcttcggcgtgatggaaagcttcgc

SEQ ID NO: 826651 - DNA, 75 bp, synthetic construct
  source 1..75: mol_type = other DNA
agtgggcctattattatcaaacgccgggtttaaatatcgtgccgcgttcacagcaggcactggaatttagcgttc

SEQ ID NO: 826652 - DNA, 75 bp, synthetic construct
  source 1..75: mol_type = other DNA
ttgaaaaacacatgttctactaattggaagcatcacctgatttatttagccaccagtaaatacggcaatattcgt

SEQ ID NO: 826653 - DNA, 75 bp, synthetic construct
  source 1..75: mol_type = other DNA
tattcgctggctgaaacaggattacgccgatattccggctcatcaagttgaacattatctcccgcagacaccggt

SEQ ID NO: 826654 - DNA, 75 bp, synthetic construct
  source 1..75: mol_type = other DNA
acaagttctgatgtcgttgccagccggtaaattgttccttgccgcttatctgggcgtgatgattattttcctcgc

SEQ ID NO: 826655 - DNA, 75 bp, synthetic construct
  source 1..75: mol_type = other DNA
ccgcctgccagaaaatgccgttgccggaggttatgagttacgtcttgcttaccgcaaacaggtctatagcagcag

SEQ ID NO: 826656 - DNA, 75 bp, synthetic construct
  source 1..75: mol_type = other DNA
gttctgttgcgattgaagttgcaaaaggggctacccgtgctgtcaatgagggaacgatccttctgggacaaggtg

SEQ ID NO: 826657 - DNA, 75 bp, synthetic construct
  source 1..75: mol_type = other DNA
ccaccgggactgcaatggcgtttgatgacgcagtgaataccaccgtactgaatgacagcggtgctgaaattcagg

SEQ ID NO: 826658 - DNA, 75 bp, synthetic construct
  source 1..75: mol_type = other DNA
tctggggggcgctattgcaattaattgcaataacgcaatggcagatgtcatattgtcaccagactggcgtccggg

SEQ ID NO: 826659 - DNA, 75 bp, synthetic construct
  source 1..75: mol_type = other DNA
gattaccggtaacctgatgatgcccggatttactgcgcctaaattgctatgggttcagcggcatgagccggagat

SEQ ID NO: 826660 - DNA, 75 bp, synthetic construct
  source 1..75: mol_type = other DNA
tggcagcagtttgcgtggcagagagcagaatactgccagcggcgcagcaggggtaaggccggacatcaaccacgc

SEQ ID NO: 826661 - DNA, 75 bp, synthetic construct
  source 1..75: mol_type = other DNA
atgaatggattcagaaacagttcacggaacggtcaggtctggcgctaccagcgtgccggtgggcgggctgttatt

SEQ ID NO: 826662 - DNA, 75 bp, synthetic construct
  source 1..75: mol_type = other DNA
gacgtttcccggtgtcgctggaaggcagtgaaacggtgtccgacgatagcggtcatgtggcgttaaatctccccg

SEQ ID NO: 826663 - DNA, 75 bp, synthetic construct
  source 1..75: mol_type = other DNA
gggatgaacggcgacgggctggtcgggcaggggcgtgcttatctgcgttcggaaaaaagtctctacatgaagtgg

SEQ ID NO: 826664 - DNA, 75 bp, synthetic construct
  source 1..75: mol_type = other DNA
tgccacaggttcagcaatatgcgtgggataaagcagcaaacagcaatcagccgctggcgcacacggttgtgctgc

SEQ ID NO: 826665 - DNA, 75 bp, synthetic construct
  source 1..75: mol_type = other DNA
gcgatcaatggatacagcaccggtttatacggaacgtggcagcagaatgacggtaatgacaacggggcttatgtc

SEQ ID NO: 826666 - DNA, 75 bp, synthetic construct
  source 1..75: mol_type = other DNA
ggtaagacaggaaataccctgaccgtaaatggcgattacaccggtggcggtacgttaattatcaataccgtgctg

SEQ ID NO: 826667 - DNA, 75 bp, synthetic construct
  source 1..75: mol_type = other DNA
aaagatggcggcagtctgaccctgtcaggcaatggtgcagtgctatttggcagcagcgatcagataggcttttat

SEQ ID NO: 826668 - DNA, 75 bp, synthetic construct
  source 1..75: mol_type = other DNA
acaaggggctgctgaaaaacgataaccaactgacgatgttattcaccctggccaacctgtttcgggtggaccaaa

SEQ ID NO: 826669 - DNA, 75 bp, synthetic construct
  source 1..75: mol_type = other DNA
ttcaaccggcaaattaacaggcatattgccgagtgttgggcgtggagctggtatcattgctcgctcgggcggtac

SEQ ID NO: 826670 - DNA, 75 bp, synthetic construct
  source 1..75: mol_type = other DNA
gacaacagcatcaggttaattcacaggcagacttacagcaatataatgattatctgactcaggcgattgttgacg

SEQ ID NO: 826671 - DNA, 75 bp, synthetic construct
  source 1..75: mol_type = other DNA
ggagacggtaatatccagagtcgtctgggcgtcagaacttacctgaaaggtaagagtgcgtctgatgataataag

SEQ ID NO: 826672 - DNA, 75 bp, synthetic construct
  source 1..75: mol_type = other DNA
aatgacagcggcgctaaaattcagggcattgtggccctgaatgggggggataattcatttaccaataaaggcagt

SEQ ID NO: 826673 - DNA, 75 bp, synthetic construct
  source 1..75: mol_type = other DNA
atgaatgaaatatataaagtcatttggaaccatacaacccaaaaatgggatgttgtgtcagaattgacgagttgt

SEQ ID NO: 826674 - DNA, 75 bp, synthetic construct
  source 1..75: mol_type = other DNA
ggattactcgcagtcctggctgcaacgaatagtggtacagcgcggttaagttcgactggtaaactgacaggcgta

SEQ ID NO: 826675 - DNA, 75 bp, synthetic construct
  source 1..75: mol_type = other DNA
gggagagctgagcaacagcctcagtggtagcggggaagtcagtaccgtgtgggatcttaccgtcagcggtgacaa

SEQ ID NO: 826676 - DNA, 75 bp, synthetic construct
  source 1..75: mol_type = other DNA
acgctcaacattacgggtattggtaacatcaacaacccgctgacccacgatccttatgcatttactctgattgat

SEQ ID NO: 826677 - DNA, 75 bp, synthetic construct
  source 1..75: mol_type = other DNA
tcgaacatgatgctggatttgcccttatatttccagacatctgttatcacttaacccattacaagcccgctgccg

SEQ ID NO: 826678 - DNA, 75 bp, synthetic construct
  source 1..75: mol_type = other DNA
catggcatcctgctggatacaggggctgtggggctggttattgatggtgcgaaaatcaatgttaatgctgcaggt

SEQ ID NO: 826679 - DNA, 75 bp, synthetic construct
  source 1..75: mol_type = other DNA
attaatccgaaggacaagaccacactattaacggcgggggctcagttaagttccacccaggataaagtgaccggg

SEQ ID NO: 826680 - DNA, 75 bp, synthetic construct
  source 1..75: mol_type = other DNA
gcaacagtaagtggtaaaaccgaatacatcactggtccaaatgtcgtccagtctggtgggtcaggtcttatctgg

SEQ ID NO: 826681 - DNA, 75 bp, synthetic construct
  source 1..75: mol_type = other DNA
cgaacattgcggcggctaacacgctgttcaacaccagaatgcacgatcgtgagggggaaacttactataccgacg

SEQ ID NO: 826682 - DNA, 75 bp, synthetic construct
  source 1..75: mol_type = other DNA
ctttgccgccgtggatcaacaaggcattgaacgctttattgcgtcttacggcacgcaggctgcactggtctcatt

SEQ ID NO: 826683 - DNA, 75 bp, synthetic construct
  source 1..75: mol_type = other DNA
atgagagataaaaaccgtaaaatgtggctctggcgtggcgtcattatcatcttgttaattgttgcgctgctcgca

SEQ ID NO: 826684 - DNA, 75 bp, synthetic construct
  source 1..75: mol_type = other DNA
atgatgaagatacaatcgcgtaaaatctggtactaccgtataaccctcatcatcctgttgttcgctatgctgctc

SEQ ID NO: 826685 - DNA, 75 bp, synthetic construct
  source 1..75: mol_type = other DNA
tcctgccaaaaacacctctatatctgcgtcatggctgctaccgaagcagaagcgcgctcatgcattcccgaagaa

SEQ ID NO: 826686 - DNA, 75 bp, synthetic construct
  source 1..75: mol_type = other DNA
atgaacgctggcaggaagagaaagcaggtcactaaccctggcttatgtgaagaagcgatgattatctatttacac

SEQ ID NO: 826687 - DNA, 75 bp, synthetic construct
  source 1..75: mol_type = other DNA
aagattgatcgcccggaagagtatgctgatattgccactaagtgtgtgaccaacttccgcgagaagaatcgcgat

SEQ ID NO: 826688 - DNA, 75 bp, synthetic construct
  source 1..75: mol_type = other DNA
cgtccagcaggcgacagaaatcgtccgtgagcgcgcaccaaagctggtggtggatggcgagttacagtttgacgc

SEQ ID NO: 826689 - DNA, 75 bp, synthetic construct
  source 1..75: mol_type = other DNA
accacaacgcatcagtacgatgttgatcgtaccgcaggggggaagattaatccggatatatatcaggccagtacc

SEQ ID NO: 826690 - DNA, 75 bp, synthetic construct
  source 1..75: mol_type = other DNA
cattcagcttgatagcggtagtgtgctaacggtcagcggcacgcagcgtcagccgggcgatgaaaatggtggcgt

SEQ ID NO: 826691 - DNA, 75 bp, synthetic construct
  source 1..75: mol_type = other DNA
ttcctgatgctgccgcagtacagcggccccgcgttgggctttgccgattgtagtgtggtgccacagccgacggca

SEQ ID NO: 826692 - DNA, 75 bp, synthetic construct
  source 1..75: mol_type = other DNA
aaccggatggtttgtcgcgaacggtttagtcagattggtcgggcactgcgaactaaaaaatccgacgatcgtgac

SEQ ID NO: 826693 - DNA, 75 bp, synthetic construct
  source 1..75: mol_type = other DNA
tcgatggcgagttgcagttcgacgccgcttttgtgccggatgttgcagcgcaaaaagcgcctgccagtccactac

SEQ ID NO: 826694 - DNA, 75 bp, synthetic construct
  source 1..75: mol_type = other DNA
agcgtttgatgatgtgatggctggtaaagctgccactccggcaagttgcgatatcgatattgccgatcattacgc

SEQ ID NO: 826695 - DNA, 75 bp, synthetic construct
  source 1..75: mol_type = other DNA
accaacgctgcaacggtggcggtgattcaggacgccctgcaatcctgcggtttaccggcaggcgctgtgcaggcg

SEQ ID NO: 826696 - DNA, 75 bp, synthetic construct
  source 1..75: mol_type = other DNA
tgaaaaccggtaatgcggttatcctgcgcggtggcaaagagacctgccgtactaatgctgcaacggtagcggtca

SEQ ID NO: 826697 - DNA, 75 bp, synthetic construct
  source 1..75: mol_type = other DNA
atggcacacttgttccgggttaccagccgccgaaagagatgaaagaattcctcgacgaacatcaaaaaatgacca

SEQ ID NO: 826698 - DNA, 75 bp, synthetic construct
  source 1..75: mol_type = other DNA
caggctgagcaacaaatgaaagccatctggtgtgcgaaagataaaaacaaagcgtttgatgatgtgatggcaggt

SEQ ID NO: 826699 - DNA, 75 bp, synthetic construct
  source 1..75: mol_type = other DNA
gcccgttgctggtatgaaaacagtgctaactaacagcggcgtgctgtatatcaccgatgacggtaaacacatcat

SEQ ID NO: 826700 - DNA, 75 bp, synthetic construct
  source 1..75: mol_type = other DNA
tatagcccgtgatgaggctgttaaagatgcacaacagaaatctgctgaaatttctgccagggctgcttatctgtc

SEQ ID NO: 826701 - DNA, 75 bp, synthetic construct
  source 1..75: mol_type = other DNA
gcggcgctggatgccgaatttgcatccctgtttgacactctggactccaccaacaaggaactggttaaccgataa

SEQ ID NO: 826702 - DNA, 75 bp, synthetic construct
  source 1..75: mol_type = other DNA
aacgctcaaacggttgcccgtatgattgaacaagggcgtgtaattgctcgcgatgaggctgttaaaaatgcacaa

SEQ ID NO: 826703 - DNA, 75 bp, synthetic construct
  source 1..75: mol_type = other DNA
ccgaagagtatgacgatgagtttctgtcattagatttgaacgtcaaaatcgtcagcgatcttgacgatgccatcg

SEQ ID NO: 826704 - DNA, 75 bp, synthetic construct
  source 1..75: mol_type = other DNA
gcggcgctggatgctgaatttgcatccctgtttgacaccctggactccaccaacaaggaactggttaaccgataa

SEQ ID NO: 826705 - DNA, 75 bp, synthetic construct
  source 1..75: mol_type = other DNA
tcggagatattgcagcagaagctcagctttatgctgaaattgctgacgaacgctacatcgcaggagtgacttgtc

SEQ ID NO: 826706 - DNA, 75 bp, synthetic construct
  source 1..75: mol_type = other DNA
gccggtgtgccgctgcgttctcttggtacggggtcgtcccgtcttctggtggcaggaatgcagcgtgctgcagcg

SEQ ID NO: 826707 - DNA, 75 bp, synthetic construct
  source 1..75: mol_type = other DNA
gtattgaagaaatggcatgggctcgtcactaccagcagatcgttcgtgaagaaaaagaaacggaactggcggacg

SEQ ID NO: 826708 - DNA, 75 bp, synthetic construct
  source 1..75: mol_type = other DNA
gcggcgaaagaaggttctgttgtcgttccggtttgtgctgctgttgaagcagacattgccgaactggacgacgaa

SEQ ID NO: 826709 - DNA, 75 bp, synthetic construct
  source 1..75: mol_type = other DNA
ctccgctgccgggctgtcgaaaagctggacgcggacgatgcagaagcgccgacttagcggcaagattgaagattt

SEQ ID NO: 826710 - DNA, 75 bp, synthetic construct
  source 1..75: mol_type = other DNA
ctcgccttgctataaactcaattaccattttgatatcagcgatatagcgcagttgatgcaaaacacgggtaaagt

SEQ ID NO: 826711 - DNA, 75 bp, synthetic construct
  source 1..75: mol_type = other DNA
tggatcactactggacctccctcaacggtaattccatgctgagtgcaggaaccgcattcgtgaatgttggtggag

SEQ ID NO: 826712 - DNA, 75 bp, synthetic construct
  source 1..75: mol_type = other DNA
tcactgggggccagggaaacaccgccgccacttcaggtttttctgaccacacactctcccgtggccgtgcgtgag

SEQ ID NO: 826713 - DNA, 75 bp, synthetic construct
  source 1..75: mol_type = other DNA
gatatccttggtcctcatctccccgcgtctgatgccggattccaagagctgattaaccggctttactggtgggca

SEQ ID NO: 826714 - DNA, 75 bp, synthetic construct
  source 1..75: mol_type = other DNA
gaaactgaagctgagctggcagacgacctggaaaaaggtctgccccaacacctgtttgaatcgctatgcatcgat

SEQ ID NO: 826715 - DNA, 75 bp, synthetic construct
  source 1..75: mol_type = other DNA
tatgagcctgccggatgcaggcgtcgacgcgctgcttcaacgaggcattgagcttatggaggaggaactggtggc

SEQ ID NO: 826716 - DNA, 75 bp, synthetic construct
  source 1..75: mol_type = other DNA
taccgtgtgctggttctggtggatgcggataagccgcccaccccggcgacggtcgaggccttcgaggctgcgggt

SEQ ID NO: 826717 - DNA, 75 bp, synthetic construct
  source 1..75: mol_type = other DNA
gtggtggctgttaaagccgaagagtatgacgatgagtttctgtcattagatttgaacgtcaaaatcgttagcgat

SEQ ID NO: 826718 - DNA, 75 bp, synthetic construct
  source 1..75: mol_type = other DNA
ttataccttacggcttgttcgcaacgaatacccactaaaagctggaagtttttattctgtattgcggtttaaggt

SEQ ID NO: 826719 - DNA, 75 bp, synthetic construct
  source 1..75: mol_type = other DNA
tccggccgtaattctgggaacaatcctggcaatggcagtggtacaggttctggtgcatctggtgtgcttcctgca

SEQ ID NO: 826720 - DNA, 75 bp, synthetic construct
  source 1..75: mol_type = other DNA
tccttcggcggcgtgttgtttggctttgctattccgatgtttgccgcttttgtggcgaactctatcggcggcaaa

SEQ ID NO: 826721 - DNA, 75 bp, synthetic construct
  source 1..75: mol_type = other DNA
taaaggtaaaggcgatgcctttataaaacagtggcaggaagcgggggcacgtggcgacggtgagtcgcaacagaa

SEQ ID NO: 826722 - DNA, 75 bp, synthetic construct
  source 1..75: mol_type = other DNA
taaccagggctatccggcccgtgtcggtaaagtgatgccgccgttattgctgaacggaaatgaagaggggctgga

SEQ ID NO: 826723 - DNA, 75 bp, synthetic construct
  source 1..75: mol_type = other DNA
aaggtataaatctgcaaattctggataattacggatatccggcaaggctaggaaaaactatgccaccgttattac

SEQ ID NO: 826724 - DNA, 75 bp, synthetic construct
  source 1..75: mol_type = other DNA
ccggtttgtacgcctgcacgggccggactatttaccggtatctacgctaaccagtccggcccgtgaccaacaacg

SEQ ID NO: 826725 - DNA, 75 bp, synthetic construct
  source 1..75: mol_type = other DNA
ttgcgctgaaagagcttgaaagaaaactggtgcaaaccatttctgatcgcaaacgccttattgctcgctatgggg

SEQ ID NO: 826726 - DNA, 75 bp, synthetic construct
  source 1..75: mol_type = other DNA
aaagagtttgaaagaaagctagtgcaatcaatatctgatcgcaaaagactggttgcacgttacgggggtaaataa

SEQ ID NO: 826727 - DNA, 75 bp, synthetic construct
  source 1..75: mol_type = other DNA
cgtctatgccgggctggctgaattcggcggctacggtacgcgctggttagcgatgatcagttatttcattgccgc

SEQ ID NO: 826728 - DNA, 75 bp, synthetic construct
  source 1..75: mol_type = other DNA
accgtcgggcgcaaatttggtttctttatcgctatcgtttcggtgctggtcgcgccgtggatcgccaacgcgccg

SEQ ID NO: 826729 - DNA, 75 bp, synthetic construct
  source 1..75: mol_type = other DNA
tttaccgaaagccgacatggcctacccgacgctggtcaataacgttctgccagtgccaatggtgggtttcttcgg

SEQ ID NO: 826730 - DNA, 75 bp, synthetic construct
  source 1..75: mol_type = other DNA
caaaaatgacctatgcctttagcgatgcgctgaaaattaccgatgccaaagagctggagcaggcgtttgggattg

SEQ ID NO: 826731 - DNA, 75 bp, synthetic construct
  source 1..75: mol_type = other DNA
caacaccatcgtggcgcgatttatcaaagatccgaccgaaccgcggtttatctggcgtgccgtgcccattcaact

SEQ ID NO: 826732 - DNA, 75 bp, synthetic construct
  source 1..75: mol_type = other DNA
acaggaagttgattatttctttggtaaagaaaagggagaggagaatgactggaatattcatattgttaattttaa

SEQ ID NO: 826733 - DNA, 75 bp, synthetic construct
  source 1..75: mol_type = other DNA
tctcctgctggcgtgcggggcgtcgctgtggcccattatccttggcgcctgcctgaccggcgtcggcggcgccct

SEQ ID NO: 826734 - DNA, 75 bp, synthetic construct
  source 1..75: mol_type = other DNA
tgctggtgggctgtgcgtttattgccggaagcgtctggagtaaccgaggttgggaaaaaaagtgggcggaacgtg

SEQ ID NO: 826735 - DNA, 75 bp, synthetic construct
  source 1..75: mol_type = other DNA
catatttacgttgatgaaagtgcagagatcgctgaagcattgaaagtgattgtcaacgcgaaaactcagcgcccg

SEQ ID NO: 826736 - DNA, 75 bp, synthetic construct
  source 1..75: mol_type = other DNA
cgtcaacgccaaaactcagcgtccgagcacatgtaatacggtagaaacgttgctggtgaataaaaacatcgccga

SEQ ID NO: 826737 - DNA, 75 bp, synthetic construct
  source 1..75: mol_type = other DNA
ctgtggggttggctgttcctgctggcggcgccgttgctggtgaaacaaactcgctatgtgatgcgtgaaatgaat

SEQ ID NO: 826738 - DNA, 75 bp, synthetic construct
  source 1..75: mol_type = other DNA
tccgctggtcgccctgctggcactgattaccgccggactgcttcaaattctctctaacctcgctaatgattacgg

SEQ ID NO: 826739 - DNA, 75 bp, synthetic construct
  source 1..75: mol_type = other DNA
gcagtcagtagctggtttaaacagcgctgggctgacattcaggaagcctttaacggcggcatcgcgggaattggt

SEQ ID NO: 826740 - DNA, 75 bp, synthetic construct
  source 1..75: mol_type = other DNA
agcaaggccagcagcagaaagcgcaaccgcaaaacaataatggaaactatccgccgccggatgatttcgatccag

SEQ ID NO: 826741 - DNA, 75 bp, synthetic construct
  source 1..75: mol_type = other DNA
gcgggaatatcggtaatgatatggaagtgcgctacacgcaaaacgggaaagctattggtagttttccgttagctg

SEQ ID NO: 826742 - DNA, 75 bp, synthetic construct
  source 1..75: mol_type = other DNA
gcgggaatatcggtaatgatatggaggttcgctacacacaaaacgggaaagcgattggtagttttccgttagctg

SEQ ID NO: 826743 - DNA, 75 bp, synthetic construct
  source 1..75: mol_type = other DNA
caaccgtctgcccctggacggagcgggtcttcagcgaatccattgaactggcctgtaccggcagacgtcatctgc

SEQ ID NO: 826744 - DNA, 75 bp, synthetic construct
  source 1..75: mol_type = other DNA
gaactgaaagacgttaacgtcggaaatatgcatttctcggaagggaaaaagcaaatcagcagtaaagtttatgtc

SEQ ID NO: 826745 - DNA, 75 bp, synthetic construct
  source 1..75: mol_type = other DNA
gtacccgctggcgctggggaatctggttatcgctgcaatgaatctggctgctgatatcggcgtacccgtagtgaa

SEQ ID NO: 826746 - DNA, 75 bp, synthetic construct
  source 1..75: mol_type = other DNA
agcgtggcatcactcaggcagcagtagcacaggctaccggggtttccgcagcggttatcgcgcagatggttaatc

SEQ ID NO: 826747 - DNA, 75 bp, synthetic construct
  source 1..75: mol_type = other DNA
caaactgcaacgggccggtaaacagctgacggacattatggacgccagcgcagtggatgccatacgtgcccgcct

SEQ ID NO: 826748 - DNA, 75 bp, synthetic construct
  source 1..75: mol_type = other DNA
caagttaatccaggcgctactggctctggtaatactgtttctgacggtcataaagaagtaccgcaggagggattc

SEQ ID NO: 826749 - DNA, 75 bp, synthetic construct
  source 1..75: mol_type = other DNA
gttcttcagacaaagaccatcttaccgttgttatttacgatccctccatcaaaaagaatgtcggtcttaatacca

SEQ ID NO: 826750 - DNA, 75 bp, synthetic construct
  source 1..75: mol_type = other DNA
gctcaccagagaatggtcaccttactgtcgttatttacgatcccaccatcaaaaagaatgtcggccttaatacca

SEQ ID NO: 826751 - DNA, 75 bp, synthetic construct
  source 1..75: mol_type = other DNA
tcttcggtctggtgctggcgatttataccacacgcatcgccaaacgcagcgccattattggccgcatcttttcca

SEQ ID NO: 826752 - DNA, 75 bp, synthetic construct
  source 1..75: mol_type = other DNA
ggcagcttcacggtgaactggggcgttgactacactctgacgctggataactttatcacgttatttggtcagggg

SEQ ID NO: 826753 - DNA, 75 bp, synthetic construct
  source 1..75: mol_type = other DNA
attgctttgtatagcgtttatggtcatcagtgccaccatcgttggccgcggtctaggctacgccgccatcgtgct

SEQ ID NO: 826754 - DNA, 75 bp, synthetic construct
  source 1..75: mol_type = other DNA
tggccgtcagtaacctggtgatagccgccatgaatctggctgctgaaatcggggttccgcaggtcaacgccgacg

SEQ ID NO: 826755 - DNA, 75 bp, synthetic construct
  source 1..75: mol_type = other DNA
accacaccggacattcgctacgtgcgtgaggcgctgtaccagacagcccgtcatggggggtttatggccgtcatc

SEQ ID NO: 826756 - DNA, 75 bp, synthetic construct
  source 1..75: mol_type = other DNA
gaggccacgctggcccagattgtgaatcataacgcgtggccccgcacccgccccggagaagtgcgccggcgtctt

SEQ ID NO: 826757 - DNA, 75 bp, synthetic construct
  source 1..75: mol_type = other DNA
gcatcctggctgaaaagtcagggaattgatacagcaaagagttttgaggctgtacagggcgcgaccacgccctgt

SEQ ID NO: 826758 - DNA, 75 bp, synthetic construct
  source 1..75: mol_type = other DNA
aggcggggttcagccacgttctggtgattgaggaagcccacagtctgccctttccgacactgaaacacctcaaac

SEQ ID NO: 826759 - DNA, 75 bp, synthetic construct
  source 1..75: mol_type = other DNA
tatcaaccgcgagaatgcgccggtcattgttatcgagccatacatcatcgcaatggaagacaacgatgtgaaagg

SEQ ID NO: 826760 - DNA, 75 bp, synthetic construct
  source 1..75: mol_type = other DNA
tatcaaccgcgagaatgcgccggtaattgttatcgagccatacatcatcgccatggaagacaacgatgtgaaagg

SEQ ID NO: 826761 - DNA, 75 bp, synthetic construct
  source 1..75: mol_type = other DNA
gcaaccaaaaaagcgtttggccttttccgtgatccgttcgccgatgaagccatgcagggcgcggacgatgtgttc

SEQ ID NO: 826762 - DNA, 75 bp, synthetic construct
  source 1..75: mol_type = other DNA
tccgctggccgtcagtaacctggtaatagccgccatgaatctggccgctgaaatcggggttccacaggtcaacgc

SEQ ID NO: 826763 - DNA, 75 bp, synthetic construct
  source 1..75: mol_type = other DNA
attccgacactgaaacacctcaaacgcttttttgagctggagtccggtttcaaaaaactgctgtccatcgtgctg

SEQ ID NO: 826764 - DNA, 75 bp, synthetic construct
  source 1..75: mol_type = other DNA
atcaacgtggtcgtgatgctggtgatcggttttatcaaaccgcgcgccacgccgttcaccttcaaagatgcgttt

SEQ ID NO: 826765 - DNA, 75 bp, synthetic construct
  source 1..75: mol_type = other DNA
gatcgtcaactctatcgtcttatcgatagcggtgggtattggctgtactttcttcggtctggtgctggcgatata

SEQ ID NO: 826766 - DNA, 75 bp, synthetic construct
  source 1..75: mol_type = other DNA
acagcgggtaccacagataaaacgaacctcagtgaggaagagaacatgttactcaaaaaacaggtgttattcccg

SEQ ID NO: 826767 - DNA, 75 bp, synthetic construct
  source 1..75: mol_type = other DNA
tttctgtaatggtggcatttagtctgctgggattcatttgtgcgactctgcttacccgaaggatgaagatgagaa

SEQ ID NO: 826768 - DNA, 75 bp, synthetic construct
  source 1..75: mol_type = other DNA
atggtaggtcgtattaacgccaatatgatccttccgtatccgccgggagttcctctggtaatgccgggtgaaatg

SEQ ID NO: 826769 - DNA, 75 bp, synthetic construct
  source 1..75: mol_type = other DNA
cggtttataccgctactcctgagaaaaaaatctcactgtatgacaagcagctgcagagcgtgctcgatggcatcc

SEQ ID NO: 826770 - DNA, 75 bp, synthetic construct
  source 1..75: mol_type = other DNA
cttaactttctgtaccagaaaacaatcaaagagtctgacgatagctgctgcagactgattccagagggatatatc

SEQ ID NO: 826771 - DNA, 75 bp, synthetic construct
  source 1..75: mol_type = other DNA
ctgttgatgatgaacgatgtagtgccagtctggctgaaaccgacgcgtaatgcgttggggattcttggtgggatc

SEQ ID NO: 826772 - DNA, 75 bp, synthetic construct
  source 1..75: mol_type = other DNA
atggatacgggtgataaaaacagaaaacaaagaacagaaaaaaacattaagcaaaaaatagcatcagcgcagatg

SEQ ID NO: 826773 - DNA, 75 bp, synthetic construct
  source 1..75: mol_type = other DNA
aatcgtcttaagtctctggagaaatcagaacgaaagaaagttgaaacaaggctaaagattatacttggtgcggaa

SEQ ID NO: 826774 - DNA, 75 bp, synthetic construct
  source 1..75: mol_type = other DNA
ggttttttacatcattggccctcaaacccctcttacttcagccggtgctgcatgctggtggtgccatctacaaag

SEQ ID NO: 826775 - DNA, 75 bp, synthetic construct
  source 1..75: mol_type = other DNA
aaagaattaggtccgccgccgcatcagttcagcggctctaaccgtatgagtgcaaagggcatttcggtattctat

SEQ ID NO: 826776 - DNA, 75 bp, synthetic construct
  source 1..75: mol_type = other DNA
gctgggtttgtgcttgttgtattggcgaagaatttttacgccacaaggtcgagaaagaaggacgtatacaaacct

SEQ ID NO: 826777 - DNA, 75 bp, synthetic construct
  source 1..75: mol_type = other DNA
gagctgacaccccggcccgcatgtgtccgtcgcaccgcgagcttgtgcagatatgcggcctcccccttgagggcg

SEQ ID NO: 826778 - DNA, 75 bp, synthetic construct
  source 1..75: mol_type = other DNA
aacatttgaggcatttccagaggaagatcaacagcaaatacttaaagatatgaaggaaaaaaaagagacaatgga

SEQ ID NO: 826779 - DNA, 75 bp, synthetic construct
  source 1..75: mol_type = other DNA
gctggctggtgggcgctctttctgtttagcgatacggcggtcgatagaatcccgcattttctgatattgagattc

SEQ ID NO: 826780 - DNA, 75 bp, synthetic construct
  source 1..75: mol_type = other DNA
tcgctgatccacattaaaggcgagtatgacgaagaggcgtttaacgaagcctttatgatgcataccaccacctcg

SEQ ID NO: 826781 - DNA, 75 bp, synthetic construct
  source 1..75: mol_type = other DNA
ttgagcaggcgcttaacgcgggggcacgcggctttctttccaaacgctgtagcccggatgaactcattgctgcgg

SEQ ID NO: 826782 - DNA, 75 bp, synthetic construct
  source 1..75: mol_type = other DNA
gccaggacccgctaaccaaacgcgaacgccaggtggcggaaaaactggcgcaaggaatggcggtgaaagagattg

SEQ ID NO: 826783 - DNA, 75 bp, synthetic construct
  source 1..75: mol_type = other DNA
atgatcaccgttgcccttatagacgatcacctcatcgtccgctccggctttgcgcagctgctggggctggaacct

SEQ ID NO: 826784 - DNA, 75 bp, synthetic construct
  source 1..75: mol_type = other DNA
tggctttggatttacaatatatgctgctgttcagactatcggactatttatttcattatatatagcagatcgctt

SEQ ID NO: 826785 - DNA, 75 bp, synthetic construct
  source 1..75: mol_type = other DNA
cgaaaagcaccgcggtgtttaatatgtttaaacacctggctcacgtgctctcggaaaaatatcatctggtagatt

SEQ ID NO: 826786 - DNA, 75 bp, synthetic construct
  source 1..75: mol_type = other DNA
ttgcggcggtgcatacggttgccacgggcggctgttatctgacgccggatattgccattaaactggcatccggtc

SEQ ID NO: 826787 - DNA, 75 bp, synthetic construct
  source 1..75: mol_type = other DNA
ctttcggcttatttttggtgttgcagccgtggcaactcgatttctcttcgatgaaaagcgccatgctggcaatcc

SEQ ID NO: 826788 - DNA, 75 bp, synthetic construct
  source 1..75: mol_type = other DNA
cgcgattgtcgcgaaacgcctatacgcccgccatccacgcgtggatttattgtcgttaacatcctggcagatgct

SEQ ID NO: 826789 - DNA, 75 bp, synthetic construct
  source 1..75: mol_type = other DNA
cctcgacgaacgtgggatcgtagtagagaaaaccggcccttataacctgctgtttctctttagtattggcatcga

SEQ ID NO: 826790 - DNA, 75 bp, synthetic construct
  source 1..75: mol_type = other DNA
accggcacggtattttttgaggatgggacgccacgaaaaatcagcttcaccctgtcactgacccgtgtcgatgag

SEQ ID NO: 826791 - DNA, 75 bp, synthetic construct
  source 1..75: mol_type = other DNA
tttctcttcgatgaaaagtgccatgctggcaatcctctccggcgtcagttggggggcgagcgcgattgttgctaa

SEQ ID NO: 826792 - DNA, 75 bp, synthetic construct
  source 1..75: mol_type = other DNA
agcggtattgtgctgattgtgctggcactggcgctggtgagccgtaaagaaaaaagaagctgtcagtgtaaaaag

SEQ ID NO: 826793 - DNA, 75 bp, synthetic construct
  source 1..75: mol_type = other DNA
gtgcttttcacacagccattaaacacgagtccaacgggcgccgtacggtgactactgaggacttcgtgaagcacc

SEQ ID NO: 826794 - DNA, 75 bp, synthetic construct
  source 1..75: mol_type = other DNA
acaaatgccgtaatatgaactcggttaatccacttaaactggttaactgtgatgagctgaattttcaggacagaa

SEQ ID NO: 826795 - DNA, 75 bp, synthetic construct
  source 1..75: mol_type = other DNA
atgattcgcaagtattggtggctcgtcgttttcgctgtctccgtttttctgtttgataccttactgatgcagtgg

SEQ ID NO: 826796 - DNA, 75 bp, synthetic construct
  source 1..75: mol_type = other DNA
tgatgattcaggctggcatttctatagtcagcgaaatacagataactcagtaacatttgctgttaacggtcagat

SEQ ID NO: 826797 - DNA, 75 bp, synthetic construct
  source 1..75: mol_type = other DNA
ccacatcacgaaagccaacacctgcggatattcttgctctggcattatcaggcggaagcatgtcaggcagcataa

SEQ ID NO: 826798 - DNA, 75 bp, synthetic construct
  source 1..75: mol_type = other DNA
ggtctattggcaaaggatatcggcgttgcagctatttcctttatgcgtcgcaatacagcaacagccacagtcagc

SEQ ID NO: 826799 - DNA, 75 bp, synthetic construct
  source 1..75: mol_type = other DNA
atggtttttccgtcgctggaagccggaaatattggttacaaaatcgcacaacgactcggcggatatcgtgccgtc

SEQ ID NO: 826800 - DNA, 75 bp, synthetic construct
  source 1..75: mol_type = other DNA
aatataaaaacattgctggcgttgaagaaaaattaacctttactgatacttacgcgcaggaaaacgtgactatcg

SEQ ID NO: 826801 - DNA, 75 bp, synthetic construct
  source 1..75: mol_type = other DNA
cagcttgccggaacgcaatagatatcctgcctaacggaaagcgcatcctcaccaccaggcgatttctgcaggaac

SEQ ID NO: 826802 - DNA, 75 bp, synthetic construct
  source 1..75: mol_type = other DNA
aaattcataccggttcattgcagggtaatgactccaacttactgatagtgttttatgttcagataatgcccgatg

SEQ ID NO: 826803 - DNA, 75 bp, synthetic construct
  source 1..75: mol_type = other DNA
atgacaaatagttatgaagaaaaaactgatgtaaaaagggaaaaactagatcggattattggccgaagcacaata

SEQ ID NO: 826804 - DNA, 75 bp, synthetic construct
  source 1..75: mol_type = other DNA
taagaatcattggtgaagtagatggcgatgatgaagccatcttcagaccaatacaaaaatacatcaatggcacat

SEQ ID NO: 826805 - DNA, 75 bp, synthetic construct
  source 1..75: mol_type = other DNA
tgccacattctggctgtacgaaagagtacactgttgccaatcgacacaattatccggcatcaagtgagtgatatc

SEQ ID NO: 826806 - DNA, 75 bp, synthetic construct
  source 1..75: mol_type = other DNA
cgccacattctggctgtacgaaagagtgcgctgctgcaaatcgacacacttatccggcaactggcagaaatcgta

SEQ ID NO: 826807 - DNA, 75 bp, synthetic construct
  source 1..75: mol_type = other DNA
tacccgttggtgtgcctgttccgtggccttcagccactccgccgacaggctggctgaaatgcaacggggcggctt

SEQ ID NO: 826808 - DNA, 75 bp, synthetic construct
  source 1..75: mol_type = other DNA
ttctcggttttgtcagcattatggaaggccgatttctggcagcaatgtttgtcgcaccgaaggccgtcaggcgcg

SEQ ID NO: 826809 - DNA, 75 bp, synthetic construct
  source 1..75: mol_type = other DNA
tgggtgtgggaagaagacggtgaatttctcggttttgtcagcattatggaaggacgatttctggctgcgatgttt

SEQ ID NO: 826810 - DNA, 75 bp, synthetic construct
  source 1..75: mol_type = other DNA
cgttatctgctcaaccagcatccgccgcattctggctgtacgaaagagttcactgctgcaaatcgacacaattat

SEQ ID NO: 826811 - DNA, 75 bp, synthetic construct
  source 1..75: mol_type = other DNA
ttaattgctgtggcgaacatggccgaaagttataagccagctcttgccgaaggctcagggcgttcgcagacctgc

SEQ ID NO: 826812 - DNA, 75 bp, synthetic construct
  source 1..75: mol_type = other DNA
aatgttaactcccctatgcaggctggtatatctgaacttgttcttcgtgcgggaaatggaaatccaaaaggtctt

SEQ ID NO: 826813 - DNA, 75 bp, synthetic construct
  source 1..75: mol_type = other DNA
tgattctgaaacactggccgcaacaccaaaagcggtgaagtctgcctatgacaatgctgaaaaacgtcttcagaa

SEQ ID NO: 826814 - DNA, 75 bp, synthetic construct
  source 1..75: mol_type = other DNA
aacgccaactgcgccaaaaggtactaataatactcagatcgcaagtacggcttatgtgatggccgcgattgccgc

SEQ ID NO: 826815 - DNA, 75 bp, synthetic construct
  source 1..75: mol_type = other DNA
gtgctggatggttcaaactggcaactgtaacaatgccacaagccagttccgtggtttacataagtctgattggtg

SEQ ID NO: 826816 - DNA, 75 bp, synthetic construct
  source 1..75: mol_type = other DNA
ggcagcatatgaccttgctaacgctaaatacaccgcacaggacgctaccacagcgcgaaaagggattgttcagct

SEQ ID NO: 826817 - DNA, 75 bp, synthetic construct
  source 1..75: mol_type = other DNA
tgcaaccaccaaagaagacgctgccaagacacttgagccgttaagcgccaaattgatgcgccgcgcgataaatgc

SEQ ID NO: 826818 - DNA, 75 bp, synthetic construct
  source 1..75: mol_type = other DNA
gttgcggaagaatcggcagaaggtttgcgcgagcatttttactggcaaaagtcacgcaaaccagaagcgggacag

SEQ ID NO: 826819 - DNA, 75 bp, synthetic construct
  source 1..75: mol_type = other DNA
atctttatgctttgcagggaagaataaactggttattgcaaatcaatcctgaggatgaggcctttaaacaggcga

SEQ ID NO: 826820 - DNA, 75 bp, synthetic construct
  source 1..75: mol_type = other DNA
cagcggctggtgttagcccctgattacttgctcaaaaccgtacagcgcaacattcttaagaacgtcctttcacaa

SEQ ID NO: 826821 - DNA, 75 bp, synthetic construct
  source 1..75: mol_type = other DNA
taccttgtgaagtggatgaaccagaaaatccagttaccggatttcctgttagcgttcaaaaccacatttttgcta

SEQ ID NO: 826822 - DNA, 75 bp, synthetic construct
  source 1..75: mol_type = other DNA
atgctggataataatggtgttattaatatgagtaaatataaattctctttaccccgtcttgatattacaggtgta

SEQ ID NO: 826823 - DNA, 75 bp, synthetic construct
  source 1..75: mol_type = other DNA
tgacgaatgacacagatgctgtgacgaatggcgacacggaaaacgcagaggcgatcgcaaatgacacggttaatc

SEQ ID NO: 826824 - DNA, 75 bp, synthetic construct
  source 1..75: mol_type = other DNA
ctgacggacattatggacgcccgcgcagtggatgccatacgtgcccgcctgagcaatccgggaagtcatcgtaaa

SEQ ID NO: 826825 - DNA, 75 bp, synthetic construct
  source 1..75: mol_type = other DNA
aggcggggttcagccacgttctggtgattgaggatgcccacagtctgcccattccgacactgaaacacctcaaac

SEQ ID NO: 826826 - DNA, 75 bp, synthetic construct
  source 1..75: mol_type = other DNA
caaaagttgcctgatagctgcctgtaagcgccagcaggtaaccgggattgttgttaatcacaagccacagcttgc

SEQ ID NO: 826827 - DNA, 75 bp, synthetic construct
  source 1..75: mol_type = other DNA
ccttcggtgaatctgctccggcagaacagctgttcgaagagttcggcttcaccgttgacaacgttgttgcgaaag

SEQ ID NO: 826828 - DNA, 75 bp, synthetic construct
  source 1..75: mol_type = other DNA
gcgggtattgctgactactggtacaagtatgttggcctgaacggtgctatcgtcggtatgaccaccttcggtgaa

SEQ ID NO: 826829 - DNA, 75 bp, synthetic construct
  source 1..75: mol_type = other DNA
aatgaagatgccgtcggtgaagccgttcgtgaagctatatccgaaggtttatgtacccgagaagagttatttata

SEQ ID NO: 826830 - DNA, 75 bp, synthetic construct
  source 1..75: mol_type = other DNA
aagttacattacgtattcgtacctggtggggcatcgtcatttgtttttcactggtgatttcaggtccacgctgga

SEQ ID NO: 826831 - DNA, 75 bp, synthetic construct
  source 1..75: mol_type = other DNA
ctgaaacgtcgtctgttttattacaccacacccggattttcttcactgttggctctgcataagggaccgcgactg

SEQ ID NO: 826832 - DNA, 75 bp, synthetic construct
  source 1..75: mol_type = other DNA
ctgcagccggcatctgtgctggccggaaggatattacaaccatgactatatcgaagtggctaaagaacttggttt

SEQ ID NO: 826833 - DNA, 75 bp, synthetic construct
  source 1..75: mol_type = other DNA
aggcgtgaccagcagtggcatccgcatatccatttatcgacaactgccggtggtgtgacgtcgggcacacctgga

SEQ ID NO: 826834 - DNA, 75 bp, synthetic construct
  source 1..75: mol_type = other DNA
gatattcacggtgatccacacatggggacgtgaccagcagtggcatccgcacattcacctgtcgacaacggccgg

SEQ ID NO: 826835 - DNA, 75 bp, synthetic construct
  source 1..75: mol_type = other DNA
acttgagtgcagcaacgataaacattgatttactgattcaagagactgataaatcgattgatcttctaaaagaac

SEQ ID NO: 826836 - DNA, 75 bp, synthetic construct
  source 1..75: mol_type = other DNA
ccgggaggaaagggaagcgctggaagcccgtcaggccgccattcttgctgcagaaaaggagagcagacatgtttc

SEQ ID NO: 826837 - DNA, 75 bp, synthetic construct
  source 1..75: mol_type = other DNA
atttattgcaccaggccatgcgcgattatttcagtgcgtggcgtgcactcgaagatgcctatgaagagggcaaat

SEQ ID NO: 826838 - DNA, 75 bp, synthetic construct
  source 1..75: mol_type = other DNA
ttagttcgcttgatttgggttatgttggggagtcggtaaaacattttaatcctgaatttgttcgtggttgtcttg

SEQ ID NO: 826839 - DNA, 75 bp, synthetic construct
  source 1..75: mol_type = other DNA
ggaaatacatctcagtggtcttgttgagtttcactcgcatactcacacgcaccggcgctgggattgcatgccaga

SEQ ID NO: 826840 - DNA, 75 bp, synthetic construct
  source 1..75: mol_type = other DNA
gcattttatcgtggtgaaacattaccccgtaaaagtgtcatgctgacctttgacgacggctggctggataactgg

SEQ ID NO: 826841 - DNA, 75 bp, synthetic construct
  source 1..75: mol_type = other DNA
tgctggatgcatggattgcccgcgtcagccgggaagagcgtgaggcactggaagccaggcaacaggccatgatgg

SEQ ID NO: 826842 - DNA, 75 bp, synthetic construct
  source 1..75: mol_type = other DNA
cgatgtgaccgtgcaggaggctgccgccatcgcatggcatatgccgtttgatgacgatcagtatcaccgtttact

SEQ ID NO: 826843 - DNA, 75 bp, synthetic construct
  source 1..75: mol_type = other DNA
ccggcgaaaatcgccacccgtaaggcttcgcaaaatacgcttaacgcttacgggccgatgctaccggagctgctc

SEQ ID NO: 826844 - DNA, 75 bp, synthetic construct
  source 1..75: mol_type = other DNA
actggcgggaacgctgggactcggcaaactgattggcttttacgatcacaacggtatttcgattgatggtgaaac

SEQ ID NO: 826845 - DNA, 75 bp, synthetic construct
  source 1..75: mol_type = other DNA
gtgcgatcaggttgaagctgccgtgggctggaagctggcggttgagcgccacaacgggccgacagcactaatcct

SEQ ID NO: 826846 - DNA, 75 bp, synthetic construct
  source 1..75: mol_type = other DNA
acagtggtgttgtgctttactatccgccgaaatcaaaaaattctctggctaaaaagatttcagaagagattggcg

SEQ ID NO: 826847 - DNA, 75 bp, synthetic construct
  source 1..75: mol_type = other DNA
cgatgctacttataaagccgctatcgataaagcgttgaaacctgtcggactaggcgggttattcggtaaagatgg

SEQ ID NO: 826848 - DNA, 75 bp, synthetic construct
  source 1..75: mol_type = other DNA
ttacaacgtcgacccaggttacctggtttggttcggcgatatcggcgttaatgaattcgcctatctggttaagaa

SEQ ID NO: 826849 - DNA, 75 bp, synthetic construct
  source 1..75: mol_type = other DNA
cttttgcccaggcgcgggcctgtgcagaagcaggcgtttttctgatttcgccgtttgtcgggcgtatttatgact

SEQ ID NO: 826850 - DNA, 75 bp, synthetic construct
  source 1..75: mol_type = other DNA
ttctcaaaatcgtacccggtcgcgtgtcaacagaagttgatgcacgcctctcttttgataaagaaaaaagtattg

SEQ ID NO: 826851 - DNA, 75 bp, synthetic construct
  source 1..75: mol_type = other DNA
gtctgaaatatattacagccgcatgaccagtctgaataaattatcagaaatatcagagggagcttataatgaaag

SEQ ID NO: 826852 - DNA, 75 bp, synthetic construct
  source 1..75: mol_type = other DNA
atatatcaatgagttacaggcaaatccggcgaaaatcgctacccgtaaggcttcgcaaaatacgcttaacgctta

SEQ ID NO: 826853 - DNA, 75 bp, synthetic construct
  source 1..75: mol_type = other DNA
atatatcaatgagttgcaggcgaatccggcgaaaatcgctacccgtaaggcttcgcaaaatacgcttaacgctta

SEQ ID NO: 826854 - DNA, 75 bp, synthetic construct
  source 1..75: mol_type = other DNA
cgcacggcgcaccgctgggggaagaagaagtggcgctggcacggcaaaaactgggctggcaccatccgccatttg

SEQ ID NO: 826855 - DNA, 75 bp, synthetic construct
  source 1..75: mol_type = other DNA
aagaaaaaccaagtactcgtttgcttgaagaacaacaatttttttcttcattacctttatttaatgatggttcta

SEQ ID NO: 826856 - DNA, 75 bp, synthetic construct
  source 1..75: mol_type = other DNA
atgatgcgccagctggcgcaggaactgcgccggacacagcagcagaatatcagaatgcagcgcaatccagatggc

SEQ ID NO: 826857 - DNA, 75 bp, synthetic construct
  source 1..75: mol_type = other DNA
agcagctatgaaccgcgacggttaacagcacgcagtaaaaaaggccgtatcaaacgtcagatgtttgcaaagctg

SEQ ID NO: 826858 - DNA, 75 bp, synthetic construct
  source 1..75: mol_type = other DNA
gcagtttgtgggacaagtgcagcgtatcgctcgggtacaccattacggcttacgtgatcgtgttagccgcaatgg

SEQ ID NO: 826859 - DNA, 75 bp, synthetic construct
  source 1..75: mol_type = other DNA
tgaataataaacacctgtccctgaccgccctgtaccctgacggtaatcgggaggtgattgccatcctgccagtca

SEQ ID NO: 826860 - DNA, 75 bp, synthetic construct
  source 1..75: mol_type = other DNA
cgatccgaagacagtattacccgttcttttcggtgttacccgtactggtacaaactgcgtttacaaagcaatttc

SEQ ID NO: 826861 - DNA, 75 bp, synthetic construct
  source 1..75: mol_type = other DNA
aacagaaacagcaccattacacatcgacaaggaaattgtccggtcagtagccccgtcaaagacgaaaaatgaaat

SEQ ID NO: 826862 - DNA, 75 bp, synthetic construct
  source 1..75: mol_type = other DNA
ccggcaaactgtttctggcgatcttcgccacctgcatcgtcttactgatcacgatgcattgggcggtgcgtatca

SEQ ID NO: 826863 - DNA, 75 bp, synthetic construct
  source 1..75: mol_type = other DNA
ccggacggcacgcggcgaccgattatggtcaatggtgtagaagttggcgcggtgatcgcctcccctgttgaacga

SEQ ID NO: 826864 - DNA, 75 bp, synthetic construct
  source 1..75: mol_type = other DNA
ctacactgacagcggcggcagcctgaaaatctctgccgggcagcacgacaaaacggtgcgcctgacctttgccga

SEQ ID NO: 826865 - DNA, 75 bp, synthetic construct
  source 1..75: mol_type = other DNA
gcagtttgaaggtatggtacagcgtattgcccgtgttcaccattacggcctgcgtgatcgcgtaaataaaaaagg

SEQ ID NO: 826866 - DNA, 75 bp, synthetic construct
  source 1..75: mol_type = other DNA
atgatgcgccagctggcgcaggaactacgccggacacagcagcaaaatatcagaatgcagcgcaatccagatggc

SEQ ID NO: 826867 - DNA, 75 bp, synthetic construct
  source 1..75: mol_type = other DNA
agtagttatgagccgcgacgggtaacagcgcgcagtaaaaaaggccgcatcaaacgtcagatgtttgcgaagctg

SEQ ID NO: 826868 - DNA, 75 bp, synthetic construct
  source 1..75: mol_type = other DNA
aacggtctgaatgaatcatcagaaatatcagaggaaacttataatgaaagaaaaaaagaaatgatgcggaacaaa

SEQ ID NO: 826869 - DNA, 75 bp, synthetic construct
  source 1..75: mol_type = other DNA
tgatgttctggaagtaacagacgaaggccaagaggttgagttttgggatcgcaaagatggtgcctgtgtcggtca

SEQ ID NO: 826870 - DNA, 75 bp, synthetic construct
  source 1..75: mol_type = other DNA
tatgaatttattcttaaggccacttttgagcaagataaaaaggacaatacacatgcttttttcactcgcccggtt

SEQ ID NO: 826871 - DNA, 75 bp, synthetic construct
  source 1..75: mol_type = other DNA
ggctgaacaaaatgtaaaatctggttatgaatttattcttaaggccacttttgagcaagataaaaaggacaatac

SEQ ID NO: 826872 - DNA, 75 bp, synthetic construct
  source 1..75: mol_type = other DNA
cattgcgctatccggaaaaacagcggacctgaccacggacgagattatccaggccatcacgcctgcctcacgcac

SEQ ID NO: 826873 - DNA, 75 bp, synthetic construct
  source 1..75: mol_type = other DNA
gccagcgttaaagggatgaatgaacctgctgatagtgccatgaatttagttaagaccagtaatggttggaaagct

SEQ ID NO: 826874 - DNA, 75 bp, synthetic construct
  source 1..75: mol_type = other DNA
cgcagaaacgggtgaactgtacggcatcgaagcccttgctcgctggtacgatcccctgcatggtcatgtgccccc

SEQ ID NO: 826875 - DNA, 75 bp, synthetic construct
  source 1..75: mol_type = other DNA
acgtacccgacccgtagctgcgtgcaggtcgcgcgtttgccgaaagatgtgaagctggaaattgaagctatcgca

SEQ ID NO: 826876 - DNA, 75 bp, synthetic construct
  source 1..75: mol_type = other DNA
acttacccaacacgtagctgcgtgcaggtcgctcgtttgccaaaagatgtgaagctggaaattgaagctatcgcg

SEQ ID NO: 826877 - DNA, 75 bp, synthetic construct
  source 1..75: mol_type = other DNA
cacgccacgtatcgggaagaacttcattcaggttgtggcgattgaaggctacccctctgaatcttatccgggcat

SEQ ID NO: 826878 - DNA, 75 bp, synthetic construct
  source 1..75: mol_type = other DNA
ttaccgttaaggggtacaaacccttgattgatgtgatcactaaagctgcggcggcttttcaggccgaggaacgtg

SEQ ID NO: 826879 - DNA, 75 bp, synthetic construct
  source 1..75: mol_type = other DNA
cacagatgcccagcgtcgcgaagagctgctgactattgcagagatcccccgccataacgcgcaacataagccgta

SEQ ID NO: 826880 - DNA, 75 bp, synthetic construct
  source 1..75: mol_type = other DNA
gtgcgccaggcgcaattggcccgtatgtacagggcattgatttaggtagcatggtatttacctccgggcaaatcc

SEQ ID NO: 826881 - DNA, 75 bp, synthetic construct
  source 1..75: mol_type = other DNA
gttggaaggatgttccggtgatggtagcgcgtgaagaagacgacgtgtccatcactcttctttcagggtttacag

SEQ ID NO: 826882 - DNA, 75 bp, synthetic construct
  source 1..75: mol_type = other DNA
ggcaagaagaaaatggttaatgcttttattgacaatttttttgttttcattgcttatttcaggaaatatgtttaa

SEQ ID NO: 826883 - DNA, 75 bp, synthetic construct
  source 1..75: mol_type = other DNA
gcgaagatgattgggagctggctctgctttcctggttaggggtgggtgagttaaatcaggaaggtatccagaaga

SEQ ID NO: 826884 - DNA, 75 bp, synthetic construct
  source 1..75: mol_type = other DNA
gctttcctggttaggggtgggtgagttaaatcaggaaggtatccagaagatcaagaagctttatgaaaaggctaa

SEQ ID NO: 826885 - DNA, 75 bp, synthetic construct
  source 1..75: mol_type = other DNA
ctcctatcgagttgcacattggcgatcatgtccagcggcatggtgctttatctgaggtcatgcatattgttgaat

SEQ ID NO: 826886 - DNA, 75 bp, synthetic construct
  source 1..75: mol_type = other DNA
aacattccattcataaatgtccagaattatggaggtacagttctgataaagaatgactggactatcgatatgggc

SEQ ID NO: 826887 - DNA, 75 bp, synthetic construct
  source 1..75: mol_type = other DNA
tttttaacccagatgaaagatgatagatttaatcataaatatggagtgctaatgaacttttatggctacaatgac

SEQ ID NO: 826888 - DNA, 75 bp, synthetic construct
  source 1..75: mol_type = other DNA
caactggcgatcccgccgttgtactgggatgtgatcgccgaaagctggcgcgcacgcgatccttcgttgtatggc

SEQ ID NO: 826889 - DNA, 75 bp, synthetic construct
  source 1..75: mol_type = other DNA
agttctttatgttctttcatggcgtttaaagataacaatatgtgggtcgattctcctgatttgacgttatcagta

SEQ ID NO: 826890 - DNA, 75 bp, synthetic construct
  source 1..75: mol_type = other DNA
gtctgaaatatattacagccgcaggactggtctgaatgaattatcggaaatatcagaggggacttataatgagag

SEQ ID NO: 826891 - DNA, 75 bp, synthetic construct
  source 1..75: mol_type = other DNA
gtagtgtctgctttctggcataaagaagagtttcttctccaccagaaaagcaaattgatacctttttttgagaag

SEQ ID NO: 826892 - DNA, 75 bp, synthetic construct
  source 1..75: mol_type = other DNA
aatccgttgattgttttatattacgattatcctggaatcttaccaagaacagatattcctgttttaaatctatta

SEQ ID NO: 826893 - DNA, 75 bp, synthetic construct
  source 1..75: mol_type = other DNA
caggacatcctggatttcaacaacattaaaatgagtattcatatatgttatgagggattattccctgagggtgaa

SEQ ID NO: 826894 - DNA, 75 bp, synthetic construct
  source 1..75: mol_type = other DNA
aatccggagcactgggacaccatacctaatcttcatttactgaatcactctcagaatataagtaaacaggatact

SEQ ID NO: 826895 - DNA, 75 bp, synthetic construct
  source 1..75: mol_type = other DNA
aatcatttttcaaataaatatcttgaaaaattagattatattgcgaattcaccggagaaactcagcttttacgaa

SEQ ID NO: 826896 - DNA, 75 bp, synthetic construct
  source 1..75: mol_type = other DNA
aatcatttttcaaagaaatatcttgaaaaactagattatattgcgaattcacctgagaagctcagcttttatgaa

SEQ ID NO: 826897 - DNA, 75 bp, synthetic construct
  source 1..75: mol_type = other DNA
gctgaaaggctggcagcggtcggcaggcgctaaggcagaactggcactggcagagaaactggggcttgaggtaat

SEQ ID NO: 826898 - DNA, 75 bp, synthetic construct
  source 1..75: mol_type = other DNA
ataccgttttaaacccggcagtacttccggacgggctgactcagccacattacatggatatttgcatggcaatga

SEQ ID NO: 826899 - DNA, 75 bp, synthetic construct
  source 1..75: mol_type = other DNA
agtacaacttcaggttcctcaccgacaagcaatacgctgattcacttacagacaacaaacatcactggttctgcc

SEQ ID NO: 826900 - DNA, 75 bp, synthetic construct
  source 1..75: mol_type = other DNA
tgaaacaggaatttgatggcgtatcggatgatgcgggtgatgcgttgctggttgttaatgacctgataaaggccg

SEQ ID NO: 826901 - DNA, 75 bp, synthetic construct
  source 1..75: mol_type = other DNA
tgaaacaggaatttgatggcgcaccggatgatacaggcgatgcgttgctggctgttaatgacctgataaaggccg

SEQ ID NO: 826902 - DNA, 75 bp, synthetic construct
  source 1..75: mol_type = other DNA
tgatgatgcggctgatgcgctttcgtcaatgccagaacttattagagcggcttttttcttactttccacgaaaga

SEQ ID NO: 826903 - DNA, 75 bp, synthetic construct
  source 1..75: mol_type = other DNA
ccgataaactctttcatgatgtgggatatccgtagtgccagtattaaaaatgattacaaattctatgaattcctg

SEQ ID NO: 826904 - DNA, 75 bp, synthetic construct
  source 1..75: mol_type = other DNA
attgataaacagcagttaacgaatagtgatactccgaagaaaagcacggtcccaaatgaagataaaaaaggcata

SEQ ID NO: 826905 - DNA, 75 bp, synthetic construct
  source 1..75: mol_type = other DNA
gagctgatgcttcgcgctggcgaggccgcattccaggtgtgtcgttcggcgtatcctgacgcccgccactggctg

SEQ ID NO: 826906 - DNA, 75 bp, synthetic construct
  source 1..75: mol_type = other DNA
aaactggtaccagtcagcgggggcgagggcggaactggcgctggcggagaaactggggcatcaggtgatttttca

SEQ ID NO: 826907 - DNA, 75 bp, synthetic construct
  source 1..75: mol_type = other DNA
ctgtatggcatctcgaaaagaaagcttgcaagagctcgcaaaaaagatgagaaattgatacgtatagagatacag

SEQ ID NO: 826908 - DNA, 75 bp, synthetic construct
  source 1..75: mol_type = other DNA
gaagctcatacgtatagagattcagatggctgaagggttcatagatggttgcttaagtatgctggaaatagagct

SEQ ID NO: 826909 - DNA, 75 bp, synthetic construct
  source 1..75: mol_type = other DNA
tcaatgccctgatgagaaagatgatgacagacgtttatcttgttatgatcgttttttttctccaacatttactcc

SEQ ID NO: 826910 - DNA, 75 bp, synthetic construct
  source 1..75: mol_type = other DNA
cgccggtgccggacttggtgcctgcgcggcaatcctgtggggattatccattgtttacatccagctgtacgcatt

SEQ ID NO: 826911 - DNA, 75 bp, synthetic construct
  source 1..75: mol_type = other DNA
gaaattaatacgtatcgagatacagatggctgaagggtttattgatggctgtctttctatgttgggcgtgaagct

SEQ ID NO: 826912 - DNA, 75 bp, synthetic construct
  source 1..75: mol_type = other DNA
ttgcaaagaagcagaaatgctcagatggtacgatcagaaaagaattgcaaactgctttaggttttattgatggtg

SEQ ID NO: 826913 - DNA, 75 bp, synthetic construct
  source 1..75: mol_type = other DNA
ggtgctaaggcggaactggcactggcggagaagctggggcatgcagttattttccaggaggcaaccagtgagcaa

SEQ ID NO: 826914 - DNA, 75 bp, synthetic construct
  source 1..75: mol_type = other DNA
atgcgagcagcgttgtgggtcgggtgtgccgctttattgttatcggcgtgtagtagtgaaccagttcagcaggca

SEQ ID NO: 826915 - DNA, 75 bp, synthetic construct
  source 1..75: mol_type = other DNA
gtgagggtttatatcgccggtccaatgacggggtatgaaaatttcaaccgtgaggcgtttcacaaggcagaagag

SEQ ID NO: 826916 - DNA, 75 bp, synthetic construct
  source 1..75: mol_type = other DNA
cgctttgctcttctgctgtatcaacagcgtatgcggtagaaccagttaaagccgatattaacaatgacgcattaa

SEQ ID NO: 826917 - DNA, 75 bp, synthetic construct
  source 1..75: mol_type = other DNA
tccgtagcgcggatgcggtttacatgcttcgaaactggttccagtcagcaggtgcaagggctgagctggcactgg

SEQ ID NO: 826918 - DNA, 75 bp, synthetic construct
  source 1..75: mol_type = other DNA
gtccaatgaccgggtataaaaatttcaaccgtgaggcgttccacaaggcggaagaggaactgaaacgggaagggc

SEQ ID NO: 826919 - DNA, 75 bp, synthetic construct
  source 1..75: mol_type = other DNA
aagcgctgagacaggcagtcgcaactccagcgccagagcaaaacaataaaattgaaatcaatattatcggagcgg

SEQ ID NO: 826920 - DNA, 75 bp, synthetic construct
  source 1..75: mol_type = other DNA
ttatgattttttcggcgggaataccctcaaggcggacgtctctatttcggtcaccgagcttggttcgttgctcga

SEQ ID NO: 826921 - DNA, 75 bp, synthetic construct
  source 1..75: mol_type = other DNA
gcgcggaacagagttatatcgttaccaacggaacatcgacgtcgaacaaaattgtgggtatgtacgccgcgccat

SEQ ID NO: 826922 - DNA, 75 bp, synthetic construct
  source 1..75: mol_type = other DNA
cggggatttcagcgttcctatcagcaatgctggtgctggctcctcatgtgtgggcagagaccttcactgcaaagg

SEQ ID NO: 826923 - DNA, 75 bp, synthetic construct
  source 1..75: mol_type = other DNA
ggggaaacttccggaaggtttcactgatgagaaattttccagcgccatttacaacggaagaatatttacaatgaa

SEQ ID NO: 826924 - DNA, 75 bp, synthetic construct
  source 1..75: mol_type = other DNA
agaaaagcccggttggctgtctgttttatgattttttcggcggtaataccctcaaggcggacgtctctatttcgg

SEQ ID NO: 826925 - DNA, 75 bp, synthetic construct
  source 1..75: mol_type = other DNA
catgacgccacatcaggcatggcagaggcagattaaaggcgaagtagaaaccattgcgctggaacaactggtcgg

SEQ ID NO: 826926 - DNA, 75 bp, synthetic construct
  source 1..75: mol_type = other DNA
caggatgcaacgcaatcctgatggcagcagctatgaaccgaggcgagtaacagcacgcagtaaaaaaggccgcat

SEQ ID NO: 826927 - DNA, 75 bp, synthetic construct
  source 1..75: mol_type = other DNA
gtggctgaattgcagaaggtggacgactggctgagtgccttgctggcgaatctggagccagccgcaagaattcgc

SEQ ID NO: 826928 - DNA, 75 bp, synthetic construct
  source 1..75: mol_type = other DNA
ctgtattccgcagataacggaatgatgacgccaccagaagaaacaacgcctgcagatgaaacatgcctgaaagcg

SEQ ID NO: 826929 - DNA, 75 bp, synthetic construct
  source 1..75: mol_type = other DNA
atgatgcgccagctggcgcaggaactgcgacggacacagcagcagaacatcaggatgcaacgcaatcctgatggc

SEQ ID NO: 826930 - DNA, 75 bp, synthetic construct
  source 1..75: mol_type = other DNA
actggctgagtgccttgctggcgaatctagagccagccgcaagaagccgaatgatgcgccagctggcacaggaac

SEQ ID NO: 826931 - DNA, 75 bp, synthetic construct
  source 1..75: mol_type = other DNA
accggaggtgagatatgcaagtaggagactacttggtagaaatagagaggttcacgacatagtgcttgatacttt

SEQ ID NO: 826932 - DNA, 75 bp, synthetic construct
  source 1..75: mol_type = other DNA
tgttcggtaaaggcggctatatggatggccctggtggaggtatcacgccagtaaacattaacggtacagtctggt

SEQ ID NO: 826933 - DNA, 75 bp, synthetic construct
  source 1..75: mol_type = other DNA
gtggcattttcccggatccctggcccgctaatatatcccggctgaacagacgattaacgagatattgcaaatatg

SEQ ID NO: 826934 - DNA, 75 bp, synthetic construct
  source 1..75: mol_type = other DNA
cggggtatacagcagggcgtgggggcggcaggaggtgccgtcggaagatgccagggctgataatccgttacagag

SEQ ID NO: 826935 - DNA, 75 bp, synthetic construct
  source 1..75: mol_type = other DNA
gaggcccgtcgtttgcatctgcagggcatgacggttccggattatacggtgaaggtgagaaagtggttttgtgtg

SEQ ID NO: 826936 - DNA, 75 bp, synthetic construct
  source 1..75: mol_type = other DNA
tcagtacgcgaaacatttacagcatggtttaaggacaatcagggcggatttgtcaacacaattactgagtgggta

SEQ ID NO: 826937 - DNA, 75 bp, synthetic construct
  source 1..75: mol_type = other DNA
tgcggtgagggccacgggacggggtatcaaatgggggacgctgggggccgtgggtctgctcggcggcgcgactgc

SEQ ID NO: 826938 - DNA, 75 bp, synthetic construct
  source 1..75: mol_type = other DNA
cagaaggtttctccgtcgttcgtgaatattgtggacacggtattggtcgtggcttccatgaagaaccgcaggtac

SEQ ID NO: 826939 - DNA, 75 bp, synthetic construct
  source 1..75: mol_type = other DNA
gcccacgctgcggtaccggggtatacagcagggcgtgggggcggcaggaggtgccgtcggaagatgccagggctg

SEQ ID NO: 826940 - DNA, 75 bp, synthetic construct
  source 1..75: mol_type = other DNA
atgaaacgtttacataccctgatgttatttctggcggttctgtttactggctttaacgtggaagcagcgagcgtg

SEQ ID NO: 826941 - DNA, 75 bp, synthetic construct
  source 1..75: mol_type = other DNA
gaccctggttacctgatttggtttggtgaaattggtgtccacgaatttgcgtatctggtgaaaaactacgtagct

SEQ ID NO: 826942 - DNA, 75 bp, synthetic construct
  source 1..75: mol_type = other DNA
ttaacacttcagcggggcaatgacggacaaccaccgtggtttgaacatgaccagatgactgtcgctgagaaaatc

SEQ ID NO: 826943 - DNA, 75 bp, synthetic construct
  source 1..75: mol_type = other DNA
gctgcggtaccggggtatacagcagggcgtgggggcggcaggaggtgccgtcggaagatgccagggctgataatc

SEQ ID NO: 826944 - DNA, 75 bp, synthetic construct
  source 1..75: mol_type = other DNA
gtgatgtgtgacgaagattatgagggggaaaagtgctgcccgcgttgtggtaccggggtatacagcagggagagg

SEQ ID NO: 826945 - DNA, 75 bp, synthetic construct
  source 1..75: mol_type = other DNA
gtgtcttaagtaacaaagaacttggcgaattattgcaggcactggacaaaaaaatattttccccttactacgtcg

SEQ ID NO: 826946 - DNA, 75 bp, synthetic construct
  source 1..75: mol_type = other DNA
cagacatgcaagcaggcgcttaagttctgcaggaagcggcgctatgcaatcagcaacgttcttgatgatatgagt

SEQ ID NO: 826947 - DNA, 75 bp, synthetic construct
  source 1..75: mol_type = other DNA
tcacctactggcttgagtattacgtaaaggaaaaccgcgtggattatatcgccctgaaaaggcgacttaataatc

SEQ ID NO: 826948 - DNA, 75 bp, synthetic construct
  source 1..75: mol_type = other DNA
gtggcggacgttgggaaaaaaccggatataagcgaacgtgtcttaagtaaccaaagaactggcgaattattgcag

SEQ ID NO: 826949 - DNA, 75 bp, synthetic construct
  source 1..75: mol_type = other DNA
agggagacacgacccgaacgcattaagctgggaagttatcctgatctgagcctgaaatcagccagggaaaaagcc

SEQ ID NO: 826950 - DNA, 75 bp, synthetic construct
  source 1..75: mol_type = other DNA
tttcttaatgacggtggaaacctgagcgtcaggcattcaaccagtggccttttaacctggtatttcacttacagg

SEQ ID NO: 826951 - DNA, 75 bp, synthetic construct
  source 1..75: mol_type = other DNA
cgtcacgcagctggtggagcagaacaggcacacgggcttattgctgggggaagtgaaacaggaaacaagcgtgtc

SEQ ID NO: 826952 - DNA, 75 bp, synthetic construct
  source 1..75: mol_type = other DNA
caggtatgcaaacaggcgcttaagtactgccgcaaacgacgctacgcaatcagcaatgttcttgatgatatggtc

SEQ ID NO: 826953 - DNA, 75 bp, synthetic construct
  source 1..75: mol_type = other DNA
acatgtggacagagcggttagagatactggcgggtactcacaaaaacgtaaccacactgccaatagccagagaaa

SEQ ID NO: 826954 - DNA, 75 bp, synthetic construct
  source 1..75: mol_type = other DNA
gcactggacaaaaaaatattctccccctactacatcgcgttaatccgcctcctgattgtgttcggatgccggacg

SEQ ID NO: 826955 - DNA, 75 bp, synthetic construct
  source 1..75: mol_type = other DNA
aatgggatctgaaagaaatgttgtggacagtgccaaaagagcatagcaaaacgaaggtaacgatattcaggccaa

SEQ ID NO: 826956 - DNA, 75 bp, synthetic construct
  source 1..75: mol_type = other DNA
atataagcgagcgtgtcttaagtaacaaagaacttggcgaattattgcaggcactggacaaaaaaatattttccc

SEQ ID NO: 826957 - DNA, 75 bp, synthetic construct
  source 1..75: mol_type = other DNA
cactgacggcagtgtgacgagcgttgaagctatagcggaacctgatgcacctgaagaaatgtggacggtgaaacg

SEQ ID NO: 826958 - DNA, 75 bp, synthetic construct
  source 1..75: mol_type = other DNA
gtcatgggagtatcgttacaccctgaacgtagtggttgaggatttcagcggcgaccagaatctgttgatggcccc

SEQ ID NO: 826959 - DNA, 75 bp, synthetic construct
  source 1..75: mol_type = other DNA
cgttacgggaaaagttattcacctttgaggtggatattctgcgcaacgatgtctgtgatatcagccttaacctgc

SEQ ID NO: 826960 - DNA, 75 bp, synthetic construct
  source 1..75: mol_type = other DNA
cactggaaaacgcctttaaccgcgtcggcctcgaccacgttttgttagtgaaagtggcctccaccgccgtcgtcg

SEQ ID NO: 826961 - DNA, 75 bp, synthetic construct
  source 1..75: mol_type = other DNA
cagcccgatgccatcaataacccagcgttacgggaaaagctattcacctttgaggtggatattctgcgcaacgat

SEQ ID NO: 826962 - DNA, 75 bp, synthetic construct
  source 1..75: mol_type = other DNA
cactgacggcagtgtgtcgagcgttgaagctgtagcggaacccgatgaacctgaagaaatgtggacggtgaaacg

SEQ ID NO: 826963 - DNA, 75 bp, synthetic construct
  source 1..75: mol_type = other DNA
ggctatcaggcggttgaactatggctgcgtaatcgtgcgcagtccaggaacgggagcaagacaaatgacactgag

SEQ ID NO: 826964 - DNA, 75 bp, synthetic construct
  source 1..75: mol_type = other DNA
aacgtggtgatagtcgatttcagcggcgaccagaatttgttgatggcaccgatcctccagtggctgagcattaac

SEQ ID NO: 826965 - DNA, 75 bp, synthetic construct
  source 1..75: mol_type = other DNA
acggcaaattagcttgcgccatgctggaatcggttcagatggtttacggcaacgccaatgttgaagccgttgaat

SEQ ID NO: 826966 - DNA, 75 bp, synthetic construct
  source 1..75: mol_type = other DNA
aactgacggagcgtgtactggtcagcactgacggcggtatctcaacggttgaggcggagccagaacccgacgagc

SEQ ID NO: 826967 - DNA, 75 bp, synthetic construct
  source 1..75: mol_type = other DNA
cactgacggcagtgtgtcgagtgttgaagcggtaacggaacccgatgaacctgaagaaatgtggacggtaaaacg

SEQ ID NO: 826968 - DNA, 75 bp, synthetic construct
  source 1..75: mol_type = other DNA
attcactactgatcatcggtgcgctgattgccattggtaatgtgcttaccagtaacgaccccatcacaccgcgac

SEQ ID NO: 826969 - DNA, 75 bp, synthetic construct
  source 1..75: mol_type = other DNA
caaggagcttggggaattactccgcgccctggatgaaaaaatttactcaccgtactacagcgccctgattcgcct

SEQ ID NO: 826970 - DNA, 75 bp, synthetic construct
  source 1..75: mol_type = other DNA
aagttgtaatggagaaaatcacacaatctgtggaaagtgtttgtgaaaaatcttattccacaaaatgggaaacaa

SEQ ID NO: 826971 - DNA, 75 bp, synthetic construct
  source 1..75: mol_type = other DNA
ttgaatttaaccgaatgagtaccgagctcatggcagaaattgaagcatttattacggataaactgagtagcgaaa

SEQ ID NO: 826972 - DNA, 75 bp, synthetic construct
  source 1..75: mol_type = other DNA
agttcctcggggcgtaaaatccgttttgagtttaatagaatgaaccgagaattaattgacgaaattgagaagttt

SEQ ID NO: 826973 - DNA, 75 bp, synthetic construct
  source 1..75: mol_type = other DNA
agcctgctttatgagtgactgttcaccgcactggggtacacagcagtttatgtcctggccgttctatactgactc

SEQ ID NO: 826974 - DNA, 75 bp, synthetic construct
  source 1..75: mol_type = other DNA
ctgttgtgggtggcgtggatacacataaagatctgcacgttgctgctgtcgtagatgagaacaataaagtccttg

SEQ ID NO: 826975 - DNA, 75 bp, synthetic construct
  source 1..75: mol_type = other DNA
caggcaaaatacaggcttatcccgaaagcaaacccagcgcgattgcgaaaatccaggtcgatggcgagttgatgt

SEQ ID NO: 826976 - DNA, 75 bp, synthetic construct
  source 1..75: mol_type = other DNA
gtgatactggttgtctggagattcagggggccagtctatattggtagtaatactttcctgctacaaaatgatact

SEQ ID NO: 826977 - DNA, 75 bp, synthetic construct
  source 1..75: mol_type = other DNA
acaacctgaacatccagttattaaagggttagactggccccctgaatctccagacaaccaatatcacttaaataa

SEQ ID NO: 826978 - DNA, 75 bp, synthetic construct
  source 1..75: mol_type = other DNA
cccattacaagcccgctgccgcagatattcccgtggcgagcgataacccagcgcactatgcggatgccattcgtt

SEQ ID NO: 826979 - DNA, 75 bp, synthetic construct
  source 1..75: mol_type = other DNA
gcttgcgccagtggattttaggtttaccgggtgatgcgactgactacaaactggacgaccagtaccgcctgagcg

SEQ ID NO: 826980 - DNA, 75 bp, synthetic construct
  source 1..75: mol_type = other DNA
cgccgaagagatgattggtaaactaaccggaatgccgattccgctcaacagcttgcgccagtggattttaggttt

SEQ ID NO: 826981 - DNA, 75 bp, synthetic construct
  source 1..75: mol_type = other DNA
atggtgcacattttttatattttgaagagattgtgggttagagattttgtaaaaacctggaatgcaatacgagct

SEQ ID NO: 826982 - DNA, 75 bp, synthetic construct
  source 1..75: mol_type = other DNA
caggtatgcaagcaggcgcttaagtactgccgcaagcgacgctacgcaattaccaacgttctagatgatatggtt

SEQ ID NO: 826983 - DNA, 75 bp, synthetic construct
  source 1..75: mol_type = other DNA
actgagatacgacgttcttgcgtgcaggagtggaacttcgaagaaatgctctggatcgtaccgaaggaacacagc

SEQ ID NO: 826984 - DNA, 75 bp, synthetic construct
  source 1..75: mol_type = other DNA
cttaacaatggccccatccaatccggttgtgaatgaaaccaatgaggccaaagagtacctggctgaatatccgca

SEQ ID NO: 826985 - DNA, 75 bp, synthetic construct
  source 1..75: mol_type = other DNA
gtgaatgcctggcttatccccgatcgcattgaagatcagtcatgggcacgacaccaccagcaaattgcccgtgaa

SEQ ID NO: 826986 - DNA, 75 bp, synthetic construct
  source 1..75: mol_type = other DNA
aaaacccaatggaacaacgggatatctgtcaaaaaaagacgttccattaaagacaaacaacgcagcgccaacaac

SEQ ID NO: 826987 - DNA, 75 bp, synthetic construct
  source 1..75: mol_type = other DNA
tgagccccctgtattccagtgagccggtcaatgaggcggaagtgctgggggcggcagtgtggctatggatgcatt

SEQ ID NO: 826988 - DNA, 75 bp, synthetic construct
  source 1..75: mol_type = other DNA
gtataacagcagcgcgttgcgcccgaacaggccacagggtaaaacctgtggcctttttcgttttatccagccaca

SEQ ID NO: 826989 - DNA, 75 bp, synthetic construct
  source 1..75: mol_type = other DNA
atgcgtaacgggaaatatgacgttctgagtcccctgtattccggtgagccggtcaatgaggcggaagtcctgggg

SEQ ID NO: 826990 - DNA, 75 bp, synthetic construct
  source 1..75: mol_type = other DNA
ggcccgcgtggtctggcggaggacaccaccgtggtgtacctggtgacggaaggcccggtttcccgcacccttttg

SEQ ID NO: 826991 - DNA, 75 bp, synthetic construct
  source 1..75: mol_type = other DNA
acccgcctgtccgcacttgatatttatgaaagcgcctgtaatgaaggtgccggtgttcacgacgtagcaagggga

SEQ ID NO: 826992 - DNA, 75 bp, synthetic construct
  source 1..75: mol_type = other DNA
atttttttagaaagattccaacggcacttcttgtagctattacatgtggtttaagtttgatcctttttttgccag

SEQ ID NO: 826993 - DNA, 75 bp, synthetic construct
  source 1..75: mol_type = other DNA
gatgctgaacatctcatcttcatagcacgctttaccctgaacagactggatgtgatcatccagacgaaaagtgat

SEQ ID NO: 826994 - DNA, 75 bp, synthetic construct
  source 1..75: mol_type = other DNA
aacgtatagagaaatcagctcctatagtcggttcatatatattaaaactacttgaggatagaaactgtattagta

SEQ ID NO: 826995 - DNA, 75 bp, synthetic construct
  source 1..75: mol_type = other DNA
gacaacagccaccaaccattgaagccagtagttactacggcagttttggcagctggcgctatgggctgaaagcta

SEQ ID NO: 826996 - DNA, 75 bp, synthetic construct
  source 1..75: mol_type = other DNA
agcgacatctgtagcagccgcatctgcgacggaagatgaaggtctggatgacctactgagagagctggactctct

SEQ ID NO: 826997 - DNA, 75 bp, synthetic construct
  source 1..75: mol_type = other DNA
cagtcaaagagtctgaagcagtcgcagcgacatctgtagcaaccgcatctgcgacggaagatgaaggtctggatg

SEQ ID NO: 826998 - DNA, 75 bp, synthetic construct
  source 1..75: mol_type = other DNA
atagtatcagaggaagtttaacgacaaagttaatttcgtcaatgaaagtcgcgtctccaactgatgaattaattt

SEQ ID NO: 826999 - DNA, 75 bp, synthetic construct
  source 1..75: mol_type = other DNA
cgctcgtacccaaaatggatattgaggtcgcgggtaatcccgacatcacgccgggaatggttattgagatcctcg

SEQ ID NO: 827000 - DNA, 75 bp, synthetic construct
  source 1..75: mol_type = other DNA
gcgctgatttgtgtcgatcgtaataaacttgaacaactgagcgcagaaaaacgccgtcgcacggcgctgatgttc

SEQ ID NO: 827001 - DNA, 75 bp, synthetic construct
  source 1..75: mol_type = other DNA
agcaatttcctctaccgcgaaaacatcgaccgcggcactgcctggatttggctctgtcactggtcatacggaggg

SEQ ID NO: 827002 - DNA, 75 bp, synthetic construct
  source 1..75: mol_type = other DNA
actgtggcaggcagtggtgaattacgtctgaatggcgcgatgcctgaacgctggcgggtgtcactgccggtaagt

SEQ ID NO: 827003 - DNA, 75 bp, synthetic construct
  source 1..75: mol_type = other DNA
tgtagccgacatgcttatgtacgccgctgttgttgatgatggcgtgatcgtatgtaagaacggttcctttatggc

SEQ ID NO: 827004 - DNA, 75 bp, synthetic construct
  source 1..75: mol_type = other DNA
cattcgaaaaccatgtctgaatttacggtcacggtacagaacaatgtcgttcgtgaggcgctcaagcaatacacc

SEQ ID NO: 827005 - DNA, 75 bp, synthetic construct
  source 1..75: mol_type = other DNA
agcagagtttatgcgcaaggctgttaacaaaaccggcttcgccgcacgaattgaaaccgttaacacgatggatgc

SEQ ID NO: 827006 - DNA, 75 bp, synthetic construct
  source 1..75: mol_type = other DNA
taaagcgattggcagactcggcaacggctggatgatgcacgttgatgcaatgcgtaccccggctccgtcatacag

SEQ ID NO: 827007 - DNA, 75 bp, synthetic construct
  source 1..75: mol_type = other DNA
tggcgaagaaaaactgctccgtctttatggcaacccagcagctgggtgacgcggctaagtccggcatccttgacg

SEQ ID NO: 827008 - DNA, 75 bp, synthetic construct
  source 1..75: mol_type = other DNA
ggcgtggagaacgtgcgtcgcccgttggtcaatacgctcaatctggccgatttgatgcctacaagcacaatctgg

SEQ ID NO: 827009 - DNA, 75 bp, synthetic construct
  source 1..75: mol_type = other DNA
cgctttatctactcgtccgtcagtgcctggcagcatcatcagagcaaaaaagaagctcaacaatccacactctct

SEQ ID NO: 827010 - DNA, 75 bp, synthetic construct
  source 1..75: mol_type = other DNA
tggaagggggggtgaccagcacacgtaatccgtgggtgtggaaagtcggacatggaaatgaaagcctggaggtta

SEQ ID NO: 827011 - DNA, 75 bp, synthetic construct
  source 1..75: mol_type = other DNA
aaggcttctgatattccgggtgttctgcagaagatgttcagtggtgaaggtcccggctggctgcagacaatgaca

SEQ ID NO: 827012 - DNA, 75 bp, synthetic construct
  source 1..75: mol_type = other DNA
atgaagaaggtgacgttgtttctgtttgttgtcagcctcctgccctccactgtactggcctggaacacgccggga

SEQ ID NO: 827013 - DNA, 75 bp, synthetic construct
  source 1..75: mol_type = other DNA
acgtgaggggttggctccccgaattatattcggaaaaggtattgaggatttttctctggtgtgggccacaccagg

SEQ ID NO: 827014 - DNA, 75 bp, synthetic construct
  source 1..75: mol_type = other DNA
tgatgatgtgtttttttccattcagtgttctggcctggaatacacccggacaggatttcagtggagaacttaaac

SEQ ID NO: 827015 - DNA, 75 bp, synthetic construct
  source 1..75: mol_type = other DNA
attgaaactgaaaaaaaaattaccgctactggtgttaaaaattcctcaacgcgattatcagttgctggagatata

SEQ ID NO: 827016 - DNA, 75 bp, synthetic construct
  source 1..75: mol_type = other DNA
actcagtggatattgcagcggtgatcggcactatcttcggtattgccactacgctcggtatcggtgtggtgcagc

SEQ ID NO: 827017 - DNA, 75 bp, synthetic construct
  source 1..75: mol_type = other DNA
ttataatttgccgctcaccatccgctcggcgctgtacccgatcttcggtaaacggattaacgggccgataggtcc

SEQ ID NO: 827018 - DNA, 75 bp, synthetic construct
  source 1..75: mol_type = other DNA
acccgtcagccctgactgcgccggtgtggggcttctacgacgtctcctttaaaggtgaatcgttccgcttccagc

SEQ ID NO: 827019 - DNA, 75 bp, synthetic construct
  source 1..75: mol_type = other DNA
cagaccgcgctgctctacctgatgacccgcgagcagcgggcggtcaggcatcagggcgagagcgatatggcagga

SEQ ID NO: 827020 - DNA, 75 bp, synthetic construct
  source 1..75: mol_type = other DNA
gttacatatttttctaatttgttgcctatagaaatagtacgtattccacataatgttggattggggcaggcgttg

SEQ ID NO: 827021 - DNA, 75 bp, synthetic construct
  source 1..75: mol_type = other DNA
cagaccgcgctgctttacctgatgacccgtgaacaacgagcggtcaggcaccagggcgagagtgatatggcagga

SEQ ID NO: 827022 - DNA, 75 bp, synthetic construct
  source 1..75: mol_type = other DNA
aaagtggcttccaccgccgtggtcgccgaaatgctcggcctgacccgcgaggaaattctcaacgccgtttcgctg

SEQ ID NO: 827023 - DNA, 75 bp, synthetic construct
  source 1..75: mol_type = other DNA
accccgtccaggcggcatttaacatcggcgcgatgatccgctggctcgatttcaacgatacctggctggcggcgg

SEQ ID NO: 827024 - DNA, 75 bp, synthetic construct
  source 1..75: mol_type = other DNA
ttcaacgatacctggctggcggcggagtgggggcatccttccgacaacctcggcggcattctggcaacggcagac

SEQ ID NO: 827025 - DNA, 75 bp, synthetic construct
  source 1..75: mol_type = other DNA
gataaattcaaaatcaatctcgcgcgccagttcccgactcgccaacagcagcgcattctggaggtttctctcgac

SEQ ID NO: 827026 - DNA, 75 bp, synthetic construct
  source 1..75: mol_type = other DNA
cgacactctcggctgcggtctggaagctctcgaatacccggcctgtaaaaaactgctggggccaattgtccccgg

SEQ ID NO: 827027 - DNA, 75 bp, synthetic construct
  source 1..75: mol_type = other DNA
accccgtccaggcggcatttaacattggcgcgatgatccgttggctcgatttcaacgatacctggctggcggcgg

SEQ ID NO: 827028 - DNA, 75 bp, synthetic construct
  source 1..75: mol_type = other DNA
agacgataaatgtaaaagcacaagatttgaacggcaacttgaaattataaaaataaaaaatgatatcgtgttgat

SEQ ID NO: 827029 - DNA, 75 bp, synthetic construct
  source 1..75: mol_type = other DNA
tgccgaattgcgtcaaaaagtacgtaatagtgcagatttcaaaccacttccgacggaaatccgctcgcttttccc

SEQ ID NO: 827030 - DNA, 75 bp, synthetic construct
  source 1..75: mol_type = other DNA
ttacggatatgagttacttaaaatgatagatttctcttcatttaatggcggttcagctgttccaacattaaaccg

SEQ ID NO: 827031 - DNA, 75 bp, synthetic construct
  source 1..75: mol_type = other DNA
gttacagcgtggcaacgcaaagaagggcacgggcaactggcggacgggattctgacattgccagcgatatcggcc

SEQ ID NO: 827032 - DNA, 75 bp, synthetic construct
  source 1..75: mol_type = other DNA
aacaaggaacgcattaattattgaaactgaaaaaaaattaccgctactggtgttaaaaattcctcaacgcgatta

SEQ ID NO: 827033 - DNA, 75 bp, synthetic construct
  source 1..75: mol_type = other DNA
agttatagttatgaaaaagaagtttctaatgtcattggtattttagatgataaaataaatttaaataaaaagatc

SEQ ID NO: 827034 - DNA, 75 bp, synthetic construct
  source 1..75: mol_type = other DNA
agctgattgagctgccgtctacggtcttcgacgatatctgcaaagtgatgtccgaagatattgcggacgatattg

SEQ ID NO: 827035 - DNA, 75 bp, synthetic construct
  source 1..75: mol_type = other DNA
aaagcgccgtggaatatggacggctggcggctggatgtggtgcatatgctgggggaagcgggtggggcgcgcaat

SEQ ID NO: 827036 - DNA, 75 bp, synthetic construct
  source 1..75: mol_type = other DNA
gaagcggcgaaagaaacccagccggaagcgtatatcgttggagagcattttggcgatgcacggcaatggttacag

SEQ ID NO: 827037 - DNA, 75 bp, synthetic construct
  source 1..75: mol_type = other DNA
aatgattgcgctgcgtaagaaaagtcaggcgctgcgtcgtggcggctgtcaggtgctgtatgcggaagataacgt

SEQ ID NO: 827038 - DNA, 75 bp, synthetic construct
  source 1..75: mol_type = other DNA
ggcataccgtgtatttattacggtgatgaagtgggggtggatggcaaaaacgatccgttttgccgtaaaccgttc

SEQ ID NO: 827039 - DNA, 75 bp, synthetic construct
  source 1..75: mol_type = other DNA
tattgtggcacgatcgccagcgttggtttacaccgcagggcttcagccgaatgccgccagcacgactggagcagt

SEQ ID NO: 827040 - DNA, 75 bp, synthetic construct
  source 1..75: mol_type = other DNA
tttggcgatgcacggcaatggttacaggccgatgtggaagatgccgccatgaactatcgcggcttcacattcccg

SEQ ID NO: 827041 - DNA, 75 bp, synthetic construct
  source 1..75: mol_type = other DNA
catcatgtgcatatgtttccgcagattttcccgattgtggccaggtttgccgctgaagaggggattgcgttgcgc

SEQ ID NO: 827042 - DNA, 75 bp, synthetic construct
  source 1..75: mol_type = other DNA
aaagatgctctcaaacacacatacctcggttatgaaagcaaagaactggttgatgtcgtaaccggtgaaatcact

SEQ ID NO: 827043 - DNA, 75 bp, synthetic construct
  source 1..75: mol_type = other DNA
tcggttatgaaaccaaggacctggttgatgtcgtaaccggcgaaatcactactatccagtcattacgccatacct

SEQ ID NO: 827044 - DNA, 75 bp, synthetic construct
  source 1..75: mol_type = other DNA
cctgataagcgcggcggggcgaaaattccagagcgcggcgtgcgcagcaatagttgagcagttacgtcgtctgcc

SEQ ID NO: 827045 - DNA, 75 bp, synthetic construct
  source 1..75: mol_type = other DNA
ctggaggtgatgtgtcatccggcgtttatcgataatactatccgtcagagtgcttactgtttcccacgcttgtgg

SEQ ID NO: 827046 - DNA, 75 bp, synthetic construct
  source 1..75: mol_type = other DNA
actcaggagcttgccagtcagtatttgcgtttcattgagctatttggacgcaaacctacgcatcttgatagccat

SEQ ID NO: 827047 - DNA, 75 bp, synthetic construct
  source 1..75: mol_type = other DNA
gaccttcgctacgcctgagtgggtcaaagacgcgatgaagcacacctatctcggctacgaaagcaaggaccgtgt

SEQ ID NO: 827048 - DNA, 75 bp, synthetic construct
  source 1..75: mol_type = other DNA
cctcatcagcaggggtaaaacgttcgccactccagcttgggtaaaagatgctctcaaacacacatatctcggtta

SEQ ID NO: 827049 - DNA, 75 bp, synthetic construct
  source 1..75: mol_type = other DNA
aacgttcgccactccagcttgggtaaaagatgctctcaaacacacatatctcggttatgaaaccaaagacctggt

SEQ ID NO: 827050 - DNA, 75 bp, synthetic construct
  source 1..75: mol_type = other DNA
tcggttatgaaaccaaagacctggttgatgtcgtaaccggtgattgtagtggtcaagtaatattggccacggttt

SEQ ID NO: 827051 - DNA, 75 bp, synthetic construct
  source 1..75: mol_type = other DNA
gggtgtgtgggaagacgacagtcaggtgaaaagaatgctggtggagtggggaccggttatcccggaagggaaggt

SEQ ID NO: 827052 - DNA, 75 bp, synthetic construct
  source 1..75: mol_type = other DNA
cagagctggaaacgggcgagatgtacattttcctgtgcaaagtcgaagcctgggcgatgaatatcggctgccacc

SEQ ID NO: 827053 - DNA, 75 bp, synthetic construct
  source 1..75: mol_type = other DNA
ttccagagcgcggcgtgcgcagcaatagttgagcagttacgtcgtctgccgaaaccaacgtcggcacctgcttca

SEQ ID NO: 827054 - DNA, 75 bp, synthetic construct
  source 1..75: mol_type = other DNA
atgaagctgatcgtgcctttcccacccagcgtgaacacgtactggcgacaccccaacaaaggggagtttgctggt

SEQ ID NO: 827055 - DNA, 75 bp, synthetic construct
  source 1..75: mol_type = other DNA
atgaagctgatcctgcctttcccccccagcgtgaacacgtactggcgacaccccaacaaaggggcgtttgctggt

SEQ ID NO: 827056 - DNA, 75 bp, synthetic construct
  source 1..75: mol_type = other DNA
atgaagctgatcttgcctttcccacccagcgtgaacacgtactggcgacaccccaacaaaggggtgtttgctggt

SEQ ID NO: 827057 - DNA, 75 bp, synthetic construct
  source 1..75: mol_type = other DNA
atcgcaggtcatgcccgcagtcgggggctgattattgtgactaataacacccgggaatttgaacgtgtgggcggc

SEQ ID NO: 827058 - DNA, 75 bp, synthetic construct
  source 1..75: mol_type = other DNA
tgacgtgctggattacgactgcgctgctgccacacataccggtcagatccgtgctgagctcgcccgtcagggacg

SEQ ID NO: 827059 - DNA, 75 bp, synthetic construct
  source 1..75: mol_type = other DNA
ggaccggttatcccgaaagggaaggtcgagatcactatcagtaagtacgagaaaacggcgggtgcagccgcctga

SEQ ID NO: 827060 - DNA, 75 bp, synthetic construct
  source 1..75: mol_type = other DNA
tccggatagacgggatggaaaaccgccgccatcgcctgaactgggaaatgagccgggacaggtgtttgcggcttg

SEQ ID NO: 827061 - DNA, 75 bp, synthetic construct
  source 1..75: mol_type = other DNA
atgaaactgaatctggattcgttaaaacaggcaggggcgtttactggtcgtcctgttgagaaggaaatcacctgg

SEQ ID NO: 827062 - DNA, 75 bp, synthetic construct
  source 1..75: mol_type = other DNA
atgaagcttatcctgcctttcccgcccagcgtgaacacttactggcgacaccctaacaaaggggcgtttgcaggt

SEQ ID NO: 827063 - DNA, 75 bp, synthetic construct
  source 1..75: mol_type = other DNA
atgaagctgatcatgcctttcccgcccagcgtgaacacgtactggcgacaccccaacaaaggggagtttgctggt

SEQ ID NO: 827064 - DNA, 75 bp, synthetic construct
  source 1..75: mol_type = other DNA
atgaagctgatcatgcctttcccacccagcgtgaacacgtactggcgacaccccaacaaaggggggtttgctggt

SEQ ID NO: 827065 - DNA, 75 bp, synthetic construct
  source 1..75: mol_type = other DNA
agcaatagttgagcagttacgtcgtttgccgaaaccaacgtcggcaccagcttcagtagagattgtgttgtttcc

SEQ ID NO: 827066 - DNA, 75 bp, synthetic construct
  source 1..75: mol_type = other DNA
aattgcatcgcggcaacttcatcgctatcggccagcagatccagccttatctggaggacggaaaatgctttcgca

SEQ ID NO: 827067 - DNA, 75 bp, synthetic construct
  source 1..75: mol_type = other DNA
ccttatgagcaaattttggcgggtcgtgagtttggggtaaaccatgacgccgattttctggcgatgaaccctaac

SEQ ID NO: 827068 - DNA, 75 bp, synthetic construct
  source 1..75: mol_type = other DNA
atttaggtgctggtataggatattctgtgctagatattataaataaatttgaggaagttaatggagttaaagtga

SEQ ID NO: 827069 - DNA, 75 bp, synthetic construct
  source 1..75: mol_type = other DNA
tctgatccatctctagcatttttagaattagggtggtcttctcgatatgatttagatacaatgataattgattct

SEQ ID NO: 827070 - DNA, 75 bp, synthetic construct
  source 1..75: mol_type = other DNA
caaactcgatggtgttaaaccaccgaagaaagagaccatggaacgcgtgaaaggcattcttgagcagtacggtca

SEQ ID NO: 827071 - DNA, 75 bp, synthetic construct
  source 1..75: mol_type = other DNA
acaaagatgtgaaggtctggatccgctacgttgtagtcccgggctggtctgacgatgacgattccgcccaccgtc

SEQ ID NO: 827072 - DNA, 75 bp, synthetic construct
  source 1..75: mol_type = other DNA
atgagtaatttaaatcactgtaatacaacagaaaaccccgctgcatcgggagctaccaagccagttattggtcgc

SEQ ID NO: 827073 - DNA, 75 bp, synthetic construct
  source 1..75: mol_type = other DNA
ataatttaggtactggaaaaggttattcggttcttgacttaataaaaacttttgaacaaataacaaatgtcgctg

SEQ ID NO: 827074 - DNA, 75 bp, synthetic construct
  source 1..75: mol_type = other DNA
tcccttgctgtattataaaaataatgtacaaggttctctttgtcttattactgaaatggcaaaggcgggggttta

SEQ ID NO: 827075 - DNA, 75 bp, synthetic construct
  source 1..75: mol_type = other DNA
acctatattttattatgataataatgttgcagggacgttgcaattaatcaattgcgctataaaaaacgatgtggc

SEQ ID NO: 827076 - DNA, 75 bp, synthetic construct
  source 1..75: mol_type = other DNA
aaagtatgctttcatgaaggcgatataagagatgaaagatttttgaaatctgtttttaaggaacatgtcattacg

SEQ ID NO: 827077 - DNA, 75 bp, synthetic construct
  source 1..75: mol_type = other DNA
tattaaaatggaaagccaaatactctctggaagatatgcttaaagatgcttggcgatgggaatgtaataatccta

SEQ ID NO: 827078 - DNA, 75 bp, synthetic construct
  source 1..75: mol_type = other DNA
cagggtacattggttctcataccataatagatttattagaaaataattaccaagttgtagccatagacaatttat

SEQ ID NO: 827079 - DNA, 75 bp, synthetic construct
  source 1..75: mol_type = other DNA
gatatctgtatcattaatggtgatattcgagatcgtgttattttaaaatccatctttactgaaaacagcataaca

SEQ ID NO: 827080 - DNA, 75 bp, synthetic construct
  source 1..75: mol_type = other DNA
aacttcattgggaagctaagcgtagtcttgaggatatggttattgatgcttggaactggcaaaataagaatccaa

SEQ ID NO: 827081 - DNA, 75 bp, synthetic construct
  source 1..75: mol_type = other DNA
cggcgtgatcccggaatcgctggagccacacatcggcttaacgccgacggtcgaagcgatgattgaacctgcgct

SEQ ID NO: 827082 - DNA, 75 bp, synthetic construct
  source 1..75: mol_type = other DNA
atgcgtattttagtcttaggggtcggcaatattttgttgaccgatgaagccatcggtgtgcggattgttgaagcg

SEQ ID NO: 827083 - DNA, 75 bp, synthetic construct
  source 1..75: mol_type = other DNA
acgcagtctttcccagaatgcactcagccacatgtggtacagcgaaatcagtgaatacctcatcagcaggggtaa

SEQ ID NO: 827084 - DNA, 75 bp, synthetic construct
  source 1..75: mol_type = other DNA
catcttcctgtgcaaagtcgaagcctgggcgatgaacatcggctgtcacctgaccatcccttccgactcccaata

SEQ ID NO: 827085 - DNA, 75 bp, synthetic construct
  source 1..75: mol_type = other DNA
atggattggcagatgagcggcaagcccttgctgctctacctagacaacgcggccgagttcaagagcgaggccctg

SEQ ID NO: 827086 - DNA, 75 bp, synthetic construct
  source 1..75: mol_type = other DNA
ctacggaaatgattatcctactaaagatggtactgggattcgcgattatattcatgttatggatcttgctgaagg

SEQ ID NO: 827087 - DNA, 75 bp, synthetic construct
  source 1..75: mol_type = other DNA
aattaggatggaaagcaaggcgagggttagaagatatgattcgtgatgcatggaattggcagcaaaaaaatccaa

SEQ ID NO: 827088 - DNA, 75 bp, synthetic construct
  source 1..75: mol_type = other DNA
tacccgtaaaagaaacattccctgtaggtggcactactaatccctatgggacttcaaaacttatggttgagaaaa

SEQ ID NO: 827089 - DNA, 75 bp, synthetic construct
  source 1..75: mol_type = other DNA
ttccaatatctgaatcaagtaaaattggtggtacaacaaatccatatgggacgtcaaaattatttgctgagcaaa

SEQ ID NO: 827090 - DNA, 75 bp, synthetic construct
  source 1..75: mol_type = other DNA
gtcggtgctgtgagcggtgaacttatcgcaggtgcaatcgcgaaggttttatatccggatgagaaagacctgtcg

SEQ ID NO: 827091 - DNA, 75 bp, synthetic construct
  source 1..75: mol_type = other DNA
gataatggaagcaactataaaatttttaatttaggtacaggaaaaggatattccgtactcgatcttatttcagct

SEQ ID NO: 827092 - DNA, 75 bp, synthetic construct
  source 1..75: mol_type = other DNA
tcgggcaggaagcagtagaggaaatcgaatcaaaccataaccgctatcgctggactgtcgaagagtgcagggcca

SEQ ID NO: 827093 - DNA, 75 bp, synthetic construct
  source 1..75: mol_type = other DNA
cacctgacagttacgacatcaatctggcgctgccttgctcaccggggaaacttgtttttcgcgaaagtacgaatc

SEQ ID NO: 827094 - DNA, 75 bp, synthetic construct
  source 1..75: mol_type = other DNA
ggttctggggccagagtccatgtggaaacggaatgttagacatcaccgtacctatgaagcgctggttcttgactg

SEQ ID NO: 827095 - DNA, 75 bp, synthetic construct
  source 1..75: mol_type = other DNA
atcagagagtgcttgaggaaggtctgaaaaaggcgaagccattggccgcgcaaatggggcttgaatctgtacctg

SEQ ID NO: 827096 - DNA, 75 bp, synthetic construct
  source 1..75: mol_type = other DNA
ggatatcgaacttcgccgctcaatgtggggctttttgaaggatttaaacgacaaaggcaccaccatcattctcac

SEQ ID NO: 827097 - DNA, 75 bp, synthetic construct
  source 1..75: mol_type = other DNA
gtggcccaagaggggtcagacctgatctcttattctatatcgaggcagcatggcagcgcagagaaatggataaga

SEQ ID NO: 827098 - DNA, 75 bp, synthetic construct
  source 1..75: mol_type = other DNA
ttaagggggattctttattttctgatggtgaataccggcatgcaattatcgcttccgcagcaacatctttcgccg

SEQ ID NO: 827099 - DNA, 75 bp, synthetic construct
  source 1..75: mol_type = other DNA
cggcctccgtatttgcggcaatgctggcgcatcgcactgctggcgggtgtgcctcgctgagtgaatacaccgctg

SEQ ID NO: 827100 - DNA, 75 bp, synthetic construct
  source 1..75: mol_type = other DNA
gacaccctttatttcacagtagacgactgctaccgcgtggacttcacaccacacgggctggcgttgcactgcctg

SEQ ID NO: 827101 - DNA, 75 bp, synthetic construct
  source 1..75: mol_type = other DNA
tggggctttttgaaggatttaaacgacaaaggcaccaccatcattctcaccacacactacctggaagaagcagaa

SEQ ID NO: 827102 - DNA, 75 bp, synthetic construct
  source 1..75: mol_type = other DNA
tatggtgatggtataggctattttctgaaagatgccattgaccagaaatatgtaaaactcccttttatttattct

SEQ ID NO: 827103 - DNA, 75 bp, synthetic construct
  source 1..75: mol_type = other DNA
gcgctattgtgggcataactgattttaagaacaagactattattctggttgatgtgctcccagaacctatcgaca

SEQ ID NO: 827104 - DNA, 75 bp, synthetic construct
  source 1..75: mol_type = other DNA
gtgcaggcatcgctggatatcggtagcgcgattttaatggccgccacgttgggatttattggcctgggtgctcaa

SEQ ID NO: 827105 - DNA, 75 bp, synthetic construct
  source 1..75: mol_type = other DNA
taccacctttgaggtgccgaggactctagcgttaaaagatgatatacccagaatagttagcctgtttctgactcc

SEQ ID NO: 827106 - DNA, 75 bp, synthetic construct
  source 1..75: mol_type = other DNA
atgtttgtgaaacctgttaaagggcggtcagtgcctgaccctgcccgcggtgaccttttgcccgccgaagggcga

SEQ ID NO: 827107 - DNA, 75 bp, synthetic construct
  source 1..75: mol_type = other DNA
actggatggcggcctgacggtagcactgcttctggccattcaggaagttaacgatctgggaaagacttcgagctc

SEQ ID NO: 827108 - DNA, 75 bp, synthetic construct
  source 1..75: mol_type = other DNA
atatctggatacgaatcggctggggacactggacatttatcgatcctgacaaactccttccacataatctgcccc

SEQ ID NO: 827109 - DNA, 75 bp, synthetic construct
  source 1..75: mol_type = other DNA
tttccggtgttgatgaaacaactggagctgaaactggctgacggtgaactctccccctgccaacaacgtaccgtc

SEQ ID NO: 827110 - DNA, 75 bp, synthetic construct
  source 1..75: mol_type = other DNA
ctggcttttggtggtaaggtcgatggtgtggcagggcgtatcgccgcatccatctgcgatgaacatggtaaaccc

SEQ ID NO: 827111 - DNA, 75 bp, synthetic construct
  source 1..75: mol_type = other DNA
aactctcggcagccgaggtggcaatatggtcgatcaggactggatggattccagtaaccccggaacctggacaga

SEQ ID NO: 827112 - DNA, 75 bp, synthetic construct
  source 1..75: mol_type = other DNA
agcccggctccaattataatacaggtaccgacacagcaaccattaacgagcgctccaactaaccaatcgtcatca

SEQ ID NO: 827113 - DNA, 75 bp, synthetic construct
  source 1..75: mol_type = other DNA
agttcaatttgcggtggcctaaagaagtattggatttggtccgcaaggtggcggaagagaatggtcggtctgtta

SEQ ID NO: 827114 - DNA, 75 bp, synthetic construct
  source 1..75: mol_type = other DNA
ggttcttacatgattaatacccttcattttaccggcgcaaatgtcggtatggtctatagctccaaagggattgct

SEQ ID NO: 827115 - DNA, 75 bp, synthetic construct
  source 1..75: mol_type = other DNA
aagcaaggcgataaggagatcacagctaccgtttatatccgaccaatgggttatcacgacgcggtatcaaatgtt

SEQ ID NO: 827116 - DNA, 75 bp, synthetic construct
  source 1..75: mol_type = other DNA
atcaatgccccattatatgtatatggtagtgatgatgataaacaattccaagaaaaattgaagaaacatcaaaac

SEQ ID NO: 827117 - DNA, 75 bp, synthetic construct
  source 1..75: mol_type = other DNA
caaagtttgttaatcaaccaaatggtggtatacaggcaacattacatttaatggatgcaatgaaaaaggcaaata

SEQ ID NO: 827118 - DNA, 75 bp, synthetic construct
  source 1..75: mol_type = other DNA
atcaccctgcgcggcggcgagttacgccactggcaagcaggaaaaggattatctgcgccgcttgccggtgtgccg

SEQ ID NO: 827119 - DNA, 75 bp, synthetic construct
  source 1..75: mol_type = other DNA
agaaaactggagtcagcatttaagtctctggaaatgagctatcagcgtcagatagcgctgattgacacaactggc

SEQ ID NO: 827120 - DNA, 75 bp, synthetic construct
  source 1..75: mol_type = other DNA
gtgaccagatggccgatatcctcaaggatattggcgataaaattggtgatgctgtactgaataaatctggggaag

SEQ ID NO: 827121 - DNA, 75 bp, synthetic construct
  source 1..75: mol_type = other DNA
aagctagagaacgtattctcgcacaacaatcattagataaaattttagtagaccagactatcggtactaatgagc

SEQ ID NO: 827122 - DNA, 75 bp, synthetic construct
  source 1..75: mol_type = other DNA
ggttggccgctggcaacctggggtattaattactcaggttttaaaataccggaagcaaaaggggaaatcgtcgcc

SEQ ID NO: 827123 - DNA, 75 bp, synthetic construct
  source 1..75: mol_type = other DNA
agcaaatagccgcacagaaagcactagataaaatcttagtagatcaaactaccggtactaatgagcgtcaattag

SEQ ID NO: 827124 - DNA, 75 bp, synthetic construct
  source 1..75: mol_type = other DNA
atgctgaagtttatgctcgataccaacatctgcatttttacgataaagaacaaacccgccagtgtcagggaacgt

SEQ ID NO: 827125 - DNA, 75 bp, synthetic construct
  source 1..75: mol_type = other DNA
gcatggccttctataacagcgacaaattcccccagtggcagcaaaaattatttattggcgcgctgaaagataaag

SEQ ID NO: 827126 - DNA, 75 bp, synthetic construct
  source 1..75: mol_type = other DNA
gatgatctctcaaaagtgaccgacttccgcaccgtctttcgccagatgccaaaactgtctaccggcaaccatttt

SEQ ID NO: 827127 - DNA, 75 bp, synthetic construct
  source 1..75: mol_type = other DNA
ttataggcgcgctgaaagataaagatgtcattgtgatgagcgtcaacggcgacaaagtgacagaagatggccgta

SEQ ID NO: 827128 - DNA, 75 bp, synthetic construct
  source 1..75: mol_type = other DNA
gtaggtagttttgttgatcggcgataccgagagttgataggccgtgacctttcacccggtggcgcggtctggaat

SEQ ID NO: 827129 - DNA, 75 bp, synthetic construct
  source 1..75: mol_type = other DNA
taccgactctgccacgaattatttcggaggcgcgtaagtttggcggctgttttgtcctgggcttccagagcttcg

SEQ ID NO: 827130 - DNA, 75 bp, synthetic construct
  source 1..75: mol_type = other DNA
tcgcccggatgatgaaaaaacgcggagaagcatccgatatccgtatcgatgggctgccgctgaaactcgattctg

SEQ ID NO: 827131 - DNA, 75 bp, synthetic construct
  source 1..75: mol_type = other DNA
agatgcttgaagatgaaattacccgtcgcaccgaagaagaacggcataagtttgccggcctgttcgaaggggcat

SEQ ID NO: 827132 - DNA, 75 bp, synthetic construct
  source 1..75: mol_type = other DNA
gtcctcagtgaatccccaaaagacgtcgcccggatgatgaaaaaacgcggagaagcatccgatattcgcatcgat

SEQ ID NO: 827133 - DNA, 75 bp, synthetic construct
  source 1..75: mol_type = other DNA
tctgaagttcagcgaacagaccagctttggccatgaacaggtgcgtgacggtatctcgtttggtaaggaagaaga

SEQ ID NO: 827134 - DNA, 75 bp, synthetic construct
  source 1..75: mol_type = other DNA
ctatctttgctgaaggcgcagagcgtatgcgtcaggataaagaccgcagctataacaaatttctccgtacacttc

SEQ ID NO: 827135 - DNA, 75 bp, synthetic construct
  source 1..75: mol_type = other DNA
cggatcgccggtatacccgaatcatcatgaatccgccgtttcatcgcggtgatgatatccggcatatccggcggg

SEQ ID NO: 827136 - DNA, 75 bp, synthetic construct
  source 1..75: mol_type = other DNA
atgcatcatgaccttaaacaccgtattcaggcgatgcgggacaaactggaggggcgcgcccctgtcgctgaaatt

SEQ ID NO: 827137 - DNA, 75 bp, synthetic construct
  source 1..75: mol_type = other DNA
gcttatctatggggcagaaaaaagtcagatgccagaacgcaatttggcggttattgaaggtttcgtatctcgttt

SEQ ID NO: 827138 - DNA, 75 bp, synthetic construct
  source 1..75: mol_type = other DNA
tgagtcgctcaaaccgttgatttccatgtggctcagtattgccgccaccagtctgctggcgatgggggaaaatcg

SEQ ID NO: 827139 - DNA, 75 bp, synthetic construct
  source 1..75: mol_type = other DNA
acgatgtccggtgtgctctgtccggaaatcaccggcggggaggtgtcactgactgccctgaacaccctggcctac

SEQ ID NO: 827140 - DNA, 75 bp, synthetic construct
  source 1..75: mol_type = other DNA
taataccaacttataattcgagcataatattagaggaaaatattaaaataatcagtagctataagcagtgtaaga

SEQ ID NO: 827141 - DNA, 75 bp, synthetic construct
  source 1..75: mol_type = other DNA
cttattagctgaaggaaagaaacgtaatatttttaaatcagatattgacccattacaggtgaatattaatattgc

SEQ ID NO: 827142 - DNA, 75 bp, synthetic construct
  source 1..75: mol_type = other DNA
ttttacctgggattattacattgctaacccctggtttttaaaaattgtgcatagtgaaaaccagagcaaaggtgt

SEQ ID NO: 827143 - DNA, 75 bp, synthetic construct
  source 1..75: mol_type = other DNA
gccaaaagattcgctgggtgaaacggcgttcaacatgctgttggatcgtatcgtcaataaacgcgaagaaccgca

SEQ ID NO: 827144 - DNA, 75 bp, synthetic construct
  source 1..75: mol_type = other DNA
acgctgacccgcaccggctttgtcatcgaccacatccactactacgccgataattatcatctgcgcgggcgcatt

SEQ ID NO: 827145 - DNA, 75 bp, synthetic construct
  source 1..75: mol_type = other DNA
cggccagttaactcaaactatgctcgttattgcgccaagcataattttaaacaaaataaaccaattaacgggata

SEQ ID NO: 827146 - DNA, 75 bp, synthetic construct
  source 1..75: mol_type = other DNA
catgccgagtctgcgaaagacggctggcagcgaatgttggaatggtttaagcagtatggagggaagcggagttag

SEQ ID NO: 827147 - DNA, 75 bp, synthetic construct
  source 1..75: mol_type = other DNA
cttaagtggccattacttgctggttatttcgctatcggccgcaccactgcgctggcgctgcataccgtgagtgga

SEQ ID NO: 827148 - DNA, 75 bp, synthetic construct
  source 1..75: mol_type = other DNA
cgggaactgggctggcaagacattaaggtcgccgataacgctgacaacgatgcgcttttacgggcattacaataa

SEQ ID NO: 827149 - DNA, 75 bp, synthetic construct
  source 1..75: mol_type = other DNA
tctggcgaaactcgcccgggaactgggctggcaagacattaaggtcgccgataacgctgacaacgatgcgctttt

SEQ ID NO: 827150 - DNA, 75 bp, synthetic construct
  source 1..75: mol_type = other DNA
tggaagagtaccgtcatattccgatggtggtgatggactggggggaagcaaaagcagattttaccgatgcggtca

SEQ ID NO: 827151 - DNA, 75 bp, synthetic construct
  source 1..75: mol_type = other DNA
tgtcgcagccgcatcgccctactgccgtcttctgtggtggcgatatcatggcaatgggcgcactttgtgctgctg

SEQ ID NO: 827152 - DNA, 75 bp, synthetic construct
  source 1..75: mol_type = other DNA
aaaccagaattaaaatatatctgattaatggtgatcgactgcgctcattgcctagcacaaagaactggactcatg

SEQ ID NO: 827153 - DNA, 75 bp, synthetic construct
  source 1..75: mol_type = other DNA
caccattgatgagctatggcgggatatgtgctgggcagtggcgcgcatccaggacaagccgcgctgcattgtgag

SEQ ID NO: 827154 - DNA, 75 bp, synthetic construct
  source 1..75: mol_type = other DNA
atcactgaaactcatcctgctctcgatggctgatcgagccgatgaatacaacctgtgctatccaagcatcgaacg

SEQ ID NO: 827155 - DNA, 75 bp, synthetic construct
  source 1..75: mol_type = other DNA
catggaaaacaaatccgggcagctcatcactgaaactcatcctgctctcgatggctgatcgagccgatgaataca

SEQ ID NO: 827156 - DNA, 75 bp, synthetic construct
  source 1..75: mol_type = other DNA
cccataccggaaccatcatcaccaaagatggcgagaaaaccgtgcagttgcgcgagactccaacgacctggtgtg

SEQ ID NO: 827157 - DNA, 75 bp, synthetic construct
  source 1..75: mol_type = other DNA
atggatgcccttagccgtttgttgatgcttaacgctccacaaggaacgatcgataagaattgcgtgttaggaagt

SEQ ID NO: 827158 - DNA, 75 bp, synthetic construct
  source 1..75: mol_type = other DNA
ggtcagcgcccagaccggtaccggtgtagttttcagggagatactgaaaaggaaaatgacaaaaaccacaatgtc

SEQ ID NO: 827159 - DNA, 75 bp, synthetic construct
  source 1..75: mol_type = other DNA
tttcgctcatcggaatggggctaatttcagatacaggagaaagaaaaggggcaacaagaagggtccgggttttct

SEQ ID NO: 827160 - DNA, 75 bp, synthetic construct
  source 1..75: mol_type = other DNA
gtctgcgtgaggccatcaagtcaggcatggctgaaacgaatgcggagctgtacgagtaccgcgaacagaaaattg

SEQ ID NO: 827161 - DNA, 75 bp, synthetic construct
  source 1..75: mol_type = other DNA
ccgccggttttacgcgtctggcggacgtcccggcggacgacatcgacggtgaaagcatcagggttttttactacg

SEQ ID NO: 827162 - DNA, 75 bp, synthetic construct
  source 1..75: mol_type = other DNA
catggcggagacgaatgcggagctgtacgagtaccgcgaacagaaaattgccgccggttttacgcgtctggcgga

SEQ ID NO: 827163 - DNA, 75 bp, synthetic construct
  source 1..75: mol_type = other DNA
tcgcccgagctatcatgccgagtctgcgaaagacggctggcagcgaatgctggaatggtttacgcagtatggtgt

SEQ ID NO: 827164 - DNA, 75 bp, synthetic construct
  source 1..75: mol_type = other DNA
gccgaatctgcgaaagatggctggcagcgtatgctggaatggtttaagcagtatggtgggaagaagtcgctgtaa

SEQ ID NO: 827165 - DNA, 75 bp, synthetic construct
  source 1..75: mol_type = other DNA
caccattgatgagctgtggcgggatatgcgctgggcagtggcgcacatccaggacaagccgcgctgcatcgtgag

SEQ ID NO: 827166 - DNA, 75 bp, synthetic construct
  source 1..75: mol_type = other DNA
taagaccagatctttatccccatcctgaagatgcaatccctgatttgttacgtagaagtcacacagccacaaatg

SEQ ID NO: 827167 - DNA, 75 bp, synthetic construct
  source 1..75: mol_type = other DNA
gatatatatatacggaaagatggggatttgtttctcttgcgacagatagaaagtgttgttgcacataatttactt

SEQ ID NO: 827168 - DNA, 75 bp, synthetic construct
  source 1..75: mol_type = other DNA
tgctgcaatgaccggccatcaggtatggacttcattacatgcaaacagcgcattatctatatttgaccgtctaaa

SEQ ID NO: 827169 - DNA, 75 bp, synthetic construct
  source 1..75: mol_type = other DNA
tacttatgctgattccggtgcgaaaattgttaataaaggtactgttgaaattcagaatttaggttttgcttttgt

SEQ ID NO: 827170 - DNA, 75 bp, synthetic construct
  source 1..75: mol_type = other DNA
aacaaaagcaattcacggtgcgcgacatctcggaactggttcgtcaggggcaagatctgatggtgcaggtggtga

SEQ ID NO: 827171 - DNA, 75 bp, synthetic construct
  source 1..75: mol_type = other DNA
aggtgtatgaacacgaagctgatatcgaaataagacgcaatggcgatttgcgtttgcttagacagattaatgcgg

SEQ ID NO: 827172 - DNA, 75 bp, synthetic construct
  source 1..75: mol_type = other DNA
agggactatatgtgtacatgatgcggccgaaaaagttagtcatatagaaaaaatttcttctgaaagaaaagcttt

SEQ ID NO: 827173 - DNA, 75 bp, synthetic construct
  source 1..75: mol_type = other DNA
ccggaccgacgggttcgggtaaatcaacaaccctgaaaaatttacttgagttattgtatatcgaaaaaaagaaaa

SEQ ID NO: 827174 - DNA, 75 bp, synthetic construct
  source 1..75: mol_type = other DNA
aatggaaggacaatcctcgcggaggttattgaaccggactcaaaattactaaggttggttgctgaaggtaagcga

SEQ ID NO: 827175 - DNA, 75 bp, synthetic construct
  source 1..75: mol_type = other DNA
tttcgccgctgttcgatgcagaacgcttcggcattaaagtcgttccttcaccgcgtcatgcggatattttactgt

SEQ ID NO: 827176 - DNA, 75 bp, synthetic construct
  source 1..75: mol_type = other DNA
tgaggttacttctcgtcagagtaatttatttgatggcagcgcagagaaaacgtcaggtctggttgtgattggcga

SEQ ID NO: 827177 - DNA, 75 bp, synthetic construct
  source 1..75: mol_type = other DNA
atccgtgggtatcaacgtttacggcagtgataataacgtgacgctggatggaaagttggatttgcccctatattt

SEQ ID NO: 827178 - DNA, 75 bp, synthetic construct
  source 1..75: mol_type = other DNA
tacttatgctgattccggtgcgaaaattgttaataaaggtacttgtagattcaatctgtcaatgcaacacccctt

SEQ ID NO: 827179 - DNA, 75 bp, synthetic construct
  source 1..75: mol_type = other DNA
aagatccgcttggcactaagggggcgcgcctgaccaccgatatcacgctgccttctcgctatctggtctttatgc

SEQ ID NO: 827180 - DNA, 75 bp, synthetic construct
  source 1..75: mol_type = other DNA
gctggcaggtcaggagacgaaaattcagcggttttcggcagaacaactttctcactggctgaaaccgcgtcgccc

SEQ ID NO: 827181 - DNA, 75 bp, synthetic construct
  source 1..75: mol_type = other DNA
aaattgaaagtgaccgcttacattgcgcccaacgtctggtacaacgttatggcggcgtagcggtgctgaaaggtg

SEQ ID NO: 827182 - DNA, 75 bp, synthetic construct
  source 1..75: mol_type = other DNA
gatctgatagttgatgcgctgctcggcaccggattgcagcaagcgccccgtgaacccatcagtaaattaatcgat

SEQ ID NO: 827183 - DNA, 75 bp, synthetic construct
  source 1..75: mol_type = other DNA
aatacagcttcttgacgtgatatgcctcagcgatggcagtgcgattaaaccagtatcccgggaggtgcttgatgc

SEQ ID NO: 827184 - DNA, 75 bp, synthetic construct
  source 1..75: mol_type = other DNA
aatacagcttcttgacgtgatatgcctcagcgatggcagtgctataaaaccgcaatcccgtgaggtgcttgatgc

SEQ ID NO: 827185 - DNA, 75 bp, synthetic construct
  source 1..75: mol_type = other DNA
cgctgcctgtggtcagtgtcccgcgtccggcggggcacgggacgggcgcttttaccgctcccggctggcatcggt

SEQ ID NO: 827186 - DNA, 75 bp, synthetic construct
  source 1..75: mol_type = other DNA
tgcattgctttgtataaattcaatagttgttttagaaccgagacagttgtagatgttatttttgggttgtatttt

SEQ ID NO: 827187 - DNA, 75 bp, synthetic construct
  source 1..75: mol_type = other DNA
aagaccctctgggcaccaaaggcgcgcgcctgactacggatatcacgctgccgtctcgctatctggtgtttatgc

SEQ ID NO: 827188 - DNA, 75 bp, synthetic construct
  source 1..75: mol_type = other DNA
actcacgcctgacttacgaagcgttgcttgagtttacttcggaatacattcctgagatgaccagcaagctggagc

SEQ ID NO: 827189 - DNA, 75 bp, synthetic construct
  source 1..75: mol_type = other DNA
ctattgccctcacaggggcagtggtttatctacaaaccattctaccatccgcaaatacaaattttgcaataagat

SEQ ID NO: 827190 - DNA, 75 bp, synthetic construct
  source 1..75: mol_type = other DNA
gtggtttatctacaaaccattctaccatccgcaaatacaaattttgcaataagatttatttcctattatttattt

SEQ ID NO: 827191 - DNA, 75 bp, synthetic construct
  source 1..75: mol_type = other DNA
atttgcgtaataagtttggttttggcattgaatttatccatgacgttcatgaacgtataagccccattaatgcaa

SEQ ID NO: 827192 - DNA, 75 bp, synthetic construct
  source 1..75: mol_type = other DNA
ttcgccacggattaccagcaactgtttgccgagaagccgtcactgacgctgcatcagcggatgcgggagttgggg

SEQ ID NO: 827193 - DNA, 75 bp, synthetic construct
  source 1..75: mol_type = other DNA
gggggcgatgctggaagacgcgcaaccaatggtgacggcggaaagcatcagtcatcagagttaccgtagattact

SEQ ID NO: 827194 - DNA, 75 bp, synthetic construct
  source 1..75: mol_type = other DNA
ggaaatcctgcttgatgatattcaggttttccgtgaatacaccggtctggcgctgcgccagtcgtgtctggtctg

SEQ ID NO: 827195 - DNA, 75 bp, synthetic construct
  source 1..75: mol_type = other DNA
cgtctaatctgaacaggttccgtcgcggactgggatatgcaggaaaaattacaaattttgccgactggatcactg

SEQ ID NO: 827196 - DNA, 75 bp, synthetic construct
  source 1..75: mol_type = other DNA
ttggcgataatttgttgctggcaatgggagtgatgctggaagaagcgcaaccaatgatgacggcagagagcatta

SEQ ID NO: 827197 - DNA, 75 bp, synthetic construct
  source 1..75: mol_type = other DNA
gttctggtttggcattccggcgacgcgcggtgagcagggatttatcggttcgcaatgtctgggaagcgcagaaat

SEQ ID NO: 827198 - DNA, 75 bp, synthetic construct
  source 1..75: mol_type = other DNA
ttaaactggaactggatatacctgcttcagatatattatattgccatgattttattgattcacagcatgtagacg

SEQ ID NO: 827199 - DNA, 75 bp, synthetic construct
  source 1..75: mol_type = other DNA
ctacgttgttgtccctggctggtctgacgatgatgattcagctcatcgcctcggtgaatttacccgcgatatggg

SEQ ID NO: 827200 - DNA, 75 bp, synthetic construct
  source 1..75: mol_type = other DNA
catacctgtctggacactaacggttttgttcgtcgttacgatccagtaattgatgaacttctggaagtgaccgac

SEQ ID NO: 827201 - DNA, 75 bp, synthetic construct
  source 1..75: mol_type = other DNA
actcaacacaatgaaaaagcatctctggctatgactacaacatcattattaacagcgatgtcaattgcctgtcag

SEQ ID NO: 827202 - DNA, 75 bp, synthetic construct
  source 1..75: mol_type = other DNA
ttatctaatggaacttttcaatactgtgatgataataactgcaagttatattctttaaactcactagatgatgat

SEQ ID NO: 827203 - DNA, 75 bp, synthetic construct
  source 1..75: mol_type = other DNA
tgaaaacattaacaaaccagtcaacggtgaaagccagttaaagcgcgtgtttgttaaagttgttgatgatcttgg

SEQ ID NO: 827204 - DNA, 75 bp, synthetic construct
  source 1..75: mol_type = other DNA
cagcgtcaacttcagaaccgcagagcgatttgggttaattgaagtcacggaaaagccggttgtcttctggttcga

SEQ ID NO: 827205 - DNA, 75 bp, synthetic construct
  source 1..75: mol_type = other DNA
tgggcgtctgctgatttagcacataaaaagctttcctggaaagcggaaaaaaaattgaaagaaatgatcgaagat

SEQ ID NO: 827206 - DNA, 75 bp, synthetic construct
  source 1..75: mol_type = other DNA
ttatggcaacgattatccaactaaagatggtacaggagtaagagactatatacatgtctgtgatttggctaaagg

SEQ ID NO: 827207 - DNA, 75 bp, synthetic construct
  source 1..75: mol_type = other DNA
cttttaacttaggaactggacaggggtattctgtcttggaagttgtaaaaatgtttgagatagttactaaaaaga

SEQ ID NO: 827208 - DNA, 75 bp, synthetic construct
  source 1..75: mol_type = other DNA
agctggagcaacccgcaaacttccaaatgaggtaaaaaagttttttaaaaaacacaaagaattacgccctcatgc

SEQ ID NO: 827209 - DNA, 75 bp, synthetic construct
  source 1..75: mol_type = other DNA
ttttaggctggaaatccaagtacaatattgaagatatgatggtccatacctggaattggcaaaaacaaaacccta

SEQ ID NO: 827210 - DNA, 75 bp, synthetic construct
  source 1..75: mol_type = other DNA
atcagttttacaagtaatcgatgcctttgaaaaagcaagtaatcagaaagttaattatgaaattgtcgccagacg

SEQ ID NO: 827211 - DNA, 75 bp, synthetic construct
  source 1..75: mol_type = other DNA
accgtcggattatgggttctcctgtaacgatacctaatgacaagtggctacagggttattcgttcctttcagcgg

SEQ ID NO: 827212 - DNA, 75 bp, synthetic construct
  source 1..75: mol_type = other DNA
caccctgaactgcatgctatagaaaacttatttccatcatgcgccccctgcaacctttttaaaggagcttttagt

SEQ ID NO: 827213 - DNA, 75 bp, synthetic construct
  source 1..75: mol_type = other DNA
caacctttttaaaggagcttttagtgttgaaggaatgagaaaagaaatggcactgttgcaaatagtcggtggtga

SEQ ID NO: 827214 - DNA, 75 bp, synthetic construct
  source 1..75: mol_type = other DNA
aatctgtaggtgagtctaagttaaagcccttagagtattattctaataatgttggtggaactttagtattacttg

SEQ ID NO: 827215 - DNA, 75 bp, synthetic construct
  source 1..75: mol_type = other DNA
tgagcggcgcccggccgcagggcagtctcgctattatcagcggcacctccaactgccatatgatcgtcagccaac

SEQ ID NO: 827216 - DNA, 75 bp, synthetic construct
  source 1..75: mol_type = other DNA
aacggatgtggtcttcatcccgactgattattgattttcagcccacaatttattacggccagaatacaaaaaaag

SEQ ID NO: 827217 - DNA, 75 bp, synthetic construct
  source 1..75: mol_type = other DNA
aataatgggacattgattttaacctgcgatcaaagcaattttaatgatcaccggaagaataaatcaaatgattag

SEQ ID NO: 827218 - DNA, 75 bp, synthetic construct
  source 1..75: mol_type = other DNA
tcgcggggaaaaatccacggcatccgggcgttaccagcagctttacctgttctggccgcattacaaaaagcagct

SEQ ID NO: 827219 - DNA, 75 bp, synthetic construct
  source 1..75: mol_type = other DNA
atatcgcggcctttctcgacatgctggccgtgtccgaagggacggcaaaccatccgctgacgaaaaaccggggct

SEQ ID NO: 827220 - DNA, 75 bp, synthetic construct
  source 1..75: mol_type = other DNA
tctggccgcactaccgcaaacagcttgccctgccggatttcagtccgttgtcacaggacaggctcgccattcagt

SEQ ID NO: 827221 - DNA, 75 bp, synthetic construct
  source 1..75: mol_type = other DNA
atggctggaaatcagcgtcagggggtggcgttcatccgtgtcaatggcatggagcttgaatcaatggaaggtgcc

SEQ ID NO: 827222 - DNA, 75 bp, synthetic construct
  source 1..75: mol_type = other DNA
gtacgcaaggaaggctggacaacgtcaccaaaacctggcgtccagggtggcaaagcccgactggttcacgtcaat

SEQ ID NO: 827223 - DNA, 75 bp, synthetic construct
  source 1..75: mol_type = other DNA
cgtcacgatcggcgacggcaccgtcgtgggtgcgcgaagcagtgtttttaaatcgcttccggcaaatgtggtttg

SEQ ID NO: 827224 - DNA, 75 bp, synthetic construct
  source 1..75: mol_type = other DNA
cgacctgtattgtctgcggcactcttcgactgcaacgttcggcgcgttattttttaacctctttgccggaagtgc

SEQ ID NO: 827225 - DNA, 75 bp, synthetic construct
  source 1..75: mol_type = other DNA
ccagatctttgatggcgggagcggatgctctgtgtagtcagatctgtgccgttttgtttacgctcgctgtgcgtg

SEQ ID NO: 827226 - DNA, 75 bp, synthetic construct
  source 1..75: mol_type = other DNA
tcgactacaacgttcggctcgttattttttaacgtctttgcctgaagttttgtttttggcgccggaaagccacag

SEQ ID NO: 827227 - DNA, 75 bp, synthetic construct
  source 1..75: mol_type = other DNA
gaaatcaggtgaagtcagaaagagccttgactggcataacactgactggatagatgaggtgtgggatgaaatcaa

SEQ ID NO: 827228 - DNA, 75 bp, synthetic construct
  source 1..75: mol_type = other DNA
ccgaaaacgggaatatacccaaaaacgggatgttgaatgatcccaaaaacgggatccagaaccagtcatataacc

SEQ ID NO: 827229 - DNA, 75 bp, synthetic construct
  source 1..75: mol_type = other DNA
tcgcaggacaaacttgcgattcagttaatccgcgagcgcggtgccattgaggatattaaggcggggcgtattgag

SEQ ID NO: 827230 - DNA, 75 bp, synthetic construct
  source 1..75: mol_type = other DNA
tgtggtggaacgcgccgcagggtgactgggcggcagtctggcaggacagctacctgtggcatgtggtgcgctttt

SEQ ID NO: 827231 - DNA, 75 bp, synthetic construct
  source 1..75: mol_type = other DNA
ctttctccggcaccagttacggcattgccgggctgctgatgctggcagtcagccacaggctgtaccgggcggaag

SEQ ID NO: 827232 - DNA, 75 bp, synthetic construct
  source 1..75: mol_type = other DNA
tgccgaaagggttccggggcggcaacgcgattaaagtgcaattatggtgggcggtacaggcaacattatttgcct

SEQ ID NO: 827233 - DNA, 75 bp, synthetic construct
  source 1..75: mol_type = other DNA
gtgggtgcgcgaagcagtgtttttaaatcgcttccggcaaatgccatttgccgggggaatcccgcagtggtgata

SEQ ID NO: 827234 - DNA, 75 bp, synthetic construct
  source 1..75: mol_type = other DNA
gcggccctgcttatattgagggaaaagttcaatgccctctgggacaacagcgaggaagactgccccctctcctga

SEQ ID NO: 827235 - DNA, 75 bp, synthetic construct
  source 1..75: mol_type = other DNA
ggcgctactgaccggactggtggaacgcttcggtacgcaactgctgccctcgcgaccggccagccggaaaatggc

SEQ ID NO: 827236 - DNA, 75 bp, synthetic construct
  source 1..75: mol_type = other DNA
atcggcgcgggtagtggcttgctggcactgatgctggcgcagcgaaccagtgacagcgtgataattgatgccgtt

SEQ ID NO: 827237 - DNA, 75 bp, synthetic construct
  source 1..75: mol_type = other DNA
tatctgtggcatgtggtgcgcttctccttctggcaggcgtttctctcggcgctgctctctgtcgtacccgcgata

SEQ ID NO: 827238 - DNA, 75 bp, synthetic construct
  source 1..75: mol_type = other DNA
cattgcgcccggcaccacgctgctgcaaggctggcgcgacccggacgatcgtctgcatagccgcatttgtgacac

SEQ ID NO: 827239 - DNA, 75 bp, synthetic construct
  source 1..75: mol_type = other DNA
cgccgcagcgggaacaggcgcgctacaccacctcacttgatcaccagactttacttacttgcgcggcggagtgca

SEQ ID NO: 827240 - DNA, 75 bp, synthetic construct
  source 1..75: mol_type = other DNA
tcacccagcagacagcacgctttgatttaatcatcagtaacccgccttattatcagcagggcgttgagtgcgcta

SEQ ID NO: 827241 - DNA, 75 bp, synthetic construct
  source 1..75: mol_type = other DNA
tgacagcgtgatgattgatgccgttgaactggaaggtgaagctgcgactcaggcgcaggaaaatatcaaccagtc

SEQ ID NO: 827242 - DNA, 75 bp, synthetic construct
  source 1..75: mol_type = other DNA
tcagagcaaaaagactcgttcctggagcgacgtcactgtcagcgatatcgttgcgacaatagcgagcgataatgg

SEQ ID NO: 827243 - DNA, 75 bp, synthetic construct
  source 1..75: mol_type = other DNA
cgatgaactgacaccgaacaatcaggaagaacaaaaacgttgtgcaaagctgaagggcgatctcgatacttataa

SEQ ID NO: 827244 - DNA, 75 bp, synthetic construct
  source 1..75: mol_type = other DNA
catcgttgtttctgcctgcgccgctgaagacggtgatacgtaacgtgcgtgatgcggtggtgtccgtggcccgcg

SEQ ID NO: 827245 - DNA, 75 bp, synthetic construct
  source 1..75: mol_type = other DNA
gaaaacggtgattcataccgtgcgtgatgcgatggtgtcggtcgcacgggccgtctgggattggatattcttcta

SEQ ID NO: 827246 - DNA, 75 bp, synthetic construct
  source 1..75: mol_type = other DNA
tgaagggcgatctcgacacttataaatgggatggtctgcgcgatcatacggatatcgctattgatgacgatctct

SEQ ID NO: 827247 - DNA, 75 bp, synthetic construct
  source 1..75: mol_type = other DNA
gaaggcgaatggctaaaaagtcttaatcgttatccctttgaggtacaaagcctgccgagcgcctcgtttaacctg

SEQ ID NO: 827248 - DNA, 75 bp, synthetic construct
  source 1..75: mol_type = other DNA
catcacctgccggacgtggcgcgggatgcgctggaaatgagcgcggaaattactgcaccctggtatcggctacaa

SEQ ID NO: 827249 - DNA, 75 bp, synthetic construct
  source 1..75: mol_type = other DNA
gaccatgaataccgtgccctgtaccggcgtatgctgccggaactggacctggtgctgtgggtcattaaggccgat

SEQ ID NO: 827250 - DNA, 75 bp, synthetic construct
  source 1..75: mol_type = other DNA
ttttttcgggaaacggctgcattcgcctttatgtagaaaaaaacatcgggaagctggtggaatccaaccagcggt

SEQ ID NO: 827251 - DNA, 75 bp, synthetic construct
  source 1..75: mol_type = other DNA
atctgatgcagcattattatgacatcgttgataacctgaacctcaaagtcctggacttcgatatcgaaggcacct

SEQ ID NO: 827252 - DNA, 75 bp, synthetic construct
  source 1..75: mol_type = other DNA
gaacgcctgcacccgcgacgtactgcgcttccggctgcgcagtggtcgtcacagtctggtgattgttgatttacc

SEQ ID NO: 827253 - DNA, 75 bp, synthetic construct
  source 1..75: mol_type = other DNA
gcacagagccggtaaagtcgcaggcccgtgacagtttcggtgaagctgtgagccgggttttcgataccgcaggat

SEQ ID NO: 827254 - DNA, 75 bp, synthetic construct
  source 1..75: mol_type = other DNA
ttacaggcaaaaggtactgtttgtgattaaccaggccgacaaaatcgaaccctgtcatgaatgggataccctcac

SEQ ID NO: 827255 - DNA, 75 bp, synthetic construct
  source 1..75: mol_type = other DNA
ggccggagaagaagggcggcatctggcgattgaagcccccaccggcgttgggaaaacgctctcctatttgatccc

SEQ ID NO: 827256 - DNA, 75 bp, synthetic construct
  source 1..75: mol_type = other DNA
attaaccaggccgacaaaatagaaccctgccacgaatgggatacccgaaccagcacgccttcagcacagcaatgg

SEQ ID NO: 827257 - DNA, 75 bp, synthetic construct
  source 1..75: mol_type = other DNA
gtacggagccggtcaggtcgcaggcccgtgacggctttggcgaagcggtggggcgggtgttcgatacggcggagt

SEQ ID NO: 827258 - DNA, 75 bp, synthetic construct
  source 1..75: mol_type = other DNA
ggcgtatgctgccggaactggacctggtgctgtgggtcattaaggccgatgaccgggcgctgtcggtggacgagc

SEQ ID NO: 827259 - DNA, 75 bp, synthetic construct
  source 1..75: mol_type = other DNA
ccattaccacgatgttcactccccgtcatccggtctgcgtggtgtcagcgttgaccggctggggcgtggaagcga

SEQ ID NO: 827260 - DNA, 75 bp, synthetic construct
  source 1..75: mol_type = other DNA
tcatcctgtctgcatggtgtccgcgctggccggatggggcactgaggagatggtgggcaccatgatgcgcagtct

SEQ ID NO: 827261 - DNA, 75 bp, synthetic construct
  source 1..75: mol_type = other DNA
cttgaacgtattcagaatctgacccactacgagccggtgattggcatcatgggcaagagtggtgccggtaagtcg

SEQ ID NO: 827262 - DNA, 75 bp, synthetic construct
  source 1..75: mol_type = other DNA
cttctcacgctccgcactgcgtgaagggctgaccgtgctgcgcgggcgcgggattattgaaacggcgcaggggcg

SEQ ID NO: 827263 - DNA, 75 bp, synthetic construct
  source 1..75: mol_type = other DNA
ccgcgaccttgcgttcgttgaacagtttttcgcgtttgcaggagatgagcgggctgaaagaaaaagcgggcgatc

SEQ ID NO: 827264 - DNA, 75 bp, synthetic construct
  source 1..75: mol_type = other DNA
cgcaatcttccggtgcgccggtgaccaaatgggcgacgcgggaagagcgcgaagggcagctacatctctggtttc

SEQ ID NO: 827265 - DNA, 75 bp, synthetic construct
  source 1..75: mol_type = other DNA
gcccgtacatccggttgtggccgtatcggcccgcaccggctgggaactggatacgctggtcagtgcgctcatgac

SEQ ID NO: 827266 - DNA, 75 bp, synthetic construct
  source 1..75: mol_type = other DNA
gtgacgcaggccgacaaaacggaaccctgtcatgaatgggatatggcaggtattcagccttctcccgcacaggaa

SEQ ID NO: 827267 - DNA, 75 bp, synthetic construct
  source 1..75: mol_type = other DNA
atgccgaacgtaaagcgagttaccaacaactggcaaagcaaaataatgtgtctgtagatgatatcgcgaaactcg

SEQ ID NO: 827268 - DNA, 75 bp, synthetic construct
  source 1..75: mol_type = other DNA
ctgtctccggaattccacggcctgactaaagaacaggcaccgaagtacgcatttagcgaaatcttcgcgccgttt

SEQ ID NO: 827269 - DNA, 75 bp, synthetic construct
  source 1..75: mol_type = other DNA
ggcggccagcgctgtggtgaaggtactgggtgatcgttcaatgcgcacctgtacggatgcgaaggaatgtaccag

SEQ ID NO: 827270 - DNA, 75 bp, synthetic construct
  source 1..75: mol_type = other DNA
tgtagtgatgaagagaaggggctggccctgcagtgggtttctgaactgacagatgaacttatggcaaaaatcaga

SEQ ID NO: 827271 - DNA, 75 bp, synthetic construct
  source 1..75: mol_type = other DNA
tgaagctccagcgcattgatttttttatcaagcttgtagcggctagcgagtgtgatgatgcagaaaagcagctgg

SEQ ID NO: 827272 - DNA, 75 bp, synthetic construct
  source 1..75: mol_type = other DNA
gtaaggctaccgggaaagaaggccggaaatggattggtggccaggatcgtggcggggcagggcaggcggctattc

SEQ ID NO: 827273 - DNA, 75 bp, synthetic construct
  source 1..75: mol_type = other DNA
aacggggtgttacaggcaaatgtggcgttcgacaaggcacagctgaactgtcagaacatggcgaagcgcatgatg

SEQ ID NO: 827274 - DNA, 75 bp, synthetic construct
  source 1..75: mol_type = other DNA
ccgcaacagcgtgctgaccattattgaacgggagaatgaacgggttgggaacaatccgatgattcagcagacaga

SEQ ID NO: 827275 - DNA, 75 bp, synthetic construct
  source 1..75: mol_type = other DNA
accggagtcggaagttgccggaccttgcagatgaaggcacattacagaaatggaggtctgttctaccgttcctca

SEQ ID NO: 827276 - DNA, 75 bp, synthetic construct
  source 1..75: mol_type = other DNA
gtacagccgtcggattaacgaatttcgcctggatcaacacatccggcgatacatatgatatttacgttgagattg

SEQ ID NO: 827277 - DNA, 75 bp, synthetic construct
  source 1..75: mol_type = other DNA
gttcgcactgggactgttgcgatcgtgaagccatagactgggccgcaagcacgggaggttatgacaaagcaacgg

SEQ ID NO: 827278 - DNA, 75 bp, synthetic construct
  source 1..75: mol_type = other DNA
tattaagcttgtagcggctagtgagtgtaacgacgaagaaaagcggctggctatccagtgggtttcggagttgac

SEQ ID NO: 827279 - DNA, 75 bp, synthetic construct
  source 1..75: mol_type = other DNA
ctggctgggcgcagtgcaatggttcccggagtccgctatctgggcatggccgctggtcactaacctcggcgtcta

SEQ ID NO: 827280 - DNA, 75 bp, synthetic construct
  source 1..75: mol_type = other DNA
tacaagcaagctattgagcagaaatgcaatacggttcttggtgttgaacagctcaactcgacggcatttaccaat

SEQ ID NO: 827281 - DNA, 75 bp, synthetic construct
  source 1..75: mol_type = other DNA
agcccgccatccgtgtcacccatgaccttgttgctgccggctacaacatgatgaacggtctgcctgtcaccgcta

SEQ ID NO: 827282 - DNA, 75 bp, synthetic construct
  source 1..75: mol_type = other DNA
atgtatgaggagtgtgtgacatttttcatgaaagtaaaacaggtgataacctcctttcgtaaggggtattcacag

SEQ ID NO: 827283 - DNA, 75 bp, synthetic construct
  source 1..75: mol_type = other DNA
ctttctcctgataaaatctctgccgggctttatggatataatgccattttaacggccgttgcagtatatgcattc

SEQ ID NO: 827284 - DNA, 75 bp, synthetic construct
  source 1..75: mol_type = other DNA
tgtttcctgatgctgtcggcggtattcttgttatgctgggactacttgcagggagccggaaactactgatgatta

SEQ ID NO: 827285 - DNA, 75 bp, synthetic construct
  source 1..75: mol_type = other DNA
atgtatgaggagggtgtgacatttttcatgacagtaaaacaggtgataacctcctttcgtaaggggaattcacag

SEQ ID NO: 827286 - DNA, 75 bp, synthetic construct
  source 1..75: mol_type = other DNA
atgtatgaggagcgtgtgacatttttcatgagagtaaaacaggtgataacctcctttcgtaaggggaattcacag

SEQ ID NO: 827287 - DNA, 75 bp, synthetic construct
  source 1..75: mol_type = other DNA
atgtatgaggagtgtgtgacatttttcatgatagtaaaacaggtgataacctcctttcgtaagggggattcacag

SEQ ID NO: 827288 - DNA, 75 bp, synthetic construct
  source 1..75: mol_type = other DNA
gggcaaaagctcgtatctcgcgctaaatcaggagaatatgtgcagggcattaacggaaaatggttacagaaataa

SEQ ID NO: 827289 - DNA, 75 bp, synthetic construct
  source 1..75: mol_type = other DNA
cgctcaaaaccgagatggagatgaagcgcgagctgtcacgtaattcggtactgaccatcattgagcgagacaacg

SEQ ID NO: 827290 - DNA, 75 bp, synthetic construct
  source 1..75: mol_type = other DNA
agcgcgtcgaaactaacccgcagacccagtcagatgacaataccgacagtcgcttcaaccagatggcagcgccgc

SEQ ID NO: 827291 - DNA, 75 bp, synthetic construct
  source 1..75: mol_type = other DNA
atggggcaccccgaaatactgtatttctcagccatcagtgcagcactttctccgttcttttcctggtgtttgcgg

SEQ ID NO: 827292 - DNA, 75 bp, synthetic construct
  source 1..75: mol_type = other DNA
caggcattagtaaaagatattaatgaagctcgtaaccatagttaccaacaactggcaaagcaaaataatgtatcc

SEQ ID NO: 827293 - DNA, 75 bp, synthetic construct
  source 1..75: mol_type = other DNA
caatgtaatggcattgactctggatgaagccagaacccagggacgggtaggtgaaacattttacggttatctggt

SEQ ID NO: 827294 - DNA, 75 bp, synthetic construct
  source 1..75: mol_type = other DNA
acgatctggccgcaccggtggactatcgcgagcaggcggagtcgatgttcaacgaagaagccaaagccattcgcc

SEQ ID NO: 827295 - DNA, 75 bp, synthetic construct
  source 1..75: mol_type = other DNA
atgtctgactatttaaagggtaagcgcgtcgttgacccggtgctgaccagcatcgctcgcggttataaaaatgcc

SEQ ID NO: 827296 - DNA, 75 bp, synthetic construct
  source 1..75: mol_type = other DNA
tgtgaccgtcccgaccttcggtaaatccgcctttgttgagtacgacaccgagcgtgccgtgggggctgacagtaa

SEQ ID NO: 827297 - DNA, 75 bp, synthetic construct
  source 1..75: mol_type = other DNA
atgagtacgcgtatttatttgtggcgggcgctttttggcgaaaaacctcgtatcttgctggaaaatagtgatttt

SEQ ID NO: 827298 - DNA, 75 bp, synthetic construct
  source 1..75: mol_type = other DNA
ggccgcgattggagccaacgagcgcaagcgtatcaccatcgaaattctgaaagaccttttccaactggaagatgt

SEQ ID NO: 827299 - DNA, 75 bp, synthetic construct
  source 1..75: mol_type = other DNA
tgctgaacgctgggtcggtggtaaaggtgatccaattggcattattgaaggtggcattgaggcggtacgtaacaa

SEQ ID NO: 827300 - DNA, 75 bp, synthetic construct
  source 1..75: mol_type = other DNA
ctgatgacctcactggcgtttatcctcggtgttatgccgttggttatcagcactggtgctggctctggcgcacaa

SEQ ID NO: 827301 - DNA, 75 bp, synthetic construct
  source 1..75: mol_type = other DNA
gatccttatcgtcgaattcgccaaagacttgatggataaagaaggtaaaggtctgattgaagcgacgcttgatgc

SEQ ID NO: 827302 - DNA, 75 bp, synthetic construct
  source 1..75: mol_type = other DNA
gttatgctggtcgttccgctgggggttatcggtgcgttgctggctgccaccttccgtggcctgaccaatgacgtt

SEQ ID NO: 827303 - DNA, 75 bp, synthetic construct
  source 1..75: mol_type = other DNA
gcctccatgaaagacgcgcagaacaaggacaaagtcccgaccgatatctggggcgacaacctgatgctgcattac

SEQ ID NO: 827304 - DNA, 75 bp, synthetic construct
  source 1..75: mol_type = other DNA
gcgcaaaaagcgcctgccagcccgctacagggcaaagccaatgtgatggtttttccgtcgctggaagccggaaat

SEQ ID NO: 827305 - DNA, 75 bp, synthetic construct
  source 1..75: mol_type = other DNA
cacgaagtggttaaaacgctggtcgaagcgatcatcctcgtgttcctggttatgtatctgttcctgcagaacttc

SEQ ID NO: 827306 - DNA, 75 bp, synthetic construct
  source 1..75: mol_type = other DNA
ctgtcgtccataccgataaggaaggtgtgaccgtgccgaccttcggtaaatccgcctttgtggaatacgacaccg

SEQ ID NO: 827307 - DNA, 75 bp, synthetic construct
  source 1..75: mol_type = other DNA
tagcgcaggtagggattaaagcccaggtgacggcgatggatgccggacagcgggcagcagaagtagaaggtaaag

SEQ ID NO: 827308 - DNA, 75 bp, synthetic construct
  source 1..75: mol_type = other DNA
gcttaaaattgcttatcaggaagcggggacatggcctgatgatggaatcgaaattgacgacactactgccgctga

SEQ ID NO: 827309 - DNA, 75 bp, synthetic construct
  source 1..75: mol_type = other DNA
tactaattaaccaggccaacgaatacatgaacagtaaacaatggcccggtaaagccgctattggtcgtctgaaag

SEQ ID NO: 827310 - DNA, 75 bp, synthetic construct
  source 1..75: mol_type = other DNA
tttggcccgaccaccgggatgagactgacgcaggtcagaaatctttgtgacgacaaccgaatcaatgccggtgtg

SEQ ID NO: 827311 - DNA, 75 bp, synthetic construct
  source 1..75: mol_type = other DNA
tctaccatcggtgcaaatctgctggtagtcgtggatgatgttgtcgctaacgatgatattcaacagaaattaatg

SEQ ID NO: 827312 - DNA, 75 bp, synthetic construct
  source 1..75: mol_type = other DNA
accggcgaagctgactgggcgttgtcgccgctgtttgcgtcacagaactggccaccgacgctgtttaatactgcg

SEQ ID NO: 827313 - DNA, 75 bp, synthetic construct
  source 1..75: mol_type = other DNA
gggagacaacctgatgctgcactacgtcggcaagccgcagccgggggcggatagcgcggacgagaacgagccgtc

SEQ ID NO: 827314 - DNA, 75 bp, synthetic construct
  source 1..75: mol_type = other DNA
cgtcatcggtgcccctgtctccctgccatccatgaaagcggcgatggataaggacagcgtgccggcggatatctg

SEQ ID NO: 827315 - DNA, 75 bp, synthetic construct
  source 1..75: mol_type = other DNA
gcgcgaactgtatgcggcccgtctggcgcaggacaaaaacgtttacccggcatcgtccgttaaagcactggcagc

SEQ ID NO: 827316 - DNA, 75 bp, synthetic construct
  source 1..75: mol_type = other DNA
cgtcatcggtgcccctgtctccctgccatccatgaaagcggcaatggatagggacagcgtgccggcggatatctg

SEQ ID NO: 827317 - DNA, 75 bp, synthetic construct
  source 1..75: mol_type = other DNA
agcgtgccgtcgggacggacagcaatgttctggtccgtgaaaaaacaggcacgctggacctggtgctgggtgaac

SEQ ID NO: 827318 - DNA, 75 bp, synthetic construct
  source 1..75: mol_type = other DNA
tgttctggtccgtgagaaaaccggcacactggatctggtgctgggtgaacacgatctggcagcaccggtggatta

SEQ ID NO: 827319 - DNA, 75 bp, synthetic construct
  source 1..75: mol_type = other DNA
accctgatatgttgaccagcgtacgtccaaacggtctggaagataccccgcagtttaagattgatatcgaccagg

SEQ ID NO: 827320 - DNA, 75 bp, synthetic construct
  source 1..75: mol_type = other DNA
gatgatgtctaactatgctgataaatggctggaggaagcaaaaggaaaagtcaaatcaacaggagtctggataac

SEQ ID NO: 827321 - DNA, 75 bp, synthetic construct
  source 1..75: mol_type = other DNA
aagcttaatgaactcgatctcgatgttgaggcggatctttgcgaaaagctccatgaggatgcggaacaactctgt

SEQ ID NO: 827322 - DNA, 75 bp, synthetic construct
  source 1..75: mol_type = other DNA
aatcatgagcataaacccggcgcgcgcctgtctggctggtatgattttaatgataactggcgtattggtggattt

SEQ ID NO: 827323 - DNA, 75 bp, synthetic construct
  source 1..75: mol_type = other DNA
gtacaatataaaaaaccttttttctggattgccatatattcatcgtacatattgccttacttatgatgtaactga

SEQ ID NO: 827324 - DNA, 75 bp, synthetic construct
  source 1..75: mol_type = other DNA
gctcttttttattgggagcaagcaaaagtatttaatcaggcggccaatggtttacccaaccaatcagccccactt

SEQ ID NO: 827325 - DNA, 75 bp, synthetic construct
  source 1..75: mol_type = other DNA
agagggggataatagaaagcccgatacatttatgaaattaggtcttgagtctggtagcgtggatctggtgttaac

SEQ ID NO: 827326 - DNA, 75 bp, synthetic construct
  source 1..75: mol_type = other DNA
tcctcaggctgaaatgacagccagagagcttgcttataacgcaccaggaaatcagggactgcgcattgattacgc

SEQ ID NO: 827327 - DNA, 75 bp, synthetic construct
  source 1..75: mol_type = other DNA
tgcgtaataatcaacttgctgccgcgattgacgatgccaatttaacgccagatattcgcgctgatattcatgccg

SEQ ID NO: 827328 - DNA, 75 bp, synthetic construct
  source 1..75: mol_type = other DNA
caatggagtggatttaaacagaaactttccggcagcaaactggaaggaaggtgaaacggtctaccgctggaacag

SEQ ID NO: 827329 - DNA, 75 bp, synthetic construct
  source 1..75: mol_type = other DNA
gagcttgcttataacgcaccaggaaatcagggactgcgcactgatgaatcccctaatgattttggtaaaaatcat

SEQ ID NO: 827330 - DNA, 75 bp, synthetic construct
  source 1..75: mol_type = other DNA
tcctcaggctgaaatgacagccagagagcttgcttataacgcaccaggaaatcagggactgcgcactgagagatc

SEQ ID NO: 827331 - DNA, 75 bp, synthetic construct
  source 1..75: mol_type = other DNA
attacgcgagtgtgttacaagcccgcggttggcctcgtgcagcagaaaatgaattaaaaaaagcagaagtgatcg

SEQ ID NO: 827332 - DNA, 75 bp, synthetic construct
  source 1..75: mol_type = other DNA
ataactgcgctgatggtggtgttcctgcgtctgatgatgttccgcaaaggcaaattgttaatcgatagcctgtaa

SEQ ID NO: 827333 - DNA, 75 bp, synthetic construct
  source 1..75: mol_type = other DNA
ataaaacactatcaataagttggagtcattacccagcaaccagtgagcgtcctggttttaaccggttgcttgctc

SEQ ID NO: 827334 - DNA, 75 bp, synthetic construct
  source 1..75: mol_type = other DNA
gatcagcatcagcgccattgcccgtgaatttaataccacccggcaaaccatactcagggtaaaggcagggcaata

SEQ ID NO: 827335 - DNA, 75 bp, synthetic construct
  source 1..75: mol_type = other DNA
ctggtatcgcgcgagcaaaagcggctggaaaacgatttggacgtccttctgtactgacaaaagaacagcaactta

SEQ ID NO: 827336 - DNA, 75 bp, synthetic construct
  source 1..75: mol_type = other DNA
tggctcagtagcagccagtgaacgtcctggttttaaccggttgcttgatcgtctggaaagtggcgatgtattgat

SEQ ID NO: 827337 - DNA, 75 bp, synthetic construct
  source 1..75: mol_type = other DNA
caggaaaaatgatgatgcacgtaatttcagcagtcgctgaatttaaacgagaccttttacttgaacgcactcatt

SEQ ID NO: 827338 - DNA, 75 bp, synthetic construct
  source 1..75: mol_type = other DNA
cagtggaacaactgaccgaaacaggtatcagagtgcattgcttagcattggggggcattggggggcattgggggg

SEQ ID NO: 827339 - DNA, 75 bp, synthetic construct
  source 1..75: mol_type = other DNA
gcaaaacgtccattttgagcacgccgccgcgatgttcgagctgaaatatcatcgtccgcaaaactggcaggaact

SEQ ID NO: 827340 - DNA, 75 bp, synthetic construct
  source 1..75: mol_type = other DNA
aaccgacgctggcgattgtgggcgatctctccgcactttacgatctcaacgcgctggcgttattgcgtcaggttt

SEQ ID NO: 827341 - DNA, 75 bp, synthetic construct
  source 1..75: mol_type = other DNA
ggatatcaacgctggatcagacccccgaaaatcaacgccgggaaatcgaaagtgcaggttttaaaatcaaacctc

SEQ ID NO: 827342 - DNA, 75 bp, synthetic construct
  source 1..75: mol_type = other DNA
ttacagcaggcgcagattgttgtgcaactgggaagcagtctgaccggcaaacggttactgcaatggcaggcgagt

SEQ ID NO: 827343 - DNA, 75 bp, synthetic construct
  source 1..75: mol_type = other DNA
ggctgggctaactggagaaaaactgatcctgttaaccgccgatcgtcctccggaactgattgattgcggtgcgaa

SEQ ID NO: 827344 - DNA, 75 bp, synthetic construct
  source 1..75: mol_type = other DNA
ccgcgccgttggtattaattgtggtgaacaacaacggcggacaaattttctcgttgttaccgacacctcaaaacg

SEQ ID NO: 827345 - DNA, 75 bp, synthetic construct
  source 1..75: mol_type = other DNA
agtgaatttggcgagattattggccgcagcgaagccatgtacagcgctgatgaatcccctaatgatttttatcaa

SEQ ID NO: 827346 - DNA, 75 bp, synthetic construct
  source 1..75: mol_type = other DNA
gtgaaactggtacaggtaaagagctgattgccgcgcgatccataatctcagtgggcgtaataatcgccgcatggt

SEQ ID NO: 827347 - DNA, 75 bp, synthetic construct
  source 1..75: mol_type = other DNA
tgccgtcgataacgctctcgcctatcaggaaatccatcgcctgaaagagcggctggttgatgaaaaccttgccct

SEQ ID NO: 827348 - DNA, 75 bp, synthetic construct
  source 1..75: mol_type = other DNA
aggagtccggcgcgtttaccggtcgcccggttgagaaagaaatcacctggacgcaaggcgataaaaaaatcaccg

SEQ ID NO: 827349 - DNA, 75 bp, synthetic construct
  source 1..75: mol_type = other DNA
atggataataaaatgattagctgccccttctgctttacacaaagcccacatggtgtgcgggtttgcaaaggctgt

SEQ ID NO: 827350 - DNA, 75 bp, synthetic construct
  source 1..75: mol_type = other DNA
gcaacgtctgggactaaaacgcaccacactgctatcacggatgaaacgactggggattgataaatcggcattggt

SEQ ID NO: 827351 - DNA, 75 bp, synthetic construct
  source 1..75: mol_type = other DNA
atgtcgtatacaccgatgagtgatctcggacaacaggggttgttcgacatcactcggacactattacagcagccg

SEQ ID NO: 827352 - DNA, 75 bp, synthetic construct
  source 1..75: mol_type = other DNA
ctggaaaatgtcattgagcgcgcggtgctgctgactcgcggtaacgttctacaactctctttacccgatatctca

SEQ ID NO: 827353 - DNA, 75 bp, synthetic construct
  source 1..75: mol_type = other DNA
aaagagttcaatcgtctgcaaacatttacgcagatcgtttctgtcgtcaccgaacaaatccagagccgcgtcgtt

SEQ ID NO: 827354 - DNA, 75 bp, synthetic construct
  source 1..75: mol_type = other DNA
gccagattgccgaacgtgtggcgattgccgtcgataacgctctcgcctatcaggaaatccatcgcctgaaagagc

SEQ ID NO: 827355 - DNA, 75 bp, synthetic construct
  source 1..75: mol_type = other DNA
tcgttttgaactggcggataaaagttcgctgttcctcgatgaagtgggtgatatgccactggagttacagccgaa

SEQ ID NO: 827356 - DNA, 75 bp, synthetic construct
  source 1..75: mol_type = other DNA
agggcgaagatgaatatcagttgattgttcgcgtgctgaaagaaaccaacggcgtggttgccgggcctaaaggcg

SEQ ID NO: 827357 - DNA, 75 bp, synthetic construct
  source 1..75: mol_type = other DNA
gggttacaaacgttggcatttaacccagcaggtgattatgccgcctcagccgattgatccatggttttatggcgg

SEQ ID NO: 827358 - DNA, 75 bp, synthetic construct
  source 1..75: mol_type = other DNA
ttggcgatattccgttagttcacggcatgccttttatttctggtatcggtatcgaagcattacaaaataaaattc

SEQ ID NO: 827359 - DNA, 75 bp, synthetic construct
  source 1..75: mol_type = other DNA
aagaaattaaagagttgtgtcagagtcataatattcctgttgaattaatccagtgtcgggttaatgaaatagaaa

SEQ ID NO: 827360 - DNA, 75 bp, synthetic construct
  source 1..75: mol_type = other DNA
aatcaattcaagaaaatgatgaaggaatctctagaggaacaaaaaaaggtaattgataaaagggtagaaacgtta

SEQ ID NO: 827361 - DNA, 75 bp, synthetic construct
  source 1..75: mol_type = other DNA
atggccgccgttaacttacgtcatattgaaatttttcatgcggtgatgaccgccggaagcctgactgaagcggca

SEQ ID NO: 827362 - DNA, 75 bp, synthetic construct
  source 1..75: mol_type = other DNA
tacttgaagagtggctttcggcccagcgtcatgatttaggactcaccgaaacgctgcatacacctgcgggtacgg

SEQ ID NO: 827363 - DNA, 75 bp, synthetic construct
  source 1..75: mol_type = other DNA
ggcacgttatcccgatgtcagcttaaatatcgtgccccaggaatcaccgctacttgaagagtggctctcggccca

SEQ ID NO: 827364 - DNA, 75 bp, synthetic construct
  source 1..75: mol_type = other DNA
tatcagaacaacccatcccagtgcttttgcgtggggataagtgggattctgtttggtcagaactgactgataacg

SEQ ID NO: 827365 - DNA, 75 bp, synthetic construct
  source 1..75: mol_type = other DNA
caaagcaaagccctgaaagccaggcgcgtattgcggcaaaagttgaggaaatgcgccagaccatcgccttgcatc

SEQ ID NO: 827366 - DNA, 75 bp, synthetic construct
  source 1..75: mol_type = other DNA
tcgtggctggccctatggctacggcggatggggctggtataatcccggccccgcgagagtacaaacagttgtaac

SEQ ID NO: 827367 - DNA, 75 bp, synthetic construct
  source 1..75: mol_type = other DNA
agtctctagaagaacaaaaaaaggtaattgataaaagggtaaaaacattaacgcactggagtgatgaagcagaag

SEQ ID NO: 827368 - DNA, 75 bp, synthetic construct
  source 1..75: mol_type = other DNA
gcgaaagctgacagaaacagaaccggtgattattttcgaaggtatcgaagcgccggcaatgaaccgccccgggaa

SEQ ID NO: 827369 - DNA, 75 bp, synthetic construct
  source 1..75: mol_type = other DNA
tagtcagctacgaaccggaccctattccgtctcctcacaaaaagaactgccgaaatacctctccgatctgcaaaa

SEQ ID NO: 827370 - DNA, 75 bp, synthetic construct
  source 1..75: mol_type = other DNA
tgcggagctgctgtcaaaagcgcaatcgggacgagccgatgagatcaacacttgtattggctgcaatcaggcctg

SEQ ID NO: 827371 - DNA, 75 bp, synthetic construct
  source 1..75: mol_type = other DNA
tgacggcaattttattgactggaagatttatcaatcagtagccgctgagttatatgcgcacaaccttgagcgtct

SEQ ID NO: 827372 - DNA, 75 bp, synthetic construct
  source 1..75: mol_type = other DNA
agatgggttctatcaggacgctgagcggttgagtacagagataatgagtctcaaaagtgagtttgaaaactacat

SEQ ID NO: 827373 - DNA, 75 bp, synthetic construct
  source 1..75: mol_type = other DNA
ttcagcatggtgaactggtggagaacacttcgatgaaggcgctattggcgaagctgaaatcggaaacctttattc

SEQ ID NO: 827374 - DNA, 75 bp, synthetic construct
  source 1..75: mol_type = other DNA
taaccgcgtttcaacgtgtctaccctgatggcaattttattgactggaagatctatcaatcggtagccgctgaat

SEQ ID NO: 827375 - DNA, 75 bp, synthetic construct
  source 1..75: mol_type = other DNA
cattcctgatcgcgttgttgaacaactgctggctatgcgtcagcaaagaaaaaaacatcttcacgctatcataaa

SEQ ID NO: 827376 - DNA, 75 bp, synthetic construct
  source 1..75: mol_type = other DNA
atgaacgcttatgaactccaggcactacgccatatttttgccatgactattgatgaatgcgcgacctggattgcc

SEQ ID NO: 827377 - DNA, 75 bp, synthetic construct
  source 1..75: mol_type = other DNA
gtgcatggagaagagtttggcgagcctcacatcactatgcctagtggccatgtttactggctaagagctatggag

SEQ ID NO: 827378 - DNA, 75 bp, synthetic construct
  source 1..75: mol_type = other DNA
ggattaattataaaaatggcggtattttttatcgttcagcccgtgatggttatggttttgaagccgactggtccg

SEQ ID NO: 827379 - DNA, 75 bp, synthetic construct
  source 1..75: mol_type = other DNA
ctggtccgaattttacaccaccaccagaaaaccttcagcaggagatgttggtgcactgccgttatctggtggtca

SEQ ID NO: 827380 - DNA, 75 bp, synthetic construct
  source 1..75: mol_type = other DNA
gaaggtcagcctggcccgcgcagccatctccctggagcctatgcagcctacctgcgagaccctgcgggtaacaaa

SEQ ID NO: 827381 - DNA, 75 bp, synthetic construct
  source 1..75: mol_type = other DNA
gaaggccaaccgggtcctcgtggtcatctgccaggtgcttatgctgcctacctgcgtgatccggctggtaacaag

SEQ ID NO: 827382 - DNA, 75 bp, synthetic construct
  source 1..75: mol_type = other DNA
atggcatcttctctcacgtctttatcggtgctgtagatgttcaaaagtcggctgagttttatgacgccactttag

SEQ ID NO: 827383 - DNA, 75 bp, synthetic construct
  source 1..75: mol_type = other DNA
atgggtggacattatcacgggaatgtcgatataggattcaaaccacactgaataataggcttgatttcttcgacc

SEQ ID NO: 827384 - DNA, 75 bp, synthetic construct
  source 1..75: mol_type = other DNA
gcgctgcgggtgacacaaattgatgtcagtgcgggtgagaagcctgggatggtgaatgtgcagcgactggagttt

SEQ ID NO: 827385 - DNA, 75 bp, synthetic construct
  source 1..75: mol_type = other DNA
attttcagcaatggcgtgagcaccagttaagtcgtggcgaacactggctggcacagcacctggcggggcgttcgc

SEQ ID NO: 827386 - DNA, 75 bp, synthetic construct
  source 1..75: mol_type = other DNA
aaaatctgccacaacaacgcctgcacaggtatcgcggatcatcagcgatagtgcttccgtgcactctgtggtcat

SEQ ID NO: 827387 - DNA, 75 bp, synthetic construct
  source 1..75: mol_type = other DNA
taaattcataaaatccattaccaaagatttggactctctcgttctaataagaaacagagttatgcatattcgacc

SEQ ID NO: 827388 - DNA, 75 bp, synthetic construct
  source 1..75: mol_type = other DNA
gacctgaaccgtgaagtttttgtcctcagtaaaattaatggtgaatggaaaattttcctttataccttcaacacc

SEQ ID NO: 827389 - DNA, 75 bp, synthetic construct
  source 1..75: mol_type = other DNA
tcagtgcgggtgagaagcctgggatggtgaatgtgcagcgactggagtttggacggggggtaggggctaaaaact

SEQ ID NO: 827390 - DNA, 75 bp, synthetic construct
  source 1..75: mol_type = other DNA
aataaagcacacattcttggcatttgtcttcataatggcggaacaacttcacatacagcgatccttgccagagca

SEQ ID NO: 827391 - DNA, 75 bp, synthetic construct
  source 1..75: mol_type = other DNA
atagtctacgtctcgcccaggggattgaggaattagcactacagatgtctggaggggacgttcctctggccattg

SEQ ID NO: 827392 - DNA, 75 bp, synthetic construct
  source 1..75: mol_type = other DNA
aaggatataaatacgttttttgataataatgattttatcaaaacaacgatgtacttaacaggtaaacaaagggct

SEQ ID NO: 827393 - DNA, 75 bp, synthetic construct
  source 1..75: mol_type = other DNA
gcgatgaacacccgactgaggagcgccgcaccggatattatcgcagcgcgaaaatctgccacaacaacgcctgca

SEQ ID NO: 827394 - DNA, 75 bp, synthetic construct
  source 1..75: mol_type = other DNA
caggtatcgcgggtcatcagtgacagcgcttccgcgcactcggtggtcatcaagcggatagccgagcgtggggag

SEQ ID NO: 827395 - DNA, 75 bp, synthetic construct
  source 1..75: mol_type = other DNA
gcgctgtgcgctaaacagcagcagctcatgccatcctcaactgcaggcgaggttattccagcaatatcaccagtc

SEQ ID NO: 827396 - DNA, 75 bp, synthetic construct
  source 1..75: mol_type = other DNA
gggcgaggggactggccgggcacatttttagactttgtcatcagtcagagcctgccaatggcaggctctggtgtt

SEQ ID NO: 827397 - DNA, 75 bp, synthetic construct
  source 1..75: mol_type = other DNA
gggcacatttttagactttgtcatcagtcagagcctgccaatggcaggctctggtgttcttttacgctaccacgc

SEQ ID NO: 827398 - DNA, 75 bp, synthetic construct
  source 1..75: mol_type = other DNA
tctttcccgctatattaactctctcaaggtcaaccgatatcaacgtacatctaccaacatatgttggtacagatg

SEQ ID NO: 827399 - DNA, 75 bp, synthetic construct
  source 1..75: mol_type = other DNA
ctgttactggcgggatcaccggggcactgaaggggaacgccgataccgcgacgaaacttgcggcagccaaaaaaa

SEQ ID NO: 827400 - DNA, 75 bp, synthetic construct
  source 1..75: mol_type = other DNA
cgacccgtgcggaagctgctgctgatcgtgctgaagagattgccggtgcggttgcgatggaagacgcaagcctta

SEQ ID NO: 827401 - DNA, 75 bp, synthetic construct
  source 1..75: mol_type = other DNA
atgagcacagaaaaagaaaagatgattgctggtgagttgtatcgctcggcagatgaggcgttatctcgcgatcgc

SEQ ID NO: 827402 - DNA, 75 bp, synthetic construct
  source 1..75: mol_type = other DNA
agcggtgactacattgacgacgaactgccagtctatcaaggcgaaacgacgcagaccttgcaggattatctgatg

SEQ ID NO: 827403 - DNA, 75 bp, synthetic construct
  source 1..75: mol_type = other DNA
agcaggagctacagcaggcgctggagagtaatccgctgcttgagcaaatcgacactcatgaagaaatcgacaccc

SEQ ID NO: 827404 - DNA, 75 bp, synthetic construct
  source 1..75: mol_type = other DNA
ttagccaacaactggcgatgacgccacagctccaacaggcaattcgtctgttgcagttgtcgacgctggaacttc

SEQ ID NO: 827405 - DNA, 75 bp, synthetic construct
  source 1..75: mol_type = other DNA
ctaataatcaacaccataatcagcccaaccacggagttgaccagctccagcagaccccaggttttcaacgtgtct

SEQ ID NO: 827406 - DNA, 75 bp, synthetic construct
  source 1..75: mol_type = other DNA
gcacgccgcactgttgcgaaataccgagagtctttatccattccgccgtcaaaccagcgtaaacagctcgtttga

SEQ ID NO: 827407 - DNA, 75 bp, synthetic construct
  source 1..75: mol_type = other DNA
acgaaacgccagacagcgaaacgctggacaccgctgacgcgctcgaacaaaaagagatgccggaagagctgccgc

SEQ ID NO: 827408 - DNA, 75 bp, synthetic construct
  source 1..75: mol_type = other DNA
ccaaaaaagacagcattccgggagtaaatacgacaggtaaccagaacactacgggtaatgcggcaacagctacaa

SEQ ID NO: 827409 - DNA, 75 bp, synthetic construct
  source 1..75: mol_type = other DNA
gtgcgcaccaacacaagagttccggtgcatttggtggcacgaacacgagcattttccctaatggttataccgcga

SEQ ID NO: 827410 - DNA, 75 bp, synthetic construct
  source 1..75: mol_type = other DNA
gtggctggacgattaagggcaagcccgccagtggtcgtgccgtattgtctcaggaacaggacggcattaaatcgc

SEQ ID NO: 827411 - DNA, 75 bp, synthetic construct
  source 1..75: mol_type = other DNA
gattattctaaatacagtgttaacacttcttctgcaggcgctcatacgcactctgtatcgggtactgctgcaagc

SEQ ID NO: 827412 - DNA, 75 bp, synthetic construct
  source 1..75: mol_type = other DNA
ttggcgataaagtactggaacagtccatccagtggctgacagataacggttcagcgtatagagcgcatgaaacac

SEQ ID NO: 827413 - DNA, 75 bp, synthetic construct
  source 1..75: mol_type = other DNA
gccagtgccgcgaaaacgtcagaaacgaatgccgcagcatcacaaaaatcggcagccacttctgcatccacagcg

SEQ ID NO: 827414 - DNA, 75 bp, synthetic construct
  source 1..75: mol_type = other DNA
cgcactccgttacgattggttcacatggacacaccatcaccgttaacgctgctggtaacgcggaaaacaccgtca

SEQ ID NO: 827415 - DNA, 75 bp, synthetic construct
  source 1..75: mol_type = other DNA
acaccatcacttttattgcgctgaaacctggcttgctcaccgggaaagcccgggatgttaccggaaatctgcatt

SEQ ID NO: 827416 - DNA, 75 bp, synthetic construct
  source 1..75: mol_type = other DNA
gcgcacatgcacatactgtaggtattggtgcgcatacgcactcggttgcgattggctcacatggacacaccatca

SEQ ID NO: 827417 - DNA, 75 bp, synthetic construct
  source 1..75: mol_type = other DNA
gccccaaaaattaacggtgttaagtttgatggctcggcggatattaacctcacgccggaaaatattggtgcattt

SEQ ID NO: 827418 - DNA, 75 bp, synthetic construct
  source 1..75: mol_type = other DNA
gcaagaaaaatatccggtgttccatttgatggttctactgatatcactttaaccgccgcgcatgtggctgctttt

SEQ ID NO: 827419 - DNA, 75 bp, synthetic construct
  source 1..75: mol_type = other DNA
ggctattcgtatgacgggggaagcggcgctacgtgctggtgctggtttagtccgagtactgacccgcagtgaaaa

SEQ ID NO: 827420 - DNA, 75 bp, synthetic construct
  source 1..75: mol_type = other DNA
gcattgaacctgctggcaatcaatcccgataagcgtcacaatcgcgtgatcacgccgcatcctggcgaggccgca

SEQ ID NO: 827421 - DNA, 75 bp, synthetic construct
  source 1..75: mol_type = other DNA
gctgggttaccgggatggcatgacgacaatcaggtcatttaaggaactggtgaatgaaaaagagaaaaccgcaca

SEQ ID NO: 827422 - DNA, 75 bp, synthetic construct
  source 1..75: mol_type = other DNA
tggttgagttcagccgtgtgatattgcgtcgcaagaacgatatggagcggctgacatctggcgctccatccttat

SEQ ID NO: 827423 - DNA, 75 bp, synthetic construct
  source 1..75: mol_type = other DNA
tcgttcagcgcaaggtcagcaagctagtctgcccttcgatactaatgtagacagccaaaaagctcatagtgagct

SEQ ID NO: 827424 - DNA, 75 bp, synthetic construct
  source 1..75: mol_type = other DNA
cacgctttccatctcgccatttgtcaggcttctcacaatcaggtgctggtgtttacgctgcaatcattgaccgac

SEQ ID NO: 827425 - DNA, 75 bp, synthetic construct
  source 1..75: mol_type = other DNA
ccagtgaaaacaacaaagaaatttcgctgatcgaacacgcgcagctggatcatgctttccatcttgccatttgtc

SEQ ID NO: 827426 - DNA, 75 bp, synthetic construct
  source 1..75: mol_type = other DNA
aacgctgtacgatctgctcgacgttcgcgcattgctggagggcgaatcggcaaggctggcggcaacgctgggaac

SEQ ID NO: 827427 - DNA, 75 bp, synthetic construct
  source 1..75: mol_type = other DNA
tcacgctcttgagcctagcaagccgctggcacacgacgagaagcccattaccatcgaagtggtttccatggactg

SEQ ID NO: 827428 - DNA, 75 bp, synthetic construct
  source 1..75: mol_type = other DNA
taaagtggaagctgtggtctggacggtacctatcttaatcatcatcttccttgcggtactgacctggaaaaccac

SEQ ID NO: 827429 - DNA, 75 bp, synthetic construct
  source 1..75: mol_type = other DNA
ctggacggtgcataccttaatcatcttcttccttgcggccctgacctggaaaaccactcactctcttgagcctag

SEQ ID NO: 827430 - DNA, 75 bp, synthetic construct
  source 1..75: mol_type = other DNA
ttatggtggactgcgccagcgccaaaaaagcagaagatacgctggcactgctgcgtaaaagccaggggtcgttac

SEQ ID NO: 827431 - DNA, 75 bp, synthetic construct
  source 1..75: mol_type = other DNA
tttgatgccgatttcatcctgatgactggtgaactggcggcattaattcaaaacctgatcgaaggattaggtggt

SEQ ID NO: 827432 - DNA, 75 bp, synthetic construct
  source 1..75: mol_type = other DNA
cgaagagatcaccaatcacattgaagccggaaaagtcgtcaccaaactggcgctcgactggcaacaacgcattca

SEQ ID NO: 827433 - DNA, 75 bp, synthetic construct
  source 1..75: mol_type = other DNA
tggccctatggctacggcggatggggctggtataatcccggccccgcgagagtacaaacagttgtaactgaataa

SEQ ID NO: 827434 - DNA, 75 bp, synthetic construct
  source 1..75: mol_type = other DNA
gccgccgaacgccatcgcttcgtttggcagcgacggcacgctgtcggtgacgcccgatgacggcgacgtgaccgc

SEQ ID NO: 827435 - DNA, 75 bp, synthetic construct
  source 1..75: mol_type = other DNA
gatggctggcgaataagcaaagacaaaacacgtgcttttgcgcctgggcataaagttttgaggattaacaaatga

SEQ ID NO: 827436 - DNA, 75 bp, synthetic construct
  source 1..75: mol_type = other DNA
ggcccgtaaagacgggtggcgaataagtaaagacaaaacgcgtgcttttgcgcccgggcataaagttttgagggt

SEQ ID NO: 827437 - DNA, 75 bp, synthetic construct
  source 1..75: mol_type = other DNA
ccgatgttttttaatcagccgttttcgctttcacgcaatgtggcagatgccagctatctgcagcaggtggctgaa

SEQ ID NO: 827438 - DNA, 75 bp, synthetic construct
  source 1..75: mol_type = other DNA
gataatactttcggaagtgttttcagattttacttccctgaactatatgatatcatccgtaggcttcaacccgat

SEQ ID NO: 827439 - DNA, 75 bp, synthetic construct
  source 1..75: mol_type = other DNA
tcaattcatcatgagaaaactaatacctccttttaggaggagtttattctcgctcgcagcctatactgatgaacc

SEQ ID NO: 827440 - DNA, 75 bp, synthetic construct
  source 1..75: mol_type = other DNA
aacgccaacaacaccaactgcgcgacagggaacgaataatacccaaatcgcaagcacggcttatgttatggctgc

SEQ ID NO: 827441 - DNA, 75 bp, synthetic construct
  source 1..75: mol_type = other DNA
caacaggtgattatgccgccgcagccaattgatccatggttttatggtggacgcggctggccctatggttacggc

SEQ ID NO: 827442 - DNA, 75 bp, synthetic construct
  source 1..75: mol_type = other DNA
attgctaccgtaccgctggacagcggagccagaccgacgctgggagaaccttctcgcggtcgcatttatgccgat

SEQ ID NO: 827443 - DNA, 75 bp, synthetic construct
  source 1..75: mol_type = other DNA
cagaacaatcgccgaagcgcgggaagtcctctcattcaaagagtcccaactctgggcaaagtaccgggaacgata

SEQ ID NO: 827444 - DNA, 75 bp, synthetic construct
  source 1..75: mol_type = other DNA
atggctattgccgcaagttacaccatgcatctctattgtgactgccgccagtgtacggaaggtgtatatcaagtg

SEQ ID NO: 827445 - DNA, 75 bp, synthetic construct
  source 1..75: mol_type = other DNA
tcgaccgttgccgccgttatcgaatacctcggtttacaggaaacggtaaacaaggctggtaacgccgttcagcgt

SEQ ID NO: 827446 - DNA, 75 bp, synthetic construct
  source 1..75: mol_type = other DNA
ataaccttctggttgctgggagggctgtccaccgtaaccttgcgtgatctttactacgctgcgccgatcattcta

SEQ ID NO: 827447 - DNA, 75 bp, synthetic construct
  source 1..75: mol_type = other DNA
gaaaaagccgaagtcgtcaggcgtgaaagtgtcagccggtgagcgtcaggaagaccagtcgcatgccgccctgct

SEQ ID NO: 827448 - DNA, 75 bp, synthetic construct
  source 1..75: mol_type = other DNA
gaaaaagccgaagtcgtcaggcgtcaaagtgtcagccggtgagcgtcaggaagaccaggcgcatgccgctctgct

SEQ ID NO: 827449 - DNA, 75 bp, synthetic construct
  source 1..75: mol_type = other DNA
ggcgcagatgcggcgggctgaaggcattaattttaatcagaacaatcacgtggtgattcagaacgacggtacgaa

SEQ ID NO: 827450 - DNA, 75 bp, synthetic construct
  source 1..75: mol_type = other DNA
cgcggctatgccaccggcgggtatgtcggtggcaccggaaaccggcggttatgtcggtacacctggcagcatggc

SEQ ID NO: 827451 - DNA, 75 bp, synthetic construct
  source 1..75: mol_type = other DNA
cccagacgcacggcgatcaggggctggcagccgatccgattaaagcgtacttcaacggcaccgcaggccagagct

SEQ ID NO: 827452 - DNA, 75 bp, synthetic construct
  source 1..75: mol_type = other DNA
tgaaagcggtgtatgacatggcccgcaagggggcgcaggatgagattcaggcgcagatgcgtgatggcggcgtat

SEQ ID NO: 827453 - DNA, 75 bp, synthetic construct
  source 1..75: mol_type = other DNA
tggagtacaaacgccagctggctgagctgggcgacaaggttgaataccagaaacggctgaatgagctggcacagc

SEQ ID NO: 827454 - DNA, 75 bp, synthetic construct
  source 1..75: mol_type = other DNA
agaacgacggtataaacggacaggcggggccgcagctgatgaaggcggtgtatgacatggcccgtaagggggagc

SEQ ID NO: 827455 - DNA, 75 bp, synthetic construct
  source 1..75: mol_type = other DNA
atgacatggcccgcaagggggcgcaggatgagattcaggcgcagatgcgtgatggcggcgtcttttccggaggca

SEQ ID NO: 827456 - DNA, 75 bp, synthetic construct
  source 1..75: mol_type = other DNA
gggatcggtgctgatccgcctcaatgaatcgacaggtccgaaggtgatgatctgcgcccatatggacgaagtggg

SEQ ID NO: 827457 - DNA, 75 bp, synthetic construct
  source 1..75: mol_type = other DNA
tggcccgtaaaggtgcgcaggatgagattcaggcgcagatgcgtgatggcggcgtattttccggaggcaggcgat

SEQ ID NO: 827458 - DNA, 75 bp, synthetic construct
  source 1..75: mol_type = other DNA
cggcgaacttccatttcgcgaccgggggatttacggggacggggggtaaatatgaacctgcggggattgttcatc

SEQ ID NO: 827459 - DNA, 75 bp, synthetic construct
  source 1..75: mol_type = other DNA
acgtttgataccacttttcaggttctccctcaccagcgagtgatggggaaagcctttgatgaccgcctcggttgc

SEQ ID NO: 827460 - DNA, 75 bp, synthetic construct
  source 1..75: mol_type = other DNA
gccgcgacattttgcagatgcagcaacttttatctgcccttattcaacgtcttacgcgtgagacggttgttcaac

SEQ ID NO: 827461 - DNA, 75 bp, synthetic construct
  source 1..75: mol_type = other DNA
gacattggcgcgcgctcctatgacgaagtgatgcaggcaggaattcgtccaggcgatcgcgtcacgtttgatact

SEQ ID NO: 827462 - DNA, 75 bp, synthetic construct
  source 1..75: mol_type = other DNA
aagcccattggtttcatcgcttctgctattgccaatggggttacagaaaccgaagtattgctccccgatggcgct

SEQ ID NO: 827463 - DNA, 75 bp, synthetic construct
  source 1..75: mol_type = other DNA
gctgatgaaggcggtgtatgacatggcccgcaagggggcgcaggatgagctccggctgcagttgcgtgatggcgg

SEQ ID NO: 827464 - DNA, 75 bp, synthetic construct
  source 1..75: mol_type = other DNA
acgaatatcaaactgggtaaaacaagttattcagagtttctgaatcaattagccaaccagtatgcgagctgcctg

SEQ ID NO: 827465 - DNA, 75 bp, synthetic construct
  source 1..75: mol_type = other DNA
aaccggtaagtaaattaccagaagcgaaacaggtaacgattgcgcagctagagaatgtgaaaccgctgctgatga

SEQ ID NO: 827466 - DNA, 75 bp, synthetic construct
  source 1..75: mol_type = other DNA
ccgatgaagaagtgggtagccgcgaactggacgacgacacgcttgccagctaccagaaacagtttaactacagcg

SEQ ID NO: 827467 - DNA, 75 bp, synthetic construct
  source 1..75: mol_type = other DNA
ctgctggcgcataaagacgagacgctggagtacaaacgccagctggctgagctgggcgacaaggttgaataccag

SEQ ID NO: 827468 - DNA, 75 bp, synthetic construct
  source 1..75: mol_type = other DNA
atgctgctcaaaccgtgggtgaatcgcagttccggcattcctgccgtgctggcggcgtgtggagccagcctggtc

SEQ ID NO: 827469 - DNA, 75 bp, synthetic construct
  source 1..75: mol_type = other DNA
aggccagtgagatggcagcaaaagatcgggccgagtctgaggcatcacggctgaaatataccgaagaggcgcaga

SEQ ID NO: 827470 - DNA, 75 bp, synthetic construct
  source 1..75: mol_type = other DNA
gaagtcggcactggtgacggtctatccattacctgacacccgcctgttgatggtggttaatatacacgccgtcaa

SEQ ID NO: 827471 - DNA, 75 bp, synthetic construct
  source 1..75: mol_type = other DNA
gaacgcgttatatcgctttgcgcgggaaatgtcgctgcgtcaggtgcgttttaccgatgatcagcgccgtcgggc

SEQ ID NO: 827472 - DNA, 75 bp, synthetic construct
  source 1..75: mol_type = other DNA
catggtggggattgtcgggagtattggcagcgccatgggtggtgctttcggtggtggggcgtctgcctccacggg

SEQ ID NO: 827473 - DNA, 75 bp, synthetic construct
  source 1..75: mol_type = other DNA
ggatttccgtcggacagtataaagcggccatgcgaaccctgcccgcacagtttacggatatcgccacgcagcttg

SEQ ID NO: 827474 - DNA, 75 bp, synthetic construct
  source 1..75: mol_type = other DNA
cccgcaggcgggcggtgcagacagcacgttgctgcgcaccacgctgattgtcgggcctggcgcggtgatccttgg

SEQ ID NO: 827475 - DNA, 75 bp, synthetic construct
  source 1..75: mol_type = other DNA
aaaatgcccgtctgggtctggcagcggccacgctgcagtcggatatggaaaaagccggtgaactggcggcaaggg

SEQ ID NO: 827476 - DNA, 75 bp, synthetic construct
  source 1..75: mol_type = other DNA
aaagaactggacggctacacagcaaaacaacagaaactggaactgtctcgcctgctggagaccgccgagccacat

SEQ ID NO: 827477 - DNA, 75 bp, synthetic construct
  source 1..75: mol_type = other DNA
aggcggatgccagaaaaaccgccagtactgttgaacaggggctgagccgacaggcgctggcggcacaaaaagccg

SEQ ID NO: 827478 - DNA, 75 bp, synthetic construct
  source 1..75: mol_type = other DNA
atgtcggcggtgccggaagtccggcgcagatgcggcgggccgaaggtattaattttaatcagaacaatcacgtgg

SEQ ID NO: 827479 - DNA, 75 bp, synthetic construct
  source 1..75: mol_type = other DNA
gctgttgaacagggcctgagccgtcaggcgctggctgcacaaaaagccgggatttccgtcgggcagtataaagcg

SEQ ID NO: 827480 - DNA, 75 bp, synthetic construct
  source 1..75: mol_type = other DNA
gttgagcagaacctgagtcgtcaggcgctggctgcacaaaaagccgggatttccgtcgggcagtataaagcggcc

SEQ ID NO: 827481 - DNA, 75 bp, synthetic construct
  source 1..75: mol_type = other DNA
agactgacgccagaaaaaccgccggtgttgttgagcagaacctgagtcgtcaggcgctggctgcacaaaaagccg

SEQ ID NO: 827482 - DNA, 75 bp, synthetic construct
  source 1..75: mol_type = other DNA
gcggtgtatgacatggcccgcaagggggcgcaggatgagattcaggcgcagatgcgtgatggcggcgtcttttcc

SEQ ID NO: 827483 - DNA, 75 bp, synthetic construct
  source 1..75: mol_type = other DNA
accactgacccgacgtcgggactgatggcgatggcgcgccagttccgtaacgtgacggcagagcagattgcgtat

SEQ ID NO: 827484 - DNA, 75 bp, synthetic construct
  source 1..75: mol_type = other DNA
tgcggaggagcagcttcgtggaagctggatggccgggctgaagtccggctggggcgagtgggcagaaagtgcgac

SEQ ID NO: 827485 - DNA, 75 bp, synthetic construct
  source 1..75: mol_type = other DNA
ctgactgggaaaatcgtctgtttaggttcaaaacattgaatctgataaattcagactttattgttggtcgtaatg

SEQ ID NO: 827486 - DNA, 75 bp, synthetic construct
  source 1..75: mol_type = other DNA
aacgcctgaatgagctggcacagcaggctgcgcggtttgagcagcagcagggcgcgaagcaggcggcaatcagtg

SEQ ID NO: 827487 - DNA, 75 bp, synthetic construct
  source 1..75: mol_type = other DNA
agaaagtgcgacggacagtttttcgcaggttaaaagcgtggccacgcagacctttgacggtattgcacagaatat

SEQ ID NO: 827488 - DNA, 75 bp, synthetic construct
  source 1..75: mol_type = other DNA
atggccagagtcaggcgtcatttttccggtacggaaagtgatgcgaaaaaaacagcggcagtcgttgaacagtcg

SEQ ID NO: 827489 - DNA, 75 bp, synthetic construct
  source 1..75: mol_type = other DNA
tggaggtggacaaggttgcagaggctttcggaaaactgaccaccgacccgacgtcggggctgattgcgatggcgc

SEQ ID NO: 827490 - DNA, 75 bp, synthetic construct
  source 1..75: mol_type = other DNA
ggtgctttccgaccggaatatcgctaaagatcgcctgccggttccggccccgatggcggttggcgcgatccagac

SEQ ID NO: 827491 - DNA, 75 bp, synthetic construct
  source 1..75: mol_type = other DNA
tacatgggcagccattgaaattaataaccaccaggccagaaatatggacgatgtgcaaagcttaggcgtgattta

SEQ ID NO: 827492 - DNA, 75 bp, synthetic construct
  source 1..75: mol_type = other DNA
cctgcctgtatggcgcgaccggtggtcgtctgtatgccgcaggccgcgcgggtgaacgtttcggcgtgcgtaact

SEQ ID NO: 827493 - DNA, 75 bp, synthetic construct
  source 1..75: mol_type = other DNA
gtactaccacgtaattctgatgcgggaaccggggagtaacgtactaccacgtaattctgatgcgggaaccgggga

SEQ ID NO: 827494 - DNA, 75 bp, synthetic construct
  source 1..75: mol_type = other DNA
atgttcagtcgagttttagcccttctggctgtgcttttgctaagtgcaaatacatgggcagccattgaaatcaat

SEQ ID NO: 827495 - DNA, 75 bp, synthetic construct
  source 1..75: mol_type = other DNA
atggctggagatggaagaaccgcactggttgaaagcgcatacgacaagctgaattatcaggattacagctactac

SEQ ID NO: 827496 - DNA, 75 bp, synthetic construct
  source 1..75: mol_type = other DNA
tggatctcgatacctactggtttgtgcaatacggtatgaccacacagccctacgagttcaccaaaggcagtatct

SEQ ID NO: 827497 - DNA, 75 bp, synthetic construct
  source 1..75: mol_type = other DNA
tcattacctgaacttgctggaatctaatcagcacagcggtgagtggcaggcgtttatcaattcgctgaccacgaa

SEQ ID NO: 827498 - DNA, 75 bp, synthetic construct
  source 1..75: mol_type = other DNA
aaccaccaggccagaaatatggacgacgtacagagcttaggcgtgatttatatcaatcataatttcgccactgaa

SEQ ID NO: 827499 - DNA, 75 bp, synthetic construct
  source 1..75: mol_type = other DNA
agtttgagcgcaccattctggtagccgacgaagacagctacgtcagctacattgaaggctgctccgcaccagtgc

SEQ ID NO: 827500 - DNA, 75 bp, synthetic construct
  source 1..75: mol_type = other DNA
gcagaaccagggggatgtagacaacatccgccaggccatgaaaaatgccaaaggaccgggtaacttccgcaacct

SEQ ID NO: 827501 - DNA, 75 bp, synthetic construct
  source 1..75: mol_type = other DNA
cagccaggtggcggcgaaggatgagtttaccggcatcaaagacgccacccgagacgacctgttagccgcgcaccg

SEQ ID NO: 827502 - DNA, 75 bp, synthetic construct
  source 1..75: mol_type = other DNA
gcgcgaacgcctttttaagtaaagaggtggaggcggcgtttgagcagttgggcgttcccgtgcgggaaggcaaag

SEQ ID NO: 827503 - DNA, 75 bp, synthetic construct
  source 1..75: mol_type = other DNA
tgattggcgctaactgtggggcgcataccttcccgtatgtcgagtgtcgtaacaatagcgctcaactggaacatg

SEQ ID NO: 827504 - DNA, 75 bp, synthetic construct
  source 1..75: mol_type = other DNA
tggcaaaggggataaacgaagaggtggtgcgcgcaatttcggcgaagcgtaatgagccggagtggatgctggagt

SEQ ID NO: 827505 - DNA, 75 bp, synthetic construct
  source 1..75: mol_type = other DNA
cgcggctatgccaccggcggttatgtcggtggcaccggaagtccggcgcaaatgcggcgttcagagggtatcagg

SEQ ID NO: 827506 - DNA, 75 bp, synthetic construct
  source 1..75: mol_type = other DNA
ccggtaatcaccgatgattccgccgcattcagtgagcaggcggtggcggcaatggagaaagagttcagcaaacta

SEQ ID NO: 827507 - DNA, 75 bp, synthetic construct
  source 1..75: mol_type = other DNA
tgcccgccgccggacaccgtttatgcctatgccaatagtctgcaacgtaccgttgcgactgcacagttctttatt

SEQ ID NO: 827508 - DNA, 75 bp, synthetic construct
  source 1..75: mol_type = other DNA
acccttcaggcacctgctcagcgcgtgacgctggaattaagcggtgaaataacagaaaactcccccgcgagaagc

SEQ ID NO: 827509 - DNA, 75 bp, synthetic construct
  source 1..75: mol_type = other DNA
cgtcgccactgcgcagttctttattactggcgcattcccggggtgtgatattcctgttcatcatcaggaaaaaat

SEQ ID NO: 827510 - DNA, 75 bp, synthetic construct
  source 1..75: mol_type = other DNA
tcgccggaagtcgcgcgcaatgttgcgaaaccgctggtaagttatatcgacaaagccctggtcaccgatcgtgcc

SEQ ID NO: 827511 - DNA, 75 bp, synthetic construct
  source 1..75: mol_type = other DNA
aaccgtatcagttgcatgaccagaacgaacgcacgccgattggcggcaaaatcgttttccagcgttggcatgaca

SEQ ID NO: 827512 - DNA, 75 bp, synthetic construct
  source 1..75: mol_type = other DNA
gatatgttcagcaacggcggaacggacggcggggcggtgcatttaaccggcactggcgtacccacagtggtgatg

SEQ ID NO: 827513 - DNA, 75 bp, synthetic construct
  source 1..75: mol_type = other DNA
aatggctggcagaacaggggatggtgaaatcaggggaatgcccgccaccggacaccgtttatgcctatgccaata

SEQ ID NO: 827514 - DNA, 75 bp, synthetic construct
  source 1..75: mol_type = other DNA
aaagttggcaactcgctggtagatgcgtttactttgcaatactacgaaggtttcccgatggatcaggtggcctgg

SEQ ID NO: 827515 - DNA, 75 bp, synthetic construct
  source 1..75: mol_type = other DNA
ggcgtgctcgaagtgtatatgggccattacatgcgtgaatggctggcagagcaggggatggtgaaatcgggggaa

SEQ ID NO: 827516 - DNA, 75 bp, synthetic construct
  source 1..75: mol_type = other DNA
gaagagagtgtacttagccaggtcaccactgctatccagaatgctcaggaaaaaattgtctacgccagcaatggc

SEQ ID NO: 827517 - DNA, 75 bp, synthetic construct
  source 1..75: mol_type = other DNA
tgcagcgttccggagacgaggccggggcattgcaggcggcgaacgatatcgccacgaaaggctttgatgagcaga

SEQ ID NO: 827518 - DNA, 75 bp, synthetic construct
  source 1..75: mol_type = other DNA
cagagcgcgaagcaggccgccatcagcgcaaaagcccgcggtctcactgaccgtcaggcgcagcgggagtctgaa

SEQ ID NO: 827519 - DNA, 75 bp, synthetic construct
  source 1..75: mol_type = other DNA
atgcgtttcagtactcaaatgatgtaccagcagaacatgcgcggtatcaccagttctcaggcggaatggatgaag

SEQ ID NO: 827520 - DNA, 75 bp, synthetic construct
  source 1..75: mol_type = other DNA
tgcgcagaaggcatttgatgaggcggataaaaaatggcagtggtaccagagccggagccagcgccggggaaagac

SEQ ID NO: 827521 - DNA, 75 bp, synthetic construct
  source 1..75: mol_type = other DNA
gggagtattggcagcgccatgggtggtgctttcggtggtggggcgtctgcctccacggggacggccattcaggct

SEQ ID NO: 827522 - DNA, 75 bp, synthetic construct
  source 1..75: mol_type = other DNA
cggcgtgccggtggagaaagtcgctgcagcctacggcaagctcgcaactgacccgacatcgggcctgatcgcgat

SEQ ID NO: 827523 - DNA, 75 bp, synthetic construct
  source 1..75: mol_type = other DNA
ctgatgcgcggctatgccaccggtggttatgtcggtggcaccggaagtccggcgcaaatgcggcgttcagagggt

SEQ ID NO: 827524 - DNA, 75 bp, synthetic construct
  source 1..75: mol_type = other DNA
gtgtatttatcaagttctgacttgttaaccaacagcaacacgatcctgaaaggtgcggaagataatggcgtagga

SEQ ID NO: 827525 - DNA, 75 bp, synthetic construct
  source 1..75: mol_type = other DNA
gaaacgctggagtacaaacgccagctggctgagctgggcgacaaggtggagcaccagaaacggctgaatgagctg

SEQ ID NO: 827526 - DNA, 75 bp, synthetic construct
  source 1..75: mol_type = other DNA
cagacccgtcgcctgaaagaaaacatgggaacactggagacctgggcggataaaacagggaaggcattcaaatcg

SEQ ID NO: 827527 - DNA, 75 bp, synthetic construct
  source 1..75: mol_type = other DNA
aaaaaatggcagtggtatcagagccgaagccaccggcgcggtaaaacgtcagcatttcttgccaatctccggggg

SEQ ID NO: 827528 - DNA, 75 bp, synthetic construct
  source 1..75: mol_type = other DNA
aaatggcagtggtaccagagccggagccagcgccggggaaaaaccgcctcttttcgtgccaaccttcagggcgca

SEQ ID NO: 827529 - DNA, 75 bp, synthetic construct
  source 1..75: mol_type = other DNA
ggcggcgcggtttgaacagcagcagagcgcgaagcaggcggcaatcagcgcaaaagcccgcggtctcaccgatcg

SEQ ID NO: 827530 - DNA, 75 bp, synthetic construct
  source 1..75: mol_type = other DNA
gcgacactgcaggcagacctggaaaaagccagcgaaatggcggcacgggatcgggctgaatcagaggcctcacgg

SEQ ID NO: 827531 - DNA, 75 bp, synthetic construct
  source 1..75: mol_type = other DNA
ctggcgatccatgaagagcatctgcgtggtcttatcaccgagcatgtgcaacacaccggttcccagcgaggtgaa

SEQ ID NO: 827532 - DNA, 75 bp, synthetic construct
  source 1..75: mol_type = other DNA
taatactgtgtgttgcccgtattgtggttctgtcgaccccttcggctattaccggaatacagaccgtatcgttac

SEQ ID NO: 827533 - DNA, 75 bp, synthetic construct
  source 1..75: mol_type = other DNA
taaccaacagcaacacgatcctgaaaggtgcggaagataatggcgtaggatttattcttgaaagtaatggtacgc

SEQ ID NO: 827534 - DNA, 75 bp, synthetic construct
  source 1..75: mol_type = other DNA
ttattgacctgagtctggatgctgtccgtttcgatgagcagatgagccgggtaaggcgtcatttttcaggactgg

SEQ ID NO: 827535 - DNA, 75 bp, synthetic construct
  source 1..75: mol_type = other DNA
cctgctgcaacagggcgggcagattaaggactcgttcggtgggatgatccccatgttccggggactggctggggc

SEQ ID NO: 827536 - DNA, 75 bp, synthetic construct
  source 1..75: mol_type = other DNA
tcacccgttccgtgctctccatgctgacagagatttttctgaagcaggcgatggtggggattgtcgggagtatcg

SEQ ID NO: 827537 - DNA, 75 bp, synthetic construct
  source 1..75: mol_type = other DNA
cgctaccggctggcggcgcggattgatgtggaagataacgggccgggcattccgcctcatttgcaggatacgctg

SEQ ID NO: 827538 - DNA, 75 bp, synthetic construct
  source 1..75: mol_type = other DNA
gcaggatttttctaatgcacgggcagtaagcacgaatagcgttagtcatacatcctttgatattgcggacggtga

SEQ ID NO: 827539 - DNA, 75 bp, synthetic construct
  source 1..75: mol_type = other DNA
tatatccggttaaatctggcctgcccacggagtatgctgacagcagggatgaaaagaatttcacaggtactgcgg

SEQ ID NO: 827540 - DNA, 75 bp, synthetic construct
  source 1..75: mol_type = other DNA
ctcagcaaaagtgggcttgtgtacaattcattgcagaggtgtctctgattgcaaattgcaaaccgtcagacctta

SEQ ID NO: 827541 - DNA, 75 bp, synthetic construct
  source 1..75: mol_type = other DNA
aaaccagcaaaaactagatgtagtcgtcaatggcgaaacgaataaattcagtgatttgtttgacgcatatattat

SEQ ID NO: 827542 - DNA, 75 bp, synthetic construct
  source 1..75: mol_type = other DNA
gcaaccgacggtggctaaaatgcttaagcgactggcaaccatggggctgattgaaatgatcccctggcgtggcgt

SEQ ID NO: 827543 - DNA, 75 bp, synthetic construct
  source 1..75: mol_type = other DNA
gaagtgggggaagctcgtcaggtggacatggctgctcgtctgggagtttcgcaaccgacggtggctaaaatgctt

SEQ ID NO: 827544 - DNA, 75 bp, synthetic construct
  source 1..75: mol_type = other DNA
gaagcaagagaggcaggactcaatatgcgctttgataaaagtactatatcaagatggattaaagcatcatctcag

SEQ ID NO: 827545 - DNA, 75 bp, synthetic construct
  source 1..75: mol_type = other DNA
gggatgactagcgcgaaggagctggcggcagcgttatccgttgatcccgacagcgtcgcgatatgtggcgaaggc

SEQ ID NO: 827546 - DNA, 75 bp, synthetic construct
  source 1..75: mol_type = other DNA
ctgtccggcaacccccgctaccgccaccgggcgggggcttcgctgtcgcactgggactggcgctcggggagattt

SEQ ID NO: 827547 - DNA, 75 bp, synthetic construct
  source 1..75: mol_type = other DNA
gtttttaacggcggaaggggagaagctggcgcaggaaagccgcgagcggcatcagttagtcgaaaatttcttgtt

SEQ ID NO: 827548 - DNA, 75 bp, synthetic construct
  source 1..75: mol_type = other DNA
acagaactggcgtggtttcacccgttctgtgctctccatgctgacagagatttttctgaagcaggcgatggtggg

SEQ ID NO: 827549 - DNA, 75 bp, synthetic construct
  source 1..75: mol_type = other DNA
tcaccctgccgatggtcggggtcacctcgctggcggtggcgacaggtgcgctggcgtacgcctggtaccaggggg

SEQ ID NO: 827550 - DNA, 75 bp, synthetic construct
  source 1..75: mol_type = other DNA
ctgcatccggtgtggaggtggacaaggttgcagaggctttcggaaaactgaccaccgacccgacgtcggggctga

SEQ ID NO: 827551 - DNA, 75 bp, synthetic construct
  source 1..75: mol_type = other DNA
gtgctttcggtggtggggcgtctgcctccacggggacggccattcaggctgcggcggcgaactttcattttgcga

SEQ ID NO: 827552 - DNA, 75 bp, synthetic construct
  source 1..75: mol_type = other DNA
agcgcagcgtcttcgtgacgtgtatggtgataatccgcaggcgctggcacaggtcaccggggcactgaaacagac

SEQ ID NO: 827553 - DNA, 75 bp, synthetic construct
  source 1..75: mol_type = other DNA
aggttatcagcttcatgactaccgacgcattcaccgccgaggtctgggacgttatcagcgttacgcatgatgaat

SEQ ID NO: 827554 - DNA, 75 bp, synthetic construct
  source 1..75: mol_type = other DNA
ttgtggggcagtattttggctggcgaatgaccttcttcgcgattggtatcggggcgcttattacccttttgtgcc

SEQ ID NO: 827555 - DNA, 75 bp, synthetic construct
  source 1..75: mol_type = other DNA
ctgaaaaagccgaagcagtccgctgcgggagagcgtcaggaagatcgagcacatgcagctcttcttgcgttacaa

SEQ ID NO: 827556 - DNA, 75 bp, synthetic construct
  source 1..75: mol_type = other DNA
ggctgcgcggtttgagcagcagcagagcgcgaagcaggcggcaatcagtgcccaggcgcggggcctcaccgaccg

SEQ ID NO: 827557 - DNA, 75 bp, synthetic construct
  source 1..75: mol_type = other DNA
atcacgtggtgattcagaacgacggccccaacgggcgggcagggccgcagctgatgaaagcggtgtatgagatgg

SEQ ID NO: 827558 - DNA, 75 bp, synthetic construct
  source 1..75: mol_type = other DNA
gtgtatgacatggcccgtaagggggcgcaggatgagctccggctgcagttgcgtgatggcggtatgttatcaggg

SEQ ID NO: 827559 - DNA, 75 bp, synthetic construct
  source 1..75: mol_type = other DNA
ccgcttcttccgggactgccattcaggctgcggcggcgaacttccattttgcaaccggaggatttacgggaaccg

SEQ ID NO: 827560 - DNA, 75 bp, synthetic construct
  source 1..75: mol_type = other DNA
atggcaggcctgaagtccggctggagcgagtggaaagagagtgccacggacagtatgtcgcaggttaaaagtgct

SEQ ID NO: 827561 - DNA, 75 bp, synthetic construct
  source 1..75: mol_type = other DNA
catggcccgcaagggggcgcaggatgagctccggctgcagttgcgtgatggcggtatgttatcggggagcaggcg

SEQ ID NO: 827562 - DNA, 75 bp, synthetic construct
  source 1..75: mol_type = other DNA
tctgagcaggaaaaatccctgctggcccatgagaaagagacgctggagtacaaacgccagctggctgagctggga

SEQ ID NO: 827563 - DNA, 75 bp, synthetic construct
  source 1..75: mol_type = other DNA
cggacggaaggcattaattttaatcagaacaatcacgtggtgattcagaacgacggctccaacggacaggcgggg

SEQ ID NO: 827564 - DNA, 75 bp, synthetic construct
  source 1..75: mol_type = other DNA
tgacgacccgccatccttcggcggaatctcgccgctatctgtataaggtaaatacggcgcagaagtcctggcgcc

SEQ ID NO: 827565 - DNA, 75 bp, synthetic construct
  source 1..75: mol_type = other DNA
tgaaaaaccgtctgaaaagccgcagcaacgggctacgtatcatctacagcgtcaccattaacatggtgccgaacc

SEQ ID NO: 827566 - DNA, 75 bp, synthetic construct
  source 1..75: mol_type = other DNA
accatcttgataaacgtgcgcacaaatatctcggtatggtccgtcaggcatcgcgtaaatatggcgtcgatgagt

SEQ ID NO: 827567 - DNA, 75 bp, synthetic construct
  source 1..75: mol_type = other DNA
aagcttccgtactggttacgcgcgcttccgatcacaatccgctactcgttgaattcggtcccggcaagcctgata

SEQ ID NO: 827568 - DNA, 75 bp, synthetic construct
  source 1..75: mol_type = other DNA
gaacatctacaaacaacaacgcgctgaatggttgtcggtattaaagaactacggaaaagatgcgcacctggtttt

SEQ ID NO: 827569 - DNA, 75 bp, synthetic construct
  source 1..75: mol_type = other DNA
ggcggtgtatgacatggcccgcaagggggcgcaggatgagattcaggcgcagatgcgtgatggcggcgtcttttc

SEQ ID NO: 827570 - DNA, 75 bp, synthetic construct
  source 1..75: mol_type = other DNA
cggaaatatggcgttgatgagtcgctgattctggcgattatgcagaccgagtcatcctttaacccatatgcggtc

SEQ ID NO: 827571 - DNA, 75 bp, synthetic construct
  source 1..75: mol_type = other DNA
tgaatgagctggcacagcaggcggcgcggtttgaacagcagcaaagcgcgaagcaggcggcaatcagcgcaaaag

SEQ ID NO: 827572 - DNA, 75 bp, synthetic construct
  source 1..75: mol_type = other DNA
cccgcggtctcactgaccgtcaggcgcagcgggagtctgaagcgcagcgtcttcgtgacgtgtacggtgataatc

SEQ ID NO: 827573 - DNA, 75 bp, synthetic construct
  source 1..75: mol_type = other DNA
gctgacgacccgccatccctctgcggaatctcgccgttatctttataaagtgaataccgcgcaaaaatcctaccg

SEQ ID NO: 827574 - DNA, 75 bp, synthetic construct
  source 1..75: mol_type = other DNA
atacaccgatcaatatcaaacccgcagccacatcaacttcgatgacggtacgatcactatcgaaaccatcgccgg

SEQ ID NO: 827575 - DNA, 75 bp, synthetic construct
  source 1..75: mol_type = other DNA
tcttgtttgatcctgccagcaatattgataccggcaccgcgtatctggcgatgctgaacaatgtttatctcggcg

SEQ ID NO: 827576 - DNA, 75 bp, synthetic construct
  source 1..75: mol_type = other DNA
ctgattgcgatggcgcgccagttccgtaacgtgacggcagagcagattgcgtatgttgcgcagctgcagcgttcc

SEQ ID NO: 827577 - DNA, 75 bp, synthetic construct
  source 1..75: mol_type = other DNA
acgagtgaaaacctggagctggtttgccgatgataaacaggaaatccgtcagggcggttttgctggttggttaac

SEQ ID NO: 827578 - DNA, 75 bp, synthetic construct
  source 1..75: mol_type = other DNA
gcttgcggaggagacgccgttacaactggcgctgcgcggtgcgcagcacgatcaactgtatcagctgtcgtcatc

SEQ ID NO: 827579 - DNA, 75 bp, synthetic construct
  source 1..75: mol_type = other DNA
ggctctaaattctttgggtttgatatggataacgaatacatcggcggattcgatgtaggagcatggggagtatta

SEQ ID NO: 827580 - DNA, 75 bp, synthetic construct
  source 1..75: mol_type = other DNA
tgatcctgattctggctatacgacgctaagcgatgagacgtaccgcatcattctgaaagcgaagattgcgattaa

SEQ ID NO: 827581 - DNA, 75 bp, synthetic construct
  source 1..75: mol_type = other DNA
aggcgtgacaaatgtctcgacgttacctgacacgctcaccacaccgttagggagcttatggaaactgtatgttta

SEQ ID NO: 827582 - DNA, 75 bp, synthetic construct
  source 1..75: mol_type = other DNA
cgtttgcttatcccgacaacagccttagccgctggggagcgccacgctcaacctgccagttattacccaaagcga

SEQ ID NO: 827583 - DNA, 75 bp, synthetic construct
  source 1..75: mol_type = other DNA
tgaatgagctggcacagcaggcggcgcggtttgaacagcagcagcgggcgaagcgggcggccatgagcgaaaagc

SEQ ID NO: 827584 - DNA, 75 bp, synthetic construct
  source 1..75: mol_type = other DNA
ctgccggaagtccggcgcagatgcggcgggccgaaggcattaattttaatcagaacaatcacgtggtgattcaga

SEQ ID NO: 827585 - DNA, 75 bp, synthetic construct
  source 1..75: mol_type = other DNA
ccaactatcacgccacgaagccgaaattttttgatcacgtcgacctgagcacgcggccactgattgatatcacta

SEQ ID NO: 827586 - DNA, 75 bp, synthetic construct
  source 1..75: mol_type = other DNA
aaattttttggttttgatatggataacgaattcatcagtggttttgatgtaggggcatggggagtattactctga

SEQ ID NO: 827587 - DNA, 75 bp, synthetic construct
  source 1..75: mol_type = other DNA
ccagcctatctcaggtgtctatttcagctgggataccgacgggcttggatatgatcagggtgtatggcaggggcc

SEQ ID NO: 827588 - DNA, 75 bp, synthetic construct
  source 1..75: mol_type = other DNA
tcgccaccttcaacctcgccgatactgcaatctgtgtcggtgcggcattgattgtgctggaaggttttttgcctt

SEQ ID NO: 827589 - DNA, 75 bp, synthetic construct
  source 1..75: mol_type = other DNA
cttgccgcagaggtgaatgccgggcgttttcgccaggatctctactatcgcctgaacgtggtggcgattgaagta

SEQ ID NO: 827590 - DNA, 75 bp, synthetic construct
  source 1..75: mol_type = other DNA
gagtatcggcagcgccattggcggtgctttcggtggtggtgcgtctgcctccacggggacggccattcaggctgc

SEQ ID NO: 827591 - DNA, 75 bp, synthetic construct
  source 1..75: mol_type = other DNA
atacgatcctgattccggatacatgtacctcagcgatgaaacttatcgtgtcatccttaaagcgaagattgcgat

SEQ ID NO: 827592 - DNA, 75 bp, synthetic construct
  source 1..75: mol_type = other DNA
tttgatgctgtagattttctgctacaccaaaaagcattgctaccccaaaatagtctaatatatcttgatccacct

SEQ ID NO: 827593 - DNA, 75 bp, synthetic construct
  source 1..75: mol_type = other DNA
tttcttcagcgctttgccgagcgtaatcgcaaggcggtaaaaggttttacgccccaggcgatggatctgctgatt

SEQ ID NO: 827594 - DNA, 75 bp, synthetic construct
  source 1..75: mol_type = other DNA
gctggtaacgctcaactgtgcggcactcaacgaatccttgctggaatctgaattgttcggtcacgaaaaaggggc

SEQ ID NO: 827595 - DNA, 75 bp, synthetic construct
  source 1..75: mol_type = other DNA
ctgctcagtgaaatcgccctcgtcgcgccatcggaagccacggtgctgatccacggcgattccggcaccggtaaa

SEQ ID NO: 827596 - DNA, 75 bp, synthetic construct
  source 1..75: mol_type = other DNA
cgccgggaagggcgctttgttgaggcggacggggcacgctgtttctcgatgaaattggcgatatctcgccgatga

SEQ ID NO: 827597 - DNA, 75 bp, synthetic construct
  source 1..75: mol_type = other DNA
tggcgatatctcgccgatgatgcaggttcgcctgctgcgtgccattcaggagcgcgaagtgcaacgtgtcggtag

SEQ ID NO: 827598 - DNA, 75 bp, synthetic construct
  source 1..75: mol_type = other DNA
ctggattatctcatcaagccgctggatttcgataacctgcaggcgacgctggaaaaggcgctcgcgcatacgcac

SEQ ID NO: 827599 - DNA, 75 bp, synthetic construct
  source 1..75: mol_type = other DNA
aatatctgcgtatttgccatctgaacaactgcgccaccggcgtggcaactcaggacgaaaaactgcgtaaaaatc

SEQ ID NO: 827600 - DNA, 75 bp, synthetic construct
  source 1..75: mol_type = other DNA
gtgttgagcatagcgataccgtgcgcaactggctcaaaaatgcttcaattcccgttatggaaatcggcgccattc

SEQ ID NO: 827601 - DNA, 75 bp, synthetic construct
  source 1..75: mol_type = other DNA
tatcaaataatcctggctgagtcacgccatcgtctggaacaagaagaaaaactgctggaaaccctgctggcttct

SEQ ID NO: 827602 - DNA, 75 bp, synthetic construct
  source 1..75: mol_type = other DNA
taacaagcgagtggttaaatgccctgaagaggtggcgcagcaattggcggtcgaagcgggtagtgatgtcttttt

SEQ ID NO: 827603 - DNA, 75 bp, synthetic construct
  source 1..75: mol_type = other DNA
atgaaaatgacaaaactggccacactttttctgactgccactctaagccttgccagtggtgccgcactggccgcc

SEQ ID NO: 827604 - DNA, 75 bp, synthetic construct
  source 1..75: mol_type = other DNA
aaaaagacggcagtcttgctgttttctgtcacactggcaaaaccagaaaacagacgcttgacacgtataaagcgc

SEQ ID NO: 827605 - DNA, 75 bp, synthetic construct
  source 1..75: mol_type = other DNA
tggcctgtggtgttttgtatgaatgccagcgaagacgcatcaaagtacctgacgatctcgccgtagtaggatttg

SEQ ID NO: 827606 - DNA, 75 bp, synthetic construct
  source 1..75: mol_type = other DNA
aactacaaaatccttattccagaagactggagtgaaacaattttgaataacattatcaatacacaaagaccatta

SEQ ID NO: 827607 - DNA, 75 bp, synthetic construct
  source 1..75: mol_type = other DNA
aagcacgccttgagcaaatcccacaaatcctgaaacgttttcgtcaggcggtgttggctgcggcagtaactggta

SEQ ID NO: 827608 - DNA, 75 bp, synthetic construct
  source 1..75: mol_type = other DNA
aaaaacaggtcaacaacgccttagcccgcgttaacaacctgacgcaatccatcctggcaaaagcgttccgtggtg

SEQ ID NO: 827609 - DNA, 75 bp, synthetic construct
  source 1..75: mol_type = other DNA
gatgcaggcgctggaagaagagggtgtggtgacgcgttcgcgcggttacggcacgcagatcaacaacatcttcga

SEQ ID NO: 827610 - DNA, 75 bp, synthetic construct
  source 1..75: mol_type = other DNA
ttgcccaactgaacgagcgtattttagcggcggataacacgccgctttatattaagtttgccgaaacggtaaaaa

SEQ ID NO: 827611 - DNA, 75 bp, synthetic construct
  source 1..75: mol_type = other DNA
ttatcagctccgtgatgctggtgatgattgtggaaatcctcaatagcgccatcgaagcagtggttgaccgaattg

SEQ ID NO: 827612 - DNA, 75 bp, synthetic construct
  source 1..75: mol_type = other DNA
ctggggggccgtcagttgcgagcactaggtaagttgatgccgggcgaagaagaggtggctgagaaccctcgtgcc

SEQ ID NO: 827613 - DNA, 75 bp, synthetic construct
  source 1..75: mol_type = other DNA
gcttatctgtttgccgggccgttattggtcgttgagcagttaaaacggcaattagcgattattcatgaagcgcag

SEQ ID NO: 827614 - DNA, 75 bp, synthetic construct
  source 1..75: mol_type = other DNA
gcgtgatattggtctgaaactggccgacacgcttcctggcgttaagccgcaacttatccgtcaggcaatgggatt

SEQ ID NO: 827615 - DNA, 75 bp, synthetic construct
  source 1..75: mol_type = other DNA
ttggcggcggcatggtggggctggcggttgcctgcggcttgcagggtagcggcttacgcgttgccgtactggagc

SEQ ID NO: 827616 - DNA, 75 bp, synthetic construct
  source 1..75: mol_type = other DNA
gatgcccgcgttaattattccgctaactcataatgcgcttaacgatctggcgatccgcggcgcggcgctggatat

SEQ ID NO: 827617 - DNA, 75 bp, synthetic construct
  source 1..75: mol_type = other DNA
acagtaaattacaaaaagtggctcgttacaccatgatattgctgatgctggcagaaccgggagtgtggctatggt

SEQ ID NO: 827618 - DNA, 75 bp, synthetic construct
  source 1..75: mol_type = other DNA
cgcgcccgcggcgtgccgcttgatgaaggctggtatcagcgtttacgcgcgatgcccgcgctaattattccgcta

SEQ ID NO: 827619 - DNA, 75 bp, synthetic construct
  source 1..75: mol_type = other DNA
ctgcagagctgattgctgaactgaaacggttgcatcgtcaggggaaagacatcgggcagtacatttatctgcgcc

SEQ ID NO: 827620 - DNA, 75 bp, synthetic construct
  source 1..75: mol_type = other DNA
gcgcgccagtttgccgcacaccgtctggcgctggtgggcgacgccgcgcataccattcacccgctggcggggcag

SEQ ID NO: 827621 - DNA, 75 bp, synthetic construct
  source 1..75: mol_type = other DNA
ttgatgacgctgagcgtggtttctcctttatgcgtgacggcccactggacatgcgcatggacccgactcgcggtc

SEQ ID NO: 827622 - DNA, 75 bp, synthetic construct
  source 1..75: mol_type = other DNA
aaggcattctggcctttttaccgcttagcgatccgcatctttgctcgattgtctggtcactgtcgccagaggaag

SEQ ID NO: 827623 - DNA, 75 bp, synthetic construct
  source 1..75: mol_type = other DNA
aaggcattctggcctttttgccgcttagcgatccgcatctttgctcaattgtctggtcattagcgccagaggaag

SEQ ID NO: 827624 - DNA, 75 bp, synthetic construct
  source 1..75: mol_type = other DNA
gcacgccagtttgccgcgcaccgtctggcgctggtgggtgacgccgcgcataccattcatccgctggcggggcag

SEQ ID NO: 827625 - DNA, 75 bp, synthetic construct
  source 1..75: mol_type = other DNA
tgagtgacacagccgctaacgcttatacgattcgctggctgaaagatgtttctgttaagcgtgacaaaatcatct

SEQ ID NO: 827626 - DNA, 75 bp, synthetic construct
  source 1..75: mol_type = other DNA
acaatgactcggtaatgctgccaacttactatttagtgtatgatggtgattttaaggtgcttgcgtggcttccat

SEQ ID NO: 827627 - DNA, 75 bp, synthetic construct
  source 1..75: mol_type = other DNA
cttacaattcgaacatggcatctcttgatttgtcatatcttgatttgagtgagttgccgcctatcccttcgacag

SEQ ID NO: 827628 - DNA, 75 bp, synthetic construct
  source 1..75: mol_type = other DNA
acctcagctttaataaaattaaaacgataacctttccaaatgaatcaaaactggaaaatatttatattgatcata

SEQ ID NO: 827629 - DNA, 75 bp, synthetic construct
  source 1..75: mol_type = other DNA
gttctttaaagaagactggatcccgaagttctcggatcgcgtcatctttaccctggcaccgatgattgcctttac

SEQ ID NO: 827630 - DNA, 75 bp, synthetic construct
  source 1..75: mol_type = other DNA
atgaccgacatcgtcaacagccaggcgcatgtgtggaacgttatcccgcaattctttggttttattacctttgcc

SEQ ID NO: 827631 - DNA, 75 bp, synthetic construct
  source 1..75: mol_type = other DNA
gagaaatataacgccgaatatggttgaaagtgttatcaaagaaggaactcctcaaaatagtgtcgttaatggcgt

SEQ ID NO: 827632 - DNA, 75 bp, synthetic construct
  source 1..75: mol_type = other DNA
gtttgctagagctttaaacaatataaagcctaaagcttttatagtagaaaacgtgtctggtatggttagaaaaaa

SEQ ID NO: 827633 - DNA, 75 bp, synthetic construct
  source 1..75: mol_type = other DNA
caagatatccgagaagttgaaaaatttccgagtgcagaccttcttgttggatgctatccatgccaaggatttagc

SEQ ID NO: 827634 - DNA, 75 bp, synthetic construct
  source 1..75: mol_type = other DNA
atctatcgcgaaaccgtaggcaagattgggatcagatatctaaaacaattgttgcaaatcctagacatatgcctc

SEQ ID NO: 827635 - DNA, 75 bp, synthetic construct
  source 1..75: mol_type = other DNA
ggatgaattacgtgaatttatcaataccctgaacacctctgcaatcagaagccactgccttaaagcttacggcat

SEQ ID NO: 827636 - DNA, 75 bp, synthetic construct
  source 1..75: mol_type = other DNA
agtgtaccggagacggttggcgataagctggaaattcggcatacctggatgccaacaggacagtttgctccttcg

SEQ ID NO: 827637 - DNA, 75 bp, synthetic construct
  source 1..75: mol_type = other DNA
aagcctaaagcttttatagtagaaaacgtgtctggtatggttagaaaaaattttgagcatttgttatctgaccag

SEQ ID NO: 827638 - DNA, 75 bp, synthetic construct
  source 1..75: mol_type = other DNA
gcgttatgaccgggtaatgtccttcggctggaaaatctgcctgccgctgacgctgatcaacttgctggtaacggc

SEQ ID NO: 827639 - DNA, 75 bp, synthetic construct
  source 1..75: mol_type = other DNA
tctccagcagacgacccaactgctcgacccggctaaagcctatgccaaaggcgtcggtaactcgatcccggatat

SEQ ID NO: 827640 - DNA, 75 bp, synthetic construct
  source 1..75: mol_type = other DNA
tgaagaccaactccagctccagcgtgttggtagggccgctgtttggttcttccgctcctgctccggttacggtag

SEQ ID NO: 827641 - DNA, 75 bp, synthetic construct
  source 1..75: mol_type = other DNA
ggatacgtccggttcactgacgtcccccagggactggccgttatttgaagtcggctggtccaacaataagccgct

SEQ ID NO: 827642 - DNA, 75 bp, synthetic construct
  source 1..75: mol_type = other DNA
ggcagtacagggattaaaagataaagaaataaaaaccaaacgatatgtggaatttctggccttgtctcaatctct

SEQ ID NO: 827643 - DNA, 75 bp, synthetic construct
  source 1..75: mol_type = other DNA
accgatggcttactgaaactgaaagtcaaaacgaactccagttccagcgtgttggtcgggcctctatttggttct

SEQ ID NO: 827644 - DNA, 75 bp, synthetic construct
  source 1..75: mol_type = other DNA
gcattagggcagcagaaactttatgtgctggtctttaccactgaaaaagatctccagcagacgacacaactgctc

SEQ ID NO: 827645 - DNA, 75 bp, synthetic construct
  source 1..75: mol_type = other DNA
acgtgatagccactgaaacagcagctaatacggcagcagcaatagctggtgctacaggtaatgccagtaaggata

SEQ ID NO: 827646 - DNA, 75 bp, synthetic construct
  source 1..75: mol_type = other DNA
gggggcacaggcaggcaggaactcggttgagaataattatcttagcgtgtctgaaaagacagagcttgagatagc

SEQ ID NO: 827647 - DNA, 75 bp, synthetic construct
  source 1..75: mol_type = other DNA
atcgcgggcgtggcggtgtgtcaccgtcacccgtttgaccaaccggaagccgagcaggaactggcggatggttac

SEQ ID NO: 827648 - DNA, 75 bp, synthetic construct
  source 1..75: mol_type = other DNA
agagatataaaaaaacgctgaaagagatgcattttctcattaatgaggcaaaatcttacgctgcaagtaacgtat

SEQ ID NO: 827649 - DNA, 75 bp, synthetic construct
  source 1..75: mol_type = other DNA
ggtcacgctacgcttggcggcccgaataccacttatgtgtttaaggccggtgaagaagccgtgccgctggaagcg

SEQ ID NO: 827650 - DNA, 75 bp, synthetic construct
  source 1..75: mol_type = other DNA
tatggccttacctgttgtacctgttgcctgtcgccgccggtggggccgtctgggcgatgcgtcgtagttttgcca

SEQ ID NO: 827651 - DNA, 75 bp, synthetic construct
  source 1..75: mol_type = other DNA
atgttgatgctaccggtaaagtgacatttaaaaatgtcggcagcaattgggaaaggattacggcgacgccaaaat

SEQ ID NO: 827652 - DNA, 75 bp, synthetic construct
  source 1..75: mol_type = other DNA
ctctagggcactgaaagagattcaggccgagaaagacgccatcgctgcacgcaatcaggagatcaacacatcgct

SEQ ID NO: 827653 - DNA, 75 bp, synthetic construct
  source 1..75: mol_type = other DNA
gacagggaattaaccagccaattggcaacgcgccagcagggcttggcgaatcgctgctttcttcccttaagcagg

SEQ ID NO: 827654 - DNA, 75 bp, synthetic construct
  source 1..75: mol_type = other DNA
atgtggcgggagcgcacggaaaactggtcgtgggagctgggggcgtctggctcgtggtcgcattcacgcaccaaa

SEQ ID NO: 827655 - DNA, 75 bp, synthetic construct
  source 1..75: mol_type = other DNA
acgatatatcaggcaatccgatcaaagtttctgaagggatggaatttgtgcaatcaggtacaaacgtgccctata

SEQ ID NO: 827656 - DNA, 75 bp, synthetic construct
  source 1..75: mol_type = other DNA
agtagcaatggctacacacttccccgtgcagaccatttaaaccatagtcgttcccgaggcatcgggtcactgtaa

SEQ ID NO: 827657 - DNA, 75 bp, synthetic construct
  source 1..75: mol_type = other DNA
cgcgccttttgccagaggcatttgaacgactggcagcaatcaaaaccaaatatcccgatatgaagcacacagcgc

SEQ ID NO: 827658 - DNA, 75 bp, synthetic construct
  source 1..75: mol_type = other DNA
ccgtttattttaagttttttatcgggttatttgcgctggttaaccctgttgggatcatccctgtgttcatcagta

SEQ ID NO: 827659 - DNA, 75 bp, synthetic construct
  source 1..75: mol_type = other DNA
ttacgcgtattatggggctattgctgatggcattggggattgaatttatcgttactggtattaaggggattttcc

SEQ ID NO: 827660 - DNA, 75 bp, synthetic construct
  source 1..75: mol_type = other DNA
gatattcagggtgagaaagacaccattgccgcgcgtaatcaggaaattaaccagacgcttgagcgtaacgccgcc

SEQ ID NO: 827661 - DNA, 75 bp, synthetic construct
  source 1..75: mol_type = other DNA
ctgaattcaataccccaaacattgaactctcagcagttagccaaaagtactttggtatgagtccagccacggcag

SEQ ID NO: 827662 - DNA, 75 bp, synthetic construct
  source 1..75: mol_type = other DNA
actcaaagcacagtccgcagtagcaggttgctcaatgattcaggttttaagcactaaagctcatcaactggcgga

SEQ ID NO: 827663 - DNA, 75 bp, synthetic construct
  source 1..75: mol_type = other DNA
caccaatgtcatattctataaaagttgatgcgattaagaaaagattgtcatattttagtgatgtttcttttttga

SEQ ID NO: 827664 - DNA, 75 bp, synthetic construct
  source 1..75: mol_type = other DNA
attgttgaaatggttcataacggagtcggggttcgcgatagttccagaacgctgaaggtggatatcaacaccgtc

SEQ ID NO: 827665 - DNA, 75 bp, synthetic construct
  source 1..75: mol_type = other DNA
gcttcaggctgcggctttttctcaactgtcagattctgacccgtcaaaatctgacgcatcaaaatctgacccgtc

SEQ ID NO: 827666 - DNA, 75 bp, synthetic construct
  source 1..75: mol_type = other DNA
ggattttaaaaatggacgtggttattactgttcacatccatttatttccagcctttcaggaaatgctgcaacagc

SEQ ID NO: 827667 - DNA, 75 bp, synthetic construct
  source 1..75: mol_type = other DNA
ttccttgacccggtgaactaccgcaatcactttgtcaccatcctcggcacaattcagggcgaacagccgggtttt

SEQ ID NO: 827668 - DNA, 75 bp, synthetic construct
  source 1..75: mol_type = other DNA
ttacatgtcacgaccattggaccggttgctgatgaattactgtcactcggtgctgttaatgtcgacaccgcgcgc

SEQ ID NO: 827669 - DNA, 75 bp, synthetic construct
  source 1..75: mol_type = other DNA
gccttacatactcggggtatctggcgttcgccgcttgcctggcaggtttgtttcttgggatcaactcactggtct

SEQ ID NO: 827670 - DNA, 75 bp, synthetic construct
  source 1..75: mol_type = other DNA
agaggtccaatattgcgaggcggagctgaaaaaaccacagacagaagaggacaccctgcaacttcaaggggagct

SEQ ID NO: 827671 - DNA, 75 bp, synthetic construct
  source 1..75: mol_type = other DNA
aaagcgctgatgggtttcagttcgcttcgagtatatcgtgacaataaatccgtcacttttgctgaaatcaatgcg

SEQ ID NO: 827672 - DNA, 75 bp, synthetic construct
  source 1..75: mol_type = other DNA
aactgatgggaatgcgatacaaaggctgggagcctggatacgaagacgcatttttctataaattgggcgagtacc

SEQ ID NO: 827673 - DNA, 75 bp, synthetic construct
  source 1..75: mol_type = other DNA
gagataacgatactgggtttaaacaaaatggtgatggggtgctggatgcttatgctaatggtgtgcatgtattcc

SEQ ID NO: 827674 - DNA, 75 bp, synthetic construct
  source 1..75: mol_type = other DNA
gtgcgagtttttgccgaagaagggctaacggttattgttccaactcaggattataccgtcggtcaaacaacatat

SEQ ID NO: 827675 - DNA, 75 bp, synthetic construct
  source 1..75: mol_type = other DNA
cagtcattcgtaaaggcgcagtgttgtacgcagccgtttattacatttctgatgatgataaagcaaaggctgagg

SEQ ID NO: 827676 - DNA, 75 bp, synthetic construct
  source 1..75: mol_type = other DNA
gcgttatcacagcattggttacttgttcggtttttttgtggcaatcgcgttgtttgctttatgttgttggggctt

SEQ ID NO: 827677 - DNA, 75 bp, synthetic construct
  source 1..75: mol_type = other DNA
caaaaaaaccgccgaacgcttgattgttgaaatgaaagaccgatttaaaggtttgcatggcgatctctttacgcc

SEQ ID NO: 827678 - DNA, 75 bp, synthetic construct
  source 1..75: mol_type = other DNA
aactttacgaaaaagagtatgttggtttttttactgaagatgcgatagaaaacttaaaggatgtaattaatctgg

SEQ ID NO: 827679 - DNA, 75 bp, synthetic construct
  source 1..75: mol_type = other DNA
ccacatagtccaaacgccgggtaatgactccaacttactgatagtgttttatgttcagataatgcccgatgacct

SEQ ID NO: 827680 - DNA, 75 bp, synthetic construct
  source 1..75: mol_type = other DNA
ctggtctgtggtggcagaactttccccgctgcatctgatggatgatgtgctggggcaggcgatgattttcttcaa

SEQ ID NO: 827681 - DNA, 75 bp, synthetic construct
  source 1..75: mol_type = other DNA
tactgtacggttttaacaataagcaagaacgcacgctgtttaaagaactgattaaaaccaacggtgtggggccga

SEQ ID NO: 827682 - DNA, 75 bp, synthetic construct
  source 1..75: mol_type = other DNA
gccgttgagcgtgaagaagtgggggcactggtgaaactgccgggtattggcaaaaaaacccgccgaacgcttgat

SEQ ID NO: 827683 - DNA, 75 bp, synthetic construct
  source 1..75: mol_type = other DNA
cggatggcaaaacagagctggctgtcagggatattgccggacaggagcgtgaccggtctgccatatctgaacggg

SEQ ID NO: 827684 - DNA, 75 bp, synthetic construct
  source 1..75: mol_type = other DNA
atttgttcgttgcctggatgcactcgatggggcaaaacctggtggagtcggtggcgattacggtgataggcgcga

SEQ ID NO: 827685 - DNA, 75 bp, synthetic construct
  source 1..75: mol_type = other DNA
tgtgggcattggcggcctgcaccacgcttatcctgcccgcgcagaccattttgccgatctatagcgcggcgacct

SEQ ID NO: 827686 - DNA, 75 bp, synthetic construct
  source 1..75: mol_type = other DNA
agctgcatcttaacgtatcaactagatttaataacaacgatatccgtacctaaccggatatctaatgtcataagc

SEQ ID NO: 827687 - DNA, 75 bp, synthetic construct
  source 1..75: mol_type = other DNA
aaaagtgaaagataagctgcatttgtcagtgatgtctgaagttaatcgtcaggttatgcgtctgcaaacagagat

SEQ ID NO: 827688 - DNA, 75 bp, synthetic construct
  source 1..75: mol_type = other DNA
ttttattttacaaaaaaatgcattgtgatcatgagatcatcgttcgagatattattaagaaatgtccaataaatc

SEQ ID NO: 827689 - DNA, 75 bp, synthetic construct
  source 1..75: mol_type = other DNA
tattgtggtcgttcagcaaaaaactggcgattttctggctggtgtttggcctgtgctggaaagtgctggagaaaa

SEQ ID NO: 827690 - DNA, 75 bp, synthetic construct
  source 1..75: mol_type = other DNA
ctaaaagacccgcgacaagtgttggggaggtcagtgcagcggacctcagaaaaattggatttgatgttattcacg

SEQ ID NO: 827691 - DNA, 75 bp, synthetic construct
  source 1..75: mol_type = other DNA
gttaccaggggcagtacctcgacagggaaacggggctgcactacaatctgcaccgttactatgatccggatgtcg

SEQ ID NO: 827692 - DNA, 75 bp, synthetic construct
  source 1..75: mol_type = other DNA
gtgaactgcgcgaccgtagccgtactgtcgatgaactgaaccgtaccattgatcagctgtgccgtgaaaacgaca

SEQ ID NO: 827693 - DNA, 75 bp, synthetic construct
  source 1..75: mol_type = other DNA
tgttaaatgataccgggctgttcactgtgctggtactggtgcaaaacctggttggtactgtggcatcggcaccgc

SEQ ID NO: 827694 - DNA, 75 bp, synthetic construct
  source 1..75: mol_type = other DNA
caattttacggcccccgttaatctcaaactataccattagcactggaagttggcacgtacaggtgggcaaaaaaa

SEQ ID NO: 827695 - DNA, 75 bp, synthetic construct
  source 1..75: mol_type = other DNA
gagcatggaaagacgctgttgactgggtgctcaaagaggcttgccaggctgtaaacattcgcatcaaaggagagt

SEQ ID NO: 827696 - DNA, 75 bp, synthetic construct
  source 1..75: mol_type = other DNA
taacgatagccagctcaacacaccaaaagcgatccttatcgacctgatccgcgcgctgccggtgtgtctgattat

SEQ ID NO: 827697 - DNA, 75 bp, synthetic construct
  source 1..75: mol_type = other DNA
acggtaaccattggtagcttctcgggtacggtaagtaagatccgtattcgtgcgacaacgattaccgatttcgat

SEQ ID NO: 827698 - DNA, 75 bp, synthetic construct
  source 1..75: mol_type = other DNA
tattaccatgttgctgatgtttgcgctgttcggtgtcatgttctgggcaatttggtccgatttgatcaccgtgtt

SEQ ID NO: 827699 - DNA, 75 bp, synthetic construct
  source 1..75: mol_type = other DNA
acaccgtcttgcaggataccttgcaaaagcaacgtgattacgtgacggcgaacagcgcccgtctggagcaccagt

SEQ ID NO: 827700 - DNA, 75 bp, synthetic construct
  source 1..75: mol_type = other DNA
gacgaagctgcgcgtattcaggctaatccgctggtgaaacaagagctggaaattaaccagcagttaagtcagcgt

SEQ ID NO: 827701 - DNA, 75 bp, synthetic construct
  source 1..75: mol_type = other DNA
tgacttgcaaaatgcacaaaacgatctggcttcctataacagccaactggtgtcgttacagacgcagccggaacg

SEQ ID NO: 827702 - DNA, 75 bp, synthetic construct
  source 1..75: mol_type = other DNA
gggggttagcgtggaagacaatgggttctgaggctatgtgtagaggtgttattagcccaacactacccaaaacgc

SEQ ID NO: 827703 - DNA, 75 bp, synthetic construct
  source 1..75: mol_type = other DNA
cttttatgcactatcactactatgcgtttcctctgttggtgatgctcgatttatttattaagcagacctgtaatg

SEQ ID NO: 827704 - DNA, 75 bp, synthetic construct
  source 1..75: mol_type = other DNA
gagctatcggtgattgcctggatgaggctgagcaagagttgatcattaccattaacaaatacgcctgtcatatta

SEQ ID NO: 827705 - DNA, 75 bp, synthetic construct
  source 1..75: mol_type = other DNA
cctataagcaatcacagtggactgatggggatatactaacatggacgtataaaagtataccctttgaagtagtgc

SEQ ID NO: 827706 - DNA, 75 bp, synthetic construct
  source 1..75: mol_type = other DNA
tgaacctaacgccacgactgattacgatacgggtaatctaaatattgctgccagtggtgcaaataacgttcagat

SEQ ID NO: 827707 - DNA, 75 bp, synthetic construct
  source 1..75: mol_type = other DNA
aatgtgacattgcgttataacgcacggtactatgcaacaggtcaggccaccgccggcaacgtttctgccactgtg

SEQ ID NO: 827708 - DNA, 75 bp, synthetic construct
  source 1..75: mol_type = other DNA
tctacagaagcgttttgaggaactgaatagctgggccaatgaacaagtaattcgttttgattcttatgcatttga

SEQ ID NO: 827709 - DNA, 75 bp, synthetic construct
  source 1..75: mol_type = other DNA
gtttatgtactcgcctaatggtaaaaaagacggacttcagattatcccattgtcagaagtcgcagcgaaggatga

SEQ ID NO: 827710 - DNA, 75 bp, synthetic construct
  source 1..75: mol_type = other DNA
aaaaaggacgggcttcagattatcccgttgtcagaagtcgcggcgaaggatgagtttctgaatatcaagaacgtg

SEQ ID NO: 827711 - DNA, 75 bp, synthetic construct
  source 1..75: mol_type = other DNA
gatgcatgtaaataacggaatcggaataccagcaataacaaggagtaaagaggttgcagagagttggttatcaaa

SEQ ID NO: 827712 - DNA, 75 bp, synthetic construct
  source 1..75: mol_type = other DNA
catcaggctggtgtcggtcagcattatattttactaccagccacatcctgcgatgtccccattttaccttgcaac

SEQ ID NO: 827713 - DNA, 75 bp, synthetic construct
  source 1..75: mol_type = other DNA
ctatgtggaatgcgtacagacggatcgctggtatgagccacccgtaagttttgacggactggcgcgaacattccg

SEQ ID NO: 827714 - DNA, 75 bp, synthetic construct
  source 1..75: mol_type = other DNA
aaaagtataccctttgaagtagtgctactcgattcacattttatcagtgttaagggtaaacatttctatcaatat

SEQ ID NO: 827715 - DNA, 75 bp, synthetic construct
  source 1..75: mol_type = other DNA
agacttatttctgaacgttatgaagatgctctcactcaggaaaacaatgctcagaaaaaatactggttactcagt

SEQ ID NO: 827716 - DNA, 75 bp, synthetic construct
  source 1..75: mol_type = other DNA
tgtttcccagaacatcctgtcacctgttatacaacttatttctactattgttgttgttttatctacgaaggactg

SEQ ID NO: 827717 - DNA, 75 bp, synthetic construct
  source 1..75: mol_type = other DNA
gacatttatctgaatgatatatccttacgtaatatcagtgatgaggatttgaatgatgctatttactacctaaca

SEQ ID NO: 827718 - DNA, 75 bp, synthetic construct
  source 1..75: mol_type = other DNA
cctgtggttgggagcacacctggttatttccggggatttaagtattggtcagttaattgcttttaatatgcttgc

SEQ ID NO: 827719 - DNA, 75 bp, synthetic construct
  source 1..75: mol_type = other DNA
ttgtcggcacgctggcgatgttcctcgtcggcggcgggattgtggtacatggtattgcgccgctgcatcacgcca

SEQ ID NO: 827720 - DNA, 75 bp, synthetic construct
  source 1..75: mol_type = other DNA
ttgaacatttcgccgggcagcagagtgcgctggtcgcaatgatattaccgactgttttaaatctgattcttggtt

SEQ ID NO: 827721 - DNA, 75 bp, synthetic construct
  source 1..75: mol_type = other DNA
acaatatcataatataactgtcaatgctgaaactataaggcatcagtttaatacccacacacaagattttggggt

SEQ ID NO: 827722 - DNA, 75 bp, synthetic construct
  source 1..75: mol_type = other DNA
cgccttgcacaaatctggcaggatttccagcaggttggtatatcagttacccgccttggtgatgtgcttaactct

SEQ ID NO: 827723 - DNA, 75 bp, synthetic construct
  source 1..75: mol_type = other DNA
cagatcagctttcccgagctgatgtttttggaagaccagttatctggtgtgactcagaaaaatttaaaacagaca

SEQ ID NO: 827724 - DNA, 75 bp, synthetic construct
  source 1..75: mol_type = other DNA
taaataatattaatttatacatatcgaagggggatgttatcggtatagttggccgttctggttcaggaaaaagta

SEQ ID NO: 827725 - DNA, 75 bp, synthetic construct
  source 1..75: mol_type = other DNA
ccttggagatgtattaaatacaccggtagagaaaaattcaggcagaaatatactgccggaaattcagggggatat

SEQ ID NO: 827726 - DNA, 75 bp, synthetic construct
  source 1..75: mol_type = other DNA
gccgggatgagttcgaaaaactgtatcagggaaaagttattctggttacgtcaagagcaacagtagtcggagagt

SEQ ID NO: 827727 - DNA, 75 bp, synthetic construct
  source 1..75: mol_type = other DNA
actgcagaaacgtttacaggaactaaataactggcttggtgaagaaattctccgttttagcttttactcgctcag

SEQ ID NO: 827728 - DNA, 75 bp, synthetic construct
  source 1..75: mol_type = other DNA
gcagaaccaggaggacgtgaacaacctccgtaacgcaatgaaaagcgccaaagggccaggcaacttccgcaacct

SEQ ID NO: 827729 - DNA, 75 bp, synthetic construct
  source 1..75: mol_type = other DNA
acctcgctggcggtggcgacaggtgcgctggcgtacgcctggtaccagggggattccacgctttcagcgttcaac

SEQ ID NO: 827730 - DNA, 75 bp, synthetic construct
  source 1..75: mol_type = other DNA
aaaacccgttgcggaggctttcagcttcggcgatcccattccagtactggaccgccgcgaactgctggactatgt

SEQ ID NO: 827731 - DNA, 75 bp, synthetic construct
  source 1..75: mol_type = other DNA
tatgccgaataatgttgggggatttggggatgtggagaaggctagtaaggtatttgtacgcaatgagttaaattc

SEQ ID NO: 827732 - DNA, 75 bp, synthetic construct
  source 1..75: mol_type = other DNA
tatttttcaacaatgaaataaaaagccttcaatgcaggttttttgagatcaatgaatgggttggtgtagatatta

SEQ ID NO: 827733 - DNA, 75 bp, synthetic construct
  source 1..75: mol_type = other DNA
tgtttgtggtgtttatcgccagccacatcctgtcgtttttatcgtggagttttactgttctggtgatcagccgta

SEQ ID NO: 827734 - DNA, 75 bp, synthetic construct
  source 1..75: mol_type = other DNA
tgttctgtcattcttgtcgtggaactttaccgttctggttatcagccgaatcggcgtagctttcgcacatgcaat

SEQ ID NO: 827735 - DNA, 75 bp, synthetic construct
  source 1..75: mol_type = other DNA
ggtatcatgctgactatctatgcctgggttgtggcgcttatgtcgctcccttttatgcttctgaccagtcaaatg

SEQ ID NO: 827736 - DNA, 75 bp, synthetic construct
  source 1..75: mol_type = other DNA
gccagtgcacagaaggcatttgatgaggcggataaaaaatggcagtggtaccagagccggagccagcgccgggga

SEQ ID NO: 827737 - DNA, 75 bp, synthetic construct
  source 1..75: mol_type = other DNA
ttactggtgggtgccgtccttcaacgagccgacacctttcacgcccggctccgtgtttcatctgctggagccgga

SEQ ID NO: 827738 - DNA, 75 bp, synthetic construct
  source 1..75: mol_type = other DNA
caggactatctggtatttggtaatgcctacctggagaaacgcacgaaccgcttcggtgaagttatcgcccttgaa

SEQ ID NO: 827739 - DNA, 75 bp, synthetic construct
  source 1..75: mol_type = other DNA
ctccgtaacgcgatgaaaagcgccaaaggaccaggcaacttccgtaacctgtttatgtactcgccgaacggcaaa

SEQ ID NO: 827740 - DNA, 75 bp, synthetic construct
  source 1..75: mol_type = other DNA
gctgcaaaagcggctgcaggagctgaattattggctaggtaaagaggtgatccgcttcgagccctacacgctggg

SEQ ID NO: 827741 - DNA, 75 bp, synthetic construct
  source 1..75: mol_type = other DNA
gttttgacggcctggcgcgaaccttccgcgccgccgtgcatcacagctcccccatcagtgttaagcgtgacatta

SEQ ID NO: 827742 - DNA, 75 bp, synthetic construct
  source 1..75: mol_type = other DNA
ctactggtttgtgcaatacggcatgaccacgcaaccgtatcagttcacgaaaggcagcattttccatctgatgga

SEQ ID NO: 827743 - DNA, 75 bp, synthetic construct
  source 1..75: mol_type = other DNA
ctgcggcgacgaaacagagccagctcaaaagccagactacagccgaagcattcagcttcggtgatcccattcccg

SEQ ID NO: 827744 - DNA, 75 bp, synthetic construct
  source 1..75: mol_type = other DNA
tacatcaacggcagccatgcaggcttcatcatgtacatgaccgacgccgcgcagaatcaggaggatgtgaacaat

SEQ ID NO: 827745 - DNA, 75 bp, synthetic construct
  source 1..75: mol_type = other DNA
ctgcggcgacgaatcagctcaagcataaaagccaaacttcagccgaagcattcagcttcggtgatcccgttcctg

SEQ ID NO: 827746 - DNA, 75 bp, synthetic construct
  source 1..75: mol_type = other DNA
tatcagaagtcgcggcaaaggatgaatttcttaacatcaagaacgtcagccgtgatgatatgatggcggcgcatc

SEQ ID NO: 827747 - DNA, 75 bp, synthetic construct
  source 1..75: mol_type = other DNA
tcaggaggatgtgaacaacctccgcaacgcgatgaaaagcgccaaaggtccaggcaacttccgcaacctgtttat

SEQ ID NO: 827748 - DNA, 75 bp, synthetic construct
  source 1..75: mol_type = other DNA
atgggaaagagtaagaagaaccgcgctgcgtcgacgaaccagattcagcataaaagccagacttcagccgaagca

SEQ ID NO: 827749 - DNA, 75 bp, synthetic construct
  source 1..75: mol_type = other DNA
tttttgttcgcaacgaacttatcccactacagaaaaggctacaggagcttaacgactggcttggtgaagaagtga

SEQ ID NO: 827750 - DNA, 75 bp, synthetic construct
  source 1..75: mol_type = other DNA
cattcccaacaacactggcggcttcggtgatgtggaaaaggcgagccgtgttttcgtccgcaatgagctgatgcc

SEQ ID NO: 827751 - DNA, 75 bp, synthetic construct
  source 1..75: mol_type = other DNA
atccgcgccaggaagtcagttttgtttacgataatcaactactgcatctcaaacagggcatttcagcgtctggtg

SEQ ID NO: 827752 - DNA, 75 bp, synthetic construct
  source 1..75: mol_type = other DNA
aggcactgcgcctggacgctggaaagtgttcgccagtgatatcgacaccgaagtgctggaaaaagccagaagcgg

SEQ ID NO: 827753 - DNA, 75 bp, synthetic construct
  source 1..75: mol_type = other DNA
aatcagcacagcggcgagtggcaggcatttattaactcgctgaccaccaacctgacggcattttttcgtgaaggg

SEQ ID NO: 827754 - DNA, 75 bp, synthetic construct
  source 1..75: mol_type = other DNA
gttttggttccggcgcaacaatgatactggggttgacgttcattggtctgcgggcaagttctgcgcatcaggcgg

SEQ ID NO: 827755 - DNA, 75 bp, synthetic construct
  source 1..75: mol_type = other DNA
tggcattctgatgattgccacaacattacgcgtcacctttaccggcgcagcaccgttactggatacgattcgttc

SEQ ID NO: 827756 - DNA, 75 bp, synthetic construct
  source 1..75: mol_type = other DNA
acaaaatgagtcgcccggcgcttacggttttggctgggcatctgtattcgagcgatcgcctggaaaatgacgcgg

SEQ ID NO: 827757 - DNA, 75 bp, synthetic construct
  source 1..75: mol_type = other DNA
aggaggttttgtattcttttttatcattaatatgattggcgcaatatacagtatcagcgacttacttaaacagta

SEQ ID NO: 827758 - DNA, 75 bp, synthetic construct
  source 1..75: mol_type = other DNA
gccgttctgccgataagcgaatatgaaaaaatagatgatttcaacacgctgtggctggaagtacaggatttttta

SEQ ID NO: 827759 - DNA, 75 bp, synthetic construct
  source 1..75: mol_type = other DNA
caacgttgtcgccagagtgtttttcccccacgagccaacgctatggtctggtatcgtctctcaactggccaccac

SEQ ID NO: 827760 - DNA, 75 bp, synthetic construct
  source 1..75: mol_type = other DNA
atgcccggcgtcgttctggcgagtatcgtgtatggagcgcggcggcttcgaccggcgaagaaccgtacagcattg

SEQ ID NO: 827761 - DNA, 75 bp, synthetic construct
  source 1..75: mol_type = other DNA
attgctagagtttataaaaaagaaattatgtatgatgccataattttcccacaaaaagatttaatgagaggtaaa

SEQ ID NO: 827762 - DNA, 75 bp, synthetic construct
  source 1..75: mol_type = other DNA
catatgccaatttggaacatggaaattcatcagaaccgatagattttatgtgcgagttagcacaacgcagaattt

SEQ ID NO: 827763 - DNA, 75 bp, synthetic construct
  source 1..75: mol_type = other DNA
cgcttactcgctaacgacggcgcaaaccggcttattaaccaccctgccattattagcctttgcgctaatctcacc

SEQ ID NO: 827764 - DNA, 75 bp, synthetic construct
  source 1..75: mol_type = other DNA
tgctttgaaggcgcagagaaagtgctgcatatgctggaggcgcgtaagcataaaggcgatccggcacagagtcag

SEQ ID NO: 827765 - DNA, 75 bp, synthetic construct
  source 1..75: mol_type = other DNA
agtctctttccattatggttcgtcagcgtcttaaacaggttcgcgcccttatttttgaacaactggatctggcta

SEQ ID NO: 827766 - DNA, 75 bp, synthetic construct
  source 1..75: mol_type = other DNA
ctaccgctgtgcatcgataccgatccgctcaatcctacattctctaattatgaaaagctgaacgtccgacagctg

SEQ ID NO: 827767 - DNA, 75 bp, synthetic construct
  source 1..75: mol_type = other DNA
ctggatgtggtggttctgatgcgggagttttgagagcagggttcaatgtgctgatggcaaacgatattttgcctt

SEQ ID NO: 827768 - DNA, 75 bp, synthetic construct
  source 1..75: mol_type = other DNA
gctcaatgcgcaacaagtttcaggcgtgcgcgccaaccgggaacttcccgtggtctggggcgtggcgaaaggatc

SEQ ID NO: 827769 - DNA, 75 bp, synthetic construct
  source 1..75: mol_type = other DNA
cttggatttatcatcggcggcatcgtggtgctgggagtgaaagcagtagcgaaaatgcgcggtcaggcacattaa

SEQ ID NO: 827770 - DNA, 75 bp, synthetic construct
  source 1..75: mol_type = other DNA
cgaaaataatttctacaggagacgcaatccgcagcatcaatgctgacaacgccaccttctggggcaaaaaacact

SEQ ID NO: 827771 - DNA, 75 bp, synthetic construct
  source 1..75: mol_type = other DNA
tcgcggccaacactcctgtggctgcgactgtcagggggaaccccgtttacgccctgcagcatgtcgggccagccc

SEQ ID NO: 827772 - DNA, 75 bp, synthetic construct
  source 1..75: mol_type = other DNA
atgaagcttacgatgctactcatgattaccgtattcctgacttttccagccatttctcaggccgagtcgccattt

SEQ ID NO: 827773 - DNA, 75 bp, synthetic construct
  source 1..75: mol_type = other DNA
tcgttattcacatttccattgtcggcggccaggcacatgattacacggtcgaaggtttccgggctatggtggaac

SEQ ID NO: 827774 - DNA, 75 bp, synthetic construct
  source 1..75: mol_type = other DNA
ttcaggaaattaatgttcagcggtcagtcagtgccaataccagcaaacgcgagactgcaaaagaagtgatcggat

SEQ ID NO: 827775 - DNA, 75 bp, synthetic construct
  source 1..75: mol_type = other DNA
tgtagttgtgacacccaacgccgcacggtttggggttgccctgatggcggctgcggagcttgtgacagtgtcgat

SEQ ID NO: 827776 - DNA, 75 bp, synthetic construct
  source 1..75: mol_type = other DNA
gggataaggattttgcagacgaactcaacgttgtcgccagagtgtttttcccccacgagccaacgctatggtctg

SEQ ID NO: 827777 - DNA, 75 bp, synthetic construct
  source 1..75: mol_type = other DNA
agaaagcggcaaccgaagctgctgaaaaagccaaggcagaagctgagaagaaagcggcagcagagaaagcggcag

SEQ ID NO: 827778 - DNA, 75 bp, synthetic construct
  source 1..75: mol_type = other DNA
cagctaaacttgcgaagatcccgaaaccaccaagccaggcagtatatgaagtgttcaaaaacgcgccattggact

SEQ ID NO: 827779 - DNA, 75 bp, synthetic construct
  source 1..75: mol_type = other DNA
caggatgacaaactgcgtaagaactactatcacggcctgccgttcaaggttaccaattactttgaatttattgcc

SEQ ID NO: 827780 - DNA, 75 bp, synthetic construct
  source 1..75: mol_type = other DNA
ctggaagagggtcagctgcgtatcattaaagaaggcaaagccaaaaaactggtacaggacgtcgcccacgtgacg

SEQ ID NO: 827781 - DNA, 75 bp, synthetic construct
  source 1..75: mol_type = other DNA
actcagaccacgcagacgcctgacgcctttttaaccagctatcaacgacaaatgtgcgctgacccaacggtgaaa

SEQ ID NO: 827782 - DNA, 75 bp, synthetic construct
  source 1..75: mol_type = other DNA
tatgatagatctctgttggctattagtttgaggaaaagggacattgagtataataaaagtcatgggcataaatag

SEQ ID NO: 827783 - DNA, 75 bp, synthetic construct
  source 1..75: mol_type = other DNA
atgttttttaaaacgtcaaatcccgcagcactgctggcatgggaccagtttatggcggactgcctgaaactacgc

SEQ ID NO: 827784 - DNA, 75 bp, synthetic construct
  source 1..75: mol_type = other DNA
gaaagaccgtagtttgttgttgggtatgggtacagttttaccatgtgtgctaaaaacaaagatcgttaccaccta

SEQ ID NO: 827785 - DNA, 75 bp, synthetic construct
  source 1..75: mol_type = other DNA
ctgtggcgtgaatattcgcccgtcacgtatgccagaaccgatgccctgttgttctggctgggcattgatttctca

SEQ ID NO: 827786 - DNA, 75 bp, synthetic construct
  source 1..75: mol_type = other DNA
cggagttacttgcgcaaatggccggagtaagtgaagctgaactggttcatgcgctaaagacaaccggggaaatct

SEQ ID NO: 827787 - DNA, 75 bp, synthetic construct
  source 1..75: mol_type = other DNA
caaggccgcatgactgaaatcctttctgacgaatttatccgggcgcaaaaacaggcggaggtaaacaatggaaaa

SEQ ID NO: 827788 - DNA, 75 bp, synthetic construct
  source 1..75: mol_type = other DNA
cgtcatgacggggatgacacccgcaccgggctgcatgacggaaatcctgtccgatgaattcatgaaggcaaagat

SEQ ID NO: 827789 - DNA, 75 bp, synthetic construct
  source 1..75: mol_type = other DNA
cgctgaaacgcctgttcacagccaaccagtgctggacatccttcctggatgcgggcggtctgcgcgatatcgggg

SEQ ID NO: 827790 - DNA, 75 bp, synthetic construct
  source 1..75: mol_type = other DNA
ttccgcacagcaagctgagcaaagaatacgatcacattaaagacgttaacgatctgccagagctgctgaaagcgc

SEQ ID NO: 827791 - DNA, 75 bp, synthetic construct
  source 1..75: mol_type = other DNA
gttgtgataaaaacaggttgaaaaatatttatattcgtttcgtttctgaactcacacagatgagttcagaaacta

SEQ ID NO: 827792 - DNA, 75 bp, synthetic construct
  source 1..75: mol_type = other DNA
gttgcgataacgacaggttaaaaaatatttatattcgcttggtttcagaacttacacagattagtgaagaaacta

SEQ ID NO: 827793 - DNA, 75 bp, synthetic construct
  source 1..75: mol_type = other DNA
cgagtcgggctacagctggggggttgacctcgatctggaaaagttcttcgatcgggtgaatcacgatgtactgat

SEQ ID NO: 827794 - DNA, 75 bp, synthetic construct
  source 1..75: mol_type = other DNA
catcaggtggtaatgatagagcaactgcgcatggccatcatgtccgaacaagcactaagggagcgccagcagcgc

SEQ ID NO: 827795 - DNA, 75 bp, synthetic construct
  source 1..75: mol_type = other DNA
aatacatagtaaagtgcactgttcgttttgttgtctctggtggcttcaactcaggcctctgctggtcgttgtcag

SEQ ID NO: 827796 - DNA, 75 bp, synthetic construct
  source 1..75: mol_type = other DNA
agaagccgccgatagcagcctcccggctggcacattacaacggaggggcgagcctgagcttccgttacctggacc

SEQ ID NO: 827797 - DNA, 75 bp, synthetic construct
  source 1..75: mol_type = other DNA
atgacccgaagtgggggggattttcagccccgaccgctgaaacgcctgttcacagccaaccagtgctggacgtcc

SEQ ID NO: 827798 - DNA, 75 bp, synthetic construct
  source 1..75: mol_type = other DNA
ctgggagtgaaggaatacaactgcgataaacctgagtgcccccacgtcagatacgtcactaactcatgcggcagc

SEQ ID NO: 827799 - DNA, 75 bp, synthetic construct
  source 1..75: mol_type = other DNA
atgcggcagctgcttctgaaagcgtggtcagaggggctggcgatgccggagtcgttgtcacatatcacgacggaa

SEQ ID NO: 827800 - DNA, 75 bp, synthetic construct
  source 1..75: mol_type = other DNA
atgcgggcggtctgcgcgatatcgaagtggaaagccatcaccaaaatgctggcctgcggcacacggatactgggt

SEQ ID NO: 827801 - DNA, 75 bp, synthetic construct
  source 1..75: mol_type = other DNA
tgtgctatgcgcagatggtgaagcagttcctgagtcgtgacccgttcgaatgcgtgctgtgtggcggcaggatgg

SEQ ID NO: 827802 - DNA, 75 bp, synthetic construct
  source 1..75: mol_type = other DNA
gcagttagacgttaactactaccagaatgatgttggtccgtttgatacgcgtatttacggtcaggcagtgcactt

SEQ ID NO: 827803 - DNA, 75 bp, synthetic construct
  source 1..75: mol_type = other DNA
gcccgttttaaagttggcccggtgccaatcttctacagcccctatttgcagttaccggtgggtgacaaacgccgc

SEQ ID NO: 827804 - DNA, 75 bp, synthetic construct
  source 1..75: mol_type = other DNA
cgtgtttactggcagcgtggatatcatgcagggtaacagccgtctgcaggccgacgaagtgcagctccatcaaaa

SEQ ID NO: 827805 - DNA, 75 bp, synthetic construct
  source 1..75: mol_type = other DNA
gccgagcagtataagaatggtatttcgcaggtgggtgcagtcgccagctggccaattgccgatcgttggtcgatt

SEQ ID NO: 827806 - DNA, 75 bp, synthetic construct
  source 1..75: mol_type = other DNA
tgcaatccgattactcgggcctgttccgggaccggacttatggcggtcttgaccgtattgcttccgcgaaccagg

SEQ ID NO: 827807 - DNA, 75 bp, synthetic construct
  source 1..75: mol_type = other DNA
gcatctatggtcaggctgtgcattttgtaaataccaatagcaatatgccagaagccacacgtctgcaccttgaac

SEQ ID NO: 827808 - DNA, 75 bp, synthetic construct
  source 1..75: mol_type = other DNA
acgcgcgctggcggcggcgacactttctaacctgatgagtgccaccattgcaggattctttattggtttagcgta

SEQ ID NO: 827809 - DNA, 75 bp, synthetic construct
  source 1..75: mol_type = other DNA
ataaaactttcccaagaaaaaattcagaaagttagaagcagcattaagaaaactcataaagccctagcaaagcac

SEQ ID NO: 827810 - DNA, 75 bp, synthetic construct
  source 1..75: mol_type = other DNA
cgtgtgattgtgacgggtatgggaaagcccgggtatattgcgcataaaatatctgccactctggccagtacaggt

SEQ ID NO: 827811 - DNA, 75 bp, synthetic construct
  source 1..75: mol_type = other DNA
ctcgaaacgtgggtggacggtcacacactctgggcaagcgtgaacatgatcagcagcaaggaggccatttcatcg

SEQ ID NO: 827812 - DNA, 75 bp, synthetic construct
  source 1..75: mol_type = other DNA
aagcattattgaagccgctgctacaggggcaatgaccgggctgaaaatcgctgcgggtgtggcgacagtggtgat

SEQ ID NO: 827813 - DNA, 75 bp, synthetic construct
  source 1..75: mol_type = other DNA
ggcatttgttgcaataattgcgttgattaacggtattatcggcggcgttggcggctggtttggttttgaacatgc

SEQ ID NO: 827814 - DNA, 75 bp, synthetic construct
  source 1..75: mol_type = other DNA
tgacgaccggtgtcacaactcgcgtatatgatgacgcagccgttgaacgttttaatatttccgttggtcaaatct

SEQ ID NO: 827815 - DNA, 75 bp, synthetic construct
  source 1..75: mol_type = other DNA
gctatctgtaccgactgtttccaaaaggtccagctaagcaagccaccaaaattgctggcctgccaaagcccgtga

SEQ ID NO: 827816 - DNA, 75 bp, synthetic construct
  source 1..75: mol_type = other DNA
ctggcgctgatctgttacctgctactggaaagccaggcgaagaagctgcgggcgaaaaatgaagcggcgatgtga

SEQ ID NO: 827817 - DNA, 75 bp, synthetic construct
  source 1..75: mol_type = other DNA
ggtaatgggagcgattatctggctgttacttggtcaaagcgtgaactatttctttgtactgggcgtgttgctggt

SEQ ID NO: 827818 - DNA, 75 bp, synthetic construct
  source 1..75: mol_type = other DNA
ccaggaaaatgggcggtagagcaggcggcattaggcgtacataaagtgatgtcttacagtgacgccggaagtgcc

SEQ ID NO: 827819 - DNA, 75 bp, synthetic construct
  source 1..75: mol_type = other DNA
ttccttgggcaaaacgagatcccggcgatcgtaaaaccgtttattgatcgtatgaatcgcaacgagttgtttacc

SEQ ID NO: 827820 - DNA, 75 bp, synthetic construct
  source 1..75: mol_type = other DNA
ccttcgcaggtcacatttgaaaatctgtcgttcagcgaaacgccgccaaaaagctttatcgaagcagcggcgagc

SEQ ID NO: 827821 - DNA, 75 bp, synthetic construct
  source 1..75: mol_type = other DNA
gcttagcaaagaagatcctcacctggctgttttttatcgcggtgattgtgttgctggtggtctacgccaaaaaag

SEQ ID NO: 827822 - DNA, 75 bp, synthetic construct
  source 1..75: mol_type = other DNA
ttcctatcgttggcgacgaacacgccgacatggaaaaaggcactggctgcgtgaagatcactccggcgcacgact

SEQ ID NO: 827823 - DNA, 75 bp, synthetic construct
  source 1..75: mol_type = other DNA
ctgcgtggttgcagcgcggatgcagaacgtcgcgtaaatgaaaaccgtggcttcctgcaaacgctggcgcgtctg

SEQ ID NO: 827824 - DNA, 75 bp, synthetic construct
  source 1..75: mol_type = other DNA
agcattatcgccgccctgctcgcttatcgcgtcctgtattactttatcccgctgctgctggcgctgatctgttac

SEQ ID NO: 827825 - DNA, 75 bp, synthetic construct
  source 1..75: mol_type = other DNA
attttctcgctcagtattaccaccaactggctgggctatattttactggcagggattatctttaccgcaggcgtg

SEQ ID NO: 827826 - DNA, 75 bp, synthetic construct
  source 1..75: mol_type = other DNA
tgcggtcacaaactggcgaagcgccaggtgatgctggtgtcgtttatctgctacgccttcaacctgacgctcagt

SEQ ID NO: 827827 - DNA, 75 bp, synthetic construct
  source 1..75: mol_type = other DNA
gtcgagactgccaagcgcactggggcgcaggtccgtggtccgatcccgctgccgacacgcaaagagcgcttcact

SEQ ID NO: 827828 - DNA, 75 bp, synthetic construct
  source 1..75: mol_type = other DNA
cgcaaggcccggagttttcccgttttgtgatgggctactggcgattgatggactggaacatgtccgcccgccagt

SEQ ID NO: 827829 - DNA, 75 bp, synthetic construct
  source 1..75: mol_type = other DNA
aaattgatgcaatgcacaagcaaatcactactgaaacaggacagacggtccaagcctcagccgatactcttaaga

SEQ ID NO: 827830 - DNA, 75 bp, synthetic construct
  source 1..75: mol_type = other DNA
gcctgcgggctccccatggtacgccgccgcaatgctgtcagaaggcgttacgtcaggttcgccgtttccggcagg

SEQ ID NO: 827831 - DNA, 75 bp, synthetic construct
  source 1..75: mol_type = other DNA
ttactcaaatatggttgtcaattttagaaggtgaagaaagatttggtttacttaatatctacaaatcaattacgg

SEQ ID NO: 827832 - DNA, 75 bp, synthetic construct
  source 1..75: mol_type = other DNA
cacatggggttgttggcgcgggtattgcgtggtcagtgaggatgatagtagattatatagcattaagtcttttgg

SEQ ID NO: 827833 - DNA, 75 bp, synthetic construct
  source 1..75: mol_type = other DNA
atggatgcctttgcaaacgggatgcgttcatataaagcgattatggttcagcgtattactattgcgccgcaaggc

SEQ ID NO: 827834 - DNA, 75 bp, synthetic construct
  source 1..75: mol_type = other DNA
gtatcaggatgaccacattatggtggtcaacaagccgagcggtttgttgtctgtgccgggtcgtctggaagagca

SEQ ID NO: 827835 - DNA, 75 bp, synthetic construct
  source 1..75: mol_type = other DNA
tggatgccgtgctcgctgctgctgatgttggcgactgggcagcttatacccagttgcagggcggggcgctggttg

SEQ ID NO: 827836 - DNA, 75 bp, synthetic construct
  source 1..75: mol_type = other DNA
atgctgaacaatcaacccccgtactgggctgagcacgaagccaacgatggggttctggaaacccgcaaggctgaa

SEQ ID NO: 827837 - DNA, 75 bp, synthetic construct
  source 1..75: mol_type = other DNA
actgccttttctggcgctgggctggtatctggcggcgcttgtcgtcattttgttgaacaggctgcttgatggtct

SEQ ID NO: 827838 - DNA, 75 bp, synthetic construct
  source 1..75: mol_type = other DNA
tatctggcggcgctagtcgtcattttgttgaacaggctgcttgatggtctggatggtgcgctggcgcggcgcaga

SEQ ID NO: 827839 - DNA, 75 bp, synthetic construct
  source 1..75: mol_type = other DNA
atgtcgtatcgtcatttcgccgcttttaacgtcatcggcgcgttgctatgggtactgatttttacctacgcgggt

SEQ ID NO: 827840 - DNA, 75 bp, synthetic construct
  source 1..75: mol_type = other DNA
aaattattgcaaggttaggtattgttcccggtgcttttgcccgcgctatttttcctcgtttgagttgttcaaatg

SEQ ID NO: 827841 - DNA, 75 bp, synthetic construct
  source 1..75: mol_type = other DNA
ggaagggatgggacgcctgtttgccatcaacaaaatggcggaaggtccgttcccggaacactacgagccgattga

SEQ ID NO: 827842 - DNA, 75 bp, synthetic construct
  source 1..75: mol_type = other DNA
aaaacgccagtacgataagtcgtcctggaactatcaattcgatgaaaacggctatgcgaaacgcgatgacactct

SEQ ID NO: 827843 - DNA, 75 bp, synthetic construct
  source 1..75: mol_type = other DNA
acttggcattgcccagggcgataccgtgaaagtctcctccaaccgtggctatatcaaagccaaagcggtggtgac

SEQ ID NO: 827844 - DNA, 75 bp, synthetic construct
  source 1..75: mol_type = other DNA
attcttttttttcagttactgctctgttttttatggacagggtaaaactatgtattaaatgggataaaaactcag

SEQ ID NO: 827845 - DNA, 75 bp, synthetic construct
  source 1..75: mol_type = other DNA
attcttttttttcagttactgctctgttttttatggacagggtaaaactctgcattaaatggaaaaaaaactcag

SEQ ID NO: 827846 - DNA, 75 bp, synthetic construct
  source 1..75: mol_type = other DNA
atcaacaaaatggcggaaggtccgttcccggaacactacgagccgattgaaacgccgctgggcactaacccgctg

SEQ ID NO: 827847 - DNA, 75 bp, synthetic construct
  source 1..75: mol_type = other DNA
agagattttcgctttggggtcagtaccttaaaaaatactcgattacaacattatccccatcatggacctgctgta

SEQ ID NO: 827848 - DNA, 75 bp, synthetic construct
  source 1..75: mol_type = other DNA
gataacgctaaaatcggtaactatatccagtcttccaactggaacggatcgaccggatggcatatcaacaagaac

SEQ ID NO: 827849 - DNA, 75 bp, synthetic construct
  source 1..75: mol_type = other DNA
tggttcctgagtggaaacagcagctacaggctcctgagcctccagcgagagattttcgctttggggtcagcaacc

SEQ ID NO: 827850 - DNA, 75 bp, synthetic construct
  source 1..75: mol_type = other DNA
cgacgctcagtatggtcgattcctcgaagtgacttccggggcgcagcagcgtttcgagcaagccgactggcatgc

SEQ ID NO: 827851 - DNA, 75 bp, synthetic construct
  source 1..75: mol_type = other DNA
tccaaaccctaactacgatatgaataaacgactatctattgaacatgattatcaaatggtaaaaggagaagcaaa

SEQ ID NO: 827852 - DNA, 75 bp, synthetic construct
  source 1..75: mol_type = other DNA
atgctgatcttcgaaggtaaaaagatagaaacggataccgaaggctatctcaaagaaagcagccagtggagtgag

SEQ ID NO: 827853 - DNA, 75 bp, synthetic construct
  source 1..75: mol_type = other DNA
cgcagatggtgtatgaaatttacggtatgtggattgatgacatgaacgacgaacaggtagccatgttgaatgcgc

SEQ ID NO: 827854 - DNA, 75 bp, synthetic construct
  source 1..75: mol_type = other DNA
aaacaaaaaccttattactcggtaagcagtttgggggcaaggtggaatgcagcagtaaaacgtgctggtattcgc

SEQ ID NO: 827855 - DNA, 75 bp, synthetic construct
  source 1..75: mol_type = other DNA
aattaaaaacactcaggataataatttgtgagagtaccccaatatcacatattcgttatagcgatatcttaaact

SEQ ID NO: 827856 - DNA, 75 bp, synthetic construct
  source 1..75: mol_type = other DNA
ctgcctgggagtttgatgcgtctgcgcaggatgtggcgctgctgaaaaatatttcccgggtggctgcgtccgcgc

SEQ ID NO: 827857 - DNA, 75 bp, synthetic construct
  source 1..75: mol_type = other DNA
gaaattgtatgccattccgcatttccaggtggaaggaatggacgtcagcctgtccctggtttcgcagatgccgaa

SEQ ID NO: 827858 - DNA, 75 bp, synthetic construct
  source 1..75: mol_type = other DNA
gggacgcctgccgtatggcccggataccgtacctgtccgcagctttaactatgttgaagaggtgaaagggccgga

SEQ ID NO: 827859 - DNA, 75 bp, synthetic construct
  source 1..75: mol_type = other DNA
tggatgccgatgaagtggcggacgcgtttaaacatctgcatcagagcggcaaagtgcgccattttggcgtatcga

SEQ ID NO: 827860 - DNA, 75 bp, synthetic construct
  source 1..75: mol_type = other DNA
cgcaaggcccggagttttcccgtttcgtgatgggctactggcgactgatggactggaatatgtccgctcgccagt

SEQ ID NO: 827861 - DNA, 75 bp, synthetic construct
  source 1..75: mol_type = other DNA
gcggatacgttctgcggtcgaagctgaagcgctgaaaatgactcgtcaacagtggttccgtattcgtaaagcggc

SEQ ID NO: 827862 - DNA, 75 bp, synthetic construct
  source 1..75: mol_type = other DNA
cagccgccagattgagatctacccgattgccggaacacgtccacgcggtcgtcgtgccgatggctcgctggacag

SEQ ID NO: 827863 - DNA, 75 bp, synthetic construct
  source 1..75: mol_type = other DNA
caacgctgctgctggaatccgcagatatcgacagcaaagatgatttaaaaagcctgctgctggtagacagtgcgc

SEQ ID NO: 827864 - DNA, 75 bp, synthetic construct
  source 1..75: mol_type = other DNA
ccgcagtcggaagccgacgaaacccgtaataaagcccgcgctgtactgcgcgctattgccaccgcgcatcatgca

SEQ ID NO: 827865 - DNA, 75 bp, synthetic construct
  source 1..75: mol_type = other DNA
tagtgatgccgcgcgtgctgggccgtctgccctatgggccggacacggtgccggtacgcagctttaactatgtgg

SEQ ID NO: 827866 - DNA, 75 bp, synthetic construct
  source 1..75: mol_type = other DNA
ctactgttacctatgaattgccgactccgactattcgaatcaaaaatcagggtagcacggctggcactttcgaag

SEQ ID NO: 827867 - DNA, 75 bp, synthetic construct
  source 1..75: mol_type = other DNA
gtgggttatggcgcatgggaattttcaggtgacagtatctgtacagcagacaaggttatagcctgcaacacatca

SEQ ID NO: 827868 - DNA, 75 bp, synthetic construct
  source 1..75: mol_type = other DNA
gactccccggaaatcattcagagcggtttatatcgtcatacatacattcaggagtacgatacgccgggtggcgaa

SEQ ID NO: 827869 - DNA, 75 bp, synthetic construct
  source 1..75: mol_type = other DNA
gcggcggcgaagcactttatcgcgcagggtaatggcggcaagattattaatatcgcgtcaatgctttcattccag

SEQ ID NO: 827870 - DNA, 75 bp, synthetic construct
  source 1..75: mol_type = other DNA
cagcttactgaagagtttcttaaaacagaaacttacaggagcaaaacggatattaaatccttatccgataaaata

SEQ ID NO: 827871 - DNA, 75 bp, synthetic construct
  source 1..75: mol_type = other DNA
aactggatgctcctgatattgttaagcataccttcaatgaagacaatatcatgatgggtaaggtatcactgaaaa

SEQ ID NO: 827872 - DNA, 75 bp, synthetic construct
  source 1..75: mol_type = other DNA
agaacgtcgcagagagcgtggtatctgaagcgcatgccggcgacagcgtatatgcttccctgtttgaaaaaatta

SEQ ID NO: 827873 - DNA, 75 bp, synthetic construct
  source 1..75: mol_type = other DNA
atgaacgtctgaccgcagggatgcaggtgtttatggaatgcctggcgaaagcgggagcaccggtggagaaactcg

SEQ ID NO: 827874 - DNA, 75 bp, synthetic construct
  source 1..75: mol_type = other DNA
ggtgagcccattgccgccctggtttcagcctgggagtttgatgcatctgcacaggacgtggcgttgctgaaaaat

SEQ ID NO: 827875 - DNA, 75 bp, synthetic construct
  source 1..75: mol_type = other DNA
gtgatgatcccggaaacccgcgaatttgaattttccaaccttggctttattccgctctcttattataagaatcgc

SEQ ID NO: 827876 - DNA, 75 bp, synthetic construct
  source 1..75: mol_type = other DNA
ttggtatcgagcgcgcgtggcaggaaattgaacaggccgaccgcgtgctgtttatggtcgatggcaccacgacag

SEQ ID NO: 827877 - DNA, 75 bp, synthetic construct
  source 1..75: mol_type = other DNA
gcggcttcctggcgcgtcgtcgccacctacaggcgctggaacaggcagcggaacatctacaacagggcaaagcgc

SEQ ID NO: 827878 - DNA, 75 bp, synthetic construct
  source 1..75: mol_type = other DNA
cgcaaggcccggagttttcccgttttgtgatgggctactggcgattgatggactggaatatgtccgcccgccagc

SEQ ID NO: 827879 - DNA, 75 bp, synthetic construct
  source 1..75: mol_type = other DNA
cagtatattccttttaaattacgagcattaaatgactggctggaacatctggaaaacattagtaaaaaagttgat

SEQ ID NO: 827880 - DNA, 75 bp, synthetic construct
  source 1..75: mol_type = other DNA
ctctccaagcaggcattgcggttttgcaatgttcggcgttatgccatcagtgatgccctggttcatttaacgtta

SEQ ID NO: 827881 - DNA, 75 bp, synthetic construct
  source 1..75: mol_type = other DNA
tggcgatttatgggctgccatttcctctggcacttgcttcatgccttactacaccaggctactgacaatcttaat

SEQ ID NO: 827882 - DNA, 75 bp, synthetic construct
  source 1..75: mol_type = other DNA
tctaaacaggcgttacgcttctgcaaggttcgccgctatgccgccagtgatgctctagcctttctcaccattcag

SEQ ID NO: 827883 - DNA, 75 bp, synthetic construct
  source 1..75: mol_type = other DNA
tggataagcacatcatttgccatatcggggcaattccccttgataagtgtgatacaaggcagtggatcgcatgtt

SEQ ID NO: 827884 - DNA, 75 bp, synthetic construct
  source 1..75: mol_type = other DNA
gtatgagttgtgcgccacagtacaagaagcactaaaacccgttacggtgaaggaagcgattaactactggctgga

SEQ ID NO: 827885 - DNA, 75 bp, synthetic construct
  source 1..75: mol_type = other DNA
tggcgacgtcattgtggtggataaaacggcggagcctgccccggctgccacaacaggtaataccggcgcggcggc

SEQ ID NO: 827886 - DNA, 75 bp, synthetic construct
  source 1..75: mol_type = other DNA
gtggactggagtgatgccaatcttgcgggtagcctgattgggcagaaactggcgattaacgaattcgtcgcttac

SEQ ID NO: 827887 - DNA, 75 bp, synthetic construct
  source 1..75: mol_type = other DNA
tgtcgtttagcgaaacgccaccaaaaagtattatcgaagccgcggcgaatggtgcaatgaccgggctgaaaattg

SEQ ID NO: 827888 - DNA, 75 bp, synthetic construct
  source 1..75: mol_type = other DNA
gcatatgaataatatgggtatagcaccacacgttgtcgaacagttgctggggcactcaatgccgggagtcatggc

SEQ ID NO: 827889 - DNA, 75 bp, synthetic construct
  source 1..75: mol_type = other DNA
tgactctgggacgatacccggatatgagcctcaaagaagcccgttcatcgcgtgataaatgccgccagtggctgg

SEQ ID NO: 827890 - DNA, 75 bp, synthetic construct
  source 1..75: mol_type = other DNA
cgacgacgacccgcaggcatctaacgagaaaatcctcgaagcgattttgttagtctggctggacgaagctgagtg

SEQ ID NO: 827891 - DNA, 75 bp, synthetic construct
  source 1..75: mol_type = other DNA
gctggccgatgtatggcgctgcacagacagcgatgatcagcagccgtattattcacgtcttctcaaaatgctggt

SEQ ID NO: 827892 - DNA, 75 bp, synthetic construct
  source 1..75: mol_type = other DNA
agttgattggccttaacgaagccagtgccaccatagtcgataaatttggggtacacgataagccagaagaagttg

SEQ ID NO: 827893 - DNA, 75 bp, synthetic construct
  source 1..75: mol_type = other DNA
gcgatggtgggtatctccatcatcgccatactctctccctggctgctgttcagccccgaacagctcgcccagcca

SEQ ID NO: 827894 - DNA, 75 bp, synthetic construct
  source 1..75: mol_type = other DNA
ctttttcgccagcgccacggcgtatacctccgccctcgcaccgatgatgattgccgccgcgctggcgatgccgga

SEQ ID NO: 827895 - DNA, 75 bp, synthetic construct
  source 1..75: mol_type = other DNA
tattggacatggtacaaaaataaatataaacaacggggcaaagttaatatttggaaaagattttattatatctgg

SEQ ID NO: 827896 - DNA, 75 bp, synthetic construct
  source 1..75: mol_type = other DNA
catggttacttgatatttatgcaaaaaaggaatgataattcatatatgtgtttatctctgcttgaaaataacaaa

SEQ ID NO: 827897 - DNA, 75 bp, synthetic construct
  source 1..75: mol_type = other DNA
ggattttcactaattgaggtttcattgtctttgatttttatttgctttggtatgctattctctttttattttata

SEQ ID NO: 827898 - DNA, 75 bp, synthetic construct
  source 1..75: mol_type = other DNA
tgcagtgatgttctccgagctgatactcgcgcctgtaacaccgtccaactcggcgcgtggtgcggggattatcta

SEQ ID NO: 827899 - DNA, 75 bp, synthetic construct
  source 1..75: mol_type = other DNA
aattggactgatgaaaagcgcatctcacgccacgctgagttggggcgactggttcctcgggatgttgccgctcag

SEQ ID NO: 827900 - DNA, 75 bp, synthetic construct
  source 1..75: mol_type = other DNA
agaatttaactataaccttagccagtatattccttttaaattacaagcgttaaatgactggtttgaatatctgga

SEQ ID NO: 827901 - DNA, 75 bp, synthetic construct
  source 1..75: mol_type = other DNA
tctcacgccacgctgagttggggcgactggtttctcggcatgttgccgctcagcattttactggttctgctggtt

SEQ ID NO: 827902 - DNA, 75 bp, synthetic construct
  source 1..75: mol_type = other DNA
ttgtggtgttttatctgctgcgctacttttttgccagcgccacggcgtatacctccgctctcgcaccgatgatga

SEQ ID NO: 827903 - DNA, 75 bp, synthetic construct
  source 1..75: mol_type = other DNA
gtgatcgttggactgatcctcgaacccgtgccgggtgccgtggtggcgatggtgggtatctccatcatcgccata

SEQ ID NO: 827904 - DNA, 75 bp, synthetic construct
  source 1..75: mol_type = other DNA
cttggtgaaatacctgatatgacgtttgaggaagcgtgtgtcaggtggctcgaagagaaagcacataagaaatca

SEQ ID NO: 827905 - DNA, 75 bp, synthetic construct
  source 1..75: mol_type = other DNA
tctatcgtgacggaaaactgattaaggcgatcagccgtggcaatggcctgaaaggtgaagactggacgcagaaag

SEQ ID NO: 827906 - DNA, 75 bp, synthetic construct
  source 1..75: mol_type = other DNA
aggggaatagcgacacgctaaactcactggctgtttttgtctgggcatggccggatggaccgcagttaatgaccg

SEQ ID NO: 827907 - DNA, 75 bp, synthetic construct
  source 1..75: mol_type = other DNA
tccatgacctcagacacacctgggcaagctggctgattcagtcaggcgtcccattatcagtgcttcaggaaatgg

SEQ ID NO: 827908 - DNA, 75 bp, synthetic construct
  source 1..75: mol_type = other DNA
atagacgacatttttggtgataatgtcccaaatatgtcccactctggaattatggaggatataaagaaggcgtaa

SEQ ID NO: 827909 - DNA, 75 bp, synthetic construct
  source 1..75: mol_type = other DNA
atagactcgattctgaacccatcggtcccaaatttgtcccagtcaaaaaataaggaaggtactaatgatgtgtaa

SEQ ID NO: 827910 - DNA, 75 bp, synthetic construct
  source 1..75: mol_type = other DNA
atgagtggtggaaagcgaaattacccttcgtcaccgatggcgtggttgtgcgagcggctaaggaacccgaatccc

SEQ ID NO: 827911 - DNA, 75 bp, synthetic construct
  source 1..75: mol_type = other DNA
tgatgccgcctttaaacggtgcggttatgcatccggttgcccatacgggtgtacgcaaaatggcggataaaaacg

SEQ ID NO: 827912 - DNA, 75 bp, synthetic construct
  source 1..75: mol_type = other DNA
tttcacgcttagtctggctggggtcaaaacaggttctggggctggatggcattggtgaggccggttggcgcgcgc

SEQ ID NO: 827913 - DNA, 75 bp, synthetic construct
  source 1..75: mol_type = other DNA
aagtgatggaatggaaagataatgcgcaaatcaagatgctgggcaactggctggctgcccagcagatcacaggct

SEQ ID NO: 827914 - DNA, 75 bp, synthetic construct
  source 1..75: mol_type = other DNA
tcagtttgcggtgggcaagagtggtaaaatctcggtggttgcgtcacttgtgcctgtcatgttggatgataaaaa

SEQ ID NO: 827915 - DNA, 75 bp, synthetic construct
  source 1..75: mol_type = other DNA
gctaccgggccaggcagagtggctggtgggcctggaaatatcaacctgtagctcaggttgccgaagtgaaggcaa

SEQ ID NO: 827916 - DNA, 75 bp, synthetic construct
  source 1..75: mol_type = other DNA
atgaccactccaacttttgataccatcgaagcgcaagcaagctacggtattggtttgcaggtagggcaacaactg

SEQ ID NO: 827917 - DNA, 75 bp, synthetic construct
  source 1..75: mol_type = other DNA
gggtcaccgagcgcgaaacggaaaactctctcgataagaaaatgctggcggtggtggtcggggccagtaccttcg

SEQ ID NO: 827918 - DNA, 75 bp, synthetic construct
  source 1..75: mol_type = other DNA
caaaaaagagggtgtgaatagcaccgaatctggcctgcaattccgcgtgatcaatcagggggaaggcgcaattcc

SEQ ID NO: 827919 - DNA, 75 bp, synthetic construct
  source 1..75: mol_type = other DNA
ccggctgttccggttgatgtggtgcaccgcgcgctgcgtgaaatccatgaacgtgccgatgctgttcgtcgtcag

SEQ ID NO: 827920 - DNA, 75 bp, synthetic construct
  source 1..75: mol_type = other DNA
atgctcaaccacgaaatgggctaccaggcagaggagccatcgctggaaaacctgctcctgaaactgttttgtacc

SEQ ID NO: 827921 - DNA, 75 bp, synthetic construct
  source 1..75: mol_type = other DNA
gccttaaagctaaatttgccgaacatcgcatcgttttctggcacgatcctgataagcgttttattgaggaactgg

SEQ ID NO: 827922 - DNA, 75 bp, synthetic construct
  source 1..75: mol_type = other DNA
aacccgccctgagtatctttctatctggaatgctattcgtcaggcagaacgcttgctgaatttgcgtaaccgtta

SEQ ID NO: 827923 - DNA, 75 bp, synthetic construct
  source 1..75: mol_type = other DNA
aaatcagataccggacatggcctcttttgccagtggtgatggatggatgaaattacccaacgggaaaatcctgca

SEQ ID NO: 827924 - DNA, 75 bp, synthetic construct
  source 1..75: mol_type = other DNA
aggtgtgccacttcctttcccgtcagcaacgccgccgacaggctggctgaaatgcaacggcgcggcatttgataa

SEQ ID NO: 827925 - DNA, 75 bp, synthetic construct
  source 1..75: mol_type = other DNA
gtgtgaaatacctcgaagaaaacgccaaaaaagagggcgtgaacagcaccgaatctggcctgcaattccgcgtga

SEQ ID NO: 827926 - DNA, 75 bp, synthetic construct
  source 1..75: mol_type = other DNA
atcgcgcgctgcgtgaaatccacgaacgcgccgatgccgttcgtcgtcagcgtttccaggcgatggctgctgaag

SEQ ID NO: 827927 - DNA, 75 bp, synthetic construct
  source 1..75: mol_type = other DNA
cgtttccaggcgatggctgctgaaggtgtgaaatacctggaagaaaacgccaaaaaagaaggtgtgaatagcacc

SEQ ID NO: 827928 - DNA, 75 bp, synthetic construct
  source 1..75: mol_type = other DNA
ttacattcagcatccctttccccaaaaaagcggactgcgccatgcttactcattctggtgatggcggtgcgcctt

SEQ ID NO: 827929 - DNA, 75 bp, synthetic construct
  source 1..75: mol_type = other DNA
accgatggcgtggttgtgcgaggggcgaaagaacccgaatcccgccattggctaccaggccaggcagaatgctgg

SEQ ID NO: 827930 - DNA, 75 bp, synthetic construct
  source 1..75: mol_type = other DNA
ttctgcgctacggtcaggtggaagtaccgctcccgccgggggctgacgttgagaggacaacgtggggcatttcgg

SEQ ID NO: 827931 - DNA, 75 bp, synthetic construct
  source 1..75: mol_type = other DNA
tttgcgcgctcagcaactttcgatggttggtaacgatttgcgttatgccggacgtttcccggtgtcgctggaagg

SEQ ID NO: 827932 - DNA, 75 bp, synthetic construct
  source 1..75: mol_type = other DNA
aagctcaggaagtcttactggatgtggtgctggacgaggcgaaaatcggtgtcgcatccatgctcggtagtcggg

SEQ ID NO: 827933 - DNA, 75 bp, synthetic construct
  source 1..75: mol_type = other DNA
ctaattattgaaagttgcttggagcaactaaaaaaaagaaaaccttatgagcattctctactggttgcgcattat

SEQ ID NO: 827934 - DNA, 75 bp, synthetic construct
  source 1..75: mol_type = other DNA
cgagttccacgatccgttgcattcatcccccatcgtcagcgccccggcgaagctttcggtgctggacgccaacgg

SEQ ID NO: 827935 - DNA, 75 bp, synthetic construct
  source 1..75: mol_type = other DNA
gagcgcacaacatggggcatttcggtcaataaacccaacgccgcgaaacagcaggggcaattgctggaaaaagcg

SEQ ID NO: 827936 - DNA, 75 bp, synthetic construct
  source 1..75: mol_type = other DNA
ttttacctcatggcaaaaagtcacggattcagtgtgatgatgacgaaggcatcatgatagacagttgtgtggctc

SEQ ID NO: 827937 - DNA, 75 bp, synthetic construct
  source 1..75: mol_type = other DNA
gaaatcccacttggcattctgaccgcttttgttggcgcaccgtttttcctgcttttgttgttacgcggaggtcgc

SEQ ID NO: 827938 - DNA, 75 bp, synthetic construct
  source 1..75: mol_type = other DNA
tcctgtgcaggaacaaattgtcttctggcaaatccgcgtgccgcgtattcttgctgcgctgttactgggcgcggc

SEQ ID NO: 827939 - DNA, 75 bp, synthetic construct
  source 1..75: mol_type = other DNA
ttaacccgctggcgtatcaccgcgcgtgggatgaacgcgggcaggggcgtgcttatctgcgttcggaaaaaaatc

SEQ ID NO: 827940 - DNA, 75 bp, synthetic construct
  source 1..75: mol_type = other DNA
gtacgccgactggcaggccagccaggcgctcggcgtaacgcaacaaccggaatactggcagcatatgctcgacag

SEQ ID NO: 827941 - DNA, 75 bp, synthetic construct
  source 1..75: mol_type = other DNA
catgcggtcagtggtaagggcagcatggcgcataccggtacggtagatattgtggcggataaaacgctctaccag

SEQ ID NO: 827942 - DNA, 75 bp, synthetic construct
  source 1..75: mol_type = other DNA
aacgtatcaggagagacctgggcgctcattcaacagatgttgcaaatgatgccgtttattctgacaaaaagaaaa

SEQ ID NO: 827943 - DNA, 75 bp, synthetic construct
  source 1..75: mol_type = other DNA
ctactgttacctatgaattgccgactccggttattcgaatcaaaaatcagggtagttcacctggtactttcgaag

SEQ ID NO: 827944 - DNA, 75 bp, synthetic construct
  source 1..75: mol_type = other DNA
aatgcaactaagagacattactgaatcaaaaatttattcagcaatgcagaaaatgacaaaccggcgtcatgagga

SEQ ID NO: 827945 - DNA, 75 bp, synthetic construct
  source 1..75: mol_type = other DNA
cagatgccggatgcgacgcttgtcgcgtcttatccgacctacgggaacgcacatgtagggcggataaggcgttca

SEQ ID NO: 827946 - DNA, 75 bp, synthetic construct
  source 1..75: mol_type = other DNA
atgaaagtatggatggcgatattaataagtatcttgtgctggcaatcatcggcgtgggcggtctgtccggcctgg

SEQ ID NO: 827947 - DNA, 75 bp, synthetic construct
  source 1..75: mol_type = other DNA
cgcaaaatggtggataaaaacgcattaagtctgtggatgcgagaacgtagcgatctttgggtgcagccaaaagtt

SEQ ID NO: 827948 - DNA, 75 bp, synthetic construct
  source 1..75: mol_type = other DNA
ggataaggcaccaattattaaagtgcctcaaccaaagaataaacggatccgctggctggagcctcatgaagcaca

SEQ ID NO: 827949 - DNA, 75 bp, synthetic construct
  source 1..75: mol_type = other DNA
gctggtcgtctcgtggcagggcgcggaaatggccccgcttacgctgattaaagatggcggcaacatggcgacgtt

SEQ ID NO: 827950 - DNA, 75 bp, synthetic construct
  source 1..75: mol_type = other DNA
aggacggggcaatcactaacgccaagatcgtaaacggtgcaattgataacgctaaaatcggtaactatatccagt

SEQ ID NO: 827951 - DNA, 75 bp, synthetic construct
  source 1..75: mol_type = other DNA
ttcctttatctggttgttgttattccattggggattcttgcgggatttcgtttcttgttgcagtttttaggcggt

SEQ ID NO: 827952 - DNA, 75 bp, synthetic construct
  source 1..75: mol_type = other DNA
ttgtccagggaatgatcaaagccaccaccgacgcctggctgaaaggctgggacgagcgcaacggcggcaacctga

SEQ ID NO: 827953 - DNA, 75 bp, synthetic construct
  source 1..75: mol_type = other DNA
gaacaagacgaagatgacgatgactatgcaccaatcgctttttcttctcagaatggcttctatggctatgatgaa

SEQ ID NO: 827954 - DNA, 75 bp, synthetic construct
  source 1..75: mol_type = other DNA
cgaccatcgttgttaactgcttcaccgatgaagaccgcttaaagtaccagaatctaccagcaattattgttcgtg

SEQ ID NO: 827955 - DNA, 75 bp, synthetic construct
  source 1..75: mol_type = other DNA
atcactttagtaaattaaagtgtattgcaatttcctggcattttaataaacctactgggaaggagcaccttcttt

SEQ ID NO: 827956 - DNA, 75 bp, synthetic construct
  source 1..75: mol_type = other DNA
acaccagggcggactctggcgggcgtatgaaaaaacgcacgggatgcggggatgggaatgcctggttgacggggt

SEQ ID NO: 827957 - DNA, 75 bp, synthetic construct
  source 1..75: mol_type = other DNA
ttgaccatcagaaaaaaagcacccgcattcaggccagcctgtttgctccgaatgaagaagaaaaacaacgtctca

SEQ ID NO: 827958 - DNA, 75 bp, synthetic construct
  source 1..75: mol_type = other DNA
ggcccgcaggtcgcgtaactacattaatgatacggaaatccaggtgcagcgccggcagacagcggcctggcgact

SEQ ID NO: 827959 - DNA, 75 bp, synthetic construct
  source 1..75: mol_type = other DNA
agatgcggcgtttggcgtgccgtcaccggacctgattcagtacttctcccgccgtgagtttatggatgcaggcga

SEQ ID NO: 827960 - DNA, 75 bp, synthetic construct
  source 1..75: mol_type = other DNA
atgtctgaatctgtacagagcaatagcgccgtcctggtgcacttcacgctaaaactcgacgatggcaccaccgcc

SEQ ID NO: 827961 - DNA, 75 bp, synthetic construct
  source 1..75: mol_type = other DNA
atgaaaacagtgcagcgtactttacttgccgcaacattgctgactattttttcggtctcagtcatggcgcaggat

SEQ ID NO: 827962 - DNA, 75 bp, synthetic construct
  source 1..75: mol_type = other DNA
gaccaagcacgcattgctcaacgcaattgctcagccggaacagtttgtggaaattagcgaaacgctggcggcggc

SEQ ID NO: 827963 - DNA, 75 bp, synthetic construct
  source 1..75: mol_type = other DNA
ggagtatgacggcgtgctattatctgttaagatatgcaggcgcaaagacaatattgccactggcgttactagaaa

SEQ ID NO: 827964 - DNA, 75 bp, synthetic construct
  source 1..75: mol_type = other DNA
tatcgacagcaaagatgatttaaaaagtctattgctagtggacagtgcgatgcgcattacagcattaggtgacac

SEQ ID NO: 827965 - DNA, 75 bp, synthetic construct
  source 1..75: mol_type = other DNA
tgcattgtgaatgtaaccagagcgatgaagagttcggtggcgtagtgcgtttgttgcaaaaagcgattcgcgccg

SEQ ID NO: 827966 - DNA, 75 bp, synthetic construct
  source 1..75: mol_type = other DNA
ctgccggtggtttccgtgccgcatatgcgttgtgaatgtaatcagagcgatgaagagttcggtggcgtggtgcgt

SEQ ID NO: 827967 - DNA, 75 bp, synthetic construct
  source 1..75: mol_type = other DNA
atttatcattcagcagcagcgtcaggaagcccttgagcaacaactgacgccttcagcccctgatgttcgcctttc

SEQ ID NO: 827968 - DNA, 75 bp, synthetic construct
  source 1..75: mol_type = other DNA
cttcaccgatcagtttgtgggcagcactgacgatgccgcagagctgcgccgccgtacgctggagtcttacggcca

SEQ ID NO: 827969 - DNA, 75 bp, synthetic construct
  source 1..75: mol_type = other DNA
tgtcggggactgggctgcatatacccaggcgcagggaggtgcactggttgcccgccgtgatctggttgttcgtct

SEQ ID NO: 827970 - DNA, 75 bp, synthetic construct
  source 1..75: mol_type = other DNA
ggcatttttaaacgaattgatgaaaatcgcgagctactcgaattgttatatgaaaaagcaccagagcttatggat

SEQ ID NO: 827971 - DNA, 75 bp, synthetic construct
  source 1..75: mol_type = other DNA
ttgcctctttccggcctgttttccgtggtttgcgtgggtatttggtgcgttgtgctggatgacgacctttacgcg

SEQ ID NO: 827972 - DNA, 75 bp, synthetic construct
  source 1..75: mol_type = other DNA
aaactattggcgagaatgtattgcctcgtctgcgaaaagtggctgcgcgttactctctggccgctgatgctgctg

SEQ ID NO: 827973 - DNA, 75 bp, synthetic construct
  source 1..75: mol_type = other DNA
tttgatatttggtcagggggcactgatttaccgcaatgggcggttgaaggaaacacgaaacgaaccattgcagga

SEQ ID NO: 827974 - DNA, 75 bp, synthetic construct
  source 1..75: mol_type = other DNA
cgacgctattctctaaccacattcctgactatcgtaatttgatgaccagttatgacacattaacgaagcagaaat

SEQ ID NO: 827975 - DNA, 75 bp, synthetic construct
  source 1..75: mol_type = other DNA
ataaaaatgatgctgctgtcttgttagtcgatcaccaggcaggattgctttctcttgtgcgagatatcgaccccg

SEQ ID NO: 827976 - DNA, 75 bp, synthetic construct
  source 1..75: mol_type = other DNA
atattcagttgtattcctcattcccggcacacgaaggctctctgctggatttacgggacattgagcaggggctgg

SEQ ID NO: 827977 - DNA, 75 bp, synthetic construct
  source 1..75: mol_type = other DNA
atgactctattaaggtactccgaaccatcatttcagaaagagagatataaagatttctatgatagcttatcgaat

SEQ ID NO: 827978 - DNA, 75 bp, synthetic construct
  source 1..75: mol_type = other DNA
ggatggcgcgctggcgcggcgtagaggattaactgacgcaggcggttttcttgatatttctctcgattttctctt

SEQ ID NO: 827979 - DNA, 75 bp, synthetic construct
  source 1..75: mol_type = other DNA
tggtttgcgtggatttttggcgcgctctgctggatgacgacatttacgcgagtgtggagtggttatctgacgctg

SEQ ID NO: 827980 - DNA, 75 bp, synthetic construct
  source 1..75: mol_type = other DNA
acatgtctagtatcagagttaggggtggtaacctcatggggcgaaatgtgttactactagatgatgttaaaacaa

SEQ ID NO: 827981 - DNA, 75 bp, synthetic construct
  source 1..75: mol_type = other DNA
aggtcgaatttcttttgaatactgcccttgttgcttaacaccaatatcagaacatgataacactgatagtggttg

SEQ ID NO: 827982 - DNA, 75 bp, synthetic construct
  source 1..75: mol_type = other DNA
agttaacgaacatatctttaaaaaggccaatgagcgtgttcatcaaatcctcgaaaaccaatttggaattgagga

SEQ ID NO: 827983 - DNA, 75 bp, synthetic construct
  source 1..75: mol_type = other DNA
cgccagcagcggccaacagaatttatccgtatccgctgggcgctggaatattaccaggctggcgacgccgataac

SEQ ID NO: 827984 - DNA, 75 bp, synthetic construct
  source 1..75: mol_type = other DNA
tatctgaattttccacttttattcttgcaggagactcggggaatgaagagctatttaaaacagcaactcaacttt

SEQ ID NO: 827985 - DNA, 75 bp, synthetic construct
  source 1..75: mol_type = other DNA
ttgaacttttcgattggggacaatataaatctgacagccatcaaaatttaaccatgcatcaaataatgcgactca

SEQ ID NO: 827986 - DNA, 75 bp, synthetic construct
  source 1..75: mol_type = other DNA
tattatgactacatctaaaattgattcatctttgaacaacaacacttacggggttggtcgttattatgacaaaaa

SEQ ID NO: 827987 - DNA, 75 bp, synthetic construct
  source 1..75: mol_type = other DNA
gaagccgctacctgccgatttgttcagcggcctgttgttgccgtgtgaacaaaagggaacggcagcccctgattc

SEQ ID NO: 827988 - DNA, 75 bp, synthetic construct
  source 1..75: mol_type = other DNA
tccacacctggaccaagcacgcgttgctcaacgcaattgctcagccggaacagtttgtggaaatcagcgaaacgc

SEQ ID NO: 827989 - DNA, 75 bp, synthetic construct
  source 1..75: mol_type = other DNA
aagatcattaccgactcagctcgccgtatgatttgcacgaatgcgaaaccaccctcagcatcgaacaaaccatta

SEQ ID NO: 827990 - DNA, 75 bp, synthetic construct
  source 1..75: mol_type = other DNA
gaatggcgcagggcgttgaacaaggtaagctggaaactgcccgcaatatgctgaatgccgggataaaccggaaga

SEQ ID NO: 827991 - DNA, 75 bp, synthetic construct
  source 1..75: mol_type = other DNA
ggtaatcataacgcttccgcagattcaatcttacttcaaggtttctgagccgactgcgaaggaagccgctagtga

SEQ ID NO: 827992 - DNA, 75 bp, synthetic construct
  source 1..75: mol_type = other DNA
cgcgccggtgtacaccaatatgtttggcaaggcggtggtcgccgatattaacaactactatcgcaatcaggcgta

SEQ ID NO: 827993 - DNA, 75 bp, synthetic construct
  source 1..75: mol_type = other DNA
ttatcgctggtgtggtaaccgaagtttgcgttgcgttcccggcactttcggcaattgaagaagggtttgatgtct

SEQ ID NO: 827994 - DNA, 75 bp, synthetic construct
  source 1..75: mol_type = other DNA
cggtatacctgaaaacccagagtaaaaagctgaagctgtcgacccgccgaaaccgggcagagctttttcgtgccg

SEQ ID NO: 827995 - DNA, 75 bp, synthetic construct
  source 1..75: mol_type = other DNA
ggctggtcagtctggtcaggaaactgctggaactgagccgaagcaacagcaatgcgcatgaagccggactggcgc

SEQ ID NO: 827996 - DNA, 75 bp, synthetic construct
  source 1..75: mol_type = other DNA
cctggattggcgtatcacaaccggaggatactggcggcggattgtcacattttatggttttggggagcgtccggt

SEQ ID NO: 827997 - DNA, 75 bp, synthetic construct
  source 1..75: mol_type = other DNA
tatcgacagcaaagatgatttaaaaagcctgctgctggtagacagtgcgctgcgcattacagcattaagtgacac

SEQ ID NO: 827998 - DNA, 75 bp, synthetic construct
  source 1..75: mol_type = other DNA
atgatgcgttctttagggttcgtaccagtcgaaacggcttatacccaacgtgcaaatgaggatgagcctggcttt

SEQ ID NO: 827999 - DNA, 75 bp, synthetic construct
  source 1..75: mol_type = other DNA
aagttcattaagaaagttggatgaagaatgttatttgaagtatggcaagtcttactctcaatcattccatgaaat

SEQ ID NO: 828000 - DNA, 75 bp, synthetic construct
  source 1..75: mol_type = other DNA
atcgcgactggcgtaatgatattgaaggactggcgacgttgttctctaaccacattcctgattatcgtaacttga

SEQ ID NO: 828001 - DNA, 75 bp, synthetic construct
  source 1..75: mol_type = other DNA
actacgagggaaagttgacattacggtcgctctcatccacgaaggtgttccggcgcgtcagtccagtatcggtaa

SEQ ID NO: 828002 - DNA, 75 bp, synthetic construct
  source 1..75: mol_type = other DNA
aataatcgatattatgaataccatgccctttgatgtggtatccattggtaatcatgaattcgaccatggttggga

SEQ ID NO: 828003 - DNA, 75 bp, synthetic construct
  source 1..75: mol_type = other DNA
tttatggctttggggagcgcccggttgtggcggcgtatgcctttgatgttctctgccggcagatgcaaaaggcaa

SEQ ID NO: 828004 - DNA, 75 bp, synthetic construct
  source 1..75: mol_type = other DNA
cagcgcttatcagtctgctgtactacatcagagtgatgggggggcttatccgtattctgggggggatttttcaga

SEQ ID NO: 828005 - DNA, 75 bp, synthetic construct
  source 1..75: mol_type = other DNA
ccggggaaatggctggttgaacaggctgcactgggcgtacataaaattatgtcttacagtgatgcgggcagtgcc

SEQ ID NO: 828006 - DNA, 75 bp, synthetic construct
  source 1..75: mol_type = other DNA
tccgcgtcagactctttgccgtgccgcatttccagattgaagggatggatatcaacctgtcactggtttcccaga

SEQ ID NO: 828007 - DNA, 75 bp, synthetic construct
  source 1..75: mol_type = other DNA
ctgttattgatatgccagccggacacggaccagttacgctaacttttgaagtaagttcaagcgcaatcaacaact

SEQ ID NO: 828008 - DNA, 75 bp, synthetic construct
  source 1..75: mol_type = other DNA
ggagtacaaacgccagctggcggcacttggcgacaaggtgacgtatcaggagcgtctgaatgcgctggcgcagca

SEQ ID NO: 828009 - DNA, 75 bp, synthetic construct
  source 1..75: mol_type = other DNA
actggcctgatggcactgttacggtaagggtggaagatgatcataagtttgatcgccaaattgtgattccagcta

SEQ ID NO: 828010 - DNA, 75 bp, synthetic construct
  source 1..75: mol_type = other DNA
ggtagctaggatggacagtgatgatatatcattaccaacgcggtttgccgaacagatagcttatatgagttctaa

SEQ ID NO: 828011 - DNA, 75 bp, synthetic construct
  source 1..75: mol_type = other DNA
tacccgaaccaaaaccgacaaagcagactccagactgattgcacgcttttgtaaagccgcgcagccagacccatg

SEQ ID NO: 828012 - DNA, 75 bp, synthetic construct
  source 1..75: mol_type = other DNA
cacagacccgacgtcgggactgatggcgatggcacgccagttccgtaacgtgacggcggagcagattgcgtatgt

SEQ ID NO: 828013 - DNA, 75 bp, synthetic construct
  source 1..75: mol_type = other DNA
gatcccggaagagtattcaccgcctcaggtactgatcgataccgatcgtttccttgagatgaaccgtcaacgttc

SEQ ID NO: 828014 - DNA, 75 bp, synthetic construct
  source 1..75: mol_type = other DNA
gtgacgccgcgctatctggcgcgattgaccaaagaagagcaggagagcgagcaaaagtggcgtaccgtcggcacc

SEQ ID NO: 828015 - DNA, 75 bp, synthetic construct
  source 1..75: mol_type = other DNA
gagtcgcactactgggggcataatgcgattatccgcgtgaaaccgtttatcgagcactgcgcactggctccgctg

SEQ ID NO: 828016 - DNA, 75 bp, synthetic construct
  source 1..75: mol_type = other DNA
agcggattggctgcgactattaaaacgtctgcgcaaaatacgggaaccacagccattacgcttaagcccattgca

SEQ ID NO: 828017 - DNA, 75 bp, synthetic construct
  source 1..75: mol_type = other DNA
ccgcacgatcctgatgcgtcgcagtccgcgtttttacgtcagtatcgggtgttatcacaattacctgcatacctt

SEQ ID NO: 828018 - DNA, 75 bp, synthetic construct
  source 1..75: mol_type = other DNA
ccgggagaaggttcctttgccggttcaatcctttcgcacgacttcgtggaagctgcgttgatgcgccgcgcaggt

SEQ ID NO: 828019 - DNA, 75 bp, synthetic construct
  source 1..75: mol_type = other DNA
gccgctggagcgaagaacgtaaggctgcggtacgacggcggaatctggagaaacgtatcaacaggcatgcaccac

SEQ ID NO: 828020 - DNA, 75 bp, synthetic construct
  source 1..75: mol_type = other DNA
tcggcgcaataaaatcccgctggtcacgaccggtggcgcgggggggcagattgatccgacgcagattcaggttac

SEQ ID NO: 828021 - DNA, 75 bp, synthetic construct
  source 1..75: mol_type = other DNA
tgacgccggataacgtagcgcaatatatgagtgccggttattcgtacgtgattgatgccattgatagtgtgcgac

SEQ ID NO: 828022 - DNA, 75 bp, synthetic construct
  source 1..75: mol_type = other DNA
ggcgccagcgttttggcggtactgcgcgtctgtatggtgaaaaagcgttgcaactgtttgctgatgcgcatattt

SEQ ID NO: 828023 - DNA, 75 bp, synthetic construct
  source 1..75: mol_type = other DNA
gctctgcataacgtcagcgtggtgaccttcacggacgtcaacggcagtccgtggccacagtcggatccgccctat

SEQ ID NO: 828024 - DNA, 75 bp, synthetic construct
  source 1..75: mol_type = other DNA
ggcctctggcggcaccgccgatgaatccgaatgagcatctctttcagatcaactacatcccggattccccagtat

SEQ ID NO: 828025 - DNA, 75 bp, synthetic construct
  source 1..75: mol_type = other DNA
tacggtctgtgcgatgaaagccacggcggaaggaccaaagcgaatggattgcgcatcaggatttggtgcggcaac

SEQ ID NO: 828026 - DNA, 75 bp, synthetic construct
  source 1..75: mol_type = other DNA
agtgcgacggacagtttttcgcaggttaaaagcgtggccacgcagacctttgacggtattgcacagaatatggca

SEQ ID NO: 828027 - DNA, 75 bp, synthetic construct
  source 1..75: mol_type = other DNA
atgctcgccagtgcgcagaaggcatttgatgaggcggataaaaaatggcagtggtaccagagccggagccagcgc

SEQ ID NO: 828028 - DNA, 75 bp, synthetic construct
  source 1..75: mol_type = other DNA
aatctggagaaacgtatcaacaggcatgcaccactgtttgcggatgaactgatagcccgtgaactggctgaacga

SEQ ID NO: 828029 - DNA, 75 bp, synthetic construct
  source 1..75: mol_type = other DNA
aaagctggtacacagcaatatcgctttatcaagaatgatttctacaattatttagctgatgcttttaaagcgtaa

SEQ ID NO: 828030 - DNA, 75 bp, synthetic construct
  source 1..75: mol_type = other DNA
ggatctgatgcaggcgcagcaggttcgtcgctggccgggtagtccactgccgttagtggaagcagatgcactgga

SEQ ID NO: 828031 - DNA, 75 bp, synthetic construct
  source 1..75: mol_type = other DNA
tgggaagtagtgtggaattcgccgcagcgtgatgatgactccacttcctggggggaagcgttcaaacgccacggc

SEQ ID NO: 828032 - DNA, 75 bp, synthetic construct
  source 1..75: mol_type = other DNA
aactcgagcgttttgccgcgcgtaaagccgtcgttgctgcgattgacgcgctcggcctgctggaagaaattaaac

SEQ ID NO: 828033 - DNA, 75 bp, synthetic construct
  source 1..75: mol_type = other DNA
caccgacgccctgcgtcagttccacccgaccaacgtgatggtttctggcttcgacatcatcttcttctggattgc

SEQ ID NO: 828034 - DNA, 75 bp, synthetic construct
  source 1..75: mol_type = other DNA
gaagatgaagtgcgcaaggaaaataaccttgccgccgacgtcgctctgcgtcaggacgaagacgttctcgatacc

SEQ ID NO: 828035 - DNA, 75 bp, synthetic construct
  source 1..75: mol_type = other DNA
ggagagcgttacgatcagatactcgcgtttgcttatcccgacaacagccttagccgctggggagcgccacgctca

SEQ ID NO: 828036 - DNA, 75 bp, synthetic construct
  source 1..75: mol_type = other DNA
gtgaactggcgcagaatcgtctggctattggcgttggtaactctgccaacgcttgcggaggagacgccgttacaa

SEQ ID NO: 828037 - DNA, 75 bp, synthetic construct
  source 1..75: mol_type = other DNA
ttacagcaaaacgccgatcgcgatggtgattgcctgagcatcccggacagtagcgctacccagcgcgtttcagct

SEQ ID NO: 828038 - DNA, 75 bp, synthetic construct
  source 1..75: mol_type = other DNA
gaaagagcgtgagaagctggaaggctatgcagaagcgaaagcgaagctgattgaacagcaggctgttatcgccgc

SEQ ID NO: 828039 - DNA, 75 bp, synthetic construct
  source 1..75: mol_type = other DNA
cctggcggcactggcgtctaccggtcgtgacatcaactgggatatgaagcgcctagaaggttaccgtaacttctg

SEQ ID NO: 828040 - DNA, 75 bp, synthetic construct
  source 1..75: mol_type = other DNA
ggcgaaatcagccgtatcgagaacaagctggcgaatgaaggctttgtcgcccgcgcaccggaagcggtcatcgcg

SEQ ID NO: 828041 - DNA, 75 bp, synthetic construct
  source 1..75: mol_type = other DNA
ccgcgcgccggaagcagttatcgcgaaagagcgtgaaaagctggaaggctatgcggaagcaaaagcgaaactgat

SEQ ID NO: 828042 - DNA, 75 bp, synthetic construct
  source 1..75: mol_type = other DNA
ctaatcccgatggcgggtctcatcaacaaagaagatgagctggcacgtctggcgaaagaagtggcgaagattgaa

SEQ ID NO: 828043 - DNA, 75 bp, synthetic construct
  source 1..75: mol_type = other DNA
cgtatggcgagtaccgcgcagttctgcttcggtgccaccgttcattaccggcttggtcagctcgagataccagtc

SEQ ID NO: 828044 - DNA, 75 bp, synthetic construct
  source 1..75: mol_type = other DNA
gttgcatattggcgcagatatgtgggggcaatactggcaacagcgtcaggcacctgcgtggttagcgtctcttac

SEQ ID NO: 828045 - DNA, 75 bp, synthetic construct
  source 1..75: mol_type = other DNA
acggcagttgttcccggtgtggccgcagtggcgtcctgagctggcgattgcactttttgcttcgactatggtgct

SEQ ID NO: 828046 - DNA, 75 bp, synthetic construct
  source 1..75: mol_type = other DNA
gaaccattaaacccggagcatcgcacggcgttgatcatgcctatctgtaacgaagacgtgaaccgtgtttttgct

SEQ ID NO: 828047 - DNA, 75 bp, synthetic construct
  source 1..75: mol_type = other DNA
gaatatccacaaggagaaattacctattacaaataccttcccaagaacggctggacactgcctgcaggctatacc

SEQ ID NO: 828048 - DNA, 75 bp, synthetic construct
  source 1..75: mol_type = other DNA
gatggaagccaacccgaacgccgggatcattcagtcgtcgccgaaagcgtccggtatggatacgctgtatgcgcg

SEQ ID NO: 828049 - DNA, 75 bp, synthetic construct
  source 1..75: mol_type = other DNA
gcaaaagtggcgtaccgtcggtaccatccgccgttacattctgttgatcctgacgctcgcgcaaactgttgtcgc

SEQ ID NO: 828050 - DNA, 75 bp, synthetic construct
  source 1..75: mol_type = other DNA
atgactccccgcaaggctcggtaaaggcgcgtctggaacaagcctggccagattcacttgctgatggacagttaa

SEQ ID NO: 828051 - DNA, 75 bp, synthetic construct
  source 1..75: mol_type = other DNA
gaacatggggcgcattgtcgttgacgttgatggtattgagctcgctgaactgattaacatggtctgcgataacgg

SEQ ID NO: 828052 - DNA, 75 bp, synthetic construct
  source 1..75: mol_type = other DNA
actcgctgtcacaccagaccagtgacttcggcgaatcagaatggattcatttcacaggtagcggatatctgttac

SEQ ID NO: 828053 - DNA, 75 bp, synthetic construct
  source 1..75: mol_type = other DNA
gaccgccacttttggctttgttgcggtttctcatgcgctgaagaagatgatggcgaaagcggcgcgtcaggggta

SEQ ID NO: 828054 - DNA, 75 bp, synthetic construct
  source 1..75: mol_type = other DNA
ggattgccacaaacagcaccggtatccgagaactcaaacgcggtggtgattcaatatcaggataaaccgtacgtt

SEQ ID NO: 828055 - DNA, 75 bp, synthetic construct
  source 1..75: mol_type = other DNA
atggggcataacggtcaattcggcggcttcctgaaagaagtgcgcgaaaatggcggtatgcagacagaattgatg

SEQ ID NO: 828056 - DNA, 75 bp, synthetic construct
  source 1..75: mol_type = other DNA
aggccgctgaaaaaggttattcactccgcgtggtggatgaccgtgactctaccgaaacaccggcaacttatgcca

SEQ ID NO: 828057 - DNA, 75 bp, synthetic construct
  source 1..75: mol_type = other DNA
tgtgtacagaaatgacagccctctaggagaacaacgggcaaatagatttatagaattatataatataaaaagaga

SEQ ID NO: 828058 - DNA, 75 bp, synthetic construct
  source 1..75: mol_type = other DNA
ctgatgaaggcggtgtatgacatggcccgcaagggggcgcaggatgagattcaggcgcagatgcgtgacggtggt

SEQ ID NO: 828059 - DNA, 75 bp, synthetic construct
  source 1..75: mol_type = other DNA
gttgatattctccagcctaatagccaggtagcggtcgatgttatgggcttaaaaatccgtaaccttgaaaccaat

SEQ ID NO: 828060 - DNA, 75 bp, synthetic construct
  source 1..75: mol_type = other DNA
aggtaacaaggtttatctcgataatgcgatgattcgtaatgctgcaattggtacagcccagattaatgatgcggc

SEQ ID NO: 828061 - DNA, 75 bp, synthetic construct
  source 1..75: mol_type = other DNA
atgtattctgtatgtccagaagcgtttgaacctatttccagaaatgaagccagtacaccggaaggaagctggcta

SEQ ID NO: 828062 - DNA, 75 bp, synthetic construct
  source 1..75: mol_type = other DNA
tatcattgatggctctatcgataatgctaaaattggtaactatatccagtcttataactggaatggtaacgatgg

SEQ ID NO: 828063 - DNA, 75 bp, synthetic construct
  source 1..75: mol_type = other DNA
aacaaaacgctggtactgtcggggaacacagccggactgacagctgaccgcatgctggcactggcgcggaacgga

SEQ ID NO: 828064 - DNA, 75 bp, synthetic construct
  source 1..75: mol_type = other DNA
ctcactgcagtggatttacagtgtggtgaagagggtcagaaaagaagaattagatcggatgcagggcaaactgtt

SEQ ID NO: 828065 - DNA, 75 bp, synthetic construct
  source 1..75: mol_type = other DNA
gggcgagtgggcagaaagtgcgacggacagtttttcgcaggttaaaagcgtggccacgcagacctttgacggtat

SEQ ID NO: 828066 - DNA, 75 bp, synthetic construct
  source 1..75: mol_type = other DNA
gctaaaatcggtaactatatccagtcttccaactggaacggatcgaccggatggcatatcaacaagaacgggtcc

SEQ ID NO: 828067 - DNA, 75 bp, synthetic construct
  source 1..75: mol_type = other DNA
cgcgtggctggtattcacatgagcgcaaccaacgatccggcgcaaccgacgagaatcatctttaatgctgataaa

SEQ ID NO: 828068 - DNA, 75 bp, synthetic construct
  source 1..75: mol_type = other DNA
tcaaatggacgaaccttgctgcacacaacgcgggtgtaacagtcgctatcgtcggcctatctacggatgtgagta

SEQ ID NO: 828069 - DNA, 75 bp, synthetic construct
  source 1..75: mol_type = other DNA
catgtggatctggcaacttcttagtgattgcgtacaaggaaatgcgagccatcgaggccgagattaatcgacgac

SEQ ID NO: 828070 - DNA, 75 bp, synthetic construct
  source 1..75: mol_type = other DNA
caacgaaaattggattacttgtggcaatgcactgcggctcgactggttaagaatttgtccgccaacgggaaccag

SEQ ID NO: 828071 - DNA, 75 bp, synthetic construct
  source 1..75: mol_type = other DNA
tctgaggatggagagaaagacatatgcaccaataaaaacaatatagaacgattatctaaaacaatgaaggatttt

SEQ ID NO: 828072 - DNA, 75 bp, synthetic construct
  source 1..75: mol_type = other DNA
ccttcccagtaccaaaactcacagaaaaaaacaaggctgacctcacacgctgcgcggaggacatacttctggcgc

SEQ ID NO: 828073 - DNA, 75 bp, synthetic construct
  source 1..75: mol_type = other DNA
ctgatgtaaaattgccgcaagctttggagattgcgtctattcggggtcggattgatggcgttcgggaaatgcggc

SEQ ID NO: 828074 - DNA, 75 bp, synthetic construct
  source 1..75: mol_type = other DNA
gtttatgacgtagcccgtaagggggccagtgatgttatgccggcgcagatgcgcgatggtggtctgttctccgga

SEQ ID NO: 828075 - DNA, 75 bp, synthetic construct
  source 1..75: mol_type = other DNA
tcggtggcaccggaagtccggcgcaaatgcggcgttcagagggtatcaggtttgagcagaacaacaacgtggtga

SEQ ID NO: 828076 - DNA, 75 bp, synthetic construct
  source 1..75: mol_type = other DNA
gtattttacgttgaagccagagcatttcctatcaagatatttgctgaggagggcttgaacgtaattgttccaact

SEQ ID NO: 828077 - DNA, 75 bp, synthetic construct
  source 1..75: mol_type = other DNA
tgaaaggaaccattaacagcaaatacaatctggcagttaatgcagatggtcgcgtggctggtattcacatgagcg

SEQ ID NO: 828078 - DNA, 75 bp, synthetic construct
  source 1..75: mol_type = other DNA
gtctggggcggacaaaatgtgtattttccgatgggtatggtctggcgggtaagccagcgagacagggagatattt

SEQ ID NO: 828079 - DNA, 75 bp, synthetic construct
  source 1..75: mol_type = other DNA
tgataaacatagtttcttgcctcaaggtgactatcattatcaaattcattatcaggttaaaaatgctttcctgcg

SEQ ID NO: 828080 - DNA, 75 bp, synthetic construct
  source 1..75: mol_type = other DNA
aattcatctggaagatcagtatgataagaaccagcaaatcctgattcgtgttaatgaaggcgcgaccagaaataa

SEQ ID NO: 828081 - DNA, 75 bp, synthetic construct
  source 1..75: mol_type = other DNA
ttaactatcttgcgcgtaaagaggcagcaacacacagtgggcggcggcggaaaggggaaacacggaaactggatt

SEQ ID NO: 828082 - DNA, 75 bp, synthetic construct
  source 1..75: mol_type = other DNA
taacgccggagccggataataaaatcccggctccggcacaggaaccagagcagataaatacaccgtccgacagtc

SEQ ID NO: 828083 - DNA, 75 bp, synthetic construct
  source 1..75: mol_type = other DNA
tcatcactttgtttttaccactgatttgttcaggcgtggccttctattctctctacatcaatgtcggagatgtat

SEQ ID NO: 828084 - DNA, 75 bp, synthetic construct
  source 1..75: mol_type = other DNA
tcgtaaatctgattgtgaaaggaaaaattcatctggaagatcagtatgacaagaaccagcaaatcctgattcgtg

SEQ ID NO: 828085 - DNA, 75 bp, synthetic construct
  source 1..75: mol_type = other DNA
gcgcccatcaccagtgttgtaccccgtatcagctctctgacagttaatctgtcccccggtgccagccttcctctt

SEQ ID NO: 828086 - DNA, 75 bp, synthetic construct
  source 1..75: mol_type = other DNA
agctgcctgcccccgggcaggccagcccgctggtacaggatgcggcaagacttgattctgagctctccgccgatg

SEQ ID NO: 828087 - DNA, 75 bp, synthetic construct
  source 1..75: mol_type = other DNA
gaccttgtcctctgccgacggaactcatctctggaagcttcccgtcaccccactactgactttctctgtgaatgg

SEQ ID NO: 828088 - DNA, 75 bp, synthetic construct
  source 1..75: mol_type = other DNA
atcttgcgcgtaaagaggcggcaacacacagtgggcggcggcggaaaggggaaacacggaaactggattacgcgt

SEQ ID NO: 828089 - DNA, 75 bp, synthetic construct
  source 1..75: mol_type = other DNA
gcatttttacggatgcagaaattttatctgccgcgtaaaaagtcttcgttttaccggcctgatacgtttttgcaa

SEQ ID NO: 828090 - DNA, 75 bp, synthetic construct
  source 1..75: mol_type = other DNA
ggaatgcctgccccggtctggcaaaactggtgctggcggtggggcttgcagcaggcaggtgaacaactactgaaa

SEQ ID NO: 828091 - DNA, 75 bp, synthetic construct
  source 1..75: mol_type = other DNA
gcgagtatttcgggcgctggaagccaacgttttaacattgacgatggtcagagtggcggtggtttcaacagcctg

SEQ ID NO: 828092 - DNA, 75 bp, synthetic construct
  source 1..75: mol_type = other DNA
gatggttggtatcacttcgctagcggtggcgaccggtgcgctggcgtatgcctggtatcagggtgactcaaccct

SEQ ID NO: 828093 - DNA, 75 bp, synthetic construct
  source 1..75: mol_type = other DNA
taagcaagaaaacaataagttagtgcaaatcttcgcaattgccgagggtgaaatcgaccattacaaagcactgtt

SEQ ID NO: 828094 - DNA, 75 bp, synthetic construct
  source 1..75: mol_type = other DNA
tcatcactggtaatgtccgcgtcaccggcaatatcagtgcgtcaggctctatcatcgacgctggcggcaatacca

SEQ ID NO: 828095 - DNA, 75 bp, synthetic construct
  source 1..75: mol_type = other DNA
aaggtagcaacctgaccgacgctgacgccatcacctcaacgtccgtggtatggactgccaaaggcagcaccgatg

SEQ ID NO: 828096 - DNA, 75 bp, synthetic construct
  source 1..75: mol_type = other DNA
ataatacagatgatttcacctcactgatctataccggtggcgatacgattacacgaagcggagaaactgtaacgc

SEQ ID NO: 828097 - DNA, 75 bp, synthetic construct
  source 1..75: mol_type = other DNA
gcgttaacattgaaggtgtcaatggcaataacggcaataatagtgaagtgcattatgctaattacacactgccag

SEQ ID NO: 828098 - DNA, 75 bp, synthetic construct
  source 1..75: mol_type = other DNA
gtgatggcattctcgataagggcaacattaaagaagaataccgtaaagtgttagaagtcgagttccgcacgggta

SEQ ID NO: 828099 - DNA, 75 bp, synthetic construct
  source 1..75: mol_type = other DNA
ctattaaattcccattaactggtatcggccgctatgcgtttgaattagctaatcatttagctggcagcccggaaa

SEQ ID NO: 828100 - DNA, 75 bp, synthetic construct
  source 1..75: mol_type = other DNA
atgggctttgataccaatatggaaggtggtttcctggcgcgtcgccgtcacttacaggcgctggagcaagcggcg

SEQ ID NO: 828101 - DNA, 75 bp, synthetic construct
  source 1..75: mol_type = other DNA
atgggctttgacaccaatatggaaggcggcttcctggcgcgccgtcgtcacctacaggcgctggaacaagcggcg

SEQ ID NO: 828102 - DNA, 75 bp, synthetic construct
  source 1..75: mol_type = other DNA
ctgattgaggcgtatcgcctgctgcatccgcggcgccaggcgtgggcattgcgcgattacaaagactacatttac

SEQ ID NO: 828103 - DNA, 75 bp, synthetic construct
  source 1..75: mol_type = other DNA
gaacagatccctttggtggagaataaaagcgataccaaagccagcaatcatggtcgtctgtcggcgtttctacgc

SEQ ID NO: 828104 - DNA, 75 bp, synthetic construct
  source 1..75: mol_type = other DNA
agatgcaatatatcatgggccaaatttttatttaccccctaaagttgggcgatgcgtagtcacttttcatgattt

SEQ ID NO: 828105 - DNA, 75 bp, synthetic construct
  source 1..75: mol_type = other DNA
gacattctctggggcgaccagggcaacttgaaagagcgattgcatccggggagttaatcccgtgtcctttaaaaa

SEQ ID NO: 828106 - DNA, 75 bp, synthetic construct
  source 1..75: mol_type = other DNA
gatgtacttgccacagcaggtttccctgattttggggatcaattgaagctgctggctaccagcagcctgcaaaaa

SEQ ID NO: 828107 - DNA, 75 bp, synthetic construct
  source 1..75: mol_type = other DNA
gacattgtgctgatgctcatctcacacctaaccgagtcgatgaatcttttcaatgccgggcgcggtgccatgccg

SEQ ID NO: 828108 - DNA, 75 bp, synthetic construct
  source 1..75: mol_type = other DNA
atttttgctaccattgcctacgatcccgatccagatttaaccccgctgactgtgagacgtttgtgcaaggcattg

SEQ ID NO: 828109 - DNA, 75 bp, synthetic construct
  source 1..75: mol_type = other DNA
gttgctaaagaaatacattcttccacagagggtttaaaaaattatttaaagaagaataggcttgcgtctgaatta

SEQ ID NO: 828110 - DNA, 75 bp, synthetic construct
  source 1..75: mol_type = other DNA
tatcgtcatgccgccgaactacactggtccgcaacgctggcagaaattgaacgggtaaagcggctttatcagacg

SEQ ID NO: 828111 - DNA, 75 bp, synthetic construct
  source 1..75: mol_type = other DNA
gctggagcaggatatcaccaatctggaaaaagcagcggcattaagcattgccagaatgattacatacccgcgtta

SEQ ID NO: 828112 - DNA, 75 bp, synthetic construct
  source 1..75: mol_type = other DNA
agcatatgcgaatactttttattcatggtgcccgcactgtcgtcaggggtgccacgaataacaatgatagtcata

SEQ ID NO: 828113 - DNA, 75 bp, synthetic construct
  source 1..75: mol_type = other DNA
caatgtctatgccgctgaattgatgaccaaagcggaatttgaaaaagtcgaatcgcaatatgaaaaaataggtga

SEQ ID NO: 828114 - DNA, 75 bp, synthetic construct
  source 1..75: mol_type = other DNA
tgcttttattcagtcacacatcaatcgcatctgtgatgaataataatcatctcgatttctgttttattcaggccg

SEQ ID NO: 828115 - DNA, 75 bp, synthetic construct
  source 1..75: mol_type = other DNA
cgggaactttgcaaaggtcgttggacttaagcaaaacgcccttttctcatggttgcgccagaatggcattctcat

SEQ ID NO: 828116 - DNA, 75 bp, synthetic construct
  source 1..75: mol_type = other DNA
aactctgccgataatatagcgggcgtttattacagacccgttcaaaagtatataaatggcacctggtataatgta

SEQ ID NO: 828117 - DNA, 75 bp, synthetic construct
  source 1..75: mol_type = other DNA
acatttgctgtaaacggtcagatacaaccaagcaactggggtaacattgattcccgatatgtgaaagatgttcgg

SEQ ID NO: 828118 - DNA, 75 bp, synthetic construct
  source 1..75: mol_type = other DNA
cgtgtggatggtgaacgttcatgcctctggcggtgcgcggatgatgaccgcggcacgagaagcgctggttccatt

SEQ ID NO: 828119 - DNA, 75 bp, synthetic construct
  source 1..75: mol_type = other DNA
atgttctattgtgcttcggcaccgacggcgcggaaaagcctgccagaggagaaatcgcaactgttaatttttatt

SEQ ID NO: 828120 - DNA, 75 bp, synthetic construct
  source 1..75: mol_type = other DNA
caggatatcaccaatctggaaaaagcagcggcattaagcattgccagaatgtttaacatacccgcgttaatagct

SEQ ID NO: 828121 - DNA, 75 bp, synthetic construct
  source 1..75: mol_type = other DNA
ttcagctgaaaaatattatcgacagcggcgaaatcggtcagccattaatggttcatggacgtcattacaatgcca

SEQ ID NO: 828122 - DNA, 75 bp, synthetic construct
  source 1..75: mol_type = other DNA
ttttttatgctgccatggcagcaatcgcctttctcattacctggtttctttcccacgataagaagagcattcgct

SEQ ID NO: 828123 - DNA, 75 bp, synthetic construct
  source 1..75: mol_type = other DNA
accagcatggaagccagcgacctggccgatcttggcgtgacactgtcaccagcggattatgcagaacgtctggcg

SEQ ID NO: 828124 - DNA, 75 bp, synthetic construct
  source 1..75: mol_type = other DNA
cgaaagaggcgatctcactgcatcctacgctgctgccgcagcagtggacgctggagcattacgtcgacattttta

SEQ ID NO: 828125 - DNA, 75 bp, synthetic construct
  source 1..75: mol_type = other DNA
aattcctggtgctgccggacggggtgaaaggggaaaacacctggacggtgggcgacaggaatgccgtgagactgg

SEQ ID NO: 828126 - DNA, 75 bp, synthetic construct
  source 1..75: mol_type = other DNA
gtgaatattgaagagttaaaaaaacaagccgaaacggaaatcgccgactttatcgcgcaaaaaatcgccgagctg

SEQ ID NO: 828127 - DNA, 75 bp, synthetic construct
  source 1..75: mol_type = other DNA
tgtagctgaggttggactcgccagttggaccgctatcaatgttgcagtgaaggtttcagaagggaagagtctacc

SEQ ID NO: 828128 - DNA, 75 bp, synthetic construct
  source 1..75: mol_type = other DNA
atgatttcagaaacagcagtgcattcactccatgggtatctgttggcctgggttatgcacgagtacatcataagg

SEQ ID NO: 828129 - DNA, 75 bp, synthetic construct
  source 1..75: mol_type = other DNA
aaactgaaacggaaattgccgattttattgcgcaaaaaatcgccgaactgaacaagaacacagggaaagaagtct

SEQ ID NO: 828130 - DNA, 75 bp, synthetic construct
  source 1..75: mol_type = other DNA
acgttttctggtgaagcggtgcagctgttccgctttgaaaacgaatatcaggccatcgaggcgctgaacaatatc

SEQ ID NO: 828131 - DNA, 75 bp, synthetic construct
  source 1..75: mol_type = other DNA
tcgcattgttgccgctatcgcttttcattaccccggcatattctgcagatctgggaattgatagtattacagagg

SEQ ID NO: 828132 - DNA, 75 bp, synthetic construct
  source 1..75: mol_type = other DNA
tcagactctttgccgtgccgcatttccagatcgaagggatggacgtcaacctgtcactggtttcccagatgccga

SEQ ID NO: 828133 - DNA, 75 bp, synthetic construct
  source 1..75: mol_type = other DNA
gaggacaatccgggcttcttccgcgtcagactctttgccgtgccgcatttccagatcgaagggatggacgtcaac

SEQ ID NO: 828134 - DNA, 75 bp, synthetic construct
  source 1..75: mol_type = other DNA
acaaaaattttcgacttcaacgttacaaactggcttgcaacgagtaactacggcactggtgatggttacagtgac

SEQ ID NO: 828135 - DNA, 75 bp, synthetic construct
  source 1..75: mol_type = other DNA
cacattagctactgcgaataccgagatgaaagatgttgctaacctgaagccggtagtttcaggaatgagtaacga

SEQ ID NO: 828136 - DNA, 75 bp, synthetic construct
  source 1..75: mol_type = other DNA
ggtgaagtggtaaataatcctttcagtccgtcaggtgatgggttgttaaataacgtatttttcacagtgaatgag

SEQ ID NO: 828137 - DNA, 75 bp, synthetic construct
  source 1..75: mol_type = other DNA
aaatatccttaaagaacatggtattaaacaaagcatgtccagaaaaggcaattgtctggataatgctgtggtgga

SEQ ID NO: 828138 - DNA, 75 bp, synthetic construct
  source 1..75: mol_type = other DNA
cagtgcgaatcacttttgcgaagagttttcccgttccagcagcagctacctgcaagaacgtgccctggacgtacg

SEQ ID NO: 828139 - DNA, 75 bp, synthetic construct
  source 1..75: mol_type = other DNA
tggtgggcgataactgccagttactgatttccggagctgacgaacaaacagcacaccagcgtttgagccagtggc

SEQ ID NO: 828140 - DNA, 75 bp, synthetic construct
  source 1..75: mol_type = other DNA
taagctgcgccgaagcgattgttgccagtgcgaatcacttttgcgaagagttcgcccgttccagcagcagctacc

SEQ ID NO: 828141 - DNA, 75 bp, synthetic construct
  source 1..75: mol_type = other DNA
gcccctggcgatgtccgggctgatatcggtgtttgtctactgctttatggtggcgtggttatcgaagagcgtcga

SEQ ID NO: 828142 - DNA, 75 bp, synthetic construct
  source 1..75: mol_type = other DNA
tgcaaattatcttccgcatcaccgtgccgttggcgatgtccgggctgatatccgtgttcgtctactgctttatgg

SEQ ID NO: 828143 - DNA, 75 bp, synthetic construct
  source 1..75: mol_type = other DNA
acggcgtacatgcacgtccggcaagccacgttgaaacgctgtgtaatactttttcatcacaaattgagtggcata

SEQ ID NO: 828144 - DNA, 75 bp, synthetic construct
  source 1..75: mol_type = other DNA
atgggatatcgccacggtatttatatatctgagctggctacatctataactcctccagtgcaagttagtgctggg

SEQ ID NO: 828145 - DNA, 75 bp, synthetic construct
  source 1..75: mol_type = other DNA
gatgagttcagtaatataagcgaactgggtaatgactccaacttattgatagtgttttatgttcagataatgccc

SEQ ID NO: 828146 - DNA, 75 bp, synthetic construct
  source 1..75: mol_type = other DNA
caattgtctggataatgctgtggtggagtgtttctttggaaccttaaagtcggagtgtttttatcttgatgagtt

SEQ ID NO: 828147 - DNA, 75 bp, synthetic construct
  source 1..75: mol_type = other DNA
gaaaaacattgagtttcgtctgctggatagcgacggtgctaccagcgcgattctggaagctcaccgatccctggc

SEQ ID NO: 828148 - DNA, 75 bp, synthetic construct
  source 1..75: mol_type = other DNA
cactgaccaatctgaatccgcaaattatccgcgcccgcaccgtgtgcagcggtagcgcaggcggcattctgacgc

SEQ ID NO: 828149 - DNA, 75 bp, synthetic construct
  source 1..75: mol_type = other DNA
gtgagctgccaaatggcgtacatgcacgcccggcaagccacgttgaaacgctgtgtaatactttttcatcacaga

SEQ ID NO: 828150 - DNA, 75 bp, synthetic construct
  source 1..75: mol_type = other DNA
ctacattgctgcgatcccacgcgaaagaattcattgtcatcttcttaattggtttcctgttaggttcattatttt

SEQ ID NO: 828151 - DNA, 75 bp, synthetic construct
  source 1..75: mol_type = other DNA
acgccggactataaccactatcgcattcggcccgtggcttgcgttcggcagcatgataaacctgggatatctggc

SEQ ID NO: 828152 - DNA, 75 bp, synthetic construct
  source 1..75: mol_type = other DNA
cattcatctttcgctggaacaaaccgcaattttcccgccgatgatgctctacatggtggcctctggcgaaaaaag

SEQ ID NO: 828153 - DNA, 75 bp, synthetic construct
  source 1..75: mol_type = other DNA
atttaccggcgtacctgcgacagaaccgttgcgctttatctgggaagttccaggcggtgggaggttaattccgcc

SEQ ID NO: 828154 - DNA, 75 bp, synthetic construct
  source 1..75: mol_type = other DNA
tctcgttgtgtcgaattagaggggcagagcggaaccaccgtggccttttccggtatagcggcagcagaaccgttg

SEQ ID NO: 828155 - DNA, 75 bp, synthetic construct
  source 1..75: mol_type = other DNA
gaaccgttgcgatttatctgggaagtgcctggcggtgggcggttaattccgccgctaaaggtacaacggaatgaa

SEQ ID NO: 828156 - DNA, 75 bp, synthetic construct
  source 1..75: mol_type = other DNA
gtggcggtgggtaaccctacaccagatatcgacgccgttgccagccaggggctgattttaacttcggcgtattct

SEQ ID NO: 828157 - DNA, 75 bp, synthetic construct
  source 1..75: mol_type = other DNA
gttggctttaacggcggcggcgtggcggtgggtaatcctacaccagatatcgacgccgttgccagccaggggctg

SEQ ID NO: 828158 - DNA, 75 bp, synthetic construct
  source 1..75: mol_type = other DNA
gtaccgctacagaccgaaatgcatgcatatatggagatcctgaaaaaatatccgccgcgcgcgcagattaaatct

SEQ ID NO: 828159 - DNA, 75 bp, synthetic construct
  source 1..75: mol_type = other DNA
cgagccagcactcattattacgatggcactgatcgtcctgtttattgtcgtgtcggtactccaacctcttcttca

SEQ ID NO: 828160 - DNA, 75 bp, synthetic construct
  source 1..75: mol_type = other DNA
aatcgcgattagtgtttcagcaaataattaaaacatatccaaaagaaatgggggtatgttttgttattggtgttt

SEQ ID NO: 828161 - DNA, 75 bp, synthetic construct
  source 1..75: mol_type = other DNA
ccatcaaagggtgaagttcttggtgcagcacaaaaccttaatgagatcacctcaatacttgctgcaacagtaagg

SEQ ID NO: 828162 - DNA, 75 bp, synthetic construct
  source 1..75: mol_type = other DNA
ggtatggggtacgtgttcgaagagttgatccgtaagttcaacgaggagaataacgaagaagccggtgagcacttt

SEQ ID NO: 828163 - DNA, 75 bp, synthetic construct
  source 1..75: mol_type = other DNA
ccgatgctgaccgaccagtggtacgtgcgtgccgatgtcctggcgaaaccggcagttgaagcggttgagaacggc

SEQ ID NO: 828164 - DNA, 75 bp, synthetic construct
  source 1..75: mol_type = other DNA
agcggtcgttgctgcggttgacgcgctcggcctgctggaagaaattaaaccacacgacctgaccgttccttatgg

SEQ ID NO: 828165 - DNA, 75 bp, synthetic construct
  source 1..75: mol_type = other DNA
acatccgtgcagaaatgaatatcgcgccgggcaaaccgctggaactgctgctgcgtggttgcagcgcggatgcag

SEQ ID NO: 828166 - DNA, 75 bp, synthetic construct
  source 1..75: mol_type = other DNA
acaaagaagatgagctggcgcgcctggcgaaagaagtggcgaagatcgaaggtgaaatcagccgtatcgagaaca

SEQ ID NO: 828167 - DNA, 75 bp, synthetic construct
  source 1..75: mol_type = other DNA
aggattgcggctttaacggcggcgaaatgacactgtcgctggcggaccgctggattctggcggagttcaaccaga

SEQ ID NO: 828168 - DNA, 75 bp, synthetic construct
  source 1..75: mol_type = other DNA
tgcgtgccgatgtcctggcgaaaccggcggttgaagcggttgagaacggcgacattcagttcgtaccgaagcagt

SEQ ID NO: 828169 - DNA, 75 bp, synthetic construct
  source 1..75: mol_type = other DNA
gtacgggccagccattgtctcaaacatatctggctctttggtgcagagtatttgatgaaggatttgtggaaataa

SEQ ID NO: 828170 - DNA, 75 bp, synthetic construct
  source 1..75: mol_type = other DNA
gatgtgattgacccgcgttttaaggttagcctgaaagactattggggaaatctcgaagtggtggatgccacgcca

SEQ ID NO: 828171 - DNA, 75 bp, synthetic construct
  source 1..75: mol_type = other DNA
acatcaaggtaggctcaaccttgtctaccgacgagtttgcggcttcacgctttgactttatgttgtctaccccgc

SEQ ID NO: 828172 - DNA, 75 bp, synthetic construct
  source 1..75: mol_type = other DNA
tggattctggcggagttcaaccagaccatcaaagcgtaccgcgaagcgctggacagcttccgcttcgatatcgcc

SEQ ID NO: 828173 - DNA, 75 bp, synthetic construct
  source 1..75: mol_type = other DNA
tacaaagtcaggatattcagccgctggtggaagtcgaaaaagaggtgattctggcggcgctggagaaaacaggcg

SEQ ID NO: 828174 - DNA, 75 bp, synthetic construct
  source 1..75: mol_type = other DNA
acaggttgaagagcgttatgagagatataaagctaaaaatctagctagcatgcatgcagatgaaggtgaagtata

SEQ ID NO: 828175 - DNA, 75 bp, synthetic construct
  source 1..75: mol_type = other DNA
gcaacccaaattgccgataatatgatgccggtaatgctgcacccggcgcaggataaagaaacccagcagaaactg

SEQ ID NO: 828176 - DNA, 75 bp, synthetic construct
  source 1..75: mol_type = other DNA
cgcgccgcagaaagagatgtctgccgctcacgttcgcgcctgctatcaactggtgaaagagcacgatcgcgtggg

SEQ ID NO: 828177 - DNA, 75 bp, synthetic construct
  source 1..75: mol_type = other DNA
cgattactggcgcgctctacaaaaccgcatccgcgaaggacatgtggaagatgtttatgcatatcggcgcagaca

SEQ ID NO: 828178 - DNA, 75 bp, synthetic construct
  source 1..75: mol_type = other DNA
gcggatggtgcctctcaatatttggcttgaacaggttgagggtcagcaactgcgtgatgctatagaagagtacgg

SEQ ID NO: 828179 - DNA, 75 bp, synthetic construct
  source 1..75: mol_type = other DNA
tttttaatatttcgtcattgccagtacaggctgagcatgctatttacgatatgtttgacaggctggagcaaaaag

SEQ ID NO: 828180 - DNA, 75 bp, synthetic construct
  source 1..75: mol_type = other DNA
acctgccgttgcgtctgcactggcagaataaaagccgtgacattcattacatcattcgccatctgacggaaacgc

SEQ ID NO: 828181 - DNA, 75 bp, synthetic construct
  source 1..75: mol_type = other DNA
ctttcaccccgatcacggctgggaatctctgctgatgcgcgttatcagcgacctgccgctgcgcctgcgctggca

SEQ ID NO: 828182 - DNA, 75 bp, synthetic construct
  source 1..75: mol_type = other DNA
agggagagatcaccagaaaaattgaggctatgctgaattcatcgacagtgagcacgactatagaaagaggaactg

SEQ ID NO: 828183 - DNA, 75 bp, synthetic construct
  source 1..75: mol_type = other DNA
gtggggagatagtattattcaggcttatagagggggccggcaagatcttattgatacagtgataagcaaaataaa

SEQ ID NO: 828184 - DNA, 75 bp, synthetic construct
  source 1..75: mol_type = other DNA
ctcaattaacgggtaaaggccagcagtggttgacgcgtaaactgctcgatgctggcttgttaaaaccggtggcgg

SEQ ID NO: 828185 - DNA, 75 bp, synthetic construct
  source 1..75: mol_type = other DNA
tcactgctgatgcgcgttattagcgacttgccgctacgcctgcgctggcagaataaaagccgtgatatcaactat

SEQ ID NO: 828186 - DNA, 75 bp, synthetic construct
  source 1..75: mol_type = other DNA
cttttaccccgatcacggctgggaatcactgctgatgcgcgttattagcgacttgccgctacgcctgcgctggca

SEQ ID NO: 828187 - DNA, 75 bp, synthetic construct
  source 1..75: mol_type = other DNA
gtcatagtggttgttttactaatctgttgcacaggctgggatggcctaagggggagattagcaggaaaattgagg

SEQ ID NO: 828188 - DNA, 75 bp, synthetic construct
  source 1..75: mol_type = other DNA
ccgcaaaacagatttatagttctaccgcagaaatcagaaaaacagatttatgggatttgatgtctggaactaaac

SEQ ID NO: 828189 - DNA, 75 bp, synthetic construct
  source 1..75: mol_type = other DNA
ggttctacatgggaaggcggcgttcgtgtgccaaccttcgtttactggaaaggcatgatccaaccgcgtaaatct

SEQ ID NO: 828190 - DNA, 75 bp, synthetic construct
  source 1..75: mol_type = other DNA
ttaccgggtcatcacggtcagtgatgaacgtgatgttgccaggtcccgacctttactccctctcatttattcaca

SEQ ID NO: 828191 - DNA, 75 bp, synthetic construct
  source 1..75: mol_type = other DNA
ctgccatcaatccggctatctgggacgcatggcgatccacgaaatgatggttattacaccggaattgcgagctgc

SEQ ID NO: 828192 - DNA, 75 bp, synthetic construct
  source 1..75: mol_type = other DNA
gctggacgatgtgggctggatggatgttggctttaacggcggcggcgtggcggtgggtaacccaacgccagacat

SEQ ID NO: 828193 - DNA, 75 bp, synthetic construct
  source 1..75: mol_type = other DNA
cccagagcggatatcagggtggattcaccggcacagtaatgcaaacagccggatcgtcggtgtttaacctctaca

SEQ ID NO: 828194 - DNA, 75 bp, synthetic construct
  source 1..75: mol_type = other DNA
cactggagaaaaacggtcagcttgataacacgctgattgtctttacctccgataacggaccggaagccgaagtac

SEQ ID NO: 828195 - DNA, 75 bp, synthetic construct
  source 1..75: mol_type = other DNA
cagattatgtagcaatgcttaatgaaatattattcgaaatagagtccaaaccactattaaaagctccttatctcg

SEQ ID NO: 828196 - DNA, 75 bp, synthetic construct
  source 1..75: mol_type = other DNA
actggttgtcggtgagaatgtcagaggcatcatcccggcctgttcccgtgaagggggcagaaaaactgcccggtc

SEQ ID NO: 828197 - DNA, 75 bp, synthetic construct
  source 1..75: mol_type = other DNA
cagatgcccgacaacttcaacaggaaatcaccgccctttttgatacctcatgggaaatcgcgatggatcagttgc

SEQ ID NO: 828198 - DNA, 75 bp, synthetic construct
  source 1..75: mol_type = other DNA
tatcatcagctcgcggtgacaacaattggcactcccgtaggctccctcattgccatcaatccggctatcaggggc

SEQ ID NO: 828199 - DNA, 75 bp, synthetic construct
  source 1..75: mol_type = other DNA
accgggtcatcacggtcagtgatgaacgtgatgttgccaggtcccgacctttactccctctcatttattcacatt

SEQ ID NO: 828200 - DNA, 75 bp, synthetic construct
  source 1..75: mol_type = other DNA
aatgaggtcaggaactctaaattaaatgaattgcagcatctactggatagtcacaaactatccgatgaggtcaat

SEQ ID NO: 828201 - DNA, 75 bp, synthetic construct
  source 1..75: mol_type = other DNA
tccgctatctcataacataaccctgtgcttcattactggcactgcattacatttcagaccccgcatagatgtctt

SEQ ID NO: 828202 - DNA, 75 bp, synthetic construct
  source 1..75: mol_type = other DNA
taagaattcaggaacctatacagaatttacataaaacagttgagaaacaaaaatataatgtacttctgagaagaa

SEQ ID NO: 828203 - DNA, 75 bp, synthetic construct
  source 1..75: mol_type = other DNA
gggtgttttttttgatgttatgtcatattacatctctaaaggaatgggaatagctcaccatcttaagagccagaa

SEQ ID NO: 828204 - DNA, 75 bp, synthetic construct
  source 1..75: mol_type = other DNA
gtgaaggaggcggtaagccatattcctgttccgcgtgatggtcgtgactatgatcccgatgttctgcagaaggcg

SEQ ID NO: 828205 - DNA, 75 bp, synthetic construct
  source 1..75: mol_type = other DNA
gccagacaacaaaaacgtgggctctggtcagatgctgatccggttcccccctggatatggagacaccgtaaataa

SEQ ID NO: 828206 - DNA, 75 bp, synthetic construct
  source 1..75: mol_type = other DNA
ttttcaaggtctcgtttgattacattgacaatgtaatgacaacaatcgatatgtataatgttggctcttccagta

SEQ ID NO: 828207 - DNA, 75 bp, synthetic construct
  source 1..75: mol_type = other DNA
gcattttctggaacaatgtaatctggaagggattggctcacgacgccttgcctgggtactggagcatgattttac

SEQ ID NO: 828208 - DNA, 75 bp, synthetic construct
  source 1..75: mol_type = other DNA
gatttatggtaaggaaccatcatcgttgctggtttcgttgagttatccacagttcctgaatattcgcacgcatta

SEQ ID NO: 828209 - DNA, 75 bp, synthetic construct
  source 1..75: mol_type = other DNA
acattttgaaaatgattgttttgttggggatgattgctgaacaaatgatcaataccggaattaaacaggaattca

SEQ ID NO: 828210 - DNA, 75 bp, synthetic construct
  source 1..75: mol_type = other DNA
cgactggcggtaaatcctgtcgaggaagcagatgatgaagaaaaagatgatgccactgagcatgaaatactacgt

SEQ ID NO: 828211 - DNA, 75 bp, synthetic construct
  source 1..75: mol_type = other DNA
cagagcgtttgaactggcattcatttaatgacagcgaaggaatggatgaggaagaaagggaggcttttctggtaa

SEQ ID NO: 828212 - DNA, 75 bp, synthetic construct
  source 1..75: mol_type = other DNA
tgccgctgaacatgaaatactacgtgcattcaggacattactggattcagaaagtgaaccgccccgggtttcctg

SEQ ID NO: 828213 - DNA, 75 bp, synthetic construct
  source 1..75: mol_type = other DNA
atcactggggatattttatccaaagtagataaaaacatttctgggtctattaaattgtcctggagtgatgagcaa

SEQ ID NO: 828214 - DNA, 75 bp, synthetic construct
  source 1..75: mol_type = other DNA
tattcaccagcgggacctggcagaactggtcgaccggctggcacccatcttgctggcgggatacttgtcttcatc

SEQ ID NO: 828215 - DNA, 75 bp, synthetic construct
  source 1..75: mol_type = other DNA
aaaagtctgccatctgctgacgtcgatgacggacgccatacgcttccccaggacgtataccggagctgatgcgcg

SEQ ID NO: 828216 - DNA, 75 bp, synthetic construct
  source 1..75: mol_type = other DNA
gcgggtcatatgttgaccgatactgccgccctgcttttcgccctactcgcagtgcaattttcccgtcgtcctccc

SEQ ID NO: 828217 - DNA, 75 bp, synthetic construct
  source 1..75: mol_type = other DNA
ccgttggcgagagcttgaagaaactgcggttaatatcccaaaacgttaccggaagcgttgcgccttgctgctgat

SEQ ID NO: 828218 - DNA, 75 bp, synthetic construct
  source 1..75: mol_type = other DNA
gtccgaacgatacagacagcctcttttttttcgggtgggaaaacagcaaccattcctgatatttcaacctgtgat

SEQ ID NO: 828219 - DNA, 75 bp, synthetic construct
  source 1..75: mol_type = other DNA
tctgcatgatggattttgccactttgtgcgacaatggagcaactttacagctcgaccactaccaacgaccctatg

SEQ ID NO: 828220 - DNA, 75 bp, synthetic construct
  source 1..75: mol_type = other DNA
gcgttcgtcggtagatgcttttgtacatttaggctatttgctgggtgaagaacacctggagcgttttgagaaggc

SEQ ID NO: 828221 - DNA, 75 bp, synthetic construct
  source 1..75: mol_type = other DNA
aaagataagttaattctcaagcaactagctggctatacagactattctcaagttgaaaatccattaaggctatta

SEQ ID NO: 828222 - DNA, 75 bp, synthetic construct
  source 1..75: mol_type = other DNA
ttaacggtgatccaagtgattttaatcaggctgttgagtatttaaaacaagattcacaaatgaaagaaactatag

SEQ ID NO: 828223 - DNA, 75 bp, synthetic construct
  source 1..75: mol_type = other DNA
cgtctaaagactacttttgttttcgcttcattaagaacatgggataatcctaaggtaaagcttgaagactggcta

SEQ ID NO: 828224 - DNA, 75 bp, synthetic construct
  source 1..75: mol_type = other DNA
tgatggcgactcattctgggaatttggtgttaatgaaaaattgcttgataaagctaactttgattacgaaaaaag

SEQ ID NO: 828225 - DNA, 75 bp, synthetic construct
  source 1..75: mol_type = other DNA
tttctgagattccatctacaacacttttatatcttctagatatagtcgttaaagaaataaatagccaggatatcc

SEQ ID NO: 828226 - DNA, 75 bp, synthetic construct
  source 1..75: mol_type = other DNA
caccgccacgatgttcaagggcagcgaatcgccattcgatgaagatgcgccgtatcaggccggagcatgggctga

SEQ ID NO: 828227 - DNA, 75 bp, synthetic construct
  source 1..75: mol_type = other DNA
atcggtaaagtgtttgctgatgttcgagatcagttgggtattccttatttggacgattatggacagcggcggtta

SEQ ID NO: 828228 - DNA, 75 bp, synthetic construct
  source 1..75: mol_type = other DNA
gatattaagcaggtgatggaagttgtagaaaacctgcctaagcgtgttgttcagccgtatcgctcaatgactatt

SEQ ID NO: 828229 - DNA, 75 bp, synthetic construct
  source 1..75: mol_type = other DNA
ccactagacgtaacgggatctactacgttcgctttcgtctgtccggcaaaaaatatttccgtaagtcgctggaaa

SEQ ID NO: 828230 - DNA, 75 bp, synthetic construct
  source 1..75: mol_type = other DNA
ttcaggctgtactggaacgctgtgcggtgagccgcgccacactgtaccggatgattgaaaaagggactttcccac

SEQ ID NO: 828231 - DNA, 75 bp, synthetic construct
  source 1..75: mol_type = other DNA
atgagtctggcggatgaagtggcagagttacgccgcagggtggcggacatggtccggcgtggtgtagtggaagag

SEQ ID NO: 828232 - DNA, 75 bp, synthetic construct
  source 1..75: mol_type = other DNA
ttatggagacgcgtaatacaccgcgtggactgttacggatcgatgccgcaactccagtggtgctgcacttgtcaa

SEQ ID NO: 828233 - DNA, 75 bp, synthetic construct
  source 1..75: mol_type = other DNA
accgagaacgctacaagacaggtggcgatacatcccaaactgatcgagtggggtttccttgatttcgttaaccgt

SEQ ID NO: 828234 - DNA, 75 bp, synthetic construct
  source 1..75: mol_type = other DNA
tagggatctggtccgctctgaagttgagaccaacaaccagcaggctttcaacatgctgatgcagggcgggccgaa

SEQ ID NO: 828235 - DNA, 75 bp, synthetic construct
  source 1..75: mol_type = other DNA
cggggtccgaaagttggcaaggtaggcggcgcggcggctctctctggcggtcctgttggctggggcattgcgatc

SEQ ID NO: 828236 - DNA, 75 bp, synthetic construct
  source 1..75: mol_type = other DNA
gcggtcctgttggctggggcattgcgatcggttcggtaggtggggattatgcctgggataaagtcatggacgcta

SEQ ID NO: 828237 - DNA, 75 bp, synthetic construct
  source 1..75: mol_type = other DNA
cctgatggttggcaaaaatggatcaccttgttgttggcgtatacgggagccagaagaggggagatcgccaagctg

SEQ ID NO: 828238 - DNA, 75 bp, synthetic construct
  source 1..75: mol_type = other DNA
tatccacaagcatttgaagatttacaaatcgctcttcaaaaccttcctgactgataataaagatattctggagaa

SEQ ID NO: 828239 - DNA, 75 bp, synthetic construct
  source 1..75: mol_type = other DNA
gacccggtgtacacgccggcgcgaaaaatccacctgtaccactgcgaccatcgcggcctgccgctggcgcttatc

SEQ ID NO: 828240 - DNA, 75 bp, synthetic construct
  source 1..75: mol_type = other DNA
ggtgccgggctacgcagacagacaacggaagcgttctccggtaagaaaatcaccgccacgatgttcaagggcagc

SEQ ID NO: 828241 - DNA, 75 bp, synthetic construct
  source 1..75: mol_type = other DNA
accgggtggtggacatggattgcgcgtacgttgcccgacaacgcggaagccggaggcgggctaatggtcgcggtg

SEQ ID NO: 828242 - DNA, 75 bp, synthetic construct
  source 1..75: mol_type = other DNA
aacgccggtaatgcgctggcgacggtcgtggccgcaccgctgggaagctatctgggggctacggtcggatggcga

SEQ ID NO: 828243 - DNA, 75 bp, synthetic construct
  source 1..75: mol_type = other DNA
ataagcgagcgcaattctattacgcgctggctgacaggctgtatctgacatatcgggcggttgttcacggtgagt

SEQ ID NO: 828244 - DNA, 75 bp, synthetic construct
  source 1..75: mol_type = other DNA
attcggtaatccggttgcttgaagacaccatagagcgggaagggtattcggctgagtttgaaattcagcgttcaa

SEQ ID NO: 828245 - DNA, 75 bp, synthetic construct
  source 1..75: mol_type = other DNA
ggctgcttgttgaagcggcgcgtcggcagccggtgcgcatcctctgtgctcgtgaactgcaaaacagtatcagcg

SEQ ID NO: 828246 - DNA, 75 bp, synthetic construct
  source 1..75: mol_type = other DNA
atgtgtcacggtctgtttatcgaattaattgcagatataaaaaaaaccaaccgtaaaggttggttttttcttggg

SEQ ID NO: 828247 - DNA, 75 bp, synthetic construct
  source 1..75: mol_type = other DNA
ggaaaaaattcagaaactgatccctgcaattctggcaatccttccgcgcgagctgcgccaccgactcagcatctt

SEQ ID NO: 828248 - DNA, 75 bp, synthetic construct
  source 1..75: mol_type = other DNA
cgagctttatcggcatgtgtatcttggtgaaccggtgggggcatcagaaatggctattatcaagtttgcatggtt

SEQ ID NO: 828249 - DNA, 75 bp, synthetic construct
  source 1..75: mol_type = other DNA
gcgatgagtagcgtgctgctcctttgcgcgggcgtactgacctttgttaccgcacgccagaaggccggtgcgctt

SEQ ID NO: 828250 - DNA, 75 bp, synthetic construct
  source 1..75: mol_type = other DNA
caacggcaggaggcatcgtgtttgaccgccttggctggcagagcacgtttgctatgagtagcgtgctgctccttt

SEQ ID NO: 828251 - DNA, 75 bp, synthetic construct
  source 1..75: mol_type = other DNA
cagaatatcagcgcgcggcattaattagtgccctgcaaacgctgtacccggaatgtgcgatttacgatcgcagcg

SEQ ID NO: 828252 - DNA, 75 bp, synthetic construct
  source 1..75: mol_type = other DNA
gtatgagtcagtcttcagactcaatggtacacagggacgataaagggaaggaaaaaaatatatctaaagaattca

SEQ ID NO: 828253 - DNA, 75 bp, synthetic construct
  source 1..75: mol_type = other DNA
atacagcacagccaactccacctacgatacgattataaaattattatcgtcaaccattacagcgttatttgattc

SEQ ID NO: 828254 - DNA, 75 bp, synthetic construct
  source 1..75: mol_type = other DNA
caacgtggcttaggactatttatagatgaaggaaatggagatagactgaggttctgcacagcagaaaaatcagaa

SEQ ID NO: 828255 - DNA, 75 bp, synthetic construct
  source 1..75: mol_type = other DNA
atggttagtgtgacgagttatacatatccaacggaaacagagaatgataatagccagtttcagagtcagggcctg

SEQ ID NO: 828256 - DNA, 75 bp, synthetic construct
  source 1..75: mol_type = other DNA
cactggaagaagcagaaaaatggtgcgccgctttaggacttccggtaattccacccgatcccaaacaccgcacac

SEQ ID NO: 828257 - DNA, 75 bp, synthetic construct
  source 1..75: mol_type = other DNA
atacagtacagccaactccacctacgatacgattatcaaattattatcgtcaaccattactgcattgtttgattc

SEQ ID NO: 828258 - DNA, 75 bp, synthetic construct
  source 1..75: mol_type = other DNA
gcctttacgctgacggcaactgttgaggataaacacggcaaccctgttcccggaactatggtcgcctttaatctt

SEQ ID NO: 828259 - DNA, 75 bp, synthetic construct
  source 1..75: mol_type = other DNA
atgtcattagtgaactccacgttcgtagctgataacgatgccccgatgatcaaaacaacgacacaactgatcttc

SEQ ID NO: 828260 - DNA, 75 bp, synthetic construct
  source 1..75: mol_type = other DNA
cgcttgtggcaaaagatgcgcatggtaacgctatcagcggtctttccctgtcagcaagtctgacgggtgccgcgt

SEQ ID NO: 828261 - DNA, 75 bp, synthetic construct
  source 1..75: mol_type = other DNA
agaacagatcaatcgaaaagataaatatttcttatacaaaaagaatgaagcgaataatcttagacttaaagcttt

SEQ ID NO: 828262 - DNA, 75 bp, synthetic construct
  source 1..75: mol_type = other DNA
aaaatgctatcagtggtttgatgaacgttagtgaactaactgaaaacataaatttatgtggacgagttcaaagtg

SEQ ID NO: 828263 - DNA, 75 bp, synthetic construct
  source 1..75: mol_type = other DNA
gattggcaaccgcgcactggcagatggtaaagccaaacagacttataaagtcacggttactgatgccaataacaa

SEQ ID NO: 828264 - DNA, 72 bp, synthetic construct
  source 1..72: mol_type = other DNA
atgtgccccttcagaggagcgaaagctcctcctgccgtccacttcacagggttttctccccgcagtggacct

SEQ ID NO: 828265 - DNA, 75 bp, synthetic construct
  source 1..75: mol_type = other DNA
atgcaaatcaggcttacccaatatttgattcgatacttgccggaaaaattagcgaagaagaagccagtagttcaa

SEQ ID NO: 828266 - DNA, 75 bp, synthetic construct
  source 1..75: mol_type = other DNA
aagaagtagcgaaagtccttttttcagcccgaagtgacccggagctcatgaaatttatgatggattatattaata

SEQ ID NO: 828267 - DNA, 75 bp, synthetic construct
  source 1..75: mol_type = other DNA
gatgtcgatgaaggtgccagcggcgcgatggtcgggtttaacgttcatttccactctctggcaagcgcctcgatt

SEQ ID NO: 828268 - DNA, 75 bp, synthetic construct
  source 1..75: mol_type = other DNA
acctggcgataccgcgtgtgggtcaggaggtgattgtggacttcctcaacggcgacccggaccagccgattatta

SEQ ID NO: 828269 - DNA, 75 bp, synthetic construct
  source 1..75: mol_type = other DNA
gtggacttcctcaacggcgatccggaccagccgattattatggggcgtacctaccaccaggaaaaccgcacaccc

SEQ ID NO: 828270 - DNA, 75 bp, synthetic construct
  source 1..75: mol_type = other DNA
ggaagttctgcagaaggcggttctggatgcggtgagtgccctgccggctccacaggacgggcgtgatgccacggc

SEQ ID NO: 828271 - DNA, 75 bp, synthetic construct
  source 1..75: mol_type = other DNA
gccagtgtacggaaaaaacattttccctgccggtgatgctctatcgcggtgtattcagaaccggcgaaacctacc

SEQ ID NO: 828272 - DNA, 75 bp, synthetic construct
  source 1..75: mol_type = other DNA
cgatgatgtgcgtccgatgcttgagcagatggtgaaggaggcggtaagccatattcctgttccgcgcgacggtcg

SEQ ID NO: 828273 - DNA, 75 bp, synthetic construct
  source 1..75: mol_type = other DNA
ttacccaaatcaggtaaacacaaaagacaaactaacaaaagacaatataaaacctttttcgtccgagaattctga

SEQ ID NO: 828274 - DNA, 75 bp, synthetic construct
  source 1..75: mol_type = other DNA
cagcaaaaaagcggcgaaggtcgagagaacggcgaaaaaatcgcgcgttcaggcgcgtgaagctcggctgcggta

SEQ ID NO: 828275 - DNA, 75 bp, synthetic construct
  source 1..75: mol_type = other DNA
accgccaccgctattatgacccgctgcaggggaggtatatcactcaggatccgattgggctgaaggggggatgga

SEQ ID NO: 828276 - DNA, 75 bp, synthetic construct
  source 1..75: mol_type = other DNA
cctgtaccactgcgaccatcgcggcctgccgctggcgctcatcagcacggaaggggcaacagcgtggtgcgcaga

SEQ ID NO: 828277 - DNA, 75 bp, synthetic construct
  source 1..75: mol_type = other DNA
agcagcaaacggcaaagatgcctttacgctgacggcaactgttgaggataaaaacggcaaccctgttcccggaac

SEQ ID NO: 828278 - DNA, 75 bp, synthetic construct
  source 1..75: mol_type = other DNA
actattatttcgcgaggtgcacagcattaatcacattatcaaaaccttatatttttactgtatttttatcgctaa

SEQ ID NO: 828279 - DNA, 75 bp, synthetic construct
  source 1..75: mol_type = other DNA
tttagacaacaagctgcgaaatggcattgcacattataaatatgaatataaagagtcaattcagatgataaccta

SEQ ID NO: 828280 - DNA, 75 bp, synthetic construct
  source 1..75: mol_type = other DNA
gccttgtatgtgacacggtcattgatacaagaataggtatgtctaatcgagacatacaaccgttccaatttgcat

SEQ ID NO: 828281 - DNA, 75 bp, synthetic construct
  source 1..75: mol_type = other DNA
aaatctgattatgtagaaaaacttattgttgctttagctacgacgatgccgtcacctgctactatagaccttgtt

SEQ ID NO: 828282 - DNA, 75 bp, synthetic construct
  source 1..75: mol_type = other DNA
ggtttcttcgccacgcgcagaaaaagcaaggttatattcagccattgagcagcgactcgaacaatcactaaagat

SEQ ID NO: 828283 - DNA, 75 bp, synthetic construct
  source 1..75: mol_type = other DNA
acaaaaaagcgctgtttcgcgcctgccggcaggcacgtgaagcatcagagtatttactgacgcggcgaacttcgc

SEQ ID NO: 828284 - DNA, 75 bp, synthetic construct
  source 1..75: mol_type = other DNA
agatgtagtgattatattaatccagagcataaaaaaacgataaaggctttacaagatgctggctatctcaagtaa

SEQ ID NO: 828285 - DNA, 75 bp, synthetic construct
  source 1..75: mol_type = other DNA
tgatgcggtgagtgccctgccggctccgcaggacgggcgtgatgccacggcactggaaatactccccgccattga

SEQ ID NO: 828286 - DNA, 75 bp, synthetic construct
  source 1..75: mol_type = other DNA
cgcagtgctggcggatttaaagcgcacatttgaggggaaaatagccgcgcaggcacaaacgtttgaagaaaaact

SEQ ID NO: 828287 - DNA, 75 bp, synthetic construct
  source 1..75: mol_type = other DNA
cgatttgatctcttcaccacggctgccgcccaaactaatcatatactactgtggagaaaaccagtttaaaactgt

SEQ ID NO: 828288 - DNA, 75 bp, synthetic construct
  source 1..75: mol_type = other DNA
gcctggaactttgagcaggatgccggttactggctgaaccggtatatcgctcgttatggcatccgcaaattccct

SEQ ID NO: 828289 - DNA, 75 bp, synthetic construct
  source 1..75: mol_type = other DNA
gtaagttggcagcatcacctggatgcggatggaaacattgcgtggagcggggagtatgatgagtggggcaaccag

SEQ ID NO: 828290 - DNA, 75 bp, synthetic construct
  source 1..75: mol_type = other DNA
ccccctatccgatgccattggtcgcaaaccagtgatggtcacggcgctactgttggcctccatttgtacgttatt

SEQ ID NO: 828291 - DNA, 75 bp, synthetic construct
  source 1..75: mol_type = other DNA
gagccgtatccaaatgcttgctaacgggagtgcgcaaaagccgctggttctgtctctgcgagacgccgaggggca

SEQ ID NO: 828292 - DNA, 75 bp, synthetic construct
  source 1..75: mol_type = other DNA
atttcatgtggcccatgacggaaaggatattaatgtatctcaggcaggaagttctctttatagcataatatctga

SEQ ID NO: 828293 - DNA, 75 bp, synthetic construct
  source 1..75: mol_type = other DNA
attcaaggaaaacagaggttgatgatagccagtttcttaatcagagtctaagggatagtatcgaaagaagtcttg

SEQ ID NO: 828294 - DNA, 75 bp, synthetic construct
  source 1..75: mol_type = other DNA
gacacaattgaccttcacggcgaaggatgcgaacggtaaccctgtaagtggtctgaaacctgatgctccagaatt

SEQ ID NO: 828295 - DNA, 75 bp, synthetic construct
  source 1..75: mol_type = other DNA
caaaagatgcgcatggtaacgcaatcagcggtctttccctgtcgacaagcctgacgggagctgcgtctgaagggg

SEQ ID NO: 828296 - DNA, 75 bp, synthetic construct
  source 1..75: mol_type = other DNA
aaacagaagccggggtgtaccagtcggtcttcaccaccggtacgcaatcaggtgaagcaaccattacggtgagcg

SEQ ID NO: 828297 - DNA, 75 bp, synthetic construct
  source 1..75: mol_type = other DNA
atgtagaaaaactaacgtggggcgttgtttgggaggggcaaatctttattatccaagaagcaattaaacttgcag

SEQ ID NO: 828298 - DNA, 75 bp, synthetic construct
  source 1..75: mol_type = other DNA
tccgtacttctgcaatgctatttagaatcgctgacgaatgggaatactcagcaaaaaacgcagatattcgagccg

SEQ ID NO: 828299 - DNA, 75 bp, synthetic construct
  source 1..75: mol_type = other DNA
gacttgtacgccacaggatgattcccagtatccagggatggatacaaagacagcaagtgattacctgccacagac

SEQ ID NO: 828300 - DNA, 75 bp, synthetic construct
  source 1..75: mol_type = other DNA
gttactccggataaagatgaaaaaaccgagaatacgaccgcatgggaaagggattattgtcagataaccatacaa

SEQ ID NO: 828301 - DNA, 75 bp, synthetic construct
  source 1..75: mol_type = other DNA
cggcacagatggggcttatttggtatgatgatggcaaagctatttatatctatgactcggtgatgctgccaactt

SEQ ID NO: 828302 - DNA, 75 bp, synthetic construct
  source 1..75: mol_type = other DNA
cctgagaatgcaatagatgaaacactttctcatcttgaactttgcctttctcaacaaactgaagaggatcagttc

SEQ ID NO: 828303 - DNA, 75 bp, synthetic construct
  source 1..75: mol_type = other DNA
gcgaattaatgtctatccggtcagtacgactggcgtaccaccagaaaccgggagatttgaagccacggcaacggt

SEQ ID NO: 828304 - DNA, 75 bp, synthetic construct
  source 1..75: mol_type = other DNA
gtatattggcgtcaattttggcgttaaaaccctggaggaagaagcaaatacggcaggggtagttaaagacaaatt

SEQ ID NO: 828305 - DNA, 75 bp, synthetic construct
  source 1..75: mol_type = other DNA
tcggtcgtcattcctcctatggcgctggcgcgactatatgagtgttacaacatacccgcaagtgattcctgcacg

SEQ ID NO: 828306 - DNA, 75 bp, synthetic construct
  source 1..75: mol_type = other DNA
tgaggctttttttacctactctgcaagcagcgacatctggtttgacacagagcgatccgcgtcgtcagttggtag

SEQ ID NO: 828307 - DNA, 75 bp, synthetic construct
  source 1..75: mol_type = other DNA
caatgggtgttccttacgacgccattgctcagaactgtcggctttctcccgaaacggtacgaacctacctgaagc

SEQ ID NO: 828308 - DNA, 75 bp, synthetic construct
  source 1..75: mol_type = other DNA
gcaatatttatgctgaatattacgctgcaaccaaaaaagataaagagattatcgaccgacgattacaaatgcgta

SEQ ID NO: 828309 - DNA, 75 bp, synthetic construct
  source 1..75: mol_type = other DNA
atctggcggctaaggtattgctccaggtgaaagggaattctccaactgcagtaccgtttgaaaatattggtacag

SEQ ID NO: 828310 - DNA, 75 bp, synthetic construct
  source 1..75: mol_type = other DNA
gcggtaatagcggtagcttttccctgaaaatattgcagccgttcgttggttcggtcgtcattcctcctatggcgc

SEQ ID NO: 828311 - DNA, 75 bp, synthetic construct
  source 1..75: mol_type = other DNA
attcaattctcctgttcgtgtcgatggagaaatgacacattacgaacgatttgaaaactattgttctgtttttaa

SEQ ID NO: 828312 - DNA, 75 bp, synthetic construct
  source 1..75: mol_type = other DNA
tgcggacagtatcgcgcgaatgaatgtttatccggtcagcacgacgggcgtaccaccggaaaccgggcgctttga

SEQ ID NO: 828313 - DNA, 75 bp, synthetic construct
  source 1..75: mol_type = other DNA
acaccttcggccgtaccttttgaaaatctcggtacaggaagtgatacccgatggcatatttgcgatcccggtggt

SEQ ID NO: 828314 - DNA, 75 bp, synthetic construct
  source 1..75: mol_type = other DNA
atgcagataatctttggagaaaaatgcgtgtcattactacgactattttttgccgccgtcttaatgctatggtgc

SEQ ID NO: 828315 - DNA, 75 bp, synthetic construct
  source 1..75: mol_type = other DNA
tcggacaatacttgtgaacttaccattaatgaaccgttaaaaaaccaggaaatatccacaggtaatatcaatatt

SEQ ID NO: 828316 - DNA, 75 bp, synthetic construct
  source 1..75: mol_type = other DNA
gggtgacggatgcgttcggtaatgcgcttggcggccagacggtcagcgtgttggcggacaacggcgtaacgactg

SEQ ID NO: 828317 - DNA, 75 bp, synthetic construct
  source 1..75: mol_type = other DNA
gttttagtggtagctggggcggatatacctgtcagtgttttattagctgatgaatttggtaatcctgtgaatgac

SEQ ID NO: 828318 - DNA, 75 bp, synthetic construct
  source 1..75: mol_type = other DNA
ttgctaatcataccctgaagcactacctgcaaacccgccgtgatgttgaatatgccatggcgcagagcctgcttc

SEQ ID NO: 828319 - DNA, 75 bp, synthetic construct
  source 1..75: mol_type = other DNA
gtgaccgatgcgttcgggaatgcacttgccgggcagacggtcagcgtgacggcaggcaacggcgcaacggttgct

SEQ ID NO: 828320 - DNA, 75 bp, synthetic construct
  source 1..75: mol_type = other DNA
gcagacggttagcgtgttggcaggcaacggcgcaacgactgctccgacggtcaccacgcagccggatggcacggt

SEQ ID NO: 828321 - DNA, 75 bp, synthetic construct
  source 1..75: mol_type = other DNA
gctgatgttagcacggcgcaggtcgctgagctggtggtgacgcaggacggctcagtggcagatggcgcgacggcg

SEQ ID NO: 828322 - DNA, 75 bp, synthetic construct
  source 1..75: mol_type = other DNA
ccagaattattaaagcagcgggttattcatggaaaggcttatgtgcggcatggcgctatgaagcagcctttcgtc

SEQ ID NO: 828323 - DNA, 75 bp, synthetic construct
  source 1..75: mol_type = other DNA
gattttttaggttataacgcccaaattattcaacgatcggacaatacttgtgaacttaccattaatgaaccgtaa

SEQ ID NO: 828324 - DNA, 75 bp, synthetic construct
  source 1..75: mol_type = other DNA
tcggacaatacctgcgaacttaccattaatgaaccgttaaaaaccaggaaatatctacaggcaatatcaatgtta

SEQ ID NO: 828325 - DNA, 75 bp, synthetic construct
  source 1..75: mol_type = other DNA
aatggataccgcttgatgtttctcatggtggcactggtgcggcaactattgatggtgccagaacgaatcttggat

SEQ ID NO: 828326 - DNA, 75 bp, synthetic construct
  source 1..75: mol_type = other DNA
atggaacaccagcgtatacaggtgtatttcagggatgggctacgcgctcgctttatacttatcgctggaatccga

SEQ ID NO: 828327 - DNA, 75 bp, synthetic construct
  source 1..75: mol_type = other DNA
cggcaaaagtatcacccccgatgatgtgcgtccgatgcttgagcagatggtgaaagaggctgtaagccatatccc

SEQ ID NO: 828328 - DNA, 75 bp, synthetic construct
  source 1..75: mol_type = other DNA
cagttaagagctcatcctagcgctaagtgtcaacgacggatgaaaagtgatccacttatatctccaccaacggcc

SEQ ID NO: 828329 - DNA, 75 bp, synthetic construct
  source 1..75: mol_type = other DNA
tatgaagcaaagaaaagtgcgaaagcagctatgaaagctgtccagataacatcagattcattaactgaggcaaga

SEQ ID NO: 828330 - DNA, 75 bp, synthetic construct
  source 1..75: mol_type = other DNA
aactttgaagcggttgttcagtatcaattcgactttggtctgcgtccgtccttaggttatgtgtactctaaaggt

SEQ ID NO: 828331 - DNA, 75 bp, synthetic construct
  source 1..75: mol_type = other DNA
atgttagttgaatggggtggcgattcctgggcttccgctgacaacttcatgaatggtcgtaccaacggtgttgca

SEQ ID NO: 828332 - DNA, 75 bp, synthetic construct
  source 1..75: mol_type = other DNA
tgcatgttcaagtcctggagagtctcgaacatgtgtcgatgctgtagatgatgaagttagtgattctaacagtta

SEQ ID NO: 828333 - DNA, 75 bp, synthetic construct
  source 1..75: mol_type = other DNA
ggcgtgccagcatgatactggggtatgacatcaccgcaggcaacagccagctgaatgtctatgtgaatgaggtgt

SEQ ID NO: 828334 - DNA, 75 bp, synthetic construct
  source 1..75: mol_type = other DNA
ggtatttctagtgactatgagatattatatgtttacttgtttttcttttttgctttctcaatcggagcattaagc

SEQ ID NO: 828335 - DNA, 75 bp, synthetic construct
  source 1..75: mol_type = other DNA
gaagcagttaaccgctatatcagtattcgatatgacaagatttccacactgtcatcatccaacaaccaaagtagc

SEQ ID NO: 828336 - DNA, 75 bp, synthetic construct
  source 1..75: mol_type = other DNA
tcccgatggattcctggaacggaaggctgagtcgatgtccagaagcttatttcaggatttatctggtttttccga

SEQ ID NO: 828337 - DNA, 75 bp, synthetic construct
  source 1..75: mol_type = other DNA
gttggtgttggaacaggtaaaacagttaaagcttatatgaacaatgcgggtaatatttatgcgtcaggtaatctt

SEQ ID NO: 828338 - DNA, 75 bp, synthetic construct
  source 1..75: mol_type = other DNA
ttaatttccgtgttcacgcttagcggccccggcccgttttctctactgcgtcgtcaggtgaatgaagtcgcttaa

SEQ ID NO: 828339 - DNA, 75 bp, synthetic construct
  source 1..75: mol_type = other DNA
cagtttggttatatatctggaacccttattgcagaatataatgaggagcgttgtagtggtggtaggaatacacat

SEQ ID NO: 828340 - DNA, 75 bp, synthetic construct
  source 1..75: mol_type = other DNA
agcaaaagttcgatttattcaacaaagcctggtggtatgagcagaagcaccaagatcgcttctggttatggtggt

SEQ ID NO: 828341 - DNA, 75 bp, synthetic construct
  source 1..75: mol_type = other DNA
atgaagttagtgattctaacagttacgaagttattagccgtgctgatttaaaaatgaatggtggttccataacaa

SEQ ID NO: 828342 - DNA, 75 bp, synthetic construct
  source 1..75: mol_type = other DNA
cctgccgctggtggtgacgacaaggatgcgaaaatcactgcgctggaaaccgaaaacgccgatctgaaagcgaaa

SEQ ID NO: 828343 - DNA, 75 bp, synthetic construct
  source 1..75: mol_type = other DNA
cagatattcttgccgctctaaagaaaaagaaaatcagcatggcggggttatcccgtgaacatggtttatcaagca

SEQ ID NO: 828344 - DNA, 75 bp, synthetic construct
  source 1..75: mol_type = other DNA
ccgtcaagggtacatcggtcggaatccggccagtggtgcctggtatgcgcacctgcagaatggctatcgccgtgt

SEQ ID NO: 828345 - DNA, 75 bp, synthetic construct
  source 1..75: mol_type = other DNA
caaccgaaaattttaaaagaaaagacctggaagctaaattaattaattttgatgcagatggaaaaatattatgga

SEQ ID NO: 828346 - DNA, 75 bp, synthetic construct
  source 1..75: mol_type = other DNA
ctaatgcgagtgattttattgttgaaaatctagggaaaatattaaagggaaataaagactattaccgcggcttga

SEQ ID NO: 828347 - DNA, 75 bp, synthetic construct
  source 1..75: mol_type = other DNA
tatttgtttttgctcgccttattgatcttgttatctggtatttcctgaacagaggaagcgtaagagctaatgatc

SEQ ID NO: 828348 - DNA, 75 bp, synthetic construct
  source 1..75: mol_type = other DNA
gtgaaatagtggaaaagtcttctggtgctttgtctttcgggattatacagagtctcgttatgataggtataattg

SEQ ID NO: 828349 - DNA, 75 bp, synthetic construct
  source 1..75: mol_type = other DNA
acacccgtcttgaaaccacagataaaacgaacattgttacctctggggaaaatgcagtaggtgttcttgcatgtt

SEQ ID NO: 828350 - DNA, 75 bp, synthetic construct
  source 1..75: mol_type = other DNA
ctaatggcattaatagctatggtgcttatgctaatgggaaaaaagcatatattaatttagattatgtggcacttg

SEQ ID NO: 828351 - DNA, 75 bp, synthetic construct
  source 1..75: mol_type = other DNA
tacacagaacttaaaggaaaagtggttcaacgtcatcaccgtcttaatgctattgcccgtattgagaagatgata

SEQ ID NO: 828352 - DNA, 75 bp, synthetic construct
  source 1..75: mol_type = other DNA
ccgcgtgatggtcgtgattatgatccggaagtactgaagcaggcggtgaatgatgcggttgcgaatattccggta

SEQ ID NO: 828353 - DNA, 75 bp, synthetic construct
  source 1..75: mol_type = other DNA
tgggccgctaaccggacgcattgaatatgactggttcggaccgtgggaaaaaattatcgggaaatttgatatcag

SEQ ID NO: 828354 - DNA, 75 bp, synthetic construct
  source 1..75: mol_type = other DNA
ttgggaaataaagaaaatatcgattgtaagcacacaagaagctcatgctataaaaacaagcagatgaaagatgtt

SEQ ID NO: 828355 - DNA, 75 bp, synthetic construct
  source 1..75: mol_type = other DNA
gtggaactgaattataaaggggatgatgttttgggaaataaagaaaatatcgattgtaagcacacaagaagctca

SEQ ID NO: 828356 - DNA, 75 bp, synthetic construct
  source 1..75: mol_type = other DNA
tggaaaaagcccaagataaatgggaaaaggcaatgagtgagttgtcatcaagtgaaggtgaactacgtctaaaaa

SEQ ID NO: 828357 - DNA, 75 bp, synthetic construct
  source 1..75: mol_type = other DNA
agtcacagcgacttcagctacgatgcgctggaccggctggtacagcagggcggctttgacgggcggacgcaacgt

SEQ ID NO: 828358 - DNA, 75 bp, synthetic construct
  source 1..75: mol_type = other DNA
agcacccggcagatgacgtggagccgctacgggcagttgctggcgttcactgactgctcgggctaccagacccgc

SEQ ID NO: 828359 - DNA, 75 bp, synthetic construct
  source 1..75: mol_type = other DNA
ttgcattgattattgaggaaatcaaccaacgcaaaaataaagagatggcgacagaagaaaaaacggcttccgtaa

SEQ ID NO: 828360 - DNA, 75 bp, synthetic construct
  source 1..75: mol_type = other DNA
aatgcctgcctgacgcttgcagtcatgcatcagggggccgagatcaccaccattgaaggcctgggttcaccagag

SEQ ID NO: 828361 - DNA, 75 bp, synthetic construct
  source 1..75: mol_type = other DNA
tcattatacgataacctggttaaagtactgagcagtacaatcagcagttgtatggaagccgcgaagagtttcctg

SEQ ID NO: 828362 - DNA, 75 bp, synthetic construct
  source 1..75: mol_type = other DNA
actgcagcaggcggtgaatgatgcggttgcgaatattccggtaccggcggacggcaaaagtatcacccccgatga

SEQ ID NO: 828363 - DNA, 75 bp, synthetic construct
  source 1..75: mol_type = other DNA
tggtactaatccagttggtcaagcccacgaagggattgaagaagtaccaggatcattaggtaaagatcggaacct

SEQ ID NO: 828364 - DNA, 75 bp, synthetic construct
  source 1..75: mol_type = other DNA
ggttctggaggcggtgaatgcccttccggctccgcaggacgggcgtgatgccacggcactggaagtgctccccgc

SEQ ID NO: 828365 - DNA, 75 bp, synthetic construct
  source 1..75: mol_type = other DNA
aagataatcgggttgggaagcacgagccgcacgattttagtttgacccggcgcgatctgattaaagtgagcgccg

SEQ ID NO: 828366 - DNA, 75 bp, synthetic construct
  source 1..75: mol_type = other DNA
gcatcgcagaggatgcgcactatgtttaccactatgatgaatacggcagactgacggagaagacggaccgtatcc

SEQ ID NO: 828367 - DNA, 75 bp, synthetic construct
  source 1..75: mol_type = other DNA
actccctcaccaggctcaactttaccgcgccggtgcgaggcattgttcaggatattgatgtcaccacggttggcg

SEQ ID NO: 828368 - DNA, 75 bp, synthetic construct
  source 1..75: mol_type = other DNA
acggtagaaccttccgggcgcgaacaggtggtgcagtcgctggaaggcgggattttgtatcatctcgacgtgaag

SEQ ID NO: 828369 - DNA, 75 bp, synthetic construct
  source 1..75: mol_type = other DNA
cgaactggcgatgacccagccgctggtaaaacagggggcagcgagcagcgtcgaagtactgcgcctgcaacgcca

SEQ ID NO: 828370 - DNA, 75 bp, synthetic construct
  source 1..75: mol_type = other DNA
ttgtactggcaggagcactgtttaccagctttactgcttctgcgctcccggggctctggcagcaaggttacggcc

SEQ ID NO: 828371 - DNA, 75 bp, synthetic construct
  source 1..75: mol_type = other DNA
actccgcaccgggtattctcgtcgaagcactgaaacgccgccgtgagcgaggccttacaccgtttaccgtgctct

SEQ ID NO: 828372 - DNA, 75 bp, synthetic construct
  source 1..75: mol_type = other DNA
tcactgcggacccggatttccggcatgactggcaaatgaggtgctattcggcaggagtgcccagagaatatgtgg

SEQ ID NO: 828373 - DNA, 75 bp, synthetic construct
  source 1..75: mol_type = other DNA
atgactacaaaactcagttatggatttggagcgttcgggaaggattttgcgatcggcattgtgtatatgtacctc

SEQ ID NO: 828374 - DNA, 75 bp, synthetic construct
  source 1..75: mol_type = other DNA
tcagccgcaccaggggaaaacgcatcggaccatacaagccgctggcgtttgatgaagtcagggaatttaaaaagg

SEQ ID NO: 828375 - DNA, 75 bp, synthetic construct
  source 1..75: mol_type = other DNA
actggatttgtatcgccactgcgggtgaaacggttgataagcgatttattgaagaacaatggttgcttgatgccg

SEQ ID NO: 828376 - DNA, 75 bp, synthetic construct
  source 1..75: mol_type = other DNA
ggtgatttcaccggacaccgtgcaggatgaagtgcggcgcgatgtttattactatcgggtgtacattcgcacttt

SEQ ID NO: 828377 - DNA, 75 bp, synthetic construct
  source 1..75: mol_type = other DNA
tgtgatgaatttcaagaagcagaaggtgacagtagcatgcataacagtacggttatgtccggtgaatctgacaga

SEQ ID NO: 828378 - DNA, 75 bp, synthetic construct
  source 1..75: mol_type = other DNA
cattttatgggccggagcatctattcttccggtgttaagctgtggtgttctcctgttaatggcattaatgagcta

SEQ ID NO: 828379 - DNA, 75 bp, synthetic construct
  source 1..75: mol_type = other DNA
actacacgcacgttcaggtcggggtcgacaaaaaacatgagctggacggactggatttgtttaccggtttcactg

SEQ ID NO: 828380 - DNA, 75 bp, synthetic construct
  source 1..75: mol_type = other DNA
tcagcgtgttggcggacaacggtgcaacagttgccccgacggtgatcacagagccggacggcacggtggcgatct

SEQ ID NO: 828381 - DNA, 75 bp, synthetic construct
  source 1..75: mol_type = other DNA
aaggtgaccgatgcgttcgggaatgcacttgccggacagacggtcagcgtgatggcggacaacggcgcaacggtt

SEQ ID NO: 828382 - DNA, 75 bp, synthetic construct
  source 1..75: mol_type = other DNA
cggcgcagatcgcgagtctggaggtgacgcaggataacgccgtggcagacggtgcgacggcgaatacgttgcggg

SEQ ID NO: 828383 - DNA, 75 bp, synthetic construct
  source 1..75: mol_type = other DNA
tgtcaccagccagacggcgggcaccagtgccgtcactgcaaccatcaacagcagcagccagagccgggatgtgac

SEQ ID NO: 828384 - DNA, 75 bp, synthetic construct
  source 1..75: mol_type = other DNA
gcgaagatcgcggatctggtggtgacgcaggacggctcagtggcagacggtgcgacggcgaactcgctgcgggcg

SEQ ID NO: 828385 - DNA, 75 bp, synthetic construct
  source 1..75: mol_type = other DNA
aaagacgcgcacggtaacctggttgaagggggcgagtccttactgtctggtgataacgtaacagtggaaggagcc

SEQ ID NO: 828386 - DNA, 75 bp, synthetic construct
  source 1..75: mol_type = other DNA
ctgtcaccagccagacggcgggagtcagtgcagtcactgcgaccatcaacaacagcagccagagccggaacgtga

SEQ ID NO: 828387 - DNA, 75 bp, synthetic construct
  source 1..75: mol_type = other DNA
tggggtagtaccgcgaaaagtaggtacgttgtggggcgaatatggtaatttaaaaacgtatgggaacgcttttag

SEQ ID NO: 828388 - DNA, 75 bp, synthetic construct
  source 1..75: mol_type = other DNA
ggacaaaacgatatatatcgctggggatagcataacggtgaccgttgttcttaaagatgcccagggtaactttat

SEQ ID NO: 828389 - DNA, 75 bp, synthetic construct
  source 1..75: mol_type = other DNA
gacgattgccagtaccaatcagcacgccaacctgcaattgcagacgtggagtgatggcgtaacgtcagatcgcta

SEQ ID NO: 828390 - DNA, 75 bp, synthetic construct
  source 1..75: mol_type = other DNA
ggcggacggttcgacggcgaacacgctgcaggtgagggtcaccgatgcgttcggtaatgcgcttgccgggcagac

SEQ ID NO: 828391 - DNA, 75 bp, synthetic construct
  source 1..75: mol_type = other DNA
cgcttgccgggcagacggtcagcgtgttggcggataacggcgcaacggttgccccgacggtcaccacgcagccgg

SEQ ID NO: 828392 - DNA, 75 bp, synthetic construct
  source 1..75: mol_type = other DNA
tcggtaatgtgcttgccgggcagacggtcagcgtgttggcggataacggcgcaacggtcgctccggcggtgacca

SEQ ID NO: 828393 - DNA, 75 bp, synthetic construct
  source 1..75: mol_type = other DNA
gattaacatttcgccactgggttcagcaaatgcacgttatttctgcagtgacgcttcttgatgatggatattcgt

SEQ ID NO: 828394 - DNA, 75 bp, synthetic construct
  source 1..75: mol_type = other DNA
cctttcgcacttactcgcaaggggcaagtattcaggaattagctgaatatgtagagttggtaagatatgaattaa

SEQ ID NO: 828395 - DNA, 75 bp, synthetic construct
  source 1..75: mol_type = other DNA
taactggtcacaagataacggtaacagttttgactttcaggatcgttacttacagcgtgacatcccggcaatacg

SEQ ID NO: 828396 - DNA, 75 bp, synthetic construct
  source 1..75: mol_type = other DNA
tgactatatctatcacggcaacataaacgggaatctggacgtacttcagcatcatgagacgaaaaaagagaacca

SEQ ID NO: 828397 - DNA, 75 bp, synthetic construct
  source 1..75: mol_type = other DNA
gggggatttataattacgccaatggcaaaaatcacgcagcatacagtaaatggaaccagacaaccattgacaatc

SEQ ID NO: 828398 - DNA, 75 bp, synthetic construct
  source 1..75: mol_type = other DNA
attccatacactgacggttgatgagctgacgacgaatggcactgcgtatgccatgcgtacggacctgaaaaatgc

SEQ ID NO: 828399 - DNA, 75 bp, synthetic construct
  source 1..75: mol_type = other DNA
cggacggcacggtggagatctctgtcaccagccagacggcaggcaccagtgcggtcactgccagcattaacagca

SEQ ID NO: 828400 - DNA, 75 bp, synthetic construct
  source 1..75: mol_type = other DNA
acggcacggtggcgatctctgtcaccagccagactgccggaatcagtgcggtcaccgccagcatcaacagcagca

SEQ ID NO: 828401 - DNA, 75 bp, synthetic construct
  source 1..75: mol_type = other DNA
gtggcagatggcacgacggcgaatacgctgcaggtgaaggtcaccgatgcgttcgggaatgcgcttgccggacag

SEQ ID NO: 828402 - DNA, 75 bp, synthetic construct
  source 1..75: mol_type = other DNA
ttcctacaaaaggggagacagtgttgatgccaagtcattatatgcctctgtaagtggaaaaggcttttttggggg

SEQ ID NO: 828403 - DNA, 75 bp, synthetic construct
  source 1..75: mol_type = other DNA
acagaaacatataatcgtgatggatttttaacacaaagttgtttaaacgctttcggtccgtctttaggacctcga

SEQ ID NO: 828404 - DNA, 75 bp, synthetic construct
  source 1..75: mol_type = other DNA
aagcatatgaacttaaatttcaaggtgccaacttttcatctatgggcacgagatttgaccaattcaatgtattaa

SEQ ID NO: 828405 - DNA, 75 bp, synthetic construct
  source 1..75: mol_type = other DNA
ttttaaagggtttaaatggggaattggaaccgctggcttattggctatattgcccatgatcccacaatggttgaa

SEQ ID NO: 828406 - DNA, 75 bp, synthetic construct
  source 1..75: mol_type = other DNA
gcacagagccactgccagcttaagggtgaaattgaactgaccggcagcgacgaattcaaacaacgcgccatcacg

SEQ ID NO: 828407 - DNA, 75 bp, synthetic construct
  source 1..75: mol_type = other DNA
gtgggccggagacgaatgcggcagataacaccgctgcagagcctgcccctgcggctgaaaccgtcgcaacggacg

SEQ ID NO: 828408 - DNA, 75 bp, synthetic construct
  source 1..75: mol_type = other DNA
tattccgctgtacaacacggacgggcagatccgttcaattcagacgattgacccggaaggtaacaagcggctggc

SEQ ID NO: 828409 - DNA, 75 bp, synthetic construct
  source 1..75: mol_type = other DNA
catgggacccagcggagtttacccggaagacgggataaagactgcgaaaaaattcacgggtattctggctcatgg

SEQ ID NO: 828410 - DNA, 75 bp, synthetic construct
  source 1..75: mol_type = other DNA
tcccaaagatggcgatttgcgtcctgaggtgatgaaacgctttgagataatggtgaataccgttattacgctgtc

SEQ ID NO: 828411 - DNA, 75 bp, synthetic construct
  source 1..75: mol_type = other DNA
attatccaaaagagaactatacctacgttagaaagagttttagaacgaaaggtacaatgggtcaaactgaaattg

SEQ ID NO: 828412 - DNA, 75 bp, synthetic construct
  source 1..75: mol_type = other DNA
attaaataaatttcttggtgcagcgggtgatgaagtaatatccaaacaaattatttccacccatttaaaccaagc

SEQ ID NO: 828413 - DNA, 75 bp, synthetic construct
  source 1..75: mol_type = other DNA
ctggtttgtctcttgccaaaatattggcttccactgagcttggagacaatactatccaagctgcaaatgatgcag

SEQ ID NO: 828414 - DNA, 75 bp, synthetic construct
  source 1..75: mol_type = other DNA
tagacctagggcaagactacatagccatccttccaggctgcgcccagcctgtttctcttgctatagccaaattta

SEQ ID NO: 828415 - DNA, 75 bp, synthetic construct
  source 1..75: mol_type = other DNA
aaacactaacacattatttctcaggtcaacctgccgatttatggttagtgcagaacacttgggactggcagggat

SEQ ID NO: 828416 - DNA, 75 bp, synthetic construct
  source 1..75: mol_type = other DNA
cagatgttgaaccattaatggatatgctgcttgacagggatcaatttgatcaagatggccttcatcatgtacaaa

SEQ ID NO: 828417 - DNA, 75 bp, synthetic construct
  source 1..75: mol_type = other DNA
ctaaacgcattgttttttttatctatttatttgtaatccagttttggaaaaacgccagttttcaaacgaaagtca

SEQ ID NO: 828418 - DNA, 75 bp, synthetic construct
  source 1..75: mol_type = other DNA
catgtcgtatggtgaaggtcacaaaaaaagcccgcgccgggagacgcgggcggcaaggaataaacaacaaaacgt

SEQ ID NO: 828419 - DNA, 75 bp, synthetic construct
  source 1..75: mol_type = other DNA
gggtggtgaaaaaggaacacgcggacggcagcgtcacgcagagtcagtttgacgcggtgggcaggcttaaggcac

SEQ ID NO: 828420 - DNA, 75 bp, synthetic construct
  source 1..75: mol_type = other DNA
cggcagcgtcacgcagagtcagtttgacgcggtgggcaggctcagggcacagacggatgccgcaggcaggacaac

SEQ ID NO: 828421 - DNA, 75 bp, synthetic construct
  source 1..75: mol_type = other DNA
aaccggcgcgatgaactgagctgcttcctgggtgacggagccgtgcccctggacaacaatatctgcgagcgtgct

SEQ ID NO: 828422 - DNA, 75 bp, synthetic construct
  source 1..75: mol_type = other DNA
cggagattctccatacgtcttccccagccgaaacgaccaccgacgcccgatctccaaaacaacgctgaactgtgc

SEQ ID NO: 828423 - DNA, 75 bp, synthetic construct
  source 1..75: mol_type = other DNA
aatggcgtatccccggcgaaagaatgaagatggataacccgcatattgttccgctgtcaaagcaggcgctggcga

SEQ ID NO: 828424 - DNA, 75 bp, synthetic construct
  source 1..75: mol_type = other DNA
tacgcacagattaccgctgatatggcgctgaatgaggccaaagccatcctgattgctgattgtgaaaatgggggg

SEQ ID NO: 828425 - DNA, 75 bp, synthetic construct
  source 1..75: mol_type = other DNA
agcacccttgaatctgaatggccattaccatgggatatagttagtgatatggcaatggatattggcgtcgcgctt

SEQ ID NO: 828426 - DNA, 75 bp, synthetic construct
  source 1..75: mol_type = other DNA
tagatataccagagggtctacctgacttccaagcgcctatcaccagtgaatttgacgtggatgattggtctaacg

SEQ ID NO: 828427 - DNA, 75 bp, synthetic construct
  source 1..75: mol_type = other DNA
taagctgggcagagcttcccggtggttaaagagcgacttggaagaatggttatattaccgtatttacgaatccag

SEQ ID NO: 828428 - DNA, 75 bp, synthetic construct
  source 1..75: mol_type = other DNA
ggaaaccgcgaaacgcaacggtctggagccacatgcctggctgacagacgtcctgacgcgtctgccggagtggcc

SEQ ID NO: 828429 - DNA, 75 bp, synthetic construct
  source 1..75: mol_type = other DNA
tctatgcgctgtctcatcgcgtggaactgagctgcttcctggaagatggtgcggtgccgctggataataatgtgt

SEQ ID NO: 828430 - DNA, 75 bp, synthetic construct
  source 1..75: mol_type = other DNA
aactcgcacgtcacgaaatttcagggatcgttttgattgatgaaattgatgcacatcttcatgtcaccctacaga

SEQ ID NO: 828431 - DNA, 75 bp, synthetic construct
  source 1..75: mol_type = other DNA
ttgttgaaatgaactggttccataacagtaaagattttgctgtctcaatgaacggtgtgaaagtcgaacaagatg

SEQ ID NO: 828432 - DNA, 75 bp, synthetic construct
  source 1..75: mol_type = other DNA
tctcttatggccattaagcattattgccaccgatgcgaatctggaggaaaactatgggacatctcctgagaaatc

SEQ ID NO: 828433 - DNA, 75 bp, synthetic construct
  source 1..75: mol_type = other DNA
cgaaactgccaccggtgagctggcgaaaacgcagcgccgcagcctggcggatgcccttcagcagtccggcggcga

SEQ ID NO: 828434 - DNA, 75 bp, synthetic construct
  source 1..75: mol_type = other DNA
ctcacactctttatcagaataattcaaatgcttataggcttaatccaatagggcatgcaaacaattcaacaccac

SEQ ID NO: 828435 - DNA, 75 bp, synthetic construct
  source 1..75: mol_type = other DNA
ccggctcgcttgatattgtggcttctgaaatcaataaccggcataccggagagagcggtaaggggctggaggccg

SEQ ID NO: 828436 - DNA, 75 bp, synthetic construct
  source 1..75: mol_type = other DNA
catatattaatgatgtaaaaattctggagtggtgttttaatcaaagtatgcaatattctgatgatactacaaaga

SEQ ID NO: 828437 - DNA, 75 bp, synthetic construct
  source 1..75: mol_type = other DNA
ttcagtccgggcgggatatcagtgtgtcaggcagcaatgtggtcagcagcggaaatctggcgttgcaggccggac

SEQ ID NO: 828438 - DNA, 75 bp, synthetic construct
  source 1..75: mol_type = other DNA
tcatggcgcgtcctttgttcctgtggatctctggtattgcgtcagccgaagcgaggatgcctggtatattgataa

SEQ ID NO: 828439 - DNA, 75 bp, synthetic construct
  source 1..75: mol_type = other DNA
tttctgtcgtgatcccgccatgcttcctcatgcgtcttttatatcccccatttcattttgttttcactgctggaa

SEQ ID NO: 828440 - DNA, 75 bp, synthetic construct
  source 1..75: mol_type = other DNA
tgcgctggttcgccaccctcagggggcgtttaaaaacgtaccgcaaggttgtcggcgagtctggttcattaaccg

SEQ ID NO: 828441 - DNA, 75 bp, synthetic construct
  source 1..75: mol_type = other DNA
tgagcagtggcggtattggttttaccgtgggtaaacagtctctgaagcaaagcacggacagcgacagccggctga

SEQ ID NO: 828442 - DNA, 75 bp, synthetic construct
  source 1..75: mol_type = other DNA
cgtcagtccacggcgcagggcagcagtatcagtgccgggcaaaacctgacagtgaatgccggcggtaaaacggca

SEQ ID NO: 828443 - DNA, 75 bp, synthetic construct
  source 1..75: mol_type = other DNA
accctgaaaggcgctcaggttcaggggaataaagtcattgcgaatgtcggcaataatctgacactgcaaagtgag

SEQ ID NO: 828444 - DNA, 75 bp, synthetic construct
  source 1..75: mol_type = other DNA
agatgtacgtgttaatgggcgtattgctgcattacttgaattaggtgctgggttcaacccggagtttaccggtcg

SEQ ID NO: 828445 - DNA, 75 bp, synthetic construct
  source 1..75: mol_type = other DNA
ccggccgggtttccggagggagactgactatacattccccggaaatcacgaatacccgcggccttctgaaccagg

SEQ ID NO: 828446 - DNA, 75 bp, synthetic construct
  source 1..75: mol_type = other DNA
acgggcgataccagacagaaggcctaagcgcgcgcgagttcgaacgcctattcaaccagattgagaaggataagc

SEQ ID NO: 828447 - DNA, 75 bp, synthetic construct
  source 1..75: mol_type = other DNA
gaagaagcaggcgttcattgatgcgcttgtcatggcaggaacgtcacctgagcaggctgaaaaaatgttcatgga

SEQ ID NO: 828448 - DNA, 75 bp, synthetic construct
  source 1..75: mol_type = other DNA
gtctcgcagttaggggccgatctgttaaccggtggttttaccgacagtgacagttggcgtttgggagtgatggct

SEQ ID NO: 828449 - DNA, 75 bp, synthetic construct
  source 1..75: mol_type = other DNA
ttgttggataattatagtataatttcctatataaccgatgaagaatcgccgattcaaatcaaagataatacttta

SEQ ID NO: 828450 - DNA, 75 bp, synthetic construct
  source 1..75: mol_type = other DNA
tattgttgctgaccgtaatgcgccgggaaaccagcaggcgacggtgatttccacggcaaacgggttgccgcaggt

SEQ ID NO: 828451 - DNA, 75 bp, synthetic construct
  source 1..75: mol_type = other DNA
aaccagagcctacaaaacttgcagagaaccgctcttctgaaacttgcagtttggaagacctcaaaagcattcagt

SEQ ID NO: 828452 - DNA, 75 bp, synthetic construct
  source 1..75: mol_type = other DNA
atcaacgtcgcccgatgatgaaaataaagttttggtcggccagagagctaggcggggtcattcatgctccgttaa

SEQ ID NO: 828453 - DNA, 75 bp, synthetic construct
  source 1..75: mol_type = other DNA
ttgcggctaagtttgctgaaattgaagaatttgcagatatcggccagttcattgatcaacccgtaaaaacatact

SEQ ID NO: 828454 - DNA, 75 bp, synthetic construct
  source 1..75: mol_type = other DNA
acccccgtatctcttcgccacaatgtgattaatatccgcgtagaagcatcggatatatccgtccaccagcaccat

SEQ ID NO: 828455 - DNA, 75 bp, synthetic construct
  source 1..75: mol_type = other DNA
aacaggggcgaatggaggcccttaacaggctgacactgaatgcagccggattacataatcataacggtaccatca

SEQ ID NO: 828456 - DNA, 75 bp, synthetic construct
  source 1..75: mol_type = other DNA
aaccttcttgccctcagcaaagtattgcaatgctcaccaacatggattctatttggcgatgaagacaagcaacca

SEQ ID NO: 828457 - DNA, 75 bp, synthetic construct
  source 1..75: mol_type = other DNA
aaggtccggggtggcatgatcacaatactccctatggaacaattcatagttatgatgggaacagccatagcggtt

SEQ ID NO: 828458 - DNA, 75 bp, synthetic construct
  source 1..75: mol_type = other DNA
gaaggagaaaaaatatccaatccttatgggcaagggaatgcgagtgctaagatcattgagatgatcaaatccatg

SEQ ID NO: 828459 - DNA, 75 bp, synthetic construct
  source 1..75: mol_type = other DNA
aaaggtgattattggtcgctggctactaacgcaaccagaaatattaatgctcgatgaaccgacgcgcggtattga

SEQ ID NO: 828460 - DNA, 75 bp, synthetic construct
  source 1..75: mol_type = other DNA
aatacctggcagcagattgagaaagacggtttttcaattgatgagaagattgatatattgctttcttcggatacg

SEQ ID NO: 828461 - DNA, 75 bp, synthetic construct
  source 1..75: mol_type = other DNA
cgcatcgataaagaacgattttcaacaaattctacaagcgatagatttattaaaggataccttggttatatttac

SEQ ID NO: 828462 - DNA, 75 bp, synthetic construct
  source 1..75: mol_type = other DNA
agaagagtttaagactatgttagcagatgtaactaatccatatggtgatggtaatagttctagaaaaataataga

SEQ ID NO: 828463 - DNA, 75 bp, synthetic construct
  source 1..75: mol_type = other DNA
ctgaactgtatggtctggtgcaggaaattccgcagaaagaaaccacgccgttctacccacgctctccgtatgcgg

SEQ ID NO: 828464 - DNA, 75 bp, synthetic construct
  source 1..75: mol_type = other DNA
gaccagacatataccctaacccaaccgacggtttacctgttggattcaaggttaacacatcaaatgcaccggagt

SEQ ID NO: 828465 - DNA, 75 bp, synthetic construct
  source 1..75: mol_type = other DNA
atattctgcgggaagaagcgccggacggcagcaccatcacgtatgaatgggatgaattccatcacctgctggccc

SEQ ID NO: 828466 - DNA, 75 bp, synthetic construct
  source 1..75: mol_type = other DNA
ataatgccaacgaagccataaaccatggatttgcactggtaactgaggagcgccgctcaacgggaatttatgcct

SEQ ID NO: 828467 - DNA, 75 bp, synthetic construct
  source 1..75: mol_type = other DNA
gtatgtttgcctgcaatggtattctctttaaccacgaatcacctcgccgtggcgagacctttgttactcgtaaaa

SEQ ID NO: 828468 - DNA, 75 bp, synthetic construct
  source 1..75: mol_type = other DNA
atgtattgattttcttctgggacccactaaatgccgtgccgcacgatcctgacgtgaaagccttgttgcgtctgg

SEQ ID NO: 828469 - DNA, 75 bp, synthetic construct
  source 1..75: mol_type = other DNA
ccgctaccgcacgatggttgtacggctggccattactggaaccgcgagcccccctttccccctctcgcagcgaaa

SEQ ID NO: 828470 - DNA, 75 bp, synthetic construct
  source 1..75: mol_type = other DNA
gttaaaacaagggcggctcatcctttgagcagggaatcaatcgcagtttcaatgattgtaggaagagataattgt

SEQ ID NO: 828471 - DNA, 75 bp, synthetic construct
  source 1..75: mol_type = other DNA
ccaggcacaattcttcgggcccggaaagaatgctggatggttggaagagagtatattcacgtatcaccagacggt

SEQ ID NO: 828472 - DNA, 75 bp, synthetic construct
  source 1..75: mol_type = other DNA
atgggcaatgtgattcaactggctcccaatgaatgggtttgtgaaagcgttctaatcgcaattaccgggctcaaa

SEQ ID NO: 828473 - DNA, 75 bp, synthetic construct
  source 1..75: mol_type = other DNA
ttaaggcgcgtgttgaactgatcaccgctatgctcaaatgcgcaaccgcgtttgttggcttagttggtgcggttt

SEQ ID NO: 828474 - DNA, 75 bp, synthetic construct
  source 1..75: mol_type = other DNA
gttattctgtgtggaaaatccacaatttaatatttataatatcggttcgggtataggagtgtcaacaaaaactat

SEQ ID NO: 828475 - DNA, 75 bp, synthetic construct
  source 1..75: mol_type = other DNA
gagcagcaggtgatgagccactggctggaaagccgcagtatgaaaacagtcacaacccgtgaactgaaagcctgc

SEQ ID NO: 828476 - DNA, 75 bp, synthetic construct
  source 1..75: mol_type = other DNA
ccagcaaattcgcgacgttgcgccagaaaaagccgagctgccgcgcccgtttcgcctggcgattattcagctggg

SEQ ID NO: 828477 - DNA, 75 bp, synthetic construct
  source 1..75: mol_type = other DNA
ttttgtgaattatcgacctttaattgatgaaagtaagaaagtggtaatgacattcccaactcaaaaagggagtgg

SEQ ID NO: 828478 - DNA, 75 bp, synthetic construct
  source 1..75: mol_type = other DNA
catgcagcggatgatgctcgcggcttcctcgcgcaaaataccgccggttccggaccatttatgctgaaaagctag

SEQ ID NO: 828479 - DNA, 75 bp, synthetic construct
  source 1..75: mol_type = other DNA
gcgtttacgccacatttggtttgataaagcccagtttcgcaacggttttgacgccattcgcgaacgcgatgttct

SEQ ID NO: 828480 - DNA, 75 bp, synthetic construct
  source 1..75: mol_type = other DNA
atgcagacaattatctatcagataacccccagcaaatggtgtacggagagagtcctcattgcatcaacagggcta

SEQ ID NO: 828481 - DNA, 75 bp, synthetic construct
  source 1..75: mol_type = other DNA
ctgaataacggtaccaacaccattccgttccaggcgcgttattatgcaatcggcgaggcaaccccgggtgctgct

SEQ ID NO: 828482 - DNA, 75 bp, synthetic construct
  source 1..75: mol_type = other DNA
cctttgtaccgggtccaccgctggtttgctcgtagagtcggctctcagtttcgctcgatcctcactgcgctgacc

SEQ ID NO: 828483 - DNA, 75 bp, synthetic construct
  source 1..75: mol_type = other DNA
catattacgtgggtaggacatactgctggtaaaggttataatccaaccgtgacatggaatgcagtaggcggttat

SEQ ID NO: 828484 - DNA, 75 bp, synthetic construct
  source 1..75: mol_type = other DNA
tctcagtatgtatcgctggcctacacgcagcggcttaaggaagccggattactggcatcaacagggagcacaggc

SEQ ID NO: 828485 - DNA, 75 bp, synthetic construct
  source 1..75: mol_type = other DNA
agtttctttgggaaccactttaagtattagctgtcttattcttgcattattgtcaatattcgtaaccattattat

SEQ ID NO: 828486 - DNA, 75 bp, synthetic construct
  source 1..75: mol_type = other DNA
cttcatttgaatatgctttcaccgttggggcaaaaacttttcgtgttgtagttcgtggaaatgcggaatacatga

SEQ ID NO: 828487 - DNA, 75 bp, synthetic construct
  source 1..75: mol_type = other DNA
aacaagcttttatttgtggaaccaatcctgaacatccaggatattggggaaaaatcaaagattatgatcagcgta

SEQ ID NO: 828488 - DNA, 75 bp, synthetic construct
  source 1..75: mol_type = other DNA
cgccataccaccgaacgcgccattaactttgtcaaacagcgtaccgacaacgtgatcgtcatcgattacgccgaa

SEQ ID NO: 828489 - DNA, 75 bp, synthetic construct
  source 1..75: mol_type = other DNA
cagataaacagcaatgataaagcgagtagaatgtaccaaaggaacttcactgcccggttgacaaagctaccgggc

SEQ ID NO: 828490 - DNA, 75 bp, synthetic construct
  source 1..75: mol_type = other DNA
aagatggcgaatgcagccagatgctgatgcaggcaatggactttctggaagggaaggcctggcgcggtcagcgtt

SEQ ID NO: 828491 - DNA, 75 bp, synthetic construct
  source 1..75: mol_type = other DNA
caacaaggtatcatggacttcatcatatgaaactgaccgttcttgatgaaaaaaataatgaactggatgaaacag

SEQ ID NO: 828492 - DNA, 75 bp, synthetic construct
  source 1..75: mol_type = other DNA
gtaagcgcaggggtaatcagtttcctttcagtaaaaataagcgataatggagtctctttgggaaccactttaagt

SEQ ID NO: 828493 - DNA, 75 bp, synthetic construct
  source 1..75: mol_type = other DNA
gaaccataggtgattatttcggaaaagtacgcgtaatgactatatgcttaattatatttcttattggcagtattg

SEQ ID NO: 828494 - DNA, 75 bp, synthetic construct
  source 1..75: mol_type = other DNA
cccttgtggagggcgttttgccgttcggctgttcttgtggtcagattaacaatctgaagagtaaagacgacagta

SEQ ID NO: 828495 - DNA, 75 bp, synthetic construct
  source 1..75: mol_type = other DNA
aattgctagtgaatttcataaattcactacaacagatatttcaaccgcagggataattaaacaattacgtttact

SEQ ID NO: 828496 - DNA, 75 bp, synthetic construct
  source 1..75: mol_type = other DNA
tgggcctaatggacttaaaggcacttatattgcgagttatgacagaacggatttttctatgacaccagaaaatat

SEQ ID NO: 828497 - DNA, 75 bp, synthetic construct
  source 1..75: mol_type = other DNA
ctggtgattacgcacctaaacctggtgacacagttcgcactgcagaggctctatatctgtatcaaaaacttactc

SEQ ID NO: 828498 - DNA, 75 bp, synthetic construct
  source 1..75: mol_type = other DNA
acgcgataactcgctcactctaaataataaaatggatgacgattctgaatccttatttctttatcagaagcttac

SEQ ID NO: 828499 - DNA, 75 bp, synthetic construct
  source 1..75: mol_type = other DNA
tgagtcacctaactggggtgatagctctaatggtacacatactgttagattaccttacgagaaatatcccagaga

SEQ ID NO: 828500 - DNA, 75 bp, synthetic construct
  source 1..75: mol_type = other DNA
ctaaaaatattcatagcaagttaagaaggcttggtaatacagttgttgctggcacttctattgcatttacggaaa

SEQ ID NO: 828501 - DNA, 75 bp, synthetic construct
  source 1..75: mol_type = other DNA
actaccggggatggcatcctcaacttcctctgaaggaggtgcatttactgttaagatggccaaatcttctactgt

SEQ ID NO: 828502 - DNA, 75 bp, synthetic construct
  source 1..75: mol_type = other DNA
cactcacatggggggactggtataacaatcaacgcttactggaaaggctgggccatatccctccgtcagaagcag

SEQ ID NO: 828503 - DNA, 75 bp, synthetic construct
  source 1..75: mol_type = other DNA
ctatacggagcgactaaaagaagcaaaactgctggcatcaacagggagtacaggtgactcgtatgacaacgcgat

SEQ ID NO: 828504 - DNA, 75 bp, synthetic construct
  source 1..75: mol_type = other DNA
ggtccgcactaccgtcagccggaaagccgttgccgcaggcgaccgcgtaaaccgtcagtttgtggcagaacgtcc

SEQ ID NO: 828505 - DNA, 75 bp, synthetic construct
  source 1..75: mol_type = other DNA
gcgggtctcatcgtccatggaaacgacattcgtgctggatgcactggagcaggcgttatgggcccgtcgaccgtc

SEQ ID NO: 828506 - DNA, 75 bp, synthetic construct
  source 1..75: mol_type = other DNA
cgctgaacgtcagcgtctgaaagagctggaacgtgaaaatcgtgaactgcgccgcagtaacatggcggttatggg

SEQ ID NO: 828507 - DNA, 75 bp, synthetic construct
  source 1..75: mol_type = other DNA
cggatacatcgtgggatggcgggtctcatcgtccatggaaacgacattcgtgctggatgcactggagcaggcagt

SEQ ID NO: 828508 - DNA, 75 bp, synthetic construct
  source 1..75: mol_type = other DNA
agataaattaatttggattaatatcgttcgccacgatgaagtaatggctattaaagaaatgtatagaaatgaacg

SEQ ID NO: 828509 - DNA, 75 bp, synthetic construct
  source 1..75: mol_type = other DNA
attaattacattttattttatcatgggttttttgaatttaattactctagaaaaaacaaaaattaatcatacatg

SEQ ID NO: 828510 - DNA, 75 bp, synthetic construct
  source 1..75: mol_type = other DNA
ggtctgatatgattagtacagttgaggccgctcttattaaaatttataagcctttgtggaatacagttgttgatg

SEQ ID NO: 828511 - DNA, 75 bp, synthetic construct
  source 1..75: mol_type = other DNA
gtcgaaacgcggctttataaaagcaaaggcggtggtcaccaaacgtctgcaaacgctgatgatcgatggtaagca

SEQ ID NO: 828512 - DNA, 75 bp, synthetic construct
  source 1..75: mol_type = other DNA
tggatgtcgcagactatgataaggcagaaccgggcagcagtgttggtccgtttatcatgaatccggaaggtgtag

SEQ ID NO: 828513 - DNA, 75 bp, synthetic construct
  source 1..75: mol_type = other DNA
tagacccgcgctttaaccgtagcgccgccgtcgccgatctgtatgcgccaatacgcgctggttcagacacagtat

SEQ ID NO: 828514 - DNA, 75 bp, synthetic construct
  source 1..75: mol_type = other DNA
gataaaataacaagtaacaacaggcctacgttaaccggcacaattgagtgcaaaggacagactgcaactcaaata

SEQ ID NO: 828515 - DNA, 75 bp, synthetic construct
  source 1..75: mol_type = other DNA
cccaatgcaaatgtagctttagcttccggctccgactccggggttaagggggattgtattaccaacattacactc

SEQ ID NO: 828516 - DNA, 75 bp, synthetic construct
  source 1..75: mol_type = other DNA
gggcttgttcagaacggtgttaaaactgataaggaaatggcctttaaatggactggactcgcagcaactgacatg

SEQ ID NO: 828517 - DNA, 75 bp, synthetic construct
  source 1..75: mol_type = other DNA
ctgagcatgtttatagaaatgactctttcctagagttaataaaagatgccgttcgtttttttagtggtacgcctg

SEQ ID NO: 828518 - DNA, 75 bp, synthetic construct
  source 1..75: mol_type = other DNA
atgccactcatctggtgtgggcgacgggaggtggaatggtgccggaagaagaaatggaacaatatctggctaagg

SEQ ID NO: 828519 - DNA, 75 bp, synthetic construct
  source 1..75: mol_type = other DNA
cgatattagctcttaccttcatggcaacgagtactcatgcaaccccccataatggagtgacttatgaaagccttg

SEQ ID NO: 828520 - DNA, 75 bp, synthetic construct
  source 1..75: mol_type = other DNA
acatccatgtttttgatgttgttgactgcttggatagaggtattacaatatcgcgcatgcttattggcaggaaaa

SEQ ID NO: 828521 - DNA, 75 bp, synthetic construct
  source 1..75: mol_type = other DNA
gtcgtagccatattgaaggggcgagcaaacaaagtgattttgtccaggcgggttatcagtatggttttaataact

SEQ ID NO: 828522 - DNA, 75 bp, synthetic construct
  source 1..75: mol_type = other DNA
tgacaatctgggtatttatgcgccgatttttcaggagatgggccgttctgcggcagttcagccggatgagctgat

SEQ ID NO: 828523 - DNA, 75 bp, synthetic construct
  source 1..75: mol_type = other DNA
gcttttacgataacaaaaagccagaactggaaaatggggggcgtttctatttcaaaacctttggttttcctgttg

SEQ ID NO: 828524 - DNA, 75 bp, synthetic construct
  source 1..75: mol_type = other DNA
atttttgttattcactcgatgttggcaaaactaccaaagataaacagttaaaaatgagaattgataaactctgtg

SEQ ID NO: 828525 - DNA, 75 bp, synthetic construct
  source 1..75: mol_type = other DNA
tgcgatcccccgtattggggaacggagggctacggtgttgaatttggactggagcagtacacccaacttgcagag

SEQ ID NO: 828526 - DNA, 75 bp, synthetic construct
  source 1..75: mol_type = other DNA
ggcccggcggtaagcgtcgtctggccaaaaagttattaccgttatttcctgagcaccagtgttatgtagagccat

SEQ ID NO: 828527 - DNA, 75 bp, synthetic construct
  source 1..75: mol_type = other DNA
atgatgaacatacgttatccggtacggaaagccgatggacgagactataagagctatgacgagctgctaaccgac

SEQ ID NO: 828528 - DNA, 75 bp, synthetic construct
  source 1..75: mol_type = other DNA
acattggctcattgacgccctgaaaagcatccgttcacattttgacagagaaaagggaccggacagctcacaggc

SEQ ID NO: 828529 - DNA, 75 bp, synthetic construct
  source 1..75: mol_type = other DNA
gaaacacgacagcagctggcacagtacccgcgatgatgcacgctggtcatcggtatgtaagtccagggatgaaag

SEQ ID NO: 828530 - DNA, 75 bp, synthetic construct
  source 1..75: mol_type = other DNA
ttaagcgcagctatttagagtttgtgcaattagaatcttgcgaatgtctgcaatacctgaatctcagccataatc

SEQ ID NO: 828531 - DNA, 75 bp, synthetic construct
  source 1..75: mol_type = other DNA
ttcagtgaccctgactcccggttttgaagggaatgttactatgtcagggaatgagcggagcgcagaagtaaatgg

SEQ ID NO: 828532 - DNA, 75 bp, synthetic construct
  source 1..75: mol_type = other DNA
ataaggtgccgccgttcgccagccagcggtcagtatggcattttcatccgcttgagtttccggaaatattacgaa

SEQ ID NO: 828533 - DNA, 75 bp, synthetic construct
  source 1..75: mol_type = other DNA
ggagaggggctttcatcttttcgcaatagtgcagatgaaattgttaatcggaagttgagtattgatgttccaaag

SEQ ID NO: 828534 - DNA, 75 bp, synthetic construct
  source 1..75: mol_type = other DNA
gccagaagatgtttttctggcatctctggacaagtataatattgattttgcgttatgttcttgtggatctgccgt

SEQ ID NO: 828535 - DNA, 75 bp, synthetic construct
  source 1..75: mol_type = other DNA
gtagctatgttaaatcataccacacacccgcaagggcgggactcgcacaacctgaataaattcacctggcgcttt

SEQ ID NO: 828536 - DNA, 75 bp, synthetic construct
  source 1..75: mol_type = other DNA
tgagcagcttaaccagcttggctcatttttatccagtaaacctcgcttaagttctgttggtggaaaattacaaaa

SEQ ID NO: 828537 - DNA, 75 bp, synthetic construct
  source 1..75: mol_type = other DNA
cgataatcctattaatgggctagatacctacaatgatgatgatttttataataagtatttggtgatgctgccaac

SEQ ID NO: 828538 - DNA, 75 bp, synthetic construct
  source 1..75: mol_type = other DNA
aatcaggaagcgatcgaattgattgcaaaacttcctaatctctatggcgatactgcgtgggttagggcggatatg

SEQ ID NO: 828539 - DNA, 75 bp, synthetic construct
  source 1..75: mol_type = other DNA
gtgtcatatggggctcgcgactgataatcaggaagcgatcgaattgattgcaaaacttcctaatctctatggcga

SEQ ID NO: 828540 - DNA, 75 bp, synthetic construct
  source 1..75: mol_type = other DNA
aaactggttatacctggaaagcaggtgagttcagcggcagtcatggcagcctgaatgaatggtatgttcagcctc

SEQ ID NO: 828541 - DNA, 75 bp, synthetic construct
  source 1..75: mol_type = other DNA
atcacggctaacggtactgccccagcaaacgacaatgccacgtatctggacggcaacgtcaccctgaatgcgtca

SEQ ID NO: 828542 - DNA, 75 bp, synthetic construct
  source 1..75: mol_type = other DNA
ggtcattaccatcatcaggaagtggcgatgaaactccagcaaattggagatccgtccacgattccttatgtcagg

SEQ ID NO: 828543 - DNA, 75 bp, synthetic construct
  source 1..75: mol_type = other DNA
gacaaacttctgcagaagtatcagaaagttgggagtaaaataggaggaaccgctgaaaatgtaggtaataatctg

SEQ ID NO: 828544 - DNA, 75 bp, synthetic construct
  source 1..75: mol_type = other DNA
ttggtgaaaattcgtcactgaacatgagcactggctccagccatttaacctccagttctgttcagtttaataata

SEQ ID NO: 828545 - DNA, 75 bp, synthetic construct
  source 1..75: mol_type = other DNA
tttattcatatatgcaaaacagaaaatcactccagttaccactaggtaaaacaaagactacagtattatgtggga

SEQ ID NO: 828546 - DNA, 75 bp, synthetic construct
  source 1..75: mol_type = other DNA
gcggattgttggctggtatcggtggcgtcaactcaaacgctcctagcgtaaatgacatcggcaatacgcttcagc

SEQ ID NO: 828547 - DNA, 75 bp, synthetic construct
  source 1..75: mol_type = other DNA
gagacgatcaacccggcctacgccacctggtcgctcgacaccctgccgctgaagctgtacccggtacagcttcag

SEQ ID NO: 828548 - DNA, 75 bp, synthetic construct
  source 1..75: mol_type = other DNA
gcggtttatccccgctggcgcggggaactcccccgcttcgctcgagtacccgctctatatcccggtttatccccg

SEQ ID NO: 828549 - DNA, 75 bp, synthetic construct
  source 1..75: mol_type = other DNA
cggtttatccccgctggcgcggggaactcgcagtaccattacatcaaagagtgcagaatcccggtttatccccgc

SEQ ID NO: 828550 - DNA, 75 bp, synthetic construct
  source 1..75: mol_type = other DNA
ggccattcccccaagcagacgcaggaagttaacggtttatccccgctggcgcggggaacacctggatttcacctc

SEQ ID NO: 828551 - DNA, 75 bp, synthetic construct
  source 1..75: mol_type = other DNA
tatccccgctggcgcggggaacacagtgcgggcggttcagaggaattgttcgtaggcggtttatccccgctggcg

SEQ ID NO: 828552 - DNA, 75 bp, synthetic construct
  source 1..75: mol_type = other DNA
atcggcaagggcaaaaccgacgttattaaaggttttaaatcgaagaaaaacgacgacacctattcgatgatcgtc

SEQ ID NO: 828553 - DNA, 75 bp, synthetic construct
  source 1..75: mol_type = other DNA
ctgctgcgacagcattagccagcagtgcaggtaacatcactattccagtattaattggtggagtacaacgaatag

SEQ ID NO: 828554 - DNA, 75 bp, synthetic construct
  source 1..75: mol_type = other DNA
ccgcagtaaacgatatccttcgccaggcttccgcttattttgcgaaggcggaattcgaccgcctctggaaaaaat

SEQ ID NO: 828555 - DNA, 75 bp, synthetic construct
  source 1..75: mol_type = other DNA
tatcaggatattatcctgtaattcaggaatacattctaagacccccgccttcgcacaacaattaaaagagatcat

SEQ ID NO: 828556 - DNA, 75 bp, synthetic construct
  source 1..75: mol_type = other DNA
gctggcgcggggaactctctcaaagtatacatttgttcttaaagcattttttcccataaaaacaacccaccaacc

SEQ ID NO: 828557 - DNA, 75 bp, synthetic construct
  source 1..75: mol_type = other DNA
gtattatctttactaccccagccgcaagcagcatccgccagcttttgcgttgttgatcgatgcgcttcgctacac

SEQ ID NO: 828558 - DNA, 75 bp, synthetic construct
  source 1..75: mol_type = other DNA
tatgtgaaaatatcggattgtcgaaagcttataatgaaacactaaggcatattcttgaatttaataagaatgtga

SEQ ID NO: 828559 - DNA, 75 bp, synthetic construct
  source 1..75: mol_type = other DNA
cacagtaatgaacttgacttatcatacctatttttgggttctgtgccgcctcttccagattggattgaaatgctt

SEQ ID NO: 828560 - DNA, 75 bp, synthetic construct
  source 1..75: mol_type = other DNA
tcagaatatttcgaatggggtgattatagtctctggtttcaaggtttctcgatttatgataagacaggttttatc

SEQ ID NO: 828561 - DNA, 75 bp, synthetic construct
  source 1..75: mol_type = other DNA
gtggtaaaccctgctacagaggctgtcatttcccgtatacccgatggtcaggccgaggatgcccgtaaggcaatc

SEQ ID NO: 828562 - DNA, 75 bp, synthetic construct
  source 1..75: mol_type = other DNA
gctgtactataaccgtcaccggtactacgatccgttgcaggggcggtatatcactcaggacccgatagggctgga

SEQ ID NO: 828563 - DNA, 75 bp, synthetic construct
  source 1..75: mol_type = other DNA
gcggatacagcatgaggagccactggtcgagagccgctacctctacgacccgctgggccgccggacggggaaacg

SEQ ID NO: 828564 - DNA, 75 bp, synthetic construct
  source 1..75: mol_type = other DNA
atcgaaacagacaacggtgagcgggagaaagcgcagcgccgcagcctggcggagaagctgcagcaggaagggagc

SEQ ID NO: 828565 - DNA, 75 bp, synthetic construct
  source 1..75: mol_type = other DNA
gtgcccgaatcatgcaaagaattagaagtcgatttcaataaccttacagaatttccacaagtacctgatggaatt

SEQ ID NO: 828566 - DNA, 75 bp, synthetic construct
  source 1..75: mol_type = other DNA
cacagtaatgaacttaacttatcaagcctttctttgggttctgtgccgcctcttccagagtggattgaaatgctt

SEQ ID NO: 828567 - DNA, 75 bp, synthetic construct
  source 1..75: mol_type = other DNA
caatacaggtgcccgaatcatgcaaagaattagaactcgagttcaataaccttacagaatttccaaaggtacccg

SEQ ID NO: 828568 - DNA, 75 bp, synthetic construct
  source 1..75: mol_type = other DNA
cggcaatcggtggtatgagcagtcgcgacggacaggacttctccaagatccaggggcgcttctctacacgcctgc

SEQ ID NO: 828569 - DNA, 75 bp, synthetic construct
  source 1..75: mol_type = other DNA
cgggattaggtggtgggcttgatgatgaacgcggcgcgctaactttgaagtatgtggagcttgcaaatgcaattg

SEQ ID NO: 828570 - DNA, 75 bp, synthetic construct
  source 1..75: mol_type = other DNA
gcaccgctggccccatgtcgcgaaccttggcgacatgacaaaactcgcccaaaaagtccaggccggagaaattga

SEQ ID NO: 828571 - DNA, 75 bp, synthetic construct
  source 1..75: mol_type = other DNA
ccggagctgcacccggacagtacactcacagtgtggccggataaccgaatcaccgaagacgcgcactacctgtac

SEQ ID NO: 828572 - DNA, 75 bp, synthetic construct
  source 1..75: mol_type = other DNA
aaaaggggagatcacaacccacggaacagaaagttatgccgcgtacgctaatggcactgtcgtcaaggctggtga

SEQ ID NO: 828573 - DNA, 75 bp, synthetic construct
  source 1..75: mol_type = other DNA
tttgccgatgacatcagtaaaaaaggcgcatacattgacgcctgggcgcaatatagctggtttaaaaactcggtg

SEQ ID NO: 828574 - DNA, 75 bp, synthetic construct
  source 1..75: mol_type = other DNA
ctggaagcggcgaaatacacgtggatattccagccacaggcacaggctatctggatgggcgtcgatcataatgcg

SEQ ID NO: 828575 - DNA, 75 bp, synthetic construct
  source 1..75: mol_type = other DNA
gatgctgcatttatcgccgcagccaaccccgccaccgtgctggcgctgctggatgagctggaagccgcagagaag

SEQ ID NO: 828576 - DNA, 75 bp, synthetic construct
  source 1..75: mol_type = other DNA
cgattttttagctaattatgcttacgacccagataatttgatttttaaagatatcttacctatagattctcaagg

SEQ ID NO: 828577 - DNA, 75 bp, synthetic construct
  source 1..75: mol_type = other DNA
cctttggctgaaatgttgatgattgcattgaatttcaacatgcacataacggacttattcccatttcctgcaata

SEQ ID NO: 828578 - DNA, 75 bp, synthetic construct
  source 1..75: mol_type = other DNA
atgtcgaaccaacaagattaacaataactgaaaattacgttggtaataatggcgtattgcatctcagaactgaat

SEQ ID NO: 828579 - DNA, 75 bp, synthetic construct
  source 1..75: mol_type = other DNA
gatcagtaaacattgatagagacgctgtttacctcacattcaactacacagatacgctttctcaatactacgcaa

SEQ ID NO: 828580 - DNA, 75 bp, synthetic construct
  source 1..75: mol_type = other DNA
gcgacgtcatcataaccatgctgccaaactcccctcatgtgaactgtctcttatacacaaatccccacccgggga

SEQ ID NO: 828581 - DNA, 75 bp, synthetic construct
  source 1..75: mol_type = other DNA
cacaacgggggattactcaattggtttgctaagtcaaacgaatggaaacctgaatactgataccataataagagt

SEQ ID NO: 828582 - DNA, 75 bp, synthetic construct
  source 1..75: mol_type = other DNA
acggttgataatagtacggtctatatttcccgggcagatggacgggatgtcgaaccaacaagattaacaataact

SEQ ID NO: 828583 - DNA, 75 bp, synthetic construct
  source 1..75: mol_type = other DNA
gtgggtagcaatttaaccattaacaatggcgtcattgtaacaacgggcggtttatatccttctgacaatagttct

SEQ ID NO: 828584 - DNA, 75 bp, synthetic construct
  source 1..75: mol_type = other DNA
aagaaaatgtggatagagcattggtgagaatgtttaaatgtgttgagctccacagtaatgaacttaacttatcaa

SEQ ID NO: 828585 - DNA, 75 bp, synthetic construct
  source 1..75: mol_type = other DNA
acaactacagcgataacggcagtcaacaacaactgaactacgctctttcaggcagtttagttgcccattcacagg

SEQ ID NO: 828586 - DNA, 75 bp, synthetic construct
  source 1..75: mol_type = other DNA
tgattgggttgatggcctatcccatccgccacagtttatcgcccgaaatgcagaataaagccttagggaaggtgc

SEQ ID NO: 828587 - DNA, 75 bp, synthetic construct
  source 1..75: mol_type = other DNA
tgtggggtgggagtgcgtcgctggagcaggcacttaagccagccgtagtcgaagaaccacagtttcggaatacaa

SEQ ID NO: 828588 - DNA, 75 bp, synthetic construct
  source 1..75: mol_type = other DNA
ctttccgacaccatgtataaacacatggatggttacgaatttaatgacggtgatgacgaagacacgccgatgtgg

SEQ ID NO: 828589 - DNA, 75 bp, synthetic construct
  source 1..75: mol_type = other DNA
gctggggcgaagctcccgatcaaatttgtcatatcagttacgagcttaccgaacaacaaattaacgctgcgatta

SEQ ID NO: 828590 - DNA, 75 bp, synthetic construct
  source 1..75: mol_type = other DNA
tatctcacaacaattaggcgagtacggttcgttttatttaagcggaagccagcagagttactggcataccaatca

SEQ ID NO: 828591 - DNA, 75 bp, synthetic construct
  source 1..75: mol_type = other DNA
ggtgctatggaactcaataattacaaaatgtattacctctatagccatatcaggattgattattttttgcaccgc

SEQ ID NO: 828592 - DNA, 75 bp, synthetic construct
  source 1..75: mol_type = other DNA
gccgctgggcgatgtcatcgcgagtgggtcagggtgggacggcttaaaaacccttgttgctgactcttatacaca

SEQ ID NO: 828593 - DNA, 75 bp, synthetic construct
  source 1..75: mol_type = other DNA
tatgttatcaactgctggcgcgggcgtgggttacgcaaattgatgttgctcttgatatctataactgcaagctag

SEQ ID NO: 828594 - DNA, 75 bp, synthetic construct
  source 1..75: mol_type = other DNA
cagcccgtccggtatgagtgacagtggtacagactcagtatgggcactgaatgtggagcaccgggtggtggaaag

SEQ ID NO: 828595 - DNA, 75 bp, synthetic construct
  source 1..75: mol_type = other DNA
gagtgtttatattaaaaaacatcgtattaaggttgtttttactataaataatagtgagtcaaattatcttcaatc

SEQ ID NO: 828596 - DNA, 75 bp, synthetic construct
  source 1..75: mol_type = other DNA
aagttagattacgcaactgaagtattggagggatacgaatataaaagattatgctcgccagatagtgctaaagaa

SEQ ID NO: 828597 - DNA, 75 bp, synthetic construct
  source 1..75: mol_type = other DNA
ttactgacagtactccaccagtgttgcctgcaccgttacaggagccggttctgctcacgcagcttctgttcaccg

SEQ ID NO: 828598 - DNA, 75 bp, synthetic construct
  source 1..75: mol_type = other DNA
caacgagtgcagatttatcttccgctagcaaattctgctggagcaacaccaatcattcgtgctgtaaccggcaac

SEQ ID NO: 828599 - DNA, 75 bp, synthetic construct
  source 1..75: mol_type = other DNA
tcctttggggttatcagcatgggatgatgcaaaatctggtgcgtgtcatgaaggaatttgccgactgttttctgt

SEQ ID NO: 828600 - DNA, 75 bp, synthetic construct
  source 1..75: mol_type = other DNA
acggtcatggtgtggtgttcccggctgaactggtgcggctgctggacaggctggagggagagatacgggcagacc

SEQ ID NO: 828601 - DNA, 75 bp, synthetic construct
  source 1..75: mol_type = other DNA
gggcgtcatcgtaggttctgaaataaccatgataagcggcgcgatggtcatggggccgttatcgtcctggctatt

SEQ ID NO: 828602 - DNA, 75 bp, synthetic construct
  source 1..75: mol_type = other DNA
aaagccgaaatactagacggaaacttgcaccatgcccgtgtcatccaccgtgtaaactgggcagcagaaatactt

SEQ ID NO: 828603 - DNA, 75 bp, synthetic construct
  source 1..75: mol_type = other DNA
gaaatattgataattacatacctaactttgatggccgtgatatctacattgcacattctttgccagatgcgggga

SEQ ID NO: 828604 - DNA, 75 bp, synthetic construct
  source 1..75: mol_type = other DNA
agcttaaacggtgtgggcattctgttcggttaatttcgcttacaccaccagttgatttgatcgataggctaatta

SEQ ID NO: 828605 - DNA, 75 bp, synthetic construct
  source 1..75: mol_type = other DNA
gcagggtaaaaatattattctgggctgtgaaggtaatattctgtggaaatgtgttaatgctcagaaaatgggagc

SEQ ID NO: 828606 - DNA, 75 bp, synthetic construct
  source 1..75: mol_type = other DNA
ttagtgccgggcagtcatttacagttgtagcagaaggtgctgttagcctgttgagcagaaaccaggggatgcaac

SEQ ID NO: 828607 - DNA, 75 bp, synthetic construct
  source 1..75: mol_type = other DNA
cactgcgaccaccggggcctgccgctggcgctcatcagcgaagacggcaatacggcgtggcgcggggagtatgat

SEQ ID NO: 828608 - DNA, 75 bp, synthetic construct
  source 1..75: mol_type = other DNA
ggcagtggagatctaatatcattaggtggtcatgcaggacttggcgttgcgtttgctaaaaagaaaggtgaaatg

SEQ ID NO: 828609 - DNA, 75 bp, synthetic construct
  source 1..75: mol_type = other DNA
aggtgatttacggcatcagcttgaaagagaaacggtcaggggaactatgatgtcatgtactacattggctgtaat

SEQ ID NO: 828610 - DNA, 75 bp, synthetic construct
  source 1..75: mol_type = other DNA
taatgctgaaggtgaaagtggcgataaacaactgggatggtcagaacgactcgcttcctccaattcttgataccg

SEQ ID NO: 828611 - DNA, 75 bp, synthetic construct
  source 1..75: mol_type = other DNA
attgaagtgcctaaaaccaacggcattccgtcagattatgatggcgtaatgggtgtaccgattagttttttggat

SEQ ID NO: 828612 - DNA, 75 bp, synthetic construct
  source 1..75: mol_type = other DNA
gggaggtgaatggcagcaagctttcaacaacatatacagatatgcaggcggctttgctgggtgcgcagtggttat

SEQ ID NO: 828613 - DNA, 75 bp, synthetic construct
  source 1..75: mol_type = other DNA
aacaaaccagttccgggatattattcagaagtcagatggtgtgggacaatcaatgagcctgtaatttcaataagt

SEQ ID NO: 828614 - DNA, 75 bp, synthetic construct
  source 1..75: mol_type = other DNA
aatcatttcacgccggaacagattgccgcactgcgggaaaaaatcatcagcaggctggagtggcatcagcggggc

SEQ ID NO: 828615 - DNA, 75 bp, synthetic construct
  source 1..75: mol_type = other DNA
gtgcaactcgacgttgtgggcgaatgggttggtcgttcccgtcgcgtggctacaccggtaaccgggatttatttt

SEQ ID NO: 828616 - DNA, 75 bp, synthetic construct
  source 1..75: mol_type = other DNA
ggcaatcccacttgggatgacggtgatggcgaagacctgtatctcaaagaggtaacccactggatgccgctacca

SEQ ID NO: 828617 - DNA, 75 bp, synthetic construct
  source 1..75: mol_type = other DNA
aaatcaaagagcgtatcagcagtttggatgtgcgagacaatgttgaacgccgtgcttatgaaattgctctggcat

SEQ ID NO: 828618 - DNA, 75 bp, synthetic construct
  source 1..75: mol_type = other DNA
aaaggattatctggctgaagtggctaattacagtaacgaccgctgggaagcaccgcaacgtgcctcacgcctagc

SEQ ID NO: 828619 - DNA, 75 bp, synthetic construct
  source 1..75: mol_type = other DNA
taaattacttcttgccctccacagtggctatctgcttacttttattgctgctgccggatgacaacaacatgaaaa

SEQ ID NO: 828620 - DNA, 75 bp, synthetic construct
  source 1..75: mol_type = other DNA
cgttaaaatattactaatgagccgcggcggcgattattctcgcaccgacttcaggggatgtggtgctggcggcgc

SEQ ID NO: 828621 - DNA, 75 bp, synthetic construct
  source 1..75: mol_type = other DNA
aatggcaggcaaagttttgccttcagttgtaatgtcgatggcgggtcaagtattggagcaggtacaacctctgtt

SEQ ID NO: 828622 - DNA, 75 bp, synthetic construct
  source 1..75: mol_type = other DNA
tagcggcggcaaggatctggtttacggcacgttgcttggtatggtaacgggatggttctatattcagtttgttta

SEQ ID NO: 828623 - DNA, 75 bp, synthetic construct
  source 1..75: mol_type = other DNA
ggcaatggtgcttttgtctggctatttgcgtaatgccgaggcgcgtgaggtttttaacccccacgcgctggagat

SEQ ID NO: 828624 - DNA, 75 bp, synthetic construct
  source 1..75: mol_type = other DNA
aaaacgcagtagtggacgttgttcctaccaaaggtgcgttagtgatggcgaaatttaaagcgcataccggcgcca

SEQ ID NO: 828625 - DNA, 75 bp, synthetic construct
  source 1..75: mol_type = other DNA
agacaacagcagtttaattacgctctttcaggcagcttagttgcccattctcacggtattacgctggggcagtct

SEQ ID NO: 828626 - DNA, 75 bp, synthetic construct
  source 1..75: mol_type = other DNA
ctatcattataatatcttataaccatgaacaatttatagaaaaagcaatcgaaagtgtattatttcagacttata

SEQ ID NO: 828627 - DNA, 75 bp, synthetic construct
  source 1..75: mol_type = other DNA
accttcaacgggatatccagcgcctgaagggacaactgacgctcggcgacagctacacgccgtcggacatcttcg

SEQ ID NO: 828628 - DNA, 75 bp, synthetic construct
  source 1..75: mol_type = other DNA
gcgggcagggggaaatcaccggtggctacaactacgacgacgacacgcaacaggttaactacgggctgaagggcg

SEQ ID NO: 828629 - DNA, 75 bp, synthetic construct
  source 1..75: mol_type = other DNA
gctgcgataatttatcaatagatgaaattatcgaacgtgctgaaaaaggcgattgcgaggctcaatatattgttg

SEQ ID NO: 828630 - DNA, 75 bp, synthetic construct
  source 1..75: mol_type = other DNA
aaggtcattgtgaagcacagtattccttagggcaaaagtataccgaggataaaagccgtcataaagataatgagc

SEQ ID NO: 828631 - DNA, 75 bp, synthetic construct
  source 1..75: mol_type = other DNA
acaaagccaggatagctctaccgcgaaacgaaattatgcctggatgacctcaaataccagtatcgataatgaagg

SEQ ID NO: 828632 - DNA, 75 bp, synthetic construct
  source 1..75: mol_type = other DNA
caacagctatacagttcctttttccagcgtgccgttacttcagcgccaggggcgtctcaaatatgcagtgacgct

SEQ ID NO: 828633 - DNA, 75 bp, synthetic construct
  source 1..75: mol_type = other DNA
atgcgcgtgtgaattttgaccttaacaaacttcgtctggaaatctctgttccgcaaattgctatcaagagtaatg

SEQ ID NO: 828634 - DNA, 75 bp, synthetic construct
  source 1..75: mol_type = other DNA
atggttcgccagttattactgaaggggatgttaataatttacctaacctattatctataacttctggagttgtca

SEQ ID NO: 828635 - DNA, 75 bp, synthetic construct
  source 1..75: mol_type = other DNA
atgattttgcagaaatatcatctgtcaattcatgaagtggcacagcgttgcggttttccggatagcgactatttt

SEQ ID NO: 828636 - DNA, 75 bp, synthetic construct
  source 1..75: mol_type = other DNA
gtgtggcggtatttacccttgaagaacatgaagtagcacgacatgagtcggtgcagttacaaattgcgccagtgg

SEQ ID NO: 828637 - DNA, 75 bp, synthetic construct
  source 1..75: mol_type = other DNA
ctgttagcgaccttgacgagtaccaaaaagcgcgaagttcaactattgttctgtggtgttctgttgcgtgttgac

SEQ ID NO: 828638 - DNA, 75 bp, synthetic construct
  source 1..75: mol_type = other DNA
tactactatatgtatcttgtttcattgaaactttttgggctggggtgataagtgtagtagcgggtctgatgacgg

SEQ ID NO: 828639 - DNA, 75 bp, synthetic construct
  source 1..75: mol_type = other DNA
aattattttggcactagctaaatcttctcaatttttgttttttattcaaagcacttacacccataaatattattt

SEQ ID NO: 828640 - DNA, 75 bp, synthetic construct
  source 1..75: mol_type = other DNA
aacgacgcatgtgccatacgccgtgttacaaccaaattttgttagtaccttgtttgtttgtctggaaagaaagat

SEQ ID NO: 828641 - DNA, 75 bp, synthetic construct
  source 1..75: mol_type = other DNA
gcagctaataaggggatcgatatttatgtaaattattctgtttgtattgatcatgaaattggcaagagagaaaaa

SEQ ID NO: 828642 - DNA, 75 bp, synthetic construct
  source 1..75: mol_type = other DNA
ataaatcggctacggacagacttattgttgagggtaatacttcgggttcaactaccgtctatgtgaaaaatgctg

SEQ ID NO: 828643 - DNA, 75 bp, synthetic construct
  source 1..75: mol_type = other DNA
ttttaagtgaaaatggtctttacgctgtgcgcgttgagaatggaaccgttgtcagccattgcctcattaaatgtt

SEQ ID NO: 828644 - DNA, 75 bp, synthetic construct
  source 1..75: mol_type = other DNA
cggactgcatcgctggaatgactatctggcgagcaaaacggtagattccgccacacacgaaagctggcgcacagt

SEQ ID NO: 828645 - DNA, 75 bp, synthetic construct
  source 1..75: mol_type = other DNA
caagcaatggcctggtaaagcggctattggtcgtctgaaaggtgaggaactggcgcaatacaatttgtggctgga

SEQ ID NO: 828646 - DNA, 75 bp, synthetic construct
  source 1..75: mol_type = other DNA
gcctatattttgtttatataaagatcctattagattaatacatttatatgcgaacggaaaaaaaatgaatctcga

SEQ ID NO: 828647 - DNA, 75 bp, synthetic construct
  source 1..75: mol_type = other DNA
gatatcacttccatatttgagcggtcggcattctacagttgctgagaataatgcatataacaagatgtatacaca

SEQ ID NO: 828648 - DNA, 75 bp, synthetic construct
  source 1..75: mol_type = other DNA
taaagcatggagattatcacgattttcacataaagtaacagaaaccataccattagcatgtgatggtaatctaca

SEQ ID NO: 828649 - DNA, 75 bp, synthetic construct
  source 1..75: mol_type = other DNA
gcgttacgacgaagccctccgcaccctgcgtgaaatcgccaacggcacccgtgacctcggtgtgccgtctgacac

SEQ ID NO: 828650 - DNA, 75 bp, synthetic construct
  source 1..75: mol_type = other DNA
tgttacgtgcggacggcaatcttgtctggaacatggcgattaaccgggaaaccaacgggctggatgaagacaaaa

SEQ ID NO: 828651 - DNA, 75 bp, synthetic construct
  source 1..75: mol_type = other DNA
gtgaatagtttatatcacaaatttaaatctgtgaaaatcgtcaacgatttaaataattctcctttgagtaagatt

SEQ ID NO: 828652 - DNA, 75 bp, synthetic construct
  source 1..75: mol_type = other DNA
atgtcagatatcaccgcaaatgttgtggtaagcatgccttctcaactcttcactatggctcgttcttttaaagct

SEQ ID NO: 828653 - DNA, 75 bp, synthetic construct
  source 1..75: mol_type = other DNA
aataaactaaagaatgaaactcaatcatatgcgcttaccacacacgcgcctaaattaattgcagaaaaaatatca

SEQ ID NO: 828654 - DNA, 75 bp, synthetic construct
  source 1..75: mol_type = other DNA
caggggcgaatcagatacctgatatgggtagcttcacgctttctgtttcaggtactggatatcaaaaattaccat

SEQ ID NO: 828655 - DNA, 75 bp, synthetic construct
  source 1..75: mol_type = other DNA
tggggtgttttctgcaccaaggcaacttatgcgcaaattgtgacatcctgcgaatcagccacaacaacaggtttt

SEQ ID NO: 828656 - DNA, 75 bp, synthetic construct
  source 1..75: mol_type = other DNA
ggctctcgaaaaccttggtttgggagatctcggtacagcatctggccgtaatgtcggtaatactcaatcgtttga

SEQ ID NO: 828657 - DNA, 75 bp, synthetic construct
  source 1..75: mol_type = other DNA
agtctataagcttagcgggacttcaaaacagttcagctaaattgctgcctaaaaactcaaccgttataagtgctc

SEQ ID NO: 828658 - DNA, 75 bp, synthetic construct
  source 1..75: mol_type = other DNA
ataaagcactccaagcgcatatagacagatatactaaagctggtgtgtatactccctataatgatattggttact

SEQ ID NO: 828659 - DNA, 75 bp, synthetic construct
  source 1..75: mol_type = other DNA
tagtgacaattcccgattaagcaaacttgttgaacatactggtcaggccaagggggctaatggacagtttatatc

SEQ ID NO: 828660 - DNA, 75 bp, synthetic construct
  source 1..75: mol_type = other DNA
caggtggtggcaagtgaactgcacggcgaacagccacaggcggtgccaggacggcagggagcggggacggcgctg

SEQ ID NO: 828661 - DNA, 75 bp, synthetic construct
  source 1..75: mol_type = other DNA
ctgctgcctggcaaagtcgttgaagggctgccggtaatggcgctcaacgttaataatgtcgatgttaacttcttc

SEQ ID NO: 828662 - DNA, 75 bp, synthetic construct
  source 1..75: mol_type = other DNA
catgtaatgaaattgcgccactggcagacaaagctgcacataccatgctgctatcgaaaacccatacctacacag

SEQ ID NO: 828663 - DNA, 75 bp, synthetic construct
  source 1..75: mol_type = other DNA
agcgacaacctggtggatgcgatgtttttccatatgaaacagcttgaggatgaaagccgcaatatggccaaaaaa

SEQ ID NO: 828664 - DNA, 75 bp, synthetic construct
  source 1..75: mol_type = other DNA
agcaaaaccttctgtattatgccagtctggcaaatttctataccgtttacgatcttcgcagtctgaaacccgggc

SEQ ID NO: 828665 - DNA, 75 bp, synthetic construct
  source 1..75: mol_type = other DNA
gccggtgttacaggagcaacacgcccggtgcggtgaattttccacgctggaagatctgtttgagcagacgggtaa

SEQ ID NO: 828666 - DNA, 75 bp, synthetic construct
  source 1..75: mol_type = other DNA
gtcagaacggctatctgatttacagtacggaagttcccgctggcacttttgaactgacggatgtgcccgcggcac

SEQ ID NO: 828667 - DNA, 75 bp, synthetic construct
  source 1..75: mol_type = other DNA
agttggcagttacaaagttaactttgagtacagaggagaaactctcacccctgtactcaacaaagaaaagctggc

SEQ ID NO: 828668 - DNA, 75 bp, synthetic construct
  source 1..75: mol_type = other DNA
atttctgttccttttggtaaaatgattaactcaggtagtgcaaatttaagataccaaatcattaacgagcgtgat

SEQ ID NO: 828669 - DNA, 75 bp, synthetic construct
  source 1..75: mol_type = other DNA
gttgtaactgacaaaaaagggtttgcaattgtcacacctctaaacaattatagaaaaaatgaggtgcgaatacaa

SEQ ID NO: 828670 - DNA, 75 bp, synthetic construct
  source 1..75: mol_type = other DNA
aaaccaaagcactaacagtaagaatcattataataaaacaacttctgttgttggttcctttagagattcgtttgg

SEQ ID NO: 828671 - DNA, 75 bp, synthetic construct
  source 1..75: mol_type = other DNA
acaaaaaataatgaatcgtattatgcgtcattggatccaggagtaaatataggaagttggcgtgtaaggaattca

SEQ ID NO: 828672 - DNA, 75 bp, synthetic construct
  source 1..75: mol_type = other DNA
gcgtctgctgtcgctttatgttgatgacagcgttcctgaccccaccacctttggtgaagtccgccgccgggcctg

SEQ ID NO: 828673 - DNA, 75 bp, synthetic construct
  source 1..75: mol_type = other DNA
ctgctgctcgacgaaccaaccaacgacctggatatcgaaaccctgcgcgcgctggaaaacgccctgctggagttc

SEQ ID NO: 828674 - DNA, 75 bp, synthetic construct
  source 1..75: mol_type = other DNA
gctggattatctggaagcactggacctggtggatacgtccagtgcgccagatattgaatggcctacccctccggc

SEQ ID NO: 828675 - DNA, 75 bp, synthetic construct
  source 1..75: mol_type = other DNA
gctggattatctggaagcactggagctggtggatacatccagtgcgccagatattgaatggcctacacctccggc

SEQ ID NO: 828676 - DNA, 75 bp, synthetic construct
  source 1..75: mol_type = other DNA
agagctttacacccttagtacaaggtattgcgcaaagtaatgcattgataacggtttcgcaaaatggctacatca

SEQ ID NO: 828677 - DNA, 75 bp, synthetic construct
  source 1..75: mol_type = other DNA
aaattcagtgtgagtcccagcgaatggcgccgcgcattccgggggcctgatctggttgaccgacaaaatgaccag

SEQ ID NO: 828678 - DNA, 75 bp, synthetic construct
  source 1..75: mol_type = other DNA
acgaccgttggttcctcgaccgtatcgccacgcacatcctggactaccaggatgaaggtaaagttgagttcttcg

SEQ ID NO: 828679 - DNA, 75 bp, synthetic construct
  source 1..75: mol_type = other DNA
aaaaccgtcaccattgagtgtgaaaatttaggaatactaaatactgatgatatcagtacctctttttatgctacc

SEQ ID NO: 828680 - DNA, 75 bp, synthetic construct
  source 1..75: mol_type = other DNA
gtaggccggataaggcgttcacgccgcatccggcattcagtgcctgatgcgacgctggcgcgtcttatcaggcct

SEQ ID NO: 828681 - DNA, 75 bp, synthetic construct
  source 1..75: mol_type = other DNA
gcggtatttgaatacgatcggctggttcgcagcatttacacgctgaagtatctgcgtgacccgcaactggaacgc

SEQ ID NO: 828682 - DNA, 75 bp, synthetic construct
  source 1..75: mol_type = other DNA
atctggcgtatgggagaagctaccagacagtgaattagaaagggttatggtggcaattttcgacgagcacgaagc

SEQ ID NO: 828683 - DNA, 75 bp, synthetic construct
  source 1..75: mol_type = other DNA
caccaacaggacgaacaggcgaacacgggcaaagatgccgcagagaaagccgccttatccgtggctggctgggtg

SEQ ID NO: 828684 - DNA, 75 bp, synthetic construct
  source 1..75: mol_type = other DNA
tggcgaacttttccgcccctgaaaaggcacgggctttactcattgaacagcgtgacggtgatgaagcactggcga

SEQ ID NO: 828685 - DNA, 75 bp, synthetic construct
  source 1..75: mol_type = other DNA
agttagagagcaatctggccgagctgcgtggcggcagcgattacgcgcaacgtaaaatcaagatagccgctgcgc

SEQ ID NO: 828686 - DNA, 75 bp, synthetic construct
  source 1..75: mol_type = other DNA
atctcggtacgttatccccagacatttgcacaagtcccctgtcttcgtccatttattaagctggagttgatggaa

SEQ ID NO: 828687 - DNA, 75 bp, synthetic construct
  source 1..75: mol_type = other DNA
tccacgaccgcgctgggctgagcacctatgaacaggaaacaattatatctttcattaaccagcggcgaggtgact

SEQ ID NO: 828688 - DNA, 75 bp, synthetic construct
  source 1..75: mol_type = other DNA
tgcacaaaatgcaggattcggtgtcggatctatgatcgttgtgatgagttttatcctggcacttgctgctttctt

SEQ ID NO: 828689 - DNA, 75 bp, synthetic construct
  source 1..75: mol_type = other DNA
tcggacaggttaaaacggataagaaatccaatgagattactgctatccctgctcttcttaatatgctggttatta

SEQ ID NO: 828690 - DNA, 75 bp, synthetic construct
  source 1..75: mol_type = other DNA
attaacacatcagccgggaaagtggaacataagttgtctaaaattctactgttgacaattttcgccgtcattttg

SEQ ID NO: 828691 - DNA, 75 bp, synthetic construct
  source 1..75: mol_type = other DNA
ggagttaacgggtaaaggtacacctgtaacagcattcccctgtgccaccattttatccactcaggctgaaaagct

SEQ ID NO: 828692 - DNA, 75 bp, synthetic construct
  source 1..75: mol_type = other DNA
ctctcccagtgctttcagaatcaagaagcagtattaaatttatcagacctaaatttgacgtctcttcccgaatta

SEQ ID NO: 828693 - DNA, 75 bp, synthetic construct
  source 1..75: mol_type = other DNA
attacacagaacgttcgctgacctgatggcatttaaatcaaagcttcagaatggcgaagatttgaaaaatgttac

SEQ ID NO: 828694 - DNA, 75 bp, synthetic construct
  source 1..75: mol_type = other DNA
gagatattaaaccaatataaagatgtctataacataaaagtaatttatcttgaaaacaatacgggtattacaggt

SEQ ID NO: 828695 - DNA, 75 bp, synthetic construct
  source 1..75: mol_type = other DNA
gctggattatctggaagcactggagctggtggatacgtccagtgcgccagatattgaatggcctacgcctccggc

SEQ ID NO: 828696 - DNA, 75 bp, synthetic construct
  source 1..75: mol_type = other DNA
atggcggcgtgaacgggacctgacgggctggatgtcgctgtcacggaaaccgcaagtgacctggtacggctggga

SEQ ID NO: 828697 - DNA, 75 bp, synthetic construct
  source 1..75: mol_type = other DNA
atacgcttgcccggacacggacacagggactggcgggattctgcgaaggtgcggaactgctggcggcaatggtaa

SEQ ID NO: 828698 - DNA, 75 bp, synthetic construct
  source 1..75: mol_type = other DNA
gctggattatctggaagcactggagctggtggatacctccagtgcgccagatattgaatggcctacccctccggc

SEQ ID NO: 828699 - DNA, 75 bp, synthetic construct
  source 1..75: mol_type = other DNA
caaaccaggcgctggatcgcaacctcaacgtgatgatgttctccgataacgtcacgctggaagatgaaatccaac

SEQ ID NO: 828700 - DNA, 75 bp, synthetic construct
  source 1..75: mol_type = other DNA
ctggtatggttgtgggattatgccaaccgctcacaggcattattccgcgaactgtatccggcgctaagacaaatt

SEQ ID NO: 828701 - DNA, 75 bp, synthetic construct
  source 1..75: mol_type = other DNA
tcgttattggcgctggtggtgcggcagttgctgcagggagtgcaggaaatgggggtgatgggggagacactacca

SEQ ID NO: 828702 - DNA, 75 bp, synthetic construct
  source 1..75: mol_type = other DNA
agtcatcgggcattatctgaacataaaacactatcaataagttggagtcattacccgaaaaaacgcatcccggtt

SEQ ID NO: 828703 - DNA, 75 bp, synthetic construct
  source 1..75: mol_type = other DNA
agcgtttagatacgcgtcgtaagccaaaaatgacaaacgaacagttactggcttttttggctgcaggcattaatg

SEQ ID NO: 828704 - DNA, 75 bp, synthetic construct
  source 1..75: mol_type = other DNA
agcgctggaaatgctcagtgcagacgagaaaagcgaagtgctggcatttacctgccgaagctgtgcgtctgaaaa

SEQ ID NO: 828705 - DNA, 75 bp, synthetic construct
  source 1..75: mol_type = other DNA
gtgggattatgcccaccgtcaggtgggttttttatttagtagttctctcaacttttcgttctgctctctgaactt

SEQ ID NO: 828706 - DNA, 75 bp, synthetic construct
  source 1..75: mol_type = other DNA
tgacccgctgcaggggcggtatatcactcaggatccgattgggctgaaggggggatggaacctgtatacatatcc

SEQ ID NO: 828707 - DNA, 75 bp, synthetic construct
  source 1..75: mol_type = other DNA
taacgacacggcttgataaagctacgatgatattatcgctaagtgttccccaagcgtggttaaaataccaggcaa

SEQ ID NO: 828708 - DNA, 75 bp, synthetic construct
  source 1..75: mol_type = other DNA
gtagttacttgggaacaccaaataacacctatctaaaatataatcccaaagctaaagggaatggagttacaatta

SEQ ID NO: 828709 - DNA, 75 bp, synthetic construct
  source 1..75: mol_type = other DNA
gttcgaaaaactggaagactgctatttcagccagtgcgagaaaaatactggcaaacaagagaagaagctcaacgg

SEQ ID NO: 828710 - DNA, 75 bp, synthetic construct
  source 1..75: mol_type = other DNA
tgatatcaatgagccagacggaccaacgaaccttctggcatgggaaaggcttaagaacaaagagttgccgccttc

SEQ ID NO: 828711 - DNA, 75 bp, synthetic construct
  source 1..75: mol_type = other DNA
ggacgtcaccgaatcgcgcaaaatgctgcgccagctgagctacagcgcctcccatgatgcactgacgcatctcgc

SEQ ID NO: 828712 - DNA, 75 bp, synthetic construct
  source 1..75: mol_type = other DNA
gcccacggtgtcgcttcgccgcggatcccgcaagcgcgtaatttgtggctgatttcacttaagctctggagttgc

SEQ ID NO: 828713 - DNA, 75 bp, synthetic construct
  source 1..75: mol_type = other DNA
tatggtttttcccctgaggatagtttttgtcatagaatttttctccctagaaatattgagtattacaaatacgcc

SEQ ID NO: 828714 - DNA, 75 bp, synthetic construct
  source 1..75: mol_type = other DNA
atgttcggcatggtactggcgacagggattcgaattctgtcgcgctgtaactacaccaccaaccgttacaacctc

SEQ ID NO: 828715 - DNA, 75 bp, synthetic construct
  source 1..75: mol_type = other DNA
ccgtgaaggttactggcaactcaagcaccgcccatgttgctagctttatcgctgatccatcgactatcgccgcca

SEQ ID NO: 828716 - DNA, 75 bp, synthetic construct
  source 1..75: mol_type = other DNA
ggatgagatgctgattacgatcattcaggggcacgctcagcggctcgggatgaagaccatcgccgggccagtagt

SEQ ID NO: 828717 - DNA, 75 bp, synthetic construct
  source 1..75: mol_type = other DNA
cgcgctgacccgtgaagcgatggaaggaaaaatcgattttgataccagttttacccggcgaattgccatgcttaa

SEQ ID NO: 828718 - DNA, 75 bp, synthetic construct
  source 1..75: mol_type = other DNA
gcaaaaaatgcgaagataatgtttttaatattttgaacaatatggcattgaatgataagagtgcttgcgttcgag

SEQ ID NO: 828719 - DNA, 75 bp, synthetic construct
  source 1..75: mol_type = other DNA
tcgcatcaggcatcggcgcggggtgtcggatgcgacgcgagcgccttatccgacctacggttcaggcctgtaggc

SEQ ID NO: 828720 - DNA, 75 bp, synthetic construct
  source 1..75: mol_type = other DNA
ctttggatttttagggggggtcaatcattatgttttaattacttcagtcaatatcaaacatagtaaaataacaat

SEQ ID NO: 828721 - DNA, 75 bp, synthetic construct
  source 1..75: mol_type = other DNA
ggaaaaatcgattttgataccagttttacccgtcgaattggcatgcttaaaggaacgcataaagatatattgcat

SEQ ID NO: 828722 - DNA, 75 bp, synthetic construct
  source 1..75: mol_type = other DNA
cagagttagctatctgccgtgaaaacatcattgcctgtggagatggtgccaatgatattcctatgcttttgcatg

SEQ ID NO: 828723 - DNA, 75 bp, synthetic construct
  source 1..75: mol_type = other DNA
acccactatcgccgtgccggtggtgttgatgggaaccttctcggtgctttatgccttcggctatagcgtcaacac

SEQ ID NO: 828724 - DNA, 75 bp, synthetic construct
  source 1..75: mol_type = other DNA
tttaattatgtgacagaagcatgcagagaatccgatggtattacaacaacaggacgtatgctctatcgaaacttg

SEQ ID NO: 828725 - DNA, 75 bp, synthetic construct
  source 1..75: mol_type = other DNA
aaatgctgatttttatatcattaatacattccctatggcttttttgtcatttttcagtctcttttcaaaaaaaaa

SEQ ID NO: 828726 - DNA, 75 bp, synthetic construct
  source 1..75: mol_type = other DNA
tatggaattctggtagataatggcaatattgacgagttatctaatgtaatgaaaatgtttatggatagttttgag

SEQ ID NO: 828727 - DNA, 75 bp, synthetic construct
  source 1..75: mol_type = other DNA
gagcttgttaaagcttggttgaggaatttaggcctagtcgcttttaatcagataaaaacaaaatatgatggggag

SEQ ID NO: 828728 - DNA, 75 bp, synthetic construct
  source 1..75: mol_type = other DNA
acagccagaccggactcagtatttctgaggttgagcatatcaggcagagtgtgcgcgacattctggtcacgccgg

SEQ ID NO: 828729 - DNA, 75 bp, synthetic construct
  source 1..75: mol_type = other DNA
cctcaatcctctgactacggtaattgagcagacccgtaatacgctttattgggggaaacatcctgattttaccgt

SEQ ID NO: 828730 - DNA, 75 bp, synthetic construct
  source 1..75: mol_type = other DNA
tgcatctggcggtggaggaagtggcgacgttctgtagcgagcagatcgaccaaatccgcgaggagctatctaaac

SEQ ID NO: 828731 - DNA, 75 bp, synthetic construct
  source 1..75: mol_type = other DNA
aagggcaagtactgagattacattgggatgaatataacttgtttaatcttgtatgcaatagaatgagggtcgctt

SEQ ID NO: 828732 - DNA, 75 bp, synthetic construct
  source 1..75: mol_type = other DNA
cgactttacagtgttggatttattgggttgtataaccagcagtcatcttcatatgtattttgccatgacggtaag

SEQ ID NO: 828733 - DNA, 75 bp, synthetic construct
  source 1..75: mol_type = other DNA
acgcaaattcagcctggtatcgaaaagtttattaaagattttaacgatgcgaaaaagaaaggtgaacatgcctac

SEQ ID NO: 828734 - DNA, 75 bp, synthetic construct
  source 1..75: mol_type = other DNA
tctgggggctacggtcggatggcgaggcgctttcttgtgcctggtgcccatcgcggttgtcgcctttatctggca

SEQ ID NO: 828735 - DNA, 75 bp, synthetic construct
  source 1..75: mol_type = other DNA
ctgtatgcggaagataacgtggtggtatttgtccgcgtgctgaatcagcagcgtgtactggtggcaatcaaccgt

SEQ ID NO: 828736 - DNA, 75 bp, synthetic construct
  source 1..75: mol_type = other DNA
aattcatattgataaacaccgcgtttgtatcggtttatccccgctggcgcggggaacactttactacaataggtg

SEQ ID NO: 828737 - DNA, 75 bp, synthetic construct
  source 1..75: mol_type = other DNA
gctattttatgaggaatctaaggataatgaacctttagggaaggtgcgaataagcggggaaatacttctcggctg

SEQ ID NO: 828738 - DNA, 75 bp, synthetic construct
  source 1..75: mol_type = other DNA
atgggggcatcagctcaagtcagcggcggagcttcagcattaaaggcagcattcgagtctgcgcaagctgccatg

SEQ ID NO: 828739 - DNA, 75 bp, synthetic construct
  source 1..75: mol_type = other DNA
actcagataagtaaacaaacagctactcgtcgggataaccgcgaacatgatgattttgccggtgatagcttatcg

SEQ ID NO: 828740 - DNA, 75 bp, synthetic construct
  source 1..75: mol_type = other DNA
ataagggtgtctggctggaattcgacatgattggcctagacattaccttcccgaaagagggaatagcgccagggg

SEQ ID NO: 828741 - DNA, 75 bp, synthetic construct
  source 1..75: mol_type = other DNA
agcagcagacactgccggaacgcaagcacggcattctgtataatctgctctggggctggccatgggccctggtgg

SEQ ID NO: 828742 - DNA, 75 bp, synthetic construct
  source 1..75: mol_type = other DNA
ggctggcgcattacctgcatgattacctgatggccacggtatatgtgacggtggtgacgctggtccgggtgacga

SEQ ID NO: 828743 - DNA, 75 bp, synthetic construct
  source 1..75: mol_type = other DNA
attatgacgccctgggcaactatatcagaaatctcagggatccatctcggccgcaagatgctgctacaaagaact

SEQ ID NO: 828744 - DNA, 75 bp, synthetic construct
  source 1..75: mol_type = other DNA
actgattattcgattacaggtactggtggatacacgggggggaatgttgttttatcaactgctttaggcaatggg

SEQ ID NO: 828745 - DNA, 75 bp, synthetic construct
  source 1..75: mol_type = other DNA
cagttctctggatattctgatgcactggcggcaattggcgcagggagtatcatatacccacagggcgcagactat

SEQ ID NO: 828746 - DNA, 75 bp, synthetic construct
  source 1..75: mol_type = other DNA
acacgccggcgcgaaaaatccacctgtaccactgcgaccatcgcggcctgccgctggcgcttgtcagcacggaag

SEQ ID NO: 828747 - DNA, 75 bp, synthetic construct
  source 1..75: mol_type = other DNA
atgaataaaatatacgcattaaaatattgtcacgcgacaggggggctgattgctgtatccgaactggcctccaga

SEQ ID NO: 828748 - DNA, 75 bp, synthetic construct
  source 1..75: mol_type = other DNA
acacctcttgttatcggctctggaggaactttaaaccctaatgctattttcttcttcacaaatccgacagtgaca

SEQ ID NO: 828749 - DNA, 75 bp, synthetic construct
  source 1..75: mol_type = other DNA
ctggcgcggggaactccgataacacagggccgtcaatgcggcccttttcggtttatccccgctggcgcggggaac

SEQ ID NO: 828750 - DNA, 75 bp, synthetic construct
  source 1..75: mol_type = other DNA
tttatccccgctggcgcggggaactcgcgtatcgtctcgttattgcgccgccccaactcggtttatccccgctgg

SEQ ID NO: 828751 - DNA, 75 bp, synthetic construct
  source 1..75: mol_type = other DNA
ccgctggcgcggggaacacaatcgtgtgtaaattcgcggcggctccactggcggtttatccccgctggcgcgggg

SEQ ID NO: 828752 - DNA, 75 bp, synthetic construct
  source 1..75: mol_type = other DNA
aacacacaaaaacaaaacaccgaaacggctgtacctgcggtttatccccgctggcgcggggaacacgatgaaatc

SEQ ID NO: 828753 - DNA, 75 bp, synthetic construct
  source 1..75: mol_type = other DNA
ccgctggcgcggggaactctgtttctgtcccaactgaacagcgccgatagtcggtttatccccgctggcgcgggg

SEQ ID NO: 828754 - DNA, 75 bp, synthetic construct
  source 1..75: mol_type = other DNA
aacacgacgttgacgtgttcgtcgatgatgaccagctcggtttatccccgctggcgcggggaacacgggcgcacg

SEQ ID NO: 828755 - DNA, 75 bp, synthetic construct
  source 1..75: mol_type = other DNA
ccgctggcgcggggaacaccaaaaagtcggataagattaactccgttagatcggtttatccccgctggcgcgggg

SEQ ID NO: 828756 - DNA, 75 bp, synthetic construct
  source 1..75: mol_type = other DNA
aaaataatgataaattcttatcacaagacttattggaatcttatgccattcgtttgttgagcggaccattgaatg

SEQ ID NO: 828757 - DNA, 75 bp, synthetic construct
  source 1..75: mol_type = other DNA
ccaggcattattgaaaataacattatttctacagaacaacatttctttagcagtaagctgtttaagtatgtaatg

SEQ ID NO: 828758 - DNA, 75 bp, synthetic construct
  source 1..75: mol_type = other DNA
aaactatgccatatgccagcaatataagtattgcggtattagatgataatgtattggaaagtcaggctattgaaa

SEQ ID NO: 828759 - DNA, 75 bp, synthetic construct
  source 1..75: mol_type = other DNA
ggttatccccgctggcgcggggaacactctaaacataacctattattaattaatgattttttaagccagtcacaa

SEQ ID NO: 828760 - DNA, 75 bp, synthetic construct
  source 1..75: mol_type = other DNA
atgaaatcaaaacggtttatccccgctggcgcggggaacacgaggcaattagtaaaactccggcaattgctgccg

SEQ ID NO: 828761 - DNA, 75 bp, synthetic construct
  source 1..75: mol_type = other DNA
ggcaggcggcgagcactttgaatatcagaaagcctctgcggccatccagcagaaagtggcgcaaattaacgccat

SEQ ID NO: 828762 - DNA, 75 bp, synthetic construct
  source 1..75: mol_type = other DNA
aaggcacggctttccagctttttaatctgcaagacgggcatgaagctgtctgtgaagtgcccgccgccgatggtt

SEQ ID NO: 828763 - DNA, 75 bp, synthetic construct
  source 1..75: mol_type = other DNA
cgagaagagattgaagcagaggcgcgaggactgctgccagaaagcgatatgtaccctgatttcggcgcattaata

SEQ ID NO: 828764 - DNA, 75 bp, synthetic construct
  source 1..75: mol_type = other DNA
caaagcattcgagtaccacatcgactgccttcctgaacaggcgcgtgaaatagtcaaagcccggcattatcggga

SEQ ID NO: 828765 - DNA, 75 bp, synthetic construct
  source 1..75: mol_type = other DNA
tgtttcctcatcctctttcgccggggtcgacggcgctgccgtccagtaaaggatttcgcgttgagatgaccggaa

SEQ ID NO: 828766 - DNA, 75 bp, synthetic construct
  source 1..75: mol_type = other DNA
tgctggcggcctggaaagccttagatcgatctcagattgacgaacagcccggcgctcagggctggcgcgggattc

SEQ ID NO: 828767 - DNA, 75 bp, synthetic construct
  source 1..75: mol_type = other DNA
gaggcgttgcgcacctgcacgagcttaatccccactggcctgctttcgcgcttatcggcctgattcttgaggtgg

SEQ ID NO: 828768 - DNA, 75 bp, synthetic construct
  source 1..75: mol_type = other DNA
gtaaactaccggagagtcttggtaagcttgttaaaacgaaaacttatgggcttcggatcagtattgatcctaata

SEQ ID NO: 828769 - DNA, 75 bp, synthetic construct
  source 1..75: mol_type = other DNA
gtatcttgaaaaagcagctgaagaccattcgatcatttttaaagatatgcatattgttgagcgcagttctcaatc

SEQ ID NO: 828770 - DNA, 75 bp, synthetic construct
  source 1..75: mol_type = other DNA
attcttgcttttgataaaagtaatgctaatgagagtttttatttctcgaattatgtaagttctcttgaaaaagct

SEQ ID NO: 828771 - DNA, 75 bp, synthetic construct
  source 1..75: mol_type = other DNA
caaccacgaagtcgccatcatagacaactgcctctgtatgcgccgcattgcgccgccactgccggggatgattca

SEQ ID NO: 828772 - DNA, 75 bp, synthetic construct
  source 1..75: mol_type = other DNA
gtaaacgcacgcgccttgaagacggctatagcacgctggagaacaaaaaattcagcgactacacggatgaagacc

SEQ ID NO: 828773 - DNA, 75 bp, synthetic construct
  source 1..75: mol_type = other DNA
gaaaacgcacgcgccttgaagacggttaccgctcgctggagaacaagaaattccaggactacacagatgaagaca

SEQ ID NO: 828774 - DNA, 75 bp, synthetic construct
  source 1..75: mol_type = other DNA
gaagtgattaaagggccgtccggcaccgactacgggcgcagcgcaccgacaggctcgatcaatatgatcagcaag

SEQ ID NO: 828775 - DNA, 75 bp, synthetic construct
  source 1..75: mol_type = other DNA
cgataaatccatctggatttgcccctatatttccagacatctgttatcacttaacccattacaagcccgctgccg

SEQ ID NO: 828776 - DNA, 75 bp, synthetic construct
  source 1..75: mol_type = other DNA
tggtgtgggtcggtaaggatgtgacaggtatcgaacccactaacgtcagtatcattgaattcccggatattaccg

SEQ ID NO: 828777 - DNA, 75 bp, synthetic construct
  source 1..75: mol_type = other DNA
gcagcctataacgacagcgggcgcgtggtgtgggtcggtaaggatgtgacaggtatcgaacccactaacgtcagt

SEQ ID NO: 828778 - DNA, 75 bp, synthetic construct
  source 1..75: mol_type = other DNA
ggacttgtgacggacggttttattttgcgtgaaaatgaatttgtcacatcattgtcgtatctgaaagaggccgga

SEQ ID NO: 828779 - DNA, 75 bp, synthetic construct
  source 1..75: mol_type = other DNA
gcgagacaccatgctgattgttggcaccgaccacggttttttacttggtgagcatggctggtgggcgaaaaacca

SEQ ID NO: 828780 - DNA, 75 bp, synthetic construct
  source 1..75: mol_type = other DNA
atcacgcggaagataactggttattgcaggtcgaaacgtttgatccgcacgagccgtttcacacaacggaagagt

SEQ ID NO: 828781 - DNA, 75 bp, synthetic construct
  source 1..75: mol_type = other DNA
cacctcaatctgcccggaaaataaaagcgtgattgagctaccggatattaccgccaatcgtcgcattgaggcgtc

SEQ ID NO: 828782 - DNA, 75 bp, synthetic construct
  source 1..75: mol_type = other DNA
tgtctggagattcagggggccagtctagttctgttgcaaaaaaacagtgaattgcagattgtcctgaaaacggat

SEQ ID NO: 828783 - DNA, 75 bp, synthetic construct
  source 1..75: mol_type = other DNA
gtggacggagcggttagggatactggcgggaacacatgaaaacgtaaccacgctaccagtagccagaagaaaata

SEQ ID NO: 828784 - DNA, 75 bp, synthetic construct
  source 1..75: mol_type = other DNA
cggaagatgagcgcgatgccctgttacaacgggtcagcatcatgaccagcgaatgggaaaaagacctgctgctgg

SEQ ID NO: 828785 - DNA, 75 bp, synthetic construct
  source 1..75: mol_type = other DNA
tggtgtgggtcggtaaggatgtgacaggcattgaaccccgtaacgccagtgttattgaagttccggatattaccg

SEQ ID NO: 828786 - DNA, 75 bp, synthetic construct
  source 1..75: mol_type = other DNA
atgactaataacactaatgacaccaacatcactagcacagctagcatcaagattgacccaaggacaccagaaggc

SEQ ID NO: 828787 - DNA, 75 bp, synthetic construct
  source 1..75: mol_type = other DNA
tgtcttatgttggtgaaacacctgaaggtgcgcagaagcagctggcgaagtatatccagcaagttgacgaacagg

SEQ ID NO: 828788 - DNA, 75 bp, synthetic construct
  source 1..75: mol_type = other DNA
aaataatgaaaatgagttcagtgggctctacttttctaaaaatggaggagtgctggacctgaatggatacgatca

SEQ ID NO: 828789 - DNA, 75 bp, synthetic construct
  source 1..75: mol_type = other DNA
gaataataagactgtgcaaatggatttatcttttaacggtggtggaactataaatcttgaacaggatttgcatac

SEQ ID NO: 828790 - DNA, 75 bp, synthetic construct
  source 1..75: mol_type = other DNA
caacctttgccggactcggaacccgtgattatagtacgcattcatggtatgccggtgctgaaacaggctaccgct

SEQ ID NO: 828791 - DNA, 75 bp, synthetic construct
  source 1..75: mol_type = other DNA
ggggcctatatttacggcactcgtgaaagcgaccgtggatgcattccttgattatttcaacgcgatcccaactgg

SEQ ID NO: 828792 - DNA, 75 bp, synthetic construct
  source 1..75: mol_type = other DNA
agtttattgaacgaacaaatcctaaatccaatattctttgtaatgagccatttggtatgtcgccatttagagctc

SEQ ID NO: 828793 - DNA, 72 bp, synthetic construct
  source 1..72: mol_type = other DNA
atgactgataacgtgatcgttggtcatgccggatgcggcgtaaacgccttatccggcctaaaaagcacgcaa

SEQ ID NO: 828794 - DNA, 75 bp, synthetic construct
  source 1..75: mol_type = other DNA
atgaaaacttgcataacaaagggaattgtgaccgtaagtttaacggcaatattactcagctgttcatccgcatgg

SEQ ID NO: 828795 - DNA, 75 bp, synthetic construct
  source 1..75: mol_type = other DNA
ctcaaaacagtagcgtaacgtaccgaaccatcaatgactacggggcggaaacgccgcaactcaactgtaaatcgt

SEQ ID NO: 828796 - DNA, 75 bp, synthetic construct
  source 1..75: mol_type = other DNA
gcgggctttattattacaccaccgctatttgtgctgaatccggcaaacgagaacctgctacgcattatgtacatt

SEQ ID NO: 828797 - DNA, 75 bp, synthetic construct
  source 1..75: mol_type = other DNA
acagtcatattaccggaggattaatcgcagtatctgaattaacgcgcagaataacgacaggatccagaaaaaaac

SEQ ID NO: 828798 - DNA, 75 bp, synthetic construct
  source 1..75: mol_type = other DNA
cctgttacacctctctattagcagcagcaaaaaatgccggtgatacagcctcaattccgatcatcgaagcgattt

SEQ ID NO: 828799 - DNA, 75 bp, synthetic construct
  source 1..75: mol_type = other DNA
aattgtgaccgtaagtttaacggcaatattactcagctgctcatccgcatgggcggcaggtaaaggcgggattgg

SEQ ID NO: 828800 - DNA, 75 bp, synthetic construct
  source 1..75: mol_type = other DNA
atgaaggctcatacttcactgcatttggtttgcaaaacgttcaatatagtaaccaaccacacttggaaatagcga

SEQ ID NO: 828801 - DNA, 75 bp, synthetic construct
  source 1..75: mol_type = other DNA
tgcgcttcttcacgcaactgaaatgccgcatgatgccgtatctgtatcgtgaagctgcgcgtgcgaacgcgcggg

SEQ ID NO: 828802 - DNA, 75 bp, synthetic construct
  source 1..75: mol_type = other DNA
aagggcgcggttatctatatcgctggcgaaggcagtatgggcgtaaaacgccgcgttaaggcgtgggagataacc

SEQ ID NO: 828803 - DNA, 75 bp, synthetic construct
  source 1..75: mol_type = other DNA
ggagcgtacctggcagttggatacgccgctgtttacgctgcgctttttttcacctcaggaaggtgtggttggcgt

SEQ ID NO: 828804 - DNA, 75 bp, synthetic construct
  source 1..75: mol_type = other DNA
agctttaaagcgggtattaaacgcaagcaaaagcgggcaggacgtaagaatgaatacctttctctaatccttgct

SEQ ID NO: 828805 - DNA, 75 bp, synthetic construct
  source 1..75: mol_type = other DNA
attggcatggtgcgcaccctcaagccctacggaatccaacgcaggtgtctatttcaaaatggcaacagcagttcc

SEQ ID NO: 828806 - DNA, 75 bp, synthetic construct
  source 1..75: mol_type = other DNA
gaacagatggccgcgcagctggaggcggaatatatcccggagcggaaacttcatctttaccactgcgaccaccgg

SEQ ID NO: 828807 - DNA, 75 bp, synthetic construct
  source 1..75: mol_type = other DNA
cgtagttcattttatccccctacaaggcgccgctttacccgttcaatttcagccagcgttgcggtgtcagctcca

SEQ ID NO: 828808 - DNA, 75 bp, synthetic construct
  source 1..75: mol_type = other DNA
taataaaagacgcctcttttttggataatgatgatgagattaagaaaatagcaaaaacgctgagtatgatcgaac

SEQ ID NO: 828809 - DNA, 75 bp, synthetic construct
  source 1..75: mol_type = other DNA
ctgaggccggagaacggcgtgaagccccgaacgccgcccttccgggggctgaaaccgtgcaggcaccgacgaaca

SEQ ID NO: 828810 - DNA, 75 bp, synthetic construct
  source 1..75: mol_type = other DNA
acgtatcaatgaagtcataacagccagcccggaaactgagtatcttacacaatcatcttctttcaaatctgtgaa

SEQ ID NO: 828811 - DNA, 75 bp, synthetic construct
  source 1..75: mol_type = other DNA
aattatcctcaatataaaggagggatgaacctgaatgatgtctatgacattctttcttctacaggattgaatgtt

SEQ ID NO: 828812 - DNA, 75 bp, synthetic construct
  source 1..75: mol_type = other DNA
gattcagcggcgtgatagtcgccagacaccactgaccgcgtcattaatcacgcaattccggcgagaatgcggcta

SEQ ID NO: 828813 - DNA, 75 bp, synthetic construct
  source 1..75: mol_type = other DNA
ggcggatattgtgataattccttactggggaacaattacacaaaaaccgccacaaaaactgctggaagccttaac

SEQ ID NO: 828814 - DNA, 75 bp, synthetic construct
  source 1..75: mol_type = other DNA
tatgaaaacctggtcggggggcaacgagacgctatcagccaggctatccagctgccaaatacaaaagcggaaagc

SEQ ID NO: 828815 - DNA, 75 bp, synthetic construct
  source 1..75: mol_type = other DNA
caacagcagcagtcagagccggaacgtgacgtttatcgcggatgtcaggacggcgcagatcgctgatctggtggt

SEQ ID NO: 828816 - DNA, 75 bp, synthetic construct
  source 1..75: mol_type = other DNA
cgagtcgctgagtgttaatggtgcaaaattcagggcggcagatggttttccaaaaacagggtttgatggtgctaa

SEQ ID NO: 828817 - DNA, 75 bp, synthetic construct
  source 1..75: mol_type = other DNA
tcactgtgcagtgtcgggatgttaacaaacctgaatcatgccgcaatgagcacgcttcttggtgagaggattatg

SEQ ID NO: 828818 - DNA, 75 bp, synthetic construct
  source 1..75: mol_type = other DNA
ggtgcaagaagaagtaattctaactttataggatatactaaaataggtatttccatagttataactaatgaggct

SEQ ID NO: 828819 - DNA, 75 bp, synthetic construct
  source 1..75: mol_type = other DNA
caacagcagcagcctgagccggaacgtgacgtttgtcgcggatgtcaggacggtgaagatagcggatctggtcgt

SEQ ID NO: 828820 - DNA, 75 bp, synthetic construct
  source 1..75: mol_type = other DNA
gtcgcgggtaagccgatagtcgttaaagtgaccctgaaagatgataacggcaacggggttaccggaagaaaagaa

SEQ ID NO: 828821 - DNA, 75 bp, synthetic construct
  source 1..75: mol_type = other DNA
cggcgtcgaactgatgaaaaaaccattcacggcttttattgactgggcgaaaaacatctttgctgggctggggga

SEQ ID NO: 828822 - DNA, 75 bp, synthetic construct
  source 1..75: mol_type = other DNA
ggcgaagaaatatcttcgttgcagaacaaggccgaggcgcttggtgttgtcacgcaagaccaggccgatcagttt

SEQ ID NO: 828823 - DNA, 75 bp, synthetic construct
  source 1..75: mol_type = other DNA
atcagtgtcaccagccagacggcgggcaccagtgccgtcaccgccagtatcaacagcagtaccgcgagccggaac

SEQ ID NO: 828824 - DNA, 75 bp, synthetic construct
  source 1..75: mol_type = other DNA
agtcaccagccagacggcgggagtcagtgcagtcactgcaaccatcaacagcagtactcagagtcagaacgtgac

SEQ ID NO: 828825 - DNA, 75 bp, synthetic construct
  source 1..75: mol_type = other DNA
ccagctgacgatgcccggctggcaaaccaagcattcggatgcgttcagtattgcgggtgataaagataccgccaa

SEQ ID NO: 828826 - DNA, 75 bp, synthetic construct
  source 1..75: mol_type = other DNA
attcactttaaacgcattgttaaccgtcgtctgattatgggcctggcggatggcgaagtgctggttgatggtcgt

SEQ ID NO: 828827 - DNA, 75 bp, synthetic construct
  source 1..75: mol_type = other DNA
gggagttcaactagcggtgctgtcccgcgaaaagtaggttcgttatggggtgaatatggtaatctgacttcgtat

SEQ ID NO: 828828 - DNA, 75 bp, synthetic construct
  source 1..75: mol_type = other DNA
cggacaacggcgtaacgactgccccaacggtgatcaccgagccggacggcacggtggaaatcagtgtcaccagcc

SEQ ID NO: 828829 - DNA, 75 bp, synthetic construct
  source 1..75: mol_type = other DNA
cacgctgcgggcgagggtgaccgatgcgttcgggaatgcacttgccgggcagacggtcagcgtgacggcaggcaa

SEQ ID NO: 828830 - DNA, 75 bp, synthetic construct
  source 1..75: mol_type = other DNA
atcaacagcagcagtcagagccgggatgtgacatttatcgccgatgccagcacggcgcagatcgcggacctggtg

SEQ ID NO: 828831 - DNA, 75 bp, synthetic construct
  source 1..75: mol_type = other DNA
agacggtgagcgtgacggcaggcaacggtgcaacggttgccccgacggtgattacagagccggacggtacggtgg

SEQ ID NO: 828832 - DNA, 75 bp, synthetic construct
  source 1..75: mol_type = other DNA
cactgatcctgccgaacgttaaaactattccatataccctgggtgcgttggaatcgccaccaacggtcgcggcac

SEQ ID NO: 828833 - DNA, 75 bp, synthetic construct
  source 1..75: mol_type = other DNA
ggtgtaaaattcagggcgacagatggttttccagaaacagggtttgatggtgcaaaattcacgctgttactaacc

SEQ ID NO: 828834 - DNA, 75 bp, synthetic construct
  source 1..75: mol_type = other DNA
cagtgtacttacaaaatgtagaaaaaaaagaaggggaaaaatggagatatgtgggtgatggcatatatgaacgta

SEQ ID NO: 828835 - DNA, 75 bp, synthetic construct
  source 1..75: mol_type = other DNA
tcgcggatctggtggtcattaaggacggttcagaggcagacggtgcaatggcgaatatgctgcggctgaagatca

SEQ ID NO: 828836 - DNA, 75 bp, synthetic construct
  source 1..75: mol_type = other DNA
cagtggcagacggtgcgacggcgaacacgctgcgggtgagggtcaccgatgcgttcggtaatgtgctggccgggc

SEQ ID NO: 828837 - DNA, 75 bp, synthetic construct
  source 1..75: mol_type = other DNA
ttcgtatacgcgaagttttagtggtagctggggcggatatacctgttagtgttttattatctgatgaatttggta

SEQ ID NO: 828838 - DNA, 75 bp, synthetic construct
  source 1..75: mol_type = other DNA
taatgttgacagtaatggagaagtaacattatctgtgctgataagaagtgaagttactattaccgggaaacccaa

SEQ ID NO: 828839 - DNA, 75 bp, synthetic construct
  source 1..75: mol_type = other DNA
tgggtgacgtctgtcagtcagtctattgatccgctggtccagttctcccgggaaacgggggtggcgatcgagacc

SEQ ID NO: 828840 - DNA, 75 bp, synthetic construct
  source 1..75: mol_type = other DNA
attattgaaatcagtaagcgaaccggcatgaagatcgaggatactacgaagctatgggaaagccttacttctgct

SEQ ID NO: 828841 - DNA, 75 bp, synthetic construct
  source 1..75: mol_type = other DNA
gcgttgcaacagactatagaaaacacagcaatgcgcctgatgcagcgcgagtcgcaaagacctggaggcatgtta

SEQ ID NO: 828842 - DNA, 75 bp, synthetic construct
  source 1..75: mol_type = other DNA
actatgaggtcgacgcccgtacagggaagctattaacagcagggaaacaagctgatgacacctttgataacatcg

SEQ ID NO: 828843 - DNA, 75 bp, synthetic construct
  source 1..75: mol_type = other DNA
aagagtataataaggtttatattcttgggcacggtagtcctggttctcatcaattaggccttggttcggaactta

SEQ ID NO: 828844 - DNA, 75 bp, synthetic construct
  source 1..75: mol_type = other DNA
gaatttcagtaaagcgagggatttagcaggaattaactggggtgaaggttctcccgcaacatttcatgaacaaag

SEQ ID NO: 828845 - DNA, 75 bp, synthetic construct
  source 1..75: mol_type = other DNA
atcgctgagatgggcgctgaatacgttaaacagatgatcttaagcgaagcagccagcgccagcgcaatgggcgga

SEQ ID NO: 828846 - DNA, 75 bp, synthetic construct
  source 1..75: mol_type = other DNA
tacaagaatacggcatcaagtttcgtccaaataagacagcgtcgcctcatcttaacggaaaggttgaacgttcct

SEQ ID NO: 828847 - DNA, 75 bp, synthetic construct
  source 1..75: mol_type = other DNA
ttcgccttcgtcaccaactattccggtatgtccaccacgctggcgctggtactggcaggtacaggcgtgatgttc

SEQ ID NO: 828848 - DNA, 75 bp, synthetic construct
  source 1..75: mol_type = other DNA
ctcatttgcatcaacaagtgttgaaagcggcacccattgtcgcccaaccaacgccaatggatgcggtgtttaaat

SEQ ID NO: 828849 - DNA, 75 bp, synthetic construct
  source 1..75: mol_type = other DNA
gtaggcggtggcggaatcacgatgaacaatacgttcaacatccaggctaacaacggctggactgaggaagactca

SEQ ID NO: 828850 - DNA, 75 bp, synthetic construct
  source 1..75: mol_type = other DNA
accagatcgaactggaagacaaagcaaaacagcttaacgagcaatttaatcccgttgatgcgctcaaacaacgcc

SEQ ID NO: 828851 - DNA, 75 bp, synthetic construct
  source 1..75: mol_type = other DNA
gaagttatgggaaaaccttacttcagctttgtctgattcaaacgctaccaggggccagatcttacagttgacaga

SEQ ID NO: 828852 - DNA, 75 bp, synthetic construct
  source 1..75: mol_type = other DNA
aagaccaaaaatcattcatgcttttaacgatggtaatggacgagcatcaaaagtcttcattgatgacggtcgtag

SEQ ID NO: 828853 - DNA, 75 bp, synthetic construct
  source 1..75: mol_type = other DNA
ttttcttgccactgcagaatatagttttccaaaagattatactgtagatgaaaaacctgattctcttacggagat

SEQ ID NO: 828854 - DNA, 75 bp, synthetic construct
  source 1..75: mol_type = other DNA
tccacggaagaataattgatcatttgggcatacaaatgtatcaaagtccaacagctgctattgctgaaatggttt

SEQ ID NO: 828855 - DNA, 75 bp, synthetic construct
  source 1..75: mol_type = other DNA
ttgagaacaacgaataatcccattctgcaaatatcacagctaatcactgataccatcagtttgttagaccaagat

SEQ ID NO: 828856 - DNA, 75 bp, synthetic construct
  source 1..75: mol_type = other DNA
ggcgtgacaagcaattcaagcgtcagccagcagaacacgattcacatcaacacatccgatccggttgtcgccggg

SEQ ID NO: 828857 - DNA, 75 bp, synthetic construct
  source 1..75: mol_type = other DNA
gaaaaaagtaggtactcttcccgtcaataagctcgaccaatttgttgaataccctgacactctttggttcaatcc

SEQ ID NO: 828858 - DNA, 75 bp, synthetic construct
  source 1..75: mol_type = other DNA
gactattacacgctgtcggtgaaccgttacttcgatgccttcgggttcatgggtatcatcagaacgggtcatgct

SEQ ID NO: 828859 - DNA, 75 bp, synthetic construct
  source 1..75: mol_type = other DNA
gtgatgctctaccgtggtgtgttcagaatcggcgaaacttaccaccccggcgatacggtgacgtggggggctcgt

SEQ ID NO: 828860 - DNA, 75 bp, synthetic construct
  source 1..75: mol_type = other DNA
tccgatgattgagcagatggtgaaagaggcagtgagccatattcctgttccgcgcgacggtcgtgactacgatcc

SEQ ID NO: 828861 - DNA, 75 bp, synthetic construct
  source 1..75: mol_type = other DNA
ccgggcgattgttctgtgtagctcaaaataccgggcagtctgctgtgtatgcttatgctgattttccttcatcga

SEQ ID NO: 828862 - DNA, 75 bp, synthetic construct
  source 1..75: mol_type = other DNA
tcgttctgttactgatgttcctcgcactgtggctggttaactggtcgatgagcatcattggcgtgacggtcctgt

SEQ ID NO: 828863 - DNA, 75 bp, synthetic construct
  source 1..75: mol_type = other DNA
ggtgattatataaaatattccattgataattatcctgaccatgatgtttttgttgcatttagccgtgttttaaga

SEQ ID NO: 828864 - DNA, 75 bp, synthetic construct
  source 1..75: mol_type = other DNA
gagattaaattcataaaactcaccagcgatgaatcattgcggatggtgtttcaggaatataaaaaaacagcctcc

SEQ ID NO: 828865 - DNA, 75 bp, synthetic construct
  source 1..75: mol_type = other DNA
attatctggcagttaggcgacaaagacctggttatttccattgaaccagcagagcaagcggcgaggtttcactga

SEQ ID NO: 828866 - DNA, 75 bp, synthetic construct
  source 1..75: mol_type = other DNA
gatcctgcgggtaaaggtgtgtccgcttctactatactgaggaacaagcaatgtcatgcactatataaaaaacac

SEQ ID NO: 828867 - DNA, 75 bp, synthetic construct
  source 1..75: mol_type = other DNA
gtggttgtgttaccggttgatcaccctttagcacatgaaaaagagatcaccgccgcgcaactggatggcgtgaat

SEQ ID NO: 828868 - DNA, 75 bp, synthetic construct
  source 1..75: mol_type = other DNA
tgtattccggttcgcttgcgccgatcgttaaagcgtggtttgcgcaagaaaacagccagccaaatatcgtccagg

SEQ ID NO: 828869 - DNA, 75 bp, synthetic construct
  source 1..75: mol_type = other DNA
cccgggcggactggcgacgatttgcccggctacgcgcagaacgatgccggaaatatggacggaaggaataaataa

SEQ ID NO: 828870 - DNA, 75 bp, synthetic construct
  source 1..75: mol_type = other DNA
aattccacgtatatctataaatccagacatgagatgttgcctgttaatcttactccggaaacacttttcggctcc

SEQ ID NO: 828871 - DNA, 75 bp, synthetic construct
  source 1..75: mol_type = other DNA
cgtcaaaatcgattcagtaaggtgaatttcgatacccaacagatgatcgattttattaacagatttaatatgaat

SEQ ID NO: 828872 - DNA, 75 bp, synthetic construct
  source 1..75: mol_type = other DNA
ttgacttctcgcagagtcaacttactcatagtaatttttgtgaatgtcagattagaaattcaaacttcgatcatt

SEQ ID NO: 828873 - DNA, 75 bp, synthetic construct
  source 1..75: mol_type = other DNA
tttttatcgtcaaatctacaacatgcaactttcgaatgtaaagaaattgagaattgcaattttactaaggcaaca

SEQ ID NO: 828874 - DNA, 75 bp, synthetic construct
  source 1..75: mol_type = other DNA
tgataaaaataacaatttttttatccaacttatcgatcaggccttacgatcaacggatgatatgatcaaagcaaa

SEQ ID NO: 828875 - DNA, 75 bp, synthetic construct
  source 1..75: mol_type = other DNA
gcggcaataactctttgatgaaacatgatgtggtgcaaggaaataataaattagatcttgatttactacgtaatt

SEQ ID NO: 828876 - DNA, 75 bp, synthetic construct
  source 1..75: mol_type = other DNA
gggagcttttggggttggtgctgttctccaaaataagcccacagatgccagttcatccttcatcagtgatgctga

SEQ ID NO: 828877 - DNA, 75 bp, synthetic construct
  source 1..75: mol_type = other DNA
gagcaggagctgcaattaccgattgttgcccaggtcacctttgccgatcgcgtgatgacgctggcctctcgcagt

SEQ ID NO: 828878 - DNA, 75 bp, synthetic construct
  source 1..75: mol_type = other DNA
ggtggtaatgaacaacgttccgccacatccggccaactatttacagcgcgccgggcgagccgggcgtagtaaaga

SEQ ID NO: 828879 - DNA, 75 bp, synthetic construct
  source 1..75: mol_type = other DNA
caagagatattactgcgtaccacctcaattctgtacacatcagtgcccgtcgtttccccaggatttttcagtggg

SEQ ID NO: 828880 - DNA, 75 bp, synthetic construct
  source 1..75: mol_type = other DNA
cgaaataactgctattcaccagcaaatccagcggttgggcatcgacaatcacatcgccataaatcagatcgacgc

SEQ ID NO: 828881 - DNA, 75 bp, synthetic construct
  source 1..75: mol_type = other DNA
ttgaccgaacgcattttggctaatagccagaaacgttacggcaaatcaggcgcgctggtgtttgtcggcgggcgt

SEQ ID NO: 828882 - DNA, 75 bp, synthetic construct
  source 1..75: mol_type = other DNA
gggccacacagccggataaaatagcgcagatgtgccagcaggcgggagtgccgacactgaatctggatctgccgg

SEQ ID NO: 828883 - DNA, 75 bp, synthetic construct
  source 1..75: mol_type = other DNA
acattggctatgtatggagttgcagttcagtttattgaacaagcatttttattaatagttatcataatacaatct

SEQ ID NO: 828884 - DNA, 75 bp, synthetic construct
  source 1..75: mol_type = other DNA
accctcaaacaccaaaatcatcagtgccgtgggcgcagctgcagtctgcaggtacatcggacataaatttcaaga

SEQ ID NO: 828885 - DNA, 75 bp, synthetic construct
  source 1..75: mol_type = other DNA
ctccaaaataagcccacagatgccagttcatccttcatcagtgatgctgatggcaatactctgtgggctccttcg

SEQ ID NO: 828886 - DNA, 75 bp, synthetic construct
  source 1..75: mol_type = other DNA
aagaagcacagtcactgatgaataacacgcgaattaccggcgttcactataccgatcgctatctgcaaaacccgg

SEQ ID NO: 828887 - DNA, 75 bp, synthetic construct
  source 1..75: mol_type = other DNA
atgggacgcctgtctggggaagtgctggcgacgttcatcgtattgcggtgagcggagctggcgctttcgtctcct

SEQ ID NO: 828888 - DNA, 75 bp, synthetic construct
  source 1..75: mol_type = other DNA
aacgccagttggcggaacgggatgaagagctgaccatcctccaaaaggccgcgacatacttcgcgaagcgcctga

SEQ ID NO: 828889 - DNA, 75 bp, synthetic construct
  source 1..75: mol_type = other DNA
gtttcgtgaagtctcaatcagtggtgatattgtaagcgtaaaattttatagaaatgaaaaaatagaatgcgcttg

SEQ ID NO: 828890 - DNA, 75 bp, synthetic construct
  source 1..75: mol_type = other DNA
aaatacctcagctaaaagccatgctttccatgcgtaatttacttcgtgatttaaaagcgaaccttctgaataacc

SEQ ID NO: 828891 - DNA, 75 bp, synthetic construct
  source 1..75: mol_type = other DNA
ttttgttcgccgcactgaccacgctgtgcatgttgtcgctgatctccgcgttttatcaggccgataaagttgccg

SEQ ID NO: 828892 - DNA, 75 bp, synthetic construct
  source 1..75: mol_type = other DNA
actacatgcatcgtgcagtttttcgcccttggggtaaattcgatgcaatagaccaaggcgatagatatagagtaa

SEQ ID NO: 828893 - DNA, 75 bp, synthetic construct
  source 1..75: mol_type = other DNA
tatagatggttctggctcatttaatttaggtgaaggtaataacaactttatagtcggaggatatatccaggggaa

SEQ ID NO: 828894 - DNA, 75 bp, synthetic construct
  source 1..75: mol_type = other DNA
atacacaaaggagcttgctgatgctaacgcgactatcgaaagtcttcgtgctgatgtttctgctgggcgtaagcg

SEQ ID NO: 828895 - DNA, 75 bp, synthetic construct
  source 1..75: mol_type = other DNA
atgagcaagagtgaaaaaagaaaccggactgaactgcttctggggattcgttgtctgccagaggaaaaggcactg

SEQ ID NO: 828896 - DNA, 75 bp, synthetic construct
  source 1..75: mol_type = other DNA
gaagtttattgccgatgtcaggacggcgcagatcgctgatctggtggtcattaaggatggttcagaggcggacgg

SEQ ID NO: 828897 - DNA, 75 bp, synthetic construct
  source 1..75: mol_type = other DNA
gctaacggtaatacgcttgccggacagacggtcagcgtgttggcaggcaacagcgcaacggtcactccgacggtg

SEQ ID NO: 828898 - DNA, 75 bp, synthetic construct
  source 1..75: mol_type = other DNA
atgtcaggacggcgaagatcgctgatctggaggtcattaaggatggttcagaggcggacggttcgacggcgaaca

SEQ ID NO: 828899 - DNA, 75 bp, synthetic construct
  source 1..75: mol_type = other DNA
aaatgttaaaaacatagttgacgatctaaaaaagagaaaacgtgctgaatactacatgcatcgtgcagtttttcg

SEQ ID NO: 828900 - DNA, 75 bp, synthetic construct
  source 1..75: mol_type = other DNA
gcctgatccgctatgtgaaaaatcccgatttatgtcctgctgaattgctgccatggctggcctgggaaatggcgg

SEQ ID NO: 828901 - DNA, 75 bp, synthetic construct
  source 1..75: mol_type = other DNA
ctgctccgacggtcaccacgcagccggacgggacggtggagatctctgtcaccagccagaccgccggaatcagtg

SEQ ID NO: 828902 - DNA, 75 bp, synthetic construct
  source 1..75: mol_type = other DNA
aacagtgtgagtgtcagcctgacccagggcagtaatccggctaaagcggggaataaagtggagtttgtggttgac

SEQ ID NO: 828903 - DNA, 75 bp, synthetic construct
  source 1..75: mol_type = other DNA
tcatttggaatagggcctttgattgtaagaaagggaaaaagttctactcaaatcgtatatagacgagctttaaac

SEQ ID NO: 828904 - DNA, 75 bp, synthetic construct
  source 1..75: mol_type = other DNA
gtgtatatgctccgttttttgggggtcgaaccacataatgaacatgtatttaggttggttatgctgattaaatca

SEQ ID NO: 828905 - DNA, 75 bp, synthetic construct
  source 1..75: mol_type = other DNA
tgatagttttgacgatgccgttgaatgctgcgcagacctgaatgttccgttctttgtggatgcgggaaacaaaaa

SEQ ID NO: 828906 - DNA, 75 bp, synthetic construct
  source 1..75: mol_type = other DNA
ataacaagttcgatgattttatgcgtcaacatcgattcagcaaggtggatttcgatacccaacagatgatccatt

SEQ ID NO: 828907 - DNA, 75 bp, synthetic construct
  source 1..75: mol_type = other DNA
attaatatttcatctttattaaaagtatactcaccaaccggtttaaaagctgtgcttaaagattttataaatacg

SEQ ID NO: 828908 - DNA, 75 bp, synthetic construct
  source 1..75: mol_type = other DNA
aaagcgttttacactgctgttctggcggaacttaagatccccatggttattaccgatgacgattatatctgggct

SEQ ID NO: 828909 - DNA, 75 bp, synthetic construct
  source 1..75: mol_type = other DNA
aagcatttgatattcacaaaattgataaaactaaagacaatatattattttccggtacaggtgaaaataatacgc

SEQ ID NO: 828910 - DNA, 75 bp, synthetic construct
  source 1..75: mol_type = other DNA
ggtgaatgtaaaaaccgccgcgacgtccgatgaaatggtcagtctgatgaccaaagggggttacgatctggttac

SEQ ID NO: 828911 - DNA, 75 bp, synthetic construct
  source 1..75: mol_type = other DNA
gcacagggtggtgccaatggtctggcggggtatccaacgaccagcaatatgtgggtgatcggcaaaagcaaagcc

SEQ ID NO: 828912 - DNA, 75 bp, synthetic construct
  source 1..75: mol_type = other DNA
cactgacagtgactcatccggatcaaagcaccgaaaacgtgacacataacgtcaccggagatgaggttactgccg

SEQ ID NO: 828913 - DNA, 75 bp, synthetic construct
  source 1..75: mol_type = other DNA
ggccctgaccattccagaagtggctgatagtgtggccaatgcggctgagctgaaagatggtttacaggcagaagt

SEQ ID NO: 828914 - DNA, 75 bp, synthetic construct
  source 1..75: mol_type = other DNA
aacagtgtgagtgtcagcctgactcagggcagtaacccggctaaagcggggaataaagtggagtttgtggttgac

SEQ ID NO: 828915 - DNA, 75 bp, synthetic construct
  source 1..75: mol_type = other DNA
acgatcaaaaatcctttccccggggcacgtatgccacacaccgggggggactctggcgggcgtatgaaaaaacgc

SEQ ID NO: 828916 - DNA, 75 bp, synthetic construct
  source 1..75: mol_type = other DNA
gatccacaaccgcaggtagaagctctgctgcgggatgccgcacaactggcctgtgatatggcaagtctggttgat

SEQ ID NO: 828917 - DNA, 75 bp, synthetic construct
  source 1..75: mol_type = other DNA
gacatattgcaaaaaattaacgaattaacaaaagaacataataaaattgtgaaagagaaagcacaactagttagt

SEQ ID NO: 828918 - DNA, 75 bp, synthetic construct
  source 1..75: mol_type = other DNA
ctgacatttgggaaaatgagaaccctgcagcggctacttcatgggataagtgggataacgaagttttcggagatc

SEQ ID NO: 828919 - DNA, 75 bp, synthetic construct
  source 1..75: mol_type = other DNA
catattatttttccctgcattcaatgcttctttattttttaccggaattaaacctctatattcaataataaaagg

SEQ ID NO: 828920 - DNA, 75 bp, synthetic construct
  source 1..75: mol_type = other DNA
acggggcttggttcacagttacaggctatgacattttgtaaattaattgataaaagcactccattacttattaat

SEQ ID NO: 828921 - DNA, 75 bp, synthetic construct
  source 1..75: mol_type = other DNA
accggatacacgaattcagacgcctgcttacggagcccccgtcacttctcccgggaaaaacgataccaggtccgg

SEQ ID NO: 828922 - DNA, 75 bp, synthetic construct
  source 1..75: mol_type = other DNA
tttttgcactgtgcagaatgtgtctttttggcaccttccgacagtgcaaaatttatcgcgtttttgtgcaaaaaa

SEQ ID NO: 828923 - DNA, 75 bp, synthetic construct
  source 1..75: mol_type = other DNA
gtctttggcctgctgatgagttatccgctggcttatgcgctggtgcgaacccgcaccgtgtggatcaaatccgcg

SEQ ID NO: 828924 - DNA, 75 bp, synthetic construct
  source 1..75: mol_type = other DNA
ttttctgataatgctgtaaaacttacgacgcttattaaaaataaaattcctgtttttgatacaactatcaattta

SEQ ID NO: 828925 - DNA, 75 bp, synthetic construct
  source 1..75: mol_type = other DNA
ttatataacggtgatttccgatcgcgatggtcatgcgctggccttaacggacgatcgtggcatagagagtctcgc

SEQ ID NO: 828926 - DNA, 75 bp, synthetic construct
  source 1..75: mol_type = other DNA
attagtcagctatcgcgattatctttattctacccccgctgaacttgttgattttacacaaggtaagattctcct

SEQ ID NO: 828927 - DNA, 75 bp, synthetic construct
  source 1..75: mol_type = other DNA
ttacgagaccgtcatcaccgccgggtcatccaccgtttttatcgatggtctccccgcagcccgccagggagatcc

SEQ ID NO: 828928 - DNA, 75 bp, synthetic construct
  source 1..75: mol_type = other DNA
agcacggacacatccgctgtaccggcgctttccacctgcaggaacacagtgacaactttatggttttgcggcgca

SEQ ID NO: 828929 - DNA, 75 bp, synthetic construct
  source 1..75: mol_type = other DNA
tgaaggtgcctttgcggatgaggccggaagacggtttatcaattacctgctgcaacctgtcgaactcctcagcca

SEQ ID NO: 828930 - DNA, 75 bp, synthetic construct
  source 1..75: mol_type = other DNA
gcatgtgcgcgatgcgcaggtcacgccaatgcattttcactggcgtaagcgtgaggacattatcaatcgcggcgg

SEQ ID NO: 828931 - DNA, 75 bp, synthetic construct
  source 1..75: mol_type = other DNA
ccactttgcggttcactcagcgtcttctgcacatttttacgtatgcggccggggatcggaaatacctgcatcatg

SEQ ID NO: 828932 - DNA, 75 bp, synthetic construct
  source 1..75: mol_type = other DNA
accctcgaaaaatcgctaaactctgacgcgcacaggcggaggaaaaaacctccgcctctttcactcattaagact

SEQ ID NO: 828933 - DNA, 75 bp, synthetic construct
  source 1..75: mol_type = other DNA
ggcggacggtaaaagtctcaccccggatgatgtgcgtccgatgcttgaacagatggtgaaggaggcggtaagcca

SEQ ID NO: 828934 - DNA, 75 bp, synthetic construct
  source 1..75: mol_type = other DNA
caagggcgtgcggaatggcatcaccgggtgccgaaaggcgatgaaattgaacaggcactggaggaactcaaagat

SEQ ID NO: 828935 - DNA, 75 bp, synthetic construct
  source 1..75: mol_type = other DNA
agacccttgagcgtaaagcgcgggcggtacgccgccatatcgtgcgcttaaatgccaatagcccggcaggtggac

SEQ ID NO: 828936 - DNA, 75 bp, synthetic construct
  source 1..75: mol_type = other DNA
aaaaaacttgataccagtccatataaaatgtcaattatcctagcattagcaattgattgcgagagaaataatgca

SEQ ID NO: 828937 - DNA, 75 bp, synthetic construct
  source 1..75: mol_type = other DNA
ccgtaaatgacggttcaacagataaaacccgtgccatcctggatcgcatggctgcacaaattccccatttgcggg

SEQ ID NO: 828938 - DNA, 75 bp, synthetic construct
  source 1..75: mol_type = other DNA
agtactactggaaaacccacgcacacccaaacatattcagaagcgtgagggatatagtgccatcaaagcgctggc

SEQ ID NO: 828939 - DNA, 75 bp, synthetic construct
  source 1..75: mol_type = other DNA
atattttatcattccagacatggctatgtcggcaggtacaatatggtgcatgtctggagataaaatttacatgga

SEQ ID NO: 828940 - DNA, 75 bp, synthetic construct
  source 1..75: mol_type = other DNA
tatacgcccatgacacaggatttcgctgaacacctgtacccggcgcttgttcttgactatatggatgataagaca

SEQ ID NO: 828941 - DNA, 75 bp, synthetic construct
  source 1..75: mol_type = other DNA
atgactattgatgttgaaaaaaaacttcaaaaaataaaggaatatcattcagtattggagttggcaataattcag

SEQ ID NO: 828942 - DNA, 75 bp, synthetic construct
  source 1..75: mol_type = other DNA
taaaggaatatcattcagtattggagttggcaataattcagggtgcgaatgccatatttcctgtgttggtattcc

SEQ ID NO: 828943 - DNA, 75 bp, synthetic construct
  source 1..75: mol_type = other DNA
agaactcgaagcatacaagcaacgtgaagagctttggcggcgccgatggcagcaaattgcctttcatgtgcggca

SEQ ID NO: 828944 - DNA, 75 bp, synthetic construct
  source 1..75: mol_type = other DNA
agccgctattttaacgtgccggtacctgaactgccggaggacaaacctgcccgccggtggtggccgttcggcaaa

SEQ ID NO: 828945 - DNA, 75 bp, synthetic construct
  source 1..75: mol_type = other DNA
ccactaatcagcttttcacgtacatgaatcgcggggatattgcggaatttaaattcagtccgctgtttaccacgc

SEQ ID NO: 828946 - DNA, 75 bp, synthetic construct
  source 1..75: mol_type = other DNA
ataagtgatgatggcgataatgatcatcgctgcgtttataaaagcggaaaatgctataacatagcaacaaaactg

SEQ ID NO: 828947 - DNA, 75 bp, synthetic construct
  source 1..75: mol_type = other DNA
caaactctttctatccgctggagatgaaagagaattacactcaagctgactcatggccagatgatgctgttgaag

SEQ ID NO: 828948 - DNA, 75 bp, synthetic construct
  source 1..75: mol_type = other DNA
gctggattatctggaagcactggaactggtggatacgtccagtgcgccagatattgaatggcctacacctccggc

SEQ ID NO: 828949 - DNA, 75 bp, synthetic construct
  source 1..75: mol_type = other DNA
gctggattatctggaagcactggatctggtggatacttccagtgcgccagatattgaatggcctacacctccggc

SEQ ID NO: 828950 - DNA, 75 bp, synthetic construct
  source 1..75: mol_type = other DNA
taaaattgaaattaaatatactaatcctgattttgatttctataaaaagaaaatagaacaatatatcaacgaggc

SEQ ID NO: 828951 - DNA, 75 bp, synthetic construct
  source 1..75: mol_type = other DNA
aaaactattgccgatatttattcatgtgaaaatttaacgcagacacaggtaatgaccgctgcaacaggagtacgt

SEQ ID NO: 828952 - DNA, 75 bp, synthetic construct
  source 1..75: mol_type = other DNA
taaagccgctattggtcgtctgaaaggtgacgagctggaacaatataatttatggctggattatctggacgcact

SEQ ID NO: 828953 - DNA, 75 bp, synthetic construct
  source 1..75: mol_type = other DNA
aaacaaatatgacaatataattaaaagcatggatgtatatatgctaatcattgtatgctcctttaatgacaggat

SEQ ID NO: 828954 - DNA, 75 bp, synthetic construct
  source 1..75: mol_type = other DNA
tggccagagtacggaaaaaacattttccctgccggtgatgctctaccgcggtgtgttcagagccggtgaaaccta

SEQ ID NO: 828955 - DNA, 75 bp, synthetic construct
  source 1..75: mol_type = other DNA
cagcatgaccggcgaacggtcgttcactgtggtggtccggcagagcagtggccagtgtacggaaaaaacattttc

SEQ ID NO: 828956 - DNA, 75 bp, synthetic construct
  source 1..75: mol_type = other DNA
cgagctacacgtctgttgatttggatctggacgcggatgcagaacttcaggcaggtacttattctacaaccttct

SEQ ID NO: 828957 - DNA, 75 bp, synthetic construct
  source 1..75: mol_type = other DNA
gtgcttagaccgcattgctataagctatcaacaagatgcaattagagaagatcatagtgcggaccaaggtgattg

SEQ ID NO: 828958 - DNA, 75 bp, synthetic construct
  source 1..75: mol_type = other DNA
gctgaatgtctgtgccattgatgctgatgatcttgtccattggttagaaatttatcctgcggtcgctcagtggtt

SEQ ID NO: 828959 - DNA, 75 bp, synthetic construct
  source 1..75: mol_type = other DNA
gcaagctcgccaattactgaagtctgcaggtcgtggtgaaataggtgatgacaagattggcatgattctctctgc

SEQ ID NO: 828960 - DNA, 75 bp, synthetic construct
  source 1..75: mol_type = other DNA
aaagtttaagcaagcggtatggcgatggtgacaccgctgtctttgccttgagagacgtgaatatgcatgttgcgc

SEQ ID NO: 828961 - DNA, 75 bp, synthetic construct
  source 1..75: mol_type = other DNA
caacaagattttttcaccagagtctgggaagaagaaggtatgcgtgtgcctactaacacgttatatcagaacatt

SEQ ID NO: 828962 - DNA, 75 bp, synthetic construct
  source 1..75: mol_type = other DNA
cgcggcgagaaagacgggggcgacgactatcaccttctttgctggcattcgctggatgtagccgcgatgggctat

SEQ ID NO: 828963 - DNA, 75 bp, synthetic construct
  source 1..75: mol_type = other DNA
atgatggtaaatatccaggtgttctttataagcagagtggttcaggaattacaactccagtaactcttattccag

SEQ ID NO: 828964 - DNA, 75 bp, synthetic construct
  source 1..75: mol_type = other DNA
ctggaggcagcaaagttggtgctatgagtatttcaggcctcagtggcagtgatggttgggccatttataatggta

SEQ ID NO: 828965 - DNA, 75 bp, synthetic construct
  source 1..75: mol_type = other DNA
aatttaaagaaattgatgaaaaaatttctgatggagatcttatttttggtatcgcagtagtaataaaagaaattc

SEQ ID NO: 828966 - DNA, 75 bp, synthetic construct
  source 1..75: mol_type = other DNA
atcggcgaattgactgggcggctcttcgacatgaaaggcgctgctgatacctcgatgggcagtaataaaggctgg

SEQ ID NO: 828967 - DNA, 75 bp, synthetic construct
  source 1..75: mol_type = other DNA
aactggatgctgcagcccagcagtccgggaagggaatggataacctcgaccagagcacgtctcaaaccggatccg

SEQ ID NO: 828968 - DNA, 75 bp, synthetic construct
  source 1..75: mol_type = other DNA
cggtcaggtgtaacaccgggaattcagggttggtcaacgtgacgttaagtttgtctgcgaccagtgatccaaatt

SEQ ID NO: 828969 - DNA, 75 bp, synthetic construct
  source 1..75: mol_type = other DNA
aggctacgcagggcagtgacggcacctggactatcgatacattcatcgctgacatgaataatggtggaccagcaa

SEQ ID NO: 828970 - DNA, 75 bp, synthetic construct
  source 1..75: mol_type = other DNA
ggcatcggagctatggctggcatcctggcactgtcaggaaagcgtaagaacggcgggccggttagtgcaagcgga

SEQ ID NO: 828971 - DNA, 75 bp, synthetic construct
  source 1..75: mol_type = other DNA
agcttgtagatctggctagagaagcagccaacgcgaagataaacgtcgacagtctgaacaagtccactgacaacc

SEQ ID NO: 828972 - DNA, 75 bp, synthetic construct
  source 1..75: mol_type = other DNA
ccagaccatgaacaccttcttgaagctgacctctgcttcatgtgggcgtctgactctttcgcgaagaaggggcgc

SEQ ID NO: 828973 - DNA, 75 bp, synthetic construct
  source 1..75: mol_type = other DNA
tcacattgcgcggccacgatgtcgaagagtttgtcggtgtagtacgtcgatacggggcgagcactgacgtgcaag

SEQ ID NO: 828974 - DNA, 75 bp, synthetic construct
  source 1..75: mol_type = other DNA
gcgagtgccgacgtgcaagagctggtggacgcagcaaatcaacctgcagaggtggcaaaacttaacatcgccaga

SEQ ID NO: 828975 - DNA, 75 bp, synthetic construct
  source 1..75: mol_type = other DNA
actgggttcatgctccgttaacgccggtgagtctattgaggttgacttaggcgatgtatttgccgccaatttccg

SEQ ID NO: 828976 - DNA, 75 bp, synthetic construct
  source 1..75: mol_type = other DNA
gcacggatgaacgtgtatcccgttagcactactggtgtgccaccagaaaccggacgttttgaggcgacggcaaca

SEQ ID NO: 828977 - DNA, 75 bp, synthetic construct
  source 1..75: mol_type = other DNA
tgctggatattctgattacatggctgcaggacaatatcgactgcgaatcaggaattatcttcgacaacgatgagg

SEQ ID NO: 828978 - DNA, 75 bp, synthetic construct
  source 1..75: mol_type = other DNA
aactggatgctgcggcccagcagtccggtaagggaatggataatcttgatcagagcacgtctcaaaccgggtccg

SEQ ID NO: 828979 - DNA, 75 bp, synthetic construct
  source 1..75: mol_type = other DNA
gcaccaacgatgcccattcagcaggacaggccagagtttccctggggcggtgtagctatttgcaaaccgaatgga

SEQ ID NO: 828980 - DNA, 75 bp, synthetic construct
  source 1..75: mol_type = other DNA
tatccatcgattaaaaaaaggcttttcaacaacgcacccgctattgaacaaagaagttcaggctttaaaaaaact

SEQ ID NO: 828981 - DNA, 75 bp, synthetic construct
  source 1..75: mol_type = other DNA
aaggacgggaccgtcagttgtgtgcttcgactgccggaccggacgtagccatgagtatcctgaaaactggcttca

SEQ ID NO: 828982 - DNA, 75 bp, synthetic construct
  source 1..75: mol_type = other DNA
atgttgtagtcgatggtgaaacgggatacctttgcaatgtacgtgattatattgggttagctaatgtaatgcgta

SEQ ID NO: 828983 - DNA, 75 bp, synthetic construct
  source 1..75: mol_type = other DNA
gataccagttatttcacccccagccaggtttcgtgcaagactaaatataatgataatattacatttcttcttata

SEQ ID NO: 828984 - DNA, 75 bp, synthetic construct
  source 1..75: mol_type = other DNA
gatgtcgatgggcgttatctttatcactcacgatatgggcgtggtggcagagattgccgatcgggtactggtgat

SEQ ID NO: 828985 - DNA, 75 bp, synthetic construct
  source 1..75: mol_type = other DNA
tacaaccatgcgcagtatctcgataagcgcagagaaatgatgcagtggtgggcggattggattgatgaaaaggtg

SEQ ID NO: 828986 - DNA, 75 bp, synthetic construct
  source 1..75: mol_type = other DNA
atgggatacggccaacgccattaaagcgcaggccgcagcagagaagctattgccggaagcgcgtgaaaacaccag

SEQ ID NO: 828987 - DNA, 75 bp, synthetic construct
  source 1..75: mol_type = other DNA
cagcggtaccggtggcgctaacagtgagttcaatcgcgccgaatccatcatcgaggcgcttggtaaccaactcgc

SEQ ID NO: 828988 - DNA, 75 bp, synthetic construct
  source 1..75: mol_type = other DNA
agaatatattgatgactgcagcatgtttgactgcagcacctactgttaatgcggccgtttcccttgaccgtcccc

SEQ ID NO: 828989 - DNA, 75 bp, synthetic construct
  source 1..75: mol_type = other DNA
agtgtcctggtgctgatggcgttcgattacccgaacgggacttatactatcgcggcgctgccgattatcggtatt

SEQ ID NO: 828990 - DNA, 75 bp, synthetic construct
  source 1..75: mol_type = other DNA
gtggtgctgaccgctgccctctccagcctgaactcaggtctgtactgcaccggacgtattctgcgctcaatggcg

SEQ ID NO: 828991 - DNA, 75 bp, synthetic construct
  source 1..75: mol_type = other DNA
gctcccgtgcgcaggttgatgaagcattacgcgtctattatgcactcgaccccgatgcgttagcacaactggatg

SEQ ID NO: 828992 - DNA, 75 bp, synthetic construct
  source 1..75: mol_type = other DNA
ccagactcgcgattctgtgtaccagcatcagccagaaacggaacaaaacgaccagaaagctgaacagaacagccc

SEQ ID NO: 828993 - DNA, 75 bp, synthetic construct
  source 1..75: mol_type = other DNA
gcgctggccatctcaaataaagcagcgcaactcgaaccgctggagattcgcgatctccacaaactggttcgtgac

SEQ ID NO: 828994 - DNA, 75 bp, synthetic construct
  source 1..75: mol_type = other DNA
ggtgacgtgggggggctcgttgtggcactgcaacagtatgaccggtgataagcccggagaagctcattcatcagg

SEQ ID NO: 828995 - DNA, 75 bp, synthetic construct
  source 1..75: mol_type = other DNA
ttcgaatgataacgaaaaaaaacaggtttcttcagagagattaacgcttgataattatattgatgatttacattt

SEQ ID NO: 828996 - DNA, 75 bp, synthetic construct
  source 1..75: mol_type = other DNA
aagtttacacctacagcctctttttctggtcgctattcaccttcctgcaaggctttgttgatatgttcccgctgg

SEQ ID NO: 828997 - DNA, 75 bp, synthetic construct
  source 1..75: mol_type = other DNA
tcgcgaaaataccggtaccggcagacggtaaaagtatcactccggatgatgtgcatccgatgcttgaacagatgg

SEQ ID NO: 828998 - DNA, 75 bp, synthetic construct
  source 1..75: mol_type = other DNA
ccatccggtgctaacgctggcggcggcattcttaccgatcgcggcgaaggttttgtccacgatgatgcatcagtg

SEQ ID NO: 828999 - DNA, 75 bp, synthetic construct
  source 1..75: mol_type = other DNA
ttcgtgcactgggcgaagaattctccacggtgctggcggatttacagtgcacatttgaggggaagatggccgcgc

SEQ ID NO: 829000 - DNA, 75 bp, synthetic construct
  source 1..75: mol_type = other DNA
acaggatgatgaagaaaaaccgcagccatctggcgcaatggcagatgaacaggcaacgactgaagcagtggaacc

SEQ ID NO: 829001 - DNA, 75 bp, synthetic construct
  source 1..75: mol_type = other DNA
tggcatcaccatgatggcaatccccttcgatgacaacatcaacggtgaagatgccacaacagctggcgatgacta

SEQ ID NO: 829002 - DNA, 75 bp, synthetic construct
  source 1..75: mol_type = other DNA
gctgtggcactgcaacagtatgaccgaagataaacccggagaagctcattcatcagcctggaccctggctgcaaa

SEQ ID NO: 829003 - DNA, 75 bp, synthetic construct
  source 1..75: mol_type = other DNA
tacgcacaatcattgaactgggaaaatccatagacttcgatgccaggacgcctattcaattcgaaggcatacgcc

SEQ ID NO: 829004 - DNA, 75 bp, synthetic construct
  source 1..75: mol_type = other DNA
aatttattcgacaaaaaaagcaagagtctcataaccaatttgatattgattataaaatgaattatggtgaccttg

SEQ ID NO: 829005 - DNA, 75 bp, synthetic construct
  source 1..75: mol_type = other DNA
tggggactgagtgaggaggactgggggcgttatcaggcactgatggcgggaccccgcgggatacagtcgccgggt

SEQ ID NO: 829006 - DNA, 75 bp, synthetic construct
  source 1..75: mol_type = other DNA
ccttcacaaatgccgcccactcaaacagagcggcatttttcttccccgcaacttcaattctgttttgcgtgcctg

SEQ ID NO: 829007 - DNA, 75 bp, synthetic construct
  source 1..75: mol_type = other DNA
atgcataaaacatttctaagttatcatcatgctaatgaacaagatttaaaagatagtataatagagacatatggc

SEQ ID NO: 829008 - DNA, 75 bp, synthetic construct
  source 1..75: mol_type = other DNA
gctggatgtagccgcgatgggctatttaatggttaaaagaaattgcttcgggctgctgattattttcgtcaatta

SEQ ID NO: 829009 - DNA, 75 bp, synthetic construct
  source 1..75: mol_type = other DNA
gtgatatccgcctgagtaaggtgctggcatccggtaagccggtggatatttatctggtggacagtcaggggaaag

SEQ ID NO: 829010 - DNA, 75 bp, synthetic construct
  source 1..75: mol_type = other DNA
ctggacccgctgacagcactgggtattgaggcccgtacaccggctgagcgccgggcgtatgccgaaaagtgggtg

SEQ ID NO: 829011 - DNA, 75 bp, synthetic construct
  source 1..75: mol_type = other DNA
gcgctggcggcagagaatgcggggctgaagtctggcgctatggacgaaatcaaggttatcaaccgtggagggcag

SEQ ID NO: 829012 - DNA, 75 bp, synthetic construct
  source 1..75: mol_type = other DNA
aaaaacatcagtgacgcgatgcgtaatattctggattggttcgaacggtatcccgatattgtaaaaaatataacc

SEQ ID NO: 829013 - DNA, 75 bp, synthetic construct
  source 1..75: mol_type = other DNA
aacactttatgttgaaaataaatcgtacgaggaaaaatatcattttgataatagtagggttgagttttttatttt

SEQ ID NO: 829014 - DNA, 75 bp, synthetic construct
  source 1..75: mol_type = other DNA
atatcccggacaaatatgtattgaaataacggaatcagtgattggacatgttacagataattttaaaaataattt

SEQ ID NO: 829015 - DNA, 75 bp, synthetic construct
  source 1..75: mol_type = other DNA
tcattaacagcattgaacacatcctgcgtgacaagttgtcaccatatgacaccgaagagatgcttgaggctatgc

SEQ ID NO: 829016 - DNA, 75 bp, synthetic construct
  source 1..75: mol_type = other DNA
gcgctggctgcggagaatgcggggctgaaacacgcaatggccgtaactcttgagcatgtgtcggtcacggatgca

SEQ ID NO: 829017 - DNA, 75 bp, synthetic construct
  source 1..75: mol_type = other DNA
ggaaaaattaacaaaaaatgataaaaaatatttcaaagagttagcacataagaaactgagacaaattgcagaaga

SEQ ID NO: 829018 - DNA, 75 bp, synthetic construct
  source 1..75: mol_type = other DNA
atgatactttggtctatgaaaaaagaaaccgatatccgtcgcggaaggcattgtgttttcctgaggcatgttcac

SEQ ID NO: 829019 - DNA, 75 bp, synthetic construct
  source 1..75: mol_type = other DNA
ctgcaaaactgcctgaggaaagccaattatcacaacgaagctagagtgatagataatattttacaggaaaaaaat

SEQ ID NO: 829020 - DNA, 75 bp, synthetic construct
  source 1..75: mol_type = other DNA
cacctggcgataccgcgtgtgggtcaggaggtgattgtggacttcctcaacggcgacccggaccagccgattatt

SEQ ID NO: 829021 - DNA, 75 bp, synthetic construct
  source 1..75: mol_type = other DNA
atgatactttggtctgtgaaaaaagaaaccgatatccgacgtggaaggcattgtgttttcctgaggcatgttcac

SEQ ID NO: 829022 - DNA, 75 bp, synthetic construct
  source 1..75: mol_type = other DNA
atgatactttggtctttgaaaaaagaaaccgatatccggcgcggaaggcattgtgttttcctgaggcatgttcac

SEQ ID NO: 829023 - DNA, 75 bp, synthetic construct
  source 1..75: mol_type = other DNA
atgatactttggtctttgaaaaaagaaaccgatatccgccggggaaggcattgtgttttcctgaggcatgttcac

SEQ ID NO: 829024 - DNA, 75 bp, synthetic construct
  source 1..75: mol_type = other DNA
ggggatgtgttattcagtcggcagtgctacgcgccaggggagcagttcgccgacccggtttatcggccagtcggc

SEQ ID NO: 829025 - DNA, 75 bp, synthetic construct
  source 1..75: mol_type = other DNA
tttgttcaggataatccagatgctgatctgcacgcttgctttattgccattaaaaaacactgtcctcctttggca

SEQ ID NO: 829026 - DNA, 75 bp, synthetic construct
  source 1..75: mol_type = other DNA
atcataaagctactcattattgcaccagtagcaatatcatcagtgatttttatagtaaaaaccaaaagccaaaaa

SEQ ID NO: 829027 - DNA, 75 bp, synthetic construct
  source 1..75: mol_type = other DNA
tgacacttgatgttgcaaaaaaaatactcagcccaataacatcatttgattacattattttatcactacacatcc

SEQ ID NO: 829028 - DNA, 75 bp, synthetic construct
  source 1..75: mol_type = other DNA
catatcaaacatcgtccggtttacgtaaaaagatcaatcagggcgcggtgagtttcgttgacctgcatttgagcg

SEQ ID NO: 829029 - DNA, 75 bp, synthetic construct
  source 1..75: mol_type = other DNA
tttttctccgatcaccgtttcacacaatatccatgctggaacacagcttagccccggaggatgggatataatacc

SEQ ID NO: 829030 - DNA, 75 bp, synthetic construct
  source 1..75: mol_type = other DNA
gcaaacacctggtcaggtggaaaaccgcgccttatatccccgccctgaaggatggggttttacggcgcaccggat

SEQ ID NO: 829031 - DNA, 75 bp, synthetic construct
  source 1..75: mol_type = other DNA
agttatgaggatgttatgaatgatttatatgcgcgggctaaaattaaaaacatggaagattggcttgataatgct

SEQ ID NO: 829032 - DNA, 75 bp, synthetic construct
  source 1..75: mol_type = other DNA
cggggaatactggagatggcgctgtgcaaacacgccatgaatgcaggccttgatgactttaaccgtactgcccgt

SEQ ID NO: 829033 - DNA, 75 bp, synthetic construct
  source 1..75: mol_type = other DNA
tctggggcgcatccatcatgggcattggttccgccaatatcatggttcagactgctgcagaaaacatcgctgaag

SEQ ID NO: 829034 - DNA, 75 bp, synthetic construct
  source 1..75: mol_type = other DNA
agtgaatggcacagacatcctcaacgaccagcgatggagtatctcgatccagtttgtggatggcggtatcgtgat

SEQ ID NO: 829035 - DNA, 75 bp, synthetic construct
  source 1..75: mol_type = other DNA
gctggaagagagtgaagataacgccagtgtcagcgaacaaactcgacagcagctgatggctctggccaacgcccc

SEQ ID NO: 829036 - DNA, 75 bp, synthetic construct
  source 1..75: mol_type = other DNA
acagcaaaaatcactcacttcgcatctggcttccggcacaccaggtacggtcgctggtttctcgctggcgttgga

SEQ ID NO: 829037 - DNA, 75 bp, synthetic construct
  source 1..75: mol_type = other DNA
atgaaaggtgactgggcggacagtcatcgcgatgaagctgacgatttttacagacagcaggctgatattaaatat

SEQ ID NO: 829038 - DNA, 75 bp, synthetic construct
  source 1..75: mol_type = other DNA
taccgtttccgttttgatgacagggaggggcgcggcacctggtactgcaatcagtgtggtgccggtgacggcctg

SEQ ID NO: 829039 - DNA, 75 bp, synthetic construct
  source 1..75: mol_type = other DNA
gattaactggaactgtgcagcctcgaaatccccaccgaagacccctgatgaaaagcaggatacgccggatatgag

SEQ ID NO: 829040 - DNA, 75 bp, synthetic construct
  source 1..75: mol_type = other DNA
tcggttgtcggcagtggacggcgcatttacggcagacgtggaagatgctcagaacgacgagtccgtcacaaagga

SEQ ID NO: 829041 - DNA, 75 bp, synthetic construct
  source 1..75: mol_type = other DNA
gccctggattgtgatggcgattagagacgtttgcgctctccgatatcttcagcttatgcatcaggccagtacagt

SEQ ID NO: 829042 - DNA, 75 bp, synthetic construct
  source 1..75: mol_type = other DNA
gagtctttcagccttacccgcagaggcatcaacggtcagcgctgaaataccatatcagactttccgtgattttgc

SEQ ID NO: 829043 - DNA, 75 bp, synthetic construct
  source 1..75: mol_type = other DNA
tccatgatcaatatggctatatgtatagcttgtattataatgataccagcataccttgcaagtaaccgtccaata

SEQ ID NO: 829044 - DNA, 75 bp, synthetic construct
  source 1..75: mol_type = other DNA
aggagcgtgacgcgctgggccgcctgctgcgcagtgacacgcagcacagtacacggaccttcagctacaaccgtc

SEQ ID NO: 829045 - DNA, 75 bp, synthetic construct
  source 1..75: mol_type = other DNA
agaaatcattattacaatgaagttatgcacgtaattaaattaacgtgggaaaagtaccctaaagccagtaaaaca

SEQ ID NO: 829046 - DNA, 75 bp, synthetic construct
  source 1..75: mol_type = other DNA
cagtggacgcgcgagtcggcagaaaccgcgatacagaatgctgacggtcagaccatgaatacggtggtggataca

SEQ ID NO: 829047 - DNA, 75 bp, synthetic construct
  source 1..75: mol_type = other DNA
gcgttaaagagatgctggagtccggcattaacgtctgctttggtcacgatgatgtcttcgatccgtggtatccgc

SEQ ID NO: 829048 - DNA, 75 bp, synthetic construct
  source 1..75: mol_type = other DNA
ttctgagtccgctccatggcgtgtttggcgatgagcatgagtaccgtccccgcaacggtactccttttacgatta

SEQ ID NO: 829049 - DNA, 75 bp, synthetic construct
  source 1..75: mol_type = other DNA
gtaccggcagcgtattgctttcgggcgtgagaacggcaggctggtgcgggtggcctccagcagcggacaccatct

SEQ ID NO: 829050 - DNA, 75 bp, synthetic construct
  source 1..75: mol_type = other DNA
attttaaaatatatgaaaatgttatttatcaaaaaagtaattcaaaaataccagatgaattgctgacttctctga

SEQ ID NO: 829051 - DNA, 75 bp, synthetic construct
  source 1..75: mol_type = other DNA
aaatgttggttttattgaaaatatagattgtgtggatttccctaatttaaaaaatttgttctataagcaagaaat

SEQ ID NO: 829052 - DNA, 75 bp, synthetic construct
  source 1..75: mol_type = other DNA
atattagttgttttttttacttggggatttgaatggctaatcttcaagttcaatgtaaaccttgaacctcatgat

SEQ ID NO: 829053 - DNA, 75 bp, synthetic construct
  source 1..75: mol_type = other DNA
aatcagccacctgagtgaaggccaccgtgtggcggtccactacggctatgacgataaaggccgtctgacgggcga

SEQ ID NO: 829054 - DNA, 75 bp, synthetic construct
  source 1..75: mol_type = other DNA
gctgggcggaacgccgctggtcgagtacacgcgggaccggctgcaccgcgagacggcccgtagcttcggcggggc

SEQ ID NO: 829055 - DNA, 75 bp, synthetic construct
  source 1..75: mol_type = other DNA
gcgagtatgatgaggcggggaggctgaaggcgcagacggatgcggcggggcggcggacggagtacagcctgcata

SEQ ID NO: 829056 - DNA, 75 bp, synthetic construct
  source 1..75: mol_type = other DNA
gatggggtatttatgagaaattcaatgaattcaaatgtttgtatgttgtatgataaaacggcattaatacatctt

SEQ ID NO: 829057 - DNA, 75 bp, synthetic construct
  source 1..75: mol_type = other DNA
acgcccagtacatcctgcgccgccgcgatgattacctggtgctgttcgaccgtgatgccctgagctgccgcttct

SEQ ID NO: 829058 - DNA, 75 bp, synthetic construct
  source 1..75: mol_type = other DNA
gggttgatactccagtggctgacgattccatcaagtgcagcagtcaaagctgtaacactggataatggtaattat

SEQ ID NO: 829059 - DNA, 75 bp, synthetic construct
  source 1..75: mol_type = other DNA
ttctggtaaacttggcttggctgattttggttttttagggggcgttaatcactatgttctgatcattggtgtttc

SEQ ID NO: 829060 - DNA, 75 bp, synthetic construct
  source 1..75: mol_type = other DNA
ttttagggccagattcttcattaatatataatgggtatgaacagacattagaagttactatgcatggaatgatat

SEQ ID NO: 829061 - DNA, 75 bp, synthetic construct
  source 1..75: mol_type = other DNA
gcatccgctggccgcgtcacgtcagccgtatcccgcatcgctgccggacgtgctcgcgcagtttggcggcgtgga

SEQ ID NO: 829062 - DNA, 75 bp, synthetic construct
  source 1..75: mol_type = other DNA
gcccaaatgctggatgtcggtaagcgtgcagcaagaaccgtattgacggggatgtgttattcagtcggcagtgct

SEQ ID NO: 829063 - DNA, 75 bp, synthetic construct
  source 1..75: mol_type = other DNA
tatatttggcaattattatttatttggatcgattggggtaaatccacacacaagagcatttgatggcggtggaat

SEQ ID NO: 829064 - DNA, 75 bp, synthetic construct
  source 1..75: mol_type = other DNA
caggtgcgggtggattatgccaaagcgtatgcactatttaatcaggccgcgcagcacggtgtgaatttagcatag

SEQ ID NO: 829065 - DNA, 75 bp, synthetic construct
  source 1..75: mol_type = other DNA
ggggagggggggctggccgcacaagcccgtgcagtatttccccggcaaacacccctgtgaaacatcggcagacat

SEQ ID NO: 829066 - DNA, 75 bp, synthetic construct
  source 1..75: mol_type = other DNA
gtacgattttaaaagggaagttcaaaagaaatagattggggtatggtttttctcctgaagatagttgttgtcata

SEQ ID NO: 829067 - DNA, 75 bp, synthetic construct
  source 1..75: mol_type = other DNA
cacgacgtaccccgccagacatgcttcctcgggaacaaaattgcgtagcgatggcattatctgcgtgttttaggc

SEQ ID NO: 829068 - DNA, 75 bp, synthetic construct
  source 1..75: mol_type = other DNA
cgataccttgctttggtcttgtaacctctttgtcactactggagaagtctggggtttcttttgaatttccaagtc

SEQ ID NO: 829069 - DNA, 75 bp, synthetic construct
  source 1..75: mol_type = other DNA
ggaaatgcattggttgaactgaatggcagccataaaagcgttttagcgctcaattcgctggcgtatcgtgacgat

SEQ ID NO: 829070 - DNA, 75 bp, synthetic construct
  source 1..75: mol_type = other DNA
gatgcaggtttgccatgtttagttacaagaggtgttaatatgacaagtattattgagaaatatcatgttggatgg

SEQ ID NO: 829071 - DNA, 75 bp, synthetic construct
  source 1..75: mol_type = other DNA
gtaacaaaatagaaccttcaaatggcataggtcgtttattaccagaaatgatagagatgcaaaataaatttagta

SEQ ID NO: 829072 - DNA, 75 bp, synthetic construct
  source 1..75: mol_type = other DNA
acacatcacggatgaccgaggtgctggtgcagtatgatgaaacgctgacggcgctggatgaactggaagcggcct

SEQ ID NO: 829073 - DNA, 75 bp, synthetic construct
  source 1..75: mol_type = other DNA
cgaaatcatgagccgcgtcacccgcgcggaaaacggcgcgaggatgctggaatcggttatcgacggcgacatgct

SEQ ID NO: 829074 - DNA, 75 bp, synthetic construct
  source 1..75: mol_type = other DNA
ctggctgggtgagtggttttatgaggagctgacgtatgaagagcgcggtgtggacgggaaatggcgtaagccggg

SEQ ID NO: 829075 - DNA, 75 bp, synthetic construct
  source 1..75: mol_type = other DNA
tggaggcgatgaccggttaccgcgatattgccgatccggtaaaagccagtgaagcggcacatatcgtctgcccgc

SEQ ID NO: 829076 - DNA, 75 bp, synthetic construct
  source 1..75: mol_type = other DNA
gcagttgctgatcacggatgtgctggagaaaacataccctctccagtcaaatccttcccgccgtatgcccgtgct

SEQ ID NO: 829077 - DNA, 75 bp, synthetic construct
  source 1..75: mol_type = other DNA
ttaacattgcacttaatttactgaacacaggcagaataagcgtatataaaaagaagtatttaaaatatcgcatta

SEQ ID NO: 829078 - DNA, 75 bp, synthetic construct
  source 1..75: mol_type = other DNA
tttcgtagaaaagtagaggccaatattacatttgataagatacagtcgcaatataatgccatgcatccaaaattt

SEQ ID NO: 829079 - DNA, 75 bp, synthetic construct
  source 1..75: mol_type = other DNA
catttattaaatcaacatctgatgccatttcatctcattatgaacttaaagaatataatagaattgtgaacaagt

SEQ ID NO: 829080 - DNA, 75 bp, synthetic construct
  source 1..75: mol_type = other DNA
ctgcacgtttattgatgaagcggcgctcggtaacggctggtcaaacaagaacgagtggatcaagcagtcattgct

SEQ ID NO: 829081 - DNA, 75 bp, synthetic construct
  source 1..75: mol_type = other DNA
tcacgctgtgacgcgcattgtcaacaacgaaatcgacacattactgatggaacagaagaaaaaaaataaaagatt

SEQ ID NO: 829082 - DNA, 75 bp, synthetic construct
  source 1..75: mol_type = other DNA
ttgcaggaaggggttccggaaggtctgaaatggaaagttaaagatggcataaatgaacgcatcaaaaccgatacc

SEQ ID NO: 829083 - DNA, 75 bp, synthetic construct
  source 1..75: mol_type = other DNA
ccgcagcgaattctgaaagagatcgaggatgttctgaactacttaaccaacacgctctccctgaaaccgagccgc

SEQ ID NO: 829084 - DNA, 75 bp, synthetic construct
  source 1..75: mol_type = other DNA
agcataagttcccgccagtagcgaatgatgatgtttatatgggtgtgctggcacaggtagagaattttaaagaac

SEQ ID NO: 829085 - DNA, 75 bp, synthetic construct
  source 1..75: mol_type = other DNA
cagaattcgtggacaaaatgttttcgctagccaacaaaaatgcaacaaagataatatatgatggatacgttaaac

SEQ ID NO: 829086 - DNA, 75 bp, synthetic construct
  source 1..75: mol_type = other DNA
acttctgaaactgatttataccaataccctgcaggatgcagcaatgaatcttgctggttgcctgcaacaggcata

SEQ ID NO: 829087 - DNA, 75 bp, synthetic construct
  source 1..75: mol_type = other DNA
tgttatcaccaatcacaatgttggcgcgcgcttttaccgcgtcatttaagaattttcgtctgcgcgaatggtaca

SEQ ID NO: 829088 - DNA, 75 bp, synthetic construct
  source 1..75: mol_type = other DNA
tctggaagtcaaagagcaactgactcttcaagacgttattaagtctcaagcaagtaagcaggttgaggtaacttt

SEQ ID NO: 829089 - DNA, 75 bp, synthetic construct
  source 1..75: mol_type = other DNA
ctactgctctgggctgcaggagtgggaggcacgctgtacagcctgtacagcctgtacagcctgtacagcgtgctg

SEQ ID NO: 829090 - DNA, 75 bp, synthetic construct
  source 1..75: mol_type = other DNA
ccaggtgatgcgtaataagaatctgatgtgggagattctgaagaagaacgacatgatgaacggtaacaccgagct

SEQ ID NO: 829091 - DNA, 75 bp, synthetic construct
  source 1..75: mol_type = other DNA
gctgacccgacagaaagcggcctatgaggagaaagtgaagggacgtacgaatgaaaaaggggcggaagagagcgc

SEQ ID NO: 829092 - DNA, 75 bp, synthetic construct
  source 1..75: mol_type = other DNA
cttataacgcgttgttaaatcgtgcaaaggcagaagggaaatcaattccaaaacttgttaatgaattactaatta

SEQ ID NO: 829093 - DNA, 75 bp, synthetic construct
  source 1..75: mol_type = other DNA
cgccgggctgatgcccgcggcgaagtaccggtatatctgctgcagaccgatctgctcaaagatcaactcagcaat

SEQ ID NO: 829094 - DNA, 75 bp, synthetic construct
  source 1..75: mol_type = other DNA
attatttagttgaaaaaatgtttgaaacacattctttggatatgaataattctgttttggcaagccctgaggact

SEQ ID NO: 829095 - DNA, 75 bp, synthetic construct
  source 1..75: mol_type = other DNA
gttttttccatggttcattaaggtttaattttaatctgtatggtgtttatgatagtgacagaatattagaaatta

SEQ ID NO: 829096 - DNA, 75 bp, synthetic construct
  source 1..75: mol_type = other DNA
aatttatcatattaggggatgataagattagaatatgggggcctgaggggaaattgtatttcgcattaatgggtg

SEQ ID NO: 829097 - DNA, 75 bp, synthetic construct
  source 1..75: mol_type = other DNA
cgcccaccttaccgggcgccggtgctgtgtggaaatccgcccatcttcatgacaaaaatttgtcaaatgacaggc

SEQ ID NO: 829098 - DNA, 75 bp, synthetic construct
  source 1..75: mol_type = other DNA
ggggtgaggttaaagctcgcgctcagtatgcagatggcgaaaaccagtacttgctccactacaaagctgctgatg

SEQ ID NO: 829099 - DNA, 75 bp, synthetic construct
  source 1..75: mol_type = other DNA
atatgacctttgaaaatacgttaaggctgatacaggcacagaccgcctggcgcgccacactctctcagtatcccg

SEQ ID NO: 829100 - DNA, 75 bp, synthetic construct
  source 1..75: mol_type = other DNA
gttattactggcatgtctgtcgggtatggttcgtgcaggagggaaattgtatgcagagtcatggggtgcggatgc

SEQ ID NO: 829101 - DNA, 75 bp, synthetic construct
  source 1..75: mol_type = other DNA
acttacgtattactcactacaggatgatatttatgaaattgagcttaatatcaaaagaaatgaaaatgaacttat

SEQ ID NO: 829102 - DNA, 75 bp, synthetic construct
  source 1..75: mol_type = other DNA
tattatttaatatggggaaaataccttatcttgacacagaaataaaacgaaataatcttgataagatgaaaaata

SEQ ID NO: 829103 - DNA, 75 bp, synthetic construct
  source 1..75: mol_type = other DNA
gccggtaaaaggcgtcactacagagctggttacagcgggcaacgatagcaaacgtcgaatcgtattaaatcgcta

SEQ ID NO: 829104 - DNA, 75 bp, synthetic construct
  source 1..75: mol_type = other DNA
gataatggaaacaatttcatcgttcaaatgccaaatggagatcaattgtactctccagatctggaaaatgttgat

SEQ ID NO: 829105 - DNA, 75 bp, synthetic construct
  source 1..75: mol_type = other DNA
gtgatatatccggaggacggggagctgattgccggtctggtgagtggtgcaacagtatttatttttctgtttgtg

SEQ ID NO: 829106 - DNA, 75 bp, synthetic construct
  source 1..75: mol_type = other DNA
ttatattcgcaagaatggcggtaacggctggcagttcttcagcccggcgatgaacgaaatggtaaaagagcgttt

SEQ ID NO: 829107 - DNA, 75 bp, synthetic construct
  source 1..75: mol_type = other DNA
ctggtaggctcggaagatttgccggtgctggatgagaacacgttcaacagccatacccctgcgccatcggcacgg

SEQ ID NO: 829108 - DNA, 75 bp, synthetic construct
  source 1..75: mol_type = other DNA
gctgaccagtccgtccaggaaaaactcgccacggtaattgcgcgtctggacattcgccgtgcacaggtgctggtt

SEQ ID NO: 829109 - DNA, 75 bp, synthetic construct
  source 1..75: mol_type = other DNA
gtctaattcgacgctcggcccgacatttaacacccgaactattcaaaacgccgtgctggttaaaaccggtgaaac

SEQ ID NO: 829110 - DNA, 75 bp, synthetic construct
  source 1..75: mol_type = other DNA
aaaaactcacaccactggaaaactacgccggagccacgctcaccgatggtctactgacagttcgctttttaagtg

SEQ ID NO: 829111 - DNA, 75 bp, synthetic construct
  source 1..75: mol_type = other DNA
ctggttggctctgaagatttgcctgtgctggatgaaaacacgttcgacagtcacgcccctgcgccatcgtcacgg

SEQ ID NO: 829112 - DNA, 75 bp, synthetic construct
  source 1..75: mol_type = other DNA
gtcactcgtatcgtaccgcttgagaacgttcctgctcgtgatcttgcccctctgcttcgccaaatgatggatggc

SEQ ID NO: 829113 - DNA, 75 bp, synthetic construct
  source 1..75: mol_type = other DNA
aatattcatatcccggcgttatccgtaaacttatctgcgctgcattttcgcagtaatcagctacccaatcaggtt

SEQ ID NO: 829114 - DNA, 75 bp, synthetic construct
  source 1..75: mol_type = other DNA
agataaccgcatccgcttacagcagcttttgtggaaaacctcccgcgatcaagatgaatttttgctattaacgcg

SEQ ID NO: 829115 - DNA, 75 bp, synthetic construct
  source 1..75: mol_type = other DNA
gctgggtcatcgcggaagcttgccgtcagttagcagaatggcgtagccagaatattcatatcccggcgttatccg

SEQ ID NO: 829116 - DNA, 75 bp, synthetic construct
  source 1..75: mol_type = other DNA
gaaacacattctttggatatgaataattctgttttggcaagccctgaggacttagagctcactggctcaggttta

SEQ ID NO: 829117 - DNA, 75 bp, synthetic construct
  source 1..75: mol_type = other DNA
gcggtcattatcagacgctggagccggttacccgcgaacagattatccggtttgcccattcattgctgacccgcc

SEQ ID NO: 829118 - DNA, 75 bp, synthetic construct
  source 1..75: mol_type = other DNA
atcctgatcaacaaagatattctccagcgccagcagtgggcgaacgtcttcttccggcgtaaaggcggtgagtaa

SEQ ID NO: 829119 - DNA, 75 bp, synthetic construct
  source 1..75: mol_type = other DNA
gcaacaactcccgagtagttgtctggaaactttgacgcttctggtgcagatgaataattatatcaaaagggatgc

SEQ ID NO: 829120 - DNA, 75 bp, synthetic construct
  source 1..75: mol_type = other DNA
aacagttaaagtagaaatgaaattaattaagcgcataagaaaaaataataatcgccaaaagatatcaggctactg

SEQ ID NO: 829121 - DNA, 75 bp, synthetic construct
  source 1..75: mol_type = other DNA
tgattgcgcagaaatcgggcgatattatctttaccagctctatcgccggtgtcgtgccagttatctgggaaccta

SEQ ID NO: 829122 - DNA, 75 bp, synthetic construct
  source 1..75: mol_type = other DNA
gtgtccgttaaactcaggctacctcagacatacaactgcatcagggaggcagcagatcaacttccggcatggttc

SEQ ID NO: 829123 - DNA, 75 bp, synthetic construct
  source 1..75: mol_type = other DNA
cggatgaaagtcaaaacagggtgcatgaagcagctcgctactccccggcccagcaatacggaagagaagaaacac

SEQ ID NO: 829124 - DNA, 75 bp, synthetic construct
  source 1..75: mol_type = other DNA
cgggcaatctcatgaaaattgcagtcagcaagagcggtgtgtgcaccagtacaaatattactcttgagctgtttc

SEQ ID NO: 829125 - DNA, 75 bp, synthetic construct
  source 1..75: mol_type = other DNA
tcctgcgctgacagctgaatttaaccttaacgttctcgataagtcgattcgggatagcgttgatatttcgttgct

SEQ ID NO: 829126 - DNA, 75 bp, synthetic construct
  source 1..75: mol_type = other DNA
gaggccgggcaggctccagtatggtttttgctgggagatgccggtttgccgagtatcagcgatcgtctgacaggc

SEQ ID NO: 829127 - DNA, 75 bp, synthetic construct
  source 1..75: mol_type = other DNA
aaagacgctatgaataatccgtcagttattccggccttcgacttccgcgaaatggtcacgaccctcgacaacaag

SEQ ID NO: 829128 - DNA, 75 bp, synthetic construct
  source 1..75: mol_type = other DNA
ttgcaaaaaattgtcgtcgaactcggtgaaaacgcatatgcgctacagatcgacctcttcaacggcgagcaggta

SEQ ID NO: 829129 - DNA, 75 bp, synthetic construct
  source 1..75: mol_type = other DNA
atactccccttaatggcaaagttgcagctatcactggcgctgcgtcaggtattggcctgcaatgtgcaaaaacgc

SEQ ID NO: 829130 - DNA, 75 bp, synthetic construct
  source 1..75: mol_type = other DNA
ttaataataataaaatcagtaatgggcaacaaattcgctggcaaaaatctggcgataaaattattccttgtatca

SEQ ID NO: 829131 - DNA, 75 bp, synthetic construct
  source 1..75: mol_type = other DNA
aaagaaatttgtcgcagccagaaaattaacaggtatccagttcagtgaaaacccaccaacttttcacgaagtcag

SEQ ID NO: 829132 - DNA, 75 bp, synthetic construct
  source 1..75: mol_type = other DNA
tacattgccttcgtgtaatacctaatccagaaatggggaaggccagtagttatgaagagataggtgtcaatgata

SEQ ID NO: 829133 - DNA, 75 bp, synthetic construct
  source 1..75: mol_type = other DNA
ggtacatcatacttagagaaaaaagccgaagtagaagtcaagcaagaagaaacaaagctcgaagaagccaagatt

SEQ ID NO: 829134 - DNA, 75 bp, synthetic construct
  source 1..75: mol_type = other DNA
ccagcagtttctctcccttgaatttgcgcaggtgctggacaaaatggcctacctgacgatatggcagggcgatgc

SEQ ID NO: 829135 - DNA, 75 bp, synthetic construct
  source 1..75: mol_type = other DNA
gcttttttctgttgtccggctggtatggtgatgccctgctggcgttcgggcgggacatgatgcgtctggcgatgg

SEQ ID NO: 829136 - DNA, 75 bp, synthetic construct
  source 1..75: mol_type = other DNA
gcgggcagggctgtatgagatggtgtgcaatctgccgcagggattccggacaccggtgaataacggcggagccga

SEQ ID NO: 829137 - DNA, 75 bp, synthetic construct
  source 1..75: mol_type = other DNA
ttcaacaatatatcaatcaacgattcccatatatcaatttgtatgtgttgaatttagtgagtgataaagcggaat

SEQ ID NO: 829138 - DNA, 75 bp, synthetic construct
  source 1..75: mol_type = other DNA
aaacactgataaatttagtatgtatagaaaccaatttgatgagataaatgatgcatactatttttataaaaggaa

SEQ ID NO: 829139 - DNA, 75 bp, synthetic construct
  source 1..75: mol_type = other DNA
cgggacaaaatcaacagcgtcagccggtgctcacaaccacgacagcggatggggtgaagccagcggtgggcgtca

SEQ ID NO: 829140 - DNA, 75 bp, synthetic construct
  source 1..75: mol_type = other DNA
tgatggtcggtcagtccttcaataaaaccgcctaccctaaactggcaatcgcttacccctccggtgtaatcccgg

SEQ ID NO: 829141 - DNA, 75 bp, synthetic construct
  source 1..75: mol_type = other DNA
gtggacttcctcgttctgacgctgccaggcggcgcgagtacgcgcggcgttattgacaaaacggtgctgcaggct

SEQ ID NO: 829142 - DNA, 75 bp, synthetic construct
  source 1..75: mol_type = other DNA
gtttaatgcgatggcggatttggtttttgataacttacaggctttctttagcggacagccagttattacccctgt

SEQ ID NO: 829143 - DNA, 75 bp, synthetic construct
  source 1..75: mol_type = other DNA
gtgatatcctggtaacactacagaaattctttgaagaagattgtgccactcatactggcatgtcacaaactgagg

SEQ ID NO: 829144 - DNA, 75 bp, synthetic construct
  source 1..75: mol_type = other DNA
aatccccaaccaattgcggttttgaaggattggcctattctcgccaggatcacactttctggttttttaaagaga

SEQ ID NO: 829145 - DNA, 75 bp, synthetic construct
  source 1..75: mol_type = other DNA
taaaaaaaacatactggtgcgactgggcgatggtctgtttgtgaatggcgcccacccactgatccccaagatggg

SEQ ID NO: 829146 - DNA, 75 bp, synthetic construct
  source 1..75: mol_type = other DNA
tagctggaacgttatcattaatccctttgatatttattaccacattagcaaaagcagcttttccacggtttacaa

SEQ ID NO: 829147 - DNA, 75 bp, synthetic construct
  source 1..75: mol_type = other DNA
tcaatcatgtgattgggaaacggatattgcggattgtggttctgcgggtccggtttttcgatgacattttcttcc

SEQ ID NO: 829148 - DNA, 75 bp, synthetic construct
  source 1..75: mol_type = other DNA
ataagatagtccagaaagcggtcgataaacttgctgatgctgcaacgctgaccggtgaggcaaaagccagcgccg

SEQ ID NO: 829149 - DNA, 75 bp, synthetic construct
  source 1..75: mol_type = other DNA
tctcgatgaaggcgacctcaagccggatgtagtgaaacgctttgaggaaatggtggcgcaggcgcagcagagcgc

SEQ ID NO: 829150 - DNA, 75 bp, synthetic construct
  source 1..75: mol_type = other DNA
gcccgacagaatacacccgcagtggttatgagaacggtggcaacagtggtgacggggccggcaggagaatatgca

SEQ ID NO: 829151 - DNA, 75 bp, synthetic construct
  source 1..75: mol_type = other DNA
gaatggcaacttgctgaaggacgaaaacgcagcgaggagattaaccgccagaatcaccagttgcgggtggaaaaa

SEQ ID NO: 829152 - DNA, 75 bp, synthetic construct
  source 1..75: mol_type = other DNA
aaagttatttatgttgaaactggcgaggtggtctgggtcggaaaagacatcacctcaatctgcccggaaaataaa

SEQ ID NO: 829153 - DNA, 75 bp, synthetic construct
  source 1..75: mol_type = other DNA
gccgctaatgagcaagcttcaaaggtgcttaagccgggtaatgctctgcgaaagtactctgtgaaccctaacaag

SEQ ID NO: 829154 - DNA, 75 bp, synthetic construct
  source 1..75: mol_type = other DNA
aatgatttttttctagagaagcaaggctataaagtcacatcgggtaatattgcgtcaggaataaagtctttaggt

SEQ ID NO: 829155 - DNA, 75 bp, synthetic construct
  source 1..75: mol_type = other DNA
ctgcacggtcggaggacagtcatcgtctgttcgtgacaaggccagtgacaaagataaggaacgggtgctgaagaa

SEQ ID NO: 829156 - DNA, 75 bp, synthetic construct
  source 1..75: mol_type = other DNA
taggtttttttatcggtcttgtatatggtagcggtaaaaaatatgtaaaagataaacatgtgagttattaccgtg

SEQ ID NO: 829157 - DNA, 75 bp, synthetic construct
  source 1..75: mol_type = other DNA
gcgccccgggaaaatcccttgccatccagtctgaaatcgttcggattctggataaatttactgcacttaccgctg

SEQ ID NO: 829158 - DNA, 75 bp, synthetic construct
  source 1..75: mol_type = other DNA
ttagagcatttcattttataagaattgcaagagaaatttcagggagtagctgcttctgtaattttgtcgctgttt

SEQ ID NO: 829159 - DNA, 75 bp, synthetic construct
  source 1..75: mol_type = other DNA
agaaggtccatgatgaatacatatcagcaggtaatgatatgttcttcgttcttaattattatgagtttatctgtt

SEQ ID NO: 829160 - DNA, 75 bp, synthetic construct
  source 1..75: mol_type = other DNA
aaagcaatgaaaacatttacagtgttgagttaaatattcccggagagatgcctccggtgtttattgttcattcaa

SEQ ID NO: 829161 - DNA, 75 bp, synthetic construct
  source 1..75: mol_type = other DNA
agattgccattttccagagccaggtacaggtccagcaggatgcgctgctggttgtcgaacgtcagatgagctaca

SEQ ID NO: 829162 - DNA, 75 bp, synthetic construct
  source 1..75: mol_type = other DNA
agaaaaggattgaacttggcctgacgcaaacagaagcagcagaaaaggctggtattcgtcagcaatcctggcaaa

SEQ ID NO: 829163 - DNA, 75 bp, synthetic construct
  source 1..75: mol_type = other DNA
gaaattgaaaaaattgccaaagaaaaatatggtagctttaatggacgaatcctcggacacgaagggattggaata

SEQ ID NO: 829164 - DNA, 75 bp, synthetic construct
  source 1..75: mol_type = other DNA
agaatttccctatccccatcccctgcccggataatccggaaaaatcccttgccatccagtctgaaatcgttcgga

SEQ ID NO: 829165 - DNA, 75 bp, synthetic construct
  source 1..75: mol_type = other DNA
caggagctgatacagcaggcccgggcgatggtggccacaggaaattatgacgaagcagttatcgaacatattaac

SEQ ID NO: 829166 - DNA, 75 bp, synthetic construct
  source 1..75: mol_type = other DNA
taaaaaacagtacaactactatcgcgaccagttgttgagttttaaagagggtgaggttgagtggaagactttggg

SEQ ID NO: 829167 - DNA, 75 bp, synthetic construct
  source 1..75: mol_type = other DNA
ttactcaaaataaaaagctctgttgatgttcatttttttgagaaaggaggacacggatttggaatgtcagataca

SEQ ID NO: 829168 - DNA, 75 bp, synthetic construct
  source 1..75: mol_type = other DNA
tactcatggcaagaactggggcaacctttggtaaaacaatgatttttgaagaagattatccagcagtatacgctg

SEQ ID NO: 829169 - DNA, 75 bp, synthetic construct
  source 1..75: mol_type = other DNA
atgcgtaaaaaacagtataactactatcgcgaccagttgttgagttttaaagagggtgaggttgagtggaagact

SEQ ID NO: 829170 - DNA, 75 bp, synthetic construct
  source 1..75: mol_type = other DNA
gaaagtctccggcggtggtgctgagggtttcctgaagaacgccagtcgtcagattgcggtggagttcagcaaaga

SEQ ID NO: 829171 - DNA, 75 bp, synthetic construct
  source 1..75: mol_type = other DNA
ttttattggttccattgctgtaaacctgtatactttaagcacaccattagtattaagtatagttagtgattttga

SEQ ID NO: 829172 - DNA, 75 bp, synthetic construct
  source 1..75: mol_type = other DNA
agttggtcttctttagttcccttattaatttattatatacgtagtaatcttccgcgaacaaagttttatacctca

SEQ ID NO: 829173 - DNA, 75 bp, synthetic construct
  source 1..75: mol_type = other DNA
gtctgatcttatccagcagaaagcaacaaaaactggtggtgaattgagcattggtgctggcgcaagtaaagttga

SEQ ID NO: 829174 - DNA, 75 bp, synthetic construct
  source 1..75: mol_type = other DNA
ggttacgccgtgaatcttgtggcagcagtggttattattattatcgggggtatcgctgcacggatgatttctggt

SEQ ID NO: 829175 - DNA, 75 bp, synthetic construct
  source 1..75: mol_type = other DNA
gaagaagtctaaaaagtcgacgccatgggaaaagaaagtcaccaagctcatgaagaaatactgggccaaggtgaa

SEQ ID NO: 829176 - DNA, 75 bp, synthetic construct
  source 1..75: mol_type = other DNA
tccattcaacaatagtaactattgaagaatatgaaagaaaaaaaatcatagatgaattagtagaacgtgctgaaa

SEQ ID NO: 829177 - DNA, 75 bp, synthetic construct
  source 1..75: mol_type = other DNA
cataaaacactatcaataagttggagtcattaccaacagtcaattcgtaaaagtgattatgccatccgactcggt

SEQ ID NO: 829178 - DNA, 75 bp, synthetic construct
  source 1..75: mol_type = other DNA
cagtaccgggctggtacgtctggtcagtagccagcatcgggtagcgattaatgaaggtaatgtggtgggcaaaga

SEQ ID NO: 829179 - DNA, 75 bp, synthetic construct
  source 1..75: mol_type = other DNA
cgcagggtggcaaaacgggtatggcgacgtgaacgggacctgacgggctggatgtcgctgtcacggaaaccgcaa

SEQ ID NO: 829180 - DNA, 75 bp, synthetic construct
  source 1..75: mol_type = other DNA
aaataaaagaatttattttcatattttctttcttgtctattacttttatgttattacatgaaaaaaatggaatac

SEQ ID NO: 829181 - DNA, 75 bp, synthetic construct
  source 1..75: mol_type = other DNA
ttcatgcatctctattatatttttgttactgcatgaaaataatggaatatacataacacaaacaacacaaataag

SEQ ID NO: 829182 - DNA, 75 bp, synthetic construct
  source 1..75: mol_type = other DNA
tcatttttgttaaagacgcaggatctgcgaatgcaagtcttgtcaaacaaagtgctgccagcgaagctactcgta

SEQ ID NO: 829183 - DNA, 75 bp, synthetic construct
  source 1..75: mol_type = other DNA
tattgctgggtaagatcaattgttaccaacccgccatttggtggcacggaagaagacggtattgagaagaacttt

SEQ ID NO: 829184 - DNA, 75 bp, synthetic construct
  source 1..75: mol_type = other DNA
tcggcgcattgcaggccggggcgtcagtgaagggcgagtttgaaaaacgctttaagggactgatggcggaagtta

SEQ ID NO: 829185 - DNA, 75 bp, synthetic construct
  source 1..75: mol_type = other DNA
cactgactctgctggacaaagctatcgcatctgttgataaattccgttcttctttgggggcggtacagaaccgtc

SEQ ID NO: 829186 - DNA, 75 bp, synthetic construct
  source 1..75: mol_type = other DNA
caatacagttttaactgccaaccccgtcattacagagccggcaacaaccgtcatttccattgagcccgccaatcc

SEQ ID NO: 829187 - DNA, 75 bp, synthetic construct
  source 1..75: mol_type = other DNA
acctgggcgatgcttttctggcccagccgcaggacgtgatggactcggtacagcgattgcggcaactggcgcaac

SEQ ID NO: 829188 - DNA, 75 bp, synthetic construct
  source 1..75: mol_type = other DNA
ccaagtagaagagttgttgctaaacttaacttcagattctagcaaggatgaagcaaaaaaaatagtcgagtcgat

SEQ ID NO: 829189 - DNA, 75 bp, synthetic construct
  source 1..75: mol_type = other DNA
cacaacatccttgataaagatggtaaggcaacagctgattatgttgttcagtcaggtaaagacttctatgctgct

SEQ ID NO: 829190 - DNA, 75 bp, synthetic construct
  source 1..75: mol_type = other DNA
ctgagcaatgctggtgttactggttctgttgagttggttaaactcacttcaactgattctgcaggcaatgctact

SEQ ID NO: 829191 - DNA, 75 bp, synthetic construct
  source 1..75: mol_type = other DNA
ctgcggttgcacttaagagcgaagccgctcctgacttaactaaggtaaatgcaactgatggtagtgtgggaggtg

SEQ ID NO: 829192 - DNA, 75 bp, synthetic construct
  source 1..75: mol_type = other DNA
gcctgtcgctgttgacccagaataacctgaataaatctcagtcttctcttagctctgctattgagcgtctctctt

SEQ ID NO: 829193 - DNA, 75 bp, synthetic construct
  source 1..75: mol_type = other DNA
aaagatcctactaaattaaaagccgcaacagctgaaacaacctattttggatcgacagttaagcttgctgacgct

SEQ ID NO: 829194 - DNA, 75 bp, synthetic construct
  source 1..75: mol_type = other DNA
atcccgtctggatgaaattgaccgcgtatctggtcagacccagttcaacggcgtgaacgtgctggcaaaaaatgg

SEQ ID NO: 829195 - DNA, 75 bp, synthetic construct
  source 1..75: mol_type = other DNA
gaatacgatgagtggggcaacctgctgaatgaagagaacccgcatcagctgcagcagcttatccgcctgccgggg

SEQ ID NO: 829196 - DNA, 75 bp, synthetic construct
  source 1..75: mol_type = other DNA
tacgccacactatccgggaatgactcaccggcaccaacttgcagacaccgtggtaaacggtttttctgccgatcc

SEQ ID NO: 829197 - DNA, 75 bp, synthetic construct
  source 1..75: mol_type = other DNA
agcattccggcccaggcttttaccgttatcctgcacgatggcacattttgtctgcgcccgcagacggcacaactg

SEQ ID NO: 829198 - DNA, 75 bp, synthetic construct
  source 1..75: mol_type = other DNA
agcttgcgatggttgaacgtaacgaaaaaggtcgccagatccgccgctacttcatcgagtgcgagaaaaagtttc

SEQ ID NO: 829199 - DNA, 75 bp, synthetic construct
  source 1..75: mol_type = other DNA
gagttgtttatcggcgagaaattacttaatagaacagaaagtaatgtcaacgctttatggactgttatttccctt

SEQ ID NO: 829200 - DNA, 75 bp, synthetic construct
  source 1..75: mol_type = other DNA
aacgacctgccgatcatcctccggatctttgtataaggatccctgttcagctggagctgaatttctgggaggaga

SEQ ID NO: 829201 - DNA, 75 bp, synthetic construct
  source 1..75: mol_type = other DNA
gccgtgtattactggtgtgaataaacgttatgccattaatccggatgaattaccgggctggctgtttggtggcct

SEQ ID NO: 829202 - DNA, 75 bp, synthetic construct
  source 1..75: mol_type = other DNA
ctgatgctgccggggaaaggcgtaacgaaaaaacagcctccgttaccggacagcaagaaggctgaatggagttta

SEQ ID NO: 829203 - DNA, 75 bp, synthetic construct
  source 1..75: mol_type = other DNA
ctgatgctgccggggaaaggcgtaacgaaaaaacagcctccgttaccggatagcaagtaggctgaatgcagttta

SEQ ID NO: 829204 - DNA, 75 bp, synthetic construct
  source 1..75: mol_type = other DNA
ctgatgctgccggggaaaggcgtaacgaaaaaacagcctccgttaccggaaagcaagcaggctgaatggagttta

SEQ ID NO: 829205 - DNA, 75 bp, synthetic construct
  source 1..75: mol_type = other DNA
tttggatttttagggggggtcaatcattatgttttaattacttcagtaaatatcaaacatagtaaaataacaata

SEQ ID NO: 829206 - DNA, 75 bp, synthetic construct
  source 1..75: mol_type = other DNA
agcgtcagggataaagccagcgacaaggataaggagcgggtgaccaaaaacatcaacatcatgtggaatgcgctt

SEQ ID NO: 829207 - DNA, 75 bp, synthetic construct
  source 1..75: mol_type = other DNA
ctgatgctgccggggaaaggcgtaacgaaaaaacagcctccgttaccggagagcaaggaggctgaatgaagttta

SEQ ID NO: 829208 - DNA, 75 bp, synthetic construct
  source 1..75: mol_type = other DNA
aggtggatttcccggaagccggtgaggacacggcgctctgcgacaaggagaacaaaccaccgaggatagcccagg

SEQ ID NO: 829209 - DNA, 75 bp, synthetic construct
  source 1..75: mol_type = other DNA
ctctcgagatctgggagtctcgggtgaataaccaccagcaacagcaggaaaacaatgtcgttaacctgtttgggc

SEQ ID NO: 829210 - DNA, 75 bp, synthetic construct
  source 1..75: mol_type = other DNA
tagtgccgtatcaactgatattcctaaattaaccactgaaaatatcacttggttcaataacagctcctatgaaga

SEQ ID NO: 829211 - DNA, 75 bp, synthetic construct
  source 1..75: mol_type = other DNA
ccctcacagcttcttgcgatgatttctgatgttggtaaggggcggttggcagccaagctcaggaaaaaagtaccc

SEQ ID NO: 829212 - DNA, 75 bp, synthetic construct
  source 1..75: mol_type = other DNA
agcaagatacaactgacatacggaaagataccacgttttttactcccgaaaataacgctaaaaagctacttcccc

SEQ ID NO: 829213 - DNA, 75 bp, synthetic construct
  source 1..75: mol_type = other DNA
cctatgggattattgcagacttgggatgatgccagatctggagcatgtacggggggagtttgtggtgttctttca

SEQ ID NO: 829214 - DNA, 75 bp, synthetic construct
  source 1..75: mol_type = other DNA
actggctactacggtctgacgcaggggctgctatctgtcctgcgtcttttctggggcaacctgattaactttatg

SEQ ID NO: 829215 - DNA, 75 bp, synthetic construct
  source 1..75: mol_type = other DNA
ctgggtttatctatgtgggaggatgcaaaatcgggggcatgtactaatggtctttgcggcacactatccgctatg

SEQ ID NO: 829216 - DNA, 75 bp, synthetic construct
  source 1..75: mol_type = other DNA
gcgaagacggcaatacggcgtggcgcggggagtatgatgaatggggcaaccagcttaatgaggagaacccgcatc

SEQ ID NO: 829217 - DNA, 75 bp, synthetic construct
  source 1..75: mol_type = other DNA
cacctgttttatgagtacgacgctgcggaccggatcatccgctggtccgataacgaccagacgtggagccaggga

SEQ ID NO: 829218 - DNA, 75 bp, synthetic construct
  source 1..75: mol_type = other DNA
gccaccgctattatgacccgctgcaggggcgatatatcactcaggatccgattggactgaaggggggatggaacc

SEQ ID NO: 829219 - DNA, 75 bp, synthetic construct
  source 1..75: mol_type = other DNA
cgccaccggtgagcaggcgaaaacgcagcgccgcagcctggcggatgcgcttcagcagtccggcggcgaagacgg

SEQ ID NO: 829220 - DNA, 75 bp, synthetic construct
  source 1..75: mol_type = other DNA
tatccgcatcccgtatgccacggacccggcgggcaaccgcctgcccgacccggagctgcacccggacagcaccct

SEQ ID NO: 829221 - DNA, 75 bp, synthetic construct
  source 1..75: mol_type = other DNA
gccgatagaggcacagcgccgtccccacaccacggtaactgaaactgtcaaaattccctctaaaaaagggaaaaa

SEQ ID NO: 829222 - DNA, 75 bp, synthetic construct
  source 1..75: mol_type = other DNA
gcagaaaaagacattgttgaacaggctaaaaatgttatgcattcagttatgagtagctatctggatcaaattagt

SEQ ID NO: 829223 - DNA, 75 bp, synthetic construct
  source 1..75: mol_type = other DNA
gcttgaagatattatgagtattccagatagttcacttagaaaacgtctcgggtatgaggttttaagcttctcgct

SEQ ID NO: 829224 - DNA, 75 bp, synthetic construct
  source 1..75: mol_type = other DNA
gaatcaaacttcaattatatgattgcctatatgtctaacattaactatgatgcctcaaagccaggagcgccagca

SEQ ID NO: 829225 - DNA, 75 bp, synthetic construct
  source 1..75: mol_type = other DNA
ccgtgatgacattgacgatatagacggcggtgagattcgtgagctggcacggattgcactggcatcactggagca

SEQ ID NO: 829226 - DNA, 75 bp, synthetic construct
  source 1..75: mol_type = other DNA
taactactgcgcagatgcagttaagggcgtagaggatgcctgccgcgctgccatgcttaagggagataaatcatg

SEQ ID NO: 829227 - DNA, 75 bp, synthetic construct
  source 1..75: mol_type = other DNA
cgatgattttgacggtgacaggcgaggtatcagtgattgtctggatgaggccgagcaagagcttatcgttaccat

SEQ ID NO: 829228 - DNA, 75 bp, synthetic construct
  source 1..75: mol_type = other DNA
atctgaaaacggttggcggtgcttttaccggatcgcgtgatgcgttagccaaagcgtgctggcctactaagacgc

SEQ ID NO: 829229 - DNA, 75 bp, synthetic construct
  source 1..75: mol_type = other DNA
ggataatcgccaattaacgctaaagctgcggggaatacagatttcatcgggcaatgcgccctcgtttgtggcgct

SEQ ID NO: 829230 - DNA, 75 bp, synthetic construct
  source 1..75: mol_type = other DNA
gtagccagttttttatcgaatatggaattcgcatacctggaattgttattcgtgagggggatggacttaatgatg

SEQ ID NO: 829231 - DNA, 75 bp, synthetic construct
  source 1..75: mol_type = other DNA
aaggtttacctatgtctgcgttagaagctgcatcggctggtttaccaatgttgctaagtgatgttggtggctgta

SEQ ID NO: 829232 - DNA, 75 bp, synthetic construct
  source 1..75: mol_type = other DNA
tattaactgataagattctttgtgtatcaaaaagggactttgaaaaagcaaatcagcagataggtatttcagaaa

SEQ ID NO: 829233 - DNA, 75 bp, synthetic construct
  source 1..75: mol_type = other DNA
ccggacgccgtacactggcggcgatgttatccgaactgtcagacaatggtgacgccgtagtgattaaccgtggtc

SEQ ID NO: 829234 - DNA, 75 bp, synthetic construct
  source 1..75: mol_type = other DNA
aaaatcatgatcttaatctggatgttagagcgattttgattttcgtccagcaaattttattttgcatatgtggaa

SEQ ID NO: 829235 - DNA, 75 bp, synthetic construct
  source 1..75: mol_type = other DNA
ttgcttgtgtttgctgtggtgacactcaacggaaaaataatcctttattccgtccgcttcggctcggcgcgccct

SEQ ID NO: 829236 - DNA, 75 bp, synthetic construct
  source 1..75: mol_type = other DNA
cctcctgaacccgccacaccacgggccggacgcccatgggctgagcaccgtaaaatcatcaatggcatgttctgg

SEQ ID NO: 829237 - DNA, 75 bp, synthetic construct
  source 1..75: mol_type = other DNA
gctgactatcagcagcccacacagcaactaccgggtcgttataacaaggctgcagctgatgcactggctgcagta

SEQ ID NO: 829238 - DNA, 75 bp, synthetic construct
  source 1..75: mol_type = other DNA
ctatcaacatacgcgcagtaatgatgatgacgatgaatttggcggcgatgacacacaaaaaaaatgggagtggag

SEQ ID NO: 829239 - DNA, 75 bp, synthetic construct
  source 1..75: mol_type = other DNA
atatctccttcgatgcctcatgaaattaagccggtgatccaggagcagacccagcaggtgatgccaacggaagcg

SEQ ID NO: 829240 - DNA, 75 bp, synthetic construct
  source 1..75: mol_type = other DNA
cactgaccgcgatatcctccgggcgattatggaggggggaacggcaaaaatttaccactgcaacgattcggacaa

SEQ ID NO: 829241 - DNA, 75 bp, synthetic construct
  source 1..75: mol_type = other DNA
cgtacttttaacgatcacgtgtgggcaaataacaggaaaagctataatcgagaagatgactcagtttatgatatc

SEQ ID NO: 829242 - DNA, 75 bp, synthetic construct
  source 1..75: mol_type = other DNA
gatatacggtaatgaaacgactgcacactttattttgcttagggagatagtcggatacactatagacaatgaaaa

SEQ ID NO: 829243 - DNA, 75 bp, synthetic construct
  source 1..75: mol_type = other DNA
aaagaaatgagcgactactctagcctaggtatcacttctgatgagggaagtgctctgtttgaaagtatcatgcgc

SEQ ID NO: 829244 - DNA, 75 bp, synthetic construct
  source 1..75: mol_type = other DNA
tattgtgcatacacactcttcgaaaacaggtattctaggaagaatagctgcacgtatggctagagttccgtgtgt

SEQ ID NO: 829245 - DNA, 75 bp, synthetic construct
  source 1..75: mol_type = other DNA
gtgaaaatacgttgatgttggatattgccgacagtaaaagcgatgtggcgctactgggtaaccgtaaaaataccg

SEQ ID NO: 829246 - DNA, 75 bp, synthetic construct
  source 1..75: mol_type = other DNA
ccattggtggcagctatagccagtcgaaaaaatatcaacagataagtggtaatattcaaggtggtttagtcgcgt

SEQ ID NO: 829247 - DNA, 75 bp, synthetic construct
  source 1..75: mol_type = other DNA
tgcggatgctggtgaaatcattgccacctttggtcagtttgtcattggcgacagccttgccgtgggttttgtggt

SEQ ID NO: 829248 - DNA, 75 bp, synthetic construct
  source 1..75: mol_type = other DNA
ccgtgcaacaagccagcgcactggtaccagattacgcctccttacaggtctggcgtgtggtattgttatgcgcag

SEQ ID NO: 829249 - DNA, 75 bp, synthetic construct
  source 1..75: mol_type = other DNA
accagattacgcctccttacaggtctggcgtgtggtattgttatgcgcaggtcttggatgctggctttgcccgct

SEQ ID NO: 829250 - DNA, 75 bp, synthetic construct
  source 1..75: mol_type = other DNA
acgacaccaagagccgtcttgaagacatgatgcgcgagctgacccatcgccacgacctgaacaaacagccgcaaa

SEQ ID NO: 829251 - DNA, 75 bp, synthetic construct
  source 1..75: mol_type = other DNA
gatattgacgggccggaaggcgacaactctgttaagcaactttctgacctgatggattcactgtctcagggggcg

SEQ ID NO: 829252 - DNA, 75 bp, synthetic construct
  source 1..75: mol_type = other DNA
caaatccttcttgatattcgcatgcatcatgcagcaaagcttttattgaatagtcaaagctatattaatgatgta

SEQ ID NO: 829253 - DNA, 75 bp, synthetic construct
  source 1..75: mol_type = other DNA
ggtactacgatgacgccgggcgcatcacgcaccggacggtgaacggcgacccggcggagcagtggcagtatgacg

SEQ ID NO: 829254 - DNA, 75 bp, synthetic construct
  source 1..75: mol_type = other DNA
atgagcgaggttaactatgaggcgcttcgtgaggcagcacaaaactatcagtcgacgctggcgtggtatcaggct

SEQ ID NO: 829255 - DNA, 75 bp, synthetic construct
  source 1..75: mol_type = other DNA
ataaagcggtgagtgatactccactggatgacagggaaaaaggcttcatttccagcaccaccgtccccgtcttta

SEQ ID NO: 829256 - DNA, 75 bp, synthetic construct
  source 1..75: mol_type = other DNA
ccgcgaacgcaacctggcgaagcgtcaaggctacaaagaaggaatcctggggactgtcgcacttggcgcaacggt

SEQ ID NO: 829257 - DNA, 75 bp, synthetic construct
  source 1..75: mol_type = other DNA
gtgaaatcgccgggttgaagtcttctctggcgatgttgctggccgccttcaaactgatgtcttcccaggctggat

SEQ ID NO: 829258 - DNA, 75 bp, synthetic construct
  source 1..75: mol_type = other DNA
tttattcagtctttgagtccgatggtaatttcatatcgtgcaaaaaacaaatctatagaagtggcaagatataaa

SEQ ID NO: 829259 - DNA, 75 bp, synthetic construct
  source 1..75: mol_type = other DNA
aacttgcattgcatcaccgcagagtttccacccatctcctccgacgaagccagcgaaaaatatctctttgcgatg

SEQ ID NO: 829260 - DNA, 75 bp, synthetic construct
  source 1..75: mol_type = other DNA
ccttttattaccctttctcatttgaagaacattatgctcattatcaggccattattaatgaggctgatggtcttc

SEQ ID NO: 829261 - DNA, 75 bp, synthetic construct
  source 1..75: mol_type = other DNA
ccgtcatttgcagccaacgttctgcctccggtgctgaaaaccttccgcgattgttattcagggattaatgtcacc

SEQ ID NO: 829262 - DNA, 75 bp, synthetic construct
  source 1..75: mol_type = other DNA
gcatgattttcaacgatgagatggtccgggccatccttgaaggaaggaagacgcagactcgccgacctgtaaaaa

SEQ ID NO: 829263 - DNA, 75 bp, synthetic construct
  source 1..75: mol_type = other DNA
tacttgggaacaccaaataatacctatctaaaatataatcccaaagctaaagggaatggagttacaattatcaga

SEQ ID NO: 829264 - DNA, 75 bp, synthetic construct
  source 1..75: mol_type = other DNA
cgaatcgataatcttgataaaatgatcacagaaactgttccactggttctgcttgttccgggtcagcggtgtgcg

SEQ ID NO: 829265 - DNA, 75 bp, synthetic construct
  source 1..75: mol_type = other DNA
ctgacagcagaacaggctgttacacagcagttaaaaaatgaggtgtcaaaaggaaaactaattgacaccgggttc

SEQ ID NO: 829266 - DNA, 75 bp, synthetic construct
  source 1..75: mol_type = other DNA
gatgctttccggatatattgaggatgcaataagaaaagggataaggcaaacctctggtggctctttcttgaatat

SEQ ID NO: 829267 - DNA, 75 bp, synthetic construct
  source 1..75: mol_type = other DNA
acaaattcgtgaaaaatcagcagacaggctctggggcagactgtccggactggtatcagatgtccagaatgcgca

SEQ ID NO: 829268 - DNA, 75 bp, synthetic construct
  source 1..75: mol_type = other DNA
cggataattcagatgttctcctgttcaaaaagctattctccccttcgaaattaatgacaattatcggtgatgaaa

SEQ ID NO: 829269 - DNA, 75 bp, synthetic construct
  source 1..75: mol_type = other DNA
gagcaaatcagaaggcagcatccggaactgattttgtacaatggttatgatgaaatttttgcttctggggtgatt

SEQ ID NO: 829270 - DNA, 75 bp, synthetic construct
  source 1..75: mol_type = other DNA
tatgatagtctaaatttttcaagcaaagatttaacgaattcttatatgaatggaatgggaaaaaaagaatacaag

SEQ ID NO: 829271 - DNA, 75 bp, synthetic construct
  source 1..75: mol_type = other DNA
atgtgtaatggagaatcaattaacgagaataaagaatatggtggactaatatgtaagaagcaaggtgaatatttc

SEQ ID NO: 829272 - DNA, 75 bp, synthetic construct
  source 1..75: mol_type = other DNA
agcttgctgtacttactgcattcgttaaagcgcaggaaataacggcattggacgatgccgttgatgtgcttgata

SEQ ID NO: 829273 - DNA, 75 bp, synthetic construct
  source 1..75: mol_type = other DNA
cgcaggcgctggataacgcactacagccggacagagcaggtcagtttgccgacgccctggagaaatacgctgccg

SEQ ID NO: 829274 - DNA, 75 bp, synthetic construct
  source 1..75: mol_type = other DNA
gggcagtctgtgggacgagtggattatccggatgtgttcgaacaggtctggcgggagtacccgttgcgtgctggg

SEQ ID NO: 829275 - DNA, 75 bp, synthetic construct
  source 1..75: mol_type = other DNA
gatgcggttatagataaaggtatttctgagcgtttaatgaaacgttttggtattttccccccatcggggaaaagc

SEQ ID NO: 829276 - DNA, 75 bp, synthetic construct
  source 1..75: mol_type = other DNA
taaaaaatttaataaccaaagtaagtgattttacatatgcaaaaaaagataattatcccttgagtgatgaggtga

SEQ ID NO: 829277 - DNA, 75 bp, synthetic construct
  source 1..75: mol_type = other DNA
atatatttctatccaggaggacaggctgcaacataatgaactaaggaaggtgcgaataagcggggaaattcttct

SEQ ID NO: 829278 - DNA, 75 bp, synthetic construct
  source 1..75: mol_type = other DNA
ggtcttgagctggaaagcgtttcacttaccaactttaaccagacctcgaaagaacatttcaatccgaacaatgcc

SEQ ID NO: 829279 - DNA, 75 bp, synthetic construct
  source 1..75: mol_type = other DNA
ccagcgctgttgtggtgattgctgccgaactgattggccgtatcgcgttttacaatctctggacgttgccgatgt

SEQ ID NO: 829280 - DNA, 75 bp, synthetic construct
  source 1..75: mol_type = other DNA
actaatgtggccgttctggcgaccacatcgctggtggttatcgctgcggagctggtgggtaggatcgcattctac

SEQ ID NO: 829281 - DNA, 75 bp, synthetic construct
  source 1..75: mol_type = other DNA
ggtgggggtggtttttatcttcgccatcccgcaaatctatcagttgccgacggtggtcacctggcggacatctta

SEQ ID NO: 829282 - DNA, 75 bp, synthetic construct
  source 1..75: mol_type = other DNA
tcataattgttggtgttcgaagtgatttgaataaaaaatggtcttttccaagcgtaacgcatactcaagaaaaat

SEQ ID NO: 829283 - DNA, 75 bp, synthetic construct
  source 1..75: mol_type = other DNA
gcttcaaccagctctggaatcagcgaatatcccgccggaagtgatccaatacccacctcatgttgacgagcagtt

SEQ ID NO: 829284 - DNA, 75 bp, synthetic construct
  source 1..75: mol_type = other DNA
aacaagcaattgctgcttcccgtatagccgtagaacggagtcgccgaggcgacgacacaatccccgagattgaaa

SEQ ID NO: 829285 - DNA, 75 bp, synthetic construct
  source 1..75: mol_type = other DNA
gtgaatctcgccggtgagtggtggagcgatgcggttaaacagtttgagtgtggaaatatcgctatgctgattatg

SEQ ID NO: 829286 - DNA, 75 bp, synthetic construct
  source 1..75: mol_type = other DNA
actattagtggtagtggctggtggaatctatgcgctgcaaatgaagggcaaaagtggtgtcacactagtagcagc

SEQ ID NO: 829287 - DNA, 75 bp, synthetic construct
  source 1..75: mol_type = other DNA
tttttgtcaatcgattcaatcactgctttttattcgggtgcttcatgggattaccttcggcgttatcacaacagt

SEQ ID NO: 829288 - DNA, 75 bp, synthetic construct
  source 1..75: mol_type = other DNA
cactacaaaccgcatccactgactgcgacacaattgtggaagctgcagcactattacccgcttttggcagtggaa

SEQ ID NO: 829289 - DNA, 75 bp, synthetic construct
  source 1..75: mol_type = other DNA
actgatttccaggaaacactcactgatatctatgctgactatgttgctaaacaccacgtagcgtatcagcgcact

SEQ ID NO: 829290 - DNA, 75 bp, synthetic construct
  source 1..75: mol_type = other DNA
ggcgtctggaaaccccaccaacgtattccatcggaaagtgagctggttaatgaaattggcgtcagccgtatgacc

SEQ ID NO: 829291 - DNA, 75 bp, synthetic construct
  source 1..75: mol_type = other DNA
gctgggggagtctatgcgctgcaaatgaagggtaaaagcggtgtcgcgctagtagtggcaaaagaaattcattaa

SEQ ID NO: 829292 - DNA, 75 bp, synthetic construct
  source 1..75: mol_type = other DNA
aagagaactggcgaggaggcttgaagcatctggaacaaacactgttgaggtggtaggtcgaggcgcgattatcac

SEQ ID NO: 829293 - DNA, 75 bp, synthetic construct
  source 1..75: mol_type = other DNA
gtctggcgagagccagatcgttgatgtggaaatgcgcggcaagttcactgaaatcgacggcggcgaaagcaaaca

SEQ ID NO: 829294 - DNA, 75 bp, synthetic construct
  source 1..75: mol_type = other DNA
gagacgacactgaatatgttaattttgcccagcccttcgaccgatgcgctgaagaaattgttaccccacttttat

SEQ ID NO: 829295 - DNA, 75 bp, synthetic construct
  source 1..75: mol_type = other DNA
ccatggggcagggctggaaaggaactgttggatggaatgcagccggtggtgcatttggtaactggctggatggga

SEQ ID NO: 829296 - DNA, 75 bp, synthetic construct
  source 1..75: mol_type = other DNA
ttcgtagtttgttgcagaattatcataatcaaattgaaaacatcaatactgaccagtcagctattcatagcgatg

SEQ ID NO: 829297 - DNA, 75 bp, synthetic construct
  source 1..75: mol_type = other DNA
tctccgtggatgacaagcctttgctggaaatcgacctgctgaacttcatctacaagcgcaacggcaagagtctct

SEQ ID NO: 829298 - DNA, 75 bp, synthetic construct
  source 1..75: mol_type = other DNA
tcaccgtatttacccagagcgcagtgggggcgtttattctgctgctgattggcggtgccatgggattaattgagc

SEQ ID NO: 829299 - DNA, 75 bp, synthetic construct
  source 1..75: mol_type = other DNA
gtctgtgcttgaggattatgatgtcattattgccagagagtttttcactccggcgaagcgcttccggagtctgga

SEQ ID NO: 829300 - DNA, 75 bp, synthetic construct
  source 1..75: mol_type = other DNA
acgatcgcgaggcgggaaatctggcctttgtggtgcgcttcagctaccccgacgatacccgcaggcagaacgacg

SEQ ID NO: 829301 - DNA, 75 bp, synthetic construct
  source 1..75: mol_type = other DNA
cggttgtctacaatgacagacagggattattaaaaacaataaattctctcgaaaaacaaacttatttatcaaatt

SEQ ID NO: 829302 - DNA, 75 bp, synthetic construct
  source 1..75: mol_type = other DNA
atgaatgccaaggcaagtgcttcggatgtggcggagggttcagctattaactttgtagctccggtaacatttgct

SEQ ID NO: 829303 - DNA, 75 bp, synthetic construct
  source 1..75: mol_type = other DNA
aaaataaagttgctaaagcaatagatatgtatagcgactttgaagctgaactgaaaaataaaattttgccactgg

SEQ ID NO: 829304 - DNA, 75 bp, synthetic construct
  source 1..75: mol_type = other DNA
taaaaaaagttaatggaatgaatattattaaattacttaataaagttattatctatcaacaacagaataagcaat

SEQ ID NO: 829305 - DNA, 75 bp, synthetic construct
  source 1..75: mol_type = other DNA
gttacaacccaagaatccaccacttttccaatgttgtaatatccaagttttcagatataggggacaatttatcta

SEQ ID NO: 829306 - DNA, 75 bp, synthetic construct
  source 1..75: mol_type = other DNA
gtatgcgtgctgactggcagactaactatcaacatactcgcagtaatgatgatgacgatgaattcagcggcgatg

SEQ ID NO: 829307 - DNA, 75 bp, synthetic construct
  source 1..75: mol_type = other DNA
atgtcgaggggggatttttctctggtgctgaagcctcctggggcatcgctaacggctggtcgttatatggcggtg

SEQ ID NO: 829308 - DNA, 75 bp, synthetic construct
  source 1..75: mol_type = other DNA
gatgtcactgtcaccaatgcacatgttaccaatttaccttacgccagcgcttatttaaaaatcggtgacaatcct

SEQ ID NO: 829309 - DNA, 75 bp, synthetic construct
  source 1..75: mol_type = other DNA
ctgggccataccccaccggcagaagcagaaaaagcttattatgcttccatcggaaacgatgatctggcagcctga

SEQ ID NO: 829310 - DNA, 75 bp, synthetic construct
  source 1..75: mol_type = other DNA
gcattgaccatgaacttcgacttgcggcaggacgttcgtggtaaattcatggctaaaaaagagacattactgtct

SEQ ID NO: 829311 - DNA, 75 bp, synthetic construct
  source 1..75: mol_type = other DNA
cgcaatcactttaaatggtcaagcgcttaaagtggggagcgctagtccaacagttgttactgtggctagtaataa

SEQ ID NO: 829312 - DNA, 75 bp, synthetic construct
  source 1..75: mol_type = other DNA
aagcgacaaccagaactggtttttaaccagtgaaattcccgcaggaccgtataccccaccggaactgcccgtcat

SEQ ID NO: 829313 - DNA, 75 bp, synthetic construct
  source 1..75: mol_type = other DNA
tttggttacatgcagttcgattttctttagaataaaatttattaaaaaaatatatgctgtatttacaacagcagt

SEQ ID NO: 829314 - DNA, 75 bp, synthetic construct
  source 1..75: mol_type = other DNA
atcttgatgagttgatttatggcatatttatttctctactattttttggataccctatcttttccatattagcaa

SEQ ID NO: 829315 - DNA, 75 bp, synthetic construct
  source 1..75: mol_type = other DNA
tagcagaaaccagcaccggtattctaaacattggtggagcgcagggagaagcagaacagaaagcggggatcatca

SEQ ID NO: 829316 - DNA, 75 bp, synthetic construct
  source 1..75: mol_type = other DNA
cagaaccactgccagaaagaaagcatcagtatcgcccggagattagtagctatctggccaatattcaggctgcaa

SEQ ID NO: 829317 - DNA, 75 bp, synthetic construct
  source 1..75: mol_type = other DNA
gcttctccttatccccccgtttcaccagaaccactgccagaaagaaagcatcagtatcgcccggagattagtagc

SEQ ID NO: 829318 - DNA, 75 bp, synthetic construct
  source 1..75: mol_type = other DNA
cctggtttcgaccggagcattacaaaaaactgggtggccagctggggcacgcctataaccgtcttgttcaaaaag

SEQ ID NO: 829319 - DNA, 75 bp, synthetic construct
  source 1..75: mol_type = other DNA
ggagaaggcgctgagccgctgtctgcattctattttgttatcagtgcgccgcgttcagtttctaaaggtgatatc

SEQ ID NO: 829320 - DNA, 75 bp, synthetic construct
  source 1..75: mol_type = other DNA
aaaatagaggcgttcacccataaaagatttagaagtaataaaagtgaattacaaaatgaacttacagagtactta

SEQ ID NO: 829321 - DNA, 75 bp, synthetic construct
  source 1..75: mol_type = other DNA
ttttactgtgcagtattttgttggtgggttgctcatccacccgaccgcctttaacagacgacgcgtcgactgtca

SEQ ID NO: 829322 - DNA, 75 bp, synthetic construct
  source 1..75: mol_type = other DNA
aaatggatttcatgattctgaaagacgtgaatgaacacatggatggtatgtttcaacgtttttctaaactgttac

SEQ ID NO: 829323 - DNA, 75 bp, synthetic construct
  source 1..75: mol_type = other DNA
tttgtgattcgggcaaacataccgtggggatgtgtatctcacgtctggcgaaagaactcagcgccaaagacgcca

SEQ ID NO: 829324 - DNA, 75 bp, synthetic construct
  source 1..75: mol_type = other DNA
tatgccagtcagttggcagcagaaccgatagcgactaatgacgttcgagagcaaacagccgttccgccagttccg

SEQ ID NO: 829325 - DNA, 75 bp, synthetic construct
  source 1..75: mol_type = other DNA
gatgattttgacggtgacaggcgaggtatcggtgattgtctggatgaggctgagcaagagcttatcgttaccatt

SEQ ID NO: 829326 - DNA, 75 bp, synthetic construct
  source 1..75: mol_type = other DNA
cctatagcgcctaatgacgttcgagagcagacagccattccacaagttccggtaactccggatggttggataagc

SEQ ID NO: 829327 - DNA, 75 bp, synthetic construct
  source 1..75: mol_type = other DNA
ggcaaatccagtaatcacacgtaacggaaagcgaagcgacgtgatgatgaatgcgaaatatctggcaaaaatgaa

SEQ ID NO: 829328 - DNA, 75 bp, synthetic construct
  source 1..75: mol_type = other DNA
ccacttcaaacttgttgagcgtactgaaggctatataccaggatcggcagaaagggagtgcaacgaataccagtt

SEQ ID NO: 829329 - DNA, 75 bp, synthetic construct
  source 1..75: mol_type = other DNA
gtggcgaagacctgtatctcaaggaggtaacccactggatgccgctgccagaaccgccgcaggaggtgaatcaat

SEQ ID NO: 829330 - DNA, 75 bp, synthetic construct
  source 1..75: mol_type = other DNA
actgtaaaattttaaacacagacacacccgataattctgcttcagatttagacagtttcttaaagaaaaacaaaa

SEQ ID NO: 829331 - DNA, 75 bp, synthetic construct
  source 1..75: mol_type = other DNA
tggcgttgttcttggggctggagctgtagttacaaaagatattccttcaaacatggttgctgtaggaaacccagc

SEQ ID NO: 829332 - DNA, 75 bp, synthetic construct
  source 1..75: mol_type = other DNA
gtcccgtccggaagcatttgttccttatatttactcatatgatgagttacataatttatttcaggcagccaaaaa

SEQ ID NO: 829333 - DNA, 75 bp, synthetic construct
  source 1..75: mol_type = other DNA
acagttctggctggaatcgggatgcgtctatggttatcgcaaaatccatttagatctgcgggacagcgggcaaca

SEQ ID NO: 829334 - DNA, 75 bp, synthetic construct
  source 1..75: mol_type = other DNA
gaatactactttcgcaattacggcttatccctgcaacgtgaagatttcgatccttttaccggtatgccagtcact

SEQ ID NO: 829335 - DNA, 75 bp, synthetic construct
  source 1..75: mol_type = other DNA
atcgaccgtaatatgcagtacctgcagcagcaggtgtccacaatcgtttcaggctcctatcaaagcaactatcac

SEQ ID NO: 829336 - DNA, 75 bp, synthetic construct
  source 1..75: mol_type = other DNA
gggcgaatttgacatgagcgccgctacgtactcacagcaacctccgctgtttgcggccatgctgaaacagttttc

SEQ ID NO: 829337 - DNA, 75 bp, synthetic construct
  source 1..75: mol_type = other DNA
tattttcataacagcatcaattcataagtcttcttgtaccggaaagttcaactacgggagaaatttctatgcaaa

SEQ ID NO: 829338 - DNA, 75 bp, synthetic construct
  source 1..75: mol_type = other DNA
agcaactgtgaaacttactgattcaaatcaaattaatcccaataacataacctgggggtatcgtgggggacgttt

SEQ ID NO: 829339 - DNA, 75 bp, synthetic construct
  source 1..75: mol_type = other DNA
accagcagagattttttatctcagaaaccaaaaaatgattttgagccggttgttagacatacggatacatctgct

SEQ ID NO: 829340 - DNA, 75 bp, synthetic construct
  source 1..75: mol_type = other DNA
gccagatttacacctatgttgcaatgaattttcagaatctgaatttattaattaactcatcattcgaacccacat

SEQ ID NO: 829341 - DNA, 75 bp, synthetic construct
  source 1..75: mol_type = other DNA
tacgatagtaactccatggggttcactgactatgaggttggttttttcaatgcaaaaacatttatatactatttc

SEQ ID NO: 829342 - DNA, 75 bp, synthetic construct
  source 1..75: mol_type = other DNA
tagctttggtcttatattctttaattgttttaaaaacaaaagatattattcatcctcttggaattggtattgttt

SEQ ID NO: 829343 - DNA, 75 bp, synthetic construct
  source 1..75: mol_type = other DNA
ctgcggagcagctttggcaccgaatttagcaaaatgcgcaatctgactcagcgcttgaaagctgccgggctcgat

SEQ ID NO: 829344 - DNA, 75 bp, synthetic construct
  source 1..75: mol_type = other DNA
aaaagagttttgcgaaggtgtaggacttaaagccagctttggtacagagttcagcaaaatgagaaatcttaccga

SEQ ID NO: 829345 - DNA, 75 bp, synthetic construct
  source 1..75: mol_type = other DNA
tgtttaaccagtacgccgctctatccggactggtcatttgccgcactacctgtagtgagtgacgagctggccgat

SEQ ID NO: 829346 - DNA, 75 bp, synthetic construct
  source 1..75: mol_type = other DNA
cgttggtactgtttacagtactgggacaaacggtggtcggcgcacttatcgtcagcggcctcggctggatggcag

SEQ ID NO: 829347 - DNA, 75 bp, synthetic construct
  source 1..75: mol_type = other DNA
taccacaccatttgccatcattagcgttctggcgctgatcgcttgtgccggggtgattgtgctgcaaggtttgtc

SEQ ID NO: 829348 - DNA, 75 bp, synthetic construct
  source 1..75: mol_type = other DNA
ttgggtcaatgcgtatatggtggctggtggcagtcatcggtaaaatgccgcaagcgttggggaaactctggttac

SEQ ID NO: 829349 - DNA, 75 bp, synthetic construct
  source 1..75: mol_type = other DNA
gtatgtaaagtatgtgaatactggtgagggaattaatccgggtacggttaacggaatatcaacatttacattttc

SEQ ID NO: 829350 - DNA, 75 bp, synthetic construct
  source 1..75: mol_type = other DNA
atcccgatggatccattctgtttataatattatttcgccttcactctatatgcccgccattcgcgaggctggttt

SEQ ID NO: 829351 - DNA, 75 bp, synthetic construct
  source 1..75: mol_type = other DNA
gcatggttcagtgggcaaaggatcgtgccaaacgcaaagcaaatgagaaaccggttattgacccgcgcccgtggg

SEQ ID NO: 829352 - DNA, 75 bp, synthetic construct
  source 1..75: mol_type = other DNA
ggttttaaccaggacagtattttacttatcagcagtgccacctctggtaaaggagcagaaaacctcaagcgatac

SEQ ID NO: 829353 - DNA, 75 bp, synthetic construct
  source 1..75: mol_type = other DNA
gcgattcgctccgagattgcacctgagtctccgctatcgttgatcgtcgagtcaattgtccgtgcgtgccgacac

SEQ ID NO: 829354 - DNA, 75 bp, synthetic construct
  source 1..75: mol_type = other DNA
ggctgacgggggagcggctggcggcacagatagagccggtttatttgcctgagcgaaagatacagctttatcact

SEQ ID NO: 829355 - DNA, 75 bp, synthetic construct
  source 1..75: mol_type = other DNA
tcagactttttcagggatactatttttcctgtccggttaccggagataagctgtccggtatacttacaagtggct

SEQ ID NO: 829356 - DNA, 75 bp, synthetic construct
  source 1..75: mol_type = other DNA
cgtggtctggatatgcttggaagccgctacaccgcgatgattgcgggtataggcagcagtttaactgtcaaacaa

SEQ ID NO: 829357 - DNA, 75 bp, synthetic construct
  source 1..75: mol_type = other DNA
ttctaaaaattgcataaagtattactataaagttgtgagctcattagattacacacatgcagagacagtcaaata

SEQ ID NO: 829358 - DNA, 75 bp, synthetic construct
  source 1..75: mol_type = other DNA
ggttttttatatcaatattccaaaagttaaacaaagaggagcttatagaaagcagtttagtaaagtacaaatccc

SEQ ID NO: 829359 - DNA, 75 bp, synthetic construct
  source 1..75: mol_type = other DNA
ttgattttggtgttaaaaacaaagaaatgatggcggcatccatcgccgcttccggaagttcaggggaagccatcg

SEQ ID NO: 829360 - DNA, 75 bp, synthetic construct
  source 1..75: mol_type = other DNA
ccaaatgggcgcatttctccagattttcgcaaaaaacaaaggaagtgcagaggaaactacaaccagtattcaggc

SEQ ID NO: 829361 - DNA, 75 bp, synthetic construct
  source 1..75: mol_type = other DNA
tccgatgtttttggttccggagttatgcccgtttatgttgtgaacatgggcaaaggtgggatgggtggtcctggt

SEQ ID NO: 829362 - DNA, 75 bp, synthetic construct
  source 1..75: mol_type = other DNA
tgaagcaggttaaagattttatgcagaagctggccagcgacctcaataacatgaatgtctcatcctgccaggcgg

SEQ ID NO: 829363 - DNA, 75 bp, synthetic construct
  source 1..75: mol_type = other DNA
acttcgccttaaaaagcggctctgccacattaacgtcattaacagcggtgaccgatcaaaacggaatcgcgacaa

SEQ ID NO: 829364 - DNA, 75 bp, synthetic construct
  source 1..75: mol_type = other DNA
tacactgagcggtacaaaatccggcacctaccccgtgacagttagcgtgaacaattatggtgtcagtgatacgaa

SEQ ID NO: 829365 - DNA, 75 bp, synthetic construct
  source 1..75: mol_type = other DNA
tgccggcgcgcactaccgaccaggatttgatcaaggccatgatggaagggggcagcgctaaaatctatcactgca

SEQ ID NO: 829366 - DNA, 75 bp, synthetic construct
  source 1..75: mol_type = other DNA
gaagtaaaccggattttattattcgcacctagacatgagttgcgctcattcccatccgaacattggaaaaatccg

SEQ ID NO: 829367 - DNA, 75 bp, synthetic construct
  source 1..75: mol_type = other DNA
ctctagatcttatggggatagaatagaagtaaaccggattttattattcgcacctagacatgagttgcgctcatt

SEQ ID NO: 829368 - DNA, 75 bp, synthetic construct
  source 1..75: mol_type = other DNA
caattatggtgtcagtgatacgaaacaggtgactttgattgccgatgctggtaccgcaaaactagcctccttaac

SEQ ID NO: 829369 - DNA, 75 bp, synthetic construct
  source 1..75: mol_type = other DNA
tgatgcctatctgggctcgttctccttcgtaaacagtgagcagatcgaacgctttattaagcaattgatgggtaa

SEQ ID NO: 829370 - DNA, 75 bp, synthetic construct
  source 1..75: mol_type = other DNA
agaacggtattgctgaagttacccttaaaggcacggttttgggtgttcatacagccgaagccatactgcttaacg

SEQ ID NO: 829371 - DNA, 75 bp, synthetic construct
  source 1..75: mol_type = other DNA
ggccaaaagatttcattggcgtctcttcgtggagttctacgattcgcgcgatggtcgatgaagttcacgcccaaa

SEQ ID NO: 829372 - DNA, 75 bp, synthetic construct
  source 1..75: mol_type = other DNA
cactggggtaacatttactctgccggaagatgtgagggcgaacttcacgctgagcgatggcggtaaagcgattac

SEQ ID NO: 829373 - DNA, 75 bp, synthetic construct
  source 1..75: mol_type = other DNA
gcagcaaataccgtctcggtcaatgtcgctgatgaaggaagcaacccaatcaatgatcataccgtcacgtttgcg

SEQ ID NO: 829374 - DNA, 75 bp, synthetic construct
  source 1..75: mol_type = other DNA
cggtaaactggtctatgaacagtattatggcgatgaagtggccctgttcgataaagacgatcggcaaagtaatcc

SEQ ID NO: 829375 - DNA, 75 bp, synthetic construct
  source 1..75: mol_type = other DNA
gtagaggcattgttgaaataaacatggggaatcacgaattctccttcgatgagtttgcttatacagactggttct

SEQ ID NO: 829376 - DNA, 75 bp, synthetic construct
  source 1..75: mol_type = other DNA
cagagaacaaggcaaaaacatttcctcatgcgaagaatcctttgggtgggggggatatgaaggttaaagcgctgt

SEQ ID NO: 829377 - DNA, 75 bp, synthetic construct
  source 1..75: mol_type = other DNA
aaatataaaccagaatatgtctttattcgtaataagcctctggcaatgaccgtcgggatttgtgtttttccttta

SEQ ID NO: 829378 - DNA, 75 bp, synthetic construct
  source 1..75: mol_type = other DNA
atgatctggcagcctgagttcacagataaaatactctccaggaaacccggggcggttcacaccgataactatggt

SEQ ID NO: 829379 - DNA, 75 bp, synthetic construct
  source 1..75: mol_type = other DNA
tggatattttgccaataacggtagcgccggcaatataaagatagagataggagatgctgatgtttcatcagtaac

SEQ ID NO: 829380 - DNA, 75 bp, synthetic construct
  source 1..75: mol_type = other DNA
tttattttattttattttttttttttttttttttttttttttttttttttgtgcgttggcgatcaaagtattttg

SEQ ID NO: 829381 - DNA, 69 bp, synthetic construct
  source 1..69: mol_type = other DNA
catactcctccggcagaagcagaaaaagcttattatgcctccatcggaaacaatgatctggcagcctga

SEQ ID NO: 829382 - DNA, 75 bp, synthetic construct
  source 1..75: mol_type = other DNA
gtgacagttagcgtgaacagttacggtgtcagtgatacgaagccggtgactttgattgccgatgctggtaccgct

SEQ ID NO: 829383 - DNA, 75 bp, synthetic construct
  source 1..75: mol_type = other DNA
atactaacgacagtggtgttgctgaagttacccttaagggcacggttttgggtgttcatacagtcgaagccacac

SEQ ID NO: 829384 - DNA, 75 bp, synthetic construct
  source 1..75: mol_type = other DNA
gccgcgtggacctactgggtggtgcatattccctatctggcacaaaaaccccaggcaattctgattgcgctcggt

SEQ ID NO: 829385 - DNA, 75 bp, synthetic construct
  source 1..75: mol_type = other DNA
aatcaaacgcgcaacccaggaaaagaatttccaaaagggatgctatgcctggcggtgatggttgcggtttgtgcc

SEQ ID NO: 829386 - DNA, 75 bp, synthetic construct
  source 1..75: mol_type = other DNA
acgactgagagagcaaattcacgatgccataggtgacatggatatacccgatgcaaaattcatattcgggggata

SEQ ID NO: 829387 - DNA, 75 bp, synthetic construct
  source 1..75: mol_type = other DNA
agcaatcgcatggggcaagcgctaaagttggcatttaatggtcgacgcaaagtgttgctaactgcgacgccactg

SEQ ID NO: 829388 - DNA, 75 bp, synthetic construct
  source 1..75: mol_type = other DNA
ggcctgtcagccaggataagtccaaaagggaaaattactttccagtaccgttacagattcaacggtaagccagtg

SEQ ID NO: 829389 - DNA, 75 bp, synthetic construct
  source 1..75: mol_type = other DNA
cttcgcaaatcaataaattcaactcaaacactgattcaaaagtacttcagactgattttttatcaagaaatggag

SEQ ID NO: 829390 - DNA, 75 bp, synthetic construct
  source 1..75: mol_type = other DNA
aaaaagtaacttccgttctaccacactctatatcagatactgtccagacatttgcaaataattcagctttagaaa

SEQ ID NO: 829391 - DNA, 75 bp, synthetic construct
  source 1..75: mol_type = other DNA
caaatagaggcgatgaataaactggctgattactacatgaagcccattgatttacaaaatgaaataacatcctga

SEQ ID NO: 829392 - DNA, 75 bp, synthetic construct
  source 1..75: mol_type = other DNA
atgcttacagataccaaattacgaaacattcacggcaagccatacgacggcccggaagaagtgccggacgcgggc

SEQ ID NO: 829393 - DNA, 75 bp, synthetic construct
  source 1..75: mol_type = other DNA
aggacaaacctttcagcgcttggcattgcgccgcacgtagccgaaaaggttttaggtcataaactggcgggaatg

SEQ ID NO: 829394 - DNA, 75 bp, synthetic construct
  source 1..75: mol_type = other DNA
acccgttaggggaatggtcgctggataccgccaaagccaacaccactccagtggcggagttggtctttgactatg

SEQ ID NO: 829395 - DNA, 75 bp, synthetic construct
  source 1..75: mol_type = other DNA
gagcaacgaattggtcgctgccatcgctatgggcaaaagcatgatgtcgttgtcattaacttcctaaatactcgc

SEQ ID NO: 829396 - DNA, 75 bp, synthetic construct
  source 1..75: mol_type = other DNA
taattgacgagttccgcgagcgcgctgaaattatgattgccactgaagcggccgccgaaggtgtaaacctgcaat

SEQ ID NO: 829397 - DNA, 75 bp, synthetic construct
  source 1..75: mol_type = other DNA
cttaaatacggtagccgtgttccctgagctgttgagaaaagtccttaataatattttagaagatataaaagattc

SEQ ID NO: 829398 - DNA, 75 bp, synthetic construct
  source 1..75: mol_type = other DNA
ggctggtcaccggccccctggtacataccgttttcaaaactgatggtatcggtaaggaggccgcatggtggaaac

SEQ ID NO: 829399 - DNA, 75 bp, synthetic construct
  source 1..75: mol_type = other DNA
ataagctgaaggatatggcagtcctgtaccgggatgataagcacatcgcttacaccgggcagcgcggcgtgatgc

SEQ ID NO: 829400 - DNA, 75 bp, synthetic construct
  source 1..75: mol_type = other DNA
cgagggcgcgaccctgacggcaagcgtcactgacgcttacggcaacccgctagaaggtatcaaggtcaatttccg

SEQ ID NO: 829401 - DNA, 75 bp, synthetic construct
  source 1..75: mol_type = other DNA
tcagatttgggacgctacatcttgaaaattccgatttttctgttggtcgtaatgcaaatgtaatcggggacattc

SEQ ID NO: 829402 - DNA, 75 bp, synthetic construct
  source 1..75: mol_type = other DNA
gcgagctggcagcaggcaacgcgggtgacattaggacgctgcccgcaaggtctctttactgattgccgcactggc

SEQ ID NO: 829403 - DNA, 75 bp, synthetic construct
  source 1..75: mol_type = other DNA
agacgcaggtgattgtccttatttccaaaccgccagcctatgacgttgcggaaagggttctcacccaagcgcaga

SEQ ID NO: 829404 - DNA, 75 bp, synthetic construct
  source 1..75: mol_type = other DNA
ctggaagcagtgttgctggatcgcgctgcgccaggatttgtcggcaaccgtctgcaatttgcactgttgcgtgaa

SEQ ID NO: 829405 - DNA, 75 bp, synthetic construct
  source 1..75: mol_type = other DNA
tgggcgccggattgatgggcgtggggattgccactcatttcgcccgctttggtcatgatatctggctgtacgata

SEQ ID NO: 829406 - DNA, 75 bp, synthetic construct
  source 1..75: mol_type = other DNA
gtaacgccggtcattacaacccaggaaaccgatgacaaaataacatggtcactgacaggctataacacggtagca

SEQ ID NO: 829407 - DNA, 75 bp, synthetic construct
  source 1..75: mol_type = other DNA
catgaacctctggcgggggaagacgacgatacgcttctggttcccgtctctatacaagggcgcgtaacaggcaac

SEQ ID NO: 829408 - DNA, 75 bp, synthetic construct
  source 1..75: mol_type = other DNA
aggaatgtatgaactagtaagaacattagatcaatttgcaaaaaatgatggatctccattgaatcatgtgcgaaa

SEQ ID NO: 829409 - DNA, 75 bp, synthetic construct
  source 1..75: mol_type = other DNA
taggtcgcgatcctgttaccccgatccctgaattaattttaaagaatattcatggtaaaacagtcatggttactg

SEQ ID NO: 829410 - DNA, 75 bp, synthetic construct
  source 1..75: mol_type = other DNA
ttggtgatggggcctgattgcggtacggcgattgttaatgggatcccgctggggtttgctaacgttgtccgcaga

SEQ ID NO: 829411 - DNA, 75 bp, synthetic construct
  source 1..75: mol_type = other DNA
tccgttcagcctgcatcgatggctatttcagtaagaccctcagtgttgaagagttgtgtaaatacaaacccgacc

SEQ ID NO: 829412 - DNA, 75 bp, synthetic construct
  source 1..75: mol_type = other DNA
attcatctaccgatcttgctgtcaggtcattaaccacatctaacccggtaaaatctggcggagggcgaattgatg

SEQ ID NO: 829413 - DNA, 75 bp, synthetic construct
  source 1..75: mol_type = other DNA
tccactaaaagtgcatccatcatgttcggtcatgatgaaagcaccccatcgaacctgtctgacaaagcctcaaaa

SEQ ID NO: 829414 - DNA, 75 bp, synthetic construct
  source 1..75: mol_type = other DNA
acgaacagggtaaggctaccgtcacttataccaatacccgctcctcgatagaatcaggagcgagaccggataccg

SEQ ID NO: 829415 - DNA, 75 bp, synthetic construct
  source 1..75: mol_type = other DNA
tcaatgacccatcgggagcaactctgactgtaaggttaactcatgcaaacggggctccattgagccatgaactcg

SEQ ID NO: 829416 - DNA, 75 bp, synthetic construct
  source 1..75: mol_type = other DNA
cagccagactgggaaaccggaacattcagatttggaacgctacatcttgaaaattccgatttttctgttggtcgt

SEQ ID NO: 829417 - DNA, 75 bp, synthetic construct
  source 1..75: mol_type = other DNA
cattcagtgcagagccatcctcgcaaatgatcatcagccagaatacggtgtctactaatacgcagggtatagccg

SEQ ID NO: 829418 - DNA, 75 bp, synthetic construct
  source 1..75: mol_type = other DNA
gcaacagtgactgatggaaacggcaacccgttagccaatgaggcggtgacattcacgctaccggcagatgtgagc

SEQ ID NO: 829419 - DNA, 75 bp, synthetic construct
  source 1..75: mol_type = other DNA
gctgactgcaaccttgcaggataaaaatggcaacccactaaaagataaagaaatcaccttctctgtgccaaacga

SEQ ID NO: 829420 - DNA, 75 bp, synthetic construct
  source 1..75: mol_type = other DNA
aagcacgcccggccaatggctgggatgtacgcgcagaaggctggctacccgcctggccgcaccttggcggtaaac

SEQ ID NO: 829421 - DNA, 75 bp, synthetic construct
  source 1..75: mol_type = other DNA
aacaggtggtgacgaataacagtgacagcgtgcagctgacggcgacggtgaaagatccgtcgaatcatccggtgg

SEQ ID NO: 829422 - DNA, 75 bp, synthetic construct
  source 1..75: mol_type = other DNA
gaagtacctgaccaacgcccagagcatgggcatgagtgcaacgtatctgttgcaggtgtcggacttcattgctca

SEQ ID NO: 829423 - DNA, 75 bp, synthetic construct
  source 1..75: mol_type = other DNA
gcactggctcagacaccaccgatataaaaaataaggacttaatatttactggcggtggagatatcctcctgaaat

SEQ ID NO: 829424 - DNA, 75 bp, synthetic construct
  source 1..75: mol_type = other DNA
ctcaacaggtggtgacgaataacagtgacagcgtgcagcttacggcgatggtgaaagatccgtcgaatcatccgg

SEQ ID NO: 829425 - DNA, 75 bp, synthetic construct
  source 1..75: mol_type = other DNA
cggcaacccggtagaaggcataaaagttaatttccgcggaacctccgtcacgctaagcagcaccagcgttgaaac

SEQ ID NO: 829426 - DNA, 75 bp, synthetic construct
  source 1..75: mol_type = other DNA
catcagaagatcaggcgctacagcttgccaatgacagccagtatggcctcggcgcggcggtgtggacgcgcgatc

SEQ ID NO: 829427 - DNA, 75 bp, synthetic construct
  source 1..75: mol_type = other DNA
gcgtgattgccgccattgtaccgtggaacttcccgctgctgctgacctgctggaaactcggcccggcgctggcgg

SEQ ID NO: 829428 - DNA, 75 bp, synthetic construct
  source 1..75: mol_type = other DNA
tgaccgtgccgtttggcggctataagcagagcggcaacggtcgcgacaaatccctgcacgcccttgaaaaattca

SEQ ID NO: 829429 - DNA, 75 bp, synthetic construct
  source 1..75: mol_type = other DNA
gaacgtgaagaacgcctggctgcgatggaacaggaaagagagaggcgcaggcagctggcacaggaacgtccaaaa

SEQ ID NO: 829430 - DNA, 75 bp, synthetic construct
  source 1..75: mol_type = other DNA
ttttctcttacatgaaggagacccacggcatcaccccggtgcagcttaaacacaactaccggaccaacgtggaaa

SEQ ID NO: 829431 - DNA, 75 bp, synthetic construct
  source 1..75: mol_type = other DNA
gcggcggccattggcccgacaatctttgtggatgtggccccgaatgcgtccttaagccgcgaagagatttttggc

SEQ ID NO: 829432 - DNA, 75 bp, synthetic construct
  source 1..75: mol_type = other DNA
atgttactttcctgactttacctgttagtacaactggaaaagtgcctgcggcaggtcgttataatgcactggcta

SEQ ID NO: 829433 - DNA, 75 bp, synthetic construct
  source 1..75: mol_type = other DNA
ttacccttcaggatgatgttctcgatataatggaagacatacaaaagcagcaaccatcgcatttctacccttgga

SEQ ID NO: 829434 - DNA, 75 bp, synthetic construct
  source 1..75: mol_type = other DNA
ggtctgccaaatcgcaataacctgcacaattacctcgatgacctggtcgacaaagccgtctctcccgtggtgtat

SEQ ID NO: 829435 - DNA, 75 bp, synthetic construct
  source 1..75: mol_type = other DNA
gccgactcggtccatagctttattcgtgaaggcgaaagcaaagggcaactgctgctggatggtcgtaacgctgag

SEQ ID NO: 829436 - DNA, 75 bp, synthetic construct
  source 1..75: mol_type = other DNA
tcggtccggtgctggtggtcacgcgtttcacatcagaagaacaggcgctacagcttgccaacgacagccagtacg

SEQ ID NO: 829437 - DNA, 75 bp, synthetic construct
  source 1..75: mol_type = other DNA
agccggttccgtcttcgtcaataactacaacgacggcgatatgaccgtgccgtttggcggctataagcagagcgg

SEQ ID NO: 829438 - DNA, 75 bp, synthetic construct
  source 1..75: mol_type = other DNA
cccgcctctaaagcatttatcgcccgtaaatgggctgtagcagcccaggaacgcattacagctgttatgcagaga

SEQ ID NO: 829439 - DNA, 75 bp, synthetic construct
  source 1..75: mol_type = other DNA
gcaggataaaggctgctgatgctctactgtcttctcctgagtttaaatcaatgctatttcgcctgcaaaacgcac

SEQ ID NO: 829440 - DNA, 75 bp, synthetic construct
  source 1..75: mol_type = other DNA
tgggtagaaaacttcagcaatcagcaattccaaaagttgaaagtgctgttgttaatatggcaaaaggaaacggtg

SEQ ID NO: 829441 - DNA, 75 bp, synthetic construct
  source 1..75: mol_type = other DNA
agacaatcgcgcaaagagcggaaatatttaaacctattggtcttaaattagaccacacaggagtaccaaaaggtt

SEQ ID NO: 829442 - DNA, 75 bp, synthetic construct
  source 1..75: mol_type = other DNA
agtttgattcccgtttcctggaattaaaaggcgacacgaaaatcgatctgaaacgtttttccagtcagggctatg

SEQ ID NO: 829443 - DNA, 75 bp, synthetic construct
  source 1..75: mol_type = other DNA
agtgcctgggctgatgatgatattcagtttgattcccgtttcctggaattaaaaggcgacacgaaaatcgatctg

SEQ ID NO: 829444 - DNA, 75 bp, synthetic construct
  source 1..75: mol_type = other DNA
gtcggggttaacctggggccgtggcgtatgcgtgctgactggcagactaactatcaacatactcgcagtaatgat

SEQ ID NO: 829445 - DNA, 75 bp, synthetic construct
  source 1..75: mol_type = other DNA
gttagttaagcgcggggtatttacccaaatcgggcgaactgtggggattaacaaagcggtcagcgaatgggtgaa

SEQ ID NO: 829446 - DNA, 75 bp, synthetic construct
  source 1..75: mol_type = other DNA
gtcaacaggtgcgagttgccgaaaatttctcagggaaggattacgggcagactgaaatcccatcatgggcgaggg

SEQ ID NO: 829447 - DNA, 75 bp, synthetic construct
  source 1..75: mol_type = other DNA
caaactattggaggggagttggcgactcagatacgtaagcagacagctactcatcgggataaccgcgaacatgat

SEQ ID NO: 829448 - DNA, 75 bp, synthetic construct
  source 1..75: mol_type = other DNA
tgacgcgtgaagactatctcgcccttctcgcagatgaagtcgagcaagacattccatatgaccctgaaccgatcg

SEQ ID NO: 829449 - DNA, 75 bp, synthetic construct
  source 1..75: mol_type = other DNA
aaggtagctcatgctgtttgccgcaaaacctatgggttcaacaaaaagatggaccgcatagcagactcacaactt

SEQ ID NO: 829450 - DNA, 75 bp, synthetic construct
  source 1..75: mol_type = other DNA
tcggacggagtgtgaaaaatcacctgaccgtcacgaagaaaccgacaaggcattcgaggaaatattctggtgtgc

SEQ ID NO: 829451 - DNA, 75 bp, synthetic construct
  source 1..75: mol_type = other DNA
atggccgcgctggcgctggaacaggaaaaaagccgtcagcatattgaacaactcatccaatttgatccgatgacc

SEQ ID NO: 829452 - DNA, 75 bp, synthetic construct
  source 1..75: mol_type = other DNA
ttgttccctccggtattcaccatcacctttttgagaaccttcgccgcaaggggcatcactgccacggccggaaac

SEQ ID NO: 829453 - DNA, 75 bp, synthetic construct
  source 1..75: mol_type = other DNA
ataccggcatcccgcacagtttcagtaatacgtcggcaggtatttgccgaattatcagcgcccatacgcccacca

SEQ ID NO: 829454 - DNA, 75 bp, synthetic construct
  source 1..75: mol_type = other DNA
gagtctatcgaaatggttcgtcgatatgctcacctcgcgcctaatcaccttaccgaacacgcacggcaaatagac

SEQ ID NO: 829455 - DNA, 75 bp, synthetic construct
  source 1..75: mol_type = other DNA
tgcaaattaccggagaaggcgatggactacctgaagcggaacgaactgataagcgcggaggatgttttgcgatga

SEQ ID NO: 829456 - DNA, 75 bp, synthetic construct
  source 1..75: mol_type = other DNA
taatcgaagaggccaaattaaaaatagcgattgcgaaatgccaccccaattcagggttggcacgggtagagggtg

SEQ ID NO: 829457 - DNA, 75 bp, synthetic construct
  source 1..75: mol_type = other DNA
agtgcaggcaccgggcattgagatcgcaataaacgaactggtgtctctgtccccacggctggataaacgagcggt

SEQ ID NO: 829458 - DNA, 75 bp, synthetic construct
  source 1..75: mol_type = other DNA
taaattcaatgtattgcagtttattggtagatactgttatggcctgcaagttttttcctggtccggtttcccgga

SEQ ID NO: 829459 - DNA, 75 bp, synthetic construct
  source 1..75: mol_type = other DNA
ggttcattttagtggtgacagtggacttcgggttgcgctggttgcagagtattacagaggattaaaatatggata

SEQ ID NO: 829460 - DNA, 75 bp, synthetic construct
  source 1..75: mol_type = other DNA
aaagcccggataaacctgcgcaacagttgttactgcttttccacggtgtcggggataacccggtggcaatgggga

SEQ ID NO: 829461 - DNA, 75 bp, synthetic construct
  source 1..75: mol_type = other DNA
acagatccgcccggcttatgtcatcaccaaagattactcctttaaagccccccactggcaggcccgttaccgtaa

SEQ ID NO: 829462 - DNA, 75 bp, synthetic construct
  source 1..75: mol_type = other DNA
tatgggaaacatgaccacttttgtacagggaagtagaacggaacatattaatctgacagacaccagttcagtaat

SEQ ID NO: 829463 - DNA, 75 bp, synthetic construct
  source 1..75: mol_type = other DNA
gggcgagacgtcgcgggattgtgcacgctaacgtgtaaatggaattatctggctcatgaacaacgctttagccat

SEQ ID NO: 829464 - DNA, 75 bp, synthetic construct
  source 1..75: mol_type = other DNA
taatcgaagaagccaaattaaaaatagcgattgcgaaatgccacccaaattcagggatggcacaggtagagggcg

SEQ ID NO: 829465 - DNA, 75 bp, synthetic construct
  source 1..75: mol_type = other DNA
acggcgtcgataacatcatcgtcaccgtctcgcgcggctatttgcagcttaatcccgaggtcattatcgaagcgc

SEQ ID NO: 829466 - DNA, 75 bp, synthetic construct
  source 1..75: mol_type = other DNA
aggaaaaccgatggcatcatcgctgccgcctcggtgcgggaaaatatcatcctcgctctccaggcccagcgcggc

SEQ ID NO: 829467 - DNA, 75 bp, synthetic construct
  source 1..75: mol_type = other DNA
tgaacgataaccaaggccgtttcgtatttccgaataccagatttggcccattactggaggagtttgaagaagtgc

SEQ ID NO: 829468 - DNA, 75 bp, synthetic construct
  source 1..75: mol_type = other DNA
tggctccagcttgttaatgatgataaagaactatctatagataacaagaacggtgatttttttgctacatggagt

SEQ ID NO: 829469 - DNA, 75 bp, synthetic construct
  source 1..75: mol_type = other DNA
ctaaggataattggtctgatttcttgcctgatgtatggtctgagcacaccatatatcctcagtctattattgagg

SEQ ID NO: 829470 - DNA, 75 bp, synthetic construct
  source 1..75: mol_type = other DNA
aagctgatcctgatgtatgccgccgcgcttatggctacttcgtccggcgcgcgccgcatcaaatcgcagggtgcg

SEQ ID NO: 829471 - DNA, 75 bp, synthetic construct
  source 1..75: mol_type = other DNA
caaatacattacagacaagcaggaaaacctaaaatgcgtaaatctgtatggattggtccaaagcttgacgcaagt

SEQ ID NO: 829472 - DNA, 75 bp, synthetic construct
  source 1..75: mol_type = other DNA
gtgctactgagcgtaagaacatcgatttagttgaaactttcaactatctcattggcttacatgtgaaatccatcg

SEQ ID NO: 829473 - DNA, 75 bp, synthetic construct
  source 1..75: mol_type = other DNA
aactgctggccgaatccgggatgcgccatcacccggtaaatcccatgaccgacagctatcttccccgtctggttg

SEQ ID NO: 829474 - DNA, 75 bp, synthetic construct
  source 1..75: mol_type = other DNA
cagtacctatcaatttcaatataaacaatgaactaacgctgttagcgtggttttttgcatcattggccctcaaac

SEQ ID NO: 829475 - DNA, 75 bp, synthetic construct
  source 1..75: mol_type = other DNA
gattttgaaacagatgattttgatatcaaaaaaaacgagagtgagatttatgatgaaaatgacgatcagatgatt

SEQ ID NO: 829476 - DNA, 75 bp, synthetic construct
  source 1..75: mol_type = other DNA
atgattaatagttttgaagacttgcctgtaaaaattgagtttgttcttggtaagaaaataatgaatctatatgaa

SEQ ID NO: 829477 - DNA, 75 bp, synthetic construct
  source 1..75: mol_type = other DNA
ccggtgcggcgactgatgttctgtatgcgctgtttttccgtggtgcgctgcaaagtggcgagctgccatctaaat

SEQ ID NO: 829478 - DNA, 75 bp, synthetic construct
  source 1..75: mol_type = other DNA
acctgatgcccagccaatgtattgcctgcggcgcctgtgcttgtccggcaaatgcgctgactatccagaccgacg

SEQ ID NO: 829479 - DNA, 75 bp, synthetic construct
  source 1..75: mol_type = other DNA
ctgcgttggtggtgatcgatttacaagaaggcatcttaccttttgccggtggtccacatactgccgatgaggtag

SEQ ID NO: 829480 - DNA, 75 bp, synthetic construct
  source 1..75: mol_type = other DNA
tgcttatcccgctggcaaatgttcttggttgcgacccgatgtggctgttaaccggtaaaccaacagctgaggata

SEQ ID NO: 829481 - DNA, 75 bp, synthetic construct
  source 1..75: mol_type = other DNA
agcctcgctgcgtcgcgttcatgtaaacaaaatttagctattaattcacggaatcggattcgtatccaacgcgaa

SEQ ID NO: 829482 - DNA, 75 bp, synthetic construct
  source 1..75: mol_type = other DNA
taaaagtcacccctgaacacattgaacaactcattcaaagtgaacattatttcactgcatatgatgccagccacg

SEQ ID NO: 829483 - DNA, 75 bp, synthetic construct
  source 1..75: mol_type = other DNA
aaatatgatattcatattttacgtcttggtttttatatatgcctgcattgattatgttaaccgttacagtttatt

SEQ ID NO: 829484 - DNA, 75 bp, synthetic construct
  source 1..75: mol_type = other DNA
gatggatgttcgaagagcgcccaaaccatcaacgcggaaccgtctggcacaaaaagggatttgatttcctgctta

SEQ ID NO: 829485 - DNA, 75 bp, synthetic construct
  source 1..75: mol_type = other DNA
atggatatggttatcacgatttagtcgttacgggatacttgggtgaagtagatgtgtcgagagattggagattaa

SEQ ID NO: 829486 - DNA, 75 bp, synthetic construct
  source 1..75: mol_type = other DNA
gggggcgctgcgccggatatccggttaagcccgcatctttacctggcgaccaacagcgcacaggggccgtggtgg

SEQ ID NO: 829487 - DNA, 75 bp, synthetic construct
  source 1..75: mol_type = other DNA
taaatccgttagatgtaccgcttgatacgttgtttaattcaacgatgccttatactatatttgttaacatgccaa

SEQ ID NO: 829488 - DNA, 75 bp, synthetic construct
  source 1..75: mol_type = other DNA
tcaatttcactgtttattttatttatatctggacgaaaagagcaattgcttgctgcgattttagcacttattttt

SEQ ID NO: 829489 - DNA, 75 bp, synthetic construct
  source 1..75: mol_type = other DNA
gtgaagcctgcggcttgacgaccaccgaactggccagactactcgatcttgacgaagagattattctgcaatggg

SEQ ID NO: 829490 - DNA, 75 bp, synthetic construct
  source 1..75: mol_type = other DNA
aaggcggaaacgtcaccattttcgacggtcagaataacgtcgttgaccacgctgatggtgattacgccgatgaac

SEQ ID NO: 829491 - DNA, 75 bp, synthetic construct
  source 1..75: mol_type = other DNA
atgagcgaagctctcggtatcactgcattttatatattcatagcagcaattattgttgctgcagtgctgtacttt

SEQ ID NO: 829492 - DNA, 75 bp, synthetic construct
  source 1..75: mol_type = other DNA
cagtctggctgaaaccgacgcgtaatgcgttggggattctgggtgggatcccgcgcggtgaatttactcgcgaca

SEQ ID NO: 829493 - DNA, 75 bp, synthetic construct
  source 1..75: mol_type = other DNA
aggccgcttaccttactcgtgcaatgactacaggcggaggattaatcgagcttggggaattggctaagggattgg

SEQ ID NO: 829494 - DNA, 75 bp, synthetic construct
  source 1..75: mol_type = other DNA
ttttttacaggaataaatggagtttctgttcaacaagaaacacaagggccgagctggacatttccaatctatagt

SEQ ID NO: 829495 - DNA, 75 bp, synthetic construct
  source 1..75: mol_type = other DNA
ggtgaaggtggctctgacgacatccgaaatttgattgttgtcaacccattaattcataaaatgctacaccatgct

SEQ ID NO: 829496 - DNA, 75 bp, synthetic construct
  source 1..75: mol_type = other DNA
tgaacaccctaattaactatttccacgatatttggcatctaccagccctgtggcttgttaatagggcgtggtgtg

SEQ ID NO: 829497 - DNA, 75 bp, synthetic construct
  source 1..75: mol_type = other DNA
agctgtcggcgtggctggcctataaaaatgaagttaagtcggctgatgtgacaactgacccggagcgtgttaact

SEQ ID NO: 829498 - DNA, 75 bp, synthetic construct
  source 1..75: mol_type = other DNA
tggagagtacgagccaaccatcagcatgcttatccccctggcaaacgtcctgggatgcgatccgctttctctgct

SEQ ID NO: 829499 - DNA, 75 bp, synthetic construct
  source 1..75: mol_type = other DNA
gcctcctgaccattgcgtctcatacggcagatggggtaacgggcatgggttcgagtgaagtaaccattgcaagcc

SEQ ID NO: 829500 - DNA, 75 bp, synthetic construct
  source 1..75: mol_type = other DNA
gtgccgcaacctacgcaagaacaagtaattgcagccgcagaaaatgagcgccaacgattgctgaattatgctgat

SEQ ID NO: 829501 - DNA, 75 bp, synthetic construct
  source 1..75: mol_type = other DNA
cgccaacagggctaaattgtcggcgtggctggcttataaaaatcaagttaagtcggttgatgtgacaactgaccc

SEQ ID NO: 829502 - DNA, 75 bp, synthetic construct
  source 1..75: mol_type = other DNA
cccgccagcttgacgggcatgggttcacgatgcaggactggagaaattatttgagctacgtaggcgaaaattgcc

SEQ ID NO: 829503 - DNA, 75 bp, synthetic construct
  source 1..75: mol_type = other DNA
tgccaacatgatgaccgctgacacgctgaatgtgattgctgattttgcaaaacaggcatctgattcagcggaaga

SEQ ID NO: 829504 - DNA, 75 bp, synthetic construct
  source 1..75: mol_type = other DNA
cgctactaccgatagaaggccagatgtaacagaatttggaattaaacacgatgtgcttatcttagatggtaattt

SEQ ID NO: 829505 - DNA, 75 bp, synthetic construct
  source 1..75: mol_type = other DNA
tcatacaagagtacattatccctaatttgttgatgcaatggattagtagaaaaacttactcgaaaattgtcggtg

SEQ ID NO: 829506 - DNA, 75 bp, synthetic construct
  source 1..75: mol_type = other DNA
gacaagttcgttaatagcagtgatgaaaccattaccacacgcacaggcaaacagttagatactttgcatggcgtt

SEQ ID NO: 829507 - DNA, 75 bp, synthetic construct
  source 1..75: mol_type = other DNA
gaaaacctggttgttatcgagtcgctgaaatcatcggacctgacaaattcaggtcagcctgattacattgcattt

SEQ ID NO: 829508 - DNA, 75 bp, synthetic construct
  source 1..75: mol_type = other DNA
aggtcttggcggccttagccttgaagactttcggatacttgtagccaagagggaagtggaatctatctcgttttt

SEQ ID NO: 829509 - DNA, 75 bp, synthetic construct
  source 1..75: mol_type = other DNA
gactgcggttgtgtgtctacggaaacattcatgcactggctgcgggtagcctatgaatctggcaaccgtctggat

SEQ ID NO: 829510 - DNA, 75 bp, synthetic construct
  source 1..75: mol_type = other DNA
ccaggccagctggaaggaaaagaaattaaggcagatttaagccagtccgcgttattaatctccctgccacaggcc

SEQ ID NO: 829511 - DNA, 75 bp, synthetic construct
  source 1..75: mol_type = other DNA
atcgtaaatagcatgtatctcttgtcagataaatataattaccataatgtcatacctccattcatcaaatccatt

SEQ ID NO: 829512 - DNA, 75 bp, synthetic construct
  source 1..75: mol_type = other DNA
ggcatttccagcataaggatctttggcaaggatattgtggcagatcccatagcatgtgcaaagagagtcagggat

SEQ ID NO: 829513 - DNA, 75 bp, synthetic construct
  source 1..75: mol_type = other DNA
tgatgaactttcaattgaacaaatcccgctggccgtagagtacatccacagggtagtgcttgaaggtgagttcat

SEQ ID NO: 829514 - DNA, 75 bp, synthetic construct
  source 1..75: mol_type = other DNA
cacttctgaccctttcactatctgctggcgcagctccccagatgtgctttgatcaggccgggaaagattatcaaa

SEQ ID NO: 829515 - DNA, 75 bp, synthetic construct
  source 1..75: mol_type = other DNA
gccgctggcggcgttggattgtgggctacgcggtctgtatgcgcctgcataaaagacttttatttagccgcttcg

SEQ ID NO: 829516 - DNA, 75 bp, synthetic construct
  source 1..75: mol_type = other DNA
ttaaaagcagaatcctggaatgaaatatatgacctgactgatccatcagtgcatggtgatattaatatgatgcaa

SEQ ID NO: 829517 - DNA, 75 bp, synthetic construct
  source 1..75: mol_type = other DNA
tcgttcacattgatgactggagtggatggctgatattaaccaacaaccagtttgatgagtttaataacattgcct

SEQ ID NO: 829518 - DNA, 75 bp, synthetic construct
  source 1..75: mol_type = other DNA
ccctgttctctgttgactataaagcgtttctgaacgaggtcaacaacctgaacaaacgtatgggtgacctgcgtg

SEQ ID NO: 829519 - DNA, 75 bp, synthetic construct
  source 1..75: mol_type = other DNA
caatagaagcagaaaaaaaatatgcactttggattgatcattttcttgaagaattattaaaacatgaaaaattaa

SEQ ID NO: 829520 - DNA, 75 bp, synthetic construct
  source 1..75: mol_type = other DNA
atgtatctgcgtttatacgggtgcatgggtactggcgcacaacttcaggtcatacggaaaaaactgggacagcgt

SEQ ID NO: 829521 - DNA, 75 bp, synthetic construct
  source 1..75: mol_type = other DNA
aagttactttcagaacgtctcgcgccagctgcgggaaaggagcatgatattaaaattgcagaaacagcatcgtca

SEQ ID NO: 829522 - DNA, 75 bp, synthetic construct
  source 1..75: mol_type = other DNA
atatcatgccactaaccgtatagatggtttatttgaaattgacgatggctcaggccgaagccaggatgcagattt

SEQ ID NO: 829523 - DNA, 75 bp, synthetic construct
  source 1..75: mol_type = other DNA
cagcagggcgtgaaagccgatcctgaagccgtcctctcctttcatgcggtgtttgcatgtatttcgctgatatcc

SEQ ID NO: 829524 - DNA, 75 bp, synthetic construct
  source 1..75: mol_type = other DNA
atgtatcgctggccttgcacacagcggcttaaggaagccggattactggcatcaacaggaagtacaggcgactcg

SEQ ID NO: 829525 - DNA, 75 bp, synthetic construct
  source 1..75: mol_type = other DNA
gaagatatcgattttgagacaaaattgtgggagatcccggcagaagtaatgaagatgaagcgacctcatattgtg

SEQ ID NO: 829526 - DNA, 75 bp, synthetic construct
  source 1..75: mol_type = other DNA
caaaaaaagaagaaaaaatcgcgcagcaaacgagtttgaaaaacacatttgaggctattactcgcgaatggcacc

SEQ ID NO: 829527 - DNA, 75 bp, synthetic construct
  source 1..75: mol_type = other DNA
tgaatctgctggttcgcggtatgtgttcattgatccccaatctggaaggcattagcgacaatattcgtgccatca

SEQ ID NO: 829528 - DNA, 75 bp, synthetic construct
  source 1..75: mol_type = other DNA
ctactggcgctgggcaacaacgatcaacgtcccgattacgcgtggcacgaaggcacggcattccacctctttaat

SEQ ID NO: 829529 - DNA, 75 bp, synthetic construct
  source 1..75: mol_type = other DNA
gctggacgcacctgtggcacaataatgaactcgacggtaatcgctggcataaacagcagcacaattttatgagtt

SEQ ID NO: 829530 - DNA, 75 bp, synthetic construct
  source 1..75: mol_type = other DNA
caaaaaaagaagaaaaaatcgcgctgcgaatgagtttgaaaaacacatttgaggccgttgctcgagaatggcatc

SEQ ID NO: 829531 - DNA, 75 bp, synthetic construct
  source 1..75: mol_type = other DNA
tatgggaaatcccggcagaacggatgaaaatgcgcaggccgcacattgtgcctttgtctattcaagcacttgatc

SEQ ID NO: 829532 - DNA, 75 bp, synthetic construct
  source 1..75: mol_type = other DNA
atcatcacaaaaacagcgactcagatcatcatgttaactggcgtacgtacgcaagaattgcgctttgctcgctgg

SEQ ID NO: 829533 - DNA, 75 bp, synthetic construct
  source 1..75: mol_type = other DNA
ccatgcgcagtatttggaggggcggagagaaatgatgcagaagtatgcagattacgtagaaagtttagtctctcg

SEQ ID NO: 829534 - DNA, 75 bp, synthetic construct
  source 1..75: mol_type = other DNA
ttactcaccgcctcattgatgcactgcctccgaatgatccggatgcgccttcccgtgaagcggaatacagcgatt

SEQ ID NO: 829535 - DNA, 75 bp, synthetic construct
  source 1..75: mol_type = other DNA
aaaacagcattcgtggtacatacaaccatgctcgttaccttgaaggaagacgagaaatgatgcaatggtacgctg

SEQ ID NO: 829536 - DNA, 75 bp, synthetic construct
  source 1..75: mol_type = other DNA
ttaatctgctggttcgcggaatgtgttcgctgatccccaatctggaaggcattagcgacaacattcgtgccatca

SEQ ID NO: 829537 - DNA, 75 bp, synthetic construct
  source 1..75: mol_type = other DNA
ccgccagcgttgtggtgaggtgtttcgctatgcaattgtcactggtagggccgaatacaacccagcccccgatct

SEQ ID NO: 829538 - DNA, 75 bp, synthetic construct
  source 1..75: mol_type = other DNA
cgccagtgcacgcattattggcgttggcctcaacacgattttccgccatttaaaaaactcaggccgcagtcggta

SEQ ID NO: 829539 - DNA, 75 bp, synthetic construct
  source 1..75: mol_type = other DNA
ggatgtcacccaggtcgacaaactgctgcacggcgacgagaacgtcgtctgcgccgatgacggttacacaggcgt

SEQ ID NO: 829540 - DNA, 75 bp, synthetic construct
  source 1..75: mol_type = other DNA
cgcgatttggctttgtaccgggaaattgcgccgcataacatcaccttcgatggtagcaacaagatttatcgcatc

SEQ ID NO: 829541 - DNA, 75 bp, synthetic construct
  source 1..75: mol_type = other DNA
ggacatggcatacctgcagcaataggtattgccgcctttaaactcttaaaatcctatggagcatttgaagcatca

SEQ ID NO: 829542 - DNA, 75 bp, synthetic construct
  source 1..75: mol_type = other DNA
tggatgagatagaagtctacctggccttccagaccatgctcgcagagaaacttcagctctccactgccgtgaagg

SEQ ID NO: 829543 - DNA, 75 bp, synthetic construct
  source 1..75: mol_type = other DNA
atgcgacgctggcgcgtcttatcaggcctacaccgctgtgaagtgctccaccccgtaggtcggataaggcggtta

SEQ ID NO: 829544 - DNA, 75 bp, synthetic construct
  source 1..75: mol_type = other DNA
tgaattaagctatagcgcgattaacggtaaattggttgtattagatagcccgacaatgtggctagtgacattaca

SEQ ID NO: 829545 - DNA, 75 bp, synthetic construct
  source 1..75: mol_type = other DNA
tatgggagatcccggcagaagtgatgaagatgaaacggccccatattgtgccgctctcagaacaggttattacgc

SEQ ID NO: 829546 - DNA, 75 bp, synthetic construct
  source 1..75: mol_type = other DNA
acacgatgagtaccattttgcatgaagaaggctttaactcagcgtggatagaaacgcagcttgcgcatgtggata

SEQ ID NO: 829547 - DNA, 75 bp, synthetic construct
  source 1..75: mol_type = other DNA
atgattgctcaggggaacccgatgccggtgccttacggtgaaatgctggttggctcacggcgaatctcccaggac

SEQ ID NO: 829548 - DNA, 75 bp, synthetic construct
  source 1..75: mol_type = other DNA
tgaaattcgttgaaaccctagaagccgccggaatgcctgcagcacaagctcgcgccatatctgctgcagtaaagg

SEQ ID NO: 829549 - DNA, 75 bp, synthetic construct
  source 1..75: mol_type = other DNA
ggcttatggtgttatccgtggttggttttatttgcgtttaccggagcattatcaggattaggcgcgctcggaacc

SEQ ID NO: 829550 - DNA, 75 bp, synthetic construct
  source 1..75: mol_type = other DNA
agggagatgatgcagtggtacgcagattatattaccagtaacgcaaagcacagcgatgtagcgttcggctatatt

SEQ ID NO: 829551 - DNA, 75 bp, synthetic construct
  source 1..75: mol_type = other DNA
cactggtcgtgccaaagctgctttaagtgggtccttttttaatgtaactcgtccacgcaacatcgcctttaacta

SEQ ID NO: 829552 - DNA, 75 bp, synthetic construct
  source 1..75: mol_type = other DNA
atccttacaggaaaaaattgctggctatcagtacgtgctggcaaacccgggctggacaaccgataacggttttat

SEQ ID NO: 829553 - DNA, 75 bp, synthetic construct
  source 1..75: mol_type = other DNA
aaactggctgctgctcaggcatcacttacccgtaatattgcggccagaacagcagcacagacaacgctgaatact

SEQ ID NO: 829554 - DNA, 75 bp, synthetic construct
  source 1..75: mol_type = other DNA
gtggctggggggggggggggggggggggggggggggggggggggggggggggggggggggggggggggggggggg

SEQ ID NO: 829555 - DNA, 75 bp, synthetic construct
  source 1..75: mol_type = other DNA
gggggggggggggggggggggggggggggggcacagaccgcacctggcttacctttttctcccccccagcaaact

SEQ ID NO: 829556 - DNA, 75 bp, synthetic construct
  source 1..75: mol_type = other DNA
gtgaaaacaataaaatcggctttttatggagtcgttgatggaattgcaggtcgatttggccctctaaaacgtaaa

SEQ ID NO: 829557 - DNA, 75 bp, synthetic construct
  source 1..75: mol_type = other DNA
agatgaactaccagacgttgaccttgatgatgaagaagaccctgaagaggaattgaagcgtgaacaatataaagc

SEQ ID NO: 829558 - DNA, 75 bp, synthetic construct
  source 1..75: mol_type = other DNA
tagataaaacattagataataatattataaaagagactgagcttgatgatggtattaatgaagatgattttctct

SEQ ID NO: 829559 - DNA, 75 bp, synthetic construct
  source 1..75: mol_type = other DNA
tattggtgcatctaaaattggtgttaacgctacgatataccaacaagttactctgggcgcaaaaaatatagatat

SEQ ID NO: 829560 - DNA, 75 bp, synthetic construct
  source 1..75: mol_type = other DNA
gaggctggtccggaagccattatgccgcttacgcgcgccgctgatggttcgctgggagttcgggcagttggtact

SEQ ID NO: 829561 - DNA, 75 bp, synthetic construct
  source 1..75: mol_type = other DNA
tagtttcaaaatgctgagattaccttatgttcctattggatataaaattcgtgaaactatcttcaatattttaag

SEQ ID NO: 829562 - DNA, 75 bp, synthetic construct
  source 1..75: mol_type = other DNA
cgacctggcgggttataccggtagcattataacgaagacagctactcaaatcattatgttaaccggtgtacgcac

SEQ ID NO: 829563 - DNA, 75 bp, synthetic construct
  source 1..75: mol_type = other DNA
tctgggagatcccgccagagcgaatgaaaatgcgtcgtcctcaccttgtacctctctcacatcaggtgattgaac

SEQ ID NO: 829564 - DNA, 75 bp, synthetic construct
  source 1..75: mol_type = other DNA
ataccctttctacaatcctgcatgagcaaggttttgagagtgcttggattgaaatccagttggctcatgtagata

SEQ ID NO: 829565 - DNA, 75 bp, synthetic construct
  source 1..75: mol_type = other DNA
agaataaaattcgaggtatttataatcatgctgattactattcaaatcgcaaagaaatgttaaattggtactcag

SEQ ID NO: 829566 - DNA, 75 bp, synthetic construct
  source 1..75: mol_type = other DNA
gttattaccaagactgcgactcaaatcatcatgcttacaggggtacgaactcaggaattacgttttgcccgctgg

SEQ ID NO: 829567 - DNA, 75 bp, synthetic construct
  source 1..75: mol_type = other DNA
ccgatgtcggatcaggttgtccagctctttgggtcacttaagcctattaccgggctaaacccactggtgttcgtc

SEQ ID NO: 829568 - DNA, 75 bp, synthetic construct
  source 1..75: mol_type = other DNA
ttttcaaccaactaaaaccaattacaggacactacccatacatcttcataggaaggaacaaccgcagaaaaccta

SEQ ID NO: 829569 - DNA, 75 bp, synthetic construct
  source 1..75: mol_type = other DNA
cggaatacaatcctgcacctgatttagctatcgctctggccgcccccaagcaaaagcaccatccttttttatctg

SEQ ID NO: 829570 - DNA, 75 bp, synthetic construct
  source 1..75: mol_type = other DNA
ggatttagaagcttatactggcagtatcatcactaaaaatgcgactaagattgtcatattaactggtgtaagaac

SEQ ID NO: 829571 - DNA, 75 bp, synthetic construct
  source 1..75: mol_type = other DNA
aacgtaaggctcagaaaattgctcagaaattatcaactgaaaactcttttgaggccgttagcagagaatggcatg

SEQ ID NO: 829572 - DNA, 75 bp, synthetic construct
  source 1..75: mol_type = other DNA
ggatcttgaagcgtataccggcagcattatcactaagaatgcgacaaaaatcgtcatgctgaccggtgtacgaac

SEQ ID NO: 829573 - DNA, 75 bp, synthetic construct
  source 1..75: mol_type = other DNA
aacgtaaagcccaaaagctggcacagcaactctcaacagagaattcattcgaagccatatgtcgagaatggcaca

SEQ ID NO: 829574 - DNA, 75 bp, synthetic construct
  source 1..75: mol_type = other DNA
tcatgctcaatatttagagaaaagattacatatgatgcagtggtatagtgacttactttatccaaaaataaaata

SEQ ID NO: 829575 - DNA, 75 bp, synthetic construct
  source 1..75: mol_type = other DNA
gagaacataggttcaatagctcctaaaaatttcactgacacagttgttatagaaataaaggatgattcatggagg

SEQ ID NO: 829576 - DNA, 75 bp, synthetic construct
  source 1..75: mol_type = other DNA
gtgtatgttttcactgggtcagccaccccgataaacaactatgtttcaggtggtaacttacaaagcttctacgtt

SEQ ID NO: 829577 - DNA, 75 bp, synthetic construct
  source 1..75: mol_type = other DNA
tctgaataatattaatatagatccggatgaggtgataaatgctgttggcatttatggtactgatggtgttggcgc

SEQ ID NO: 829578 - DNA, 75 bp, synthetic construct
  source 1..75: mol_type = other DNA
atataaattttttctttatttttctgatggcttattaagcatgacatttaaaaatttacaattaataaaaccatt

SEQ ID NO: 829579 - DNA, 75 bp, synthetic construct
  source 1..75: mol_type = other DNA
gctggcgtatggcgcctggctgatttatcccccggcgggttttgttgttgccggggcgctgtgcctgttctggtc

SEQ ID NO: 829580 - DNA, 75 bp, synthetic construct
  source 1..75: mol_type = other DNA
caccgacggcgtgaaggtaaagtgagccgtgttcctgacggcgttgcgatacagcgtgtgggggctgaagctgcc

SEQ ID NO: 829581 - DNA, 75 bp, synthetic construct
  source 1..75: mol_type = other DNA
gccaattgcatatattattaaatcttctcctattataattgtatcaaattttttggtctcagataaaaatgcgga

SEQ ID NO: 829582 - DNA, 75 bp, synthetic construct
  source 1..75: mol_type = other DNA
aacaaaagagatattatttttgtaggtaaaagttgtataactgaaagacttattcataaatcaggttcacgagtc

SEQ ID NO: 829583 - DNA, 75 bp, synthetic construct
  source 1..75: mol_type = other DNA
ttgggagtatctgatgaagagattaaagatatacaacgtattctgagtaatccttatggtgtgtattttattgca

SEQ ID NO: 829584 - DNA, 75 bp, synthetic construct
  source 1..75: mol_type = other DNA
cacgctggcacgctcatttaaagcaaatgccaacggtaaaatctatcttgggctaccagataccgaccctacaat

SEQ ID NO: 829585 - DNA, 75 bp, synthetic construct
  source 1..75: mol_type = other DNA
cgaattgcgctgacggggcatccgcaggcgaacctgaaccgggaatggcaggtggtggcaagtgaactgcacggc

SEQ ID NO: 829586 - DNA, 75 bp, synthetic construct
  source 1..75: mol_type = other DNA
ttagtatctcaagttccttttgttatacgagcaattagtggtatgtcgttgattatgtctttggctactttttat

SEQ ID NO: 829587 - DNA, 75 bp, synthetic construct
  source 1..75: mol_type = other DNA
tctggcactacgatgcgtcggaccgcatcacgcaccggacggtgaacggcgacccggcagagcagtggcagtatg

SEQ ID NO: 829588 - DNA, 75 bp, synthetic construct
  source 1..75: mol_type = other DNA
tcagaggccatcagcccgttactgtatggggctatgaatggtgaaaaagtgtatcaacaggccgttgatctgatt

SEQ ID NO: 829589 - DNA, 75 bp, synthetic construct
  source 1..75: mol_type = other DNA
tcaccgaccactcagaaccgtattatgcagcgtgagtttgccaagattgttctgatagcgggatatgatggcctg

SEQ ID NO: 829590 - DNA, 75 bp, synthetic construct
  source 1..75: mol_type = other DNA
cgctgatgaaagacttcgaagccaaaggcgcgaccgaaggcctgacgccggaaatgcctgctactgtattccccc

SEQ ID NO: 829591 - DNA, 75 bp, synthetic construct
  source 1..75: mol_type = other DNA
aaatgtcatttatatgctaaaaatgctacttttgattttctttctgtaaacggcgatgttcattttgatgaatgc

SEQ ID NO: 829592 - DNA, 75 bp, synthetic construct
  source 1..75: mol_type = other DNA
ggccgagtattaactactgatccttatacaggcattggttacattttcactagtgatggatgggttaaaagtctt

SEQ ID NO: 829593 - DNA, 75 bp, synthetic construct
  source 1..75: mol_type = other DNA
aaaatgcattcaatcgtgctaaatataaaaattattcagttcataccaatttggctgcagaaaaccattatagca

SEQ ID NO: 829594 - DNA, 75 bp, synthetic construct
  source 1..75: mol_type = other DNA
ggaaatccatggtatatggatctcatgtgtatggctcgaggggcacgtgatttgcagtcgaattcggccctacag

SEQ ID NO: 829595 - DNA, 75 bp, synthetic construct
  source 1..75: mol_type = other DNA
ggtcaggcgtggtacatggatttgatgtgctttgcgcgtggcgctcgtgatctgattagccaggcgactatagct

SEQ ID NO: 829596 - DNA, 75 bp, synthetic construct
  source 1..75: mol_type = other DNA
gtcgctgtccactacggctacgacgataagggccgcctgaccggcgaacggcagacggtggagaacccggagacg

SEQ ID NO: 829597 - DNA, 75 bp, synthetic construct
  source 1..75: mol_type = other DNA
gcgtctgattgccggttacgacggtatcgcgccggaggtgtcagcaagcgacgtagggaccgtgcgggaagttga

SEQ ID NO: 829598 - DNA, 75 bp, synthetic construct
  source 1..75: mol_type = other DNA
aggcgcgaccgaaggactgacgcctgaaatgcctgctaccgtattccctcgagggcgggtgctgttcggcatgac

SEQ ID NO: 829599 - DNA, 75 bp, synthetic construct
  source 1..75: mol_type = other DNA
tgaagataaatatctacacgaggccattgtgctgagcagcgctaccgggctcatagggatgccgcagcagaccat

SEQ ID NO: 829600 - DNA, 75 bp, synthetic construct
  source 1..75: mol_type = other DNA
attctcggacgaaaattcatattaagtaaagtgaatgagcagggatgtgatgattgtaattttacaggagtgaaa

SEQ ID NO: 829601 - DNA, 75 bp, synthetic construct
  source 1..75: mol_type = other DNA
aacgcaccagctttacactgcccctccagcgccagtagtacctgaagaaaaaccaatgcctaaccctcttaaaat

SEQ ID NO: 829602 - DNA, 75 bp, synthetic construct
  source 1..75: mol_type = other DNA
agctgaaaaagttgttatcccaacatttgccgatgcagccaggcgtgtacatgctgaattgtcaccgggatggga

SEQ ID NO: 829603 - DNA, 75 bp, synthetic construct
  source 1..75: mol_type = other DNA
gttagatgactatattgttgaaatgaaagatggctccagcaataagtctatttttattaaattaaagcttgaggc

SEQ ID NO: 829604 - DNA, 75 bp, synthetic construct
  source 1..75: mol_type = other DNA
aagaaaaccgacctcatcccggaaggggttatccgcacggatgatgagcggactcaccggtaccattacgacagt

SEQ ID NO: 829605 - DNA, 75 bp, synthetic construct
  source 1..75: mol_type = other DNA
ctgctgccgggtgaggcggtgtacagccgcagcgagtccctgtggctggtgcgtggcggtaaggcagcgcagccg

SEQ ID NO: 829606 - DNA, 75 bp, synthetic construct
  source 1..75: mol_type = other DNA
cggacggagcattcactttgagccgctgctgccgggggaggcggtgtacagccgcagcgagtcaatgtggctggt

SEQ ID NO: 829607 - DNA, 75 bp, synthetic construct
  source 1..75: mol_type = other DNA
tggtggtcgtcatcctgggcgctatagcgggcgcgttcggcattggtcatgctcgcgggaccaatcaggcggaag

SEQ ID NO: 829608 - DNA, 75 bp, synthetic construct
  source 1..75: mol_type = other DNA
aacatgcgcgaccagcctcttgcgaaattgcgccctcgttcatcgcgagccaaaaaccgccagtccggtaccagc

SEQ ID NO: 829609 - DNA, 75 bp, synthetic construct
  source 1..75: mol_type = other DNA
tcctctagaggtcagccgcttacaaaacttaaaccacgactagcgagagccaagaatcgccaaaccaacgccagc

SEQ ID NO: 829610 - DNA, 75 bp, synthetic construct
  source 1..75: mol_type = other DNA
cacgccaaaaaggcaaaaaaacttttgttgatgagttaattgatttcgccgtgcaaacggcagttcagtttttgg

SEQ ID NO: 829611 - DNA, 75 bp, synthetic construct
  source 1..75: mol_type = other DNA
gttgcagaacgccgggtagagacaacaaaaggagccagggatgtacagcaaactgttagtcatcttcctgatgac

SEQ ID NO: 829612 - DNA, 75 bp, synthetic construct
  source 1..75: mol_type = other DNA
atgggacttgaaatgattatcggcctggttgttgctgtactggctacaattctaggtgcttttggtctgggcaaa

SEQ ID NO: 829613 - DNA, 75 bp, synthetic construct
  source 1..75: mol_type = other DNA
tctttagaaacatgtaagatgaagtgctccggaaataacattggacgtcttattagatttgtattcaccggagtg

SEQ ID NO: 829614 - DNA, 75 bp, synthetic construct
  source 1..75: mol_type = other DNA
tgaaagtcgcacagtttgttgttttaacttcatgtaaaggaagtagtaaaaccaggcgttccgtcgcctgtagcc

SEQ ID NO: 829615 - DNA, 75 bp, synthetic construct
  source 1..75: mol_type = other DNA
atgctcagccggtcgccggagaacgcggaagaagaaacgccgcccgacgaatcatcctggccgaacatgacctaa

SEQ ID NO: 829616 - DNA, 75 bp, synthetic construct
  source 1..75: mol_type = other DNA
cgcgccgaatgttgtcatgcgctccagcaatatggaagtggtgcgtgcgatggtggctaacggcgtgggatttgg

SEQ ID NO: 829617 - DNA, 75 bp, synthetic construct
  source 1..75: mol_type = other DNA
gacgggccttgcagtcgttgattctgatttatactatcagcttctggaagatatctcattagagaatgtaaagcg

SEQ ID NO: 829618 - DNA, 75 bp, synthetic construct
  source 1..75: mol_type = other DNA
taattccgactcaacgtgagttggaagcactggctaatcaatactggctcaatgtatattcgatatggcgagaaa

SEQ ID NO: 829619 - DNA, 75 bp, synthetic construct
  source 1..75: mol_type = other DNA
aaacattgtctaaaaattaccagccaggagttgatggactccgtgctgttgccgtcattttagttcttatattcc

SEQ ID NO: 829620 - DNA, 75 bp, synthetic construct
  source 1..75: mol_type = other DNA
cgtgcgtgcaacagaggcaatacagacgctctccgccgtgtcaaatatccggtccaccgcaccggtaaactgttc

SEQ ID NO: 829621 - DNA, 75 bp, synthetic construct
  source 1..75: mol_type = other DNA
tggcaacgcaatttcaatctttcgggcattcaaccgaatgctccccagcgtcagcaacttcaggcgctttttacc

SEQ ID NO: 829622 - DNA, 75 bp, synthetic construct
  source 1..75: mol_type = other DNA
tacagggcgcgtttaatcacttcccggggatggacttccgtgcggttgatggttgtagtggcacagtaaatttgg

SEQ ID NO: 829623 - DNA, 75 bp, synthetic construct
  source 1..75: mol_type = other DNA
ctcggggcgacttactggctgctgcgcgagcgcgatgaccggacagccggggaaagctcagatgatcagtcgtga

SEQ ID NO: 829624 - DNA, 75 bp, synthetic construct
  source 1..75: mol_type = other DNA
acagcatcatccaggtcaagacggtgatcctgatcgggctgatcgccctggcgcgtaaattcgtgatcctcgacc

SEQ ID NO: 829625 - DNA, 75 bp, synthetic construct
  source 1..75: mol_type = other DNA
ggtgtcgctgctccagctcatgtccattgtcttcacgctgctgatcctcgacgcgttcaatccgcttgatcacaa

SEQ ID NO: 829626 - DNA, 75 bp, synthetic construct
  source 1..75: mol_type = other DNA
aaatcgcttatctaaaccgcgctatgacagacgggaagggtcttattgaaataggtgagctagctcgtggtcttg

SEQ ID NO: 829627 - DNA, 75 bp, synthetic construct
  source 1..75: mol_type = other DNA
aggtattaccattaatgaagccaagaccatttttacatctaaggctcacaataggcatgttacaggtgtaactat

SEQ ID NO: 829628 - DNA, 75 bp, synthetic construct
  source 1..75: mol_type = other DNA
gtaagtttaattataatagattagctttccaattacttttaaatgaggcccccaaaaaatataaagtttattata

SEQ ID NO: 829629 - DNA, 75 bp, synthetic construct
  source 1..75: mol_type = other DNA
aatgcgattcagagcgttttagggaggttctgttagttctcctgcattgcgcccgtagctcgctgacgctcacac

SEQ ID NO: 829630 - DNA, 75 bp, synthetic construct
  source 1..75: mol_type = other DNA
gttctggcgaaggtgtttttgtctttaatcatactaataacagtgatgccggctaccaggtcgatatgctgatta

SEQ ID NO: 829631 - DNA, 75 bp, synthetic construct
  source 1..75: mol_type = other DNA
cctcgacaggaggcgtcgggacggtcaatgttgagggagaagactctgttctgacgaccgaattattcgaaatag

SEQ ID NO: 829632 - DNA, 75 bp, synthetic construct
  source 1..75: mol_type = other DNA
ataaagcgaattcagcgtgaggttgtgaaaattttggcttccaagctcatcgtgcacgatgcagcgaaagcttat

SEQ ID NO: 829633 - DNA, 75 bp, synthetic construct
  source 1..75: mol_type = other DNA
atgtcgattcttgaatacatccttgatcataacgctaaaccagatatttgggactattttaaagctatgggggtt

SEQ ID NO: 829634 - DNA, 75 bp, synthetic construct
  source 1..75: mol_type = other DNA
acaaggcagggaagcggagcataaattgtcaatatactactttatgctatttgtgccgtcatttctggtgcagaa

SEQ ID NO: 829635 - DNA, 75 bp, synthetic construct
  source 1..75: mol_type = other DNA
ttaacatgatggatattaaaggaaaaatcatcacaactgatgcgatgggctgccagaaagatattgcagaaaaga

SEQ ID NO: 829636 - DNA, 75 bp, synthetic construct
  source 1..75: mol_type = other DNA
accgccgtgctgctggcctacattcagggcagccgggataaagtgattcgtgaggacggtgaactgatcccgggc

SEQ ID NO: 829637 - DNA, 75 bp, synthetic construct
  source 1..75: mol_type = other DNA
tgattgccgaaaacggcccggacgaattctacaaaggcacgatagcggaacagattgcccaggagatgcagaaaa

SEQ ID NO: 829638 - DNA, 75 bp, synthetic construct
  source 1..75: mol_type = other DNA
ggactattttaaagctatgggggttggttggttgatggatttgcccctatatttccagacacctgttatcactta

SEQ ID NO: 829639 - DNA, 75 bp, synthetic construct
  source 1..75: mol_type = other DNA
taactctcattcagcacactaaacatcccgtcacgcattcccttaacagcctgtttaacctgataaagctccctc

SEQ ID NO: 829640 - DNA, 75 bp, synthetic construct
  source 1..75: mol_type = other DNA
ctgttccagcaggcgcgcaatgtcgataacgccgacagctatgcggtgctggggctgggcgatgtggcgatggcg

SEQ ID NO: 829641 - DNA, 75 bp, synthetic construct
  source 1..75: mol_type = other DNA
gataatcctgactctggtgccatatttggggcgctggggcaggcgtattcccagaatggcgatcgcgctaatgcg

SEQ ID NO: 829642 - DNA, 75 bp, synthetic construct
  source 1..75: mol_type = other DNA
cagcgtctttgccggcgttaatgcggcaaaaggcagcgagaaaggtaacggtactgagtggactgaaaccacaac

SEQ ID NO: 829643 - DNA, 75 bp, synthetic construct
  source 1..75: mol_type = other DNA
tgggagctgggggcttcaggttcatggtcgcactcacggaccaaaaccatgccgcgttatccgctgatgaacctg

SEQ ID NO: 829644 - DNA, 75 bp, synthetic construct
  source 1..75: mol_type = other DNA
tggggcacctgtacgttgcaggactgtagcggcaaccgcagccagtcagattccggcgccagcgtggcggtcggc

SEQ ID NO: 829645 - DNA, 75 bp, synthetic construct
  source 1..75: mol_type = other DNA
atcgcagcaggcggaggcgctggaaaatcagggtaaatgggcgcaggcggcagcacttcagcggcaacgactggc

SEQ ID NO: 829646 - DNA, 75 bp, synthetic construct
  source 1..75: mol_type = other DNA
gtgatggtggcttcgacattacagtgggcagccacacccaactcgatggtgcggtgatcgcttccactgccacgg

SEQ ID NO: 829647 - DNA, 75 bp, synthetic construct
  source 1..75: mol_type = other DNA
gcgctggagcgggccagaacggcctctctgcaggcttcttcacagggggaacgctacttttttgattatctgcgt

SEQ ID NO: 829648 - DNA, 75 bp, synthetic construct
  source 1..75: mol_type = other DNA
taataaatgtaagaaactaaatgatgatgaattatttcgcttacttgatgatcacaattccttgaaaaggatttc

SEQ ID NO: 829649 - DNA, 75 bp, synthetic construct
  source 1..75: mol_type = other DNA
tcaccatgaatacggcgcatctgctgaattcatgggatgccatttcggccagccatgaggtcattcctggaagca

SEQ ID NO: 829650 - DNA, 75 bp, synthetic construct
  source 1..75: mol_type = other DNA
gggattaataaattcaaatgataacgattattcgataaatggtggttttggcgttggtgcagtggggctttctac

SEQ ID NO: 829651 - DNA, 75 bp, synthetic construct
  source 1..75: mol_type = other DNA
ggaaggaacgactcaggccgcagtggcagaaggcactatcaccatccgggacagggacaatcagaagcagaatct

SEQ ID NO: 829652 - DNA, 75 bp, synthetic construct
  source 1..75: mol_type = other DNA
aagagcatggacatgacccagccagaaggtgagcacagtgcacacgaaggtatggaaggcatggacatgagccac

SEQ ID NO: 829653 - DNA, 75 bp, synthetic construct
  source 1..75: mol_type = other DNA
cgtttcagcatacaaccagtaccagcaaggtaagtattcgtctgctgttgccgagcaaaatgcagaagtggccac

SEQ ID NO: 829654 - DNA, 75 bp, synthetic construct
  source 1..75: mol_type = other DNA
tgggagcagcaacaacattgctcactgcgcctctgaaggcatacggtgcgtaccagatgtttggtgggacgtgga

SEQ ID NO: 829655 - DNA, 75 bp, synthetic construct
  source 1..75: mol_type = other DNA
gctgtcagcccgcgtggtggctggcctggctcatttcctgtcgtcaggcgttcaactcccgactgcagattatgg

SEQ ID NO: 829656 - DNA, 75 bp, synthetic construct
  source 1..75: mol_type = other DNA
tttttaccttcagttttggatttattttggctttagcactggctaaaaaaaattacgtttcgcaaaggtctggcg

SEQ ID NO: 829657 - DNA, 75 bp, synthetic construct
  source 1..75: mol_type = other DNA
agcattcattgttttacctattgtaattacagttcttgtatcgtttacaaactatgctgcgccaaatcacatccc

SEQ ID NO: 829658 - DNA, 75 bp, synthetic construct
  source 1..75: mol_type = other DNA
tggggagaagtggcccatattcttcctgccagcccgaaaggccccaggggaaatgccacacacagcgtagaagag

SEQ ID NO: 829659 - DNA, 75 bp, synthetic construct
  source 1..75: mol_type = other DNA
accgacgatagtatggaagctgcttatatgctaaaagataatatccgctggtattatcataatggtgacctatca

SEQ ID NO: 829660 - DNA, 75 bp, synthetic construct
  source 1..75: mol_type = other DNA
tcccgggaacgccaaaagaacgctacagggtgccaaacggcacccttttttatgactggctggcggccaatgatg

SEQ ID NO: 829661 - DNA, 75 bp, synthetic construct
  source 1..75: mol_type = other DNA
agatgaacgccaaagtgtttgaggacggcattatccaggtcggtagcgtcattcagatgcccgacatctacgaca

SEQ ID NO: 829662 - DNA, 75 bp, synthetic construct
  source 1..75: mol_type = other DNA
gatgaatggtggcgtgcattgctgcaaagtcgcaatgatcatttgcgccaaacggcattacgcaacgcacatacc

SEQ ID NO: 829663 - DNA, 75 bp, synthetic construct
  source 1..75: mol_type = other DNA
tcgcagttacgtgatttagtgaaaaccggggcaacgcggcaaattcgcagtgaagcgcgtaaccggcttgaggaa

SEQ ID NO: 829664 - DNA, 75 bp, synthetic construct
  source 1..75: mol_type = other DNA
tcgatcaacagtatcgcttcaactctgactgggcgctggctgttgtcagtatgaaaaatagcacccgtaggcaaa

SEQ ID NO: 829665 - DNA, 75 bp, synthetic construct
  source 1..75: mol_type = other DNA
tccgttatcttcggaattttggctgtcattaataagggcgagaaaagcacagactttacggactatttagatagt

SEQ ID NO: 829666 - DNA, 75 bp, synthetic construct
  source 1..75: mol_type = other DNA
gtagagagaagctgctgtttaacaagctgaagcagttcgatgaaccaggactgttccacgataactatcagacgc

SEQ ID NO: 829667 - DNA, 75 bp, synthetic construct
  source 1..75: mol_type = other DNA
cagatggatgccttcgtcagcgacatgcagaacaggctgaatgagggagaatcgctcgaaaccgcctcgttctcc

SEQ ID NO: 829668 - DNA, 75 bp, synthetic construct
  source 1..75: mol_type = other DNA
caggtgttccttgaaccgaagggggatgaccgtctgctggatgacgcatggaaagaacggatgctcgaaacactg

SEQ ID NO: 829669 - DNA, 75 bp, synthetic construct
  source 1..75: mol_type = other DNA
tataaagagtggattcgtagtgatgatgtttcacctatatttatagaaactgaagataatttaagaacctttaac

SEQ ID NO: 829670 - DNA, 75 bp, synthetic construct
  source 1..75: mol_type = other DNA
caaatctcatggtaaatatgcgcttttcccaatttttactgcgagttggcgagctcatcgtataatgaataaggg

SEQ ID NO: 829671 - DNA, 75 bp, synthetic construct
  source 1..75: mol_type = other DNA
tcaataaatcaagcaagctacctgataaagcgatggaatatctgaagcagaacggactggttggtgtggaggata

SEQ ID NO: 829672 - DNA, 75 bp, synthetic construct
  source 1..75: mol_type = other DNA
tctgacgcagtggatagacgggcagacatttggtctggagagggtggatccggctgtttttatttcggctgatgc

SEQ ID NO: 829673 - DNA, 75 bp, synthetic construct
  source 1..75: mol_type = other DNA
ggtatcacgatgctgtgactgacgcattaaaaaaaatcggatgggtgcgtgatgccggtgcgtatccggaaagaa

SEQ ID NO: 829674 - DNA, 75 bp, synthetic construct
  source 1..75: mol_type = other DNA
agcgccgggcttacgaccattactgccggcgacagtgtgatgctgagtgcaggccgggatgtgagcagtcagggt

SEQ ID NO: 829675 - DNA, 75 bp, synthetic construct
  source 1..75: mol_type = other DNA
tggaaatcgacggggaaaaaatcaccatcgcaccggtggagacgttcccgtccgtaccggaacgcaacacgattt

SEQ ID NO: 829676 - DNA, 75 bp, synthetic construct
  source 1..75: mol_type = other DNA
gccggctggctacaaaccattaatcccaacaaagtaaaacccgaaatccgcgataaggtcatccggtatcaggaa

SEQ ID NO: 829677 - DNA, 75 bp, synthetic construct
  source 1..75: mol_type = other DNA
ccattacagcgcgtctggatagggatttcaccggagatcggtaaacagcacgttgatgattaccggctgatttat

SEQ ID NO: 829678 - DNA, 75 bp, synthetic construct
  source 1..75: mol_type = other DNA
gcggggcggggtggcggagcagcacagttcgcagccgctaagcgcactctggcaggtgctgccggaagaccggca

SEQ ID NO: 829679 - DNA, 75 bp, synthetic construct
  source 1..75: mol_type = other DNA
gcggggcgggggtgacggacggcgcgggccgccgttttcacctggtgctgaccacacaggcacagcgggcggaag

SEQ ID NO: 829680 - DNA, 75 bp, synthetic construct
  source 1..75: mol_type = other DNA
gtgctgataggcgcgccgacgggagtggcctgttcggtatgtcccaacagcccgatagaggagcagaagggtaac

SEQ ID NO: 829681 - DNA, 75 bp, synthetic construct
  source 1..75: mol_type = other DNA
ctggcgcagtaaacagcaaaatcagcagacgtcttctgaacgtgaactggagatgtctaccgagattgcacgtct

SEQ ID NO: 829682 - DNA, 75 bp, synthetic construct
  source 1..75: mol_type = other DNA
ccctgccggcgcgtaccactgaccgcgatattctgcgggcaatcatggaagggggaaccgccagaatctatcact

SEQ ID NO: 829683 - DNA, 75 bp, synthetic construct
  source 1..75: mol_type = other DNA
atgatccagttaataaaagagtttgacgcccaaggtgtatccattcggtttattgatgacggaatcagtaccgat

SEQ ID NO: 829684 - DNA, 75 bp, synthetic construct
  source 1..75: mol_type = other DNA
caaggaaacatatcgaggagatcgctggtgaagcattggcgcaactcgaaagcatcgctgaaaccgaaaggggca

SEQ ID NO: 829685 - DNA, 75 bp, synthetic construct
  source 1..75: mol_type = other DNA
attcaatgcatctatggtatcaccgatagcctctggtaatgtacatccatcagcacaggatgtacaggctacaat

SEQ ID NO: 829686 - DNA, 75 bp, synthetic construct
  source 1..75: mol_type = other DNA
cgtggtgcgacagagaaaccaagaaagttcgccatagctccggtgaagtctttcattacgccatagttaccagcc

SEQ ID NO: 829687 - DNA, 75 bp, synthetic construct
  source 1..75: mol_type = other DNA
cgcgatcgaggtggacagagcgtcaccacgagcacgttcaatactgaaactgcgcagactcaagctatacggcat

SEQ ID NO: 829688 - DNA, 75 bp, synthetic construct
  source 1..75: mol_type = other DNA
ccgggatccggacggtaacattactgcagccggctcttgaagcactgaaggagcaatacaaactgaccgggcatc

SEQ ID NO: 829689 - DNA, 75 bp, synthetic construct
  source 1..75: mol_type = other DNA
agattacttgtgttactggcagagaaaaaaaaccgaacaacgacggatgaaaaaacgttgtccgcactgatacgg

SEQ ID NO: 829690 - DNA, 75 bp, synthetic construct
  source 1..75: mol_type = other DNA
atgaatattgatatgttacgtaaagcactcagtcctaaactagtaaaaattgaagttgaaggagtagaactatat

SEQ ID NO: 829691 - DNA, 75 bp, synthetic construct
  source 1..75: mol_type = other DNA
attaatactaaaggtttgggaggggtcccagttaaagggagtgcgttactagatactgattattttggttatgct

SEQ ID NO: 829692 - DNA, 75 bp, synthetic construct
  source 1..75: mol_type = other DNA
attggcagtgaaagcaatatcttcgccgactgggccgcatctcgtcaggggtgcacggtcggagggcagtcctca

SEQ ID NO: 829693 - DNA, 75 bp, synthetic construct
  source 1..75: mol_type = other DNA
tacgtcattttcacttgatatgatgtccacttccccggcgattgtgattatatttttctgctatttcttttctgc

SEQ ID NO: 829694 - DNA, 75 bp, synthetic construct
  source 1..75: mol_type = other DNA
ttctttgtgccgtcttactgacggccatacccacagcgtcagcggatgtgaacagcgacatgaatcagttcttta

SEQ ID NO: 829695 - DNA, 75 bp, synthetic construct
  source 1..75: mol_type = other DNA
cattttctggtagtagagatgagttttgggatacaaatgatacaagagaactgtacactatcacttggaataaca

SEQ ID NO: 829696 - DNA, 75 bp, synthetic construct
  source 1..75: mol_type = other DNA
aattattatttatcagggagtaataatggtgtttttattaattctgataataattcacaatcgaattttttaggt

SEQ ID NO: 829697 - DNA, 75 bp, synthetic construct
  source 1..75: mol_type = other DNA
accgacctgatatccgtatcttcaaaacaccggatatttacccgatcagtggccatgatatctcgtctaacgatg

SEQ ID NO: 829698 - DNA, 75 bp, synthetic construct
  source 1..75: mol_type = other DNA
cagcaacaacaagttggtgcggtaataataatacagatagtagtggagtcggattcgcaaaaccttccggtacaa

SEQ ID NO: 829699 - DNA, 75 bp, synthetic construct
  source 1..75: mol_type = other DNA
tgttaatgatatcgataaattgtttgccgaacaaatttacatgaaggttttaggattaattactgtagatgatgc

SEQ ID NO: 829700 - DNA, 75 bp, synthetic construct
  source 1..75: mol_type = other DNA
tgattatatttttattgagtttaaatgtactaaaggtgtagtaccattagttaggggcttaaatgctgacaaaaa

SEQ ID NO: 829701 - DNA, 75 bp, synthetic construct
  source 1..75: mol_type = other DNA
tgggttatttctgcaacgtctcagtcaggggtatggcaaaagccgggcgttcggttgtggtctgatgctgatcaa

SEQ ID NO: 829702 - DNA, 75 bp, synthetic construct
  source 1..75: mol_type = other DNA
aggtagggaaaaacattttattagggtaattgataaaaacacgcttcagttcagagatgatgaaaacgatctgta

SEQ ID NO: 829703 - DNA, 75 bp, synthetic construct
  source 1..75: mol_type = other DNA
ccggagacgggggagatgctgtgggagcatgagacggggcatgcgtacagcgaacaggggctggcgacccgtcag

SEQ ID NO: 829704 - DNA, 75 bp, synthetic construct
  source 1..75: mol_type = other DNA
gtacaggtaacatatgtcgttcacctattggtgaacatctattacgtgggttattaagcaacaaaatcgttgact

SEQ ID NO: 829705 - DNA, 75 bp, synthetic construct
  source 1..75: mol_type = other DNA
gcactggaaatatttgccgctctccaataggagagcgaattttacagaataaatttccgttaaaacatgtcgctt

SEQ ID NO: 829706 - DNA, 75 bp, synthetic construct
  source 1..75: mol_type = other DNA
caatcaggggaaattacatcatgcattcgaggaaaaatttcctgtaaatgtgttttctaattataaaggcgattc

SEQ ID NO: 829707 - DNA, 75 bp, synthetic construct
  source 1..75: mol_type = other DNA
cgtgacggcgtgctgattaatacggtgagtcgtcagtctccggagggggacatcatcacccgccagaagctggag

SEQ ID NO: 829708 - DNA, 75 bp, synthetic construct
  source 1..75: mol_type = other DNA
cggggcacaggtaaacctgcacctggccggagggcagtcttacctgacggaccgttatccgggcatttttgccct

SEQ ID NO: 829709 - DNA, 75 bp, synthetic construct
  source 1..75: mol_type = other DNA
ataaaacaatggtgtaaagaaaagaaaagcacatctcctaaaattagatgtatattagtcgaaagcgaaagaaat

SEQ ID NO: 829710 - DNA, 75 bp, synthetic construct
  source 1..75: mol_type = other DNA
cctcggcaggagttttaactctagccaaaatggcaatgggatttgccatttcgaaaattattgcgatatataccg

SEQ ID NO: 829711 - DNA, 75 bp, synthetic construct
  source 1..75: mol_type = other DNA
catattatgatcatcggcgaaaattaaaaataactgtaagttgcttatacgacgaagcaccaataagcgtatcgt

SEQ ID NO: 829712 - DNA, 75 bp, synthetic construct
  source 1..75: mol_type = other DNA
ttcctgaaaatctggccgaagagatccgggtgatggctcgcgtgcataaacgcagcctgaacgacgaaatgctga

SEQ ID NO: 829713 - DNA, 75 bp, synthetic construct
  source 1..75: mol_type = other DNA
gggaaattacaagaattcgctaccaaacagggtttcgaagtttacccgctgtatggcaaagagatgacgacattt

SEQ ID NO: 829714 - DNA, 75 bp, synthetic construct
  source 1..75: mol_type = other DNA
gcctggtttaccgttatttcctagggactgacggagacaatggtgatgaaggaacaccgttgacaacgatcctga

SEQ ID NO: 829715 - DNA, 75 bp, synthetic construct
  source 1..75: mol_type = other DNA
tagcgggtagagagcctctggttcgtagaagacttatcaatattttaggcgtacttgagggagatgttgaccatg

SEQ ID NO: 829716 - DNA, 75 bp, synthetic construct
  source 1..75: mol_type = other DNA
ccggtggtgcttttgttaacggtctgttcctgaccggggaccagttacgttttgacggagcgctgagttacgaga

SEQ ID NO: 829717 - DNA, 75 bp, synthetic construct
  source 1..75: mol_type = other DNA
tagcctggcggaggtgttgcaggaggacacgggggtgacgctaccggcggagctggcggtgatgctggggaggct

SEQ ID NO: 829718 - DNA, 75 bp, synthetic construct
  source 1..75: mol_type = other DNA
gggcagaagccttccgtaaacagcgcgagtcttccttatcttctccagccggtccccgttctgcttcctcttctc

SEQ ID NO: 829719 - DNA, 75 bp, synthetic construct
  source 1..75: mol_type = other DNA
caactgctggcctttacggactgctcggggtacacgacgcttatcttctccggccggtccccgttctgtttcctc

SEQ ID NO: 829720 - DNA, 75 bp, synthetic construct
  source 1..75: mol_type = other DNA
ggcagtatgatgaacacgggtggctaaccaccatcagccataccagtgacggccaccgagtgtcggtccactacg

SEQ ID NO: 829721 - DNA, 75 bp, synthetic construct
  source 1..75: mol_type = other DNA
acatgggtttgctcatgcgcagtattaccttcttgataaggaaaatttcatagctcttttaagccgaacagataa

SEQ ID NO: 829722 - DNA, 75 bp, synthetic construct
  source 1..75: mol_type = other DNA
atgtgcaggaaatatgcacatgttgtggacgccctgcaagggaatttcccgtatgcgacggacccggcaggaaac

SEQ ID NO: 829723 - DNA, 75 bp, synthetic construct
  source 1..75: mol_type = other DNA
ataaaattagagtcgctcagtatctgaggatgtccacagaccatcaacaattctcaatcgacaatcaggctcttt

SEQ ID NO: 829724 - DNA, 75 bp, synthetic construct
  source 1..75: mol_type = other DNA
agatataagaagaaagcagttggcacaaaatcctaacgataccaatgaaatgattcaggcactaagaacagggaa

SEQ ID NO: 829725 - DNA, 75 bp, synthetic construct
  source 1..75: mol_type = other DNA
tctatccatgccgacgcctttaccagtcgtcagccgagcggttcctctgtgtttgcgctctcaaccaaaggtgca

SEQ ID NO: 829726 - DNA, 75 bp, synthetic construct
  source 1..75: mol_type = other DNA
gcttcgccagttcaaagaaacgccggaacagcgcttcgcgctggagcaggaacatctgcagccgttaccggatac

SEQ ID NO: 829727 - DNA, 75 bp, synthetic construct
  source 1..75: mol_type = other DNA
atttaatatgtttatttttgatggattgaatgaatatcttatcgcaacaaaactaaacagagaggggtatacata

SEQ ID NO: 829728 - DNA, 75 bp, synthetic construct
  source 1..75: mol_type = other DNA
aagttaattgataataacaatagaccaaaaatgatactttgtcctggtgaaagaaagagcttgcaaactgaccga

SEQ ID NO: 829729 - DNA, 75 bp, synthetic construct
  source 1..75: mol_type = other DNA
cgcatctaaggctgagattcgtgatatgacggtgaaggttgataaccagctggctaatggacaatcgactaacct

SEQ ID NO: 829730 - DNA, 75 bp, synthetic construct
  source 1..75: mol_type = other DNA
tcacattcaacgcactgacgtatggcgggtacgaaatgacgcctgtgaaggtgacaattaacgccgttgctgcag

SEQ ID NO: 829731 - DNA, 75 bp, synthetic construct
  source 1..75: mol_type = other DNA
atcccgtaggaggaagtatgtgggtcgacattgaggctccggaaggagtgacggagaaggattatcaatctcctg

SEQ ID NO: 829732 - DNA, 75 bp, synthetic construct
  source 1..75: mol_type = other DNA
cgatttacggtatgtttaaagggtgttttttgtatcaatgcgaaatgaaaaatttcaagatagagacatcaaaaa

SEQ ID NO: 829733 - DNA, 75 bp, synthetic construct
  source 1..75: mol_type = other DNA
acaggcttgcaccgaagtcggtgaagaatttacttaatcctgaaattccgcttgtgaaaatgaatggcacaaacc

SEQ ID NO: 829734 - DNA, 75 bp, synthetic construct
  source 1..75: mol_type = other DNA
gaagctggacagatatgcgtccagaattgcaggagcaaaagactatacaacccttttaaactggttaactgtcat

SEQ ID NO: 829735 - DNA, 75 bp, synthetic construct
  source 1..75: mol_type = other DNA
aagtcgggctgtttggtaaagataagcgccagaaagacccgcatgctatttctgccgaggtgacctatacgccag

SEQ ID NO: 829736 - DNA, 75 bp, synthetic construct
  source 1..75: mol_type = other DNA
aatggcactgcgacaacgaatgagcaagggcaggctattttcaccgctaccactactgttgcggcgacatacaca

SEQ ID NO: 829737 - DNA, 75 bp, synthetic construct
  source 1..75: mol_type = other DNA
agtctctgtcgcagaagatcacgtaaaagccggcgaaagtacaaccgtgacgctggtggcgaaagatgcgcatgg

SEQ ID NO: 829738 - DNA, 75 bp, synthetic construct
  source 1..75: mol_type = other DNA
ccttaacgctgggatctgccgcgagtgaacggccaaaatgccgttgctcagccactggtgctgaacgttgcaggt

SEQ ID NO: 829739 - DNA, 75 bp, synthetic construct
  source 1..75: mol_type = other DNA
atggtgaacgccgacaaggagggtaaagcggaactgaaagtggtctccgtgactgccggaacgtatgagatcacg

SEQ ID NO: 829740 - DNA, 75 bp, synthetic construct
  source 1..75: mol_type = other DNA
tggctaatggacagtctgctaaccagataaccctgaccgttgtggacacctatggtaacccgttgcaggggcagg

SEQ ID NO: 829741 - DNA, 75 bp, synthetic construct
  source 1..75: mol_type = other DNA
atatatcttatgaaaatcttaatggcccagtattcgaaaattgtttttttgaggggtgtaatttcgagaatgtgt

SEQ ID NO: 829742 - DNA, 75 bp, synthetic construct
  source 1..75: mol_type = other DNA
cggggaagggagagcgttacgaccagatactcgcgtttgcttatcccgacaacagccttagccgctggggagcgc

SEQ ID NO: 829743 - DNA, 75 bp, synthetic construct
  source 1..75: mol_type = other DNA
atcaatccggatactgccgcttacgcactgctagcagcgagatgcagatggtacccgacgtgcttatctttgccc

SEQ ID NO: 829744 - DNA, 75 bp, synthetic construct
  source 1..75: mol_type = other DNA
tctggtggcagagcacgacggacataccgccgtattctccctggatgaaatccatctgattcagcctttgcagga

SEQ ID NO: 829745 - DNA, 75 bp, synthetic construct
  source 1..75: mol_type = other DNA
cgagtcaatcaatggaattaccttgaatgattgtgctattgatccttcaaccactaggttaagtgttaatattgc

SEQ ID NO: 829746 - DNA, 75 bp, synthetic construct
  source 1..75: mol_type = other DNA
aaaggaactattatatttacaatctttgttggtcaagctgggtagcttcaatcttgatgatgaaggcaaaaaata

SEQ ID NO: 829747 - DNA, 75 bp, synthetic construct
  source 1..75: mol_type = other DNA
taacaagtctgacaatgcttatcagtaaaggtgaaaataaattattatccgctgtagaatcaggaagcataccta

SEQ ID NO: 829748 - DNA, 75 bp, synthetic construct
  source 1..75: mol_type = other DNA
gataaagtgaatttcatgcataaaatctataataacctttattggtatagacattacgatgaaaatctgggacat

SEQ ID NO: 829749 - DNA, 75 bp, synthetic construct
  source 1..75: mol_type = other DNA
atacagaaaaaccagcagatgtagcccgtgaaattgcgtcattctttgacattgaacaatatttactgggggtca

SEQ ID NO: 829750 - DNA, 75 bp, synthetic construct
  source 1..75: mol_type = other DNA
attcctgtttatatgtcctatagaggagctatagctgaaaatgatattttacctttcatgaaaaagttaacggaa

SEQ ID NO: 829751 - DNA, 75 bp, synthetic construct
  source 1..75: mol_type = other DNA
tgctcatggctcatgtgatggttttattttaacagacgagggttttattacatggagggatttcgatcgtatagc

SEQ ID NO: 829752 - DNA, 75 bp, synthetic construct
  source 1..75: mol_type = other DNA
gacagcctatctttcattatttaatgaatatgatgaaaaaaaagcgtcagcacaaaaaacaatattaatcaaagt

SEQ ID NO: 829753 - DNA, 75 bp, synthetic construct
  source 1..75: mol_type = other DNA
aaacagtaaaaacagcaatagatacagcagataaagctttagatctctacaacaaggtactagatcaggttatac

SEQ ID NO: 829754 - DNA, 75 bp, synthetic construct
  source 1..75: mol_type = other DNA
gcgcaatgcggcgtggtgaccctgatccagcgcttcggcagcgcgctgaatctcaagtgtaacccaaaccctcac

SEQ ID NO: 829755 - DNA, 75 bp, synthetic construct
  source 1..75: mol_type = other DNA
aatggtaaagagatcaataaattatccactggagaacgtttactgcgcggtctggtttatctgccggaagatcgc

SEQ ID NO: 829756 - DNA, 75 bp, synthetic construct
  source 1..75: mol_type = other DNA
gacacggaatatggcttaactgccagtgtctggacgcaaaatctctcccaggctctggaatatagcgatcgctta

SEQ ID NO: 829757 - DNA, 75 bp, synthetic construct
  source 1..75: mol_type = other DNA
cagggggcgcgttatcaggcctggacgcgtaaagagccggttggcgtagtggcgggaattgtgccatggaacttt

SEQ ID NO: 829758 - DNA, 75 bp, synthetic construct
  source 1..75: mol_type = other DNA
tgcgtgaggcggcagaaaaagcaacgtgtggtgagtggtcgctcgaatatggagagggccgatttgatggtgatg

SEQ ID NO: 829759 - DNA, 75 bp, synthetic construct
  source 1..75: mol_type = other DNA
tgcgtatttattaattttaattactattccgggcgtctttgcggctttcatttcgctggtaatgactccaactta

SEQ ID NO: 829760 - DNA, 75 bp, synthetic construct
  source 1..75: mol_type = other DNA
atgcaagaagataaattaaagtatttgcttgaaatttatagagaaaatgacagaaagataaaagagcaggaacag

SEQ ID NO: 829761 - DNA, 75 bp, synthetic construct
  source 1..75: mol_type = other DNA
ttcagtcaaaacgagattatgaaaatgttatgcagcacctatctaaaacattcgaaatctctggttcatggcaat

SEQ ID NO: 829762 - DNA, 75 bp, synthetic construct
  source 1..75: mol_type = other DNA
agctgagcaggatttattagaacagcacacaggtattcttgggcaatgggcgagggatatgaatgacagcctcaa

SEQ ID NO: 829763 - DNA, 75 bp, synthetic construct
  source 1..75: mol_type = other DNA
gcagtggcaaaacagggatgcaggcaaagggcattaaagccagccatgtatcaggtacccgcctttattttcatg

SEQ ID NO: 829764 - DNA, 75 bp, synthetic construct
  source 1..75: mol_type = other DNA
ctggcgcaactggaaaccctggagcaaggcaagtcaattgccatttcccgtgcttttgaagtgggctgtacgctg

SEQ ID NO: 829765 - DNA, 75 bp, synthetic construct
  source 1..75: mol_type = other DNA
gcagcactgtcgtcagtcagcgggtggggatttccttttatggcgtgtcagatattcacgagccggagttgctgt

SEQ ID NO: 829766 - DNA, 75 bp, synthetic construct
  source 1..75: mol_type = other DNA
ccagataacgaaaaaaagggttattccgagctggcaaaagtatccgcaggtgtaacaggccaaataggtgttgga

SEQ ID NO: 829767 - DNA, 75 bp, synthetic construct
  source 1..75: mol_type = other DNA
tccaacatacagaccatactggatgacggctttgacgtggttcacttcgattgcgacgccgagctggtggatggg

SEQ ID NO: 829768 - DNA, 75 bp, synthetic construct
  source 1..75: mol_type = other DNA
tgaaaggtgaaacgaaaacgcaaagagaaaaaaattcagaagctgatcccagcaattctggcaatccttccgcgc

SEQ ID NO: 829769 - DNA, 75 bp, synthetic construct
  source 1..75: mol_type = other DNA
tgaaaggtgaaacaaaagcgcaaagggaaaaaattcagaagctgatcccagcaattctggcaatccttccgcgcg

SEQ ID NO: 829770 - DNA, 75 bp, synthetic construct
  source 1..75: mol_type = other DNA
tgcgcaggtaaataataaagggaaagttgggattatcgcgcacgttgcaggaacatcttccgctattgaacgctc

SEQ ID NO: 829771 - DNA, 75 bp, synthetic construct
  source 1..75: mol_type = other DNA
cctttatcgaccatgatttatcccgtagtcatacccgcattggtgttggtgcggaatactggcgcgattatctga

SEQ ID NO: 829772 - DNA, 75 bp, synthetic construct
  source 1..75: mol_type = other DNA
aggaacgcattaattattgaaactgaaaaaaaaattaccgctactggtgttaaaaattcctcaacgcgattatca

SEQ ID NO: 829773 - DNA, 75 bp, synthetic construct
  source 1..75: mol_type = other DNA
gcggtgatgcggatgcggagagggaagccggtgcacaggtgatgcgtgagactgaacagcagatttaccgtcagc

SEQ ID NO: 829774 - DNA, 75 bp, synthetic construct
  source 1..75: mol_type = other DNA
tgagcagtgaaagccgggcgtggcttgcgcagtgcgggctgacggtggagcaactggccagacaggtggagccgg

SEQ ID NO: 829775 - DNA, 75 bp, synthetic construct
  source 1..75: mol_type = other DNA
ggcgggtggtggagcaactgaacccggcagggttaagctaccgctatctttatgagcaggaccgcatcaccgtca

SEQ ID NO: 829776 - DNA, 75 bp, synthetic construct
  source 1..75: mol_type = other DNA
ttgaaaaatatcctgattacatttttggcgctagtcagtaccaactttttcactggataaaaaagattatcccta

SEQ ID NO: 829777 - DNA, 75 bp, synthetic construct
  source 1..75: mol_type = other DNA
gccttcgggaagtagatcatgaatttgttagatatgttgcaggacgagcaaatattggtcgtcaattaaatcaaa

SEQ ID NO: 829778 - DNA, 75 bp, synthetic construct
  source 1..75: mol_type = other DNA
aggtttccggcccttatttggagaaactaaaaatagccttccggcttttcctcagcagtttcctgcttgcaacta

SEQ ID NO: 829779 - DNA, 75 bp, synthetic construct
  source 1..75: mol_type = other DNA
ctgccgctggcgctcatcagcgaagacggcaatacggcgtggcgcggggagtatgatgaatggggcaaccagctt

SEQ ID NO: 829780 - DNA, 75 bp, synthetic construct
  source 1..75: mol_type = other DNA
tgttagtaacaagatgattgcactggaacgcgacaaccagcaaaaggcacagcagatagcagcactgaaagttga

SEQ ID NO: 829781 - DNA, 75 bp, synthetic construct
  source 1..75: mol_type = other DNA
atgtctgatttagatattgcagcaaagctgtatgaagaaaacacattcatgggcagatgtgacattacagggagt

SEQ ID NO: 829782 - DNA, 75 bp, synthetic construct
  source 1..75: mol_type = other DNA
atgctttctactggcggttttgtggaatgggggaccgtgaatatgccaccgcacccgtttgtgcgcccggcattt

SEQ ID NO: 829783 - DNA, 75 bp, synthetic construct
  source 1..75: mol_type = other DNA
gcgttgcgaagaactagccagagaaaacgaggcgctaaaggctgagattgatatgttgaaaaaccagctaaacaa

SEQ ID NO: 829784 - DNA, 75 bp, synthetic construct
  source 1..75: mol_type = other DNA
tacaaggcgttagcaaagctggaggatgaagggaagatcgtcaaagaggcagcgacaaggagcgggattaatatt

SEQ ID NO: 829785 - DNA, 75 bp, synthetic construct
  source 1..75: mol_type = other DNA
gattgatgtgttgaaaaaacaattaagcaacaagagcgatattgtagacaaaccagttaatcaacaaatcgagac

SEQ ID NO: 829786 - DNA, 75 bp, synthetic construct
  source 1..75: mol_type = other DNA
gtcccgcggctttaatccgacaaccgcgctttttttgcgccatattcatcactgacttacatggcattgccacac

SEQ ID NO: 829787 - DNA, 75 bp, synthetic construct
  source 1..75: mol_type = other DNA
gagtggggacatctggaaagggaaagtcgctatgacaggtggcggctcatgcaaatggacgttgagtgcggtcaa

SEQ ID NO: 829788 - DNA, 75 bp, synthetic construct
  source 1..75: mol_type = other DNA
acattttcaaagcacaatctgcccggtttttggaatacgtgaaccggatcaagatatgcccatttcttatcctct

SEQ ID NO: 829789 - DNA, 75 bp, synthetic construct
  source 1..75: mol_type = other DNA
gtaactttatcgttagtaaagatggtgtcaggataattgacctatccggtaaaagctgtacggcagagcgtaaag

SEQ ID NO: 829790 - DNA, 75 bp, synthetic construct
  source 1..75: mol_type = other DNA
tttgctagttcgagagatgaaacctttatagcaaagttattatatggcaatataccaggtttggaatttaatgaa

SEQ ID NO: 829791 - DNA, 75 bp, synthetic construct
  source 1..75: mol_type = other DNA
tcagtattgaataccctgagtggcgctttaacctgcgcacgtccaacacggagccggtggtgcgtctgaacgttg

SEQ ID NO: 829792 - DNA, 75 bp, synthetic construct
  source 1..75: mol_type = other DNA
tggggctggctggcgtatcccgcaatggaacgcggaaagccatcacgccggaatattatcaacagatggcagaga

SEQ ID NO: 829793 - DNA, 75 bp, synthetic construct
  source 1..75: mol_type = other DNA
gtatatcgaaccagtggatacgctgggagcgggtgacgcttttttaaccggttttatgctctccattatgcaatc

SEQ ID NO: 829794 - DNA, 75 bp, synthetic construct
  source 1..75: mol_type = other DNA
ttacgtttgtcagccacggtgagacgaccttactgagcgaaaagagcaaactgaaattgcagtcgcatctcgatc

SEQ ID NO: 829795 - DNA, 75 bp, synthetic construct
  source 1..75: mol_type = other DNA
cgcgggcgtccggtgagtgtgacggaaggcggtcttacgcgcagcatggggtatgacgctgccgggcgcatcacc

SEQ ID NO: 829796 - DNA, 75 bp, synthetic construct
  source 1..75: mol_type = other DNA
actacaaccaggtgccgggtactcagcagacgttcacgtatcaccaggggacgccgcacaaatcatccagcgaag

SEQ ID NO: 829797 - DNA, 75 bp, synthetic construct
  source 1..75: mol_type = other DNA
tggccgcgccgggaataattttgataccagcgagccaataacgtttaccggctcgatgtatgtcctggtgaccga

SEQ ID NO: 829798 - DNA, 75 bp, synthetic construct
  source 1..75: mol_type = other DNA
acgcagtgtggacttcgcccgtctgttctcccgcgtctctaaaaaatacgtcatcaataccgtatcagccggaga

SEQ ID NO: 829799 - DNA, 75 bp, synthetic construct
  source 1..75: mol_type = other DNA
tgggtataacacgctggctaataatattagcattaaacttcattatttgttttctggttcatctttcaaatatat

SEQ ID NO: 829800 - DNA, 75 bp, synthetic construct
  source 1..75: mol_type = other DNA
ggtctgtggcatacgggatatcaatgcccaggttacatataataataagagcaattaacttaatttatttgttta

SEQ ID NO: 829801 - DNA, 75 bp, synthetic construct
  source 1..75: mol_type = other DNA
acgggagaatatggctgctgaaaaattgcaactttctgaggaagtgttgtctacgttggatggtatttcgcgaga

SEQ ID NO: 829802 - DNA, 75 bp, synthetic construct
  source 1..75: mol_type = other DNA
tgaaaatgtgtttaatttgctcgatagtttatatgttgagtcagttgataccctaactttcaaatatcaatcaat

SEQ ID NO: 829803 - DNA, 75 bp, synthetic construct
  source 1..75: mol_type = other DNA
ctgatagattttttggttcacgttctgatgaccgtaaagagcttttagaacaagttaagcgtgaaaaagagttaa

SEQ ID NO: 829804 - DNA, 75 bp, synthetic construct
  source 1..75: mol_type = other DNA
ctattattttctctgttttgtattgctctcattaatattgaaaaaatacaaagttaatgaaccattatttttggg

SEQ ID NO: 829805 - DNA, 75 bp, synthetic construct
  source 1..75: mol_type = other DNA
tctttattacttcgtaatatcgttcagttactgcccctttctgtcacacttactcagtattatatccataatgac

SEQ ID NO: 829806 - DNA, 75 bp, synthetic construct
  source 1..75: mol_type = other DNA
tgataaccgcaaatttgaataccacttcgaaattaatgctgcgccgggacaggatgagaaagccattgccgatga

SEQ ID NO: 829807 - DNA, 75 bp, synthetic construct
  source 1..75: mol_type = other DNA
agaagcagattctggagtatgtcgggcgtggcgacatgaccgctgcccggacagtggcccggaacagcggacagg

SEQ ID NO: 829808 - DNA, 75 bp, synthetic construct
  source 1..75: mol_type = other DNA
tctgcggaaataaagcgggcgaagctggccggacaaagtgtggccggactgaaaaaagagtatgcgaagctgggc

SEQ ID NO: 829809 - DNA, 75 bp, synthetic construct
  source 1..75: mol_type = other DNA
aatagaacttttcaccatggcgcaaattcatccagtatttattatagggaaaataacgataattatgaagaagct

SEQ ID NO: 829810 - DNA, 75 bp, synthetic construct
  source 1..75: mol_type = other DNA
gaatatcaagcacatcatatttcattagaatattttccaactactatggcgtcacaccaaaacaattttatttat

SEQ ID NO: 829811 - DNA, 75 bp, synthetic construct
  source 1..75: mol_type = other DNA
ccaactggaagcggtactgagcgacgataacagcagcctgagcggcggcttcgataacttcttcgccgcccttaa

SEQ ID NO: 829812 - DNA, 75 bp, synthetic construct
  source 1..75: mol_type = other DNA
acggaaataaattacagggattataggaaagtatcaaaatatgtagatgataaagtcgatttattctcagcattg

SEQ ID NO: 829813 - DNA, 75 bp, synthetic construct
  source 1..75: mol_type = other DNA
aataaagaagataaaaaagatgcagccaaaattcgtaagattaatgaaacactaaataaaatagatgacgaaata

SEQ ID NO: 829814 - DNA, 75 bp, synthetic construct
  source 1..75: mol_type = other DNA
taatctggataaacacatttcaaaccttatctacgttaatctttttcctaatatgagtggcggtcgttatataaa

SEQ ID NO: 829815 - DNA, 75 bp, synthetic construct
  source 1..75: mol_type = other DNA
tacaaaaacattactgggacataaagtccaggctaccaccgatcgctataacgatacccgaggtcaggaatgggt

SEQ ID NO: 829816 - DNA, 72 bp, synthetic construct
  source 1..72: mol_type = other DNA
aatattgtgcgcggtcagcgcgttcctgggggacggctgggcgtgaagatttacaaaattgagagtgagtga

SEQ ID NO: 829817 - DNA, 75 bp, synthetic construct
  source 1..75: mol_type = other DNA
atggctatatcatcatataatacagttacagataattttgcaaagctgactaaaatgccagatgaaaatctgaat

SEQ ID NO: 829818 - DNA, 75 bp, synthetic construct
  source 1..75: mol_type = other DNA
attaatgatatccccatcttcatgttaaataatcgcgatattgataccattatacaagctatggtatcggcaaaa

SEQ ID NO: 829819 - DNA, 75 bp, synthetic construct
  source 1..75: mol_type = other DNA
acctccctatatgatgaggtaattattattaataaaatccccccaaaaaaattgatactaaaggagttgctactg

SEQ ID NO: 829820 - DNA, 75 bp, synthetic construct
  source 1..75: mol_type = other DNA
gttacgtcatctgttctggtcagataaacagactgaggcttataaacttctgttcaatttcgtgaataaaaaggc

SEQ ID NO: 829821 - DNA, 75 bp, synthetic construct
  source 1..75: mol_type = other DNA
gatgaggcaacaggaagaatacggcaatgggggcagaaacaagttgtccggccaaccagtgaaggagacacacat

SEQ ID NO: 829822 - DNA, 75 bp, synthetic construct
  source 1..75: mol_type = other DNA
taccacgggggcgcgaacgatgaccgtctggacgcaggatctcatctatgcgggcgatccggttcattatcacgg

SEQ ID NO: 829823 - DNA, 75 bp, synthetic construct
  source 1..75: mol_type = other DNA
ggacggtgctatcctggacggtgctaccgtgaacggtgctacctccctatatgatgaggtaattattattaataa

SEQ ID NO: 829824 - DNA, 75 bp, synthetic construct
  source 1..75: mol_type = other DNA
tgcgcaaaaaatccggatgagatggtcgcaaagggcaatatgcgctgggtcgccgagatctacggtgatatcgag

SEQ ID NO: 829825 - DNA, 75 bp, synthetic construct
  source 1..75: mol_type = other DNA
gcaatgaatgctcgctgacccccttcacccaggtgccgaatggtgcacctggtggtcaggtttcggccacggtag

SEQ ID NO: 829826 - DNA, 75 bp, synthetic construct
  source 1..75: mol_type = other DNA
ccagaactggctgcctatgagctgttaagcgcagtccctcaggaaatctcatttgagcacgctgccgagcttttt

SEQ ID NO: 829827 - DNA, 75 bp, synthetic construct
  source 1..75: mol_type = other DNA
gacgcgctgaagctggcaaatgaaggtaaagtaaaagaagcgcaggctgctgcagagcaactgaaaacgacccgc

SEQ ID NO: 829828 - DNA, 75 bp, synthetic construct
  source 1..75: mol_type = other DNA
aattttttgtcgctattgccgatgccggacaaatctctaaggcagcgttgttttgcaatgtttcccaatcgtcaa

SEQ ID NO: 829829 - DNA, 75 bp, synthetic construct
  source 1..75: mol_type = other DNA
tctggtgggcggcctttgctttacactcggctttattttgctggcggtttgcggcacagcctgttcacctcgtcg

SEQ ID NO: 829830 - DNA, 75 bp, synthetic construct
  source 1..75: mol_type = other DNA
tgcagttgagcgccagaaaagcggcaatcgctgaacggattgctgcccataaaattgcccgcagtaaagtgtcgg

SEQ ID NO: 829831 - DNA, 75 bp, synthetic construct
  source 1..75: mol_type = other DNA
agccgtacccgttctggcggcgaatggtgtcattttggcaccaatcccacttgaacacatagtagagatcatcac

SEQ ID NO: 829832 - DNA, 75 bp, synthetic construct
  source 1..75: mol_type = other DNA
atgacggtgataaaaaaagtggtgcaacagcctcaatgttagatcttttaacagagctgatcaaatgtaaagatt

SEQ ID NO: 829833 - DNA, 75 bp, synthetic construct
  source 1..75: mol_type = other DNA
tgtaatactcttttctaaaccggttccgactgctgtgtttgtcaccataatattgctttgtgcttattttaaagc

SEQ ID NO: 829834 - DNA, 75 bp, synthetic construct
  source 1..75: mol_type = other DNA
gctgggaaccgggtgtccagaccgtcgcggtgaaatgcgacctgtggatttcttgccagaaggtccggcctgcgt

SEQ ID NO: 829835 - DNA, 75 bp, synthetic construct
  source 1..75: mol_type = other DNA
aaccctgaaaaatcagcccggcgaaacagttcgtcgggctgaagattattcttgcgcgatttgcccatcgggcca

SEQ ID NO: 829836 - DNA, 75 bp, synthetic construct
  source 1..75: mol_type = other DNA
ttcaaaccgtatactggaaagattaaaacgattgaagatgtctatatggttatattctgtcctagggctgttggt

SEQ ID NO: 829837 - DNA, 75 bp, synthetic construct
  source 1..75: mol_type = other DNA
actgaaacaggtgcaaacagaagtcgataagtcgaccaaacaggaatactggcaattgcggccagaaaacgcgta

SEQ ID NO: 829838 - DNA, 75 bp, synthetic construct
  source 1..75: mol_type = other DNA
atccaaaaactcgccaagctttgcgcaacaagacactcgagaattattagctttcaactttagccataaggattt

SEQ ID NO: 829839 - DNA, 75 bp, synthetic construct
  source 1..75: mol_type = other DNA
tgcagattttaaagctcttgcaggaagatggcaggctgaacaacgctgagattgccaagcgtgtttttctttccc

SEQ ID NO: 829840 - DNA, 75 bp, synthetic construct
  source 1..75: mol_type = other DNA
atttctataccctgtatatgcacctggccccctattcagcttatagtgtcaatccggcagaaacaaagtggacag

SEQ ID NO: 829841 - DNA, 75 bp, synthetic construct
  source 1..75: mol_type = other DNA
agaaggtaaaacaagtttacatgccaccacagaaaaaatagtaaaattcattgaaggtaattacccagagtacct

SEQ ID NO: 829842 - DNA, 75 bp, synthetic construct
  source 1..75: mol_type = other DNA
acgccggccacgtcgttaccaacttccacgtcatccagggcgcgtccgaagccaccgtcaaactggccgacggcc

SEQ ID NO: 829843 - DNA, 75 bp, synthetic construct
  source 1..75: mol_type = other DNA
atggggcgtacctaccaccaggaaaaccgcacacccggcagcctgccggggacgaagacgcagatgacgatccgc

SEQ ID NO: 829844 - DNA, 75 bp, synthetic construct
  source 1..75: mol_type = other DNA
gcgcgacaccgaaagccagcatgaagaataaatcctggttcaggatgcaggctggggggccgggtgacgcggata

SEQ ID NO: 829845 - DNA, 75 bp, synthetic construct
  source 1..75: mol_type = other DNA
ctgaaaccattggcaacaatcagatgattgcggttaccaacaatcagatacagacggtgggtgttaaccagatag

SEQ ID NO: 829846 - DNA, 75 bp, synthetic construct
  source 1..75: mol_type = other DNA
taattagcacacccatgtcccttaccgattactggccaaaggcatgtgaaaaagcccaacgcgcaatagccatgc

SEQ ID NO: 829847 - DNA, 75 bp, synthetic construct
  source 1..75: mol_type = other DNA
ccggttctggtaaaaccctgaccagctttaaagccgcgcgtctggcaacagaactggactttattgataaagtct

SEQ ID NO: 829848 - DNA, 75 bp, synthetic construct
  source 1..75: mol_type = other DNA
aatggttcatactaccgggcgaatgaaacacgtcagttcgccaggatgttgggacttgaaccgaagaacacggca

SEQ ID NO: 829849 - DNA, 75 bp, synthetic construct
  source 1..75: mol_type = other DNA
attcttttggtcccgacttgctgtctccacatatacaactgcgagcacattggtcgtaggagctgcaggacatgt

SEQ ID NO: 829850 - DNA, 75 bp, synthetic construct
  source 1..75: mol_type = other DNA
tggttaagtcagtggctgattgctttaatctttggtccagaatatatagttagccagaatgtattcatagttttc

SEQ ID NO: 829851 - DNA, 75 bp, synthetic construct
  source 1..75: mol_type = other DNA
tccgtactactcaagactgattttgcgttctataaaaaaacataccagaagcttgataaaatatatgatgacata

SEQ ID NO: 829852 - DNA, 75 bp, synthetic construct
  source 1..75: mol_type = other DNA
actgtcatccagaaggctgctgcatcctacattcattcagaatatgaccgtcttcctgaatatgtaatcaactac

SEQ ID NO: 829853 - DNA, 75 bp, synthetic construct
  source 1..75: mol_type = other DNA
acctatgtctggtgagacagtctgctacgccttcgacttcacagacccctatagcatcgttatgaatacctgcgc

SEQ ID NO: 829854 - DNA, 75 bp, synthetic construct
  source 1..75: mol_type = other DNA
atatgatgcgtatggcgcacaacaattctattatcctgatctactgaaatattctccagaccagttaagggctga

SEQ ID NO: 829855 - DNA, 75 bp, synthetic construct
  source 1..75: mol_type = other DNA
gaatattagaaacagaaatcttttatttacagcaatgacaagaactaaagggtggttatctatttcaggtattgg

SEQ ID NO: 829856 - DNA, 75 bp, synthetic construct
  source 1..75: mol_type = other DNA
gcccagctttctactccctgtactgacagcatcataaacagtattgcatcaggcgttttcaccaaagagggttag

SEQ ID NO: 829857 - DNA, 75 bp, synthetic construct
  source 1..75: mol_type = other DNA
tactccctgtactgacagcatcataaacagtattgcatcaggcgttttcaccaaagagggtcagcatgatgagaa

SEQ ID NO: 829858 - DNA, 75 bp, synthetic construct
  source 1..75: mol_type = other DNA
cgatatgcggatgttgaggtcatgaaaattgctggagatgcccagctttctactccatgcactgacagcatcata

SEQ ID NO: 829859 - DNA, 75 bp, synthetic construct
  source 1..75: mol_type = other DNA
tgtactgtgtatcctgaccccagattttttgcctttgcacggtgttgatcccgaaaacgagcgcctgcacgcgct

SEQ ID NO: 829860 - DNA, 75 bp, synthetic construct
  source 1..75: mol_type = other DNA
catcggcgcttacgctggtaatagcccagcgtctggtacgtaaactttgcccacattgtcgccgacagcaagggg

SEQ ID NO: 829861 - DNA, 75 bp, synthetic construct
  source 1..75: mol_type = other DNA
atttatttgtaatccagttttggaaaaacgccagttttcaaacgaaagtcagttaaaaaaactgccgggatatga

SEQ ID NO: 829862 - DNA, 75 bp, synthetic construct
  source 1..75: mol_type = other DNA
tatatccataaagcggaacatctggatgaacgaaagctgatgttgcagtggtgggcggattttctggatgccaat

SEQ ID NO: 829863 - DNA, 75 bp, synthetic construct
  source 1..75: mol_type = other DNA
tattaggtactatctggaatatagttatgagtgcagcaccaggatttaatgcattagcaggaactagcagtatac

SEQ ID NO: 829864 - DNA, 75 bp, synthetic construct
  source 1..75: mol_type = other DNA
gcaggtggtggcaagtgaactgcacggcgaacagccacaggcggtgccaggacggcagggagcggggacggcgct

SEQ ID NO: 829865 - DNA, 75 bp, synthetic construct
  source 1..75: mol_type = other DNA
tgatcgattattcgcgtcacgccgtccttctcggcagtagtggaatggcggagctacgctttattcgcacccacg

SEQ ID NO: 829866 - DNA, 75 bp, synthetic construct
  source 1..75: mol_type = other DNA
gctccttataccgcttacctttggcaaccatacaccgggtgcattgttgctggcgcatacctcttccactctctt

SEQ ID NO: 829867 - DNA, 75 bp, synthetic construct
  source 1..75: mol_type = other DNA
tttagcaaaagaccgtttcacggtaccaaaaacacaggcgggaaccaatcgggtcattcatcttattaagccagc

SEQ ID NO: 829868 - DNA, 75 bp, synthetic construct
  source 1..75: mol_type = other DNA
ccgtaaggctatggctgccagcttgtctgagtttataaaacaccatgcaccgaaagcgcacttccgggtgccgga

SEQ ID NO: 829869 - DNA, 75 bp, synthetic construct
  source 1..75: mol_type = other DNA
attctttcccgcgcctacagcagctaccggaccaggacgcccgcgccggtgggggtgtttggtcccggctggaaa

SEQ ID NO: 829870 - DNA, 75 bp, synthetic construct
  source 1..75: mol_type = other DNA
aaggcaacattactgatgtcaggcggctataaagccttccttgctgaggtcaacaaccttaacaaacgtatgggt

SEQ ID NO: 829871 - DNA, 75 bp, synthetic construct
  source 1..75: mol_type = other DNA
ccctggtatttctttgtggaacggactgggtcaccgttttgaaagaaacagagagttcatataataaaaagttca

SEQ ID NO: 829872 - DNA, 75 bp, synthetic construct
  source 1..75: mol_type = other DNA
acgtgaagtacgtaaagctgtaaaagaacgggcattggaaaaaattaaactgttcggttctgatggcaaagcgga

SEQ ID NO: 829873 - DNA, 75 bp, synthetic construct
  source 1..75: mol_type = other DNA
tacagagactatccggatatcgtatgggctggtcgctctaatactgtactggccgggcagagcctcggtggagtg

SEQ ID NO: 829874 - DNA, 75 bp, synthetic construct
  source 1..75: mol_type = other DNA
ctcgtcgacccagaagtcgaaccacgtaatggaaagctggtagtcgccaaacttgaaggggaaaacgaggcgaca

SEQ ID NO: 829875 - DNA, 75 bp, synthetic construct
  source 1..75: mol_type = other DNA
gtaataaccaatacgtcaaccaaaaagtccgttttatccctgaataatactgctgactatatctatcacggcaac

SEQ ID NO: 829876 - DNA, 75 bp, synthetic construct
  source 1..75: mol_type = other DNA
agaatcgaccggggaaatcactccgtcgatgttctatgctgcaggaggatatgaactgacggaagacggggctaa

SEQ ID NO: 829877 - DNA, 75 bp, synthetic construct
  source 1..75: mol_type = other DNA
acgtcataaaatttctgccttcccggatactgaatcctggtgccgtgagctagcagcgcccccccaaattaaatc

SEQ ID NO: 829878 - DNA, 75 bp, synthetic construct
  source 1..75: mol_type = other DNA
aactacgatgaatttgccacgctgaaagccctgcagaaggttgatattagtgacccggaagcggtagaaaccttt

SEQ ID NO: 829879 - DNA, 75 bp, synthetic construct
  source 1..75: mol_type = other DNA
tctccggtaaggactggaaagtcacagcccgcgccggccttggctaccagtttgacctgtttgccaacggtgaaa

SEQ ID NO: 829880 - DNA, 75 bp, synthetic construct
  source 1..75: mol_type = other DNA
ccgtcgtcttattcttgatgggggggtggacacaacaaatgatataagcctgcgcaatacacaactgtccatgca

SEQ ID NO: 829881 - DNA, 75 bp, synthetic construct
  source 1..75: mol_type = other DNA
actgcatggcgggcgataatttaccagcagaaccgaaagctgcattggtaacgaaaaatgatggtaaaacctttc

SEQ ID NO: 829882 - DNA, 75 bp, synthetic construct
  source 1..75: mol_type = other DNA
attttaccatcgctgcatatggcaaaccgcgaactgcgccgggcgaaaagtcatgcccagaagtgggagcgagtt

SEQ ID NO: 829883 - DNA, 75 bp, synthetic construct
  source 1..75: mol_type = other DNA
aacgtgtctgcgccgcgctgcgggagctgaacaagcaccgggatattttccggcagatgactgattcttcccgcc

SEQ ID NO: 829884 - DNA, 75 bp, synthetic construct
  source 1..75: mol_type = other DNA
ggggagcaacggacgttttctggtgttgcccgaggggatgaaagccgaaacgaactggacgatggaaaacgggaa

SEQ ID NO: 829885 - DNA, 75 bp, synthetic construct
  source 1..75: mol_type = other DNA
ctttcattccatctcaggataaaattggtcataatcaattgactataccagtatcttacagattgaaaataatta

SEQ ID NO: 829886 - DNA, 75 bp, synthetic construct
  source 1..75: mol_type = other DNA
gcatacagggttacaactgttatgacggtggtgaacatacggacagtgacccgcaggccgaatggccgggcaggg

SEQ ID NO: 829887 - DNA, 75 bp, synthetic construct
  source 1..75: mol_type = other DNA
gcatacagggttacaactgttattgtcacgaacggtgcaatagtgatccacacccaacgcctgaaatcagatcca

SEQ ID NO: 829888 - DNA, 75 bp, synthetic construct
  source 1..75: mol_type = other DNA
cactggtacagcgagccggtacacggtatacagggttacaactgttacgatggcggagagcatacggacagtgat

SEQ ID NO: 829889 - DNA, 75 bp, synthetic construct
  source 1..75: mol_type = other DNA
ttcgtctttttcaggcccggtgccagtacctttaccggtgtgtagtcagtgtgaagctcgcgggtattcatcaca

SEQ ID NO: 829890 - DNA, 75 bp, synthetic construct
  source 1..75: mol_type = other DNA
atgggcggaggtgttgccccgggtgtttcccctgccggttcggtgagtacgcgaaccagaccgccggaggagatg

SEQ ID NO: 829891 - DNA, 75 bp, synthetic construct
  source 1..75: mol_type = other DNA
tgatttctctgacagtacgtgctgcgtgcaaaatcactacatcaaataaaccagccaaatctcatagagataaga

SEQ ID NO: 829892 - DNA, 75 bp, synthetic construct
  source 1..75: mol_type = other DNA
agatgctggcaggtcaaccggggatgacggtggcgcaggcgaaagcgtttctggcggcagcccctgctgccggtg

SEQ ID NO: 829893 - DNA, 75 bp, synthetic construct
  source 1..75: mol_type = other DNA
tgaaggtcttccgcgtgaaatcgagttgcgccagaaacaatacgagtactatcgtgatttactgttcagtttccc

SEQ ID NO: 829894 - DNA, 75 bp, synthetic construct
  source 1..75: mol_type = other DNA
acaggctatgacggcattgttgcctgtcttcagcaggcaatggcggacacctctgtccggggcgtactgctggat

SEQ ID NO: 829895 - DNA, 75 bp, synthetic construct
  source 1..75: mol_type = other DNA
ccgaaggtactataggcgtaacatatgcttattgtttgaattatttcttatatatgattgttttcatatttgtca

SEQ ID NO: 829896 - DNA, 75 bp, synthetic construct
  source 1..75: mol_type = other DNA
ggcctcccgcgtgaaatcgagttgcgccagaaacaatacgagtactatcgtgatttactgttcagttttcccaaa

SEQ ID NO: 829897 - DNA, 75 bp, synthetic construct
  source 1..75: mol_type = other DNA
tcccttactatccagtctgaaatcgtgcgaattctggacaaattcagcgcccttacagcagagcttacagcagag

SEQ ID NO: 829898 - DNA, 75 bp, synthetic construct
  source 1..75: mol_type = other DNA
gaagaacaagcacgcatcgttgctttcttggacaaattcgacacattgacaagctccatcaccgaaggcttaccc

SEQ ID NO: 829899 - DNA, 75 bp, synthetic construct
  source 1..75: mol_type = other DNA
gtcgactggaggcatgggaacgctacagcgttctggtcagtcgtgtggatcctgcaaatcctgaatggccggaaa

SEQ ID NO: 829900 - DNA, 75 bp, synthetic construct
  source 1..75: mol_type = other DNA
ccggcaaccggcacggcaagttccggcgatcaaattattgcgttgccggaagcaaaaggacgcgaaaaactggca

SEQ ID NO: 829901 - DNA, 75 bp, synthetic construct
  source 1..75: mol_type = other DNA
ggcgctgccggaagctaaagggcgtgaacaactcgcacaggcgctggctgaacagccgggaatgaccgttgatca

SEQ ID NO: 829902 - DNA, 75 bp, synthetic construct
  source 1..75: mol_type = other DNA
cttccaatagttattgtatgtggattgataatctacctattacgtgattttattatttatttacttttctctgat

SEQ ID NO: 829903 - DNA, 75 bp, synthetic construct
  source 1..75: mol_type = other DNA
agacattgccatccaccttgagcctcagatttccaaatgccgagccgtcattggtggcgcgggcgcagcaaaggc

SEQ ID NO: 829904 - DNA, 75 bp, synthetic construct
  source 1..75: mol_type = other DNA
tatccctaaaatttctaaagatacaaaactggctcacataccaattattttagtgcaacaagtaccattggttat

SEQ ID NO: 829905 - DNA, 75 bp, synthetic construct
  source 1..75: mol_type = other DNA
accattgaccgcctttatcaccagacatgtattggcgcagtccgctgggggaatctgccggataatgcccgggag

SEQ ID NO: 829906 - DNA, 75 bp, synthetic construct
  source 1..75: mol_type = other DNA
tataccggtgttggcttttattagagggagggacgttttaacaaaaccacatgaacgagaaagtgaccctcaaaa

SEQ ID NO: 829907 - DNA, 75 bp, synthetic construct
  source 1..75: mol_type = other DNA
agattaaccggcgataactttggtcaactcgttgaagaaatcgtatttgaagataatgccatcgtggatattggc

SEQ ID NO: 829908 - DNA, 75 bp, synthetic construct
  source 1..75: mol_type = other DNA
ttatcgaactgatggtggttattggcatcattgccattttaagcgccattggtattcccgcttatcaaaactacc

SEQ ID NO: 829909 - DNA, 75 bp, synthetic construct
  source 1..75: mol_type = other DNA
aaattaatatctgattttgtgacgcttttagataatattttagaaaggacaggttcgtttgcaattattgctaca

SEQ ID NO: 829910 - DNA, 75 bp, synthetic construct
  source 1..75: mol_type = other DNA
aaacttgagaacgttcaaggtgatgagcgtgatgtaatctttatttcctttacctgtggaccttctgagcatggt

SEQ ID NO: 829911 - DNA, 75 bp, synthetic construct
  source 1..75: mol_type = other DNA
ttacagagcttaactgttgagtatgaggaaatagtcatcattcccttaacgattggctctggagttattaatttt

SEQ ID NO: 829912 - DNA, 75 bp, synthetic construct
  source 1..75: mol_type = other DNA
aaataagaatgcctgatcttgcccgtactttagtagatggtgtctatgaatcaaaaatcacagcgccagcaagtt

SEQ ID NO: 829913 - DNA, 75 bp, synthetic construct
  source 1..75: mol_type = other DNA
ctactctgccagccgggctacgtgagaagttacttttggcatttaatgaaggagctggattcccactcccagata

SEQ ID NO: 829914 - DNA, 75 bp, synthetic construct
  source 1..75: mol_type = other DNA
ggtgaatgccacgcctggtttgctgactcgcggaaaaaagcgttacttgccgaagttggtgtgggcacaattgac

SEQ ID NO: 829915 - DNA, 75 bp, synthetic construct
  source 1..75: mol_type = other DNA
aacattggcgttaatcagatacagacggttggtgtcaaccaggtggaaacggtgggcagtaaccagattatcaaa

SEQ ID NO: 829916 - DNA, 75 bp, synthetic construct
  source 1..75: mol_type = other DNA
tggataccgaagtgctcaacgaccgtaccaccaccgtaaaacacgatcatcgcgaaaccgtaaaaaatgaccaga

SEQ ID NO: 829917 - DNA, 75 bp, synthetic construct
  source 1..75: mol_type = other DNA
gttgctggtcaaaatttattgcgtcacgaaaaaggttacggccgggaagccagcgattttttatgggataccgaa

SEQ ID NO: 829918 - DNA, 75 bp, synthetic construct
  source 1..75: mol_type = other DNA
ctgatactggcattcctcactgccggaattggcccctggatcgcctcttttatttgggctttcatgtacaacaaa

SEQ ID NO: 829919 - DNA, 75 bp, synthetic construct
  source 1..75: mol_type = other DNA
cgtgttgcctctctggcagcgcaggtgtcccgcagcaagacggcaatcgaaaagccgggccgtgagtacctgaag

SEQ ID NO: 829920 - DNA, 75 bp, synthetic construct
  source 1..75: mol_type = other DNA
gccaggcagtaaacgaagtgccggacctgtccacgaagaaaggccgtgaccgtgtcgcctctctggcggcgcagg

SEQ ID NO: 829921 - DNA, 75 bp, synthetic construct
  source 1..75: mol_type = other DNA
gctgaagctctcgcaaagcaaattgagtctgaccatgaaatagctattttgatggattgcgaatttgaccgccaa

SEQ ID NO: 829922 - DNA, 75 bp, synthetic construct
  source 1..75: mol_type = other DNA
accattgagcgtctttatcaccagtcatgtatcggcgctgttcgctggggtaatctgccggataatgccagggag

SEQ ID NO: 829923 - DNA, 75 bp, synthetic construct
  source 1..75: mol_type = other DNA
agtatccgccatatccggcgctggttcgtcaaggaacggggttgtcatctccggctaaccaggcgtttgagcagt

SEQ ID NO: 829924 - DNA, 75 bp, synthetic construct
  source 1..75: mol_type = other DNA
attgataaaagaagaaaatctcaatgaagatgcagcaaaacgctatattcgcacatctttaaaacgcaaatatgc

SEQ ID NO: 829925 - DNA, 75 bp, synthetic construct
  source 1..75: mol_type = other DNA
tattgctttcaagttattatggcccaaaagggttggtttattcatattgtgctgcaacaatattatcaacaatgc

SEQ ID NO: 829926 - DNA, 75 bp, synthetic construct
  source 1..75: mol_type = other DNA
gcaagtgtcatgtttaactcgacatatattggtatatatgttaatagcgccaataaagaacgtggattatttttt

SEQ ID NO: 829927 - DNA, 75 bp, synthetic construct
  source 1..75: mol_type = other DNA
agtcaaaatggcaccactattactattagtgatggtgacagaattacaggagataccgccgatccatcaggaaac

SEQ ID NO: 829928 - DNA, 75 bp, synthetic construct
  source 1..75: mol_type = other DNA
gcaaaggataaagctcaccggaaagaagtaaataacaaaatacttgctgaccttatcaaggttggcgcatcagaa

SEQ ID NO: 829929 - DNA, 75 bp, synthetic construct
  source 1..75: mol_type = other DNA
aggaagcgttgcagtatgcgaatcaggcgcaggtgacaaagccacaggttcagcagactgggggagcgaagcgct

SEQ ID NO: 829930 - DNA, 75 bp, synthetic construct
  source 1..75: mol_type = other DNA
tatatgcactatatgtaaatattattattgtaagtgtattatcctttgcatatcccaagatatgtaaaaaggcca

SEQ ID NO: 829931 - DNA, 75 bp, synthetic construct
  source 1..75: mol_type = other DNA
tggatgccgtcagtgatgatgtgcgtcgctgggtcgacaccgtcagcgtgcggcagaagacccgtggcgacctga

SEQ ID NO: 829932 - DNA, 75 bp, synthetic construct
  source 1..75: mol_type = other DNA
agaagcgatagcctactttgagtcgaagggctacaccaccggctttaactggcacgatgttgaagcccgcgccca

SEQ ID NO: 829933 - DNA, 75 bp, synthetic construct
  source 1..75: mol_type = other DNA
actatcggcacaaatacctttaccacggtgctggatgccagcggcaactggagcgtcggcgttccggcaagcgtc

SEQ ID NO: 829934 - DNA, 75 bp, synthetic construct
  source 1..75: mol_type = other DNA
acgacgtgaagcgcggtttgcgaaacggcgttgctccttacataccagcggccttttgccgggatgcctggagcg

SEQ ID NO: 829935 - DNA, 75 bp, synthetic construct
  source 1..75: mol_type = other DNA
ttttgtgggctgttcatttaccctggacagtcagtgcggcaggttgtggctgtctcagcccccggcgacagggcc

SEQ ID NO: 829936 - DNA, 75 bp, synthetic construct
  source 1..75: mol_type = other DNA
cggacaaatataaaaactttacgccaaacgtatataactacggtattaccactattgacgattcttaccaattta

SEQ ID NO: 829937 - DNA, 75 bp, synthetic construct
  source 1..75: mol_type = other DNA
gaggcgttcgcggttaaatatgacaaagaggtttatcaaccggcgattgcggcatgtcataaacagagtgaagag

SEQ ID NO: 829938 - DNA, 75 bp, synthetic construct
  source 1..75: mol_type = other DNA
cttatcacaccaataacgcagactcttaatgacctggagaatacctttagcgataaactggctcgtataaccatt

SEQ ID NO: 829939 - DNA, 75 bp, synthetic construct
  source 1..75: mol_type = other DNA
agcacgacaagatgccacatactgcgccccagtcggttcggtttacagactacccgtgcgtccaccgccgataat

SEQ ID NO: 829940 - DNA, 75 bp, synthetic construct
  source 1..75: mol_type = other DNA
cgcagacagcctgaactggagttacgttgacggacgaaccctcaccaacggcaccaccacctggcaggtgcgggt

SEQ ID NO: 829941 - DNA, 75 bp, synthetic construct
  source 1..75: mol_type = other DNA
gggatgtggacggtgctggcaaaccagcaggtaatgcaatcgactgacccactcacctggtcgaagaccgcgctg

SEQ ID NO: 829942 - DNA, 75 bp, synthetic construct
  source 1..75: mol_type = other DNA
gcggggagacagtacgctaccgctacgatgatgcgtacagtgagttaccggcgacgacaacagatgcgacgggca

SEQ ID NO: 829943 - DNA, 75 bp, synthetic construct
  source 1..75: mol_type = other DNA
acgacgtgaagcgcggtttgcgaaacggcgttgctccttacatacctgcggccttttgcagggatgccaggagcg

SEQ ID NO: 829944 - DNA, 75 bp, synthetic construct
  source 1..75: mol_type = other DNA
acatctggcgcttgcagaacggcgaaaagccgcctcgttggtgcccttgcagccgatttcgacagcactaactgt

SEQ ID NO: 829945 - DNA, 75 bp, synthetic construct
  source 1..75: mol_type = other DNA
acgcggatgcgtacccacattccccggcacaacatcaatacctttcttgctattgcggatatctctgaccactta

SEQ ID NO: 829946 - DNA, 75 bp, synthetic construct
  source 1..75: mol_type = other DNA
aaaagccaatagcttaactcatacagttagagttcgtgctgtgatccatttcatttcttttttgattaacaccta

SEQ ID NO: 829947 - DNA, 75 bp, synthetic construct
  source 1..75: mol_type = other DNA
agataactctgacctcagcaaacgtctgcggaataaaggattgccagattattttcttggcatacgctatgttgg

SEQ ID NO: 829948 - DNA, 75 bp, synthetic construct
  source 1..75: mol_type = other DNA
ataattttccaagccgcagatggtgttacagcgaaaacagacaacgaggtcaatcttaactttgtttttgataag

SEQ ID NO: 829949 - DNA, 75 bp, synthetic construct
  source 1..75: mol_type = other DNA
atgtggggagaaaaataacctcatcatacttatccaactcagaagagaggttgacatacataagcaacaaattaa

SEQ ID NO: 829950 - DNA, 75 bp, synthetic construct
  source 1..75: mol_type = other DNA
cactggcggcgcaaattcaggacggtgcgactattgctattagcggtaacggcggcggtatggtggaagcggacc

SEQ ID NO: 829951 - DNA, 75 bp, synthetic construct
  source 1..75: mol_type = other DNA
gccttttgcagggatgcctggagcgcaggccacggcgcgacagaggcggcgcgaccggaacggtcgctgcaagcc

SEQ ID NO: 829952 - DNA, 75 bp, synthetic construct
  source 1..75: mol_type = other DNA
acgacgtgaagcgcggtttgcgaaacggcgttgctccttacataccggcggccttttgctgggatgccaggagcg

SEQ ID NO: 829953 - DNA, 75 bp, synthetic construct
  source 1..75: mol_type = other DNA
caatgttcattcagcaacgattgcagattctccaccttggtaaacactatgatgagttcagcgattcttacgtgt

SEQ ID NO: 829954 - DNA, 75 bp, synthetic construct
  source 1..75: mol_type = other DNA
cagaaaacccaccgtaccttccctggctcaaaaggttttaatgctatgttggcagtgagcagcgtggatgccgcg

SEQ ID NO: 829955 - DNA, 75 bp, synthetic construct
  source 1..75: mol_type = other DNA
caggagatgctccacgaaaatgaggtacccttatactcttctcgccttgtagcattaaatggagaaattaggcta

SEQ ID NO: 829956 - DNA, 75 bp, synthetic construct
  source 1..75: mol_type = other DNA
atcaactcgacggttatcggctcacgtcgattttcagcaaaaaactccagggccgtttacaaacaatcgacgaca

SEQ ID NO: 829957 - DNA, 75 bp, synthetic construct
  source 1..75: mol_type = other DNA
ttttgggtgagatatggcatgagggcaccccctggttgcgtggtgatcagtttgattcattaatgaattatccct

SEQ ID NO: 829958 - DNA, 75 bp, synthetic construct
  source 1..75: mol_type = other DNA
tagctacattgcgaaccttgcagcagcgaatacaatgttcaccacgcgtctgcatgagcgtctgggtaatacgta

SEQ ID NO: 829959 - DNA, 75 bp, synthetic construct
  source 1..75: mol_type = other DNA
ctatgtcaagatccgcggcaaatggcgctatctgtaccgagccatcgataagcatggcaatccggtggatttcct

SEQ ID NO: 829960 - DNA, 75 bp, synthetic construct
  source 1..75: mol_type = other DNA
atgccattaaatggagtcagtgctgcgatgcgagaaagggtatcgcagcagttaaaagaaattgaacggcggtat

SEQ ID NO: 829961 - DNA, 75 bp, synthetic construct
  source 1..75: mol_type = other DNA
tttttccgatcgccacggcgatgtttatcgcgaacagatggtggactttatccttagcgcgttgaatccgcagaa

SEQ ID NO: 829962 - DNA, 75 bp, synthetic construct
  source 1..75: mol_type = other DNA
tgaaatttcagccttgggtgggtgaccattatcactcaagccgctacggcgtccgcgttatggtgttgggtgagt

SEQ ID NO: 829963 - DNA, 75 bp, synthetic construct
  source 1..75: mol_type = other DNA
gcgtgttgaagctcgctcgccggatggcttagttgaggcggttagcgtcatcaatcatccttttgcgctgggcgt

SEQ ID NO: 829964 - DNA, 75 bp, synthetic construct
  source 1..75: mol_type = other DNA
gtgacgccaccagtcatcctcccgcgtaaaatccggcatctcaatccccgccagatggtaagcgtcccggaacag

SEQ ID NO: 829965 - DNA, 75 bp, synthetic construct
  source 1..75: mol_type = other DNA
caccttatggcggaatgcaaattgcagaaaattatcaggccttcaaccttggtattggtaaagatttgggactgt

SEQ ID NO: 829966 - DNA, 75 bp, synthetic construct
  source 1..75: mol_type = other DNA
agcagccgcgttaccgacgtgcctgtgccggtgaactcatacaaattgacggctgcgaccatcactggtttgaaa

SEQ ID NO: 829967 - DNA, 75 bp, synthetic construct
  source 1..75: mol_type = other DNA
atgcgccgtcgcacgaagttcaggttgaagagggggggattactgtctgcactgttacctgaatgtagcaacttt

SEQ ID NO: 829968 - DNA, 75 bp, synthetic construct
  source 1..75: mol_type = other DNA
tggaatggtatctgcgtgtagagtcaccgcgcgatgttatcgagctgcccatcgacgacgaattagatgtttccg

SEQ ID NO: 829969 - DNA, 75 bp, synthetic construct
  source 1..75: mol_type = other DNA
agtcctttaaatccgcaatataaaacgaaaaaacagactgtttttcaaaaaattagcgcatttattgaaaaattt

SEQ ID NO: 829970 - DNA, 75 bp, synthetic construct
  source 1..75: mol_type = other DNA
atgacgaatttgatcaatataaaaaatagtttggttattcattatttaaggactatatactatgaaaaaattata

SEQ ID NO: 829971 - DNA, 75 bp, synthetic construct
  source 1..75: mol_type = other DNA
actacagcgaccctaataaaaacgtcaccggacagagaattgccggacacgcaatgattcttggagccacaggta

SEQ ID NO: 829972 - DNA, 75 bp, synthetic construct
  source 1..75: mol_type = other DNA
gaaatccgattggtgacggttcagctttaatgccgttaaaaacagtttctgatggtttgtattattttaatacgc

SEQ ID NO: 829973 - DNA, 75 bp, synthetic construct
  source 1..75: mol_type = other DNA
ttatgagttttccagtaaattcttaaatttatttgcggagaaatatatttctttgttcaagggggatgatttctt

SEQ ID NO: 829974 - DNA, 75 bp, synthetic construct
  source 1..75: mol_type = other DNA
gggaatactattccattattattaacccttcaaaagggagacgggaaaattgctactggtaaaatagaaacattc

SEQ ID NO: 829975 - DNA, 75 bp, synthetic construct
  source 1..75: mol_type = other DNA
ctattttactttccagttataatggcgagcaatttatagaacaacaactacaatctcttatcgacatgaaggctg

SEQ ID NO: 829976 - DNA, 75 bp, synthetic construct
  source 1..75: mol_type = other DNA
taacggcgcttaaggcaatggtcccaacgtggttttctccgctgcgtgcgcgctggcattactattcgatggcgc

SEQ ID NO: 829977 - DNA, 75 bp, synthetic construct
  source 1..75: mol_type = other DNA
gggttctaacgacatcatggaagtgaaagacgcctttatgaacggcaccgcgccgatggcgatttactccaccta

SEQ ID NO: 829978 - DNA, 75 bp, synthetic construct
  source 1..75: mol_type = other DNA
aatatgacctcttggggagtggaaaagcggcttcagttggcgcaaaaccggtgcctccacaggtctttaattatt

SEQ ID NO: 829979 - DNA, 75 bp, synthetic construct
  source 1..75: mol_type = other DNA
tattttatgcaaaaaacaccagtggaagccttacttataaattaacgaaaaaagcagacgcttctgctattccac

SEQ ID NO: 829980 - DNA, 75 bp, synthetic construct
  source 1..75: mol_type = other DNA
gatagaaaaacgctttggcgataaagtaccggaacagtccatccagtggctgacagataacggttcagcgtacag

SEQ ID NO: 829981 - DNA, 75 bp, synthetic construct
  source 1..75: mol_type = other DNA
ggtcgttggcttgacacagtgttgctgcaacgaaatctgggcgaagggaacagcacgttaccatcggattcaggc

SEQ ID NO: 829982 - DNA, 75 bp, synthetic construct
  source 1..75: mol_type = other DNA
gctgaaaaatattggcttcaagcatggtcgttggcttgacacagtgttgctgcaacgaaatctgggcgaagggaa

SEQ ID NO: 829983 - DNA, 75 bp, synthetic construct
  source 1..75: mol_type = other DNA
cgcagacagtagaggaggctacagacaaaaaagggcagacactgaatcgctatggctctgcatccaagctttcca

SEQ ID NO: 829984 - DNA, 75 bp, synthetic construct
  source 1..75: mol_type = other DNA
atggcagtgactccggagaagaaaatggagactctgggggggagctgcgtgaccggaagtggtggtggtgatgat

SEQ ID NO: 829985 - DNA, 75 bp, synthetic construct
  source 1..75: mol_type = other DNA
acgaaaaagcagaccgtattccaaaaaattggtgcctttatagataaattcaaaggtgtaggcggaaacatctag

SEQ ID NO: 829986 - DNA, 75 bp, synthetic construct
  source 1..75: mol_type = other DNA
tagtgagtatgccttcgcaactcttcactatggctcgttcttttaaagccgtagctaatggaaagatttatatcg

SEQ ID NO: 829987 - DNA, 75 bp, synthetic construct
  source 1..75: mol_type = other DNA
aatgtccctgtaccgttcactgctgatggcgtttcatttggcatggcaatggccaccattaatgcttcaacagga

SEQ ID NO: 829988 - DNA, 75 bp, synthetic construct
  source 1..75: mol_type = other DNA
ccaatagatattggagagcatatttctgcacatattcgcatggaatctcaggccgcctcagaagttgggattgtt

SEQ ID NO: 829989 - DNA, 75 bp, synthetic construct
  source 1..75: mol_type = other DNA
ttgcaggataacgatgaaaccattcttgcggtaacgagggatggggaaatgagcctgccattattgccttatgta

SEQ ID NO: 829990 - DNA, 75 bp, synthetic construct
  source 1..75: mol_type = other DNA
ttacggacgacatgagcatatttatagcaacgttagagtcatgtggcggacgcagcaacatattgaggagcttaa

SEQ ID NO: 829991 - DNA, 75 bp, synthetic construct
  source 1..75: mol_type = other DNA
atgccttactggacaatggctatcaaccaagacaattacaggtgttggttgatgctcttcctacagctcccgggc

SEQ ID NO: 829992 - DNA, 75 bp, synthetic construct
  source 1..75: mol_type = other DNA
cagattgccgccactgagcgaattctctggaaaattaacagctcatttaaagcgaagaactggtcaaaaccagaa

SEQ ID NO: 829993 - DNA, 75 bp, synthetic construct
  source 1..75: mol_type = other DNA
cagagaatactcgtgtggcgaacagcaccgggctgaaaactgactggcgcggatataccgttgttccttatgcca

SEQ ID NO: 829994 - DNA, 75 bp, synthetic construct
  source 1..75: mol_type = other DNA
acctttgccatcacggcggtgcagcacgtaccggaaaaagagccatcgtggataacggggccagctttgagccgc

SEQ ID NO: 829995 - DNA, 75 bp, synthetic construct
  source 1..75: mol_type = other DNA
gtggaagacccggacgccatcctgcgctacgggcgcaatctgctgaagatggatgcgtttggctgtaccagccgc

SEQ ID NO: 829996 - DNA, 75 bp, synthetic construct
  source 1..75: mol_type = other DNA
atttgtcttcggcggcgaatgtgaaacgccggtgcgtaaggcgaagcacggtgattccagcggcgtacgcggcgc

SEQ ID NO: 829997 - DNA, 75 bp, synthetic construct
  source 1..75: mol_type = other DNA
gcattccatttggctgggcttaatgagggataggttagaaataattcgtaatctactaagtgatgatggagtaat

SEQ ID NO: 829998 - DNA, 75 bp, synthetic construct
  source 1..75: mol_type = other DNA
agagcagtgataatcagttccggtttgtgctaaaagcgggcaatggtgagactatcctcaccagcgagctgtata

SEQ ID NO: 829999 - DNA, 75 bp, synthetic construct
  source 1..75: mol_type = other DNA
gtcaggctgatgatttacggacgttctcttgaggcgcaggcaaccgcgagtcttgcagcagccacaggctatgac

SEQ ID NO: 830000 - DNA, 75 bp, synthetic construct
  source 1..75: mol_type = other DNA
tgcctggaggcggttatctggttgacctacggatggaacaaaaaacaggaccgggttactaataccgtcatcgca

SEQ ID NO: 830001 - DNA, 75 bp, synthetic construct
  source 1..75: mol_type = other DNA
aatccttcccgaaatcaggaataaccttcccgaaaacggtagacacccaatacaagaacaagaacagtattaaaa

SEQ ID NO: 830002 - DNA, 75 bp, synthetic construct
  source 1..75: mol_type = other DNA
gtggtaaagggaaaacacgctctgcaatgtatgagaacaaagttgctgaatggcaggtaagtattttcagtacgg

SEQ ID NO: 830003 - DNA, 75 bp, synthetic construct
  source 1..75: mol_type = other DNA
tcaggtacgtattgccaaacgttttgccatcgcttatgtagcaggttccatggctgtgaaatatggtgttttacc

SEQ ID NO: 830004 - DNA, 75 bp, synthetic construct
  source 1..75: mol_type = other DNA
ctctccgtgctggcagaaatcgcctctgtacgtctccatcaggaggaggattcatgcctgcccccgtcgtcctga

SEQ ID NO: 830005 - DNA, 75 bp, synthetic construct
  source 1..75: mol_type = other DNA
tgtttatgatgcgtacggtgctcagcagttctatttttcgaatgtgctgaagtatgaccctgaccaactcaggca

SEQ ID NO: 830006 - DNA, 75 bp, synthetic construct
  source 1..75: mol_type = other DNA
ggccgcactggcgcgaagggtcttttcatcgcagcacccttcattcgccagaccggcacaacacaggagagatcc

SEQ ID NO: 830007 - DNA, 75 bp, synthetic construct
  source 1..75: mol_type = other DNA
gaacactggcatcgattaaccgaaaagcggcaattgcccgctatgtgcattcggccgccaacaggcaatcacgca

SEQ ID NO: 830008 - DNA, 75 bp, synthetic construct
  source 1..75: mol_type = other DNA
cgctcacgcctgccggaaaaatcatgcggcagtaccacgaagagcaggcacacaaacacaacgcagaactcacca

SEQ ID NO: 830009 - DNA, 75 bp, synthetic construct
  source 1..75: mol_type = other DNA
gcaaagagagttttaacagcgaaaattccctgtttaagtatctgcaactgtttgtcatttctaacggcaccgata

SEQ ID NO: 830010 - DNA, 75 bp, synthetic construct
  source 1..75: mol_type = other DNA
ttgaagtggcgtggtatttgtcgaagtacggtaaatctcaaccacccgtaggacttggtgttcagaaatggaaag

SEQ ID NO: 830011 - DNA, 75 bp, synthetic construct
  source 1..75: mol_type = other DNA
cgccagtttcgcctggtttattcgctggtttggtcgcgttgtgcctggcaaaccgagcgaggccgtcgccgatgc

SEQ ID NO: 830012 - DNA, 75 bp, synthetic construct
  source 1..75: mol_type = other DNA
acagacgttctatcccccctcgtcaccagacataataaagaaaaaaaacaaacgacattctacccttctcaaaaa

SEQ ID NO: 830013 - DNA, 75 bp, synthetic construct
  source 1..75: mol_type = other DNA
ctgaccaaaatagagaataatgtagacctgaataaattcactactatatgcacagacgttctatcccccccgcgt

SEQ ID NO: 830014 - DNA, 75 bp, synthetic construct
  source 1..75: mol_type = other DNA
caataacattataaaaatgattgatacattgccagataatgcaatgatattgaaatccgttctggccgtaaaact

SEQ ID NO: 830015 - DNA, 75 bp, synthetic construct
  source 1..75: mol_type = other DNA
agcgacagcgttttgacgaaatgatgcgccagcgcacgcccttactgaccctgaacaacattgccacgagaccgc

SEQ ID NO: 830016 - DNA, 75 bp, synthetic construct
  source 1..75: mol_type = other DNA
gcgcaaactatcgccgaccaggaacgttttcgcgcattatcacgcgaatatgcgcagttaagtgatgtttcgcgc

SEQ ID NO: 830017 - DNA, 75 bp, synthetic construct
  source 1..75: mol_type = other DNA
ggttataccgtaaaaacgcagcttagcccgtatgacgaaaaccgcgtggcattgaacagcgactatttctccaaa

SEQ ID NO: 830018 - DNA, 75 bp, synthetic construct
  source 1..75: mol_type = other DNA
agtctcaggaaataaacctggattatatccttggactgattttcgaacacaacagacaaaataaaggtaagggcg

SEQ ID NO: 830019 - DNA, 75 bp, synthetic construct
  source 1..75: mol_type = other DNA
tgagatgaatattccatcagaggacgggaaaagtacagaaaagttggggccaataacgtatagcttatctaaaga

SEQ ID NO: 830020 - DNA, 75 bp, synthetic construct
  source 1..75: mol_type = other DNA
agctcagaactagaaaaaaagaataaacatgataaacgatctgaagagtatattgttaaaatcctcagaggaagt

SEQ ID NO: 830021 - DNA, 75 bp, synthetic construct
  source 1..75: mol_type = other DNA
acgcaaggagtctactaaaacagagagtgcatatgaatcctataagattacttatacggggtgccgtatacatga

SEQ ID NO: 830022 - DNA, 75 bp, synthetic construct
  source 1..75: mol_type = other DNA
aagaaatcaggggaaattttttgcagaggtccatgaggatgcattcgactacctgaccatgcttattcagcatgc

SEQ ID NO: 830023 - DNA, 75 bp, synthetic construct
  source 1..75: mol_type = other DNA
tttaaagccggaatgcgtgaatttaccgccaatgtcagcggtaacgatctggttcgcgttaccggttatatggtg

SEQ ID NO: 830024 - DNA, 75 bp, synthetic construct
  source 1..75: mol_type = other DNA
tttttcgaaatcccatataacgatgcgcacctagatgcaatttcgcgttatagtatagactcgtgggtaaaaaca

SEQ ID NO: 830025 - DNA, 75 bp, synthetic construct
  source 1..75: mol_type = other DNA
taccaatgactacccggtactggtgcaaagttgggtagataatggtgaaggttccccagaagctgcttctccccc

SEQ ID NO: 830026 - DNA, 75 bp, synthetic construct
  source 1..75: mol_type = other DNA
ggaattgacggtactgtttttgatttaattaatttgaagcttagggttactaaacacatacaagaccttctggag

SEQ ID NO: 830027 - DNA, 75 bp, synthetic construct
  source 1..75: mol_type = other DNA
gttttggctggtgatgacttacttgtcgcgcttttatgtctgagcaccggaggaagatggacggaagttgccacg

SEQ ID NO: 830028 - DNA, 75 bp, synthetic construct
  source 1..75: mol_type = other DNA
ggaatctactaaatcaggtgtcgaatattcatcctataatgttatctatacaggttgtagaataaataatatttt

SEQ ID NO: 830029 - DNA, 75 bp, synthetic construct
  source 1..75: mol_type = other DNA
gtaaagaatttgttagaataacaatagatgacaagataataaagggaaactcaaaagttaataacagtgatgagt

SEQ ID NO: 830030 - DNA, 75 bp, synthetic construct
  source 1..75: mol_type = other DNA
cgaaagtagataagtttagtgattactttgatgggtatagtcctaacgcatttcatgcttttgctggcgtggacg

SEQ ID NO: 830031 - DNA, 75 bp, synthetic construct
  source 1..75: mol_type = other DNA
tggacccgtggcgtttgcaggatttggataaattcaacctgattaaattccagagaatgatgaggaagttagaag

SEQ ID NO: 830032 - DNA, 75 bp, synthetic construct
  source 1..75: mol_type = other DNA
ccgggttgatggcgctgtcactgtcattgttgctgttgccgctggtctctctgaacagcgagccggccagggctg

SEQ ID NO: 830033 - DNA, 75 bp, synthetic construct
  source 1..75: mol_type = other DNA
aaggttatgatccggcattttctaccgctgtaaacgtctcatcctgtattactggattactgataccgccctcaa

SEQ ID NO: 830034 - DNA, 75 bp, synthetic construct
  source 1..75: mol_type = other DNA
taatcaattatataaagcccgtaaggcttattatttaattattgaaaagttagtgccccagcatcgaaaagtgct

SEQ ID NO: 830035 - DNA, 75 bp, synthetic construct
  source 1..75: mol_type = other DNA
gagcgggtggtctttgtggacaaaaacgtccgcgtcggttttccgccgacgcttaacggtaaactccgtgtgcag

SEQ ID NO: 830036 - DNA, 75 bp, synthetic construct
  source 1..75: mol_type = other DNA
tccggaatagcctgatggcgcttccgttactgatacccccgtttgtgctgcatgctgacgaactgatgaagtggg

SEQ ID NO: 830037 - DNA, 75 bp, synthetic construct
  source 1..75: mol_type = other DNA
cggacagggcgtttatcgcagagccagtccgacgtaaagtcaccacagcccctaagacagggggcagcacccgcg

SEQ ID NO: 830038 - DNA, 75 bp, synthetic construct
  source 1..75: mol_type = other DNA
tcccgcgctgctagggatcctcgccactcactcattagataaacccgtgccgggtctgaagaatttgatggctga

SEQ ID NO: 830039 - DNA, 75 bp, synthetic construct
  source 1..75: mol_type = other DNA
ctgttcctgaactcacaaaaatgcccagttttctcctggccgatccatctgcattgcccagacttgcgcacactg

SEQ ID NO: 830040 - DNA, 75 bp, synthetic construct
  source 1..75: mol_type = other DNA
gggcgggggaagaaaatttctggtcattccgcaagggatgtcagcagaggtgacgcactatcaggggaaggactg

SEQ ID NO: 830041 - DNA, 75 bp, synthetic construct
  source 1..75: mol_type = other DNA
aagaacgaaaaagtcttaatgtaattcctgatgaacaacagtttctttcattattaaaatgcaattacccgggtt

SEQ ID NO: 830042 - DNA, 75 bp, synthetic construct
  source 1..75: mol_type = other DNA
taatcaatccagaacatctacggcaaacacttgagcgtaaattgatcttacccagcaatagtggacacgcggcta

SEQ ID NO: 830043 - DNA, 75 bp, synthetic construct
  source 1..75: mol_type = other DNA
cagaaattgaaattgcagtttattgatgaggatggacaccacgtccctgaaggtggaagggagtatacagttagg

SEQ ID NO: 830044 - DNA, 75 bp, synthetic construct
  source 1..75: mol_type = other DNA
cggctggattgagggaacgctggagactgacggcgggcaacaggaagaagtaattgccacgctgatggtgtgggc

SEQ ID NO: 830045 - DNA, 75 bp, synthetic construct
  source 1..75: mol_type = other DNA
gaaggccgcgcaggagctatctcgacgcgcgcaaaaaactactcggaatgctcaattcacccgatttcaacagcg

SEQ ID NO: 830046 - DNA, 75 bp, synthetic construct
  source 1..75: mol_type = other DNA
caaccaaagttcatacacacgggcgttacagggtcatcacaggtgatgttttcattcatcatggttacgcctacc

SEQ ID NO: 830047 - DNA, 75 bp, synthetic construct
  source 1..75: mol_type = other DNA
agcaacgctggtggagttgccaaaaaaaacggaaagatatccgaatcattacattattgaaccgccccgggtttc

SEQ ID NO: 830048 - DNA, 75 bp, synthetic construct
  source 1..75: mol_type = other DNA
cagttcgccgcgattgcccgacaattaccgccaaaattcatcatatcgccgcagagactgagcaggaagcacgcc

SEQ ID NO: 830049 - DNA, 75 bp, synthetic construct
  source 1..75: mol_type = other DNA
gcttgccgactatcgccaacacggtttatggttatagcgcaccagcaaaatctggcgccgggcgtggaaacccga

SEQ ID NO: 830050 - DNA, 75 bp, synthetic construct
  source 1..75: mol_type = other DNA
tcttcggttacctactggcacaccgctggaaaccagcaacgaatggatgcgccagttattcaagaaattacgcga

SEQ ID NO: 830051 - DNA, 75 bp, synthetic construct
  source 1..75: mol_type = other DNA
tttcttcatctcagtggggatcggtgccagccttgggcgacagtttaatctcgatccgattatgtctggcttgct

SEQ ID NO: 830052 - DNA, 75 bp, synthetic construct
  source 1..75: mol_type = other DNA
gctgtttttcctgccattcgtattagtgccgatggttaatgccacgctagcctggtttgcgctggatctcgattt

SEQ ID NO: 830053 - DNA, 75 bp, synthetic construct
  source 1..75: mol_type = other DNA
ctcatattatcaaccatggccagcagaatgttcatggcggggtatctaatggaagtcttattgaagtggtttact

SEQ ID NO: 830054 - DNA, 75 bp, synthetic construct
  source 1..75: mol_type = other DNA
agagacatgaggtagaaaaagaccattaccattgctggattgcactaccacatcggcaaataaaccgattgggag

SEQ ID NO: 830055 - DNA, 75 bp, synthetic construct
  source 1..75: mol_type = other DNA
acccgtagacaccgccaacgaatgggtaagccagctattcaagaaactacgcgagcggctgaaatcgaaatttcg

SEQ ID NO: 830056 - DNA, 75 bp, synthetic construct
  source 1..75: mol_type = other DNA
actacagccgaatccggtgtccggttagatatccttaccccgatagccgcagagcttgaagcaatgctgagttct

SEQ ID NO: 830057 - DNA, 75 bp, synthetic construct
  source 1..75: mol_type = other DNA
ctggatgctgacggcactgtacagttcggacacgcatacccggttcaatatgatgggattccagaacacgtcgga

SEQ ID NO: 830058 - DNA, 75 bp, synthetic construct
  source 1..75: mol_type = other DNA
attcaagtacttcttatttcattagtaccttcaggcaatactttggtatcactccaatggaaatgaaaaaaaaca

SEQ ID NO: 830059 - DNA, 75 bp, synthetic construct
  source 1..75: mol_type = other DNA
ataccgccacattatcataaatatgatcatcagtgggaacattttcaagtgatcgagggtatagtcgatttatat

SEQ ID NO: 830060 - DNA, 75 bp, synthetic construct
  source 1..75: mol_type = other DNA
tgcgggcttttctaaatcacaccgtcaggatctacggcgacatcagtatgcctcaaaagtacgtcatcattatca

SEQ ID NO: 830061 - DNA, 75 bp, synthetic construct
  source 1..75: mol_type = other DNA
caaaagcagctctcgcagctgccaaagcacgtggtaaggttctggggatggcgggtagtgctaacctcaaaagta

SEQ ID NO: 830062 - DNA, 75 bp, synthetic construct
  source 1..75: mol_type = other DNA
caaaagcagctctcgcagccgctaaagcacgtggtaaggttctgggggtggcgggtagagctaatctcaaaagta

SEQ ID NO: 830063 - DNA, 75 bp, synthetic construct
  source 1..75: mol_type = other DNA
taattcatgacaagctgattgcggctgatgtttttatgtttatggcccagcatgatggtattgcgaaaggcaatt

SEQ ID NO: 830064 - DNA, 75 bp, synthetic construct
  source 1..75: mol_type = other DNA
caaagaaacaatatgaaaatgaacgatgggagtcttgtaaagcattcgaaccatgttctgatttagttttgtcga

SEQ ID NO: 830065 - DNA, 75 bp, synthetic construct
  source 1..75: mol_type = other DNA
gcctgttccgtcatcaagtcaccgatatggaatacaccgcagatggcccgatcctggattggtcagaggaatttg

SEQ ID NO: 830066 - DNA, 75 bp, synthetic construct
  source 1..75: mol_type = other DNA
gcagacccgccaggacttacatgcttttgcagatctagtgatgcagcgcgagaaagagggactaaccctttccta

SEQ ID NO: 830067 - DNA, 75 bp, synthetic construct
  source 1..75: mol_type = other DNA
aagaaattcagtataactccagaaatgcttctggatccctgtttgaatatctatacaggtgcttattttctgaga

SEQ ID NO: 830068 - DNA, 75 bp, synthetic construct
  source 1..75: mol_type = other DNA
caacaggagcgtgaaatgaggcgcttcgcaggcgcatgtcgtttcgttttcaatcatgctctggcgcttcagaat

SEQ ID NO: 830069 - DNA, 75 bp, synthetic construct
  source 1..75: mol_type = other DNA
ccatgttctgatttagttttgtcgagttctttgacaatagcgataaagatttatatgcgtttaaatcctaaaatg

SEQ ID NO: 830070 - DNA, 75 bp, synthetic construct
  source 1..75: mol_type = other DNA
atataaatgatgttggcataaaaaagagatttaaaaattgcgagccatttcagtgtattgttgagttagcatgga

SEQ ID NO: 830071 - DNA, 75 bp, synthetic construct
  source 1..75: mol_type = other DNA
tttatttattaatgagggcgatattatattagcaatggatcgcccaataatatcaagcgggttaaaaatagctaa

SEQ ID NO: 830072 - DNA, 75 bp, synthetic construct
  source 1..75: mol_type = other DNA
cttcttgagccctctggtactcatttacaatcttaaaggaaaagagttttggattggtgcattcataataattat

SEQ ID NO: 830073 - DNA, 75 bp, synthetic construct
  source 1..75: mol_type = other DNA
aaaggaggaaaggctgataatcaattcatgcagggtatttcacagttttctttctttatcatgatgtgttgcgtt

SEQ ID NO: 830074 - DNA, 75 bp, synthetic construct
  source 1..75: mol_type = other DNA
ggaattcaacgtggtacagagactgtttcgggagcagcgcagacagcaggaactattgcgagaagtggtgtgaaa

SEQ ID NO: 830075 - DNA, 75 bp, synthetic construct
  source 1..75: mol_type = other DNA
gctgacggcgctgtacagttcggatacacatacccggttcaatatgatgggattccagaacacatcggatgatct

SEQ ID NO: 830076 - DNA, 75 bp, synthetic construct
  source 1..75: mol_type = other DNA
cggacctggaacgtgaactgattcaggacctgcggaatcagggttatgaatttatttccgtaaaatcacagtcgg

SEQ ID NO: 830077 - DNA, 75 bp, synthetic construct
  source 1..75: mol_type = other DNA
agatactaagtactggtgatgaagacacaacagatgtaaccggctcatttaaaccgtctggtctgtttcctccgg

SEQ ID NO: 830078 - DNA, 75 bp, synthetic construct
  source 1..75: mol_type = other DNA
tgttgctcagtaatgaatattttcatgttggacagcatgatcttctgttgctgaaaaatcaagtatcttcaatga

SEQ ID NO: 830079 - DNA, 75 bp, synthetic construct
  source 1..75: mol_type = other DNA
atttctttgccgtctcgcaacctgacttgttatcgctgtatggcgatttacaacagcaacataaagaaaaatgcc

SEQ ID NO: 830080 - DNA, 75 bp, synthetic construct
  source 1..75: mol_type = other DNA
aatcgattgcaaccattagcatgtttaattcaggacttgtacggcgcaatggtatgcaggattcacagttggata

SEQ ID NO: 830081 - DNA, 75 bp, synthetic construct
  source 1..75: mol_type = other DNA
aacatttgcagtggggcgcaaaatacattcattcattaattattgaagaatacgataatattttgaacattttaa

SEQ ID NO: 830082 - DNA, 75 bp, synthetic construct
  source 1..75: mol_type = other DNA
cgatttatacgacgaaatcacgcatagcatgagtaatctcaaagataaaattagtactttttgtgactttataaa

SEQ ID NO: 830083 - DNA, 75 bp, synthetic construct
  source 1..75: mol_type = other DNA
gtgtgatatctgcggtttcaaaagtactgacccggacggcgctcactactgctgcgaggataactccgatgactg

SEQ ID NO: 830084 - DNA, 75 bp, synthetic construct
  source 1..75: mol_type = other DNA
ccttgccgctcagggggttctttccgcagcagcaaagggaatagggcgtggaataacggctataaaaggtgatat

SEQ ID NO: 830085 - DNA, 75 bp, synthetic construct
  source 1..75: mol_type = other DNA
gaataacggctataaaaggtgatattgcgccagaagtagcgaagaaaattgccacatcagaatcgatgggcgtga

SEQ ID NO: 830086 - DNA, 75 bp, synthetic construct
  source 1..75: mol_type = other DNA
gtatcgacaccgctaaagagaaactgaatgtcgatgtgttgcgtcctgatggtcgtcatcgcaccaaaaaattcg

SEQ ID NO: 830087 - DNA, 75 bp, synthetic construct
  source 1..75: mol_type = other DNA
atactcccctatggatttggctattttgatgggggataagagaattattttttatttatatggttatatttctca

SEQ ID NO: 830088 - DNA, 75 bp, synthetic construct
  source 1..75: mol_type = other DNA
cagactatgtccactacgtaatttcagggacagataacgcatttgaacagacaatccactgctactcaattacag

SEQ ID NO: 830089 - DNA, 75 bp, synthetic construct
  source 1..75: mol_type = other DNA
ggtacgggtgctgggcctgcggcagggaggtgtcagtgaagaaacacaaaatgacagctgtgagaaaatactgac

SEQ ID NO: 830090 - DNA, 75 bp, synthetic construct
  source 1..75: mol_type = other DNA
tgtcgttttcagcggaatacggcgcatggtgccagctcattgagggcaggctgcaggcaataaatgagtattaca

SEQ ID NO: 830091 - DNA, 75 bp, synthetic construct
  source 1..75: mol_type = other DNA
gcggcctgcagctcttccgtgaagcctttggctactcaggatccgaaagcctccccgctggtcagcatctgccag

SEQ ID NO: 830092 - DNA, 75 bp, synthetic construct
  source 1..75: mol_type = other DNA
atgaagatttatcattacactgacctgaacggcctgaagggcatcatcgaatcaggctcactgtgggcgacgcac

SEQ ID NO: 830093 - DNA, 75 bp, synthetic construct
  source 1..75: mol_type = other DNA
caaaacacagatggtgcgaatgctgatggtccaacccccccccggcagcagggaaagaagctggcgtctaattgt

SEQ ID NO: 830094 - DNA, 75 bp, synthetic construct
  source 1..75: mol_type = other DNA
gagcatcacgctccactctggcagcaggcttcggagcgcatggccgaacggctgggggagatacagaaacgggta

SEQ ID NO: 830095 - DNA, 75 bp, synthetic construct
  source 1..75: mol_type = other DNA
gtattgagatgttcgaatcagtagacagcccattgcgcagcattacccaacgcataaccggcgttttacagtcca

SEQ ID NO: 830096 - DNA, 75 bp, synthetic construct
  source 1..75: mol_type = other DNA
tgagcgatacccgtcccgtgtttgactgggagcaggtgatacgtaaaaaggcggtggtgtatatcggtcttgatg

SEQ ID NO: 830097 - DNA, 75 bp, synthetic construct
  source 1..75: mol_type = other DNA
acacagaaacacacccagcgccttcaggatacgctgcgcccggaggtggccaggtaccttcagccgggctggctg

SEQ ID NO: 830098 - DNA, 75 bp, synthetic construct
  source 1..75: mol_type = other DNA
aggcgtttgccctgctggaaggggggcagctgtggaaaatccggatgccgctgccggcaggggatacggatgacg

SEQ ID NO: 830099 - DNA, 75 bp, synthetic construct
  source 1..75: mol_type = other DNA
gcacggtcgggtacatggtttttttatcggtaacgtgttccatgttgtatggctggatccgcatcaccggcttta

SEQ ID NO: 830100 - DNA, 75 bp, synthetic construct
  source 1..75: mol_type = other DNA
gcctgacggattttctcatctgcacgaacaattccaaaactacaccccctatcaattttcaatatcccgaaatga

SEQ ID NO: 830101 - DNA, 75 bp, synthetic construct
  source 1..75: mol_type = other DNA
tggtcgcatacatggatttttcatcggtaatgtattccatattgtctggcttgacccggcacatcagctctatcc

SEQ ID NO: 830102 - DNA, 75 bp, synthetic construct
  source 1..75: mol_type = other DNA
atgagtgcgatatcaacaagattgttgagcgtgctatcagaacgggagatatgacggttttcaccagtgcgcaac

SEQ ID NO: 830103 - DNA, 75 bp, synthetic construct
  source 1..75: mol_type = other DNA
ataataacgttgttattaatgtcattatctgggacggaatttctgaatggaaaccagaggctggtaatttagttc

SEQ ID NO: 830104 - DNA, 75 bp, synthetic construct
  source 1..75: mol_type = other DNA
agggattcagggatcgcaggcaggtacatccttacgtatggcgctgttgcggctggcatcacagccgaaaaaagc

SEQ ID NO: 830105 - DNA, 75 bp, synthetic construct
  source 1..75: mol_type = other DNA
tctggggcagcttttgcgcaaggactctccgctgaatccggtacgccccctgccgccggtgggcgggaatccggc

SEQ ID NO: 830106 - DNA, 75 bp, synthetic construct
  source 1..75: mol_type = other DNA
atagccaaagaagaatactggaagaacatgtttttttcaaattgattggttctgagcatgtgcaccttaatgata

SEQ ID NO: 830107 - DNA, 75 bp, synthetic construct
  source 1..75: mol_type = other DNA
tcatcaagcaaatccgtgtaccggtggtggcgaaggcttgcgggcgcactccccgcgctatctacaagtggatta

SEQ ID NO: 830108 - DNA, 75 bp, synthetic construct
  source 1..75: mol_type = other DNA
cctggttataccggcattggccctgggggcctgcagctcttccgggaagccttcggctacccaggagccgaaagc

SEQ ID NO: 830109 - DNA, 75 bp, synthetic construct
  source 1..75: mol_type = other DNA
gaaatgtatcaggagcttgagcgcctgattgatgacgcaaaaccggcaagtcgtcatctgaccgggctggctatc

SEQ ID NO: 830110 - DNA, 75 bp, synthetic construct
  source 1..75: mol_type = other DNA
gctcgtcgccgctggaagttgccgccgctgctgcactctctgagattcagcgcgtgccggtaccgttgcgcaccc

SEQ ID NO: 830111 - DNA, 75 bp, synthetic construct
  source 1..75: mol_type = other DNA
agcattgatccactgaccgctgataacatcattaacgccgccgaaagcgggcaggatctgcccatcaccggcacc

SEQ ID NO: 830112 - DNA, 75 bp, synthetic construct
  source 1..75: mol_type = other DNA
tgagttgcgattagctgcctcccaaaccggcaggctggatttcattctggacgttgagtccatttatggtgacaa

SEQ ID NO: 830113 - DNA, 75 bp, synthetic construct
  source 1..75: mol_type = other DNA
aagccgccaccttattggcctgaacattacccgggacattcccggctacctgttcgccggtggtgtggcttacga

SEQ ID NO: 830114 - DNA, 75 bp, synthetic construct
  source 1..75: mol_type = other DNA
gcttcagagcctcaatggtgtgatgtttaatgacagcgagtggcggcgtttcacggagcagtttctggataatcc

SEQ ID NO: 830115 - DNA, 75 bp, synthetic construct
  source 1..75: mol_type = other DNA
gctgccatcatggctactacccctacccaaaatccacaatttatctggttaatcgcagccgttcgccgcgacatg

SEQ ID NO: 830116 - DNA, 75 bp, synthetic construct
  source 1..75: mol_type = other DNA
gatcacgtctgcttttttgctggtcgtatccgcatggaggtggtgaagtggcacactgaatttggccacctgaac

SEQ ID NO: 830117 - DNA, 75 bp, synthetic construct
  source 1..75: mol_type = other DNA
cagggccggggcgttctcacgcccaaaacaaccaccacacgccccacagaatgggcggcaaccgcaaatattgct

SEQ ID NO: 830118 - DNA, 75 bp, synthetic construct
  source 1..75: mol_type = other DNA
ggtagacacctcagcacccgtggtcagtgttaataccgtggcgggcgacgatattcttaataatgccgagcaggc

SEQ ID NO: 830119 - DNA, 75 bp, synthetic construct
  source 1..75: mol_type = other DNA
gttgataaaagaagaaaatctcaatgaagaggcggcgaaacgctatattcgcacatctttaaaacgcgaatacgc

SEQ ID NO: 830120 - DNA, 75 bp, synthetic construct
  source 1..75: mol_type = other DNA
agcaaaacgcggctacaacctgacacttgcagaagaagagcgggcactggcagcaaaagatgcgctgatgagcga

SEQ ID NO: 830121 - DNA, 75 bp, synthetic construct
  source 1..75: mol_type = other DNA
tattaagcgcgcagcaggtcttagccgattttcagtaatatattgccctcccgataaatgtatcgatggggaagt

SEQ ID NO: 830122 - DNA, 75 bp, synthetic construct
  source 1..75: mol_type = other DNA
cgtgcgctgaccgtgggcgtggcgtaccagacgacggtaggtggcattatgaacacttcggtggctctgatgcag

SEQ ID NO: 830123 - DNA, 75 bp, synthetic construct
  source 1..75: mol_type = other DNA
atgaggttaacagcgtacaccactatatgttagtccttaataaatataattccagccagagcgagatgcaacctt

SEQ ID NO: 830124 - DNA, 75 bp, synthetic construct
  source 1..75: mol_type = other DNA
tcttgaacaggctgcagtaaatctaagtggaggaaaccagcaaaaaattattattgcgcgctgggtatgtaaaga

SEQ ID NO: 830125 - DNA, 75 bp, synthetic construct
  source 1..75: mol_type = other DNA
gacagaccgacagacccctacgcgcaagctggagaaacaattggcgggtatttagttccaggagttggaacggca

SEQ ID NO: 830126 - DNA, 75 bp, synthetic construct
  source 1..75: mol_type = other DNA
taaatatgagtcagtatgcatcgccgcgatggaacatttaaaaagtaaggcaacggcccctatacaaaacggacc

SEQ ID NO: 830127 - DNA, 75 bp, synthetic construct
  source 1..75: mol_type = other DNA
gcgacctcgttccgtatggtgcttatttcgccttaaaaaatgcacaaggtgtagttgttccgtgggtgccttcag

SEQ ID NO: 830128 - DNA, 75 bp, synthetic construct
  source 1..75: mol_type = other DNA
acaaatttttggaacagctaaagcgccagtgtagccgtgacaatatcaaagcccttgtattgatagatgatagta

SEQ ID NO: 830129 - DNA, 75 bp, synthetic construct
  source 1..75: mol_type = other DNA
ttaagtgagttttctcttgtgcagaatgcattacttcttctttttgaaaacacaggttgtcaggaagattttgaa

SEQ ID NO: 830130 - DNA, 75 bp, synthetic construct
  source 1..75: mol_type = other DNA
tcacactttggtgcacgattttccttagatcgatttattccactaaaaaaggaaagagaaaaaaaattattagtt

SEQ ID NO: 830131 - DNA, 75 bp, synthetic construct
  source 1..75: mol_type = other DNA
atttttatcggcagggagttttgtaaaaaaaatcgctggcgtctggatgaaaaacagcaacgccaggcgacgatt

SEQ ID NO: 830132 - DNA, 75 bp, synthetic construct
  source 1..75: mol_type = other DNA
attataaaaatgcagaatgcaaatctgtatgtatggctgagtgtttatcaagtgtaacggtcgagccgaaaaatt

SEQ ID NO: 830133 - DNA, 75 bp, synthetic construct
  source 1..75: mol_type = other DNA
atggtcatctggagcttacaggtggccattcgtgggacagtatccctgactgaaccgccccgggtttcctggaga

SEQ ID NO: 830134 - DNA, 75 bp, synthetic construct
  source 1..75: mol_type = other DNA
aatgaaaaagagatgttgatcgccaagagtacgacgatacgcatcagtgcctcgctgggggtaagcagcagcgag

SEQ ID NO: 830135 - DNA, 75 bp, synthetic construct
  source 1..75: mol_type = other DNA
gttaagtcactcagagcgcaacaatgtgcgtgctgcatatattcatacatcagaacatttagaagaacgacgcct

SEQ ID NO: 830136 - DNA, 75 bp, synthetic construct
  source 1..75: mol_type = other DNA
ttattcagcaaacgaacctggaagatttgccggataaagccagcatcattgacgcgttctttacctttgctcaac

SEQ ID NO: 830137 - DNA, 75 bp, synthetic construct
  source 1..75: mol_type = other DNA
gcgactatcgtcggtattgatttccagcaggaaaatattaacgtgtgccgagcgctggctgaagaaaaccccggc

SEQ ID NO: 830138 - DNA, 75 bp, synthetic construct
  source 1..75: mol_type = other DNA
ttatgagaaaacatccgcaggtaaaacataccgcggtaaatggtttacataagctggggctttatcagccggcct

SEQ ID NO: 830139 - DNA, 75 bp, synthetic construct
  source 1..75: mol_type = other DNA
gcttgcttcgttccttagcggcgctggagaaacaagggttctggcatgacgatgtacgcccgtggaacgtgatgg

SEQ ID NO: 830140 - DNA, 75 bp, synthetic construct
  source 1..75: mol_type = other DNA
ttatgatcttggacacggtttctgtacttatgacttttttgagcaatgcccccatcggatggcatgtgcaaaatg

SEQ ID NO: 830141 - DNA, 75 bp, synthetic construct
  source 1..75: mol_type = other DNA
aaagcctattatgcgacgtttaaacggttacaagaggaagccgctaataaatcggctacctataaaccgctgcgt

SEQ ID NO: 830142 - DNA, 75 bp, synthetic construct
  source 1..75: mol_type = other DNA
gatacgttctttacctttgctcaacgcgaacaacaacgtgaagcagatgcattgatcaaagaagaaaatcttaat

SEQ ID NO: 830143 - DNA, 75 bp, synthetic construct
  source 1..75: mol_type = other DNA
gcaccggtggcccggaagtgctggaagttgttgatgtgcaggtgcctgcaccgacagcgggtgaagtgcagatcc

SEQ ID NO: 830144 - DNA, 75 bp, synthetic construct
  source 1..75: mol_type = other DNA
aaggcatcaacaatatagaaagccatgaacacgcgatgttgacattgctcaaagagcatcgagatatgaccctac

SEQ ID NO: 830145 - DNA, 75 bp, synthetic construct
  source 1..75: mol_type = other DNA
ccagcacatgcattctgcgcttgatgtgttcaaaacctggctactgaatgaactcaatctgggtaaaattcgttg

SEQ ID NO: 830146 - DNA, 75 bp, synthetic construct
  source 1..75: mol_type = other DNA
gatgattcttatgttattaacttatctctttcaaatggaaaaatgtcgcatgctacggcatttataaaaaatggt

SEQ ID NO: 830147 - DNA, 75 bp, synthetic construct
  source 1..75: mol_type = other DNA
gtgattgacttcaaccgctctaccgaactggcaatcagaatgttcggtggtcagtatttctctctgtctgagggt

SEQ ID NO: 830148 - DNA, 75 bp, synthetic construct
  source 1..75: mol_type = other DNA
gccagcgacgtttcgctcgtctgcaatcccgtatacaaaaccccgatctgaacctccgtctgtctaaatggtggg

SEQ ID NO: 830149 - DNA, 75 bp, synthetic construct
  source 1..75: mol_type = other DNA
tacccgaaatctgatttattcaacaaagccccatcaatacaaagaaatattcctgtcgttacccaacccgtagaa

SEQ ID NO: 830150 - DNA, 75 bp, synthetic construct
  source 1..75: mol_type = other DNA
ttcagtgtacgggaattcatttgcaagcagaactgataatattcctttattctcttctgaaatatttatctttct

SEQ ID NO: 830151 - DNA, 75 bp, synthetic construct
  source 1..75: mol_type = other DNA
agaaatataaaggttattataatttagataatatatcactatattcggctaaatccattgatggacggagaatac

SEQ ID NO: 830152 - DNA, 75 bp, synthetic construct
  source 1..75: mol_type = other DNA
aaggtaaatggtgaaacgcatccggcgtgcgaacctctgctggcgattttatttttctataaaacgcttatgcaa

SEQ ID NO: 830153 - DNA, 75 bp, synthetic construct
  source 1..75: mol_type = other DNA
atcttctgggaagctattcagcggtttaatcatccacaaccagtggccggcactaccatgatagtgattgccgtc

SEQ ID NO: 830154 - DNA, 75 bp, synthetic construct
  source 1..75: mol_type = other DNA
agtaccagcgaaatacattacatcggtcattatttggttttcccccagcaccagcacatgcattctgcgcttgat

SEQ ID NO: 830155 - DNA, 75 bp, synthetic construct
  source 1..75: mol_type = other DNA
gggaagctaacagcgatatccctgaagtctggctgcccttcatgatgaaacggctcaaagacaaattgccggaaa

SEQ ID NO: 830156 - DNA, 75 bp, synthetic construct
  source 1..75: mol_type = other DNA
cgtttttggctcctggcacagcgtcctttccgtcttcggaaacacaccggatgaagccagtaataacggttctga

SEQ ID NO: 830157 - DNA, 75 bp, synthetic construct
  source 1..75: mol_type = other DNA
tattcatgaaaatatcatctggcttgaagataaaaaactactgctcacttttcttattgaaggcattccctatga

SEQ ID NO: 830158 - DNA, 75 bp, synthetic construct
  source 1..75: mol_type = other DNA
cattcagggattagcgaccaaaaaggagccttaagaaagaaccttgccactgctcaatctcttgaaaaagagctt

SEQ ID NO: 830159 - DNA, 75 bp, synthetic construct
  source 1..75: mol_type = other DNA
gagaagcgcagcggaagcgaggaaaacgcgttagccatgctggcaatgacagccttcacactcatgacccgacgt

SEQ ID NO: 830160 - DNA, 75 bp, synthetic construct
  source 1..75: mol_type = other DNA
atcggaagggttacgccagtaccagcgcagccgtttttccatttcaggcgcataacgctgaacccagcggtaaat

SEQ ID NO: 830161 - DNA, 75 bp, synthetic construct
  source 1..75: mol_type = other DNA
ctgtattagcatctctttttatgagcgcaggatcatttgcagcagaagggagcacagagggtcagttaactatta

SEQ ID NO: 830162 - DNA, 75 bp, synthetic construct
  source 1..75: mol_type = other DNA
ttaccgagcaggcgacagatgatgtcagcgccacccgcctttccaccagtctgtcatttgcggaagttgaaaaag

SEQ ID NO: 830163 - DNA, 75 bp, synthetic construct
  source 1..75: mol_type = other DNA
gccaaagaaggtctggtggtcgattttattcaacaaacaaacctggatgatttgccggataaagccagcatcatt

SEQ ID NO: 830164 - DNA, 75 bp, synthetic construct
  source 1..75: mol_type = other DNA
ggtatctgcgaaatgcagaacgacgcttcattgaagaagaaagggcgcaatgaggtcagccttcgcaacaaagcg

SEQ ID NO: 830165 - DNA, 75 bp, synthetic construct
  source 1..75: mol_type = other DNA
acttttggctggtctgttgttgctgcttttagttttgagtcggctgcttacgtggcgcgatactgtgttaaaaaa

SEQ ID NO: 830166 - DNA, 75 bp, synthetic construct
  source 1..75: mol_type = other DNA
ctcgtgactgggcgacccgctgcgttcatgaagcccacatgcacgatcacaattgttttatcactctgacttatt

SEQ ID NO: 830167 - DNA, 75 bp, synthetic construct
  source 1..75: mol_type = other DNA
cagataaaaccgccccgttattatgacaagttattatcaggctgtgattttgaaaagttgcagcagaataaagaa

SEQ ID NO: 830168 - DNA, 75 bp, synthetic construct
  source 1..75: mol_type = other DNA
ctattttcttcatcttaaacgttactgtaaagcttttcgtcatgacagagatgcgctgttagctgcccaaagtaa

SEQ ID NO: 830169 - DNA, 75 bp, synthetic construct
  source 1..75: mol_type = other DNA
tagacccgtggcgattgcaggatttggataaatataatctggttaaattccagcggatgatgaggaagttagaag

SEQ ID NO: 830170 - DNA, 75 bp, synthetic construct
  source 1..75: mol_type = other DNA
ttttccggataagacactttataaagcgggaagatttaatttatttaattccccgcttctttcgagatgttggaa

SEQ ID NO: 830171 - DNA, 75 bp, synthetic construct
  source 1..75: mol_type = other DNA
caattcagtggtacatctggtgctctgaaaactattcggagctcgggttctcgatagcctatgcacaagagctcg

SEQ ID NO: 830172 - DNA, 75 bp, synthetic construct
  source 1..75: mol_type = other DNA
tggatcgaatgacggagatctggttatggacttccatcttggcagtggaacaaccgccgctgttgcccacaaaat

SEQ ID NO: 830173 - DNA, 75 bp, synthetic construct
  source 1..75: mol_type = other DNA
caaggaacagtataatatcaaaatataatgaattaattctgaatggtcttccaagaaaagattttttaaaattac

SEQ ID NO: 830174 - DNA, 75 bp, synthetic construct
  source 1..75: mol_type = other DNA
acggacagaaacgtttaggctacgaacttcctaatttttcagttcgccaaaaagacaacgtctatattgttaatg

SEQ ID NO: 830175 - DNA, 75 bp, synthetic construct
  source 1..75: mol_type = other DNA
cccagattttatatacagatatatccacaaaacaaactcaaagttcttccgaaacacaaaaatcacaaaattatc

SEQ ID NO: 830176 - DNA, 75 bp, synthetic construct
  source 1..75: mol_type = other DNA
gcacactatccgctatgataggtccagataaatttgattctatagatagcaccgcatatgacgccttaaataaaa

SEQ ID NO: 830177 - DNA, 75 bp, synthetic construct
  source 1..75: mol_type = other DNA
ttttgcagtagtagccatgatagtagttttccctgtgctactgttcatgcgtaaatattctacaaactatgttct

SEQ ID NO: 830178 - DNA, 75 bp, synthetic construct
  source 1..75: mol_type = other DNA
acagaccgattattccctcgtctccgatctttccattgatgatcttgaattacgtttaattgcggtgatggaagc

SEQ ID NO: 830179 - DNA, 75 bp, synthetic construct
  source 1..75: mol_type = other DNA
atataatttcctataccatcatcataattgtaacattgtgtttcatctcaatgattaccgctgcgataattgtct

SEQ ID NO: 830180 - DNA, 75 bp, synthetic construct
  source 1..75: mol_type = other DNA
ctactcatgttatttgtgccccaagtttcagccatatcgtcatgctgatcatgagcatgtcttggagtgcctgct

SEQ ID NO: 830181 - DNA, 75 bp, synthetic construct
  source 1..75: mol_type = other DNA
caagaccagcaagatagaaaactgggatgatttatcctcatcagattatacaaccatattacacaacgcatccga

SEQ ID NO: 830182 - DNA, 75 bp, synthetic construct
  source 1..75: mol_type = other DNA
atactcttgctatttatgccctaaatttcagccctatcgacatgccgatcatgagcaggtgttggattgcctatt

SEQ ID NO: 830183 - DNA, 75 bp, synthetic construct
  source 1..75: mol_type = other DNA
cggatacccagcatgtgcaggtctattttgaaatggctggcagaattgttgagcaccttgataaggcaaccacaa

SEQ ID NO: 830184 - DNA, 75 bp, synthetic construct
  source 1..75: mol_type = other DNA
tttagccatcaaagcaaacgcaccgtggcgctcgatatcaaacaaacgggcgtgattcagggactgccgttgttg

SEQ ID NO: 830185 - DNA, 75 bp, synthetic construct
  source 1..75: mol_type = other DNA
tgtaaatagagttgcctgcccaactaaattaattgaataccttgaatgtggtgttgttcctgttgttaaatctcc

SEQ ID NO: 830186 - DNA, 75 bp, synthetic construct
  source 1..75: mol_type = other DNA
ttattatattgggactatgtcagtaagtctttatacgatgagcactcctattatacttggattagtgtcgaccag

SEQ ID NO: 830187 - DNA, 75 bp, synthetic construct
  source 1..75: mol_type = other DNA
aaaatactttttccagcttgcttccgcagagcttacacagattgatagttcccttaaagccgcgctaagcaaccg

SEQ ID NO: 830188 - DNA, 75 bp, synthetic construct
  source 1..75: mol_type = other DNA
ccatggaaatgttcagggatgagctgatcggtgacctgctgaaggctctgccacatccggtactggattacgatc

SEQ ID NO: 830189 - DNA, 75 bp, synthetic construct
  source 1..75: mol_type = other DNA
acggaagttgctcaggtcgttgccgccactcccgcagaccgtgagagcgtcatggatactgcgcaatcaggggct

SEQ ID NO: 830190 - DNA, 75 bp, synthetic construct
  source 1..75: mol_type = other DNA
accggtcagtgaactgagcgaggcagagaagcagacggtctcaacactggcaacggttgctgccggcctggccgg

SEQ ID NO: 830191 - DNA, 75 bp, synthetic construct
  source 1..75: mol_type = other DNA
atgaaccctaaggtgtataacccccagtcgggatatattgctaactggaacaattctccccaaaaagattatccc

SEQ ID NO: 830192 - DNA, 75 bp, synthetic construct
  source 1..75: mol_type = other DNA
gcgctttcattatgagtgtactgaaaaatggcctcaatttaatgggcgtctcccagttctggcaaatggtcgcga

SEQ ID NO: 830193 - DNA, 75 bp, synthetic construct
  source 1..75: mol_type = other DNA
tgcagatggcgctgaagtaaaaattgttgattctgctggtaacgttaaatcaggaaacttatataatatcgcgcg

SEQ ID NO: 830194 - DNA, 75 bp, synthetic construct
  source 1..75: mol_type = other DNA
tggcttgatgaaaatcagattcatcatatgattgatgtcattaatgatagtttaggtttggtagaatctggtaga

SEQ ID NO: 830195 - DNA, 75 bp, synthetic construct
  source 1..75: mol_type = other DNA
atgctgcagtggtgggctgattatctggatgcgaatcgggagaagggcattagtccttttgatttcgggaaaatg

SEQ ID NO: 830196 - DNA, 75 bp, synthetic construct
  source 1..75: mol_type = other DNA
ttcataaaagtagctcactcacaaataatagttgttattttgttgggctagataaaaacagattatcaataattg

SEQ ID NO: 830197 - DNA, 75 bp, synthetic construct
  source 1..75: mol_type = other DNA
tcatcagcatgtcagcgaacgtcgcagcgtcgccatcagtctgttgctgattgccgtcggtgcattgatgcgtga

SEQ ID NO: 830198 - DNA, 75 bp, synthetic construct
  source 1..75: mol_type = other DNA
ccgatggtatgggcaaagcctgtcagtggtgcatagaatatttaagaaacccacaattaatgacacgatttgtat

SEQ ID NO: 830199 - DNA, 75 bp, synthetic construct
  source 1..75: mol_type = other DNA
tcatggatgcaacgggcagggtggttacggatacgtctgcaattatgtgcagacgtttattctcatatcatgttc

SEQ ID NO: 830200 - DNA, 75 bp, synthetic construct
  source 1..75: mol_type = other DNA
caagacaacaaccactccggttcgcgtggtatttactccccgcgcctggacgctgggcctatacttcggtctgat

SEQ ID NO: 830201 - DNA, 75 bp, synthetic construct
  source 1..75: mol_type = other DNA
tggggctgtggtccgcggctctgatgggcggcggtggacttggtgccgccctgacgccctggttagttcaacata

SEQ ID NO: 830202 - DNA, 75 bp, synthetic construct
  source 1..75: mol_type = other DNA
tctgcggctttatctggctgccgctgcaattgccggtcttctgggcgatggtgtgtggtttaggtctgggcggcg

SEQ ID NO: 830203 - DNA, 75 bp, synthetic construct
  source 1..75: mol_type = other DNA
cacatctggctttagtgaaggggaacccatccaagcgcccgatcaataagaacgagccaaaacccccgtcagggg

SEQ ID NO: 830204 - DNA, 75 bp, synthetic construct
  source 1..75: mol_type = other DNA
ggatgaagctcttaaaggtgctttgaaggttttagagaaaagaaaaaaagatttggcaacgtggggggacaaaga

SEQ ID NO: 830205 - DNA, 75 bp, synthetic construct
  source 1..75: mol_type = other DNA
gataagttaaaagaagaacatagtttagacgtttttagaaatgcttataattttgaattatactttgagctaact

SEQ ID NO: 830206 - DNA, 75 bp, synthetic construct
  source 1..75: mol_type = other DNA
gtgtttttttgtgccggatagtcacagcttatcaatggtgggctgtatgggggcggagcaatccgcgccgggttc

SEQ ID NO: 830207 - DNA, 75 bp, synthetic construct
  source 1..75: mol_type = other DNA
acgaagcgcacaacacgcgccctgcgtgtttttttgtgccggatagtcacagcttatcaatggtgggctgtatgg

SEQ ID NO: 830208 - DNA, 75 bp, synthetic construct
  source 1..75: mol_type = other DNA
cgtattggtgatgaacttgatgccgtcggcgtgttgaccacgcttgatgctaaagcgctggagttgttgatagaa

SEQ ID NO: 830209 - DNA, 75 bp, synthetic construct
  source 1..75: mol_type = other DNA
tttgcgacgggcactgccgggtgtgacctttatcgtaacaacgcatgacccgctatgtctgcgtggcatgtataa

SEQ ID NO: 830210 - DNA, 75 bp, synthetic construct
  source 1..75: mol_type = other DNA
acacttgatttcggcccacgtcaattcaccgttggttttgacgaaaccttaaaacccatggttcgtgacgcaaac

SEQ ID NO: 830211 - DNA, 75 bp, synthetic construct
  source 1..75: mol_type = other DNA
tttccaacagctcgaacgtggtagttaccaccttgctgataacgaacgtaatgtccatgaattgtcacgctggga

SEQ ID NO: 830212 - DNA, 75 bp, synthetic construct
  source 1..75: mol_type = other DNA
actggcaactgacgccgttaacctctttaaacaattgaagaaagatgtgcgcgccattgccagccagcaggttga

SEQ ID NO: 830213 - DNA, 75 bp, synthetic construct
  source 1..75: mol_type = other DNA
ggaaactattggccccactggtggtgatgggtgtcatgtttcttatccctgtccccgacggtatgccgccgcagg

SEQ ID NO: 830214 - DNA, 75 bp, synthetic construct
  source 1..75: mol_type = other DNA
gaatttggctgggatctgtatcccgcctggacagaagctggcgcacccgcaaaagaaaactgggcatttacttcg

SEQ ID NO: 830215 - DNA, 75 bp, synthetic construct
  source 1..75: mol_type = other DNA
tcctgaaagatttacctaagccaaaccagagcgatgataaaacactggcaactgacgcagttaatctcttcaaac

SEQ ID NO: 830216 - DNA, 75 bp, synthetic construct
  source 1..75: mol_type = other DNA
ttaatcaggcaatcctaaatttctgtcctcctgaatatcaagccgccgtagcatgtggcgaagctgcattgccca

SEQ ID NO: 830217 - DNA, 75 bp, synthetic construct
  source 1..75: mol_type = other DNA
aacggcggcatcctgtggctggaaacgtcatttgcactcaacatccgcgaacagtcgattatgaacgtcagcttt

SEQ ID NO: 830218 - DNA, 75 bp, synthetic construct
  source 1..75: mol_type = other DNA
aagacagcatatcgggcgttatcgttgcacttgtcactggaggaagtgggatcgccgtcgttgtgtggctatgga

SEQ ID NO: 830219 - DNA, 75 bp, synthetic construct
  source 1..75: mol_type = other DNA
ccgatgatgaatgccccttctgtgaagttcgttgctgcggtaatgactccaacttattgatagtgttttatgttc

SEQ ID NO: 830220 - DNA, 75 bp, synthetic construct
  source 1..75: mol_type = other DNA
acttaaggtcagctgatgtttttgatgacaagaatatatttgcagagactaatgattgggtgttccattactcag

SEQ ID NO: 830221 - DNA, 75 bp, synthetic construct
  source 1..75: mol_type = other DNA
gtgctaaagcgcttggggcgaatcccgtttggcaaaatatggtggctatgatgctcactggtgaactggtcgact

SEQ ID NO: 830222 - DNA, 75 bp, synthetic construct
  source 1..75: mol_type = other DNA
gctgtttggtgataaaaataccaaaaatgtggtgttagaaaagagttatgcagagtatatggaaggctttacaga

SEQ ID NO: 830223 - DNA, 75 bp, synthetic construct
  source 1..75: mol_type = other DNA
accgaaaaaaccactcatcgtagttttggctacattgcttggtggcatgctgtcagtagggttaattctgattcg

SEQ ID NO: 830224 - DNA, 75 bp, synthetic construct
  source 1..75: mol_type = other DNA
gattgggcaagtgagcactatgattttgtgcttgtagactcaccaccaatcttagcagtgactgatgccgcaatt

SEQ ID NO: 830225 - DNA, 75 bp, synthetic construct
  source 1..75: mol_type = other DNA
ccacgttcgcactgcccacattgccggaagagtattcgcattcgtgacaatataccgctgatttcctggctgata

SEQ ID NO: 830226 - DNA, 75 bp, synthetic construct
  source 1..75: mol_type = other DNA
gccaatacgatattgcgcagacaatttcaaagaccgcatttgatggtctggactttgttagccgtggcgctgttc

SEQ ID NO: 830227 - DNA, 75 bp, synthetic construct
  source 1..75: mol_type = other DNA
aatcgaaggccaagtgggtaaactgttagatacaaaaggtgtgaccttactgattaacgatgttgcagcagatga

SEQ ID NO: 830228 - DNA, 75 bp, synthetic construct
  source 1..75: mol_type = other DNA
ggcagcctgagttcacagataaaacactctccaggaaacccggggcggttcacatatcaaatatcggtaatcttg

SEQ ID NO: 830229 - DNA, 75 bp, synthetic construct
  source 1..75: mol_type = other DNA
ggcaagcgcgtagcattcaattcattcatctgttggatgaaattgtgctggaaccggctatctatctgatggcca

SEQ ID NO: 830230 - DNA, 75 bp, synthetic construct
  source 1..75: mol_type = other DNA
tacgctggcaattcctcaacgaggtgtttttttaagaaatgctgaaggttccagagtatgtagtttatatgatga

SEQ ID NO: 830231 - DNA, 75 bp, synthetic construct
  source 1..75: mol_type = other DNA
aaaaagatgctcactaaaaatttttattggcacgttaaaagtgccatattgtttttatggaaaaagcataccctg

SEQ ID NO: 830232 - DNA, 75 bp, synthetic construct
  source 1..75: mol_type = other DNA
aaaacttacaagataaattaagaaattctgacttttttattatgacttctatttacgaaggattgcccatggttc

SEQ ID NO: 830233 - DNA, 75 bp, synthetic construct
  source 1..75: mol_type = other DNA
atggcgaaacgggtatggcggcgggagcgtgacctgacggggtggatgtcgctgtcgcgtaaaccggaggtgaca

SEQ ID NO: 830234 - DNA, 75 bp, synthetic construct
  source 1..75: mol_type = other DNA
agatctacaaaatatttattttagcattgctatctgctaccaggcactaaataaacaagaaatttctaaagaaac

SEQ ID NO: 830235 - DNA, 75 bp, synthetic construct
  source 1..75: mol_type = other DNA
atgcctgccgggtttacccactttctactggtaaccagaaacaacatgaaatcattaaccacggaaacggctctg

SEQ ID NO: 830236 - DNA, 75 bp, synthetic construct
  source 1..75: mol_type = other DNA
atgcctgccgggtttacccactttccactggtaaccagtaacaacatgaaatcattaaccacggaaacagctctg

SEQ ID NO: 830237 - DNA, 75 bp, synthetic construct
  source 1..75: mol_type = other DNA
atgggcaccgtgggggccgtggcgttggatttagacggcaatctggcggcagccacgtccacgggcggaatgacc

SEQ ID NO: 830238 - DNA, 75 bp, synthetic construct
  source 1..75: mol_type = other DNA
ggatgattatggcgcattacgcatgacaacgctcaactgtaacgggcaatgccgtttacaggctgtggaggcgaa

SEQ ID NO: 830239 - DNA, 75 bp, synthetic construct
  source 1..75: mol_type = other DNA
atgaaaaaggggagaaaagcgatgctcttctggtcgctttgccccctattcaacgtctggaaccgaaagcgacat

SEQ ID NO: 830240 - DNA, 75 bp, synthetic construct
  source 1..75: mol_type = other DNA
attattttctacggtgttaacggtgatatttattataaccgttactggtccacaggtgatggatggttaactggc

SEQ ID NO: 830241 - DNA, 75 bp, synthetic construct
  source 1..75: mol_type = other DNA
ggtaccctgaaaacggttaactatttgtcagaaattgcggcagcaggtacggaggcgcagcaggaatcccgcgat

SEQ ID NO: 830242 - DNA, 75 bp, synthetic construct
  source 1..75: mol_type = other DNA
aaaagcaggtggcacagctggcatcatctgccacacaggatgccgcccgggcagaacaggcggtcaaagatgccg

SEQ ID NO: 830243 - DNA, 75 bp, synthetic construct
  source 1..75: mol_type = other DNA
tgggcattttccgttgaccgctgggatcgcaactggcaggaagagacaaagcgacaggtgattcgtgatgcatgg

SEQ ID NO: 830244 - DNA, 75 bp, synthetic construct
  source 1..75: mol_type = other DNA
tcgggaaaatattttcctatgacgacaggacagagtttgaaacagaggctgattttctactgtgggtaaaaaggg

SEQ ID NO: 830245 - DNA, 75 bp, synthetic construct
  source 1..75: mol_type = other DNA
tgattttgctgaatggctgaaagaggtcatgccggagcgttatgcggtcagtattgtggactcctccacactact

SEQ ID NO: 830246 - DNA, 75 bp, synthetic construct
  source 1..75: mol_type = other DNA
atagccccttagtgggtgccggatgctacgccaataacgccagtgtggcggtttcttgtaccggcacgggcgaag

SEQ ID NO: 830247 - DNA, 75 bp, synthetic construct
  source 1..75: mol_type = other DNA
aaggcaagtgatgtaagtgaggcgttggcctatattcgccagaacaacgaaatggagcgctcaggtcgcaataac

SEQ ID NO: 830248 - DNA, 75 bp, synthetic construct
  source 1..75: mol_type = other DNA
tgagtgccttcactgcctggattggtgttccctatgtaggtcccgtggtggcgtcaacccaagcaatagctgcgg

SEQ ID NO: 830249 - DNA, 75 bp, synthetic construct
  source 1..75: mol_type = other DNA
cgaaagacagaataaattagtccgccaagggtttgaaaaccaaatagttggccgttattctggtagtcgtgaacg

SEQ ID NO: 830250 - DNA, 75 bp, synthetic construct
  source 1..75: mol_type = other DNA
aaatatgcgtatccacagcatcaggaagtgcattctaaacaaacagcgtaactcgttattgtttgcgatctacaa

SEQ ID NO: 830251 - DNA, 75 bp, synthetic construct
  source 1..75: mol_type = other DNA
atgcctgccgggtttacccactttcaactggtaaccagaaacaacatgaaatcattaaccacggaaactgctctg

SEQ ID NO: 830252 - DNA, 75 bp, synthetic construct
  source 1..75: mol_type = other DNA
agattgtctaatcagggggtagacccacaacaactcctcagcatgtatcaaaaagacccacaagcaacatcacaa

SEQ ID NO: 830253 - DNA, 75 bp, synthetic construct
  source 1..75: mol_type = other DNA
aaaggtaaacatctatctaactatactgaatcctgcaaatggagaagttttagtacacgatttaatgtttagtgg

SEQ ID NO: 830254 - DNA, 75 bp, synthetic construct
  source 1..75: mol_type = other DNA
gccgataaaactatccatatgctgacttacctcgatgatgaaaacaaacgacggagaacgttacaacaactcaac

SEQ ID NO: 830255 - DNA, 75 bp, synthetic construct
  source 1..75: mol_type = other DNA
gctaagcccggcactcagccaattaccaatgtccccatgacattacttgatgcctttaatctcgctggcggcctt

SEQ ID NO: 830256 - DNA, 75 bp, synthetic construct
  source 1..75: mol_type = other DNA
ccggggttgtggggcgtattgctggtggcttgggggccattgctacttatacccgctctcgtataggtgctgtat

SEQ ID NO: 830257 - DNA, 75 bp, synthetic construct
  source 1..75: mol_type = other DNA
tgataaccttgttaaggttaatcagttctttcaggatatagagactagcgcccgcggtcttaaaatggaaatggc

SEQ ID NO: 830258 - DNA, 75 bp, synthetic construct
  source 1..75: mol_type = other DNA
cattgccacggggtacagtgaggatgatggcgtggcaaaggcgctggaaacgtatgccgtgaagctgcgggctgt

SEQ ID NO: 830259 - DNA, 75 bp, synthetic construct
  source 1..75: mol_type = other DNA
aacgagctggcagcggcgctgggtaatgacccgaactttgcgacaacggtcactaatgcactggcaggtaaacag

SEQ ID NO: 830260 - DNA, 75 bp, synthetic construct
  source 1..75: mol_type = other DNA
agagttctttcaccagtaatggcgatatgattatcgggcagggaacaggctcatcagccacaatggaaagtaaca

SEQ ID NO: 830261 - DNA, 75 bp, synthetic construct
  source 1..75: mol_type = other DNA
cggcgagatgtcagtggcccagggaagttctgcttcagtagatgtgacagccactaatgcagtgctgtctgctga

SEQ ID NO: 830262 - DNA, 75 bp, synthetic construct
  source 1..75: mol_type = other DNA
tggttccggtgtacagttcgggattttcgggcagaaagaggcggatgtgatgcatgttaaaggtgatacatccgg

SEQ ID NO: 830263 - DNA, 75 bp, synthetic construct
  source 1..75: mol_type = other DNA
aaacaacaaggggtggatgaacacgacgcacggaggcggtttcaccatgactgacagccagtggatacgcgccgt

SEQ ID NO: 830264 - DNA, 75 bp, synthetic construct
  source 1..75: mol_type = other DNA
agttatatcacgggtatccgccgtaaccagactacaggacgtcttgaagccctgacctgctcaacaggggggcag

SEQ ID NO: 830265 - DNA, 75 bp, synthetic construct
  source 1..75: mol_type = other DNA
cgcttccggtggaaatggtgccggtggcggtgattgcgccaacacatcaaatcttcagggctatgtgaacggcgc

SEQ ID NO: 830266 - DNA, 75 bp, synthetic construct
  source 1..75: mol_type = other DNA
accgtaagagctggaaaaaccgtgcagaagtggaactggccacactcacgtgggtggactggtataacaatcgac

SEQ ID NO: 830267 - DNA, 75 bp, synthetic construct
  source 1..75: mol_type = other DNA
ggaagcaggattactggcatcaacagggagcacaggcgactcgtatgacaacgcgatggcggagagcatcaatgg

SEQ ID NO: 830268 - DNA, 75 bp, synthetic construct
  source 1..75: mol_type = other DNA
aagtggaactggccacactaacgtgggtggactggtataacaatcgacgattgctgggaaggctggatcatatcc

SEQ ID NO: 830269 - DNA, 75 bp, synthetic construct
  source 1..75: mol_type = other DNA
attctgattgcgtggctgcaggacaatatcgactgcgaatcgggaattatctttgacaacaatgaggataaaacg

SEQ ID NO: 830270 - DNA, 75 bp, synthetic construct
  source 1..75: mol_type = other DNA
ataaaacggattcggcagcactgttgccctgtattgaacaggccggggaggatatccgtaccctgcgccaactgc

SEQ ID NO: 830271 - DNA, 75 bp, synthetic construct
  source 1..75: mol_type = other DNA
gcatgtaatataaatatcaacgagtgctcatatgaggagagattaagaagttctattatactttctagacgacaa

SEQ ID NO: 830272 - DNA, 75 bp, synthetic construct
  source 1..75: mol_type = other DNA
ggacgactacggcgcattgcgtatgaacacgctctcctgccagcggcaatgccgcctgcagccggtggagaataa

SEQ ID NO: 830273 - DNA, 75 bp, synthetic construct
  source 1..75: mol_type = other DNA
acactatcaataagttggagtcattacccaggaagtcaatatggcaccaatattactattaatgatggtgacaga

SEQ ID NO: 830274 - DNA, 75 bp, synthetic construct
  source 1..75: mol_type = other DNA
ttacttattaaactatgttgaaaaccgtacgctgatgcaacggatgggtgacctgcgaaatcagagtaaagacgg

SEQ ID NO: 830275 - DNA, 75 bp, synthetic construct
  source 1..75: mol_type = other DNA
gatacagaatatctgttgaacaactcccgggagaagtacagtttcaaaggtaatggctggaataacggcgtggga

SEQ ID NO: 830276 - DNA, 75 bp, synthetic construct
  source 1..75: mol_type = other DNA
acggcgattaatccggcctggccgaaagcggcattattcaccaccgtgatgccttttatttttaactacgttcac

SEQ ID NO: 830277 - DNA, 75 bp, synthetic construct
  source 1..75: mol_type = other DNA
gacgtttttcactcctcagcgatgccgcttcacgtgctgtttgtcaactcaaccatttctcttgaaggcgttgtg

SEQ ID NO: 830278 - DNA, 75 bp, synthetic construct
  source 1..75: mol_type = other DNA
atgggcatcaaacaacacaatgggaataccaaagccgatcgtctcgctgaattaaaaatccgttcgccctcaatt

SEQ ID NO: 830279 - DNA, 75 bp, synthetic construct
  source 1..75: mol_type = other DNA
tttgtctatgagaaagctgtacaatataagcgcctgcaagatgaagcaactgaagaggctatgaatgatcttata

SEQ ID NO: 830280 - DNA, 75 bp, synthetic construct
  source 1..75: mol_type = other DNA
gctaaagaaccattgaaagatagggaatatagaagagaggaggcttcaaaggagtctgaacataagcgcaacatg

SEQ ID NO: 830281 - DNA, 75 bp, synthetic construct
  source 1..75: mol_type = other DNA
gaaacaacaagcgtattcatgtacgcaagtttctcagcacacctgagggtaggaagtggttagaggaaaaacaga

SEQ ID NO: 830282 - DNA, 75 bp, synthetic construct
  source 1..75: mol_type = other DNA
gttaatacgctggggttctcccgccgcttccatgtcttcgccgcaccaaaacaggatgctgagcatacaccagag

SEQ ID NO: 830283 - DNA, 75 bp, synthetic construct
  source 1..75: mol_type = other DNA
gcggataaactgcatgtgacagacattaccaggaatgcgacttacccggtgctgattgacagcattgcggtggaa

SEQ ID NO: 830284 - DNA, 75 bp, synthetic construct
  source 1..75: mol_type = other DNA
aggatggcacaccgttcacgctgacgcagtcaccggtcagtgcctttgcggcggataaactgcatgtgacagaca

SEQ ID NO: 830285 - DNA, 75 bp, synthetic construct
  source 1..75: mol_type = other DNA
tccgtggggatgcaatgcggccgatgaccggcttcctgatgcagcgagccgagcaggcggcacctgaaacctggt

SEQ ID NO: 830286 - DNA, 75 bp, synthetic construct
  source 1..75: mol_type = other DNA
gaccagccgggcactccgcaggggtttggccagacgcagccagcagataactcgttaggcctggcgtttaacaac

SEQ ID NO: 830287 - DNA, 75 bp, synthetic construct
  source 1..75: mol_type = other DNA
gacaatcagcgttggagtacgcgtttggtatatgccaaggtaaatccaaaagatcaaccgattaataaagcattc

SEQ ID NO: 830288 - DNA, 75 bp, synthetic construct
  source 1..75: mol_type = other DNA
tggtatacgccaaagttaacccggaggatcagtcgatcaacaaagcattccctcatgcagatactttgaaaggag

SEQ ID NO: 830289 - DNA, 75 bp, synthetic construct
  source 1..75: mol_type = other DNA
aggaaaagttgagcttattacggaggataaccagcgctggagcacgcgtctggtatacgccaaagttaacccgga

SEQ ID NO: 830290 - DNA, 75 bp, synthetic construct
  source 1..75: mol_type = other DNA
aaggacaccatggctggggtaaggatgcggttaactggtacttggaagcgcatgatacgcgtaccaacatgagcc

SEQ ID NO: 830291 - DNA, 75 bp, synthetic construct
  source 1..75: mol_type = other DNA
gtgctatgacacgccttcgcaggtggtcgaggctgtccagaaagatttcggtatcaccatcaccaggcagcaggt

SEQ ID NO: 830292 - DNA, 75 bp, synthetic construct
  source 1..75: mol_type = other DNA
atatttctctttataaagaaaaacattatccactttggaaaaagcagtgtgaagaaatactgaaaaactgtcata

SEQ ID NO: 830293 - DNA, 75 bp, synthetic construct
  source 1..75: mol_type = other DNA
tgtggtgttcccggctgaactggtggggctgctggacaggctggagggggaaatccgggcaaactgcgtgagcag

SEQ ID NO: 830294 - DNA, 75 bp, synthetic construct
  source 1..75: mol_type = other DNA
cgaacggttcctgaccgaaaccagcgacattccgatcgcgaacaaatcctatcgcctccgcgtgcttgaccgcat

SEQ ID NO: 830295 - DNA, 75 bp, synthetic construct
  source 1..75: mol_type = other DNA
agcccatacagcataatcacacagtaagcgcggaggatctgactgatgagcagctcgccgcaattatcgctggta

SEQ ID NO: 830296 - DNA, 75 bp, synthetic construct
  source 1..75: mol_type = other DNA
gcccactgaatcaggtgacgtacaccgctgaagactatgcgaaggcccagcagaagctggagggaaggttagaag

SEQ ID NO: 830297 - DNA, 75 bp, synthetic construct
  source 1..75: mol_type = other DNA
tacagcttggctggagcggagatgtttatcagtcggtccgcttgaatacttcattgtggtacaccaacgcgaaca

SEQ ID NO: 830298 - DNA, 75 bp, synthetic construct
  source 1..75: mol_type = other DNA
atgaccatcaaactgatgctggaaaaaatgcaaccggcagtcactggattagcagaagcaacaggttcctcgctc

SEQ ID NO: 830299 - DNA, 75 bp, synthetic construct
  source 1..75: mol_type = other DNA
ttcggaatctgtttggtgatggagtctattatataaatgaagaggagggcagaaattatctgttagtcataatta

SEQ ID NO: 830300 - DNA, 75 bp, synthetic construct
  source 1..75: mol_type = other DNA
atgtcagcttcaatggctatgagcgcgatactttcccacagcttgccaagatcgatggcgtgaccaattttagca

SEQ ID NO: 830301 - DNA, 75 bp, synthetic construct
  source 1..75: mol_type = other DNA
agtaattgccgctcatgtacaagctaataaagttgcagcattcacctcgcatgtttttgaggacgagggtgttaa

SEQ ID NO: 830302 - DNA, 75 bp, synthetic construct
  source 1..75: mol_type = other DNA
cctccatcaatgaagtttgcggcagcgtttctggtcggtgcgatgctggcgttcgatatgggcggccccatcaat

SEQ ID NO: 830303 - DNA, 75 bp, synthetic construct
  source 1..75: mol_type = other DNA
aaagccatcagcgatacccagggacggtttgctgtcgcgcatggatttcgttccagcttccgtgactggtgcagc

SEQ ID NO: 830304 - DNA, 75 bp, synthetic construct
  source 1..75: mol_type = other DNA
cggtaaggttgagcttattacggaggataaccagcgctggagcacgcgtttggtatacgcgaaggttaacccgga

SEQ ID NO: 830305 - DNA, 75 bp, synthetic construct
  source 1..75: mol_type = other DNA
tacaccaacgctaacaacagcgacagcgatgacgttggggccagcgcagggatagagataccgtttagtttataa

SEQ ID NO: 830306 - DNA, 75 bp, synthetic construct
  source 1..75: mol_type = other DNA
gaccggtttcctgatgcagcgagcagagcaggcggcgccagagacatggtggttacgctgggtgggaccatggca

SEQ ID NO: 830307 - DNA, 75 bp, synthetic construct
  source 1..75: mol_type = other DNA
ctaaaattatcggcggtcgtttcacctttacgccgttccagtcattggaattaggcgcatcgcggataatgcagt

SEQ ID NO: 830308 - DNA, 75 bp, synthetic construct
  source 1..75: mol_type = other DNA
gaccggcttcctgatgcagcgagcagagcaggcggcacctgaaacctggtggttacgctggataggcccatggca

SEQ ID NO: 830309 - DNA, 75 bp, synthetic construct
  source 1..75: mol_type = other DNA
cggtaaggttgagcttattacggaggataaccagcgctggagtacgcgcttagtatacgcgaaggttaacccgga

SEQ ID NO: 830310 - DNA, 75 bp, synthetic construct
  source 1..75: mol_type = other DNA
aagaaggtcagcgcgtgaaagttggcgatactgtcattgaatttgatctgccgctactggaagagaaagccaagt

SEQ ID NO: 830311 - DNA, 75 bp, synthetic construct
  source 1..75: mol_type = other DNA
aagcactgctctggcagcatgagaccagacatgcgtacaacgcgcagggactggcgaaacgctgtataccggaca

SEQ ID NO: 830312 - DNA, 75 bp, synthetic construct
  source 1..75: mol_type = other DNA
gatgaaggttaccggctggccgcactctggcaggcgctgccggaagaactccgcttaagtccgcatcgttatctg

SEQ ID NO: 830313 - DNA, 75 bp, synthetic construct
  source 1..75: mol_type = other DNA
ctgaccggcgttcacaccaccgcagcgaatctggatatccgcatcccgtatgccacggacccggcgggcaaccgc

SEQ ID NO: 830314 - DNA, 75 bp, synthetic construct
  source 1..75: mol_type = other DNA
atgctcccctgtatggacatctccgctctcaacaccacgaatgacatcgaaaaactgcgtgccatggcacttgcc

SEQ ID NO: 830315 - DNA, 75 bp, synthetic construct
  source 1..75: mol_type = other DNA
tgctgggcccatgcccgcaggggcttcgccgacctgtataaaatcagtaaagatccacgggctgccatagccgtg

SEQ ID NO: 830316 - DNA, 75 bp, synthetic construct
  source 1..75: mol_type = other DNA
caaaccgcgtcacgccggacagcctgccgccggtggagtggctgacctacggcagcggttacctggcgggcatga

SEQ ID NO: 830317 - DNA, 75 bp, synthetic construct
  source 1..75: mol_type = other DNA
tgtagtttctttgtgggcttatggaatgcgcctgaaacaaactttagcaacagtacttttccaataagtatggat

SEQ ID NO: 830318 - DNA, 75 bp, synthetic construct
  source 1..75: mol_type = other DNA
tcggcacagtctctgctaacaatcgaggtcttgaaaagataggttcttcatggatggaaataagcgagtcagaaa

SEQ ID NO: 830319 - DNA, 75 bp, synthetic construct
  source 1..75: mol_type = other DNA
tcgtcagcgttgaagtgatgtggcctgcgcaaacgctgccccttcccctgcaacaggcggtggaagcactgacgc

SEQ ID NO: 830320 - DNA, 75 bp, synthetic construct
  source 1..75: mol_type = other DNA
ataaaacggattcagcggcactgttgccctgtatcgaacaggccagagcagatatccgcaccctgcgccagctgc

SEQ ID NO: 830321 - DNA, 75 bp, synthetic construct
  source 1..75: mol_type = other DNA
cgccgcggctccgggcgtatatgctccgcattggtcttgaccaactctatcagagcttggttgacggcaatttcg

SEQ ID NO: 830322 - DNA, 75 bp, synthetic construct
  source 1..75: mol_type = other DNA
tgcgtaagaatatttccgaattgcaacaacaactcgccaaacaaatcgcgatgtatcatgacgtaacaaatgcaa

SEQ ID NO: 830323 - DNA, 75 bp, synthetic construct
  source 1..75: mol_type = other DNA
aaatcctgaacacgaagaaaggcgggaaagtgcagaacggttatctgtgggcgtatgccagcggcgaagccacgg

SEQ ID NO: 830324 - DNA, 75 bp, synthetic construct
  source 1..75: mol_type = other DNA
tctccgaacagaccaaatcggatctttcacgttacctgtcagattttaaagcggacctgtgggagctgatcctcg

SEQ ID NO: 830325 - DNA, 75 bp, synthetic construct
  source 1..75: mol_type = other DNA
tttctaagaaaagtgacgctagtgcagagaatttgaggaaaaaagcaatctcttctgatatctttaataaatctt

SEQ ID NO: 830326 - DNA, 75 bp, synthetic construct
  source 1..75: mol_type = other DNA
aagttcatgttccatagtgaaaccaaccttgcaaatacggattaccgggaaaaccggtccatgatactgtccggt

SEQ ID NO: 830327 - DNA, 75 bp, synthetic construct
  source 1..75: mol_type = other DNA
aaactgaattcataaagtctcaacatacagacagaagcatatataatggattatgtttttttatgtgtattgatt

SEQ ID NO: 830328 - DNA, 75 bp, synthetic construct
  source 1..75: mol_type = other DNA
tttgggcgaactatccatgtttgattgggagccagcataccatcaacgtcaagctacaaactatggtgcagtatg

SEQ ID NO: 830329 - DNA, 75 bp, synthetic construct
  source 1..75: mol_type = other DNA
ctttcgctggagaaaatcgaggcgattggactagtcaacatgccactaatttatgaacgttggtgtttgctgcaa

SEQ ID NO: 830330 - DNA, 75 bp, synthetic construct
  source 1..75: mol_type = other DNA
tttcagtggacacaaaacagaaaatcaggtgttgatttacgatcgtaaaaccaaaatcaccccaacactggattt

SEQ ID NO: 830331 - DNA, 75 bp, synthetic construct
  source 1..75: mol_type = other DNA
agaaagggtaaagggaagagaaatatgctcaggaaggcgtaccgctcccggggctctgctgaggcgcgggggatg

SEQ ID NO: 830332 - DNA, 75 bp, synthetic construct
  source 1..75: mol_type = other DNA
cggaaaatgcaccgggaaagagcaaggtgttacttgagaacataaagaaacgtgcaggcttcgtaccctcgctct

SEQ ID NO: 830333 - DNA, 75 bp, synthetic construct
  source 1..75: mol_type = other DNA
gcactggatattctgattgcgtggctgcaggacaatatcgactgcgaatcggggattatcttcgacaacgatgag

SEQ ID NO: 830334 - DNA, 75 bp, synthetic construct
  source 1..75: mol_type = other DNA
ggtggtgcagacgctgctggaggcggtagtgctggtggtgctggtagtgatcctgttcctgcagacctggcgcgc

SEQ ID NO: 830335 - DNA, 75 bp, synthetic construct
  source 1..75: mol_type = other DNA
aatgtgtaatggagaatcaattaacgagaataaagaatatggtgggctaatatgtaagaagcaaggtgaatattt

SEQ ID NO: 830336 - DNA, 75 bp, synthetic construct
  source 1..75: mol_type = other DNA
ctatgccagctgggaacatgaaagtggtttctatctggacggtatcgtgaagctgaaccgctttgaaagtaacgt

SEQ ID NO: 830337 - DNA, 75 bp, synthetic construct
  source 1..75: mol_type = other DNA
atcgacagtcgtaatgatattcctgaggggattgcgacgctgggcgcttttatgggttattcccattcacatatc

SEQ ID NO: 830338 - DNA, 75 bp, synthetic construct
  source 1..75: mol_type = other DNA
tacgttaagcggacatctcggggtggggtatagccatggtgccggtgtggaatccccgtggaacgcggtggctgg

SEQ ID NO: 830339 - DNA, 75 bp, synthetic construct
  source 1..75: mol_type = other DNA
ggctaatctccagttcaatactgttcaacctgctgaaacccggcagcggaaaaacaaaaataaatgcagcttctg

SEQ ID NO: 830340 - DNA, 75 bp, synthetic construct
  source 1..75: mol_type = other DNA
aagatgcaattagagatggactaaaacggcaacaggaacttgataaatggaaaagggaaaacatgactccattta

SEQ ID NO: 830341 - DNA, 75 bp, synthetic construct
  source 1..75: mol_type = other DNA
tgtcgatgataaccgggtgaaggtgaataatgacggtaattttgtcaatgatttgtcgggcagacgtggaatata

SEQ ID NO: 830342 - DNA, 75 bp, synthetic construct
  source 1..75: mol_type = other DNA
tcgtcgtagacactactgctttcttcgtaaggaaccctctttgccgcaaggaaatgaagatgaagctggcgctat

SEQ ID NO: 830343 - DNA, 75 bp, synthetic construct
  source 1..75: mol_type = other DNA
ttggaaaaggaagttgctcagcttgcagatctctctgctaatcgggcaaatatcgaaatgaaagttttagaaatt

SEQ ID NO: 830344 - DNA, 75 bp, synthetic construct
  source 1..75: mol_type = other DNA
cgtttatcaaggaacagagaaagaatgctatttagttattattaataacatccaaaaattaaagcaattatcaaa

SEQ ID NO: 830345 - DNA, 75 bp, synthetic construct
  source 1..75: mol_type = other DNA
caattgcgagcaaataggcgctttatcatatgaagttgaaaatagagctttattagcaacatttaaaacaaaaac

SEQ ID NO: 830346 - DNA, 75 bp, synthetic construct
  source 1..75: mol_type = other DNA
atcatcgatgagcacattcgcaatcactactaccgtgcgatctctatggaagagttgactgaaatgagcggaatg

SEQ ID NO: 830347 - DNA, 75 bp, synthetic construct
  source 1..75: mol_type = other DNA
gacatcggcagatgttttcccttctgcattgggacgaggatataccgaacaggatctgcgtgtgctacgcgaagg

SEQ ID NO: 830348 - DNA, 75 bp, synthetic construct
  source 1..75: mol_type = other DNA
tcggttgtcggatgcgacgccatgcgtcttatccgacctacagttcaccccgtaggcctgataagtcgcgtcagc

SEQ ID NO: 830349 - DNA, 75 bp, synthetic construct
  source 1..75: mol_type = other DNA
caactaacgtggtcacgctgacgggcgtgcacaccgacctcgccactttgctggcgaatcatcagttgatggtgg

SEQ ID NO: 830350 - DNA, 75 bp, synthetic construct
  source 1..75: mol_type = other DNA
actcgcacgggatgtggacggtgctggcaaaccagcaggtaatgcaatcgactgacccactcacctggtcgaaga

SEQ ID NO: 830351 - DNA, 75 bp, synthetic construct
  source 1..75: mol_type = other DNA
cagcgctaccgtgcagccagatttaagctggagcgtgagcgtacctgccgccgactggcaggcgctgggtaacgg

SEQ ID NO: 830352 - DNA, 75 bp, synthetic construct
  source 1..75: mol_type = other DNA
gcaacaccaacacggtgagctacggcacttcgctacacctgcgcatcaccgatcccaacggcattaacgtctatt

SEQ ID NO: 830353 - DNA, 75 bp, synthetic construct
  source 1..75: mol_type = other DNA
cgatttccggcaccagcgaccagcctgcgggcacgcagattaccgttacgcttaacgggcaaaattacaccacca

SEQ ID NO: 830354 - DNA, 75 bp, synthetic construct
  source 1..75: mol_type = other DNA
gagcatggtcaggcactggtgatcaccggcggcagtagcggcctgaatgcaggcgccgtgctgacggtcaccatc

SEQ ID NO: 830355 - DNA, 75 bp, synthetic construct
  source 1..75: mol_type = other DNA
tgatcagcagattcgttgggccaaagccgacctggtacaacaagtcagtcgaaaccgattaaacagagcaaggac

SEQ ID NO: 830356 - DNA, 75 bp, synthetic construct
  source 1..75: mol_type = other DNA
aacaaaaaaggcagcacgttgctgcctggcgcgccagtggtcttacacgtcagcaatactgtgaactcaacgata

SEQ ID NO: 830357 - DNA, 75 bp, synthetic construct
  source 1..75: mol_type = other DNA
ttgggggagttggattctaaatgatgacaaaatgaaaagctctgcaatagaaagtgcctacctgatatacaaatt

SEQ ID NO: 830358 - DNA, 75 bp, synthetic construct
  source 1..75: mol_type = other DNA
atcgtatctttacactaacgttggtggtgccagcaactggacgcaatcggccctcggcggcagccagagtggtac

SEQ ID NO: 830359 - DNA, 75 bp, synthetic construct
  source 1..75: mol_type = other DNA
ttccggctgcggatttggcggcgctgcgtgacggcgatgccagcgcccaggagcgggtgactaacgtcaacggca

SEQ ID NO: 830360 - DNA, 75 bp, synthetic construct
  source 1..75: mol_type = other DNA
gcgatgccagcgcccaggtgcgggtgactaacgtcaacggcaacagcgccacggcaacgcatgaatacagcgtcg

SEQ ID NO: 830361 - DNA, 75 bp, synthetic construct
  source 1..75: mol_type = other DNA
tgctatttagttattattaataacatccaaaaattaaagcaattatcaaaaactaataataatatcgattttaat

SEQ ID NO: 830362 - DNA, 75 bp, synthetic construct
  source 1..75: mol_type = other DNA
actctctcaagctcctgatatctggaaaatctctattggtcgtgcccatgaaaaagaaatgcgtgatcgctatat

SEQ ID NO: 830363 - DNA, 75 bp, synthetic construct
  source 1..75: mol_type = other DNA
cacccacaaaaacgatttgcccttgaagattttgtcgagaaatacccacggcggttaaaagccactaaaaaccga

SEQ ID NO: 830364 - DNA, 75 bp, synthetic construct
  source 1..75: mol_type = other DNA
tccttatacatgaaagaaaaaaacaactgctatattccaataaagctggaagcaaacttttacagttatgtagaa

SEQ ID NO: 830365 - DNA, 75 bp, synthetic construct
  source 1..75: mol_type = other DNA
aggccattgggctatatctgtaaacggtaactggcgactaacctttcgatttgaaggcgaagacgcaattctggt

SEQ ID NO: 830366 - DNA, 75 bp, synthetic construct
  source 1..75: mol_type = other DNA
gtgtccactattctctcaggaatttcaggatctgccagacggtgctgagacgacgcttacctttctcagggagtt

SEQ ID NO: 830367 - DNA, 75 bp, synthetic construct
  source 1..75: mol_type = other DNA
tatttttttgcagactgggaacgtatcggttgggtactcaatgatagcgaaaaagcacctgaaaacagatttatc

SEQ ID NO: 830368 - DNA, 75 bp, synthetic construct
  source 1..75: mol_type = other DNA
ccggcgaggcggtggtgcccttcttctccatctccggatcagagtttgtcgagatgttcgtcggcgtgggtgcgg

SEQ ID NO: 830369 - DNA, 75 bp, synthetic construct
  source 1..75: mol_type = other DNA
gtctcggggcgcgcattcccaagggcgtgttgctggtcggcccaccgggcaccggcaagacattgctggccaagg

SEQ ID NO: 830370 - DNA, 75 bp, synthetic construct
  source 1..75: mol_type = other DNA
gtaagggggcttatattcagggggatttgttcgccatgatggcgaatgacacagcagcgctgtatatcgccacac

SEQ ID NO: 830371 - DNA, 75 bp, synthetic construct
  source 1..75: mol_type = other DNA
tgctggcgcgggaaacgctcgacgagaacgacatccttcaattgacccaaggacttgttctagatagaaacgaaa

SEQ ID NO: 830372 - DNA, 75 bp, synthetic construct
  source 1..75: mol_type = other DNA
tgctcacggagatggacggcttcgacagctcggtcgggctgatcatcctcgccgccaccaaccgccccgaaatcc

SEQ ID NO: 830373 - DNA, 75 bp, synthetic construct
  source 1..75: mol_type = other DNA
ggcaggcgaaatgcgcaaacacggcattctgctttccggcagcagccgcaccattgaaagtgccgttcgccgtac

SEQ ID NO: 830374 - DNA, 75 bp, synthetic construct
  source 1..75: mol_type = other DNA
cgataacaacgattttaatgctgtggtcggtgtcgattaaagccgcatcgttgcttggcgatcatagcgagcaag

SEQ ID NO: 830375 - DNA, 75 bp, synthetic construct
  source 1..75: mol_type = other DNA
ataattcattgcttaatccggcgaagaaattcacttatcaggcaccgcaaaacgttgatgacacttatgtcgtgt

SEQ ID NO: 830376 - DNA, 75 bp, synthetic construct
  source 1..75: mol_type = other DNA
gcgccaaagagatcgccgagcgcgtcgcctatctgaagcactgcgactatcaacaaatgccacagcaccgcgtca

SEQ ID NO: 830377 - DNA, 75 bp, synthetic construct
  source 1..75: mol_type = other DNA
atgaataataatgacaacaatttacgcagagagtttttgcgggtaatgaacgaaaatgttaaatcagaattaaaa

SEQ ID NO: 830378 - DNA, 75 bp, synthetic construct
  source 1..75: mol_type = other DNA
gtccctgcgcagggcaaacctggcgctgcgttgggcgaaaagtgatgttcagaagtgggagcgagtctgtgccgc

SEQ ID NO: 830379 - DNA, 75 bp, synthetic construct
  source 1..75: mol_type = other DNA
ttgccgtaagctttatatcatcagctttagctgtatcgcttgcgctcgcctgcttttactttagcttcctgagtt

SEQ ID NO: 830380 - DNA, 75 bp, synthetic construct
  source 1..75: mol_type = other DNA
gagcgtaataccacgccgaaactggcccaggagaaaaatctggcggcgttccgtggttactcctgtgataccgca

SEQ ID NO: 830381 - DNA, 75 bp, synthetic construct
  source 1..75: mol_type = other DNA
ataccgcttccagcctgttactcattcgctcgctgattgaagatcaaatcaatttcgatggagattttactctat

SEQ ID NO: 830382 - DNA, 75 bp, synthetic construct
  source 1..75: mol_type = other DNA
atgacgccgcaccagtttagagcgtggtttaactcgctgcctgagaagtaccagaagcaggccaaagccatgtac

SEQ ID NO: 830383 - DNA, 75 bp, synthetic construct
  source 1..75: mol_type = other DNA
ctgcgatgcatagcaatttaaaattcttttttacaggatgtaatcctgttgaagagacatttttatatcatgggc

SEQ ID NO: 830384 - DNA, 75 bp, synthetic construct
  source 1..75: mol_type = other DNA
ccttccggcactgtgggggatggtctccggtgcggtttctgtgctgggcggggtgctttccggtcttctcagtcc

SEQ ID NO: 830385 - DNA, 75 bp, synthetic construct
  source 1..75: mol_type = other DNA
taaccgcatcgcggaagatgcgcactatgtctaccactatgatgaatacggcagactgacggagaagacggaccg

SEQ ID NO: 830386 - DNA, 75 bp, synthetic construct
  source 1..75: mol_type = other DNA
gcgtatccagacggtataccagccggggagcttcgcgccgctcatccgcatcgaaacagacaacggtgaacggga

SEQ ID NO: 830387 - DNA, 75 bp, synthetic construct
  source 1..75: mol_type = other DNA
aaaacttgagaataatgaaaaaataatagaatcaatttatatatcatctgtgagttttttttctgacaaggtcag

SEQ ID NO: 830388 - DNA, 75 bp, synthetic construct
  source 1..75: mol_type = other DNA
cacgttgtggaacacggtatatatagaaagagctattgagtcactaaaacgaaaaggtatcccgataaatgagca

SEQ ID NO: 830389 - DNA, 75 bp, synthetic construct
  source 1..75: mol_type = other DNA
ttaataaaggaactggtcggatgtgcatctcagcttattgaatcaggatgtgaaattgaagatgttagatctatg

SEQ ID NO: 830390 - DNA, 75 bp, synthetic construct
  source 1..75: mol_type = other DNA
tataactttgtctgtcgacaaagataataaaattgttgcgtcatccagttataatggagtccagaaaggaaatgg

SEQ ID NO: 830391 - DNA, 75 bp, synthetic construct
  source 1..75: mol_type = other DNA
tttaacttcattctcaacgttgccgcttcgcatctggtcatatattggcttctttgttgcgggcatatctttcat

SEQ ID NO: 830392 - DNA, 75 bp, synthetic construct
  source 1..75: mol_type = other DNA
tatccactctaatatatcttatttcaagaatcgaaaataatgaaaagataatagagtcaatatacatatcatcta

SEQ ID NO: 830393 - DNA, 75 bp, synthetic construct
  source 1..75: mol_type = other DNA
gcggcttgcctgccacacattgaacattacagaccaattagcactttgtcaccggggaaagatgtaaagattatg

SEQ ID NO: 830394 - DNA, 75 bp, synthetic construct
  source 1..75: mol_type = other DNA
aatacggaagcatgggtatggtataaaaattgcgatagtaaaaatgtggcagttgaacttcttcaaatctacgaa

SEQ ID NO: 830395 - DNA, 75 bp, synthetic construct
  source 1..75: mol_type = other DNA
ctggtcgcctcaacctttgtctgggcaccgattcccggccttatctgcgccgtcatcgttattgctactggtctg

SEQ ID NO: 830396 - DNA, 75 bp, synthetic construct
  source 1..75: mol_type = other DNA
cactggtggatggcccgcgtggtaaagatttacgtgcttcacgcgcagcggcagaaaatatcattccccacacta

SEQ ID NO: 830397 - DNA, 75 bp, synthetic construct
  source 1..75: mol_type = other DNA
caccattgtttccgtggcgtcatgcaccactaactgtcttgcaccgatggccaaagccttgcatgacagtttcgg

SEQ ID NO: 830398 - DNA, 75 bp, synthetic construct
  source 1..75: mol_type = other DNA
gattcagtgcattaaagaacaaggattagatcttagggaaggtgcgaataagcggggaaattcttctcggctgac

SEQ ID NO: 830399 - DNA, 75 bp, synthetic construct
  source 1..75: mol_type = other DNA
tcgcgaaggatgcgcactatgtttaccactacgatgaatacggcagactgacggagaagacggaccgcatcccgg

SEQ ID NO: 830400 - DNA, 75 bp, synthetic construct
  source 1..75: mol_type = other DNA
tagataatcaggttgagcaacatctcaaaagcgaacttaaaggttttcaggaaaatgtccgtgattatgctcaat

SEQ ID NO: 830401 - DNA, 75 bp, synthetic construct
  source 1..75: mol_type = other DNA
cctgaaagcgatccagtccattgaacgtaaaatcgaggttaagggtgaactgctgcccgattaccagccgtgggt

SEQ ID NO: 830402 - DNA, 75 bp, synthetic construct
  source 1..75: mol_type = other DNA
ggagtaccacaaccacactatgccgtgccactgcgcaaggtttacgacgaactgaagccggacggtacattccgg

SEQ ID NO: 830403 - DNA, 75 bp, synthetic construct
  source 1..75: mol_type = other DNA
agcctgtctttgaagttgtatgccgtattcttgggaacggctggcgtgttaacaaactggataattatcagcatc

SEQ ID NO: 830404 - DNA, 75 bp, synthetic construct
  source 1..75: mol_type = other DNA
caagcctgggcactgagcgcctgaaattcacggcacagcaacgtcaggcggtgatgacgtttaacagtatccagg

SEQ ID NO: 830405 - DNA, 75 bp, synthetic construct
  source 1..75: mol_type = other DNA
atagcggcagcgggagttgatgttctgtatgttctaacaggcaaccgcacgcctgtagttacgttgtccagtaaa

SEQ ID NO: 830406 - DNA, 75 bp, synthetic construct
  source 1..75: mol_type = other DNA
tacgctcttggcgtattaagttcttattcccgtcccctggtcagcaatgataacccttattccgaatcgctcttc

SEQ ID NO: 830407 - DNA, 75 bp, synthetic construct
  source 1..75: mol_type = other DNA
ctgggcagtatgcggcagaactgcttcaacgtgctgtatggaatgaaaaatgttcatcccgcaatctcgtgcttc

SEQ ID NO: 830408 - DNA, 75 bp, synthetic construct
  source 1..75: mol_type = other DNA
tattacagaccatgagcgcacaggaatatgaagatatcctgagcgtactgccggaatggccttccaaccgagttg

SEQ ID NO: 830409 - DNA, 75 bp, synthetic construct
  source 1..75: mol_type = other DNA
agtataataacactgatatcacggtgggtggtgcagttcttggtgcaggtgaaggcgcaaaagcaacactggatt

SEQ ID NO: 830410 - DNA, 75 bp, synthetic construct
  source 1..75: mol_type = other DNA
tttaatgaaaaattagtccatcacccttattatgattcttggacttttggcccatatattcgtaagggaaatgat

SEQ ID NO: 830411 - DNA, 75 bp, synthetic construct
  source 1..75: mol_type = other DNA
gggtactcggctggagtgagcgggtgccgggggggatgaggtgctgcctgccccattgccgccgtaccgggtgct

SEQ ID NO: 830412 - DNA, 75 bp, synthetic construct
  source 1..75: mol_type = other DNA
atgcccttcgacaaactcgccaattctgaaacgccgatttccgacgccctgacctggatccccgcactcggcagc

SEQ ID NO: 830413 - DNA, 75 bp, synthetic construct
  source 1..75: mol_type = other DNA
gaccgggtgagtgaggaaagccgccgctggctggcatcgtgcggcctgacggtggcgcagatgcaaagccagatg

SEQ ID NO: 830414 - DNA, 75 bp, synthetic construct
  source 1..75: mol_type = other DNA
cgctcaacgaaggttctggcgtcgatctgaacaatgacggcaggatcgacctggttcagcacacctacaacctga

SEQ ID NO: 830415 - DNA, 75 bp, synthetic construct
  source 1..75: mol_type = other DNA
tgaacgatcgcgccggtaaccccggtcaaaccacgcacgccctgaccgtcgataccgttgcgccaacggtcacca

SEQ ID NO: 830416 - DNA, 75 bp, synthetic construct
  source 1..75: mol_type = other DNA
cgttcagcagttttactgagatcatgtcccggcaatatcaggcattttttagcgatgttagtgatgctcaaggcg

SEQ ID NO: 830417 - DNA, 75 bp, synthetic construct
  source 1..75: mol_type = other DNA
cttatcgctatattactcggtcaggatgttttgctaagcatctatgacacgcagttatcagaacgtattaacaat

SEQ ID NO: 830418 - DNA, 75 bp, synthetic construct
  source 1..75: mol_type = other DNA
attgctattcttcttggtcaggatgttcttttagaaatttatgacatgcaaatttctgagcgcatcaataaacgt

SEQ ID NO: 830419 - DNA, 75 bp, synthetic construct
  source 1..75: mol_type = other DNA
tcaccaacggcaccaccacctggcaggtgcgggtggtcgatctggcgggcaacgttggcgcaaccggcagccagt

SEQ ID NO: 830420 - DNA, 75 bp, synthetic construct
  source 1..75: mol_type = other DNA
accggcacgacctggcgctataacgacagccgcacgctgaccgatggcaactatctctatcaggtgcgggtgatt

SEQ ID NO: 830421 - DNA, 75 bp, synthetic construct
  source 1..75: mol_type = other DNA
tggtgatcaacggcaaaacctacacctctgaaccgggcggcgcggtagtggtcgatccggcgcacaacacctggt

SEQ ID NO: 830422 - DNA, 75 bp, synthetic construct
  source 1..75: mol_type = other DNA
gtaaaacctacaccaccacggtggcggctaacggtagctggagcaccaccgttccggctgcggatatggcggctc

SEQ ID NO: 830423 - DNA, 75 bp, synthetic construct
  source 1..75: mol_type = other DNA
accgccagccgacttaagcgccctgaccgccagcaactataccgttagcgcggcagtgagcgacaaagccggaaa

SEQ ID NO: 830424 - DNA, 75 bp, synthetic construct
  source 1..75: mol_type = other DNA
ccaatggcacctgggcgctgaacgtgcctgcggcagatctggcagcgctcgggcagggcgcacagaccattaccg

SEQ ID NO: 830425 - DNA, 75 bp, synthetic construct
  source 1..75: mol_type = other DNA
gaagtaagtactcaatacagaccttgggtaatatctgttttaagtgataaaactaatcctgctaattatctgttc

SEQ ID NO: 830426 - DNA, 75 bp, synthetic construct
  source 1..75: mol_type = other DNA
aaagcacggtcgacaaaaaagggtttaatgacccgttaatagactcggcccacatgctgaactcggtcgactacg

SEQ ID NO: 830427 - DNA, 75 bp, synthetic construct
  source 1..75: mol_type = other DNA
aactgatagcggatttatcccgctgtaatccggaggcattcgtgttgtgtgagatgtggttccccgatgatgtta

SEQ ID NO: 830428 - DNA, 75 bp, synthetic construct
  source 1..75: mol_type = other DNA
cttaatgctgagctggcagccctttatcttggtgtcagtgtaaaaactctggcacgatataggcaaaatgatcct

SEQ ID NO: 830429 - DNA, 75 bp, synthetic construct
  source 1..75: mol_type = other DNA
gacaggctattttcaccgccacgaccactgtcgcagcgaaatatacactcacggcgaaagtgagtcaggccgacg

SEQ ID NO: 830430 - DNA, 75 bp, synthetic construct
  source 1..75: mol_type = other DNA
ggcggaggtggtgcatacgatgcaggttatagcggaaccagtatgacgggcgggaaaggtgctgatggggtttgt

SEQ ID NO: 830431 - DNA, 75 bp, synthetic construct
  source 1..75: mol_type = other DNA
ctgcgaccgctctggtgtgtatgggagaacatatcaaagggcagttgcagatgtctgttcgcgactgggaaagtc

SEQ ID NO: 830432 - DNA, 75 bp, synthetic construct
  source 1..75: mol_type = other DNA
atgctttctgcttcagttcctggatatcaaaaattgccatccggtttaattattcaatgggggccaattgatgtt

SEQ ID NO: 830433 - DNA, 75 bp, synthetic construct
  source 1..75: mol_type = other DNA
tttccaaaccgatgtctgcgtgttttggtctcacaagactacacaccagatagcgggtctgttggttatattgcc

SEQ ID NO: 830434 - DNA, 75 bp, synthetic construct
  source 1..75: mol_type = other DNA
aatttcacccaccatttatggatgcttacaagcactcacgagcggtgatgaacaaacctatcccacgttttggat

SEQ ID NO: 830435 - DNA, 75 bp, synthetic construct
  source 1..75: mol_type = other DNA
actatgagctggcagccgatgtatataatattaacgtgacgtcacctgatcctacccacgtaatatggacacagg

SEQ ID NO: 830436 - DNA, 75 bp, synthetic construct
  source 1..75: mol_type = other DNA
cggaaaggtgcttaatacgcggctcgccagtgacggtcttctcagacaataaacgtcattcatttcacccatcag

SEQ ID NO: 830437 - DNA, 75 bp, synthetic construct
  source 1..75: mol_type = other DNA
ctatttctcttgagacgctatttggcatgattcacttcagagccagcctgatgcatgacgaaagccagagaaata

SEQ ID NO: 830438 - DNA, 75 bp, synthetic construct
  source 1..75: mol_type = other DNA
gcgcgtctgtacgccaggacgttctgggtgacctgatgagccgtaacttcattgacgccatcattaaagaaaaat

SEQ ID NO: 830439 - DNA, 75 bp, synthetic construct
  source 1..75: mol_type = other DNA
gctggctttccataccttgctttttggtatcggcatcgtgtgcagcattttgctgatattccttatcttttcctt

SEQ ID NO: 830440 - DNA, 75 bp, synthetic construct
  source 1..75: mol_type = other DNA
ggcaatcgccccttattaattcaaaactggttagatacaggtgatgataatgctgatcccagccagataaaagtt

SEQ ID NO: 830441 - DNA, 75 bp, synthetic construct
  source 1..75: mol_type = other DNA
aacctctgctggcaaaactgcattgcgcgtcgcaaatccgacgccgtatcacgtgtcattcagtagtggtgattt

SEQ ID NO: 830442 - DNA, 75 bp, synthetic construct
  source 1..75: mol_type = other DNA
tgccgatcccagccagatcaaagtgccatttacctctacgccgcctgtttcacgcgttgagccaaaacgcggtca

SEQ ID NO: 830443 - DNA, 75 bp, synthetic construct
  source 1..75: mol_type = other DNA
tgccgatcccagccagatcaaagtgccgtttaccgcgaccccaccagtttcacgcgtggagccaaaacgcggtca

SEQ ID NO: 830444 - DNA, 75 bp, synthetic construct
  source 1..75: mol_type = other DNA
aattggcattccgcacacgcatcaaacttttttatcgcccgagcggcttgcaaggtcaatcctttgaagctccaa

SEQ ID NO: 830445 - DNA, 75 bp, synthetic construct
  source 1..75: mol_type = other DNA
tgatatgcgtggctggacgattaagggcaaacccgccagtggtcgtgccgtattgtctcaggaacaggacggcat

SEQ ID NO: 830446 - DNA, 75 bp, synthetic construct
  source 1..75: mol_type = other DNA
atgatgatataaagaaccaggcggacgaagtgctgaacctgatgaatatattctttcgcattgatgcttttatat

SEQ ID NO: 830447 - DNA, 75 bp, synthetic construct
  source 1..75: mol_type = other DNA
atgatgatataaagaaccaggcggatgaagtgctgaacctgatgaatatattcttttgcattgatgcttttatat

SEQ ID NO: 830448 - DNA, 75 bp, synthetic construct
  source 1..75: mol_type = other DNA
tcctgcaactggctttccgtacccgtatcaaactgttctatcgccctgatggattagccggtgagcatttcaaag

SEQ ID NO: 830449 - DNA, 75 bp, synthetic construct
  source 1..75: mol_type = other DNA
ctgctatcgttgtcggtgcaacgcttacggcattcagccccataacccaggccgatatcgttatcaacggtacgc

SEQ ID NO: 830450 - DNA, 75 bp, synthetic construct
  source 1..75: mol_type = other DNA
aaggcggcggaggggcacatctcccaatgataatgaggttatgcaacctgttagtcaccggcttgcctgatgtta

SEQ ID NO: 830451 - DNA, 75 bp, synthetic construct
  source 1..75: mol_type = other DNA
cgtttcatccgggaaagtgatctttaaagcgatcaacgactttggcggcaacatcgatggttccgcaacgttcta

SEQ ID NO: 830452 - DNA, 75 bp, synthetic construct
  source 1..75: mol_type = other DNA
cgatgaaaaatgaatctggtgacaaaattggcacagtgaaagtaaatacatcttatgctggtgtagttatgttgg

SEQ ID NO: 830453 - DNA, 75 bp, synthetic construct
  source 1..75: mol_type = other DNA
aaaaaaacaccattcatcattactccgccattattcaaacttgagccaggaaaaacaacatcttacgtatcgtaa

SEQ ID NO: 830454 - DNA, 75 bp, synthetic construct
  source 1..75: mol_type = other DNA
gtaaaggtgaatcttgggcggcagatgtaaatagttatttgcacaagcataatctggaagaatatctggataaga

SEQ ID NO: 830455 - DNA, 75 bp, synthetic construct
  source 1..75: mol_type = other DNA
tcttgagaacatctatttgatagataaaaagaatctcatgcgcaataaggtgcagattatccagcagtttgaaca

SEQ ID NO: 830456 - DNA, 75 bp, synthetic construct
  source 1..75: mol_type = other DNA
attgataaaagaagaaaatctcaatgaagatgcagcaaaacgctatattcgcacgtctttaaaacgcgaatatgc

SEQ ID NO: 830457 - DNA, 75 bp, synthetic construct
  source 1..75: mol_type = other DNA
aagaaggacatatcaagggtgggcaaattaataagatcaggcgcatccttgaacaacgtaagaaaggcgataaag

SEQ ID NO: 830458 - DNA, 75 bp, synthetic construct
  source 1..75: mol_type = other DNA
ggatgctgcatgagcgattccataatatccgcctgccggatgcgctggcattctcggcggtacgcgcttcgtacc

SEQ ID NO: 830459 - DNA, 75 bp, synthetic construct
  source 1..75: mol_type = other DNA
agcagaacggactggagatttattgcttcggtcttgtgtgctttcggaatggcatcagacatcagtccgattagc

SEQ ID NO: 830460 - DNA, 75 bp, synthetic construct
  source 1..75: mol_type = other DNA
atgcaggggcatcatattcaggaaaattcgacgtcttttttcagaaatggcggcaggccgtccggggtgattgag

SEQ ID NO: 830461 - DNA, 75 bp, synthetic construct
  source 1..75: mol_type = other DNA
gcgtttaatttatacacggttgttgatgacaatccccgccagtctgcaagtgtggaagttggtgtaaagattgtg

SEQ ID NO: 830462 - DNA, 75 bp, synthetic construct
  source 1..75: mol_type = other DNA
aatgtggaaccgtaaatacggcgctggaaatttcaaaatattggttaaggaagaatatttccgggttagataaaa

SEQ ID NO: 830463 - DNA, 75 bp, synthetic construct
  source 1..75: mol_type = other DNA
caatttggcggtgataattcaaaaatgccgggaagaaaagcgtttgttgagcagtttaaattagagtttaaggct

SEQ ID NO: 830464 - DNA, 75 bp, synthetic construct
  source 1..75: mol_type = other DNA
cgcaacagcctgcggttcttggcgtggaaagactataaagcggtaacccgtgacctgaaacaggtttaccgcgca

SEQ ID NO: 830465 - DNA, 75 bp, synthetic construct
  source 1..75: mol_type = other DNA
cccgggagatattttatattatcaaaaagcatccatgaaagtaataattactggatggaaacctatcacaataaa

SEQ ID NO: 830466 - DNA, 75 bp, synthetic construct
  source 1..75: mol_type = other DNA
ggtcgcgtggatgcccaccgcaggcgtagagaggacgagaagcgaacaaaaatggttaatgactacctgaaaggc

SEQ ID NO: 830467 - DNA, 75 bp, synthetic construct
  source 1..75: mol_type = other DNA
agcgcaataagctcttctgctgtcaccggcacatcattgttttccgcatccgtccagaaaaacgcctccggcagt

SEQ ID NO: 830468 - DNA, 75 bp, synthetic construct
  source 1..75: mol_type = other DNA
agcgaatgagctcggtgttccactcggtgaattaaaggcgcttctcgatgtgaatggtgtttcgctgtccaatag

SEQ ID NO: 830469 - DNA, 75 bp, synthetic construct
  source 1..75: mol_type = other DNA
tcgaaaatttcaggtcaataagacaggcagagtggtatcccggcccgggctttaattgtcttatcggcccggggg

SEQ ID NO: 830470 - DNA, 75 bp, synthetic construct
  source 1..75: mol_type = other DNA
cattgctattgccaggtaataataagtatgagatttatgcaagaaatgaatatagcaacgtagaacaaattattc

SEQ ID NO: 830471 - DNA, 75 bp, synthetic construct
  source 1..75: mol_type = other DNA
caatcatttgaaatgtctttaccaaatggacaaaaaatatgggtacatggtaatgctacagaacatatggctgaa

SEQ ID NO: 830472 - DNA, 75 bp, synthetic construct
  source 1..75: mol_type = other DNA
cttatgatggaatgaaagttgtagctgcttcgatggcaccagtaataggtgctgcggcggccagtaagatagaag

SEQ ID NO: 830473 - DNA, 75 bp, synthetic construct
  source 1..75: mol_type = other DNA
ttgtttgatgtaaatggcgctattaattgcacaacgctgaatcagtcatcagaccgcgaccttaaagacgatatt

SEQ ID NO: 830474 - DNA, 75 bp, synthetic construct
  source 1..75: mol_type = other DNA
agtgtcagcgatcgggcagggaacaccaccagccacagcgcgaatttcacggtagacacctcagcacccgtggtc

SEQ ID NO: 830475 - DNA, 75 bp, synthetic construct
  source 1..75: mol_type = other DNA
ggttagccggtgcggcggtaggtggcggtgcgcttggcgctttactggcaagcggtggcgatgacgattcaaaaa

SEQ ID NO: 830476 - DNA, 75 bp, synthetic construct
  source 1..75: mol_type = other DNA
aacgtttgccgatgccgcagcggggggattagcccccgtagaactgagcgcccagaccaccgctattgaaagcat

SEQ ID NO: 830477 - DNA, 75 bp, synthetic construct
  source 1..75: mol_type = other DNA
cgaagatcgtacacattcagtgatgcggatttttatctcatgaattccgctactccagtctgcatcagtgtaact

SEQ ID NO: 830478 - DNA, 75 bp, synthetic construct
  source 1..75: mol_type = other DNA
acctgtaattgtaggtatagaaaatggtattttgctaagtattttgatgaagataaaaaagagtccaatgcagtg

SEQ ID NO: 830479 - DNA, 75 bp, synthetic construct
  source 1..75: mol_type = other DNA
tgacgcacagtatcagcggtagcggtgatgtgacaaaactgggtaccgggatcctgactcttaacaacgattccg

SEQ ID NO: 830480 - DNA, 75 bp, synthetic construct
  source 1..75: mol_type = other DNA
aataattactcttatctggataacgatacctggcgtttttatctgaatggtgttgtcaataaagtacccacagat

SEQ ID NO: 830481 - DNA, 75 bp, synthetic construct
  source 1..75: mol_type = other DNA
ggtcattatgctgaatattccgcaaagcaccgtagcggtctgcatcggcctcttttttgtcggtctttgtctgaa

SEQ ID NO: 830482 - DNA, 75 bp, synthetic construct
  source 1..75: mol_type = other DNA
ggaaatgaaacgcgaagggatttcagattttgagttatcaatagggcagtatgataacaatggatttgacagtca

SEQ ID NO: 830483 - DNA, 75 bp, synthetic construct
  source 1..75: mol_type = other DNA
gagtagaagtttctacaacacctaccttgaacgtgatatcagcgcactgcgtgcctccctgcgtatcggtgatgt

SEQ ID NO: 830484 - DNA, 75 bp, synthetic construct
  source 1..75: mol_type = other DNA
ctatggaacagataccgctaatactctgaatattacgaactcaaatattcacggtatgattacttccgatcagat

SEQ ID NO: 830485 - DNA, 75 bp, synthetic construct
  source 1..75: mol_type = other DNA
caaccgcctgacggcgcatctgacggtaataaggcaatcactgaaacagagcatgatgcggtgaaggcgatgttc

SEQ ID NO: 830486 - DNA, 75 bp, synthetic construct
  source 1..75: mol_type = other DNA
gcttcctggtgaaattcacattaaagaaagtggtaagcgagaatataagggccgggattccggcctttttatgca

SEQ ID NO: 830487 - DNA, 75 bp, synthetic construct
  source 1..75: mol_type = other DNA
gattccactggcaccgggtcatgcctacgggatgtttatggaacgttttaacgatttatcggagttacgcaaatg

SEQ ID NO: 830488 - DNA, 75 bp, synthetic construct
  source 1..75: mol_type = other DNA
atgggaattacgggagggatgtttgccgcaatggcgctgatttgctcttgtagtaatagggttatcccaccagtc

SEQ ID NO: 830489 - DNA, 75 bp, synthetic construct
  source 1..75: mol_type = other DNA
atgaatttggtcagcaacaggctgaaaacctgcgttcggcaggaaccgcccgcgtgatgatgatgctgggagatt

SEQ ID NO: 830490 - DNA, 75 bp, synthetic construct
  source 1..75: mol_type = other DNA
aggatctcgcggacttacgttttattaaacaacgtggcgtgaatgttttcattcaggacgtccctggcgatcaaa

SEQ ID NO: 830491 - DNA, 75 bp, synthetic construct
  source 1..75: mol_type = other DNA
ctggtaagcacaaatatttcccgggagccatatcgtatctgtattgcgtatactgatgtaacgttgatcctgtgc

SEQ ID NO: 830492 - DNA, 75 bp, synthetic construct
  source 1..75: mol_type = other DNA
atgccgcgcgacagactgcgtttttctcggcgtctgcacggtgttaagaaggttaaaaatcctgatgcacaacag

SEQ ID NO: 830493 - DNA, 75 bp, synthetic construct
  source 1..75: mol_type = other DNA
tggaacaacggttccctgaccctgccagtattgaaagtgaaaaagagaagaaagacttcgttaaactgtttggcg

SEQ ID NO: 830494 - DNA, 75 bp, synthetic construct
  source 1..75: mol_type = other DNA
ttgcaaaaaggcgaccgggtggtaattccgtttgtcattgcttgtggcgactgttttttctgtcgaatgcagtaa

SEQ ID NO: 830495 - DNA, 75 bp, synthetic construct
  source 1..75: mol_type = other DNA
tcaaggcaaagaaaaaatattaagcagaatctatattctaggcgccattgtccatttattatatgcctttccttt

SEQ ID NO: 830496 - DNA, 75 bp, synthetic construct
  source 1..75: mol_type = other DNA
accggccaggcggtcggattaggtgcaaatcaaaatgtgttccccgcgccagcggggataaaccgaatttgcatc

SEQ ID NO: 830497 - DNA, 75 bp, synthetic construct
  source 1..75: mol_type = other DNA
ccgcgcctgcggggataaaccgcgcggcaatggatgcgcaggtacgcgaattaagagttccccgcgcctgcgggg

SEQ ID NO: 830498 - DNA, 75 bp, synthetic construct
  source 1..75: mol_type = other DNA
atggccgttactttcttcagttgctttaatgatttcggttgtggcgacattttccacgcactccgtttccagaaa

SEQ ID NO: 830499 - DNA, 75 bp, synthetic construct
  source 1..75: mol_type = other DNA
attcctctaaatggctattatgatcagtctgatccagtagtaataaaaaaacaatcaaaattagcaagtgaatat

SEQ ID NO: 830500 - DNA, 75 bp, synthetic construct
  source 1..75: mol_type = other DNA
catgataaaaatcctggtgatgttattagcctgtatggcactttagataacattcctcttgtagttaaggaatgc

SEQ ID NO: 830501 - DNA, 75 bp, synthetic construct
  source 1..75: mol_type = other DNA
gcgtgtaggccaatactacgattgtgccggtgatatcgttcgcattaagtcgctggacttcgacagccagcgcgc

SEQ ID NO: 830502 - DNA, 75 bp, synthetic construct
  source 1..75: mol_type = other DNA
ctggagcagcacaaggtataggaagaaaaattgtggaggatttttctaaatcagaggtaaaaagagtatatgcat

SEQ ID NO: 830503 - DNA, 75 bp, synthetic construct
  source 1..75: mol_type = other DNA
aatgcccgtctgcccgcgcagggaaaagaccgcgcgccggtggcgctgaaaggggccgcgctcacgcgccgcccc

SEQ ID NO: 830504 - DNA, 75 bp, synthetic construct
  source 1..75: mol_type = other DNA
caaagctcgcatgggcaatcagtatcattttgttgttgatagcgctaatttacaccctgcattttatccctggct

SEQ ID NO: 830505 - DNA, 75 bp, synthetic construct
  source 1..75: mol_type = other DNA
accggggctggtgatgatggcatggatggtgttgccatcataattgatgaagaattgtgtatatcttctgaagat

SEQ ID NO: 830506 - DNA, 75 bp, synthetic construct
  source 1..75: mol_type = other DNA
tccagaaggctgttgatattgttttgtcaattgatgatatcactgatgatagaatgaaaaggcaagctattttag

SEQ ID NO: 830507 - DNA, 75 bp, synthetic construct
  source 1..75: mol_type = other DNA
tttactgaaacacatcgcgacatgatggaaatgtactgtcggcatgtggtgcaggcgagactgttaaccactcag

SEQ ID NO: 830508 - DNA, 75 bp, synthetic construct
  source 1..75: mol_type = other DNA
aggcgggattacgcaccgataccacgcccgcatcagttaaaaaagatagcagaaagcgaaaatgttaccttggaa

SEQ ID NO: 830509 - DNA, 75 bp, synthetic construct
  source 1..75: mol_type = other DNA
ttcctgccgatggaaaagaaccgattatcgaaagaatctttaggttagtagaacgatacccttcaagaaatgcgg

SEQ ID NO: 830510 - DNA, 75 bp, synthetic construct
  source 1..75: mol_type = other DNA
cgctggacttcgacagccagcgcgcagacgtggagatcatctttaccttcaaaggcaccaaatcgggtaactggg

SEQ ID NO: 830511 - DNA, 75 bp, synthetic construct
  source 1..75: mol_type = other DNA
tttaatgtttattccattgttgatttttatggaaatttcaagaagaggtgtattaataatagcatctaaatattt

SEQ ID NO: 830512 - DNA, 75 bp, synthetic construct
  source 1..75: mol_type = other DNA
gtgtgatcgattttgatgcggccaacctgactactgacggtctgcagttctcagccaaactgagaggcggtcaaa

SEQ ID NO: 830513 - DNA, 75 bp, synthetic construct
  source 1..75: mol_type = other DNA
ttctggatgagcacatccaagagttgcacgctctagttggagttcgtagagccatagcgttaagccttggtaatt

SEQ ID NO: 830514 - DNA, 75 bp, synthetic construct
  source 1..75: mol_type = other DNA
tgtcaacaaaccttccccgtggtattacggaggataagggccggactgccgttcctgcaggatttacctttggtg

SEQ ID NO: 830515 - DNA, 75 bp, synthetic construct
  source 1..75: mol_type = other DNA
ctggagaagctaagattttctaatataaaaattaagattgaactctatacccatttattcaaagcattacctgaa

SEQ ID NO: 830516 - DNA, 75 bp, synthetic construct
  source 1..75: mol_type = other DNA
ccattcgtctcccggcagaacgtaaagttcaggactatcgctcagcatacaatgatatccgggactggcagcgac

SEQ ID NO: 830517 - DNA, 75 bp, synthetic construct
  source 1..75: mol_type = other DNA
agttcttatgtgcagtttacaactgaccaacgtaagccctggtatatacaggcactgcgtcccgatggttcgcca

SEQ ID NO: 830518 - DNA, 75 bp, synthetic construct
  source 1..75: mol_type = other DNA
ttgtagtgagtatgccttcgcaactcttcactatggcgcgttcttttaaagcggttgccaatggcaaaatttata

SEQ ID NO: 830519 - DNA, 75 bp, synthetic construct
  source 1..75: mol_type = other DNA
gtaatacatgggaaatctcgaagttttgtccttaagtttcttgttgatatttttaatattttaaggatatttttc

SEQ ID NO: 830520 - DNA, 75 bp, synthetic construct
  source 1..75: mol_type = other DNA
tatttagccatttgattaaacgtcttccattatgtaatttcaaaactcaagactttgaaacaagattaatacttg

SEQ ID NO: 830521 - DNA, 75 bp, synthetic construct
  source 1..75: mol_type = other DNA
cgtctcaccacgctggaaagtgtctggattcagggaaaactgcgcatgtgggggcgctggtcgtcatcgtcttga

SEQ ID NO: 830522 - DNA, 75 bp, synthetic construct
  source 1..75: mol_type = other DNA
aatcaggtacaaacgtgccctatatgaaaattagcgcaattgattacagtcaaaatatcaacggtgattacaaag

SEQ ID NO: 830523 - DNA, 75 bp, synthetic construct
  source 1..75: mol_type = other DNA
aaaaaaaatctcatgcatattctggaggcaaaagataaaaatggttgttctggattatttttagcgatatcacgt

SEQ ID NO: 830524 - DNA, 75 bp, synthetic construct
  source 1..75: mol_type = other DNA
accttttttacagatatgatagcgtccgtttgatatactatgctaattttatattatacatattacttttgctgg

SEQ ID NO: 830525 - DNA, 75 bp, synthetic construct
  source 1..75: mol_type = other DNA
atggctattaatattaatggtattccgacttggtcttctcaaataggagtgttaggttacttttatttttaccaa

SEQ ID NO: 830526 - DNA, 75 bp, synthetic construct
  source 1..75: mol_type = other DNA
tgctggaatttggcggtattgagccaaacccggcttatgaaacgctgatgaacgccgtgaaactggttcgcgaat

SEQ ID NO: 830527 - DNA, 75 bp, synthetic construct
  source 1..75: mol_type = other DNA
aaaccctgaaaaccagattcaggtttatgtggagaacgaagatggctctcatgttcctgtttcgcaaccaatcat

SEQ ID NO: 830528 - DNA, 75 bp, synthetic construct
  source 1..75: mol_type = other DNA
acaaagggaagatacctgatcttaaaatagatcagaaaattagggatcaaatgccagaaagaggatggacagaag

SEQ ID NO: 830529 - DNA, 75 bp, synthetic construct
  source 1..75: mol_type = other DNA
accgcttatgttaataacgttcttgaacttggagacgtcagtgcccctacagaggatggggtaaaagtcggtaat

SEQ ID NO: 830530 - DNA, 75 bp, synthetic construct
  source 1..75: mol_type = other DNA
tcagtcaggatggtggtgtctatgatatggataatatcagagtgaccacacctaagcgacatattgatattcatc

SEQ ID NO: 830531 - DNA, 75 bp, synthetic construct
  source 1..75: mol_type = other DNA
tccccgcgccagcggggataaaccgggattctgcactctttgatgtaatggtactgcgagttccccgcgccagcg

SEQ ID NO: 830532 - DNA, 75 bp, synthetic construct
  source 1..75: mol_type = other DNA
gcggtaatctgtcagcagtagctgcgccagtggcatttggttttccggcactttccactccaggagctggcggtc

SEQ ID NO: 830533 - DNA, 75 bp, synthetic construct
  source 1..75: mol_type = other DNA
agccaggtaaagccacagggaaaggaaaaacagttggtgataaatggcttgatgatgcgggtaaagattcaggat

SEQ ID NO: 830534 - DNA, 75 bp, synthetic construct
  source 1..75: mol_type = other DNA
cgaagctgacctgcccgtctatcagcagcaggtggtgtttatctttgatgagtgtcaccgcagccagtttggtga

SEQ ID NO: 830535 - DNA, 75 bp, synthetic construct
  source 1..75: mol_type = other DNA
tcatgactatatgggcgatcagcatgagtggttaactatctggcagcatcacctgcaggacattattggttatcc

SEQ ID NO: 830536 - DNA, 75 bp, synthetic construct
  source 1..75: mol_type = other DNA
taaaaatggccagacactgaatgtgctgcaattatcgcagggtgaaaaatcactgatggcgttagtcggcgatat

SEQ ID NO: 830537 - DNA, 75 bp, synthetic construct
  source 1..75: mol_type = other DNA
gtgacagacattaccaggaatgcgacttacccggtactgatagacagcattgtggtggaagtgaacagcacagac

SEQ ID NO: 830538 - DNA, 75 bp, synthetic construct
  source 1..75: mol_type = other DNA
actaaatcagtaagttggcatcatcaccgacaggctggagccagtgtttcagggggcattgtcgcctggtcgggt

SEQ ID NO: 830539 - DNA, 75 bp, synthetic construct
  source 1..75: mol_type = other DNA
cgccccttatcgcggcgcggttgtactggttaattttgataccgatcagcgcaagccctggtttataaaagcgtt

SEQ ID NO: 830540 - DNA, 75 bp, synthetic construct
  source 1..75: mol_type = other DNA
atcccatgcgtattcaggaaatcacgcaatatattctgaataatttccgccagaaaacccaccgtaccttccctg

SEQ ID NO: 830541 - DNA, 75 bp, synthetic construct
  source 1..75: mol_type = other DNA
taaaagcctttcgacgggcgctggagcttgccgccggtgagcgggctgacgagtgccgtcggtttcctcgctggg

SEQ ID NO: 830542 - DNA, 75 bp, synthetic construct
  source 1..75: mol_type = other DNA
aacgccgccttgagcgccagtggtgcagcgtcctcggcaacggcggcaggcaattccgcgaaggcggcaaaaacg

SEQ ID NO: 830543 - DNA, 75 bp, synthetic construct
  source 1..75: mol_type = other DNA
ctatttttagggagaataaaactatctttgctgatgcccctagagatggaattcctgtagcattaattggctact

SEQ ID NO: 830544 - DNA, 75 bp, synthetic construct
  source 1..75: mol_type = other DNA
gataagattttgataccagcaaaacctgattatttgtcaacgctaggtattgattatttaaaaagaagcgtagat

SEQ ID NO: 830545 - DNA, 75 bp, synthetic construct
  source 1..75: mol_type = other DNA
gaacaaaatgccattggtgaaatttccgatgaaacttttgataccagcgcaatggacagcagtgctaaagagttt

SEQ ID NO: 830546 - DNA, 75 bp, synthetic construct
  source 1..75: mol_type = other DNA
gctgggtcaggacgcacaagggccaacggcggtactgaagtcagtcagtaagctcgataatacgctgctgtctaa

SEQ ID NO: 830547 - DNA, 75 bp, synthetic construct
  source 1..75: mol_type = other DNA
gccggtgatgtgacgccggtaagcgaagctgaacccgcccctgaacttagcgttcccactcaaccgctgccggag

SEQ ID NO: 830548 - DNA, 75 bp, synthetic construct
  source 1..75: mol_type = other DNA
ccattcccggtgggctactggatcattcgctggaagttgcctgcaacgccatccgactgcgccagggttatctgc

SEQ ID NO: 830549 - DNA, 75 bp, synthetic construct
  source 1..75: mol_type = other DNA
tcaaatgccacaccggggcggtatacggtcagcgctgactgcgaaattataccggaagtacagtttacaggtgtg

SEQ ID NO: 830550 - DNA, 75 bp, synthetic construct
  source 1..75: mol_type = other DNA
taagcctgccatgtcgaccaatgatgagatgctggaattacatgccgtccttgccggagaagttattgctcaggt

SEQ ID NO: 830551 - DNA, 75 bp, synthetic construct
  source 1..75: mol_type = other DNA
tgagcgcctgggcagtagaaagggctttgttttttcctcagaagaactgagacaggcacatattgaaggtattgc

SEQ ID NO: 830552 - DNA, 75 bp, synthetic construct
  source 1..75: mol_type = other DNA
tttataaagttgttttgaaaaatagaaatgcaactaataaccattttgatttgcctgctagtgaaattgttacag

SEQ ID NO: 830553 - DNA, 75 bp, synthetic construct
  source 1..75: mol_type = other DNA
atctacaggtcaccttcagtaccaaccccgcagatactcaacttagtcagagcaaaagcaatactaacgacagtg

SEQ ID NO: 830554 - DNA, 75 bp, synthetic construct
  source 1..75: mol_type = other DNA
ttgacttttaaagttgattatatcgctacggggaaagcgacttcaggtaatgtgaatgcgggtgatgctgccaac

SEQ ID NO: 830555 - DNA, 75 bp, synthetic construct
  source 1..75: mol_type = other DNA
aatgatggtacaacggccatcacgccagacacagaaaccgggaacattttgttgcaggatggagatcagacgttg

SEQ ID NO: 830556 - DNA, 75 bp, synthetic construct
  source 1..75: mol_type = other DNA
aggtgacttcgttaaagctgtatccaaatcattcccgaaacaggctggtacgtggggtaatacggaaacaccaaa

SEQ ID NO: 830557 - DNA, 75 bp, synthetic construct
  source 1..75: mol_type = other DNA
agccggagccaaaggtgccccggggccaaaaggggacaaaggcgaacccggagcaacaggtcccgcggggccgca

SEQ ID NO: 830558 - DNA, 75 bp, synthetic construct
  source 1..75: mol_type = other DNA
gtgagcgcggtgaacccggacctcaggggcctgcagaaaggtgagcagggcctccgtgggctgcagggggcgaca

SEQ ID NO: 830559 - DNA, 75 bp, synthetic construct
  source 1..75: mol_type = other DNA
aaaaaatacttgttgattgtagaatgattaatgcctctggaataggtgtttatactcgtgaaattatcaaagagt

SEQ ID NO: 830560 - DNA, 75 bp, synthetic construct
  source 1..75: mol_type = other DNA
ttgaagcgatctcgctctttgatgaaagcacgtacagcgattttgaaagattttccgagccaatgcctgacacaa

SEQ ID NO: 830561 - DNA, 75 bp, synthetic construct
  source 1..75: mol_type = other DNA
ttcttatctcaggcattgcatcactgccgttaacaacaacagcatcgcaatttcagactgatactgcacaggtag

SEQ ID NO: 830562 - DNA, 75 bp, synthetic construct
  source 1..75: mol_type = other DNA
ggatattcgtcgggtaccgcggcgcgcaacctgcgcatgttggcctggtactgaaccggcaggcgctgcactcgc

SEQ ID NO: 830563 - DNA, 75 bp, synthetic construct
  source 1..75: mol_type = other DNA
attatgaggcaacgctcgcggaatatgcctctctggcggaacagaaagacaacgcggtaagcgcaccggtttatg

SEQ ID NO: 830564 - DNA, 75 bp, synthetic construct
  source 1..75: mol_type = other DNA
attcgccttcttaacgaaggatgcacatttttgccatataggaaaataatttccgtattctcgtgggatggtgtg

SEQ ID NO: 830565 - DNA, 75 bp, synthetic construct
  source 1..75: mol_type = other DNA
gcgccacaatccgcagaacagttgctggcgacaccgttacgccagtcctgtttgcaccagttacggcaactgacc

SEQ ID NO: 830566 - DNA, 75 bp, synthetic construct
  source 1..75: mol_type = other DNA
taacaattacagaaatcgcttaggtgatttggttttattacctagaggctcaaaccagtcatatggtgatttgtg

SEQ ID NO: 830567 - DNA, 75 bp, synthetic construct
  source 1..75: mol_type = other DNA
aggattgaatcttactccgtccgaaatgcttaaaggttttttactttcacgctttcatcagggagataaacgcca

SEQ ID NO: 830568 - DNA, 75 bp, synthetic construct
  source 1..75: mol_type = other DNA
ttcgtttaccagaggttctcaatcgaaccggttatggtaaagcctggatctatcacctaatcagcaaaggatgtt

SEQ ID NO: 830569 - DNA, 75 bp, synthetic construct
  source 1..75: mol_type = other DNA
ttgaacagtgtgaactggtgatcaaagcggcgcgtaaggcgctggcggccatgcgagtaagtgtcgaagaagcgt

SEQ ID NO: 830570 - DNA, 75 bp, synthetic construct
  source 1..75: mol_type = other DNA
aaggtggcgtaattctgccgccgccgggctatctcaccgccgtacgtaagctatgcgatgagttcggcgcactga

SEQ ID NO: 830571 - DNA, 75 bp, synthetic construct
  source 1..75: mol_type = other DNA
ataaagatgaagaccaacgttttttccagtcatggttgcgtgctcaatatgctgatacaatacgcccgggtaaag

SEQ ID NO: 830572 - DNA, 75 bp, synthetic construct
  source 1..75: mol_type = other DNA
gatggttggatttgcccctatatttccagacacctgttatcacttaacccattactggcctgctgccgcagatat

SEQ ID NO: 830573 - DNA, 75 bp, synthetic construct
  source 1..75: mol_type = other DNA
tttgttgtcttatagaaggttaatgatcggtgatcaccgtcaattaccaccataccgttccattgaactaaaaaa

SEQ ID NO: 830574 - DNA, 75 bp, synthetic construct
  source 1..75: mol_type = other DNA
acggcctggaaaaacgctttccgggcatggacaagcccgccgtcgcgccgctcgattgcaccattcatgccggtt

SEQ ID NO: 830575 - DNA, 75 bp, synthetic construct
  source 1..75: mol_type = other DNA
aagaactccaacccaacaaaaaaaataaagttggcaattctttctccatactcaaatcaagttaaattaatttca

SEQ ID NO: 830576 - DNA, 75 bp, synthetic construct
  source 1..75: mol_type = other DNA
gcaataaacactaagtatgaacaatctgataataccaaagataaaaaagagctatttcactgcatacaaaaaata

SEQ ID NO: 830577 - DNA, 75 bp, synthetic construct
  source 1..75: mol_type = other DNA
attatgagattatagaaagaaatctactaaaaacagaatcaaatagaaatattcctgaagtaattcttaccctta

SEQ ID NO: 830578 - DNA, 75 bp, synthetic construct
  source 1..75: mol_type = other DNA
tttcttatgaaaaatataaaacagctaacaatgtgtatttcaatatcattggtacgttaagtgacagtgaattaa

SEQ ID NO: 830579 - DNA, 75 bp, synthetic construct
  source 1..75: mol_type = other DNA
gatgcagttagtacaagttcgatgttctacgataatgaattcgaagatttaacacaaaacgattgtattataggt

SEQ ID NO: 830580 - DNA, 75 bp, synthetic construct
  source 1..75: mol_type = other DNA
attccgtgatgaaatattaccttcaaactattttgttacagatcgttttgtggatatttttcagaattattttcg

SEQ ID NO: 830581 - DNA, 75 bp, synthetic construct
  source 1..75: mol_type = other DNA
gatttttattatgcaaacgtggtaggaaaaataccagccttacattataacaacagacaagagctacaaattatg

SEQ ID NO: 830582 - DNA, 75 bp, synthetic construct
  source 1..75: mol_type = other DNA
aaagtctaggatgtccagcaggggtgattggtttggacttggctggtaatgaagatataaaccaccacctgagac

SEQ ID NO: 830583 - DNA, 75 bp, synthetic construct
  source 1..75: mol_type = other DNA
gatttatctattatgattgagagtgcatttttaaatctaattgctgagaatattaagtttgttgaattaagaaat

SEQ ID NO: 830584 - DNA, 75 bp, synthetic construct
  source 1..75: mol_type = other DNA
aagcgtttttcgccagacagcgtcaacggctccgaaaataccgcaggtcttaaacgcaatctggataaggacgat

SEQ ID NO: 830585 - DNA, 75 bp, synthetic construct
  source 1..75: mol_type = other DNA
gaagctcgatgctaccctttcaagacgtaatgttcagagcctccagattcaatcggatgacgcggaccaactaaa

SEQ ID NO: 830586 - DNA, 75 bp, synthetic construct
  source 1..75: mol_type = other DNA
gacgtcgaaagactcttccagccaagtcctttcttcttgtaattaataaggcgtctaatgacgccttattatttc

SEQ ID NO: 830587 - DNA, 75 bp, synthetic construct
  source 1..75: mol_type = other DNA
gcaaggcgatcacgtaattatgttcctcacagataaaaagtttattaccgacgtcgaaagactcttccagccaag

SEQ ID NO: 830588 - DNA, 75 bp, synthetic construct
  source 1..75: mol_type = other DNA
caacatggacgaaatcaaagaactgatcaaactgtccggcagcgtaaccgtgggtgaaaccccggttatccgcat

SEQ ID NO: 830589 - DNA, 75 bp, synthetic construct
  source 1..75: mol_type = other DNA
gccctggctgaacttcagcctcagctttgaccgctcctatatgagctttgaagcggcacgtatggggctggggtt

SEQ ID NO: 830590 - DNA, 75 bp, synthetic construct
  source 1..75: mol_type = other DNA
aattacgtatgggggaatggtgtgagatcgattttacccaaaagatatgggaagttcctccgacccggatgaaaa

SEQ ID NO: 830591 - DNA, 75 bp, synthetic construct
  source 1..75: mol_type = other DNA
ggctgaactgctggcctgtggtcttgaagcctggcgggtacctttcccggccgggatggatgcgaatgaatatgc

SEQ ID NO: 830592 - DNA, 75 bp, synthetic construct
  source 1..75: mol_type = other DNA
cggtggtattcgttcttggggggcaagtagaggtttatgtgcgccgcatcatttaagaggtgagtggtattttat

SEQ ID NO: 830593 - DNA, 75 bp, synthetic construct
  source 1..75: mol_type = other DNA
gcgtagtacgctacaaccaacagggtggatataacgttccctttgggcgtcacaaaaccccgccttacttcccgg

SEQ ID NO: 830594 - DNA, 75 bp, synthetic construct
  source 1..75: mol_type = other DNA
ttagtttggggcttattgctctggcggtgggtaatgcatatgctggacagtttattcagcatgaagataaggagc

SEQ ID NO: 830595 - DNA, 75 bp, synthetic construct
  source 1..75: mol_type = other DNA
ggtgggtaatgcatatgctgaacagtttattcagtacgatgaatataaacatgctgtggcaataaaagatggaga

SEQ ID NO: 830596 - DNA, 75 bp, synthetic construct
  source 1..75: mol_type = other DNA
agagcctgtattacctgggggaaacctcacttcagcataaaatcctcgccatcgctgaagaggaaggcgtccggc

SEQ ID NO: 830597 - DNA, 75 bp, synthetic construct
  source 1..75: mol_type = other DNA
cggcggcggttgccctgattgtggcgccgtgatgggtgatgcgacttacaacgcgatggttgcggcgggcacgtc

SEQ ID NO: 830598 - DNA, 75 bp, synthetic construct
  source 1..75: mol_type = other DNA
ccagcaaccgccagaatgctaaagaggtgatcggcgttctcaaggtatgcgaagggtgcgggcgcgcgggcggag

SEQ ID NO: 830599 - DNA, 75 bp, synthetic construct
  source 1..75: mol_type = other DNA
gtgacgggctacgattattttgtcgaaaactatttcccgcactacgtccgcaacccggcaaaaagtgagctgcat

SEQ ID NO: 830600 - DNA, 75 bp, synthetic construct
  source 1..75: mol_type = other DNA
ttctgtcagcgcgaacgccattacccgaggggccgccagtgaggtgatcggtattctcaaggttgcgacttctac

SEQ ID NO: 830601 - DNA, 75 bp, synthetic construct
  source 1..75: mol_type = other DNA
acggtaaaaagcggtgggttgcgttatggcgtagaaatggcgtgcatcatgcgcgctgctcaattcctgtatctg

SEQ ID NO: 830602 - DNA, 75 bp, synthetic construct
  source 1..75: mol_type = other DNA
tggcggcggttgccctgattgtggcgccgtgatgggtgatgcgacttacaacgcgatggttgcggcgggcgagtt

SEQ ID NO: 830603 - DNA, 75 bp, synthetic construct
  source 1..75: mol_type = other DNA
cataactggtgttctcggtgtttctgtgactggcggcaatatcgcgctccgggctggaaaacaacccatcaaaaa

SEQ ID NO: 830604 - DNA, 75 bp, synthetic construct
  source 1..75: mol_type = other DNA
gtccggactgggcagagcgcctgaaaaagggactgtcgattattccggctccgatttatccggaccaggctgcac

SEQ ID NO: 830605 - DNA, 75 bp, synthetic construct
  source 1..75: mol_type = other DNA
aggcggcggcagttccggtggtggttcaggttctggctccggtggttcatccggtagcggtggctccggctcggg

SEQ ID NO: 830606 - DNA, 75 bp, synthetic construct
  source 1..75: mol_type = other DNA
tcagcgtcgtttatggccgcgcattgagcgcgtgaatcagcgccatgaaatgaacaccgacgcgtcgttactgtt

SEQ ID NO: 830607 - DNA, 75 bp, synthetic construct
  source 1..75: mol_type = other DNA
atggcgctgtctgatgcgtggttgcgttcagtcgttggaaagaaacgtgataaggttttggttaaatccgatcgt

SEQ ID NO: 830608 - DNA, 75 bp, synthetic construct
  source 1..75: mol_type = other DNA
tgcggcagaacgcgcgctggaagccgacagcatcctgtgcgcctgtgttcactgcggattttgtaccgcaacctg

SEQ ID NO: 830609 - DNA, 75 bp, synthetic construct
  source 1..75: mol_type = other DNA
aaattaataatctcttcattaaaaaaagcaacatatttggagcatcattcactaataccagaataaaaaaatttg

SEQ ID NO: 830610 - DNA, 75 bp, synthetic construct
  source 1..75: mol_type = other DNA
aatatatgggattactcacagggtaaaggccctggaaaagcggtgaagcaagtcataccttttgaaggcaatgaa

SEQ ID NO: 830611 - DNA, 75 bp, synthetic construct
  source 1..75: mol_type = other DNA
gatccgcgatgtgcacgcgcgccgactggctaatctcgaatacctgaaatcctgcgagttggaaaacaaagtcac

SEQ ID NO: 830612 - DNA, 75 bp, synthetic construct
  source 1..75: mol_type = other DNA
ttctgaaaaccccggaggattttaaattctacgtaggatcaatgagttacatagcagtgcattgcgaaactttgc

SEQ ID NO: 830613 - DNA, 75 bp, synthetic construct
  source 1..75: mol_type = other DNA
gctcaggggcgcattaaaacacgggctgagaacaccaaatcgtcagcagagaaacggaagcccgttaaaaacaca

SEQ ID NO: 830614 - DNA, 75 bp, synthetic construct
  source 1..75: mol_type = other DNA
attgaggttagttcaggcgattatttaggtgaggatgatattgtacggcaaaaagaacgctacagaatagatgac

SEQ ID NO: 830615 - DNA, 75 bp, synthetic construct
  source 1..75: mol_type = other DNA
gaatcaattgattttgcggttatggaaaaaacaaaaaattgcattgttcgtccagtagacatcgggtggagtgat

SEQ ID NO: 830616 - DNA, 75 bp, synthetic construct
  source 1..75: mol_type = other DNA
ataactctcatatcattttgagtgcccgaactgtatattcacacactaatccgtggttaataaagactaatttta

SEQ ID NO: 830617 - DNA, 75 bp, synthetic construct
  source 1..75: mol_type = other DNA
gtattctctcaggaacaggacggcattaaatcgcatacccacagcgccagcgcatccagtaccgatttggggacg

SEQ ID NO: 830618 - DNA, 75 bp, synthetic construct
  source 1..75: mol_type = other DNA
gtattttctcaggaacaggacggcattaaatcgcaaacccacagcgccagcgcatccagtacggatttggggacg

SEQ ID NO: 830619 - DNA, 75 bp, synthetic construct
  source 1..75: mol_type = other DNA
gtattatctcaggaacaggacggcattaaatcgcacacccacagcgccagcgcatccagtactgatttggggacg

SEQ ID NO: 830620 - DNA, 75 bp, synthetic construct
  source 1..75: mol_type = other DNA
caggaaaaaattgagcggttcaggcgtgaaatagaaataattcaacttcataatattacaggcgtagtgcctgtt

SEQ ID NO: 830621 - DNA, 75 bp, synthetic construct
  source 1..75: mol_type = other DNA
tcccgcatatctaatgaggtgcagttagaaatcgatgaggctataaaaaacattctaagaaaactgcctgaatag

SEQ ID NO: 830622 - DNA, 75 bp, synthetic construct
  source 1..75: mol_type = other DNA
catgaagaagaaattaagcgaatggcagccgccgcagcagcccgagaagttgagcagcgcgcacagcgtgaacgt

SEQ ID NO: 830623 - DNA, 75 bp, synthetic construct
  source 1..75: mol_type = other DNA
ttttttcaacagtagcatatgcaaaattcagcaattttaagttacataataacgaggcatctataaaatcatttc

SEQ ID NO: 830624 - DNA, 75 bp, synthetic construct
  source 1..75: mol_type = other DNA
tggtgatgcgaccgtaccagattgccgccaccgagcgcattctgtggaaaattaagagttcctttacagcgaaga

SEQ ID NO: 830625 - DNA, 75 bp, synthetic construct
  source 1..75: mol_type = other DNA
aacataaagcagaacttgaaagaataaaatctgaatctcaatacaatacgagcgagttaaaagaaaaacttgaac

SEQ ID NO: 830626 - DNA, 75 bp, synthetic construct
  source 1..75: mol_type = other DNA
gggcaagcctgccagtggtcgggccgtattatctcaggaacaggacggcattaaatcgcatacccacagcgccag

SEQ ID NO: 830627 - DNA, 75 bp, synthetic construct
  source 1..75: mol_type = other DNA
gggcaatcctgccagtggtcgggccgtattttctcaggaacaggacggcattaaatcgcatacccacagcgccag

SEQ ID NO: 830628 - DNA, 75 bp, synthetic construct
  source 1..75: mol_type = other DNA
gggcaaacctgccagtggtcgggccgtattgtctcaggaacaggacggcattaaatcgcatacccacagcgccag

SEQ ID NO: 830629 - DNA, 75 bp, synthetic construct
  source 1..75: mol_type = other DNA
tatgccattagctacttcatttgaagatttcactaaagatataacaatacagaaaattgctaaagaatttctagg

SEQ ID NO: 830630 - DNA, 75 bp, synthetic construct
  source 1..75: mol_type = other DNA
caccatcaccaactcgtaagagacgacgcaaaaatatagcgcatgaacatgaatcagaaagattcgcaccttgtt

SEQ ID NO: 830631 - DNA, 75 bp, synthetic construct
  source 1..75: mol_type = other DNA
gacgtcaccgcaagcctgagcgccctttttgcgatgttgccgggttttgacaatacgcccaaagtgactgatgca

SEQ ID NO: 830632 - DNA, 75 bp, synthetic construct
  source 1..75: mol_type = other DNA
cgtacgcgccgccctggaagcagcgctgccggtactgcgtacgcagctggccgaaagtggcattcagttagggca

SEQ ID NO: 830633 - DNA, 75 bp, synthetic construct
  source 1..75: mol_type = other DNA
attgatattaatgaaaatgattttatagttaaaaatggaactagatttccatatagttacccaatcataagtaaa

SEQ ID NO: 830634 - DNA, 75 bp, synthetic construct
  source 1..75: mol_type = other DNA
taggtaaaatatcgttagaaaactcaaaaaaactttcagcatatgagggggttttcgttactggggctgtagata

SEQ ID NO: 830635 - DNA, 75 bp, synthetic construct
  source 1..75: mol_type = other DNA
tcccaaatttaaaaaaataattaataagttagttcctgaacatgatttattattacctcatttaattcgtgttgc

SEQ ID NO: 830636 - DNA, 75 bp, synthetic construct
  source 1..75: mol_type = other DNA
gatgtaccaattgccttagaaggctgtgatgttactgtaactaaaaatgcgacgtttacctttagtggtacggct

SEQ ID NO: 830637 - DNA, 75 bp, synthetic construct
  source 1..75: mol_type = other DNA
catagacctcatttagagattaagctaaaagaaaattcagttgtaacaatacatcatgacttgtatgatacagat

SEQ ID NO: 830638 - DNA, 75 bp, synthetic construct
  source 1..75: mol_type = other DNA
aaaataaagtttgcattggttttatttcaaagagatatgggcgaaaggttaaaggagaagcttatctttatgaaa

SEQ ID NO: 830639 - DNA, 75 bp, synthetic construct
  source 1..75: mol_type = other DNA
gacatgatcaccgaagatatcgacatcagttggaagctgcagttgcgccactggtcggtattctttgaaccgcgg

SEQ ID NO: 830640 - DNA, 75 bp, synthetic construct
  source 1..75: mol_type = other DNA
atctgttcccgccagcctttaccggacttattctcggcgtggtctgcttaatacagtttgcgataagcctgatga

SEQ ID NO: 830641 - DNA, 75 bp, synthetic construct
  source 1..75: mol_type = other DNA
ctggactgctattttgaggtttttggtgtcagcaacggccgcacagttatggcgtgctcttctgccgggttctat

SEQ ID NO: 830642 - DNA, 75 bp, synthetic construct
  source 1..75: mol_type = other DNA
gcgagtgcggagttggcacttgatggaggggaaggtattgaatctccaatagaaggcgataactggcttgcaatt

SEQ ID NO: 830643 - DNA, 75 bp, synthetic construct
  source 1..75: mol_type = other DNA
gtctgatgggaagtgtaatggtcgatgacaatcggatctcacaatcacagcctggtagttccggccagaaaacgg

SEQ ID NO: 830644 - DNA, 75 bp, synthetic construct
  source 1..75: mol_type = other DNA
atggtatccatacagaatacatcacagatcaaaaacacagtaataataaagatcgtgaaaaaaaaataccgcgat

SEQ ID NO: 830645 - DNA, 75 bp, synthetic construct
  source 1..75: mol_type = other DNA
taaaggtgccgcaggtggtcatacggcaacgcatcatgcctccgccgctcctgcgcgtccgcaacctgttgagta

SEQ ID NO: 830646 - DNA, 75 bp, synthetic construct
  source 1..75: mol_type = other DNA
aatggggcaacagtattgctctccggttaaccggaaatctgaaaaccgtgccgggtttttcggcaggagatgtgg

SEQ ID NO: 830647 - DNA, 75 bp, synthetic construct
  source 1..75: mol_type = other DNA
aaacaacagcgacttcacaatgaacaataccactggaacatccagcgaactggcaaaaaccacgcttgataattc

SEQ ID NO: 830648 - DNA, 75 bp, synthetic construct
  source 1..75: mol_type = other DNA
cattaatgctttccctcattgaagactcgctcgccgttggtacatcgcgtctttcccgagaaaacaacagcgact

SEQ ID NO: 830649 - DNA, 75 bp, synthetic construct
  source 1..75: mol_type = other DNA
acccgataattctgcttcgaatttagacagtttcttaaagaaaaacaaaaaaaataaagaaatgagtgagattgt

SEQ ID NO: 830650 - DNA, 75 bp, synthetic construct
  source 1..75: mol_type = other DNA
ggagcgagttcgatttagccaatggcatttggtacttgccgggcgagcgtacaaagacgggcgacgggattgata

SEQ ID NO: 830651 - DNA, 75 bp, synthetic construct
  source 1..75: mol_type = other DNA
agtactttcaacgcaaacttctatcctcaaggtcatgacagtaatgccgatggcgtactggacaccaatggtggc

SEQ ID NO: 830652 - DNA, 75 bp, synthetic construct
  source 1..75: mol_type = other DNA
gagtggccgattatgccgaccgaatgggtacatactctgctgaaaccatggaacttctttgacgaaacgccaacg

SEQ ID NO: 830653 - DNA, 75 bp, synthetic construct
  source 1..75: mol_type = other DNA
gtgaaaggtgttaaagcgaaaaccatgcacgatgagacggcgaaagatgacacgcgctacggcacgcttatcgat

SEQ ID NO: 830654 - DNA, 75 bp, synthetic construct
  source 1..75: mol_type = other DNA
ctggaaagtagtgaagggatacgactaaaaccatcagacacgattgtctccgacagactccatgaagcccaacac

SEQ ID NO: 830655 - DNA, 75 bp, synthetic construct
  source 1..75: mol_type = other DNA
tattgacgggatgaaggcttttggttcctggattgagaaacatcatggcgacatcattggctttttcaatgacgc

SEQ ID NO: 830656 - DNA, 75 bp, synthetic construct
  source 1..75: mol_type = other DNA
aggtttttcttaaattaaataaccctcaatctttggctataatatacttaataccttttggatacttggttgtag

SEQ ID NO: 830657 - DNA, 75 bp, synthetic construct
  source 1..75: mol_type = other DNA
aaataaattctcggagttaagactaactcttgtagataaaaacatctcgaatataaataataaaggcacttcaac

SEQ ID NO: 830658 - DNA, 75 bp, synthetic construct
  source 1..75: mol_type = other DNA
atgattttgatatcaaaaaaaaacgagagtgagatttatgatgaaaatgacgaacagatgattaatagttttgaa

SEQ ID NO: 830659 - DNA, 75 bp, synthetic construct
  source 1..75: mol_type = other DNA
aaaagaccgttggccggtcagcagacccgattgatcgagattccgacctttggcaggtatggtgcatttgatgaa

SEQ ID NO: 830660 - DNA, 75 bp, synthetic construct
  source 1..75: mol_type = other DNA
gattggagtgtctggaccgggaccgatggctgcgtgttggtagttggatccgggtgtcggccagaacacgggacg

SEQ ID NO: 830661 - DNA, 75 bp, synthetic construct
  source 1..75: mol_type = other DNA
gaagtttaagcttaacattgcttatggaatagatccagaaaaccttaattactcgacattagcttatgctttcat

SEQ ID NO: 830662 - DNA, 75 bp, synthetic construct
  source 1..75: mol_type = other DNA
gaagctcgccttgagcgagatatattaaaaaaagcaacagtgtattttgcacaggagtcgctgaaaaatacgcgt

SEQ ID NO: 830663 - DNA, 75 bp, synthetic construct
  source 1..75: mol_type = other DNA
ccgctgtttcagctttccgcaacgtgacaacagcagccgctggatttttgggaattggcgccgggttgtatggaa

SEQ ID NO: 830664 - DNA, 75 bp, synthetic construct
  source 1..75: mol_type = other DNA
tgcctgatacagctagagagttaggcctgaaagttggtgatggaattgatgagagacttgatgaagaaaaatccc

SEQ ID NO: 830665 - DNA, 75 bp, synthetic construct
  source 1..75: mol_type = other DNA
atgcgttcatgtcgcatccgcctactgtacccaaaatgtcggatgcgatgctggcgcgtcttacccgacctacgg

SEQ ID NO: 830666 - DNA, 75 bp, synthetic construct
  source 1..75: mol_type = other DNA
gtaggcggcattatgaatacctcggtggcgttgttgcagtcctcacaggtagggctgcataaatcactgatggtg

SEQ ID NO: 830667 - DNA, 75 bp, synthetic construct
  source 1..75: mol_type = other DNA
ataacccgtcaaaccaggaaagttcatgctggatccgtgtggcacaggcgtgggcaggcaccggctttggtaacc

SEQ ID NO: 830668 - DNA, 75 bp, synthetic construct
  source 1..75: mol_type = other DNA
tcagggtaataccgtaaacaatacttacactactgaatctcatacttgggataacaatatctcagttaccgattc

SEQ ID NO: 830669 - DNA, 75 bp, synthetic construct
  source 1..75: mol_type = other DNA
ttctcctggcagaagaaatgctggcctaccttcggcaaaacaaggttatgtttcctgcgattgatgttgtggaac

SEQ ID NO: 830670 - DNA, 75 bp, synthetic construct
  source 1..75: mol_type = other DNA
acagccttaatgttggaggctttatatggcgcaggtgctaatatattggggcatgtaacacccggtagtttgtat

SEQ ID NO: 830671 - DNA, 75 bp, synthetic construct
  source 1..75: mol_type = other DNA
caggtaccggagaaaacaatcacaggcaaaaatccgggagccgcagctgcccgacataatctggctactgttctg

SEQ ID NO: 830672 - DNA, 75 bp, synthetic construct
  source 1..75: mol_type = other DNA
aatccggcacgcataccgcgatgaacggtacgcagatgccgttcacagcggcggagctggccgcctgtgcagccg

SEQ ID NO: 830673 - DNA, 75 bp, synthetic construct
  source 1..75: mol_type = other DNA
tctcggtgcgcagccgcctgccgtgaaaggactgaaagcggtggagttcagcgagcaggaggaaggcgtggttga

SEQ ID NO: 830674 - DNA, 75 bp, synthetic construct
  source 1..75: mol_type = other DNA
ctggaagatgccagagctacgctgacagatgaaattattgagttgcatgaacgaatattgaatagtctgttcaac

SEQ ID NO: 830675 - DNA, 75 bp, synthetic construct
  source 1..75: mol_type = other DNA
ctggcacgaatcctagctgaggatgttcaagctccacgtggtgcggcatgtatcacatatagccaagaatgcgca

SEQ ID NO: 830676 - DNA, 75 bp, synthetic construct
  source 1..75: mol_type = other DNA
acggtttcactggtgccgatggtgcgttacttctagaactggcagacaggagagacgttgaaacagttcggctcc

SEQ ID NO: 830677 - DNA, 75 bp, synthetic construct
  source 1..75: mol_type = other DNA
acgctttctgatcaggctgagcaactagatcgcatgactgcagcacttgccgaaggcggtgcgttagcgatgttg

SEQ ID NO: 830678 - DNA, 75 bp, synthetic construct
  source 1..75: mol_type = other DNA
agagaaattgttgataatggtgtaaatggatatttatttgaaacaggcaactaccatgagttggctaaaatatta

SEQ ID NO: 830679 - DNA, 75 bp, synthetic construct
  source 1..75: mol_type = other DNA
ctacaaagaaggagagggatgaatacaaaaaaaaacagcaagaaagaattggcaaatacgtcgttggtggaacag

SEQ ID NO: 830680 - DNA, 75 bp, synthetic construct
  source 1..75: mol_type = other DNA
gttgtaaagtttaaacgtgcatcgaaagcaacctatattaacaaatctggtgtgctgacagaggctgccattgac

SEQ ID NO: 830681 - DNA, 75 bp, synthetic construct
  source 1..75: mol_type = other DNA
atgcctgatgttatgcataccttatattattgccttgccggaatcttcagcgttttatcttttgcaaccattatt

SEQ ID NO: 830682 - DNA, 75 bp, synthetic construct
  source 1..75: mol_type = other DNA
tcggccttatcacccaggcggagaagcgcgatttcattgccaccatcccacgcctgatgctccaggttttcagct

SEQ ID NO: 830683 - DNA, 75 bp, synthetic construct
  source 1..75: mol_type = other DNA
cgggcgctatccacaccacgcaggtcagtaacccgtccccgaccgaattcatcctgccgctggcgctattctcac

SEQ ID NO: 830684 - DNA, 75 bp, synthetic construct
  source 1..75: mol_type = other DNA
cctgctgaagcaaaaaaatcgtcggctggaccaggccttcgccagcctgtcgggcgctatccacaccacgcaggt

SEQ ID NO: 830685 - DNA, 75 bp, synthetic construct
  source 1..75: mol_type = other DNA
ggtaactctgcggaacctagtgattactctggtaacggcgaagctaatgatgtgaaccgccccggaaatcctgga

SEQ ID NO: 830686 - DNA, 75 bp, synthetic construct
  source 1..75: mol_type = other DNA
gactattaactcctacagtactgttgcgttgaccgaatctactgggtgggggctgattgatcctacccacgtaat

SEQ ID NO: 830687 - DNA, 75 bp, synthetic construct
  source 1..75: mol_type = other DNA
ccgcggcaaaataaagaattatgctgcggcgggtaaagttcagcagggccggctggtggtcaacggtgccagtat

SEQ ID NO: 830688 - DNA, 75 bp, synthetic construct
  source 1..75: mol_type = other DNA
attcaatagccttcccttccccggaaggcgcattacgtgagcctaacggcctgctggctctgggggcgatcttag

SEQ ID NO: 830689 - DNA, 75 bp, synthetic construct
  source 1..75: mol_type = other DNA
gatgttaccgggtgtggacaccagagcaggtgcattactggttattttcctggtcgccactaccgagcttaacga

SEQ ID NO: 830690 - DNA, 75 bp, synthetic construct
  source 1..75: mol_type = other DNA
accttgtaccattggctgataagtataaagaatccctcctacctctgattgaagagattaagacgaaccttcaag

SEQ ID NO: 830691 - DNA, 75 bp, synthetic construct
  source 1..75: mol_type = other DNA
acgcttctactgacggtaagttcaagttcaccaaaactgatgacatcaaacttacgtttcttaaagcaaagctca

SEQ ID NO: 830692 - DNA, 75 bp, synthetic construct
  source 1..75: mol_type = other DNA
aaatcagtgattttcgagacttagttaactcaaactctagctttgtgtatcaaatatacaaagataaaggtggta

SEQ ID NO: 830693 - DNA, 75 bp, synthetic construct
  source 1..75: mol_type = other DNA
ccccgactatgtataccctataattccttcgcctaccgattacaagcttgcccgtagaaaactggccgcagaaat

SEQ ID NO: 830694 - DNA, 75 bp, synthetic construct
  source 1..75: mol_type = other DNA
ttgtattatactgggtaattctgggatatatctcatttgcacatgtgaccatacatctaatgaccgcctgtcaaa

SEQ ID NO: 830695 - DNA, 75 bp, synthetic construct
  source 1..75: mol_type = other DNA
tcgctgtggatgttgacgacgtacacgccgtactgatgccgctaaatgttctggttggctggatttaccataaca

SEQ ID NO: 830696 - DNA, 75 bp, synthetic construct
  source 1..75: mol_type = other DNA
atgaagcacggtttttatactcaactgcgggagaaactcgctcgtgtcagcgccgtgattgacgccaaaatcctc

SEQ ID NO: 830697 - DNA, 75 bp, synthetic construct
  source 1..75: mol_type = other DNA
caaatagataacgatttaggcctgcatatcatctatttcctgcaacatggtcgctggaaggtaaatgaatatagt

SEQ ID NO: 830698 - DNA, 75 bp, synthetic construct
  source 1..75: mol_type = other DNA
ccgtgacgatggcagagtgggtactgccagttactggttagtctttccattggtattttgcgagaaccgtaatgt

SEQ ID NO: 830699 - DNA, 75 bp, synthetic construct
  source 1..75: mol_type = other DNA
tttgaagaacgctacattgaatctctggcagaaaaactcaaatcatggggcgaaccacctgaaaaaatcaacaaa

SEQ ID NO: 830700 - DNA, 75 bp, synthetic construct
  source 1..75: mol_type = other DNA
tctggaatggtgaagagaaatgcaaaactttccacgaaattaaagataaatttcctgtagatagtggcacacgcc

SEQ ID NO: 830701 - DNA, 75 bp, synthetic construct
  source 1..75: mol_type = other DNA
gggcctggcggttcgttgatggtgtgatatccgcagtgccggttaactggaatgcagcggctgaaaatcaacgat

SEQ ID NO: 830702 - DNA, 75 bp, synthetic construct
  source 1..75: mol_type = other DNA
taacgacgcggatatcgaccggatccgcgagatcaaacgctggatcgacaacggcgtgcaggttagcaaagttaa

SEQ ID NO: 830703 - DNA, 75 bp, synthetic construct
  source 1..75: mol_type = other DNA
gaaaatcgaacctccgcccaacagcagcaactcaccagttggcaagaacaaggccatgatattttcccactcggc

SEQ ID NO: 830704 - DNA, 75 bp, synthetic construct
  source 1..75: mol_type = other DNA
tgaccgcagtatccgtggattgttttacttattccacagccgtgaatgcctgactgttgatactatacctgaaga

SEQ ID NO: 830705 - DNA, 75 bp, synthetic construct
  source 1..75: mol_type = other DNA
catcgccagccgaaatatctcgggccatcggtcatgattgggccgtttagtgagcatggctgtccggcaaaagaa

SEQ ID NO: 830706 - DNA, 75 bp, synthetic construct
  source 1..75: mol_type = other DNA
cccttatagctatcctgaatggaacggcataccaggctcatgcttattcagtcaccgtcgtcgccagccgtcccg

SEQ ID NO: 830707 - DNA, 75 bp, synthetic construct
  source 1..75: mol_type = other DNA
gaagcacgacttgagcgagatatattaaaaaaagcaacagcgtattttgcacaggagtcgctgaaaaatacgcgt

SEQ ID NO: 830708 - DNA, 75 bp, synthetic construct
  source 1..75: mol_type = other DNA
gaacaggttaatgctctttttgctccgcgtgcagaaactcaggttaccccactgcaggccagccagcctccggca

SEQ ID NO: 830709 - DNA, 75 bp, synthetic construct
  source 1..75: mol_type = other DNA
gtaccatattcatgccggaaacggtaatctggttggggattccattcgtgccgccattatggcccgtgcgggcta

SEQ ID NO: 830710 - DNA, 75 bp, synthetic construct
  source 1..75: mol_type = other DNA
tggatatgctgacgcgtatcccgcaggcaatggggcttgctgcgcgagccaccgtcggcgatctggtctgggctg

SEQ ID NO: 830711 - DNA, 75 bp, synthetic construct
  source 1..75: mol_type = other DNA
tggggggcttcagtgctctgcgtcaggtgcgtgaaggggcggaatataaatacgtcaccaccggagataaacagg

SEQ ID NO: 830712 - DNA, 75 bp, synthetic construct
  source 1..75: mol_type = other DNA
gatctttaacccgtatcacaagctacttgatatcatcgtcgatccccgccttgatgatatcagcgaaaaacaatg

SEQ ID NO: 830713 - DNA, 75 bp, synthetic construct
  source 1..75: mol_type = other DNA
tgtcttttcgctgcctggtcacaggagagtacgcagaactgaaacgacaagacggattgagtgacgagccagaaa

SEQ ID NO: 830714 - DNA, 75 bp, synthetic construct
  source 1..75: mol_type = other DNA
tctaatattatatttaacaatcattcttaccctgatttttacccgcttaaacagacaatatataaggacattata

SEQ ID NO: 830715 - DNA, 75 bp, synthetic construct
  source 1..75: mol_type = other DNA
ctcgctatgggtaaagaatcaacgccaacaaacaaaaccacccccgcaaatctttactacgcgtacacggataac

SEQ ID NO: 830716 - DNA, 75 bp, synthetic construct
  source 1..75: mol_type = other DNA
gtggtgttactgccggagtgtcgggcgacgttcgccgctttgctgatctgatggacaagctgggcgacacgatgg

SEQ ID NO: 830717 - DNA, 75 bp, synthetic construct
  source 1..75: mol_type = other DNA
gtctgaaatccatctgagcattcattcacctggtggcgacatctttgaagggctggctatctataacgctctgaa

SEQ ID NO: 830718 - DNA, 75 bp, synthetic construct
  source 1..75: mol_type = other DNA
ctaaagctggacatgattagtgaagagaataaggcgcgcctggcccgatggatgacatatattagcgaggttaaa

SEQ ID NO: 830719 - DNA, 75 bp, synthetic construct
  source 1..75: mol_type = other DNA
ctgctcaacctcggcctcgcctgtcactttaccggcttcgactccggctttatgcagttcttccgcgtgcgtgaa

SEQ ID NO: 830720 - DNA, 75 bp, synthetic construct
  source 1..75: mol_type = other DNA
tcatgtttctggagttgattactagagtcattataggtaatctatcagaaggtattttatatgcattcaaaaaaa

SEQ ID NO: 830721 - DNA, 75 bp, synthetic construct
  source 1..75: mol_type = other DNA
atttcgcgccaaaatcaccgatgttcagtgactcctcgagggcgactgccaccgacaacctgaccggaactgatg

SEQ ID NO: 830722 - DNA, 75 bp, synthetic construct
  source 1..75: mol_type = other DNA
gacgcaccgctgattatcggtagccttgatccctgctactcctgtaccgaccgtgtgacgctggttgatgtgcgc

SEQ ID NO: 830723 - DNA, 75 bp, synthetic construct
  source 1..75: mol_type = other DNA
tgcgtaagaagaagagcaaagtggtgccgtacaaagaactcgagcgttacagcattgagcgtaaaaactcgccgc

SEQ ID NO: 830724 - DNA, 75 bp, synthetic construct
  source 1..75: mol_type = other DNA
tccagacccgccagctggcacaacagatgcgtcgtgaagtgcaggagctggtggatgtgctgctgagcacaccga

SEQ ID NO: 830725 - DNA, 75 bp, synthetic construct
  source 1..75: mol_type = other DNA
tggtatgccgcgaaagagaccgcgctgcactacaccggctcagtaaaaaattttgctttctggctgcgcgagtta

SEQ ID NO: 830726 - DNA, 75 bp, synthetic construct
  source 1..75: mol_type = other DNA
tgctgaatggccgccgatatcttttattacaaggaccgatgggcccctgcttttcacgtctggcaagctggttgc

SEQ ID NO: 830727 - DNA, 75 bp, synthetic construct
  source 1..75: mol_type = other DNA
accgtgtatgaggattctaagccggggacattgaatgattttctgggcgctgcaacagaagatgatgttcgtccg

SEQ ID NO: 830728 - DNA, 75 bp, synthetic construct
  source 1..75: mol_type = other DNA
atgattgatttacgccaactgaagtacttcgtggtggtcgcagaagaagagcacgtgggacgcgcagccgagcga

SEQ ID NO: 830729 - DNA, 75 bp, synthetic construct
  source 1..75: mol_type = other DNA
ctcggcaccaaaggcggacggccccgcggcacccttattcaggatactggcgcagttaaacgggcgcttgagact

SEQ ID NO: 830730 - DNA, 75 bp, synthetic construct
  source 1..75: mol_type = other DNA
gatgcatatcgaagcgaagaagtgggcgcgcagcaaatccatcgattttctggcgtttgaagagggctatttccg

SEQ ID NO: 830731 - DNA, 75 bp, synthetic construct
  source 1..75: mol_type = other DNA
gatgacaatggcggaattgctgaccgggtcgcgtaaaacctacggtctgaatctgattggtggtgttcgccgcga

SEQ ID NO: 830732 - DNA, 75 bp, synthetic construct
  source 1..75: mol_type = other DNA
ggctggacttatgcttccggtgcgaccagcctgcttgaccagtgcgacgtgcgcgccgcctctgcacgcgtactc

SEQ ID NO: 830733 - DNA, 75 bp, synthetic construct
  source 1..75: mol_type = other DNA
actgatgggcgcgctggggctgtcgtgccccgtcggcatgaacaatgccagtcaggatcacgtggtggaagcggt

SEQ ID NO: 830734 - DNA, 75 bp, synthetic construct
  source 1..75: mol_type = other DNA
tttgccgggttgattttccactacatcggtattggcccgaataaggaagtggacgatgacgaggaggatcatcat

SEQ ID NO: 830735 - DNA, 75 bp, synthetic construct
  source 1..75: mol_type = other DNA
ttggatgttgtgaattactagattatgacaattttatagcaacaataactccttttgtgaatggggagccttcat

SEQ ID NO: 830736 - DNA, 75 bp, synthetic construct
  source 1..75: mol_type = other DNA
agaagccgaaagcagaccgcaacgacctcgcaattgctcacatctccggaagcctgaaggcgatggcgaaagacc

SEQ ID NO: 830737 - DNA, 75 bp, synthetic construct
  source 1..75: mol_type = other DNA
atgttgttgtggcaaggggctgaacagttcacattatggactggcaaagatttccctctggaatatgttaaacag

SEQ ID NO: 830738 - DNA, 75 bp, synthetic construct
  source 1..75: mol_type = other DNA
caaacaggccggaaaagctgcgaagggtggtgacgacgatatgggtcagcaagccgtcgcgcagcaacggcagat

SEQ ID NO: 830739 - DNA, 75 bp, synthetic construct
  source 1..75: mol_type = other DNA
ctgtactactacgccattatactgttctggctgctggccaccatccagttcgtatggacgcttatgcctctggtc

SEQ ID NO: 830740 - DNA, 75 bp, synthetic construct
  source 1..75: mol_type = other DNA
aggagttccgcgccagaaagttgcgattatctatgatgttggcgtatcgactttgtatcagaggtttccggcagg

SEQ ID NO: 830741 - DNA, 75 bp, synthetic construct
  source 1..75: mol_type = other DNA
gttggcgtttattcaacctgaagaattgtactttgagataatgaattctattacagaagaaaatttcatagtaac

SEQ ID NO: 830742 - DNA, 75 bp, synthetic construct
  source 1..75: mol_type = other DNA
gacgaagcgtcgttgatgaccctggtcggcctgtctttggtgtgcgcctacctgaccaaaaccatccctgaactg

SEQ ID NO: 830743 - DNA, 75 bp, synthetic construct
  source 1..75: mol_type = other DNA
catcatcaatgccgccgtcctgttcatgggtttcggtggctctcaatggacacgcgaatatgcactggctcccat

SEQ ID NO: 830744 - DNA, 75 bp, synthetic construct
  source 1..75: mol_type = other DNA
atgaaagaaaatttggccgctttgttagtcgtgataaagtacaagttgtttttttacagatcgctgctaataacg

SEQ ID NO: 830745 - DNA, 75 bp, synthetic construct
  source 1..75: mol_type = other DNA
actgaggatcagcgtaatctaactaaaaaatatttgagcgtatgcaattctatttctacaagacatttaacaaga

SEQ ID NO: 830746 - DNA, 75 bp, synthetic construct
  source 1..75: mol_type = other DNA
ctgaatgagcttgccgcagcacttggcaatgacccgaactttgcgacaacaatgacaaatgctctggcaggcaaa

SEQ ID NO: 830747 - DNA, 75 bp, synthetic construct
  source 1..75: mol_type = other DNA
cctccagtaagatgctaaaattactggaggcgtcaagcgaagggggtaccccgggtttgtatatggccatgaaga

SEQ ID NO: 830748 - DNA, 75 bp, synthetic construct
  source 1..75: mol_type = other DNA
agggtatccgtcgggcatatcgtcatacactggcgacaagtccgtactcctcataccgcaatcctgtccgcagac

SEQ ID NO: 830749 - DNA, 75 bp, synthetic construct
  source 1..75: mol_type = other DNA
atgatgccatttctattgtgaaaaggaagattattccgttagcatttattctgtattttttaactatatggatcg

SEQ ID NO: 830750 - DNA, 75 bp, synthetic construct
  source 1..75: mol_type = other DNA
cttgatattccattatggatggtagtcagagatgttaaaggttgggatgatatggaaattacgatttttatttct

SEQ ID NO: 830751 - DNA, 75 bp, synthetic construct
  source 1..75: mol_type = other DNA
agattattaccaatgctttggctgaacaactagttgttttaaataaaagaaaaaaagacttatatagatgggagg

SEQ ID NO: 830752 - DNA, 75 bp, synthetic construct
  source 1..75: mol_type = other DNA
atatagccatgacctgttaagtgctagtctatttgaggtcacccaatgggactcattggatttgcccctatattt

SEQ ID NO: 830753 - DNA, 75 bp, synthetic construct
  source 1..75: mol_type = other DNA
aatttagatgaaggtgaaagcaaagcgcaatttatagttactgccgttaaaggcgaaatcaaacgccgccagcgc

SEQ ID NO: 830754 - DNA, 75 bp, synthetic construct
  source 1..75: mol_type = other DNA
gtagcggaggaaatcgggcaactcgtagccgtcgctcgtgaagaactccagcggcgtaaagccaaagaatctgaa

SEQ ID NO: 830755 - DNA, 75 bp, synthetic construct
  source 1..75: mol_type = other DNA
ttatggttcagtgtgggaaaacaactggttaagcacatggctgcataatcatgtcgttcgggatattcgtcttgg

SEQ ID NO: 830756 - DNA, 75 bp, synthetic construct
  source 1..75: mol_type = other DNA
tagcagggaatgatgcaaaaattatatccccgtggcactatggacattatggtgaaaatgctatgttttataaaa

SEQ ID NO: 830757 - DNA, 75 bp, synthetic construct
  source 1..75: mol_type = other DNA
cgtaaaggggaggtggccacgctggcggtgatttacaaagactggaaaaaacaggctgtggatgaacacggtaac

SEQ ID NO: 830758 - DNA, 75 bp, synthetic construct
  source 1..75: mol_type = other DNA
cctgaagtctgacaaaaaagcgctgtttcgcgcctgccggcaggcacgtgaagcatcagagtatttactgacgct

SEQ ID NO: 830759 - DNA, 75 bp, synthetic construct
  source 1..75: mol_type = other DNA
gtgtgccaccctggaaacgtccctggcgctctgcgcgtaacggcgtgggagagccggagatgatgccggtaaacg

SEQ ID NO: 830760 - DNA, 75 bp, synthetic construct
  source 1..75: mol_type = other DNA
gaggtagtcaaaggaaaacttattgacaccgggttctgtatttttgccctcagtaagctggcaatggcgttatcc

SEQ ID NO: 830761 - DNA, 75 bp, synthetic construct
  source 1..75: mol_type = other DNA
tgaacggacccgcgagctggaatgcctgctgaagcattaccggctggcgggtacggaatatgaatattattacac

SEQ ID NO: 830762 - DNA, 75 bp, synthetic construct
  source 1..75: mol_type = other DNA
cttgaaaatgagatgattattttcacttctcccgatttgaaaccaagggttgaagcgattcgcaacggaaaacca

SEQ ID NO: 830763 - DNA, 75 bp, synthetic construct
  source 1..75: mol_type = other DNA
caggcagaaggaagcggagaaaatccccttgtgtcttcactggatgctttggctaaggtcgaacaaattggcatc

SEQ ID NO: 830764 - DNA, 75 bp, synthetic construct
  source 1..75: mol_type = other DNA
caagctgaaggaagcggagaaaatcccctggtttcttcgctcgatgcactggcgcaggtggaaaaaattggagtc

SEQ ID NO: 830765 - DNA, 75 bp, synthetic construct
  source 1..75: mol_type = other DNA
agtgagaaaacccaatatctgggggtggttaatggtcaggtggtggggaacagcgtggtgaaagtcacccgaacc

SEQ ID NO: 830766 - DNA, 75 bp, synthetic construct
  source 1..75: mol_type = other DNA
tcctggttttaaacatgctctacacacattctgcactagctgctgaatacagtgaaaagacgcagttcctggggg

SEQ ID NO: 830767 - DNA, 75 bp, synthetic construct
  source 1..75: mol_type = other DNA
gatgcaccggcagagctggaggtgccggtcagctaccggggaaacctgcagatagcgctgcaggtggaggactga

SEQ ID NO: 830768 - DNA, 75 bp, synthetic construct
  source 1..75: mol_type = other DNA
gccggataacggggaagcccgcatcaccctgaagacggccctgatggttgacggaaagagagaggcactcagcgc

SEQ ID NO: 830769 - DNA, 75 bp, synthetic construct
  source 1..75: mol_type = other DNA
ttccgctcaacgggattctggtgttgaagttgtctccagtaacctgccggtaagatataaatgggattcaacgct

SEQ ID NO: 830770 - DNA, 75 bp, synthetic construct
  source 1..75: mol_type = other DNA
ttgattccattcattaaagatccagtaacaaaagaacgtaaacaaatccatccagaagatatacatctcactgca

SEQ ID NO: 830771 - DNA, 75 bp, synthetic construct
  source 1..75: mol_type = other DNA
gataacatctctaaggatgaatgggaaaacctccatgcattaaaagaaaagcgtttaaatggaatgcctaaaaca

SEQ ID NO: 830772 - DNA, 75 bp, synthetic construct
  source 1..75: mol_type = other DNA
tcgaaggcatcgaaattgttgatgatatttaccagtatttaatttccgacgcgctttataacacgtcatacgaaa

SEQ ID NO: 830773 - DNA, 75 bp, synthetic construct
  source 1..75: mol_type = other DNA
tactgttgattatttgcgtcattatttttggtgcagaaggatgggaagatatagagaatctgggagaaacgcatc

SEQ ID NO: 830774 - DNA, 75 bp, synthetic construct
  source 1..75: mol_type = other DNA
cattaatacttaatcaggaattagtgcaaatcatttcaaataaaaaaatcgatggtctctatgatcctacccacg

SEQ ID NO: 830775 - DNA, 75 bp, synthetic construct
  source 1..75: mol_type = other DNA
gcgacgtacccgacgttacaccagtgcagcaggctccggcattgccagtaacacatacagacggcgcaccggcag

SEQ ID NO: 830776 - DNA, 75 bp, synthetic construct
  source 1..75: mol_type = other DNA
aagcatcctcggcacgattttgcaggaaaacggggtgaccgaatggagcccgctgttcagcgagccacatccttc

SEQ ID NO: 830777 - DNA, 75 bp, synthetic construct
  source 1..75: mol_type = other DNA
taaagcttgaagactggctacaagagaaacgcaatagtggtaagtggaaagacatcaaattaattgatggttcta

SEQ ID NO: 830778 - DNA, 75 bp, synthetic construct
  source 1..75: mol_type = other DNA
gattgttcgagaaacaaatggtgggcagttactgacaatggggaagaaccggcatcgaaagtaacccactggatg

SEQ ID NO: 830779 - DNA, 75 bp, synthetic construct
  source 1..75: mol_type = other DNA
aagcatcctcggcacgattttgcaggaaaacggggtgaccgagtggagtccgctgttcagcgagcctcatccttc

SEQ ID NO: 830780 - DNA, 75 bp, synthetic construct
  source 1..75: mol_type = other DNA
aagcatcctcggcacgattttgcaggaaaacggggtgaccgactggaggccgctgttcagcgagccccatccttc

SEQ ID NO: 830781 - DNA, 75 bp, synthetic construct
  source 1..75: mol_type = other DNA
aagcatcctcggcacgattttgcaggaaaacggggtgaccgattggagtccgctgttcagcgagccgcatccttc

SEQ ID NO: 830782 - DNA, 75 bp, synthetic construct
  source 1..75: mol_type = other DNA
gcctttaatatcgcgatcccggaaatggttaaacaggcaatcaaatcaagcgatgtggtgaaggcaattgaagag

SEQ ID NO: 830783 - DNA, 75 bp, synthetic construct
  source 1..75: mol_type = other DNA
gttgaaacgtataacgccctgcgtaccgaatacgttgcgctgtcggcgcagcacggcagcaccacgctggagcag

SEQ ID NO: 830784 - DNA, 75 bp, synthetic construct
  source 1..75: mol_type = other DNA
ctaaaatttatgagctaataaaacaatctcgaggtagtgttgctttacatatacgccgtggagattatgttacaa

SEQ ID NO: 830785 - DNA, 75 bp, synthetic construct
  source 1..75: mol_type = other DNA
tctcaccaacagcttttgcgagtagtttaagaaaaaggattgagaaaaatataatggatgattacacctttatag

SEQ ID NO: 830786 - DNA, 75 bp, synthetic construct
  source 1..75: mol_type = other DNA
cgcgacgctattccgggtattgtggtgaaaatcccggtgacttccgaaggtctggcagcaattaaaatactgaaa

SEQ ID NO: 830787 - DNA, 75 bp, synthetic construct
  source 1..75: mol_type = other DNA
ataagtttatcaccaccgactatttgcaacagtgccaaaaagagtgcgtccaggctaaagcggaaatctatagcg

SEQ ID NO: 830788 - DNA, 75 bp, synthetic construct
  source 1..75: mol_type = other DNA
ggctatctggaacaactgggcgggcagattggcgttgcggcactttctgcacagcttgacgcccgacagccggtt

SEQ ID NO: 830789 - DNA, 75 bp, synthetic construct
  source 1..75: mol_type = other DNA
aaggcgctgaattggtagaacagcgagaaaaatgcactgacgacgctcaatgcgcaatgctgaataaggagatcg

SEQ ID NO: 830790 - DNA, 75 bp, synthetic construct
  source 1..75: mol_type = other DNA
tcatccaggtgcagaccgtaccgaaatttaacgcgcagtttaatccctataccctgcccggcggcaccgatggct

SEQ ID NO: 830791 - DNA, 75 bp, synthetic construct
  source 1..75: mol_type = other DNA
tccaacgtcggcaatacgtttcgtctgttcaccccgtggcactatacgtttgagaaggcagctatttccgtgact

SEQ ID NO: 830792 - DNA, 75 bp, synthetic construct
  source 1..75: mol_type = other DNA
gaaagaccttgatgatgcgctgaagtcagcaggactcaccgggttaacgggaaaacagggctccatgaacggccc

SEQ ID NO: 830793 - DNA, 75 bp, synthetic construct
  source 1..75: mol_type = other DNA
gcaggatttcgccgaccagttcacgctggacaaactcgccattacggaaagccttacctacgaatacccgacaat

SEQ ID NO: 830794 - DNA, 75 bp, synthetic construct
  source 1..75: mol_type = other DNA
actgagctgtggatcgaggtcgaagatgatttaactacctacggcgaagaggtcaaattcggcggcggtaaagta

SEQ ID NO: 830795 - DNA, 75 bp, synthetic construct
  source 1..75: mol_type = other DNA
atggcgcgtgttttagaacaagatcatgaagaagatgcagaaatattttatcgtggacattctgatgtatcttac

SEQ ID NO: 830796 - DNA, 75 bp, synthetic construct
  source 1..75: mol_type = other DNA
tgatatttataagcatgatattcattttgatgagaaaagcttttcaatcagggatgttgaaaatacagttcccaa

SEQ ID NO: 830797 - DNA, 75 bp, synthetic construct
  source 1..75: mol_type = other DNA
ctgtgatacaaaatgaaggtgagtttctactttgtaaaatggcctctgatcgtggagtattcccgggccaatggg

SEQ ID NO: 830798 - DNA, 75 bp, synthetic construct
  source 1..75: mol_type = other DNA
ttcaagattgatgcaagcatgaatgaacgactgtcgcatatttatttctctttatatggaatgttaaataatgct

SEQ ID NO: 830799 - DNA, 75 bp, synthetic construct
  source 1..75: mol_type = other DNA
tggaacctgttccagttgatgcaccgtaaagcacgcggcgatgatgttggcaaaaccaagtttggcgaaagaaat

SEQ ID NO: 830800 - DNA, 75 bp, synthetic construct
  source 1..75: mol_type = other DNA
atgtccggcggtgcttttgccgttacgcaccacgccttcagtagcggagcaggaaggacatctgatggaaatgga

SEQ ID NO: 830801 - DNA, 75 bp, synthetic construct
  source 1..75: mol_type = other DNA
ctccatcaccacgctggccattgagtgcgggctggcgacagagtccggtgccggaaaactctccatcacccgggc

SEQ ID NO: 830802 - DNA, 75 bp, synthetic construct
  source 1..75: mol_type = other DNA
tgttgagtttgatttcagaatcactcactcacaagatgatgtcgtagtgataaacaaagagttatatcaaacagc

SEQ ID NO: 830803 - DNA, 75 bp, synthetic construct
  source 1..75: mol_type = other DNA
gtgaccactgatgcgggcgctggctttgagcaaacattgaccgggctgacgctcggtatcgatagccgtttctcc

SEQ ID NO: 830804 - DNA, 75 bp, synthetic construct
  source 1..75: mol_type = other DNA
ggcggtgtgagccagtcggcttacgagacgctggcggcgcttaatctgccgaaaccgcagcaagggccggaaacc

SEQ ID NO: 830805 - DNA, 75 bp, synthetic construct
  source 1..75: mol_type = other DNA
cggaaatgattacttatccctcggttactacgatcaggacgactaccacattcaaagaggaattcgtattaatgg

SEQ ID NO: 830806 - DNA, 75 bp, synthetic construct
  source 1..75: mol_type = other DNA
ggccagaatcagcattcgagagatttctacccgatgcagatatcgttatctcacaacccttctggccagcctatt

SEQ ID NO: 830807 - DNA, 75 bp, synthetic construct
  source 1..75: mol_type = other DNA
gaaggtcattatcacctggtatgagtgcgaaatcgtccggctgaaggtgaagtatggagaaatcatgccaccggg

SEQ ID NO: 830808 - DNA, 75 bp, synthetic construct
  source 1..75: mol_type = other DNA
ctcaaatctaaatataagaataacaaccaaatacactttcatggaccgagtttaaacacagatgtttttttggca

SEQ ID NO: 830809 - DNA, 75 bp, synthetic construct
  source 1..75: mol_type = other DNA
ctatcagagaagagtatctgattgtggatcgcgggcaactggccgggaccggggcaaagtcttatcaactgaact

SEQ ID NO: 830810 - DNA, 75 bp, synthetic construct
  source 1..75: mol_type = other DNA
attggacttgctgtattacgcagattaaaagcgtttgatatgccattgcattacacccaacgccaccgtcttgcg

SEQ ID NO: 830811 - DNA, 75 bp, synthetic construct
  source 1..75: mol_type = other DNA
tctacccgatgcagatatcgttatctcacaacccttctggccagcctatttaactagggaccggatagaaaaagc

SEQ ID NO: 830812 - DNA, 75 bp, synthetic construct
  source 1..75: mol_type = other DNA
caatattgaagcggtttctgaagccctgctatttgcttcaaaagccggagcggatccggtacgtgtgcgccaggc

SEQ ID NO: 830813 - DNA, 75 bp, synthetic construct
  source 1..75: mol_type = other DNA
aattacagcatcacatccgcagcgcaaagagttggatgagaagaaagcacagtatgagcaggacttccaaactac

SEQ ID NO: 830814 - DNA, 75 bp, synthetic construct
  source 1..75: mol_type = other DNA
tccgtactatcattaatgacaacatagttgagaagactcatgatatcaataacaaggaaatgatcttcagcgcat

SEQ ID NO: 830815 - DNA, 75 bp, synthetic construct
  source 1..75: mol_type = other DNA
cggcgcagaacaccatcagtcgcgactttacgctgcgttttgccgagctggaatccaccctttgccgggtgttaa

SEQ ID NO: 830816 - DNA, 75 bp, synthetic construct
  source 1..75: mol_type = other DNA
gtcctgggtttcattttcctgtttttcacggcgtagttccccacttcaacactcgccagctgttcagtgaagtca

SEQ ID NO: 830817 - DNA, 75 bp, synthetic construct
  source 1..75: mol_type = other DNA
atgataaaggccattctccgtgctgcagaacgcgactggaagtggctggaaaaagcgcctgtcatcaagatacca

SEQ ID NO: 830818 - DNA, 75 bp, synthetic construct
  source 1..75: mol_type = other DNA
tgcggaccgttttaaccgtatcgatcgcctttttagccagctaaccggcagtacgccgttgccctccacgccttc

SEQ ID NO: 830819 - DNA, 75 bp, synthetic construct
  source 1..75: mol_type = other DNA
taattgacgcactaagtaaagataagtatatctacattgcccttatgattttagtcattcacctcttgatgaagc

SEQ ID NO: 830820 - DNA, 75 bp, synthetic construct
  source 1..75: mol_type = other DNA
acatcaagtttgaacagtttgtctgctgcgtggctagtctggtgataggggtgctgattttgtatatatacgagc

SEQ ID NO: 830821 - DNA, 75 bp, synthetic construct
  source 1..75: mol_type = other DNA
tcagaaggagagatgtttataaactggttaaaaaaaggagtgaggaacggggaaatcagcctgaacggaaaaaaa

SEQ ID NO: 830822 - DNA, 75 bp, synthetic construct
  source 1..75: mol_type = other DNA
ggtaccatttcatcaacatcgggtttaaaaagtcaggaaatgccttttttgggactgggaagtatcttaaagaaa

SEQ ID NO: 830823 - DNA, 75 bp, synthetic construct
  source 1..75: mol_type = other DNA
aaagccgccgaggagatcgggcagctcgtcaccgtcgcacgtgaagaactccagcgccgcaaggccaaagaatca

SEQ ID NO: 830824 - DNA, 75 bp, synthetic construct
  source 1..75: mol_type = other DNA
gatgagaacccgcatcatctgcagcagctcattcgcctgccgggtcagcagtatgatgaggagtccggcctgtat

SEQ ID NO: 830825 - DNA, 75 bp, synthetic construct
  source 1..75: mol_type = other DNA
tgacaaacatgatctcatatcagggacttgttcgcaccttccatagtgctgtaagaaactatttatcttgtcaca

SEQ ID NO: 830826 - DNA, 75 bp, synthetic construct
  source 1..75: mol_type = other DNA
tgaaaaagattattactgtttcagcgatggccatggcggggatgttttcaacccagactctggctgatgaaggca

SEQ ID NO: 830827 - DNA, 75 bp, synthetic construct
  source 1..75: mol_type = other DNA
gcggcgagcgcaaactggaaaaagaggagcagggcaagaagttccaccgcatcgaacgtgcgtatggccgctttg

SEQ ID NO: 830828 - DNA, 75 bp, synthetic construct
  source 1..75: mol_type = other DNA
ggcagaagaggtggagagcccacttcctgcgttgccggtaacggaccccgtcacagcacctttgccctcagaaac

SEQ ID NO: 830829 - DNA, 75 bp, synthetic construct
  source 1..75: mol_type = other DNA
tatctgaaacagacggggagtaaccacgatcgccgttatgttcagtccgtatttgagcgtgcgggacttcaccgg

SEQ ID NO: 830830 - DNA, 75 bp, synthetic construct
  source 1..75: mol_type = other DNA
tatatttctttcagatgtatcaaaacattggaaactaagagatttaactgattatctatacatgagtgagatatt

SEQ ID NO: 830831 - DNA, 75 bp, synthetic construct
  source 1..75: mol_type = other DNA
agaggaaaatgctcactgtgtcgccaattatcaactgccaccagagagtcagcagcagttattaacccagctatc

SEQ ID NO: 830832 - DNA, 75 bp, synthetic construct
  source 1..75: mol_type = other DNA
gatggcgctgccgtatgaggattttgtgacaatgatgctggcagagtcggaggagaggaagcaacgttatggcaa

SEQ ID NO: 830833 - DNA, 75 bp, synthetic construct
  source 1..75: mol_type = other DNA
ggttcgggtggtctccaggagatgtgatggcgctgccgtatacggattttgtggcaatgatgctggcggagtcgg

SEQ ID NO: 830834 - DNA, 75 bp, synthetic construct
  source 1..75: mol_type = other DNA
gaaaaaataccgtgttttactgagccgcatccagccggaggatgctccggatattgaatggccgccgctgccagt

SEQ ID NO: 830835 - DNA, 75 bp, synthetic construct
  source 1..75: mol_type = other DNA
tagtgggcatttacaagcggggttaccgaaactggtcacttctcttgacgctattttgtcgtcagctacgacagc

SEQ ID NO: 830836 - DNA, 75 bp, synthetic construct
  source 1..75: mol_type = other DNA
gataacaaacagcttccctatctggcccaggcatgggtggagaatgaaaagaaagaaaaaaatcaccacaggccc

SEQ ID NO: 830837 - DNA, 75 bp, synthetic construct
  source 1..75: mol_type = other DNA
catacgagctgctcctgacgtcgctgcgctccatgattcctgaaggaacccagaaggtgctgatctcagcggtca

SEQ ID NO: 830838 - DNA, 75 bp, synthetic construct
  source 1..75: mol_type = other DNA
gacaacattgcctcattgatagtatctttactcagggccaactctgtgctggtactggaggcgctgaagatgatt

SEQ ID NO: 830839 - DNA, 75 bp, synthetic construct
  source 1..75: mol_type = other DNA
gaagccagcgatggatgctaatggaactccaagatacaatatgacctgctccccgttgattagtacaccccgatg

SEQ ID NO: 830840 - DNA, 75 bp, synthetic construct
  source 1..75: mol_type = other DNA
cgctaaaaaattaggacaaaatcttaagcagcagtttaatcaagagttgttaaaagctgagagacgtattacgag

SEQ ID NO: 830841 - DNA, 75 bp, synthetic construct
  source 1..75: mol_type = other DNA
ctgctttcagatatccgtatgccgggaatggacgggctggcgctgctcaagcagattaaacagcgccatccgatg

SEQ ID NO: 830842 - DNA, 75 bp, synthetic construct
  source 1..75: mol_type = other DNA
tatcgataaaggctttgggagttttaattatttatttcttgttaatacgtcctgcgccgccctgccttcccttcg

SEQ ID NO: 830843 - DNA, 75 bp, synthetic construct
  source 1..75: mol_type = other DNA
atcatcaacatgtcagcgttagcacgcaggcttgagtgtagtcgttccagccttcttgaccgcatccatacgcat

SEQ ID NO: 830844 - DNA, 75 bp, synthetic construct
  source 1..75: mol_type = other DNA
agatgacgacgatgtgcatttaagcaatctgcaacgacaaatcctctttaccactgaagatatcgatcgcccgaa

SEQ ID NO: 830845 - DNA, 75 bp, synthetic construct
  source 1..75: mol_type = other DNA
tggcgttaatcagatacagacggttggtgtcaaccaggtggaaacggtgggcagtaaccagattatcaaagtggg

SEQ ID NO: 830846 - DNA, 75 bp, synthetic construct
  source 1..75: mol_type = other DNA
aatctatacacgtatccactggtaccaatacgttacactgatccactggggttagaacgagttataagtgtatat

SEQ ID NO: 830847 - DNA, 75 bp, synthetic construct
  source 1..75: mol_type = other DNA
cagaagtggcgcgcggaacaagccgttcgccggagatatggccgggacggcgaattgtgctgacggggcatccgc

SEQ ID NO: 830848 - DNA, 75 bp, synthetic construct
  source 1..75: mol_type = other DNA
tccgctaaagcgattgagtgggatgaggcgttcaagaaaatggacgatccgtctggtcgtgcggttggcgttcac

SEQ ID NO: 830849 - DNA, 75 bp, synthetic construct
  source 1..75: mol_type = other DNA
atccgccgctgggagaacttcccgattgccccggagcgccgcgccaatccagcctgggcgcagaacaccgtcgat

SEQ ID NO: 830850 - DNA, 75 bp, synthetic construct
  source 1..75: mol_type = other DNA
acatggcggccacagccgttgctgaaaccgctggtggacggcccgcagagcgccgtcgtgacgggaccggcaggc

SEQ ID NO: 830851 - DNA, 75 bp, synthetic construct
  source 1..75: mol_type = other DNA
cttcagaaaaagatgtcatgctcttcgctggactgctcatgcctcttaaacttactgacgagcaaaaaagcgaac

SEQ ID NO: 830852 - DNA, 75 bp, synthetic construct
  source 1..75: mol_type = other DNA
gctttacgcgtattgatcgtctcccgccctacgtttttaacattaccgctgaactgaaaatggctgcgcgtcggc

SEQ ID NO: 830853 - DNA, 75 bp, synthetic construct
  source 1..75: mol_type = other DNA
gagtactactggaaaacccacgcacacccaaacatattcagaagcgtgagggatatagtgccatcaaagcgctgg

SEQ ID NO: 830854 - DNA, 75 bp, synthetic construct
  source 1..75: mol_type = other DNA
tgcgcgatccttatgctcctcgacaaggctggaaaccaactatgggatgtacccgtgcacagaatgaagatgtag

SEQ ID NO: 830855 - DNA, 75 bp, synthetic construct
  source 1..75: mol_type = other DNA
agactacacctttaaacgccccggctgggcaggacgttttgatcaggaaggccagcaccaggattaccagcgcac

SEQ ID NO: 830856 - DNA, 75 bp, synthetic construct
  source 1..75: mol_type = other DNA
attaccagcgcacacagtatgaagtgtatgactaccccggacgtttcaagggcgcccacgggcagaactttgccc

SEQ ID NO: 830857 - DNA, 75 bp, synthetic construct
  source 1..75: mol_type = other DNA
tctgacgatggccgacggcagttcgtgggtggtggaaaactcgtgggtgctgccggagggcttcccgaaggacaa

SEQ ID NO: 830858 - DNA, 75 bp, synthetic construct
  source 1..75: mol_type = other DNA
caaaaacagggaggtgattatttattcgctgtaaaaggaaaccaggggcggcaaaataaagcctttgaggaaaga

SEQ ID NO: 830859 - DNA, 75 bp, synthetic construct
  source 1..75: mol_type = other DNA
caaggattagcagccaaaaagaatttgcaaaagatccaaacaatgctaaaaggatggaagtattagaaaaacaaa

SEQ ID NO: 830860 - DNA, 75 bp, synthetic construct
  source 1..75: mol_type = other DNA
aacagtcactccgtctgccggggcagcagtatgatgaggagtcggggctgtactataaccggaaccggtactacg

SEQ ID NO: 830861 - DNA, 75 bp, synthetic construct
  source 1..75: mol_type = other DNA
agaaggcacagtaatcagcgccaccagagacccggagtattacttttgttgtggttctggcggggcagtcaaaca

SEQ ID NO: 830862 - DNA, 75 bp, synthetic construct
  source 1..75: mol_type = other DNA
tgcgcgaaatattggcttgcagagtggttatctcgatgtgtttgacagtgccggcagccttatctggagcgctgc

SEQ ID NO: 830863 - DNA, 75 bp, synthetic construct
  source 1..75: mol_type = other DNA
acgcaccgtacggtgaacggcgacccggcggagcagtggcagtatgatgggcacgggtggttaaccaccatcagc

SEQ ID NO: 830864 - DNA, 75 bp, synthetic construct
  source 1..75: mol_type = other DNA
ggcagaactgagtgcgaacccggcagaaacggttgttgagggaccgtttagtaaagacgtaatcctgaaaatcac

SEQ ID NO: 830865 - DNA, 75 bp, synthetic construct
  source 1..75: mol_type = other DNA
cgaaatccactgtacctggatttgggatgggacttgctattgttgcagggataatcagactattaaaaggtacta

SEQ ID NO: 830866 - DNA, 75 bp, synthetic construct
  source 1..75: mol_type = other DNA
aaattcattatacagttgaatgagctttacacgctaatcaatagcgataatactattgacgatgttaggcttaaa

SEQ ID NO: 830867 - DNA, 75 bp, synthetic construct
  source 1..75: mol_type = other DNA
tgttagatttaattcgaataatatggcgatatattggaatagtagagcatctttattttgttcaactgaattaaa

SEQ ID NO: 830868 - DNA, 75 bp, synthetic construct
  source 1..75: mol_type = other DNA
aacgtttctggctaataagggggtaacggtgcgtcttaatgggcggtacgccatcatgcacaacaaatttatgat

SEQ ID NO: 830869 - DNA, 75 bp, synthetic construct
  source 1..75: mol_type = other DNA
atgagtggcacaggaactatagacacagacaaaaatttgaccttcagaattcgtgggttaaataatattcatgtc

SEQ ID NO: 830870 - DNA, 75 bp, synthetic construct
  source 1..75: mol_type = other DNA
aaatattcgcctacaatcttcaaagcgcgagaggctcagatggaaacctcattaaattcaatggcgaaccaaata

SEQ ID NO: 830871 - DNA, 75 bp, synthetic construct
  source 1..75: mol_type = other DNA
tttcctgatgagttatgggaagaatttggtagattgacaggatggagtaccccattgcaatcaaggcccaaatgg

SEQ ID NO: 830872 - DNA, 75 bp, synthetic construct
  source 1..75: mol_type = other DNA
accatcacgaagccagacacagcaagggctggagagtggtacagttattttaaatatctataccgtatctatccc

SEQ ID NO: 830873 - DNA, 75 bp, synthetic construct
  source 1..75: mol_type = other DNA
tgggcactaccaatcagtcgtaagcgtaaactgaccgccgtatgtagccatcagacgagaattggtaacttagac

SEQ ID NO: 830874 - DNA, 75 bp, synthetic construct
  source 1..75: mol_type = other DNA
taaaatattacctcaaaatttaaaaggtagtgcttataatttaaagttaaacgacactaatacttattatactgg

SEQ ID NO: 830875 - DNA, 75 bp, synthetic construct
  source 1..75: mol_type = other DNA
ctccactttgggtatcaaacccgaaacagcagatcgcttatctggcactcaaatactgggcgcgcctgtattgcc

SEQ ID NO: 830876 - DNA, 75 bp, synthetic construct
  source 1..75: mol_type = other DNA
attacctagtggatgcacgcaacaaggttgaggaggctattaaatccctgccccagcccgacgagccgcatgcat

SEQ ID NO: 830877 - DNA, 75 bp, synthetic construct
  source 1..75: mol_type = other DNA
gctttatcatctttggcgcgtcagaccatcaaatcatccacgtcaccgcctggacggaacgtgaagcgcgtaacc

SEQ ID NO: 830878 - DNA, 75 bp, synthetic construct
  source 1..75: mol_type = other DNA
ccctgtacagtccaccgccagcgagcttctcacctcctgcggtggttacattccatcaatcaaggaggctgccaa

SEQ ID NO: 830879 - DNA, 75 bp, synthetic construct
  source 1..75: mol_type = other DNA
tcttctcatcattatttgcgttcttggtcaactgtactttcacggagatgtttttctaaatcctatcgcgcaacc

SEQ ID NO: 830880 - DNA, 75 bp, synthetic construct
  source 1..75: mol_type = other DNA
aacgcgaagcgcgtagccgttgcccgtccggttgtgttgctgtatttgccgcccgtattcgccagggagaaacct

SEQ ID NO: 830881 - DNA, 75 bp, synthetic construct
  source 1..75: mol_type = other DNA
ctctatctttctgcgccgtcttttccgtgccggtgataatgttttggtcaattctttatcggtcattgtgttgtc

SEQ ID NO: 830882 - DNA, 75 bp, synthetic construct
  source 1..75: mol_type = other DNA
atcggagaaaaaaaccagttgatcgccagtgtcgaaaatagctatgattcccgcgcacctcataaaacgggtgcc

SEQ ID NO: 830883 - DNA, 75 bp, synthetic construct
  source 1..75: mol_type = other DNA
tccgggaagcagaacgccaacgtgatgagattgcccgccaacaggctgaaaccgcgcatttgttagcaatggcgg

SEQ ID NO: 830884 - DNA, 75 bp, synthetic construct
  source 1..75: mol_type = other DNA
acagcagcacagatgactaccgggatgatttcagcctgtggggtgtacatgttctggcgggcaaatcctttgccg

SEQ ID NO: 830885 - DNA, 75 bp, synthetic construct
  source 1..75: mol_type = other DNA
gaagtgacggataagaaaaatacgctgattaaaaaaggtgaggtgctatttcgactggacccgacgcgttatcag

SEQ ID NO: 830886 - DNA, 75 bp, synthetic construct
  source 1..75: mol_type = other DNA
tagattatcacatcgatataatcattaaagattatgaaagcgtcaaagaaaatgcttatctgatcgttccaaaaa

SEQ ID NO: 830887 - DNA, 75 bp, synthetic construct
  source 1..75: mol_type = other DNA
gatatgactccgccagcaaacttaagcgccctcgttttcttgccgatcagtaataccgagtggcagggtgtcgac

SEQ ID NO: 830888 - DNA, 75 bp, synthetic construct
  source 1..75: mol_type = other DNA
aatacatcatcgccatggcagcaaattgcccgggaagtgaaagcgccccgtgaacgactgaagtatgcgctggaa

SEQ ID NO: 830889 - DNA, 75 bp, synthetic construct
  source 1..75: mol_type = other DNA
cgggtgcttttctttaccgcattatcaaaggtgattcgccggaagaggcgctgtgctacgccaacgccgccgctg

SEQ ID NO: 830890 - DNA, 75 bp, synthetic construct
  source 1..75: mol_type = other DNA
cgttttgtcagcgcacagactggcagctacgtgggcagcaaaagcgcgttgtcacgccgggtcagaatgaaaagt

SEQ ID NO: 830891 - DNA, 75 bp, synthetic construct
  source 1..75: mol_type = other DNA
cttcaggtgaagttatcgacagcacgctattgccgccaaatctgctgaataatggcacaacggagcaaagtgatg

SEQ ID NO: 830892 - DNA, 75 bp, synthetic construct
  source 1..75: mol_type = other DNA
tgagattgcccgccaacaggctgaaaccgcgcatttgttagcaatggcggaggcagcagaggctgagaaaaatcg

SEQ ID NO: 830893 - DNA, 75 bp, synthetic construct
  source 1..75: mol_type = other DNA
cggagacggtaatgtccatacccgtctgggcgtgaaaacctggattaaaaggctcaataaaatggatgatggtaa

SEQ ID NO: 830894 - DNA, 75 bp, synthetic construct
  source 1..75: mol_type = other DNA
gttggtgtaataaactggcatgaagcattgataagggcagatttagaattagagatcctcggttctgctttgata

SEQ ID NO: 830895 - DNA, 75 bp, synthetic construct
  source 1..75: mol_type = other DNA
gaacaagggcaagctccttaccctgctggtttttatgatttgcatccatctagtatttttgttggtgattttcag

SEQ ID NO: 830896 - DNA, 75 bp, synthetic construct
  source 1..75: mol_type = other DNA
caatcttgcattcacaaaccttcagcatattgctagcggtaatgtttcatttgatgctgttactatactggcaaa

SEQ ID NO: 830897 - DNA, 75 bp, synthetic construct
  source 1..75: mol_type = other DNA
acccatttattcataacttatgggtgcttgctgtctatcgaggctttgctcacggtcttggctctggagcaggtc

SEQ ID NO: 830898 - DNA, 75 bp, synthetic construct
  source 1..75: mol_type = other DNA
gagacagacggagagatatcttccagagtcagaaaatctgttcaggacacactgaacaatggatactcaccaatg

SEQ ID NO: 830899 - DNA, 75 bp, synthetic construct
  source 1..75: mol_type = other DNA
actgactacacggtgacaggtgctggcggatatactggcgggaatgttgttttatcgtcgcctcttgccaatggt

SEQ ID NO: 830900 - DNA, 75 bp, synthetic construct
  source 1..75: mol_type = other DNA
aattcaaggaatatcataccattcggcggaggattaacaggaggtaaaacacttggattgcctaccccagcagta

SEQ ID NO: 830901 - DNA, 75 bp, synthetic construct
  source 1..75: mol_type = other DNA
gttaaggacggcacaatactaggtttaacactaactggtaattctatggttacaatcgacgaaaactcagattca

SEQ ID NO: 830902 - DNA, 75 bp, synthetic construct
  source 1..75: mol_type = other DNA
aacggctacaggctcaacgtaatttagaaactgctcttgctcaggttggggaagatggttttaaagtacgcctac

SEQ ID NO: 830903 - DNA, 75 bp, synthetic construct
  source 1..75: mol_type = other DNA
atggcgggggcgttaaactatcaaggtgcagcccttcatactggctcgatggataacggcaaggggaaccagtac

SEQ ID NO: 830904 - DNA, 75 bp, synthetic construct
  source 1..75: mol_type = other DNA
tgatctcgatgagataattggcgagtgggctgatgaaggcggcagaatctcctatcagcccggcatgatggcaaa

SEQ ID NO: 830905 - DNA, 75 bp, synthetic construct
  source 1..75: mol_type = other DNA
acagtgtctatgatgctgcaaatcaaaaacctcacgaggcaggtttgtttgaagatctgaatgaacgtattaaaa

SEQ ID NO: 830906 - DNA, 75 bp, synthetic construct
  source 1..75: mol_type = other DNA
acctccggggctttaaactaccagggtgcagccttgcaaactggcagtatggataatggcaagcagagtgtgtac

SEQ ID NO: 830907 - DNA, 75 bp, synthetic construct
  source 1..75: mol_type = other DNA
gctaaagtactcggtattaatcctgatgaaatgctaaagaatgcgaatacttccggtgctaaacaacgtactgat

SEQ ID NO: 830908 - DNA, 75 bp, synthetic construct
  source 1..75: mol_type = other DNA
gttacgactttaacgatgcaagcctggtcccggcaagcagctactggggcgcactggttgaagcctggctgcaat

SEQ ID NO: 830909 - DNA, 75 bp, synthetic construct
  source 1..75: mol_type = other DNA
aagaaatggtttacatgagtttgacgttggcgatctaaaaataatatttaatcgacaagatgataatgaaagcgt

SEQ ID NO: 830910 - DNA, 75 bp, synthetic construct
  source 1..75: mol_type = other DNA
cgtgtgggtcaggaggtgattgtggacttcctcaacggcgatccggaccagccgatcattatggggcgcacctac

SEQ ID NO: 830911 - DNA, 75 bp, synthetic construct
  source 1..75: mol_type = other DNA
tcttaacatgctggatattaaaggaaaaatcatcacaactgatgcgatgggttgccagaaagatattgcagagaa

SEQ ID NO: 830912 - DNA, 75 bp, synthetic construct
  source 1..75: mol_type = other DNA
gtgatgagcagaaatctcgcagagtgtttccgtattcaaaaaaacagagagcgctctgcaaatagtgagattctg

SEQ ID NO: 830913 - DNA, 75 bp, synthetic construct
  source 1..75: mol_type = other DNA
cacaaacgctgggcccggctatgcccgggaaataccagaatcggacgacaggtcaacacaaaggcattcgagcca

SEQ ID NO: 830914 - DNA, 75 bp, synthetic construct
  source 1..75: mol_type = other DNA
ttaacaatacaggataacaataacaagactgaaactttctcgtttacaaacttacaatgggaaaatttgctgcaa

SEQ ID NO: 830915 - DNA, 75 bp, synthetic construct
  source 1..75: mol_type = other DNA
gcatcggcagactcagcgcaagaggcatataaactactgcagggatatctaaagaatgttaataatcaagctgta

SEQ ID NO: 830916 - DNA, 75 bp, synthetic construct
  source 1..75: mol_type = other DNA
attaagaatatcgttctaaattcagtatacaggaataaacttattttaggtaccgaagaggcattttcaggaata

SEQ ID NO: 830917 - DNA, 75 bp, synthetic construct
  source 1..75: mol_type = other DNA
tttcaaaagtgaggtatgaaaataaaaaaattttaaaatggctatttcagaatatcaggttaattataactaaga

SEQ ID NO: 830918 - DNA, 75 bp, synthetic construct
  source 1..75: mol_type = other DNA
ttacgcgcgctggcggcggcgacactttctaacctgatgagtgccaccattgccgggttctttattggtttagcg

SEQ ID NO: 830919 - DNA, 75 bp, synthetic construct
  source 1..75: mol_type = other DNA
gtagacgccgaaatcaccagcatcgaagagatgcgacgggatatccaggcgctcaagggagcgactaccgaactt

SEQ ID NO: 830920 - DNA, 75 bp, synthetic construct
  source 1..75: mol_type = other DNA
taacggttggataaaaatgttaaggcagcgcgagctgaagctgtctgtaccaatggatggcatcttatttgcccg

SEQ ID NO: 830921 - DNA, 75 bp, synthetic construct
  source 1..75: mol_type = other DNA
tctgctctctatatgacccagatgcactgaaggaaatggtccatcacaacgctagccatcctttcagccgtgagc

SEQ ID NO: 830922 - DNA, 75 bp, synthetic construct
  source 1..75: mol_type = other DNA
ggccgccgaaaaagccgcccttgccgtcgacggtatggtcgcgctggcccctgcggaagccggagagaaacgcga

SEQ ID NO: 830923 - DNA, 75 bp, synthetic construct
  source 1..75: mol_type = other DNA
ccgtgacagacctggaggctggccggatcggcagactgtacggataccggaagcccgccgatggtgataacggcg

SEQ ID NO: 830924 - DNA, 75 bp, synthetic construct
  source 1..75: mol_type = other DNA
agccggatcagtccagacagcagcgaaagaaaaaatatcactgcttgcaccctatgatgagtggtatttcaattt

SEQ ID NO: 830925 - DNA, 75 bp, synthetic construct
  source 1..75: mol_type = other DNA
ttaccgactacattgatgaagattatctacaacgtgttaatgcttttaccagcaaaaatgctaacgttgaagggc

SEQ ID NO: 830926 - DNA, 75 bp, synthetic construct
  source 1..75: mol_type = other DNA
cagcgaaagacggcagcaacgcgccacatgattcatggcggcttccggtcatcagtaccggcgaggccgatacgg

SEQ ID NO: 830927 - DNA, 75 bp, synthetic construct
  source 1..75: mol_type = other DNA
gagcttgaggacttcctgcgtgacaccgtcgcgggggcggaaagcccgtacctgaagcgtaaaggcctggagagt

SEQ ID NO: 830928 - DNA, 75 bp, synthetic construct
  source 1..75: mol_type = other DNA
atggcatttcaattttttcaccctaattccctaccagcagaagttatctatgtggagttattagataccgatggc

SEQ ID NO: 830929 - DNA, 75 bp, synthetic construct
  source 1..75: mol_type = other DNA
agccttccaaaaaaatgataatatccctgctggaacatatacagcaacattctacattcaacaatatcagaacta

SEQ ID NO: 830930 - DNA, 75 bp, synthetic construct
  source 1..75: mol_type = other DNA
ggagagccacaggtcggcccttctaacctgtatttcaaaatcagagaggaccgtcgtaaggcggcgcggggagag

SEQ ID NO: 830931 - DNA, 75 bp, synthetic construct
  source 1..75: mol_type = other DNA
tggaaattgatgctcacaccttattcaccaccaggcggtggcagtgaaaagtattatctgcggtatctgttaatc

SEQ ID NO: 830932 - DNA, 75 bp, synthetic construct
  source 1..75: mol_type = other DNA
atccccctatgtctatccatttctgctgggaatcagtgattgataaaaaagtgtatgaaacctggataacgctgg

SEQ ID NO: 830933 - DNA, 75 bp, synthetic construct
  source 1..75: mol_type = other DNA
agaagaaaataatgatcccttattaaaagtgattccactacgttccttcatcggcatgcttctaggccgttgttc

SEQ ID NO: 830934 - DNA, 75 bp, synthetic construct
  source 1..75: mol_type = other DNA
tctacaacgtgttaatgcttttaccagcaaaaatgctaacgttgaagtaagaatttataaagtatccagtgccgg

SEQ ID NO: 830935 - DNA, 75 bp, synthetic construct
  source 1..75: mol_type = other DNA
cagattcacttcatcaatgagtatacgggggaagtaatggatatgctgggtgcggcggaacaccgcttcggcaaa

SEQ ID NO: 830936 - DNA, 75 bp, synthetic construct
  source 1..75: mol_type = other DNA
cgttgatatcgcaaagcatcttattcagattcacttcatcaatgagtatacgggggaagtaatggatatgctggg

SEQ ID NO: 830937 - DNA, 75 bp, synthetic construct
  source 1..75: mol_type = other DNA
atgattcaatcattaaagaacaacggattgatcaacaagcctgtttttactttggcttatggacctgatactaca

SEQ ID NO: 830938 - DNA, 75 bp, synthetic construct
  source 1..75: mol_type = other DNA
gggaaatgcatctcggccgccggatgaccctggcgctacaggtagggatccagaagctgtccgaaccatccagtg

SEQ ID NO: 830939 - DNA, 75 bp, synthetic construct
  source 1..75: mol_type = other DNA
atctttattgtttgtatctgtcagctaaaaagagaggtattcaattatttgtatgtattttgtttttttctttat

SEQ ID NO: 830940 - DNA, 75 bp, synthetic construct
  source 1..75: mol_type = other DNA
gcagaggaagaaaatacaatctctgtaggttcttctactaaccaacgccgtatcaccaacgtagctgccggtgtt

SEQ ID NO: 830941 - DNA, 75 bp, synthetic construct
  source 1..75: mol_type = other DNA
cggtatgccattgttacaggtcgggcacgatacaatccagcttctgatctggttatagcaatgaaaagctataag

SEQ ID NO: 830942 - DNA, 75 bp, synthetic construct
  source 1..75: mol_type = other DNA
cggagctggtagagatgctgcttgccacgccgaatatggaacaacgcactcagggcattggcattctcgaccgac

SEQ ID NO: 830943 - DNA, 75 bp, synthetic construct
  source 1..75: mol_type = other DNA
caatctgctgcctgacgttgtacattatctttattatcaacatgatggctggcttccagtcctgtttggcaacga

SEQ ID NO: 830944 - DNA, 75 bp, synthetic construct
  source 1..75: mol_type = other DNA
cgccgctgccggcacgtacaaaaaaggccagccgttatccatcgcaaacggccaggtaaaagcccacgcttctgg

SEQ ID NO: 830945 - DNA, 75 bp, synthetic construct
  source 1..75: mol_type = other DNA
gcagaatccgccatcaagtatgtggcaaacaaagactacctgcgctgcctgagtgttgatgacgcaatcccagcc

SEQ ID NO: 830946 - DNA, 75 bp, synthetic construct
  source 1..75: mol_type = other DNA
cgaatctgtccgtgcgttcgttgaagaagatcgcgcatacactacggcggcaggcgatctcctgcgcgttgtcat

SEQ ID NO: 830947 - DNA, 75 bp, synthetic construct
  source 1..75: mol_type = other DNA
atgacgatattcgcttaaaacccttggcttcccttttaatttcatgttcatatggtagtgcattagcagatctgg

SEQ ID NO: 830948 - DNA, 75 bp, synthetic construct
  source 1..75: mol_type = other DNA
cagcttactgctgaagcagtcgcacggaaactgggaatagatgaggttgaagccggaattctgccggatggcaaa

SEQ ID NO: 830949 - DNA, 75 bp, synthetic construct
  source 1..75: mol_type = other DNA
taatgctatcgtttttgccactaacgataatcgcccggacttcctcaacaattacccggcagtagatgcaccagt

SEQ ID NO: 830950 - DNA, 75 bp, synthetic construct
  source 1..75: mol_type = other DNA
tctgcaacgacaaatcctctttaccactgaagatatcaacagcccgaaatcgcaggtcagccaacagcgactgac

SEQ ID NO: 830951 - DNA, 75 bp, synthetic construct
  source 1..75: mol_type = other DNA
atagccgccaaatcctgctcgatgacatcgccattgaaggccagcaaaaactgctcgacagtcaggtgctgatta

SEQ ID NO: 830952 - DNA, 75 bp, synthetic construct
  source 1..75: mol_type = other DNA
gctggagcgcataactgatgccatgttgtcactgcagccgggcgagatcgctgacgaagatcgcaagcaacggca

SEQ ID NO: 830953 - DNA, 75 bp, synthetic construct
  source 1..75: mol_type = other DNA
tgagcggtatagagacgcctgcgggagaactccgactgttcgacggtaaatcgagccagtggcgcagcctggcgt

SEQ ID NO: 830954 - DNA, 75 bp, synthetic construct
  source 1..75: mol_type = other DNA
gcgtctcactgggtgtggtagtcaaccgggacgcggagcgcttttacgatgaaggcgaagatttctggccgaaac

SEQ ID NO: 830955 - DNA, 75 bp, synthetic construct
  source 1..75: mol_type = other DNA
ataccgccggggtcggcatgtccattggcaccacgtttggtcgcatcgcaggtaaagaagccgcgcaggcagcac

SEQ ID NO: 830956 - DNA, 75 bp, synthetic construct
  source 1..75: mol_type = other DNA
cgtaagctgcatacgtttctggctgtagggcgtgactttaccaactggatcaaagggcgcattaagcagtacggg

SEQ ID NO: 830957 - DNA, 75 bp, synthetic construct
  source 1..75: mol_type = other DNA
attagtgacagattattatccttcacagaaagtcaaccgtatttttgcgaccatcatgccgctggtgggtctgtc

SEQ ID NO: 830958 - DNA, 75 bp, synthetic construct
  source 1..75: mol_type = other DNA
ccatcatgccgctggtgggtctatctccggccctggctcctctgttaggaagctggctgctggtccatttttcct

SEQ ID NO: 830959 - DNA, 75 bp, synthetic construct
  source 1..75: mol_type = other DNA
gcgctgatcatcaacgaataccgggagcagggcgggacctccatcagctttccggaagacatcagccgggcgcgc

SEQ ID NO: 830960 - DNA, 75 bp, synthetic construct
  source 1..75: mol_type = other DNA
cagtggcgcagcctggcgttgcgccgcgccagtggttgcccggtatgcggaggaagcaatgcagatcctgtttaa

SEQ ID NO: 830961 - DNA, 75 bp, synthetic construct
  source 1..75: mol_type = other DNA
atgattgcggttaccaacaatcagatacagacggtgggtgtcaaccagatagagacggtgggcagtaaggcggtc

SEQ ID NO: 830962 - DNA, 75 bp, synthetic construct
  source 1..75: mol_type = other DNA
aggaccggcaggcgaggaaatcttctgcgacgaacatggtcacgtgcgggtgaagttcaactgggaccgttataa

SEQ ID NO: 830963 - DNA, 75 bp, synthetic construct
  source 1..75: mol_type = other DNA
cgcgcaaaagctgatttgctggaaaaaacattcacctcccgctcatgggaaagaatcaaaggtatggactggccg

SEQ ID NO: 830964 - DNA, 75 bp, synthetic construct
  source 1..75: mol_type = other DNA
tatcatcaatctgggcttacagttctccatgtacatggtcattctgttgcagggcgtgcgcatgatggtcggtga

SEQ ID NO: 830965 - DNA, 75 bp, synthetic construct
  source 1..75: mol_type = other DNA
gttaaagggataaataattacccggataagattactgttactgtggcactggaaattggtgggtatccgtcactg

SEQ ID NO: 830966 - DNA, 75 bp, synthetic construct
  source 1..75: mol_type = other DNA
actgatgataagcgtcaacaacttgcactacaggttaaacaagagctaggaacagaaacttaccaaagcaacgaa

SEQ ID NO: 830967 - DNA, 75 bp, synthetic construct
  source 1..75: mol_type = other DNA
ataccggaatacacccgggagcgatgataaaccgcgctcaacctaaggcggagccaggtcacgacaaaatccgcg

SEQ ID NO: 830968 - DNA, 75 bp, synthetic construct
  source 1..75: mol_type = other DNA
gtaagcgagggtatagcttcgctgttccgcctcatgccggagcaggtaggcccactgatgacgatggtcacgtcg

SEQ ID NO: 830969 - DNA, 75 bp, synthetic construct
  source 1..75: mol_type = other DNA
tcaatgatattctttatagcgtgcgattaaaaaacattagtaaactggagaatatggagttctgcgctacaaaac

SEQ ID NO: 830970 - DNA, 75 bp, synthetic construct
  source 1..75: mol_type = other DNA
tgttttgtctgagacagtctcattagctaatgaatactggcatccagaaactccaccggtggttatgttgttctc

SEQ ID NO: 830971 - DNA, 75 bp, synthetic construct
  source 1..75: mol_type = other DNA
cactacaggttaaacaagagctaggaacagaaacttaccaaagcaacgaagatttccgtcaacaaattggcgtta

SEQ ID NO: 830972 - DNA, 75 bp, synthetic construct
  source 1..75: mol_type = other DNA
ttcccgttcatcttctcggcacgtgccagtgcagagcgcaggaaggcctccgtctcttcaaccagactcagttgc

SEQ ID NO: 830973 - DNA, 75 bp, synthetic construct
  source 1..75: mol_type = other DNA
tttctccatcactcgccaggcaatcatcaacgatgatctgaatcagatcaccgatgttccgatgaaaatgggccg

SEQ ID NO: 830974 - DNA, 75 bp, synthetic construct
  source 1..75: mol_type = other DNA
cttacattgatcagcaggaagggtttaccactgacggtatcgctacaaaagttcgtatcgatgctggtgtggcgc

SEQ ID NO: 830975 - DNA, 75 bp, synthetic construct
  source 1..75: mol_type = other DNA
cgcgcttctctggtggatcgtggggtaagcggcattcccggtaatccgctgggcatggtcggaatggcgtttact

SEQ ID NO: 830976 - DNA, 75 bp, synthetic construct
  source 1..75: mol_type = other DNA
atgatcagtcgtttgaccggaacattgttatcccgccggttttttattccggtattgtctaccagggaagtgatg

SEQ ID NO: 830977 - DNA, 75 bp, synthetic construct
  source 1..75: mol_type = other DNA
gacagttggggcagttcacgaatcagtaaccttcaggcgatagtggtgaagaaaaacagcgcggggatcagtatc

SEQ ID NO: 830978 - DNA, 75 bp, synthetic construct
  source 1..75: mol_type = other DNA
tgaaaaaagaaaccgatatccgacgcggaaggcattgtgttttcctgatgcatgttcacctggtcttcgttacta

SEQ ID NO: 830979 - DNA, 75 bp, synthetic construct
  source 1..75: mol_type = other DNA
ttaaaccaatggcgcaacctggcgttgcgccgcgccagcagttgcccggtatgcggaggaagcaatgcagatcct

SEQ ID NO: 830980 - DNA, 75 bp, synthetic construct
  source 1..75: mol_type = other DNA
caccggcggtaacagaaccatcaccggtaccggcagtgtctgatgaggcgaccattcgcgcccgcgttatggcag

SEQ ID NO: 830981 - DNA, 75 bp, synthetic construct
  source 1..75: mol_type = other DNA
gtgattgcagaagcgcgtcttgatgcggcagacccgaaaacctggtatctggcggcggcacagggcactgacacc

SEQ ID NO: 830982 - DNA, 75 bp, synthetic construct
  source 1..75: mol_type = other DNA
gaagcctggagaattcagatccggggtgtgcagcgacagaatctgactgggtgcgtgccgggggcgcaatccggg

SEQ ID NO: 830983 - DNA, 75 bp, synthetic construct
  source 1..75: mol_type = other DNA
catggctgaatatggtggttgcggcaggtctgctgaaaattccggcggatgtggagatgaaaacgctatataacg

SEQ ID NO: 830984 - DNA, 75 bp, synthetic construct
  source 1..75: mol_type = other DNA
cagaagaaaccttccagaagtggacccgtaagggacgcctgtcagacttcaaaacagcgtatcgcgtggggatgg

SEQ ID NO: 830985 - DNA, 75 bp, synthetic construct
  source 1..75: mol_type = other DNA
gaactcaccaaagacacgctgggccgctatatcctggcgaacccagcggccctgactggccctaccctttggggc

SEQ ID NO: 830986 - DNA, 75 bp, synthetic construct
  source 1..75: mol_type = other DNA
tcagctttccggtgcgcctgataatgtgctgaataccacaggtgctaatccttcggcgctgggcattgcattata

SEQ ID NO: 830987 - DNA, 75 bp, synthetic construct
  source 1..75: mol_type = other DNA
ctggagagcagggaaaatatggatataaaattacgcgggggcttacagggcaaaatagcacatccggaacgttta

SEQ ID NO: 830988 - DNA, 75 bp, synthetic construct
  source 1..75: mol_type = other DNA
tgtctcagaagaattttcagaagagcaattttacatttacagcagtaccttataaaaatgggaatgctgtactta

SEQ ID NO: 830989 - DNA, 75 bp, synthetic construct
  source 1..75: mol_type = other DNA
caccagaaaaccttgaccctaaaaatgttaacaaccatttaaatagatatattttgcaagaaattgcagagcgaa

SEQ ID NO: 830990 - DNA, 75 bp, synthetic construct
  source 1..75: mol_type = other DNA
ggcaacctctttcaatggcccacttcctgcatcaggcaagataccaaacatagaaaataatcatctcatgattac

SEQ ID NO: 830991 - DNA, 75 bp, synthetic construct
  source 1..75: mol_type = other DNA
ctaaaccgatttgacagacgtgaaagctcatcagttgtgttacacggaaagggtaataagcgtcggcattgccct

SEQ ID NO: 830992 - DNA, 75 bp, synthetic construct
  source 1..75: mol_type = other DNA
cgatatgacagaagacgagataccgggctggctcagcgacattttccatgaagcggcaacagaacgtcaccctga

SEQ ID NO: 830993 - DNA, 75 bp, synthetic construct
  source 1..75: mol_type = other DNA
gagcttacaaaggacacgctgggccgctatatcctggcaaacccggcggcgctgaccgggcccaccctgtggggg

SEQ ID NO: 830994 - DNA, 75 bp, synthetic construct
  source 1..75: mol_type = other DNA
atccggcgttcactgtcgaacagcagagcgggattgacgatctgcgactggcaatgttgcaggcacagctggcac

SEQ ID NO: 830995 - DNA, 75 bp, synthetic construct
  source 1..75: mol_type = other DNA
ggccagttttctctgcctgcagtccgcatgccgtatcgggccttgggttctaacctgttgcgtagatttatgcag

SEQ ID NO: 830996 - DNA, 75 bp, synthetic construct
  source 1..75: mol_type = other DNA
ataactcgctggcgggtgataaggccagggaatcggtcaaacaaagtgctgaatggtggaaaacacaggtcaggg

SEQ ID NO: 830997 - DNA, 75 bp, synthetic construct
  source 1..75: mol_type = other DNA
acagttagataagaaatttaaacatgcttctgattttggcgtaataacaactaagaaaaatagtgataccattgc

SEQ ID NO: 830998 - DNA, 75 bp, synthetic construct
  source 1..75: mol_type = other DNA
acttcctcaacggcgatccggaccagccgatcattatggggcgtacctaccaccaggaaaaccgcacccccggca

SEQ ID NO: 830999 - DNA, 75 bp, synthetic construct
  source 1..75: mol_type = other DNA
ccgagtggagtccgctgttcagcgagccgcatccttcccgtgagttttgtgtccagtacggcgaaaccgattacg

SEQ ID NO: 831000 - DNA, 75 bp, synthetic construct
  source 1..75: mol_type = other DNA
tcttcttttatgaggagcacgcgcaaaaaagtaccgaccagagcctggtcctgtgcgacaccgtgcgttatctgc

SEQ ID NO: 831001 - DNA, 75 bp, synthetic construct
  source 1..75: mol_type = other DNA
ccgacagctggagccgttgtgcctgcgacattggcagtgaagagcggggataaaggattagtaaccttaaaacag

SEQ ID NO: 831002 - DNA, 75 bp, synthetic construct
  source 1..75: mol_type = other DNA
caaaaaggttacttttgtcgttagtcgtttgcactgcgataatttcacaaaatgccggtgcagataacgccatgc

SEQ ID NO: 831003 - DNA, 75 bp, synthetic construct
  source 1..75: mol_type = other DNA
ttcgattacggctgtgataagatggaagtatgagtggtataaggataataccgttacagatgactggactatatg

SEQ ID NO: 831004 - DNA, 75 bp, synthetic construct
  source 1..75: mol_type = other DNA
cttgaaatcgacttcaagggagagactgtaagtaaatggactttttcctctgacaataacaacaccaaaactgga

SEQ ID NO: 831005 - DNA, 75 bp, synthetic construct
  source 1..75: mol_type = other DNA
ctcgaaatcgaatttaaagacgaaacggtcagaaaatggacgttctcagaaaattacagcaagatgaaaaccggt

SEQ ID NO: 831006 - DNA, 75 bp, synthetic construct
  source 1..75: mol_type = other DNA
ctttacagatatgctggatggatgttcagttggagtacgcacagaggaggttgtaacccgtgtataccatgccaa

SEQ ID NO: 831007 - DNA, 75 bp, synthetic construct
  source 1..75: mol_type = other DNA
cagccgttgctgaaaccgctggtggacggcccgcagagcgccgtcgtgacgggaccggcaggcgaggaaatcttc

SEQ ID NO: 831008 - DNA, 75 bp, synthetic construct
  source 1..75: mol_type = other DNA
acaaaaaagccatcacggacgatatggcagggcgatgaagtacagcgccgggtgaaaggcgtggtgacctggttt

SEQ ID NO: 831009 - DNA, 75 bp, synthetic construct
  source 1..75: mol_type = other DNA
tttatgtattcaggaatgattaatactctttcgtttgatttcgattcaatacaatatggatattttgaaagtgaa

SEQ ID NO: 831010 - DNA, 75 bp, synthetic construct
  source 1..75: mol_type = other DNA
tcgatcagtgaaggcgcttcccgattatctcttcctgaaggcactgaaccgccccgggtttcctggagagtgttt

SEQ ID NO: 831011 - DNA, 75 bp, synthetic construct
  source 1..75: mol_type = other DNA
ttaaataatatatatggtaaatctattgattatgcagcgctgcgtcatcgggatataattattgcaaaaatagat

SEQ ID NO: 831012 - DNA, 75 bp, synthetic construct
  source 1..75: mol_type = other DNA
caccaaaacagaagtttgtgggcatggtttccgctctatggcctgtagtgccttaatcgaatccggcttatggtc

SEQ ID NO: 831013 - DNA, 75 bp, synthetic construct
  source 1..75: mol_type = other DNA
aagtgtatgactaccccggacgtttcaagggtgcccacgggcagaactttgcccgctggcagatggacggctggc

SEQ ID NO: 831014 - DNA, 75 bp, synthetic construct
  source 1..75: mol_type = other DNA
acatgatggttcacgccatggggcgggcggtcatggagttgtcactggcagatttacctatgacccagcaaaaca

SEQ ID NO: 831015 - DNA, 75 bp, synthetic construct
  source 1..75: mol_type = other DNA
caggttgcaagtcctggccaaaacatcaggtggtgctggttttggtgctctggtcggagaagaactgtctataac

SEQ ID NO: 831016 - DNA, 75 bp, synthetic construct
  source 1..75: mol_type = other DNA
agaacgatatacttttgatgtagaaaccaagaatggccttccctccacggttcagctattttatgaggaatctaa

SEQ ID NO: 831017 - DNA, 75 bp, synthetic construct
  source 1..75: mol_type = other DNA
cagatcatccagcaggccggtaactccgtgttggcaaaagctaaccaggtaccgcagcaggttctgtctctgctg

SEQ ID NO: 831018 - DNA, 75 bp, synthetic construct
  source 1..75: mol_type = other DNA
cattatggatattcccttctggtcgctggttccaaccatcacgctcgataaacgtgagcgcgaacaactggttcc

SEQ ID NO: 831019 - DNA, 75 bp, synthetic construct
  source 1..75: mol_type = other DNA
acatcctctggggcatgacttacaccattatggatatgaggtgtactgacaatagcggacactaccatttgttct

SEQ ID NO: 831020 - DNA, 75 bp, synthetic construct
  source 1..75: mol_type = other DNA
tcaaagtgggatcaaaccaggttgaaaaggtggggatcattcgtgcgctgacggtgggtgtagcttaccagacga

SEQ ID NO: 831021 - DNA, 75 bp, synthetic construct
  source 1..75: mol_type = other DNA
gggatcgactttaaacagtttgctgtcacgctacgcgatgcgcagggggatatccctgctgttgtgatgcattac

SEQ ID NO: 831022 - DNA, 75 bp, synthetic construct
  source 1..75: mol_type = other DNA
caatgcagcgacaaacctttccccctggcgacggttgctaactccggcgctcggcggactgcggcgggtttgttg

SEQ ID NO: 831023 - DNA, 75 bp, synthetic construct
  source 1..75: mol_type = other DNA
aaacttttatcacattcctatatttctataatctcatcaaaggaagtaattcaacatctggtgtaatgaacgatc

SEQ ID NO: 831024 - DNA, 75 bp, synthetic construct
  source 1..75: mol_type = other DNA
cctatcggtatcctcatcgcgctgggattcaacccactgaaagccgcaattgcttcactggttgctaataccgta

SEQ ID NO: 831025 - DNA, 75 bp, synthetic construct
  source 1..75: mol_type = other DNA
tcaccccctacagtgaaaagcgccttgatgtgctggcaggatacctttcaggaatgcctgccccggtctggcaaa

SEQ ID NO: 831026 - DNA, 75 bp, synthetic construct
  source 1..75: mol_type = other DNA
attaaagaagccctgaatgcgccgttgccgtggagctatcgcggcgttattcatcccgacaccgatccgattctg

SEQ ID NO: 831027 - DNA, 75 bp, synthetic construct
  source 1..75: mol_type = other DNA
cactatgaagtactgctgtgcctacatcgcaatactcggcttaaaagtaggtctcttttacttctggtttatgcg

SEQ ID NO: 831028 - DNA, 75 bp, synthetic construct
  source 1..75: mol_type = other DNA
cttccggtgccacgggtgggaaaatgatttcaccgcaaagtattgccattgccgtttctgccacaaaaatggaag

SEQ ID NO: 831029 - DNA, 75 bp, synthetic construct
  source 1..75: mol_type = other DNA
tgctgttccgggtcggttctatttacctgtttatttttatctttattctgctgtgctcaccgttattcccaacga

SEQ ID NO: 831030 - DNA, 75 bp, synthetic construct
  source 1..75: mol_type = other DNA
tgagctgggattttaagagcaatagcccgtgcaagtttgggaaaaagatcatcgtcacagggctggtcaaatatg

SEQ ID NO: 831031 - DNA, 75 bp, synthetic construct
  source 1..75: mol_type = other DNA
atcaactttcgatcagtgaaggcgcttcccgattatctcttcctgaaggcactttaggacaatgggttaccgccg

SEQ ID NO: 831032 - DNA, 75 bp, synthetic construct
  source 1..75: mol_type = other DNA
tctgaaattctgcaactgcgtaaggcgttaaatgaagctcgccttgagcgagatatattaaaaaaagcaactgta

SEQ ID NO: 831033 - DNA, 75 bp, synthetic construct
  source 1..75: mol_type = other DNA
agcgctttagttgccaatacgggcgcggggactgatattgatggataccagaggtcatctcacttcactattacc

SEQ ID NO: 831034 - DNA, 75 bp, synthetic construct
  source 1..75: mol_type = other DNA
aagcgcatagagctggagaagaaacggcactgtggcgagtatctgctgcgcgatctggctgccagaaccttcctg

SEQ ID NO: 831035 - DNA, 75 bp, synthetic construct
  source 1..75: mol_type = other DNA
attggcggtgatgtggctggaacctgggcaatgcggaatggatatgcctttgactgctggctgatgcagccaacc

SEQ ID NO: 831036 - DNA, 75 bp, synthetic construct
  source 1..75: mol_type = other DNA
ggtgagctgttattgctagaatgcgtgtccgtaaaaattcccggaattatttttttgaaatcctgcagcgatttt

SEQ ID NO: 831037 - DNA, 75 bp, synthetic construct
  source 1..75: mol_type = other DNA
tgagttaggaattaatgaattcattgatagcaaaaaagagcttcaaatgctaagttacaaccaagtaaataaaat

SEQ ID NO: 831038 - DNA, 75 bp, synthetic construct
  source 1..75: mol_type = other DNA
attaactggaactgtgcagcctcgaaagccccaccgaagactcctgatgaaaaacaggatacgccggatatgaga

SEQ ID NO: 831039 - DNA, 75 bp, synthetic construct
  source 1..75: mol_type = other DNA
ggattaccagcgcacacagtatgaagtgtatgactaccccggacgtttcaagggggcccacgggcagaactttgc

SEQ ID NO: 831040 - DNA, 75 bp, synthetic construct
  source 1..75: mol_type = other DNA
ataatgaactatacaaaaacaggagcatggaaagagaaaaactaacaaaagaaatatggcattatatagttaaag

SEQ ID NO: 831041 - DNA, 75 bp, synthetic construct
  source 1..75: mol_type = other DNA
attgaaaactcgaacggtataggcctaaccatcaatgactatggcaccagtatcgatcttggaagcggaagtaaa

SEQ ID NO: 831042 - DNA, 75 bp, synthetic construct
  source 1..75: mol_type = other DNA
atgtttgaagtaattattacttctgacgtgccttgcctttttttttggagctatggaatgatcatcgaaaaagtc

SEQ ID NO: 831043 - DNA, 75 bp, synthetic construct
  source 1..75: mol_type = other DNA
gtgagcatctggagctctgctgtggtaaggcaaggctggtgctgacgaaggacggacaaattatcccagaacttc

SEQ ID NO: 831044 - DNA, 75 bp, synthetic construct
  source 1..75: mol_type = other DNA
ttagcatcaatatggataatgaaaaactcaaccaatccactcagaacaaccatgttttgggtacaggttatgtca

SEQ ID NO: 831045 - DNA, 75 bp, synthetic construct
  source 1..75: mol_type = other DNA
atgtgccgcgcgcgacaaattgcgctcgccagccacgatgacgcaacgcacgcccacgttgccgaatctcaccag

SEQ ID NO: 831046 - DNA, 75 bp, synthetic construct
  source 1..75: mol_type = other DNA
gaagctcgccttgagcgcgatatattaaaaaaatcaacagcgtattttgcacaggagtcgctgaaaaatacgcgt

SEQ ID NO: 831047 - DNA, 75 bp, synthetic construct
  source 1..75: mol_type = other DNA
tgccgcgctgaaaaccctcgataccattaaaggtgaaggttgggctgctattgttgccgacttgcgtggtgaagc

SEQ ID NO: 831048 - DNA, 75 bp, synthetic construct
  source 1..75: mol_type = other DNA
aaatccgtattcatattgtttgcgatgtccctgatgaacttattgatttcacgtttgaatggaaaggactgaaaa

SEQ ID NO: 831049 - DNA, 75 bp, synthetic construct
  source 1..75: mol_type = other DNA
gcaattataaaatctataccaagggcaactcttacagataaattagaaaatgaattaacaaaagaaatatataaa

SEQ ID NO: 831050 - DNA, 75 bp, synthetic construct
  source 1..75: mol_type = other DNA
tctaagtatatttggtggtattcaactggccgatatttatagttcttatgccgttggtataagtaaggatgccgg

SEQ ID NO: 831051 - DNA, 75 bp, synthetic construct
  source 1..75: mol_type = other DNA
cagcgatcagttcagtaactttgacagtggcttatttgatgtcacagtcattgagagtaacggacagaaacaaat

SEQ ID NO: 831052 - DNA, 75 bp, synthetic construct
  source 1..75: mol_type = other DNA
acattattaacaacagtgaagaatttgccgctgccgtgaagaaacgcggtattactgatgcgaaaaaagtgatta

SEQ ID NO: 831053 - DNA, 75 bp, synthetic construct
  source 1..75: mol_type = other DNA
agtcgctggacaacaccgacgccgttgtctggatgaccaccggcaccacacatgtggcccgcgccgaagagtggc

SEQ ID NO: 831054 - DNA, 75 bp, synthetic construct
  source 1..75: mol_type = other DNA
gcaaagtcatgtacgaaggttctctcggcggcatgattgtgccttacggtgatcctgatattggctggtacttta

SEQ ID NO: 831055 - DNA, 75 bp, synthetic construct
  source 1..75: mol_type = other DNA
ttcagtctgttctgcccatccgttggttatcgaagcggcgctggcatttgatcgcaacagcacgcgcaaagtgct

SEQ ID NO: 831056 - DNA, 75 bp, synthetic construct
  source 1..75: mol_type = other DNA
aattgctggatgggattgaggttgagtgggtacctgtatcagaactatttcaaattaaaaatgggtatacacctt

SEQ ID NO: 831057 - DNA, 75 bp, synthetic construct
  source 1..75: mol_type = other DNA
caaactctggcaagcctatcagccgcagatgcaggactatatcacgcgcgcgctcgaccccactcaggcgccgag

SEQ ID NO: 831058 - DNA, 75 bp, synthetic construct
  source 1..75: mol_type = other DNA
tgctgaagccacgctggatgtattcgatcgcgaaccgctgccgccgcacgacccgctgtggcagatggacaatgt

SEQ ID NO: 831059 - DNA, 75 bp, synthetic construct
  source 1..75: mol_type = other DNA
gcgacatcccggcttttgagcgcgcgcagcgtgaacgacgctggcgctatctgcatccgcgcgcgcctgccggca

SEQ ID NO: 831060 - DNA, 75 bp, synthetic construct
  source 1..75: mol_type = other DNA
atctcaggctgttggtcaatcttggcgcgggcgtcgattcgctggtcgggcgcaacgacctgccggatattccca

SEQ ID NO: 831061 - DNA, 75 bp, synthetic construct
  source 1..75: mol_type = other DNA
ctgcaccgtgagacggtgcgcagcttcggcagcatggcaggcagtaatgccgcatataaactgaccagcacatac

SEQ ID NO: 831062 - DNA, 75 bp, synthetic construct
  source 1..75: mol_type = other DNA
agttaaagatttagctgattatataaaaatcaaatcaggtacatcacctaactattcactctttcttggtgctgg

SEQ ID NO: 831063 - DNA, 75 bp, synthetic construct
  source 1..75: mol_type = other DNA
atgagaaaattagccggcagcgccgtgatttatggaaggcggaaagtcagtatgcggtcctgaaagaggctgcca

SEQ ID NO: 831064 - DNA, 75 bp, synthetic construct
  source 1..75: mol_type = other DNA
gaatagccccttttatcatatttaaatcaagatatgaaatcggttgtaacaaagacattaatactggtattaaac

SEQ ID NO: 831065 - DNA, 75 bp, synthetic construct
  source 1..75: mol_type = other DNA
attaatcgataacgctgataatgacaatataaaatccaaatacctgcgcaggctaattgaaataaaagaagaaca

SEQ ID NO: 831066 - DNA, 75 bp, synthetic construct
  source 1..75: mol_type = other DNA
acaaaacatcatcaaaaaataaaaaaagaaacatattaaaatatttaacacaactgcatctatctttatttgaaa

SEQ ID NO: 831067 - DNA, 75 bp, synthetic construct
  source 1..75: mol_type = other DNA
acttgataaaataaaagatgttaaccctactcacgatacatatttgtcgttatatactgatttcacctgcgcatt

SEQ ID NO: 831068 - DNA, 75 bp, synthetic construct
  source 1..75: mol_type = other DNA
tattgccgctgcggcagtgctgtatggtatcgccagcggtaaggctgggtttgatgcgacaaccagcggttttgc

SEQ ID NO: 831069 - DNA, 75 bp, synthetic construct
  source 1..75: mol_type = other DNA
cagcgttatcagtcggcctcgcctgagcagcgccaggcagtccgcgagaaaatgcagactaacccacagatccag

SEQ ID NO: 831070 - DNA, 75 bp, synthetic construct
  source 1..75: mol_type = other DNA
gattattgcagacttgggatgatgccagatctggagcatgtacggggggagtttgtggtgttctttcacgtataa

SEQ ID NO: 831071 - DNA, 75 bp, synthetic construct
  source 1..75: mol_type = other DNA
ccaattcacgatacatatttacacctatattctgaattcacatgctccttacagaaaaaggatgagattctaaca

SEQ ID NO: 831072 - DNA, 75 bp, synthetic construct
  source 1..75: mol_type = other DNA
tatagtgataaattgatcgcgcttgatgaattcaatataaattatgttttatccaggacaaacatttttacagat

SEQ ID NO: 831073 - DNA, 75 bp, synthetic construct
  source 1..75: mol_type = other DNA
aaataatgagtattcttcccttttcgaaaaaaaatttgatcttccatctcaacgcagacgatttgttgaacttca

SEQ ID NO: 831074 - DNA, 75 bp, synthetic construct
  source 1..75: mol_type = other DNA
aacatctcaaccaaagtctttaatagtggattaggtatttccgtattccgcgacaactccactcgtacccgcttc

SEQ ID NO: 831075 - DNA, 75 bp, synthetic construct
  source 1..75: mol_type = other DNA
tggtacggatgcagccagcgggctggcaattgcgattctggatgatgcgaagatattgattccgcttaaccaggc

SEQ ID NO: 831076 - DNA, 75 bp, synthetic construct
  source 1..75: mol_type = other DNA
acggtagatggaaaaaaaatgggcttcatccgccgatatgtgagttttacatacaagaaattccgtgataccgtt

SEQ ID NO: 831077 - DNA, 75 bp, synthetic construct
  source 1..75: mol_type = other DNA
aaacagacgtattataaaaatgttgaaacatactctctatgggctccgaagaagcgatcgctggaagcgattgtc

SEQ ID NO: 831078 - DNA, 75 bp, synthetic construct
  source 1..75: mol_type = other DNA
cacggcgcagacggacgcggcgggacggcggacagagtacggtctgaatgtggtgtccggcgatatcacggacat

SEQ ID NO: 831079 - DNA, 75 bp, synthetic construct
  source 1..75: mol_type = other DNA
aaggcgacatggtgaacgatatcaaaccgatctgggcttatgctgattcgctgcacaacggcacctgtaaccagt

SEQ ID NO: 831080 - DNA, 75 bp, synthetic construct
  source 1..75: mol_type = other DNA
gtgaaaacgctggagaaaaccaccgttgccgacaccaataccgagtggagcaagttacaggccaccgcgtggatg

SEQ ID NO: 831081 - DNA, 75 bp, synthetic construct
  source 1..75: mol_type = other DNA
aaagatcgggagtccgtattctggttgaacgtgaaaaacatccctccttcacttgataaaaaaataccaatgttc

SEQ ID NO: 831082 - DNA, 75 bp, synthetic construct
  source 1..75: mol_type = other DNA
tttaaaaacggctggcgagttaccaaaagatcgggagtccgtattctggttgaacgtgaaaaatatccctccttc

SEQ ID NO: 831083 - DNA, 75 bp, synthetic construct
  source 1..75: mol_type = other DNA
ttcctggactaatgattgattatgtttttgtagatgaagctcaaaagttaacaacaaaaaatgattcgaggagtc

SEQ ID NO: 831084 - DNA, 75 bp, synthetic construct
  source 1..75: mol_type = other DNA
cgatagaaacaggaatatctggaaaggagaaaggcacatttacatttactgcagttccatataaagacgggaata

SEQ ID NO: 831085 - DNA, 75 bp, synthetic construct
  source 1..75: mol_type = other DNA
aataattacaggacgcactgtggagtggttgatataaatcttaattttttcaatgatattctttatagcgtgcga

SEQ ID NO: 831086 - DNA, 75 bp, synthetic construct
  source 1..75: mol_type = other DNA
tgatacaaatatatctgatcttttttttcaagatatgcaaaattactataatgccgatgtgatgttacaaatccc

SEQ ID NO: 831087 - DNA, 75 bp, synthetic construct
  source 1..75: mol_type = other DNA
ataaatgtaaaaggagagcggtatcattcatcaattacatcagcaatgttgtttggtatgtcaatgctcaacgag

SEQ ID NO: 831088 - DNA, 75 bp, synthetic construct
  source 1..75: mol_type = other DNA
agatgaactgaaagcccgtcctataatggtaggttttttcttcaccggtagcgctattatgggaattctggtcag

SEQ ID NO: 831089 - DNA, 75 bp, synthetic construct
  source 1..75: mol_type = other DNA
atgacagcacagatagccgcttacgggcggctgacaaatgacccgcagttaaagaccaccagcaagggtacacaa

SEQ ID NO: 831090 - DNA, 75 bp, synthetic construct
  source 1..75: mol_type = other DNA
ccttttaataaagatgataaaagcaaagcgccatttacagttatccctccggtttcacggttagagcctgcgcaa

SEQ ID NO: 831091 - DNA, 75 bp, synthetic construct
  source 1..75: mol_type = other DNA
cggaacggcgacgatgtggttatccgtcctggcgtttggcagacaggccgaagcactggcaaagcaccgcaaggg

SEQ ID NO: 831092 - DNA, 75 bp, synthetic construct
  source 1..75: mol_type = other DNA
cgatgtacttttgatgtagaaactaagaatgaccttccctccacggttcagctattttatgaggaatctaaggat

SEQ ID NO: 831093 - DNA, 75 bp, synthetic construct
  source 1..75: mol_type = other DNA
tggcctttgccatcgctgcggcaatcgctgttaacgtcgccttgttcggcggtttgttccttctagtcaatccat

SEQ ID NO: 831094 - DNA, 75 bp, synthetic construct
  source 1..75: mol_type = other DNA
cagtgagctgtccgggctgcagagaattgaatatctggcgtttgttcagcagcgaacggcaaagtttgatgccga

SEQ ID NO: 831095 - DNA, 75 bp, synthetic construct
  source 1..75: mol_type = other DNA
aattcaggttgtcaaagaagaaccgaattactgctatgaaagagtgtatggcagcataaaatcgaacagacatgc

SEQ ID NO: 831096 - DNA, 75 bp, synthetic construct
  source 1..75: mol_type = other DNA
tgattatgccggagttttctttactgaaaatggaggaacccttgatctaaatggttatgaccagatatttaagta

SEQ ID NO: 831097 - DNA, 75 bp, synthetic construct
  source 1..75: mol_type = other DNA
gttacctttacctgctaattctgcgggaggccaaatgacctggcgatttattaatgattacggcgcagtcagtga

SEQ ID NO: 831098 - DNA, 75 bp, synthetic construct
  source 1..75: mol_type = other DNA
aataacccagataaatctatttctgtatttagcaaggaagaaaaaattccttatctcatccaggcatgggtagat

SEQ ID NO: 831099 - DNA, 75 bp, synthetic construct
  source 1..75: mol_type = other DNA
ctgttctggcgaccggcaagcattcgtctgattcccgaagatgccgcaccgaaagtgaagtggcatcgagaaggg

SEQ ID NO: 831100 - DNA, 75 bp, synthetic construct
  source 1..75: mol_type = other DNA
cttaatccacagccaatggcttattacgacggctgtattagcgttgatttaagcgctatcaagccaatgattgcg

SEQ ID NO: 831101 - DNA, 75 bp, synthetic construct
  source 1..75: mol_type = other DNA
agtctgacggctgaagagcgcgagattatcaaggcgggtagtttgattaacttcaataaaaaccgtcagatgtaa

SEQ ID NO: 831102 - DNA, 75 bp, synthetic construct
  source 1..75: mol_type = other DNA
tatgaccactgaaacgacctgtttaagttctgtctggcaaaccgatgaagaagtccataactggctggcgctgca

SEQ ID NO: 831103 - DNA, 75 bp, synthetic construct
  source 1..75: mol_type = other DNA
gctggaaaatcagcgtctggcaggaaacgttagtgaactggcaggggtgtttgcgcgtattaaacagattgctgg

SEQ ID NO: 831104 - DNA, 75 bp, synthetic construct
  source 1..75: mol_type = other DNA
caggatgtggcgttggcaattatcggcgcggtgttcaaaaacggctacgtcaaaaataaagtgatggagttcgtg

SEQ ID NO: 831105 - DNA, 75 bp, synthetic construct
  source 1..75: mol_type = other DNA
gacacctgggatatcgactatccgggcgttgttgcggtgcatttgaccggaaaaccagcaccctatgtggggccg

SEQ ID NO: 831106 - DNA, 75 bp, synthetic construct
  source 1..75: mol_type = other DNA
ttgcacgtattatgtcaggattattgcatttttttccctcgttaatatccacaactctcgcagaatatgcggctg

SEQ ID NO: 831107 - DNA, 75 bp, synthetic construct
  source 1..75: mol_type = other DNA
cattttcaggtgtaggtagtctggcgtcgccacagaagttcagtattaagcttgaaaattgcccggcaacgtaca

SEQ ID NO: 831108 - DNA, 75 bp, synthetic construct
  source 1..75: mol_type = other DNA
ggagggaggttgcggcggcgaacggcagagcgaaactttaactgctggctagccgtcgaagcaaacgagcttaat

SEQ ID NO: 831109 - DNA, 75 bp, synthetic construct
  source 1..75: mol_type = other DNA
ccaatcaacaacggtttgagtattcgccacaccacgcgtaacttcccgaaccgcgaaggctctaagccagctaat

SEQ ID NO: 831110 - DNA, 75 bp, synthetic construct
  source 1..75: mol_type = other DNA
gatgttgtcgggatcgacaacatgaacgactattatgacgtcagcctaaagcaggcccgtctggatcgcctggca

SEQ ID NO: 831111 - DNA, 75 bp, synthetic construct
  source 1..75: mol_type = other DNA
caaaagcctttagaaaaactagaacttgtacatacacgaattgcaagtttgttatcacggattgcgttgccagaa

SEQ ID NO: 831112 - DNA, 75 bp, synthetic construct
  source 1..75: mol_type = other DNA
atggcgtactacgatggctgcatcagcgttgatttaagcgccatcaaaccaatgattgcgctgccgttccacccg

SEQ ID NO: 831113 - DNA, 75 bp, synthetic construct
  source 1..75: mol_type = other DNA
ttgagtacggaggaatttctactggcacgataatcgaaagtggcaatcaatatgtttataaaggtggtaccagca

SEQ ID NO: 831114 - DNA, 75 bp, synthetic construct
  source 1..75: mol_type = other DNA
atgatctattgtgcgctgtttgccccagcgtattttcccgcgttacaacgtctgagcggagagaaagaaacgcgt

SEQ ID NO: 831115 - DNA, 75 bp, synthetic construct
  source 1..75: mol_type = other DNA
ccaaataagaggaccaggctaccaagaaaattcaaacaaacgcaatgtatttcattattttcgtcgacaattttc

SEQ ID NO: 831116 - DNA, 75 bp, synthetic construct
  source 1..75: mol_type = other DNA
atgacggcacagatagcagcttacgggcggctggtggaggacccgcaggtaaaacagaccagcaagggaacaccc

SEQ ID NO: 831117 - DNA, 75 bp, synthetic construct
  source 1..75: mol_type = other DNA
tatattgacagagtatggaataatgggctggcttatggagatgggcacaaattaccattcaataaagttcgttgg

SEQ ID NO: 831118 - DNA, 75 bp, synthetic construct
  source 1..75: mol_type = other DNA
tttttctgagaaaatctatgacataaaagtttctgggaaaaagaatatcgaatggagtgtgataacagattttgg

SEQ ID NO: 831119 - DNA, 75 bp, synthetic construct
  source 1..75: mol_type = other DNA
ggataaggataccgggcgggagttccgtccgtatatagaggcaaactggctccataacactcatgaatttggtgt

SEQ ID NO: 831120 - DNA, 75 bp, synthetic construct
  source 1..75: mol_type = other DNA
aaagaagaatcgaagaaattcagcgccaatctgaacggcactgaaattgccattacctatgttgatcctacccac

SEQ ID NO: 831121 - DNA, 75 bp, synthetic construct
  source 1..75: mol_type = other DNA
atgaaggtacattgacacaggcgaggggggttaatgttaaaaatggcgggattatattgggttctgcagtagtca

SEQ ID NO: 831122 - DNA, 75 bp, synthetic construct
  source 1..75: mol_type = other DNA
ttttcagcgagtcagtgcgggtggtacagccaccggaacaaaactgagcgctggtacacagaatatctcctctgg

SEQ ID NO: 831123 - DNA, 75 bp, synthetic construct
  source 1..75: mol_type = other DNA
agataaagacaggtattgagggggtgattactcaaaatctgtcagtgaatggcggagtcgcatatcaggcaggag

SEQ ID NO: 831124 - DNA, 75 bp, synthetic construct
  source 1..75: mol_type = other DNA
tttctttgacattcgttgcttgcgctggctttgctgcatatcacttcaatagtgtgccattgatgttcacttctg

SEQ ID NO: 831125 - DNA, 75 bp, synthetic construct
  source 1..75: mol_type = other DNA
gcaggttatcgcagacagcgtaatcagtgcccgcgcggcacgtccaggcgggaacagacgcaaaaccacaggcac

SEQ ID NO: 831126 - DNA, 75 bp, synthetic construct
  source 1..75: mol_type = other DNA
gtaaaaaaggccaacaggggcaggccactgacgcactgaacagggcaaaacaacaggcggggaatgatgatccgt

SEQ ID NO: 831127 - DNA, 75 bp, synthetic construct
  source 1..75: mol_type = other DNA
gccgtcgaagagctaaactatcgtcccaatgtcattgcgcagtcactgctgacgcaatctacgggctgtatcggt

SEQ ID NO: 831128 - DNA, 75 bp, synthetic construct
  source 1..75: mol_type = other DNA
tggtccggattaccgatagcgcgacattaactatcggaaatggcgtcgatacgacgcttgccgacctgacggctg

SEQ ID NO: 831129 - DNA, 75 bp, synthetic construct
  source 1..75: mol_type = other DNA
ttgcatactgctttgccatcgactgaaggttttattcactggcggcaagcgctgcactcatcaaaaatggaaaac

SEQ ID NO: 831130 - DNA, 75 bp, synthetic construct
  source 1..75: mol_type = other DNA
tatgaggggattattgcggaatgcctaggtgtgccacccgaggagatttggcccagccgctacattcgtaaggtc

SEQ ID NO: 831131 - DNA, 75 bp, synthetic construct
  source 1..75: mol_type = other DNA
ttgtgggctaagacaccttagtgttgatcctattgataaattcagcttattgaagctagtaaaaaagcaatactc

SEQ ID NO: 831132 - DNA, 75 bp, synthetic construct
  source 1..75: mol_type = other DNA
gggcagaagctgccagccaggcactgactgcggcactggatttcagtcgccggatggataatgccgcccgtgcac

SEQ ID NO: 831133 - DNA, 75 bp, synthetic construct
  source 1..75: mol_type = other DNA
ttacgaaaagccataaaaactgacaattatgaacatttgctacgagttgttcaattttttagtagcaatacctcc

SEQ ID NO: 831134 - DNA, 75 bp, synthetic construct
  source 1..75: mol_type = other DNA
atagtcagttggcttaacgagaagacgcagacgatgctgggttcatatgttctgcgtggtgatttaattattccc

SEQ ID NO: 831135 - DNA, 75 bp, synthetic construct
  source 1..75: mol_type = other DNA
gttatatcatttatctgcattcccaattaataaatatgatttgttaactaagatatcaaaagcatataacaaaga

SEQ ID NO: 831136 - DNA, 75 bp, synthetic construct
  source 1..75: mol_type = other DNA
attatatcatttatccacattcccgattaataagtatgacctattaacaaaaatatcaaaagtatatgataaaaa

SEQ ID NO: 831137 - DNA, 75 bp, synthetic construct
  source 1..75: mol_type = other DNA
ccgccattaagttacatacctaaaaatattgactcattcaaaattgaacatgaatccgtttggaaaaatgttcag

SEQ ID NO: 831138 - DNA, 75 bp, synthetic construct
  source 1..75: mol_type = other DNA
aaacagaaattgttatttagataaatatggcgatgcaaatatcaatcattattatagaaacttagaaataaaaca

SEQ ID NO: 831139 - DNA, 75 bp, synthetic construct
  source 1..75: mol_type = other DNA
ttaccatattgttagaaacccaacaaatgagaccctatcgattatccgacttatcaaaaatgcttgtttaaaatt

SEQ ID NO: 831140 - DNA, 75 bp, synthetic construct
  source 1..75: mol_type = other DNA
ataaaatgcatcatattcaattcattacgtgcactaggccatgaaaaagaaaattcacttaagcgtatcattaat

SEQ ID NO: 831141 - DNA, 75 bp, synthetic construct
  source 1..75: mol_type = other DNA
ctattttctgctgaggatatatggagaatgaattccgcattcgttggtggaagtaattatattggaagttcttac

SEQ ID NO: 831142 - DNA, 75 bp, synthetic construct
  source 1..75: mol_type = other DNA
tatggcgatgcacgaatcaatgcttcttatacacaattagaaataaaacactcacaacccaaaaatagagcatcc

SEQ ID NO: 831143 - DNA, 75 bp, synthetic construct
  source 1..75: mol_type = other DNA
catggcagcccaggaagtgattgaacaaagggaaagcaattctgacagcgcccccctatacgttattaaaaaact

SEQ ID NO: 831144 - DNA, 75 bp, synthetic construct
  source 1..75: mol_type = other DNA
aggggcgacaaaaagttgaagacggtttgggcgacctcaacaagccgctgagtaatcagaacttagttacctgga

SEQ ID NO: 831145 - DNA, 75 bp, synthetic construct
  source 1..75: mol_type = other DNA
ttgttttgtatggcaattctcgagcaagaaccgatatctatcagagccttagggaatccatacgaagtggagaac

SEQ ID NO: 831146 - DNA, 75 bp, synthetic construct
  source 1..75: mol_type = other DNA
caagtatgatctcgcaccaaacttgacacctattgtgtctaagtcaagaataccctcaaaagatgaaactgatag

SEQ ID NO: 831147 - DNA, 75 bp, synthetic construct
  source 1..75: mol_type = other DNA
aagatgttggcactgtactcaatagtgctggcacccaaacaatatatgccagtgccacttctgataaagcaaata

SEQ ID NO: 831148 - DNA, 75 bp, synthetic construct
  source 1..75: mol_type = other DNA
gcaggtcatcgcagacagcgtaatcagtgcgcgaaccgtgcgactaggaggcaggaaaggacagcaagggcaggc

SEQ ID NO: 831149 - DNA, 75 bp, synthetic construct
  source 1..75: mol_type = other DNA
cacagaatattaataatcatggtattgccacgggtaccaatatcaacggcggaacgcaaaatatcaagagcggcg

SEQ ID NO: 831150 - DNA, 75 bp, synthetic construct
  source 1..75: mol_type = other DNA
cgttttgttttacagaacttaggtaatacagaactaccatttgctgtcaaggtgtggggttcaggtgatcgacaa

SEQ ID NO: 831151 - DNA, 75 bp, synthetic construct
  source 1..75: mol_type = other DNA
tctgccaacgcaaagccagaactaaattacccgatacagcttgctggtgcattgttagtgcaaagaactggtgct

SEQ ID NO: 831152 - DNA, 75 bp, synthetic construct
  source 1..75: mol_type = other DNA
accaactggcaggacatgagaaaggcaacgtaatcagcgtatccggcacgatgcagataagccagtggaccggac

SEQ ID NO: 831153 - DNA, 75 bp, synthetic construct
  source 1..75: mol_type = other DNA
tccggatgaagcagggcgttacagcatggacgttgagtacggtcagtacagcgttattctgttggtggaaggctt

SEQ ID NO: 831154 - DNA, 75 bp, synthetic construct
  source 1..75: mol_type = other DNA
ttgggttcatcagtcggcgtaagtaagatgctgtcgctaaaaaatttctttagcggagctgagatactgttaaat

SEQ ID NO: 831155 - DNA, 75 bp, synthetic construct
  source 1..75: mol_type = other DNA
gatcagaagtgtcaacaaaaagatattccggtctatttgttggttcagatacaaaatcattgtattcgtacattt

SEQ ID NO: 831156 - DNA, 75 bp, synthetic construct
  source 1..75: mol_type = other DNA
ctgtttatctggcaggttatgtcccggaatttgttatttatcgcattattggcggtattggcgttggtttagcct

SEQ ID NO: 831157 - DNA, 75 bp, synthetic construct
  source 1..75: mol_type = other DNA
tacactaaatcagtaagttggcagcatcaccgtattggcgttggtttagcctcaatgctctcgccaatgtatatt

SEQ ID NO: 831158 - DNA, 75 bp, synthetic construct
  source 1..75: mol_type = other DNA
ctggctgaatactgacggctggcgttatatgtttgcctcggaatgtatccctgcactgctgttcttaatgctgct

SEQ ID NO: 831159 - DNA, 75 bp, synthetic construct
  source 1..75: mol_type = other DNA
ttactggaggagtttgaagaagtgcatgacgcatacggcactgatgaaatcagcgagacgagttatatcaacaaa

SEQ ID NO: 831160 - DNA, 75 bp, synthetic construct
  source 1..75: mol_type = other DNA
gctgtcagcttccaggatgcaccagcttctgaatggaaagcacaccctttattactccctgacagggatgaaaat

SEQ ID NO: 831161 - DNA, 75 bp, synthetic construct
  source 1..75: mol_type = other DNA
ttccctttgcctggcccacagggtggggatcgtagcggcgggtttactacgccaaccaagccagcagaacctcag

SEQ ID NO: 831162 - DNA, 75 bp, synthetic construct
  source 1..75: mol_type = other DNA
gtcctggcatttggcagacaggccgaagcactggcaaggcaccgcaagggtgaactcctgagcgtggcgggtaac

SEQ ID NO: 831163 - DNA, 75 bp, synthetic construct
  source 1..75: mol_type = other DNA
atgacagatggtatctcaacttcgccacattgtctttataaatcaaatatagtagatgatgtaataataaataaa

SEQ ID NO: 831164 - DNA, 75 bp, synthetic construct
  source 1..75: mol_type = other DNA
gcagaattttaaaactagcaattcggcatattcaaaaccatgtggaaaattatctttatttaaaagcgtgcccag

SEQ ID NO: 831165 - DNA, 75 bp, synthetic construct
  source 1..75: mol_type = other DNA
atgcgatgtgtaaacgtctgggggcttctggggtagtaaaactgaacaaacagactattcaggtgattgtgggcg

SEQ ID NO: 831166 - DNA, 75 bp, synthetic construct
  source 1..75: mol_type = other DNA
atgatcatcaggagacgtcacaaaacgctaagtacagtgcaatagtcaagaaaaaaagttattttaataaggaaa

SEQ ID NO: 831167 - DNA, 75 bp, synthetic construct
  source 1..75: mol_type = other DNA
tgcaaaatatagtgaaacagacaagaaaaaaagtcaccttaaccaggaaatcaaaaagctaatcaaaaaaaatat

SEQ ID NO: 831168 - DNA, 75 bp, synthetic construct
  source 1..75: mol_type = other DNA
catcatcttttcaaatggagaaataaacaacctcttcattaaaaaagcaacatatttggagcatcattcactaat

SEQ ID NO: 831169 - DNA, 75 bp, synthetic construct
  source 1..75: mol_type = other DNA
tttggcttaaaaaccgtaaaagaatttgttaaagcaattctttatattatttttttttgcattggcgatcaaagt

SEQ ID NO: 831170 - DNA, 75 bp, synthetic construct
  source 1..75: mol_type = other DNA
tttggcttaaaaaccgtaaaagaatttgttaaagcaatactttatattattttttttgcattggcgatcaaagta

SEQ ID NO: 831171 - DNA, 75 bp, synthetic construct
  source 1..75: mol_type = other DNA
caaaatggtgtcacttaagaactaccatagtaatgcagagattctacttaatggcagtgatggagcagttcaact

SEQ ID NO: 831172 - DNA, 75 bp, synthetic construct
  source 1..75: mol_type = other DNA
attaccatttgatactgtgtttcaatcaggatgcttattatcatttaggtgattacgacttaaaccgtaacacgt

SEQ ID NO: 831173 - DNA, 75 bp, synthetic construct
  source 1..75: mol_type = other DNA
gaatataccaaaaatggaaagcggcattatcatttaatactgtgcttcaatcaggatgcttattatcatgtaggt

SEQ ID NO: 831174 - DNA, 75 bp, synthetic construct
  source 1..75: mol_type = other DNA
gtctgagtcaacaggaacaaaaagcattacggaatacatcgttgcgagcgattccttattccttaatcaatgcct

SEQ ID NO: 831175 - DNA, 75 bp, synthetic construct
  source 1..75: mol_type = other DNA
aattgtattgcagtaattgttcctgcgtctattgctcctatgcctcaacgagtaggtgaattttggattaaaggt

SEQ ID NO: 831176 - DNA, 75 bp, synthetic construct
  source 1..75: mol_type = other DNA
aattatgggccttataactggactttcaggaaacagcatagtctcccaactttttttccaccaggcccagattaa

SEQ ID NO: 831177 - DNA, 75 bp, synthetic construct
  source 1..75: mol_type = other DNA
tgaactaaaaaagaaaaaaatgcagataaatgaaagtgagccgactattaatcatttggttaaaataattaaaga

SEQ ID NO: 831178 - DNA, 75 bp, synthetic construct
  source 1..75: mol_type = other DNA
gattatagaaaatgctttattggaacatatcaggaattttgacttttctatgttgaggtcaaacgatgatgatat

SEQ ID NO: 831179 - DNA, 75 bp, synthetic construct
  source 1..75: mol_type = other DNA
ctggcagaggttaaagagttttttggacaccgctggctcgctaaaaagttgtacgctgaggctagcattgatgac

SEQ ID NO: 831180 - DNA, 75 bp, synthetic construct
  source 1..75: mol_type = other DNA
aagtaactgacattgacgtagacgaggactcagacatggaaacatttactcttgagattgataacgcacccagcg

SEQ ID NO: 831181 - DNA, 75 bp, synthetic construct
  source 1..75: mol_type = other DNA
aaatcaatcggatccgctacgaactggaattaatggcagttgctctggctgtagaaaacctctcctcgcaagata

SEQ ID NO: 831182 - DNA, 75 bp, synthetic construct
  source 1..75: mol_type = other DNA
ggatgacagcggcattagcgtgggtatggttggcgaggaaggacatgcctggttaagcggtgtcgctgaaaatca

SEQ ID NO: 831183 - DNA, 75 bp, synthetic construct
  source 1..75: mol_type = other DNA
ataaagatcgcgacaaccagatttacctgtcgatttcgctccccttcggtaacggtggtcgggttggctatgaca

SEQ ID NO: 831184 - DNA, 75 bp, synthetic construct
  source 1..75: mol_type = other DNA
gcgatgcgcaggacgaaaaacagacgatcagcttatccgtgggccaaccgattaccccactaaacctcaatcttt

SEQ ID NO: 831185 - DNA, 75 bp, synthetic construct
  source 1..75: mol_type = other DNA
gtcagcttcggcgcgcagtatagagggtttgcgcgcccttgtcaccccgcgttgcgcattccaatcgccagtgtc

SEQ ID NO: 831186 - DNA, 75 bp, synthetic construct
  source 1..75: mol_type = other DNA
tctaggccagcaatcgctcactggctcaagcagcctacccgggttcagtacgggccgtaccttatgaacccctat

SEQ ID NO: 831187 - DNA, 75 bp, synthetic construct
  source 1..75: mol_type = other DNA
tccatcgcaaggcaaataatttatttgctggcttatgtatatgcatggaatgtggtagatatgttcaggttaaca

SEQ ID NO: 831188 - DNA, 75 bp, synthetic construct
  source 1..75: mol_type = other DNA
gataccgctgcaattttgttgctgccttcagaaatcgttaacgaaagcgcagaaaaaatattaagtgcattcaaa

SEQ ID NO: 831189 - DNA, 75 bp, synthetic construct
  source 1..75: mol_type = other DNA
ctcacagtcggtggggtagaggttaccggtggccacttctatcttggacagcgaatgaaacctgccgggcataac

SEQ ID NO: 831190 - DNA, 75 bp, synthetic construct
  source 1..75: mol_type = other DNA
caggagccccggttccagcggatctggctctgacgtgggtgacaaaccatgctgaatactcattacgaacccccg

SEQ ID NO: 831191 - DNA, 75 bp, synthetic construct
  source 1..75: mol_type = other DNA
tagcactaagtttatttgcattttttctatttaaattattaagtatttttcaatataacttcaggaagataatga

SEQ ID NO: 831192 - DNA, 75 bp, synthetic construct
  source 1..75: mol_type = other DNA
gtatcgtcgatatgaattcgcgtaaaagaacggtaaacaccatgataaacattaaaaacttcagagaatacacac

SEQ ID NO: 831193 - DNA, 75 bp, synthetic construct
  source 1..75: mol_type = other DNA
ccgattaggttcggtagtcgccttgattgacaattctctcgattattatcgatctcggaaagcactccttccaca

SEQ ID NO: 831194 - DNA, 75 bp, synthetic construct
  source 1..75: mol_type = other DNA
ttccccagaagcacgcggtgcgtatgtcagttggcttgccagcgataggtctgatccatcgtgtcctatcggcta

SEQ ID NO: 831195 - DNA, 75 bp, synthetic construct
  source 1..75: mol_type = other DNA
gaaatttgttttacgtcgcttgttccagaccccaaaagcgccttgcgatccttttcaaccaagctttgtcacctg

SEQ ID NO: 831196 - DNA, 75 bp, synthetic construct
  source 1..75: mol_type = other DNA
aagtatgattcattcagcgatagttgcattcaaatcccttgcggtccatacggaggaatgttaacaaaaaaatca

SEQ ID NO: 831197 - DNA, 75 bp, synthetic construct
  source 1..75: mol_type = other DNA
atgtgttatataatatctatgcacgcccgatccccgcttttgcccctcactaagttaatgttttataaagagttt

SEQ ID NO: 831198 - DNA, 75 bp, synthetic construct
  source 1..75: mol_type = other DNA
ttcaccgaagaagaaccggaagagccagaaagcgctccagcctcatcaacggaggcggggggacttgactccgca

SEQ ID NO: 831199 - DNA, 75 bp, synthetic construct
  source 1..75: mol_type = other DNA
ctcaaatatggtgaagggatggtcgttaaggcgaataaaacgcgcctaaggttagattacacaccagcaagtcct

SEQ ID NO: 831200 - DNA, 75 bp, synthetic construct
  source 1..75: mol_type = other DNA
aaatttcatttccaaaactattagcagaagatgaagatattagcaacgtatttgatattgcatgtttcaattatt

SEQ ID NO: 831201 - DNA, 75 bp, synthetic construct
  source 1..75: mol_type = other DNA
aacaaaacggaactaatttcatcttcaccagaatttaaagatgataagcaatatgacaatgaattttttgtattg

SEQ ID NO: 831202 - DNA, 75 bp, synthetic construct
  source 1..75: mol_type = other DNA
tttgatatagcttgttttgagtatttcactaattttacgaatacctacggtaaaagtagaaatctacttgccagg

SEQ ID NO: 831203 - DNA, 75 bp, synthetic construct
  source 1..75: mol_type = other DNA
ttattccggttggttcatctcaggaagttttgaataaaggcttacttcaattccaaagtgagaaacagaagatta

SEQ ID NO: 831204 - DNA, 75 bp, synthetic construct
  source 1..75: mol_type = other DNA
gaaatattattcatcagaggagacaatttcagattcacgttcagatacggataacaattttgcatggagtctggg

SEQ ID NO: 831205 - DNA, 75 bp, synthetic construct
  source 1..75: mol_type = other DNA
atgaataaaattattattgcgtctttattctcaggtgttggttttatttcattgccatcattcgcgactcaggat

SEQ ID NO: 831206 - DNA, 75 bp, synthetic construct
  source 1..75: mol_type = other DNA
cagttgccctttgatatcagcgggaaagacagcaatagccctatcatccgcctgaatgaaacctgtcagtcttga

SEQ ID NO: 831207 - DNA, 75 bp, synthetic construct
  source 1..75: mol_type = other DNA
cggtcaggcgacgatgtggttatctgtcctggcgtttggcagacaagccgacgcgctggcaaagcatcacaaatg

SEQ ID NO: 831208 - DNA, 75 bp, synthetic construct
  source 1..75: mol_type = other DNA
ctacgatccgttgcaggggcggtatatcaccccggacccgattgggttgagaggtggatggaatatgtatcagta

SEQ ID NO: 831209 - DNA, 75 bp, synthetic construct
  source 1..75: mol_type = other DNA
ctggatgtcaccgttacggaagctaatggcgcagtcagtcgtttcagtgtccccttttcagccgtaccagaatcg

SEQ ID NO: 831210 - DNA, 75 bp, synthetic construct
  source 1..75: mol_type = other DNA
gtaaaacgcaggatagcggtgatgactcgatgtttggtgacctcacctggcagcacgggatgactaatacgctga

SEQ ID NO: 831211 - DNA, 75 bp, synthetic construct
  source 1..75: mol_type = other DNA
atgcgtccaggaacttcccgttataacgtggaagtaggtaaaacgcaggatagtggtgatgactcgatgtttggt

SEQ ID NO: 831212 - DNA, 75 bp, synthetic construct
  source 1..75: mol_type = other DNA
gtactgccgattatcgcatcaaacaacatgatcgccagatggcagaattgaagaaatctattcaagaaagcggta

SEQ ID NO: 831213 - DNA, 75 bp, synthetic construct
  source 1..75: mol_type = other DNA
gtcagcttgggaagaaatgacctgcttattcgcaccttccttagccaattggttagaaacttatattggaaagga

SEQ ID NO: 831214 - DNA, 75 bp, synthetic construct
  source 1..75: mol_type = other DNA
ggaggctggcgactgacccgcagttaaagaccaccagcaaagggacacaaatggcgatggcgagtatggcggtcc

SEQ ID NO: 831215 - DNA, 75 bp, synthetic construct
  source 1..75: mol_type = other DNA
cagtctatatcattctggtcgtgactctgatgtcatgtctgagtctgtcatcattctctgcccgggcagataata

SEQ ID NO: 831216 - DNA, 75 bp, synthetic construct
  source 1..75: mol_type = other DNA
aatctgatttctcagccacattatacccattaaaaaccaatcaaatattactcaagcatcactcacaagagatgt

SEQ ID NO: 831217 - DNA, 75 bp, synthetic construct
  source 1..75: mol_type = other DNA
gactatataataaatctttacctacggtacttgtagctgaagaagcacatacatttattaaacggtatcgtgatg

SEQ ID NO: 831218 - DNA, 75 bp, synthetic construct
  source 1..75: mol_type = other DNA
ttctgggatgtttggacaagaaagtatgctgatgggaaattggtcgagagaactgtcgattggggagctgttgta

SEQ ID NO: 831219 - DNA, 75 bp, synthetic construct
  source 1..75: mol_type = other DNA
acagtccggaaagctctatcgtggcggataagatggctgaaaaccaggcgcattttctgggaaatcgttcagaaa

SEQ ID NO: 831220 - DNA, 75 bp, synthetic construct
  source 1..75: mol_type = other DNA
aagtttcaagaaatgctcaagaaacacagtcaaagtgtcaatcaggctgttagagacgcacaaaaacgtacatcg

SEQ ID NO: 831221 - DNA, 75 bp, synthetic construct
  source 1..75: mol_type = other DNA
cgcaagaaactagaactagaattaaatgatgcattagtacaaagcaccgaagaacgcgtaaaacgtcaagctgca

SEQ ID NO: 831222 - DNA, 75 bp, synthetic construct
  source 1..75: mol_type = other DNA
ggataaagaagcaactaataaccagacacaaaccgaactaactaacggtactaatatcttctggatgaatcttaa

SEQ ID NO: 831223 - DNA, 75 bp, synthetic construct
  source 1..75: mol_type = other DNA
gatccctgtaacttcgcatttggtagcagttctgaatcagaagtgaaaaagttcaaagatggtaaatttcttcct

SEQ ID NO: 831224 - DNA, 75 bp, synthetic construct
  source 1..75: mol_type = other DNA
gttttcaaaaagaaccaatggatattgcccaactgagaagtactaagaagattgtacttcagtcgtgtagccaat

SEQ ID NO: 831225 - DNA, 75 bp, synthetic construct
  source 1..75: mol_type = other DNA
tcagcacggaaggggcaacagcgtggtgcgcagaatatgatgaatggggcaacctgctgaatgaagagaacccgc

SEQ ID NO: 831226 - DNA, 75 bp, synthetic construct
  source 1..75: mol_type = other DNA
atatttgcaggaaataaagcaggtgcatataagggacaggctattacatcctatggcccatcaggtcctagaggt

SEQ ID NO: 831227 - DNA, 75 bp, synthetic construct
  source 1..75: mol_type = other DNA
agtgcccgtgctgcacgtcctggcgggagcagacgtacaaccacaggcacacagggtaatcagccaccagctgga

SEQ ID NO: 831228 - DNA, 75 bp, synthetic construct
  source 1..75: mol_type = other DNA
gctactgacgcactgaacagggcaaaacaacaggcggggaatgatgatccgtacggggataacataccgttttaa

SEQ ID NO: 831229 - DNA, 75 bp, synthetic construct
  source 1..75: mol_type = other DNA
cgacgctgaaggccgcacgacccattacaccgaagaccgctggctgcgtatcacggggttgatggattcggaagg

SEQ ID NO: 831230 - DNA, 75 bp, synthetic construct
  source 1..75: mol_type = other DNA
gcgcggcgtggaaacgacacccgcacgccgtcagtgaagtacgctatcagtggctgggaatagcgctttccacca

SEQ ID NO: 831231 - DNA, 75 bp, synthetic construct
  source 1..75: mol_type = other DNA
ccaggtgtggcgctaccgctgggatgacttcgaccggctgcgcgaagtacggacgccggacggtgaggtgtggca

SEQ ID NO: 831232 - DNA, 75 bp, synthetic construct
  source 1..75: mol_type = other DNA
cacaaaggcgatgctgcgaccgttgagtcggtcgatcgcatgatgtcggcgttgaacctgccgctttccggtatc

SEQ ID NO: 831233 - DNA, 75 bp, synthetic construct
  source 1..75: mol_type = other DNA
gcaactggccagacaggtggagccggaatacacaccggcgcgaaaagctcatctttatcactgcgaccaccgggg

SEQ ID NO: 831234 - DNA, 75 bp, synthetic construct
  source 1..75: mol_type = other DNA
agtgcgcgaaccgtgcgaccaggaggcaggaaaggacagcaagggcaggctactgacgcactgaacagggcaaag

SEQ ID NO: 831235 - DNA, 75 bp, synthetic construct
  source 1..75: mol_type = other DNA
cttagtcagagcacaagcaatactaacgacagtggtgttgctgaagttacccttaagggcacggttttgggcgtt

SEQ ID NO: 831236 - DNA, 75 bp, synthetic construct
  source 1..75: mol_type = other DNA
aactagcaatattgcatattcacaactatgtaaaaaattatctttatttaaaagcatacccagtcgattaataaa

SEQ ID NO: 831237 - DNA, 75 bp, synthetic construct
  source 1..75: mol_type = other DNA
ttaccgaagcgccgcgcggggcgttaggccactgggccgccattcgcgatggcaagattgatctctaccagtgcg

SEQ ID NO: 831238 - DNA, 75 bp, synthetic construct
  source 1..75: mol_type = other DNA
taccggggcagatttgacctgctggcgaaggaaagccgggcggcgaatgatgacagaagttatttttacccggta

SEQ ID NO: 831239 - DNA, 75 bp, synthetic construct
  source 1..75: mol_type = other DNA
ctagtaaaccctatcagtatttccatattttgttttcaaaacctttcgctatgctttggtatttcagacgatatt

SEQ ID NO: 831240 - DNA, 75 bp, synthetic construct
  source 1..75: mol_type = other DNA
tctttacaacaatacttctaagttgaatgtaaaatatgttaatgaaaaaattctttgttttttatttactggagg

SEQ ID NO: 831241 - DNA, 75 bp, synthetic construct
  source 1..75: mol_type = other DNA
tttctttgcgtggccatccttgattatttccagtcaggaagctctaccggaaaaaatcaggaaggcgtattagag

SEQ ID NO: 831242 - DNA, 75 bp, synthetic construct
  source 1..75: mol_type = other DNA
agcgaagacggcaatacggcgtggcgcggggagtatgatgaatggggcaaccagcttaatgaggagaacccgcat

SEQ ID NO: 831243 - DNA, 75 bp, synthetic construct
  source 1..75: mol_type = other DNA
atgacagcacagatagcggcttacgggcggctggtggctgacccacagttaaagaccaccagcaagggcacacaa

SEQ ID NO: 831244 - DNA, 75 bp, synthetic construct
  source 1..75: mol_type = other DNA
aggttgatagctgcggggaaagctcaggggctgttttttggtctgccaacaatggcaacggccaatgccatgtac

SEQ ID NO: 831245 - DNA, 75 bp, synthetic construct
  source 1..75: mol_type = other DNA
cgattaagggggttaaatcccacggtacccgaccagcttcccgccatgctctggcgattaagggggttaaatgcc

SEQ ID NO: 831246 - DNA, 75 bp, synthetic construct
  source 1..75: mol_type = other DNA
tacgcgaccagcattccccatggtctggcgaataagggagttaaataccacggtacctgaccagcatgaccccat

SEQ ID NO: 831247 - DNA, 75 bp, synthetic construct
  source 1..75: mol_type = other DNA
catacgatgccggttatagcggaaccagtatgacaggcgggaaaggtgctgctgggatttgtattatcgaggagt

SEQ ID NO: 831248 - DNA, 75 bp, synthetic construct
  source 1..75: mol_type = other DNA
gcttttgcggcagtttactacggaacccaagcagccgattttattatcagctatttaccggagaaagttattgct

SEQ ID NO: 831249 - DNA, 75 bp, synthetic construct
  source 1..75: mol_type = other DNA
gcaatggaattagcttggttagggctggtaccaaacgccggttcacaaccaccagatgttaccatcggagctatt

SEQ ID NO: 831250 - DNA, 75 bp, synthetic construct
  source 1..75: mol_type = other DNA
tgaggccgaagccatcgaccatcagagctacgatatcagcatcaaactggcgctgaccgagcgcgtcattgttcg

SEQ ID NO: 831251 - DNA, 75 bp, synthetic construct
  source 1..75: mol_type = other DNA
aatgcttatggggttagcaaagctgtagctgaaagctatgtcgaaaaatatgctgctgctagtggttcttcgtat

SEQ ID NO: 831252 - DNA, 75 bp, synthetic construct
  source 1..75: mol_type = other DNA
cggcagcacggcggaagacacaacgcttaccaacggcgaaaatctgctgacgggcgccagcgacctgaacggcga

SEQ ID NO: 831253 - DNA, 75 bp, synthetic construct
  source 1..75: mol_type = other DNA
ggcggcggcaacgccagcggcgctatcggctatgtggcgatcgtcggcaacaccaccgacgcaagcctcggccac

SEQ ID NO: 831254 - DNA, 75 bp, synthetic construct
  source 1..75: mol_type = other DNA
gcctcgctgcttaccgccagcgcctcgaccaccgggctgcgcttcgtcagcgacggctcggaagtgcgctccacc

SEQ ID NO: 831255 - DNA, 75 bp, synthetic construct
  source 1..75: mol_type = other DNA
tggagccctaatccgcatagcgcctcgatttttgaggctatcgagaaagccgaagcgctcatggatgacggaatg

SEQ ID NO: 831256 - DNA, 75 bp, synthetic construct
  source 1..75: mol_type = other DNA
tgaagtgcgggcgcagggtgtggagatgtttgccgcacataagcgagaacgacagcaggctctgcgtagccgaag

SEQ ID NO: 831257 - DNA, 75 bp, synthetic construct
  source 1..75: mol_type = other DNA
caccgtccagctggcgggcgtcggcgcgctgaccgttaaccgcgacggcagctaccgcttcacgccagtcgccga

SEQ ID NO: 831258 - DNA, 75 bp, synthetic construct
  source 1..75: mol_type = other DNA
tcatcaagagtgaaatgatcgacaacaaaggcgagttgtcctgtgtctccaggcaactgattgtcggcgacaaaa

SEQ ID NO: 831259 - DNA, 75 bp, synthetic construct
  source 1..75: mol_type = other DNA
atttattcaacaaagcccataaaatcactaaaacggtcactattgagtgtgaaaacctggggatactgaataccg

SEQ ID NO: 831260 - DNA, 75 bp, synthetic construct
  source 1..75: mol_type = other DNA
gggtgatgcgccatgcggatgctggctatgaacaggcaaaagcctgtgctgaacgtcatcatttgaatttgccga

SEQ ID NO: 831261 - DNA, 75 bp, synthetic construct
  source 1..75: mol_type = other DNA
cccgcgaaggcgctggatattccccacgccgccacagccgacgccgcaagcgaaaaaccgggcagcgccgccagc

SEQ ID NO: 831262 - DNA, 75 bp, synthetic construct
  source 1..75: mol_type = other DNA
tacgtccgcgtgcgcatcgttttgctcttgagtctcgccagctttttgatggagccgctctggctgaaaccgcca

SEQ ID NO: 831263 - DNA, 75 bp, synthetic construct
  source 1..75: mol_type = other DNA
atgtatacaactattttcttcttcacttttaattatcgtattcattataaaactaagttaaaaaaactcctggag

SEQ ID NO: 831264 - DNA, 75 bp, synthetic construct
  source 1..75: mol_type = other DNA
gttttgcaataattttcttggggttgttatgcatttatcaggcaaatgcagcatcgactacacatacaacgatta

SEQ ID NO: 831265 - DNA, 75 bp, synthetic construct
  source 1..75: mol_type = other DNA
ttgctgacggtagtgttatatgtacatcattaataaagtgtagaatttctcattctgaaaacaaatacgatctag

SEQ ID NO: 831266 - DNA, 75 bp, synthetic construct
  source 1..75: mol_type = other DNA
tgctgacaatccagcattggcgcgaaacatacggacctggtagcaacgttgtactgccagcagaagaagcggaag

SEQ ID NO: 831267 - DNA, 75 bp, synthetic construct
  source 1..75: mol_type = other DNA
tatgctgtcggttacgaaagctatcccatttcagtcgggaatattcgcggatgtttggagagtcacccaagagag

SEQ ID NO: 831268 - DNA, 75 bp, synthetic construct
  source 1..75: mol_type = other DNA
gtaatgacatcatatacaccggatctaaatcaatttacgagttcagattttggcattgtaatgtactattcaata

SEQ ID NO: 831269 - DNA, 75 bp, synthetic construct
  source 1..75: mol_type = other DNA
tgtctgggcgttgcttgccgtctcactggtgcgccacacggatggcacgccgctctattttatcgctcagattga

SEQ ID NO: 831270 - DNA, 75 bp, synthetic construct
  source 1..75: mol_type = other DNA
ttcggaacgccatggaatattccgctagcggtatggcgttagtgggcaccgagggacaatggctgcaaaccaaca

SEQ ID NO: 831271 - DNA, 75 bp, synthetic construct
  source 1..75: mol_type = other DNA
aaaattcggaaacacaatcaaccatagtttccccatcgccaatggctgcggtggttggttttcagtccccgtatc

SEQ ID NO: 831272 - DNA, 75 bp, synthetic construct
  source 1..75: mol_type = other DNA
gcgcaaaccttatgatgcgccaaattgggtacgcactgaccgtcctgtaactttcgcagagcttaagacatatga

SEQ ID NO: 831273 - DNA, 75 bp, synthetic construct
  source 1..75: mol_type = other DNA
ttcgcggcgatagtgtgatcgtaaatgaagtgacgccgttactgccgcgtaaaccttatgatgcgccaaactggg

SEQ ID NO: 831274 - DNA, 75 bp, synthetic construct
  source 1..75: mol_type = other DNA
caaaatccctttgtcaaattgctggtactttttggccgcgatgataaagatttattacaggcggcaaaaggtctt

SEQ ID NO: 831275 - DNA, 75 bp, synthetic construct
  source 1..75: mol_type = other DNA
gtgctattggcgtgggtagtatggcgtctgttacgtaacattagtcgccgtcgtctgaaccctcatcaacagtaa

SEQ ID NO: 831276 - DNA, 75 bp, synthetic construct
  source 1..75: mol_type = other DNA
tagattgttgttacgtttaccgttattgcaagaattgttggatggtaataatgaaattaacattcctgcgctgac

SEQ ID NO: 831277 - DNA, 75 bp, synthetic construct
  source 1..75: mol_type = other DNA
gactatattaagacttttctcaaaacctacaaagagtttacttactatctttgggttgatgaaaaagcatttgga

SEQ ID NO: 831278 - DNA, 75 bp, synthetic construct
  source 1..75: mol_type = other DNA
ctttttcggggttttcgtttcttgctcacatgttctttccggcattatcccctgattctgtggataacactatca

SEQ ID NO: 831279 - DNA, 75 bp, synthetic construct
  source 1..75: mol_type = other DNA
acgatggccgcaaatactatatctaccgcccgtgggggccgcgccaccacagcaacccgcacaacaccatcgtgt

SEQ ID NO: 831280 - DNA, 75 bp, synthetic construct
  source 1..75: mol_type = other DNA
ttattgaaaaacctaaccattcgacggcagaagagtatgtttccacaggagaatatctctggaatagtggaatgt

SEQ ID NO: 831281 - DNA, 75 bp, synthetic construct
  source 1..75: mol_type = other DNA
gccgtaagcgtggatgcgcatgcacaaccaccgaccgctcaggctattgcgagaaacaccgcaatgaaggctggc

SEQ ID NO: 831282 - DNA, 75 bp, synthetic construct
  source 1..75: mol_type = other DNA
tgaagcgtgataatcatctgtgtcagaactgcctgcgtagtggacgtgctgtcgcggccacaaccgttgaccata

SEQ ID NO: 831283 - DNA, 75 bp, synthetic construct
  source 1..75: mol_type = other DNA
tgtggctggcaggattgctttttttcttttctaacgcctgggcggaacgtcaggtcaccgaccagttgggacgaa

SEQ ID NO: 831284 - DNA, 75 bp, synthetic construct
  source 1..75: mol_type = other DNA
agtacgcagaggacttcagaaaaatatgtcttctgtttatccggttaatgagcaatgtattaaaactgtttcctt

SEQ ID NO: 831285 - DNA, 75 bp, synthetic construct
  source 1..75: mol_type = other DNA
tctttgatgcgtggtttatggcgcaaaatgaagagattcgtgaatcagtgtttgaggctatgggattactggaaa

SEQ ID NO: 831286 - DNA, 75 bp, synthetic construct
  source 1..75: mol_type = other DNA
atagtgtagccgcaaaaaaggttctgctcaccctgtgggattatatgtctacgcccgaccagattaagcggatgc

SEQ ID NO: 831287 - DNA, 75 bp, synthetic construct
  source 1..75: mol_type = other DNA
gaccgcttcgaaaccgataaatgggacgttatggatgccgatgttcgcttcaaagggcggcgcattgagcatggc

SEQ ID NO: 831288 - DNA, 75 bp, synthetic construct
  source 1..75: mol_type = other DNA
atagggggcagattttatattccgtaatttgcatcctgatacttgtgtttaaagttaatttaagaaaaaagattc

SEQ ID NO: 831289 - DNA, 75 bp, synthetic construct
  source 1..75: mol_type = other DNA
ttactgaaatcgcaattgttttttcttgcactatttacatatttactcaatgtttgttaatgcggaggatctatt

SEQ ID NO: 831290 - DNA, 75 bp, synthetic construct
  source 1..75: mol_type = other DNA
aaatcctggctgaccgggtgagtgaggaaagccgccgctggctggcatcgtgcggcctgacggtggagcagatac

SEQ ID NO: 831291 - DNA, 75 bp, synthetic construct
  source 1..75: mol_type = other DNA
gaagtattacgttgctgtgctgaaccgtaaatccgcaacgggttgtgctttcggtgatttttatgtcgctgcccg

SEQ ID NO: 831292 - DNA, 75 bp, synthetic construct
  source 1..75: mol_type = other DNA
aggtgttcgttatctgtttgagtgccgtgatcctgccagtaaagcacctaagtttgtgcagtttagcgatcatat

SEQ ID NO: 831293 - DNA, 75 bp, synthetic construct
  source 1..75: mol_type = other DNA
tgtgcttcagccgatggattttatcgacttccgaaaatgcgaggagtttttgctcggttttttgacctggaagcc

SEQ ID NO: 831294 - DNA, 75 bp, synthetic construct
  source 1..75: mol_type = other DNA
cgaagcgttacttcgcgatctgatcaacgattcgtggaatctggtggttgatggtctggctaaacgcgatcaaaa

SEQ ID NO: 831295 - DNA, 75 bp, synthetic construct
  source 1..75: mol_type = other DNA
agttttatgtggcttatatcttacatttagattctactttttacttacgccttatgctattacatatttatttag

SEQ ID NO: 831296 - DNA, 75 bp, synthetic construct
  source 1..75: mol_type = other DNA
aaataggataaaggaagccagtaacttctttataatcgaacttaattatcacaacagggataaaaagtcgcctgc

SEQ ID NO: 831297 - DNA, 75 bp, synthetic construct
  source 1..75: mol_type = other DNA
ttcgcgctggtttccgcacattgatgcagcgatgaaagagttcggcattattaagcctgaagaccaggcaatgtt

SEQ ID NO: 831298 - DNA, 75 bp, synthetic construct
  source 1..75: mol_type = other DNA
ttatcatttttccaacgatattgaaatgccatatgcactggattatagtcagatagaatctcatttacatgagtt

SEQ ID NO: 831299 - DNA, 75 bp, synthetic construct
  source 1..75: mol_type = other DNA
tctgggagacaaaagatgagttgatcaaaaatgtgtcagtttcgttaatgaagcaaattatgcaaaaacctggtg

SEQ ID NO: 831300 - DNA, 75 bp, synthetic construct
  source 1..75: mol_type = other DNA
gcagagatcttataaagagagcaggagttaatcatctcttgactttgttctcagcccaactggatgaagttataa

SEQ ID NO: 831301 - DNA, 75 bp, synthetic construct
  source 1..75: mol_type = other DNA
cattcaggtgatgtggagcgcgtcacgctgcttatcaatggcggccgtaacggtctggataaacgccgcgcgctg

SEQ ID NO: 831302 - DNA, 75 bp, synthetic construct
  source 1..75: mol_type = other DNA
tttagtcagtaatcctgagttgctggaaaaggatatcaacgcagcacggtcagctgcatggttctacgccaccag

SEQ ID NO: 831303 - DNA, 75 bp, synthetic construct
  source 1..75: mol_type = other DNA
tgtggtatttatccccatggttcctacgaaggcgaaattatttttgcgggagaagagattcaggcgagtcacatc

SEQ ID NO: 831304 - DNA, 75 bp, synthetic construct
  source 1..75: mol_type = other DNA
tatctgcaacggtcattgcagccagtgtggcagtggctgccagccctatgagtgcagcaactgccgggatgctgg

SEQ ID NO: 831305 - DNA, 75 bp, synthetic construct
  source 1..75: mol_type = other DNA
aggaaatcacctcgccggagccggatgcagaatataagcagatcgtcagccattggcgaggcggttgctgtagtc

SEQ ID NO: 831306 - DNA, 75 bp, synthetic construct
  source 1..75: mol_type = other DNA
cggtggttttggcgatctgaattgtggatggtactgtcaggatgcattacttgggtggtactgtaagaaacataa

SEQ ID NO: 831307 - DNA, 75 bp, synthetic construct
  source 1..75: mol_type = other DNA
tttgacctgccggaggagccaacaggcaatgacgcgccttcatggctgactgagccgacgccacagattaacggg

SEQ ID NO: 831308 - DNA, 75 bp, synthetic construct
  source 1..75: mol_type = other DNA
tttgacctgccggacgagccaacaggcgatggcgcgccttcatggctgactgagccgacgccacagattaacggg

SEQ ID NO: 831309 - DNA, 75 bp, synthetic construct
  source 1..75: mol_type = other DNA
ctacagggatgaatggaatggtactaaggtgatatgcgaatcggtgttagtagatgatgacggtacaaatctgta

SEQ ID NO: 831310 - DNA, 75 bp, synthetic construct
  source 1..75: mol_type = other DNA
caccattcggtaagatcaacacgtcagaggcgtatacaggccgttataagggcagtgaatttgagtacaaggtga

SEQ ID NO: 831311 - DNA, 75 bp, synthetic construct
  source 1..75: mol_type = other DNA
ggattggtcgcctcagctactaccagtacttaagaaataagccaacgcacatcacttgtgttgaactgaatccag

SEQ ID NO: 831312 - DNA, 75 bp, synthetic construct
  source 1..75: mol_type = other DNA
gcaggattttactattcggcatggtgtttctgctgttatctggttgtgataataaacgggaagaattaaaactgg

SEQ ID NO: 831313 - DNA, 75 bp, synthetic construct
  source 1..75: mol_type = other DNA
tcaccgggaataaaatttcggaaggtatatataataaaataaagttcaaaaatgatgcagcaccaaaagactgga

SEQ ID NO: 831314 - DNA, 75 bp, synthetic construct
  source 1..75: mol_type = other DNA
aaatatgaacagccaacaaagtatttggtaaaagcaaaagattatcacgacacatataccatcccggttcttact

SEQ ID NO: 831315 - DNA, 75 bp, synthetic construct
  source 1..75: mol_type = other DNA
acacctgttatcacttaacccattactggcttgctgccgtagatattcccgtggcgagcgataacccagtgcact

SEQ ID NO: 831316 - DNA, 75 bp, synthetic construct
  source 1..75: mol_type = other DNA
atggcggagcagtggcctttaagggaagaaatgaaaattatccccggaggtagtgactacatgaggaaatatcta

SEQ ID NO: 831317 - DNA, 75 bp, synthetic construct
  source 1..75: mol_type = other DNA
gaaggggtttactgacaaacgcgcattacagggcgacacccaaagcctgcaaatgaccttgaggatgatcgccca

SEQ ID NO: 831318 - DNA, 75 bp, synthetic construct
  source 1..75: mol_type = other DNA
tccgtcagccatctggcgaattctgaccacagaatacggtgtccggatttcaaaagagaccgtgcggaaaatgat

SEQ ID NO: 831319 - DNA, 75 bp, synthetic construct
  source 1..75: mol_type = other DNA
tagccgttcgctgttctggtgcggtacaggcctatcgctggaccgatttgggcgacggacagggatacatccact

SEQ ID NO: 831320 - DNA, 75 bp, synthetic construct
  source 1..75: mol_type = other DNA
gcaacgggctgtgctttcggtgatttttatgttgccgcccgcgataccgcaacatggcggcagtatgataccggc

SEQ ID NO: 831321 - DNA, 75 bp, synthetic construct
  source 1..75: mol_type = other DNA
acgacaaaaaccagatgctgtacagcatgaaggtgcccccgccgctgtggcgtgccggtctgcgccagaacttcc

SEQ ID NO: 831322 - DNA, 75 bp, synthetic construct
  source 1..75: mol_type = other DNA
tcggcgacccagacctgttctggttcaagagcggtaacctgttcagggcctggtttaagcaggtttggatgtcgg

SEQ ID NO: 831323 - DNA, 75 bp, synthetic construct
  source 1..75: mol_type = other DNA
cgcgccccggtaggccaggtgatgaaatccatcgttgccgagcagattaagtacatcaaatcgctccctcttgag

SEQ ID NO: 831324 - DNA, 75 bp, synthetic construct
  source 1..75: mol_type = other DNA
atgaccggtcacgctggcgagctcccgaactgccgctgttacaaagagatcgtcttccccaaccctcattcttat

SEQ ID NO: 831325 - DNA, 75 bp, synthetic construct
  source 1..75: mol_type = other DNA
gcatcagctgcagcagcttatccgcctgccggggcagcagtatgatgaggagtccggcctgtattacaaccgcca

SEQ ID NO: 831326 - DNA, 75 bp, synthetic construct
  source 1..75: mol_type = other DNA
actgagtacgaagtcaaaaccaacggagaaacaaacccgatgaaagagaagatgatcgccgcgctcaatgccgca

SEQ ID NO: 831327 - DNA, 75 bp, synthetic construct
  source 1..75: mol_type = other DNA
atgaagaaaaaaaaatgttattgtctcggtgctttgcaggttccatttaatcagatgaaaaatcctactgatcct

SEQ ID NO: 831328 - DNA, 75 bp, synthetic construct
  source 1..75: mol_type = other DNA
tattattcagtatatggcaatattcactcgccaaacaaaatacttataacctttccaggtgtttctaatcttgat

SEQ ID NO: 831329 - DNA, 75 bp, synthetic construct
  source 1..75: mol_type = other DNA
gcgatgtacccaacgctacatcagtgcagcagccaccggcaatgcctgtaacacctgcaaacgacgcaccggcaa

SEQ ID NO: 831330 - DNA, 75 bp, synthetic construct
  source 1..75: mol_type = other DNA
tattcaaatacctcatttcgaaggactgttttttaaaaatttcaatccatcaaacaaagttgagacagtaacatc

SEQ ID NO: 831331 - DNA, 75 bp, synthetic construct
  source 1..75: mol_type = other DNA
atagcagaattttaaacaaagatccatctgtttttatcagctccaacgaaaaaatgatagacatgtatcatgcat

SEQ ID NO: 831332 - DNA, 75 bp, synthetic construct
  source 1..75: mol_type = other DNA
agcgggagtcaacctactggaatgtttccggcagggagtactcaagttagcgggactaatcaggttggtatcagt

SEQ ID NO: 831333 - DNA, 75 bp, synthetic construct
  source 1..75: mol_type = other DNA
taaatccacgaataacactggtgcgcatacccatagtgttagcggtacggctgcttcagccggtgcacataccca

SEQ ID NO: 831334 - DNA, 75 bp, synthetic construct
  source 1..75: mol_type = other DNA
atgatgtcagatatcacagcctcccgtccggaagtggtcaccaggcatacggacgttatttgctcaaccagtatc

SEQ ID NO: 831335 - DNA, 75 bp, synthetic construct
  source 1..75: mol_type = other DNA
ctgaatattgcgacgccatttgtcctggttggactggggctgatattcccgttacttgcgcgtaaagcgaataag

SEQ ID NO: 831336 - DNA, 75 bp, synthetic construct
  source 1..75: mol_type = other DNA
tattctcgattgatgccccgcttaaagtgctattaggcgatgctgacagcaaatatattccagccagtttatgtc

SEQ ID NO: 831337 - DNA, 75 bp, synthetic construct
  source 1..75: mol_type = other DNA
cgagtttaatgacactatatatgctttcttaaagggatactatcacaatcagttatctctaaatagaatatataa

SEQ ID NO: 831338 - DNA, 75 bp, synthetic construct
  source 1..75: mol_type = other DNA
aacaatatcctcatattgtggggaaaagtcccaatgaaattattgatatatttcggcgttataactttgtcgatg

SEQ ID NO: 831339 - DNA, 75 bp, synthetic construct
  source 1..75: mol_type = other DNA
aatgcggatggacgtgggaccctatatataaaaaaatagggatttcattcaccgccacagagcttggtactatcg

SEQ ID NO: 831340 - DNA, 75 bp, synthetic construct
  source 1..75: mol_type = other DNA
atgacatgagattgcagtttatttcattaagtcgacattgccttacgttaagaacagctactgtaaatgatagcg

SEQ ID NO: 831341 - DNA, 75 bp, synthetic construct
  source 1..75: mol_type = other DNA
aacaagcggtagtggccagactcgtaatgcagggaagacatcatcagatggtgctcatacccactcactgtccgg

SEQ ID NO: 831342 - DNA, 75 bp, synthetic construct
  source 1..75: mol_type = other DNA
tctgaaggatgcattttatttccataatagtgatgactactcaaaatactttaccggggctgtcgatggggatgc

SEQ ID NO: 831343 - DNA, 75 bp, synthetic construct
  source 1..75: mol_type = other DNA
agatcagtctgtgcagttctaacctactcggtgctgacctgcacggtgctaaaatgaacaatgccaaagtcatca

SEQ ID NO: 831344 - DNA, 75 bp, synthetic construct
  source 1..75: mol_type = other DNA
atgcttactttaacggggttgtcatttgtggtattgaccgtctcgaggttgacctgagcaatgctgaaatgaaca

SEQ ID NO: 831345 - DNA, 75 bp, synthetic construct
  source 1..75: mol_type = other DNA
ctggtagtgcaatagagttagttaaaaaaaacttcgccaaaatttttcagttaattactgaaaagaatgccatca

SEQ ID NO: 831346 - DNA, 75 bp, synthetic construct
  source 1..75: mol_type = other DNA
aatttccccagcccgttataaccataatgcaggaattataggagcagcattatttttgcatcaacataatgccgt

SEQ ID NO: 831347 - DNA, 75 bp, synthetic construct
  source 1..75: mol_type = other DNA
agcaaaagtatacatgacctgaacattgcgttaagtcagttgcttgctcctttaattcctttcgccagtcgatac

SEQ ID NO: 831348 - DNA, 75 bp, synthetic construct
  source 1..75: mol_type = other DNA
aaacgacgcttcctcaatctataaagcatatggcgataacccggaaacctcaaacggtattattggcagcaatgc

SEQ ID NO: 831349 - DNA, 75 bp, synthetic construct
  source 1..75: mol_type = other DNA
gcatcgggatgagaatttcgggggccttggcgaaacagatgctggaagattaccggctggctgaaggatggcgtt

SEQ ID NO: 831350 - DNA, 75 bp, synthetic construct
  source 1..75: mol_type = other DNA
cagacggaagcggcctcccgttaaatatcgtgctaagccccgggcagtctcatgaaagccagttcgcgcaacgac

SEQ ID NO: 831351 - DNA, 75 bp, synthetic construct
  source 1..75: mol_type = other DNA
aaattatattaaattttatggagaagctatcagtggtgttgaaggcttatatgcaaaatgctctaaaaaaaatca

SEQ ID NO: 831352 - DNA, 75 bp, synthetic construct
  source 1..75: mol_type = other DNA
ctattcagtgacaaatgcagcgcctggtggtgcattgacctcgcactctatttatcagacgttcaacatggggaa

SEQ ID NO: 831353 - DNA, 75 bp, synthetic construct
  source 1..75: mol_type = other DNA
agggcgacacggtaggattgggcgaatacagttcgaaagaggttatcgacggcctgaacggcgtgcctttttcaa

SEQ ID NO: 831354 - DNA, 75 bp, synthetic construct
  source 1..75: mol_type = other DNA
ggtgcgccgcagcgcattaccacccctgaccctgtgcccccgaccggagcgacatccggcggcctcggcggccca

SEQ ID NO: 831355 - DNA, 75 bp, synthetic construct
  source 1..75: mol_type = other DNA
aaaaccgggaccagcacattctgacactgcggatgatctgcggggtgctggtgctctgcctgtttgtggcctttg

SEQ ID NO: 831356 - DNA, 75 bp, synthetic construct
  source 1..75: mol_type = other DNA
taagctactcaatctcatgctgtcagaacaggccgatcaagcccctgtgcagttacgctttagtagtactctccc

SEQ ID NO: 831357 - DNA, 75 bp, synthetic construct
  source 1..75: mol_type = other DNA
ctgaaacaggtgattcaatgacttttgatagtagcaatagaattgatcgtcgttctcaacgtggtgctggtgatc

SEQ ID NO: 831358 - DNA, 75 bp, synthetic construct
  source 1..75: mol_type = other DNA
cactgatccactggggttagaacgagttataagtgtatatgggcctcccgctccagaccgggcaggtgctgaaac

SEQ ID NO: 831359 - DNA, 75 bp, synthetic construct
  source 1..75: mol_type = other DNA
ccatagtgcgtgacggggcgcgttttcaggacgctaataaaccagatgagataccgacggcgcgagttgggttta

SEQ ID NO: 831360 - DNA, 75 bp, synthetic construct
  source 1..75: mol_type = other DNA
tagaagaaccaaaaccagaaacagtacaaaaaccaaaacggaatagacgtactggaatgggatcaaactggttcg

SEQ ID NO: 831361 - DNA, 75 bp, synthetic construct
  source 1..75: mol_type = other DNA
ggcggggtacaaactacagatcctaaacgtacatgaacagaagaacacgatacgccgcctcctgaacctgatgct

SEQ ID NO: 831362 - DNA, 75 bp, synthetic construct
  source 1..75: mol_type = other DNA
acggcacgtttatctattggctaaaccttaatacaccaggaaacctacgcggtattacaacacgtgttgttctgt

SEQ ID NO: 831363 - DNA, 75 bp, synthetic construct
  source 1..75: mol_type = other DNA
agtatgccgatgctctttataacttcaatttacagacgttctataataacgaattgggattaccttatgaggatg

SEQ ID NO: 831364 - DNA, 75 bp, synthetic construct
  source 1..75: mol_type = other DNA
tgaatatacttttgaatgggaacaagtagcgtttgaatttaagcaattagaaaatggtagatccattcctgatag

SEQ ID NO: 831365 - DNA, 75 bp, synthetic construct
  source 1..75: mol_type = other DNA
ggtcaagtagcactactggtgatctcttcaagacgagtacacaggctggctaccagctacagatcctaaacgtac

SEQ ID NO: 831366 - DNA, 75 bp, synthetic construct
  source 1..75: mol_type = other DNA
ttgttgagttcacactatccagcccgatggacctgcaggggcaaatgatcccgacgcgacagcttcattccctgt

SEQ ID NO: 831367 - DNA, 75 bp, synthetic construct
  source 1..75: mol_type = other DNA
tcatactttgatgatgcgaaagaacataatattataatggctgattatcactatctttatgaagcatcagaaaaa

SEQ ID NO: 831368 - DNA, 75 bp, synthetic construct
  source 1..75: mol_type = other DNA
cacaccatcacggtaaatccaacaggcaataccgaaaacaccgtcaaaaacattgcatataactatattgtgagg

SEQ ID NO: 831369 - DNA, 75 bp, synthetic construct
  source 1..75: mol_type = other DNA
cccagcttttcttcgtcagcaatttgactaagctattagtcggctggagaggtactgagccagataaactagcag

SEQ ID NO: 831370 - DNA, 75 bp, synthetic construct
  source 1..75: mol_type = other DNA
ttgctataagtataaatgtggagtggagtataaaagacgcgccgcaacagccttagctcatggtatttatgggga

SEQ ID NO: 831371 - DNA, 75 bp, synthetic construct
  source 1..75: mol_type = other DNA
ggacaatgataacggttctaatgggtcaaggaaaaaattaaaaaataaaaaaatgcttatatgtataaataaaga

SEQ ID NO: 831372 - DNA, 75 bp, synthetic construct
  source 1..75: mol_type = other DNA
catttaaatataacaacattggaaatgaaatattacacatgacaggtaaaaaattgcctaaaagttgtcaagagt

SEQ ID NO: 831373 - DNA, 75 bp, synthetic construct
  source 1..75: mol_type = other DNA
gtggatcactattgcaccgttcgtgacaattatatttacagtcatacacctgccgcaccagaggagccgctgaaa

SEQ ID NO: 831374 - DNA, 75 bp, synthetic construct
  source 1..75: mol_type = other DNA
tacatgatgcaacaccgtcatggaacgggttcaattaccaaggaaaagttggcctctatgtttgcttgaaaaata

SEQ ID NO: 831375 - DNA, 75 bp, synthetic construct
  source 1..75: mol_type = other DNA
acggcctgcaaacttcggttcggtgaaaacaacgaactctcgtttggtgggttcccgggtacgtcgctgatcagg

SEQ ID NO: 831376 - DNA, 75 bp, synthetic construct
  source 1..75: mol_type = other DNA
cttaggcggtgcattagctctaattcatgctgctgtgttgcgtgattatcaaccaataatctatacatatggaat

SEQ ID NO: 831377 - DNA, 75 bp, synthetic construct
  source 1..75: mol_type = other DNA
ataaccgtcaccggtactacgatccgttgcaggggcggtatattactcaggacccgatggggttgaaagggggat

SEQ ID NO: 831378 - DNA, 75 bp, synthetic construct
  source 1..75: mol_type = other DNA
ctttgccatgcagccaggcagatgacggaacggcgacgatgtggttatccgtcctggcgtttggcagacaggcca

SEQ ID NO: 831379 - DNA, 75 bp, synthetic construct
  source 1..75: mol_type = other DNA
ataaaatacccgaaagtgcattaggaatttgtactgcaacagaccaacagattgaccgtgtagaaactacgataa

SEQ ID NO: 831380 - DNA, 75 bp, synthetic construct
  source 1..75: mol_type = other DNA
ttgcgtttgaccttgccacccaccgtcgataacccgcgcgtggcgggcgacgtcggcaaagcgggcgtcgctatc

SEQ ID NO: 831381 - DNA, 75 bp, synthetic construct
  source 1..75: mol_type = other DNA
gtatatttttgttgccgaaaagatagtgcattatgcggagagtaatctcgaaaaaaactcaatccatcgctacta

SEQ ID NO: 831382 - DNA, 75 bp, synthetic construct
  source 1..75: mol_type = other DNA
gtattgtcggggtattttctttaaatacctttgcatcattccctccgggaaatgatgtgacaacaaaacctgacc

SEQ ID NO: 831383 - DNA, 75 bp, synthetic construct
  source 1..75: mol_type = other DNA
atacctgttcaggttcgactgttaaccaggcaaccttaaatatgattatgcaacgttatggcagacttttttctg

SEQ ID NO: 831384 - DNA, 75 bp, synthetic construct
  source 1..75: mol_type = other DNA
aacttgccaacaaggaattgagccgtcgggagaaaaacgtcgactcactggtacggcaaacggcggaagggatag

SEQ ID NO: 831385 - DNA, 75 bp, synthetic construct
  source 1..75: mol_type = other DNA
cggtggaagatatgaaggtgctgttcgaccagatcccgctggataaaatgtcagtttcgatgaccatgaacggtg

SEQ ID NO: 831386 - DNA, 75 bp, synthetic construct
  source 1..75: mol_type = other DNA
tcgccggacttattgagctgaacaaatttaatggctatacgctggtcagcggagaagactggcagaagcctacag

SEQ ID NO: 831387 - DNA, 75 bp, synthetic construct
  source 1..75: mol_type = other DNA
tcctaaacagtttgcgtatacggttccttcttatagtgatgacagaggggtattctgtgaagtattgaaaacgaa

SEQ ID NO: 831388 - DNA, 75 bp, synthetic construct
  source 1..75: mol_type = other DNA
tataacaaatattggtgatgagaaactgattgtgattttatgggccaacgaagtttttaactctaaaaaaactga

SEQ ID NO: 831389 - DNA, 75 bp, synthetic construct
  source 1..75: mol_type = other DNA
tgatcccatgctcacgagcgagttgcgctacggagatctctggtcgatgcgagagttcaaccattttgattttga

SEQ ID NO: 831390 - DNA, 75 bp, synthetic construct
  source 1..75: mol_type = other DNA
ctcaagaaatatggccaacccgatattttgataaggcaggaatgccgatcaagagaatcataagaaaaccggttt

SEQ ID NO: 831391 - DNA, 75 bp, synthetic construct
  source 1..75: mol_type = other DNA
gacaacgttatatgcaaatacttcacgcgtcggctggattatcgccggctctgttgacggaattatggttgaaat

SEQ ID NO: 831392 - DNA, 75 bp, synthetic construct
  source 1..75: mol_type = other DNA
gattctttaacatccgtgtctacacacctttttataatcctggtgcaacctacggcgcaagacagaattttcttt

SEQ ID NO: 831393 - DNA, 75 bp, synthetic construct
  source 1..75: mol_type = other DNA
gggcaggagcaaatgtcaggacctggtggattgctcagctgagtggcctaacaacgtcattaatgccagtaatgc

SEQ ID NO: 831394 - DNA, 75 bp, synthetic construct
  source 1..75: mol_type = other DNA
tcagaactctaaatatcgtgatttcatctcgggcatcactcctgctgttaataaggcagcaggcgctccagattt

SEQ ID NO: 831395 - DNA, 75 bp, synthetic construct
  source 1..75: mol_type = other DNA
agacgatttctaatcataatgtcataaagatttttgagcttcttcatcagggaagacatcccgagtctcagaaag

SEQ ID NO: 831396 - DNA, 75 bp, synthetic construct
  source 1..75: mol_type = other DNA
ggtaacccaatcaaactagcagaagggcgtacatctacatttggtgaagacgctttgacagtagtagccagtaca

SEQ ID NO: 831397 - DNA, 75 bp, synthetic construct
  source 1..75: mol_type = other DNA
tttgtaaatatcggaaagaaagagaaattattcaagcttgggattcatatcactgggaaagtatttgcaaataac

SEQ ID NO: 831398 - DNA, 75 bp, synthetic construct
  source 1..75: mol_type = other DNA
caaggattgataacactgatcaaaaattagactcaacaaaccaatctctttataaggtattggctatattagagt

SEQ ID NO: 831399 - DNA, 75 bp, synthetic construct
  source 1..75: mol_type = other DNA
cgctggataggaaacccctataagaaaaatgcgttaactgactatgataccctgccctacgcagagctgcgtgta

SEQ ID NO: 831400 - DNA, 75 bp, synthetic construct
  source 1..75: mol_type = other DNA
tcagcagtgaggaaagtattaaaagtcaactttacagcgatcaaaaaaaatatacagacctgctactacattctg

SEQ ID NO: 831401 - DNA, 75 bp, synthetic construct
  source 1..75: mol_type = other DNA
cggtgacatttcgcagaacgatcaccaatgactggtcaaagattgcgttaagagtaatgtatgaagtcgctaaag

SEQ ID NO: 831402 - DNA, 75 bp, synthetic construct
  source 1..75: mol_type = other DNA
acaatgtattaaaatacaaagaagttcatttcctttcatgcagggctctccggttaactcaggggtacattatat

SEQ ID NO: 831403 - DNA, 75 bp, synthetic construct
  source 1..75: mol_type = other DNA
ctgatcccgattgaaaatattatggatggtgaaacgattggtgcacagatttatgaagtcgtccaacagcatttc

SEQ ID NO: 831404 - DNA, 75 bp, synthetic construct
  source 1..75: mol_type = other DNA
ggaaaataatgcgctccccgctctgaaaaactttaacgatatttccggagataccccacgaacactggttctggt

SEQ ID NO: 831405 - DNA, 75 bp, synthetic construct
  source 1..75: mol_type = other DNA
gggagccggggataactctaccagcgcacagcgcctggtccctgatttcttcaaagacctgtcgctggcagatct

SEQ ID NO: 831406 - DNA, 75 bp, synthetic construct
  source 1..75: mol_type = other DNA
gccaatacgagattaaaaaaggctacctcgctcttgatgtccgactcgctgaacggtttacgatagttaccagac

SEQ ID NO: 831407 - DNA, 75 bp, synthetic construct
  source 1..75: mol_type = other DNA
tggttacttgtaaaaaataccgatttcagcaacgaagaattgcgtgaaatatataaaaattgcgaaattttgcaa

SEQ ID NO: 831408 - DNA, 75 bp, synthetic construct
  source 1..75: mol_type = other DNA
cggcagcgagtgagcaaatgggcgtcactaactgctatccagtcgaaggcatcattcacgctgacgaaacgccag

SEQ ID NO: 831409 - DNA, 75 bp, synthetic construct
  source 1..75: mol_type = other DNA
gcaaaaaaggccagcagggccaggctactgacgcgctgaacagagcaaaacaacaggcgggaaatgatgatccgt

SEQ ID NO: 831410 - DNA, 75 bp, synthetic construct
  source 1..75: mol_type = other DNA
cagtgggataaatggcagccaggtctggcgatttatgactttaccaatccggatgcctgcaaatggtacgccgac

SEQ ID NO: 831411 - DNA, 75 bp, synthetic construct
  source 1..75: mol_type = other DNA
tcaggaagtggcttatatcgataacaacgttccccagtgttcgtctctggagcatgaaagtccgcccgatacctt

SEQ ID NO: 831412 - DNA, 75 bp, synthetic construct
  source 1..75: mol_type = other DNA
tcattcaaggaatcaggacagaatccatgtaaaaagagtctttgatgatattagtaataaagcaaacaggggatg

SEQ ID NO: 831413 - DNA, 75 bp, synthetic construct
  source 1..75: mol_type = other DNA
atgaacttcactctcaaaacgcagttcgaaaactacggccttgctggcggcccggtgcacgacgccacctgcatc

SEQ ID NO: 831414 - DNA, 75 bp, synthetic construct
  source 1..75: mol_type = other DNA
gtgcataaatttcagggacgggagtgcgatgaaattgtgttttccactgtgctggataagaagcgcagcagccag

SEQ ID NO: 831415 - DNA, 75 bp, synthetic construct
  source 1..75: mol_type = other DNA
tacgatgatgagtcctgtgatgtggtgcgcttcttcacgcaactgaaatgccgcatgatgccgtatctgtatcgt

SEQ ID NO: 831416 - DNA, 75 bp, synthetic construct
  source 1..75: mol_type = other DNA
gatggttatcgtgtctggttaacatcgcataacgatttaggcattatccgttacatggtcgccatggaacggcac

SEQ ID NO: 831417 - DNA, 75 bp, synthetic construct
  source 1..75: mol_type = other DNA
tagaaagagcaaataaaaaataccccgggatttatgagttattggattttccatctccgaagattaatcctatga

SEQ ID NO: 831418 - DNA, 75 bp, synthetic construct
  source 1..75: mol_type = other DNA
aagcttcgtgcctatgtagactcattcgattttaccatcttcgacgccaagactgcgcttcagcttgttgacgat

SEQ ID NO: 831419 - DNA, 75 bp, synthetic construct
  source 1..75: mol_type = other DNA
tcacctgaagctgttttttcaaaaatttttgagtcatacagcgaaggccgagacaaaactgtacgtaaaatagga

SEQ ID NO: 831420 - DNA, 75 bp, synthetic construct
  source 1..75: mol_type = other DNA
agcatttggagcgccttaactcttgcaaaagatagtaaagatgatgaattgaaggcatactttggagtagccaat

SEQ ID NO: 831421 - DNA, 75 bp, synthetic construct
  source 1..75: mol_type = other DNA
tggagcatggtgggccgcaggtcgtgccataaagatgtccagaatctggctggacagaatcattctgatcctgct

SEQ ID NO: 831422 - DNA, 75 bp, synthetic construct
  source 1..75: mol_type = other DNA
ttgttgagtttctggaaagacagaaaaaatttttcagtaaaacattctttagtacccgtgaaattgctgatgctg

SEQ ID NO: 831423 - DNA, 75 bp, synthetic construct
  source 1..75: mol_type = other DNA
atggcgcattcagcctgacggcaccgccggtacagggaatgccggtacagactgccctgcgcaccctgcacggcg

SEQ ID NO: 831424 - DNA, 75 bp, synthetic construct
  source 1..75: mol_type = other DNA
taaaagacaaaaatatagatgatatccttaagacatttggtattaaccaaaatgcacaagtggatagcagtccag

SEQ ID NO: 831425 - DNA, 75 bp, synthetic construct
  source 1..75: mol_type = other DNA
gttgggatgttgaacagcctctatcggctgtaaatgatacagatattgaaactctgatacgtgaattacggaata

SEQ ID NO: 831426 - DNA, 75 bp, synthetic construct
  source 1..75: mol_type = other DNA
aaaatattgataaaaaaaagcgtaaaatgaaaaaggaaacgcaaagaaaaataaaagagaaaagaaaacgtagca

SEQ ID NO: 831427 - DNA, 75 bp, synthetic construct
  source 1..75: mol_type = other DNA
gcaggtactgcggcatttgccgtgctcggtgtttcactggccgcccgtctgggtatcggtatcatcaaaggcttc

SEQ ID NO: 831428 - DNA, 75 bp, synthetic construct
  source 1..75: mol_type = other DNA
atgaatagcgacagatttttacgcttacgccaggtggaagacaaaatcggcttcggtaaatcgtggatttatcga

SEQ ID NO: 831429 - DNA, 75 bp, synthetic construct
  source 1..75: mol_type = other DNA
ccgaagagtggacgccagccataacattgattatggcgcaggtgtctttttgcttgccgggactgaaatgttgaa

SEQ ID NO: 831430 - DNA, 75 bp, synthetic construct
  source 1..75: mol_type = other DNA
tactcctgctcacgccgctgcttttttcgctgctctgttttgcctgccggaaacgggggcactctgcgactcgcg

SEQ ID NO: 831431 - DNA, 75 bp, synthetic construct
  source 1..75: mol_type = other DNA
attctgaagccgacctggaaattaagcaggggaggcgttttcgtgcgcctcagtatggctggtttcactatctgt

SEQ ID NO: 831432 - DNA, 75 bp, synthetic construct
  source 1..75: mol_type = other DNA
caaatcatcgctttcactggctgaacgcccggtgtcaacgtggacaaaagccgatctggaagaatacgaacgggt

SEQ ID NO: 831433 - DNA, 75 bp, synthetic construct
  source 1..75: mol_type = other DNA
cttcgacaacgaagaacaggtggtgaactgggcgaatgacagccagtacggacttgcatcttcggtatggacgaa

SEQ ID NO: 831434 - DNA, 75 bp, synthetic construct
  source 1..75: mol_type = other DNA
tatttctgctgatttttgccatgtttatttttggctggagcataacgcaatatggaggcatatcgcagtatggcg

SEQ ID NO: 831435 - DNA, 75 bp, synthetic construct
  source 1..75: mol_type = other DNA
ggcggctggtggacgacccgcaggtaaaacagaccagcaagggtacaaacatgacgctggcgagaatggcggtat

SEQ ID NO: 831436 - DNA, 75 bp, synthetic construct
  source 1..75: mol_type = other DNA
atgacagcacagattgcagcttacgggcggctggtggacgacccgcaggaaaaacagaccagcaagggcacaccg

SEQ ID NO: 831437 - DNA, 75 bp, synthetic construct
  source 1..75: mol_type = other DNA
atgaataaattcaccggtgttttactattaggcacggtgttactggcgggatgtgtcgaccgggaagggtactat

SEQ ID NO: 831438 - DNA, 75 bp, synthetic construct
  source 1..75: mol_type = other DNA
ccaatgtgaaagtctttatggccgatttcgaagattcactggcaccagactggaacaaagtgatcgacgggcaaa

SEQ ID NO: 831439 - DNA, 75 bp, synthetic construct
  source 1..75: mol_type = other DNA
gctgattggaaaattcgcgggattcctgcggacttagaagaccgccgcgtagagataactggcccggtagagcgc

SEQ ID NO: 831440 - DNA, 75 bp, synthetic construct
  source 1..75: mol_type = other DNA
ttatgtcacgcgtatgaatgacaacatgctcaaaatgcgcaagcagatcaaattactggcaatcaacggtatctc

SEQ ID NO: 831441 - DNA, 75 bp, synthetic construct
  source 1..75: mol_type = other DNA
gactggtttttaagcccgcagggacagcaattggtagaggatgtgggctatgtgccgatttatgacgcatcatcc

SEQ ID NO: 831442 - DNA, 75 bp, synthetic construct
  source 1..75: mol_type = other DNA
cttatatggtgacgcacgaaaaccctacgctggaaacgcagaaattcgtcgactggtttttaagcccgcagggac

SEQ ID NO: 831443 - DNA, 75 bp, synthetic construct
  source 1..75: mol_type = other DNA
ctctcctcatgatggactagttataataaataaaggaaacgaagaagttgaaggtgcctggcctaacaaattgca

SEQ ID NO: 831444 - DNA, 75 bp, synthetic construct
  source 1..75: mol_type = other DNA
ggaagacagctcattgtcctgaatgccttaaacgcagcagttccgttcacagctgccgacgtcgtcggatacagc

SEQ ID NO: 831445 - DNA, 75 bp, synthetic construct
  source 1..75: mol_type = other DNA
atgaaggttaagtatagcatcgtagtcccgttatataataaatctaactatataaaagatactttagaaagtata

SEQ ID NO: 831446 - DNA, 75 bp, synthetic construct
  source 1..75: mol_type = other DNA
tttgttactagatccagccgatattaatcagtgcaacagcgctattttaaatggctttaacttggtgcagcaggc

SEQ ID NO: 831447 - DNA, 75 bp, synthetic construct
  source 1..75: mol_type = other DNA
cgataactacactaacagtgaaatggctaaaggtgtcggcatcaccatagcttacagtacagcccccaatacgcc

SEQ ID NO: 831448 - DNA, 75 bp, synthetic construct
  source 1..75: mol_type = other DNA
ccggatgagcaggtggagacgctggtgtggaatgagtggcagaagacgggcgtgaacaagctcgactcacccgaa

SEQ ID NO: 831449 - DNA, 75 bp, synthetic construct
  source 1..75: mol_type = other DNA
ccattatcagcagatggagtaacggtgtagttgaagggcatgtaaatcagctgaaaatgttgaagcggcagatgt

SEQ ID NO: 831450 - DNA, 75 bp, synthetic construct
  source 1..75: mol_type = other DNA
cccgacgacccacgcggcccacccgtgcatcgaaagagcgcaggctggcatcgaaagcacaaaaatcaagcgtga

SEQ ID NO: 831451 - DNA, 75 bp, synthetic construct
  source 1..75: mol_type = other DNA
atggggaatctttaccggagtgtgagccaaatcactcgcgataagtttgagcgaacaatgccacaggcgtattgt

SEQ ID NO: 831452 - DNA, 75 bp, synthetic construct
  source 1..75: mol_type = other DNA
atgaaaatatctctgcgcgatctggtgacgaacccggccaccggtcgtctctctacgtcagacaccatcgttttt

SEQ ID NO: 831453 - DNA, 75 bp, synthetic construct
  source 1..75: mol_type = other DNA
atgagccagccgccaaatcactggctgaaatgttgaacacaccttataccgataaacaggcagaaacagataaaa

SEQ ID NO: 831454 - DNA, 75 bp, synthetic construct
  source 1..75: mol_type = other DNA
cgcacaaatccgcccttcttccgtggtgaccaaggactacacctttaaacgacccggctggccagggcgttttga

SEQ ID NO: 831455 - DNA, 75 bp, synthetic construct
  source 1..75: mol_type = other DNA
cccatcttgaggatttggttgaagagttacagttacacagccacgcttctcgtgttgctattgctgtattatcaa

SEQ ID NO: 831456 - DNA, 75 bp, synthetic construct
  source 1..75: mol_type = other DNA
gttttagttctgaacacaatgttactaagcgagaacaaggtaaagaatggctgattgaaatcccgtattttcttc

SEQ ID NO: 831457 - DNA, 75 bp, synthetic construct
  source 1..75: mol_type = other DNA
cattacgtaaagtgatgctagaacatacatatcaagatcgtcttgcctatatttattcaaaaattagcaattcag

SEQ ID NO: 831458 - DNA, 75 bp, synthetic construct
  source 1..75: mol_type = other DNA
atggaccgcgaggaaagacatctcggttggcatcgatccggtaaaggcgaaaaaggcttcgtctaacaacaattc

SEQ ID NO: 831459 - DNA, 75 bp, synthetic construct
  source 1..75: mol_type = other DNA
aaacagcaatggctggttcccggatacagatggcgcactcatcaccggactgacctttcttgaccccaaagatgc

SEQ ID NO: 831460 - DNA, 75 bp, synthetic construct
  source 1..75: mol_type = other DNA
cgaggacaccacctgggcatgggtagcgatgatcctgacactggtcggtcttattccagtggcaggttctttaat

SEQ ID NO: 831461 - DNA, 75 bp, synthetic construct
  source 1..75: mol_type = other DNA
ttgaccccaaagatgccacacaggttcaggggctgtttcagcatttgcaggtcagatttggcgacgggccgtggc

SEQ ID NO: 831462 - DNA, 75 bp, synthetic construct
  source 1..75: mol_type = other DNA
aatattggtgtgatggccgtgacaaaagtctactcgacgctggtgtttgttgccgctgccgtcatcgccatgctg

SEQ ID NO: 831463 - DNA, 75 bp, synthetic construct
  source 1..75: mol_type = other DNA
gtgattattctcattacaggaccttttttatttgatattggtaatcaatataaggttaaacttacacaaagcgga

SEQ ID NO: 831464 - DNA, 75 bp, synthetic construct
  source 1..75: mol_type = other DNA
cgccagtttccagggagaatctggtggggagcctcgctggatagaagatccgacacagcgcgtagaggatattag

SEQ ID NO: 831465 - DNA, 75 bp, synthetic construct
  source 1..75: mol_type = other DNA
ggggggacaaaaccacctgcggcgggaagattattggaggcgcggacgaccatacgatcatgggtatcccacagg

SEQ ID NO: 831466 - DNA, 75 bp, synthetic construct
  source 1..75: mol_type = other DNA
cgaaatgacagaaagaagccaatcagcgagaactcagtacttgggctgatccgcaacattggctatgaagggcag

SEQ ID NO: 831467 - DNA, 75 bp, synthetic construct
  source 1..75: mol_type = other DNA
ataatgttgctcgtaatggcagtccacggtatacaggtttactacatcaaatagcatccaactctgagatattac

SEQ ID NO: 831468 - DNA, 75 bp, synthetic construct
  source 1..75: mol_type = other DNA
tttttttgatagtgggtggggcgaaaaatagcatgtctgatattcctgggcatgcttatctgaatgcgagtggtg

SEQ ID NO: 831469 - DNA, 75 bp, synthetic construct
  source 1..75: mol_type = other DNA
ccagccgatagaggtgatatgggaactgctggtgtctatccgcagccaagccaacaccatgcttgcaaaagcgct

SEQ ID NO: 831470 - DNA, 75 bp, synthetic construct
  source 1..75: mol_type = other DNA
atgctgaaggggcgacgagcattaaatggctttctggtaaagagcccacgaactttagctgacttcacaatgata

SEQ ID NO: 831471 - DNA, 75 bp, synthetic construct
  source 1..75: mol_type = other DNA
gaaaataaagaaaagtgtattgatgaaataagtttaaaaaaattgaaattcttattcttcgccgttgtattgact

SEQ ID NO: 831472 - DNA, 75 bp, synthetic construct
  source 1..75: mol_type = other DNA
aaaaacaataacagaaaaaactaatatagggagtctttcagatacggaaaaggctgagatattattttgtttagg

SEQ ID NO: 831473 - DNA, 75 bp, synthetic construct
  source 1..75: mol_type = other DNA
acaggtgcggctggcccggtgggggcaaccggacctcagggaccgaagggcgacccgggggagacacaaatacgg

SEQ ID NO: 831474 - DNA, 75 bp, synthetic construct
  source 1..75: mol_type = other DNA
atcctgctgatttacttttcacctgtgctgtcgcccggggtcatgaccctgacgtttccgaccacggtggctgag

SEQ ID NO: 831475 - DNA, 75 bp, synthetic construct
  source 1..75: mol_type = other DNA
ttttgtcgaagatacagattatgacctggtttcccatgacgtgctgctggcgcaagggagctaccgagcacaagc

SEQ ID NO: 831476 - DNA, 75 bp, synthetic construct
  source 1..75: mol_type = other DNA
gttaaggatgcatcaggggcagtcataaacccggcaacgttaagctacgctgcttttgatgtcattcttgctggt

SEQ ID NO: 831477 - DNA, 75 bp, synthetic construct
  source 1..75: mol_type = other DNA
tgtaccagacggaactagcggtatttcttctgtttcgggtgctaaagttataatggctggaaattacagcaaccc

SEQ ID NO: 831478 - DNA, 75 bp, synthetic construct
  source 1..75: mol_type = other DNA
aaagttaaagatttatctggaacagtcataaacccagcgacattaagctatgccgcttttgatttaatgcttgct

SEQ ID NO: 831479 - DNA, 75 bp, synthetic construct
  source 1..75: mol_type = other DNA
tactaagaagaccaaaacaattgctttttcatatatcggtccagaaatgacttatccgatttatcatacagggac

SEQ ID NO: 831480 - DNA, 75 bp, synthetic construct
  source 1..75: mol_type = other DNA
ctggcagacggacagggagcaggctttttaccaaacgtacacaatgctcgttaagaacgttgctaagcagattaa

SEQ ID NO: 831481 - DNA, 75 bp, synthetic construct
  source 1..75: mol_type = other DNA
tcgttaacccctggattatttcattagtgaagctgttacatgctattgaggttccactttgtgtcatatccgtct

SEQ ID NO: 831482 - DNA, 75 bp, synthetic construct
  source 1..75: mol_type = other DNA
tcatattacatgtacgtaaaaaaatggagttctggggaattattgatttgaaatcttcattttcttgttgtaatt

SEQ ID NO: 831483 - DNA, 75 bp, synthetic construct
  source 1..75: mol_type = other DNA
ccgggtactgtagatggtaactatgtgaattatagtggctttgtcggtaatgactccaacttattgatagtgttt

SEQ ID NO: 831484 - DNA, 75 bp, synthetic construct
  source 1..75: mol_type = other DNA
tttccgcgaccgcctataccgttactgcgcaggtaaaaagttcggcgggtaacggcaataacgccaatattagca

SEQ ID NO: 831485 - DNA, 75 bp, synthetic construct
  source 1..75: mol_type = other DNA
taacgatctggaaattgacggtattggcggcggtaatccactgaccagtaaagtcgccattattagggaaggtgc

SEQ ID NO: 831486 - DNA, 75 bp, synthetic construct
  source 1..75: mol_type = other DNA
atgaagcggggtctgtgggcagataaaaaacctgttcctccatggctgtggcgaaaagaaaataaaaatgaccac

SEQ ID NO: 831487 - DNA, 75 bp, synthetic construct
  source 1..75: mol_type = other DNA
tggtcggcgcatcatgcccgcatcagcacttattagttcggtgaaaaataaacagcttgtcagaaattcaatatg

SEQ ID NO: 831488 - DNA, 75 bp, synthetic construct
  source 1..75: mol_type = other DNA
gcttggcgctccaccacacgttatagaaaagttgctcggacatcagatgggcggggttatggccagatacaacct

SEQ ID NO: 831489 - DNA, 75 bp, synthetic construct
  source 1..75: mol_type = other DNA
agcgacggtcatgtcccggcatcttatttactggcgttggcaggcgtgctgtttaccgctatcagctacggcaaa

SEQ ID NO: 831490 - DNA, 75 bp, synthetic construct
  source 1..75: mol_type = other DNA
gtcgttctttatgcagctgttctttcccgatatcagccgctttaaagacccggacgccgcactgcctgaaattgc

SEQ ID NO: 831491 - DNA, 75 bp, synthetic construct
  source 1..75: mol_type = other DNA
tgtttctcgttcctcggtttcgatgcggtgaccacgctttcggaagagacgccggacgccgcacgcgtgatcccg

SEQ ID NO: 831492 - DNA, 75 bp, synthetic construct
  source 1..75: mol_type = other DNA
ggggccaaagggggataaaggagacaagggcgataagggggataccggcccgaaaggtgagcagggcgacccggg

SEQ ID NO: 831493 - DNA, 75 bp, synthetic construct
  source 1..75: mol_type = other DNA
acgctttcggaagaaacgccggacgccgcgcgcgtgatcccgaaagctattttcctgacggcggtttacggcggg

SEQ ID NO: 831494 - DNA, 75 bp, synthetic construct
  source 1..75: mol_type = other DNA
ttcctggtggttcaggggctgcataaaggtgaaggcgttggcactgtctggtcgctacagccatttatcagcgag

SEQ ID NO: 831495 - DNA, 75 bp, synthetic construct
  source 1..75: mol_type = other DNA
aaagtgattttgtttgttctgctgaccgtgcttttttgcggtctggcatatgcgggttcagatgatggggcactg

SEQ ID NO: 831496 - DNA, 75 bp, synthetic construct
  source 1..75: mol_type = other DNA
aatgcagagatatcgcagacatctacgcgtgttgttcctacaaaaggagccgttgttttagctaaatttgataca

SEQ ID NO: 831497 - DNA, 75 bp, synthetic construct
  source 1..75: mol_type = other DNA
aaactatcgcccactggatccaggcatcgcgccagatcatggatgatgccccggcgctcgagtcttacatcaatt

SEQ ID NO: 831498 - DNA, 75 bp, synthetic construct
  source 1..75: mol_type = other DNA
cgtagaagtcagccgcgaagatcgcgacaacttcgtgaaaaacatgctgaccatcctgtgtgaagaacgccttgc

SEQ ID NO: 831499 - DNA, 75 bp, synthetic construct
  source 1..75: mol_type = other DNA
gctgggcatgggcttccatcctgactttaccggccggcagaacgtgtatatgtccgggctgatgatgggcctggg

SEQ ID NO: 831500 - DNA, 75 bp, synthetic construct
  source 1..75: mol_type = other DNA
gcggcgaaagccagatgtcgctcgatgagattgaggatgtgtaccatacgcggccaggctatcgtccggaagaat

SEQ ID NO: 831501 - DNA, 75 bp, synthetic construct
  source 1..75: mol_type = other DNA
agtaccttttggctctgttgctactgttgaaggccaggcatccagttctgggattgttggggataacagtcaggt

SEQ ID NO: 831502 - DNA, 75 bp, synthetic construct
  source 1..75: mol_type = other DNA
ggcccgcgggtcctcaggggccgaagggagataaaggagagcgtggtgacaccggccctgtcggggcaaccggcg

SEQ ID NO: 831503 - DNA, 75 bp, synthetic construct
  source 1..75: mol_type = other DNA
atgagtattcgtatcgaagttagcaacaaatgggttattaccagcgaccaatatcaattcatcctgaatgaaaag

SEQ ID NO: 831504 - DNA, 75 bp, synthetic construct
  source 1..75: mol_type = other DNA
cccgcgttttccctggagtcggtctgatactcctccttatttctattgttatcttttataaccagttcacctaca

SEQ ID NO: 831505 - DNA, 75 bp, synthetic construct
  source 1..75: mol_type = other DNA
gctgataatcaatgggatgaaatggtttgtcctgcagggcttggtatctcaggaagtcatgaaggagatatatct

SEQ ID NO: 831506 - DNA, 75 bp, synthetic construct
  source 1..75: mol_type = other DNA
cgtaaaccgaatccccaccgtggtgggacctcccgggccaaagggggaacaggggcccgcggtgtcaacgacgga

SEQ ID NO: 831507 - DNA, 75 bp, synthetic construct
  source 1..75: mol_type = other DNA
ctggggccggcgagcattattgagacaaacagcaatggctggttcccggatacagatggcgcactcatcaccgga

SEQ ID NO: 831508 - DNA, 75 bp, synthetic construct
  source 1..75: mol_type = other DNA
accagctaattgagaataaactctgccaggctgggttaaaacgtgagcacgctgcaaccgtggctgaagtattgg

SEQ ID NO: 831509 - DNA, 75 bp, synthetic construct
  source 1..75: mol_type = other DNA
actattcgcaaagctatcagcgacttagtggcagacggcgtactgatccgctggcagggcaaaggcacctttgta

SEQ ID NO: 831510 - DNA, 75 bp, synthetic construct
  source 1..75: mol_type = other DNA
tctgacttgtacgccacaggatgattcccagtatccagggatggatacaaagacagcaagtgattacctgccaca

SEQ ID NO: 831511 - DNA, 75 bp, synthetic construct
  source 1..75: mol_type = other DNA
catcttttaaaaaagggaataatctatttagttcaacatttagtggcatcgagtttacatttgaccactacataa

SEQ ID NO: 831512 - DNA, 75 bp, synthetic construct
  source 1..75: mol_type = other DNA
aatggtggtgccgtttggcggcgcggaaatttactacggtactaaccccctggcctttgccgcgccgggagaagg

SEQ ID NO: 831513 - DNA, 75 bp, synthetic construct
  source 1..75: mol_type = other DNA
aatggtggtgccgtttggcggcgcggaaatttactacggtactaacccccctggcctttgccgcgccgggagaag

SEQ ID NO: 831514 - DNA, 75 bp, synthetic construct
  source 1..75: mol_type = other DNA
tgtttaaatttgatacattacacctgaacaatgctgacttttcaatatcacgcaatgccaatgttgaaggaaata

SEQ ID NO: 831515 - DNA, 75 bp, synthetic construct
  source 1..75: mol_type = other DNA
atttttattattttatataaatttaatattaagttgttttggccagttttccacccttcttacttaagattttct

SEQ ID NO: 831516 - DNA, 75 bp, synthetic construct
  source 1..75: mol_type = other DNA
cgcttacaaaatgtgaagctgaaaaacagaacattgacgttattattcctgagcttccctcccctgaatcccctg

SEQ ID NO: 831517 - DNA, 75 bp, synthetic construct
  source 1..75: mol_type = other DNA
gagcaggcgaaaacgcagcgccgcagcctggcggatacccttcagcagtccggcggcgaagacggtggcagtgtg

SEQ ID NO: 831518 - DNA, 75 bp, synthetic construct
  source 1..75: mol_type = other DNA
gtctcgaagcttcgctttacagcacacactccatgagaagaacaaaaccttacctgatctacaagaaaaccaaga

SEQ ID NO: 831519 - DNA, 75 bp, synthetic construct
  source 1..75: mol_type = other DNA
tcaaacgagaaatttgattttggattccatttgggaagcagctatcaaatggatttgaggaatgatagcaacact

SEQ ID NO: 831520 - DNA, 75 bp, synthetic construct
  source 1..75: mol_type = other DNA
gttgcagtacctatcacattgttatttgtattcacacagaagcatataactactggacttgttagcggtgccgtt

SEQ ID NO: 831521 - DNA, 75 bp, synthetic construct
  source 1..75: mol_type = other DNA
aaaatatcggtgattacactatgggcattactgaaagcatctgggcgggttataccaccgtcagggtgctttcga

SEQ ID NO: 831522 - DNA, 75 bp, synthetic construct
  source 1..75: mol_type = other DNA
tgaggacgtcagctacgtcctggaagagctgaaagccaaaggcctgtgccgtgactttctcgccacgacgtcggg

SEQ ID NO: 831523 - DNA, 75 bp, synthetic construct
  source 1..75: mol_type = other DNA
gtttgctttgggggttattttatttgagatgatgtcaggaggattccatcctgcagggatcaaactgagtgattt

SEQ ID NO: 831524 - DNA, 75 bp, synthetic construct
  source 1..75: mol_type = other DNA
ctaatactgaattatcacaggcagagatctcctggcgtgtgggttatgaaaatgtcgatcactttgccaaactgt

SEQ ID NO: 831525 - DNA, 75 bp, synthetic construct
  source 1..75: mol_type = other DNA
aatgttatacgttgaaaacaacaaatctattaatcgaattatgcgtgttaaagattttattgagaaaaaaataca

SEQ ID NO: 831526 - DNA, 75 bp, synthetic construct
  source 1..75: mol_type = other DNA
cgatgactttaaccgtaccgcacgttcatcaacgctgcccatgagcgaatcctcatggacagagaacggcaggta

SEQ ID NO: 831527 - DNA, 75 bp, synthetic construct
  source 1..75: mol_type = other DNA
atgatcattcggtaggcgtccagcagataagtcacagcttcccttttctggacgggcctcaaaacttttttcgaa

SEQ ID NO: 831528 - DNA, 75 bp, synthetic construct
  source 1..75: mol_type = other DNA
gcgctatatcgccgccgccatgctgattggtttaatccgcgggattatcaccgagtacctgttcctgcggctcag

SEQ ID NO: 831529 - DNA, 75 bp, synthetic construct
  source 1..75: mol_type = other DNA
cactaccgaaggcgcagccgcaaacatgtattaccgcgttgcggtgatggcgtgtgcaattacttccctcggaga

SEQ ID NO: 831530 - DNA, 75 bp, synthetic construct
  source 1..75: mol_type = other DNA
tttccgttggtaggtgattttggcttggctaatgcatccgtggattctgatttttttggtggggcacgaccctat

SEQ ID NO: 831531 - DNA, 75 bp, synthetic construct
  source 1..75: mol_type = other DNA
ttcaacggtgataaagaacaggttgtacgccccactcaagcggttctgtcagtccagacgggagatgtagtcatt

SEQ ID NO: 831532 - DNA, 75 bp, synthetic construct
  source 1..75: mol_type = other DNA
atataaatataattgaatatgactcaattataaatattgaacttccttatttgttgtctgaaatagaaggttctc

SEQ ID NO: 831533 - DNA, 75 bp, synthetic construct
  source 1..75: mol_type = other DNA
atgcgcttcccgatttaggtcattttttaggtgacgatggtatcaacgaattaccactggtgttgcaactattaa

SEQ ID NO: 831534 - DNA, 75 bp, synthetic construct
  source 1..75: mol_type = other DNA
gtcagcccggcaggcggcagaaagtgcagcctcagcaaagcagtcagaggatgcgtcctcgtcctcggcctctga

SEQ ID NO: 831535 - DNA, 75 bp, synthetic construct
  source 1..75: mol_type = other DNA
atgacaacaacgggaacattttctggtgcgatgcgcatcgtcaggttaccggaaaatgcgaagccatgtctgttg

SEQ ID NO: 831536 - DNA, 75 bp, synthetic construct
  source 1..75: mol_type = other DNA
aggcatattattgaatctcccgaaagcgttgatacaaccgaaattaccatcagacctactgcatctgcaaactga

SEQ ID NO: 831537 - DNA, 75 bp, synthetic construct
  source 1..75: mol_type = other DNA
gtggagtcactggcgttttccctctcttcttcaggctttaccttcacgtttaatctggtggctgaaatcaaaaac

SEQ ID NO: 831538 - DNA, 75 bp, synthetic construct
  source 1..75: mol_type = other DNA
atgaatcccgccgattatgataaatattccgatatggttaaaaagcatgtaatagatggtgaggaactcataatt

SEQ ID NO: 831539 - DNA, 75 bp, synthetic construct
  source 1..75: mol_type = other DNA
ggcacacgctcgcagatagtaaacgcggcattcacccacagcagcagcgattttaccgatattcttgctggtggc

SEQ ID NO: 831540 - DNA, 75 bp, synthetic construct
  source 1..75: mol_type = other DNA
tattattggtgagtatattgggaaaatttatatggaaagtaaaaacaggccaaaattctttatcgaagagaaagc

SEQ ID NO: 831541 - DNA, 75 bp, synthetic construct
  source 1..75: mol_type = other DNA
tttgatgattttgatgctttggatgtagttactaacagtaataagctaattaagaatacagttcttaattttact

SEQ ID NO: 831542 - DNA, 75 bp, synthetic construct
  source 1..75: mol_type = other DNA
aatttgtgcctcatgtaaaaggggcgctggcaggccagcctattgagttgatggactggcatgtatttatcctca

SEQ ID NO: 831543 - DNA, 75 bp, synthetic construct
  source 1..75: mol_type = other DNA
gaagcacagggttccggtcagatcatcaatcttggttctattggtgctctttctgtcgtgcctactggcgcagtc

SEQ ID NO: 831544 - DNA, 75 bp, synthetic construct
  source 1..75: mol_type = other DNA
tttttctggtacccggaaacgagcttcgactttctgggctatacattccggccgcgtctgtcgaagaatcgctgg

SEQ ID NO: 831545 - DNA, 75 bp, synthetic construct
  source 1..75: mol_type = other DNA
ggaaagccgttactgctgccgaagtggaggcattttatcgtggtgagaaattaccccgtaaaagcgtcatgctga

SEQ ID NO: 831546 - DNA, 75 bp, synthetic construct
  source 1..75: mol_type = other DNA
aacgcggtgagtaaaccttccggtggttactggctttttctgccgcagggggcgacagcgacagtttccggtaaa

SEQ ID NO: 831547 - DNA, 75 bp, synthetic construct
  source 1..75: mol_type = other DNA
aaaccagattttgatgttctgatttgtggtaacgatcgcgcagcctttgtggcttatcaggttcttctggcgaag

SEQ ID NO: 831548 - DNA, 75 bp, synthetic construct
  source 1..75: mol_type = other DNA
gatgctggacgagatctggctgaggtgaaacaatttcacatggcaacaggtgatgatcactacaccgatctcgca

SEQ ID NO: 831549 - DNA, 75 bp, synthetic construct
  source 1..75: mol_type = other DNA
gactttgccctgagcgaagaggattacgcctggctggcgcagtatgacattgtgcacgcggcaatctggggacat

SEQ ID NO: 831550 - DNA, 75 bp, synthetic construct
  source 1..75: mol_type = other DNA
gatggctcaaagcggacattctcgcaacctttttcatcggtcgttcaaatgttacgccctggcgttggacgttag

SEQ ID NO: 831551 - DNA, 75 bp, synthetic construct
  source 1..75: mol_type = other DNA
tcgttatagagttaaaaaagactacgaaaattggttgaatcaactcaagatgatggcattcagggcgggaatccc

SEQ ID NO: 831552 - DNA, 75 bp, synthetic construct
  source 1..75: mol_type = other DNA
gagcgttggcggggcggtactgttggctaacaatgatgaagtgagcgccatcgaaggcattatccctctgattga

SEQ ID NO: 831553 - DNA, 75 bp, synthetic construct
  source 1..75: mol_type = other DNA
gagactaccggctacgtgaaatcggatggcgagtggttcatcaactgcccgcgcatccgggcgactggcgcgaag

SEQ ID NO: 831554 - DNA, 75 bp, synthetic construct
  source 1..75: mol_type = other DNA
tggaggggctattatcacagatacggatgaaaccgtaagcggcttcaatactaatggcgaattcagtatcgctga

SEQ ID NO: 831555 - DNA, 75 bp, synthetic construct
  source 1..75: mol_type = other DNA
acaaacactaccattaacggtggtgggcagattgtttacagcggtggcaaagtctcagtttccagactgaacagt

SEQ ID NO: 831556 - DNA, 75 bp, synthetic construct
  source 1..75: mol_type = other DNA
tgggatggcgcgcagttctggcgtcaggctcctgaaccggtgacggttatcgacaccatgggtgccggagattcg

SEQ ID NO: 831557 - DNA, 75 bp, synthetic construct
  source 1..75: mol_type = other DNA
cgacttctccgacaagtgggacagcccgctctggcagacactggtgccgcatctcgattttgcctttgcctccgc

SEQ ID NO: 831558 - DNA, 75 bp, synthetic construct
  source 1..75: mol_type = other DNA
tcagcacgtgcagccagcacgtcagccggacaggccgcttcgtcggctcagtcagcgtcttccagcgcaggaacg

SEQ ID NO: 831559 - DNA, 75 bp, synthetic construct
  source 1..75: mol_type = other DNA
cccgagatattgcaatacgttttatccacgcgcctatgattagtttcttttcaggatttaaatggacagatacta

SEQ ID NO: 831560 - DNA, 75 bp, synthetic construct
  source 1..75: mol_type = other DNA
gtgacaaacacaccagcgttgacggctattacagcccatgatggttcgctggcgcaggttgacttcagtgcgaac

SEQ ID NO: 831561 - DNA, 75 bp, synthetic construct
  source 1..75: mol_type = other DNA
gtgaatacgggcatttcacactttctgtgttgttggctagtggcattctgatgattaatattccggttacaaact

SEQ ID NO: 831562 - DNA, 75 bp, synthetic construct
  source 1..75: mol_type = other DNA
gcctcaacatcaatcaacttgcagcggtgaccgaccttcatcgtcagacgatctccagcaagctgaataacgttg

SEQ ID NO: 831563 - DNA, 75 bp, synthetic construct
  source 1..75: mol_type = other DNA
aggttttcgctgcattgagcttccaacttctcgtatatacccaaatggtgatgtgccaactaaaattagcggctt

SEQ ID NO: 831564 - DNA, 75 bp, synthetic construct
  source 1..75: mol_type = other DNA
taccaaaataaatggaatcaaaggaaatttttccatattgattgtcttatttaaagcgtgttttggattttataa

SEQ ID NO: 831565 - DNA, 75 bp, synthetic construct
  source 1..75: mol_type = other DNA
tttcaaagaggaaaatcttgtgcttgtattaggcgctggaatttctttggattataaaatacctacatgggatga

SEQ ID NO: 831566 - DNA, 75 bp, synthetic construct
  source 1..75: mol_type = other DNA
aacaagtaaaatcagaaacagaaaataattcatctgcaaatatgaatggaagtggctcggatgaaatcctttcta

SEQ ID NO: 831567 - DNA, 75 bp, synthetic construct
  source 1..75: mol_type = other DNA
gcaggcaccaaatccgcgagattattttgacgggaacctggacgagtttactcgccagtattttgacggggatga

SEQ ID NO: 831568 - DNA, 75 bp, synthetic construct
  source 1..75: mol_type = other DNA
catgttttgtatgaatattatcaggaggaagaaagcagtacattgaaagcaatcaagaaattgtgcatatcggca

SEQ ID NO: 831569 - DNA, 75 bp, synthetic construct
  source 1..75: mol_type = other DNA
acttttgaagaaatcgatgctaattcatttggcgtgaatgttatttggatcgactcttacgatgagattgcacca

SEQ ID NO: 831570 - DNA, 75 bp, synthetic construct
  source 1..75: mol_type = other DNA
cccaaaatctaatgtttgtttttgagtattataataaacttaataacaaagagtctttagatgctattaggctag

SEQ ID NO: 831571 - DNA, 75 bp, synthetic construct
  source 1..75: mol_type = other DNA
agaagctcctctcagcaccaagaatcggtacgtatgaaaacttttttgtagatcatactgaagaagaaatttacg

SEQ ID NO: 831572 - DNA, 75 bp, synthetic construct
  source 1..75: mol_type = other DNA
aaatcaaaactcaacgagcagcgcgagtattacgaaggcgttatcgcggatggaagtaagcgcatcgccaaaatg

SEQ ID NO: 831573 - DNA, 75 bp, synthetic construct
  source 1..75: mol_type = other DNA
accagtcaggcggaatatcgcgcacctatctttttcgtccattaccgcaattaggctctaagttaaggaaggtgc

SEQ ID NO: 831574 - DNA, 75 bp, synthetic construct
  source 1..75: mol_type = other DNA
taaatttggcttaaaacctgaagtccgtcagtcgttacccctgattaatcagtgcgtcgattttagcacccgacc

SEQ ID NO: 831575 - DNA, 75 bp, synthetic construct
  source 1..75: mol_type = other DNA
tttgctcgactatactccaacttcttatatgggcagactggttaatcgtcatttggcagaacagggagggatagc

SEQ ID NO: 831576 - DNA, 75 bp, synthetic construct
  source 1..75: mol_type = other DNA
gtgaagacggcaaattatttaatatgctgtcagaatttaagttattgcactcagaatatttcgaatggggtgatt

SEQ ID NO: 831577 - DNA, 75 bp, synthetic construct
  source 1..75: mol_type = other DNA
acacttttcatttcgtcgaggtccaaagattactttgtctgatggtgtatttgcttatgctctgatcgattattg

SEQ ID NO: 831578 - DNA, 75 bp, synthetic construct
  source 1..75: mol_type = other DNA
cacttgggctaaggcattaagtgaaggtaaagatgttaaagttaatatccagccatcttatacaggtaacagcgt

SEQ ID NO: 831579 - DNA, 75 bp, synthetic construct
  source 1..75: mol_type = other DNA
tgtacggtaagccgatgaatgaactgagcgagacagagaagcagactgtttcgacactggcaacggttgctgccg

SEQ ID NO: 831580 - DNA, 75 bp, synthetic construct
  source 1..75: mol_type = other DNA
acgccatcgcggagaaggttaccagtatggaaaccgcatttgctgaactcagcaaggatgccacgaagctgccgg

SEQ ID NO: 831581 - DNA, 75 bp, synthetic construct
  source 1..75: mol_type = other DNA
gagagcaaagaacttatggtgtatttctcgaaaatattcagcggtaatccctttttgatcgaagaagggcaattg

SEQ ID NO: 831582 - DNA, 75 bp, synthetic construct
  source 1..75: mol_type = other DNA
agaataagcgtcctgatagttttagtgtaacatactctattgatggaggccgtcctgttatcaaagacatcagca

SEQ ID NO: 831583 - DNA, 75 bp, synthetic construct
  source 1..75: mol_type = other DNA
ggtaaagatgttaaagttaatatccagccatcttatacaggtaacagcgtaaggccggtatctgaaacgtttaaa

SEQ ID NO: 831584 - DNA, 75 bp, synthetic construct
  source 1..75: mol_type = other DNA
gcaggtcattgatgtatacctgaatgcggcgattcgcctggcgttacaacacgggttcactttcgatgaaattgt

SEQ ID NO: 831585 - DNA, 75 bp, synthetic construct
  source 1..75: mol_type = other DNA
tctgaatgaatggtatgttcagcctcaggcacaggttgtctggatgggtgtaaaagcggatgaacaccgtgaaag

SEQ ID NO: 831586 - DNA, 75 bp, synthetic construct
  source 1..75: mol_type = other DNA
tggggagctcgcggcatctcggccgaaaacaaaggctctgtttctgtaaataacacccaaattaaaactgaaggt

SEQ ID NO: 831587 - DNA, 75 bp, synthetic construct
  source 1..75: mol_type = other DNA
aaaaagtgcatttgcgatttccgtttcaaataactcatctctgaccattaccaatggggcatctattacaacaag

SEQ ID NO: 831588 - DNA, 75 bp, synthetic construct
  source 1..75: mol_type = other DNA
ccgattattttattgccaataaaattgaccagccgaaaattgccgtcatcaattgcgaagcctttgaagtttgtg

SEQ ID NO: 831589 - DNA, 75 bp, synthetic construct
  source 1..75: mol_type = other DNA
cgcgacctggtatcagaacgatgcgaataagaccggcgcttatgttgacagctgggcgctgtataactggtttga

SEQ ID NO: 831590 - DNA, 75 bp, synthetic construct
  source 1..75: mol_type = other DNA
acggtactcgtgttgaaagcaccggagatggcaatatccagacccgccttggcgtgaaaacctggattaagagcc

SEQ ID NO: 831591 - DNA, 75 bp, synthetic construct
  source 1..75: mol_type = other DNA
cggagctcataatggggccgccgatgcaatgagacattgttacttgatgtgtcgaatgactaagacatttggatc

SEQ ID NO: 831592 - DNA, 75 bp, synthetic construct
  source 1..75: mol_type = other DNA
ggcaaccagcttaatgaggagaacccgcatcacctgcaccagccgtaccggctgccggggcagcagtatgataag

SEQ ID NO: 831593 - DNA, 75 bp, synthetic construct
  source 1..75: mol_type = other DNA
accacgcagggcgggctgacgcgcagtatggagtacgatgctgccggacgtgtcatcagtctgactaacgagaac

SEQ ID NO: 831594 - DNA, 75 bp, synthetic construct
  source 1..75: mol_type = other DNA
ataatattgtgcaatatatattgggatttggcccgacggtaatgttgccgttggtgttatttattcttgctctct

SEQ ID NO: 831595 - DNA, 75 bp, synthetic construct
  source 1..75: mol_type = other DNA
ttgatgtgctgtggggggagctggaatggtcacatccgacagatgatgacgagttgccggaagtcaccggacctg

SEQ ID NO: 831596 - DNA, 75 bp, synthetic construct
  source 1..75: mol_type = other DNA
aataataaaaaacataccggaaccggaactggacatattgcacgtgcgaatttcagagatatccatggttcaagc

SEQ ID NO: 831597 - DNA, 75 bp, synthetic construct
  source 1..75: mol_type = other DNA
aataaagtttgtttacatgattggctgttatatgcgtttgccagagaaagaaaatataaatggtttattgatcct

SEQ ID NO: 831598 - DNA, 75 bp, synthetic construct
  source 1..75: mol_type = other DNA
gcagttggaggaaaactttaaggagattgctggtggcccggtcaaaaagcggctttggatccttgagagcggctt

SEQ ID NO: 831599 - DNA, 75 bp, synthetic construct
  source 1..75: mol_type = other DNA
cgagctggggatcgggcattgagcagcagaatctcggcttcctgcagtacaccctgcagccctatatctcccggt

SEQ ID NO: 831600 - DNA, 75 bp, synthetic construct
  source 1..75: mol_type = other DNA
gaaggcacgattgtgctgcgcgatgagccgggcccggctctgctctcccgacttaaaaaaggagaactttggggc

SEQ ID NO: 831601 - DNA, 75 bp, synthetic construct
  source 1..75: mol_type = other DNA
tttgcatattgcaagctttaagaaaatgagtaaagaggtcattgacgtatatctgaatgcggcgattcgcctggc

SEQ ID NO: 831602 - DNA, 75 bp, synthetic construct
  source 1..75: mol_type = other DNA
gacattgccacaaacgcattcacagcgccacagcaggcaccaaatccgcgagattattttggcgaaaatctggat

SEQ ID NO: 831603 - DNA, 75 bp, synthetic construct
  source 1..75: mol_type = other DNA
aatgccgctattgatgagtatttcagcgaccccaaagaatttcgcgatcagttagacgattatctttacatgggg

SEQ ID NO: 831604 - DNA, 75 bp, synthetic construct
  source 1..75: mol_type = other DNA
ttgccgttattggtagcgatggttcaggcaagtcaacggtgtgtgaacatctcattaccgttgatgggaaaatcc

SEQ ID NO: 831605 - DNA, 75 bp, synthetic construct
  source 1..75: mol_type = other DNA
agtcgcagccgcaggtagagtttgattacttttttgaagccgcagggccggggtgcacttatgtattcaacacca

SEQ ID NO: 831606 - DNA, 75 bp, synthetic construct
  source 1..75: mol_type = other DNA
ctgacggcaccgtcaaagtgctggtcgaggggttacagcgcgcgcgtatttctgcgctctctgacaatggcgaac

SEQ ID NO: 831607 - DNA, 75 bp, synthetic construct
  source 1..75: mol_type = other DNA
gaacataaatttttgcgcgagttcccgtgcccttattgtcatcatcaggtcaaaaaatcgcgccttgcccgaacg

SEQ ID NO: 831608 - DNA, 75 bp, synthetic construct
  source 1..75: mol_type = other DNA
agactacaaacagcgaattacagaccatcagcgacagcagctcgtctatgaactgaagtccaggggatttgatgg

SEQ ID NO: 831609 - DNA, 75 bp, synthetic construct
  source 1..75: mol_type = other DNA
aaaagaagaagagaaagcgtttctgatggaatgcgcaagcacaggaaaaacggttatcactgcggaagaaggccg

SEQ ID NO: 831610 - DNA, 75 bp, synthetic construct
  source 1..75: mol_type = other DNA
aaataacacatcgtcctataaaagctatctctctcagtacaccggattaggtgttaaggagaaaatcgatggttc

SEQ ID NO: 831611 - DNA, 75 bp, synthetic construct
  source 1..75: mol_type = other DNA
gcagaatgattcgttactgacctctgcacatacaagtaaatatcagaatcttaccagtaacctggaaaaaaactg

SEQ ID NO: 831612 - DNA, 75 bp, synthetic construct
  source 1..75: mol_type = other DNA
gaaaataactgggatcaacttaccagcggatttcagggggcaatgtcgggtaactctgtacagctaattagaata

SEQ ID NO: 831613 - DNA, 75 bp, synthetic construct
  source 1..75: mol_type = other DNA
tcagaatgactcgttgctcacatctggacatacaagtcagtatcagaatcttaccagtaacttagaaaataactg

SEQ ID NO: 831614 - DNA, 75 bp, synthetic construct
  source 1..75: mol_type = other DNA
gctaaagctgtaagtgttgaagatgtgatccgggcgctggctatgaatcgtgggattgtccctgcagcaggaaac

SEQ ID NO: 831615 - DNA, 75 bp, synthetic construct
  source 1..75: mol_type = other DNA
caggctcgacgttcaacaaaaaccaggttccgacatactggcacaactcgccggaatgcaacaaatatcggggta

SEQ ID NO: 831616 - DNA, 75 bp, synthetic construct
  source 1..75: mol_type = other DNA
ggcgacaccttcacggaaaccgaagaaagcgatctggttgtgggcgacggtgacaaaaaagcaaaaggtttttta

SEQ ID NO: 831617 - DNA, 75 bp, synthetic construct
  source 1..75: mol_type = other DNA
cgtttacaggcgggtgatcctgatacgttgctgggccttccggtcgaatatctggagtttatgcctgataacgtt

SEQ ID NO: 831618 - DNA, 75 bp, synthetic construct
  source 1..75: mol_type = other DNA
atgccgagaataatcgaattacgccagcagaaaaccgccattaaaaatcagatgcgcgaagaaaaccgcagtctt

SEQ ID NO: 831619 - DNA, 75 bp, synthetic construct
  source 1..75: mol_type = other DNA
ccgaacgcgattagcgcaaaaggggctatgggacttccacaatttgtaaagagaaccggaaacgcttacgggctt

SEQ ID NO: 831620 - DNA, 75 bp, synthetic construct
  source 1..75: mol_type = other DNA
agggaagtggtcttacccagagcatgttcaggggaagagggcttggatgggtaaattttggtcttactaaccagt

SEQ ID NO: 831621 - DNA, 75 bp, synthetic construct
  source 1..75: mol_type = other DNA
tgacactggatgttaacgaagaacaactcaaacggcttgaggcgatatttgaaaagtatcgcaatggtctgatga

SEQ ID NO: 831622 - DNA, 75 bp, synthetic construct
  source 1..75: mol_type = other DNA
tactgcctatataaccattggcattgccggaaaagaaggcgaacacttggatctgttaaataagatcgccttaat

SEQ ID NO: 831623 - DNA, 75 bp, synthetic construct
  source 1..75: mol_type = other DNA
gccattgccggctcatcactgtctgcatgttgcctttcgaatggtactcccctggttgcttccggtaatgtgggg

SEQ ID NO: 831624 - DNA, 75 bp, synthetic construct
  source 1..75: mol_type = other DNA
caggggccgaaaggggatacgggagctgcaggcccggcagggcctcagggtcaaaaaggtgatacgggagccaca

SEQ ID NO: 831625 - DNA, 75 bp, synthetic construct
  source 1..75: mol_type = other DNA
atcctgaagtcgagccgcgcaacggaaagctggttgtcgcgaagctagaaggcgataacgaagcgacctttaaga

SEQ ID NO: 831626 - DNA, 75 bp, synthetic construct
  source 1..75: mol_type = other DNA
gtcacttcagccgtttatcagcgagaacgcgcacctgatcccgattattaccggtgcgacgattgtctgtttctc

SEQ ID NO: 831627 - DNA, 75 bp, synthetic construct
  source 1..75: mol_type = other DNA
aatctccatcatggtggtgtttatcttcctggtggttcagggactgcataaaggagaaggcgttggcaccgtctg

SEQ ID NO: 831628 - DNA, 75 bp, synthetic construct
  source 1..75: mol_type = other DNA
cgccattttaaccgccgcgaatctgaagagcgtcaacctggtcgctaacttcaataccctgtttgtactggtgca

SEQ ID NO: 831629 - DNA, 75 bp, synthetic construct
  source 1..75: mol_type = other DNA
gcgacaaggagactaaaccgccgaggatagcccagggcagcagcaacgtcttcatcaacaatcagcctgccgcac

SEQ ID NO: 831630 - DNA, 75 bp, synthetic construct
  source 1..75: mol_type = other DNA
aaatttattgaacatatgatcgcctgtactttggcagataaatacagccccggactgaacgctgccagttatgaa

SEQ ID NO: 831631 - DNA, 75 bp, synthetic construct
  source 1..75: mol_type = other DNA
ttacgttaagagcattctgtatttcattttataatgaggatgtgtatttccataaagatgaagtccttctcataa

SEQ ID NO: 831632 - DNA, 75 bp, synthetic construct
  source 1..75: mol_type = other DNA
gattgatcgctggtatgacactaccgttgtctgctcagacgattcattctggctggacgttaaaggggattctat

SEQ ID NO: 831633 - DNA, 75 bp, synthetic construct
  source 1..75: mol_type = other DNA
gcaagggccgccgtcacccttccccctcctcccccacctggagcaatacctgaaatcccacagggggaaccctca

SEQ ID NO: 831634 - DNA, 75 bp, synthetic construct
  source 1..75: mol_type = other DNA
gctggactaccacctgttttatgagtacgacgctgcggaccggatcatccgctggtccgataaccccactgaccc

SEQ ID NO: 831635 - DNA, 75 bp, synthetic construct
  source 1..75: mol_type = other DNA
gacagtgaaaaccgcagcctgaacgatgacgagggcaaacagtttgatgaactgcgtgcaaaagccgattccctc

SEQ ID NO: 831636 - DNA, 75 bp, synthetic construct
  source 1..75: mol_type = other DNA
tgattgcggaagatgagtttgagaatattaaacgggcggtattgcacgggatagggatggcttatctgtatcgat

SEQ ID NO: 831637 - DNA, 75 bp, synthetic construct
  source 1..75: mol_type = other DNA
ctctggccctgagagaactgcataaccacgtattccccgatatttcctttgaacaatctccgctgaaacaggccg

SEQ ID NO: 831638 - DNA, 75 bp, synthetic construct
  source 1..75: mol_type = other DNA
caacctgacgcaactgaaaaatctcgaaagcagcaatcctgctgttcaggctctggccctgagagaactgcataa

SEQ ID NO: 831639 - DNA, 75 bp, synthetic construct
  source 1..75: mol_type = other DNA
gcggcggaagacgccgtaaaccgaatccccaccgtggtgggacctcccgggccaaagggagaaccggggcccgcg

SEQ ID NO: 831640 - DNA, 75 bp, synthetic construct
  source 1..75: mol_type = other DNA
cgattggcgcagcgttcttctctgttggtcgtttttacccggcaagacgtcgcggtaacggtgctggaaacagaa

SEQ ID NO: 831641 - DNA, 75 bp, synthetic construct
  source 1..75: mol_type = other DNA
attacgggcatttcagcgttcctctgccgggcgcagaggcgctgattgcctgtgtgggtgcacaacgtgatcagg

SEQ ID NO: 831642 - DNA, 75 bp, synthetic construct
  source 1..75: mol_type = other DNA
gaggatgcaacaaaagtcctgaagatgtttactacatctcaaagcaatgaagaggtgacaagcgaagttcgttgc

SEQ ID NO: 831643 - DNA, 75 bp, synthetic construct
  source 1..75: mol_type = other DNA
agtgaaaggctcgttgcgctggccaggcaccatggcgaagtactgtgagcctttgcactctgtgcatcacccgaa

SEQ ID NO: 831644 - DNA, 75 bp, synthetic construct
  source 1..75: mol_type = other DNA
cggctctctttgagcgtaacggtcagctgcagctgcagcggttcgcaccggagatgtcgtgtgtcttggccgttg

SEQ ID NO: 831645 - DNA, 75 bp, synthetic construct
  source 1..75: mol_type = other DNA
accgctgctggtaaatattgagcaggaaattgaccggtgcttactcgacagcgatgatgacgtgtttgcagagtt

SEQ ID NO: 831646 - DNA, 75 bp, synthetic construct
  source 1..75: mol_type = other DNA
gacacgaaatggattgagtcagcgctggagaacgggcgttacccgcttacggatgcgccggaaggccatgttgat

SEQ ID NO: 831647 - DNA, 75 bp, synthetic construct
  source 1..75: mol_type = other DNA
atttcatggagtagacatgaaatcatgcaatcttatcatggaggaaagcaagatcttattagtgtggtattaagt

SEQ ID NO: 831648 - DNA, 75 bp, synthetic construct
  source 1..75: mol_type = other DNA
cagcgcttctggatagtgttgcacgatggaatgaagtgacgactctggctaaattacgctatcaggccgagctgg

SEQ ID NO: 831649 - DNA, 75 bp, synthetic construct
  source 1..75: mol_type = other DNA
agacaatattgccagagaatgtggctataatgatacgtcatattttatctgcatattcaagaaaaacttttcatt

SEQ ID NO: 831650 - DNA, 75 bp, synthetic construct
  source 1..75: mol_type = other DNA
tatgcattattctctgattcagaaaacacatatattaataaaatcaatatcaataaagcagttttaataaaatat

SEQ ID NO: 831651 - DNA, 75 bp, synthetic construct
  source 1..75: mol_type = other DNA
atatcaggaatattaacgattctgttttacatatagtgtttatacgtaaaccgttaaatttattactgaaaaagg

SEQ ID NO: 831652 - DNA, 75 bp, synthetic construct
  source 1..75: mol_type = other DNA
tggggaattcctgttgagcagtttaaaacagaggcgtatcacgtcacagaacgcaatttagaagcataccacagc

SEQ ID NO: 831653 - DNA, 75 bp, synthetic construct
  source 1..75: mol_type = other DNA
tgtaattgagggccttaaagagaactcttcaatttctgaccttttaaaatgtttctatcatggtagctatatgca

SEQ ID NO: 831654 - DNA, 75 bp, synthetic construct
  source 1..75: mol_type = other DNA
gccttcaggctcagcaggaaggtcagccaggatgccgtttatccatgcttcctggataaccgcgttgagcgcctt

SEQ ID NO: 831655 - DNA, 75 bp, synthetic construct
  source 1..75: mol_type = other DNA
gtgattgtccgcgcgggggactatatcgacattggtacgcctctttttggcggatcggttgtgccggtgacggtg

SEQ ID NO: 831656 - DNA, 75 bp, synthetic construct
  source 1..75: mol_type = other DNA
actcccgttggcagtcattgacgaagtgattgtccgcgcgggggactatatcgacattggtacgcctctttttgg

SEQ ID NO: 831657 - DNA, 75 bp, synthetic construct
  source 1..75: mol_type = other DNA
gcgaagctccgtgagcgtgatgcagacagtatttttgcagctacccgtgaagcgattctggccgttcatgaaacg

SEQ ID NO: 831658 - DNA, 75 bp, synthetic construct
  source 1..75: mol_type = other DNA
ttgcaagcaatttccccgtagatagcctttgtggcagctttactaatatattccatggttttatgacagtgtgtg

SEQ ID NO: 831659 - DNA, 75 bp, synthetic construct
  source 1..75: mol_type = other DNA
tattatccagaagattattttgcagatgtaggtgatattaatattgttgaaacatgttatatggaaactgaatgg

SEQ ID NO: 831660 - DNA, 75 bp, synthetic construct
  source 1..75: mol_type = other DNA
agacaacgcaggccagctaccgtatccgcggccttctgacccagatacatccggcacaggagcgcgttctcggtc

SEQ ID NO: 831661 - DNA, 75 bp, synthetic construct
  source 1..75: mol_type = other DNA
cagcgattaccgcaggcaatttaaaaactgttttgcggaacaagaaatcttatctgaatttcctcaaccggtaag

SEQ ID NO: 831662 - DNA, 75 bp, synthetic construct
  source 1..75: mol_type = other DNA
acaactggtcggtagagtatcggcaaatatgatcctgccttatccaccgggcgtaccgctgttgatgcctggaga

SEQ ID NO: 831663 - DNA, 75 bp, synthetic construct
  source 1..75: mol_type = other DNA
attcgtaaacacgatcttcccggtttgatgttgcgggcattcgatactttgccggagatgatcatgacgccacat

SEQ ID NO: 831664 - DNA, 75 bp, synthetic construct
  source 1..75: mol_type = other DNA
gcagatcatcagcggctccgccaccggtgcggcaaccggtagcaccgtgacggtgactatcggcacaaatacctt

SEQ ID NO: 831665 - DNA, 75 bp, synthetic construct
  source 1..75: mol_type = other DNA
caatcttccggtgcgccggtgactaaatgggcgacgcgggaagagcgcgaagggcagctgcatctctggtttcac

SEQ ID NO: 831666 - DNA, 75 bp, synthetic construct
  source 1..75: mol_type = other DNA
aacggccaaatgttaaccgcatctttagcctagcaattacttcccctgagggttcatcaagcgggatgccatctt

SEQ ID NO: 831667 - DNA, 75 bp, synthetic construct
  source 1..75: mol_type = other DNA
ccggcttttatctgctcgatgcgctgcttgaaggcaacggtgaagtcttcttcaatgcgttgcaacatctcatct

SEQ ID NO: 831668 - DNA, 75 bp, synthetic construct
  source 1..75: mol_type = other DNA
accggtagcagtaccggactggcggtgggggcggcgttgacggtagtgatcaacggcgtcacctatggcgcaacg

SEQ ID NO: 831669 - DNA, 75 bp, synthetic construct
  source 1..75: mol_type = other DNA
cgtggcgacgctggatgcgcaggccgggaacatcagtgattttgtcaaagtcacccagagcggcagcgacaccat

SEQ ID NO: 831670 - DNA, 75 bp, synthetic construct
  source 1..75: mol_type = other DNA
acggtcagcgatcaggcgggtaaccctggcagcgccagcaaaggtgtgaccgtcgataccaccgcgcccgtcatc

SEQ ID NO: 831671 - DNA, 75 bp, synthetic construct
  source 1..75: mol_type = other DNA
gccaacgtcagcaatgttaacggcaacagcgccaccactacccacgcttacagcgtcgatgctaccgcgccaacg

SEQ ID NO: 831672 - DNA, 75 bp, synthetic construct
  source 1..75: mol_type = other DNA
tgaacggcgtgctctccggcccgcttgccagcggtgaagtggtttacctctaccgtaacggcctgctgttaggcg

SEQ ID NO: 831673 - DNA, 75 bp, synthetic construct
  source 1..75: mol_type = other DNA
ttgaccatcgccagcatcagcaccgacacggggagttcggcaactgactttatcaccagcgatacctcgctcacg

SEQ ID NO: 831674 - DNA, 75 bp, synthetic construct
  source 1..75: mol_type = other DNA
ggttatcacgatatcgtaggaaagattattggtgaagaaattgttgaaaacatcaatattagaagcgatgaaatt

SEQ ID NO: 831675 - DNA, 75 bp, synthetic construct
  source 1..75: mol_type = other DNA
tcggcacggaatacctcgaattctgcagccgtgctgcgcagaacccgctcgccggtaaaaaagaccagccgggcg

SEQ ID NO: 831676 - DNA, 75 bp, synthetic construct
  source 1..75: mol_type = other DNA
agcggcggctattgccgagttcaaggagctgcaaagacaacaaatcacagcgcagcaagaagaatgccgccaccc

SEQ ID NO: 831677 - DNA, 75 bp, synthetic construct
  source 1..75: mol_type = other DNA
actattaaatcctggtgattatggattgggtagtactgatactacaatctatccaactaatagtgcttcacagtt

SEQ ID NO: 831678 - DNA, 75 bp, synthetic construct
  source 1..75: mol_type = other DNA
ggcagctaatctagataaactatctgaagtaacgggacttcctcagtattggtttttcttaccattaaatgaaga

SEQ ID NO: 831679 - DNA, 75 bp, synthetic construct
  source 1..75: mol_type = other DNA
tcggcacggaatacctggaattctgccgcaaggcaaaacacaaccccctgaaccgcttcaaattaagccctgaaa

SEQ ID NO: 831680 - DNA, 75 bp, synthetic construct
  source 1..75: mol_type = other DNA
tcgcgaatttgcacaggttactactgttccagcttataaagagatgagtatgtatcaattgcttgtcatttcgca

SEQ ID NO: 831681 - DNA, 75 bp, synthetic construct
  source 1..75: mol_type = other DNA
gaaataaaccgcgctcaacaaagctataaaccaatatccataatctctctcaaagaatgcaatcaaaccataaaa

SEQ ID NO: 831682 - DNA, 75 bp, synthetic construct
  source 1..75: mol_type = other DNA
atttaattaaaaatagagaaaaatataatggtaaattggaggattacttacaaacaactatccacagtatgtttt

SEQ ID NO: 831683 - DNA, 75 bp, synthetic construct
  source 1..75: mol_type = other DNA
tatcactctctaataaaccttataacaacaaaagaaagagttatatcaaaatcaagttttgttttgattgatttt

SEQ ID NO: 831684 - DNA, 75 bp, synthetic construct
  source 1..75: mol_type = other DNA
tactaacggtgttaatgattttactgaaactacttcatttactggtaaaatttctaatagtgcagctaaaccatt

SEQ ID NO: 831685 - DNA, 75 bp, synthetic construct
  source 1..75: mol_type = other DNA
ttatggtggtattcatgtaggctttagtggtaattacggattccaaattgcaggtcgtaatggtaaaacatatac

SEQ ID NO: 831686 - DNA, 75 bp, synthetic construct
  source 1..75: mol_type = other DNA
gtggaacagcattttagccgtgaggcgctggcggtggatcgcagcgatggcatcagcatgacctttgccgactgg

SEQ ID NO: 831687 - DNA, 75 bp, synthetic construct
  source 1..75: mol_type = other DNA
tctgcaaatcaccggcaccagtaatcagcccgcaggcaccacaataacggtgacgctgaacgggcaaaattacac

SEQ ID NO: 831688 - DNA, 75 bp, synthetic construct
  source 1..75: mol_type = other DNA
tgcgctggaactcaggtagcgcgtatcctgcgattgatgatgatgttccgcttaatattattattcctgattttg

SEQ ID NO: 831689 - DNA, 75 bp, synthetic construct
  source 1..75: mol_type = other DNA
aatctattttgggactggcgctgttgtctgcagttcctgtggcaagtgcagctgttgttactggaggaacagtac

SEQ ID NO: 831690 - DNA, 75 bp, synthetic construct
  source 1..75: mol_type = other DNA
acctctattccaaccacgctggcgcaaattaccagccagaccacgcgcgataccacgccgattatcagcggggtg

SEQ ID NO: 831691 - DNA, 75 bp, synthetic construct
  source 1..75: mol_type = other DNA
agcaccgccgaaaccgggcagacggtcaccgtgacccttaacggcgcaacctacagcggtaatgtgcaggcggac

SEQ ID NO: 831692 - DNA, 75 bp, synthetic construct
  source 1..75: mol_type = other DNA
agctccggcaccggaacgtggctggcaaacggcggcatggacgtggttgatttccgcctctcgacggtgggcgtg

SEQ ID NO: 831693 - DNA, 75 bp, synthetic construct
  source 1..75: mol_type = other DNA
cttagatcaggcgattttaagtaaactgagcgctgagggttatgccatagaaggcgccacaccgctatttagcga

SEQ ID NO: 831694 - DNA, 75 bp, synthetic construct
  source 1..75: mol_type = other DNA
ctgcggggacggtgaatattacggtttcaggcgccagtagtgccggaaacccggtcaccatcacccatccggtca

SEQ ID NO: 831695 - DNA, 75 bp, synthetic construct
  source 1..75: mol_type = other DNA
aacaccatcgcgggcgatgatgtgatcaacgcgacggaaaaaggatctgatctggcgctttctggcaccagcgat

SEQ ID NO: 831696 - DNA, 75 bp, synthetic construct
  source 1..75: mol_type = other DNA
tcagcgtcagccatccgttcaccgtcgatttaacggcggtggcaatcagcatcaatacggtcgccagcgacgacg

SEQ ID NO: 831697 - DNA, 75 bp, synthetic construct
  source 1..75: mol_type = other DNA
tgcacccacggtgaccatcgccaccgtggcgggtgacgatattatcaacagcgtcgagcaggcggcagggcaaac

SEQ ID NO: 831698 - DNA, 75 bp, synthetic construct
  source 1..75: mol_type = other DNA
cggatctgcaaatcaccggtaccagtaatcagcctgctggcaccacaattacggtgacgctgaacgggcaaaatt

SEQ ID NO: 831699 - DNA, 75 bp, synthetic construct
  source 1..75: mol_type = other DNA
atattatcgaacacgctcaggcgcaggtgatcaccggcagcagctccggctttgcgacaggcacggcgctgaccg

SEQ ID NO: 831700 - DNA, 75 bp, synthetic construct
  source 1..75: mol_type = other DNA
cagctaacgtggtcacgctgacgggcgtgcacaccgacctcgccactttactggcgaatcatcagttgatggtgg

SEQ ID NO: 831701 - DNA, 75 bp, synthetic construct
  source 1..75: mol_type = other DNA
cggaggccggaagcccgctcaccatcagcggcaccagcaccgccgaaaccgggcagacggtgaccgtcaccctta

SEQ ID NO: 831702 - DNA, 75 bp, synthetic construct
  source 1..75: mol_type = other DNA
ctgaatgcaggcgcagcgctgacggttaccatcaacagtgtggcgtattccgccacggtacaggcggacgggagc

SEQ ID NO: 831703 - DNA, 75 bp, synthetic construct
  source 1..75: mol_type = other DNA
cggcgagcaccacgcataatctggcggtggatctcaccgttccggttctcaccatcaacatcattgcgggcgatg

SEQ ID NO: 831704 - DNA, 75 bp, synthetic construct
  source 1..75: mol_type = other DNA
cgcaggtaaaaagctcggcgggaaacggcaataacgccaatattagtaacggcacggtgacggttaacgcagcga

SEQ ID NO: 831705 - DNA, 75 bp, synthetic construct
  source 1..75: mol_type = other DNA
tggcaaaacctacacctctgaaccgggcggtgcggtggtagtcgatccggcgcacaacacctggtatgtgcaact

SEQ ID NO: 831706 - DNA, 75 bp, synthetic construct
  source 1..75: mol_type = other DNA
aacacgcccaggcgctggtgatttccggcaccagcacgggcggggaagcgggcgatgtggtgagcgttgtgctca

SEQ ID NO: 831707 - DNA, 75 bp, synthetic construct
  source 1..75: mol_type = other DNA
ccggcggcggatatggcgaccctgcgtgacggcgatgccagcgcccaggtgcgggtgactaacgtcaatggcaac

SEQ ID NO: 831708 - DNA, 75 bp, synthetic construct
  source 1..75: mol_type = other DNA
gatggcagctggaatgtggcactggacccggcggtaacccgcacgctggatcgcggagccaatacgattttcgtc

SEQ ID NO: 831709 - DNA, 75 bp, synthetic construct
  source 1..75: mol_type = other DNA
acaacatcatcagttctgcggaacataacgtcgcgctggtactgagcggcacgtcgaatgcagaagcggggcaaa

SEQ ID NO: 831710 - DNA, 75 bp, synthetic construct
  source 1..75: mol_type = other DNA
gattgattactaacgattttgtcaccagcgacacgacgcttgcggtgagcggcacgctgggcgcggcgctttctg

SEQ ID NO: 831711 - DNA, 75 bp, synthetic construct
  source 1..75: mol_type = other DNA
gataccaccgcgccgctggcgagcaaaaccatcgccattgcgggcattagcgatgacaccgggttaagcagcagc

SEQ ID NO: 831712 - DNA, 75 bp, synthetic construct
  source 1..75: mol_type = other DNA
agacgcacaacgtacaggtaaacacggcggcagtgtcgctctcggtcagcaccatcagcggcgataatattatta

SEQ ID NO: 831713 - DNA, 75 bp, synthetic construct
  source 1..75: mol_type = other DNA
atgaacaagacaaagtagcacaaattacactcggtactgataccccgttttataatagtcttccatataatagaa

SEQ ID NO: 831714 - DNA, 75 bp, synthetic construct
  source 1..75: mol_type = other DNA
caatcttttatgactattggttatctatcggataagcaatttaaaaacggtactatcctaccgtggactattggc

SEQ ID NO: 831715 - DNA, 75 bp, synthetic construct
  source 1..75: mol_type = other DNA
gccaggataaagtagatgaaattgatatgaatggtgaaaaaccattttataacagtttgccatatacgcgtagtt

SEQ ID NO: 831716 - DNA, 75 bp, synthetic construct
  source 1..75: mol_type = other DNA
taatcgcaagtattaaacttgagggtgacgttcgtcgaatcggcgaaatttattataaggatgctgatttagagt

SEQ ID NO: 831717 - DNA, 75 bp, synthetic construct
  source 1..75: mol_type = other DNA
acattccataataatgacagtgtgacctttgatttttgtaaacgtttttctcatacgctggcatcatttcgggga

SEQ ID NO: 831718 - DNA, 75 bp, synthetic construct
  source 1..75: mol_type = other DNA
accgctataaacagcgtttctttggcgactttctggagcttcccggcctgacggagatcgccgtcaaccgtccag

SEQ ID NO: 831719 - DNA, 75 bp, synthetic construct
  source 1..75: mol_type = other DNA
gtaccgatcggcgtgccgacgaggcgcagcgccaccttaatttccgtggtcacatccaccgcgggatcccaaggc

SEQ ID NO: 831720 - DNA, 75 bp, synthetic construct
  source 1..75: mol_type = other DNA
cctatcgaaaaagaaaaacaaattacaacttatctcgataaagggaaaatgcaattatccatatctgcaccttag

SEQ ID NO: 831721 - DNA, 75 bp, synthetic construct
  source 1..75: mol_type = other DNA
tacagtagcggcatggcgatctctgcctacagcggcagccccctcgataagctgtctcttatacacaaatcccca

SEQ ID NO: 831722 - DNA, 75 bp, synthetic construct
  source 1..75: mol_type = other DNA
gaaatctaaaaaatatggacattttttacttgcagaacaaagagaattattttatttaaaggtgattagtggtga

SEQ ID NO: 831723 - DNA, 75 bp, synthetic construct
  source 1..75: mol_type = other DNA
tagcccgtatcacgacactaacctggccggtgattcgtatctgcgaacgcttctggttcagggggctcgttcagt

SEQ ID NO: 831724 - DNA, 75 bp, synthetic construct
  source 1..75: mol_type = other DNA
agcaatgaatgcaaaactaactataggtcaatacgatactgaatcctctattttcgactctttccatttttctgg

SEQ ID NO: 831725 - DNA, 75 bp, synthetic construct
  source 1..75: mol_type = other DNA
aggagaacgctgccagatagtggtgcccccggcctgtgagcgtaacaccatctcaatcaccctgcgtaagccgga

SEQ ID NO: 831726 - DNA, 75 bp, synthetic construct
  source 1..75: mol_type = other DNA
agttgcttaaagaaacggatgataatattggaagtgaaagactttctgaacttatactacagaataacactttga

SEQ ID NO: 831727 - DNA, 75 bp, synthetic construct
  source 1..75: mol_type = other DNA
cttataaaacgccttcagttttcttctgcagctaacctcggtcaaattaataatttcatttcaaatatcaaaaaa

SEQ ID NO: 831728 - DNA, 75 bp, synthetic construct
  source 1..75: mol_type = other DNA
gaggaaaaagttgagtctggtgatggtgatgatatttttaatagtggctatgatgacataataaaaaaaatcgac

SEQ ID NO: 831729 - DNA, 75 bp, synthetic construct
  source 1..75: mol_type = other DNA
taacaatgctaaacgtggcatatccgcatttcgttaaaaatcttagtgatagcaaaaacaatagacgccacataa

SEQ ID NO: 831730 - DNA, 75 bp, synthetic construct
  source 1..75: mol_type = other DNA
ttaaggctggtgatgaacttaaatcgctttatgccatccgctccggtacgattaaaagttataccatcactgagc

SEQ ID NO: 831731 - DNA, 75 bp, synthetic construct
  source 1..75: mol_type = other DNA
tttgttgaagagatgaatcgattgatatcaaatggaaatattcaagagagggactataaaaaattcaatctttct

SEQ ID NO: 831732 - DNA, 75 bp, synthetic construct
  source 1..75: mol_type = other DNA
gtggtattcactccccgcgcgtggacgctgggtgtttacttcggtctgattaacggcggttacgccagcctgatt

SEQ ID NO: 831733 - DNA, 75 bp, synthetic construct
  source 1..75: mol_type = other DNA
ctggtcattccggaaggtcagcgtgtatcatcactggaacagttgaaaaaaggccctgttacagtcagtggacct

SEQ ID NO: 831734 - DNA, 75 bp, synthetic construct
  source 1..75: mol_type = other DNA
tcaggaaaatacaggtgattatgggtattattatttactcaacggatatgaatgggatacttggacaagcgatgg

SEQ ID NO: 831735 - DNA, 75 bp, synthetic construct
  source 1..75: mol_type = other DNA
acgacagcgagcagatgcagcttgacgccttcgtgcgcttcgttgaggccaattcgaagatccacgacgcgatga

SEQ ID NO: 831736 - DNA, 75 bp, synthetic construct
  source 1..75: mol_type = other DNA
tacaggcgctcgacttcccggcagtgatgggctttgccgtcgtggtttcatttgcttatgtgctggtcaacctgg

SEQ ID NO: 831737 - DNA, 75 bp, synthetic construct
  source 1..75: mol_type = other DNA
accatgctgctgttgcaactaccacatatcggtcaggttcagtgtggtgtatggcctactgctgttcgcgagagc

SEQ ID NO: 831738 - DNA, 75 bp, synthetic construct
  source 1..75: mol_type = other DNA
gcgagtgaatataagatgcaactacctgatgaaaaacgactcgcggatgaactcgttcgaacacaggcggtgcta

SEQ ID NO: 831739 - DNA, 75 bp, synthetic construct
  source 1..75: mol_type = other DNA
gagctccaccaaatcttactttggccacaacattggcgcagcggggattgtggaactgattgcctgtctggcaac

SEQ ID NO: 831740 - DNA, 75 bp, synthetic construct
  source 1..75: mol_type = other DNA
agaacgcccctttgagcagattaaaatcgcccttaaccatcaaaatgttggtgctgtcctggtcagcgctggggc

SEQ ID NO: 831741 - DNA, 75 bp, synthetic construct
  source 1..75: mol_type = other DNA
ttgtactggcgaatagcggaatggccgggtgagggtggtgaaggctatctgagttctttctttgtccagacagat

SEQ ID NO: 831742 - DNA, 75 bp, synthetic construct
  source 1..75: mol_type = other DNA
aggaatcggtgatggtcctcttttatatcaatgtagacaactggttaaaaaagatccgcgttttacttttgtcgg

SEQ ID NO: 831743 - DNA, 75 bp, synthetic construct
  source 1..75: mol_type = other DNA
tacagcttcagcgacgctacgcttccggaaacggaaagcaacttcaaaacgttccaggtttccgggctggagccg

SEQ ID NO: 831744 - DNA, 75 bp, synthetic construct
  source 1..75: mol_type = other DNA
atctatcgcattcctttgtcgctcataaagcctcaggacgatatttttaatatagcatggccaccttcacattgt

SEQ ID NO: 831745 - DNA, 75 bp, synthetic construct
  source 1..75: mol_type = other DNA
caaaagaggcacgagagattgaggcagtcctacgccgtcgcaacgaaacctttgctgacgcctgggcgcttaacc

SEQ ID NO: 831746 - DNA, 75 bp, synthetic construct
  source 1..75: mol_type = other DNA
gctggaagatgcgtttgaactttcttctatggggatccgcgtggatgccgatacgctgaagcaccaactggcgct

SEQ ID NO: 831747 - DNA, 75 bp, synthetic construct
  source 1..75: mol_type = other DNA
ccccggaagagcacatacgggcacacggtctggatacacccggattgaaagaacgtctttcagttttctatcgcc

SEQ ID NO: 831748 - DNA, 75 bp, synthetic construct
  source 1..75: mol_type = other DNA
tcaggatttcgacggtattttcaatcaaaccatgcgtaacaccaggaatttgaataacagaagtttacgggtgaa

SEQ ID NO: 831749 - DNA, 75 bp, synthetic construct
  source 1..75: mol_type = other DNA
tttttttattcattataggttcgtgcattggtagttttttaaatgtggtcatctatcgtattcctttgtcgctca

SEQ ID NO: 831750 - DNA, 75 bp, synthetic construct
  source 1..75: mol_type = other DNA
acaggtagtgcagaaacctaccctgtacttattgatacggtggaagttaaagcaaacaaagctggagcagccgca

SEQ ID NO: 831751 - DNA, 75 bp, synthetic construct
  source 1..75: mol_type = other DNA
ccgtagcctggcggaggtgttgcaggaggacacgggtgtgacgctaccggcggagctggcggtgatgctggggag

SEQ ID NO: 831752 - DNA, 75 bp, synthetic construct
  source 1..75: mol_type = other DNA
gggtgtcggtattgaaatacttgataatacatccgcaattctcaaacctgatgggaatagcttctcaaccaacca

SEQ ID NO: 831753 - DNA, 75 bp, synthetic construct
  source 1..75: mol_type = other DNA
gacaaaacgaaatatatcgctggggatagcataacggtgaccgttgttcttaaagatgcccagggtaactttatt

SEQ ID NO: 831754 - DNA, 75 bp, synthetic construct
  source 1..75: mol_type = other DNA
tttacttctatcgggcaagaatatccccagatactacataaggcgcgcgaaatccttgccagagaaacggcacat

SEQ ID NO: 831755 - DNA, 75 bp, synthetic construct
  source 1..75: mol_type = other DNA
aatgaaaatggggacttgtatctaccacagtttgggattagtgtcagggagtttatcgcgggtgtttttgccaga

SEQ ID NO: 831756 - DNA, 75 bp, synthetic construct
  source 1..75: mol_type = other DNA
taaccgcttgccaaaacgtcactccgcttcttcaggtagcagaacaccgcgaagccggtcgcttcacttcaatcg

SEQ ID NO: 831757 - DNA, 75 bp, synthetic construct
  source 1..75: mol_type = other DNA
acctactggtatcaaagaacatcctgaatctgtaagagaaaataatagtcaaacgcaagtgattcataaaaggga

SEQ ID NO: 831758 - DNA, 75 bp, synthetic construct
  source 1..75: mol_type = other DNA
aactggaagcgaaaggtttatggcgacgggcggctaatcgctggggtgagttactgaaacaggcggcaagtgatg

SEQ ID NO: 831759 - DNA, 75 bp, synthetic construct
  source 1..75: mol_type = other DNA
gggatttgatttgccgttataagacggttttttctgatgtctggaaaattcgtcacacacttgatgctcctgtga

SEQ ID NO: 831760 - DNA, 75 bp, synthetic construct
  source 1..75: mol_type = other DNA
agttattccatccacagcggtgctccggtgcaggcaaattctgctatcaggacagataaattggcatatatcgct

SEQ ID NO: 831761 - DNA, 75 bp, synthetic construct
  source 1..75: mol_type = other DNA
cacccaaagataagaaattgataaaaatccttaaggatgaaattaggacctatataagtctaccagaaaaaatag

SEQ ID NO: 831762 - DNA, 75 bp, synthetic construct
  source 1..75: mol_type = other DNA
aaaacagaggagattattcaaactgcggaaaaagatacaaaatattcactaacagtggataacataaaggataag

SEQ ID NO: 831763 - DNA, 75 bp, synthetic construct
  source 1..75: mol_type = other DNA
tttgatgaagccaatacccgcaattgggactataacagtcgccaaaaaagtgaaattcaattcaacatcagccag

SEQ ID NO: 831764 - DNA, 75 bp, synthetic construct
  source 1..75: mol_type = other DNA
caggggccgaagggtgataagggagagcgcggtgacaccggccctgtcggggcaaccggcgaacggggaccggca

SEQ ID NO: 831765 - DNA, 75 bp, synthetic construct
  source 1..75: mol_type = other DNA
agcagcgggtgatttttctcgaaaccaagaacggaaaaaaacgaataatccctatatctgaagaactggaaaccg

SEQ ID NO: 831766 - DNA, 75 bp, synthetic construct
  source 1..75: mol_type = other DNA
gccagaaagatcgcccaacccaacatgaaatgcgtcttgatggctcactgctggatgatggtcgcctgagctata

SEQ ID NO: 831767 - DNA, 75 bp, synthetic construct
  source 1..75: mol_type = other DNA
aagctggactgtacgctggggaaatcaggcagatcaacaatgtcagtttgcttttagtacaccggattcagaacc

SEQ ID NO: 831768 - DNA, 75 bp, synthetic construct
  source 1..75: mol_type = other DNA
cctgctcacgccgattgcccgtgacctgggcgtgacggaggggctggcagggcgggggattgctatctccggtgc

SEQ ID NO: 831769 - DNA, 75 bp, synthetic construct
  source 1..75: mol_type = other DNA
acgcagatgacgatccgctcgaaaacctataagggcagcgggtttaatgaactgaagtttgacgatgcgacaggg

SEQ ID NO: 831770 - DNA, 75 bp, synthetic construct
  source 1..75: mol_type = other DNA
gtttaggcattgtttatgtattggcgtgggtaataatccaatttcgtacctggaggggttataataagttaatgg

SEQ ID NO: 831771 - DNA, 75 bp, synthetic construct
  source 1..75: mol_type = other DNA
agttaccaacccaatatacaattcttaggttatcttctgcaatgaagataaatatattgcaaaaacagataaatg

SEQ ID NO: 831772 - DNA, 75 bp, synthetic construct
  source 1..75: mol_type = other DNA
acgcctgggtagaaccgcctgtctatttctcttacggttccaacatccatataggccgcaattttttatgcaaat

SEQ ID NO: 831773 - DNA, 75 bp, synthetic construct
  source 1..75: mol_type = other DNA
caggcaagctatttaccgatatgtgcgaaggcttaccggaaaaaagacttcgtgggaaaacgttaatgtatgagt

SEQ ID NO: 831774 - DNA, 75 bp, synthetic construct
  source 1..75: mol_type = other DNA
caaccttactaaatagagtggctgtgaattctgatggagatatcacatggccaaatgagtttatggatgttgaga

SEQ ID NO: 831775 - DNA, 75 bp, synthetic construct
  source 1..75: mol_type = other DNA
cagatcaacaatgtcagtttgctttcagtacaccggattcagaacctacaacctctgtattacaaggcacagcgc

SEQ ID NO: 831776 - DNA, 75 bp, synthetic construct
  source 1..75: mol_type = other DNA
acttagttgaatctaagagaaacatagaaagcattgttatacatcccaggaaaatagaaataggcaaaagtagca

SEQ ID NO: 831777 - DNA, 75 bp, synthetic construct
  source 1..75: mol_type = other DNA
tctacaaaatgggaagtatcgcagctggtaaaggtagtccattcaatagggatggaaatgagcgagttttttgag

SEQ ID NO: 831778 - DNA, 75 bp, synthetic construct
  source 1..75: mol_type = other DNA
ggaattctggcttgcgcattgtggcgatttctgtgcttttatcggctatgtgggctggaatgatataaaagatcg

SEQ ID NO: 831779 - DNA, 75 bp, synthetic construct
  source 1..75: mol_type = other DNA
ctcgataggtgtacaccttaacacaagggcacttaaaaaagcaaagcccggctgtgcgcgaacactaaccgggct

SEQ ID NO: 831780 - DNA, 75 bp, synthetic construct
  source 1..75: mol_type = other DNA
agccgctgcaaagcagtcagaggaggcgtcctcgtcctcggcctctgcggccgctcaaaaagccagtgagtcatt

SEQ ID NO: 831781 - DNA, 75 bp, synthetic construct
  source 1..75: mol_type = other DNA
gcctgttggtgtgcctgttccgtggcccaccgccacaccgccagcaggctggttacagtgcaacggagctacgtt

SEQ ID NO: 831782 - DNA, 75 bp, synthetic construct
  source 1..75: mol_type = other DNA
agatccggaacataaaataataagagtaaaaacaacaaacatttcaacagaaaaaggccttaagatgagtcgcgg

SEQ ID NO: 831783 - DNA, 75 bp, synthetic construct
  source 1..75: mol_type = other DNA
gaatacattccatcaaataaaagcgcaactccatcggttttatgtgctcgcaccaatctctctaagcaataatac

SEQ ID NO: 831784 - DNA, 75 bp, synthetic construct
  source 1..75: mol_type = other DNA
agtggtttactgaatttggccacctgaacaaaggtgatatgctcacctcagaacaacacaggtgtcataatgaaa

SEQ ID NO: 831785 - DNA, 75 bp, synthetic construct
  source 1..75: mol_type = other DNA
gaagtaagggctcatgatgtaaaccctactgctccagcagggagtaattctgccaatggccccatatataggatt

SEQ ID NO: 831786 - DNA, 75 bp, synthetic construct
  source 1..75: mol_type = other DNA
taaccggttccggtattacgagccggaaaccgggatgtacctggtgagtgatccgctggggttgcaggggggtga

SEQ ID NO: 831787 - DNA, 75 bp, synthetic construct
  source 1..75: mol_type = other DNA
gtgcgcttacagtggcagcagcaccataaactgagtggccttgagcgcactggcaccggcgcggaaggattccgc

SEQ ID NO: 831788 - DNA, 75 bp, synthetic construct
  source 1..75: mol_type = other DNA
tgagtcaagatatatcatggataaaattaaaaatatcaacctgtgggggggcaaggatattattacccatcggta

SEQ ID NO: 831789 - DNA, 75 bp, synthetic construct
  source 1..75: mol_type = other DNA
gagtgagcagttggtggtgaactttattgcggatacgctcactgcgcaggttaatcttaacgttaccgaggacaa

SEQ ID NO: 831790 - DNA, 75 bp, synthetic construct
  source 1..75: mol_type = other DNA
agtactaatgctgtaaagttttttaatattgggaaaatacaactacctagtgactcgtccatgataactgtgcca

SEQ ID NO: 831791 - DNA, 75 bp, synthetic construct
  source 1..75: mol_type = other DNA
aagcgggccgaggtacgcgaagcgctggcactctatgccactgttcaagacatggagcgccgtcgggctgatctt

SEQ ID NO: 831792 - DNA, 75 bp, synthetic construct
  source 1..75: mol_type = other DNA
tctcactgtgtacttcgccttaaaaagcggctctgccacattaacgtcattaacagcggtgaccgatcaaaacgg

SEQ ID NO: 831793 - DNA, 75 bp, synthetic construct
  source 1..75: mol_type = other DNA
tactctgacggcaacgctaacctctgcaaatggcactccagtggagggtcaggtcatcaactttagcgtaacgcc

SEQ ID NO: 831794 - DNA, 75 bp, synthetic construct
  source 1..75: mol_type = other DNA
agcaacagtcgctgatacagagggcaatgcgatagccaacactgaggtaacatttactctgccggaagatgtgaa

SEQ ID NO: 831795 - DNA, 75 bp, synthetic construct
  source 1..75: mol_type = other DNA
ttgatagagctgagcaatcaactgctcatgaaatacagcaagcgaaagttattgatttaaatgaccgggttctca

SEQ ID NO: 831796 - DNA, 75 bp, synthetic construct
  source 1..75: mol_type = other DNA
gtaaaagatcgtcgagaagttgatagcttcctagcctcatattcactaggtaaaccattccagatggacttagga

SEQ ID NO: 831797 - DNA, 75 bp, synthetic construct
  source 1..75: mol_type = other DNA
aagtatcaaacgtgaatctaaagaacgtgcaaccaatctatgagcatcaagcctggagcggtaaaaagttacaac

SEQ ID NO: 831798 - DNA, 75 bp, synthetic construct
  source 1..75: mol_type = other DNA
tccccccgatactgggtgtaatggagatactgatgccgtcgttcaggctgcacgtgtggagattgccaagatcga

SEQ ID NO: 831799 - DNA, 75 bp, synthetic construct
  source 1..75: mol_type = other DNA
atgacatggagttactttatagaaaagctatattatttatatgccctgtaagttatgggagtggtatgaaaacta

SEQ ID NO: 831800 - DNA, 75 bp, synthetic construct
  source 1..75: mol_type = other DNA
atgatcgcagcagcgcacttgagcatgcgatcccgcgccgagcatttgagaaggcaacgggatgaacgctggctg

SEQ ID NO: 831801 - DNA, 75 bp, synthetic construct
  source 1..75: mol_type = other DNA
gtcgaatcatccggtggcgggaataacggtgaacttcaccatgcctcaggacgtggcggcaaactttacccttga

SEQ ID NO: 831802 - DNA, 75 bp, synthetic construct
  source 1..75: mol_type = other DNA
gtcctgaaaagcgatggcaacagcaactggaacctgaccaataatgtcaacccaaatccgaacccaaacccaaat

SEQ ID NO: 831803 - DNA, 75 bp, synthetic construct
  source 1..75: mol_type = other DNA
tatgagtatgtcctgaaaagtgacggtaacagtaactggaacctgaccaataatgtcaacccaaacccaaaccca

SEQ ID NO: 831804 - DNA, 75 bp, synthetic construct
  source 1..75: mol_type = other DNA
acattaactatcggaaatggcgtcgatacgacgcttgccgacctgacggctgccagccggggcagtgtctggctt

SEQ ID NO: 831805 - DNA, 75 bp, synthetic construct
  source 1..75: mol_type = other DNA
atgattttggtgctgacaactgtaaaataaatatatctcaattacaaaatgttggggcggttaagcttgataaag

SEQ ID NO: 831806 - DNA, 75 bp, synthetic construct
  source 1..75: mol_type = other DNA
aagcagagccagggaggcgaagacctctcgcttaagatctcggcgctggaatccaccatcgccggcctgcagcag

SEQ ID NO: 831807 - DNA, 75 bp, synthetic construct
  source 1..75: mol_type = other DNA
gtcgtcctgactccaggagtctctctcttaaaccaggtaatgaaatcataattccaattatatatgagatagaag

SEQ ID NO: 831808 - DNA, 75 bp, synthetic construct
  source 1..75: mol_type = other DNA
aaaggtggtaaggttggcgcaaaacaatctttagatagggctaatgcacttcgttttggggaagggattgtcgaa

SEQ ID NO: 831809 - DNA, 75 bp, synthetic construct
  source 1..75: mol_type = other DNA
ggcggccaagccgtaacgaacgaacagggtaaggctaccgtcacttataccaatacccgctcctcgatagaatca

SEQ ID NO: 831810 - DNA, 75 bp, synthetic construct
  source 1..75: mol_type = other DNA
aatgagcggtacagtatcagtcaatggtactgacctaccgacaactacattcccttcgcagggggttcaccgggg

SEQ ID NO: 831811 - DNA, 75 bp, synthetic construct
  source 1..75: mol_type = other DNA
catcttggggtggggtatagcaacggtgctggtatggaatccccgtggaacgcggtggctggtgtgaactggtcg

SEQ ID NO: 831812 - DNA, 75 bp, synthetic construct
  source 1..75: mol_type = other DNA
tccaatggcatggaatcgaaatcagtcgatacccgcagtatatatcgtgaactgggcgcaacgctgagttacaac

SEQ ID NO: 831813 - DNA, 75 bp, synthetic construct
  source 1..75: mol_type = other DNA
aaggggaggtcgaatccgtcgatacggatcgaatctcagaaagtaacaaacgctggcgcgggagaactgctgact

SEQ ID NO: 831814 - DNA, 75 bp, synthetic construct
  source 1..75: mol_type = other DNA
gcattacgcatccggtaacggtcgatctcactccggcggcgatcaccatcaacaccatcgccacggatgatgtga

SEQ ID NO: 831815 - DNA, 75 bp, synthetic construct
  source 1..75: mol_type = other DNA
aacagtgacagttaccgtgtctggggaaagtagcgccggaaatccggtgagcattacgcatccggtaacggtcga

SEQ ID NO: 831816 - DNA, 75 bp, synthetic construct
  source 1..75: mol_type = other DNA
ccgccaacgttgacgcgctggctgacggtaacgccacggtcaccgccagcgtgaacgatgtcgccggtaacccga

SEQ ID NO: 831817 - DNA, 75 bp, synthetic construct
  source 1..75: mol_type = other DNA
cgcataatctgacggtggaccttgccgctccggtcgtcaccatcaacacggtggcgggcgatgacatcatcaacg

SEQ ID NO: 831818 - DNA, 75 bp, synthetic construct
  source 1..75: mol_type = other DNA
atgtcacaaactggcctgcggggacggtcgatattgccgtctctggcaccaacaccgccggaacaactaccagca

SEQ ID NO: 831819 - DNA, 75 bp, synthetic construct
  source 1..75: mol_type = other DNA
ctgacggcgggaacggctttaacggtcgttatcaacaacgtcacttatgccgcgacggtgttagccgatggcaca

SEQ ID NO: 831820 - DNA, 75 bp, synthetic construct
  source 1..75: mol_type = other DNA
cgggtagtggcgctatgagcagcagcgtttctatgacctgggccgatttcgatggtgacggcgatatggatctct

SEQ ID NO: 831821 - DNA, 75 bp, synthetic construct
  source 1..75: mol_type = other DNA
ccgacagccagaatgtggtgatcgacactaccgcgccagatcccgcggtgaaaaccatcgccatcagcgcgatca

SEQ ID NO: 831822 - DNA, 75 bp, synthetic construct
  source 1..75: mol_type = other DNA
tggcggacggcaacgcctacgtgattaacgcctcggtgagcaatgccattggcaataccggcagcagcaatcaca

SEQ ID NO: 831823 - DNA, 75 bp, synthetic construct
  source 1..75: mol_type = other DNA
cgtttgattgccgaactgctgcgcggcgacgccgaacgtttcgacgccttcgccaatctgccgcattacccgttc

SEQ ID NO: 831824 - DNA, 75 bp, synthetic construct
  source 1..75: mol_type = other DNA
cctatgaggggctcgaccttgtagcaactatcaaggattctaaacaaggctcttacctgcttcaggatttgaacc

SEQ ID NO: 831825 - DNA, 75 bp, synthetic construct
  source 1..75: mol_type = other DNA
atgacgctatcgccaccaacaaagagattcaggcgtttatcctgcacagcgtacagcaggcgcagatctccggtg

SEQ ID NO: 831826 - DNA, 75 bp, synthetic construct
  source 1..75: mol_type = other DNA
accgccgaagcggggcagacggtgaccgtcacccttaatggtgtgacttacaccggcaccgtccaggcggacggg

SEQ ID NO: 831827 - DNA, 75 bp, synthetic construct
  source 1..75: mol_type = other DNA
tggacggtgaatgtgccgccagccgatctcgctgccctgccggacggcgcgggcaacgtgcaggcgagcgtcagc

SEQ ID NO: 831828 - DNA, 75 bp, synthetic construct
  source 1..75: mol_type = other DNA
caaacggtcaccgttacctttggcgggaaaacctacaccgctaccgtagcgggcgatggtagctggacaaccacc

SEQ ID NO: 831829 - DNA, 75 bp, synthetic construct
  source 1..75: mol_type = other DNA
ctccatcgccgattacgaccgtaacggcacgggcgatctgtttatcacccgtgatgactacggtacaggctatat

SEQ ID NO: 831830 - DNA, 75 bp, synthetic construct
  source 1..75: mol_type = other DNA
gccaccagtgcagcaggcaacaccgccagcagccaagcgaatttactggtcgacagcggcctgccgggcgtcacc

SEQ ID NO: 831831 - DNA, 75 bp, synthetic construct
  source 1..75: mol_type = other DNA
aacgataaagcgggtaacccggtgtccgccactcacgggctggcggtggatctcaccgtgccggtgctgaccatt

SEQ ID NO: 831832 - DNA, 75 bp, synthetic construct
  source 1..75: mol_type = other DNA
cgtatagcgttgacgccagcgcgccgacgctcaccattaacaccatcgccagcgatgacatccttaacgccacag

SEQ ID NO: 831833 - DNA, 75 bp, synthetic construct
  source 1..75: mol_type = other DNA
gccgggcgtcaccattaacgtggtggcgagcgacgatattattaacgctgccgaagcgggcgcgggccagagcat

SEQ ID NO: 831834 - DNA, 75 bp, synthetic construct
  source 1..75: mol_type = other DNA
ttacccatccggtcaccgtcgatctggctggggttgccatcaccattaacaccctttccggcgatgatgtgatca

SEQ ID NO: 831835 - DNA, 75 bp, synthetic construct
  source 1..75: mol_type = other DNA
gctggtgatttccggttccagcactggcggcgaagcgggcgatgtcatcaccgtcacgttaaacagtaaaaccta

SEQ ID NO: 831836 - DNA, 75 bp, synthetic construct
  source 1..75: mol_type = other DNA
caccacagtggaagctaacggtagctggacggtgaatgtgccgcctgccgatctcgctgcgctaccggacggcgc

SEQ ID NO: 831837 - DNA, 75 bp, synthetic construct
  source 1..75: mol_type = other DNA
ggtgaatatcacggtaagcggcaccaacagtgccggaacaacctccaccattacccatccggttaccgtcgatct

SEQ ID NO: 831838 - DNA, 75 bp, synthetic construct
  source 1..75: mol_type = other DNA
cggcggatattcaggccatcggcaatggcaatctgacggttaacgcttcggtgaccaacggcgttggcaatactg

SEQ ID NO: 831839 - DNA, 75 bp, synthetic construct
  source 1..75: mol_type = other DNA
cacggttagcgcctccgctcaggacagtgccggaaacagcgccacggcctcgcgcagcgtggcggtggatctcac

SEQ ID NO: 831840 - DNA, 75 bp, synthetic construct
  source 1..75: mol_type = other DNA
tcctgcaatggatgcggtttgcgccgctgccgatgtcggatgctttgctacttacatcatccgccagggtggtgt

SEQ ID NO: 831841 - DNA, 75 bp, synthetic construct
  source 1..75: mol_type = other DNA
tgaccttttgccgtcgccaaccggcgacgcttggagttctgtcaataactctacggaagacgaaaaaatcaccga

SEQ ID NO: 831842 - DNA, 75 bp, synthetic construct
  source 1..75: mol_type = other DNA
cgactacgtgaaacaccattcaaaaggcagcaaagcggatcaccttatgagccaggaagcgaattagatgtcgcc

SEQ ID NO: 831843 - DNA, 75 bp, synthetic construct
  source 1..75: mol_type = other DNA
acacttcgcagccaggcggcgcggtagtggtcgatccggcgcacaacacctggtatgtacaactgccggataccg

SEQ ID NO: 831844 - DNA, 75 bp, synthetic construct
  source 1..75: mol_type = other DNA
atgttcgctttactcctgctcacgccgctgcttttttcgctgctctgttttgcctgccggaaacgggggcactct

SEQ ID NO: 831845 - DNA, 75 bp, synthetic construct
  source 1..75: mol_type = other DNA
tgctggcgggcctggtacggatggcagcgcgggtgttaatgggaaaccgccgcaggccgttaaccggggtgatct

SEQ ID NO: 831846 - DNA, 75 bp, synthetic construct
  source 1..75: mol_type = other DNA
agagaactgtaccattcaactgaaagccagacggaccagcagcacggtggtggtgaacacggtggcctctgaaaa

SEQ ID NO: 831847 - DNA, 75 bp, synthetic construct
  source 1..75: mol_type = other DNA
tgggtttatagtctgttccccgtcatccggtttctacaataagcgctgcgcaataactttgacgcctcgtttttt

SEQ ID NO: 831848 - DNA, 75 bp, synthetic construct
  source 1..75: mol_type = other DNA
atgatggtaaaatcactgctaatcaaataagatcaaatataagcacgcaatttgaaatgctaccttctcagatac

SEQ ID NO: 831849 - DNA, 75 bp, synthetic construct
  source 1..75: mol_type = other DNA
aatccacgtcaaacccggctattcgtcgccatgagcttatggcccgaatggctggggttgagcttgttgcccaaa

SEQ ID NO: 831850 - DNA, 75 bp, synthetic construct
  source 1..75: mol_type = other DNA
tgctctttgctgacggagggctgctatatgactatttcccgtatttcactccgccaatggaccgatttggatcgg

SEQ ID NO: 831851 - DNA, 75 bp, synthetic construct
  source 1..75: mol_type = other DNA
cagcttcggtcgttatgaactcaccaccgcttacaccccagggaaagatcatcagaagttcactttttgtactaa

SEQ ID NO: 831852 - DNA, 75 bp, synthetic construct
  source 1..75: mol_type = other DNA
gcagtgcgcttgatatcaccatcagtgccgggctgccggggctgcgcattgacactatcgcgggcgatgatgtga

SEQ ID NO: 831853 - DNA, 75 bp, synthetic construct
  source 1..75: mol_type = other DNA
gcggtggcgaccgacgatattattaacgctgctgaatccggcaatgcgcaaaccatcagcggccaggtcacgggc

SEQ ID NO: 831854 - DNA, 75 bp, synthetic construct
  source 1..75: mol_type = other DNA
ccagcgtctcacgcgtggcgctggtcgatgccacgccgcctgtggtgaccattaatccggtggcaagcgataacg

SEQ ID NO: 831855 - DNA, 75 bp, synthetic construct
  source 1..75: mol_type = other DNA
gcagcggcggcaactcgacgtctgtctccatgacctgggcggatttcgatggtgacggcgatatggatctcttcc

SEQ ID NO: 831856 - DNA, 75 bp, synthetic construct
  source 1..75: mol_type = other DNA
ggcacagtggtgaccgtgttgcttaacggtaaaggttacagcgccaccattcaaagcaacgggaactggagcgtg

SEQ ID NO: 831857 - DNA, 75 bp, synthetic construct
  source 1..75: mol_type = other DNA
tgatgccagcggcaactggagcgtcggcgtgcctgccagtgtgatttccggccttgcggacggtacggtgaccat

SEQ ID NO: 831858 - DNA, 75 bp, synthetic construct
  source 1..75: mol_type = other DNA
tggacggtgaatgtgccgcctgccgatctcgctgcgctgtcggacggcgcgggcaacgtgcaggcgagcgtcagc

SEQ ID NO: 831859 - DNA, 75 bp, synthetic construct
  source 1..75: mol_type = other DNA
ggcagcactaccgccggaaacccggtcagcgttacgcatccggtgactgtcgatctctcggcggtggctgtcagc

SEQ ID NO: 831860 - DNA, 75 bp, synthetic construct
  source 1..75: mol_type = other DNA
agctggaccgccaccgtacctgccgccgatttagcggcattacccgagggcagcgcctccgcgcaggccagcgtc

SEQ ID NO: 831861 - DNA, 75 bp, synthetic construct
  source 1..75: mol_type = other DNA
gatgttgccggtaatccgagcagcgtctcacgcgtggcgctggtcgatgccacgccgccggtggtaaccattaat

SEQ ID NO: 831862 - DNA, 75 bp, synthetic construct
  source 1..75: mol_type = other DNA
gcgggcgtgctgacggggaactctaccgtaaccaacaacggcgggagcgccacagtcggtggggcggtgacggga

SEQ ID NO: 831863 - DNA, 75 bp, synthetic construct
  source 1..75: mol_type = other DNA
cgtggcgggcgatgatattatcaacgccgccgaagccggggccgatcaaaccatcagcggggtggtcactcgtgc

SEQ ID NO: 831864 - DNA, 75 bp, synthetic construct
  source 1..75: mol_type = other DNA
cggcagatatggcagccctgcgtgatggcgatgccagcgcacaggccagcgtcagcaatgttaacggcaacagcg

SEQ ID NO: 831865 - DNA, 75 bp, synthetic construct
  source 1..75: mol_type = other DNA
tgagagacgtccagaagtcatttactacccgtcagtggggatgtttccgctgacggtgtttctgacggccctgcg

SEQ ID NO: 831866 - DNA, 75 bp, synthetic construct
  source 1..75: mol_type = other DNA
gacgagaactatgcctgctggggcccccgtttttctgcctgggcccccaccacaatgccggaggagctgaatgaa

SEQ ID NO: 831867 - DNA, 75 bp, synthetic construct
  source 1..75: mol_type = other DNA
cgctcgtatttgctgctccggtactggcttctgaagtgacggtggggcaggtttgcaaggctgcttctgcggcta

SEQ ID NO: 831868 - DNA, 75 bp, synthetic construct
  source 1..75: mol_type = other DNA
ctgtcgtgagtgccggaatagcgatgttatgcagcgggttttgatgttttacagggacaataaagggacagtaaa

SEQ ID NO: 831869 - DNA, 75 bp, synthetic construct
  source 1..75: mol_type = other DNA
gctgccagcggtgaggtgtacaactctgactacggggtatttccgtctgagcaggcgcacagggactgggaaagg

SEQ ID NO: 831870 - DNA, 75 bp, synthetic construct
  source 1..75: mol_type = other DNA
ctgccacggagcaggcaggcatgcgttttcgcctggagagttttgaatggcaggtagtcaggggaaataatgaag

SEQ ID NO: 831871 - DNA, 75 bp, synthetic construct
  source 1..75: mol_type = other DNA
cactcgggatttctgtcaccactgtaagtcgggctcttggaggcttttcagatgtgtctgcttctacccgtgccc

SEQ ID NO: 831872 - DNA, 75 bp, synthetic construct
  source 1..75: mol_type = other DNA
ctggccgtcagaggaggagtatacgcatctgagatggtatatccaggttgtggatgcggccgatttgttctatct

SEQ ID NO: 831873 - DNA, 75 bp, synthetic construct
  source 1..75: mol_type = other DNA
caaacaggcgatagaacaccacatataaatcgccatcagctatataaatgcttacgtgatggcgcaacccttata

SEQ ID NO: 831874 - DNA, 75 bp, synthetic construct
  source 1..75: mol_type = other DNA
gaagttgatagctttttaaataaactgaatattactgattataagtattatgatttcagccagatttacagttgt

SEQ ID NO: 831875 - DNA, 75 bp, synthetic construct
  source 1..75: mol_type = other DNA
tactggatagcaaaaccgctgttgatacaacgaacaccggtgtggcgacctacgccagtggccgtactttctggc

SEQ ID NO: 831876 - DNA, 75 bp, synthetic construct
  source 1..75: mol_type = other DNA
cctttagtattatgctggcaattatcctcagcgcctttttcattgccgcggtaggtaatggtgccaacttactga

SEQ ID NO: 831877 - DNA, 75 bp, synthetic construct
  source 1..75: mol_type = other DNA
aaccgaaaatattttggttccggccgcgggctcacctggtacaactttatttcagatcagtattccggatttcat

SEQ ID NO: 831878 - DNA, 75 bp, synthetic construct
  source 1..75: mol_type = other DNA
gctgccagttataaaccatcaagcaatggagtttcctggactcagaatctaggaagcggactggttatgacaggt

SEQ ID NO: 831879 - DNA, 75 bp, synthetic construct
  source 1..75: mol_type = other DNA
accaactgatgtagcgttaacaagaaaaaatattgatgtttacagcaaagccgaagtagaccttaaaaaagggat

SEQ ID NO: 831880 - DNA, 75 bp, synthetic construct
  source 1..75: mol_type = other DNA
agaggaagtcattatcaaagaagctatccgcagaatgccaaaagcaatgcgaaataagttgcttgcatcaacaga

SEQ ID NO: 831881 - DNA, 75 bp, synthetic construct
  source 1..75: mol_type = other DNA
gtgataatccccgagccgccacggcgttgctggaacagttcctgctgccctgggcaccgcgctatcttgaatgcc

SEQ ID NO: 831882 - DNA, 75 bp, synthetic construct
  source 1..75: mol_type = other DNA
gggcaataccaccgctaagtaccgggcgtttctgcagtctcagggaatgacttttaattcgggtcaaaatgagcc

SEQ ID NO: 831883 - DNA, 75 bp, synthetic construct
  source 1..75: mol_type = other DNA
ccgtgtggaaaaatgtaattgtaagtgacgaatcccttacacggtgtatatattcattaagatgtatttttgaac

SEQ ID NO: 831884 - DNA, 75 bp, synthetic construct
  source 1..75: mol_type = other DNA
cagaacgaaagaaagttgaaacaaggctaaagattattcttggtgcggaagtggctaaggctatgaattgtggtg

SEQ ID NO: 831885 - DNA, 75 bp, synthetic construct
  source 1..75: mol_type = other DNA
tcctcgtcctcggcctctgcggctgctcaaaaagccagtgagtcatcacaaagtgcagcagatgctgagttgtca

SEQ ID NO: 831886 - DNA, 75 bp, synthetic construct
  source 1..75: mol_type = other DNA
tcagcagacaggctctggaacagactgtccggactggtatcagatgcgcagaatgcgcaactggaagaactgtta

SEQ ID NO: 831887 - DNA, 75 bp, synthetic construct
  source 1..75: mol_type = other DNA
aggaaaggtgagcacgaacctgattttcaaggagtgtcgccagagtgccgtgatgaaacgggtattgatgttttt

SEQ ID NO: 831888 - DNA, 75 bp, synthetic construct
  source 1..75: mol_type = other DNA
cgcagctgcaccaacggaatatttctggagtgccggaacagtccggccatgaagcgagtattgatggtttggggg

SEQ ID NO: 831889 - DNA, 75 bp, synthetic construct
  source 1..75: mol_type = other DNA
tactagatgtactaaacgatctctcagctataagtgatggcgttcttgactggcgtctacagatgacgaaaccaa

SEQ ID NO: 831890 - DNA, 75 bp, synthetic construct
  source 1..75: mol_type = other DNA
gcgctgaacgtgcctgcggcagatctggcagcgctcgggcagggcgcacagaccattaccgccagcgtgaacgat

SEQ ID NO: 831891 - DNA, 75 bp, synthetic construct
  source 1..75: mol_type = other DNA
agctggagcgtgggcgttacagcggcgcaggttagcgcctggcctgcggggacggttaatattgctgtatccggg

SEQ ID NO: 831892 - DNA, 75 bp, synthetic construct
  source 1..75: mol_type = other DNA
cgagcgcgcctcgggcagcgccgaagtcaaggccgagcatgtcgcgcagatcgtctcgcgcctgaccggcattcc

SEQ ID NO: 831893 - DNA, 75 bp, synthetic construct
  source 1..75: mol_type = other DNA
caccagctgcggcgtgagcaggactatatggcctcgcgcaagcagtacgacaaggccgccgagctgggcaagcgc

SEQ ID NO: 831894 - DNA, 75 bp, synthetic construct
  source 1..75: mol_type = other DNA
tccgctaaccatcagcggcagcagtagcgccgaagcggggcagacggtaaccgtcacgcttaatggcgtgactta

SEQ ID NO: 831895 - DNA, 75 bp, synthetic construct
  source 1..75: mol_type = other DNA
tccggcgtggagccggggcaaacggtcaccgttatctttggcggcaaaacctacaccgccaccgtagcaggcgat

SEQ ID NO: 831896 - DNA, 75 bp, synthetic construct
  source 1..75: mol_type = other DNA
accgccacggtcaatgacaaagcgggcaacccggcgagcaccacgcataatctggcggtggatctcaccgttccg

SEQ ID NO: 831897 - DNA, 75 bp, synthetic construct
  source 1..75: mol_type = other DNA
ggcgctcgccgacagcgacgtggtcaagaccatcctgggtcagttcaagatcaaggtcgatgacctcaagcggca

SEQ ID NO: 831898 - DNA, 75 bp, synthetic construct
  source 1..75: mol_type = other DNA
gctgaccttcgatcagaccttgatcgaccacttcgcggaggaaggctacaagcccgagttcggcgcgcgtgagct

SEQ ID NO: 831899 - DNA, 75 bp, synthetic construct
  source 1..75: mol_type = other DNA
ataaaggtggtgttgggaaaagctatctgactttccaattggcttctgaatacgcaagacaacacccagataaaa

SEQ ID NO: 831900 - DNA, 75 bp, synthetic construct
  source 1..75: mol_type = other DNA
agaaggtgcggcgcaagccctacagcgtgctgctgctcgacgagatcgagaaggcacaccctgacgtctacaaca

SEQ ID NO: 831901 - DNA, 75 bp, synthetic construct
  source 1..75: mol_type = other DNA
gccggcgccaaatatcgcggcgagttcgaggagcgcgtgcagaaggtgctgaaggaggtgaccgagcaccagggc

SEQ ID NO: 831902 - DNA, 75 bp, synthetic construct
  source 1..75: mol_type = other DNA
tcggcgagccgggtgtgggcaagaccgccatcgtcgaagggctggcgcagcgcatggtggcgggtgaagtgcccg

SEQ ID NO: 831903 - DNA, 75 bp, synthetic construct
  source 1..75: mol_type = other DNA
gcgggatcggcgctgaccatcagcggtaccagcacggcggaagccgggcagacggtgaccgtgacgcttaacggc

SEQ ID NO: 831904 - DNA, 75 bp, synthetic construct
  source 1..75: mol_type = other DNA
agcgggcaggtgacgggcgcagcgcagggggatacggttaccgttacgctgggcggcaacacctacaccgccacg

SEQ ID NO: 831905 - DNA, 75 bp, synthetic construct
  source 1..75: mol_type = other DNA
gaacgggcaaaattacaccgctactaccgatagcaacggcaactggagcgccacggtgccagcgtcagcggttag

SEQ ID NO: 831906 - DNA, 75 bp, synthetic construct
  source 1..75: mol_type = other DNA
cagatgtgggtaactggcctgcggggacggtgaatatcacggtttcaggtgccactagcgcaggaaacccggtca

SEQ ID NO: 831907 - DNA, 75 bp, synthetic construct
  source 1..75: mol_type = other DNA
actctctctggcgatgatgtgatcaacgccgttgaaaaaggcgaaacgctggtcgtaagcggcagcaccagcggt

SEQ ID NO: 831908 - DNA, 75 bp, synthetic construct
  source 1..75: mol_type = other DNA
accgtggcgggcgatgatgttattaacagcattgagcacaatcaggcgctggtgataacaggtagcagcaccggg

SEQ ID NO: 831909 - DNA, 75 bp, synthetic construct
  source 1..75: mol_type = other DNA
accgccagcctgagcgatcgcgcgggcaacagcgacagcacgactcacgatgtgaccgttgatcttagcggcccg

SEQ ID NO: 831910 - DNA, 75 bp, synthetic construct
  source 1..75: mol_type = other DNA
caccacggtggtggatgcttccggcaactggagtctgggcgttccggcctccgttgtcagcggactggtggacgg

SEQ ID NO: 831911 - DNA, 75 bp, synthetic construct
  source 1..75: mol_type = other DNA
aatgacctgttgatctatatgcaagacggcacggtgatccgctgcaacggttatttcctgcaagcggcaaatacc

SEQ ID NO: 831912 - DNA, 75 bp, synthetic construct
  source 1..75: mol_type = other DNA
ggcgtcacgggtgagcgccctcggtgaagccacttacacggtgaccgccgccgctactgactctgatggcaacag

SEQ ID NO: 831913 - DNA, 75 bp, synthetic construct
  source 1..75: mol_type = other DNA
cggtggtgatcaataacgtcacctatggcgcgacagtattagccgatggcacatggagccttggcgttccggcgg

SEQ ID NO: 831914 - DNA, 75 bp, synthetic construct
  source 1..75: mol_type = other DNA
cagccataacgtgcaggtcaataccgcgctgcctggcgtcaccattaacccagttgcgaccgacgatattattaa

SEQ ID NO: 831915 - DNA, 75 bp, synthetic construct
  source 1..75: mol_type = other DNA
ccgctgaatctggtaacgcccagaccatcagcggccaggtcacgggcgcagcgcagggggatacggttaccgtca

SEQ ID NO: 831916 - DNA, 75 bp, synthetic construct
  source 1..75: mol_type = other DNA
aagattccgtgcgtaaccgctggttcagcgtgatggcggggccgtctgtgcgcgtgaatgaatggttcagcgcgt

SEQ ID NO: 831917 - DNA, 75 bp, synthetic construct
  source 1..75: mol_type = other DNA
aatacatatttgctgggcgatttggatgaccttcctttaatcaataaagaagaacaaccagataaaggcttctta

SEQ ID NO: 831918 - DNA, 75 bp, synthetic construct
  source 1..75: mol_type = other DNA
ttcgctcaactttaacataccacggtatgctttatcgcatgtgtgcgttggtggtgatatccgggattacgggcg

SEQ ID NO: 831919 - DNA, 75 bp, synthetic construct
  source 1..75: mol_type = other DNA
ggtaaacgcagcaccatcgcatatgataaacgcgggcgtccggtgagtgtgacggaaggcggtcttacgcgcagc

SEQ ID NO: 831920 - DNA, 75 bp, synthetic construct
  source 1..75: mol_type = other DNA
tttgaaaaaaacggtcgggttactgatgaggtgcagaaaaaaatagatttgcttaaaaaacgctcattcaagcaa

SEQ ID NO: 831921 - DNA, 75 bp, synthetic construct
  source 1..75: mol_type = other DNA
taatgttacattgtgtgtggataaagattttagctttgagattgatgagttgtttatttccaagcaagatttttt

SEQ ID NO: 831922 - DNA, 75 bp, synthetic construct
  source 1..75: mol_type = other DNA
ttggcaagaacgacacgccccctgaccaacacagaagtactgcgcgctaaagcgttagaaaaggatctaacgttg

SEQ ID NO: 831923 - DNA, 75 bp, synthetic construct
  source 1..75: mol_type = other DNA
cgatcacctggcctggaaagcggtacatgaacaaagtccggtaggtgattttctggatatgttcagccaccgcct

SEQ ID NO: 831924 - DNA, 75 bp, synthetic construct
  source 1..75: mol_type = other DNA
agtatggatgctaaagatatggacgagactgcaaaaaaaaggaaaaatgctctaaatcaaatcaatatcgtgcgt

SEQ ID NO: 831925 - DNA, 75 bp, synthetic construct
  source 1..75: mol_type = other DNA
gaaaattgttattaataaaggcatatacgcatcatggaagtttgtaggtacgattcaaaattatatccaatttat

SEQ ID NO: 831926 - DNA, 75 bp, synthetic construct
  source 1..75: mol_type = other DNA
aggcgcgatacctgttcaggagattaaggcaagaacgattgttgaagcattggagccaatcaaagcacgtggcgc

SEQ ID NO: 831927 - DNA, 75 bp, synthetic construct
  source 1..75: mol_type = other DNA
gcggattacctttccttgctagccaacggaattgacccgcaaattcaagctgagattgtagaggaacagcaacaa

SEQ ID NO: 831928 - DNA, 75 bp, synthetic construct
  source 1..75: mol_type = other DNA
tatgacgctgccgggcgcatcaccgtgctgaccaacgagaacggcagccagtccacgttccggtatgacccggtg

SEQ ID NO: 831929 - DNA, 75 bp, synthetic construct
  source 1..75: mol_type = other DNA
ggttacgacggcatcgaaatttggggcggtcgcccgcacgcgttcgcgccggacttaaaagcgggcggcatcaaa

SEQ ID NO: 831930 - DNA, 75 bp, synthetic construct
  source 1..75: mol_type = other DNA
gctatcgttaagcgtttgccgaaagggtggagtactgtaaatgtactaagggttttacgtgacaaaaatgtagta

SEQ ID NO: 831931 - DNA, 75 bp, synthetic construct
  source 1..75: mol_type = other DNA
cgagtcgctaatgaagtcagtacgtgcaaaggcagcatgggataggaaaatcattgaagcagtacagaacggcac

SEQ ID NO: 831932 - DNA, 75 bp, synthetic construct
  source 1..75: mol_type = other DNA
attgtaaaacgcttgccgaaagggtggagtaccgtcaatgtactgagggtactacgtgataagaaagtagttacc

SEQ ID NO: 831933 - DNA, 75 bp, synthetic construct
  source 1..75: mol_type = other DNA
agcgacggggccagcgacacgcattacattcctggagaaggcaaaatgccgctgcgggaactgatgcgcgatatt

SEQ ID NO: 831934 - DNA, 75 bp, synthetic construct
  source 1..75: mol_type = other DNA
atgtatatgaacgagcccagactttacgcccgccaggcgctggaacgctttcgcgcgctgctgccggaggatgag

SEQ ID NO: 831935 - DNA, 75 bp, synthetic construct
  source 1..75: mol_type = other DNA
cgcatggtgctacttgtagtaactggacttggagttggtcatttgtgaaccacgacaagaaaatggttatctttg

SEQ ID NO: 831936 - DNA, 75 bp, synthetic construct
  source 1..75: mol_type = other DNA
ccaatgcggatgaccccaccaaagcactgtgttcgctgagccaaaattggtggctttttgtgctgcgcggtgtct

SEQ ID NO: 831937 - DNA, 75 bp, synthetic construct
  source 1..75: mol_type = other DNA
catactcaccggtgtcgttgtggtagttgcccctctggctgccactttggcgttggcctatttcttgtgggtaag

SEQ ID NO: 831938 - DNA, 75 bp, synthetic construct
  source 1..75: mol_type = other DNA
atgctccgtcctatatgttatgagcgagtatcaagcattcagcaaatcgaagggggcggtggtctggatgaccag

SEQ ID NO: 831939 - DNA, 75 bp, synthetic construct
  source 1..75: mol_type = other DNA
cacacggagctacttgcagtaactggacgtggagctggtcatttgttaaccatgaaaagaagatggtcatctttg

SEQ ID NO: 831940 - DNA, 75 bp, synthetic construct
  source 1..75: mol_type = other DNA
ctattgtatttgatcctgaccgcaggattatatactcagaaaatcaaacggtcagattacactcttcctgcgtgt

SEQ ID NO: 831941 - DNA, 75 bp, synthetic construct
  source 1..75: mol_type = other DNA
cattacaagagcagtttggagatttgaaatattcaaatttcactgttcagttcatgcctcctattatttttgttt

SEQ ID NO: 831942 - DNA, 75 bp, synthetic construct
  source 1..75: mol_type = other DNA
gtaggtaaaacatcaacggttaatttgcgtaaatcctctggactgacaacgaaattcagtagattgacgctgggt

SEQ ID NO: 831943 - DNA, 75 bp, synthetic construct
  source 1..75: mol_type = other DNA
aaaaatattgataataatgattcgaaaaatcaaatattcgctattgaaactgaagagcatggattgattggcact

SEQ ID NO: 831944 - DNA, 75 bp, synthetic construct
  source 1..75: mol_type = other DNA
tagcctctatttcagaggcgaacgcacggatgacaatggtggtgacaagcctttagatagcaaaacactgcatca

SEQ ID NO: 831945 - DNA, 75 bp, synthetic construct
  source 1..75: mol_type = other DNA
tttccggcggtcagcgccagcgtgtggctattggacgcgccatcgtacgtaatccgcgggtctttatgttcgacg

SEQ ID NO: 831946 - DNA, 75 bp, synthetic construct
  source 1..75: mol_type = other DNA
tcagcatcaccacgggggggatgtgggaggtcaataagaatgtctataccaccattggtgttgcgggctgtagtg

SEQ ID NO: 831947 - DNA, 75 bp, synthetic construct
  source 1..75: mol_type = other DNA
tctctggaatttaaagacatcatctactaacgcccaattgctacaggtcggtgtattaggcacgggtgaactgaa

SEQ ID NO: 831948 - DNA, 75 bp, synthetic construct
  source 1..75: mol_type = other DNA
actcaaagtgattagcctggatttgccaactagtcatatcgcattctctccccaaatcaccgatgaatttactgg

SEQ ID NO: 831949 - DNA, 75 bp, synthetic construct
  source 1..75: mol_type = other DNA
acagagcacaaaggaagtcgccgccggctccgctttacccggccatgcggggcatggccttgtgggttttcagtt

SEQ ID NO: 831950 - DNA, 75 bp, synthetic construct
  source 1..75: mol_type = other DNA
tttcaagcaaagatttaacgaattcttatatgaatggaatgggaaaaaaagaatacagtagttacttgggaacac

SEQ ID NO: 831951 - DNA, 75 bp, synthetic construct
  source 1..75: mol_type = other DNA
taatgcgatgactggaagtgttgtccgcaaacttccaataacaagtaagccatacagcgataaccacgaaaagga

SEQ ID NO: 831952 - DNA, 75 bp, synthetic construct
  source 1..75: mol_type = other DNA
cgaaataggttattcgcatgggcatatgccttgcgggtcgagttacttcgtgtgcaatttgtatctgctgacaac

SEQ ID NO: 831953 - DNA, 75 bp, synthetic construct
  source 1..75: mol_type = other DNA
agcgctatatcagaataatgtcggcgttaccattgccgcagatcaccctggtcgcgaagtcatgggtgatgctgc

SEQ ID NO: 831954 - DNA, 75 bp, synthetic construct
  source 1..75: mol_type = other DNA
ggcgctgcggtaacgttagggatccggccagaacacctcactccggaggtcactactggtacggtggtggagttt

SEQ ID NO: 831955 - DNA, 75 bp, synthetic construct
  source 1..75: mol_type = other DNA
gcggaagttttcgcaaaaatgtatggttttaaaagcattggtttgagatatttcaatgtctttggtaaaaggcaa

SEQ ID NO: 831956 - DNA, 75 bp, synthetic construct
  source 1..75: mol_type = other DNA
ctatgtattgcatcaggctgcacttgggtctgtgccacgttcaattaatgatcctataacaactaatgaagttaa

SEQ ID NO: 831957 - DNA, 75 bp, synthetic construct
  source 1..75: mol_type = other DNA
gatgttagacattcgctagctgatattagcaaagctaaagaaatgctcggttatcaacctcagtttgatattata

SEQ ID NO: 831958 - DNA, 75 bp, synthetic construct
  source 1..75: mol_type = other DNA
agacagacgattatttatgttgcctcattcgctccatgaataaaacctgtgaaatggcttacgcgtatatcgaca

SEQ ID NO: 831959 - DNA, 75 bp, synthetic construct
  source 1..75: mol_type = other DNA
gatgttaggcattctcaggctgatgttactaaggctatagatttactaaagtatagaccaaatataaaaatcaga

SEQ ID NO: 831960 - DNA, 75 bp, synthetic construct
  source 1..75: mol_type = other DNA
agcagttaattttttcaccgaaaacttggttaattactggtgtcgctggctttataggatcaaatcttttagaaa

SEQ ID NO: 831961 - DNA, 75 bp, synthetic construct
  source 1..75: mol_type = other DNA
gatattcctcatgttgagagtttatatttaaaagaagttagtgccagaaatgatgtgtgcgttgttttttttaat

SEQ ID NO: 831962 - DNA, 75 bp, synthetic construct
  source 1..75: mol_type = other DNA
aggacgttacagaggccatacagtcgctttctgaagtcactgagaggggtttaatagatgttgatgtagtagcga

SEQ ID NO: 831963 - DNA, 75 bp, synthetic construct
  source 1..75: mol_type = other DNA
tagatgtggtcaccttgtccgatggtgaacattacacaagggaatctcttagagacccgctagctctgattaaaa

SEQ ID NO: 831964 - DNA, 75 bp, synthetic construct
  source 1..75: mol_type = other DNA
caagtatttgcaagaacctacggattcaaatcaattggattaagatactttaatgtatttggaaaacgccaggat

SEQ ID NO: 831965 - DNA, 75 bp, synthetic construct
  source 1..75: mol_type = other DNA
tatcggtcgatgaaatcagccagtacctgggtgtcagcagtgacaccgtttatcgctggattgataagcagggca

SEQ ID NO: 831966 - DNA, 75 bp, synthetic construct
  source 1..75: mol_type = other DNA
aacaatatcagcactcattggccgtttttaaagagcttcttgatgccgatgtttatgaaagcggtaataaaaaaa

SEQ ID NO: 831967 - DNA, 75 bp, synthetic construct
  source 1..75: mol_type = other DNA
atatttatatcccggattggcagagaaaaagcttttttcatgcactatttttgcaaatatttctatatgggaggc

SEQ ID NO: 831968 - DNA, 75 bp, synthetic construct
  source 1..75: mol_type = other DNA
cttcgtttccggctgtaacaatcgacagccagatgctgttgaaaatggtcaatgaagctcgcaagttatgtggag

SEQ ID NO: 831969 - DNA, 75 bp, synthetic construct
  source 1..75: mol_type = other DNA
ccaacgattgggtttgtgaaagtgttctgatcgcggtgaccgggctcaagcccggtaccatcctccgggccagaa

SEQ ID NO: 831970 - DNA, 75 bp, synthetic construct
  source 1..75: mol_type = other DNA
tttctcgcgcgtcagcatttttcagaaaaatcattagttttaccaaatgcacattttagtataaatatatcgaat

SEQ ID NO: 831971 - DNA, 75 bp, synthetic construct
  source 1..75: mol_type = other DNA
aaatttacaagaggttgaggggataattaaagggatgcttatgacattagatatcaggttaggtacggatatcgt

SEQ ID NO: 831972 - DNA, 75 bp, synthetic construct
  source 1..75: mol_type = other DNA
ggggacgttattttgattgaacaggtggaccggctatcccgtctgaatgatgctggctgggtgattcttagaaaa

SEQ ID NO: 831973 - DNA, 75 bp, synthetic construct
  source 1..75: mol_type = other DNA
ttatgagttaatcgctgaagcctggcgtttgatggatggacaagatcctaaaaccagcgattggcatagcaaggc

SEQ ID NO: 831974 - DNA, 75 bp, synthetic construct
  source 1..75: mol_type = other DNA
ggacagccggagtcgttatctgcgggatatgtaccgcccgggaatggtgatggagcagtggaacccggagacacg

SEQ ID NO: 831975 - DNA, 75 bp, synthetic construct
  source 1..75: mol_type = other DNA
aaggccggtgagctggggaaagagcaggtcatggtgcctgtcctgaacacagcgaatatacccagacacgcagag

SEQ ID NO: 831976 - DNA, 75 bp, synthetic construct
  source 1..75: mol_type = other DNA
ccggtgacgggatgcattctgagcgggaactcgttcgggtgcgcatgctgaaaacggcacatatgcctgcctgtg

SEQ ID NO: 831977 - DNA, 75 bp, synthetic construct
  source 1..75: mol_type = other DNA
gtaattcctgggagtactttgtgcctgcaggctctacaatcgaatctctggaagttaaaaataatacaggattag

SEQ ID NO: 831978 - DNA, 75 bp, synthetic construct
  source 1..75: mol_type = other DNA
gtgaaaaaagggtttaatgataaagtatcaagtcttaaaatttcatctgaaaaaacatttttaattacttccgat

SEQ ID NO: 831979 - DNA, 75 bp, synthetic construct
  source 1..75: mol_type = other DNA
gtcaaattcagctcagtcaaattcagctttattcgctctggaatcggtattagacgtaagttcttacctggaaaa

SEQ ID NO: 831980 - DNA, 75 bp, synthetic construct
  source 1..75: mol_type = other DNA
agcggatgcagtaatttctggtgacaataacccggaccataaactgaaagtttccctgacaacgcttgagcagga

SEQ ID NO: 831981 - DNA, 75 bp, synthetic construct
  source 1..75: mol_type = other DNA
ttgatgaaagcctgaaagggcaggggattggtaaacggctggtggcgaaggtggtggaaaaaatgcgccgggaga

SEQ ID NO: 831982 - DNA, 75 bp, synthetic construct
  source 1..75: mol_type = other DNA
gcgaagtggcgaaagctgcagatgccacgctgaggcgaatggggattgccagtccgtccggggaggtattcagaa

SEQ ID NO: 831983 - DNA, 75 bp, synthetic construct
  source 1..75: mol_type = other DNA
gggaccatcacagtgtatgaagattctcaacccggtacgctgaatgattttctcggtgccatgacggaggatgat

SEQ ID NO: 831984 - DNA, 75 bp, synthetic construct
  source 1..75: mol_type = other DNA
gtcgtaaaacgcacctcggtaccggtgcttgttggtttggtgattgttatcgttgctacagagctgatggtgcca

SEQ ID NO: 831985 - DNA, 75 bp, synthetic construct
  source 1..75: mol_type = other DNA
tatcgcgggatggcagatgcgtttgctaacgtggtgatgctgctggttgccgctggggtattcgctcaggggctt

SEQ ID NO: 831986 - DNA, 75 bp, synthetic construct
  source 1..75: mol_type = other DNA
tcgtctggctggaccaggtaaagcaggcagagcggtggctgtggtatttggtggctttactctggcgatggcaat

SEQ ID NO: 831987 - DNA, 75 bp, synthetic construct
  source 1..75: mol_type = other DNA
tgcaggtcaggtttggtgacgggccgtggcaggatgttaaggggctggatgaagtgggcagtgatacaggcagaa

SEQ ID NO: 831988 - DNA, 75 bp, synthetic construct
  source 1..75: mol_type = other DNA
atgaaacgtaaaacactgcctcttctggcactggtcgccaccactctgtttctgagcgcctgcgatgacaggagt

SEQ ID NO: 831989 - DNA, 75 bp, synthetic construct
  source 1..75: mol_type = other DNA
ataagtaatgggaatctcacgccagaggcacggcgtagtatcaaagttgctgattttgattttctggatgttttt

SEQ ID NO: 831990 - DNA, 75 bp, synthetic construct
  source 1..75: mol_type = other DNA
cgacaaaaacaccgccaggctgttaggcggccccactattgagcactatcatcaggccattgcgctggtagtggc

SEQ ID NO: 831991 - DNA, 75 bp, synthetic construct
  source 1..75: mol_type = other DNA
gttgtgtttactgccggtagtctggcggccgcgtttgcagccacattacctcagctcctgttagcgcggttcatt

SEQ ID NO: 831992 - DNA, 75 bp, synthetic construct
  source 1..75: mol_type = other DNA
tcatattaactccgaaagaagaatatgtttatacaaatgtacaacctgttaaggaaattaaatcggaatttttaa

SEQ ID NO: 831993 - DNA, 75 bp, synthetic construct
  source 1..75: mol_type = other DNA
cagcaaaacctccacgcggcgcaggaagtgatgaacttaataacgcaagccggtggcaaagcattcgtgctctag

SEQ ID NO: 831994 - DNA, 75 bp, synthetic construct
  source 1..75: mol_type = other DNA
gcgttacataaactcggcgtcagtacgtatctgctggatggcgacaacgttcgccacggcttatgcagtgatctc

SEQ ID NO: 831995 - DNA, 75 bp, synthetic construct
  source 1..75: mol_type = other DNA
gccacgaacgcttcagaggcggcgacctcagcccgtgatgcggaggcctcaaaagacgcggcaaaatcatcagaa

SEQ ID NO: 831996 - DNA, 75 bp, synthetic construct
  source 1..75: mol_type = other DNA
gccacgaacgcttcagaggcggctacctcagcccgggatgcggaggcctcaaaagacgcggcaaaatcatcagaa

SEQ ID NO: 831997 - DNA, 75 bp, synthetic construct
  source 1..75: mol_type = other DNA
gccacgaatgcttcagaggcggcaacctcagcccgagatgcggaggcctcaaaagacgcggcaaaatcatcagaa

SEQ ID NO: 831998 - DNA, 75 bp, synthetic construct
  source 1..75: mol_type = other DNA
gtgcagcttcctcggcaacggcggcagtaaattccgcgacggcggcaaaaacgtccgagacgaacgccaggtcat

SEQ ID NO: 831999 - DNA, 75 bp, synthetic construct
  source 1..75: mol_type = other DNA
gccacgaaggcttcagaggcggccacctcagcccgtgatgcggaggcctcaaaagacgcggcaaaatcatcagaa

SEQ ID NO: 832000 - DNA, 75 bp, synthetic construct
  source 1..75: mol_type = other DNA
gccacgaaggcttcagaggcggctacctcagcccgcgatgcggaggcctcaaaagacgcggcaaaatcatcagaa

SEQ ID NO: 832001 - DNA, 75 bp, synthetic construct
  source 1..75: mol_type = other DNA
cacaggccagctttgccattcgaacgattctcagaacttttagaacgaatagatagcttcaagggtagaaaactc

SEQ ID NO: 832002 - DNA, 75 bp, synthetic construct
  source 1..75: mol_type = other DNA
acaaccctgctcaagagatggcaggagctattgcggtagctaaaagagtccacaggccagctttgccattcgaac

SEQ ID NO: 832003 - DNA, 75 bp, synthetic construct
  source 1..75: mol_type = other DNA
gaacggttaagcctgcagacaaacctttcaaacttaccgatggtgaggggatgcacctgctggttaaccccaatg

SEQ ID NO: 832004 - DNA, 75 bp, synthetic construct
  source 1..75: mol_type = other DNA
tagtgatagtgatagtgatagtgatagtgatagtgatatcagtataatagaatctaaggggatgatggataaaaa

SEQ ID NO: 832005 - DNA, 75 bp, synthetic construct
  source 1..75: mol_type = other DNA
atgaaatatatttgttttaaagaactaccctattgtgatagtgatagtgatagtgatagtgatagtgatagtgat

SEQ ID NO: 832006 - DNA, 75 bp, synthetic construct
  source 1..75: mol_type = other DNA
ttagcattgggtgtttatccaatggtctctcttggtgaagcccgcaggaagcgagatgaagccaaaaagttggta

SEQ ID NO: 832007 - DNA, 75 bp, synthetic construct
  source 1..75: mol_type = other DNA
ctacctggcgtcagtccttgcggggagcgggctttcgtaatcttgccctgaatacaggactgagtatcaaaaagc

SEQ ID NO: 832008 - DNA, 75 bp, synthetic construct
  source 1..75: mol_type = other DNA
aaaatataaaatatgttttgaataactcagatgcaaaaattattttctcagatatgatccctttcactagttatg

SEQ ID NO: 832009 - DNA, 75 bp, synthetic construct
  source 1..75: mol_type = other DNA
gcttttgaaaatcattgaggattacattttaaaaatggatcgctcatctaacattacagatgtggtcagacagta

SEQ ID NO: 832010 - DNA, 75 bp, synthetic construct
  source 1..75: mol_type = other DNA
aagctgcagccgacaaaaaagcagcagaaaaggctgcagctgataaggcagcagctgataagaaagcagcggcag

SEQ ID NO: 832011 - DNA, 75 bp, synthetic construct
  source 1..75: mol_type = other DNA
ccgggcagccgtggcaccctcaactggagatgattgccggggtgttaaccagtcataaagatggtaaaccgtggg

SEQ ID NO: 832012 - DNA, 75 bp, synthetic construct
  source 1..75: mol_type = other DNA
tcagagtgggaagatccagcttaatggtgaaaccatcgacaaatgccatttccaggcgcggctcaaaaaggggct

SEQ ID NO: 832013 - DNA, 75 bp, synthetic construct
  source 1..75: mol_type = other DNA
ccttcggctggcgaacaatggcgggagccagtggcaattaattaatggcgaacaggagattacgctgcagcctga

SEQ ID NO: 832014 - DNA, 75 bp, synthetic construct
  source 1..75: mol_type = other DNA
ccgcgccggttctcaccattaacaccgtggcgggcgatgacatcatcaacgacgccgaacacgcccaggcgctgg

SEQ ID NO: 832015 - DNA, 75 bp, synthetic construct
  source 1..75: mol_type = other DNA
gagcatcagcgttcccacctcagccctgggtgcgctgagtgcaagcaattacaccgtcagcgccacggtcaacga

SEQ ID NO: 832016 - DNA, 75 bp, synthetic construct
  source 1..75: mol_type = other DNA
cagcgaatgttcaggccagcgttagcagcgcgagcggcaacagcgcctcggcgacccatgcgtacagcgttgacg

SEQ ID NO: 832017 - DNA, 75 bp, synthetic construct
  source 1..75: mol_type = other DNA
gtgaaatgtttgggcgtgttcaacgggattcgttctgggtaaaaaacatcatgagtccggcaaaactccgggaaa

SEQ ID NO: 832018 - DNA, 75 bp, synthetic construct
  source 1..75: mol_type = other DNA
ggtcagcgaaaccaacgctaaagcgtcagagaacaaggcgaaagaatatctcgacaaggtcgggggactcgtcag

SEQ ID NO: 832019 - DNA, 75 bp, synthetic construct
  source 1..75: mol_type = other DNA
acccgggaggatttgacgtgtgcacagtggatctggggacgggttgttgcgttgtatgaacaggccgccagtgat

SEQ ID NO: 832020 - DNA, 75 bp, synthetic construct
  source 1..75: mol_type = other DNA
atgcatatcaatacgtccctgacgacaaccctgacaatagggggtaactataaagggtatgaaactatgactgag

SEQ ID NO: 832021 - DNA, 75 bp, synthetic construct
  source 1..75: mol_type = other DNA
aaggtacattattacccgataatgattatcaggttacaagtaccaatatcatgcaaatacaatttaaatgtcagg

SEQ ID NO: 832022 - DNA, 75 bp, synthetic construct
  source 1..75: mol_type = other DNA
cctccgcctgacgaacaatggcgggagccagtggcagttaatgaatggcgaccaggagattacgctgcatcccga

SEQ ID NO: 832023 - DNA, 75 bp, synthetic construct
  source 1..75: mol_type = other DNA
acaaaggacgtcgccgccggctccgctttacccggccatgcgggcatggccttatgggttttcagttatgtggcc

SEQ ID NO: 832024 - DNA, 75 bp, synthetic construct
  source 1..75: mol_type = other DNA
ttttgtctttttctggtcagaatgctgtctggtcagtgtccgtaagtgactgtttttatagtctctgtccggttg

SEQ ID NO: 832025 - DNA, 75 bp, synthetic construct
  source 1..75: mol_type = other DNA
tatcgcccggcttttatggaggcacggcaccgcccggtgtcgcggaatatgtgaacaacggaggaaaacatcatg

SEQ ID NO: 832026 - DNA, 75 bp, synthetic construct
  source 1..75: mol_type = other DNA
gccagcccagacaccgtgcgtgcgatgacgccggagatgttctttgattatcttgccgtccatattaatggtgag

SEQ ID NO: 832027 - DNA, 75 bp, synthetic construct
  source 1..75: mol_type = other DNA
aagttgaaggtgcatcaatcgataaacaggatcacgctgcgaatccttgtgggcaaattggcgagacggtcgatc

SEQ ID NO: 832028 - DNA, 75 bp, synthetic construct
  source 1..75: mol_type = other DNA
ccaccatgcagagcaaaggcgacactgaaggttacagcttccacgcttacctgagccgccagtataacaacggta

SEQ ID NO: 832029 - DNA, 75 bp, synthetic construct
  source 1..75: mol_type = other DNA
aagtaaacgataatttatttgagggcattatcaatatttcttctatacggagtgagaaagtaataatgtcgctat

SEQ ID NO: 832030 - DNA, 75 bp, synthetic construct
  source 1..75: mol_type = other DNA
ctaccgctacgccagccgggagcaggcctgtcaggctctgctggccgccatccgccgcaccagcccgaagcgtat

SEQ ID NO: 832031 - DNA, 75 bp, synthetic construct
  source 1..75: mol_type = other DNA
tttagcacactgaatgaagaacagtttatttctcttaccaatcagctagttttggagttcgactctcttcaggag

SEQ ID NO: 832032 - DNA, 75 bp, synthetic construct
  source 1..75: mol_type = other DNA
gataatcagtctggaaataaaataataaaaataagtttgttcggttttaaaaccacatccagcattgatgaaatg

SEQ ID NO: 832033 - DNA, 75 bp, synthetic construct
  source 1..75: mol_type = other DNA
tccaccccgacccctgacgataaaatcgactgccataaacatccctcctcactgacgcagtttctcgcacaaaaa

SEQ ID NO: 832034 - DNA, 75 bp, synthetic construct
  source 1..75: mol_type = other DNA
gtgggggcagtcagggaaggtgcgaataagcaggtcatttcttcccaagctgactcgctgattaaaatttcgcgg

SEQ ID NO: 832035 - DNA, 75 bp, synthetic construct
  source 1..75: mol_type = other DNA
aacaagcgtaacggagtcgttcacccttgggtttacggtagcgcagaggcgtgtccaagcgagggggatatcttc

SEQ ID NO: 832036 - DNA, 75 bp, synthetic construct
  source 1..75: mol_type = other DNA
tcttaatgatgccgaaaactatacgttaattcgtgaagcattcaacgcgcagcggctggatgcggtcgagcgtgc

SEQ ID NO: 832037 - DNA, 75 bp, synthetic construct
  source 1..75: mol_type = other DNA
gggtgtggcgatggtgtacaccggcgtgacagacacggtcagcgaagtctgttcagacctcgcaaatatgctttt

SEQ ID NO: 832038 - DNA, 75 bp, synthetic construct
  source 1..75: mol_type = other DNA
ggaagataaaagtagatttactaaataataaggaaaatattataaatataactagggatgttaataaatcattca

SEQ ID NO: 832039 - DNA, 75 bp, synthetic construct
  source 1..75: mol_type = other DNA
gctacttacccgaaactggcactggtaatccccagcctgacgctaccagatgctcgcggtgagtttccgcgcatc

SEQ ID NO: 832040 - DNA, 75 bp, synthetic construct
  source 1..75: mol_type = other DNA
taacatccatgtcgggatggctgggcctgaacaagtcagtatgcatatttatgggaatgtggtcgatcagggctg

SEQ ID NO: 832041 - DNA, 75 bp, synthetic construct
  source 1..75: mol_type = other DNA
aatcaacagaaaaagacccggcagtaaacgctattgctcacgccattctgggcggtgcagtggcggcaatgcagg

SEQ ID NO: 832042 - DNA, 75 bp, synthetic construct
  source 1..75: mol_type = other DNA
cgacatgggtggcatttaacacaatcagcatggcgtgcgtaatgcgcggtgatattcaggttggcgatcacatcc

SEQ ID NO: 832043 - DNA, 75 bp, synthetic construct
  source 1..75: mol_type = other DNA
ggaaagaacgataaaatacagtagccataagaacggagtttacaacccaggcgccctgatgattgagtttgatat

SEQ ID NO: 832044 - DNA, 75 bp, synthetic construct
  source 1..75: mol_type = other DNA
atacaccatctaacccctcagcagtttgaaaaaatggtctggactcagctttaccagcttgaactggtaaatatg

SEQ ID NO: 832045 - DNA, 75 bp, synthetic construct
  source 1..75: mol_type = other DNA
cggaacagttcgcatagtatccaactcatataatcaaaacacagcaaggcaaatgactggggtatttggatggag

SEQ ID NO: 832046 - DNA, 75 bp, synthetic construct
  source 1..75: mol_type = other DNA
tgggagaaggctcagcgttacccgttggtgtacctgtaccatatccactggctacaccaccaacaggatggatga

SEQ ID NO: 832047 - DNA, 75 bp, synthetic construct
  source 1..75: mol_type = other DNA
gccgaatactacccgaaactggcggcacaaacgcatattccactggcggcgggtgaacgcatgttctcacgcttc

SEQ ID NO: 832048 - DNA, 75 bp, synthetic construct
  source 1..75: mol_type = other DNA
ggctggcccggtgggggcaaccggacctcagggaccaaaagggcgacccgggggagacacaaatccgttttcgtc

SEQ ID NO: 832049 - DNA, 75 bp, synthetic construct
  source 1..75: mol_type = other DNA
gggctttccgcattcaaaaatgccaatatctctccagagtctcagcttgggatatttttgcaagatgtgggcaac

SEQ ID NO: 832050 - DNA, 75 bp, synthetic construct
  source 1..75: mol_type = other DNA
tggcggcactggatacgcgaaaatccaaacagcacgtcgatcctgaagtcagaatggctgaatggatgcagacgc

SEQ ID NO: 832051 - DNA, 75 bp, synthetic construct
  source 1..75: mol_type = other DNA
tctcctgatggcactgtgggggcctttgtccggcaccagttacggcattgccgggctgctgatgctggcggtctg

SEQ ID NO: 832052 - DNA, 75 bp, synthetic construct
  source 1..75: mol_type = other DNA
gtttctggcgatgcgaatacagtgaatatcactggtaacgttctggttgataaggataaaaccgcagacaattag

SEQ ID NO: 832053 - DNA, 75 bp, synthetic construct
  source 1..75: mol_type = other DNA
tcgggcaataccggccagtgcgcaagattccaccctgctggagcacagtctggcaacgcttgccgagcaactgaa

SEQ ID NO: 832054 - DNA, 75 bp, synthetic construct
  source 1..75: mol_type = other DNA
tggtcaaggttcacaaagcgactgatttatctcaggctcagtctgacgttgtgctcaatggcaataacacaggta

SEQ ID NO: 832055 - DNA, 75 bp, synthetic construct
  source 1..75: mol_type = other DNA
tctgatggccctgtgggggcctttgtccggcaccagttacggcattgccgggctgctgatgctggcggtcagtta

SEQ ID NO: 832056 - DNA, 75 bp, synthetic construct
  source 1..75: mol_type = other DNA
atatcagcagccggagacgatgaagaggattttatcgcctggctgaagatggggttgtcatcaggaatgattgaa

SEQ ID NO: 832057 - DNA, 75 bp, synthetic construct
  source 1..75: mol_type = other DNA
tggaatgaaaattatgtcgtgcatgacaaagtggtgagattgcaatctacaggcagtgtcgttgaacaaacgctt

SEQ ID NO: 832058 - DNA, 75 bp, synthetic construct
  source 1..75: mol_type = other DNA
ccagaatcagttcactacggcgtatataagtctcgttttatgccaaatgaaaggctgactgcaatttcgtggact

SEQ ID NO: 832059 - DNA, 75 bp, synthetic construct
  source 1..75: mol_type = other DNA
aatcttaggtagaatgatatcgttacattcggatttcagaaaattctatatatatagaaacggattatatatgac

SEQ ID NO: 832060 - DNA, 75 bp, synthetic construct
  source 1..75: mol_type = other DNA
caaaataacggaatgctttgtcgagaaccaattaaaatgtgagaactatctaataagtaatggggttaaagtatc

SEQ ID NO: 832061 - DNA, 75 bp, synthetic construct
  source 1..75: mol_type = other DNA
ttatagttacatataatccagatatacctgttttatcttgtcttattgaagagttaaataagcaagtagacaatg

SEQ ID NO: 832062 - DNA, 75 bp, synthetic construct
  source 1..75: mol_type = other DNA
gtgtggagaaaattatctctacctgggcacctgcgtctgataataacaacacaactgcgtatatcagggctgtat

SEQ ID NO: 832063 - DNA, 75 bp, synthetic construct
  source 1..75: mol_type = other DNA
gcaacggcaaattgcgaccactgggtatcccagcgatgcggtattgttcagcgggccatgctgatggtgatggag

SEQ ID NO: 832064 - DNA, 75 bp, synthetic construct
  source 1..75: mol_type = other DNA
tgttgagggtgtgaacacagcaaagctacaggccggacggtctgctgagctgcaaaggctcagcgaagaacttat

SEQ ID NO: 832065 - DNA, 75 bp, synthetic construct
  source 1..75: mol_type = other DNA
tggaagcgccaacaccgatcagtgcctatctccacgccgcatcgatggtgaaagtgggcgtttacatttttgccc

SEQ ID NO: 832066 - DNA, 75 bp, synthetic construct
  source 1..75: mol_type = other DNA
gaaacagttaattctgatataaaaacaacgaccagttctcatcctgtaagttcccttactatgctcaacgacacc

SEQ ID NO: 832067 - DNA, 75 bp, synthetic construct
  source 1..75: mol_type = other DNA
atgctgattacaggtgacgataaagacggaaaagtgatccatgatgcaggccatacggtgttcaatgcagggaat

SEQ ID NO: 832068 - DNA, 75 bp, synthetic construct
  source 1..75: mol_type = other DNA
tcagttattacaattcgcaatatattaaaagaagaaaaacaagccgctatggagaagactgataaagagcaataa

SEQ ID NO: 832069 - DNA, 75 bp, synthetic construct
  source 1..75: mol_type = other DNA
ttggcaactgaaaaaaatactgagatgccaaaaattattgttgaacaaataaataataaattattttcttcatac

SEQ ID NO: 832070 - DNA, 75 bp, synthetic construct
  source 1..75: mol_type = other DNA
agtaacctggggcaattaaaaaaagctgagtcatttgtacaaaaatttagcaagagaagtaactatcttattgtt

SEQ ID NO: 832071 - DNA, 75 bp, synthetic construct
  source 1..75: mol_type = other DNA
tattgagacaaacagcaatggctggttcccggatacagatggcgcactcatcaccggactgacctttcttgaccc

SEQ ID NO: 832072 - DNA, 75 bp, synthetic construct
  source 1..75: mol_type = other DNA
gtcatggcactggtcaccattctttatggctttctgatgtatttgccacagcaggatatgaagcggttgctggcc

SEQ ID NO: 832073 - DNA, 75 bp, synthetic construct
  source 1..75: mol_type = other DNA
agttacagctgcggcacgcgcttgttgccgcgtctgcgtggcgtattgcacaccctgccgttgccaggcgtgggt

SEQ ID NO: 832074 - DNA, 75 bp, synthetic construct
  source 1..75: mol_type = other DNA
ttgatcagttattaccagagcgataaagcgcagcgttcagcactaaaagcgttgcttatcacccatatcggttcg

SEQ ID NO: 832075 - DNA, 75 bp, synthetic construct
  source 1..75: mol_type = other DNA
ggatgggtgcggacggtgtggaggatggatgaccagcagcagtgggaagaccgggtgcgggcgaacgtggacgtg

SEQ ID NO: 832076 - DNA, 75 bp, synthetic construct
  source 1..75: mol_type = other DNA
cgacaacattgttttgtattataatgaaattaactctctagatgaaataaaaagagaattaataaaaaggaaaat

SEQ ID NO: 832077 - DNA, 75 bp, synthetic construct
  source 1..75: mol_type = other DNA
atcaaaaaaaagtggagtatcttaaaaatcaactctataaaagcaatgggaatattatctcgtattacaatgaac

SEQ ID NO: 832078 - DNA, 75 bp, synthetic construct
  source 1..75: mol_type = other DNA
gataggctatcattattagataagttgcagtcaatatctattgagaaaagccggattaattatcttctgtctatt

SEQ ID NO: 832079 - DNA, 75 bp, synthetic construct
  source 1..75: mol_type = other DNA
ccggtgggggcaaccggacctcagggaccgaagggcgacccgggggagacacaaatccgttttcgtctggggccg

SEQ ID NO: 832080 - DNA, 75 bp, synthetic construct
  source 1..75: mol_type = other DNA
cgcagaactgtgagttaacgccaaatcagagcatcgatgtcgattttcaaaaaattaatagcgctgagttctcct

SEQ ID NO: 832081 - DNA, 75 bp, synthetic construct
  source 1..75: mol_type = other DNA
aatgtggacattattctctggcatggttttccgtttgccggaacgcattccggggaatattgcggtgtactgttc

SEQ ID NO: 832082 - DNA, 75 bp, synthetic construct
  source 1..75: mol_type = other DNA
atctcaagcgttcagatatatactttaaatcaggctggattagttagtttagaatttccactcaatgaagaatta

SEQ ID NO: 832083 - DNA, 75 bp, synthetic construct
  source 1..75: mol_type = other DNA
gatacggcgctgaatgaggcaaaagccatcctgattgctgattgtgaaaatggcgggggcgattatgcgaaataa

SEQ ID NO: 832084 - DNA, 75 bp, synthetic construct
  source 1..75: mol_type = other DNA
agtgctgatatggcgctgaatgaggccaaagctatcctgattgctgattgtgaaaatggggggggttatgcgtga

SEQ ID NO: 832085 - DNA, 75 bp, synthetic construct
  source 1..75: mol_type = other DNA
ctatagctttattgggaaactcatcagtctttgcaaatgtttgtcctcttgatatatatttcagtaagtccatag

SEQ ID NO: 832086 - DNA, 75 bp, synthetic construct
  source 1..75: mol_type = other DNA
atgtttgagtttaatatggcagaacttcttcgccaccgctgggggcgtctgcgcttatatcgtttccccggttct

SEQ ID NO: 832087 - DNA, 75 bp, synthetic construct
  source 1..75: mol_type = other DNA
tccgcgcacgctggcagcgccttcgcatttaccgctaccgtggatcggtgctggtggattaccgcattcttcgta

SEQ ID NO: 832088 - DNA, 75 bp, synthetic construct
  source 1..75: mol_type = other DNA
acagcacctctgattttggcaatattctgctggatgtgtcgaacaaggggctgatccagggctgggaggaatcag

SEQ ID NO: 832089 - DNA, 75 bp, synthetic construct
  source 1..75: mol_type = other DNA
tgttgcagtgaatcgtgtccaccctgaaaccggctatatcaattgccttccgtggagccaggaaaaactcagtcg

SEQ ID NO: 832090 - DNA, 75 bp, synthetic construct
  source 1..75: mol_type = other DNA
gtttcgttttacttccgctggtgccgttgggttactgacggataaaccgacgtttattgtctcgacgcgcggcgg

SEQ ID NO: 832091 - DNA, 75 bp, synthetic construct
  source 1..75: mol_type = other DNA
tgtcgcccgggttctgcgaggactgttctggtgtctgaagtacaccgtcattctgccactggccacaatggcctg

SEQ ID NO: 832092 - DNA, 75 bp, synthetic construct
  source 1..75: mol_type = other DNA
cgtgctgtccggcgtggcgcggagcctgagggcttcacggcggaggatatgcggaccatcgggcgttacctgcat

SEQ ID NO: 832093 - DNA, 75 bp, synthetic construct
  source 1..75: mol_type = other DNA
ggtcaaggtactgctccggaactgcatttagaagacgcaagaaccatattaccaacttcacgttgccctggcctt

SEQ ID NO: 832094 - DNA, 75 bp, synthetic construct
  source 1..75: mol_type = other DNA
gacggtgacgcctgagccgcaaccgattacgtccaggcaactgcatgatatgaagctacgcgtggacacgacatc

SEQ ID NO: 832095 - DNA, 75 bp, synthetic construct
  source 1..75: mol_type = other DNA
tgtcgatattgttgatggtcgttttgatgccgggatacgcctgggtgaaattgtagataacgatatggttgcagt

SEQ ID NO: 832096 - DNA, 75 bp, synthetic construct
  source 1..75: mol_type = other DNA
tgtcgatattgttgaaggtcgttttgatgccgggatacgcctgggtgaaattgtggataatgatatggttgcagt

SEQ ID NO: 832097 - DNA, 75 bp, synthetic construct
  source 1..75: mol_type = other DNA
aaaatataagagtaagccattcttcgcttgttaataataaggaatggtgcaaaattggtagtgccattaattcta

SEQ ID NO: 832098 - DNA, 75 bp, synthetic construct
  source 1..75: mol_type = other DNA
caacctgttcgtcggcgatactctccggcagcagcgtgagcaacggcgatacggtagggttgggcgaatacagct

SEQ ID NO: 832099 - DNA, 75 bp, synthetic construct
  source 1..75: mol_type = other DNA
tgtcgatattgttgagggtcgttttgatgccgggatacgcctgggtgaaattgttgataacgatatggttgcagt

SEQ ID NO: 832100 - DNA, 75 bp, synthetic construct
  source 1..75: mol_type = other DNA
tgtcgatattgttgacggtcgttttgatgccgggatacgcctgggtgaaattgttgataaggatatggttgcagt

SEQ ID NO: 832101 - DNA, 75 bp, synthetic construct
  source 1..75: mol_type = other DNA
atgagggaaagctagtaattgcttactctgataagaatggctctacagtagggctggaattttcttctgtagcat

SEQ ID NO: 832102 - DNA, 75 bp, synthetic construct
  source 1..75: mol_type = other DNA
tacgaaataattgcataggatatatacatagtcattcggctggaggaacaaacccttctttagtcgaggcaatgc

SEQ ID NO: 832103 - DNA, 75 bp, synthetic construct
  source 1..75: mol_type = other DNA
aaatagatgttgttggaattgttggattgccagcatgttatggtggatttgaatcattagttcaaaatttagttg

SEQ ID NO: 832104 - DNA, 75 bp, synthetic construct
  source 1..75: mol_type = other DNA
ggatgtgaacgtcgacccgcagtttaacgatgaggactcgtgccttctcgacatcacggtgggactggctgaccc

SEQ ID NO: 832105 - DNA, 75 bp, synthetic construct
  source 1..75: mol_type = other DNA
gaacagctgcggactccaaatcttgaaaagatctgccaggagatgaatatcaagacgttaatccgttatcacgag

SEQ ID NO: 832106 - DNA, 75 bp, synthetic construct
  source 1..75: mol_type = other DNA
atgttatatttacagtcccatctgaacctgattttgatgcaagtagaactttaagagatatacctgattatgagg

SEQ ID NO: 832107 - DNA, 75 bp, synthetic construct
  source 1..75: mol_type = other DNA
ccaaaacagcgcccaaatagtgctggcacctaatggtatatcctgtgctggttctcaatcgtcatcggcgggttt

SEQ ID NO: 832108 - DNA, 75 bp, synthetic construct
  source 1..75: mol_type = other DNA
acttaagaactccattctaggaaaactattaagctcatgtataggcactaagtatgaaacacgtattacggaaat

SEQ ID NO: 832109 - DNA, 75 bp, synthetic construct
  source 1..75: mol_type = other DNA
ccaaagatgcagaaggaactggcagtgaaatatttaactgcttccgtcctgcaaataaaacggttgatctttcta

SEQ ID NO: 832110 - DNA, 75 bp, synthetic construct
  source 1..75: mol_type = other DNA
gcccacttcagcgtgcgccagataacgtccgttataacgggctgggcagttttaaaagataatgagatattttga

SEQ ID NO: 832111 - DNA, 75 bp, synthetic construct
  source 1..75: mol_type = other DNA
acggtccgctatgccttttgggtgcatgaaatgccagggacactgaaaggacaaccgcgcgagcatttcggaaaa

SEQ ID NO: 832112 - DNA, 75 bp, synthetic construct
  source 1..75: mol_type = other DNA
ggacccggacgccgatcctaaattccttgagcgggcacttaacgaccacaaagcggagtatatggatatagcgat

SEQ ID NO: 832113 - DNA, 75 bp, synthetic construct
  source 1..75: mol_type = other DNA
ggagcaaggctggcggagcaatcgccattgacgaggattgcctgataacaggagacccctggctggcaacagaaa

SEQ ID NO: 832114 - DNA, 75 bp, synthetic construct
  source 1..75: mol_type = other DNA
gtaaatttaatctgctggatattcgccgccacacaatgtcgaaaacattcagtattaagacgacaaaatcacaaa

SEQ ID NO: 832115 - DNA, 75 bp, synthetic construct
  source 1..75: mol_type = other DNA
tgactcatactatcgtttacgcaagccccgtgattgccgttatgctgggcggtgaggctgtcctgggattgctgg

SEQ ID NO: 832116 - DNA, 75 bp, synthetic construct
  source 1..75: mol_type = other DNA
atattaattatttattttggcccaatattggctgaacgagtgatgccgttatctttttttccggaacaattgcaa

SEQ ID NO: 832117 - DNA, 75 bp, synthetic construct
  source 1..75: mol_type = other DNA
atctggtcatttttgcgttagcacaggccgtgattctgctgatgctaaccccactttttacgggtatttcccggc

SEQ ID NO: 832118 - DNA, 75 bp, synthetic construct
  source 1..75: mol_type = other DNA
aacaggtgcggctggcccggtgggggcaaccggacctcagggaccgaagggcgacccgggggagacacaaatacg

SEQ ID NO: 832119 - DNA, 75 bp, synthetic construct
  source 1..75: mol_type = other DNA
acatataacggcgttgattacgatgccagtctcgggaaaagtcgaatcgacaccaaccagtgtatcgacagcaag

SEQ ID NO: 832120 - DNA, 75 bp, synthetic construct
  source 1..75: mol_type = other DNA
tcttgccattgactgctggcgatttaatgatcagagaatagatgcttatatagtaaataacctgagcactgaacc

SEQ ID NO: 832121 - DNA, 75 bp, synthetic construct
  source 1..75: mol_type = other DNA
aagaaagtcgaggatttatttcgcggttaattgaagggcaaaccaatacctttgcggaaacagcttcagtaaaaa

SEQ ID NO: 832122 - DNA, 75 bp, synthetic construct
  source 1..75: mol_type = other DNA
cgaggttgattatcttaatgagttaaaaagaatttctagaataaattctttggatgataagactcttactgaaaa

SEQ ID NO: 832123 - DNA, 75 bp, synthetic construct
  source 1..75: mol_type = other DNA
taataataactacctgacagctcagtttgaagaattatctcaacgtgatatgaagaagtatctgggagagatgaa

SEQ ID NO: 832124 - DNA, 75 bp, synthetic construct
  source 1..75: mol_type = other DNA
attgcaaaaatagatttgtttattcaaagaatcactcataatttatggactgcacgtgaaaaaaatgtgacgtta

SEQ ID NO: 832125 - DNA, 75 bp, synthetic construct
  source 1..75: mol_type = other DNA
ctggatactttaataaaacactcaattcaaatcaattcgataatgaagatgcaatcaaaggtaaagtaaatagta

SEQ ID NO: 832126 - DNA, 75 bp, synthetic construct
  source 1..75: mol_type = other DNA
accgatgataccgagatttcacaagttgctattggtgacgtttatatttctgaactgagaaatgaaaccaataaa

SEQ ID NO: 832127 - DNA, 75 bp, synthetic construct
  source 1..75: mol_type = other DNA
gggcctacgtggtgcgcagatccataaagagctaaaccgcgagcttgatgatatggcagacaaaactggcgtatc

SEQ ID NO: 832128 - DNA, 75 bp, synthetic construct
  source 1..75: mol_type = other DNA
gcgttgcagcgaaccatagaaaacacagcgcttcgcctgatgcagcgtgaatcacaacgagccggaggaatgttg

SEQ ID NO: 832129 - DNA, 75 bp, synthetic construct
  source 1..75: mol_type = other DNA
aacacgctataccggaaagaaccggttggtgcagcagggatggtggacggacagaacgcctttcattttcagatt

SEQ ID NO: 832130 - DNA, 75 bp, synthetic construct
  source 1..75: mol_type = other DNA
atgccgattcaaatcactgcccgccgtaacggttttcgccgtctcggcatcgcccacagcgcgaatactgtcacc

SEQ ID NO: 832131 - DNA, 75 bp, synthetic construct
  source 1..75: mol_type = other DNA
aacctgctgaatatcaccagtgttgatgcacaaaatcaacaacaggtgaaggatgcgatggtgaactatgccatg

SEQ ID NO: 832132 - DNA, 75 bp, synthetic construct
  source 1..75: mol_type = other DNA
agcagaaatatgatgcattgcttgaaaaagatatcagcagtgataaggcagtaatcgctgcgtgcagtaacggac

SEQ ID NO: 832133 - DNA, 75 bp, synthetic construct
  source 1..75: mol_type = other DNA
tttaaagattcattcaatcccatcaaatatagaaatgattcttacataggattaatatgcttgccagtaaaggaa

SEQ ID NO: 832134 - DNA, 75 bp, synthetic construct
  source 1..75: mol_type = other DNA
tctctttctggattcagatgatacatacaaaaataatatattttcgattttatcgaacatatcattttcagatga

SEQ ID NO: 832135 - DNA, 75 bp, synthetic construct
  source 1..75: mol_type = other DNA
aaccgctatatccagcaaataatactgttagtaaggaacaagcaaataaatggcttacagaattaggtggaacaa

SEQ ID NO: 832136 - DNA, 75 bp, synthetic construct
  source 1..75: mol_type = other DNA
acccaataaccaactcccagttgaaaatgcctatttttcttgcgatgccgggggatacttttgggcaagtaagca

SEQ ID NO: 832137 - DNA, 75 bp, synthetic construct
  source 1..75: mol_type = other DNA
tagacgaggttttgacattacataattataaaaacgcatttaatagtgtatcagcatcagattattattatgaaa

SEQ ID NO: 832138 - DNA, 75 bp, synthetic construct
  source 1..75: mol_type = other DNA
tggcctttgaaaagatgtttattgaatggatgcaggagtgccatgaaatcactgatggtgaaattatagcaatag

SEQ ID NO: 832139 - DNA, 75 bp, synthetic construct
  source 1..75: mol_type = other DNA
tggccggatgaccagttcagcgacagcgaactccagattctggaaaacgatcccaatctgattgtggtccgcctg

SEQ ID NO: 832140 - DNA, 75 bp, synthetic construct
  source 1..75: mol_type = other DNA
gcgtagatgtcggcgcgaaaaaagagatctatcaactgattaaccagttcaaagccgatggcttgagtatcattc

SEQ ID NO: 832141 - DNA, 75 bp, synthetic construct
  source 1..75: mol_type = other DNA
gccgacatggatagcgccgtttaccgtcagtttcaaatgccctatgagaggcgatatcagatgtggtgatgtggt

SEQ ID NO: 832142 - DNA, 75 bp, synthetic construct
  source 1..75: mol_type = other DNA
gtggtgctgtttgaccgctcggccatcgccaaattcaccaatgtcgggaggatgttgctggagcgagggcgcgtt

SEQ ID NO: 832143 - DNA, 75 bp, synthetic construct
  source 1..75: mol_type = other DNA
ttaacaaaaaaattaatgcaaaagatcgtgcagcgattgccgcagcccttgagtctgtgaagctgtctgatatat

SEQ ID NO: 832144 - DNA, 75 bp, synthetic construct
  source 1..75: mol_type = other DNA
tatcgtctaatctgaataggttcagtcgcggactgggatatgcaggaaaaattacaaattttgctgactggatca

SEQ ID NO: 832145 - DNA, 75 bp, synthetic construct
  source 1..75: mol_type = other DNA
ccgggcaggctaaagggaagaaaatacgtaatgttgaagaggcattaaaaacgtatgaaaagtaccgggctgaca

SEQ ID NO: 832146 - DNA, 75 bp, synthetic construct
  source 1..75: mol_type = other DNA
attcacaaatgaaagaaactatagattttttatcaagctctgaagaaactataaatatagagtatattgaaggaa

SEQ ID NO: 832147 - DNA, 75 bp, synthetic construct
  source 1..75: mol_type = other DNA
gttagcggaattggctggttcgccgccaataatgacgcagaccgtcagcgtattgtccgtggcatgtttttcctc

SEQ ID NO: 832148 - DNA, 75 bp, synthetic construct
  source 1..75: mol_type = other DNA
ttttcatttgttaaaattgaagatattatttcatcaagagcaacgtctaaagaggctaatctaaatttcaggtgt

SEQ ID NO: 832149 - DNA, 75 bp, synthetic construct
  source 1..75: mol_type = other DNA
aaggcgagggtggtagagtcatttttaatggctataacgtgtttggtgagatcgtgtcaacttggacatatggtg

SEQ ID NO: 832150 - DNA, 75 bp, synthetic construct
  source 1..75: mol_type = other DNA
tctcagccgtgaccctgcgcacgctaatgacagtatcagcccgatatttgacaaggagaaagagcagaggcgtct

SEQ ID NO: 832151 - DNA, 75 bp, synthetic construct
  source 1..75: mol_type = other DNA
cgtgaccctgcgcacgctaatgacagtatcagcccgatatttgacaaggagaaagagcagaggcgtctgcagaca

SEQ ID NO: 832152 - DNA, 75 bp, synthetic construct
  source 1..75: mol_type = other DNA
cactctcggtaacgcgcaggcgggtaatgactccaacttattgatagtgttttatgttcagataatgcccgatga

SEQ ID NO: 832153 - DNA, 75 bp, synthetic construct
  source 1..75: mol_type = other DNA
tgaggcagaaatcaatcgtatggcccgtgaacgtaaattacgtgaggaagcggcactgatgaaatatacagaaga

SEQ ID NO: 832154 - DNA, 75 bp, synthetic construct
  source 1..75: mol_type = other DNA
gaactgaaaaaacaggttgatctggcaaccagccagcttgaagcctataagcaggaagtgctggataccaaaaga

SEQ ID NO: 832155 - DNA, 75 bp, synthetic construct
  source 1..75: mol_type = other DNA
agcgtattgctatggcagctaaagcaaaagaatcagcggaacctgacgacgcagaacgtaaatttcggagaggga

SEQ ID NO: 832156 - DNA, 75 bp, synthetic construct
  source 1..75: mol_type = other DNA
catcacaaaccgactcgcaacatattgcggcgaaaaattcaatgatttattgcaggagagaaccaaaggcgagct

SEQ ID NO: 832157 - DNA, 75 bp, synthetic construct
  source 1..75: mol_type = other DNA
accgactcgcaacatattgcggcgaaaaaattcaatgatttattgcaggagagaaccaaaggcgagctgaaataa

SEQ ID NO: 832158 - DNA, 75 bp, synthetic construct
  source 1..75: mol_type = other DNA
gctatatcgaaatttcaccggaagttaatctcgatcttggggctgtatattctcaaaaagataaagcatgggaat

SEQ ID NO: 832159 - DNA, 75 bp, synthetic construct
  source 1..75: mol_type = other DNA
tcctcgtcacgccggatacccgcgtagcgacggcttacatcctcaaccgcgtggaagatggcgaatacggtgtag

SEQ ID NO: 832160 - DNA, 75 bp, synthetic construct
  source 1..75: mol_type = other DNA
ataaatcgctcgatgaagcctcactcagcctgcgcgccggttccctgcgtaccattacgcacatcctgctgccgc

SEQ ID NO: 832161 - DNA, 75 bp, synthetic construct
  source 1..75: mol_type = other DNA
gcgaacagtaaaagagcggcgtgacgaaagaaaaaaagccagggacgcaatggagaacaccaagcccagggataa

SEQ ID NO: 832162 - DNA, 75 bp, synthetic construct
  source 1..75: mol_type = other DNA
gttattcagtgcaaaaatagaacctgtcacactggggatttcttatgcttatcaatacactgatattaaagatgg

SEQ ID NO: 832163 - DNA, 75 bp, synthetic construct
  source 1..75: mol_type = other DNA
tagatgactcaccattacggattaatttgtatggtaaggaaaatactgtggaaaaaaaaagtaacgccagtgacg

SEQ ID NO: 832164 - DNA, 75 bp, synthetic construct
  source 1..75: mol_type = other DNA
tgcgatgtctacccttactcagccagctcttcaacgctggatctcaaacaagtcaccgacgaattcgatattgtg

SEQ ID NO: 832165 - DNA, 75 bp, synthetic construct
  source 1..75: mol_type = other DNA
agcttgcgcccttgatgacgtaaaccagttcaattacgcaaacatgctcgatgatttagcgcagaagattcgcaa

SEQ ID NO: 832166 - DNA, 75 bp, synthetic construct
  source 1..75: mol_type = other DNA
atgaaacaaatgacactaattgagatggatggatttctgaaaggtaaatgcatcccaagtgatttaaaggttaac

SEQ ID NO: 832167 - DNA, 75 bp, synthetic construct
  source 1..75: mol_type = other DNA
tgcgacctataaagcgacattaccaatcattggacgtctgatgaacatcagtcaggctatgattataccactttt

SEQ ID NO: 832168 - DNA, 75 bp, synthetic construct
  source 1..75: mol_type = other DNA
tatgtgggttacgccagcgagaagttggatatggtaaccaccggtgtggttaacagctacgccacctacgaaatt

SEQ ID NO: 832169 - DNA, 75 bp, synthetic construct
  source 1..75: mol_type = other DNA
cagtcagtctgctcctgaaaacagcaaactgggtgtgcgctggaccggcggtaacctgctggccaatgctaccag

SEQ ID NO: 832170 - DNA, 75 bp, synthetic construct
  source 1..75: mol_type = other DNA
tggataaaatcacatcatcatattttattaaagctgatattttattcagaacaattatatttcaaaacattgcca

SEQ ID NO: 832171 - DNA, 75 bp, synthetic construct
  source 1..75: mol_type = other DNA
ggaaacattattgagacaaacagcaatggctggttcccggatacagatggtgcgctcatcaccggactgaccttt

SEQ ID NO: 832172 - DNA, 75 bp, synthetic construct
  source 1..75: mol_type = other DNA
aaacgccggatctggaatcgtacttcgagccgacccggaaaactgatacccggacaccggatattggaagctatt

SEQ ID NO: 832173 - DNA, 75 bp, synthetic construct
  source 1..75: mol_type = other DNA
cgtcactgaacgttggcacgctgattggtcatacggcgctgcgtaataaccatatggacgacctgtttcgcccgg

SEQ ID NO: 832174 - DNA, 75 bp, synthetic construct
  source 1..75: mol_type = other DNA
gtcgtgtcggccgtcgggccggtgccgcggggatgctgtttcttttcacccttgccatacccgttcaggcggctg

SEQ ID NO: 832175 - DNA, 75 bp, synthetic construct
  source 1..75: mol_type = other DNA
agcctgttgttttattataagtacgggggtgcttttttccagtaaaatatcagaatacttattttatcaaagtga

SEQ ID NO: 832176 - DNA, 75 bp, synthetic construct
  source 1..75: mol_type = other DNA
ataccaaatcaaagcaaacaaaaagacactgattcttatttaataagaaaagtgagaccattcttgttgttaaaa

SEQ ID NO: 832177 - DNA, 75 bp, synthetic construct
  source 1..75: mol_type = other DNA
agggggcgaatagcgatatcacggagctgaaagggctcactactgcgctttctattgcacagggtggcaccgggg

SEQ ID NO: 832178 - DNA, 75 bp, synthetic construct
  source 1..75: mol_type = other DNA
gtgcatgaaccctgggcggtggcgattgccgggcgaatacatgcgctatggggcgctgacgcgtcggtggtcgcc

SEQ ID NO: 832179 - DNA, 75 bp, synthetic construct
  source 1..75: mol_type = other DNA
catatgcagtcgagcggctcgttaacatttggagattgctacatatcacttaacgagttcgccgcccagcttcgc

SEQ ID NO: 832180 - DNA, 75 bp, synthetic construct
  source 1..75: mol_type = other DNA
gacaatccgcgagtttccgacgctggctgcggcgcaggcagacgcagctgcgggtaatataccggtgggatcaac

SEQ ID NO: 832181 - DNA, 75 bp, synthetic construct
  source 1..75: mol_type = other DNA
tctggagaagcttgacctgctaacgggttatttgtatgaaatacagaatgctgatggcagttggcaacaatctgt

SEQ ID NO: 832182 - DNA, 75 bp, synthetic construct
  source 1..75: mol_type = other DNA
gccgtaaccgtgcagccaccgcgcccgaaaccgtggggaaaaaacctacgtgttgctgccttctttcgagaaagt

SEQ ID NO: 832183 - DNA, 75 bp, synthetic construct
  source 1..75: mol_type = other DNA
atcctttaccgcctccaccgggcggttttttttattctgaaccctaaaaaaagaaacacggacactgataatgcc

SEQ ID NO: 832184 - DNA, 75 bp, synthetic construct
  source 1..75: mol_type = other DNA
gtcccgccgctcaagttggacagaaaacacaatacagttcattgtcgcgagtgggatagtaatttacgacattag

SEQ ID NO: 832185 - DNA, 75 bp, synthetic construct
  source 1..75: mol_type = other DNA
ggggtgtcagcattcaaaaatgctaacatttcgcctgagtcaaaccttggtaaatttttgcaggatgtgcgagat

SEQ ID NO: 832186 - DNA, 75 bp, synthetic construct
  source 1..75: mol_type = other DNA
aactgatacagcaccgttcacacaatgagtcattgatgaaatcggtacgtgcaaaattggcatgggataacaaaa

SEQ ID NO: 832187 - DNA, 75 bp, synthetic construct
  source 1..75: mol_type = other DNA
ctccaccagttcatgggatgtctaaaaatctactactttttaaggaaaaaattgaattcttagagggtaaggttg

SEQ ID NO: 832188 - DNA, 75 bp, synthetic construct
  source 1..75: mol_type = other DNA
ggtgagaaaaagcaaattcttatcatggtagataccaatcaaacagtaagagtcgagtttcctagccatggaatc

SEQ ID NO: 832189 - DNA, 75 bp, synthetic construct
  source 1..75: mol_type = other DNA
gcacagcacggtgaatttattcagagggcaaaggtcattgtcgcggactgtaatatcagtgaagaggcactggca

SEQ ID NO: 832190 - DNA, 75 bp, synthetic construct
  source 1..75: mol_type = other DNA
cggctggcccggtgggggcaaccggacctcagggaccgaacgggcgacccgggggagacacaaatccgttttcgt

SEQ ID NO: 832191 - DNA, 75 bp, synthetic construct
  source 1..75: mol_type = other DNA
aaggggagcaaaggcagttatttcttagcaagaaaaatcagtatctagcgataggaaaggttcctgaagatatat

SEQ ID NO: 832192 - DNA, 75 bp, synthetic construct
  source 1..75: mol_type = other DNA
gtgattcaagaaaagttatctgtgagcgacataatgtaaataatggctatatcagcaccagtctgtctcgtctgg

SEQ ID NO: 832193 - DNA, 75 bp, synthetic construct
  source 1..75: mol_type = other DNA
agcgtatgaatgaaatgataaaggaaattattccgcatcatattaaatggcatgccggcacgagtaatatctgtg

SEQ ID NO: 832194 - DNA, 75 bp, synthetic construct
  source 1..75: mol_type = other DNA
acggagagatgatcaaaaccaaaggagagctgatggatgttccggcgaacagctggatcgatgttcgcctggata

SEQ ID NO: 832195 - DNA, 75 bp, synthetic construct
  source 1..75: mol_type = other DNA
caattaacggaaataccgcaaccggtactggcacaaactggacggcaccagtcagccaggttcgcgctggccaga

SEQ ID NO: 832196 - DNA, 75 bp, synthetic construct
  source 1..75: mol_type = other DNA
ctctctccagcaaccaatgccaccagggattaagcccccgcaacattgcgcctcaccggaacctttccggcttgc

SEQ ID NO: 832197 - DNA, 75 bp, synthetic construct
  source 1..75: mol_type = other DNA
agcaggaagggagcgaagacggtcacggtgtggtgttcccggctgaactggtggggctgctggacaggctggagg

SEQ ID NO: 832198 - DNA, 75 bp, synthetic construct
  source 1..75: mol_type = other DNA
ggtcgagagccgctacctctacgacccgctgggacggcgaatggcgaaacgggtatggcggcgggagcgtgacct

SEQ ID NO: 832199 - DNA, 75 bp, synthetic construct
  source 1..75: mol_type = other DNA
atgtgcggcagcagtctgtttcagaatgcgggtgtcgaaccgggcattaaagataattactggtcggtctccgat

SEQ ID NO: 832200 - DNA, 75 bp, synthetic construct
  source 1..75: mol_type = other DNA
taccaaaagatattttcatacatctgcgcgccttgatgatgcttctgattttgttggcagcaatgggaatgtcgt

SEQ ID NO: 832201 - DNA, 75 bp, synthetic construct
  source 1..75: mol_type = other DNA
tatctgatattcataccctttgggctaaacctccatttggtttaaaaaaaggtgttataccgataatatttatgg

SEQ ID NO: 832202 - DNA, 75 bp, synthetic construct
  source 1..75: mol_type = other DNA
ctaggtaagttccttgaagcatcagctttaggaaatggcgatgatatttatttttaccaagagcttgctgaatct

SEQ ID NO: 832203 - DNA, 75 bp, synthetic construct
  source 1..75: mol_type = other DNA
agcgaataataaatccccaattttcttttaacttatctgttgtgttaagatgtcctagagccgttactgattatt

SEQ ID NO: 832204 - DNA, 75 bp, synthetic construct
  source 1..75: mol_type = other DNA
aatggtagatgcgtctgttaaaccattcaggggaatatttgttgataaaagccaactcccggaaatggcaaagca

SEQ ID NO: 832205 - DNA, 75 bp, synthetic construct
  source 1..75: mol_type = other DNA
atggccaaaatgattccggcatttggacccattgataataatagtcatggggaaaaaacagtctatacactgtta

SEQ ID NO: 832206 - DNA, 75 bp, synthetic construct
  source 1..75: mol_type = other DNA
agaggtcaacgggcgaattgagatcctggacggcacacgtcgccgggcagcctgcatttataacaatgttaaatt

SEQ ID NO: 832207 - DNA, 75 bp, synthetic construct
  source 1..75: mol_type = other DNA
aatttgaattaaatgaattaggctcagggatacatctggtaataaaaaattgtagcatatgtaaaaagatggtgc

SEQ ID NO: 832208 - DNA, 75 bp, synthetic construct
  source 1..75: mol_type = other DNA
ttaatgaaattttacaattgaaagaaagttctgtactgcctgatgagattactgtccttgttcctacggatttag

SEQ ID NO: 832209 - DNA, 75 bp, synthetic construct
  source 1..75: mol_type = other DNA
gtgctggcgagcctcggtgggctggtttcctgtgcggcaaaggttcatttcaaagagcaggtacacgctatgaaa

SEQ ID NO: 832210 - DNA, 75 bp, synthetic construct
  source 1..75: mol_type = other DNA
atatcgagtaaatcacaaagctggactgtacgctggggaaatcaggcagatcaacaatgtcagtttgcttttagt

SEQ ID NO: 832211 - DNA, 75 bp, synthetic construct
  source 1..75: mol_type = other DNA
gccttacgagatgaaaatctctccttactggcaaatggtgttgatccccaagtccataacaataataaggcgaag

SEQ ID NO: 832212 - DNA, 75 bp, synthetic construct
  source 1..75: mol_type = other DNA
aactcgcagaccaattcttccaaaagcatattagtccagatgttgacatcaaacagctacgagatgacatcccca

SEQ ID NO: 832213 - DNA, 75 bp, synthetic construct
  source 1..75: mol_type = other DNA
cttccgtcccgcccgccgctcagcgcaatcggctgttgctgaatgcgattatgactggcggtggctttgtcggta

SEQ ID NO: 832214 - DNA, 75 bp, synthetic construct
  source 1..75: mol_type = other DNA
aagatgtcgccagtatgtcaggtcgcttgctcaatcgctggggcagggtgaagaagcctcagttgctggcaaggc

SEQ ID NO: 832215 - DNA, 75 bp, synthetic construct
  source 1..75: mol_type = other DNA
cgaaatactggttacaaaagacagtattgatattgccgacgcgagacaacttgcaaaagatatacagacagccag

SEQ ID NO: 832216 - DNA, 75 bp, synthetic construct
  source 1..75: mol_type = other DNA
agcagcgcccgacgcgcggtctgtacgataccatcacgttctaccatccatcctttggctatgtccgcctggtcg

SEQ ID NO: 832217 - DNA, 75 bp, synthetic construct
  source 1..75: mol_type = other DNA
tgctattgcaaacatcattattatctttgttaatattatcggtgggctatcagtaggagtaggccaaaatggaat

SEQ ID NO: 832218 - DNA, 75 bp, synthetic construct
  source 1..75: mol_type = other DNA
attgacgccgatctacgcgccgggatcattgatgcagatttagcaaaagaacgtcgtagcgtattagaacgagag

SEQ ID NO: 832219 - DNA, 75 bp, synthetic construct
  source 1..75: mol_type = other DNA
gttatcgcagacaaggcgcataagcacgccaccagcgaaacagaatatgccggggctttcgttcctcactcactg

SEQ ID NO: 832220 - DNA, 75 bp, synthetic construct
  source 1..75: mol_type = other DNA
actgccgccattgattattggtgcgcagagaaaaataacatataaaaacattacaggaatgaccagggaaacaga

SEQ ID NO: 832221 - DNA, 75 bp, synthetic construct
  source 1..75: mol_type = other DNA
caaaaacattgaagaaaatgatattgatgaactgaagcgtaattattcacgacttgaatctgtcagtcatccgga

SEQ ID NO: 832222 - DNA, 75 bp, synthetic construct
  source 1..75: mol_type = other DNA
attcaaaagcgaaggaataaaccagagcggtatccggctccagataaaaaccctctgcgaccagatgaacgccgc

SEQ ID NO: 832223 - DNA, 75 bp, synthetic construct
  source 1..75: mol_type = other DNA
atggctgtttatgatacgtacggtgcgcagcagttctattttcctaatgtgctgaagtatgaccctgatcagtta

SEQ ID NO: 832224 - DNA, 75 bp, synthetic construct
  source 1..75: mol_type = other DNA
ggcgaaacattttaggtagtgatagctcagattttatccgtagcctcgaaaccaaagaagcagagaaggtattca

SEQ ID NO: 832225 - DNA, 75 bp, synthetic construct
  source 1..75: mol_type = other DNA
gtaccagccgacttatacttcttgaggcggacgccggagaaattataacgagttttagtgaattcgttattggag

SEQ ID NO: 832226 - DNA, 75 bp, synthetic construct
  source 1..75: mol_type = other DNA
tggccgcattggagtacgacgacgatgagccaattgacggtgtaactcactggatgccgttgccagaaccgccgc

SEQ ID NO: 832227 - DNA, 75 bp, synthetic construct
  source 1..75: mol_type = other DNA
aacgtcaaccaactatccggtaactccggatggttggataagctgtagtgagcgaatgccggataccaaaacagc

SEQ ID NO: 832228 - DNA, 75 bp, synthetic construct
  source 1..75: mol_type = other DNA
gcagcggtcagcgggcgctaaggcagagctggcactggcggagaaactgggacatgcggtgatttatcaggaggt

SEQ ID NO: 832229 - DNA, 75 bp, synthetic construct
  source 1..75: mol_type = other DNA
aatcctataaaataataaaatcttcaaaaagccagttaacattggaggttattaacgaaatcggaagcaatttca

SEQ ID NO: 832230 - DNA, 75 bp, synthetic construct
  source 1..75: mol_type = other DNA
agggctgctgttcctttaccaggactgggaaagcgtgtctgttgcgatccaccgtaagcgtcacccattaacgga

SEQ ID NO: 832231 - DNA, 75 bp, synthetic construct
  source 1..75: mol_type = other DNA
aatgtaaaggattctacttatataaaggcttccacgttacttcaggaaacgaggactggggagctgaaccgaggt

SEQ ID NO: 832232 - DNA, 75 bp, synthetic construct
  source 1..75: mol_type = other DNA
ggcagaatatgaccgctgtcatcgagccgttttatcccaaggcgggcaatggcgacggccctatccgctggagac

SEQ ID NO: 832233 - DNA, 75 bp, synthetic construct
  source 1..75: mol_type = other DNA
ttgctcaggacgtactaaattcatcaataaacgattacaacaagcgacaacaggaaggaattgaactcagacaga

SEQ ID NO: 832234 - DNA, 75 bp, synthetic construct
  source 1..75: mol_type = other DNA
atgggacgaaaaatttctgcattattaaagataataggagttacaggttctttatgcgggatcattgcgacagca

SEQ ID NO: 832235 - DNA, 75 bp, synthetic construct
  source 1..75: mol_type = other DNA
atgaacaaatatatacgttcgacgggactgtatgcgtttttatttccagcaagtttaaaagcacccgggcagaca

SEQ ID NO: 832236 - DNA, 75 bp, synthetic construct
  source 1..75: mol_type = other DNA
ggggaagatggctgacaaaccggcgcttgctgctttgcagcagaaggttgatgcgctggataagcaacagagtga

SEQ ID NO: 832237 - DNA, 75 bp, synthetic construct
  source 1..75: mol_type = other DNA
aaaatgataaatccgtctggtggggatggtaactgttcagggtgtgcgcttcatgcttgtatggctatgttaggg

SEQ ID NO: 832238 - DNA, 75 bp, synthetic construct
  source 1..75: mol_type = other DNA
aactcgtttaccgcagcgcatactataaatggatcgcagcaagttgccgttattgaaagtaaaggcgacaaaacc

SEQ ID NO: 832239 - DNA, 75 bp, synthetic construct
  source 1..75: mol_type = other DNA
atgccgctggcggcggcactgatgaacctgctggttaacctgtcccagcgattcagcattcagtacctggaacag

SEQ ID NO: 832240 - DNA, 75 bp, synthetic construct
  source 1..75: mol_type = other DNA
gtcatctgatgatggcttttcggtaattgattatcatcaggtcgccagtgaagcgggggagtggcaggatattca

SEQ ID NO: 832241 - DNA, 75 bp, synthetic construct
  source 1..75: mol_type = other DNA
aatcagtattcaaaggaagaatataataatcttatcgctcaaataaatgagcgttataaagatccaaagcaacca

SEQ ID NO: 832242 - DNA, 75 bp, synthetic construct
  source 1..75: mol_type = other DNA
acaacacatacgcgaagccatcgtggcgatggagcgtaataatcagaataactactgggaagcgttgggtcgggt

SEQ ID NO: 832243 - DNA, 75 bp, synthetic construct
  source 1..75: mol_type = other DNA
atcttttgaaatcccctggaacccgaacacccgtaccgaggtgagcaccctctgcatcagccagtttcgctacag

SEQ ID NO: 832244 - DNA, 75 bp, synthetic construct
  source 1..75: mol_type = other DNA
tcatataatgaacgtgttatttcttgggtagacgtttcatatacagaaaatctaactaatattgatgctaaaatt

SEQ ID NO: 832245 - DNA, 75 bp, synthetic construct
  source 1..75: mol_type = other DNA
gcggtcagcaggtgctaaggcagaactggcgctggcggagaaactggggcatgcagttattttccaggaggaggt

SEQ ID NO: 832246 - DNA, 75 bp, synthetic construct
  source 1..75: mol_type = other DNA
ttctgttcttctttgcttgtgggcatttgttggtgtcgaatctgcggcagttagttcagatcttgtccataatcc

SEQ ID NO: 832247 - DNA, 75 bp, synthetic construct
  source 1..75: mol_type = other DNA
cttgtgcttgttcttatacctgtagttggaacggcattattcggttggggatcattcgatattgaagtttatcgc

SEQ ID NO: 832248 - DNA, 75 bp, synthetic construct
  source 1..75: mol_type = other DNA
cgggcatcgcgaagttaacccccggaggaaatgcagcggggtggtatcctgtatttgaaggggcaacattagaag

SEQ ID NO: 832249 - DNA, 75 bp, synthetic construct
  source 1..75: mol_type = other DNA
atgattaaaaatggtgctagatttattagtaccattattttttttgggtggctaatgtttattacatcagataaa

SEQ ID NO: 832250 - DNA, 75 bp, synthetic construct
  source 1..75: mol_type = other DNA
cagaacaaccagaccgggacattgttaccagcaagtaataagcacgcatggatgtgcggtaatgactccaactta

SEQ ID NO: 832251 - DNA, 75 bp, synthetic construct
  source 1..75: mol_type = other DNA
atgacagaaatcacacctgcagaacaaatccgactgactatcatcaagaaagttaactacgacactgcagcggcc

SEQ ID NO: 832252 - DNA, 75 bp, synthetic construct
  source 1..75: mol_type = other DNA
gcggtaaacgtgtcgtgatgggattttggtgtctcgaaagcaaaggagacaccaaaatgaactattcaaacatta

SEQ ID NO: 832253 - DNA, 75 bp, synthetic construct
  source 1..75: mol_type = other DNA
tggtcatggggtttatttcagtgaatgccgcatctgcagctcaggaaattaaccatgcagatgggaaagaaaaga

SEQ ID NO: 832254 - DNA, 75 bp, synthetic construct
  source 1..75: mol_type = other DNA
atgacgccctgtatcttgatacggatagcctcatcggctgggatttttccggcatgaacttacatcgtgccattt

SEQ ID NO: 832255 - DNA, 75 bp, synthetic construct
  source 1..75: mol_type = other DNA
gcaagggttatatacatggtcattctgcaggggggacaaatccatccttagttgaggctatgcactttgaaaagc

SEQ ID NO: 832256 - DNA, 75 bp, synthetic construct
  source 1..75: mol_type = other DNA
ggatttaaaaggtcagaaggtgcaggcggggctggctccggcgttaatcagccgtatgcgccagcatttacaggc

SEQ ID NO: 832257 - DNA, 75 bp, synthetic construct
  source 1..75: mol_type = other DNA
gtacggcgatgttgttccttggcgttatccagccagacgggaactgcaattcggggagtggcagcgcaaggacat

SEQ ID NO: 832258 - DNA, 75 bp, synthetic construct
  source 1..75: mol_type = other DNA
caagtattgtcgttatatcttcatgattggtttgtttacgcttttgcacgcagtaataattttacatggttcatt

SEQ ID NO: 832259 - DNA, 75 bp, synthetic construct
  source 1..75: mol_type = other DNA
tggccacaccggaaggttttatccaggcagttcgtcaggctgctgaagcatacggtttaacggctaccgacaagg

SEQ ID NO: 832260 - DNA, 75 bp, synthetic construct
  source 1..75: mol_type = other DNA
atggcgcaggagataattgccgtatagatattgggtacgtcacgggaaccagcaacaacccgcttcaaatgaaaa

SEQ ID NO: 832261 - DNA, 75 bp, synthetic construct
  source 1..75: mol_type = other DNA
gcgatcatccctttggtgtctggcaattacgcaataaagaaggccatcatgcgattaaagtcaccggcccactgt

SEQ ID NO: 832262 - DNA, 75 bp, synthetic construct
  source 1..75: mol_type = other DNA
gtcaacaaaagacacttgaatcattattgaatcacagagatgagctaaaaaataaatttaccttgctaaaatctc

SEQ ID NO: 832263 - DNA, 75 bp, synthetic construct
  source 1..75: mol_type = other DNA
ttaataattttaaatcattcaaagatgattttactattaacttaggatccaccgatctgtttattttagatggtc

SEQ ID NO: 832264 - DNA, 75 bp, synthetic construct
  source 1..75: mol_type = other DNA
ttctcgtgaatttgtgactccgcaacaactgggtgaactggcgctgtttctctgttcggatgcggcagcacaagt

SEQ ID NO: 832265 - DNA, 75 bp, synthetic construct
  source 1..75: mol_type = other DNA
ttgtgacggggtcctccagcggtattggactcggtattgctcagacactggcaaaagccggcgcgcaagtgatcc

SEQ ID NO: 832266 - DNA, 75 bp, synthetic construct
  source 1..75: mol_type = other DNA
ctggctcattgtaatatcctcgcgaatacactgtttggtgcgatttcaggttcagccgttgcggtcagccgcagc

SEQ ID NO: 832267 - DNA, 75 bp, synthetic construct
  source 1..75: mol_type = other DNA
atccatagagttagtaaaattgacagtttttgcagcaacgggagaggctgattgtgatagcacagcactggcctt

SEQ ID NO: 832268 - DNA, 75 bp, synthetic construct
  source 1..75: mol_type = other DNA
cgccaatgtgtctggccagatagcacctccacctcactcgccgcgctcctcaacacccgtgaaaattcgcccata

SEQ ID NO: 832269 - DNA, 75 bp, synthetic construct
  source 1..75: mol_type = other DNA
gtgttccgtcagcctttgacgccaattatgggttcgattcccacattcattcctgaaatgaatactggttttaac

SEQ ID NO: 832270 - DNA, 75 bp, synthetic construct
  source 1..75: mol_type = other DNA
ttcagtgtacgggaattcgtttgcgagctgaactgataatattcctttgttctcttcttaaatctttatttttca

SEQ ID NO: 832271 - DNA, 75 bp, synthetic construct
  source 1..75: mol_type = other DNA
gcgccagacaggataggagaaggaaaaacatgggtttatcaacgagatacaatggttgaaagaggtgataacagc

SEQ ID NO: 832272 - DNA, 75 bp, synthetic construct
  source 1..75: mol_type = other DNA
aggtggctatcccttacgcggaaaacggcaagttggtgactttcggcatcgtgcctgatacgccggaaacgggat

SEQ ID NO: 832273 - DNA, 75 bp, synthetic construct
  source 1..75: mol_type = other DNA
caataatcatggctggtggggcaggtagtcgtctgtggccactgtcccgcgagctttatccaaaacaattcattc

SEQ ID NO: 832274 - DNA, 75 bp, synthetic construct
  source 1..75: mol_type = other DNA
cgggctggacagaaacggggcgaacgccaacggccagaccgataccttcgggatttatgccttcgatacgctgac

SEQ ID NO: 832275 - DNA, 75 bp, synthetic construct
  source 1..75: mol_type = other DNA
tattgatggagtttataaaaaagaaatattggaattgaaaataaataaagcccgagatgaatataaaaaatataa

SEQ ID NO: 832276 - DNA, 75 bp, synthetic construct
  source 1..75: mol_type = other DNA
ggattgaaatcagcggttcttgaactggaagataatggaaagctatctcctgagctcctggatacagcatttgag

SEQ ID NO: 832277 - DNA, 75 bp, synthetic construct
  source 1..75: mol_type = other DNA
atgaatgactgtccacgacactatacccaaaagaaagcggcttatcggtcagtttcacctggtttacgtaaaaac

SEQ ID NO: 832278 - DNA, 75 bp, synthetic construct
  source 1..75: mol_type = other DNA
aggtcaacgcgaagaagagtgctgtagcacgccctgaaacgcgcaagttccctggatacagcttcataagggggc

SEQ ID NO: 832279 - DNA, 75 bp, synthetic construct
  source 1..75: mol_type = other DNA
tggcgaaaaccggttgggtggcggcgattcctttcctcgcggcggcagtcgggatgtgggttaacggtattgttg

SEQ ID NO: 832280 - DNA, 75 bp, synthetic construct
  source 1..75: mol_type = other DNA
tgaatactaatgttttaatcacaaatgcaaaagatggtgtgtcttttaaacgcagtaacgatttacaagaaatta

SEQ ID NO: 832281 - DNA, 75 bp, synthetic construct
  source 1..75: mol_type = other DNA
ctgcggccgggtgacggaagagcgtgactggggcggcgtggtctggcgttaccgctatgacgccgatggcctctg

SEQ ID NO: 832282 - DNA, 75 bp, synthetic construct
  source 1..75: mol_type = other DNA
ctggacaatggagtacggcccgttcgatttgccggtggcgcgaacggacggtgaaggccaccgctggcagtaccg

SEQ ID NO: 832283 - DNA, 75 bp, synthetic construct
  source 1..75: mol_type = other DNA
agcttatgccggcgattggcgagctggcacaaagccttacgccggttattcgccagttcagcgcctggctacgcg

SEQ ID NO: 832284 - DNA, 75 bp, synthetic construct
  source 1..75: mol_type = other DNA
ggaaaccggaatgtacctggtgagtgatccgctggggttgcaggggggtgagcagacttaccggtatgtgcctaa

SEQ ID NO: 832285 - DNA, 75 bp, synthetic construct
  source 1..75: mol_type = other DNA
agggccgacgggccattgaataccactaccccgatgaacacaccgttatccgctgtatccagccaccggaagatg

SEQ ID NO: 832286 - DNA, 75 bp, synthetic construct
  source 1..75: mol_type = other DNA
taccgccagggtcaacggtctggaggaaaccatcctctacagccgggacgccgcaggccgcctggcagaaatcat

SEQ ID NO: 832287 - DNA, 75 bp, synthetic construct
  source 1..75: mol_type = other DNA
ctggaaggtatggctgaactggccgccaccatgcagatcgccatgaaaaacggtgccagcgccagtgcggcgacg

SEQ ID NO: 832288 - DNA, 75 bp, synthetic construct
  source 1..75: mol_type = other DNA
acttcagcaagtgccatcaaatatgacacttaatggggttgctttgctattgtcaatgtttgtaatgatgccggt

SEQ ID NO: 832289 - DNA, 75 bp, synthetic construct
  source 1..75: mol_type = other DNA
ccctttaaacttcggattgtgggcagcctccataattacgggagttttactttatgaagttaacttcggattaag

SEQ ID NO: 832290 - DNA, 75 bp, synthetic construct
  source 1..75: mol_type = other DNA
gtgatgaattggtttggtgttgagatgcctgcgagttttagcgagttcggcagcaatatactgggtagtctggcc

SEQ ID NO: 832291 - DNA, 75 bp, synthetic construct
  source 1..75: mol_type = other DNA
tccgctctccgcctggaggaaaatagccgcagccgcgctaatctgatggagaaaacccaaacatttgccgggcaa

SEQ ID NO: 832292 - DNA, 75 bp, synthetic construct
  source 1..75: mol_type = other DNA
taccgtgcagggtaacggacaaaacaccactaaagagattcagaacgtgttgacgatgagtaaacgcgaactgga

SEQ ID NO: 832293 - DNA, 75 bp, synthetic construct
  source 1..75: mol_type = other DNA
ctggtgtttaacggctttgagctgataagccagcagttcagccgggtacggcagccgcatccgtccgtggccccg

SEQ ID NO: 832294 - DNA, 75 bp, synthetic construct
  source 1..75: mol_type = other DNA
gatagagatgataccattaataatggtgagctattgttccctgtatctcaatatgataaggggacgggagggatt

SEQ ID NO: 832295 - DNA, 75 bp, synthetic construct
  source 1..75: mol_type = other DNA
aaatcactcggcagtgcatgggaagggctgcgcatccgcattgcagatctgattgacggtccgctgcgttctgtc

SEQ ID NO: 832296 - DNA, 75 bp, synthetic construct
  source 1..75: mol_type = other DNA
ccattcaacaggccatcaggcgcaccgaacagtacaacaaccagcttgaacgcgaacggcagtcgcttgcgcgtg

SEQ ID NO: 832297 - DNA, 75 bp, synthetic construct
  source 1..75: mol_type = other DNA
cgatactaccagaggatttaacacaggggaaatatagaaaaatttatctgcttggagatggtactgccggtcgac

SEQ ID NO: 832298 - DNA, 75 bp, synthetic construct
  source 1..75: mol_type = other DNA
ataccagtattttgattactaaagcgaaagagggggcatattattctagaaataatgaattgttggaggtaaaaa

SEQ ID NO: 832299 - DNA, 75 bp, synthetic construct
  source 1..75: mol_type = other DNA
catacgatgccggttatagcggaaccagtatgacgggcgggaaaggcgctgcagggatttgtattatcgaggagt

SEQ ID NO: 832300 - DNA, 75 bp, synthetic construct
  source 1..75: mol_type = other DNA
taaagattttagtaatcatgatattggggggattttaaaagttactggagagactggttcttcagtcaacattca

SEQ ID NO: 832301 - DNA, 75 bp, synthetic construct
  source 1..75: mol_type = other DNA
ccggtaactccggatggttgggttatggtgccgaaggaaccaactcaggccatgattaaagcgtggctatcagag

SEQ ID NO: 832302 - DNA, 75 bp, synthetic construct
  source 1..75: mol_type = other DNA
cgcctgacccgtcgggcggggaatgcgcgcccggcaattcaacatgtgctggatttaaaaggtcagaaggtgcag

SEQ ID NO: 832303 - DNA, 75 bp, synthetic construct
  source 1..75: mol_type = other DNA
aaaatcaatccgccgaagtctgcggaaaatggcaatggcaccggaggtgataaacccaaagacaataaaccgctc

SEQ ID NO: 832304 - DNA, 75 bp, synthetic construct
  source 1..75: mol_type = other DNA
ttgcaacacatcattagtggtacgctggcgcttattaatacaataccggattcccgcaaggtgaaatgggtgttg

SEQ ID NO: 832305 - DNA, 75 bp, synthetic construct
  source 1..75: mol_type = other DNA
aaactgagaaaagaacttgaaggcgcgcgcggtgaggctgaacgcacagcaaaggttatggccaacaaccttgac

SEQ ID NO: 832306 - DNA, 75 bp, synthetic construct
  source 1..75: mol_type = other DNA
ccattttactgatccactttatatgtgttgctgggatgaagaatctccttttggcagcgatgaaggtgctgatgc

SEQ ID NO: 832307 - DNA, 75 bp, synthetic construct
  source 1..75: mol_type = other DNA
cgctactattttgatgatgaagaaattgggttacatgttaaaacgtcacacccaaacttccagtgccattttact

SEQ ID NO: 832308 - DNA, 75 bp, synthetic construct
  source 1..75: mol_type = other DNA
cattagtttcattgggagcagtaacaaaacacgtcaataataattgcccgaagcgtattcatagattaggatacg

SEQ ID NO: 832309 - DNA, 75 bp, synthetic construct
  source 1..75: mol_type = other DNA
aagttgtctgaatggggcagcagtaaacaatcagagagttattccatccacagcggtgctccggtgcaggcaaat

SEQ ID NO: 832310 - DNA, 75 bp, synthetic construct
  source 1..75: mol_type = other DNA
caccgatgctaacgataatacgcttgccggacaggcggtcagcgtgttggcaggcaacagcgcaacggttgcttc

SEQ ID NO: 832311 - DNA, 75 bp, synthetic construct
  source 1..75: mol_type = other DNA
ggagctactgattgggccgcggtgccaagcacaaacgcgatattcaaatgcattaaaggaccggctggtaaagtg

SEQ ID NO: 832312 - DNA, 75 bp, synthetic construct
  source 1..75: mol_type = other DNA
gatggtagtgccaatatcgacctgccgggcgtgaataaagcaggtaatcagagcactaccggtaatgctgcaacc

SEQ ID NO: 832313 - DNA, 75 bp, synthetic construct
  source 1..75: mol_type = other DNA
aaacactattggcgcatccgctgacgcgtctgcaccagcgcgttctgcccgacaggaatattcaccggaatttga

SEQ ID NO: 832314 - DNA, 75 bp, synthetic construct
  source 1..75: mol_type = other DNA
attaaacttagttaatatattgttcgcagctataatattactatgtttgtctttgtttagtggctatgcattcgg

SEQ ID NO: 832315 - DNA, 75 bp, synthetic construct
  source 1..75: mol_type = other DNA
gctggcgttaaaacgtgtcgatccgccgaagctgggtggcttgctgggcgacatcatcacgatggtagacggact

SEQ ID NO: 832316 - DNA, 75 bp, synthetic construct
  source 1..75: mol_type = other DNA
taaccggaggaaatctcaaaggcggtttaacggctactggtgagatcatttcaaaatcggcgaatggtcagcgca

SEQ ID NO: 832317 - DNA, 75 bp, synthetic construct
  source 1..75: mol_type = other DNA
cattcgctcccgaagagattacgctgatgcggcatggtcagcgtgggcgcaggtatatacatcaagggactccat

SEQ ID NO: 832318 - DNA, 75 bp, synthetic construct
  source 1..75: mol_type = other DNA
cggcacggtggagatatctgtaaccagccagacggcgggaatcagtgcagtcactgccagcatcaacagcagcag

SEQ ID NO: 832319 - DNA, 75 bp, synthetic construct
  source 1..75: mol_type = other DNA
ggttatcacttttatcgagaaaggtttgcagaacgcggatttttttataaggttcctgctgtgctaagggattat

SEQ ID NO: 832320 - DNA, 75 bp, synthetic construct
  source 1..75: mol_type = other DNA
tggcagacggttcgacggcgaacatgctgcgggtgagggtgacggatgcgttcggtaatgcgcttggcggccaga

SEQ ID NO: 832321 - DNA, 75 bp, synthetic construct
  source 1..75: mol_type = other DNA
ggttcagaggcggacggtgcgacggcgaacacgctgcgggcgagggtgaccgatgcattcggtaatgcgcttgcc

SEQ ID NO: 832322 - DNA, 75 bp, synthetic construct
  source 1..75: mol_type = other DNA
ctgaagcgctgatgctcgcgctgggggtgtcgcacagcaccttgccgattgaacagtacgatgttgggccgcgtc

SEQ ID NO: 832323 - DNA, 75 bp, synthetic construct
  source 1..75: mol_type = other DNA
tgttaccatatcttatggtgtaataatatatgaccatgattcacactcgctagattatcgggaaaggcaaaagga

SEQ ID NO: 832324 - DNA, 75 bp, synthetic construct
  source 1..75: mol_type = other DNA
accgaacaggccaccgccgttggcgcaattcatagcgcggcggataccttctctgcctggctgctggcgggcgtt

SEQ ID NO: 832325 - DNA, 75 bp, synthetic construct
  source 1..75: mol_type = other DNA
ggcacggtggagatcagtgtcaccagccagacggcgggaatcagtgcagtcactgccagcatcaacagcagcagt

SEQ ID NO: 832326 - DNA, 75 bp, synthetic construct
  source 1..75: mol_type = other DNA
gctgcgggcgagggtgaccgatgcattcggtaatacgctgggcgggcagacggtcagcgtgttggcagacaacgg

SEQ ID NO: 832327 - DNA, 75 bp, synthetic construct
  source 1..75: mol_type = other DNA
gcagtgtacttacaaaatgtagaaaaaaaagaaggggaaaaatggagatatgtgggtgatggaatatatgaacgt

SEQ ID NO: 832328 - DNA, 75 bp, synthetic construct
  source 1..75: mol_type = other DNA
acgctagccgggcagacggtcagcgtgttggcggacaacggcgcaacgactgccccgacggtcatcacagagccg

SEQ ID NO: 832329 - DNA, 75 bp, synthetic construct
  source 1..75: mol_type = other DNA
cccctaaatagtgaaatcactattaccgggaaaccaaaagatggtaaagggaataatgttgtattcaaattcaag

SEQ ID NO: 832330 - DNA, 75 bp, synthetic construct
  source 1..75: mol_type = other DNA
atttctgcagattaacggttggcgtgtaaacgggcaaccttcctataccatccttccttttgtagtagtcgattc

SEQ ID NO: 832331 - DNA, 75 bp, synthetic construct
  source 1..75: mol_type = other DNA
tactgtttttcctgcaattttcatctatacattgtctatatattatttgaaaatatttggttcagaaagcagttc

SEQ ID NO: 832332 - DNA, 75 bp, synthetic construct
  source 1..75: mol_type = other DNA
gatgtctctaggatggagtaagtactggggagttttgggggtacttcctgtaacaaatattgttcttttttctta

SEQ ID NO: 832333 - DNA, 75 bp, synthetic construct
  source 1..75: mol_type = other DNA
acggcgatatgctggatgacatctgccagagacactatggcagtgccgggcttaaccagtcactggcggcggtac

SEQ ID NO: 832334 - DNA, 75 bp, synthetic construct
  source 1..75: mol_type = other DNA
tattggtccgatctatccggcgggagtggaaatcgtgttgccggactgggtgtatgaaccggaggaaaaggagac

SEQ ID NO: 832335 - DNA, 75 bp, synthetic construct
  source 1..75: mol_type = other DNA
gctgtcagaaaatgcggtgacagtggaaatcgcggtgaattattaccgtcagacgctggaggggatcgaactcat

SEQ ID NO: 832336 - DNA, 75 bp, synthetic construct
  source 1..75: mol_type = other DNA
gaggccaccagcgaacaggaagcccgccagcaatctcctgatggctgcgtgatggtattcgctgcccgtattcgc

SEQ ID NO: 832337 - DNA, 75 bp, synthetic construct
  source 1..75: mol_type = other DNA
cctcccgccacgcagccactggcagaagacccggttttgaaaccagtattcgaaaaccacgacgtcattctgcgt

SEQ ID NO: 832338 - DNA, 75 bp, synthetic construct
  source 1..75: mol_type = other DNA
gcgattacacaatactaacttatttaacccaaaatatcatgaaaaagccgttatgaattacatggaatatctggt

SEQ ID NO: 832339 - DNA, 75 bp, synthetic construct
  source 1..75: mol_type = other DNA
caaaccgtccccaaaagataagtatgttgcatatgctattaacattcctgactatgagctggcagccgatgtata

SEQ ID NO: 832340 - DNA, 75 bp, synthetic construct
  source 1..75: mol_type = other DNA
aacactcaaaacatgaacaaatagaaagatcaataaccccaccgcttaaaaattataatgagcgattacacaata

SEQ ID NO: 832341 - DNA, 75 bp, synthetic construct
  source 1..75: mol_type = other DNA
actgaacaagccaccgccgttggtgccatccatagcgcggcagataccttttccgcctggctgctggcgggcgtc

SEQ ID NO: 832342 - DNA, 75 bp, synthetic construct
  source 1..75: mol_type = other DNA
gtctttatccggctggtaaatgctgtccaggaatgccggaaagtgactctgcacggcaacggatgcaaccatacc

SEQ ID NO: 832343 - DNA, 75 bp, synthetic construct
  source 1..75: mol_type = other DNA
aatacggcaggctggcggagaagacggaccgcatcccggaaggggtgatacggatgcacgacgagcggacccacc

SEQ ID NO: 832344 - DNA, 75 bp, synthetic construct
  source 1..75: mol_type = other DNA
agtggcaatcgctcccgcttcacggcctatcaggggtatctggcgaacggcaccgcgctggggaccactgaagaa

SEQ ID NO: 832345 - DNA, 75 bp, synthetic construct
  source 1..75: mol_type = other DNA
ggattgctgttatcgataatcaattgtgcattgctgggtgggatgtacaagatccaaccaaggttgtgcaagaat

SEQ ID NO: 832346 - DNA, 75 bp, synthetic construct
  source 1..75: mol_type = other DNA
gcttttaataatgggattcgtgaaggacatacagtcattatatttacacaacctgatggttcgactaatcgttat

SEQ ID NO: 832347 - DNA, 75 bp, synthetic construct
  source 1..75: mol_type = other DNA
aacgaagacgagatccgcgaagcacacatggcattacatgacgcgatttacgacaccaactacagcgcctacgca

SEQ ID NO: 832348 - DNA, 75 bp, synthetic construct
  source 1..75: mol_type = other DNA
aagacggcaatacggcgtggcgcggggagtatgatgaatggggcaaccagcttaatgaagagaacccgtattacc

SEQ ID NO: 832349 - DNA, 75 bp, synthetic construct
  source 1..75: mol_type = other DNA
aagaatgggtggaatttgggccgcagcacgaagccgtcagcgttacccgttaccgtgaaatggtcgaaactttga

SEQ ID NO: 832350 - DNA, 75 bp, synthetic construct
  source 1..75: mol_type = other DNA
tctattcctacaccaagttttggcagatggtcgggcgcggcacgcgcctgctggaaaccagcaaactcaagcctt

SEQ ID NO: 832351 - DNA, 75 bp, synthetic construct
  source 1..75: mol_type = other DNA
gaatgtgtttttcgggaccagtcctaacccggtatccgcgggcggcacgctgatcgtcggttactggaacgctgc

SEQ ID NO: 832352 - DNA, 75 bp, synthetic construct
  source 1..75: mol_type = other DNA
tctgatctttggttgctggcggcgatgcatctattggcaatctcgcgcggtcatatctttaatgatggtaataag

SEQ ID NO: 832353 - DNA, 75 bp, synthetic construct
  source 1..75: mol_type = other DNA
agtcactggacgggcgcgaactgttcgccattgatacagagcgtttcgcccgccgggtgaatggcgtggatgtgc

SEQ ID NO: 832354 - DNA, 75 bp, synthetic construct
  source 1..75: mol_type = other DNA
tgaaagctgaactggcagcacaggaaaccactttcgaagtagcagcggttgaagttgaagcagttgaagaaaaat

SEQ ID NO: 832355 - DNA, 75 bp, synthetic construct
  source 1..75: mol_type = other DNA
tccccggttgttcaggtagcagtgaagaatgctggtgctgttcacagtgccgatatcatcatcaatttcaataaa

SEQ ID NO: 832356 - DNA, 75 bp, synthetic construct
  source 1..75: mol_type = other DNA
atcgcccaaatccaggcgaaaattacgccagatgttgcatcggttgtttttgatggcagccgtatagcgattacc

SEQ ID NO: 832357 - DNA, 75 bp, synthetic construct
  source 1..75: mol_type = other DNA
acacaggcgcagcgggcggaagaggcccgtaaaccgcacaccgcttcgttatcttcccctgacagtccctgccct

SEQ ID NO: 832358 - DNA, 75 bp, synthetic construct
  source 1..75: mol_type = other DNA
tctgaagctccatgatggcttttcgttaagtggtgtatcggctctttatccttcacgacggccaacccttgggga

SEQ ID NO: 832359 - DNA, 75 bp, synthetic construct
  source 1..75: mol_type = other DNA
acagcgaaagcacgggcgcggatgatcctaaagtcatcgatggccgtcatttccgaccccagcaccgtgaacgta

SEQ ID NO: 832360 - DNA, 75 bp, synthetic construct
  source 1..75: mol_type = other DNA
gcagagcagatcattcgtgatatggagcaaaaacgcgatttctataaacggaaacttgaagagttactgcggcag

SEQ ID NO: 832361 - DNA, 75 bp, synthetic construct
  source 1..75: mol_type = other DNA
ccgttccacaactgtatctgcaagataaaaaaagtagtttagcaccagtgtcgttatggaatgagggtgtagctg

SEQ ID NO: 832362 - DNA, 75 bp, synthetic construct
  source 1..75: mol_type = other DNA
cagacgacctcaccgctatcattgccccggacggtagccgcagtgagacacagtatgatgcgtggggtaaagcca

SEQ ID NO: 832363 - DNA, 75 bp, synthetic construct
  source 1..75: mol_type = other DNA
gtaccgtaaacaccacatcatttgatgtcgataaggggagctatgaaagagtagttgcccagatccgcaaggtgg

SEQ ID NO: 832364 - DNA, 75 bp, synthetic construct
  source 1..75: mol_type = other DNA
ataattttacacttggatttgcggattctttcagctcaagcaaagagctacaacaagcctttgaaaacctaactc

SEQ ID NO: 832365 - DNA, 75 bp, synthetic construct
  source 1..75: mol_type = other DNA
gcggaaaaaggaaacggcggaccagctacgtgctgaaagtaagttgcaaagggagttagggaaacgcttcaccgg

SEQ ID NO: 832366 - DNA, 75 bp, synthetic construct
  source 1..75: mol_type = other DNA
tgagtgatggaagcgccttatacgagcttggcgaccacttcatcacctgcaaattaagccacgataaatgttggc

SEQ ID NO: 832367 - DNA, 75 bp, synthetic construct
  source 1..75: mol_type = other DNA
tatcgccggaccttagtgtgaaaatgcagacgcttttttcctgtttctcctctgaacgtgacttcttcgaatttc

SEQ ID NO: 832368 - DNA, 75 bp, synthetic construct
  source 1..75: mol_type = other DNA
ttgcagcagaatatagatgccctgcaggcaaatatcgccattacacgtgaaacggctgcgattgccattcgaaac

SEQ ID NO: 832369 - DNA, 75 bp, synthetic construct
  source 1..75: mol_type = other DNA
gctgtgggagcatgagacgaagcacgcgtacagcgaacaggggctggcgacccgtcaggagccggacggtctgcc

SEQ ID NO: 832370 - DNA, 75 bp, synthetic construct
  source 1..75: mol_type = other DNA
atacaattgaaaataatggggggtatattactatatctagactgaaaacaatagcttatgatatgaaaaaaaatt

SEQ ID NO: 832371 - DNA, 75 bp, synthetic construct
  source 1..75: mol_type = other DNA
gaaagataagaaactgcgcatatattataacgtcgtttctttcatatcgggtgctctaataaccgttgtaatgaa

SEQ ID NO: 832372 - DNA, 75 bp, synthetic construct
  source 1..75: mol_type = other DNA
ggacttttggcttacggggttaaaggccttaaccttgatgctaactattgggaacgcaacggtgagattggttac

SEQ ID NO: 832373 - DNA, 75 bp, synthetic construct
  source 1..75: mol_type = other DNA
cattaataaatataaatgccaaagtgctgagttgaaattaaaaaatgagcgcttattaaaggagaacaaagatgg

SEQ ID NO: 832374 - DNA, 75 bp, synthetic construct
  source 1..75: mol_type = other DNA
tctttattcagtgaaaacggatatgatcttcagacaggtgcatggttctgtcttatttcttctcatctgcatagt

SEQ ID NO: 832375 - DNA, 75 bp, synthetic construct
  source 1..75: mol_type = other DNA
attattggcagaacttgagtataatcttctttcaggtgaaagaactattatttctgaaatgctacatgaagtaaa

SEQ ID NO: 832376 - DNA, 75 bp, synthetic construct
  source 1..75: mol_type = other DNA
tttaaacgtggatagtaaaaaattaaatattaaaagtaacacaattgatcttgttattacatcgccaccgtattt

SEQ ID NO: 832377 - DNA, 75 bp, synthetic construct
  source 1..75: mol_type = other DNA
atcagtttatggataaaggacaaaatgatatcgtaaatcctttaaaagcattttattgcagtgttttattttata

SEQ ID NO: 832378 - DNA, 75 bp, synthetic construct
  source 1..75: mol_type = other DNA
tgggtggtacgccactggtcgagtacacgcgggaccggctgcaccgtgagacggcccgcagcttcggcggggagg

SEQ ID NO: 832379 - DNA, 75 bp, synthetic construct
  source 1..75: mol_type = other DNA
atgtcagatatcaccgcaaatgttgtggtcagcatgccttcgcaactcttcactatgtctcgctcttttaaagcc

SEQ ID NO: 832380 - DNA, 75 bp, synthetic construct
  source 1..75: mol_type = other DNA
gtgggacctgcgcgaaccgggaaaaccgaagggctgattgatggctggattgtgtacggcatcatctgtgatccg

SEQ ID NO: 832381 - DNA, 75 bp, synthetic construct
  source 1..75: mol_type = other DNA
ggacgtcacctttgaattccctcggggacgagcgacaaaagatcgactctatttctgtgtaccgatgctggatct

SEQ ID NO: 832382 - DNA, 75 bp, synthetic construct
  source 1..75: mol_type = other DNA
ctaccggcagacgtgagcgcaagcttcactctcggacaaggcggttccgccattactgatatcaacggcaaggct

SEQ ID NO: 832383 - DNA, 75 bp, synthetic construct
  source 1..75: mol_type = other DNA
cagagggcaatgcgatagccaacactgaagtaacatttactctgccggaagatgtgaaggcgaacttcacgctga

SEQ ID NO: 832384 - DNA, 75 bp, synthetic construct
  source 1..75: mol_type = other DNA
ccactctcgcaggcgttgcctttggtgagcagacggtcactgcatcactggctaataatggtgccagcgacaaca

SEQ ID NO: 832385 - DNA, 75 bp, synthetic construct
  source 1..75: mol_type = other DNA
tcgggctgatggtcgcctttatactggtgaatacttacaactggaaagaactgccgttgctggcgcatcatgttc

SEQ ID NO: 832386 - DNA, 75 bp, synthetic construct
  source 1..75: mol_type = other DNA
tgactctaacggcgagatgacttggcaagccaaaaactacacacagtattcgtcctactttatgaagattacttg

SEQ ID NO: 832387 - DNA, 75 bp, synthetic construct
  source 1..75: mol_type = other DNA
ctgcaaatggcattccagtggagggtcaggtcatcaactttagcgtaacgccagaaggtgcgacgttaagtggcg

SEQ ID NO: 832388 - DNA, 75 bp, synthetic construct
  source 1..75: mol_type = other DNA
cgatcgcgcctaccagcgtgtacaggctgaaaaagccaaagttctggaatttcaaaacacccatcaccttattag

SEQ ID NO: 832389 - DNA, 75 bp, synthetic construct
  source 1..75: mol_type = other DNA
aatcttccggtttgatgcgcaaactgaataaattaaaaactaaacccaaacattttattgtcgattctaaaggtt

SEQ ID NO: 832390 - DNA, 75 bp, synthetic construct
  source 1..75: mol_type = other DNA
ctcagcaggcattcaacgcctacatccgtgcgcgcgatgctgatttgccatgcatcagctgcggagagaccaacc

SEQ ID NO: 832391 - DNA, 75 bp, synthetic construct
  source 1..75: mol_type = other DNA
tgcaacggttaaagatcagttcgacaatgaggtgaataatcttccggtaacattcagctcagcctcttcaggact

SEQ ID NO: 832392 - DNA, 75 bp, synthetic construct
  source 1..75: mol_type = other DNA
agcgtcactgtaagcgcggtcacaagcgcaggtggaatgcaaacagtagatatatcgctagtggcagggccagca

SEQ ID NO: 832393 - DNA, 75 bp, synthetic construct
  source 1..75: mol_type = other DNA
agtggtcagccagattgaaggagagctggtgcgtcaacaggcggagctaaaacaactgcgcagctatatgaagga

SEQ ID NO: 832394 - DNA, 75 bp, synthetic construct
  source 1..75: mol_type = other DNA
ggagatggaatcgtgtttcacatatgccctgcaaagataatttttgaatgcgttagtagctttaatatccaattg

SEQ ID NO: 832395 - DNA, 75 bp, synthetic construct
  source 1..75: mol_type = other DNA
gagtgggaaaaatatttgagtagtgagcagaatagaagcgctttattacaaagcaagattgacttaaacgaatgg

SEQ ID NO: 832396 - DNA, 75 bp, synthetic construct
  source 1..75: mol_type = other DNA
atacgtgcgctatccgctggtgccgttgcagagcgttcctatccagtatcgtggtctgtatcagattgcgaccta

SEQ ID NO: 832397 - DNA, 75 bp, synthetic construct
  source 1..75: mol_type = other DNA
atctacactcaaatggtaaaggaacgggtgtatagcctgaaacagtccgttattgaggtaatgactccaacttat

SEQ ID NO: 832398 - DNA, 75 bp, synthetic construct
  source 1..75: mol_type = other DNA
attctttcccgcgcctacagcagctaccggaccagaacacccgcgccggtgggggtgtttggtcccggctggaaa

SEQ ID NO: 832399 - DNA, 75 bp, synthetic construct
  source 1..75: mol_type = other DNA
aaagcctgtcacaaccgagggcaattcctccaatgatctggaccaaccgcccgatgaagaaccgctggatcttta

SEQ ID NO: 832400 - DNA, 75 bp, synthetic construct
  source 1..75: mol_type = other DNA
gataattaacttcggtcctgtagggcaaaagattatatataatatggtctttggctgtgagttattcgtagccgc

SEQ ID NO: 832401 - DNA, 75 bp, synthetic construct
  source 1..75: mol_type = other DNA
ttgcgctgacgtggtgctcttcattgacgttctgtgtgacaccgataagcaaccggtattcagcgtagacgaaga

SEQ ID NO: 832402 - DNA, 75 bp, synthetic construct
  source 1..75: mol_type = other DNA
ttgcagcacatcatcaacggcacattagcacttatcaatacaatacccgattcacgaaaagtgaaatgggtgctg

SEQ ID NO: 832403 - DNA, 75 bp, synthetic construct
  source 1..75: mol_type = other DNA
gacgaagatggttttttggttgaagaaacaattgatgtattaaagcgaataggttttcctacacctctttccttt

SEQ ID NO: 832404 - DNA, 75 bp, synthetic construct
  source 1..75: mol_type = other DNA
ttggggggcgggaatggatgccgatccgatgcacacagcaatcacaccattattatttcctcagccgaatgagcc

SEQ ID NO: 832405 - DNA, 75 bp, synthetic construct
  source 1..75: mol_type = other DNA
ccatgaagttccagctgatcagatagtaccactggccagtgctcttaattgtgacctgatgtggttgttaacagg

SEQ ID NO: 832406 - DNA, 75 bp, synthetic construct
  source 1..75: mol_type = other DNA
ctttgtcttgtcggggatgctgatggcgataactcagcggtttaccggccggtgcaaaaatacataaacggcaca

SEQ ID NO: 832407 - DNA, 75 bp, synthetic construct
  source 1..75: mol_type = other DNA
ggactcgttggacttcgacttcttcgaattgctcgacagcgtcaccatcgcacgctcgcgcaagcatattcaaac

SEQ ID NO: 832408 - DNA, 75 bp, synthetic construct
  source 1..75: mol_type = other DNA
ccactgggatcatcaacaaacttgaaaactacagcggttgcatcctggccgacagcgtgggcttgggcaaaacct

SEQ ID NO: 832409 - DNA, 75 bp, synthetic construct
  source 1..75: mol_type = other DNA
ttgcaaaaagaacagccggaagcctttgttgccgaactctttgaacatattgctgattatagctggccgtggacg

SEQ ID NO: 832410 - DNA, 75 bp, synthetic construct
  source 1..75: mol_type = other DNA
gcttatgaaggcgagtcgagcaatctcacaaagcatcttaaaaccataaaaagcgtagaacagatcttcaaccaa

SEQ ID NO: 832411 - DNA, 75 bp, synthetic construct
  source 1..75: mol_type = other DNA
ccaaatttcacagcccagtacttacagttattcgaccaaatttggaaagaccctgcgaagcttcaagatgttact

SEQ ID NO: 832412 - DNA, 75 bp, synthetic construct
  source 1..75: mol_type = other DNA
tgagtccttccgcttgacgctccagtccctgcgcacgaacctcacaaatacactggacaagatcagctcgttcaa

SEQ ID NO: 832413 - DNA, 75 bp, synthetic construct
  source 1..75: mol_type = other DNA
tgatctgaaagtatatcggcaagaaaaaaacaaagatatattgctagtcaattgtggatgcaggcagtcgttgtg

SEQ ID NO: 832414 - DNA, 75 bp, synthetic construct
  source 1..75: mol_type = other DNA
cgatatttcggttgatgtggccgccctgccggaggacgtggacgtcagcagctccgtcatcagccaggtgctgac

SEQ ID NO: 832415 - DNA, 75 bp, synthetic construct
  source 1..75: mol_type = other DNA
gcgccggcagcagctaccgccgcagcgatatttcggttgatgtggccgccctgccggaggacgtggacgtcagca

SEQ ID NO: 832416 - DNA, 75 bp, synthetic construct
  source 1..75: mol_type = other DNA
ttgaaggacgagacattgcgacatttgatcttgccataatgcgaactctcccaaggcttaaaggaattacagcaa

SEQ ID NO: 832417 - DNA, 75 bp, synthetic construct
  source 1..75: mol_type = other DNA
aggtaattcagctaatgcttctgggagcggatctattgttgttggtgatggagcaaaatcgacagggccgggcgt

SEQ ID NO: 832418 - DNA, 75 bp, synthetic construct
  source 1..75: mol_type = other DNA
ggcgaaaggccaccacttcccggatgtgacgctggtggcattactggacgtggacggtgcgctgttttctgcgga

SEQ ID NO: 832419 - DNA, 75 bp, synthetic construct
  source 1..75: mol_type = other DNA
attgttacaaaacattgatgatcttcctgaacatactgtacttatatctgccagcaatcacgagaatttactaga

SEQ ID NO: 832420 - DNA, 75 bp, synthetic construct
  source 1..75: mol_type = other DNA
atcgaactggtgagcaaaggaaaaaatatgtcatttgccacgccgattatccttgtgataaatacgagtttggaa

SEQ ID NO: 832421 - DNA, 75 bp, synthetic construct
  source 1..75: mol_type = other DNA
ctaaactgggtggttcaaaaagccagatccgtaaagcctggggcgtggcgctgaaaagagccgcgtccgcactgc

SEQ ID NO: 832422 - DNA, 75 bp, synthetic construct
  source 1..75: mol_type = other DNA
tcgctgcagtagatttcggtagcctgtctaaagccgctgtgcagttggatatgacagtttcatctgtatctcgca

SEQ ID NO: 832423 - DNA, 75 bp, synthetic construct
  source 1..75: mol_type = other DNA
aaggagcaagaaggaaatccagaaattaagtctaaacgcagagagcgcatcaggaaattctttctgagcaattga

SEQ ID NO: 832424 - DNA, 75 bp, synthetic construct
  source 1..75: mol_type = other DNA
tttaagtcagtcacaatctaccaactttatagtatcacacaaacaacacatccattatgttaaagagcacttaat

SEQ ID NO: 832425 - DNA, 75 bp, synthetic construct
  source 1..75: mol_type = other DNA
caccgaggttatctgtgaggcggttgggagagatggcgttctggttattttggaggccatgaaggcaacaggaaa

SEQ ID NO: 832426 - DNA, 75 bp, synthetic construct
  source 1..75: mol_type = other DNA
cgagcgcgacgacactatccgttgcctgttacttacaggtgccgggcgcggattttgtgctggtcaggatcttaa

SEQ ID NO: 832427 - DNA, 75 bp, synthetic construct
  source 1..75: mol_type = other DNA
gtggtgaaaaaggaacacgcggacggcagcgtcacgcagagtcagtttgatgcggtgggcaggctcagggcacag

SEQ ID NO: 832428 - DNA, 75 bp, synthetic construct
  source 1..75: mol_type = other DNA
ggatgatccccagtatccagggatggagacaaagacagcaagtgattacctgccacagacaaattggtcaacaac

SEQ ID NO: 832429 - DNA, 75 bp, synthetic construct
  source 1..75: mol_type = other DNA
caatatacgtaaagacaaaccggttttattctaacccatcacttgcaatactcggattcagaatatacaaagcta

SEQ ID NO: 832430 - DNA, 75 bp, synthetic construct
  source 1..75: mol_type = other DNA
ccgactggctcgccgaacatattgatgacccggaaattcagattattgatgcccgcatggcgtcgcctggacagg

SEQ ID NO: 832431 - DNA, 75 bp, synthetic construct
  source 1..75: mol_type = other DNA
gcgccatggggctggcattgctgaagttgccgccagtcatggacatcaggttttactgtatgacatttctgctga

SEQ ID NO: 832432 - DNA, 75 bp, synthetic construct
  source 1..75: mol_type = other DNA
cgaaagattgtttaaatcagaagatgtaaatactctaaaattatatctacaggaaaaaaacaaaaatatatgtcg

SEQ ID NO: 832433 - DNA, 75 bp, synthetic construct
  source 1..75: mol_type = other DNA
gttttgcattgcgacggcaagtaatgatgcagaacaagatgattaaaaatgcagccgggaataatgcaaaaatca

SEQ ID NO: 832434 - DNA, 75 bp, synthetic construct
  source 1..75: mol_type = other DNA
gtgaactattatctcgagcgcggctttaatatggacgacagccgcaataacggtgagttttctacgcaagaaatt

SEQ ID NO: 832435 - DNA, 75 bp, synthetic construct
  source 1..75: mol_type = other DNA
ttgccgccgtcatggtcgcgctatggcgaagtttctttcttccttgggactgacgacctcggacgcgatgtttta

SEQ ID NO: 832436 - DNA, 75 bp, synthetic construct
  source 1..75: mol_type = other DNA
aaacagtgaagatgaaagaccttaatatccgtgtcgccttcagtgcgattgataagttaacccgcccggtaaatg

SEQ ID NO: 832437 - DNA, 75 bp, synthetic construct
  source 1..75: mol_type = other DNA
tgttacatccctgtctctggaattaaattcagattttaattatttctttacagatatgctggatggatgttcagt

SEQ ID NO: 832438 - DNA, 75 bp, synthetic construct
  source 1..75: mol_type = other DNA
actgtggtgaatacagaaaatgttcatctcttttctgattcatctgaaaagaaaacaggtaaattttatttaaaa

SEQ ID NO: 832439 - DNA, 75 bp, synthetic construct
  source 1..75: mol_type = other DNA
gaagataagctgcatacagtaattctacgcgcccatccccgcgtttacggtcagactgttgctattgtcactgaa

SEQ ID NO: 832440 - DNA, 75 bp, synthetic construct
  source 1..75: mol_type = other DNA
acagttttatggtagtgcaaaatttaattatatcattttcattatcatatctaatttataaatataaatgggggt

SEQ ID NO: 832441 - DNA, 75 bp, synthetic construct
  source 1..75: mol_type = other DNA
agttttggtacaataataatcccaatgcttggtcgattttcatatgcatgtgatttggtatatattttaatttta

SEQ ID NO: 832442 - DNA, 75 bp, synthetic construct
  source 1..75: mol_type = other DNA
gcggtcgctggcgctggcaaatcttgttgcagcacccttcccgtgtgcgcttgcagcacatcatcaacggcacat

SEQ ID NO: 832443 - DNA, 75 bp, synthetic construct
  source 1..75: mol_type = other DNA
gaacgtttcttaaaagaaaggctggtatcggactgggcttaccagaccgaagtccgcttccctgttcagtttgaa

SEQ ID NO: 832444 - DNA, 75 bp, synthetic construct
  source 1..75: mol_type = other DNA
aggatctacaagattggtactggaaagagaagatgacatatgcgtatcacaaagaacataaaacaaccataagct

SEQ ID NO: 832445 - DNA, 75 bp, synthetic construct
  source 1..75: mol_type = other DNA
gaccggcaccgttctgaccgacgcgcagcgcgagcgcatgacagcgctggcggcaaaacttgatcgcctgaatgc

SEQ ID NO: 832446 - DNA, 75 bp, synthetic construct
  source 1..75: mol_type = other DNA
taacggggatgatatacatatgggactctggctgaaaatattcaaaattgtggttggtgaaaatgaaaattacct

SEQ ID NO: 832447 - DNA, 75 bp, synthetic construct
  source 1..75: mol_type = other DNA
agggatcaccggtggtgcggatgtggaaacggtgccggagctgctttcccgtctggttttccgggtgcagaatcc

SEQ ID NO: 832448 - DNA, 75 bp, synthetic construct
  source 1..75: mol_type = other DNA
tttgaacgctgggcgcgtgaagtgccgggggtgacgcgggcatggtgccgcccggaatggccgcaggcgggcagc

SEQ ID NO: 832449 - DNA, 75 bp, synthetic construct
  source 1..75: mol_type = other DNA
ctagccaatataaaagccaaaatgtttaaaaatgaaataaataaagaagatatattgaaactgatggcagcaaga

SEQ ID NO: 832450 - DNA, 75 bp, synthetic construct
  source 1..75: mol_type = other DNA
cgagagcaggcccatttattaagtggtatagacaatgaattgcaaccaccattatcaccatcagcattatatcta

SEQ ID NO: 832451 - DNA, 75 bp, synthetic construct
  source 1..75: mol_type = other DNA
caacatcactcaaagatatttttattcgtcctcatacgaacgcagatgatgagagttttactaaagagcagaaaa

SEQ ID NO: 832452 - DNA, 75 bp, synthetic construct
  source 1..75: mol_type = other DNA
ggaccaagactgttttttgtggcaagcgtccccagaccaagataaccacgggccagacgctgggcctccgcaccg

SEQ ID NO: 832453 - DNA, 75 bp, synthetic construct
  source 1..75: mol_type = other DNA
ttaccgggtagtgtcagtgagccacctgtcagactgccgcaggtgccgtcggtcagtgtgccttcgttgccaccg

SEQ ID NO: 832454 - DNA, 75 bp, synthetic construct
  source 1..75: mol_type = other DNA
ctggcaaaaatggtgggtgatgccgtccgtgcggaaatggaacgccgtatccgccagacagtcggtagtttccgt

SEQ ID NO: 832455 - DNA, 75 bp, synthetic construct
  source 1..75: mol_type = other DNA
accgaacaggccaccgccgttggcgcaattcatagcgcggcggatactttttctgcctggctgctggcgggcgtt

SEQ ID NO: 832456 - DNA, 75 bp, synthetic construct
  source 1..75: mol_type = other DNA
ccctaatcaaagaattcgaaggctgtagactcaccgcctaccgggacagtgtcggtgtatggacgatcggatatg

SEQ ID NO: 832457 - DNA, 75 bp, synthetic construct
  source 1..75: mol_type = other DNA
ttatgtggggcagtctaataataccaccattaacgggggcagacagtcaattcatgacgggggtatttccaccgg

SEQ ID NO: 832458 - DNA, 75 bp, synthetic construct
  source 1..75: mol_type = other DNA
gacgagcggacccaccactaccattacgacaaccagcaccgcctggtgttctacacgcggatacaatacggcgag

SEQ ID NO: 832459 - DNA, 75 bp, synthetic construct
  source 1..75: mol_type = other DNA
gacgacaaagaagaacgctatggcctgaactggcatggtaagcgtcaggctcgtcagcttgctcttaccccttcc

SEQ ID NO: 832460 - DNA, 75 bp, synthetic construct
  source 1..75: mol_type = other DNA
gatcccaagagacgcatgatgcgttttgtaaaagttggttctcggggaccatatcgagacgatggaaatataagc

SEQ ID NO: 832461 - DNA, 75 bp, synthetic construct
  source 1..75: mol_type = other DNA
acctggtattatccactggaagctattcgcgaaactgttgtaaatgcactggctcatcgtgactggacacgcttt

SEQ ID NO: 832462 - DNA, 75 bp, synthetic construct
  source 1..75: mol_type = other DNA
accagcagaagattcatttgtaacacaaagatctggtgccaatagcaatggcgaatttactgagttaagtgaaga

SEQ ID NO: 832463 - DNA, 75 bp, synthetic construct
  source 1..75: mol_type = other DNA
atggttactatcagtttgtattatttttatcattttactatttttccctgatacactaaagtttaaattcccact

SEQ ID NO: 832464 - DNA, 75 bp, synthetic construct
  source 1..75: mol_type = other DNA
taccctcgaattaaacttgctaaaaatttattaaaaaaagatggtatatttattgccagtatcgatgatgcggaa

SEQ ID NO: 832465 - DNA, 75 bp, synthetic construct
  source 1..75: mol_type = other DNA
accggggccagggcacatgagtttttgcagataaggttagtcccagagcatctttatcggatcaatctggcagaa

SEQ ID NO: 832466 - DNA, 75 bp, synthetic construct
  source 1..75: mol_type = other DNA
gtgaagtgacatattcagaaataaccgccatagtctgccttgaccacaggctagttaaaagagtggtggatcaat

SEQ ID NO: 832467 - DNA, 75 bp, synthetic construct
  source 1..75: mol_type = other DNA
gattaaataccggtacattatttattgtattgaggatggactcaggaataacaatgaagagtatatattaaaaat

SEQ ID NO: 832468 - DNA, 75 bp, synthetic construct
  source 1..75: mol_type = other DNA
tgttaatttatattcatgactataaattaactgtttctataaatctaccttttttcttgactgaaaaggaagttt

SEQ ID NO: 832469 - DNA, 75 bp, synthetic construct
  source 1..75: mol_type = other DNA
ggcagctgcgacgacatgctggaagaaatggatttgattgagcaggtcgataccatcaggcgtaatctgcagtcc

SEQ ID NO: 832470 - DNA, 75 bp, synthetic construct
  source 1..75: mol_type = other DNA
ctgcgagttacctctggcaaaacgatgaaagacattttacacagaaagacattaacggcgcactttccgttatgc

SEQ ID NO: 832471 - DNA, 75 bp, synthetic construct
  source 1..75: mol_type = other DNA
gtggtcacactctgccatatgttcggggttcatcgcagcagctacagatactggaaaaaccgtcctgaaaaacca

SEQ ID NO: 832472 - DNA, 75 bp, synthetic construct
  source 1..75: mol_type = other DNA
cataccgggtgctgacgggcgtggtggacggcttcgggcggacgctgactttccaccgggcggcggagggtgacg

SEQ ID NO: 832473 - DNA, 75 bp, synthetic construct
  source 1..75: mol_type = other DNA
ccaaaatcaggaggccctagctatgtatacgaaatccgtgtgaagagttggtgggtgaactccggcgatgctttc

SEQ ID NO: 832474 - DNA, 75 bp, synthetic construct
  source 1..75: mol_type = other DNA
attcactcgcgcagaagacaaaataatgagcggtacagtatcagtcaatggtactgacctaccgacaactacatt

SEQ ID NO: 832475 - DNA, 75 bp, synthetic construct
  source 1..75: mol_type = other DNA
ctgctgattctcgtgccagtgatattcccggacttcctacaaatccactgcgctttgctgcgtccgaggtatctt

SEQ ID NO: 832476 - DNA, 75 bp, synthetic construct
  source 1..75: mol_type = other DNA
tatttattctggtagaccgcatggagaagcaaagacatatataggtaaagatgcttggatcggtgcgggtagcat

SEQ ID NO: 832477 - DNA, 75 bp, synthetic construct
  source 1..75: mol_type = other DNA
cccgtattacctgcaccagccataccgtctgccggggcagcagcatgatgaggaatcagggctgtactataaccg

SEQ ID NO: 832478 - DNA, 75 bp, synthetic construct
  source 1..75: mol_type = other DNA
gatgctgcatttgacagagcaattagtttcggtgcctgtatcaaagctattgaaaatgttcttggaaatgatatt

SEQ ID NO: 832479 - DNA, 75 bp, synthetic construct
  source 1..75: mol_type = other DNA
cgttttcagatgtagaagatgcttcggttgtatttgaagagttacatgaaatttttaaaaatagtgggaatttaa

SEQ ID NO: 832480 - DNA, 75 bp, synthetic construct
  source 1..75: mol_type = other DNA
ttgtcaaagaaaaatataaacttgataaggaaaatgagaggttatatagcttaattataagctatttgaacccca

SEQ ID NO: 832481 - DNA, 75 bp, synthetic construct
  source 1..75: mol_type = other DNA
agatggctatatccgcagtgatgatcccacaattcgtcaggtcggtgctggaggacaactcacctacaatcaggc

SEQ ID NO: 832482 - DNA, 75 bp, synthetic construct
  source 1..75: mol_type = other DNA
gaggacaactcagctacaatcaggcaatgcagttggcgaacgattcatcaaacgatgttgtcacaagcttagcgt

SEQ ID NO: 832483 - DNA, 75 bp, synthetic construct
  source 1..75: mol_type = other DNA
aaaaatttggcaacgtgctttatcgcatcggaaaaataatcccaaagcagattcagatgcatatgaaaccagcgc

SEQ ID NO: 832484 - DNA, 75 bp, synthetic construct
  source 1..75: mol_type = other DNA
aatatgtaaagatacagtaaaagaaaataatctttcctctgtagtatattttatgggaaaaattaaaagcgaaga

SEQ ID NO: 832485 - DNA, 75 bp, synthetic construct
  source 1..75: mol_type = other DNA
gcgccgcaggcgacctgacagcaacggtatcaccggacggtaaacgcagcaccatcgaatatgataaacgcgggc

SEQ ID NO: 832486 - DNA, 75 bp, synthetic construct
  source 1..75: mol_type = other DNA
acgctggcaggcgctggtgtcgggatggcactgacggcctttggcgttccggcaacggtgcacattttattggcg

SEQ ID NO: 832487 - DNA, 75 bp, synthetic construct
  source 1..75: mol_type = other DNA
ggtgcacattttattggcggcgctggtaggtatcgcgcctatttatatcgccattcaggcaatccctgacggtac

SEQ ID NO: 832488 - DNA, 75 bp, synthetic construct
  source 1..75: mol_type = other DNA
attttaccattattcactataccagagtggaggatgagcttattaaacaacaaggtgcagtaataacaactgcac

SEQ ID NO: 832489 - DNA, 75 bp, synthetic construct
  source 1..75: mol_type = other DNA
ctggtgacgctgtttgccctgtcgaacctatggatggcccgccgacatttgctggcaagcgcaggagaggtgcgc

SEQ ID NO: 832490 - DNA, 75 bp, synthetic construct
  source 1..75: mol_type = other DNA
gcaagtgcgagcgaaggtagagcccccgtttcgcgtgatcaagcggcagttcggctacaccaaggtacgtttccg

SEQ ID NO: 832491 - DNA, 75 bp, synthetic construct
  source 1..75: mol_type = other DNA
cgcccagttttctctgcctgcagtccgcatgccgtatcgggccttgggttctaacctgttgcgtagatttatgca

SEQ ID NO: 832492 - DNA, 75 bp, synthetic construct
  source 1..75: mol_type = other DNA
atgcaatactgcctgatgcgctatgccaatcaggccttgtattatccctccagtgcagagaaaatcggccagttt

SEQ ID NO: 832493 - DNA, 75 bp, synthetic construct
  source 1..75: mol_type = other DNA
gatgaacgaggtgcaacaaataatgctcatatcatcaatcacggcaatcaggaggtatatggcgggatttctaat

SEQ ID NO: 832494 - DNA, 75 bp, synthetic construct
  source 1..75: mol_type = other DNA
gttcaatgagcggtattctctgctcggcgtggttagtgaaacgctttgggacgcgtaatgtcatcctggtcacga

SEQ ID NO: 832495 - DNA, 75 bp, synthetic construct
  source 1..75: mol_type = other DNA
gataaagccactcatctttacagtgaaataataaagtttaattattttctcgcttataaatcgcacaatatcaat

SEQ ID NO: 832496 - DNA, 75 bp, synthetic construct
  source 1..75: mol_type = other DNA
gaccggcgtgctcggccacgaaatcgcgcatattgcgaacgaggatttgcgtgtcatgggcctggccgattccat

SEQ ID NO: 832497 - DNA, 75 bp, synthetic construct
  source 1..75: mol_type = other DNA
gggcggtcaaaagatgagtttcaggctctggcccgggcagaagatctccaggttgctggcgggacagcaatcgtc

SEQ ID NO: 832498 - DNA, 75 bp, synthetic construct
  source 1..75: mol_type = other DNA
actttgtcgggataacggatgatggacggcctgttttcagatactttaatataaataaagccaggatacaggggc

SEQ ID NO: 832499 - DNA, 75 bp, synthetic construct
  source 1..75: mol_type = other DNA
gagttgttgacgtcacaaattaatgttaaagagctttatgatgaaagtttatctctgtttaataatgcagttgag

SEQ ID NO: 832500 - DNA, 75 bp, synthetic construct
  source 1..75: mol_type = other DNA
cggtatttatactctaagcgtggctgaagtcgaaaatctcttttgcgttccggaagttataactttagttagcga

SEQ ID NO: 832501 - DNA, 75 bp, synthetic construct
  source 1..75: mol_type = other DNA
aataaattaagttctaatgctgcgaatgcttttaataatactcccatttacgctgaagatctcgaaagaaacctt

SEQ ID NO: 832502 - DNA, 75 bp, synthetic construct
  source 1..75: mol_type = other DNA
tcacatccactgtctgcagaaaaaacaatccagcgggaacaacttcattcatggcgagaacttcgtcttaatact

SEQ ID NO: 832503 - DNA, 75 bp, synthetic construct
  source 1..75: mol_type = other DNA
tccggcatggaatgtgatggtgttcgctggatttataacacaacagaacaatggctggaacagttcccgttctgg

SEQ ID NO: 832504 - DNA, 75 bp, synthetic construct
  source 1..75: mol_type = other DNA
atggagctgctttaaaagtaacgacttacgatttgacggtgagcggtacgaatagtgaaggtgcattctccatcc

SEQ ID NO: 832505 - DNA, 75 bp, synthetic construct
  source 1..75: mol_type = other DNA
aaagtcgaggttatttacctgatgggacagaggtagttccagatatggcaagggttgttgtaaaacccgacggtt

SEQ ID NO: 832506 - DNA, 75 bp, synthetic construct
  source 1..75: mol_type = other DNA
ttccattaccggcaatttagcgaccaatgtgctgctggaaaatggcggtaatttattggtattagcaggtaccga

SEQ ID NO: 832507 - DNA, 75 bp, synthetic construct
  source 1..75: mol_type = other DNA
gtggcgcgacaggaagcctgtcgttaataacgccacgggataatgtgacgccagttaaacttgaaggggcggtcc

SEQ ID NO: 832508 - DNA, 75 bp, synthetic construct
  source 1..75: mol_type = other DNA
gtaatttcgtcaattatttgtcgggcagacgtggaatataccaggcaggtattaaagcctcattcagcagtacgt

SEQ ID NO: 832509 - DNA, 75 bp, synthetic construct
  source 1..75: mol_type = other DNA
ttcagcatcgagcagggtgcggcgaacaatatcctgctggcaaatggcggcgtgttaaccgtggagtcagacacc

SEQ ID NO: 832510 - DNA, 75 bp, synthetic construct
  source 1..75: mol_type = other DNA
atttacctgccgcgccactggtgtgctacgactggacgccacgcggtgagctggcggcggtgtatgaccgcagcg

SEQ ID NO: 832511 - DNA, 75 bp, synthetic construct
  source 1..75: mol_type = other DNA
ggaatttttatcagtatccgttgaatccgatctcaaatatagatccattaggattagaaacactaaaatgcatta

SEQ ID NO: 832512 - DNA, 75 bp, synthetic construct
  source 1..75: mol_type = other DNA
gagcgattgccggaactttggactcgaattgagaactaccaacaaggacgagaattaacccgcctggcagtatca

SEQ ID NO: 832513 - DNA, 75 bp, synthetic construct
  source 1..75: mol_type = other DNA
gtcggtgcagcttctatggctttaggggcgtggaatataaaatctgcgacagctgcatataacagagcaaattta

SEQ ID NO: 832514 - DNA, 75 bp, synthetic construct
  source 1..75: mol_type = other DNA
gggcggtatatcactcaggacccgatagggctggaggggggatggagtctgtatgcgtatccgctgaatccggtg

SEQ ID NO: 832515 - DNA, 75 bp, synthetic construct
  source 1..75: mol_type = other DNA
aggaaggctcacggcgcagacggacgcggcgggacggaggacagagtacggtctgaatgtggtgtccggcgatat

SEQ ID NO: 832516 - DNA, 75 bp, synthetic construct
  source 1..75: mol_type = other DNA
atgccattggcattggtatggctagcctgttagggcttgatccgctgatggggctgctggccggttctattacgc

SEQ ID NO: 832517 - DNA, 75 bp, synthetic construct
  source 1..75: mol_type = other DNA
agttttttatagatggtactgatccaggttgggttatttcaaatgctggtacagatgaggaacctgagtatttat

SEQ ID NO: 832518 - DNA, 75 bp, synthetic construct
  source 1..75: mol_type = other DNA
cgctgtcggtggccggcattgtggagatggcgacggcggtggtcgtagaggacggcatatttggaaaaaatacat

SEQ ID NO: 832519 - DNA, 75 bp, synthetic construct
  source 1..75: mol_type = other DNA
agcagtttgatgaaatcaatattgtgcgcggtcagccagtatctggtggacggctgggtgtgaagatttacaaaa

SEQ ID NO: 832520 - DNA, 75 bp, synthetic construct
  source 1..75: mol_type = other DNA
tgatgattaacacggtggatgcgccgggtgatatcaccctgggcccgtgccggatacctgcggcgaaactgcagg

SEQ ID NO: 832521 - DNA, 75 bp, synthetic construct
  source 1..75: mol_type = other DNA
gagactgtggcgatattcagaataaatatgctgtattaaacgcagagaaccgacatcaattatacattgatgtgg

SEQ ID NO: 832522 - DNA, 75 bp, synthetic construct
  source 1..75: mol_type = other DNA
ggcgtataagttcattatatttaatgttagtcaccgttcctctaggggtatattatctcccaaggcttgcagaac

SEQ ID NO: 832523 - DNA, 75 bp, synthetic construct
  source 1..75: mol_type = other DNA
tgcgtggagtaaattgttcattgaacgttatggcttcaccaatgcgacggaagtggcgatggcctgtgcaacgtt

SEQ ID NO: 832524 - DNA, 75 bp, synthetic construct
  source 1..75: mol_type = other DNA
tcttattttgtaataccatatatgtttggggctaattatatcacctcatataatatattaatcattttgctattt

SEQ ID NO: 832525 - DNA, 75 bp, synthetic construct
  source 1..75: mol_type = other DNA
agttacaagcctcagttgtcacgaaaattagtttttgcgcacttattatatcctcggtatttaaagtctatttgt

SEQ ID NO: 832526 - DNA, 75 bp, synthetic construct
  source 1..75: mol_type = other DNA
ctataagaaccagggcgaaatcatcaacctgataacaggcgaggatattgatttctcaaacatttatacactgag

SEQ ID NO: 832527 - DNA, 75 bp, synthetic construct
  source 1..75: mol_type = other DNA
acgcttgagcgggaagcccgcgtaaaaagggaggcagagcttctcaacgcgcaggacgacgaagagaaagccccg

SEQ ID NO: 832528 - DNA, 75 bp, synthetic construct
  source 1..75: mol_type = other DNA
ctgggaccacggtcccacctgcgtcgtcggtcaggttatctgcctgggaccacggtcccacctgcgtcatcggtc

SEQ ID NO: 832529 - DNA, 75 bp, synthetic construct
  source 1..75: mol_type = other DNA
tctcatgtatgatcatacagaccaatacgcgaactcgccagttgcagctataccgtaactctgaagatttttatc

SEQ ID NO: 832530 - DNA, 75 bp, synthetic construct
  source 1..75: mol_type = other DNA
tggtgaagcttatcgttatatagaacaagtgccacgcacaggtgtaaaaaaacctgataccgaacaacttaactt

SEQ ID NO: 832531 - DNA, 75 bp, synthetic construct
  source 1..75: mol_type = other DNA
tctgaagattttttatccaagccctttgacaagaggataattcacatatttttggcatgttttgttgcaagctat

SEQ ID NO: 832532 - DNA, 75 bp, synthetic construct
  source 1..75: mol_type = other DNA
agatatttgcaacttggctaagcaatagccttaatagaaaaacgtttgaatgcttcagaatacagtcaatgaccg

SEQ ID NO: 832533 - DNA, 75 bp, synthetic construct
  source 1..75: mol_type = other DNA
tctttatgaatggtgataattcagtcgagtcgggtggggcatattcagcgggacttttaggtgatgctgccaact

SEQ ID NO: 832534 - DNA, 75 bp, synthetic construct
  source 1..75: mol_type = other DNA
gatcatgacatttcagccatcaaagattgttggcaaaaaaattcagatgatgatactgacattaacgtgatcaaa

SEQ ID NO: 832535 - DNA, 75 bp, synthetic construct
  source 1..75: mol_type = other DNA
tttcactgagctgaataaattctttcaagatagtgttgccagccagtttagtattgacatggataaatggagcaa

SEQ ID NO: 832536 - DNA, 75 bp, synthetic construct
  source 1..75: mol_type = other DNA
atggggcgtattaccggactaaaaagacattcagcgcacagaatggccctgcagaatttctgtcctgggtgcaag

SEQ ID NO: 832537 - DNA, 75 bp, synthetic construct
  source 1..75: mol_type = other DNA
cagattgccacacaaatcagtcgtactggtttaactaacggtattaccctgaacagtacggctcacagtgatgga

SEQ ID NO: 832538 - DNA, 75 bp, synthetic construct
  source 1..75: mol_type = other DNA
gtaggtggtgctacacaaaccatgatttatcagggcgttgttagtgggttccagtattactggtcaggttctgtt

SEQ ID NO: 832539 - DNA, 75 bp, synthetic construct
  source 1..75: mol_type = other DNA
gagcgcgtcacgcagattattaacggcgggcagaacggcattaaagaccgccgtgaacgttacgccaaagcaaaa

SEQ ID NO: 832540 - DNA, 75 bp, synthetic construct
  source 1..75: mol_type = other DNA
gaagaaaacctttggtaagcgcctgacgccgtaccagtgcgaaatgctggggcgtgtcgatggtaaacaggtcgc

SEQ ID NO: 832541 - DNA, 75 bp, synthetic construct
  source 1..75: mol_type = other DNA
ggcggctttagcgctgtagttgaaaatttgaactacacaccatctgcgctggtggcgaccttcggaaagaggatc

SEQ ID NO: 832542 - DNA, 75 bp, synthetic construct
  source 1..75: mol_type = other DNA
gatgccttcggtgattaaacggcggtttcagcagcgcacgccactggtgatggggctatggtccgcggctctgat

SEQ ID NO: 832543 - DNA, 75 bp, synthetic construct
  source 1..75: mol_type = other DNA
agattctttgggtttaaaattccatgttaacggtgatccaagtgattttaatcaggctgttgagtatttaaaaca

SEQ ID NO: 832544 - DNA, 75 bp, synthetic construct
  source 1..75: mol_type = other DNA
ctcaataagcaaattggagcctctgcatttcgtattgaacagcagtcagatggttcttatgccgctattggagaa

SEQ ID NO: 832545 - DNA, 75 bp, synthetic construct
  source 1..75: mol_type = other DNA
actgaactgggattgggtaaaccttttatgatgagtcaaatggtgggacgatctatgggttgtaaaattgcgacc

SEQ ID NO: 832546 - DNA, 75 bp, synthetic construct
  source 1..75: mol_type = other DNA
ctggcacccacatgggccgccgccaccgccgcgtcaccataagaaagtgcatcatgatcatcacggtggtcatgg

SEQ ID NO: 832547 - DNA, 75 bp, synthetic construct
  source 1..75: mol_type = other DNA
atggaacttaaaaaattgatggaacatatttctattatccccgattacagacaagcccagggaaagatcatcaga

SEQ ID NO: 832548 - DNA, 75 bp, synthetic construct
  source 1..75: mol_type = other DNA
ttcgcgctggtttccgcacattgacgcagcaatgaaagagttcggcattgttaagcccgaagaccaggcaatgtt

SEQ ID NO: 832549 - DNA, 75 bp, synthetic construct
  source 1..75: mol_type = other DNA
ctgactccgttgttggagaatatgcttatttaggtgcgcaggtacgtaccagtaatcatcgtttggataatcagc

SEQ ID NO: 832550 - DNA, 75 bp, synthetic construct
  source 1..75: mol_type = other DNA
tcctgatgagcgtgaagcatttgcagttgaagccggtaccaccagtcattacatccagacgcacctgaccggtcg

SEQ ID NO: 832551 - DNA, 75 bp, synthetic construct
  source 1..75: mol_type = other DNA
atattcgtttaaagttgaacggcttaattttggcggtttaaatattctttttgataactctgatgcccttttcat

SEQ ID NO: 832552 - DNA, 75 bp, synthetic construct
  source 1..75: mol_type = other DNA
agtaagttggcagcatcaccgtttattcgtcctggcacaataatcagcaatggtgtaaaaattggttttgccacc

SEQ ID NO: 832553 - DNA, 75 bp, synthetic construct
  source 1..75: mol_type = other DNA
agagctggtagaaatcgacgtcctcaacatgattgagaaggtgaacggcgttgaccgactcgaccagcaccgccg

SEQ ID NO: 832554 - DNA, 75 bp, synthetic construct
  source 1..75: mol_type = other DNA
cgcaactggcgctggcggaacaactgacccgcgacggctatcccgtcagccagtcgcaaatcagccggatgctac

SEQ ID NO: 832555 - DNA, 75 bp, synthetic construct
  source 1..75: mol_type = other DNA
acccgctgcgcccggcgagccaaagccctcaccgctggtgcatacggcaaggtcgctatgtgcctgctggggact

SEQ ID NO: 832556 - DNA, 75 bp, synthetic construct
  source 1..75: mol_type = other DNA
gcggaaagcgacctgcataacggattgatgtttatcgaacgcgcggaaggggtactgcacctgcgcgatctttac

SEQ ID NO: 832557 - DNA, 75 bp, synthetic construct
  source 1..75: mol_type = other DNA
acacggttttcgcacatagtgcattaattgagtctgggttatggtcagaagatgctgtggagcttcaaatgagcc

SEQ ID NO: 832558 - DNA, 75 bp, synthetic construct
  source 1..75: mol_type = other DNA
caaggataggtacttttgttaccataattggtgctatgtgttcactatgggggtggaaaaagtcgcgggatgccg

SEQ ID NO: 832559 - DNA, 75 bp, synthetic construct
  source 1..75: mol_type = other DNA
tggtcagcaagcgtccgaccaccgaaccgctgaaagaagttcagtttaaagccggtactgacagcctgttccaga

SEQ ID NO: 832560 - DNA, 75 bp, synthetic construct
  source 1..75: mol_type = other DNA
gaatgagttagtggcaagaatggatgctgatgatatttctttgcctcatcggtttgagaaacaaatttcttttat

SEQ ID NO: 832561 - DNA, 75 bp, synthetic construct
  source 1..75: mol_type = other DNA
aaaccagatggtgatatttctgaatcattacatcattctactgtcttgatagaaaagagtcatagagctaaggag

SEQ ID NO: 832562 - DNA, 75 bp, synthetic construct
  source 1..75: mol_type = other DNA
atccaacttatgtttttctcctttcatggaaaataaaaaagaaaaatgttggcaaagccgttagaacattagacc

SEQ ID NO: 832563 - DNA, 75 bp, synthetic construct
  source 1..75: mol_type = other DNA
attgccgtagagcgaattaaagaagcttacaattcgaacatggcatctcttgatttgtcatatcttgatttgagt

SEQ ID NO: 832564 - DNA, 75 bp, synthetic construct
  source 1..75: mol_type = other DNA
aacttgatgtctttaaagaaaaaaagaaccgtggttttgaaggtcttggctgggaagaaagctcgtacacatttt

SEQ ID NO: 832565 - DNA, 75 bp, synthetic construct
  source 1..75: mol_type = other DNA
agaaaaagttaattgttttcatgtttattatttcagcaatttcatgtgttaacttatcaactccctatgaaatgt

SEQ ID NO: 832566 - DNA, 75 bp, synthetic construct
  source 1..75: mol_type = other DNA
actagtgagttcagctattacaatggactcccaaaaaaggcataaagtgaaaaatatggatataatatttcgtgc

SEQ ID NO: 832567 - DNA, 75 bp, synthetic construct
  source 1..75: mol_type = other DNA
cctgctcttacaatttttttgcgatggcggagctgttgcaccgcctggcacagggtgaaaaggggacgccggaat

SEQ ID NO: 832568 - DNA, 75 bp, synthetic construct
  source 1..75: mol_type = other DNA
gccgccggtattttgctggccttcggcgtcagctttcaggatcccaatattgtcgccagcctgccgtttctcggc

SEQ ID NO: 832569 - DNA, 75 bp, synthetic construct
  source 1..75: mol_type = other DNA
cccatcgctgacgatgtcgcagggggaatttttgctcttaatggtggcgatcttggggaagatactggctgcgtt

SEQ ID NO: 832570 - DNA, 75 bp, synthetic construct
  source 1..75: mol_type = other DNA
tcccaactggaggtctggaacctgatgcaggatacccagcttgttgatctcagcatggatatggaggttgattcc

SEQ ID NO: 832571 - DNA, 75 bp, synthetic construct
  source 1..75: mol_type = other DNA
ggtttcctttatattattatgagaaatcttcgagtgatgaagtagttaaagaatacaaaaggaaagaagcaattt

SEQ ID NO: 832572 - DNA, 75 bp, synthetic construct
  source 1..75: mol_type = other DNA
ttaatctcagggaagatattaagacattatttggcgttgatctgcattctgacaaccaaattcaggatatgggta

SEQ ID NO: 832573 - DNA, 75 bp, synthetic construct
  source 1..75: mol_type = other DNA
tgttctttcagatagcatttgctcatcgtttattgttaccagtaatgtggcatcaatctccttggggaacgaatc

SEQ ID NO: 832574 - DNA, 75 bp, synthetic construct
  source 1..75: mol_type = other DNA
tgattaatgaaaaaatttcctcactgctctttcagatagcatttgctcattatttattgttaatagtaacgtggc

SEQ ID NO: 832575 - DNA, 75 bp, synthetic construct
  source 1..75: mol_type = other DNA
ggtgcggtaaataacctgattcagtttggccaagtcgctaaaagaggaaacgttgagaaaacattcacagtgaaa

SEQ ID NO: 832576 - DNA, 75 bp, synthetic construct
  source 1..75: mol_type = other DNA
gaagtatacgaagagtttattaaaattgttgataaacaaacgatcgaggctcttgttgatgcggcattctatgat

SEQ ID NO: 832577 - DNA, 75 bp, synthetic construct
  source 1..75: mol_type = other DNA
tgcttgaatgacgaaagatgcatattgcatttacccgagtttatatttaatgataacaagggttcgcttgtttta

SEQ ID NO: 832578 - DNA, 75 bp, synthetic construct
  source 1..75: mol_type = other DNA
ggtgttgttttgtttgtggttcttagcactgggcgccattgagtatctggtgctgcgctgggtgtggcgtcgctg

SEQ ID NO: 832579 - DNA, 75 bp, synthetic construct
  source 1..75: mol_type = other DNA
tccggcaatcccccgacgttctccctgacgccggagggcaggctgacggcccgcaatgcggacatcagcggacat

SEQ ID NO: 832580 - DNA, 75 bp, synthetic construct
  source 1..75: mol_type = other DNA
attcgttcaccggtaacagagccggtcatccctgtacccgcaccggcggccaccgttaaccgtgccggtgcgtaa

SEQ ID NO: 832581 - DNA, 75 bp, synthetic construct
  source 1..75: mol_type = other DNA
gattattcatgggcgctgggcagtcataagacgcaaaaggaagtatacgaagagtttattaaaattgttgataaa

SEQ ID NO: 832582 - DNA, 75 bp, synthetic construct
  source 1..75: mol_type = other DNA
atgggtaatatacatggaattagttgcactgcaaataattatttgaagcaagcctggaacgatataaaaaatgag

SEQ ID NO: 832583 - DNA, 75 bp, synthetic construct
  source 1..75: mol_type = other DNA
ttagacaccgacccagagcagagggttaatgaggtgaaaaatttcctcactgctctttcagatagcatttgctca

SEQ ID NO: 832584 - DNA, 75 bp, synthetic construct
  source 1..75: mol_type = other DNA
aagatcagcggtcctttcagcctgaatatcaatcaggaaagcggattactgattgatgaaccgccccgggaatcc

SEQ ID NO: 832585 - DNA, 75 bp, synthetic construct
  source 1..75: mol_type = other DNA
tagggagatgtcatgaaggtattgatgccatccatacattcacagacaataaatttaggattgacgagtatttcg

SEQ ID NO: 832586 - DNA, 75 bp, synthetic construct
  source 1..75: mol_type = other DNA
atgctaaaaagaatgacaataaatgcaatactatggcatattgagtcaaacattgaaaacacacctttggacata

SEQ ID NO: 832587 - DNA, 75 bp, synthetic construct
  source 1..75: mol_type = other DNA
ctgtaggattaactatcgtatattcactggcacatattggcatttctactttgtgtaacgctttcaagtatcatt

SEQ ID NO: 832588 - DNA, 75 bp, synthetic construct
  source 1..75: mol_type = other DNA
atgcggttggggtgatcctgaccggtatgggcaacgacggcgcggcgggaatgttggcgatgcgtcaggctgggg

SEQ ID NO: 832589 - DNA, 75 bp, synthetic construct
  source 1..75: mol_type = other DNA
tctgtcgccaaacaggcggggcgtaatgcggttggggtgatcctgaccggtatgggcaacgacggcgcggcggga

SEQ ID NO: 832590 - DNA, 75 bp, synthetic construct
  source 1..75: mol_type = other DNA
atgcctatattgcgccgggcgatcggcatatggagctggcgcgtagtggcgcaaattaccaaatcaaaattcacg

SEQ ID NO: 832591 - DNA, 75 bp, synthetic construct
  source 1..75: mol_type = other DNA
tcaaaattgcactggcatcgctggaagcagaaccgatagcgtgggaatgcggtgaaaacataatcctgtttaacc

SEQ ID NO: 832592 - DNA, 75 bp, synthetic construct
  source 1..75: mol_type = other DNA
cgtatcccggaaggggttatccggatgcacgacgagcgcacccaccactatcactacgacagccagcaccgcctg

SEQ ID NO: 832593 - DNA, 75 bp, synthetic construct
  source 1..75: mol_type = other DNA
cgatagggctggaggggggatggagtctgtatgcgtatccgctgaatccggtgaatggtattgatccattagggt

SEQ ID NO: 832594 - DNA, 75 bp, synthetic construct
  source 1..75: mol_type = other DNA
aattctaatacctcagccgccagacattaccctgaaaataacgccgggacgctggtcatttataaaaatgccgga

SEQ ID NO: 832595 - DNA, 75 bp, synthetic construct
  source 1..75: mol_type = other DNA
agcggcgaatgataatgctgatggccgcgttccttcctcgcgcaaaattaacggacactccctgaatgctgacac

SEQ ID NO: 832596 - DNA, 75 bp, synthetic construct
  source 1..75: mol_type = other DNA
gaatggcagcgatcgacatacggtgaatgtccgggtggaagatcagtttggcaatgtgctgccggatcagaccgt

SEQ ID NO: 832597 - DNA, 75 bp, synthetic construct
  source 1..75: mol_type = other DNA
gttttgatatggccggaaccgtgaacagttttatgtcacaggctgcggcgcagtcactggatgaagcccggataa

SEQ ID NO: 832598 - DNA, 75 bp, synthetic construct
  source 1..75: mol_type = other DNA
gtcggaaaaatggcgcagactacagcagaaaatatccccctggctggcacaagcggaatgagagcaacgcaacag

SEQ ID NO: 832599 - DNA, 75 bp, synthetic construct
  source 1..75: mol_type = other DNA
gcaacacaggcaccaacactcgctggtagaatcgctcagggtgcaactcgccttctcgctgaaaacgcagtcggg

SEQ ID NO: 832600 - DNA, 75 bp, synthetic construct
  source 1..75: mol_type = other DNA
ggtgcaggctggcgtgaacgtggcaaacatacctgcatcagttgccgatgctgtaacaagcgcggcggcttgggc

SEQ ID NO: 832601 - DNA, 75 bp, synthetic construct
  source 1..75: mol_type = other DNA
gcaaacaccccacgcggatcaacagcgtttgagaaagccatgcagcaggcgcaaaaggccattaacgcccttact

SEQ ID NO: 832602 - DNA, 75 bp, synthetic construct
  source 1..75: mol_type = other DNA
atggctaaagcatggaaagatgttatcagatttgcagagcgtgaaggagttcctctgcacaccacagacctgtta

SEQ ID NO: 832603 - DNA, 75 bp, synthetic construct
  source 1..75: mol_type = other DNA
ttcagcagattgatactgagatatctaatctgcagaagcttggtaaggtagctgataacgagacaatttcaaaac

SEQ ID NO: 832604 - DNA, 75 bp, synthetic construct
  source 1..75: mol_type = other DNA
gtctggagcaacccgggcaggtaatatttgaagataggcataattcccctctaacaaacacagtgaaacttttac

SEQ ID NO: 832605 - DNA, 75 bp, synthetic construct
  source 1..75: mol_type = other DNA
gaagctgtagacaaatgggttgatagttataatggaagtaataaacaactaaccttcattgaaagatatgatgaa

SEQ ID NO: 832606 - DNA, 75 bp, synthetic construct
  source 1..75: mol_type = other DNA
cagtcactggatgaagcccggataaaggtgctgacagcacgttttaaccgcgcgctctctgacagcctgacggca

SEQ ID NO: 832607 - DNA, 75 bp, synthetic construct
  source 1..75: mol_type = other DNA
attgcagagatggaagtaagggatgtgcagttaccgacttgctatgagcctcgatatggtcatccgataaatact

SEQ ID NO: 832608 - DNA, 75 bp, synthetic construct
  source 1..75: mol_type = other DNA
aataaagttgatgccttgttagttaagtttagtgaggattttaatcaaattatagaaaaagcagaacagtggatg

SEQ ID NO: 832609 - DNA, 75 bp, synthetic construct
  source 1..75: mol_type = other DNA
tggaaaatggacatgaatttacagtccactttgatgagttattaaaataccacggtgccggttatccgggtggtg

SEQ ID NO: 832610 - DNA, 75 bp, synthetic construct
  source 1..75: mol_type = other DNA
caacatgcaattgtaaaaatccagatacctgtattcatgctttaacattgaagttgggggataaagcatatgagt

SEQ ID NO: 832611 - DNA, 75 bp, synthetic construct
  source 1..75: mol_type = other DNA
tgctggcagatgaggtggataaatatccgattacccgtgagggcgatcccatcgctctggcggaagagcgaaccg

SEQ ID NO: 832612 - DNA, 75 bp, synthetic construct
  source 1..75: mol_type = other DNA
tgcgcatgacgtcatttatggcgatctggagactgaggaaccgtggaagcgcctcgatgcgtacctgaaacagat

SEQ ID NO: 832613 - DNA, 75 bp, synthetic construct
  source 1..75: mol_type = other DNA
ccctggatgcaaaaaatgatttagaaaaaatcattgtaacaaaaacaaccaggaaacttgttccactgatggtat

SEQ ID NO: 832614 - DNA, 75 bp, synthetic construct
  source 1..75: mol_type = other DNA
tgccagttttatatgtaattattatggcttatattggttttaattatttcaataaaggcgtaactttttttgaac

SEQ ID NO: 832615 - DNA, 75 bp, synthetic construct
  source 1..75: mol_type = other DNA
atgcagtcattgttaataaattatagggggcagattttatattccgtaatttgcatcctgatacttgtgtttaaa

SEQ ID NO: 832616 - DNA, 75 bp, synthetic construct
  source 1..75: mol_type = other DNA
atgaaacgactgctgacagctctgctcctgtttattttcaacggcgtggccgcctcccctgcaacgccagaagtc

SEQ ID NO: 832617 - DNA, 75 bp, synthetic construct
  source 1..75: mol_type = other DNA
ttgctactcaatcagcagacgttcgcccggaagctgaattagaccgcgcagatcgcatcaaggcggccttaaaga

SEQ ID NO: 832618 - DNA, 75 bp, synthetic construct
  source 1..75: mol_type = other DNA
atgaaggtgtattgaacacggtgactctggaaggaggaaccttcaataacaacggaacgcttaatgacgtcgtaa

SEQ ID NO: 832619 - DNA, 75 bp, synthetic construct
  source 1..75: mol_type = other DNA
ggcaatgaataccggcattgccgaacgtgaagatttcttcctcatttcatcatgggatggtatttgcgccagctg

SEQ ID NO: 832620 - DNA, 75 bp, synthetic construct
  source 1..75: mol_type = other DNA
acggttattgccagcgttgcttcacaaaaagctgcttcggtgagactaatccaagctattacggcaaagagcttt

SEQ ID NO: 832621 - DNA, 75 bp, synthetic construct
  source 1..75: mol_type = other DNA
aaggcgcacagctttgtataatttgcgaaaaaaacacggattcccggaaccagtacttactcatccggcgcgata

SEQ ID NO: 832622 - DNA, 75 bp, synthetic construct
  source 1..75: mol_type = other DNA
atgtcagataaaaaaatggcgccactactgctcaatgtagacgccagcgaagtgcttacccagaccggggagctt

SEQ ID NO: 832623 - DNA, 75 bp, synthetic construct
  source 1..75: mol_type = other DNA
taccagaatcaatggttccgatagcaaaggaagctatcgtgcgattacgaaaacttactaataatgcaagggttg

SEQ ID NO: 832624 - DNA, 75 bp, synthetic construct
  source 1..75: mol_type = other DNA
tttgttcatttatgtcaaaaaggaatatgttacctccatggatcgttcgctggtcttatccatttaaaagaaatg

SEQ ID NO: 832625 - DNA, 75 bp, synthetic construct
  source 1..75: mol_type = other DNA
agttattcaaaattgcactgacatcgctggaagcagaaccggtggcatggactgacgacgaggaactgcgagata

SEQ ID NO: 832626 - DNA, 75 bp, synthetic construct
  source 1..75: mol_type = other DNA
gcggatttaatgatcggtaaaggcgttcactttttgcagggctatttgtactccccgccagtaccgggtaataaa

SEQ ID NO: 832627 - DNA, 75 bp, synthetic construct
  source 1..75: mol_type = other DNA
taaaggcgttcactttttgcagggctatttgtactctccgccagtaccgggtaataaatttatctctgaatgggt

SEQ ID NO: 832628 - DNA, 75 bp, synthetic construct
  source 1..75: mol_type = other DNA
actagcgcgtaagcctggtctgagtatcgtggcggaaggggtagaaacccaggagcaggcggatttaatgatcgg

SEQ ID NO: 832629 - DNA, 75 bp, synthetic construct
  source 1..75: mol_type = other DNA
ggatgctgcagcagaccatagaacaagcgttacttgaacaaggtcgcatcaccgaaaaaactaaccaaaactttg

SEQ ID NO: 832630 - DNA, 75 bp, synthetic construct
  source 1..75: mol_type = other DNA
aatttatttaaatcacttctggctatcttattagtctataatctatatgagattggatatatatataatgatacc

SEQ ID NO: 832631 - DNA, 75 bp, synthetic construct
  source 1..75: mol_type = other DNA
cctgccttccggcgtatttaaaccttacgctggcgtggcgacggcgatcctgatctttaccaaaggcggtcaaac

SEQ ID NO: 832632 - DNA, 75 bp, synthetic construct
  source 1..75: mol_type = other DNA
atcgtccagaacagcggtgccgctctccagacgagcacggctaacggtattgaaatcagcggtacgcaccagtac

SEQ ID NO: 832633 - DNA, 75 bp, synthetic construct
  source 1..75: mol_type = other DNA
atcttcgatcaggacgaagccgaacgtgtcattgaagggagtgcgacagaggttcatgtagggcatgaatcggat

SEQ ID NO: 832634 - DNA, 75 bp, synthetic construct
  source 1..75: mol_type = other DNA
aagggtgggaatgtcactgatgagcagttcacggcactgctgatcgtcgccaaccagtacggactgaacccgtgg

SEQ ID NO: 832635 - DNA, 75 bp, synthetic construct
  source 1..75: mol_type = other DNA
agttagcgaacttatccaggcgttgcataaggctggcatcagtgtggggattgtcactagcggctggcggtcgaa

SEQ ID NO: 832636 - DNA, 75 bp, synthetic construct
  source 1..75: mol_type = other DNA
gctgagtatacattatatcgaaatgcgcaatctaacgttgtaaaagcgtataaagatcttgattcagcaatcata

SEQ ID NO: 832637 - DNA, 75 bp, synthetic construct
  source 1..75: mol_type = other DNA
aaagctattcgctcggctgctgaacaatctacgaattatacaaatgaggtggcaaaacgtctcaatgacaaacag

SEQ ID NO: 832638 - DNA, 75 bp, synthetic construct
  source 1..75: mol_type = other DNA
tgcgatgtcctcgtcgctaacggcaaaattatcgccgttgccagtaatatcccctctgacattgtaccggactgc

SEQ ID NO: 832639 - DNA, 75 bp, synthetic construct
  source 1..75: mol_type = other DNA
ttaatataatggaatattcggagagaaacgtcaggcagttgaccttaaatgaacaggaagatacatccccaggaa

SEQ ID NO: 832640 - DNA, 75 bp, synthetic construct
  source 1..75: mol_type = other DNA
aaactgagtggcgtgttcagtctaaaagagggttgatgccagcatacaggggcgaagctggtcaacaagtcaaca

SEQ ID NO: 832641 - DNA, 75 bp, synthetic construct
  source 1..75: mol_type = other DNA
tagatgcattagctaaaaatccttcgaatccacagttgctggctgaataccaaagtaaattatctgaatatacat

SEQ ID NO: 832642 - DNA, 75 bp, synthetic construct
  source 1..75: mol_type = other DNA
tcagcatttaaagaaaatattcaatcgcgcaatgaatcttcaaggaaaaataagcaggaaaaagtataatgaatt

SEQ ID NO: 832643 - DNA, 75 bp, synthetic construct
  source 1..75: mol_type = other DNA
ttcattggggcaagtggttattgctaccgcatacactcgcgcaacgcgcaataaaaatctggagagagaaaatgc

SEQ ID NO: 832644 - DNA, 75 bp, synthetic construct
  source 1..75: mol_type = other DNA
tgtcaaatttgccattacgaaactaaaagaaggcggaattcttgcaataaagagccttggtggctttcatctcgt

SEQ ID NO: 832645 - DNA, 75 bp, synthetic construct
  source 1..75: mol_type = other DNA
ggaggtatggtggggtctgttgtttctggcgtggcttcaaaaatcactggtgctgttgagttcttggggagcgtt

SEQ ID NO: 832646 - DNA, 75 bp, synthetic construct
  source 1..75: mol_type = other DNA
gggggccttgatgtggttgcccctctggctgatttttctgagaaagtaaccattcatggcctgttaacctggatg

SEQ ID NO: 832647 - DNA, 75 bp, synthetic construct
  source 1..75: mol_type = other DNA
cacgatttaaatcaaaatcttattgaaaggctatggaacaaaattcgtgatttttttctggacagtgataaacaa

SEQ ID NO: 832648 - DNA, 75 bp, synthetic construct
  source 1..75: mol_type = other DNA
tgacggtaataaggcaatcagtgaaacagagcatggtgcggtgaaagcgatgttgagggggatactgcgaaaatg

SEQ ID NO: 832649 - DNA, 75 bp, synthetic construct
  source 1..75: mol_type = other DNA
aaaccgcgcccgcgccgtgccgctaaaccggcggcacggcgcgggcgtcccccgaaagcggcaaaagccgcaggt

SEQ ID NO: 832650 - DNA, 75 bp, synthetic construct
  source 1..75: mol_type = other DNA
acagcctgtcgggctgtcgctcctgctcgacaccatcgcactgaccgaacgcgcagatatgcccgatatcgtgcg

SEQ ID NO: 832651 - DNA, 75 bp, synthetic construct
  source 1..75: mol_type = other DNA
ccgattatcatcaaggctaaaccaagtcaaggttgattatctgcataaagcttcaaccgcgatcagcaaaaacca

SEQ ID NO: 832652 - DNA, 75 bp, synthetic construct
  source 1..75: mol_type = other DNA
cattaattgatctaatttcaatgcttgagagaaaagaactaataattaacaaggattatcagcgcggaaatggaa

SEQ ID NO: 832653 - DNA, 75 bp, synthetic construct
  source 1..75: mol_type = other DNA
gatgaagaaacgccgcgagcataaggtgccgctgtcgccgcaggctatcgcggtggtggagcagctcagatccct

SEQ ID NO: 832654 - DNA, 75 bp, synthetic construct
  source 1..75: mol_type = other DNA
cgacctttcctggctgcagaccactatcgacctgaccgacggcgctgacgttcccgatatggtgcgcgcccgtct

SEQ ID NO: 832655 - DNA, 75 bp, synthetic construct
  source 1..75: mol_type = other DNA
aaaaataattacagagattgatgctgactttctcactgtgttaagaactctcagaaataaagctgcacatccttc

SEQ ID NO: 832656 - DNA, 75 bp, synthetic construct
  source 1..75: mol_type = other DNA
ttcaaaaagttagacgggatggccactacgaatagagttgctaaagcgatctttacagaaatatccaagaaaaga

SEQ ID NO: 832657 - DNA, 75 bp, synthetic construct
  source 1..75: mol_type = other DNA
gatattgatgccaccatcgaaataaacaacctgttattagacattgaaaaaggcggaaacatagaaccctacaat

SEQ ID NO: 832658 - DNA, 75 bp, synthetic construct
  source 1..75: mol_type = other DNA
cacctcatggttatcttcatgtcgaacagcaaaaaacaggaacccggattgccatccctctggctctgcgttgcg

SEQ ID NO: 832659 - DNA, 75 bp, synthetic construct
  source 1..75: mol_type = other DNA
atgcttaaaaaaataattttaattataacagcgacattttcagttatatctcatgcaacacaaatagaaacaacc

SEQ ID NO: 832660 - DNA, 75 bp, synthetic construct
  source 1..75: mol_type = other DNA
taaatagatttctttcaaagccagttctttcaacaactcaagttgccgaccaaatcctatctaagcttaccaatt

SEQ ID NO: 832661 - DNA, 75 bp, synthetic construct
  source 1..75: mol_type = other DNA
ggacgcattctggcgaaggtggaatctcgtaaccccagcttcagcgttaagtgccgtatcggtgccaacatgatt

SEQ ID NO: 832662 - DNA, 75 bp, synthetic construct
  source 1..75: mol_type = other DNA
acattagtctgggtcgcaattacgaagaataaacttccggcgtggttgggcgtggtgttttgtctgaatggtatc

SEQ ID NO: 832663 - DNA, 75 bp, synthetic construct
  source 1..75: mol_type = other DNA
attgaaaatagaatgtcataataacgacgacgccatcgataaagtatactctggtgatgagatacgaaatctcaa

SEQ ID NO: 832664 - DNA, 75 bp, synthetic construct
  source 1..75: mol_type = other DNA
agtttttgcggggaagtattttgttggtaaaaatattatcaacttcatctgagcgagaattattctactatttcc

SEQ ID NO: 832665 - DNA, 75 bp, synthetic construct
  source 1..75: mol_type = other DNA
ttttaagtggcctgtttacgctggtcatacatttcgcagcgccggagatgttcggaagtacggggcattatgccg

SEQ ID NO: 832666 - DNA, 75 bp, synthetic construct
  source 1..75: mol_type = other DNA
ggtataaaatcactcaggtaattcttactgaaccatctccaaatatgtatgtcaaacgaatgcgttgggtttctg

SEQ ID NO: 832667 - DNA, 75 bp, synthetic construct
  source 1..75: mol_type = other DNA
acgttcaggagagtggtctgaaactgccggtgtttatactgctacatggtcggcgcaaatggcgggagactctca

SEQ ID NO: 832668 - DNA, 75 bp, synthetic construct
  source 1..75: mol_type = other DNA
cagaacgtcacctttgtaccgggtgacgcatcgcagctcacttcaaccgttgaaacaaataagtctaactacacg

SEQ ID NO: 832669 - DNA, 75 bp, synthetic construct
  source 1..75: mol_type = other DNA
tatcaggacggcgcagatcgcggacctggtggtcattaaggacggctcagtggctgacggcgcaatggcgaatat

SEQ ID NO: 832670 - DNA, 75 bp, synthetic construct
  source 1..75: mol_type = other DNA
attgatgctgttatcgcaggccagaatcaggcttacagggaactaagaagaataagagataatattcatagtgaa

SEQ ID NO: 832671 - DNA, 75 bp, synthetic construct
  source 1..75: mol_type = other DNA
ggtgaatatggtaatcttacttcgtatgacggaatatttcgcgctgaacattattggctcgacagcggtatgata

SEQ ID NO: 832672 - DNA, 75 bp, synthetic construct
  source 1..75: mol_type = other DNA
cgtcagatcgctatgacatacagtccggttctccggcgcaagccacatcaactatcgccacggataaaaacgcat

SEQ ID NO: 832673 - DNA, 75 bp, synthetic construct
  source 1..75: mol_type = other DNA
tttccagcgcgtaagtgcaggtggtacagccacgggaacaaaactgagcggcggtaaccagaacgtctcttctgg

SEQ ID NO: 832674 - DNA, 75 bp, synthetic construct
  source 1..75: mol_type = other DNA
tcttccgatgccggtattaatgtcatggtaatcaacgtacaagcgtttaacgccaccggcaaagataatcgccgc

SEQ ID NO: 832675 - DNA, 75 bp, synthetic construct
  source 1..75: mol_type = other DNA
gagatacaactggtaaaagtgatattctttatgtaaatgaatctggtagtggtggtcagacgattgaggggatca

SEQ ID NO: 832676 - DNA, 75 bp, synthetic construct
  source 1..75: mol_type = other DNA
gaaccttactggtgattataattttgaaacaaatttatcgggtaatggttcacttataaagaataattctgggac

SEQ ID NO: 832677 - DNA, 75 bp, synthetic construct
  source 1..75: mol_type = other DNA
ttataaggttgattttgattcgtctgagttgattaaaaattgtattcgggtactcaataaagagcttaaggtaac

SEQ ID NO: 832678 - DNA, 75 bp, synthetic construct
  source 1..75: mol_type = other DNA
atgaaacttaagttcaaagtccaaccttatcaaactgttgccgtagagtcggttgttgactgctttgcggggcaa

SEQ ID NO: 832679 - DNA, 75 bp, synthetic construct
  source 1..75: mol_type = other DNA
ggtgatcgcatggatcacccgtccattgttcatgatattaacgtactgacagttgtggccagcgaaagttacaag

SEQ ID NO: 832680 - DNA, 75 bp, synthetic construct
  source 1..75: mol_type = other DNA
gattatgacctatgctggtacattgacacaggcacagggagtgaacgtaaagaatggcgggattatttttgatgc

SEQ ID NO: 832681 - DNA, 75 bp, synthetic construct
  source 1..75: mol_type = other DNA
gatacaaccgtaaactcagccggtcgtttaagaatcgatgaggggggcactcttgacggaacaaccacaatcaat

SEQ ID NO: 832682 - DNA, 75 bp, synthetic construct
  source 1..75: mol_type = other DNA
gttaaacgcttttgcaggcaatgtggtcggcactatccttaaccaggaagggaggcagtatgtttattcgggagc

SEQ ID NO: 832683 - DNA, 75 bp, synthetic construct
  source 1..75: mol_type = other DNA
aaactggattcataacacacatgagtttggagtaagtatgaatggcgatactcaatttttatcgggaacacgaaa

SEQ ID NO: 832684 - DNA, 75 bp, synthetic construct
  source 1..75: mol_type = other DNA
ggaaccatagtacaagtagcaggggaaaataatattcaaacgaaagctggtattcgtgctttctggaatgtgaga

SEQ ID NO: 832685 - DNA, 75 bp, synthetic construct
  source 1..75: mol_type = other DNA
agtaaatgctaatggaatttttgtcgaatcatgggggcaatataactggtttcatgcgtcagttaaaggtgatga

SEQ ID NO: 832686 - DNA, 75 bp, synthetic construct
  source 1..75: mol_type = other DNA
ggatgtgacgtttatcgccgatatcaggacggcgcagatcgcggacctggtggtcattaaggacggctcagtggc

SEQ ID NO: 832687 - DNA, 75 bp, synthetic construct
  source 1..75: mol_type = other DNA
aaaatgcatcggctataactattatttcaaagagtgcatcttttattggagatattagttctagtgagaaaataa

SEQ ID NO: 832688 - DNA, 75 bp, synthetic construct
  source 1..75: mol_type = other DNA
aggacccacgaaggctggctgtatcttgccgtggttgttgatctgttctcacgcaaaattatcggctggtccatg

SEQ ID NO: 832689 - DNA, 75 bp, synthetic construct
  source 1..75: mol_type = other DNA
cactctggccttttcttgaacaaaatccaaaatatcgccagatgtcattggatttgcccctatatttccagacat

SEQ ID NO: 832690 - DNA, 75 bp, synthetic construct
  source 1..75: mol_type = other DNA
ccactggcataaaagttgctctcaatgatgaacagaacttattctgtactattactttccaacacgttatcgatg

SEQ ID NO: 832691 - DNA, 75 bp, synthetic construct
  source 1..75: mol_type = other DNA
gctacccgatcgagtagtaagttaaataatgataccagacacgaaggtacgagctatcaggtcgcctataataaa

SEQ ID NO: 832692 - DNA, 75 bp, synthetic construct
  source 1..75: mol_type = other DNA
gtgtttcaaatttcgattttatcgccggacgtagtcagatatatggtgtcaagaatcaggaggactttctcgagg

SEQ ID NO: 832693 - DNA, 75 bp, synthetic construct
  source 1..75: mol_type = other DNA
cacacggcatataagaatatcaatatatatacatattatgaaaaaggtattagcctcagtagaaatcgagctata

SEQ ID NO: 832694 - DNA, 75 bp, synthetic construct
  source 1..75: mol_type = other DNA
ttcaagataatttaaatgatttacttgattatacttgtggtcttacacttccggacgaagtggaaataatcatta

SEQ ID NO: 832695 - DNA, 75 bp, synthetic construct
  source 1..75: mol_type = other DNA
gatgctgtcggaaacactgatccaagactttatgttactctttataaaaagaataaagttgttctcgtttcatca

SEQ ID NO: 832696 - DNA, 75 bp, synthetic construct
  source 1..75: mol_type = other DNA
tgcagtctgtgttacccgctcactggtggcaggaaaacaatgttcatctgcattccggtgtaaccatcaaaacat

SEQ ID NO: 832697 - DNA, 75 bp, synthetic construct
  source 1..75: mol_type = other DNA
gctactgccgtggttctggagcgatcagtacagtgataacttacagtttattggcgatatgcgtggcgatgactg

SEQ ID NO: 832698 - DNA, 75 bp, synthetic construct
  source 1..75: mol_type = other DNA
tattggatggaatagtgactggggaactaataatatagctcaggtattagataatttaacgcgtaatgatatact

SEQ ID NO: 832699 - DNA, 75 bp, synthetic construct
  source 1..75: mol_type = other DNA
cagcgtgactgcaggcaacagcgcaacggtcgcttcgacagtgaccacaaagccggacggcacggtggagatcag

SEQ ID NO: 832700 - DNA, 75 bp, synthetic construct
  source 1..75: mol_type = other DNA
tagctgatgaatttggtaatcctgtgaatgacggtctggatttgctgacagatgatgcagtgtacttacaaaatg

SEQ ID NO: 832701 - DNA, 75 bp, synthetic construct
  source 1..75: mol_type = other DNA
cgctgcgcagcttcggccgttatgaactcaccaccgcttatacccctgccgggcagttacagagccagcacctga

SEQ ID NO: 832702 - DNA, 75 bp, synthetic construct
  source 1..75: mol_type = other DNA
tggcgatcgccattacgccacgctgaaactatcgacatggagtagcgcgcagcaatccgatgcgggtgatgctgc

SEQ ID NO: 832703 - DNA, 75 bp, synthetic construct
  source 1..75: mol_type = other DNA
attacagagccggacggtacggtggagatccctgtcaccagccagacggcgggagccagtgcggtcaccgccagt

SEQ ID NO: 832704 - DNA, 75 bp, synthetic construct
  source 1..75: mol_type = other DNA
gcagcagccagagccggaacgtgacgtttgtcgcggatgtcaggacggcgaagatcgctgatctggaggtcatta

SEQ ID NO: 832705 - DNA, 75 bp, synthetic construct
  source 1..75: mol_type = other DNA
tctcagaccaaaggcctcgtagagcgtaccgatcgcatggtgctcggcatgtcgccggaaatggaagtcaacctg

SEQ ID NO: 832706 - DNA, 75 bp, synthetic construct
  source 1..75: mol_type = other DNA
ttttaaacaaaaatgggtttataaaaaatggtaacaatgatttttataaagttcatgataattttgtaaattgta

SEQ ID NO: 832707 - DNA, 75 bp, synthetic construct
  source 1..75: mol_type = other DNA
atactatcgtcgagtggattgatgacaacctgcatcaaccgctgcgtattgatgatatcgctcgccatgccgggt

SEQ ID NO: 832708 - DNA, 75 bp, synthetic construct
  source 1..75: mol_type = other DNA
ggtttttcaagtttagtaaaaacacctaattgggtgtttcaagataatgattatctagattatataccagtcttt

SEQ ID NO: 832709 - DNA, 75 bp, synthetic construct
  source 1..75: mol_type = other DNA
taacggtcatattgagcgtaccgacaaaatgaaactgtgcatgtcgccgctggcagaggtgaacctcaccaaaac

SEQ ID NO: 832710 - DNA, 75 bp, synthetic construct
  source 1..75: mol_type = other DNA
gtaccgatcgcatggtgctcggcatgtcgccggaaatggaagtcaacctgaccaagacgaaccagtacaacgtga

SEQ ID NO: 832711 - DNA, 75 bp, synthetic construct
  source 1..75: mol_type = other DNA
ttaacgctacggaaaaaggcgcggatctgcaaattaccggcaccagtaatcagcccgcaggcaccacaataacgg

SEQ ID NO: 832712 - DNA, 75 bp, synthetic construct
  source 1..75: mol_type = other DNA
atcaccgttatcttcggtggtaaaagctacaccaccacggttgccacagataatagctgggagctgacgatcccc

SEQ ID NO: 832713 - DNA, 75 bp, synthetic construct
  source 1..75: mol_type = other DNA
cgcaggttagcgcctggcctgcggggacggttaatattgccgtatccggggaaagtagcgccgaaaatccggtga

SEQ ID NO: 832714 - DNA, 75 bp, synthetic construct
  source 1..75: mol_type = other DNA
gccgatggtcaacagctgactcatgtcacctttgccgataccgccgccggtggcttagcgcccgttgaactgagc

SEQ ID NO: 832715 - DNA, 75 bp, synthetic construct
  source 1..75: mol_type = other DNA
gatggcaacagcggttccgccagccataacgtacaggttaataccgcgctgccgggcgtcaccattaacgtggtg

SEQ ID NO: 832716 - DNA, 75 bp, synthetic construct
  source 1..75: mol_type = other DNA
gcggtggcggccgatgacattattaacgctgccgaagcgggcaatgcgcaaaccatcagtgggcaggtgacgggt

SEQ ID NO: 832717 - DNA, 75 bp, synthetic construct
  source 1..75: mol_type = other DNA
aggttaataccgcgctgccgggcgtcaccattaacgtggtggcaacggacgatattattaacgccgccgaagcgg

SEQ ID NO: 832718 - DNA, 75 bp, synthetic construct
  source 1..75: mol_type = other DNA
gaatacagcgtcgatagcgccgcgccaacggtgaccatcaacaccattgccagcgataacatcatcaacgccagc

SEQ ID NO: 832719 - DNA, 75 bp, synthetic construct
  source 1..75: mol_type = other DNA
taaccgccagcagttacaccgtgaccgccacggtgagcgacaaagcgggtaacccggcaagcgccgaccacgcgc

SEQ ID NO: 832720 - DNA, 75 bp, synthetic construct
  source 1..75: mol_type = other DNA
catcactgcggtgcaggccgatggtagctggagcgtgggcgtcacggcggcgcaggttagcgcctggcctgcggg

SEQ ID NO: 832721 - DNA, 75 bp, synthetic construct
  source 1..75: mol_type = other DNA
cctggtcgaagaccgcgctgacgctgtatcagagcggcaacaactacgccaccagctccattgccgattacgacc

SEQ ID NO: 832722 - DNA, 75 bp, synthetic construct
  source 1..75: mol_type = other DNA
catcgccatcagcgcgatcaccaccgatatgggcttgatcactaacgattttgtcaccagcgacacgacgcttgc

SEQ ID NO: 832723 - DNA, 75 bp, synthetic construct
  source 1..75: mol_type = other DNA
agtaatcagccagcgggcaccactattacggtgacgctgaacgggcaaaattacaccgccacgaccgatgcttcc

SEQ ID NO: 832724 - DNA, 75 bp, synthetic construct
  source 1..75: mol_type = other DNA
tcagcggccaggtaaccggtgcggcggcgggcagcaccgtcaccgttgaactgggcggtaaaacttacaccgcca

SEQ ID NO: 832725 - DNA, 75 bp, synthetic construct
  source 1..75: mol_type = other DNA
atggcggtacggttaacgtgacgttaaataatgtcacttatagcgctcaggttagcggcggtatctggacgctga

SEQ ID NO: 832726 - DNA, 75 bp, synthetic construct
  source 1..75: mol_type = other DNA
actaacgtggtcacgctgacgggcgtgcataccgacctcgccactttgctggcgaatcatcagttgatggtggtg

SEQ ID NO: 832727 - DNA, 75 bp, synthetic construct
  source 1..75: mol_type = other DNA
acctacaccgccagcgtcgccgccaacggaagctggagcgtaaacgttccggcggcggatttggcaagcctgcca

SEQ ID NO: 832728 - DNA, 75 bp, synthetic construct
  source 1..75: mol_type = other DNA
cgatattcttaacgccgccgaagcgggatcggcgctgaccatcagcggcaccagcacggcggaagccgggcagac

SEQ ID NO: 832729 - DNA, 75 bp, synthetic construct
  source 1..75: mol_type = other DNA
gtcgatagcggcctgccgggcgtcaccatcaaccccgtggcaggcgacgatattatcaacgccgccgaagccggg

SEQ ID NO: 832730 - DNA, 75 bp, synthetic construct
  source 1..75: mol_type = other DNA
agatcccgcggtgaaaaccatcgccatcagcgcgatcaccaccgatatgggcttgatcactaacgattttgtcac

SEQ ID NO: 832731 - DNA, 75 bp, synthetic construct
  source 1..75: mol_type = other DNA
cgcacgctgaccgacggcagctacgtttatcaggttcgggtgctggatctggcggggaacaccggcccggtggta

SEQ ID NO: 832732 - DNA, 75 bp, synthetic construct
  source 1..75: mol_type = other DNA
cagccgaacccggcaatgccactccatcgtttttagtcaccgataatcagggcgatcaacgcggtattctttccg

SEQ ID NO: 832733 - DNA, 75 bp, synthetic construct
  source 1..75: mol_type = other DNA
agcgttacgcatccggtgacggtcgatctctcggcggtggcggtgagcatcaacgccattaccgccgatgatgtg

SEQ ID NO: 832734 - DNA, 75 bp, synthetic construct
  source 1..75: mol_type = other DNA
gggctggcagaaggcacgccgcttaccgtcacgattaataatgtggaatacaccaccgcggtgcaggccgatggc

SEQ ID NO: 832735 - DNA, 75 bp, synthetic construct
  source 1..75: mol_type = other DNA
gaccggttcgctgggggcggggcttgccagcggcgaagtggcgcagattagccttgatagcggcgcgacctggac

SEQ ID NO: 832736 - DNA, 75 bp, synthetic construct
  source 1..75: mol_type = other DNA
gaatgcaggcgtgccgttgacgatcacgattaacggtacgccttattccgccacggtacaggcggacggaagctg

SEQ ID NO: 832737 - DNA, 75 bp, synthetic construct
  source 1..75: mol_type = other DNA
tgaatttttattttagcttgtgtacttcagatgaagtggaaagaataaaaaatgtatcaaactcggcggattact

SEQ ID NO: 832738 - DNA, 75 bp, synthetic construct
  source 1..75: mol_type = other DNA
ggtagtaagttaatttttaacagagctctctctttaggagcatcaggttgggctacaggaagagtgaatgtgtct

SEQ ID NO: 832739 - DNA, 75 bp, synthetic construct
  source 1..75: mol_type = other DNA
aaatttatggtttttatacaacaagaattactatggatataagctcgttgcctgtcggttctttttcttgtgtga

SEQ ID NO: 832740 - DNA, 75 bp, synthetic construct
  source 1..75: mol_type = other DNA
tagaccatggtgataatgctatcaccactgccgacggtcatacaataagcgaaaaaatttatgttaattgtgtta

SEQ ID NO: 832741 - DNA, 75 bp, synthetic construct
  source 1..75: mol_type = other DNA
aatgatttacgcccacttcgctcccgaccatctggaagatgctgtaaccaaaaatcctcttgctaaccttggatg

SEQ ID NO: 832742 - DNA, 75 bp, synthetic construct
  source 1..75: mol_type = other DNA
attgatatggaaattaggtaccatgtaaatgatgtgatgaagtttattgttggtcatgaatattcacattacgta

SEQ ID NO: 832743 - DNA, 75 bp, synthetic construct
  source 1..75: mol_type = other DNA
gccaaaatggagttgggcaagatccgcgacggttttgtcattccattcaatatgccagccattgttgaactgggc

SEQ ID NO: 832744 - DNA, 75 bp, synthetic construct
  source 1..75: mol_type = other DNA
cctgtacttccttcatccagtaatattctgcttttgcctggccgtgaagaaaaacagcgatggttaaacgctaag

SEQ ID NO: 832745 - DNA, 75 bp, synthetic construct
  source 1..75: mol_type = other DNA
ggcaatctcacgacagtgacgtgctatctgatgggctttatcgcgttctggattttgacagagataccgatttgt

SEQ ID NO: 832746 - DNA, 75 bp, synthetic construct
  source 1..75: mol_type = other DNA
tgctggcgggggcgtgggaacgactggagcaggggcgggcggatattgttatcgcgccggatatgcattttcgtt

SEQ ID NO: 832747 - DNA, 75 bp, synthetic construct
  source 1..75: mol_type = other DNA
atgttcagattgttgattaacaggctgcgagtcctgttgtctttccagactcaacaggcccaactgcttgaaccg

SEQ ID NO: 832748 - DNA, 75 bp, synthetic construct
  source 1..75: mol_type = other DNA
cgccaatatcccaatgagtatttatttagcaatgtatcttaaaaaaaatgaaataaatattcttcatacaaataa

SEQ ID NO: 832749 - DNA, 75 bp, synthetic construct
  source 1..75: mol_type = other DNA
tactgatgatgattggccttgttctcacattccattaacattgatgtgtgacaacggggagatgattggtcttaa

SEQ ID NO: 832750 - DNA, 75 bp, synthetic construct
  source 1..75: mol_type = other DNA
gttccggcggcaaatgtaggcaactggcctgcgggtacggtgaatatcacggtaagcggcactaacacagccgga

SEQ ID NO: 832751 - DNA, 75 bp, synthetic construct
  source 1..75: mol_type = other DNA
atctggcggtggatctcaccgttccggtactcaccatcaacaccattgcgggcgatgacattataaacgccaccg

SEQ ID NO: 832752 - DNA, 75 bp, synthetic construct
  source 1..75: mol_type = other DNA
tgcaggtcaataccgcgctgcctggcgtcaccattaacccagttgcgaccgacgatattattaacgccgccgaat

SEQ ID NO: 832753 - DNA, 75 bp, synthetic construct
  source 1..75: mol_type = other DNA
ttccggcggcggatgtcacggcactgggcagcggcccgcaaactgttaccgccacggtgactgatgcggcgggta

SEQ ID NO: 832754 - DNA, 75 bp, synthetic construct
  source 1..75: mol_type = other DNA
attatcgagcacgggcaggcgctggtgattaccggcagcagctccggtctggcggcgggcagcaacgtcacgctg

SEQ ID NO: 832755 - DNA, 75 bp, synthetic construct
  source 1..75: mol_type = other DNA
ccgacggcggatctcagcaatctgaccgccagccagtacacggtcagcgcctcggtaagcgataaagcgggtaac

SEQ ID NO: 832756 - DNA, 75 bp, synthetic construct
  source 1..75: mol_type = other DNA
acctgttgttgcgtcttcgacaaatagtgaattcatggtccgtgcgagtgacaaacatgacactgaaaatgtcaa

SEQ ID NO: 832757 - DNA, 75 bp, synthetic construct
  source 1..75: mol_type = other DNA
tattatcatgaccttccagttaggtattggcggggtgaagaaattccgtaagatgttagcagccctgaaagcaca

SEQ ID NO: 832758 - DNA, 75 bp, synthetic construct
  source 1..75: mol_type = other DNA
tcatgttgctaatggaagatctgaacccctacttccttcatccagtaatgttctgcttttgcctggccgggagga

SEQ ID NO: 832759 - DNA, 75 bp, synthetic construct
  source 1..75: mol_type = other DNA
agacaagttctggagggaagttcatttgtcttatgttgtggtgaaaaaataaacagcactataagtgaattactt

SEQ ID NO: 832760 - DNA, 75 bp, synthetic construct
  source 1..75: mol_type = other DNA
tgctaaaaataactataacatgaaatactcttttgataggcaaaccgaacgccgaatgatagagcttataaggga

SEQ ID NO: 832761 - DNA, 75 bp, synthetic construct
  source 1..75: mol_type = other DNA
cgagtggccggagctcgttatccagctggcgcgcgaaaaagcactaggtatggctgacggtggactgcgggcaga

SEQ ID NO: 832762 - DNA, 75 bp, synthetic construct
  source 1..75: mol_type = other DNA
agcgttccgcgcctttatctgatggtctatggctcattgatatagagggggcggttagtatcagggaactaactg

SEQ ID NO: 832763 - DNA, 75 bp, synthetic construct
  source 1..75: mol_type = other DNA
tatgactttattgtgcattgcgccctagaaactggcgcaaatctcgcttggctactcaccggcaaagggtcacct

SEQ ID NO: 832764 - DNA, 75 bp, synthetic construct
  source 1..75: mol_type = other DNA
gcggcgggagcgtgacctgacggggtggatgtcgctgtcgcgtaaaccggaggtgacgtggtacggctgggacgg

SEQ ID NO: 832765 - DNA, 75 bp, synthetic construct
  source 1..75: mol_type = other DNA
cattttgtgatctgcgttacatttctggtttatacaaaatgtatttattgatttatatcaatgttgagaaaacga

SEQ ID NO: 832766 - DNA, 75 bp, synthetic construct
  source 1..75: mol_type = other DNA
ggcctgacgggctggaattgcgccgggaatatgatgaatccggccgtctgattcaggaaactgcccctgacggcg

SEQ ID NO: 832767 - DNA, 75 bp, synthetic construct
  source 1..75: mol_type = other DNA
ttgacgcggtgggcaggcttaaggcacagacggatgccgcaggccggacaacagaatacagcccggatgtggtga

SEQ ID NO: 832768 - DNA, 75 bp, synthetic construct
  source 1..75: mol_type = other DNA
atccattaaaccctgttcggtttatagattctttgggtttaaaattccatgttaacggtgatccaagtgatttta

SEQ ID NO: 832769 - DNA, 75 bp, synthetic construct
  source 1..75: mol_type = other DNA
gaatggtgaacaggcgaaggcgcggcaccgtagcctggcggaggtgttgcaggaggacacgggtgtgacgctacc

SEQ ID NO: 832770 - DNA, 75 bp, synthetic construct
  source 1..75: mol_type = other DNA
gccaccgcgtgtcggtccactacggctatgacgataaaggccgcctgacgggtgaacggcagacggtggagaacc

SEQ ID NO: 832771 - DNA, 75 bp, synthetic construct
  source 1..75: mol_type = other DNA
tggcggggggatggagtctgtatgcgtatccgctgaatccggtgaatggtattgatccattagggttaagtcctg

SEQ ID NO: 832772 - DNA, 75 bp, synthetic construct
  source 1..75: mol_type = other DNA
tcgctgtcgcgtaaaccggaggtaacgtggtacggctgggacggcgaccacctgacgacggtgcagaccgacagc

SEQ ID NO: 832773 - DNA, 75 bp, synthetic construct
  source 1..75: mol_type = other DNA
cgctgccaattaatcaagtcatcctacagcctttatctcgttatggaataaaagtgaacagtgtaaatctacctg

SEQ ID NO: 832774 - DNA, 75 bp, synthetic construct
  source 1..75: mol_type = other DNA
tgatgtatccaccccgaatcgattaaagattcttgaggcggctattcaagaaaataactatccagatgtaatagg

SEQ ID NO: 832775 - DNA, 75 bp, synthetic construct
  source 1..75: mol_type = other DNA
gacggtgaacggcgacccggcagagcagtggcagtatgatgagcacgggtggttaaccaccatcagccataccag

SEQ ID NO: 832776 - DNA, 75 bp, synthetic construct
  source 1..75: mol_type = other DNA
ctaccactacgacagccagcaccgtctggtgttctacacgcggatacagcacggtgagccccgggttgagagccg

SEQ ID NO: 832777 - DNA, 75 bp, synthetic construct
  source 1..75: mol_type = other DNA
ctaccactacgacagccagcaccgtctggtgttctacacgcggatacagcacggtgagcccctggtggagagccg

SEQ ID NO: 832778 - DNA, 75 bp, synthetic construct
  source 1..75: mol_type = other DNA
cccggcttccggcagcgagctggcccgtcgcctgcagattgcgcattatccggtacttatcaccgataccggcct

SEQ ID NO: 832779 - DNA, 75 bp, synthetic construct
  source 1..75: mol_type = other DNA
tggaagacggaaccggggtgaggcggagaataacgcgaaaccggtacggtcagcttcaggcctttacggactgct

SEQ ID NO: 832780 - DNA, 75 bp, synthetic construct
  source 1..75: mol_type = other DNA
gaaggcatcagcacttacagcagttataacccgcgtgggcaactggtcagtcagaaggatgcgcaggggcgtgaa

SEQ ID NO: 832781 - DNA, 75 bp, synthetic construct
  source 1..75: mol_type = other DNA
tggataagaatccaacagcatctccaggggatcgagcagcagcagaaaacgttcttcaggatttacagaatgctt

SEQ ID NO: 832782 - DNA, 75 bp, synthetic construct
  source 1..75: mol_type = other DNA
ccgtcacacgggccgaccggaaatccgttaccgttacgacagcgacgggcgggtgacagaacagctaaacccggc

SEQ ID NO: 832783 - DNA, 75 bp, synthetic construct
  source 1..75: mol_type = other DNA
gcgtacaacgcgcaggggctggcgaaccgctgtataccggacagcctgcccgccgtggaatggctgacctacggc

SEQ ID NO: 832784 - DNA, 75 bp, synthetic construct
  source 1..75: mol_type = other DNA
ctaccactacgacagccagcaccgtctggtgttctacacgcggatacagcacggtgagcctccggtagagagccg

SEQ ID NO: 832785 - DNA, 75 bp, synthetic construct
  source 1..75: mol_type = other DNA
ctaccactacgacagccagcaccgtctggtgttctacacgcggatacagcacggtgagcctcaggtcgagagccg

SEQ ID NO: 832786 - DNA, 75 bp, synthetic construct
  source 1..75: mol_type = other DNA
tgacgggcgaacggcagacggtggagaacccggagacgggggagatgctgtgggagcatgagacggggcatgcgt

SEQ ID NO: 832787 - DNA, 75 bp, synthetic construct
  source 1..75: mol_type = other DNA
gaagacggaccgcatcccggaaggggttatccggatgcacgacgagcggacccaccactaccattacgacagcca

SEQ ID NO: 832788 - DNA, 75 bp, synthetic construct
  source 1..75: mol_type = other DNA
tggatattgcgctgactgagcttatcccggcaggtctggtggaggatttcgaggattataaagacacgctcgatg

SEQ ID NO: 832789 - DNA, 75 bp, synthetic construct
  source 1..75: mol_type = other DNA
tgaagataatctatgataaatataatcagatgacagattacgaagtgatgatactagaatcactcgtagaatgtt

SEQ ID NO: 832790 - DNA, 75 bp, synthetic construct
  source 1..75: mol_type = other DNA
ctgcagcggtaaagaagtttaccgccgcgagtggattactgtttttccggtggaaaaatcaggttcaatacaatg

SEQ ID NO: 832791 - DNA, 75 bp, synthetic construct
  source 1..75: mol_type = other DNA
ttcaattgcgtgcgttaacccgaaaagtcatcgaaaaaccgtttgatgttgcagatggtggtagcctttctgttc

SEQ ID NO: 832792 - DNA, 75 bp, synthetic construct
  source 1..75: mol_type = other DNA
gttaacccgcccggacaaaaccacgctcacaattgaaatcacccgccgatgggaggccaccattaatgccgtatg

SEQ ID NO: 832793 - DNA, 75 bp, synthetic construct
  source 1..75: mol_type = other DNA
ccgggcgacacgtacagcgatttttcgtggggttcccgcctgtggctgcttgagcgcgaaaaactgacggaagat

SEQ ID NO: 832794 - DNA, 75 bp, synthetic construct
  source 1..75: mol_type = other DNA
cgtatccggaatatagggattctggggtggagtggttgggggagatacctcgcacttggcaggcgtacacaggaa

SEQ ID NO: 832795 - DNA, 75 bp, synthetic construct
  source 1..75: mol_type = other DNA
gcgcagcgccgcagcctggcggagaagctgcagcaggaagggagcgaggacgggcacggcgtggtatttccggct

SEQ ID NO: 832796 - DNA, 75 bp, synthetic construct
  source 1..75: mol_type = other DNA
gattttggtgcagatactcagaactatttaaatgaatttgatgaatattgttctaatcctagtggatatatagga

SEQ ID NO: 832797 - DNA, 75 bp, synthetic construct
  source 1..75: mol_type = other DNA
gagctgaaggagtcccgggaggacggccgtcagcttcaggcagaactgctggccctggcccgccaggacgggaag

SEQ ID NO: 832798 - DNA, 75 bp, synthetic construct
  source 1..75: mol_type = other DNA
ttgccccaacggtacgtgggattgcccgtacggcggcccagctaacgattcggcaaaatggttttattatctatc

SEQ ID NO: 832799 - DNA, 75 bp, synthetic construct
  source 1..75: mol_type = other DNA
gccaatggtggtgatctgcaagtaaccataagtttgaagtcaactcagaagtccgtcaatcctggactggtgagc

SEQ ID NO: 832800 - DNA, 75 bp, synthetic construct
  source 1..75: mol_type = other DNA
gcgctggcttgctcataatctagatcctaaagaccagtttgaccacgagtcagctaaaaccatgaagcctgttac

SEQ ID NO: 832801 - DNA, 75 bp, synthetic construct
  source 1..75: mol_type = other DNA
cagggttagcgctgatggtcaatgcgcaggccgacacaattacggccgccaagccgcaggataaactgagcggag

SEQ ID NO: 832802 - DNA, 75 bp, synthetic construct
  source 1..75: mol_type = other DNA
tgaagaaagcattgagttactgcataatattgcgttaggttatgataaatttgggaaagaagctgaagatattct

SEQ ID NO: 832803 - DNA, 75 bp, synthetic construct
  source 1..75: mol_type = other DNA
aatgataccctatcgattatccgacttattaaaaatgcctgtttaaaattatataatttggcacataccgcaacc

SEQ ID NO: 832804 - DNA, 75 bp, synthetic construct
  source 1..75: mol_type = other DNA
ggaaggatttgacggatgaagagaagaactgcctggccggcggcagtacgggaagcccgggaggatggggaccag

SEQ ID NO: 832805 - DNA, 75 bp, synthetic construct
  source 1..75: mol_type = other DNA
acacaaatccgttttcgtctggggccggcgagcattattgagacaaacagcaatggctggttcccgggtacagat

SEQ ID NO: 832806 - DNA, 75 bp, synthetic construct
  source 1..75: mol_type = other DNA
ggacttggagggtatctccgtaatgagtaatgccttactgagaaaggccaagcaggaaggggtgccggtagaatt

SEQ ID NO: 832807 - DNA, 75 bp, synthetic construct
  source 1..75: mol_type = other DNA
agatacagttactgtaaccggagacagtaatataagaaccaaaaccaccagtaccggggtcaaagtcgctttaaa

SEQ ID NO: 832808 - DNA, 75 bp, synthetic construct
  source 1..75: mol_type = other DNA
aaacccaccgttccaaccctaatacggttgagctcggggttccatatccttcaaacgatatggttgaaaaaatgg

SEQ ID NO: 832809 - DNA, 75 bp, synthetic construct
  source 1..75: mol_type = other DNA
cgggccttttggcgcggtaaaagaacaggcctcaggtctctatgctcagaccttagcagagcgcggattcgtgac

SEQ ID NO: 832810 - DNA, 75 bp, synthetic construct
  source 1..75: mol_type = other DNA
aaaaccggctctgtcggcgcacaggctgattacagcggtccggcctggtatctgcttgactgctcccgcgcggta

SEQ ID NO: 832811 - DNA, 75 bp, synthetic construct
  source 1..75: mol_type = other DNA
aggaaattccgcgaaggcggcaaaaacgtccgagacgaacgccaggtcttctgaaacggcagcgggacagagcgc

SEQ ID NO: 832812 - DNA, 75 bp, synthetic construct
  source 1..75: mol_type = other DNA
ggtgaaacgctgggaatgagccgggcggctattaataaacacattcagacactgcgtgactggggcgttgatgtc

SEQ ID NO: 832813 - DNA, 75 bp, synthetic construct
  source 1..75: mol_type = other DNA
tggccgaacgcttcggtgatgagcccattgtactggccagtcttgtcagggctggcgttccgctcgggcgttatg

SEQ ID NO: 832814 - DNA, 75 bp, synthetic construct
  source 1..75: mol_type = other DNA
gaacttctatactataaacgactggcttaatacctatgattgctgttcttttgttcctgcgccaaatcgcggagt

SEQ ID NO: 832815 - DNA, 75 bp, synthetic construct
  source 1..75: mol_type = other DNA
ggaaaatcggatacccggactgttgacctgtctgatgctgtataccggcggctgatactgatgaaagccatgtcg

SEQ ID NO: 832816 - DNA, 75 bp, synthetic construct
  source 1..75: mol_type = other DNA
gtcacacttgtggcattactggacgtggacggtgcgctgttttctgccgattttcgatccgcagaacgtttcgcc

SEQ ID NO: 832817 - DNA, 75 bp, synthetic construct
  source 1..75: mol_type = other DNA
actgcgtgactggggcgttgatgtctttaccgttccgggtaaaggatacagcctgcctgagcccatccagttact

SEQ ID NO: 832818 - DNA, 75 bp, synthetic construct
  source 1..75: mol_type = other DNA
tcaggacagcaagctggcaatgtgttagtggtgaaggggaactaccacggtaataacggtcaactagtaatgaat

SEQ ID NO: 832819 - DNA, 75 bp, synthetic construct
  source 1..75: mol_type = other DNA
cccatcaataatccccctgttgtggatccggaaggcccatcagtttatcgcccggaggccggaagctatatcagc

SEQ ID NO: 832820 - DNA, 75 bp, synthetic construct
  source 1..75: mol_type = other DNA
ttgcgtcctgtctcctgtacggtcatgccgttctggctgacacagccgcaccgggcaacaccacaaccggacaac

SEQ ID NO: 832821 - DNA, 75 bp, synthetic construct
  source 1..75: mol_type = other DNA
ggtgcaattgtcactcacggagagaataaaaatggcagcattgtcgcggaaaatggtcaggtttatctgactgga

SEQ ID NO: 832822 - DNA, 75 bp, synthetic construct
  source 1..75: mol_type = other DNA
gcggtgtcacgtccgcaactatcggagtgacgttcgcatctttgttccccgaggcaacgcccggcgtaatgctgt

SEQ ID NO: 832823 - DNA, 75 bp, synthetic construct
  source 1..75: mol_type = other DNA
agtttgacaaaaaagaaaaatatagactagaacacgacgaaaatggaaatatacgaccggtacttatttataagc

SEQ ID NO: 832824 - DNA, 75 bp, synthetic construct
  source 1..75: mol_type = other DNA
aaatatttagtgctttccctgataatgagcagcaggagatcataaaagaactaaaaaacaaaaaagaggctatgg

SEQ ID NO: 832825 - DNA, 75 bp, synthetic construct
  source 1..75: mol_type = other DNA
cccacactggatacgctaactcatttccctgactcgttaaaacacgccatcgacagttttttactagcgtgctgt

SEQ ID NO: 832826 - DNA, 75 bp, synthetic construct
  source 1..75: mol_type = other DNA
gaaaagggcgacttcagtgccggagtggctaagaatctgggaatcagccctgagcaacggccctggctgttcgtg

SEQ ID NO: 832827 - DNA, 75 bp, synthetic construct
  source 1..75: mol_type = other DNA
gatatataaaagattacagctatgatgatgacggaggatgtctctcttattcccgacgtctggagaaatatactg

SEQ ID NO: 832828 - DNA, 75 bp, synthetic construct
  source 1..75: mol_type = other DNA
gtggtaaacgttatcagggtgaaggcgtttcatggtttatcttgccggagaagagcgtaacggtggatgttagtg

SEQ ID NO: 832829 - DNA, 75 bp, synthetic construct
  source 1..75: mol_type = other DNA
taaacgacatcccggcacagcgtcaaaaagggctattgctcatttacttactggacccgcaacaggcgttgtcgg

SEQ ID NO: 832830 - DNA, 75 bp, synthetic construct
  source 1..75: mol_type = other DNA
agccaacagcaaactgctggcggatttcattacgcggatgaatcgtgttgatgaactcacccaatggacggtggc

SEQ ID NO: 832831 - DNA, 75 bp, synthetic construct
  source 1..75: mol_type = other DNA
gtatgccctgtacgccacggataccgtcagaacaatacagacagcccgttactttggcagacaggaagctcaggt

SEQ ID NO: 832832 - DNA, 75 bp, synthetic construct
  source 1..75: mol_type = other DNA
atgaacatgccccccgctcccggggggcattctgcgactgaactgacagttatgcgtatcctcaaaaatcgcttt

SEQ ID NO: 832833 - DNA, 75 bp, synthetic construct
  source 1..75: mol_type = other DNA
agtgccagcattgatgacaccgtggcgcgttacacggcacagtttacgcaattagataccatgatgagcaaactg

SEQ ID NO: 832834 - DNA, 75 bp, synthetic construct
  source 1..75: mol_type = other DNA
tcagtaatacgggaatacattgagattttctacaatcgtcagcgtcgtcactctcgtctggggaatatctccccg

SEQ ID NO: 832835 - DNA, 75 bp, synthetic construct
  source 1..75: mol_type = other DNA
cacggcacctgttccttttagtctgcgcctggaaggatgtcctccgggatcagtcgcgattttatttacgggaac

SEQ ID NO: 832836 - DNA, 75 bp, synthetic construct
  source 1..75: mol_type = other DNA
atgagaagagaactctttagctgtttctgcgggctactgtggagttccagcgtatgggccacggaccctttagga

SEQ ID NO: 832837 - DNA, 75 bp, synthetic construct
  source 1..75: mol_type = other DNA
cgtggacagccgcagcatgcctgattggttgcctcgcgatatcagcccttcctccgctgaatggttttatcagcg

SEQ ID NO: 832838 - DNA, 75 bp, synthetic construct
  source 1..75: mol_type = other DNA
aacaacgtgagcaggaagaccgcgaacggcatatcagtaatgctcgcaataaaaaaacgggtatttctcggcttc

SEQ ID NO: 832839 - DNA, 75 bp, synthetic construct
  source 1..75: mol_type = other DNA
atcgcgtccgtgacctgaaacaacccgccggctttgaactggataaaaaacgctgggttccacaaatcacggtcg

SEQ ID NO: 832840 - DNA, 75 bp, synthetic construct
  source 1..75: mol_type = other DNA
ccgttgcaggggcggtatatcactcaggacccgatagggctggaggggggatggagtctgtatgcgtatccgctg

SEQ ID NO: 832841 - DNA, 75 bp, synthetic construct
  source 1..75: mol_type = other DNA
aaccagacgcaataccgggccggatatccctttaactggcgctgggtaagtgcgaatacatttaccgaaacaacc

SEQ ID NO: 832842 - DNA, 75 bp, synthetic construct
  source 1..75: mol_type = other DNA
ctgacacacgtgcgattatcccgctgaccagcctcaatatccgttatgacgcggtgactgtctcaacggcagcgg

SEQ ID NO: 832843 - DNA, 75 bp, synthetic construct
  source 1..75: mol_type = other DNA
ccgatgtacattcacgattacacggatggcgcacacctcaccgccagaagttcctatattcaggggctttatatt

SEQ ID NO: 832844 - DNA, 75 bp, synthetic construct
  source 1..75: mol_type = other DNA
tgacagttcccgccctctctcagcctcaccgttccccgacacactgcccggtaccgaatacggccccgacagggg

SEQ ID NO: 832845 - DNA, 75 bp, synthetic construct
  source 1..75: mol_type = other DNA
tggtgtagttacaatgctaattgcattgtacgactctatgtttttaaagaaaaacatagagaataaaaataaaat

SEQ ID NO: 832846 - DNA, 75 bp, synthetic construct
  source 1..75: mol_type = other DNA
tgccgctggcgctcatcagcgaagacggcaatacggcgtggcgcggggagtatgatgaatggggcaaccagctta

SEQ ID NO: 832847 - DNA, 75 bp, synthetic construct
  source 1..75: mol_type = other DNA
cgcagtgcgggctgacggtggagcggctggcggcacagatagagccggtttatttgcctgagcgaaaaatacatc

SEQ ID NO: 832848 - DNA, 75 bp, synthetic construct
  source 1..75: mol_type = other DNA
acaaccggaaccggtactacgatccgttgcaggggcggtatatcactcaggacccgatagggctggaggggggat

SEQ ID NO: 832849 - DNA, 75 bp, synthetic construct
  source 1..75: mol_type = other DNA
gcgaccaccggggcctgccgctggcgctcatcagcgaagacggcaatacggcgtggcgcggggagtatgatgaat

SEQ ID NO: 832850 - DNA, 75 bp, synthetic construct
  source 1..75: mol_type = other DNA
aaccagacgcaataccgggccggatatccctttaactggcgctgggtaagtgcgaacacattcacaagcacgaca

SEQ ID NO: 832851 - DNA, 75 bp, synthetic construct
  source 1..75: mol_type = other DNA
gtgttctaaaagagaaagcatttccttcaaagaaatacagcttgctttgatgtataccttttattcgtgggacat

SEQ ID NO: 832852 - DNA, 75 bp, synthetic construct
  source 1..75: mol_type = other DNA
ccctgtttgacgcccagataaacctcctggggggacagcttaccattataggtattgtgtatcccatggtcgttg

SEQ ID NO: 832853 - DNA, 75 bp, synthetic construct
  source 1..75: mol_type = other DNA
atggcccgtcaaacgtctttcacttctttcaataaacgtccccgttcaattcgcctggtgctgaccgagctgttt

SEQ ID NO: 832854 - DNA, 75 bp, synthetic construct
  source 1..75: mol_type = other DNA
ggcaaaccacttgaaatcgctttgcattctcagtatgaaggagaagccgttttcagtggtcagattaagatccgc

SEQ ID NO: 832855 - DNA, 75 bp, synthetic construct
  source 1..75: mol_type = other DNA
aagattatgggatcaatttaatgagtacagagcgaatactatagatagtgtcgagggtaaagaagatatattgtt

SEQ ID NO: 832856 - DNA, 75 bp, synthetic construct
  source 1..75: mol_type = other DNA
aaatacgccattaaaaaaaccggttgaactttcgcaactccaggactcattctacatgaataccctgacagatct

SEQ ID NO: 832857 - DNA, 75 bp, synthetic construct
  source 1..75: mol_type = other DNA
tagctttatctgtggcagaccagtgtatagcgggtacaacaaccctatcattatctccacaagccatgggttaca

SEQ ID NO: 832858 - DNA, 75 bp, synthetic construct
  source 1..75: mol_type = other DNA
cccgtgccgggtgccgtggtggcgatggtgggtatctccattatcgccattctctcaccgtggctactgtttagc

SEQ ID NO: 832859 - DNA, 75 bp, synthetic construct
  source 1..75: mol_type = other DNA
atgtataacgggaatgaattgcgaattattcaaagtttgcaaaaagatatagaagatgaacttaatcgtattgga

SEQ ID NO: 832860 - DNA, 75 bp, synthetic construct
  source 1..75: mol_type = other DNA
aaggtcgttgatgccagcagtctgatcatttcgaacaaccttgacggtacgattaatccggccttcccggaagaa

SEQ ID NO: 832861 - DNA, 75 bp, synthetic construct
  source 1..75: mol_type = other DNA
gataatgtaatggtgaatgaagttgaaaccgcattatttaatgcaagggctctggcactcaaaatttatagcatg

SEQ ID NO: 832862 - DNA, 75 bp, synthetic construct
  source 1..75: mol_type = other DNA
gccacgcttgatgtgcacagacaacaatgggtgtgttcaggcttcactcccaactgtctacccactgataaaaat

SEQ ID NO: 832863 - DNA, 75 bp, synthetic construct
  source 1..75: mol_type = other DNA
tacctacaccaccaccgttcaggccaatttaagctggagcgtgagcgttctggcggcagatattcaggcgctggg

SEQ ID NO: 832864 - DNA, 75 bp, synthetic construct
  source 1..75: mol_type = other DNA
cgggcctgatcgctaatgattttgtcaccagcgatacgacgcttgcggtgagcggcacgttgggcgcggcgcttt

SEQ ID NO: 832865 - DNA, 75 bp, synthetic construct
  source 1..75: mol_type = other DNA
gccattagcgcgatcactaccgatacgggcctgatcgctaatgattttgtcaccagcgatacgacgcttgcggtg

SEQ ID NO: 832866 - DNA, 75 bp, synthetic construct
  source 1..75: mol_type = other DNA
tgccagacggcgcggcgaacgtgcaggccagcgtcagcagcgcgagcggtaacagtgcctcggcgacccatgcgt

SEQ ID NO: 832867 - DNA, 75 bp, synthetic construct
  source 1..75: mol_type = other DNA
cgatgaacgggcgcaaatcagcctcgacggcggcgttacctggaccaccttaaccgttatcggcaccaactggag

SEQ ID NO: 832868 - DNA, 75 bp, synthetic construct
  source 1..75: mol_type = other DNA
actatcagcggccaggtgacgggcgcggcgcagggagatacggtcaccatcacgctgggcggcaacacctacacc

SEQ ID NO: 832869 - DNA, 75 bp, synthetic construct
  source 1..75: mol_type = other DNA
atcagcggcgataacgtcctgaacgccgatgaaaaaggccagccgttgaccattagcggtagcagtacggggctg

SEQ ID NO: 832870 - DNA, 75 bp, synthetic construct
  source 1..75: mol_type = other DNA
tgccaacctgccaggcctgcgggtcgataccgtggcaggcgatgatgtgattaacagcattgagcacactcaggc

SEQ ID NO: 832871 - DNA, 75 bp, synthetic construct
  source 1..75: mol_type = other DNA
gcggcgggtgatgtggtaaccgtcacgctgaacggtaaaaactacaccaccacgctggacgcctccggtaactgg

SEQ ID NO: 832872 - DNA, 75 bp, synthetic construct
  source 1..75: mol_type = other DNA
cccatacggtgaatgtcgaatcgctcctgcctggggtgatcattaataccgtggcgggcgatgacattatcaacg

SEQ ID NO: 832873 - DNA, 75 bp, synthetic construct
  source 1..75: mol_type = other DNA
gacaaaactacagcgccactaccgacgcctccggcaactggagcgttaccgtgcccgcctcggcagtcagtgcgc

SEQ ID NO: 832874 - DNA, 75 bp, synthetic construct
  source 1..75: mol_type = other DNA
cggaggcgggaaatccgctcaccatcagcggcaccagcaccgccgaaaccgggcagacggtcaccgtaaccctca

SEQ ID NO: 832875 - DNA, 75 bp, synthetic construct
  source 1..75: mol_type = other DNA
tggagcgtcagcgtaccaaccggcgatttagctagccttaccgccagctcgtataccgttaacgcctcggtcagc

SEQ ID NO: 832876 - DNA, 75 bp, synthetic construct
  source 1..75: mol_type = other DNA
agcggcaggggacattaagcagttcgcaggccaccgacgacaccacgccgttgctgaacggcgtgctctccgcgc

SEQ ID NO: 832877 - DNA, 75 bp, synthetic construct
  source 1..75: mol_type = other DNA
ggaccgcaacggttggtagcggaggaagctggtcggtatttattccggctcagcagtttgtcggattaagcgacg

SEQ ID NO: 832878 - DNA, 75 bp, synthetic construct
  source 1..75: mol_type = other DNA
aacatcatcaatgccagcgaagcggcggcgggcgtaacggtttccggcaccagtacggcggaagcggggcaaacg

SEQ ID NO: 832879 - DNA, 75 bp, synthetic construct
  source 1..75: mol_type = other DNA
ccctgaccgccagtaactacaccgtcagcgcggcggtgagcgacaaagccggaaacccggcctccgttaaccaca

SEQ ID NO: 832880 - DNA, 75 bp, synthetic construct
  source 1..75: mol_type = other DNA
acaactacgccaccagttccattgccgattacgaccgcaacggcacgggcgatctgtttattacccgcgatgact

SEQ ID NO: 832881 - DNA, 75 bp, synthetic construct
  source 1..75: mol_type = other DNA
ctgggggctgacctacggcctcgacaaccacgggatgtggacggtgctggcgaaccagcaaattatgcaatcaac

SEQ ID NO: 832882 - DNA, 75 bp, synthetic construct
  source 1..75: mol_type = other DNA
cgatctggcaggcaacgtcggcgcaacgggcagccagacggcgcagattgataccgttaatccggcgcaggtgtt

SEQ ID NO: 832883 - DNA, 75 bp, synthetic construct
  source 1..75: mol_type = other DNA
cgggaacacttacacagcggaggttcagcccgatttaagctggagtgtcaccgttccggcagccgatctccaggc

SEQ ID NO: 832884 - DNA, 75 bp, synthetic construct
  source 1..75: mol_type = other DNA
ggctacaccggcaacggcaaagccagctacgtcaacggcgtggcaacgctggatgcgcaggccggaaacatcggt

SEQ ID NO: 832885 - DNA, 75 bp, synthetic construct
  source 1..75: mol_type = other DNA
gcggtggtaactcgacgtctgtctccatgacctgggcggatttcgatggtgatggcgatatggatctcttcctgc

SEQ ID NO: 832886 - DNA, 75 bp, synthetic construct
  source 1..75: mol_type = other DNA
gcgggcgacacggtgaccgtcacgctgggtggcgagacttacacggcgacagtgcaggccaatttaagctggagt

SEQ ID NO: 832887 - DNA, 75 bp, synthetic construct
  source 1..75: mol_type = other DNA
tcgagcacggacaggcgctggtgattaccggcagcagttccggtctggcgacgggcagtaacgtcacgctgacca

SEQ ID NO: 832888 - DNA, 75 bp, synthetic construct
  source 1..75: mol_type = other DNA
cagcgggcaggtgacgggcgcggcagcgggcgacacggtaaccgtcacgctcggcggggcgacgtacactgccac

SEQ ID NO: 832889 - DNA, 75 bp, synthetic construct
  source 1..75: mol_type = other DNA
agcgtgaacgttccggcaacggatttaagcggattaaccgccagcagttataccgtgactgcgacggtgagcgac

SEQ ID NO: 832890 - DNA, 75 bp, synthetic construct
  source 1..75: mol_type = other DNA
gggtacagtgaatatcattgtaagcggcactaacactgcagaaacgactacgactatcacctatccagtcaccgt

SEQ ID NO: 832891 - DNA, 75 bp, synthetic construct
  source 1..75: mol_type = other DNA
accgtcaccgttacgctgggcggtaaaacttacaccgccactgtccagccagatttaagctggaatgtaagcata

SEQ ID NO: 832892 - DNA, 75 bp, synthetic construct
  source 1..75: mol_type = other DNA
cgacacaaatcatcaacccgcagtcgggaatgggcgttaacgacacctcggcgctggtcaacttctacggactta

SEQ ID NO: 832893 - DNA, 75 bp, synthetic construct
  source 1..75: mol_type = other DNA
aggcgggaagcccgctcaccatcagcggcaccagcaccgccgaaaccgggcagacggtgaccgtcacccttaacg

SEQ ID NO: 832894 - DNA, 75 bp, synthetic construct
  source 1..75: mol_type = other DNA
cggcccgacgctgactattaacaccgtctccggtgatgacattattaataatgcagagaaaacccaggatctgac

SEQ ID NO: 832895 - DNA, 75 bp, synthetic construct
  source 1..75: mol_type = other DNA
taccgtgaccgccacggtgagcgacaaagcgggtaacccggcaagcgccgaccacgcgctggcggtagatatcac

SEQ ID NO: 832896 - DNA, 75 bp, synthetic construct
  source 1..75: mol_type = other DNA
cggctcgaattttaacgacactctgaccggcagcagcggcgataaccaactggaagggcgcggcggtaacgacac

SEQ ID NO: 832897 - DNA, 75 bp, synthetic construct
  source 1..75: mol_type = other DNA
ggcgctgaacgtgccagctgcggatctggcagcgctcgggcagggcgcacagactattaccgccagcgtgaacga

SEQ ID NO: 832898 - DNA, 75 bp, synthetic construct
  source 1..75: mol_type = other DNA
gccagccataacgtgcaggtcaataccgcgctgccgggcgtcaccattaatccggtggcgacggacgatattatc

SEQ ID NO: 832899 - DNA, 75 bp, synthetic construct
  source 1..75: mol_type = other DNA
gcggttgcgggtaatatggtgattgtcaccattggcggcaatcaatataacgccaccgtgcagccagatttaagc

SEQ ID NO: 832900 - DNA, 75 bp, synthetic construct
  source 1..75: mol_type = other DNA
ttcttaacgccgctgaggcgggcaatccgttaaccatcagcggcaccagcaccgccgaagcggggcaaacggtaa

SEQ ID NO: 832901 - DNA, 75 bp, synthetic construct
  source 1..75: mol_type = other DNA
cgtggcgggcgatgatgttgttaatattatcgagcacggacaggcgctggtgattaccggcagcagctccggtct

SEQ ID NO: 832902 - DNA, 75 bp, synthetic construct
  source 1..75: mol_type = other DNA
cagacggtgaccgtcacctttaacgggcaaacctggaccgcaacggtcggcagcggcggaagttggtcggtgttt

SEQ ID NO: 832903 - DNA, 75 bp, synthetic construct
  source 1..75: mol_type = other DNA
tggagcgtcagcgtaccggcgaacgttttgcaggcgctgggcaacggtgaactgaccatcagcgcctcggtgact

SEQ ID NO: 832904 - DNA, 75 bp, synthetic construct
  source 1..75: mol_type = other DNA
ttacgctgggtggcaacacctacaccgccacggtgcaggctaatttaagctggagcgttagcgtgccggcggcgg

SEQ ID NO: 832905 - DNA, 75 bp, synthetic construct
  source 1..75: mol_type = other DNA
cgtctattacggcaataccgtgaagctgtacaactcggcgggagtgctggtcgccacgcaaatcatcaacccgca

SEQ ID NO: 832906 - DNA, 75 bp, synthetic construct
  source 1..75: mol_type = other DNA
acaccaccacggtggcggctaacggtagctggagcaccaccgttccggcggcggatatggcgaccctgcgtgacg

SEQ ID NO: 832907 - DNA, 75 bp, synthetic construct
  source 1..75: mol_type = other DNA
gcaacgttggcgcaaccggcagccagtcggcgcagattgacaccgttaacccggcgcaggtgctcaccatcgcca

SEQ ID NO: 832908 - DNA, 75 bp, synthetic construct
  source 1..75: mol_type = other DNA
tatcaacgccgccgaagccggggccgatcaaaccatcagcggggtggtgacccgcgccgccgcaggcgatacagt

SEQ ID NO: 832909 - DNA, 75 bp, synthetic construct
  source 1..75: mol_type = other DNA
tcggtagcggtgcacagaccatcaccgccagcgtcagcgatcgggcgggtaatagcgacgacgccggccgcaccg

SEQ ID NO: 832910 - DNA, 75 bp, synthetic construct
  source 1..75: mol_type = other DNA
cggcagttatccgatcaacgtttcagtcactgaccgcgccggaaacagcggcagccagtcactcactgtcacggt

SEQ ID NO: 832911 - DNA, 75 bp, synthetic construct
  source 1..75: mol_type = other DNA
caaatcagtaccgacaacggcgcaacctgggtgaacgtgaccgttgccgcagacggccttaactggagttacgtt

SEQ ID NO: 832912 - DNA, 75 bp, synthetic construct
  source 1..75: mol_type = other DNA
cggcagcaccagcgggattgaaagcgggcaaaccgttaccgtcacctttggcggcaaaacctacaccgcaagcgt

SEQ ID NO: 832913 - DNA, 75 bp, synthetic construct
  source 1..75: mol_type = other DNA
acaactacgccaccagttccattgccgattacgatcgtaacggcacgggcgatttgtttatcactcgtgatgact

SEQ ID NO: 832914 - DNA, 75 bp, synthetic construct
  source 1..75: mol_type = other DNA
ctggcaaacggcggcatggacgtggttgatttccgcctctcgacggtgggcgtgaccgcgaacttaagcagcacc

SEQ ID NO: 832915 - DNA, 75 bp, synthetic construct
  source 1..75: mol_type = other DNA
aatcatttgttgtattgggaacagaagcgccaacaattgacttattggcaagttcaacagaacaaacgttaaact

SEQ ID NO: 832916 - DNA, 75 bp, synthetic construct
  source 1..75: mol_type = other DNA
gttggtgcggtttgtcaccagacaaggtgatgacacccgaagctggatcgtcgttcatcggactgtgaagacata

SEQ ID NO: 832917 - DNA, 75 bp, synthetic construct
  source 1..75: mol_type = other DNA
ttacttcagagaaagcaattcagacattggaattacaacctttggctgaaattcgctcatttggacaaggaggcg

SEQ ID NO: 832918 - DNA, 75 bp, synthetic construct
  source 1..75: mol_type = other DNA
gatgcggtttacgggactgaagaggggctaccgtctgacagctatgatgcataagcccctggcccggaagcggtg

SEQ ID NO: 832919 - DNA, 75 bp, synthetic construct
  source 1..75: mol_type = other DNA
ccaccagccacattaatcagtcacatcacagcgatgccgttgctgtcgacctgcgcttagtcaactgtgatctgg

SEQ ID NO: 832920 - DNA, 75 bp, synthetic construct
  source 1..75: mol_type = other DNA
ctgcttctgacaacggtagcggaatgccggtatccaaagttggcgtaaccttcgatagtgatcctacccacgtaa

SEQ ID NO: 832921 - DNA, 75 bp, synthetic construct
  source 1..75: mol_type = other DNA
gcacgcgagcaaacgtatttcgtcgacaagacggccgatcatagagaaaaccggctgtggatgatggccaacatg

SEQ ID NO: 832922 - DNA, 75 bp, synthetic construct
  source 1..75: mol_type = other DNA
gcacgcgagcaaacgtatttcgtcgacaacacggctgatcatagagaaaaccgtctgtggatgatggccaacatg

SEQ ID NO: 832923 - DNA, 75 bp, synthetic construct
  source 1..75: mol_type = other DNA
gcacgcgagcaaacgtatttcgtcgacaatacggctgatcatagagaaaaccgcctgtggatgatggccaacatg

SEQ ID NO: 832924 - DNA, 75 bp, synthetic construct
  source 1..75: mol_type = other DNA
ggggcgatagctctaggccatcctttgggagcatctggctcaagaattgttgtttctttattatatcaaatgata

SEQ ID NO: 832925 - DNA, 75 bp, synthetic construct
  source 1..75: mol_type = other DNA
ttaaaaaaagcaaaactggatattaaagatattgatctttttgaaattaacgaggcgtttgcggctcaggcaata

SEQ ID NO: 832926 - DNA, 75 bp, synthetic construct
  source 1..75: mol_type = other DNA
ccgcctgtggatgatggccaacatggggagggttctgaggagttatcttgcgatgcgctataggtttgccccatc

SEQ ID NO: 832927 - DNA, 75 bp, synthetic construct
  source 1..75: mol_type = other DNA
gctgtttttcatgacggcatccgcccgatcctgccgcaactgattgaaggctatatgaaccgtcgtgaggcgggg

SEQ ID NO: 832928 - DNA, 75 bp, synthetic construct
  source 1..75: mol_type = other DNA
tatcaaagacagtatatagcgagtgttgcggaattgaatttgaatgcgcaactgaagatggctggttggagcgat

SEQ ID NO: 832929 - DNA, 75 bp, synthetic construct
  source 1..75: mol_type = other DNA
acggtgcaacggtcgctttgacggaaaccacaaagccggacggcacggcggaaatcagtgtcaccagccagacgg

SEQ ID NO: 832930 - DNA, 75 bp, synthetic construct
  source 1..75: mol_type = other DNA
ctataaccgtcgctgtgacgctgaaagacgcgcacggtaacctggttgaagggggcgagtccttattgtctggtg

SEQ ID NO: 832931 - DNA, 75 bp, synthetic construct
  source 1..75: mol_type = other DNA
aaatgaccaactaccgccgggaagatttcatccggatccgcgatgagtaccgcgccaaactcaaagcattgaaac

SEQ ID NO: 832932 - DNA, 75 bp, synthetic construct
  source 1..75: mol_type = other DNA
gcaaagtatgcggtgaatacttcgtgccgaaattccacgacatccggatccgctggtgctgcccggagcacggca

SEQ ID NO: 832933 - DNA, 75 bp, synthetic construct
  source 1..75: mol_type = other DNA
agaaatttaatcctgaaactggtatatcagagcttggaacaggaaagtcttctggcttgtgcgtagagtattatt

SEQ ID NO: 832934 - DNA, 75 bp, synthetic construct
  source 1..75: mol_type = other DNA
cagatcgcggatctggtggtcacccgggataactcagtggctgacggcgcaatggcgaatacgttgcaagtgaag

SEQ ID NO: 832935 - DNA, 75 bp, synthetic construct
  source 1..75: mol_type = other DNA
ggcggatatacctgtcagtgttttattatctgatgaatttggtaatcctgtgaatgacggtctggatttgctgac

SEQ ID NO: 832936 - DNA, 75 bp, synthetic construct
  source 1..75: mol_type = other DNA
attagctttggtcaggatactgcgaccatgttctatcaggaaaacgcatatttcacaggtgataaaataaagatt

SEQ ID NO: 832937 - DNA, 75 bp, synthetic construct
  source 1..75: mol_type = other DNA
ggtaatgcgcttgccggacagacggtcagcgtgatggcggacaacggtgcagcggtcgcttcgacgatgaccaca

SEQ ID NO: 832938 - DNA, 75 bp, synthetic construct
  source 1..75: mol_type = other DNA
tcccgcgaaaagtaggttcgttatggggtgaatatggtaatctgacttcttatgacggaatatttcgctctgaac

SEQ ID NO: 832939 - DNA, 75 bp, synthetic construct
  source 1..75: mol_type = other DNA
ttcggtaatacgcttgccgggcagacggtcagcgtgacagcaggcaatggcgcaacggtcgctccgacggtcacc

SEQ ID NO: 832940 - DNA, 75 bp, synthetic construct
  source 1..75: mol_type = other DNA
gcacgcgagcaaacgtatttcgtcgacaaaacggcggatcatagagaaaaccgactgtggatgatggccaacatg

SEQ ID NO: 832941 - DNA, 75 bp, synthetic construct
  source 1..75: mol_type = other DNA
catcaaaccttaccgttagcacaagctgcggacgcgcatcgcattcttgaagccaataccaacatcggcaaagtg

SEQ ID NO: 832942 - DNA, 75 bp, synthetic construct
  source 1..75: mol_type = other DNA
gttaaccgtctccgccagtgacggccggcgtatcgcgtcaccaccaccaaagagatcctcattgaacgcggtctg

SEQ ID NO: 832943 - DNA, 75 bp, synthetic construct
  source 1..75: mol_type = other DNA
caattacctttaacgccatcagcggcgataacgtcctgaacgccgatgaaaaaggccagccgttgaccattagcg

SEQ ID NO: 832944 - DNA, 75 bp, synthetic construct
  source 1..75: mol_type = other DNA
atataaatctatttattacagcgtcattgctaagcattttaaagcagactcatttattcatccaataaggcatgc

SEQ ID NO: 832945 - DNA, 75 bp, synthetic construct
  source 1..75: mol_type = other DNA
gtgagttcatctggacatgaatatactgagcgtgaatttgaactagaaagggaaaaatctactcgcggtaaagga

SEQ ID NO: 832946 - DNA, 75 bp, synthetic construct
  source 1..75: mol_type = other DNA
aaataaaaaagtaacaaaattactaagtgatttagataaaatatctggagatattaaacgaagctacggtgttcc

SEQ ID NO: 832947 - DNA, 75 bp, synthetic construct
  source 1..75: mol_type = other DNA
ggcacgcgggatatcaccatcgacgccaatctgcccggtctgcgggtcgatacggtggcgggcgatgatgtggtc

SEQ ID NO: 832948 - DNA, 75 bp, synthetic construct
  source 1..75: mol_type = other DNA
ccgccagccataacgtgcaggtcaataccgcgctgcctggcgtcacccttaatccggtggcgagcgacgatatta

SEQ ID NO: 832949 - DNA, 75 bp, synthetic construct
  source 1..75: mol_type = other DNA
catgacgggttaatggatatcgcccgtattgcccagaccggacagtcgtatctttacaccaacgttggcggtgcc

SEQ ID NO: 832950 - DNA, 75 bp, synthetic construct
  source 1..75: mol_type = other DNA
gccgccgactggcaggcgctgggtaacggtgagttaacggttaacgcctcggtgaccaacgccgttggcaacacc

SEQ ID NO: 832951 - DNA, 75 bp, synthetic construct
  source 1..75: mol_type = other DNA
gccgggcagacggtgaccgtgacgctaaacggcgtcaattacagcggcaacgtgcaggcagacgggagctggagc

SEQ ID NO: 832952 - DNA, 75 bp, synthetic construct
  source 1..75: mol_type = other DNA
cggatctgcaaatttccggcaccagtaatcagccagcaggcaccacaattacgctgacgcttaacgggcaaaatt

SEQ ID NO: 832953 - DNA, 75 bp, synthetic construct
  source 1..75: mol_type = other DNA
gatgtcagtgagctgccgcttaacgagctgaaagcggtagttgaagtgctggacgttgagccggtatttactcac

SEQ ID NO: 832954 - DNA, 75 bp, synthetic construct
  source 1..75: mol_type = other DNA
gcgctctgctctccctgggcagggaaatgttccgcctcgaaattctggaggacattgcccgggataaagtcagaa

SEQ ID NO: 832955 - DNA, 75 bp, synthetic construct
  source 1..75: mol_type = other DNA
gaagatgagttgcttaattatctcaagaaagttcagatattccttagccattctaaacatgataaagatggagag

SEQ ID NO: 832956 - DNA, 75 bp, synthetic construct
  source 1..75: mol_type = other DNA
atgagagggaatgtgcgcgctggccccctcaccctaaccctctccccagaggggcgaggggaccgattgtgctcg

SEQ ID NO: 832957 - DNA, 75 bp, synthetic construct
  source 1..75: mol_type = other DNA
tttggtcagcatggggataaagtggtgcagccgctggtgcaaaagctggataagcagcaggtgctttcgcagcga

SEQ ID NO: 832958 - DNA, 75 bp, synthetic construct
  source 1..75: mol_type = other DNA
gcctacaaaaacaatatctacaacaactggaacctttcgggtgaccgcgcgctttcggctcgtcgggtgctggaa

SEQ ID NO: 832959 - DNA, 75 bp, synthetic construct
  source 1..75: mol_type = other DNA
ggcctagagcgatcgcatttattgccgcatttaatgagttttggatgcagcttcaggagccaacgcgaacagtct

SEQ ID NO: 832960 - DNA, 75 bp, synthetic construct
  source 1..75: mol_type = other DNA
caggtacaaatgttaaaggcaacaccgtcgattttggcaatgttttaacctcggatattagtaacgggaccagta

SEQ ID NO: 832961 - DNA, 75 bp, synthetic construct
  source 1..75: mol_type = other DNA
agaaccacctattacctcggcagcgactatcagagccgtatatatactggcggcggttccggttactacgattca

SEQ ID NO: 832962 - DNA, 75 bp, synthetic construct
  source 1..75: mol_type = other DNA
ggcattgaaacgcggctgtccaccacaaaaaccgggaacagcgtcgggctattgggtaaccaacagacaaacaat

SEQ ID NO: 832963 - DNA, 75 bp, synthetic construct
  source 1..75: mol_type = other DNA
tagtcactgcgttttaccagcagaatgcaaatctggtaatgacactgacgacagagcacactgaaacgttggtta

SEQ ID NO: 832964 - DNA, 75 bp, synthetic construct
  source 1..75: mol_type = other DNA
gtgcgtggcaagcttcttccaaccagcgaagcgatcacactttttgaaaaagcgcagtcgatttatcacgaactc

SEQ ID NO: 832965 - DNA, 75 bp, synthetic construct
  source 1..75: mol_type = other DNA
atgaataaaacggcaaataatcatgctgattttgcgcgagcccagcgcgaagcaattattaagaaagtaactgaa

SEQ ID NO: 832966 - DNA, 75 bp, synthetic construct
  source 1..75: mol_type = other DNA
atatgaatgtggtgcagacctgactgctaatggtaaaaaaatcatattcgtgttaattggtgattcggaattaca

SEQ ID NO: 832967 - DNA, 75 bp, synthetic construct
  source 1..75: mol_type = other DNA
aaccatgaaaaaaatttggaattggccactttgattagaaaaaaattacataaaatgtatggggaagatatatac

SEQ ID NO: 832968 - DNA, 75 bp, synthetic construct
  source 1..75: mol_type = other DNA
tgttggttgtatgttcaaaattataaaaagagaaaagataatgaaagtgtgttttctttttatcctaaaaaaata

SEQ ID NO: 832969 - DNA, 75 bp, synthetic construct
  source 1..75: mol_type = other DNA
ccactgggtaaagtcagtaaaaatgcattttcaggtgtaggtagtctggcgtcgccacagaagttcagtattaaa

SEQ ID NO: 832970 - DNA, 75 bp, synthetic construct
  source 1..75: mol_type = other DNA
tgacccacctcaaccggatgcgcgaacgttttactgatgtgcacaccctgcgcgtcactggcggcccggcgcact

SEQ ID NO: 832971 - DNA, 75 bp, synthetic construct
  source 1..75: mol_type = other DNA
ctggtaggaaaaaaaatgtgttcccctatttgattgctggagatttattcatttcaccatcacacaaagaaggtt

SEQ ID NO: 832972 - DNA, 75 bp, synthetic construct
  source 1..75: mol_type = other DNA
tttttttgaaggtattgttttcttatgcaagcgttggaacaatgataagtcaatcatagaaaagcatcgtcattc

SEQ ID NO: 832973 - DNA, 75 bp, synthetic construct
  source 1..75: mol_type = other DNA
gcacaaggtatcaaagcaaatgaccttgatgataaattactccgcgaatgcttttgtggttttttggaaggatta

SEQ ID NO: 832974 - DNA, 75 bp, synthetic construct
  source 1..75: mol_type = other DNA
ttaatcgtttgggtcttgttgatcgtcggctactatgtcgttcgctacaacaataactatcagacttcattatca

SEQ ID NO: 832975 - DNA, 75 bp, synthetic construct
  source 1..75: mol_type = other DNA
ccaaaatcgagttatatgatggggtaaaagatacttaccagtggtttttgaataatatagaaaatataagaaaat

SEQ ID NO: 832976 - DNA, 75 bp, synthetic construct
  source 1..75: mol_type = other DNA
aaccagcattagcccaaatgcggaagtcagcctcgataatactcaggggttaggcagaggaaatattgccaatga

SEQ ID NO: 832977 - DNA, 75 bp, synthetic construct
  source 1..75: mol_type = other DNA
atgcggatggtgcacttggcaacacccgggaactgaacatcagcaacgcggccatcgtcgatcttaatggatcga

SEQ ID NO: 832978 - DNA, 75 bp, synthetic construct
  source 1..75: mol_type = other DNA
ttgttgacagtagttgtgaagttacctccgatacagcggatcaaactgttcctcttggaaaagtcagtaaaaatg

SEQ ID NO: 832979 - DNA, 75 bp, synthetic construct
  source 1..75: mol_type = other DNA
gtgggacgcagcggtaaagcgtgccggaatccgccatcgcaaatcgtatcagtcgagacacacttatgcctgctg

SEQ ID NO: 832980 - DNA, 75 bp, synthetic construct
  source 1..75: mol_type = other DNA
tttatcaacaatcagcctgccgcacgccagggcgacaaactggagtgcagcgcagcaatcgtgggaggttcgccg

SEQ ID NO: 832981 - DNA, 75 bp, synthetic construct
  source 1..75: mol_type = other DNA
ggacgacgagcggacccaccactaccactacgacagccagcaccgtctggtgttctacacgcggatacagcatgg

SEQ ID NO: 832982 - DNA, 75 bp, synthetic construct
  source 1..75: mol_type = other DNA
gccggaaaatcgattgccgccaaagtgatgatgggcggcgatttggctatggatatcgccaatacccgttatatg

SEQ ID NO: 832983 - DNA, 75 bp, synthetic construct
  source 1..75: mol_type = other DNA
atcatggaaagaatcccgttatcgggttaatgccatcggtattaatccgataacgggatattgtcagcgccaatg

SEQ ID NO: 832984 - DNA, 75 bp, synthetic construct
  source 1..75: mol_type = other DNA
tgatgacgtctgtttgcccaacagaattgaaagtcaatatttacatatggaggcgacgaaagcagatatatgtgg

SEQ ID NO: 832985 - DNA, 75 bp, synthetic construct
  source 1..75: mol_type = other DNA
gagtaactcgggcagccatctatttacggttaacaaatcttccgatagctataatttctgaaaagctttgctatg

SEQ ID NO: 832986 - DNA, 75 bp, synthetic construct
  source 1..75: mol_type = other DNA
atgttgcaaaatcaatacgttcgtgaaatgcgaaaatatggcgtacgaggtttacgttacgatgcagcaaaacac

SEQ ID NO: 832987 - DNA, 75 bp, synthetic construct
  source 1..75: mol_type = other DNA
gaaatgaagtttattgcacgctatgtggcaaccaatgcgaccgtaacggctggtacggcgaacgcggattcataa

SEQ ID NO: 832988 - DNA, 75 bp, synthetic construct
  source 1..75: mol_type = other DNA
gacgtctttattggcggtgagcaggtgacctatctggatatccagccggagttcccgccgtggcagagaatgatc

SEQ ID NO: 832989 - DNA, 75 bp, synthetic construct
  source 1..75: mol_type = other DNA
ggattaggcttcctgttgaattaaaaaaaataattgaagcgtcatcaaaacaaaataatcgttctatgaatgctg

SEQ ID NO: 832990 - DNA, 75 bp, synthetic construct
  source 1..75: mol_type = other DNA
ggcataagcaggaaagtcgtgcgaattaccccgggagatctgccgctctgccagtgtgctaccgacgccgtagta

SEQ ID NO: 832991 - DNA, 75 bp, synthetic construct
  source 1..75: mol_type = other DNA
tcgctgagttacgcctctgcgaaaaagagcagaaccacgatgaccggggataaggcatttcattatgaaagtctg

SEQ ID NO: 832992 - DNA, 75 bp, synthetic construct
  source 1..75: mol_type = other DNA
cagcccgcaggcactacaattacggtgacgctgaacgggcaaaattacaccgcgacgaccgatgcttctggtaac

SEQ ID NO: 832993 - DNA, 75 bp, synthetic construct
  source 1..75: mol_type = other DNA
gctttgccgcaggtacagcgctgacggtggtgataaataatcaaacttacgccgcgacggtgctggcgaatggta

SEQ ID NO: 832994 - DNA, 75 bp, synthetic construct
  source 1..75: mol_type = other DNA
cggcagaggcaggaagcccgctgaccatcagcggtaccagcactgccgaaacaggacaggcggtcaccgtcaccc

SEQ ID NO: 832995 - DNA, 75 bp, synthetic construct
  source 1..75: mol_type = other DNA
ttcgtccctgactacgttgagtctctgaaagattgtccggtttcgtatgatatcggccttgaacttcagcagtgt

SEQ ID NO: 832996 - DNA, 75 bp, synthetic construct
  source 1..75: mol_type = other DNA
tttaaccctttccggcaccaccactaacgtagaacccggtcaaaccgtcaccgtcacctttggcgggaaaaatta

SEQ ID NO: 832997 - DNA, 75 bp, synthetic construct
  source 1..75: mol_type = other DNA
ccagtggcgaccgacgatattattaacgccgccgaatcgggcgtggcgcagactatcagcgggcaggtgacaggt

SEQ ID NO: 832998 - DNA, 75 bp, synthetic construct
  source 1..75: mol_type = other DNA
atcaacaccctttccactgacgatgtgattaacgccgccgaaaaaggcagcgatttgcagctctccggcaccacc

SEQ ID NO: 832999 - DNA, 75 bp, synthetic construct
  source 1..75: mol_type = other DNA
cgccagcgatgacgtgattaacgccacggaaaaaggtgcggacctgcaaattaccggcaccagtaatcagcccgc

SEQ ID NO: 833000 - DNA, 75 bp, synthetic construct
  source 1..75: mol_type = other DNA
gtgttccggcggcggatgtcaccgcgctgggtagcggcccgcaaaccgtgactgcgaccgttaccgatgccgccg

SEQ ID NO: 833001 - DNA, 75 bp, synthetic construct
  source 1..75: mol_type = other DNA
acgggagctggagcgtcggtattccggcggcaaacgtcagcgcctggccagcgggggcattaaccgttgaggtag

SEQ ID NO: 833002 - DNA, 75 bp, synthetic construct
  source 1..75: mol_type = other DNA
cagcgccaccactacccacgcttacagcgtcgatgccaccgcgccaacggtgaccattaacaccattgcgggcga

SEQ ID NO: 833003 - DNA, 75 bp, synthetic construct
  source 1..75: mol_type = other DNA
ggtcagcgatcaggcgggtaaccctggcagcgccagcaaaggtgtgaccgtcgataccaccgcgcccgtcatcag

SEQ ID NO: 833004 - DNA, 75 bp, synthetic construct
  source 1..75: mol_type = other DNA
ctctgtatggatagagctctatacgtgtaattcaaagcaacagcggtttgagaaaagtaacttttcttttcgaac

SEQ ID NO: 833005 - DNA, 75 bp, synthetic construct
  source 1..75: mol_type = other DNA
cgtgccggtattgtccggtaccggtgcccgtacaggtgatttaaaagggatcaacgtgaaataccgttatgaatt

SEQ ID NO: 833006 - DNA, 75 bp, synthetic construct
  source 1..75: mol_type = other DNA
gtgtggagaactgtttaaaagggaagtttaaagaggtaaggccgcgttattctgtattgcctgatatatttacac

SEQ ID NO: 833007 - DNA, 75 bp, synthetic construct
  source 1..75: mol_type = other DNA
aagccgccgctggctggcatcgtgcggcctgacggtggcgcagatgcaaagccagatggacccggtatacacgcc

SEQ ID NO: 833008 - DNA, 75 bp, synthetic construct
  source 1..75: mol_type = other DNA
ggaaatgtggataaattaaattatgaggcactaagtgcgtctttatttgatagtattggtacaaagtttaaattt

SEQ ID NO: 833009 - DNA, 75 bp, synthetic construct
  source 1..75: mol_type = other DNA
ggaagtcgaatacagtcgcatacgtttatttgtgagaacgtaacactgggagagaactgcttcattggtcataac

SEQ ID NO: 833010 - DNA, 75 bp, synthetic construct
  source 1..75: mol_type = other DNA
ggcgaaaggtcaccactttccggatgtgacgctggttgcattactggacgtggacggcgcgctgttttctgccga

SEQ ID NO: 833011 - DNA, 75 bp, synthetic construct
  source 1..75: mol_type = other DNA
tcactgccggactatacggagtatggccgggataacggtatccgcctgtcaggggtgtggctgacgcacgacccg

SEQ ID NO: 833012 - DNA, 75 bp, synthetic construct
  source 1..75: mol_type = other DNA
ctataacaatcaaaaccagttaacctcagctaccgggcctgacggactggaaatgcgccggaaatatgatgagta

SEQ ID NO: 833013 - DNA, 75 bp, synthetic construct
  source 1..75: mol_type = other DNA
tccgtctggcgattactgctctgggcggcagattactatcatcatccgattggcgatgtgctgtttcatgccttg

SEQ ID NO: 833014 - DNA, 75 bp, synthetic construct
  source 1..75: mol_type = other DNA
gccatcaacaccatcgctcaggacaacatcatcagtgctgcggaacataacgtcgcgctggtactgagcggcacg

SEQ ID NO: 833015 - DNA, 75 bp, synthetic construct
  source 1..75: mol_type = other DNA
cagaagatcgttgtccactggaagcattaattattcgtcgattattaattcaggcggcgaattttaccgagaagc

SEQ ID NO: 833016 - DNA, 75 bp, synthetic construct
  source 1..75: mol_type = other DNA
tgccgaacaggcgctggccgaacggcgaatgatgcaactgccaccgtggaccagccatgtgattgtgcgcgcaga

SEQ ID NO: 833017 - DNA, 75 bp, synthetic construct
  source 1..75: mol_type = other DNA
ggagctcgttagatgcccgtgaagaaattcatgcattagtggatgagatgaaccgtgttggtgatggattcaacg

SEQ ID NO: 833018 - DNA, 75 bp, synthetic construct
  source 1..75: mol_type = other DNA
gatagagaatgcatcagaaactggctcattaggtcgttgttgaaagcgtcaggcatctggggaagtggtttggat

SEQ ID NO: 833019 - DNA, 75 bp, synthetic construct
  source 1..75: mol_type = other DNA
ttgtcggcatggctcttttactcgggggatgtacatctccaaagtataattatttaccaaaaacagaaagttata

SEQ ID NO: 833020 - DNA, 75 bp, synthetic construct
  source 1..75: mol_type = other DNA
ggtctgtgtgatttagcaagtgaaacaccagagtttagcgactggcgaacgaactatgccgtttctggtgagcgg

SEQ ID NO: 833021 - DNA, 75 bp, synthetic construct
  source 1..75: mol_type = other DNA
acgctcatcctctaacatggcgcgcatgatcttccttcgcggcctagagctaacccagaaagaacaaaacaaatc

SEQ ID NO: 833022 - DNA, 75 bp, synthetic construct
  source 1..75: mol_type = other DNA
tgatatttataagcatgatattcattttgatgagaaagcttttcaatcagggatgttgaaaatacagttcccaaa

SEQ ID NO: 833023 - DNA, 75 bp, synthetic construct
  source 1..75: mol_type = other DNA
ctatcacccatccggtcaccgtcgatctggcggcggtggcgatctccattaacaccgtttccggcgatgatgtga

SEQ ID NO: 833024 - DNA, 75 bp, synthetic construct
  source 1..75: mol_type = other DNA
gaccatcagcggcaccagcacggcagaagccgggcagacggtgaccgtgacgcttaacggcgtcaattacagcgg

SEQ ID NO: 833025 - DNA, 75 bp, synthetic construct
  source 1..75: mol_type = other DNA
cctgccaggggtaatcattaataccgtggcgggcgatgacattatcaacgccgctgaaatcgttgtggcgcagac

SEQ ID NO: 833026 - DNA, 75 bp, synthetic construct
  source 1..75: mol_type = other DNA
accctttccggcgatgatgtgatcaacgccgtggagaaaggcgaaacgctggtcgtaagcggcagcaccagcggt

SEQ ID NO: 833027 - DNA, 75 bp, synthetic construct
  source 1..75: mol_type = other DNA
ggcacgctgggcgcggcgctttctgccggtgagttcgcgcaaatcagcattgatggcggcaccacctggcagaat

SEQ ID NO: 833028 - DNA, 75 bp, synthetic construct
  source 1..75: mol_type = other DNA
gccaaccattggcatcaacactatcgccagcgatgacgtgattaacgccacggaaaaaggcgcggatctgcaaat

SEQ ID NO: 833029 - DNA, 75 bp, synthetic construct
  source 1..75: mol_type = other DNA
accgacgcggcaggcaacagcgatgacgccagccgcacggtcaccgtgaatctgaccgcgccaaccattggcatc

SEQ ID NO: 833030 - DNA, 75 bp, synthetic construct
  source 1..75: mol_type = other DNA
tggtcgcacactgaccgacggcacctggaactacacggtgcgggtggtggatctggcggggaacgttgggcagac

SEQ ID NO: 833031 - DNA, 75 bp, synthetic construct
  source 1..75: mol_type = other DNA
gcgggcgatgacattatcaacgccatcgaacatggtcaggcgctggtggtcagcggcaccagcacgggcgcggcg

SEQ ID NO: 833032 - DNA, 75 bp, synthetic construct
  source 1..75: mol_type = other DNA
atctcagcaatctgaccgccagcccgtacacggtcagcgcctcggtaaacgataaagcgggtaacccggcgaccg

SEQ ID NO: 833033 - DNA, 75 bp, synthetic construct
  source 1..75: mol_type = other DNA
atattcaggccatcggcaacggctctctcaccgtaaacgcctcggtgaccaacgtcgtcggcaacaccggcaacg

SEQ ID NO: 833034 - DNA, 75 bp, synthetic construct
  source 1..75: mol_type = other DNA
ctggcaggtgcgggtggtcgatctggcgggcaacgttggcgcaaccggcagccagtcggcgcagattgacaccgt

SEQ ID NO: 833035 - DNA, 75 bp, synthetic construct
  source 1..75: mol_type = other DNA
cgtggcggcaatggactacgactgggacggcgcggtggatgtgctggtgaccaaacagtcgggcagcgtctatct

SEQ ID NO: 833036 - DNA, 75 bp, synthetic construct
  source 1..75: mol_type = other DNA
ataaggctatggaagaacgtttccgtcttggtataggaaacgctacttgcgttggtgacattgtagccattttgg

SEQ ID NO: 833037 - DNA, 75 bp, synthetic construct
  source 1..75: mol_type = other DNA
attgcatcaaatgtaaaaataatgggtggaaatcatcctttgaatcgttttactactcacatgattgatcttacc

SEQ ID NO: 833038 - DNA, 75 bp, synthetic construct
  source 1..75: mol_type = other DNA
aaactcaagttacagaatttaactattgatgctgcaatgtggttttattacccagatctatcttggagatatatt

SEQ ID NO: 833039 - DNA, 75 bp, synthetic construct
  source 1..75: mol_type = other DNA
ttggtaataaaagaaattcaagaacgagggccagcatatgtttataagaaaatcagtgacataaacagaaatagc

SEQ ID NO: 833040 - DNA, 75 bp, synthetic construct
  source 1..75: mol_type = other DNA
atcggttatgacccggcaaaaggtacgcaaaacggcgacagcgccggatgcgtggtggtggcaccgccagccgtg

SEQ ID NO: 833041 - DNA, 75 bp, synthetic construct
  source 1..75: mol_type = other DNA
gacaaaaagtcaaaacttattgaatcaatattaatgaagcttccattaccggggttttactttggtgaaaagcca

SEQ ID NO: 833042 - DNA, 75 bp, synthetic construct
  source 1..75: mol_type = other DNA
tattgcgtagtcataatgtccatgaggcagcgacattatcagaagttcaaggttctgaatttagggttttaagaa

SEQ ID NO: 833043 - DNA, 75 bp, synthetic construct
  source 1..75: mol_type = other DNA
atagctacccttgggttgactcttattgtcaacagcataatattgactatattaatgtcaatgattccaattcta

SEQ ID NO: 833044 - DNA, 75 bp, synthetic construct
  source 1..75: mol_type = other DNA
gcagcccccgcgccgtggccccgccatgccgccggtggcggcctggcggcaccccgtcacggggtgccggaaacg

SEQ ID NO: 833045 - DNA, 75 bp, synthetic construct
  source 1..75: mol_type = other DNA
ccccgcagtccgtgcagcgcaaagcttcgctggcgctccgctctgctgtcagcggtggtgccgttctgtggcccc

SEQ ID NO: 833046 - DNA, 75 bp, synthetic construct
  source 1..75: mol_type = other DNA
gcagggagttgactaaagacatggagttctccggacaatttttgttaaaaaaattgaaagcagagaatttaactg

SEQ ID NO: 833047 - DNA, 75 bp, synthetic construct
  source 1..75: mol_type = other DNA
gatgcttcaccgcgaacgccgcgaaatgctttgccgtttcaaagccgcactggataccgctggcgttgagtacag

SEQ ID NO: 833048 - DNA, 75 bp, synthetic construct
  source 1..75: mol_type = other DNA
ggatatcgccaatacacgctatctggtttcgtttggtcacaatttgtatgaaggcattgaagtcgcggataccca

SEQ ID NO: 833049 - DNA, 75 bp, synthetic construct
  source 1..75: mol_type = other DNA
aaaaaactgaccgaacagtacaacgtgacttatatcggtatcgactcaaccggcgttggtcacggggtttacgag

SEQ ID NO: 833050 - DNA, 75 bp, synthetic construct
  source 1..75: mol_type = other DNA
tttccgaccttcatcacttacctgaaacagttgcagaaaactttcaaatggacggacaaccagacccggcacctg

SEQ ID NO: 833051 - DNA, 75 bp, synthetic construct
  source 1..75: mol_type = other DNA
aaagaatactggaccagtcgctggaatctgcaaccgttactgcaaagtgctcagttgacaggaatgactgtcaca

SEQ ID NO: 833052 - DNA, 75 bp, synthetic construct
  source 1..75: mol_type = other DNA
acgaggtggataacatcagcgccgaactgttacgccactactgcaaagaagtggaaaaataccagaacccgcgcg

SEQ ID NO: 833053 - DNA, 75 bp, synthetic construct
  source 1..75: mol_type = other DNA
cttagactaaaaagcattttcagagtatcagccacttgcatcatcgatcgtcttagtaaatgtaatttaattaat

SEQ ID NO: 833054 - DNA, 75 bp, synthetic construct
  source 1..75: mol_type = other DNA
actggtgaggcgacggttaaagtcgaggttgagcagactctgaatgctggcgttttagatggtcttattgataca

SEQ ID NO: 833055 - DNA, 75 bp, synthetic construct
  source 1..75: mol_type = other DNA
ataccggttcctttaaaactaacaagcaaggggtaacaacattcagcggaggtggtgaacttgctgatctggtga

SEQ ID NO: 833056 - DNA, 75 bp, synthetic construct
  source 1..75: mol_type = other DNA
cagaatttttatatgttcagagcctggggaaaagtcagaagaacatacttaaccactggaaaatttccccaggaa

SEQ ID NO: 833057 - DNA, 75 bp, synthetic construct
  source 1..75: mol_type = other DNA
aatgagcaaattcagattagaatgataactaaggaaaaaattgctcaacttcctaaggacagagaaactctgttc

SEQ ID NO: 833058 - DNA, 75 bp, synthetic construct
  source 1..75: mol_type = other DNA
gaaaaaactaaccgatccttctctaaatattaagctgttcattttatccaatccgcaaaatccaaccgggaaggt

SEQ ID NO: 833059 - DNA, 75 bp, synthetic construct
  source 1..75: mol_type = other DNA
tacaacccagaaggcgctgggccaggcattagataacaatctgatcaacatggtaaaaacgcttgaacaggaagg

SEQ ID NO: 833060 - DNA, 75 bp, synthetic construct
  source 1..75: mol_type = other DNA
gctgcgccgaatgtgttgctctctccttcgctctggctcggccatgtttatcttttgacgatgaataaacacacc

SEQ ID NO: 833061 - DNA, 75 bp, synthetic construct
  source 1..75: mol_type = other DNA
cgatcggttatcagcaagaacaagcacagtgggtagaaaagcaaaataaggaaggcgtggagaaagccggggaag

SEQ ID NO: 833062 - DNA, 75 bp, synthetic construct
  source 1..75: mol_type = other DNA
ccgtcggtcagaccgttgcagaggtcccgtttgcagttgaagcgttgctgcagccgtatcgaatttacggggtgt

SEQ ID NO: 833063 - DNA, 75 bp, synthetic construct
  source 1..75: mol_type = other DNA
gaagataatgagccagtttctcttgagattaaaagtaagtatttgaaagattatttatgtgctcgtggcatgttt

SEQ ID NO: 833064 - DNA, 75 bp, synthetic construct
  source 1..75: mol_type = other DNA
aacgttcgagaaaaggatgaaattttcagcatccaatctaaactggaatcattgacaacccaacttaatgctatt

SEQ ID NO: 833065 - DNA, 75 bp, synthetic construct
  source 1..75: mol_type = other DNA
ttgtcgacacccgcttgcaggtactggaagttagtggacaagaaatcttaacgaaagataaggtcaatttgcgga

SEQ ID NO: 833066 - DNA, 75 bp, synthetic construct
  source 1..75: mol_type = other DNA
cagttaacgaagccgattgatcatttgtatcgggaattgcaatttgccctgcgtgaagcggtaggtacgcgtacg

SEQ ID NO: 833067 - DNA, 75 bp, synthetic construct
  source 1..75: mol_type = other DNA
aggtcattgatgacgttgttagcgagcaggtgaaactacgcatgaagccgttcggtatggagatcgcttcgttag

SEQ ID NO: 833068 - DNA, 75 bp, synthetic construct
  source 1..75: mol_type = other DNA
tggtactttctgattgttattcatgggctaacgagcagtttggacatgccagtctcggtgatccgcgtcgtacac

SEQ ID NO: 833069 - DNA, 75 bp, synthetic construct
  source 1..75: mol_type = other DNA
ggcggacccgacgaagctcggcgtgcgcgcctgggcgcctgcggcggaatccaccaacctgaacccgcacgcggc

SEQ ID NO: 833070 - DNA, 75 bp, synthetic construct
  source 1..75: mol_type = other DNA
aatgatttttttcgaagaataacaaatttaaggcaggacgtatggcatcggtttattatagaagcaagtcttgaa

SEQ ID NO: 833071 - DNA, 75 bp, synthetic construct
  source 1..75: mol_type = other DNA
gttaactcttcaatatcaaatgataaaatagatctccatttcccttcagcattaaggattacaaatgtatcaaaa

SEQ ID NO: 833072 - DNA, 75 bp, synthetic construct
  source 1..75: mol_type = other DNA
tgaatttgaaggccgtaaacttcttgtgcacaaatctttcattgatttaattaatactattgtaaaacctgatga

SEQ ID NO: 833073 - DNA, 75 bp, synthetic construct
  source 1..75: mol_type = other DNA
tactggcgtgtagaggatgatttggcgctggtacggatgaatacgcagcaagtccaggtacaaacggacgtgatg

SEQ ID NO: 833074 - DNA, 75 bp, synthetic construct
  source 1..75: mol_type = other DNA
cccatgctggcaggagaaaaaggaaggggctttttctgctgttcggcagtatctgaagaatttagtaagaaaaca

SEQ ID NO: 833075 - DNA, 75 bp, synthetic construct
  source 1..75: mol_type = other DNA
aaaaacacagggaggtggaagataagtgcatgtttttgcatctccccccggctacagtggctacgcgtagccact

SEQ ID NO: 833076 - DNA, 75 bp, synthetic construct
  source 1..75: mol_type = other DNA
gttggcggaaaccgttacagcgtgccagaaagcctgtgtggtcagctagtttcagtagggatctatttggatgaa

SEQ ID NO: 833077 - DNA, 75 bp, synthetic construct
  source 1..75: mol_type = other DNA
gcgattaaatataataagaaggtaattgcctcgtcattttcattaattggatatgagactatgttaaatagtcaa

SEQ ID NO: 833078 - DNA, 75 bp, synthetic construct
  source 1..75: mol_type = other DNA
caaaaacgctatgatgaaatcataagaattattgatgtagaaaaggtgttcagtacagttcaacgaagggaaatc

SEQ ID NO: 833079 - DNA, 75 bp, synthetic construct
  source 1..75: mol_type = other DNA
ttggagtcattacctgctctgcatataatccccagattaatcgcacttgacatatataaaacgtacaaagacgaa

SEQ ID NO: 833080 - DNA, 75 bp, synthetic construct
  source 1..75: mol_type = other DNA
ttgcagctttgcacatcgataaagcgttgcctaatcaactatatcctcctaaaaccaccattaaccttccttacg

SEQ ID NO: 833081 - DNA, 75 bp, synthetic construct
  source 1..75: mol_type = other DNA
cgaaagggctaataataaaagaatacccctctgggaagaaagaattagtagatttctcctctggtaaagaggtat

SEQ ID NO: 833082 - DNA, 75 bp, synthetic construct
  source 1..75: mol_type = other DNA
atgataattgttctaatatttgattttatcgctgagtattttttatttatgaaagatatgaaaatggataaacaa

SEQ ID NO: 833083 - DNA, 75 bp, synthetic construct
  source 1..75: mol_type = other DNA
tcgacctgtaccatatgcaggaagaagcgccgggtatggtattctggcacaacgacggctggaccatcttccgtg

SEQ ID NO: 833084 - DNA, 75 bp, synthetic construct
  source 1..75: mol_type = other DNA
atggcagtaaagatttcaggtgtgctgaaagacggcacaggaaaaccggtagagaactgcaccattcaactgaaa

SEQ ID NO: 833085 - DNA, 75 bp, synthetic construct
  source 1..75: mol_type = other DNA
gagcggaagacggaataaaccctttattgctatcaactgtgccgcgattccggagcagcttctggaaagcgaact

SEQ ID NO: 833086 - DNA, 75 bp, synthetic construct
  source 1..75: mol_type = other DNA
actgaatcagtctaaaaaaataaatgggtccagcatttcccttggtgaagatacctttttaaactctacctggca

SEQ ID NO: 833087 - DNA, 75 bp, synthetic construct
  source 1..75: mol_type = other DNA
ctgaacgtttcccctacgctaaaggtaaagctacagggatctattacagtgcgggcagtattgcgacctttacta

SEQ ID NO: 833088 - DNA, 75 bp, synthetic construct
  source 1..75: mol_type = other DNA
gtgattttcagcaacccgtcgaatcccgtgggctgcatgctcgacaatgcaggttttgagcgcatcatcgccgcg

SEQ ID NO: 833089 - DNA, 75 bp, synthetic construct
  source 1..75: mol_type = other DNA
aggacaaggaatattcgttgagataggaggtgaatctaacggtgttgcagcgcagaatgttgttattgatagcaa

SEQ ID NO: 833090 - DNA, 75 bp, synthetic construct
  source 1..75: mol_type = other DNA
ggggaccggcaggtgatgctggtccggcaggtccgcaggggccgaaaggcgacaggggagagcggggagagaccg

SEQ ID NO: 833091 - DNA, 75 bp, synthetic construct
  source 1..75: mol_type = other DNA
cgtcttcatattgtttgcgatgtccctgatgagcttattgatttcacgtttgaatagaaagggcagctatggtta

SEQ ID NO: 833092 - DNA, 75 bp, synthetic construct
  source 1..75: mol_type = other DNA
gctgatataagtgactttgtagttagccaataccttgaacgtgagtgcaaattgaatgttagtgatcagactgat

SEQ ID NO: 833093 - DNA, 75 bp, synthetic construct
  source 1..75: mol_type = other DNA
tattgccagtacacctcaggatttattcacggtttcctgtttggcgacgcctttgataaagggttgacgtttaaa

SEQ ID NO: 833094 - DNA, 75 bp, synthetic construct
  source 1..75: mol_type = other DNA
gaccgcaacagaaaaagcccgggagtcagcagaaagcgcacagtcagcggaacaaagcagaatagcggcggaaga

SEQ ID NO: 833095 - DNA, 75 bp, synthetic construct
  source 1..75: mol_type = other DNA
atgacagatcttcccgacagcacccgttggcaattgtggattgtggctttcggcttctttatgcagtcgctggac

SEQ ID NO: 833096 - DNA, 75 bp, synthetic construct
  source 1..75: mol_type = other DNA
gcacagcctttgcgctggaagaaggcacatcagaagcggtgaaggatgcagaccgtagcgtgtttaatggcagtg

SEQ ID NO: 833097 - DNA, 75 bp, synthetic construct
  source 1..75: mol_type = other DNA
acaaactggacaacccttctccagggttgtgatactgtcattcacacagcaggcagagcgcatatccttaatgat

SEQ ID NO: 833098 - DNA, 75 bp, synthetic construct
  source 1..75: mol_type = other DNA
ctggttttctcggttctgctttagtcaaagcgctgaggtctgcaggtcatcaggtaattttcacttcccgtcgag

SEQ ID NO: 833099 - DNA, 75 bp, synthetic construct
  source 1..75: mol_type = other DNA
cgggccgtggcaggatgtcaaggggctggatgaagtgggcagtgatacaggcagaacaggagaatgacatgaata

SEQ ID NO: 833100 - DNA, 75 bp, synthetic construct
  source 1..75: mol_type = other DNA
aaccagagttagttacatctgatacagatatcatatctggagaagagagatttcgattaaattataatggtgtta

SEQ ID NO: 833101 - DNA, 75 bp, synthetic construct
  source 1..75: mol_type = other DNA
attgaggggaccgaaagtacggtgacgctcaatatgctgttacgccgcagtcttgttgaggttagcatacccgga

SEQ ID NO: 833102 - DNA, 75 bp, synthetic construct
  source 1..75: mol_type = other DNA
atatctggtgaagagagatttcgattaaattataatggtgttattgcgctgttagttgaaggaataaaaaatctg

SEQ ID NO: 833103 - DNA, 75 bp, synthetic construct
  source 1..75: mol_type = other DNA
cgaggagcacaatgcaaagatggtattatcccgtgcaatagataatgccataaataactggagaaaagataacac

SEQ ID NO: 833104 - DNA, 75 bp, synthetic construct
  source 1..75: mol_type = other DNA
agcattcgcagataacgcgaataaagaggcgctgcttcttgatgccagacaaaaactggaacgacaatatgttat

SEQ ID NO: 833105 - DNA, 75 bp, synthetic construct
  source 1..75: mol_type = other DNA
ggggccagcaggtccggctgggccgaggggcgttcagggaccgaaaggtgatcccggcccccagggaccaaaggg

SEQ ID NO: 833106 - DNA, 75 bp, synthetic construct
  source 1..75: mol_type = other DNA
caatatctggaatatggatgtgtcgttatctcaagtggaatagagcagccagaattggaatattatttttctgat

SEQ ID NO: 833107 - DNA, 75 bp, synthetic construct
  source 1..75: mol_type = other DNA
gtgattgaattatttaatacgtcaataaacatacattctttgaaagaaagagacataacgatagacgattgtttg

SEQ ID NO: 833108 - DNA, 75 bp, synthetic construct
  source 1..75: mol_type = other DNA
atggacgcgactcaggcgcgggatgtggtgaagatgaacctgccacgcgtgctggagaatctgcgtttgctggtg

SEQ ID NO: 833109 - DNA, 75 bp, synthetic construct
  source 1..75: mol_type = other DNA
gaggttgcgacaacccgcccgtcgggagaaagcatacctggaccgaaaggtgacaggggcgagcaaggaccggca

SEQ ID NO: 833110 - DNA, 75 bp, synthetic construct
  source 1..75: mol_type = other DNA
gggacctcgtggggagccaggcccggcgggcagcgcagcaaatgtggcagatgcgacgacggcacagaagggaat

SEQ ID NO: 833111 - DNA, 75 bp, synthetic construct
  source 1..75: mol_type = other DNA
atatttattatttaaaactgtaaagaaagaaaattatctccttatatacaatttattgccagttcatatttttcc

SEQ ID NO: 833112 - DNA, 75 bp, synthetic construct
  source 1..75: mol_type = other DNA
acttacacccaaatcagcgcgggccgcagcaacgatgcctcctggcttagcactaacgtgcacaaggtcatgcag

SEQ ID NO: 833113 - DNA, 75 bp, synthetic construct
  source 1..75: mol_type = other DNA
taagtacggtactgtctgttgctatttttaactcagcaatggcatatgacggtacaattagtcttactggatgca

SEQ ID NO: 833114 - DNA, 75 bp, synthetic construct
  source 1..75: mol_type = other DNA
acctggcagtcgattgccagaaattatcacatgctcgatgtgataatttcgccgagtgaattcctgaaagggata

SEQ ID NO: 833115 - DNA, 75 bp, synthetic construct
  source 1..75: mol_type = other DNA
aactgttacagtttcgttctctggtggttatgtaaataatacacctaaagaattaaatgctcttggcccaagcga

SEQ ID NO: 833116 - DNA, 69 bp, synthetic construct
  source 1..69: mol_type = other DNA
gcagatttacagtctgctccctttggccgctcgggaaccccaccaggggtaattcaaattttgaggtaa

SEQ ID NO: 833117 - DNA, 75 bp, synthetic construct
  source 1..75: mol_type = other DNA
ttccggacgagcgacttcgcaaagttgctaaaccggtagaagaagtgaatacagaaattcagcgtatcgtcgatg

SEQ ID NO: 833118 - DNA, 75 bp, synthetic construct
  source 1..75: mol_type = other DNA
aatactggcccacgctcagtattcaggggggcaaaacgcgctaccagaccagtgaccgttcgtactgggacgacc

SEQ ID NO: 833119 - DNA, 75 bp, synthetic construct
  source 1..75: mol_type = other DNA
agctaccgctttaaattgatggcaaccttaaccgacgtagccgaaaaaacggcgacgacctatatggaagtcagc

SEQ ID NO: 833120 - DNA, 75 bp, synthetic construct
  source 1..75: mol_type = other DNA
gtgtcgctaaaaaatattgattaccagtccataccgctggttctggcagcagaaaacttacgtcagtctgctcag

SEQ ID NO: 833121 - DNA, 75 bp, synthetic construct
  source 1..75: mol_type = other DNA
atggctcattaagttttgacctgtttcagcagaacgcagagaaggtaagggtccaggatggtgaatgctttattc

SEQ ID NO: 833122 - DNA, 75 bp, synthetic construct
  source 1..75: mol_type = other DNA
atgaagtatgtctttattgaaaaacatcaggctgagttcagcatcaaagcaatgtgccgtgtgctccgggtggcc

SEQ ID NO: 833123 - DNA, 75 bp, synthetic construct
  source 1..75: mol_type = other DNA
agaagccggtttagcgcaatccgaaagtgcgcacaaaacgcgagatgtgtaccaaaatgaatataaattaggtaa

SEQ ID NO: 833124 - DNA, 75 bp, synthetic construct
  source 1..75: mol_type = other DNA
gaagacgaggggcttatcaccctctggcactacgatgcgtcggaccgcatcacgcaccggacggtgaacggcgac

SEQ ID NO: 833125 - DNA, 75 bp, synthetic construct
  source 1..75: mol_type = other DNA
ccatcttcgaacgcaagaagccgctggcggagaacacgcttaagcgtatcgcgcgcggcatccagcgcttcgtga

SEQ ID NO: 833126 - DNA, 75 bp, synthetic construct
  source 1..75: mol_type = other DNA
gtgccgccgccattcgctgaggcgctggtgcggtcaaacctgccggagttgtgtgacatgcgggagcgagctgcg

SEQ ID NO: 833127 - DNA, 75 bp, synthetic construct
  source 1..75: mol_type = other DNA
tcttcatttctgccagtgactatacagaaccagccattcttacggcacgtgaatttctgcaacacaaagttgtag

SEQ ID NO: 833128 - DNA, 75 bp, synthetic construct
  source 1..75: mol_type = other DNA
ttgcattatctgagtactgagaatgccgtctataagcagcatgaagaagatggttggttctctgggcagggagaa

SEQ ID NO: 833129 - DNA, 75 bp, synthetic construct
  source 1..75: mol_type = other DNA
atccagcgctttgttatcgaaagcgcatcacctttcatcgtgaagtgtaaccacaccacgacgaaaggaggttat

SEQ ID NO: 833130 - DNA, 75 bp, synthetic construct
  source 1..75: mol_type = other DNA
tcgacggggatcgcggcgaatcaccctgcgctggctgaggtttgtgaattccttgccattgagccgcacggccag

SEQ ID NO: 833131 - DNA, 75 bp, synthetic construct
  source 1..75: mol_type = other DNA
tattcctgatttttatgtctttccagaaaaaagtgtaagctataatatactaaagcaaggtaagcatgcttttat

SEQ ID NO: 833132 - DNA, 75 bp, synthetic construct
  source 1..75: mol_type = other DNA
cgcttcagaaacagcagaccattgccttgttaatgtacgtaataaatactgggaaatgtatccctctgaagataa

SEQ ID NO: 833133 - DNA, 75 bp, synthetic construct
  source 1..75: mol_type = other DNA
atggtaatggaagacatcattgagcgcgttgaaataacgccagcaggatctagatggggggtcagacctgatctc

SEQ ID NO: 833134 - DNA, 75 bp, synthetic construct
  source 1..75: mol_type = other DNA
gcgaagaagaacggcaaacccgcctcgctgagtcacagcggatcgcagcagaaaaacgtgatcgtagttatagaa

SEQ ID NO: 833135 - DNA, 75 bp, synthetic construct
  source 1..75: mol_type = other DNA
tcctcaggggccgaagggtgataagggagagcgcggtgacaccggccctgtcggggcaaccggcgaacggggacc

SEQ ID NO: 833136 - DNA, 75 bp, synthetic construct
  source 1..75: mol_type = other DNA
gatgctgagttgtcaagaaagacggcagaaagtgcagccggtaatgcagccagggatgcaacgaccgcaacagaa

SEQ ID NO: 833137 - DNA, 75 bp, synthetic construct
  source 1..75: mol_type = other DNA
ttaaccactcaggcaggctttatccgggcacttcctcacttcagctgtatccgtgaagttttgtcacaggctgcc

SEQ ID NO: 833138 - DNA, 75 bp, synthetic construct
  source 1..75: mol_type = other DNA
tatatattcagaacttgacaagcatatgccattttggctgaagtttgaaaaaaaatatagctttcttataactaa

SEQ ID NO: 833139 - DNA, 75 bp, synthetic construct
  source 1..75: mol_type = other DNA
agatatcaaaaaataaatattctcttattaaagatttattttatggtaaagttattatgaacactccgactatac

SEQ ID NO: 833140 - DNA, 75 bp, synthetic construct
  source 1..75: mol_type = other DNA
tggtgaacacggtggcctctgaaaacccggatgaagccggtcgttacagcatggaggtggagtatggtcagtaca

SEQ ID NO: 833141 - DNA, 75 bp, synthetic construct
  source 1..75: mol_type = other DNA
gggcaggctggagagcgtgcgcaccctcgcaccggacctggacatccgcatcccgtatgccacggacccggcggg

SEQ ID NO: 833142 - DNA, 75 bp, synthetic construct
  source 1..75: mol_type = other DNA
atgctgacgatggagcatatccggaaaccactggcggcgcgtcaggcactgacccggtcagaggcggtattgcag

SEQ ID NO: 833143 - DNA, 75 bp, synthetic construct
  source 1..75: mol_type = other DNA
atatatattgtctggcagctatactttctgaaatctgccccaccgagtcgctaaacagcgtgatccgccatgcga

SEQ ID NO: 833144 - DNA, 75 bp, synthetic construct
  source 1..75: mol_type = other DNA
atccataactcggtcacccgtatcacgccgaaaccgacgcatatgatcggcggctatgcccatctggcatacggc

SEQ ID NO: 833145 - DNA, 75 bp, synthetic construct
  source 1..75: mol_type = other DNA
gatgttgaaaaacttgcagaacagtatgtaagcagtaaaaactataatattataaaagacgtatctgttcttgca

SEQ ID NO: 833146 - DNA, 75 bp, synthetic construct
  source 1..75: mol_type = other DNA
atatatgaatatgaactacaaactaatgtgtcaaaagtaaaaatagccatagataacctgaagggatatgctgga

SEQ ID NO: 833147 - DNA, 75 bp, synthetic construct
  source 1..75: mol_type = other DNA
gcaaggcattgcagcagacgattgagaatacagcgatgcggttgatgcagagagaatcaaccaggccgggcggaa

SEQ ID NO: 833148 - DNA, 75 bp, synthetic construct
  source 1..75: mol_type = other DNA
ctggacgatgccactgatagcactgacaggatgaaagaggcattgacttcaattgatgccgtgatggacaagtca

SEQ ID NO: 833149 - DNA, 75 bp, synthetic construct
  source 1..75: mol_type = other DNA
taatcaccatcacgacgatcggtctccggtgccggatgatggcggtaatacaccagtaccgccggatgatggcgg

SEQ ID NO: 833150 - DNA, 75 bp, synthetic construct
  source 1..75: mol_type = other DNA
ggccggataaccgcatcgcgaaggatgcgcactatgtttaccactacgatgaatacggcagactgacggagaaga

SEQ ID NO: 833151 - DNA, 75 bp, synthetic construct
  source 1..75: mol_type = other DNA
cagaaatttattataaatttttgtgcatttatgcgttcgaaaatcatgagtatctagaagattttgcatcagtat

SEQ ID NO: 833152 - DNA, 75 bp, synthetic construct
  source 1..75: mol_type = other DNA
tcaataacagtgatgaatgggcaagtcaactaaaacacgcattatcacaaggagaaaatctggcattactacatg

SEQ ID NO: 833153 - DNA, 75 bp, synthetic construct
  source 1..75: mol_type = other DNA
actagcccggatgcgatatttggggtgatcacctacatcatcaacgatgcgcgttcaggtgagtttgatgattgt

SEQ ID NO: 833154 - DNA, 75 bp, synthetic construct
  source 1..75: mol_type = other DNA
cagttaaccacacagtcgggctttatccgggcacttccgcacttcgactgtatccgtgaagttctgtcacaggct

SEQ ID NO: 833155 - DNA, 75 bp, synthetic construct
  source 1..75: mol_type = other DNA
gctgctggccgagggagagcgctgtgacgggctggccccgtaccgcctgatatcactcgacggctgctggtacct

SEQ ID NO: 833156 - DNA, 75 bp, synthetic construct
  source 1..75: mol_type = other DNA
tcagtgccgggattagaaaaaacagccctgacggcagcattcacccggacggcctgacaaaaaaatttgtcgcag

SEQ ID NO: 833157 - DNA, 75 bp, synthetic construct
  source 1..75: mol_type = other DNA
tcagaatctacattattgattgcagaagagtttgggatgatgaatcctaaatcttatttctcaattagagttatg

SEQ ID NO: 833158 - DNA, 75 bp, synthetic construct
  source 1..75: mol_type = other DNA
acgccagaacgtaaagaacgtctcaccgaattagcccaacgctggctggtccgtcgcctgggagaacgtgaacat

SEQ ID NO: 833159 - DNA, 75 bp, synthetic construct
  source 1..75: mol_type = other DNA
gttggcggcggagttggggggcattttgcgtatacttatgtagtggatgttgataatccagaatcatcgacagaa

SEQ ID NO: 833160 - DNA, 75 bp, synthetic construct
  source 1..75: mol_type = other DNA
tatagtcaaaaaatggattactgattctatggggggatctctgggtggagaatactcgatcgcatttggtcaggg

SEQ ID NO: 833161 - DNA, 75 bp, synthetic construct
  source 1..75: mol_type = other DNA
gcgattactcagtatatatgcaatcaataaatattggtgaaagttatcatggtaatttagctattggtgaagata

SEQ ID NO: 833162 - DNA, 75 bp, synthetic construct
  source 1..75: mol_type = other DNA
aaaaggataatcagtttgtccatggtgcaaaaaatttcgccagtggttcaaactcaactgcgtggggttataaaa

SEQ ID NO: 833163 - DNA, 75 bp, synthetic construct
  source 1..75: mol_type = other DNA
tgaacagtcagcagcgtcagattaatgagaatcatgaggaaatgaagcgggcagcagcccagtcagctgcgctgg

SEQ ID NO: 833164 - DNA, 75 bp, synthetic construct
  source 1..75: mol_type = other DNA
agctcgcgttagcagtctgtcagtactgcgacagcgttgtctgggagggctttacccggtcaaaacagcattatt

SEQ ID NO: 833165 - DNA, 75 bp, synthetic construct
  source 1..75: mol_type = other DNA
ctgttcttcagtgcatggagggtgttggtaccagtcggttttaaatacgcgagaacgccgcccatgcctgctggc

SEQ ID NO: 833166 - DNA, 75 bp, synthetic construct
  source 1..75: mol_type = other DNA
cggttgtcggcagtggacggcgcatttacggcagacgtggaagatgctcagaacgacgagtccgtcacaaaggat

SEQ ID NO: 833167 - DNA, 75 bp, synthetic construct
  source 1..75: mol_type = other DNA
cacctgattccggtcagaatctggataatgacctgcgtcctgaagctggcagctacactgcgaaccttgcagcag

SEQ ID NO: 833168 - DNA, 75 bp, synthetic construct
  source 1..75: mol_type = other DNA
cgtttgccttcaacgtgggaactagcaatgcctgcagttccacactggtgaaattgctcaatcagcggcgctggg

SEQ ID NO: 833169 - DNA, 75 bp, synthetic construct
  source 1..75: mol_type = other DNA
gagacttttactcattcagtcacgttactgtaaaatctttggaaaccacaggggaatattttcgtaatgtattaa

SEQ ID NO: 833170 - DNA, 75 bp, synthetic construct
  source 1..75: mol_type = other DNA
aaagatttggttggttctaatactctcagcatagcccgggattccatcatctcaaaaagaaataaaagctgccat

SEQ ID NO: 833171 - DNA, 75 bp, synthetic construct
  source 1..75: mol_type = other DNA
aaagcaatacattgaaataaaaaataaaatttctgagtttctcgttgggcaatcagacaaagcatctgacattac

SEQ ID NO: 833172 - DNA, 75 bp, synthetic construct
  source 1..75: mol_type = other DNA
ttcctaaactcatacccacgtctgcggtagttctgtatcagccattcggcctgttcttcagtgcagggggcatgc

SEQ ID NO: 833173 - DNA, 75 bp, synthetic construct
  source 1..75: mol_type = other DNA
ttatggcgaggcctacgatgctctggaagacagaaatattagttccttcatcagtgcaacagacaggctggtgga

SEQ ID NO: 833174 - DNA, 75 bp, synthetic construct
  source 1..75: mol_type = other DNA
gtgaggggaaagatattaccgatgtccggatgcggttatttaattttctgttacgatttctgcgaccagttaata

SEQ ID NO: 833175 - DNA, 75 bp, synthetic construct
  source 1..75: mol_type = other DNA
aacacatccgatattagaagtttattccccataataaagaagagcgaaagcttaaattttttaaatatttctggc

SEQ ID NO: 833176 - DNA, 75 bp, synthetic construct
  source 1..75: mol_type = other DNA
aaccgtggcaagagccactggcggctggagcggtaattttgcaccgttttgcttttaacgctgcggagcaactaa

SEQ ID NO: 833177 - DNA, 75 bp, synthetic construct
  source 1..75: mol_type = other DNA
ccggggaaagatggcgcaacttcgctggttagtggactgcgtatcggagggaagaaagaagtcgcacaccatgag

SEQ ID NO: 833178 - DNA, 75 bp, synthetic construct
  source 1..75: mol_type = other DNA
cgggagctgcaggcccggcaggcgcaaaggggccaaaaggtgacaaaggcgatccgggagaagcaggtccagcag

SEQ ID NO: 833179 - DNA, 75 bp, synthetic construct
  source 1..75: mol_type = other DNA
atcaacctgtcgtcgccgccgaagcaaatctcggcgctgaccactctgagccaccagcaggaggcggaaattcgc

SEQ ID NO: 833180 - DNA, 75 bp, synthetic construct
  source 1..75: mol_type = other DNA
cagctgaagcgatttacaccccagaagaagctccggctaaaatcgatcacgtgattaaaactgctcttcgtgaga

SEQ ID NO: 833181 - DNA, 75 bp, synthetic construct
  source 1..75: mol_type = other DNA
ctgaactgcggtttcagtgcagaaggttatgctcgtgccaaaggcgcagcagcagccgtcgttacctacagcgtc

SEQ ID NO: 833182 - DNA, 75 bp, synthetic construct
  source 1..75: mol_type = other DNA
aataaaaatgaactcttactgctggatctatcccataatggtaatgactccaacttattgatagtgttttatgtt

SEQ ID NO: 833183 - DNA, 75 bp, synthetic construct
  source 1..75: mol_type = other DNA
tgatttatcaggacttaatttaaccactcaaccaccagggctgcaaaacttcacctctatcaatcttgataataa

SEQ ID NO: 833184 - DNA, 75 bp, synthetic construct
  source 1..75: mol_type = other DNA
actaatgaagtgaccattgatttatcaggacttaatttaaccactcaaccaccagggctgcaaaacttcacctct

SEQ ID NO: 833185 - DNA, 75 bp, synthetic construct
  source 1..75: mol_type = other DNA
caggtctacatccacgcgcagaagaacatgaacaccgaggtgctgaataaccgcaccacggatgtgataaacaac

SEQ ID NO: 833186 - DNA, 75 bp, synthetic construct
  source 1..75: mol_type = other DNA
atgaccattcgttcgaaaacctataagggcagcgggtttaatgaactgaagtttgacgatgcgacagggaaagaa

SEQ ID NO: 833187 - DNA, 75 bp, synthetic construct
  source 1..75: mol_type = other DNA
tattttagtgcggcacataatcaactagagtttgtgcaattagaatcttgcgaatggctgcagtacctgaatctc

SEQ ID NO: 833188 - DNA, 75 bp, synthetic construct
  source 1..75: mol_type = other DNA
caccaaaaagtgctgccgctgctggcgtcactggaggggtggctgcgggagaaacagaaaaccctctcaaggcac

SEQ ID NO: 833189 - DNA, 75 bp, synthetic construct
  source 1..75: mol_type = other DNA
gataatgataagttttcaattaaagtagataaaatagatgccgaaccaggtgctaaatttaaaattaattatata

SEQ ID NO: 833190 - DNA, 75 bp, synthetic construct
  source 1..75: mol_type = other DNA
aaacgttttgagcgaagcggtattaatgttaaaggttgcatactcaatggcgtaatgaaaaaatctagctcgtat

SEQ ID NO: 833191 - DNA, 75 bp, synthetic construct
  source 1..75: mol_type = other DNA
tatcgagaagaaaaatacattaagtaaagagcgtggtttgttgaataatagaatttctgcgatgccagcaactca

SEQ ID NO: 833192 - DNA, 75 bp, synthetic construct
  source 1..75: mol_type = other DNA
tagataatgattccgaggatatagatttaggccggataattggagaggtgatcgatcatcggaaattaataatat

SEQ ID NO: 833193 - DNA, 75 bp, synthetic construct
  source 1..75: mol_type = other DNA
gatttgtctatggaagcccgctcggtattaagtcaaatagttaacgtagacaatcaattgaatgaattaacattt

SEQ ID NO: 833194 - DNA, 75 bp, synthetic construct
  source 1..75: mol_type = other DNA
attgtacttgttgggattgttctgggaggtatggtatctataggcatagtattgttaaggatcttcttgcgtcga

SEQ ID NO: 833195 - DNA, 75 bp, synthetic construct
  source 1..75: mol_type = other DNA
atagtattaattgggttagtagtcggtatgatcttttctatattgcttgtccttttaagggtgtttttacgcaga

SEQ ID NO: 833196 - DNA, 75 bp, synthetic construct
  source 1..75: mol_type = other DNA
aaatagttatagaaaaactttatctacctgaaaatggtgaaaaggctcctaagattgtactgaatgttattgatg

SEQ ID NO: 833197 - DNA, 75 bp, synthetic construct
  source 1..75: mol_type = other DNA
ctaattgttgtggtcggatttatctttggcttattgttttcagttgggatggttttattaagaattctattaaga

SEQ ID NO: 833198 - DNA, 75 bp, synthetic construct
  source 1..75: mol_type = other DNA
ccaatttatcaagctgatgctttaattcaagttgaacaaaagcaaggtaatacaatacttgagagtttgagtcag

SEQ ID NO: 833199 - DNA, 75 bp, synthetic construct
  source 1..75: mol_type = other DNA
tcattagaagctaaagccacattagatcaactagttaatgttgataatcaaattaatgaactgacctttcgagag

SEQ ID NO: 833200 - DNA, 75 bp, synthetic construct
  source 1..75: mol_type = other DNA
gacaagcagcacaagatgcgaaaagtttagattttttaaatgaacaattaccgcaagtacgaagcgatttggatc

SEQ ID NO: 833201 - DNA, 75 bp, synthetic construct
  source 1..75: mol_type = other DNA
tcgaggtgtcacgactgtttatcccaaacgtaggcgatgacactccagagatcatagtaaaaataattaatgaaa

SEQ ID NO: 833202 - DNA, 75 bp, synthetic construct
  source 1..75: mol_type = other DNA
ctagacaagccgcacaagatgctaaaagtctcgagtttttgaatcaacaactaccaattgtacgtaatgatttag

SEQ ID NO: 833203 - DNA, 75 bp, synthetic construct
  source 1..75: mol_type = other DNA
taattgttgacacaccaccaatccttgcagtaactgatgcagcaattataggtaagtatgcgggtactaccttgt

SEQ ID NO: 833204 - DNA, 75 bp, synthetic construct
  source 1..75: mol_type = other DNA
gcccactcgaaaaaagatgaaattatcgcagcatacaatcgtgcagaatatctgatagagcgacagagtttgatg

SEQ ID NO: 833205 - DNA, 75 bp, synthetic construct
  source 1..75: mol_type = other DNA
cgcgagtatccctgtatcagaatggcttactaaaaacactaataaaaataaaagacaaaaaaatgagtctgataa

SEQ ID NO: 833206 - DNA, 75 bp, synthetic construct
  source 1..75: mol_type = other DNA
ctatatcagtctcaaggttctatttagatagtggaagtaatgatgtaccctctgaagttactttaactatcttgg

SEQ ID NO: 833207 - DNA, 75 bp, synthetic construct
  source 1..75: mol_type = other DNA
attcaacgattcgaacagagcggcgtatctgttaaaggatgtattctaaatggagtgattaaaaaagcaagcagc

SEQ ID NO: 833208 - DNA, 75 bp, synthetic construct
  source 1..75: mol_type = other DNA
caaggcaagcagcacaagatgaaaaaagtttagagtttttagacaatcaactgccaaaagttcgaaatgaacttg

SEQ ID NO: 833209 - DNA, 75 bp, synthetic construct
  source 1..75: mol_type = other DNA
tggatgtagtcaagttttatctatcgggcgcgaatgatgaagatgcacctgatgcagaagttagagtaattgata

SEQ ID NO: 833210 - DNA, 75 bp, synthetic construct
  source 1..75: mol_type = other DNA
atatctcagactggcaaaaaagtcctgtttattgatgcggatatgcgaaagggatacacgcataagctatttaaa

SEQ ID NO: 833211 - DNA, 75 bp, synthetic construct
  source 1..75: mol_type = other DNA
gctgatttcatgaaaatgaaaaagcctcacaaagttcctttgagtaaagaagctttgcgcatccttgaattaatg

SEQ ID NO: 833212 - DNA, 75 bp, synthetic construct
  source 1..75: mol_type = other DNA
gagctgaagttcttgaggcagcgcttgcccactcgaaaaaagatgaaattatcgcagcatacaatcgtgcagaat

SEQ ID NO: 833213 - DNA, 75 bp, synthetic construct
  source 1..75: mol_type = other DNA
ggtatctcacaagaccatgcagaagacatctggcgaagcttggagagaaatatatttcccggcttgggtaaggtt

SEQ ID NO: 833214 - DNA, 75 bp, synthetic construct
  source 1..75: mol_type = other DNA
gcctgtttatgtggtcaatatgggcagtggcgggatgaatggtaataccggtggtttgcctgatgccaggaattc

SEQ ID NO: 833215 - DNA, 75 bp, synthetic construct
  source 1..75: mol_type = other DNA
gtgatacagcggccacaacggtggaaaatttcataaaagatttgcagaacccgaaagtcgtcaaaacgcttaagc

SEQ ID NO: 833216 - DNA, 75 bp, synthetic construct
  source 1..75: mol_type = other DNA
atggctctcaccgatatcaaagttaggactaccaagccctccgacaaacccttcaaactcaccgatgggcagggt

SEQ ID NO: 833217 - DNA, 75 bp, synthetic construct
  source 1..75: mol_type = other DNA
ccaatgctatcgccgtttcggacacctttcatgttcccctcacctccgtgatgatgaccgggataatccccggtc

SEQ ID NO: 833218 - DNA, 75 bp, synthetic construct
  source 1..75: mol_type = other DNA
ttaattttggtttcaaaaacaaggagatgatggcggcatccatcgccgcttccggaagttcaggggaagccatcg

SEQ ID NO: 833219 - DNA, 75 bp, synthetic construct
  source 1..75: mol_type = other DNA
gaagccgggtttcttgatgatgcaacaatgttaatcaaagcggtaacctcaggcaaaggcgcagaaaacctgcaa

SEQ ID NO: 833220 - DNA, 75 bp, synthetic construct
  source 1..75: mol_type = other DNA
gagccatatggaacgtaactccgttcgagcggcttatatccataaggcagaacatttggatgagagaagattgat

SEQ ID NO: 833221 - DNA, 75 bp, synthetic construct
  source 1..75: mol_type = other DNA
gagcggagattgatgttgcaatggtgggcggattatcttgatgttaatcgggagaaggggattagcccgtttgat

SEQ ID NO: 833222 - DNA, 75 bp, synthetic construct
  source 1..75: mol_type = other DNA
aatttttggaggcccgcatcgaaatgatgcagtggtggtcagattatcttagtctgaaccagaaggaatatattg

SEQ ID NO: 833223 - DNA, 75 bp, synthetic construct
  source 1..75: mol_type = other DNA
gttcggctaagcctgaagcaaaagcctataaacttactgatggtgacggtttggttttgctggttcacccgaatg

SEQ ID NO: 833224 - DNA, 75 bp, synthetic construct
  source 1..75: mol_type = other DNA
gtctcgaagtcgctgctcgtttgcagcagcatactaccgcgattatacgctttgctgtacacagtggattaatcg

SEQ ID NO: 833225 - DNA, 75 bp, synthetic construct
  source 1..75: mol_type = other DNA
agtggagatcaggaaatcatcttcattggtgatcactatgcttataaaccaatgagtgaaaacaccatcaacaac

SEQ ID NO: 833226 - DNA, 75 bp, synthetic construct
  source 1..75: mol_type = other DNA
ctgcggtataaaaagacgaaggcgtgtcagttaatggaaagactgtcgaaagagaagccggagctatttgcccac

SEQ ID NO: 833227 - DNA, 75 bp, synthetic construct
  source 1..75: mol_type = other DNA
cgggttttccggccataccatcaccgtcacgccgggaaggtatagtcgctctgtgaaccttaaggtctgtggggg

SEQ ID NO: 833228 - DNA, 75 bp, synthetic construct
  source 1..75: mol_type = other DNA
acctgagcgcggaaaatgagcctggcccgcaactgcccacccgctcccgcgtccaggtaaggcggaaagtggcca

SEQ ID NO: 833229 - DNA, 75 bp, synthetic construct
  source 1..75: mol_type = other DNA
gtgcggaacatgcgcctggcccgcaattgccctccgtccgggcaagacagaaagggaccaaaaagcccccattat

SEQ ID NO: 833230 - DNA, 75 bp, synthetic construct
  source 1..75: mol_type = other DNA
accaccaaccgggcgctacgcctgatggggtatgatacgaaaactgaaatctgcgggcatggactcagggcgatg

SEQ ID NO: 833231 - DNA, 75 bp, synthetic construct
  source 1..75: mol_type = other DNA
ttttaccgcagcagcggcgcgcaggcgcaccttcagcaaaacctgacgctgtgcaataacgcaacgctggagtgg

SEQ ID NO: 833232 - DNA, 75 bp, synthetic construct
  source 1..75: mol_type = other DNA
atttaatcaacaggaatacagactgcagcaggggtgttcctgaccaggttaacgcactggtggctaccatgacgg

SEQ ID NO: 833233 - DNA, 75 bp, synthetic construct
  source 1..75: mol_type = other DNA
cttcagacatgggctggtgaaaatggtctgatctttacgggtgcacatgacccgcgtaaaccaatcagtgaaaat

SEQ ID NO: 833234 - DNA, 75 bp, synthetic construct
  source 1..75: mol_type = other DNA
gcaaaagcgcactgattgaagggctggcgctgcgcatcgtggcaggccaggtgccggacaagctgaaaaacaccg

SEQ ID NO: 833235 - DNA, 75 bp, synthetic construct
  source 1..75: mol_type = other DNA
gtcagttaatggaaagactgtcgaaagagaagccggagctatttgcccactggaaagcaggaccaggaagcgcgt

SEQ ID NO: 833236 - DNA, 75 bp, synthetic construct
  source 1..75: mol_type = other DNA
gaagtacaggagaaaaaaagacagaagtatgcaaaagaaattcaggcgatttatatagacatcaagaaaaatacg

SEQ ID NO: 833237 - DNA, 75 bp, synthetic construct
  source 1..75: mol_type = other DNA
cgcctgtacatcaggaaaagaatacgtcagcgcccattcagaggcgctttccgcccatgcccggaatgagtggtc

SEQ ID NO: 833238 - DNA, 75 bp, synthetic construct
  source 1..75: mol_type = other DNA
agccgctttcgcaccctgcgcggcagtctcacccctgaaatgaaagctgagcacagcaggcgtatcgccagtcgc

SEQ ID NO: 833239 - DNA, 75 bp, synthetic construct
  source 1..75: mol_type = other DNA
gaaatcaccggagaatcagtcttcgtttttgccggagcacattcactggataaaccgatgagcgaaaacaccatc

SEQ ID NO: 833240 - DNA, 75 bp, synthetic construct
  source 1..75: mol_type = other DNA
ttattgctatgatcagttcatcattgtcagtttctatgtatgcaaaaaataggattgacttgatgcaatatggga

SEQ ID NO: 833241 - DNA, 75 bp, synthetic construct
  source 1..75: mol_type = other DNA
aaacgcgggcgctgggcgttcttcctgccgacctcaatctgcgtgaccaggtagggccaacctttgaccaggtgt

SEQ ID NO: 833242 - DNA, 75 bp, synthetic construct
  source 1..75: mol_type = other DNA
ccggaatcgctggcaaaacaccggataatttatggtgaacctgactcccgcccccgggataactcacctcagtaa

SEQ ID NO: 833243 - DNA, 75 bp, synthetic construct
  source 1..75: mol_type = other DNA
cagcaaatacccaatgcaatatagattctatggataacagattacatacattgtttccaaaagtgacatcagtgc

SEQ ID NO: 833244 - DNA, 75 bp, synthetic construct
  source 1..75: mol_type = other DNA
ggattcaggaaaaaacattggcgatatggtatcttctacaggatattgtcgaaagactatagaaacatggttctt

SEQ ID NO: 833245 - DNA, 75 bp, synthetic construct
  source 1..75: mol_type = other DNA
tttatctacagcccgcaccgttggcaatactggtcaatactcggtactgcactgatcatcttcgtcacctggttt

SEQ ID NO: 833246 - DNA, 75 bp, synthetic construct
  source 1..75: mol_type = other DNA
atgaacagtcgcttacccgtcgccactcaggttttaagtaaaaaagatgaccagtttaaatttgaaaagcagacc

SEQ ID NO: 833247 - DNA, 75 bp, synthetic construct
  source 1..75: mol_type = other DNA
agcggggatgatgtcgtttgggttaaacctgaaaaatactggcgataccgcgttcctgaggatgaagaaggccga

SEQ ID NO: 833248 - DNA, 75 bp, synthetic construct
  source 1..75: mol_type = other DNA
gtttgggttaagccagataagtactggcgtttccgtgtgcctgaagacgaaaacggtcgtgaagcccgcggttaa

SEQ ID NO: 833249 - DNA, 75 bp, synthetic construct
  source 1..75: mol_type = other DNA
attcgtggattgaaaacagcagcggtgtaaaagaaaagtcattcatcattacaccgccactgtttgttagtgaac

SEQ ID NO: 833250 - DNA, 75 bp, synthetic construct
  source 1..75: mol_type = other DNA
aggatatgctacctttagcaatatccatggtcatattagctttatttatacttcctcgactcaacggctctggcg

SEQ ID NO: 833251 - DNA, 75 bp, synthetic construct
  source 1..75: mol_type = other DNA
tgctaaatttattattgacatgatgatctggttaactgccgcaacaaacccagtcgtatttataattgtaggagt

SEQ ID NO: 833252 - DNA, 75 bp, synthetic construct
  source 1..75: mol_type = other DNA
ggaaaaaatcttgcccctgtggatctggatagaatcataaactttgtttttcagccagagtaccatatacctagg

SEQ ID NO: 833253 - DNA, 75 bp, synthetic construct
  source 1..75: mol_type = other DNA
aaaatcgacgaattacttgcagcggctggcagtgataaatttcatatcttatccgcgcaggtatggataaaagat

SEQ ID NO: 833254 - DNA, 75 bp, synthetic construct
  source 1..75: mol_type = other DNA
atgccggaggccaccggctgaaacaggccggaaacacgcagtatgactatgacgccgcaggccggatggtcagcc

SEQ ID NO: 833255 - DNA, 75 bp, synthetic construct
  source 1..75: mol_type = other DNA
gacccgcgcggggaactggacccggaagccgaccccggcctgctgtatgcaggacagtggcaggatgcggaatca

SEQ ID NO: 833256 - DNA, 75 bp, synthetic construct
  source 1..75: mol_type = other DNA
agaaggatatagcccggcacgtgctgccgtacaagcggagatggcccgcccggagattctggttgaagtgatggt

SEQ ID NO: 833257 - DNA, 75 bp, synthetic construct
  source 1..75: mol_type = other DNA
acgacgtatgggttagctggatgccagaaggacatagcccggctcgcgctgccgtgcaggctgagatggcccgcc

SEQ ID NO: 833258 - DNA, 75 bp, synthetic construct
  source 1..75: mol_type = other DNA
atggagccaatcagcttgaatatcaaacgtaataacccacaacctcgtctgaccgccagtgtggaatatggcaat

SEQ ID NO: 833259 - DNA, 75 bp, synthetic construct
  source 1..75: mol_type = other DNA
cttgttctggggttaatcctcattcttggcggtgagatgatcgggcgtgtgctcttttatggcctgcacatgacg

SEQ ID NO: 833260 - DNA, 75 bp, synthetic construct
  source 1..75: mol_type = other DNA
actggaggatatcattatatcgatttccatcatatcaacagcatggatgatgatataatcagttgtaatttattt

SEQ ID NO: 833261 - DNA, 75 bp, synthetic construct
  source 1..75: mol_type = other DNA
ctcatttaaggctattgagcaccttgacagattatcgaagcattatatatctgaaataagggaaaaacttcatcc

SEQ ID NO: 833262 - DNA, 75 bp, synthetic construct
  source 1..75: mol_type = other DNA
gagcagtgggaataccgccacgacgccagcggcagacgaacagagaaacgctgcgaccggaagaaaatccgcttc

SEQ ID NO: 833263 - DNA, 75 bp, synthetic construct
  source 1..75: mol_type = other DNA
atgattttaagcagcttttgttagagacgaatgcggaagtcgtctggatctctgtggaaaaagctctttttgatg

SEQ ID NO: 833264 - DNA, 75 bp, synthetic construct
  source 1..75: mol_type = other DNA
aaagctttaagcaaattcttttagagcctaatgcagaagttatttggatctctattgaggaagctctctttgtat

SEQ ID NO: 833265 - DNA, 75 bp, synthetic construct
  source 1..75: mol_type = other DNA
tactggttaggcacgattgagcgtgtttgcttcgtgttcatactggaaacgcagctatgttcagtactggaaggt

SEQ ID NO: 833266 - DNA, 75 bp, synthetic construct
  source 1..75: mol_type = other DNA
catttcatttcaatgacggtggtctaggtttcaaaagccggaaattgaacattagtaattttcatattactgctt

SEQ ID NO: 833267 - DNA, 75 bp, synthetic construct
  source 1..75: mol_type = other DNA
tattgatgaactaatcaaattattagagaaaaaaggggcaaatcaaataaggcgagcgaatatttttacaacaaa

SEQ ID NO: 833268 - DNA, 75 bp, synthetic construct
  source 1..75: mol_type = other DNA
aacgacgggagatgatgcagtggtgggcggattatctggatgcaaaccggttcaggcatgttgtgccgtatggct

SEQ ID NO: 833269 - DNA, 75 bp, synthetic construct
  source 1..75: mol_type = other DNA
aaacgaggattgttggtaacgtgcgtgaagatgtatttgaagtggatgatgacgcgactcctgaggaaatagaaa

SEQ ID NO: 833270 - DNA, 75 bp, synthetic construct
  source 1..75: mol_type = other DNA
agtctgcccgtcaacaaggctgaaaaagaggccatcgcatttcgcaatgcagaacgtttactgggcatcacggcg

SEQ ID NO: 833271 - DNA, 75 bp, synthetic construct
  source 1..75: mol_type = other DNA
gggctacaaagcccactgacaaggcttataaactcactgacggggctggtatgttcctgctggtacatcctaatg

SEQ ID NO: 833272 - DNA, 75 bp, synthetic construct
  source 1..75: mol_type = other DNA
agtttacctctggtattttcgatgaaactaacaaagttgtatattttatatccagtcttgctcgtgaagaaaata

SEQ ID NO: 833273 - DNA, 75 bp, synthetic construct
  source 1..75: mol_type = other DNA
tctcctgcatatcaatgtttctccatggcaattaaatgaatttgacttccacactcgtgttcttactttaattaa

SEQ ID NO: 833274 - DNA, 75 bp, synthetic construct
  source 1..75: mol_type = other DNA
tatcactccccagacttcctgatgtcagattccattattttcactatcagaaatcagaggatgcaaacatcaata

SEQ ID NO: 833275 - DNA, 75 bp, synthetic construct
  source 1..75: mol_type = other DNA
acaattaccgcaaaccgatgagcgaaaacaccatcaacaaagcgctgcgggtgatgggctacgacacccagaaag

SEQ ID NO: 833276 - DNA, 75 bp, synthetic construct
  source 1..75: mol_type = other DNA
gcgggcaaactggatgttgcttctcgtcttcagcagcgtactgcctgcgtgatgcgctatgcagtgcagaacggc

SEQ ID NO: 833277 - DNA, 75 bp, synthetic construct
  source 1..75: mol_type = other DNA
cagtccttcatcgcatgaaaaaaatagacgctgttaatttagtagggataatgctcaataatggaaactatctta

SEQ ID NO: 833278 - DNA, 75 bp, synthetic construct
  source 1..75: mol_type = other DNA
aataaagacaataaagacaataaagacaataaagacaataaagacaataaagacaataaagacaatgttgtatca

SEQ ID NO: 833279 - DNA, 75 bp, synthetic construct
  source 1..75: mol_type = other DNA
cagctacaactattaagggatgcttttgaagaggatgaggtcagacggcttagagatgagaaattacctcagtaa

SEQ ID NO: 833280 - DNA, 75 bp, synthetic construct
  source 1..75: mol_type = other DNA
aaatgcacaaagtcaaatggaattctggcgagaaccctatggtgctttttccagcgtgtttggaaatgatgattc

SEQ ID NO: 833281 - DNA, 75 bp, synthetic construct
  source 1..75: mol_type = other DNA
gtccattatctttcttaaaaaaggtagcgtataaattcatagttaaatacagaacacttcaattggcctggcgat

SEQ ID NO: 833282 - DNA, 75 bp, synthetic construct
  source 1..75: mol_type = other DNA
cttaaaggaataaatctccttgtaattccactggcgttttggtgggtaatttacgcagcatatttgatacttttt

SEQ ID NO: 833283 - DNA, 75 bp, synthetic construct
  source 1..75: mol_type = other DNA
caataataaaaataatttcaaagcatgcatttggcatctacctagttcacccattaattattttcacttcatgga

SEQ ID NO: 833284 - DNA, 75 bp, synthetic construct
  source 1..75: mol_type = other DNA
gagttgtagttgcacgttttattgctatattgctggtagttttactacatgccagtgccggacctttcggggcta

SEQ ID NO: 833285 - DNA, 75 bp, synthetic construct
  source 1..75: mol_type = other DNA
ggaaaatccgcacgcgtatgcggatgctaacctggacggtcaccttaacgtgctggaaggttgttgccataacaa

SEQ ID NO: 833286 - DNA, 75 bp, synthetic construct
  source 1..75: mol_type = other DNA
ccgcgtttttgcgttgttttttcctggatgaggataatttctttaatgatttgtcagtcatcgtagatacctgta

SEQ ID NO: 833287 - DNA, 75 bp, synthetic construct
  source 1..75: mol_type = other DNA
ttacgcctgcctccaggcagaccatcagtcacaccggaattaaaaaatggctgtggagaatcagaaaaatcctcc

SEQ ID NO: 833288 - DNA, 75 bp, synthetic construct
  source 1..75: mol_type = other DNA
acacagtatgaagtgtatgactaccccggacgtttcaagggtgctcacgggcagaactttgcccgctggcagatg

SEQ ID NO: 833289 - DNA, 75 bp, synthetic construct
  source 1..75: mol_type = other DNA
cacgttatccccaacgcatgagcatagccaacaatgccacatttgcggctggtgggcaatgtgatcagtgtgctg

SEQ ID NO: 833290 - DNA, 75 bp, synthetic construct
  source 1..75: mol_type = other DNA
tgcaatgcaagtctcaggaaggaatacttctcacgacttataccttttacaagtcaataaaactttgccaataat

SEQ ID NO: 833291 - DNA, 75 bp, synthetic construct
  source 1..75: mol_type = other DNA
aacatacttgttgctgtgccacacgcactgcgaagagttcatcgaaagattatctgttttaaacttccctgaaca

SEQ ID NO: 833292 - DNA, 75 bp, synthetic construct
  source 1..75: mol_type = other DNA
atgcgctggctgaaaatgaaagtgcagtgcgtgaactgggcgatgatacgctgagaaagctggccatcgaagtga

SEQ ID NO: 833293 - DNA, 75 bp, synthetic construct
  source 1..75: mol_type = other DNA
caataaccgcgccattgagaccgcgcaggtgattgaagagctgatccagatggcgaaagcgttccaggaggcgat

SEQ ID NO: 833294 - DNA, 75 bp, synthetic construct
  source 1..75: mol_type = other DNA
gccgtctggaaaagctggtcggttcagagccacgtattcagcaggtcgccgccgatctggttcagcattttgaaa

SEQ ID NO: 833295 - DNA, 75 bp, synthetic construct
  source 1..75: mol_type = other DNA
cgatgagcaaagcctggtcattgtgtaacacccttgatgaggccgaatctttacaggaagagttcgcgtttcttt

SEQ ID NO: 833296 - DNA, 75 bp, synthetic construct
  source 1..75: mol_type = other DNA
agcaaacgcctttacaggccaacgaccgcgacgagctgcgcgagctgctcaatgcccgcgaatccggcggcatta

SEQ ID NO: 833297 - DNA, 75 bp, synthetic construct
  source 1..75: mol_type = other DNA
ttatctgcaacgaagcgctggtgataagcgacggacagaatgcgcgtatcggctcgctgaccgctgatgaagagc

SEQ ID NO: 833298 - DNA, 75 bp, synthetic construct
  source 1..75: mol_type = other DNA
ttttcgataacgtttatttcccactggtgcttaatggtcagttcagtaaaaaagaagccactgaacggacgctgc

SEQ ID NO: 833299 - DNA, 75 bp, synthetic construct
  source 1..75: mol_type = other DNA
gatggatatgaccaacggcggactttacgcttccatcatgcagcagtacggtacgaaagaagaagctgggcattt

SEQ ID NO: 833300 - DNA, 75 bp, synthetic construct
  source 1..75: mol_type = other DNA
gacgcacgaccgggcatacccggagagcctgcccggtgcgccgctggcacggtacacgtatacggaagccggtga

SEQ ID NO: 833301 - DNA, 75 bp, synthetic construct
  source 1..75: mol_type = other DNA
gcagaagtcgttatgagttcgatgattttaatttagccaatcgagctgcggctcttactaagttagcaaaagaaa

SEQ ID NO: 833302 - DNA, 75 bp, synthetic construct
  source 1..75: mol_type = other DNA
gcatcgggacattagtaactgtttcaaaagaattgtttaacaggatacttgcgaagcaattagataaatatattt

SEQ ID NO: 833303 - DNA, 75 bp, synthetic construct
  source 1..75: mol_type = other DNA
caactatcgggcggtcaacaacagcgtgtcgccatcgccagggcctggcccacgaaccgatggtggtcattgccg

SEQ ID NO: 833304 - DNA, 75 bp, synthetic construct
  source 1..75: mol_type = other DNA
gatttaatcattatggatatagacttgcccggaacagacggttttaccttcctgaaaagggtaatgctgccaact

SEQ ID NO: 833305 - DNA, 75 bp, synthetic construct
  source 1..75: mol_type = other DNA
ctgaactcttgtcagataatgttacccgtgaagaggctattgaactgatctcaacatcgcataagatgctgggag

SEQ ID NO: 833306 - DNA, 75 bp, synthetic construct
  source 1..75: mol_type = other DNA
cagttacttggctagctaagccataccagattgggcggcattgcggtagctggaggataatatcagtgaataccg

SEQ ID NO: 833307 - DNA, 75 bp, synthetic construct
  source 1..75: mol_type = other DNA
aagtgctgacgacacagcttaacgaggtcgtgtcctcatactcacccggtcgggcggtcactgtttctcctgcag

SEQ ID NO: 833308 - DNA, 75 bp, synthetic construct
  source 1..75: mol_type = other DNA
ttgatcaccgccattctcgacataacggacagcgaattaaaagaggatttgttgcaaagcctgatggattcatta

SEQ ID NO: 833309 - DNA, 75 bp, synthetic construct
  source 1..75: mol_type = other DNA
tttggaactctcattggagaaaaactaccgtttagtcctgataatgataacaagccgcttcactgggttgattta

SEQ ID NO: 833310 - DNA, 75 bp, synthetic construct
  source 1..75: mol_type = other DNA
atatttttgccattttcgctactgataaatcaacgaacaaatctgccggtatttatatgtttaccgtgaagcgtt

SEQ ID NO: 833311 - DNA, 75 bp, synthetic construct
  source 1..75: mol_type = other DNA
attttaacgcgtaccggccgctggcattagacgatgaccttgatgcagaatttcccgggcgagagcctcgccggg

SEQ ID NO: 833312 - DNA, 75 bp, synthetic construct
  source 1..75: mol_type = other DNA
aaataaaaaaatcatatatagcaaaactcaataatagattgagtgacttaagtaaaatagatgaatcaaatatgt

SEQ ID NO: 833313 - DNA, 75 bp, synthetic construct
  source 1..75: mol_type = other DNA
ttcaaatcaattcgataatgaagatgcaatcaaagataaattagataatagaggttcaatcaaaggtaaattagg

SEQ ID NO: 833314 - DNA, 75 bp, synthetic construct
  source 1..75: mol_type = other DNA
tttatacaaatctcagaactagtcgtccagagctggagcttcctacagccactaccggtacagccattgatcagg

SEQ ID NO: 833315 - DNA, 75 bp, synthetic construct
  source 1..75: mol_type = other DNA
tgaagagccggagctctttcagcacccgatccaggcacaggccttcgcaaaagtgctccgctcactcgttgaaga

SEQ ID NO: 833316 - DNA, 75 bp, synthetic construct
  source 1..75: mol_type = other DNA
ggcactattcagtggatttgtccgagtccgtatcggcctcatcatgggcgcaaaaacttgtttctgggcatgcta

SEQ ID NO: 833317 - DNA, 75 bp, synthetic construct
  source 1..75: mol_type = other DNA
acttcatcattcgggtagtgcgaaatccattttatttacgtagctattattcgcaattaaaacagcaggttgatg

SEQ ID NO: 833318 - DNA, 75 bp, synthetic construct
  source 1..75: mol_type = other DNA
gcagagaagatacaaaaacagggaggtgattatttattcgcggtaaaaggaaaccaggggcggctaaataaagcc

SEQ ID NO: 833319 - DNA, 75 bp, synthetic construct
  source 1..75: mol_type = other DNA
gaaccgtggcagggaacaggacggaagatgagcgcgtttcagggaccacgggcaaatgtgggtcaagggactgtg

SEQ ID NO: 833320 - DNA, 75 bp, synthetic construct
  source 1..75: mol_type = other DNA
attgcggccggaggaatggctggcagaccggcaagctcgcctcgacatgcggttgcgcgagcttggccgtgccgc

SEQ ID NO: 833321 - DNA, 75 bp, synthetic construct
  source 1..75: mol_type = other DNA
ccggagatgtctggcttactaggtcccggcgctatggcgatctgaaacacgcactcgttccggcacaatccatcg

SEQ ID NO: 833322 - DNA, 75 bp, synthetic construct
  source 1..75: mol_type = other DNA
ggcagtatgagtaatgaccgttatgtgaatatggccggctacactgacacgttcaatgacggtctggacagctac

SEQ ID NO: 833323 - DNA, 75 bp, synthetic construct
  source 1..75: mol_type = other DNA
gagtggttattaccagggtatgggcgaaatattacgtagcgcctggggaaaaccgtatttttcaaccgtagtgaa

SEQ ID NO: 833324 - DNA, 75 bp, synthetic construct
  source 1..75: mol_type = other DNA
ctctgaaacagaaaatctccgggcagaaccttccatccggggggagaaaacttttcgttttgagccgtccggtgt

SEQ ID NO: 833325 - DNA, 75 bp, synthetic construct
  source 1..75: mol_type = other DNA
cggaagaagccacatggagcgggctggttccgtcactggtacgggagtaccgttacgacagcgcgggtaatgtgt

SEQ ID NO: 833326 - DNA, 75 bp, synthetic construct
  source 1..75: mol_type = other DNA
aaatgaaggacgcaacggtcgaagtacgcgccggtgcatggtacgacggtcgcgttgtctacaccaatcaggcag

SEQ ID NO: 833327 - DNA, 75 bp, synthetic construct
  source 1..75: mol_type = other DNA
cttatggacaattcgtgaagaacttgtccaggcaattaaggggctggattttttttggcacaacagaaaacacca

SEQ ID NO: 833328 - DNA, 75 bp, synthetic construct
  source 1..75: mol_type = other DNA
agccattgatggactgattaaggcaggtgcgcagtgtattcaggctgatttttcgaccaacgacggtgtgatgcg

SEQ ID NO: 833329 - DNA, 75 bp, synthetic construct
  source 1..75: mol_type = other DNA
acacggcggactatctaaagaccgaggatgacattgcggcctacatcgaagccgtgatggaggaaggcggcgacg

SEQ ID NO: 833330 - DNA, 75 bp, synthetic construct
  source 1..75: mol_type = other DNA
tattgttctcgatgccgcgaggccgttcgtggtgttgcacaccctcaagcagcgccagcagccgcgccccggacg

SEQ ID NO: 833331 - DNA, 75 bp, synthetic construct
  source 1..75: mol_type = other DNA
tttgcaggtcagatttggtgacgggccgtggcaggatgttaaggggctggatgaagtgggcagtgatacaggcag

SEQ ID NO: 833332 - DNA, 75 bp, synthetic construct
  source 1..75: mol_type = other DNA
ggtaacagtgacagcaagactatctcatcgcgcaccggttatcgaactaaagcaagcgtgaatggttacagcacg

SEQ ID NO: 833333 - DNA, 75 bp, synthetic construct
  source 1..75: mol_type = other DNA
tggtgcacagatgacagaagggacagtcaacgttagtaaaacgctggatttgcgcggcgagggtgtgattcaggt

SEQ ID NO: 833334 - DNA, 75 bp, synthetic construct
  source 1..75: mol_type = other DNA
tgaatgtctggggaaatgtgggcgttcaggttgctgacaagggatataatgacacctccgcgatgattggcgtta

SEQ ID NO: 833335 - DNA, 75 bp, synthetic construct
  source 1..75: mol_type = other DNA
gtgacggaaaggacgagcgttccccctgaattgctgattctggctcccgtctgggacgactctcctggcgacgaa

SEQ ID NO: 833336 - DNA, 75 bp, synthetic construct
  source 1..75: mol_type = other DNA
ggcctgtacatcacagcatctgattttgttgaaatgtgtattaatttggagcattttttatcaagagacattgtt

SEQ ID NO: 833337 - DNA, 75 bp, synthetic construct
  source 1..75: mol_type = other DNA
cgtttcgtaacctggaagggatagtcaaaacacacgcctcgctggcgcatctggcgcaggcggacgatatcccct

SEQ ID NO: 833338 - DNA, 75 bp, synthetic construct
  source 1..75: mol_type = other DNA
tgtggaactattcatcttgcaggttgcgttattgaggttatgggtaataaaggtgccatgaccatccgtgtaaca

SEQ ID NO: 833339 - DNA, 75 bp, synthetic construct
  source 1..75: mol_type = other DNA
ttaatacattggtatcacgcgggcccgtaacggcgttaagtggctctactcagggtactgctggtattcaaatgt

SEQ ID NO: 833340 - DNA, 75 bp, synthetic construct
  source 1..75: mol_type = other DNA
gaagttgatggcgatgatccggcagtattcagaccaatacaaaagttaattaacggaacatggtataacgtatcg

SEQ ID NO: 833341 - DNA, 75 bp, synthetic construct
  source 1..75: mol_type = other DNA
cgaacagagaaacgctgcgaccggaagaaaatccgcttcacgtatctgtgggacggcgacagtattgcggaaatc

SEQ ID NO: 833342 - DNA, 75 bp, synthetic construct
  source 1..75: mol_type = other DNA
gctgaacaaaaagctgttttggctgcaaaatatcagcgacgagtttttggtcgagctatacgcgcgttcacgtgc

SEQ ID NO: 833343 - DNA, 75 bp, synthetic construct
  source 1..75: mol_type = other DNA
ttgatgaacgtcttttacatggacaaattcgaatcacatgggggaaatattctggtgcaaataccattattgtcg

SEQ ID NO: 833344 - DNA, 75 bp, synthetic construct
  source 1..75: mol_type = other DNA
atgattgaaacagatattgagggtgatatcaccttgctggccccttggcaatatgctatttggatccctgcgggg

SEQ ID NO: 833345 - DNA, 75 bp, synthetic construct
  source 1..75: mol_type = other DNA
acgatgcagaaaattgatgcgctgagcgaagtcgaccgtctaggtctggcgtgggctgttgcgcgcaatggttat

SEQ ID NO: 833346 - DNA, 75 bp, synthetic construct
  source 1..75: mol_type = other DNA
attgacagcatgcgcgccgccggggcgttcgcctgcttcgtggtgcatgatattctgccattacgccgtccggag

SEQ ID NO: 833347 - DNA, 75 bp, synthetic construct
  source 1..75: mol_type = other DNA
ttattagcttcttcgaggggcatagcgatagttataccgtgtctattccggcggataatgtgccgtggaaaacgg

SEQ ID NO: 833348 - DNA, 75 bp, synthetic construct
  source 1..75: mol_type = other DNA
tacaaataaggctatattgattcatgggatcaaaggagtaaacctaagcaactttagccccattgttggcatgac

SEQ ID NO: 833349 - DNA, 75 bp, synthetic construct
  source 1..75: mol_type = other DNA
catactaacgactattactaacataaaagacaatatatttaaaaacattagatttatatcattgttattattttt

SEQ ID NO: 833350 - DNA, 75 bp, synthetic construct
  source 1..75: mol_type = other DNA
cgattacattgcaatttatctttttgttccaatgatagttatgggatgtagagagataagaacacgctatagcct

SEQ ID NO: 833351 - DNA, 75 bp, synthetic construct
  source 1..75: mol_type = other DNA
ggacgctggagtgatatcaccgaacgccgatttaacactgaaaacgaggcattcaacttcacatacgaatacgcg

SEQ ID NO: 833352 - DNA, 75 bp, synthetic construct
  source 1..75: mol_type = other DNA
gggcttggtttccactggtcagcagcagttgttttattcatgcttttcctaacaagatttttatctacaaggtta

SEQ ID NO: 833353 - DNA, 75 bp, synthetic construct
  source 1..75: mol_type = other DNA
aggtaatggtaatgtatactatgttttctacagggttgtggtctctatcaatagctagtttctattcatttccta

SEQ ID NO: 833354 - DNA, 75 bp, synthetic construct
  source 1..75: mol_type = other DNA
ccaacaaatttttcgtcccgcattcgtcataattcagtcagatgagaccgaaaattcatggaactctgatttacg

SEQ ID NO: 833355 - DNA, 75 bp, synthetic construct
  source 1..75: mol_type = other DNA
ctggcggaaacgcagcgccgcagcctggcggatgcgcttcagcagtccggcggcgaagacggtggcagtgtggtg

SEQ ID NO: 833356 - DNA, 75 bp, synthetic construct
  source 1..75: mol_type = other DNA
attcttcagagcattaagcccttacgactacacactgtattgcaggaagtgggtaaaaccaaatctgacttgtac

SEQ ID NO: 833357 - DNA, 75 bp, synthetic construct
  source 1..75: mol_type = other DNA
attaacgtgaaataccgttatgaatttacggacacgctggggatggtgacgtcgttcagctatgcaggagacaag

SEQ ID NO: 833358 - DNA, 75 bp, synthetic construct
  source 1..75: mol_type = other DNA
gctccagcttgttgcagcgtattgaggatgttaatgctgaacgagccagggcctttagtcgtttgacagttatat

SEQ ID NO: 833359 - DNA, 75 bp, synthetic construct
  source 1..75: mol_type = other DNA
gacgaatagcggcacgctgaatgtcgaaggtggagaagtttacttaggtgtttttgaacctgctgtaggaacgct

SEQ ID NO: 833360 - DNA, 75 bp, synthetic construct
  source 1..75: mol_type = other DNA
caaatcacctggatgggtgtgaaagattccgaccatacccggaaagacggaacgcgcattgaaacggaaggcgac

SEQ ID NO: 833361 - DNA, 75 bp, synthetic construct
  source 1..75: mol_type = other DNA
agcatcttggtttatggcgtaacagtagctcagctatagcttcatatgaacgcaattatccagaggaaggcggct

SEQ ID NO: 833362 - DNA, 75 bp, synthetic construct
  source 1..75: mol_type = other DNA
cagtagtgccactaacagtacgtctgaaacgcaggcggcaacgccaaaagcggtcaaggcagcaaatgacaacgc

SEQ ID NO: 833363 - DNA, 75 bp, synthetic construct
  source 1..75: mol_type = other DNA
cacattcacacactgttgctattggctcacacgggcattccattaccgtaaatgctactggcaataccgaaaaca

SEQ ID NO: 833364 - DNA, 75 bp, synthetic construct
  source 1..75: mol_type = other DNA
agacgtggggggcaaaacagatattcagttctggcctttcaggtgagttatccggcaacgcatcaactgcaacaa

SEQ ID NO: 833365 - DNA, 75 bp, synthetic construct
  source 1..75: mol_type = other DNA
ggagggtggcacagagtcggacatcagtctgacggggcatatcgtgatgatgacctgaacaccatgaaaacgccg

SEQ ID NO: 833366 - DNA, 75 bp, synthetic construct
  source 1..75: mol_type = other DNA
atcagtcagagagtcgttattacgaaggtgatttgaatgatgtaacctcaccaggtatttacagcgttacaggta

SEQ ID NO: 833367 - DNA, 75 bp, synthetic construct
  source 1..75: mol_type = other DNA
agccggggagcttcacgccactcatcagagttgaaaccgccaccggtgagctggcgaaaacgcagcgccgcagcc

SEQ ID NO: 833368 - DNA, 75 bp, synthetic construct
  source 1..75: mol_type = other DNA
atttgcgatggacattcgattccattgctgagttggatagttccttcggaaaaacagcaaaatgcaaagatacag

SEQ ID NO: 833369 - DNA, 75 bp, synthetic construct
  source 1..75: mol_type = other DNA
attttttccgcggtgctttagcaccatttcacaaataccgacaaaatgctttgttggatgccactatcgcactaa

SEQ ID NO: 833370 - DNA, 75 bp, synthetic construct
  source 1..75: mol_type = other DNA
ctatgacaggtccagataaatttgattctatagatagcaccgcatatgacgccttaaataaaataaatagccaat

SEQ ID NO: 833371 - DNA, 75 bp, synthetic construct
  source 1..75: mol_type = other DNA
agacgatttatcagccggggagcttcacgccactcatcagagttgaaaccgccaccggtgagctggcgaaaacgc

SEQ ID NO: 833372 - DNA, 75 bp, synthetic construct
  source 1..75: mol_type = other DNA
gattctatagatagcaccgcatatggcgccttaaataaaataaatagccaatctatttgcgaagataaagagttc

SEQ ID NO: 833373 - DNA, 75 bp, synthetic construct
  source 1..75: mol_type = other DNA
ctaatccttttgataagctagtggctttaggaattaaccgggataagtggttcaaaagggagttacatcattcat

SEQ ID NO: 833374 - DNA, 75 bp, synthetic construct
  source 1..75: mol_type = other DNA
aacgcttctggcgttgtattggcgacatgggcaggatatttatgcattgctacccgcattctcgaactgtggcgc

SEQ ID NO: 833375 - DNA, 75 bp, synthetic construct
  source 1..75: mol_type = other DNA
gtagagaactgcaccattcaactgaaagccagacggaccagcagcacggtggtggtgaacacggtggcctctgaa

SEQ ID NO: 833376 - DNA, 75 bp, synthetic construct
  source 1..75: mol_type = other DNA
gacggcagccattgcggcggcggaagacgcgcaggtggtgatggtggatactagcccggagcgccgcgcgcatgt

SEQ ID NO: 833377 - DNA, 75 bp, synthetic construct
  source 1..75: mol_type = other DNA
aatagtgttatagaaaagttgcaaaaaaaatataaggtaatatatgaacatactccagaaaatcgcactctacgc

SEQ ID NO: 833378 - DNA, 75 bp, synthetic construct
  source 1..75: mol_type = other DNA
gagccacaaatgcggcatggaatggccacgtaaaaggtatccaaattggggctgatttatggcctgctgatgaag

SEQ ID NO: 833379 - DNA, 75 bp, synthetic construct
  source 1..75: mol_type = other DNA
attttctacagcatcagctattgcgtgtggtactcgagcctcaagctttttggattttgcattaactgcttttgt

SEQ ID NO: 833380 - DNA, 75 bp, synthetic construct
  source 1..75: mol_type = other DNA
gtgtatgacccgacggtacagtttgagttctggttttcggagacaaaaatcgcagacacatctcaggtggaaacc

SEQ ID NO: 833381 - DNA, 75 bp, synthetic construct
  source 1..75: mol_type = other DNA
agcaagcgctggggcaaacgctgggtttagttgtggcctatattctgtttgcggtcgcgggggtatgtattattg

SEQ ID NO: 833382 - DNA, 75 bp, synthetic construct
  source 1..75: mol_type = other DNA
attaccgcctgtgtatctgcaagaccttccattaacgcttcgtcctctgctcagtaacggcttattggtcgggat

SEQ ID NO: 833383 - DNA, 75 bp, synthetic construct
  source 1..75: mol_type = other DNA
cagttgcgcagcctgaatggcgaatggcgctttgcctggtttcccgccccccaaacggggggggggggggggggg

SEQ ID NO: 833384 - DNA, 75 bp, synthetic construct
  source 1..75: mol_type = other DNA
actacactatgatacccagagtgtcagtttgtataaaaactctgtttacgctgaacaaaccattgagatacaatt

SEQ ID NO: 833385 - DNA, 75 bp, synthetic construct
  source 1..75: mol_type = other DNA
ggaagctgaccgcaagaaatgctgatatcagcggtaacgtgaatgcgaattccgggacgctcaacaacgtcacga

SEQ ID NO: 833386 - DNA, 75 bp, synthetic construct
  source 1..75: mol_type = other DNA
tgacgtgtttaacacctgggtttaaattggtgttcaacaccttgttggcgcaaggtgcagaaacgacgaaacccg

SEQ ID NO: 833387 - DNA, 75 bp, synthetic construct
  source 1..75: mol_type = other DNA
accccctgggtttatctatgtgggaggatgcaaaatcgggggcatgtactaatggtctttgcggcacactatccg

SEQ ID NO: 833388 - DNA, 75 bp, synthetic construct
  source 1..75: mol_type = other DNA
cttaaaattatcaaggcgcataaatgcaaagccccgcaagtgtcgttaccactcgcagggcttctaaccaccaac

SEQ ID NO: 833389 - DNA, 75 bp, synthetic construct
  source 1..75: mol_type = other DNA
gcatctgacggtaataaggcaatcagtgaaacagagcatgatgcagtgaaagcgatgttcagggggatactgaga

SEQ ID NO: 833390 - DNA, 75 bp, synthetic construct
  source 1..75: mol_type = other DNA
atggacagcgaacggcgcatgaaaacactgggtgaatcggtgaaaaatacgcttctcacgcccaatgaggcccgt

SEQ ID NO: 833391 - DNA, 75 bp, synthetic construct
  source 1..75: mol_type = other DNA
ctttatctaacttttgcttttttaagtggtgtctggccctggctgattttcctcgtggttttactttcgtggctg

SEQ ID NO: 833392 - DNA, 75 bp, synthetic construct
  source 1..75: mol_type = other DNA
acgctgaggaggcgaagaagaatgccggagaagcagagacgtccgcgaggaatgccggcatatcagccagtaagg

SEQ ID NO: 833393 - DNA, 75 bp, synthetic construct
  source 1..75: mol_type = other DNA
ccgtagtcggcattgcaccggaagatctatcagcatgggctggcgcagacgctgaacgcctgaccgttacagctc

SEQ ID NO: 833394 - DNA, 75 bp, synthetic construct
  source 1..75: mol_type = other DNA
cagacaattagtgagggaggaatttctacagggacgataattaacgataaaggaacaatgtcagttttaacgaat

SEQ ID NO: 833395 - DNA, 75 bp, synthetic construct
  source 1..75: mol_type = other DNA
gcagtcagtacacaagccatgaatggcagtcgttcctgaaatcacacggcctggagggcagcatgagccgtcgcg

SEQ ID NO: 833396 - DNA, 75 bp, synthetic construct
  source 1..75: mol_type = other DNA
gaacattgaaatcagaatgttattacctcaatgaatataaaaatgtggagggcttaaagcaagacatcatcgatt

SEQ ID NO: 833397 - DNA, 75 bp, synthetic construct
  source 1..75: mol_type = other DNA
atgatctggtcaaatatgttatcccattgactaaaatattccccgaggctgaggtatttgagaatgaccaacctg

SEQ ID NO: 833398 - DNA, 75 bp, synthetic construct
  source 1..75: mol_type = other DNA
ataaccaaagttaaacttgcttctttgataacatggcgttgtatcaatgaaaaatctttcgatgcacgttcgcga

SEQ ID NO: 833399 - DNA, 75 bp, synthetic construct
  source 1..75: mol_type = other DNA
ccgagcgcaactatcaccgcgggcggtggcggtaaatcacagctggtgacgccaacgctgattcagatgggttat

SEQ ID NO: 833400 - DNA, 75 bp, synthetic construct
  source 1..75: mol_type = other DNA
tggtatgccggtgacctggccggacccgacccacggcgacccgaaatctccagctgtgcagagtggaaagttggc

SEQ ID NO: 833401 - DNA, 75 bp, synthetic construct
  source 1..75: mol_type = other DNA
ggttacgtccaaatcccctgcgtactggtgagaccttcgaggctttctgcggcatgctatccggtggtattcctg

SEQ ID NO: 833402 - DNA, 75 bp, synthetic construct
  source 1..75: mol_type = other DNA
atgataaatactcttcgcgcatttttatttcaaaatttgatggctctgtacaatttatcgactcgataagtgcga

SEQ ID NO: 833403 - DNA, 75 bp, synthetic construct
  source 1..75: mol_type = other DNA
tacactgaatctggtttggtaaaatattattatacatctgaaaatttaagtgttgtagataattttgaaaaggca

SEQ ID NO: 833404 - DNA, 75 bp, synthetic construct
  source 1..75: mol_type = other DNA
ttaacttatctggtgagggaagatgaaattgccaggcttcatgaagatggttggttttgtggacaagaagaacta

SEQ ID NO: 833405 - DNA, 75 bp, synthetic construct
  source 1..75: mol_type = other DNA
gcgggacgtgtggcagctcatgcagtagtgaatgcagccctgtctctggcacagggtaagaatgctctggctggg

SEQ ID NO: 833406 - DNA, 75 bp, synthetic construct
  source 1..75: mol_type = other DNA
acacctaaaaataaaatagtagagattccgaattttattaatacaaataaatttgattttgatattaatgtcaga

SEQ ID NO: 833407 - DNA, 75 bp, synthetic construct
  source 1..75: mol_type = other DNA
tttttacctcttttttcaacatgttgaaattcgccagacaatgtctggcgaattaacaccattgggaattccgca

SEQ ID NO: 833408 - DNA, 75 bp, synthetic construct
  source 1..75: mol_type = other DNA
ctggtctgttcgccagctagagcggcaaattgcgacccagttttatgagctggatttgcccctatatttccagac

SEQ ID NO: 833409 - DNA, 75 bp, synthetic construct
  source 1..75: mol_type = other DNA
gtgtgaagcttgtgagccctacgatatcaaggacattgatgaatggtatgacagtgacgtgaacttattaggcga

SEQ ID NO: 833410 - DNA, 75 bp, synthetic construct
  source 1..75: mol_type = other DNA
accctgttcaaatcctggtttgtggattttgatccggtgattgataacgctctggatgcaggaaacccaatcccg

SEQ ID NO: 833411 - DNA, 75 bp, synthetic construct
  source 1..75: mol_type = other DNA
gatattattatgagtgcattaacaccccgtatgcttcaacacctgaaacaagatattaacgcatgggtgaatgaa

SEQ ID NO: 833412 - DNA, 75 bp, synthetic construct
  source 1..75: mol_type = other DNA
tgctgttgttattcttcagcctgttttccataataattctagttgctggtttagttaaaggggtaaaggatgttc

SEQ ID NO: 833413 - DNA, 75 bp, synthetic construct
  source 1..75: mol_type = other DNA
tattttccgttgaatacagaaaaaatatttttgatttatataaagatacatttgtttgcgtagctattgctgttt

SEQ ID NO: 833414 - DNA, 75 bp, synthetic construct
  source 1..75: mol_type = other DNA
aatatccacaggtaatatcaatattaattgcccattaaaagatatttacaatgaaatcaggaggttaaacgtaat

SEQ ID NO: 833415 - DNA, 75 bp, synthetic construct
  source 1..75: mol_type = other DNA
tatttccagcatgtcgatgacgcttaatggcgcagtcagcggctatacagattcgttaatcgctaatgaccagac

SEQ ID NO: 833416 - DNA, 75 bp, synthetic construct
  source 1..75: mol_type = other DNA
acagctacgacctgaactatctgaacagtaatacgtcgaagggtgacagggctctggctttcttcggggaaccgg

SEQ ID NO: 833417 - DNA, 75 bp, synthetic construct
  source 1..75: mol_type = other DNA
gtgaaggattacgtgactgaaggcaacagctacgacctgaactatctgaacagtaatacgtcgaagggtgacagg

SEQ ID NO: 833418 - DNA, 75 bp, synthetic construct
  source 1..75: mol_type = other DNA
cgttatatctggcagaagcctatcgccattttggtcatgatgatcgcgcgcggctgttgcttgaggatcaactga

SEQ ID NO: 833419 - DNA, 75 bp, synthetic construct
  source 1..75: mol_type = other DNA
gagagatgaaattaacctttgatggatacgaacaagcgttattcactgctaagggacaagcatggatcactaaat

SEQ ID NO: 833420 - DNA, 75 bp, synthetic construct
  source 1..75: mol_type = other DNA
tggctacgacatcaagcgccggacggctgttattgatcgatggtttgaacttgaaaaacgggtacagcaaaacac

SEQ ID NO: 833421 - DNA, 75 bp, synthetic construct
  source 1..75: mol_type = other DNA
aaaaaccagatgctgtacagcatgaaggtgcacccgccgctgtggcgtgccggtctgcgccagaacttccgtatc

SEQ ID NO: 833422 - DNA, 75 bp, synthetic construct
  source 1..75: mol_type = other DNA
atcgagtctgagctccgcggcagtccggcagaagagcgactggcggtcagaaaagccagaacggtaccgctaatg

SEQ ID NO: 833423 - DNA, 75 bp, synthetic construct
  source 1..75: mol_type = other DNA
ttgttcggtcgcagctgcgagaaaagccgcgagaagatagaaaagaagatcgcacgggcagaaacgcgtataacc

SEQ ID NO: 833424 - DNA, 75 bp, synthetic construct
  source 1..75: mol_type = other DNA
ctttgccgggatcgcaatcgctctccctgagttgcccgtgtaacgaaatcctctacgaaggtacgcgaggccccg

SEQ ID NO: 833425 - DNA, 75 bp, synthetic construct
  source 1..75: mol_type = other DNA
cactcagcaggaagatcacgactgggatggcactagatatgccgtcctgcattcaccgccgaagaaagtcggcaa

SEQ ID NO: 833426 - DNA, 75 bp, synthetic construct
  source 1..75: mol_type = other DNA
atgtcaccagcggtggtcgctttgaccatctgtggaatgcctcgcatcacgtgattaagccgttccgcattcccg

SEQ ID NO: 833427 - DNA, 75 bp, synthetic construct
  source 1..75: mol_type = other DNA
gagtggttggtgcgtttcggatcatctgttgatgtgcgtattgaaaacgctggagtatggcgggacagaacattc

SEQ ID NO: 833428 - DNA, 75 bp, synthetic construct
  source 1..75: mol_type = other DNA
cacgcgtgaacggcgcggcactgtttgctgacatgctggaggccgtcattgagggcaagaagctggaatcaggta

SEQ ID NO: 833429 - DNA, 75 bp, synthetic construct
  source 1..75: mol_type = other DNA
tgaattgcgctgggtatggccgactggcgaagagttgctgttccgctttgggaaggaagagggggattactggga

SEQ ID NO: 833430 - DNA, 75 bp, synthetic construct
  source 1..75: mol_type = other DNA
gtgattgctaaccagagtcgcaaggtggccatgttctttaaccaccagacacgtgctatcccggtcggtaaatgg

SEQ ID NO: 833431 - DNA, 75 bp, synthetic construct
  source 1..75: mol_type = other DNA
ttgaggccaaagacaagtagtgtaagcaaacctagtttacttcactcacttttgagaatacatgatgaccttgat

SEQ ID NO: 833432 - DNA, 75 bp, synthetic construct
  source 1..75: mol_type = other DNA
ccaccagcgaagtggtgtaataaggacttggcacgatatattaaaatgaatgtgcatgagattttacctaattat

SEQ ID NO: 833433 - DNA, 75 bp, synthetic construct
  source 1..75: mol_type = other DNA
catgaacaacgttctctatcagaacggctgtaccgtgcacagggtatcgatacaaaaacattactaggacataaa

SEQ ID NO: 833434 - DNA, 75 bp, synthetic construct
  source 1..75: mol_type = other DNA
atgaacaaaatatttaaagttatctggaaccctgcgacagggaattatactgttaccagcgaaacggcaaaagcc

SEQ ID NO: 833435 - DNA, 75 bp, synthetic construct
  source 1..75: mol_type = other DNA
caccattaccttcaccaacacgcatatggattttaatggggacaattgcgtgaatattatggtcagcaaggatgg

SEQ ID NO: 833436 - DNA, 75 bp, synthetic construct
  source 1..75: mol_type = other DNA
acattgcatgaactggcggaacgttacggtatatccgcagagcgcgtgagacaacttgaaaataacgcgatgaaa

SEQ ID NO: 833437 - DNA, 75 bp, synthetic construct
  source 1..75: mol_type = other DNA
taatgcacgctacaatgcgttaaccagcattagcccaaatgcggaagtcagcctcgacaatacgcaggggttagg

SEQ ID NO: 833438 - DNA, 75 bp, synthetic construct
  source 1..75: mol_type = other DNA
attggtggactggccatgaatggcggtacgctcattttcgatacggatattcctgctgcgacgcttgcagaggga

SEQ ID NO: 833439 - DNA, 75 bp, synthetic construct
  source 1..75: mol_type = other DNA
gttttgctggcactaagcggttcagcgtctggtgcgagtctggaagttgataatggtcagattaccaatattaat

SEQ ID NO: 833440 - DNA, 75 bp, synthetic construct
  source 1..75: mol_type = other DNA
taccgggatcctgactcttaacaacgattccgcggcgtatcagggtacgacggatatcgtgggggggggaaattg

SEQ ID NO: 833441 - DNA, 75 bp, synthetic construct
  source 1..75: mol_type = other DNA
tggcaatcaatacggtgcgacaggtttcgctttccaacggtcagaacgactatcagggggcaacctacgttcaga

SEQ ID NO: 833442 - DNA, 75 bp, synthetic construct
  source 1..75: mol_type = other DNA
atatgctgattacgggtgacgataaagacggaaaagtgatgcatgatgcaggccatacggtgttcaatgcaggga

SEQ ID NO: 833443 - DNA, 75 bp, synthetic construct
  source 1..75: mol_type = other DNA
ctttgactactgccgaggctggataagccgtgttccggtgctggttcgagacagtaagaaccccgatgacgttga

SEQ ID NO: 833444 - DNA, 75 bp, synthetic construct
  source 1..75: mol_type = other DNA
ttttcaccagattcggtagcaaagaaggttcctgctttaaaaaaactactagaactacgtgaacaattatgtgat

SEQ ID NO: 833445 - DNA, 75 bp, synthetic construct
  source 1..75: mol_type = other DNA
tcggcgtctggaccaccgcttttttttcagtcgttttttacacattcaaaacggaatatcgtcgtcaaagtccat

SEQ ID NO: 833446 - DNA, 75 bp, synthetic construct
  source 1..75: mol_type = other DNA
tgacgttcgggcatcaggattatgccgctttcctcacagagaggaattatcgtagcattccccgtagtgatgcca

SEQ ID NO: 833447 - DNA, 75 bp, synthetic construct
  source 1..75: mol_type = other DNA
caacgatgcagcgatcgaaaccagtgttccaggatttgggattgagcttcagcaaaatggtcaacggtttcagct

SEQ ID NO: 833448 - DNA, 75 bp, synthetic construct
  source 1..75: mol_type = other DNA
attaccgcaaagatgttccgtaccagataaagtgtgaccctgatattaccgatgacgcctgggtaatgacgctaa

SEQ ID NO: 833449 - DNA, 75 bp, synthetic construct
  source 1..75: mol_type = other DNA
gtaaaagcgagcggcgccacattaaatgacggcgcgttttcagcgtacgcaacattacgggtggattatcaatga

SEQ ID NO: 833450 - DNA, 75 bp, synthetic construct
  source 1..75: mol_type = other DNA
ctcattcttacagaaaaatcagtatatatcagatgtaaaaatttattctgtaaataaagagaaaaaacttgcatt

SEQ ID NO: 833451 - DNA, 75 bp, synthetic construct
  source 1..75: mol_type = other DNA
cgacgacgacttctacaaagaaaacggcatcgctaccgatgatatcgtggctgtgggcttagtctaccagttcta

SEQ ID NO: 833452 - DNA, 75 bp, synthetic construct
  source 1..75: mol_type = other DNA
ttcagaccgtactggaatataagattccgaaaaaaactccggcaaaaataaactttcttatgtatgaaaatcatc

SEQ ID NO: 833453 - DNA, 75 bp, synthetic construct
  source 1..75: mol_type = other DNA
tttaacatcgtcatgccgcgatgttttccaggtatgcgatcccatttttgtgcgcctgtactcttttaagaactt

SEQ ID NO: 833454 - DNA, 75 bp, synthetic construct
  source 1..75: mol_type = other DNA
agcgctgcacgcggcaacgtcgccagtctgattaaccccttacgtcatcacccgaaggagccacgccatgactcg

SEQ ID NO: 833455 - DNA, 75 bp, synthetic construct
  source 1..75: mol_type = other DNA
tatgatcgctgcacaggggtgtgccggtgagcatgatttatttggtcgcgctcaattcataactgggaaaagatt

SEQ ID NO: 833456 - DNA, 75 bp, synthetic construct
  source 1..75: mol_type = other DNA
attatcgacgatatcgacggtaactatggtcgaaaaaatgtgccatacgaactcagttgtgattcgacgattcgc

SEQ ID NO: 833457 - DNA, 75 bp, synthetic construct
  source 1..75: mol_type = other DNA
acggtcgtcaggaagtggaatacggactgagctgtgagtcggatgtccgcgattctgaatggcagatgacgctca

SEQ ID NO: 833458 - DNA, 75 bp, synthetic construct
  source 1..75: mol_type = other DNA
tggaggcggtaccggtcaaagcggctgatgcggtgctgacggacacgaccttttctgcttacgcaaccttacggg

SEQ ID NO: 833459 - DNA, 75 bp, synthetic construct
  source 1..75: mol_type = other DNA
caacgactctgctattgagacggatgtaccgggcttcggaattgagcttcagcatgacggtcagcgttttaagct

SEQ ID NO: 833460 - DNA, 75 bp, synthetic construct
  source 1..75: mol_type = other DNA
cttgaagcaaacaaaaaaccgggttcgcgcgttaacggcgcagccctgtttgccgatatgctcgaagccgtcatt

SEQ ID NO: 833461 - DNA, 75 bp, synthetic construct
  source 1..75: mol_type = other DNA
acgtaaccagcggtggacgctttgaccatctgtggaatgcctcacatcacgtcatcaagccgttccgcataccgg

SEQ ID NO: 833462 - DNA, 75 bp, synthetic construct
  source 1..75: mol_type = other DNA
tgactggggtgagtcgaagccgttctctaacctctggtgggcccaagctgacggcactgccgccgagctgccaga

SEQ ID NO: 833463 - DNA, 75 bp, synthetic construct
  source 1..75: mol_type = other DNA
ctcttggtcttgacctgtatgagtggggaggtactggcgacgaacgggagcgtgacagtcattccgcgttaaacg

SEQ ID NO: 833464 - DNA, 75 bp, synthetic construct
  source 1..75: mol_type = other DNA
actgattttacgcaaaagccgaagctggaggccgtaccggtaaaagcgagtgatgctgtgttaagcgatacgaat

SEQ ID NO: 833465 - DNA, 75 bp, synthetic construct
  source 1..75: mol_type = other DNA
aacaaccttcgccaaggatgtcgatcaaggaacactaaccattagaggagaagttgttgatacaacgtgttactt

SEQ ID NO: 833466 - DNA, 75 bp, synthetic construct
  source 1..75: mol_type = other DNA
gtgccgggcttcggaattgagcttcagcacgacggtcagcgttttaagctgaacacgccactttccattaacgcc

SEQ ID NO: 833467 - DNA, 75 bp, synthetic construct
  source 1..75: mol_type = other DNA
tctgtatgagcagcggtattgtgaatgcatcaccggatatcaccttcaaaggaactcttgtattgcctccggcat

SEQ ID NO: 833468 - DNA, 75 bp, synthetic construct
  source 1..75: mol_type = other DNA
tcggagcatttatcggtaagccaggagaagactatcaatgccggtgcctggctctcccttacgtctcatgggatt

SEQ ID NO: 833469 - DNA, 75 bp, synthetic construct
  source 1..75: mol_type = other DNA
acggcagcaggaaattccgcgaaggccgcaaaaacgtctgagacgaatgcggataacagcgcacaggcggcagca

SEQ ID NO: 833470 - DNA, 75 bp, synthetic construct
  source 1..75: mol_type = other DNA
aaggaaaccaggggcggctaaataaagcctttgaggaaaaatttccgctgaaagaattaaataatccagagcatg

SEQ ID NO: 833471 - DNA, 75 bp, synthetic construct
  source 1..75: mol_type = other DNA
atgtatttaaagaaaaatttgataaccattgatgctatgggctgtcagaaagatatcgcttcgaagatcaaagat

SEQ ID NO: 833472 - DNA, 75 bp, synthetic construct
  source 1..75: mol_type = other DNA
tgagctatacggctcggcaaacaagccgtcgaaatcggatgttggacttggcaacgtaacgaacgatgcgcaggt

SEQ ID NO: 833473 - DNA, 75 bp, synthetic construct
  source 1..75: mol_type = other DNA
tggacttggcaacgtaacgaacgatgcgcaggtaaaaaaaaccggcgatacaatgaccggtgacttgacaatcaa

SEQ ID NO: 833474 - DNA, 75 bp, synthetic construct
  source 1..75: mol_type = other DNA
cccgatgacgcaatacgattggcctgttgttactgctagtgagtctctttacatcaagatcgcgaaactttccga

SEQ ID NO: 833475 - DNA, 75 bp, synthetic construct
  source 1..75: mol_type = other DNA
tactcgtgcatatattgattccgtatcaaaaagtactgggtttggagcgcagcagcgtattaatctccacgatcc

SEQ ID NO: 833476 - DNA, 75 bp, synthetic construct
  source 1..75: mol_type = other DNA
gatctgttcactaatggtgattttactgggctgtctcatgctctcggttttatcaacagcaatgatgctgagaaa

SEQ ID NO: 833477 - DNA, 75 bp, synthetic construct
  source 1..75: mol_type = other DNA
agaatatgtcgaagagcgcgcgggataacgtgcagtttattggcgacatggttcccccactgaaaatggtggggg

SEQ ID NO: 833478 - DNA, 75 bp, synthetic construct
  source 1..75: mol_type = other DNA
attgaacgttacggattagttgaaatcacggttccacagaaagaagatcgatattcaagaatgagttttactctc

SEQ ID NO: 833479 - DNA, 75 bp, synthetic construct
  source 1..75: mol_type = other DNA
cctggtcaatgataagggggagaagaaaacctataacgtcgaggataacggcagaataacaaccgccatgaatta

SEQ ID NO: 833480 - DNA, 75 bp, synthetic construct
  source 1..75: mol_type = other DNA
tgccctcgggttgacgccggaaatgctggcgctgatgcgtgaaggcgtacggatgaaagcattgctggctaaatc

SEQ ID NO: 833481 - DNA, 75 bp, synthetic construct
  source 1..75: mol_type = other DNA
gccacatttaacgcaggtatggcgggatctatcgagccggaaaccattgacaacaagactattgatttaaacgac

SEQ ID NO: 833482 - DNA, 75 bp, synthetic construct
  source 1..75: mol_type = other DNA
ccactctttacggtaaagagctacaggggccaacaactgacggaaacgtgttacgcgaagagatgaagtgcctta

SEQ ID NO: 833483 - DNA, 75 bp, synthetic construct
  source 1..75: mol_type = other DNA
acttggtaacgtaactaacgatgcgcaggtgaaaaaatccggcgacattatgtcaggtgatctgtcgatcactaa

SEQ ID NO: 833484 - DNA, 75 bp, synthetic construct
  source 1..75: mol_type = other DNA
ccaaaaatatctcggcatatacggtgacggtgatttgtattttggtagttattctgaccacacaaaaaacagtag

SEQ ID NO: 833485 - DNA, 75 bp, synthetic construct
  source 1..75: mol_type = other DNA
agaattatacattccagacggatttgttaagcaaaccgccgcgccttctggatatattgaaggcaacgttgtaag

SEQ ID NO: 833486 - DNA, 75 bp, synthetic construct
  source 1..75: mol_type = other DNA
ccgtaggatcgtttactcgttacggtgaagaattgcagggtccgaccattgatggcaacgagctacgcgaagaaa

SEQ ID NO: 833487 - DNA, 75 bp, synthetic construct
  source 1..75: mol_type = other DNA
atgcgcaaagaacgccagcaggccagttgtttgatgtaaatggcgctattaattgcacaacgctgaatcagtcat

SEQ ID NO: 833488 - DNA, 75 bp, synthetic construct
  source 1..75: mol_type = other DNA
ttgttgtgattttgctatgtgctgtcgtttcagctcttattactcagaagagagaaaagaaaaaagggagcgtag

SEQ ID NO: 833489 - DNA, 75 bp, synthetic construct
  source 1..75: mol_type = other DNA
agtacggatttcaggtgtactgaaagatggcgcaggtaagccgatacaaaactgcaccattcagctaaaggccag

SEQ ID NO: 833490 - DNA, 75 bp, synthetic construct
  source 1..75: mol_type = other DNA
gtcaaaacgtttttgaggttggcacgtctgccgcgtatctgttttatgcgcaaaaaacaacagacgggcaaaacc

SEQ ID NO: 833491 - DNA, 75 bp, synthetic construct
  source 1..75: mol_type = other DNA
acgtctgagatgaatgcggataacagcgcacaggcggcagcagactcacaaactgcatcggcaaattccgcgaca

SEQ ID NO: 833492 - DNA, 75 bp, synthetic construct
  source 1..75: mol_type = other DNA
aacacaagcactagctccgatgataccacggtaaatatcaaaggatcacagcatacgcctttggttttaacgcgc

SEQ ID NO: 833493 - DNA, 75 bp, synthetic construct
  source 1..75: mol_type = other DNA
aggacaatctcaatccggttaaaaatatatttggagattgttccttcagagaaggaataaatttaaagtatcatt

SEQ ID NO: 833494 - DNA, 75 bp, synthetic construct
  source 1..75: mol_type = other DNA
ttttttctgaaagtttatattggacttataagaagaaaaatccaaagtttattgttaaatattttttaaaaagat

SEQ ID NO: 833495 - DNA, 75 bp, synthetic construct
  source 1..75: mol_type = other DNA
agtgtcacagaatgaaaaaattgctgactcccttttatctttagctaaaagaaatagagagttatattctaatga

SEQ ID NO: 833496 - DNA, 75 bp, synthetic construct
  source 1..75: mol_type = other DNA
aaaacagtaaaacgtcttcaggattgggatacatggttaaggttgtcgtttagatatggtcattttgtacgatat

SEQ ID NO: 833497 - DNA, 75 bp, synthetic construct
  source 1..75: mol_type = other DNA
aaaggccatccgtaccacacagggcggtctgacgcgcagtatggaatacgatgctgccggacgggtcatccgcct

SEQ ID NO: 833498 - DNA, 75 bp, synthetic construct
  source 1..75: mol_type = other DNA
gggggctgttccctcagacgcaggaatctcagcagaaagtttgtcaggacattggcagtgaaagcaatatcttcg

SEQ ID NO: 833499 - DNA, 75 bp, synthetic construct
  source 1..75: mol_type = other DNA
tatacaaccctaatattaaatatgttattaataacataaatatcatatctgagttaactgacttacttattttaa

SEQ ID NO: 833500 - DNA, 75 bp, synthetic construct
  source 1..75: mol_type = other DNA
cggaaattggtgaaatccttggattaccgttagattttgacgaagagggacagtgtgccttacagtttgatgaga

SEQ ID NO: 833501 - DNA, 75 bp, synthetic construct
  source 1..75: mol_type = other DNA
aaaaattgcgacattatctgccagcaataatggtgtgctcgccaatgagaatgcagcaaacaccgtctcggtcaa

SEQ ID NO: 833502 - DNA, 75 bp, synthetic construct
  source 1..75: mol_type = other DNA
tcgacgcgtcacgaaggtgttcaggacatcaccctttctgaatggaaagataatggtgacggaagctatacccag

SEQ ID NO: 833503 - DNA, 75 bp, synthetic construct
  source 1..75: mol_type = other DNA
cgcagtaattcaggtaatggtacttttgcaaaagtgatagcagccatcgagcgtctgaaatcatatcaagtatag

SEQ ID NO: 833504 - DNA, 75 bp, synthetic construct
  source 1..75: mol_type = other DNA
aagaacactgcatcctgctggggaacctgttcacaaaattcatctcgcaggtgggtggtcttggcgccgccagaa

SEQ ID NO: 833505 - DNA, 75 bp, synthetic construct
  source 1..75: mol_type = other DNA
tggtcaccagcgttacccgcgaagacggctcgatcgtatacctgcacgtgacgccttttccctatgaggtggtgg

SEQ ID NO: 833506 - DNA, 75 bp, synthetic construct
  source 1..75: mol_type = other DNA
tatatacagagtggttaattgaacgagaaactcgctataatgactttgcaccaaaagctttattagatattttta

SEQ ID NO: 833507 - DNA, 75 bp, synthetic construct
  source 1..75: mol_type = other DNA
caaacaccttgaaagtattgcccgtagtcgtggtctccccccaaaaaaactgctgaatgaaatgattgagcaggc

SEQ ID NO: 833508 - DNA, 75 bp, synthetic construct
  source 1..75: mol_type = other DNA
caaacatcttgaaagtattgcccgaagtcgtggtctccgcccaaaaaaactgctgaatgaaatgattgagcaggc

SEQ ID NO: 833509 - DNA, 75 bp, synthetic construct
  source 1..75: mol_type = other DNA
gcaccagctgtccgtatatcgatgctataaaacggcacaaacaacagctcggtgccatagaggaatatacacagt

SEQ ID NO: 833510 - DNA, 75 bp, synthetic construct
  source 1..75: mol_type = other DNA
gggttcgctcaggagatgacgggaagacctggacaacgccggaatggcttacagatttacatgaaaactatccca

SEQ ID NO: 833511 - DNA, 75 bp, synthetic construct
  source 1..75: mol_type = other DNA
agtcgtggtgtccgcccaaaaaaactgctgaatgaaatgattgagcaggcgtaccaggactttgtggcaaatgag

SEQ ID NO: 833512 - DNA, 75 bp, synthetic construct
  source 1..75: mol_type = other DNA
caaacagcttgaaagtattgcccgaagtcgtggtctcctcccaaaaaaactgctgaatgaaatgattgagcaggc

SEQ ID NO: 833513 - DNA, 75 bp, synthetic construct
  source 1..75: mol_type = other DNA
gcatgtattgtatgaggaatttttgcaatcataatttaatttctattttttttgttattttgaataagtttatta

SEQ ID NO: 833514 - DNA, 75 bp, synthetic construct
  source 1..75: mol_type = other DNA
gggcataccacccgacgggtgatccgtgctcctgctgcaggcattatgcgatccaacgtgaaattaggcgatctg

SEQ ID NO: 833515 - DNA, 75 bp, synthetic construct
  source 1..75: mol_type = other DNA
gcaacggcttcgccaatcgacaggaaggtcaacaccattattactggcgacctggcgacaaaaatacgacgatga

SEQ ID NO: 833516 - DNA, 75 bp, synthetic construct
  source 1..75: mol_type = other DNA
aacgacaacatgaatgatgccacccggcagattgcggcgtttcagtcacaggtgcaggtacagcaggatgcgctg

SEQ ID NO: 833517 - DNA, 75 bp, synthetic construct
  source 1..75: mol_type = other DNA
ttccgctttgttaagcagtatccagaataaagcagtggctgatgaaaaactgacggatcaggagaaagggtttat

SEQ ID NO: 833518 - DNA, 75 bp, synthetic construct
  source 1..75: mol_type = other DNA
tttgttattttgaataagtttattattggttatgctcaatgtaataatattcagttaattatggattgcaaagag

SEQ ID NO: 833519 - DNA, 75 bp, synthetic construct
  source 1..75: mol_type = other DNA
agattttattctttgcggcagaacgcgaagaactgatggccacatacaagagatatgtgaagagatttacacaag

SEQ ID NO: 833520 - DNA, 75 bp, synthetic construct
  source 1..75: mol_type = other DNA
ggaagagccaattaacgtatttgccaaacccgaagggtcttttaatcttactttaggtgaacttcaataccttta

SEQ ID NO: 833521 - DNA, 75 bp, synthetic construct
  source 1..75: mol_type = other DNA
atggacatggagtcgcaaaaattactgtttgctctgtcaactccgatggaaatacgcaatgaatgctgtttacct

SEQ ID NO: 833522 - DNA, 75 bp, synthetic construct
  source 1..75: mol_type = other DNA
tggcttgccgagcagggactggtgcgtaagcgcacgctcgttaacggttatttcatcgccgaactgaccggccgg

SEQ ID NO: 833523 - DNA, 75 bp, synthetic construct
  source 1..75: mol_type = other DNA
caggcgggtgacaaagcgatgggatactcgcacttctgccgttgctaccgggagtggaaaaaacgcgacgtctct

SEQ ID NO: 833524 - DNA, 75 bp, synthetic construct
  source 1..75: mol_type = other DNA
agcgtggcctaacttatttaaatgacggagcttcctatgcgatacgaacacaacactacccaaaacaaagggaag

SEQ ID NO: 833525 - DNA, 75 bp, synthetic construct
  source 1..75: mol_type = other DNA
ctttattaccagcccgcgaacgcgcaggcgcaaaccgggacgaattatccggaggcgatcgcgggttctcttgaa

SEQ ID NO: 833526 - DNA, 75 bp, synthetic construct
  source 1..75: mol_type = other DNA
aaccattaccggatttgatgaagaccgaaacgagatccgcacgttctaccgcgccgatattgagcgttatacgga

SEQ ID NO: 833527 - DNA, 75 bp, synthetic construct
  source 1..75: mol_type = other DNA
ccctgactttcctatttttaaaagggatgtgttaaataaagccattgctgaaattaaaaagaaaacagaaatatc

SEQ ID NO: 833528 - DNA, 75 bp, synthetic construct
  source 1..75: mol_type = other DNA
tttgtcgccagcaccgccgaatgctgtggcgaagggggaatcaaagcctgggattatgtccggatgggtttttta

SEQ ID NO: 833529 - DNA, 75 bp, synthetic construct
  source 1..75: mol_type = other DNA
tttttgcactttctacgccaatggaagtgcgtaatgaatgctgcttaccttcgcattcatcgccaaaaatgtatt

SEQ ID NO: 833530 - DNA, 75 bp, synthetic construct
  source 1..75: mol_type = other DNA
tgatgaatggggcaacctgctgaatgaagagaacccgcatcagctgcagcagcttatccggctgccggggcagca

SEQ ID NO: 833531 - DNA, 75 bp, synthetic construct
  source 1..75: mol_type = other DNA
gcaaacgcgttctgattaacggttatttcatcgcggaactgaccggccgggggcaggatgtggcggaaggccggg

SEQ ID NO: 833532 - DNA, 75 bp, synthetic construct
  source 1..75: mol_type = other DNA
atcaatcgactattagtcttcaaacaaaatagatatgatgaaagcgaaccaccagagaatactcttggcgacatt

SEQ ID NO: 833533 - DNA, 75 bp, synthetic construct
  source 1..75: mol_type = other DNA
cactcttcaagccaacgaagattacgaagctaaagttactgatctaatgaatcggttagtaaacccacaaaaaca

SEQ ID NO: 833534 - DNA, 75 bp, synthetic construct
  source 1..75: mol_type = other DNA
aaattttgatttaattaatgaacgaatactttatagaaaagccattgaagaaaaaagtgataccgaaatcattgc

SEQ ID NO: 833535 - DNA, 75 bp, synthetic construct
  source 1..75: mol_type = other DNA
gacccggagctgcacccggacagcaccctcagcatgtggccggataaccgtatcgcccgtgacgcgcactatctt

SEQ ID NO: 833536 - DNA, 75 bp, synthetic construct
  source 1..75: mol_type = other DNA
acgccgcgcggcgaactggcggcagtgtatgaccgcagcaatacacaggtgcgtagctttacttacgatgataaa

SEQ ID NO: 833537 - DNA, 75 bp, synthetic construct
  source 1..75: mol_type = other DNA
agcgtaatgccttttatgaaggcgtcgaatttcctgatgattgtgatgttttaatcagctacgctccaccaaaag

SEQ ID NO: 833538 - DNA, 75 bp, synthetic construct
  source 1..75: mol_type = other DNA
atgacagcatacatctggttctggagttgatggagttgcagccgtttaacatggataggcagactgagcgtatgc

SEQ ID NO: 833539 - DNA, 75 bp, synthetic construct
  source 1..75: mol_type = other DNA
ggcagttgatttctgaagtacataaagcggttaccgggcgttgtgtcggtagtgctggtgtgcaaaaaattgctg

SEQ ID NO: 833540 - DNA, 75 bp, synthetic construct
  source 1..75: mol_type = other DNA
accggccggggtcaggatgtggcggaaggccgcgccaccgttccgggtgtgaagaaaccacgcgcaagggggtaa

SEQ ID NO: 833541 - DNA, 75 bp, synthetic construct
  source 1..75: mol_type = other DNA
gacttgaaaaaaagagagaatctcttattgaatactttattgatgagttaaatcccatcagcagttcaaaagcta

SEQ ID NO: 833542 - DNA, 75 bp, synthetic construct
  source 1..75: mol_type = other DNA
aaatctgcacataccgaacttcgcagacttgaaaaaaagagagaatctcttattgaatactttattgatgagtta

SEQ ID NO: 833543 - DNA, 75 bp, synthetic construct
  source 1..75: mol_type = other DNA
agcagagtcttggccaactatctcgtatctcgtcagagttcgaaccatcaagccagaagcgcaggaaaatgtctc

SEQ ID NO: 833544 - DNA, 75 bp, synthetic construct
  source 1..75: mol_type = other DNA
agaaaaaaaatcacgaaccgctataattgctaagaaaaaaaagaaaagtcaaaagaaagctagaaaactaaatcg

SEQ ID NO: 833545 - DNA, 75 bp, synthetic construct
  source 1..75: mol_type = other DNA
gattgaaatcaaagataataatccgataagtaatggagagtatctaaccactgaagacgaaagccatgctgtgaa

SEQ ID NO: 833546 - DNA, 75 bp, synthetic construct
  source 1..75: mol_type = other DNA
ttaaatgcattggcacatgaaggcctcattatcctttctgttgtagatgaggataccttcctgatccgtctgggt

SEQ ID NO: 833547 - DNA, 75 bp, synthetic construct
  source 1..75: mol_type = other DNA
tgtgctacatctgcgacggcattgattgaagaaataatcgcctactgtgagagcatgagagataacgatgtcacg

SEQ ID NO: 833548 - DNA, 75 bp, synthetic construct
  source 1..75: mol_type = other DNA
gaatatcaattgatgcatcaaatatcgattctcaagccaaaatagcactattaaggaaggtgcgaacaagtccct

SEQ ID NO: 833549 - DNA, 75 bp, synthetic construct
  source 1..75: mol_type = other DNA
cggtcaggttgagttcacggaaaaggtacccgccgatgcgatggtatgtactctggaacggtttaaattttatct

SEQ ID NO: 833550 - DNA, 75 bp, synthetic construct
  source 1..75: mol_type = other DNA
attgttacctctggggaaaatgcagtaggtgttcttgcatgttcaagtcctggagagtctcgaacatgtgtcgat

SEQ ID NO: 833551 - DNA, 75 bp, synthetic construct
  source 1..75: mol_type = other DNA
gccgcaaagaagtcagccagcgatgccggcacatctgcctgtgaggcggcaacccatgcaaccgatgccgcaggc

SEQ ID NO: 833552 - DNA, 75 bp, synthetic construct
  source 1..75: mol_type = other DNA
agtaattagaaaacaaacagggactggcaatcgttttgctttacttaattcaggtaattcagaactaccagttag

SEQ ID NO: 833553 - DNA, 75 bp, synthetic construct
  source 1..75: mol_type = other DNA
caaaacgtatatacgttcgctttgttgttaatggaaactggacagcgtggagtcaggttgttgtttccggatgga

SEQ ID NO: 833554 - DNA, 75 bp, synthetic construct
  source 1..75: mol_type = other DNA
taaagcgccgaatgaaaatagctggaattcaccttacctggcagttcgtgcttattattcaagcgcactcataaa

SEQ ID NO: 833555 - DNA, 75 bp, synthetic construct
  source 1..75: mol_type = other DNA
cgtctttggagacgactttggcaaagcagagccttgggaagtgctacgcagtaaaatagggctgggtgccgccat

SEQ ID NO: 833556 - DNA, 75 bp, synthetic construct
  source 1..75: mol_type = other DNA
agatcacgcgatattttccaatataatcagggaagtagttgttatcgcggttatcttgctgaatatcctgacagc

SEQ ID NO: 833557 - DNA, 75 bp, synthetic construct
  source 1..75: mol_type = other DNA
taacagttacgaagttattagccgtgctgatttaaaaatgaatggtggttccataacaactaatggcactaatag

SEQ ID NO: 833558 - DNA, 75 bp, synthetic construct
  source 1..75: mol_type = other DNA
ttgttaataaaattgaagataggattaatctaaataaaagcatagatttaaatgaggtagaaaatttatctggtt

SEQ ID NO: 833559 - DNA, 75 bp, synthetic construct
  source 1..75: mol_type = other DNA
tggtgaaccgttgccggtcagcccggaaggtgaagcgcagcaaaacatcattgtctggatggatcatcgtgctac

SEQ ID NO: 833560 - DNA, 75 bp, synthetic construct
  source 1..75: mol_type = other DNA
tgatacacaaatttattcaggggtttcaggaggtattacatatactatacaatatgttcaaaatgttgatattgt

SEQ ID NO: 833561 - DNA, 75 bp, synthetic construct
  source 1..75: mol_type = other DNA
gaatcgctgtagctaagaatgcaacaaagcgattttcctcgatagttcaaggttcaggaagtctgataataaatc

SEQ ID NO: 833562 - DNA, 75 bp, synthetic construct
  source 1..75: mol_type = other DNA
acgacaatgcttaatgcgctggcaggtaaacaaccgctggacaatacgctgactaatttgagtggaaaggatgta

SEQ ID NO: 833563 - DNA, 75 bp, synthetic construct
  source 1..75: mol_type = other DNA
cgtcgccgaactgggtcaggcgctggcacttcctgccaaaccgccagcgcttaaagagatccagcgagtcgtgca

SEQ ID NO: 833564 - DNA, 75 bp, synthetic construct
  source 1..75: mol_type = other DNA
aaatgggatcgaactcataactgtgaatggcgatgaatctccagcagatgccttcagacaaggtgatgcaaggat

SEQ ID NO: 833565 - DNA, 75 bp, synthetic construct
  source 1..75: mol_type = other DNA
tgacttaaacataatttcgtccgactctattctaaatggagcgactaaactcgtcagcggcacaaccacgctgaa

SEQ ID NO: 833566 - DNA, 75 bp, synthetic construct
  source 1..75: mol_type = other DNA
atgaaagatgactccgttgttacccatctgactaattcagacagtattatcaatctttcgtatgatgatgggctt

SEQ ID NO: 833567 - DNA, 75 bp, synthetic construct
  source 1..75: mol_type = other DNA
tgtttagatacaagcgctggatagatattgaaacactacaagcgatcaaaagaatcgatacgtctgtaaatgccg

SEQ ID NO: 833568 - DNA, 75 bp, synthetic construct
  source 1..75: mol_type = other DNA
tcaggcagagctcaccgcagcctttcaggaaagtccccatgccgttgagattcgacaccgggtggaggatatcac

SEQ ID NO: 833569 - DNA, 75 bp, synthetic construct
  source 1..75: mol_type = other DNA
atttatcagccggggagcttcacgccactcatcagggtcgaaactgccaccggtgagctggcgaaaacgcagcgc

SEQ ID NO: 833570 - DNA, 75 bp, synthetic construct
  source 1..75: mol_type = other DNA
cttttgttttgatgactggcattctgtctggtcaggtatatgctggtgtaagtgaacacttcaggaatatttgta

SEQ ID NO: 833571 - DNA, 75 bp, synthetic construct
  source 1..75: mol_type = other DNA
cgacttccattactcaatggatgaatatgctgacgggaggattagagtacggcgcccagtcatctctccagattt

SEQ ID NO: 833572 - DNA, 75 bp, synthetic construct
  source 1..75: mol_type = other DNA
atgaatcctgggttctggtcaggaataatcaccttgaaacagcggttgagaaaagggggggatgtggccctggag

SEQ ID NO: 833573 - DNA, 75 bp, synthetic construct
  source 1..75: mol_type = other DNA
cggtggagtgcccgctgcacgccgccagtttttgcctgaaaacggggaaagcgttatgcctgcccgccaccgatc

SEQ ID NO: 833574 - DNA, 75 bp, synthetic construct
  source 1..75: mol_type = other DNA
gcgccagagagttgcagcgcgtaattcaatctggtgaagatattatttgcgaaagaacgctaaccaataaagagg

SEQ ID NO: 833575 - DNA, 75 bp, synthetic construct
  source 1..75: mol_type = other DNA
catttggaacaaaccaagaaagtgttttatctgcggtggtcagtggcgtgattcacagttctcacgctaaaacga

SEQ ID NO: 833576 - DNA, 75 bp, synthetic construct
  source 1..75: mol_type = other DNA
cggttaaggtaggtggatctatagggttagttttggggattgggctatgggtagctaacatagttattcctgaat

SEQ ID NO: 833577 - DNA, 75 bp, synthetic construct
  source 1..75: mol_type = other DNA
ctggcgggcatgaagctgggcgggacgccgctggtcgagtatacgcgggacaggctgcaccgtgagacggtgcgc

SEQ ID NO: 833578 - DNA, 75 bp, synthetic construct
  source 1..75: mol_type = other DNA
gattacgggttaaatctgttcggtatgtacggcagaaaagtaaagctatcccattctgaaatgattgaagataat

SEQ ID NO: 833579 - DNA, 75 bp, synthetic construct
  source 1..75: mol_type = other DNA
cagactccagtttgtatgcaatgcaaattcagcgctatcaacaggctgtgcgatcaacaatggtcctttcactga

SEQ ID NO: 833580 - DNA, 75 bp, synthetic construct
  source 1..75: mol_type = other DNA
gatgagcagattaagtcggggattaatctcaacgaattgggttttgcggacccaacccgacaggtagccaatacc

SEQ ID NO: 833581 - DNA, 75 bp, synthetic construct
  source 1..75: mol_type = other DNA
ggagccggtggtcgtcaacgaggccggtgagattgtcgccgccagcagttgcccgcgcgctcagctgtttgttac

SEQ ID NO: 833582 - DNA, 75 bp, synthetic construct
  source 1..75: mol_type = other DNA
gctatcattttccaagagtccttactataacgcagtattgagttcatcgttcaattttgctctgccaggttgtga

SEQ ID NO: 833583 - DNA, 75 bp, synthetic construct
  source 1..75: mol_type = other DNA
ttgggcgtattagaataaatatattactaggttttttttcgaagtttggtagttttatattaagttatatatcat

SEQ ID NO: 833584 - DNA, 75 bp, synthetic construct
  source 1..75: mol_type = other DNA
acagttttacccaaacgcccgagggtgaggatgtgctggtctaccacgcacgtaattacaccgaaatagaaggcg

SEQ ID NO: 833585 - DNA, 75 bp, synthetic construct
  source 1..75: mol_type = other DNA
aacgattttactgagtatcaattaacacaagaaaataaaatagagcgagttttcaatccgcatgactttaaaaaa

SEQ ID NO: 833586 - DNA, 75 bp, synthetic construct
  source 1..75: mol_type = other DNA
aaactcaaaaaaaagcttaaagaggccaccgattacacccatctttatgttgaattcgaaaatgatgaagggggg

SEQ ID NO: 833587 - DNA, 75 bp, synthetic construct
  source 1..75: mol_type = other DNA
gctacggtatcgggcttcgatgaacccatatcggctggtattgaggaaggcttctggcattcactgacccaattg

SEQ ID NO: 833588 - DNA, 75 bp, synthetic construct
  source 1..75: mol_type = other DNA
ctgttatttacctttggtatcggcggtctttggggactcgacggctatcgatcagagtattacctgagcagtcag

SEQ ID NO: 833589 - DNA, 75 bp, synthetic construct
  source 1..75: mol_type = other DNA
gtgtcggcacgccgttagtggcaggaactcaggatccggttaacagcgtagatgacgtcatgaaatttgccgagc

SEQ ID NO: 833590 - DNA, 75 bp, synthetic construct
  source 1..75: mol_type = other DNA
cagtaacgccagcatcacgtagtccatattttaatatggtcaaaatcaacagcaatggcttgaatgagttagtaa

SEQ ID NO: 833591 - DNA, 75 bp, synthetic construct
  source 1..75: mol_type = other DNA
acgttcgttatccccatgccaaagagctggagtaaggcaaagcgggcgcaatatgtcggcaagccacatcgacaa

SEQ ID NO: 833592 - DNA, 75 bp, synthetic construct
  source 1..75: mol_type = other DNA
actgcctacattggggcagttccgttacttctatgggcgcgaatatcacttcaccgacaccttgccatgcagggt

SEQ ID NO: 833593 - DNA, 75 bp, synthetic construct
  source 1..75: mol_type = other DNA
tgggaacccagatccgcgagaacaagcagcaggaaaagcgccaggaacgccagaaaacagcattcaaaccggaga

SEQ ID NO: 833594 - DNA, 75 bp, synthetic construct
  source 1..75: mol_type = other DNA
tgtgcccgaccagagccatccagcttaccaataactttgaactgaccgtcaccaataaagccgatctctataccc

SEQ ID NO: 833595 - DNA, 75 bp, synthetic construct
  source 1..75: mol_type = other DNA
tggcggtgcattacggttatgatgataagggccgcctggcaggggagcgccagacggtgcataacccggagacgg

SEQ ID NO: 833596 - DNA, 75 bp, synthetic construct
  source 1..75: mol_type = other DNA
ggcaccctacgttactcctgcagtaaccagtagtcttttgaaaatgaaagaactgctttctgaatctcggaatta

SEQ ID NO: 833597 - DNA, 75 bp, synthetic construct
  source 1..75: mol_type = other DNA
ggccacccggtcacaaaaaatcgaactcagcattgagaccgtctatgaccagcagacgatcaccttcccggtcaa

SEQ ID NO: 833598 - DNA, 75 bp, synthetic construct
  source 1..75: mol_type = other DNA
tgccactctttaagtcgtgatactattgaacgacgtgctacaactattaaacactggtgccgtgaattgaaaaat

SEQ ID NO: 833599 - DNA, 75 bp, synthetic construct
  source 1..75: mol_type = other DNA
gtatggattcagtgatcgctttgcgtgggaacttcttgcacagcagaaaaacaaaggttgtaacagtcaaggaaa

SEQ ID NO: 833600 - DNA, 75 bp, synthetic construct
  source 1..75: mol_type = other DNA
ctcccctatggggagagggctagggggagggggaacaggcacgctcggtgatgcaaaatcgcgccgctacccgta

SEQ ID NO: 833601 - DNA, 75 bp, synthetic construct
  source 1..75: mol_type = other DNA
acgctccgggagcgcacggaagcctctctttcatccgcgctcgataccgttctgcagcaactggaaagtgtgctc

SEQ ID NO: 833602 - DNA, 75 bp, synthetic construct
  source 1..75: mol_type = other DNA
gataactacagcctgtttaacaccccgcagagtcgttattcatcaagccacgacactaccgcgcgtcagaatggt

SEQ ID NO: 833603 - DNA, 75 bp, synthetic construct
  source 1..75: mol_type = other DNA
gaccgcagacgctgtagcgattccgaggtttgctaagggggcaggtgtttatgccaacatctacggggctgcttc

SEQ ID NO: 833604 - DNA, 75 bp, synthetic construct
  source 1..75: mol_type = other DNA
aaagaaagcgtattggctgcatctctgtttagcggtaaaacttacacgcctaaaactgatgatgttcttatcgaa

SEQ ID NO: 833605 - DNA, 75 bp, synthetic construct
  source 1..75: mol_type = other DNA
ttttgaccttgccctgcagacaacggtgcccgaaatcaaaaccgcgaaagatttcctgcagaagatggcgaatga

SEQ ID NO: 833606 - DNA, 75 bp, synthetic construct
  source 1..75: mol_type = other DNA
aaatgcgagcagaccaactttgacacggtgctgacctacgcgaagctggacctgtggacggggtgggctcttaga

SEQ ID NO: 833607 - DNA, 75 bp, synthetic construct
  source 1..75: mol_type = other DNA
ggttaacgctttccagtatgcaagccctaccgacgacgcaaacatcgtttatagtgtgcgctccctgctgccagg

SEQ ID NO: 833608 - DNA, 75 bp, synthetic construct
  source 1..75: mol_type = other DNA
aagaatatggtggactaatatgtaagaagcaaggtgaatatttccccatgaatccgataagttcaaatgataatg

SEQ ID NO: 833609 - DNA, 75 bp, synthetic construct
  source 1..75: mol_type = other DNA
tcagcaccgatggcgtggcagatattccggttcagggcaatctcgactacaccaaccattttggcattgcggtgg

SEQ ID NO: 833610 - DNA, 75 bp, synthetic construct
  source 1..75: mol_type = other DNA
aacggggggcgggtcggttatgacatgcaaaacagtagtcacagcaccacgcaccgcatgtcgtggaatgatacg

SEQ ID NO: 833611 - DNA, 75 bp, synthetic construct
  source 1..75: mol_type = other DNA
agggcacgctggatgtcaaagtgacggaagaagatggtcgggtgaacaatttccaggtttcggcagcatcgacgc

SEQ ID NO: 833612 - DNA, 75 bp, synthetic construct
  source 1..75: mol_type = other DNA
cttcaatttcgatcaagccaatcagcaactcaatatcaccattccgcaagcgtggctggcatggcactcagaaaa

SEQ ID NO: 833613 - DNA, 75 bp, synthetic construct
  source 1..75: mol_type = other DNA
aaaaatttaccgtggtctggggtgatagccagcgttgctcgatccatcttcctgaacatatggaagacaccgcaa

SEQ ID NO: 833614 - DNA, 75 bp, synthetic construct
  source 1..75: mol_type = other DNA
gccaaccgattatcccgctgaatctcaacctgtacgccaacctcttacatcagacctggtggaacgcagatgcct

SEQ ID NO: 833615 - DNA, 75 bp, synthetic construct
  source 1..75: mol_type = other DNA
atgatttactggtcgataaatttggcttaaaacctgaagtccgtcagtcgttaccattgataaatcagtgcgtcg

SEQ ID NO: 833616 - DNA, 75 bp, synthetic construct
  source 1..75: mol_type = other DNA
gccgctggtcgaaagccgctatctttacgacccgctgggccgcagggtggcaaaacgggtgtggcgacgtgaacg

SEQ ID NO: 833617 - DNA, 75 bp, synthetic construct
  source 1..75: mol_type = other DNA
gggaaaaaaagaatacagtagttacttgggaacaccaaataacacctatctaaaatataatcccaaagctaaagg

SEQ ID NO: 833618 - DNA, 75 bp, synthetic construct
  source 1..75: mol_type = other DNA
gcgaccgcattgatatttcattattaaaggaaaaaggagtcattgctcccggtgaatattttgttagcgttgcgg

SEQ ID NO: 833619 - DNA, 75 bp, synthetic construct
  source 1..75: mol_type = other DNA
gatggattacaacttgtttgccagcagctaccgcccacaggacggcagcagcagcactaacctgaacgcctacgg

SEQ ID NO: 833620 - DNA, 75 bp, synthetic construct
  source 1..75: mol_type = other DNA
aaacagtagccacagcaccacacaccgcatgtcgtggaacgatacgctggatgaacgtaatagctggggcatgtc

SEQ ID NO: 833621 - DNA, 75 bp, synthetic construct
  source 1..75: mol_type = other DNA
ggtaaaaccattgctgaactgaatctgcgcgacatagttgagcagaagtattttccgattgtgggtcgcggctga

SEQ ID NO: 833622 - DNA, 75 bp, synthetic construct
  source 1..75: mol_type = other DNA
ttaacgccattccagatgcgcgatcattcaacgcgccatttatggaccacctttagtgacgatcaaattgacctg

SEQ ID NO: 833623 - DNA, 75 bp, synthetic construct
  source 1..75: mol_type = other DNA
gtatatgcttccatacatccaacctattctattgatccgctgggcttaattgataaacctgctccagtattcaat

SEQ ID NO: 833624 - DNA, 75 bp, synthetic construct
  source 1..75: mol_type = other DNA
acctgcggggattgttcatcgcggggagtttgtcttcacgaaggaggcgaccagccggattggtgtcggcaatct

SEQ ID NO: 833625 - DNA, 75 bp, synthetic construct
  source 1..75: mol_type = other DNA
gcctgtacaacatcgaagaaattatgcgatggatcgaaaaccagaaacaaccaggtgccaaaaaatgcaagttcc

SEQ ID NO: 833626 - DNA, 75 bp, synthetic construct
  source 1..75: mol_type = other DNA
ccatgattgccaccgggaactatccgcaggctgtgatggacaatgttctggagaatctgaatcaggcacagcaac

SEQ ID NO: 833627 - DNA, 75 bp, synthetic construct
  source 1..75: mol_type = other DNA
tctgaattgaaacttaataactggacattgcaaatattgggctatttcccaacaatatttacggatgctctaaga

SEQ ID NO: 833628 - DNA, 75 bp, synthetic construct
  source 1..75: mol_type = other DNA
acacacataatggttacaatgatgcatttttaaaaaaagatgtagggatggtaccatctgttatgttaaatggtg

SEQ ID NO: 833629 - DNA, 75 bp, synthetic construct
  source 1..75: mol_type = other DNA
atgggttattcccattcacatatcggttttgatcgtggaggacatggcagtgtggacagttattctctgggcggc

SEQ ID NO: 833630 - DNA, 75 bp, synthetic construct
  source 1..75: mol_type = other DNA
cgccgcatggtggaagaagatccagcgcatccgcgttacattcagaccgtctggggtctgggctacgtctttgta

SEQ ID NO: 833631 - DNA, 75 bp, synthetic construct
  source 1..75: mol_type = other DNA
tttttcatggttttataattaattcagaattggatgatttttttataagttataatattagactattatttgcaa

SEQ ID NO: 833632 - DNA, 75 bp, synthetic construct
  source 1..75: mol_type = other DNA
ctgggtaataagcaatttggcatctacatgattaataattcaaggacagccaatggcaccgatggtcaggcgtac

SEQ ID NO: 833633 - DNA, 75 bp, synthetic construct
  source 1..75: mol_type = other DNA
ttgaaagcacaggtgaaggaactgaaccaaaagcgcacagaactacagactactattgacactctgaagcgtaaa

SEQ ID NO: 833634 - DNA, 75 bp, synthetic construct
  source 1..75: mol_type = other DNA
atgagaagagtactctttagctgtttctgcgggttactgtggagttccattggatgggcagctgaccctttagga

SEQ ID NO: 833635 - DNA, 75 bp, synthetic construct
  source 1..75: mol_type = other DNA
ttcaatgttcaggaagttgatttttttggtgaatactataaagctaatatttcagagaaagggctggaatatcag

SEQ ID NO: 833636 - DNA, 75 bp, synthetic construct
  source 1..75: mol_type = other DNA
gtaaaatggaatgctatattggatgatgatatcctcgctgtcacagcattccttaagcgacaggcttatagtgag

SEQ ID NO: 833637 - DNA, 75 bp, synthetic construct
  source 1..75: mol_type = other DNA
taagccagaaagattcctcggtatcgttaagtacccaaacattgaacgcggattcccattcaaccgccacactga

SEQ ID NO: 833638 - DNA, 75 bp, synthetic construct
  source 1..75: mol_type = other DNA
ggcgtttgatggatggacaagaccctaaaaccagcgattggcatagcaaggcttcgaagtatttaaattccaata

SEQ ID NO: 833639 - DNA, 75 bp, synthetic construct
  source 1..75: mol_type = other DNA
ctacaaaatggccgatggcggcggtttgtatcttgaggtttcggccaagggttctaaatactggcgcatgaaata

SEQ ID NO: 833640 - DNA, 75 bp, synthetic construct
  source 1..75: mol_type = other DNA
ttattgtctcattttggcgcatgtcattttgccgatcctcaaatttatactttgaaggatctggacagatattac

SEQ ID NO: 833641 - DNA, 75 bp, synthetic construct
  source 1..75: mol_type = other DNA
gaacaacattgatccttttcctgttggcagttttggcgatgggagtgtagcttttcttgaccgcaacagcctaaa

SEQ ID NO: 833642 - DNA, 75 bp, synthetic construct
  source 1..75: mol_type = other DNA
ctgcgcctgtgcttgtccggcaaatgcgctgactatccagaccgacgaccagcaaaattcgcgcacctggcagct

SEQ ID NO: 833643 - DNA, 75 bp, synthetic construct
  source 1..75: mol_type = other DNA
atggtacaatgcagttcggcgatgttacggtggttaaaacgcacggtgctcacggtactgacgaaatgtttgcct

SEQ ID NO: 833644 - DNA, 75 bp, synthetic construct
  source 1..75: mol_type = other DNA
tgtttgaagagatattcgaagctgacacacctaagagtgctgaaactctgagccttagttcgtcatcgtccgcga

SEQ ID NO: 833645 - DNA, 75 bp, synthetic construct
  source 1..75: mol_type = other DNA
ttgacgcgacatataaaaagaaatttgacttcaaaacattcaacccttccacatccttaaaaatacctctcgcgt

SEQ ID NO: 833646 - DNA, 75 bp, synthetic construct
  source 1..75: mol_type = other DNA
tcagcatacccgcagcaacgatgacggcgacactgatgatagcggtacgcaaaaaaactgggagtggagtcgtta

SEQ ID NO: 833647 - DNA, 75 bp, synthetic construct
  source 1..75: mol_type = other DNA
agaccgtgggaaaactgctggatcaggttctcagtcaggaaaccctgccggacagtgacgcagcccaccgtacct

SEQ ID NO: 833648 - DNA, 75 bp, synthetic construct
  source 1..75: mol_type = other DNA
tacatcagcctgaaaagcaggaactattacaacaaaagagtatcaaacatttaccaacaagtaataacatcgacg

SEQ ID NO: 833649 - DNA, 75 bp, synthetic construct
  source 1..75: mol_type = other DNA
cttatctaaggaggatgccggagctttaagagattatgcaaaattaaaaatgaaagaactattttcgatgttaga

SEQ ID NO: 833650 - DNA, 75 bp, synthetic construct
  source 1..75: mol_type = other DNA
gatggaaaaaggctggcagcagattgccgccgtacacggcattttacgactgggtgcggtctatctgccagtgga

SEQ ID NO: 833651 - DNA, 75 bp, synthetic construct
  source 1..75: mol_type = other DNA
taaaagcaaaaatatttttgctactttaatgaacaagttttgctatcgttttggattgttaattaaaattagaaa

SEQ ID NO: 833652 - DNA, 75 bp, synthetic construct
  source 1..75: mol_type = other DNA
tggtgtgatgaagtatattcaatactaagaaaccctccagatgatgcttatttgaaatatatgtcgaataatgca

SEQ ID NO: 833653 - DNA, 75 bp, synthetic construct
  source 1..75: mol_type = other DNA
gcaagaatgctcgtggcgaaacgcaacgtttctcgattcgaacgctcgctcctatatttttggtagatgaagtat

SEQ ID NO: 833654 - DNA, 75 bp, synthetic construct
  source 1..75: mol_type = other DNA
acagtgagaacgctaaaaaattaatgaacagtaatgaagtccgacgttcttctttagggaaggtgcgaacaagtt

SEQ ID NO: 833655 - DNA, 75 bp, synthetic construct
  source 1..75: mol_type = other DNA
tgtggacaaaatttactacatccacacagtgagaacgctaaaaaattaatgaacagtaatgaagtccgacgttct

SEQ ID NO: 833656 - DNA, 75 bp, synthetic construct
  source 1..75: mol_type = other DNA
tacagctacaattagctaattatgtaacttcgaatacatttgaacctgaaaacacaattaattttatttatgatt

SEQ ID NO: 833657 - DNA, 75 bp, synthetic construct
  source 1..75: mol_type = other DNA
ggataaagaaagacgtattatcttgggtaataacgccagagtcaaaattcttgaaagctataaaatagaaaatag

SEQ ID NO: 833658 - DNA, 75 bp, synthetic construct
  source 1..75: mol_type = other DNA
gaaattgtaaaagcgaggttgatggcgaagcttgaattcatccaggatttgattcgaccacttgatgaacgtttc

SEQ ID NO: 833659 - DNA, 75 bp, synthetic construct
  source 1..75: mol_type = other DNA
ttaaagatgaatatggggcagtggtaattgatgtagatgctatgcaaagtaaaagcgctgagcgtttgtgtaatg

SEQ ID NO: 833660 - DNA, 75 bp, synthetic construct
  source 1..75: mol_type = other DNA
tggaggaaatgcaggacacgcaaaccgagaatgatgtgatttttcagacgttcgttaataaagcgaaacagtcgc

SEQ ID NO: 833661 - DNA, 75 bp, synthetic construct
  source 1..75: mol_type = other DNA
agaatcttcggagaccagacattggttccaggagtctaccggacaacctttgaattaactacttggaccgactga

SEQ ID NO: 833662 - DNA, 75 bp, synthetic construct
  source 1..75: mol_type = other DNA
ttgggtcgacgctgggccaacgactacagatgcaaaagatggtgaggtttgggggcaccttgatatgactcaaac

SEQ ID NO: 833663 - DNA, 75 bp, synthetic construct
  source 1..75: mol_type = other DNA
acgctgtatcccacaatgagtgcggtgccgaatttggtcggtgccagaggattactcgccacttcgtggctcgcc

SEQ ID NO: 833664 - DNA, 75 bp, synthetic construct
  source 1..75: mol_type = other DNA
ttgttgtcgcgcctgacgaaacctatatcactcatgcttttggcgattctgaaagctggacgtttgcgcacaaaa

SEQ ID NO: 833665 - DNA, 75 bp, synthetic construct
  source 1..75: mol_type = other DNA
cgcgttacgggacgttcggctgaaatttctgatgatgcctggcaattcttcctgggcgattacctgcgcaacgaa

SEQ ID NO: 833666 - DNA, 75 bp, synthetic construct
  source 1..75: mol_type = other DNA
ggtattgtgaaaataccttctaaccttatcccgggatttcatgagagcacacaaccggttgttgtgtaccgtaac

SEQ ID NO: 833667 - DNA, 75 bp, synthetic construct
  source 1..75: mol_type = other DNA
aatcgccgtcgggacaaccgtcggctccggtatttttgtatctgtgggtgaagtggcaaaagcagcgggcacgcc

SEQ ID NO: 833668 - DNA, 75 bp, synthetic construct
  source 1..75: mol_type = other DNA
acaatcagaaattgccgtttacacgctacgacttcggctgggttttattatgcataggcatggcgattggtgccg

SEQ ID NO: 833669 - DNA, 75 bp, synthetic construct
  source 1..75: mol_type = other DNA
acaactgcaacaataacagctcaacacatagttgaagcagatgttgaattcactatgaggtgggaggatgtaggg

SEQ ID NO: 833670 - DNA, 75 bp, synthetic construct
  source 1..75: mol_type = other DNA
aagcagatgttgaattcactatgaattgggttgattcagggccaacaaaaaccacagcaaaagataatgagttgt

SEQ ID NO: 833671 - DNA, 75 bp, synthetic construct
  source 1..75: mol_type = other DNA
tgcgaagtaatgaggttgttgtaagcctttctcttctttctgaggtaagagagttggcaggactacctgttgatg

SEQ ID NO: 833672 - DNA, 75 bp, synthetic construct
  source 1..75: mol_type = other DNA
tataagtatgtgtgtttatataaggatggcgtaaaaaagaacatactaatacataagcttgttgcatctcacttt

SEQ ID NO: 833673 - DNA, 75 bp, synthetic construct
  source 1..75: mol_type = other DNA
aacaggggggtgataagcattaatccgcttgaaagcctgaggcgttcagatgtgggcatggctgcggcaaccaga

SEQ ID NO: 833674 - DNA, 75 bp, synthetic construct
  source 1..75: mol_type = other DNA
tgaaggagttggatttattgattctatgataagactagcgtctgttggcctgctgaaacttcctgaccgatggcg

SEQ ID NO: 833675 - DNA, 75 bp, synthetic construct
  source 1..75: mol_type = other DNA
atgaataataaatacaggcttattattccagtcttttttattgcgttggttgattcaaatggctcggttagtaaa

SEQ ID NO: 833676 - DNA, 75 bp, synthetic construct
  source 1..75: mol_type = other DNA
aaagacggacctcactttcagctgaagcgataagtaaaacaaaaccccggctgggggaacagtccggggttttta

SEQ ID NO: 833677 - DNA, 75 bp, synthetic construct
  source 1..75: mol_type = other DNA
tggagcacctcaaaaacaccatcatacactaaatcagtaagttggcagcatcaccagatcactgaaaccgtgatc

SEQ ID NO: 833678 - DNA, 75 bp, synthetic construct
  source 1..75: mol_type = other DNA
ctcgcaatttaccggcgatattttcggtactgcgggaaaaattgtgcgcattattttcgatctggcacgctataa

SEQ ID NO: 833679 - DNA, 75 bp, synthetic construct
  source 1..75: mol_type = other DNA
agatacgggctaaaacgaccaaatggtattgaggcatatttttctaagaattacccaaatatatacgatgacttt

SEQ ID NO: 833680 - DNA, 75 bp, synthetic construct
  source 1..75: mol_type = other DNA
cggagtggggcagcgaattattgacaaagggaatgataacctcgaactggtgagaatgagtgaacgtgtgaaaac

SEQ ID NO: 833681 - DNA, 75 bp, synthetic construct
  source 1..75: mol_type = other DNA
cggagtggggcagcgaattgttgacaaagggaatgaaaatcttgacttggttagaaaatcggaacttgttaagac

SEQ ID NO: 833682 - DNA, 75 bp, synthetic construct
  source 1..75: mol_type = other DNA
gatcaggcgtgggatgtgttcgaaaaactggaagactgctatttcagccagtgcgagaaaaatactggcaaacaa

SEQ ID NO: 833683 - DNA, 75 bp, synthetic construct
  source 1..75: mol_type = other DNA
gttagcctataagcacaggttaaagctaccaaatggtattgaggcatattttgctaagaaacatcccaaagtata

SEQ ID NO: 833684 - DNA, 75 bp, synthetic construct
  source 1..75: mol_type = other DNA
tcaccaatatttgatgaaaaggtaacgaatgatagggaggatgtgttagaaaattttgcctctcttattatcaag

SEQ ID NO: 833685 - DNA, 75 bp, synthetic construct
  source 1..75: mol_type = other DNA
cggctgctggaacagtccggggttttgagttttcacgccaaagaggaaattgtgagtagtgagtacggagaaaat

SEQ ID NO: 833686 - DNA, 75 bp, synthetic construct
  source 1..75: mol_type = other DNA
cgggtgcagaaagcggggcgtcagatgacgataacgctgccctgccgaccggtattgctgaaagcgggggcggaa

SEQ ID NO: 833687 - DNA, 75 bp, synthetic construct
  source 1..75: mol_type = other DNA
cagatgtgactgcactgaaaacccgcgccttcagcgatgtcacgctgggtgacctggtaaaaacgatcgccactg

SEQ ID NO: 833688 - DNA, 75 bp, synthetic construct
  source 1..75: mol_type = other DNA
cgcacccctatacctggcctgagcaggcctcagcagaacagcaggcggggtcaagaaaaacgcaggcacagcgga

SEQ ID NO: 833689 - DNA, 75 bp, synthetic construct
  source 1..75: mol_type = other DNA
gatttacgctgaatctgtcactgactacggatatttctgcaaaggggaaagccagtggcacgaaaaaaggcgtca

SEQ ID NO: 833690 - DNA, 75 bp, synthetic construct
  source 1..75: mol_type = other DNA
cacggatatctccgcgaaagggcaagcatcagggaagaagaaagcggataaaaaaggcgtgaattatcacggata

SEQ ID NO: 833691 - DNA, 75 bp, synthetic construct
  source 1..75: mol_type = other DNA
cggatgcgtccctgctttccaggcttgcaggggtgtacggtgccaccagtaaaccgaccaatggctactggttgt

SEQ ID NO: 833692 - DNA, 75 bp, synthetic construct
  source 1..75: mol_type = other DNA
tactaatttttaccattctaaatttgactggatgcgcacagcgaagtgacatcataaacaacttagacaagtact

SEQ ID NO: 833693 - DNA, 75 bp, synthetic construct
  source 1..75: mol_type = other DNA
tccacccgggcatcgattttaccagggcaacgtctggcaaatgagatgacaccggatgttccccgtatcccctcg

SEQ ID NO: 833694 - DNA, 75 bp, synthetic construct
  source 1..75: mol_type = other DNA
gggataacacttcaggtgttcgcttcagtatgccgttgcccgatatcaatgggtttatgtcgtctgctaaaaatg

SEQ ID NO: 833695 - DNA, 75 bp, synthetic construct
  source 1..75: mol_type = other DNA
ctgttatctgacaccctgccgttaccctcaaaaggcgcccgcctcagactggcgctgggatttaacggcaacctg

SEQ ID NO: 833696 - DNA, 75 bp, synthetic construct
  source 1..75: mol_type = other DNA
atgcgtagtaattatattttacaagtgtccaaaatgaaacaacaaaacgtagtggacgaaattaggcgtaattac

SEQ ID NO: 833697 - DNA, 75 bp, synthetic construct
  source 1..75: mol_type = other DNA
tacacttgcacaaatgaacgtgatgaatcatttagctttacgataaaaggccgatatcttgcccacattaagcgc

SEQ ID NO: 833698 - DNA, 75 bp, synthetic construct
  source 1..75: mol_type = other DNA
ctcagtatgaagcgttacgtttcatacgtcagcaaacagaggaatttgccaaaggcaatctgaccagcgcccgta

SEQ ID NO: 833699 - DNA, 75 bp, synthetic construct
  source 1..75: mol_type = other DNA
tgattgagaaatataagaatgaatattatataaatatcacaccagattatctatcatttaaaaatgatacaacat

SEQ ID NO: 833700 - DNA, 75 bp, synthetic construct
  source 1..75: mol_type = other DNA
tgcggtaacaaaggtcagtacgccagcgcaaaggagcagcacgctactcatagcaaacgtgctctgccagccaag

SEQ ID NO: 833701 - DNA, 75 bp, synthetic construct
  source 1..75: mol_type = other DNA
acggggcaaagagggcgactttaacccgcaggagcgggcgcaactggcgtatcgcaaaaatctgctttacgtcca

SEQ ID NO: 833702 - DNA, 75 bp, synthetic construct
  source 1..75: mol_type = other DNA
gggcaaaatttatttgataaatctgtatcttttggtccacatgtatgggatatacctgaggcggtagatgctttt

SEQ ID NO: 833703 - DNA, 75 bp, synthetic construct
  source 1..75: mol_type = other DNA
ccgctaccgccacgcggtgtacagcctgacgcacgcaaacctgctggaacgctaccgtaactttgatgccaccgc

SEQ ID NO: 833704 - DNA, 75 bp, synthetic construct
  source 1..75: mol_type = other DNA
caaggtgcatgccgaggggcggttggcctcgtaaaaagccgcaaaaaacagtcgcaaacgacgaaaactacgctt

SEQ ID NO: 833705 - DNA, 75 bp, synthetic construct
  source 1..75: mol_type = other DNA
caggggcgaatgttaaaaatgatggtcgcatgtctaatttagctatcacttcggaatcacatactattcctattg

SEQ ID NO: 833706 - DNA, 75 bp, synthetic construct
  source 1..75: mol_type = other DNA
tcacggacggtgaataaattatgggaacatttacgggataaccacggcattgatgccacgcacctgcggtttgat

SEQ ID NO: 833707 - DNA, 75 bp, synthetic construct
  source 1..75: mol_type = other DNA
cggcatacatcgctaaatacatttcgaagaatatcgacggccacgcgctggccggtgaactggacgacgaaagcg

SEQ ID NO: 833708 - DNA, 75 bp, synthetic construct
  source 1..75: mol_type = other DNA
tcaggcttcctgggcgcaattaaagatgcattcgacgctatcgctgcagcaattcaacaggtaacgatttccgga

SEQ ID NO: 833709 - DNA, 75 bp, synthetic construct
  source 1..75: mol_type = other DNA
tcaggtttcctgggtgcaattaaagatgcattcgacgctatcgctgcagcaattcagcaagtaacggtttccgga

SEQ ID NO: 833710 - DNA, 75 bp, synthetic construct
  source 1..75: mol_type = other DNA
tatgccaaacatattaaagagatgggcagcgcagtgcccgaagagccagtgctgtttattaaaccagaaacggca

SEQ ID NO: 833711 - DNA, 75 bp, synthetic construct
  source 1..75: mol_type = other DNA
tttcaaaagttggcgttttttcgcccgcactatggttcaatgacagcgcaatgctgaattttattcaggaaaaca

SEQ ID NO: 833712 - DNA, 75 bp, synthetic construct
  source 1..75: mol_type = other DNA
gatgggaatccacataactcatttataatgtttcaagctagatttggaatatttgcggtattatttttattgtct

SEQ ID NO: 833713 - DNA, 75 bp, synthetic construct
  source 1..75: mol_type = other DNA
tcatgcgcaaatatgtttggatgcattcctagcgctgtagagcaaactgcaaagttgaaaaattacattaaagcc

SEQ ID NO: 833714 - DNA, 75 bp, synthetic construct
  source 1..75: mol_type = other DNA
caatgaaacattagaagtgaattccaatggttctcttagcttctcagaggagctttttgataagatattctctgc

SEQ ID NO: 833715 - DNA, 75 bp, synthetic construct
  source 1..75: mol_type = other DNA
gccggtcagcctgtcagtcagcgcgccggttttttcccggaagaagccacatggggcgggctggttccgtcactg

SEQ ID NO: 833716 - DNA, 75 bp, synthetic construct
  source 1..75: mol_type = other DNA
ccgggaagattacggacgggaaacccggcgggaataccggctggaccggaacggccaggtcacggcggtgacagc

SEQ ID NO: 833717 - DNA, 75 bp, synthetic construct
  source 1..75: mol_type = other DNA
gcggggcacgccgttcttgcctgtggagagatggtgcagtcaggccgcccgttgaagcaggaacccaccgaaatg

SEQ ID NO: 833718 - DNA, 75 bp, synthetic construct
  source 1..75: mol_type = other DNA
tgaataacccggcactttctgaaacagaaagtgaagctgcgctacaggcgatggtgtgtctgctgcgcccggtac

SEQ ID NO: 833719 - DNA, 75 bp, synthetic construct
  source 1..75: mol_type = other DNA
atgccattctatttcaggaaggagtgtccgttaaactcaggctacctcacctggcaggaagtaaaaggcagcgac

SEQ ID NO: 833720 - DNA, 75 bp, synthetic construct
  source 1..75: mol_type = other DNA
tacgcaggaaaccagtggtatgcgcgaagactttcctgaagtctatatttccggtgctgaaaaattatgcgtgag

SEQ ID NO: 833721 - DNA, 75 bp, synthetic construct
  source 1..75: mol_type = other DNA
aattagccggagccaggctcaccatggaagactgtcaaaaaatgtacaatgcaacgcctgaaaaacactttatcc

SEQ ID NO: 833722 - DNA, 75 bp, synthetic construct
  source 1..75: mol_type = other DNA
aacacatttttttgaatttcaaatcgacgattctttgctgaaacctattaggggtgatcgtggagaatttattag

SEQ ID NO: 833723 - DNA, 75 bp, synthetic construct
  source 1..75: mol_type = other DNA
aaaattgcccgtaacgttcgctccctcatcctctggacagaacgaggcgcagcccgtcacgccaaaatgctagaa

SEQ ID NO: 833724 - DNA, 75 bp, synthetic construct
  source 1..75: mol_type = other DNA
agcccacatcactgaaaaaactaacgctctgaaagatgccacggagcatacgctacaagctgttgcccgaaagtg

SEQ ID NO: 833725 - DNA, 75 bp, synthetic construct
  source 1..75: mol_type = other DNA
ggtagcgttggcaatgcacggaatgtcagggctttttttactaatgccccgcctcccaattctttctgccagttg

SEQ ID NO: 833726 - DNA, 75 bp, synthetic construct
  source 1..75: mol_type = other DNA
aaggttatcatcggtgacagtaaagatgcactccatcttttaccctctgttttttctgtggggaatgaatgtgga

SEQ ID NO: 833727 - DNA, 75 bp, synthetic construct
  source 1..75: mol_type = other DNA
ccaacacagaagttctgcgcgctaaagcgttagaaaaggatctaacgttgcatgatggcgatggtctttttctgc

SEQ ID NO: 833728 - DNA, 75 bp, synthetic construct
  source 1..75: mol_type = other DNA
tatccgctcaggcgttagatattctagaggtgatgaaacctattagtgcccatcgtgaacatgtttttcccagta

SEQ ID NO: 833729 - DNA, 75 bp, synthetic construct
  source 1..75: mol_type = other DNA
tgtataaaacgaattttaatttcgccataatggaaaaatactttttgataattgtattctcgatgactcaaattt

SEQ ID NO: 833730 - DNA, 75 bp, synthetic construct
  source 1..75: mol_type = other DNA
cgatcacgtttgaacaaatcagcgaaacattgcgtacacagtatagcgatgcggaaaaaagactgcaggacagca

SEQ ID NO: 833731 - DNA, 75 bp, synthetic construct
  source 1..75: mol_type = other DNA
atgaataaaatatactcccttaaatatagtgctgccactggcggactcattgctgtttctgaattagcgaaaaga

SEQ ID NO: 833732 - DNA, 75 bp, synthetic construct
  source 1..75: mol_type = other DNA
aagttaaggttttacttaacgcatttgttttggaatacaattccagattagaactaattaaagagaagatgtata

SEQ ID NO: 833733 - DNA, 75 bp, synthetic construct
  source 1..75: mol_type = other DNA
tcgttccagcaaaacctcaaaaaccatcctttatactttacggtatttttcttattactgccgttggttctggcg

SEQ ID NO: 833734 - DNA, 75 bp, synthetic construct
  source 1..75: mol_type = other DNA
cagcagacgctggtacaggaaattatcgcgctgcgccagcagttactgggcgtggcagaagacgacgttgcgtcg

SEQ ID NO: 833735 - DNA, 75 bp, synthetic construct
  source 1..75: mol_type = other DNA
ctgcaacctggcgatccgcaatataataaagtactgacgcaaaaaaatgcggctgaaaaaacactcacgggcttt

SEQ ID NO: 833736 - DNA, 75 bp, synthetic construct
  source 1..75: mol_type = other DNA
agatcgatcttgaaacaaaactatggacaattcccgcagaacggatgaaagccaagcgtgagcacattgttcctt

SEQ ID NO: 833737 - DNA, 75 bp, synthetic construct
  source 1..75: mol_type = other DNA
acaccagtgtatcaggcggatgcgttgattcaagtggagcaaaaacaaggtaatagcattttaaacaatcttagc

SEQ ID NO: 833738 - DNA, 75 bp, synthetic construct
  source 1..75: mol_type = other DNA
tcctccaatattagctgtaactgacgcagcgattattgggcagtatgtaggtacaactttgcttgttgtccgctt

SEQ ID NO: 833739 - DNA, 75 bp, synthetic construct
  source 1..75: mol_type = other DNA
tgtggttttgattatatttcaagaggttctgtacctccaaatccggctgaattattaatgcatcgacgattgaat

SEQ ID NO: 833740 - DNA, 75 bp, synthetic construct
  source 1..75: mol_type = other DNA
gctacgccaatctatcaggcaaatgcattggtacaagttgaacaaaaacagggtaatacaattttaagtaattta

SEQ ID NO: 833741 - DNA, 75 bp, synthetic construct
  source 1..75: mol_type = other DNA
cacgtcaagctgcccaagatgaaaaaagtctgcagtttttaagcgaacaattgcctaaagtcagacgtgatttag

SEQ ID NO: 833742 - DNA, 75 bp, synthetic construct
  source 1..75: mol_type = other DNA
gcggattacgtactagtctccattttgcaatgatggaggctaaaaataatattctaatgataacaagtgcaagtc

SEQ ID NO: 833743 - DNA, 75 bp, synthetic construct
  source 1..75: mol_type = other DNA
gaccgctcatgcagtggtggggaaactacgttgatgccgccagacggcaggcattgctcggtgaagaagaaccgc

SEQ ID NO: 833744 - DNA, 75 bp, synthetic construct
  source 1..75: mol_type = other DNA
tggtgagattcccgttcagcaaatcaaagcccgaacattggttgaagcacttgagccaatcaaagctcgtggagc

SEQ ID NO: 833745 - DNA, 75 bp, synthetic construct
  source 1..75: mol_type = other DNA
tcaacttacctagaacaacgtatagacttgatgaattggtggggggaatttgtgcacaatcgccacctcctcatg

SEQ ID NO: 833746 - DNA, 75 bp, synthetic construct
  source 1..75: mol_type = other DNA
atgacccaacactgcgcgtgtggcaattctgggtgcctggaaaccaattgctctggaatggcgctaagacgctgg

SEQ ID NO: 833747 - DNA, 75 bp, synthetic construct
  source 1..75: mol_type = other DNA
attgcagcctacaatcgtgcagagtatctcacagaacgtgtggttctcatgcaatggtggagtgactatgtttcg

SEQ ID NO: 833748 - DNA, 75 bp, synthetic construct
  source 1..75: mol_type = other DNA
gtgctcgttgggctgatattgatacagagaataaaatctggaacatcccaccagagtttatgaagatgaaacggc

SEQ ID NO: 833749 - DNA, 75 bp, synthetic construct
  source 1..75: mol_type = other DNA
ttgttcgctgcaatgttcagttggtataaaaatccatttcctcaattactagcaattggttcattaaaaggatgt

SEQ ID NO: 833750 - DNA, 75 bp, synthetic construct
  source 1..75: mol_type = other DNA
gctgttcagtctgcttgataacccgcaggatgatttcacacgggtgaggattgtccgtgaaacggcaaccgccct

SEQ ID NO: 833751 - DNA, 75 bp, synthetic construct
  source 1..75: mol_type = other DNA
cgtgggtatggtggcaggccccgtggccgggggactgttgggcgccatctccttgctgcctcgcgcgtttcggtg

SEQ ID NO: 833752 - DNA, 75 bp, synthetic construct
  source 1..75: mol_type = other DNA
cgcgccggcacccaagacgccggagccacggcggccgaagcaggggggcaaggctgaaaagccggcccccgctgc

SEQ ID NO: 833753 - DNA, 75 bp, synthetic construct
  source 1..75: mol_type = other DNA
cagtggatgcacgacctgatccgccacggtctggcgcagatctctgcacaacagttgccttttgccgggatcgcc

SEQ ID NO: 833754 - DNA, 75 bp, synthetic construct
  source 1..75: mol_type = other DNA
ccagtcgctggctgcagatgacgatattgatatcacttcactgggtgatgatcgccctgtgtacctgagtcaaag

SEQ ID NO: 833755 - DNA, 75 bp, synthetic construct
  source 1..75: mol_type = other DNA
caggatgatttcacacgggtgaggattgtccgtgaaacggcaaccgccctcgaacgctgggaaccccgcctgacc

SEQ ID NO: 833756 - DNA, 75 bp, synthetic construct
  source 1..75: mol_type = other DNA
aagaggaacaattgggcttgaattaacatcttttgatgttttcttatgttccttttcgtattgtacatttgggcc

SEQ ID NO: 833757 - DNA, 75 bp, synthetic construct
  source 1..75: mol_type = other DNA
tgagcaacaatatttatctgctctgaatataaattttgtccatcaagaatgctggattttaaactccgttccggc

SEQ ID NO: 833758 - DNA, 75 bp, synthetic construct
  source 1..75: mol_type = other DNA
ctgatgcagccctcctgtcccgcattgcaggtatgtacggtgccaccagtaaaccgaccagtggctactggttgt

SEQ ID NO: 833759 - DNA, 75 bp, synthetic construct
  source 1..75: mol_type = other DNA
ggttgaaaaaaatggggcaggaagtcgactttatattacctatagttcatcgtcgcaaaaaagactggcaagtga

SEQ ID NO: 833760 - DNA, 75 bp, synthetic construct
  source 1..75: mol_type = other DNA
tttatttgccaggttgttatagatgtattactggagtttgagatgaatattgtgttctacactgtgcatgataat

SEQ ID NO: 833761 - DNA, 75 bp, synthetic construct
  source 1..75: mol_type = other DNA
atgaacgttattccggtatcagcccttgaatgcagcattactgagctgtgccgtattcttgcagacagctttaat

SEQ ID NO: 833762 - DNA, 75 bp, synthetic construct
  source 1..75: mol_type = other DNA
taacaacacaaacggtgatttcgataccacctttaatggtgacactgttaacgggactatctctacatattacct

SEQ ID NO: 833763 - DNA, 75 bp, synthetic construct
  source 1..75: mol_type = other DNA
tgaaaggccaagaatcactcactgctgagaaaatcttagcaacctgtaatgctacggtgaactctattattctag

SEQ ID NO: 833764 - DNA, 75 bp, synthetic construct
  source 1..75: mol_type = other DNA
gttggagtcggttcgtctggttctggtgaatattctttgactactgcagttgatatgacacaggatgcggatggt

SEQ ID NO: 833765 - DNA, 75 bp, synthetic construct
  source 1..75: mol_type = other DNA
gtattggtggcgctactaccacgaaaaactcatcggttctcaaaggctttgctatggagttgaatggtcttagcc

SEQ ID NO: 833766 - DNA, 75 bp, synthetic construct
  source 1..75: mol_type = other DNA
tggtagcaacgcttatgaaagcgaagctggaaaacagactggagcgccagctacagcaactgagttatgcccggg

SEQ ID NO: 833767 - DNA, 75 bp, synthetic construct
  source 1..75: mol_type = other DNA
ggttatggtgaagcggtaaaccacgatgctgacagcacgaatcgccccgcaccggagcttatgcagtttcatctg

SEQ ID NO: 833768 - DNA, 75 bp, synthetic construct
  source 1..75: mol_type = other DNA
aaacaggagtattcacaggcagcctccgttttagtcggcgatattaaaaccttacttatggatagcaggataagt

SEQ ID NO: 833769 - DNA, 75 bp, synthetic construct
  source 1..75: mol_type = other DNA
acgcttaatgttcccttcagtcattggatgcgtacagacagtcagtcggcatttcgtaattcaaacgccagttac

SEQ ID NO: 833770 - DNA, 75 bp, synthetic construct
  source 1..75: mol_type = other DNA
tttaattaatcacacgcgggatatagatatttatgagcctgacgggccgacgaaccttctggcatgggaaaggct

SEQ ID NO: 833771 - DNA, 75 bp, synthetic construct
  source 1..75: mol_type = other DNA
taccgaatattgctgtacggtaaacgaccagattgtggaacctcatcaccgtatgcgtctgaatgaaggcgacct

SEQ ID NO: 833772 - DNA, 75 bp, synthetic construct
  source 1..75: mol_type = other DNA
ctcacaggcattattccgcgaactgtatccggcattaaaactgattcaatcgaactattccgggagatgctacga

SEQ ID NO: 833773 - DNA, 75 bp, synthetic construct
  source 1..75: mol_type = other DNA
ctatttactaacgaccatgactatcagtataaccgtcgtgaatcattgatggcaatacgcgcttatgcacaatct

SEQ ID NO: 833774 - DNA, 75 bp, synthetic construct
  source 1..75: mol_type = other DNA
agttacatcatatatagttaatattccaccgcttgaacaaagtaatagtaaaaaaattgtgtgtaaccttcatgg

SEQ ID NO: 833775 - DNA, 75 bp, synthetic construct
  source 1..75: mol_type = other DNA
tattcatgtcaccatcaaagaatcagacgggacagtacgtacctatcgacagccttactcaacgctcccagttat

SEQ ID NO: 833776 - DNA, 75 bp, synthetic construct
  source 1..75: mol_type = other DNA
ctgctgaaagacctgtctgaccaggttgtctggcacggcgagaagttgacccgcgaagagtggaaggacctcatc

SEQ ID NO: 833777 - DNA, 75 bp, synthetic construct
  source 1..75: mol_type = other DNA
ccgttaccttcaataaagccttacatttcctataataaatcttctttaaacaatctggtattctcacgatttatt

SEQ ID NO: 833778 - DNA, 75 bp, synthetic construct
  source 1..75: mol_type = other DNA
tatagataggctttcatcaattacttattttagtgcggcacataataaactagagtttgtgcaattagaatcttg

SEQ ID NO: 833779 - DNA, 75 bp, synthetic construct
  source 1..75: mol_type = other DNA
gaagccgctaaaaggataaactgtgcttttttgtcgaaacagaatgacattgatttatcaggacttaatttagct

SEQ ID NO: 833780 - DNA, 75 bp, synthetic construct
  source 1..75: mol_type = other DNA
attaaatgacctgaatgagattggcgtgaacctgcattcgcttaaaggtacagagcacttaccgcatgaccgtgc

SEQ ID NO: 833781 - DNA, 75 bp, synthetic construct
  source 1..75: mol_type = other DNA
atcatgattgacagctgtgttgcgcgattgcgtaaatataagcccgaagagtatgagttggttattgctcatttt

SEQ ID NO: 833782 - DNA, 75 bp, synthetic construct
  source 1..75: mol_type = other DNA
atgcgtgatattcagatcatccttgaacgttggggggcatgggcagctagtgatagctcaggagtggactattcg

SEQ ID NO: 833783 - DNA, 75 bp, synthetic construct
  source 1..75: mol_type = other DNA
ccgcctccgaagtccagaaggctaaacccgctgccaaagattacgaactgttcgacggacaggggctgaccctgt

SEQ ID NO: 833784 - DNA, 75 bp, synthetic construct
  source 1..75: mol_type = other DNA
acgctgcgatatccgcgatcgcggataaaaaggaggatttaaataaggcgttgatgcgccgtttgaagtcggcaa

SEQ ID NO: 833785 - DNA, 75 bp, synthetic construct
  source 1..75: mol_type = other DNA
cacttccgggaatctcagcacctttgctgtcgccaaaaaatgtcgcggataaattttatcgattgccgttttttt

SEQ ID NO: 833786 - DNA, 75 bp, synthetic construct
  source 1..75: mol_type = other DNA
aacagcagagagaaatattttcattatttagaaaaatgcatagatttatagctttacctttttcttcaataaata

SEQ ID NO: 833787 - DNA, 75 bp, synthetic construct
  source 1..75: mol_type = other DNA
tctttaccaaagtcatcatgctgcttatcgcattgctttgcattgttcttgcctcatttggtatttctgccccat

SEQ ID NO: 833788 - DNA, 75 bp, synthetic construct
  source 1..75: mol_type = other DNA
aaatgcaggaaaaaacaaaattaaacttgcattgcaaaaccgtataaagttactttggcgtccaagcggaatagc

SEQ ID NO: 833789 - DNA, 75 bp, synthetic construct
  source 1..75: mol_type = other DNA
gagaagttctcgtacagttaatgaatcaaagtaaaaatgcctctttaattcaggcatggatcgatgatgggaaca

SEQ ID NO: 833790 - DNA, 75 bp, synthetic construct
  source 1..75: mol_type = other DNA
aaacaaaattaaacttgcattgcaaaaccgtataaagttactttggcgtccaagcggaatagctccggtagataa

SEQ ID NO: 833791 - DNA, 75 bp, synthetic construct
  source 1..75: mol_type = other DNA
tgtattatccctcctgtgcagagaaaatcggccagttttctctgcctgcagtccgcatgccgtatcgggccttag

SEQ ID NO: 833792 - DNA, 75 bp, synthetic construct
  source 1..75: mol_type = other DNA
tatatatagagatggccaaattgatgatgatcacattcaaattatactaaaaaaacaaaaaaacaacatcgatga

SEQ ID NO: 833793 - DNA, 75 bp, synthetic construct
  source 1..75: mol_type = other DNA
gtgcgcgtgctggcggcgactaaccgcgacttacgcgaagaggtgctggcagggcgattccgcgccgatttgttt

SEQ ID NO: 833794 - DNA, 75 bp, synthetic construct
  source 1..75: mol_type = other DNA
ttaatgaatattaaaggggtgatacaattattggtatatttactgattcctcgcgttgcttgtattccaatatcc

SEQ ID NO: 833795 - DNA, 75 bp, synthetic construct
  source 1..75: mol_type = other DNA
tcgcccagtccatggcagcgatcggcgagatttacggaaaggatatatccgaggtgatggtgggtatttactgga

SEQ ID NO: 833796 - DNA, 75 bp, synthetic construct
  source 1..75: mol_type = other DNA
ttgctgacggcgatattcccaaatccgacgctgttaatggtagaaactttctaccggaccggatcactggttttt

SEQ ID NO: 833797 - DNA, 75 bp, synthetic construct
  source 1..75: mol_type = other DNA
gagttaatgttccgggctttcgatgtcctgccagaaatggtaatgaaacctcagcaggctttccaggcagaactt

SEQ ID NO: 833798 - DNA, 75 bp, synthetic construct
  source 1..75: mol_type = other DNA
tgattctgttaaccgtcagcctgggtagctacgctgcagtgcaacctgatcgcacacgcattgtgtttaacgcca

SEQ ID NO: 833799 - DNA, 75 bp, synthetic construct
  source 1..75: mol_type = other DNA
gtgcggctggatgaaaatatcatccgcagatatctggagagttgtggcggcaaccgggaggccgacaacacggtt

SEQ ID NO: 833800 - DNA, 75 bp, synthetic construct
  source 1..75: mol_type = other DNA
agatgaggggcttatcaccataagcgctaacttaagggttgaaccatctgaagaatgcgacgcctcggtgcctcg

SEQ ID NO: 833801 - DNA, 75 bp, synthetic construct
  source 1..75: mol_type = other DNA
aaaccgtgacgccaattaaacctgatgccacctttgtgactcagcgcgtctggtttggtgataagagcgaagtga

SEQ ID NO: 833802 - DNA, 75 bp, synthetic construct
  source 1..75: mol_type = other DNA
atgtatttggattccagaacgtaacagctaacagtgtggcatgtcaaattacggtatcattaagtagtttgctaa

SEQ ID NO: 833803 - DNA, 75 bp, synthetic construct
  source 1..75: mol_type = other DNA
atcaggtacgtacaccacgacgccaggaacaaaacggattagggtcacaataacgggcggcggtggcggaggggg

SEQ ID NO: 833804 - DNA, 75 bp, synthetic construct
  source 1..75: mol_type = other DNA
ttgcagaacaacctgagcgtgttattgcggctgcgacagaaatggcgtctttaattctggctaaactggataagg

SEQ ID NO: 833805 - DNA, 75 bp, synthetic construct
  source 1..75: mol_type = other DNA
acccaaattatggtgggctggacgggggcaccgaaaggtgcgccggtttccgataacgccggttacgccaacccc

SEQ ID NO: 833806 - DNA, 75 bp, synthetic construct
  source 1..75: mol_type = other DNA
taaaactgcgcaccgcccgctacctgaaagcccgtgcagatgcttccggtgtgacggtgggttacagcggcgtgg

SEQ ID NO: 833807 - DNA, 75 bp, synthetic construct
  source 1..75: mol_type = other DNA
aacgaacgtaaagccgagaaaaagcgcgagctgctgccgttctatgcgccgtgggtcgccggtgtgctggctgat

SEQ ID NO: 833808 - DNA, 75 bp, synthetic construct
  source 1..75: mol_type = other DNA
taccttgcggacccgcgagacagttacgtcagatcagatgccatgtgtctcgagtttctgtttcgatatctcagc

SEQ ID NO: 833809 - DNA, 75 bp, synthetic construct
  source 1..75: mol_type = other DNA
ttcattgcgaatgaatactctgcggaagcattccaggcactaaagcaggcaggaatcatcccggccacacctgaa

SEQ ID NO: 833810 - DNA, 75 bp, synthetic construct
  source 1..75: mol_type = other DNA
atgcgtttctcttttttgatctttgtggttgtccggctttgcctgacggattgcaggcggaattctttaccctgt

SEQ ID NO: 833811 - DNA, 75 bp, synthetic construct
  source 1..75: mol_type = other DNA
gcaactgtgggcgataagagggtaagacgatggatgaggggtcactgtctctgccaccatttaccggacacgacg

SEQ ID NO: 833812 - DNA, 75 bp, synthetic construct
  source 1..75: mol_type = other DNA
ttcccgttacagcgccgacgggcgaggtttttcaggtttcggggctaatcagcggcaatgaaagtggcgcgtctg

SEQ ID NO: 833813 - DNA, 75 bp, synthetic construct
  source 1..75: mol_type = other DNA
tacccagaaaaccacggctatccagccagcgttcatcccgttgccttctcaaatgctcggcgcgggttcgcatgc

SEQ ID NO: 833814 - DNA, 75 bp, synthetic construct
  source 1..75: mol_type = other DNA
gaagcacaatcgcaagagagtattcaggacaaaatatctcaatgtaagtttcctgttagttcaggaaatttccag

SEQ ID NO: 833815 - DNA, 75 bp, synthetic construct
  source 1..75: mol_type = other DNA
atgcataaaatctataataacctttattggtatagacattacgatgaaaatggaaatgaaaaaacatatcgtact

SEQ ID NO: 833816 - DNA, 75 bp, synthetic construct
  source 1..75: mol_type = other DNA
atacacttaatgatgtagttcaaaatatcaggacttggctaaaagaaaatcaaaatatggtgaaagctattaaga

SEQ ID NO: 833817 - DNA, 75 bp, synthetic construct
  source 1..75: mol_type = other DNA
tatgtcagattcttttgatggatttagatgtaaatcaagaaaaaataagcatttttattaagcagattgaaaaga

SEQ ID NO: 833818 - DNA, 75 bp, synthetic construct
  source 1..75: mol_type = other DNA
atatataatgaaaggttcattagagaaaaagcagggttagtagcattatcattgcaaaatgatcaattaaaaaaa

SEQ ID NO: 833819 - DNA, 75 bp, synthetic construct
  source 1..75: mol_type = other DNA
ttatcgagcatggcttaccataaagttatcgatagcatcagaaatgtcatgcctgagctttgcaatcttacgggg

SEQ ID NO: 833820 - DNA, 75 bp, synthetic construct
  source 1..75: mol_type = other DNA
ttggcagtaaagttaaggcattatttgctgataaaattgataacagtgatctcaatcataaagataaagaaatac

SEQ ID NO: 833821 - DNA, 75 bp, synthetic construct
  source 1..75: mol_type = other DNA
ggcatgatgaattaaaaaataaaatattaagcctggaggaatttgtattattaagaagtgaagttaacacatttt

SEQ ID NO: 833822 - DNA, 75 bp, synthetic construct
  source 1..75: mol_type = other DNA
tgaatggtgtgacaggcgataatgatgcatcatttacgcttatggccttttctctgataattgctgcttccctta

SEQ ID NO: 833823 - DNA, 75 bp, synthetic construct
  source 1..75: mol_type = other DNA
taatgagaagatgcttaatttaagtgataatgatgaaaaagaaaaagtcaaaatcgaaaatgatataaagaaaat

SEQ ID NO: 833824 - DNA, 75 bp, synthetic construct
  source 1..75: mol_type = other DNA
atgacaatcttaataaagcgccatataaaacaattttcaacccgcaaaccaatggtatttatttacgaaatacgg

SEQ ID NO: 833825 - DNA, 75 bp, synthetic construct
  source 1..75: mol_type = other DNA
ttgttaatggtgctcagactgtaagcgtaattggtaaatattcgcaagaaggaggggcaaatcttgctaaattgc

SEQ ID NO: 833826 - DNA, 75 bp, synthetic construct
  source 1..75: mol_type = other DNA
tggctgaagtccgggctcacggaaaactagctggcgttccagtgtggcacatgaatgaaagtgacgagcgattta

SEQ ID NO: 833827 - DNA, 75 bp, synthetic construct
  source 1..75: mol_type = other DNA
cttatgcattctgcctgggcgcaatggcgaacggcgtttacggcccgtatgccattttcgcctccgtcaaaatgg

SEQ ID NO: 833828 - DNA, 75 bp, synthetic construct
  source 1..75: mol_type = other DNA
taggtaatgttgatatagaaaaaggtggagcaacgtggcttttgccacgcgttaaagatgatgcctgttttctta

SEQ ID NO: 833829 - DNA, 75 bp, synthetic construct
  source 1..75: mol_type = other DNA
cggcctgccgctggcgctcatcagcacggaaggggcaacagcgtggtgcgcagaatacgatgagtggggcaacct

SEQ ID NO: 833830 - DNA, 75 bp, synthetic construct
  source 1..75: mol_type = other DNA
gtaattaacgaactggaggccggggagtttagcgggctggaaattcggttacccaacggcgaaccgcatatcgcg

SEQ ID NO: 833831 - DNA, 75 bp, synthetic construct
  source 1..75: mol_type = other DNA
gggcaagcctgttatgcgctaatgccatcgacggggcaaaaacgctggaagagttgcaaacagaaatgtcggatt

SEQ ID NO: 833832 - DNA, 75 bp, synthetic construct
  source 1..75: mol_type = other DNA
gaaatgcttcaggtcagaacggagaatggttattacttgataacattaggtgaaattatcgaagatgaataccaa

SEQ ID NO: 833833 - DNA, 75 bp, synthetic construct
  source 1..75: mol_type = other DNA
gaaatgcttcagatcagaacggagaatggttattacttgataacattaggtgaaatttttgaagatgaataccaa

SEQ ID NO: 833834 - DNA, 75 bp, synthetic construct
  source 1..75: mol_type = other DNA
ggatcactaatcctaaacaggctattgatcatggcattgcttttgtgaccgaaaaccgcaaggaagaagggttag

SEQ ID NO: 833835 - DNA, 75 bp, synthetic construct
  source 1..75: mol_type = other DNA
cgaattcataaggtttatggaagaacagctgatgtgatctatccccccgttgatgttcatcgctttttgatgaat

SEQ ID NO: 833836 - DNA, 75 bp, synthetic construct
  source 1..75: mol_type = other DNA
ctgaaaaattaccatctgcaaataaaaaagatgaagatattgaacctccaacgtggcttttagccctgataggtt

SEQ ID NO: 833837 - DNA, 75 bp, synthetic construct
  source 1..75: mol_type = other DNA
ggtgaacagcgaggtaaatacccatggaatgatgatcccccatggtcagattctcttccacggtggccaatggag

SEQ ID NO: 833838 - DNA, 75 bp, synthetic construct
  source 1..75: mol_type = other DNA
aaaccagtatgtcatggggctttactggccggtttcctctctgccgcagggtgtcaccctgacaggggatgcagg

SEQ ID NO: 833839 - DNA, 75 bp, synthetic construct
  source 1..75: mol_type = other DNA
agcgccggctggcaaatatcgtgcggcgtggagttattcattccgttcgcactgacgggggaatacctgagtgtc

SEQ ID NO: 833840 - DNA, 75 bp, synthetic construct
  source 1..75: mol_type = other DNA
ccttcagtcagtcgcgtttggagaatatcgccgcaatctggctggaaatcgtattgtcagaacttccgtatctga

SEQ ID NO: 833841 - DNA, 75 bp, synthetic construct
  source 1..75: mol_type = other DNA
aacacagcgggttatttacctgcgtgatggttatccgcatgaatgcttcagcccgctgtggttgtttcgtcgtga

SEQ ID NO: 833842 - DNA, 75 bp, synthetic construct
  source 1..75: mol_type = other DNA
taaattctcaggctgaaatgtgttactggaccagtagttgtcctttagatagcccacatgagaatgataattcgt

SEQ ID NO: 833843 - DNA, 75 bp, synthetic construct
  source 1..75: mol_type = other DNA
ttcgtgtcatggaaggactacaaagccgtcactcgcgacctgaaagcgatttatcaggctcccacggaagaggca

SEQ ID NO: 833844 - DNA, 75 bp, synthetic construct
  source 1..75: mol_type = other DNA
ggttccggatggagcagaaggcgaacacatcacgcgatacggtgacgggacagaaatccgctacaaccgtgatga

SEQ ID NO: 833845 - DNA, 75 bp, synthetic construct
  source 1..75: mol_type = other DNA
cgccccttccggggtatcctgcaggcggatgcgttcacaggttactacaggttgttcagtgcagaacgtgaaggt

SEQ ID NO: 833846 - DNA, 75 bp, synthetic construct
  source 1..75: mol_type = other DNA
ttacagtctacataagccccgacattgtggaggcactcaaggaacgccaccagcagaacgtaaaagcgagcattg

SEQ ID NO: 833847 - DNA, 75 bp, synthetic construct
  source 1..75: mol_type = other DNA
atggctgaagagaaaaaaggcggtgtttcggtgtacataagccccgacatcgtgaaggcgctcaaggaacgccac

SEQ ID NO: 833848 - DNA, 75 bp, synthetic construct
  source 1..75: mol_type = other DNA
gtatcaatgacggcgttgtcactatagcgaaagatgtggaagaacagaaagaagggctggcgatccagaagaaag

SEQ ID NO: 833849 - DNA, 75 bp, synthetic construct
  source 1..75: mol_type = other DNA
aacagaccgtattgatgctgcagttggtagcgttgaccgccgggttactaaaaatacacaggctattcagtccaa

SEQ ID NO: 833850 - DNA, 75 bp, synthetic construct
  source 1..75: mol_type = other DNA
ggattaggcatcgccttacaaccagagttaacgctgaaaagcattgcaggtgaattgtgttccgttcctcagtaa

SEQ ID NO: 833851 - DNA, 75 bp, synthetic construct
  source 1..75: mol_type = other DNA
gagccggaggagaatcagatatatactggtctcttgagtacattacactcagcaatgtaaaacgcgccatatatc

SEQ ID NO: 833852 - DNA, 75 bp, synthetic construct
  source 1..75: mol_type = other DNA
ggacgtttcctcgcgcccgacccggtagccgaaggggataagctgaaggtaccgcgcagcggcgattttgttcgc

SEQ ID NO: 833853 - DNA, 75 bp, synthetic construct
  source 1..75: mol_type = other DNA
gatgacggttcccgcatcgcgttcgagtggaaaactgaggtcagaaagtaccgtcgctcaccgacgaaagataaa

SEQ ID NO: 833854 - DNA, 75 bp, synthetic construct
  source 1..75: mol_type = other DNA
ctttcgcctgatgcgctattccatggcggtgatgcagcgccatatagagcatgataaacgccagccgctaccgtt

SEQ ID NO: 833855 - DNA, 75 bp, synthetic construct
  source 1..75: mol_type = other DNA
gaaaaccaagaacagaaaaaacagccaaacaaaaaatagcttcagcacagatgcgtctgaatcgcctcaaggcca

SEQ ID NO: 833856 - DNA, 75 bp, synthetic construct
  source 1..75: mol_type = other DNA
acagatgtcaccgacagaatatgaaaaccagtattatcaacggctcggaagtgtctagattatccgtggcgattc

SEQ ID NO: 833857 - DNA, 75 bp, synthetic construct
  source 1..75: mol_type = other DNA
aactgattataaagagagtaaatatgcctatgagtcaggatatatctctaaggatgaactacttgacatagaaga

SEQ ID NO: 833858 - DNA, 75 bp, synthetic construct
  source 1..75: mol_type = other DNA
tggatcagggctacggaggtgacgcgaggtaaggatggcagcgcacatccgcattttcactgtctgctgatggtg

SEQ ID NO: 833859 - DNA, 75 bp, synthetic construct
  source 1..75: mol_type = other DNA
tctaacccagaaaaccgactccgtattgccatgacagcgcaggttacactccttattgaagaagccaaaaacaca

SEQ ID NO: 833860 - DNA, 75 bp, synthetic construct
  source 1..75: mol_type = other DNA
agtatccacctataggaggaggggctggtgtagtagctaatcaactaatcgaccatttttgtgaagacagcgcga

SEQ ID NO: 833861 - DNA, 75 bp, synthetic construct
  source 1..75: mol_type = other DNA
catcccgatttaaaggtgctggaaaatccttactctcctccctattctatgacggatgaaaatggctcggttcgg

SEQ ID NO: 833862 - DNA, 75 bp, synthetic construct
  source 1..75: mol_type = other DNA
ttgttaacttcggtagtcattcagtcaatagactttcaacgcagcactacacacagattggaacacgtaatatta

SEQ ID NO: 833863 - DNA, 75 bp, synthetic construct
  source 1..75: mol_type = other DNA
ggaaaagatagtgggggtcagagtggtgtaaaatataccttaaatggcggaggttatattagccagacaacgcgc

SEQ ID NO: 833864 - DNA, 75 bp, synthetic construct
  source 1..75: mol_type = other DNA
tacgaagcggccaaagattatgcgacccgctccaggctggtcacggcggcgaatatcccttctttcggagcgcca

SEQ ID NO: 833865 - DNA, 75 bp, synthetic construct
  source 1..75: mol_type = other DNA
cccattaattatggcagtagtggcatctggtcgggtacttggagtaaatgctgatcatgatggtttcgaacttca

SEQ ID NO: 833866 - DNA, 75 bp, synthetic construct
  source 1..75: mol_type = other DNA
tgagtattattcagtactcaattgataacccatataagtatggtgataacgattgcaacattatagtactacgcc

SEQ ID NO: 833867 - DNA, 75 bp, synthetic construct
  source 1..75: mol_type = other DNA
acagcatgggtgaaacgacagcggtgctgtgggtgcggaaaggtggcagatgatccgcatcacatcacagggcat

SEQ ID NO: 833868 - DNA, 75 bp, synthetic construct
  source 1..75: mol_type = other DNA
atgcgtgtcaataagtccacagagcattcccgacatccgcaaaaaatgttaacatccataaaaacaccaagcgta

SEQ ID NO: 833869 - DNA, 75 bp, synthetic construct
  source 1..75: mol_type = other DNA
aaatcgaaattatacgagcgttaaagagggcatagcaggacttaaaaaagaagggtgggatcatacgggtcaaat

SEQ ID NO: 833870 - DNA, 75 bp, synthetic construct
  source 1..75: mol_type = other DNA
aaatcgccaatatacgagcattaaagaggggatagcaggtcttaaaaaagaaggatgggatcatacaggtcaaat

SEQ ID NO: 833871 - DNA, 75 bp, synthetic construct
  source 1..75: mol_type = other DNA
gacgatgcgacagggaaagaacaggtctacatccacgcgcagaagaacatgaacaccgaggtgctgaataaccgc

SEQ ID NO: 833872 - DNA, 75 bp, synthetic construct
  source 1..75: mol_type = other DNA
cgaagacgcagatgaccattcgttcgaaaacctataagggcagcgggtttaatgaactgaagtttgacgatgcga

SEQ ID NO: 833873 - DNA, 75 bp, synthetic construct
  source 1..75: mol_type = other DNA
gtggtggcaagtgaactgcacggcgagcagccgcaggcggtgccgggacgcagtggttcaggcaccacgctgaat

SEQ ID NO: 833874 - DNA, 75 bp, synthetic construct
  source 1..75: mol_type = other DNA
cttttcaagaaaaatattaattggggagcaaaccatgataactgaacagacaacaaccattataattttactttc

SEQ ID NO: 833875 - DNA, 75 bp, synthetic construct
  source 1..75: mol_type = other DNA
ttagattatagaatacatggatatgcaggtagtaaggggatcgtatttactcgatatgccgatgatttgacttta

SEQ ID NO: 833876 - DNA, 75 bp, synthetic construct
  source 1..75: mol_type = other DNA
tttttcgcttacgcaatcttggattgcctgttatgtcctctttagaggatatgtctagagaaatgcgtttatcag

SEQ ID NO: 833877 - DNA, 75 bp, synthetic construct
  source 1..75: mol_type = other DNA
atttctgaagataagaacatcggccgtgcagaactggatgttgatggcaaactgcaaattaatgccaataaagat

SEQ ID NO: 833878 - DNA, 75 bp, synthetic construct
  source 1..75: mol_type = other DNA
agattacttttacgctaatactgaccatttgggtatggagtcagagttcagatataaaaaaaacaactattcaaa

SEQ ID NO: 833879 - DNA, 75 bp, synthetic construct
  source 1..75: mol_type = other DNA
cgtccattcccaagggtgtcagggacctcgaagtgaatgtattgtagttagtaaaggaattgactttgtcgtgga

SEQ ID NO: 833880 - DNA, 75 bp, synthetic construct
  source 1..75: mol_type = other DNA
gtggatgagctgatcagcatagattctcgttgtccgttgcttgaaaagctgaaactggaactgacaacacctcat

SEQ ID NO: 833881 - DNA, 75 bp, synthetic construct
  source 1..75: mol_type = other DNA
agcgcatgctcaacctgaatgcctttgaatccggcatgctgtttgagcagcagctgattgaagatgagtctctgc

SEQ ID NO: 833882 - DNA, 75 bp, synthetic construct
  source 1..75: mol_type = other DNA
tcggtgctttgcaggttccatttaatcagatgaaaaatcctactgatcctgaggaattagccaatatttttaata

SEQ ID NO: 833883 - DNA, 75 bp, synthetic construct
  source 1..75: mol_type = other DNA
tatatctaaacacctacaaggaattaagaggaaatgattacagcgtttctttggggatgaatatatctttgggta

SEQ ID NO: 833884 - DNA, 75 bp, synthetic construct
  source 1..75: mol_type = other DNA
ttgcacttttaagctacttttcattgaatttttacgtaggaattacacagggattaatcatcaattacattgaat

SEQ ID NO: 833885 - DNA, 75 bp, synthetic construct
  source 1..75: mol_type = other DNA
aggcattagaacaggaaggaagcaatcacgaggttcttgatgaaaggctgcgagagagggcgctggtgccgctca

SEQ ID NO: 833886 - DNA, 75 bp, synthetic construct
  source 1..75: mol_type = other DNA
acgccgctcatccgggtcgagacagagaacggcgagcgggagaaagcgcagcgccgcagcctggcggagaagtta

SEQ ID NO: 833887 - DNA, 75 bp, synthetic construct
  source 1..75: mol_type = other DNA
ggatttgaagaaattgcagaaaactcagctttaagttttaacatgttttttaaagcggcgtacgctggaattaaa

SEQ ID NO: 833888 - DNA, 75 bp, synthetic construct
  source 1..75: mol_type = other DNA
gcttatcactttctaaaggccctaccaatcccagtaaagacccataaccttagcaatgttgaatcagtcgctaat

SEQ ID NO: 833889 - DNA, 75 bp, synthetic construct
  source 1..75: mol_type = other DNA
atggcacatttgtcagggtgcatgaagcgctgctcccggcgaatatgctctgggacgctgaaaaaatacgcgcat

SEQ ID NO: 833890 - DNA, 75 bp, synthetic construct
  source 1..75: mol_type = other DNA
acatggaattttgagactggcgctggtcggagtctgaatcgctaccttcagcattatggtgtgaaaaaacgctga

SEQ ID NO: 833891 - DNA, 75 bp, synthetic construct
  source 1..75: mol_type = other DNA
cccgttccgtggcccttagcaacaccaccaacgggctggctgaaatgtaacggtgcagcattttcttctgaaatg

SEQ ID NO: 833892 - DNA, 75 bp, synthetic construct
  source 1..75: mol_type = other DNA
ccagtacgcaccgaaagccagcccgacattcaccggcacgccaacagcgcccacgcctgcaaatagcgataacag

SEQ ID NO: 833893 - DNA, 75 bp, synthetic construct
  source 1..75: mol_type = other DNA
gatgttgatcaaaactttgatgctttagactgccatatactgcaagcatatttaattttattgttttatgattaa

SEQ ID NO: 833894 - DNA, 75 bp, synthetic construct
  source 1..75: mol_type = other DNA
tttataacggggtgttatatagaggtatacctatttattcatctaacttaaagataggtttagagaaagaaggat

SEQ ID NO: 833895 - DNA, 75 bp, synthetic construct
  source 1..75: mol_type = other DNA
cataaataatacaatattttactctgaaagatggactgaacgtctcttaaatgaattaggattatttactatcaa

SEQ ID NO: 833896 - DNA, 75 bp, synthetic construct
  source 1..75: mol_type = other DNA
aaactggttaaccctgaaacaaaatattttactgaccggggccaccggcagcggtaaaacgttacctggcatgtg

SEQ ID NO: 833897 - DNA, 75 bp, synthetic construct
  source 1..75: mol_type = other DNA
atatctatatttttagtaatctgtgatttagccattaatcccggagtcgcttttccattagatgttggacatgaa

SEQ ID NO: 833898 - DNA, 75 bp, synthetic construct
  source 1..75: mol_type = other DNA
aatctgattatgactttatttatcgtattctttctgaagtgggtatttactactattttatacattcctgtgatg

SEQ ID NO: 833899 - DNA, 75 bp, synthetic construct
  source 1..75: mol_type = other DNA
agttaaaaactgttgaggctaaaacatttaactattatgttttttctctaagtctgaaagcgtttaatgattatg

SEQ ID NO: 833900 - DNA, 75 bp, synthetic construct
  source 1..75: mol_type = other DNA
aactggaggcgaaaggcttttaccggagagcgtcggcgcgatggggtgaagtcatgcaactggtggagacagaca

SEQ ID NO: 833901 - DNA, 75 bp, synthetic construct
  source 1..75: mol_type = other DNA
cggtgatttcgcccgttacctgccgcgcaaaaccgctgccgggaaagtgattttctggacgtcgcttgggatttc

SEQ ID NO: 833902 - DNA, 75 bp, synthetic construct
  source 1..75: mol_type = other DNA
tcgctggacggcattattatcgctgtttgttgcatcggttatcggcatgggaaccatcacctcaggcgatccgtg

SEQ ID NO: 833903 - DNA, 75 bp, synthetic construct
  source 1..75: mol_type = other DNA
tttatatcaattattatatgatgtttggcatgatgattcatatggaacatcatcaattgatattactggcagtgg

SEQ ID NO: 833904 - DNA, 75 bp, synthetic construct
  source 1..75: mol_type = other DNA
ggcacccgtcacagtgggcaatcggttaaatccgtctacagcaaatccttctaccagacaggaaccaatatccag

SEQ ID NO: 833905 - DNA, 75 bp, synthetic construct
  source 1..75: mol_type = other DNA
cctattccgggtgacaatgaagcattaataaaaattaagtctgtcgggatttgcggtaccgatattcatgcctag

SEQ ID NO: 833906 - DNA, 75 bp, synthetic construct
  source 1..75: mol_type = other DNA
tatgggaaatccgattgcagcacaaatcacagcggcggatttcagccaatacagagaaggtcgcttaaagggtga

SEQ ID NO: 833907 - DNA, 75 bp, synthetic construct
  source 1..75: mol_type = other DNA
caacctgcttttgataaagatgattttgatgatgataaggaatattttcctggtgatgatgatggtggtgatggt

SEQ ID NO: 833908 - DNA, 75 bp, synthetic construct
  source 1..75: mol_type = other DNA
aaaaactgtgcagttgaaattttctatccacctaaaaaagtggatgacagtgtaaaagatgtatctgaaacaatc

SEQ ID NO: 833909 - DNA, 75 bp, synthetic construct
  source 1..75: mol_type = other DNA
aaaatggctgataactgggatgtcatggttaaagcgtttgagatgagatcggactacagtctggcttatgggaca

SEQ ID NO: 833910 - DNA, 75 bp, synthetic construct
  source 1..75: mol_type = other DNA
tatgaagggattctggttgccggatttaaccgttaatgttaattgtaatataagtacacaatctcatcgggtttt

SEQ ID NO: 833911 - DNA, 75 bp, synthetic construct
  source 1..75: mol_type = other DNA
tttatcttcggttcgctggtcgggccgaaaatggacacgctgtttgatggcgcaggatttatctttggtttcagg

SEQ ID NO: 833912 - DNA, 75 bp, synthetic construct
  source 1..75: mol_type = other DNA
ctgcttcgtgaaaatacccgcatcgaattacgcaacccgaaattatcccttagcgatgctaatctcagcgccctg

SEQ ID NO: 833913 - DNA, 75 bp, synthetic construct
  source 1..75: mol_type = other DNA
tattattgctgattgtcatttcgggcagtttattttccgcttgtcaatttgcttataaagatgcaaaaataaaaa

SEQ ID NO: 833914 - DNA, 75 bp, synthetic construct
  source 1..75: mol_type = other DNA
cctttggtacaactttcaatgatggatttgcgattagtgtgctccagagtgatccggatgaagttgtcaaaatgc

SEQ ID NO: 833915 - DNA, 75 bp, synthetic construct
  source 1..75: mol_type = other DNA
agaaacagaatagcaccggaccagatgtaatactccagttcagggatgctgcagataaagcgttattttttgttg

SEQ ID NO: 833916 - DNA, 75 bp, synthetic construct
  source 1..75: mol_type = other DNA
tcccagtacaacccgcaataaaattattgaaaaacgggctgttatgctaccacaagaaattactgatttacggga

SEQ ID NO: 833917 - DNA, 75 bp, synthetic construct
  source 1..75: mol_type = other DNA
aagctgattgatggtggcgtaagccagcttactgatgataataaccttactgatgactcaactataggcgactcc

SEQ ID NO: 833918 - DNA, 75 bp, synthetic construct
  source 1..75: mol_type = other DNA
tacctgaagacatggacctgatgtcccgctctgggtggctggctgtcagggactctatgctggcttctgaggtga

SEQ ID NO: 833919 - DNA, 75 bp, synthetic construct
  source 1..75: mol_type = other DNA
aataccgtatcccggttccttacttctggcatggacctgatgtcccgctctgagtggctggcagtgagggacgct

SEQ ID NO: 833920 - DNA, 75 bp, synthetic construct
  source 1..75: mol_type = other DNA
cgcagcctgacgacggcggtcctctcttcgggatgactccaagcgcatactctagctggtttaactctagggtcc

SEQ ID NO: 833921 - DNA, 75 bp, synthetic construct
  source 1..75: mol_type = other DNA
cttcgggatgactccaagcgcatactctagctggtttaactcaagggtcctcacagaggccctaggagacgctga

SEQ ID NO: 833922 - DNA, 75 bp, synthetic construct
  source 1..75: mol_type = other DNA
catacggcccagacgtcctctgaggctcgcaggtgggcgtcgctggtgtctgtgattaccggggcacgagctgct

SEQ ID NO: 833923 - DNA, 75 bp, synthetic construct
  source 1..75: mol_type = other DNA
tatatttccagacacctgttatcacttaacccattactggcctgctgccgcagatattcccgtggcgagcgataa

SEQ ID NO: 833924 - DNA, 75 bp, synthetic construct
  source 1..75: mol_type = other DNA
atttattttttatgtgatgatgattctttaagtgaaaaattcggcagggcaattaaattcaaacgtaaatgcgat

SEQ ID NO: 833925 - DNA, 75 bp, synthetic construct
  source 1..75: mol_type = other DNA
aaaaatacctgtttgcaggacttgcagggactctgcttccgttcctgattgcactcatcctgactgtcgtgatgt

SEQ ID NO: 833926 - DNA, 75 bp, synthetic construct
  source 1..75: mol_type = other DNA
caaatcctatgacgcatatcgtgcatgggtgatcatcgagtctggccactacgacgccatacagcttcccgacgg

SEQ ID NO: 833927 - DNA, 75 bp, synthetic construct
  source 1..75: mol_type = other DNA
atctgttctgaatgtgctgtggaactggattctgttccgtaaattttcctctctggaacaagtcgaaaatgtggc

SEQ ID NO: 833928 - DNA, 75 bp, synthetic construct
  source 1..75: mol_type = other DNA
gagtgggtaaccattcaggccggattttacaccgagcatatttatcctgatggtagtcgtgggcgcagggcaaaa

SEQ ID NO: 833929 - DNA, 75 bp, synthetic construct
  source 1..75: mol_type = other DNA
ctaaagcgaaggccaaagacccgcaactgggcgcggatcttgatcgagaaataaagatcctgtcatcacgtcttc

SEQ ID NO: 833930 - DNA, 75 bp, synthetic construct
  source 1..75: mol_type = other DNA
ttttccattccctaaatcgctttatgctgttgaggacgctcttcgcttttttgttgctaacaagcccaaagcaat

SEQ ID NO: 833931 - DNA, 75 bp, synthetic construct
  source 1..75: mol_type = other DNA
ctgtaagcagacgtttaccaaaaggcgttgagcctgtgcgtctgtacgaatcgtacctgaccaatttcagcttca

SEQ ID NO: 833932 - DNA, 75 bp, synthetic construct
  source 1..75: mol_type = other DNA
gcgacagcggcagatgttgccgctaatcatggcgtatctcttgaaggacatgccggacgtaagctcactgctgag

SEQ ID NO: 833933 - DNA, 75 bp, synthetic construct
  source 1..75: mol_type = other DNA
actaaatctgctgatattactcagaaagttgtcactgaagcctatgccgccagattcaaccgtgagctgaaagtt

SEQ ID NO: 833934 - DNA, 75 bp, synthetic construct
  source 1..75: mol_type = other DNA
gcggattcagtcgggacaaggagccctggaactctttggaatatggtttctcatagcgcaagtgaacatggtgcc

SEQ ID NO: 833935 - DNA, 75 bp, synthetic construct
  source 1..75: mol_type = other DNA
gccgccagtgcatctccatcacgaacaatgaagtcgctgccagcgaacaaaaacagttgcgtgaacaggggttac

SEQ ID NO: 833936 - DNA, 75 bp, synthetic construct
  source 1..75: mol_type = other DNA
cggtggctgatacttatggcctgctatcggctgtggatcaggccacgcctttcattgaagccattagccatgcca

SEQ ID NO: 833937 - DNA, 75 bp, synthetic construct
  source 1..75: mol_type = other DNA
ccatgcggcaactgccgggggtgcaataagtattttcaggttctggatgatgtcggatatgacttggactgttcc

SEQ ID NO: 833938 - DNA, 75 bp, synthetic construct
  source 1..75: mol_type = other DNA
accgacgacgatcgtcacttccaggctgtaagcagacgtttaccaaaaggcgttgagcctgtgcgtctgtacgaa

SEQ ID NO: 833939 - DNA, 75 bp, synthetic construct
  source 1..75: mol_type = other DNA
ataaacctttccactcagttatcaatggcgagaactaccatgtgttaaaggcgttaacctatacacacaggggca

SEQ ID NO: 833940 - DNA, 75 bp, synthetic construct
  source 1..75: mol_type = other DNA
ttgcccggtcggacgaatatgtcttttttgttctgtttggaaaagcaacagttggacaagagttagatccagact

SEQ ID NO: 833941 - DNA, 75 bp, synthetic construct
  source 1..75: mol_type = other DNA
ttagtacaaacaggtgatgttgcaagatctaatggatgtataaatacatattccgcgctatataatcaactagga

SEQ ID NO: 833942 - DNA, 75 bp, synthetic construct
  source 1..75: mol_type = other DNA
acgcgttgcaatacgtatgtaactaatcatctccaatcgactgagtggttgaaaagagtgcctaaagtaggtcat

SEQ ID NO: 833943 - DNA, 75 bp, synthetic construct
  source 1..75: mol_type = other DNA
cgaagcgaaacattaaaaacgctcatatcctcgaaaaatatcaagcagacattgacgcgttatccacaatgtttt

SEQ ID NO: 833944 - DNA, 75 bp, synthetic construct
  source 1..75: mol_type = other DNA
ttgcgattaacaaatacaacaacagcgcagaaccccttgatgctctacaccctatcaaatcgctggttatgcctg

SEQ ID NO: 833945 - DNA, 75 bp, synthetic construct
  source 1..75: mol_type = other DNA
agcctcaggctcagattgtatggatgggagtaaaagctgataaacaccgtgaaaacaatggtacccgtgttgaaa

SEQ ID NO: 833946 - DNA, 75 bp, synthetic construct
  source 1..75: mol_type = other DNA
aaataactgttgatgcatcacagaaatcagtcctgtcaggaacgaccagtgttgctacaggaagtactcttaaca

SEQ ID NO: 833947 - DNA, 75 bp, synthetic construct
  source 1..75: mol_type = other DNA
cagcagctaatacggcagcagcaatagctggtgctacaggtaatgccagtaaggataccgggaatgataatagct

SEQ ID NO: 833948 - DNA, 75 bp, synthetic construct
  source 1..75: mol_type = other DNA
gatttacagccaggcacaacagaatacgaacgctatcgcctcaccaaagcacaggcggacgggcaggagctaaag

SEQ ID NO: 833949 - DNA, 75 bp, synthetic construct
  source 1..75: mol_type = other DNA
ggtggtgaaaaggtggtattaaggttgttacagcaggtgggtcaggcactggatgtcaacacgcttggaatgcag

SEQ ID NO: 833950 - DNA, 75 bp, synthetic construct
  source 1..75: mol_type = other DNA
tatcggtaaacttgctctagttgaaaatgctgaattagccagaagaactacatttcaaaagagtgtggccattat

SEQ ID NO: 833951 - DNA, 75 bp, synthetic construct
  source 1..75: mol_type = other DNA
ttgacgatgcgacagggaaagaacaggtctacatccacgcgcagaagaacatgaacaccgaggtgctgaataacc

SEQ ID NO: 833952 - DNA, 75 bp, synthetic construct
  source 1..75: mol_type = other DNA
gtggcaaatgagtcattgggtggtttttttaaacagttcgaaaaaatgtcaaaattacctaagaatcttattgat

SEQ ID NO: 833953 - DNA, 75 bp, synthetic construct
  source 1..75: mol_type = other DNA
cgcattctgggagactatctgatggaaacaaccggaaacgtgccggagaaattacggcaacagaaaggtgagtga

SEQ ID NO: 833954 - DNA, 75 bp, synthetic construct
  source 1..75: mol_type = other DNA
ttcaggaagggaaaatagtcgttgaagctccagcaatagaactttccacaactgagttggttagagtttctggcg

SEQ ID NO: 833955 - DNA, 75 bp, synthetic construct
  source 1..75: mol_type = other DNA
gaggtcgatccttttacgccagcggagacagcagcaatctatgacgcctgtcattacccggaatggcgaaatctg

SEQ ID NO: 833956 - DNA, 75 bp, synthetic construct
  source 1..75: mol_type = other DNA
tcagcattgcataaatttcatgtatcagaactgacacctgcagtactaaaaaactggatcgccagcagaaaaaca

SEQ ID NO: 833957 - DNA, 75 bp, synthetic construct
  source 1..75: mol_type = other DNA
aaggttgttagcttcaaacgcgcatcaggtgcaacatacattaataaatcaggtgtattaaccgttgctgaagtt

SEQ ID NO: 833958 - DNA, 75 bp, synthetic construct
  source 1..75: mol_type = other DNA
cagaactgacacctgcagtactcaaaaactggatcgccagcagaaaaacaaaactgaaaacgatccgcaataatc

SEQ ID NO: 833959 - DNA, 75 bp, synthetic construct
  source 1..75: mol_type = other DNA
gaggtcgatccttttacaccagcggagacggcagcaatctatgacgcctgtcattacccggaatggcgaaatctg

SEQ ID NO: 833960 - DNA, 75 bp, synthetic construct
  source 1..75: mol_type = other DNA
ctacacggcgctaaaaagcgacttcatattcagcgatccgaaaactcgcgctccttgggcaaacgcagatgcgat

SEQ ID NO: 833961 - DNA, 75 bp, synthetic construct
  source 1..75: mol_type = other DNA
ccgctcttttcaacaactttacctgccccctgaattcaagattcaggaaggtgccagaaaaaattacgaaaaaat

SEQ ID NO: 833962 - DNA, 75 bp, synthetic construct
  source 1..75: mol_type = other DNA
ttaatggttaaaagaaattgcttcgggctggctgattattttcgtcaattagggatttctgacaaggaacaggca

SEQ ID NO: 833963 - DNA, 75 bp, synthetic construct
  source 1..75: mol_type = other DNA
aaagaattgcaagaagtagcaacaccaaatattaagaattttatatataagaaaaaccaaagaaatatgggggct

SEQ ID NO: 833964 - DNA, 75 bp, synthetic construct
  source 1..75: mol_type = other DNA
tggacacgcaacgatcaggcgtcaagctggaacactatcagtagttatttacaacgtgatatcaaggcgttgaag

SEQ ID NO: 833965 - DNA, 75 bp, synthetic construct
  source 1..75: mol_type = other DNA
tgccaaagccagtgaaactgcggcgaaaagcagtcaggatgcagcggcccaaagcgagagtgccgcagccagttc

SEQ ID NO: 833966 - DNA, 75 bp, synthetic construct
  source 1..75: mol_type = other DNA
tatgtggcaacaacccagaggaaaatcatttcaggcttccgttgtggcgctgatggagatgttcaggccgtatgt

SEQ ID NO: 833967 - DNA, 75 bp, synthetic construct
  source 1..75: mol_type = other DNA
cagccatatcagccgtggtgcgaacctgttctggcttgcaggccagatgggccataagggaccagaaatgctatt

SEQ ID NO: 833968 - DNA, 75 bp, synthetic construct
  source 1..75: mol_type = other DNA
tttttatcagtatccgttaaatccggttcagtatatagattcaatgggactggcatctaaatatggacacttaaa

SEQ ID NO: 833969 - DNA, 75 bp, synthetic construct
  source 1..75: mol_type = other DNA
tacttaatgttatttatcctgcaaatctttcaaagataaacaccagaagaaaagagcaagttctaaaaatagtta

SEQ ID NO: 833970 - DNA, 75 bp, synthetic construct
  source 1..75: mol_type = other DNA
ctgaaatggcacttcccgaaagctataactatatccacaagtcgggaactttgatcttacccagcaatagtggac

SEQ ID NO: 833971 - DNA, 75 bp, synthetic construct
  source 1..75: mol_type = other DNA
cgaaaatcacgttatacgatcatcctcagactcaggggcaaagattctgtctcagtaaatcaggctcttaccgac

SEQ ID NO: 833972 - DNA, 75 bp, synthetic construct
  source 1..75: mol_type = other DNA
gagcgttagttgatagcgctgctgattctacagcaatgagaattgccaaatcttttgatgtttctttggatggac

SEQ ID NO: 833973 - DNA, 75 bp, synthetic construct
  source 1..75: mol_type = other DNA
aagaagccctggagcagatcggtcagttgtacgccatagaggcggatataaggggaatgccggcagagcagcggc

SEQ ID NO: 833974 - DNA, 75 bp, synthetic construct
  source 1..75: mol_type = other DNA
atacacctttatgaaaagtgagttcatattcagcgatccgaaaacgggagatccctggacgaacgccgacgctat

SEQ ID NO: 833975 - DNA, 75 bp, synthetic construct
  source 1..75: mol_type = other DNA
tatctctgccaagaggagtaactattcgtaagcataaaactgcttcaacactagttatcactttcacatataaag

SEQ ID NO: 833976 - DNA, 75 bp, synthetic construct
  source 1..75: mol_type = other DNA
ctcttctggctagcagggcagatggggcataaggggcccgaaatgttgtttcgtcattatgggcgttacttgagt

SEQ ID NO: 833977 - DNA, 75 bp, synthetic construct
  source 1..75: mol_type = other DNA
gattgtcattcctacacccaacgatacccatttcccgttagccaaagcggcgcttgaggcgggtaaacatgtggt

SEQ ID NO: 833978 - DNA, 75 bp, synthetic construct
  source 1..75: mol_type = other DNA
ggcacgcccgggctggaactggcggtaatctccagcagcgatgaaacaaaagtaaaagccgactggccaacggtt

SEQ ID NO: 833979 - DNA, 75 bp, synthetic construct
  source 1..75: mol_type = other DNA
aatgctgttccgcaattacggtaaatacctggctgaatacgacgggaaaaccgcaatggaatctggaatgactca

SEQ ID NO: 833980 - DNA, 75 bp, synthetic construct
  source 1..75: mol_type = other DNA
attattgccgacgaaccgactacggcgctggacgtcacggtacagttgcaggtactgcgtttgcttaaacataaa

SEQ ID NO: 833981 - DNA, 75 bp, synthetic construct
  source 1..75: mol_type = other DNA
aagaaatacattatggtgatgttttatatcattatcataaaaatgacatctctttgggagtagatactctttacg

SEQ ID NO: 833982 - DNA, 75 bp, synthetic construct
  source 1..75: mol_type = other DNA
tcgataaaggaagcaaagttcaattggaggtatataatttattatccgaagaaaagatatttgaacataaaatta

SEQ ID NO: 833983 - DNA, 75 bp, synthetic construct
  source 1..75: mol_type = other DNA
ctacggcgctggacgtcacggtgcagttgcaggtactgcgtttgcttaaacataaagcccgcggttctgttcatc

SEQ ID NO: 833984 - DNA, 75 bp, synthetic construct
  source 1..75: mol_type = other DNA
atgacccaacccgttctggacattcaacaactgcatttgagtttccccggttttaacggcgacgttcacgcgctc

SEQ ID NO: 833985 - DNA, 75 bp, synthetic construct
  source 1..75: mol_type = other DNA
atgacccaacccgttctggacattcaacaactgcatttgagtttccccggttttaacggtgatgttcacgcgctc

SEQ ID NO: 833986 - DNA, 75 bp, synthetic construct
  source 1..75: mol_type = other DNA
agtggcaggcaacgttgcaggagctttgttctgtccatgaaatgcaatcttttctcctcaaactcccttgtgtga

SEQ ID NO: 833987 - DNA, 75 bp, synthetic construct
  source 1..75: mol_type = other DNA
tggtgtatctctggtcacatctgcagtaaaagatgccctttctcttgcgagaacaaaaggaagtagctatcttgc

SEQ ID NO: 833988 - DNA, 75 bp, synthetic construct
  source 1..75: mol_type = other DNA
aagagtcacggcagagaagaaacccgtcttcatattgtttgcgatgtccctgatgagcttattgatttcacgttt

SEQ ID NO: 833989 - DNA, 75 bp, synthetic construct
  source 1..75: mol_type = other DNA
tataacttttgaaccagctcaccaggatgatagtattcccgaacatttacgatttgttgattgtggggatagaag

SEQ ID NO: 833990 - DNA, 75 bp, synthetic construct
  source 1..75: mol_type = other DNA
aaaataaaattgaaacaaaggcccccaaacaaaaagatagttataagaagtatttgcataatgggtatataaaaa

SEQ ID NO: 833991 - DNA, 75 bp, synthetic construct
  source 1..75: mol_type = other DNA
ataactttaggacaatatcaggtggcattggtaataatagaataatatttaaagatagcaatacgcttttcattt

SEQ ID NO: 833992 - DNA, 75 bp, synthetic construct
  source 1..75: mol_type = other DNA
ctcaaaagcgaaagttgcaaactttgttgcttttgttggcgcgatgtatagcttttatgcgctgtactcatccgg

SEQ ID NO: 833993 - DNA, 75 bp, synthetic construct
  source 1..75: mol_type = other DNA
taatttcttaaaaaaatcgggtctgtataactctcgttatgaaattaaagggggcggcaatggtactttctatgt

SEQ ID NO: 833994 - DNA, 75 bp, synthetic construct
  source 1..75: mol_type = other DNA
atggcaatgaaatcaattccgacaagaccaatgttgatgatctgcctcaggttggtagaacgcttataagtacta

SEQ ID NO: 833995 - DNA, 75 bp, synthetic construct
  source 1..75: mol_type = other DNA
ttttaatggattattgactcctggtgcatatgccgcaacagcgaatggatacgtagcaaataaagaaaatctacg

SEQ ID NO: 833996 - DNA, 75 bp, synthetic construct
  source 1..75: mol_type = other DNA
aataacaatgacggttattatctttcgccagatatcattccaacggatgttaaattacgggcgttattgggtaga

SEQ ID NO: 833997 - DNA, 75 bp, synthetic construct
  source 1..75: mol_type = other DNA
gccagggcgcacaaaaactggctgatttaatggcaatagcaaaaaataaaaatatccctgataagcaacgcgcgc

SEQ ID NO: 833998 - DNA, 75 bp, synthetic construct
  source 1..75: mol_type = other DNA
cgattattatctttcgccagatattattccaacggacgttaaagtacgtgcgctattaggtagacgattaatacg

SEQ ID NO: 833999 - DNA, 75 bp, synthetic construct
  source 1..75: mol_type = other DNA
tgtatgcctccggttcgcagcaagactattggggcaataacgagaaaaacaggaatatctctgttggggtttccg

SEQ ID NO: 834000 - DNA, 75 bp, synthetic construct
  source 1..75: mol_type = other DNA
atgactaaagaagaactattaaaaatcaccgaaggtatgagccttgcactagcacctgacctaaatgaaccatct

SEQ ID NO: 834001 - DNA, 75 bp, synthetic construct
  source 1..75: mol_type = other DNA
tcgatgcgacccaggcgaagagtacgctggcagaccaaagcgaacataaaggtcagtcatatcgttttctgtatg

SEQ ID NO: 834002 - DNA, 75 bp, synthetic construct
  source 1..75: mol_type = other DNA
ttaaattgaattcaacaaattttactaatgccaacatgtttcaggttaattttgttagttcaacacaaaacgcca

SEQ ID NO: 834003 - DNA, 75 bp, synthetic construct
  source 1..75: mol_type = other DNA
attatttctatttttgttctgctcgttactagaaaaatgattatggtatccttcatacaattaggaatgatacat

SEQ ID NO: 834004 - DNA, 75 bp, synthetic construct
  source 1..75: mol_type = other DNA
aacagttcgtgattattactattgcgggattaatatcctttggactgttgtatttatatcataggttgacatcga

SEQ ID NO: 834005 - DNA, 75 bp, synthetic construct
  source 1..75: mol_type = other DNA
atgagaactggaataaacaaagcgcactgccggaaccgccgcagtttgtggaaacgcagacagtccaggagctgc

SEQ ID NO: 834006 - DNA, 75 bp, synthetic construct
  source 1..75: mol_type = other DNA
atgcgcggcccgattccggaaggcatgtggggctacgatgcgacggcaatgcaatacaaccatgacgaaacgaaa

SEQ ID NO: 834007 - DNA, 75 bp, synthetic construct
  source 1..75: mol_type = other DNA
atgaaaagtgataaaattgagagaataagagataatataattgaatctaccgttggagccagactccggtccaat

SEQ ID NO: 834008 - DNA, 75 bp, synthetic construct
  source 1..75: mol_type = other DNA
tgaggagtcggggctgtattataaccgtcaccggtactacgatccgttgcaggggtggtatatcatccaggaccc

SEQ ID NO: 834009 - DNA, 75 bp, synthetic construct
  source 1..75: mol_type = other DNA
cgggtcagaagaaccggatgaacaaacgttcagtcagggatgtgcggcctggtttgccgacagtaacaagaaggc

SEQ ID NO: 834010 - DNA, 75 bp, synthetic construct
  source 1..75: mol_type = other DNA
cgatagaagtttgccaggaacgcaaattcaactgcgtgagtggtttttaactgagaaaatcccggatttacgtag

SEQ ID NO: 834011 - DNA, 75 bp, synthetic construct
  source 1..75: mol_type = other DNA
atgattgatgtcttagggcctgagaaacgcagacggcgtaccacacaggaaaagatcgcaattgttcagcagagc

SEQ ID NO: 834012 - DNA, 75 bp, synthetic construct
  source 1..75: mol_type = other DNA
gcaaaaaaattcaggcacaatatccgcaagaagtgattactaccgttcgcggccagggctatttgttcgaattgc

SEQ ID NO: 834013 - DNA, 75 bp, synthetic construct
  source 1..75: mol_type = other DNA
tgtcacgcttgggatgatcgacaaggtgtagccaaagagctacacgatttgctcgaggctgcaggcgtcaaagta

SEQ ID NO: 834014 - DNA, 75 bp, synthetic construct
  source 1..75: mol_type = other DNA
gtggacatagctcagcagcagctgctgctgcctgtcccgcatgtcgtaatcgcagtggttatcgccgcagtagct

SEQ ID NO: 834015 - DNA, 75 bp, synthetic construct
  source 1..75: mol_type = other DNA
caagcaaaagatgtgattgggcatgtgcacatcagtgaagcgcagcttgcgccgccaggggactcatattttcga

SEQ ID NO: 834016 - DNA, 75 bp, synthetic construct
  source 1..75: mol_type = other DNA
agattcgtcgtctggacaggctctatccggatggcaaattcaacatcgcggcggagcagaaaagcctgctcaggg

SEQ ID NO: 834017 - DNA, 75 bp, synthetic construct
  source 1..75: mol_type = other DNA
gtggagaccgcccttcccgatgttgagattcgtcgtctggacaggctctatccggatggcaaattcaacatcgcg

SEQ ID NO: 834018 - DNA, 75 bp, synthetic construct
  source 1..75: mol_type = other DNA
acgggcgctgagtgtactgggatatcctgcggtgcttgttgagtggtggcaggaaaatcctcggggcacgcctta

SEQ ID NO: 834019 - DNA, 75 bp, synthetic construct
  source 1..75: mol_type = other DNA
tctaggttcgaccgcaccagttatcaatatcaccattaatgacaatggcaacaaaggcggcgttgatagcaatgt

SEQ ID NO: 834020 - DNA, 75 bp, synthetic construct
  source 1..75: mol_type = other DNA
ccacaaccaccacatctcttacatgtcatctctttaaagaaatgcaagaatgagataaaaaagatcttaccactg

SEQ ID NO: 834021 - DNA, 75 bp, synthetic construct
  source 1..75: mol_type = other DNA
atgctttagacctgagccgtgaaattgcacgcatgattgactgcgaattgcttcaagaccatttgaagggaatca

SEQ ID NO: 834022 - DNA, 75 bp, synthetic construct
  source 1..75: mol_type = other DNA
tgtgagtattaaagctcctttggagtctttacggttacaacggaaatataatttaattaatacatttgaatattt

SEQ ID NO: 834023 - DNA, 75 bp, synthetic construct
  source 1..75: mol_type = other DNA
tcatttagttcagttaccaatagttctatattagaggatgtatcacttattgcatatccagaaaccaattctata

SEQ ID NO: 834024 - DNA, 75 bp, synthetic construct
  source 1..75: mol_type = other DNA
gggtggctactgttgtagaacgtttattgaataacggtaaggctctgagtaatagacaagccaaaaatgatctga

SEQ ID NO: 834025 - DNA, 75 bp, synthetic construct
  source 1..75: mol_type = other DNA
cagctgcgcgataacacactgatactcagtgataacggcggcagaagcctgtattttgagcacctgtttcccggt

SEQ ID NO: 834026 - DNA, 75 bp, synthetic construct
  source 1..75: mol_type = other DNA
tcaacagagctgacacccaattcgataaccggcactcttttcatggctatcaatggcgtacgcagtacatcaaag

SEQ ID NO: 834027 - DNA, 75 bp, synthetic construct
  source 1..75: mol_type = other DNA
gtatcggcgatgacagtgttttctgtatcgggggggcgataaccgggcatgttgatgtggtgatagaagctggag

SEQ ID NO: 834028 - DNA, 75 bp, synthetic construct
  source 1..75: mol_type = other DNA
ctactaccagccaagaataaacaaatcacagtgctggattctaaaaaagcaaaacataaattcaagattgaaggc

SEQ ID NO: 834029 - DNA, 75 bp, synthetic construct
  source 1..75: mol_type = other DNA
gtcgttgaaaagggcggtgagtggctaatgaaaaataacgattcctcaattgaatttcaaattggtaatcaagga

SEQ ID NO: 834030 - DNA, 75 bp, synthetic construct
  source 1..75: mol_type = other DNA
atgaatagaatctatcgcgtgatatggaattgcaccctacaggcatttcaggtctgctcggaattaactcgcagg

SEQ ID NO: 834031 - DNA, 75 bp, synthetic construct
  source 1..75: mol_type = other DNA
aaagagcataattttgtgcagcgtggcgatgttcaggcactgggggaaaatggcgttgccgtccggtttgacttc

SEQ ID NO: 834032 - DNA, 75 bp, synthetic construct
  source 1..75: mol_type = other DNA
aaattggagccagcgtgaacagcaatgtgttccgtaaaggttacgattccgtctctggtaatcttcacgctatct

SEQ ID NO: 834033 - DNA, 75 bp, synthetic construct
  source 1..75: mol_type = other DNA
atttatactggatattggccagttttttccccgttctgtagcaacggagatgattatttacggattctgtttcag

SEQ ID NO: 834034 - DNA, 75 bp, synthetic construct
  source 1..75: mol_type = other DNA
actggatttgaaaacgtagcgttgttgtttagtgatgaaaggataaaaaagaaatgtagtatagttacagatctt

SEQ ID NO: 834035 - DNA, 75 bp, synthetic construct
  source 1..75: mol_type = other DNA
tgaaagtaaaagccccggaaaaaggtaccggcagaaccacagccttctcggtggggatgcaggcgcgctatgccg

SEQ ID NO: 834036 - DNA, 75 bp, synthetic construct
  source 1..75: mol_type = other DNA
ccgtcaggataatcacgttggttatgacgctaccagttacggtattctgtttggtgctgaaaagcagagtgtgga

SEQ ID NO: 834037 - DNA, 75 bp, synthetic construct
  source 1..75: mol_type = other DNA
gctatgatatttccggcaaactcattaatccgaaggacaagaccacactattaacggcgggggctcagttaagtt

SEQ ID NO: 834038 - DNA, 75 bp, synthetic construct
  source 1..75: mol_type = other DNA
gctcttgcgaacagacaaacgttatgcagggaagcactggaccggcaaacatcgaacctggttgctgaactgggt

SEQ ID NO: 834039 - DNA, 75 bp, synthetic construct
  source 1..75: mol_type = other DNA
tatatcatcaactcacagcgatgaatataaaatgccaggttattaccccttcccggataccaaaatcactgacag

SEQ ID NO: 834040 - DNA, 75 bp, synthetic construct
  source 1..75: mol_type = other DNA
ctggcaacgcgcggaagatctgaataaccaggttgccgccttggaaggtaaggctcgcgacctgcgcaacagttt

SEQ ID NO: 834041 - DNA, 75 bp, synthetic construct
  source 1..75: mol_type = other DNA
gattgaagaaactgaaaaccagctcaagagcgaactggcagcagcgctggcgcatcactttgtgggtgaggacgc

SEQ ID NO: 834042 - DNA, 75 bp, synthetic construct
  source 1..75: mol_type = other DNA
tgccacacaagatgttacaacgattaataactcgggaaatctcgttctcaaggggggagataacgctaaccgtac

SEQ ID NO: 834043 - DNA, 75 bp, synthetic construct
  source 1..75: mol_type = other DNA
acacttctaaaaagaaagtctggtgagataagcactactgattttcaaccaattgctgatttggtacggaatcta

SEQ ID NO: 834044 - DNA, 75 bp, synthetic construct
  source 1..75: mol_type = other DNA
aaaaaaagagtttctttggctcattgataaaatataaagagaaaataccatatacgggttccagttcaaataaaa

SEQ ID NO: 834045 - DNA, 75 bp, synthetic construct
  source 1..75: mol_type = other DNA
accctacagcagagctatctgcggtcgctcgttggtgcttgttaatgcgcaacgatccacagctttccagattgg

SEQ ID NO: 834046 - DNA, 75 bp, synthetic construct
  source 1..75: mol_type = other DNA
agtatcttctgaataagttggattcgaataagaatacggattcgttctacattggacctaacgacgagcgggaag

SEQ ID NO: 834047 - DNA, 75 bp, synthetic construct
  source 1..75: mol_type = other DNA
gaatgaagatgtagatgagttgtgtaagaaagtgacaagttggatgtattcgcatcctggagagagaattagata

SEQ ID NO: 834048 - DNA, 75 bp, synthetic construct
  source 1..75: mol_type = other DNA
acatgagcggtgtatgatgttatgtaaaactgcacaaatagatccagatatgtcacacatttggggcggttctct

SEQ ID NO: 834049 - DNA, 75 bp, synthetic construct
  source 1..75: mol_type = other DNA
tattaaaaaatccgatgtcaagagttgacgcaagcattttcgtacacaaagcaacttacaaatattgtaagttat

SEQ ID NO: 834050 - DNA, 75 bp, synthetic construct
  source 1..75: mol_type = other DNA
gatacagccaatggtatgtgcaactgtagtaggagccagaagagataaaggtaagagatttcttcgcctacagcc

SEQ ID NO: 834051 - DNA, 75 bp, synthetic construct
  source 1..75: mol_type = other DNA
cggcagtagagctttacagtgccagcgctgccctgctggcggcattatggtgcgtgacggcaccgcaaacgctgc

SEQ ID NO: 834052 - DNA, 75 bp, synthetic construct
  source 1..75: mol_type = other DNA
taccctggattattctcttagccgggaggattacaaaaaacaggacaaaaatcgtcgtgacaggaatggcgtgtt

SEQ ID NO: 834053 - DNA, 75 bp, synthetic construct
  source 1..75: mol_type = other DNA
ggagagtcggtggccgccgccgggtaatgactgaagaagtggtggagcggtgccgcagaatgctggagaacggcg

SEQ ID NO: 834054 - DNA, 75 bp, synthetic construct
  source 1..75: mol_type = other DNA
caaccggggatcaaaacctcgatttacagaaaaacgcgctgatccgcgcagaatgtgagctggtttttgaggata

SEQ ID NO: 834055 - DNA, 75 bp, synthetic construct
  source 1..75: mol_type = other DNA
gttaacggtggtgaaatccgccagaccaccttccttgataatctgccagccgtcactgtttacaacagtgccaga

SEQ ID NO: 834056 - DNA, 75 bp, synthetic construct
  source 1..75: mol_type = other DNA
tcgcctgacaccttaccagtgcagcgcgggagtgtggacgtcgggcatcggccacactgccggggtggtcccgaa

SEQ ID NO: 834057 - DNA, 75 bp, synthetic construct
  source 1..75: mol_type = other DNA
atgcgctgcgccacaccttcgccagtcatttcatgatgaacggcggcaatattctgacgctccagaaaattctgg

SEQ ID NO: 834058 - DNA, 75 bp, synthetic construct
  source 1..75: mol_type = other DNA
tccagcagtggtagtgctgtaggcaccaccattaatgggggactgcagactgttttcggtggtggaagtgtctcc

SEQ ID NO: 834059 - DNA, 75 bp, synthetic construct
  source 1..75: mol_type = other DNA
cagaaggtgtatgacgctacggtgtcgtttgccttcaacgtggggacgggcaatgcctgcagttccacgctggtg

SEQ ID NO: 834060 - DNA, 75 bp, synthetic construct
  source 1..75: mol_type = other DNA
cggatgcgtgccgacagttgccgcgctgggtttatgtaaaaggtgtttttaatcaggggctggataaccgccgtg

SEQ ID NO: 834061 - DNA, 75 bp, synthetic construct
  source 1..75: mol_type = other DNA
ggtgtatgtcaatggtacaaaaaataaagggctggagaaccgccgcgcgcgggaacgggcttactgcgtaaaggg

SEQ ID NO: 834062 - DNA, 75 bp, synthetic construct
  source 1..75: mol_type = other DNA
caggccatcaattggtttgatattcccgatcatcgccaggccgcacaaaaactggctgatttaatggcgatagca

SEQ ID NO: 834063 - DNA, 75 bp, synthetic construct
  source 1..75: mol_type = other DNA
catcagggaaaatacgatagcccttactttcatcgattattagccttgccgaaaacagagcaaggagaatggcga

SEQ ID NO: 834064 - DNA, 75 bp, synthetic construct
  source 1..75: mol_type = other DNA
ctgcgcggcttttgcgtttcagtggtatcgaattggcggcttatgaaatgtatcccgattatgccattaccagcg

SEQ ID NO: 834065 - DNA, 75 bp, synthetic construct
  source 1..75: mol_type = other DNA
aggaagttggtgaggggggaagtgcaagtggtaccactataaataattctggtatccagttcatcagcagtggag

SEQ ID NO: 834066 - DNA, 75 bp, synthetic construct
  source 1..75: mol_type = other DNA
ttccggcggtggcagtgccgtggacaccaccattgaggggggactgcagactgttttcggtggtggatttgcccc

SEQ ID NO: 834067 - DNA, 75 bp, synthetic construct
  source 1..75: mol_type = other DNA
ccggggaacagcaagtttccagcggtggcagtgccgtggacaccaccattgaggggggactgcagactgttttcg

SEQ ID NO: 834068 - DNA, 75 bp, synthetic construct
  source 1..75: mol_type = other DNA
ggaagctatacccaagtcctgaccacaggagcgatgtctggcacgctgacgcttatgccacagctgaacggtgtg

SEQ ID NO: 834069 - DNA, 75 bp, synthetic construct
  source 1..75: mol_type = other DNA
tggtttaagcctggaatcattctctccagaacaactgaacaggaccgacgtactggaactggcacggaaagtgtc

SEQ ID NO: 834070 - DNA, 75 bp, synthetic construct
  source 1..75: mol_type = other DNA
ccgaatattttttccggagcgaaatgtcacgatgtctgcactgacagaagcaacgattattattgaagcatcaga

SEQ ID NO: 834071 - DNA, 75 bp, synthetic construct
  source 1..75: mol_type = other DNA
aatcctcctttttgccgattgaagaggcttacgctatccgtttatcggacgcagaatatttttatatctacgaac

SEQ ID NO: 834072 - DNA, 75 bp, synthetic construct
  source 1..75: mol_type = other DNA
tctcatggctctggggcgtaccaattattgcgcttggtcaggtgatttttacatttggtatttcaatcatatttt

SEQ ID NO: 834073 - DNA, 75 bp, synthetic construct
  source 1..75: mol_type = other DNA
gggatcctgcccccccaagccactgaaaaggtgatacagctggttgcggacatcgaaaatcacccggtaactgaa

SEQ ID NO: 834074 - DNA, 75 bp, synthetic construct
  source 1..75: mol_type = other DNA
tagcagcgcgtgtagggcttactgcgaagggaactttccacaaacgcggttttcattcaacagccattgctggca

SEQ ID NO: 834075 - DNA, 75 bp, synthetic construct
  source 1..75: mol_type = other DNA
caccattttaattaatgataaaggaattccagacgatattgctcttgctaatataaaaaaaccagtttatcccat

SEQ ID NO: 834076 - DNA, 75 bp, synthetic construct
  source 1..75: mol_type = other DNA
ctaatcaacaggtgatttttatcggtgatcaaagtactgcagccctgaccctcagtgtgcccccaggcgagatca

SEQ ID NO: 834077 - DNA, 75 bp, synthetic construct
  source 1..75: mol_type = other DNA
gttgatctgcagaagtcgaaaaatgaagtggtcgctgacggcaatgacagcgccacaatgaccgcgacagtccgg

SEQ ID NO: 834078 - DNA, 75 bp, synthetic construct
  source 1..75: mol_type = other DNA
gctaggcgtcattgatgccatgttggttcatgaaatggctaaggctttattgccactggtagcagatcaacatga

SEQ ID NO: 834079 - DNA, 75 bp, synthetic construct
  source 1..75: mol_type = other DNA
atgcaaagggcaacgttactgtggttattcgcggtggaaattctggttctcgtagcgttagccgtcgctcaatcg

SEQ ID NO: 834080 - DNA, 75 bp, synthetic construct
  source 1..75: mol_type = other DNA
ccagcgcagcggtattttcacaggcagatgttggcgtggttgatgactggaaagtgatgctggaggcactggtga

SEQ ID NO: 834081 - DNA, 75 bp, synthetic construct
  source 1..75: mol_type = other DNA
cacagatttgtctattatgtcgcgtcatactaattttcaacacgttgatatctggtcagggagagagaaatatga

SEQ ID NO: 834082 - DNA, 75 bp, synthetic construct
  source 1..75: mol_type = other DNA
cgtgagacggtgcgcagcttcggcagcagggcaggcagtaatgccgcatatgaactgaccagcacatacaccccc

SEQ ID NO: 834083 - DNA, 75 bp, synthetic construct
  source 1..75: mol_type = other DNA
atcttcaggcaattttattgattgccaaacattatcgtatcgaaacctctgaagaacgtatccgtttgcagatgg

SEQ ID NO: 834084 - DNA, 75 bp, synthetic construct
  source 1..75: mol_type = other DNA
atccaggctgcaacggctgcacttcagggcctggcgggcggcaatatggcaggcgcgctggcaggtgcttcagcg

SEQ ID NO: 834085 - DNA, 75 bp, synthetic construct
  source 1..75: mol_type = other DNA
catcgcgtacagagcttctagatgactactatggagcaatatccccggaagctttagccagcaaagcaagattcg

SEQ ID NO: 834086 - DNA, 75 bp, synthetic construct
  source 1..75: mol_type = other DNA
tgcactcacgtgagggttatacagagaaaagttgccggagccgtctcagtaaagcgcgaaaagtgatcagggatg

SEQ ID NO: 834087 - DNA, 75 bp, synthetic construct
  source 1..75: mol_type = other DNA
ttgaaaaataatcatttgatatcatatggtttcctaacctcgctgagtgatattgaattactgtcgcttcactcc

SEQ ID NO: 834088 - DNA, 75 bp, synthetic construct
  source 1..75: mol_type = other DNA
tgccacacgggttcagggtttttttcagcatttgcaggtcaggtttggcgacgggccgtggcaggatgttaaggg

SEQ ID NO: 834089 - DNA, 75 bp, synthetic construct
  source 1..75: mol_type = other DNA
tcagcaggggaggcatcggagtcagcccggcaggcggcacgaaagtgcagcctcagcaaagcagtcagaggatgc

SEQ ID NO: 834090 - DNA, 75 bp, synthetic construct
  source 1..75: mol_type = other DNA
atgtctgaatttgcacgttgccattatgggtatatacaaatccctccagtgacaactttccgcgccgacggacca

SEQ ID NO: 834091 - DNA, 75 bp, synthetic construct
  source 1..75: mol_type = other DNA
tgcagtcagggaaagcaaaaacagtcgcaacggcaggtcagaaagtcatgaaagccacgcagctgtgtccacggt

SEQ ID NO: 834092 - DNA, 75 bp, synthetic construct
  source 1..75: mol_type = other DNA
tgcggtatctgatggataacgcggccagacaacagaaaggactgggattagagtttggtgtggcgctgacagctg

SEQ ID NO: 834093 - DNA, 75 bp, synthetic construct
  source 1..75: mol_type = other DNA
aggccgcattgcgtcagggcgtaatctttctgctgaggctgaacgactggaaaaccgggcgtcatttatcctggc

SEQ ID NO: 834094 - DNA, 75 bp, synthetic construct
  source 1..75: mol_type = other DNA
gggactggcggtcggattactgagtggttttaatacggcataccgcggtgcaattcatgccccgtctgcatctgc

SEQ ID NO: 834095 - DNA, 75 bp, synthetic construct
  source 1..75: mol_type = other DNA
tttgatgcttacagtcgaaatttttctaaaaaagaatataagtatgcccccttcatgtctgaccatacatcattg

SEQ ID NO: 834096 - DNA, 75 bp, synthetic construct
  source 1..75: mol_type = other DNA
aaatcataattcgctaaatcttgaactggtcagtgcaccgaaaggaactgctgccgatgtctttaattcacagac

SEQ ID NO: 834097 - DNA, 75 bp, synthetic construct
  source 1..75: mol_type = other DNA
tcgaatctgtggacagccagcaaaagaaaacgccgataattgcgccaccttccaatgctgaaccaaaggcacaat

SEQ ID NO: 834098 - DNA, 75 bp, synthetic construct
  source 1..75: mol_type = other DNA
aaagcacaggaagaaataaaggcgagcaagaaattatttaagaattcattgtcatacgatctgttaagtgagttt

SEQ ID NO: 834099 - DNA, 75 bp, synthetic construct
  source 1..75: mol_type = other DNA
ggatttcaaatatttttaactttttagttgaaggggtaaataaatcattagcatcgccaaaaaaatatgcattcg

SEQ ID NO: 834100 - DNA, 75 bp, synthetic construct
  source 1..75: mol_type = other DNA
ttatcattctaaaccattgtttgagatgttgaatgagtacatcctttttaaagagttccctgacaaagagatgtt

SEQ ID NO: 834101 - DNA, 75 bp, synthetic construct
  source 1..75: mol_type = other DNA
gaggcatcaacagtcagcgcagaaataccatatcagacttttcgtgactttgctgaaaataaaggtgtatttacc

SEQ ID NO: 834102 - DNA, 75 bp, synthetic construct
  source 1..75: mol_type = other DNA
atgccggtgcagaagtgggctaccgctatcatgtcactgaggatgcctggattgagccacaggctgagctggttt

SEQ ID NO: 834103 - DNA, 75 bp, synthetic construct
  source 1..75: mol_type = other DNA
tgcttccgccatgtttgattccggtgcctatatcgacctgattggcaagtatgttcaccatgataatgagtacac

SEQ ID NO: 834104 - DNA, 75 bp, synthetic construct
  source 1..75: mol_type = other DNA
tcatctgagtcatttcagtcactcttctcttaatattggagataatgcaaccctgacagcgacagccggatttta

SEQ ID NO: 834105 - DNA, 75 bp, synthetic construct
  source 1..75: mol_type = other DNA
agttgatcctgataacatcaactggggctatcgcggaggtacacttgacctgaatggtaacagtctcacatttca

SEQ ID NO: 834106 - DNA, 75 bp, synthetic construct
  source 1..75: mol_type = other DNA
gtcattaagaatgacattcagtatcaagcgtaccgtgattttgctgaaaacaaaggggagttttatccaggagtt

SEQ ID NO: 834107 - DNA, 75 bp, synthetic construct
  source 1..75: mol_type = other DNA
cgctatggcagctaacctgcaacaacctctgaacaccctgccgcagggcgctactcttagcgccaatggcaccac

SEQ ID NO: 834108 - DNA, 75 bp, synthetic construct
  source 1..75: mol_type = other DNA
gatgcattaaatataatcacataaaggaagtaacagcagcacaaactttctacgttcctggtttatatgatatag

SEQ ID NO: 834109 - DNA, 75 bp, synthetic construct
  source 1..75: mol_type = other DNA
aacctgaacccttaaaattatgctattgggaactagatcatacaaaaggaaagcctttcattattgctttacacg

SEQ ID NO: 834110 - DNA, 75 bp, synthetic construct
  source 1..75: mol_type = other DNA
ctcttgtcaatgcaccttcatatcaagaaccatggtgtacagcaatatacatgtttcataatccgaaggcattaa

SEQ ID NO: 834111 - DNA, 75 bp, synthetic construct
  source 1..75: mol_type = other DNA
aggcggtgtctcaggtggtgcgcgatagcgtgcagcgggaccgcctgcagcagatggagcgcgagacggtgcgcg

SEQ ID NO: 834112 - DNA, 75 bp, synthetic construct
  source 1..75: mol_type = other DNA
aaccttagaaaaatgattgagttaacatttcaagataaagataagtgcgaatacgttttttctaccccaatgaga

SEQ ID NO: 834113 - DNA, 75 bp, synthetic construct
  source 1..75: mol_type = other DNA
agcttattgccacgaaggcggggaatattaccgtctataactatgatggtgaaactcgggaatatatttctgaat

SEQ ID NO: 834114 - DNA, 75 bp, synthetic construct
  source 1..75: mol_type = other DNA
ctggtctgatgtaggaatggcgcttgtctattgttccctcgctggcggtgcactttacgccgggaactgggcgct

SEQ ID NO: 834115 - DNA, 75 bp, synthetic construct
  source 1..75: mol_type = other DNA
acacagcaacttatactcaaactataactgatgcagatattaaaagcttcgcaggtatatctggggataataatc

SEQ ID NO: 834116 - DNA, 75 bp, synthetic construct
  source 1..75: mol_type = other DNA
atggtcactgctgcgtattatcaagaatgagcacagtgactgtatccctttatccatgcacgaaatgcttaatga

SEQ ID NO: 834117 - DNA, 75 bp, synthetic construct
  source 1..75: mol_type = other DNA
tactatcgaagaaatggtagaaaaatacgccgatgcaatgtataacttccagttgcaaacattcttcaataatga

SEQ ID NO: 834118 - DNA, 75 bp, synthetic construct
  source 1..75: mol_type = other DNA
ccggttgtgtcggcgtgtatgccacagagtatgtactggaacgctacgggcgggagcttccgccggaatcgctgg

SEQ ID NO: 834119 - DNA, 75 bp, synthetic construct
  source 1..75: mol_type = other DNA
aaaaaagccccctagacacagtaagaagcaaatatatcaaagagatgtcgcagatgaccggacgtaacgtcattg

SEQ ID NO: 834120 - DNA, 75 bp, synthetic construct
  source 1..75: mol_type = other DNA
gccgggcgttacagtatggacgttgagtatggccagtacagcgtcatcctgctggttgaaggttttccgccttca

SEQ ID NO: 834121 - DNA, 75 bp, synthetic construct
  source 1..75: mol_type = other DNA
gattttaaagaaataccagctgcggatttttcatctgttgcggggagtgcggtaacaacacataaaatcggcttt

SEQ ID NO: 834122 - DNA, 75 bp, synthetic construct
  source 1..75: mol_type = other DNA
gctgatgtttatattcggggcgatattacagctccgcaaagttgcgaaataaataatttacagccagtttatttt

SEQ ID NO: 834123 - DNA, 75 bp, synthetic construct
  source 1..75: mol_type = other DNA
atgctaacaacccgtctggtaatacaaagtacaattgcaaccgcattgaacctttaagtatatctagtggggcta

SEQ ID NO: 834124 - DNA, 75 bp, synthetic construct
  source 1..75: mol_type = other DNA
gtgattaccggtaatgcacgcttttttgccgccggggccgatctcaacgaaatggcagaaaaagatctcgcggcc

SEQ ID NO: 834125 - DNA, 75 bp, synthetic construct
  source 1..75: mol_type = other DNA
taccgatagcagtatttcggtctgtgtgattaccggtaatgcacgcttttttgccgccggggccgatctcaacga

SEQ ID NO: 834126 - DNA, 75 bp, synthetic construct
  source 1..75: mol_type = other DNA
caccgaatgacaaggttcgcattgaaggagagattgacaaagactggaacagtgttgaggttgatgtaaataaaa

SEQ ID NO: 834127 - DNA, 75 bp, synthetic construct
  source 1..75: mol_type = other DNA
taacgtggttatcgccgctggcaaccaggcgcacattggcggcgcagacctgattgccgggaaggatatgagcct

SEQ ID NO: 834128 - DNA, 75 bp, synthetic construct
  source 1..75: mol_type = other DNA
cccccagggcgttatcgccgcgaacaggcagctctccatcagcagccagggcgatatcaccaacggagccacatt

SEQ ID NO: 834129 - DNA, 75 bp, synthetic construct
  source 1..75: mol_type = other DNA
ccggcaggcggcagaaagtgcagccgctgcaaagaagtcagaggaagcgtcctcgtcctcggcctctgaggccgc

SEQ ID NO: 834130 - DNA, 75 bp, synthetic construct
  source 1..75: mol_type = other DNA
tgttaaagccaccttcaccagcgatatcagtaacaccaacaccaccgccaacgcgggcaaaatcagcaacaccat

SEQ ID NO: 834131 - DNA, 75 bp, synthetic construct
  source 1..75: mol_type = other DNA
ccagtgatacgctgcaaacgcaggggcagatgaccgccgggcaaaacctgacggtaagcggtaacaccctgaccc

SEQ ID NO: 834132 - DNA, 75 bp, synthetic construct
  source 1..75: mol_type = other DNA
atgactagtcgggtggcagaaagacaggttgggccgtgtaatggtcatggagcctgtaactatatccactggaat

SEQ ID NO: 834133 - DNA, 75 bp, synthetic construct
  source 1..75: mol_type = other DNA
aagcattgccagcgtgccatccggcaaagttgaaaatcagagcgtaaaagtggcgatgcgctcggtatttaaact

SEQ ID NO: 834134 - DNA, 75 bp, synthetic construct
  source 1..75: mol_type = other DNA
ttcttctcacattgttgttggtggcgactgaactgcatgcgggtgttgtcgttggtggtacacggtttgtatttc

SEQ ID NO: 834135 - DNA, 75 bp, synthetic construct
  source 1..75: mol_type = other DNA
gtgccagcaccattactggccgctccaccgcttattctcctgaagcccggtactacgggcacgttgcgcttgctg

SEQ ID NO: 834136 - DNA, 75 bp, synthetic construct
  source 1..75: mol_type = other DNA
ggctggtcgagttttccgccgattcgcttaacccctggcggctgccgctgatcgcggtatttgataatcagcaga

SEQ ID NO: 834137 - DNA, 75 bp, synthetic construct
  source 1..75: mol_type = other DNA
aagcctggctggaggcgatgatcgccgtggcgcgctattatcggctcgatttttctcaggagaatgtgcgcgcga

SEQ ID NO: 834138 - DNA, 75 bp, synthetic construct
  source 1..75: mol_type = other DNA
ggcgactgttcttcggttcgctgcgggaaaacctcaccatggggatgccggaagccagcgatgaagatatcgaac

SEQ ID NO: 834139 - DNA, 75 bp, synthetic construct
  source 1..75: mol_type = other DNA
gattttgagtttatcagaggctttgattatacttacgaagacgaccttaaagacgccattaaattaattgatgat

SEQ ID NO: 834140 - DNA, 75 bp, synthetic construct
  source 1..75: mol_type = other DNA
ccgacatcattgccgccttacacaagcgcggcaccagtatggcgaaactctcgcgggaagcgggactggcctcgt

SEQ ID NO: 834141 - DNA, 75 bp, synthetic construct
  source 1..75: mol_type = other DNA
gataatgttgaactggatgaaaccgtagtcactgtcatcccaactcacggtgctattgccagagcaacatttaat

SEQ ID NO: 834142 - DNA, 75 bp, synthetic construct
  source 1..75: mol_type = other DNA
aggcaggagtggtggtcggcggaacgcgatttatctttccggcagacagagaatcgatatctattttactgacta

SEQ ID NO: 834143 - DNA, 75 bp, synthetic construct
  source 1..75: mol_type = other DNA
aactgttctggcgacccgaaggtttgccgggcgacccgctggaagcttatcaacaattacgctggacacggaatt

SEQ ID NO: 834144 - DNA, 75 bp, synthetic construct
  source 1..75: mol_type = other DNA
aaagtggcgatgcgctcggtatttaaactgttctggcgacccgaaggtttgccgggcgacccgctggaagcttat

SEQ ID NO: 834145 - DNA, 75 bp, synthetic construct
  source 1..75: mol_type = other DNA
ttattacgacgaagaagagaaaattgccgatgtggcgattggcaaactcaacattcaggccggagagaaaatcgc

SEQ ID NO: 834146 - DNA, 75 bp, synthetic construct
  source 1..75: mol_type = other DNA
gtgatattcacaccggcattcaccatacaatatattggtttggatctggcattttcctttgtctttattactgaa

SEQ ID NO: 834147 - DNA, 75 bp, synthetic construct
  source 1..75: mol_type = other DNA
gcagtggaacaaatttctcttcgcttcagcttgccatgtgggacggaacaacacttactttaactccgcttaagt

SEQ ID NO: 834148 - DNA, 75 bp, synthetic construct
  source 1..75: mol_type = other DNA
tggcagatatttctcaacagcacctaaccgaggagaaagaaaaggatcatatccattcaatagcccttgccctaa

SEQ ID NO: 834149 - DNA, 75 bp, synthetic construct
  source 1..75: mol_type = other DNA
acgagcgctgcctcgagcgccggcagtgcagcttcctcggcaacggcagcaggaaattccgcgaaggccgcaaaa

SEQ ID NO: 834150 - DNA, 75 bp, synthetic construct
  source 1..75: mol_type = other DNA
gttcttattaccgcgcactgagtgccgaagctaccacggcctacggtttctcgccgcgatttgtcgcacacgacg

SEQ ID NO: 834151 - DNA, 75 bp, synthetic construct
  source 1..75: mol_type = other DNA
ggtgttcttatggctgcatatcattggtggcgaaaggtcgttaacaacctgccagactgggatagtcttggatga

SEQ ID NO: 834152 - DNA, 75 bp, synthetic construct
  source 1..75: mol_type = other DNA
gtacccgacgctatgggtgctgttcgccggggtgatgatggcgatcctgtttgagttctgtatgcgcatggtgcg

SEQ ID NO: 834153 - DNA, 75 bp, synthetic construct
  source 1..75: mol_type = other DNA
ggtggcgaacgtgctggcgctggcggcgatgattttctcgatgcaggtttacgaccgggtggttccggcgcaatc

SEQ ID NO: 834154 - DNA, 75 bp, synthetic construct
  source 1..75: mol_type = other DNA
gaagccagcgatgaagatatcgaacgcgcgttaatcctcagcggggcgctgccctttgtgcagaagcagaaaaac

SEQ ID NO: 834155 - DNA, 75 bp, synthetic construct
  source 1..75: mol_type = other DNA
ttcacaccaccgcagcgaaccttgatatccgcatcccgtatgccacggacccggcgggcaaccgcctgcccgacc

SEQ ID NO: 834156 - DNA, 75 bp, synthetic construct
  source 1..75: mol_type = other DNA
cacgcagagtctccggcgtacagccaatctttggagcaatggaacaaattgtcgcccattgtgagtcatattcgc

SEQ ID NO: 834157 - DNA, 75 bp, synthetic construct
  source 1..75: mol_type = other DNA
aataaagacgataagcccttgttgcatagtgatcaggggtggcaatatcagatgcctcgttggcaacgttggttg

SEQ ID NO: 834158 - DNA, 75 bp, synthetic construct
  source 1..75: mol_type = other DNA
cgccacagttgaacgtttcgacaaagccattgtgaatgctggtcatcatgtcaaactgccgaatgtggtggttga

SEQ ID NO: 834159 - DNA, 75 bp, synthetic construct
  source 1..75: mol_type = other DNA
aaaagatgattttgataataagttaaattcgttaaagccaatagactattctaaagtgggcgatatattgaataa

SEQ ID NO: 834160 - DNA, 75 bp, synthetic construct
  source 1..75: mol_type = other DNA
aagggtaatagggtaattatacaactaaaatgtatattgaaaaaattgggactatctaattctgtaagaaaaatg

SEQ ID NO: 834161 - DNA, 75 bp, synthetic construct
  source 1..75: mol_type = other DNA
tgatgccggttgatttgaatactaattctattgcagattttgcagacagcattgttacggcaaaagggacggcag

SEQ ID NO: 834162 - DNA, 75 bp, synthetic construct
  source 1..75: mol_type = other DNA
ttttctggggcggggatttcgctggacacagaaacacacccagcgccttcaggatacgctgcgcccggaggtagc

SEQ ID NO: 834163 - DNA, 75 bp, synthetic construct
  source 1..75: mol_type = other DNA
gaaagaaatgcaagccagtaaaaaatatttattacaaccaagtagatggccgaaatgagtattattctgttcctg

SEQ ID NO: 834164 - DNA, 75 bp, synthetic construct
  source 1..75: mol_type = other DNA
aatttactcggttttccgattataaggtatatttcttaagctttttaccttcgcaggttaagaaaatatcttatg

SEQ ID NO: 834165 - DNA, 75 bp, synthetic construct
  source 1..75: mol_type = other DNA
aaagagcatttcgcatattgttgcgaaagatgctctggctgcatctctaaagacggtcagggaaaggcagaaaga

SEQ ID NO: 834166 - DNA, 75 bp, synthetic construct
  source 1..75: mol_type = other DNA
atatttgcagttgcattgggttgtacattgcgaactgataatattaaagaactaaaatatttagccgaaactgtt

SEQ ID NO: 834167 - DNA, 75 bp, synthetic construct
  source 1..75: mol_type = other DNA
gcacccacgaaaagaggtttggtatcagatcagaagttatatcgttaaagttcaagaatttgaaaattttagatg

SEQ ID NO: 834168 - DNA, 75 bp, synthetic construct
  source 1..75: mol_type = other DNA
cactccatttagtgtaccgaataacctttatttaattggtaccatgaacactgctgatcattcgcttactgcact

SEQ ID NO: 834169 - DNA, 75 bp, synthetic construct
  source 1..75: mol_type = other DNA
tctactctatgttgcgcgcaatattgcttcatcttttgctacggttcacgagcacgggcacgtcgtgacgtcgtg

SEQ ID NO: 834170 - DNA, 75 bp, synthetic construct
  source 1..75: mol_type = other DNA
gggctgtttcagcatttgcaggtcaggtttggtgacgggccgtggcaggatgttaaggggctggatgaagtgggc

SEQ ID NO: 834171 - DNA, 75 bp, synthetic construct
  source 1..75: mol_type = other DNA
caggatgtgacgctggcgctgggagagcgggtgggtcacaccattgtttatggtaccacccgtgtcggtaaaacc

SEQ ID NO: 834172 - DNA, 75 bp, synthetic construct
  source 1..75: mol_type = other DNA
agttcagcttatcagcgaggagtccccctgccattacatccgcaatatgagctctacgcagggctggcgaatgcc

SEQ ID NO: 834173 - DNA, 75 bp, synthetic construct
  source 1..75: mol_type = other DNA
ctcatcacgcgcatcaccacgccggatggcagggcatcggcgttttactataaccaccacagccagttaacgtca

SEQ ID NO: 834174 - DNA, 75 bp, synthetic construct
  source 1..75: mol_type = other DNA
gtcagcttggtctgggagaacacacctcacgcaagcgccgtgtgcctgatgtggcgcccgaacttctgcgacagg

SEQ ID NO: 834175 - DNA, 75 bp, synthetic construct
  source 1..75: mol_type = other DNA
gatgaagcgcacagagggatgggctcgtcaacggcttccagtgaagctgctaagagtactattgtacaacggctt

SEQ ID NO: 834176 - DNA, 75 bp, synthetic construct
  source 1..75: mol_type = other DNA
ccatccagaacaccatcgaagacccggatctgaccctttacttagtgctggatgaagcgcacagagggatgggct

SEQ ID NO: 834177 - DNA, 75 bp, synthetic construct
  source 1..75: mol_type = other DNA
tcgttatgattttttacgtcgttattatgtgcaggcgggtcgcatggacaaccgcacactatttaatgcacaagg

SEQ ID NO: 834178 - DNA, 75 bp, synthetic construct
  source 1..75: mol_type = other DNA
ataacgccatcgggcgttttggccgagtatcggaagtcgcggggcgggttgccggccagttatccggggaaggga

SEQ ID NO: 834179 - DNA, 75 bp, synthetic construct
  source 1..75: mol_type = other DNA
gcgggacagttgtccggtgaaggcaacagtgctgctttccgggagtttgcctggcgttttgtcaatatcattgcc

SEQ ID NO: 834180 - DNA, 75 bp, synthetic construct
  source 1..75: mol_type = other DNA
ctggcgctttgtcaatatcatcgcccgcgccctggtggccctcggtgagcgtccggactatatgctgattatgcg

SEQ ID NO: 834181 - DNA, 75 bp, synthetic construct
  source 1..75: mol_type = other DNA
ctttaccgttagcgaacgcagtaaagaaagcgggatgctggaacttaccatgactggtgatgatccccagttgat

SEQ ID NO: 834182 - DNA, 75 bp, synthetic construct
  source 1..75: mol_type = other DNA
tcggctggcccgacatcagcgcccgctacaacgctgtcggccgcttcggccgcatcagcgaggtcgctacgcgta

SEQ ID NO: 834183 - DNA, 75 bp, synthetic construct
  source 1..75: mol_type = other DNA
caggcctttgctctgctcgaaggcgggcggttgtggaaaattcgcctgccgctgccgatggcggataaacacagt

SEQ ID NO: 834184 - DNA, 75 bp, synthetic construct
  source 1..75: mol_type = other DNA
atcctgattgttccgctggcggcgggtgttatcgcaccagttgttggtcaggccgttggaacagtcgcagatcca

SEQ ID NO: 834185 - DNA, 75 bp, synthetic construct
  source 1..75: mol_type = other DNA
ttcacctctggcacagcaacgtcagaggcaatccgcgctggcgcaatcgcgctgcgtgatcagatgcgtcgcgtg

SEQ ID NO: 834186 - DNA, 75 bp, synthetic construct
  source 1..75: mol_type = other DNA
gagcagtctcgttacgattatgctcgtaccggcggtcgcggctgggctcatacgtccatgtccggccaggtcggt

SEQ ID NO: 834187 - DNA, 75 bp, synthetic construct
  source 1..75: mol_type = other DNA
atgaaggcagtttcgccgccgccgcgagacgttttaagctttcggctgcaatggcaggaaagcatgtcagcgcta

SEQ ID NO: 834188 - DNA, 75 bp, synthetic construct
  source 1..75: mol_type = other DNA
gaacagtgtataatattaataacctacatttgtttgcagatggttgtaagattataaaaaacagcctgaaggaac

SEQ ID NO: 834189 - DNA, 75 bp, synthetic construct
  source 1..75: mol_type = other DNA
cctgaacatcaacttcgccaccagtactgatcccgaagcgatgcgtaacggagctatcaagctgcgcgatacgct

SEQ ID NO: 834190 - DNA, 75 bp, synthetic construct
  source 1..75: mol_type = other DNA
ggttctacggataaatatgctgttgaattcttgataccacaattatttttcttaaacctttctggtgacggatat

SEQ ID NO: 834191 - DNA, 75 bp, synthetic construct
  source 1..75: mol_type = other DNA
atggacgttgagtacggtcagtacagcgtcattctgttggtggagggatttccgccgtcacatgccgggaccatc

SEQ ID NO: 834192 - DNA, 75 bp, synthetic construct
  source 1..75: mol_type = other DNA
tgatgtcactatattatagagaaaacccgatatacttaaatgagtgtttaaatagtcttaataatcaaactttac

SEQ ID NO: 834193 - DNA, 75 bp, synthetic construct
  source 1..75: mol_type = other DNA
caacctggaacgctacttctccgacaacttccagtccggaacgatcatggatgaaatcctgaagctgaccggtgt

SEQ ID NO: 834194 - DNA, 75 bp, synthetic construct
  source 1..75: mol_type = other DNA
ggcgaaactaagccacgtctcaaaacacgcaaagaaatcacaaaagccctcgaaggtgccagcggtgaatacgcg

SEQ ID NO: 834195 - DNA, 75 bp, synthetic construct
  source 1..75: mol_type = other DNA
ctgatgtttggcgtgagtgtccagaccgtacgcgcaacgctgtcactgctggatgccacccaggctgttcgcgat

SEQ ID NO: 834196 - DNA, 75 bp, synthetic construct
  source 1..75: mol_type = other DNA
accggtcgccttcggtgcaatgcatcttggtaggatcgtatcacgctacctggagcaatttccggaggtcagtct

SEQ ID NO: 834197 - DNA, 75 bp, synthetic construct
  source 1..75: mol_type = other DNA
taaacacattaagttgaagagagctacaataacacaaggcgaatatttattatctattcgtgatgaagtttttag

SEQ ID NO: 834198 - DNA, 75 bp, synthetic construct
  source 1..75: mol_type = other DNA
ttattatgcttctgccagatatattgaatttcattgtgataataatcatgctataaatgattattcaggctctat

SEQ ID NO: 834199 - DNA, 75 bp, synthetic construct
  source 1..75: mol_type = other DNA
tagatgaaataatcatttcatctaaactagatgtattaaaattcgaaaaacatcatcaaggtattggagtgttag

SEQ ID NO: 834200 - DNA, 75 bp, synthetic construct
  source 1..75: mol_type = other DNA
catgagctgggcattgaagatgagcgtttcaatgcgtttagatctaaaattaacgagcttggtttttacgaggta

SEQ ID NO: 834201 - DNA, 75 bp, synthetic construct
  source 1..75: mol_type = other DNA
tataaagatggcgtattgattgcaggtgcctggtatttaggacctgcagcatcaacaggtaaagtagtcagtggc

SEQ ID NO: 834202 - DNA, 75 bp, synthetic construct
  source 1..75: mol_type = other DNA
tctatatctttgacgtcaaatataaagatcgccctccgactattgatactgcagtactaacattaatagctgatc

SEQ ID NO: 834203 - DNA, 75 bp, synthetic construct
  source 1..75: mol_type = other DNA
gagataaggcattttactttgttgcgttcagggctttcagggaaaagaaaaaactccgtttgcatgtaactagcg

SEQ ID NO: 834204 - DNA, 75 bp, synthetic construct
  source 1..75: mol_type = other DNA
ggtggagggattcccgccatcacatgccgggaccattaccgtgtatgaagattcccgacccggtaccgctgaatg

SEQ ID NO: 834205 - DNA, 75 bp, synthetic construct
  source 1..75: mol_type = other DNA
aatatttacatatttttttctttcttatttatatcattgatattttttgtcgttactttcacctctagtaaaaaa

SEQ ID NO: 834206 - DNA, 75 bp, synthetic construct
  source 1..75: mol_type = other DNA
aagtgattcagcaaggaattaccggaaaagaactctctattttctcttcacgcttaaatgcaaataaatttccgg

SEQ ID NO: 834207 - DNA, 75 bp, synthetic construct
  source 1..75: mol_type = other DNA
tgaaaatacctggtttcgcactccagatgaagttgtgatacatcgctatagcggaaaggaagactgttttcgtta

SEQ ID NO: 834208 - DNA, 75 bp, synthetic construct
  source 1..75: mol_type = other DNA
aaaaaagaagcgtccttgaacagaggctctcactcgataaagaattctgcgacgagtgcttattcgatatcgatg

SEQ ID NO: 834209 - DNA, 75 bp, synthetic construct
  source 1..75: mol_type = other DNA
tgcggtgcatatttgctggatggaaaaacgtaatgatgcacatgaagacctagaccatcagatgcttggtatcgt

SEQ ID NO: 834210 - DNA, 75 bp, synthetic construct
  source 1..75: mol_type = other DNA
tggctctattccagatgattatataatttcaataattacagataatgtcaatgttgaatattttgaatcaactat

SEQ ID NO: 834211 - DNA, 75 bp, synthetic construct
  source 1..75: mol_type = other DNA
tatcaaaagcatgacaattttagtttccagttgtttgagtatgacaccgataatattgaaaaaaacattgagata

SEQ ID NO: 834212 - DNA, 75 bp, synthetic construct
  source 1..75: mol_type = other DNA
attaccaaaaaaaaaccgcctgctaaggcggtggtcaaatcagtaagtgctgaagagtattattataatacaagt

SEQ ID NO: 834213 - DNA, 75 bp, synthetic construct
  source 1..75: mol_type = other DNA
taaagcggttatatcacatggaggttttagtagttttcacttacaacaccacacattaaataatgaaaaagatgc

SEQ ID NO: 834214 - DNA, 75 bp, synthetic construct
  source 1..75: mol_type = other DNA
aattaaagaaaattgatccattctcaaccccgttggaaatatgggatgacagagagccgacaaatgaagaagttg

SEQ ID NO: 834215 - DNA, 75 bp, synthetic construct
  source 1..75: mol_type = other DNA
tctagaaaatggccacaacgtccagtcaaatgtattgtctttaacgagagtcacaaaagccaatagcttaactca

SEQ ID NO: 834216 - DNA, 75 bp, synthetic construct
  source 1..75: mol_type = other DNA
tgcggtagtggcaggtgaagtgcgcaatcttgccagccgtagcgcgcaggcagcaaaagagatcaaagggctgat

SEQ ID NO: 834217 - DNA, 75 bp, synthetic construct
  source 1..75: mol_type = other DNA
gcaaaaaatgccgcgacaacggcgcaggcgggcggtgttcaggtcagtaccatgactcacaccatgcaggagatc

SEQ ID NO: 834218 - DNA, 75 bp, synthetic construct
  source 1..75: mol_type = other DNA
ggcaacggacaactggcgaatcaggccgaccatctttcgtcgcgtgtggcggtatttacccttgaagaacatgaa

SEQ ID NO: 834219 - DNA, 75 bp, synthetic construct
  source 1..75: mol_type = other DNA
cttactggatttgcccctatatttccagacatctgttatcacttaacccattacaagcccgctgccgcagatatt

SEQ ID NO: 834220 - DNA, 75 bp, synthetic construct
  source 1..75: mol_type = other DNA
gcgccagcctcctggaggcgatgagcacagcagccgctcccgtagaattaaacaaaagtgctgaagacgtgctat

SEQ ID NO: 834221 - DNA, 75 bp, synthetic construct
  source 1..75: mol_type = other DNA
tgaaggcaagtcttgatgagctaacacctgaacaacgcgccgcgcttgagcgtctgggttacgatatcaatcagg

SEQ ID NO: 834222 - DNA, 75 bp, synthetic construct
  source 1..75: mol_type = other DNA
ttatctttgctttatgatataaaaaaagatatttattcctataataggattaatgttgagttaataaaaacgatg

SEQ ID NO: 834223 - DNA, 75 bp, synthetic construct
  source 1..75: mol_type = other DNA
tggctggagaagctgctgcgcgaacaattgattgtgctcgatggagaacagatccggctcccggatacgggggaa

SEQ ID NO: 834224 - DNA, 75 bp, synthetic construct
  source 1..75: mol_type = other DNA
atggaaaggagaacccggtggtgtgattgcagaatgtcatgttaactgcctggttgaaacagatgttcaggctta

SEQ ID NO: 834225 - DNA, 75 bp, synthetic construct
  source 1..75: mol_type = other DNA
cagtatttaaaaatgttgcagagtatttaaaagggcgcttccctcataagtcgttagggctcgtatatgccgacg

SEQ ID NO: 834226 - DNA, 75 bp, synthetic construct
  source 1..75: mol_type = other DNA
ctgtcggcagcgacacgagctgaaaaggcggcagaccgcgcagaagccgcagcggaagtgactgcagagccctat

SEQ ID NO: 834227 - DNA, 75 bp, synthetic construct
  source 1..75: mol_type = other DNA
actgcgaccatcgcggcctgccgctggcgctcatcagcacggaaggggcaacagcgtggtgcgcagaatacgatg

SEQ ID NO: 834228 - DNA, 75 bp, synthetic construct
  source 1..75: mol_type = other DNA
agtcctcacaggtagggctgcataaatcactgatggtgggaatgggctacagcgtcaatgtggggaataacgtca

SEQ ID NO: 834229 - DNA, 75 bp, synthetic construct
  source 1..75: mol_type = other DNA
tgagatactaacctcaacacttaagcgacctttcgatgattcttctagaatagagtataaaaataaaatagacga

SEQ ID NO: 834230 - DNA, 75 bp, synthetic construct
  source 1..75: mol_type = other DNA
agtggtgatatacgacggaatgacaccttatcgggaaaatcacctgatgctggatgtgtcgcaaagcgatagcga

SEQ ID NO: 834231 - DNA, 75 bp, synthetic construct
  source 1..75: mol_type = other DNA
gcagccaatccggctactgtgctggcactactggatgaacgggaaagaaaccagcaatacataaaacgccgcgac

SEQ ID NO: 834232 - DNA, 75 bp, synthetic construct
  source 1..75: mol_type = other DNA
ttcaaattcctggccggaccagaaaccgtgctggcactactggatgaacgggaaagaaaccagcaatacatcaaa

SEQ ID NO: 834233 - DNA, 75 bp, synthetic construct
  source 1..75: mol_type = other DNA
ccggtgttaacggctgtgccagtaaaaaagagtggtgatgatctgcctgaggcggactttgaagcctgggccacg

SEQ ID NO: 834234 - DNA, 75 bp, synthetic construct
  source 1..75: mol_type = other DNA
ctgtaactgtaggacaacttaatgaaagtttctccagtttaaaacagtataccgacagaaaggtggattctcttg

SEQ ID NO: 834235 - DNA, 75 bp, synthetic construct
  source 1..75: mol_type = other DNA
aaccagcggggaaacattagcggatttgaccagtcacaaccgcagtcagggagataccctgatggtagacaatag

SEQ ID NO: 834236 - DNA, 75 bp, synthetic construct
  source 1..75: mol_type = other DNA
cgcggcgcgctcttatcagcaatcaatcacctgtttactgagaacaatctggatacagaagccatcactgtcagt

SEQ ID NO: 834237 - DNA, 75 bp, synthetic construct
  source 1..75: mol_type = other DNA
gttaaagaaagcgtacctaaaaaccctaactcttcaagtgcaattacagatgctgaagccggaggctattcttac

SEQ ID NO: 834238 - DNA, 75 bp, synthetic construct
  source 1..75: mol_type = other DNA
aggctgtctgggcatcattaaaattattttctatatttttatctttgctggtttgatagggaaaatactccatct

SEQ ID NO: 834239 - DNA, 75 bp, synthetic construct
  source 1..75: mol_type = other DNA
ataaccgataccgtcgcgggcagtgactttccagtggcggtgagctggattatctgggggaagtcagcgctgaac

SEQ ID NO: 834240 - DNA, 75 bp, synthetic construct
  source 1..75: mol_type = other DNA
ctgaaccacggattcggtagcaataccgtcatgaaaataaccggtctgactgaagacgatctggcgcagatccgc

SEQ ID NO: 834241 - DNA, 75 bp, synthetic construct
  source 1..75: mol_type = other DNA
accactctgcgcccttcaccactggcgaagggaaacccgcagcacactaatctggtcgagatcgaaaaaatataa

SEQ ID NO: 834242 - DNA, 75 bp, synthetic construct
  source 1..75: mol_type = other DNA
actgaaggtcgcacgcaggaacaatggttacaacatctgtacgccaaaatgcttgccaaagatccggcgttaccg

SEQ ID NO: 834243 - DNA, 75 bp, synthetic construct
  source 1..75: mol_type = other DNA
ttgtacaggattcaccattttatagtggaagagatctttattggttacgtcctaaagttgaactgactctggaag

SEQ ID NO: 834244 - DNA, 75 bp, synthetic construct
  source 1..75: mol_type = other DNA
aaagtgaaacccagcatagctggaactatgctgggtcaatctgtaaaaacttgcatcaatgctttacttcgagct

SEQ ID NO: 834245 - DNA, 75 bp, synthetic construct
  source 1..75: mol_type = other DNA
cgggacaattgtcacggatattgatgacagcgtatgggccgggcagaatgtttctccgaaagacaaagtaagaat

SEQ ID NO: 834246 - DNA, 75 bp, synthetic construct
  source 1..75: mol_type = other DNA
tatggtgagcctactggctctttccttgctcctaaaggtactccttacgaacaacgagctctagcgccaggaact

SEQ ID NO: 834247 - DNA, 75 bp, synthetic construct
  source 1..75: mol_type = other DNA
gtcaccattgagtgtgaaaatttaggaatactaaatactgatgatatcagtacctctttttatgctaccgaaccc

SEQ ID NO: 834248 - DNA, 75 bp, synthetic construct
  source 1..75: mol_type = other DNA
gcggcgacctgaaggttatgagtgaaaccgtctcagagcaactggagataatccgcagctcctttaaggtcatcg

SEQ ID NO: 834249 - DNA, 75 bp, synthetic construct
  source 1..75: mol_type = other DNA
tgatttataaaagtcgtgttagtgttggtagcgtgattgtacttttggtgttttgcatatatctattcatgcctc

SEQ ID NO: 834250 - DNA, 75 bp, synthetic construct
  source 1..75: mol_type = other DNA
acattaagtactcaacccggtagttcattgcacagaagctctgatttaggtacatcatggaattctcttcgcttc

SEQ ID NO: 834251 - DNA, 75 bp, synthetic construct
  source 1..75: mol_type = other DNA
agggagagttatttaaaattacagatacaccgtggtacaacgcctggacgcaggataaaacgtttgtatatgaca

SEQ ID NO: 834252 - DNA, 75 bp, synthetic construct
  source 1..75: mol_type = other DNA
gcttaatggtggtcctgaagcgctcagggatataatgttgagaatggtttcaggttcaggtaacacacaatcaca

SEQ ID NO: 834253 - DNA, 75 bp, synthetic construct
  source 1..75: mol_type = other DNA
gtaactttttctgctgcccctgcgagcctcactggtgcacgacccgcgccaggaacatttactgctacggcaact

SEQ ID NO: 834254 - DNA, 75 bp, synthetic construct
  source 1..75: mol_type = other DNA
actattgagtgtgaaaacatggggttactgaatacagacgatatcaccacatcattttatgctactgaatccagt

SEQ ID NO: 834255 - DNA, 75 bp, synthetic construct
  source 1..75: mol_type = other DNA
cagtcatcaactactggaacggggacaggttgcctgccattttcaagacataaccctcaacaccccccgaaatcg

SEQ ID NO: 834256 - DNA, 75 bp, synthetic construct
  source 1..75: mol_type = other DNA
tagatgtcttaatgtggtcttctccaaaaaatgtgttggaattgctaaataaatatactctgataacaagcgggc

SEQ ID NO: 834257 - DNA, 75 bp, synthetic construct
  source 1..75: mol_type = other DNA
gagacaaacagcaatggctggttcccggatacagatggtgcgctcatcaccggactgacctttcttgaccccaaa

SEQ ID NO: 834258 - DNA, 75 bp, synthetic construct
  source 1..75: mol_type = other DNA
aaaggtatctgtactccggataatggcgtttttcatagcgtgcttgattttcctggatatgttattacggcagct

SEQ ID NO: 834259 - DNA, 75 bp, synthetic construct
  source 1..75: mol_type = other DNA
aactggcgcgtgaaattggcacagcaaaacccgcttatatctgccagggctgggggccacaacgccaggcaaacg

SEQ ID NO: 834260 - DNA, 75 bp, synthetic construct
  source 1..75: mol_type = other DNA
tcggtgaaacactcacgttgatggaagcagataaacgcacgccgactgaggcattatctctttcctatcctaaaa

SEQ ID NO: 834261 - DNA, 75 bp, synthetic construct
  source 1..75: mol_type = other DNA
ttggaatctcaccatggggttgtactggacccgtccttggttctaccctactttagatagccagtcgcagtatta

SEQ ID NO: 834262 - DNA, 75 bp, synthetic construct
  source 1..75: mol_type = other DNA
cttatgacatcagtcatctggtgcaggatggctgtttcttggaagaggctaagatccaactcacacttcagcgcc

SEQ ID NO: 834263 - DNA, 75 bp, synthetic construct
  source 1..75: mol_type = other DNA
cctgaaccagcagtcacgcgacgccatcgcgcagaacctcacccttgagccgatcatgggtaagcgcttgaacgt

SEQ ID NO: 834264 - DNA, 75 bp, synthetic construct
  source 1..75: mol_type = other DNA
atctatgtgggaggatgcaaaatcgggggcatgtactaatggtctttgcggcacactatccgctatgataggtcc

SEQ ID NO: 834265 - DNA, 75 bp, synthetic construct
  source 1..75: mol_type = other DNA
gcgattcctcagggaaaatcctaacgttgacgttctttttcgcgaaaagatgcccgcgatgcaaatggccctgct

SEQ ID NO: 834266 - DNA, 75 bp, synthetic construct
  source 1..75: mol_type = other DNA
cactttgagcaatttgctatcgaagacaaaaccggcgatgcatttaccctggtgcttgcccgttccggaaaagag

SEQ ID NO: 834267 - DNA, 75 bp, synthetic construct
  source 1..75: mol_type = other DNA
cgcttagagattccagaacacgatgataacattgactcttcaaaggaattaagaatatttatcgccatcccttta

SEQ ID NO: 834268 - DNA, 75 bp, synthetic construct
  source 1..75: mol_type = other DNA
cgtacaggcgcaggccgggatcgtgattggcggtacgcgcgtgatttatgacggggataaaaaagagacggccgc

SEQ ID NO: 834269 - DNA, 75 bp, synthetic construct
  source 1..75: mol_type = other DNA
ttgcggttctgctggtggttgtcgtaattatcatcgcggtgctctgtgttctgctggcacgcagcaatgcagcac

SEQ ID NO: 834270 - DNA, 75 bp, synthetic construct
  source 1..75: mol_type = other DNA
tcttaatagcgaacgtaccttagcagggctggccgtagccagggcaaaagggcgagttggtggtcgcaggcctaa

SEQ ID NO: 834271 - DNA, 75 bp, synthetic construct
  source 1..75: mol_type = other DNA
gcgacattaccctcacttttgccacgggcgtcatgcgctggagatgcagcatattctcggggcgctatcgctgga

SEQ ID NO: 834272 - DNA, 75 bp, synthetic construct
  source 1..75: mol_type = other DNA
ccggcatatcagccagtaaggcggaagcgagcgccgcaaatgctgatacttcagcaggggatgcatcggagtcag

SEQ ID NO: 834273 - DNA, 75 bp, synthetic construct
  source 1..75: mol_type = other DNA
caacaaaggcgggaagctcaccatcctgcaggaagatcagggtcagctgttcgggatcactggcgcggtggatgg

SEQ ID NO: 834274 - DNA, 75 bp, synthetic construct
  source 1..75: mol_type = other DNA
tgcccgatttcctgggcgaactggatgccggcgtgttcatgaacaagatcgcggcagctttaaacactaccgcgc

SEQ ID NO: 834275 - DNA, 75 bp, synthetic construct
  source 1..75: mol_type = other DNA
atggcaacagcaccacggatattgaaaacagcaagctggtcgtgatgtttggtaacaacccggcagaaacccgca

SEQ ID NO: 834276 - DNA, 75 bp, synthetic construct
  source 1..75: mol_type = other DNA
ccggtaacatgggatctcattttcctccagcctgtcaccagcgaaaaattcgaacgcaaaccgatttactggatc

SEQ ID NO: 834277 - DNA, 75 bp, synthetic construct
  source 1..75: mol_type = other DNA
aatcgaccatggcggctgtgtgaatacgctaaccactctgcgcccttcaccactggcgaagggaaacccgcagca

SEQ ID NO: 834278 - DNA, 75 bp, synthetic construct
  source 1..75: mol_type = other DNA
ggtagtagtaccaatcttcccgctggaagagtggtcactgttttactcggtagcaacacctaccagggggtgacc

SEQ ID NO: 834279 - DNA, 75 bp, synthetic construct
  source 1..75: mol_type = other DNA
tttgggtgttcatacaaagaaatcagcgaggagcagtttaccgaagctctgtccttgctgctcgcgttccgcttg

SEQ ID NO: 834280 - DNA, 75 bp, synthetic construct
  source 1..75: mol_type = other DNA
ggaattaacaatgagccttatgttcctatgaagcctgttgttgaaggtatggggatggtttgggctgctcaattt

SEQ ID NO: 834281 - DNA, 75 bp, synthetic construct
  source 1..75: mol_type = other DNA
aagcgaaggccaagcggatactggcggctctgtatatggttctgactcatcgctacgaatggcagctatacgttg

SEQ ID NO: 834282 - DNA, 75 bp, synthetic construct
  source 1..75: mol_type = other DNA
tcttacaagatttttatcgctacttgaaaaaaattcatcaacataatcgccatgactatctgcaccgtgagtatg

SEQ ID NO: 834283 - DNA, 75 bp, synthetic construct
  source 1..75: mol_type = other DNA
gcgatgacattattaatgccacagaaaaaggcgcggcgttaacgctgactggcaccacgcagctggtggaaaccg

SEQ ID NO: 834284 - DNA, 75 bp, synthetic construct
  source 1..75: mol_type = other DNA
gataagccagcagttcagccgggtacggcaggcgcatccgtcggtggccccgcagtgggtgacgcggacgaatca

SEQ ID NO: 834285 - DNA, 75 bp, synthetic construct
  source 1..75: mol_type = other DNA
acgcagctaaggctaatgggaaacaaggtgttcttgatgagttagatgctatcagggatgacctgctttttaata

SEQ ID NO: 834286 - DNA, 75 bp, synthetic construct
  source 1..75: mol_type = other DNA
ccatcacggcgtaaactcggcggtcgttccgttggctggtctttatccgaagttctggcatggaaggacagccgc

SEQ ID NO: 834287 - DNA, 75 bp, synthetic construct
  source 1..75: mol_type = other DNA
ttcctcgatattatcggcggaatgggtaatgactctaacttattgatagtgttttatgttcagataatgcccgat

SEQ ID NO: 834288 - DNA, 75 bp, synthetic construct
  source 1..75: mol_type = other DNA
cctcgttctttgcggtactggttattctgatgacgggtaatgactccaacttattgatagtgttttatgttcaga

SEQ ID NO: 834289 - DNA, 75 bp, synthetic construct
  source 1..75: mol_type = other DNA
acctggaaaacatttaactattttaccttatggatgggttcggttcataacgttcccaattatgtgatggtcggc

SEQ ID NO: 834290 - DNA, 75 bp, synthetic construct
  source 1..75: mol_type = other DNA
catgatattagtgataaattggttccttattttcatgttacgcctgaatcggagaatgcgaattataagacatag

SEQ ID NO: 834291 - DNA, 75 bp, synthetic construct
  source 1..75: mol_type = other DNA
tggcgtttaccatttcagatgttgaacgtctcgaccctgtcagggtgatgattgaaaactatgaacctggtaagg

SEQ ID NO: 834292 - DNA, 75 bp, synthetic construct
  source 1..75: mol_type = other DNA
gaacaggacggaattccatcattgcactcaatgattcaggggctgtttcatccggtacgtctgctggatgtgatt

SEQ ID NO: 834293 - DNA, 75 bp, synthetic construct
  source 1..75: mol_type = other DNA
attcatactcaactgggtaaaggcgaaattaccgaaatcaataccggacatgccgggcaattgctgcgcttattg

SEQ ID NO: 834294 - DNA, 75 bp, synthetic construct
  source 1..75: mol_type = other DNA
tattacggcccaggcagcgtagacgtattaaagaaaatacgagagcgaacgacccggaaataatcgttattaagc

SEQ ID NO: 834295 - DNA, 75 bp, synthetic construct
  source 1..75: mol_type = other DNA
tttttcatcacctgttgctgtcagaagaagtcattacactgacttttttgagctggccgagatttttagtgtttt

SEQ ID NO: 834296 - DNA, 75 bp, synthetic construct
  source 1..75: mol_type = other DNA
ttattttatctctcggcggtaaatttattccggtcatggaaccgttatcgcgtgtttcatggtttgtcggcgtca

SEQ ID NO: 834297 - DNA, 75 bp, synthetic construct
  source 1..75: mol_type = other DNA
gcagagcgggctgtgtcatttgcgcaggaatacaaagatgacaaggttatttataccgtcgcaagtggtgccggt

SEQ ID NO: 834298 - DNA, 75 bp, synthetic construct
  source 1..75: mol_type = other DNA
gcaacattttggccagccagggggataaagggggcgtaaaatacgtttattacgtggcctgtggtggctcttatg

SEQ ID NO: 834299 - DNA, 75 bp, synthetic construct
  source 1..75: mol_type = other DNA
acttcctgaaaaaatatggccgccgcatcgaagtggtggacgcgaaagagctggggctttctaccatcaggccga

SEQ ID NO: 834300 - DNA, 75 bp, synthetic construct
  source 1..75: mol_type = other DNA
cggaaatggcggccatggcccgcagggatgtgatgagtcgtttcagtatggaggtaacccttgacaggctgttgt

SEQ ID NO: 834301 - DNA, 75 bp, synthetic construct
  source 1..75: mol_type = other DNA
tttggtaatgtcttcatttccaagatcgatggggtaagttacaaacgccccattgactactcgcttgtgtgcaac

SEQ ID NO: 834302 - DNA, 75 bp, synthetic construct
  source 1..75: mol_type = other DNA
caatcagcatcaaaccccggtggcgctgtattcaattctgacgctggtggccaggcagcacggtgattttgtcga

SEQ ID NO: 834303 - DNA, 75 bp, synthetic construct
  source 1..75: mol_type = other DNA
tgggcgatttcgttggttgggatcggtccaatcctcgactacatccccagtggtgtacagaaagcagaaaacagt

SEQ ID NO: 834304 - DNA, 75 bp, synthetic construct
  source 1..75: mol_type = other DNA
tttaactctcggtggtgatttcactctgttaggactttctctacccggcctgattaccttcttgtttttttggct

SEQ ID NO: 834305 - DNA, 75 bp, synthetic construct
  source 1..75: mol_type = other DNA
ttgcggtctgggcggcaccggcggtgagcgcatccgactttacgcaaaacgcccactcgtttcgtgagcaggcgc

SEQ ID NO: 834306 - DNA, 75 bp, synthetic construct
  source 1..75: mol_type = other DNA
gtcgggttgtacaacagcggcgaatttattaataacccgcccgtggcgctgggcgacaacgccgtggtggtggtg

SEQ ID NO: 834307 - DNA, 75 bp, synthetic construct
  source 1..75: mol_type = other DNA
atggaaaaacgctccggcattcttatgataagagtcgccgcagggtgcgattcatgtcattagtgcgttctcaac

SEQ ID NO: 834308 - DNA, 75 bp, synthetic construct
  source 1..75: mol_type = other DNA
atggaacatcagagaaaactattccagcaacgcggatatagcgaagatttattaccgaaaacgcaaaatcaacgt

SEQ ID NO: 834309 - DNA, 75 bp, synthetic construct
  source 1..75: mol_type = other DNA
gacagtcgggattattttagtggtgagccacaagcgcaattatcctgcctcaaccgcgcggcggaatttgttctg

SEQ ID NO: 834310 - DNA, 75 bp, synthetic construct
  source 1..75: mol_type = other DNA
acctccaatgggtattaattaataaccaaactgcagtttgcgtgacaccagagcaattaacattattaggattta

SEQ ID NO: 834311 - DNA, 75 bp, synthetic construct
  source 1..75: mol_type = other DNA
ttaagtatgcgcttgatgaaatcacaaagaaaaaatccccggtggccgccggggactctaagcaaattgatatgc

SEQ ID NO: 834312 - DNA, 75 bp, synthetic construct
  source 1..75: mol_type = other DNA
aaacgtgaaatcgagacacaaaaacataataaacttaatattaaggaagacaaaatgactcaacaagtccgtact

SEQ ID NO: 834313 - DNA, 75 bp, synthetic construct
  source 1..75: mol_type = other DNA
tcatcatcgggggaatcattggcatcctggtttcgcgtcctgcgccattgcgggtatctgaagatcctgcctctc

SEQ ID NO: 834314 - DNA, 75 bp, synthetic construct
  source 1..75: mol_type = other DNA
cattgtcagtgccgggatgtcgctggtacacacacccacgcaactctatgttatgcgattcttactcggcatggc

SEQ ID NO: 834315 - DNA, 75 bp, synthetic construct
  source 1..75: mol_type = other DNA
ccaaactgcagtttgcgtgacaccagagcaattaacattattaggctttactgatgagtttattgaagaagctca

SEQ ID NO: 834316 - DNA, 75 bp, synthetic construct
  source 1..75: mol_type = other DNA
cttcagaagatcgctcatgctactggagttagtccggcttggttactaggtgaggaaacaggtcaatctcaagat

SEQ ID NO: 834317 - DNA, 75 bp, synthetic construct
  source 1..75: mol_type = other DNA
gattagagaaacttctcgctatgacaggcgattccatgcgtgatctggcacaaaaatgtgatatcccgtactcta

SEQ ID NO: 834318 - DNA, 75 bp, synthetic construct
  source 1..75: mol_type = other DNA
ttctggatcaacgctggtgtgtccattcttggtttactgttaattctcggacctccggaatcaaaagcaccagtg

SEQ ID NO: 834319 - DNA, 75 bp, synthetic construct
  source 1..75: mol_type = other DNA
atattgacagtactgaagcaataaataataacgtaagcgtcgaagattttaaacgtgaaatcgagacacaaaaac

SEQ ID NO: 834320 - DNA, 75 bp, synthetic construct
  source 1..75: mol_type = other DNA
taaaatggaagttgaaaaagaactaaataacattaatgcagaattgaaagcaattgaagatgctaaagctgaaga

SEQ ID NO: 834321 - DNA, 75 bp, synthetic construct
  source 1..75: mol_type = other DNA
gaattgactgaatggcatcgtgttgctgtatccgggaaactggctgaggttgtggggcagtatgtgaaaaaaggt

SEQ ID NO: 834322 - DNA, 75 bp, synthetic construct
  source 1..75: mol_type = other DNA
taattcatatacaagatttcgaggttgatgctatgctcggcttgggtatggctaagaaaggtgtgtttgctacat

SEQ ID NO: 834323 - DNA, 75 bp, synthetic construct
  source 1..75: mol_type = other DNA
ttttcgcgttgttaattttagcaacgctgataaaccgttttctgatatggcggttaccggagagaaaagggggtg

SEQ ID NO: 834324 - DNA, 75 bp, synthetic construct
  source 1..75: mol_type = other DNA
cccataggggaaaggacgagtaatagcatcaatagttccgttcactggacagttcttggtcctttattgaaacag

SEQ ID NO: 834325 - DNA, 75 bp, synthetic construct
  source 1..75: mol_type = other DNA
gtgcgagtgctgctggtgagggcgagttgcttattggctggagtggtacgagcggtgcacatgcgccagttttca

SEQ ID NO: 834326 - DNA, 75 bp, synthetic construct
  source 1..75: mol_type = other DNA
aatgatgatgtttatatgggtgtgctggcacaggcagagaattttaaagaacatcatatgagtgctttaaattaa

SEQ ID NO: 834327 - DNA, 75 bp, synthetic construct
  source 1..75: mol_type = other DNA
cggacgttccgaactggcgcagttaattttcggcgtgcgcaaagcgacaggcggaatgattgaagtcgatggtga

SEQ ID NO: 834328 - DNA, 75 bp, synthetic construct
  source 1..75: mol_type = other DNA
ctgccgctggtagtcttcgagtttaaatcggcggtacgtgaagaagaggccaccacctatgacgcttggcgccaa

SEQ ID NO: 834329 - DNA, 75 bp, synthetic construct
  source 1..75: mol_type = other DNA
ggcgcgcagtctcgcccgcagcagtccgctccggcagcgccgtcaaatgagccgccgatggactttgatgacgat

SEQ ID NO: 834330 - DNA, 75 bp, synthetic construct
  source 1..75: mol_type = other DNA
ggaaaagcttctcgccaacagccagcagcagaaaaaagccctgattcagcaattgcttaccgggaagaaacggtt

SEQ ID NO: 834331 - DNA, 75 bp, synthetic construct
  source 1..75: mol_type = other DNA
ttgatgccgaaacgcaacgcgcaggcgctggcctacgcggaacgcacgctcgagaaagataacgtgctgagtcaa

SEQ ID NO: 834332 - DNA, 75 bp, synthetic construct
  source 1..75: mol_type = other DNA
tccgtaatgatggatcgaacacatatttcatgctaacagcatcaggagacacattaggttcatggaacggtttgc

SEQ ID NO: 834333 - DNA, 75 bp, synthetic construct
  source 1..75: mol_type = other DNA
tgcgtacccgcaaatggaccgatcagtccggccaggatcgctacacgacagaagttgtcgtaaacgtcggcggca

SEQ ID NO: 834334 - DNA, 75 bp, synthetic construct
  source 1..75: mol_type = other DNA
ggcgcgcagtctcgcccgcagcagtccgctccggcagcgccgtctaacgagccaccgatggactttgatgacgat

SEQ ID NO: 834335 - DNA, 75 bp, synthetic construct
  source 1..75: mol_type = other DNA
aaacatcgaaagcggaaatcattgggaatggcgtggatgagacgacgctgacagcaacagtgaaagatccttttg

SEQ ID NO: 834336 - DNA, 75 bp, synthetic construct
  source 1..75: mol_type = other DNA
tcaatgtgaacttcgcattaaaaagaggctttgcctttgccacattaacgtcattaacagcggtgaccgatcaaa

SEQ ID NO: 834337 - DNA, 75 bp, synthetic construct
  source 1..75: mol_type = other DNA
accagagcacatgaccatcagccaaaatattgtctctactgatacgcatggtatagccgaggtctccatgacgcc

SEQ ID NO: 834338 - DNA, 75 bp, synthetic construct
  source 1..75: mol_type = other DNA
agtgattaactggaactgtggtgccacacaacctgtaccggatgcgcctgtgccgaaagatttaccccccggaat

SEQ ID NO: 834339 - DNA, 75 bp, synthetic construct
  source 1..75: mol_type = other DNA
gcatcgaagatcggcggtgggttgagcagcagctcaccgacgagaaagagaagtggatcgacgaccgggcgaaag

SEQ ID NO: 834340 - DNA, 75 bp, synthetic construct
  source 1..75: mol_type = other DNA
cgagggtgcgaccctgacggcaagtgtcactgacgcttatgacaatccattagaaggcatcaaggtcaatttccg

SEQ ID NO: 834341 - DNA, 75 bp, synthetic construct
  source 1..75: mol_type = other DNA
ctccctgaccggcacgttagcgggcacgcatatgatcacggctcgtctggctaacagcaatgtcagcgatacaca

SEQ ID NO: 834342 - DNA, 75 bp, synthetic construct
  source 1..75: mol_type = other DNA
ctcctgggtaggcgttgatgctactggtaaagtgacattcaaaaatgacggtgatagcaatactgtaataatcac

SEQ ID NO: 834343 - DNA, 75 bp, synthetic construct
  source 1..75: mol_type = other DNA
ggttttaccgcatcatcaagctcattcaccgcgagcacaaccgagggcgcgcccctgacggcaagcgtcactgac

SEQ ID NO: 834344 - DNA, 75 bp, synthetic construct
  source 1..75: mol_type = other DNA
tcgctgaaattcttgtgacaagcaccgaagtcggactgaaaacagtttcagcctctctggcagataaacctactg

SEQ ID NO: 834345 - DNA, 75 bp, synthetic construct
  source 1..75: mol_type = other DNA
atacttccggtaaggtgacattcaaaaatgtcggagatagaaatgctgtaataatcacggcgaccccaagatcag

SEQ ID NO: 834346 - DNA, 75 bp, synthetic construct
  source 1..75: mol_type = other DNA
ccaatcaacaggtgaattttattggtgatcaaagtactgctgccctgaccctcagtgtgcccccaggcgagatca

SEQ ID NO: 834347 - DNA, 75 bp, synthetic construct
  source 1..75: mol_type = other DNA
cccgttgccatgtttaacccctcatgtttttggtgtaagacaatatacacgaaaaaaaaatattttgaagggttg

SEQ ID NO: 834348 - DNA, 75 bp, synthetic construct
  source 1..75: mol_type = other DNA
caaaaatttatggtgtgtttccgtttatactgggattcgccctggtgaactctgtgcgcttggatgggaagatat

SEQ ID NO: 834349 - DNA, 75 bp, synthetic construct
  source 1..75: mol_type = other DNA
ttagaaaatataaagctttcgaaaagctttttagtgaaattgtatttacgccagatgaatgtaatattgtgagaa

SEQ ID NO: 834350 - DNA, 75 bp, synthetic construct
  source 1..75: mol_type = other DNA
cgccattatttgcttatgattctctcagtgaaaaatggtctctggctggagtcaccctgcataataatggtgtta

SEQ ID NO: 834351 - DNA, 75 bp, synthetic construct
  source 1..75: mol_type = other DNA
agatagatggaaacctgactgcaacgaggactggcggtctttatggggctgttatcgaaaatacaggcggggact

SEQ ID NO: 834352 - DNA, 75 bp, synthetic construct
  source 1..75: mol_type = other DNA
gtatcaaagtaaaacgctgacactttttaatgataccagtagtaaaaaagagaaaaagagaaccgatgggctatg

SEQ ID NO: 834353 - DNA, 75 bp, synthetic construct
  source 1..75: mol_type = other DNA
caaattggccagatgccacctgaattcagcacgtgtggcatgggttgaaaaacactgtattagttctgattcaga

SEQ ID NO: 834354 - DNA, 75 bp, synthetic construct
  source 1..75: mol_type = other DNA
catttctatcggtattagttggatattcagaggattagccagttcggcttcaaggcgagcacaggtttctaactg

SEQ ID NO: 834355 - DNA, 75 bp, synthetic construct
  source 1..75: mol_type = other DNA
cctgtaaagcaatgcgccgtagtacctcacgccacggcgctgatagtgattattctgattctttggtcttgcggc

SEQ ID NO: 834356 - DNA, 75 bp, synthetic construct
  source 1..75: mol_type = other DNA
acgtgtaagacaccgttattttacattgtgtcttacaccttgttgatgcaaggtacagaaaagacgaaaccccgc

SEQ ID NO: 834357 - DNA, 75 bp, synthetic construct
  source 1..75: mol_type = other DNA
cgtcacgcagcgaccagcaaatatcatttggattaaatgtgccgtttggtgatattacgacttcgctgaattaca

SEQ ID NO: 834358 - DNA, 75 bp, synthetic construct
  source 1..75: mol_type = other DNA
gaggatgttgaagttgccctcgaaaagtggtgcgctgagggagaatttagcgaaaatcgtcatgaggttgcatca

SEQ ID NO: 834359 - DNA, 75 bp, synthetic construct
  source 1..75: mol_type = other DNA
atacacacacaaacgccccggaaacggaataatccgtttcatagttcggttttgtgcactcatcctggcggtcgg

SEQ ID NO: 834360 - DNA, 75 bp, synthetic construct
  source 1..75: mol_type = other DNA
gcaacgctaactgcaacggttaaagatcagttcgacaatgaggtgaacaatcttccggtaacattcagctcagcc

SEQ ID NO: 834361 - DNA, 75 bp, synthetic construct
  source 1..75: mol_type = other DNA
atcatatatctggccgtcctatatcactaagcattgattctcttaaagagattaatacaccgtcaattttattat

SEQ ID NO: 834362 - DNA, 75 bp, synthetic construct
  source 1..75: mol_type = other DNA
atgactggttttctatacatgacctagacacctggagcgtgacggaccgcctcatcaataagatacaaaaggaaa

SEQ ID NO: 834363 - DNA, 75 bp, synthetic construct
  source 1..75: mol_type = other DNA
ttcaggctctcgtcagcagcccagatgaaataaaaaacctgtaccgtcgctgtcgtaacggctatgaaaaactgc

SEQ ID NO: 834364 - DNA, 75 bp, synthetic construct
  source 1..75: mol_type = other DNA
tgattcagaaggtagtgcacgaatgtgtccaggctggggtaaaagagattatcctggtgacgcactcctctaaga

SEQ ID NO: 834365 - DNA, 75 bp, synthetic construct
  source 1..75: mol_type = other DNA
ataacatagaaaacaaagaggaagagcttctcttttatgaaaaaaaagaaacgctatgggagtacctaaaaaagg

SEQ ID NO: 834366 - DNA, 75 bp, synthetic construct
  source 1..75: mol_type = other DNA
aacaaccacgatttcgttattcagttctggcccgctgcgtggcatgggcaaatatctctgttcaggttctttttc

SEQ ID NO: 834367 - DNA, 75 bp, synthetic construct
  source 1..75: mol_type = other DNA
atgacatttactcagagtgttgacccgccagaaacgaataatgctgtattttgcctggcgtatgaattgtctgtg

SEQ ID NO: 834368 - DNA, 75 bp, synthetic construct
  source 1..75: mol_type = other DNA
ccggaacaagtatgaagacacatctggagcaggaaggatgtcgaacccgggttactgttgtgcctccaggctttg

SEQ ID NO: 834369 - DNA, 75 bp, synthetic construct
  source 1..75: mol_type = other DNA
cgctctacagggtggcttccctgatggtgatgccttccacctgtgaatcatttggtatggctgcagtggaggctg

SEQ ID NO: 834370 - DNA, 75 bp, synthetic construct
  source 1..75: mol_type = other DNA
ccggattacgctatttcgacgcctcacaggatgagtcgatctatatctttggcggttccaccttcaccgatgata

SEQ ID NO: 834371 - DNA, 75 bp, synthetic construct
  source 1..75: mol_type = other DNA
ccaatctgcgcggcaagttattattcaacccggccgggcttcgcgaactcaccactaaactgaccgttaaccact

SEQ ID NO: 834372 - DNA, 75 bp, synthetic construct
  source 1..75: mol_type = other DNA
caaccatcgtcgcacagtagaacgcctgccgtgggccaatattgacgggaaagaattccagaccgagccgctgct

SEQ ID NO: 834373 - DNA, 75 bp, synthetic construct
  source 1..75: mol_type = other DNA
gcagagaaataccagtccgatctctctgcggtcggacgttacgtgctctccgccgccatctggccgatcctggcg

SEQ ID NO: 834374 - DNA, 75 bp, synthetic construct
  source 1..75: mol_type = other DNA
tttcttcccaagctgactcgctgattaaaatttcgcggatctgggccgatttttttcccgcaaacacatcgaatc

SEQ ID NO: 834375 - DNA, 75 bp, synthetic construct
  source 1..75: mol_type = other DNA
aaacctaaagccattgatgcatggggagatggaatttttattggtcagcactggcctgataaggtctcatacccg

SEQ ID NO: 834376 - DNA, 75 bp, synthetic construct
  source 1..75: mol_type = other DNA
gacgctaaaggatgataagggaggttctgcgactattaatggtgggaaggataataagaatggtaacactttaac

SEQ ID NO: 834377 - DNA, 75 bp, synthetic construct
  source 1..75: mol_type = other DNA
gaatggcgtggatgagacaacgctgacagcaacagtgaaagatccttttgataacgtagtaaaagatctaccggt

SEQ ID NO: 834378 - DNA, 75 bp, synthetic construct
  source 1..75: mol_type = other DNA
gctggctgctggtttgctgcctgctgtttggcaccattaaactgctgctggccgtaattgaagatcacaaagact

SEQ ID NO: 834379 - DNA, 75 bp, synthetic construct
  source 1..75: mol_type = other DNA
acattaatgatggcccgcgtgcagcaacatcaagggcaagcctcctacgtggtgtttggcacacagctggcggca

SEQ ID NO: 834380 - DNA, 75 bp, synthetic construct
  source 1..75: mol_type = other DNA
cgtagccactggcgtactggcccgttcaatggatctggacatctataaccttcatctgtcagcgccaatgatata

SEQ ID NO: 834381 - DNA, 75 bp, synthetic construct
  source 1..75: mol_type = other DNA
gggtcaggattgaggaatatccggcgttgttccgtgcatccggagagggtcgtggtgcctccgtggcggaggaga

SEQ ID NO: 834382 - DNA, 75 bp, synthetic construct
  source 1..75: mol_type = other DNA
gggcttcagggagcggagcattaccagtctgcggctctggggcttggctggtcactggggcgtctgggggcggtg

SEQ ID NO: 834383 - DNA, 75 bp, synthetic construct
  source 1..75: mol_type = other DNA
ataagtttgcattttttgtttctgttgctatttttatttttaatattggcgtgttttttttatatattggctttg

SEQ ID NO: 834384 - DNA, 75 bp, synthetic construct
  source 1..75: mol_type = other DNA
acgttaacgaatactgataaagagatgaaaaatgccgccagtgttgcagacctgaaaacggcaattgatggtgtg

SEQ ID NO: 834385 - DNA, 75 bp, synthetic construct
  source 1..75: mol_type = other DNA
gcaacggctgaaacagtggaaccgaatgcaactgaacatcatcagaacacgcagccgctggatgctcagtcacag

SEQ ID NO: 834386 - DNA, 75 bp, synthetic construct
  source 1..75: mol_type = other DNA
aagctaataaagaattgcaatggactgccaaaagagacttaaaagatatgattcgggatgcttggcattggcagt

SEQ ID NO: 834387 - DNA, 75 bp, synthetic construct
  source 1..75: mol_type = other DNA
tatttaaataatgtagcacaaacattgtcattgctaaatgcaatgataaaaaataatattaaagatttgattttt

SEQ ID NO: 834388 - DNA, 75 bp, synthetic construct
  source 1..75: mol_type = other DNA
atggggaaaattatctaccatacgatgttcgacaacatgcaaaaagcgattgacctgaatcgtcctgcctgtcag

SEQ ID NO: 834389 - DNA, 75 bp, synthetic construct
  source 1..75: mol_type = other DNA
actcccagcggaaagccgaagaacaagcagaggcagagcaagccgcaatgcgggatcgcttacgcactctcctga

SEQ ID NO: 834390 - DNA, 75 bp, synthetic construct
  source 1..75: mol_type = other DNA
atggtataaaatcgattttccagacagagttctctaagtttttcaatgctatgacaaataaaaacattcaaataa

SEQ ID NO: 834391 - DNA, 75 bp, synthetic construct
  source 1..75: mol_type = other DNA
gcctgaatccgttatcgaagaggagttgaaggcgctacgctccaaagtctccgacaactacaccaatgaactatt

SEQ ID NO: 834392 - DNA, 75 bp, synthetic construct
  source 1..75: mol_type = other DNA
gcacgtatgttaccgccaacacagggcttcatcctaattggctacgatcagcagcccgaagcaaaggcgacgatt

SEQ ID NO: 834393 - DNA, 75 bp, synthetic construct
  source 1..75: mol_type = other DNA
agccgacgttccgtttgggtgcaacttccatgacataaaagccaaagggatttcagattacgaaggcagcagtcg

SEQ ID NO: 834394 - DNA, 75 bp, synthetic construct
  source 1..75: mol_type = other DNA
tttttctttggttgttatattagtaaaaatattatcagttggtaatattccatttttgatggttttacatggtga

SEQ ID NO: 834395 - DNA, 75 bp, synthetic construct
  source 1..75: mol_type = other DNA
atagtcgcattgattttaaccgaatgtatacgtatgttatgtggcataaaagttgatgtacgattgaaaatcgtg

SEQ ID NO: 834396 - DNA, 75 bp, synthetic construct
  source 1..75: mol_type = other DNA
caatagaacaacaagggaaaattgattatcttttttatggatataaacatagctttttattccaagacagtaatt

SEQ ID NO: 834397 - DNA, 75 bp, synthetic construct
  source 1..75: mol_type = other DNA
atttaatacattacttctggaaatgggattggtgggattcattataattaccatatcaatagtatattgttggtg

SEQ ID NO: 834398 - DNA, 75 bp, synthetic construct
  source 1..75: mol_type = other DNA
tcgacaaacacactaaagattcagcgcgacttcaaatcgtccttgatcgcgacaagatcaagcggcaatttctgg

SEQ ID NO: 834399 - DNA, 75 bp, synthetic construct
  source 1..75: mol_type = other DNA
gcggtattcactggggaggtggttctggctccggtaatggcggtggtgaacatgggagtcaaacaggttgggggt

SEQ ID NO: 834400 - DNA, 75 bp, synthetic construct
  source 1..75: mol_type = other DNA
gatcggtgcaggtattccacggcatggcggcgtattttggtctaccggaagcgttgatgaatcgctttgtcggtc

SEQ ID NO: 834401 - DNA, 75 bp, synthetic construct
  source 1..75: mol_type = other DNA
gcgcgtcacgctgaggaggcgaagaagaatgccggagaggcggagacgtccgcgaggaatgccggcatatcagcc

SEQ ID NO: 834402 - DNA, 75 bp, synthetic construct
  source 1..75: mol_type = other DNA
ccaccctagccgagccgttgaggtgagctactttggttttgacgaggagacgggcttggaagttcgtgtgcgccc

SEQ ID NO: 834403 - DNA, 75 bp, synthetic construct
  source 1..75: mol_type = other DNA
ccatacgaaagcatttgcgccgacgtgaagtcagtcagcctcggttatgtgcgacaggaacgactgaaagatcgc

SEQ ID NO: 834404 - DNA, 75 bp, synthetic construct
  source 1..75: mol_type = other DNA
atccagaactggcaaaaaaagaacgggctaaatctttgccttacaacatcagtggtacaaaagagcaattaaccg

SEQ ID NO: 834405 - DNA, 75 bp, synthetic construct
  source 1..75: mol_type = other DNA
gttcttatgcaaaagttcataatgttagctcattagaagatatcatgagttatcacaatgatgatgttcttctaa

SEQ ID NO: 834406 - DNA, 75 bp, synthetic construct
  source 1..75: mol_type = other DNA
gacgttttcattgcctgcgcagccagatgaaggtgacgccgatgccattactctcgtggtgctcagcaaccgtag

SEQ ID NO: 834407 - DNA, 75 bp, synthetic construct
  source 1..75: mol_type = other DNA
cgtgccgctccctggctcgctgtaattcttgcctcagtggcatgcagagataatggcccgcaggttatcgccgcc

SEQ ID NO: 834408 - DNA, 75 bp, synthetic construct
  source 1..75: mol_type = other DNA
tccgttagttcacggcatgccttttatttctggtatcggtatcgaagcattacaaaataaaattctgactatctt

SEQ ID NO: 834409 - DNA, 75 bp, synthetic construct
  source 1..75: mol_type = other DNA
gggccggcgagcattattgagacaaacagcaatggctggttcccggatacagatggcgcactcatcaccggactg

SEQ ID NO: 834410 - DNA, 75 bp, synthetic construct
  source 1..75: mol_type = other DNA
cttggtgcttacctccaccattatccaaatacaaatgacatgctaaaaaatgagataaggcatgttaatgagcat

SEQ ID NO: 834411 - DNA, 75 bp, synthetic construct
  source 1..75: mol_type = other DNA
atgaatattgatgcttatgccccggagctgttgcgctctttgtttcggtacgatgcgaagactggccgcctgttc

SEQ ID NO: 834412 - DNA, 75 bp, synthetic construct
  source 1..75: mol_type = other DNA
ctcgacagttgggcgcagtacagctggtttgataacactgtgaaaggtgatgatttacagagcgaatcttataaa

SEQ ID NO: 834413 - DNA, 75 bp, synthetic construct
  source 1..75: mol_type = other DNA
gcggtggtgagtcagttgaaccgcaaccggagcctgagccgatgccgaatccggagccgaatccggagccgaatc

SEQ ID NO: 834414 - DNA, 75 bp, synthetic construct
  source 1..75: mol_type = other DNA
tagtggtgaaggggaactaccacggtaataacggtcaactggttatgaatacggtactgaatggcgatgattcag

SEQ ID NO: 834415 - DNA, 75 bp, synthetic construct
  source 1..75: mol_type = other DNA
gcgcaggtggaatgcaaacagtagatatatcgctagtggcagtcccagcagacgcctcgcagtccatccttaaga

SEQ ID NO: 834416 - DNA, 75 bp, synthetic construct
  source 1..75: mol_type = other DNA
gtcatccccttatttgtcgggcgggaaaaatctatccgttgtctggaagcggcgatggaccatgataaaaaatta

SEQ ID NO: 834417 - DNA, 75 bp, synthetic construct
  source 1..75: mol_type = other DNA
attcaggcctgacgcggcttcggtggatgacagccgtgaaaaattcacccctgcgcagaacatgattttttcgcg

SEQ ID NO: 834418 - DNA, 75 bp, synthetic construct
  source 1..75: mol_type = other DNA
ggaacaggtcccgtaactgttggtgcgtttgctctgagctgggaagtagaataaaaggaaagaaggcaagagccg

SEQ ID NO: 834419 - DNA, 75 bp, synthetic construct
  source 1..75: mol_type = other DNA
acacttgctgtttcggaaggtggtaaaatttctgcgcctactattagtttaagcaccaattcggagttggcgcta

SEQ ID NO: 834420 - DNA, 75 bp, synthetic construct
  source 1..75: mol_type = other DNA
tggggatcacccaaaatataggctctgcagaaatcaccaaccgcgggaaattacacctgaaggctgacgatagca

SEQ ID NO: 834421 - DNA, 75 bp, synthetic construct
  source 1..75: mol_type = other DNA
gtctgacggttaccaacgggggcacttcaaccggttcgttaacggggagcggagagctgaatattcagggcggca

SEQ ID NO: 834422 - DNA, 75 bp, synthetic construct
  source 1..75: mol_type = other DNA
gcaatctgaccaacaacggtacgctgatgaccggaatgtcaggacagcaagctggcaatgtgttagtggtgaagg

SEQ ID NO: 834423 - DNA, 75 bp, synthetic construct
  source 1..75: mol_type = other DNA
catcgattaccgtattacggttactgataatgctaatctggttatcgacgttacagacacttctcgtccacgttt

SEQ ID NO: 834424 - DNA, 75 bp, synthetic construct
  source 1..75: mol_type = other DNA
agctgacggcaacggtgaaagatccgtcgaatcatccagtggcgggaataacggtgaacttcaccatgccacagg

SEQ ID NO: 834425 - DNA, 75 bp, synthetic construct
  source 1..75: mol_type = other DNA
gaatgtggaatattgaaagaagagctatgtaatgtgattttctcgcagccttgctttttatactattccatcgct

SEQ ID NO: 834426 - DNA, 75 bp, synthetic construct
  source 1..75: mol_type = other DNA
gacacaacatcacaaaatataatatacaaagaaatcacgcgaacaatcaacaattcgcaacttcctcataattat

SEQ ID NO: 834427 - DNA, 75 bp, synthetic construct
  source 1..75: mol_type = other DNA
acttacacttatcagactcaaaaaaatatggttttcactggaagaaagccaaagaactggtcacagtattagtta

SEQ ID NO: 834428 - DNA, 75 bp, synthetic construct
  source 1..75: mol_type = other DNA
gtcatcaccttggcttattcactaccgaagctgcggcgcgtgttgcgtacctgaaagctaaagccagataccatc

SEQ ID NO: 834429 - DNA, 75 bp, synthetic construct
  source 1..75: mol_type = other DNA
caattttgcgacagctaacgtggtcacgctgacgggcgtgcacaccgacctcgccactttgctggcgaatcatca

SEQ ID NO: 834430 - DNA, 75 bp, synthetic construct
  source 1..75: mol_type = other DNA
gaaaaagatgacgcgcgactagatgaattatcacctttatctgataaagataaaaaagctaatatatcaaatgtt

SEQ ID NO: 834431 - DNA, 75 bp, synthetic construct
  source 1..75: mol_type = other DNA
aacacgcgtaatactaatgagaacggtattgctgaagttacccttaagggcacggttttgggtgttcatacagcc

SEQ ID NO: 834432 - DNA, 75 bp, synthetic construct
  source 1..75: mol_type = other DNA
gccccagggagcctgaaagcccctgatacgcgtaacgaaaaacttaattctctggaagacgtacgcaaaggcagt

SEQ ID NO: 834433 - DNA, 75 bp, synthetic construct
  source 1..75: mol_type = other DNA
ggctgaagttacactgagcggtaccaaatccggcacctatcccgtgacagttagcgtgatcaattatggtgtcag

SEQ ID NO: 834434 - DNA, 75 bp, synthetic construct
  source 1..75: mol_type = other DNA
ttaatcaggcgattgaaattatgaaatataccgggaagtatgtatattgtatagataataatagaatgtactccc

SEQ ID NO: 834435 - DNA, 75 bp, synthetic construct
  source 1..75: mol_type = other DNA
accgatgttaattcttttatcctaaatacaccaattcaaagaggatcgactagaacatcaggaaaacgcatatat

SEQ ID NO: 834436 - DNA, 75 bp, synthetic construct
  source 1..75: mol_type = other DNA
acgtcaaggtcaccttcaatgttaattcagcagaggcgaaactgagccaaaccgaagtgaatagccacgacggga

SEQ ID NO: 834437 - DNA, 75 bp, synthetic construct
  source 1..75: mol_type = other DNA
cggatggtaaggttcagtggaaagtcgtgatggatcatggggggaccagtaagtggtttgaaatgactcctgaag

SEQ ID NO: 834438 - DNA, 75 bp, synthetic construct
  source 1..75: mol_type = other DNA
tgatgaaagtgaaaggttttatttcttcgtcacataagtatattgtgtgttttatgctttttatgagcgcaatgc

SEQ ID NO: 834439 - DNA, 75 bp, synthetic construct
  source 1..75: mol_type = other DNA
tagaaccttatggctatattttgcttataaaaaaagcagcgttgttagttctttcatttgcagcattatttgatt

SEQ ID NO: 834440 - DNA, 75 bp, synthetic construct
  source 1..75: mol_type = other DNA
tcgaatacaattctttgtgaagacatgttttttgctggcaaagcattgctccgcggccataagatagcatatgtc

SEQ ID NO: 834441 - DNA, 75 bp, synthetic construct
  source 1..75: mol_type = other DNA
tgaagctggatttattgagaatattatctctgtatttgacaaccctggagtcgcatgtgcatatgggcgccaact

SEQ ID NO: 834442 - DNA, 75 bp, synthetic construct
  source 1..75: mol_type = other DNA
cgaacccaatttcatacaaggtattataagtgtgtttgacgaccctgctgttgcttgtgcctacggtcgtcaaat

SEQ ID NO: 834443 - DNA, 75 bp, synthetic construct
  source 1..75: mol_type = other DNA
acgtccttacaggaagtggcctgtcctttacctgcgatccacagcttgcaaaacagcttcttggataccctgatg

SEQ ID NO: 834444 - DNA, 75 bp, synthetic construct
  source 1..75: mol_type = other DNA
attccgctctattcgatcacggattggcatcgaagttcgatcagcgattcgcatccattcgatcaaccgggaact

SEQ ID NO: 834445 - DNA, 75 bp, synthetic construct
  source 1..75: mol_type = other DNA
cgccgctggctggcatcgtgcggcctgaccgtggagcagatgaaaaaccagatggacccggtgtacacgccggcg

SEQ ID NO: 834446 - DNA, 75 bp, synthetic construct
  source 1..75: mol_type = other DNA
aaaaatgagttgggtaaaaaaaccagacatattccaattaggcaattggttaaccgtgcatgtaatgcgctggtt

SEQ ID NO: 834447 - DNA, 75 bp, synthetic construct
  source 1..75: mol_type = other DNA
accaacttgattgctgcagctctgctcaacggtaagaaagtcctgtttgtggcagagaagatggctgcactggag

SEQ ID NO: 834448 - DNA, 75 bp, synthetic construct
  source 1..75: mol_type = other DNA
taccaccaaccagtttctttgatcgaagtgccgacggagaagatgacgatgatgccgcggctttaagtgatactg

SEQ ID NO: 834449 - DNA, 75 bp, synthetic construct
  source 1..75: mol_type = other DNA
tgcccaaactaaccagtgatatgctagtaatcttgccagcattgtattttattcaagaactggaatggagtaacc

SEQ ID NO: 834450 - DNA, 75 bp, synthetic construct
  source 1..75: mol_type = other DNA
acctgaaagcagtgaataaagaagtggctgcattcaactgcgagaagaaagtatcaggcgttattcactcaacta

SEQ ID NO: 834451 - DNA, 75 bp, synthetic construct
  source 1..75: mol_type = other DNA
ggcagaaagtgcagccggtaatgcagccagggatgcaacgaccgcaacagaaaaagcccgggagtcagcagaaag

SEQ ID NO: 834452 - DNA, 75 bp, synthetic construct
  source 1..75: mol_type = other DNA
cgaaaaatatcttaagcagctcgatttatggggaaaacgcaacgaacgtgcgcgcatgttatctggcgggatgaa

SEQ ID NO: 834453 - DNA, 75 bp, synthetic construct
  source 1..75: mol_type = other DNA
atgctggaggggcgtggcttaagtaccggagatgtcgccaccatgaccattacctatgcagcagcagtactactc

SEQ ID NO: 834454 - DNA, 75 bp, synthetic construct
  source 1..75: mol_type = other DNA
cgtcggtgccggaattttttcatcaatggcagaaaccggagaacgcctggttcgctgggaacggacgcacacacc

SEQ ID NO: 834455 - DNA, 75 bp, synthetic construct
  source 1..75: mol_type = other DNA
ctagattctaatagtatttctaaaccagtctggaaatttttaaaatcttctgctttaccaggagtatgctctgtt

SEQ ID NO: 834456 - DNA, 75 bp, synthetic construct
  source 1..75: mol_type = other DNA
gtacatttcgctcagtatgccgtggggcgacaacagtaccgttagctataacggcaactatggcagtgggacgga

SEQ ID NO: 834457 - DNA, 75 bp, synthetic construct
  source 1..75: mol_type = other DNA
caagaaaaaaaggtaaaataataaatatatgttcaatgcagagtgagttgggcagagaaacgataaccccttatg

SEQ ID NO: 834458 - DNA, 75 bp, synthetic construct
  source 1..75: mol_type = other DNA
aacacttaccactccgggccaagtaatagcaatcaaaatgctggaagaaatatttcccacaataaatttgcgcga

SEQ ID NO: 834459 - DNA, 75 bp, synthetic construct
  source 1..75: mol_type = other DNA
tttatggctttaagtagtcatgtttatcaatccattcaaggatttgatacaggttattttatgtattgcgaggat

SEQ ID NO: 834460 - DNA, 75 bp, synthetic construct
  source 1..75: mol_type = other DNA
gtcacgaagtaccagtacaacaattagtgcgtgcaacttctactaccgttggtggtggtgcacttgttaaggaag

SEQ ID NO: 834461 - DNA, 75 bp, synthetic construct
  source 1..75: mol_type = other DNA
ttgacctcagtgcgaactaccatgaagggcaatacacctctgcgggcttgtcgttacagggcggcgcaacgctta

SEQ ID NO: 834462 - DNA, 75 bp, synthetic construct
  source 1..75: mol_type = other DNA
gtcactctgaatgccgacaaccgggcattgcgcagccactggtttgtgcgcgagaacggcaccctgctggagtcc

SEQ ID NO: 834463 - DNA, 75 bp, synthetic construct
  source 1..75: mol_type = other DNA
agctcgacgccagcttaacgcccttaatcagttacaacacacgggtacagtgctcagcgaaaaacacaaaagctg

SEQ ID NO: 834464 - DNA, 75 bp, synthetic construct
  source 1..75: mol_type = other DNA
ccggcctgccgaaaacgcccgccgcctgatgggcagtttggtgactccatccagcgaacgcaggggcgatcaaaa

SEQ ID NO: 834465 - DNA, 75 bp, synthetic construct
  source 1..75: mol_type = other DNA
ccgcaggggccgaaaggcgacaggggagagcggggagagaccggtctgacgggaaatgcaggtccacagggtcca

SEQ ID NO: 834466 - DNA, 75 bp, synthetic construct
  source 1..75: mol_type = other DNA
cattagcgttaacttctgtgtttatggcaggtcacctacaggcggctgatggaacagtccatttccgtggtgaaa

SEQ ID NO: 834467 - DNA, 75 bp, synthetic construct
  source 1..75: mol_type = other DNA
actctccaggaaacccggggcggttcaccgtattcaggacgctgactatgcgaccgaagtgtccaacatgtcgaa

SEQ ID NO: 834468 - DNA, 75 bp, synthetic construct
  source 1..75: mol_type = other DNA
gttcgactcctattatcggcaccattaaaatcaaattgttacgtaagatcttatcattctcccaccaaaaaatta

SEQ ID NO: 834469 - DNA, 75 bp, synthetic construct
  source 1..75: mol_type = other DNA
agatccgctcgcatcgtggggcaataaacaactggagtgttcaatcaacaaaattgccccatcccatctgaacat

SEQ ID NO: 834470 - DNA, 75 bp, synthetic construct
  source 1..75: mol_type = other DNA
tcgcaaagaacggtacaggctgcggtattacgggcactgggcagcgcgtttcagcgttctgacaacgatgcgcaa

SEQ ID NO: 834471 - DNA, 75 bp, synthetic construct
  source 1..75: mol_type = other DNA
ctgaaagcgtcagcgcaggtggtcgcactgggaaccgctggcgcatcggtgaaaacgccgctggcgtgggacttc

SEQ ID NO: 834472 - DNA, 75 bp, synthetic construct
  source 1..75: mol_type = other DNA
tgagtacggtcagtacagcgttattctgttggtggaagggttcccgccgtcacatgccgggaccatcaccgtgta

SEQ ID NO: 834473 - DNA, 75 bp, synthetic construct
  source 1..75: mol_type = other DNA
aggcaactagagtgtcgcatttcagcgctgtctccatcctatacgcttgtaaaattcggttatatctattttggg

SEQ ID NO: 834474 - DNA, 75 bp, synthetic construct
  source 1..75: mol_type = other DNA
aatcgtctcaaaattaataagcaccggcggtcagtcaaaaagctatttcatcagtattgctgccgcaatgggtta

SEQ ID NO: 834475 - DNA, 75 bp, synthetic construct
  source 1..75: mol_type = other DNA
gatttaggcaaagtaaaccgtacagcctttagtggcgtcgatgatgtggctgccccgacggctttttctatcgat

SEQ ID NO: 834476 - DNA, 75 bp, synthetic construct
  source 1..75: mol_type = other DNA
taccccaccgatcgtccggcaggcgcagcgctacatctctttgcttctatcgctaccatgttctggtatgtcctg

SEQ ID NO: 834477 - DNA, 75 bp, synthetic construct
  source 1..75: mol_type = other DNA
gtgttgcggcggctatcgaagccgcgagtgtatcccgcatctttggcgttacctcggctgattcaacgattcttg

SEQ ID NO: 834478 - DNA, 75 bp, synthetic construct
  source 1..75: mol_type = other DNA
cgggtatgaaacactgacagtcagccaggcatcggcacttgatgcaaaaaactgcaatgtattcgtgtactacca

SEQ ID NO: 834479 - DNA, 75 bp, synthetic construct
  source 1..75: mol_type = other DNA
agctgcacccggacagtacactcacagtgtggccggataaccgcatcgcggaggatgcgcactatgtctaccgcc

SEQ ID NO: 834480 - DNA, 75 bp, synthetic construct
  source 1..75: mol_type = other DNA
aattggaagataacatctggcagacttgtgaagctgactggaaaaaatatcaaagcagcgtcttttgcctttacc

SEQ ID NO: 834481 - DNA, 75 bp, synthetic construct
  source 1..75: mol_type = other DNA
aggccaaggtcgtccctttcgttgatcgtcttgagcgtgacaggaatgaaaatctcaactctttagtcagcaaag

SEQ ID NO: 834482 - DNA, 75 bp, synthetic construct
  source 1..75: mol_type = other DNA
catcggttttggtggaattagccaaagagtattcatcttataatgggtgtagacgaaggcaattaattgaagttg

SEQ ID NO: 834483 - DNA, 75 bp, synthetic construct
  source 1..75: mol_type = other DNA
gattatatcgctacgggtaaagcgacgtcaggtaatgtcaatgcggtaacaaatttccatattaattattattaa

SEQ ID NO: 834484 - DNA, 75 bp, synthetic construct
  source 1..75: mol_type = other DNA
tatattgctacggaaacgactattgaccctggtacagctaacgccgactcgcagtttacagttgaatatataaaa

SEQ ID NO: 834485 - DNA, 75 bp, synthetic construct
  source 1..75: mol_type = other DNA
gccggcgtcgctcagtgcggcgaaaaccgggcttcagatctggaagcagaagggggccgatgcttaccttaaggg

SEQ ID NO: 834486 - DNA, 75 bp, synthetic construct
  source 1..75: mol_type = other DNA
tacaaaaatattggcgacaacaacaaggagctgtttggcacgctctccggcggcgtgggcgaaaaggactcaaag

SEQ ID NO: 834487 - DNA, 75 bp, synthetic construct
  source 1..75: mol_type = other DNA
cagataaaggtggggtaggcaaaagcacctacgtggctaacacaggctcaatgctggtcaacaaaggtaagtcgg

SEQ ID NO: 834488 - DNA, 75 bp, synthetic construct
  source 1..75: mol_type = other DNA
gccgcggagagcggaatgtcttatgcgcaaaataatcttgggtggatgtacagaaatggcaacggagtcgcaaaa

SEQ ID NO: 834489 - DNA, 75 bp, synthetic construct
  source 1..75: mol_type = other DNA
agataagccacagcgctggttaccatccctccattaacgatcaggcgcggatccggctgataaaaaccggcgaca

SEQ ID NO: 834490 - DNA, 75 bp, synthetic construct
  source 1..75: mol_type = other DNA
tttacgctgtatagtggcctgctcggttctgaagattattatgcgctggggatcggtatcggcggcacacttggc

SEQ ID NO: 834491 - DNA, 75 bp, synthetic construct
  source 1..75: mol_type = other DNA
tccattcgcagccggtttgctggcgctgattcttagcgaaaccgcctatattgcggaaatccatcgtggtggatt

SEQ ID NO: 834492 - DNA, 75 bp, synthetic construct
  source 1..75: mol_type = other DNA
gtctggttgatataacattattagcgtcaacgaggattacccccggggctaaaatatggacgctggataagcgac

SEQ ID NO: 834493 - DNA, 75 bp, synthetic construct
  source 1..75: mol_type = other DNA
aacctcggcctgccggggatttgcctgtcactggcagataaacccgacgaactggcggcgctggaacactattgg

SEQ ID NO: 834494 - DNA, 75 bp, synthetic construct
  source 1..75: mol_type = other DNA
agatgaccagccagaaagatcgcccaacccaacatgaaatgcgtcttgatggctcactgaaccgccccgggaatc

SEQ ID NO: 834495 - DNA, 75 bp, synthetic construct
  source 1..75: mol_type = other DNA
tttatcaaacctttactgaaggtcgcagtcagcatgaatggatcaaatatctccatgcgaaaacgaaggaacgta

SEQ ID NO: 834496 - DNA, 75 bp, synthetic construct
  source 1..75: mol_type = other DNA
gcttgccaaagatccggcgttaccgtcttacgacgaacctgctgccgggcgtgaagatgaatggctgcccattcg

SEQ ID NO: 834497 - DNA, 75 bp, synthetic construct
  source 1..75: mol_type = other DNA
tgtgcctcgtcttctggtggtaagttcaaagctgttttagtgagtggctttctcgggattgctacttttgtagtt

SEQ ID NO: 834498 - DNA, 75 bp, synthetic construct
  source 1..75: mol_type = other DNA
aacttgttcgcaccttccttagaaaacgtctcgggtatgaggttttaagcttctcactacaggcacattcattga

SEQ ID NO: 834499 - DNA, 75 bp, synthetic construct
  source 1..75: mol_type = other DNA
cgggaatgcgtctgcgccacccggtgactgacgataccagcgatgaccgcctggcacacagccccgacgaccgga

SEQ ID NO: 834500 - DNA, 75 bp, synthetic construct
  source 1..75: mol_type = other DNA
cactgccccgccagtcccggtgacatcagaaggactggttaaagccgtgcgtttctatgaacaggttaagcgtga

SEQ ID NO: 834501 - DNA, 75 bp, synthetic construct
  source 1..75: mol_type = other DNA
ataacgaatggtatcgtgatgaaaacctgattaattccgccccgcttccgcttggtgatgaaacggaaacaggtc

SEQ ID NO: 834502 - DNA, 75 bp, synthetic construct
  source 1..75: mol_type = other DNA
ttaatctgggttgaatgccccgctgacattcagcagggctatacatacagtaacggcgaatttacgcctccaccg

SEQ ID NO: 834503 - DNA, 75 bp, synthetic construct
  source 1..75: mol_type = other DNA
atgagccatatggaacgcaattcggtgagggcggcgtatatccataaagcggaacatctggatgagcgcaagctg

SEQ ID NO: 834504 - DNA, 75 bp, synthetic construct
  source 1..75: mol_type = other DNA
atgaagtgcgggcggatgctcgcaacgaggggattaactataccgccagccgcctcgctgccgcattcaatcatg

SEQ ID NO: 834505 - DNA, 75 bp, synthetic construct
  source 1..75: mol_type = other DNA
cgctgcaaacagaaaaacgccgctatgcctttccctggcgcgtcaggcgggagcagcgaaaaacgccacgttgcc

SEQ ID NO: 834506 - DNA, 75 bp, synthetic construct
  source 1..75: mol_type = other DNA
tggaagtgggatattggtcacactgaatatattactacaaacaggattgattcattaacacactggttaaatgtt

SEQ ID NO: 834507 - DNA, 75 bp, synthetic construct
  source 1..75: mol_type = other DNA
cgttgagcttgaagcagaagagaaaacatcagcagctagacttgaggcgctcgaccgcacccacaaaatgttcca

SEQ ID NO: 834508 - DNA, 75 bp, synthetic construct
  source 1..75: mol_type = other DNA
gcaagcggacgttattcctgtttatgctgccgcgcctgcgtcggttgtgccggatgatgcatcaggggcgcttgc

SEQ ID NO: 834509 - DNA, 75 bp, synthetic construct
  source 1..75: mol_type = other DNA
gattgaagggcttcgaaaactggttgctgagcttgaagagacaaaatcaaaactcaacgagcagcgtgaatatta

SEQ ID NO: 834510 - DNA, 75 bp, synthetic construct
  source 1..75: mol_type = other DNA
ataccggaagcacctttcggcgtgggcagataacggttgcgcctggtaatggtattgagcaagcaactcactgga

SEQ ID NO: 834511 - DNA, 75 bp, synthetic construct
  source 1..75: mol_type = other DNA
gttcttgttgccagggagtttgacaggaaaggtgactggcgaatgaaatgggcgacttacatcccggggcatcct

SEQ ID NO: 834512 - DNA, 75 bp, synthetic construct
  source 1..75: mol_type = other DNA
gaacccgcaagtcgaaacaggggcatggaaagacgctgttgactgggtgctcaaagaggcttgccaggctgtaaa

SEQ ID NO: 834513 - DNA, 75 bp, synthetic construct
  source 1..75: mol_type = other DNA
ctcgttaatcagcattctgacatcaacaaaacgcatgaaattctgcaggacgaatcgaaatgcgaaatgattgtg

SEQ ID NO: 834514 - DNA, 75 bp, synthetic construct
  source 1..75: mol_type = other DNA
acctgacgggccgtccgctgatgctctttaacagtgaaggtaaaaccgtctggcgaccgggacagaccagcctgt

SEQ ID NO: 834515 - DNA, 75 bp, synthetic construct
  source 1..75: mol_type = other DNA
gacaaaacaccgtgacggctaccgtccggaaacggagaggttccggtgggacagccgggaccagctgaccgggta

SEQ ID NO: 834516 - DNA, 75 bp, synthetic construct
  source 1..75: mol_type = other DNA
tggctatgacagttgtggctacctgaaggcgcagtctgcgggcaggcaccggataagtgaagagactgaccagta

SEQ ID NO: 834517 - DNA, 75 bp, synthetic construct
  source 1..75: mol_type = other DNA
tcagtaatttgaagcaaatattgccggaagttacggctgaaatcgttgatacaggcgcaaacgatggaaaagttg

SEQ ID NO: 834518 - DNA, 75 bp, synthetic construct
  source 1..75: mol_type = other DNA
cagtacggcagattagcgcacaggaggctaaatcaccctcactggtcactacatgacatccggcgcacctttaca

SEQ ID NO: 834519 - DNA, 75 bp, synthetic construct
  source 1..75: mol_type = other DNA
gtgaagtgctccggcacagtaaccggggtttttgcctgtgaacagggctggaatgcagccggccagcctgtcagt

SEQ ID NO: 834520 - DNA, 75 bp, synthetic construct
  source 1..75: mol_type = other DNA
tttcgtatgttttcgcagttagaccgcgattttcatgccatgctgctatctgcggctgacaacatcttttttaat

SEQ ID NO: 834521 - DNA, 75 bp, synthetic construct
  source 1..75: mol_type = other DNA
cacggcaggctgacagagaaaaccgacctcatcccggaaggggttatccgcacggatgatgagcgcacccaccag

SEQ ID NO: 834522 - DNA, 75 bp, synthetic construct
  source 1..75: mol_type = other DNA
aagaagaaagttttggtaaatttatgaataaaacggcaaataatcatgctgattttgcgcgagcccagcgcgaag

SEQ ID NO: 834523 - DNA, 75 bp, synthetic construct
  source 1..75: mol_type = other DNA
ggatgcggcgcgagcgccttatccggcctacgttttaatgccagcaaaaatggtgaattacctgggttatcagtt

SEQ ID NO: 834524 - DNA, 75 bp, synthetic construct
  source 1..75: mol_type = other DNA
gtgattaaaggagctttaagatctgcaccaagtagaaaggttttacttacccttgacgaggaaacgaataaatta

SEQ ID NO: 834525 - DNA, 75 bp, synthetic construct
  source 1..75: mol_type = other DNA
gggaaccgggtcccgcgggtcctcaggggccgaagggagataaaggagagcgtggcgacaccggcccggcagggg

SEQ ID NO: 834526 - DNA, 75 bp, synthetic construct
  source 1..75: mol_type = other DNA
acgtggatttcatcaaaaggaaactatattcagaagtttgaaaataaatttgcggaacaaaaccatgtgcaatat

SEQ ID NO: 834527 - DNA, 75 bp, synthetic construct
  source 1..75: mol_type = other DNA
aattgcttttaataagtttaagctaaagcctgattactatctaaaaccggaaacattacaatattatgaagatca

SEQ ID NO: 834528 - DNA, 75 bp, synthetic construct
  source 1..75: mol_type = other DNA
tatagatcgtgattatgatggagtttatttcacacgaactaaaaatgacaaattgatagtcactcatggatatag

SEQ ID NO: 834529 - DNA, 75 bp, synthetic construct
  source 1..75: mol_type = other DNA
gcgacctcatttacaacaggtatgatggctcccgatcgtggtgtccttgcgaacacaggtatcgcaatgggtggg

SEQ ID NO: 834530 - DNA, 75 bp, synthetic construct
  source 1..75: mol_type = other DNA
ttatcgatccgcgatataccgatacggctgccggtcgtgaagacgaatggctccctattcgcccgggcaccgatg

SEQ ID NO: 834531 - DNA, 75 bp, synthetic construct
  source 1..75: mol_type = other DNA
aacaataatggagaaatgctgattgccgcaaaagtgactccgcgtattctgcctggcgttaccgccatcgggcaa

SEQ ID NO: 834532 - DNA, 75 bp, synthetic construct
  source 1..75: mol_type = other DNA
tctttgatttcaatttgttaaagtcaattgcttttaataagtttaagctaaagcctgattactatctaaaaccgg

SEQ ID NO: 834533 - DNA, 75 bp, synthetic construct
  source 1..75: mol_type = other DNA
aagatggcgtattgattgcaggtgcctggtatctggggcctgcagcatccgtcgggaaagtgatcggtggtggag

SEQ ID NO: 834534 - DNA, 75 bp, synthetic construct
  source 1..75: mol_type = other DNA
tttcatttctgcttgaaaggtatgctttagataattctggaaagtggaatgcttttcagaaatttgtcgccaaag

SEQ ID NO: 834535 - DNA, 75 bp, synthetic construct
  source 1..75: mol_type = other DNA
tatgaccgttgtttacattttaaaggccaaggattagctgtacataggcaatattggcatgacgttataggctac

SEQ ID NO: 834536 - DNA, 75 bp, synthetic construct
  source 1..75: mol_type = other DNA
cggcagcactgaatcaggcccgcgcagagcttgaggcagcaggaaaaccgttcacggaacaggatgtggcgcagc

SEQ ID NO: 834537 - DNA, 75 bp, synthetic construct
  source 1..75: mol_type = other DNA
ctgctgcgtcagcaggtaaagttcttggtggcgggcttcttggactggcggccaatagtggttatcagatctatg

SEQ ID NO: 834538 - DNA, 75 bp, synthetic construct
  source 1..75: mol_type = other DNA
gtggcagatattgccagaacggaaggacagatagccggtgagaaagcgaagcgggacccggcagcactgaatcag

SEQ ID NO: 834539 - DNA, 75 bp, synthetic construct
  source 1..75: mol_type = other DNA
cggtgaacagcgttttttccactgcgtataatgattatctgattaatgcatggatgggcgtaaccagaccggctc

SEQ ID NO: 834540 - DNA, 75 bp, synthetic construct
  source 1..75: mol_type = other DNA
tgcgaccagatttatatccgaatccaaccgacgggttgcctgctggagataaggctaacacacaaaatacaccgg

SEQ ID NO: 834541 - DNA, 75 bp, synthetic construct
  source 1..75: mol_type = other DNA
attaaggtctccacaaaatatgatttcacacatccagtcaagaatcccattaataaatggagagcaattgttgcc

SEQ ID NO: 834542 - DNA, 75 bp, synthetic construct
  source 1..75: mol_type = other DNA
gaagggacggtgatatcacacttgacgggaatatgtctgagtatgttattcgcagcctgtataccagcacgttgc

SEQ ID NO: 834543 - DNA, 75 bp, synthetic construct
  source 1..75: mol_type = other DNA
tggatttgcccctatatttccagacacctgttatcacttaacccattactggcttgctgccgtagatattcccgt

SEQ ID NO: 834544 - DNA, 75 bp, synthetic construct
  source 1..75: mol_type = other DNA
ggatggtagcccggacgccgaagaggcgctgaagcgtgagaactcgttgtttgtcgcgactcccgcgcaagaccc

SEQ ID NO: 834545 - DNA, 75 bp, synthetic construct
  source 1..75: mol_type = other DNA
ggaaggtgaggagcaactgtgcgattgtgttaacgaacttaaactcgggttgtcgagtaataataaatatgacct

SEQ ID NO: 834546 - DNA, 75 bp, synthetic construct
  source 1..75: mol_type = other DNA
gcagtagagaaggcttcgtcaattgtgttatgtgctgtgcaaaaaaatctccatgcagcaaggaaggttcttagc

SEQ ID NO: 834547 - DNA, 75 bp, synthetic construct
  source 1..75: mol_type = other DNA
ccggtttttgataaatggaatgaactggtagataaattaaatcacgaaagaaatacagttccgtttgcgtgtttg

SEQ ID NO: 834548 - DNA, 75 bp, synthetic construct
  source 1..75: mol_type = other DNA
gtgcgcaaagaatttgtcgatgataaccgggtgaaagtgaatagtgacggtaatttcgtcaattatttgtcgggc

SEQ ID NO: 834549 - DNA, 75 bp, synthetic construct
  source 1..75: mol_type = other DNA
tacaattacggcgttaccggcggcgtggttatccatcctcatggcgtgacgctctcgcaatatctgggcaacgct

SEQ ID NO: 834550 - DNA, 75 bp, synthetic construct
  source 1..75: mol_type = other DNA
atgcaacatcatcaggaccgtattatgcgcaaagtctttctggttctccggatatcgagatgataaaaaatcgca

SEQ ID NO: 834551 - DNA, 75 bp, synthetic construct
  source 1..75: mol_type = other DNA
ctgagcgcatctacaaggccgtacttaacggtaatctgacgaaatttcaagggttatccatgatttctcgcagca

SEQ ID NO: 834552 - DNA, 75 bp, synthetic construct
  source 1..75: mol_type = other DNA
tagccaaaggacttgaacaaattagcgcagcagtgtgttcaatagcaacatcgaccatgaatgtatttgtatctg

SEQ ID NO: 834553 - DNA, 75 bp, synthetic construct
  source 1..75: mol_type = other DNA
gcgcaggatgggcaggccacccgtcagcagatgatattcagtaatgaaacccgccggcttgaggaagcccggaag

SEQ ID NO: 834554 - DNA, 75 bp, synthetic construct
  source 1..75: mol_type = other DNA
tgcccggatggaactgatgtttatgctacattgacagatgcatcacagccagtgaacagaacagatatattgacc

SEQ ID NO: 834555 - DNA, 75 bp, synthetic construct
  source 1..75: mol_type = other DNA
tcgagcatgaatcaatacgctgccagtaagtctgcagatatcgaaattctacaacaagatataagcaatctatca

SEQ ID NO: 834556 - DNA, 75 bp, synthetic construct
  source 1..75: mol_type = other DNA
tgtcagggaaaataaactcaatgaaacagcacgtaaatatactaccacgactaaagttttaaaaatcgttaatga

SEQ ID NO: 834557 - DNA, 75 bp, synthetic construct
  source 1..75: mol_type = other DNA
ccgaagaaataacaaaagaagtaacaaagagtataaaatccacagtagaaaccatcattaaatctgtttcaaaaa

SEQ ID NO: 834558 - DNA, 75 bp, synthetic construct
  source 1..75: mol_type = other DNA
tttcatatccgtgtgacgccggacacaccggaaatacgggctgccatcaccgcggagttgcgttcgttcctgctg

SEQ ID NO: 834559 - DNA, 75 bp, synthetic construct
  source 1..75: mol_type = other DNA
ctgatccttgccgcactggaccacggcgttgagcgaattattctcgggattggcggtagcgccaccaatgacggc

SEQ ID NO: 834560 - DNA, 75 bp, synthetic construct
  source 1..75: mol_type = other DNA
agggatttcgtgaaatttatcccgaggccgagtatgtcaaattgccgatggctgacggcggtgagggtaccgtcg

SEQ ID NO: 834561 - DNA, 75 bp, synthetic construct
  source 1..75: mol_type = other DNA
cccctatggtcgccgcacgcatggggcgcgatcgttctaagcctctgcgtaaaactgggagtcggtcaaagaaca

SEQ ID NO: 834562 - DNA, 75 bp, synthetic construct
  source 1..75: mol_type = other DNA
gcgcgatcgttctaagcctctgcgtaaaaactgggagtcggtcaaagaacaggtgatgcggaaagcacttcgcgc

SEQ ID NO: 834563 - DNA, 75 bp, synthetic construct
  source 1..75: mol_type = other DNA
agccatcagttgcttgcaccggcagacaatatctccattgcgaaaaacgaactggcggtactggggacgatttca

SEQ ID NO: 834564 - DNA, 75 bp, synthetic construct
  source 1..75: mol_type = other DNA
gtgttatgtgctgtgcaaaaaaatctccatgcagcaaggaaggttcttagcgggataataggaaatgtgccaaaa

SEQ ID NO: 834565 - DNA, 75 bp, synthetic construct
  source 1..75: mol_type = other DNA
atcattccactatggtgccattatcactggagcttctcgaagcagattttgttccggtcagtctgaacacgaacg

SEQ ID NO: 834566 - DNA, 75 bp, synthetic construct
  source 1..75: mol_type = other DNA
ttcgccaaaaggaatctcgatatattgaataaagttttccttgaaaataaatactctgatattgaaggtgctatt

SEQ ID NO: 834567 - DNA, 75 bp, synthetic construct
  source 1..75: mol_type = other DNA
actccgatgaatatactcagacaccgtcgcgggagggatatgttggcagcggcgagtcggcactcgatttcggct

SEQ ID NO: 834568 - DNA, 75 bp, synthetic construct
  source 1..75: mol_type = other DNA
atacctacgtgcgcaataacccagactatgccaacagaagtgcgtttctggcagaagctgcccgccgtgtgctgt

SEQ ID NO: 834569 - DNA, 75 bp, synthetic construct
  source 1..75: mol_type = other DNA
gtgatcctgacggcagcgccagcggttttttccctgatgttccaggctgttattttgctggtgatacgctggaca

SEQ ID NO: 834570 - DNA, 75 bp, synthetic construct
  source 1..75: mol_type = other DNA
ttcgcgcgccagaaacaaaatgctgctgagagcttatgaggcggcgcagccttcacgcctgaataaagcccggcg

SEQ ID NO: 834571 - DNA, 75 bp, synthetic construct
  source 1..75: mol_type = other DNA
agaacgaggtggttttgattatgccgttaagtttctacgcagtgaagcgtctggtgtacgtttgttcgccgccca

SEQ ID NO: 834572 - DNA, 75 bp, synthetic construct
  source 1..75: mol_type = other DNA
ggatgcagggcaggccggagttgctgcaatgattatcaacgatgccctacaccacagcgaaaccccaaccaccga

SEQ ID NO: 834573 - DNA, 75 bp, synthetic construct
  source 1..75: mol_type = other DNA
aaagcgattgagtcaattaagcaggctgatgcagctgttaagttggcacacgagaagttttcagcgctggctgcg

SEQ ID NO: 834574 - DNA, 75 bp, synthetic construct
  source 1..75: mol_type = other DNA
attttatgtgctgtacaacaagatcaatatgcggccaggcaggttatgggagggataatgaaaaatctgccgaaa

SEQ ID NO: 834575 - DNA, 75 bp, synthetic construct
  source 1..75: mol_type = other DNA
gataattatcttccaggtgccaatccccgagccgctgcgctttatcgagccgcgcgaaacggaaacccgcaccat

SEQ ID NO: 834576 - DNA, 75 bp, synthetic construct
  source 1..75: mol_type = other DNA
tgctcgggttagctgcgctgggctttatcagtcataacaccactgtcgccgtttcaattctggtgttaatcattg

SEQ ID NO: 834577 - DNA, 75 bp, synthetic construct
  source 1..75: mol_type = other DNA
gtcccgttcagtcttaacagcacatcggggcagcagatccgccagggcattatcgttaacgactgggggcgtcct

SEQ ID NO: 834578 - DNA, 75 bp, synthetic construct
  source 1..75: mol_type = other DNA
tcagagtaggaacaagtgtctatgcaattgggggagggttaagaatatataaacgaattaatcatcaggtttggc

SEQ ID NO: 834579 - DNA, 75 bp, synthetic construct
  source 1..75: mol_type = other DNA
cctaaacacaagctggtatcaatagttattgacaaccctcctgaaaacagggtgtttgggatgtctttcggtaat

SEQ ID NO: 834580 - DNA, 75 bp, synthetic construct
  source 1..75: mol_type = other DNA
atggcggggaaaatccccgctttttttctgccggtccccggaaagagcaaaaggatgtcgccgcaggctccgctt

SEQ ID NO: 834581 - DNA, 75 bp, synthetic construct
  source 1..75: mol_type = other DNA
aattgtttaaccagtcggatacttctgtgcgcaacaaatatcgcccggcttttgataaatggaatgaactggtag

SEQ ID NO: 834582 - DNA, 75 bp, synthetic construct
  source 1..75: mol_type = other DNA
aacaagaaagttattctgttgttaatttagaaaaacaactaatgagtaatgaatcaccgaagcaaacgctattaa

SEQ ID NO: 834583 - DNA, 75 bp, synthetic construct
  source 1..75: mol_type = other DNA
tatatcactgtctttttactcccatataacttattgttcttttcatatggttattactgcatgaaggaccagagt

SEQ ID NO: 834584 - DNA, 75 bp, synthetic construct
  source 1..75: mol_type = other DNA
atcggaatggaagtccggtgagaaaaaatatcgtcacttcgatatcgcaccaggcatgattttcgacggtctggg

SEQ ID NO: 834585 - DNA, 75 bp, synthetic construct
  source 1..75: mol_type = other DNA
aacacagtcgcccggtataccgcgcctggctggcgatggcgctgttaacgacagatatcccaccggatgtggatc

SEQ ID NO: 834586 - DNA, 75 bp, synthetic construct
  source 1..75: mol_type = other DNA
cgctgaactgaaaaccattgcggcagagaacatgctgcaccttgcccagcgtaaacgccttcaccagttacgtgg

SEQ ID NO: 834587 - DNA, 75 bp, synthetic construct
  source 1..75: mol_type = other DNA
atgtggcttatgaagacattactaacatcggggtgtactaatcaacggggagcaggtcagattcattgcaccaac

SEQ ID NO: 834588 - DNA, 75 bp, synthetic construct
  source 1..75: mol_type = other DNA
cgcgttcttttccgggactattcccccgtggctggcagaagaaaatacgatcgccaatattcaggggttgattga

SEQ ID NO: 834589 - DNA, 75 bp, synthetic construct
  source 1..75: mol_type = other DNA
ccccttctggcgtggtgaaggtaacggacgtccggctgaattaggcgagatgatcggcgattttcttcatttgct

SEQ ID NO: 834590 - DNA, 75 bp, synthetic construct
  source 1..75: mol_type = other DNA
caagattgatttcagttacatcaaggctaacggttacgatccatttatccgcgattttatcaaggaaaagcccta

SEQ ID NO: 834591 - DNA, 75 bp, synthetic construct
  source 1..75: mol_type = other DNA
caagtcagagtagtgtggatacatggagccagcgcgtaggcagtttttcagccagttttaacattggcaaggcac

SEQ ID NO: 834592 - DNA, 75 bp, synthetic construct
  source 1..75: mol_type = other DNA
tgatgcagccagaccaagtcagagtagtgtggatacatggagccagcgcgtaggcagtttttcagccagttttaa

SEQ ID NO: 834593 - DNA, 75 bp, synthetic construct
  source 1..75: mol_type = other DNA
ttttatttagagatgatacggattcatttctaagtaaaatgttatctatcatatcaactgggctaacaggtgctg

SEQ ID NO: 834594 - DNA, 75 bp, synthetic construct
  source 1..75: mol_type = other DNA
acagcatatttttcatgcttttattcagaatgttatccatcagaatgaacttatagagaatggaattccaggtaa

SEQ ID NO: 834595 - DNA, 75 bp, synthetic construct
  source 1..75: mol_type = other DNA
ttaacgttattgttaaccaattacatttcatatcagaatatagttatatttacggggggaatcagtttaagataa

SEQ ID NO: 834596 - DNA, 75 bp, synthetic construct
  source 1..75: mol_type = other DNA
atttatcagccggggagcttcacgccactcatcagagttgaaaccgccaccggtgagctggcgaaaacgcagcgc

SEQ ID NO: 834597 - DNA, 75 bp, synthetic construct
  source 1..75: mol_type = other DNA
gtgaatagcatggatccattaggattatatgaatttaaatcaaaaaatatagatgatattggaatatttgcattg

SEQ ID NO: 834598 - DNA, 75 bp, synthetic construct
  source 1..75: mol_type = other DNA
tactcatgacgaattatcagctattggccttaaaaatcagtatctagtcattaacggtgtcctgcctgcgagcga

SEQ ID NO: 834599 - DNA, 75 bp, synthetic construct
  source 1..75: mol_type = other DNA
tgagtcaggatccggagttgatagcgcagttttcaagtggtaaccaaacacgtataaaacaaggattaaccgcaa

SEQ ID NO: 834600 - DNA, 75 bp, synthetic construct
  source 1..75: mol_type = other DNA
caagtttatatgctaatggtgaagtggcggggcatattccagatgttggatggggtggaaaaattgatggtccgt

SEQ ID NO: 834601 - DNA, 75 bp, synthetic construct
  source 1..75: mol_type = other DNA
aggagatgtacagcgcgaacgggcggaaggtgtggacgaaacaccgcagcctgtgggggctggcggcaaacgact

SEQ ID NO: 834602 - DNA, 75 bp, synthetic construct
  source 1..75: mol_type = other DNA
aggatgacgtccggccggaggcactgcgtcgttttgaactgatggtggaagaagcggcgcgtcacgctgaggagg

SEQ ID NO: 834603 - DNA, 75 bp, synthetic construct
  source 1..75: mol_type = other DNA
tgcacgacgtcctggaagaaaaccggcaaaacaaacagtcagaaattccccaagaagacctgaaagaaagactga

SEQ ID NO: 834604 - DNA, 75 bp, synthetic construct
  source 1..75: mol_type = other DNA
aacaataccatcatcacgttggggactcccctgaatccgcaacataacgagttcatgatggtcgccgaatggtgc

SEQ ID NO: 834605 - DNA, 75 bp, synthetic construct
  source 1..75: mol_type = other DNA
ttgacgaccaatggggtgtatcatggggagtattatcagaatcgatcagctgccgttgtgacaggggatctccct

SEQ ID NO: 834606 - DNA, 75 bp, synthetic construct
  source 1..75: mol_type = other DNA
cctggaaggattctcaccaaacgcaacggtgattgtactggttctggtgttctactttgcacactacctgtttgc

SEQ ID NO: 834607 - DNA, 75 bp, synthetic construct
  source 1..75: mol_type = other DNA
catgtcgaaagcgcagattatccagcaggcgggcaactccgtgctgtctaaagccaaccaggtaccgcagcaagt

SEQ ID NO: 834608 - DNA, 75 bp, synthetic construct
  source 1..75: mol_type = other DNA
ggatgtggaggaggaagagcattacgacaacaccgcagcggaaatcgtcaggtggatgcgcacctgaagcgctgc

SEQ ID NO: 834609 - DNA, 75 bp, synthetic construct
  source 1..75: mol_type = other DNA
atgtttaacagcctgccggacgggctgtcctaccttctcaatccggttgacgccgggttaattccttatacatca

SEQ ID NO: 834610 - DNA, 75 bp, synthetic construct
  source 1..75: mol_type = other DNA
gcctatggtgatgcactcgccaaactgactgccattgaccccgagacaattataaattttatggatgggcctagt

SEQ ID NO: 834611 - DNA, 75 bp, synthetic construct
  source 1..75: mol_type = other DNA
tctggttacagcaacatcatctgactcaaaaagacctcgctcaacttattgaaaagacaacacacagaccttgtt

SEQ ID NO: 834612 - DNA, 75 bp, synthetic construct
  source 1..75: mol_type = other DNA
tggccttgatacgagtaaaagttcttgcgttggtataagtagcaattctgggtggtcttgtaattccatcccttt

SEQ ID NO: 834613 - DNA, 75 bp, synthetic construct
  source 1..75: mol_type = other DNA
gaaccgaatgtctcctgcgaatgtcgtttctacattagatatcctcaaacatctgtggaataaaaaactagagca

SEQ ID NO: 834614 - DNA, 75 bp, synthetic construct
  source 1..75: mol_type = other DNA
cctaatgtgtctgctgtaattgctgtgattgccgagttagtgtttggtatcctcattttcgttgggtattttact

SEQ ID NO: 834615 - DNA, 75 bp, synthetic construct
  source 1..75: mol_type = other DNA
attgcggtgttccaggcgttttcacgcgtaattcgtgaagctggcaaacggtttgtggtcatggatacggcacct

SEQ ID NO: 834616 - DNA, 75 bp, synthetic construct
  source 1..75: mol_type = other DNA
ttaattcaggagcgagtcgataaattatttagccagttgccggaatcaatgaaaattgaagacagcatcactcat

SEQ ID NO: 834617 - DNA, 75 bp, synthetic construct
  source 1..75: mol_type = other DNA
taaccggaaacagcaccgcatcagcagcagtgggagcacaaagcgggaagaatgctgttgagaataatgcgctgg

SEQ ID NO: 834618 - DNA, 75 bp, synthetic construct
  source 1..75: mol_type = other DNA
tgcacccagagttaattcacaaattcccttaccctcaggagtgcagggaaagctgaaatttcagaccgttaatga

SEQ ID NO: 834619 - DNA, 75 bp, synthetic construct
  source 1..75: mol_type = other DNA
attgcattcacccatcttggactcaccgtgccggaaatgcatttcccatcgcccgacagtcctcttggattctct

SEQ ID NO: 834620 - DNA, 75 bp, synthetic construct
  source 1..75: mol_type = other DNA
tcatatctacgcgaatcaggaagaaaactgcagttagtcggaatcgatttacccaacaccttgaatccaagggac

SEQ ID NO: 834621 - DNA, 75 bp, synthetic construct
  source 1..75: mol_type = other DNA
atctgaatggctcaactcaacagccggtgctcatgaacttgagcgattttcggataccctgaccttttctttgta

SEQ ID NO: 834622 - DNA, 75 bp, synthetic construct
  source 1..75: mol_type = other DNA
aggctggggttattgcgtatttggtgaagtggtggaagggatggaagtggtagacgccatcgccgccgtggaagt

SEQ ID NO: 834623 - DNA, 75 bp, synthetic construct
  source 1..75: mol_type = other DNA
ataaaagctttgttcaaaaccggcgttcatctcttctcgccgccatttttctgatggcgacttccgccattggcc

SEQ ID NO: 834624 - DNA, 75 bp, synthetic construct
  source 1..75: mol_type = other DNA
gcgccctgcgtcgctgcggcgttcccggctggggtgtctttaccaataaagaactgcagggtggtggcccgctga

SEQ ID NO: 834625 - DNA, 75 bp, synthetic construct
  source 1..75: mol_type = other DNA
cctggttagagcgtaacgtgaaggaatgccagtacccgcacactgattatcaccatcatgagctggtaacgatgc

SEQ ID NO: 834626 - DNA, 75 bp, synthetic construct
  source 1..75: mol_type = other DNA
aatttagcagcattggcaataaacgaggcttttcggattctttataaacattcagacgagttattctcatacgcc

SEQ ID NO: 834627 - DNA, 75 bp, synthetic construct
  source 1..75: mol_type = other DNA
ctggccagaacgcagcgccgcagcctggcggatgcgcttcagcagtccggcggcgaagacggtggcagtgtggtg

SEQ ID NO: 834628 - DNA, 75 bp, synthetic construct
  source 1..75: mol_type = other DNA
tacgtcggcaggcaaagcgcacgcttccccgttttgctttcagttatctggagggtggggccgatgatgaacaaa

SEQ ID NO: 834629 - DNA, 75 bp, synthetic construct
  source 1..75: mol_type = other DNA
ctgccgctccctgctaccacgctgaatactttggatttaccgaaacttgcctcactggtagatgaactcagcctg

SEQ ID NO: 834630 - DNA, 75 bp, synthetic construct
  source 1..75: mol_type = other DNA
caaaagcattacagaaaatgccagagaacctggcgaaccttccccgctcgcagctgtacctgaaaccatttaatc

SEQ ID NO: 834631 - DNA, 75 bp, synthetic construct
  source 1..75: mol_type = other DNA
tgcgggaaaaatatgaccatatcgtatttgataccgcgccaaccggtcacaccatccgcatgcttgagctgccgg

SEQ ID NO: 834632 - DNA, 75 bp, synthetic construct
  source 1..75: mol_type = other DNA
acaggtaaagggctgataatgacgatgggtaaaggcggagtgggtaaaacgaccgtagcggcctcgctagcggta

SEQ ID NO: 834633 - DNA, 75 bp, synthetic construct
  source 1..75: mol_type = other DNA
agatctccgttcgccctgtactgaagagatcgcggtcttccaggcattctcgcggatcatcaaagaggccgacga

SEQ ID NO: 834634 - DNA, 75 bp, synthetic construct
  source 1..75: mol_type = other DNA
atgaatatgccatttttaaaagacattcccccgttcatcttcttcaccggtaaaggtggagtgggtaagacatcc

SEQ ID NO: 834635 - DNA, 75 bp, synthetic construct
  source 1..75: mol_type = other DNA
atggtaaatatcataaacaaaaaatctttatttattcttacaatgatggcttgcagtacaagttatgctgcttct

SEQ ID NO: 834636 - DNA, 75 bp, synthetic construct
  source 1..75: mol_type = other DNA
acatgcgagagttagctcgtatttttttgagctatacaggttatgttattgataataataaatccaaagagttat

SEQ ID NO: 834637 - DNA, 75 bp, synthetic construct
  source 1..75: mol_type = other DNA
gatgctgtcatccttatcgacagtggatttcgccgtggcaccgatgtggtgaaagcactggcgctgggcgcgaat

SEQ ID NO: 834638 - DNA, 75 bp, synthetic construct
  source 1..75: mol_type = other DNA
atggcagggctggagaaacagcgtgagcagtattcacacgccgtccaggcattgtctgatccggatcgtacgagg

SEQ ID NO: 834639 - DNA, 75 bp, synthetic construct
  source 1..75: mol_type = other DNA
gaatcgaccctcatgatgaaacagaacgttatcgccagcatgtccttgaaacgaaaggacgtgacctggatgaag

SEQ ID NO: 834640 - DNA, 75 bp, synthetic construct
  source 1..75: mol_type = other DNA
ttttttatttttgtatatcgggtgcttggtggtcctcgagtaggtagagattctttgctttattttaattttatt

SEQ ID NO: 834641 - DNA, 75 bp, synthetic construct
  source 1..75: mol_type = other DNA
atgaacgtcacttttgacaacctagcccctgaagtacagaacgctgtcatggttaagttcgacacatgtgaaaac

SEQ ID NO: 834642 - DNA, 75 bp, synthetic construct
  source 1..75: mol_type = other DNA
atgcgccatgagtttgttttgccctggcttgtgcgcgatcattatgtccctggtggaaagcccgggataaaaatc

SEQ ID NO: 834643 - DNA, 75 bp, synthetic construct
  source 1..75: mol_type = other DNA
caggcaaatcggtaatagcgttagcccattagtagctgaagctatgctattaccgttatataaattatgtcagtt

SEQ ID NO: 834644 - DNA, 75 bp, synthetic construct
  source 1..75: mol_type = other DNA
cccattatcttcaactccagctcatccggcacttcgttatacgacagcacatgcagccctggtgcaaacaacctt

SEQ ID NO: 834645 - DNA, 75 bp, synthetic construct
  source 1..75: mol_type = other DNA
ggcaacattcgacggccatatcgttgaagcgttgatgaaaatgccagaagttaacgctatgtatccggagcttaa

SEQ ID NO: 834646 - DNA, 75 bp, synthetic construct
  source 1..75: mol_type = other DNA
atcactgttgatatggtgattagcgcacaggaattgttgcaggaagacatggcaacattcgacggccatatcgtt

SEQ ID NO: 834647 - DNA, 75 bp, synthetic construct
  source 1..75: mol_type = other DNA
gtcaggaaaaaattcaacgatatttaaatatattctataaagaacataaaatctttgaggatagatacttgtctg

SEQ ID NO: 834648 - DNA, 75 bp, synthetic construct
  source 1..75: mol_type = other DNA
tataggatttattgattctgatgattatgttagcgagaattacattcgagaaatcaagtctaatatattaaaata

SEQ ID NO: 834649 - DNA, 75 bp, synthetic construct
  source 1..75: mol_type = other DNA
ctggtccggcaggcccgcaggggccgaaaggcgacaggggagagaccggtctgacgggagctgcaggcccggcag

SEQ ID NO: 834650 - DNA, 75 bp, synthetic construct
  source 1..75: mol_type = other DNA
ctggaaacggatcccgaagtcgaatggcaaggagcgcattctggggatcccgtggtgttccggtgctttgagcac

SEQ ID NO: 834651 - DNA, 75 bp, synthetic construct
  source 1..75: mol_type = other DNA
cgcccgcgcgttaaagcaaaactatgccgcctatatggagatcaaacctctgatcccgctcggcggttatgtggc

SEQ ID NO: 834652 - DNA, 75 bp, synthetic construct
  source 1..75: mol_type = other DNA
atctgaaacgccttgcggacatcgttgctgcgtcttttctgcttgagcaggggagtcaacatccggatttctccc

SEQ ID NO: 834653 - DNA, 75 bp, synthetic construct
  source 1..75: mol_type = other DNA
ccagttgctcagcatttgattaaacgcacctacagcgaaccgcactgggaacgggcgcagggcgcggtgatggca

SEQ ID NO: 834654 - DNA, 75 bp, synthetic construct
  source 1..75: mol_type = other DNA
gctgcaaatgctgacacttcagcaggggaggcatcggagtcagcccggcaggcggcagaaagtgcagccgctgca

SEQ ID NO: 834655 - DNA, 75 bp, synthetic construct
  source 1..75: mol_type = other DNA
tcaccggactgacctttcttgaccccaaagatgccacacaggttcaggggctgtttcagcatttgcaggtcaggt

SEQ ID NO: 834656 - DNA, 75 bp, synthetic construct
  source 1..75: mol_type = other DNA
gtggatccggtgctaccgccacagcgtcgccagcttttgctgacggtgggcgaggtgcgggtacaagtaacgcag

SEQ ID NO: 834657 - DNA, 75 bp, synthetic construct
  source 1..75: mol_type = other DNA
tgcatctaaggcagaaactgataatttaagaaaggagtcatatcctctgaaaagaaaatgtcccacaggtacaga

SEQ ID NO: 834658 - DNA, 75 bp, synthetic construct
  source 1..75: mol_type = other DNA
gatacaaagtcaaaaagcagttatttaatgtcgccgactatggcgttcctcaaatgcgataccgagtcatcattg

SEQ ID NO: 834659 - DNA, 75 bp, synthetic construct
  source 1..75: mol_type = other DNA
taatttttatctgtgcgttttattgatgaactctttaatgctggcttttatcggtcagcgaggtccattgttatc

SEQ ID NO: 834660 - DNA, 75 bp, synthetic construct
  source 1..75: mol_type = other DNA
aaaagccagctgcgtcaactggatagcgaggcgtgtcgggaactggcacgtcaggcgtgtgaatgtcgcagcgcg

SEQ ID NO: 834661 - DNA, 75 bp, synthetic construct
  source 1..75: mol_type = other DNA
gtagcgatcccgcacaccaaatctcagtggatccgtcattccagtatcagcattgcccggctggcgaaaccggtt

SEQ ID NO: 834662 - DNA, 75 bp, synthetic construct
  source 1..75: mol_type = other DNA
caactacagccagatcgatccggcgttatgtcgtgaactctttattcgccacgcgctggtggaaggtgactggca

SEQ ID NO: 834663 - DNA, 75 bp, synthetic construct
  source 1..75: mol_type = other DNA
ggtaatgcagccagggatgcaacgaccgcaacagaaaaagcccgggagtcagcagaaagcgcacagtcagcggaa

SEQ ID NO: 834664 - DNA, 75 bp, synthetic construct
  source 1..75: mol_type = other DNA
cctacgaatggcgcaagaatctgtaggcctgataagcgtagcgcatcaggcatttgccaccactgccggatgcgg

SEQ ID NO: 834665 - DNA, 75 bp, synthetic construct
  source 1..75: mol_type = other DNA
cggatgcggcgtggacgccttatccggcctacgagtggcgcgagaattgtaggcctgataagcgtagcgcatcag

SEQ ID NO: 834666 - DNA, 75 bp, synthetic construct
  source 1..75: mol_type = other DNA
cagccaactggcagtgggtgcctttgtttcctacactgataacagtgtcagccataatcacggaggaaacagcaa

SEQ ID NO: 834667 - DNA, 75 bp, synthetic construct
  source 1..75: mol_type = other DNA
tgctgcatattcaggattacgaagtggacgccatgctggggctgggccttgccggaaaaggtaaaggcggcaaag

SEQ ID NO: 834668 - DNA, 75 bp, synthetic construct
  source 1..75: mol_type = other DNA
tagaaccggaatcggtcgaggcgctggtggcggggattcgtcaggcgctcctgctgcccaaacacaacacggtgg

SEQ ID NO: 834669 - DNA, 75 bp, synthetic construct
  source 1..75: mol_type = other DNA
atgggggcatttatcatggcttcactggataacggcatgagtatgatggatgtaccgaccttctggcagtatatc

SEQ ID NO: 834670 - DNA, 75 bp, synthetic construct
  source 1..75: mol_type = other DNA
gcgtttcgatgttaaccggcttgagcaactgcccctgcggcagttgcttattcaggtcaggcaactgaggaagca

SEQ ID NO: 834671 - DNA, 75 bp, synthetic construct
  source 1..75: mol_type = other DNA
aagagatacttagcgcataggcttgcttggttttatatgacaggaaaacctgcaaattgcttaatagatcatatt

SEQ ID NO: 834672 - DNA, 75 bp, synthetic construct
  source 1..75: mol_type = other DNA
actactcgccggagttaaccggcatcggcaaatacaccggagagatggtggaatggctggcggcgcaaggtcatg

SEQ ID NO: 834673 - DNA, 75 bp, synthetic construct
  source 1..75: mol_type = other DNA
aaaatatgatattgataaagcaacaaatggaatctttttaagaaaagttgacgatggtgtaagtgcaatggcaag

SEQ ID NO: 834674 - DNA, 75 bp, synthetic construct
  source 1..75: mol_type = other DNA
tgcgtggacacctgaagaagatgcgctgctgattgcgctttatccatccaccccggttaaggatattgctgtcag

SEQ ID NO: 834675 - DNA, 75 bp, synthetic construct
  source 1..75: mol_type = other DNA
cggagagttgctgcccttcacccgcatacctgacgatgatgttcatcttattcgtgaattacgggatgctgaatc

SEQ ID NO: 834676 - DNA, 75 bp, synthetic construct
  source 1..75: mol_type = other DNA
cgctgatgcaactattactacggcgaagatagccagtactattcaatcaactaactatgttgctaactctacagg

SEQ ID NO: 834677 - DNA, 75 bp, synthetic construct
  source 1..75: mol_type = other DNA
agcagcttgcttacgagcacgctctgtttgtggaggtcggcaccgaagggcaatcgatcatcacgtcgctcgtgt

SEQ ID NO: 834678 - DNA, 75 bp, synthetic construct
  source 1..75: mol_type = other DNA
gtgattatcgccttcctggtgatgatcccctgtgcctggctgacattgctcggctggccaaaagtacaaatgggg

SEQ ID NO: 834679 - DNA, 75 bp, synthetic construct
  source 1..75: mol_type = other DNA
acgatatgattgttttctcaccaacgacaagcgatcgtcctgtgcttgcctgggatgtggtcgcacccggtcaga

SEQ ID NO: 834680 - DNA, 75 bp, synthetic construct
  source 1..75: mol_type = other DNA
cttctcttgatgaagaaagtactgccgatacaggaagtaatgaaaatagcgccaaagcaatactggatatggcaa

SEQ ID NO: 834681 - DNA, 75 bp, synthetic construct
  source 1..75: mol_type = other DNA
tgaatccgcaacgcgcagtatcatgacagctaaagatctagcatatctaattaaatttgatgggaattataaaga

SEQ ID NO: 834682 - DNA, 75 bp, synthetic construct
  source 1..75: mol_type = other DNA
taccattacgacagtcagcaccggctggtgcactacacgcggacacaatatgcagagccgctggtcgaaagtcgc

SEQ ID NO: 834683 - DNA, 75 bp, synthetic construct
  source 1..75: mol_type = other DNA
ggtcagcgtcgcatcaggcagtcggcactgttgccggatgcggcgtaaacgccttatccggcctacggagggtgc

SEQ ID NO: 834684 - DNA, 75 bp, synthetic construct
  source 1..75: mol_type = other DNA
ccacaaaggttaactctggtgggcaatatacccttgggcggtcaaaagatgagtttcaggctctggcccgggcag

SEQ ID NO: 834685 - DNA, 75 bp, synthetic construct
  source 1..75: mol_type = other DNA
atgtataaaccaaatatttacaatgaccctatgagaaaagaagaacccaacctcgttctggtagagcgccttact

SEQ ID NO: 834686 - DNA, 75 bp, synthetic construct
  source 1..75: mol_type = other DNA
gttttttccgaggtgatgaaggcaagaatgcccgataataccgggtcgtttgcctatagtatttatctctgttcc

SEQ ID NO: 834687 - DNA, 75 bp, synthetic construct
  source 1..75: mol_type = other DNA
ccgacatgaaagtgccacgccgtcatgtagagctgtacgacaccatcatgggttgtcttggctatacttcaccgg

SEQ ID NO: 834688 - DNA, 75 bp, synthetic construct
  source 1..75: mol_type = other DNA
cattcatctgatggcctgattctccggctactggatatacacgaggtcgggcgtgaaatacgtcgtcagacagaa

SEQ ID NO: 834689 - DNA, 75 bp, synthetic construct
  source 1..75: mol_type = other DNA
actatcatgagtatgatttattttcactgatatccgatagtgaaggtttgcctatgtcaggccttgaggctcaca

SEQ ID NO: 834690 - DNA, 75 bp, synthetic construct
  source 1..75: mol_type = other DNA
ggcaaaaaaaatacacatcaaaccttctggatctattatattatttcgacataagaataatattagcgacacatt

SEQ ID NO: 834691 - DNA, 75 bp, synthetic construct
  source 1..75: mol_type = other DNA
caattaaaaaattatatggctataaagacatacatctaattttcaataaaaaaagtacaattatcattgcagaga

SEQ ID NO: 834692 - DNA, 75 bp, synthetic construct
  source 1..75: mol_type = other DNA
atcctgaacagcgcaatggcctactatgcgaagcaaaatggcgtcccggtcgttctctctgagttgtcgcaggtt

SEQ ID NO: 834693 - DNA, 75 bp, synthetic construct
  source 1..75: mol_type = other DNA
aaacacaacgtaatggaccttattggctgggtcttttccctcaccctggtctctatgctggttgtcattcgtacc

SEQ ID NO: 834694 - DNA, 75 bp, synthetic construct
  source 1..75: mol_type = other DNA
atataactgataacaatgcaagctctcgtgtcgatcagtttgctgcttcactttctagtgctaaaaatagttacg

SEQ ID NO: 834695 - DNA, 75 bp, synthetic construct
  source 1..75: mol_type = other DNA
catggtgatggccgccatgtttaatatgatgacgctgcaggtgttaaaggggtatgtgtttgcgcttatctggct

SEQ ID NO: 834696 - DNA, 75 bp, synthetic construct
  source 1..75: mol_type = other DNA
aaccatattagccgtgatgaagcattcggccagcttatggacaagtcaatgagaggtgatgtttctggcgaggct

SEQ ID NO: 834697 - DNA, 75 bp, synthetic construct
  source 1..75: mol_type = other DNA
gcgtgttgaccagtttgccgcgtcactctccagtgccaaaaacagctacgaccagtatacaaccagccggacacg

SEQ ID NO: 834698 - DNA, 75 bp, synthetic construct
  source 1..75: mol_type = other DNA
tgattaaattacaatataatgtacacttacggaatgtaatttatattgtgtttttttgtgaagaatgtccggatg

SEQ ID NO: 834699 - DNA, 75 bp, synthetic construct
  source 1..75: mol_type = other DNA
cgaagttgcattctgcaacctgataataaatcccttttcagagagggttgcatagtactggagttgacccaatca

SEQ ID NO: 834700 - DNA, 75 bp, synthetic construct
  source 1..75: mol_type = other DNA
gcatcgtctgaccattgatagtgccagacttatggcgcttataatcacccagagaaatgagttagtcctgttcag

SEQ ID NO: 834701 - DNA, 75 bp, synthetic construct
  source 1..75: mol_type = other DNA
agggaaaatggacgctcatgatccacgtagtaagctggttatgtcattcatgcgggcggtggatataattcaacc

SEQ ID NO: 834702 - DNA, 75 bp, synthetic construct
  source 1..75: mol_type = other DNA
cgtagtaagctggttatgtcattcatgcgggcggtggatataattcaaccagaatgctttgttatggagaatgtt

SEQ ID NO: 834703 - DNA, 75 bp, synthetic construct
  source 1..75: mol_type = other DNA
caagcgatgctaaacaaggcatacaagcaaaactggaatgaccattatcctgatgaagtatcgaaagcacagtca

SEQ ID NO: 834704 - DNA, 75 bp, synthetic construct
  source 1..75: mol_type = other DNA
gataccgcctttgtcgtgggggatcgtgaagagcatgggagccgccttctccagtgcctacagccatttttcttc

SEQ ID NO: 834705 - DNA, 75 bp, synthetic construct
  source 1..75: mol_type = other DNA
cgttccatctcggcgtggatggcggcatcgaagttaccgccagccataacccgatggattataacggcatgaaac

SEQ ID NO: 834706 - DNA, 75 bp, synthetic construct
  source 1..75: mol_type = other DNA
gaccctaagcgagatatgccattcaaaggaactcgccacaacgcgcttgatgatgccattcaccaagccaaatac

SEQ ID NO: 834707 - DNA, 75 bp, synthetic construct
  source 1..75: mol_type = other DNA
ctcgtgatgataaaagattcctcagggctgctgaaaatgctctttcaacagtgaagcgcagttcaggcgcgcagc

SEQ ID NO: 834708 - DNA, 75 bp, synthetic construct
  source 1..75: mol_type = other DNA
atctcaatttactgctctgcctgcaactgctgatgcaggaacgcagcgtgaccaaagcggctaagcggatgaacg

SEQ ID NO: 834709 - DNA, 75 bp, synthetic construct
  source 1..75: mol_type = other DNA
gacaccgcgcggcctgaagtttgagttggcggcggaatcgccgctgatgatgatcatgcttaatgcgctgtcgaa

SEQ ID NO: 834710 - DNA, 75 bp, synthetic construct
  source 1..75: mol_type = other DNA
gacgacccgctctttgtgaactcaccgctgggcctgtcgcccacaccgctaatggtcagcatggagcaaaatctg

SEQ ID NO: 834711 - DNA, 75 bp, synthetic construct
  source 1..75: mol_type = other DNA
gatgtaatgctgccggggatggacggctaccgggtacttgagggtgtgcgagcagccaaacagacgccggtgctg

SEQ ID NO: 834712 - DNA, 75 bp, synthetic construct
  source 1..75: mol_type = other DNA
aagagaaaacctcgacatatatcagccgtgcattaaaagaatcagggttcatcgttgatatttctgccaatggcg

SEQ ID NO: 834713 - DNA, 75 bp, synthetic construct
  source 1..75: mol_type = other DNA
aaacccgagtccactgcgtggcgtgtttgacaaaaacaaccagttccagacatgcgaggaggcctcacgggatct

SEQ ID NO: 834714 - DNA, 75 bp, synthetic construct
  source 1..75: mol_type = other DNA
aagattcctcaaggctgctgaaaatgctctttcgaccgtgaagcgcagcttagacgcgccgcaagatcaagaata

SEQ ID NO: 834715 - DNA, 75 bp, synthetic construct
  source 1..75: mol_type = other DNA
tgataatgtcagcgggaacagctggaatactaacagcaccactgcatttggccagatgacccggcagctctctaa

SEQ ID NO: 834716 - DNA, 75 bp, synthetic construct
  source 1..75: mol_type = other DNA
ataaaaagcgtgggggcaggtttctcaaatatctacagccattttgcttcctctggcctcagtgccacctctcag

SEQ ID NO: 834717 - DNA, 75 bp, synthetic construct
  source 1..75: mol_type = other DNA
ggggagaggaaaacggcagtgtgcaatctcctgcagaaaccgatacaagactttcagaaaaagcaactgaagaat

SEQ ID NO: 834718 - DNA, 75 bp, synthetic construct
  source 1..75: mol_type = other DNA
ctcgtgcggcgaagaaaacggggcagaaaaaacggctcaggacgctgaaagatcttgaccgtgctgcgctactgc

SEQ ID NO: 834719 - DNA, 75 bp, synthetic construct
  source 1..75: mol_type = other DNA
aatatcggacatgagccgctgatcaagcacaatatccctgcactgacccgccatcgcctgagctgggtgaaacag

SEQ ID NO: 834720 - DNA, 75 bp, synthetic construct
  source 1..75: mol_type = other DNA
gcttatccgttctctgctcagaagtacccgcccgtcagggctggcgcaggcgatcatggaggtcgggcgggtcaa

SEQ ID NO: 834721 - DNA, 75 bp, synthetic construct
  source 1..75: mol_type = other DNA
actatttgcaacagtgcccttcagctcaccacagcccgttttctgggaacatttctgacggatttaactcaggtt

SEQ ID NO: 834722 - DNA, 75 bp, synthetic construct
  source 1..75: mol_type = other DNA
gtggtcattggcgcgtctattcgctacggtcactaccattctgcgttccaggaatttgtcaaaaaacatgcgacg

SEQ ID NO: 834723 - DNA, 75 bp, synthetic construct
  source 1..75: mol_type = other DNA
tgactggatcactgagtttggtaaggctgcccggacagataactggcgtccttttttgttaaaacagaaaccatc

SEQ ID NO: 834724 - DNA, 75 bp, synthetic construct
  source 1..75: mol_type = other DNA
agctgggcacaattcatgcgtcagaactcattcgatcgctattgagaagtacccgaccgtcagggcttgctcagg

SEQ ID NO: 834725 - DNA, 75 bp, synthetic construct
  source 1..75: mol_type = other DNA
ggtgttctggcgggctgacaaagcagcgaattacggggcgttggacgaactggctcggggttgtgttgacctttc

SEQ ID NO: 834726 - DNA, 75 bp, synthetic construct
  source 1..75: mol_type = other DNA
tatacgttttcgttaccggaagatattctgaagggcgagttaagaccattaaatttcaatacaaacaatgaatta

SEQ ID NO: 834727 - DNA, 75 bp, synthetic construct
  source 1..75: mol_type = other DNA
cccgctacgccggcatggcatcagcaaggtatatcgccagaatgccagaagcacggcggctggctgtgctgaccg

SEQ ID NO: 834728 - DNA, 75 bp, synthetic construct
  source 1..75: mol_type = other DNA
ctcaagtgatggagcttctggtcattccggaaggtcagcgtgtatcagcactggaacagttgaaaaaaggccctg

SEQ ID NO: 834729 - DNA, 75 bp, synthetic construct
  source 1..75: mol_type = other DNA
aatgatattgccagagggcaatcagatccccgaaaaatagtccttcagtgggacgaaatgatccggaccgcaggc

SEQ ID NO: 834730 - DNA, 75 bp, synthetic construct
  source 1..75: mol_type = other DNA
ctcgttatgctggcatggcgtcggtaaaatatatcgctcgaatgccacagcagagaaagcttgctgcacttactg

SEQ ID NO: 834731 - DNA, 75 bp, synthetic construct
  source 1..75: mol_type = other DNA
aaacctctctatctacttcatggatgagagccaccgccgcagcattgatgagaacccgaaaaaagaccgcgtgga

SEQ ID NO: 834732 - DNA, 75 bp, synthetic construct
  source 1..75: mol_type = other DNA
atacggaagctggtaatgctaagttagtgaaaatgacctacaccgatagcaacggtaaaaaagtcgaaggcggtt

SEQ ID NO: 834733 - DNA, 75 bp, synthetic construct
  source 1..75: mol_type = other DNA
aacggtatccttcaaagatggttcatattacgtaactgttgaatcatcggatgatgatactaaaaatgggactta

SEQ ID NO: 834734 - DNA, 75 bp, synthetic construct
  source 1..75: mol_type = other DNA
agccgtcggctggctgcagaaataccgcaacgaagccccgacgcgtgtgatgagcaatatcaccgatgctgacgg

SEQ ID NO: 834735 - DNA, 75 bp, synthetic construct
  source 1..75: mol_type = other DNA
aaaacccgaaaaaagaccgcgttgaaaactacgagtcgatgaatatcgactatgtggtcgaggcgtatgccgccg

SEQ ID NO: 834736 - DNA, 75 bp, synthetic construct
  source 1..75: mol_type = other DNA
atgcgatgctcatcacgaagctggaaaacctgtccatctactacatggatgacagtcatcgccgcgtgattgagg

SEQ ID NO: 834737 - DNA, 75 bp, synthetic construct
  source 1..75: mol_type = other DNA
aatgactcattagtcaatgctgatggcgctgctggcgctgaagcaactagagttacaattgatggtgatggtact

SEQ ID NO: 834738 - DNA, 75 bp, synthetic construct
  source 1..75: mol_type = other DNA
ggtgctgacacgagtggcctgaaactggttcaactgtccaacacggattccgcaggtaaagtgaccaacgtgggt

SEQ ID NO: 834739 - DNA, 75 bp, synthetic construct
  source 1..75: mol_type = other DNA
tttcctgccccatctgctgaataccgttaaattttcatccgcacctgccggggttaccactctgaatgcctgtga

SEQ ID NO: 834740 - DNA, 75 bp, synthetic construct
  source 1..75: mol_type = other DNA
gtctggattccgcggttaccaacctgaacaacaccactaccaacctgtctgaagcgcagtcccgtattcaggacg

SEQ ID NO: 834741 - DNA, 75 bp, synthetic construct
  source 1..75: mol_type = other DNA
gcgtgaacgtactggcaaaagatggctcgatgaaaattcaggtcggtgcaaatgatggtcatacaatcagcattg

SEQ ID NO: 834742 - DNA, 75 bp, synthetic construct
  source 1..75: mol_type = other DNA
gataaagcttcaggatcgttaggtaccctaaaattagttgagaaagacggtaagtactatgtaaatgacactaaa

SEQ ID NO: 834743 - DNA, 75 bp, synthetic construct
  source 1..75: mol_type = other DNA
tgtcgattttatgtgtggtgtgctgacatgtgctcgccgttttcgtacattcaatgtcgttgatgactttaatcg

SEQ ID NO: 834744 - DNA, 75 bp, synthetic construct
  source 1..75: mol_type = other DNA
cgatgttcaaactgcacttcaccgaatacgacaaccactccgacatcccaagctggggcggtggttacggcaaca

SEQ ID NO: 834745 - DNA, 75 bp, synthetic construct
  source 1..75: mol_type = other DNA
cgggcggctgatgtagtggatttacgcctgaaggcacctgggttaaagctgacggtcagcagggatacttcctgc

SEQ ID NO: 834746 - DNA, 75 bp, synthetic construct
  source 1..75: mol_type = other DNA
aaaatctctcatggtgtaatgaaaatacgcttaaaactcttcacgcttttagtattgaagagttatacggcactt

SEQ ID NO: 834747 - DNA, 75 bp, synthetic construct
  source 1..75: mol_type = other DNA
tggtcaggatcgcggatagttttgggatctggcattatagctatatgcctgactggggaattcctcttatgctaa

SEQ ID NO: 834748 - DNA, 75 bp, synthetic construct
  source 1..75: mol_type = other DNA
aaaccgcggttatccggtcatgctgcgcatggataatggtccggaatttatctctctggcgggcagatatacacg

SEQ ID NO: 834749 - DNA, 75 bp, synthetic construct
  source 1..75: mol_type = other DNA
gcgaactgaagcgaaaacctgacgtgaatattcagggtgagccttgcgaacgctttgtgaccgaacggagcagcg

SEQ ID NO: 834750 - DNA, 75 bp, synthetic construct
  source 1..75: mol_type = other DNA
gcggtaaagtttatggtacgccgtatcagtgggggcctaacctgttgatgtacaacaccaaaaccttcccgacac

SEQ ID NO: 834751 - DNA, 75 bp, synthetic construct
  source 1..75: mol_type = other DNA
ggcgtccggcgatgcctcgctgcgtttgattatgggtaaacgcgtgcagccgattaataccgcgctaattcctaa

SEQ ID NO: 834752 - DNA, 75 bp, synthetic construct
  source 1..75: mol_type = other DNA
cggcggtatctattactggcagcgtgaacgcgaccgtaaagatgttaccgacggcgacaaatacaaaaccaacct

SEQ ID NO: 834753 - DNA, 75 bp, synthetic construct
  source 1..75: mol_type = other DNA
gcagcggccaaatttaaatacggtccggtttgggcgagggcaggttatattcagccaaccggtcagacgctgtta

SEQ ID NO: 834754 - DNA, 75 bp, synthetic construct
  source 1..75: mol_type = other DNA
cttcggtgcgatgtatgacctgaaaaactggaatcttccaggcttcgccatcggcgcttcctacgtttacgcatg

SEQ ID NO: 834755 - DNA, 75 bp, synthetic construct
  source 1..75: mol_type = other DNA
gcaggacccggcaacggatgcgggactgcttaaccagaacgatatcaccaccctcattcgtaaagacggtttccg

SEQ ID NO: 834756 - DNA, 75 bp, synthetic construct
  source 1..75: mol_type = other DNA
gcggaatggatgcaaatgagtaatctgctgctggataaaccacaccacgaaacgccgcgcggtcttaagtttgaa

SEQ ID NO: 834757 - DNA, 75 bp, synthetic construct
  source 1..75: mol_type = other DNA
gttatccattgattatgaagtgctgtttagtgatgtgccctgcgtctggctacgcaaagatcatccggcactacg

SEQ ID NO: 834758 - DNA, 75 bp, synthetic construct
  source 1..75: mol_type = other DNA
atgtgggcggtggataaaccgcttaacccgtcgctggcccgcgacattattgaaggtatccgcgccaaaatgcgc

SEQ ID NO: 834759 - DNA, 75 bp, synthetic construct
  source 1..75: mol_type = other DNA
tcaactgccgttggttgctcttcctctcccgtttgacgaaagccagcaaaaaaaaaaagctggaagttcctttta

SEQ ID NO: 834760 - DNA, 75 bp, synthetic construct
  source 1..75: mol_type = other DNA
attacgattcgctggatgccattactcgtggtgaagtggatatcggtttttccgggcgtgaaagtcatccacgct

SEQ ID NO: 834761 - DNA, 75 bp, synthetic construct
  source 1..75: mol_type = other DNA
ttgcgttatccgcatatcagcatttgctgggaacagagcgatacctgggcgctggacaatgtgttacaggagctg

SEQ ID NO: 834762 - DNA, 75 bp, synthetic construct
  source 1..75: mol_type = other DNA
atgtgggcggtggataaaccgcttaacccgtcgctggcccgcgacattatcgaaggtatccgtgccaaaatgcgc

SEQ ID NO: 834763 - DNA, 75 bp, synthetic construct
  source 1..75: mol_type = other DNA
ggcgatcacttaccgtaaaaacttcagccagcgcgaaggaatgctgatctggcccgactttactggctgggacac

SEQ ID NO: 834764 - DNA, 75 bp, synthetic construct
  source 1..75: mol_type = other DNA
acgactatacgccagtgccgccgcttgaaaatctgatgctgcgccagcgcatcaccgatcgctatctggtcgatt

SEQ ID NO: 834765 - DNA, 75 bp, synthetic construct
  source 1..75: mol_type = other DNA
ggcccgttcgctggatgccatcgctgaccaggcaaaaccagtgaccgttgttgtgcgtgtgccgcagggtgaaac

SEQ ID NO: 834766 - DNA, 75 bp, synthetic construct
  source 1..75: mol_type = other DNA
gtcacgataacaaagccgttgctactgagttgctgagtgtggcgcaaagcctgcgcgggtttgcttacctgtcag

SEQ ID NO: 834767 - DNA, 75 bp, synthetic construct
  source 1..75: mol_type = other DNA
atggctcaggattaccaccatggggtgcgcgttgttgaagtcaacgaaggcacccgatccattaccacggtgagc

SEQ ID NO: 834768 - DNA, 75 bp, synthetic construct
  source 1..75: mol_type = other DNA
aaatggatgaactggtcattaacaccaaaagtgcagggtgatgtggcagcctggtttggctcactgcctgtggtg

SEQ ID NO: 834769 - DNA, 75 bp, synthetic construct
  source 1..75: mol_type = other DNA
gattcgctccgtttgcagttctacgacggcacgcgctggcaggagagctggtcatcagtgcaggcgatccctgtg

SEQ ID NO: 834770 - DNA, 75 bp, synthetic construct
  source 1..75: mol_type = other DNA
gctatgcgaataatactgcatacgcaaaaatggggcatgatagaacgcgtttggttacttcatgggccacaaatt

SEQ ID NO: 834771 - DNA, 75 bp, synthetic construct
  source 1..75: mol_type = other DNA
ggttataaagaaagagataaaaaatccgaaatggtagatttacttatattaattagtaatgacgagcctaacggt

SEQ ID NO: 834772 - DNA, 75 bp, synthetic construct
  source 1..75: mol_type = other DNA
gacgccagcctttatgcagcgtttacgcgcactgtgtgacgagcacggaatcatgctgattgccgatgaagtgca

SEQ ID NO: 834773 - DNA, 75 bp, synthetic construct
  source 1..75: mol_type = other DNA
ggtgtggttaacccgttgatgcgtctgccacgcagcaatctgctcaccgtcggttaccgcattcatgacggttat

SEQ ID NO: 834774 - DNA, 75 bp, synthetic construct
  source 1..75: mol_type = other DNA
gtcgtcagtacaggcgatccctgtggcggtgcgcatgaccctgcattcgccgcaatggggcgagattgaacgcat

SEQ ID NO: 834775 - DNA, 75 bp, synthetic construct
  source 1..75: mol_type = other DNA
gggcattgctcaacaggaacagcaggccaaatcaactacaccaaagggtaaaaaagacgcaggaaggctatatca

SEQ ID NO: 834776 - DNA, 75 bp, synthetic construct
  source 1..75: mol_type = other DNA
aaaaacatccgggaaagtgatggtctgtgggggagacgtcttctgcctcgatggcgaatgcgataaggctcagag

SEQ ID NO: 834777 - DNA, 75 bp, synthetic construct
  source 1..75: mol_type = other DNA
atgggtaaattttctttcatgcacctggtaggcatgggcggtcgttcgcgaatggatgacgatccggaggacaaa

SEQ ID NO: 834778 - DNA, 75 bp, synthetic construct
  source 1..75: mol_type = other DNA
gaaagtcaatcagcgatacaaagacgatcatggtgcgcttgtcaccgtgaccagtgttgaggaaacccgggtggt

SEQ ID NO: 834779 - DNA, 75 bp, synthetic construct
  source 1..75: mol_type = other DNA
atgtcagaagatattccattaccgaaaatcaatcagcgatacagagacgatcatggtgcgcttgtcaccgtgacc

SEQ ID NO: 834780 - DNA, 75 bp, synthetic construct
  source 1..75: mol_type = other DNA
tacgatgcttttagccatcctgcaggggagccgattattcctgaccatagcggaaacaaaagaactttttgccca

SEQ ID NO: 834781 - DNA, 75 bp, synthetic construct
  source 1..75: mol_type = other DNA
acccaacgccagactcaccgctgagatcgtggcgcgcgcccgtgacaaaggcctgattcttctctcctgcggccc

SEQ ID NO: 834782 - DNA, 75 bp, synthetic construct
  source 1..75: mol_type = other DNA
cgcaacaactggcgggcatgacgcgcggaagaggcgatcagggccagcgtgaaccagcgttactggctggcgctg

SEQ ID NO: 834783 - DNA, 75 bp, synthetic construct
  source 1..75: mol_type = other DNA
cccacgatctgacacaaatgatgccacgcccggtaagaggcgagcaggggcagcgagaaccggcgttactggctg

SEQ ID NO: 834784 - DNA, 75 bp, synthetic construct
  source 1..75: mol_type = other DNA
accaaaaaattcgctaacaccactaaagggcacgatgagctggtgagctggctgaaaggtcacaagattgaccat

SEQ ID NO: 834785 - DNA, 75 bp, synthetic construct
  source 1..75: mol_type = other DNA
gtaaaaatacattttttaattatgggttgtcattgctctctgacgacaatttagatattaaatgtttcgattaca

SEQ ID NO: 834786 - DNA, 75 bp, synthetic construct
  source 1..75: mol_type = other DNA
atggtacgcgctggcaggagaactggtcgtcagtacaggcgatccctgtggcggtgcgcatgaccctgcattcgc

SEQ ID NO: 834787 - DNA, 75 bp, synthetic construct
  source 1..75: mol_type = other DNA
ggtgtggttaacccgttgatgcgtctgccacgcagtaatctgctcaccgtcggttaccgcattcatgacggctat

SEQ ID NO: 834788 - DNA, 75 bp, synthetic construct
  source 1..75: mol_type = other DNA
gtgccgctcactattgaagatgctcagattcgtcagggtctggagatcatcgctcagtgttttgatgaggcgaaa

SEQ ID NO: 834789 - DNA, 75 bp, synthetic construct
  source 1..75: mol_type = other DNA
accggatgcgaaactcaccgccgagatcgtagcgcgtgcccgcgataaaggtctgattcttctctcctgcggccc

SEQ ID NO: 834790 - DNA, 75 bp, synthetic construct
  source 1..75: mol_type = other DNA
ccatcgtgattgagcccgttcagggcgaaggcggtttctacgccgcgacgccagcctttatgcagcgtttacgcg

SEQ ID NO: 834791 - DNA, 75 bp, synthetic construct
  source 1..75: mol_type = other DNA
atgtgttgcgtcctgatggtcgtcatcgcaccaaaaaattcgactaacaccactaaagggcacgatgagctggtg

SEQ ID NO: 834792 - DNA, 75 bp, synthetic construct
  source 1..75: mol_type = other DNA
gctcagagtgaaggactgcgtaacaagactgataccgtggatgcgcgcatgctggcagagttctgtcgtcagaag

SEQ ID NO: 834793 - DNA, 75 bp, synthetic construct
  source 1..75: mol_type = other DNA
tggcaccagatctcaccacctttgcgaaatcgatcgcaggcggcttcccgctggcgggcgtcaccggtcgcgccg

SEQ ID NO: 834794 - DNA, 75 bp, synthetic construct
  source 1..75: mol_type = other DNA
gccagacctggaactggcgcgtcgctttgcggaagctatccacgcgaaatatccgggcaaactgctggcttataa

SEQ ID NO: 834795 - DNA, 75 bp, synthetic construct
  source 1..75: mol_type = other DNA
gaattcatcactggtgaacgcactaatgaaggtttcttccgtacccatgcgggcattgaacaagctatcagccgt

SEQ ID NO: 834796 - DNA, 75 bp, synthetic construct
  source 1..75: mol_type = other DNA
ccaatgcttccattcactgcgcggtcacttcatcacctgcttagatagggctggcgtaccagaacagcgcatagg

SEQ ID NO: 834797 - DNA, 75 bp, synthetic construct
  source 1..75: mol_type = other DNA
atcttatcccccgtcacattcggccttttgaaagactggaacatatccggaggtatacggactatcttcttatgc

SEQ ID NO: 834798 - DNA, 75 bp, synthetic construct
  source 1..75: mol_type = other DNA
aggcattggtgttgatcgttatctctatcgccatcaatatgatcggcgggcaactggccagcatggtcaaattac

SEQ ID NO: 834799 - DNA, 75 bp, synthetic construct
  source 1..75: mol_type = other DNA
tggctataccttcgtttctcaccagcaggaagtgggtacgggttacttcgataaagtgacgaccattattcaggg

SEQ ID NO: 834800 - DNA, 75 bp, synthetic construct
  source 1..75: mol_type = other DNA
tctatgcctcgttgatagatgaaatccttaagatgaataatgaagggataagggttgtggaacattcggcctcca

SEQ ID NO: 834801 - DNA, 75 bp, synthetic construct
  source 1..75: mol_type = other DNA
tagaagtttttctccaaagcatcaagaagacagatatcgctttagataaaattgggcggcggctcgtttcagagt

SEQ ID NO: 834802 - DNA, 75 bp, synthetic construct
  source 1..75: mol_type = other DNA
gacagtgaagcactgaacatcggaaagctggtactcacgaaggcttttggggtgtttgccgacggaacaccgttt

SEQ ID NO: 834803 - DNA, 75 bp, synthetic construct
  source 1..75: mol_type = other DNA
attttccgtgaccaatatctattagagttccgcaagctacagctcatgatgaaaccggataaccccattacccgg

SEQ ID NO: 834804 - DNA, 75 bp, synthetic construct
  source 1..75: mol_type = other DNA
gaaccctgatcgggaagatatccgcatccagaatgcgctctccgtcctccactccactgtaaaacaggcaaagag

SEQ ID NO: 834805 - DNA, 75 bp, synthetic construct
  source 1..75: mol_type = other DNA
atcacaagggaatgttcaggtatctgatgaactccatctctgaaggtggtcctaaggctgagatgctaaaaggat

SEQ ID NO: 834806 - DNA, 75 bp, synthetic construct
  source 1..75: mol_type = other DNA
agatttgtaaatatatagcagaacatgagaaaaagaaacttagcgaaattatgaaacaaacaatctctttaatgc

SEQ ID NO: 834807 - DNA, 75 bp, synthetic construct
  source 1..75: mol_type = other DNA
gacaggcagaacaggcgggagccagtctcaatcgacaggtgagcgtggaagatctcgtcagaaccggtgcttttc

SEQ ID NO: 834808 - DNA, 75 bp, synthetic construct
  source 1..75: mol_type = other DNA
aatataacggtgtgtccgtcacgctttccgaattgtctgcgctgcagcggtttgattatatgaagtttgtttcag

SEQ ID NO: 834809 - DNA, 75 bp, synthetic construct
  source 1..75: mol_type = other DNA
ctggtggcgaccgataccatttatccgcataccgggcaggccgcaaaagcagcgatgaccgttgctgcgctgtgt

SEQ ID NO: 834810 - DNA, 75 bp, synthetic construct
  source 1..75: mol_type = other DNA
gaattgtctgcgctgcagcgtattgagcatcttgccctcctgaaacggcgtgcagaacaggcagaatccagcggc

SEQ ID NO: 834811 - DNA, 75 bp, synthetic construct
  source 1..75: mol_type = other DNA
gaagacgtggtgttgcgtctgtccgggatgagcgggcctgttcatgtggatacggatatcaccgaagtggcgaaa

SEQ ID NO: 834812 - DNA, 75 bp, synthetic construct
  source 1..75: mol_type = other DNA
gctgcagcgtattgagcatcttgccctcctgaaacggcgtgcagaacaggcagaatccagcggcaacctgcaggt

SEQ ID NO: 834813 - DNA, 75 bp, synthetic construct
  source 1..75: mol_type = other DNA
gtattgagcatcttgccctcctgaaacggcgggcagaagaggcggaagccagcggcaacctgcaggtaagcgtgg

SEQ ID NO: 834814 - DNA, 75 bp, synthetic construct
  source 1..75: mol_type = other DNA
tttttgaaatttgctattcattaggcgatttcaaagccaaaatgctcattcgtcatattagtatgaaggatagca

SEQ ID NO: 834815 - DNA, 75 bp, synthetic construct
  source 1..75: mol_type = other DNA
ttggaagaaatatactgttttactgtaaaaacccaagaatgattgacactctggttaaagcaggaatagatttta

SEQ ID NO: 834816 - DNA, 75 bp, synthetic construct
  source 1..75: mol_type = other DNA
ggtcgcgatccgcgtccagaatttaaaacagcccagtttgctgatggcgtcgagacgatgaacgacttacaaccg

SEQ ID NO: 834817 - DNA, 75 bp, synthetic construct
  source 1..75: mol_type = other DNA
gtgaaggtgaaagtgctggaagtggatcttcagcgtaaacgtatcgccctgactatgcgcctggatgagcagcct

SEQ ID NO: 834818 - DNA, 75 bp, synthetic construct
  source 1..75: mol_type = other DNA
ggggccgaaagccttcgagcagtgcgcgggcttcttgcgcattaaccacggtgataacccgctggacgcttctac

SEQ ID NO: 834819 - DNA, 75 bp, synthetic construct
  source 1..75: mol_type = other DNA
ccaactcgctggggcgtggcgcacaattgttgcagctcagccacctgcgcctgcgcctgttgccggaaaaagcag

SEQ ID NO: 834820 - DNA, 75 bp, synthetic construct
  source 1..75: mol_type = other DNA
aataaaggcaatgatcatttttattatcctcatcatccttatgaaaacaaaaatccataatgaattaaaggaatg

SEQ ID NO: 834821 - DNA, 75 bp, synthetic construct
  source 1..75: mol_type = other DNA
gaatacaagagaagagcgaatttcttcattgattcagaaaatggaggatacgctgaaagttatccctaaaaatgt

SEQ ID NO: 834822 - DNA, 75 bp, synthetic construct
  source 1..75: mol_type = other DNA
gatggtcagggctcgatcggtaccgaaatcgcgggtaataacgcggtggtgaatcaggacggtacactggatgtc

SEQ ID NO: 834823 - DNA, 75 bp, synthetic construct
  source 1..75: mol_type = other DNA
agatgccgggattattgatattggcgcgtcaaacgtcgaagcgttcctgatggcaatgtctcgctttgacagtgg

SEQ ID NO: 834824 - DNA, 75 bp, synthetic construct
  source 1..75: mol_type = other DNA
tctgcatcagggagaggtaatggctctataagtccttggccttggacgcttcgcgttcctgggcttcctttctat

SEQ ID NO: 834825 - DNA, 75 bp, synthetic construct
  source 1..75: mol_type = other DNA
gaaggtcgccgccgccagttgcagctcattggtaagatgctgcgccaacgcgatgtagagccgatccgtcaggcg

SEQ ID NO: 834826 - DNA, 75 bp, synthetic construct
  source 1..75: mol_type = other DNA
aagcagctcgtaattactggtctgcattggatgatgaaaagaaaaacaatttccgcttccatcatatttctactg

SEQ ID NO: 834827 - DNA, 75 bp, synthetic construct
  source 1..75: mol_type = other DNA
gcagtgatgcacctggcggctgagagccacgttgaccgctcaataactggcccggcggcattcattgaaactaat

SEQ ID NO: 834828 - DNA, 75 bp, synthetic construct
  source 1..75: mol_type = other DNA
gaattaccgctatttactgagacgacagcctatgcgccaagcagtccttattccgcatcaaaagcatccagcgat

SEQ ID NO: 834829 - DNA, 75 bp, synthetic construct
  source 1..75: mol_type = other DNA
gctgccggcgtcctgcacggggacaggtcttcctgaaaacgctgcgcgtggacggtgacagtttcagcttcaccc

SEQ ID NO: 834830 - DNA, 75 bp, synthetic construct
  source 1..75: mol_type = other DNA
ttgcgacggaggcaatccgctggcctgacagtgtggatgaacacaaaaaggccaacgcctttgcaggcagtgtcc

SEQ ID NO: 834831 - DNA, 75 bp, synthetic construct
  source 1..75: mol_type = other DNA
ttctgcttctaaagcttccagcgatcatttggttcgcgcatggaaacgtacttatggtttaccgaccattgtgac

SEQ ID NO: 834832 - DNA, 75 bp, synthetic construct
  source 1..75: mol_type = other DNA
gtaacgcctttacggtctttaatcaggcatttcatggcattaccacgccggataatccggtgccgttatatctcg

SEQ ID NO: 834833 - DNA, 75 bp, synthetic construct
  source 1..75: mol_type = other DNA
aggcagccaaaggacaagggatagcaaaatcattttccgtcgcagcaattaacgttattccttctgctatcgcgt

SEQ ID NO: 834834 - DNA, 75 bp, synthetic construct
  source 1..75: mol_type = other DNA
atgactgggcaatggtgccatgagattgctcacgaataccgaagaattggaagcccttcaaactgtgtgattgat

SEQ ID NO: 834835 - DNA, 75 bp, synthetic construct
  source 1..75: mol_type = other DNA
ccgggaatatgacgaggaaacaacagaaaccgctgattttgactcttatgaaataaagggcaataaagttgagtt

SEQ ID NO: 834836 - DNA, 75 bp, synthetic construct
  source 1..75: mol_type = other DNA
aagaaaaatcccgcagagctatggaaagctgcagatgaatttgaacgaaaaaacgggactgcgtaccgtgaaatt

SEQ ID NO: 834837 - DNA, 75 bp, synthetic construct
  source 1..75: mol_type = other DNA
gacaaagaaaacgctgcttttaagcgtaccgagggatataagtacgttggggatctggacaggtacagagaacgt

SEQ ID NO: 834838 - DNA, 75 bp, synthetic construct
  source 1..75: mol_type = other DNA
agctgcttcagaatgcgaaagctaaaaaagactctctttccgaatggagcaggcgaatatatgaaggggcacggt

SEQ ID NO: 834839 - DNA, 75 bp, synthetic construct
  source 1..75: mol_type = other DNA
acatacaagatcgcatggccatttctaaagccctggaagctattaatcaggtccatatggcggagaattttaagc

SEQ ID NO: 834840 - DNA, 75 bp, synthetic construct
  source 1..75: mol_type = other DNA
gcattgttggtttggttggtttggttggtttcgttgttagtggattgttcaaatcaagaaaagatggcgataaag

SEQ ID NO: 834841 - DNA, 75 bp, synthetic construct
  source 1..75: mol_type = other DNA
gcattactgggaacaagtacaattagtattgttggtttggttggcttcgttgttagtggattgttcaaatctaga

SEQ ID NO: 834842 - DNA, 75 bp, synthetic construct
  source 1..75: mol_type = other DNA
cccgccattaataaagattccgtcctgcaggctgcccggcaggcatacgcccgggaatatgacgaggaaacaaca

SEQ ID NO: 834843 - DNA, 75 bp, synthetic construct
  source 1..75: mol_type = other DNA
tctgcccgaaatttgtcacatcacttgtcggtttttccccgaaacagacgaccactattaataaagactccgtac

SEQ ID NO: 834844 - DNA, 75 bp, synthetic construct
  source 1..75: mol_type = other DNA
tagcagagcgtgatgtgtccgttttacaggcatttggtgtacgaatggaattcacccgcggtgatatgctgaggg

SEQ ID NO: 834845 - DNA, 75 bp, synthetic construct
  source 1..75: mol_type = other DNA
atcaacaggcgcggataacgttgagttttattggcgatcctgattatgcgtttagccatcaaagcaaacgcaccg

SEQ ID NO: 834846 - DNA, 75 bp, synthetic construct
  source 1..75: mol_type = other DNA
atagatcgtaaattgcggcttatgctttctaggcgtgaagagtttgaaagttccttaaagtactctaatcatgac

SEQ ID NO: 834847 - DNA, 75 bp, synthetic construct
  source 1..75: mol_type = other DNA
tacactcttggtactgcaaagccgagagatgagaagatgattcgaattgcagaaagacttgccgtctcaccggct

SEQ ID NO: 834848 - DNA, 75 bp, synthetic construct
  source 1..75: mol_type = other DNA
agtgtcattaaggaggcagattcaaatattgattatattaaaagtgacagcttgttttcagttcttagaaaggaa

SEQ ID NO: 834849 - DNA, 75 bp, synthetic construct
  source 1..75: mol_type = other DNA
atgatgtatcgcatcagaaattggttggtagcgacgttgctgctgctgtgcgcgcaggtgggtgccgcgacgctc

SEQ ID NO: 834850 - DNA, 75 bp, synthetic construct
  source 1..75: mol_type = other DNA
aatcattccaaataccccaaacaatcctcatttagtcaattttgatgcttcaagagtagtgccaactgcctcaga

SEQ ID NO: 834851 - DNA, 75 bp, synthetic construct
  source 1..75: mol_type = other DNA
cctacggcggggttcgacgtcgttacggctgacgtcagcggggaaatagtaaatcagcctactcgatcaaccgtc

SEQ ID NO: 834852 - DNA, 75 bp, synthetic construct
  source 1..75: mol_type = other DNA
caatacagaacggagttatctggggggaatgaaacccgcccacgtaacattgccttcaattatattgtgagagca

SEQ ID NO: 834853 - DNA, 75 bp, synthetic construct
  source 1..75: mol_type = other DNA
gctatatccgagaaggttcctagggcatttaggctatattctttttttgctcaaaatatagataaatcgtgtgga

SEQ ID NO: 834854 - DNA, 75 bp, synthetic construct
  source 1..75: mol_type = other DNA
ttgaacagcaaaaacggcgagatcatcaggtacaagatcaatccaagaacgctaagcaaaaacgagatcggttga

SEQ ID NO: 834855 - DNA, 75 bp, synthetic construct
  source 1..75: mol_type = other DNA
cctgttccgtggccttccgccactccgccgacaggctggctgaaatgcaatggtgcggctttttctgctgaagaa

SEQ ID NO: 834856 - DNA, 75 bp, synthetic construct
  source 1..75: mol_type = other DNA
atctaatcgacccggtggtgacctttgccaatagcccggaaagctacatgcagtatgtcgaccagcatccggaac

SEQ ID NO: 834857 - DNA, 75 bp, synthetic construct
  source 1..75: mol_type = other DNA
aacgtttttaggccagttactggtcagcaaagtttcaaccgagctgatgagcgtattgccgtgggttacaggttt

SEQ ID NO: 834858 - DNA, 75 bp, synthetic construct
  source 1..75: mol_type = other DNA
aggttggtttcgccggtggcggcgcattgctggattttgccagtaacctgacggctaccagcctgctcggcctga

SEQ ID NO: 834859 - DNA, 75 bp, synthetic construct
  source 1..75: mol_type = other DNA
agcagcagagccggaaaatagggatgattgtccccagtgtggttgtttctgagaagcataccgacacgctggaga

SEQ ID NO: 834860 - DNA, 75 bp, synthetic construct
  source 1..75: mol_type = other DNA
tggccatataaatatgctggggcattatacgttttcgttaccggaagatattctgaagggcgagttaagaccatt

SEQ ID NO: 834861 - DNA, 75 bp, synthetic construct
  source 1..75: mol_type = other DNA
aaattatgacggacacggcaggatccagcgatatcatttttggcctgttctggttactgggctaccagttttccc

SEQ ID NO: 834862 - DNA, 75 bp, synthetic construct
  source 1..75: mol_type = other DNA
tgatgagaacaccgatgaagcagctctgcggcaggctatttttcgccgcataccaaaggacaaactggctgaatc

SEQ ID NO: 834863 - DNA, 75 bp, synthetic construct
  source 1..75: mol_type = other DNA
agataggcttcacgattttcatcccttttttgattatcgacctggtgattgccagccatccaccagtacaaacag

SEQ ID NO: 834864 - DNA, 75 bp, synthetic construct
  source 1..75: mol_type = other DNA
gcagacgctggtgttcatcacctcgttgacgtttattccggcaattttactgatgatgaccagtttcactcgcat

SEQ ID NO: 834865 - DNA, 75 bp, synthetic construct
  source 1..75: mol_type = other DNA
accagcgagctgaaaaccgcgttccagattggtttcacgatttttattcctttcctgattatcgacctggtaatc

SEQ ID NO: 834866 - DNA, 75 bp, synthetic construct
  source 1..75: mol_type = other DNA
aatggcctggcaggaaactttctgggcgcatggctttggcaaagtcaccgataaatttggcgtaccgtggatgat

SEQ ID NO: 834867 - DNA, 75 bp, synthetic construct
  source 1..75: mol_type = other DNA
atgccgttaagtccctacctctcttttgccggtaactgttccgacgcgattgcttattatcaacgtacgttgggc

SEQ ID NO: 834868 - DNA, 75 bp, synthetic construct
  source 1..75: mol_type = other DNA
atgccgttaagtccctacctctcttttgctggtaactgttccgacgcgattgcctattatcaacgtacgttgggc

SEQ ID NO: 834869 - DNA, 75 bp, synthetic construct
  source 1..75: mol_type = other DNA
atgctgaaacgcccgcttttaaacaatcaacacaacactattttttcaaaaaaacagccactccccgtcgtcgaa

SEQ ID NO: 834870 - DNA, 75 bp, synthetic construct
  source 1..75: mol_type = other DNA
atgctaatgcatctgatccttgcgcttcggtactttgcttatatggaaagtgagtgcagaagtgctgaaaaggat

SEQ ID NO: 834871 - DNA, 75 bp, synthetic construct
  source 1..75: mol_type = other DNA
cgtgggcgaactgcacctgcgtacccgtgcaacggctcaggtggctgcactggtgacactggtctgtttcgcact

SEQ ID NO: 834872 - DNA, 75 bp, synthetic construct
  source 1..75: mol_type = other DNA
cgtgctgatatttttgcccattgtgttgctctacactctctggagctactacaaaatgtgggggcgcatgacgac

SEQ ID NO: 834873 - DNA, 75 bp, synthetic construct
  source 1..75: mol_type = other DNA
taccagccttgctggcgttaggattaatatcaacaaatgctaatgcatctgacccttgcgcttctgtactttgct

SEQ ID NO: 834874 - DNA, 75 bp, synthetic construct
  source 1..75: mol_type = other DNA
agaaaaaaggaaacattcgctggagtaaaacatttgatgcccgcaaggcatttttgaatcagtgctcaacggctg

SEQ ID NO: 834875 - DNA, 75 bp, synthetic construct
  source 1..75: mol_type = other DNA
tggaaggtgacaagaaaatttataatgctgaagttgctgaatgggataagttacggcaacgattgcttgacgtat

SEQ ID NO: 834876 - DNA, 75 bp, synthetic construct
  source 1..75: mol_type = other DNA
gtgggataaccgttctgacttcaacgccaacggcgaaaaagcggtcttcttcggtgcgatgtatgacctgaaaaa

SEQ ID NO: 834877 - DNA, 75 bp, synthetic construct
  source 1..75: mol_type = other DNA
gccggggcgaattttgattacggcgatgctggtgcgttgagtttctcctacatgtggaccaacgaatacaaagca

SEQ ID NO: 834878 - DNA, 75 bp, synthetic construct
  source 1..75: mol_type = other DNA
tacggatattaccgaagtggcgaaaaataacgcgctgactgatgatgatttttctgcgggaaagtcttcgacggc

SEQ ID NO: 834879 - DNA, 75 bp, synthetic construct
  source 1..75: mol_type = other DNA
gaccttgtcagaaccggcgcgtttctggtggcgatgtccctgtggcataaccatccacagaaaacggagtcacca

SEQ ID NO: 834880 - DNA, 75 bp, synthetic construct
  source 1..75: mol_type = other DNA
aatataacggtgtatccgtcatgctttctgagctgtctgcgctgcagcgtattgagcatcttgccctcctgaaac

SEQ ID NO: 834881 - DNA, 75 bp, synthetic construct
  source 1..75: mol_type = other DNA
tcaggacggtcgcgccaaaggcacgatgttcaaactgcatttcaccgaatatgacaaccactccgacatcccaag

SEQ ID NO: 834882 - DNA, 75 bp, synthetic construct
  source 1..75: mol_type = other DNA
atgaaaaagatatgcaaaggtctaatcgtaatttttactgtgtcctgttttatagcgccaacgtatgccgctgat

SEQ ID NO: 834883 - DNA, 75 bp, synthetic construct
  source 1..75: mol_type = other DNA
cccagagtgtatgcagcggcgttttccggcttttatgtggcgatgatcctggtgctgtgctcgctgttcttccgc

SEQ ID NO: 834884 - DNA, 75 bp, synthetic construct
  source 1..75: mol_type = other DNA
aaatcgccgatgcacgctggcgtaaaatgtgggatgccggtctggtcatcggcagtctggtgccgccggtagtct

SEQ ID NO: 834885 - DNA, 75 bp, synthetic construct
  source 1..75: mol_type = other DNA
ccggcttttatgtggcgatgatcctggtgctgtgctcgctgttcttccgcccgctggcctttgattatcgcggaa

SEQ ID NO: 834886 - DNA, 75 bp, synthetic construct
  source 1..75: mol_type = other DNA
cctgttccgtggccttccgccactccgccaacggggtggctaaaatgtaacggagcagtattttcttctgaaaag

SEQ ID NO: 834887 - DNA, 75 bp, synthetic construct
  source 1..75: mol_type = other DNA
atacccggaactggcaaaggcttacccgacaaataaattgccagatttacgtggtgagtttattcgtggctggga

SEQ ID NO: 834888 - DNA, 75 bp, synthetic construct
  source 1..75: mol_type = other DNA
cccagagtctatgcagcggcgttttcgggcttctatgtggcgatgattctggtgctgtgctcgctgttcttccgc

SEQ ID NO: 834889 - DNA, 75 bp, synthetic construct
  source 1..75: mol_type = other DNA
gcccagcagttatgggcgatatggatagttaaaacggaaaattcagtagaagaagcaccaccttataaacaatca

SEQ ID NO: 834890 - DNA, 75 bp, synthetic construct
  source 1..75: mol_type = other DNA
gggaagaactcgattccctgcgccagcttagcaagctgctggcaacggaaaaaccccatctggcccgcttcctgg

SEQ ID NO: 834891 - DNA, 75 bp, synthetic construct
  source 1..75: mol_type = other DNA
ggagagggaacgatttgcctgcaaaccagcgcgaaagaaatttcgcctgacttcatcagtgtgaaaggggaagtt

SEQ ID NO: 834892 - DNA, 75 bp, synthetic construct
  source 1..75: mol_type = other DNA
gacggtgtgctgggaaccattgaactggaccctaacgatgatatcgatgccttacccgacggcatctacgcccag

SEQ ID NO: 834893 - DNA, 75 bp, synthetic construct
  source 1..75: mol_type = other DNA
gatgatgcggaagtggtgtttaacgcgctacctgggcaggtgtttcacggcaaactgaccagtattttacctgtc

SEQ ID NO: 834894 - DNA, 75 bp, synthetic construct
  source 1..75: mol_type = other DNA
acctgatgacggcgacgcataatataaagacactgcgcgcgcagctcactgaagcgcaagccaataccacccagg

SEQ ID NO: 834895 - DNA, 75 bp, synthetic construct
  source 1..75: mol_type = other DNA
agtcagcgtgaagggatgctgatctggccggattttatcagctgggacacggtgctgaatgccgaagcaacggca

SEQ ID NO: 834896 - DNA, 75 bp, synthetic construct
  source 1..75: mol_type = other DNA
gcagtggtgaatagttatttatcggcaccgctaaaaccggttattgatagcaccgataatagctgtctgcctgaa

SEQ ID NO: 834897 - DNA, 75 bp, synthetic construct
  source 1..75: mol_type = other DNA
gctggaatatgcgactgaggtggtgattgcacgccagtttattgcacggtgttatgagagtgatcctctggtagt

SEQ ID NO: 834898 - DNA, 75 bp, synthetic construct
  source 1..75: mol_type = other DNA
atgttgttggatattgaccgatttaaattggttaatgatacctacgggcatttaatcggcgatgtagtattacgc

SEQ ID NO: 834899 - DNA, 75 bp, synthetic construct
  source 1..75: mol_type = other DNA
tccgcgcctcgcgatatatgcccataaagaagattgcggcagtctgctggtacaaattaaccatccgcaagtcat

SEQ ID NO: 834900 - DNA, 75 bp, synthetic construct
  source 1..75: mol_type = other DNA
gttatgagagtgatcctctggtagtaacattgcagtatcagaacgaggactatggctatggttatcgctcagaaa

SEQ ID NO: 834901 - DNA, 75 bp, synthetic construct
  source 1..75: mol_type = other DNA
cctataacgaattcgatctccgactgcgtaagcatctctctctggcagaggaaagctgctggcagcgttgcgccg

SEQ ID NO: 834902 - DNA, 75 bp, synthetic construct
  source 1..75: mol_type = other DNA
gctattcaggaaatggacgccaaatatcaagctaagattgaagcattgactaaagagattgccgaactcaaagca

SEQ ID NO: 834903 - DNA, 75 bp, synthetic construct
  source 1..75: mol_type = other DNA
cacgttcctagcggtactatcggtaacgctcttgttcgtctccatgttcatgatactaactttgactttaacgct

SEQ ID NO: 834904 - DNA, 75 bp, synthetic construct
  source 1..75: mol_type = other DNA
gaccagacatcacgagatcttaactactttggtgctttccgaactaatggacaagatggtcttttagatctaact

SEQ ID NO: 834905 - DNA, 75 bp, synthetic construct
  source 1..75: mol_type = other DNA
cttaacgttcctcactcttccggtaaagcgcacggtcgcggatttactttccgttatgcgtctggtggatctcgt

SEQ ID NO: 834906 - DNA, 75 bp, synthetic construct
  source 1..75: mol_type = other DNA
aacaaatctgatgcagatagcaaacatgcagctttaacgaaaacggtcactgacaataacaccgcgattaacaac

SEQ ID NO: 834907 - DNA, 75 bp, synthetic construct
  source 1..75: mol_type = other DNA
cacaaacggctggtaaaaagccgacgccggaacaattatcacagggtgagatcgccttacaactggcggaccatg

SEQ ID NO: 834908 - DNA, 75 bp, synthetic construct
  source 1..75: mol_type = other DNA
aagtgatggatgccgtcgctccaggcgggctgggcggcacctatgccggtaacccgattgcctgcgtggcggcgc

SEQ ID NO: 834909 - DNA, 75 bp, synthetic construct
  source 1..75: mol_type = other DNA
tggcagaggcgcgacgggtaagagaaaatgagcgcaataaaatacgcgaaaaacaacttcaggcattaaatgatg

SEQ ID NO: 834910 - DNA, 75 bp, synthetic construct
  source 1..75: mol_type = other DNA
ttttacaatgattaccttgagcaacaacctgcaacaccagaacaactgacagagattatacaggataccccctgt

SEQ ID NO: 834911 - DNA, 75 bp, synthetic construct
  source 1..75: mol_type = other DNA
gcagcagaagcatttcaggaaacacttaattatcagtctgaacctttaagtcttggtaaggcaaaagagcttgca

SEQ ID NO: 834912 - DNA, 75 bp, synthetic construct
  source 1..75: mol_type = other DNA
gagaaagaaacgaaatggcagaggtgaaacgggtaagagaaaatgagcgaaataagatacgtgaaaaacaacttc

SEQ ID NO: 834913 - DNA, 75 bp, synthetic construct
  source 1..75: mol_type = other DNA
ttctacaatgattaccttgagcaacaaccagcaacaccagaacaactgacagaaattgctcaggataccccctgt

SEQ ID NO: 834914 - DNA, 75 bp, synthetic construct
  source 1..75: mol_type = other DNA
aggagacacttaattatcagtctgaacctttaacacttggtaaggcaaataaaatcgcatcagaatgcagaaaaa

SEQ ID NO: 834915 - DNA, 75 bp, synthetic construct
  source 1..75: mol_type = other DNA
ctcaccattgaagacgctcagatccgtcagggtctggagatcatcagccagtgttttgctgaggcgaagcagtag

SEQ ID NO: 834916 - DNA, 75 bp, synthetic construct
  source 1..75: mol_type = other DNA
tcatgctgattgccgacgaagtgcagagcggcgcggggcgtaccggcacgctgtttgcgatggagcaaatgggcg

SEQ ID NO: 834917 - DNA, 75 bp, synthetic construct
  source 1..75: mol_type = other DNA
tcgccagcatccatcgaatcttcaaaaatgacgccgcgccggaagatatcgccggcatcgtgattgaaccggttc

SEQ ID NO: 834918 - DNA, 75 bp, synthetic construct
  source 1..75: mol_type = other DNA
tggaagtgttaaaggtattcgagcaggaaaatctgctgcaaaaagccaacgatctggggcaaaagctgaaagacg

SEQ ID NO: 834919 - DNA, 75 bp, synthetic construct
  source 1..75: mol_type = other DNA
gatctggggcagaagctaaaagacggattgctggcgatagccgaaaaacacccggagatcggcgacgtacgcggc

SEQ ID NO: 834920 - DNA, 75 bp, synthetic construct
  source 1..75: mol_type = other DNA
gacgccagcctttatgcagcgtttacgcgcgctgtgtgacgagcacgggatcatgctgattgccgatgaagtgca

SEQ ID NO: 834921 - DNA, 75 bp, synthetic construct
  source 1..75: mol_type = other DNA
aacgcgaagtaggtattattgctcaggatctggaagaagtattgccggaagcagtaggtattcaatccaccgaag

SEQ ID NO: 834922 - DNA, 75 bp, synthetic construct
  source 1..75: mol_type = other DNA
tctgagtctctaccccgggtagctgcccggtttaacattcccagccacaacatggttaaaaactggataaaaggc

SEQ ID NO: 834923 - DNA, 75 bp, synthetic construct
  source 1..75: mol_type = other DNA
atgaaaaagaaaaattctggctttactgccagcggcctctctcggcctgaaatccgccccggtgatattttccgg

SEQ ID NO: 834924 - DNA, 75 bp, synthetic construct
  source 1..75: mol_type = other DNA
acaggcagcgccccgcagtaaaccaaccagcagggagaaagcacgcgccaatattcagaagatgaaaaccatgat

SEQ ID NO: 834925 - DNA, 75 bp, synthetic construct
  source 1..75: mol_type = other DNA
ggtctgcaagttaatgcaaccggttaccctcctgcaccagacgggcgccgaaacagggcgtcacggtgcagggca

SEQ ID NO: 834926 - DNA, 75 bp, synthetic construct
  source 1..75: mol_type = other DNA
gtccagatggtatgcatccgcatcgctgaaccggcctctgataccggcgcggtctgcaagttaatgcaaccggtt

SEQ ID NO: 834927 - DNA, 75 bp, synthetic construct
  source 1..75: mol_type = other DNA
atcagggaaaccataaccgctgcacgccagaacagacattacgttatctcaaccggctctcggggccctttctcg

SEQ ID NO: 834928 - DNA, 75 bp, synthetic construct
  source 1..75: mol_type = other DNA
cagcaaagcgttaatgagcggcaatgttaaaaacgcgcaaatagcctcagtaaaagtgcagtatcttgataaaca

SEQ ID NO: 834929 - DNA, 75 bp, synthetic construct
  source 1..75: mol_type = other DNA
gggccatcgtaaagacgtaaatcagaaacgtgcagcaagtcatatccgcaaaatccgtgaaatgctggtcgcagg

SEQ ID NO: 834930 - DNA, 75 bp, synthetic construct
  source 1..75: mol_type = other DNA
ctgacagcggcaaaactcgcactaaattcatgcgcggggatatttaccgcgaccagtacggcggcatcgtgacga

SEQ ID NO: 834931 - DNA, 75 bp, synthetic construct
  source 1..75: mol_type = other DNA
tatgattgcgtgatgcctgtttatcaattccggcgtgatttcacgctggtgggccatcgtaaagccgtaaatcag

SEQ ID NO: 834932 - DNA, 75 bp, synthetic construct
  source 1..75: mol_type = other DNA
aatccgccccggcgatattttccgggataactacggtggcacggtaacgattaaaagcgtggcggggcggtgcgt

SEQ ID NO: 834933 - DNA, 75 bp, synthetic construct
  source 1..75: mol_type = other DNA
ttattgccattgcaggaagcaccgcgcaagggggcgtgatccatttttatggccaaattgtggaaccggcatgtg

SEQ ID NO: 834934 - DNA, 75 bp, synthetic construct
  source 1..75: mol_type = other DNA
gtgtcggcttcgcaggtcagccctttttgcatacagcgtgacggtatgctgatttcggggattcagttcaccgct

SEQ ID NO: 834935 - DNA, 75 bp, synthetic construct
  source 1..75: mol_type = other DNA
ggtaacgagcaacgcaaacaggtttttgaatgtaaggatgctacaagttatcactggtatactgaacgtactcag

SEQ ID NO: 834936 - DNA, 75 bp, synthetic construct
  source 1..75: mol_type = other DNA
gtcgcggatttactttccgttatgcgtctggtggatctcgtgttgaaacctatggttttgatagagaaggacaga

SEQ ID NO: 834937 - DNA, 75 bp, synthetic construct
  source 1..75: mol_type = other DNA
gattcaattcagagttgctggtagtttagaaacgggtggtcgtgctcggataaatggtgatttggtggttactaa

SEQ ID NO: 834938 - DNA, 75 bp, synthetic construct
  source 1..75: mol_type = other DNA
actttagcaacgggtgctattaaaactaaattcttcggtgatttggaagctgctggtcaaattaaatggggtaag

SEQ ID NO: 834939 - DNA, 75 bp, synthetic construct
  source 1..75: mol_type = other DNA
atctggcatgaaactgttgaaggtagcgtatatcgtttggcaactggtgcaaccgacgccgacgagaagttaaga

SEQ ID NO: 834940 - DNA, 75 bp, synthetic construct
  source 1..75: mol_type = other DNA
atggttataacgttaactcttatgatcaggttgactttgtagaaattgtcatccgttccggtaacaataacccga

SEQ ID NO: 834941 - DNA, 75 bp, synthetic construct
  source 1..75: mol_type = other DNA
cgaaatgacatgcctcgcggggcggggttaaaaagcgcgtttacgtggaatcggttttacatcgagaaagatgat

SEQ ID NO: 834942 - DNA, 75 bp, synthetic construct
  source 1..75: mol_type = other DNA
tcaccaagttgattcagttggaagagtttttcggcacccatccagtgcatggattgccaccactgactgaagaaa

SEQ ID NO: 834943 - DNA, 75 bp, synthetic construct
  source 1..75: mol_type = other DNA
agaatcagctgctgcaccgcgaaatcctgttcaggggtacgttaaactcggtcagcgttcacccccgtgaagtta

SEQ ID NO: 834944 - DNA, 75 bp, synthetic construct
  source 1..75: mol_type = other DNA
ccattacactacgccgacctgctggtcaatccaaccatattgcgtttcaagataatcgtactggagatattactc

SEQ ID NO: 834945 - DNA, 75 bp, synthetic construct
  source 1..75: mol_type = other DNA
aattaaggcgtttcaggaaatgagcgctaagtttgatgctatggctaaagaacttgccgaaacgaaagctgaatt

SEQ ID NO: 834946 - DNA, 75 bp, synthetic construct
  source 1..75: mol_type = other DNA
gtcagtatgaagtagacgtatggccccgtgggcgtaatggaaaacgcatccgcaggcgatttgaaaagaaacaag

SEQ ID NO: 834947 - DNA, 75 bp, synthetic construct
  source 1..75: mol_type = other DNA
ttccaatgtctccgcgaccgtcaacagtacagaagtaaagaaattgatgaagcacgatggcaaagccttgcttgt

SEQ ID NO: 834948 - DNA, 75 bp, synthetic construct
  source 1..75: mol_type = other DNA
gcaaagccttgcttgtgctgtttgatttctctgacacaccctattcagaagaacagattgaatccttccgcaact

SEQ ID NO: 834949 - DNA, 75 bp, synthetic construct
  source 1..75: mol_type = other DNA
acgttgctatttgctgggttggtttgcagataatgtctcaccggaagtaaaaagcaagctgccaagaactgtatc

SEQ ID NO: 834950 - DNA, 75 bp, synthetic construct
  source 1..75: mol_type = other DNA
agggaagattttaaacgctggtcaatggccttgcgcacaacggatcagatccttgcctatgaccgcgcatcagta

SEQ ID NO: 834951 - DNA, 75 bp, synthetic construct
  source 1..75: mol_type = other DNA
tcagcagatatctcacaggttagcgacctgatgaaactgcctgctcgtgaacgcttcgccgccgtcctgctgttc

SEQ ID NO: 834952 - DNA, 75 bp, synthetic construct
  source 1..75: mol_type = other DNA
actggccttccctgggccggggcaaccatcgtaaatccgcgtttaatgtcgcgtatttctttgttgaaaaacgca

SEQ ID NO: 834953 - DNA, 75 bp, synthetic construct
  source 1..75: mol_type = other DNA
aaaagggcgaaacgctggccgataccatttcggttatcagcacttacgtcgatgcgatagtgatgcgtcatccgc

SEQ ID NO: 834954 - DNA, 75 bp, synthetic construct
  source 1..75: mol_type = other DNA
gcgacagcggcgaaactgaaagcaaacccgcaaccagagctgttgaagcacaaagtcattgccagctgtttcttc

SEQ ID NO: 834955 - DNA, 75 bp, synthetic construct
  source 1..75: mol_type = other DNA
tttcaatgtgtctccctttgttaccccaaacagcgaaattaaagcacttataaaaatattcacgaaacctgggca

SEQ ID NO: 834956 - DNA, 75 bp, synthetic construct
  source 1..75: mol_type = other DNA
cctggtacttccagcaagcaggcaatgggattttcgctcgccaggcgttactggcactggttctgaatcgcgatc

SEQ ID NO: 834957 - DNA, 75 bp, synthetic construct
  source 1..75: mol_type = other DNA
gaagcctctacccgtacccgcctctctttcgaaacttctatgcaccgcctgggtgccagcgtggtgggcttctcc

SEQ ID NO: 834958 - DNA, 75 bp, synthetic construct
  source 1..75: mol_type = other DNA
ccccgcctctctttcgaaacttccatgcaccgcctgggcgccagcgtggtgggcttctccgacagcgccaatacc

SEQ ID NO: 834959 - DNA, 75 bp, synthetic construct
  source 1..75: mol_type = other DNA
atgcaaatgctgttgaagagaagccaaaggaagcagcaccaaaggatgatgtaaaagtcaccaaccacggcggcg

SEQ ID NO: 834960 - DNA, 75 bp, synthetic construct
  source 1..75: mol_type = other DNA
agtgcattcaaaggaaagcatgcacaatcaggagctttttcggaatttttagatgctatagaacatggttatata

SEQ ID NO: 834961 - DNA, 75 bp, synthetic construct
  source 1..75: mol_type = other DNA
gtaccttcatatcgtgcaagagggaaagggataagtgaaatcgctggctattatcccagagtcatatcagatgat

SEQ ID NO: 834962 - DNA, 75 bp, synthetic construct
  source 1..75: mol_type = other DNA
cctcaaagccatatcacgtacgttaatcctgacttcattaaaatcagtggtttcactgaggaagaactattaggc

SEQ ID NO: 834963 - DNA, 75 bp, synthetic construct
  source 1..75: mol_type = other DNA
ccgcaacaatcgctggtacggcaactctccgcacagggactgatggcgaaagatgttgatacgattattctgtcg

SEQ ID NO: 834964 - DNA, 75 bp, synthetic construct
  source 1..75: mol_type = other DNA
ctaccacacgcttgggcaattacatcagctttggcaaaacggcgcggtagagattcgattgtgccacgaggggga

SEQ ID NO: 834965 - DNA, 75 bp, synthetic construct
  source 1..75: mol_type = other DNA
ttcagatgaaaattaataatttaatcgttgcattgtctgtcgcgcctgaagttaccgctatagcagagaaaataa

SEQ ID NO: 834966 - DNA, 75 bp, synthetic construct
  source 1..75: mol_type = other DNA
ttgccaggaactacattgttagttgaaagtctggacagactttcaagagaaaaagtcggtgaagcgattgaacgt

SEQ ID NO: 834967 - DNA, 75 bp, synthetic construct
  source 1..75: mol_type = other DNA
taaatagtgattattatcttgataccataacatatgaagatttaggattaagtgcattcaaaggaaagcatgcac

SEQ ID NO: 834968 - DNA, 75 bp, synthetic construct
  source 1..75: mol_type = other DNA
gaagccaaaggcgataaagaatattcatcgtatctgggatcacgtctgcgccgtatcaccgacatcaaaactgaa

SEQ ID NO: 834969 - DNA, 75 bp, synthetic construct
  source 1..75: mol_type = other DNA
agagccgcgtgcgccgggtcttgatgatatgacctatcgtcaggcatttatgattggctatttccagtgtctggc

SEQ ID NO: 834970 - DNA, 75 bp, synthetic construct
  source 1..75: mol_type = other DNA
gtagaggaaatctctgctggtgtatatcgctctgttctggctgctggttcgcaggctgggacggtacgtgtaact

SEQ ID NO: 834971 - DNA, 75 bp, synthetic construct
  source 1..75: mol_type = other DNA
gaggaatttccagattgcattagactattagaagaagtatcacctaataagatagacgaaaatttcaagatatta

SEQ ID NO: 834972 - DNA, 75 bp, synthetic construct
  source 1..75: mol_type = other DNA
tggcggcacagcgtctggaatccacggcaatgtccagccaccggcgcgagaaagaaatccgccaggcattcgcag

SEQ ID NO: 834973 - DNA, 75 bp, synthetic construct
  source 1..75: mol_type = other DNA
ttttattggcgatcctgattatgcgtttagccatcaaagcaaacgcaccgtggcgctcgatatcaaacaaacggg

SEQ ID NO: 834974 - DNA, 75 bp, synthetic construct
  source 1..75: mol_type = other DNA
caggaccctggcgctatcggccccggcggtacgcgggagaaaaatgtcaccatcgccattgcgcgtaaattacgt

SEQ ID NO: 834975 - DNA, 75 bp, synthetic construct
  source 1..75: mol_type = other DNA
cgcgtcagcgaaccggcgcgcaatccgtttaaaacggaaagtaaccgcactacgggtgttatcagcagtaatacg

SEQ ID NO: 834976 - DNA, 75 bp, synthetic construct
  source 1..75: mol_type = other DNA
gtgatatcgtgatcgaaatgtatcagcgtggcgaactgcagcagttgatcaaagaaactgccgctaaatacaagt

SEQ ID NO: 834977 - DNA, 75 bp, synthetic construct
  source 1..75: mol_type = other DNA
atgtggcgaacgttttgcctatgttgatatcctgcagaatccggacattcgtgcggaactgccgaaatatgctaa

SEQ ID NO: 834978 - DNA, 75 bp, synthetic construct
  source 1..75: mol_type = other DNA
cctgtaagcggttgctggatattcctggcgttggaccacttattgcgacggcagcggtggccaccatgggggaag

SEQ ID NO: 834979 - DNA, 75 bp, synthetic construct
  source 1..75: mol_type = other DNA
gaaagagagactgccaccgtatctcatcacggtactggaaaaccagtataagcggttgaatgagatggactccct

SEQ ID NO: 834980 - DNA, 75 bp, synthetic construct
  source 1..75: mol_type = other DNA
gaaagagagactgccaccgtatctcattactgtgctggaaaaccagtacaaccggctgaatgagctggactcact

SEQ ID NO: 834981 - DNA, 75 bp, synthetic construct
  source 1..75: mol_type = other DNA
cggcattggaccacttatcgcgacggcagcggtggccaccatgggggaagcatctgcatttaaatcagggcgaga

SEQ ID NO: 834982 - DNA, 75 bp, synthetic construct
  source 1..75: mol_type = other DNA
atgacggagacggtcgggcaagtgcccgtttcttttccgacaaaggatgtcgccgtgctcctctttttactgcgc

SEQ ID NO: 834983 - DNA, 75 bp, synthetic construct
  source 1..75: mol_type = other DNA
gtaagcacgctatctctggttacatgtacaacgagaaaggtgaaaacctgagtaacacacttatcgaaaaagaaa

SEQ ID NO: 834984 - DNA, 75 bp, synthetic construct
  source 1..75: mol_type = other DNA
cggcggccgacaggtgtggctatcgtggcaatggcgaacaagctggcacggacagtgtgggcaatagtcgctcat

SEQ ID NO: 834985 - DNA, 75 bp, synthetic construct
  source 1..75: mol_type = other DNA
gcaggcatggccttgtgggttttcagttatgtggccaccgtgtcgtgtgcgggctgtgccgtgcctccatcttag

SEQ ID NO: 834986 - DNA, 75 bp, synthetic construct
  source 1..75: mol_type = other DNA
caccgacgagctgcgcggcgtggatggcataagcgagcagatagaattccgtatcaggcagatgctgctgggtaa

SEQ ID NO: 834987 - DNA, 75 bp, synthetic construct
  source 1..75: mol_type = other DNA
ctcacgccaaattactcaacgcaacgtcaaatatcggcggtttactgctgtttattctcggtggcaaagtgattt

SEQ ID NO: 834988 - DNA, 75 bp, synthetic construct
  source 1..75: mol_type = other DNA
ggggcagttcctcggcgcgcgcatggggtcaagactggtgttgagcaaaggacaaaagctgatccgcccgatgat

SEQ ID NO: 834989 - DNA, 75 bp, synthetic construct
  source 1..75: mol_type = other DNA
cggccatcagccgggaagcctcccgtaatgagctgattgcccgtaacctgcgtgatttgcgcgagcagacaaaag

SEQ ID NO: 834990 - DNA, 75 bp, synthetic construct
  source 1..75: mol_type = other DNA
tgtaccgccgtctgcgtgccgccaccgaatccctgaacagcgacagcgatgtggatatgcgccttattaaggaca

SEQ ID NO: 834991 - DNA, 75 bp, synthetic construct
  source 1..75: mol_type = other DNA
agaactgcgcgggcaggatggcatcagcgaagagctggagcagcgtatccgtgatgtactgctgggtaaggcatg

SEQ ID NO: 834992 - DNA, 75 bp, synthetic construct
  source 1..75: mol_type = other DNA
ccgattgccaacaggtagtcgcatcagtatgccgttggcatattttgcaaattcaagaatgtttggtgaaatata

SEQ ID NO: 834993 - DNA, 75 bp, synthetic construct
  source 1..75: mol_type = other DNA
caaaagcctttagaaaaactagaacttgtacatacacgaattgcaagtttgttatcgcggattgctttgccagaa

SEQ ID NO: 834994 - DNA, 75 bp, synthetic construct
  source 1..75: mol_type = other DNA
tgccaaaaagctctttggtcgtttgcattcaatgggagtgattgagcaacgttacaaatctaaggtgcttacttt

SEQ ID NO: 834995 - DNA, 75 bp, synthetic construct
  source 1..75: mol_type = other DNA
cgcattcgctttctatgatacagtcgcggcaaaagcacgtgaaggcgtagaagccagagacgaaattaaatattt

SEQ ID NO: 834996 - DNA, 75 bp, synthetic construct
  source 1..75: mol_type = other DNA
ttgacgggccgcgatctcaaatcattgatgacgcatgcaaccaatctaactaacggtgtgttacaggtttcaaaa

SEQ ID NO: 834997 - DNA, 75 bp, synthetic construct
  source 1..75: mol_type = other DNA
ggaaaagcgccccgtaattttagaggcgcagaatgtatggataacctacaaaggaaagctaccgggaagaattac

SEQ ID NO: 834998 - DNA, 75 bp, synthetic construct
  source 1..75: mol_type = other DNA
gccttgaagattgtatggacgctattattgattacaggggtaaaaccccaaaaaaagttgataacggcatcccct

SEQ ID NO: 834999 - DNA, 75 bp, synthetic construct
  source 1..75: mol_type = other DNA
attattaaaactccgcgacaccctgctcccgaaactcatctccggtgagctatccctggaagatcttccggatct

SEQ ID NO: 835000 - DNA, 75 bp, synthetic construct
  source 1..75: mol_type = other DNA
agcgatcagtaaagtaccaatggctataaatcaaggatatattgcaattccttctgctaaacatttatcaccaga

SEQ ID NO: 835001 - DNA, 75 bp, synthetic construct
  source 1..75: mol_type = other DNA
cagtaacaaaagaaaccacaggtgctacagtcactgcaggtattggccttgcacaaattgctgacgttatgcctc

SEQ ID NO: 835002 - DNA, 75 bp, synthetic construct
  source 1..75: mol_type = other DNA
tcttgtattaacaggtgacactaaacgagaggatattgaggattcatctgtaaaaccgacctatatacttcaaca

SEQ ID NO: 835003 - DNA, 75 bp, synthetic construct
  source 1..75: mol_type = other DNA
tttggggataaatcgatccccagaggaacagcaattgccacttttgttaacggaaagtatccttcgaggcagaat

SEQ ID NO: 835004 - DNA, 75 bp, synthetic construct
  source 1..75: mol_type = other DNA
tgcacacactgcgattacaccgggaatatctccctgttttctcgcctacacgtcagcaaaattgaccaccagctt

SEQ ID NO: 835005 - DNA, 75 bp, synthetic construct
  source 1..75: mol_type = other DNA
tacgatgaagatgcttaaatcgagaaagctgaaggcagcggaatatgaattccagctgtctgcggaaacgttata

SEQ ID NO: 835006 - DNA, 75 bp, synthetic construct
  source 1..75: mol_type = other DNA
aaaatctaatcaagcagggctatatcaaaggcgttattggtttgccagccaacctgttttacggcaccggcatcc

SEQ ID NO: 835007 - DNA, 75 bp, synthetic construct
  source 1..75: mol_type = other DNA
tatcatcggctaatgacaaacgatgccgccacggttcaacattttgcctgtgatatcgcgacgctgaagcggaac

SEQ ID NO: 835008 - DNA, 75 bp, synthetic construct
  source 1..75: mol_type = other DNA
tctggatgtatggagtatctataaatgcacgcactgtgattacacctggaatatctccctgttttctcgcctgca

SEQ ID NO: 835009 - DNA, 75 bp, synthetic construct
  source 1..75: mol_type = other DNA
tgatatcgcgatgctgaagcggaacaacgtagagctatcgggtcggcctaattttaccgttcaggagcgctggcc

SEQ ID NO: 835010 - DNA, 75 bp, synthetic construct
  source 1..75: mol_type = other DNA
attttccaccctgacgttgcttgacctcttcacccacccttctcctgctgccctggccgattatctggccggcgt

SEQ ID NO: 835011 - DNA, 75 bp, synthetic construct
  source 1..75: mol_type = other DNA
cacggcggcagcaacgcatgtacaactgaaagcgaaaagcctgcgcggagaaggaacgatctgcctgcaaaccag

SEQ ID NO: 835012 - DNA, 75 bp, synthetic construct
  source 1..75: mol_type = other DNA
ctgaaagtgaaacgcctgcgtggagagggagcgatttgcctgcaaaccagtgcgaaagaaatttcacctgacttc

SEQ ID NO: 835013 - DNA, 75 bp, synthetic construct
  source 1..75: mol_type = other DNA
tcatgtctcccaccagcgcggacgataaatttgtcgtggaagaggattgtgcgccagttgaactgatggggagcg

SEQ ID NO: 835014 - DNA, 75 bp, synthetic construct
  source 1..75: mol_type = other DNA
aagctgtatcgtaccgtttctgcgattgtgaacattttccgttccatcccgttcattatcttgctggtatggatg

SEQ ID NO: 835015 - DNA, 75 bp, synthetic construct
  source 1..75: mol_type = other DNA
tggttcgtggcgtatgggaaacgctggcaatgaccttcgtatccggtttttttgggtttgtgattggtctgccgg

SEQ ID NO: 835016 - DNA, 75 bp, synthetic construct
  source 1..75: mol_type = other DNA
attggaaccaaactgtccgcaagtctgaacggtaatgcattaacagcaacaaagctgcaaacgccaagacgggtt

SEQ ID NO: 835017 - DNA, 75 bp, synthetic construct
  source 1..75: mol_type = other DNA
atgtttggtatttttggtaaaaaagcccgccgagcggcagtggaaattaaaaagtttgaaaaacgcgatctggca

SEQ ID NO: 835018 - DNA, 75 bp, synthetic construct
  source 1..75: mol_type = other DNA
cgttgtccgcgtttacgtcagaaattaatgccatcagtgccacgatcacaggtcagcttgacaccaactttaaaa

SEQ ID NO: 835019 - DNA, 75 bp, synthetic construct
  source 1..75: mol_type = other DNA
atggcaaagctcccaaagaaaattgatcaggaaattaaaccgctggatttacgccagtttgtaagttctgctgca

SEQ ID NO: 835020 - DNA, 75 bp, synthetic construct
  source 1..75: mol_type = other DNA
caacaatcaacgattactgtacagcagggcggtgtgttgattctcgacggcagtacggtaaaaggtgacggtgtc

SEQ ID NO: 835021 - DNA, 75 bp, synthetic construct
  source 1..75: mol_type = other DNA
ttttctgcttctgccggaggaatatggcccagcctttccagcaatcgtcgattgttataccagtccacccacgtt

SEQ ID NO: 835022 - DNA, 75 bp, synthetic construct
  source 1..75: mol_type = other DNA
cggcaaactctgtgtaacgctctgaaattacagccagacgaagacgggattggcgcaacgctccagcctgcgtaa

SEQ ID NO: 835023 - DNA, 75 bp, synthetic construct
  source 1..75: mol_type = other DNA
attttgccgtggcgaacccgcctttttccaataaaaactggaccaacgggctgacgccgaaaaaagatccgtttg

SEQ ID NO: 835024 - DNA, 75 bp, synthetic construct
  source 1..75: mol_type = other DNA
gtaaagcgggtgagtccggcacgctggcccgttcgctggacgccatcgctgaccaggcaaaacctgtgaccgttg

SEQ ID NO: 835025 - DNA, 75 bp, synthetic construct
  source 1..75: mol_type = other DNA
aaaccgcgcattctcggcgtgccaggccacgacaccaaggcggtagctactgagttgctgagcgtggcgcaaagc

SEQ ID NO: 835026 - DNA, 75 bp, synthetic construct
  source 1..75: mol_type = other DNA
atcggcgcagtgactgctgaaggtaaaaaaacaggtatgaaagccctgttatctgcccagacacagctcggcgtt

SEQ ID NO: 835027 - DNA, 75 bp, synthetic construct
  source 1..75: mol_type = other DNA
ctgaaaattcgcggcatgggcaagcaacaaattgccgaacgtgttaaagaagcggcgcgcattctggagctggac

SEQ ID NO: 835028 - DNA, 75 bp, synthetic construct
  source 1..75: mol_type = other DNA
gtcatgataacaaagccgttgcgactgagttgctgagcgtggcgcaaagcctgcgtgggtttgcttacctgtcag

SEQ ID NO: 835029 - DNA, 75 bp, synthetic construct
  source 1..75: mol_type = other DNA
acaaagacactctgaaagctggaaaactcaccatcgactacgactacacaccagtgccgccacttgaaaacctga

SEQ ID NO: 835030 - DNA, 75 bp, synthetic construct
  source 1..75: mol_type = other DNA
acgaatgagccagtcacgctcttccttcccggcggagtacggatgtgctgtcagccgtcacaacttaccgatgtc

SEQ ID NO: 835031 - DNA, 75 bp, synthetic construct
  source 1..75: mol_type = other DNA
ggtggagtacggatgtgctgtcagccgtcacaacttaccgatgtcttcagggcgctcaaatatgctcagtcctga

SEQ ID NO: 835032 - DNA, 75 bp, synthetic construct
  source 1..75: mol_type = other DNA
gagtcgtgtgcgggctgtgccgtgcctccatcttagccgggctggcgttgatgcaagcaactgtcttaatgggag

SEQ ID NO: 835033 - DNA, 75 bp, synthetic construct
  source 1..75: mol_type = other DNA
atctgcccagacacagctcggtgttaaaccgcgcattctcggcgtgccaggtcacgataacaaagccgttgctac

SEQ ID NO: 835034 - DNA, 75 bp, synthetic construct
  source 1..75: mol_type = other DNA
actcgacgaaagcggcaaactgaaaaaagtgcgcaatggcgcagaagccattacccagcagcgcccgcgctggac

SEQ ID NO: 835035 - DNA, 75 bp, synthetic construct
  source 1..75: mol_type = other DNA
ctggcgcgccagtggtcttacacgtcagcaatactgtgaactcaacgatattcccttcacatcacttcgcgaatg

SEQ ID NO: 835036 - DNA, 75 bp, synthetic construct
  source 1..75: mol_type = other DNA
gtattgcgctgccgctaaacggtggctaccgtcagtatgccgggcgtaaaatgaccctcggcattcgcccggaac

SEQ ID NO: 835037 - DNA, 75 bp, synthetic construct
  source 1..75: mol_type = other DNA
cgtgactttgctttagcggaagccatgcgcacggttgatcagatgtataagcaagggggcagtaatgcacgatga

SEQ ID NO: 835038 - DNA, 75 bp, synthetic construct
  source 1..75: mol_type = other DNA
gatatgccgggggcaatggcggaatatggcagggagtatatgaaacggaaaacgaagcacggtttgcgttcaaac

SEQ ID NO: 835039 - DNA, 75 bp, synthetic construct
  source 1..75: mol_type = other DNA
gatggtgctgggattaaggccattacaggcggtgacaaggtggctatcgatccgaaacacaaagcgccctattcc

SEQ ID NO: 835040 - DNA, 75 bp, synthetic construct
  source 1..75: mol_type = other DNA
tgtgcaaacggacccccgccgcacgctggggagatccgcaggaactgattggtgctgcggtgttcctttcttcaa

SEQ ID NO: 835041 - DNA, 75 bp, synthetic construct
  source 1..75: mol_type = other DNA
aacagaaatgactaaagcactggttgaggacgaagccttcaccgcctggttgtgcaaacggacccccgccgcacg

SEQ ID NO: 835042 - DNA, 75 bp, synthetic construct
  source 1..75: mol_type = other DNA
ccagaccgccgtgttcctggtatcgcaagcggtaactcgtcacatggttgaacgcaaggcaggtaaagttattaa

SEQ ID NO: 835043 - DNA, 75 bp, synthetic construct
  source 1..75: mol_type = other DNA
ctggcgcgccacaatattcaggtcaacggtattgcgccgggctatttcaaaacagaaatgactaaagcactggtt

SEQ ID NO: 835044 - DNA, 75 bp, synthetic construct
  source 1..75: mol_type = other DNA
aacccaagaccgaaggcggacggcagctccggctgttcctggaacccaagtgggaggccgtcaccgctgaatgcc

SEQ ID NO: 835045 - DNA, 75 bp, synthetic construct
  source 1..75: mol_type = other DNA
tggtggtcaagggaagctatcgagcacttgcccgcgaaattggctacgccaaccccgacgacactaagccggttc

SEQ ID NO: 835046 - DNA, 75 bp, synthetic construct
  source 1..75: mol_type = other DNA
ggcgaacagagtgcgtatcagcgagaaaacagaagtcacctccagcacagtcgttttcccctctttttatggcgg

SEQ ID NO: 835047 - DNA, 75 bp, synthetic construct
  source 1..75: mol_type = other DNA
tatttgctcgatgcaaagcgaactgggacgtgacaccatcaccccttatgccgcatcgaaaggggcggtaaaaat

SEQ ID NO: 835048 - DNA, 75 bp, synthetic construct
  source 1..75: mol_type = other DNA
agcgtccgcctgccgctgtgttatacgccgatgaactggcaaaattaaacaaaatgataacgcaccttgcccgcc

SEQ ID NO: 835049 - DNA, 75 bp, synthetic construct
  source 1..75: mol_type = other DNA
atgctccccgtgaccgacggacttcttaagatgatgaacttcaacaatgttttccgctggcatttgcccttcctg

SEQ ID NO: 835050 - DNA, 75 bp, synthetic construct
  source 1..75: mol_type = other DNA
ctgctgcccttttttatggaagaggtctacctcaagccacaatggatgcaggatgacggtattcatcccaaccgc

SEQ ID NO: 835051 - DNA, 75 bp, synthetic construct
  source 1..75: mol_type = other DNA
atgacatcaaaaaattctggcttaactgccagtggcaaagctcaacctgaatttatgcgcggggatatttaccgc

SEQ ID NO: 835052 - DNA, 75 bp, synthetic construct
  source 1..75: mol_type = other DNA
acagtccacaccacgcaaacagcccaccagcaacgcaaaggcacgggcaaatattcagaaaatgaaaagcatgat

SEQ ID NO: 835053 - DNA, 75 bp, synthetic construct
  source 1..75: mol_type = other DNA
accagcagggagaaagcacgcgccaatattcaggaaataagaaagatgttgaatgtattcaggggtaaaaaatga

SEQ ID NO: 835054 - DNA, 75 bp, synthetic construct
  source 1..75: mol_type = other DNA
gttgagcgtctgggaatttcgcctgcgactgcgcgacgcgatatcaataaacttgacgaaagcggcaaactgaag

SEQ ID NO: 835055 - DNA, 75 bp, synthetic construct
  source 1..75: mol_type = other DNA
catctgatatgatagcagcttatctttatgcacaattggagaatgtagatgctatacaaaataagcgaaaggaat

SEQ ID NO: 835056 - DNA, 75 bp, synthetic construct
  source 1..75: mol_type = other DNA
atgctaccaataatgctcatatgttttatattgtatgcagtgaccttaaaaaacgctcagagcttatttcttatt

SEQ ID NO: 835057 - DNA, 75 bp, synthetic construct
  source 1..75: mol_type = other DNA
ctggcgcttgagaagtacgactctgacgaaacgaaggtaaaaaaggtacatgtcaatctggctcgcagccaggac

SEQ ID NO: 835058 - DNA, 75 bp, synthetic construct
  source 1..75: mol_type = other DNA
aggcggtagcgaagagctgtacaaaaaactgaactctgctgtcttccctggtggtcagggtggtccgctgatgca

SEQ ID NO: 835059 - DNA, 75 bp, synthetic construct
  source 1..75: mol_type = other DNA
accagcaacgcaaaggcacgggcaaatattcagaaaatgaaaaacatgattaacgcattcaggggtaaaaaatga

SEQ ID NO: 835060 - DNA, 75 bp, synthetic construct
  source 1..75: mol_type = other DNA
acgcaatattctgaatgaccggaatccggtggtgacagaggatgtggaaggtgacaagaaaatttataatgctga

SEQ ID NO: 835061 - DNA, 75 bp, synthetic construct
  source 1..75: mol_type = other DNA
ctgccagtgacttctctcggcctgaaatccgccccggcgatattttccgtgataactacggcggtacggtaatga

SEQ ID NO: 835062 - DNA, 75 bp, synthetic construct
  source 1..75: mol_type = other DNA
gcggttttgcaggtgtttattgttcccgttgcagacaaagagtttggtcatcgcccggtagcggttgtggagtat

SEQ ID NO: 835063 - DNA, 75 bp, synthetic construct
  source 1..75: mol_type = other DNA
caatttgcgctggtgccggaaggggaaaacacgtttccggcgttaacgtcgctgcacattcagctggttgaaggc

SEQ ID NO: 835064 - DNA, 75 bp, synthetic construct
  source 1..75: mol_type = other DNA
tgtcggacgtttagacaatctattcttcagtggcggtgagggtattcagccggaagaagtcgagcgcgttattgc

SEQ ID NO: 835065 - DNA, 75 bp, synthetic construct
  source 1..75: mol_type = other DNA
ggggcgcgggtgttgcccgtgaaccctcagctgccgcaaccgctgcttgaagaattgctgcccaatctgacgctg

SEQ ID NO: 835066 - DNA, 75 bp, synthetic construct
  source 1..75: mol_type = other DNA
gcaggcagcggggtgatgttgcgggcatggaatacaccgcaaacgctgctcgtctggctggcgctactacaatgt

SEQ ID NO: 835067 - DNA, 75 bp, synthetic construct
  source 1..75: mol_type = other DNA
accgcagttccgtttccctgaaagcagtgttgcttggcggcgcggcgatcccggtcgagttgacggaacaggcgc

SEQ ID NO: 835068 - DNA, 75 bp, synthetic construct
  source 1..75: mol_type = other DNA
cagccgcgcccggccctgaacagacatatttccattcccaaagaggtgcttaaactggatggcgaaaacaactaa

SEQ ID NO: 835069 - DNA, 75 bp, synthetic construct
  source 1..75: mol_type = other DNA
acagaacgcaacacgcggtaagcccaccagcaaagaaaaagcacgggcaaatattcaggccataagaaaaatgct

SEQ ID NO: 835070 - DNA, 75 bp, synthetic construct
  source 1..75: mol_type = other DNA
tacttaccgccgtgatgggtacggctatgactgcgtgatgcctgcttatcagttccggcgtgatttttccctggt

SEQ ID NO: 835071 - DNA, 75 bp, synthetic construct
  source 1..75: mol_type = other DNA
gtcactggcggcaagtgcggggagaagccatcgccttacgtcttaatgacgagcaactcaactggcgcgagcttt

SEQ ID NO: 835072 - DNA, 75 bp, synthetic construct
  source 1..75: mol_type = other DNA
tatgattgcgttatgcctgtttatcagttcgaccgtgatttttctctggtgcaggctgtaccgcgtaacgtgccc

SEQ ID NO: 835073 - DNA, 75 bp, synthetic construct
  source 1..75: mol_type = other DNA
ggaaacgggaaagatgacagtgaagtcggtggtggtgctggtgatgctgtgggtaagcctgcgcaataactttgc

SEQ ID NO: 835074 - DNA, 75 bp, synthetic construct
  source 1..75: mol_type = other DNA
tgtgtcactggccagcgaacccggaaagtttatcggcgggctggcagaggtgctggaaatccacacgtcagatgt

SEQ ID NO: 835075 - DNA, 75 bp, synthetic construct
  source 1..75: mol_type = other DNA
agtgaacgttgcaggggttacacgtcacaagctctacgagaatgataccggcacgaccgacagtaatgggctgcc

SEQ ID NO: 835076 - DNA, 75 bp, synthetic construct
  source 1..75: mol_type = other DNA
gggcaaccgacagcaacgggctgccgccacactctatttccgccatcgtcgatggaggggatgttaccgagatag

SEQ ID NO: 835077 - DNA, 75 bp, synthetic construct
  source 1..75: mol_type = other DNA
cccagaccatcagggggaataaagggcagggaaccgcaacttacggtacaacttctgtcaccgtgccggatactt

SEQ ID NO: 835078 - DNA, 75 bp, synthetic construct
  source 1..75: mol_type = other DNA
gtaaccaacccggcagcggccaccgtaggcgctccggcagaaaccgacgcagagctgcgcatcaggcaggggcag

SEQ ID NO: 835079 - DNA, 75 bp, synthetic construct
  source 1..75: mol_type = other DNA
tctgttgctggtgctgtggcggcccctgccgggtcagtcaataagataaacaccccgacacgtggctgggtatca

SEQ ID NO: 835080 - DNA, 75 bp, synthetic construct
  source 1..75: mol_type = other DNA
cccagactatcaggggcaataaagggcagggaacagcaacttacgggaaaacttctgtcacggtgccagatactt

SEQ ID NO: 835081 - DNA, 75 bp, synthetic construct
  source 1..75: mol_type = other DNA
tcaggcgcttacaatgtcacccgctctggcgacagctatattctggttaacttctataccggagtcggaagttgc

SEQ ID NO: 835082 - DNA, 75 bp, synthetic construct
  source 1..75: mol_type = other DNA
tttctggggttgagtttgatggttcaaaagatattactttaaccgccgcgcatgtggctgcttttgccagaaggg

SEQ ID NO: 835083 - DNA, 75 bp, synthetic construct
  source 1..75: mol_type = other DNA
ggcgctaaaacttacctgctgcttaccaatcaaggtgatgtttatggtggatggaatacattaagaccgtttgct

SEQ ID NO: 835084 - DNA, 75 bp, synthetic construct
  source 1..75: mol_type = other DNA
gtaacaaatccattggcggctacagttggctctcctggtgaaaatgacgcacagttgcgccagaggcaatcacgg

SEQ ID NO: 835085 - DNA, 75 bp, synthetic construct
  source 1..75: mol_type = other DNA
gccttttctacattttcagagtaactcccgccagttgcgagcaaaaaagccgctacgctttagctatacgtgcta

SEQ ID NO: 835086 - DNA, 75 bp, synthetic construct
  source 1..75: mol_type = other DNA
gtttaacggcacgctgcactggagcgatttcatctggcccttcgcactacctactttagcggggaacatctgcgg

SEQ ID NO: 835087 - DNA, 75 bp, synthetic construct
  source 1..75: mol_type = other DNA
gatgggcaaatggtcgcgctggtagctcttgccgtgcatgacgctaacaataccgctatcgagatctacaactcg

SEQ ID NO: 835088 - DNA, 75 bp, synthetic construct
  source 1..75: mol_type = other DNA
gtcggtgattgtgaccggctacagcatccgccatgacgcagaaagcccggacagctgcaccattgacatgagttt

SEQ ID NO: 835089 - DNA, 75 bp, synthetic construct
  source 1..75: mol_type = other DNA
ccggcggatatcgggcgactggtcggggatgtgcgcacccgcttacaggcagccatcacgctgttccgtgaacgc

SEQ ID NO: 835090 - DNA, 75 bp, synthetic construct
  source 1..75: mol_type = other DNA
gtcggtgattgtgaccggctacagcattcgccatgacgcagaaagcccggacagctgcaccatcgacatgagttt

SEQ ID NO: 835091 - DNA, 75 bp, synthetic construct
  source 1..75: mol_type = other DNA
gatgcctcgccagacgatgtgcaggatgtgaaagcagtttacgcaacacaggccgcatctgaactggccagtgtt

SEQ ID NO: 835092 - DNA, 75 bp, synthetic construct
  source 1..75: mol_type = other DNA
agcgaacccgggaaatttattggcgggctggcagaggtgctggaaatccacacgtcagatgtcgggcacgcggtg

SEQ ID NO: 835093 - DNA, 75 bp, synthetic construct
  source 1..75: mol_type = other DNA
gtgatgaactgctggaataaggtcatcactgatatggatgaatttgttgcgctgcctgttgccctggtcagtggc

SEQ ID NO: 835094 - DNA, 75 bp, synthetic construct
  source 1..75: mol_type = other DNA
tggagcagaagagtaccaccgcgctcgggaaggtttttgaaaccctggaagcgggctggacggtgatttctgacg

SEQ ID NO: 835095 - DNA, 75 bp, synthetic construct
  source 1..75: mol_type = other DNA
tcaaacagcggagcggttgcggcgctggctgggacgattaccactatcaacacgccgacccgtggctgggcttca

SEQ ID NO: 835096 - DNA, 75 bp, synthetic construct
  source 1..75: mol_type = other DNA
ttactccccggcgaacctcggcgtggtgagtggtggcagtgcacgctattacgacattcaggagctgttgattgg

SEQ ID NO: 835097 - DNA, 75 bp, synthetic construct
  source 1..75: mol_type = other DNA
gacagcgcaaacacctcactgggaaaaaaaggggaaacgctggctgataccatctcggttatcagcacttacgtc

SEQ ID NO: 835098 - DNA, 75 bp, synthetic construct
  source 1..75: mol_type = other DNA
acgatattcaggaactgacgattggtaaatccccgggggctttgtcgtcatcaaacattgatatcagatacaacg

SEQ ID NO: 835099 - DNA, 75 bp, synthetic construct
  source 1..75: mol_type = other DNA
tccgtcagtggtgcagtggcggcgcaggctggaactatcactgaaattaatacgccaacccgtggctgggtttcg

SEQ ID NO: 835100 - DNA, 75 bp, synthetic construct
  source 1..75: mol_type = other DNA
acaaagagagggaactcatttaaatattgtcaaatttctatatgcttaccttcaaagcttatacttcaatgtttc

SEQ ID NO: 835101 - DNA, 75 bp, synthetic construct
  source 1..75: mol_type = other DNA
gccggcaccatcatcagcaccgcatccggtgtactgcgtgacgtcatgacagagcgccagaaccgacaacaggaa

SEQ ID NO: 835102 - DNA, 75 bp, synthetic construct
  source 1..75: mol_type = other DNA
ttgtatccctccagcagcctgcactgtgtgacccccgtaacgcacggcgtaagggtggcatcatttatgtggata

SEQ ID NO: 835103 - DNA, 75 bp, synthetic construct
  source 1..75: mol_type = other DNA
taatggtccggtggattttaatgtgtttaatggcacggtggaggagttgcaggcattcgttgatgggattaaata

SEQ ID NO: 835104 - DNA, 75 bp, synthetic construct
  source 1..75: mol_type = other DNA
caaagaacaggggatctcctgcaataccgttaaacgttatttgcaggaaaaatctggcccgtccaaatatactcc

SEQ ID NO: 835105 - DNA, 75 bp, synthetic construct
  source 1..75: mol_type = other DNA
aaatttgccattcttggttttttaatgattattagctttattggtataggttattatcgtgaaccgattaatatg

SEQ ID NO: 835106 - DNA, 75 bp, synthetic construct
  source 1..75: mol_type = other DNA
aagagattataaaaatcaacaatatcagaatacatcagtacactgtactatatacatctaattgtacaatcgatg

SEQ ID NO: 835107 - DNA, 75 bp, synthetic construct
  source 1..75: mol_type = other DNA
tcttattgtcgccagccccggcattgcgctggcgcatccatccttaagcgccgctgccgatgccggaatcgaaat

SEQ ID NO: 835108 - DNA, 75 bp, synthetic construct
  source 1..75: mol_type = other DNA
gttgttgggaggcgatggtaaatcggcagacttcagcccgctggcgcgctatctgaatggcgataacgtacgcct

SEQ ID NO: 835109 - DNA, 75 bp, synthetic construct
  source 1..75: mol_type = other DNA
ttgtatccctccagcagcctgcattgcgtgacacccgtaacccgcggcgtacgagtggcatcatttatgtggatc

SEQ ID NO: 835110 - DNA, 75 bp, synthetic construct
  source 1..75: mol_type = other DNA
acgagtggcatcatttatgtggatccagtcgatgatccgcgatgataaaaagcgcgccatgctgtttgaactgga

SEQ ID NO: 835111 - DNA, 75 bp, synthetic construct
  source 1..75: mol_type = other DNA
gataaattagacaagctagcaaaagtgaccggataccctgttcattttttcttcatgaatgaaggggaatatttg

SEQ ID NO: 835112 - DNA, 75 bp, synthetic construct
  source 1..75: mol_type = other DNA
tcagtaagagcagtgataatcagttccggtttgtgctaaaagcgggcaatggtgagactatcctcaccagcgagc

SEQ ID NO: 835113 - DNA, 75 bp, synthetic construct
  source 1..75: mol_type = other DNA
aggttggtttcgccggtggcggtgcattgctggattttgccagtaatctgacggctaccagcatgctcggcctga

SEQ ID NO: 835114 - DNA, 75 bp, synthetic construct
  source 1..75: mol_type = other DNA
gaagccaaagcgcgtgaacgtggcacagtgatgatcatctcccataaagagatgaaatcgtggttccgggaaatt

SEQ ID NO: 835115 - DNA, 75 bp, synthetic construct
  source 1..75: mol_type = other DNA
ggaacaggctctgttgctggagaaggcccgccaggtttactccccagcaggcgtgcgttcacacatcctgacctc

SEQ ID NO: 835116 - DNA, 75 bp, synthetic construct
  source 1..75: mol_type = other DNA
gctggatcttcagtcttcccggttgccgttcgacgtggtcactggtaagcgcacctacagtaacatgctgattcg

SEQ ID NO: 835117 - DNA, 75 bp, synthetic construct
  source 1..75: mol_type = other DNA
atgcagcttgagcgcgtaccgttcgatgtggttaccgggaagagggtgtacaccaatatgctggtgcgtgccatt

SEQ ID NO: 835118 - DNA, 75 bp, synthetic construct
  source 1..75: mol_type = other DNA
gcggataaaaccaacatgaaggacggggccagcacgtcgtcggtactgaataccggcaacaaaaccacaaagccg

SEQ ID NO: 835119 - DNA, 75 bp, synthetic construct
  source 1..75: mol_type = other DNA
cgtgacggtgtaacttttagtgtgtcaccgatagtaccgaaaaccttccggcacagttttgccatgcatatattg

SEQ ID NO: 835120 - DNA, 75 bp, synthetic construct
  source 1..75: mol_type = other DNA
gtttaaaagtacggaagtgtatacccggttgtttctgttcgacgtggccggacaacaccaggtcagttttgggtt

SEQ ID NO: 835121 - DNA, 75 bp, synthetic construct
  source 1..75: mol_type = other DNA
tttcatagttcgctgaacgtggagatctttattagcagattccggcgggaaatcccgacttccagaaataaccat

SEQ ID NO: 835122 - DNA, 75 bp, synthetic construct
  source 1..75: mol_type = other DNA
agccctactgcgaagaagatttatccacggtgaaggagagcttcattgaacaagcgcgcaatgagatcggccttg

SEQ ID NO: 835123 - DNA, 75 bp, synthetic construct
  source 1..75: mol_type = other DNA
cgcgatcattcgccatcgtaaacacaaagagttcaagaaccgactaatcgtccgtggtgaagacggtgatatgac

SEQ ID NO: 835124 - DNA, 75 bp, synthetic construct
  source 1..75: mol_type = other DNA
accgaagagacaccagaagattacgccttgcgtattggtgatgaagaaattcagcttaacgctgacgatgatgat

SEQ ID NO: 835125 - DNA, 75 bp, synthetic construct
  source 1..75: mol_type = other DNA
ttggcgtgggtggcaacattggcctgccagccttgatgctgctggatgctgagtgcgaactgtacgtgctggaac

SEQ ID NO: 835126 - DNA, 75 bp, synthetic construct
  source 1..75: mol_type = other DNA
gcagactctcttaaacggactttagtagaaaaccagcgttcaattagcctggcaattagtgatgatgctaaggcg

SEQ ID NO: 835127 - DNA, 75 bp, synthetic construct
  source 1..75: mol_type = other DNA
accttcccgtcttcgctgcccgctgatgctcagccatttgaactactggtgattaacatctgttcgctttcctag

SEQ ID NO: 835128 - DNA, 75 bp, synthetic construct
  source 1..75: mol_type = other DNA
gaaacgacccgagctttaggcatttatcctgccgtaacacttgcacaggcaaggaacgctcgtgatgaatatctg

SEQ ID NO: 835129 - DNA, 75 bp, synthetic construct
  source 1..75: mol_type = other DNA
tgctcaatattaatgccgggcagattattggcgtttatcctgccagctacgttaatcatcttcgtttttcagcgg

SEQ ID NO: 835130 - DNA, 75 bp, synthetic construct
  source 1..75: mol_type = other DNA
aggggatcaacaagccagcattatgacgcaatggtgtagcaggagcgtttattccgttgagggtattagcccgga

SEQ ID NO: 835131 - DNA, 75 bp, synthetic construct
  source 1..75: mol_type = other DNA
gttacggaaggcgggattattgttgcggtcactcttcttctgaccgggactatctggcttgtgcagcagcagatt

SEQ ID NO: 835132 - DNA, 75 bp, synthetic construct
  source 1..75: mol_type = other DNA
aaaagggccgccaggaggagagagaaaaggctcttcaggagaattacgcatcggcccgtcgcatgcagcagatgg

SEQ ID NO: 835133 - DNA, 75 bp, synthetic construct
  source 1..75: mol_type = other DNA
tctgtacatgcctttccgcatgttacgttacagtgtggcggcgatgcagagacatctggagcagcacaaaacgtt

SEQ ID NO: 835134 - DNA, 75 bp, synthetic construct
  source 1..75: mol_type = other DNA
accgcctgtctgtccggctgtcgctgattatcagccgtctgctcgcaggtgaaacactgaatatgcgtaaactgg

SEQ ID NO: 835135 - DNA, 75 bp, synthetic construct
  source 1..75: mol_type = other DNA
aacacatgcaggagcgtcgccagatgttgcagtggtgggctgattatctcgactcctgccagacggcatatgtcg

SEQ ID NO: 835136 - DNA, 75 bp, synthetic construct
  source 1..75: mol_type = other DNA
aaagtaagtttgataataccagttatatagaacgaataggttatcactcgaaagtaaaatacctggttccgagta

SEQ ID NO: 835137 - DNA, 75 bp, synthetic construct
  source 1..75: mol_type = other DNA
cacttgctgtgcagtgtgcggtatctgtacatcctgataccgtatcagccatagcacaaacagaatctggattta

SEQ ID NO: 835138 - DNA, 75 bp, synthetic construct
  source 1..75: mol_type = other DNA
tggagaaatacgacgggacggggcgagcggtaaaccaggcgcctgggttatggcactttccccggatgaaaaaac

SEQ ID NO: 835139 - DNA, 75 bp, synthetic construct
  source 1..75: mol_type = other DNA
ctcgctgattctcgatggttccgcaaccatgattcacagtctggtcactatcgatatgaccactatcttgtctct

SEQ ID NO: 835140 - DNA, 75 bp, synthetic construct
  source 1..75: mol_type = other DNA
ctcttctgcgccattaacttcggtatgccggctggactggcctcgctggtcttacaggctcaggcgttttttact

SEQ ID NO: 835141 - DNA, 75 bp, synthetic construct
  source 1..75: mol_type = other DNA
agccttgatgactggttatcgcaggcaccagacggcgtagtgctgttaagcagcgatccgaaacgcacgccggag

SEQ ID NO: 835142 - DNA, 75 bp, synthetic construct
  source 1..75: mol_type = other DNA
agcgttaaccacattcactggtctgccgcatcgctttgaagttgtgctggagcataacggtgtgcgctggattaa

SEQ ID NO: 835143 - DNA, 75 bp, synthetic construct
  source 1..75: mol_type = other DNA
agcgttaaccaccttcaccggtctgccgcatcgctttgaagtggtgctggagcataacggtgtgcgctggattaa

SEQ ID NO: 835144 - DNA, 75 bp, synthetic construct
  source 1..75: mol_type = other DNA
acatgggtgactatcacctgaatcatcagcagggtgaaacctggctgcgggtgaaaggcgagaaagtgctgaacg

SEQ ID NO: 835145 - DNA, 75 bp, synthetic construct
  source 1..75: mol_type = other DNA
tcagttttacaggtcaggcaaagcctgcgtgaagcgttttatccgcaggagattgaacaagagcgacgacaaaaa

SEQ ID NO: 835146 - DNA, 75 bp, synthetic construct
  source 1..75: mol_type = other DNA
ggtgcgggcacataccataaaaaccagcggcgagtatttcctctgttgggtatggtggcgctgacactgttgtac

SEQ ID NO: 835147 - DNA, 75 bp, synthetic construct
  source 1..75: mol_type = other DNA
caggcaaagcctgcgtgaagagttttatccacaggagattgaacaagagcgacggcaaaaaaagcagcagttagc

SEQ ID NO: 835148 - DNA, 75 bp, synthetic construct
  source 1..75: mol_type = other DNA
gatgtgaatcagttatatgatgctctgtataacaaagcgggtgtaaatgggctgtttactgatttccctgataag

SEQ ID NO: 835149 - DNA, 75 bp, synthetic construct
  source 1..75: mol_type = other DNA
ggtaaaaaagtgcagacttacccgggacgtttcccgatgggtaaatctgacttccgggtacacactttcgaagac

SEQ ID NO: 835150 - DNA, 75 bp, synthetic construct
  source 1..75: mol_type = other DNA
cccggatcgggcgcgtaaagatggtcgttactacgcgatagattttacgttggatgaaattaaatccctgaaatt

SEQ ID NO: 835151 - DNA, 75 bp, synthetic construct
  source 1..75: mol_type = other DNA
ttgagtgggttaaacattgtcagcgccacggagtgcctttgacgacatataaatgcccaggatgtggcaaacaac

SEQ ID NO: 835152 - DNA, 75 bp, synthetic construct
  source 1..75: mol_type = other DNA
cctcgctggcagcggaagaacgtgacgggcagacactgcaggataccgggcgtctgatggggtcagtatcaaccg

SEQ ID NO: 835153 - DNA, 75 bp, synthetic construct
  source 1..75: mol_type = other DNA
gcaacgcttgttcaagtttccgggtatcggcctgctggtggtaaccggcggcgaagcggtagtagaagcggcgcg

SEQ ID NO: 835154 - DNA, 75 bp, synthetic construct
  source 1..75: mol_type = other DNA
atgccgttgctgcaacacagcagggcgttttttagtttcctcaccaagcctgtcgacaaagacgcgctatatcag

SEQ ID NO: 835155 - DNA, 75 bp, synthetic construct
  source 1..75: mol_type = other DNA
ggccgggagcatgtgacgatcgcgagatacgaatgattattcgtctggcgatggggaaaacaataacggctctca

SEQ ID NO: 835156 - DNA, 75 bp, synthetic construct
  source 1..75: mol_type = other DNA
gttttgaagaaagttacctgcgtgaactgatcgcggaagtcgcaccgcagcgggcaaaagaggcgcgtcctttcc

SEQ ID NO: 835157 - DNA, 75 bp, synthetic construct
  source 1..75: mol_type = other DNA
atcattttatccggtggtgcgggcgcgactgacggcgattaacggcaagccgacagaaggcaatgaagatgaggc

SEQ ID NO: 835158 - DNA, 75 bp, synthetic construct
  source 1..75: mol_type = other DNA
tgaaatcgctacctctgcgcctggcggttagccgcctgttgcgtcagccgtggtcaacgttaagccagctttcgg

SEQ ID NO: 835159 - DNA, 75 bp, synthetic construct
  source 1..75: mol_type = other DNA
tgaagagcagcgacgcactgaatggatggttaccgaatctctgtccgatttcctcgacccacatgatccgagtaa

SEQ ID NO: 835160 - DNA, 75 bp, synthetic construct
  source 1..75: mol_type = other DNA
gcaacgtttgttcaagttcccgggtatcggcctgctggtggtgaccggcggcgaagcggtagtggaagcggcgcg

SEQ ID NO: 835161 - DNA, 75 bp, synthetic construct
  source 1..75: mol_type = other DNA
gtggtgcgggcgcggttgacggcgattaacgacaagccgacagaaggcaatggagatgaggcgctcaaccgcgag

SEQ ID NO: 835162 - DNA, 75 bp, synthetic construct
  source 1..75: mol_type = other DNA
taaacccgaacaacgctggtacggtctggaacaggacgaaggcgcgctggggcgctcgatggaacgctcgcaaca

SEQ ID NO: 835163 - DNA, 75 bp, synthetic construct
  source 1..75: mol_type = other DNA
gatttagtcatcagcgatctgcggatggatgaaatggatggtatgcaactgtttgccgaaatccagaaagtgcag

SEQ ID NO: 835164 - DNA, 75 bp, synthetic construct
  source 1..75: mol_type = other DNA
cggggtggcctgaccagtggaaacaaaaaacagacagaaacgggactcacgaatcccgtaaatgagcaaaaaacg

SEQ ID NO: 835165 - DNA, 75 bp, synthetic construct
  source 1..75: mol_type = other DNA
cccttggactcgtggcaataactgtccccgtgtacaggaaacagacaacaacgggacagaacagccggaagaacg

SEQ ID NO: 835166 - DNA, 75 bp, synthetic construct
  source 1..75: mol_type = other DNA
tatctatccagaaatcaaagcgccgtggttccatcatcaggaagggaaggatattgcggcaaaaacgctggaagt

SEQ ID NO: 835167 - DNA, 75 bp, synthetic construct
  source 1..75: mol_type = other DNA
tttatgcctgtattgtttttttagcgtgagagagcgcatctaccatccaaaacccagtctcggtatggccgcgca

SEQ ID NO: 835168 - DNA, 75 bp, synthetic construct
  source 1..75: mol_type = other DNA
agaacaaacaccacaggcgctgtgggggatctgcctgttaatgacgatcattcccgcgatacttaacctgcttac

SEQ ID NO: 835169 - DNA, 75 bp, synthetic construct
  source 1..75: mol_type = other DNA
taggttttggtgccggtgatatggccattgcgatagtaatgatgtctttagccatgatcatcacttatttttaca

SEQ ID NO: 835170 - DNA, 75 bp, synthetic construct
  source 1..75: mol_type = other DNA
acgcctgatgaccgcgagctggccgggtaatgtgcgccagttggtcaacgtgattgaacagtgcgtggcgctgac

SEQ ID NO: 835171 - DNA, 75 bp, synthetic construct
  source 1..75: mol_type = other DNA
tctctattaccgcctcaacgttgttagtctgaagatccccgcactggcggagcgcacggaagatattccgttgtt

SEQ ID NO: 835172 - DNA, 75 bp, synthetic construct
  source 1..75: mol_type = other DNA
tttgttgaggcacgtaatcagtttgaactcaactatttgcgtaagctgctgcaaattaccaaaggcaacgtcacc

SEQ ID NO: 835173 - DNA, 75 bp, synthetic construct
  source 1..75: mol_type = other DNA
aaagatgcacagcagaataagctggtggtgcatccttataccgtgcggtcggataaactgccggcatatacgacc

SEQ ID NO: 835174 - DNA, 75 bp, synthetic construct
  source 1..75: mol_type = other DNA
tactggtcgatgacgatccgggattgctgaaactgcttggcctgcgtctgaccagcgaaggctacagcgtggtca

SEQ ID NO: 835175 - DNA, 75 bp, synthetic construct
  source 1..75: mol_type = other DNA
agcgcacggaagatattcccctactggcaaaccatttgttgcgccaggcggcagagcgacataaaccgtttgtcc

SEQ ID NO: 835176 - DNA, 75 bp, synthetic construct
  source 1..75: mol_type = other DNA
gtctctgtccgatttcctcgacccgcataatccgggtaaaacggtagaaggttatcccgcgcctaaacgcgcagt

SEQ ID NO: 835177 - DNA, 75 bp, synthetic construct
  source 1..75: mol_type = other DNA
tgaccaaaattcgaatgaaagtgatgacagctattttgagatgaaagatagctggatgttgacttccattttacg

SEQ ID NO: 835178 - DNA, 75 bp, synthetic construct
  source 1..75: mol_type = other DNA
tattaaaaatgaaaacggagagcaaagtcaggttaatggcgctaacgccgtgaatggatcgcaacaagttgccgt

SEQ ID NO: 835179 - DNA, 75 bp, synthetic construct
  source 1..75: mol_type = other DNA
gcaacaaaattaaccatagagcagcgccttgaattgcttgaaaatgaattgtcgcaaaataaacaagagctgaaa

SEQ ID NO: 835180 - DNA, 75 bp, synthetic construct
  source 1..75: mol_type = other DNA
aaccgccctgcgtcgccattccacacacggatcataaacatgtcagacacaatgcaattgccgtcggtatcctgc

SEQ ID NO: 835181 - DNA, 75 bp, synthetic construct
  source 1..75: mol_type = other DNA
catctgcccgtatccgcacaagtcgtccggaaaatgattcaaacaccgtgcggcaaaagtattaccagtgtaaca

SEQ ID NO: 835182 - DNA, 75 bp, synthetic construct
  source 1..75: mol_type = other DNA
aaaatcaccgttgttacgtacaacaccgaaactggtgccgaagtccaggccagtacgatcgtgcgtaaaggtgat

SEQ ID NO: 835183 - DNA, 75 bp, synthetic construct
  source 1..75: mol_type = other DNA
catgtggagctgccgcgccgacgcatccacgctggattgtggtttcggctactacgcacgctgctcgatgagctg

SEQ ID NO: 835184 - DNA, 75 bp, synthetic construct
  source 1..75: mol_type = other DNA
agctgcccgctgcatggctgctggctggaatcctattggggcgtgcctgggcggtttctcggctgggagaacgcc

SEQ ID NO: 835185 - DNA, 75 bp, synthetic construct
  source 1..75: mol_type = other DNA
ccgtgaaatgacggtaattgaaaacctgctggtggcacagcatcagcaactgaaaaccgggctgttctccggcct

SEQ ID NO: 835186 - DNA, 75 bp, synthetic construct
  source 1..75: mol_type = other DNA
tttgctggaacatgccaaccgtcaggcgagtaacctggcctatggcgaccagcgtcgtctggagatcgcccgctg

SEQ ID NO: 835187 - DNA, 75 bp, synthetic construct
  source 1..75: mol_type = other DNA
agtgcatcgtgcgcgacaagatcggctcgttcaaagaacgtgaagatatgcagcgctggctcaatgaatggatca

SEQ ID NO: 835188 - DNA, 75 bp, synthetic construct
  source 1..75: mol_type = other DNA
gtcagggtgatttttttgctcgccttaagcgaaagtaataaacaattaaatgccctgggctggattatggagatg

SEQ ID NO: 835189 - DNA, 75 bp, synthetic construct
  source 1..75: mol_type = other DNA
gggaattatgatcgatgatattgtcgcaggggtgatttcggcagggatattatactttattggtcatcactggcc

SEQ ID NO: 835190 - DNA, 75 bp, synthetic construct
  source 1..75: mol_type = other DNA
ggggatcatgatcgacgatattgtcgccggggtgatttccgcaggcatcctgtactttatcggtcatcactggcc

SEQ ID NO: 835191 - DNA, 75 bp, synthetic construct
  source 1..75: mol_type = other DNA
gtcatatcacggcatgttggcttgtgttatcgcgggtgcaggcattgcgcttatccctcgctctatgctggaaag

SEQ ID NO: 835192 - DNA, 75 bp, synthetic construct
  source 1..75: mol_type = other DNA
atgttccgttgtccgctttgtggcgcatctgcccgtatccgcacaagtcgccctgaaaatgattcgaataccgtg

SEQ ID NO: 835193 - DNA, 75 bp, synthetic construct
  source 1..75: mol_type = other DNA
atgttccgttgtccgctttgtggcgcatctgcccgaatccgcaccagtcgtccggaaaatgattcaaacaccgtg

SEQ ID NO: 835194 - DNA, 75 bp, synthetic construct
  source 1..75: mol_type = other DNA
acgctcatggcgctgccgaccaatgactggcagtgggtcgccgccgggtttgtgattttccgtattctggatatg

SEQ ID NO: 835195 - DNA, 75 bp, synthetic construct
  source 1..75: mol_type = other DNA
actcttcagaagatatcccgtggcatgagctgccagcttcacacaggggaaacaatcagatgagtttgcctttat

SEQ ID NO: 835196 - DNA, 75 bp, synthetic construct
  source 1..75: mol_type = other DNA
gtccatatggcggagaattttaagctgttcagtaaggcatttggttttaccggaaaagttattgatcgttatgat

SEQ ID NO: 835197 - DNA, 75 bp, synthetic construct
  source 1..75: mol_type = other DNA
ctcactgttaaacgttatggcagcacttcacaggatattccgtggcaaagcctgcctgcgtctcaccggggtgat

SEQ ID NO: 835198 - DNA, 75 bp, synthetic construct
  source 1..75: mol_type = other DNA
cgtgccagtcaggttaatggcagtaacatttatgccttccgcgccaattgttcgtatcgtcgccacttcgagagc

SEQ ID NO: 835199 - DNA, 75 bp, synthetic construct
  source 1..75: mol_type = other DNA
acatttatgccttccgcgctaactgctcgtatcgccgccactttgagagctggtttcatgccgacggcgcagcac

SEQ ID NO: 835200 - DNA, 75 bp, synthetic construct
  source 1..75: mol_type = other DNA
atgttccgttgtccactttgtggcgcgtctgcccgaatccgcaccagtcgtccggaaaacgattcaaacactgtg

SEQ ID NO: 835201 - DNA, 75 bp, synthetic construct
  source 1..75: mol_type = other DNA
ggaacagtcagagaatttactcagtcagctgcagaattaccagtcttacaaagaaaaggaaggtttcgttataat

SEQ ID NO: 835202 - DNA, 75 bp, synthetic construct
  source 1..75: mol_type = other DNA
tttcattatctcagccgctcggagatgaattaggggctttttatttgtcggcttctgatgataagtattggaata

SEQ ID NO: 835203 - DNA, 75 bp, synthetic construct
  source 1..75: mol_type = other DNA
tattgataaaaatatacctggcagcactgcatcgttttctgctaaagataacgcaatttatataaaaatccctca

SEQ ID NO: 835204 - DNA, 75 bp, synthetic construct
  source 1..75: mol_type = other DNA
tgtggcaaacggtgatgaccctgcaggcatcccctgagacccggttaatgcgcgctgaggtgcagcggcattatc

SEQ ID NO: 835205 - DNA, 75 bp, synthetic construct
  source 1..75: mol_type = other DNA
acatctgcactggctccgttcctgaagggacgcggaggggttgacgttgcgtcccgtatattacgcagtgctctg

SEQ ID NO: 835206 - DNA, 75 bp, synthetic construct
  source 1..75: mol_type = other DNA
atctggacagcactgcaaatttccggcggacaaacgcaggataagatcccgcagtttggtcagcaaacgccgatg

SEQ ID NO: 835207 - DNA, 75 bp, synthetic construct
  source 1..75: mol_type = other DNA
tccgctgtatcaggaaaaattgccggagcgctggttgaaggtaagcgtgcagcaagaaccgtattgacggggatg

SEQ ID NO: 835208 - DNA, 75 bp, synthetic construct
  source 1..75: mol_type = other DNA
gctggtgacatctctggcactggtagctgtcacaaccggccctgacatgatcaaaatgttgcggggacggatctc

SEQ ID NO: 835209 - DNA, 75 bp, synthetic construct
  source 1..75: mol_type = other DNA
ggggaccggtgcaggaaatatcagtgccctgaacaaagtgatgaagggtacgctggtgacatctctggcactggt

SEQ ID NO: 835210 - DNA, 75 bp, synthetic construct
  source 1..75: mol_type = other DNA
acgaacagaaaacaggccgctatctgcagcaggggctgattgaggaaggataccaggccgacctcttcgataacg

SEQ ID NO: 835211 - DNA, 75 bp, synthetic construct
  source 1..75: mol_type = other DNA
gccgcgatggtctcggggccgcgtcgaagggacagtatgatttgataatactggacgtgatgctgcctttcctcg

SEQ ID NO: 835212 - DNA, 75 bp, synthetic construct
  source 1..75: mol_type = other DNA
cttaatgagctggatctggatcatgaggctgatttctgcgagaaactccatgaggatgcggaacgcctttaccga

SEQ ID NO: 835213 - DNA, 75 bp, synthetic construct
  source 1..75: mol_type = other DNA
ctttttcctggtggcggttattttgtggggaagtctacgcagctctggcgcaattatgcggctggtgggcaaggg

SEQ ID NO: 835214 - DNA, 75 bp, synthetic construct
  source 1..75: mol_type = other DNA
tgtccgtacgtttgtgctggtgaaagataaaaaaacattctgttcatctgcgactggtgagatggacattccact

SEQ ID NO: 835215 - DNA, 75 bp, synthetic construct
  source 1..75: mol_type = other DNA
ttacgcgctgatttgtgagctaaaacaggcggagtttgaccaccaggcgtttcgcgtgggctttaacgccaacct

SEQ ID NO: 835216 - DNA, 75 bp, synthetic construct
  source 1..75: mol_type = other DNA
gcggtttctttgaaaagctgattgatgctgaagagtttgcgggtaataacccgtttcgcgagatacgtaagttaa

SEQ ID NO: 835217 - DNA, 75 bp, synthetic construct
  source 1..75: mol_type = other DNA
tcttacccggtacgccgatggtgccgaacaaacccgcaatcgtcatctggtatcgcaaccctttgctgaaaaata

SEQ ID NO: 835218 - DNA, 75 bp, synthetic construct
  source 1..75: mol_type = other DNA
gaaacaccggaacaggcgcgctggctgcgcgaacgtggcgttaatttcctgcaaggttactggattagtcgcccc

SEQ ID NO: 835219 - DNA, 75 bp, synthetic construct
  source 1..75: mol_type = other DNA
tgattgcccgcgatgccgcagaattagaaaaagtactgccggtaggcgtcaaatttggcattaacattgcgccgg

SEQ ID NO: 835220 - DNA, 75 bp, synthetic construct
  source 1..75: mol_type = other DNA
aagaagacctgattaaactggtcgagtttgataacaaagaatatctctattacaaagcgattgcgccggatatcg

SEQ ID NO: 835221 - DNA, 75 bp, synthetic construct
  source 1..75: mol_type = other DNA
ccttcattcgcgctaccacctgcgacagtgaaggctacgccacttttgaagatgaggtgatgtatctcgacgcat

SEQ ID NO: 835222 - DNA, 75 bp, synthetic construct
  source 1..75: mol_type = other DNA
tcgatatgaccaccatcttgtctctgatgtatctggcatttgtggcgacaatcgttggttatgggatctggggaa

SEQ ID NO: 835223 - DNA, 75 bp, synthetic construct
  source 1..75: mol_type = other DNA
gtaagtttgctgtggacgtgcggcctgcaggagcagaaggaaaaagattcaggcggcgatttgatactcgtggtg

SEQ ID NO: 835224 - DNA, 75 bp, synthetic construct
  source 1..75: mol_type = other DNA
acaaggcgtacttacacaaaccttacgtgctgctgctgcccaccagcctggtattattagtgatattggtatcgg

SEQ ID NO: 835225 - DNA, 75 bp, synthetic construct
  source 1..75: mol_type = other DNA
ggatttattgatatcagcgccacctcgaagaaaattattttctgtggcacgttaaccgcaggaagtttaaaaaca

SEQ ID NO: 835226 - DNA, 75 bp, synthetic construct
  source 1..75: mol_type = other DNA
acagcggcaagtgtttcgtgggtgttcactgatgcccaggcgcagctgtttgaggtgtggtatcgggatgttatt

SEQ ID NO: 835227 - DNA, 75 bp, synthetic construct
  source 1..75: mol_type = other DNA
gttgaaagagaacctgtcattcacacctgatgaactgaaaacgctcttccggaaccgcctgaatttatcaccgga

SEQ ID NO: 835228 - DNA, 75 bp, synthetic construct
  source 1..75: mol_type = other DNA
tcagtgttgttcagggtatgctgaagcacattgatttttcgactgccagcccgactgtccgactggctcttcaga

SEQ ID NO: 835229 - DNA, 75 bp, synthetic construct
  source 1..75: mol_type = other DNA
catttcagctcagcagcccgtcgggggattatttctgacaggtttgtagaagcaattttgcagttttggcgcgaa

SEQ ID NO: 835230 - DNA, 75 bp, synthetic construct
  source 1..75: mol_type = other DNA
gcccattattttattgattgaactggtctttgcgacgtggagctggcaaaaactgcgcagcctgacacgtcgtcg

SEQ ID NO: 835231 - DNA, 75 bp, synthetic construct
  source 1..75: mol_type = other DNA
tgtcagatttctcgatgccgagcgtacgcacccaatccgacgagcagaccgccacgcagtggatcaactggctgg

SEQ ID NO: 835232 - DNA, 75 bp, synthetic construct
  source 1..75: mol_type = other DNA
gccggttattttattgcttgaactggtgtttgcgacgtggagctggcaaaagctgcgcagcctgacgcgtcgtcg

SEQ ID NO: 835233 - DNA, 75 bp, synthetic construct
  source 1..75: mol_type = other DNA
gcctttttattacctctgcgccttattacgcgtcccccgctgacatcaaagtcaaactgaagcccgaagactctt

SEQ ID NO: 835234 - DNA, 75 bp, synthetic construct
  source 1..75: mol_type = other DNA
cggcggaattaatctgacgacactcaaaaattacctcgactgcggcattcgcctttttattacctccgcgcctta

SEQ ID NO: 835235 - DNA, 75 bp, synthetic construct
  source 1..75: mol_type = other DNA
atttagtccgctgcaggcaacggaaattgcgcaaaaagcaccgtcactggctcctcactgcacgctggctctgac

SEQ ID NO: 835236 - DNA, 75 bp, synthetic construct
  source 1..75: mol_type = other DNA
tcagtctaatgccatggcgtatggcgaaggactgccattaccggacagggaagatgcgcctcatcccagaattaa

SEQ ID NO: 835237 - DNA, 75 bp, synthetic construct
  source 1..75: mol_type = other DNA
tcttcgccttttgttcagagcattaatcagcacggcgtctgcgctggcagggctcatattgctgtgtctgttcgg

SEQ ID NO: 835238 - DNA, 75 bp, synthetic construct
  source 1..75: mol_type = other DNA
aaatctgaacgcgaatctggcccgtgttatcgatcagaatgctctggagatcattttcgccgccggtatacaaca

SEQ ID NO: 835239 - DNA, 75 bp, synthetic construct
  source 1..75: mol_type = other DNA
tatggacggcattctgtcgacccgtacacctgcggcattaattaccgcgcttaaccagcaaggctatcaactggg

SEQ ID NO: 835240 - DNA, 75 bp, synthetic construct
  source 1..75: mol_type = other DNA
acgagaatctggcccgtgttatcgatcagaatgctctggagatcattttcgccgccggtatacaacaacgggccg

SEQ ID NO: 835241 - DNA, 75 bp, synthetic construct
  source 1..75: mol_type = other DNA
tgaatgcacagggagtcccctcgggtacgctggaaaagtacgccgcccacacggctgataccccattacatctgg

SEQ ID NO: 835242 - DNA, 75 bp, synthetic construct
  source 1..75: mol_type = other DNA
cgagtggcattgtggaaaatgaagtgtgtccggtatttgccgcacgcaccaccagtgcgttacgatcaacgatga

SEQ ID NO: 835243 - DNA, 75 bp, synthetic construct
  source 1..75: mol_type = other DNA
gtgaaatcaattgggagctggatgatggttctcgcatggtgttaagggcagaaaagcagggggcaaacgatgaaa

SEQ ID NO: 835244 - DNA, 75 bp, synthetic construct
  source 1..75: mol_type = other DNA
gtgagcaattcagcacgactacagcttggtttttcaccgctatcaaaaaccatcgtgttggcaaaaatgcgtgac

SEQ ID NO: 835245 - DNA, 75 bp, synthetic construct
  source 1..75: mol_type = other DNA
gtcatttttgtggcaatttgccgaatacgacccatttccatgagcaaaccgtggagttcccgatccagggagaga

SEQ ID NO: 835246 - DNA, 75 bp, synthetic construct
  source 1..75: mol_type = other DNA
acactggaagaacaaccggtgctcaacagtaaatcgtggctgagcagtttgcaaaacgattacagccttcctgac

SEQ ID NO: 835247 - DNA, 75 bp, synthetic construct
  source 1..75: mol_type = other DNA
gtctgattctcatgaaactgccggaaacctggagtacaaatgagaaaatgtttgcttccggagggcaggggcatg

SEQ ID NO: 835248 - DNA, 75 bp, synthetic construct
  source 1..75: mol_type = other DNA
tttaggcaaagggtgccaggcacggctgcacattaatgccgacggaacgcaggcgacatttattgatgatgccgg

SEQ ID NO: 835249 - DNA, 75 bp, synthetic construct
  source 1..75: mol_type = other DNA
gcgtgtggactaactcggtttgtgggcacccacaactgggagaaagcaacgaagacgcggtgatccgccgttgcc

SEQ ID NO: 835250 - DNA, 75 bp, synthetic construct
  source 1..75: mol_type = other DNA
attgatgccacgccgtgggcattcagcccgtggatggtgatgcaggcagccaatagcgaagccagaaaacaattg

SEQ ID NO: 835251 - DNA, 75 bp, synthetic construct
  source 1..75: mol_type = other DNA
gccgctttgaactgggtgtggaaataacagcaccagaaccggtctatcctgactttcgctatcgcgccaccgatc

SEQ ID NO: 835252 - DNA, 75 bp, synthetic construct
  source 1..75: mol_type = other DNA
gaaacgctgaatatgcgcaaactggccgctgagtttggcatctcggagcgtaccctacatcgtgatttccgcgag

SEQ ID NO: 835253 - DNA, 75 bp, synthetic construct
  source 1..75: mol_type = other DNA
cctgcgccaaaaccaacaaccccgcccgtgcctgaagtggtgcgctatgaccgctacctgcttattaacacccgc

SEQ ID NO: 835254 - DNA, 75 bp, synthetic construct
  source 1..75: mol_type = other DNA
tgccgtaccggatgcgcctgacgagccaaatgtggtggatattatcgaccgccccggaggctttgaccgttctga

SEQ ID NO: 835255 - DNA, 75 bp, synthetic construct
  source 1..75: mol_type = other DNA
agcgactggatggaagcacgcgatcttcctgaagctgacggagagagtttccgtagttggtttaagaaacatcag

SEQ ID NO: 835256 - DNA, 75 bp, synthetic construct
  source 1..75: mol_type = other DNA
gtggatcactattgcaccgttcgtgacagcggttttttcacctttattttgaacgtcagcggagggtttcgttgg

SEQ ID NO: 835257 - DNA, 75 bp, synthetic construct
  source 1..75: mol_type = other DNA
ttttggttagtggttttatttatgtaaacctatcactttcaacaagataccgatataagcgttccaacggctggg

SEQ ID NO: 835258 - DNA, 75 bp, synthetic construct
  source 1..75: mol_type = other DNA
tttatcatgcagcaggaaggcatggggcgtctgtttgccctcgataagatggcggaaggtccgttcccggaacac

SEQ ID NO: 835259 - DNA, 75 bp, synthetic construct
  source 1..75: mol_type = other DNA
aaaccactgctggaaggccaggtcaactactggggcaactacccgaaattcttcgtctctatgatgaaggccttc

SEQ ID NO: 835260 - DNA, 75 bp, synthetic construct
  source 1..75: mol_type = other DNA
ctgggcgatggaagccaaaattcacaatggcgcgaagctgattgtgatcgatcctcgctttacgcgtacggctgc

SEQ ID NO: 835261 - DNA, 75 bp, synthetic construct
  source 1..75: mol_type = other DNA
ttgcgtgaacgctgggagcgttatgtggtactcaatgctgaatgggcagcaagagggcgcaggggatttgaacgt

SEQ ID NO: 835262 - DNA, 75 bp, synthetic construct
  source 1..75: mol_type = other DNA
aagccaaaattcacaatggcgcgaagctgattgtgatcgatcctcgctttacgcgtacggcggcggtggctgact

SEQ ID NO: 835263 - DNA, 75 bp, synthetic construct
  source 1..75: mol_type = other DNA
aagccaaaattcacaacggcgcaaagctgattgttatcgatcctcgctttacacgtacagcggcggtggctgact

SEQ ID NO: 835264 - DNA, 75 bp, synthetic construct
  source 1..75: mol_type = other DNA
cttctgggcggttcgggggagtcgccctgccttatctggcagggagaatctgcacagaccatcaccgacggtggg

SEQ ID NO: 835265 - DNA, 75 bp, synthetic construct
  source 1..75: mol_type = other DNA
agatcgttttggcgtgcagtgtattgtggtcggtattgatacctggtacgacgccgaaaccggcaaatatcacgt

SEQ ID NO: 835266 - DNA, 75 bp, synthetic construct
  source 1..75: mol_type = other DNA
agtctctggatgacgctgcgaaaattctttcctttggcgctgataaaatctccatcaactcccctgcgctggcgg

SEQ ID NO: 835267 - DNA, 75 bp, synthetic construct
  source 1..75: mol_type = other DNA
gcgtggtagataaaagctgggtatcccgcgtggcggaagtgatcgacatcccgttctgcgtggcgggtgggatta

SEQ ID NO: 835268 - DNA, 75 bp, synthetic construct
  source 1..75: mol_type = other DNA
ggaagtgcaaaaacgcggcgccggagaaatcgtcctcaacatgatgaatcaggacggcgtgcgtaacggttacga

SEQ ID NO: 835269 - DNA, 75 bp, synthetic construct
  source 1..75: mol_type = other DNA
cgctcgactgggtacaggaagtgcaaaaacgtggagccggagaaatcgtcctcaacatgatgaatcaggacggcg

SEQ ID NO: 835270 - DNA, 75 bp, synthetic construct
  source 1..75: mol_type = other DNA
gtcttgatgtgcgtgatggtcaggttgttaagggcgtgcagttccgcaatcacgagatcatcggcgatatcgtcc

SEQ ID NO: 835271 - DNA, 75 bp, synthetic construct
  source 1..75: mol_type = other DNA
acttgacggacatctggtcagttcacttctgggtgggccgggtgaatctccctgccttatctggcagggagattc

SEQ ID NO: 835272 - DNA, 75 bp, synthetic construct
  source 1..75: mol_type = other DNA
gcgtggcaacggatgcagccatactgatatcgccccctaccggctggttctgcatgccggtaactggtatctgac

SEQ ID NO: 835273 - DNA, 75 bp, synthetic construct
  source 1..75: mol_type = other DNA
gcgtcacgcttcatccggacacttttacacccgacgccacggtgcgcgacatcctttctcgcccgaaatttttac

SEQ ID NO: 835274 - DNA, 75 bp, synthetic construct
  source 1..75: mol_type = other DNA
tgcgtaacggttacgacctcgagcagctgaaaaaagtacgtgaagtttgccacgtcccgctgattgcctccggtg

SEQ ID NO: 835275 - DNA, 75 bp, synthetic construct
  source 1..75: mol_type = other DNA
ggatcgctttggcgtgcagtgtattgtggtcggtattgatacctggtacgacgctgaaaccggtaaatatcatgt

SEQ ID NO: 835276 - DNA, 75 bp, synthetic construct
  source 1..75: mol_type = other DNA
atcgcagcgggatggccggtctttttcctggctttgaccgccgtctggtgaacgcactgctgatgtgcgatgagt

SEQ ID NO: 835277 - DNA, 75 bp, synthetic construct
  source 1..75: mol_type = other DNA
tggacttatgaactggacgaaaacggctttgccaaacgcgataccacgttgcaacacccacgttgcgtatggaac

SEQ ID NO: 835278 - DNA, 75 bp, synthetic construct
  source 1..75: mol_type = other DNA
ctacaatcaaacgcctttaaaaaaattaatggttttgatgagtctttcaatggtcatggatatgaagattttgat

SEQ ID NO: 835279 - DNA, 75 bp, synthetic construct
  source 1..75: mol_type = other DNA
cgccacgacgcgcaccgtttttacctgcgcgaaggctacgagcagagccacttccgcttcaccaaggcgctgtaa

SEQ ID NO: 835280 - DNA, 75 bp, synthetic construct
  source 1..75: mol_type = other DNA
caacgtgaagcgccacgacgcacaccgtttttacctgcgtgaaggctacgagcagagccacttccgcttcaccaa

SEQ ID NO: 835281 - DNA, 75 bp, synthetic construct
  source 1..75: mol_type = other DNA
cgaatgccgcagccagtgccaccgccgccggaaaatcagcagaaagcgcgtcgtcatcggcaacaacagctaccg

SEQ ID NO: 835282 - DNA, 75 bp, synthetic construct
  source 1..75: mol_type = other DNA
ccagtgcatcagccagcgaggcggcaactcatgcaaccgatgctgcaggctcagcacgtgccgccagcacgtcag

SEQ ID NO: 835283 - DNA, 75 bp, synthetic construct
  source 1..75: mol_type = other DNA
aggcaataaacatgtgctggttaaattcaccgtgccacagcaaaccgcggtcagccaacgttggggcgacttgct

SEQ ID NO: 835284 - DNA, 75 bp, synthetic construct
  source 1..75: mol_type = other DNA
gcagtaagcggtgatgcccggcggattacgctactttgtctcagtactggggcgagatggggagaagcgaaaaat

SEQ ID NO: 835285 - DNA, 75 bp, synthetic construct
  source 1..75: mol_type = other DNA
gaggaagatggacggaagttgccacgctaaaaccagcacagattacaaattgcagggttaccttcctgaaaacca

SEQ ID NO: 835286 - DNA, 75 bp, synthetic construct
  source 1..75: mol_type = other DNA
tacgggtattccgctaaccgtgcgtctttatgccgatgactggacatggaacgatgtatggtatgcgtttttact

SEQ ID NO: 835287 - DNA, 75 bp, synthetic construct
  source 1..75: mol_type = other DNA
taattaaaaaaaagatatcagtagagttattaaaaaaaagatattttgatttttcaagaaaagagtttttacatt

SEQ ID NO: 835288 - DNA, 75 bp, synthetic construct
  source 1..75: mol_type = other DNA
cgagattatggaatatacttcgacaacaaacctggccatgtagatcgttatgatacaatgtacaggaagattaaa

SEQ ID NO: 835289 - DNA, 75 bp, synthetic construct
  source 1..75: mol_type = other DNA
gaactcttacagagttgttaggcagatggtggatatatcatggaaaatcacatgagcgtggagatattgaacggg

SEQ ID NO: 835290 - DNA, 75 bp, synthetic construct
  source 1..75: mol_type = other DNA
gtcggctccccacagcaggcaggcatttcagaactggttttgcgagcaggcaatggaaatcccaaagggattact

SEQ ID NO: 835291 - DNA, 75 bp, synthetic construct
  source 1..75: mol_type = other DNA
ctgcgtgctcctaagaccaataccgatgatgaggaaaggcaaacggcactgttgcaaatagtcggtggtgataaa

SEQ ID NO: 835292 - DNA, 75 bp, synthetic construct
  source 1..75: mol_type = other DNA
atcgccgatatcgttgatacaggcggttatggagatgttgatactgaaggtgtatcaaacgaaccatggctggaa

SEQ ID NO: 835293 - DNA, 75 bp, synthetic construct
  source 1..75: mol_type = other DNA
cgttgtggcaacgtatgctggcgcgtggttggacgccgatcactgagcctcgtctcgatcagtggcttatgcaag

SEQ ID NO: 835294 - DNA, 75 bp, synthetic construct
  source 1..75: mol_type = other DNA
agaacgccaaccttgtcgtggtgatgggcggtaatgccgctgaagctcacccggtcggattccgctgggcgatgg

SEQ ID NO: 835295 - DNA, 75 bp, synthetic construct
  source 1..75: mol_type = other DNA
ctgccctcttttggagaggccggcgacagtggttctccattatttggctggaatacggccaaagggcagtggtcg

SEQ ID NO: 835296 - DNA, 75 bp, synthetic construct
  source 1..75: mol_type = other DNA
tgctggagaacgccagggatacgtgtattcgcctggtgcaggaaatgcgcgatcagcaaaaagacgatgatgaag

SEQ ID NO: 835297 - DNA, 75 bp, synthetic construct
  source 1..75: mol_type = other DNA
atgaaaatcatcaggtgtacggtgtgcgtaaagtctggcgtcagttgttacgggaaggtatcagggtggccagat

SEQ ID NO: 835298 - DNA, 75 bp, synthetic construct
  source 1..75: mol_type = other DNA
ctcgctgttcgtgggcttatgctaataacgcctcaataccggatagcgaaacaaaatgcggcactattccgcttg

SEQ ID NO: 835299 - DNA, 75 bp, synthetic construct
  source 1..75: mol_type = other DNA
gttactggcgggatcaccggggcactgaaggggaacgcggcaaccgccaccaaattgcagacagcgagaagcatt

SEQ ID NO: 835300 - DNA, 75 bp, synthetic construct
  source 1..75: mol_type = other DNA
caacgtattaccactgtcagcaacagcgacatcgtcctgataaacgcagtacccgtgcgcagcgcgatgactggc

SEQ ID NO: 835301 - DNA, 75 bp, synthetic construct
  source 1..75: mol_type = other DNA
gtacgccagcatgagcgggataccggaggcggtgatggtgggctcaccaccactgaacgtcagcgtctgaaagag

SEQ ID NO: 835302 - DNA, 75 bp, synthetic construct
  source 1..75: mol_type = other DNA
gccggaaagccgtttccgcaggcgaccgcgtaaaccgtcagttcgtggcagaacgtcctgaccagctgtgggtgg

SEQ ID NO: 835303 - DNA, 75 bp, synthetic construct
  source 1..75: mol_type = other DNA
cggactcatcatgcgattttatctgattaataatgaattttacgaacagattaaagcacggttacagacggcgga

SEQ ID NO: 835304 - DNA, 75 bp, synthetic construct
  source 1..75: mol_type = other DNA
agacattaccgactggcagacggcgaaaatcatgcgtgaagcggtagcgattgtcccggaagggcgtcgtgtctt

SEQ ID NO: 835305 - DNA, 75 bp, synthetic construct
  source 1..75: mol_type = other DNA
agacattaccgactggcagacggcgaaaatcatgcgcgaagcggtagcgattgtcccggaagggcgtcgcgtctt

SEQ ID NO: 835306 - DNA, 75 bp, synthetic construct
  source 1..75: mol_type = other DNA
tgtatgacctgatcaactatttcgcagcggaaatgaaagccccgcgctggctgcgcaccgccgacggtgtgaagt

SEQ ID NO: 835307 - DNA, 75 bp, synthetic construct
  source 1..75: mol_type = other DNA
catgttgtgctctccgatactggtgatgcgctgctggcgaacgaagcagtgagaagtgcgtatttaggcgggtaa

SEQ ID NO: 835308 - DNA, 75 bp, synthetic construct
  source 1..75: mol_type = other DNA
tgttgcttgatgagccatcgctcggtcttgcgccgattatcatccagcaaattttcgacaccatcgagcagctgc

SEQ ID NO: 835309 - DNA, 75 bp, synthetic construct
  source 1..75: mol_type = other DNA
aaagtgggtgtatgaactgtttccgcgtctccatgaacgccgtgttcagcgggcgggcaccatgtccggcggtga

SEQ ID NO: 835310 - DNA, 75 bp, synthetic construct
  source 1..75: mol_type = other DNA
cgtacggccctgcgcgcagttcgtgacacggtggtctctgttgcccgcgcggtatggaactggattttcttctga

SEQ ID NO: 835311 - DNA, 75 bp, synthetic construct
  source 1..75: mol_type = other DNA
ctctgttgcacgcacggttctgcgggccgtccgtgactccgtggtctctgttgcccgcgctgtatggaactggat

SEQ ID NO: 835312 - DNA, 75 bp, synthetic construct
  source 1..75: mol_type = other DNA
ctctgttgcacgcacggttctgcgcgccgtccgtgactcggtggtctctgttgcccgcgctgtatggaactggat

SEQ ID NO: 835313 - DNA, 75 bp, synthetic construct
  source 1..75: mol_type = other DNA
tgctgccacagattttaccgtactggcagaccactgtgaaaacttcgccgaaaccctgatcgaaagcgacgatcc

SEQ ID NO: 835314 - DNA, 75 bp, synthetic construct
  source 1..75: mol_type = other DNA
ggcgaaaaattaccaaatgctggaaaaacactatccgcaaacaaaaatctcctgggtggagttcccggctggccc

SEQ ID NO: 835315 - DNA, 75 bp, synthetic construct
  source 1..75: mol_type = other DNA
gatcgttttatctggcagctcgtccgtatgcagaaaaaaacggcgcttttattcagggtgtgctgacaaccttta

SEQ ID NO: 835316 - DNA, 75 bp, synthetic construct
  source 1..75: mol_type = other DNA
ttatgcggcgacccgcgcgccaccagtgggcgaattgtgtttgatgataaagacattaccgactggcagacggcg

SEQ ID NO: 835317 - DNA, 75 bp, synthetic construct
  source 1..75: mol_type = other DNA
gggcacaccattgataacagcggctttaccacgcagcttgagcttgaggcaaaaatcccggaatggatagcggaa

SEQ ID NO: 835318 - DNA, 75 bp, synthetic construct
  source 1..75: mol_type = other DNA
gaaacagtactggcctgcatgcacgtccggcggcctgtctggcgaaagccgccaaaaaatatagctgtaaagtga

SEQ ID NO: 835319 - DNA, 75 bp, synthetic construct
  source 1..75: mol_type = other DNA
atgttgagtaaaaccgtggaggtcagaaacagtactggcctgcatgcacgtccggcggcgtgtctggtgaaagcc

SEQ ID NO: 835320 - DNA, 75 bp, synthetic construct
  source 1..75: mol_type = other DNA
cgctgcgccaggtgtgcaagctgtcggcgcgtaaacaaaagcaggtgcaggattttattggggtgattgcgggta

SEQ ID NO: 835321 - DNA, 75 bp, synthetic construct
  source 1..75: mol_type = other DNA
cactgcgccaggtgtgcaaactgtcggcgcgtaaacaaaagcaggtgcaggagttcattgggatgattgcgggta

SEQ ID NO: 835322 - DNA, 75 bp, synthetic construct
  source 1..75: mol_type = other DNA
tgcaaactgtcggcacgtaaacaaaagcaggtgcaggagtttattggggtgattagtagcaaaacgccacgctaa

SEQ ID NO: 835323 - DNA, 75 bp, synthetic construct
  source 1..75: mol_type = other DNA
tgcgggtagcgcaacaaatgttggtgtgcagatactggacagaacaggaaatgagctgacgctggacggtgcgac

SEQ ID NO: 835324 - DNA, 75 bp, synthetic construct
  source 1..75: mol_type = other DNA
ggttttaacattcaactgaatgattgcgataccgatgttgcaagcaaagctgctgttgccttcttaggtacaaca

SEQ ID NO: 835325 - DNA, 75 bp, synthetic construct
  source 1..75: mol_type = other DNA
gcgctgatgagcaacccgcgtttgttgttacttgatgagccatcgctcggtcttgcgccgattatcatccagcaa

SEQ ID NO: 835326 - DNA, 75 bp, synthetic construct
  source 1..75: mol_type = other DNA
agctatgcgagccgctacccggattacagccgtattcccgccatcaccctgaaaggtcagtggctggaagccgcc

SEQ ID NO: 835327 - DNA, 75 bp, synthetic construct
  source 1..75: mol_type = other DNA
cagtgccggatgctcacccgtgtccggcgcacgcactccacctcacccgtggagaactccttaatcaccaaccct

SEQ ID NO: 835328 - DNA, 75 bp, synthetic construct
  source 1..75: mol_type = other DNA
aagtactggctctgcagagttcagctgcgggtagcgcaacaaacgttggtgtgcagatcctggacagaacgggtg

SEQ ID NO: 835329 - DNA, 75 bp, synthetic construct
  source 1..75: mol_type = other DNA
ctctgttgcacgcacggttctgcgtgccgtccgtgactcggtggtctctgttgcccgcgccgtatggaactggat

SEQ ID NO: 835330 - DNA, 75 bp, synthetic construct
  source 1..75: mol_type = other DNA
tgctgtcaggacgctttcagccagccacgccaacattcctcaactgcggtaagcagcagcgcggcgaactggttt

SEQ ID NO: 835331 - DNA, 75 bp, synthetic construct
  source 1..75: mol_type = other DNA
ctttgcccgcacggtagagactgccgtacgcggtttaacggcggtgtcagatatgagtcatatccgcagcgtgcc

SEQ ID NO: 835332 - DNA, 75 bp, synthetic construct
  source 1..75: mol_type = other DNA
atgacgaactggttgccgatgaacgcatccgcaaaaaatacctcaacgcccgtgatttcttccagcgactggcag

SEQ ID NO: 835333 - DNA, 75 bp, synthetic construct
  source 1..75: mol_type = other DNA
acgctattgccattatggaaagcaagaagatgtggcgtagtaattatgcccctcccttgctacgcctcgcatgga

SEQ ID NO: 835334 - DNA, 75 bp, synthetic construct
  source 1..75: mol_type = other DNA
caagcgtagtagcaggtatttgttttggtgttcttatggctgcgtatcattggtggcgaaaggtcgttaacaacc

SEQ ID NO: 835335 - DNA, 75 bp, synthetic construct
  source 1..75: mol_type = other DNA
cgagctgcgtttttcaccaggctacatggcaatggcacatcagctgcctgtagcgggtgttgtcgaagcggtgat

SEQ ID NO: 835336 - DNA, 75 bp, synthetic construct
  source 1..75: mol_type = other DNA
caacgaaggttactatgatgaaagcgttcttaatcgctactctcgcgactttgtcattacgctgtttgcccacgc

SEQ ID NO: 835337 - DNA, 75 bp, synthetic construct
  source 1..75: mol_type = other DNA
gctgtcggttttaacattcaactgaacgattgtgacactactgttgcagacaaagctgctattgccttccttggt

SEQ ID NO: 835338 - DNA, 75 bp, synthetic construct
  source 1..75: mol_type = other DNA
cgctgttgccttcttaggtacggcaattgatgctacgcatactgatgtactggctctgcagagttctgctgcagg

SEQ ID NO: 835339 - DNA, 75 bp, synthetic construct
  source 1..75: mol_type = other DNA
aacggcggtgtcagatatgagtcatatccgcagcgtgccgtccatcgaagccggaaatgccgcctcgcacgccat

SEQ ID NO: 835340 - DNA, 75 bp, synthetic construct
  source 1..75: mol_type = other DNA
gacgagaatctcgactatgcccgtacaggccatgatatttcctgcaatctagggtcgttgaatattgcccacacc

SEQ ID NO: 835341 - DNA, 75 bp, synthetic construct
  source 1..75: mol_type = other DNA
atcacctggcacgctctgcgtacctcgatgttgctggcacgcgaacgtggtgaaaccttcgctggattcaaacaa

SEQ ID NO: 835342 - DNA, 75 bp, synthetic construct
  source 1..75: mol_type = other DNA
ggtgtagtgaatatcatcaccaaaaaaatcggtcagaaatggtcggtcgggtaccgttaccgtcgataccaccat

SEQ ID NO: 835343 - DNA, 75 bp, synthetic construct
  source 1..75: mol_type = other DNA
ccggttatatcatcgaaaacggcaaactggctggttacgaagtagttacttctggtgttatcccggcagaccaca

SEQ ID NO: 835344 - DNA, 75 bp, synthetic construct
  source 1..75: mol_type = other DNA
acatcgttctgggtgacttctccggtattaccatcggtgagtggggaggtctggaactcgacatggatctaacta

SEQ ID NO: 835345 - DNA, 75 bp, synthetic construct
  source 1..75: mol_type = other DNA
cattgtttctaaatggattcctcacgaggtttcatgggtgtctgttcccgcagacgacaccgtgggtctgaatcg

SEQ ID NO: 835346 - DNA, 75 bp, synthetic construct
  source 1..75: mol_type = other DNA
ctctgttgcacgcacggttctgcgtgccgtccgtgactccgtggtctctgttgcccgcgcggtatggaactggat

SEQ ID NO: 835347 - DNA, 75 bp, synthetic construct
  source 1..75: mol_type = other DNA
ctctgttgcacgcacggttctgcgagccgtccgtgactctgtggtctctgttgcccgcgcagtatggaactggat

SEQ ID NO: 835348 - DNA, 75 bp, synthetic construct
  source 1..75: mol_type = other DNA
ctggaacatctgcgcaaactcacccgtcacgaacccgtgcctggcattatgggtaaaagcggggccggtaaatcc

SEQ ID NO: 835349 - DNA, 75 bp, synthetic construct
  source 1..75: mol_type = other DNA
tattgctaccctgatcactgatcacattaacaaagctgttcggatcaaactggaacaactgattctgtctgacaa

SEQ ID NO: 835350 - DNA, 75 bp, synthetic construct
  source 1..75: mol_type = other DNA
tcagcgtaagcaaagcatcgctttactggcaaaaacaatgggtttaccggcaccggtgattgcctcttacttaga

SEQ ID NO: 835351 - DNA, 75 bp, synthetic construct
  source 1..75: mol_type = other DNA
atccctactactccgctgcattattacagggcggcgtgcgggtgctgaaagacggcaccgatctcaatcaaaccg

SEQ ID NO: 835352 - DNA, 75 bp, synthetic construct
  source 1..75: mol_type = other DNA
cttaccgcgcacagtctgctatcgttccgcgtatctgggtagacctggacttcaccgtagttcagccggaagctc

SEQ ID NO: 835353 - DNA, 75 bp, synthetic construct
  source 1..75: mol_type = other DNA
cgctaccctgatcactgatcacattaacaaagctgttcgcatcaaactggaacaactgattctgtctgataaagc

SEQ ID NO: 835354 - DNA, 75 bp, synthetic construct
  source 1..75: mol_type = other DNA
gaccgcttccagcgttgaatctttcggcttcgttgatgaaaacggtgctgcaccggaaggtaaagcagaatttgc

SEQ ID NO: 835355 - DNA, 75 bp, synthetic construct
  source 1..75: mol_type = other DNA
atgcgtaacatcattaaactggcgctggtgggattgcttagcgtctctacactcgcggttgccgcagagtcttcg

SEQ ID NO: 835356 - DNA, 75 bp, synthetic construct
  source 1..75: mol_type = other DNA
atgcgctcaatgttaacggaacttgaaagagaactttgtcgccaagtgaagacagagaagcctgatgttccaaat

SEQ ID NO: 835357 - DNA, 75 bp, synthetic construct
  source 1..75: mol_type = other DNA
gggacgtattctctgatagtttcacgcagcatggtacgttgcgtaagcattttaatcacccgccatcactagaag

SEQ ID NO: 835358 - DNA, 75 bp, synthetic construct
  source 1..75: mol_type = other DNA
caacaccggctctgacgcccctgatgctggatgaagccagcgggaaactggtggtctgggatggacagaaagccg

SEQ ID NO: 835359 - DNA, 75 bp, synthetic construct
  source 1..75: mol_type = other DNA
gctggatgaagctaccgggaaactggtggtctgggacggacagaaagccggtagtgcggttggcatactggtact

SEQ ID NO: 835360 - DNA, 75 bp, synthetic construct
  source 1..75: mol_type = other DNA
tagtgggattacttagcgtttctactctttcggttgcggcggagccgtctccagaagctttacgtattggctacc

SEQ ID NO: 835361 - DNA, 75 bp, synthetic construct
  source 1..75: mol_type = other DNA
tacttttacttaatttaaatgtattggaaaaatacacaaaaaacaaaccaatcatatattttgtttattatagtg

SEQ ID NO: 835362 - DNA, 75 bp, synthetic construct
  source 1..75: mol_type = other DNA
ggacagcacagcgggggtaatttcaagaatgacccgcagcgcgcatctgaagcaggtaaaaaaggtggcaagagc

SEQ ID NO: 835363 - DNA, 75 bp, synthetic construct
  source 1..75: mol_type = other DNA
gatattggcaacctgcattatattgataccggcgctgtctttgggggcgaactgactcttgtgcaattgcaataa

SEQ ID NO: 835364 - DNA, 75 bp, synthetic construct
  source 1..75: mol_type = other DNA
tttctcccgaggattgcccgttgaatttggcaacgtgtggctaaaaggtaataaatattaccttggcaccgtact

SEQ ID NO: 835365 - DNA, 75 bp, synthetic construct
  source 1..75: mol_type = other DNA
tttctcccgcggattacccgttgagtttggcaacgtctggttaaaaggaaataaatactatcttggcaccgtgct

SEQ ID NO: 835366 - DNA, 75 bp, synthetic construct
  source 1..75: mol_type = other DNA
agcgtttacgttcaattggtgatgaaaaagcgatgctgatagagaaccgtatcaatattgagctatgccccggca

SEQ ID NO: 835367 - DNA, 75 bp, synthetic construct
  source 1..75: mol_type = other DNA
ttgcgacggaggcaatccgctggcctgacagtgtggatgaacacaaaaaggcaaatgcctttgccggtacagccc

SEQ ID NO: 835368 - DNA, 75 bp, synthetic construct
  source 1..75: mol_type = other DNA
tttgcgatgctgctgcaatggcgcggatttttgctctgcatcagccggatgcagtgatgcacctggctgctgaaa

SEQ ID NO: 835369 - DNA, 75 bp, synthetic construct
  source 1..75: mol_type = other DNA
cgcagcggggacaacattatccttaacatgccgaacaatgtgacctttgacagcagcagcgcgacccttaaaccg

SEQ ID NO: 835370 - DNA, 75 bp, synthetic construct
  source 1..75: mol_type = other DNA
agcggcaggtgcggcactgggcggcggtgttggttattacatggatgtgcaggaagcgaaactgcgtgacaaaat

SEQ ID NO: 835371 - DNA, 75 bp, synthetic construct
  source 1..75: mol_type = other DNA
taccatttccctgaaaagttgattcccttggttattctcaatgctctcgaagggaaatcgttacccatttatggt

SEQ ID NO: 835372 - DNA, 75 bp, synthetic construct
  source 1..75: mol_type = other DNA
cagcatacgcgccaagtagtccatattctgcttctaaagcgtcaagcgatcatttggttcgcgcatggaaacgta

SEQ ID NO: 835373 - DNA, 75 bp, synthetic construct
  source 1..75: mol_type = other DNA
caattgttcgaataactatggtccttaccatttcccggaaaaattaattccgctggtcattctcaatgctctgga

SEQ ID NO: 835374 - DNA, 75 bp, synthetic construct
  source 1..75: mol_type = other DNA
atgtggcttttgcatgggcaatgtttaagatcttcaaaattcccgtaaataaatggaccattcccacagcggccc

SEQ ID NO: 835375 - DNA, 75 bp, synthetic construct
  source 1..75: mol_type = other DNA
gttgctgtggagttacaaaaggctgtaaaaacggacaactggcgtccattttttgtaaaacttgaatcactggca

SEQ ID NO: 835376 - DNA, 75 bp, synthetic construct
  source 1..75: mol_type = other DNA
gggacctttgcgacggaggcaatccgctggcctgaaagtgtggatgaacacaaaaaggcaaatgcctttgccggc

SEQ ID NO: 835377 - DNA, 75 bp, synthetic construct
  source 1..75: mol_type = other DNA
gcaaatgacctttgccggcagtgccctgagtcacgcggcgctgccgtaacacgttatcaggccaccgcggtggcc

SEQ ID NO: 835378 - DNA, 75 bp, synthetic construct
  source 1..75: mol_type = other DNA
atgctggatgaagccaccgggaaactggtggtctgggacggacagaaagccggtagtgcggctggcatactggta

SEQ ID NO: 835379 - DNA, 75 bp, synthetic construct
  source 1..75: mol_type = other DNA
tcgctgtcggactatcaatttttgttgaaactgtctgaaaaggcaaccaacaaaaaatgtcagtggaagagttta

SEQ ID NO: 835380 - DNA, 75 bp, synthetic construct
  source 1..75: mol_type = other DNA
agggaaatcgttacccatttatggtaaaggcgatcagattcgcgactggctctatgttgaagaccatgcccgtgc

SEQ ID NO: 835381 - DNA, 75 bp, synthetic construct
  source 1..75: mol_type = other DNA
cgctatgtttttgaacatgcggatatttgcgatgctgctgcaatggcgcgaattttttctcagcatcagccggat

SEQ ID NO: 835382 - DNA, 75 bp, synthetic construct
  source 1..75: mol_type = other DNA
cccggatgaagtgagttcgggtagtgagctgccgctctttaccgagaccacgccgtacgcgccaagcagcccgta

SEQ ID NO: 835383 - DNA, 75 bp, synthetic construct
  source 1..75: mol_type = other DNA
cgcctggcaatcattcagttaggaacctatgacggcactgtctataacgctcgtcaggtgatcgatgccattggg

SEQ ID NO: 835384 - DNA, 75 bp, synthetic construct
  source 1..75: mol_type = other DNA
tggtggcaaattgtggcaggattatccgacgtcagtattggccagcgaccgtcgcttcttcagttttgaaccggg

SEQ ID NO: 835385 - DNA, 75 bp, synthetic construct
  source 1..75: mol_type = other DNA
tagtgcgtattcgtgatgccgaagggcggattgcggcggaaggcgcgctgccgtatccacctggcgtgctttgcg

SEQ ID NO: 835386 - DNA, 75 bp, synthetic construct
  source 1..75: mol_type = other DNA
ccgggttacacgaagccgaaacacacgatcaatccgaatatgagcatcaagcgcgccgccggtgagcaaattggt

SEQ ID NO: 835387 - DNA, 75 bp, synthetic construct
  source 1..75: mol_type = other DNA
aggctgttctgtacggtaaatacactgtttccggcagcaatatcgagacctatgagatcgacatgagccgcagcg

SEQ ID NO: 835388 - DNA, 75 bp, synthetic construct
  source 1..75: mol_type = other DNA
ggttttgccaccggcacgccggtagatgtcaaagtgatggaaggctgcattgtcctcaccgctcagccacccgcc

SEQ ID NO: 835389 - DNA, 75 bp, synthetic construct
  source 1..75: mol_type = other DNA
acctggctaatacaaaatgggttgagaatgtgaaactaggtgcatatacttcttacctttccaaacaaggcggag

SEQ ID NO: 835390 - DNA, 75 bp, synthetic construct
  source 1..75: mol_type = other DNA
aaagcgctcaagcagttatgtaaggcaggtattcttcactgtatcggagaaccggacgattttgttgttatgctg

SEQ ID NO: 835391 - DNA, 75 bp, synthetic construct
  source 1..75: mol_type = other DNA
cgggacgattattaaggcgcgtttaccaaaagcgcgtattggcgccttttacaagatagaacccagtcaacgttt

SEQ ID NO: 835392 - DNA, 75 bp, synthetic construct
  source 1..75: mol_type = other DNA
cttaagcgtattggttttcaactgccagtatttttattttccgaatatgtggtcgagttgccagcgggcgtcacg

SEQ ID NO: 835393 - DNA, 75 bp, synthetic construct
  source 1..75: mol_type = other DNA
taataacgacctggtgcgtattctcgcgctgagcaatgttgaagctaccgccgatcagatcgctatctggctgcg

SEQ ID NO: 835394 - DNA, 75 bp, synthetic construct
  source 1..75: mol_type = other DNA
ttatgcaacggaactgaaaaattaagtgaatccgaaaaatcatttatacgaagagccggtaatatgcttgattct

SEQ ID NO: 835395 - DNA, 75 bp, synthetic construct
  source 1..75: mol_type = other DNA
gggtattgagcaagcgatcagccgtggcctggcgtatgcgccatatgctgacctggtatggtgtgaaacctccac

SEQ ID NO: 835396 - DNA, 75 bp, synthetic construct
  source 1..75: mol_type = other DNA
attgacaatctcttttggtatgagaggagcattgattgctgtagtttcaaatcaagctatattgttttttgtgac

SEQ ID NO: 835397 - DNA, 75 bp, synthetic construct
  source 1..75: mol_type = other DNA
tcgcgagaaggggcaagtgggcatcgtaacacatggcgtattgcttacagcatagaacctattcgcgaatggtta

SEQ ID NO: 835398 - DNA, 75 bp, synthetic construct
  source 1..75: mol_type = other DNA
aggtaaggctctgccgatttatggtaagggcgaccaaattcgtgactggctgtatgttgaagatcatgcgcgcgc

SEQ ID NO: 835399 - DNA, 75 bp, synthetic construct
  source 1..75: mol_type = other DNA
gaccgtcgctatgctattgatgcagcgaagatgagccatgaactggcgtggaaaccgcaggagacatttgaatca

SEQ ID NO: 835400 - DNA, 75 bp, synthetic construct
  source 1..75: mol_type = other DNA
tgcgatctcaatgttcttattaactccggcggaaagccacgagaagctggcacaactggtagagatgttggcgca

SEQ ID NO: 835401 - DNA, 75 bp, synthetic construct
  source 1..75: mol_type = other DNA
gttatataccgtcgtaaccgaaggtaaagcgggtgaaacttataacattggtggacacaacgaaaagaaaaacat

SEQ ID NO: 835402 - DNA, 75 bp, synthetic construct
  source 1..75: mol_type = other DNA
agaagattagccgcgaattgggatggaaaccacaggaaacgtttgagagcgggattcggaagacagtggaatggt

SEQ ID NO: 835403 - DNA, 75 bp, synthetic construct
  source 1..75: mol_type = other DNA
cctatggtttaccgaccattgtgactaactgttcgaataactacggtccttatcactttccggaaaaattgattc

SEQ ID NO: 835404 - DNA, 75 bp, synthetic construct
  source 1..75: mol_type = other DNA
gccgctgccgcgctgggcgtcgatcccctgtatgtcgctctgccaagctatgttgtcatcatgggcggcggcgca

SEQ ID NO: 835405 - DNA, 75 bp, synthetic construct
  source 1..75: mol_type = other DNA
aagagatggatgaagatgacttcgatagtagtgagtcaagcccaattgagttatggcaggcattatctgatacag

SEQ ID NO: 835406 - DNA, 75 bp, synthetic construct
  source 1..75: mol_type = other DNA
gaccgcctggaacaggtaaaacaacatttatttcaaaatttattcactatctgtatcaacattgcggtgtgaata

SEQ ID NO: 835407 - DNA, 75 bp, synthetic construct
  source 1..75: mol_type = other DNA
gacgcctattatcaacggcaatttcgatgtgctgattaacaccgacggtgggcgcataacgttgctcggcgtact

SEQ ID NO: 835408 - DNA, 75 bp, synthetic construct
  source 1..75: mol_type = other DNA
gggcagttgaaagagcgcaagatgggcattaaagccgaagagttcaatctgaaaaagggctggtgctggcggtga

SEQ ID NO: 835409 - DNA, 75 bp, synthetic construct
  source 1..75: mol_type = other DNA
gagtggaacaatgcaggtcgccgtccggtaacggtgttgagcctcggttgtgtggtgattattgtcgccgccaac

SEQ ID NO: 835410 - DNA, 75 bp, synthetic construct
  source 1..75: mol_type = other DNA
cctgacacatttctttgaacttctgcgcggtaatggcgatgtcgatcaggctcgactgcactactggctgcgttt

SEQ ID NO: 835411 - DNA, 75 bp, synthetic construct
  source 1..75: mol_type = other DNA
cctccgccgctctcgacatggaaaagcagtttgataaggcagaaagaatcccctcaccgccccaagaaatgcggc

SEQ ID NO: 835412 - DNA, 75 bp, synthetic construct
  source 1..75: mol_type = other DNA
ctcaacgtattgcagcgaggctctcttccagccaacgggatgaccattatttgcataatgactttcacgcgttga

SEQ ID NO: 835413 - DNA, 75 bp, synthetic construct
  source 1..75: mol_type = other DNA
gtaatacttttattgaactactgtttaacctcgagccagtaattgatgccatcattgagcgagctaatcctaatc

SEQ ID NO: 835414 - DNA, 75 bp, synthetic construct
  source 1..75: mol_type = other DNA
tatccgaggaggatataactgatgatgcccgtgagctgtatgagttacgccgtagttttagccgattagatgaga

SEQ ID NO: 835415 - DNA, 75 bp, synthetic construct
  source 1..75: mol_type = other DNA
attggtcatatgaccgctggcggtacagtagatgaaccaatcagccgccacccgaccaaacgtactcacatggcg

SEQ ID NO: 835416 - DNA, 75 bp, synthetic construct
  source 1..75: mol_type = other DNA
gtcgcgtatgcgaacaaaattctggcggaagatgacattcagtacaatgaactgactgtggaacatccagcgtat

SEQ ID NO: 835417 - DNA, 75 bp, synthetic construct
  source 1..75: mol_type = other DNA
ggcggaactggcaaagaaagtagccaaagtgctgacaaaagaaaagcctcaagactgctgcaacagttttgaggc

SEQ ID NO: 835418 - DNA, 75 bp, synthetic construct
  source 1..75: mol_type = other DNA
ccgccagaccaaagccgacattgtggtggtcgggttgattggcgaacgcgggcgcgaagtgaaagagtttattga

SEQ ID NO: 835419 - DNA, 75 bp, synthetic construct
  source 1..75: mol_type = other DNA
tcccggctatcgagcgatttttgcgccaggagatgcgcgaacccgcttccctcgaactggtgcaaagccgcctgc

SEQ ID NO: 835420 - DNA, 75 bp, synthetic construct
  source 1..75: mol_type = other DNA
acttttgaaaacgactcaatccttgcctggattcgaaatactgactgggcaaagattggatttaaaaatgatgcc

SEQ ID NO: 835421 - DNA, 75 bp, synthetic construct
  source 1..75: mol_type = other DNA
atggtaaaaaattcacgctatccagctccaacaactccacgaagaacgtagggtttaatttatggggcacttcat

SEQ ID NO: 835422 - DNA, 75 bp, synthetic construct
  source 1..75: mol_type = other DNA
gagctggcaaagaaagtagccatggtgctgacaaaagaaaagcctcaagactgctgcaacagttttgaggcctga

SEQ ID NO: 835423 - DNA, 75 bp, synthetic construct
  source 1..75: mol_type = other DNA
ggattgacccggacatccgtgcactggtggccgcgatgaacgttcacggattttgtacatatgcgtcctgtcagg

SEQ ID NO: 835424 - DNA, 75 bp, synthetic construct
  source 1..75: mol_type = other DNA
ttgcactcattctcaccagcacctgtatgacagcctccgctgccacacaagaaatctcaaaaaaagcctatgtct

SEQ ID NO: 835425 - DNA, 75 bp, synthetic construct
  source 1..75: mol_type = other DNA
gacgcaagtaacgactttgagaaggtgaaaacccagaatcgcctgctgccgaaacatatcgacaagattgcagat

SEQ ID NO: 835426 - DNA, 75 bp, synthetic construct
  source 1..75: mol_type = other DNA
ctgatggcgggcagcggcgtcgggaaaagcgtgctgctggggatgatcacccgccagactaaagccgacatcgtg

SEQ ID NO: 835427 - DNA, 75 bp, synthetic construct
  source 1..75: mol_type = other DNA
atggcgagttataccggattctctatcgcggttgccatttacttcctcaacgaatccctgggccgtccggtacag

SEQ ID NO: 835428 - DNA, 75 bp, synthetic construct
  source 1..75: mol_type = other DNA
ggattgacccggacatccgtgcactggtggccgcgatgaacgttcacggattccgtacatatgcgtcctgtcagg

SEQ ID NO: 835429 - DNA, 75 bp, synthetic construct
  source 1..75: mol_type = other DNA
caatcaaaaaacgtattgaaaccaaaacgttgaaacgccgggattgggcagcactttgttcaagctattttgcct

SEQ ID NO: 835430 - DNA, 75 bp, synthetic construct
  source 1..75: mol_type = other DNA
tgcgctgggtctggggcggtggattgttgatgattgtgggcgcgttattaagcggattgcggaggagaacgcgca

SEQ ID NO: 835431 - DNA, 75 bp, synthetic construct
  source 1..75: mol_type = other DNA
tatggcggtttgatggtggcggcgagcgtggcgctggcgagtttactgcgcggcgagtttgatggtgcctgcgcc

SEQ ID NO: 835432 - DNA, 75 bp, synthetic construct
  source 1..75: mol_type = other DNA
ctggctggagtgcattaaccgcagggatcattctcggttcctggtgggcttattgcgaactgggctggggcggtt

SEQ ID NO: 835433 - DNA, 75 bp, synthetic construct
  source 1..75: mol_type = other DNA
gccaaaattcatgaaggggagagtgggcgtcggctgtgggctgagtgtgttgagatagggattgaagcgcgcaag

SEQ ID NO: 835434 - DNA, 75 bp, synthetic construct
  source 1..75: mol_type = other DNA
accggagcggatcgttacgcatttcgtttgtatgtacaaagcggtgtgcgctggatctggggggaggattgttga

SEQ ID NO: 835435 - DNA, 75 bp, synthetic construct
  source 1..75: mol_type = other DNA
ctgggatatgcaggaaaaattacaaattttgctgactggatcactgagtttggtaaggctgcccggacagataac

SEQ ID NO: 835436 - DNA, 75 bp, synthetic construct
  source 1..75: mol_type = other DNA
ccggagctgcaaggtgtttatagcgaaaccgatgcggatggtatgaaacggttgtacgggtatgtgttgaagtaa

SEQ ID NO: 835437 - DNA, 75 bp, synthetic construct
  source 1..75: mol_type = other DNA
cttacgacggcactgtctataacgcccgtcaggtgatcgacaccatcggtcatctttgtgattacattttgtttg

SEQ ID NO: 835438 - DNA, 75 bp, synthetic construct
  source 1..75: mol_type = other DNA
agcttgtcatcaccgatcttttactgcgtattgagcattacctgcaaccggacgttgtgttaccggttcctcatc

SEQ ID NO: 835439 - DNA, 75 bp, synthetic construct
  source 1..75: mol_type = other DNA
gcactggcgttgtttcagggagataactggcaggctcgtgaaacattgtgtcaggcgttggcatatagcgtgcca

SEQ ID NO: 835440 - DNA, 75 bp, synthetic construct
  source 1..75: mol_type = other DNA
atcgacgcgtttttgcatgggcgcggcgtggaagaatccccacgaacgcgatatgccgtacctggaacagatggt

SEQ ID NO: 835441 - DNA, 75 bp, synthetic construct
  source 1..75: mol_type = other DNA
ggcagcctgagttcacagataaaacactctccaggaaacccggggcggttcagcactcagtgttctttcgacgca

SEQ ID NO: 835442 - DNA, 75 bp, synthetic construct
  source 1..75: mol_type = other DNA
atgtcattactgtcatgttgcatgaagacacattaactgaaattaatgagttaaataactttctgacacgcgacg

SEQ ID NO: 835443 - DNA, 75 bp, synthetic construct
  source 1..75: mol_type = other DNA
actggtttcggggctcagccaaagtgcaacaggcaaaacacctgaaatcacgatcgccacctgggaggcgtggaa

SEQ ID NO: 835444 - DNA, 75 bp, synthetic construct
  source 1..75: mol_type = other DNA
acttgcaggtgagagcaattcactctcgtcattagaaaaaatcgcgcaaatccctgatagcagttggttgtggaa

SEQ ID NO: 835445 - DNA, 75 bp, synthetic construct
  source 1..75: mol_type = other DNA
ctgacgacaccgtagaaagagagttgttacgactaggctttgcacctgtagctaaagaaccgcatcgttactgga

SEQ ID NO: 835446 - DNA, 75 bp, synthetic construct
  source 1..75: mol_type = other DNA
gaatcagcagtacttggtggattcatttgctgttggggtggtaattatgatcgggcgtccaaacataagagagaa

SEQ ID NO: 835447 - DNA, 75 bp, synthetic construct
  source 1..75: mol_type = other DNA
aactgtataccgacagtgccggttacccggtaaaaattgttcgctgcataaacaacaccgtgttgtacagaagaa

SEQ ID NO: 835448 - DNA, 75 bp, synthetic construct
  source 1..75: mol_type = other DNA
gcgtggaagaatccccacgaacgcgatatgccgtacctggaacaaatggtgcagggggtaaaagcgatggggctg

SEQ ID NO: 835449 - DNA, 75 bp, synthetic construct
  source 1..75: mol_type = other DNA
gatcgcgccggattattactgcaactggcaaacctgccgacgccgccggaaagcgtgccaatcaacatgctcgtg

SEQ ID NO: 835450 - DNA, 75 bp, synthetic construct
  source 1..75: mol_type = other DNA
tgagggaaatatccatgagctggggactaacacttttggacttatcagtacccaaagtgaagaagaaattagaga

SEQ ID NO: 835451 - DNA, 75 bp, synthetic construct
  source 1..75: mol_type = other DNA
gcaaccggtaaagatcctgaaatcaccatcacgacctgggaggaatggaatagcaacagaaaatacatggttttt

SEQ ID NO: 835452 - DNA, 75 bp, synthetic construct
  source 1..75: mol_type = other DNA
atctcactagtaaaaacgctaaacatcagaacatatcgccgttaagccatcaccccccctctcagtgcagtgaaa

SEQ ID NO: 835453 - DNA, 75 bp, synthetic construct
  source 1..75: mol_type = other DNA
ttatcctcggagtttacccgcagtctgctgctgtccacgccgtcagtgacggtgatgaagtgggtgtccacggcg

SEQ ID NO: 835454 - DNA, 75 bp, synthetic construct
  source 1..75: mol_type = other DNA
gtgggtggctcgcgggctatctacatgaatatctgatggcgactgtatggatatgcgtgattaccctggtgcggg

SEQ ID NO: 835455 - DNA, 75 bp, synthetic construct
  source 1..75: mol_type = other DNA
ttttctgcttctgccggagggatatgacccagccttcccagcaatcgtcgattgttataccagtccacccacgtg

SEQ ID NO: 835456 - DNA, 75 bp, synthetic construct
  source 1..75: mol_type = other DNA
ggactatctgctggcgacggtgtatgtgacgctgaccttttttatccgggtgaccattctggtgctctctgtccc

SEQ ID NO: 835457 - DNA, 75 bp, synthetic construct
  source 1..75: mol_type = other DNA
ctgctgatatggccggcggccatgcttctggggggagctatcaccgtgaccatggcgtcattcaaaaaatacctc

SEQ ID NO: 835458 - DNA, 75 bp, synthetic construct
  source 1..75: mol_type = other DNA
tggccgggatggtgctctcctccctgttgctgagcctgctgattgagtacgtgggtattacgtttttctggcccg

SEQ ID NO: 835459 - DNA, 75 bp, synthetic construct
  source 1..75: mol_type = other DNA
gcggcagaaataataccacattattaagtgccataacgctggaagccgcattacaacaacgctgccgggaaaata

SEQ ID NO: 835460 - DNA, 75 bp, synthetic construct
  source 1..75: mol_type = other DNA
tgaagagtacgacaatgcgccaaacagttgtcggttggcactcactcactttgatggtctgttccgtcatggtga

SEQ ID NO: 835461 - DNA, 75 bp, synthetic construct
  source 1..75: mol_type = other DNA
caggcaatagaaaaattaaacatattggctccagttccggctgcgacatgctgtatggcatggccgatggttgtg

SEQ ID NO: 835462 - DNA, 75 bp, synthetic construct
  source 1..75: mol_type = other DNA
cagcgaagacacaggaacaggaaataactgaagcggagggaatgaaaaatatacttattgaacaggccaacgatt

SEQ ID NO: 835463 - DNA, 75 bp, synthetic construct
  source 1..75: mol_type = other DNA
gcggcagaaaaaataccacgttattaagtgctattacgctggaagccgcattacaacaacgctgtcgggaaaata

SEQ ID NO: 835464 - DNA, 75 bp, synthetic construct
  source 1..75: mol_type = other DNA
attacgattggtcaacatcttcatatagagatgagtcattgccagcgttggctgtccccaaccttgcaaatgacc

SEQ ID NO: 835465 - DNA, 75 bp, synthetic construct
  source 1..75: mol_type = other DNA
gccattcatggaagtatactgatagttatgaccgactattgaacattcttcataatagagggtatttttatttta

SEQ ID NO: 835466 - DNA, 75 bp, synthetic construct
  source 1..75: mol_type = other DNA
ctggaacaggacgaaggcgcgctggggcgatcgatggaacgctcgcagcagttcctgctgctttcggcgcttctg

SEQ ID NO: 835467 - DNA, 75 bp, synthetic construct
  source 1..75: mol_type = other DNA
ccggagccgtgcagccggggagtcgggtcacctggcgttataaattcggcggcaacgagaaccagctcgacggct

SEQ ID NO: 835468 - DNA, 75 bp, synthetic construct
  source 1..75: mol_type = other DNA
gaactactttttaattaacatcgccacagaacaggtagcaccgctaaaagcgttcctcgcggaacatcagatagt

SEQ ID NO: 835469 - DNA, 75 bp, synthetic construct
  source 1..75: mol_type = other DNA
tagcgcaacaaacgttggtgtgcagatcctggacataacgggtgctgcgctgacgctggatggtgcgacatttag

SEQ ID NO: 835470 - DNA, 75 bp, synthetic construct
  source 1..75: mol_type = other DNA
actttaaaggggaagttgttaacgccgcttgcgcagttgatgcaggctctgttgatcaaaccgttcagttagggc

SEQ ID NO: 835471 - DNA, 75 bp, synthetic construct
  source 1..75: mol_type = other DNA
actttaaaggggaagttgttaacgccgcttgcgcagttgatgcaggctctgttgatcaaaccgttcagttgggac

SEQ ID NO: 835472 - DNA, 75 bp, synthetic construct
  source 1..75: mol_type = other DNA
aactcctaaaagaacgccgcaccgcccttatctccgccgccgtcaccggcaaaatagatctccgcaactggacca

SEQ ID NO: 835473 - DNA, 75 bp, synthetic construct
  source 1..75: mol_type = other DNA
gcaagatgttatgagagtaagagttaataaaaaaaccttcaatgcacatttcatagcatatctattgaactcaaa

SEQ ID NO: 835474 - DNA, 75 bp, synthetic construct
  source 1..75: mol_type = other DNA
ttataaccagcaattcaatagaaccagaaggaaactatcctgtatatggtggaaatggattaagaggatattatt

SEQ ID NO: 835475 - DNA, 75 bp, synthetic construct
  source 1..75: mol_type = other DNA
agcggtgcgctgcttctttccctgtgcggaggctggttgggcgcgcgactggttaaggggaaggcgctgtttcgg

SEQ ID NO: 835476 - DNA, 75 bp, synthetic construct
  source 1..75: mol_type = other DNA
gtctggccgcttaagttttatctgccgattgtcaccgtggtggttgtgctgctgctcgccggactgatgggcggc

SEQ ID NO: 835477 - DNA, 75 bp, synthetic construct
  source 1..75: mol_type = other DNA
aaactcttaagttatatgtttttttatatacgagcgttcctttatttgaacttcaaaaaatatgactatatatat

SEQ ID NO: 835478 - DNA, 75 bp, synthetic construct
  source 1..75: mol_type = other DNA
gtgtgggcgctaactgcggatgcggattttctggcgcagcggggagaaggtcaggttgaacaggtctttgccaga

SEQ ID NO: 835479 - DNA, 75 bp, synthetic construct
  source 1..75: mol_type = other DNA
acaccgatgaatttattgatacattaaccagaaggcctattcagaagttgattggtgggacatattataacgttg

SEQ ID NO: 835480 - DNA, 75 bp, synthetic construct
  source 1..75: mol_type = other DNA
agccaccgcaaaagcggtgaaaattgcgatggataatgccaatgcccgtctggcaaaagaccggaacggagcaga

SEQ ID NO: 835481 - DNA, 75 bp, synthetic construct
  source 1..75: mol_type = other DNA
cggtattcttgatgtttatgctaatagtcagcgtgtattccgctttcagaatggagtggctattgcttttaaaaa

SEQ ID NO: 835482 - DNA, 75 bp, synthetic construct
  source 1..75: mol_type = other DNA
cggaggatgtggaacaactggctgatgcgttacgggagcgcggggtgagtcggttaatatttccggcgctatatt

SEQ ID NO: 835483 - DNA, 75 bp, synthetic construct
  source 1..75: mol_type = other DNA
atcttacctcagacaaatcggcgtgcacgatgttcgacttggttcacagcaatattatggagtgaacaactggca

SEQ ID NO: 835484 - DNA, 75 bp, synthetic construct
  source 1..75: mol_type = other DNA
atgacgttgccagtttggcaaccctgacagaagtcgggcgggatattcttgcgaaatcgaccgttgccgctgtta

SEQ ID NO: 835485 - DNA, 75 bp, synthetic construct
  source 1..75: mol_type = other DNA
cagccaccgcaaaagcggtgaaaattgcgatggataatgccaatgcccgtctggcaaaagagcggaacggagcag

SEQ ID NO: 835486 - DNA, 75 bp, synthetic construct
  source 1..75: mol_type = other DNA
cggcgcgcaaagcgaaagcggcgggatcgacgcgtttttgcatgggcgcggcgtggaagaatccccacgaacgcg

SEQ ID NO: 835487 - DNA, 75 bp, synthetic construct
  source 1..75: mol_type = other DNA
ataacgatgatgtcgatgcctttgattttattcgcaccattgcggtcgcgcggatcatgatgccgacctcttacg

SEQ ID NO: 835488 - DNA, 75 bp, synthetic construct
  source 1..75: mol_type = other DNA
ggttttcagaaggtgacgggaataatgttatcacatggcccggcatggactggtttaatattgtgcaggcggagt

SEQ ID NO: 835489 - DNA, 75 bp, synthetic construct
  source 1..75: mol_type = other DNA
ccttaacccgccgttcagtggacgaaccgctggacgtgggcgtgaaagcgattaacggcctgctgaccatcggca

SEQ ID NO: 835490 - DNA, 75 bp, synthetic construct
  source 1..75: mol_type = other DNA
tcccggccatcgagcgatttttgcgccaggagatgcgcgaacccgcctccctcgaactggtgcaaagccgcctgc

SEQ ID NO: 835491 - DNA, 75 bp, synthetic construct
  source 1..75: mol_type = other DNA
cggtgctgtttattgaagggataacggtaagcggcggcgaagccacgacccaactgccgtttgtggtggcgctgt

SEQ ID NO: 835492 - DNA, 75 bp, synthetic construct
  source 1..75: mol_type = other DNA
tgctttcaattgatgcaaataatgtgcggcagcgtgtgtttcagacgggctgcagcacttttgaagcaattacat

SEQ ID NO: 835493 - DNA, 75 bp, synthetic construct
  source 1..75: mol_type = other DNA
tgaaggtgattatatggaaggcgcagaaggcaatgtgtttgtgttacgcaagacttatcagaacgagcaggcagc

SEQ ID NO: 835494 - DNA, 75 bp, synthetic construct
  source 1..75: mol_type = other DNA
gcaacaccgatgaatttattgatacattaaccagaaggcctattcagaagttgattggtgggacatattataacg

SEQ ID NO: 835495 - DNA, 75 bp, synthetic construct
  source 1..75: mol_type = other DNA
taaggttcagtttgacgatcaaggtattacggttggtcaacatcttcatatagagatgagtcgttgtcggcgttg

SEQ ID NO: 835496 - DNA, 75 bp, synthetic construct
  source 1..75: mol_type = other DNA
gtggcggcgccgggggcatttggttttccggcactttcccaccaggaggtggggggctgggggggggggtttctg

SEQ ID NO: 835497 - DNA, 75 bp, synthetic construct
  source 1..75: mol_type = other DNA
aacaaataaaacattttctggcgacggcatttattcgccagcaaccggagcgttttttctctgcccccggaagtt

SEQ ID NO: 835498 - DNA, 75 bp, synthetic construct
  source 1..75: mol_type = other DNA
ctttaatctatggggtgcctctactcgtcctgttgtagctgaattaggtgatgattcaggatggcatttttatag

SEQ ID NO: 835499 - DNA, 75 bp, synthetic construct
  source 1..75: mol_type = other DNA
tggtgctgtttatcgaagggataacggtgagcggcggcgaagccacgacccagctcccgtttgtggtggcactgt

SEQ ID NO: 835500 - DNA, 75 bp, synthetic construct
  source 1..75: mol_type = other DNA
gtaagattatccccttctcctgcgttgacgggccaggcagtcgtctggctctgtttttacagggctgcaatctgc

SEQ ID NO: 835501 - DNA, 75 bp, synthetic construct
  source 1..75: mol_type = other DNA
atggtgtccttttattctatttaaatggacaactgatatttgggcttcaacccacatccgctgatttttataagc

SEQ ID NO: 835502 - DNA, 75 bp, synthetic construct
  source 1..75: mol_type = other DNA
gcgcaaagctgggcgagcgccacgccggaagacgttgagccgttggctgatgcattaaaggtgcgcggggtgagc

SEQ ID NO: 835503 - DNA, 75 bp, synthetic construct
  source 1..75: mol_type = other DNA
tgtcacaatccgtggacgatggggcgctgtaatcattgcggagagtgcgtgccacagtgtccgcatcaggcgttg

SEQ ID NO: 835504 - DNA, 75 bp, synthetic construct
  source 1..75: mol_type = other DNA
aaagctcgccgaaggtattcgcctgtttgccgtggaccagaacagtcttgaggcactgctgagtcaatatctgta

SEQ ID NO: 835505 - DNA, 75 bp, synthetic construct
  source 1..75: mol_type = other DNA
ttaggttcttattcagatgtttcgaagtataaatgtcctatttactctgggatcacgctgtttgaaatcatggtt

SEQ ID NO: 835506 - DNA, 75 bp, synthetic construct
  source 1..75: mol_type = other DNA
tatttacatttcatttcgcttaaaaaaccctaaactctcaattggaagaacagggatatttctagagttagtgga

SEQ ID NO: 835507 - DNA, 75 bp, synthetic construct
  source 1..75: mol_type = other DNA
aaatattcaatacacttgatgattatcgattaagaagtgatgctccggaattccgagaagctatagagtctgcga

SEQ ID NO: 835508 - DNA, 75 bp, synthetic construct
  source 1..75: mol_type = other DNA
cgcggcagccggttctgcgacttcagcagctggatcagcaactgctgcggctaacagccagaaagctgcgaagac

SEQ ID NO: 835509 - DNA, 75 bp, synthetic construct
  source 1..75: mol_type = other DNA
cctcaaagactgcatcggcaaactccgcgacagcagccaaaaaatcagaaaccaacgcgaaaaacagcgagacag

SEQ ID NO: 835510 - DNA, 75 bp, synthetic construct
  source 1..75: mol_type = other DNA
ttaccaatcactttgcacttgcgcccccatccctctgccttgagttaatcaagatcgagccaatagttcgttctg

SEQ ID NO: 835511 - DNA, 75 bp, synthetic construct
  source 1..75: mol_type = other DNA
atgtcttacaaccgctgcctgatgtgtggataccgtttaacgattcactggatatgattacgggcttttcgccat

SEQ ID NO: 835512 - DNA, 75 bp, synthetic construct
  source 1..75: mol_type = other DNA
acagaaggttgcaagttgttgtcaatggtgttttcggggcattgacaacttcagcatatcaaaatcagaagtaca

SEQ ID NO: 835513 - DNA, 75 bp, synthetic construct
  source 1..75: mol_type = other DNA
acgcatggattccgtggtaataatttctctgatgccggttctccttttatttctatgggagggtgtaataaatat

SEQ ID NO: 835514 - DNA, 75 bp, synthetic construct
  source 1..75: mol_type = other DNA
ccgtgatatcggtgactatctctactggaggttagatgaagatgaaaaaattattgctgcacttaataagtcttt

SEQ ID NO: 835515 - DNA, 75 bp, synthetic construct
  source 1..75: mol_type = other DNA
tacattttttcttttccaatgctaagtttgcagctgatttagcaatataccgtgatatcggtgactatctctact

SEQ ID NO: 835516 - DNA, 75 bp, synthetic construct
  source 1..75: mol_type = other DNA
ggtataaaacgccaaatgcagcgccacgtgtttttgataccggcggtcatcaaaccggagcggctattattcttg

SEQ ID NO: 835517 - DNA, 75 bp, synthetic construct
  source 1..75: mol_type = other DNA
gttccgcgacctatatcaataagtccggcgctcttaccattgcagaaattaatgagccacgttttgaaaaagaag

SEQ ID NO: 835518 - DNA, 75 bp, synthetic construct
  source 1..75: mol_type = other DNA
cccgactgccgcgcacccttgccggattgctggcaggcggtgcgcttggtcttgccggggcgttaatgcaaaccc

SEQ ID NO: 835519 - DNA, 75 bp, synthetic construct
  source 1..75: mol_type = other DNA
gccgactgcaccattgtgctcgatgccagactgccgcgcacccttgcaggtttactggcgggcggcgcgcttggc

SEQ ID NO: 835520 - DNA, 75 bp, synthetic construct
  source 1..75: mol_type = other DNA
gccgatcatcgctggtcgctgcccgtcacgctacttgccacccctgccctgctgctgtttgccgatatcatcggg

SEQ ID NO: 835521 - DNA, 75 bp, synthetic construct
  source 1..75: mol_type = other DNA
cccttcatgtctgcttttcatcgcatgatgagtgaagcagaaccacgaggtactcgctggtatcacccgaaaatg

SEQ ID NO: 835522 - DNA, 75 bp, synthetic construct
  source 1..75: mol_type = other DNA
atcattgttgtcgcacagctttgccctgaattcaccgcccgtctggtagaccgctggcgcgaactggaagaacag

SEQ ID NO: 835523 - DNA, 75 bp, synthetic construct
  source 1..75: mol_type = other DNA
gatgaagcgggccatgttaagggcggttttttcctgtttagtcacagttctgtttctccatgtgtggggagtctg

SEQ ID NO: 835524 - DNA, 75 bp, synthetic construct
  source 1..75: mol_type = other DNA
cagcaaaaaccagtgaaaccaacgcaaaggtgagcgaaacagcggctgcgaactcagcgaaagcatcggcagcaa

SEQ ID NO: 835525 - DNA, 75 bp, synthetic construct
  source 1..75: mol_type = other DNA
aatttcacaagtggagtcggtctcaggctggatgcatttggacgtggcgtgattttttttttcgataatgtgcaa

SEQ ID NO: 835526 - DNA, 75 bp, synthetic construct
  source 1..75: mol_type = other DNA
cggcgctcttaccattgcagaaattaatgagccacgttttgaaaaagaagggctgttaattgaagggcagagaac

SEQ ID NO: 835527 - DNA, 75 bp, synthetic construct
  source 1..75: mol_type = other DNA
gcgccattgccgtgcccggattgctgttattactgattatcgcgacggcattaagcctgctcattggggcaaaat

SEQ ID NO: 835528 - DNA, 75 bp, synthetic construct
  source 1..75: mol_type = other DNA
aaaaggccaaattgttggcttatgtattaaaaaccgagtggaacgcaaagcaaaaacacatcgctttagtactac

SEQ ID NO: 835529 - DNA, 75 bp, synthetic construct
  source 1..75: mol_type = other DNA
gaggcaactatagaagctgttgaaggtgaaaccttaattggcgcaatgattcagtatgcgccgaaaaaaggtggt

SEQ ID NO: 835530 - DNA, 75 bp, synthetic construct
  source 1..75: mol_type = other DNA
ggatgcagccagagagtatgcaagccaggcagcagagccgtataaatatgtcttacagccactgcctgatgtgtg

SEQ ID NO: 835531 - DNA, 75 bp, synthetic construct
  source 1..75: mol_type = other DNA
gtttctggcagtaaaggatttgatgtcacaggtgatgaaaaatatgtgaccatttcatgccgtgtcagaagtgat

SEQ ID NO: 835532 - DNA, 75 bp, synthetic construct
  source 1..75: mol_type = other DNA
tggtggaagaagcggcacgcaacgctgaagccgcctctcagagcgcagcggcggcaaagaaatccgaaactgcag

SEQ ID NO: 835533 - DNA, 75 bp, synthetic construct
  source 1..75: mol_type = other DNA
atgcaaacttataaagcgtcgacaagtacttacgtttctagtgtgtttgctggtcgaactgatgttcgaaaattc

SEQ ID NO: 835534 - DNA, 75 bp, synthetic construct
  source 1..75: mol_type = other DNA
tgaaataacgatgcctggcgataaggttgtaaagtttaaacgcgcatcaaaagcaacttacattaataaatctgg

SEQ ID NO: 835535 - DNA, 75 bp, synthetic construct
  source 1..75: mol_type = other DNA
gttaagtttaaacgtgcatcgaaagcaacctatattaacaaatctggtgtgctgacagaggctgccattgacgag

SEQ ID NO: 835536 - DNA, 75 bp, synthetic construct
  source 1..75: mol_type = other DNA
tatggcagtagtttcaacctcgggggctgtcgatgtatcaggcgataataagtgtgtgacgacatcgtgcagatt

SEQ ID NO: 835537 - DNA, 75 bp, synthetic construct
  source 1..75: mol_type = other DNA
tgccggagcgtcatcacagagtgcagcggcggcaaagaaatccgaaacggcagcgacatcatcgaagaacgcggc

SEQ ID NO: 835538 - DNA, 75 bp, synthetic construct
  source 1..75: mol_type = other DNA
aactgaaaataatatctataatagaccgcttacgtgcctggtcgaggttaatagaaattggggcgatattcctcc

SEQ ID NO: 835539 - DNA, 75 bp, synthetic construct
  source 1..75: mol_type = other DNA
gcatcagccaacagtcaaaaagcagcaaaaaccagtgaaaccaatgcaaagacaagcgagactgcagcggcgaac

SEQ ID NO: 835540 - DNA, 75 bp, synthetic construct
  source 1..75: mol_type = other DNA
atctcaatgttcgcgcacgtatccgttttgaacgatataactcggaaggatacaccttcctttgcgacgcctatt

SEQ ID NO: 835541 - DNA, 75 bp, synthetic construct
  source 1..75: mol_type = other DNA
ggttcaatatgctccagtaaaaggttcaggcacagcatctggagactatctggatatcgcaactccacaagtgga

SEQ ID NO: 835542 - DNA, 75 bp, synthetic construct
  source 1..75: mol_type = other DNA
ggaactccatatgttcaatttggtaatcaaatatcatttccacctggaaattacccaagaaagattatcgctgta

SEQ ID NO: 835543 - DNA, 75 bp, synthetic construct
  source 1..75: mol_type = other DNA
gcaaccgtatctggtgactatatttatctggccaccccacaagtagaagatgggccttgtgtatcatcttttatt

SEQ ID NO: 835544 - DNA, 75 bp, synthetic construct
  source 1..75: mol_type = other DNA
cttctcggctggcatcacgggacactggtggcgtatgcgaggatactgaaaagtgatgatgatctcgaaccggtg

SEQ ID NO: 835545 - DNA, 75 bp, synthetic construct
  source 1..75: mol_type = other DNA
tggttttgtctgtaatagctcgactgaatttcgttgctgttgtaatggttacctgtcacctgttcagacttcgtc

SEQ ID NO: 835546 - DNA, 75 bp, synthetic construct
  source 1..75: mol_type = other DNA
cattacagacccatgaactacaaattacgggtggtaatgcccagctattaacagcaaactttgaaatcgatccag

SEQ ID NO: 835547 - DNA, 75 bp, synthetic construct
  source 1..75: mol_type = other DNA
taatctttataatcttccttttacggttctttgtgaggtacataagaactggtataaaacgccaaatgcagcgcc

SEQ ID NO: 835548 - DNA, 75 bp, synthetic construct
  source 1..75: mol_type = other DNA
taacgattcgctggatatgattacgggcttttcgccgtcatataaaaagattgttattggtgatgatgaaataac

SEQ ID NO: 835549 - DNA, 75 bp, synthetic construct
  source 1..75: mol_type = other DNA
attctgatttatctgtttctcagctttatgccttattacaactacgctgcgcggtatttgtggtggagcaaaact

SEQ ID NO: 835550 - DNA, 75 bp, synthetic construct
  source 1..75: mol_type = other DNA
tgtgaccatttcatgccgtgtcagaagtgatgttgaaaatataaggtgtcgtttaagatttgaacatcatgatgg

SEQ ID NO: 835551 - DNA, 75 bp, synthetic construct
  source 1..75: mol_type = other DNA
aaaaatggttatggggatgcgtgtaaagtcagatcagtctacatgcgcagtaagtaacgggcgtatatccagcga

SEQ ID NO: 835552 - DNA, 75 bp, synthetic construct
  source 1..75: mol_type = other DNA
aaaagcgcaacaagtttatcagtaacacctgcggcaagtcctgctattccggctggaactaaatttagtatcctg

SEQ ID NO: 835553 - DNA, 75 bp, synthetic construct
  source 1..75: mol_type = other DNA
actaactattttgttaaatccaatactcccgctgaatggacgagtaccagcaatatcgataaaactaataatggt

SEQ ID NO: 835554 - DNA, 75 bp, synthetic construct
  source 1..75: mol_type = other DNA
aatgcaaagacaagcgagactgcagcggcgaactcggcgaaagcatcggcagcaagccagacagcagctaaagca

SEQ ID NO: 835555 - DNA, 75 bp, synthetic construct
  source 1..75: mol_type = other DNA
ttccttttacggttctttgtgaggtacataagaactggtataaaacgccaaatgcagcaccgcgtgttttttaca

SEQ ID NO: 835556 - DNA, 75 bp, synthetic construct
  source 1..75: mol_type = other DNA
tcggcattatctggtcgctgatttggtttaaggtttatcagccgccgcgcctgactaaaggcatcagcaaagctg

SEQ ID NO: 835557 - DNA, 75 bp, synthetic construct
  source 1..75: mol_type = other DNA
tgcgtcagggatggaagcccgccagggcggagacagcttcgctggctccgttcacgacagcccgccccgccaggg

SEQ ID NO: 835558 - DNA, 75 bp, synthetic construct
  source 1..75: mol_type = other DNA
tttaatagtgcttataatcgccaacttttgggaaccaaatctgtaggtgatattccactaaccgtgaactatctc

SEQ ID NO: 835559 - DNA, 75 bp, synthetic construct
  source 1..75: mol_type = other DNA
taaagtacgcgcaggaattcgctcagtcatgattgatggttctcatctgccgtttgaagaaaatatcgcgcgagt

SEQ ID NO: 835560 - DNA, 75 bp, synthetic construct
  source 1..75: mol_type = other DNA
ccggtatcgtcatcagcgatgacgagccggatgatgatgcgctgatggccgcagctgaggggataacaggaggta

SEQ ID NO: 835561 - DNA, 75 bp, synthetic construct
  source 1..75: mol_type = other DNA
gtgcgaatctttccgtggaagtaggttcctacgaaatcgatagtgtaactggcaaagtaaaaatcccaaccgatt

SEQ ID NO: 835562 - DNA, 75 bp, synthetic construct
  source 1..75: mol_type = other DNA
tatcaaaaggattggttatggcggaaaacttactggacacggatttaggcatatgatgtctacattgttgcatga

SEQ ID NO: 835563 - DNA, 75 bp, synthetic construct
  source 1..75: mol_type = other DNA
ttgtatcttgaggttgttccctctggttccagatactggcggatgaaatatcgcttcaatggaaaagagaagcgt

SEQ ID NO: 835564 - DNA, 75 bp, synthetic construct
  source 1..75: mol_type = other DNA
agggagatgatgcagtggtacgcagatttcatcggtcaagtaggcaaattccagctcacccctagcttatgcagc

SEQ ID NO: 835565 - DNA, 75 bp, synthetic construct
  source 1..75: mol_type = other DNA
cgtgagatgctgcaatggtatgctgactacatggcaagccttgagaaaggcggcaatgtggtgcagggaacgttt

SEQ ID NO: 835566 - DNA, 75 bp, synthetic construct
  source 1..75: mol_type = other DNA
ccaaagaattacctgattttttcaaggcattgtccagttactcaggaagtgcattggttgttatggcggctcgtc

SEQ ID NO: 835567 - DNA, 75 bp, synthetic construct
  source 1..75: mol_type = other DNA
tactaaatgaactcaagatcatgacagggaactatcgttatgtttttccggggcggaatgatccgaacaaaccta

SEQ ID NO: 835568 - DNA, 75 bp, synthetic construct
  source 1..75: mol_type = other DNA
tccatgtgtgctgttgcagcaattcaggcagagatcgagcgatatcgggagaaaaacggcctcccgatgccataa

SEQ ID NO: 835569 - DNA, 75 bp, synthetic construct
  source 1..75: mol_type = other DNA
atattcttcggggatttatttgtttatatcaaagatattttttaaaaaaataaatatagtgcattctcattctga

SEQ ID NO: 835570 - DNA, 75 bp, synthetic construct
  source 1..75: mol_type = other DNA
agaacaaggcttcagaaaagaatgaagtttatacgctcctggataaaggtggcttttttttctcttttgaaatga

SEQ ID NO: 835571 - DNA, 75 bp, synthetic construct
  source 1..75: mol_type = other DNA
acgtgatgaagccaagaaaaagctggccgagggtatcgatccatcctttgccaagaaagaagaaaagctggttcg

SEQ ID NO: 835572 - DNA, 75 bp, synthetic construct
  source 1..75: mol_type = other DNA
ttttaagcggattggatatacggggagggtaacggggcatggtttccgtcacacgatgagtacgattttgcatga

SEQ ID NO: 835573 - DNA, 75 bp, synthetic construct
  source 1..75: mol_type = other DNA
tttatctgaagtagcccgtcgctttggttttaagtccactcaatccgtcgccaattgggtaattaacaatcaagt

SEQ ID NO: 835574 - DNA, 75 bp, synthetic construct
  source 1..75: mol_type = other DNA
tgcggatcagtacagaggatgaagccatgctgatgatggtgtctgagggaattgcaggaggtgtacgctatggcg

SEQ ID NO: 835575 - DNA, 75 bp, synthetic construct
  source 1..75: mol_type = other DNA
tataaagcgacgctgcccgcgattggtcgtctgatgaaagtgtgtcgtgcgcgtgtcgtaccgttgtttccgatt

SEQ ID NO: 835576 - DNA, 75 bp, synthetic construct
  source 1..75: mol_type = other DNA
agatggtgaccgtacagcttgagcaaaaagatggtgatatttccattcttgagttgaacgtgaccctgccggaag

SEQ ID NO: 835577 - DNA, 75 bp, synthetic construct
  source 1..75: mol_type = other DNA
atgtccgcagaaaaattcagagttgtcatatacaccaatacatgtgaaaagaaagtcatctgtatcccggcaaca

SEQ ID NO: 835578 - DNA, 75 bp, synthetic construct
  source 1..75: mol_type = other DNA
tcgctttctcagtcgaggatcccggagattttcaatggcattgagcgcttgcgccaacaactcgccagccgcccg

SEQ ID NO: 835579 - DNA, 75 bp, synthetic construct
  source 1..75: mol_type = other DNA
tccaaacgaacagaacatgatactgcaggtatcaataattggcaggactggttgaaggaagtgttaaataaccct

SEQ ID NO: 835580 - DNA, 75 bp, synthetic construct
  source 1..75: mol_type = other DNA
gcttatcttggacaagaagatcgcttggcctcgcgcgcagatcagttggaagaatttgttcactacgtgaaaggc

SEQ ID NO: 835581 - DNA, 75 bp, synthetic construct
  source 1..75: mol_type = other DNA
ggcgaaacgtgagctgcagtttggcgaatggcagcgtaacgatattctggccggcatttttgaaccggcgaccat

SEQ ID NO: 835582 - DNA, 75 bp, synthetic construct
  source 1..75: mol_type = other DNA
atatttgcagtgcaagagacgtaatgtcacgaacggtgcaatagtgatccacacccaacgcctgaaatcagatcc

SEQ ID NO: 835583 - DNA, 75 bp, synthetic construct
  source 1..75: mol_type = other DNA
aagaggaagatatatataaaaccccacacatagcacacgcgcgcgagagtgatccgaccagtgaagcgaacggta

SEQ ID NO: 835584 - DNA, 75 bp, synthetic construct
  source 1..75: mol_type = other DNA
atttgctggttactgtgactgcacagctcgatgagactgtgcggcaggctctgttcgtagatttcctggaagttt

SEQ ID NO: 835585 - DNA, 75 bp, synthetic construct
  source 1..75: mol_type = other DNA
tcaccattgttgtgcacgacgacatcattccgtggcgttatccagctaagcgcgaactgcaatttggagaatggc

SEQ ID NO: 835586 - DNA, 75 bp, synthetic construct
  source 1..75: mol_type = other DNA
gcatgatgaagcagatggatacccgcggcaaagtcatcaactgcgccttcgccgtttccgctgctttcgccctgg

SEQ ID NO: 835587 - DNA, 75 bp, synthetic construct
  source 1..75: mol_type = other DNA
gcccggactggcgtgccatgcttgctggcatgtcctcaacggaatacggcgactggaaaatcttctaccaggaca

SEQ ID NO: 835588 - DNA, 75 bp, synthetic construct
  source 1..75: mol_type = other DNA
ctgatgaacatgatcccggtacttatcgttgcggtgctggtggcgctggggctgaaattcatcccggaaaaaatg

SEQ ID NO: 835589 - DNA, 75 bp, synthetic construct
  source 1..75: mol_type = other DNA
ccggtgattatcccggtttacgaaatgctcggcgcaaacccgtcaatgttcgccggaacactgctggcgtgcgat

SEQ ID NO: 835590 - DNA, 75 bp, synthetic construct
  source 1..75: mol_type = other DNA
ttttgcgatccggatatgcatccggcggatttcagcctgttcgctccggaggcagaggaagggcaggcggagacg

SEQ ID NO: 835591 - DNA, 75 bp, synthetic construct
  source 1..75: mol_type = other DNA
tgtccgctttggggctgacgggaaggaaatcgttacggtcagtgatgacatgcggagcagtacagaggatgaagc

SEQ ID NO: 835592 - DNA, 75 bp, synthetic construct
  source 1..75: mol_type = other DNA
gactggcgcgccatgcttgccgggatgacatccaccgaatatgccgactggcaccgtttttaccgcacgcattat

SEQ ID NO: 835593 - DNA, 75 bp, synthetic construct
  source 1..75: mol_type = other DNA
cgatgattgtcggcaaattgatcggcggcgtaacggcaattggcgtggcgatgatgctggtgccaaaagaagacg

SEQ ID NO: 835594 - DNA, 75 bp, synthetic construct
  source 1..75: mol_type = other DNA
aaaccgctgatgagcgtcggtaaagtactgaatatgaacaacatcgcggcagccggcatggtggcaacgcttgcc

SEQ ID NO: 835595 - DNA, 75 bp, synthetic construct
  source 1..75: mol_type = other DNA
ggtagtcaaattcctgctcggctgggaactgatccccggtctggatccgatcttcatggcccctggcgacaaacc

SEQ ID NO: 835596 - DNA, 75 bp, synthetic construct
  source 1..75: mol_type = other DNA
tggcgggcattgtgaccattccaattggctgtatcgctggaggtctggtagctatgtattccggtgtgcagatca

SEQ ID NO: 835597 - DNA, 75 bp, synthetic construct
  source 1..75: mol_type = other DNA
ggcaagctgatcggcggcgtcacggcgattggcgtggcgatgatgctggtgccaaaagaagacgcggcaacggct

SEQ ID NO: 835598 - DNA, 75 bp, synthetic construct
  source 1..75: mol_type = other DNA
acatcatgatgttctttatgctgatagcggccgtagacaggatcctgtcgcagttcggcggttctgcacgtttcc

SEQ ID NO: 835599 - DNA, 75 bp, synthetic construct
  source 1..75: mol_type = other DNA
atgtcggatgacaaatttgatgccattgtggtcggtgcgggcgttgctggtagcgttgccgcactggtcatggcg

SEQ ID NO: 835600 - DNA, 75 bp, synthetic construct
  source 1..75: mol_type = other DNA
agccgagcaggcgggcgcgcagtttatcccaggcgttcgcgtcgatgcgctggttcgtgaaggaaacaaggtcac

SEQ ID NO: 835601 - DNA, 75 bp, synthetic construct
  source 1..75: mol_type = other DNA
caaaccagccggtacgcaaaatgatcatgggacatgcgaagaaaattgggctgatcaacttgctgaaagatggca

SEQ ID NO: 835602 - DNA, 75 bp, synthetic construct
  source 1..75: mol_type = other DNA
atgtcgttcttcacccagaccacagacggcaaactgaatctgatgcatcacaagaaagcaggaaacacaaagttg

SEQ ID NO: 835603 - DNA, 75 bp, synthetic construct
  source 1..75: mol_type = other DNA
cacccagtacaacaccatttacggggcgtacaaaaacagggagagtgagggcgtttattttgtgcccttcatgac

SEQ ID NO: 835604 - DNA, 75 bp, synthetic construct
  source 1..75: mol_type = other DNA
cgctgacgctgacggatattaccaaaaatgcaacgtatggcgttgagatagaaagtctggtgctggagataaatg

SEQ ID NO: 835605 - DNA, 75 bp, synthetic construct
  source 1..75: mol_type = other DNA
gaatggagtggctggcccggcattccaggttataaaagacagtctgacactgggactgaaccgccccggaaatcc

SEQ ID NO: 835606 - DNA, 75 bp, synthetic construct
  source 1..75: mol_type = other DNA
taacgcgcagtgtcatggtggcagtgctgcagatgtgccgtggatttgtggtgacacgacgtattactggaaaaa

SEQ ID NO: 835607 - DNA, 75 bp, synthetic construct
  source 1..75: mol_type = other DNA
cacaatctccctgttgccgacagccggagaggctgctgcgcagggctggagcattaaggatggcggaattcagtt

SEQ ID NO: 835608 - DNA, 75 bp, synthetic construct
  source 1..75: mol_type = other DNA
ggtgacgcagccggtttctgccttaacctgggctttacggttcgtggaatggatttagccatcgcttcggcacag

SEQ ID NO: 835609 - DNA, 75 bp, synthetic construct
  source 1..75: mol_type = other DNA
tgacgcatccggtggatgacgcaattaccctgctgacacagggcggcagactgacctgtaagttccgcctgtcag

SEQ ID NO: 835610 - DNA, 75 bp, synthetic construct
  source 1..75: mol_type = other DNA
aaacattatgatgttgtcagggcggcgtcgccgtcagaccttgcggaaaagctgacacacaaactgaaagagggc

SEQ ID NO: 835611 - DNA, 75 bp, synthetic construct
  source 1..75: mol_type = other DNA
cgcaattaccctgctgacacagggcggcagactgacctgtaagttccgcctgtcaggcgcactgaccaacaatca

SEQ ID NO: 835612 - DNA, 75 bp, synthetic construct
  source 1..75: mol_type = other DNA
catgaccggcgacaaccagaagctgtaccgctggcgctgccgtgccgcgacctacgcgaactggccgaccctgcg

SEQ ID NO: 835613 - DNA, 75 bp, synthetic construct
  source 1..75: mol_type = other DNA
cggcgccgaccaccgatgctgaaacctacgagttcatcaatgaactgggtgacaagaaaaacaacgtcgtgccga

SEQ ID NO: 835614 - DNA, 75 bp, synthetic construct
  source 1..75: mol_type = other DNA
gacagcatggattatcgtcagcgtccggcgccgaccaccgatgctgaaacctacgagttcatcaatgaactgggt

SEQ ID NO: 835615 - DNA, 75 bp, synthetic construct
  source 1..75: mol_type = other DNA
acagggcggcagactgacctgtaagttccgcctgtcaggcgcactgaccaacaatcagttcgggctggggattta

SEQ ID NO: 835616 - DNA, 75 bp, synthetic construct
  source 1..75: mol_type = other DNA
cccgcgatttcagtaacgttggcccgatggttcgcgccagcggccacgctcgtgatacccgtgccgatcacccgt

SEQ ID NO: 835617 - DNA, 75 bp, synthetic construct
  source 1..75: mol_type = other DNA
cagatgcgtcgtgaagtgcaggagctggtggatgtgctgctgagcacaccgaacatggaacagcgcactgtcggc

SEQ ID NO: 835618 - DNA, 75 bp, synthetic construct
  source 1..75: mol_type = other DNA
atttcagttcatgggcgcgcagggagcattattccggatcgtctggcaaccgctattctgaacgcagccgggcgc

SEQ ID NO: 835619 - DNA, 75 bp, synthetic construct
  source 1..75: mol_type = other DNA
ctgagccggattggtactacgtcatcgtactggccgggcagtccaatgcaatggcttacggtgaagggcttccgc

SEQ ID NO: 835620 - DNA, 75 bp, synthetic construct
  source 1..75: mol_type = other DNA
agagacccggagtattactttattgtggttctggcggggcagtcaaacagcatggcatatggtgaaggccttccg

SEQ ID NO: 835621 - DNA, 75 bp, synthetic construct
  source 1..75: mol_type = other DNA
tactgtttggtaacgatgaacgcaaactgaatggtcattatgccgtttactacgtgctgtcgatggagaagggca

SEQ ID NO: 835622 - DNA, 75 bp, synthetic construct
  source 1..75: mol_type = other DNA
gtgccgtgggtttgtggtgacacgacgtattactggaaaaatacatacgctacccaatacgacaccgtgtacggc

SEQ ID NO: 835623 - DNA, 75 bp, synthetic construct
  source 1..75: mol_type = other DNA
acgcacagcaacctgcgctgtttacagccatgctgacacagtttcgtgctgacctctccgtgtttaacgcgcagt

SEQ ID NO: 835624 - DNA, 75 bp, synthetic construct
  source 1..75: mol_type = other DNA
gtcaataccgccactaacgcgccggcagaagatccggatattccggcatcaggatattacggtgcggcatcgaga

SEQ ID NO: 835625 - DNA, 75 bp, synthetic construct
  source 1..75: mol_type = other DNA
cctgatggtgtggcgatgacgggtaccggaaacaacgcgcggcgctctttactcgttcgtttacaacgtgggcgc

SEQ ID NO: 835626 - DNA, 75 bp, synthetic construct
  source 1..75: mol_type = other DNA
ttacatattgccaaaaaactgcttccgtatatccctaataatgcggggatcctgctggtaccatgctgtcgtggt

SEQ ID NO: 835627 - DNA, 75 bp, synthetic construct
  source 1..75: mol_type = other DNA
attagtggtaaggcaccggaaatcaaaccctcgcccggcggcgacacgccatcggggccgtctgaagatgcatcc

SEQ ID NO: 835628 - DNA, 75 bp, synthetic construct
  source 1..75: mol_type = other DNA
ctggggatttatctgtatacggatgctcccgttcctgatggtgtggcgatgacgggtaccggtaatccgttcctg

SEQ ID NO: 835629 - DNA, 75 bp, synthetic construct
  source 1..75: mol_type = other DNA
attaccaaaaatgcagcgtatggcgttgagatagaaagtctggtgctggagataaatgcaccggcatcatcataa

SEQ ID NO: 835630 - DNA, 75 bp, synthetic construct
  source 1..75: mol_type = other DNA
atccccgggctgacctgagcaaagggcagtacggctgtgtcggacagggcttacatattgccaaaaaactgcttc

SEQ ID NO: 835631 - DNA, 75 bp, synthetic construct
  source 1..75: mol_type = other DNA
tggggctggtgactgaacgtgaagcgaaagcggcggcagatattgccagccgggtgagcggcgtgaagcgggtaa

SEQ ID NO: 835632 - DNA, 75 bp, synthetic construct
  source 1..75: mol_type = other DNA
aaccatatcgccctgagcgagcaggagttttttacccgcgcggggcagaaccttctggccttaagctggcacgcc

SEQ ID NO: 835633 - DNA, 75 bp, synthetic construct
  source 1..75: mol_type = other DNA
tgctggatgcagggtgagtttgacatgagcgccgccacccacgcacagcaacctgcgctgtttacagccatgctg

SEQ ID NO: 835634 - DNA, 75 bp, synthetic construct
  source 1..75: mol_type = other DNA
ggggacattcagtgcggacacgggggccagccaggattcggcgcgctggggtgtgggtaaaccgttatatcagga

SEQ ID NO: 835635 - DNA, 75 bp, synthetic construct
  source 1..75: mol_type = other DNA
gaaagcggcggctgatattgccagtcgggtgagcggcgtgaagcgggtaaccacggcgtttacgtttattaaata

SEQ ID NO: 835636 - DNA, 75 bp, synthetic construct
  source 1..75: mol_type = other DNA
cgcaactgctggccagcgacctggtgaaatcgtctaacgtgaaagtcaccaccgaaaacggcgaagtgttcctga

SEQ ID NO: 835637 - DNA, 75 bp, synthetic construct
  source 1..75: mol_type = other DNA
atcgtgtcggcaaagttgttccgccgaaacgtcatattttgaaaaacatctctctgagtttcttccctggggcaa

SEQ ID NO: 835638 - DNA, 75 bp, synthetic construct
  source 1..75: mol_type = other DNA
actgtctgcatgatgtgcaggatatgagtacgctgaatcatccgaaggcagacctgagcaaagggcagtacggct

SEQ ID NO: 835639 - DNA, 75 bp, synthetic construct
  source 1..75: mol_type = other DNA
ggttcggcatttacccagggcgcggaggggacattcagtgcggacacgggggccagccaggattcggcacgctgg

SEQ ID NO: 835640 - DNA, 75 bp, synthetic construct
  source 1..75: mol_type = other DNA
aaaacgtctgctgaccacctgcaacatcccggttccgtctgatgttcgcgtagcaaccgagttctctgaaaccgc

SEQ ID NO: 835641 - DNA, 75 bp, synthetic construct
  source 1..75: mol_type = other DNA
ggacggcgggctgtgtacgcgccggcatcgagcatggtcttctgtacaatcaggaacagcgtctatggtatatcg

SEQ ID NO: 835642 - DNA, 75 bp, synthetic construct
  source 1..75: mol_type = other DNA
gaaccgctgggtgaacgctgccactgcggcaactttggctgcctggaaactatcgctgccaacgctgccattgaa

SEQ ID NO: 835643 - DNA, 75 bp, synthetic construct
  source 1..75: mol_type = other DNA
ggaatttatctgtataccgatgtagcgttacctgacgtcgtggcgatgaccgggactggtaacccgttcctgatg

SEQ ID NO: 835644 - DNA, 75 bp, synthetic construct
  source 1..75: mol_type = other DNA
cttaagctggcacgccaacggcctgtattatggcatcggcgtcgagattgacctctggctgcacgctggatttga

SEQ ID NO: 835645 - DNA, 75 bp, synthetic construct
  source 1..75: mol_type = other DNA
gatatcgaaaccctgcgtgcgctggaaaacgccctgctggagttcccaggctgcgcgatggttatctcgcacgac

SEQ ID NO: 835646 - DNA, 75 bp, synthetic construct
  source 1..75: mol_type = other DNA
cgttggttcctcgaccgtatcgccacgcacattctggattaccaggatgaaggtaaagttgagttcttcgaaggt

SEQ ID NO: 835647 - DNA, 75 bp, synthetic construct
  source 1..75: mol_type = other DNA
gcgcactgaccaacaatcagttcgggctggggatttatctgtatacggacgctcccgttcctgatggtgtggcga

SEQ ID NO: 835648 - DNA, 75 bp, synthetic construct
  source 1..75: mol_type = other DNA
ttaacgcgcagtgccatggtggcagtgctgcagatgtgccgtggatttgtggtgacacgacgtattactggaaaa

SEQ ID NO: 835649 - DNA, 75 bp, synthetic construct
  source 1..75: mol_type = other DNA
ggggtgtgggtaaaccgttatatcaggacctgattgcgcgcactaaagctgcattacagaagaacccgaaaaatg

SEQ ID NO: 835650 - DNA, 75 bp, synthetic construct
  source 1..75: mol_type = other DNA
atgattaccgggtttgctcctggatataagagaatcacagttggtgacgatgttattgcattgccgtctgaaaag

SEQ ID NO: 835651 - DNA, 75 bp, synthetic construct
  source 1..75: mol_type = other DNA
aacagcagctaaaaaatcagaaaccaacgcgaaaaatagcgagacagccgcaacgacgagcgaaaccaacgcaaa

SEQ ID NO: 835652 - DNA, 75 bp, synthetic construct
  source 1..75: mol_type = other DNA
cggcgtgtatatgagtcatgcggagtaagagatctcgttatgggattcagggttaaggctgacggcatgacatgc

SEQ ID NO: 835653 - DNA, 75 bp, synthetic construct
  source 1..75: mol_type = other DNA
accattaccgtctatgaaggttccagaccaggtacgctgaatgattttctcggtgccatgacggaggatgatgtt

SEQ ID NO: 835654 - DNA, 75 bp, synthetic construct
  source 1..75: mol_type = other DNA
ttttgcagaggcaacgattcaggcaattgatggtgagttaaaaataggctctcagatacagtattctcctgggca

SEQ ID NO: 835655 - DNA, 75 bp, synthetic construct
  source 1..75: mol_type = other DNA
tgtcggtcgtcatctgggcaaaaccatcgccattgctatcaacttatttaatccgcaaaaaattgttattgccgg

SEQ ID NO: 835656 - DNA, 75 bp, synthetic construct
  source 1..75: mol_type = other DNA
ggcaaacctcagccatttctattgtcacagtatctggaagcaaaggatatgatgttaccggcgatgaaaagtatg

SEQ ID NO: 835657 - DNA, 75 bp, synthetic construct
  source 1..75: mol_type = other DNA
cctgttaataaacagcacaaatccatcaaagtggaacaagtcatcaaatatgattttaaatacatcaggtgtaga

SEQ ID NO: 835658 - DNA, 75 bp, synthetic construct
  source 1..75: mol_type = other DNA
caggtacgctgaatgattttctcggcgccatgacggaggatgatgttcgtccggaggcactgcgccgttttgagc

SEQ ID NO: 835659 - DNA, 75 bp, synthetic construct
  source 1..75: mol_type = other DNA
cagcccggattgcagaagatgccgctgatcctgcttctgtccctccgcttcctgatatctggctacccttgaatg

SEQ ID NO: 835660 - DNA, 75 bp, synthetic construct
  source 1..75: mol_type = other DNA
cggtgaaattggtcatattcaggtcgaaccgttgggtgaacgctgccactgcggcaacttcggttgtctggaaac

SEQ ID NO: 835661 - DNA, 75 bp, synthetic construct
  source 1..75: mol_type = other DNA
agacggcagcgaagaccagcgaaacgaatgccaaagccagtgaaactgcggcgaaaagcagtcaggatgcagcgg

SEQ ID NO: 835662 - DNA, 75 bp, synthetic construct
  source 1..75: mol_type = other DNA
aaattgcagccgacagagctgtgggagcttttgcaacaggtgactggatagaagtaaccaccccgcaattcgagt

SEQ ID NO: 835663 - DNA, 75 bp, synthetic construct
  source 1..75: mol_type = other DNA
tgtgctgacagaggctgccattgacgagccacgatttgaacgtgatggcctgcttattgagggtcagagaacgaa

SEQ ID NO: 835664 - DNA, 75 bp, synthetic construct
  source 1..75: mol_type = other DNA
gggaccattaccgtctatgaaggttccagaccaggtacgctgaatgattttctcggtgccatgacggaggatgat

SEQ ID NO: 835665 - DNA, 75 bp, synthetic construct
  source 1..75: mol_type = other DNA
ggtgtgctgacagaggctgccattgacgagccacgatttgaacgtgatggcctgcttattgaggggcaaagaact

SEQ ID NO: 835666 - DNA, 75 bp, synthetic construct
  source 1..75: mol_type = other DNA
ctgcagcgaagaccagcgaaacgaatgccaaagccagcgaaactgcggcgaaaaacagtcaggatgcagcggccc

SEQ ID NO: 835667 - DNA, 75 bp, synthetic construct
  source 1..75: mol_type = other DNA
gaggccagactacagccggcttacgtcatttatttggttatatcaggaattttagaatatggcataaagaattaa

SEQ ID NO: 835668 - DNA, 75 bp, synthetic construct
  source 1..75: mol_type = other DNA
caacctatcagtgttcttattgaagttaataagaattgggatattgtgccaaacggagcaccaagaatttttgac

SEQ ID NO: 835669 - DNA, 75 bp, synthetic construct
  source 1..75: mol_type = other DNA
taatcttccttttacggttctttgtgaggtacataagaactggtataaaacgccaaatgcagcgccacgtgtttt

SEQ ID NO: 835670 - DNA, 75 bp, synthetic construct
  source 1..75: mol_type = other DNA
ccactgcatcagctaacagtcaaaaagcagcaaaaaccagtgaaaccaacgcaaaggtgagcgaaacagcggctg

SEQ ID NO: 835671 - DNA, 75 bp, synthetic construct
  source 1..75: mol_type = other DNA
aacgcgaaaaatagcgagacagccgcaaagacgagcgaaaccaacgcaaagtccagccagacggcagcgataacc

SEQ ID NO: 835672 - DNA, 75 bp, synthetic construct
  source 1..75: mol_type = other DNA
taagagatcttgttatgggattcagggttaaggctgacggcatgacatgctcatttgcaaataagcatataagca

SEQ ID NO: 835673 - DNA, 75 bp, synthetic construct
  source 1..75: mol_type = other DNA
tgctggcagaagatcattatccgctaccagaacgtacccagcagacgctggaacatgccctgctgaatgccattg

SEQ ID NO: 835674 - DNA, 75 bp, synthetic construct
  source 1..75: mol_type = other DNA
acagaactgcaccattcagctcaaagcaaaacgtaacagcaccacggttgtggtgaacacggtggcctcagaaaa

SEQ ID NO: 835675 - DNA, 75 bp, synthetic construct
  source 1..75: mol_type = other DNA
ttaaggatgatgcaactggctggatattttttgaggctacattaaaagcagatacaacagaaaatacggttggtg

SEQ ID NO: 835676 - DNA, 75 bp, synthetic construct
  source 1..75: mol_type = other DNA
aaggggcagtacggaaccgtggggcaggggctgcatatcgccaaaaaattgctgccgtttataccggcgaatgcg

SEQ ID NO: 835677 - DNA, 75 bp, synthetic construct
  source 1..75: mol_type = other DNA
cctgctggtaccatgctgtcgtggtggttctgcattcacccagggcgctgaggggacattcagtgcggacacggg

SEQ ID NO: 835678 - DNA, 75 bp, synthetic construct
  source 1..75: mol_type = other DNA
tctgatgcaggcgattacagcagaaggtgatgtggtggtcagtggtgcaactgagccggattggtactacgtcat

SEQ ID NO: 835679 - DNA, 75 bp, synthetic construct
  source 1..75: mol_type = other DNA
gacgctgacggatattaccaaaaatgcaacgtatggcgttgagatagaaagtctggtgctggaaataaatagtcc

SEQ ID NO: 835680 - DNA, 75 bp, synthetic construct
  source 1..75: mol_type = other DNA
gttaccggattcttacgatgctccggatccgcgcattaaacagctggcgcgccgcagtacggtacccccgggtgg

SEQ ID NO: 835681 - DNA, 75 bp, synthetic construct
  source 1..75: mol_type = other DNA
acagccatgctgacacagtttcgtgctgacctcactgtgtttaacgcgcagtgccatggtggcagtgctgcagat

SEQ ID NO: 835682 - DNA, 75 bp, synthetic construct
  source 1..75: mol_type = other DNA
gcgctgacgctgacggatgttacaaaaaatgcagcgtatggcgttgagatagaaagtctgatgctggagataaat

SEQ ID NO: 835683 - DNA, 75 bp, synthetic construct
  source 1..75: mol_type = other DNA
cgcacagcaacctgcgctgtttacagccatgctgacacagtttcgtgctgacctctccgtgtttaacgcgcagtg

SEQ ID NO: 835684 - DNA, 75 bp, synthetic construct
  source 1..75: mol_type = other DNA
tgattgcgcgcaccaaagctgcattacagaagaacccgaaaaatgtgttgctggcggtgtgctggatgcagggag

SEQ ID NO: 835685 - DNA, 75 bp, synthetic construct
  source 1..75: mol_type = other DNA
ggtgatgtggtggtcagtggtgcaactgagccggagccgaccaaatcgcccaccggatatcaccggaaagcaccg

SEQ ID NO: 835686 - DNA, 75 bp, synthetic construct
  source 1..75: mol_type = other DNA
tcagggcggcgtcgccgtcagaccttgcggaaaagctgacacaaaaactgaaggaggggtggcagccatttggca

SEQ ID NO: 835687 - DNA, 75 bp, synthetic construct
  source 1..75: mol_type = other DNA
gttctgcattcacccagggcgctgaggggacattcagtgcggacacgggggctagccaggattcggcacgctggg

SEQ ID NO: 835688 - DNA, 75 bp, synthetic construct
  source 1..75: mol_type = other DNA
acggtaacgactggcagacgctggagctggtgttcaccgccggcagtgccacggttactccgaaactgaatggag

SEQ ID NO: 835689 - DNA, 75 bp, synthetic construct
  source 1..75: mol_type = other DNA
ctggctggtacgtgattatgtggcaaaagcctgtgaagtcgaaaaatcagattgtcctgtttatcttgtgcttca

SEQ ID NO: 835690 - DNA, 75 bp, synthetic construct
  source 1..75: mol_type = other DNA
agttttgtagacccaaaaactttacagtggtggatgatacaaagcgattctgcaagggcggtttttaatgacccg

SEQ ID NO: 835691 - DNA, 75 bp, synthetic construct
  source 1..75: mol_type = other DNA
catcaactggatcgttattgtactgaacgttattgtcatccctgtactgacagtgacagtcttccgtccgtttct

SEQ ID NO: 835692 - DNA, 75 bp, synthetic construct
  source 1..75: mol_type = other DNA
cgaacttcttccagaacagtacagacccttcgaagtggaataagtcaacttcactggacgttacagaaacaggca

SEQ ID NO: 835693 - DNA, 75 bp, synthetic construct
  source 1..75: mol_type = other DNA
gagtcagaaaggacgaagctaccggatggatttttgcagaggcaacaattcaggcaattgatggggagttaaaaa

SEQ ID NO: 835694 - DNA, 75 bp, synthetic construct
  source 1..75: mol_type = other DNA
ggttgccagatggcggataactcatttgaacatgccaaaagtagtctgcgttgtcgtgccattaataccgtgcgt

SEQ ID NO: 835695 - DNA, 75 bp, synthetic construct
  source 1..75: mol_type = other DNA
gtccggtggccataaccccttataccctgatgcaggcgattacagcagaaggtgatgtggtggtcagtggtgcaa

SEQ ID NO: 835696 - DNA, 75 bp, synthetic construct
  source 1..75: mol_type = other DNA
acaggaaagccggaaacacgaagctgggggagttcggcgattacggtaacgactggcagacgctggagctggtgt

SEQ ID NO: 835697 - DNA, 75 bp, synthetic construct
  source 1..75: mol_type = other DNA
aaactgaatctgatgcatcacaggaaagcaggaaacacaaagttgggcgagttcgggaattacagtaacgactgg

SEQ ID NO: 835698 - DNA, 75 bp, synthetic construct
  source 1..75: mol_type = other DNA
ggcgtgggtaaaccgttatatcaggacctgattgcgcgcactaaagctgcattacagaagaacccgaaaaatagt

SEQ ID NO: 835699 - DNA, 75 bp, synthetic construct
  source 1..75: mol_type = other DNA
gtaaggcaccggaaatcaaaccctcgcccggcggcaacacgccatcgggtccgtctgcagatacgtccgttcgca

SEQ ID NO: 835700 - DNA, 75 bp, synthetic construct
  source 1..75: mol_type = other DNA
caggaaacacaaagttgggcgagttcgggaattacagtaacgactggcagacgctggagctggtgttcaccgccg

SEQ ID NO: 835701 - DNA, 75 bp, synthetic construct
  source 1..75: mol_type = other DNA
gtttttcgctatgccatcgtaacgggtagggcaatctacaatccggcaccggatcttgccagtgtgatgcaagga

SEQ ID NO: 835702 - DNA, 75 bp, synthetic construct
  source 1..75: mol_type = other DNA
tggcatcaacagggagcacaggcgactcgtatgacaacgagatggttgagagcatcaatggtccttacaaagcgg

SEQ ID NO: 835703 - DNA, 75 bp, synthetic construct
  source 1..75: mol_type = other DNA
tcgtgggatggcgggtctcatcgtccatggaaacgacattcatgctggatgcactggagcaggcgttgtgggccc

SEQ ID NO: 835704 - DNA, 75 bp, synthetic construct
  source 1..75: mol_type = other DNA
gggtggggatcattcattcctttgcccgccataacgtaattggtgacaaagttgaactgccttttgtcgagtttg

SEQ ID NO: 835705 - DNA, 75 bp, synthetic construct
  source 1..75: mol_type = other DNA
acgtattaccactgtcagcaacagcgacatcatcctgataaacgctgtgcacatgcgcagcgcgatgactggctg

SEQ ID NO: 835706 - DNA, 75 bp, synthetic construct
  source 1..75: mol_type = other DNA
acgtattaccactgtcagcaacagcgacatcatcctgataaacgcagtgcacatgctcagcgcgatgactggctg

SEQ ID NO: 835707 - DNA, 75 bp, synthetic construct
  source 1..75: mol_type = other DNA
acgtattaccactgtcagcaacagcgacatcatcctgataaacgcagttcacatgcgcagcgcgatgactggctg

SEQ ID NO: 835708 - DNA, 75 bp, synthetic construct
  source 1..75: mol_type = other DNA
aaatacactgtcacgcaccgatgccacggaagaactgacgcgtctttctctggcccgtgcagaaggattcgataa

SEQ ID NO: 835709 - DNA, 75 bp, synthetic construct
  source 1..75: mol_type = other DNA
gccacactttccgttactgaattacagccgcaactcctacatggggcgattgattaatcgcaccctgacgcgcca

SEQ ID NO: 835710 - DNA, 75 bp, synthetic construct
  source 1..75: mol_type = other DNA
gaatatatcacccatctggtacagtcagcttactacgatactgagcgggatattgtgcagttacaggccgatccc

SEQ ID NO: 835711 - DNA, 75 bp, synthetic construct
  source 1..75: mol_type = other DNA
tgcgggatattggttatctggattacactgagtttaaacgtggccgagccacctatttcagcgtgcattatcgca

SEQ ID NO: 835712 - DNA, 75 bp, synthetic construct
  source 1..75: mol_type = other DNA
gaggatatcgttgagatcaaggctgaacctaagctgtttgagctttaccacatggacagaagggtacttctgcgg

SEQ ID NO: 835713 - DNA, 75 bp, synthetic construct
  source 1..75: mol_type = other DNA
gtgctggatgcactggagcaggcgttgtgggcccgtcgtccgtccggcaccatccatcacagcgataaaggctct

SEQ ID NO: 835714 - DNA, 75 bp, synthetic construct
  source 1..75: mol_type = other DNA
gggatgagtccttaataaaacgggtcctcagagcatacatagtctgcggggcgtgcggcaacaacaggacgaact

SEQ ID NO: 835715 - DNA, 75 bp, synthetic construct
  source 1..75: mol_type = other DNA
gcctttacaaagcggaggtaatacaccgtaagagctggaaaaaccggacagaagtggaactggccacactcacgt

SEQ ID NO: 835716 - DNA, 75 bp, synthetic construct
  source 1..75: mol_type = other DNA
ctcatggcggttatgggacttgccggtgttctccggggtaaaaaggtccgcactacgtcagccggaaaaccgttg

SEQ ID NO: 835717 - DNA, 75 bp, synthetic construct
  source 1..75: mol_type = other DNA
agcagtacggggtcggaccggtatgcagtgaactgcatattgccccgtcaacgtattaccactgtcagcagcagc

SEQ ID NO: 835718 - DNA, 75 bp, synthetic construct
  source 1..75: mol_type = other DNA
cgtcagttgttacgggaaggaatcagggtggccagatgtacagtggcgcgcctcatggcggttatgggacttgcc

SEQ ID NO: 835719 - DNA, 75 bp, synthetic construct
  source 1..75: mol_type = other DNA
gcctacacacagcggcttaaggaagccggattactggcatcaacaggaagtacaggcgactcgtatgacaacgcg

SEQ ID NO: 835720 - DNA, 75 bp, synthetic construct
  source 1..75: mol_type = other DNA
cggggcggttcaaccgacgataattccgttatctgccagctccgtctggagccgccgggttccatatgtttcgcg

SEQ ID NO: 835721 - DNA, 75 bp, synthetic construct
  source 1..75: mol_type = other DNA
cagaagtggaactggccacactcacgtgggtggactggtataacaatcgacgattgctgggaaggcagggccata

SEQ ID NO: 835722 - DNA, 75 bp, synthetic construct
  source 1..75: mol_type = other DNA
cagaagtggaactggccacactcacgtgggtggactggtataacaatcgaagattgctgggaaggccgggccata

SEQ ID NO: 835723 - DNA, 75 bp, synthetic construct
  source 1..75: mol_type = other DNA
ccgcgtaaaccgtcagttcgtggcagaacgtcctgaccagctgtgggtggctgattttacttacatcagcacatg

SEQ ID NO: 835724 - DNA, 75 bp, synthetic construct
  source 1..75: mol_type = other DNA
actgctggcatcaacagggagtacaggtgactcgtatgacaacgcgatggcggagagcatcaatggtctttacaa

SEQ ID NO: 835725 - DNA, 75 bp, synthetic construct
  source 1..75: mol_type = other DNA
cactaccgtcagccggaaaaccgttgccgcaggtgaccgcgtaaaccgtcagtgcgtggcagaacgtcctgacca

SEQ ID NO: 835726 - DNA, 75 bp, synthetic construct
  source 1..75: mol_type = other DNA
cagaagtggaactggccacactcacgtgggtggactggtataacaatcgaggattgctggaaaggcggggccata

SEQ ID NO: 835727 - DNA, 75 bp, synthetic construct
  source 1..75: mol_type = other DNA
tttacaccgaacatttttatccggacggtagccgtggacgccgggcgaaatccatcgcttttgcgaatatggacg

SEQ ID NO: 835728 - DNA, 75 bp, synthetic construct
  source 1..75: mol_type = other DNA
atcaggcgctggcgaaggcgggtgctccgtgggacagatggactgcggttatccgtcaggatctggcgctgctgc

SEQ ID NO: 835729 - DNA, 75 bp, synthetic construct
  source 1..75: mol_type = other DNA
gtgattgcgctggtggatgcggtacatgccgatgagcagatgaaccagttcaccatcgcccagtcccaggtgggc

SEQ ID NO: 835730 - DNA, 75 bp, synthetic construct
  source 1..75: mol_type = other DNA
cgctgaccaacggctgcatctgctgttcgcgctccaacgagctggaagacgcactactcgacctgctggataatc

SEQ ID NO: 835731 - DNA, 75 bp, synthetic construct
  source 1..75: mol_type = other DNA
tgatgcgtgagatgactcatgcaggcgaactcgaacacctgacgcccgaacgcgtgtggaaagagactgaaagcg

SEQ ID NO: 835732 - DNA, 75 bp, synthetic construct
  source 1..75: mol_type = other DNA
ccgaagaccagcattccccctccctgatgccgctgattaacgcgctggaatcgcgtctggcgcagtcgggcggga

SEQ ID NO: 835733 - DNA, 75 bp, synthetic construct
  source 1..75: mol_type = other DNA
agtctccctccctgatgccgctgatcaacgcgctggaatcgcgtctggcgcagtcgggtgggatgaacgcggtgg

SEQ ID NO: 835734 - DNA, 75 bp, synthetic construct
  source 1..75: mol_type = other DNA
gacgcacgatcccgagcgggtggcaagcttcaataaggatccgctgattacccgaccaattgctgtgaatattct

SEQ ID NO: 835735 - DNA, 75 bp, synthetic construct
  source 1..75: mol_type = other DNA
gtgggaaacggcctgcaggcctacagaggagctggtgcaaagcggatgttaaataaggggctggaaagccttgct

SEQ ID NO: 835736 - DNA, 75 bp, synthetic construct
  source 1..75: mol_type = other DNA
cgcttaaccgcaacggcaagtcatggctgatggcggtagtcggcgcggaatatattttgcgcatggtgcctaaag

SEQ ID NO: 835737 - DNA, 75 bp, synthetic construct
  source 1..75: mol_type = other DNA
tcgattgtggtggaactggattacccggtagatatcagcgaagtttcccgggtgatggaaaacctgctgctggaa

SEQ ID NO: 835738 - DNA, 75 bp, synthetic construct
  source 1..75: mol_type = other DNA
gaaactgcgtgaacgcctggcgcgcatcaacgcccgcgcaccggtctacaccgtcacccacggcgacatcgacct

SEQ ID NO: 835739 - DNA, 75 bp, synthetic construct
  source 1..75: mol_type = other DNA
cgccagcgtaaaattcatctgcagatgttaattcagcaggctgttgctcggttaacagagcagggtagctcggtc

SEQ ID NO: 835740 - DNA, 75 bp, synthetic construct
  source 1..75: mol_type = other DNA
aaggtgtggagattcgcgaggagctgacccgacggcggattgcggcggtagccagctggaaggaacaacgttgcc

SEQ ID NO: 835741 - DNA, 75 bp, synthetic construct
  source 1..75: mol_type = other DNA
ccttttgtcgagtttgcaaaactttgcggtataccttcaagccagtcatcacgcaggctgcgtgagcgcatcagt

SEQ ID NO: 835742 - DNA, 75 bp, synthetic construct
  source 1..75: mol_type = other DNA
gttgcagccccgaccgctggtctgcattttgacgaacctttgctggaaaaattacgcgccaaaggcgtggagatg

SEQ ID NO: 835743 - DNA, 75 bp, synthetic construct
  source 1..75: mol_type = other DNA
gagatgactgaaaagctggcacttttagaaaaacttggcatcacgctcgatgacctggaaaagctcttcaaatcc

SEQ ID NO: 835744 - DNA, 75 bp, synthetic construct
  source 1..75: mol_type = other DNA
atttgcagtcggccaaattggcaatgcgcgatgtggtgagcaaagtgattgccgattgtggctgcgagggcaggg

SEQ ID NO: 835745 - DNA, 75 bp, synthetic construct
  source 1..75: mol_type = other DNA
gtggtggatttttgccatcgctttgatgtcagcgtcgaagcggagctggggcaacttggcggccaggaagatgat

SEQ ID NO: 835746 - DNA, 75 bp, synthetic construct
  source 1..75: mol_type = other DNA
aaaaacacgctttcccggactgatgcgacggaagaactgacgcgcctgtctctcgccagagccgaaggttttgat

SEQ ID NO: 835747 - DNA, 75 bp, synthetic construct
  source 1..75: mol_type = other DNA
cagccgccgcatccgtgcgctggaacaggcgattggcgttgaattgtttaaccgccaggtgacgccgctgcaact

SEQ ID NO: 835748 - DNA, 75 bp, synthetic construct
  source 1..75: mol_type = other DNA
ggaggctatggtcccgctcctgatggctgggatgatgacatcccgttcatgcggctgcaccacttggctggcggg

SEQ ID NO: 835749 - DNA, 75 bp, synthetic construct
  source 1..75: mol_type = other DNA
agcatgtcgcgcaagggcaactgccttgataatgcggtaatggagaacttctttggtcacctgaaagaagaaatg

SEQ ID NO: 835750 - DNA, 75 bp, synthetic construct
  source 1..75: mol_type = other DNA
gaacgtccagaccagttgtgggtggctgattttacctgggtaaggggtctgacgctcagtggaacgaaaactcac

SEQ ID NO: 835751 - DNA, 75 bp, synthetic construct
  source 1..75: mol_type = other DNA
cagtgagttaagtttcagcaccttttttgtctcttcgatgagcgagcttttaaagcaggttgccctcgacggctg

SEQ ID NO: 835752 - DNA, 75 bp, synthetic construct
  source 1..75: mol_type = other DNA
cagaggtcgaacaaaaagctgctaatggtgtttttgatgataccaatgtacaaaaccgaacgctcagtgactggg

SEQ ID NO: 835753 - DNA, 75 bp, synthetic construct
  source 1..75: mol_type = other DNA
catactgcctgaagaaatgggctgcgatcccttgcacggacaggggctggtgatgttgccggttagcgaaatttt

SEQ ID NO: 835754 - DNA, 75 bp, synthetic construct
  source 1..75: mol_type = other DNA
gggtggactggtataacaatcgacgattgctggaaaggctgggccatatcccaccggcagaagcagaaaaagctt

SEQ ID NO: 835755 - DNA, 75 bp, synthetic construct
  source 1..75: mol_type = other DNA
ggcagggcttcgtctatgtggcgttcatcattgatgtgtttgccggatgtatcgtggggtggcgagtctcatcgt

SEQ ID NO: 835756 - DNA, 75 bp, synthetic construct
  source 1..75: mol_type = other DNA
ccactgtcagcaacagagacatcatcctgataaacgcagtgcacatgcacagcgcgatgactggctgaagagaga

SEQ ID NO: 835757 - DNA, 75 bp, synthetic construct
  source 1..75: mol_type = other DNA
acaggtcggtgtagtctgcgagacgttctcagcctgtatcagtctggtggcaaaaagcgattttctcagcatact

SEQ ID NO: 835758 - DNA, 75 bp, synthetic construct
  source 1..75: mol_type = other DNA
ccgccattggtgcccgttcgatcaaacagttactggattacagctggacaatgccgacgccacacggcagctact

SEQ ID NO: 835759 - DNA, 75 bp, synthetic construct
  source 1..75: mol_type = other DNA
aggtaatacaccgtaatagctggaaaaaccggacagaagtggaactggccacactaacgtgggtggactggtata

SEQ ID NO: 835760 - DNA, 75 bp, synthetic construct
  source 1..75: mol_type = other DNA
gataaaggctctcagtatgtatcgctggcctacacgcagcggcttaaggaagccggattactggcatcaacaggg

SEQ ID NO: 835761 - DNA, 75 bp, synthetic construct
  source 1..75: mol_type = other DNA
gcgtaaagtctggcgccagttgttacgcgaaggtatcagggtggccagatgtacagtggcacgtctcatggcagt

SEQ ID NO: 835762 - DNA, 75 bp, synthetic construct
  source 1..75: mol_type = other DNA
gggtaaaaaggtccgtactaccgtcagccggaaagccgtttccgcaggcgaccgcgtaaaccgtcagttcgtggc

SEQ ID NO: 835763 - DNA, 75 bp, synthetic construct
  source 1..75: mol_type = other DNA
tgggtggactggtataacaatcgacgattgctgggaaggctgggtcatatccctccggcagaagcagaaaaagct

SEQ ID NO: 835764 - DNA, 75 bp, synthetic construct
  source 1..75: mol_type = other DNA
ggcttccgcttattttgcgaaggcggagttcgaccgcctctggaaaaaataatgccgctgctggataagctgcgt

SEQ ID NO: 835765 - DNA, 75 bp, synthetic construct
  source 1..75: mol_type = other DNA
tctggcgtcagttgttacgggaaggaatcagggtggccagatgtacagtggcgcgcctcatggcggttatgggac

SEQ ID NO: 835766 - DNA, 75 bp, synthetic construct
  source 1..75: mol_type = other DNA
gtcggccgtccggcacagtccatcacagtgataaaggttctcagtatatatcactggcctatacggagcgactaa

SEQ ID NO: 835767 - DNA, 75 bp, synthetic construct
  source 1..75: mol_type = other DNA
gtggcgttcatcattgatgtgtttgccggatacattgtggggtggcgggtctcatcgtccatggaaacgacattc

SEQ ID NO: 835768 - DNA, 75 bp, synthetic construct
  source 1..75: mol_type = other DNA
gatgacctgctgaagccggagatacagcgcgtgtacgatgaaaaccacagcgtgtacggtgtgcgcaaggtctgg

SEQ ID NO: 835769 - DNA, 75 bp, synthetic construct
  source 1..75: mol_type = other DNA
tggcattgaggacggcattgttgaattccatagaaataatgaaacaacatcctgtaaatatgattacgatggata

SEQ ID NO: 835770 - DNA, 75 bp, synthetic construct
  source 1..75: mol_type = other DNA
atggaaaactggccaacgtattatccatatcagttgagtagcgaagaagtggtcgaggaaatgatgtctcattga

SEQ ID NO: 835771 - DNA, 75 bp, synthetic construct
  source 1..75: mol_type = other DNA
actcacctataaatcaggcaagaaaggcgttcgttacttattcgaatgtaaagatcctgaaagcaaagcccctaa

SEQ ID NO: 835772 - DNA, 75 bp, synthetic construct
  source 1..75: mol_type = other DNA
gctgatgaaggtgatggggcttgccggtgtgcgccggggtaaaaaggtccacaccacagtcagccggaaagaagc

SEQ ID NO: 835773 - DNA, 75 bp, synthetic construct
  source 1..75: mol_type = other DNA
agcacatggcagggcttcgtctatgtggcgttcatcattgatgtgtttgccggatacattgtggggtggcgggtc

SEQ ID NO: 835774 - DNA, 75 bp, synthetic construct
  source 1..75: mol_type = other DNA
gcgcgcctcatggcggttatgggacttgccggtgttctccggggtaaaaaggtccgcactaccgtcagccggaaa

SEQ ID NO: 835775 - DNA, 75 bp, synthetic construct
  source 1..75: mol_type = other DNA
tggcatcaacagggaacacaggcgactcgtatgacaacgcgatggcggagatcatcaatggtctttacaaagcgg

SEQ ID NO: 835776 - DNA, 75 bp, synthetic construct
  source 1..75: mol_type = other DNA
atggacgtagaatgcccgcaagggcggctgacagagtataacgtaatggatgactgtggtgcggttttgcataac

SEQ ID NO: 835777 - DNA, 75 bp, synthetic construct
  source 1..75: mol_type = other DNA
tcgcagatccgccatctgctgcaacagttagagagcaaccttgcagaactgcgtggcggcagcgattacgcgcaa

SEQ ID NO: 835778 - DNA, 75 bp, synthetic construct
  source 1..75: mol_type = other DNA
ggggtaaaaaggtccgtactaccgtcagccggaaagccgttgccgcatgcgaccgcgtaaaccgtcagttcgtgg

SEQ ID NO: 835779 - DNA, 75 bp, synthetic construct
  source 1..75: mol_type = other DNA
tggatcctgttccgtaaattttcctcgccggaacaagtcgaaaatgtggccgcgcagttgctggagtttgcgtaa

SEQ ID NO: 835780 - DNA, 75 bp, synthetic construct
  source 1..75: mol_type = other DNA
gcgctggagcaggcgttgtgggccgtcgtccgtctggcaccatccatcacagcgataaaggctctcagtatgtgt

SEQ ID NO: 835781 - DNA, 75 bp, synthetic construct
  source 1..75: mol_type = other DNA
cactggagcaggcgttgtgggcccgtcggcagtccggcacagtccatcacagtgataaaggttctcagtatgtat

SEQ ID NO: 835782 - DNA, 75 bp, synthetic construct
  source 1..75: mol_type = other DNA
ctctggaaaaaataatgccctgctggataagctgcgtgagcagtacggggtcggaccggtatgcagtgaactgca

SEQ ID NO: 835783 - DNA, 75 bp, synthetic construct
  source 1..75: mol_type = other DNA
ctgaccagttgtgggtggctgattttacttacggtgtgcccggagttcagggcgggcatggatgcttaaatgaac

SEQ ID NO: 835784 - DNA, 75 bp, synthetic construct
  source 1..75: mol_type = other DNA
cgcttttttagttacggtgatgtgatgtttatcacgtacaatccgcaggcaattaatgagcgcgtcggggagtaa

SEQ ID NO: 835785 - DNA, 75 bp, synthetic construct
  source 1..75: mol_type = other DNA
ttcgtggcagaacgacctgaccagctgtgggtggctgattttacttacgtcagcacatggcagggcttcgtctat

SEQ ID NO: 835786 - DNA, 75 bp, synthetic construct
  source 1..75: mol_type = other DNA
tcgacgattgctgggaaggctgggtcatatccctccggcagaagcagaaaaagcttattatgcttccatcagaaa

SEQ ID NO: 835787 - DNA, 75 bp, synthetic construct
  source 1..75: mol_type = other DNA
gcttaaggaagcccggattactggcatcaacaggaagtacaggcgactcgtatgacaacgcgatggcggagagca

SEQ ID NO: 835788 - DNA, 75 bp, synthetic construct
  source 1..75: mol_type = other DNA
gaacgtccagaccagttgtgggtggctgattttacctgggtaagcacatggcggggcttcgtctatgtggcgttc

SEQ ID NO: 835789 - DNA, 75 bp, synthetic construct
  source 1..75: mol_type = other DNA
aagagagagatacagcgcgtatacgatgaaaatcaccaggtatacggtgtgcgtaaagtctggcgtcagttgtta

SEQ ID NO: 835790 - DNA, 75 bp, synthetic construct
  source 1..75: mol_type = other DNA
agcagtacggggtcggaccgctatgcagcgaactgcatattgccccgtcaacgtattaccattgtcagcaacagc

SEQ ID NO: 835791 - DNA, 75 bp, synthetic construct
  source 1..75: mol_type = other DNA
atcaatggtctttacaaaacggaagtaatacaccgtaatagctggaaaaaccagacaaaagtggaactggccaca

SEQ ID NO: 835792 - DNA, 75 bp, synthetic construct
  source 1..75: mol_type = other DNA
actgctggcatcaacagggagtacaggcgactcgtatgacaacgcgatggcggagagcatcaatggcctttacaa

SEQ ID NO: 835793 - DNA, 75 bp, synthetic construct
  source 1..75: mol_type = other DNA
actcctggcatcaacaggcagtacaggcgactcgtatgacaacgcgatggcggagagcatcaatggcctttacaa

SEQ ID NO: 835794 - DNA, 75 bp, synthetic construct
  source 1..75: mol_type = other DNA
acttctggcatcaacaggtagtacaggcgactcgtatgacaacgcgatggcggagagcatcaatggcctttacaa

SEQ ID NO: 835795 - DNA, 75 bp, synthetic construct
  source 1..75: mol_type = other DNA
tcgtgggatggcgagtctcatcgtccatggaaacgacattcgtgctggatgcactggagcaggcgttgtgggccc

SEQ ID NO: 835796 - DNA, 75 bp, synthetic construct
  source 1..75: mol_type = other DNA
cgggaaggtatcagagtggccaggtgctctgtggcacgtctcatggcggttatggggattgccggtgttctccgg

SEQ ID NO: 835797 - DNA, 75 bp, synthetic construct
  source 1..75: mol_type = other DNA
atgccactgctggataagctgcgtgagcagtacggggacggaccggtatgcagtgaactgcatattgccccgtca

SEQ ID NO: 835798 - DNA, 75 bp, synthetic construct
  source 1..75: mol_type = other DNA
ctcatcgtctatggaaacgacattcgtgctggatgccctggagcaggcgttttgggcccgacgtccgtccggcac

SEQ ID NO: 835799 - DNA, 75 bp, synthetic construct
  source 1..75: mol_type = other DNA
ctcatcgtctatggaaacgacattcgtgctggatgcactggagcaggcgttttgggcccgccgtccgtccggcac

SEQ ID NO: 835800 - DNA, 75 bp, synthetic construct
  source 1..75: mol_type = other DNA
agtctggcgtcagttgttacgggaaggtatcagagtggccagatgcactgtggcacgtctcatggcggttatggg

SEQ ID NO: 835801 - DNA, 75 bp, synthetic construct
  source 1..75: mol_type = other DNA
actactggcatcaacagggagtacgggcgactcgtatgacaacgcgatggcggagagcatcaatggcctttacaa

SEQ ID NO: 835802 - DNA, 75 bp, synthetic construct
  source 1..75: mol_type = other DNA
actactggcatcaacaggcagtaccggcgactcgtatgacaacgcgatggcggagagcatcaatggcctttacaa

SEQ ID NO: 835803 - DNA, 75 bp, synthetic construct
  source 1..75: mol_type = other DNA
actactggcatcaacaggaagtacaggcgactcgtatgacaacgcgatggcggagagcatcaatggcctttacaa

SEQ ID NO: 835804 - DNA, 75 bp, synthetic construct
  source 1..75: mol_type = other DNA
gtgacctgaaaggcggtgtgtttgcggcgtcatacggttacggtctggacgggctgacgctgcgcaccggcgggg

SEQ ID NO: 835805 - DNA, 75 bp, synthetic construct
  source 1..75: mol_type = other DNA
ggaacaacagcatgaagccgggcaatctggggtataccccggtgttcagcggcattgcgaacgggccgtcgaggg

SEQ ID NO: 835806 - DNA, 75 bp, synthetic construct
  source 1..75: mol_type = other DNA
ccgatagcaagaacaacgatcagccgctggcttactactacttttcgctgcatctggatgacggtgttaaccgta

SEQ ID NO: 835807 - DNA, 75 bp, synthetic construct
  source 1..75: mol_type = other DNA
ggtgtcagtcttaacctgggctggtccggttcacggaacacccggggagaaaacaactggtctgcatcggcgtca

SEQ ID NO: 835808 - DNA, 75 bp, synthetic construct
  source 1..75: mol_type = other DNA
accctgggccagtgccggatacctgcggcgaaactgcaggatactgagaaactacaggagattacgtgtgagtaa

SEQ ID NO: 835809 - DNA, 75 bp, synthetic construct
  source 1..75: mol_type = other DNA
gggctgacgctgcgcaccggcggggtgtttaaccaggactggcagggcgtcagcgccggggctgttctggggctg

SEQ ID NO: 835810 - DNA, 75 bp, synthetic construct
  source 1..75: mol_type = other DNA
aatttgaccaaaagcttacgcgcggttatgcccggtgggggcgctgggtatggcggacgttaattgtcgttccgg

SEQ ID NO: 835811 - DNA, 75 bp, synthetic construct
  source 1..75: mol_type = other DNA
tcggtacctttcactctctttgatcgtaagtatagcagtaatacatctttgtcacgtagcaaaggcggtggtact

SEQ ID NO: 835812 - DNA, 75 bp, synthetic construct
  source 1..75: mol_type = other DNA
gggatatcactctggggcagtgccggatacctgcaacaaaactgcgggatacagagaaactacaggagattacgt

SEQ ID NO: 835813 - DNA, 75 bp, synthetic construct
  source 1..75: mol_type = other DNA
tttttagtcatcctgtttacctctttctcaggaagtttagtctccaggattcccggggcggttcagttttttaag

SEQ ID NO: 835814 - DNA, 75 bp, synthetic construct
  source 1..75: mol_type = other DNA
cctacaaaaatggtgtggcagcgaaaacccgcaaccgcgccgtggctgccaggcgtgcgactggcatcggctgtg

SEQ ID NO: 835815 - DNA, 75 bp, synthetic construct
  source 1..75: mol_type = other DNA
gaccggggcgatctgacggccgcttcggtgacagcagagctgtgggggaaatttttaattgccctgttcgagtgt

SEQ ID NO: 835816 - DNA, 75 bp, synthetic construct
  source 1..75: mol_type = other DNA
aatggtgtgctgatgattaacacggtggatgcgccgggggatatcaccctgggccagtgccggatacctgcggcg

SEQ ID NO: 835817 - DNA, 75 bp, synthetic construct
  source 1..75: mol_type = other DNA
tgtgctgggggcaatctgccacgcggcgctatcgttaaaaatggccgactggacggcaaaacgggtacagaacat

SEQ ID NO: 835818 - DNA, 75 bp, synthetic construct
  source 1..75: mol_type = other DNA
atcctcaatgctgggaacatcgcttgtattgccggtgcataaagggcgtattcagaccggcacctggcaaggcat

SEQ ID NO: 835819 - DNA, 75 bp, synthetic construct
  source 1..75: mol_type = other DNA
tgatttttgtttacagtctggtctttactgtgttgttggcgatcccgctgggaatttatttcctcggcggcgatg

SEQ ID NO: 835820 - DNA, 75 bp, synthetic construct
  source 1..75: mol_type = other DNA
gtccagcgcctctacagcgccgactgggaccgcccgtggggcgatgaaaaaccgcatagcacgatggtgtttatc

SEQ ID NO: 835821 - DNA, 75 bp, synthetic construct
  source 1..75: mol_type = other DNA
gaatgctgtattcattgatactgcattagcttcagcaattacatgtcctatctgccagggatatttagatccttc

SEQ ID NO: 835822 - DNA, 75 bp, synthetic construct
  source 1..75: mol_type = other DNA
atttggatgcgatgatttcaagagaggatttctctgctcaatccgataatgatttatctttcgaatctatacaaa

SEQ ID NO: 835823 - DNA, 75 bp, synthetic construct
  source 1..75: mol_type = other DNA
tcagccagccggtgggtgggctgttcagtctgtcggtgtccggctggcagcggagttattacccggcacagatga

SEQ ID NO: 835824 - DNA, 75 bp, synthetic construct
  source 1..75: mol_type = other DNA
tcagtacgggactgtccggctcgctgaatgaccgtttcagctatggctttggtagcggtcatgacaacggtggcg

SEQ ID NO: 835825 - DNA, 75 bp, synthetic construct
  source 1..75: mol_type = other DNA
aggcggtggcacaggcttcagcaccggtgtatccggctcactgaatgaccgtttcagctatggtctgggcggtgg

SEQ ID NO: 835826 - DNA, 75 bp, synthetic construct
  source 1..75: mol_type = other DNA
ggtttaagcgcaacggaaatcgttgagttgatccgcgaagaagccgcggcgatttgcagcaaaggcggtgcggca

SEQ ID NO: 835827 - DNA, 75 bp, synthetic construct
  source 1..75: mol_type = other DNA
ggtttaagcgcaacggaaatcgttgagttaatccgcgaagaagccgcagcgatttgcagcaaaggcggtgcggca

SEQ ID NO: 835828 - DNA, 75 bp, synthetic construct
  source 1..75: mol_type = other DNA
tgacggctattcgtgaaacagcccagattgcaaaactaatgaacgaggcaaaaactcaagctgaagtaaatgcgg

SEQ ID NO: 835829 - DNA, 75 bp, synthetic construct
  source 1..75: mol_type = other DNA
aaggtggtgtgtttgctgcgtcatacggttatggtctgaataacctgaccctgcgggccggaggggtgtttaacc

SEQ ID NO: 835830 - DNA, 75 bp, synthetic construct
  source 1..75: mol_type = other DNA
tatcgagttgcgagcggcattatggcaagagtttgatctggataacgctatttgggaaattcctgcagaaagaat

SEQ ID NO: 835831 - DNA, 75 bp, synthetic construct
  source 1..75: mol_type = other DNA
tcgctatgcaggtaaacctaaaatgatctcgcttggtgtttatccaacgatcactcttgctgaagctcgcgcccg

SEQ ID NO: 835832 - DNA, 75 bp, synthetic construct
  source 1..75: mol_type = other DNA
aaagtgactggacatggttttcggcatactttctctacaattttacatgaaatgggttacgattcgtattgtatt

SEQ ID NO: 835833 - DNA, 75 bp, synthetic construct
  source 1..75: mol_type = other DNA
cctaactgggaactacccgctgatgttccctggacgcaacgatcctagcaaacctatgagtgaagcaagcattaa

SEQ ID NO: 835834 - DNA, 75 bp, synthetic construct
  source 1..75: mol_type = other DNA
tgtgggaagtgccgaaagaacgaatgaaaatgcgccgttctcattgcgtgccgctttcagaacaggcgattgcta

SEQ ID NO: 835835 - DNA, 75 bp, synthetic construct
  source 1..75: mol_type = other DNA
ggtcgaatacagcacagtaaaccgatgagtgaaatggcgatgaacgtgcttattcgtcgtattggttatgcaggg

SEQ ID NO: 835836 - DNA, 75 bp, synthetic construct
  source 1..75: mol_type = other DNA
ccgttagttgttcttgccgctcgtctgcttatccttacgggagttcgtactggcgagcttcgaggtgctttctgg

SEQ ID NO: 835837 - DNA, 75 bp, synthetic construct
  source 1..75: mol_type = other DNA
ccatgctttgtatctggaagggcggagggagatgatgcagtggtatgctgattgcattggaagaattggtaatga

SEQ ID NO: 835838 - DNA, 75 bp, synthetic construct
  source 1..75: mol_type = other DNA
cggaatacaaccctgcagcagatctaaccagcgcgatgtcagggcatgaatcaaagcattatcccttcctgactg

SEQ ID NO: 835839 - DNA, 75 bp, synthetic construct
  source 1..75: mol_type = other DNA
gaggcagcgatgtggggaagttttccgctatgcaattgtcactggacgtgctgagtataaccctgcaccggatct

SEQ ID NO: 835840 - DNA, 75 bp, synthetic construct
  source 1..75: mol_type = other DNA
gtgctgcgtaaaattgagaaacgtggtgcattggagaaaatgcgcaaagtgcggcaacgttgctcagaggttttt

SEQ ID NO: 835841 - DNA, 75 bp, synthetic construct
  source 1..75: mol_type = other DNA
ccatgcacagtatctggatggaaggctagaaatgatgcagtggtacgctgattatattgacaagcttctaagttc

SEQ ID NO: 835842 - DNA, 75 bp, synthetic construct
  source 1..75: mol_type = other DNA
tgagatagacatcattatggcctggcgtcgcgacagtatgggggaagcaaaatcctggtgcttgcgggaaattcc

SEQ ID NO: 835843 - DNA, 75 bp, synthetic construct
  source 1..75: mol_type = other DNA
gcgaagggaggtgaaggttcagccggtggcaaacatcatggccgctggcgaactcaaaactgtcaccgcgccaat

SEQ ID NO: 835844 - DNA, 75 bp, synthetic construct
  source 1..75: mol_type = other DNA
gctgacgaaattgcggcgacggttgaacgcatcaacgcggccaaagctggtatcgaggagttcattatctcgacg

SEQ ID NO: 835845 - DNA, 75 bp, synthetic construct
  source 1..75: mol_type = other DNA
aaattgtttgcaccgtgcgccaccacggactggcgcatgacaaattgctgatggtggaaatgattgatccacagg

SEQ ID NO: 835846 - DNA, 75 bp, synthetic construct
  source 1..75: mol_type = other DNA
gaaaaatggaaagtttgttgaaggtggtacttgggctagggataagcgaaacacacctttgggatttgtagcaaa

SEQ ID NO: 835847 - DNA, 75 bp, synthetic construct
  source 1..75: mol_type = other DNA
cgctgaacggtaattatgcgccggggcgttacctggttgacctgtccctgaacgggaaggagagcggaaagcaga

SEQ ID NO: 835848 - DNA, 75 bp, synthetic construct
  source 1..75: mol_type = other DNA
tggtcagcatccgcttctgtttcagtgccgttcatgttgcttgaccgtcgttacagcagcagcacttcggtgagc

SEQ ID NO: 835849 - DNA, 75 bp, synthetic construct
  source 1..75: mol_type = other DNA
tggttatgcttcagacatcctcgaagccttcaacaaagatgtgttcccttacattggcaaaaaaccaatcgccga

SEQ ID NO: 835850 - DNA, 75 bp, synthetic construct
  source 1..75: mol_type = other DNA
gaaacccagctggctcacgttgataaaaatgcgattcgtgggacgtataaccatgcgttgtatttggaaggacgt

SEQ ID NO: 835851 - DNA, 75 bp, synthetic construct
  source 1..75: mol_type = other DNA
atatcggccagcagccggtaaatgaaattaaaccgctggttctgctgaatgtgctgcgtcgaatggaaagccgtg

SEQ ID NO: 835852 - DNA, 75 bp, synthetic construct
  source 1..75: mol_type = other DNA
cgctatgcaatagtgacgggccgggctgaatataatccggcaccagacctcacctgtgccatgcgagggcatgaa

SEQ ID NO: 835853 - DNA, 75 bp, synthetic construct
  source 1..75: mol_type = other DNA
attatattaacagcattggagaattgaatacttatggtgggcttataataccagcttcaaatttatccatttatt

SEQ ID NO: 835854 - DNA, 75 bp, synthetic construct
  source 1..75: mol_type = other DNA
tgatgtgcagctcaacaacacgtttcaggctgtggcgcttgagtggcacggaacgaaggtgagccggtggtcaga

SEQ ID NO: 835855 - DNA, 75 bp, synthetic construct
  source 1..75: mol_type = other DNA
atagtgaattcagcactaagcgccgtcagacccgaaaagagatttgcctctcccgcattgagcagattctgccat

SEQ ID NO: 835856 - DNA, 75 bp, synthetic construct
  source 1..75: mol_type = other DNA
agtgctaacgcggggacaaatctgggatcgctggaagagcagctggcgcaaaaagcggatgagatgggcgcaaaa

SEQ ID NO: 835857 - DNA, 75 bp, synthetic construct
  source 1..75: mol_type = other DNA
ctgcggcgattttaagctccatgtcatttgccagctttgcggctgtcgaagttcagtcaacgccagaaggccaac

SEQ ID NO: 835858 - DNA, 75 bp, synthetic construct
  source 1..75: mol_type = other DNA
tgcgtctggtgctaggtaatcacgatctgcatctgctggcggtattcgccgggatcagccgtaacaaaccgaaag

SEQ ID NO: 835859 - DNA, 75 bp, synthetic construct
  source 1..75: mol_type = other DNA
tcgcctccatgcggctgtttgcccgtttatccctggatagcgccgtgccggaacgcaccaccatcatgaatttcc

SEQ ID NO: 835860 - DNA, 75 bp, synthetic construct
  source 1..75: mol_type = other DNA
tgatggtctgacactttgccgggaaattcgtcgtttttccgatgtccccatcgtgatggttacggcaaaaatcga

SEQ ID NO: 835861 - DNA, 75 bp, synthetic construct
  source 1..75: mol_type = other DNA
aatgcttgacctgacgcctgcggaatttcgtctgctgaaaacgctctctcatgaaccaggaaaagtgttctcccg

SEQ ID NO: 835862 - DNA, 75 bp, synthetic construct
  source 1..75: mol_type = other DNA
tatctgcaagccgtacagcccacgggaagtggtagcgcgcgtcaaaaccattttgcgccgttgcaaaccgcagcg

SEQ ID NO: 835863 - DNA, 75 bp, synthetic construct
  source 1..75: mol_type = other DNA
agcgagcgcaacgtctgactcgtcagcgatttggcaacgtcgtcagcttctacgtcccgctttatctttccaatc

SEQ ID NO: 835864 - DNA, 75 bp, synthetic construct
  source 1..75: mol_type = other DNA
taactcgctgcatgaccctgattgctactacctgattcgcgcctttgacagtgctgaaagcatggctgcggctct

SEQ ID NO: 835865 - DNA, 75 bp, synthetic construct
  source 1..75: mol_type = other DNA
gccggaacgtacccagcaaacgctggaacatgccctgttgaatgccattgctcagtttattgatagctaccagcg

SEQ ID NO: 835866 - DNA, 75 bp, synthetic construct
  source 1..75: mol_type = other DNA
agttattgcgtaacgaaagccccagggcgattgacttcaccatcacccacgggaagggacgcaagggaatcatta

SEQ ID NO: 835867 - DNA, 75 bp, synthetic construct
  source 1..75: mol_type = other DNA
aaaaatgaccttgccctgcatctgcttgcggagctggatgaacgtgcaacccggctgaccctgtcacaatgggaa

SEQ ID NO: 835868 - DNA, 75 bp, synthetic construct
  source 1..75: mol_type = other DNA
aaattactgaccaccagaaccaaagatatccgggtggcgacctggtatatctgggcccgtctgcggcaggatggt

SEQ ID NO: 835869 - DNA, 75 bp, synthetic construct
  source 1..75: mol_type = other DNA
taactcgctgcatgaccctgattgctactacctgattcgtgcctttgacagctctgaaagcatggctacggttct

SEQ ID NO: 835870 - DNA, 75 bp, synthetic construct
  source 1..75: mol_type = other DNA
cgtcagtgccttctcgaaaacgcagccaggtggttatgccgacaatcacccggagctggaacagttctcaccgta

SEQ ID NO: 835871 - DNA, 75 bp, synthetic construct
  source 1..75: mol_type = other DNA
gagaactggactgggacgacatccgtctgcgcatcaacagtaaaacggccgctgacgtagagcgggcgctaaatg

SEQ ID NO: 835872 - DNA, 75 bp, synthetic construct
  source 1..75: mol_type = other DNA
gatgagcgtcagttagtgcaaaccatctgcgccttccgtctgcttgcgccggagattgaactgtcactctccacg

SEQ ID NO: 835873 - DNA, 75 bp, synthetic construct
  source 1..75: mol_type = other DNA
tggcaaagccgctactctgtctccttcccacggttgcggccatgtactggcggcattgaaccagcgtcgattatg

SEQ ID NO: 835874 - DNA, 75 bp, synthetic construct
  source 1..75: mol_type = other DNA
tttgctatggctgcaacagcattactggcaaagccgctactctgtctccttcccacgcctgcgtccatgtactgg

SEQ ID NO: 835875 - DNA, 75 bp, synthetic construct
  source 1..75: mol_type = other DNA
agtgattatctggaaccactggcccaacgggcgcaacgtctgacacgccaacgatttggcaataccgtcaacttc

SEQ ID NO: 835876 - DNA, 75 bp, synthetic construct
  source 1..75: mol_type = other DNA
tcgcctccatgcggctgtttgcccgtttatccctggatagcgccttgccggatcgcaccaccatcatgaatttcc

SEQ ID NO: 835877 - DNA, 75 bp, synthetic construct
  source 1..75: mol_type = other DNA
gtcaggcacgcaaaagttgcaggactggatgatgccgataccgtaacgcttaaggaagtgacagaagcattgttg

SEQ ID NO: 835878 - DNA, 75 bp, synthetic construct
  source 1..75: mol_type = other DNA
ggtgcaagttggggccgttagcgatcaggcgcgagcacagcaatatcaacagcaactggggaaaaaatttggcgt

SEQ ID NO: 835879 - DNA, 75 bp, synthetic construct
  source 1..75: mol_type = other DNA
tcactttctggccctggtatggcttgtactactgtcgccaaacagacttatgccctgcctgcaccacccgactta

SEQ ID NO: 835880 - DNA, 75 bp, synthetic construct
  source 1..75: mol_type = other DNA
ctgcgccacacatgcgggtaatgcgcgatttgataaagcagcatcgttcacccatggagttgatgacgatgctgc

SEQ ID NO: 835881 - DNA, 75 bp, synthetic construct
  source 1..75: mol_type = other DNA
gctgcttcggtaacagcggagctgtgggggcgatttttaatcacactgttcgagtgttgggcgcgtgcagatatc

SEQ ID NO: 835882 - DNA, 75 bp, synthetic construct
  source 1..75: mol_type = other DNA
tcttgtcggatgtgcgggctggggcgtttaacgacctttgcgcggcgtttgtcaggcacgcaaaagttgcaggac

SEQ ID NO: 835883 - DNA, 75 bp, synthetic construct
  source 1..75: mol_type = other DNA
gcatcgcggcaggaatgctcgcggcatgtacaagcgatgatggtcagcaacagacggtaagcgtgccgcaacctg

SEQ ID NO: 835884 - DNA, 75 bp, synthetic construct
  source 1..75: mol_type = other DNA
cggcggagaatgcggggctgaaagacactctatcagcagtgattgaccgcagtaacgagcctgattatcaaagca

SEQ ID NO: 835885 - DNA, 75 bp, synthetic construct
  source 1..75: mol_type = other DNA
tgtcaggcacgcaaaaattgcaggactggacgatggcgatctcgttacggtgaaagaagcgactgatgcgctgct

SEQ ID NO: 835886 - DNA, 75 bp, synthetic construct
  source 1..75: mol_type = other DNA
ggcagaatatgaccgctgtcatcgagccgttttatcccaaggcgggcaatggccgactgccctatccgctggaga

SEQ ID NO: 835887 - DNA, 75 bp, synthetic construct
  source 1..75: mol_type = other DNA
tcgcctccatgcggctgtttgcccgtttatccctggatagcgccatgccggagcgcaccaccatcatgaatttcc

SEQ ID NO: 835888 - DNA, 75 bp, synthetic construct
  source 1..75: mol_type = other DNA
tcgcctccatgcggctgtttgcccgattatccctggatagcgccttgccggaacgcaccaccatcatgaatttcc

SEQ ID NO: 835889 - DNA, 75 bp, synthetic construct
  source 1..75: mol_type = other DNA
tcgcctccatgcggctgtttgcccgattatccctggatagcgccatgccggatcgcaccaccatcatgaatttcc

SEQ ID NO: 835890 - DNA, 75 bp, synthetic construct
  source 1..75: mol_type = other DNA
agccatgcagcatcaggtggcacggcatcacgggcagttcaggaaatccgggcagcacgcgaacagtgggaacgt

SEQ ID NO: 835891 - DNA, 75 bp, synthetic construct
  source 1..75: mol_type = other DNA
actggctgatcgccgagcgtcccggcagggtaaaaaccttgaagcagcatccgcgcaagaacaaaacggccatca

SEQ ID NO: 835892 - DNA, 75 bp, synthetic construct
  source 1..75: mol_type = other DNA
tcgcctccatgcgtctgtttgcccgcttatccctggatagcgccctgccggaacgcaccaccatcatgaatttcc

SEQ ID NO: 835893 - DNA, 75 bp, synthetic construct
  source 1..75: mol_type = other DNA
tctgagcgaacgccttaaggaccaggcagccttttatgccgaatcggatgcgcagcgtgcggactggcagaaagg

SEQ ID NO: 835894 - DNA, 75 bp, synthetic construct
  source 1..75: mol_type = other DNA
agtaatgctctggaagcctggcgtaataacgaggcgaacaaacctaaatcccggggtggaaaatcagagacggaa

SEQ ID NO: 835895 - DNA, 75 bp, synthetic construct
  source 1..75: mol_type = other DNA
gccgagaccctgggctcctgtggttacgtttatctggctgtttatcctgcgaccgaaacggaaaatgtagtggtc

SEQ ID NO: 835896 - DNA, 75 bp, synthetic construct
  source 1..75: mol_type = other DNA
gccgacaccctcggctcctgtggttacgtttatctggctgtttatcctgcgaccgaaacggaaaatgtagtggtc

SEQ ID NO: 835897 - DNA, 75 bp, synthetic construct
  source 1..75: mol_type = other DNA
gccgaaaccctaggctcctgtggttacgtttatctggctgtttatcctgcgaccgaaacggaaaatgtagtggtc

SEQ ID NO: 835898 - DNA, 75 bp, synthetic construct
  source 1..75: mol_type = other DNA
gcaaaacgggttctgttgccgatgtcctcggctatggatattccaacggttccggcagagttatttaccaagttt

SEQ ID NO: 835899 - DNA, 75 bp, synthetic construct
  source 1..75: mol_type = other DNA
ggtcaaaaccagccatctgctagcaccgttcccggatgcgatgattgatactgcattttttgaccgcttccatgc

SEQ ID NO: 835900 - DNA, 75 bp, synthetic construct
  source 1..75: mol_type = other DNA
taccaagtggcatctgattactcgcatgattccctttgtggaaaacaactataacgtctgcgagcttggtccacg

SEQ ID NO: 835901 - DNA, 75 bp, synthetic construct
  source 1..75: mol_type = other DNA
atgaagctaaacatcgacctcggaaaatacgttattaccggaaccaaacacgatctgattcttagcgaaagagga

SEQ ID NO: 835902 - DNA, 75 bp, synthetic construct
  source 1..75: mol_type = other DNA
aaaccaggacgagtggcaagcaaatgatctgcggcggtgatgtcttctgccttgatggagaatgtgacaaagcca

SEQ ID NO: 835903 - DNA, 75 bp, synthetic construct
  source 1..75: mol_type = other DNA
gatgaaggaaaaaaaacgggcgaggaatgtatcagcccgggaggaacgcgaaccatcaccctcggaggcagggat

SEQ ID NO: 835904 - DNA, 75 bp, synthetic construct
  source 1..75: mol_type = other DNA
tggtgcaggagggtaaccggttgcattaccttacagaccgcgccggtatcagagggcggttcagcgatgcggatg

SEQ ID NO: 835905 - DNA, 75 bp, synthetic construct
  source 1..75: mol_type = other DNA
atgaagctaaacatcgacctcggaaaatacgttattaccggaaccaaacacgacctgattcttagtgaaagagga

SEQ ID NO: 835906 - DNA, 75 bp, synthetic construct
  source 1..75: mol_type = other DNA
gcagacgctacaggatattcagcagaatatcgagactttgggtgtgtcacttagcatggctattgaccagttagt

SEQ ID NO: 835907 - DNA, 75 bp, synthetic construct
  source 1..75: mol_type = other DNA
tcaactatttctttgaagaagggcagaagacttcgcccttctcattgatgacgcttaagcctatccagatgccga

SEQ ID NO: 835908 - DNA, 75 bp, synthetic construct
  source 1..75: mol_type = other DNA
tgatcgttccctggtggatattgtgctggcgctaccgttactgaatgctaacggcggcaaccttgatgatggaag

SEQ ID NO: 835909 - DNA, 75 bp, synthetic construct
  source 1..75: mol_type = other DNA
cgtaccatctggacctggcctttccgctgctgatgaaacaactggaactcatactcaccagcggtgaactgaatc

SEQ ID NO: 835910 - DNA, 75 bp, synthetic construct
  source 1..75: mol_type = other DNA
attatcccgacgaccataacgaccgcccctggtggggactgccctgcaccgtgacaccctgttttggcgcccgtc

SEQ ID NO: 835911 - DNA, 75 bp, synthetic construct
  source 1..75: mol_type = other DNA
actcatgctcaccagcggtgaactgaatccccgccatcagcataccgtaactctgtatgcgaagggactgacctg

SEQ ID NO: 835912 - DNA, 75 bp, synthetic construct
  source 1..75: mol_type = other DNA
attatcccaacgacaatgacgaccatccctggtggggactaccctgcacagtgacgccctgtttcggcgcccgtc

SEQ ID NO: 835913 - DNA, 75 bp, synthetic construct
  source 1..75: mol_type = other DNA
cgcctcccgacgacaatcacgaccgcccctggtgggggctgccctgcaccgtgacgccctgtttcggggcccgac

SEQ ID NO: 835914 - DNA, 75 bp, synthetic construct
  source 1..75: mol_type = other DNA
ttaaactatcattcaccgattttctgtgaggattttatcgtgtcagacacactctccgggacaacgcatcccgat

SEQ ID NO: 835915 - DNA, 75 bp, synthetic construct
  source 1..75: mol_type = other DNA
gccgacaccctcggctcctgtggttacgtttatatggctgtttatccgacactggcacccgcaaccacctcataa

SEQ ID NO: 835916 - DNA, 75 bp, synthetic construct
  source 1..75: mol_type = other DNA
ttgctgatgtttcccttttctggttgctgaatgcgctgaattcccacgccagtgtactgacggaatacgaacgtt

SEQ ID NO: 835917 - DNA, 75 bp, synthetic construct
  source 1..75: mol_type = other DNA
tgtatgcaaaaggtctgacctgcaaagctgacactctcggtagcggtggttacgtttatctggctgtttatccga

SEQ ID NO: 835918 - DNA, 75 bp, synthetic construct
  source 1..75: mol_type = other DNA
agcgacgcggatttacgccacctggaccaggcctttccggtactgctgaaacagctggagctgatgctgctttcc

SEQ ID NO: 835919 - DNA, 75 bp, synthetic construct
  source 1..75: mol_type = other DNA
gctgatactctcggcagttgtagtttcgtttatatggctgtttatgctacccgattctcaaatcaattaccgaaa

SEQ ID NO: 835920 - DNA, 75 bp, synthetic construct
  source 1..75: mol_type = other DNA
ctgcgcatttttttgtcctgagcgcctttatctggctggcatcccccgcctgtgctgacagtggaagcgactata

SEQ ID NO: 835921 - DNA, 75 bp, synthetic construct
  source 1..75: mol_type = other DNA
aaaacggcaagacgaaacacagcggttgcttgtcactggctgaagaagaatgggcaaacggagctgatgtggatt

SEQ ID NO: 835922 - DNA, 75 bp, synthetic construct
  source 1..75: mol_type = other DNA
gtgaagccgataccctcagcagttgtggttacgtttatctggctgtttatccgacaccggcagcgcccgcaatca

SEQ ID NO: 835923 - DNA, 75 bp, synthetic construct
  source 1..75: mol_type = other DNA
ctggagaatcagtattttgcgctggatatgcacagtgacgcggctaaatcgatgctggagtccgggtgctgcatg

SEQ ID NO: 835924 - DNA, 75 bp, synthetic construct
  source 1..75: mol_type = other DNA
gattcaggctctgttcgcggcttatcttgccgggcgcaaaatgtggcaggcgtcatgcggcacgaacggcagacc

SEQ ID NO: 835925 - DNA, 75 bp, synthetic construct
  source 1..75: mol_type = other DNA
ttttttcggtgtcaatatggcctcgacggggggcggtaaaacctttgctaacgcccgcattatgtatgcgcttgc

SEQ ID NO: 835926 - DNA, 75 bp, synthetic construct
  source 1..75: mol_type = other DNA
gcatcgcttccggcaattgcccgacataaaggttttaaccagcgagctacagatgcgaaatatcgctggcaggac

SEQ ID NO: 835927 - DNA, 75 bp, synthetic construct
  source 1..75: mol_type = other DNA
agaggcctgttcagcgatgcagatgcgtaccctctggaccaggcttttcccctgctgatgaaacaactgcaactc

SEQ ID NO: 835928 - DNA, 75 bp, synthetic construct
  source 1..75: mol_type = other DNA
agaggcctgttcagcgatgcagatgcgtaccctctggaccaggcatttcctctgctgatgaaacaactggaactc

SEQ ID NO: 835929 - DNA, 75 bp, synthetic construct
  source 1..75: mol_type = other DNA
tcatcaaaccgaacgcggtagcaaaaaacgtcattggtagtatctttgcgcgcttcgaagctgcagggttcaaaa

SEQ ID NO: 835930 - DNA, 75 bp, synthetic construct
  source 1..75: mol_type = other DNA
attatcccgacgataacaacgaccgcccctggtgggggctaccctgcaccgtgacgccctgttttggggcacgtc

SEQ ID NO: 835931 - DNA, 75 bp, synthetic construct
  source 1..75: mol_type = other DNA
gacctgcgaagccgacaccctcggcagctgtggttacgtttatctggctgtttatccaacatccgaaacgaaaac

SEQ ID NO: 835932 - DNA, 75 bp, synthetic construct
  source 1..75: mol_type = other DNA
agaggcctgttcagcgatgcagatgcgtaccctctggaccaggcctttccactgctgatgaaacaactgtaactc

SEQ ID NO: 835933 - DNA, 75 bp, synthetic construct
  source 1..75: mol_type = other DNA
aaattggtgatggcgctacttttcgtgagacgcacaaaaagtttgttgcgcgacgagcgttaatgttggctgaaa

SEQ ID NO: 835934 - DNA, 75 bp, synthetic construct
  source 1..75: mol_type = other DNA
ggccggttcagcgacgcggattcgtaccacctggaccaggcctttccgctgctgatgaaacaactggaactcatg

SEQ ID NO: 835935 - DNA, 75 bp, synthetic construct
  source 1..75: mol_type = other DNA
cgcttcccgacgacaacaaagacctcccctggtgggggctgccctgcaccgtgacaccttgttttggcgcccgtc

SEQ ID NO: 835936 - DNA, 75 bp, synthetic construct
  source 1..75: mol_type = other DNA
atgactcacatcacatggggcctgcagcggaatatcacgccgcgcctgggagcccgtctggtgcaggaggggaac

SEQ ID NO: 835937 - DNA, 75 bp, synthetic construct
  source 1..75: mol_type = other DNA
gccaagtacaaccaccagccttgcatcgttgattgccttttgctctatgctactggctaagcccgtacaggaaca

SEQ ID NO: 835938 - DNA, 75 bp, synthetic construct
  source 1..75: mol_type = other DNA
attatcccgacgacaacaacgaccgggggctaccctgcaccgtgacgccctgtttcggggcacgtctggtgcagg

SEQ ID NO: 835939 - DNA, 75 bp, synthetic construct
  source 1..75: mol_type = other DNA
agcataccgtcacgctgtatgcaaaagggctgacctgcgaagccgataccctcggcagctgtggttacgtttata

SEQ ID NO: 835940 - DNA, 75 bp, synthetic construct
  source 1..75: mol_type = other DNA
acggggtgtggtaaaacctttgcgaacgcccgcattatgtatgcacttgccgacgagcgagaagggtgccgcttt

SEQ ID NO: 835941 - DNA, 75 bp, synthetic construct
  source 1..75: mol_type = other DNA
atgaatgtcctaattatctcacgctgtacgaaaaatgctcgcgtggaaagctgccgtattattgatcagtttgcc

SEQ ID NO: 835942 - DNA, 75 bp, synthetic construct
  source 1..75: mol_type = other DNA
gcgcaatggtggcgcgcaccgctaagctggaacggctggatgcagcgccagacgccttttcgttattcgtcgtta

SEQ ID NO: 835943 - DNA, 75 bp, synthetic construct
  source 1..75: mol_type = other DNA
atgctgggaacgcgggtgttactctcttcggcgacgctgccgccaggcctgattcaggcgctgttcgcggcttat

SEQ ID NO: 835944 - DNA, 75 bp, synthetic construct
  source 1..75: mol_type = other DNA
atttccgtcaggaacgccgcttcaaagcgcgagctggcgagaaaaagcgcgtcagattgcccgtagggcgtgtaa

SEQ ID NO: 835945 - DNA, 75 bp, synthetic construct
  source 1..75: mol_type = other DNA
gcgcaatggtggcgtgcaccgctaagctggaacggctggatgcagcgccagacgccatttcgttattcccctttg

SEQ ID NO: 835946 - DNA, 75 bp, synthetic construct
  source 1..75: mol_type = other DNA
tctttaaattcgatgatcttgtgcgttgtggtgttgatgtcagtacgtgggaggattttcacccggaagagccca

SEQ ID NO: 835947 - DNA, 75 bp, synthetic construct
  source 1..75: mol_type = other DNA
aaggcacacaccaaaagaaatacaaaagaaactcggactgaacagcccgcgaattgtttattactgggcgacaaa

SEQ ID NO: 835948 - DNA, 75 bp, synthetic construct
  source 1..75: mol_type = other DNA
cgcaggatggacggctgtccgcgaaagagtttattggcgggcggtcaaagatgcgtgaagatcagagcacctacg

SEQ ID NO: 835949 - DNA, 75 bp, synthetic construct
  source 1..75: mol_type = other DNA
gtcagccaaaacacatcagggctacccgttctggtctggcgatgaatggcgcaaaggtgacccgaaacgaaaagg

SEQ ID NO: 835950 - DNA, 75 bp, synthetic construct
  source 1..75: mol_type = other DNA
atggcgtactctgatgaagtgattgctgcagcaaaatcactctatctgaaaaggcacaccccaaaagaaatacaa

SEQ ID NO: 835951 - DNA, 75 bp, synthetic construct
  source 1..75: mol_type = other DNA
acgattccgcgtgctggaaaaacaccactggcgcagtatgtcattccagtttatggcagagcgtatccgcagcat

SEQ ID NO: 835952 - DNA, 75 bp, synthetic construct
  source 1..75: mol_type = other DNA
acgcttattcaactaatggaggatggagatcgcaacgttgcgctgcggttatcatttacagtcctgactatggcg

SEQ ID NO: 835953 - DNA, 75 bp, synthetic construct
  source 1..75: mol_type = other DNA
taacgggaatacagtcatgcgctggattaaaacagcccgtgaccgcgacgaaatggaaatgctaatggaagctgc

SEQ ID NO: 835954 - DNA, 75 bp, synthetic construct
  source 1..75: mol_type = other DNA
ggcgaaacgcggtttattatcaacgcgccgcgctcctggttttggtgtcaatggcgagtcgttgctagtcgataa

SEQ ID NO: 835955 - DNA, 75 bp, synthetic construct
  source 1..75: mol_type = other DNA
tcgggcagaaaaatggcagcgatgtttcataaccagagaaatccggtggtggattatgtctggaacagtgttcgt

SEQ ID NO: 835956 - DNA, 75 bp, synthetic construct
  source 1..75: mol_type = other DNA
ctgaacgtctcccagcaggctgtacaggcatgggaagccggacggcggcggatacagatctccatactcccagcc

SEQ ID NO: 835957 - DNA, 75 bp, synthetic construct
  source 1..75: mol_type = other DNA
tttgctgttaggaggggatgtgctccacactgacagactgttaccagtgacgccatcaagtaatcacgttttgga

SEQ ID NO: 835958 - DNA, 75 bp, synthetic construct
  source 1..75: mol_type = other DNA
cccacgacaaataccgcacgacgtatttttccacacccagcgccaaaacccaccaggcttatctggtctggaacg

SEQ ID NO: 835959 - DNA, 75 bp, synthetic construct
  source 1..75: mol_type = other DNA
gcggactgacacaggaagattttgaccggttcgcgctggagcaccttttcggttaccagaaacaccttcgcgcta

SEQ ID NO: 835960 - DNA, 75 bp, synthetic construct
  source 1..75: mol_type = other DNA
aaggcgttgcgcgggcgctttatttaaaacgctataccccgcaggaaattgccagcgaacttaatctgcctaaca

SEQ ID NO: 835961 - DNA, 75 bp, synthetic construct
  source 1..75: mol_type = other DNA
gggatcgatacaaccggcattggtaaaggcgtttatgacctggtcagtaagtttgcaccgcgcgaagccacgccc

SEQ ID NO: 835962 - DNA, 75 bp, synthetic construct
  source 1..75: mol_type = other DNA
acatgaacgcccaggttggcatcacttcaccgggctttattggtgcggacgtttcgcaccttaacctgcataaaa

SEQ ID NO: 835963 - DNA, 75 bp, synthetic construct
  source 1..75: mol_type = other DNA
ttgaagatctggagcgttgtggtgttgacccccgaatatgggaggacttcaatcctgatgaaccggcgccgttcg

SEQ ID NO: 835964 - DNA, 75 bp, synthetic construct
  source 1..75: mol_type = other DNA
atgaactggaagtggcaggcggcacaaatcaaaaagctgtttggtcagtacaacatgacttacatcggcattgat

SEQ ID NO: 835965 - DNA, 75 bp, synthetic construct
  source 1..75: mol_type = other DNA
acgctgcccgcgccctgtatctgaaattcagtacaccaaaagagatagcggccacgctggggcttcctgtgcgta

SEQ ID NO: 835966 - DNA, 75 bp, synthetic construct
  source 1..75: mol_type = other DNA
gtgaatgccctgacgggatctggcgctacattatccggctggaagaggcggtggcgggtggcctgtctgcacggg

SEQ ID NO: 835967 - DNA, 75 bp, synthetic construct
  source 1..75: mol_type = other DNA
catgaagtggcctcggcaatggcgacccacgacaaataccgcacgacgtatttttccacacccagcgccaaaacc

SEQ ID NO: 835968 - DNA, 75 bp, synthetic construct
  source 1..75: mol_type = other DNA
gggtggcttcaatctggccaacatcgagaagctgcgcaaccgctacaacaccgccacattcgacatgctttacat

SEQ ID NO: 835969 - DNA, 75 bp, synthetic construct
  source 1..75: mol_type = other DNA
aactcctgtttaaaaaatacaacttcacctatctgggagtggacgttaccggtattggccagggtgtttttgaca

SEQ ID NO: 835970 - DNA, 75 bp, synthetic construct
  source 1..75: mol_type = other DNA
acattcagcattttgccatgcgcgtggccgtccctattcgttacgacctgaacaccaaaaataagctggtactga

SEQ ID NO: 835971 - DNA, 75 bp, synthetic construct
  source 1..75: mol_type = other DNA
gtattatccggtaatcacgaccaatcaggtatgatctggctacgtgctgcgctggcggctttttacgaagatgaa

SEQ ID NO: 835972 - DNA, 75 bp, synthetic construct
  source 1..75: mol_type = other DNA
gtatgcaaaaggactgacctgcgaagccgacaccctcggcagttgtggctacgtttatatggctgtttatccgac

SEQ ID NO: 835973 - DNA, 75 bp, synthetic construct
  source 1..75: mol_type = other DNA
agaggccggttcagagatgcggatgcgtaccacccggaccaggcctttccgctgctgatgaaacaactggaactc

SEQ ID NO: 835974 - DNA, 75 bp, synthetic construct
  source 1..75: mol_type = other DNA
tgcgaagccgacaccctcggcagctgtggttacgtttatctggctgtttatccgacacccgaaacgaaaaagtaa

SEQ ID NO: 835975 - DNA, 75 bp, synthetic construct
  source 1..75: mol_type = other DNA
tgcgaagccgacaccttcggctcctgtggttacgtttatctggctgtttatccgacgcccgaaacgaaaaagtaa

SEQ ID NO: 835976 - DNA, 75 bp, synthetic construct
  source 1..75: mol_type = other DNA
gctacgatattgctgaaccctggtgggggcttaaacgcaatatcacaccctgttttggcgctcgcctggtgcagg

SEQ ID NO: 835977 - DNA, 75 bp, synthetic construct
  source 1..75: mol_type = other DNA
cgtaccacctggaccaggcctttccgctgctgatgaaacaactggaaatcatgctcaccagcggtgaactgaatc

SEQ ID NO: 835978 - DNA, 75 bp, synthetic construct
  source 1..75: mol_type = other DNA
actcatgctcaccagcggtgaactgaatccccgccatcagcataccgtgactctgtatgcgaaaggactgacctg

SEQ ID NO: 835979 - DNA, 75 bp, synthetic construct
  source 1..75: mol_type = other DNA
actcatgctcaccagcggtgaactgaatccccgccatcagcataccgtgacactgtatgcgaatggactgacctg

SEQ ID NO: 835980 - DNA, 75 bp, synthetic construct
  source 1..75: mol_type = other DNA
actcatgctcaccagcggtgaactgaatccccgccatcagcataccgtaacgctgtatgcgaatggactgacctg

SEQ ID NO: 835981 - DNA, 75 bp, synthetic construct
  source 1..75: mol_type = other DNA
tgcgaagccgatacccttggcagttgtggttacgcttatctggctgtttatccgacgcccgaaacgaaaaagtaa

SEQ ID NO: 835982 - DNA, 75 bp, synthetic construct
  source 1..75: mol_type = other DNA
gaatgctgtcggcaccggtttgggaaatccggctcgatgaaatcaaattcaccgacaacacgctgggctttggta

SEQ ID NO: 835983 - DNA, 75 bp, synthetic construct
  source 1..75: mol_type = other DNA
gttggctggcaaaacaacatgttgtcacctggtgtgtgcagcaggaaggggaactgtggtgcgccaatgcctttt

SEQ ID NO: 835984 - DNA, 75 bp, synthetic construct
  source 1..75: mol_type = other DNA
cgcttcccgacgacaacaaagaccgcccctggtggggactgccctgcaccgtgacgccctgtttcggtgcccgtc

SEQ ID NO: 835985 - DNA, 75 bp, synthetic construct
  source 1..75: mol_type = other DNA
attcgcggaacccaaacactggcgcaaaaacaagtaccacaaggggaattgacaggtaaaggtaattatctctga

SEQ ID NO: 835986 - DNA, 75 bp, synthetic construct
  source 1..75: mol_type = other DNA
gaggaaaagggttttatcgtgctggtggaagaggaaaacagctttattactggtcgagttggccagcgtgtaagg

SEQ ID NO: 835987 - DNA, 75 bp, synthetic construct
  source 1..75: mol_type = other DNA
gaacatgacaaaaaaggcgatgaatttttcaacatcaactggagcgaaataacgacagagcacgttctgacgttg

SEQ ID NO: 835988 - DNA, 75 bp, synthetic construct
  source 1..75: mol_type = other DNA
cggggatgatttggctacgtgctgcgctggcggctttttacgaagatgaaccgcgcgtaacgattgacgtgtcac

SEQ ID NO: 835989 - DNA, 75 bp, synthetic construct
  source 1..75: mol_type = other DNA
ttgaaacgtttattgacgaatctcactttaaattcacacgcgatccttgcggaacgatggtttatacgcctccac

SEQ ID NO: 835990 - DNA, 75 bp, synthetic construct
  source 1..75: mol_type = other DNA
ttaacataattcgcggaacccaaacgctggcgcaaaaacaagtgccgcaaggggagttaacaggaaaaggaaatt

SEQ ID NO: 835991 - DNA, 75 bp, synthetic construct
  source 1..75: mol_type = other DNA
accgtcacgctgtatgcgaaagggctgacctgcgatgccgacaccctcgggtcctgtggttacgtttatctggct

SEQ ID NO: 835992 - DNA, 75 bp, synthetic construct
  source 1..75: mol_type = other DNA
ctgatgaaacaactggaactcatgctcaccagcggtgaactgaatccccgccatcagcataccgtcacgctgtat

SEQ ID NO: 835993 - DNA, 75 bp, synthetic construct
  source 1..75: mol_type = other DNA
accgtcacgctgtatgcgaaaggtctgacctgcaaagctgacaccctcggtagcggtggttacgtttatctggct

SEQ ID NO: 835994 - DNA, 75 bp, synthetic construct
  source 1..75: mol_type = other DNA
aacgaaagactcgccgattttgctgttgctgatgtttcccttttctggttgctgaatgcgctgaattcccacgcc

SEQ ID NO: 835995 - DNA, 75 bp, synthetic construct
  source 1..75: mol_type = other DNA
cgtcccgcgcgccggaagcgtcgacccatcaccataccgccatcatcatcggtcagggagctactgaataacgcg

SEQ ID NO: 835996 - DNA, 75 bp, synthetic construct
  source 1..75: mol_type = other DNA
ctttcttcctgctggtggaaaaacgactcatcgcttttaaccctgttgaccgtcccgcgcgccggaagcgtcgac

SEQ ID NO: 835997 - DNA, 75 bp, synthetic construct
  source 1..75: mol_type = other DNA
caagatcattatatccagtgataagcaggatgcaagatgatgtcaatagtatcaatcatgtttacatgagaacgt

SEQ ID NO: 835998 - DNA, 75 bp, synthetic construct
  source 1..75: mol_type = other DNA
cttattataagggatttgggaacaggtgcagccgttattcaaaggaaagttatcagtaatgatttgctatcttca

SEQ ID NO: 835999 - DNA, 75 bp, synthetic construct
  source 1..75: mol_type = other DNA
gtctttggctcctaagtgattcatttgtaagtgttgtttttggagagaaatggatattagtatcttcaattctct

SEQ ID NO: 836000 - DNA, 75 bp, synthetic construct
  source 1..75: mol_type = other DNA
ctgcaggcggtgcagaaacgtaacttctggcagcttcaggctgaaatcagtcaccggggacgttactgccatccg

SEQ ID NO: 836001 - DNA, 75 bp, synthetic construct
  source 1..75: mol_type = other DNA
atgtcagatgctctaacacagttaaacaatatccgtaccttacgttctcagactcgtgaaatgtcattagatgta

SEQ ID NO: 836002 - DNA, 75 bp, synthetic construct
  source 1..75: mol_type = other DNA
ccccgcgaagtatcgatatactaacgaaactggagagtcaaaaacatggtcaggtcaggggcgaatgccgaagcg

SEQ ID NO: 836003 - DNA, 75 bp, synthetic construct
  source 1..75: mol_type = other DNA
gacaaaaactgatccgcccgatgatcgttatcgtctcggcggtgatgagtgccaaattactttatgatagccacg

SEQ ID NO: 836004 - DNA, 75 bp, synthetic construct
  source 1..75: mol_type = other DNA
aactcaatatcgccatgacctttgttggttcaatgagcggcgcattgctggtgcagtacgtgcaggctgatgtgc

SEQ ID NO: 836005 - DNA, 75 bp, synthetic construct
  source 1..75: mol_type = other DNA
ttttatttcaaatttaataaatttttttgttgcaatgtattttactttaaaactattatcgggaaatttgatgca

SEQ ID NO: 836006 - DNA, 75 bp, synthetic construct
  source 1..75: mol_type = other DNA
ttgtatcggcctctatttcttgctgatgccaaagctgggtgaagaagatcgccagcgccggatgtacggtttacc

SEQ ID NO: 836007 - DNA, 75 bp, synthetic construct
  source 1..75: mol_type = other DNA
cggctcaatgagcggcgcgctgttggtgcagtatgttcaggccgatgtcttacggcagattttaccgatcctggt

SEQ ID NO: 836008 - DNA, 75 bp, synthetic construct
  source 1..75: mol_type = other DNA
tcagagtctggatgagattccgacgcgatgtgacggcagcttcacgtctgaaagtgctgaccggtgcattcaaag

SEQ ID NO: 836009 - DNA, 75 bp, synthetic construct
  source 1..75: mol_type = other DNA
tctacggcagtgacagtgaagatatggccgttgagcgccatgcactgtccctgcgctttgctcatgataacaatc

SEQ ID NO: 836010 - DNA, 75 bp, synthetic construct
  source 1..75: mol_type = other DNA
cccggtgtgtaccgggtggatatttatctgaatgatacgtatatctcaacccgtgacgtgcagtttcagatgagt

SEQ ID NO: 836011 - DNA, 75 bp, synthetic construct
  source 1..75: mol_type = other DNA
gtcgaaatggtggagacccgtctacggctggcagtggtggagctggaagaagaaaaagccaatatctttcagcta

SEQ ID NO: 836012 - DNA, 75 bp, synthetic construct
  source 1..75: mol_type = other DNA
tccgcgcgatggtggagatgatggcgaaagagcccgtcgagtgggggggcattggggcaatgggctggctttttt

SEQ ID NO: 836013 - DNA, 75 bp, synthetic construct
  source 1..75: mol_type = other DNA
atgcacaggttgaatctcaatggctatgaacccgaccgacaccatgaagccgcggtcgcattttgtattcacgcc

SEQ ID NO: 836014 - DNA, 75 bp, synthetic construct
  source 1..75: mol_type = other DNA
acggtggcaaccttgataatggcagtgagagcgagcgtccgcgtcgctggaaatcagaaagggtgaatgtgcagg

SEQ ID NO: 836015 - DNA, 75 bp, synthetic construct
  source 1..75: mol_type = other DNA
tcgcactggctttattttcaaccgcttcgatagcctgctccggcgtgccttatgctgcgttttactaccagccgt

SEQ ID NO: 836016 - DNA, 75 bp, synthetic construct
  source 1..75: mol_type = other DNA
atcggtgacgggccagaagaagacgccggagagatccgggaaggggaatataagccgacttttaacgtgctggaa

SEQ ID NO: 836017 - DNA, 75 bp, synthetic construct
  source 1..75: mol_type = other DNA
ttgagactaaaacccggactgatgcctacaagtgatgttatcacgctggcgcaacattgcatgtaccacggttta

SEQ ID NO: 836018 - DNA, 75 bp, synthetic construct
  source 1..75: mol_type = other DNA
ggctggcggtggtggagctggaagaggaaaaagctaatctctttcaacttttactgatgctgggcctgacgatgc

SEQ ID NO: 836019 - DNA, 75 bp, synthetic construct
  source 1..75: mol_type = other DNA
tgaagatagcgatggttacggactctattttccggatattcatttaccgcaggtgaggttcaaacaactgcgccg

SEQ ID NO: 836020 - DNA, 75 bp, synthetic construct
  source 1..75: mol_type = other DNA
gagaatgtggcgcaatataaagattcgctctatctggtgaaatatgtgtctgcggttgaaaaaacgctgtcggtc

SEQ ID NO: 836021 - DNA, 75 bp, synthetic construct
  source 1..75: mol_type = other DNA
tgttattgtctcagcggtgatgagtgccaaattactttttgatagccacggacaggagatcctccactggttggg

SEQ ID NO: 836022 - DNA, 75 bp, synthetic construct
  source 1..75: mol_type = other DNA
agacatttattgaaaaattagcaaaaaatagcgatagaacatattttaagttaaaatatcaagatcgcgaagagc

SEQ ID NO: 836023 - DNA, 75 bp, synthetic construct
  source 1..75: mol_type = other DNA
gctttcattaatatcgcgtaaattgcgttccttagggcaagattcattagcggatgatatatttaaaacatatat

SEQ ID NO: 836024 - DNA, 75 bp, synthetic construct
  source 1..75: mol_type = other DNA
aataatagcgccaaatacagatgactggcctcaacctgatcagcgtgaaatttacaactcgttaaaagcattcga

SEQ ID NO: 836025 - DNA, 75 bp, synthetic construct
  source 1..75: mol_type = other DNA
ataaatgtgaaaatacttaccgtgaaggttcgtttcccgaattaatgtgtctcaattctgatagtcgtcacgtcg

SEQ ID NO: 836026 - DNA, 75 bp, synthetic construct
  source 1..75: mol_type = other DNA
caatctgtgcggttcgcaacggccagagcgttgatacttccatgggaatgacgccgctggaaggcttgatgatgg

SEQ ID NO: 836027 - DNA, 75 bp, synthetic construct
  source 1..75: mol_type = other DNA
gtgaaattaaaagctatgtcattcagttcagtcgtgtcgatggtgtcagctggctggcgcgttttggagaaataa

SEQ ID NO: 836028 - DNA, 75 bp, synthetic construct
  source 1..75: mol_type = other DNA
attatcctgaaaatatgccatatggtaataatgttcagtatttccagagtgaagatggtaaggatttctacgaat

SEQ ID NO: 836029 - DNA, 75 bp, synthetic construct
  source 1..75: mol_type = other DNA
ccgtttgtgggccgtatctacgactggtacaagaaaaacaaccctgataccaccttcaccgtcgagaacgatccg

SEQ ID NO: 836030 - DNA, 75 bp, synthetic construct
  source 1..75: mol_type = other DNA
gtgaaagatgccgtcgcggcggtgaagtcccgccagaatggaaagccggtacagcctgcggatattgccgattac

SEQ ID NO: 836031 - DNA, 75 bp, synthetic construct
  source 1..75: mol_type = other DNA
agcaagagaacataaatgggatgattcattaataaaagaaagaacagatagcttggcgttagaaacgtttgctaa

SEQ ID NO: 836032 - DNA, 75 bp, synthetic construct
  source 1..75: mol_type = other DNA
atcctttgaggctggtacgggttttcaaagtctgccgtctaaaatgaagtgggcgtgcctggcacgtggtgtgaa

SEQ ID NO: 836033 - DNA, 75 bp, synthetic construct
  source 1..75: mol_type = other DNA
ccatcagtgatgaagacagagccgcacttacccgatggatggcatacatcagtcaggtgaaaaaaatggaaccat

SEQ ID NO: 836034 - DNA, 75 bp, synthetic construct
  source 1..75: mol_type = other DNA
taaggtaaatcctatcgatattcttgctcgctcgggaggcttacgaagcactgatcagctgcagattttcaaaaa

SEQ ID NO: 836035 - DNA, 75 bp, synthetic construct
  source 1..75: mol_type = other DNA
caacaacaacttgctttctgaaattaaaatattctttagcaacttctgcaatgttcagacattaaacgctgcgaa

SEQ ID NO: 836036 - DNA, 75 bp, synthetic construct
  source 1..75: mol_type = other DNA
ccactggaacaagtgcagattgatcacacggtcatcgacctgatcgtggtggacgagcgcgaccggcaaccgatt

SEQ ID NO: 836037 - DNA, 75 bp, synthetic construct
  source 1..75: mol_type = other DNA
tacggcagattttgcccattctggtaatttgtatcggcctctatttcttgctgatgccaaagctgggtgaagaag

SEQ ID NO: 836038 - DNA, 75 bp, synthetic construct
  source 1..75: mol_type = other DNA
gacgatctgtttgtgaccaacgtaaagtatattcagcgcggcattgacgaaaaccttgccaattcagcattgatt

SEQ ID NO: 836039 - DNA, 75 bp, synthetic construct
  source 1..75: mol_type = other DNA
agggtaatggctattactatgcgccgacgctgctggctggcgcattacaggacgatgccatcgtgcaaaaagagg

SEQ ID NO: 836040 - DNA, 75 bp, synthetic construct
  source 1..75: mol_type = other DNA
gcaatggcatcggattttacaaaaagcccgccttgccgcgccgattaccgatgctcaggtcaggctggcgctggg

SEQ ID NO: 836041 - DNA, 75 bp, synthetic construct
  source 1..75: mol_type = other DNA
atgcaaaagacgtaagaccaatatttgataccagacctctccgagccgccatgattgtatttctcatgatgcagg

SEQ ID NO: 836042 - DNA, 75 bp, synthetic construct
  source 1..75: mol_type = other DNA
ttcggctgcggcgagcggactctcctttctcaaaggcggtaaccccgttatccacagaatccggggataacccgg

SEQ ID NO: 836043 - DNA, 75 bp, synthetic construct
  source 1..75: mol_type = other DNA
tcgaccacatccactactacgccgacgccctcaagccgtggattgcccggcgcgagcgcttgcccgccttcctga

SEQ ID NO: 836044 - DNA, 75 bp, synthetic construct
  source 1..75: mol_type = other DNA
ccgcgcaaggcgtggccaccctgcccgacgaggcatgggcgcaagcccggcaccggacggaaatcatcgggccac

SEQ ID NO: 836045 - DNA, 75 bp, synthetic construct
  source 1..75: mol_type = other DNA
ttattacaatgaagatttcgtagaaaaggatagcaatgatgttgtttgcgaaatttttatccccgttcgtccggt

SEQ ID NO: 836046 - DNA, 75 bp, synthetic construct
  source 1..75: mol_type = other DNA
gaaacgcatcggtaacctgccagcggtacgcgtcccgtacttcccggcggatgcgatgctcatcacgaagctgga

SEQ ID NO: 836047 - DNA, 75 bp, synthetic construct
  source 1..75: mol_type = other DNA
caggatgtggcggtcggctggctgcagaaataccgcaatgaagccccggcgcgcgtgatgagcaaggtcactgac

SEQ ID NO: 836048 - DNA, 75 bp, synthetic construct
  source 1..75: mol_type = other DNA
tgagcaaggtcactgacgaggaaggccgcaccacctctgaggttatccgcgtgggtaagggcggtgattatgtaa

SEQ ID NO: 836049 - DNA, 75 bp, synthetic construct
  source 1..75: mol_type = other DNA
tgttgatgtcaccgtcgatggcagtgagcacgtctacccgatgcagattcgcgggggcggaatggatgaaatgtg

SEQ ID NO: 836050 - DNA, 75 bp, synthetic construct
  source 1..75: mol_type = other DNA
cttacaatcccactactaccggacataaagggcaaattaagcgtgctctgcaaacgctggtggcggcaaaaaaac

SEQ ID NO: 836051 - DNA, 75 bp, synthetic construct
  source 1..75: mol_type = other DNA
catggtggggatttcgcgaccggtggttaaacacagttttctggttaagcaaacggaagacattccgcaggtgct

SEQ ID NO: 836052 - DNA, 75 bp, synthetic construct
  source 1..75: mol_type = other DNA
ttacgaacagtcaaagagtttaaatcggtaggcctagatactgtatacaacatagaagtcgaaggtgatcattcc

SEQ ID NO: 836053 - DNA, 75 bp, synthetic construct
  source 1..75: mol_type = other DNA
agagctttatcatgacagtggcttcagagtggaacctctttttgccagacgttctgtgtcttgtaagggggacac

SEQ ID NO: 836054 - DNA, 75 bp, synthetic construct
  source 1..75: mol_type = other DNA
ccgatatgatcatcagtcagaaacgcatgggtggcctgcaggccgtacgtgcgccgttcttcccgccgaatgcgc

SEQ ID NO: 836055 - DNA, 75 bp, synthetic construct
  source 1..75: mol_type = other DNA
cgtggagaactacgagtcaatgaacattgattacgtggtggaagactacgccgccggttgtctggtggaaaaaat

SEQ ID NO: 836056 - DNA, 75 bp, synthetic construct
  source 1..75: mol_type = other DNA
gtatttcccattacaggagatggaagccttcctcggtgcggaagggcgttctgagtttgtatgtggtgattttgc

SEQ ID NO: 836057 - DNA, 75 bp, synthetic construct
  source 1..75: mol_type = other DNA
gcggtgggatggcaaaaccggttgccatgttccaaagtggccgcagtgtggttgtatttatggaccgcagcgaaa

SEQ ID NO: 836058 - DNA, 75 bp, synthetic construct
  source 1..75: mol_type = other DNA
ctgccagatttcgtccgcctggcagaagcctatggtcatgttggtatccagatttcgcgcccggatgagctggaa

SEQ ID NO: 836059 - DNA, 75 bp, synthetic construct
  source 1..75: mol_type = other DNA
aaacgtcattggtaatatctttgcgcgctttgaagctgcggggttcaaaattgtcggcaccaaaatgctgcacct

SEQ ID NO: 836060 - DNA, 75 bp, synthetic construct
  source 1..75: mol_type = other DNA
atccagatttaagcgaagaagaggccgcgatgcttgcagctgacggaccgcgttacaaagcgatcggcaatagta

SEQ ID NO: 836061 - DNA, 75 bp, synthetic construct
  source 1..75: mol_type = other DNA
cggtgattgaagctgccggagaaggagatgtcatcttttgcgatccgccgtatgaaccgcttccaaatacagagg

SEQ ID NO: 836062 - DNA, 75 bp, synthetic construct
  source 1..75: mol_type = other DNA
aaggtgcattgaaggcaattgcatttgaactggaaaaacggaatttaaatgacagtgtggccttaattggccacc

SEQ ID NO: 836063 - DNA, 75 bp, synthetic construct
  source 1..75: mol_type = other DNA
aagagtcgggattattaggtatttccggtctttcttcggatttacgtgttctggaaaaagcctggcatgaaggtc

SEQ ID NO: 836064 - DNA, 75 bp, synthetic construct
  source 1..75: mol_type = other DNA
acggtcagagtgttgatacttcaatgggaatgacgccgctggaaggcttgatgatgggtacccgcagtggcgatg

SEQ ID NO: 836065 - DNA, 75 bp, synthetic construct
  source 1..75: mol_type = other DNA
caatctcaaaaactgttaccgccgatattccgatcgttggcgatgcgcggctggtgctggatcaaatgctggagt

SEQ ID NO: 836066 - DNA, 75 bp, synthetic construct
  source 1..75: mol_type = other DNA
atttttgccgtcggggtacgttttgatgatcgaacgacgaacaatctggcaaagtactgcccaaatgccactgtt

SEQ ID NO: 836067 - DNA, 75 bp, synthetic construct
  source 1..75: mol_type = other DNA
gtactggtggtgaatctcaataaccgctatctggggatggtgaaacagtggcaggacatgatctattccggccgt

SEQ ID NO: 836068 - DNA, 75 bp, synthetic construct
  source 1..75: mol_type = other DNA
gaccaacccggcgaacgctctggcgggaactctgcgcgcagactacgctgacagcctgaccgaaaacggcacaca

SEQ ID NO: 836069 - DNA, 75 bp, synthetic construct
  source 1..75: mol_type = other DNA
cgttatctggggatggtgaagcagtggcaggacatgatctattctggtcgtcattcacaatcttatatgcagtca

SEQ ID NO: 836070 - DNA, 75 bp, synthetic construct
  source 1..75: mol_type = other DNA
cggttgtctacgtaggcggtggggcaatcacggcgggctgccatctgcagttgaaagaagcggtggaggcgttga

SEQ ID NO: 836071 - DNA, 75 bp, synthetic construct
  source 1..75: mol_type = other DNA
cggtcagcgaaatgaaaggggaaaaaattggcatcggtgtcaccggctccatcgccagcaccaccgacaccgccg

SEQ ID NO: 836072 - DNA, 75 bp, synthetic construct
  source 1..75: mol_type = other DNA
aaaacccgctgctgcaggatgtgaataaaggctggctgcagaaaatccgtgaagatgcaccggatcacgtcatgg

SEQ ID NO: 836073 - DNA, 75 bp, synthetic construct
  source 1..75: mol_type = other DNA
cgaaacgtgaccggattgaaaattttgaatccgttaacgaagcctatgtggttgaagactatcgctgcgctgcac

SEQ ID NO: 836074 - DNA, 75 bp, synthetic construct
  source 1..75: mol_type = other DNA
ccgtcagcgctgtggtgaagtgttccgctatgcaattgtcactggcagagctgactataaccccgctcccgatct

SEQ ID NO: 836075 - DNA, 75 bp, synthetic construct
  source 1..75: mol_type = other DNA
agaaatttgaccattgcgccatttatctgttgattgccggaacctacacgccgtttttactggtggggctgggtt

SEQ ID NO: 836076 - DNA, 75 bp, synthetic construct
  source 1..75: mol_type = other DNA
tggcagttaagctcgcggcgggcagcgttaccttactggcggtaggcggtgtggtttactcgctcggggtgattt

SEQ ID NO: 836077 - DNA, 75 bp, synthetic construct
  source 1..75: mol_type = other DNA
gcgtctgaacggtgtggcagttgaagaactgtccagcaagttcaccgtggagccgtctgtgcagcagacgctgga

SEQ ID NO: 836078 - DNA, 75 bp, synthetic construct
  source 1..75: mol_type = other DNA
gtggtacagggggctccggatatcacccgggaaatccagcaggatattgcccggcgaatgagagcggaaccatga

SEQ ID NO: 836079 - DNA, 75 bp, synthetic construct
  source 1..75: mol_type = other DNA
gatgctggacgcggggcgttgtactttctacaccccggcatcgcttggagatgtgaaactggaactttttgcggt

SEQ ID NO: 836080 - DNA, 75 bp, synthetic construct
  source 1..75: mol_type = other DNA
cacgcggtcattctggtgtcgcctgccgtggtacagggggcaccggatatcacccgggaaatccagcaggatatt

SEQ ID NO: 836081 - DNA, 75 bp, synthetic construct
  source 1..75: mol_type = other DNA
ccgcttcgctggtaaggaaaagatgctgtctattggcgtttaccccgatgtaacgcttgccgacgctcgtgagaa

SEQ ID NO: 836082 - DNA, 75 bp, synthetic construct
  source 1..75: mol_type = other DNA
gctggcagtattatgaacggtggaagactgaacaagccgcgcaggcagcagctgcccgacaggtcacagaggaac

SEQ ID NO: 836083 - DNA, 75 bp, synthetic construct
  source 1..75: mol_type = other DNA
gtgacggatatttcaccgacagagcggcaggtgtttccgctgccggcagggcgcaatgtgtttctggccgggctg

SEQ ID NO: 836084 - DNA, 75 bp, synthetic construct
  source 1..75: mol_type = other DNA
gggattctgttcaaactgaccattgcgcaccgatttaaaatcttgtcgctggtaacctacctgacaatgggctgg

SEQ ID NO: 836085 - DNA, 75 bp, synthetic construct
  source 1..75: mol_type = other DNA
ttcctgacgctgattaacgtcacaccagtgactgagcagtctggtcagttgctggggctgggtgttggcagcacc

SEQ ID NO: 836086 - DNA, 75 bp, synthetic construct
  source 1..75: mol_type = other DNA
ttatcaagcgccagtcgctcgatttcattatggccggtttcaacggtatcacccgtgcggcgacctccagccgta

SEQ ID NO: 836087 - DNA, 75 bp, synthetic construct
  source 1..75: mol_type = other DNA
caggaaaacagtgaaaaactcgctgccgatatgatcatcagtcagaaacgcatgggtggcctgcaggccgtgcgt

SEQ ID NO: 836088 - DNA, 75 bp, synthetic construct
  source 1..75: mol_type = other DNA
ccgatatgatcatcagtcagaaacgcatgggtggcctgcaggccgtgcgtgcgccgttcttcccgccgaatgcac

SEQ ID NO: 836089 - DNA, 75 bp, synthetic construct
  source 1..75: mol_type = other DNA
tgaatccgttaacgaagcctacgtggttgaggactaccgttgcgctgcactggtggaaaacatccagattggcga

SEQ ID NO: 836090 - DNA, 75 bp, synthetic construct
  source 1..75: mol_type = other DNA
cctgtccatctactggcaggaagacccccgccgccgttctgtcatcgacaacccgaaacgtgaccggattgaaaa

SEQ ID NO: 836091 - DNA, 75 bp, synthetic construct
  source 1..75: mol_type = other DNA
tggccgctgacgtcatcatcagccagaaacgcatcggtaacctgccggcggtacgcgtcccgtacttcccggcgg

SEQ ID NO: 836092 - DNA, 75 bp, synthetic construct
  source 1..75: mol_type = other DNA
atcgccagcaccaccgacactgccggtggcaccgagcgtcagccgaaggacttctcgaagctggcgtcaaacaag

SEQ ID NO: 836093 - DNA, 75 bp, synthetic construct
  source 1..75: mol_type = other DNA
cgcaccgattcaaaattttatctctggtgacctatctggcgatgggctggttgtcgctggtggtaatttatgaaa

SEQ ID NO: 836094 - DNA, 75 bp, synthetic construct
  source 1..75: mol_type = other DNA
cacaccgggcgcggtgaaagtcggtaaaggtggcgaatatgccaacctggacgccgtggtgatggatgccgttaa

SEQ ID NO: 836095 - DNA, 75 bp, synthetic construct
  source 1..75: mol_type = other DNA
aagcagcaggaaaacaccgagtcgctcgcggcggatatcatcatcagccagaagcgcatcggcaacctgcctgcc

SEQ ID NO: 836096 - DNA, 75 bp, synthetic construct
  source 1..75: mol_type = other DNA
agggagcaggacaacagcgaaatgctggccgctgacgtcatcatcagccagaaacgcatcggtaacctgccagcg

SEQ ID NO: 836097 - DNA, 75 bp, synthetic construct
  source 1..75: mol_type = other DNA
ccgatgggctacggtggcccacacgcggcattctttgcggcgaaagatgaatacaaacgctcaatgccgggccgt

SEQ ID NO: 836098 - DNA, 75 bp, synthetic construct
  source 1..75: mol_type = other DNA
gtgttcaaaaaattgttgggtaaatttattaaagagaatacttcactacctgcttcatttgcgccgctgtatgta

SEQ ID NO: 836099 - DNA, 75 bp, synthetic construct
  source 1..75: mol_type = other DNA
atcgtttaaaagtaatttcacgcgagctaggaaaacagggaccgggaagttctaaaaccgcatttgccaggagaa

SEQ ID NO: 836100 - DNA, 75 bp, synthetic construct
  source 1..75: mol_type = other DNA
taccaggcgctgttaacccggctggactatctcaccaaagtcgagagcaaagtatttggtgaaggaggccgtaac

SEQ ID NO: 836101 - DNA, 75 bp, synthetic construct
  source 1..75: mol_type = other DNA
aacgacaaccttttgcctcgcgaagaagcagaaattttccacgataaatggaaaaagaaaatcgatggcgaaaca

SEQ ID NO: 836102 - DNA, 75 bp, synthetic construct
  source 1..75: mol_type = other DNA
gctctctgaactggagcaaaagttagcggtacaactgcccgccggagtctggcagggttacgatctggagctttc

SEQ ID NO: 836103 - DNA, 75 bp, synthetic construct
  source 1..75: mol_type = other DNA
ggcaaattgcggcggtaacgcttcttctcagccccagaactgagcaatctgtggcggatgaaacctatatcttta

SEQ ID NO: 836104 - DNA, 75 bp, synthetic construct
  source 1..75: mol_type = other DNA
gtcaggcaaggccatcaacgccaaggtacgtctgtacgggcgcatcggtcaggcgctgatcgacgccaagcaatc

SEQ ID NO: 836105 - DNA, 75 bp, synthetic construct
  source 1..75: mol_type = other DNA
tgggtacgccagcccgcgctgtacgcagtgttagtgacgacgagttacactggaaacggttgaataccaaagagt

SEQ ID NO: 836106 - DNA, 75 bp, synthetic construct
  source 1..75: mol_type = other DNA
caagaatctggcgacgctgaaagcgggcaatgcgcgagtcgtgaacaccaatgcgatgtcttttctaatgcaaaa

SEQ ID NO: 836107 - DNA, 75 bp, synthetic construct
  source 1..75: mol_type = other DNA
cccgaacagcgaccagtacctggaagagcgtttgcagctgctggacgagcagttggccaccgtcacccgcctggc

SEQ ID NO: 836108 - DNA, 75 bp, synthetic construct
  source 1..75: mol_type = other DNA
atatctccgaccagtacgcgccgttcagcacccgcgtggtgaatgtcggcgtccgcgattccacctatgtgctcg

SEQ ID NO: 836109 - DNA, 75 bp, synthetic construct
  source 1..75: mol_type = other DNA
gacagccatggtcctgccgcacgtcaagatcaccgaactgctgctcgaagtcgatgagtggacgggcttcacccg

SEQ ID NO: 836110 - DNA, 75 bp, synthetic construct
  source 1..75: mol_type = other DNA
actcgataactgggagcgtgaggttgggaatttcttcctgcgcgagcaggtgtcgattttaaaactctacggtaa

SEQ ID NO: 836111 - DNA, 75 bp, synthetic construct
  source 1..75: mol_type = other DNA
gaatttctgaacattatcttaatcatcttgatgtgatcattaaagaattcgaactaccatcaacatggcaaccca

SEQ ID NO: 836112 - DNA, 75 bp, synthetic construct
  source 1..75: mol_type = other DNA
ttgcgcagcagttaagcgccatcgtggacaaaagcttctcagactccagctacggcttccggccggggcgcaacg

SEQ ID NO: 836113 - DNA, 75 bp, synthetic construct
  source 1..75: mol_type = other DNA
ctacaacgccgacgtgcattggccagagatatgctctgcgctactcccgatttgaactgtgcggattttgagacc

SEQ ID NO: 836114 - DNA, 75 bp, synthetic construct
  source 1..75: mol_type = other DNA
accgcaggtaacttcaccatgacttaccagtctgatgatgttcgtgtgttctctgttcagttcagtgcgtaccct

SEQ ID NO: 836115 - DNA, 75 bp, synthetic construct
  source 1..75: mol_type = other DNA
aaagaagaaatgagcaaaagattatcatcgacaaaacctatacccctacagttggatcgctggctgatcataaaa

SEQ ID NO: 836116 - DNA, 75 bp, synthetic construct
  source 1..75: mol_type = other DNA
agtgttcgatttaatgaaaaattagtccatcacccttattatgattcttgggcttttggcccatatattcgtaag

SEQ ID NO: 836117 - DNA, 75 bp, synthetic construct
  source 1..75: mol_type = other DNA
gtctattatccgacggtgcgtgatagccagttaatgacttttgaagaaacgttggatgaattactgaaccgacgc

SEQ ID NO: 836118 - DNA, 75 bp, synthetic construct
  source 1..75: mol_type = other DNA
ttgggtttggcgtcaatgtccaaaaagcgaatcatgtcatccactttacccgctgttggaatccggcgaaggaag

SEQ ID NO: 836119 - DNA, 75 bp, synthetic construct
  source 1..75: mol_type = other DNA
aaaatccggcggcattaataacccaatcggcaaaagccattcaggcgcaatttaaagtcgcatgtaccggaacac

SEQ ID NO: 836120 - DNA, 75 bp, synthetic construct
  source 1..75: mol_type = other DNA
tccctatacatttttgggtgaagatgctgccggtgttattgcccccgaagaacatgaacaggcgttgtttgatgc

SEQ ID NO: 836121 - DNA, 75 bp, synthetic construct
  source 1..75: mol_type = other DNA
gtcaaaccaacttcattgtcattacgtctgcgtaaagcaacggttgccgatactgctgttatcgaaattgagccc

SEQ ID NO: 836122 - DNA, 75 bp, synthetic construct
  source 1..75: mol_type = other DNA
agagcgttggccagagatatgctcaaaggggcaagcgatctgaccgccgcagattttgaagcggtgctggcgggc

SEQ ID NO: 836123 - DNA, 75 bp, synthetic construct
  source 1..75: mol_type = other DNA
gcggccaaatccgcattattggcggtcagtggcgaggccgtaaactcccggttccgaatagccctggtctgcgcc

SEQ ID NO: 836124 - DNA, 75 bp, synthetic construct
  source 1..75: mol_type = other DNA
cttaacggaagcgctggcagaaaactgcccggtcctgcaacgacaggttggtgacgaattttttcgggccatggt

SEQ ID NO: 836125 - DNA, 75 bp, synthetic construct
  source 1..75: mol_type = other DNA
tgacgatgattttacttacagacccaaaaagaaaactcacaccgagccaaagaaagagggtgttaaagtcagacg

SEQ ID NO: 836126 - DNA, 75 bp, synthetic construct
  source 1..75: mol_type = other DNA
gaccataaaaacacacagtgccccgccactgatgatgagatggaccccttcgatgattaccttgatgatgaagaa

SEQ ID NO: 836127 - DNA, 75 bp, synthetic construct
  source 1..75: mol_type = other DNA
tgccgctggccgtggccaccgactgcaaccggtacctgaacgaccggctgacgctgctggaaacacagcttgcca

SEQ ID NO: 836128 - DNA, 75 bp, synthetic construct
  source 1..75: mol_type = other DNA
tgaacaagggcgaggcgcgcaatgcgctggcccgtgccgtgtttttcaaccgcctgggtgaaatccgcgaccgca

SEQ ID NO: 836129 - DNA, 75 bp, synthetic construct
  source 1..75: mol_type = other DNA
atgccggcaataacctggcgcaggcaacgttgcaggccagagagcatgactgctgttttgaacctggctctctgt

SEQ ID NO: 836130 - DNA, 75 bp, synthetic construct
  source 1..75: mol_type = other DNA
tattatggcgtcggcgtcgagattgacctctggctgcacgctggatttgacgtggtggtcaacggctcacgcgcc

SEQ ID NO: 836131 - DNA, 75 bp, synthetic construct
  source 1..75: mol_type = other DNA
tatatcactatcataggtatcggtggtgatgttcgtgaggcgaaagaagggaagtttgatgtcattatgatttca

SEQ ID NO: 836132 - DNA, 75 bp, synthetic construct
  source 1..75: mol_type = other DNA
gaaaatgaaaccggcgctgaaaaaaacgctgatggcggtagcgtggctgagcgcagtacccgcagcccaggctgc

SEQ ID NO: 836133 - DNA, 75 bp, synthetic construct
  source 1..75: mol_type = other DNA
tgatggccgggatggatatcaccccagaacgtgaaaagcaggtgctgtttaccaccccttactatgacaactctg

SEQ ID NO: 836134 - DNA, 75 bp, synthetic construct
  source 1..75: mol_type = other DNA
atacaccagcgttgatcagctgaaaggcaaaaaagtcggcgtacagaatggtacgactcaccagaaattcattat

SEQ ID NO: 836135 - DNA, 75 bp, synthetic construct
  source 1..75: mol_type = other DNA
taattgcaggttttagtctttccgccacagctgccgaaaccattcgttttgccaccgaagcctcctatcctccgt

SEQ ID NO: 836136 - DNA, 75 bp, synthetic construct
  source 1..75: mol_type = other DNA
cgcccgagaagttcaccagcctcaagcagtccagcgaattgccgctggccgtggccaccgactgcgaacaatatc

SEQ ID NO: 836137 - DNA, 75 bp, synthetic construct
  source 1..75: mol_type = other DNA
ctggcggatgcgatttgcgatctggtttccaccggtgccacgctggaagctaacggcctgcgcgaagtcgaagtt

SEQ ID NO: 836138 - DNA, 75 bp, synthetic construct
  source 1..75: mol_type = other DNA
cgtatcgccacctcttatcctcacctgctcaagcgttatctcgaccagaaaggcatctcttttaaatcctgctta

SEQ ID NO: 836139 - DNA, 75 bp, synthetic construct
  source 1..75: mol_type = other DNA
tgacctcgggattattggcgaaaacgtgctggaagaagagctgcttaaccgccgcgcccagggtgaagatccgcg

SEQ ID NO: 836140 - DNA, 75 bp, synthetic construct
  source 1..75: mol_type = other DNA
tccggcaaactggtcattacatcgggaaaaagtggcgggtcaggtggcttatcggctgtatcaacgcgaagcaca

SEQ ID NO: 836141 - DNA, 75 bp, synthetic construct
  source 1..75: mol_type = other DNA
catcagaaggagaaaccccatgcctgcttgtcagcttcgcccgactacgcagtacgacaccaacgcagtttacgc

SEQ ID NO: 836142 - DNA, 75 bp, synthetic construct
  source 1..75: mol_type = other DNA
aagtgatgattcacgcgaactgctggcccgctgcgggattaaaatcaacctgcacacccagcgcctgattgccct

SEQ ID NO: 836143 - DNA, 75 bp, synthetic construct
  source 1..75: mol_type = other DNA
gagcacatcaacctgaccggtgattacctatggcgcagcagcgccaagatcggcgcggggaagttcaggccgcta

SEQ ID NO: 836144 - DNA, 75 bp, synthetic construct
  source 1..75: mol_type = other DNA
gctgcgcgagttgggccgcatcgagcgcacgctgttcatcctcgactggctgcaaagcgtcgagctacgccgccg

SEQ ID NO: 836145 - DNA, 75 bp, synthetic construct
  source 1..75: mol_type = other DNA
atatggcagcagcccaggacggactttctacacccacatctccgaccaatacgcgccattccacaccaaggtggt

SEQ ID NO: 836146 - DNA, 75 bp, synthetic construct
  source 1..75: mol_type = other DNA
gagtttcggtatcgccctgttcctgaccgagcttgcgcctggctggctgaagcgcccgctgggtatcgccattga

SEQ ID NO: 836147 - DNA, 75 bp, synthetic construct
  source 1..75: mol_type = other DNA
gacggcgatgatcctaccgcacgtcaagatcaccgaattgctgctggaggtagacgaatggacgggcttcacccg

SEQ ID NO: 836148 - DNA, 75 bp, synthetic construct
  source 1..75: mol_type = other DNA
accggaattccttgccgtgctcaagctgcgggccgcgcccgccgccaaaaacgtgcttgatgccattgaggtgct

SEQ ID NO: 836149 - DNA, 75 bp, synthetic construct
  source 1..75: mol_type = other DNA
atgaatgagtttaagcgttttgaagaccggctggcgggacttattgaatcgctgtcaccgtcagggcgtcggcga

SEQ ID NO: 836150 - DNA, 75 bp, synthetic construct
  source 1..75: mol_type = other DNA
gttaaacaaagaatatggcgatgtggtggagtccgggctgctttttgcggatccagttgttgtggaacgtgagac

SEQ ID NO: 836151 - DNA, 75 bp, synthetic construct
  source 1..75: mol_type = other DNA
gtgaggctctggatgcctgggtatgcagaccaggaatgacacaggagcaggcgacgatattaatcacggaagcat

SEQ ID NO: 836152 - DNA, 75 bp, synthetic construct
  source 1..75: mol_type = other DNA
gcgcgtcctctgctcggctttaccggtgaggatgtgcagatgattgaagagattattctggctcacctgaatcgc

SEQ ID NO: 836153 - DNA, 75 bp, synthetic construct
  source 1..75: mol_type = other DNA
aacgtcttgccggtctgattgccagcctgtcaccggcggcgcggcgacaaatggcggctgagattgcgaaaaagc

SEQ ID NO: 836154 - DNA, 75 bp, synthetic construct
  source 1..75: mol_type = other DNA
gtgcgtcctctgctcggctttaccggtgaatcgctcatcggtaaggctggcagtatggcgactaaattcacgggg

SEQ ID NO: 836155 - DNA, 75 bp, synthetic construct
  source 1..75: mol_type = other DNA
cggcgctagtgcctgcaattatggaggctattcggattaatgatttcaggttgtatcgtgaaattagtgacggaa

SEQ ID NO: 836156 - DNA, 75 bp, synthetic construct
  source 1..75: mol_type = other DNA
gagatcctgcgccagcgcctggaaaaccgtggccgtgaaaacgccagtgaaattaacgcccggctggcgcgcgcc

SEQ ID NO: 836157 - DNA, 75 bp, synthetic construct
  source 1..75: mol_type = other DNA
tgtttggtggggatcttacccgtcgttacgggcaaaaggtgcataaactgacgctgcatggcggttttagctgcc

SEQ ID NO: 836158 - DNA, 75 bp, synthetic construct
  source 1..75: mol_type = other DNA
cggcgctgattccggcaattatggaggctatccggatcagcgatttcagattgtattgtgaaattactgacggaa

SEQ ID NO: 836159 - DNA, 75 bp, synthetic construct
  source 1..75: mol_type = other DNA
acgccgtatgtaccgagaaaaaaccaaccagtgcgaaataagaaaggccggataaagcgggaaatgtttgtgaaa

SEQ ID NO: 836160 - DNA, 75 bp, synthetic construct
  source 1..75: mol_type = other DNA
accagggataagcgtgaaaagttcacggcgctagtgcctgcaattatggaggctacagattattccttacctcgt

SEQ ID NO: 836161 - DNA, 75 bp, synthetic construct
  source 1..75: mol_type = other DNA
tgatgctccggctttgcagcggattgatgctcgcctggcgggaccatccgcaggttaccggccttgcagaaatga

SEQ ID NO: 836162 - DNA, 75 bp, synthetic construct
  source 1..75: mol_type = other DNA
tctcagctcaggggttccctaaatctgatgttaacgatttagaaattgctattggtgaagatggcccgatagcta

SEQ ID NO: 836163 - DNA, 75 bp, synthetic construct
  source 1..75: mol_type = other DNA
gggagcctgcagacagaatgtcaccataaagcaggatgcgccagggcagaaagctttcctgactgacgggcagat

SEQ ID NO: 836164 - DNA, 75 bp, synthetic construct
  source 1..75: mol_type = other DNA
agaaaaaggaatgaacatcacagtagatcatgctgactacgtgtggtttgtagcgccagatacaacaaaaaggta

SEQ ID NO: 836165 - DNA, 75 bp, synthetic construct
  source 1..75: mol_type = other DNA
gaaacagcaggcaaagataatcaaatgcaagctatataccatgatgccaaaatccgatgtggtgatgtgatactt

SEQ ID NO: 836166 - DNA, 75 bp, synthetic construct
  source 1..75: mol_type = other DNA
tgatgtacgccgatatgatggcctgaaagacctcaccctagaacaaatctatgcagagcttgaaagacggatgtt

SEQ ID NO: 836167 - DNA, 75 bp, synthetic construct
  source 1..75: mol_type = other DNA
tgctgtcgtcgtggcaggcggttacggctttttactccacacctttaccaatgcttgggcaccctggctggattc

SEQ ID NO: 836168 - DNA, 75 bp, synthetic construct
  source 1..75: mol_type = other DNA
accgcttaacctgctgtggattgaagaaccgctgccttccgacgacatcaccggccacatgaaactgcgcgaacg

SEQ ID NO: 836169 - DNA, 75 bp, synthetic construct
  source 1..75: mol_type = other DNA
tgtgttactctcgacactgggcgggttgatgtggtatctgcaattctttttctatgcctggggccacgcccgcat

SEQ ID NO: 836170 - DNA, 75 bp, synthetic construct
  source 1..75: mol_type = other DNA
gcaaaaccagtacttacaggtcagctcttgcgtacccgccctggaaggctgcgatgttaacggtgccagtttacc

SEQ ID NO: 836171 - DNA, 75 bp, synthetic construct
  source 1..75: mol_type = other DNA
agttaattttttcagcatactggaaaggaagcccaagcataagatgggaggagacaaatagaagaaatatgaaga

SEQ ID NO: 836172 - DNA, 75 bp, synthetic construct
  source 1..75: mol_type = other DNA
gtggtgctgtctgtaagctctcaaattcagtcaccatctgtcattgtcaccgtaaaattgagcgataggatgcct

SEQ ID NO: 836173 - DNA, 75 bp, synthetic construct
  source 1..75: mol_type = other DNA
tcctggtatgataatcaaacgaccgtttatttcagtcaattttctgcgcaacgaaaagaggatcgtacgatcggg

SEQ ID NO: 836174 - DNA, 75 bp, synthetic construct
  source 1..75: mol_type = other DNA
aagatcagggttatgaagtgtggctggaactgggactgcaaaccgctcatgacaaaacgctacaccgtattaacc

SEQ ID NO: 836175 - DNA, 75 bp, synthetic construct
  source 1..75: mol_type = other DNA
cgagggaaatttttcgacaggttccgccgccgcgacaagagtgagcagtatgacttggccgccgatcatctccgc

SEQ ID NO: 836176 - DNA, 75 bp, synthetic construct
  source 1..75: mol_type = other DNA
caaccctggcgaactgtttgtttatcttggcattgccagcggtctgacaacactgaatctgccacttggcccact

SEQ ID NO: 836177 - DNA, 75 bp, synthetic construct
  source 1..75: mol_type = other DNA
gggtgaccgatctgaccaccgctatttttgagaaaaagatgggcattcaacttgaacaaaaagttcacctggcag

SEQ ID NO: 836178 - DNA, 75 bp, synthetic construct
  source 1..75: mol_type = other DNA
tacgggctggtacatggcaactaaatgtaattctgagtgtaactattgcgtcagataaacaggacttacttcagg

SEQ ID NO: 836179 - DNA, 75 bp, synthetic construct
  source 1..75: mol_type = other DNA
cacagattgcaggtgtgggtgttgaaggtgccatgcagggcgcagccgctatggggattggtgctggcgttttcg

SEQ ID NO: 836180 - DNA, 75 bp, synthetic construct
  source 1..75: mol_type = other DNA
gtgttaaaacatcatgttttgattgacggaaatgccgtggtacgtggcggaccgattctgctcgacgagcacgtt

SEQ ID NO: 836181 - DNA, 75 bp, synthetic construct
  source 1..75: mol_type = other DNA
cgagtctgtgttgcagaatatggtcgatctgatgccgggttctaccctgagtgaagaagataactctgtgaccat

SEQ ID NO: 836182 - DNA, 75 bp, synthetic construct
  source 1..75: mol_type = other DNA
aactgacagcagaaatcactccagctgatgccgcagataaaaccggtgtttgggaatccgaagaccaggaaaagg

SEQ ID NO: 836183 - DNA, 75 bp, synthetic construct
  source 1..75: mol_type = other DNA
tgactccgcaggacaccaccgactatgtgttgaccatcccgaaagcggcaaccgcgggcaacttcactatgacct

SEQ ID NO: 836184 - DNA, 75 bp, synthetic construct
  source 1..75: mol_type = other DNA
cgcattgattaattttatcggtcagcatcgtattgaacgatttgctcaacgttgcgccggtaaccctgtttcccg

SEQ ID NO: 836185 - DNA, 75 bp, synthetic construct
  source 1..75: mol_type = other DNA
atggaaaaatggaaaaatggaaaaatggaaaaagtttatgataccactagaattagtaatcttgctaacgacccg

SEQ ID NO: 836186 - DNA, 75 bp, synthetic construct
  source 1..75: mol_type = other DNA
atgccgcataaaaaagtagcgctacagcttattgaggaaacgcttaaagaacttgagtccccaaaaggctctttg

SEQ ID NO: 836187 - DNA, 75 bp, synthetic construct
  source 1..75: mol_type = other DNA
atggggattgtcactggtataccggatggtactgatttatcaggtaatgtaacctctcccgcaaatgcgggaggt

SEQ ID NO: 836188 - DNA, 75 bp, synthetic construct
  source 1..75: mol_type = other DNA
gtgtagcccgactggcgggctgtctgcctctgttgctgacgctgtctgccggcgcggtgaatgtcacttttgacg

SEQ ID NO: 836189 - DNA, 75 bp, synthetic construct
  source 1..75: mol_type = other DNA
gcaagggtcagtcgtgcgctgtcgaaggactcacaactcagggaggatgcgcgaatcattgtcacagcataccag

SEQ ID NO: 836190 - DNA, 75 bp, synthetic construct
  source 1..75: mol_type = other DNA
ttaaaatattctgtaaagaattttcatataagtcctggcaatacgcctcctcagaaatttagcattcgtttgcgt

SEQ ID NO: 836191 - DNA, 75 bp, synthetic construct
  source 1..75: mol_type = other DNA
ggaagttcaggtgctgcgttctatgtatcagcaggcggtgagccaggccaatattgtcggtttgtgtgttggtac

SEQ ID NO: 836192 - DNA, 75 bp, synthetic construct
  source 1..75: mol_type = other DNA
gctaaccgccggggagatgattcgccatacgccaccggaggttatctaccaccgaatttccgccagcgcccgtcg

SEQ ID NO: 836193 - DNA, 75 bp, synthetic construct
  source 1..75: mol_type = other DNA
aactgggtgatgcacataaccatggacagggcactcccgttgaccgggatacgctgcagtttaattttaaagctt

SEQ ID NO: 836194 - DNA, 75 bp, synthetic construct
  source 1..75: mol_type = other DNA
catgggtaaaaatgcagggataggagcatggaaaggtgttcgccgtcaggataatggttttagccagtcgcctgg

SEQ ID NO: 836195 - DNA, 75 bp, synthetic construct
  source 1..75: mol_type = other DNA
cccgtatggggcgcaatatgcttggtatgggtaaaaatgcaggtattggcgcatggaaaggtgttcgtcgtcagg

SEQ ID NO: 836196 - DNA, 75 bp, synthetic construct
  source 1..75: mol_type = other DNA
agatggactacgggaaacatttgcaggaggtgatccatggaaatgggttgatgaactttgggagaaagttcagca

SEQ ID NO: 836197 - DNA, 75 bp, synthetic construct
  source 1..75: mol_type = other DNA
ttgaagtatcctgtaaaaaattttcatataagcccaggcaatgcgcctcctcagaaatttagtattcgtttgcgt

SEQ ID NO: 836198 - DNA, 75 bp, synthetic construct
  source 1..75: mol_type = other DNA
accgggcagggaataaatatcggcgctaagaagctgcgtaatgcggctattgagatggcaaaaaagaaatacggt

SEQ ID NO: 836199 - DNA, 75 bp, synthetic construct
  source 1..75: mol_type = other DNA
atttgtctttcatttggttttttaaggcagatgtttaatagctggcttcagttaatatttagctcatgcttcata

SEQ ID NO: 836200 - DNA, 75 bp, synthetic construct
  source 1..75: mol_type = other DNA
gatagcatgaaatctttgatagccgaatacgaggcacagaaaaaggttgccctgcaaggtgacattgaacagcta

SEQ ID NO: 836201 - DNA, 75 bp, synthetic construct
  source 1..75: mol_type = other DNA
tagtgaatatgaatcacagaagaaaattgctatgcaggctgatattgagcagttagtgaagatttctcagaaata

SEQ ID NO: 836202 - DNA, 75 bp, synthetic construct
  source 1..75: mol_type = other DNA
tgaatcattacttgagcttgaaaagaaatattacccactgctgaaagcacagcgtattaaacttgatgacgctta

SEQ ID NO: 836203 - DNA, 75 bp, synthetic construct
  source 1..75: mol_type = other DNA
ccgcacgcttgatggaacagatcaccacttccgatgagttaattgatttcctgaccctgccaggctaccgcctgt

SEQ ID NO: 836204 - DNA, 75 bp, synthetic construct
  source 1..75: mol_type = other DNA
atattgatattaccattaataacaactcaggatctgacactggaaataatggcaatatagatttgggagaagatc

SEQ ID NO: 836205 - DNA, 75 bp, synthetic construct
  source 1..75: mol_type = other DNA
ggtgactaaaaatccggcgcaagcgcttaatctccaggatcgcggggtgattggcgagggcaatcgcgcggacct

SEQ ID NO: 836206 - DNA, 75 bp, synthetic construct
  source 1..75: mol_type = other DNA
acgaaaccctgctgcacagtcagaactatatcggctggtgtggcctctggcgtgaacagggcacctctgccatcc

SEQ ID NO: 836207 - DNA, 75 bp, synthetic construct
  source 1..75: mol_type = other DNA
gcacgcttcaggagctggtgtggttgccggtgggtgcctgccaggtggggctgctcgccagcagcgaaggggcgg

SEQ ID NO: 836208 - DNA, 75 bp, synthetic construct
  source 1..75: mol_type = other DNA
ctctggcgccgtctgcgccgggtgtggcctttttatcagcgcctgaatgcacaaaagcgcaagcgtctggggctg

SEQ ID NO: 836209 - DNA, 75 bp, synthetic construct
  source 1..75: mol_type = other DNA
cacgccacaaacccgctttctggtgaaccctgcaggcagttttgtgattggcgggccggtgggtgactgcgggct

SEQ ID NO: 836210 - DNA, 75 bp, synthetic construct
  source 1..75: mol_type = other DNA
gctggaaccaaaatgggttatctcaatgggtgcctgtgccaactccggcggtatgtacgatatttattccgttgt

SEQ ID NO: 836211 - DNA, 75 bp, synthetic construct
  source 1..75: mol_type = other DNA
gagagtattcaggcactctgttatccggcaagcaatataaacctgcgggagcatggtgcatatccagaaatctcc

SEQ ID NO: 836212 - DNA, 75 bp, synthetic construct
  source 1..75: mol_type = other DNA
atgaataatactcaatttgataataatttgttttattttaataggttaacttacataacgccacacgaagtggcg

SEQ ID NO: 836213 - DNA, 75 bp, synthetic construct
  source 1..75: mol_type = other DNA
gcacatccgggcagctcacggtggtctggttctttcaaccgactcccttaatcatgatttcagtatttcgccctc

SEQ ID NO: 836214 - DNA, 75 bp, synthetic construct
  source 1..75: mol_type = other DNA
tgctgctgtagagcatctcggagcaccagagcgcgtgaagtttgaagcgatgcgcaagttgctcggggcggtgac

SEQ ID NO: 836215 - DNA, 75 bp, synthetic construct
  source 1..75: mol_type = other DNA
ctcggatccgcgttgctgtcatcgttctctgatcttggaaccatgtatctgtctgcgaaggtgaccaaccttcca

SEQ ID NO: 836216 - DNA, 75 bp, synthetic construct
  source 1..75: mol_type = other DNA
taatactgggtgttagtgctggcgttattgccgcattaaaacaaaacaccaaatgggactataccgtgatggggc

SEQ ID NO: 836217 - DNA, 75 bp, synthetic construct
  source 1..75: mol_type = other DNA
tcatctgcatgacgcaaaaaaatcggtgccgcaaatgctggaagatttcaaacaacatccggccgttgcaccgct

SEQ ID NO: 836218 - DNA, 75 bp, synthetic construct
  source 1..75: mol_type = other DNA
caggtatcaacatgctgccggagttggttggtgacggcgtactgattgccggtgatgccgccggaatgtgtatga

SEQ ID NO: 836219 - DNA, 75 bp, synthetic construct
  source 1..75: mol_type = other DNA
atacatacagaccagagaatgactctgctttttattatcatatttataattttttacagaaatcgtattgtcctt

SEQ ID NO: 836220 - DNA, 75 bp, synthetic construct
  source 1..75: mol_type = other DNA
atggttgtgatgacgcatatctgaaaatgattataagtcattttgggcagttgcagaatgaggctgttcatgtga

SEQ ID NO: 836221 - DNA, 75 bp, synthetic construct
  source 1..75: mol_type = other DNA
gtatggctacgctgcacgctatctttatgattttaatatttttgacacaacgccttatgcaagagcattacttga

SEQ ID NO: 836222 - DNA, 75 bp, synthetic construct
  source 1..75: mol_type = other DNA
gaacgcctgcgccgagccgggcaactggcggctgaagagttgcagcgagaggtggcactgaaaaaacgccgtgtc

SEQ ID NO: 836223 - DNA, 75 bp, synthetic construct
  source 1..75: mol_type = other DNA
gattggataaatttatcaatagctatcaaggggctgatgggaaacttggcgctcttaaccgtactattgctttta

SEQ ID NO: 836224 - DNA, 75 bp, synthetic construct
  source 1..75: mol_type = other DNA
tataaggagggtgaaatacagtatgatgcgaacaattttaccctgatgcgtgttattaagatgtataattgtatg

SEQ ID NO: 836225 - DNA, 75 bp, synthetic construct
  source 1..75: mol_type = other DNA
ggaacagccctctacggcgggcaggccagcaggagaatggcagtgggccgttccggtgggggcggaacttgcccc

SEQ ID NO: 836226 - DNA, 75 bp, synthetic construct
  source 1..75: mol_type = other DNA
acggtcacgccgatgttttctttgcaatcgctcacgcgctctttaatgagccgttgaactggaaaaataaacgta

SEQ ID NO: 836227 - DNA, 75 bp, synthetic construct
  source 1..75: mol_type = other DNA
aaaaacggcaacatcgatctggctgatctgcgcgcgaaagcggaacaagcgggcgataacctctcctgtatcatg

SEQ ID NO: 836228 - DNA, 75 bp, synthetic construct
  source 1..75: mol_type = other DNA
atacaaacgctccatgccggggcgcattatcggcgtatcgaaagatgcggctggtaatactgcgctacgcatggc

SEQ ID NO: 836229 - DNA, 75 bp, synthetic construct
  source 1..75: mol_type = other DNA
aactgacttcttcagcatgttagctgatatcacgatggctactaccgctgtctgggctgcatttaaagctaatga

SEQ ID NO: 836230 - DNA, 75 bp, synthetic construct
  source 1..75: mol_type = other DNA
atcgctgcctgtacgttttatcccgatcctggccaccctattcatcaactggccgatcagcaaaaaagcgcggcc

SEQ ID NO: 836231 - DNA, 75 bp, synthetic construct
  source 1..75: mol_type = other DNA
aatatttctggataccgaaatttaatcgccttaatgacgttgcgtcagcgatggcgacccatgacagatggcgtt

SEQ ID NO: 836232 - DNA, 75 bp, synthetic construct
  source 1..75: mol_type = other DNA
tggttgaaccgactgaatctgaaagcaaagtggaattggatcgctttatcgatgcgatgctggctatccgcgcag

SEQ ID NO: 836233 - DNA, 75 bp, synthetic construct
  source 1..75: mol_type = other DNA
cgatggcaaaacgcgtcagtaaactgaaaaatgccaaccgcttcttcgttgcttctgacgtgcatccgcaaacct

SEQ ID NO: 836234 - DNA, 75 bp, synthetic construct
  source 1..75: mol_type = other DNA
tgtacgaagaaacgatccgtgaagtgtgtgaaatcgtgcatcagttcggcggtcaggtttaccttgatggcgcga

SEQ ID NO: 836235 - DNA, 75 bp, synthetic construct
  source 1..75: mol_type = other DNA
gatgcagactcgcgagcaacatattcgccgcgagaaagcgaactccaacatttgtacttcccaggtactgctggc

SEQ ID NO: 836236 - DNA, 75 bp, synthetic construct
  source 1..75: mol_type = other DNA
caactggctgactggctggtgaaactgaccggttacgacgccgtttgtatgcagccgaactctggcgcacagggc

SEQ ID NO: 836237 - DNA, 75 bp, synthetic construct
  source 1..75: mol_type = other DNA
acctggccggaatttgccgaactgcacccgttctgcccgccggaacaggccgaaggttatcagcagatgatcgcg

SEQ ID NO: 836238 - DNA, 75 bp, synthetic construct
  source 1..75: mol_type = other DNA
atgagtgacacaactgacttcttcagcatgttagctgatatcactatggctactaccgctgtctgggctgcattc

SEQ ID NO: 836239 - DNA, 75 bp, synthetic construct
  source 1..75: mol_type = other DNA
agtgtcacgaccacgcagaagtatgatcgccggggagatgagcgcttgaaacaggccagtcggcgtctcgaattc

SEQ ID NO: 836240 - DNA, 75 bp, synthetic construct
  source 1..75: mol_type = other DNA
ccctcgatatggaatgcgtcatcaccagggagcaggcgcttcgggtgctcggtaagggtaacaaagaacgcatcg

SEQ ID NO: 836241 - DNA, 75 bp, synthetic construct
  source 1..75: mol_type = other DNA
aaaagactggataagtgggttgaagaggttcgaggaacgcatgaagggcctttattcccgaggatcaggcggttt

SEQ ID NO: 836242 - DNA, 75 bp, synthetic construct
  source 1..75: mol_type = other DNA
attttgaacatatcactcaggcgtacggggtccgggttatcgcctgggatcgtccctttaactactccgccatca

SEQ ID NO: 836243 - DNA, 75 bp, synthetic construct
  source 1..75: mol_type = other DNA
cctgcgagctcatccaccagctcccccatcagcaacaaacgccggttatcgcggtaacggcgcatgcaatggccg

SEQ ID NO: 836244 - DNA, 75 bp, synthetic construct
  source 1..75: mol_type = other DNA
cgaaaacacggcattacgttggcgctatttgcagcgggttcaacagggttaactgcggccatcaaccagatgacc

SEQ ID NO: 836245 - DNA, 75 bp, synthetic construct
  source 1..75: mol_type = other DNA
aaaacatggcaaaaagttgccgtgtaagcgccactgcgttcgataagtggggagtgattcccgtcgagcgtaagg

SEQ ID NO: 836246 - DNA, 75 bp, synthetic construct
  source 1..75: mol_type = other DNA
gtcagatttcatcaatcatggacagcctcccgcttactatgcaaaggagcttcccacagattacccccgccatgc

SEQ ID NO: 836247 - DNA, 75 bp, synthetic construct
  source 1..75: mol_type = other DNA
tggacaggcttaaaagggaagtggttaaagcctgtaatgccagtgccagtgaaccgccccgggaatcctggagac

SEQ ID NO: 836248 - DNA, 75 bp, synthetic construct
  source 1..75: mol_type = other DNA
atctcgacttcctaaagggcgggcacttgaacgccatgagattcgcagcctctttttcacatgtgaaagtgattc

SEQ ID NO: 836249 - DNA, 75 bp, synthetic construct
  source 1..75: mol_type = other DNA
cttcaacagctacaggcggcaaaacaacagtacgatcagctagtcgctgaatacaagcaggctaaaagcttgcat

SEQ ID NO: 836250 - DNA, 75 bp, synthetic construct
  source 1..75: mol_type = other DNA
gttgccgacaacctcccgaagatactggctgattacctgatggaaactaccggagacgtaccggaaaagttgcta

SEQ ID NO: 836251 - DNA, 75 bp, synthetic construct
  source 1..75: mol_type = other DNA
atggcaaataatatgtcgtcccgtcaggcgtgccatgccgcccggtatgttgtcgcccgggttctgcgtggggtg

SEQ ID NO: 836252 - DNA, 75 bp, synthetic construct
  source 1..75: mol_type = other DNA
aactggtctccctgccggaaaaaatcaggaaatgccctgtttatttccatgatgacagaacaaacagaagcaacg

SEQ ID NO: 836253 - DNA, 75 bp, synthetic construct
  source 1..75: mol_type = other DNA
gtgggaaccgcagatgaacgactgaaggaactacttgctgaagacgtttccctgccggaaaaaatcaggaaatgc

SEQ ID NO: 836254 - DNA, 75 bp, synthetic construct
  source 1..75: mol_type = other DNA
tgatgctgcagattatgtcagggagactgaccggtcactgatgcaactggtcaccgcattatgggcaacactggc

SEQ ID NO: 836255 - DNA, 75 bp, synthetic construct
  source 1..75: mol_type = other DNA
ctgaccggtcactgatgcaactggtcaccgcattatgggcaacactggcactgatgtatgtctcgctggcagcaa

SEQ ID NO: 836256 - DNA, 75 bp, synthetic construct
  source 1..75: mol_type = other DNA
tctgtcggaaaaaatcaggaaatgccgtgtttatttccctgatgacaggacaaacagaaacaacggagataaaaa

SEQ ID NO: 836257 - DNA, 75 bp, synthetic construct
  source 1..75: mol_type = other DNA
tcatgggggaggtttattcgaaccgctggactcagaagaacggggccgcaccttcgacgctctggattgcacaga

SEQ ID NO: 836258 - DNA, 75 bp, synthetic construct
  source 1..75: mol_type = other DNA
aggtggcggaacctgaatttccggacggcctgagtgaacccatcgggaaatttccgatgaccgatggctggcatc

SEQ ID NO: 836259 - DNA, 75 bp, synthetic construct
  source 1..75: mol_type = other DNA
cggaacctgattacctggaaggcctgagcgaacccatcggaaaatttccgatgaccgatggctggcatccggcgc

SEQ ID NO: 836260 - DNA, 75 bp, synthetic construct
  source 1..75: mol_type = other DNA
ttccctgccgggaaaaatcaggaaatgccatgtttatttccctgatgaccgaacaaacagaagcaacggagataa

SEQ ID NO: 836261 - DNA, 75 bp, synthetic construct
  source 1..75: mol_type = other DNA
agactgaccggtcactgatgcaactggtcaccgcattatgggcaacactggcactgatgtttatgttgtttgtgt

SEQ ID NO: 836262 - DNA, 75 bp, synthetic construct
  source 1..75: mol_type = other DNA
gtcgacaccgcacatcggctggcggaagatatcctgcgcttcgcccgctgccgccagggtggtgctttgacctga

SEQ ID NO: 836263 - DNA, 75 bp, synthetic construct
  source 1..75: mol_type = other DNA
aggcgtgccatgccgcccggtatgttgtcgcccggggcctgtgttggttgttctggtgtctgaagtacaccgtca

SEQ ID NO: 836264 - DNA, 75 bp, synthetic construct
  source 1..75: mol_type = other DNA
gtgcctgctgccgctgctgaccggttgcggaagtacgcggacagtttacgtgccagttccagcggtgccattacc

SEQ ID NO: 836265 - DNA, 75 bp, synthetic construct
  source 1..75: mol_type = other DNA
atgaagttgagctataagctggctatctctgcattcttctttactgtcatcggttctttcatctggtctgccaac

SEQ ID NO: 836266 - DNA, 75 bp, synthetic construct
  source 1..75: mol_type = other DNA
gtgcctgctgccgctgctgaccggttgcgaaagttcgcggacagtttacgtgccagttccggctataccgttacc

SEQ ID NO: 836267 - DNA, 75 bp, synthetic construct
  source 1..75: mol_type = other DNA
acgatgaagctcatcactccgcagccgcgttcgggttattttgtcgcacaacgtaaagcccagccgccagtaccg

SEQ ID NO: 836268 - DNA, 75 bp, synthetic construct
  source 1..75: mol_type = other DNA
gagacgatgaacctcatcactccgttgccgcttcgggttattttgtcgcgcaacgtaaagcccagccgccagtac

SEQ ID NO: 836269 - DNA, 75 bp, synthetic construct
  source 1..75: mol_type = other DNA
agggctgtatcgtcacggggagaaattgccgtcggtgcgcagcttaagtcaggagcacggcgtcagtattagcac

SEQ ID NO: 836270 - DNA, 75 bp, synthetic construct
  source 1..75: mol_type = other DNA
gtgcctgctgccgctgctgaccggttgcggaagtacgcggacagtttacgtaccggttccggcggtaccgttgcc

SEQ ID NO: 836271 - DNA, 75 bp, synthetic construct
  source 1..75: mol_type = other DNA
ggatgatgattgtgcttcacgtcctgtgcctgctgccgctgctgaccggttgcggaagtacgcgatagactggcc

SEQ ID NO: 836272 - DNA, 75 bp, synthetic construct
  source 1..75: mol_type = other DNA
gaaggcgaggcactgactgacgcgctattactcgctgaagacgaacgcgttttggggtacagaatcgaacctgtc

SEQ ID NO: 836273 - DNA, 75 bp, synthetic construct
  source 1..75: mol_type = other DNA
tcttcgcgttcgcattgagcgtactgggcgtcatcgtttggtcagcaagccattatcacgataagtatcaggcgg

SEQ ID NO: 836274 - DNA, 75 bp, synthetic construct
  source 1..75: mol_type = other DNA
atgaagccgagatataagctggttattgttgcctcctttgttaccgtcatcggttctttcatctggtctgccggg

SEQ ID NO: 836275 - DNA, 75 bp, synthetic construct
  source 1..75: mol_type = other DNA
ggatgatggttgtgctgcacgccttgtgcctgctgccgctgctgagcggttgcggaagtacgcggacagtttacg

SEQ ID NO: 836276 - DNA, 75 bp, synthetic construct
  source 1..75: mol_type = other DNA
gataaacccgatatgattcttgttcatggggataccacaactactttagctgcgtcccttgctgcatattataat

SEQ ID NO: 836277 - DNA, 75 bp, synthetic construct
  source 1..75: mol_type = other DNA
gaatatcaaaaacgcaatgaaaccagcgagctgttcattccgcccggccctcgtttaggcgataaagtgctggaa

SEQ ID NO: 836278 - DNA, 75 bp, synthetic construct
  source 1..75: mol_type = other DNA
atcgtgtcggaaaagttgttcctccgaagcgacatattctaaaaaatatctctctcagcttcttccccggcgcca

SEQ ID NO: 836279 - DNA, 75 bp, synthetic construct
  source 1..75: mol_type = other DNA
tcacatcctggcactgaaagcgacaagcctcaggacgacaagcctatcgatggcgataagccaaaagaggaaaag

SEQ ID NO: 836280 - DNA, 75 bp, synthetic construct
  source 1..75: mol_type = other DNA
caacctgctcgataatgtcggttttatcctgcttcctcctcctgaaagctacgactggccagtcagcgaaacatt

SEQ ID NO: 836281 - DNA, 75 bp, synthetic construct
  source 1..75: mol_type = other DNA
cgaccgttacttccttgataacgtcgcaggctggattctggaacttgaccgcggtgaaggtattccatgggaagg

SEQ ID NO: 836282 - DNA, 75 bp, synthetic construct
  source 1..75: mol_type = other DNA
gcttatgtcggtcgcttcaacttcaaaggcaccgatcagggcaaacgcgttggcgagctttccggcggcgaacgc

SEQ ID NO: 836283 - DNA, 75 bp, synthetic construct
  source 1..75: mol_type = other DNA
tggtgattatattaataagaaaggacgactgaattttccagttgatgtttataattctcctgaaaaaggaaaata

SEQ ID NO: 836284 - DNA, 75 bp, synthetic construct
  source 1..75: mol_type = other DNA
ttgcattctaactttattcgtactgcccgcgcgaaaggtttacctatgcgcaggatcatccttcgccacgcatta

SEQ ID NO: 836285 - DNA, 75 bp, synthetic construct
  source 1..75: mol_type = other DNA
gttgaaccgtgactattcattggtattaagcctgaccattctggttggtgcattaaccattttgtttaatgccat

SEQ ID NO: 836286 - DNA, 75 bp, synthetic construct
  source 1..75: mol_type = other DNA
ttatgccaatggtccagcagcagcaggcggaagcctggcagaaaaccaccgaacagtgggctgctgacgttaagg

SEQ ID NO: 836287 - DNA, 75 bp, synthetic construct
  source 1..75: mol_type = other DNA
cggtgctgcgttacatgctacgcggcaataccgtttctgacgcaccgctgattatcggtagccttgatccctgct

SEQ ID NO: 836288 - DNA, 75 bp, synthetic construct
  source 1..75: mol_type = other DNA
aaacgtttgccgatctgaaaggcaaacgtattgggatggaaaacggcaccacgcaccagaaatatattcaggagc

SEQ ID NO: 836289 - DNA, 75 bp, synthetic construct
  source 1..75: mol_type = other DNA
ggtcgcgtgctgcgtatgaaaccggagacccgcattctggacctcggcagcggctcgggcgagatgctctgcacc

SEQ ID NO: 836290 - DNA, 75 bp, synthetic construct
  source 1..75: mol_type = other DNA
gacacccaggcattgccggttagggttctcatccgtgatcagtacaaacctgatggtgactatgacgctaacacg

SEQ ID NO: 836291 - DNA, 75 bp, synthetic construct
  source 1..75: mol_type = other DNA
cggatgggatggatggcaaggttatggtccccgctgtcactcatgaatttgttcatgcagatggcaagcggatca

SEQ ID NO: 836292 - DNA, 75 bp, synthetic construct
  source 1..75: mol_type = other DNA
gggtggcgggtaagtattttcacccgtaacggcactagggtgacgttgaacgacgagactttcaatgtcgaagcg

SEQ ID NO: 836293 - DNA, 75 bp, synthetic construct
  source 1..75: mol_type = other DNA
ctgaaacatcaaagcaaaacctattggctgaaaatattcaagagaagaatatatatgtgacaggtaatactgtta

SEQ ID NO: 836294 - DNA, 75 bp, synthetic construct
  source 1..75: mol_type = other DNA
tgacggtggaaaaacctactcacataaagggaacagcatcacgctttcaagtgatgaagaaacccgataccgcct

SEQ ID NO: 836295 - DNA, 75 bp, synthetic construct
  source 1..75: mol_type = other DNA
tacgaaccctctgacactgacctcaatcaggctaccctcccactttctcagaggccttcattgagggttgctgag

SEQ ID NO: 836296 - DNA, 75 bp, synthetic construct
  source 1..75: mol_type = other DNA
gtgataaccctgctccagttggtgatccatcacaaccggaaggtgataagccacaacctgttgctgatggcgata

SEQ ID NO: 836297 - DNA, 75 bp, synthetic construct
  source 1..75: mol_type = other DNA
gcgcaaaatgcacagctaaacgttaacggtatcgatattgaacgttcaagtaacaaattaccgatgctcctcagg

SEQ ID NO: 836298 - DNA, 75 bp, synthetic construct
  source 1..75: mol_type = other DNA
caggcctgtggcgtcagctcgtcaaccgatttcctgacgcttacggggcttgtgagtgcgttcgatgaactcggc

SEQ ID NO: 836299 - DNA, 75 bp, synthetic construct
  source 1..75: mol_type = other DNA
tgattatcggcagacgcaagctgatgtattccagcaacatgggacaaaaactaagtcgtttattatttacgactg

SEQ ID NO: 836300 - DNA, 75 bp, synthetic construct
  source 1..75: mol_type = other DNA
acgtactgaccgtttctacagttaactctcaggatcaggtaacccaaaaacccctgcgtgactcggttaaacagg

SEQ ID NO: 836301 - DNA, 75 bp, synthetic construct
  source 1..75: mol_type = other DNA
aatttacttgtaccgtcattagattctgttcctgcatgggtatatggtgtgacaggaaaaataatatctgaattg

SEQ ID NO: 836302 - DNA, 75 bp, synthetic construct
  source 1..75: mol_type = other DNA
tgtccttgccgtcgattccatcctttgtattgtcgggattactgttgatttgtttgccgttttcttcatttgcca

SEQ ID NO: 836303 - DNA, 75 bp, synthetic construct
  source 1..75: mol_type = other DNA
agtcagggaaattacaggtttcatggggcaatgataaaaactcaaactgtattgtcgagtacaagcttcctgaag

SEQ ID NO: 836304 - DNA, 75 bp, synthetic construct
  source 1..75: mol_type = other DNA
ggaaactggacaccttatggcggaatgcaaattgcagaagattatcaggccttcaaccttggtattggtaaagat

SEQ ID NO: 836305 - DNA, 75 bp, synthetic construct
  source 1..75: mol_type = other DNA
aacgagatgtatcactaccatcgggcaacgattgtggcgaataacgacctgcgccggggagatttgctgtttttc

SEQ ID NO: 836306 - DNA, 75 bp, synthetic construct
  source 1..75: mol_type = other DNA
gctgaaattgagcgaccgacgctggcaggcgctggcggaaaacaatcactttttaagcagtgatcacctgcataa

SEQ ID NO: 836307 - DNA, 75 bp, synthetic construct
  source 1..75: mol_type = other DNA
cgtctggggcggcacgcggcctgataaaggctttgactgtagcgggttggttttttatgcctacaacaagatcct

SEQ ID NO: 836308 - DNA, 75 bp, synthetic construct
  source 1..75: mol_type = other DNA
ggtttacgcatcgatatggtggtcgatctttggtacgcccggcaaccctggaatgggccaagccgtcaggaagta

SEQ ID NO: 836309 - DNA, 75 bp, synthetic construct
  source 1..75: mol_type = other DNA
ctgaccatgtttgacttacgtgacagtttcgatgccctcgcctccgcagaaaaactgccttacagcaaaccgcac

SEQ ID NO: 836310 - DNA, 75 bp, synthetic construct
  source 1..75: mol_type = other DNA
ctgcaattttcgatatggatggattacttatcgactcagaacctttatgggatcgagccgaactggatgtgatgg

SEQ ID NO: 836311 - DNA, 75 bp, synthetic construct
  source 1..75: mol_type = other DNA
gatttgaaaggcggcatgaccaacctatcaggggtttatggcactctgctgccggataataacctgaattatagc

SEQ ID NO: 836312 - DNA, 75 bp, synthetic construct
  source 1..75: mol_type = other DNA
cccttgtgatgcgccgtgcgcgtgatctgattgctgactacggctggcccgaccataccgatgttgatcagcgtg

SEQ ID NO: 836313 - DNA, 75 bp, synthetic construct
  source 1..75: mol_type = other DNA
cacgtatgcgttctatcgtcgtccccgcgcccgaagcgcaaaatgatccccgttttgtgttggcgaatgtaaaac

SEQ ID NO: 836314 - DNA, 75 bp, synthetic construct
  source 1..75: mol_type = other DNA
gaggtgatttcccgacagatcgtgaaactctacagtgggtttgtataaaggggatcccgccgaaagttgatgata

SEQ ID NO: 836315 - DNA, 75 bp, synthetic construct
  source 1..75: mol_type = other DNA
tcaccactttactcaattttgtgggatgttggtgaggctctgggctggttgctgtatgacctggagatggaaaat

SEQ ID NO: 836316 - DNA, 75 bp, synthetic construct
  source 1..75: mol_type = other DNA
tttgctggcacatctctgtcagctggaaggtgaactggcgatacttcgcgcctggcaacgtctcggaattacccc

SEQ ID NO: 836317 - DNA, 75 bp, synthetic construct
  source 1..75: mol_type = other DNA
ttgtcggcgtcatcgtcgcctttgcggcctacgccttattaaagaaacgtacaacagcagaaaaaacaggagagc

SEQ ID NO: 836318 - DNA, 75 bp, synthetic construct
  source 1..75: mol_type = other DNA
gggtggtcactatttcgctgatattctttctcattgcaaactttgtctggcttggattgccgtttggcatggcga

SEQ ID NO: 836319 - DNA, 75 bp, synthetic construct
  source 1..75: mol_type = other DNA
gcgtttctgcactggcgcgagcccgagctgactggctgtacggcatcaatatgacccgcgcttacaccattctcg

SEQ ID NO: 836320 - DNA, 75 bp, synthetic construct
  source 1..75: mol_type = other DNA
cagaatttatgcgtttactaaccgcggcggaacaccgccgcgttgaaatacgaaccggcaagctattcgataaaa

SEQ ID NO: 836321 - DNA, 75 bp, synthetic construct
  source 1..75: mol_type = other DNA
gacccagttcactcgtgcgataaagacactgggcatcgagccaatccatgccaacagcccgcaggcaaaagggcg

SEQ ID NO: 836322 - DNA, 75 bp, synthetic construct
  source 1..75: mol_type = other DNA
tggcgtaccgctcgctctctactctgatagacacagtatattcagggtaaataacccagagcgggaaggtgagct

SEQ ID NO: 836323 - DNA, 75 bp, synthetic construct
  source 1..75: mol_type = other DNA
agtaaacccaacaccgttctatataaatcttgcggaattgaaagtgggcgaaaaagaaatactggagcgtcatta

SEQ ID NO: 836324 - DNA, 75 bp, synthetic construct
  source 1..75: mol_type = other DNA
tggcggtaagtttattccctttatggaaccgttatcgcgtgtttcatggtttgtcggcgtcatcgtcgcctttgc

SEQ ID NO: 836325 - DNA, 75 bp, synthetic construct
  source 1..75: mol_type = other DNA
atatgaatatgatattccagtgagcacagctggtaacgtttattggaaagtaataacggattatggtggtaatag

SEQ ID NO: 836326 - DNA, 75 bp, synthetic construct
  source 1..75: mol_type = other DNA
tccctggcttacgcgccgaacgcaaagtcatcagcaagttaagcccccgaagttacctaaaagaagcctgatccc

SEQ ID NO: 836327 - DNA, 75 bp, synthetic construct
  source 1..75: mol_type = other DNA
cagcactgatgatgacggtgatgactggcagcggacaggctgccaccaccgccacggcgacgctgacgattaatg

SEQ ID NO: 836328 - DNA, 75 bp, synthetic construct
  source 1..75: mol_type = other DNA
aaaacgctgattagcaccgctggtgtagagaaggcacttagcctcggggtaactaaactggttgagcgatggatt

SEQ ID NO: 836329 - DNA, 75 bp, synthetic construct
  source 1..75: mol_type = other DNA
ggcgaatgtctcaaaaacaggaaagatgaatggattctcgttcgaatatcaaaacatcgcatttaaagcctccca

SEQ ID NO: 836330 - DNA, 75 bp, synthetic construct
  source 1..75: mol_type = other DNA
catagagcttctcagaagttatgggaagagcatccttcataagactcctacaaacttcttagaagtctattcagc

SEQ ID NO: 836331 - DNA, 75 bp, synthetic construct
  source 1..75: mol_type = other DNA
taatccgcgaaaaagaatgcagagaattaacaggcatttgccgcacaactcgctacgagatggaaaagcaggggc

SEQ ID NO: 836332 - DNA, 75 bp, synthetic construct
  source 1..75: mol_type = other DNA
aaatggcagcgtatttgctgaaaaagcatggcggatctatgcgtttcattaagctgatgaagctgatgtatctct

SEQ ID NO: 836333 - DNA, 75 bp, synthetic construct
  source 1..75: mol_type = other DNA
cgaccaggttcgttcactcatggaaaatagcgatcgctgccaggatatacggaatctggcatttctggggattgc

SEQ ID NO: 836334 - DNA, 75 bp, synthetic construct
  source 1..75: mol_type = other DNA
acgaccccgaccacttagaagctatgcgaaccggcataccaccaaaagacccccttgctcctgctcctgctcctg

SEQ ID NO: 836335 - DNA, 75 bp, synthetic construct
  source 1..75: mol_type = other DNA
agtacaacagcaaaagcatctcaggcttatcggctggattccatttctcagaaggctcgcagagcttctcagaag

SEQ ID NO: 836336 - DNA, 75 bp, synthetic construct
  source 1..75: mol_type = other DNA
gacggctaacattgcttctaccggtaagatgaacggcttctcattcgaataccgcgatatagctttcaaagcttc

SEQ ID NO: 836337 - DNA, 75 bp, synthetic construct
  source 1..75: mol_type = other DNA
gaactggaattacggctcagagaaggcaaacgaaacgagattgtagaaaagattcttcaaaagaatgcagtacaa

SEQ ID NO: 836338 - DNA, 75 bp, synthetic construct
  source 1..75: mol_type = other DNA
tcatcattgatcccccgaccatagataacagaaaagccgacacatctaattttttcgctggaatggatgtggcca

SEQ ID NO: 836339 - DNA, 75 bp, synthetic construct
  source 1..75: mol_type = other DNA
aaaagcaatccccaacagggcttcaaccggaaaaatgaatggtttttcctttgagtacgccaacatttcattcaa

SEQ ID NO: 836340 - DNA, 75 bp, synthetic construct
  source 1..75: mol_type = other DNA
atgaaaaaaatggcaattgttgataaaaagggtctggagtacattcctaacatcgatcgtatgatccgtgagaaa

SEQ ID NO: 836341 - DNA, 75 bp, synthetic construct
  source 1..75: mol_type = other DNA
gtcagtttatgccgtcgtcttacaaacaatacgcagtggatttcagcggcgacgggcatatcaacctgtgggatc

SEQ ID NO: 836342 - DNA, 75 bp, synthetic construct
  source 1..75: mol_type = other DNA
actgagactgaaacgaccaccggaacgccgtctggcggcttcctgcttgagccgcagcacaatgtgatgcagatg

SEQ ID NO: 836343 - DNA, 75 bp, synthetic construct
  source 1..75: mol_type = other DNA
ttgagttatgtaaagtccgtatcgggcagtgactaccgcttccttgtgtggggcgtgatgctttaccataccaac

SEQ ID NO: 836344 - DNA, 75 bp, synthetic construct
  source 1..75: mol_type = other DNA
cagcataatcgggagcagataaaacagcatccagaatggtttcctgcgccgctcaaggcgaacgacagacgctgg

SEQ ID NO: 836345 - DNA, 75 bp, synthetic construct
  source 1..75: mol_type = other DNA
gaaaattgcctcgtcggttcttggtatcagtgctaacactatttataaacatctcaggactctaaataacagggt

SEQ ID NO: 836346 - DNA, 75 bp, synthetic construct
  source 1..75: mol_type = other DNA
cctgattcatataacctgggcttactgacaccgggagaaacaaagaaccatggtgatatgaatatcatctgggag

SEQ ID NO: 836347 - DNA, 75 bp, synthetic construct
  source 1..75: mol_type = other DNA
tccctggcttacgcgccgaacgcaaagtcatcagcaagttaagcccccgaagttacctaaaaagaagcctgatcc

SEQ ID NO: 836348 - DNA, 75 bp, synthetic construct
  source 1..75: mol_type = other DNA
cacgcattggcatttctattcggcaggttaaacgtctggtgcaacggtatagaaatgaagggccttctggtctgg

SEQ ID NO: 836349 - DNA, 75 bp, synthetic construct
  source 1..75: mol_type = other DNA
tcattgatgatgccaccagtgcgttgatggcgttgcgttttgtgcctgctgaaacaacccgggcttacatggaaa

SEQ ID NO: 836350 - DNA, 75 bp, synthetic construct
  source 1..75: mol_type = other DNA
ccatcacccgttataaccacagcacccattacgcaatggcggtctggcagttaggacaagccgtggcgctggcgc

SEQ ID NO: 836351 - DNA, 75 bp, synthetic construct
  source 1..75: mol_type = other DNA
ggtaaaatcgtaatcaaccaacgttctctggaacagtactttggtcgtgaaactgctcgcatggtagttcgtcag

SEQ ID NO: 836352 - DNA, 75 bp, synthetic construct
  source 1..75: mol_type = other DNA
cgcaaatcggtttatcccttctccgtgctcgacgacatcaccgccagcgaactcattaacgatattgaatcactg

SEQ ID NO: 836353 - DNA, 75 bp, synthetic construct
  source 1..75: mol_type = other DNA
ctgcgtagcgctggaagattcggtaaatggcatgatcgcctctaaagcagcccgcatgcgttcctgcgccagaag

SEQ ID NO: 836354 - DNA, 75 bp, synthetic construct
  source 1..75: mol_type = other DNA
tatcgccatcatcatcccgattgtactcacctcgtttatctatcagcggaaataccgcctgggcacgctggatat

SEQ ID NO: 836355 - DNA, 75 bp, synthetic construct
  source 1..75: mol_type = other DNA
aactctgggagtggcacatcggtacatatcggaaatggcggccagagccctgccaacatggaactggaagggggg

SEQ ID NO: 836356 - DNA, 75 bp, synthetic construct
  source 1..75: mol_type = other DNA
ccgcgactaacgccatcagcgatatcttcgcgatgggcggaaaaccgattatggcaattgcgatcctcggctggc

SEQ ID NO: 836357 - DNA, 75 bp, synthetic construct
  source 1..75: mol_type = other DNA
gtctggtggtgaagatgccggatatcttaatgattttccttttgcctttccgtcagcatgttatggaatgatagt

SEQ ID NO: 836358 - DNA, 75 bp, synthetic construct
  source 1..75: mol_type = other DNA
ttcagcaataccaattattgtgttgttgcatcgtacgataatgcacggtcaggtgtgtcaacaatggttagtttt

SEQ ID NO: 836359 - DNA, 75 bp, synthetic construct
  source 1..75: mol_type = other DNA
gaaagctgccagccttctacatgacagacccattaaaaccaagagggaaagctgaattatgggtaaatcgtcgtg

SEQ ID NO: 836360 - DNA, 75 bp, synthetic construct
  source 1..75: mol_type = other DNA
tgctcacagactggcatggttgattgtttatggcaccatgcccgatggttttattgatcacatcaacagggtaag

SEQ ID NO: 836361 - DNA, 75 bp, synthetic construct
  source 1..75: mol_type = other DNA
gaacaatatcctgttctggccagagtctacccgaccctccgtcttcccgatttgcgcggtgagtttatccgtgga

SEQ ID NO: 836362 - DNA, 75 bp, synthetic construct
  source 1..75: mol_type = other DNA
tgagttgtacgataatgaagtatgttctgatacagaaaccttgaacaatctccgtcttctgtttgagcttaacga

SEQ ID NO: 836363 - DNA, 75 bp, synthetic construct
  source 1..75: mol_type = other DNA
cagaacaacttggacgagactgctggtgagctgatcgaaaacatccagcgggatgacttgactccggtagagatt

SEQ ID NO: 836364 - DNA, 75 bp, synthetic construct
  source 1..75: mol_type = other DNA
aacgcatggctttattcaggtcgtctggaaaagcgcatgagcagcgtaatagcggagttcatggcgaagagtata

SEQ ID NO: 836365 - DNA, 75 bp, synthetic construct
  source 1..75: mol_type = other DNA
cggcgactaacgccatcagcgatatcttcgcgatggggggcaaaccgattatggcgattgcgatcctcggctggc

SEQ ID NO: 836366 - DNA, 75 bp, synthetic construct
  source 1..75: mol_type = other DNA
gcgcctttaggcgctgggcgagggttcgtgatgactgcagaaggcccaacgttaaccggctttaattctgcttac

SEQ ID NO: 836367 - DNA, 75 bp, synthetic construct
  source 1..75: mol_type = other DNA
atgccatttgctcgttatttctgcattttcataaacgttggtttaggagaagcggcgaaaagggatgtgggcaca

SEQ ID NO: 836368 - DNA, 75 bp, synthetic construct
  source 1..75: mol_type = other DNA
tgccgacccagttaagtttattaccagagccaaccaaccaggcctcggcgcttcatttttagcgttaggctgtta

SEQ ID NO: 836369 - DNA, 75 bp, synthetic construct
  source 1..75: mol_type = other DNA
aaccttggtttgggagaagcggcaaaacgggatgtggggacaggggaaaatcagataccggatatctccaacttt

SEQ ID NO: 836370 - DNA, 75 bp, synthetic construct
  source 1..75: mol_type = other DNA
gaagcggcaaaacgggatgtggggacaggggaaaatcagataccggatatctccaactttccatttacaaaaaac

SEQ ID NO: 836371 - DNA, 75 bp, synthetic construct
  source 1..75: mol_type = other DNA
ggctctcgaaaaccttcaattgggagaagcggcaaaacgggatgtcggaaccggtaataatcaactcccggacat

SEQ ID NO: 836372 - DNA, 75 bp, synthetic construct
  source 1..75: mol_type = other DNA
ctggtcggtttaggagcggtgtgttttaccctgttctccattgtttcgatattagaagcaggttcagcaaagaaa

SEQ ID NO: 836373 - DNA, 75 bp, synthetic construct
  source 1..75: mol_type = other DNA
catgattccggtatttacctgcctgttttgcctgttccttgccgcattccttgcggaaattgcgcaaatcaatat

SEQ ID NO: 836374 - DNA, 75 bp, synthetic construct
  source 1..75: mol_type = other DNA
gtcactgctggcaagtgataatgtcatggccgatgaatttgttgccggacatgttatttttggtgttgggatgat

SEQ ID NO: 836375 - DNA, 75 bp, synthetic construct
  source 1..75: mol_type = other DNA
aatggggattgctgacgcctctgaaatcaggtggctatgtgaatattaaccttcctgtcgcttttcctactatgg

SEQ ID NO: 836376 - DNA, 75 bp, synthetic construct
  source 1..75: mol_type = other DNA
aaacacgacccgctttatcagtggacatttccctataccattccctaatcggccgatggtttcagtcagtgttat

SEQ ID NO: 836377 - DNA, 75 bp, synthetic construct
  source 1..75: mol_type = other DNA
ctacgtattaatcagttcagatgcaagcgcccgcctggcccccggcattattctcatttgcctggggatgatctg

SEQ ID NO: 836378 - DNA, 75 bp, synthetic construct
  source 1..75: mol_type = other DNA
ctggctgaagattactgctgagcagctgaaaaaagcgccttccgttgaggtatgccgtgaactggctgtggcggc

SEQ ID NO: 836379 - DNA, 75 bp, synthetic construct
  source 1..75: mol_type = other DNA
aatacggcatttgatggttttgttgtcgccatatgccgtcaaattggggctgctttagaactcccttacgaactc

SEQ ID NO: 836380 - DNA, 75 bp, synthetic construct
  source 1..75: mol_type = other DNA
tggcagagaagagaatgctcgccgtgagttggggctgattacgcctcctgtttctgaggtaaatgaacaaaatat

SEQ ID NO: 836381 - DNA, 75 bp, synthetic construct
  source 1..75: mol_type = other DNA
gaaccggggctgaagttccaaccggttcatagtctggaggaactgaacgccaaagcgaagctgtggcggcagcac

SEQ ID NO: 836382 - DNA, 75 bp, synthetic construct
  source 1..75: mol_type = other DNA
gaagtcagaaagaacgagtttggctttgctgaaggcgcggcggtatttggcgaaagttacaaagccctgccggaa

SEQ ID NO: 836383 - DNA, 75 bp, synthetic construct
  source 1..75: mol_type = other DNA
taccgccagttaacggcacagtaaccggacggcgtaccggaagctgcactggatgaagtcatggccacgctgacc

SEQ ID NO: 836384 - DNA, 75 bp, synthetic construct
  source 1..75: mol_type = other DNA
tcaaacggttttatcaccgcaggtagaacggacgaggccacaggcgagtttttccctctgtcagatgacaccatc

SEQ ID NO: 836385 - DNA, 75 bp, synthetic construct
  source 1..75: mol_type = other DNA
aaggtaaaactcttagccaaccgcgcgcaggcgtggcgctgatggacgaacacatcgaactactgaaaacactac

SEQ ID NO: 836386 - DNA, 75 bp, synthetic construct
  source 1..75: mol_type = other DNA
gccagcaccgtcggcgatgtgcgcattgttgacccggcaatcacccagcctggcgtgctgaaaccgaagaaaggg

SEQ ID NO: 836387 - DNA, 75 bp, synthetic construct
  source 1..75: mol_type = other DNA
ttcccacaagttctgtcgtttaaccgctggctgctggtatgggataaaacgtcgttatcagatgcattgtttaac

SEQ ID NO: 836388 - DNA, 75 bp, synthetic construct
  source 1..75: mol_type = other DNA
gtgctgctgtgctggatggggattacctcgccagaagacttacgcaaaaaacgcccgtatgtgctggttggcgca

SEQ ID NO: 836389 - DNA, 75 bp, synthetic construct
  source 1..75: mol_type = other DNA
ctgtctcaattatgactgtctgtcgatggaaaattacgaaggcgttcgcttgcgtcagtacaggatgaggctgga

SEQ ID NO: 836390 - DNA, 75 bp, synthetic construct
  source 1..75: mol_type = other DNA
tccgcggacatctgccagcacatattgccctcgtcggtctgcaacccgcgatgctcgacgactacggcggcagcc

SEQ ID NO: 836391 - DNA, 75 bp, synthetic construct
  source 1..75: mol_type = other DNA
gcactggatgaagtcatggccacgctgaccacgccggcccgcagcagggttatcagcattgttaacggcaactga

SEQ ID NO: 836392 - DNA, 75 bp, synthetic construct
  source 1..75: mol_type = other DNA
ttgaaaaaagcgccttccgttgaggtttgccgtgaactggctgtggcagcaccagaactccgcaaagtcacgcca

SEQ ID NO: 836393 - DNA, 75 bp, synthetic construct
  source 1..75: mol_type = other DNA
gctggccgcgaaatggcgcagccactttaacgccacggctgttcacagccgccacggtaaaacccgcacggatat

SEQ ID NO: 836394 - DNA, 75 bp, synthetic construct
  source 1..75: mol_type = other DNA
tggtttatgtcgcccgcgcggcacgtgacgcggggcatggtaaacgcggcgcagtatacgacgctgcctgtgctg

SEQ ID NO: 836395 - DNA, 75 bp, synthetic construct
  source 1..75: mol_type = other DNA
cggccttacctggacgccggaacattaccgccagttaacggcacagtatccggacggcgtaccggaagccgcact

SEQ ID NO: 836396 - DNA, 75 bp, synthetic construct
  source 1..75: mol_type = other DNA
agaacggtaagcgtctctattccatcgcagatgcagtggaaaccctacgggctaacggctttatcaccgcaggca

SEQ ID NO: 836397 - DNA, 75 bp, synthetic construct
  source 1..75: mol_type = other DNA
tgtatgacgacctgaatgcgaatggtcttcctggtgaaagtacagccatgaagacgtctgatatacagaacattc

SEQ ID NO: 836398 - DNA, 75 bp, synthetic construct
  source 1..75: mol_type = other DNA
tgcgccgcataccgaagtggccagtctgcatcccaatcatgtctggcagattgatgcctcgctctgcacgcttta

SEQ ID NO: 836399 - DNA, 75 bp, synthetic construct
  source 1..75: mol_type = other DNA
gcccgcgcggcacgtgacgcggggcatggtaaacgcggtgcaatatacgacgctgcctgtgctgaacttggcatg

SEQ ID NO: 836400 - DNA, 75 bp, synthetic construct
  source 1..75: mol_type = other DNA
tgctgatgctgtggcggcggaaaaagcggaactgaagctgattgcggagaaggtgaagaagggatatgtggagca

SEQ ID NO: 836401 - DNA, 75 bp, synthetic construct
  source 1..75: mol_type = other DNA
cccgacatttcgcgggctttatggttttttgctgcttggtgatttttgctgatagcttattcgatattctggatc

SEQ ID NO: 836402 - DNA, 75 bp, synthetic construct
  source 1..75: mol_type = other DNA
cgggccgcgcactgaacaacgtcccatgacttatgtggaggccgcgaaagccctgcgcgataagttcagcgccaa

SEQ ID NO: 836403 - DNA, 75 bp, synthetic construct
  source 1..75: mol_type = other DNA
tttcccgttgtccgaagatgccatcagtcgtgccctgcgtaactatggcctgcacccggaacaactggatgcccc

SEQ ID NO: 836404 - DNA, 75 bp, synthetic construct
  source 1..75: mol_type = other DNA
ccggcaactggctgaaatctcagcaatgacagaaagcattggcggtaaaaccgcactggactgggccatgaaaca

SEQ ID NO: 836405 - DNA, 75 bp, synthetic construct
  source 1..75: mol_type = other DNA
tggatgggaagacaattcccgataaccggcatgatgtctccatccggtttatggattttgtgcgcgataatccgc

SEQ ID NO: 836406 - DNA, 75 bp, synthetic construct
  source 1..75: mol_type = other DNA
gcagtcgtacactgcgtaatattcagcgccgctttatgattgatattgatcaggcgcagcgcgtggtcaacgttg

SEQ ID NO: 836407 - DNA, 75 bp, synthetic construct
  source 1..75: mol_type = other DNA
ggggtgatcaacgtcttcaggggactgagctggaattacaaaaccaattgcccttgcaaatttggcagtaaaatt

SEQ ID NO: 836408 - DNA, 75 bp, synthetic construct
  source 1..75: mol_type = other DNA
atcgttaacaatctggtgagatgggaccggtggggatttcatcttatcaccgggcaacaggcagatcgactcgcc

SEQ ID NO: 836409 - DNA, 75 bp, synthetic construct
  source 1..75: mol_type = other DNA
atcgtcaacaacctggtgaggtgggaccggtggggctttcatcttatcaccgggcaacaggcagatcgacttgct

SEQ ID NO: 836410 - DNA, 75 bp, synthetic construct
  source 1..75: mol_type = other DNA
caggaaatcctcggttgtccagtgcaagtcattagtggtgaagaggaagctcgcctgatttatcagggtgttgct

SEQ ID NO: 836411 - DNA, 75 bp, synthetic construct
  source 1..75: mol_type = other DNA
gaagcaataagccgcgatttgctcatcagcgcctgtcagcttcatgaaatcggcctgagcgttgacttcaaacaa

SEQ ID NO: 836412 - DNA, 75 bp, synthetic construct
  source 1..75: mol_type = other DNA
aggatattcgcagccgtacgctgcgtaatattcaacgccgctttatgatcgatattgatcaggcacagcgcgtag

SEQ ID NO: 836413 - DNA, 75 bp, synthetic construct
  source 1..75: mol_type = other DNA
gcagccgaacactgcataatattcagcgccgctttatgattgatattgatcaggctcagcgcgtagccagcgttg

SEQ ID NO: 836414 - DNA, 75 bp, synthetic construct
  source 1..75: mol_type = other DNA
cgaagttgcagcaactgaaacagcgcgctattcattgcggtcggctggaagagctggagattgaagggttaacgc

SEQ ID NO: 836415 - DNA, 75 bp, synthetic construct
  source 1..75: mol_type = other DNA
gcagaaaaagctgctggcgacgctgttgctcaaccaaactaatccggtcgatctctcatcgctgcatcaacaaaa

SEQ ID NO: 836416 - DNA, 75 bp, synthetic construct
  source 1..75: mol_type = other DNA
ccgcactggactgggcgatgaaacaggattttcgctgtggctgctggctcatggagaaacctgaaacggcaatga

SEQ ID NO: 836417 - DNA, 75 bp, synthetic construct
  source 1..75: mol_type = other DNA
cttacctggcgactggttgtgggtttcgccgcagccagtcgctgaaaaccactgtactccctcggcgctacaaac

SEQ ID NO: 836418 - DNA, 75 bp, synthetic construct
  source 1..75: mol_type = other DNA
ttgaaggaaagagcattccattattttttagtaaacaaaatgaaaaattcaatacaccaatagatataaattatc

SEQ ID NO: 836419 - DNA, 75 bp, synthetic construct
  source 1..75: mol_type = other DNA
taaaaaggctggtgcatttggtgtatgatgtgcgccgcgatgatgcgccactgcgcaaagttgctgggattccgg

SEQ ID NO: 836420 - DNA, 75 bp, synthetic construct
  source 1..75: mol_type = other DNA
aaaggtttaccagttattgtctggtgcgcactaccggacttcaccgctggatttacgccggatgatggacgcgcc

SEQ ID NO: 836421 - DNA, 75 bp, synthetic construct
  source 1..75: mol_type = other DNA
atttacgccgcatgatggatgcaccagggcaacattttttacaggcggctggcgaaaacgagattgccggggcgc

SEQ ID NO: 836422 - DNA, 75 bp, synthetic construct
  source 1..75: mol_type = other DNA
gggctacgaaggcaccggacgtggttttttgctgaaattttgcgctcgctttccgcatttacaccgttttgaact

SEQ ID NO: 836423 - DNA, 75 bp, synthetic construct
  source 1..75: mol_type = other DNA
tttctgccgcacctggctgcaatgcgattgcggtagtggaatatgttttctcgtcgttgctaatgcttgccgaac

SEQ ID NO: 836424 - DNA, 75 bp, synthetic construct
  source 1..75: mol_type = other DNA
agataagagtgcctaccaggatattcagaacgcccccagcccggcggcgcaaatccgcatacaaaaacagcgtga

SEQ ID NO: 836425 - DNA, 75 bp, synthetic construct
  source 1..75: mol_type = other DNA
tctgggacgcgaaacgctcgacgagtttgatgatctgcttgcagcccatgccggagacaatgaatttttgccctg

SEQ ID NO: 836426 - DNA, 75 bp, synthetic construct
  source 1..75: mol_type = other DNA
gccggagtttggtcgcattacgctacatggttctctcgatcagccaacgctaaaaaggctggtgcatttggtgta

SEQ ID NO: 836427 - DNA, 75 bp, synthetic construct
  source 1..75: mol_type = other DNA
gcgcggttgtcgataataccgcgctgctgacctgtctgaacgaaggccagaagctgagcgtagtgctggatgtct

SEQ ID NO: 836428 - DNA, 75 bp, synthetic construct
  source 1..75: mol_type = other DNA
ggtgcgttcagtcacaaaagtgaacgcgtcgctgctgacggggaaaccgataaaatttgttggcactgccacggc

SEQ ID NO: 836429 - DNA, 75 bp, synthetic construct
  source 1..75: mol_type = other DNA
tggtctggcgatcctgatagccatttttaccgaactgaatattcagtgtatgaccctggcgggcggtgcgctgcg

SEQ ID NO: 836430 - DNA, 75 bp, synthetic construct
  source 1..75: mol_type = other DNA
cggacaacaggcagatcgacttgccgatctggaaagaatgctacacctgttcagcggcaaaccgatccccgacaa

SEQ ID NO: 836431 - DNA, 75 bp, synthetic construct
  source 1..75: mol_type = other DNA
ggagtgatcaacgtcttcagagtgctgagctggaattacaaaaccaactcaccctgtaaatttggcagtaaaatt

SEQ ID NO: 836432 - DNA, 75 bp, synthetic construct
  source 1..75: mol_type = other DNA
gggctccgcgcacatcacgttcagaaaaccggaactgattgatcggctaaatgacatcattgcgaagtattatcc

SEQ ID NO: 836433 - DNA, 75 bp, synthetic construct
  source 1..75: mol_type = other DNA
tcagcggtaaaccaatccccgacaatcgggaaaacatcactattcgtctggatgagcacattcagtctgttcagg

SEQ ID NO: 836434 - DNA, 75 bp, synthetic construct
  source 1..75: mol_type = other DNA
ggattttcgctgtggttgctggctgatggaaaaacctgaaacggcaatgaaagccatcacccgcaatctcgatcg

SEQ ID NO: 836435 - DNA, 75 bp, synthetic construct
  source 1..75: mol_type = other DNA
ggattttcgctgtggctgctggctcatggagaaacctgaaacggcaatgaaagccatcacacacaatcttgatcg

SEQ ID NO: 836436 - DNA, 75 bp, synthetic construct
  source 1..75: mol_type = other DNA
ggcaaaccgatcccagacaaccgggaaaacatcaccattcatctggatgagcacatccagtctgttcagggtaaa

SEQ ID NO: 836437 - DNA, 75 bp, synthetic construct
  source 1..75: mol_type = other DNA
agaagggatctgcacacatcactttcaaaaggctggaactgattgacagaattaacgatataatagccaggtact

SEQ ID NO: 836438 - DNA, 75 bp, synthetic construct
  source 1..75: mol_type = other DNA
accatagatttcatcttatcaccggacaacaggctgaccgggttgccgacctggaaagaatgttgcatctgttca

SEQ ID NO: 836439 - DNA, 75 bp, synthetic construct
  source 1..75: mol_type = other DNA
ctggactgggccatgaaacaggattttcgctgcggtttctggctgatggagaaacctgaaatcgcaatgaaagcc

SEQ ID NO: 836440 - DNA, 75 bp, synthetic construct
  source 1..75: mol_type = other DNA
gtcaacaacctggtgaggtgggaccggtgggggtttcatcttatcaccgggcaacaggccgatcgacttgccgac

SEQ ID NO: 836441 - DNA, 75 bp, synthetic construct
  source 1..75: mol_type = other DNA
aacaggccgatcgacttgccgacctggaaagaatgctgcatctgttcagcggcaaaccgatccccgacaaccggg

SEQ ID NO: 836442 - DNA, 75 bp, synthetic construct
  source 1..75: mol_type = other DNA
atgaaacaggattttcgctgcggctgctggctcatggagaaaccggaaaccgcaatgaaagccatcacccgcaat

SEQ ID NO: 836443 - DNA, 75 bp, synthetic construct
  source 1..75: mol_type = other DNA
tggctgaaatatcagcaatgacagaaagtattggcggtaaagccgccccggactgggccatgaaacaggattttc

SEQ ID NO: 836444 - DNA, 75 bp, synthetic construct
  source 1..75: mol_type = other DNA
gacctggaaagaatgttgcatctgctcagcggtaaaccgatccccgacaaccggggaatatcaccattaatctgg

SEQ ID NO: 836445 - DNA, 75 bp, synthetic construct
  source 1..75: mol_type = other DNA
cgttccgggatgctttccttaatggatgcacaggcacgtgatacatggtacaggtcactggaatatgataatttt

SEQ ID NO: 836446 - DNA, 75 bp, synthetic construct
  source 1..75: mol_type = other DNA
cgctggtgattttattgccaaagcgcaggaaattcttggttgtccggtgcaggtgatcagcggtgaagaggaagc

SEQ ID NO: 836447 - DNA, 75 bp, synthetic construct
  source 1..75: mol_type = other DNA
gaactggagattgatgggttaacgctggagcgcgcgttagtcttcccgagtggtctggcgattctcatcgccatt

SEQ ID NO: 836448 - DNA, 75 bp, synthetic construct
  source 1..75: mol_type = other DNA
gagctagagattgacgggctgacgctggaacgtgcgttagtgttcccgagtggtctggcgatcctgatcgccatt

SEQ ID NO: 836449 - DNA, 75 bp, synthetic construct
  source 1..75: mol_type = other DNA
tgagcacatttgaacaactgcaccagaataacgatgaagtgtttgaccggggtgtgatcaacgtcttcaaagggc

SEQ ID NO: 836450 - DNA, 75 bp, synthetic construct
  source 1..75: mol_type = other DNA
ggaaaacatcaccattcatctggatgagcacatccagtctgttcagggtaaagagagctatgaagacgagatgtt

SEQ ID NO: 836451 - DNA, 75 bp, synthetic construct
  source 1..75: mol_type = other DNA
gatgatcacgtccagtctgttcagggtaaagaggactatgaagatgagatgttcagcatcagatactttaagaag

SEQ ID NO: 836452 - DNA, 75 bp, synthetic construct
  source 1..75: mol_type = other DNA
cgggcaacagactgaccgactcgtcgacctggaaagaatgctacatctgttcagcagcaaaccgatccccgacaa

SEQ ID NO: 836453 - DNA, 75 bp, synthetic construct
  source 1..75: mol_type = other DNA
tgagcacatttgaacaactgcaccagaataacgatgatgtgtttgaccggggggtgatcaacgtcttcaaagggc

SEQ ID NO: 836454 - DNA, 75 bp, synthetic construct
  source 1..75: mol_type = other DNA
tgagcacatttgaacaactgcaccagaataacgatgaagtgtttgaccggggggtgatcaacgtcttcatagggc

SEQ ID NO: 836455 - DNA, 75 bp, synthetic construct
  source 1..75: mol_type = other DNA
atggcagagactgcccggctgaaagacgcgggactggaggcagcgctggagctggcgcggctgatgggactgcgc

SEQ ID NO: 836456 - DNA, 75 bp, synthetic construct
  source 1..75: mol_type = other DNA
tgacctgaaaaccgcgatgaaatactggcacagtcaggcgttggggcttggtttaactggcgcatattccccgca

SEQ ID NO: 836457 - DNA, 75 bp, synthetic construct
  source 1..75: mol_type = other DNA
ggatggcggcagcgctggaactctcaaggctgatgggcctgcgttcgcaggaggcggtgcaaagcgcacagtcgc

SEQ ID NO: 836458 - DNA, 75 bp, synthetic construct
  source 1..75: mol_type = other DNA
gatccagcgggtggagcagatcaaagttcgccatatcgaatgctacattcaggagcggctggagcaggatattgg

SEQ ID NO: 836459 - DNA, 75 bp, synthetic construct
  source 1..75: mol_type = other DNA
tctcaaatcggccatgaactactggcgcaaacaggccgttagcgtcggattgactggcgcatattctccgcactc

SEQ ID NO: 836460 - DNA, 75 bp, synthetic construct
  source 1..75: mol_type = other DNA
acggtccggtcagcaaaatgcagcattcgcttggtaagctcaacatgctgcactacttcccggaaaaactgttca

SEQ ID NO: 836461 - DNA, 75 bp, synthetic construct
  source 1..75: mol_type = other DNA
ggctggagcgctcctgtcagcgatcactgcgccaatgtgtgtggtatctaacggcccaaataacaaaatgcagca

SEQ ID NO: 836462 - DNA, 75 bp, synthetic construct
  source 1..75: mol_type = other DNA
taattagtgaactgaaaaacggtaaggccagcgtgatgactcgtggttgcgaaggatactgcggggcttctgcgg

SEQ ID NO: 836463 - DNA, 75 bp, synthetic construct
  source 1..75: mol_type = other DNA
cgcagcagcacagtacgtaaaacccggagtggttctaaccctgaatccggcaaagggcaatgctgaattcaacat

SEQ ID NO: 836464 - DNA, 75 bp, synthetic construct
  source 1..75: mol_type = other DNA
tgaagggggaattttcccctcactccctgcgctatgcctgggcgcaggatgcgatccgccattatctggcgcagg

SEQ ID NO: 836465 - DNA, 75 bp, synthetic construct
  source 1..75: mol_type = other DNA
accgcccgacggaaagatgcgggactggcggcggcgcttgaactggcgcggctgatggggctacgctcgcaggag

SEQ ID NO: 836466 - DNA, 75 bp, synthetic construct
  source 1..75: mol_type = other DNA
gggattcagcgaaaaagaggcgctggcaatggtggcgatggacctggggcatggcgacgggcgcggtcgctgggt

SEQ ID NO: 836467 - DNA, 75 bp, synthetic construct
  source 1..75: mol_type = other DNA
atcagcgaggctcaaagcctgagcaacagcttgtctcagacctcaagcctggcgacatcgcagttaaaccagtgg

SEQ ID NO: 836468 - DNA, 75 bp, synthetic construct
  source 1..75: mol_type = other DNA
aaaggaaagtatcagtgaaaaaattgctgaactcgaactgcgactcagaaaagacagacgaaatgagatcgttga

SEQ ID NO: 836469 - DNA, 75 bp, synthetic construct
  source 1..75: mol_type = other DNA
atgttcagaaaccagtttggcacaactcgctacgattgcctgacggagaaacattatcaaatgaccaatgggtaa

SEQ ID NO: 836470 - DNA, 75 bp, synthetic construct
  source 1..75: mol_type = other DNA
ggaagaacaaattggctatacgctatttacccgcaaagataataatatcagcctcaataaagccggacaggaact

SEQ ID NO: 836471 - DNA, 75 bp, synthetic construct
  source 1..75: mol_type = other DNA
tgattgctgaatttgatagcagcaaacaacttcgccctgatgttcagaaggccgtttggcacaactcgcttcgct

SEQ ID NO: 836472 - DNA, 75 bp, synthetic construct
  source 1..75: mol_type = other DNA
ttctcagaaaatatggaaagagcatcctccacaaggttcctacaaacttctcagaagtctattcaacacatcatc

SEQ ID NO: 836473 - DNA, 75 bp, synthetic construct
  source 1..75: mol_type = other DNA
aagaaaagtttcccgtaatgaacagatgcttgcagaacggactggccttccctcccctaaagaagctctacaaca

SEQ ID NO: 836474 - DNA, 75 bp, synthetic construct
  source 1..75: mol_type = other DNA
acccgtaacattatggatctgatcaaatgggccggattttacgttctggtgattgccgttctgattggtgataaa

SEQ ID NO: 836475 - DNA, 75 bp, synthetic construct
  source 1..75: mol_type = other DNA
atttcaaaactgccggtcgatattgcgctgggtaaaaccgcaacgagcagctggcagcagcaacagcgtgatgcc

SEQ ID NO: 836476 - DNA, 75 bp, synthetic construct
  source 1..75: mol_type = other DNA
atccggacccgtaatattatggatctggtcaagtgggccggattttatgttctggtcattgccgttttgattggc

SEQ ID NO: 836477 - DNA, 75 bp, synthetic construct
  source 1..75: mol_type = other DNA
gggctctgttgattctaatcgacagatacttggtaaagttgctggtctggtcaccggcggaaaaatctctttgga

SEQ ID NO: 836478 - DNA, 75 bp, synthetic construct
  source 1..75: mol_type = other DNA
caggagtttgtcgggtatgtcaccagccagcgtccgggagaggctgaccagctgctttctgacactgccagcccg

SEQ ID NO: 836479 - DNA, 75 bp, synthetic construct
  source 1..75: mol_type = other DNA
ggtaaaattggtgggctggcaacaggacttaaaggctctgctgaagggcatgtcaaatacgctggccgaagtgga

SEQ ID NO: 836480 - DNA, 75 bp, synthetic construct
  source 1..75: mol_type = other DNA
accactacgccttatctttttttacatacgccagatatttgcccaggccccggaactggtacataccctgtggga

SEQ ID NO: 836481 - DNA, 75 bp, synthetic construct
  source 1..75: mol_type = other DNA
gtaccttcgggtggtggcagccaggatattattgctgaccatcagggacatcaggccattattgagcaaagaacg

SEQ ID NO: 836482 - DNA, 75 bp, synthetic construct
  source 1..75: mol_type = other DNA
agcatgagtgggcagatgagtgaagacctatcgcaacagtttgcacagtatgtgatgaaacacgctccgcaggat

SEQ ID NO: 836483 - DNA, 75 bp, synthetic construct
  source 1..75: mol_type = other DNA
gcgtcgaacagagcagaaagcgccctgcatgggttcagcagcagtattgccagtgcctggaactcgctcagtcag

SEQ ID NO: 836484 - DNA, 75 bp, synthetic construct
  source 1..75: mol_type = other DNA
acgagacatattggctttgacgaaaattcggagcattttgttggcgagccttttgccattaatgtcaaatcatta

SEQ ID NO: 836485 - DNA, 75 bp, synthetic construct
  source 1..75: mol_type = other DNA
gtcggttcaggaaagaatgcccggggctgacagtccacaggaactgatgaaaagggcaaaggagtatcaggataa

SEQ ID NO: 836486 - DNA, 75 bp, synthetic construct
  source 1..75: mol_type = other DNA
gatgaagagcgagaaagtcaaaagataatacctgagccatcaggagaggctgtgaaaaaaatgattgatggtaaa

SEQ ID NO: 836487 - DNA, 75 bp, synthetic construct
  source 1..75: mol_type = other DNA
gtagatgatataagacgcacatgccgttgttcagatcctgaatgtagtttcaaacgtcgaatcgagcaatttgaa

SEQ ID NO: 836488 - DNA, 75 bp, synthetic construct
  source 1..75: mol_type = other DNA
acggcgatggcactattacccattagcgaagcgggtaaacaattgacagaatgtgagcattatcgtttacgccgc

SEQ ID NO: 836489 - DNA, 75 bp, synthetic construct
  source 1..75: mol_type = other DNA
tcgcgaagccagcagcggttgctatacggcgatggcgttgttaccgattagcgaagcgggtaaacaattggcaga

SEQ ID NO: 836490 - DNA, 75 bp, synthetic construct
  source 1..75: mol_type = other DNA
ctatcagcccgactgccagtgcggcaggtagtgtggttgacggtaattactcctacggcaacatgcagacggaaa

SEQ ID NO: 836491 - DNA, 75 bp, synthetic construct
  source 1..75: mol_type = other DNA
ttttttatgtattaaattcgcttgttaagctaattttcatacccctcatttttatcaatgataattatatctatc

SEQ ID NO: 836492 - DNA, 75 bp, synthetic construct
  source 1..75: mol_type = other DNA
catttccgctatattttcagagttattagttctgattttatgctatggtttatatttgaaattaaaacacaaact

SEQ ID NO: 836493 - DNA, 75 bp, synthetic construct
  source 1..75: mol_type = other DNA
attcggagcattttgttggcgagccttttgccattaatgtcaaatcattagggggacctcgcttacagattgcat

SEQ ID NO: 836494 - DNA, 75 bp, synthetic construct
  source 1..75: mol_type = other DNA
cgaagcgcgtaagagcgtgttctacgccaccggatttatgggctacttctatatcctgacctttattatcggttt

SEQ ID NO: 836495 - DNA, 75 bp, synthetic construct
  source 1..75: mol_type = other DNA
atgaaaagagttatgacggcgcttgccgccacactccctttcgcagcgaacgccgcggatgccattagcggggcc

SEQ ID NO: 836496 - DNA, 75 bp, synthetic construct
  source 1..75: mol_type = other DNA
atgtactggtcgaaactgaccacgcgtggcgcgatgatgggtggctggctggggctgattaccgcagtggtactg

SEQ ID NO: 836497 - DNA, 75 bp, synthetic construct
  source 1..75: mol_type = other DNA
atttcaggtctggttacaaaaattagcgcagtggcatcagaccactacgccttatctttttttacatacgccaga

SEQ ID NO: 836498 - DNA, 75 bp, synthetic construct
  source 1..75: mol_type = other DNA
gataggaactaatggcactccttttattaaaattacacgaacaaaagaaaatggtagaattgttgacactcaaga

SEQ ID NO: 836499 - DNA, 75 bp, synthetic construct
  source 1..75: mol_type = other DNA
gccaccggatttatgggttacttctatatcctgacctttattatcggttttggcgcgatcatgctggtcggtgcg

SEQ ID NO: 836500 - DNA, 75 bp, synthetic construct
  source 1..75: mol_type = other DNA
ggatgcgtaccgatgccaacggtaaaggcgttatcaatatcctcagcgccgagaagctttatcagatgccgaaac

SEQ ID NO: 836501 - DNA, 75 bp, synthetic construct
  source 1..75: mol_type = other DNA
atcctacttcagcgaattaagtaagcttgataaagaggatgttactcttcttatggactattaccatgagcaaag

SEQ ID NO: 836502 - DNA, 75 bp, synthetic construct
  source 1..75: mol_type = other DNA
attcggagcattttgttggcgagccttttgccattaatgtcaaatcattaggagggcctcgcttacagattgcat

SEQ ID NO: 836503 - DNA, 75 bp, synthetic construct
  source 1..75: mol_type = other DNA
ctccgcgctggtgtttacctccggctatgacggcttaatttactcgctgggcttcctggtgggctggccgatcat

SEQ ID NO: 836504 - DNA, 75 bp, synthetic construct
  source 1..75: mol_type = other DNA
ccgcaggtactgctggataagattgagcaggtaataaggcttatccgttcaaaaggcgtgggcgtctggtttgtt

SEQ ID NO: 836505 - DNA, 75 bp, synthetic construct
  source 1..75: mol_type = other DNA
atcctcccgcgaaagggaaagaggtggcggtggatgacggtattcttggtggattgaaggatattttgtttggca

SEQ ID NO: 836506 - DNA, 75 bp, synthetic construct
  source 1..75: mol_type = other DNA
tgtaaatatcaccctgccgatatctttcagcaataccaattattgtgttgttgcatcgtacgataatgcacggtc

SEQ ID NO: 836507 - DNA, 75 bp, synthetic construct
  source 1..75: mol_type = other DNA
agcaactggacgatcaggcagactcgcaagaaacgctcgcgttggcagtcactaaacatcatcaacaagcgctgg

SEQ ID NO: 836508 - DNA, 75 bp, synthetic construct
  source 1..75: mol_type = other DNA
cagattgccgaagccagtgacgaattacgccactactgcgatcgtctggatctcgaccctaaccgcttgtgtgaa

SEQ ID NO: 836509 - DNA, 75 bp, synthetic construct
  source 1..75: mol_type = other DNA
cggcctttgtctcggtggtcgcgctgaagccgacatggtgcggaccggcgctgctcgcgcagacctgtgcgctcg

SEQ ID NO: 836510 - DNA, 75 bp, synthetic construct
  source 1..75: mol_type = other DNA
ccccaactgacgctcagcggcgttcagggcgggcattattcatgggcgaccgtggtgtcgccattcgtttcccca

SEQ ID NO: 836511 - DNA, 75 bp, synthetic construct
  source 1..75: mol_type = other DNA
gtagcagccgtgcgcgacagcggcggacttctctcattgggtagcgattcacacagcgcgttttctctgggggac

SEQ ID NO: 836512 - DNA, 75 bp, synthetic construct
  source 1..75: mol_type = other DNA
ccgaccgcattgagtttcgggttaccaccaaccctggtcagccaatgcagcctatcgccaaagtcgcatccggtg

SEQ ID NO: 836513 - DNA, 75 bp, synthetic construct
  source 1..75: mol_type = other DNA
gaaagatacgccagcggctctgcgctggctggaagaaaaccagcttgaagacgggcatgaatgtttgcttcgtcg

SEQ ID NO: 836514 - DNA, 75 bp, synthetic construct
  source 1..75: mol_type = other DNA
tggacagcaaactgtccggcgtacttgatatgctggaagaagctaccatccagattgctgaagccagcgatgaac

SEQ ID NO: 836515 - DNA, 75 bp, synthetic construct
  source 1..75: mol_type = other DNA
gcactacgctggcgttcgtgatggcagccggattcattgccgataccgccagcctgccgcttatcgtctcgaacc

SEQ ID NO: 836516 - DNA, 75 bp, synthetic construct
  source 1..75: mol_type = other DNA
tttttctctaaaagatacgcccgcagcactgcactggctggaagaaaaccaactggaagatggccacgaatgcct

SEQ ID NO: 836517 - DNA, 75 bp, synthetic construct
  source 1..75: mol_type = other DNA
atggaaaccccggcactgatttttgatgaagtggatgtagggattagcggtccaacagcggcagttgtcggcaaa

SEQ ID NO: 836518 - DNA, 75 bp, synthetic construct
  source 1..75: mol_type = other DNA
gcttcgtcgcgtaatcagtagcgatggtcgctctcgtggttttatcaacggtacagctgttccactgtcacaact

SEQ ID NO: 836519 - DNA, 75 bp, synthetic construct
  source 1..75: mol_type = other DNA
acaaagcgaccaatacgcaagcgatgatcgccactatcgccagcggcaatgtgcatataataagccatcccggaa

SEQ ID NO: 836520 - DNA, 75 bp, synthetic construct
  source 1..75: mol_type = other DNA
ggatggcaagccgatcaaagtgtggaagttccgttccatgaaagtgatggagaacgacaaagtggtgacccaggc

SEQ ID NO: 836521 - DNA, 75 bp, synthetic construct
  source 1..75: mol_type = other DNA
ggatgctaatcgtaaaggggcctcagtggccatatccaacagcatgactccctttacgctggagctctatgaaga

SEQ ID NO: 836522 - DNA, 75 bp, synthetic construct
  source 1..75: mol_type = other DNA
ttgcgaaaacatacaccaatcatcaaatgggcggggggtaaaaccaaactgatgccgttcctcagtaagcacttc

SEQ ID NO: 836523 - DNA, 75 bp, synthetic construct
  source 1..75: mol_type = other DNA
aaaactagttttgtcagttacgatggtaaaccgttcagccaaagcgaccacgtgctgttagcaaatatgctcgtt

SEQ ID NO: 836524 - DNA, 75 bp, synthetic construct
  source 1..75: mol_type = other DNA
tcaaagagcggctttgttttactccctgaatcgcctgggctataacggtatgtgccgctataactcagaaagaat

SEQ ID NO: 836525 - DNA, 75 bp, synthetic construct
  source 1..75: mol_type = other DNA
tgctgctgatccccgatgtctttaccttcaacattctccattcacgtctcgaagagatgaacggcgtaccggtgg

SEQ ID NO: 836526 - DNA, 75 bp, synthetic construct
  source 1..75: mol_type = other DNA
cgccggaaggcagcaagcattatgggcaattgacgcactacgccactatgttccgggctttgaaaatgtacggtt

SEQ ID NO: 836527 - DNA, 75 bp, synthetic construct
  source 1..75: mol_type = other DNA
gaagggaatggaagagaattaccagctatggtttgaatcttttacaaaaggttggataaaaatccttgattcgaa

SEQ ID NO: 836528 - DNA, 75 bp, synthetic construct
  source 1..75: mol_type = other DNA
caccttgtttatgaaaggactgaccgtcttcgcccgaccgcaaaaaaaattcccgcaattaccggtatgcatgcg

SEQ ID NO: 836529 - DNA, 75 bp, synthetic construct
  source 1..75: mol_type = other DNA
ccagaacctcagtcaattagcgaagttatagatactgaaggatttaaagttgttgccgatcagatgataacggaa

SEQ ID NO: 836530 - DNA, 75 bp, synthetic construct
  source 1..75: mol_type = other DNA
taggcggcgtattgacgcaggttggtgtggaaagttttgcctggtatcgccatccggggacggaagattgtgaag

SEQ ID NO: 836531 - DNA, 75 bp, synthetic construct
  source 1..75: mol_type = other DNA
aaagaagacccgatgtttagcccgtatatggaggatatttttacccgcgcgcaacaggatggtgtgattccaggt

SEQ ID NO: 836532 - DNA, 75 bp, synthetic construct
  source 1..75: mol_type = other DNA
tcctgaccattgtattggttatctggcaaccgaaaggtttaagcatcggctggagtgcgacgctgggcgcaatac

SEQ ID NO: 836533 - DNA, 75 bp, synthetic construct
  source 1..75: mol_type = other DNA
gataaaattaaccttatcaaaaactgatagcgtaattattatctcatcaatcaccccaataaaaaacgaaacttt

SEQ ID NO: 836534 - DNA, 75 bp, synthetic construct
  source 1..75: mol_type = other DNA
tttatatagacatcccgttcccattagaaattatcgaggtgattgaaaaaaataaagatgcctttacaataataa

SEQ ID NO: 836535 - DNA, 75 bp, synthetic construct
  source 1..75: mol_type = other DNA
gttatttcatctgctggtgatcacctccagtaactatctggttcagcttcccgtctccatttttggttttcatac

SEQ ID NO: 836536 - DNA, 75 bp, synthetic construct
  source 1..75: mol_type = other DNA
ggtgtttgccgccggactgctggcgtttaacgatgattttaataccaactttaccatgtggctggcgtggtatct

SEQ ID NO: 836537 - DNA, 75 bp, synthetic construct
  source 1..75: mol_type = other DNA
atgatccacaaatcaagccttggagaaaaacttcgcctgattcgagaggcagagggattgtcacgtagagagatg

SEQ ID NO: 836538 - DNA, 75 bp, synthetic construct
  source 1..75: mol_type = other DNA
agctcaaattcgaccggaagctgtccaacaggactatcgggctgacactaaatatcagcccttccaccgtctttg

SEQ ID NO: 836539 - DNA, 75 bp, synthetic construct
  source 1..75: mol_type = other DNA
tttgccattccacacagcaaatcagaacacattgagcaatccaccatcagcgtggtgcgtctgcaagcgccggtg

SEQ ID NO: 836540 - DNA, 75 bp, synthetic construct
  source 1..75: mol_type = other DNA
atggacattggcggcgacaaacccgttgattatctgaacattcccgcagaggcaaacccgttcctcggttatcgc

SEQ ID NO: 836541 - DNA, 75 bp, synthetic construct
  source 1..75: mol_type = other DNA
cgtaacgaacacattccgtttgatgagaagatccagctcggcatcatgctggaagtgccgtcggtgatgttcatc

SEQ ID NO: 836542 - DNA, 75 bp, synthetic construct
  source 1..75: mol_type = other DNA
aacgtcagcgacacgctggccttcttcttcattgccttctggcgtagcccggatgcctttatggctgaacactgg

SEQ ID NO: 836543 - DNA, 75 bp, synthetic construct
  source 1..75: mol_type = other DNA
atggaaatcgcgctggtcgattactgtttcaaagtgttaatcagtatcgttttcttcctgccaatgtatggcgta

SEQ ID NO: 836544 - DNA, 75 bp, synthetic construct
  source 1..75: mol_type = other DNA
ctcgcccacttcaacctgtttgttgcccgtatcgctaccgccagcttcatggcctacgcgctgggacagatcctc

SEQ ID NO: 836545 - DNA, 75 bp, synthetic construct
  source 1..75: mol_type = other DNA
agctattacgatgctaaaccaggcggcgttaacgccgactggatgggcaatcttgaacaactactcgacgatgcc

SEQ ID NO: 836546 - DNA, 75 bp, synthetic construct
  source 1..75: mol_type = other DNA
taaagccattcgtccaagtgagtttataaataaaacttatgaagaaatagtagaactattgaggaaagaaaaatg

SEQ ID NO: 836547 - DNA, 75 bp, synthetic construct
  source 1..75: mol_type = other DNA
tgtcaacgcatctggcagatattcaggcagtaacgcccgataaaacggtacggataaaaacgctcgtgcaaggcc

SEQ ID NO: 836548 - DNA, 75 bp, synthetic construct
  source 1..75: mol_type = other DNA
caaaagtgcgcttaaccacggaccgactggtcgtgcgtctggtgcatgatcgtgatgcctggcggctggcggatt

SEQ ID NO: 836549 - DNA, 75 bp, synthetic construct
  source 1..75: mol_type = other DNA
tccgggcgatattccggtggtgtggaatatcgtctggaacgcgacggctgcgtttattgccgttattatcatcag

SEQ ID NO: 836550 - DNA, 75 bp, synthetic construct
  source 1..75: mol_type = other DNA
tcgccgcgattgttgccacgctggtgatgttacatctctattttcgcaaagatattccgcagaactacgatatgg

SEQ ID NO: 836551 - DNA, 75 bp, synthetic construct
  source 1..75: mol_type = other DNA
ctgctggctttagggttcagtaaaggcactacgctggcgttcgtgatggcggccggattcattgccgataccgcc

SEQ ID NO: 836552 - DNA, 75 bp, synthetic construct
  source 1..75: mol_type = other DNA
ccgggcctttgcagaagaaaattggtggtatttgcccgttgacgcacagctttcaggcgatgaaccagcgaaact

SEQ ID NO: 836553 - DNA, 75 bp, synthetic construct
  source 1..75: mol_type = other DNA
gctcatcgtaaccgacgacggtctacaacattatcgtctggcacgagatgtggaaattgtcgtcattgatggtgt

SEQ ID NO: 836554 - DNA, 75 bp, synthetic construct
  source 1..75: mol_type = other DNA
gtatccgttgttgctgtcggcagatactaccaccacacaggcaggcgatgaacctgtactgatttatcagcgtac

SEQ ID NO: 836555 - DNA, 75 bp, synthetic construct
  source 1..75: mol_type = other DNA
tggtatttgcccgttgacgcacagctttcgggcgatgaaccagagaaactgctcgcgcaactttcctcgctggct

SEQ ID NO: 836556 - DNA, 75 bp, synthetic construct
  source 1..75: mol_type = other DNA
taccactggccgatcatcagtctttgaattatacggatgtcagcgcgttggtaagcgacgggcaaacgctagtta

SEQ ID NO: 836557 - DNA, 75 bp, synthetic construct
  source 1..75: mol_type = other DNA
gccactctcctggttgtatggtctggtgagtggcgcgatccgtctttgctataaactaaaactgaagcgcgcctg

SEQ ID NO: 836558 - DNA, 75 bp, synthetic construct
  source 1..75: mol_type = other DNA
tcttgtccgaggcagaacaagatgagttatatggaccccccgctttcacctccgccgaccaacgcttctttttct

SEQ ID NO: 836559 - DNA, 75 bp, synthetic construct
  source 1..75: mol_type = other DNA
tccggtggcgattgcgcaaatcacacgtctgaaaatgtctggcgtattaaccgggatttatatgctggcaaccgg

SEQ ID NO: 836560 - DNA, 75 bp, synthetic construct
  source 1..75: mol_type = other DNA
tcaggaaacccagctttccgcgtcagtggaagtcaccgtaaatccggtagccgttcaatccgtaacggtaacgcc

SEQ ID NO: 836561 - DNA, 75 bp, synthetic construct
  source 1..75: mol_type = other DNA
tgctggcctcatcaacactggacagactaaaacagcccgcagagttattgttacaggagaaacaacaccggctgg

SEQ ID NO: 836562 - DNA, 75 bp, synthetic construct
  source 1..75: mol_type = other DNA
aagatgtgatccacgccagtgccgatggtcaaaagttcgaagcccggcgcgagaccttcaaaacccgttattcgt

SEQ ID NO: 836563 - DNA, 75 bp, synthetic construct
  source 1..75: mol_type = other DNA
aacgcttctggcgcctgccttcggccagcaaacatcatctggtcaacaatcccttcttccagcaaattcccacaa

SEQ ID NO: 836564 - DNA, 75 bp, synthetic construct
  source 1..75: mol_type = other DNA
gtggccaaaaattgaggcatttattacctggctaagagagcaggtatgtcagtcttgtcagtagcagcgataccg

SEQ ID NO: 836565 - DNA, 75 bp, synthetic construct
  source 1..75: mol_type = other DNA
gtggccaaaaattgaggcatttattacctggctaagagagcaggtatgtcagtcttgtcagtaccagggataccg

SEQ ID NO: 836566 - DNA, 75 bp, synthetic construct
  source 1..75: mol_type = other DNA
gtggccaaaaattgaggcatttattacctggctaagagagcaggtatgtcagtcttgtcagtatctgagataccg

SEQ ID NO: 836567 - DNA, 75 bp, synthetic construct
  source 1..75: mol_type = other DNA
ggtgttgcggctggtactgccacaatcgaggttactacccaagatggtagccacaaagcgacagcgaccgtagaa

SEQ ID NO: 836568 - DNA, 75 bp, synthetic construct
  source 1..75: mol_type = other DNA
gctttgatcgttctgatttagccgttatcgccgcgatgaatcatgttggggtggcgatgggaaggaaacgcctgg

SEQ ID NO: 836569 - DNA, 75 bp, synthetic construct
  source 1..75: mol_type = other DNA
atttgcaacgtgccggaatcgatttggcgatctactttgatgatgcgccgtcagcgcaattggctcatcactttc

SEQ ID NO: 836570 - DNA, 75 bp, synthetic construct
  source 1..75: mol_type = other DNA
tgcgcaagattgcttgccaacgcgatcatctacttcaactccgcgatactgagtcatcttctgggacactttgaa

SEQ ID NO: 836571 - DNA, 75 bp, synthetic construct
  source 1..75: mol_type = other DNA
atccggaaaaatcccttgccatccagtctgaaatcgttcggattctggataaattcgacaccctgactaactcca

SEQ ID NO: 836572 - DNA, 75 bp, synthetic construct
  source 1..75: mol_type = other DNA
ttcgtgatggcatcgaccgctatctcacgccttcccgggcccagccccgtacaacgtcagccgtgaacggtcact

SEQ ID NO: 836573 - DNA, 75 bp, synthetic construct
  source 1..75: mol_type = other DNA
ctttcctgctggtgacttctgcatctcatttaccccgcgcgatgatcttttttcaacaagcagggctgaaaccac

SEQ ID NO: 836574 - DNA, 75 bp, synthetic construct
  source 1..75: mol_type = other DNA
tcactccgctttatcgccgcgccacaaatgaaggtattcagctgtttctggccggaagtgccggacttctgcaga

SEQ ID NO: 836575 - DNA, 75 bp, synthetic construct
  source 1..75: mol_type = other DNA
ggtcaccgccgccgcgctgtttggtacctctgtgccgctcgcccatgcggcagtctctggcacaacccactgcga

SEQ ID NO: 836576 - DNA, 75 bp, synthetic construct
  source 1..75: mol_type = other DNA
gcgcggagagctcgttgatgtgctgtggggggaactggaatggtcttccccgacagatgacgatgagctgccgga

SEQ ID NO: 836577 - DNA, 75 bp, synthetic construct
  source 1..75: mol_type = other DNA
atggaacactgttttaatatggttgaccagcaaaccaccacagcgcaaactaacgctaattttttacagatcagg

SEQ ID NO: 836578 - DNA, 75 bp, synthetic construct
  source 1..75: mol_type = other DNA
ggtaatggagcaagaacaatgggtgaccaagcatactcatgttcgattaattgattttgtgttgtggtcaactaa

SEQ ID NO: 836579 - DNA, 75 bp, synthetic construct
  source 1..75: mol_type = other DNA
tatcagggcagcagcggaacgccagtccagtctgtgacatacaggaacagcggggcgatttttacagtaacgccg

SEQ ID NO: 836580 - DNA, 75 bp, synthetic construct
  source 1..75: mol_type = other DNA
caagcagaagactctcataaattacatgagcaaaattaaagcaataaggagggggctgaaccgccccgggtttcc

SEQ ID NO: 836581 - DNA, 75 bp, synthetic construct
  source 1..75: mol_type = other DNA
gtggccgatgaccagagcaaccgctttacgctgccgcaggcggtgaggctggtgaccaaaaacccggcccaggca

SEQ ID NO: 836582 - DNA, 75 bp, synthetic construct
  source 1..75: mol_type = other DNA
gtggccaaaaattgaggcatttattacctggctaagagagcaggtatgtcagtcttgtcagtaactgtgataccg

SEQ ID NO: 836583 - DNA, 75 bp, synthetic construct
  source 1..75: mol_type = other DNA
ttaagtttgattaccaggaatatcccggtctgaaccatgaaatggatgtctggcgaccagcctatgcagcctttg

SEQ ID NO: 836584 - DNA, 75 bp, synthetic construct
  source 1..75: mol_type = other DNA
aaccggcaaggatatcgccgggctgaaaactgagcttgagcagaaaaaaattaagtttgattaccaggaatatcc

SEQ ID NO: 836585 - DNA, 75 bp, synthetic construct
  source 1..75: mol_type = other DNA
acggtgaggcacgctctatgctcttgcttaatcttatcaataaagagattaagcacagtgtgaagaacaccgagt

SEQ ID NO: 836586 - DNA, 75 bp, synthetic construct
  source 1..75: mol_type = other DNA
caccgatgacagatccaggcgtcggggttatcgtgacaattgtggcgctaatttgtacgattatccttgtctcgt

SEQ ID NO: 836587 - DNA, 75 bp, synthetic construct
  source 1..75: mol_type = other DNA
agctatggcgtgctgtgtgggatgtcagtaatgggatttagtttagtgctgctacaaacggcgggaattggttaa

SEQ ID NO: 836588 - DNA, 75 bp, synthetic construct
  source 1..75: mol_type = other DNA
gcggaactcaagctgattgcggagaaaacgaaaaaggggtatgtggaacaagcggagaatgctccatcgaaacat

SEQ ID NO: 836589 - DNA, 75 bp, synthetic construct
  source 1..75: mol_type = other DNA
atcgataaagggcatctcgagccggttcaggggcgacaaaaagttgaagacggtttgggtgacctcaacaagccg

SEQ ID NO: 836590 - DNA, 75 bp, synthetic construct
  source 1..75: mol_type = other DNA
ggccgcgagtcgtcgatggggtggggatcctgcgtggcatcgaagccaatatcaaaaatattgatggtgaaattg

SEQ ID NO: 836591 - DNA, 75 bp, synthetic construct
  source 1..75: mol_type = other DNA
gtcgttaccggataccttggtgaggttgatatatcgagagactggagattaaaaaatgatgatggtatggcgttt

SEQ ID NO: 836592 - DNA, 75 bp, synthetic construct
  source 1..75: mol_type = other DNA
ctctggcgcaatttaatccacatgttttgtatctttcttatccatttggcggatttaatgacaaagccgtgaagg

SEQ ID NO: 836593 - DNA, 75 bp, synthetic construct
  source 1..75: mol_type = other DNA
cgctggcgcagtttaatccacatgtcttgtatctttcttatccgtttggcggttttaatgacaaagcggttaagg

SEQ ID NO: 836594 - DNA, 75 bp, synthetic construct
  source 1..75: mol_type = other DNA
ttatcagtaaattgaaagatcgcctgaatcaaacctggtatcaaattcgtattggcgaacgtctggtctatatca

SEQ ID NO: 836595 - DNA, 75 bp, synthetic construct
  source 1..75: mol_type = other DNA
gcaaagtcaggctgtgcgggcagatatgctacattatcagtctgatgttatgatgaacggcgcgattttgctggc

SEQ ID NO: 836596 - DNA, 75 bp, synthetic construct
  source 1..75: mol_type = other DNA
gcggcgatattacggttaccagcgaacagggcaaaggttcaacctttacgttgacgatccacgcaccgtcggtgg

SEQ ID NO: 836597 - DNA, 75 bp, synthetic construct
  source 1..75: mol_type = other DNA
ttgaactgaacgttattgttgcacgctcggtgctggaaaagctcggcaatactgtcgacgtagcgatgaccggta

SEQ ID NO: 836598 - DNA, 75 bp, synthetic construct
  source 1..75: mol_type = other DNA
gatgccgggctatgtcagcgtgctggagtcgaatctgacggcgcaggataaaaaaggcattgtagaggaaggaca

SEQ ID NO: 836599 - DNA, 75 bp, synthetic construct
  source 1..75: mol_type = other DNA
aaactcagttcaccagggccggttattttccgccagactcgctatggcatggatggcaagccgatcaaagtgtgg

SEQ ID NO: 836600 - DNA, 75 bp, synthetic construct
  source 1..75: mol_type = other DNA
ggaatgaatcatctggaaagctttggctggctggccacattcagtggtgttaccacgacgaccgtaccagatgaa

SEQ ID NO: 836601 - DNA, 75 bp, synthetic construct
  source 1..75: mol_type = other DNA
cgcaaatcatggataacctgctggctgaagggaaaattaaatcgatgctggtggtgatcccggataccgaaaccg

SEQ ID NO: 836602 - DNA, 75 bp, synthetic construct
  source 1..75: mol_type = other DNA
atgctacattatcagtccgatgttatgatgaacggcgcaattctgctggcgctggggttgtcctggtatggctgg

SEQ ID NO: 836603 - DNA, 75 bp, synthetic construct
  source 1..75: mol_type = other DNA
ccgggatcggatgtaattatccatcaggacccctgttccgtcgtacccagggagggtaaacggtctatgctttca

SEQ ID NO: 836604 - DNA, 75 bp, synthetic construct
  source 1..75: mol_type = other DNA
gggatccaacatctgatttcaccgacgccaatgaatgatccaggtgtcggtattatcgtcacaattgtcgcgtta

SEQ ID NO: 836605 - DNA, 75 bp, synthetic construct
  source 1..75: mol_type = other DNA
ttgaactgaacgtgattgttgcgcgttctgtgctggaaaaattaggtaacagcgttgatgtcgccatgaccggca

SEQ ID NO: 836606 - DNA, 75 bp, synthetic construct
  source 1..75: mol_type = other DNA
acctggagctgggctttggcatcgcgctggctgttgcattgcataatattcctgaaggtctggcagttgcggggc

SEQ ID NO: 836607 - DNA, 75 bp, synthetic construct
  source 1..75: mol_type = other DNA
cctggccgtagcgttgcacaatattcctgaaggtctggcggttgcagggccggtttacgctgcaacaggatcgaa

SEQ ID NO: 836608 - DNA, 75 bp, synthetic construct
  source 1..75: mol_type = other DNA
gcagtttacacggccattgaacgtggtattgctgtggcatccgcaaccgaccatcaggccaaatcactggtgatc

SEQ ID NO: 836609 - DNA, 75 bp, synthetic construct
  source 1..75: mol_type = other DNA
tccgccacgtgtcgaatcaggccagaaacctcatgcagagctgccgacagttgcagaaatggctgtctgcgagga

SEQ ID NO: 836610 - DNA, 75 bp, synthetic construct
  source 1..75: mol_type = other DNA
cggaaatacgcaggaaacatccccactggatgaacgtcaggcagtttccgttaacaagcacaatttcggtgcagt

SEQ ID NO: 836611 - DNA, 75 bp, synthetic construct
  source 1..75: mol_type = other DNA
ctccgcattatgtcgcgggtcacgtattgcttgggttaaccgcaatctgtgcctgtctaattggccttgttgcca

SEQ ID NO: 836612 - DNA, 75 bp, synthetic construct
  source 1..75: mol_type = other DNA
tattcttcattaatcggtaattgcctcattgccgttcccgttttactcaccctgctcggtttcatttggtctatt

SEQ ID NO: 836613 - DNA, 75 bp, synthetic construct
  source 1..75: mol_type = other DNA
attgcttgggttaaccgcaatctgtgcctgtctaattggccttgttgccacaatcgtccatcaaacacgtaatac

SEQ ID NO: 836614 - DNA, 75 bp, synthetic construct
  source 1..75: mol_type = other DNA
aaaaccaggcgcaggcccagcaatccagcggaagcttctggatgccgctaatggcaggttacatgatgggtcgtc

SEQ ID NO: 836615 - DNA, 75 bp, synthetic construct
  source 1..75: mol_type = other DNA
gagcgcccggactggcgcgaaaaagcccacgaatacggtttcaattttcacaccatgtacggcgagccgtactgg

SEQ ID NO: 836616 - DNA, 75 bp, synthetic construct
  source 1..75: mol_type = other DNA
gcaaaagcgccgaatgtaccactgcgtacaacaatgcgctgaaagaagccgaacgtactgcgccgaaatacgcca

SEQ ID NO: 836617 - DNA, 75 bp, synthetic construct
  source 1..75: mol_type = other DNA
atggaaggtaagttaattttttgttccgatgcaatactacggtttcagtccgaatacgaagaaaccgttgctgtt

SEQ ID NO: 836618 - DNA, 75 bp, synthetic construct
  source 1..75: mol_type = other DNA
atgaaacggacaaaatccatacgccacgcatcgttccgcaaaaactggagcgcacgccatctgacaccagtcgct

SEQ ID NO: 836619 - DNA, 75 bp, synthetic construct
  source 1..75: mol_type = other DNA
tggctgacggtgaagacgcaaacctgcaaagtcaactttacacggctaaacaactggtgagcgaattgattggca

SEQ ID NO: 836620 - DNA, 75 bp, synthetic construct
  source 1..75: mol_type = other DNA
gatggagagctggttacggtcaccattaagacagctgctgcgaccggtaccctgaatgttctgctgcgttatacc

SEQ ID NO: 836621 - DNA, 75 bp, synthetic construct
  source 1..75: mol_type = other DNA
tcttaccggacgaggacaagagtacgccgcagctcgatcttttggctcgtgtcgaacgagagctaccggtgcggc

SEQ ID NO: 836622 - DNA, 75 bp, synthetic construct
  source 1..75: mol_type = other DNA
ggcaggaggaacaggagggggcatgcttggtgataacggcaattccgggagtaccggcggctgatctgtctggag

SEQ ID NO: 836623 - DNA, 75 bp, synthetic construct
  source 1..75: mol_type = other DNA
gcctgatgctgcagaagctgccggatatgctcatcctgttgttgctattcgttcccgctaccagtcggcggttct

SEQ ID NO: 836624 - DNA, 75 bp, synthetic construct
  source 1..75: mol_type = other DNA
cgaaaccgatgtactggtggtggatatcgatcaaccgctggaaggtgttgtggcaagcaccattgaggttattaa

SEQ ID NO: 836625 - DNA, 75 bp, synthetic construct
  source 1..75: mol_type = other DNA
ggcgctgaacgacgccgcgtttgccatgcagcgtaccaataaagtgtcgctgatcgtctgttctgcactgaaaaa

SEQ ID NO: 836626 - DNA, 75 bp, synthetic construct
  source 1..75: mol_type = other DNA
aaggtcgaggtgtggcttgccccgaggtgatcaactggcaggaggaacaggagggggcatgcttggtgataacgg

SEQ ID NO: 836627 - DNA, 75 bp, synthetic construct
  source 1..75: mol_type = other DNA
acctcgaagcaatgtctaaagacaatgatctcaaagaactactgatccgtggcgttacacaaacactaaggcaat

SEQ ID NO: 836628 - DNA, 75 bp, synthetic construct
  source 1..75: mol_type = other DNA
catacatggattcagcccccgtaaattcaaaccttgcgaaaatccgggatttactcatgaagactaaacagaatg

SEQ ID NO: 836629 - DNA, 75 bp, synthetic construct
  source 1..75: mol_type = other DNA
gaaggtgtgtttactgtgaatgctgcggaagcggacagtgttattcatcttctttcgttgccgatcggtgttcgt

SEQ ID NO: 836630 - DNA, 75 bp, synthetic construct
  source 1..75: mol_type = other DNA
gcatatctgcacaaattagaggagcagggtgcgattaacggagggcgtgcgtggttagacggtgagctgaataca

SEQ ID NO: 836631 - DNA, 75 bp, synthetic construct
  source 1..75: mol_type = other DNA
cgggagtcgacgtttatcaatatcagtcgcaccggcatccggctcgcacggatacaccccagcagaaatcgtgca

SEQ ID NO: 836632 - DNA, 75 bp, synthetic construct
  source 1..75: mol_type = other DNA
acgaaacaaaaatgcggcagaacgtcgttaacgggattaacgcattgttgacgtctgcgcaaataaatcaagtaa

SEQ ID NO: 836633 - DNA, 75 bp, synthetic construct
  source 1..75: mol_type = other DNA
ttaatattccctgtacacttttcgaaactattagtttatttgatgattattctgctgatgatatgcaatatggtg

SEQ ID NO: 836634 - DNA, 75 bp, synthetic construct
  source 1..75: mol_type = other DNA
atcacgttaatagcattctccgcaatcagtcttgtttgcggtttcttctattcaaaattcattgtttttagggaa

SEQ ID NO: 836635 - DNA, 75 bp, synthetic construct
  source 1..75: mol_type = other DNA
atgccatttgctcgttatttctgcattttcataaacgttggtttgggagaagcggcaaaacgggatgtagggaca

SEQ ID NO: 836636 - DNA, 75 bp, synthetic construct
  source 1..75: mol_type = other DNA
aaaactcacactgagccgtgcaaacccatttgccgatatcaaatcagatggtgcagcggcgatttctacggctct

SEQ ID NO: 836637 - DNA, 75 bp, synthetic construct
  source 1..75: mol_type = other DNA
tgacacccgccgagctggtcgggtgtgccgaaatagtcagggataattacggcaagctggatagcatcagcaagc

SEQ ID NO: 836638 - DNA, 75 bp, synthetic construct
  source 1..75: mol_type = other DNA
gggtaattaagtatgaggctgtgaatagtcagacgttccgtttgctcgaggtaaacccgtttgaattgtggctga

SEQ ID NO: 836639 - DNA, 75 bp, synthetic construct
  source 1..75: mol_type = other DNA
tatacactgggtggtttttggtgtatgtatctatgccgcacataccaatcaggctctggcaaacttcgcaggttt

SEQ ID NO: 836640 - DNA, 75 bp, synthetic construct
  source 1..75: mol_type = other DNA
ccggctttaattctgcttacagaacgtcatcaaccagcgacacggtatcgatgaattacagttggtgggctgttg

SEQ ID NO: 836641 - DNA, 75 bp, synthetic construct
  source 1..75: mol_type = other DNA
gcttaccaatttgagtggaaaggatgtggctggtcttctcgcataccttggtttgggagaagcggcaaaacggga

SEQ ID NO: 836642 - DNA, 75 bp, synthetic construct
  source 1..75: mol_type = other DNA
accagttggcgtgtcgtcagctgatctttcaacaatccgaattgccaactggagcactccaggagcagaaattgc

SEQ ID NO: 836643 - DNA, 75 bp, synthetic construct
  source 1..75: mol_type = other DNA
cggatttacatgcagatgctttgaccatttagatggatctactacgccaagcacaagtaacttttattggtattg

SEQ ID NO: 836644 - DNA, 75 bp, synthetic construct
  source 1..75: mol_type = other DNA
ccactgcaacgcaggatggcaaatatactgatggaagtgttgctggtggtattgccgcaacgaggctgcgggccg

SEQ ID NO: 836645 - DNA, 75 bp, synthetic construct
  source 1..75: mol_type = other DNA
ttaaccggttttaattccgcttacagaactgcatcaaccagttccacagtatcgatgaattacagttggtgggct

SEQ ID NO: 836646 - DNA, 75 bp, synthetic construct
  source 1..75: mol_type = other DNA
gggcggctgcatgatataagcaatcagaaagttgaggccttcacaccggcgagaggtccgataatactgccgcca

SEQ ID NO: 836647 - DNA, 75 bp, synthetic construct
  source 1..75: mol_type = other DNA
tgcacatccggcaacgctggttccaacgcgtcgggcgggtgcgctggtggtcgtttctggcggcaaattgttact

SEQ ID NO: 836648 - DNA, 75 bp, synthetic construct
  source 1..75: mol_type = other DNA
atcctatgcactttctattaggtggagacgcagaagttctcatctgggagcgattatgggatcgttacaaaagca

SEQ ID NO: 836649 - DNA, 75 bp, synthetic construct
  source 1..75: mol_type = other DNA
atcctgaggtgctggagtatgatcttctcctcacaccacatcattgttcgtggcattcactttcctattatagct

SEQ ID NO: 836650 - DNA, 75 bp, synthetic construct
  source 1..75: mol_type = other DNA
cgctataggatggagtgcaacaattcattttgtagcacaggaccacttcggtcttgatgtaactgatatcaaaaa

SEQ ID NO: 836651 - DNA, 75 bp, synthetic construct
  source 1..75: mol_type = other DNA
caggtgctggagtggtcgaaagatcacgtcacttcgacgctgtttgtctgttgggcggtccaggccgcgctaaat

SEQ ID NO: 836652 - DNA, 75 bp, synthetic construct
  source 1..75: mol_type = other DNA
ctgatgcgcccgttcgattacccgctcaacgcccaggcgcgttttagccagaacctgctggatcagggcagccat

SEQ ID NO: 836653 - DNA, 75 bp, synthetic construct
  source 1..75: mol_type = other DNA
attaaaacatgtaagagtgaggctgtgtctattgatgaaatactaaaagaaacgaaagagtataaagttgctaac

SEQ ID NO: 836654 - DNA, 75 bp, synthetic construct
  source 1..75: mol_type = other DNA
cacaacagggcggtagctcgattagcctttatatcgaccgcttcgttaaccgcgatatgtttggttataccgttc

SEQ ID NO: 836655 - DNA, 75 bp, synthetic construct
  source 1..75: mol_type = other DNA
tgccgaaatagtccgggataattacgggcggtttaaccatatcggtcagtccagagttgcgccaccacaacgcag

SEQ ID NO: 836656 - DNA, 75 bp, synthetic construct
  source 1..75: mol_type = other DNA
atccagtatcattatgaatatgaaaatactgccttccgcatattctcgtaatcctatgcactttttactcggtgg

SEQ ID NO: 836657 - DNA, 75 bp, synthetic construct
  source 1..75: mol_type = other DNA
cacatcaatctacgacccagcatgtggaactgggggtttattaatagagtcagcacgatatattaaaggcaacag

SEQ ID NO: 836658 - DNA, 75 bp, synthetic construct
  source 1..75: mol_type = other DNA
gccatttggcatgaatcctaactccatgttgtttaacaccttattagccaaagttaagccgttgagaggggctgt

SEQ ID NO: 836659 - DNA, 75 bp, synthetic construct
  source 1..75: mol_type = other DNA
aaggtctataacctgattgctcgtcaatacctgatgcagttctgcccggatgcggtgttccgcaagtgtgttatc

SEQ ID NO: 836660 - DNA, 75 bp, synthetic construct
  source 1..75: mol_type = other DNA
agtggctccagatggcggagaaggaaataaaaagacttcaccccgtaagcgagcagcgaaaaaaagcccgccagc

SEQ ID NO: 836661 - DNA, 75 bp, synthetic construct
  source 1..75: mol_type = other DNA
ctgaggttctcaaccggcatccggagcgggaacgctttatcagagcactgccggatactgaatgtcaggttctca

SEQ ID NO: 836662 - DNA, 75 bp, synthetic construct
  source 1..75: mol_type = other DNA
tgcgaccgatggtctggggacagaagcaacccgtgccgggattattgaactgttgttcaagcgtggtttcctgac

SEQ ID NO: 836663 - DNA, 75 bp, synthetic construct
  source 1..75: mol_type = other DNA
ttgttgcaaaagcacgttttcttgccgaagcgggctggcgcacgctgttaggcagcaaagagcgtgacgaagaaa

SEQ ID NO: 836664 - DNA, 75 bp, synthetic construct
  source 1..75: mol_type = other DNA
gattgtcccggaaaagtggcaattgcaaccgcggccttccgtgaccaaacaacttaacgtcatcaaacgctttct

SEQ ID NO: 836665 - DNA, 75 bp, synthetic construct
  source 1..75: mol_type = other DNA
cagtccgccaccagcgaaattagccttttgcgtggcggttatcttaaccacactgaggaggctgccaacatggct

SEQ ID NO: 836666 - DNA, 75 bp, synthetic construct
  source 1..75: mol_type = other DNA
ttaccattgaggccaccagcgaacaggaagcacgccagaaaaaccagttgatcgccattgccagccagggctatg

SEQ ID NO: 836667 - DNA, 75 bp, synthetic construct
  source 1..75: mol_type = other DNA
gataaatgggcgcacacctcggtgcaggatcgcgcggcgattctgtttaagattgccgatcgaatggaacaaaac

SEQ ID NO: 836668 - DNA, 75 bp, synthetic construct
  source 1..75: mol_type = other DNA
gggattggcgtcctgggcaaaactgaagcgcataacacgcgccccgcgtgtttttttgtgccgcatagtcacacc

SEQ ID NO: 836669 - DNA, 75 bp, synthetic construct
  source 1..75: mol_type = other DNA
atggggccgacttcggtcgggctggttccctttatcgccagttgtgagaaccctgtacagtccaccgccagcgag

SEQ ID NO: 836670 - DNA, 75 bp, synthetic construct
  source 1..75: mol_type = other DNA
atattgccacaggtaacaggcatccgcgccaaatacccgccagagaaaatcagttgatcgccagtatcaaaaatg

SEQ ID NO: 836671 - DNA, 75 bp, synthetic construct
  source 1..75: mol_type = other DNA
agtggcaccgggtagtggagaagagaagaaaaaggcttcaccacgcaagcgagcggtgaaaaaaagcccgccatc

SEQ ID NO: 836672 - DNA, 75 bp, synthetic construct
  source 1..75: mol_type = other DNA
atacctgcatgacaatggaacaggccaacgaaaaagccaaaaagctggaacagcctgcagatgcaaagccggttg

SEQ ID NO: 836673 - DNA, 75 bp, synthetic construct
  source 1..75: mol_type = other DNA
cggttgcggcatcactgccgcgcctggctgaagggaacttccggacaatgccggtgcagaccgtcaccgcgacca

SEQ ID NO: 836674 - DNA, 75 bp, synthetic construct
  source 1..75: mol_type = other DNA
atgaaacagatttctttatttattcctctgctgggaaccttattactttccggctgtgccggaaccagtacggaa

SEQ ID NO: 836675 - DNA, 75 bp, synthetic construct
  source 1..75: mol_type = other DNA
cggcatcactgccgcgcctggctgacgggaacttcaggaccacgtcggtgcaggccgttgcggcgacaacgccgt

SEQ ID NO: 836676 - DNA, 75 bp, synthetic construct
  source 1..75: mol_type = other DNA
ccccgtccgctaagaacgggtgagcagacggcagcattatggatagcgccttatattgataatcaggatgtttat

SEQ ID NO: 836677 - DNA, 75 bp, synthetic construct
  source 1..75: mol_type = other DNA
cctcgtccgctaagaacgggtgagcagacggcagcattatggatagcgccttatattgataaccaggatgtttat

SEQ ID NO: 836678 - DNA, 75 bp, synthetic construct
  source 1..75: mol_type = other DNA
cagttcagttgcgccggtaacacctccccgtccgctaagaacgggtgagcagacggcagcattatggatagcgcc

SEQ ID NO: 836679 - DNA, 75 bp, synthetic construct
  source 1..75: mol_type = other DNA
acttccggagcagaaactgctggcaccacgtccgttgtttaccgctgcccgggaagtgaaaacgattgttccggt

SEQ ID NO: 836680 - DNA, 75 bp, synthetic construct
  source 1..75: mol_type = other DNA
aagaaaaaggcttcaccacgcaagcgagcggtgaaaaaaagcccgccagcagatgaagcgggcagtggagtgata

SEQ ID NO: 836681 - DNA, 75 bp, synthetic construct
  source 1..75: mol_type = other DNA
ccggcagcgggcctgtagtgactgcacttccggagcagaaactgctggcaccacgcccgctgtttaccgctgccc

SEQ ID NO: 836682 - DNA, 75 bp, synthetic construct
  source 1..75: mol_type = other DNA
cagcctgcagacgcaaagccggttgcggcatcactgccgcgcctggctgaagggaacttccggaccacctcggtg

SEQ ID NO: 836683 - DNA, 75 bp, synthetic construct
  source 1..75: mol_type = other DNA
atgaaacagatttctttatttattcctctgctggggactttattactttccggctgtgccggaacgaactccgat

SEQ ID NO: 836684 - DNA, 75 bp, synthetic construct
  source 1..75: mol_type = other DNA
atcgccactgccagccagggctatgatttacccgcaccagcaaaatctggtgccgggattggcgtcctggaaatg

SEQ ID NO: 836685 - DNA, 75 bp, synthetic construct
  source 1..75: mol_type = other DNA
ctggcaacccagaggcctgagtattggctggagcgcgagtatcggggctgtgctggcgctgggaaccggtgtcat

SEQ ID NO: 836686 - DNA, 75 bp, synthetic construct
  source 1..75: mol_type = other DNA
ctctcctgaaagcaccggcaaaagcgattaaagatctggcaaccttcagaaccggctggatagtgttgatccttc

SEQ ID NO: 836687 - DNA, 75 bp, synthetic construct
  source 1..75: mol_type = other DNA
acggagaacgctgggatacgcttgcctggcactattatggtgacccgctgggataccctcggattattgcggcga

SEQ ID NO: 836688 - DNA, 75 bp, synthetic construct
  source 1..75: mol_type = other DNA
tattacttccgcgtgggcatcgtgatgaccctgccggtgctttttgtcacgctggccgcgctggccctgcgcctg

SEQ ID NO: 836689 - DNA, 75 bp, synthetic construct
  source 1..75: mol_type = other DNA
gccgacggtactgattggcgcgctgtcgattgacgggactacggcgaccggcgtcgtcaaagaggcaatgattta

SEQ ID NO: 836690 - DNA, 75 bp, synthetic construct
  source 1..75: mol_type = other DNA
agacaaggggttatgggcagcgacgttcggcactggcttcctgacggcatttctctcatcggtgatgaacaatat

SEQ ID NO: 836691 - DNA, 75 bp, synthetic construct
  source 1..75: mol_type = other DNA
atgtcacttcctgttccttttggtgcaattgttacagtagtgaagaaatgctggtctactcttacccagataatg

SEQ ID NO: 836692 - DNA, 75 bp, synthetic construct
  source 1..75: mol_type = other DNA
gttcacagcctatcggttgatcaatgtccgtttgagcgcaggctgtcgcgaatgttcggacgcgccgttgatgtg

SEQ ID NO: 836693 - DNA, 75 bp, synthetic construct
  source 1..75: mol_type = other DNA
ccaatacacaactcttaaataccagcactggcttttagcttgtatccacaatgctcatcaaaacacatatccaga

SEQ ID NO: 836694 - DNA, 75 bp, synthetic construct
  source 1..75: mol_type = other DNA
ttcagggcgataagcgtgatttattaaaatcaatgcttgaagcgaaagggatgaaggtaaaactcgcaggcggct

SEQ ID NO: 836695 - DNA, 75 bp, synthetic construct
  source 1..75: mol_type = other DNA
attatgatgagtgtaagaaaaaatgcaatcatatgaattatatagcggatgtcaatgctcaattagctatgagta

SEQ ID NO: 836696 - DNA, 75 bp, synthetic construct
  source 1..75: mol_type = other DNA
ttttgtctgccgttagtgggacgccccccgttatattcaccatcgcgaaaaggtattcatctgtttgaagcaaaa

SEQ ID NO: 836697 - DNA, 75 bp, synthetic construct
  source 1..75: mol_type = other DNA
tagaaataatgtttccttcagttgttagtgcttggctaaatataattagtatagatgattggtggaaagataccc

SEQ ID NO: 836698 - DNA, 75 bp, synthetic construct
  source 1..75: mol_type = other DNA
gacaagcgcattgcctttgtgacgggccatcccgaatacgatgcgcaaacactggcgcaggaatatttccgcgat

SEQ ID NO: 836699 - DNA, 75 bp, synthetic construct
  source 1..75: mol_type = other DNA
tctcgcgcgtctggtcaggaaattcgtccgctaaaggtgcttatccttaacctgatgccgaagaagatcgaaact

SEQ ID NO: 836700 - DNA, 75 bp, synthetic construct
  source 1..75: mol_type = other DNA
ggcgtagtcacggtaatttgctgtttaccaactggctcaactattacgtctaccagatcacgccatacgatctac

SEQ ID NO: 836701 - DNA, 75 bp, synthetic construct
  source 1..75: mol_type = other DNA
gcagaacctgaagctgaatatggccctgaatttaagcggtacggcgatctttctgtggtgcctgccgggcgtaat

SEQ ID NO: 836702 - DNA, 75 bp, synthetic construct
  source 1..75: mol_type = other DNA
gcactacgcttgcgttcgtgatggcggccgggttcattgccgataccgccagcctgccgcttattgtctccaacc

SEQ ID NO: 836703 - DNA, 75 bp, synthetic construct
  source 1..75: mol_type = other DNA
tgtcgcttactggccgcaaatcaaacaggtgctggagtggtcgaaagatcacgtcacctcgacgctgtttgtctg

SEQ ID NO: 836704 - DNA, 75 bp, synthetic construct
  source 1..75: mol_type = other DNA
ctttggtctgggattcaccgaatatgcatcggtaatggtgtcggtggatattgcagccattgctgccactcttgt

SEQ ID NO: 836705 - DNA, 75 bp, synthetic construct
  source 1..75: mol_type = other DNA
agtactgcaactggcgttattaaagaggcgatgatctacgccaacgtgattggttgcgatctgggcccgaaaatt

SEQ ID NO: 836706 - DNA, 75 bp, synthetic construct
  source 1..75: mol_type = other DNA
tctgacgccgatagtcatcgccatgctactggcattagggttcagcaaaggcacgacactggcattcgtcatggc

SEQ ID NO: 836707 - DNA, 75 bp, synthetic construct
  source 1..75: mol_type = other DNA
aaattctggcagagacggaagaaggggatgcatatctgtttgccagcaaagataagcgcattgcctttgtgacgg

SEQ ID NO: 836708 - DNA, 75 bp, synthetic construct
  source 1..75: mol_type = other DNA
tgtttaccaactggctcaactattacgtttaccagatcacgccatacgatctacgccatatgaatcctacgctgg

SEQ ID NO: 836709 - DNA, 75 bp, synthetic construct
  source 1..75: mol_type = other DNA
aatatcatctggaatgcgacggcgacctttattgccgtgattattatcagccttctgctcgatgaatcgggcttt

SEQ ID NO: 836710 - DNA, 75 bp, synthetic construct
  source 1..75: mol_type = other DNA
agtttcatcagccgattgccgccagagtgctggaagaggcgcaaaagcgcggtgccttgcccagggaaagatcat

SEQ ID NO: 836711 - DNA, 75 bp, synthetic construct
  source 1..75: mol_type = other DNA
gagggcgttggtgcggtggtaggcgatgccgatgttattagccggattcgcgccacgctctattccggcggcagc

SEQ ID NO: 836712 - DNA, 75 bp, synthetic construct
  source 1..75: mol_type = other DNA
atttcaatgacctgtcggcactgaagcaggtcgtcgacgagcaacaaccggatgcggcgctggtgcagcatacgc

SEQ ID NO: 836713 - DNA, 75 bp, synthetic construct
  source 1..75: mol_type = other DNA
cagagtcgaaatatgaaatcccgccacttttttatcgactttccgggacgtttcgccaggcgaatccacagctcg

SEQ ID NO: 836714 - DNA, 75 bp, synthetic construct
  source 1..75: mol_type = other DNA
gccttgccttacccggttggtgcagagtcgaaatatgaaatcccgccgctcttttatcgactttccggaacgttt

SEQ ID NO: 836715 - DNA, 75 bp, synthetic construct
  source 1..75: mol_type = other DNA
attacccagcgtgtggaacaggtgctggctgacgcgtttcacgcacaggccgcggcgctggtacagggcgcgggt

SEQ ID NO: 836716 - DNA, 75 bp, synthetic construct
  source 1..75: mol_type = other DNA
ggcactgaagcaggtcgtcgacgagcaacaaccggatgcggcgctggtgcagcatacgcgccagcagccgcagga

SEQ ID NO: 836717 - DNA, 75 bp, synthetic construct
  source 1..75: mol_type = other DNA
tgactcttgctgaagcgcagcaaaagcagtttgcgctggtggacactatttgccgccattttccaggcagcgagt

SEQ ID NO: 836718 - DNA, 75 bp, synthetic construct
  source 1..75: mol_type = other DNA
gtgctggctgatgcatttcacgcacaggctgcggcgctggtgcagggcgcggggactggcgcgattcgcgccggg

SEQ ID NO: 836719 - DNA, 75 bp, synthetic construct
  source 1..75: mol_type = other DNA
gaatcgcagcggtgaagatactgtgatgcggatcttgcgcgagagtattaccagcgttttattgatttttaaccc

SEQ ID NO: 836720 - DNA, 75 bp, synthetic construct
  source 1..75: mol_type = other DNA
ctcctgcttcaagctgtttgggccagagggtgttggcgcggtggtaggcgatgccgatgttattagccggattcg

SEQ ID NO: 836721 - DNA, 75 bp, synthetic construct
  source 1..75: mol_type = other DNA
tgctcaacggtggcgcagtgccacaagttaaaagcgccgtcattgccaatgcgcagtcgaaggtgttgattgtgg

SEQ ID NO: 836722 - DNA, 75 bp, synthetic construct
  source 1..75: mol_type = other DNA
tgacgttcgccgaggcacagcaaaagcagtttgcgctggtggactcgatttgccgtcactttccgggcgccgagt

SEQ ID NO: 836723 - DNA, 75 bp, synthetic construct
  source 1..75: mol_type = other DNA
tttgagaacccctggttgctcccggtaagcggcacgaacaaccagcgttgtgtgaatcatatttctgaaccggat

SEQ ID NO: 836724 - DNA, 75 bp, synthetic construct
  source 1..75: mol_type = other DNA
aagccgatcgggtagtcccggaaaacaccgggcagcctgtgggacgagtggattatccggatgtgttcgaacagg

SEQ ID NO: 836725 - DNA, 75 bp, synthetic construct
  source 1..75: mol_type = other DNA
taccgcctccgtcagcagaagccggtctgggcactgtgcaatgacacggcctgttctgcagccatgctgctggcg

SEQ ID NO: 836726 - DNA, 75 bp, synthetic construct
  source 1..75: mol_type = other DNA
attaaggtcttatctgattcacaggaagtgcaatatattaaagttgatataaaaaaaattgaaaacccaggtaca

SEQ ID NO: 836727 - DNA, 75 bp, synthetic construct
  source 1..75: mol_type = other DNA
tactctgtaggtgataatgaccaggatgaggcatcaaaaggcagcgatgcgaaaatagcaattaatattcactgg

SEQ ID NO: 836728 - DNA, 75 bp, synthetic construct
  source 1..75: mol_type = other DNA
atgaaggtgacgcgaatcggctgtgaatgcggggcgaatatctcaacattctcctgcttcaagctgtttgggcca

SEQ ID NO: 836729 - DNA, 75 bp, synthetic construct
  source 1..75: mol_type = other DNA
actggcgcgattcgtgcggcgttggcggctttgctcaaaccggggcagcgtcttctggtgcatgacgcgcctgtt

SEQ ID NO: 836730 - DNA, 75 bp, synthetic construct
  source 1..75: mol_type = other DNA
ctaacgccattaacagtcagggaatgctcacaccgcttcaatatttttgtgttttcgacgccaacaccggggaag

SEQ ID NO: 836731 - DNA, 75 bp, synthetic construct
  source 1..75: mol_type = other DNA
gcagcctacgagcaatatcatggggcattttgggaactctctctttggtgctgggagtgtgtgcgttttctgcta

SEQ ID NO: 836732 - DNA, 75 bp, synthetic construct
  source 1..75: mol_type = other DNA
tgaatggcgtcggatgtcgcgccagtgcacgcattatgggcgttggcctcaacacggttttacgtcacttaaaaa

SEQ ID NO: 836733 - DNA, 75 bp, synthetic construct
  source 1..75: mol_type = other DNA
tagttccggaaaacaccgggcagtctgtgggacgagtggattatccggatgtgttcgaacaggtctggcgggagt

SEQ ID NO: 836734 - DNA, 75 bp, synthetic construct
  source 1..75: mol_type = other DNA
aggtagttaacagcttggggatgctagctccgcttcaatacttttgtgttttcaacgcaaaaacaggagaagtca

SEQ ID NO: 836735 - DNA, 75 bp, synthetic construct
  source 1..75: mol_type = other DNA
cgattgcagcgggagccgcgattagctgggccagttatagtgtagttgcccatgctgtatcaaagcagcacatca

SEQ ID NO: 836736 - DNA, 75 bp, synthetic construct
  source 1..75: mol_type = other DNA
caaaatccacgcggtctttggcggtaaaaacccgcatccaaactggattgtcggcgggatgccttgtgccattaa

SEQ ID NO: 836737 - DNA, 75 bp, synthetic construct
  source 1..75: mol_type = other DNA
tggcgtcggatgtcgcgccagtgcacgcattatgggcgttggcctcaacacggttttacgtcacttaaaaaactc

SEQ ID NO: 836738 - DNA, 75 bp, synthetic construct
  source 1..75: mol_type = other DNA
gcagtacgaacaaccagcgttgtgtgaatcatatttctgaaccggataccgaaattccaccgggcttcagggggt

SEQ ID NO: 836739 - DNA, 75 bp, synthetic construct
  source 1..75: mol_type = other DNA
ccctggttgctcccggtaagcggcacgaacaaccagcgttgcgtgaatcacatttctgaaccggacactgaaata

SEQ ID NO: 836740 - DNA, 75 bp, synthetic construct
  source 1..75: mol_type = other DNA
gatatcgaccatgaaattgccgaattgcaggcgaaacgtgctcgcctggtgctgcaacatccacgtattgatgcg

SEQ ID NO: 836741 - DNA, 75 bp, synthetic construct
  source 1..75: mol_type = other DNA
gatattgaccacgagattgccgatttgcaggcgaaacgcactcgcctggtacagcaacatccgcgaattgatgag

SEQ ID NO: 836742 - DNA, 75 bp, synthetic construct
  source 1..75: mol_type = other DNA
cgaacaaccagcgttgtgtgaatcatatttctgaaccggataccgaaattccgccgggattcagggggggatgtg

SEQ ID NO: 836743 - DNA, 75 bp, synthetic construct
  source 1..75: mol_type = other DNA
cacgacaccggaagccgattcagcgtatgcgctgaaagccgattcgggcgctgtgcagcaggtgatgaccgcaag

SEQ ID NO: 836744 - DNA, 75 bp, synthetic construct
  source 1..75: mol_type = other DNA
atcttcaactatgccgactacggtctggtgggcgatatctacaaagtcgtccctgccctgattagccagttgaat

SEQ ID NO: 836745 - DNA, 75 bp, synthetic construct
  source 1..75: mol_type = other DNA
ccgcaggcacgacaccggaagccgattcagcgtatgcgctgaaagccgattcgggcgctgtgcagcaggtgatga

SEQ ID NO: 836746 - DNA, 75 bp, synthetic construct
  source 1..75: mol_type = other DNA
ccctggctgctcccggtaagcggcacgaacaaccagcgttgtgtgaatcatatttctgaaccggataacgaaatt

SEQ ID NO: 836747 - DNA, 75 bp, synthetic construct
  source 1..75: mol_type = other DNA
aaacgccacgaaccaggcaggggatgttcaggccgtcaatcctggtcagccagcaggcacgacaccggaagccga

SEQ ID NO: 836748 - DNA, 75 bp, synthetic construct
  source 1..75: mol_type = other DNA
ccgtttgtgctacttggtagtgttgcactgtttgtgttggcgatcccggcgtttattctgattaacagtaacgtc

SEQ ID NO: 836749 - DNA, 75 bp, synthetic construct
  source 1..75: mol_type = other DNA
gttatttgtcgcataacctgcattactccgaagatcacggggtgctgattattatcgccattatgatcgggatgt

SEQ ID NO: 836750 - DNA, 75 bp, synthetic construct
  source 1..75: mol_type = other DNA
gtacgttctgtatcggtttaataccgtcctatgcctctattggtatttgggcgccgattctgctgttgatttgta

SEQ ID NO: 836751 - DNA, 75 bp, synthetic construct
  source 1..75: mol_type = other DNA
caggcagaggccatcgcgccggggctgaccgggcaacactggctggagggcgaccacacggtgctgatatatggc

SEQ ID NO: 836752 - DNA, 75 bp, synthetic construct
  source 1..75: mol_type = other DNA
taccgccgtgccggaggccgcacctcatgcgtggctgccgtcgccggtctgggcgggcgtgacgggtgacaacgc

SEQ ID NO: 836753 - DNA, 75 bp, synthetic construct
  source 1..75: mol_type = other DNA
gctggaagcggcgcaagcctgggcagatgccgacccgtacgttgcggctggagtatatgagcaagtatcggtaaa

SEQ ID NO: 836754 - DNA, 75 bp, synthetic construct
  source 1..75: mol_type = other DNA
ctgatgtcacactgctgatcgccttaaaaaaactgcgccgcagccgcccgctggatggcatcatctggccactga

SEQ ID NO: 836755 - DNA, 75 bp, synthetic construct
  source 1..75: mol_type = other DNA
atgttactcaccgatctccttcacggtaatacgcaactgctgaccttctggatggcgaacctgccggaacacccg

SEQ ID NO: 836756 - DNA, 75 bp, synthetic construct
  source 1..75: mol_type = other DNA
cgggccgctggataaaaccttcgcgccgctgctgcggttgctgggcgataagtcaggaggcggtggtggtgatac

SEQ ID NO: 836757 - DNA, 75 bp, synthetic construct
  source 1..75: mol_type = other DNA
gattttctgctgcgtctggcccatacccttgcagagcggggtatcgctcactggcaaagcgttctgaaaccgctg

SEQ ID NO: 836758 - DNA, 75 bp, synthetic construct
  source 1..75: mol_type = other DNA
ctgataaacggcagtaagcgactcggttttcaggccccactctatttgtggcaggtctgtgacaacggtgattat

SEQ ID NO: 836759 - DNA, 75 bp, synthetic construct
  source 1..75: mol_type = other DNA
ggtctgggcgggcgtcaccggcgataacgcacgggggcgtgcagtgggctttccgtggctgcgtatcgcgctgat

SEQ ID NO: 836760 - DNA, 75 bp, synthetic construct
  source 1..75: mol_type = other DNA
atgtatgttatttacgctcaagacaaagctgatagcctcgaaaaacgcctttccgttcgtccggcacatttagca

SEQ ID NO: 836761 - DNA, 75 bp, synthetic construct
  source 1..75: mol_type = other DNA
gtacctgagctacatcaacgactacggtggacgtccggttctgcagttctcctgtgcaggaagtcgctgtactgc

SEQ ID NO: 836762 - DNA, 75 bp, synthetic construct
  source 1..75: mol_type = other DNA
atcagtcgcctgccacaggacagggaatcccttttttacttcagtcttcgggaaattcccctaaaagcgataagg

SEQ ID NO: 836763 - DNA, 75 bp, synthetic construct
  source 1..75: mol_type = other DNA
atcgatgacgctgaatgtggccaatgacaacaaacagcttccgtacctggcgcaggcctggatagagaatgagaa

SEQ ID NO: 836764 - DNA, 75 bp, synthetic construct
  source 1..75: mol_type = other DNA
ggcggcgttggcgcggccttgatggcttttctcgatgctcgcttacaaccgggtatttcgctcgtgctggaagcg

SEQ ID NO: 836765 - DNA, 75 bp, synthetic construct
  source 1..75: mol_type = other DNA
ccgaagtccacgcagacggtgaaatcaggaacatacagcacgccgtacctgagctacatcaacgactacggcgga

SEQ ID NO: 836766 - DNA, 75 bp, synthetic construct
  source 1..75: mol_type = other DNA
agacaaaaataaaactgttttatcggcctgaatccattaaagcaaagcccaatgcggtatggcaggatcagttgg

SEQ ID NO: 836767 - DNA, 75 bp, synthetic construct
  source 1..75: mol_type = other DNA
tcgcttgatgaactgctgatgcagtgcgacatgaatgcaccggaacttagcgagcaggatgtctggggtaaatcc

SEQ ID NO: 836768 - DNA, 75 bp, synthetic construct
  source 1..75: mol_type = other DNA
ggaacagtgcaggtatggtcattcccaatattgtgatgaaagagcttaacttgcagccggggcagagcgttgagg

SEQ ID NO: 836769 - DNA, 75 bp, synthetic construct
  source 1..75: mol_type = other DNA
ttacggccggggcagagcgtggaggcgcaagtgagcaacaatcaactgttcttgcccccttatttccagacaggg

SEQ ID NO: 836770 - DNA, 75 bp, synthetic construct
  source 1..75: mol_type = other DNA
ttactcaggccgatatttataaaacagaagcggcaatgtctctgacactccgtgttctgaatgaggttattcctc

SEQ ID NO: 836771 - DNA, 75 bp, synthetic construct
  source 1..75: mol_type = other DNA
gggctccgtcgttctccgaagattatgggggttggtgagctccttaaccgcctgtcatttgaagctgctgtactg

SEQ ID NO: 836772 - DNA, 75 bp, synthetic construct
  source 1..75: mol_type = other DNA
tcttctatctgagctgaaaaatctatccattcaggaaggatacatgctaaaaatagaaaatgtactgccgccaaa

SEQ ID NO: 836773 - DNA, 75 bp, synthetic construct
  source 1..75: mol_type = other DNA
gcagcacctttaaagtggtgtggaaagcgcaggacggcctgccgctgaattacctgctgcgggttgaacagggta

SEQ ID NO: 836774 - DNA, 75 bp, synthetic construct
  source 1..75: mol_type = other DNA
tacctgaacattcgttcgctggtggtgtttggcggcgtcagcattaacccgcagatgatgaaactgcgcggcggt

SEQ ID NO: 836775 - DNA, 75 bp, synthetic construct
  source 1..75: mol_type = other DNA
tttacatctgcaatgagtgcgtggatttgtgcaatgaaattatcaggagagaagtggcagacaaaaagggaaaaa

SEQ ID NO: 836776 - DNA, 75 bp, synthetic construct
  source 1..75: mol_type = other DNA
ctaggtaccaagggccagaagtaatctttttttgtgatagcatttctattcctgatgatatggatcctacaagag

SEQ ID NO: 836777 - DNA, 75 bp, synthetic construct
  source 1..75: mol_type = other DNA
ccgaaccgatccagaatggtcgccagcaacgtggcggcggtcgtggacaaggcggtggtcgcggtcaacagcaac

SEQ ID NO: 836778 - DNA, 75 bp, synthetic construct
  source 1..75: mol_type = other DNA
tgttgttctccgcgaccttctctgacgatattaaagccctggcggaaaaactgttgcacaacccgctggaaatcg

SEQ ID NO: 836779 - DNA, 75 bp, synthetic construct
  source 1..75: mol_type = other DNA
tttgtcgataagaaacgcaaacgcgaattgctgtcgcacatgattggtaaagggaactggcagcaggtgctggtg

SEQ ID NO: 836780 - DNA, 75 bp, synthetic construct
  source 1..75: mol_type = other DNA
aggttgctaacggtggtcaggaaccgctgacaaggctaatcataggtgtcgctgcaatcgttgggatcattggtg

SEQ ID NO: 836781 - DNA, 75 bp, synthetic construct
  source 1..75: mol_type = other DNA
tctgggaaagcatcacgtatacatttaaacgatcttaataacgccattttttgtttttggcggtcaattctagaa

SEQ ID NO: 836782 - DNA, 75 bp, synthetic construct
  source 1..75: mol_type = other DNA
atcctggtggtaaaggtaaattaactaactatctatcaaagatcattatgatcaatggtttagatggttgcgaat

SEQ ID NO: 836783 - DNA, 75 bp, synthetic construct
  source 1..75: mol_type = other DNA
cttcagtgaacgattgaaaatctttaaaacagatgatccaactaaggtaaaagcgcctgtatttaaaagaggatg

SEQ ID NO: 836784 - DNA, 75 bp, synthetic construct
  source 1..75: mol_type = other DNA
gaaaaaccgtctcgtcgcctcggcgatgccaaaccggcaggcgaacaacaacgtcgccgccgtccgcgtaaacct

SEQ ID NO: 836785 - DNA, 75 bp, synthetic construct
  source 1..75: mol_type = other DNA
aaacgaaaaagccgctatccaagcccaacatgaagttgttctggaccggattagagaaatgcaaaacgataatag

SEQ ID NO: 836786 - DNA, 75 bp, synthetic construct
  source 1..75: mol_type = other DNA
ttcaatagaaccgccatttatcctagcaaggatgccgcagcgaccagaccaggaacagcaagagattgttgccga

SEQ ID NO: 836787 - DNA, 75 bp, synthetic construct
  source 1..75: mol_type = other DNA
tagagatgtctattgcccgacttgaaaacgaaaaagccgctatccaagcccagcatgaagctgtcattgccagga

SEQ ID NO: 836788 - DNA, 75 bp, synthetic construct
  source 1..75: mol_type = other DNA
cggcattctcgaccagctgacactgatggccgatgcccgtcagtcgccactgattgcgctgaccgataccctcgc

SEQ ID NO: 836789 - DNA, 75 bp, synthetic construct
  source 1..75: mol_type = other DNA
tgacggaacagggcatgtcgcaactgctggctgataaccgccatgattttctgctgcgtctggcccataccctta

SEQ ID NO: 836790 - DNA, 75 bp, synthetic construct
  source 1..75: mol_type = other DNA
tggaatatatagcggataaccgtattcatgctgtgtcgatcaaagcgtatacaccggcggagtgggcgcgcgatc

SEQ ID NO: 836791 - DNA, 75 bp, synthetic construct
  source 1..75: mol_type = other DNA
ggcccgcctttcaacaacaccccgtaatggcggaggtgggaagtatgaaaatgcacaatgctcctcattcctggc

SEQ ID NO: 836792 - DNA, 75 bp, synthetic construct
  source 1..75: mol_type = other DNA
taacgacctttgcgcggcgtttgtcaggcacgcaaaagttgcaggactggatgatgccgataccgtaacgcttaa

SEQ ID NO: 836793 - DNA, 75 bp, synthetic construct
  source 1..75: mol_type = other DNA
cggcggaatatgaagtggtttacgggactcgtatggagcttggttctgacggactccttacaatggaagaatacg

SEQ ID NO: 836794 - DNA, 75 bp, synthetic construct
  source 1..75: mol_type = other DNA
tagatgtgcttaccaggcagggttttacaccttcgcgcattgagaacgaaggaatttgtatttctgacgacggcg

SEQ ID NO: 836795 - DNA, 75 bp, synthetic construct
  source 1..75: mol_type = other DNA
aagatccgacacttccagaatattgccggtggatgaaaaattggattgaatataaccgacgtgactgttacattt

SEQ ID NO: 836796 - DNA, 75 bp, synthetic construct
  source 1..75: mol_type = other DNA
gcgcccggagcgtctgcgtgcagttgctcaatttcgcgggcaacaggtcaatagcgatctgggtgaaggttttgt

SEQ ID NO: 836797 - DNA, 75 bp, synthetic construct
  source 1..75: mol_type = other DNA
ttagggtgccaccaaactattcatcttaattttgctgacacccgcgctcatttacagctcaatgatatgatttcc

SEQ ID NO: 836798 - DNA, 75 bp, synthetic construct
  source 1..75: mol_type = other DNA
gggtatccttgccattggcgcgcatcctgacgatatagaattaggctgtggcgcatcgctagctcgccttgcgca

SEQ ID NO: 836799 - DNA, 75 bp, synthetic construct
  source 1..75: mol_type = other DNA
cggattacgcgattgcgcgtataaccgatctgatgtgtgaagccctactgggttataaagggcagcgggcctgga

SEQ ID NO: 836800 - DNA, 75 bp, synthetic construct
  source 1..75: mol_type = other DNA
agtatataaaatgcagagaattcaatcggcggctggtcccatttatcggtgaattattggcaaggggtcgtggat

SEQ ID NO: 836801 - DNA, 75 bp, synthetic construct
  source 1..75: mol_type = other DNA
agtaaggacgcattaaacggcatcctgaaaaagccaggtgcagccattcagatcgcggcggctgttaataaacag

SEQ ID NO: 836802 - DNA, 75 bp, synthetic construct
  source 1..75: mol_type = other DNA
accgcgaagcactgaccgcgtcgccggtcagcttccacctgcaaaagctggaactggaaaaagatgtcgcaatgc

SEQ ID NO: 836803 - DNA, 75 bp, synthetic construct
  source 1..75: mol_type = other DNA
gcctgatacatgatgcggcgttcaggaagacactgaaggaccctgcagccgcgagggactttcttgaacaggtat

SEQ ID NO: 836804 - DNA, 75 bp, synthetic construct
  source 1..75: mol_type = other DNA
tgcgtcagcatgcctgtgatgttttgatcagcatgaagacaaacgacggcagggacggatacatttataccttaa

SEQ ID NO: 836805 - DNA, 75 bp, synthetic construct
  source 1..75: mol_type = other DNA
tttatcaggcgtcaatggttgcctgccgcactattccacaaattctcggctatgaaaccccaagcacctggcttt

SEQ ID NO: 836806 - DNA, 75 bp, synthetic construct
  source 1..75: mol_type = other DNA
tggttgcatcaacaacaggcggcgctggactggctggcagcgcagggggaaagaagtggttttacactgctggat

SEQ ID NO: 836807 - DNA, 75 bp, synthetic construct
  source 1..75: mol_type = other DNA
gtaccggacaatccctttgtttcaacctgcgggcgaatccaacaatctgtaaagcgggcaagcgccacgatctgc

SEQ ID NO: 836808 - DNA, 75 bp, synthetic construct
  source 1..75: mol_type = other DNA
aacaaaggtattaagcgttcagcaaggacagacctgtctaaaattcacaagtatctactccctcgtcttggcgat

SEQ ID NO: 836809 - DNA, 75 bp, synthetic construct
  source 1..75: mol_type = other DNA
cagatgtttgaagctaaggtaagaaaaagagagggcgaaaccgagttccaccctctcaacttatgcactggagtc

SEQ ID NO: 836810 - DNA, 75 bp, synthetic construct
  source 1..75: mol_type = other DNA
tataaccaaattcaaggtctggttagaaagggattgttaaataaagtaagaaaattaggtgcgtatcaatattta

SEQ ID NO: 836811 - DNA, 75 bp, synthetic construct
  source 1..75: mol_type = other DNA
aaaaacaggcgtgtatcaatatttatactcagtcacatcagaatttaatatcgcaacagaatgcgtggaattaat

SEQ ID NO: 836812 - DNA, 75 bp, synthetic construct
  source 1..75: mol_type = other DNA
gccgtttttatatcgtatggtgtggaagaaggagcatttccccaacccgctttcagtaaaaaaagcacctgtatc

SEQ ID NO: 836813 - DNA, 75 bp, synthetic construct
  source 1..75: mol_type = other DNA
actgtcttgatgttatgccttcattactaccgggaagtgttgacctggttttatgtgacccgccgtatggaacca

SEQ ID NO: 836814 - DNA, 75 bp, synthetic construct
  source 1..75: mol_type = other DNA
cggttgtcggcagaatgctattaggtgcgtatcaatatttatactcagccacatctgaattcaatgtcgtaaagg

SEQ ID NO: 836815 - DNA, 75 bp, synthetic construct
  source 1..75: mol_type = other DNA
aactccgccgtgtaccggtatgtgataaggcgttcgttcttctgacagaacagcgtcagcatctgggtgatgaag

SEQ ID NO: 836816 - DNA, 75 bp, synthetic construct
  source 1..75: mol_type = other DNA
ccatgagatgcgccatacctttgcgacaaaactcattgagagcggggccgacattcacaccgtcaaagacttact

SEQ ID NO: 836817 - DNA, 75 bp, synthetic construct
  source 1..75: mol_type = other DNA
ggccggactatcgaagccagcgatacaaaatgtaccgggcttaaggctatattccactcatccggacgcattaag

SEQ ID NO: 836818 - DNA, 75 bp, synthetic construct
  source 1..75: mol_type = other DNA
aagggaaagaagtactggaacatgaagtgaaggagtatttaaaagataaactaaataatgtgagcaaatgggaat

SEQ ID NO: 836819 - DNA, 75 bp, synthetic construct
  source 1..75: mol_type = other DNA
acgattagagagtattttgattctgtgtgctcattttttgattgctgtggctttttgttgtgggagtgttgaatg

SEQ ID NO: 836820 - DNA, 75 bp, synthetic construct
  source 1..75: mol_type = other DNA
tcttctttgatagagctgtagatgatcaccgacatcaattttgggctttgggtcatactgagctgctttcagact

SEQ ID NO: 836821 - DNA, 75 bp, synthetic construct
  source 1..75: mol_type = other DNA
gaagggcataacaatgcgacagtgaaagcattttatgattatctgaaggggccgcaggctgcggaaatctttaaa

SEQ ID NO: 836822 - DNA, 75 bp, synthetic construct
  source 1..75: mol_type = other DNA
tgttcgtccgttatcatacggttttatttcgcaggatgacctggcaaaacagttcctgaatgtctctgaagattt

SEQ ID NO: 836823 - DNA, 75 bp, synthetic construct
  source 1..75: mol_type = other DNA
gtagcgaaatttaccatgttattttcaatggtaatgtttacaagaacgcctggtgggttgggtctaaagattgcc

SEQ ID NO: 836824 - DNA, 75 bp, synthetic construct
  source 1..75: mol_type = other DNA
caccggaagttcatcttggtcccgttcgtgttgctgttatgaatgctgatcaggtttgtgcaattctggcacgga

SEQ ID NO: 836825 - DNA, 75 bp, synthetic construct
  source 1..75: mol_type = other DNA
cagccgattactggcgacaacattgttaacgtgctggatgatttccgtcaggcgggttacaccgtagtgaccact

SEQ ID NO: 836826 - DNA, 75 bp, synthetic construct
  source 1..75: mol_type = other DNA
aagggggcgggcgtccaggaaaatctcgtgctgacggtggccgtcgccccgcccgcgatgacaaacagagtcagc

SEQ ID NO: 836827 - DNA, 75 bp, synthetic construct
  source 1..75: mol_type = other DNA
cgcgccacaaagcgccgggacaacgaagccatgcgcacccgccccgccacacgacggcaggcggagcggcttctt

SEQ ID NO: 836828 - DNA, 75 bp, synthetic construct
  source 1..75: mol_type = other DNA
gcacaaagcttatttaatgaaaaagaattgactggttatacacgtcgtatgtttaaggccggtaataaatcactt

SEQ ID NO: 836829 - DNA, 75 bp, synthetic construct
  source 1..75: mol_type = other DNA
atatcaataatgctgaagagcgagtgaaagttaaatatcgtaaagaaaatttcaactcaccatattttaatgagc

SEQ ID NO: 836830 - DNA, 75 bp, synthetic construct
  source 1..75: mol_type = other DNA
caggttcacatgagatttggtctgaactacaaactgaaggttatcttgaaaaatcgggaaaaatcaccaaagccc

SEQ ID NO: 836831 - DNA, 75 bp, synthetic construct
  source 1..75: mol_type = other DNA
cccgctgggtgacggcacgtacagcaacgttgtcggcaccccggcatcagacaagggtgagccgtggttcctgat

SEQ ID NO: 836832 - DNA, 75 bp, synthetic construct
  source 1..75: mol_type = other DNA
tggaaacaccttctgatacctactctatgaaagtcggtgatgtcgtgggggatattgaccctatgctcatccagc

SEQ ID NO: 836833 - DNA, 75 bp, synthetic construct
  source 1..75: mol_type = other DNA
tctctcatttgaaggttcaacgggttcaatgcctgttaacccacaaatacccgaagatgatgtactgcttaaaaa

SEQ ID NO: 836834 - DNA, 75 bp, synthetic construct
  source 1..75: mol_type = other DNA
ggcaggtgcgcaggattgtgttctggcactggaaaacgaatctaacccgcataacctgggtggcatgatgcgcag

SEQ ID NO: 836835 - DNA, 75 bp, synthetic construct
  source 1..75: mol_type = other DNA
tcatgcaggcatttatggacatggcaaacgctgagaagaaagaagagcgtcgccgtaaacgagcggaagcaaaat

SEQ ID NO: 836836 - DNA, 75 bp, synthetic construct
  source 1..75: mol_type = other DNA
tcatgcaggcattcatggacatggcaaaagccgagaggaaagaagagcgccggcgtaagcgagcggaagcaaaag

SEQ ID NO: 836837 - DNA, 75 bp, synthetic construct
  source 1..75: mol_type = other DNA
atgattctgtactgcgtaaacaatctgccgttaagtgttatgttcaaccagttacttaaacaggtaagaaatggc

SEQ ID NO: 836838 - DNA, 75 bp, synthetic construct
  source 1..75: mol_type = other DNA
atttatgcaaaagaagcactgcaaaaactgggcgcatgggatacgctctccccgaaactggctccggcggaagat

SEQ ID NO: 836839 - DNA, 75 bp, synthetic construct
  source 1..75: mol_type = other DNA
cgccagacactgctcggcaatagcctggtcgttgtagcaccgaaagccagcgagcagaaagatttcatcatcgac

SEQ ID NO: 836840 - DNA, 75 bp, synthetic construct
  source 1..75: mol_type = other DNA
cgaaagccagcgagcagaaagatttcaccatcgacagcaaaaccaactggacttcgctgctgaatggcggtcgcc

SEQ ID NO: 836841 - DNA, 75 bp, synthetic construct
  source 1..75: mol_type = other DNA
ttgatacggttcgcccggacaacatgcaggctgcacagttgttgacggagcatctcattcgcaatgggcatcagc

SEQ ID NO: 836842 - DNA, 75 bp, synthetic construct
  source 1..75: mol_type = other DNA
ttcctcattaacccgtgcagaacgggttggggggctattgtgcaactctactaaaatttggcctgccgtttcata

SEQ ID NO: 836843 - DNA, 75 bp, synthetic construct
  source 1..75: mol_type = other DNA
ggtgtacgcaaactgccggagcgatgtgtgcctgttcatatgctgttgttagcgcaggttcacgactttagagca

SEQ ID NO: 836844 - DNA, 75 bp, synthetic construct
  source 1..75: mol_type = other DNA
gcaggggcggatggtttttttgctacatggcggtaaagacggtaaacaactggctcagcgattttccttgttgct

SEQ ID NO: 836845 - DNA, 75 bp, synthetic construct
  source 1..75: mol_type = other DNA
catgatgcaaaaaatcagtcacgaagagaatcactctcgaaatctgattatccccgcgcggctcattacggcgaa

SEQ ID NO: 836846 - DNA, 75 bp, synthetic construct
  source 1..75: mol_type = other DNA
gtggggggctattgtgcaactctactaaaatttggcctgccgtttcacagcgattgggtgctggagtgcacatcc

SEQ ID NO: 836847 - DNA, 75 bp, synthetic construct
  source 1..75: mol_type = other DNA
agatggtcgtgagataaaagctgataagatatctcataataataatgaacagtcaggttatataaaagccagtaa

SEQ ID NO: 836848 - DNA, 75 bp, synthetic construct
  source 1..75: mol_type = other DNA
tctgaacgatttaaaaaattgaattatgaaggggatgctttactcgcagcctttcataaagaaaccggagctata

SEQ ID NO: 836849 - DNA, 75 bp, synthetic construct
  source 1..75: mol_type = other DNA
tatgtataaagctgaagataatgccctttccattgaaaacaaaaatggtattacgtttaagaactggtttgaaaa

SEQ ID NO: 836850 - DNA, 75 bp, synthetic construct
  source 1..75: mol_type = other DNA
ggcggaaatcgcgaagcatttcccgtcgcgtctgggttacgttacaccgcttgccgctggtgcgtttccgctgac

SEQ ID NO: 836851 - DNA, 75 bp, synthetic construct
  source 1..75: mol_type = other DNA
aaaccgtctcgtcgtctcggcgatgctaaaccggcaggcgaacaacaacgtcgccgccgtccgcgtaaacctgcc

SEQ ID NO: 836852 - DNA, 75 bp, synthetic construct
  source 1..75: mol_type = other DNA
atccggcgatattcgtgtactggtggcaactgacatcgctgcgcgcggcctggatattgaagagctgccgcacgt

SEQ ID NO: 836853 - DNA, 75 bp, synthetic construct
  source 1..75: mol_type = other DNA
cgccagtgcacgcattatgggcgttggcctcaacacggttttacgtcacttaaaaaatcaggccgcagtcggtaa

SEQ ID NO: 836854 - DNA, 75 bp, synthetic construct
  source 1..75: mol_type = other DNA
gctgccggctcagccaatatctacgcaggaaaggggcatgatgttgtttactatgataaaacagataccggttat

SEQ ID NO: 836855 - DNA, 75 bp, synthetic construct
  source 1..75: mol_type = other DNA
agggaaagcggctggaaagaaggccaaaagagttccagcaacaaatctttgatccattaaaaggaaatattgacc

SEQ ID NO: 836856 - DNA, 75 bp, synthetic construct
  source 1..75: mol_type = other DNA
gaaagtggtgcgaagtctggtaacgcgaagcccgcagaaaaaccgtctcgtcgtctcggcgatgccaaaccggca

SEQ ID NO: 836857 - DNA, 75 bp, synthetic construct
  source 1..75: mol_type = other DNA
tgcgttttatgcgtaatctcgggttaatggcggcggagcgtgctggcgtgttgaaacgtcaggcgctgaaatatg

SEQ ID NO: 836858 - DNA, 75 bp, synthetic construct
  source 1..75: mol_type = other DNA
gcgtactctgcacagctttgatccgtgcctcgcctgttcaacacacgtgctgggcgacgacggtagcgagctgat

SEQ ID NO: 836859 - DNA, 75 bp, synthetic construct
  source 1..75: mol_type = other DNA
taccagtgcgtggtgccgaccacctggaacgccagcccgcgcgatcccaaagggcagattggcgcttatgaagcg

SEQ ID NO: 836860 - DNA, 75 bp, synthetic construct
  source 1..75: mol_type = other DNA
cttgccgggatggactggatcgatgtgttagatgcgctgaaagccgacccgcggaaaacctccgaactggcgcaa

SEQ ID NO: 836861 - DNA, 75 bp, synthetic construct
  source 1..75: mol_type = other DNA
ttccggcatccagtcgactttgggccgcattttgtgccgcgcgcacgaagcgcagtgggccgcaagcaagttgca

SEQ ID NO: 836862 - DNA, 75 bp, synthetic construct
  source 1..75: mol_type = other DNA
gcggtcaatatggagcgcctgaatctggtgcagtcgatcattacccgcacggcggatttcattaataacgtgatg

SEQ ID NO: 836863 - DNA, 75 bp, synthetic construct
  source 1..75: mol_type = other DNA
agggcagattggcgcttatgaacaccaaaatggcgatccccgagcaaccgctggagatcctgcgtactctgcaca

SEQ ID NO: 836864 - DNA, 75 bp, synthetic construct
  source 1..75: mol_type = other DNA
cgaagctggtgattggtgccgacggcgcaaattcccaggtgcggcagatggcgggaattggcgttcatgcctggc

SEQ ID NO: 836865 - DNA, 75 bp, synthetic construct
  source 1..75: mol_type = other DNA
tggtggaaaacactgtcctgcaacaggcgttgtggcaggcgctggaagcgcatccgaaagtaacgttacgtgtgc

SEQ ID NO: 836866 - DNA, 75 bp, synthetic construct
  source 1..75: mol_type = other DNA
ttatgctggcaacgctctggtgccacgatcatctggtgcacttctatcagcttgccgggatggactggatcgatg

SEQ ID NO: 836867 - DNA, 75 bp, synthetic construct
  source 1..75: mol_type = other DNA
cgccagtgcacgcattatggacgttggcctcaacacggttttacgtcacttaaaaaactcaggccgcagtcggta

SEQ ID NO: 836868 - DNA, 75 bp, synthetic construct
  source 1..75: mol_type = other DNA
tggaaaaggtaatgacaagttgtacggcagtgagggagcagatctgcttgatggcggagaagggaatgatcttct

SEQ ID NO: 836869 - DNA, 75 bp, synthetic construct
  source 1..75: mol_type = other DNA
atcaatgactggcttggcgaagaggtgatccgctttaacccttacgcactgttagacacccagcccacatcctga

SEQ ID NO: 836870 - DNA, 75 bp, synthetic construct
  source 1..75: mol_type = other DNA
gagatctacggtgcgccggaatatctggccgcgctacaaagcgccatgctgaacggtgaagcaacggtgttccgc

SEQ ID NO: 836871 - DNA, 75 bp, synthetic construct
  source 1..75: mol_type = other DNA
ctgcgtcgacgaaccagatccagcataaaagccaaacttcagccgaagcattcagctttggcgatcccgttcctg

SEQ ID NO: 836872 - DNA, 75 bp, synthetic construct
  source 1..75: mol_type = other DNA
gaaagtgcgctggaaaacattgttcgtaatgccctgcgttattcccatacgaagattgaagtgggctttgcggta

SEQ ID NO: 836873 - DNA, 75 bp, synthetic construct
  source 1..75: mol_type = other DNA
aagccaaccagttgtggagtgaagtgctggataacgcggcgttcgaagccgagcaaatgggcaagtcgttgacag

SEQ ID NO: 836874 - DNA, 75 bp, synthetic construct
  source 1..75: mol_type = other DNA
tttgagcaacgagttttatccaaggataccggatttaaattatcatgggatgaggttaaaaatttttccaactca

SEQ ID NO: 836875 - DNA, 75 bp, synthetic construct
  source 1..75: mol_type = other DNA
ctgagatgattaattggtacttccctcggttacttaagagctatgaggatgaaaagatttattttgataagttag

SEQ ID NO: 836876 - DNA, 75 bp, synthetic construct
  source 1..75: mol_type = other DNA
ttcaaatgctggaactggaaaaggatgttgaacggcttcgcaatctgacacgcgctgaccgtatggacatgaagt

SEQ ID NO: 836877 - DNA, 75 bp, synthetic construct
  source 1..75: mol_type = other DNA
tgtcatggaggccatgaagcatgtcaatgaatggcttggcgttgaggtgatgcgctttaacccctatgccctgct

SEQ ID NO: 836878 - DNA, 75 bp, synthetic construct
  source 1..75: mol_type = other DNA
aaaaaggacggacttcagattatcccgttgtcagaagtcgcagcgaaggatgagtttctgaatatcaagaacgtg

SEQ ID NO: 836879 - DNA, 75 bp, synthetic construct
  source 1..75: mol_type = other DNA
aaatccatgctcatcgcggtatgggtagaacgccgccaaacgctcaaaatccgcttgctcgtatgtgttcaagag

SEQ ID NO: 836880 - DNA, 75 bp, synthetic construct
  source 1..75: mol_type = other DNA
atgggaaagagtaagaaaaaccgcgctgcggcgacgaatcagatcctgcataaaaaccagacttcagccgaagca

SEQ ID NO: 836881 - DNA, 75 bp, synthetic construct
  source 1..75: mol_type = other DNA
ggtgatgtggagaaggccgcgcgggtttacgcaattaatgagctgatgcccgtcatggaggccatgaagcacatc

SEQ ID NO: 836882 - DNA, 75 bp, synthetic construct
  source 1..75: mol_type = other DNA
acctccaaaggtcttggagcgcataccgactccggggcactggaacgctggctgcttccagcgtatcagcgcgtt

SEQ ID NO: 836883 - DNA, 75 bp, synthetic construct
  source 1..75: mol_type = other DNA
attacgagactgggattctgtggaactcaggactccttgatggttctctcaatagcaaattcactttcctttttg

SEQ ID NO: 836884 - DNA, 75 bp, synthetic construct
  source 1..75: mol_type = other DNA
ctgaaattaaaaatatttgagcaggagcaacttgtccgtgaagaaattgtaccttttaacaaatcaggttcttca

SEQ ID NO: 836885 - DNA, 75 bp, synthetic construct
  source 1..75: mol_type = other DNA
aaaaaggtgcgaaataagcaggtggtgttactcattgccggaatatccggcgtcgcgacgggaataatcgtcagc

SEQ ID NO: 836886 - DNA, 75 bp, synthetic construct
  source 1..75: mol_type = other DNA
tcttttgagaatacaatgaataataaagataataaattgtttttattaaagaataatctgattttcctctgcccc

SEQ ID NO: 836887 - DNA, 75 bp, synthetic construct
  source 1..75: mol_type = other DNA
tcttcaatcatattcccgcaacgggaatatgagttgtaatgggtttgatgaaaaggaatatagctgcaattacat

SEQ ID NO: 836888 - DNA, 75 bp, synthetic construct
  source 1..75: mol_type = other DNA
accagccaggaacaagcaactggacaggatgactaccggaacagtccagaatggaaggatttttcatcacgcatt

SEQ ID NO: 836889 - DNA, 75 bp, synthetic construct
  source 1..75: mol_type = other DNA
tcatcatgtacatgaccgatgccgcgcagaaccaagaggatgtgaacaacctccgcaatgcgatgaaaagcgcca

SEQ ID NO: 836890 - DNA, 75 bp, synthetic construct
  source 1..75: mol_type = other DNA
gggcaaaaggtgaagcctgggttcaaattagcaggcaagctggtacttcttaccgcactgcgctatggcccggcg

SEQ ID NO: 836891 - DNA, 75 bp, synthetic construct
  source 1..75: mol_type = other DNA
atgaagcataaaaaaaagaatagattagtcgtagcgatttcagttgcattaattccatatataggggttaccgga

SEQ ID NO: 836892 - DNA, 75 bp, synthetic construct
  source 1..75: mol_type = other DNA
gtagatgtcatcgttgatgatgttgataatgttgttaacctttttataggtaatgaatttctggattctgaagca

SEQ ID NO: 836893 - DNA, 75 bp, synthetic construct
  source 1..75: mol_type = other DNA
caaattttgccgttccagcagatcaccgcaaaggatgagttcatgaatgttaaggcggcatcccgtgatgatgtg

SEQ ID NO: 836894 - DNA, 75 bp, synthetic construct
  source 1..75: mol_type = other DNA
gcagtgaaaaacaggccagagaaggtgaatttgatgctgtgatgctggcaccaaagtcaacgcagacggtgaaat

SEQ ID NO: 836895 - DNA, 75 bp, synthetic construct
  source 1..75: mol_type = other DNA
cacccaattagatgtgttaatgaactcgctgaactccaccagtagctatctgacacagcagttcgacacctcaaa

SEQ ID NO: 836896 - DNA, 75 bp, synthetic construct
  source 1..75: mol_type = other DNA
cgctgagttggtgggaagtcgtccagataacgtaaaaatatcaatagagcgcctggctaaatctggagttattca

SEQ ID NO: 836897 - DNA, 75 bp, synthetic construct
  source 1..75: mol_type = other DNA
aaacggttaatgtgaccaccttcacgttgccaaaggcaatgaatgaacagaccttcacgctcaatgtgctgaatg

SEQ ID NO: 836898 - DNA, 75 bp, synthetic construct
  source 1..75: mol_type = other DNA
cgccagagttcaccgctcgccttgttgaccgctggcgagaactcgaaggggcaaccgcgaaaataccacaaacct

SEQ ID NO: 836899 - DNA, 75 bp, synthetic construct
  source 1..75: mol_type = other DNA
atttctacacgattacccgctacaaccacagcacccattacgcgatggcggtatggcagctaggtgaggcagtag

SEQ ID NO: 836900 - DNA, 75 bp, synthetic construct
  source 1..75: mol_type = other DNA
ccatcaaaatgacaagcattgaaatcgctgagttggtaggaagtcgtcatgacaaggtgaaacaatctattgaac

SEQ ID NO: 836901 - DNA, 75 bp, synthetic construct
  source 1..75: mol_type = other DNA
gataggtttaaatgaggcaattaagactactcaagttgacaatctagacatcatgtcgcgtggtcaagtgccgcc

SEQ ID NO: 836902 - DNA, 75 bp, synthetic construct
  source 1..75: mol_type = other DNA
ttgctgtcggatggtgaaggcttaatgcgcaagcgtctcattgaggctaccagacgaattaaaactttaccgttc

SEQ ID NO: 836903 - DNA, 75 bp, synthetic construct
  source 1..75: mol_type = other DNA
gccgggatgctgggggcaaggtaaaacaggaattacgttagtttatcgcccttcagaggatggacgagatgaagc

SEQ ID NO: 836904 - DNA, 75 bp, synthetic construct
  source 1..75: mol_type = other DNA
aatccgcaattggttacatcgtagaagcgctgcgtctgcgtcgtgagaaagggctgaaagcgtttacggtaatgt

SEQ ID NO: 836905 - DNA, 75 bp, synthetic construct
  source 1..75: mol_type = other DNA
gcgtatgctgaacggcagccactctttcctggcgtacctcggttacctcggcggctatgaaaccattgccgacac

SEQ ID NO: 836906 - DNA, 75 bp, synthetic construct
  source 1..75: mol_type = other DNA
cccgatgctggcggagttccagaagatcaacgcgcagtatcagggcgcagaccgcgtgaaagcgctgctgggcct

SEQ ID NO: 836907 - DNA, 75 bp, synthetic construct
  source 1..75: mol_type = other DNA
ttcaatgcaaaaagttgaaaataaacaaacaattagccctaacaaattcacaagcgtgtatatattcgaaggcga

SEQ ID NO: 836908 - DNA, 75 bp, synthetic construct
  source 1..75: mol_type = other DNA
tcgctcaggcgttctgcggtcatcgtcgcgctattatggaagggccaggtggcctgtggtggggaaccatcctta

SEQ ID NO: 836909 - DNA, 75 bp, synthetic construct
  source 1..75: mol_type = other DNA
agtcaccggcccgctgtcatccaatcatggtgaaattgtgcatcagtggtgtctcgatggtcaggggattgctct

SEQ ID NO: 836910 - DNA, 75 bp, synthetic construct
  source 1..75: mol_type = other DNA
atgaataatttaccgctgctgaacgatttgcgcgtctttatgctggtggctcgccgggctggttttgctgccgtg

SEQ ID NO: 836911 - DNA, 75 bp, synthetic construct
  source 1..75: mol_type = other DNA
tggtcttgtttatgttgatgctgggcgcgcagctgaccactatctttttcaaaggtatgctcgggctgccgtttg

SEQ ID NO: 836912 - DNA, 75 bp, synthetic construct
  source 1..75: mol_type = other DNA
tcggtggcggtgatgtgcctggtactggcgatgattattttcctgccgcaacgttttgcccgttatggcctgctg

SEQ ID NO: 836913 - DNA, 75 bp, synthetic construct
  source 1..75: mol_type = other DNA
accagtctggcggtgggaattgcgctctccggcgtactgacaataatgattggtgttagtggcttaggtcatcgc

SEQ ID NO: 836914 - DNA, 75 bp, synthetic construct
  source 1..75: mol_type = other DNA
tttacaaccatgctcagtatctcgataagcgcagagaaatgatgcagtggtggttggactggattgatgaaaagg

SEQ ID NO: 836915 - DNA, 75 bp, synthetic construct
  source 1..75: mol_type = other DNA
aaatttggcaataaaattatcgtcaacaatctggtgaggtgggaccggtggggattgcatcttatcaccgggcaa

SEQ ID NO: 836916 - DNA, 75 bp, synthetic construct
  source 1..75: mol_type = other DNA
atgaatgagttaataaatggcaatgctatcaaaatgacaagcattgaaatcgctgagttggtgggtaagcgtcaa

SEQ ID NO: 836917 - DNA, 75 bp, synthetic construct
  source 1..75: mol_type = other DNA
ataaagaaggtcaccatgccattaaagtcaccggaccgatgtcgtctaatcatggtgaaattgtccatcagtggt

SEQ ID NO: 836918 - DNA, 75 bp, synthetic construct
  source 1..75: mol_type = other DNA
tacctttatgtccctgtatcagggaaaaaggtatggcagcttcgctacaagattgacggtaaggagaaaatcctg

SEQ ID NO: 836919 - DNA, 75 bp, synthetic construct
  source 1..75: mol_type = other DNA
acaaaaactacaccctgagcagcgatggcggctttagcgcccgtgggcaagcgggccagatgctgaaaaaagaag

SEQ ID NO: 836920 - DNA, 75 bp, synthetic construct
  source 1..75: mol_type = other DNA
tgagttctacgtatatggatggatacattcagatgattaccctgaagttaatgcactaaaagaagaaataagagt

SEQ ID NO: 836921 - DNA, 75 bp, synthetic construct
  source 1..75: mol_type = other DNA
acgataatgcctgcgtggaaagcttctttcattcgctgaaagtggaatgtatccatggagaacactttatcagcc

SEQ ID NO: 836922 - DNA, 75 bp, synthetic construct
  source 1..75: mol_type = other DNA
tattcagccatcaccggattcacagtgggtcagtattgtcacgataaacagtgaaaccggctaccggaatatgaa

SEQ ID NO: 836923 - DNA, 75 bp, synthetic construct
  source 1..75: mol_type = other DNA
atggctgtaaccctcaccccgcatcagcgcgccctgttgcagttgctgcctgacgggctggcatgggacaagcgt

SEQ ID NO: 836924 - DNA, 75 bp, synthetic construct
  source 1..75: mol_type = other DNA
catacacagcagttcacgcgagcaaagcgtaaagctcttggcgaggctgccgcagaaagaaaagtatttcactca

SEQ ID NO: 836925 - DNA, 75 bp, synthetic construct
  source 1..75: mol_type = other DNA
atctgatgacgctggcagggtttaaaccggcaggtgtactgtgtgagctgactaatgacgatggcaccatggcgc

SEQ ID NO: 836926 - DNA, 75 bp, synthetic construct
  source 1..75: mol_type = other DNA
caataaacacaatatggcgctggtcaccattgaagatttggtggcgtatcgtcaggcacatgagcgtaaagctag

SEQ ID NO: 836927 - DNA, 75 bp, synthetic construct
  source 1..75: mol_type = other DNA
tgcgcgtttcctgtacctgaaccggcactgcttcaatggtctgtgtcggtataaccgtcgaggccagttcaacgt

SEQ ID NO: 836928 - DNA, 75 bp, synthetic construct
  source 1..75: mol_type = other DNA
gcctaagctgcgtccgcaccttccagaaggtaaacgcctggttgaaccgttcgcaggttcctgcgccgtcatgat

SEQ ID NO: 836929 - DNA, 75 bp, synthetic construct
  source 1..75: mol_type = other DNA
actgaaaaaacaccttcctgctggcctgcgactggttgaacctttcgcgggttcctgtgcagtgatgatggaaac

SEQ ID NO: 836930 - DNA, 75 bp, synthetic construct
  source 1..75: mol_type = other DNA
agcgcgccctgttgcagttgctgcctgacggactggcctgggacaagcggccgtcatccgtactggctgcgttat

SEQ ID NO: 836931 - DNA, 75 bp, synthetic construct
  source 1..75: mol_type = other DNA
atgaatcgcatttattgtgtgattggcacagtgcatattgatatacatatgttgcgtaatgtccaaaaagatgac

SEQ ID NO: 836932 - DNA, 75 bp, synthetic construct
  source 1..75: mol_type = other DNA
aaagtggtcaacatgaccatctatgacgctgagcactacaccgacgagcagaaagagcaaatcatcgcatcctat

SEQ ID NO: 836933 - DNA, 75 bp, synthetic construct
  source 1..75: mol_type = other DNA
catacgcagcagttcacacgggcaaagcgtaaagctctcggtgagacttatacacagagaaaagtgttccattca

SEQ ID NO: 836934 - DNA, 75 bp, synthetic construct
  source 1..75: mol_type = other DNA
ctgatggtgattatgctggcaatcccgttcctggcccgcaatgagttcggcgcagctattagcatggtggtgtgg

SEQ ID NO: 836935 - DNA, 75 bp, synthetic construct
  source 1..75: mol_type = other DNA
ttatcacattgcttggctttaataactatatcagatagtacctcatgggaggttaaattgatgaaggatagttat

SEQ ID NO: 836936 - DNA, 75 bp, synthetic construct
  source 1..75: mol_type = other DNA
atgagtaagctatcgagatttacttacaaggcgttagccaccatttaccccgtaacgcgtgacgactggacaaac

SEQ ID NO: 836937 - DNA, 75 bp, synthetic construct
  source 1..75: mol_type = other DNA
ccgaggaagctaaatcggttgtctcagaggtattgcctgatattcatattgcaacaggtattaataactggaagg

SEQ ID NO: 836938 - DNA, 75 bp, synthetic construct
  source 1..75: mol_type = other DNA
tatcggcggtgttccggcggcgacctggctgggtgaaactattggctggcgaatgtcgttcctggcaacggcggg

SEQ ID NO: 836939 - DNA, 75 bp, synthetic construct
  source 1..75: mol_type = other DNA
ctgatggtgattatgctcgcgatcccgttccttgcgcgaaatgagtttggcgcggctattagcatggtggtgtgg

SEQ ID NO: 836940 - DNA, 75 bp, synthetic construct
  source 1..75: mol_type = other DNA
ttccatcgcttgagatccaacgtatggctgtttttgaaaatggaatcaaagaatctatagatgcgctgcggaaaa

SEQ ID NO: 836941 - DNA, 75 bp, synthetic construct
  source 1..75: mol_type = other DNA
cgctcgaagcaaaaagcagcaaggtcagctatgaagtcttcgcaccgggagagctggcaaaggtctatgccttgc

SEQ ID NO: 836942 - DNA, 75 bp, synthetic construct
  source 1..75: mol_type = other DNA
gatgttcagttgcgggatattaaccgaaccatagttacaggctggttagataagctcaaaactgagcgagcgccc

SEQ ID NO: 836943 - DNA, 75 bp, synthetic construct
  source 1..75: mol_type = other DNA
gggaatgagattagcaacacaataaccgtatataccgaactgctttacaaaatgcagccagtgcagcgcccggaa

SEQ ID NO: 836944 - DNA, 75 bp, synthetic construct
  source 1..75: mol_type = other DNA
gatcaggttccggcgaacaaaccaattgttgacgcgatcaaagcgaaaaaacaggacccaagcggcgcgttcgtc

SEQ ID NO: 836945 - DNA, 75 bp, synthetic construct
  source 1..75: mol_type = other DNA
cctggactccgaccagggaccgacggcggcgaaatatattcttgagaaagtgaaaccgcagcgtattgctatcgt

SEQ ID NO: 836946 - DNA, 75 bp, synthetic construct
  source 1..75: mol_type = other DNA
tatcgtctgtcagtcacatcaaatgacaccggccttgataatgcgatgacactctcggtcagcggtgatgatgcg

SEQ ID NO: 836947 - DNA, 75 bp, synthetic construct
  source 1..75: mol_type = other DNA
tgccagcggcgtaggcgctctgattgtcggcgacggaaaaaaaaccggcatcaccaccaccattggcgttaacct

SEQ ID NO: 836948 - DNA, 75 bp, synthetic construct
  source 1..75: mol_type = other DNA
cgggaaatacaccatcagcgtcacccatctggcgcaggcgcaaaccctgaccacgcgcaccaccagagacgatac

SEQ ID NO: 836949 - DNA, 75 bp, synthetic construct
  source 1..75: mol_type = other DNA
tggcattcagcgaaattaatcagcaactttatcaactacttaatggtctggatgtggtttaccacgcccagggcg

SEQ ID NO: 836950 - DNA, 75 bp, synthetic construct
  source 1..75: mol_type = other DNA
ccacgaatttaaccgccacggcgcgcgctatccttcctataacaccattgtcggcagcggtgaaaacggctgcat

SEQ ID NO: 836951 - DNA, 75 bp, synthetic construct
  source 1..75: mol_type = other DNA
gatgtggtttaccatgctcagggcgaatatgcatatgctgatgaaatcgtgaacagtgcgctggaaaaactgcgt

SEQ ID NO: 836952 - DNA, 75 bp, synthetic construct
  source 1..75: mol_type = other DNA
tctgagcacatttgaacaactgcaccagaataatgatgaggtgtttgaccggggcgtgatcaacgtcttcatagg

SEQ ID NO: 836953 - DNA, 75 bp, synthetic construct
  source 1..75: mol_type = other DNA
tctgagcacatttgaacaactgcaccagaaaaacgatgaggtgtttgagcggggcgtgatcaacgtcttcatagg

SEQ ID NO: 836954 - DNA, 75 bp, synthetic construct
  source 1..75: mol_type = other DNA
agggatctgcacacatcactttcaaaaggctggagctgattgacagaattaacgatatgaaccgccccgggaatc

SEQ ID NO: 836955 - DNA, 75 bp, synthetic construct
  source 1..75: mol_type = other DNA
atgttgtacctgttcagcggtaaaccaatccccgacaaccgggaaaacatcactattcgtctggatgatcacatt

SEQ ID NO: 836956 - DNA, 75 bp, synthetic construct
  source 1..75: mol_type = other DNA
tctgagcacatttgaacaactgcaccagaagaaggatgaggtgtttgaacggggcgtgatcaacgtcttcatagg

SEQ ID NO: 836957 - DNA, 75 bp, synthetic construct
  source 1..75: mol_type = other DNA
tctgagcacatttgaacaactgcaccagaacaaagatgaggtgtttgagcggggcgtgatcaacgtcttcatagg

SEQ ID NO: 836958 - DNA, 75 bp, synthetic construct
  source 1..75: mol_type = other DNA
gatgtggtttaccacgctcagggcgaatatacctatgctgatgaaatcgtgaacagcgcgctggaaaaactgcgt

SEQ ID NO: 836959 - DNA, 75 bp, synthetic construct
  source 1..75: mol_type = other DNA
accgatgggggtttcatcttatcaccgggcaacagactgaccgactcgtcgacctggaaagaatgctacatctgt

SEQ ID NO: 836960 - DNA, 75 bp, synthetic construct
  source 1..75: mol_type = other DNA
cgggtaagaccgttacgctgcaaaaactggcggagtcattgtcggaaatcggtgtaccggtgtttatggctgatg

SEQ ID NO: 836961 - DNA, 75 bp, synthetic construct
  source 1..75: mol_type = other DNA
agatgagcgtaacggcctgattaatcactccccggtgtatggcaagtatgaagatgacgtggatcgggaatctgc

SEQ ID NO: 836962 - DNA, 75 bp, synthetic construct
  source 1..75: mol_type = other DNA
ggggtgatcaacgtcttcagaggactgagctggaattacaaaaccaactccccctgtaaatttggtaataaaatt

SEQ ID NO: 836963 - DNA, 75 bp, synthetic construct
  source 1..75: mol_type = other DNA
cacattctggctgtacgaaagagtacactgctgcaaatcgacacacttatccgacaactggctgaaatctcggtg

SEQ ID NO: 836964 - DNA, 75 bp, synthetic construct
  source 1..75: mol_type = other DNA
atgcacaggcacgtgatacatggtaccggtcactggaatacgataattttccggaaatcagtgcggcaaacattc

SEQ ID NO: 836965 - DNA, 75 bp, synthetic construct
  source 1..75: mol_type = other DNA
atggatctcaatacactcatctcacaatatggttatgctgcgctggtgctcggaagtctggcggaaggtgaaacc

SEQ ID NO: 836966 - DNA, 75 bp, synthetic construct
  source 1..75: mol_type = other DNA
tctggtcgtggttctggtggtaggcgtgcgctggtggctgaaacggcgcgggaagaaaaagccggataatcaggc

SEQ ID NO: 836967 - DNA, 75 bp, synthetic construct
  source 1..75: mol_type = other DNA
caggataaaattgagcgggcgcagaaactgatccagcgccatccgtatctgtttgtcattggtacgcgttttatg

SEQ ID NO: 836968 - DNA, 75 bp, synthetic construct
  source 1..75: mol_type = other DNA
attccagaatcagtacggtaatatcagtagcgcatcggttggtgccatccagcgcggattactgacgctggaaca

SEQ ID NO: 836969 - DNA, 75 bp, synthetic construct
  source 1..75: mol_type = other DNA
aaggcgattcaggagctggggaccggcgaggcattaatctcgcttctggatgcaaaagggagtccgtcggtggta

SEQ ID NO: 836970 - DNA, 75 bp, synthetic construct
  source 1..75: mol_type = other DNA
tgaaatctggcgaaacctgatgcaacgttcagggatgctttccttaatggatgcacaggcccgtgatacatggta

SEQ ID NO: 836971 - DNA, 75 bp, synthetic construct
  source 1..75: mol_type = other DNA
ccccctcttacactgcgcaaacactcaaagagtggcgacaggaacaaggtgacgatgtgccactggcgtttatta

SEQ ID NO: 836972 - DNA, 75 bp, synthetic construct
  source 1..75: mol_type = other DNA
cacatcacgttcaggaaaccagaactggttgacaggctaaatgacataattgccaggcactatccaaatgtatta

SEQ ID NO: 836973 - DNA, 75 bp, synthetic construct
  source 1..75: mol_type = other DNA
aaagtgtgctatgaagatgagatgttcaacatcagatactttaagaagggctccgcacacatcacgttcaggaaa

SEQ ID NO: 836974 - DNA, 75 bp, synthetic construct
  source 1..75: mol_type = other DNA
gctctgggatgctgtcattaatggatgcgcagacccgtgatacatggtaccgatcactggagtacgataattttc

SEQ ID NO: 836975 - DNA, 75 bp, synthetic construct
  source 1..75: mol_type = other DNA
ttcagggtaaagaacgctatgaagatgagatgttcatcattaaatactttaagaagggatctgcacacatcactt

SEQ ID NO: 836976 - DNA, 75 bp, synthetic construct
  source 1..75: mol_type = other DNA
aaatgcctgcgaccatatttaatggatttgttggaaattttaaggtttataacctgtctcctaccactcagaacc

SEQ ID NO: 836977 - DNA, 75 bp, synthetic construct
  source 1..75: mol_type = other DNA
ccggtcactggagtacgataattttccggaaatcagtgaagcgaacattctgagcacatttgaacaactacacca

SEQ ID NO: 836978 - DNA, 75 bp, synthetic construct
  source 1..75: mol_type = other DNA
cgggcaacaggcagatcgactcgccgacctggaaagaatgctgtatctgttcagtggcaaaccaatccctgacaa

SEQ ID NO: 836979 - DNA, 75 bp, synthetic construct
  source 1..75: mol_type = other DNA
agggggatcgtcgccatgcaggaacaccggaagatggtgtgatatcccgggagcaaatcgcccaggttctggtca

SEQ ID NO: 836980 - DNA, 75 bp, synthetic construct
  source 1..75: mol_type = other DNA
cgggacaccgatcaacgatatcgctaccagcctggcggtggggattgcgctctctggcgtgctgacgatgttgat

SEQ ID NO: 836981 - DNA, 75 bp, synthetic construct
  source 1..75: mol_type = other DNA
gtaaagagtgctatgaagatgatatgttcagaattaaatactttaagaaaggctccgcgcacatcacgttcagga

SEQ ID NO: 836982 - DNA, 75 bp, synthetic construct
  source 1..75: mol_type = other DNA
accctgtaaatttggcagtaaaattatcgtcaacaatctggtgaggcgggacagatggggatttcatctgaacaa

SEQ ID NO: 836983 - DNA, 75 bp, synthetic construct
  source 1..75: mol_type = other DNA
cggtcagggaattgagctaagtgattttaaagtgacctttacgatcgactggttcaacatcagcagcgcgtcccg

SEQ ID NO: 836984 - DNA, 75 bp, synthetic construct
  source 1..75: mol_type = other DNA
ggattttcgttgcggttgctggctgatggaaaaaccggaaaccgcaatgaaagccatcacccggaaccttgaccg

SEQ ID NO: 836985 - DNA, 75 bp, synthetic construct
  source 1..75: mol_type = other DNA
atgaagatgagatgttcagaattaaatactttaagaaaggctccgcgcacatcacgttcaggaaatcagagctgg

SEQ ID NO: 836986 - DNA, 75 bp, synthetic construct
  source 1..75: mol_type = other DNA
atgctacacctgttcagcggcaaaccgattcccgacaaccgggaaaacatcactattcatctggatgagcacatc

SEQ ID NO: 836987 - DNA, 75 bp, synthetic construct
  source 1..75: mol_type = other DNA
accggtggagatttcatcttatcaccggacaacagactgaccgactcgccgatctggaaagaatgctacatctgt

SEQ ID NO: 836988 - DNA, 75 bp, synthetic construct
  source 1..75: mol_type = other DNA
gtcctggttatccgcttgaaatggcacaaccgcagtaccagcagtggctggaagatcatttaacgcacaacccgg

SEQ ID NO: 836989 - DNA, 75 bp, synthetic construct
  source 1..75: mol_type = other DNA
accgataatgtcagacatcacaatctcccgtccggaagtggtcaccgggcatacggacgttatctgctcaaccag

SEQ ID NO: 836990 - DNA, 75 bp, synthetic construct
  source 1..75: mol_type = other DNA
atactttaagaaaggctccgcgcacatcacgttcaggaaatcagagctggttgacaggctgaatgatattattgc

SEQ ID NO: 836991 - DNA, 75 bp, synthetic construct
  source 1..75: mol_type = other DNA
ccgggaaaacatcaccattcatctggatgatcacatccagtccgttcagggtaagagcgctatgaagacgagatg

SEQ ID NO: 836992 - DNA, 75 bp, synthetic construct
  source 1..75: mol_type = other DNA
accggtggggatttcatcttatcaccgggcaacaggctgaccgactcgccgatctggaaagaatgttgcacctgt

SEQ ID NO: 836993 - DNA, 75 bp, synthetic construct
  source 1..75: mol_type = other DNA
ctacattacctccactagagatcattgagggttttctagggtatccagttggtggccgcgaaagatcgcaggaag

SEQ ID NO: 836994 - DNA, 75 bp, synthetic construct
  source 1..75: mol_type = other DNA
atggagaaaccggaaaccgcaatgaaagccatcacccggaatctcgatcgcgaactctggcgtgacctgatgcaa

SEQ ID NO: 836995 - DNA, 75 bp, synthetic construct
  source 1..75: mol_type = other DNA
ccggtcactggagtacgataatgtcccggaaatcagtgaagcaaacattctgaacacatttaaacaactgcacca

SEQ ID NO: 836996 - DNA, 75 bp, synthetic construct
  source 1..75: mol_type = other DNA
tcgggaaaacatcactattcgtctggatgagcacattcagtctgttcagggtaaagagagctatgaagatgagat

SEQ ID NO: 836997 - DNA, 75 bp, synthetic construct
  source 1..75: mol_type = other DNA
cctcatggcgtgcgagtaaagagtttcgtctgcatcttatccagacgatgaccaaaaaagtcattagcgaagccg

SEQ ID NO: 836998 - DNA, 75 bp, synthetic construct
  source 1..75: mol_type = other DNA
ctacctacggtggaaatatttgcaacggtgccaccagcgcagattccgccacgccaacgctgatttatgaggcga

SEQ ID NO: 836999 - DNA, 75 bp, synthetic construct
  source 1..75: mol_type = other DNA
atgtacgtatggagcgctaaagcaaatggctttttccccatatcggagaaagaaaaatttgaggcatcaggtctg

SEQ ID NO: 837000 - DNA, 75 bp, synthetic construct
  source 1..75: mol_type = other DNA
gcccgcagtcgcaggtgaagaaaatcagcggtatcagtaccagcgccgcgcagctgcgaaccgatgatggcgcgg

SEQ ID NO: 837001 - DNA, 75 bp, synthetic construct
  source 1..75: mol_type = other DNA
ttttggtggcagagcggcggcgttcaggagaccgtcgacccgcgccagcatgacttatctgatgcgttcgccatc

SEQ ID NO: 837002 - DNA, 75 bp, synthetic construct
  source 1..75: mol_type = other DNA
tcgtctgcatctcatccagacgatgaccaaaaaagtgattagcgaagccgtcgccgcggcggggggaaaattgca

SEQ ID NO: 837003 - DNA, 75 bp, synthetic construct
  source 1..75: mol_type = other DNA
gttcagccgcgcggtggggtgatctctcctcagccagcctttatgcagctggtgcgtcaggagttgcaggcaaaa

SEQ ID NO: 837004 - DNA, 75 bp, synthetic construct
  source 1..75: mol_type = other DNA
cgccagaagatattgtggatatgggcgtggactacaacggtaactttgtttgcagcggcggtatgcgtactttgc

SEQ ID NO: 837005 - DNA, 75 bp, synthetic construct
  source 1..75: mol_type = other DNA
ttcgcgcgatggtcggtggttcggaaccgcagtttgcgggttacaaccgtgcgatgcaggcgcgtcgttcgattg

SEQ ID NO: 837006 - DNA, 75 bp, synthetic construct
  source 1..75: mol_type = other DNA
caggtggtacaacgcggtacgggtcgtcagcttggggctaaatatccaaatctgcatttagcagggaaaacaggg

SEQ ID NO: 837007 - DNA, 75 bp, synthetic construct
  source 1..75: mol_type = other DNA
tccgctgggcgtacagccgcgcggtggggtgatctctccgcagcctgcctttatgcaactggtgcgccaggagtt

SEQ ID NO: 837008 - DNA, 75 bp, synthetic construct
  source 1..75: mol_type = other DNA
tgaagatcttcactacctttgactcggtggcccaggacgcggcagaaaaagccgccgtggaaggcattccggcac

SEQ ID NO: 837009 - DNA, 75 bp, synthetic construct
  source 1..75: mol_type = other DNA
catgaaagcctgcgcacgcttgaaaaagcacagcgtcagctaaatgccgcccgatttgttgatgataatggcgag

SEQ ID NO: 837010 - DNA, 75 bp, synthetic construct
  source 1..75: mol_type = other DNA
gaaaccggaaacacttatgcggtatcttcgccgtggcggcgtgtctgtgggggctaatagccgcctgatggattt

SEQ ID NO: 837011 - DNA, 75 bp, synthetic construct
  source 1..75: mol_type = other DNA
accagggggcttatgcgccgaatactctgcgcgacctccggttggtgtttcattcctgggcgcgctggtgtcacg

SEQ ID NO: 837012 - DNA, 75 bp, synthetic construct
  source 1..75: mol_type = other DNA
gcaccgccattgctgcggcatctggctgccatcgggaacaacctgaaccagacagcccggaaggtgaacagcggc

SEQ ID NO: 837013 - DNA, 75 bp, synthetic construct
  source 1..75: mol_type = other DNA
aacgtctgcgattgccaacctgcattcacaattgaaaggcctccaaccaataagagcgatgcagaaattgacgct

SEQ ID NO: 837014 - DNA, 75 bp, synthetic construct
  source 1..75: mol_type = other DNA
agagttatcggttatatgcggcgtagcgaagatgatatgtcggaaaatgataattctttacatatgcagcgcgcg

SEQ ID NO: 837015 - DNA, 75 bp, synthetic construct
  source 1..75: mol_type = other DNA
gttccggtggttttctgcgcaacattggcaaagagtaccaggaggccgcagaaaactttatgcggttcatgaatg

SEQ ID NO: 837016 - DNA, 75 bp, synthetic construct
  source 1..75: mol_type = other DNA
atgattgtgaaagttccagatgagaatacagcgagagacttgctggttgcgtgggtaaagcgccagccatatgag

SEQ ID NO: 837017 - DNA, 75 bp, synthetic construct
  source 1..75: mol_type = other DNA
tcgattgacaggcttagagccttcaaaagacgtctactctctatcgatctggatgctacacaaggtggaaacgta

SEQ ID NO: 837018 - DNA, 75 bp, synthetic construct
  source 1..75: mol_type = other DNA
cggtcatggatgtaacggaaataccagctgaaccgcaggtcttccagtcggggacactgagtacagggctggagc

SEQ ID NO: 837019 - DNA, 75 bp, synthetic construct
  source 1..75: mol_type = other DNA
ccctggcgattactgacccggttccagtactgagcgatgaagagattgccgtggtgctggagaaattcaaaacct

SEQ ID NO: 837020 - DNA, 75 bp, synthetic construct
  source 1..75: mol_type = other DNA
aaggaaaagagaccattgctcataccgcactgaacgacgccatttaccaggcgaaggttgtttcagaaatctggc

SEQ ID NO: 837021 - DNA, 75 bp, synthetic construct
  source 1..75: mol_type = other DNA
gaaaagtatcgtaagtgataaagatgtacgtggtttattatctcgctatggtttgtttaaagatgtatcaggaat

SEQ ID NO: 837022 - DNA, 75 bp, synthetic construct
  source 1..75: mol_type = other DNA
actaccaacaataacgtagatacctggtttgcaggcattgacggcagcacggtgaccatcacctgggtaggccgt

SEQ ID NO: 837023 - DNA, 75 bp, synthetic construct
  source 1..75: mol_type = other DNA
gatggacaaacagaacgcacgacggattgtggattttatgagtttacgcattgcagttgctgccgatcctcgcca

SEQ ID NO: 837024 - DNA, 75 bp, synthetic construct
  source 1..75: mol_type = other DNA
gatggcgattttcacgcttggcaacgtactttccgccatcgcgccggattatatgactctgatgctttcacgcat

SEQ ID NO: 837025 - DNA, 75 bp, synthetic construct
  source 1..75: mol_type = other DNA
tggaatggcactgatggtccgtggggcgtatggcgtcacactcaatctgctacccgccctttgagtacgactata

SEQ ID NO: 837026 - DNA, 75 bp, synthetic construct
  source 1..75: mol_type = other DNA
agctttctccagatgtgattaaagaaaaaatattacttttcagggctatgccatggaggcggctttacattttcg

SEQ ID NO: 837027 - DNA, 75 bp, synthetic construct
  source 1..75: mol_type = other DNA
agtcagtgaactgccgccgacagtaagagagctacatattgaattgaataattcgtcttttgtacatactgttcc

SEQ ID NO: 837028 - DNA, 75 bp, synthetic construct
  source 1..75: mol_type = other DNA
gaacgcttaccacggggccgttactttgtaggcaaaaaaccaggtcgtccattacagatcattgacgactttttt

SEQ ID NO: 837029 - DNA, 75 bp, synthetic construct
  source 1..75: mol_type = other DNA
gtctttttatactcttacatgggcaaaaattaaaggtggccccgtccaaaagatagaagatattgccaatcgtga

SEQ ID NO: 837030 - DNA, 75 bp, synthetic construct
  source 1..75: mol_type = other DNA
atcaatgactacggcggacgtccggtgctgcagttctcctgtggtggtagccgctgtaccgcagtgaagaaataa

SEQ ID NO: 837031 - DNA, 75 bp, synthetic construct
  source 1..75: mol_type = other DNA
gagttacatcaatgactacggtgggcgtccggtactgcaattctcctgtgccggaagccgctgtaccgcagtaaa

SEQ ID NO: 837032 - DNA, 75 bp, synthetic construct
  source 1..75: mol_type = other DNA
cagtgcgtcaaatacggatttagggacgaaaacgaccagttcatttgattacggcacgaagacagtcagtacgtt

SEQ ID NO: 837033 - DNA, 75 bp, synthetic construct
  source 1..75: mol_type = other DNA
tgggcggcttctggatgcgtgagcttggtctgtatgacgatgctggaacactgattgcggtcgccaacatggcgg

SEQ ID NO: 837034 - DNA, 75 bp, synthetic construct
  source 1..75: mol_type = other DNA
gcggctatgaaaccattgccgacaccatgactaacccggcttatcgcaaagcggcctttgccctgatgatgcagg

SEQ ID NO: 837035 - DNA, 75 bp, synthetic construct
  source 1..75: mol_type = other DNA
gttgcatgacaatggatgaggcaaatagtaaagcccgatcaactactgaacgttctgatgcaataaaacaaatat

SEQ ID NO: 837036 - DNA, 75 bp, synthetic construct
  source 1..75: mol_type = other DNA
gccgggaaagacacgccagcaacgcaactggttgtaccgttctttaaagatgtgatgccgcagttaggtttgttc

SEQ ID NO: 837037 - DNA, 75 bp, synthetic construct
  source 1..75: mol_type = other DNA
caagcgcggtacaccgaccatgggcgggataatgatcctgacggcgattgtgatctccgtactgctgtgggctta

SEQ ID NO: 837038 - DNA, 75 bp, synthetic construct
  source 1..75: mol_type = other DNA
cgcatcggtgttactgccgcagcccgtgaactcagcctgtatgaatcacagctctacaactggcgcagtaaacag

SEQ ID NO: 837039 - DNA, 75 bp, synthetic construct
  source 1..75: mol_type = other DNA
tacagcaaagaccgtattcttgagctgtatatgaacgaggtgtatctcggtcagagcggcgacaacgaaatccgt

SEQ ID NO: 837040 - DNA, 75 bp, synthetic construct
  source 1..75: mol_type = other DNA
tggggatcagtgagggtgcgattccgtttgcactggaaagccctatcaccgccattccgtcgtatatggtcggcg

SEQ ID NO: 837041 - DNA, 75 bp, synthetic construct
  source 1..75: mol_type = other DNA
gggcgttgctttcgcgctgtaccttgccggaaacgatacgccagcaacacagcttgtggtgccgttctttaaaga

SEQ ID NO: 837042 - DNA, 75 bp, synthetic construct
  source 1..75: mol_type = other DNA
cgcagaaacatcagcaggcatcaaaagcgaaatcacaccaactcagatagaagaagcgcgggccattggtcgttt

SEQ ID NO: 837043 - DNA, 75 bp, synthetic construct
  source 1..75: mol_type = other DNA
ccgtcattaactgtgaaaaattacaaatcacagacatgccatcaaccgtaaaaaatctacatattgaattaactg

SEQ ID NO: 837044 - DNA, 75 bp, synthetic construct
  source 1..75: mol_type = other DNA
ctaacctgacagaaaccgagctaaggaaactgccctatgggggcgtatgggttgcacagatgcagttaaaaacga

SEQ ID NO: 837045 - DNA, 75 bp, synthetic construct
  source 1..75: mol_type = other DNA
ttcgcaagtgttgtgatggcgctgcaagaaaatacgcctaaaccacaaaacgtatctgcttatcgacgtaaaaga

SEQ ID NO: 837046 - DNA, 75 bp, synthetic construct
  source 1..75: mol_type = other DNA
gccaaggagacattgtctatggacttgatgggccaagagaaaaaattgttaaggcgatcaaagtagttaatggcc

SEQ ID NO: 837047 - DNA, 75 bp, synthetic construct
  source 1..75: mol_type = other DNA
atcctctcccagagaaaaacttgtcaacagcatcaaactggttaacgacttttccaaaaaagatatcgtaattca

SEQ ID NO: 837048 - DNA, 75 bp, synthetic construct
  source 1..75: mol_type = other DNA
ctcgatgccgccttcacgccggaaggggccgagtacgtggagcatttctgcgggctggagggcactgttgcaaat

SEQ ID NO: 837049 - DNA, 75 bp, synthetic construct
  source 1..75: mol_type = other DNA
tatgatcttcccggcagaaaccatgaccgttgagcagatggcgctaaccattcgccacggtagcggtattgtttg

SEQ ID NO: 837050 - DNA, 75 bp, synthetic construct
  source 1..75: mol_type = other DNA
gttatgtgccgcggcttcgtcaattgccggaccgcaaatccgtaacgtcgcgacctacggtggtaatatttgcaa

SEQ ID NO: 837051 - DNA, 75 bp, synthetic construct
  source 1..75: mol_type = other DNA
gcctgggttaatgcaggatatttcccgtgatttatgggatcaggggaatacacctgttccaccgctgcgccagtt

SEQ ID NO: 837052 - DNA, 75 bp, synthetic construct
  source 1..75: mol_type = other DNA
actctggcgtcatttacgtcgtcatggcttgtggaatctggcgggcgatgttatcaggagtgttcgatgtctgta

SEQ ID NO: 837053 - DNA, 75 bp, synthetic construct
  source 1..75: mol_type = other DNA
ggcggtcatacggaagccaccattgatctgatgacgctggctgggtttaaacctgcaggtgtgctgtgtgaactg

SEQ ID NO: 837054 - DNA, 75 bp, synthetic construct
  source 1..75: mol_type = other DNA
aacgggaactgtccattattcgtgcactgggagaagaattctccacagtgctggcggatttacagcgcacatttg

SEQ ID NO: 837055 - DNA, 75 bp, synthetic construct
  source 1..75: mol_type = other DNA
ggtcgtgattacgatccggaagtactgaagcaggcggttctggaggcggtgaatgcccttccggctccgcaggac

SEQ ID NO: 837056 - DNA, 75 bp, synthetic construct
  source 1..75: mol_type = other DNA
gatatccacaatctggcggaactgcggggagttacgctggcggaagatggcgcgctacgaatcggttcagcgaca

SEQ ID NO: 837057 - DNA, 75 bp, synthetic construct
  source 1..75: mol_type = other DNA
tatgatcttcccggcagaaaccatgaccgttgagcagatggcactgaccattcgccacggtagcggtattgtttg

SEQ ID NO: 837058 - DNA, 75 bp, synthetic construct
  source 1..75: mol_type = other DNA
caataaacacaatatggcgctcgtgactattgaagacctggtggcttatcgtcaggcgcatgaacgcaaagccag

SEQ ID NO: 837059 - DNA, 75 bp, synthetic construct
  source 1..75: mol_type = other DNA
aattgctggagatgcccagctttctaccccatgcactgacagcatcataaacagcattgcaacaggcattcgcat

SEQ ID NO: 837060 - DNA, 75 bp, synthetic construct
  source 1..75: mol_type = other DNA
ttttaaagcgccttctttgttgcagcttagccctgactggacgacaaattcctgccgtggtgcatgtaaaattgt

SEQ ID NO: 837061 - DNA, 75 bp, synthetic construct
  source 1..75: mol_type = other DNA
acttagcgatgcggtgaacctgaccgggggaaccagctccaaaacgtcagtaaatactgcgcatggaagcgcagg

SEQ ID NO: 837062 - DNA, 75 bp, synthetic construct
  source 1..75: mol_type = other DNA
cgaactgaaatactacggtgagaaagtcgagaacaaaaaccctggcaacagcagcccgataacttccgaaagcaa

SEQ ID NO: 837063 - DNA, 75 bp, synthetic construct
  source 1..75: mol_type = other DNA
tggaagactggtcattctatgtttctgctcattataccgggcagaaacgtgccgatagcgatacggctaaaacgc

SEQ ID NO: 837064 - DNA, 75 bp, synthetic construct
  source 1..75: mol_type = other DNA
ataaagatctcagccgtgatgactacagctacaacgaagacggccgtcgttactttatggcggtggactatcgtt

SEQ ID NO: 837065 - DNA, 75 bp, synthetic construct
  source 1..75: mol_type = other DNA
gacgtcaaactgcgtgcgggcgtgctgaacctgactgataaagatctcagccgtgatgactacagctataacgaa

SEQ ID NO: 837066 - DNA, 75 bp, synthetic construct
  source 1..75: mol_type = other DNA
acactactatggcaagaagattggtaatctgattaccacgctgtacttcatcgccttttttgtcgtcgtgttgat

SEQ ID NO: 837067 - DNA, 75 bp, synthetic construct
  source 1..75: mol_type = other DNA
ccaactcactcactgaacagctggcgaagcatatggtcattgatctacgcatccgtatgctggtgagtcttggcg

SEQ ID NO: 837068 - DNA, 75 bp, synthetic construct
  source 1..75: mol_type = other DNA
atgacttctcccgtcaatgtggacgtcaaactgggcgtcaataaattcaatgtcgatgaagagcatccgcacatt

SEQ ID NO: 837069 - DNA, 75 bp, synthetic construct
  source 1..75: mol_type = other DNA
ggcaggcagaacaggcggggtcagtctcaatcggcagtttagtgtggaagactcgtcagaaccggtgcttttctg

SEQ ID NO: 837070 - DNA, 75 bp, synthetic construct
  source 1..75: mol_type = other DNA
ggttgtcaatttccgggattattgtcgcagtagttgcgatgtcgaaatcattcctgggtacgtactttggcgtta

SEQ ID NO: 837071 - DNA, 75 bp, synthetic construct
  source 1..75: mol_type = other DNA
ctatttcattgcattctttgtcgttgttctaatttatgccgtggcaatcacaaactcattaacggaacaactggc

SEQ ID NO: 837072 - DNA, 75 bp, synthetic construct
  source 1..75: mol_type = other DNA
gaaagccgatcctgaagccgtcctctcctttcatgcggtgtttgcatgtatttcgctgatatcccaggatatcgc

SEQ ID NO: 837073 - DNA, 75 bp, synthetic construct
  source 1..75: mol_type = other DNA
gaccggaactgcgggatcacggaggcggtgacggtgcctgcccgggaagtgatccacgaccggtttaactgtttt

SEQ ID NO: 837074 - DNA, 75 bp, synthetic construct
  source 1..75: mol_type = other DNA
ctgtttcaggcggtggctgagccttttgccggtgcctggcagcagggtgtgaaagccgatccggaaaccgttttg

SEQ ID NO: 837075 - DNA, 75 bp, synthetic construct
  source 1..75: mol_type = other DNA
atgcgttggttttgtcttcgcctggagtcggtgagcaaaattactgctggtgtttatttaggggcgtttccacaa

SEQ ID NO: 837076 - DNA, 75 bp, synthetic construct
  source 1..75: mol_type = other DNA
gcggtgatgcactgtatcttcagcagcagaactacagtctggaggcgctgtcccgtcgtgatgcccgtgaggatc

SEQ ID NO: 837077 - DNA, 75 bp, synthetic construct
  source 1..75: mol_type = other DNA
tcctttcacgcggtgttttcttgcatttcgctgatatcccaggatatcgccaaaatgcggctgcgcctgatgcag

SEQ ID NO: 837078 - DNA, 75 bp, synthetic construct
  source 1..75: mol_type = other DNA
agcatgacgggtgagcggttgttctctgtggtggtccggcagagcagtggccagcgtacggaaaaaacattttcc

SEQ ID NO: 837079 - DNA, 75 bp, synthetic construct
  source 1..75: mol_type = other DNA
atgagatattcactgctaatttcaatcgcctcacacgggattacaccggcatgttgcgctacagcacgctactgc

SEQ ID NO: 837080 - DNA, 75 bp, synthetic construct
  source 1..75: mol_type = other DNA
gtgccggcgcgctttgtcagtaacccaccgacctggaaaagctatcttctgaccgggctgatggcgcagcggatc

SEQ ID NO: 837081 - DNA, 75 bp, synthetic construct
  source 1..75: mol_type = other DNA
gcccaggcgatgcgaaagaaaacgatgccagcaacccatggcgttatgttcgcgcggcaacggcaacagaaatca

SEQ ID NO: 837082 - DNA, 75 bp, synthetic construct
  source 1..75: mol_type = other DNA
ttatcttgtgtatatggttatgataatagttttagagactgttggtttttggatgtatgatactttcccgtctaa

SEQ ID NO: 837083 - DNA, 75 bp, synthetic construct
  source 1..75: mol_type = other DNA
aaaagaaggtaaggatttttttcttgcatcactttattctgttattctcaataatagtggcatttttctattagg

SEQ ID NO: 837084 - DNA, 75 bp, synthetic construct
  source 1..75: mol_type = other DNA
aaaaattatgaatcctatggaaagtttgaggttgaatctgcatctaatgtcagtcaatttaaagagcatggcgct

SEQ ID NO: 837085 - DNA, 75 bp, synthetic construct
  source 1..75: mol_type = other DNA
tgatgcggttgcaaatattccgcagccggcagacggtaaaagtctcaccccggatgatgtgcgtccgatgcttga

SEQ ID NO: 837086 - DNA, 75 bp, synthetic construct
  source 1..75: mol_type = other DNA
atgacaaagcccaaatcaccggggccggaagccctttatctcagccgccagaacgaacacacgacgcagcgccag

SEQ ID NO: 837087 - DNA, 75 bp, synthetic construct
  source 1..75: mol_type = other DNA
aaaatcgtcacgagtaaatctagtcaaaaccgtgtaaaaatattgagaatcattaaaaattactataatctgtgg

SEQ ID NO: 837088 - DNA, 75 bp, synthetic construct
  source 1..75: mol_type = other DNA
atggctggggtgttgtatttacgtttttccactttcaggaatgttgtgaaaacgtctggattgaagacattgttg

SEQ ID NO: 837089 - DNA, 75 bp, synthetic construct
  source 1..75: mol_type = other DNA
caggagggcgcatctgacggtaataaggccataagcgaaacagagcgtgatgcggtgaaggcgatgttcaggggg

SEQ ID NO: 837090 - DNA, 75 bp, synthetic construct
  source 1..75: mol_type = other DNA
ttgccggtgcctggcagcagggcgtgaaagccgatccggaaagtgtcctctcctttcatgcggtgttttcttgca

SEQ ID NO: 837091 - DNA, 75 bp, synthetic construct
  source 1..75: mol_type = other DNA
caggatgggacgtggacagatcggcacggaagcgccagcgacgcagtggcggcagagccgcagacgcggcgtgag

SEQ ID NO: 837092 - DNA, 75 bp, synthetic construct
  source 1..75: mol_type = other DNA
gctggcggatttacagcgcacatttgaggggaagatggcctcgcaggcacaagcgtttgaagagaaactgacttc

SEQ ID NO: 837093 - DNA, 75 bp, synthetic construct
  source 1..75: mol_type = other DNA
gaggctgtaagccatatccctgctccgcgcgacggtcgtgactatgatcccgatgttctgcagaaggcggtgaat

SEQ ID NO: 837094 - DNA, 75 bp, synthetic construct
  source 1..75: mol_type = other DNA
tttttcatccgcttatagggttgccgccggtgtatgccgccgggctggcggcaacgcaggggcatcatattcagg

SEQ ID NO: 837095 - DNA, 75 bp, synthetic construct
  source 1..75: mol_type = other DNA
ggaacaaccaccgtttgatttaaatcacatgggtgctggcagtgataagtcggatgcgctcggcgtgccctatta

SEQ ID NO: 837096 - DNA, 75 bp, synthetic construct
  source 1..75: mol_type = other DNA
cgcggtgtgttcagagccggtgaaacctaccaccccggcgatacggtgacgtgggggggctcgctgtggcactgc

SEQ ID NO: 837097 - DNA, 75 bp, synthetic construct
  source 1..75: mol_type = other DNA
ccctgccggctccgcaggacgggcgtgatgccacggcactggaaatactccctgccattgacgatcaaaaatcct

SEQ ID NO: 837098 - DNA, 75 bp, synthetic construct
  source 1..75: mol_type = other DNA
ggagtaacgaggatgtatcggtgtggtggaaccgtctgtgtgacaacgtactgccggaaaaaaccatgccgtttg

SEQ ID NO: 837099 - DNA, 75 bp, synthetic construct
  source 1..75: mol_type = other DNA
tgccgaaacagatccacgttctgcatgagtcacagcaacagtccggcatcggctccggcctgaatgaaggcgata

SEQ ID NO: 837100 - DNA, 75 bp, synthetic construct
  source 1..75: mol_type = other DNA
tgataccaagccaggccgttatcgataccggcaaagaacagcgcgtgattactgttgatgatgaaggcaagtttg

SEQ ID NO: 837101 - DNA, 75 bp, synthetic construct
  source 1..75: mol_type = other DNA
ccgttacttcgaacagcgtgtcgccacacataaagaagctcactggcaggcttattatcaagcccgccaccgcct

SEQ ID NO: 837102 - DNA, 75 bp, synthetic construct
  source 1..75: mol_type = other DNA
ctgggatcttttactcactgacgtctttgataaaacgtggccgctcgcagctgacccatcaaagggcatgcggct

SEQ ID NO: 837103 - DNA, 75 bp, synthetic construct
  source 1..75: mol_type = other DNA
cggctgcggcgtttcagacctgggaacaactgatttttaaactgctggcggcagaagaagagtatgagcgaaccg

SEQ ID NO: 837104 - DNA, 75 bp, synthetic construct
  source 1..75: mol_type = other DNA
ttctggtatgacccgatgaaaccggataccaaatttgataaacccggaaaatcgccctttatggatatggacctg

SEQ ID NO: 837105 - DNA, 75 bp, synthetic construct
  source 1..75: mol_type = other DNA
ttttcattaatccatccggccaccatcaacacgtctgaggttgaagagatattccgggatgaaggttttatgctc

SEQ ID NO: 837106 - DNA, 75 bp, synthetic construct
  source 1..75: mol_type = other DNA
tccgctgactttttttcgcaaatcgtggtttgctgatgtggatgtcccattttttattatccgtcctctccggtt

SEQ ID NO: 837107 - DNA, 75 bp, synthetic construct
  source 1..75: mol_type = other DNA
cttttccaccacgggcagaatgctcagaccggtggcattttcattaattcatccggcatccctcgaatcttcaga

SEQ ID NO: 837108 - DNA, 75 bp, synthetic construct
  source 1..75: mol_type = other DNA
tattaaatcgtggtcggcctattcgccattagatatgggcagaaaatggattaaacgcggtaatgacgtttttaa

SEQ ID NO: 837109 - DNA, 75 bp, synthetic construct
  source 1..75: mol_type = other DNA
ggtcaaaaatcccccgtctttaaagagttacaagagaaaggctatttactcaaacgcccggacggttcgctatgg

SEQ ID NO: 837110 - DNA, 75 bp, synthetic construct
  source 1..75: mol_type = other DNA
gtaatggactcaatgtaactggcgatataagaaccaatgcatgggtatatgcaaacagattttctgttaatagca

SEQ ID NO: 837111 - DNA, 75 bp, synthetic construct
  source 1..75: mol_type = other DNA
cctacaagttctggcgcagatgtcgccgtgaggggctgggtaagcgtatctatctcttcaaaggggacagcgtca

SEQ ID NO: 837112 - DNA, 75 bp, synthetic construct
  source 1..75: mol_type = other DNA
accgttgcgaatctcaacggtcataccatcggcggtggtattgaacttgccttgtgctgcgatattcgtattgcc

SEQ ID NO: 837113 - DNA, 75 bp, synthetic construct
  source 1..75: mol_type = other DNA
tcccaccagttactggctggattaatgtccgccactcaggattgccaacaggcgacgcacgcatttgccgaaaaa

SEQ ID NO: 837114 - DNA, 75 bp, synthetic construct
  source 1..75: mol_type = other DNA
cttccggtggcgattgatggtattgccggcgttgagaacgatgaaaactggctgaccacaccgggtgccaacgaa

SEQ ID NO: 837115 - DNA, 75 bp, synthetic construct
  source 1..75: mol_type = other DNA
attccctgataacaccggacgaacgggccgacgggcgcaggccgcaggtgatgtgccgctctggcttcttcagac

SEQ ID NO: 837116 - DNA, 75 bp, synthetic construct
  source 1..75: mol_type = other DNA
tggtgaatcgcattttgtccaacaaccatagccatcatcgcgatatggatgtaacgatcgttgttcattcgcctg

SEQ ID NO: 837117 - DNA, 75 bp, synthetic construct
  source 1..75: mol_type = other DNA
tgtccgccactcaggattgccagcaggcgacgcgcgcctttgccgaaaaaagtagcgtgagcttcaataatcaat

SEQ ID NO: 837118 - DNA, 75 bp, synthetic construct
  source 1..75: mol_type = other DNA
ggcaccaccacgccgtggattattgaagcgatagataatgaaatccctttcaccgccatttgttattcactaaat

SEQ ID NO: 837119 - DNA, 75 bp, synthetic construct
  source 1..75: mol_type = other DNA
cgagggcaacccggagttggggcagcttattgccgatgaagccttaaagctcggcgtgcgggcaaaagcgcacaa

SEQ ID NO: 837120 - DNA, 75 bp, synthetic construct
  source 1..75: mol_type = other DNA
ttgccgggaaatgggcgtcgataccattatcgttttcgatacccactggctggtcaacagtgcttatcacatcaa

SEQ ID NO: 837121 - DNA, 75 bp, synthetic construct
  source 1..75: mol_type = other DNA
accgttcgttgatgcagtaaacgcattcattaacgatgaaggtcatcacggacacggtgatgatctgcgctgttt

SEQ ID NO: 837122 - DNA, 75 bp, synthetic construct
  source 1..75: mol_type = other DNA
gcaacgtgatcggctcaacgattctggcgtattactgggatgatttcgctccggcgctggccaccgactgggaca

SEQ ID NO: 837123 - DNA, 75 bp, synthetic construct
  source 1..75: mol_type = other DNA
tgcctcaaaacgcgtgcagacagaggtggtcattaccggagcaggtatgagcgccgatcgcacggcgttaacgct

SEQ ID NO: 837124 - DNA, 75 bp, synthetic construct
  source 1..75: mol_type = other DNA
acgccggaccaggcttcccgcctcatccgccttatccgctggccgctgatgagtcaggaagaatatgccctcagt

SEQ ID NO: 837125 - DNA, 75 bp, synthetic construct
  source 1..75: mol_type = other DNA
ccaactacacattatcatctggtatcctgctcaaaactaaggaggttggtgtgtttggcatattaacgagaagca

SEQ ID NO: 837126 - DNA, 75 bp, synthetic construct
  source 1..75: mol_type = other DNA
atgaagcaattcgatcaatcctacgccgagcagctgtttgagctacgcgaaatgctcgaaacacattcacttcag

SEQ ID NO: 837127 - DNA, 75 bp, synthetic construct
  source 1..75: mol_type = other DNA
tgagtgaacaaaacaaagtgtttgagcaggcttttttcacgatgataaaccagcgccagttacgccctggggaaa

SEQ ID NO: 837128 - DNA, 75 bp, synthetic construct
  source 1..75: mol_type = other DNA
tttctccccgagcaatagttcccttaacgcaacaaagctttttacagcccaaaattctaccctggtatcaggctc

SEQ ID NO: 837129 - DNA, 75 bp, synthetic construct
  source 1..75: mol_type = other DNA
cagaaaccgggctggcgacagtgcctggctggtcaggaacgcagcggctgacggcactgcttgggcgctcactgg

SEQ ID NO: 837130 - DNA, 75 bp, synthetic construct
  source 1..75: mol_type = other DNA
tgagtgtctggatgcagtggggccggagttgtaccgcaagttgtggtcgttcgtcccggcagaaggggaatcgcc

SEQ ID NO: 837131 - DNA, 75 bp, synthetic construct
  source 1..75: mol_type = other DNA
cacgaagcgccgccgtggtgaacattccactaagccaaagtgtgagaatccagcctggttccgtcccgacagcta

SEQ ID NO: 837132 - DNA, 75 bp, synthetic construct
  source 1..75: mol_type = other DNA
ttcccctggttttccccggtgattggctatgacgaaaacaccggagaacctgtcgaacttcggatgctggctatt

SEQ ID NO: 837133 - DNA, 75 bp, synthetic construct
  source 1..75: mol_type = other DNA
gcacggcggcgctgtctgcccttaccgggatcaaaacccgtgcggatgcgcacgacaccctgaaaacgcaggttg

SEQ ID NO: 837134 - DNA, 75 bp, synthetic construct
  source 1..75: mol_type = other DNA
tccccacttccatcgcaaagtgcgctggcggaaatgtacaacatcagccgcacaacagtgcgtcatattctcagc

SEQ ID NO: 837135 - DNA, 75 bp, synthetic construct
  source 1..75: mol_type = other DNA
agcatacgggcgggatatttatgccgcttgtcagaaaggagaggccggtgaaattgcagaacatgtacagccatc

SEQ ID NO: 837136 - DNA, 75 bp, synthetic construct
  source 1..75: mol_type = other DNA
gagcacattgagcaggcggttcctttcactgcaacagccagcgataccgaagcatacgggcgggatatttatgcc

SEQ ID NO: 837137 - DNA, 75 bp, synthetic construct
  source 1..75: mol_type = other DNA
taagaaagtatttaagatattgtatcttgctattagagacaataaagatacagatacgatattaatgtcattcga

SEQ ID NO: 837138 - DNA, 75 bp, synthetic construct
  source 1..75: mol_type = other DNA
ccagactatatgtttaatggtgatcgcttaaccttcatgaaaacttattacttgaaagacaaaaatacaaaaacc

SEQ ID NO: 837139 - DNA, 75 bp, synthetic construct
  source 1..75: mol_type = other DNA
aggaaaagatcgattagcattagttaatgagagtacgggagaacaagttggtaatggtggtttctttcagtctat

SEQ ID NO: 837140 - DNA, 75 bp, synthetic construct
  source 1..75: mol_type = other DNA
cagtcagcaaaatcagacggaagtcgatgccgcgtccaatgtctattccgcagcgcaaaaccagcagagcagcgt

SEQ ID NO: 837141 - DNA, 75 bp, synthetic construct
  source 1..75: mol_type = other DNA
atggtcgctggcacctggcgtgccggggcgactacgttatccgtctcgacggcaccacctgcctgcagctgtgga

SEQ ID NO: 837142 - DNA, 75 bp, synthetic construct
  source 1..75: mol_type = other DNA
ctacgtggctcctgccgtcgtatggaggcggcgggctggctgcgcaccctgcgtgccccaaacctacagctggcc

SEQ ID NO: 837143 - DNA, 75 bp, synthetic construct
  source 1..75: mol_type = other DNA
tcctgatgacggatggattcgggttccgcagtccgctgtcccgtgaagcgggcgccagggcgctggcaatcctgg

SEQ ID NO: 837144 - DNA, 75 bp, synthetic construct
  source 1..75: mol_type = other DNA
cgaccagggcaactacaacgtcaccctgaaaaacggtcagccgctggtgagcgggcagcaaagttcgaccatcgc

SEQ ID NO: 837145 - DNA, 75 bp, synthetic construct
  source 1..75: mol_type = other DNA
cgctgatcaacatctccactgagccgctggagatagccaacctcggcagcgtgacggtcgggcaagcgtgctcgt

SEQ ID NO: 837146 - DNA, 75 bp, synthetic construct
  source 1..75: mol_type = other DNA
taagaaagtattcaagatactgtatcttgctatcagagataataaagatacagatacgatattaatgtcattcga

SEQ ID NO: 837147 - DNA, 75 bp, synthetic construct
  source 1..75: mol_type = other DNA
aacgccgatggcccgctgaccgttaacccggatatcaccgccgatgagctggcgttctccagttcgccggacgaa

SEQ ID NO: 837148 - DNA, 75 bp, synthetic construct
  source 1..75: mol_type = other DNA
tatgccgccagcgattacggctattacagcacccagcaggggtatctcagccaactggaagcggtactaagcgac

SEQ ID NO: 837149 - DNA, 75 bp, synthetic construct
  source 1..75: mol_type = other DNA
cgctgatcaatatctccaccgaaccgctggagatcgacaatcttggcagcgtgacggtcgggcaggcgtgctcgt

SEQ ID NO: 837150 - DNA, 75 bp, synthetic construct
  source 1..75: mol_type = other DNA
gaacgcttcttgcctgttcatttggggtaatcaccgcgctggcgcttgagcacgtcgaatcaggtaaagccggtc

SEQ ID NO: 837151 - DNA, 75 bp, synthetic construct
  source 1..75: mol_type = other DNA
ccggtctggctgattctggaataccaacaaataccagacagcttgaacgaatcattgtacaagctcagatttgtg

SEQ ID NO: 837152 - DNA, 75 bp, synthetic construct
  source 1..75: mol_type = other DNA
atgagtgatgaaagtaaaaaaccaagaacagaaaaaacattaaagcagaaagtagcatttgctcaacttgagctt

SEQ ID NO: 837153 - DNA, 75 bp, synthetic construct
  source 1..75: mol_type = other DNA
taacgccgtaaagactgccgcccgcgccgcgctttcggcctgcaaagcggaggtagaaaagaacggctacagcga

SEQ ID NO: 837154 - DNA, 75 bp, synthetic construct
  source 1..75: mol_type = other DNA
aaaagggacagggttaaaaatcgatgatttcgcccgggttttgggcgtatcagtcgccatggtaaaggaatggga

SEQ ID NO: 837155 - DNA, 75 bp, synthetic construct
  source 1..75: mol_type = other DNA
tgctgttctatgccagtccaaaggcgtcgtactgcaccggacagtcgatcaatgtcaccggtggtcaggtgatgt

SEQ ID NO: 837156 - DNA, 75 bp, synthetic construct
  source 1..75: mol_type = other DNA
gccgactattctcgccacgctgatgttgttgtctcatcagtacccgaatcagatggggcatctggtgattgctct

SEQ ID NO: 837157 - DNA, 75 bp, synthetic construct
  source 1..75: mol_type = other DNA
ttgctgtctcatcagtacccgaatcagatggggcatctggtgattgccctgctgctggcctggggcggcacattt

SEQ ID NO: 837158 - DNA, 75 bp, synthetic construct
  source 1..75: mol_type = other DNA
gtgcagttgctttcccttagaaccattgacggtgatacattatatctaaaattcagaaatgttatcaccgaggcc

SEQ ID NO: 837159 - DNA, 75 bp, synthetic construct
  source 1..75: mol_type = other DNA
aaccgacttaagtctctggaaaaatcagaacgaaagaaagttgaaacaaggctaaagattatacttggtgcagaa

SEQ ID NO: 837160 - DNA, 75 bp, synthetic construct
  source 1..75: mol_type = other DNA
cgttcctgtctcagaactggctgccgctataaaacaaataaaagagttacagcgcttactgggtaagaaaaccat

SEQ ID NO: 837161 - DNA, 75 bp, synthetic construct
  source 1..75: mol_type = other DNA
cctcaaagaagcggtggagtatggtcagtcgcgaaaatggatagcgcatgcgcccttgttgccaacggacaagga

SEQ ID NO: 837162 - DNA, 75 bp, synthetic construct
  source 1..75: mol_type = other DNA
ggcaccagcgataaactcgacgcatttttagcatcgattcgcgatgtggcgaaaattgttgaagttgcccgctcc

SEQ ID NO: 837163 - DNA, 75 bp, synthetic construct
  source 1..75: mol_type = other DNA
gtgttgcaatggcattttcattttcaatgtgtataagatttttagcaacatggtggctagcatttcggttgaatt

SEQ ID NO: 837164 - DNA, 75 bp, synthetic construct
  source 1..75: mol_type = other DNA
caaaagtgcctggcgaacagcacttcaggaactgaagatagaaaatttgcattttcatgacctccgtcatgaggc

SEQ ID NO: 837165 - DNA, 75 bp, synthetic construct
  source 1..75: mol_type = other DNA
tcgccgcatatcgcgatatgcgactcgctgaaatcaacccgcggacaggaaaaaccatcacaggaaataccgtcc

SEQ ID NO: 837166 - DNA, 75 bp, synthetic construct
  source 1..75: mol_type = other DNA
ccttcttgaatcaatgggtataaagggaattctcgtccgttacaaactgagtgatgcaagtaatttaattcaggc

SEQ ID NO: 837167 - DNA, 75 bp, synthetic construct
  source 1..75: mol_type = other DNA
agagaagatttatggaggcttccccatcgggtaagcgagatctgatactgtcgctatcatcagcactaatcgttt

SEQ ID NO: 837168 - DNA, 75 bp, synthetic construct
  source 1..75: mol_type = other DNA
agagtgaaaattattcttttgctgatattttaatttctgaaatactgccgcaaatacagaactcagaacctgctc

SEQ ID NO: 837169 - DNA, 75 bp, synthetic construct
  source 1..75: mol_type = other DNA
gaaatgttccgcgaagatgagccgatgccgctcaccagcggtgaatttgcggtactgaaggcgctggtcagccat

SEQ ID NO: 837170 - DNA, 75 bp, synthetic construct
  source 1..75: mol_type = other DNA
ccgacgtcttcgtagccagagcaacccgatgccgatcatcatggtgacggcgaaaggggaagaggttgaccgtat

SEQ ID NO: 837171 - DNA, 75 bp, synthetic construct
  source 1..75: mol_type = other DNA
tgccgctcaccagcggtgagtttgcggtactgaaggcactggtcagccatccgcgtgagccgctctcccgcgata

SEQ ID NO: 837172 - DNA, 75 bp, synthetic construct
  source 1..75: mol_type = other DNA
acacagaccctgcgcattgaagacctgcattttcacgacctgcgccatgaagctatcagccgtttctttgagctc

SEQ ID NO: 837173 - DNA, 75 bp, synthetic construct
  source 1..75: mol_type = other DNA
cagaaaggtgagcgcgttccggcccccggtgcactccccgtcaatgacccggcgttcgtcatggtctgccctctg

SEQ ID NO: 837174 - DNA, 75 bp, synthetic construct
  source 1..75: mol_type = other DNA
acgacgggcagacagtgagaattgatatctgcgacttcgacgacctgtccgtgacggcggcaacccgggaggaag

SEQ ID NO: 837175 - DNA, 75 bp, synthetic construct
  source 1..75: mol_type = other DNA
tgcaacaacgttgccagcaaattgtcaccagcccggtacttagcccggagcagaagcgccattttctggcactgg

SEQ ID NO: 837176 - DNA, 75 bp, synthetic construct
  source 1..75: mol_type = other DNA
acgcacggaagcccttgccagacagcttaacgatgccgccagcgtgcaggccgaacgacttacccccatcaacga

SEQ ID NO: 837177 - DNA, 75 bp, synthetic construct
  source 1..75: mol_type = other DNA
caaagcgtttctcgcctcggcctatgcgtctcgcggactgaaaatgcgttacacctctggcaccggttcggaagc

SEQ ID NO: 837178 - DNA, 75 bp, synthetic construct
  source 1..75: mol_type = other DNA
tgcttgcgaagcgccctgtaaatcaggatgggctgattggcgaatggcctgaagaggggctgatcgccatggaaa

SEQ ID NO: 837179 - DNA, 75 bp, synthetic construct
  source 1..75: mol_type = other DNA
aaatgcgtcagagcttggttgcaacctgatggaagataacaaagaagcatttatatcagtgttaggagagtgcct

SEQ ID NO: 837180 - DNA, 75 bp, synthetic construct
  source 1..75: mol_type = other DNA
gcagaacaggaatacgagacaaccggaagtgaagaaacactcaggacggttatcaataccgactggggattacct

SEQ ID NO: 837181 - DNA, 75 bp, synthetic construct
  source 1..75: mol_type = other DNA
ggctggcaactgctgcaactggacggcagtcacgcctctttccgtaaaggcggtcagcggctgacgctgaacacc

SEQ ID NO: 837182 - DNA, 75 bp, synthetic construct
  source 1..75: mol_type = other DNA
tgtggacccggatatggcacaacaatgccttgcatggggggcgaactttgtcgctgttggcgttgacacgatgct

SEQ ID NO: 837183 - DNA, 75 bp, synthetic construct
  source 1..75: mol_type = other DNA
tcaaagaacgattatgcaagggagaagtgcaaatcggtctgtggttgagctcgactacttcttatatggcagaaa

SEQ ID NO: 837184 - DNA, 75 bp, synthetic construct
  source 1..75: mol_type = other DNA
gtgatggtttctccctggcctcaaaacgtaccaccacatttatgtccgccgggatgactctggtggagagctcgc

SEQ ID NO: 837185 - DNA, 75 bp, synthetic construct
  source 1..75: mol_type = other DNA
gcgatggattcggtaaaacttgccaatatgttgtgcgatccaaatgtcaaacgtagcgatatcgttccccttacc

SEQ ID NO: 837186 - DNA, 75 bp, synthetic construct
  source 1..75: mol_type = other DNA
cttatggtactggatttaatgttacctggtgaagatggcttgtcgatttgccgacgtcttcgtagtcagagcaac

SEQ ID NO: 837187 - DNA, 75 bp, synthetic construct
  source 1..75: mol_type = other DNA
aacaagtcctggatattggcgcgcaaactctattgatcccgatggtcgatactgccgatcaggcacgtcaggtgg

SEQ ID NO: 837188 - DNA, 75 bp, synthetic construct
  source 1..75: mol_type = other DNA
cggcagataccccgcgcctgaatgaggtcgatttggtcctccacagtctggagcaaattactgtgaccaaacagc

SEQ ID NO: 837189 - DNA, 75 bp, synthetic construct
  source 1..75: mol_type = other DNA
gtttccgtgcagactggcaaagtgattatcagcacacccgcagcaacgacgatgaagatgacagcagtaacagta

SEQ ID NO: 837190 - DNA, 75 bp, synthetic construct
  source 1..75: mol_type = other DNA
agtcagaaaacgttcacggtatggcggcttctttccactcgggagaaataaccacgcaccgaactaccggcaccc

SEQ ID NO: 837191 - DNA, 75 bp, synthetic construct
  source 1..75: mol_type = other DNA
ggtaaagtggtgatgccaaaaggtgcgccgaaatccaaagtcgcggcaacgtgcgactactccgcagaagtcgtt

SEQ ID NO: 837192 - DNA, 75 bp, synthetic construct
  source 1..75: mol_type = other DNA
atggctaccctcaccactggcgtggttcttcttcgctggcagctgcttagcgccgtattgatgtttctggccagc

SEQ ID NO: 837193 - DNA, 75 bp, synthetic construct
  source 1..75: mol_type = other DNA
ttttgacctgatacgtagaagcctccataacggaggcttcttttttatggctggcagatgctttaatcatccacc

SEQ ID NO: 837194 - DNA, 75 bp, synthetic construct
  source 1..75: mol_type = other DNA
ggcgctctttgtaatgcagcagataagtccaacgtcagcttctccgccgaacttgatgttgctgccaaaaaagct

SEQ ID NO: 837195 - DNA, 75 bp, synthetic construct
  source 1..75: mol_type = other DNA
gctacgcaagatccactgtcgcgttattcagggatatttcttttcccgccccctacccgccgaagaaattccagg

SEQ ID NO: 837196 - DNA, 75 bp, synthetic construct
  source 1..75: mol_type = other DNA
tcgcgttattcagggatatttcttttcccgccccctacccgccgaagaaattccaggctggatgagcagcgtgtt

SEQ ID NO: 837197 - DNA, 75 bp, synthetic construct
  source 1..75: mol_type = other DNA
tgaaacgtgggaaaccagagcccgacgcgtatctgttaggcgcgcaactgctgggtcttgcaccacaagaatgcg

SEQ ID NO: 837198 - DNA, 75 bp, synthetic construct
  source 1..75: mol_type = other DNA
atgcatattacatacgatctgccggttgctattgatgacattattgaagcgaaacaacgactggctgggcgaatt

SEQ ID NO: 837199 - DNA, 75 bp, synthetic construct
  source 1..75: mol_type = other DNA
ggcggaaaacttaatttgttcatcgcttgatctggaatgcgcctccagtaacgaccagacctttacccactcaga

SEQ ID NO: 837200 - DNA, 75 bp, synthetic construct
  source 1..75: mol_type = other DNA
cggccagcatgatggttgccgtgagcaccgctcatgcgcagttctcatatagcggcaacaccggcacagtcaaag

SEQ ID NO: 837201 - DNA, 75 bp, synthetic construct
  source 1..75: mol_type = other DNA
gcttcctgctcccctaacgggcttgtaggccgcgacagtacaggggcgatactttcgtgccaatccggtacgtgg

SEQ ID NO: 837202 - DNA, 75 bp, synthetic construct
  source 1..75: mol_type = other DNA
tcgctgcgcctgatgtggtggatgagctggactatgaaaccattctggcagagcgaaaggcgacgcttgtctcac

SEQ ID NO: 837203 - DNA, 75 bp, synthetic construct
  source 1..75: mol_type = other DNA
ctatttttatcctggcccggaatctgaacccattcttgccgccgccagagatgcacttgacacatggctgaagac

SEQ ID NO: 837204 - DNA, 75 bp, synthetic construct
  source 1..75: mol_type = other DNA
cacctcgctgagactgcgggcgcagcgggcgtatgacgggctgagcgttgctggcccgtcaggtgcatacgagta

SEQ ID NO: 837205 - DNA, 75 bp, synthetic construct
  source 1..75: mol_type = other DNA
cgtctccgccgcgctggagctggaatcggaacccctgaacgttatcgcccagacaacagcatttcgtgaaatgct

SEQ ID NO: 837206 - DNA, 75 bp, synthetic construct
  source 1..75: mol_type = other DNA
ggctcagcgtggctggtccggtcggcgcatatgaataccacggtcgcagcgccgacggtcgggtcgctgatatct

SEQ ID NO: 837207 - DNA, 75 bp, synthetic construct
  source 1..75: mol_type = other DNA
catggaatctgataccgatttacggttacgcgcacaacaggcttatgaagggctcagcgtggctggtccggtcgg

SEQ ID NO: 837208 - DNA, 75 bp, synthetic construct
  source 1..75: mol_type = other DNA
tccccgcgcctgacgtggtggaaacgctggattttgaaaccattctcgcggaacgcaaagcgacgctagtctcgc

SEQ ID NO: 837209 - DNA, 75 bp, synthetic construct
  source 1..75: mol_type = other DNA
cgggcgtatgacggcctgagcgttgctggcccgtcaggcgcatacgagtattttgcccgcagcgccagcggtctg

SEQ ID NO: 837210 - DNA, 75 bp, synthetic construct
  source 1..75: mol_type = other DNA
gcgcgttgggattatcgcgcagtgcgctggtagtggcggcatggttgttatgttacggacactgtaaaaccgttg

SEQ ID NO: 837211 - DNA, 75 bp, synthetic construct
  source 1..75: mol_type = other DNA
atgccgattatcgacctgaaccagctacccgcaccggatgtggtcgaggagctggactttgaaagcattctcgct

SEQ ID NO: 837212 - DNA, 75 bp, synthetic construct
  source 1..75: mol_type = other DNA
cagccggtaatgaccttgatgtgattggtgccaattacaacaccacgcgcctgactatcaccccggcagatgatt

SEQ ID NO: 837213 - DNA, 75 bp, synthetic construct
  source 1..75: mol_type = other DNA
cgctgctaactacaacgtgaaacgcctgacggtgacacctgctgatgatgactctgtaccgcccgttgcggctgt

SEQ ID NO: 837214 - DNA, 75 bp, synthetic construct
  source 1..75: mol_type = other DNA
cgtgcagcgtgtcgaactggctgcaccgctggccgatatcgtgctcaacagtacgcaggcgtctttctgtaccga

SEQ ID NO: 837215 - DNA, 75 bp, synthetic construct
  source 1..75: mol_type = other DNA
ttcatccgaaagatgagcaggaagcagtgatccgcacgctggaactggaatctgaacccgtcaccaaattgttgc

SEQ ID NO: 837216 - DNA, 75 bp, synthetic construct
  source 1..75: mol_type = other DNA
gacatcgtgctcaacagtacgcaggcgtctttctgcaccgaatacagcgtcgtgaccggaggctcggatgagtga

SEQ ID NO: 837217 - DNA, 75 bp, synthetic construct
  source 1..75: mol_type = other DNA
ggtcccgaaagcgaacccatccgcgctgctgccgtgaaaaaactggaagcgtacatcacggcacagcaccggctg

SEQ ID NO: 837218 - DNA, 75 bp, synthetic construct
  source 1..75: mol_type = other DNA
tttaataataaaagtcagtttttgtcaattgatagctcatttaattttggtgggtggcgcttacgtcaatctggt

SEQ ID NO: 837219 - DNA, 75 bp, synthetic construct
  source 1..75: mol_type = other DNA
tgtgcagcgtgtcgaactggctgcaccgctggctgacatcgtgctcaacagtacgcaggcgtctttctgtactga

SEQ ID NO: 837220 - DNA, 75 bp, synthetic construct
  source 1..75: mol_type = other DNA
gccgacgggcgggtcgctgacgtttcggtcgcaagcccgtcgccagcctgcgtgacgattacagtgttatcccgg

SEQ ID NO: 837221 - DNA, 75 bp, synthetic construct
  source 1..75: mol_type = other DNA
cattgcccggacgctcgcgcttgagtcagagccgattgttaagctgctgcaggaaaacgcctaccgtgaagttat

SEQ ID NO: 837222 - DNA, 75 bp, synthetic construct
  source 1..75: mol_type = other DNA
cattgcccggacactggcacttgagtcggagccgattgttaaactgctgcaggaaaacgcctaccgtgaagttat

SEQ ID NO: 837223 - DNA, 75 bp, synthetic construct
  source 1..75: mol_type = other DNA
cgaccattccgccgacaccggcagtgatggagtctgacaccgattatcgtctgcgtattcagcaggcgtttgagg

SEQ ID NO: 837224 - DNA, 75 bp, synthetic construct
  source 1..75: mol_type = other DNA
gatggaaagcgatgaagcgttacgcctgcgtgtgcctgcggcttttgaagggctttcggttgcggggccaaccgc

SEQ ID NO: 837225 - DNA, 75 bp, synthetic construct
  source 1..75: mol_type = other DNA
caggcgagtatttacagcttgaaaaaacagcaacggctggcgcttcctgctcccctaacgggcttgtaggccgcg

SEQ ID NO: 837226 - DNA, 75 bp, synthetic construct
  source 1..75: mol_type = other DNA
ggccccgaatctgaacccatcaggcaggcgtcagagcagaagttgcagagctacatcagcgcgcagcaccgcctc

SEQ ID NO: 837227 - DNA, 75 bp, synthetic construct
  source 1..75: mol_type = other DNA
atccccgtgaggtggtgaagtcagcgcttcgcttcaatgccgcagctgtcgtgctggcacataaccatccctccg

SEQ ID NO: 837228 - DNA, 75 bp, synthetic construct
  source 1..75: mol_type = other DNA
catcgcagcctgaactcttcccggtgtcggtcatggctcagcatggttgcatgcttcctgcgacttccggattga

SEQ ID NO: 837229 - DNA, 75 bp, synthetic construct
  source 1..75: mol_type = other DNA
tctacctcgataatcagcatcgtttactggagagtgaaacgctgttcgccggttcggtaaaccatgtgcaggttc

SEQ ID NO: 837230 - DNA, 75 bp, synthetic construct
  source 1..75: mol_type = other DNA
aggcggcctatcactctatactggcccggtgatcaccagctaccgctatacccagtatgactccagcgatgcagg

SEQ ID NO: 837231 - DNA, 75 bp, synthetic construct
  source 1..75: mol_type = other DNA
aggcggcatatcactctatactggcccggtgatcaccagataccgctatacccactatgactccagcgatgcagg

SEQ ID NO: 837232 - DNA, 75 bp, synthetic construct
  source 1..75: mol_type = other DNA
ccagctatcgctatacccattatgactccagcgatgcaggtggtagttacagcaatatgatttccgtgcgtctga

SEQ ID NO: 837233 - DNA, 75 bp, synthetic construct
  source 1..75: mol_type = other DNA
gacaagtgggtcgctgaaaacattggtttgtcgcgctgtaaagacgaggctgaactcttcgagacgaagtggttt

SEQ ID NO: 837234 - DNA, 75 bp, synthetic construct
  source 1..75: mol_type = other DNA
gattgtggagattgcgcgtcagcataatctcattatcttcgccgatgaaatttacgacaaaattctctatgacga

SEQ ID NO: 837235 - DNA, 75 bp, synthetic construct
  source 1..75: mol_type = other DNA
tttacgacaaaatcctctatgacgacgctgagcatcactcgattgcgccgttagctcctgacctgctgactatta

SEQ ID NO: 837236 - DNA, 75 bp, synthetic construct
  source 1..75: mol_type = other DNA
ttgctctccgcgacctccggattaaccccctatgcccaacgcaccattcgtcgtgccatcaacctgctggataaa

SEQ ID NO: 837237 - DNA, 75 bp, synthetic construct
  source 1..75: mol_type = other DNA
ttgtcgactgccaataaaacgtcgctatggaaagcacgccagtttgcggatcgctattgctgctcatacgactac

SEQ ID NO: 837238 - DNA, 75 bp, synthetic construct
  source 1..75: mol_type = other DNA
gccatcccccgcagcaagcgcatacgcgcaattttctccgctatctggctaatggaaatcgttccagagcgcctt

SEQ ID NO: 837239 - DNA, 75 bp, synthetic construct
  source 1..75: mol_type = other DNA
tatttcctgcaaacgagcaacgcgtcattcatcgggcattacgcctgctggagaaatatcagcgtcaaccgagtg

SEQ ID NO: 837240 - DNA, 75 bp, synthetic construct
  source 1..75: mol_type = other DNA
atattgataaaaaaataaaggaaggaaaactaaagcaagaacaactaaagcaagaacaattgaatacggagagct

SEQ ID NO: 837241 - DNA, 75 bp, synthetic construct
  source 1..75: mol_type = other DNA
tttctgtcctgccagcaagtgcttcagataagtctttccacgtagccagttctgatccgtcaaaagcaacggtca

SEQ ID NO: 837242 - DNA, 75 bp, synthetic construct
  source 1..75: mol_type = other DNA
aagcaccgaaagacagcgatactgttgtagtgaactacaagggtacgctgatcgacggtaaagagttcgataact

SEQ ID NO: 837243 - DNA, 75 bp, synthetic construct
  source 1..75: mol_type = other DNA
ctatgcgtatgtgaacgcggaaatccgcgagaaaggcgacacctacggcaatctggtaccattctccccgaaaca

SEQ ID NO: 837244 - DNA, 75 bp, synthetic construct
  source 1..75: mol_type = other DNA
cattgcccggacgctcacacttgagtcagagccgattgttaagctgctgcaggaaaacgcctaccgtgaagttat

SEQ ID NO: 837245 - DNA, 75 bp, synthetic construct
  source 1..75: mol_type = other DNA
ctatgcaagcaataaacgataggattaaaagcccattatggggatatatcattcttgcatgggtatggttcaatt

SEQ ID NO: 837246 - DNA, 75 bp, synthetic construct
  source 1..75: mol_type = other DNA
gcgaacccatcaggggaaaatgtgctgtggccggacgccaatggaaacgttacttgatggaaagcacatctgggc

SEQ ID NO: 837247 - DNA, 75 bp, synthetic construct
  source 1..75: mol_type = other DNA
taccgatgaggcaactgaacaggctgttgttgattacgccgtcgctttcccggcacacggtcagcaccgaaccag

SEQ ID NO: 837248 - DNA, 75 bp, synthetic construct
  source 1..75: mol_type = other DNA
tgggagtgactttagcacaccttggtgtattcactcattggtcctatgaggaggctcttcaaggtaagtcttggt

SEQ ID NO: 837249 - DNA, 75 bp, synthetic construct
  source 1..75: mol_type = other DNA
tgaagtcttctgctcaggcgaagatggaaaaagacgcggctgataacgaagcgaaaggtaaagagtaccgcgaga

SEQ ID NO: 837250 - DNA, 75 bp, synthetic construct
  source 1..75: mol_type = other DNA
caactttgcccaggcgactgtctcccccgacaggacacgcatcatttttaatgcttcgaataaaagcgcaacggt

SEQ ID NO: 837251 - DNA, 75 bp, synthetic construct
  source 1..75: mol_type = other DNA
aagccagcaatacggaagacaaacgtgaccttgaatcgcttcaaggctggctggaagagaacatcaattctcaac

SEQ ID NO: 837252 - DNA, 75 bp, synthetic construct
  source 1..75: mol_type = other DNA
gtttgaagcgagcaatactgacggcatcactgcggttaacggggctgttgattttctccgccagcttgagcagtt

SEQ ID NO: 837253 - DNA, 75 bp, synthetic construct
  source 1..75: mol_type = other DNA
gagaataacggcgcggcatccggggaactgctcgccgtggtgcgtaatgctctcaacgatgaggatgtgaggccg

SEQ ID NO: 837254 - DNA, 75 bp, synthetic construct
  source 1..75: mol_type = other DNA
tgcctatcagtatcatggtcgcagtgccgacgggcgtgtcgcagatatctctgtcaccagcccttctccggcctg

SEQ ID NO: 837255 - DNA, 75 bp, synthetic construct
  source 1..75: mol_type = other DNA
cacaaccaatttttcctgaacgctgaggggcaaaaagcgttgcaggatgtggttcctcttgtgctggaagcgtcc

SEQ ID NO: 837256 - DNA, 75 bp, synthetic construct
  source 1..75: mol_type = other DNA
ggcgcgcatgggtgacctgaaacgctttgatattgtggtgagtgattgttgcccggaagatgagtatgtgaagta

SEQ ID NO: 837257 - DNA, 75 bp, synthetic construct
  source 1..75: mol_type = other DNA
cgatcagaccctcttttttgactgtggcaccaccacgccgtggattattgaagcaattgataatgaaatcccttt

SEQ ID NO: 837258 - DNA, 75 bp, synthetic construct
  source 1..75: mol_type = other DNA
ggccggaaacaacaacaccgggcgacagattgtgacgccagccgatgacagcactatcccgccaacacccgccgt

SEQ ID NO: 837259 - DNA, 75 bp, synthetic construct
  source 1..75: mol_type = other DNA
actggactatgaaaacatccttgcggaacgcattgcgacgctgatttcgctctatcccgaagaccagcaggaggc

SEQ ID NO: 837260 - DNA, 75 bp, synthetic construct
  source 1..75: mol_type = other DNA
gattgatgccacgctgtatatctatccggggccggagtcggaacccatccgccaggcatctgagcagaagttaca

SEQ ID NO: 837261 - DNA, 75 bp, synthetic construct
  source 1..75: mol_type = other DNA
atgataaaacggacgttattagcggcggcaatatttagcacattgcccgcttatgccgggttaacttccattacc

SEQ ID NO: 837262 - DNA, 75 bp, synthetic construct
  source 1..75: mol_type = other DNA
gttgaaaacgcaacgctgctttttaatctttcccaggggcgtcgtgattatgaaactgaaaatttcaatgccact

SEQ ID NO: 837263 - DNA, 75 bp, synthetic construct
  source 1..75: mol_type = other DNA
cagcctgttgcggatattgtgctgagtgactaccaggcatcgcactgcaccgaatacaccataacggtgggtggt

SEQ ID NO: 837264 - DNA, 75 bp, synthetic construct
  source 1..75: mol_type = other DNA
cactcggcagcgaaggcatgttaatcactcgctacactgaagacgcaagttttcatgaagttgaaattaaagatt

SEQ ID NO: 837265 - DNA, 75 bp, synthetic construct
  source 1..75: mol_type = other DNA
atggagaaacaactttcaaatccctctgtactgagcgacgttgcacataacgccagcgttctctattcctacatt

SEQ ID NO: 837266 - DNA, 75 bp, synthetic construct
  source 1..75: mol_type = other DNA
aagaacttcagaacagaaagagaagatggaaagtatagctgcttatcttgctactcagaacccccaaattgacgc

SEQ ID NO: 837267 - DNA, 75 bp, synthetic construct
  source 1..75: mol_type = other DNA
atgtcgactcccgacaatcacggcaaaaaagtccctcaatttgccgcgttcaaaccgctaaccccggcacagaat

SEQ ID NO: 837268 - DNA, 75 bp, synthetic construct
  source 1..75: mol_type = other DNA
ggataaaaagaccgccaccgctgtgctgtcggctgaagatatcgccgccgcacgtctgttgggtaaaaccgaagc

SEQ ID NO: 837269 - DNA, 75 bp, synthetic construct
  source 1..75: mol_type = other DNA
aacaaacccatgaatgaaacgctgcgcaagctgcttgcgcgtcttggggtgacggtccccgaaaatgcagacatc

SEQ ID NO: 837270 - DNA, 75 bp, synthetic construct
  source 1..75: mol_type = other DNA
ctgattaaccatgcggccgttgagcgcatggtatccggggttgtggcactcaatcagccggtgaagattgactat

SEQ ID NO: 837271 - DNA, 75 bp, synthetic construct
  source 1..75: mol_type = other DNA
catttgctggtttgattaatgaactggaaagcgccgggcaaacggtagtgctggtagtgcgtaacgatgacgtgc

SEQ ID NO: 837272 - DNA, 75 bp, synthetic construct
  source 1..75: mol_type = other DNA
ccaccgaaaaactggtggtcgatgccgacaatgacatccgtgcccaggttgaatctgcggtgcaaaaagcgggct

SEQ ID NO: 837273 - DNA, 75 bp, synthetic construct
  source 1..75: mol_type = other DNA
cgtttgataaaaccggtacgctgaccgtcggtaaaccgcgcgttaccgcgattcatccggcaacgggtattagtg

SEQ ID NO: 837274 - DNA, 75 bp, synthetic construct
  source 1..75: mol_type = other DNA
ctgttaggaatgaccggactatggctggcggtgctggcagatacgggtgcgacggtgctggtaacggcgaatgcg

SEQ ID NO: 837275 - DNA, 75 bp, synthetic construct
  source 1..75: mol_type = other DNA
ttatcgtgatgatggcaatcagctggggtctggagcagtttaatcatccgttcggtcaactggcgtttatcgcga

SEQ ID NO: 837276 - DNA, 75 bp, synthetic construct
  source 1..75: mol_type = other DNA
cccgcggcgattacctccgggctggcggcagcagcgcgtcgtggggcgttgattaaaggcggagcggcgctggaa

SEQ ID NO: 837277 - DNA, 75 bp, synthetic construct
  source 1..75: mol_type = other DNA
aattaccgcctccggtggtggtggagccgctggactttgaaacgctgttcaatgagcgtaaagaggcgtttatcg

SEQ ID NO: 837278 - DNA, 75 bp, synthetic construct
  source 1..75: mol_type = other DNA
ggaggagccttctcaaaagtgtaaagtaaattacaaattgcaaaataaaacagcaaaattcaatgaattaacttt

SEQ ID NO: 837279 - DNA, 75 bp, synthetic construct
  source 1..75: mol_type = other DNA
ccgatgtaagtgaccctaactatcaagaaccatggtgtacagccatgtacatgtaccataatccaaacgctatac

SEQ ID NO: 837280 - DNA, 75 bp, synthetic construct
  source 1..75: mol_type = other DNA
attatgtttctgccgttttactcactactcaagcaaccatacctaagtttaaccggatgggaattcttgcaggtg

SEQ ID NO: 837281 - DNA, 75 bp, synthetic construct
  source 1..75: mol_type = other DNA
aggcatctcttaacctcagtcagataagcagtgatctgctgaataatcctgaaacaggattgcttaacctgaaag

SEQ ID NO: 837282 - DNA, 75 bp, synthetic construct
  source 1..75: mol_type = other DNA
tgaggagccttctcaaaagtgtaaagtaaattacaaattgaaaaataaaacagctaaattcaatgaattaacttt

SEQ ID NO: 837283 - DNA, 75 bp, synthetic construct
  source 1..75: mol_type = other DNA
aaattaaaattgattttaccgaacaagataatgagctaaccgccagactgacgcctcaacagttggaacgttggg

SEQ ID NO: 837284 - DNA, 75 bp, synthetic construct
  source 1..75: mol_type = other DNA
tcaccgcgacaattgcttattctcaggatcgtaaccaaaacaataacaactcgaatcaagctccgaacatgagca

SEQ ID NO: 837285 - DNA, 75 bp, synthetic construct
  source 1..75: mol_type = other DNA
tcttgggttttacgatgacccaaaggaagctcataaagtatatgcaaataaagcggatgaatgtttcggcgaatt

SEQ ID NO: 837286 - DNA, 75 bp, synthetic construct
  source 1..75: mol_type = other DNA
ccgctggccgacatcgtgctcaacaatacgcaggcgtctttctgtaccgaataccgcgtcgtgaccggaggctcg

SEQ ID NO: 837287 - DNA, 75 bp, synthetic construct
  source 1..75: mol_type = other DNA
agataaaaaattcagagcaataaacgtcttggcttcatttgattcaatggatgtcttgcttaataatttgaacga

SEQ ID NO: 837288 - DNA, 75 bp, synthetic construct
  source 1..75: mol_type = other DNA
cctgctgcactaccgccagccagccagcctctggccgtggctgtgggcgctgggtaccatgacggtcatctcgct

SEQ ID NO: 837289 - DNA, 75 bp, synthetic construct
  source 1..75: mol_type = other DNA
tggcggcgcagatagcggcagcgatactggtatgcagctggcatcggtgggtggtgcttccgtttcccgaaatga

SEQ ID NO: 837290 - DNA, 75 bp, synthetic construct
  source 1..75: mol_type = other DNA
caatggcatacgagatcgcaaaggactattacgctggtgtgatggcgaaaaaaggcgtggtatcaggcgaaattg

SEQ ID NO: 837291 - DNA, 75 bp, synthetic construct
  source 1..75: mol_type = other DNA
tcccaatgtctttctcggcggcggtacgcagacggtgctggagatcagcccggaaatccctgactggttgcgtca

SEQ ID NO: 837292 - DNA, 75 bp, synthetic construct
  source 1..75: mol_type = other DNA
gcagttgaactccccggcgaacgcagggtaacgctggaatacgacaccctgagtcgggtggtgaaagagacggat

SEQ ID NO: 837293 - DNA, 75 bp, synthetic construct
  source 1..75: mol_type = other DNA
actgagcagccaccgtcgcatcacgggcagcgtacagtcctggcagtatacgccgcgcgggctgctggcgctcca

SEQ ID NO: 837294 - DNA, 75 bp, synthetic construct
  source 1..75: mol_type = other DNA
atctgttcagatattatgcgccggagtgcgggcggttcgtaagccaggacccgatttcgatccggggagggctga

SEQ ID NO: 837295 - DNA, 75 bp, synthetic construct
  source 1..75: mol_type = other DNA
ttgatatacctatagttggacctaccggaacagcaactgtccgtacgggatggattatcaaagaaggtactgata

SEQ ID NO: 837296 - DNA, 75 bp, synthetic construct
  source 1..75: mol_type = other DNA
ctgacggcggtgacggacgcggaagggaaaacggtacacatcagctataaccgtctgggacagccggagacagtc

SEQ ID NO: 837297 - DNA, 75 bp, synthetic construct
  source 1..75: mol_type = other DNA
ggggagaacgaagccggacgacgtttgtgtgggaagggttccggctgttgcaggagacaacgtggcaggggaagc

SEQ ID NO: 837298 - DNA, 75 bp, synthetic construct
  source 1..75: mol_type = other DNA
ccgcctgcatgacgggcgctatgtgctgcattacaccgaccgcagctattacgtgtttgatgaatttgatgacta

SEQ ID NO: 837299 - DNA, 75 bp, synthetic construct
  source 1..75: mol_type = other DNA
gtatggtttgcaaagttacggcgatagtcagtacctggtgaaacttggtactggttatctgctaaaagatgatgg

SEQ ID NO: 837300 - DNA, 75 bp, synthetic construct
  source 1..75: mol_type = other DNA
cgggcgctcgatacattccacagtgggaaaaattctgaccggttctgataatgtcagcaccaacagtcgcccggc

SEQ ID NO: 837301 - DNA, 75 bp, synthetic construct
  source 1..75: mol_type = other DNA
ctccgaggaactggtcaaaacaaaatcgtgattatataactcaagtacatgatgttctggattattttggaatag

SEQ ID NO: 837302 - DNA, 75 bp, synthetic construct
  source 1..75: mol_type = other DNA
actgagcagccaccgtcgcatcacgggcagcgtacagtcctggcagtatacgccgcgcggcctgccggcagttca

SEQ ID NO: 837303 - DNA, 75 bp, synthetic construct
  source 1..75: mol_type = other DNA
tgagctcgcattgagcaaagggatggattgttctgtttctgatgttttaatttctgaaatactgcctcacacata

SEQ ID NO: 837304 - DNA, 75 bp, synthetic construct
  source 1..75: mol_type = other DNA
gttcagtacctgcaagagaggatggccgcaggcactgcgactggttatgtcccatcgcaggggaacccatacggc

SEQ ID NO: 837305 - DNA, 75 bp, synthetic construct
  source 1..75: mol_type = other DNA
atggctgacaatcaaaacccttatctcgctgctggcgctgatgctgcgccgcagcaatcgccgtacatggccgca

SEQ ID NO: 837306 - DNA, 75 bp, synthetic construct
  source 1..75: mol_type = other DNA
cctgttggcgctgacaatggcgcaccccgctttagctctgcgcctgctgatgctgatttcctccgtacccagccc

SEQ ID NO: 837307 - DNA, 75 bp, synthetic construct
  source 1..75: mol_type = other DNA
ggatatggccccggccatcgccagtatgatgaacaataccgcgttctggttgctcagcgctccgctggcaaacgc

SEQ ID NO: 837308 - DNA, 75 bp, synthetic construct
  source 1..75: mol_type = other DNA
cccttgaacggatggttatgtctggcgaccctgcacagatgcagcgggcggttcagtatctgcaagagcgtatgg

SEQ ID NO: 837309 - DNA, 75 bp, synthetic construct
  source 1..75: mol_type = other DNA
tgacgcgatgttgcagtacgctggcacgctcgacgccgggacgcaatcaacccttgaacggatggtcatgtctgg

SEQ ID NO: 837310 - DNA, 75 bp, synthetic construct
  source 1..75: mol_type = other DNA
atgctgcagcgtggtttccggcttgccgtgaacgtgacgccgaccctgctgcttgagcatgagttcactcagatg

SEQ ID NO: 837311 - DNA, 75 bp, synthetic construct
  source 1..75: mol_type = other DNA
cacaggacattctgagtgaaaagacatcccggcatatcgtggaaagtgttgtcgggctggcaggaaagctgggta

SEQ ID NO: 837312 - DNA, 75 bp, synthetic construct
  source 1..75: mol_type = other DNA
acacaaacgtgcgacttaacgtctcatgggattcatctcataacactgctcttggcgcaggttttgcgggtggat

SEQ ID NO: 837313 - DNA, 75 bp, synthetic construct
  source 1..75: mol_type = other DNA
cagcaatcagggtatggccccggccatcgccagtacgatgaacaataccgcgctctggttgcgcagcgctccgct

SEQ ID NO: 837314 - DNA, 75 bp, synthetic construct
  source 1..75: mol_type = other DNA
cgaaagctgacgctggtaaggaaggagtatccgaagctatttgtccactggtatttactacgtgcatcgaatgag

SEQ ID NO: 837315 - DNA, 75 bp, synthetic construct
  source 1..75: mol_type = other DNA
gaaagcatggtaactggctacatgtatatcactacagacgggcaactctacagtcacgaacttagtggattaacc

SEQ ID NO: 837316 - DNA, 75 bp, synthetic construct
  source 1..75: mol_type = other DNA
tgattatcgatggtaccgccaacgtgcgggaaattaacaaagcctttaactggcatctgccggaagatgatgccc

SEQ ID NO: 837317 - DNA, 75 bp, synthetic construct
  source 1..75: mol_type = other DNA
gaaatcaatcaacatcatcggcataaattcgcccatttcgatgagaatttcgttgaacgtctgctaaatcatccg

SEQ ID NO: 837318 - DNA, 75 bp, synthetic construct
  source 1..75: mol_type = other DNA
cggttgatgagcgatctcaaccgtaacctgttgctgctaaatcaactgtactggcaggccggacgtaaaagtgac

SEQ ID NO: 837319 - DNA, 75 bp, synthetic construct
  source 1..75: mol_type = other DNA
ggatttaccgatttgacggcgaatacgcgcttcctaagcgccggaatgggagaagattttcaggaagcgtaacgt

SEQ ID NO: 837320 - DNA, 75 bp, synthetic construct
  source 1..75: mol_type = other DNA
ccagaactgatccgcaccagcccgttgacccaacgtgaatggcaggtcctggggctgatttactccggttacagc

SEQ ID NO: 837321 - DNA, 75 bp, synthetic construct
  source 1..75: mol_type = other DNA
accgcgaagccagagtttgccaataaccacttcctgcaaggtcaatggcgcaacattgcccgtgcgcaaatcttg

SEQ ID NO: 837322 - DNA, 75 bp, synthetic construct
  source 1..75: mol_type = other DNA
ttccggttgggcgacggcactacagctaatcgccctctccgcccggcagaatacccactcagcccataagtcggc

SEQ ID NO: 837323 - DNA, 75 bp, synthetic construct
  source 1..75: mol_type = other DNA
agtggctctttaagcaaagaagaattacgcaccattgtgcacgaatcgcggtcacaaatttcccgtcgcaatcag

SEQ ID NO: 837324 - DNA, 75 bp, synthetic construct
  source 1..75: mol_type = other DNA
tcgcttatccgagtagtattctgttagcaccgctgcaaattttgatgatgccgctggtctggttgctgaacgcta

SEQ ID NO: 837325 - DNA, 75 bp, synthetic construct
  source 1..75: mol_type = other DNA
atggtggtcatttcagcctatttttccggttcagaaactggaatgatgacactcaaccgctatcgcctgagacac

SEQ ID NO: 837326 - DNA, 75 bp, synthetic construct
  source 1..75: mol_type = other DNA
gtgtgctgacttttgtcgtactggtttttgctgaagtattgccgaaaaccattgccgcgctgtacccggaaaaag

SEQ ID NO: 837327 - DNA, 75 bp, synthetic construct
  source 1..75: mol_type = other DNA
aatcgattctccgtcagctctcccactctcctcacgggcgcatagtgctgtaccgcgactcgctggacgacgcta

SEQ ID NO: 837328 - DNA, 75 bp, synthetic construct
  source 1..75: mol_type = other DNA
cgctgcaaattttgatgatgccgctggtctggttgctgaacgctatcacccgcatgttaatgcgcatgatgggca

SEQ ID NO: 837329 - DNA, 75 bp, synthetic construct
  source 1..75: mol_type = other DNA
aacgacgcaatcagtacatccaacagttacactgataacaaaatcagtgatacaaaaacagagctgaataccaat

SEQ ID NO: 837330 - DNA, 75 bp, synthetic construct
  source 1..75: mol_type = other DNA
ctggtgcagtaatgccgctggcgacctcactcagtggaaataactcagtggatgagaagacaggagtgattaaac

SEQ ID NO: 837331 - DNA, 75 bp, synthetic construct
  source 1..75: mol_type = other DNA
gctggtaactcgtgatactatttatgttgctggtgatatatttcaaagtatatttgatactaatatctctaatga

SEQ ID NO: 837332 - DNA, 75 bp, synthetic construct
  source 1..75: mol_type = other DNA
acgccagacggcaacgtgatgtataacggtaagcaatattccctgaatgccgcccagcgcgagcaggcgaaggat

SEQ ID NO: 837333 - DNA, 75 bp, synthetic construct
  source 1..75: mol_type = other DNA
gtgcgccccgatgaatttggtgaatttctggtggcgatttttgaccactggatcaaacgcgacgtcggcaagatt

SEQ ID NO: 837334 - DNA, 75 bp, synthetic construct
  source 1..75: mol_type = other DNA
gcagatgatcgaagcacaccagactgaactggcacagcgcgacgaacgctacgccgctctggagagcgagaacgc

SEQ ID NO: 837335 - DNA, 75 bp, synthetic construct
  source 1..75: mol_type = other DNA
cagcgtgacgaacgttatgcagcactggaaagtgaaaacgcatcactgaaatctcaattagtcgagatgaccgtg

SEQ ID NO: 837336 - DNA, 75 bp, synthetic construct
  source 1..75: mol_type = other DNA
attggatagcgccagccaagagcttgaaacctaccttgaagaaaactcgggtgaagacggtttactaaacgatgc

SEQ ID NO: 837337 - DNA, 75 bp, synthetic construct
  source 1..75: mol_type = other DNA
aggcagtggatcaggcatatgcccaatttcactcacttagcggcgggcaaaatgccgattacattccctttctgg

SEQ ID NO: 837338 - DNA, 75 bp, synthetic construct
  source 1..75: mol_type = other DNA
atgttagatgcaaacaaattacagcaggcagtggatcaggcttacacccaatttcactcacttaacggcggtcaa

SEQ ID NO: 837339 - DNA, 75 bp, synthetic construct
  source 1..75: mol_type = other DNA
ccggcatattgttcagcgggaagaaccggttgcaagtcctggccaaaacatcaggtggtgctggttttggtgctc

SEQ ID NO: 837340 - DNA, 75 bp, synthetic construct
  source 1..75: mol_type = other DNA
ttcatcacctccacctcccgtccctgtagagtgggataaagcctccgctccattaaatacccgtttaccgcaatg

SEQ ID NO: 837341 - DNA, 75 bp, synthetic construct
  source 1..75: mol_type = other DNA
ttttagctctggctatttcgccggttgcagttaatgcgcaactggtagttaacgatcctgcaaatctggcccagg

SEQ ID NO: 837342 - DNA, 75 bp, synthetic construct
  source 1..75: mol_type = other DNA
gcgttatttccgccatctaccgccatatcttaaagcaatggctgatttgctggcgcacggtcgcccggccagtga

SEQ ID NO: 837343 - DNA, 75 bp, synthetic construct
  source 1..75: mol_type = other DNA
aaatatactcagtcaattaatggcatcgaaaataatgagcctggtaatcagcttcagcatctgcaaagtttgttt

SEQ ID NO: 837344 - DNA, 75 bp, synthetic construct
  source 1..75: mol_type = other DNA
ccattatggggatggcattccgataaaaagaatgaaaggaaatggcatgccgcactaccgatgttggttgcaggt

SEQ ID NO: 837345 - DNA, 75 bp, synthetic construct
  source 1..75: mol_type = other DNA
ggtcaccatgtttgaaaaatggcgactggcgcaatgttataaaaaccttgaacttcttaccgccagcattgacca

SEQ ID NO: 837346 - DNA, 75 bp, synthetic construct
  source 1..75: mol_type = other DNA
taacacttacatctgtagaaccctataaggtacctgtcactgttatcgtcacagttacctttgcctttgtctgct

SEQ ID NO: 837347 - DNA, 75 bp, synthetic construct
  source 1..75: mol_type = other DNA
ctcggagcaacaactggtcgatattccgctgaacaccgaatttttcaaacacctgcccggtattctgaccggtat

SEQ ID NO: 837348 - DNA, 75 bp, synthetic construct
  source 1..75: mol_type = other DNA
tcaccagccttcaagcctctgtggcgaaaattggcgcagaaggtgaaggggccggtgaacgtatagctcgccaac

SEQ ID NO: 837349 - DNA, 75 bp, synthetic construct
  source 1..75: mol_type = other DNA
aaaaggaaggtggttctcctgccagctggacaagatactcaaagacaaaactaacgaaatcagaatgcgaaaaaa

SEQ ID NO: 837350 - DNA, 75 bp, synthetic construct
  source 1..75: mol_type = other DNA
acagcaggcatttggtgaagataaattcaagcagttaccggcacagtgtcgcagttgcaacgtgttaaaagcgtg

SEQ ID NO: 837351 - DNA, 75 bp, synthetic construct
  source 1..75: mol_type = other DNA
ttaacgaaatcagaatgcgaaaaaatgctctcagggaaaaaagaagcaggcgtttccagagagcagaaagtaaaa

SEQ ID NO: 837352 - DNA, 75 bp, synthetic construct
  source 1..75: mol_type = other DNA
gtacagatgatcgccattggcggcgcgattggcaccggcttgtttttaggtgcaggagcccgactgcaaatggcg

SEQ ID NO: 837353 - DNA, 75 bp, synthetic construct
  source 1..75: mol_type = other DNA
aaagagaataaaaattgcaatatgtggtggacccatacaattaatttaaattgtaataatttaatttcaggatgt

SEQ ID NO: 837354 - DNA, 75 bp, synthetic construct
  source 1..75: mol_type = other DNA
cgctggctgtgccgtcactcaacagtgatatcgtcaatcacttcttcagccgcgcagcccggttgttcccggtcg

SEQ ID NO: 837355 - DNA, 75 bp, synthetic construct
  source 1..75: mol_type = other DNA
ctgcccacacgatgttcaggatatgcagggttatcaccatcctctggcaacgaatcatcaaacacagtacggcac

SEQ ID NO: 837356 - DNA, 69 bp, synthetic construct
  source 1..69: mol_type = other DNA
atgcgtgattttcagaatgcctttgatgccgcccttgccggggtggacagtacgattgttgaagtgatg

SEQ ID NO: 837357 - DNA, 75 bp, synthetic construct
  source 1..75: mol_type = other DNA
tgtatgacatgcttggctggctggcgcaggaagaaggtattcgtcttgaaccttcagcactggcgggtatggccg

SEQ ID NO: 837358 - DNA, 75 bp, synthetic construct
  source 1..75: mol_type = other DNA
cctgaaaatggagagggcagaacaggccacaccagcacgcccgttaagcccacgacaaaaacaagcgagggcatc

SEQ ID NO: 837359 - DNA, 75 bp, synthetic construct
  source 1..75: mol_type = other DNA
agtggctgaataatcaacaggctagccaggtgattgaacaactgaaaaaatggctggcgcgtgtcgggaggagaa

SEQ ID NO: 837360 - DNA, 75 bp, synthetic construct
  source 1..75: mol_type = other DNA
gtcggcgttaaataagttcgtacaacgccagacaggcgtcgcccggctggagtggcttaacaatcagcaggccag

SEQ ID NO: 837361 - DNA, 75 bp, synthetic construct
  source 1..75: mol_type = other DNA
caaattcagcccgctggggaatgggtaaaccgttgtatcaggattttctcttccgtacaaaagcggcgctgtcga

SEQ ID NO: 837362 - DNA, 75 bp, synthetic construct
  source 1..75: mol_type = other DNA
tcggcaatggctactctcgatcacgtccgccactcgctggataagtccgccgtcaatcgcgctgttgatctcctc

SEQ ID NO: 837363 - DNA, 75 bp, synthetic construct
  source 1..75: mol_type = other DNA
actctgacgatatcgtgctgcaacgaatgagttgtatgaattgtagcgacggagacgtcgttgtgctgatttctc

SEQ ID NO: 837364 - DNA, 75 bp, synthetic construct
  source 1..75: mol_type = other DNA
tctttattgatgacgaaaattcccgcacgttgttccttgggtattccgtcgcaggccagcgtcttaaagcgcaat

SEQ ID NO: 837365 - DNA, 75 bp, synthetic construct
  source 1..75: mol_type = other DNA
atggatttaattgcccgcacgaaggcggcccttgaaaagaacccgaaaaacgtcctgctggccgtgtactggatg

SEQ ID NO: 837366 - DNA, 75 bp, synthetic construct
  source 1..75: mol_type = other DNA
gatggcaaacatttcttctatgtgaatccgctggaagtacatccaaaatcgctgaaattcaaccatatctacgat

SEQ ID NO: 837367 - DNA, 75 bp, synthetic construct
  source 1..75: mol_type = other DNA
taataaggcgaaagaggcagaactgctgcacgacagtaaagaggtgcttgagcatatcctttctgtcaaagaagc

SEQ ID NO: 837368 - DNA, 75 bp, synthetic construct
  source 1..75: mol_type = other DNA
gggcgtgtggttggcggtgttctggggggaatgattgcctccgctgtatcaggaaaaattgccggagtgctggtt

SEQ ID NO: 837369 - DNA, 75 bp, synthetic construct
  source 1..75: mol_type = other DNA
acgggccgcgaccaatatgttaatcaaaccactggtggtcagtatcatcaggcaacgccccgtcatggaatatga

SEQ ID NO: 837370 - DNA, 75 bp, synthetic construct
  source 1..75: mol_type = other DNA
aacatatcgcactggaggctcatacttttgactctgtaaaatttattctgaccaccgctctcgccgatggtctgc

SEQ ID NO: 837371 - DNA, 75 bp, synthetic construct
  source 1..75: mol_type = other DNA
atcaaaatgttgcggggacggatctccggtgcgcagttcatcaggaatcttgccgtggcatcttccggtgtggca

SEQ ID NO: 837372 - DNA, 75 bp, synthetic construct
  source 1..75: mol_type = other DNA
ccccgtcatggaatatgatgcatcccatctcggcaatatggttaaccgactggaagaagcattacccccggagtt

SEQ ID NO: 837373 - DNA, 75 bp, synthetic construct
  source 1..75: mol_type = other DNA
catggcttgccggcagtttcctgctgaccggacatgagattgaaaatctgaacgcgaatctggcccgtgttatcg

SEQ ID NO: 837374 - DNA, 75 bp, synthetic construct
  source 1..75: mol_type = other DNA
cagttcatcaggaatcttgccgtggcatcttccggtgtggcaggtggtgctgtcgggtcagtggcgggcgggata

SEQ ID NO: 837375 - DNA, 75 bp, synthetic construct
  source 1..75: mol_type = other DNA
cagtaacgttaagctcgacaggtaacgctgcctcggagttcagcacctatgaaagcggttatcactggattaagg

SEQ ID NO: 837376 - DNA, 75 bp, synthetic construct
  source 1..75: mol_type = other DNA
cgctgcctcggagttcagcacctatgaaagcggttatcactggattaaggccaaaataacaaatagtaaaaaaac

SEQ ID NO: 837377 - DNA, 75 bp, synthetic construct
  source 1..75: mol_type = other DNA
gggatattgatgattatctggaaagacccgcaaatggctgggatttttctgctgaaggatggctacctgcttatc

SEQ ID NO: 837378 - DNA, 75 bp, synthetic construct
  source 1..75: mol_type = other DNA
cggagacctgagggaatttgaactggcagacggaaactggctactggacaatgcctggtatgaaagaaacatggc

SEQ ID NO: 837379 - DNA, 75 bp, synthetic construct
  source 1..75: mol_type = other DNA
aggagaactgagggaatttgaactggcagacggaaactggctactggacaatgcctggtatgaaagaaacatggc

SEQ ID NO: 837380 - DNA, 75 bp, synthetic construct
  source 1..75: mol_type = other DNA
tgaactggcgcaactggcgcgggaaaacgacgcaatggtgattgccctcacctctgctggtacaccactcgcccg

SEQ ID NO: 837381 - DNA, 75 bp, synthetic construct
  source 1..75: mol_type = other DNA
cctcaaatcgataaactagatgagatggaatcattactttctagtgaggaaatagattttactgaggtgtcggat

SEQ ID NO: 837382 - DNA, 75 bp, synthetic construct
  source 1..75: mol_type = other DNA
gcttaatgacactcgtttgctggctttgatgggtgagctggaagggcgtatctccggcagcattcattacgacaa

SEQ ID NO: 837383 - DNA, 75 bp, synthetic construct
  source 1..75: mol_type = other DNA
cgctttgccgataagctgccgtcagaaccacgggaaaatatcgtttatcagtgctgggagcgtttttgccaggaa

SEQ ID NO: 837384 - DNA, 75 bp, synthetic construct
  source 1..75: mol_type = other DNA
ctctttacgggcaggcgttaggggatgcgatgggaatgccctccgagctttggccacgctcccgcgtcaaagcgc

SEQ ID NO: 837385 - DNA, 75 bp, synthetic construct
  source 1..75: mol_type = other DNA
ggaagtccgcgcgttacgccacagacccaaacttacggagatcagtttttccctgcgtcgtggcgaagtgcttgg

SEQ ID NO: 837386 - DNA, 75 bp, synthetic construct
  source 1..75: mol_type = other DNA
gccagaaaaccgcaaagaagcggggatcattccctggctgggcgttgacgaaaatacagtgctgaccaatcggca

SEQ ID NO: 837387 - DNA, 75 bp, synthetic construct
  source 1..75: mol_type = other DNA
gcagttttttgattgccgcctgtcatcgccgattgaagccgcagaaagcagtcggatttgcgatgacgtttccgg

SEQ ID NO: 837388 - DNA, 75 bp, synthetic construct
  source 1..75: mol_type = other DNA
cgcgcgcaactgttatgggcatgggcacggctggatgaagccgaagcctcggcgcgtagtggaattgaagtctta

SEQ ID NO: 837389 - DNA, 75 bp, synthetic construct
  source 1..75: mol_type = other DNA
cagaaactcggcgtggcccatcgccaggatgcggtacaacacgcccagcaattgctgaagatgatggggtacggc

SEQ ID NO: 837390 - DNA, 75 bp, synthetic construct
  source 1..75: mol_type = other DNA
tgtcgccgaactcgcttctgatttgctcttcagcctgctccagccacatctccagatcgtcagtatcgagggcat

SEQ ID NO: 837391 - DNA, 75 bp, synthetic construct
  source 1..75: mol_type = other DNA
tctcagtgagatattcgaacgatacctcatggatctttgtaaaaggtaccgcagttaaaggaaatggatggggcc

SEQ ID NO: 837392 - DNA, 75 bp, synthetic construct
  source 1..75: mol_type = other DNA
tttggctccacatttagttggggggatgattacatttaccaaagatcattaggcgctaacaaatctggcggctct

SEQ ID NO: 837393 - DNA, 75 bp, synthetic construct
  source 1..75: mol_type = other DNA
gcgtatccgggaattaaagtctcgacggcagaagcccgggctattttaccggcgcagtatcgccgccaggattgc

SEQ ID NO: 837394 - DNA, 75 bp, synthetic construct
  source 1..75: mol_type = other DNA
tgttgccgtcggtaaaacgctggtttcatctgcgatgatcgaccgtgtggtcaacgacttgggccgtaaactggt

SEQ ID NO: 837395 - DNA, 75 bp, synthetic construct
  source 1..75: mol_type = other DNA
ccaaagtggcgtgcgccagctgccattccctgcatcctcagcaagacacgatgcagacgttaagtgataaaggac

SEQ ID NO: 837396 - DNA, 75 bp, synthetic construct
  source 1..75: mol_type = other DNA
ttccctgcatccacagcaagatacgatgcagacgttaagtgacaaaggacggattaagatttgcgtcgattgcca

SEQ ID NO: 837397 - DNA, 75 bp, synthetic construct
  source 1..75: mol_type = other DNA
caacgtcaccaaagtggtggaagacagggccaacgcactgatggccgatggcctgaaaggcgtgaagcgtatctc

SEQ ID NO: 837398 - DNA, 75 bp, synthetic construct
  source 1..75: mol_type = other DNA
atactggaagcgtattggcgagtattacaacctcaacctgactatcgttaacgatcaggtcgatcaaaccttccg

SEQ ID NO: 837399 - DNA, 75 bp, synthetic construct
  source 1..75: mol_type = other DNA
gtgctggcagcgaacggcgttgatgtcattgtgcaggaaaacaatggcttcaccccgacgcctgccgtttccaat

SEQ ID NO: 837400 - DNA, 75 bp, synthetic construct
  source 1..75: mol_type = other DNA
gaagatggtggtatcaaatacaacccgccaaatggtggcccggctgataccaacgtcactaaagtggtggaagac

SEQ ID NO: 837401 - DNA, 75 bp, synthetic construct
  source 1..75: mol_type = other DNA
gccattctggttcacaataaaaaaggtggcccgctggcagacggtatcgtgattacaccgtcccataacccgccg

SEQ ID NO: 837402 - DNA, 75 bp, synthetic construct
  source 1..75: mol_type = other DNA
cgccaaatggtggcccggctgatactaacgtcaccaaagtggtggaagacagggccaacgcactgctggccgatg

SEQ ID NO: 837403 - DNA, 75 bp, synthetic construct
  source 1..75: mol_type = other DNA
agccatcaccgcaacaccgcgaaggggtgaaagatgtgatgcgctttaacgagccgatgtacaaggtcggagagc

SEQ ID NO: 837404 - DNA, 75 bp, synthetic construct
  source 1..75: mol_type = other DNA
tgttggcggcgaacctggcgcttcccgctcatcatctggtgacgttcacctggggcaatgtcagcgcggtagacg

SEQ ID NO: 837405 - DNA, 75 bp, synthetic construct
  source 1..75: mol_type = other DNA
cagaacggcacggagccagccatgatgcttgtcgttggggaacggatactccgctgtaccaggatttagtcagca

SEQ ID NO: 837406 - DNA, 75 bp, synthetic construct
  source 1..75: mol_type = other DNA
acagttatgcagtgctggggctgggcgatgtggcgatggcgcgaaaagattatcccgccgccgaacgttattatc

SEQ ID NO: 837407 - DNA, 75 bp, synthetic construct
  source 1..75: mol_type = other DNA
gccgagttcaaatgcgtataaatcgtcacggaccacaatgttgctttccacgccggatggtcgtcaggcactgca

SEQ ID NO: 837408 - DNA, 75 bp, synthetic construct
  source 1..75: mol_type = other DNA
aaccgtttcagtcaatgacctcgactcttttggtcagggtgtggcgcggcataacggaaaaacgttatttatccc

SEQ ID NO: 837409 - DNA, 75 bp, synthetic construct
  source 1..75: mol_type = other DNA
ggcagataaacatggagtaaaactggaatttatccagccggacaggccggcgcagaacgctttcattgagcgctt

SEQ ID NO: 837410 - DNA, 75 bp, synthetic construct
  source 1..75: mol_type = other DNA
ctcgctctctgccagtcagcggcgtagcattgatgatatcgaacgcagcctgcaaaatgaccgtctggcacagca

SEQ ID NO: 837411 - DNA, 75 bp, synthetic construct
  source 1..75: mol_type = other DNA
cagcaggcgcgtaatgtcgataacaccgacagctatgcagtgctggggctgggcgatgtggcgatggcgcgataa

SEQ ID NO: 837412 - DNA, 75 bp, synthetic construct
  source 1..75: mol_type = other DNA
gttttcactggcgggtgatgagtcatctggggacaggatttcttaacatgctgagcagtgcggaagtgctgcgtg

SEQ ID NO: 837413 - DNA, 75 bp, synthetic construct
  source 1..75: mol_type = other DNA
ctggtctcaggtcgatttgcatcgtctgagcctgtatctggcagcagaagccccggtcagcagcacccttcatct

SEQ ID NO: 837414 - DNA, 75 bp, synthetic construct
  source 1..75: mol_type = other DNA
cctgtttggcgaaatgctcaaccgtttcctggccctgtacgccgatatgaatcagttcaatcagctcacactgat

SEQ ID NO: 837415 - DNA, 75 bp, synthetic construct
  source 1..75: mol_type = other DNA
gacgcacgacgacgcgtcagatcataaccgtttcagtcaacgacctcgactcttttggtcagggcgtggcgcgac

SEQ ID NO: 837416 - DNA, 75 bp, synthetic construct
  source 1..75: mol_type = other DNA
ttggaaagtaccggggtaagcaggccgatcaggaacggcatcagaaagtcctgtactaccggcaggtaaagaaac

SEQ ID NO: 837417 - DNA, 75 bp, synthetic construct
  source 1..75: mol_type = other DNA
ctcagcaacagcgactggatgacgctaaaaaaacagatagaacaacatgagctgcgaattgtcagtcttgatgtg

SEQ ID NO: 837418 - DNA, 75 bp, synthetic construct
  source 1..75: mol_type = other DNA
cattgagcgttttaacaggatataccgtacagaaatactcgatttttatctgttcagaacgctgaatgaagtacg

SEQ ID NO: 837419 - DNA, 75 bp, synthetic construct
  source 1..75: mol_type = other DNA
atggaaaacgctaaaatgaattcgctcatcgcccagtatccgttggtaaaggatctggttgctcttaaagaaacc

SEQ ID NO: 837420 - DNA, 75 bp, synthetic construct
  source 1..75: mol_type = other DNA
atggaaaatgctaaaatgaactcgctcatcgcccagtatccgttggtcaaggatctggttgctcttcaagaaacc

SEQ ID NO: 837421 - DNA, 75 bp, synthetic construct
  source 1..75: mol_type = other DNA
caatagtgctcgacagcgtgaaacggtaactgccccgtcattaggcgcggtagaggaaatctctgctggtgtata

SEQ ID NO: 837422 - DNA, 75 bp, synthetic construct
  source 1..75: mol_type = other DNA
ctggtggtcggtgaaaccacctgcgacggcaaaaagaaaatgtatgaatacatggcggagtttaagcccgtgcat

SEQ ID NO: 837423 - DNA, 75 bp, synthetic construct
  source 1..75: mol_type = other DNA
catggcagaatttaagcccgttcatgtgatgcagttgccaaacagcgttaaggacgatgcctcgcgtgcattatg

SEQ ID NO: 837424 - DNA, 75 bp, synthetic construct
  source 1..75: mol_type = other DNA
gatgagctggaagtttcgcacgctgggtgaaggcatgaactgggtattcgtcagcaagctggcggtaaaaacgga

SEQ ID NO: 837425 - DNA, 75 bp, synthetic construct
  source 1..75: mol_type = other DNA
tatgccgcaagagatcccgatggctgccggggcggttgtagtctcgctctgttcaacctccgatgaaaccatcga

SEQ ID NO: 837426 - DNA, 75 bp, synthetic construct
  source 1..75: mol_type = other DNA
cctgtcatacctatgcggtggaatcactggcgattaaacgccacgtgcgccaacagcacaacattccttatatcg

SEQ ID NO: 837427 - DNA, 75 bp, synthetic construct
  source 1..75: mol_type = other DNA
cgatgccattgcgttaaaaaaccgtgaacgccgcgcactggccaatttctatcatctggggcagctaaatcctcc

SEQ ID NO: 837428 - DNA, 75 bp, synthetic construct
  source 1..75: mol_type = other DNA
ccacttatccaatagtattaagcctgaaagacagtaacggtaaggcattaaccggactggctgatgacattgaaa

SEQ ID NO: 837429 - DNA, 75 bp, synthetic construct
  source 1..75: mol_type = other DNA
gtgcatgccatgatttattcggaggacgctccatcattagaaaaaaactacatgatgtcttcgataaaaagagag

SEQ ID NO: 837430 - DNA, 75 bp, synthetic construct
  source 1..75: mol_type = other DNA
cagccagtgaaatcgccaggcgtattggtgtcagtcgtgcggtattgtataaatggaaagatgaaattatcggca

SEQ ID NO: 837431 - DNA, 75 bp, synthetic construct
  source 1..75: mol_type = other DNA
attatttatgttgtttttattttcatttgttcctgcgtattatttagtaaatagattcataaagggtgacttgaa

SEQ ID NO: 837432 - DNA, 75 bp, synthetic construct
  source 1..75: mol_type = other DNA
ttacggatttttgggaagatgaaaacgcttcagtcagtctttctggtatatggactcaggagggacagaataaac

SEQ ID NO: 837433 - DNA, 75 bp, synthetic construct
  source 1..75: mol_type = other DNA
tttcctccagaatcaagaagtcttcttgaatcaatgggtataaaaggaattctcgtccgttacaaactgagtgat

SEQ ID NO: 837434 - DNA, 75 bp, synthetic construct
  source 1..75: mol_type = other DNA
aagcgaagaataaaaatgtcatttaaatcagttatggtcatgacggtactatgctttattggatatagtgcatat

SEQ ID NO: 837435 - DNA, 75 bp, synthetic construct
  source 1..75: mol_type = other DNA
ccaatatatcagaaataaatgtatctgaatatgattcatcatatatattgtcatcattaaaatctaatattacga

SEQ ID NO: 837436 - DNA, 75 bp, synthetic construct
  source 1..75: mol_type = other DNA
accagcaagttcggcgcaggactggctttctgatttcaggctgctttatcgtatgttttcacttaaagtggataa

SEQ ID NO: 837437 - DNA, 75 bp, synthetic construct
  source 1..75: mol_type = other DNA
atacaggtttaataagtccgcttcaactgactaatattatacagaatcgttcatctgagcataaattttttaagt

SEQ ID NO: 837438 - DNA, 75 bp, synthetic construct
  source 1..75: mol_type = other DNA
agagatgagatacaaaagaatcatggaagtgaaaatattgatatgttcagaaaacttctgagcgattttattcag

SEQ ID NO: 837439 - DNA, 75 bp, synthetic construct
  source 1..75: mol_type = other DNA
aatcagttatagccatgactgcattgtgttttgttggatatagcggatattgttcatataatgtgtataacatca

SEQ ID NO: 837440 - DNA, 75 bp, synthetic construct
  source 1..75: mol_type = other DNA
taggcgtggtcccttggtttttactaacggggggggcagaaaaaaacacttctcttcttaaggatattaatctac

SEQ ID NO: 837441 - DNA, 75 bp, synthetic construct
  source 1..75: mol_type = other DNA
ccacctataaattcacaggtgaaacagcctggattgattttatcagcaagttttcggatggagagtatgagctaa

SEQ ID NO: 837442 - DNA, 75 bp, synthetic construct
  source 1..75: mol_type = other DNA
ttctctggttttttgtttctgttttctctttgtctattttatatgtgattggtgtgttaagaaactggacagata

SEQ ID NO: 837443 - DNA, 75 bp, synthetic construct
  source 1..75: mol_type = other DNA
agtgatccatcttattcatggtttacttctgaatatgttaatattccggccgtaaaagttacggatttttgggaa

SEQ ID NO: 837444 - DNA, 75 bp, synthetic construct
  source 1..75: mol_type = other DNA
ttgattcaatggggataaaaggtattctcgtccgttacaaactgagtgatacaggcgatataagtcaggcatata

SEQ ID NO: 837445 - DNA, 75 bp, synthetic construct
  source 1..75: mol_type = other DNA
aaccagatgtatctggaggcaggtaacctgaccgttgaacttctcgggcgcgggtttgcctggttggacactggt

SEQ ID NO: 837446 - DNA, 75 bp, synthetic construct
  source 1..75: mol_type = other DNA
ccttcttgtctggtgctgggcgataacatcttcttcggtcagggcttcagtccgaagctgcgtcatgttgcggcg

SEQ ID NO: 837447 - DNA, 75 bp, synthetic construct
  source 1..75: mol_type = other DNA
ggatgcgattctggatacgatactgggagagcagccaggcgaacagccagagccggaaccgcaaccggaagatat

SEQ ID NO: 837448 - DNA, 75 bp, synthetic construct
  source 1..75: mol_type = other DNA
gtgcctttctacgccgcgaatcaaccgctggccgatatcagcgagatgcgcgtggtgcagggaatggacgacggg

SEQ ID NO: 837449 - DNA, 75 bp, synthetic construct
  source 1..75: mol_type = other DNA
gtgcagggaatggacgccggactttatcaaaaactgaaaccgctggtctgtgcgctgccgatgacccgccagcaa

SEQ ID NO: 837450 - DNA, 75 bp, synthetic construct
  source 1..75: mol_type = other DNA
cgcacggaaggggcgacggtatttggctatcaggtaatggatccggaacgctttggcgtggtggagtttgacgac

SEQ ID NO: 837451 - DNA, 75 bp, synthetic construct
  source 1..75: mol_type = other DNA
actttctgaaacagaaagtgaagctgcgctacaggcgatggtgtgtctgctgcgcccggtacttcatcagcggga

SEQ ID NO: 837452 - DNA, 75 bp, synthetic construct
  source 1..75: mol_type = other DNA
actctgtaagtattgatattttgttccctgatttttctaccacctataaatttacaggtgaaacagcctggattg

SEQ ID NO: 837453 - DNA, 75 bp, synthetic construct
  source 1..75: mol_type = other DNA
gtcattcagatccgttatggttatgacggcgctgtgctttgttggatacagtgcatattgttcatatcatatata

SEQ ID NO: 837454 - DNA, 75 bp, synthetic construct
  source 1..75: mol_type = other DNA
cgatggtgatttacggtttatcgctggtgggattcggtctgttgatttcatcactctgttcaacacaacagcagg

SEQ ID NO: 837455 - DNA, 75 bp, synthetic construct
  source 1..75: mol_type = other DNA
ttcactttccgtcgcccgcgaacgtgaacaaggtacgctcgatcagctactggtttcgccgctcaccacctggca

SEQ ID NO: 837456 - DNA, 75 bp, synthetic construct
  source 1..75: mol_type = other DNA
atgcgattcgccatgccgcagatgatgaaaaactggcaggcatcggctttcattggggattttctgaccagagtc

SEQ ID NO: 837457 - DNA, 75 bp, synthetic construct
  source 1..75: mol_type = other DNA
ttctgggaaaaaatgaacaacggctgggatgaattcagcattccaaaagaggtcgctcgccagctgattgatatg

SEQ ID NO: 837458 - DNA, 75 bp, synthetic construct
  source 1..75: mol_type = other DNA
aggtgcaaggggaatacgtggagttgagcgacggcactttatcgtggttagggaacgccttgttctggatgcctc

SEQ ID NO: 837459 - DNA, 75 bp, synthetic construct
  source 1..75: mol_type = other DNA
atttcaacctgccgctgttggtgggtatgtcacgaaaatcgatgattggacaactgctgaacgtggggccgtccg

SEQ ID NO: 837460 - DNA, 75 bp, synthetic construct
  source 1..75: mol_type = other DNA
tgattacgatgaaaccgctgccgttccattgttctcactcgctgagagagaatccttttgttcctctgttttaaa

SEQ ID NO: 837461 - DNA, 75 bp, synthetic construct
  source 1..75: mol_type = other DNA
ttctgggaaaagatgaacaacggttgggatgaattcagcattccaaaagaggttgcacgtcagctaattgatata

SEQ ID NO: 837462 - DNA, 75 bp, synthetic construct
  source 1..75: mol_type = other DNA
gaaaacagaaacggtttcaaaaacgctggcggataattttcatattcctgccaccaacatgaatccggtgatctt

SEQ ID NO: 837463 - DNA, 75 bp, synthetic construct
  source 1..75: mol_type = other DNA
cggaaatactacagttgaaggattactaaccttcaaaggtggaatgaaaggatcttctgctggaggtgttgcagc

SEQ ID NO: 837464 - DNA, 75 bp, synthetic construct
  source 1..75: mol_type = other DNA
ctgccaataccgcccaggcggcaggaaatggtgcagctcgcgatcgctggctacaacaggcagaacaacgtggac

SEQ ID NO: 837465 - DNA, 75 bp, synthetic construct
  source 1..75: mol_type = other DNA
aactcccgtatttcactggaaatgatacagcagcgcagactgatttaacttctgtcggccgcgacattattggta

SEQ ID NO: 837466 - DNA, 75 bp, synthetic construct
  source 1..75: mol_type = other DNA
gccccgaagtatgacgatgtctttgcagaagtgaatcgctattttattgagcaaatagcacgttgcgagcaggcg

SEQ ID NO: 837467 - DNA, 75 bp, synthetic construct
  source 1..75: mol_type = other DNA
agcgtctgagcggtagtctggcttgtgcggtcattgccgcaatgcaaggcgcgcacatcattcgtgttcatgacg

SEQ ID NO: 837468 - DNA, 75 bp, synthetic construct
  source 1..75: mol_type = other DNA
acgagctagtgctgggagctgaaagaactggcaaaggatatctggagcagaccatggagcgaggaaagacgcaac

SEQ ID NO: 837469 - DNA, 75 bp, synthetic construct
  source 1..75: mol_type = other DNA
atgaccactttaaccgacaaagaactgattaaagaaatcaaagagcgcataggcagtctggacgtgcgagacaat

SEQ ID NO: 837470 - DNA, 75 bp, synthetic construct
  source 1..75: mol_type = other DNA
aaggcatctttatgatcgatgccagtaagggctttattaaagacggcaataaaaatcgcctacgtgcccaggaca

SEQ ID NO: 837471 - DNA, 75 bp, synthetic construct
  source 1..75: mol_type = other DNA
tcactgctcgctctgtgttaaataaaaccagattagataattttactcatgctgttctcagtaactgcactacag

SEQ ID NO: 837472 - DNA, 75 bp, synthetic construct
  source 1..75: mol_type = other DNA
cccggatccctatcgtaaaagtcaggatgcatttgaacatgtctacggaatgttggagcgcgccagtcaggaatg

SEQ ID NO: 837473 - DNA, 75 bp, synthetic construct
  source 1..75: mol_type = other DNA
gcgtatcgcgttggtttaccgggcaaaagcggtgtaggtggcggtattctggcggtcgtccctggcgtgatggga

SEQ ID NO: 837474 - DNA, 75 bp, synthetic construct
  source 1..75: mol_type = other DNA
cactctactaaatctctcacaaagcattgatggattggaggcgaaagttgttgcacaccttaagtcaatgggatt

SEQ ID NO: 837475 - DNA, 75 bp, synthetic construct
  source 1..75: mol_type = other DNA
gtttctacggataaagaagaaaaggcggtcctgaaatctgctcaggcattattcgatgctgaaaccaaagctaaa

SEQ ID NO: 837476 - DNA, 75 bp, synthetic construct
  source 1..75: mol_type = other DNA
gccacgcagtggatcaactggctgggccgctacgcacaagaagataaccgctggttctcgtgggtctctttcaat

SEQ ID NO: 837477 - DNA, 75 bp, synthetic construct
  source 1..75: mol_type = other DNA
gtggtgaaagagtgaaagatgaaaaaccacagttaagtttgttattgcaagtactgacagacgagaagcgtttta

SEQ ID NO: 837478 - DNA, 75 bp, synthetic construct
  source 1..75: mol_type = other DNA
gttctcgcttccggtgactccggatggttggataagctgtagtgagcgaatgccgaaagaaacgggtgacattat

SEQ ID NO: 837479 - DNA, 75 bp, synthetic construct
  source 1..75: mol_type = other DNA
atcatggcgtatctcttgaaggacatgccggacgtaagctcactgctgagatggcacgaaattacgatctgattc

SEQ ID NO: 837480 - DNA, 75 bp, synthetic construct
  source 1..75: mol_type = other DNA
gacacacaatttcttaagtgcccaataacattatgcgttccagaaaaaggggtttttgtcaagaacgcactgaac

SEQ ID NO: 837481 - DNA, 75 bp, synthetic construct
  source 1..75: mol_type = other DNA
ggtgggcagttactgacgatggggaagaaccggcatcgaaagtaactcactggatgccgctaccagaaccgccgc

SEQ ID NO: 837482 - DNA, 75 bp, synthetic construct
  source 1..75: mol_type = other DNA
tccgttttatttacgtagctattattcgcaattaaaacagcaggttgacaaaaaggttaccaaaaaagaatttgc

SEQ ID NO: 837483 - DNA, 75 bp, synthetic construct
  source 1..75: mol_type = other DNA
caaaagcagtgaaggattccatcttctcgatgcagaacctcagctctgttaccggtgcactgtcagctgcttttg

SEQ ID NO: 837484 - DNA, 75 bp, synthetic construct
  source 1..75: mol_type = other DNA
tgctaaacgggtgaaagccgtcgtacttgagactatcgctcaagaaaaacgccctggcggatcactcaacccaaa

SEQ ID NO: 837485 - DNA, 75 bp, synthetic construct
  source 1..75: mol_type = other DNA
caaaagcagtgaaggattccatcttctcgatgcagaacctcagctctgttaccggcgcgctgtctgccgcgtttg

SEQ ID NO: 837486 - DNA, 75 bp, synthetic construct
  source 1..75: mol_type = other DNA
tggcgtttgccgatgacgccgggaggacgcggagcattacgctcaacactgcccgcaaggtggtaacagcgcctt

SEQ ID NO: 837487 - DNA, 75 bp, synthetic construct
  source 1..75: mol_type = other DNA
ggccacggcgggcgcggtgctgaaaatggcgtgttctctggtctgcgcggcaatattttcctgctgggcgagatt

SEQ ID NO: 837488 - DNA, 75 bp, synthetic construct
  source 1..75: mol_type = other DNA
tccgcgatcagatggatgcggtgattggccgccagcagctgatcagcaagccggtgcgtgtgcgcaccagcggct

SEQ ID NO: 837489 - DNA, 75 bp, synthetic construct
  source 1..75: mol_type = other DNA
cacctggactgatttgtttagtggcttaactgatgtcctgactgatttcgttattaacgggaagatgagcttctc

SEQ ID NO: 837490 - DNA, 75 bp, synthetic construct
  source 1..75: mol_type = other DNA
ctccgcagcgaaacttcaaaggtcgttgacgagattaggaaaataccagaggcgatgacggcggccaaacgtgca

SEQ ID NO: 837491 - DNA, 75 bp, synthetic construct
  source 1..75: mol_type = other DNA
taaaggcgcttttgctggattaacggcgttcattgcagcaaatccaattggcgctgcgtttaccgtggcaaccgt

SEQ ID NO: 837492 - DNA, 75 bp, synthetic construct
  source 1..75: mol_type = other DNA
agaagatccaaaaaatcaatgatgacgattcactttctgatgacgaaaagaacaaactattggcaccgttacgtg

SEQ ID NO: 837493 - DNA, 75 bp, synthetic construct
  source 1..75: mol_type = other DNA
cagcgtgcggccaagaaggaacaggcagcgcaacagaaactggcagccggataccagaaggctctggacaaagcc

SEQ ID NO: 837494 - DNA, 75 bp, synthetic construct
  source 1..75: mol_type = other DNA
tccattgcctgatggtcgaacaatccctgtaacgctcagtaccgatggtatgagtggaggaggaaatgttctttc

SEQ ID NO: 837495 - DNA, 75 bp, synthetic construct
  source 1..75: mol_type = other DNA
aaacgttgctttcttaccgaatgccgcaggtgttgcagcgttttcggcaacgcgcaccaaaagtgcgtttatcgt

SEQ ID NO: 837496 - DNA, 75 bp, synthetic construct
  source 1..75: mol_type = other DNA
gccggagaaaattggcatgtggtttaaggcggagctggatcctaatattcagtttttcctctcctccatgctttg

SEQ ID NO: 837497 - DNA, 75 bp, synthetic construct
  source 1..75: mol_type = other DNA
ccctgccatatctgctcgacgggctggtgatcacgctgaaaatcaccgtcacggcagtcgtgattggtattttgt

SEQ ID NO: 837498 - DNA, 75 bp, synthetic construct
  source 1..75: mol_type = other DNA
gaagatcaccaggtaaagctgtcagcgcagaaactggaagaactgctcgcatcaatggttaaggatgaggttgat

SEQ ID NO: 837499 - DNA, 75 bp, synthetic construct
  source 1..75: mol_type = other DNA
attattcgcaattaaaacagcaggttgatgtcaaagtcaccaaaaaagagttcgcactctggctactggcattag

SEQ ID NO: 837500 - DNA, 75 bp, synthetic construct
  source 1..75: mol_type = other DNA
tcgtcagcgagcggtcgtcagacgcattcagcggcttgcgtatgtggacccggtggttcatctgccaaatgttcg

SEQ ID NO: 837501 - DNA, 75 bp, synthetic construct
  source 1..75: mol_type = other DNA
aaatatgcagagctgggtttttacgaaacgctatcattaacggctaattttattatcattatcattctctgttgg

SEQ ID NO: 837502 - DNA, 75 bp, synthetic construct
  source 1..75: mol_type = other DNA
ggaagatgaacaacgtctcttttccgccgcgatgctacgccgggccgtgattgtcgcggcggtgtgtctgtccgt

SEQ ID NO: 837503 - DNA, 75 bp, synthetic construct
  source 1..75: mol_type = other DNA
atggaaaacgctaaaatgaactcgctcatcgcccagtatccgttggtcaaggatctggttgctctccaagaaacc

SEQ ID NO: 837504 - DNA, 75 bp, synthetic construct
  source 1..75: mol_type = other DNA
tggtcgcgcatcgggctttgtcgggcgggcaatggagcgtctgctggatggcttctatacccttagcgatcaaac

SEQ ID NO: 837505 - DNA, 75 bp, synthetic construct
  source 1..75: mol_type = other DNA
gcaaaatcagccactgcgcgaaccacaatagcccgggaagatgctgaagatcaccaggtaaagctgtcagcgcag

SEQ ID NO: 837506 - DNA, 75 bp, synthetic construct
  source 1..75: mol_type = other DNA
gcggtggtgcctgtgtctacggtggagcgacgcagcagcgtgccggaggtagcggaatggctggtattgcaatca

SEQ ID NO: 837507 - DNA, 75 bp, synthetic construct
  source 1..75: mol_type = other DNA
tttttctgctaatcgcaggtataacgcctgccgcgacgggggcttgcccggtgcagacacctgacggtgtcgcag

SEQ ID NO: 837508 - DNA, 75 bp, synthetic construct
  source 1..75: mol_type = other DNA
gcgctgatattgtgattgcggtcgatctgcagcacgatgctcatttaatgcaacaagatctcctttcatttaatg

SEQ ID NO: 837509 - DNA, 75 bp, synthetic construct
  source 1..75: mol_type = other DNA
acctctttcagttattgggatgttttacgcctgatggatctctcctggcagcgcggtgggttactgcgcggcgag

SEQ ID NO: 837510 - DNA, 75 bp, synthetic construct
  source 1..75: mol_type = other DNA
aaaaaggtgaatggcctgaagaaaaaggtgttgatatagacgaagtaattttcagggaatatttctatgacacac

SEQ ID NO: 837511 - DNA, 75 bp, synthetic construct
  source 1..75: mol_type = other DNA
gtgggtattgaaattgatatcgttgcaggatgttcaattggttcgctggtgggcgcggcctatgcatgcgatcga

SEQ ID NO: 837512 - DNA, 75 bp, synthetic construct
  source 1..75: mol_type = other DNA
ccatcttgcgattcgcgcatcatgcagtattcctggtctgatggctcctgtcgctcataacggctactggctggt

SEQ ID NO: 837513 - DNA, 75 bp, synthetic construct
  source 1..75: mol_type = other DNA
aattatggtttactgagggcgatctccatcttgcgattcgcgcatcatgcagtattcctggtctgatggctcctg

SEQ ID NO: 837514 - DNA, 75 bp, synthetic construct
  source 1..75: mol_type = other DNA
aatggcacaaaaagcaacggtgccggtaataactcattgggatcatggtcggagtatggagattattcataacgc

SEQ ID NO: 837515 - DNA, 75 bp, synthetic construct
  source 1..75: mol_type = other DNA
tggatgacagcgaagctggttgctgacgagcggacaaactcagttctcgtcagcggagagccaatctcccaacag

SEQ ID NO: 837516 - DNA, 75 bp, synthetic construct
  source 1..75: mol_type = other DNA
gtacaggtagagaactacatcaaaaaaataaataatgagctggaacaacaagtaactataaacgtagcggtatat

SEQ ID NO: 837517 - DNA, 75 bp, synthetic construct
  source 1..75: mol_type = other DNA
ggattatctggacgcactggagctagtcgatactaccggtgcgccagatattgaatggcctacacctccggcagt

SEQ ID NO: 837518 - DNA, 75 bp, synthetic construct
  source 1..75: mol_type = other DNA
cgatctctgtgaacagcgggaagaggggccagcctgcgttgaatcttgcccgacacaggcgctgcagttgcttac

SEQ ID NO: 837519 - DNA, 75 bp, synthetic construct
  source 1..75: mol_type = other DNA
ggactacgtagcgaaaaaagtctcggaggggcactcaaaaatggaagcactgcactgcctgaaatgttatatctc

SEQ ID NO: 837520 - DNA, 75 bp, synthetic construct
  source 1..75: mol_type = other DNA
attatggtttactgaaggcgatctccatcttgctattcgcgcatcatgcagtattccaggactaatggcacccgt

SEQ ID NO: 837521 - DNA, 75 bp, synthetic construct
  source 1..75: mol_type = other DNA
actataaaatcagaaagtaaagtgaatgatgttaaatccagcaatgtgatttatgaatgtattattcctgagaaa

SEQ ID NO: 837522 - DNA, 75 bp, synthetic construct
  source 1..75: mol_type = other DNA
tcttacctggtgaaaatcttagggagtcgcatcagggatacatcactgaatggtctgtcacagaaaatcttaaat

SEQ ID NO: 837523 - DNA, 75 bp, synthetic construct
  source 1..75: mol_type = other DNA
tattaacagggttttgtctgatgctggaatttactacttctttgttcataagaaagacaaacatattatgacatt

SEQ ID NO: 837524 - DNA, 75 bp, synthetic construct
  source 1..75: mol_type = other DNA
tttcggtagtcagtttattcctcgtattggcagtgaggttctggttagttttatacagggtaaccctgactatcc

SEQ ID NO: 837525 - DNA, 75 bp, synthetic construct
  source 1..75: mol_type = other DNA
gtctggatttgttacccgtagtgttaagaatggaaaaaagggagagggtcatcaacttgtttttgatgataaaga

SEQ ID NO: 837526 - DNA, 75 bp, synthetic construct
  source 1..75: mol_type = other DNA
cctcgtattggcagtgaggttctggttagttttatacagggtaatcctgactatccaattgttgttggaacagtg

SEQ ID NO: 837527 - DNA, 75 bp, synthetic construct
  source 1..75: mol_type = other DNA
ctttccaataattgatgaaaataataaagatgtacgctattcttttcgattcccatttttatctcactatatatc

SEQ ID NO: 837528 - DNA, 75 bp, synthetic construct
  source 1..75: mol_type = other DNA
ggcgtgtaaaaatcagatttttatggggagaaaagtcaacttcaggtacagaaaaaagctcttgttgggtccgcg

SEQ ID NO: 837529 - DNA, 75 bp, synthetic construct
  source 1..75: mol_type = other DNA
ctatccaggtgctggagaaccgccttaaaggaaccgcatggcaggtgatgcccgatattctgattcaacctgttt

SEQ ID NO: 837530 - DNA, 75 bp, synthetic construct
  source 1..75: mol_type = other DNA
taaagaaggtgacctacataatgatgtacatggtaatattaatataaaagtttcgaacggagattataatcttaa

SEQ ID NO: 837531 - DNA, 75 bp, synthetic construct
  source 1..75: mol_type = other DNA
agtcaactcaatcaataaaaataaaagtgggtgtaaatgagataactatatccacatcaggggtaagtataaaag

SEQ ID NO: 837532 - DNA, 75 bp, synthetic construct
  source 1..75: mol_type = other DNA
cctatttcaaaaagaagcttttagccatggaacgagagttattcgatgagttatctgtagggatacaaactggcg

SEQ ID NO: 837533 - DNA, 75 bp, synthetic construct
  source 1..75: mol_type = other DNA
taaaaggtgctctgtcgagtggtggaagagttttgggttcgctatcaaatgaattcgcagtggctaattctccca

SEQ ID NO: 837534 - DNA, 75 bp, synthetic construct
  source 1..75: mol_type = other DNA
atatacagaagcaggccacgaagagtcaggagacaccccagaatccgatgctatcggcatgaaatcaagtgactc

SEQ ID NO: 837535 - DNA, 75 bp, synthetic construct
  source 1..75: mol_type = other DNA
cagaaagccgtcggagagcaaagacgagtccgaggaaacgccagaatcaggtgacgagccgtctcatggtgactc

SEQ ID NO: 837536 - DNA, 75 bp, synthetic construct
  source 1..75: mol_type = other DNA
aagttacgccacatggcataaaaattggcaatacaaccattgattatgttgaggccgtacagcaacttaatgatg

SEQ ID NO: 837537 - DNA, 75 bp, synthetic construct
  source 1..75: mol_type = other DNA
atgacgagagccacagaacgcgcttacagcgagctacaacaggcgtttgatttctataaccagcgcctttttgac

SEQ ID NO: 837538 - DNA, 75 bp, synthetic construct
  source 1..75: mol_type = other DNA
gccatcgccagccgcaaccgagttcagtttatacctggtcagaggcgtgggcggatacatggcgcgagcctgtat

SEQ ID NO: 837539 - DNA, 75 bp, synthetic construct
  source 1..75: mol_type = other DNA
aaagacagtgagtctggctttgttcctgcgccggatgaaatgactctggaggaggcgctaaaggcgctcgacgag

SEQ ID NO: 837540 - DNA, 75 bp, synthetic construct
  source 1..75: mol_type = other DNA
aaccggggcggtcagtggagttttcttgatccttcatggggggcccggatggtcagcttccaggaattgctcgcc

SEQ ID NO: 837541 - DNA, 75 bp, synthetic construct
  source 1..75: mol_type = other DNA
ctgtgaccctgtacctgggcgctgttgctgcaaccgtacgtgaaggccgttctcaggatctggcttctcaggcgg

SEQ ID NO: 837542 - DNA, 75 bp, synthetic construct
  source 1..75: mol_type = other DNA
cgctgatgcgcactcgtgagctggagaaactggaaaacagcctgggcggtattaaagacatgggcggtctgccgg

SEQ ID NO: 837543 - DNA, 75 bp, synthetic construct
  source 1..75: mol_type = other DNA
gtgacgacattcatcaacgaagaagaagacaagaacggcacaattgatatcctgaatgaacacggaacaactgaa

SEQ ID NO: 837544 - DNA, 75 bp, synthetic construct
  source 1..75: mol_type = other DNA
aaccgaggcggtcagtggagttttcttgatccttcatggggagctcggatgatcagctttcaggaattgctcgcc

SEQ ID NO: 837545 - DNA, 75 bp, synthetic construct
  source 1..75: mol_type = other DNA
gcgcagtgtggtctttatcgagcgactgttgacgcgcttatcgcccgatcacgacatgcaatacctatatcacga

SEQ ID NO: 837546 - DNA, 75 bp, synthetic construct
  source 1..75: mol_type = other DNA
agtcaaatatcagtgtcgggggtgcggtgctgccgtgtggggcaaagccggactgaatattgaatgcggcgattg

SEQ ID NO: 837547 - DNA, 75 bp, synthetic construct
  source 1..75: mol_type = other DNA
tcgctcgctcaaggcgcttggtaaagagctgggctgtccggtactggcgctttctcagctcaaccgtctggtgga

SEQ ID NO: 837548 - DNA, 75 bp, synthetic construct
  source 1..75: mol_type = other DNA
atggccgagctggccggagaggggctaccactcgatctcatcactattacggaacggctggagaacagaggcgaa

SEQ ID NO: 837549 - DNA, 75 bp, synthetic construct
  source 1..75: mol_type = other DNA
cacggcgttaccgccgtaaagtgggtacgccgggactgattattgtggattaccttcaactgatgcgcagtcctg

SEQ ID NO: 837550 - DNA, 75 bp, synthetic construct
  source 1..75: mol_type = other DNA
ggccacgtgcgcgcactcgcgcggtttttgtgccaagacctaaagcaggcaatttttcaacccctgctaagcctg

SEQ ID NO: 837551 - DNA, 75 bp, synthetic construct
  source 1..75: mol_type = other DNA
catggccgcctgcgccgcggccatagccgccaaacctgacgatcacgtctttgtgttcagtcttgaaatgccctc

SEQ ID NO: 837552 - DNA, 75 bp, synthetic construct
  source 1..75: mol_type = other DNA
acattcttgagtcggctgaaggtaagctgtttaacattgctgaacagggagccatgcagttcaacagtgagactg

SEQ ID NO: 837553 - DNA, 75 bp, synthetic construct
  source 1..75: mol_type = other DNA
tcatcgagcgaaaaatgggtcaggtctttaacggaacaagacgtaatctgatggcaactcagcgccttataatcg

SEQ ID NO: 837554 - DNA, 75 bp, synthetic construct
  source 1..75: mol_type = other DNA
taacgatgatggagagccaattctcgtaaacatcccatcaatcccggataacgcaacaccggcattgatgaatgc

SEQ ID NO: 837555 - DNA, 75 bp, synthetic construct
  source 1..75: mol_type = other DNA
gtcgattatctccagttgattcgttcaccggaccaggaaaaccgcactcaggagattgcggaaatatcccgcgct

SEQ ID NO: 837556 - DNA, 75 bp, synthetic construct
  source 1..75: mol_type = other DNA
tctgcggtcggtatggcgcttggtgacggaggaatgggctctctgggtgagcgcataataattgatgactgctgt

SEQ ID NO: 837557 - DNA, 75 bp, synthetic construct
  source 1..75: mol_type = other DNA
ccagtggcagtgacgaagatgatcctacggcgattaataaaacagtgcgcgtagtcacgaccgtaacctatgcgt

SEQ ID NO: 837558 - DNA, 75 bp, synthetic construct
  source 1..75: mol_type = other DNA
aagatgaagtcggaggcatgacagaagatgcgctatccgaaacgattaaaagcgagttaacagaaagctcgaaaa

SEQ ID NO: 837559 - DNA, 75 bp, synthetic construct
  source 1..75: mol_type = other DNA
cagcccatgagctttgttcagaatgagaaagtgaaagcattcctcgaagcatccggagcagaagggcttccgcta

SEQ ID NO: 837560 - DNA, 75 bp, synthetic construct
  source 1..75: mol_type = other DNA
cgtatcgctgcgccatgttatccgtttgatactgaacgttactggaaagagcgcgtctccccggcctgcgagcct

SEQ ID NO: 837561 - DNA, 75 bp, synthetic construct
  source 1..75: mol_type = other DNA
cgggcaaattcctcccttactgaattttcacacccccaacccggcgctgaaacttgaagagagcccctttaccat

SEQ ID NO: 837562 - DNA, 75 bp, synthetic construct
  source 1..75: mol_type = other DNA
aagctcgtcgcagggcgacgattaatttatcgctttgtttcccggaaaagagtgatacagaacgggaaataattg

SEQ ID NO: 837563 - DNA, 75 bp, synthetic construct
  source 1..75: mol_type = other DNA
cgcaccatgaaagctcagcagccgccgattcgtatcatcgcgcctggacgtgtttatcgtaacgactacgaccag

SEQ ID NO: 837564 - DNA, 75 bp, synthetic construct
  source 1..75: mol_type = other DNA
ggatattaccaccggcgcaattaacggcgcagatcccgccacgtttagcctgagcttcctcaactccatgcagca

SEQ ID NO: 837565 - DNA, 75 bp, synthetic construct
  source 1..75: mol_type = other DNA
gcctgatcgataaattgtcacgcccgttaaaacaggcgcagggcagcgtgaccggctttgcggaaaaatcaaacg

SEQ ID NO: 837566 - DNA, 75 bp, synthetic construct
  source 1..75: mol_type = other DNA
tccaggagaaactcgccacggtaattgcgcgtctggatattcgccgtgcacaggtgctggttgaggcaatcatcg

SEQ ID NO: 837567 - DNA, 75 bp, synthetic construct
  source 1..75: mol_type = other DNA
aatcgacgggaaatcaaaagcgctggttggctcggaagatttgccggtgctgaatgagaacacgttcaacagtca

SEQ ID NO: 837568 - DNA, 75 bp, synthetic construct
  source 1..75: mol_type = other DNA
cgcactggcgcactatgggtcaaacgatgtaccatcactcaacggcgtttgccgacacgctggatcgctgttttt

SEQ ID NO: 837569 - DNA, 75 bp, synthetic construct
  source 1..75: mol_type = other DNA
cgcgccgtattccccccgccggccgttttcttcgacatgtacatcaggcgcggaactcatcggggcgcgggaatg

SEQ ID NO: 837570 - DNA, 75 bp, synthetic construct
  source 1..75: mol_type = other DNA
tcaagctgcagggcaaatatggcaagagcctggaagggaacctgaaagcacaggcggagctggatgaagcctttg

SEQ ID NO: 837571 - DNA, 75 bp, synthetic construct
  source 1..75: mol_type = other DNA
tgatgaacatcagtcaggctatgattataccgcttttcccggtttatgatgaaaaaaaacatttacctgactatt

SEQ ID NO: 837572 - DNA, 75 bp, synthetic construct
  source 1..75: mol_type = other DNA
caagtgcggaagagatcgcagagcaactggataagccagttgatgacgtcagccgtatgcttcgtcttaacgagc

SEQ ID NO: 837573 - DNA, 75 bp, synthetic construct
  source 1..75: mol_type = other DNA
cgctggaagcgtctaacgtcgatctcagtaaagaactggtcaatatgatcgttgcccagcgtaactatcagtcta

SEQ ID NO: 837574 - DNA, 75 bp, synthetic construct
  source 1..75: mol_type = other DNA
agagcggagcgacgccatgcttcagggtaaaggagggggatatggctattgccgcaagttacaccatgcatctct

SEQ ID NO: 837575 - DNA, 75 bp, synthetic construct
  source 1..75: mol_type = other DNA
ggcgaagagaaaccagcctgtaagcagtgtccggtgcactgttaccagcctgcaaagcgtgaagagatgaaacag

SEQ ID NO: 837576 - DNA, 75 bp, synthetic construct
  source 1..75: mol_type = other DNA
taacatcatccttcacgagcatgatatgaatattcatcgcaaaggtgcaacaccggcacgcgcgggcgatctggc

SEQ ID NO: 837577 - DNA, 75 bp, synthetic construct
  source 1..75: mol_type = other DNA
gattttcatcccggcaatggcgtccccgttggcgcggtggtggcctcaacgccggatttagtcattcctgccgcc

SEQ ID NO: 837578 - DNA, 75 bp, synthetic construct
  source 1..75: mol_type = other DNA
aagcgcagattgctgagttgcaatctttcgttagccgctttagcgccaacgcctcgaaatctcgccaggcaactt

SEQ ID NO: 837579 - DNA, 75 bp, synthetic construct
  source 1..75: mol_type = other DNA
agccgtcagaacccgttcatccgttttgaacaggataagaaactgttccgtaacacgctggaagtggaaggtctg

SEQ ID NO: 837580 - DNA, 75 bp, synthetic construct
  source 1..75: mol_type = other DNA
atgacgagcaaagaacctttacccattaccagccgctgggcaacagtgtacccggctcataccgcaaccgcgccc

SEQ ID NO: 837581 - DNA, 75 bp, synthetic construct
  source 1..75: mol_type = other DNA
caacctggaacgctggatgagcgaaagccgcgacctttcaactcagggaaaacttcaccgcgcatccggcgtcgc

SEQ ID NO: 837582 - DNA, 75 bp, synthetic construct
  source 1..75: mol_type = other DNA
gtgcgctcagctaatgtaaaaacatcgccagggatgattgctgacagttctcgtccaggcgtaggtgatgagttg

SEQ ID NO: 837583 - DNA, 75 bp, synthetic construct
  source 1..75: mol_type = other DNA
agggcggctttttttgtgtctgaaatccagtatccgcaatgccttcctcactttttcactcaacctaattcaatc

SEQ ID NO: 837584 - DNA, 75 bp, synthetic construct
  source 1..75: mol_type = other DNA
gctgttttgtctgtggtgaagatatcgatttgaatcggcttatgtttgatcctaccgtgactcgctgcattaact

SEQ ID NO: 837585 - DNA, 75 bp, synthetic construct
  source 1..75: mol_type = other DNA
tccgtgtatctcaggtatggtccggagaggggttcggtagtcagtttattcctcgtattggcagtgaggttctgg

SEQ ID NO: 837586 - DNA, 75 bp, synthetic construct
  source 1..75: mol_type = other DNA
ggcgatatcattgcacagaaagatgtatggctgcagccaggtggttcagtggccgtggatatgcctctggatgat

SEQ ID NO: 837587 - DNA, 75 bp, synthetic construct
  source 1..75: mol_type = other DNA
accgcccggatcagaaggacaatcgctggcgcctggtactgacccgtgatgacctcaatccggataagccccgca

SEQ ID NO: 837588 - DNA, 75 bp, synthetic construct
  source 1..75: mol_type = other DNA
agccaacgccagttcaccgaccggcgcaccgaagctgaaaagcgtcatcatcaaaaatgttcccgatcctgcaac

SEQ ID NO: 837589 - DNA, 75 bp, synthetic construct
  source 1..75: mol_type = other DNA
aagtaaaaggtactatgttgacgcttcagggctcagcaatgacacagataaaaggtggaattgtgaatattggat

SEQ ID NO: 837590 - DNA, 75 bp, synthetic construct
  source 1..75: mol_type = other DNA
ggtaatattgatataaaggtttcagatggaaattatagtctcaaggttacaggtggaagtggtagtcttatcatc

SEQ ID NO: 837591 - DNA, 75 bp, synthetic construct
  source 1..75: mol_type = other DNA
atttgtcacccgtagtgttaagaatggtaaaaagggagaaggacataaactggtttttgatgataagaaaaacga

SEQ ID NO: 837592 - DNA, 75 bp, synthetic construct
  source 1..75: mol_type = other DNA
gaaggtcatcagctggtttttgatgacaaagaaaatgaggaaaaagccatattaacctcttctggtgattgtttc

SEQ ID NO: 837593 - DNA, 75 bp, synthetic construct
  source 1..75: mol_type = other DNA
tagtgttaaaaatggtaaaaagggagaaggtcatcagctggtttttgatgacaaagaaaatgaggaaaaagccat

SEQ ID NO: 837594 - DNA, 75 bp, synthetic construct
  source 1..75: mol_type = other DNA
gttctggtgagttttatacagggcaatcctgactatccagttattgtgggctccgtgtataatggtcagaataaa

SEQ ID NO: 837595 - DNA, 75 bp, synthetic construct
  source 1..75: mol_type = other DNA
gttaaacacggtcttgcagcaaatagaaaaagagcagaacaccattatcgcgaccgatcgccagctatatcagaa

SEQ ID NO: 837596 - DNA, 75 bp, synthetic construct
  source 1..75: mol_type = other DNA
aggtatcgctaaaaatgaaacagcggtgtatccggtaccagagttaaaacaatccgcaaaagctgaaggcgcact

SEQ ID NO: 837597 - DNA, 75 bp, synthetic construct
  source 1..75: mol_type = other DNA
gctggccggaaaaatggtgtacatgcgcaaaacctttggcacggaaatggccgctatcaaggatttgatggaagg

SEQ ID NO: 837598 - DNA, 75 bp, synthetic construct
  source 1..75: mol_type = other DNA
cagacgacgcgctgtatctctggctgggtgaccgccaggatagtgatcccgttttaaccctgatgatggatgaat

SEQ ID NO: 837599 - DNA, 75 bp, synthetic construct
  source 1..75: mol_type = other DNA
agttactccgcaggtcaatgaaggcgacgcggtgttgctcgaaatagagcaggaagtctccagcgttgactcttc

SEQ ID NO: 837600 - DNA, 75 bp, synthetic construct
  source 1..75: mol_type = other DNA
tttcactggccagtgaaaccacgcagccattaaccggaaatacactgtcaacgggtggtgatttaaaaggtgtgg

SEQ ID NO: 837601 - DNA, 75 bp, synthetic construct
  source 1..75: mol_type = other DNA
gggcagatggcctgaaacgtacccaggaaatggcacaaaaaatggtgaagccgtgggatcggtttgtccagatcc

SEQ ID NO: 837602 - DNA, 75 bp, synthetic construct
  source 1..75: mol_type = other DNA
tgacacaggttcagtcactgacagagcaactgaagcgtcagcaggagagtgctgacgccggcgccggaggacagg

SEQ ID NO: 837603 - DNA, 75 bp, synthetic construct
  source 1..75: mol_type = other DNA
gcggcgcggcataaacgctgcctgtggtcagtgtcccgcgtccggcgggcacgggacgggcgcttttaccgctcc

SEQ ID NO: 837604 - DNA, 75 bp, synthetic construct
  source 1..75: mol_type = other DNA
ttaacaccagtgctgccggtattcccctgtcggttgtggtgcggatttatcagcttaaagacaaccggaattttg

SEQ ID NO: 837605 - DNA, 75 bp, synthetic construct
  source 1..75: mol_type = other DNA
acatcctgctgcagcattaccagcgctggctggacgatttcacccgtctggctgtacgacatgggttgtgtcacc

SEQ ID NO: 837606 - DNA, 75 bp, synthetic construct
  source 1..75: mol_type = other DNA
tgacggcactgcttggccgtgtgcccatcaacggcactgtgaccgatccttatccgttcaaggtgcttattggta

SEQ ID NO: 837607 - DNA, 75 bp, synthetic construct
  source 1..75: mol_type = other DNA
gcgcaacgtcagcgtgagccgtttttcattaagcgtggaaggtgatgatcttttgttcaccctacaactggagac

SEQ ID NO: 837608 - DNA, 75 bp, synthetic construct
  source 1..75: mol_type = other DNA
ttcacgtttgaatggaaagggctgaagaaattatgcgtggcagtctcctttcggtccataatagcagaacaaaag

SEQ ID NO: 837609 - DNA, 75 bp, synthetic construct
  source 1..75: mol_type = other DNA
tttcagggatacggcacatcgctattgatattttgacgaatgataaggtattcaaggcagggttaagacgtaaga

SEQ ID NO: 837610 - DNA, 75 bp, synthetic construct
  source 1..75: mol_type = other DNA
gaaatccgttttcatattgtttgcgatgtccctgatgaacttattgatttcacgtttgaatggaaaaggctgaag

SEQ ID NO: 837611 - DNA, 75 bp, synthetic construct
  source 1..75: mol_type = other DNA
ggaatgaatcatctggaaagctttggctggctggccacattcagtggtgttaccacgacaaccgtaccggatgaa

SEQ ID NO: 837612 - DNA, 75 bp, synthetic construct
  source 1..75: mol_type = other DNA
gtgataccggacgttccgctatcgatcaggggcgtatcccgcaaatcatggataacctgctggctgaagggaaaa

SEQ ID NO: 837613 - DNA, 75 bp, synthetic construct
  source 1..75: mol_type = other DNA
gaagaaatccgtcttcatattgtttgcgatgtccctgatgaacttattgatttcacgtttgaatggaaaggtctg

SEQ ID NO: 837614 - DNA, 75 bp, synthetic construct
  source 1..75: mol_type = other DNA
ttgtcaccgcagaaaattttgatgaaaacgctgtgcgcggcgcgcacaggcagaaaaaatggcgaatgagcaaat

SEQ ID NO: 837615 - DNA, 75 bp, synthetic construct
  source 1..75: mol_type = other DNA
aagaacttacgcagcgcagtacgcagagccatatgttcgacggcataagtttaaccgaacatcagcgtcagcaga

SEQ ID NO: 837616 - DNA, 75 bp, synthetic construct
  source 1..75: mol_type = other DNA
acaaagcgataaatttttgggtgcgctggatgaaatcggcgtcaatgctgaaaaagtccagaaaagcatgtcagt

SEQ ID NO: 837617 - DNA, 75 bp, synthetic construct
  source 1..75: mol_type = other DNA
ttgtttgcgatgtccctgatgaacttattgatttcacgtttgaatggaaagggctgaagaaattatgcgtggcag

SEQ ID NO: 837618 - DNA, 75 bp, synthetic construct
  source 1..75: mol_type = other DNA
taatgccggaaacagagatcgaaaattgttcccgtcgcttcgcggctgttgccaccaatttaagtactgggcgtg

SEQ ID NO: 837619 - DNA, 75 bp, synthetic construct
  source 1..75: mol_type = other DNA
ggcgcggcaagaggttggtcgcatattggcgtaattaatgcgctaaaaaaagtgggtattgaaattgatatcgtt

SEQ ID NO: 837620 - DNA, 75 bp, synthetic construct
  source 1..75: mol_type = other DNA
attattcccgaagatttcgtgccgcatggaacattaacgccgggtctggcttccagcgctgaatatcgtagccgc

SEQ ID NO: 837621 - DNA, 75 bp, synthetic construct
  source 1..75: mol_type = other DNA
gacggcaatgatacctttaaattaggcacaattgccaaaaacctgaccattgatgccggtgccggtgatgatatt

SEQ ID NO: 837622 - DNA, 75 bp, synthetic construct
  source 1..75: mol_type = other DNA
gggaaatatttatctgaagaggggataactaatattgaaaaaatagatatgacgacagggaaggatctgatgcca

SEQ ID NO: 837623 - DNA, 75 bp, synthetic construct
  source 1..75: mol_type = other DNA
ggaatttatacacgtcaaccagagtgtatggaggtgaaggtaaagatgttattactgtcggcggcatgaatgaag

SEQ ID NO: 837624 - DNA, 75 bp, synthetic construct
  source 1..75: mol_type = other DNA
ggttgcaaccattacgggaacatctgataacgcaacagcggtaacggatactgtaaataatgcgggcgcttcagc

SEQ ID NO: 837625 - DNA, 75 bp, synthetic construct
  source 1..75: mol_type = other DNA
aaacatagacatgaaaatgatgagtctgatactacagccccatcgtcaccagaactgaaggcagaggatgacggt

SEQ ID NO: 837626 - DNA, 75 bp, synthetic construct
  source 1..75: mol_type = other DNA
cagatcccgggggataccgatggtgatggtgcaacagatgcaacaccggtagttgccattccggaagcggcagat

SEQ ID NO: 837627 - DNA, 75 bp, synthetic construct
  source 1..75: mol_type = other DNA
acgtctgccgctcaatcccaatatcgaggcaacatttgttggggtgagcaactatgtgcgtattctctccgatcc

SEQ ID NO: 837628 - DNA, 75 bp, synthetic construct
  source 1..75: mol_type = other DNA
gtggtggcgggcagcaccgtgctcgggctggcggtggcgatgtttttcaaccgcgagttccgcctgcgcaaaacc

SEQ ID NO: 837629 - DNA, 75 bp, synthetic construct
  source 1..75: mol_type = other DNA
agaagaggaaacgccgcagaattattttcagggatacggcacatcgctattaatattttaacgaatgataaggta

SEQ ID NO: 837630 - DNA, 75 bp, synthetic construct
  source 1..75: mol_type = other DNA
ggattctcaatgcttgatgaacatgctacgaatgcaattacctcttggctcagttctcacttaatcaatagttac

SEQ ID NO: 837631 - DNA, 75 bp, synthetic construct
  source 1..75: mol_type = other DNA
cgaaaccactggcacgtggagaataagctgcactggcgtctggacgtggtaatgaatgaagacgactgcagaata

SEQ ID NO: 837632 - DNA, 75 bp, synthetic construct
  source 1..75: mol_type = other DNA
atgaacaggcttttttcaggtcgttccgatatgccttttgcactgctgcttctcgcgcccagcttattactgctg

SEQ ID NO: 837633 - DNA, 75 bp, synthetic construct
  source 1..75: mol_type = other DNA
ggcgcggttaacgcattcagttcagcaggtgaaacccttcgcgatccgctgatggatatcatgcttaccgtcagt

SEQ ID NO: 837634 - DNA, 75 bp, synthetic construct
  source 1..75: mol_type = other DNA
cttctgcaaaccactgaagatgtgcggtttgaaccatgccccggactgagcgctgccggacgtggcgttgtatcg

SEQ ID NO: 837635 - DNA, 75 bp, synthetic construct
  source 1..75: mol_type = other DNA
tcagtagtcagggagacaacttcattcaggttgatttcgacacgccgtggtgtcagccggaaagcgacgttattg

SEQ ID NO: 837636 - DNA, 75 bp, synthetic construct
  source 1..75: mol_type = other DNA
gtggatttcgacacgccgtggtgtcagccggaaagcgacgttgttgcagcattaagccgccgtttcggctgcacg

SEQ ID NO: 837637 - DNA, 75 bp, synthetic construct
  source 1..75: mol_type = other DNA
gggagacaacttcattaaggtggatttcgacacgccgtggtgtcagccggaaagcgacgttattgcagaattaag

SEQ ID NO: 837638 - DNA, 75 bp, synthetic construct
  source 1..75: mol_type = other DNA
ctggatgttgaagtgaatggctttaacggtggtgttctgaacggtgttccttctgcgtatcactggtatacggaa

SEQ ID NO: 837639 - DNA, 75 bp, synthetic construct
  source 1..75: mol_type = other DNA
cggtttcaaccatgccacggactgatggctgccggacgtggcgttgtatcgcctgagaatatcgcgttcacccac

SEQ ID NO: 837640 - DNA, 75 bp, synthetic construct
  source 1..75: mol_type = other DNA
aaaacacccagccgatgttgtcgcacattaacgtcggcacgggcgttgactgcaccatccgtgaactggcgcaaa

SEQ ID NO: 837641 - DNA, 75 bp, synthetic construct
  source 1..75: mol_type = other DNA
gcgaatttctgcacgttgatgatatggcagcggcgagcattcatgtgatggagctggcgcacgaagtctggcagg

SEQ ID NO: 837642 - DNA, 75 bp, synthetic construct
  source 1..75: mol_type = other DNA
tgcctgatgctgcatgaactctggctgcagagcggtactggacagcgtcgctgggaagggttaccggatgatgtc

SEQ ID NO: 837643 - DNA, 75 bp, synthetic construct
  source 1..75: mol_type = other DNA
atgctgcatgaactctggctgcagagtggtactggccagcgtcgctgggaaggattaccggatgagatcagggaa

SEQ ID NO: 837644 - DNA, 75 bp, synthetic construct
  source 1..75: mol_type = other DNA
tggggggaactggaatggtcttccccgacagatgatgagctgccggaagtcaccgcgccggagtggatagtcgac

SEQ ID NO: 837645 - DNA, 75 bp, synthetic construct
  source 1..75: mol_type = other DNA
atgccaaactggtgcagtaaccgtatgtatttttctgccgatccggcacagatcgctgagattaaacgactggcc

SEQ ID NO: 837646 - DNA, 75 bp, synthetic construct
  source 1..75: mol_type = other DNA
gggtatccctgctcagtttctgcactgcgtgcagcatccacggcgttcagacccgcgagtgtggtcacacgtcac

SEQ ID NO: 837647 - DNA, 75 bp, synthetic construct
  source 1..75: mol_type = other DNA
aaaccatcgccaaagtggtgggttacaaaggtcgggtggtttttgatgccagcaaaccggatggtacgccgcgca

SEQ ID NO: 837648 - DNA, 75 bp, synthetic construct
  source 1..75: mol_type = other DNA
gtcagggagaaaacttcattcaggtggatttcgacacgccgtggtgtcagccggaaagcgacgttattgcagaat

SEQ ID NO: 837649 - DNA, 75 bp, synthetic construct
  source 1..75: mol_type = other DNA
ggccagcggtgcagtcacaccgttttatcgccgcgccacaaatgaaggtattcagctgtttctggccggaagtgc

SEQ ID NO: 837650 - DNA, 75 bp, synthetic construct
  source 1..75: mol_type = other DNA
gtgatggctgtctgaacggtgaatttgctgcgctgatcacaggccccgtgcataaaggcgtcattaacgacgcag

SEQ ID NO: 837651 - DNA, 75 bp, synthetic construct
  source 1..75: mol_type = other DNA
accgctgcgcgatatcgcagatgctatcacccctgcacttttgcacgaagtgattgctattttgcatcacgattt

SEQ ID NO: 837652 - DNA, 75 bp, synthetic construct
  source 1..75: mol_type = other DNA
ggcacagaatgcaccggacgtggtggtatggggcagcggtacaccgatgcgtgaattcctgcacgtcgatgatat

SEQ ID NO: 837653 - DNA, 75 bp, synthetic construct
  source 1..75: mol_type = other DNA
tgccggaaaaaaccatgccgtttgacctgctgacggttctgtccactcgcctggatgttgaagtgaatggcttta

SEQ ID NO: 837654 - DNA, 75 bp, synthetic construct
  source 1..75: mol_type = other DNA
atgccaaactggtgctcgaatcgtatgaatttttctggtgaaccggcacagatcgctgagattaaacgactggcc

SEQ ID NO: 837655 - DNA, 75 bp, synthetic construct
  source 1..75: mol_type = other DNA
gaaaacttcattcaggtggatttcgacacgccgtggtgtcagccggaaagcgacgttgttgcagaattaagccgc

SEQ ID NO: 837656 - DNA, 75 bp, synthetic construct
  source 1..75: mol_type = other DNA
gctactggatgaacaaaactgcctgatgctgcatgaactctggctgcagagcggtactgaacagcgtcgctggga

SEQ ID NO: 837657 - DNA, 75 bp, synthetic construct
  source 1..75: mol_type = other DNA
cgacagatgacgatgagctgccggaagtcaccggacctgcgtggatagtcgacaaggtggcgcattacggtggat

SEQ ID NO: 837658 - DNA, 75 bp, synthetic construct
  source 1..75: mol_type = other DNA
ggtatgacctgaatatcagcagtcagggggaaaacttcattcaggtggatttcgacacgccgtggtgtcagccgg

SEQ ID NO: 837659 - DNA, 75 bp, synthetic construct
  source 1..75: mol_type = other DNA
tggcgacatgcggctaacagccgggtaaatcgtcgtccgtccacgcagtttctgggaccggataacgacatgctg

SEQ ID NO: 837660 - DNA, 75 bp, synthetic construct
  source 1..75: mol_type = other DNA
tcaggaactgcagtatcaacgcagttggcgacatgcggcaaacagtcgggtaaaccgacgtccgtccacgcagtt

SEQ ID NO: 837661 - DNA, 75 bp, synthetic construct
  source 1..75: mol_type = other DNA
tcagtacgcaactgaataatctgcaggatacggcaacgtctgccttaagcgatatcggtaaaacggtgggagggc

SEQ ID NO: 837662 - DNA, 75 bp, synthetic construct
  source 1..75: mol_type = other DNA
agataacaggcggcaggctgtcgttgctggtactggagcagatggcagagcaggggaaagcatggcccctgattg

SEQ ID NO: 837663 - DNA, 75 bp, synthetic construct
  source 1..75: mol_type = other DNA
tccctgtccgatatgttcggtgatctcaattcgcagctgaataagctgcaggacacggcaacatctgcattaagc

SEQ ID NO: 837664 - DNA, 75 bp, synthetic construct
  source 1..75: mol_type = other DNA
acgctttctggtgttcttatgccagagataacgggcggcaggctgtcgttgctggctctggagcagatggcagaa

SEQ ID NO: 837665 - DNA, 75 bp, synthetic construct
  source 1..75: mol_type = other DNA
gcgcagcgagaaaaatcgagttcagtctgtccctgaaacgcgtcgacgagtcgctcgcggccatgtatggcgacc

SEQ ID NO: 837666 - DNA, 75 bp, synthetic construct
  source 1..75: mol_type = other DNA
gatggccatcgagctgatggccgacgaggggcgcgcatggccgctgattgacggaaccggcatgatccacgggat

SEQ ID NO: 837667 - DNA, 75 bp, synthetic construct
  source 1..75: mol_type = other DNA
tatttgaacggcgcaccctgccgcatcagtcaatgcagtattcgaaggactaccggtgggtgtcaaatgaccgta

SEQ ID NO: 837668 - DNA, 75 bp, synthetic construct
  source 1..75: mol_type = other DNA
tgggaaaaacgccccagatttacatcaaatactatgagtaatagtcagaagttggatttgcccctatatttccag

SEQ ID NO: 837669 - DNA, 75 bp, synthetic construct
  source 1..75: mol_type = other DNA
taaaccgtcgtccgtccacgcagtttctgggaccggaaaacgacatgctgacgctttccggtgttcttatgccgg

SEQ ID NO: 837670 - DNA, 75 bp, synthetic construct
  source 1..75: mol_type = other DNA
ttagtgcgcaactgaataatctgcaggacacggtaacgtctgccttaagtgatatcagtaaaacggtgggagggc

SEQ ID NO: 837671 - DNA, 75 bp, synthetic construct
  source 1..75: mol_type = other DNA
gcacagttgatttttcaccctcattgataaaaacgttgcttgctaaaatagaatcaaccagacaagaactaagaa

SEQ ID NO: 837672 - DNA, 75 bp, synthetic construct
  source 1..75: mol_type = other DNA
ggcacaggggactaatagtacccagatcgcaagcacggctttcgttatggccgcgattgccgcacttgtagattc

SEQ ID NO: 837673 - DNA, 75 bp, synthetic construct
  source 1..75: mol_type = other DNA
aggattgtggcgctgacatgactgaagatcctgatggtgattatgtcctgtttgatgacgtggttaagttgtttg

SEQ ID NO: 837674 - DNA, 75 bp, synthetic construct
  source 1..75: mol_type = other DNA
cggcagaacaacctatgctctatgctgaggatttttctcctaacacgcctcagggagcatgtccatcctgccatg

SEQ ID NO: 837675 - DNA, 75 bp, synthetic construct
  source 1..75: mol_type = other DNA
ctctgagctgcgaccagttcttcgtgaaccatcgctggctgggcggtatgctgactaactggaaaaccgttcgtc

SEQ ID NO: 837676 - DNA, 75 bp, synthetic construct
  source 1..75: mol_type = other DNA
tttgatgctattgctgatattcgtggtgtttattttttcgatgagtttgatgctatcggctcccaacgcagcctc

SEQ ID NO: 837677 - DNA, 75 bp, synthetic construct
  source 1..75: mol_type = other DNA
accaaccaggattttcccgtttttcatttgcagggccttcacgaggtgatggggttaattatgtaaccattcgtc

SEQ ID NO: 837678 - DNA, 75 bp, synthetic construct
  source 1..75: mol_type = other DNA
aagaaatcatatcccgcattgaaatgtatgggcatggtgcagggtataccgctgacgaggtttatgacctagctg

SEQ ID NO: 837679 - DNA, 75 bp, synthetic construct
  source 1..75: mol_type = other DNA
gtcaaagcgggggagcaaggtttgccggtcggtgagttgcaaaagcagcttgggatacccggctctacactcagt

SEQ ID NO: 837680 - DNA, 75 bp, synthetic construct
  source 1..75: mol_type = other DNA
taagtgtagcgagcttcattcgtaaagtagcaatgggttatcaggttgagtctattgtagatattgaacaggttg

SEQ ID NO: 837681 - DNA, 75 bp, synthetic construct
  source 1..75: mol_type = other DNA
gaaaaatcatatatcgccatgaaatgggactgaacagcgatgtcactgccgaagaggtttatgacctggctgtac

SEQ ID NO: 837682 - DNA, 75 bp, synthetic construct
  source 1..75: mol_type = other DNA
tttgatgacgtggttaagttgtttgagtttgatacaaccactcagaagttagaaggcccagcaaaggagacaacc

SEQ ID NO: 837683 - DNA, 75 bp, synthetic construct
  source 1..75: mol_type = other DNA
aggattgtggcgctgacatgactgaagattctgatggcgattatgtcctgtttgatgacgtggttaagttgtttg

SEQ ID NO: 837684 - DNA, 75 bp, synthetic construct
  source 1..75: mol_type = other DNA
cagggcaaagcctggcctctgattgaaggaagtggaaccatttacggtatgtttgtgattgaaagtctgagccag

SEQ ID NO: 837685 - DNA, 75 bp, synthetic construct
  source 1..75: mol_type = other DNA
gtggatgtcacctttgaagatgaaaagggtggtaaacacaccgtgacgctggagaacggcgataacggctggaca

SEQ ID NO: 837686 - DNA, 75 bp, synthetic construct
  source 1..75: mol_type = other DNA
gtggatgtcacctttgaagatgaaaagggtgctaagcacaccgtgacgctggagaacggagataacggctggaca

SEQ ID NO: 837687 - DNA, 75 bp, synthetic construct
  source 1..75: mol_type = other DNA
gtggatgtcacctttgaagatgaaaagggtgctaatcacaccgtgacgctggagaacggtgataacggctggaca

SEQ ID NO: 837688 - DNA, 75 bp, synthetic construct
  source 1..75: mol_type = other DNA
tgtggcgcgtattatccgtgccaaaaaacctgctatctttgttctggaaaacgtaaaaaacctgaagagccatga

SEQ ID NO: 837689 - DNA, 75 bp, synthetic construct
  source 1..75: mol_type = other DNA
agagaccattccgcccattaccccgatacccactgcgttctgcgcgccactgccggcaccgttactgatagctag

SEQ ID NO: 837690 - DNA, 75 bp, synthetic construct
  source 1..75: mol_type = other DNA
gtggatgtcacctttgaagatgaaaagggtggtaaccacaccgtgacgctggagaacggagataacggctggaca

SEQ ID NO: 837691 - DNA, 75 bp, synthetic construct
  source 1..75: mol_type = other DNA
gtggatgtcacctttgaagatgaaaagggtgataagcacaccgtgacgctggagaacggcgataacggctggaca

SEQ ID NO: 837692 - DNA, 75 bp, synthetic construct
  source 1..75: mol_type = other DNA
gtggatgtcacctttgaagatgaaaagggtgataaccacaccgtgacgctggagaacggggataacggctggaca

SEQ ID NO: 837693 - DNA, 75 bp, synthetic construct
  source 1..75: mol_type = other DNA
agcactgaaggcagaggatgacggttctgtttctgttgtcttgccgggtgatgccaataaaggtgataccgttga

SEQ ID NO: 837694 - DNA, 75 bp, synthetic construct
  source 1..75: mol_type = other DNA
gtggatgtcacctttgaagatgaaaagggtgctaaacacaccgtgacgctggagaacggggataacggctggaca

SEQ ID NO: 837695 - DNA, 75 bp, synthetic construct
  source 1..75: mol_type = other DNA
gtggatgtcacctttgaagatgaaaagggtgttaaccacaccgtgacgctggagaacggtgataacggctggaca

SEQ ID NO: 837696 - DNA, 75 bp, synthetic construct
  source 1..75: mol_type = other DNA
gtggatgtcacctttgaagatgaaaagggtgttaatcacaccgtgacgctggagaacggcgataacggctggaca

SEQ ID NO: 837697 - DNA, 75 bp, synthetic construct
  source 1..75: mol_type = other DNA
tatcgcacgaacgctgtctgctcgttaccataaagatggctctgaaatactgatcgatcgtggctgggataaggc

SEQ ID NO: 837698 - DNA, 75 bp, synthetic construct
  source 1..75: mol_type = other DNA
aagagctggtggaagaggcacgtaatgaagaggccagacaacagcaaagggacctgtccctgatagggaaagtcc

SEQ ID NO: 837699 - DNA, 75 bp, synthetic construct
  source 1..75: mol_type = other DNA
tatccggtgaaattctaggcggatacggtagtgataatattacggtaactaaaaatctgaccggtaatatttctg

SEQ ID NO: 837700 - DNA, 75 bp, synthetic construct
  source 1..75: mol_type = other DNA
aaggtggtaagcacaccgtgacgctggagaaaggggataacggctggacatccagtgatccgacgctgatcccgg

SEQ ID NO: 837701 - DNA, 75 bp, synthetic construct
  source 1..75: mol_type = other DNA
actgggctggtaccacgaaatctcgctggaggctggtcttgccagcacttaccagtggtttctggaaagccagca

SEQ ID NO: 837702 - DNA, 75 bp, synthetic construct
  source 1..75: mol_type = other DNA
tcgcttccacgaggcgacggcacagaatgcccggacgtggtggtgtggggcagcggtacaccgatgcgcgaattt

SEQ ID NO: 837703 - DNA, 75 bp, synthetic construct
  source 1..75: mol_type = other DNA
cctgtcgctcaaacgggtggatgaatccttgtccgatatgttcggtgatctcagtacgcaactgaataatctgca

SEQ ID NO: 837704 - DNA, 75 bp, synthetic construct
  source 1..75: mol_type = other DNA
atggcgagctggaaaatggcccccgcgctggcggcgggcaactgcgtggtgctgaaacctgcgcgacttactcct

SEQ ID NO: 837705 - DNA, 75 bp, synthetic construct
  source 1..75: mol_type = other DNA
aggctaactggtttaacgatgagctggaacataaatttaacctcgacattcgtgaagtcactctgagtgacagag

SEQ ID NO: 837706 - DNA, 75 bp, synthetic construct
  source 1..75: mol_type = other DNA
taactatgccaagaaacatgccgcgaaaggcaatggttttgggttcggactcgttgatcctacgaatgtgaatag

SEQ ID NO: 837707 - DNA, 75 bp, synthetic construct
  source 1..75: mol_type = other DNA
atacttatacgttatacagcagtgtaagtggcgcaaatgtgtatattgataacaatattattgatgcgaatggtg

SEQ ID NO: 837708 - DNA, 75 bp, synthetic construct
  source 1..75: mol_type = other DNA
ggtcagaacaatatgcgggtgttccaggaggagatttttggcccggtgctggcggtgaccaccttcaaaacgatg

SEQ ID NO: 837709 - DNA, 75 bp, synthetic construct
  source 1..75: mol_type = other DNA
atggcgagctggaaaatggctcccgcgctggcggcgggcaactgcgtggtgctaaaacccgcacgacttaccccg

SEQ ID NO: 837710 - DNA, 75 bp, synthetic construct
  source 1..75: mol_type = other DNA
cggcgtggaagcgcttagccccgacccggcgttcttcaccgagatctctttcgctgagaaagacgatgacctcgc

SEQ ID NO: 837711 - DNA, 75 bp, synthetic construct
  source 1..75: mol_type = other DNA
catgatgggggcggtaagtattgatctcggtctggacgactccgcgcttgatgcgagctttgtcatggggggagc

SEQ ID NO: 837712 - DNA, 75 bp, synthetic construct
  source 1..75: mol_type = other DNA
ggagattgacctgctgaacttcatctaccggaaggacggcaaggacattgtgcctgaccgtatccgttccgcgct

SEQ ID NO: 837713 - DNA, 75 bp, synthetic construct
  source 1..75: mol_type = other DNA
tttttacgctgtttgtggatggtgaaaacgaagtgggtaacgtgacctccgtcactcggcccaaactgacgcgca

SEQ ID NO: 837714 - DNA, 75 bp, synthetic construct
  source 1..75: mol_type = other DNA
tgagctattcgcaaaccgatagccaggcgttgacaaatcaattagcgcagggtttcagccgttctggaagcgagt

SEQ ID NO: 837715 - DNA, 75 bp, synthetic construct
  source 1..75: mol_type = other DNA
ggcactctcgatgctgacgaagcggcttccatgcttatgcctatggttggtaaggtcagggcggcaatgaagggg

SEQ ID NO: 837716 - DNA, 75 bp, synthetic construct
  source 1..75: mol_type = other DNA
ggaaatcgacctgctgaaccacatctaccggaaggacggcaaggacattgtgccagatcgcatccgttccgcgct

SEQ ID NO: 837717 - DNA, 75 bp, synthetic construct
  source 1..75: mol_type = other DNA
ggagttcgatttgctgaacttcatctaccgacaggacggggaaaatattgttcccgaccgcatccgttccgcgct

SEQ ID NO: 837718 - DNA, 75 bp, synthetic construct
  source 1..75: mol_type = other DNA
ctcgaccgtcctgatggacggcatccccgtccccttcgccccttacggtcagccgcagctttcactggctcccgt

SEQ ID NO: 837719 - DNA, 75 bp, synthetic construct
  source 1..75: mol_type = other DNA
aactccgccacttatggctttaaatccggcacggcctcttttgctgatatgtttgccggttctaaagtcggtctg

SEQ ID NO: 837720 - DNA, 75 bp, synthetic construct
  source 1..75: mol_type = other DNA
tttttacgatgtttgtggatggtgaaaacgaagtgggtaaagtgacctccgtcactccgcccaaactgacgcgca

SEQ ID NO: 837721 - DNA, 75 bp, synthetic construct
  source 1..75: mol_type = other DNA
attgaggtccgcgggcgcatcactgaaatcgatatgggggaggcgaagcagggtgaagacactgagcacagttat

SEQ ID NO: 837722 - DNA, 75 bp, synthetic construct
  source 1..75: mol_type = other DNA
gctggagattgatttactgaaccacatcgaacgcaaggacggcaaaaacgtcttcccggaccgcgtgcgctcggc

SEQ ID NO: 837723 - DNA, 75 bp, synthetic construct
  source 1..75: mol_type = other DNA
gcgcattttgactgggttcggcctggcattattttgtatggcgcttcgccgtccggtcgcgtaatcctacccagc

SEQ ID NO: 837724 - DNA, 75 bp, synthetic construct
  source 1..75: mol_type = other DNA
caggtgactcgcactctcggtcagttaacgataattagtgagcgttaccctgagttaaaatctcaggaactctat

SEQ ID NO: 837725 - DNA, 75 bp, synthetic construct
  source 1..75: mol_type = other DNA
gcgaggaagatatattaaagccattgaacaatataatgttactatccgcaaattccccgctgtattaaccgcaaa

SEQ ID NO: 837726 - DNA, 75 bp, synthetic construct
  source 1..75: mol_type = other DNA
cgctatcctgaatgaaaaggacgccgtgaaaaatattcccggtattaccataaaaagtgatattgaggatttttc

SEQ ID NO: 837727 - DNA, 75 bp, synthetic construct
  source 1..75: mol_type = other DNA
ctgccctcgaccgatattttcgatgcccaggatgaggaatatcgggagtcggtactgccttcaaatgtttctgcc

SEQ ID NO: 837728 - DNA, 75 bp, synthetic construct
  source 1..75: mol_type = other DNA
atgctgtttgtaagactttactttgcatataaaaacggaacggaaagtttcggcatgggagatgtgctacttatt

SEQ ID NO: 837729 - DNA, 75 bp, synthetic construct
  source 1..75: mol_type = other DNA
gaaatattactgtctgatactgacaacgcttgccgttctgtatctttcattaaatcagctatcactgattcaatc

SEQ ID NO: 837730 - DNA, 75 bp, synthetic construct
  source 1..75: mol_type = other DNA
cgatggttgctgtggggctgtgttataacaatctcgggcagcggtttatcagcgaacagcagcaaatccaggaaa

SEQ ID NO: 837731 - DNA, 75 bp, synthetic construct
  source 1..75: mol_type = other DNA
aataccggattacgcccggtcatgacgttaagcagtgagattattggtgttcagacgctaaaagcgggcgagcgt

SEQ ID NO: 837732 - DNA, 75 bp, synthetic construct
  source 1..75: mol_type = other DNA
tcgatctgcaggcattaaaacaaaatctgaccattgtccgccaggccgcgccgcatgcacgcgtctggtcggtgg

SEQ ID NO: 837733 - DNA, 75 bp, synthetic construct
  source 1..75: mol_type = other DNA
catgactgaagcagttaatacagactctatagccgttgcggaaatgcaacattttcatgctctccgctgcctact

SEQ ID NO: 837734 - DNA, 75 bp, synthetic construct
  source 1..75: mol_type = other DNA
cgtagagctgctggatgtgaaaccagcgccgaaggctgatgcaaagccggaagctgatgcgaaagccgcagattc

SEQ ID NO: 837735 - DNA, 75 bp, synthetic construct
  source 1..75: mol_type = other DNA
atggcattactggaaatttgctgttacagcatggaatgcgcgctaacggcgcagcaaaacggcgcagacagagtt

SEQ ID NO: 837736 - DNA, 75 bp, synthetic construct
  source 1..75: mol_type = other DNA
ggcggcacgattggcggcacgttgctgcgttttgcgggtgaatactacaccgatgcagaaagcgatctgtatgaa

SEQ ID NO: 837737 - DNA, 75 bp, synthetic construct
  source 1..75: mol_type = other DNA
aaagcgcagattgctgagctgcaatctttcgttagccgctttagcgccaacgcctcgaaatctcgccaggcaact

SEQ ID NO: 837738 - DNA, 75 bp, synthetic construct
  source 1..75: mol_type = other DNA
gctggccaagatctttgatgagactctgcccaccggtgagcgcaaattctggatcagaggtaacgaacctttcac

SEQ ID NO: 837739 - DNA, 75 bp, synthetic construct
  source 1..75: mol_type = other DNA
ttttccccgcgctcaatggctttcagccacgttttcagcgacagtgaactctgtaccgcttcctgcgagcgtaac

SEQ ID NO: 837740 - DNA, 75 bp, synthetic construct
  source 1..75: mol_type = other DNA
taatgcagtccagtccgaatgatgaatatttgattgcggcttcgcctgtttatattgctgctgtccagaatgaca

SEQ ID NO: 837741 - DNA, 75 bp, synthetic construct
  source 1..75: mol_type = other DNA
aactggccgctgaaaatgtccgccttaaacgacaactggcggagcaggctgaggaactggccatcctccaaaagg

SEQ ID NO: 837742 - DNA, 75 bp, synthetic construct
  source 1..75: mol_type = other DNA
ctataatggaggagcatggcgcattacaaaacctcttcacgaaaaggcggccatgaccgcattttcgcgagataa

SEQ ID NO: 837743 - DNA, 75 bp, synthetic construct
  source 1..75: mol_type = other DNA
aggatctgcaactcgaagcgcgggtggcaggcagccgaacgttgcagcttggtcaaagcgacagtgtgttgttcc

SEQ ID NO: 837744 - DNA, 75 bp, synthetic construct
  source 1..75: mol_type = other DNA
gccactgttacaggcggcggagagggtatcgcaacgctgatccctgtattgaatggtgttcatcaagctggtctg

SEQ ID NO: 837745 - DNA, 75 bp, synthetic construct
  source 1..75: mol_type = other DNA
ttgagctaacggaatccgggcgctattttttccgcaaggccaccgacctgctgaatgattttcacgctattaaac

SEQ ID NO: 837746 - DNA, 75 bp, synthetic construct
  source 1..75: mol_type = other DNA
atcactgaaaggggactttaccgaaagtgctgaactatatcttgttctacacgatctatcaggtcatccgatcaa

SEQ ID NO: 837747 - DNA, 75 bp, synthetic construct
  source 1..75: mol_type = other DNA
gtgctgtttcctttcacaaaaggaaaattaatgcatgattttttcacagcaattattgaatctcatcgttttagc

SEQ ID NO: 837748 - DNA, 75 bp, synthetic construct
  source 1..75: mol_type = other DNA
ccgggcagcaattccttaagtgtccgctgagtgttgtaaagaaacgcgccagcattcgttacagcggagatgtca

SEQ ID NO: 837749 - DNA, 75 bp, synthetic construct
  source 1..75: mol_type = other DNA
tacttctgccgtctgtttcgtaaaaacaccgaacgctcgccgtcggaatatcgtcggcagtaccacagccaactg

SEQ ID NO: 837750 - DNA, 75 bp, synthetic construct
  source 1..75: mol_type = other DNA
ttatcgagtgatatttaccgggttaccgcaagatttattgacaataccaatatctgaaattgaaacactaccttt

SEQ ID NO: 837751 - DNA, 75 bp, synthetic construct
  source 1..75: mol_type = other DNA
atggctcccgtaaaacgtggggttattgcacgtgcacgtcacaagaaaattttgaaacaagctaaaggctactac

SEQ ID NO: 837752 - DNA, 75 bp, synthetic construct
  source 1..75: mol_type = other DNA
ggccgccagggatctccccggtttcctgcagcgctttctggcgttcctggccgaccggggcatcagctgcagcaa

SEQ ID NO: 837753 - DNA, 75 bp, synthetic construct
  source 1..75: mol_type = other DNA
tgcgttttgcgggtgaatactacaccgatgatgaaagcgacctgtatgaagtcgaaatgcgcggacgtgtgacgg

SEQ ID NO: 837754 - DNA, 75 bp, synthetic construct
  source 1..75: mol_type = other DNA
ccgcaagatttattgacaataccaatacctgaaatcgaaacactaccatttgatgagtttatttataccgttgcg

SEQ ID NO: 837755 - DNA, 75 bp, synthetic construct
  source 1..75: mol_type = other DNA
tttacggtaaaagatatcgatactgaaactttaactgattcagtaaagagattaagttgtatagataagaagtga

SEQ ID NO: 837756 - DNA, 75 bp, synthetic construct
  source 1..75: mol_type = other DNA
tttccacggctggaaattgtgctggaaggtgagtttgttgataccggcgctggagcaacgttagttcccggcgat

SEQ ID NO: 837757 - DNA, 75 bp, synthetic construct
  source 1..75: mol_type = other DNA
atgtatcacgacgtcagctatctgctctcccgcctgatcaacggcccggtgcccgatcttgcgtatcaggtcgat

SEQ ID NO: 837758 - DNA, 75 bp, synthetic construct
  source 1..75: mol_type = other DNA
gattatatcgacgaacgctatgcctccgcacttacccgcgaatctgtcgcactgaaccgccccgggaatcctgga

SEQ ID NO: 837759 - DNA, 75 bp, synthetic construct
  source 1..75: mol_type = other DNA
atgatctttataaacaagcccccgctctggtcgataacgtattaagaatgttcatgccagatgaaaacatgacac

SEQ ID NO: 837760 - DNA, 75 bp, synthetic construct
  source 1..75: mol_type = other DNA
atcattgcgggagttaatccaggagcgactggcgacagggtcagaccataacccgtaccagcaattgcgtgaaaa

SEQ ID NO: 837761 - DNA, 75 bp, synthetic construct
  source 1..75: mol_type = other DNA
gcaactcggcttcagcgtcgtgcaatggaatggcaagcaatatcaaaacctggcgaaacagcacgtcgcccgacg

SEQ ID NO: 837762 - DNA, 75 bp, synthetic construct
  source 1..75: mol_type = other DNA
atgagcgccatagattcccaacttccctcatcttcagggcaagaccgcccaactgatgaggttgaccgcatatta

SEQ ID NO: 837763 - DNA, 75 bp, synthetic construct
  source 1..75: mol_type = other DNA
taatggctatcagcatcatgctgacctggtgaaggaatccgtctctgataaagatttaaaagtcaggacagtacg

SEQ ID NO: 837764 - DNA, 75 bp, synthetic construct
  source 1..75: mol_type = other DNA
gatcccgtttccattctgaccatgactgccgtgttaatcatcgtgtttatcgagtcgatggggatgttcctggca

SEQ ID NO: 837765 - DNA, 75 bp, synthetic construct
  source 1..75: mol_type = other DNA
gtcaaaagataatacctgagccatcaggagaggctgtgaaaaaaatgattgatgataaaaaggaacgactgaagg

SEQ ID NO: 837766 - DNA, 75 bp, synthetic construct
  source 1..75: mol_type = other DNA
agcttagcagtgttcttaacagggaatgtacgcgaagccgcgtccactgtcagagcaaaaaacgcgccctggaaa

SEQ ID NO: 837767 - DNA, 75 bp, synthetic construct
  source 1..75: mol_type = other DNA
aacgtttaacagcttcccccacacgtcattttcacaaaacgttggcctggttagcgtgacgcgcgttcatagccg

SEQ ID NO: 837768 - DNA, 75 bp, synthetic construct
  source 1..75: mol_type = other DNA
atggatatttttaataccacaatttcccgtaaaggaacatattgtacccagtgggacttttgtgaggacagattt

SEQ ID NO: 837769 - DNA, 75 bp, synthetic construct
  source 1..75: mol_type = other DNA
atgttcctgcactaacaggatcatatatgatatccgctgaccaggattttaatgataagtttagaacgatatcaa

SEQ ID NO: 837770 - DNA, 75 bp, synthetic construct
  source 1..75: mol_type = other DNA
agtttggtggtgatggctggactcagaccgataactttatgactgcccgaacttccggagttctgacctaccgta

SEQ ID NO: 837771 - DNA, 75 bp, synthetic construct
  source 1..75: mol_type = other DNA
gaagcgatcaaaaacttgacgttgtagcaaataaaggtaatgctctttctgaacaagtaattcctctgcgtgcct

SEQ ID NO: 837772 - DNA, 75 bp, synthetic construct
  source 1..75: mol_type = other DNA
ggggatgttttcgctggaacgcgatattgaaaatccccgtgagagcgagatcttcgccagctacccacgcatcct

SEQ ID NO: 837773 - DNA, 75 bp, synthetic construct
  source 1..75: mol_type = other DNA
ttgttctcggtacagttttcggcggttatttgatgaccggtggaagccttggagcactctatcaacccgctgaac

SEQ ID NO: 837774 - DNA, 75 bp, synthetic construct
  source 1..75: mol_type = other DNA
acatgatggatattaaaggaaaaatcatcacaactgatgcgatgggctgccagaaagatattgcagaaaagatac

SEQ ID NO: 837775 - DNA, 75 bp, synthetic construct
  source 1..75: mol_type = other DNA
gaagatgtaaaacaagctttcgatagcgctgttcgtagaaaaaaagaagtaaataattactacttgccatataga

SEQ ID NO: 837776 - DNA, 75 bp, synthetic construct
  source 1..75: mol_type = other DNA
catgtaccaaaaatacaatttttacaacctctaatacattgatttatggtggttttatgatttctctgaatgatt

SEQ ID NO: 837777 - DNA, 75 bp, synthetic construct
  source 1..75: mol_type = other DNA
gagcagtaaagcggaagtatatcgagtaattcaagataaacttgtttatttgatcaatgaatctgttcctgaagg

SEQ ID NO: 837778 - DNA, 75 bp, synthetic construct
  source 1..75: mol_type = other DNA
ggcaatggtgtatcggagcttatcgttcaggcaatgcaggcattgctgaacagcggggacgaaatgttggttcct

SEQ ID NO: 837779 - DNA, 75 bp, synthetic construct
  source 1..75: mol_type = other DNA
ggtaataaaattaccaagtattgtaaaggaattgtttttcaaatgtcttgatgcaaatcctcaagctaggccccc

SEQ ID NO: 837780 - DNA, 75 bp, synthetic construct
  source 1..75: mol_type = other DNA
ggtgtgtacttcgctatgaacagcccgatggcagtgctggctccggcagggacggcggatgtagtcgcttctgcg

SEQ ID NO: 837781 - DNA, 75 bp, synthetic construct
  source 1..75: mol_type = other DNA
attcgtctgaaagactcacgtggtgatggttatactcaattatggctgagccgcggcacaggtgcttatgtctat

SEQ ID NO: 837782 - DNA, 75 bp, synthetic construct
  source 1..75: mol_type = other DNA
atgatgctgaggttaatacatggcaaggaggaataggtctctacgttggtcaatttatcgtcaattaccgttacg

SEQ ID NO: 837783 - DNA, 75 bp, synthetic construct
  source 1..75: mol_type = other DNA
gaaaatggtattcctgttcacgataccattgccagagttgtatcctgtatcagtcctgcaaaatttcacgagtgc

SEQ ID NO: 837784 - DNA, 75 bp, synthetic construct
  source 1..75: mol_type = other DNA
tgtactggtgacagagtgggtcaattaatagaggaatatgctgaattatatgatccagttcaggaatgctggaaa

SEQ ID NO: 837785 - DNA, 75 bp, synthetic construct
  source 1..75: mol_type = other DNA
cttaaaatgtacgcggtcgatgctgttgccgctattgcagaggtgagaggctggaatgcctgccgcgccgccatg

SEQ ID NO: 837786 - DNA, 75 bp, synthetic construct
  source 1..75: mol_type = other DNA
ggctgacggcaggtaaagtgtggtacgacaccccaaccgatgattataacggtctgcaacttgcagcccatctga

SEQ ID NO: 837787 - DNA, 75 bp, synthetic construct
  source 1..75: mol_type = other DNA
ctcgtcgtgtttataaagaaaatggtggtttgagcatgattatgatcgactacctgcaacttatgcgcgtccccg

SEQ ID NO: 837788 - DNA, 75 bp, synthetic construct
  source 1..75: mol_type = other DNA
tggtgggaaaagatggatgcaatgcaggagtctgccactcgtcagcgtgaacaggataccatccggcagttttct

SEQ ID NO: 837789 - DNA, 75 bp, synthetic construct
  source 1..75: mol_type = other DNA
attgaagcgattgtggcggcaaagcctgacctgatcatcacagaaccgacccgtaatacgcccattgaacaactt

SEQ ID NO: 837790 - DNA, 75 bp, synthetic construct
  source 1..75: mol_type = other DNA
tgctgacatattatgttcagaaatacggtgatattgctatttcaattgaagatccaccggaagttcctgttcagg

SEQ ID NO: 837791 - DNA, 75 bp, synthetic construct
  source 1..75: mol_type = other DNA
agactgtgcaataccctgtttgctggggatatatcaccagtcagtgatgtggcggcatgtactcgacaaccactg

SEQ ID NO: 837792 - DNA, 75 bp, synthetic construct
  source 1..75: mol_type = other DNA
ccattaataaaaaagcccgcgacgattttggtgaaacggtcggctcggtactggatacagtaagttccatgcccc

SEQ ID NO: 837793 - DNA, 75 bp, synthetic construct
  source 1..75: mol_type = other DNA
gcctgctgtccggtaaaaaactgaccggtctggacaagagggaaatcaggagcctctggtgggaaaaaatggatg

SEQ ID NO: 837794 - DNA, 75 bp, synthetic construct
  source 1..75: mol_type = other DNA
gggttctttggcgtcgaccgtagcgatcgcgatcctcaacatgcacgagctgcgtttagtgacttttccaaactg

SEQ ID NO: 837795 - DNA, 75 bp, synthetic construct
  source 1..75: mol_type = other DNA
gtgaagaggcaatttctaactcctttgcatctctggggctgatggctgcgcagatacaatcacaaattgcggggc

SEQ ID NO: 837796 - DNA, 75 bp, synthetic construct
  source 1..75: mol_type = other DNA
ccgacgcaccaggctgttgagcaactggccagcctgcgcttaacgccaaatttcagcacctggcgaccgtgcgat

SEQ ID NO: 837797 - DNA, 75 bp, synthetic construct
  source 1..75: mol_type = other DNA
taccgtcagatgcagatgaatgcacaagctgaaaaagtagcgaaaatcatcgccgcaaacagcagcaatacataa

SEQ ID NO: 837798 - DNA, 75 bp, synthetic construct
  source 1..75: mol_type = other DNA
gatggaaaatgcataccgtcagatgcagatgaatgcacaagctgaaaaagtagcgaaaatcatcgccgcaaacag

SEQ ID NO: 837799 - DNA, 75 bp, synthetic construct
  source 1..75: mol_type = other DNA
gtgcgcggctatccaaacagtcagtacaccaccgatgccaccaaacgtctggtattcctgaaagatcgtctggcg

SEQ ID NO: 837800 - DNA, 75 bp, synthetic construct
  source 1..75: mol_type = other DNA
agccgcaaaatctgtctattgcatgagttattccaacctgtaaaccctgtctgtgcggtgtcggtacgtttgcag

SEQ ID NO: 837801 - DNA, 75 bp, synthetic construct
  source 1..75: mol_type = other DNA
atttttaccgtcaggtgattggcgaagcataccggcataagatgctgtttgttatcagccagtcagacaaagctg

SEQ ID NO: 837802 - DNA, 75 bp, synthetic construct
  source 1..75: mol_type = other DNA
atgaataattctgaaggtttgaagtcgtttcagcaatcgcttgctgatctgccgcaatgggtatcagagcggctt

SEQ ID NO: 837803 - DNA, 75 bp, synthetic construct
  source 1..75: mol_type = other DNA
ctcgatagcatcagtgcctttcccctgatacccgccccggtgcgggccgtcattcaggccgtgcgcaccacggtg

SEQ ID NO: 837804 - DNA, 75 bp, synthetic construct
  source 1..75: mol_type = other DNA
ttccgcgggaaataaaacccgtctggcatttgcaggtctgagatttgcagatgttggtaccattgattacggacg

SEQ ID NO: 837805 - DNA, 75 bp, synthetic construct
  source 1..75: mol_type = other DNA
gggagattatcaatttaatgttcagccagggtatatcctggctaaccgccgtgcgtatcaggcataaattatcgc

SEQ ID NO: 837806 - DNA, 75 bp, synthetic construct
  source 1..75: mol_type = other DNA
ggtttcggcaactggtttgcgggttattggcgtaagtggctgcaaagatgcgcaacttaaagccgaaattgaaaa

SEQ ID NO: 837807 - DNA, 75 bp, synthetic construct
  source 1..75: mol_type = other DNA
gggtaaaactggggtggggaagagtagtctgtgcaatgccctgtttgctggagatatatcaccggtcagcgatgt

SEQ ID NO: 837808 - DNA, 75 bp, synthetic construct
  source 1..75: mol_type = other DNA
cactgcagcattcgctttctaacctgccgcactgggcatcagagcgtattctgcagcagataaatcagcttactg

SEQ ID NO: 837809 - DNA, 75 bp, synthetic construct
  source 1..75: mol_type = other DNA
atgaaaaccggcatcgtgaccaccttgattgcattatgtttgccggtatccgtttttgccaccacgctgcggctt

SEQ ID NO: 837810 - DNA, 75 bp, synthetic construct
  source 1..75: mol_type = other DNA
gaccgggcgctggcggtggatgaacatttttatcatcaggtgattggagaggtataccggcataaggtgctgttt

SEQ ID NO: 837811 - DNA, 75 bp, synthetic construct
  source 1..75: mol_type = other DNA
gatcgtgcgctggccgtggatgagcatttttaccatcaggtgatcggtgagccttatcgacataaggtgctgttt

SEQ ID NO: 837812 - DNA, 75 bp, synthetic construct
  source 1..75: mol_type = other DNA
gaccgggcgctggcagtggatgaacacttttatcatcaggtgattggtgaggtataccggcataaagtgctgttt

SEQ ID NO: 837813 - DNA, 75 bp, synthetic construct
  source 1..75: mol_type = other DNA
caatatgggcagcatcagcatggtagatgccgtctacaccgacgccccgccgccagtaagcgtgatgcaggtgct

SEQ ID NO: 837814 - DNA, 75 bp, synthetic construct
  source 1..75: mol_type = other DNA
cattgtcaccaacaatctcaacgttgctaacacgttgatggtaaaagaagattttcgcatcattctcgccggtgg

SEQ ID NO: 837815 - DNA, 75 bp, synthetic construct
  source 1..75: mol_type = other DNA
cttccagttcggttaacacgccgtggcacgatcgcaaggccacccagaccgaagaaaaagagcgcatcgcccgca

SEQ ID NO: 837816 - DNA, 75 bp, synthetic construct
  source 1..75: mol_type = other DNA
gcgcgtttgacagctatctgctgctacgcgggttgcgaacgctggtgccgcgaatggagctggcgcagcgtaacg

SEQ ID NO: 837817 - DNA, 75 bp, synthetic construct
  source 1..75: mol_type = other DNA
cctttgaaccagaagtcaaacgtcaggctgtcatggcactctctacacgacaagtatcagccagtgaaatcgcca

SEQ ID NO: 837818 - DNA, 75 bp, synthetic construct
  source 1..75: mol_type = other DNA
tccaccggtattgaagatggcgaagatttaattgctgacctggaaaatggcttccgggctgcaaacaaggggtaa

SEQ ID NO: 837819 - DNA, 75 bp, synthetic construct
  source 1..75: mol_type = other DNA
acagcggcgaattatccaagcagtcgcgcgaatcttttacgtatagtttagaaactgaagtaagaaaaattatcg

SEQ ID NO: 837820 - DNA, 75 bp, synthetic construct
  source 1..75: mol_type = other DNA
cgccttcggaatggggatggagcgtctgaccatgttgcgttacggcgtcaccgacctgcgttcattcttcgaaaa

SEQ ID NO: 837821 - DNA, 75 bp, synthetic construct
  source 1..75: mol_type = other DNA
agccgtaaccgtcgtcgtcgctacagctcatattgcggagaaatcggaccggctccggataaccttatcgccaga

SEQ ID NO: 837822 - DNA, 75 bp, synthetic construct
  source 1..75: mol_type = other DNA
actccacaaaataaacaacagcaagatacactagttactatcagccatttatatgatttaaatgttcccccggaa

SEQ ID NO: 837823 - DNA, 75 bp, synthetic construct
  source 1..75: mol_type = other DNA
gcaagggaaacttcgctaaacattctgatgggggggcaatgtatggtctggaagaagaattgagaaggctaatta

SEQ ID NO: 837824 - DNA, 75 bp, synthetic construct
  source 1..75: mol_type = other DNA
tgtattgtcgattacaagcttcctgaagtctctcctggaaccttgctgaaccagcagacagcaatctgtcgctaa

SEQ ID NO: 837825 - DNA, 75 bp, synthetic construct
  source 1..75: mol_type = other DNA
atggtcaggtttatctgactggacttccacagtcagggcaattacaggtttcatggggcaaagataaaaactcaa

SEQ ID NO: 837826 - DNA, 75 bp, synthetic construct
  source 1..75: mol_type = other DNA
aagccgctcagagagccagacaagctgcatctggtgtacgtaagctggagattgtgcttgatgctcaggaaattg

SEQ ID NO: 837827 - DNA, 75 bp, synthetic construct
  source 1..75: mol_type = other DNA
attgctcatgctgatggcatcacctttggtcagccgctgggcgacacaatggttctggttaaggctcctggcgct

SEQ ID NO: 837828 - DNA, 75 bp, synthetic construct
  source 1..75: mol_type = other DNA
tggctagtcgggatattacttttattgcagatgataataacgcagatctcatcccatgcctgagtacagaccttc

SEQ ID NO: 837829 - DNA, 75 bp, synthetic construct
  source 1..75: mol_type = other DNA
actgtattgtcgattacaagcttcctgtagtctctcctggtaccttactgaaccagcagacagcaatctgtcgct

SEQ ID NO: 837830 - DNA, 75 bp, synthetic construct
  source 1..75: mol_type = other DNA
actatcgaaaatttctgcggcgcgaagctggttttgatattaatcaggggaataatttgtggaaacgctgggagg

SEQ ID NO: 837831 - DNA, 75 bp, synthetic construct
  source 1..75: mol_type = other DNA
atgtattaccagttaagtcgtgtccgtgcgatggtgattcggcatgttgggtaactcgtggctggcatgaaacta

SEQ ID NO: 837832 - DNA, 75 bp, synthetic construct
  source 1..75: mol_type = other DNA
atgctttgcaatgaaataaatgaacatctgaaaaataatggtggtgaatatcacgaggatattattgatagttac

SEQ ID NO: 837833 - DNA, 75 bp, synthetic construct
  source 1..75: mol_type = other DNA
atatgctgaaagtggagcaaatcaggcatgttctggttcactccgaaggtgagatagataaacacagggcggagc

SEQ ID NO: 837834 - DNA, 75 bp, synthetic construct
  source 1..75: mol_type = other DNA
actctgcacgatttcctgcgtaacttctttgaggaagatttgcagattcgcttccgtccttcctacttcccgttc

SEQ ID NO: 837835 - DNA, 75 bp, synthetic construct
  source 1..75: mol_type = other DNA
ggcgttctaccacaaagtggaagaagaccgcccgacgctgggctttgatatcgacggcgtggtaattaaggtcaa

SEQ ID NO: 837836 - DNA, 75 bp, synthetic construct
  source 1..75: mol_type = other DNA
gatgtcggaattgtggtggcatcacacgttcataacttttttgccgaagaaagtaatcgcaatgtcatcagcgag

SEQ ID NO: 837837 - DNA, 75 bp, synthetic construct
  source 1..75: mol_type = other DNA
cgaacgtcttggtttacgcattggcgataaagtggtgattcgccgcgctggcgacgtgatcccgcaggtggttaa

SEQ ID NO: 837838 - DNA, 75 bp, synthetic construct
  source 1..75: mol_type = other DNA
ataatggcgtctgggattcactcattaataaccaggctgatatcgccattggcgcgcccgatacgttactggacg

SEQ ID NO: 837839 - DNA, 75 bp, synthetic construct
  source 1..75: mol_type = other DNA
aattaaatcccgggtgcgcatttgtattaatcaactgttgtatacccctcagcatacagctcggcttctgcaagt

SEQ ID NO: 837840 - DNA, 75 bp, synthetic construct
  source 1..75: mol_type = other DNA
ccgtgaagtcggcgaggccaccgcagcaggtctggcggcatatttcggcacgctggaagcgctggaagccgcgtc

SEQ ID NO: 837841 - DNA, 75 bp, synthetic construct
  source 1..75: mol_type = other DNA
cgacgcctgacgaatggttccacttcgacctggtgctgggtcgtacggaccagctgctaccggtcgtgtgcaatc

SEQ ID NO: 837842 - DNA, 75 bp, synthetic construct
  source 1..75: mol_type = other DNA
ctacgcctgatgagtggtttcatttcgacctggtattggggcgaactgctcatcttctcccagttgtatgtaacc

SEQ ID NO: 837843 - DNA, 75 bp, synthetic construct
  source 1..75: mol_type = other DNA
tcaataccaaagagctcgaatccatcaaagcattcgtgacgcgcacgcatgagaactggatccctaaataccggg

SEQ ID NO: 837844 - DNA, 75 bp, synthetic construct
  source 1..75: mol_type = other DNA
tcaacgaagaggcgcgacgcacgggcgggaaagtatttgctaacccacgtaatgctgcggcaggttcgctgcgtc

SEQ ID NO: 837845 - DNA, 75 bp, synthetic construct
  source 1..75: mol_type = other DNA
cgcaggtggttaacgtcgtgctttctgaacgcccggaagatacccgtgaggttgtattcccgacgcattgtccgg

SEQ ID NO: 837846 - DNA, 75 bp, synthetic construct
  source 1..75: mol_type = other DNA
ggtggtggaattgattacattgaaatcggcatgattcgttggttgttcgcgatttctccggctcatccgctggcg

SEQ ID NO: 837847 - DNA, 75 bp, synthetic construct
  source 1..75: mol_type = other DNA
attatccggctgcgggaacgttcggcactcaccggaggtgcagcttatcgtcagtggttgtccgcgagtgacacc

SEQ ID NO: 837848 - DNA, 75 bp, synthetic construct
  source 1..75: mol_type = other DNA
cttccagttcggttaacacgccatggcacgatcgtaaagccacccagaccgaagaaaaagagcggattgcccgca

SEQ ID NO: 837849 - DNA, 75 bp, synthetic construct
  source 1..75: mol_type = other DNA
gatgccgtctacaccgacgccccgccgccagtaagcgtcatgcaggtgctgacggaccatcatattcaactggag

SEQ ID NO: 837850 - DNA, 75 bp, synthetic construct
  source 1..75: mol_type = other DNA
ctacgtattgcaggtggtttaatcgtcgcgtttatcggtttccgtatgctctttcctcagcaaaaggcaacggat

SEQ ID NO: 837851 - DNA, 75 bp, synthetic construct
  source 1..75: mol_type = other DNA
ttacccgtaccatcgaccgtatcgaaagtttcttcggtgagcttggctttaccgtggcaaccgggccggaaatcg

SEQ ID NO: 837852 - DNA, 75 bp, synthetic construct
  source 1..75: mol_type = other DNA
ctcgacactgtttatcgatatcggcaccacgccggaagcggtggcgcacgcgctgctcaatcacagcaatttgcg

SEQ ID NO: 837853 - DNA, 75 bp, synthetic construct
  source 1..75: mol_type = other DNA
accaacaatctcaacgtcgctaacacgctgatggtaaaagaggatttccgtatcattcttgccggtggcgaatta

SEQ ID NO: 837854 - DNA, 75 bp, synthetic construct
  source 1..75: mol_type = other DNA
cccaacacctttgcgtttatccgtaattccgggatttcagggattattccggctcagaatcgcaggttaattcga

SEQ ID NO: 837855 - DNA, 75 bp, synthetic construct
  source 1..75: mol_type = other DNA
gcggcggcattgattacacggagattggcgcgattcgctgggcctttgccatcgccccggatcacccattagcct

SEQ ID NO: 837856 - DNA, 75 bp, synthetic construct
  source 1..75: mol_type = other DNA
tgacgcagtggattaaaaaacaatttgcgccaaatggcatattaacggggatctatcaggatttactgcatcggg

SEQ ID NO: 837857 - DNA, 75 bp, synthetic construct
  source 1..75: mol_type = other DNA
gtctggggctggtggtgttgctgccgttagccaacccattaacgacagtcgcgttatttcttggcctggcgggca

SEQ ID NO: 837858 - DNA, 75 bp, synthetic construct
  source 1..75: mol_type = other DNA
aaccggtacaggttgcgcactggcagttttccattgtggagctaccgtggcccggggaaaaacgttacccgcacg

SEQ ID NO: 837859 - DNA, 75 bp, synthetic construct
  source 1..75: mol_type = other DNA
atgaaaacacaaaacgatcattatgaccgtctgtcggtcaggttatcgatcattatcactcgcttactggctggc

SEQ ID NO: 837860 - DNA, 75 bp, synthetic construct
  source 1..75: mol_type = other DNA
atgggatattggcacaactactagcggtgccaatatgtacattgatccaaacccaggtatcaatacagtttggcg

SEQ ID NO: 837861 - DNA, 75 bp, synthetic construct
  source 1..75: mol_type = other DNA
actgctggcattcaaatgtacgaggcgtacaacaatagctacccgaccacgtatggcaacgtattgcacatgaaa

SEQ ID NO: 837862 - DNA, 75 bp, synthetic construct
  source 1..75: mol_type = other DNA
accagtgatacgaacattgttctctcagaaccctataccggcgaaactcagtctgaagttccgtgccgaatcatt

SEQ ID NO: 837863 - DNA, 75 bp, synthetic construct
  source 1..75: mol_type = other DNA
accaagttgcagacagcatgtactatcaacggcgtctcgtttgatggttctaaaaatattgagctaacggcggaa

SEQ ID NO: 837864 - DNA, 75 bp, synthetic construct
  source 1..75: mol_type = other DNA
ccgctgccgccggatggttaaatagtggtaacggaacagcatttacgactgctcagtttataacgtggctaaata

SEQ ID NO: 837865 - DNA, 75 bp, synthetic construct
  source 1..75: mol_type = other DNA
aaccgacgccgttagatattggagcactgccaacaaccggaggaacagtttcaggtccgttgtctgttacaggtg

SEQ ID NO: 837866 - DNA, 75 bp, synthetic construct
  source 1..75: mol_type = other DNA
tgagggcgagttgcttattggctggagtggtacgagcggtgcacatgcgccagttttcattcgctcacgaagaga

SEQ ID NO: 837867 - DNA, 75 bp, synthetic construct
  source 1..75: mol_type = other DNA
gtggagttacaaacgcaatcctcgtttatcactaccgtagtaatagaagtccgtcaggtcaatggctgaaatttg

SEQ ID NO: 837868 - DNA, 75 bp, synthetic construct
  source 1..75: mol_type = other DNA
gtgggcgcaggtatataccgctaaggattcaatacctggtgtgaatacaaccggtaatcagaacactactggtaa

SEQ ID NO: 837869 - DNA, 75 bp, synthetic construct
  source 1..75: mol_type = other DNA
atggctatgggttcgaagaggactggactcagatatatactaaaaaagacagcattccaggtgtgaatgcagatg

SEQ ID NO: 837870 - DNA, 75 bp, synthetic construct
  source 1..75: mol_type = other DNA
tgtacgaggcgtacaacaatagctacccgaccacgtatggcaacgtattgcacatgaaaggtgcgagagttgctg

SEQ ID NO: 837871 - DNA, 75 bp, synthetic construct
  source 1..75: mol_type = other DNA
ggatttggtgctgtagaattagcagaatctataatcgaagtttttaatctacctaacggtgattatacaattcgt

SEQ ID NO: 837872 - DNA, 75 bp, synthetic construct
  source 1..75: mol_type = other DNA
aacccagccgttggtgaaaaaactttatcacccatcgctgccggaaaatcaggggcatgaaattgccgcgcgcca

SEQ ID NO: 837873 - DNA, 75 bp, synthetic construct
  source 1..75: mol_type = other DNA
tgaagtcactgttatcgtcgtcgcacaggatgaaaatgcaccgttagagttgcgttttcggattgtggcttgtgt

SEQ ID NO: 837874 - DNA, 75 bp, synthetic construct
  source 1..75: mol_type = other DNA
gggcgcgccgcatgaagaagagcgggcaaaaagactggcggaaggatttgattatgtcgacgtattgccgaagat

SEQ ID NO: 837875 - DNA, 75 bp, synthetic construct
  source 1..75: mol_type = other DNA
gagtctggaaggagttgcccgagtgctggccggggcgaaattcgtggtttcggtagatacggggttaagccattt

SEQ ID NO: 837876 - DNA, 75 bp, synthetic construct
  source 1..75: mol_type = other DNA
tgacgcagtggattaaaaaacagtttgcgtcaaaagggatattaactgagatttatcaggatttactgcatcagg

SEQ ID NO: 837877 - DNA, 75 bp, synthetic construct
  source 1..75: mol_type = other DNA
atggtggaggacaccgcgcatacgattaataaaaaagtgggctggttgctgcatgggcaggagtcgattctggtg

SEQ ID NO: 837878 - DNA, 75 bp, synthetic construct
  source 1..75: mol_type = other DNA
cacggttctccggagcttgggattgtagattttaatgatggctcccctgactccatgaacatccgggactggatg

SEQ ID NO: 837879 - DNA, 75 bp, synthetic construct
  source 1..75: mol_type = other DNA
tatggcggcagctatcgcctgtttgacagcctggcgaagcgcgggtgttaccgtgtgttgtttgttgatcaaagt

SEQ ID NO: 837880 - DNA, 75 bp, synthetic construct
  source 1..75: mol_type = other DNA
aacccgacgcgcgatgtcgtgcagcgtgcgctggcagaactggaaggtggcgctggcgcggtgcttactaatacc

SEQ ID NO: 837881 - DNA, 75 bp, synthetic construct
  source 1..75: mol_type = other DNA
tccaccggtattgaagatggcgaagatttaattgccgacttggaaaatggcttccgggctgcaaacaaggggtaa

SEQ ID NO: 837882 - DNA, 75 bp, synthetic construct
  source 1..75: mol_type = other DNA
atcacggtttatggaccaaccgatccgggattaattggcggatatgggaagaatcaggtggtttgtagggctccg

SEQ ID NO: 837883 - DNA, 75 bp, synthetic construct
  source 1..75: mol_type = other DNA
gggtgcgccgcatgaagaagagcgggcaaaaaggctggcggaaggctttaattatgtcgacgtactgccgaaaat

SEQ ID NO: 837884 - DNA, 75 bp, synthetic construct
  source 1..75: mol_type = other DNA
gatgctggtgaatatgctgtatttctgcatgccacgacccgtgatgataagcactggccggaagagcactggcga

SEQ ID NO: 837885 - DNA, 75 bp, synthetic construct
  source 1..75: mol_type = other DNA
agtacagccacgaaattgcagacggcaagatctatcggtggagttggtttcgacggttctgcaaatatcaacctt

SEQ ID NO: 837886 - DNA, 75 bp, synthetic construct
  source 1..75: mol_type = other DNA
tggcgttaagtaccgcattcaccatgcttttgatgatgttgcaggcaagtggtgacccgcgaatggcgcaagtgc

SEQ ID NO: 837887 - DNA, 75 bp, synthetic construct
  source 1..75: mol_type = other DNA
ctgtggtggtggcgctgtcgtttggtcgtgatgcgcacggctggacgtgggcgagcggggcgttgctcgaggatt

SEQ ID NO: 837888 - DNA, 75 bp, synthetic construct
  source 1..75: mol_type = other DNA
ggattttccccacaccgcatgttactggcggggatggcgttaagtaccgcgttcaccatgcttttgatgatgttg

SEQ ID NO: 837889 - DNA, 75 bp, synthetic construct
  source 1..75: mol_type = other DNA
agcgatcatcgttttatgaaactgtgcagctggtttggcatcccgcgtcagagtcagtttgcagatgccatttca

SEQ ID NO: 837890 - DNA, 75 bp, synthetic construct
  source 1..75: mol_type = other DNA
gagcgtgattaaaacctatacggggagaatcacaattgagcatattcttcctcaagcattagttaatgaatactg

SEQ ID NO: 837891 - DNA, 75 bp, synthetic construct
  source 1..75: mol_type = other DNA
atgcggacctcattccggtgacggccagaggtacggaagaaatcagtcgggtacagatccccttccgttcctggg

SEQ ID NO: 837892 - DNA, 75 bp, synthetic construct
  source 1..75: mol_type = other DNA
gtttggtcgtgattcgcaaggctggacgtgggcgagtgggggactgcttgaggatttaatgccctggcgctggcc

SEQ ID NO: 837893 - DNA, 75 bp, synthetic construct
  source 1..75: mol_type = other DNA
ttggaccgttgagttttgttggtttaatggcaccgcatattgcgcggatgatgggctttcgacggacgatgccgc

SEQ ID NO: 837894 - DNA, 75 bp, synthetic construct
  source 1..75: mol_type = other DNA
ttggaccgttgagttttgttggtctgatggcaccgcatatcgcgcggatgatgggctttcgacggacgatgccgc

SEQ ID NO: 837895 - DNA, 75 bp, synthetic construct
  source 1..75: mol_type = other DNA
cgttccagatcccagcggggttgctatcgacgtttattggcgcgccgtactttatctatttgttgagaaagcaga

SEQ ID NO: 837896 - DNA, 75 bp, synthetic construct
  source 1..75: mol_type = other DNA
ggtggtgataccgcacgagccgtaggaatggcgctgacgccgacgcgaattgcgctgctgctgttagcggcttgc

SEQ ID NO: 837897 - DNA, 75 bp, synthetic construct
  source 1..75: mol_type = other DNA
aggtctggcgcaccggaattgtgatggtgattttgctggcgattaccccgctgtgccgccgctggctgaccattt

SEQ ID NO: 837898 - DNA, 75 bp, synthetic construct
  source 1..75: mol_type = other DNA
ttatcactaccgcagtaatagaagtccgtcaggtcaatggctgaaatttgccggtactgttggggcaacaagtaa

SEQ ID NO: 837899 - DNA, 75 bp, synthetic construct
  source 1..75: mol_type = other DNA
gctgccgcatcgtccgccagttcggcggcgtcatcggcatcatctgcgtctgcttcaaaagatgaggcgaccaga

SEQ ID NO: 837900 - DNA, 75 bp, synthetic construct
  source 1..75: mol_type = other DNA
catccggtgatacctatgacatttatgtagaaataggtaattacgccacaggtgttaatatccagtgggattata

SEQ ID NO: 837901 - DNA, 75 bp, synthetic construct
  source 1..75: mol_type = other DNA
aacaacatcaggtcatggtggtgttaataatgcggaatttatttatgtgtacaatgggagtgattatgcaccagg

SEQ ID NO: 837902 - DNA, 75 bp, synthetic construct
  source 1..75: mol_type = other DNA
gcgtacagctgtcggattaacgaatttcgcctggatcaacacatccggcgatacatatgatatttacgttgagat

SEQ ID NO: 837903 - DNA, 75 bp, synthetic construct
  source 1..75: mol_type = other DNA
agtgtccgttaaactcaggctacctcactgcatcatcggcaacagaagctgcaaattcctctaaggcagcaaaaa

SEQ ID NO: 837904 - DNA, 75 bp, synthetic construct
  source 1..75: mol_type = other DNA
tgatccaaaccctggtatcaatacagtttggcgttcaacatcttcaaggcgctataaaaaggatattgaaacatt

SEQ ID NO: 837905 - DNA, 75 bp, synthetic construct
  source 1..75: mol_type = other DNA
agtgaatcgctggctgcaacgccaaaggcagttaaaactgttaaagatagttcagttcaaaaaactggcgacaca

SEQ ID NO: 837906 - DNA, 75 bp, synthetic construct
  source 1..75: mol_type = other DNA
agtgacaaacgcaatcctcgtttatcactaccgtagtaatagaagtccgtcaggtcaatggctgaaatttgccgg

SEQ ID NO: 837907 - DNA, 75 bp, synthetic construct
  source 1..75: mol_type = other DNA
ttgtaccactcattcatcatattcagcaattgaccaaaagggttgaggagcttgaaaagaagttaaattcaccta

SEQ ID NO: 837908 - DNA, 75 bp, synthetic construct
  source 1..75: mol_type = other DNA
ggatgacaggtgtatgggtaacagctcgtgttaataaaattgggtcgtatatcgtgaaatatgaatttatctata

SEQ ID NO: 837909 - DNA, 75 bp, synthetic construct
  source 1..75: mol_type = other DNA
tattgcacatgaaaggtgcgagtgctgctggcgagggtgagttgcttattggctggagtggtacgagcggtgcac

SEQ ID NO: 837910 - DNA, 75 bp, synthetic construct
  source 1..75: mol_type = other DNA
cattattggcgctgttgatggtgatgacccagcagtattcaggccaatacaaaaatacatcaatggcacatggta

SEQ ID NO: 837911 - DNA, 75 bp, synthetic construct
  source 1..75: mol_type = other DNA
gtaatacaccgtaagagctggaaaaaccggacagaagtggaacaggccacactaacgtgggtggactggtataac

SEQ ID NO: 837912 - DNA, 75 bp, synthetic construct
  source 1..75: mol_type = other DNA
ccacttactgatgcagaactggaaaagtggctcttctgcaacctgggtggagattctcatgccagtggactcatt

SEQ ID NO: 837913 - DNA, 75 bp, synthetic construct
  source 1..75: mol_type = other DNA
attacgaggtatgaataatgcggctattgctaactggagagaacaactttcagcgaataaacggtctggcctaaa

SEQ ID NO: 837914 - DNA, 75 bp, synthetic construct
  source 1..75: mol_type = other DNA
gctacgaatgatggacaggagatgtggaactactcaagtatgaccgaagaaagccaactatctgatcctacccac

SEQ ID NO: 837915 - DNA, 75 bp, synthetic construct
  source 1..75: mol_type = other DNA
ataaaaatctataacaaccaggaggaaatcattaattattgtaagagtgatacttcgttagctcctgcagtcgct

SEQ ID NO: 837916 - DNA, 75 bp, synthetic construct
  source 1..75: mol_type = other DNA
tgattcatatggaacatcatcaattgatattactggcagtggagatctaatatcattaggtggtcatgcaggact

SEQ ID NO: 837917 - DNA, 75 bp, synthetic construct
  source 1..75: mol_type = other DNA
gacaacggcgacctggtgcgcatcagcggcccgcgacagacgcgggaatacggctacagcgccacgggcaggctg

SEQ ID NO: 837918 - DNA, 75 bp, synthetic construct
  source 1..75: mol_type = other DNA
cagatagccgaaagccgcgaactcaccgtcgcagagctggaagaccggttagcgcccgatctcggtctggacgaa

SEQ ID NO: 837919 - DNA, 75 bp, synthetic construct
  source 1..75: mol_type = other DNA
taccttatgtattgacaacgcctgtatggctgcaaaagaaaaaaaagattaccggaatcaacattacgcttccgg

SEQ ID NO: 837920 - DNA, 75 bp, synthetic construct
  source 1..75: mol_type = other DNA
ttggcggtgaatggcgtcacgacaaacttagcgatgcggtgaacctgactgggggaaccagctccaaaacatctg

SEQ ID NO: 837921 - DNA, 75 bp, synthetic construct
  source 1..75: mol_type = other DNA
gaggctgagcaaagcgctgccgccgcgaaagccttggcccagcaagaagtgcaacaatattcagacaaacaggct

SEQ ID NO: 837922 - DNA, 75 bp, synthetic construct
  source 1..75: mol_type = other DNA
gggcttatttctaatgccgttgtcgattctgcaacaaccgctgcagctactactgcgaaattcggcagtctcagt

SEQ ID NO: 837923 - DNA, 75 bp, synthetic construct
  source 1..75: mol_type = other DNA
cgtaacagcaaaggctggctcaatgaaactcacggtggcggattttatatgtccgacggatcatgggttcgaagt

SEQ ID NO: 837924 - DNA, 75 bp, synthetic construct
  source 1..75: mol_type = other DNA
aatggtgttaagctgttggttagcgagcttagcggtgttgagccgaaaatgttgcgtaccatggttgacgattta

SEQ ID NO: 837925 - DNA, 75 bp, synthetic construct
  source 1..75: mol_type = other DNA
tttaaatattaaaagcctggctttcgactcttttaaagaaaggcttgagtctaccatggcggcactcactttctt

SEQ ID NO: 837926 - DNA, 75 bp, synthetic construct
  source 1..75: mol_type = other DNA
gcgacagaaatgaaacaacactatgccatcacagtagaacgggtaccgctggctgatacggcagatgccgtgcgt

SEQ ID NO: 837927 - DNA, 75 bp, synthetic construct
  source 1..75: mol_type = other DNA
ccagttaatgccaatgccaaagcgggcgctcaggtattggccaacttcctgctgtcgcctcgtgcgcagatccgc

SEQ ID NO: 837928 - DNA, 75 bp, synthetic construct
  source 1..75: mol_type = other DNA
aatggattttaaatggggaaataaagatgagtttgagcataaatttactgggcccaatattgaaaagcctgataa

SEQ ID NO: 837929 - DNA, 75 bp, synthetic construct
  source 1..75: mol_type = other DNA
tccagggccgcaaacaacttatgattatatagataatacaggtaagaaatggagttgccctgaaaaagggtggag

SEQ ID NO: 837930 - DNA, 75 bp, synthetic construct
  source 1..75: mol_type = other DNA
aaaaaaatgagagtctcctaaagtttccttcgataatatcaatgcttaatactgatgaatcccctaatgattttt

SEQ ID NO: 837931 - DNA, 75 bp, synthetic construct
  source 1..75: mol_type = other DNA
gccggacgtgtcatcagtctgactaacgagaacggcagccacagcgacttcagctacgatgcgctggaccggctg

SEQ ID NO: 837932 - DNA, 75 bp, synthetic construct
  source 1..75: mol_type = other DNA
gcttttttgtcatgctgatggtcaccggcgtctcgctgttgggtattatcgccgcgctggtcatcgcgacggcaa

SEQ ID NO: 837933 - DNA, 75 bp, synthetic construct
  source 1..75: mol_type = other DNA
tcgatcccggcagcgctgatgctcggcctgctgctggggctgttcaacggcgcgctggtggcctttgccggattg

SEQ ID NO: 837934 - DNA, 75 bp, synthetic construct
  source 1..75: mol_type = other DNA
tccccatcggcatgtctttacgtgaagtcctggcgctggcgggcggcgcaacagtagatgctcctggttttatca

SEQ ID NO: 837935 - DNA, 75 bp, synthetic construct
  source 1..75: mol_type = other DNA
cggtgtggtggtcaataatgttcaaaccgtacttaatattgccagagccgtcgagcaacagtatccagtgacgcg

SEQ ID NO: 837936 - DNA, 75 bp, synthetic construct
  source 1..75: mol_type = other DNA
gcgcacaaaatctccgctacgaaggtgccttaaatcctgctgatcccatggcaaattatcgactgattcccgtaa

SEQ ID NO: 837937 - DNA, 75 bp, synthetic construct
  source 1..75: mol_type = other DNA
aacaaaaaccctggcaacagcagcccgataacttccgaaagcaatacggtcgacggcaaatacacgttgccgctg

SEQ ID NO: 837938 - DNA, 75 bp, synthetic construct
  source 1..75: mol_type = other DNA
gggacatcgtcccagcgcggcgaaaccagtcgccatcgccaaagcagcgggaaaacccgtcattcgtctggaaga

SEQ ID NO: 837939 - DNA, 75 bp, synthetic construct
  source 1..75: mol_type = other DNA
gtatcgttaatgttcttttaggttttatttttagaactgttatcattaggtttgttttgttttttggacttcttt

SEQ ID NO: 837940 - DNA, 75 bp, synthetic construct
  source 1..75: mol_type = other DNA
catcctttcaggattgtttacagcaatgatttcgcagcaagaaaagaagtgtttgatttgctgaaatttacattg

SEQ ID NO: 837941 - DNA, 75 bp, synthetic construct
  source 1..75: mol_type = other DNA
tcagcatgttgcagggttgcatggtcgatagctgggaagtctgggacgactacaagccgtttgccctgcgtccgc

SEQ ID NO: 837942 - DNA, 75 bp, synthetic construct
  source 1..75: mol_type = other DNA
cacccatgaagcctataagttctggacagggcaactgttcaacaagggcaggccgaagagcgaacagattcgact

SEQ ID NO: 837943 - DNA, 75 bp, synthetic construct
  source 1..75: mol_type = other DNA
tctcccacgcggatctggcatgggcgtgcatgcacgccattatcaatgaaccactggaaagctctggcggcgcga

SEQ ID NO: 837944 - DNA, 75 bp, synthetic construct
  source 1..75: mol_type = other DNA
ctatattactgacacgacaaaagagcgttatcaccagtgtcagaacgtgaattgcagcgccacgttcatcactta

SEQ ID NO: 837945 - DNA, 75 bp, synthetic construct
  source 1..75: mol_type = other DNA
tgctgattatcaggcactggacgcagatattattcaatgcattcagcgcgcagatgaagtgcataccatgacgtc

SEQ ID NO: 837946 - DNA, 75 bp, synthetic construct
  source 1..75: mol_type = other DNA
cccagcgacctggaagtgctgcttaatcacagccagttaacactggcgcagcagatgcgagctgaaaaattacgc

SEQ ID NO: 837947 - DNA, 75 bp, synthetic construct
  source 1..75: mol_type = other DNA
tgctttcaggttttattcatgaacctgcatttccaggaatcatcaggagatcagtaaaacttagcgtaaaatata

SEQ ID NO: 837948 - DNA, 75 bp, synthetic construct
  source 1..75: mol_type = other DNA
gtatcacattgtgtcgcaccaggtataatggtttttgaaagagaccagtctataaacattgttatgcaggaagtt

SEQ ID NO: 837949 - DNA, 75 bp, synthetic construct
  source 1..75: mol_type = other DNA
atattccacgtttgtgtgaagggggtatctcagagtgcgtcaatgtatccaatgtttatgttgcatcattcacgc

SEQ ID NO: 837950 - DNA, 75 bp, synthetic construct
  source 1..75: mol_type = other DNA
atgaaagcaatcacattagagcaattcgctaaaatggcgaatgtttcaaccagaacgcttaggcgctggctgaaa

SEQ ID NO: 837951 - DNA, 75 bp, synthetic construct
  source 1..75: mol_type = other DNA
taccggcacccggtaagcggcgaaccgacaggccttgccgaggttgtcgactggctggcgttacagcgcagccac

SEQ ID NO: 837952 - DNA, 75 bp, synthetic construct
  source 1..75: mol_type = other DNA
gaccgactttcatgcactggcactgcgcccgtttggctggcgcgaagtgtggatcggttatgacccggcgaaagg

SEQ ID NO: 837953 - DNA, 75 bp, synthetic construct
  source 1..75: mol_type = other DNA
ccgcccggcaagagatcccactctggcgcatggaagatggctttattcgctcatccgggttagggtctgacctgc

SEQ ID NO: 837954 - DNA, 75 bp, synthetic construct
  source 1..75: mol_type = other DNA
ccccctcccaaactccactgaacagtatgtggccgaagatataacacaacggcttagagaaaaatatcctttata

SEQ ID NO: 837955 - DNA, 75 bp, synthetic construct
  source 1..75: mol_type = other DNA
cctgcattgctggcaggtgtggtgatgagcagaatcattacccgtctacccggattggatatttcatgtcctgaa

SEQ ID NO: 837956 - DNA, 75 bp, synthetic construct
  source 1..75: mol_type = other DNA
atcttgagtaagcataatattcaggccagcattttttcagcgtcggcccggacaatatgggccgccatctctggc

SEQ ID NO: 837957 - DNA, 75 bp, synthetic construct
  source 1..75: mol_type = other DNA
ggcgtggatattcatctgcttcgccctgctgatcggcatcctgagcgggataatctggtttcagggcacgatcat

SEQ ID NO: 837958 - DNA, 75 bp, synthetic construct
  source 1..75: mol_type = other DNA
cagatatccctgctttttaccatgactggtttatgaatcgaattaaagaagggtttctgttgatacgaaatccct

SEQ ID NO: 837959 - DNA, 75 bp, synthetic construct
  source 1..75: mol_type = other DNA
atttctgcatgaagtatgaccgcgatgaatttatggatatgacattacggcattacgacaaggtgatgactgtaa

SEQ ID NO: 837960 - DNA, 75 bp, synthetic construct
  source 1..75: mol_type = other DNA
agccgtggtacgcaggctgggggctgacggatgaccgtcatccccaggctgcgatgcttgccaaacgccgccagc

SEQ ID NO: 837961 - DNA, 75 bp, synthetic construct
  source 1..75: mol_type = other DNA
taacatccctggcgtagtatttattattgccactgacacccaacaattacagcattcaataaaagttatatatgg

SEQ ID NO: 837962 - DNA, 75 bp, synthetic construct
  source 1..75: mol_type = other DNA
tactcagaacggcgacagtgccggatgcgtggtggtggcaccgccagccgtaccgggcggtaaattccgcattct

SEQ ID NO: 837963 - DNA, 75 bp, synthetic construct
  source 1..75: mol_type = other DNA
atgatagatttctcatcagaaaaaatacataattatatcgacataatcattgaagattatgaaaatataaaagaa

SEQ ID NO: 837964 - DNA, 75 bp, synthetic construct
  source 1..75: mol_type = other DNA
caacagcggttccgccagccataacgtgcaggttaataccgcgctgcctggcgtcaccattaacgtggtggcaac

SEQ ID NO: 837965 - DNA, 75 bp, synthetic construct
  source 1..75: mol_type = other DNA
gcgcacatggcctgcctgtgtcagaaaatctgctggagcaggatttttacgccagtggtccgaaccagaagtggg

SEQ ID NO: 837966 - DNA, 75 bp, synthetic construct
  source 1..75: mol_type = other DNA
ccggcaacacttcccgcaccattaccgtcgatagccaggccccggccttaagcattgatccactgaccgctgata

SEQ ID NO: 837967 - DNA, 75 bp, synthetic construct
  source 1..75: mol_type = other DNA
caaaacctacacgaccagcgtaggcgctaacggtgcctggagcgtgcaggtgccgaccgccgatgcacaggcgtt

SEQ ID NO: 837968 - DNA, 75 bp, synthetic construct
  source 1..75: mol_type = other DNA
ggcttctatagattacctgaagcagcaccccgagctgtcaatcgacttcattaatcgctacggatatcttccatc

SEQ ID NO: 837969 - DNA, 75 bp, synthetic construct
  source 1..75: mol_type = other DNA
aattggaggaaaattatattgcggtttcgttgattcaattatcagtaatcagcttgagatttatatcactaattt

SEQ ID NO: 837970 - DNA, 75 bp, synthetic construct
  source 1..75: mol_type = other DNA
gggaatatatctatgttcttattcggcgtagttgtttccatattaatttggtttctttgcccaatgattgtttct

SEQ ID NO: 837971 - DNA, 75 bp, synthetic construct
  source 1..75: mol_type = other DNA
cgaagccgggtcgtttagttgtcacggcagaaaaccacacctgtattggcggactgggtgaagcagtagccgcgc

SEQ ID NO: 837972 - DNA, 75 bp, synthetic construct
  source 1..75: mol_type = other DNA
gtaagcgtccggaaaatgtcattgttcacaccgaccgtggaggccagtactgttcagctgattatcaggccctgc

SEQ ID NO: 837973 - DNA, 75 bp, synthetic construct
  source 1..75: mol_type = other DNA
cggcaagcctgcgccgtcagggactgagggcaaaggcctcccggaagttcagcccggtcagctaccgcgcacacg

SEQ ID NO: 837974 - DNA, 75 bp, synthetic construct
  source 1..75: mol_type = other DNA
acctttaaccctgatccagtctgggaatacatttgtccgctaccagtaactatcggtgaacaagtccttgcttaa

SEQ ID NO: 837975 - DNA, 75 bp, synthetic construct
  source 1..75: mol_type = other DNA
cggcgagcaccacgcataatctggcggtggatctcaccgttccggtgctgaccatcaacaccattgcgggcgatg

SEQ ID NO: 837976 - DNA, 75 bp, synthetic construct
  source 1..75: mol_type = other DNA
gcaggtgcgagatttgatgaccaaatatcctggtcaattagagaagattcagtctggcatgaagtgggcagacga

SEQ ID NO: 837977 - DNA, 75 bp, synthetic construct
  source 1..75: mol_type = other DNA
caatatctttgtgtcccagatggtaaaggggactatacttgtggtggccaagaccaacggggagaatcaaaagga

SEQ ID NO: 837978 - DNA, 75 bp, synthetic construct
  source 1..75: mol_type = other DNA
tagtaacctacagtcaaaatgaaaaagttaaagagatggctaatgcttatcttgaactcttgacagccaattccg

SEQ ID NO: 837979 - DNA, 75 bp, synthetic construct
  source 1..75: mol_type = other DNA
gggtattagcgcgtccgctaccgttattaccgtgggtactggagcggggtctttattcccttcccctgtatctgg

SEQ ID NO: 837980 - DNA, 75 bp, synthetic construct
  source 1..75: mol_type = other DNA
tggcgctccaaaagcgttctatgcaaacggcacctatacgcgctctcctctggcccgttatgcaaaagtaacgtt

SEQ ID NO: 837981 - DNA, 75 bp, synthetic construct
  source 1..75: mol_type = other DNA
gccgcgaagaagtcagccagcgatgcccgcacatcagcccgtgaggcggcaacccatgcgactgatgctgcaggc

SEQ ID NO: 837982 - DNA, 75 bp, synthetic construct
  source 1..75: mol_type = other DNA
ccgatctggcggcgttacccgatggcagcgcctccgcgcaggccagcgtcagcaatattaacggcaatagcgcct

SEQ ID NO: 837983 - DNA, 75 bp, synthetic construct
  source 1..75: mol_type = other DNA
tttaactctttccggcaccaccactaacgtagaagcagggcaaaccgtcactgtcacctttggcggtaaaaatta

SEQ ID NO: 837984 - DNA, 75 bp, synthetic construct
  source 1..75: mol_type = other DNA
cgatttaacggttaatgcctcggtcaccaatcaaaacggcaacaccggcagcggcacgcgggatatcaccatcga

SEQ ID NO: 837985 - DNA, 75 bp, synthetic construct
  source 1..75: mol_type = other DNA
gtaatcaggcagcaattgcttgataatacccaatcatttcatggtgttgatcttctcaagtttacttccttggat

SEQ ID NO: 837986 - DNA, 75 bp, synthetic construct
  source 1..75: mol_type = other DNA
taacggtgacgctgaacgggcaaaattacactgccaccacagatgcttccggcaactggagcactacagtgccag

SEQ ID NO: 837987 - DNA, 75 bp, synthetic construct
  source 1..75: mol_type = other DNA
cggtttgatgaccatgcgtgcgctggaaaccgttgaaaaactgcgtgctgacaatatcagtgccgcggtgcttca

SEQ ID NO: 837988 - DNA, 75 bp, synthetic construct
  source 1..75: mol_type = other DNA
cgtttaaacttcgctataaatcaactcaggaaaatgtacatgccgggcaagcaaatgctctgttgtattttgata

SEQ ID NO: 837989 - DNA, 75 bp, synthetic construct
  source 1..75: mol_type = other DNA
ataactatttatcatgggggagggtttgatgttattgagccaaaagaatatgacttattttttggtaataagatt

SEQ ID NO: 837990 - DNA, 75 bp, synthetic construct
  source 1..75: mol_type = other DNA
gccggagccagtacagtcaccgtaaccatcaacagcagcagtcagagccgggatgtgacatttatcgccgatgcc

SEQ ID NO: 837991 - DNA, 75 bp, synthetic construct
  source 1..75: mol_type = other DNA
gaaaccgacaacacttacccaataacagttatagcggaagattcgaaagggaatttctcccggcgtgaagaaagt

SEQ ID NO: 837992 - DNA, 75 bp, synthetic construct
  source 1..75: mol_type = other DNA
ccaaatacgcgctgaaaggttatgacatcgaagccgcttccttgcaatctgcgggcgggaaagttgctgtttccg

SEQ ID NO: 837993 - DNA, 75 bp, synthetic construct
  source 1..75: mol_type = other DNA
atgctaacgggaatgcacttgccgggcagacggtcagcgtgacggcaggcaacggtgcaacggtcgctccgacgg

SEQ ID NO: 837994 - DNA, 75 bp, synthetic construct
  source 1..75: mol_type = other DNA
gacaacacacaccagagtgtttccacaccatccacccagcctaatgtcagaacaactccttatatgctgggtgtg

SEQ ID NO: 837995 - DNA, 75 bp, synthetic construct
  source 1..75: mol_type = other DNA
aaatccggaaaaatcccaaatgattataaaataaattgtataaatgggcgtgctgaatttatatattgctctatt

SEQ ID NO: 837996 - DNA, 75 bp, synthetic construct
  source 1..75: mol_type = other DNA
ccggacggtacggtggaaatcagtgtcaccagccagacggcggggatcagtacagtcactgccagcatcaacagc

SEQ ID NO: 837997 - DNA, 75 bp, synthetic construct
  source 1..75: mol_type = other DNA
ttggcatggagctgacgctgcaaaccggtcattcgttgcaaaaacagttggacccggatgaagttgctgcccggc

SEQ ID NO: 837998 - DNA, 75 bp, synthetic construct
  source 1..75: mol_type = other DNA
tctgcctctgcacaggcttcagactggcttagtcgctggggaacggctcaggtttctcttggcattgatgaggat

SEQ ID NO: 837999 - DNA, 75 bp, synthetic construct
  source 1..75: mol_type = other DNA
attacgacgtctgaatcagtttcgcacttttgctcgcggctttgataatgttcgtcagggcgatgagctggacgt

SEQ ID NO: 838000 - DNA, 75 bp, synthetic construct
  source 1..75: mol_type = other DNA
ttcaccagtacgccagaaaccgataacacctggccgattgaagtcaccgctgaagatgtcaaaggcaatttttcg

SEQ ID NO: 838001 - DNA, 75 bp, synthetic construct
  source 1..75: mol_type = other DNA
accggctgaccacaatacagaacgacaggagccgcatccagacgatttatcagccggggagcttcacaccactca

SEQ ID NO: 838002 - DNA, 75 bp, synthetic construct
  source 1..75: mol_type = other DNA
ttacggcagattatcgccattagcgattttaacgatgtgatagcaggaaccgctggcggctggatcgatcgcgaa

SEQ ID NO: 838003 - DNA, 75 bp, synthetic construct
  source 1..75: mol_type = other DNA
ggacggtggagatctctgtcaccagccagacggcgggcaccagtgcggtcaccgccagcatcaacaacagcagcc

SEQ ID NO: 838004 - DNA, 75 bp, synthetic construct
  source 1..75: mol_type = other DNA
acggcccaagccatcaggctacggaagatctggcaatcatgcgtggcattccgggcatgacaattattgatccat

SEQ ID NO: 838005 - DNA, 75 bp, synthetic construct
  source 1..75: mol_type = other DNA
ttacagcctgggtggcatttaacgaaactcatgaagtgcttgaatttgatatggcaccaaatggcagccagcatt

SEQ ID NO: 838006 - DNA, 75 bp, synthetic construct
  source 1..75: mol_type = other DNA
gcggggcaatcgatgttaccgataataatagcgacagcaagcatccttcaggttatacgataataaataacaccg

SEQ ID NO: 838007 - DNA, 75 bp, synthetic construct
  source 1..75: mol_type = other DNA
gcgtgacggcagacaacagtgcaacggtcactccgacggttatcaccgagccggacggcacggtggagatctcag

SEQ ID NO: 838008 - DNA, 75 bp, synthetic construct
  source 1..75: mol_type = other DNA
tggtcacccgggataactcggtggctgacggtgcaatggcgaacacgctgcgggtgagggtgaccgatgcgttcg

SEQ ID NO: 838009 - DNA, 75 bp, synthetic construct
  source 1..75: mol_type = other DNA
gatgcaaaaggcaacctgctcaatgacgtcaaggtcaccttcaatgttaattcagcagaggcgaaactgagccaa

SEQ ID NO: 838010 - DNA, 75 bp, synthetic construct
  source 1..75: mol_type = other DNA
ttgaggctaagatcaatcaaagcagcgatagtaaaacggtgaactttgttgctgatgttagcacggcgcaagtag

SEQ ID NO: 838011 - DNA, 75 bp, synthetic construct
  source 1..75: mol_type = other DNA
gtaatacgcttgccgggcagacagtcagcgtgttggcggacaacggtgccacgactgctccgacggtcaccacgc

SEQ ID NO: 838012 - DNA, 75 bp, synthetic construct
  source 1..75: mol_type = other DNA
gatagtaaaacggtgaactttgttgctgatgttagcacggcgcaggtcgcggagctggtggtcattaaggatggt

SEQ ID NO: 838013 - DNA, 75 bp, synthetic construct
  source 1..75: mol_type = other DNA
cattcctattcaaaaatcgagcaagaacttgccatcgccagacgcactttaatctctgaaactgtcgaaatagaa

SEQ ID NO: 838014 - DNA, 75 bp, synthetic construct
  source 1..75: mol_type = other DNA
aggcgctgtcctctaatccgtccaacctgcgtggtatgcagggtaacgtcattattgatgaggcggcctttcagg

SEQ ID NO: 838015 - DNA, 75 bp, synthetic construct
  source 1..75: mol_type = other DNA
tactgaacagcgcatccgctgcggcaattcttgctggtgagtttgatcaggaccaggtacttttgccctaccagc

SEQ ID NO: 838016 - DNA, 75 bp, synthetic construct
  source 1..75: mol_type = other DNA
gtttccgtgcggcgtttgaagatgatgagctgatccttccgaagcatgaagacgtgatcaatgacctcggggcca

SEQ ID NO: 838017 - DNA, 75 bp, synthetic construct
  source 1..75: mol_type = other DNA
gacaaggacattctgacgttcgtcgtgtacttcgccagcggatttaaggtcaaggcgctgtccagtaatccgggc

SEQ ID NO: 838018 - DNA, 75 bp, synthetic construct
  source 1..75: mol_type = other DNA
gcaatggaagcatctctcctttcgaagttgaaagctgagctttctgccaagaaagatagcgaagcagcagagtcg

SEQ ID NO: 838019 - DNA, 75 bp, synthetic construct
  source 1..75: mol_type = other DNA
tatttttcctcgctgcagattgcgctgatcagcgacgacccgcctgtttataacatctcggcaatcacaaacgca

SEQ ID NO: 838020 - DNA, 75 bp, synthetic construct
  source 1..75: mol_type = other DNA
ccggccgccgggtcggtgatccagcaaatcctgccgacgtattacgtaaaccgtattcagaaacagttcagccag

SEQ ID NO: 838021 - DNA, 75 bp, synthetic construct
  source 1..75: mol_type = other DNA
gtgagaacctatggccgaaactctgaggggaagtgggtcctggtggaaaccgacgaatatgggtttaatgactcg

SEQ ID NO: 838022 - DNA, 75 bp, synthetic construct
  source 1..75: mol_type = other DNA
aaatggcattcaacgttgggcatctaagctatgtccaaaaattgatgttgaagaaaataaaaacattcatctgga

SEQ ID NO: 838023 - DNA, 75 bp, synthetic construct
  source 1..75: mol_type = other DNA
gaggcagtaagaaacgatgattatcaactacccgtatataccgcaagcctctttcgtcacaacgttggtcactca

SEQ ID NO: 838024 - DNA, 75 bp, synthetic construct
  source 1..75: mol_type = other DNA
aggggaagtgggtcctggtggaaaccgacgaatatgggtttaatgactcggtgtatttgaccaccctgatccaga

SEQ ID NO: 838025 - DNA, 75 bp, synthetic construct
  source 1..75: mol_type = other DNA
aaaagtgttgcgctttaccggcacaccggaatttaacgcactgacggaaagccagcgccgggcagatatccggga

SEQ ID NO: 838026 - DNA, 75 bp, synthetic construct
  source 1..75: mol_type = other DNA
aaagcctttacagatatggtgacccacaaactggaagacggcgatcggctggtagtgctcaagctggacaggctg

SEQ ID NO: 838027 - DNA, 75 bp, synthetic construct
  source 1..75: mol_type = other DNA
aataacagtagtggcgacgatgatatccctcatcttacttcactggcagaattggagatgcaagctattgagcat

SEQ ID NO: 838028 - DNA, 75 bp, synthetic construct
  source 1..75: mol_type = other DNA
aaggctttctccgaccttgttaaccataaactggaagccggggataagttagttgtactcaagttggatcgcttg

SEQ ID NO: 838029 - DNA, 75 bp, synthetic construct
  source 1..75: mol_type = other DNA
tatgggtgacccaatgatgtgtgagattgatgaacgtatgattgctgattacagatcgcgccgtcttgacagtgg

SEQ ID NO: 838030 - DNA, 75 bp, synthetic construct
  source 1..75: mol_type = other DNA
ttgaatggtattgttaattcaccagtcagtaatggcgttgtgaggtttactgctgaaaacaataaatcaggattt

SEQ ID NO: 838031 - DNA, 75 bp, synthetic construct
  source 1..75: mol_type = other DNA
cgctaagtgggatgttaacattacttaaaatgttaatggggtttataattgcgaaagtaattgcggtttataccg

SEQ ID NO: 838032 - DNA, 75 bp, synthetic construct
  source 1..75: mol_type = other DNA
atatactcatctgagagatgcatatttttatagatgtaaactcatagaacatacagttcaattttattttttaaa

SEQ ID NO: 838033 - DNA, 75 bp, synthetic construct
  source 1..75: mol_type = other DNA
atgcgactgatcaatcgaggaagtaagcaatcacctttagctcgccaagcatgcgacatcgcgctggcagctcac

SEQ ID NO: 838034 - DNA, 75 bp, synthetic construct
  source 1..75: mol_type = other DNA
aatccgatgttctgctgccgtatcagaaacgttgggtggcggatgatgccgacctgaaaattgccgaaaaacccc

SEQ ID NO: 838035 - DNA, 75 bp, synthetic construct
  source 1..75: mol_type = other DNA
aaagcctttgccgatatgatcaatcataagctggagactggtgataggttggtcgtcctcaagcttgatcgctta

SEQ ID NO: 838036 - DNA, 75 bp, synthetic construct
  source 1..75: mol_type = other DNA
gcagaaagattgatagcttcggggactggtcaccacagggtgaacatccgctacatactattcagcgtaaagaac

SEQ ID NO: 838037 - DNA, 75 bp, synthetic construct
  source 1..75: mol_type = other DNA
ttgattaataacttcgtcaatcaaggttataacgccattatcgttccgcggtttcgcctgatggcttgtgtccgg

SEQ ID NO: 838038 - DNA, 75 bp, synthetic construct
  source 1..75: mol_type = other DNA
tgtcttcaggaggcctgaatacccggcccggtggcagtatcggccggacgacatccgccgtctctcagggaatgc

SEQ ID NO: 838039 - DNA, 75 bp, synthetic construct
  source 1..75: mol_type = other DNA
atataacactgacgccgaaagatattggtacgcttaactcaacaacaatgtcattcagcggtggtgctggttggt

SEQ ID NO: 838040 - DNA, 75 bp, synthetic construct
  source 1..75: mol_type = other DNA
tcactcaagctgcacgatttttatacagaacccagtccagtatttcattacgtctgaaacaactagaaagtaagg

SEQ ID NO: 838041 - DNA, 75 bp, synthetic construct
  source 1..75: mol_type = other DNA
acagcgttttgaaaacgcttcaaaggaaagtaccgaatttacgaaaagaattaatgtaatcggtgtaactgacca

SEQ ID NO: 838042 - DNA, 75 bp, synthetic construct
  source 1..75: mol_type = other DNA
gagaatgaagatgatgcgtggttaaacgcagttaacggtatcaagaggttaattggtaacattagtgaaaaaaaa

SEQ ID NO: 838043 - DNA, 75 bp, synthetic construct
  source 1..75: mol_type = other DNA
acataaggtagtgtctgcggccagtgtgaatacaagtgctgcaggagcgcacactcatagtgtcagcggcacagc

SEQ ID NO: 838044 - DNA, 75 bp, synthetic construct
  source 1..75: mol_type = other DNA
ttaaaatagataaaagctttatagacacacttactacagcgggaagacgaaacgccagttttagatattattatt

SEQ ID NO: 838045 - DNA, 75 bp, synthetic construct
  source 1..75: mol_type = other DNA
cgtggacacagcagtgcgatgaacgcggcctgccggtgagtctggtatcgccacagggcgaagagacccggctgg

SEQ ID NO: 838046 - DNA, 75 bp, synthetic construct
  source 1..75: mol_type = other DNA
ggtgaagatgcgcggccccggcggtcagtcagtgcggttacagtggcagcagcaccataaactgagcggccttga

SEQ ID NO: 838047 - DNA, 75 bp, synthetic construct
  source 1..75: mol_type = other DNA
aaaaattaaggcgatagactatgagcctgatagccatagttcattaaaaattcgtatttccgcgttgcaaaaggc

SEQ ID NO: 838048 - DNA, 75 bp, synthetic construct
  source 1..75: mol_type = other DNA
aggaggtgatcgccgccgcaaggactaccacctaactctcgacacagccaaagagcttgcgatggttgacgactg

SEQ ID NO: 838049 - DNA, 75 bp, synthetic construct
  source 1..75: mol_type = other DNA
gaaaatcaggactatattttggtttccccaaatcgggaaatcaaaggtcgaggaggcgatcgccgtagcaaatac

SEQ ID NO: 838050 - DNA, 75 bp, synthetic construct
  source 1..75: mol_type = other DNA
gatttaccgtggaacccgcggtgcagcagcgttttgaaaacgcctcaaaggaaagtaccgaatttacgaaaagaa

SEQ ID NO: 838051 - DNA, 75 bp, synthetic construct
  source 1..75: mol_type = other DNA
attatattatataatggcacaaatataaatattgaatggtatgtattaagtattattactggtggattactatac

SEQ ID NO: 838052 - DNA, 75 bp, synthetic construct
  source 1..75: mol_type = other DNA
taaagagtttagattattggttaatgcagataaaccagatgcatattcccctgttaaaaaaaacgtggaataata

SEQ ID NO: 838053 - DNA, 75 bp, synthetic construct
  source 1..75: mol_type = other DNA
ctggtcaccacagggtgaacatccgctacatactattcagcgtaaagaacacgatgaaagaattaagcttgagca

SEQ ID NO: 838054 - DNA, 75 bp, synthetic construct
  source 1..75: mol_type = other DNA
gctattgagccgtcagaatttgagattcaggatgaattgtcacagaagccgtatgtttacttcacatacgaagac

SEQ ID NO: 838055 - DNA, 75 bp, synthetic construct
  source 1..75: mol_type = other DNA
cattttatatttttgatgccatcggctatgccatatgtgttataagtattactgtgttccaaaaatatctattac

SEQ ID NO: 838056 - DNA, 75 bp, synthetic construct
  source 1..75: mol_type = other DNA
aatttcaattatgaacgtatgcaagccggtggtttttgttttagcattatcccggcgctgaaaaagattcatcgt

SEQ ID NO: 838057 - DNA, 75 bp, synthetic construct
  source 1..75: mol_type = other DNA
tttttcaaacgctcttggacgactccagaggaccagttttattgtttctgaaatatctccttattatgttaagta

SEQ ID NO: 838058 - DNA, 75 bp, synthetic construct
  source 1..75: mol_type = other DNA
ctgcggctaacgttaatgcttatacgaaaacagaagtcataaatcttctgagctcttatgtgaagagtagtgctc

SEQ ID NO: 838059 - DNA, 75 bp, synthetic construct
  source 1..75: mol_type = other DNA
ctcacaagttgctagcgagatatttctttgtgctattgcttggattcttcatcatgaaataagtcatgttgtttt

SEQ ID NO: 838060 - DNA, 75 bp, synthetic construct
  source 1..75: mol_type = other DNA
gcattgcaatactttctttgatggtttatttgctatgccttcatttagattacaggctaaaaaaaccatctttcg

SEQ ID NO: 838061 - DNA, 75 bp, synthetic construct
  source 1..75: mol_type = other DNA
acgccacaaaaaaccatgtttatcggctttgtgctgtggtgcgtatttcacgtgctgtttctggtctttggtctg

SEQ ID NO: 838062 - DNA, 75 bp, synthetic construct
  source 1..75: mol_type = other DNA
tgcccctgctggccttgctggcgatctgggcgcgcggcgagtcgccgaagatcgagcatgtgctgctcgaagtat

SEQ ID NO: 838063 - DNA, 75 bp, synthetic construct
  source 1..75: mol_type = other DNA
caggaaaaatatgatgtaataataacctgtacaggctatgaaatgcctgattactcgttcattcgtaagcgtaca

SEQ ID NO: 838064 - DNA, 75 bp, synthetic construct
  source 1..75: mol_type = other DNA
ttgcttccagctatatatctatctataaatagaatagttaataagggtaaagaagttactttatcatattcagta

SEQ ID NO: 838065 - DNA, 75 bp, synthetic construct
  source 1..75: mol_type = other DNA
ctcgcgacgattttttattttattcccttctgtctgatcatcgcagaatttgtttcgttaaataaaaactcagaa

SEQ ID NO: 838066 - DNA, 75 bp, synthetic construct
  source 1..75: mol_type = other DNA
agcaagcgttgcgcatcgcccaggcgattgccgagcaccgtccggcgctgaccttgtgggtgtcatgcagaagta

SEQ ID NO: 838067 - DNA, 75 bp, synthetic construct
  source 1..75: mol_type = other DNA
gccgcgcagacgacgcgatatcgagaccatgtcatcatttgcggcgcgggcgagcttggcctgacagtcagcgag

SEQ ID NO: 838068 - DNA, 75 bp, synthetic construct
  source 1..75: mol_type = other DNA
ttcctcttatatcatctggatggtgagtacctccgcgaaagtttgggtaccgttctcaacattcctctatggtag

SEQ ID NO: 838069 - DNA, 75 bp, synthetic construct
  source 1..75: mol_type = other DNA
atggcgaaaaatgactttaaagcgtttgcaacggatcggaatgccaatgttatgtcgcaggaggaatgggaagcg

SEQ ID NO: 838070 - DNA, 75 bp, synthetic construct
  source 1..75: mol_type = other DNA
ttttaattgtaacgtcgacaattaatttagaagtgaaccgccccgggtttcctggagagtgttttatctgtgaac

SEQ ID NO: 838071 - DNA, 75 bp, synthetic construct
  source 1..75: mol_type = other DNA
tatatcaccccggacccgattgggttgagaggtggatggaatatgtatcagtatccgttgaatcccatacaagtg

SEQ ID NO: 838072 - DNA, 75 bp, synthetic construct
  source 1..75: mol_type = other DNA
aatgttaataacaatggaagtaaagattatggtataatgcaaataaatgactttcattctaaaagacttagagaa

SEQ ID NO: 838073 - DNA, 75 bp, synthetic construct
  source 1..75: mol_type = other DNA
ctctctgattgaggacgtggccagtaccgatgtcggcgcgctcatcgtttgtgatcaagcaagggttgacctgat

SEQ ID NO: 838074 - DNA, 75 bp, synthetic construct
  source 1..75: mol_type = other DNA
tccgtactcctcttacgaatatgaaattccttctggtgcatcaggaaaagtcagctggacagtgattacggatta

SEQ ID NO: 838075 - DNA, 75 bp, synthetic construct
  source 1..75: mol_type = other DNA
agcgccgggaggcggtcctggtattgcgtggatgcaagggatgcagattgtcaacggtgggcagacgacggcttc

SEQ ID NO: 838076 - DNA, 75 bp, synthetic construct
  source 1..75: mol_type = other DNA
ttcaagggaaaatcaaagaagttaaagttaaaatttcagagttagatggttttgttaaggttctaaaaagaagca

SEQ ID NO: 838077 - DNA, 75 bp, synthetic construct
  source 1..75: mol_type = other DNA
atataaaaatactctcattaagagacagaaaagctttttcttatgagttttcagaaggggttaacttcatatatg

SEQ ID NO: 838078 - DNA, 75 bp, synthetic construct
  source 1..75: mol_type = other DNA
tagatgaccgtattctaaagcaagtttttaatacatactgggagcaatttgaaaacaattttaaacgagctttag

SEQ ID NO: 838079 - DNA, 75 bp, synthetic construct
  source 1..75: mol_type = other DNA
gcttataacaacggcattgtgattgttgctgatcaggtcaggcttggtgaagcgccgggaggtggccccggtatt

SEQ ID NO: 838080 - DNA, 75 bp, synthetic construct
  source 1..75: mol_type = other DNA
aaccaaacggatcttgcagagatctggaatcaacaaggcattgaggaaacgatgggcaaccggcttgtcagctta

SEQ ID NO: 838081 - DNA, 75 bp, synthetic construct
  source 1..75: mol_type = other DNA
aaccaactgtaaggcatttccctgggttgccaaaaaacaaacagtatcaaattactcaccatatttgtttcatgc

SEQ ID NO: 838082 - DNA, 75 bp, synthetic construct
  source 1..75: mol_type = other DNA
agaaatgtggtggccagactgagcggtatgtctgcacctgtggatgaaccgcccgggaaacaggagaaaaaccag

SEQ ID NO: 838083 - DNA, 75 bp, synthetic construct
  source 1..75: mol_type = other DNA
ggatccgtaacgggctgggaattgggcgcttgtttgagcctgtctggcagttacagccggacagggagcgcttta

SEQ ID NO: 838084 - DNA, 75 bp, synthetic construct
  source 1..75: mol_type = other DNA
gccttcggtggcgcgatgtggaaacagccgcagtccggggtgtatgtggattacaaatcctctccggcagagtaa

SEQ ID NO: 838085 - DNA, 75 bp, synthetic construct
  source 1..75: mol_type = other DNA
gtatccgtcagggaaaaaaagttatcaattgggagacgcatagtctaactgttgataataatcagataatattat

SEQ ID NO: 838086 - DNA, 75 bp, synthetic construct
  source 1..75: mol_type = other DNA
attcggcccgatttgaacggctatggaagtcgtcaaaaaaggcgaaaaagcaactttttgacccaaactgtcaac

SEQ ID NO: 838087 - DNA, 75 bp, synthetic construct
  source 1..75: mol_type = other DNA
tggtagtaagtgatggagaagaaagattcacagagcttgatttttactatgggtcaaaagcacttgaaggcacgt

SEQ ID NO: 838088 - DNA, 75 bp, synthetic construct
  source 1..75: mol_type = other DNA
gggtaacagatatttcaattaataaaaatctcaaaactgataccatgtggattcaggtggaatctagcgttgtaa

SEQ ID NO: 838089 - DNA, 75 bp, synthetic construct
  source 1..75: mol_type = other DNA
tggcggatttggtttgaagcctattttttactctgctatgtaccgtgcttaatttactattttttccattgttga

SEQ ID NO: 838090 - DNA, 75 bp, synthetic construct
  source 1..75: mol_type = other DNA
catcctgtactttctttaaagatcgggtaaaaatagtcatttttacatacaatattatgaatatttatgaatcat

SEQ ID NO: 838091 - DNA, 75 bp, synthetic construct
  source 1..75: mol_type = other DNA
gttcaggataccggcatcagccctcagtctgacgatgcgatgacgctggtgaaaacagggggaggggatgcttcg

SEQ ID NO: 838092 - DNA, 75 bp, synthetic construct
  source 1..75: mol_type = other DNA
ctgcataaaagcatcggtattttgttaatgatggggctggttattcgcgttctgtggcgtgtcatatctccaccg

SEQ ID NO: 838093 - DNA, 75 bp, synthetic construct
  source 1..75: mol_type = other DNA
tatcatccctaattgccaataataaatacaataaagaaaccgagagtcgccgccaattacttaaaaggactttaa

SEQ ID NO: 838094 - DNA, 75 bp, synthetic construct
  source 1..75: mol_type = other DNA
tcccgactggcccgaatgacatgatgcactcctatctgggcaggtgtctgctgagccaaatgaattatgaagatt

SEQ ID NO: 838095 - DNA, 75 bp, synthetic construct
  source 1..75: mol_type = other DNA
tataaaggcttcaacgattaaccatgacctttttgccctgagcggtatgtttaaggcgatggctgagatcgatga

SEQ ID NO: 838096 - DNA, 75 bp, synthetic construct
  source 1..75: mol_type = other DNA
actcattttatgatgaagggcgggaatataattgcgttacaaagaattcttggtcacgcagatatttcacaaaca

SEQ ID NO: 838097 - DNA, 75 bp, synthetic construct
  source 1..75: mol_type = other DNA
gtttggggaggtggggaaggcggtgattctgcatttgctccacaaccaatacaatttataaagaccttggctaag

SEQ ID NO: 838098 - DNA, 75 bp, synthetic construct
  source 1..75: mol_type = other DNA
gaaatagagtttgaaactcttactaaggctctgggacgtgttgaagaagaaattaaacaggcttgtgaattacaa

SEQ ID NO: 838099 - DNA, 75 bp, synthetic construct
  source 1..75: mol_type = other DNA
accgcaacaaaatatcccttttaccctgaaaggttgcggtgcgctggtagactggccccctgaatctccagacaa

SEQ ID NO: 838100 - DNA, 75 bp, synthetic construct
  source 1..75: mol_type = other DNA
agtgaccatcaagcgctggctaaggagtaccgtcaagagttggcacagattatcagcttcaatgattttctgagt

SEQ ID NO: 838101 - DNA, 75 bp, synthetic construct
  source 1..75: mol_type = other DNA
gtgccaattttacaacgcgaagggcgtttcaaatttgacctgacggcgggcgattttcgtagcggtaatagtcag

SEQ ID NO: 838102 - DNA, 75 bp, synthetic construct
  source 1..75: mol_type = other DNA
cagaaagttattttaatcccgcatttttattatcaaatggtgagcctgtcgctgatttatctcgtttcgaaaaag

SEQ ID NO: 838103 - DNA, 75 bp, synthetic construct
  source 1..75: mol_type = other DNA
caggggagaagggacagccgccatgaactgcgcgtcaggattgccggagagggctggtcaccgtcagtgacaggt

SEQ ID NO: 838104 - DNA, 75 bp, synthetic construct
  source 1..75: mol_type = other DNA
tattggcgggacaggtaaatacaataaggcgtcatcaggcccagcgacaggaaataatggaaatcagggatatat

SEQ ID NO: 838105 - DNA, 75 bp, synthetic construct
  source 1..75: mol_type = other DNA
tgtttcatttttacggggggtcaacgaccggaaaaacaattcttcttcagcttcccatgtcagttcatgggcatg

SEQ ID NO: 838106 - DNA, 75 bp, synthetic construct
  source 1..75: mol_type = other DNA
gagctggtacgtcgaaaactgctgcgggtagaaagtaaagggcattacaaaaagcgtcctcttactggtatggac

SEQ ID NO: 838107 - DNA, 75 bp, synthetic construct
  source 1..75: mol_type = other DNA
atgccgggaatatggtcggcgtggcgttaacaaccgaaggtgaatgtggcctcgatatggaactacagcgtgcta

SEQ ID NO: 838108 - DNA, 75 bp, synthetic construct
  source 1..75: mol_type = other DNA
atgtccattcgtaatgaacacgaaatgattgttgagaacagaccaagtgcacttgatattcacgaattaactttg

SEQ ID NO: 838109 - DNA, 75 bp, synthetic construct
  source 1..75: mol_type = other DNA
taagggaaaccgagattaatttggtgaaatcaactctggctaatttgattcgtgaccatcaaaaaatcgctaagg

SEQ ID NO: 838110 - DNA, 75 bp, synthetic construct
  source 1..75: mol_type = other DNA
cagggatggaagcccgccagggcggagacagctccgctggctccgttcacgacagcccgccccgccagggggacg

SEQ ID NO: 838111 - DNA, 75 bp, synthetic construct
  source 1..75: mol_type = other DNA
gctgcctgtcggagtcgggcctgacgaccggatgccgccaggcagccgggagccgaaggggcgcccggcagacag

SEQ ID NO: 838112 - DNA, 75 bp, synthetic construct
  source 1..75: mol_type = other DNA
tcactgccacggccggaaacgactgtccgggggcagaccgcaaaagtttttgcctgcttttgggcaaaaactttt

SEQ ID NO: 838113 - DNA, 75 bp, synthetic construct
  source 1..75: mol_type = other DNA
tgggactgggaagtatcttaaagaaattgattttactataaatgggtttagtcagaagatgtatttgatggcggt

SEQ ID NO: 838114 - DNA, 75 bp, synthetic construct
  source 1..75: mol_type = other DNA
atgtcatggagctttctgttttttaaaaaacaattcattgatagttgcttgaataacgaaaaatgtatcctgcat

SEQ ID NO: 838115 - DNA, 75 bp, synthetic construct
  source 1..75: mol_type = other DNA
tggaacatgctgcacgcctttggcgggcggatgggcttctccggaatgcaggaagtgctggcgcaggagatccca

SEQ ID NO: 838116 - DNA, 75 bp, synthetic construct
  source 1..75: mol_type = other DNA
aatccggcaacccaatggcagtcgaagctggattacaaccgctggctggagatggacttaaaaggcacgtaccag

SEQ ID NO: 838117 - DNA, 75 bp, synthetic construct
  source 1..75: mol_type = other DNA
ccacattcgcactgacgccaacggtgaaattactcaattcatccctgtggaacctgcagcagttcgctacctgtc

SEQ ID NO: 838118 - DNA, 75 bp, synthetic construct
  source 1..75: mol_type = other DNA
cattatgacgtttacctccctcctgaactttttgctcaggcttacaagttaaacaataaggaaatgaatgcgcaa

SEQ ID NO: 838119 - DNA, 75 bp, synthetic construct
  source 1..75: mol_type = other DNA
ttttagacaccgacccagagcagaaggttaatgaggtgaaaaatttcctcactgctctttcagatagcatttgct

SEQ ID NO: 838120 - DNA, 75 bp, synthetic construct
  source 1..75: mol_type = other DNA
attgccctgcttttcttcttcggttttaatactgtcttgggctggatagatcaaaacactgctgaagacgatatt

SEQ ID NO: 838121 - DNA, 75 bp, synthetic construct
  source 1..75: mol_type = other DNA
aaagcagctgaactgaagaaggcttctgctcggtgccagccctttactcaagggggagtcatcaggttgtccgag

SEQ ID NO: 838122 - DNA, 75 bp, synthetic construct
  source 1..75: mol_type = other DNA
atgctgaccttggccgcatttgcaattattttcttcctgccttcgttaattttcagcatttccgtgcctgaaagt

SEQ ID NO: 838123 - DNA, 75 bp, synthetic construct
  source 1..75: mol_type = other DNA
gagcgacataatctgaatctgagacaacacctggcaaggccgggacggaagtcactgtcgttctcaaaatcggtg

SEQ ID NO: 838124 - DNA, 75 bp, synthetic construct
  source 1..75: mol_type = other DNA
gcattccaattcatgtgtttatcgccggtcgcagcatccgtgatgccgcttctccggttgaagccgcgcgtcagt

SEQ ID NO: 838125 - DNA, 75 bp, synthetic construct
  source 1..75: mol_type = other DNA
ctttatcgcgggccgtagtatccgtgatgccgcttctccggtggaagccgcacgtcagttcaaacgttccatcgc

SEQ ID NO: 838126 - DNA, 75 bp, synthetic construct
  source 1..75: mol_type = other DNA
atgaagattcgagaatgcaaagctgccgaagcagaccgcaaattctttaaagtctcagccgggattgactggctg

SEQ ID NO: 838127 - DNA, 75 bp, synthetic construct
  source 1..75: mol_type = other DNA
tgaggtatttggcgcattgatggttgcatggcgccttctgaataccgcctttgcgatgtcgcccattggccgtgt

SEQ ID NO: 838128 - DNA, 75 bp, synthetic construct
  source 1..75: mol_type = other DNA
tggtggtacaggtggtaatagtggcccaactgcacgtactgcattatctgtaatgtatgagaataaaacatcatt

SEQ ID NO: 838129 - DNA, 75 bp, synthetic construct
  source 1..75: mol_type = other DNA
gaaatatatgataatgaatatgaagaaaaactagctggacaaattaatctcgatccaattgatattacagtacac

SEQ ID NO: 838130 - DNA, 75 bp, synthetic construct
  source 1..75: mol_type = other DNA
caaatgtcatcaaaatgggggtggccgttgaaggagctgcactgtctgtggtggcctttacggctaagattgcct

SEQ ID NO: 838131 - DNA, 75 bp, synthetic construct
  source 1..75: mol_type = other DNA
taaaatcggctccagtctcgctgatggacttgctggctctctcgacaggctgcgccgccagatactggaaaactt

SEQ ID NO: 838132 - DNA, 75 bp, synthetic construct
  source 1..75: mol_type = other DNA
gcgtccgcagttcaatcaaaatccttggttcgctggtggacgctctgcgaaaggttattagtggcgatttctcag

SEQ ID NO: 838133 - DNA, 75 bp, synthetic construct
  source 1..75: mol_type = other DNA
ctggcgcaaaggtatcaaaacgctctattacattcgcctgcgtcagatggcgctggaaggcactgaaattgaagg

SEQ ID NO: 838134 - DNA, 75 bp, synthetic construct
  source 1..75: mol_type = other DNA
ggtatgttgatcctctgggattagcaacgtgtcctatactcagacagtgggcgctgactaaccttgaagccagtc

SEQ ID NO: 838135 - DNA, 75 bp, synthetic construct
  source 1..75: mol_type = other DNA
aaaacttgggtaaaacccataattagcagcactaacgatacttttcggattcgcttccgcgatctactggtaaaa

SEQ ID NO: 838136 - DNA, 75 bp, synthetic construct
  source 1..75: mol_type = other DNA
tcgctcttgcaattgcaaatggtggtactggtgcattagatctaaataccgcacgtggcaatttacaagcagtat

SEQ ID NO: 838137 - DNA, 75 bp, synthetic construct
  source 1..75: mol_type = other DNA
tggtggcgagcgatcttcacggcgaacagccgcaggcggtaccgggacgcaggggttcaggcaccacgctggata

SEQ ID NO: 838138 - DNA, 75 bp, synthetic construct
  source 1..75: mol_type = other DNA
tagataaactcatcgctatacatgagtgcagtgctctggaggctaatgaaattggtttcattgctcggtttttaa

SEQ ID NO: 838139 - DNA, 75 bp, synthetic construct
  source 1..75: mol_type = other DNA
ccacggtgccgccatgcctcagtctgtgtttgaggctatgactgatgccgcctataacctgggctgtaccagtct

SEQ ID NO: 838140 - DNA, 75 bp, synthetic construct
  source 1..75: mol_type = other DNA
ccgcgaaacaggcttatgatctgctgaagacaataaaagaaaccagagacgatgctgttatcgctaaagctattg

SEQ ID NO: 838141 - DNA, 75 bp, synthetic construct
  source 1..75: mol_type = other DNA
gcgcacagaccatcaccgccagcgtcagcgatcgggcgggtaatagcgacgacgccagccgcaccgtgaccgtta

SEQ ID NO: 838142 - DNA, 75 bp, synthetic construct
  source 1..75: mol_type = other DNA
gctttacaggcgctgggcaacggcgagctgaccatttcggcttcggtaacgaacagcgtaggcaataccggtaac

SEQ ID NO: 838143 - DNA, 75 bp, synthetic construct
  source 1..75: mol_type = other DNA
atacattgaacagttgttcatgctgatatctcttgcaggcatagcttcctatcttggttatgggctacttgataa

SEQ ID NO: 838144 - DNA, 75 bp, synthetic construct
  source 1..75: mol_type = other DNA
ttcattggtagcacgcatatgataggtattggtgctgcttttatctgcgtccccttcatagcttcatttctacat

SEQ ID NO: 838145 - DNA, 75 bp, synthetic construct
  source 1..75: mol_type = other DNA
tgcctcctgctcgttatgtgcgttcctatgcacctgcgcagcaaagtgttgcggcagggagtgaatggaccggga

SEQ ID NO: 838146 - DNA, 75 bp, synthetic construct
  source 1..75: mol_type = other DNA
acctgccgggtctgcgcgtggataccgtggcgggcgatgatatcgtcaacagcatcgaacacgggcaggcgctgg

SEQ ID NO: 838147 - DNA, 75 bp, synthetic construct
  source 1..75: mol_type = other DNA
gtcaggcaagcaaggccaatattatatgagtctattaaaaaaagacataggtgagatggctctaaaagttatcac

SEQ ID NO: 838148 - DNA, 75 bp, synthetic construct
  source 1..75: mol_type = other DNA
aggcagataaacttctgtactttaatacaggagggaatatcacgctgtctccgttgtcagtaaaagcccgttcac

SEQ ID NO: 838149 - DNA, 75 bp, synthetic construct
  source 1..75: mol_type = other DNA
gcagccgatctccaggcgttgggcaatggcgatttgaccattaccgcctcggtcaccaacgcgaatggcaatacg

SEQ ID NO: 838150 - DNA, 75 bp, synthetic construct
  source 1..75: mol_type = other DNA
cgaacgtgcaggccagcgttagcagcgcgagcggtaacagcgcctcggcgatccatgcgtacagcgttgacgcca

SEQ ID NO: 838151 - DNA, 75 bp, synthetic construct
  source 1..75: mol_type = other DNA
gcagccgatctcgcaaccttgcctgacggcgcagcaaacgtccaggccagcgtcagtagcgtcgcaggtaacagc

SEQ ID NO: 838152 - DNA, 75 bp, synthetic construct
  source 1..75: mol_type = other DNA
ccaacatcaccgaatttggtgccacgccgctgtttaccaccgacgaattacgcagcgcccatgtcgcaatggcgc

SEQ ID NO: 838153 - DNA, 75 bp, synthetic construct
  source 1..75: mol_type = other DNA
ggagatgcgaaggacggtctgaacgggcgtctggctaaagttgacggtatcgatgtaccggcagtggatgaaaac

SEQ ID NO: 838154 - DNA, 75 bp, synthetic construct
  source 1..75: mol_type = other DNA
tccggcctacggttcaggcacaggtttgtaggcctgataagacgcgtaagcgtcgcatcaggcaatggtgctcgg

SEQ ID NO: 838155 - DNA, 75 bp, synthetic construct
  source 1..75: mol_type = other DNA
cgcatcaggcaaccggctcgggcgttagatgttggatgcggcgtaaccgccttatccaacctacggggtggagca

SEQ ID NO: 838156 - DNA, 75 bp, synthetic construct
  source 1..75: mol_type = other DNA
agtctctatacttgaaagtgctgattataatgttgaattcacaaactcacctgttcgtgcattcgaaaaactgca

SEQ ID NO: 838157 - DNA, 75 bp, synthetic construct
  source 1..75: mol_type = other DNA
tgagaagattgaactgaaagatggagctgcactgaatttgttggctgagaatttaaattctgcctctatagaggg

SEQ ID NO: 838158 - DNA, 75 bp, synthetic construct
  source 1..75: mol_type = other DNA
tacagaagctggtcgataaaggcggctatcgcccgctggaatggcgttataaatgggatgtgcgaagccaactga

SEQ ID NO: 838159 - DNA, 75 bp, synthetic construct
  source 1..75: mol_type = other DNA
ggggggccgtctttgtcgctatcgaaaagggaggactactggaggttaaagaggggggatttgcatttgcggtag

SEQ ID NO: 838160 - DNA, 75 bp, synthetic construct
  source 1..75: mol_type = other DNA
acattctaaatataaatttattttttctttagtgttactaacatcacctttttttcttgaaaacctatcatacaa

SEQ ID NO: 838161 - DNA, 75 bp, synthetic construct
  source 1..75: mol_type = other DNA
tgccggatgtggcgtatgctgataagacgcgccagcgtcgcatcaggcaaccggctcgggcgttagatgttggat

SEQ ID NO: 838162 - DNA, 75 bp, synthetic construct
  source 1..75: mol_type = other DNA
cgttagatgtcggatgcggcgtaaccgccttatccgacctacggggtggagcacttcacagcggtgtaggcctga

SEQ ID NO: 838163 - DNA, 75 bp, synthetic construct
  source 1..75: mol_type = other DNA
tataaccgcttccggtactatgattgtgacacgggacagtatatctcgtcagacccgatagggttacgtggggga

SEQ ID NO: 838164 - DNA, 75 bp, synthetic construct
  source 1..75: mol_type = other DNA
tttaaataaggcaataatgtgtaaggcacgattaccaaagaatcgtttagatttatttaaagtactgcaagatct

SEQ ID NO: 838165 - DNA, 75 bp, synthetic construct
  source 1..75: mol_type = other DNA
aaacatgggatattaaagatatcgattccggtaactatgccgcattcgtatatcttattcagtttgataatggtg

SEQ ID NO: 838166 - DNA, 75 bp, synthetic construct
  source 1..75: mol_type = other DNA
aacaccgaggtgctgaataaccgcaccacggatgtgataaacaaccatgctgagaccattggcaacaatcagatg

SEQ ID NO: 838167 - DNA, 75 bp, synthetic construct
  source 1..75: mol_type = other DNA
gctcaactactccaacccggcagccattgtcgcagaagccacgcgtcgtctgcgcccgaatgcgaaaatcctcaa

SEQ ID NO: 838168 - DNA, 75 bp, synthetic construct
  source 1..75: mol_type = other DNA
tctatgcaaaacctgggaagtgatacagggacgaccgtgatgaaatatgcggtatataatctggggcgggttgat

SEQ ID NO: 838169 - DNA, 75 bp, synthetic construct
  source 1..75: mol_type = other DNA
gctattacggcttacatcccgacaatctcaataaagccattctgtgtaaatcccgattgccaaaaaatcgaattg

SEQ ID NO: 838170 - DNA, 75 bp, synthetic construct
  source 1..75: mol_type = other DNA
aataagaggaaagatatagttttgggatggattggaacacatggtaatttaaaataccttgaaaagatttatcca

SEQ ID NO: 838171 - DNA, 75 bp, synthetic construct
  source 1..75: mol_type = other DNA
atttaatacatctgttcctggtctgtatttagactggccccatgaatctccagacaaccaatatcacttaaataa

SEQ ID NO: 838172 - DNA, 75 bp, synthetic construct
  source 1..75: mol_type = other DNA
gtaaagattatggcggacataaactatttaatacatctgttcctggtctgtattacaccatgtttgatcctaccc

SEQ ID NO: 838173 - DNA, 75 bp, synthetic construct
  source 1..75: mol_type = other DNA
atggtcgcgtgcgggtgaagttcaactgggaccgttataacccggcagaccaagacagttcgtgctggatccgtg

SEQ ID NO: 838174 - DNA, 75 bp, synthetic construct
  source 1..75: mol_type = other DNA
cagccacaggcggtgccaggacggcagggagcggggacggcgctggagaaccattttgcggtgatcccggcagac

SEQ ID NO: 838175 - DNA, 75 bp, synthetic construct
  source 1..75: mol_type = other DNA
ttcagacaaaagacccgagttttgtattgataactcacgtgcaaattacattgagtggtcagcggaagatgaagt

SEQ ID NO: 838176 - DNA, 75 bp, synthetic construct
  source 1..75: mol_type = other DNA
catctgtgacatgccaatcggtattgaaagccggatggcgcaaattgttgggctgcaagatcgcaaacagatgcg

SEQ ID NO: 838177 - DNA, 75 bp, synthetic construct
  source 1..75: mol_type = other DNA
cacgtaagattggcggtaacgctgacttaagcgaaagcctgctggaagaagtggcttcgctggtggagtggccgg

SEQ ID NO: 838178 - DNA, 75 bp, synthetic construct
  source 1..75: mol_type = other DNA
tcgttctgaccgcaaaattcgaagagaaattcctcgcggtgccggctgaagccctggtttacaccatgaaaggtg

SEQ ID NO: 838179 - DNA, 75 bp, synthetic construct
  source 1..75: mol_type = other DNA
gaagaagttttccttgaggtatttcaccatccgttccaccttacctttggttctggcccttcgtggataaagact

SEQ ID NO: 838180 - DNA, 75 bp, synthetic construct
  source 1..75: mol_type = other DNA
gcaccacttgcggtttcttccacttttttagtttaaacaaagttagtgaaaatatctcttctggaaaattcgtaa

SEQ ID NO: 838181 - DNA, 75 bp, synthetic construct
  source 1..75: mol_type = other DNA
gttcgctggtttaatatgtaaggataatagtggcagatatttctcaacagcacctaaccgaggagaaagaaaagg

SEQ ID NO: 838182 - DNA, 75 bp, synthetic construct
  source 1..75: mol_type = other DNA
aagggcaaaggcaaagggcgtaagcctcgtggcaaacgcggctggctatggctactgctaaaactggctatcgtt

SEQ ID NO: 838183 - DNA, 75 bp, synthetic construct
  source 1..75: mol_type = other DNA
ctgcatggcaatcatcattggaattatcaaagagattgagcttcgctttatcaaagaagatatttatgcagcaga

SEQ ID NO: 838184 - DNA, 75 bp, synthetic construct
  source 1..75: mol_type = other DNA
ggatccaatatcaaaaaaaacgttatgagtgaggaggttggtagtgtaaaaattgctattctttttgatgactca

SEQ ID NO: 838185 - DNA, 75 bp, synthetic construct
  source 1..75: mol_type = other DNA
cacggttatgttccaccgcagcaagatacacatactgaagcgagctggaacgacacctatgcaaaagcgcgggat

SEQ ID NO: 838186 - DNA, 75 bp, synthetic construct
  source 1..75: mol_type = other DNA
acgtcaacgtctcccatctcaatggcaatctgattggccccggcggatttctcgaaattgcgcaaaatgcccgta

SEQ ID NO: 838187 - DNA, 75 bp, synthetic construct
  source 1..75: mol_type = other DNA
agatcatttctggtttatcgcattcaacggtaccggcggcgacatttttcctgtgaaaacccagcaggactaccg

SEQ ID NO: 838188 - DNA, 75 bp, synthetic construct
  source 1..75: mol_type = other DNA
aacgtcgactgtgtgaaaagctcggcttctcacgctccgcactgcgtgaagggctgaccgtgctgcgcgggcgcg

SEQ ID NO: 838189 - DNA, 75 bp, synthetic construct
  source 1..75: mol_type = other DNA
tgttgaatatttgttgactggtttaatatcatatttactattaaaagagcctgtaacatttaaagggattgataa

SEQ ID NO: 838190 - DNA, 75 bp, synthetic construct
  source 1..75: mol_type = other DNA
gaagcccgcatgattgcgctgctgtgcaatctcagtgaacaggatctctggctgatgacggcggcagattattca

SEQ ID NO: 838191 - DNA, 75 bp, synthetic construct
  source 1..75: mol_type = other DNA
ctcagcctgtgaaagcagagaaaccccgtcggaaccgattttcaccggagtttaaatggagacttgttcagcaaa

SEQ ID NO: 838192 - DNA, 75 bp, synthetic construct
  source 1..75: mol_type = other DNA
gcgcgtcgtccgactcgtccggcagatttcgatgcccgtatgaaggcggtatcgcacttccgtaccctggatgca

SEQ ID NO: 838193 - DNA, 75 bp, synthetic construct
  source 1..75: mol_type = other DNA
ccgcgtcgtctggcgctgaaagtggctaaccttgcggaagcacagcctgatcgtgaaatcgaaaaacgtggcccg

SEQ ID NO: 838194 - DNA, 75 bp, synthetic construct
  source 1..75: mol_type = other DNA
gcaactcttcgggttagatggtataaaagcagataatccaataaaagcaaagcaagggagttcagatgcttcaaa

SEQ ID NO: 838195 - DNA, 75 bp, synthetic construct
  source 1..75: mol_type = other DNA
tggttagaaggtggtaaaccaaagatgattggagatccggaagaagtattaaataaatatatggatagcgtagtt

SEQ ID NO: 838196 - DNA, 75 bp, synthetic construct
  source 1..75: mol_type = other DNA
gcaattgcccaggcgttcgacgctgaaggcaaaccgagcaaagcggcagaaggttgggcgcgtggttgcggtatt

SEQ ID NO: 838197 - DNA, 75 bp, synthetic construct
  source 1..75: mol_type = other DNA
ttgatgataaagatctgcgtatcaaccgcctgaccatgctggaaaaactgcgcgaattattcctgcgcgttgcgg

SEQ ID NO: 838198 - DNA, 75 bp, synthetic construct
  source 1..75: mol_type = other DNA
gcgtcacgatggcgaagcggaagacgtagccgttgcgctgaacgaacagtatcagccgcgctttgccggtgatga

SEQ ID NO: 838199 - DNA, 75 bp, synthetic construct
  source 1..75: mol_type = other DNA
gatttcggctctgtccgaagaccaccagaaagcgattgagtcaattaagcaggctgatgcagctgttaaattggc

SEQ ID NO: 838200 - DNA, 75 bp, synthetic construct
  source 1..75: mol_type = other DNA
agcgtttacagatcactttgaactatctcctttagcttttagaaaaaagaaaaccttagattgctccaaattatt

SEQ ID NO: 838201 - DNA, 75 bp, synthetic construct
  source 1..75: mol_type = other DNA
atggtctttgagttcaccgacacccagggcgttatgggtatgcactatgcgcgtcatgatggtgaagcggaagat

SEQ ID NO: 838202 - DNA, 75 bp, synthetic construct
  source 1..75: mol_type = other DNA
tcaagtctgaaagtgccaattcctattgtttttgttaagatacataatatccccatgctgaattctttctttaaa

SEQ ID NO: 838203 - DNA, 75 bp, synthetic construct
  source 1..75: mol_type = other DNA
ctggctggatgtgtgcactacgtccacaggcagagacggaaaccacggaataccgtgacaaccaggccgatgccg

SEQ ID NO: 838204 - DNA, 75 bp, synthetic construct
  source 1..75: mol_type = other DNA
gtttcggtgttgcatcattcgcccttgccacctcactaatatccagtctttccggtagtgacgaaggcgatatct

SEQ ID NO: 838205 - DNA, 75 bp, synthetic construct
  source 1..75: mol_type = other DNA
cggcagatctgttttatgaaaatcgtctggtgccgaaaaaagtcgatattcgccagcgcatctggcagcccactc

SEQ ID NO: 838206 - DNA, 75 bp, synthetic construct
  source 1..75: mol_type = other DNA
aaaagcacagcaacgtcgtgctttcactgactggctgaaaacgcttaatatccgggtaacaacgcgtaatggggt

SEQ ID NO: 838207 - DNA, 75 bp, synthetic construct
  source 1..75: mol_type = other DNA
ttatttgatattacaccagattacaatttaaatataatgcggccggaacaaagtttatcgacaattacagtcgat

SEQ ID NO: 838208 - DNA, 75 bp, synthetic construct
  source 1..75: mol_type = other DNA
aagacaagagaaagacgttcttctaaaacggtttgaagacggtttttataaccttatctcttcagaaagagagga

SEQ ID NO: 838209 - DNA, 75 bp, synthetic construct
  source 1..75: mol_type = other DNA
agttggagaagaccaccacagggcaggatgccaatataaacagccaacaggaacgcgtgactcaatcagctaata

SEQ ID NO: 838210 - DNA, 75 bp, synthetic construct
  source 1..75: mol_type = other DNA
atggtcgaggtgcggttacgccgccgaggtatcgatacaattgtgttatgtgggatctcgaccaatatcggtgtt

SEQ ID NO: 838211 - DNA, 75 bp, synthetic construct
  source 1..75: mol_type = other DNA
tgctcgatacccgtaaactctatagccaaagttgggacgccgggctgcgctataacggcgaactgattaaatcac

SEQ ID NO: 838212 - DNA, 75 bp, synthetic construct
  source 1..75: mol_type = other DNA
cccgcaccatgcaactgggtcgccagcagcgtgttgttatcctcggtccgcagcgagtgctgggcgcgatggaga

SEQ ID NO: 838213 - DNA, 75 bp, synthetic construct
  source 1..75: mol_type = other DNA
gctgtcagaaatgcgctctacggctggctgggcagtccgtccggaagctatcaccatcctgtcgatgaaatacag

SEQ ID NO: 838214 - DNA, 75 bp, synthetic construct
  source 1..75: mol_type = other DNA
gccggagttgatcattggttaccagcaggcgtccggtgcgttcgaaaccatcgccagcggtaacccgcaggtccg

SEQ ID NO: 838215 - DNA, 75 bp, synthetic construct
  source 1..75: mol_type = other DNA
cgtgctggtctccttgtgcgtggtcgtggcggcagccgctgctgcacacgccgtcggcgtatccgccgccctggg

SEQ ID NO: 838216 - DNA, 75 bp, synthetic construct
  source 1..75: mol_type = other DNA
cgccagtatggtcgccagttaaatatcgtgctcgcgctgctgctggtctattgcgcggtacgcattttctattaa

SEQ ID NO: 838217 - DNA, 75 bp, synthetic construct
  source 1..75: mol_type = other DNA
cagtccaacaaaggaagacggacttcaggcaaaaccaatcagcttttgggccagctttgcgctacagtttgtgaa

SEQ ID NO: 838218 - DNA, 75 bp, synthetic construct
  source 1..75: mol_type = other DNA
catacccccccgcaggccagttacagagccagcacctgaacagcctggtgtatgaccgtgactacgggtggaatg

SEQ ID NO: 838219 - DNA, 75 bp, synthetic construct
  source 1..75: mol_type = other DNA
aaattaatagaactacaaatgatgctttccaagtttggacaagaaaaaatttatccaaatatgtatcatgtaatg

SEQ ID NO: 838220 - DNA, 75 bp, synthetic construct
  source 1..75: mol_type = other DNA
gcgtgaagttttacagcagttatggccgggataactgggatgctccggccagaatgaccatcacgttctacggtc

SEQ ID NO: 838221 - DNA, 75 bp, synthetic construct
  source 1..75: mol_type = other DNA
gattacaaacacttgatagcgaatttaaaattgatgagcagaaatttcggcgagagataaccgacgaaattcata

SEQ ID NO: 838222 - DNA, 75 bp, synthetic construct
  source 1..75: mol_type = other DNA
aaaccaatataccgaaggagtatataaagtctatccgtgcaggactttatgcgtgggagaagtttggcttggatg

SEQ ID NO: 838223 - DNA, 75 bp, synthetic construct
  source 1..75: mol_type = other DNA
ctccattttgctttgctaaatcgccagcaaatactgtagcacgtctttgcacaaaagatgggcgcttaccacaag

SEQ ID NO: 838224 - DNA, 75 bp, synthetic construct
  source 1..75: mol_type = other DNA
gcgctgaactccgcagcaaaccccactaccgtgctggcgctgctggatgagctggaagccgcagaaaagaagact

SEQ ID NO: 838225 - DNA, 75 bp, synthetic construct
  source 1..75: mol_type = other DNA
tgcgtgaaatcgcagcggcagcagttggcgcacatgagctccttagtgttatgccgcctgatgacattttcgata

SEQ ID NO: 838226 - DNA, 75 bp, synthetic construct
  source 1..75: mol_type = other DNA
tctgtatcaagactcgctactttttacttgtgatagcgagggaagacgtttatattttaaagatgagttcgacaa

SEQ ID NO: 838227 - DNA, 75 bp, synthetic construct
  source 1..75: mol_type = other DNA
atccgttgcaggggcggtatatcacccaggacccgattgggctggcggggggatggagtctgtatgcgtatccgc

SEQ ID NO: 838228 - DNA, 75 bp, synthetic construct
  source 1..75: mol_type = other DNA
acctgctgtccgctcttcatgataactacggcaaccggattgattttatccgcacggatggcctgctgacagaaa

SEQ ID NO: 838229 - DNA, 75 bp, synthetic construct
  source 1..75: mol_type = other DNA
ctggggatgggggatatgctctactctgggccgaactccacgttgccggtacgtgtccatggtgcttttgttcgc

SEQ ID NO: 838230 - DNA, 75 bp, synthetic construct
  source 1..75: mol_type = other DNA
aagagaaagcccgtgaagcccagcgcaatcagtatgattctggcgatcagtataacgatgatgaaatcgatgcga

SEQ ID NO: 838231 - DNA, 75 bp, synthetic construct
  source 1..75: mol_type = other DNA
ttcaggtttcgccacatccgttctccctgatcagtgagcaaagctgccgctccatctctgatgacgacctgtgcg

SEQ ID NO: 838232 - DNA, 75 bp, synthetic construct
  source 1..75: mol_type = other DNA
aaaactccttcatgaaataaaggctgtccgtgatgatttactccaaacaatcctttataatgaagaggtggaaga

SEQ ID NO: 838233 - DNA, 75 bp, synthetic construct
  source 1..75: mol_type = other DNA
tggcgggcgtaacacgagacaaccttcagcaattatccacggtctgcgacaaccaacaccgctggccgctgatgc

SEQ ID NO: 838234 - DNA, 75 bp, synthetic construct
  source 1..75: mol_type = other DNA
cgtaagagctggaaaaaccgtgcagaggtggaactggccacactcacgtgggtgggctggtataacaatcgacga

SEQ ID NO: 838235 - DNA, 75 bp, synthetic construct
  source 1..75: mol_type = other DNA
cgcagcggcttaaggaagcaggattactggcatcaacagggagcacaggcgactcgtatgacaacgcgatggcgg

SEQ ID NO: 838236 - DNA, 75 bp, synthetic construct
  source 1..75: mol_type = other DNA
agccacaatgtccctggcgcagcaacatcaccttcctcccgccgtccaggtccaccaccacgagcacggcagact

SEQ ID NO: 838237 - DNA, 75 bp, synthetic construct
  source 1..75: mol_type = other DNA
cgagcaggactgcggcacagaaaagcctatcagtctaggcatacttatgcctgctgggcattatcggcaggagcg

SEQ ID NO: 838238 - DNA, 75 bp, synthetic construct
  source 1..75: mol_type = other DNA
gcgaacagggggatttactggcgcgtattctgccgggaggagctacctggcgctggagccatgacgccctgcacc

SEQ ID NO: 838239 - DNA, 75 bp, synthetic construct
  source 1..75: mol_type = other DNA
atgaatgaagggacaagagtaaatgattttgcttatgtcaaacaggcccttttggcggtgtttcatcggatgaat

SEQ ID NO: 838240 - DNA, 75 bp, synthetic construct
  source 1..75: mol_type = other DNA
tgctctggcgggcactgagctgctggtcgagatcgagttggtgacggaacagccgctgccacgtgacctccgggg

SEQ ID NO: 838241 - DNA, 75 bp, synthetic construct
  source 1..75: mol_type = other DNA
gacattatttatgccccggagggcgcgcgcggcgcagaacaacgcctgtaccttacgccccatgtcggtaaatag

SEQ ID NO: 838242 - DNA, 75 bp, synthetic construct
  source 1..75: mol_type = other DNA
aatattcattaccattttggtaataaaaataacctcgtcgagattgtggtcagtgaatatgtcgccgaagcaaaa

SEQ ID NO: 838243 - DNA, 75 bp, synthetic construct
  source 1..75: mol_type = other DNA
actgacgaggggcgttctgccgtgctgaatattactgccgccaatggcaaatccattccgtttgctgcggaggtt

SEQ ID NO: 838244 - DNA, 75 bp, synthetic construct
  source 1..75: mol_type = other DNA
tgctaaagaaggcaagatctcaaccgtcgtgccaatgtgcagccatgttgatcacagcgaacacagcgtcaaagt

SEQ ID NO: 838245 - DNA, 75 bp, synthetic construct
  source 1..75: mol_type = other DNA
ggtaatggcacgtctcggagataacccggatattccaccgtttatgatgtattcggaagtgctacaggaatcggt

SEQ ID NO: 838246 - DNA, 75 bp, synthetic construct
  source 1..75: mol_type = other DNA
atgagtatgacctgggcaaggatgaccgccgatgaagcggcggaaattatccggcacaacgatatggtggcattc

SEQ ID NO: 838247 - DNA, 75 bp, synthetic construct
  source 1..75: mol_type = other DNA
gctgatacagaaactctggttgacacactgaaatctcagggattcttatctggcattcagcagatgaaagggatg

SEQ ID NO: 838248 - DNA, 75 bp, synthetic construct
  source 1..75: mol_type = other DNA
agcactgatgcgccaggggaaagcaaggctggctttgccatccgcaggaccgctgatttgactggttgggagctt

SEQ ID NO: 838249 - DNA, 75 bp, synthetic construct
  source 1..75: mol_type = other DNA
tgcgtggatgcgccaatcagcaaaaaggacggctttgctgtttgccggacggctgatttgaccggttgggaatac

SEQ ID NO: 838250 - DNA, 75 bp, synthetic construct
  source 1..75: mol_type = other DNA
tgtacgcggtattaacgacagcggggaattaatcgtgcgctggtatgaaaacaaccaaaccattgactgtaagtt

SEQ ID NO: 838251 - DNA, 75 bp, synthetic construct
  source 1..75: mol_type = other DNA
ggtatatcactcaggatccgattgggctgaaggggggatggaatttttatcagtatccgctgaatccggttcagt

SEQ ID NO: 838252 - DNA, 75 bp, synthetic construct
  source 1..75: mol_type = other DNA
aaaactgaagacataaaggggctaggtgacctcaaaaaaggtacacctaaaacaccaatgcagggaggtggaggt

SEQ ID NO: 838253 - DNA, 75 bp, synthetic construct
  source 1..75: mol_type = other DNA
cgatgccggtaacgtactcgataagcagaaccctatttgtcagcaaatcgccgacaatgtagtgacctttttgct

SEQ ID NO: 838254 - DNA, 75 bp, synthetic construct
  source 1..75: mol_type = other DNA
tccgacatggaaaggcggtggcacagtcggggtgacgtttgttatggataaccggagcaatatttttccacaacc

SEQ ID NO: 838255 - DNA, 75 bp, synthetic construct
  source 1..75: mol_type = other DNA
atgccttatcagcctttaccgctggcacagttaatcacgcagacacagcaggatatcagccagcgcctgcccggc

SEQ ID NO: 838256 - DNA, 75 bp, synthetic construct
  source 1..75: mol_type = other DNA
atgagaaaaacacatcaactaaaaattcggcctgagttttttcaggctgtcatcaatggaacaaaaaaagccgag

SEQ ID NO: 838257 - DNA, 75 bp, synthetic construct
  source 1..75: mol_type = other DNA
catctggaaatcagcagctacatcaaagtaggcgatccacttacgcctcaacctcattcatgggcacccgtttta

SEQ ID NO: 838258 - DNA, 75 bp, synthetic construct
  source 1..75: mol_type = other DNA
aaacattggatcgtaagtttcaatattttatcgataatcaagcacagctaggaatagttgtctacgcactcacga

SEQ ID NO: 838259 - DNA, 75 bp, synthetic construct
  source 1..75: mol_type = other DNA
gtacccgtatgtggtccccctgctggatggcaggccgtcggtggcgcttccgtgggtggttttcagcctgatttc

SEQ ID NO: 838260 - DNA, 75 bp, synthetic construct
  source 1..75: mol_type = other DNA
ctggaaagagttaagcgagaaagggcttgttttcagaattaatcacgaaattctacacccgttagggctggctat

SEQ ID NO: 838261 - DNA, 75 bp, synthetic construct
  source 1..75: mol_type = other DNA
tggtgcagcagcaagaggccgttacagcgctcacggctcaaatagtcagaggccagaaaatcgccccatcaggtt

SEQ ID NO: 838262 - DNA, 75 bp, synthetic construct
  source 1..75: mol_type = other DNA
tcagcggctggcgacaactgtttttgcgcgaaatggcaacgcactcaccggaagaaacgcaggcacttcccgccc

SEQ ID NO: 838263 - DNA, 75 bp, synthetic construct
  source 1..75: mol_type = other DNA
tattctttgcgctgcatttttgaaaaaattggctatgatcgttgcatagaaacaatctaccggaaaggttatcgt

SEQ ID NO: 838264 - DNA, 75 bp, synthetic construct
  source 1..75: mol_type = other DNA
gcctggagcgtggcgcattacgttgagttaaccggagaggttgattcgccattactggcccgcgcggtggttgcc

SEQ ID NO: 838265 - DNA, 75 bp, synthetic construct
  source 1..75: mol_type = other DNA
aaaaagtgacgaagcttttgcctctgttttccagctaattgatcaagctggtcaaagttgggttgataagttaag

SEQ ID NO: 838266 - DNA, 75 bp, synthetic construct
  source 1..75: mol_type = other DNA
cgaatggatagcctctcggcatttatggtgctggttatctccttgctggtggtggtttgttcgctctattcattg

SEQ ID NO: 838267 - DNA, 75 bp, synthetic construct
  source 1..75: mol_type = other DNA
tggcacgagaagaagcagcggcggggaaattcaccgccgatctgctgaaggtaaacaaagcagacgatgttgtca

SEQ ID NO: 838268 - DNA, 75 bp, synthetic construct
  source 1..75: mol_type = other DNA
ccaatgtcgatggaaaaattttagctattatgggactgataactggtctgtctggacaagcaaaagtatctcata

SEQ ID NO: 838269 - DNA, 75 bp, synthetic construct
  source 1..75: mol_type = other DNA
atgccggaggtcaccgcctacgatcttgaggaagtcgttatctataccgatagcgatggcgaaccagtgacctca

SEQ ID NO: 838270 - DNA, 75 bp, synthetic construct
  source 1..75: mol_type = other DNA
ctgacgggcgggctggcccatgattttaataatctgttggcggtaattattggcagcctggaactggtgaacacg

SEQ ID NO: 838271 - DNA, 75 bp, synthetic construct
  source 1..75: mol_type = other DNA
ttaagttcgctatatcaaaacttaagttatctgcggcatctgcaaaaagtcacttacgcggaagatgatcttttg

SEQ ID NO: 838272 - DNA, 75 bp, synthetic construct
  source 1..75: mol_type = other DNA
tggtctgctgacagaaatccgtcacagcgatggctatatgctcgcccttgcctggcaacaggctcagctgatgag

SEQ ID NO: 838273 - DNA, 75 bp, synthetic construct
  source 1..75: mol_type = other DNA
cgtcggcggcggcgcactgctcgacaccgcgaaagccctcgcccgccgtctcggtctgccatttgttgccgctcc

SEQ ID NO: 838274 - DNA, 75 bp, synthetic construct
  source 1..75: mol_type = other DNA
aaaacattccttgtttccattttttgttaaatgacaaaaaagaacttatgcatggcaatcaactggtcagaatag

SEQ ID NO: 838275 - DNA, 75 bp, synthetic construct
  source 1..75: mol_type = other DNA
gcgaaagcggcagcctcgattttgccagtttccgcacgctttcactttctccggggctggcgtcggcggtgttcc

SEQ ID NO: 838276 - DNA, 75 bp, synthetic construct
  source 1..75: mol_type = other DNA
tcccggagttgaccgcttccggtaaaaatgcagaagtccgggcggccggtctgaaatatgatgccaataacgttt

SEQ ID NO: 838277 - DNA, 75 bp, synthetic construct
  source 1..75: mol_type = other DNA
gggagtaagcttgtccagatagccacgaaattactgatgattacgggtgtgagaaccatcgaattacgcgcggca

SEQ ID NO: 838278 - DNA, 75 bp, synthetic construct
  source 1..75: mol_type = other DNA
cctggcagcctgtaccgggtccacaaacgggagagccggttattgctcctgcaccggaaggttacccacagcagc

SEQ ID NO: 838279 - DNA, 75 bp, synthetic construct
  source 1..75: mol_type = other DNA
ggcagcgtggaagaaattcaccgtccggatggcgtgcgggaactgatgcgccagaacagcgaaaagctaccggag

SEQ ID NO: 838280 - DNA, 75 bp, synthetic construct
  source 1..75: mol_type = other DNA
aagacaaagtcattttcaggggagaaaacggccctgctgattttatttcctgggtatccactacaccaccgggcc

SEQ ID NO: 838281 - DNA, 75 bp, synthetic construct
  source 1..75: mol_type = other DNA
accaccgcaggtatcacagaacgctttacccgcaacctgatggggcatctgacatcatggcagatagctaaccac

SEQ ID NO: 838282 - DNA, 75 bp, synthetic construct
  source 1..75: mol_type = other DNA
gctggaagctgcatggaagtacatcattatttgtactgttggtgtcgcttttggtctgttcggtaccgtgctggt

SEQ ID NO: 838283 - DNA, 75 bp, synthetic construct
  source 1..75: mol_type = other DNA
catctgtttttgttcaccatgctgctggttgttaccagcaataacctgattgtgatgtgggcggcgatcgaagcc

SEQ ID NO: 838284 - DNA, 75 bp, synthetic construct
  source 1..75: mol_type = other DNA
ttcggcgttgatgtctggcgtaatggtcaaaatcggtattttcggcatcctgaaagtagcgatggacctgctggc

SEQ ID NO: 838285 - DNA, 75 bp, synthetic construct
  source 1..75: mol_type = other DNA
tgtccatggtgcttttgttcgcgatcaggaagtccatgccgtggtgcaggactggaaagcgcgtggtcgcccaca

SEQ ID NO: 838286 - DNA, 75 bp, synthetic construct
  source 1..75: mol_type = other DNA
gacctgatgatgacggtaggtaaaaaagtggaagagctgatagcacgtctggcgcaaaaagcccgtgccgcgggt

SEQ ID NO: 838287 - DNA, 75 bp, synthetic construct
  source 1..75: mol_type = other DNA
taaggaagtgaaggagcatgaatatattgcgccgttttcctcccgtgaatatccgctgcctgcgggggcatcggg

SEQ ID NO: 838288 - DNA, 75 bp, synthetic construct
  source 1..75: mol_type = other DNA
atggcgcaccccggacgtcacttttttgccagcgcgcgcgggcggttgctgcttttaaatttgcttgtggtggcg

SEQ ID NO: 838289 - DNA, 75 bp, synthetic construct
  source 1..75: mol_type = other DNA
atagataatatgacagacattgagcaggaaaaagtcgcgcaatttttgtcacgtgaaggaattcgcaatttcctc

SEQ ID NO: 838290 - DNA, 75 bp, synthetic construct
  source 1..75: mol_type = other DNA
atttgccggtacgataaaaatcacaaccagtgcggtcatcgataaccgtgcaaacctgaattatcttctgaccca

SEQ ID NO: 838291 - DNA, 75 bp, synthetic construct
  source 1..75: mol_type = other DNA
cagagagccaaggtttgaaaccttaactggtatatggcatggagtaacccactggatgccgctaccagaaccgcc

SEQ ID NO: 838292 - DNA, 75 bp, synthetic construct
  source 1..75: mol_type = other DNA
ttatgcttctttataagtaattttattgcaacgattattggtgtcgggcttatctggggggcaggttataaaatc

SEQ ID NO: 838293 - DNA, 75 bp, synthetic construct
  source 1..75: mol_type = other DNA
ccctggtagttggtcctctgaatactgaaatgggtctcgacaagggatggccgaacatctgtcaagctcttgatg

SEQ ID NO: 838294 - DNA, 75 bp, synthetic construct
  source 1..75: mol_type = other DNA
tgaagatgcccgcgacaatgggtatatcgctctggggtggggtgggaccatagactggagcgcggatagattctc

SEQ ID NO: 838295 - DNA, 75 bp, synthetic construct
  source 1..75: mol_type = other DNA
gaagcgaagaatgacgatgccaccgttacatttgaatataacgatgcaaaccagattgttgccgaaacgctgaac

SEQ ID NO: 838296 - DNA, 75 bp, synthetic construct
  source 1..75: mol_type = other DNA
atgcagcatgtctctgaaggcgtgattcaggtaccagaattacccgacgccccggaggctctgccggggtgtcgt

SEQ ID NO: 838297 - DNA, 75 bp, synthetic construct
  source 1..75: mol_type = other DNA
ataagtatccctgaggggcactggccttcacgctgtgatgatgatggctatgtgcagttctgtccgtcactttgt

SEQ ID NO: 838298 - DNA, 75 bp, synthetic construct
  source 1..75: mol_type = other DNA
agcgaatgccggataagttaattccggtaatggtcatgtatgaagacggtgagatgtggtctgcaatgtggaatg

SEQ ID NO: 838299 - DNA, 75 bp, synthetic construct
  source 1..75: mol_type = other DNA
acaaactggcgactggctttacgatgacccgctggagctggctaaagctatcagaaaaggtcctgacatgcccga

SEQ ID NO: 838300 - DNA, 75 bp, synthetic construct
  source 1..75: mol_type = other DNA
ctccgcgccgccatgcttcggggtgccgaacatgtaagtaatcgtgatgagttgccgctgggctatctgcaaggt

SEQ ID NO: 838301 - DNA, 75 bp, synthetic construct
  source 1..75: mol_type = other DNA
tacaccgctgaaagaggttcggccggggatctatactgcaaaactggataacggaacatcgatcacgttgcgaaa

SEQ ID NO: 838302 - DNA, 75 bp, synthetic construct
  source 1..75: mol_type = other DNA
ccagcctgtgacgatgatacatacgccgccagcatggccacgcgccagttgttggagaataacaatgctatcacc

SEQ ID NO: 838303 - DNA, 75 bp, synthetic construct
  source 1..75: mol_type = other DNA
agggagtgaaatcacctcgaccacggataaaaagctggaagaccagagcgccaccatacagcagatacagcaggt

SEQ ID NO: 838304 - DNA, 75 bp, synthetic construct
  source 1..75: mol_type = other DNA
tgttcctgaagcgactgtttgcggtgagtatcacgtcatccggcaatcccccgacgttctccctgacgccggagg

SEQ ID NO: 838305 - DNA, 75 bp, synthetic construct
  source 1..75: mol_type = other DNA
ttggcattttcccgcaagcagtccttacatccacaagccattgaactgaaaacattactggaagagttaagcgaa

SEQ ID NO: 838306 - DNA, 75 bp, synthetic construct
  source 1..75: mol_type = other DNA
ggggtaatgtctgcgttgccgacccacagcgatacgccgttggttaacacgctactcaatgattttaatcgtgaa

SEQ ID NO: 838307 - DNA, 75 bp, synthetic construct
  source 1..75: mol_type = other DNA
agcggcaggggttggaagaggcgctattacacagccagaaactgaaagctgtcgggcaactgacgggcgggctgg

SEQ ID NO: 838308 - DNA, 75 bp, synthetic construct
  source 1..75: mol_type = other DNA
atgcaccctggcgcaactggggcggcgaaaatgtggcgtctgctgcatggcgagtcgaaaaaaggctacatcaac

SEQ ID NO: 838309 - DNA, 75 bp, synthetic construct
  source 1..75: mol_type = other DNA
tgagctcgccctccagcaaaaaggaatcgaaacgcatcgcaggacttttcatgaactgcataatcaattgagtac

SEQ ID NO: 838310 - DNA, 75 bp, synthetic construct
  source 1..75: mol_type = other DNA
cgagcgctaccgtcttaaatatgataaagccgggcagcttgtagcagaaacagacttcaccggacgcacgctgaa

SEQ ID NO: 838311 - DNA, 75 bp, synthetic construct
  source 1..75: mol_type = other DNA
ccgcaccactcggtacctcggtcggcaaggacatggggcgcgtcaccctggtgagttattccgacgtccagacgt

SEQ ID NO: 838312 - DNA, 75 bp, synthetic construct
  source 1..75: mol_type = other DNA
tgtgaccggacacggaagtatgaatggtttggactctgcgccgatcataaccccataccgtttattggacaggtt

SEQ ID NO: 838313 - DNA, 75 bp, synthetic construct
  source 1..75: mol_type = other DNA
ggctccgttgcagtgctgatactctccttcgcagggttatcaatacccccggagacgaaacagtcaggcgcgcct

SEQ ID NO: 838314 - DNA, 75 bp, synthetic construct
  source 1..75: mol_type = other DNA
aatgcactgatatggaattacattcccgatctacaggccctggcgcaaaacagcgattttctgatggtttgcgcg

SEQ ID NO: 838315 - DNA, 75 bp, synthetic construct
  source 1..75: mol_type = other DNA
aaatatgcctgcgtgatgatgaatatgagaaattcccggtggctattgacgaaattcttgcaaaggaaaacatct

SEQ ID NO: 838316 - DNA, 75 bp, synthetic construct
  source 1..75: mol_type = other DNA
ctttaacgccattcgttggtgatgcgaacacgcagacgccggagtttaagtccttccttgtgaatgtggaaaagg

SEQ ID NO: 838317 - DNA, 75 bp, synthetic construct
  source 1..75: mol_type = other DNA
ggcagcatcaaggcgtttctcaaccaatgccgccatcgggccatgcgtgtgagttatgcagattgcggcaacact

SEQ ID NO: 838318 - DNA, 75 bp, synthetic construct
  source 1..75: mol_type = other DNA
caacgctgggccgatcttctgagtagcgaaagctggcaggaagtgctcgataaaaccgccgcttaccagcaggag

SEQ ID NO: 838319 - DNA, 75 bp, synthetic construct
  source 1..75: mol_type = other DNA
cgttgctggctatttctcgcccacgaaagccagatcccaaaacccggtgatttctttaacacctacatgggagaa

SEQ ID NO: 838320 - DNA, 75 bp, synthetic construct
  source 1..75: mol_type = other DNA
agagctgttcctacgagttatcactgtcagtcttgaaacccagaaaatagtcaatagtctaccaaaactagatat

SEQ ID NO: 838321 - DNA, 75 bp, synthetic construct
  source 1..75: mol_type = other DNA
ggctgcatgtcaggcaaactatatccgggatgttcagggcgggaccgtatctccgtcatcaacagctgaagtgac

SEQ ID NO: 838322 - DNA, 75 bp, synthetic construct
  source 1..75: mol_type = other DNA
tcgccaattctgaaacgccgatttccgacgccctgacctggatccccgcactcggcagcaccgccgggatcttcg

SEQ ID NO: 838323 - DNA, 75 bp, synthetic construct
  source 1..75: mol_type = other DNA
agccgtgatttcaatgagagggtgtaccaaatgccgcgcatcttccctgatgctggggcggagaatttggtgatt

SEQ ID NO: 838324 - DNA, 75 bp, synthetic construct
  source 1..75: mol_type = other DNA
aacgcatccgttccacctatggcgcccactccaacgccaccttatccaaaggtttgtacgacagctatatccgag

SEQ ID NO: 838325 - DNA, 75 bp, synthetic construct
  source 1..75: mol_type = other DNA
ttgatgccctgtttgctgactacaaatttactgaccataatccgatgagtatagcaatgcaaaatgtcctgaaca

SEQ ID NO: 838326 - DNA, 75 bp, synthetic construct
  source 1..75: mol_type = other DNA
cgagcaggatgactcggagaactggtgtgaaatccagaaattgctgaaaggccaccgcgcccgcaacagcaaact

SEQ ID NO: 838327 - DNA, 75 bp, synthetic construct
  source 1..75: mol_type = other DNA
aacgctcttagtgttatgaatctccagttgaaggggtattttcttaaagtgatgcacagagactcaattattggt

SEQ ID NO: 838328 - DNA, 75 bp, synthetic construct
  source 1..75: mol_type = other DNA
gggcggtgatggtgggttcaccagcactgaacgtcagcgtctgaaagagctggaacgtgaaaatcatcgagtagg

SEQ ID NO: 838329 - DNA, 75 bp, synthetic construct
  source 1..75: mol_type = other DNA
gagcatatcaacctgaccggcgattacctatggcgcagcagtgccaaggtcggtgcggggaagttcaggccattg

SEQ ID NO: 838330 - DNA, 75 bp, synthetic construct
  source 1..75: mol_type = other DNA
gcttctggattatcttaatgatgatttatataaaaatgatagagagattactttttataaagaatcactactgtt

SEQ ID NO: 838331 - DNA, 75 bp, synthetic construct
  source 1..75: mol_type = other DNA
gctacgtgataagcaagcgttacttgaaacatcagagaagcgcatagcaatactggaaacaatcaaatccgctgc

SEQ ID NO: 838332 - DNA, 75 bp, synthetic construct
  source 1..75: mol_type = other DNA
taacgcaaaaatcgtacgtaaaattccctttgtacagtcggtagcattaaaaacatggaagggctatttcatgtt

SEQ ID NO: 838333 - DNA, 75 bp, synthetic construct
  source 1..75: mol_type = other DNA
acgaactgcaacagaaaatgcgtaatgccagcctgttcaacaaagggtatgagatgagcgaactgcttagcgccg

SEQ ID NO: 838334 - DNA, 75 bp, synthetic construct
  source 1..75: mol_type = other DNA
cagttgcgtgaatcaggttgtgacggggtgatcgcgtttggcggcggctcggtgctggatgcggcgaaagccgtt

SEQ ID NO: 838335 - DNA, 75 bp, synthetic construct
  source 1..75: mol_type = other DNA
catctgttcgtgatggcagacagctttttgcatcaggcagggatgaccgccgggctgacacgtagcctggccgtt

SEQ ID NO: 838336 - DNA, 75 bp, synthetic construct
  source 1..75: mol_type = other DNA
gctgcaaagcgtggagctgcgccgccgcgtctatgcggggctgaataagggcgaggcgctggacgacacgttgct

SEQ ID NO: 838337 - DNA, 75 bp, synthetic construct
  source 1..75: mol_type = other DNA
taaacaatcactggcgaaaggctcatcaattgcgctggtcagtcctgttgagtttgcaacatcatcgtggcggcg

SEQ ID NO: 838338 - DNA, 75 bp, synthetic construct
  source 1..75: mol_type = other DNA
ttttgtagcggtttcattttttatttaagcccaaatataatttcgttcttgtatggagaaagttataaagaatcc

SEQ ID NO: 838339 - DNA, 75 bp, synthetic construct
  source 1..75: mol_type = other DNA
gggcattaaagggtatctggctcttttttctcaccataatctttttttccggtgttttttccggaacagacagct

SEQ ID NO: 838340 - DNA, 75 bp, synthetic construct
  source 1..75: mol_type = other DNA
tttagttcacccagtggtttggacaaccagggaaatatttttgtgggtcatgctaaatatgttaatgaaatggat

SEQ ID NO: 838341 - DNA, 75 bp, synthetic construct
  source 1..75: mol_type = other DNA
cgttattttactaccggtagtgtcgacgaacaaaactccaaaatagataaaaccgcttttacattttccggtgcc

SEQ ID NO: 838342 - DNA, 75 bp, synthetic construct
  source 1..75: mol_type = other DNA
aaatgaagttaagcttcagtgtgctcgttattttactaccggtagggtcgacgaacaaaactccaaaatcgataa

SEQ ID NO: 838343 - DNA, 75 bp, synthetic construct
  source 1..75: mol_type = other DNA
ggctacgaccgcctccccgccattcacgccccgcgcaaccaggaggagatcgccctgctggtaagctcactgcaa

SEQ ID NO: 838344 - DNA, 75 bp, synthetic construct
  source 1..75: mol_type = other DNA
gtcttgtattggtgatagtgtgttgttggtcatgatactgccctgtaaagcaatgcgccgtagtacctcacacca

SEQ ID NO: 838345 - DNA, 75 bp, synthetic construct
  source 1..75: mol_type = other DNA
gtcgacgaacaaaactccatcagcgataaaatcgcttttacattttacggtgccgcaacaactgctgatttatga

SEQ ID NO: 838346 - DNA, 75 bp, synthetic construct
  source 1..75: mol_type = other DNA
ataacgagaaaaaatattcacctggcagtaatttcgcaaaatggatgttacaggaaataaagcgcttaatactaa

SEQ ID NO: 838347 - DNA, 75 bp, synthetic construct
  source 1..75: mol_type = other DNA
cgttattttactaccggtagggtcgacaaagaaaactccactagcgataaagtcgcttttacattttccgctgcc

SEQ ID NO: 838348 - DNA, 75 bp, synthetic construct
  source 1..75: mol_type = other DNA
gtctgaaaaaactgctgcgttagaaacacattctgctgacatggttttgaggaaaaaattagttaatagtattgt

SEQ ID NO: 838349 - DNA, 75 bp, synthetic construct
  source 1..75: mol_type = other DNA
atcaggaaatgctttttttgggtctggaaagtatcttaatgaaatggattttactatgaatgggtttagtcagaa

SEQ ID NO: 838350 - DNA, 75 bp, synthetic construct
  source 1..75: mol_type = other DNA
acacattctgctgacacggttttgaggaaaaaattagttaatagtattgttctgatgaatgcggattgtaattac

SEQ ID NO: 838351 - DNA, 75 bp, synthetic construct
  source 1..75: mol_type = other DNA
cagtaattttgcaaaatggatgttgcaggaaataaagcgcttaatactaaatattatgtccggttctcgcagtgt

SEQ ID NO: 838352 - DNA, 75 bp, synthetic construct
  source 1..75: mol_type = other DNA
cccgaagaggggctgaaacggatgctgggagaaacccggcactacggtattccggccacactgcggggtatggtg

SEQ ID NO: 838353 - DNA, 75 bp, synthetic construct
  source 1..75: mol_type = other DNA
acaagatcatgatgatgcttggtacgtattgttttcagcacagcaaaataatcgtgcaatgcgtctttcatctaa

SEQ ID NO: 838354 - DNA, 75 bp, synthetic construct
  source 1..75: mol_type = other DNA
tgtaatgatgactgacctggcactaaaaagtaaaaataatatattggcagaaaaagcatataatatttataaaac

SEQ ID NO: 838355 - DNA, 75 bp, synthetic construct
  source 1..75: mol_type = other DNA
ttaattacagttgattgctgtatctcttcttcttttttgtttaatcttagtgaagagaggattaattattattta

SEQ ID NO: 838356 - DNA, 75 bp, synthetic construct
  source 1..75: mol_type = other DNA
gcgtgagagttgagtttatagataatcacatgacttttgatgattcccccaccagcaagttcataaccaccatgt

SEQ ID NO: 838357 - DNA, 75 bp, synthetic construct
  source 1..75: mol_type = other DNA
actccaatgaagaaatttacaagctggtggggtgtgggcgggctacatttttccggatcaaaaaagaactgaatg

SEQ ID NO: 838358 - DNA, 75 bp, synthetic construct
  source 1..75: mol_type = other DNA
tggctgtggctgcctctgctgcagtatctggttctgctatggcgtggactgcaaacggcactggtggttctgtta

SEQ ID NO: 838359 - DNA, 75 bp, synthetic construct
  source 1..75: mol_type = other DNA
cggcctggtcgtcaacgagtatggagacattcaggggctggtgacggttgaagatattctggaagagattgtcgg

SEQ ID NO: 838360 - DNA, 75 bp, synthetic construct
  source 1..75: mol_type = other DNA
aattggtaaagaagatattttgtttaaaaaaggaagtgctgttctcattgattacaatttaaaagatttttttca

SEQ ID NO: 838361 - DNA, 75 bp, synthetic construct
  source 1..75: mol_type = other DNA
cccgaagagggactgaaacggatgctgggagaaacccggcactacggcattccggccacactgcggggcatggtg

SEQ ID NO: 838362 - DNA, 75 bp, synthetic construct
  source 1..75: mol_type = other DNA
attcaatgcctgaaataaaaaaaatcctcgccaacgaactgagtacaaaaaattgtatctatgaccttgcaaaat

SEQ ID NO: 838363 - DNA, 75 bp, synthetic construct
  source 1..75: mol_type = other DNA
caaaaaaagaatattagcaaactagagatgtataaatcttgtttaaacattaaggaaaatcattataaagattta

SEQ ID NO: 838364 - DNA, 75 bp, synthetic construct
  source 1..75: mol_type = other DNA
gggatctatgcggaaatttttctttgacgatactcctccattacaagatttaatcagggttgatatatgtaaagc

SEQ ID NO: 838365 - DNA, 75 bp, synthetic construct
  source 1..75: mol_type = other DNA
cggcgggagaatgttttctccaggacgcgctggcaatcctcgaacaagcggaaaatgccaaattacgggcgcgga

SEQ ID NO: 838366 - DNA, 75 bp, synthetic construct
  source 1..75: mol_type = other DNA
aatattgatctcggagcgccagtttttgaaaactacacactttttgcacctattgctagcacaaaaataagaagt

SEQ ID NO: 838367 - DNA, 75 bp, synthetic construct
  source 1..75: mol_type = other DNA
gattactctgaaatagaacacctaaatgtgatcaatggcatgggagtgacattaggtgattctatcgtcgggatt

SEQ ID NO: 838368 - DNA, 75 bp, synthetic construct
  source 1..75: mol_type = other DNA
acgccggacgaactggcagaaagcctgcatgaaaaacaggaactgccgccagtacgcttaaaaacacaatcatat

SEQ ID NO: 838369 - DNA, 75 bp, synthetic construct
  source 1..75: mol_type = other DNA
cggcttaatgcgccatcctgtctatagcccggagattgattatctggaactttttgacgaaccattagtggtggt

SEQ ID NO: 838370 - DNA, 75 bp, synthetic construct
  source 1..75: mol_type = other DNA
gttaccggttgatcaccctttagcacatgaaaaagagatcaccgccgcgcagcttaatggcgtgaatttcgtcag

SEQ ID NO: 838371 - DNA, 75 bp, synthetic construct
  source 1..75: mol_type = other DNA
tagtcgtaccattggatgcgcaatggagtgatgttgggtcatggtctgcgctgtgggaaataagttcaaaagacc

SEQ ID NO: 838372 - DNA, 75 bp, synthetic construct
  source 1..75: mol_type = other DNA
tctggaagtaattgagattcagtccggggtttatcttggtggcgatgatataatacgtttgaatgataagtatgg

SEQ ID NO: 838373 - DNA, 75 bp, synthetic construct
  source 1..75: mol_type = other DNA
gaaaatcccgctcgatctgattgaagtgcgctctggatcttaccttgatgaggatgatgtggtgcggtttgcgga

SEQ ID NO: 838374 - DNA, 75 bp, synthetic construct
  source 1..75: mol_type = other DNA
cgctgaaaggtaaacctgtttctgcgcagctaacggtaggcgtggtcgatgaaatgatctacgcgctgcaaccag

SEQ ID NO: 838375 - DNA, 75 bp, synthetic construct
  source 1..75: mol_type = other DNA
aattaacgaggctgagtttattaattgtcctgaagagtctatcgattatgctgtgatggaaaaacaaaagacgct

SEQ ID NO: 838376 - DNA, 75 bp, synthetic construct
  source 1..75: mol_type = other DNA
tgaaataattgaggttagatcaggagtctacctggaagaggatgatgttataagagtttcttcttctggagtagg

SEQ ID NO: 838377 - DNA, 75 bp, synthetic construct
  source 1..75: mol_type = other DNA
gttgcagtcgatggcctgtccgtcgttaacggtgcacaaaccattgctagtgctgcacagtttatgcgtgaaaac

SEQ ID NO: 838378 - DNA, 75 bp, synthetic construct
  source 1..75: mol_type = other DNA
agaaatctggacggatggttacgggctgcgcgggcaaataatgttgatgaaggggaaatgtctggggcattttcc

SEQ ID NO: 838379 - DNA, 75 bp, synthetic construct
  source 1..75: mol_type = other DNA
atgaatgaaaaaggtgcaggattaattgagattgcttttgttttgatcctttttacagctgtgctcccgatgagt

SEQ ID NO: 838380 - DNA, 75 bp, synthetic construct
  source 1..75: mol_type = other DNA
gactggccccgttaatataccaccagtaaatatgtacggtgatgggcagggtgaaacggttattgtgtttgacaa

SEQ ID NO: 838381 - DNA, 75 bp, synthetic construct
  source 1..75: mol_type = other DNA
aaaaaccagcttcaaatcatgtgtgagaatgaaggaattactcaggcagcaatgattgagaggctgattgaaagg

SEQ ID NO: 838382 - DNA, 75 bp, synthetic construct
  source 1..75: mol_type = other DNA
agatacagaagtggcactatttataaatatcacttgaatgatatatctgaaggtggttgctcgtttatatccctg

SEQ ID NO: 838383 - DNA, 75 bp, synthetic construct
  source 1..75: mol_type = other DNA
aaagcctggcaacatcacccgggcacaatcacccacagtatggcagcagggcatgctggatactcaggcttctca

SEQ ID NO: 838384 - DNA, 75 bp, synthetic construct
  source 1..75: mol_type = other DNA
aacaaactcaccgagaacattattctcgaaccggcagggcgtaacactgcaccagccattgcgctggcggcgctg

SEQ ID NO: 838385 - DNA, 75 bp, synthetic construct
  source 1..75: mol_type = other DNA
gcgatccgttaatgttggtgctggcggcagatcatgtgattgccgacgaagatgcgttccgcgccgccgtgcgta

SEQ ID NO: 838386 - DNA, 75 bp, synthetic construct
  source 1..75: mol_type = other DNA
ccgcagcatccttatacgcgtaaattactggcggcagttccggtcgctgaaccgtcccgacaacgaccgcagcgt

SEQ ID NO: 838387 - DNA, 75 bp, synthetic construct
  source 1..75: mol_type = other DNA
acaggtatacgctggtactggcagtatcaacacgtcgaatgaagagctgaaattgcgtattgaggctgacgagaa

SEQ ID NO: 838388 - DNA, 75 bp, synthetic construct
  source 1..75: mol_type = other DNA
atgaggatgcacttccccggttttcgcttctcctgcgaggatattgcattcgccagaactcatcgtcgatctcat

SEQ ID NO: 838389 - DNA, 75 bp, synthetic construct
  source 1..75: mol_type = other DNA
tggaacagcggcatgttcctgttccgcgccggacgctatctcgaagaactgaaaaaatatcgcccggatatcctc

SEQ ID NO: 838390 - DNA, 75 bp, synthetic construct
  source 1..75: mol_type = other DNA
agttgcacttgctgcattgtctaatcttcagaatggaaaagatcccttacttttagtactggcagctgatcatgt

SEQ ID NO: 838391 - DNA, 75 bp, synthetic construct
  source 1..75: mol_type = other DNA
ccccggaacgttatcgttcacacggaccgtggaggccagtactgttcagcagattatcaggcgcaactgaagcgg

SEQ ID NO: 838392 - DNA, 75 bp, synthetic construct
  source 1..75: mol_type = other DNA
gcgcaactggcctgcgatgccctgcagatggcgctgtggcggcgtaagagaccccggaacgttatcgttcactcg

SEQ ID NO: 838393 - DNA, 75 bp, synthetic construct
  source 1..75: mol_type = other DNA
gcaagaacagacgttgccatttggcgtgaaattattgtgcgtaagtatttgctttttttttaatgagcgggtggt

SEQ ID NO: 838394 - DNA, 75 bp, synthetic construct
  source 1..75: mol_type = other DNA
acctggttgcgcgatgccgacgatccacgtctcaatagtatcgttcagcaactctttcgcgtactccgggggtta

SEQ ID NO: 838395 - DNA, 75 bp, synthetic construct
  source 1..75: mol_type = other DNA
atggatgcgcggcgagggcgcatcttacagggacgttaccttgcgcccgacccggtagccgcaagggataagctg

SEQ ID NO: 838396 - DNA, 75 bp, synthetic construct
  source 1..75: mol_type = other DNA
gcattaacgttcttggcacgttgattgttgaagttgaagcagaaaacggccagaccggattcgctgtttcgacag

SEQ ID NO: 838397 - DNA, 75 bp, synthetic construct
  source 1..75: mol_type = other DNA
cccgttgcccgcagcagagaatgacactctgtgtacgttctcctccgctcacgccagcgccacttcctgtcatgt

SEQ ID NO: 838398 - DNA, 75 bp, synthetic construct
  source 1..75: mol_type = other DNA
atctcgatgatgaagatgcagactggaaaacgacaacccaggggcagaaatcagtcggtgatacttcggcgacgc

SEQ ID NO: 838399 - DNA, 75 bp, synthetic construct
  source 1..75: mol_type = other DNA
aatcaccgggattgggcgtccacacctggcggaagagagccaggaggtggtcagcgtcactggtgtgacggtgac

SEQ ID NO: 838400 - DNA, 75 bp, synthetic construct
  source 1..75: mol_type = other DNA
gtcaaattattatgcgtaagtatttgcttttttttaatgagcggatggtacggtgaaaaattatactcttttggt

SEQ ID NO: 838401 - DNA, 75 bp, synthetic construct
  source 1..75: mol_type = other DNA
gcgctgtttggcgcgctgccgctggtgttgtcgggcggcgacggctcggagctgcggcaacccctggggatcacc

SEQ ID NO: 838402 - DNA, 75 bp, synthetic construct
  source 1..75: mol_type = other DNA
atgggctatggcgtcgatgaaaaagtgcaggtgccacaaaaactgtatgaagcaggcgtgccaaccgtgctggtg

SEQ ID NO: 838403 - DNA, 75 bp, synthetic construct
  source 1..75: mol_type = other DNA
tcgtgggtgaaaaaaggtgagctgtatatgcaacggaggaagaaacctcgttgcgggaagcctggaagaagtatc

SEQ ID NO: 838404 - DNA, 75 bp, synthetic construct
  source 1..75: mol_type = other DNA
gtaatggaaaaaactcaggattgtgtagttattccacttgatgctgactggagtgacatcggttcatggacatca

SEQ ID NO: 838405 - DNA, 75 bp, synthetic construct
  source 1..75: mol_type = other DNA
agtaaattctttcgtcgaaaaacctgatttagaaacggctaaaaattatctcgaacaaaaatgctatttgtggaa

SEQ ID NO: 838406 - DNA, 75 bp, synthetic construct
  source 1..75: mol_type = other DNA
acgtacaagacataaagaagattgtcgaaattcttaaaaagcaaaaacgtagcgaacatatatcccatcgcgaag

SEQ ID NO: 838407 - DNA, 75 bp, synthetic construct
  source 1..75: mol_type = other DNA
aaaacatattgttgaggctattaaaaacggtggccgccatgaacaccatattcatcgcgtagtttatcggccatg

SEQ ID NO: 838408 - DNA, 75 bp, synthetic construct
  source 1..75: mol_type = other DNA
gaaggcggtcgagttcctcaagcagaaccagcgcagcgagtacaagcgccaccgcgagatttaccgtccctgggg

SEQ ID NO: 838409 - DNA, 75 bp, synthetic construct
  source 1..75: mol_type = other DNA
ttcgaagtagagcgttttgttgaaaaaccagatattgaaacagctgaagaatatgtttcaaatggcgaatattac

SEQ ID NO: 838410 - DNA, 75 bp, synthetic construct
  source 1..75: mol_type = other DNA
cggacaggaactctgaatgtcaaaggtgcattagtgtcatctccgtgcatactggagacaccagaaattaaactt

SEQ ID NO: 838411 - DNA, 75 bp, synthetic construct
  source 1..75: mol_type = other DNA
gtgattttttcgatattatcggctttaagcaatttctttttgagcaaactgaaatgagccctggtacggtgcgtg

SEQ ID NO: 838412 - DNA, 75 bp, synthetic construct
  source 1..75: mol_type = other DNA
ggccattaagccgctatcttaaagactttaagcacagccagacccattgcgcgcattgccgtaaattactcgatc

SEQ ID NO: 838413 - DNA, 75 bp, synthetic construct
  source 1..75: mol_type = other DNA
gatgatagagaacaacgaggaagaattgaatcttctccattcagaaaaaaaaatgttacccctacaaatgaaatg

SEQ ID NO: 838414 - DNA, 75 bp, synthetic construct
  source 1..75: mol_type = other DNA
tgtatctggactggtaaagtgggaaattattggtgatctaggtgagagcagtgaaacaaagaaattcaatatttg

SEQ ID NO: 838415 - DNA, 75 bp, synthetic construct
  source 1..75: mol_type = other DNA
atcaaataacctgaataacgttggggcagtaaatgcccagactggtaatttcagcggcaatgtgaatggtgtaaa

SEQ ID NO: 838416 - DNA, 75 bp, synthetic construct
  source 1..75: mol_type = other DNA
gtcattgccagatattgctttaccagaacctgaaacgccgcctgccgcaacggttgtcgcccaggagggcgaaga

SEQ ID NO: 838417 - DNA, 75 bp, synthetic construct
  source 1..75: mol_type = other DNA
gtgataatggcataacacaaagcatgtcccgacgtggtaactgcttagataatgcagcaatggaaagctttttta

SEQ ID NO: 838418 - DNA, 75 bp, synthetic construct
  source 1..75: mol_type = other DNA
agatttgtgaatgttaattctgtcaataaagtcaacgtaaagagtaaagttaaaaacagttatatctcacgatct

SEQ ID NO: 838419 - DNA, 75 bp, synthetic construct
  source 1..75: mol_type = other DNA
cttagccacagggatggttcctgaaacatcagtattgctggttgatgaaaagcgtggtgaagctagtattaatat

SEQ ID NO: 838420 - DNA, 75 bp, synthetic construct
  source 1..75: mol_type = other DNA
aatgtgttggagatgttggtattggctggtcatatgacggtaaaaaattcatcaagcctgaagataaaaccgcgc

SEQ ID NO: 838421 - DNA, 75 bp, synthetic construct
  source 1..75: mol_type = other DNA
ggcatcatgctgaaagtcacgccgcagattaacgaaggtaacgcggtacagatggtgattgagcaggaagtctcg

SEQ ID NO: 838422 - DNA, 75 bp, synthetic construct
  source 1..75: mol_type = other DNA
cactgttctgcttgtaccaaccgctgcaaaatgcgtttaacaatcgcgaaaatgtgaggaaaattgcaaaaaaat

SEQ ID NO: 838423 - DNA, 75 bp, synthetic construct
  source 1..75: mol_type = other DNA
cggccggtatgtagtgatgatgacggaatgctcattgatgctgtcattcgccactacctgaagaatgtggatgaa

SEQ ID NO: 838424 - DNA, 75 bp, synthetic construct
  source 1..75: mol_type = other DNA
agcaccagtggatagatcagtggctccagctttggggcgcatggtgccagacagggaagatagacaaggcgatga

SEQ ID NO: 838425 - DNA, 75 bp, synthetic construct
  source 1..75: mol_type = other DNA
ttccactatttatgtattatgcaataatgtatctaattataagcactgctatgcgaattttgaggcaaagatatg

SEQ ID NO: 838426 - DNA, 75 bp, synthetic construct
  source 1..75: mol_type = other DNA
aaatagctacatgctaagttttcccgcttatgcaaactatgttgctaatccaaatatgtattttgctggatacgg

SEQ ID NO: 838427 - DNA, 75 bp, synthetic construct
  source 1..75: mol_type = other DNA
ccgaattgcatcatggcagcatgcagtaagtaagcctcgcctgatgaagacgcgtggcggaaatcagtataaaca

SEQ ID NO: 838428 - DNA, 75 bp, synthetic construct
  source 1..75: mol_type = other DNA
tgcctgaaagcaataaatcaattcgtttaatcccgactcagcccgttattcgtgttgaagccggtcaagtacaac

SEQ ID NO: 838429 - DNA, 75 bp, synthetic construct
  source 1..75: mol_type = other DNA
gtttcgtttgcttatgtgctggtcaacctggtggtggatttgctctatttgtggattgatccgcgtatcggacgt

SEQ ID NO: 838430 - DNA, 75 bp, synthetic construct
  source 1..75: mol_type = other DNA
gcaacgatattgcaaaagatgaatgcgcccacgctttgcctgacgctcgttttactgacaggttgcgcaggcacg

SEQ ID NO: 838431 - DNA, 75 bp, synthetic construct
  source 1..75: mol_type = other DNA
tgtttatcgtgttcagattgtttggtcgtgaatggtcgtttgacctcaaggacaggaccagaacagacaatcacg

SEQ ID NO: 838432 - DNA, 75 bp, synthetic construct
  source 1..75: mol_type = other DNA
ttatcgcttttaacgtcttcttcgtttacgcggtttactgtggcctgacattcttcattccattcctgaaaaaca

SEQ ID NO: 838433 - DNA, 75 bp, synthetic construct
  source 1..75: mol_type = other DNA
gccgagtaaatatctatgctacacctttatcatcagtaccgctgcgctcgtactgttgattatgctgccgcacga

SEQ ID NO: 838434 - DNA, 75 bp, synthetic construct
  source 1..75: mol_type = other DNA
ggttacccctgaatttttcgccattttggcctcagccgtggactgacgttatcggcccgataagcgctcagcttg

SEQ ID NO: 838435 - DNA, 75 bp, synthetic construct
  source 1..75: mol_type = other DNA
atattaagtatgctggtttcgatatagtttccagtagtttcagggataacactagtgatgatggaggttttttta

SEQ ID NO: 838436 - DNA, 75 bp, synthetic construct
  source 1..75: mol_type = other DNA
ctacattgtcacgacggccccaagagatgcgaaacttcaaaaatcagtaagggaaatctcccagaaacatagcaa

SEQ ID NO: 838437 - DNA, 75 bp, synthetic construct
  source 1..75: mol_type = other DNA
tgttattttatcctattttttatataatgcggtggaaaatgatgcggctttaagtcatcgatatgattcaatcat

SEQ ID NO: 838438 - DNA, 75 bp, synthetic construct
  source 1..75: mol_type = other DNA
tcgtacatggacgcttgaccttaaggataatgaccacacagcccccccccccccgttaaactcccttcaaaaccc

SEQ ID NO: 838439 - DNA, 75 bp, synthetic construct
  source 1..75: mol_type = other DNA
agtttgtcccttacgaggcagacagcattacaccattcgtcgcaaacagtccactaatgtcgggtgatgctgcca

SEQ ID NO: 838440 - DNA, 75 bp, synthetic construct
  source 1..75: mol_type = other DNA
gtttgccctcggacagattgcgaatacgactgaagatgacagcgatatcctgctctatcacgcgttacgtgatta

SEQ ID NO: 838441 - DNA, 75 bp, synthetic construct
  source 1..75: mol_type = other DNA
agcatcaatgggtagaccagtggctccagttgtggggcgcatggtgccagaccggcaagattgataaagcgatga

SEQ ID NO: 838442 - DNA, 75 bp, synthetic construct
  source 1..75: mol_type = other DNA
ttaccaccgaatgcagtagtcgaagatgtcggatttaaaaaataccctatgctcctagttaatgctatgagacgc

SEQ ID NO: 838443 - DNA, 75 bp, synthetic construct
  source 1..75: mol_type = other DNA
ttcaaacaaattcataatttgttaaaagtgactaaaatgatatctatcgaaggagataaaaatgtccattgccga

SEQ ID NO: 838444 - DNA, 75 bp, synthetic construct
  source 1..75: mol_type = other DNA
gtgccactacagaatacagaaaaaatagattttactatcacaaataaaggcgatgaggctgaaggactttctctg

SEQ ID NO: 838445 - DNA, 75 bp, synthetic construct
  source 1..75: mol_type = other DNA
cgcccacgctttgcctgacgctcgttttactgacaggttgcgcaggcacgcagaacgcgccacggccagcgccgt

SEQ ID NO: 838446 - DNA, 75 bp, synthetic construct
  source 1..75: mol_type = other DNA
taaaagaacttatctcatatttcgggtatgggatgggtcagtgctttagtttcggtctggttggaagctttatcc

SEQ ID NO: 838447 - DNA, 75 bp, synthetic construct
  source 1..75: mol_type = other DNA
ctggagactggggcaccgtcaaaaacattagtgttcccacgatgtctttacgtgagagaatctttattgaggaac

SEQ ID NO: 838448 - DNA, 75 bp, synthetic construct
  source 1..75: mol_type = other DNA
gttgagaagttaaacaagatccccggcgtcaacatcgacctgaaaaccgtttcgccaccggcagcggctgccgtt

SEQ ID NO: 838449 - DNA, 75 bp, synthetic construct
  source 1..75: mol_type = other DNA
ccgtactgggtacgctttcgcgcacgctgggtactgaggccagcgggatctacgagcagtttttacgcagcgccc

SEQ ID NO: 838450 - DNA, 75 bp, synthetic construct
  source 1..75: mol_type = other DNA
cgctgtttcgaatcacctgtgatcactgtgcacatgtacttcttttttcttataaaaaagctagatcattgatcc

SEQ ID NO: 838451 - DNA, 75 bp, synthetic construct
  source 1..75: mol_type = other DNA
ggaaaatcagcaacgcaatcaggacggagaggccagacgtgaacagctacgcaacgatattgcaaaagatgaatg

SEQ ID NO: 838452 - DNA, 75 bp, synthetic construct
  source 1..75: mol_type = other DNA
tcggtttgggatcatcaccgcgtgattgctctgacatctcaggaaatccatcaggttatattggctttatgcgca

SEQ ID NO: 838453 - DNA, 75 bp, synthetic construct
  source 1..75: mol_type = other DNA
cctcagcccgggatgcggcggcctcaaaagaggtagcgaaatcatcagaaacgaacgcatcatcaagtgccagta

SEQ ID NO: 838454 - DNA, 75 bp, synthetic construct
  source 1..75: mol_type = other DNA
atggataaaataaaatcaaatgcgcgtgatttaagacgcaatctcactttgcaggaacgaaagctctggcgatat

SEQ ID NO: 838455 - DNA, 75 bp, synthetic construct
  source 1..75: mol_type = other DNA
atcagcgccgggggacaggatatgcagcaggtgctggcgcaactccgcgtggaaaatcagcaacgcaatcaggac

SEQ ID NO: 838456 - DNA, 75 bp, synthetic construct
  source 1..75: mol_type = other DNA
gtggcgcttgaggatgcgagcacgacgaaaaaggggatagtacagctcagtagtgcgactaacagcacttccgag

SEQ ID NO: 838457 - DNA, 75 bp, synthetic construct
  source 1..75: mol_type = other DNA
ccagtggtcgggccgtattgtctcaggaacaggacggcattaaatcgcacacccacagcgccagcgcatccagta

SEQ ID NO: 838458 - DNA, 75 bp, synthetic construct
  source 1..75: mol_type = other DNA
acccaggcaaatcatgaactggcaagcctgagtcgagtatacgggtggggatatgagcgtggggatatgagcgtg

SEQ ID NO: 838459 - DNA, 75 bp, synthetic construct
  source 1..75: mol_type = other DNA
caggtatacggaaaatggatgtctgaaaacaataatgcacaggtagctttgttaaatacacagttaagcgagttt

SEQ ID NO: 838460 - DNA, 75 bp, synthetic construct
  source 1..75: mol_type = other DNA
tgatgattttaatgtaggtatgttgactgccgacgcaacaggccgcaatgcactggcaaacgtcaacgaagaaga

SEQ ID NO: 838461 - DNA, 75 bp, synthetic construct
  source 1..75: mol_type = other DNA
tggggagaggattagggtgtggggaaaagcgcccaccctgcccgcaccctgctccggtcggacctggcagctata

SEQ ID NO: 838462 - DNA, 75 bp, synthetic construct
  source 1..75: mol_type = other DNA
gcgatttaagacgcaacctcaccccgcaggagcgaaagttctggcgatatcttcgcagccgacgttttgctgatt

SEQ ID NO: 838463 - DNA, 75 bp, synthetic construct
  source 1..75: mol_type = other DNA
tgagtcgcagggctggaccgtgctgcgtttctggaataacgagattgattgtaatgaggagacggtgctggagaa

SEQ ID NO: 838464 - DNA, 75 bp, synthetic construct
  source 1..75: mol_type = other DNA
ggaaatataccgcacaggacgccactacagcgcgaaaaggcattgtccagctcagtagcgccaccaacagcgatt

SEQ ID NO: 838465 - DNA, 75 bp, synthetic construct
  source 1..75: mol_type = other DNA
aagatcagaacggtgcggatatccctggcaaagatacctttacgaaaaatattggtgcctgccgtgccttcggtg

SEQ ID NO: 838466 - DNA, 75 bp, synthetic construct
  source 1..75: mol_type = other DNA
accaaaggcagtaaaagcagccaatgacaatgctgagaaacgtctgcagaaagatcagaacggtgcggatatccc

SEQ ID NO: 838467 - DNA, 75 bp, synthetic construct
  source 1..75: mol_type = other DNA
atgtcatggggcagagcagcagcggtaccagtgcaaacggcagtgctgacctggacattaacctggggcgctggg

SEQ ID NO: 838468 - DNA, 75 bp, synthetic construct
  source 1..75: mol_type = other DNA
cctcgttctcgcatcatggtttgcctcaaggcagtgacgacgcgctacggtatattgcggaacatgacgatgcgc

SEQ ID NO: 838469 - DNA, 75 bp, synthetic construct
  source 1..75: mol_type = other DNA
gacattaagtatggacattgacacgctgcgggcggcgctgcttttccctctggcggatgctagactggccccctg

SEQ ID NO: 838470 - DNA, 75 bp, synthetic construct
  source 1..75: mol_type = other DNA
cgtctgagaccggaccgctctttactaaagagtcgtctgacaccgtgggtattgtcagtattcctggtgttgaag

SEQ ID NO: 838471 - DNA, 75 bp, synthetic construct
  source 1..75: mol_type = other DNA
gtatgaggctcgtctgtctcatcggtttgatacgacttatctgagtggagcgtggtggcaccagaattactggga

SEQ ID NO: 838472 - DNA, 75 bp, synthetic construct
  source 1..75: mol_type = other DNA
agtgtggtgccgacggagaaagccgtggtgtaccgcgaattcagggcaaactacgtcaaacgttatttcctgcaa

SEQ ID NO: 838473 - DNA, 75 bp, synthetic construct
  source 1..75: mol_type = other DNA
aggatgaacctgttgccgggaaaacggcagtggccgggtcggcgaataacgtcacagtggaagcggatggcatat

SEQ ID NO: 838474 - DNA, 75 bp, synthetic construct
  source 1..75: mol_type = other DNA
atgaactggaaaatatttgcgctttttgccctgactgcaggaatgcatatcactgttcatgcctcagacaatgtg

SEQ ID NO: 838475 - DNA, 75 bp, synthetic construct
  source 1..75: mol_type = other DNA
ttcagataaccatttcctggatgagctggttcgtaaacagcaggcttcgcaggacgggaaaccccggcagggtgc

SEQ ID NO: 838476 - DNA, 75 bp, synthetic construct
  source 1..75: mol_type = other DNA
ggtacctctgcggtcacagggtttgctgacagcatgaagcgcagcgcaagtgagcttccggtgaactggtgggta

SEQ ID NO: 838477 - DNA, 75 bp, synthetic construct
  source 1..75: mol_type = other DNA
gaaagccaactcttcggataaccgttttgatactgacggcactggctggctggcctctgtggaaaccggtctacc

SEQ ID NO: 838478 - DNA, 75 bp, synthetic construct
  source 1..75: mol_type = other DNA
gctgccagctggaatattcagcgtggggcggcagtgaaatcggtgctcgataacctcgataacgccggaaccatc

SEQ ID NO: 838479 - DNA, 75 bp, synthetic construct
  source 1..75: mol_type = other DNA
ctcaggcttatttgcttagtaaaacagaccccgctcgttgggattatggcgtgaatggtggacgcctgaaatatt

SEQ ID NO: 838480 - DNA, 75 bp, synthetic construct
  source 1..75: mol_type = other DNA
tgcggtgctgtccacggccatcagcccgctgcgcagtgacctgcgcctcgggaagtcatggacgcgcaatgacca

SEQ ID NO: 838481 - DNA, 75 bp, synthetic construct
  source 1..75: mol_type = other DNA
gacagaccactaccgtcatgacaaccagaagtcgcggtatgagatgcagctgacgaagcgtctgccctggggtca

SEQ ID NO: 838482 - DNA, 75 bp, synthetic construct
  source 1..75: mol_type = other DNA
tgctccatcacagatcactgttaagcggggagatgacagtgtctgtcatttttcagtgaaaggtattgtacccaa

SEQ ID NO: 838483 - DNA, 75 bp, synthetic construct
  source 1..75: mol_type = other DNA
gaacgccgtggtttaccgccagttcggggcaaattatgtgaaacgttacgttcttcagattaaggacagtaatgg

SEQ ID NO: 838484 - DNA, 75 bp, synthetic construct
  source 1..75: mol_type = other DNA
agtcttatcatattagctatgatttctattgttattataatagcatctagagaatatacagatgaaatagaacat

SEQ ID NO: 838485 - DNA, 75 bp, synthetic construct
  source 1..75: mol_type = other DNA
ggaatcaaggggatatgcgccggatatctctggtatcgcctccaccccttcacgtataactgtgaaacagaacgg

SEQ ID NO: 838486 - DNA, 75 bp, synthetic construct
  source 1..75: mol_type = other DNA
aatccggtggtctgggtgtcacgcatatgctggggggactgggagcgctgtcgctcagtgcaaacgtgtcaaagg

SEQ ID NO: 838487 - DNA, 75 bp, synthetic construct
  source 1..75: mol_type = other DNA
atctgcatcggccagttatgcgtttgatgccattcagaccaacatgggcgtgtcccgttcctacaacaggcacgg

SEQ ID NO: 838488 - DNA, 75 bp, synthetic construct
  source 1..75: mol_type = other DNA
gctggctttatttcaaacaatggtgttctgctgatgaatatgctggctgagccaaaagctgtcagcgtgaataca

SEQ ID NO: 838489 - DNA, 75 bp, synthetic construct
  source 1..75: mol_type = other DNA
atgcgggtgtcccggcgactgggaaatagtaatctcagcttgtctgggtggcaggaagattactggtggctgaac

SEQ ID NO: 838490 - DNA, 75 bp, synthetic construct
  source 1..75: mol_type = other DNA
agtttcacacttttcttttgcaggtaatgactcagaactgaacctggattttttacagggtatgagtactattcc

SEQ ID NO: 838491 - DNA, 75 bp, synthetic construct
  source 1..75: mol_type = other DNA
gggggatctattgctggggaaatcacagacccgtacagagctgttttctgactttaatttctacggcgcagctct

SEQ ID NO: 838492 - DNA, 75 bp, synthetic construct
  source 1..75: mol_type = other DNA
gtgtccagcggtcagatggttggagggacggctgaatccaccaccatcaacaaaaatggccggcaggttatctgg

SEQ ID NO: 838493 - DNA, 75 bp, synthetic construct
  source 1..75: mol_type = other DNA
ggttattatgctatttaagcagcttgaaccaatctcaaaacatcatcccctagtctttatcggtagaaatgatcc

SEQ ID NO: 838494 - DNA, 75 bp, synthetic construct
  source 1..75: mol_type = other DNA
aactgcgttttgcacgctgggaagatatcgattttgagacaaaattgtgggagatcccggcagaagtaatgaaga

SEQ ID NO: 838495 - DNA, 75 bp, synthetic construct
  source 1..75: mol_type = other DNA
cggccacactgcggggcatggtgaacaatgacctgaagaccaccgctgaagccgtgctgtccctggtgaaagacg

SEQ ID NO: 838496 - DNA, 75 bp, synthetic construct
  source 1..75: mol_type = other DNA
ggaagatggtactccatttctagaagttcatcatattgagtggctttcaaagggggggggaggactctgtggaaa

SEQ ID NO: 838497 - DNA, 75 bp, synthetic construct
  source 1..75: mol_type = other DNA
caggctaacgtcagaccaaaagatacgcttgaaagcaattttatttaccgtaaattgggcaccattcctgagcag

SEQ ID NO: 838498 - DNA, 75 bp, synthetic construct
  source 1..75: mol_type = other DNA
cgagcattttgaaccttccacaccgcctgaagaccctgatctttatctcttctggctagcagagaaaaaacgcca

SEQ ID NO: 838499 - DNA, 75 bp, synthetic construct
  source 1..75: mol_type = other DNA
ggattatggaccgcatgaccatgaacggtggtcgatgggtgacgtttaactgggatagctggcgtccaaatgtca

SEQ ID NO: 838500 - DNA, 75 bp, synthetic construct
  source 1..75: mol_type = other DNA
gatttacaccccggacgcggctacccgattggcgcagccttcttctccgttgggcgtttttacccggcgctggtc

SEQ ID NO: 838501 - DNA, 75 bp, synthetic construct
  source 1..75: mol_type = other DNA
ccgatgcggtatttactatcgcatccgatgacctgtggatcgaaagttcagcgatccaacaattacataccacgg

SEQ ID NO: 838502 - DNA, 75 bp, synthetic construct
  source 1..75: mol_type = other DNA
atgagccgtaaaatatttgtacttttttccctgacagcaggactgtttatttctgcccacgcttcggaaaacgtg

SEQ ID NO: 838503 - DNA, 75 bp, synthetic construct
  source 1..75: mol_type = other DNA
ggccgtggtggatactcagctggccggagcgggtgccgggggcggacgaggtgctgccgcctccgccgcccgcat

SEQ ID NO: 838504 - DNA, 75 bp, synthetic construct
  source 1..75: mol_type = other DNA
ttgtgaagtggcctgtgtggtcgctcacccttcagaacaggagttgaatgccgatgtctttttaccccggctgaa

SEQ ID NO: 838505 - DNA, 75 bp, synthetic construct
  source 1..75: mol_type = other DNA
aatacttggctcaatttaattgctaatacagttaattgtaagcggagctactggagtttcaacaaaactgcccga

SEQ ID NO: 838506 - DNA, 75 bp, synthetic construct
  source 1..75: mol_type = other DNA
ttcagctcccggggtgacatgagcatgggtacagccgccgccggcagtaacatgacgttctcaccgtcccggaat

SEQ ID NO: 838507 - DNA, 75 bp, synthetic construct
  source 1..75: mol_type = other DNA
aagcggtgctggcactggtgaaggacggggcgaccgatggtgttcagatcgacccgacgctgttttcacagtacg

SEQ ID NO: 838508 - DNA, 75 bp, synthetic construct
  source 1..75: mol_type = other DNA
gttaacgcaggggagattcgctttgataatcagacgacaccggatgctgcgctgagccgtgctgttgcaaaaggc

SEQ ID NO: 838509 - DNA, 75 bp, synthetic construct
  source 1..75: mol_type = other DNA
ttcccgaagaggggctgaaacggatgctgggcgaaacccggcactacggtattccggccacactgcggggcatgg

SEQ ID NO: 838510 - DNA, 75 bp, synthetic construct
  source 1..75: mol_type = other DNA
ttactttgtgagcctcggtattccacgtgaaggtctgctgcccatgctgaaggatgcccgccgttacaacattcc

SEQ ID NO: 838511 - DNA, 75 bp, synthetic construct
  source 1..75: mol_type = other DNA
ttgcaacaaccagtgccggggaaacagcatgatgcctggattcagggactttcaggcaagtcgcagatggtatca

SEQ ID NO: 838512 - DNA, 75 bp, synthetic construct
  source 1..75: mol_type = other DNA
tgctgttcatgcttcagaaaatgtgaacacaactgaaaaccgccagttcctgaagcagcaggaaacactgagtca

SEQ ID NO: 838513 - DNA, 75 bp, synthetic construct
  source 1..75: mol_type = other DNA
atgattttgtctgagctgattagccacggtgaagttgatgaccagatgctattaaatgccacctctctgatacgt

SEQ ID NO: 838514 - DNA, 75 bp, synthetic construct
  source 1..75: mol_type = other DNA
actggctgtcgccagttgtcgaaccccggtcggggcttctcatccccccggtgtgtgcaatatacgaaaaaaaag

SEQ ID NO: 838515 - DNA, 75 bp, synthetic construct
  source 1..75: mol_type = other DNA
ttctatgggagagcgaaattgggagatattcctgaagcgcatttaacgcaggaaaatgttctttggaaaggctca

SEQ ID NO: 838516 - DNA, 75 bp, synthetic construct
  source 1..75: mol_type = other DNA
catcgggcattatctgaacataaaacactatcaataagttggagtcattaccagcttgatttagggggagaatcc

SEQ ID NO: 838517 - DNA, 75 bp, synthetic construct
  source 1..75: mol_type = other DNA
tgtcaggcaaaaatgttctttgcaccgacgttgtttaaacaaacgcgtccggtagatttaatcctgccgctgtaa

SEQ ID NO: 838518 - DNA, 75 bp, synthetic construct
  source 1..75: mol_type = other DNA
tcaattcctctggtaagtcaggttgagttttcgacatcatcatggcgacgggcagttctgtctcttgaagaacac

SEQ ID NO: 838519 - DNA, 75 bp, synthetic construct
  source 1..75: mol_type = other DNA
tagattcacgcaaagatcattttgatataatttcaaaccagtgcccggttttgattcctttgtataagcatcgtt

SEQ ID NO: 838520 - DNA, 75 bp, synthetic construct
  source 1..75: mol_type = other DNA
ggaattcaacctggcattatctggacattaccaggcagataaaaagccagttaaattttgggatgattttttata

SEQ ID NO: 838521 - DNA, 75 bp, synthetic construct
  source 1..75: mol_type = other DNA
ttcctgagaatgaactccggatgctatggaaggctttggatgatgctactgttggaggaggctccattgcatctg

SEQ ID NO: 838522 - DNA, 75 bp, synthetic construct
  source 1..75: mol_type = other DNA
agggtatcaattgtcacctgacatcagatttaaaaataaaaaagctcacttattgtttttaagggaaattacatc

SEQ ID NO: 838523 - DNA, 75 bp, synthetic construct
  source 1..75: mol_type = other DNA
tgacggatggcctttcgcttaatttgatgcctggcagtttatggcgggcgtcctgcccgccaccctccgggccgt

SEQ ID NO: 838524 - DNA, 75 bp, synthetic construct
  source 1..75: mol_type = other DNA
caaaacggctgctggtggcttcccggaagatattaatattaaagctgactgtgcaacaggtaatgcaactgctca

SEQ ID NO: 838525 - DNA, 75 bp, synthetic construct
  source 1..75: mol_type = other DNA
ggcgttatgtggacggcaattttgatgaaactttcgtcgccgaatggtgcgcactggagcataacgttgatatct

SEQ ID NO: 838526 - DNA, 75 bp, synthetic construct
  source 1..75: mol_type = other DNA
atagccaatatagataccgggaaagcagcaagatgtcgtaagtacatggggcgttttttatttggcacgcgggaa

SEQ ID NO: 838527 - DNA, 75 bp, synthetic construct
  source 1..75: mol_type = other DNA
ataagaaaatgaaattcgatactttgaatgcgaaaattgggattataggccttggttatgttggattgcctcttg

SEQ ID NO: 838528 - DNA, 75 bp, synthetic construct
  source 1..75: mol_type = other DNA
aacattggcggtcgtcctggtggggcgattaccgcaggttgcttcctgtcacgctttacccgtaagtacaactgg

SEQ ID NO: 838529 - DNA, 75 bp, synthetic construct
  source 1..75: mol_type = other DNA
aaatgcttttgggcatagttggaatggtgttagcttcgcaacacccaaaatacaaaatcaactggagcagctacc

SEQ ID NO: 838530 - DNA, 75 bp, synthetic construct
  source 1..75: mol_type = other DNA
gcaaaaaattaactggcaaaaaagggtgacaaaaccattccatgcatcaatgattcactggtcgataaatttggt

SEQ ID NO: 838531 - DNA, 75 bp, synthetic construct
  source 1..75: mol_type = other DNA
ggtcttaattatgctaagaatacactacataatataaatcaaaattctgctgtagcaacaaaatcatcctgtcag

SEQ ID NO: 838532 - DNA, 75 bp, synthetic construct
  source 1..75: mol_type = other DNA
ccaaactcggataaaatcaaaagaagatatggcaaatgcgaaagccagacttgccgaaatagaaaatcaacaaaa

SEQ ID NO: 838533 - DNA, 75 bp, synthetic construct
  source 1..75: mol_type = other DNA
gggaatatccgtggtagtgaaggcccgcgcaatgcggtagctaccgggctactgatttcctggcacagggagttg

SEQ ID NO: 838534 - DNA, 75 bp, synthetic construct
  source 1..75: mol_type = other DNA
gctgggtgattacggtagtccattgcgcgacaacgcgttgatgctctccttgctggaagagaacaaactgctacc

SEQ ID NO: 838535 - DNA, 75 bp, synthetic construct
  source 1..75: mol_type = other DNA
ttgccgggttatggcgatggagaaattcaggccaccattagcgggttagcgttaccgggtgaaaccgttgccgat

SEQ ID NO: 838536 - DNA, 75 bp, synthetic construct
  source 1..75: mol_type = other DNA
ttggagttggagtagtcgcaaatgcagaatataaaaagcctgcaggtaaaatagatggtgtcactccaaaccagg

SEQ ID NO: 838537 - DNA, 75 bp, synthetic construct
  source 1..75: mol_type = other DNA
ctgcatcggactgagtggaccggttttggcccaatcggcggcaagtccaagcgctgcagcgccctctgtcgcacc

SEQ ID NO: 838538 - DNA, 75 bp, synthetic construct
  source 1..75: mol_type = other DNA
cacggctcatcgacagcggcaagatcgacaacgccaaagcggaactcgcccgagcactgaacacgctggtggtga

SEQ ID NO: 838539 - DNA, 75 bp, synthetic construct
  source 1..75: mol_type = other DNA
cgataaaaccgggacgctgaccgaagggaagccgcaggttgtcgcagtgaaaacgtttgctgatgttgatgaagc

SEQ ID NO: 838540 - DNA, 75 bp, synthetic construct
  source 1..75: mol_type = other DNA
cccctcatgtatttgcccgcgtttgtgtggtgaaacctgacgaactggtgcctattcccggcgatttaacactgg

SEQ ID NO: 838541 - DNA, 75 bp, synthetic construct
  source 1..75: mol_type = other DNA
gtcaatggcgtatcggatgcattagtcagcgaggggaatctcctgtctcgcgaaaatgaaagcctcgacaatgaa

SEQ ID NO: 838542 - DNA, 75 bp, synthetic construct
  source 1..75: mol_type = other DNA
gtaagctgagatttttgacctcttccaatcctgaccatccaacagggaatatttttgatcctcgtgaactggcct

SEQ ID NO: 838543 - DNA, 75 bp, synthetic construct
  source 1..75: mol_type = other DNA
gaaatgtatgcttatacaaccggagagtattttaacggcgacgctaatttgaatagtgacggaactttctatttc

SEQ ID NO: 838544 - DNA, 75 bp, synthetic construct
  source 1..75: mol_type = other DNA
gtaaccttcgcgcagagaatgcctgtctaaaaaagctgaaggccttagttcaaagcgagaaaaacggcagaaagc

SEQ ID NO: 838545 - DNA, 75 bp, synthetic construct
  source 1..75: mol_type = other DNA
ccacgctgaaaaccaccctgcaaaaagaagtggaagcattgagctggcgtaaacaaggtaatcagctggtggtca

SEQ ID NO: 838546 - DNA, 75 bp, synthetic construct
  source 1..75: mol_type = other DNA
gatctgataaaaaaagcaggcagaaatgttttggccatccccggcgatatccgtgatgaggctttttgcggtcat

SEQ ID NO: 838547 - DNA, 75 bp, synthetic construct
  source 1..75: mol_type = other DNA
ctggtacgctaaaggccaaaacctctgtaatccgctgtataacctgatgtaccaggctggcgtccctctgcgtca

SEQ ID NO: 838548 - DNA, 75 bp, synthetic construct
  source 1..75: mol_type = other DNA
gcactggaactggttgatacctccagtgctccagatattgaatggcctacgcctccagtagttcaggccagatga

SEQ ID NO: 838549 - DNA, 75 bp, synthetic construct
  source 1..75: mol_type = other DNA
ggtatgatttggtgtgtcggtctggcattcagtctgattgcgtctggtcaggcggggtatgccatttcctacggt

SEQ ID NO: 838550 - DNA, 75 bp, synthetic construct
  source 1..75: mol_type = other DNA
ctacattgctcgcgctcgtccttgccacaactttcccggttgcgcacgccgccgtaccgaaagatatgctggtga

SEQ ID NO: 838551 - DNA, 75 bp, synthetic construct
  source 1..75: mol_type = other DNA
tgaaaacagtgaggtcgataagttactgcgcaatgcgctcgcgaccaccgaccagacgggactaccagcaggcac

SEQ ID NO: 838552 - DNA, 75 bp, synthetic construct
  source 1..75: mol_type = other DNA
aaagtgcctcccgtcgcctgcagctctcccgtggcgacattgacattgccgatgcgctgccggtggatcaactca

SEQ ID NO: 838553 - DNA, 75 bp, synthetic construct
  source 1..75: mol_type = other DNA
ctgcgcgatctgagcagcaaactggtggtggaagagtcgcaggaactggcgttaaaagatgacttgccattgctg

SEQ ID NO: 838554 - DNA, 75 bp, synthetic construct
  source 1..75: mol_type = other DNA
atttagccgtaatcttccctgatctggagatcgaattgaaatacgcctgcgctgataacatcacaggtaaagcta

SEQ ID NO: 838555 - DNA, 75 bp, synthetic construct
  source 1..75: mol_type = other DNA
cgattggcaactggagtccggattttgccgacccgtatatgtttatgaaacaggtcttcaatatcaataccatga

SEQ ID NO: 838556 - DNA, 75 bp, synthetic construct
  source 1..75: mol_type = other DNA
gaccatttagactggcaggaatatgccttattactgcttaacagcatgccagaaaaaacggctgaccattatcgc

SEQ ID NO: 838557 - DNA, 75 bp, synthetic construct
  source 1..75: mol_type = other DNA
gatatcctcggcgatgtttttgatgacgaaacctggattcaattattcaaaaaacactttgctgatgttattcaa

SEQ ID NO: 838558 - DNA, 75 bp, synthetic construct
  source 1..75: mol_type = other DNA
gacatcatcggtgatgtttttgatgaccaaacctggattcgattattcaaaaaacactttgctgatgttattcag

SEQ ID NO: 838559 - DNA, 75 bp, synthetic construct
  source 1..75: mol_type = other DNA
ggcttcttctgttctgtctctcagcagtcaataatgaacataaccaggatggctgaagatgtatggataatagaa

SEQ ID NO: 838560 - DNA, 75 bp, synthetic construct
  source 1..75: mol_type = other DNA
aattattacagacattggtttataagaagccctcgtcaaaagaagcgtttattggtttgataacaatagcaatct

SEQ ID NO: 838561 - DNA, 75 bp, synthetic construct
  source 1..75: mol_type = other DNA
accatctttgtgactcctgagccccaagaaatgcccgatatctgcaaaactgaatcactatttaatcttgagcgt

SEQ ID NO: 838562 - DNA, 75 bp, synthetic construct
  source 1..75: mol_type = other DNA
gtgagtgccggaagagtgaagttatgcagcgtgtgctggcgttttatcagggtaattttcaggaggtgatggcgt

SEQ ID NO: 838563 - DNA, 75 bp, synthetic construct
  source 1..75: mol_type = other DNA
gccatgtcggaaatcgtccgtgaacttagccagttgggatgggacgataataaaattggcaaagagctgggaatg

SEQ ID NO: 838564 - DNA, 75 bp, synthetic construct
  source 1..75: mol_type = other DNA
cagccgcaatgatggtcggtatccgtgccgacgagtcttataatcgtttcgtcgccattgccagcttaaataaac

SEQ ID NO: 838565 - DNA, 75 bp, synthetic construct
  source 1..75: mol_type = other DNA
aattcattatcccaatatcaacccgaatggcagtgctggcagcctgatattgaatgggttcgtcaaccgccagaa

SEQ ID NO: 838566 - DNA, 75 bp, synthetic construct
  source 1..75: mol_type = other DNA
tgtgattacctggccctggagcggcagtttaatgtttttttgctgccgccggtccggcggaagaagacagcatcc

SEQ ID NO: 838567 - DNA, 75 bp, synthetic construct
  source 1..75: mol_type = other DNA
gggtgatttatattaaaacggatttgttttacgccaacccctccctggctttattgggatttaatatttataaat

SEQ ID NO: 838568 - DNA, 75 bp, synthetic construct
  source 1..75: mol_type = other DNA
gctggattatctggacgcactggagctggtcgatacttccagtgcaccagatattgaatggccggaagaaccaga

SEQ ID NO: 838569 - DNA, 75 bp, synthetic construct
  source 1..75: mol_type = other DNA
tgtttcgggggcagttgttttacccattgtgaaacttttctctcgtgcaaaaattattacaaatattgatgggtt

SEQ ID NO: 838570 - DNA, 75 bp, synthetic construct
  source 1..75: mol_type = other DNA
ggaaatgaagctttgtattttaataatgctgaaagtctttttaatgttataaataacgagaatgtaccttcaaat

SEQ ID NO: 838571 - DNA, 75 bp, synthetic construct
  source 1..75: mol_type = other DNA
gtacagttggtttaccagcatgttatggtggttttgaatcacttgtagataatttaataaagcataatgacaagg

SEQ ID NO: 838572 - DNA, 75 bp, synthetic construct
  source 1..75: mol_type = other DNA
ttatttatatcggccttaccagctgattactcccaaaagggtgactgtcgttttttcgctattagaaaaaatatt

SEQ ID NO: 838573 - DNA, 75 bp, synthetic construct
  source 1..75: mol_type = other DNA
gcccttatggtgcaccgcagtttgatacacaagctaaagtgatgcgtaagtgtgatggttgccttgaccgactgg

SEQ ID NO: 838574 - DNA, 75 bp, synthetic construct
  source 1..75: mol_type = other DNA
tcactgcgatgaaccgacctgtgtggcaggttgcccaaccggcgcgatgcacaaacgcgaagaagatggcctggt

SEQ ID NO: 838575 - DNA, 75 bp, synthetic construct
  source 1..75: mol_type = other DNA
aagttcagagtgggggtggcaaattgatccggttggattacgggttctgttaaatacgctttgggatcgttatca

SEQ ID NO: 838576 - DNA, 75 bp, synthetic construct
  source 1..75: mol_type = other DNA
ttaaaatatactgtagatttcatctcttttagttattacatgactggttgtgtttcccacgacgaaagcattaat

SEQ ID NO: 838577 - DNA, 75 bp, synthetic construct
  source 1..75: mol_type = other DNA
ggtgttactggcaagaaaaatatggcgtacccacggcggcacgctggacgtgaacaacttgaccgcgctgaaggg

SEQ ID NO: 838578 - DNA, 75 bp, synthetic construct
  source 1..75: mol_type = other DNA
tacgaaataattgcatgggatatatacatggtcattcggctggaggaacaaacccttctttagtcgaggcaatgc

SEQ ID NO: 838579 - DNA, 75 bp, synthetic construct
  source 1..75: mol_type = other DNA
gttatatgcggcaattgagtccgacaaaaagcgaaataatggcatgtatagtcaaaacgccagggaagaagtgga

SEQ ID NO: 838580 - DNA, 75 bp, synthetic construct
  source 1..75: mol_type = other DNA
aagcggatggttcgatacaggacgattatcgaattgcctatttaaacgatcacctggtacaggtaaatgaagcga

SEQ ID NO: 838581 - DNA, 75 bp, synthetic construct
  source 1..75: mol_type = other DNA
tataataggaccaagtaaatttgatagtactgcagatgctgcgttagatgctttgaaagaaacgcagaatagatc

SEQ ID NO: 838582 - DNA, 75 bp, synthetic construct
  source 1..75: mol_type = other DNA
aaccggggttttgcctgtgagcagggctggaatgcagccggccagcttaccagccagcgcgccggacttttcccg

SEQ ID NO: 838583 - DNA, 75 bp, synthetic construct
  source 1..75: mol_type = other DNA
cggaagaagccacatggggcgggctgctcccctcactggtacgggagtaccgttacgacagcgcgggcaatgtgt

SEQ ID NO: 838584 - DNA, 75 bp, synthetic construct
  source 1..75: mol_type = other DNA
gctgtcaccagccgggaagattacggacgggaaacacggcgggagtaccggctggaccggaacggtcaggtcacg

SEQ ID NO: 838585 - DNA, 75 bp, synthetic construct
  source 1..75: mol_type = other DNA
tttaacggctttgagctgataagccagcagttcagccgggtacggcagccgcacccgtccgtggccccgcagtgg

SEQ ID NO: 838586 - DNA, 75 bp, synthetic construct
  source 1..75: mol_type = other DNA
caatattgctaaagaaatggagaagctaggaattaaagtaataaggaaagcagataaatatttgccaccaaatgc

SEQ ID NO: 838587 - DNA, 75 bp, synthetic construct
  source 1..75: mol_type = other DNA
aggaaaaatagattatgttggaataagtagaaatgtgcttaatcgttatccgcaaggtaaatatgatttggagtt

SEQ ID NO: 838588 - DNA, 75 bp, synthetic construct
  source 1..75: mol_type = other DNA
ggccccggcggtcagtcagtgcggttgcagtggcagcagcaccataaactgagcggccttgagcgggcagaaacc

SEQ ID NO: 838589 - DNA, 75 bp, synthetic construct
  source 1..75: mol_type = other DNA
cggcctgctgtatgcgggacagtggcaggatgcagaatccgggctgtgctataaccggttccggtattacgagcc

SEQ ID NO: 838590 - DNA, 75 bp, synthetic construct
  source 1..75: mol_type = other DNA
caccataaactgagcggcattgaacgtgctggaaccggcgcggaaggatttcgctatgaccgccacggcaacctg

SEQ ID NO: 838591 - DNA, 75 bp, synthetic construct
  source 1..75: mol_type = other DNA
ctatggctatgacagttgtggctacctgaaggcgcagtctgcgggcaggcaccggataagtgaagagactgacca

SEQ ID NO: 838592 - DNA, 75 bp, synthetic construct
  source 1..75: mol_type = other DNA
atgtatgattggtataaatacaatcgttctcaaggtatgacagcagcacaagcgcatcaagcaattaaaaatgcc

SEQ ID NO: 838593 - DNA, 75 bp, synthetic construct
  source 1..75: mol_type = other DNA
cggacggtaacggtgttgtctggacaatggagtacggcccgtttgatttgccggtggcgcgaacggacggtgaag

SEQ ID NO: 838594 - DNA, 75 bp, synthetic construct
  source 1..75: mol_type = other DNA
cgcccaaagcaatgccccactccgtctggcagacgatctcaaactaatgaatccccactattttcaacaaggacg

SEQ ID NO: 838595 - DNA, 75 bp, synthetic construct
  source 1..75: mol_type = other DNA
gaaggtgtctcgcttaattgtaattctgatatagctcgttgtcttgtggcattaggcggcgatgttgcggcgctg

SEQ ID NO: 838596 - DNA, 75 bp, synthetic construct
  source 1..75: mol_type = other DNA
gtaattataataatgtcctgatagctggtagtgttaatgttgatgctacaccctatcatgttgatctggcatctg

SEQ ID NO: 838597 - DNA, 75 bp, synthetic construct
  source 1..75: mol_type = other DNA
aaggcaccatcaacctcggtacagagggtactaccgacacgggcatgatcggtatgcagcttgatgccaacgcca

SEQ ID NO: 838598 - DNA, 75 bp, synthetic construct
  source 1..75: mol_type = other DNA
agagttaaagatgtcaccaaaggaaattacctttgtgtctcctgagcctcaagagatgcctgatgtatgcaaggg

SEQ ID NO: 838599 - DNA, 75 bp, synthetic construct
  source 1..75: mol_type = other DNA
cctctgtatatagcgctgaatgactatgttctggaggcaggaaaggtgcacgcagatgacactcttgaggtagcc

SEQ ID NO: 838600 - DNA, 75 bp, synthetic construct
  source 1..75: mol_type = other DNA
acaacggtgttgcgataaatgatgttgatggagtcattaacattaatgctactaatgggcaggcattttataatg

SEQ ID NO: 838601 - DNA, 75 bp, synthetic construct
  source 1..75: mol_type = other DNA
tacgggaaaagattctgtggttgtggcgataaccggaaacgatattaccgttaacaataacggccatatggttgt

SEQ ID NO: 838602 - DNA, 75 bp, synthetic construct
  source 1..75: mol_type = other DNA
agatctttataaaatatgaacaggctgaaaaagacagtaactttgttgtttttttatccttaaccactatgcatt

SEQ ID NO: 838603 - DNA, 75 bp, synthetic construct
  source 1..75: mol_type = other DNA
ggtgtggttgcaggtaaaagccagtaacagcgtgccggatgcgttagtcgtggatctgctgcctgcgggtctgga

SEQ ID NO: 838604 - DNA, 75 bp, synthetic construct
  source 1..75: mol_type = other DNA
aataccggtatcatcaacgttaagaatgaaggcttcggcatgctggcgatgaacggtgggaccgttgtaaaccaa

SEQ ID NO: 838605 - DNA, 75 bp, synthetic construct
  source 1..75: mol_type = other DNA
taactcctgggcgtttggtgggcaaacgaaagccatcattaacaacggtgaaattaatctgctgtgtgacaccgg

SEQ ID NO: 838606 - DNA, 75 bp, synthetic construct
  source 1..75: mol_type = other DNA
accgcggtgatgcagtgatcactaacggcggcacgggtgtcattgtgacgggtgacaacgcggttatcaacaaca

SEQ ID NO: 838607 - DNA, 75 bp, synthetic construct
  source 1..75: mol_type = other DNA
ccgtagtggtacagcaattaatgacgtaacgggcgttattaatatcgatactgacatcggccaggcattttacgg

SEQ ID NO: 838608 - DNA, 75 bp, synthetic construct
  source 1..75: mol_type = other DNA
gatgatatggcgcatgcgggtttccagttacgcaacctggaaaaactgctccgtgctggtgaaatttctcgtcaa

SEQ ID NO: 838609 - DNA, 75 bp, synthetic construct
  source 1..75: mol_type = other DNA
attatttattccgttccgatcaactggtgaccagtgaacggcttattatgcggaaagcggaacatggctacgaaa

SEQ ID NO: 838610 - DNA, 75 bp, synthetic construct
  source 1..75: mol_type = other DNA
gctatcactatccagcgtaaagagcacgatgaaagaattaagcttgagcaagagctaaagatgtcaccaaaaaca

SEQ ID NO: 838611 - DNA, 75 bp, synthetic construct
  source 1..75: mol_type = other DNA
aaaggtgcaatgctctcttcttcggatacattacagattgatgtgactggtgttggtggtcatggtgcatttccg

SEQ ID NO: 838612 - DNA, 75 bp, synthetic construct
  source 1..75: mol_type = other DNA
cacggaatggcgaaaaccggtatagtcggtacgctacaggctggtaacagtgacaaagttctgggattacgtgct

SEQ ID NO: 838613 - DNA, 75 bp, synthetic construct
  source 1..75: mol_type = other DNA
atgcaggacaatttccttaacctgataatgacaccgacacaaccgggtaaactggttttggattatatcgataaa

SEQ ID NO: 838614 - DNA, 75 bp, synthetic construct
  source 1..75: mol_type = other DNA
tgcgaattcgttcttcccttatgattttacaaagtattgaggatgatttacaagacaatgaaaataaagatgaac

SEQ ID NO: 838615 - DNA, 75 bp, synthetic construct
  source 1..75: mol_type = other DNA
tctcaacggttacgtggtgggtacgagtgccgatggcagcgccggtaagctcaaggtcaacaatgccagcatgaa

SEQ ID NO: 838616 - DNA, 75 bp, synthetic construct
  source 1..75: mol_type = other DNA
gtgaacggtaacaacggtaataacacggaagtgcattatggcgactatacattgccggatgtgccgagtcccaat

SEQ ID NO: 838617 - DNA, 75 bp, synthetic construct
  source 1..75: mol_type = other DNA
atatattttatttatttattgtacaaataataaattatgttgctccttttttagttttgccttatttaagcaggg

SEQ ID NO: 838618 - DNA, 75 bp, synthetic construct
  source 1..75: mol_type = other DNA
aaaaagattatcccgcttcggatctgtttgcctttttgtggggggggcccctattaagttgtcaagcatgttatg

SEQ ID NO: 838619 - DNA, 75 bp, synthetic construct
  source 1..75: mol_type = other DNA
tccgatgcgaaaaaaaccattaacgatttgcgtcgggatgtcgattctggcgctaaacggctgcgcatcgccgca

SEQ ID NO: 838620 - DNA, 75 bp, synthetic construct
  source 1..75: mol_type = other DNA
gcatcacactggatacagtggaagatgagatcaaccgtctgcgctataactggcaggagagtcgcccctccacgc

SEQ ID NO: 838621 - DNA, 75 bp, synthetic construct
  source 1..75: mol_type = other DNA
caggagcattatttgttgtcatggaaaatgcattttatttattttttatgtgcaattttattagcgatgagaaaa

SEQ ID NO: 838622 - DNA, 75 bp, synthetic construct
  source 1..75: mol_type = other DNA
ccatggtatcagtcattgggattatatgcagctataattattggtattctcttagggttttattacgggatatgg

SEQ ID NO: 838623 - DNA, 75 bp, synthetic construct
  source 1..75: mol_type = other DNA
taaattccatttggttggaaaagatggtttaaaagatagaacgaagttaatggagtttagatatgactattctta

SEQ ID NO: 838624 - DNA, 75 bp, synthetic construct
  source 1..75: mol_type = other DNA
aactgcttgattccgttggaggtaaaaaaatcgatttatcttcaggttctgcaagtgtagaagggatgcttctaa

SEQ ID NO: 838625 - DNA, 75 bp, synthetic construct
  source 1..75: mol_type = other DNA
atccgacaataagtgcggtgccgttgcctgatgcgacgctggcgcgtcttatcaggcctagtattatccctccag

SEQ ID NO: 838626 - DNA, 75 bp, synthetic construct
  source 1..75: mol_type = other DNA
tcaatgacgcggatcggctacgcaaatacctggcgcgttttggtctgacatgggaagcaatgcaggatcagcaca

SEQ ID NO: 838627 - DNA, 75 bp, synthetic construct
  source 1..75: mol_type = other DNA
tggtgaccggtcagccctggcgtggtcagcagcgacggacccggatggtggtataccgccgtatcgggaaaaaca

SEQ ID NO: 838628 - DNA, 75 bp, synthetic construct
  source 1..75: mol_type = other DNA
gcgaagatttaccatgcgggcccgtccattattgattttctgccctgggtggaatacctggatgaagcgcagtgc

SEQ ID NO: 838629 - DNA, 75 bp, synthetic construct
  source 1..75: mol_type = other DNA
ttttcttgccagaccctcatcaattggctctcaacagaaaagtgaaggaacagctaagagatttatcgcaagaca

SEQ ID NO: 838630 - DNA, 75 bp, synthetic construct
  source 1..75: mol_type = other DNA
cagcaaaatagtctggggagctattcacttaaaaatggcgaaaaactggcgggaagatcggtactgggcaacttt

SEQ ID NO: 838631 - DNA, 75 bp, synthetic construct
  source 1..75: mol_type = other DNA
atgtgacgctgattgacctggggcatctggcccgtgaagggtatgaagcccagatggcgctgaccatggtgtcga

SEQ ID NO: 838632 - DNA, 75 bp, synthetic construct
  source 1..75: mol_type = other DNA
gcagaagaacatggataccgaagtgctcaacgaccgtaccaccaccgtaaaacacgatcaccgcgaaaccgtaaa

SEQ ID NO: 838633 - DNA, 75 bp, synthetic construct
  source 1..75: mol_type = other DNA
acaaaacaccccatgggaagttaaagtaggcgatgcggtaaataacctgaatgttgagatccactcaggagatag

SEQ ID NO: 838634 - DNA, 75 bp, synthetic construct
  source 1..75: mol_type = other DNA
gtgaatacctcatcagcaggggtaaaacgttcgccactccagcttgggtaaaagatgctctcaaacacacatatc

SEQ ID NO: 838635 - DNA, 75 bp, synthetic construct
  source 1..75: mol_type = other DNA
tattttcctggtaaaggttgaaatgtggtgcgctcagttcggccttgccctgactatcccgaacggctgcgagta

SEQ ID NO: 838636 - DNA, 75 bp, synthetic construct
  source 1..75: mol_type = other DNA
tcgcaatcagggaaaatttttccccgaagttcatgaagatgcatttgactacctgacgatgctgatccagcgatg

SEQ ID NO: 838637 - DNA, 75 bp, synthetic construct
  source 1..75: mol_type = other DNA
cggtaaaccaaaacggcagggtgtcgctcttggttctcaacggatatttgctggtattggtgcatctaccacggc

SEQ ID NO: 838638 - DNA, 75 bp, synthetic construct
  source 1..75: mol_type = other DNA
gtacgctggttgataaaacgcagattacaaacttcactgaatcaacacgccttggagtgcgatatcagtttagtg

SEQ ID NO: 838639 - DNA, 75 bp, synthetic construct
  source 1..75: mol_type = other DNA
cgatgctcctcagggagtgactctcgatttgaccaaaaaagtcactgacgtccgggtcacggtgacaaaaagcaa

SEQ ID NO: 838640 - DNA, 75 bp, synthetic construct
  source 1..75: mol_type = other DNA
tttacagcgatctcgttataaaagcatcgcgccagaaaaatagtttccacgtactggacagtcagaacaacggcg

SEQ ID NO: 838641 - DNA, 75 bp, synthetic construct
  source 1..75: mol_type = other DNA
accggcaggcgaggaaatcttctgcgacgaacatggtcgcgtgcgggtgaagttcaactgggaccgttataaccc

SEQ ID NO: 838642 - DNA, 75 bp, synthetic construct
  source 1..75: mol_type = other DNA
aatatgaatcacagaagaagattgctatgcaggctgatattgagcagctactgaaggttcctcagaaatacagca

SEQ ID NO: 838643 - DNA, 75 bp, synthetic construct
  source 1..75: mol_type = other DNA
gcctggccggcgcgcacgcgattcacaacggtttcaccatccttgaagagtgccaccatctgtatcacggcgaaa

SEQ ID NO: 838644 - DNA, 75 bp, synthetic construct
  source 1..75: mol_type = other DNA
cattgacggcaagattatggccgtggctaaagccacctgcgcagaaggtgaaactattcacaatatgccgttccc

SEQ ID NO: 838645 - DNA, 75 bp, synthetic construct
  source 1..75: mol_type = other DNA
actgggaaaataaacctggtgaagcaacccctctggttctgtttggcctgccagatatgaatgcagaagagacga

SEQ ID NO: 838646 - DNA, 75 bp, synthetic construct
  source 1..75: mol_type = other DNA
aagaatggaaaattcctgcagctcgaatgaagatgaaccgggaccatacggttccgctaggttcgcgaggcctga

SEQ ID NO: 838647 - DNA, 75 bp, synthetic construct
  source 1..75: mol_type = other DNA
gatctggagattaaaccgttccaggattacattctgccgaacactgcgctggctggccgtgagattgatgccaac

SEQ ID NO: 838648 - DNA, 75 bp, synthetic construct
  source 1..75: mol_type = other DNA
aagatgccgaaagcattctttttgatttgattaactggcgatatggctatgtgcaaaaagttatgaaagggtgtc

SEQ ID NO: 838649 - DNA, 75 bp, synthetic construct
  source 1..75: mol_type = other DNA
agagcttcattcctgacttagccgacccgctttttattacctatagtcaacgactgctccaggcattaggtcaac

SEQ ID NO: 838650 - DNA, 75 bp, synthetic construct
  source 1..75: mol_type = other DNA
gaggaagtacagaggatatttgattgggcactggcacaccatgccagcacgcttaatctgaaatcacgtgttatc

SEQ ID NO: 838651 - DNA, 75 bp, synthetic construct
  source 1..75: mol_type = other DNA
gtagatcttgatttactacgtaatttaaatggggtgccaggtttaaacagagataacttggtaatgactccaact

SEQ ID NO: 838652 - DNA, 75 bp, synthetic construct
  source 1..75: mol_type = other DNA
aaatatagtacaagctataaaaaactgaaaattttggtgagtaaaataatccttggtcgattttatatttcttta

SEQ ID NO: 838653 - DNA, 75 bp, synthetic construct
  source 1..75: mol_type = other DNA
gaaatttttgatcataatggcgtggggctggcgttattttacggtgatttcttcgcccgtgattcaaaaagcggc

SEQ ID NO: 838654 - DNA, 75 bp, synthetic construct
  source 1..75: mol_type = other DNA
catcggcctggaaggttgcgggcagcgcatcgtttatatgctggggccagagaatggcgacgcctccgcgctcga

SEQ ID NO: 838655 - DNA, 75 bp, synthetic construct
  source 1..75: mol_type = other DNA
tcttaatggtgacgagttagcgcatacggagttatatcagtggcgtattgatagtggaatgatcccgcaaaaatt

SEQ ID NO: 838656 - DNA, 75 bp, synthetic construct
  source 1..75: mol_type = other DNA
cgtgatgatatctacggcgtgggtgaagctggtgcaagccttaacgatgcgagaatggcgcaaagtggtgtcacc

SEQ ID NO: 838657 - DNA, 75 bp, synthetic construct
  source 1..75: mol_type = other DNA
atgaagatacgttcactgagtaggtttgtgctggctggtgtactactcgcgagctttaatgcctctgcagtccct

SEQ ID NO: 838658 - DNA, 75 bp, synthetic construct
  source 1..75: mol_type = other DNA
tcctgaatgtccaactgctgcagaacagcatggatgcgccgaaaatcatcggttcctttccatgcaaaaagattg

SEQ ID NO: 838659 - DNA, 75 bp, synthetic construct
  source 1..75: mol_type = other DNA
agtagatgatgtaataataaataaaacaagacaaaatgagttagtaaaagtgttttgcgagtataaaacagagtt

SEQ ID NO: 838660 - DNA, 75 bp, synthetic construct
  source 1..75: mol_type = other DNA
taccggaaagtgagggaaatttatatttatccagatgcttccggggattccagaaaatcaagtaacgcaagtacg

SEQ ID NO: 838661 - DNA, 75 bp, synthetic construct
  source 1..75: mol_type = other DNA
caacgcacagtggttgcaagccagcatggatgcgctgcgtcagtatgcaacatacgactgcgtgaaggtgaagta

SEQ ID NO: 838662 - DNA, 75 bp, synthetic construct
  source 1..75: mol_type = other DNA
aaaaaagtcatcttaaccaggaaatcaaaaagcttattaaaaataatattttccctgagctatacaatgagcaat

SEQ ID NO: 838663 - DNA, 75 bp, synthetic construct
  source 1..75: mol_type = other DNA
tcaaaaagctaattaaaaaaatattttccctgagctatacaatgagcaatgcaataaaatcccctcctcatcgat

SEQ ID NO: 838664 - DNA, 75 bp, synthetic construct
  source 1..75: mol_type = other DNA
tcagccaggaaatatacccacagccatatattcctgagatattttatgaggcctgcaaacatctccagtcatttt

SEQ ID NO: 838665 - DNA, 75 bp, synthetic construct
  source 1..75: mol_type = other DNA
attgctggggacaaaagtgggctttacggcgtcggtggtcaccgccattccgtgggttgcggccttgtttgggac

SEQ ID NO: 838666 - DNA, 75 bp, synthetic construct
  source 1..75: mol_type = other DNA
ctggttaatgctcgactgctggatgagtcaggacgtgaactatgccaccaaactggcccacgcttgcgcgcccta

SEQ ID NO: 838667 - DNA, 75 bp, synthetic construct
  source 1..75: mol_type = other DNA
atgcaactggaacacgttatcgctatctgccgccaggcaaagtcgctttctgctgccggacgtgaactgtttgac

SEQ ID NO: 838668 - DNA, 75 bp, synthetic construct
  source 1..75: mol_type = other DNA
caaagccattctcaatgcccagtggctgcaagccagcatgaatgcgccgcgtcagtatgcaacatacgactgcgt

SEQ ID NO: 838669 - DNA, 75 bp, synthetic construct
  source 1..75: mol_type = other DNA
agtcagaaggtgacattcctcaaaaaagagggagattatgacaatattaaaatgcaatggattgtcatgaatgag

SEQ ID NO: 838670 - DNA, 75 bp, synthetic construct
  source 1..75: mol_type = other DNA
acgatgccgacacaacttctttccggtacggcgctggctgcggggattggttttataaacctgtttggtgcagtg

SEQ ID NO: 838671 - DNA, 75 bp, synthetic construct
  source 1..75: mol_type = other DNA
aatatgaagatgctaagaagattgctatgcaggctgatattgagcagcttacgaagatttcaacgaagtatagca

SEQ ID NO: 838672 - DNA, 75 bp, synthetic construct
  source 1..75: mol_type = other DNA
ttggtattgatgtttcccgcgatacgctcgacatccggctggattccgtcgtatttgactgctccgtgtctaatg

SEQ ID NO: 838673 - DNA, 75 bp, synthetic construct
  source 1..75: mol_type = other DNA
gggcagactgaaccgccgtcagattagtgccctgattggtttggctccgtttaacagggactccggatttatgcg

SEQ ID NO: 838674 - DNA, 75 bp, synthetic construct
  source 1..75: mol_type = other DNA
caccgcgaacgcatcgcgtctttcaggaagctcagctttttccactgaccatgcttattcagacctccacaggtt

SEQ ID NO: 838675 - DNA, 75 bp, synthetic construct
  source 1..75: mol_type = other DNA
aaggcagatgttcatcagaaccaggcgccagcggaagaggctaaacaagaaatttatctggtcagccatacaaac

SEQ ID NO: 838676 - DNA, 75 bp, synthetic construct
  source 1..75: mol_type = other DNA
ggatgcattcaagaatttattaatgcaatatggtgatgtaaaaattcgcaatgaggggaagactaatcaatactt

SEQ ID NO: 838677 - DNA, 75 bp, synthetic construct
  source 1..75: mol_type = other DNA
gtctgcttgaaacggatgggtatgtcgagaaggatggaacgcttgttttttcctcagcaagtgaagaactgcgca

SEQ ID NO: 838678 - DNA, 75 bp, synthetic construct
  source 1..75: mol_type = other DNA
cgagaaggatggaacgcttgttttttcctcagcaagtgaagaactgcgcaatgaagtggtcaacaaaaactggcc

SEQ ID NO: 838679 - DNA, 75 bp, synthetic construct
  source 1..75: mol_type = other DNA
ttgttactctgccgtacaaagacatcaacgaatgcctgatgaacggtgttaccgaggatgaaatctggcagtaca

SEQ ID NO: 838680 - DNA, 75 bp, synthetic construct
  source 1..75: mol_type = other DNA
gcaaaaacttaaaaaagaacttgatagcatgaaatctttgatagccgaatacgaggcacagaaaaaggttgccct

SEQ ID NO: 838681 - DNA, 75 bp, synthetic construct
  source 1..75: mol_type = other DNA
ggcggcctcgaccgggaagcgcgcaggatgatgcttacccttgagcgctgcgaaccctgcgaaggggccggggtg

SEQ ID NO: 838682 - DNA, 75 bp, synthetic construct
  source 1..75: mol_type = other DNA
cacagggtgagcagtgggaataccgccacgacgccagcggcagacgaacagagaaacgctgcgaccggaagaaaa

SEQ ID NO: 838683 - DNA, 75 bp, synthetic construct
  source 1..75: mol_type = other DNA
tgataccattaagaaatactataataatgagcaaggttcttattggggaatcgttggtactgaaaatattatgaa

SEQ ID NO: 838684 - DNA, 75 bp, synthetic construct
  source 1..75: mol_type = other DNA
aatgcactggcagagtttcttcaggtttccaccgatttcttcgggatacctctttctggtgacgttaagccagag

SEQ ID NO: 838685 - DNA, 75 bp, synthetic construct
  source 1..75: mol_type = other DNA
gattaagatcaaaccagaattattggccgatatatcaggtgtaaaatacgtacctgatatagatgatggttatga

SEQ ID NO: 838686 - DNA, 75 bp, synthetic construct
  source 1..75: mol_type = other DNA
tattgagactggatgtaaaaaaacagagcgagaggctgatgcttttgctagtgctttcttatttcctagaaagtc

SEQ ID NO: 838687 - DNA, 75 bp, synthetic construct
  source 1..75: mol_type = other DNA
taacgatccgaactgggagcctattgctctggcgacacaatccagtctcaacaagctgggcatcaatgtgaagct

SEQ ID NO: 838688 - DNA, 75 bp, synthetic construct
  source 1..75: mol_type = other DNA
acgccctgaagcaggaaaacaaagtcaatgtggcagagtatccgtcactgcgcgtcacctatctgtatctgaata

SEQ ID NO: 838689 - DNA, 75 bp, synthetic construct
  source 1..75: mol_type = other DNA
gcagatatatcaggtgttaaatacgtacctgacatagatgatggctatgacgatattgttgttccattcaagttt

SEQ ID NO: 838690 - DNA, 75 bp, synthetic construct
  source 1..75: mol_type = other DNA
tcggggagaagcagggcggattgaactcggcgtagtgggaacggcaatgtggggacggatgcgcccggttatgcg

SEQ ID NO: 838691 - DNA, 75 bp, synthetic construct
  source 1..75: mol_type = other DNA
aatgcgcagcggtcggcaatggccatcaggatgaccaattccgcagccgcccaaacactcgcggcccgtctgagg

SEQ ID NO: 838692 - DNA, 75 bp, synthetic construct
  source 1..75: mol_type = other DNA
taatctgctagaatctgataatagaaatggtcaaattggtttaaaaaatcatagcttgtctattgataagaatat

SEQ ID NO: 838693 - DNA, 75 bp, synthetic construct
  source 1..75: mol_type = other DNA
tgcgacgaattatcgatctcgctcaacgttgcggagcgcttgcagtaacggcgaaaggggcaatgacagcgctgc

SEQ ID NO: 838694 - DNA, 75 bp, synthetic construct
  source 1..75: mol_type = other DNA
ttgggtataccgatgatattgagctggccgaattgatgtctattgcattcagggaaaaatatcatggcgagtttg

SEQ ID NO: 838695 - DNA, 75 bp, synthetic construct
  source 1..75: mol_type = other DNA
cagcaaaagaatttgcgcgtgatcgtgataacgaactgaagcgctcactgcggatcacgcgttttgcgcttttct

SEQ ID NO: 838696 - DNA, 75 bp, synthetic construct
  source 1..75: mol_type = other DNA
acgcatcaggcatcggctgtcgaatacaatcaacgggcgttttttatttcacctggctacgggcaaacaggttgt

SEQ ID NO: 838697 - DNA, 75 bp, synthetic construct
  source 1..75: mol_type = other DNA
aagatcaatccatcgacactggacgatttgtactgtctcgtatcaataatgaaaattatcagtttcatcatataa

SEQ ID NO: 838698 - DNA, 75 bp, synthetic construct
  source 1..75: mol_type = other DNA
aaaaaatagagcttccagggaagtcatcttataatttagaagaaatgctatctgcgataaatttcaccattccat

SEQ ID NO: 838699 - DNA, 75 bp, synthetic construct
  source 1..75: mol_type = other DNA
atcacctttgtggctcctgagcctcaagagatgcctgatatttgcaagagtgaagcattgcttgagcttgaaaag

SEQ ID NO: 838700 - DNA, 75 bp, synthetic construct
  source 1..75: mol_type = other DNA
gcgacgtgtcattggctattttaagctgtctcgaacatgaccaggtgttggcgcgtccaggtggcgatgagtttc

SEQ ID NO: 838701 - DNA, 75 bp, synthetic construct
  source 1..75: mol_type = other DNA
aacaccggaaatatcattgagtgtgcagacttgcaagagacgaccaacgccattaaagttcattttttaacacag

SEQ ID NO: 838702 - DNA, 75 bp, synthetic construct
  source 1..75: mol_type = other DNA
ccgcgtacatatggaaataatgtctcaagcgggcaaataatgagccgagtcaaaatcgtggtaatgtacaactaa

SEQ ID NO: 838703 - DNA, 75 bp, synthetic construct
  source 1..75: mol_type = other DNA
ctcagctcttcccgttgtcggtgatggccgggcagttaaacccgacaacacgagttcagcgtggcagtcggtttg

SEQ ID NO: 838704 - DNA, 75 bp, synthetic construct
  source 1..75: mol_type = other DNA
acggggcgtcgagggtgacactgacacagaacgggcggttgctgcattcggagatggtgccggcaggtccgttct

SEQ ID NO: 838705 - DNA, 75 bp, synthetic construct
  source 1..75: mol_type = other DNA
attttcaagagggagtattacgatttcaacaaattagaacaaaatacagacaagagctaaaagaactcggttatc

SEQ ID NO: 838706 - DNA, 75 bp, synthetic construct
  source 1..75: mol_type = other DNA
tgtttctatttttgttctgttgtttttttgcagaagcagcttctgttacgtatccttatcccgagaagacaacga

SEQ ID NO: 838707 - DNA, 75 bp, synthetic construct
  source 1..75: mol_type = other DNA
gcaatataatctatggctggattatcttgacgctctttatgcagttgatttttctacagcgcctgatgtcaaatg

SEQ ID NO: 838708 - DNA, 75 bp, synthetic construct
  source 1..75: mol_type = other DNA
gtcagacaagcattaaggggttctggtcaatttattctgatgactgataaaacagatgaagagattcttcagtta

SEQ ID NO: 838709 - DNA, 75 bp, synthetic construct
  source 1..75: mol_type = other DNA
gttatcccgtcactcttactcctgcgccggaaggcggttatgtggtttcttttgtagatatccctgaagcgttga

SEQ ID NO: 838710 - DNA, 75 bp, synthetic construct
  source 1..75: mol_type = other DNA
agtaatgggctaatcaggaaagaaggccgcgttttcgtcgctgttaaatatatcaatcacgcttatacatcggac

SEQ ID NO: 838711 - DNA, 75 bp, synthetic construct
  source 1..75: mol_type = other DNA
aattttgccgccaaagagttaacagtgagcggattgtcgcgcgcaatggattatctgatgggtgaaggttgcgtc

SEQ ID NO: 838712 - DNA, 75 bp, synthetic construct
  source 1..75: mol_type = other DNA
atttagacagaattcagatattaatcaatatctctttagatattggcagttagtttcaggggagtttgaatgctc

SEQ ID NO: 838713 - DNA, 75 bp, synthetic construct
  source 1..75: mol_type = other DNA
ccagcggctggtggcgggatgaaattttagcaaatagtgcgatcgccggtgtttatgcaaaatctgatgacggaa

SEQ ID NO: 838714 - DNA, 75 bp, synthetic construct
  source 1..75: mol_type = other DNA
gaaatggacgtgtacttaatcgaaagcaagaagctatttgtaaagggaaagcacttttggggatattgtgtgggg

SEQ ID NO: 838715 - DNA, 75 bp, synthetic construct
  source 1..75: mol_type = other DNA
gtcgccgcaatcatgcacggtatatttcaggcaacagatacagaacgccggactttaaccctacgcaggaagatc

SEQ ID NO: 838716 - DNA, 75 bp, synthetic construct
  source 1..75: mol_type = other DNA
cggcctggcgcatccatcacagccgcctgatccgctttgatggcgtcacgctgccattccagcagaagatgaccg

SEQ ID NO: 838717 - DNA, 75 bp, synthetic construct
  source 1..75: mol_type = other DNA
actcagcatccacctaccgggctaatttcaccagtcgtaaccgcatgctggtggaatggtcctatcgttcgtcct

SEQ ID NO: 838718 - DNA, 75 bp, synthetic construct
  source 1..75: mol_type = other DNA
ggctacacggctgccatcatcgcctttccgatggttaatattactgctgtgggatatcgctcaggcgcgcgtttg

SEQ ID NO: 838719 - DNA, 75 bp, synthetic construct
  source 1..75: mol_type = other DNA
cgtttacgtcttccggtgcgtcggatactggacatcatgcatcgttcggagcttggcaagccgctgccggatgat

SEQ ID NO: 838720 - DNA, 75 bp, synthetic construct
  source 1..75: mol_type = other DNA
cggttgtagagcgtatctgggatcgtcttaccgcgttcgacagcgctactgtcggcgcggcgcagctggtctaca

SEQ ID NO: 838721 - DNA, 75 bp, synthetic construct
  source 1..75: mol_type = other DNA
gcaatcagtacggcgctgggtgatggtctgatgacactgaaagccgctatgactgatttgcgcgaaaattctgac

SEQ ID NO: 838722 - DNA, 75 bp, synthetic construct
  source 1..75: mol_type = other DNA
gatactgttgaactacgttgtctggggcaacggaagtgtttcggcccgactctggaacgcgatccgcagcgacga

SEQ ID NO: 838723 - DNA, 75 bp, synthetic construct
  source 1..75: mol_type = other DNA
atcaaaaatattcaggcaataccatcatgaacttatgtctgaagtaaaaaatagacaagattttaattttaatat

SEQ ID NO: 838724 - DNA, 75 bp, synthetic construct
  source 1..75: mol_type = other DNA
attgccagtacacctcacattaatagagataaaattgtacaacttgtagataccgatactattgaaaacctgaca

SEQ ID NO: 838725 - DNA, 75 bp, synthetic construct
  source 1..75: mol_type = other DNA
gctagcgccctgtgtgcagctgaagatacacccaaattttacggtgcaggctttgttactttcaccgatcaggca

SEQ ID NO: 838726 - DNA, 75 bp, synthetic construct
  source 1..75: mol_type = other DNA
cgcacctacagcagctaccggactatgactcctgccccggtgggcgtcttaggccccggctggaaagcgccttct

SEQ ID NO: 838727 - DNA, 75 bp, synthetic construct
  source 1..75: mol_type = other DNA
gactggtaaccagaaacaacatgaaatcattaaccacggaaaccgcactggatattctgattgcgtggctacagg

SEQ ID NO: 838728 - DNA, 75 bp, synthetic construct
  source 1..75: mol_type = other DNA
tgttgccctgtattgaacaggctagggaggatatccgtatcctgcgccaactgcagtttctgcaacaaaaccggt

SEQ ID NO: 838729 - DNA, 75 bp, synthetic construct
  source 1..75: mol_type = other DNA
tccgcattgcccaaggttccggcaacatctacatcaacagccagctgcccgtaaggatgaccacactgagtgtga

SEQ ID NO: 838730 - DNA, 75 bp, synthetic construct
  source 1..75: mol_type = other DNA
tatcaggtaaaattaacgagctgaatgcatgtcataaagtggcaatttttcttgccgaaaaagacaatgagataa

SEQ ID NO: 838731 - DNA, 75 bp, synthetic construct
  source 1..75: mol_type = other DNA
ataaagtttacacaaagatgcatgggcatgaaaagatgttttcattggctgcggacgccgaaactggagacatgt

SEQ ID NO: 838732 - DNA, 75 bp, synthetic construct
  source 1..75: mol_type = other DNA
ttgctgccaccagtacagatacgtcctggcgctttaaggaaacgaagaaatccggtctgatgggtaccggcggta

SEQ ID NO: 838733 - DNA, 75 bp, synthetic construct
  source 1..75: mol_type = other DNA
tgagcgccatcggggatatcagcaatatcagctcagtcatcagcggtaaaaccgtacaactggaaagcgtgagtg

SEQ ID NO: 838734 - DNA, 75 bp, synthetic construct
  source 1..75: mol_type = other DNA
cgcacctacagcagctaccggactaggactcctgccccggtgggcgtatttggccccggctggaaagcgccttct

SEQ ID NO: 838735 - DNA, 75 bp, synthetic construct
  source 1..75: mol_type = other DNA
tcacataaatgcaatgtgccatgttttcatataaaaagaccaagtattttagtttataaagattttttggatgca

SEQ ID NO: 838736 - DNA, 75 bp, synthetic construct
  source 1..75: mol_type = other DNA
gctttgacatctttccgcaaatcgccagcaactccgtagatcttgtatgtgccgatattccatatggaacaactc

SEQ ID NO: 838737 - DNA, 75 bp, synthetic construct
  source 1..75: mol_type = other DNA
ttttctctgcccgtttttccactgattcacgcaattctctcagttactggtgcctccctgttaacgcttctgctc

SEQ ID NO: 838738 - DNA, 75 bp, synthetic construct
  source 1..75: mol_type = other DNA
cgcatgtggctttacccgtggctcacctggctggtaataggctttattacctttgtgttggtagtgatgctattc

SEQ ID NO: 838739 - DNA, 75 bp, synthetic construct
  source 1..75: mol_type = other DNA
tgcagagcaggccaaagaagaaccgtccgatgaagccgtggctgatgtggaagcagatgctgatgctgacgccta

SEQ ID NO: 838740 - DNA, 75 bp, synthetic construct
  source 1..75: mol_type = other DNA
gtatgttgatagcaaagtatctctgtctgctgaagcccttttggctgcgtaagaataataaaacttcagtgttgt

SEQ ID NO: 838741 - DNA, 75 bp, synthetic construct
  source 1..75: mol_type = other DNA
ttaaccggccttatactgagaaagctattagcatctagttcgcacgcagtgctcaacacactcgaaactataaag

SEQ ID NO: 838742 - DNA, 75 bp, synthetic construct
  source 1..75: mol_type = other DNA
gggagacggtgcgcagctttggcagcatggcaggcagtaatgccgcatataaactgaccagcacatacacctccg

SEQ ID NO: 838743 - DNA, 75 bp, synthetic construct
  source 1..75: mol_type = other DNA
cgcacctacagcagctaccggactaggactcctgccccggtgggcgttttgggccccggctggaaagcgccttct

SEQ ID NO: 838744 - DNA, 75 bp, synthetic construct
  source 1..75: mol_type = other DNA
ttttctccgcccgtttttctaccgatttgcgcaattctctcagttactggtgcccccctgtaaacgcttgtgctc

SEQ ID NO: 838745 - DNA, 75 bp, synthetic construct
  source 1..75: mol_type = other DNA
aaatgtcattatccagatatatgaccccagcagtggtcagtagtttatcgaaaatgaaagagcttatttcggcat

SEQ ID NO: 838746 - DNA, 75 bp, synthetic construct
  source 1..75: mol_type = other DNA
gctatcgcagacattgacccaagcaaccatagttttacgcttaatcaaagtatcaatcaggctcctacaggtagc

SEQ ID NO: 838747 - DNA, 75 bp, synthetic construct
  source 1..75: mol_type = other DNA
tttttattgcaatgtttgtcacaccaattgcattaatattatttgtatttgattatggttacaaaaaaatcacca

SEQ ID NO: 838748 - DNA, 75 bp, synthetic construct
  source 1..75: mol_type = other DNA
atgggatacatcaagaaaacgaagaaggcgtccggcgctggtggcggtggcggtgagctatccatcatggagaag

SEQ ID NO: 838749 - DNA, 75 bp, synthetic construct
  source 1..75: mol_type = other DNA
tgagctatccatcatggagaagcctttcagtcagtggactactgaagatctgaacgagtggacggaaattaactg

SEQ ID NO: 838750 - DNA, 75 bp, synthetic construct
  source 1..75: mol_type = other DNA
tgtcatcccgggaacgccaacaactgacggtcattttgcaggacagtcgatcactgttatccgagttggatcgtg

SEQ ID NO: 838751 - DNA, 75 bp, synthetic construct
  source 1..75: mol_type = other DNA
gttttttttattcgctttattatgtttaatttccatggagagcttagggataagttcttggacaaaatcgttcct

SEQ ID NO: 838752 - DNA, 75 bp, synthetic construct
  source 1..75: mol_type = other DNA
gtccactgctggatgaagacgctcgcttatgctccctttcggtttttgacgctttccgtttattgcagaatctgt

SEQ ID NO: 838753 - DNA, 75 bp, synthetic construct
  source 1..75: mol_type = other DNA
agaatgccgcgcctggtgctggtagcggtgaactatccatcatggacaagccttttagccagtggactaccgaag

SEQ ID NO: 838754 - DNA, 75 bp, synthetic construct
  source 1..75: mol_type = other DNA
aaaagctcaaagaatacaaaaccaccctgatcaacagcgccgtgacaggaaaaataaaaatcaccccagaaatgg

SEQ ID NO: 838755 - DNA, 75 bp, synthetic construct
  source 1..75: mol_type = other DNA
tgaaccttgatgcaaaaaagatgcttaaaccgctttatcgtggcctgagaaatacaattcctaaagattcatttc

SEQ ID NO: 838756 - DNA, 75 bp, synthetic construct
  source 1..75: mol_type = other DNA
gaatcgaattgtacttaattctgattatgatttaatagcgtcattgaattgtcttgattattttggtggtaaggc

SEQ ID NO: 838757 - DNA, 75 bp, synthetic construct
  source 1..75: mol_type = other DNA
aatgatcaaacaaggccgtggtgcagtagggaaagtcggattcagtgcgataacacaacgccgtgcattactcag

SEQ ID NO: 838758 - DNA, 75 bp, synthetic construct
  source 1..75: mol_type = other DNA
gggtggtttcaacatcagtggctataaaacatatagttacgacggtgacaatgactcaagcaaccttaatattaa

SEQ ID NO: 838759 - DNA, 75 bp, synthetic construct
  source 1..75: mol_type = other DNA
tcagttccttacacaaacaaatggcacattcagtaaccagaactcgtcaacctaccttcaacgtacctttacaga

SEQ ID NO: 838760 - DNA, 75 bp, synthetic construct
  source 1..75: mol_type = other DNA
tgactcaagcaaccttaatattaactggaacaaagcgttcaaacacgccacggtttccgtcaactggcagcatca

SEQ ID NO: 838761 - DNA, 75 bp, synthetic construct
  source 1..75: mol_type = other DNA
aatggatgcgagtatgaaatacttaatgggcgtctacttgttatcattggtaatgatgtttcgttaggaagaagt

SEQ ID NO: 838762 - DNA, 75 bp, synthetic construct
  source 1..75: mol_type = other DNA
tggcgtatctctagacccactaatcgatttcactataaaattcgactttctacaggcatttgcaaaatattttaa

SEQ ID NO: 838763 - DNA, 75 bp, synthetic construct
  source 1..75: mol_type = other DNA
tataaagggaaagatgatagtgtacagttactatccatttcgataaaatacccaatcattaaagtaaatggtcat

SEQ ID NO: 838764 - DNA, 75 bp, synthetic construct
  source 1..75: mol_type = other DNA
agcgtggtgcgcagaatatgatgaatggggcaacctgctgaatgaagagaacccgcatcagctgcagcagcttat

SEQ ID NO: 838765 - DNA, 75 bp, synthetic construct
  source 1..75: mol_type = other DNA
tcgcgctggaaaccaacgccgatggcacgtcgaccatgtcgctgaccttcgctggcaccacctcgacgatgacca

SEQ ID NO: 838766 - DNA, 75 bp, synthetic construct
  source 1..75: mol_type = other DNA
acaaacgctggattggcgatctgctgggtggttcgttgatggttcgtgagagccgaaccattgctgagctgttgc

SEQ ID NO: 838767 - DNA, 75 bp, synthetic construct
  source 1..75: mol_type = other DNA
cttgttatgacgaagctgtattgtctgaaataatttacgctgctgatgtaactgtttctcctggtaaggttgggc

SEQ ID NO: 838768 - DNA, 75 bp, synthetic construct
  source 1..75: mol_type = other DNA
tgatgtacctgttcgcaatggtaatagtgatcttaatgtcaccgttgtcgaaacagacggtagttcgcacaacta

SEQ ID NO: 838769 - DNA, 75 bp, synthetic construct
  source 1..75: mol_type = other DNA
atcacactttccgacggcaaaaaactgcccagaggcgttgcgattgaagatagtgaaggcaactatctgacaaca

SEQ ID NO: 838770 - DNA, 75 bp, synthetic construct
  source 1..75: mol_type = other DNA
agtcatgtggcggacgcagcaacatattgaggaacttaatggagcatccttatttttccctgatgcctaccggca

SEQ ID NO: 838771 - DNA, 75 bp, synthetic construct
  source 1..75: mol_type = other DNA
tcgcgtcaatgtacccttcacctggaaacgtagtttttctgaagtagtagatgaagatgggttactttggctgga

SEQ ID NO: 838772 - DNA, 75 bp, synthetic construct
  source 1..75: mol_type = other DNA
atacttatggtctgcatacagatccagtggaaaataactccgcatatccactcattaactggcgaggtgtgaatg

SEQ ID NO: 838773 - DNA, 75 bp, synthetic construct
  source 1..75: mol_type = other DNA
gaaaaagtcaaaatcgaaaatgatataaagaaaatagataaaaaaattgaagaaatagataatgcaatccgggat

SEQ ID NO: 838774 - DNA, 75 bp, synthetic construct
  source 1..75: mol_type = other DNA
acgggaggaatacggcgcgccacctgggtcgttatctgaagaagccgccgatagcagcctcccggctggcacatt

SEQ ID NO: 838775 - DNA, 75 bp, synthetic construct
  source 1..75: mol_type = other DNA
gcattacaacggaggagcaagcctgagcttccgttacctggaccacaatacaggagagacggcgacggaaacgct

SEQ ID NO: 838776 - DNA, 75 bp, synthetic construct
  source 1..75: mol_type = other DNA
gtgattaccgaggcaggttttagccactatttcggtcataacaccggtcatgctatcggcattgaagttcatgaa

SEQ ID NO: 838777 - DNA, 75 bp, synthetic construct
  source 1..75: mol_type = other DNA
ttaacggacgcagtgaaagcaaactcccatatgacaaggcttatatgtacgggcacaattacgcaatgagcaaaa

SEQ ID NO: 838778 - DNA, 75 bp, synthetic construct
  source 1..75: mol_type = other DNA
attatcagaacaagctatgcaggaattaacactactgagtcatttggaccaactattggtggttttatcctaatg

SEQ ID NO: 838779 - DNA, 75 bp, synthetic construct
  source 1..75: mol_type = other DNA
ggcgccgatatctctggcgcgtctgcgggcccgtcttaacctgaaatccccagtgttctcacagaaccagacggt

SEQ ID NO: 838780 - DNA, 75 bp, synthetic construct
  source 1..75: mol_type = other DNA
tggaaaataatcaccctttgtgtgtcacacggttcctctctaaaattaatggcatcgcctttaaatacaagttga

SEQ ID NO: 838781 - DNA, 75 bp, synthetic construct
  source 1..75: mol_type = other DNA
attcttttagtcaacatcagttatttacactattggccgctaaaaatcatgacaacatgtcagctgttcatatag

SEQ ID NO: 838782 - DNA, 75 bp, synthetic construct
  source 1..75: mol_type = other DNA
cgctgtattgataagtactttagcttcactgatcaggtgtttaagcgtagcagggctgctgaattcattagcggg

SEQ ID NO: 838783 - DNA, 75 bp, synthetic construct
  source 1..75: mol_type = other DNA
atgacgagcgaaaataacagcttacctcttaatcttcaggaagtggacaaggcaaccggcgaaattgttaagctg

SEQ ID NO: 838784 - DNA, 75 bp, synthetic construct
  source 1..75: mol_type = other DNA
ggcgattaatgccctgaagcgacgggagtccgcccaggcactttacacctttatagagagcctgccccgggatcc

SEQ ID NO: 838785 - DNA, 75 bp, synthetic construct
  source 1..75: mol_type = other DNA
taccctgaaggatacacatgcgagatttaccgaggataaagagcacctccctattcgtaaatcctctattgagga

SEQ ID NO: 838786 - DNA, 75 bp, synthetic construct
  source 1..75: mol_type = other DNA
cgcagatcatccagcaggcaggcaactccgtgctggcaaaagccaaccaggtaccgcagcaggttctgtctctgc

SEQ ID NO: 838787 - DNA, 75 bp, synthetic construct
  source 1..75: mol_type = other DNA
tcacccttgataaagtgaacagcactgtagatatcactggcgcatctatttcagccgctgcaatgactaatgagt

SEQ ID NO: 838788 - DNA, 75 bp, synthetic construct
  source 1..75: mol_type = other DNA
tgctaaagccgcgaccatccaaactgataaaggaacattcaccagtgacggtacaacgtttgatggtgcatcaat

SEQ ID NO: 838789 - DNA, 75 bp, synthetic construct
  source 1..75: mol_type = other DNA
cgcagtcccgtattcaggacgccgactatgcgaccgaagtgtccaacatgtcgaaagcgcagatcatccagcagg

SEQ ID NO: 838790 - DNA, 75 bp, synthetic construct
  source 1..75: mol_type = other DNA
tttccgccagtaaagcgactgggtttacttctggcacttataccgtaggtacagatggagttgttaaatctggtg

SEQ ID NO: 838791 - DNA, 75 bp, synthetic construct
  source 1..75: mol_type = other DNA
acaatctactattactactgcggatggaacttcaatagttctagcaggttctggcgactttggaacaacaaaaac

SEQ ID NO: 838792 - DNA, 75 bp, synthetic construct
  source 1..75: mol_type = other DNA
gtggcaagagcgatgttacggtttgttactgtgacagctgaagctttacgttttcggcaaattcagaggggattt

SEQ ID NO: 838793 - DNA, 75 bp, synthetic construct
  source 1..75: mol_type = other DNA
gcgccgacggtgaagtggcagttgatgcgggggtagacacgcagtggggcgcactgatggctgacagcagcgggc

SEQ ID NO: 838794 - DNA, 75 bp, synthetic construct
  source 1..75: mol_type = other DNA
acaaaagaaatgttagagcattaaccctttacagtaaaaatgatttttcaatattatcagaatctgagaatactt

SEQ ID NO: 838795 - DNA, 75 bp, synthetic construct
  source 1..75: mol_type = other DNA
tccgccaacaccggtgggaatacttatgctgttgccgcaaataatactacaaatggtttcctagcgggggatgac

SEQ ID NO: 838796 - DNA, 75 bp, synthetic construct
  source 1..75: mol_type = other DNA
cagggcgagtctattccagagaagaatatatgatgtgggaattgcagcaacgggtatcagaagcttccagtgccc

SEQ ID NO: 838797 - DNA, 75 bp, synthetic construct
  source 1..75: mol_type = other DNA
tgtatgtcttaatatagctcctggtggtgtcggtggttttgatggtggtgaaaatcatcctttttacggaagaaa

SEQ ID NO: 838798 - DNA, 75 bp, synthetic construct
  source 1..75: mol_type = other DNA
ttctgatatttgcaatataatgtatatttcagaatcatcggcacgaaagaaacttttgcaagaaaataaaacatt

SEQ ID NO: 838799 - DNA, 75 bp, synthetic construct
  source 1..75: mol_type = other DNA
tacacgccggcgcgaaaaattcacctgtaccactgcgaccatcgcggcctgccgctggcccttatcagcacggaa

SEQ ID NO: 838800 - DNA, 75 bp, synthetic construct
  source 1..75: mol_type = other DNA
aaagtgaaatcctggctgaccgggtgagtgaggaaagccgccgctggctggcatcgtgcggcctgacggtggcgc

SEQ ID NO: 838801 - DNA, 75 bp, synthetic construct
  source 1..75: mol_type = other DNA
ttgatcgccgtctgtactgggatatccgagagcagttctcttcgggtagtgaaagtcgagaggatagcagtcgtc

SEQ ID NO: 838802 - DNA, 75 bp, synthetic construct
  source 1..75: mol_type = other DNA
gaggagattgaaaatttgcgccaatatcttgctgcagcaagccaacatggaagtgtagcaataatgggtgtcaat

SEQ ID NO: 838803 - DNA, 75 bp, synthetic construct
  source 1..75: mol_type = other DNA
cgcttgatggaatggttaatggggggaactcaggaggacctattattgatcgagattcgggagagttagtaggta

SEQ ID NO: 838804 - DNA, 75 bp, synthetic construct
  source 1..75: mol_type = other DNA
acgcggtaaaaaattactctggcatcgacacgagatcgaggaatggatgaatagaccgagaggggagcggttgaa

SEQ ID NO: 838805 - DNA, 75 bp, synthetic construct
  source 1..75: mol_type = other DNA
gaatccgatctcaaatatagatccattaggattagaaacactaaaatgcattaagccactgcattcaatgggcgg

SEQ ID NO: 838806 - DNA, 75 bp, synthetic construct
  source 1..75: mol_type = other DNA
ttggagtcattacccgaaattcgcttgcgaatatggctttatccgtggctcacctggctagtcatcggctttatt

SEQ ID NO: 838807 - DNA, 75 bp, synthetic construct
  source 1..75: mol_type = other DNA
atgtggctttatccgtggctcacctggctagtcatcggctttattacctttgtgttggtagtgatgctattccgt

SEQ ID NO: 838808 - DNA, 75 bp, synthetic construct
  source 1..75: mol_type = other DNA
tttccggagggcagtaccgttcttctgacgacgctgttgagcaatcatcattggggcagttgactgccatgtatg

SEQ ID NO: 838809 - DNA, 75 bp, synthetic construct
  source 1..75: mol_type = other DNA
gatgcgccagctgaacgccgggatgtccggcagcatggtggcccacagtgagggggtcacctttggtcagcggac

SEQ ID NO: 838810 - DNA, 75 bp, synthetic construct
  source 1..75: mol_type = other DNA
ggaattatcttcaacaacgatgaggataaaacggattcggcagcattgttgccctgtatcgaacaggtcagggaa

SEQ ID NO: 838811 - DNA, 75 bp, synthetic construct
  source 1..75: mol_type = other DNA
gttgcggctcgggtaaaaaacataagcccagccggtggtcatgagagcaatctcaaactgtaccgactgacagat

SEQ ID NO: 838812 - DNA, 75 bp, synthetic construct
  source 1..75: mol_type = other DNA
atttattaaaaggcgcaacagtacatggaacccctgctttatacatcgctatgagcaagggtaataaagacgtca

SEQ ID NO: 838813 - DNA, 75 bp, synthetic construct
  source 1..75: mol_type = other DNA
tattcaacgttctctagacgatatatcttcaggctctattattcttctggatatgatggaagcggataaaaagct

SEQ ID NO: 838814 - DNA, 75 bp, synthetic construct
  source 1..75: mol_type = other DNA
atccgggactgtgggaactgccgttcggcaccaccgcacgcgagatcctcgaagattacgccggtggtatgcgtg

SEQ ID NO: 838815 - DNA, 75 bp, synthetic construct
  source 1..75: mol_type = other DNA
tcgatgaaataatcaatatcttccttaatacattaaccactccaatagcacaagagcttttaaacaaaaagctgg

SEQ ID NO: 838816 - DNA, 75 bp, synthetic construct
  source 1..75: mol_type = other DNA
caattaaattatgttgtgtccgtttacgacccgaacgataccaacgttgccgtcagaggcacccacaggacagca

SEQ ID NO: 838817 - DNA, 75 bp, synthetic construct
  source 1..75: mol_type = other DNA
atttattaaaaggcgcaacagcatatggagcccctgctttatacattgccatgagcaagggtaatgaagacgtcg

SEQ ID NO: 838818 - DNA, 75 bp, synthetic construct
  source 1..75: mol_type = other DNA
tttgcaagagatataaaagagttagctttagcattaacttattttgttgcctcttattgctactttgaacacttt

SEQ ID NO: 838819 - DNA, 75 bp, synthetic construct
  source 1..75: mol_type = other DNA
aactcaatatcaaccagcttgccgggattactggcgtacaccggcagaccgtcgctaccaggctaaaaaatgtca

SEQ ID NO: 838820 - DNA, 75 bp, synthetic construct
  source 1..75: mol_type = other DNA
acggattcagcagcactgttgccctgtatcgaacaggccagagaggatgtccgtaccctgcgtcatctgcagctt

SEQ ID NO: 838821 - DNA, 75 bp, synthetic construct
  source 1..75: mol_type = other DNA
gtaagttggagtcattacctacataagctggggctttatcagccggcctatcgtttgtatcgtcgtatgaatcca

SEQ ID NO: 838822 - DNA, 75 bp, synthetic construct
  source 1..75: mol_type = other DNA
acgctggattgattacattcgtgatattaaccctgatgttgttattattgcttttggcatgaatgacggagatgg

SEQ ID NO: 838823 - DNA, 75 bp, synthetic construct
  source 1..75: mol_type = other DNA
gatgaaatcacctccctgcgacaactgttacgcaaaaaccacaccatgccaattggcaacctgttgaatgctctg

SEQ ID NO: 838824 - DNA, 75 bp, synthetic construct
  source 1..75: mol_type = other DNA
gactcgtcgctgacaccgaaagacggttctctattggtgtgcgctattgatggtgagttcaggattatgcgctac

SEQ ID NO: 838825 - DNA, 75 bp, synthetic construct
  source 1..75: mol_type = other DNA
gactcggtattgaagccatgcgatggttcgcttcttgtttgtgctactgagggggaattcaggataaagcggtac

SEQ ID NO: 838826 - DNA, 75 bp, synthetic construct
  source 1..75: mol_type = other DNA
atgagtgtgcaaataatgaccgtcaaggatgtcgcgtcgtacctcaagctcaacgagcgagctgtttaccgtatg

SEQ ID NO: 838827 - DNA, 75 bp, synthetic construct
  source 1..75: mol_type = other DNA
ataaataaatatcgtattgaaataaaattcgatcctgttaccacaaacctaaagaaaaaggctatcaggtatcgt

SEQ ID NO: 838828 - DNA, 75 bp, synthetic construct
  source 1..75: mol_type = other DNA
caggtcaacgctacgcgtctgcaaccggacgtcggcgagcagtattatattgaaatccatccgtacggcatgttt

SEQ ID NO: 838829 - DNA, 75 bp, synthetic construct
  source 1..75: mol_type = other DNA
ggtggacggaagcaacttttgtattctgcaagagagcgcgcagttgatgagcttcagatgtatctgccggggatc

SEQ ID NO: 838830 - DNA, 75 bp, synthetic construct
  source 1..75: mol_type = other DNA
ccttactcatattttttggataaggaaaaattacatttaataaaaaatggaatagatagtaatttattttcttca

SEQ ID NO: 838831 - DNA, 75 bp, synthetic construct
  source 1..75: mol_type = other DNA
atttagtgttagttctggtgcctatggaattattgattataaaaaagagtaccctaatgtcagttttcatattca

SEQ ID NO: 838832 - DNA, 75 bp, synthetic construct
  source 1..75: mol_type = other DNA
atgattataaatgaatgcgttaaagcatttacactcaggatgaatatatggggaaaaattaaaattgtagtttca

SEQ ID NO: 838833 - DNA, 75 bp, synthetic construct
  source 1..75: mol_type = other DNA
caggattggttggataagaatccaacagcatctccaggggatcgagcagcagcagaaaacgttcttcaggattta

SEQ ID NO: 838834 - DNA, 75 bp, synthetic construct
  source 1..75: mol_type = other DNA
tgcaccgctaatgcgtaaatccattaatagattttcatgggatctaacagcaaagcagacctatttggcttatca

SEQ ID NO: 838835 - DNA, 75 bp, synthetic construct
  source 1..75: mol_type = other DNA
caaagtctacgccgtgaagatgaatggtcaaaccgtaagccgtgatggtgcgcgtaatctcggtgaagtacgtac

SEQ ID NO: 838836 - DNA, 75 bp, synthetic construct
  source 1..75: mol_type = other DNA
cattacaaataacagcagtatggaagggttgaaatcagcggttcttgaactggaagataatggaaagctatctcc

SEQ ID NO: 838837 - DNA, 75 bp, synthetic construct
  source 1..75: mol_type = other DNA
ggagtgcgtagtgttatcagctatcttcttagcccattaaaggaaactattaatgaaagtttacgtgaacgttag

SEQ ID NO: 838838 - DNA, 75 bp, synthetic construct
  source 1..75: mol_type = other DNA
aaaatagctatattcaggcaaaaaatgaacatgcagtctggcttgcacaggtttctcaacttgaaaaagaaatag

SEQ ID NO: 838839 - DNA, 75 bp, synthetic construct
  source 1..75: mol_type = other DNA
ttcgtaaatgacaatatggcgggtgaatttgttaatctctgctggatggctatgaaatgcggacatgctggcgac

SEQ ID NO: 838840 - DNA, 75 bp, synthetic construct
  source 1..75: mol_type = other DNA
cgcagcttcggccgttatgaactcaccaccgcttacacccctgccgggcagttacagagccagcacctgaacagc

SEQ ID NO: 838841 - DNA, 75 bp, synthetic construct
  source 1..75: mol_type = other DNA
tgaaagacgcacagggccatgaaacgcggtatgagtacaacgccgcaggcgacctgactgccgttatcaccccgg

SEQ ID NO: 838842 - DNA, 75 bp, synthetic construct
  source 1..75: mol_type = other DNA
cgcaggtgcaacagcagggacagcgaattaatcagcttcgtgatttgggctggtggaagcaagccagtctggaag

SEQ ID NO: 838843 - DNA, 75 bp, synthetic construct
  source 1..75: mol_type = other DNA
cctgactgtctcggccggcgtcatgggcggcggcacggctgaccagatcatcggggatgcgccattggtcggcgt

SEQ ID NO: 838844 - DNA, 75 bp, synthetic construct
  source 1..75: mol_type = other DNA
ctgacgctctcgccgtccgtggcggcgcggaacggcaggcccttactcaaagccatatccgatccgacgccggct

SEQ ID NO: 838845 - DNA, 75 bp, synthetic construct
  source 1..75: mol_type = other DNA
ataatgcttgagcagcacgccattgcaataccgcattgtgaggcgattcatgctaagtcgtcagccattggtgat

SEQ ID NO: 838846 - DNA, 75 bp, synthetic construct
  source 1..75: mol_type = other DNA
cagcccaacggcggtactcgcaaacttccctgctatcaaatcacccgcgacggcttcgcattccttgctatgggc

SEQ ID NO: 838847 - DNA, 75 bp, synthetic construct
  source 1..75: mol_type = other DNA
aacagtctgaccagccaacaactgcgcttcctgtcattactgaaaaatcacagtcgcgattacggcacaattgaa

SEQ ID NO: 838848 - DNA, 75 bp, synthetic construct
  source 1..75: mol_type = other DNA
aattgtgataagctgaagtcattaccaagcacgaaaaactggacttacgcaacatattttcgatttataattgca

SEQ ID NO: 838849 - DNA, 75 bp, synthetic construct
  source 1..75: mol_type = other DNA
ttcctgaagctcatcaacatggtgaccgtttccgagctgaccgaagagaaagtcggcatcgatgtgaccggctcc

SEQ ID NO: 838850 - DNA, 75 bp, synthetic construct
  source 1..75: mol_type = other DNA
ggtggtcgtaagcagctattgcacgcagcaagagatcgcgtcgccgatgaagttcagatgtacctgccaggcatc

SEQ ID NO: 838851 - DNA, 75 bp, synthetic construct
  source 1..75: mol_type = other DNA
tgctgggtgcggtactggtggatgtgaaaggcttctctgaacaggatgaagatagtcaggatctgcaactcgaag

SEQ ID NO: 838852 - DNA, 75 bp, synthetic construct
  source 1..75: mol_type = other DNA
atctgtagaagagatcaccgttgaagagtggttacacgtatttaatatcaatgtgcacgccagttttctttgcgc

SEQ ID NO: 838853 - DNA, 75 bp, synthetic construct
  source 1..75: mol_type = other DNA
gcagtctctgaccagcactgctccggccagcgcccctgtctctgacggcgaaacttccccggctgaaaccaacac

SEQ ID NO: 838854 - DNA, 75 bp, synthetic construct
  source 1..75: mol_type = other DNA
gacctcaacaaaaaattcaccgtcgagccgtcggtgacgcagaccctgtttgacaaaatccagcagtcgtccagt

SEQ ID NO: 838855 - DNA, 75 bp, synthetic construct
  source 1..75: mol_type = other DNA
tcggcgcagttcattttatggcaatacgttgttgataattacatcggatcattctacatttccttcgacagaata

SEQ ID NO: 838856 - DNA, 75 bp, synthetic construct
  source 1..75: mol_type = other DNA
gcggtgagacgacgagttacagctatgatgacccggctagtgagctgccgacagggatacaggacgcgacgggca

SEQ ID NO: 838857 - DNA, 75 bp, synthetic construct
  source 1..75: mol_type = other DNA
gagcaggtcaacccggaggggctggactatcgctttgagtacgggcaggaccgtgtgaccatcacggacagcctg

SEQ ID NO: 838858 - DNA, 75 bp, synthetic construct
  source 1..75: mol_type = other DNA
atcacccttgccatttcaccttcccacgtgatttctctgtttggcatcacgctgatttgtgccggtttctcggta

SEQ ID NO: 838859 - DNA, 75 bp, synthetic construct
  source 1..75: mol_type = other DNA
gcagccgtagaacgccgcgtcgaagtaaccaaaaaggccagcaatgtacagcagactgttagccatatgcctgat

SEQ ID NO: 838860 - DNA, 75 bp, synthetic construct
  source 1..75: mol_type = other DNA
gcagactgttagccatatgcctgatgacgatgttgatcgcgagctgcgggaatcgtggaagcgtcccggttgtcg

SEQ ID NO: 838861 - DNA, 75 bp, synthetic construct
  source 1..75: mol_type = other DNA
tcagcgacggcgacgaatcgcctgcagccgcgcttcgcaaacttgatgcattgctggctaaaaccaacaccccgc

SEQ ID NO: 838862 - DNA, 75 bp, synthetic construct
  source 1..75: mol_type = other DNA
gaaatgacggaagaatgggtgtcatgcgggaaaattcatgcggatatccgtggcaggagcagccgggagcggatg

SEQ ID NO: 838863 - DNA, 75 bp, synthetic construct
  source 1..75: mol_type = other DNA
tattacaaccgccaccgctattatgacccgctgcaggggaggtatatcactcaggatccgattggactgaagggg

SEQ ID NO: 838864 - DNA, 75 bp, synthetic construct
  source 1..75: mol_type = other DNA
cgagagttcgccagtgatcggggctggcctgtacgggcggagtacatcgagaatgccagcggtgcaaggctggcc

SEQ ID NO: 838865 - DNA, 75 bp, synthetic construct
  source 1..75: mol_type = other DNA
cattcttcagagcattaagcccttacgactacacactgtattgcaggaagtgggtaaaaccaaatctgacttgta

SEQ ID NO: 838866 - DNA, 75 bp, synthetic construct
  source 1..75: mol_type = other DNA
agcgccgcagcctggcggatgcccttcagcagtccggcggcgaagacggtggcagtgtggtgttcccgccggtgc

SEQ ID NO: 838867 - DNA, 75 bp, synthetic construct
  source 1..75: mol_type = other DNA
atctttgtgtcccagatggtaaaggggactatacttgtggtggccaagaccaacggggagaatcaaaaggagatg

SEQ ID NO: 838868 - DNA, 75 bp, synthetic construct
  source 1..75: mol_type = other DNA
aggacgattatataaacgcttaagatactatttacctgaaagaattttatccacaaaaaaaagtttaaggtggtc

SEQ ID NO: 838869 - DNA, 75 bp, synthetic construct
  source 1..75: mol_type = other DNA
tgttaatggttatatcctggcgtcggcagatcgcccagcagtcttatctgaaaaaagagagagccaggttgtgtg

SEQ ID NO: 838870 - DNA, 75 bp, synthetic construct
  source 1..75: mol_type = other DNA
ctcggtgagttatatggatatcaaagatattttatgcctaaaagtcctttcactggattcccatttgaatttcaa

SEQ ID NO: 838871 - DNA, 75 bp, synthetic construct
  source 1..75: mol_type = other DNA
gccgcgccagtacagcagagcaacacgcagaccgggcgctgggcttgctgcgagagttcgccagtgatcggggct

SEQ ID NO: 838872 - DNA, 75 bp, synthetic construct
  source 1..75: mol_type = other DNA
ctggcgcagggtgtgaaaccggagcgcatcatgaaagctgccgggataagccgggcgacgttttaccgcatcaag

SEQ ID NO: 838873 - DNA, 75 bp, synthetic construct
  source 1..75: mol_type = other DNA
cgagtttattttgattatttcttaatgtacattttcagaaagtataagattaatgacaactccatattaatagaa

SEQ ID NO: 838874 - DNA, 75 bp, synthetic construct
  source 1..75: mol_type = other DNA
cactactggtggtggtggtatggttttttgtcgcgcgtctgaggaaggtgtgcgagcgaagcatgtcaccacaac

SEQ ID NO: 838875 - DNA, 75 bp, synthetic construct
  source 1..75: mol_type = other DNA
aagaggcaaaacaactcgcctggtttttatcgctgagtgccgtcagtgaaaatattggctatccgaaaaatgcca

SEQ ID NO: 838876 - DNA, 75 bp, synthetic construct
  source 1..75: mol_type = other DNA
accgatgaggaactgctttactgcgcacaaagcgggcgttttcaaatcttaaaagacgtcagttgtgatctacct

SEQ ID NO: 838877 - DNA, 75 bp, synthetic construct
  source 1..75: mol_type = other DNA
aaagcatctctactgcagtaattgatgcaattaactctggcgctacactgaaagatattaatgcaattcctgatg

SEQ ID NO: 838878 - DNA, 75 bp, synthetic construct
  source 1..75: mol_type = other DNA
tgtttggcagttaatgcatcgtcttcccatgttcaaaaactctttgtgtggagaattgacttactctgaatttat

SEQ ID NO: 838879 - DNA, 75 bp, synthetic construct
  source 1..75: mol_type = other DNA
actaccgtatgcccaacctgaatgctgctctgggatgtggacaaatggaacgattggatatgtttttaaagcaaa

SEQ ID NO: 838880 - DNA, 75 bp, synthetic construct
  source 1..75: mol_type = other DNA
tcgtcgagggtggaaatagagccttcgagtgcaagatagaagatgttgaaataattgggaaaattataagtttaa

SEQ ID NO: 838881 - DNA, 75 bp, synthetic construct
  source 1..75: mol_type = other DNA
gacttggaccatctggcaatgaatctcaattcttttgagaaaattaatggtattattgttattggtcataccgat

SEQ ID NO: 838882 - DNA, 75 bp, synthetic construct
  source 1..75: mol_type = other DNA
gaaagcgtttactaaagcatttagtggtgcagataatgtaattcttttattagcaggggcaacttcggaagatat

SEQ ID NO: 838883 - DNA, 75 bp, synthetic construct
  source 1..75: mol_type = other DNA
cagtatttaactttagaagagcgcgtggagctggcgagctttgtggttgaatatagccaacaacgagtaccggtt

SEQ ID NO: 838884 - DNA, 75 bp, synthetic construct
  source 1..75: mol_type = other DNA
accgatgaggaactgctttactgcgcgcaaagcgggcgttttcaaatcttaaaagatgtcagttgtgatttgcct

SEQ ID NO: 838885 - DNA, 75 bp, synthetic construct
  source 1..75: mol_type = other DNA
gcgatctcttttatcgcctgaatgtcttcccactggaattgccgccgctacgcgaccgtccggaagatatccctc

SEQ ID NO: 838886 - DNA, 75 bp, synthetic construct
  source 1..75: mol_type = other DNA
aatctggaaattgatgcaccgtctgccaatgtttgaacatgcaatgcgtgatgatctcaagaactctgaacagat

SEQ ID NO: 838887 - DNA, 75 bp, synthetic construct
  source 1..75: mol_type = other DNA
gcagcaccatgaaattttgaaagctcgcttgctggcgttactgccagatagcgctgagcgcgaagcctatggcca

SEQ ID NO: 838888 - DNA, 75 bp, synthetic construct
  source 1..75: mol_type = other DNA
aaatgagcagtggaatgacgtgctagcattggctcatcagcaacaaatgcttgaggaatataacgcatatttttc

SEQ ID NO: 838889 - DNA, 75 bp, synthetic construct
  source 1..75: mol_type = other DNA
tttattctgttttattatggtgaatatataatggaaaacatgatgagaaatgaagcattacgcgttgcgctcatt

SEQ ID NO: 838890 - DNA, 75 bp, synthetic construct
  source 1..75: mol_type = other DNA
tagctttggtatgcattgggatgtattggattccaaacaaaaaaatgtcattattttttataataacaggttgtt

SEQ ID NO: 838891 - DNA, 75 bp, synthetic construct
  source 1..75: mol_type = other DNA
ctatctggcgtcagtccttgcggggagcgggctttcgtaatcttgccctgggtggatggaccgttgcagacgatg

SEQ ID NO: 838892 - DNA, 75 bp, synthetic construct
  source 1..75: mol_type = other DNA
aaaaccgcatcaccatcactgacagcctgaaccggcgcgaggtgctgcacacggaaggtgaagccgggctgaaac

SEQ ID NO: 838893 - DNA, 75 bp, synthetic construct
  source 1..75: mol_type = other DNA
aatacggcagataacgtcggcggcgtgtattaccggccgttgcagtatctgttaaatggagcatgggtgacggct

SEQ ID NO: 838894 - DNA, 75 bp, synthetic construct
  source 1..75: mol_type = other DNA
taactcctgttaagttatattcctcagcgaaatcttttatcgaattcatgagatatattcccgccttttataata

SEQ ID NO: 838895 - DNA, 75 bp, synthetic construct
  source 1..75: mol_type = other DNA
cattatccatacttcagaagaatatccttgcacaaaaaatactacatatccaaacatttatgctcacttcacata

SEQ ID NO: 838896 - DNA, 75 bp, synthetic construct
  source 1..75: mol_type = other DNA
gggcgggctgacgcgcagtatggaatacgatgctgccggacgggtcatccgcctgaccagtgaaaacggcagcca

SEQ ID NO: 838897 - DNA, 75 bp, synthetic construct
  source 1..75: mol_type = other DNA
cacgccataaaacttgacaaattattttttcagaaaaatatagacaaaccatattttgagggaattattaataat

SEQ ID NO: 838898 - DNA, 75 bp, synthetic construct
  source 1..75: mol_type = other DNA
cctgacgcctgaaggctggcagttccccggacgtatcaccgccaactcacagcgcctttcagtggactgggatgg

SEQ ID NO: 838899 - DNA, 75 bp, synthetic construct
  source 1..75: mol_type = other DNA
taccggaaaaactacgcttttgaaaaaaactgatcccggcattatgcgccagagggatccgtccagggctgatta

SEQ ID NO: 838900 - DNA, 75 bp, synthetic construct
  source 1..75: mol_type = other DNA
ggcgcgtaatgccgaagttgcgtacaaagaacttgcgttgaagcatcttttactttgcaaagaaacaagaatcag

SEQ ID NO: 838901 - DNA, 75 bp, synthetic construct
  source 1..75: mol_type = other DNA
aatgtgccactacgacctgtggatatgaaaagcgaattttcaaccacctctcaggcactgtgggtgtatgacaaa

SEQ ID NO: 838902 - DNA, 75 bp, synthetic construct
  source 1..75: mol_type = other DNA
tggaataatcattacaccagaaaggataaagtacgagccatcgcttaatcccatatggattcgtcttatcatgcg

SEQ ID NO: 838903 - DNA, 75 bp, synthetic construct
  source 1..75: mol_type = other DNA
tgattggattgaataatacggaaagatgttttgttttaaagcattgtggattttttaattggatgaaaaatggct

SEQ ID NO: 838904 - DNA, 75 bp, synthetic construct
  source 1..75: mol_type = other DNA
ttcttatatagtgtgttaatcattgtgattggattgaataatacggaaagatgttttgttttaaagcattgtgga

SEQ ID NO: 838905 - DNA, 75 bp, synthetic construct
  source 1..75: mol_type = other DNA
atatttgtaactgcaaatatcgtccttacaatcgtaatgattgtcaaaaggctttatctcattttaataaataac

SEQ ID NO: 838906 - DNA, 75 bp, synthetic construct
  source 1..75: mol_type = other DNA
atattgatggtaaagaatatttagtatcaaaatttctagggcaaggcggaatggggaatgtcttcttaattgaag

SEQ ID NO: 838907 - DNA, 75 bp, synthetic construct
  source 1..75: mol_type = other DNA
agaatgagcaggaacagctgacactgcgcctaagtgagctaaaaaaactcacaccggagatgatccgtgacggca

SEQ ID NO: 838908 - DNA, 75 bp, synthetic construct
  source 1..75: mol_type = other DNA
tggtaaacaggaattgttatttagataaatatggcgatgcaggtaatgactccaacttactgatagtgttttatg

SEQ ID NO: 838909 - DNA, 75 bp, synthetic construct
  source 1..75: mol_type = other DNA
ataaaagcataagcaatattttaagtgtaattcgtcctatttatgatgatttttttcagtctgcattcatggggc

SEQ ID NO: 838910 - DNA, 75 bp, synthetic construct
  source 1..75: mol_type = other DNA
ttaattgaacagcttgcaaaagaaacattattaaatcctccatctattattaatgctatagaaaaggagttcatg

SEQ ID NO: 838911 - DNA, 75 bp, synthetic construct
  source 1..75: mol_type = other DNA
agaaatacataatattggtgtgatgcacatttataatctagcagcaaaaccattagaagcaaaagatatagttga

SEQ ID NO: 838912 - DNA, 75 bp, synthetic construct
  source 1..75: mol_type = other DNA
atgaattctaaaattaatatagtgtcatatctaactaatgtaattttgcctggaggggggattgcatttattatt

SEQ ID NO: 838913 - DNA, 75 bp, synthetic construct
  source 1..75: mol_type = other DNA
aatcaccaacgtcaccgctggcgacctgacggctggcagcaccgacgcggttaacggctctcagctcaaaaccac

SEQ ID NO: 838914 - DNA, 75 bp, synthetic construct
  source 1..75: mol_type = other DNA
gttaaaagattcatcaaagcattgcagtccaaagcccaaaaaagtgctttggaacaaattcaaccacttaaggta

SEQ ID NO: 838915 - DNA, 75 bp, synthetic construct
  source 1..75: mol_type = other DNA
ggcgctacggctgtgggttataacgctgtcgcctcaggcgaaagcagcgtagccattggtcaaggtagcagcagc

SEQ ID NO: 838916 - DNA, 75 bp, synthetic construct
  source 1..75: mol_type = other DNA
ccagcaggactgccagacggtaaaagatgaagcgaaacgccttgaggctgtgctgaatgttgcgtgccggtcggt

SEQ ID NO: 838917 - DNA, 75 bp, synthetic construct
  source 1..75: mol_type = other DNA
gcaacttgaacaagaaattaccgatcgaaaggtgatagaagccgatctgcgtgccacccaggacgaactgattca

SEQ ID NO: 838918 - DNA, 75 bp, synthetic construct
  source 1..75: mol_type = other DNA
acaccaccaacatcaccaacctgactgacgctgttgacagtctcggtgatgactctctgctgtggaacgctacgg

SEQ ID NO: 838919 - DNA, 75 bp, synthetic construct
  source 1..75: mol_type = other DNA
cactgcaattggtgctcaagccagtgctcaggggaaaaattcagttgctctgggtgctggttctgtagcgactga

SEQ ID NO: 838920 - DNA, 75 bp, synthetic construct
  source 1..75: mol_type = other DNA
ctggcctggatgcgacggctgtcgcgctttctggcgtctgtttaatgttgatgacccggattatcacctggcagg

SEQ ID NO: 838921 - DNA, 75 bp, synthetic construct
  source 1..75: mol_type = other DNA
tagaccttctctagatttttgtcaaatgaaaaatatattatcatttgcagtatggaatatgtggggaggagctgc

SEQ ID NO: 838922 - DNA, 75 bp, synthetic construct
  source 1..75: mol_type = other DNA
taccgaagccaccagcaaaatcaccaacgtcaaagacggtgacctgacggctggcagcaccgacgcggttaacgg

SEQ ID NO: 838923 - DNA, 75 bp, synthetic construct
  source 1..75: mol_type = other DNA
aagccgatcagctgtatgccctggtccgcgccgggggcggtgcccctcacacaatcatcaaggaagcgttagccg

SEQ ID NO: 838924 - DNA, 75 bp, synthetic construct
  source 1..75: mol_type = other DNA
tcaccaccaacactaacagtatcaataccctgacggattccgttggcgaccttaaagacgatgccctgctgtgga

SEQ ID NO: 838925 - DNA, 75 bp, synthetic construct
  source 1..75: mol_type = other DNA
cttaaacgttaaaattggttctacgtcaattgacgttgtattggctagcgacggtaaaattaccgcgaaagatgg

SEQ ID NO: 838926 - DNA, 75 bp, synthetic construct
  source 1..75: mol_type = other DNA
cagagccgctgcacgctggcaggaattgctgctgaactacctgcaggaagatgatcggatctgtatccagagacg

SEQ ID NO: 838927 - DNA, 75 bp, synthetic construct
  source 1..75: mol_type = other DNA
aaattgaaaaagatacgttgatacaaggggttagtgcaatagcaaatatgaccagggatatcggtggttttaagt

SEQ ID NO: 838928 - DNA, 75 bp, synthetic construct
  source 1..75: mol_type = other DNA
acattctcaaaggcgctgcgatggaaggcaagtacaagggcgctcagcgtggagctaaatgtgaggaaatcgcaa

SEQ ID NO: 838929 - DNA, 75 bp, synthetic construct
  source 1..75: mol_type = other DNA
gtctgcatcggtcgtttcaggatcgacttctactatgccaagactggcaccgggataatacaaatcaacatcacc

SEQ ID NO: 838930 - DNA, 75 bp, synthetic construct
  source 1..75: mol_type = other DNA
agtccagggctctcttataagccacggactaaatttgttaactacaatgagcggacaaaatatttacttgaactt

SEQ ID NO: 838931 - DNA, 75 bp, synthetic construct
  source 1..75: mol_type = other DNA
ccgttatctggcagatgtagtgaagtttgaaaacctatgtggtgatttagagcatacatcgcagaaggctaggga

SEQ ID NO: 838932 - DNA, 75 bp, synthetic construct
  source 1..75: mol_type = other DNA
tcagcggcaccagtgcgtcggcagtgacccgtgaaggtggatattacggaatgacgatggatccggggagtatgc

SEQ ID NO: 838933 - DNA, 75 bp, synthetic construct
  source 1..75: mol_type = other DNA
gatatataccaatagcgtgacggctccctatcttattgatatttctgttgatgacagctacagccaggtgatgct

SEQ ID NO: 838934 - DNA, 75 bp, synthetic construct
  source 1..75: mol_type = other DNA
tcaaggaaagaatgcatcagaaggatacactctggcctctcctaggttttcttatactccggataagccaacaag

SEQ ID NO: 838935 - DNA, 75 bp, synthetic construct
  source 1..75: mol_type = other DNA
caggggtacgctcggcgtacttcgtcacggcctgaaaatccgcaatgcccgtttttcgctgtgtcagtttaaacc

SEQ ID NO: 838936 - DNA, 75 bp, synthetic construct
  source 1..75: mol_type = other DNA
tgtggtcaacaaactgctggaggccgcaacggtcgaaggcaccggccataaatacctgatccagcacagcgccgg

SEQ ID NO: 838937 - DNA, 75 bp, synthetic construct
  source 1..75: mol_type = other DNA
tcaacctgcaaaacgacatcatcgcccagatggtagaaaaaggctggattgtcggcaaaggtgacacctacgaca

SEQ ID NO: 838938 - DNA, 75 bp, synthetic construct
  source 1..75: mol_type = other DNA
tgtctaatggtgaaatagaatggaaaagccacccttacctgactcagcagcagattattaatataccaattccta

SEQ ID NO: 838939 - DNA, 75 bp, synthetic construct
  source 1..75: mol_type = other DNA
tatggcgcgcggctaaagcgtattcgtaatgatgaattatttagcaatgagcaggataatccattccatatcagt

SEQ ID NO: 838940 - DNA, 75 bp, synthetic construct
  source 1..75: mol_type = other DNA
agtcgcgtcatcaacaaatcggtgttcctggcactgggcatcaatatcgaaggtcagaaagaactgccaggtatg

SEQ ID NO: 838941 - DNA, 75 bp, synthetic construct
  source 1..75: mol_type = other DNA
aaaactacgcaagtttttatcagaaaataaatatttatctaaacttatttcttttggttctcatcaagtattcaa

SEQ ID NO: 838942 - DNA, 75 bp, synthetic construct
  source 1..75: mol_type = other DNA
cgctcacaaaatattggtttagtaattacaggatatacctatgtcacgccaaggaaattcaggcatcgaaaggaa

SEQ ID NO: 838943 - DNA, 75 bp, synthetic construct
  source 1..75: mol_type = other DNA
taatcatatttcacaaagtctgacgaatctaaaggatttactggatcttcgctttgattcagcagatttttattt

SEQ ID NO: 838944 - DNA, 75 bp, synthetic construct
  source 1..75: mol_type = other DNA
gctgccggtagtgtaggtgaaaatgccgatactctgcgccgtgcggatggattaaccattcgtcgtttgggctgg

SEQ ID NO: 838945 - DNA, 75 bp, synthetic construct
  source 1..75: mol_type = other DNA
cagagaacgtatgaggaactggcttatatcaatcccttactgattgaaaatgatctcgtaatatcaccaaaaaat

SEQ ID NO: 838946 - DNA, 75 bp, synthetic construct
  source 1..75: mol_type = other DNA
ataaacagagcggatcaagcaaagtgggtcattgaagagttacagctatcaccttggctagggttgggctgcaaa

SEQ ID NO: 838947 - DNA, 75 bp, synthetic construct
  source 1..75: mol_type = other DNA
atgttaatcgtgcatgtgctattctaatatttagaaaaaagacttcctctacttttgaggattacgaaattgact

SEQ ID NO: 838948 - DNA, 75 bp, synthetic construct
  source 1..75: mol_type = other DNA
atcatagaacaattatacttcccacaaagcacatactctttctctgttttctcttctgatattttaggtaatata

SEQ ID NO: 838949 - DNA, 75 bp, synthetic construct
  source 1..75: mol_type = other DNA
ccatccactggcggcgaaaacgcgaattacaccggaagatctcgccagcgagacgctgttgatttatccggtgca

SEQ ID NO: 838950 - DNA, 75 bp, synthetic construct
  source 1..75: mol_type = other DNA
gctcatcttgatacagatgtaatggctgattgggtagatactcaaaaagaaattaatttatttactctggattcg

SEQ ID NO: 838951 - DNA, 75 bp, synthetic construct
  source 1..75: mol_type = other DNA
cctatgaattcgccctggcgcagcgtttttccggtgtgatggtggattctcttgggacgcttgaaggcggtgaag

SEQ ID NO: 838952 - DNA, 75 bp, synthetic construct
  source 1..75: mol_type = other DNA
gaaaattaattgtctcaacgaatgcgctggaagtgagtggtacaaacagtaaaggccaatttagtataaaagatg

SEQ ID NO: 838953 - DNA, 75 bp, synthetic construct
  source 1..75: mol_type = other DNA
ttgccgctatcgaaaagggaggattactggaggttaaagaggggggattagcatttgcggtagatcagaaagcag

SEQ ID NO: 838954 - DNA, 75 bp, synthetic construct
  source 1..75: mol_type = other DNA
tcatctgtgacggcaagtgcggaaaatttcactacgttgaccaccaataccctgtcgggaaacggcaatttttat

SEQ ID NO: 838955 - DNA, 75 bp, synthetic construct
  source 1..75: mol_type = other DNA
aaagctgcgtagatatattcaagatagttataggtccatccagttcccgcactgtcgggccaatgcgtgcggctt

SEQ ID NO: 838956 - DNA, 75 bp, synthetic construct
  source 1..75: mol_type = other DNA
ccttatgcgatgacatttcgtgccagagatgactggtttacgctttatgaagaaacctggttttctgtcggcgac

SEQ ID NO: 838957 - DNA, 75 bp, synthetic construct
  source 1..75: mol_type = other DNA
gacggtggtcagcaacttgggcgtaagttccagttgtatgacatgaccagcgaccgtagcgtcaatttccgctaa

SEQ ID NO: 838958 - DNA, 75 bp, synthetic construct
  source 1..75: mol_type = other DNA
atgatgagcgccctagaagtatctatgtacagaatcagcaagcttcttcaggaaactggatggagccaggctgag

SEQ ID NO: 838959 - DNA, 75 bp, synthetic construct
  source 1..75: mol_type = other DNA
atgcgaaaggaggttacacaaaaaacgtgtatgtgtaaactcgttttttgtgtgtcgcgtattactcattttttg

SEQ ID NO: 838960 - DNA, 75 bp, synthetic construct
  source 1..75: mol_type = other DNA
ggcgttctggcgctctgccatctggctggctgggtgccgcaggcgattgaccccgcaccgctaccggaaatgggc

SEQ ID NO: 838961 - DNA, 75 bp, synthetic construct
  source 1..75: mol_type = other DNA
taatagaggtacaatcaaagataaattaaataatatatatggtaagtctattgattattcagcgctgcgtcatcg

SEQ ID NO: 838962 - DNA, 75 bp, synthetic construct
  source 1..75: mol_type = other DNA
cagggcatccattgcattggtttttattgcctcctgaagagtgtgagcaaattttcacccctgacacgatgaaaa

SEQ ID NO: 838963 - DNA, 75 bp, synthetic construct
  source 1..75: mol_type = other DNA
cttgcccgtagaattggtgtgacacaacaaactgttcaacaatgggtcagcggtaaggctacacctaaagcctca

SEQ ID NO: 838964 - DNA, 75 bp, synthetic construct
  source 1..75: mol_type = other DNA
gccattcctgttgattataatttaagtcgcagtggtattaaccttgttggtgatttatggaatacttacttatta

SEQ ID NO: 838965 - DNA, 75 bp, synthetic construct
  source 1..75: mol_type = other DNA
cagtatgctttgtcgcccgccctgagcacccactggcgaaatacgccaccctcagctggaatgatcttgccaact

SEQ ID NO: 838966 - DNA, 75 bp, synthetic construct
  source 1..75: mol_type = other DNA
acgttatgccagccagggacaactggtgatcctcaacctgccaaagatagaacagaaaggcagcgtcggtgtgtt

SEQ ID NO: 838967 - DNA, 75 bp, synthetic construct
  source 1..75: mol_type = other DNA
gcacaattgattaacggctttaatttttacgttggctggaaagcgaaccgcaagattcgcataacgagcatgtcg

SEQ ID NO: 838968 - DNA, 75 bp, synthetic construct
  source 1..75: mol_type = other DNA
atatcaattatgagtaagatctatattgctcttaaaatgaaaatatactcgaaattgcatagtatgaaaggaata

SEQ ID NO: 838969 - DNA, 75 bp, synthetic construct
  source 1..75: mol_type = other DNA
tctcaacatgatgatgcatggcttgagcaagaaatcctaaatagaggattactggccacccattatcctagaaga

SEQ ID NO: 838970 - DNA, 75 bp, synthetic construct
  source 1..75: mol_type = other DNA
tgtttcggaagtgattgctaacctgttgcttggcgccgctggcagcgctttgtttctgctgctgcaaaacgtacc

SEQ ID NO: 838971 - DNA, 75 bp, synthetic construct
  source 1..75: mol_type = other DNA
ttgcccgttcccgcaaacacatagaaaagtactacggcaccgaagatatcggccgcttcccaactcgcttgccac

SEQ ID NO: 838972 - DNA, 75 bp, synthetic construct
  source 1..75: mol_type = other DNA
cactctgcggcttgcccagaagcaatttaacaaatgggtcagtgagccggtcgaaaagcgtaccaccgcagcatt

SEQ ID NO: 838973 - DNA, 75 bp, synthetic construct
  source 1..75: mol_type = other DNA
tatatggctttgcctcgctgaggcacgagttgaagcagctggagtctgcaaggattattttcagcgaatgggatt

SEQ ID NO: 838974 - DNA, 75 bp, synthetic construct
  source 1..75: mol_type = other DNA
cacgaatgcaccagcaggaaaccttcgccagcgcctttcagggggagatacatgtgcatcttcacggggtgagtt

SEQ ID NO: 838975 - DNA, 75 bp, synthetic construct
  source 1..75: mol_type = other DNA
aacctgcaggattgcgatacgctcatcaactacgacattcactggaatccggtacgtatcattcagcgttttggc

SEQ ID NO: 838976 - DNA, 75 bp, synthetic construct
  source 1..75: mol_type = other DNA
accgactgctggccaaaattgatgcccacgaatcagaagatctgacggagctgaatatcgaggatatccacgact

SEQ ID NO: 838977 - DNA, 75 bp, synthetic construct
  source 1..75: mol_type = other DNA
cactgaaagcagtaacgcttggtaacgaatcctttggttatacagatgacccggttgtttcatccgatataatcg

SEQ ID NO: 838978 - DNA, 75 bp, synthetic construct
  source 1..75: mol_type = other DNA
tccagacggtataccagccgggaagcttcacgccgctcctgagaatcgaaacagagaatggtgaacaggcgaagg

SEQ ID NO: 838979 - DNA, 75 bp, synthetic construct
  source 1..75: mol_type = other DNA
ttacccgcagcgagtatgatgaggcggggaggctgaaggcacagacggatgcggcggggcggcggacggagtaca

SEQ ID NO: 838980 - DNA, 75 bp, synthetic construct
  source 1..75: mol_type = other DNA
cgctatttcagcgataaaaatatcaatcccattaaacccaataatattatattataaatacaacctatttattct

SEQ ID NO: 838981 - DNA, 75 bp, synthetic construct
  source 1..75: mol_type = other DNA
gaggctgtgaacagtccggggggagagacggtatcgcctccacctgtggtgaacgttctgatgccagcagtgaat

SEQ ID NO: 838982 - DNA, 75 bp, synthetic construct
  source 1..75: mol_type = other DNA
gttcacagctcggacttgagcccggtagcgccctcggtcatgcatatttactgccttttggtaataaaaacgaaa

SEQ ID NO: 838983 - DNA, 75 bp, synthetic construct
  source 1..75: mol_type = other DNA
gcttgagcaggggcgagaagtttttgccttgccaggtccaatagggaatccgggaagcgaagggcctcactggtt

SEQ ID NO: 838984 - DNA, 75 bp, synthetic construct
  source 1..75: mol_type = other DNA
gttcgtcggcgcagttcgccgtgggtcaggaggtaccggtgctgggttccgtgtcataccaggacaataacaggc

SEQ ID NO: 838985 - DNA, 75 bp, synthetic construct
  source 1..75: mol_type = other DNA
aaacaggtcagcggcacgttgactgccgctaaagaagaagccgaagggacaactaccagtgaacgcgagattgtc

SEQ ID NO: 838986 - DNA, 75 bp, synthetic construct
  source 1..75: mol_type = other DNA
tggccggataaccgcatcgcggaagatgcgcactatgtctaccgctacgatgaatacggcaggctggcggagaag

SEQ ID NO: 838987 - DNA, 75 bp, synthetic construct
  source 1..75: mol_type = other DNA
aattggaatagttagacctagaataattgataaaataaataaaataagaaatgaaattgagcacgagtatcgaga

SEQ ID NO: 838988 - DNA, 75 bp, synthetic construct
  source 1..75: mol_type = other DNA
agggtgtttatccagattgctactggagttatatagggcaaaaggattatttgaagcctaacacatacttacaag

SEQ ID NO: 838989 - DNA, 75 bp, synthetic construct
  source 1..75: mol_type = other DNA
acccgctgaccgcatagtcagactgcttctggattacgacaattgggaatatgacggtatcagcgaggcctatta

SEQ ID NO: 838990 - DNA, 75 bp, synthetic construct
  source 1..75: mol_type = other DNA
gtcttccacgttcggtgcgctgtcactgacgctcgggctgattgcggggccgctggcaaaactgcaactgggact

SEQ ID NO: 838991 - DNA, 75 bp, synthetic construct
  source 1..75: mol_type = other DNA
gacttgccggtgttctccggggtaaaaaggtccgtacgaccatcagccggaaagccgttgccgcaggcgaccgcg

SEQ ID NO: 838992 - DNA, 75 bp, synthetic construct
  source 1..75: mol_type = other DNA
gggccaaccaggtctgggtcactgatattacttatagtgtgcccggagttcagggtgagcagggatgctcaaatg

SEQ ID NO: 838993 - DNA, 75 bp, synthetic construct
  source 1..75: mol_type = other DNA
gaagcggttcgcttttgtccatacccgggaatggggtttcctgcgagtgaaataaaagacgctgtaattcctgaa

SEQ ID NO: 838994 - DNA, 75 bp, synthetic construct
  source 1..75: mol_type = other DNA
ggcgatgacccggtgcgattcaggccctggcccgggatgggattcccggtcagcaccctgaaagcggtggagatc

SEQ ID NO: 838995 - DNA, 75 bp, synthetic construct
  source 1..75: mol_type = other DNA
gaaccggtgcgctttcgcccgcatccggggatggggtttccggcctctgaaatcaaaggcgtggaattacctgag

SEQ ID NO: 838996 - DNA, 75 bp, synthetic construct
  source 1..75: mol_type = other DNA
ctcagaagagttactttcagataatggtatcgagaaagacgataattcttctgacaattactttgaggtcgaaaa

SEQ ID NO: 838997 - DNA, 75 bp, synthetic construct
  source 1..75: mol_type = other DNA
ggcgcgacagaggcggcgcgaccggaacggtcgctgcaagccgggggttttgcgtcagggatggaagcccgccag

SEQ ID NO: 838998 - DNA, 75 bp, synthetic construct
  source 1..75: mol_type = other DNA
tcatgagaaaaagggcaatgctatcactgccaagtggcttgtcccagtgacaaaatttcgcgtgcgtgagcttgc

SEQ ID NO: 838999 - DNA, 75 bp, synthetic construct
  source 1..75: mol_type = other DNA
cgggttcatggcgatctgaacgaaatcgaggaaacctgcggtaaaaaccgggtgggccacatcatgcaactgaac

SEQ ID NO: 839000 - DNA, 75 bp, synthetic construct
  source 1..75: mol_type = other DNA
aaaacctgccgtcagcatttgcacagcatccgtggcgcagctcgcttggctctatcggtggcggcaatcatttcg

SEQ ID NO: 839001 - DNA, 75 bp, synthetic construct
  source 1..75: mol_type = other DNA
atgaagcatataactcagagaagcaatattttaccagagaggactatacgtatgattacgaccttttaaatgcaa

SEQ ID NO: 839002 - DNA, 75 bp, synthetic construct
  source 1..75: mol_type = other DNA
ttacgcaactgatgattcaactccagaaaatgccagaactacatagaacagaaatgttgactgcctataatagta

SEQ ID NO: 839003 - DNA, 75 bp, synthetic construct
  source 1..75: mol_type = other DNA
cacctaccgggatgatttttatgccggccggccggctgtgacggtgaacgagttcgggaaaggcaaagcctggca

SEQ ID NO: 839004 - DNA, 75 bp, synthetic construct
  source 1..75: mol_type = other DNA
tcgaccagcagaaccgctgggcgctggatgacgcccaggggccgcgcaatcttgggatggaatatgagaagacgg

SEQ ID NO: 839005 - DNA, 75 bp, synthetic construct
  source 1..75: mol_type = other DNA
acgattacgactactggcagcttgcgaaagcgatcgactttatctcctgggacagctacccgatgtggcacaagg

SEQ ID NO: 839006 - DNA, 75 bp, synthetic construct
  source 1..75: mol_type = other DNA
taaacataagggagtatatggggttagctgaaacattagttagtattccgcagtctgaaagaggcggtgagattg

SEQ ID NO: 839007 - DNA, 75 bp, synthetic construct
  source 1..75: mol_type = other DNA
aaaatgggagtctgctacagactctcaaaaaaaatcaattgagaaacttgtagatataataaaaatatttatgag

SEQ ID NO: 839008 - DNA, 75 bp, synthetic construct
  source 1..75: mol_type = other DNA
tttattgatcatgaggggtatataagaaatgctggaattataaaacacacagtccctgaacttgaagaaggtcgc

SEQ ID NO: 839009 - DNA, 75 bp, synthetic construct
  source 1..75: mol_type = other DNA
cacaacgaggcaaatacagagctggctgccggtattcagcgcgtgcgtgaggctgtgaacagtccgggtggagat

SEQ ID NO: 839010 - DNA, 75 bp, synthetic construct
  source 1..75: mol_type = other DNA
aatagacctgaaaacttggatccagtaccgggcagacaaggcgccagtagttttacgagaagaggaactgccgtt

SEQ ID NO: 839011 - DNA, 75 bp, synthetic construct
  source 1..75: mol_type = other DNA
tcagttgccgttcccctgaaaaccgcccctgccagtgactcatcccgtcaccacgtgatctggcccggagtcgtc

SEQ ID NO: 839012 - DNA, 75 bp, synthetic construct
  source 1..75: mol_type = other DNA
tcccggggccgctgcgtaaactgctcggcatctgggcagaagagatcgactgtctcggtgagggagaacgtaatc

SEQ ID NO: 839013 - DNA, 75 bp, synthetic construct
  source 1..75: mol_type = other DNA
atggggatggagtacgaaaaaaccgttaacgaacactaccgtccattctgggaaaaaggcatcgcggtggatgtg

SEQ ID NO: 839014 - DNA, 75 bp, synthetic construct
  source 1..75: mol_type = other DNA
atcaggaatgggtttttgtacaaaactacactgctcatgtacaaaatattgtgcttcctggagcgtggcgagtgg

SEQ ID NO: 839015 - DNA, 75 bp, synthetic construct
  source 1..75: mol_type = other DNA
ggcgacagattgcctgatgagcgtctcaccacttctgttgactgcgactacagcgcccggaaagatgacattgca

SEQ ID NO: 839016 - DNA, 75 bp, synthetic construct
  source 1..75: mol_type = other DNA
attaagttggttgattttgactatgtccacaaaagtctatgcatagtaagaaggccagatgatcaaaacgaacca

SEQ ID NO: 839017 - DNA, 75 bp, synthetic construct
  source 1..75: mol_type = other DNA
attggcatcgaagtccgatcagcgattcgcatccattcgatcaaccgggaacttaactttttctaccgcttttta

SEQ ID NO: 839018 - DNA, 75 bp, synthetic construct
  source 1..75: mol_type = other DNA
gcgtcattcgcggtatacaccacaactttcgggcatgactgcgttacgtacggcgtggcatctattgccggtggt

SEQ ID NO: 839019 - DNA, 75 bp, synthetic construct
  source 1..75: mol_type = other DNA
tattttgacaagatggaatcaaatggcatcagtgttatggcagccatattattggtggataaccatgctttgacg

SEQ ID NO: 839020 - DNA, 75 bp, synthetic construct
  source 1..75: mol_type = other DNA
gcgcgcgacacgggtttgtttatggccatgcagcgcggacatatgaacgttattaagactatttttaacgcatta

SEQ ID NO: 839021 - DNA, 75 bp, synthetic construct
  source 1..75: mol_type = other DNA
cgattaaggcaaccattggttaaaactttagaaagaaaaataccattgagtatagaattgactgagttaatacag

SEQ ID NO: 839022 - DNA, 75 bp, synthetic construct
  source 1..75: mol_type = other DNA
acaacaaaaacggttgcgctgtttcgcggtaaatctcaccgcatcggcggcaccattacaggagaagcctgatgc

SEQ ID NO: 839023 - DNA, 75 bp, synthetic construct
  source 1..75: mol_type = other DNA
gttttaatataacgctcccggatattcttgatgctgttcatcatgttctggaaacacatcctgacgacttcgata

SEQ ID NO: 839024 - DNA, 75 bp, synthetic construct
  source 1..75: mol_type = other DNA
cccttcactggcgcaatttattcttattgataaagattcgcacaaaattaaaagtgacggtgaacgtctgtttgc

SEQ ID NO: 839025 - DNA, 75 bp, synthetic construct
  source 1..75: mol_type = other DNA
aaccccaatttgcatcttgtagaatatgatcttaccgatctttctgccagcattcgtctcatgcaaacgacaaac

SEQ ID NO: 839026 - DNA, 75 bp, synthetic construct
  source 1..75: mol_type = other DNA
aatacctgtcgtttgccataccggtgatgtggcgggagcgcacggaaaactggtcgtgggagctgggggcgtctg

SEQ ID NO: 839027 - DNA, 75 bp, synthetic construct
  source 1..75: mol_type = other DNA
aacaagagcgcatttaatcaaggttcttcaggaagtacttattactctccagattttaaaaagaacttttatacc

SEQ ID NO: 839028 - DNA, 75 bp, synthetic construct
  source 1..75: mol_type = other DNA
agatgagatcgtccgtagacttttttcccaaacgccacaaaatgtcagaatttcttgtcgctctcaggattggtt

SEQ ID NO: 839029 - DNA, 75 bp, synthetic construct
  source 1..75: mol_type = other DNA
atgctttatcaaccctggctatagccatttcaacaatattatccacacccgtatctctggccgtaaccccaccca

SEQ ID NO: 839030 - DNA, 75 bp, synthetic construct
  source 1..75: mol_type = other DNA
ggaaggtcagcttaatccgcgtctgcaactgtggggcaacgtcgcccagcagttgggtgacaacggttacagcga

SEQ ID NO: 839031 - DNA, 75 bp, synthetic construct
  source 1..75: mol_type = other DNA
ttgggttctaccatttttccctattattgctttagattacgcagaatctaatcaagcgaaaattcattcaagaat

SEQ ID NO: 839032 - DNA, 75 bp, synthetic construct
  source 1..75: mol_type = other DNA
aactctcggaaagcgatccttggtttagaaaccacggcttttcttctaatttgaatggcttcgtgagcgaggaga

SEQ ID NO: 839033 - DNA, 75 bp, synthetic construct
  source 1..75: mol_type = other DNA
atttctaaccgaattgccaatgaaaataccgatatttataagcaattctggaatgaagacagctatggccgtacc

SEQ ID NO: 839034 - DNA, 75 bp, synthetic construct
  source 1..75: mol_type = other DNA
cgcgacaagaaaggcagaacgcggacagagagtagccacctgacagcagacaaagaactgagtaaccgggttaga

SEQ ID NO: 839035 - DNA, 75 bp, synthetic construct
  source 1..75: mol_type = other DNA
gggatgcaacgacggaacgcggcgttcactcgttcagcactgtaggacaacgcgacaagaaaggcagaacgcgga

SEQ ID NO: 839036 - DNA, 75 bp, synthetic construct
  source 1..75: mol_type = other DNA
cagagagtagccacctgacagccgacaaagagctgagcaaccgggttagagctgcactgcgcaacctgcatccct

SEQ ID NO: 839037 - DNA, 75 bp, synthetic construct
  source 1..75: mol_type = other DNA
accggcctctatgccacctggtatgccgatgacgagtcgcgtaatggcgcgtatctcgacagttgggcgcagtac

SEQ ID NO: 839038 - DNA, 75 bp, synthetic construct
  source 1..75: mol_type = other DNA
atgaatggggcaaccagcttaatgaggagaacccgcatcacctgcaccagccgtaccgtctgccagggcagcagc

SEQ ID NO: 839039 - DNA, 75 bp, synthetic construct
  source 1..75: mol_type = other DNA
cgaaaatgaacacctattccggtttaaaatgaacgctgattccggcttgcgtgtacaccgattccggacacctca

SEQ ID NO: 839040 - DNA, 75 bp, synthetic construct
  source 1..75: mol_type = other DNA
gcagtatatatcgtgaactgggtgcaacgctgagttacaacatgcgtctggggaacggtatggaaattgagccgt

SEQ ID NO: 839041 - DNA, 75 bp, synthetic construct
  source 1..75: mol_type = other DNA
ggctggtctgatttctataccacaacacgaaaaccatcagcgggagatgttggtgcatacaccaaagctgaatca

SEQ ID NO: 839042 - DNA, 75 bp, synthetic construct
  source 1..75: mol_type = other DNA
ggagcgtaaaggggacaccaggtattcagatgtatgaggcatacaacaatggctacccaacagcctatggtaatg

SEQ ID NO: 839043 - DNA, 75 bp, synthetic construct
  source 1..75: mol_type = other DNA
cggtaaaagcagcatatgaccttgctaacgggaaatataccgcacaggacgccaccacagcgcggaaaggccttg

SEQ ID NO: 839044 - DNA, 75 bp, synthetic construct
  source 1..75: mol_type = other DNA
taaaggtgccaccgctgctggcgaaggtgagttattcattggctggagtggcacgagcggtgcccatgcgcccgt

SEQ ID NO: 839045 - DNA, 75 bp, synthetic construct
  source 1..75: mol_type = other DNA
catatcagactaatgagcgcgcaatccattccattgtaacaagccttaaagaagatgatgtatgcagcgtttttt

SEQ ID NO: 839046 - DNA, 75 bp, synthetic construct
  source 1..75: mol_type = other DNA
gcctagtggctggactgatcgtggttcatatgcggcaggttatttttcgacatatcagactaatgagcgcgcaat

SEQ ID NO: 839047 - DNA, 75 bp, synthetic construct
  source 1..75: mol_type = other DNA
cggtaagggctttaagttcctggcggaagtgcgtcagcacacctggtcatccggtaccaacggcgtggtggctgc

SEQ ID NO: 839048 - DNA, 75 bp, synthetic construct
  source 1..75: mol_type = other DNA
atcagagcatgatcaacgcccgacagtctgcggtaactgatgcccagcaaacgcaaattacagagcaacaggcgc

SEQ ID NO: 839049 - DNA, 75 bp, synthetic construct
  source 1..75: mol_type = other DNA
ctcgggtccctggatcgggaactccacggtttgctcatggaaatgggtcgtattcggcaaattgccacaaaaatg

SEQ ID NO: 839050 - DNA, 75 bp, synthetic construct
  source 1..75: mol_type = other DNA
gcatggctggaaattgataatgaagtggttgcagaccaagataacctgaaaacaaaacttacaccaataattaga

SEQ ID NO: 839051 - DNA, 75 bp, synthetic construct
  source 1..75: mol_type = other DNA
caccgtttatcccgggcaaggttaaatgccttgagttttcacttgttttgttcgacatgttagtgtcaagaaaaa

SEQ ID NO: 839052 - DNA, 75 bp, synthetic construct
  source 1..75: mol_type = other DNA
ttcttgtccgaaaacgtctccagtcaaagggttttcaccattgccttgagcattgtcgttgtgcgcttagccaga

SEQ ID NO: 839053 - DNA, 75 bp, synthetic construct
  source 1..75: mol_type = other DNA
gtccgatagctgcggcacagttggcaaaaggggatctgttccgactcatttcaatcaactggatacgctcataca

SEQ ID NO: 839054 - DNA, 75 bp, synthetic construct
  source 1..75: mol_type = other DNA
gaagtcgcagctatagaaaagatagttagtacattaaacactattgataaacaagtttttatatcactcgatcaa

SEQ ID NO: 839055 - DNA, 75 bp, synthetic construct
  source 1..75: mol_type = other DNA
tcgaacatcactctgactctgggacaggtaaatcttatgcgaatatgctggcgttggatgtgagctttttacata

SEQ ID NO: 839056 - DNA, 75 bp, synthetic construct
  source 1..75: mol_type = other DNA
ttttagaaacaacgaagaaaatttagagtggtcaattgaagattttagaatcttcttggctcagaaatatggttt

SEQ ID NO: 839057 - DNA, 75 bp, synthetic construct
  source 1..75: mol_type = other DNA
tatatctatccagtgtcacagtagatgtcgaaagcgcacggaagatagtagagctaaggaatggcgatgtgcaaa

SEQ ID NO: 839058 - DNA, 75 bp, synthetic construct
  source 1..75: mol_type = other DNA
ttgtaacagcgattattaacggcgaacttaagtattcacgtttcgagacaaatgaacgtgatgggaaatgtattg

SEQ ID NO: 839059 - DNA, 75 bp, synthetic construct
  source 1..75: mol_type = other DNA
tagaaaatgcaattgaggagaacgatactgatagcgagttatttataactgatattcagtcaacgcttatacctg

SEQ ID NO: 839060 - DNA, 75 bp, synthetic construct
  source 1..75: mol_type = other DNA
gaagtgtccaacatgtcgaaagcgcagatcatccagcaggccggtaactccgtgctggcaaaagctaaccaggta

SEQ ID NO: 839061 - DNA, 75 bp, synthetic construct
  source 1..75: mol_type = other DNA
gtatctggccagacccagttcaacggcgtgaacgtactggcgaaagacggttccatgaaaattcaggttggtgcg

SEQ ID NO: 839062 - DNA, 75 bp, synthetic construct
  source 1..75: mol_type = other DNA
gatgctactacttctggtgcaatcactgtagcaaatgcaagaatgagtgctgagtctcttcaatcggcaactaag

SEQ ID NO: 839063 - DNA, 75 bp, synthetic construct
  source 1..75: mol_type = other DNA
atacgaatttgctggtggcaattctactaatggtggcggcgttaaattcaaagacacggtgtcttctgacgcgct

SEQ ID NO: 839064 - DNA, 75 bp, synthetic construct
  source 1..75: mol_type = other DNA
gatggtacgattacatccagcgatggtaaggcgctgtatttagatgagaagggcaacctgacccaaacaggtagt

SEQ ID NO: 839065 - DNA, 75 bp, synthetic construct
  source 1..75: mol_type = other DNA
gatgtttatgtcgaagatggtgcactttcagccaatgctacaaaagatgtaacctactttgaacaaaaaaatggg

SEQ ID NO: 839066 - DNA, 75 bp, synthetic construct
  source 1..75: mol_type = other DNA
ttagggaattatttagaaagaaataagaatggagatgaattttatttttttattaaacggattgatactgatgag

SEQ ID NO: 839067 - DNA, 75 bp, synthetic construct
  source 1..75: mol_type = other DNA
tcacggggaaaatccatagacaggatgctggtcaaagcaggattcagtgaggggttactgacgcagctaaagaat

SEQ ID NO: 839068 - DNA, 75 bp, synthetic construct
  source 1..75: mol_type = other DNA
gatagattggtcatttttcatgagcctcatcctgaaaacaccctcaaaaggtacgtcttggaagaagttaaacag

SEQ ID NO: 839069 - DNA, 75 bp, synthetic construct
  source 1..75: mol_type = other DNA
aggttcgatgaattatgtaaggaactgactaagtttgatgccactggcgatgaggggcgagttcaagcaacagta

SEQ ID NO: 839070 - DNA, 75 bp, synthetic construct
  source 1..75: mol_type = other DNA
gaggggcgcggcacatggttctgcaatcagtgcggcgcaggtgacggactggatctggtttcccgcttcttcggt

SEQ ID NO: 839071 - DNA, 75 bp, synthetic construct
  source 1..75: mol_type = other DNA
tggcactgctgccgctggcggctcatgcaggaaaaatcaccatgagcaaccccgacgaacaagagttacagggcg

SEQ ID NO: 839072 - DNA, 75 bp, synthetic construct
  source 1..75: mol_type = other DNA
gccagcgcggaaccggtgaagcgcatcaccgtagcggatgcaattaactactggcttgataactacatccgcgtc

SEQ ID NO: 839073 - DNA, 75 bp, synthetic construct
  source 1..75: mol_type = other DNA
acactggaagaatgggctgaaatatattgttcaaagccttggcgagtgtaactggaaccttctatcagacgacag

SEQ ID NO: 839074 - DNA, 75 bp, synthetic construct
  source 1..75: mol_type = other DNA
tacatttttacccacatttaattcaagtgcaatagagttaaatctgtcaaggataaagggattaagtgagaggtt

SEQ ID NO: 839075 - DNA, 75 bp, synthetic construct
  source 1..75: mol_type = other DNA
cataaaaaatataaattttcctattttcaagttgataaaaaaaataaagaagtaatagcgtttcataaaaaaaca

SEQ ID NO: 839076 - DNA, 75 bp, synthetic construct
  source 1..75: mol_type = other DNA
attgattttaatatcaatatgatcgagggtatgactcgagaggtatatgattcattatgctttcaaaatagagtt

SEQ ID NO: 839077 - DNA, 75 bp, synthetic construct
  source 1..75: mol_type = other DNA
gacttgtcctatctcaccgatgaactccagaagcgatacgggattacccggcgccgtgcggcgttcattgcccga

SEQ ID NO: 839078 - DNA, 75 bp, synthetic construct
  source 1..75: mol_type = other DNA
tgaaccgaattcagactatatacgacgaagaaaaaaatcgaaaagacagatcgtcttctctaggccagataaacg

SEQ ID NO: 839079 - DNA, 75 bp, synthetic construct
  source 1..75: mol_type = other DNA
agggttttgcctggacagatggcgacaacaatatcgtgccggtcacggcggctgaactgctggctctgggggatg

SEQ ID NO: 839080 - DNA, 75 bp, synthetic construct
  source 1..75: mol_type = other DNA
gactatggccgacagctttaccatgatctggtaaatggcaaatatggcgaagtcaccccattctcagtcacacct

SEQ ID NO: 839081 - DNA, 75 bp, synthetic construct
  source 1..75: mol_type = other DNA
acaattagcccaagttctttcactaggctcaagccccgtgtgaaaaaacttcgcagaaaaggtcatgaaatggcg

SEQ ID NO: 839082 - DNA, 75 bp, synthetic construct
  source 1..75: mol_type = other DNA
agacaatcactctaaagagccgagcacctaccgctgccgtaagaccaactacgactcagccgtaagctattcgca

SEQ ID NO: 839083 - DNA, 75 bp, synthetic construct
  source 1..75: mol_type = other DNA
aatgcgcattcattgacgggatcaccttcgcggaggccgccccggaaacgcagtccgcagaacctgaagagaacg

SEQ ID NO: 839084 - DNA, 75 bp, synthetic construct
  source 1..75: mol_type = other DNA
atttcaataaaattattgatgttgattttcatccagatgaaaatgccactttccctcagggcatggagtggttag

SEQ ID NO: 839085 - DNA, 75 bp, synthetic construct
  source 1..75: mol_type = other DNA
tggtcagcgtattctttctgatattcttccgggacgatatttcaaaacacaaagcagatctcccattgaaaaaag

SEQ ID NO: 839086 - DNA, 75 bp, synthetic construct
  source 1..75: mol_type = other DNA
aattgaaaacgacaccacattacgattagtcgaattaacggcaaccggcgataaattcttttgtgcgggtggcga

SEQ ID NO: 839087 - DNA, 75 bp, synthetic construct
  source 1..75: mol_type = other DNA
cagaaaggtgcgcttgaaaaagccctggccattgcgcgtcagcttcagaaaatggggatgacacctgagcagatt

SEQ ID NO: 839088 - DNA, 75 bp, synthetic construct
  source 1..75: mol_type = other DNA
acatgttgtgttatctccgtcattctgatgttagcgctatattacactttcctgaccatgccaccgttcccggcc

SEQ ID NO: 839089 - DNA, 75 bp, synthetic construct
  source 1..75: mol_type = other DNA
gagcacgtctgccagacgttgccagttcccagggctggccccggaagccggtatacgctgctgttcgaatcgttc

SEQ ID NO: 839090 - DNA, 75 bp, synthetic construct
  source 1..75: mol_type = other DNA
atattctcaacctgaccgctccaaggcaggttaaatctctttctctcgatgaaaacgccggttctgttaccgtca

SEQ ID NO: 839091 - DNA, 75 bp, synthetic construct
  source 1..75: mol_type = other DNA
ctgccctgcattgaacaggcgagggaggatatccataccctgcgccaactgcagcttctgcaacagaaccggtga

SEQ ID NO: 839092 - DNA, 75 bp, synthetic construct
  source 1..75: mol_type = other DNA
tgtttacgctgtgtatcgtctggccggtcatctggctgtggcttggtctgcgtatccgccaccgcgagcgactgc

SEQ ID NO: 839093 - DNA, 75 bp, synthetic construct
  source 1..75: mol_type = other DNA
ctggtcagtccaatggtatgtcatacggtgagggactgccattgccggatacattcgacagccctgatccacgta

SEQ ID NO: 839094 - DNA, 75 bp, synthetic construct
  source 1..75: mol_type = other DNA
aatacggattccatacaggattattataacgaagacaggattacgatttattttgaacgtataactggtaaggaa

SEQ ID NO: 839095 - DNA, 75 bp, synthetic construct
  source 1..75: mol_type = other DNA
tgtcattgacaagtggccgcacgacgcacaacaaacgccttattgcgaggcagcctttactgccctgagcgccgc

SEQ ID NO: 839096 - DNA, 75 bp, synthetic construct
  source 1..75: mol_type = other DNA
tgttgtctgccggaaagcgcctggatctcgcgcatgaagtctcggttagcgccgttgctcagttcatcccccgct

SEQ ID NO: 839097 - DNA, 75 bp, synthetic construct
  source 1..75: mol_type = other DNA
atgtaatatataatgctggatatttactttgcacacaaggtgttgcgtatctttcaccaattatcgtgctaggtc

SEQ ID NO: 839098 - DNA, 75 bp, synthetic construct
  source 1..75: mol_type = other DNA
tttaagtgtaaatgtttataaatatataaaggttaaaaatcatcctaatttctgtttgttatttgtattcagcat

SEQ ID NO: 839099 - DNA, 75 bp, synthetic construct
  source 1..75: mol_type = other DNA
gatcacctcgttcaacaacctgtcaatttactggcagaaaggaacaatgcgtcgcctgatgaaagacgagccgga

SEQ ID NO: 839100 - DNA, 75 bp, synthetic construct
  source 1..75: mol_type = other DNA
tgaacaggtgaactacgacacgtttatttcatacccgaagcttgatgcctgggcggctcacagcgattttcagtc

SEQ ID NO: 839101 - DNA, 75 bp, synthetic construct
  source 1..75: mol_type = other DNA
ctcgatttgcgaagtaatatgagcgctactcctggcaaaatgacaccctggctgaatgataatcttttgtgtcgc

SEQ ID NO: 839102 - DNA, 75 bp, synthetic construct
  source 1..75: mol_type = other DNA
atgcaactgctacatggaaaaaataatacacaacaatatatattcggtgagtttgtattaaaaaacaatggaata

SEQ ID NO: 839103 - DNA, 75 bp, synthetic construct
  source 1..75: mol_type = other DNA
agctggccagcgagccgtcaggccaggaatttctggtatttacccttggtgatgaagagtacggtattgatatcc

SEQ ID NO: 839104 - DNA, 75 bp, synthetic construct
  source 1..75: mol_type = other DNA
gagcgttgagatatatctttctgaaaaaaatattatttataaaataattaatgaccaaaaattagtagagggaat

SEQ ID NO: 839105 - DNA, 75 bp, synthetic construct
  source 1..75: mol_type = other DNA
gggggctgagacacgcatgcgcaacaagactgatggaggcaggcttatccttggctcaaataggtatgcacctgg

SEQ ID NO: 839106 - DNA, 75 bp, synthetic construct
  source 1..75: mol_type = other DNA
ttactgcttacgcgcattttttaggtacggagccagttgtggtcgatgtaataaattgctagtagattgtttacg

SEQ ID NO: 839107 - DNA, 75 bp, synthetic construct
  source 1..75: mol_type = other DNA
gtttccgacctcttttctggaggataacgccattacccgtcagaaagcggaactggaccgggtggccaaaaatca

SEQ ID NO: 839108 - DNA, 75 bp, synthetic construct
  source 1..75: mol_type = other DNA
tgcgggtggtgtggttaaagatacctggaacaacactgcactggttattccggcaaccaactccgaagcgggtac

SEQ ID NO: 839109 - DNA, 75 bp, synthetic construct
  source 1..75: mol_type = other DNA
atggaactccgtggctggtttcctaaaggtagtagtacttatctgctgatgcgagaaatacattacaatgcgggt

SEQ ID NO: 839110 - DNA, 75 bp, synthetic construct
  source 1..75: mol_type = other DNA
aaggcagagtatagcgcagacttcccaggggtaaagagtaacgaacgagttgattacgctttattttgtcatgat

SEQ ID NO: 839111 - DNA, 75 bp, synthetic construct
  source 1..75: mol_type = other DNA
ttgccgatgacaagatggtcagttcgcacgatgacgacactactatcaccgtagtgatggatcaccagcagtaca

SEQ ID NO: 839112 - DNA, 75 bp, synthetic construct
  source 1..75: mol_type = other DNA
tatccagttattttccagcgttccacaggcagcactggcgagctggcttccagagtgattataacgaccacatct

SEQ ID NO: 839113 - DNA, 75 bp, synthetic construct
  source 1..75: mol_type = other DNA
gtatgtgccgccggggcagaaagtcgcggtgcatatcagccgtcagatcccggtggattatgaatcgcagggacg

SEQ ID NO: 839114 - DNA, 75 bp, synthetic construct
  source 1..75: mol_type = other DNA
ttatgctggcgggtgtactgctcgccagctttaatgcctctgcgatcccggggctctggcagcagggttacggtc

SEQ ID NO: 839115 - DNA, 75 bp, synthetic construct
  source 1..75: mol_type = other DNA
taagcaatatgccattccctcaacccttggctggcgtaacggggataatgcctggttcagctttatcatggatat

SEQ ID NO: 839116 - DNA, 75 bp, synthetic construct
  source 1..75: mol_type = other DNA
aaaacctcctacagtgtcatcctgtactctgatgcgaacaacaacaacaaagttgatacaggcgaggatgttacc

SEQ ID NO: 839117 - DNA, 75 bp, synthetic construct
  source 1..75: mol_type = other DNA
ctaaattttgaccaacagtgctggcagcctgcagatgcgataaaactcaatcagatgctttccctgcaaccttgt

SEQ ID NO: 839118 - DNA, 75 bp, synthetic construct
  source 1..75: mol_type = other DNA
aggtttacaacatcattgccacccattaattttaatagccgcttcattgtacttgaacttgaagaactcaaacct

SEQ ID NO: 839119 - DNA, 75 bp, synthetic construct
  source 1..75: mol_type = other DNA
ctgaagatggatatcttccttcagttactggcttcgctaaaaaatgcatgaagcatgagatacaagaaattaaag

SEQ ID NO: 839120 - DNA, 75 bp, synthetic construct
  source 1..75: mol_type = other DNA
ttagtggaaaactatgagcaagtggatattgaaactaagctgttggttccactaaagaaaacgtacttgcctgcc

SEQ ID NO: 839121 - DNA, 75 bp, synthetic construct
  source 1..75: mol_type = other DNA
tatggggatgtcgacagaagtcattaagcaggcacttcagctttctgatgagcagattcgggaagctcttcataa

SEQ ID NO: 839122 - DNA, 75 bp, synthetic construct
  source 1..75: mol_type = other DNA
ggcggaaattggcacttttcacggcggcgatttacgcggcctgaccaacaaactggattacctccagcagttggg

SEQ ID NO: 839123 - DNA, 75 bp, synthetic construct
  source 1..75: mol_type = other DNA
ttccgatccctgtaagtcccgaaggcacgccagtaaaattcatcaaaaaagaggtttttgcgttcttctggcggg

SEQ ID NO: 839124 - DNA, 75 bp, synthetic construct
  source 1..75: mol_type = other DNA
acagtaacaataaaatcaatgaactggcatcagagtttaaaaagaataaactaataaactatgtcaatattttca

SEQ ID NO: 839125 - DNA, 75 bp, synthetic construct
  source 1..75: mol_type = other DNA
tcgaactggtaggcactggtgacttatgggccggacaatgcaaaccgcctcccgccagcgaagccaatctgccaa

SEQ ID NO: 839126 - DNA, 75 bp, synthetic construct
  source 1..75: mol_type = other DNA
attaatgccattaaataatcaggtcaacatcccaggaaggaaatatgaggtgggagaggattatttcgcgtcatt

SEQ ID NO: 839127 - DNA, 75 bp, synthetic construct
  source 1..75: mol_type = other DNA
caattcctataagccctgaaggtacgccagtaaaattcatcaaaaaagaggttttggcttacttctggcggggtc

SEQ ID NO: 839128 - DNA, 75 bp, synthetic construct
  source 1..75: mol_type = other DNA
cagaggaagtagcaaaacttttttccgtatcaaaacgaactgttgcaaggtgggttaataccattcctggctttc

SEQ ID NO: 839129 - DNA, 75 bp, synthetic construct
  source 1..75: mol_type = other DNA
tgaaaaccatgaccacagacctggttacaggtgaggtgaataaggctgcaaatgtggcagcccatgccgtggtga

SEQ ID NO: 839130 - DNA, 75 bp, synthetic construct
  source 1..75: mol_type = other DNA
tttctctgtttctacaggatatacaaaggagtttggtgctaaagctggggcttcgattggtattgattttggccc

SEQ ID NO: 839131 - DNA, 75 bp, synthetic construct
  source 1..75: mol_type = other DNA
gcacgaacgcttccttctggctgacgtcagcgctgacctgattaacctgtatcagatgctggcggtggtccccga

SEQ ID NO: 839132 - DNA, 75 bp, synthetic construct
  source 1..75: mol_type = other DNA
cagtggtaatcgggtgcgcgacagctatggtggcaccagcgattatgcctatctgaatctgaaaacaggactgaa

SEQ ID NO: 839133 - DNA, 75 bp, synthetic construct
  source 1..75: mol_type = other DNA
atgaccgccatgaacacccctaaggaaggtgcgaataagcaggtcatttcttcccaagctgactcgctgattaaa

SEQ ID NO: 839134 - DNA, 75 bp, synthetic construct
  source 1..75: mol_type = other DNA
gcttgcaacttacctggcgcaggttacatgaatgccattggtctgcacaaagctgtttggggggaagaccgttat

SEQ ID NO: 839135 - DNA, 75 bp, synthetic construct
  source 1..75: mol_type = other DNA
tttaaaggtaaaagatgaatatgatattgagtctatttgtaggttcctggataaacactttccgtgttggaaagg

SEQ ID NO: 839136 - DNA, 75 bp, synthetic construct
  source 1..75: mol_type = other DNA
tttacgatgagatgtgcctgcggggtaaacctaaaatggtagccattggcgcgctgatgcggaaactggtgcact

SEQ ID NO: 839137 - DNA, 75 bp, synthetic construct
  source 1..75: mol_type = other DNA
ccaatagatactcataccgaattcaatttcaacggtaaatatctgattattgcgcaagatggctctattggctgt

SEQ ID NO: 839138 - DNA, 75 bp, synthetic construct
  source 1..75: mol_type = other DNA
cagggggccagtctagatacaaactttgatccaacagtaactcaacagatcaaattatccagctcatcaaattat

SEQ ID NO: 839139 - DNA, 75 bp, synthetic construct
  source 1..75: mol_type = other DNA
gcgtggcatgggaatcatgacaaaaacagataaggtggatgcgtatatgctggcctgttacgcattccttaagaa

SEQ ID NO: 839140 - DNA, 75 bp, synthetic construct
  source 1..75: mol_type = other DNA
gcgctgatgcggaaactggtgcactggtgttatggcgtcctgaagaccggaaccgtttttaatgacgaagacctg

SEQ ID NO: 839141 - DNA, 75 bp, synthetic construct
  source 1..75: mol_type = other DNA
cagatgggaggggtaacagacatatcaaagcgaaatgtgttaaatcagaaaattagccaactggaaaaggagcga

SEQ ID NO: 839142 - DNA, 75 bp, synthetic construct
  source 1..75: mol_type = other DNA
atcatttatgaaatatcactgtgatgataaatacatcaatgtatctcttgcgggattcgatatgacggaaaatga

SEQ ID NO: 839143 - DNA, 75 bp, synthetic construct
  source 1..75: mol_type = other DNA
ggcgagcgggagaaagcgcagcgccgcagcctggcggagaagctgcagcaggaagggagcgaggacgggcacggc

SEQ ID NO: 839144 - DNA, 75 bp, synthetic construct
  source 1..75: mol_type = other DNA
agcttcgcgccgctcatccgcatcgaaacagacaacggcgagcgggagaaagcgcagcgccgcagcctggcggag

SEQ ID NO: 839145 - DNA, 75 bp, synthetic construct
  source 1..75: mol_type = other DNA
aagatgaaaatggttttttggattttgtatcgcgcgatgataatatcttcattggttattcaaattaccatgtaa

SEQ ID NO: 839146 - DNA, 75 bp, synthetic construct
  source 1..75: mol_type = other DNA
atgagtaccatgtattcagcaatatcgttgataacggcaaagataaaatcaaactgttatcgctggtgttttata

SEQ ID NO: 839147 - DNA, 75 bp, synthetic construct
  source 1..75: mol_type = other DNA
ttcatcaatcgaacccaggcgacaattgctgttgcaaacagggaacgcgtgatatcaattcttgagcatctgcag

SEQ ID NO: 839148 - DNA, 75 bp, synthetic construct
  source 1..75: mol_type = other DNA
tgcgcaaggcagaagcaaaggcgaaagcactgcttgcagcagcaaaactaaatagcctgaaacattcgccatttg

SEQ ID NO: 839149 - DNA, 75 bp, synthetic construct
  source 1..75: mol_type = other DNA
cgtaaaatcatcgcatacaaaaacacattcaaacaatttttttaacaatatccagcatgcatttaataaaaaaga

SEQ ID NO: 839150 - DNA, 75 bp, synthetic construct
  source 1..75: mol_type = other DNA
gtcacagggataatttatgcgctgcgtcacaaaaactgctacactccgctccctcatgtcattgtggtttttgtc

SEQ ID NO: 839151 - DNA, 75 bp, synthetic construct
  source 1..75: mol_type = other DNA
ggatgttgataatccagaatcatcgacagaatctgttggtatcggtgcaggtgttgacgcttcagttatgactct

SEQ ID NO: 839152 - DNA, 75 bp, synthetic construct
  source 1..75: mol_type = other DNA
ggctgctggacaggctggaggaagaaatccgggcagaccgcgtgagcagtgaaagccgggcgtggcttgcgcagt

SEQ ID NO: 839153 - DNA, 75 bp, synthetic construct
  source 1..75: mol_type = other DNA
caacgcaaatcgtcctattggtaagcgaaggttatagtttgcgcaagatcagcatgatgccagggatgccgagcc

SEQ ID NO: 839154 - DNA, 75 bp, synthetic construct
  source 1..75: mol_type = other DNA
cgctcacctgataaattttatagacacccgctttgtcctgaagtggatgaacatgaaccacttgatgttcgtcag

SEQ ID NO: 839155 - DNA, 75 bp, synthetic construct
  source 1..75: mol_type = other DNA
gcattaccattgagggtaaagcacataacggcaatggtacagtaatcacaaataccaacctgagtgccaacagtg

SEQ ID NO: 839156 - DNA, 75 bp, synthetic construct
  source 1..75: mol_type = other DNA
tagttttgagttatagacgtcagtcagtagtttcgacagacaaaaatatcttagaaacgactatttttgaaaaaa

SEQ ID NO: 839157 - DNA, 75 bp, synthetic construct
  source 1..75: mol_type = other DNA
gcagtgatgatacagctgacatttacgcaaaaatgctagattactgctcaaatgtgtcgcagatggataatccta

SEQ ID NO: 839158 - DNA, 75 bp, synthetic construct
  source 1..75: mol_type = other DNA
gggattgcgcctaaagcctggatgaccgatccgttctggaccaaaacggcgctgatcatgatgcaaacctggctt

SEQ ID NO: 839159 - DNA, 75 bp, synthetic construct
  source 1..75: mol_type = other DNA
tctataattgaatcaataagcatcgaagcgattgccacattgctagctgaggtggcacaatttaactctgaaatt

SEQ ID NO: 839160 - DNA, 75 bp, synthetic construct
  source 1..75: mol_type = other DNA
gccctggtttacaccatgaaaggtgaccagaagtacttcccggtgtatgcgaacgacggtaaactgctgccgaac

SEQ ID NO: 839161 - DNA, 75 bp, synthetic construct
  source 1..75: mol_type = other DNA
gatttaattggtaagcgagttattagtgatgttatggccaatacccgaacatcattggaattaattgcagattta

SEQ ID NO: 839162 - DNA, 75 bp, synthetic construct
  source 1..75: mol_type = other DNA
cacaatagataataccacggctattgcatccgtctcacttggagctaatgtaattgaaaaacatgttacactgga

SEQ ID NO: 839163 - DNA, 75 bp, synthetic construct
  source 1..75: mol_type = other DNA
gtgctgacgttatcattaccagcctcagccagcgcaccttatgccgttgaacgcatggcggcgcttttgcaacaa

SEQ ID NO: 839164 - DNA, 75 bp, synthetic construct
  source 1..75: mol_type = other DNA
gggtggtctacatacattttttcacgaatctgcattcatgcttcaataatgatttccaacgtaccaaaatcaaga

SEQ ID NO: 839165 - DNA, 75 bp, synthetic construct
  source 1..75: mol_type = other DNA
tagagaatccactcgaacgtaatgattttacaattgatgacttccaccatgttcttagggagtttgataaagctg

SEQ ID NO: 839166 - DNA, 75 bp, synthetic construct
  source 1..75: mol_type = other DNA
aatagataatactacggcgatagcatccgttgcattaggagcgagtgtgatcgaaaagcatgtaacacttgatcg

SEQ ID NO: 839167 - DNA, 75 bp, synthetic construct
  source 1..75: mol_type = other DNA
tgatgacctgtatgaagcggctaccatggacggcgccagcagctggacccggctgcggactattacgctgccgct

SEQ ID NO: 839168 - DNA, 75 bp, synthetic construct
  source 1..75: mol_type = other DNA
aacctttatccccaagaaagatattgcacaaaatgacatttctgtaccagttttattatcacagcaaatcccaat

SEQ ID NO: 839169 - DNA, 75 bp, synthetic construct
  source 1..75: mol_type = other DNA
gcgaagcgcgtcgggcgctgcatgaactgatgatagggcgtgctgtggcttctgtcagtaagaacggacgacagg

SEQ ID NO: 839170 - DNA, 75 bp, synthetic construct
  source 1..75: mol_type = other DNA
ctagctgtatgttttgctgtgtcagggcaaataatgtcagtgattgagtctttagtgacacagatatttcaacca

SEQ ID NO: 839171 - DNA, 75 bp, synthetic construct
  source 1..75: mol_type = other DNA
ctcactccgatttagatgcagaaagaaatgttcaggaatttatcagcttttgccgtggtaaattaaccgtgttag

SEQ ID NO: 839172 - DNA, 75 bp, synthetic construct
  source 1..75: mol_type = other DNA
aaacttccaggccaagcaatcgttacaagccactcaccccaaattgcagtgaattttaaacctgattcaatcata

SEQ ID NO: 839173 - DNA, 75 bp, synthetic construct
  source 1..75: mol_type = other DNA
tcaacttgatactggtgcaatagggattgaccagtttatagagaaattagaattaagtgcgaatacaaatgggaa

SEQ ID NO: 839174 - DNA, 75 bp, synthetic construct
  source 1..75: mol_type = other DNA
agcagccacttctgcatccgccgcgaccacgaaggcgtcagaagcagccacctcagcccgggatgcggcggcctc

SEQ ID NO: 839175 - DNA, 75 bp, synthetic construct
  source 1..75: mol_type = other DNA
tcgccgacgtggcgaaacgctatggcgtttcacgcgccaccatttacaagcacgttggtgcggtgcgcccagagc

SEQ ID NO: 839176 - DNA, 75 bp, synthetic construct
  source 1..75: mol_type = other DNA
ccggacaacccattgctctgctggcctggctgaaggataacgagccggaggtgctgcagaaagcacataccattt

SEQ ID NO: 839177 - DNA, 75 bp, synthetic construct
  source 1..75: mol_type = other DNA
tgctattgggattgcacaattggcctcctttatcgtttgcttaattacggtaaaaaaatctcttattttaaaata

SEQ ID NO: 839178 - DNA, 75 bp, synthetic construct
  source 1..75: mol_type = other DNA
aaattccatcttcttaatgaagaggataataatagtactaccttctgtgttaattgcccattgcattcctaaatt

SEQ ID NO: 839179 - DNA, 75 bp, synthetic construct
  source 1..75: mol_type = other DNA
gccgggaagattacggacgggaaacacggcgggaataccggctggaccggaacggccaggtcacggcggtgacag

SEQ ID NO: 839180 - DNA, 75 bp, synthetic construct
  source 1..75: mol_type = other DNA
gcctgagcgaaaaatacatctttatcactgcgaccaccggggactgccgctggcgcttatcagtactgaaggtgc

SEQ ID NO: 839181 - DNA, 75 bp, synthetic construct
  source 1..75: mol_type = other DNA
aactgaacgaattcggcaacagccggatgaagaaacttaccaatatgttggcaatgcacttcaacaagctaaaga

SEQ ID NO: 839182 - DNA, 75 bp, synthetic construct
  source 1..75: mol_type = other DNA
cttgccctatacccgtttgtacgaaggcctggcgagcggattgaaagcccagtttgatggcatttctttttacta

SEQ ID NO: 839183 - DNA, 75 bp, synthetic construct
  source 1..75: mol_type = other DNA
gacagaacacaggctttgattcaggagcagcttacttctcaacacgatcaggctaccgcgcaggagcataataaa

SEQ ID NO: 839184 - DNA, 75 bp, synthetic construct
  source 1..75: mol_type = other DNA
agacattaagcccttcacaacaaattgatttcctgcaagagaggataaaagaatatgactcaagagaaaaactta

SEQ ID NO: 839185 - DNA, 75 bp, synthetic construct
  source 1..75: mol_type = other DNA
aaatagccaggagtccgaatccagaatagagaaaggtgatgcattgaaggaacaggccaccgaacaggcacaggc

SEQ ID NO: 839186 - DNA, 75 bp, synthetic construct
  source 1..75: mol_type = other DNA
aattaactcagtatattcataattattatgcatcatccaattatttttctgccaaagattacgcatacataaatc

SEQ ID NO: 839187 - DNA, 75 bp, synthetic construct
  source 1..75: mol_type = other DNA
ggctggatacgaaagagacgccgtgggggatatatgtctcctcatacagtaaaatccatgtagtgctacagcatt

SEQ ID NO: 839188 - DNA, 75 bp, synthetic construct
  source 1..75: mol_type = other DNA
ccagcgagctgtcctcttatccagaaaaactgacagcagaatttgataaaccctacgaaatcctggctgattcat

SEQ ID NO: 839189 - DNA, 75 bp, synthetic construct
  source 1..75: mol_type = other DNA
tgatctaaagagtcttaatgtgaaggatgggaaaatcgagtatgttttcattattgataataaaaccaactataa

SEQ ID NO: 839190 - DNA, 75 bp, synthetic construct
  source 1..75: mol_type = other DNA
agtgaaatccgtggagttagtgttacgaacctgaatagcaaaaaggaatctgtttatgattgtaagtccgttggc

SEQ ID NO: 839191 - DNA, 75 bp, synthetic construct
  source 1..75: mol_type = other DNA
tcaaactagatgaaaacaaaggtgtacttcggtacaccttatcgaaagaccgcaaaactgaatttaactatgaat

SEQ ID NO: 839192 - DNA, 75 bp, synthetic construct
  source 1..75: mol_type = other DNA
aagcaattatttaaatggtgatggttttgaaactattgtgcttatgtctaaaactgtctcaaccgatgaattatc

SEQ ID NO: 839193 - DNA, 75 bp, synthetic construct
  source 1..75: mol_type = other DNA
atgcaaaaacgctccggcactcttatgataaaagtcgtcgcaggagagcgggctttcgtaatcttgccctgatca

SEQ ID NO: 839194 - DNA, 75 bp, synthetic construct
  source 1..75: mol_type = other DNA
tacttcagatgataaagacgtcatcgcaattgatggaaaaacgctccggcactcttatgacaagagtcgccgcag

SEQ ID NO: 839195 - DNA, 75 bp, synthetic construct
  source 1..75: mol_type = other DNA
tgatggtgctgactggtgtttgctttgcagatgttggtgattacaggctgaacggggaggataacgcaagaattg

SEQ ID NO: 839196 - DNA, 75 bp, synthetic construct
  source 1..75: mol_type = other DNA
tggcgaaatcagggacggcgaaaccgttgaaggcatggtgaactgcgccctctccggtcacctctgtctgggaac

SEQ ID NO: 839197 - DNA, 75 bp, synthetic construct
  source 1..75: mol_type = other DNA
gccgtgtggcgcaagagcttcgtgatggtgacatcgttaacttagggatcggtttacccacaatggtcgccaatt

SEQ ID NO: 839198 - DNA, 75 bp, synthetic construct
  source 1..75: mol_type = other DNA
gcattcacatgggtacatacatatttatcattggatgcttaatatttacagaaaagtatattaaaacagaaaata

SEQ ID NO: 839199 - DNA, 75 bp, synthetic construct
  source 1..75: mol_type = other DNA
ctttgcagatggttctcagcgtagcaatggcggagcagatgggtgaacgttcgacgagtgcgattctggcctacg

SEQ ID NO: 839200 - DNA, 75 bp, synthetic construct
  source 1..75: mol_type = other DNA
caggccacagagcaggcacaggccacagagcaggcacaggccacagagcaggcacaggccacagagcaggcacag

SEQ ID NO: 839201 - DNA, 75 bp, synthetic construct
  source 1..75: mol_type = other DNA
aaatggtgatggttttgatactgttgtgcttatgtctaaaactgtctcaaccgatgaattatcctcttatccaga

SEQ ID NO: 839202 - DNA, 75 bp, synthetic construct
  source 1..75: mol_type = other DNA
taaacagttatactacaatgtacataattacaatgttaaagaaacgtcgggggatttgagcggtaagtctggatt

SEQ ID NO: 839203 - DNA, 75 bp, synthetic construct
  source 1..75: mol_type = other DNA
tggtgtttcctggcaaatgttgttaagagttccattagagatgatgtccatgtcatggttgataaaagaaagtat

SEQ ID NO: 839204 - DNA, 75 bp, synthetic construct
  source 1..75: mol_type = other DNA
cggtcgcgttttgcgttatttgcttcctgtttacggttgtcttttgtggcgcactggctgcggtgattggcctta

SEQ ID NO: 839205 - DNA, 75 bp, synthetic construct
  source 1..75: mol_type = other DNA
gatgactatgacaaaaaatacaaacttaacacaaaaaattctgaaagaacgcaaggacggtcttgtggtaacaag

SEQ ID NO: 839206 - DNA, 75 bp, synthetic construct
  source 1..75: mol_type = other DNA
ccatcgtgttatactaaatccagagcagacatctcacaaatatgtgacgaattcattgcgagagttgataatctt

SEQ ID NO: 839207 - DNA, 75 bp, synthetic construct
  source 1..75: mol_type = other DNA
ccatttaataaagaggataaaagcaaagcgccgtttaccgttattccgccagtatcacgattagaaccttcgcgg

SEQ ID NO: 839208 - DNA, 75 bp, synthetic construct
  source 1..75: mol_type = other DNA
tgagaggacgctgcgtaacgtggtgtgtgaaggatttgatgacagcgtgatcctgccgccggggggcggtgatga

SEQ ID NO: 839209 - DNA, 75 bp, synthetic construct
  source 1..75: mol_type = other DNA
cctaccgcagcaaaaaatggctcgccgctgtcgggcagatcgagcagtgcgtgttatgcggttcgtgggggacac

SEQ ID NO: 839210 - DNA, 75 bp, synthetic construct
  source 1..75: mol_type = other DNA
cagggaagagcgccggcagcttatggatcgcgcgattgttctgacagtgattgaagttgcccgccgcgggctggt

SEQ ID NO: 839211 - DNA, 75 bp, synthetic construct
  source 1..75: mol_type = other DNA
cgtcataaggcgtatctctacactttcgaacatgctactcgcttgggtcatttcagcgtggcattacgtgatgaa

SEQ ID NO: 839212 - DNA, 75 bp, synthetic construct
  source 1..75: mol_type = other DNA
atagttaacaataatattgtcgatggcagtccggtcaggtttgtttatgcggtaagagatgacctattcctgggc

SEQ ID NO: 839213 - DNA, 75 bp, synthetic construct
  source 1..75: mol_type = other DNA
aataccgccagcttattcactcgctggggtgccgcatcatctctcagctcaccgaagaaaatcaggaagcgttca

SEQ ID NO: 839214 - DNA, 75 bp, synthetic construct
  source 1..75: mol_type = other DNA
gctaatcatcgggcgtgaaaaatttgcagagattgcgcaggggtatcttgaggcgatggcgggtcatgactttgt

SEQ ID NO: 839215 - DNA, 75 bp, synthetic construct
  source 1..75: mol_type = other DNA
cgcggaaaatcgcattacccatctgttttataactatcagtatgaggtgaatgagcgggcgcgggatgtgcaggc

SEQ ID NO: 839216 - DNA, 75 bp, synthetic construct
  source 1..75: mol_type = other DNA
aatcaatggcatacactgatcaggaagttacgaaaaataacggtgttattaataaaaacatacaatcagcaaaac

SEQ ID NO: 839217 - DNA, 75 bp, synthetic construct
  source 1..75: mol_type = other DNA
tcgataagttaatcgttaccgcgctgcaaaaaaatggttatcttgacagaatggttgccgttctcgcgggacagc

SEQ ID NO: 839218 - DNA, 75 bp, synthetic construct
  source 1..75: mol_type = other DNA
atgaaatgtataatcatttatctgtctgtctgtctggctcataatattaatgagtactttggtatacaagaaaca

SEQ ID NO: 839219 - DNA, 75 bp, synthetic construct
  source 1..75: mol_type = other DNA
ggttaaacgttttcttccggcggtgttgcggaacctgcatttccgtgcggcaccggcaggtgaacatgtactgaa

SEQ ID NO: 839220 - DNA, 75 bp, synthetic construct
  source 1..75: mol_type = other DNA
actggcaggccgcttacggtacgctgggggtcgggtataactacgaccgcgatcaacatgacgttaactggcagc

SEQ ID NO: 839221 - DNA, 75 bp, synthetic construct
  source 1..75: mol_type = other DNA
ttgaacgaattggccttaatagcagtgcatttcccgagttagcccagcagcaaaataataaatgcatcaatttac

SEQ ID NO: 839222 - DNA, 75 bp, synthetic construct
  source 1..75: mol_type = other DNA
cctgggtatcgatacctggtggtatgacgttaataaagcggccaaactgccgtccgccagcaaacagggagagta

SEQ ID NO: 839223 - DNA, 75 bp, synthetic construct
  source 1..75: mol_type = other DNA
gaatgctcctggtgatgttgaaatggctcgcagtttgccgactggctcattagcaatgattgtgggaggacattc

SEQ ID NO: 839224 - DNA, 75 bp, synthetic construct
  source 1..75: mol_type = other DNA
tcccccgacgcgagagcggtcgtcacgtctggccggtgaaggaggatgatacccaaagcaacgatatcgattttt

SEQ ID NO: 839225 - DNA, 75 bp, synthetic construct
  source 1..75: mol_type = other DNA
tcctaaccttactttatttatctatcaattttttatcaatgttgataggatgttctagtggtgaaatacaagtag

SEQ ID NO: 839226 - DNA, 75 bp, synthetic construct
  source 1..75: mol_type = other DNA
caccgatcagcgcctatctccacgccgcatcgatggtgaaagtgggcggctggcactggagggcagcatcgccta

SEQ ID NO: 839227 - DNA, 75 bp, synthetic construct
  source 1..75: mol_type = other DNA
ccctgcccggtcatggtcacccgtgcagacggcgcacattttaccgccagcacagaagcgccactggcacttgaa

SEQ ID NO: 839228 - DNA, 75 bp, synthetic construct
  source 1..75: mol_type = other DNA
tttactgcagattttttgataccgctactaaagccgtatcaagtaagagatggtgcatccgggaggattactcgc

SEQ ID NO: 839229 - DNA, 75 bp, synthetic construct
  source 1..75: mol_type = other DNA
ctatgttaacttagcattttacgcatgtataataagtctgcttgcaaatataagattatacagaactgtatatat

SEQ ID NO: 839230 - DNA, 75 bp, synthetic construct
  source 1..75: mol_type = other DNA
atttgctggtaagagaatgttgagtgttttggcttgcttttctattatttatttatttcacggatggttgggagc

SEQ ID NO: 839231 - DNA, 75 bp, synthetic construct
  source 1..75: mol_type = other DNA
ccaatcgccgggattggcgatgcgattttctggtttactttgttgccgattatggcgggaatttgctcatcattt

SEQ ID NO: 839232 - DNA, 75 bp, synthetic construct
  source 1..75: mol_type = other DNA
accagcaatctgaaacaatacaagcttttcaactaatcgaagattggttaagtagtgctgatgagatgggtgtag

SEQ ID NO: 839233 - DNA, 75 bp, synthetic construct
  source 1..75: mol_type = other DNA
aaaaccatttaaaatacaaattcagtatgaagaagataaacatagttaccttttgacaaccactaacaattatga

SEQ ID NO: 839234 - DNA, 75 bp, synthetic construct
  source 1..75: mol_type = other DNA
tgacgggcgaacggcagactgacggagaagacggaccgcatcccgacgggtgtgatacggacggacgacgagcgg

SEQ ID NO: 839235 - DNA, 75 bp, synthetic construct
  source 1..75: mol_type = other DNA
cgaccggtacggtcaacaaatcgccgttcaccgggaagaaggcatcagcacttacagcagttataacccgcgtgg

SEQ ID NO: 839236 - DNA, 75 bp, synthetic construct
  source 1..75: mol_type = other DNA
tgagaagaacctcaatcttgacctgcaaaccctgaccgaagaagcggtgcgtttgtatggcgataagctgacaaa

SEQ ID NO: 839237 - DNA, 75 bp, synthetic construct
  source 1..75: mol_type = other DNA
aatcaactgtttaccgtggtctggggtgagcaaagctgcattattcatctgccagaacgtctggaagacacgacc

SEQ ID NO: 839238 - DNA, 75 bp, synthetic construct
  source 1..75: mol_type = other DNA
aagacattgaaaatgttaaacgttggctaaatataggtgataaccatgtcaacagaaaaataaatgaaggctata

SEQ ID NO: 839239 - DNA, 75 bp, synthetic construct
  source 1..75: mol_type = other DNA
taatgccacacagatttgcgtgttaagcaacacatcagacagagtgctccttcccgataataacgccaccacctg

SEQ ID NO: 839240 - DNA, 75 bp, synthetic construct
  source 1..75: mol_type = other DNA
ggaactgcatacacaaggttcacttgttaaagaaataaaaaatgaccataatgtattcatgtatctatacatatc

SEQ ID NO: 839241 - DNA, 75 bp, synthetic construct
  source 1..75: mol_type = other DNA
aaaaaaatgaaaatataaaatgcataataaaatgtaaagatgcctatgatatatctcgataccacgaatcaattt

SEQ ID NO: 839242 - DNA, 75 bp, synthetic construct
  source 1..75: mol_type = other DNA
tgggtatggttggcgaggaaggacatgcctggttaagcggtgtcgctgaaaatcaactgtttaccgtggtctggg

SEQ ID NO: 839243 - DNA, 75 bp, synthetic construct
  source 1..75: mol_type = other DNA
tttatcttcgttgccaacatcgaatcgaaagatccgcagcaaattatctctggtaacgagaaggttgttcgccca

SEQ ID NO: 839244 - DNA, 75 bp, synthetic construct
  source 1..75: mol_type = other DNA
ggctatctgcctgaatccatgcaacaggaaagccgggaggtactggtggcgatgacgcgttcagactcggccctg

SEQ ID NO: 839245 - DNA, 75 bp, synthetic construct
  source 1..75: mol_type = other DNA
gcgtgcgtctgaagtggtgatcgccacggatgcggacagggaaggggaagtcatcgcccgggaactgctggcgta

SEQ ID NO: 839246 - DNA, 75 bp, synthetic construct
  source 1..75: mol_type = other DNA
atgcaactctatttgtgtgaaaaaccgtcacaggcgcgggatattgcccgggtactggggcttagcgggcgggga

SEQ ID NO: 839247 - DNA, 75 bp, synthetic construct
  source 1..75: mol_type = other DNA
cgtaatcagcagcgcattcgcctgaccgctgatggacagacattccttgccgaaacacgttcgttgctgacacac

SEQ ID NO: 839248 - DNA, 75 bp, synthetic construct
  source 1..75: mol_type = other DNA
aagccagcgtccgggaggcgctggcaaatattctgcccggtgagcagacggcccgtctgtatgatgccggtctgg

SEQ ID NO: 839249 - DNA, 75 bp, synthetic construct
  source 1..75: mol_type = other DNA
cgccagcattatctggcccagtttctgcccctgcaggagtctgatattaccgatgcaacactgacactcggtggg

SEQ ID NO: 839250 - DNA, 75 bp, synthetic construct
  source 1..75: mol_type = other DNA
gctgaagctgaactcaaagagatgcagaccacgccaccgcgtcattatacggaaggcacgctgattgcggcgatg

SEQ ID NO: 839251 - DNA, 75 bp, synthetic construct
  source 1..75: mol_type = other DNA
cggtcagcgcagcaatgctgatttacgtcatttcacgcgcatcctgggtattgaagggctgttccctcgctggga

SEQ ID NO: 839252 - DNA, 75 bp, synthetic construct
  source 1..75: mol_type = other DNA
cctcaaccagaaagcggaaaccgaaggctgggatatgacgccgattaaatcggcactaaccagcaaaggcaaaga

SEQ ID NO: 839253 - DNA, 75 bp, synthetic construct
  source 1..75: mol_type = other DNA
gcaaatgatgtgctcgccattgctcagtcactttacgaaacccataaagcgaccacctacccccggacagactgc

SEQ ID NO: 839254 - DNA, 75 bp, synthetic construct
  source 1..75: mol_type = other DNA
gtggcacgagagctgattgcggccctgccggaaacgctgacgagcccgggcatgaccgcattatgggagcaggca

SEQ ID NO: 839255 - DNA, 75 bp, synthetic construct
  source 1..75: mol_type = other DNA
cgaaaatgcggggctgggcactgaagcgacccgcgcagaaatactggaaacgttgttcacccgcaaatatatcga

SEQ ID NO: 839256 - DNA, 75 bp, synthetic construct
  source 1..75: mol_type = other DNA
atggcccacaccgggcttatgatcgtgtccatactgctcttcatgcttcattaagacaaatgtgcgcaaaccatg

SEQ ID NO: 839257 - DNA, 75 bp, synthetic construct
  source 1..75: mol_type = other DNA
acgtccttttatggtaacaaatgatagccatgataaatgggatgtttttggtgatttcaaaacacacgattttaa

SEQ ID NO: 839258 - DNA, 75 bp, synthetic construct
  source 1..75: mol_type = other DNA
atgcagaaaaattaacagcagaaaataaaaggtttagtgcaggtctgacacagatatacagcaaaaatttcccat

SEQ ID NO: 839259 - DNA, 75 bp, synthetic construct
  source 1..75: mol_type = other DNA
tcactaaacataacctattattaattattgattttttaagtcagtcacaatctaccaacttaacagaaacacaca

SEQ ID NO: 839260 - DNA, 75 bp, synthetic construct
  source 1..75: mol_type = other DNA
taactaccctataaaatttaaagaaaaattcaccgtcggaaattataaatatgaagtaagggctcatgatgtaaa

SEQ ID NO: 839261 - DNA, 75 bp, synthetic construct
  source 1..75: mol_type = other DNA
tatgattggtataaatacaatcgttctcaaggtatgacagcagcacaagcgcatcaagcaattaaaaatgcctca

SEQ ID NO: 839262 - DNA, 75 bp, synthetic construct
  source 1..75: mol_type = other DNA
cagccatttaatggtatccagtgataaccatgataaatgggatgtttttggtgatttcggaatacaggattttaa

SEQ ID NO: 839263 - DNA, 75 bp, synthetic construct
  source 1..75: mol_type = other DNA
cacgccgttccggtattaccgttcgcacactacactactacgacaatattggtttgctgatcccttctgcgcgct

SEQ ID NO: 839264 - DNA, 75 bp, synthetic construct
  source 1..75: mol_type = other DNA
ttttgctgtctactgctgattgggataatcctttttggacaaacaaacagcatgttgcaatagagttagcacgaa

SEQ ID NO: 839265 - DNA, 75 bp, synthetic construct
  source 1..75: mol_type = other DNA
gtaaacaacaggcagaggaattactgaataaactggcaaaacgttttcaggaatgtggactggaattacatccgg

SEQ ID NO: 839266 - DNA, 75 bp, synthetic construct
  source 1..75: mol_type = other DNA
aacactggaaatatcattgagtgtgcggatttgcaagatacgaccaacgccattaaagttcattttttaacactg

SEQ ID NO: 839267 - DNA, 75 bp, synthetic construct
  source 1..75: mol_type = other DNA
aggtgaattagtttttgaacccagtgatgttgaatattactttgagccagtgacgatacaggattcaggaaccag

SEQ ID NO: 839268 - DNA, 75 bp, synthetic construct
  source 1..75: mol_type = other DNA
aacaccgggaatatcattgagtgtacagacttgcaagagacgaccaacgccattaaagttcattttttaacacag

SEQ ID NO: 839269 - DNA, 75 bp, synthetic construct
  source 1..75: mol_type = other DNA
ttgcagcgcacagggggagcagtgggaataccgctacgacgccagcggcaggcggacggaaaaacgctgcgaccg

SEQ ID NO: 839270 - DNA, 75 bp, synthetic construct
  source 1..75: mol_type = other DNA
atgatagaaattccattacccttatttatttcaatctatatagttctgctcataggaatgaattgtaagataaac

SEQ ID NO: 839271 - DNA, 75 bp, synthetic construct
  source 1..75: mol_type = other DNA
cctgcccgcagacacagactacccggacccgcgcggggagcgggacgcggaagccgaccccggcctgctgtatgc

SEQ ID NO: 839272 - DNA, 75 bp, synthetic construct
  source 1..75: mol_type = other DNA
ccggcctgctgtatgcgggacagtggcaggatgcggaatcagggctgtgctataaccggttccggtattacgagc

SEQ ID NO: 839273 - DNA, 75 bp, synthetic construct
  source 1..75: mol_type = other DNA
aatcagaacgggcaaagaaatgtttcggcagcaccagtgaaaaatgtaaatgaaaacatttaccaggccttagaa

SEQ ID NO: 839274 - DNA, 75 bp, synthetic construct
  source 1..75: mol_type = other DNA
atgcatcgtatagacacaaaaaccgcgcagaaggataagttcggcgcgggtaagaacggttttacccgtggtaac

SEQ ID NO: 839275 - DNA, 75 bp, synthetic construct
  source 1..75: mol_type = other DNA
ccatcctactgaaactttgctgaatgaagccgatgcccgttttgccataaatctggttcgttccatcatgactta

SEQ ID NO: 839276 - DNA, 75 bp, synthetic construct
  source 1..75: mol_type = other DNA
cgaaagatccgcagcagattatctccggtaacgagaaagtcgttcgtccacgtttggcggatgccgagttcttct

SEQ ID NO: 839277 - DNA, 75 bp, synthetic construct
  source 1..75: mol_type = other DNA
tgccggtagtgattacagttatgaaatggtttttctcctttggctagatagtaccgttgagccagaggtctgggt

SEQ ID NO: 839278 - DNA, 75 bp, synthetic construct
  source 1..75: mol_type = other DNA
ttgagctggctgaagaacaggggaaagaggctcagttttggtttaaatatggagtaagccctaaagtaagagaat

SEQ ID NO: 839279 - DNA, 75 bp, synthetic construct
  source 1..75: mol_type = other DNA
atcgcacttccgtaccctggatgcagctgcagcactggcggcggcgaacaagcgtgtatctaacattctggcgaa

SEQ ID NO: 839280 - DNA, 75 bp, synthetic construct
  source 1..75: mol_type = other DNA
tggatgtctgtaaggcgaaagtcagaattgccgaacgtacgtttactacctttggctcacgcggcggggtggtgt

SEQ ID NO: 839281 - DNA, 75 bp, synthetic construct
  source 1..75: mol_type = other DNA
ttgatgacaaagaattgcgtatcaaccgtttgaccatgctggagaaactgcgcgaactgttcctgcgcgttgcgg

SEQ ID NO: 839282 - DNA, 75 bp, synthetic construct
  source 1..75: mol_type = other DNA
gatggaaaagatccgcgggcatcaaacgcgaagaagaaaaaagccccagcaccccggaatgatggcgacgatgaa

SEQ ID NO: 839283 - DNA, 75 bp, synthetic construct
  source 1..75: mol_type = other DNA
atggataaaaatgaagtaatccttcttagccgccctgccatctgccggatgctgggcggaattagcaggggaacg

SEQ ID NO: 839284 - DNA, 75 bp, synthetic construct
  source 1..75: mol_type = other DNA
ttaaccgtgagcaagtgcaaaaaatgttaggcgggcttagtaagtcctcatttttcaaactggtcaggaagtgga

SEQ ID NO: 839285 - DNA, 75 bp, synthetic construct
  source 1..75: mol_type = other DNA
gatgatgatacggaaacgggtcagtcatatcgttttctgtattcaaaacgttttgacgatacagacaccagctta

SEQ ID NO: 839286 - DNA, 75 bp, synthetic construct
  source 1..75: mol_type = other DNA
ttaccttgtatggtggcgtacaggctgctgaaaagtatggttctgttgctttgggggtaggtaaagatctcggtt

SEQ ID NO: 839287 - DNA, 75 bp, synthetic construct
  source 1..75: mol_type = other DNA
ttcgacagtacgcaaattcgtggcgcacgtctgtataccgataacgaaatgctacccgctagccagaatggcttt

SEQ ID NO: 839288 - DNA, 75 bp, synthetic construct
  source 1..75: mol_type = other DNA
tcaaagtcatcgcaagtcagtatcgtttatgaagcggggccctgtggttatggactttatcgtcggctggtgaaa

SEQ ID NO: 839289 - DNA, 75 bp, synthetic construct
  source 1..75: mol_type = other DNA
tcgggttagatgttcacaaagaatcgattactgtcgcttatgctatcaattcagaacctgttgagctgatgggta

SEQ ID NO: 839290 - DNA, 75 bp, synthetic construct
  source 1..75: mol_type = other DNA
cggctgaacgcctcaaagcgaaaccattgcctcatgtaaaaaatcgcgttacaaagcctctgagcgcgtttctgg

SEQ ID NO: 839291 - DNA, 75 bp, synthetic construct
  source 1..75: mol_type = other DNA
cctggtatcaggacgaaggttacaccgttgataccatccaggcggtactggcgcgtcgtccgactcgtccggcag

SEQ ID NO: 839292 - DNA, 75 bp, synthetic construct
  source 1..75: mol_type = other DNA
aacatagcttgcccagagggaatgtcatctatttccttgtggtttggtgatgcaaaaatagtcaaagataaattt

SEQ ID NO: 839293 - DNA, 75 bp, synthetic construct
  source 1..75: mol_type = other DNA
caagccatgcgagggattcagtttattattgcggttggattaatttctgaactgggtgatctgacccgttttgaa

SEQ ID NO: 839294 - DNA, 75 bp, synthetic construct
  source 1..75: mol_type = other DNA
atggtcttcgagttcaccgacacgcagggcgttatggggatgcactacgcgcgtcacgatggcgaagcggaagac

SEQ ID NO: 839295 - DNA, 75 bp, synthetic construct
  source 1..75: mol_type = other DNA
gaaatgagtaaataccttcagagcatcaatgaaagtatgttccttatgacaaacatccctcatcaggatcccccc

SEQ ID NO: 839296 - DNA, 75 bp, synthetic construct
  source 1..75: mol_type = other DNA
agacaaaaacatcacattacttagattggatgtttttgatgacgtcacaagtgaatatattactgaagatattaa

SEQ ID NO: 839297 - DNA, 75 bp, synthetic construct
  source 1..75: mol_type = other DNA
caactcaatctatcttgaatagattcgacaatcacatagcaactatcagaaacagtattcaaaaaaataataaca

SEQ ID NO: 839298 - DNA, 75 bp, synthetic construct
  source 1..75: mol_type = other DNA
tggcacatgtgttgggacaatttcgtaatacagaaagcgaggcacgggtagaagcaatgaataacggtgttttac

SEQ ID NO: 839299 - DNA, 75 bp, synthetic construct
  source 1..75: mol_type = other DNA
attcaactgctccataacggctggcgctatcaggaacagagcgctattagtcaggcagagttgctggcgaatgac

SEQ ID NO: 839300 - DNA, 75 bp, synthetic construct
  source 1..75: mol_type = other DNA
cgcaaaccatcgcctcaatcggctacatcgtattgctgttcatgttctgtcatctgtttggtgtgctgggagcag

SEQ ID NO: 839301 - DNA, 75 bp, synthetic construct
  source 1..75: mol_type = other DNA
agttaaaggttaaaatagagtctttaggtaaaaccagtgagacgattgggaaatccagcaatgcgcaggcagaat

SEQ ID NO: 839302 - DNA, 75 bp, synthetic construct
  source 1..75: mol_type = other DNA
aattaaaggttaaaatagagtctttaggtaaaaccagcgacacaattgggaaatccagcaatgcgcaggcagtat

SEQ ID NO: 839303 - DNA, 75 bp, synthetic construct
  source 1..75: mol_type = other DNA
tgtgcgcgatcctgcgggcgttgcctgtgaacctgcgcatgctcaacggcagtcattcattcctggcgtatctgg

SEQ ID NO: 839304 - DNA, 75 bp, synthetic construct
  source 1..75: mol_type = other DNA
gccatttattcctcttacaagcatggcatacaaaattttattatactcaatcccacatactgattcttcttttat

SEQ ID NO: 839305 - DNA, 75 bp, synthetic construct
  source 1..75: mol_type = other DNA
tcacaactgatgcgatgggttgccagaaagatattgcagagaagatacaaaaacagggaggtgattatttattcg

SEQ ID NO: 839306 - DNA, 75 bp, synthetic construct
  source 1..75: mol_type = other DNA
ccagcaaaatatttcccacaaacaactagttgggttaaatgcgacatggttcaaacagtaagtaatcagcgactt

SEQ ID NO: 839307 - DNA, 75 bp, synthetic construct
  source 1..75: mol_type = other DNA
ttaacgatgaccataatacatgtcctacatgtgatacaacaaaaattcatatcgacaattcagcaactattttga

SEQ ID NO: 839308 - DNA, 75 bp, synthetic construct
  source 1..75: mol_type = other DNA
tcactggggcgtctgggggcggtgtcgctggacacgacgcactcccgggggcagcagaagggacatgattatgag

SEQ ID NO: 839309 - DNA, 75 bp, synthetic construct
  source 1..75: mol_type = other DNA
tgatgaagctgaatatgaatactggctgaagcggtacaagctggaaattatggaaaataccacacttccatcgct

SEQ ID NO: 839310 - DNA, 75 bp, synthetic construct
  source 1..75: mol_type = other DNA
tgcaattaaatagcaatatttcaccatcaccggaaagagtgaaagcattaatcattcattcagcgatgttagagc

SEQ ID NO: 839311 - DNA, 75 bp, synthetic construct
  source 1..75: mol_type = other DNA
aaggcgcgcaatccacgccagaaaaatgcacccgcgacaatacgcacttcagcagtgaagccactaagctcacgg

SEQ ID NO: 839312 - DNA, 75 bp, synthetic construct
  source 1..75: mol_type = other DNA
taatcttggtccctggcgggtgcgtaacctgacaacctggaacaggtcatccggtcagccggggcagtgggagag

SEQ ID NO: 839313 - DNA, 75 bp, synthetic construct
  source 1..75: mol_type = other DNA
gacggataacgacatcagtgccacggcgcagatgcagcgttccacgggacaggatacccggtatgaggccgggct

SEQ ID NO: 839314 - DNA, 75 bp, synthetic construct
  source 1..75: mol_type = other DNA
tactgaggatggaaaattcacaggtgaaattattatgacactcgtttattctccaccgcttgattatgactaccc

SEQ ID NO: 839315 - DNA, 75 bp, synthetic construct
  source 1..75: mol_type = other DNA
actgggtggaaacaccacgaatttctttcctgacttgttaaaatttttaaggaaaaataatgatgttgatatggt

SEQ ID NO: 839316 - DNA, 75 bp, synthetic construct
  source 1..75: mol_type = other DNA
cattaaatccgttgatactgttatactatagatttaatgatttgttttatagcactccataccctattattaatc

SEQ ID NO: 839317 - DNA, 75 bp, synthetic construct
  source 1..75: mol_type = other DNA
ttgttgttgcatctggtaattacgaatctttaccgcaacgcacttggccgcctcaggagctatcagattgtgatc

SEQ ID NO: 839318 - DNA, 75 bp, synthetic construct
  source 1..75: mol_type = other DNA
ttatagatagcggagtcgatcccaataacaacatacttaggccatggatttgggatagtttagatttagtaaaag

SEQ ID NO: 839319 - DNA, 75 bp, synthetic construct
  source 1..75: mol_type = other DNA
ttgaaaagatcgaaccttttagtcttaaccatgatgttatagataaaaataaatcagatagttttcttctgaaac

SEQ ID NO: 839320 - DNA, 75 bp, synthetic construct
  source 1..75: mol_type = other DNA
tagaaagtttctcattagataagggagagaaaattattctcgaacagctatctcatttaaaaagcttgatggcga

SEQ ID NO: 839321 - DNA, 75 bp, synthetic construct
  source 1..75: mol_type = other DNA
cctgcgacgggaagtacatctcagtggaagacgttttcattatctctaacaaactgtcaaaatacaggtcgtgta

SEQ ID NO: 839322 - DNA, 75 bp, synthetic construct
  source 1..75: mol_type = other DNA
cgcggatccgtctggatatccctaatgatgccgacatagactggaagattgatattcgtaaatcgatggcgcgcc

SEQ ID NO: 839323 - DNA, 75 bp, synthetic construct
  source 1..75: mol_type = other DNA
tggcgcaatcaacacgcgatcgtgcggtaaggacatttgcaaaacgcgggaaaatgaataagcgcaagcccgggg

SEQ ID NO: 839324 - DNA, 75 bp, synthetic construct
  source 1..75: mol_type = other DNA
ccaaacaacagaaatcgctatacgttttgatatgagtgcttatcaggctcgccattatcttatgtgtcttgagaa

SEQ ID NO: 839325 - DNA, 75 bp, synthetic construct
  source 1..75: mol_type = other DNA
actcaaccgacgacgcaccctgtcagtcaatggcgtatcggatgcattagtcagcgaggggaatctcctgtctcg

SEQ ID NO: 839326 - DNA, 75 bp, synthetic construct
  source 1..75: mol_type = other DNA
tatgtctcgcgtgccggattttacgtttcgacgcagccgaccttgtcgtcaccgcgcggtacgctggttcacttc

SEQ ID NO: 839327 - DNA, 75 bp, synthetic construct
  source 1..75: mol_type = other DNA
tgcccaacatgcagtcattaccaaaatgtcaggtatggaaattacagaagaagatctggactctccgttatttaa

SEQ ID NO: 839328 - DNA, 75 bp, synthetic construct
  source 1..75: mol_type = other DNA
attgaaggaggatttgagttatttcataaaagcataaccgatttcttgttcttctgcaataactaccaagtaatc

SEQ ID NO: 839329 - DNA, 75 bp, synthetic construct
  source 1..75: mol_type = other DNA
aaattagcaacaatgttttattcaacatcacctgacatggcttggatgatgggacaattttatgatataggtaag

SEQ ID NO: 839330 - DNA, 75 bp, synthetic construct
  source 1..75: mol_type = other DNA
aggctggtgagttatccccacaaattcaggccatgctaagactgattgaggaaaccgttccggttcagcaaatct

SEQ ID NO: 839331 - DNA, 75 bp, synthetic construct
  source 1..75: mol_type = other DNA
cgggaaaatgaataagcgcaagcccggcgaggaactcgttcatctctggcaggcgcagaagacgtcatcaggtgt

SEQ ID NO: 839332 - DNA, 75 bp, synthetic construct
  source 1..75: mol_type = other DNA
tttacttcatcagcggagacgaaaaactttattttgcatacggaaataaaaaatattatatacccgtgatcattg

SEQ ID NO: 839333 - DNA, 75 bp, synthetic construct
  source 1..75: mol_type = other DNA
ggcgtagaaacattactttttagcaatatggaatgcgtatatatggggcaattaaattttgaaaaaatcacaaaa

SEQ ID NO: 839334 - DNA, 75 bp, synthetic construct
  source 1..75: mol_type = other DNA
tcatctgccgtcgaaaaacatatccctgaagcgccagccaggaagaagaagaaaaagaaaaaacacagtttccca

SEQ ID NO: 839335 - DNA, 75 bp, synthetic construct
  source 1..75: mol_type = other DNA
tgccagcgaaggcgaagaacagcgatttcccgggcaactggtggattatcgagacaaaacacaacgtggcggacg

SEQ ID NO: 839336 - DNA, 75 bp, synthetic construct
  source 1..75: mol_type = other DNA
ggattctgaacttgaggtcaccaatgccattttcggtacccatgagttccgggcgtcagattatgagatcaccac

SEQ ID NO: 839337 - DNA, 75 bp, synthetic construct
  source 1..75: mol_type = other DNA
ccgttgcatttaaaaaagcgcgggattctgtggattacaactggcgtgctaatggcaccccaccctctttccatg

SEQ ID NO: 839338 - DNA, 75 bp, synthetic construct
  source 1..75: mol_type = other DNA
tagatattaatgccgtaattaaccaacagcttccagcacttatgatcgaaagtcgtgatttggcacttaataacc

SEQ ID NO: 839339 - DNA, 75 bp, synthetic construct
  source 1..75: mol_type = other DNA
gcctgacagatcaggcactgtttgacgagcaggcggcaattaaaaaggcgaatctgaaaggcaaattgcaacgtg

SEQ ID NO: 839340 - DNA, 75 bp, synthetic construct
  source 1..75: mol_type = other DNA
agtctcaatacagccctccttgatacaggatcggcctacggtctcgccctgagttgcctccgggctcgcgggggg

SEQ ID NO: 839341 - DNA, 75 bp, synthetic construct
  source 1..75: mol_type = other DNA
cgtcgctggattgtgccagctactggcaagtactgccgcgataggctgggctgttttgggttatggtacgcttaa

SEQ ID NO: 839342 - DNA, 75 bp, synthetic construct
  source 1..75: mol_type = other DNA
aaaggtgagcggggcgaccctggcggcccacaggggccaaaaggggatacgggagccgcaggtccggcaggccca

SEQ ID NO: 839343 - DNA, 75 bp, synthetic construct
  source 1..75: mol_type = other DNA
cgggataatacctgcgacaccggagaatctgttcggaaaagactttgctgatgcactctttcagttacgggatct

SEQ ID NO: 839344 - DNA, 75 bp, synthetic construct
  source 1..75: mol_type = other DNA
agcgcgcgctccatcccctcaaagccaggctgcttacagagtccgttctgatgacatccctgagtcagtgggtcc

SEQ ID NO: 839345 - DNA, 75 bp, synthetic construct
  source 1..75: mol_type = other DNA
gaaaaatagattatcatggaagtcagttctggacggtctgcttcagtacaaaatggtcaggttcgttacgttacc

SEQ ID NO: 839346 - DNA, 75 bp, synthetic construct
  source 1..75: mol_type = other DNA
tatcaatgacttatactacgagtcagaagatatatcctcaaatatcagcagatttaaaatctatctttcacaggt

SEQ ID NO: 839347 - DNA, 75 bp, synthetic construct
  source 1..75: mol_type = other DNA
atattgaaccatttttttctgcagctaccgctgaagataaacaacaagttgaacaagctatcaacagtagcgtga

SEQ ID NO: 839348 - DNA, 75 bp, synthetic construct
  source 1..75: mol_type = other DNA
ttgcactaatgtgtatgtggtatgcggtacccgctgctgcaaaagagactttactggctatgccacgtaattcaa

SEQ ID NO: 839349 - DNA, 75 bp, synthetic construct
  source 1..75: mol_type = other DNA
ctgggctccagagtatctatctcgcatttcaagtacgcttacagcgacacgtcttaaatacccgtcaatcaatgc

SEQ ID NO: 839350 - DNA, 75 bp, synthetic construct
  source 1..75: mol_type = other DNA
ggttcctccctcagcgataatgtcaatggcgggaaactggacgttgcaatgaataacagcgtctggaacgtaaca

SEQ ID NO: 839351 - DNA, 75 bp, synthetic construct
  source 1..75: mol_type = other DNA
atctcaaatgaatttctttataggttgcatttttcagacaaaatagacgaagtaaaagatattattgataatgtt

SEQ ID NO: 839352 - DNA, 75 bp, synthetic construct
  source 1..75: mol_type = other DNA
ccattacgacaccatcactcatagaagtgatctctaaatattgcaatgacttaggggctgtaaaaaaatgcatta

SEQ ID NO: 839353 - DNA, 75 bp, synthetic construct
  source 1..75: mol_type = other DNA
aagaagcgcggaaaggaaatatcatcagaatatttcctgaatgggagttcagtatgtctcccggtgaaaatgcta

SEQ ID NO: 839354 - DNA, 75 bp, synthetic construct
  source 1..75: mol_type = other DNA
agaagatttagaaaaacatgtccgggagtttaaggacaaatctcatactgattatcggaaacttttagcattata

SEQ ID NO: 839355 - DNA, 75 bp, synthetic construct
  source 1..75: mol_type = other DNA
aggttacccaagaatcaaagaatagtagaacataccattgaagatatttacgctaaacattctgatagttatagc

SEQ ID NO: 839356 - DNA, 75 bp, synthetic construct
  source 1..75: mol_type = other DNA
tgaacctattgatgatgatatcaaagaattagatggattaacttttgataaattacctcaaagaataaaaaacag

SEQ ID NO: 839357 - DNA, 75 bp, synthetic construct
  source 1..75: mol_type = other DNA
atgacaatgcagaagcaggtggaaggggcacaggactatatccgcactcagtgtactaagcaggctttttattat

SEQ ID NO: 839358 - DNA, 75 bp, synthetic construct
  source 1..75: mol_type = other DNA
ggtaaccagctgaatgaagagaacccgcaccagctgcagcagctcatccgcctgccggggcagcagtatgatgag

SEQ ID NO: 839359 - DNA, 75 bp, synthetic construct
  source 1..75: mol_type = other DNA
aacgtaaggactatgaacccacagttaacagaggtaaacaccggttcgttgccaaacaaatcgagctaaatatcg

SEQ ID NO: 839360 - DNA, 75 bp, synthetic construct
  source 1..75: mol_type = other DNA
tattaagttgtctgaagatgttagagctattatatttgatgcgttgggtgatatgagaacacccttaggcttcat

SEQ ID NO: 839361 - DNA, 75 bp, synthetic construct
  source 1..75: mol_type = other DNA
attctgcaatttcgggacgttacactgtctctgcaccttataaagcgggtgccgggggtcgcagcccggaattgt

SEQ ID NO: 839362 - DNA, 75 bp, synthetic construct
  source 1..75: mol_type = other DNA
acgttgattcccgcgcgcctgcatgccgcgcatctgcgcaatcaccgcaagctgctggtgatcgatggcgagacg

SEQ ID NO: 839363 - DNA, 75 bp, synthetic construct
  source 1..75: mol_type = other DNA
gcaagcttccttgctatcaaatcactcgcgacggctttgcgtttcttgctatgggtttcacgggtaaacgtgctg

SEQ ID NO: 839364 - DNA, 75 bp, synthetic construct
  source 1..75: mol_type = other DNA
tgagaatcggagatgatcaaatttttatccgttgtaaagactcatgggatgtgcttcttaaaaatcatgccggta

SEQ ID NO: 839365 - DNA, 75 bp, synthetic construct
  source 1..75: mol_type = other DNA
ctttgtatgagaggaataaagataagggtatcattaaagatataatattcccatccattgaaaaaaatgaaaccg

SEQ ID NO: 839366 - DNA, 75 bp, synthetic construct
  source 1..75: mol_type = other DNA
actgcggaagatgtgacaagcacaggagcaaatgcagccgcagccggacagagcgcacaggatgccgcaggttat

SEQ ID NO: 839367 - DNA, 75 bp, synthetic construct
  source 1..75: mol_type = other DNA
acttatattatgaatcagactaaaaatttgggactcgcagttaatgtcatcagcgactatgatcgtaccaacgct

SEQ ID NO: 839368 - DNA, 75 bp, synthetic construct
  source 1..75: mol_type = other DNA
agagatggttgggcccatgaccgctttaatgctctgtatgaagcaattcatgggttgataccttcctacctcgag

SEQ ID NO: 839369 - DNA, 75 bp, synthetic construct
  source 1..75: mol_type = other DNA
taaagaactggtcaatatgatcgttgcccagcgtaactatcagtctaacgcccagaccatcaaaacccaggacca

SEQ ID NO: 839370 - DNA, 75 bp, synthetic construct
  source 1..75: mol_type = other DNA
tctttgtggatgccggaaacaaaaagctggtcttctggtttgtacgtgttgatgacgatgaaccgccccggtttt

SEQ ID NO: 839371 - DNA, 75 bp, synthetic construct
  source 1..75: mol_type = other DNA
accggacaaaaggccgtctggcgatacccggcgcattcggctttgggtgtgcttttctgcctgaagatgttatcc

SEQ ID NO: 839372 - DNA, 75 bp, synthetic construct
  source 1..75: mol_type = other DNA
ggtggagtttaccgggaaggtgcaacgtatcgcgcggattcatcagtacggacttaaagaccgaccaaaccaaca

SEQ ID NO: 839373 - DNA, 75 bp, synthetic construct
  source 1..75: mol_type = other DNA
atccgaaagccgcgctcgacagcgcagaaaaacaggttcagatgcaaatcgaagccatgcaggccagcaaccagt

SEQ ID NO: 839374 - DNA, 75 bp, synthetic construct
  source 1..75: mol_type = other DNA
tactcgctgctctgatcctctctacgctcgcggtgcaggctcacgccaccacgcagcttaacgtctgggaagaca

SEQ ID NO: 839375 - DNA, 75 bp, synthetic construct
  source 1..75: mol_type = other DNA
gagaaggtctttccggcggggatcctcggcgataacgggctgaatgccatcgattcgctgtttaccgagaaaaaa

SEQ ID NO: 839376 - DNA, 75 bp, synthetic construct
  source 1..75: mol_type = other DNA
gaacacgttgcgatccctatgtaaataaattactgactggcgaagatttcgatttccattgccattccaacctgg

SEQ ID NO: 839377 - DNA, 75 bp, synthetic construct
  source 1..75: mol_type = other DNA
gaaactaaccgctgagaacggcgctaagggtgtgctatccggtgaattttcagaaactacgtttataagctgccc

SEQ ID NO: 839378 - DNA, 75 bp, synthetic construct
  source 1..75: mol_type = other DNA
cagcgtcgcatcagacatcagtgcggtgcctgtgccggatgcggcgtggacgccttacccggcctacatagtaca

SEQ ID NO: 839379 - DNA, 75 bp, synthetic construct
  source 1..75: mol_type = other DNA
tagttcatctactacgttccctgtaaatggcggatatgttgactggatgatgtcggtagatgctcaagtctatat

SEQ ID NO: 839380 - DNA, 75 bp, synthetic construct
  source 1..75: mol_type = other DNA
cagggtgtggggttccagtactcgacaaaacgtttttgaggttggaacgtctgctgcgtatctgttttatgcgca

SEQ ID NO: 839381 - DNA, 75 bp, synthetic construct
  source 1..75: mol_type = other DNA
gctgggttagggtatcgcaggcgtgggcggggccggggttcggtaacctggcgataccgcgtgtgggtcaggaag

SEQ ID NO: 839382 - DNA, 75 bp, synthetic construct
  source 1..75: mol_type = other DNA
caccacgttttatagctcatgatggaattgaggcaattcatgtaaatcaaataaataagttattcgagatagctt

SEQ ID NO: 839383 - DNA, 75 bp, synthetic construct
  source 1..75: mol_type = other DNA
gcaaaagaaaccgcttctaatcacggggtttatctttctaattgcatctggttttttgcagtttacagcgttgat

SEQ ID NO: 839384 - DNA, 75 bp, synthetic construct
  source 1..75: mol_type = other DNA
tgttgagttatcaaatgatgaaagaaaggagacacttcatcagtactggtcatatgagaaagtagtacaagaagg

SEQ ID NO: 839385 - DNA, 75 bp, synthetic construct
  source 1..75: mol_type = other DNA
tgtcaccagacacccttttatcaaaaggcagggtgactgcattaagcggcactcagcagggtgtggcagggcttc

SEQ ID NO: 839386 - DNA, 75 bp, synthetic construct
  source 1..75: mol_type = other DNA
ggtggtgatgttcatccgtcaacgtcactaaagctgtattcaagaccccttcagaaattaattaacggcacatgg

SEQ ID NO: 839387 - DNA, 75 bp, synthetic construct
  source 1..75: mol_type = other DNA
aacagggtcatttctcagttggtaccaacgatcagtggcgtccatgacatgactgaaaccgttaagtttgtcaag

SEQ ID NO: 839388 - DNA, 75 bp, synthetic construct
  source 1..75: mol_type = other DNA
tattggtttactgatggtaggggtgatccgcttctggcgcgagatttctcccgtcgggccgcgcccagcggaaat

SEQ ID NO: 839389 - DNA, 75 bp, synthetic construct
  source 1..75: mol_type = other DNA
acagcacagggcaatgcaggacttcagatgtatgaagtgtacaacaacggctatcccacagcttatggcaatgtt

SEQ ID NO: 839390 - DNA, 75 bp, synthetic construct
  source 1..75: mol_type = other DNA
gaaacgggaagaagttcttcggataacatcggcggcgtgtattacaaacaaactcaggtttatatcaatggctca

SEQ ID NO: 839391 - DNA, 75 bp, synthetic construct
  source 1..75: mol_type = other DNA
tcctggtgatatactatttgtcccgcgaaatgatgacttaaaagtttttgtgatgggggaagtaggaaagcagag

SEQ ID NO: 839392 - DNA, 75 bp, synthetic construct
  source 1..75: mol_type = other DNA
taactgggtgaactcagatggcaccattttctatccttatattggtaaggtgcaggtggcaggtaaaacccttag

SEQ ID NO: 839393 - DNA, 75 bp, synthetic construct
  source 1..75: mol_type = other DNA
agaaatgacgatctgaaaatatttgtaatgggtgaagtaggaaaacaaaccactatgaagatggaccgtagtgga

SEQ ID NO: 839394 - DNA, 75 bp, synthetic construct
  source 1..75: mol_type = other DNA
aaccgtgtgataactcagcttgtaccgacgattagcggtgtgcatgatatgaccgaaaccgtaaaattcgtcaag

SEQ ID NO: 839395 - DNA, 75 bp, synthetic construct
  source 1..75: mol_type = other DNA
aaggtaagatcgccaacgtctatcagcttaatgcacaggatgcttcagcgatggttctggggacggagttccagt

SEQ ID NO: 839396 - DNA, 75 bp, synthetic construct
  source 1..75: mol_type = other DNA
aatgtttaccctatgactcccggcctaatcgatcaactgcgtccggagaccgttcttgctcgtccaaacccgcag

SEQ ID NO: 839397 - DNA, 75 bp, synthetic construct
  source 1..75: mol_type = other DNA
ctctttttactcctggcgatggggctgaagggatcgctgctccacccaccgctggccggtgatttctaccaaatc

SEQ ID NO: 839398 - DNA, 75 bp, synthetic construct
  source 1..75: mol_type = other DNA
tatccttcttatgtgtatacaacatcaggttgagttactcgcttttttcgaaagatttatcaatcttaataaaag

SEQ ID NO: 839399 - DNA, 75 bp, synthetic construct
  source 1..75: mol_type = other DNA
aataaaagacatgctgtttagcaaaaaaattttttttcaggtaggggagaatccatatgcaacgcaattaaaaaa

SEQ ID NO: 839400 - DNA, 75 bp, synthetic construct
  source 1..75: mol_type = other DNA
agcaaaatcaatgagcaaaaaaatgttccaatacaggagtaccgagtttgcattaaaaatacttaatggtataaa

SEQ ID NO: 839401 - DNA, 75 bp, synthetic construct
  source 1..75: mol_type = other DNA
acccggatgaactgccgactgcgccgctggcgcgctacacgtacacggccggtggtgaactgcgggcggtgtatg

SEQ ID NO: 839402 - DNA, 75 bp, synthetic construct
  source 1..75: mol_type = other DNA
tagaagcataaaggctattttttatagcttattagttggtatgcaccctcgctcaaaaaaatatattagtaataa

SEQ ID NO: 839403 - DNA, 75 bp, synthetic construct
  source 1..75: mol_type = other DNA
tggtgaattttttataccgttaacgacagctagcagactaactcttaataatgatgtggatggagttaaaattat

SEQ ID NO: 839404 - DNA, 75 bp, synthetic construct
  source 1..75: mol_type = other DNA
tctgatacccagagaagcaaatagagctgtctttcggacatttaatgaacctgatagtctaatatctgtctgcga

SEQ ID NO: 839405 - DNA, 75 bp, synthetic construct
  source 1..75: mol_type = other DNA
gtattgcatcattgtaaagcgatgttaagcgaaaccagccgcctgcctggtcttgacggcaacgcaaagatgtct

SEQ ID NO: 839406 - DNA, 75 bp, synthetic construct
  source 1..75: mol_type = other DNA
tcagtcaggcagctgatatcactgcattcaaagctagccaagttcccgtcggcgacgaccagttgccgatgatag

SEQ ID NO: 839407 - DNA, 75 bp, synthetic construct
  source 1..75: mol_type = other DNA
atcgagcaaaccaagccgccatttaaggaagatgttcatattgtgagaaaggaccttgatggaaacgtggttctg

SEQ ID NO: 839408 - DNA, 75 bp, synthetic construct
  source 1..75: mol_type = other DNA
tagtaatgctactaaaggtgaaataccaataaacatatataatgacgaagctaacatagaaacaataaatattac

SEQ ID NO: 839409 - DNA, 75 bp, synthetic construct
  source 1..75: mol_type = other DNA
aagcactggaccgatgggttgactaccttgatgggctggtgggtgaagaaaatacagtaaaagtaattaagaaaa

SEQ ID NO: 839410 - DNA, 75 bp, synthetic construct
  source 1..75: mol_type = other DNA
cggcattagcattggcgattggttttttatcgggttgtacggttatcccaggccaagggttaaatactctgcgga

SEQ ID NO: 839411 - DNA, 75 bp, synthetic construct
  source 1..75: mol_type = other DNA
tgggcgaggttggaaaacaaagcacattaaaaatggaccgcagcggtatgacagtcgcggaagcgttaggaaatg

SEQ ID NO: 839412 - DNA, 75 bp, synthetic construct
  source 1..75: mol_type = other DNA
ggagaggttataaaatcaggtcagcagcctattacaaatattccattgacgataatggatgctattaatgccgcg

SEQ ID NO: 839413 - DNA, 75 bp, synthetic construct
  source 1..75: mol_type = other DNA
tgccgggcgatacctgttattaccggtatgaaattattggggacagtacccatcgaaccagcatacacaacagtt

SEQ ID NO: 839414 - DNA, 75 bp, synthetic construct
  source 1..75: mol_type = other DNA
tgactacgatctggataaactggtcaatgtctacccgatgacaccgggcctgatcgatcagcttcgaccggaaac

SEQ ID NO: 839415 - DNA, 75 bp, synthetic construct
  source 1..75: mol_type = other DNA
gcgggaggattggctcccgatgcggattggcgaaatgtagtgttaacgcataatggaaaagataccaaaatttct

SEQ ID NO: 839416 - DNA, 75 bp, synthetic construct
  source 1..75: mol_type = other DNA
gttgaacgcgcaagatgcctccgcgatggttcttggtacagaatttgaattacaaccttatgatatcgtctatgt

SEQ ID NO: 839417 - DNA, 75 bp, synthetic construct
  source 1..75: mol_type = other DNA
tctggcatcgcgcaggccactctcgcaggcgttgcctttggtgagcagactgttactgcatcactggctaatact

SEQ ID NO: 839418 - DNA, 75 bp, synthetic construct
  source 1..75: mol_type = other DNA
gcgcgtcctctgctcggctttaccggtgaggatgtgcagatgattgaagagattatcctggctcaccttgaccgt

SEQ ID NO: 839419 - DNA, 75 bp, synthetic construct
  source 1..75: mol_type = other DNA
atgaatgagtttaagcgttttgaagaccgtctgaccggactgattgaatcgctgtcaacgtcagggcgtcggcga

SEQ ID NO: 839420 - DNA, 75 bp, synthetic construct
  source 1..75: mol_type = other DNA
gagatggaggcgcaggtgaaagcctacgtcagcggcatcgggacggcagatgggaaaagcgactcgttgctgggg

SEQ ID NO: 839421 - DNA, 75 bp, synthetic construct
  source 1..75: mol_type = other DNA
gggcgtgcgcgaagtatgaagaacacgccagagagggggcaggcaacgccagctggcagggcggcatcaccaata

SEQ ID NO: 839422 - DNA, 75 bp, synthetic construct
  source 1..75: mol_type = other DNA
ggtcagagggatcacgctgacggtgggggggttctttgatggtaccgggaataaccgggcaaacgcagacgatct

SEQ ID NO: 839423 - DNA, 75 bp, synthetic construct
  source 1..75: mol_type = other DNA
aatgtgtatccgatgacaccgggcctgatcgaccaactccgtccgaaaaaggtactcgcacgtcccaacccgcag

SEQ ID NO: 839424 - DNA, 75 bp, synthetic construct
  source 1..75: mol_type = other DNA
cacaggttgacgtgagtattgctgcattccgctcgcaaaaagcctatgtgaccggggaagttgttaaatcaggac

SEQ ID NO: 839425 - DNA, 75 bp, synthetic construct
  source 1..75: mol_type = other DNA
tacaggtggcagggaaaacacttagccaggtacgccaggatattgccagccgtttgacaacatacatcgaaagtc

SEQ ID NO: 839426 - DNA, 75 bp, synthetic construct
  source 1..75: mol_type = other DNA
aatcgtgtaatttcacagctagttccgactatcaccggtgttcatgatatgactgaaacagcacgttatatcaaa

SEQ ID NO: 839427 - DNA, 75 bp, synthetic construct
  source 1..75: mol_type = other DNA
aatcgagtaatctctcaattagtaccaactataacaggtgtacatgatatgacagaaacagttcgttatattaag

SEQ ID NO: 839428 - DNA, 75 bp, synthetic construct
  source 1..75: mol_type = other DNA
agaacgtggttgagcttccggacagcgactacgatctggataaactggtgaatgtgtatccgatgacaccgggcc

SEQ ID NO: 839429 - DNA, 75 bp, synthetic construct
  source 1..75: mol_type = other DNA
atgaagaaaaaaattgttagattttcggcattagcgttggcaattgggtttttatcaggttgtaccattatccct

SEQ ID NO: 839430 - DNA, 75 bp, synthetic construct
  source 1..75: mol_type = other DNA
actggtgcagttgcaaaatctggacagcagccaataacgaatattccgcttacagttatggacgcgattaataac

SEQ ID NO: 839431 - DNA, 75 bp, synthetic construct
  source 1..75: mol_type = other DNA
actggcgaagttgcaaaatcaggtcagcagcctatcactaatatccctttaacagttatggatgctataaacgct

SEQ ID NO: 839432 - DNA, 75 bp, synthetic construct
  source 1..75: mol_type = other DNA
actgatggtcaccgtttgggatcacccggaattgaccacgccagcaggccaataccgcagtgccagcgataccgg

SEQ ID NO: 839433 - DNA, 75 bp, synthetic construct
  source 1..75: mol_type = other DNA
cgtttgacaacttatattgaaagtccacaggttgatgtaagtattgctgcatttcgttctcaaaaagcctatgtg

SEQ ID NO: 839434 - DNA, 75 bp, synthetic construct
  source 1..75: mol_type = other DNA
aatcgcgttatctcacaattggtaccgaccataactggagttcatgatatgacggaaactgctaaattcataaag

SEQ ID NO: 839435 - DNA, 75 bp, synthetic construct
  source 1..75: mol_type = other DNA
acaggtgaagtaattaaatcaggacagcagccaattacaaatattccgcttacggttatggatgcaataaacgct

SEQ ID NO: 839436 - DNA, 75 bp, synthetic construct
  source 1..75: mol_type = other DNA
aacagtgacaggcaaccagaatatgtccgtgccattgctgatggtgtcgtggtatctattcgcaatccctctgac

SEQ ID NO: 839437 - DNA, 75 bp, synthetic construct
  source 1..75: mol_type = other DNA
ctaaagatgaaaaaaatgacaccattaacatttatgataactttttctattcatctaatgatgatcttgattcta

SEQ ID NO: 839438 - DNA, 75 bp, synthetic construct
  source 1..75: mol_type = other DNA
gggcaaatttgttacacaggcaaaagcagaattcagtaattctgccaattcaaatgtacaaaaatggagcgctta

SEQ ID NO: 839439 - DNA, 75 bp, synthetic construct
  source 1..75: mol_type = other DNA
atacagattcactgcattctcagggggcggcaagcagtatgtggatgcgtcatgtcggagggcacgaacgttcaa

SEQ ID NO: 839440 - DNA, 75 bp, synthetic construct
  source 1..75: mol_type = other DNA
ggggacgggcactaaaattgataataaacaagcatggatgtggctaacaattgccggaaataacaacccctggat

SEQ ID NO: 839441 - DNA, 75 bp, synthetic construct
  source 1..75: mol_type = other DNA
gcaggctcatatgactggatactaggaaactgcgacactgaggatgcccagaagtttcgggtaatggtgccaact

SEQ ID NO: 839442 - DNA, 75 bp, synthetic construct
  source 1..75: mol_type = other DNA
ggaaagattttgctggtcaagatgtccattctgaaactattggtggggatggtaatgccacattacgttatatgg

SEQ ID NO: 839443 - DNA, 75 bp, synthetic construct
  source 1..75: mol_type = other DNA
acattacccactgtatcgaataaggcccttgctacccctggagaaacaaccggattaacaccattttcaattaac

SEQ ID NO: 839444 - DNA, 75 bp, synthetic construct
  source 1..75: mol_type = other DNA
atgcagccccgccttcttctccgtatttgtttttctcgccggactcttaagattggctgtttgttgttgcttata

SEQ ID NO: 839445 - DNA, 75 bp, synthetic construct
  source 1..75: mol_type = other DNA
ctgtattaaaaggctatccgctcggtttgatttattttaatcaacctgacaaagatacagaagatacatttgaag

SEQ ID NO: 839446 - DNA, 75 bp, synthetic construct
  source 1..75: mol_type = other DNA
actgaggtaaaagcacagatcaccgaacaagtaaaagctcagttaacccaagagcaacgggagctatttactgaa

SEQ ID NO: 839447 - DNA, 75 bp, synthetic construct
  source 1..75: mol_type = other DNA
ttaaaggcattaccgattttgtgctagcaccgccagaagtgatcaccggtgataactatgagagccgcggcgcac

SEQ ID NO: 839448 - DNA, 75 bp, synthetic construct
  source 1..75: mol_type = other DNA
gttttgctggcactaagcggttcagcgtctggtgcaagtctggaagttgataatggtcagattaccaatattgat

SEQ ID NO: 839449 - DNA, 75 bp, synthetic construct
  source 1..75: mol_type = other DNA
ggttatcgggcggcaggggtaaaagcgaaaaaatcccgcagtgctcacggacaggaactgcgggagcgttacgaa

SEQ ID NO: 839450 - DNA, 75 bp, synthetic construct
  source 1..75: mol_type = other DNA
tccaacagaggtattgaacctacagaagcaggtatggttttattcaaagagttttcttctattaatgaagacata

SEQ ID NO: 839451 - DNA, 75 bp, synthetic construct
  source 1..75: mol_type = other DNA
cgtacccgttttggtaatcaggtatacgccattggcggcaacgcaacgtcggcaaacctgatggggatttctacc

SEQ ID NO: 839452 - DNA, 75 bp, synthetic construct
  source 1..75: mol_type = other DNA
gctgctgagtggatcgatatagaactctcccttcctgacccgccgacgccagtttctaactctccgcaaaattat

SEQ ID NO: 839453 - DNA, 75 bp, synthetic construct
  source 1..75: mol_type = other DNA
cgggttacgatgtcaaaggtgtattgcagctggcggtaaaaacggcggcagttatgctgctgatgccacgggtga

SEQ ID NO: 839454 - DNA, 75 bp, synthetic construct
  source 1..75: mol_type = other DNA
taaaattatcgaatttcgttatgataacgccaagccaattagacgtgttaaacaattactactggaagctggcat

SEQ ID NO: 839455 - DNA, 75 bp, synthetic construct
  source 1..75: mol_type = other DNA
gggaaggggaatgacgagaaaaactggtatctgaccagtaaatgggacggcgtaacgccagcggatacacccgat

SEQ ID NO: 839456 - DNA, 75 bp, synthetic construct
  source 1..75: mol_type = other DNA
gttatgcctgggggggcactgcgtgtcgctaaaaccactatcggcggcaacctggagaatggcggcacggttcaa

SEQ ID NO: 839457 - DNA, 75 bp, synthetic construct
  source 1..75: mol_type = other DNA
ctaggcggcgatttggcgcagtggagtagcaacgcgcaggatcgctggcatcttggcgtgatggcaggttacgct

SEQ ID NO: 839458 - DNA, 75 bp, synthetic construct
  source 1..75: mol_type = other DNA
cgcccgcgctgccttgcgtatgcttaccgaaaacggtcatcagccattactgcaagaaatcgcccgacgttataa

SEQ ID NO: 839459 - DNA, 75 bp, synthetic construct
  source 1..75: mol_type = other DNA
tatcggtgcaatttatctgaccggtattttcatgacctggcgtagagcgcgtggctttattaaacaagagaaagt

SEQ ID NO: 839460 - DNA, 75 bp, synthetic construct
  source 1..75: mol_type = other DNA
gtaagttgttagctaaaattgatgaaaaacagttacaaatagatgagtttgaacgtattcagagagaacaaaatg

SEQ ID NO: 839461 - DNA, 75 bp, synthetic construct
  source 1..75: mol_type = other DNA
ttacaatagtcacgtctatgtgcagatgctgacgggcaggattggaagcgacgcagattccagcgctcaactaac

SEQ ID NO: 839462 - DNA, 75 bp, synthetic construct
  source 1..75: mol_type = other DNA
cggtcagcgtgatggcaggcaacggcgcaacgactgccccgacggtgaccactcagccggatggcacggtggaga

SEQ ID NO: 839463 - DNA, 75 bp, synthetic construct
  source 1..75: mol_type = other DNA
atttgaatgcgcaactgaagatggctggttggagcgatgccaattattcaaacaattatactatcaaaccaggtg

SEQ ID NO: 839464 - DNA, 75 bp, synthetic construct
  source 1..75: mol_type = other DNA
accagtcagacggcgggcaccagtgccgtcaccgcaaccatcaacagcagcagccagagccggaacgtgacgttt

SEQ ID NO: 839465 - DNA, 75 bp, synthetic construct
  source 1..75: mol_type = other DNA
tcaccgccagcatcaacagcagcagccagagccagagcgtgaagtttattgccgatgtcagcacggcgcagattg

SEQ ID NO: 839466 - DNA, 75 bp, synthetic construct
  source 1..75: mol_type = other DNA
gatcaatatgactactcattcgagcgtggtaaggatgcggtcaatcagtatttctcagcaactttcaagggaaca

SEQ ID NO: 839467 - DNA, 75 bp, synthetic construct
  source 1..75: mol_type = other DNA
cagtacagtcactgccagcatcaacagcagcagcctgagccggaacgtgacgtttgtcgccgatgtcaggacggc

SEQ ID NO: 839468 - DNA, 75 bp, synthetic construct
  source 1..75: mol_type = other DNA
ccccatcaagagatgattggttaacgcaacttgccgatgttgtgaccgttcctgatgaacttctgcgtcttttga

SEQ ID NO: 839469 - DNA, 75 bp, synthetic construct
  source 1..75: mol_type = other DNA
ggaaagttgattatataattcatgtctccaatgcaatgaaagaacattttgacaataaatattcaaataggaaaa

SEQ ID NO: 839470 - DNA, 75 bp, synthetic construct
  source 1..75: mol_type = other DNA
atagatgctaaaaccactcaatatgaatttaatttttttatacatttttttattataaataaaattctaagcaat

SEQ ID NO: 839471 - DNA, 75 bp, synthetic construct
  source 1..75: mol_type = other DNA
ggcgaaaaccccgactaccgtacattattcagcaatctttccgatcaggatggtggcgcaattgtcagtcaactg

SEQ ID NO: 839472 - DNA, 75 bp, synthetic construct
  source 1..75: mol_type = other DNA
cattaattgagcagatatatcacacctttcaccgttatccagtgccgaagcaatgtgtggtttgttgtgaatatt

SEQ ID NO: 839473 - DNA, 75 bp, synthetic construct
  source 1..75: mol_type = other DNA
aaagtggctgttgcggatgatgattgtgctctacgccctgtgcctgctgccgctgctgaccggttgcgccggtac

SEQ ID NO: 839474 - DNA, 75 bp, synthetic construct
  source 1..75: mol_type = other DNA
acggtgtctccgacggtcatcacagggccggacggtacggtggagatctctgtcaccagccagacggcgggaatc

SEQ ID NO: 839475 - DNA, 75 bp, synthetic construct
  source 1..75: mol_type = other DNA
cctgcacgtttctgagttcgggaagatatgcgccaagtatcctgacaaagcccgtgagatcgtcactggcgcgtt

SEQ ID NO: 839476 - DNA, 75 bp, synthetic construct
  source 1..75: mol_type = other DNA
ttagacttaaaaaaatgggtgttgaactctaaggacattagggttgtgaacaatgggtgcaactttttttatact

SEQ ID NO: 839477 - DNA, 75 bp, synthetic construct
  source 1..75: mol_type = other DNA
gataacattatattatatacatgctatgttgatagtgattgtcggaaaggtttacatgatattaaagctaggaaa

SEQ ID NO: 839478 - DNA, 75 bp, synthetic construct
  source 1..75: mol_type = other DNA
actgattgcgctaagcaatgctgagtctctacaacgccaggagttgagcgacaattttcataccattaaagagaa

SEQ ID NO: 839479 - DNA, 75 bp, synthetic construct
  source 1..75: mol_type = other DNA
ggaacagaatggaatatccaggggtatatggtctataccgttgtgctcattgtgatcggtggaactttatttacc

SEQ ID NO: 839480 - DNA, 75 bp, synthetic construct
  source 1..75: mol_type = other DNA
gacaaactgccgtcagagataaaggctgccaacccggccagcaatgattcatccggcgagctcgtttttaagaag

SEQ ID NO: 839481 - DNA, 75 bp, synthetic construct
  source 1..75: mol_type = other DNA
caacgactgccccgacggtcatcacagggccagacgggacggtggagagcagtgtcaccagccagacggcgggga

SEQ ID NO: 839482 - DNA, 75 bp, synthetic construct
  source 1..75: mol_type = other DNA
cccataatatgaaaaatacggattataattggacggctgggatttatggaattaatgttgatagtaatggagaag

SEQ ID NO: 839483 - DNA, 75 bp, synthetic construct
  source 1..75: mol_type = other DNA
acgtcacgtttatcgccgatgtcaggacggcgcagatcgcgagtctggaggtgaggcaggataactcagtggcag

SEQ ID NO: 839484 - DNA, 75 bp, synthetic construct
  source 1..75: mol_type = other DNA
acaggtcgcgcggctggcaacctgtacttccgcgtatgggctgaccttgattgggctgttatggaccatagcgca

SEQ ID NO: 839485 - DNA, 75 bp, synthetic construct
  source 1..75: mol_type = other DNA
catgctgaaacacagtgctatcgctctggaaaaagcgattctgtccaatgctgctaacactaacgctcgtgatgg

SEQ ID NO: 839486 - DNA, 75 bp, synthetic construct
  source 1..75: mol_type = other DNA
tattgacgaagaccgtgtaggtcgttgccttgtccaattctccaaagtaggccaactggctaatgaatgctttga

SEQ ID NO: 839487 - DNA, 75 bp, synthetic construct
  source 1..75: mol_type = other DNA
cggtgccgtgtgggaatccgcccaccttgccgggcgccggtgctgtgtggaaattcgcccatcttcatgacaaaa

SEQ ID NO: 839488 - DNA, 75 bp, synthetic construct
  source 1..75: mol_type = other DNA
ttctcgaggatgatgcggtaattaaaaacggggaaatggttaaaaccggtgagaactcaggaaagctcgctatca

SEQ ID NO: 839489 - DNA, 75 bp, synthetic construct
  source 1..75: mol_type = other DNA
atgggaatccgcccatcttgccgggcgccgctgtcgtgtggaaatccgcccaccttaccgggcgccggtgccgtg

SEQ ID NO: 839490 - DNA, 75 bp, synthetic construct
  source 1..75: mol_type = other DNA
tactacgatccgttgcaggggcggtatatcaccccggacccgattgggttgagaggtggatggaatatgtatcag

SEQ ID NO: 839491 - DNA, 75 bp, synthetic construct
  source 1..75: mol_type = other DNA
cactcattacggtcaaattacttatctacaaggtcgacgtatattccctgcgccaggccttgtgctgtatggcga

SEQ ID NO: 839492 - DNA, 75 bp, synthetic construct
  source 1..75: mol_type = other DNA
ggaaacaacgcaaatccgggcacccgtcgggatattccccaaagcccgggatgcgcatactctggcactctccgt

SEQ ID NO: 839493 - DNA, 75 bp, synthetic construct
  source 1..75: mol_type = other DNA
ggcactggagaaaacgggcggcaacaaaaccgaagccgcccgtcagttagggatcacgcgcaaaacgctcttggc

SEQ ID NO: 839494 - DNA, 75 bp, synthetic construct
  source 1..75: mol_type = other DNA
gcgccgcgttctctgctgacgacagtcacgacaatgacgacatccttgacacctggatggacgccattgacgaca

SEQ ID NO: 839495 - DNA, 75 bp, synthetic construct
  source 1..75: mol_type = other DNA
gagaaacaggctggtcaaggcctgataacaaccctcaagaagcgcaacagtattccggttaaagagatccctcga

SEQ ID NO: 839496 - DNA, 75 bp, synthetic construct
  source 1..75: mol_type = other DNA
atataacgccatgggtcattggatattgcactggtctcctggatgcagtgactcagacggaggctaacaggatgg

SEQ ID NO: 839497 - DNA, 75 bp, synthetic construct
  source 1..75: mol_type = other DNA
gccggaagagaaggcgcagctggaagcggcgaagcagaatgctgacaccctgaaggaagaagcgaacagtgccgt

SEQ ID NO: 839498 - DNA, 75 bp, synthetic construct
  source 1..75: mol_type = other DNA
tgttgttattggtgcaatcagtttatgctgctgttgagcgtgtcgaattatctgatgatgttgatcttaagttcg

SEQ ID NO: 839499 - DNA, 75 bp, synthetic construct
  source 1..75: mol_type = other DNA
gttcctaaaatgtggaataaaaaaggtactacaaatggaaaggtgagggtggagaaatttaattatgaaaaatga

SEQ ID NO: 839500 - DNA, 75 bp, synthetic construct
  source 1..75: mol_type = other DNA
gcaccgtgatgttcgaatggtggatcgtcttcctgtcagtggaatctcgtatgagaaactgaacaaagatatcaa

SEQ ID NO: 839501 - DNA, 75 bp, synthetic construct
  source 1..75: mol_type = other DNA
ggcgggtcgactgctaaatgaatacccggaaatgtctgccaatatgctgcgggcaatgctggtcaatcatgcttc

SEQ ID NO: 839502 - DNA, 75 bp, synthetic construct
  source 1..75: mol_type = other DNA
cgcggtatagcgtatttattagatacgttgtcaaggcagtacaatgtactctttgtcgtttctgcaggaaacttc

SEQ ID NO: 839503 - DNA, 75 bp, synthetic construct
  source 1..75: mol_type = other DNA
cctctggaaaagaataaaatgacatatgaaaataacaaaaaaacccatcagcagcatattgaaatacttacggcc

SEQ ID NO: 839504 - DNA, 75 bp, synthetic construct
  source 1..75: mol_type = other DNA
gcagagttagttggggagttagttactccagtaataaagaaaagtgattctattattctacaaaggattttaggt

SEQ ID NO: 839505 - DNA, 75 bp, synthetic construct
  source 1..75: mol_type = other DNA
gccatttaagccctgcaggtgaatatcaaccttcaccattcacgcggcatggaccttctgtgaaaggtgcattta

SEQ ID NO: 839506 - DNA, 75 bp, synthetic construct
  source 1..75: mol_type = other DNA
atgagtacgaccggtacggtcaacaaaccgccgttcaccgggaagaaggcatcagcacttacagcagttataacc

SEQ ID NO: 839507 - DNA, 75 bp, synthetic construct
  source 1..75: mol_type = other DNA
aggtgcgattggtggatttatctcatcctatctctatgcaatatttggatggaatgtagtgctgattagctgtgc

SEQ ID NO: 839508 - DNA, 75 bp, synthetic construct
  source 1..75: mol_type = other DNA
ggcacaccatcggaacgagacgggcgtattcagaccgtagattataacgagcaggatgtatttaatgtgcgcgta

SEQ ID NO: 839509 - DNA, 75 bp, synthetic construct
  source 1..75: mol_type = other DNA
ggcgggtcgactgttaaacgaatacccggaaatgtctgccagtatgttgcgggcgatgctggtcaatcatgcatc

SEQ ID NO: 839510 - DNA, 75 bp, synthetic construct
  source 1..75: mol_type = other DNA
accgctggcgaacggctgcgcgggcaaaccgattgttgagcgcggtaaagggccggaaggctggtcgccgctgtt

SEQ ID NO: 839511 - DNA, 75 bp, synthetic construct
  source 1..75: mol_type = other DNA
gagatggcgacgattctcggtaaaccggaagaagctaagcgctatcgccagttggcacagcagctcgcggactac

SEQ ID NO: 839512 - DNA, 75 bp, synthetic construct
  source 1..75: mol_type = other DNA
tcatcgatgtagtacgtggtcgctgggaccctgaagacctcctgaagaaagcagaagaggtctgggagaaatggc

SEQ ID NO: 839513 - DNA, 75 bp, synthetic construct
  source 1..75: mol_type = other DNA
gtgatattggttgtctggagattcagggggccagtctatgtagatacttcactgaagtcgttagaagctgaaaac

SEQ ID NO: 839514 - DNA, 75 bp, synthetic construct
  source 1..75: mol_type = other DNA
ttgttgaagactggttcaacgaaagctgtaaacgtatcggcgggcatctgcgttcagtttgccggtttatgaagg

SEQ ID NO: 839515 - DNA, 75 bp, synthetic construct
  source 1..75: mol_type = other DNA
acggcgtctgggcatcgcttagtggcgaccagttaaccggtaaaaatgtcgaagataactggcgtgtgcgctgga

SEQ ID NO: 839516 - DNA, 75 bp, synthetic construct
  source 1..75: mol_type = other DNA
tgggtctgaaggaaatgacgcagggaacgctgatccgtaagttatgtacatatacaacaactaatcctacaaggc

SEQ ID NO: 839517 - DNA, 75 bp, synthetic construct
  source 1..75: mol_type = other DNA
atggatgaatctgaactggcactggcctgtagtcgtcggggacttcacgctcaaatttattgcatcctccagatt

SEQ ID NO: 839518 - DNA, 75 bp, synthetic construct
  source 1..75: mol_type = other DNA
ttagcacttcgtgaaggtgccaaaagatggtcaattagcgaccccaaaattgttgaggattggtttaacgatagc

SEQ ID NO: 839519 - DNA, 75 bp, synthetic construct
  source 1..75: mol_type = other DNA
gtaagctggataaatccaaagcaacgggccgtattgatggcatggtcgcaatgacaatgtccgttggtgctgcta

SEQ ID NO: 839520 - DNA, 75 bp, synthetic construct
  source 1..75: mol_type = other DNA
atgctcaaacctcactacggaaccgcattagtttctcgcgaggacgttaaacccggcacagcaattctttacaac

SEQ ID NO: 839521 - DNA, 75 bp, synthetic construct
  source 1..75: mol_type = other DNA
ttcatttctatgagcatttcaggcgctggcggagcagtcgggatcagttgctgcatcgccaggggataacgccca

SEQ ID NO: 839522 - DNA, 75 bp, synthetic construct
  source 1..75: mol_type = other DNA
gagaaagcggcaaagaagctgaagcggaagcgatgctgcgtcagcaaccaccttccacgcgtattgacctcacgc

SEQ ID NO: 839523 - DNA, 75 bp, synthetic construct
  source 1..75: mol_type = other DNA
cgattgaaaccgcgtctgttgatgagttacaggcgttgcaaacacagcgtctgaaatggacgctcaaacacgcgt

SEQ ID NO: 839524 - DNA, 75 bp, synthetic construct
  source 1..75: mol_type = other DNA
agagaacggcaatcaaatgctcttttgaagctagtaatggctgcaaaaagagagataaaaaatggtcgtggaatg

SEQ ID NO: 839525 - DNA, 75 bp, synthetic construct
  source 1..75: mol_type = other DNA
tggttaagcttatttttttatgcataggcttgatgttcgctactgtagtaatggcctatttattagcgtcagtaa

SEQ ID NO: 839526 - DNA, 75 bp, synthetic construct
  source 1..75: mol_type = other DNA
ctcaatgccggtgaagagctctgggagcgtattcgtgagcaactgaaattaccagcgccggatgtggcggtactg

SEQ ID NO: 839527 - DNA, 75 bp, synthetic construct
  source 1..75: mol_type = other DNA
tgttcgatccttctggaaaagtacagggtcctaagctaaaagaagcgataaaaagccttagattagtagctttag

SEQ ID NO: 839528 - DNA, 75 bp, synthetic construct
  source 1..75: mol_type = other DNA
tttaaaaaaaatcaatcaacctaaaacagattatcgacgcgcaatgaatactggagacaactctaaacttgttga

SEQ ID NO: 839529 - DNA, 75 bp, synthetic construct
  source 1..75: mol_type = other DNA
atgcaaatggactggtatttatcgactcatattacgataatccgtctacgattaagggaagtattaatgcgcgcg

SEQ ID NO: 839530 - DNA, 75 bp, synthetic construct
  source 1..75: mol_type = other DNA
acccaacgcactatgcggatggttttcattgtaatgctcgatcgccactgcaaggttatgcaatgccgttcttac

SEQ ID NO: 839531 - DNA, 75 bp, synthetic construct
  source 1..75: mol_type = other DNA
agcctattacaccccgatcgacacctctacgctgattaacagccagtttcgcgaaattgacgctggcggcgtgtt

SEQ ID NO: 839532 - DNA, 75 bp, synthetic construct
  source 1..75: mol_type = other DNA
ggtgacctgtccagctacttcggcacattacatcaccggctgctgatgaaagcgctccgccgcaggagcagtgac

SEQ ID NO: 839533 - DNA, 75 bp, synthetic construct
  source 1..75: mol_type = other DNA
atacagttattcaaggaaagaataaaagcaagtataatatttatttgttctgatagatttatacatagcaaagaa

SEQ ID NO: 839534 - DNA, 75 bp, synthetic construct
  source 1..75: mol_type = other DNA
tgtcacctgaagcgtcattgtcgctgggcgtatggtttgcgcgtattactggactttcgatgttcctcgcctata

SEQ ID NO: 839535 - DNA, 75 bp, synthetic construct
  source 1..75: mol_type = other DNA
gtattttaagaagtgcgttgaaagttggagttatttcatctatttttgcccaaatggcaagggttaatttagtat

SEQ ID NO: 839536 - DNA, 75 bp, synthetic construct
  source 1..75: mol_type = other DNA
gcgaatagggatgaggcgattagatcagttacggcgtaaaacgcataatattgctgcgctaaaaattattgcccg

SEQ ID NO: 839537 - DNA, 75 bp, synthetic construct
  source 1..75: mol_type = other DNA
catatacaaatattgcactacaccatctcctagaagataagttttttgatgacaaatgttgttataacattaatg

SEQ ID NO: 839538 - DNA, 75 bp, synthetic construct
  source 1..75: mol_type = other DNA
actggatgagttttcgaaagagtggaaagacgccaacgataaatggaatgccatgtggggcgtcaaaattgagca

SEQ ID NO: 839539 - DNA, 75 bp, synthetic construct
  source 1..75: mol_type = other DNA
ggttctcggaaaagcggattaccgatatcaggcaggttgaaaccacagcccgctaccttggcacggggctgtact

SEQ ID NO: 839540 - DNA, 75 bp, synthetic construct
  source 1..75: mol_type = other DNA
cgtcacgattaatgagaactgtcagattaaggggaaactgtcagccaaccagattgaaggcgatatagtcaaaac

SEQ ID NO: 839541 - DNA, 75 bp, synthetic construct
  source 1..75: mol_type = other DNA
agaccggactgctggaaacgcagacggtggatttcacgctcgggtcacaggggctgcgtcacacacccggtgaca

SEQ ID NO: 839542 - DNA, 75 bp, synthetic construct
  source 1..75: mol_type = other DNA
accattaccagcggcggcaatccgccggtattttccctgacaccggacgggcggttgacggcgaaaaatgccgat

SEQ ID NO: 839543 - DNA, 75 bp, synthetic construct
  source 1..75: mol_type = other DNA
gggacgctcaacaacgtcacgattaatgagaactgtcagattaaggggaaactgtcagccaaccagattgaaggc

SEQ ID NO: 839544 - DNA, 75 bp, synthetic construct
  source 1..75: mol_type = other DNA
atcagggggcaggcaatatcaccgactgtacggtgattgtgaccaaaaaagccgcttccggcatcagtattcgtt

SEQ ID NO: 839545 - DNA, 75 bp, synthetic construct
  source 1..75: mol_type = other DNA
attaaaacggagctgctggagacgcagaccgtggatttcagcgtgggtgccgaagggcttcgccatgtgccgggt

SEQ ID NO: 839546 - DNA, 75 bp, synthetic construct
  source 1..75: mol_type = other DNA
ggttgagattttccatgaaccggcaactgatgtcagccgggtgttctcatcggtgatagatatgccggcagggcg

SEQ ID NO: 839547 - DNA, 75 bp, synthetic construct
  source 1..75: mol_type = other DNA
tcaggcccaccgtgccggactgtgggtgataaagaccggactgctggaaacgcagacggtggatttcacgctcgg

SEQ ID NO: 839548 - DNA, 75 bp, synthetic construct
  source 1..75: mol_type = other DNA
cacgattgagctgacaccgggctattttcagataacggcggtcccgcgtcttgcggtgtatgacccgacggtaca

SEQ ID NO: 839549 - DNA, 75 bp, synthetic construct
  source 1..75: mol_type = other DNA
tatgacgatcagccgtttgaccggcaaattgttattccggcggtggcattcagcggcgctaaacatgagagagag

SEQ ID NO: 839550 - DNA, 75 bp, synthetic construct
  source 1..75: mol_type = other DNA
gacttaaggtgaaagtgaaccgggttcctgacggcgttgcagaatacagtgtgtgggggctgaagttgccgacgt

SEQ ID NO: 839551 - DNA, 75 bp, synthetic construct
  source 1..75: mol_type = other DNA
ttcagtctgcgcctgaccaacggaagcggagaagacagccgtctggtgaccaccgccatcactgcggatacagag

SEQ ID NO: 839552 - DNA, 75 bp, synthetic construct
  source 1..75: mol_type = other DNA
ggtgaaagtgagccgtgttcctgacggcgttgctgaatacagcgtatgggggctgaagttgccgacgttgcgcca

SEQ ID NO: 839553 - DNA, 75 bp, synthetic construct
  source 1..75: mol_type = other DNA
gcgaacaactggacaccgacgacgtacatcagtgatttactggttgtggtgatgaaaaaatccacggcgggaatc

SEQ ID NO: 839554 - DNA, 75 bp, synthetic construct
  source 1..75: mol_type = other DNA
cagtttggcggtcagcagatgacggtgaactaccatatccgaggtcgcatcatcctggtgccgtcaaactatgac

SEQ ID NO: 839555 - DNA, 75 bp, synthetic construct
  source 1..75: mol_type = other DNA
gaccgtcaaatcattattccgcccattatctttaacggaatagcgtatagcgatccgggaagtggtaataacccg

SEQ ID NO: 839556 - DNA, 75 bp, synthetic construct
  source 1..75: mol_type = other DNA
ggacgaaacaccagaatttcaacagcccgaatcagcagtcgtactggtattccacctgtaagctgcaggtgctga

SEQ ID NO: 839557 - DNA, 75 bp, synthetic construct
  source 1..75: mol_type = other DNA
cggcaatcccccgacgttctccctgacgccggagggcaggctgacggcccgcaatgctgacatcagcggacatat

SEQ ID NO: 839558 - DNA, 75 bp, synthetic construct
  source 1..75: mol_type = other DNA
acctggctgcgctgtacatgctgaaggtgcagaaaactaaaaacggcattccgtatgttgccggtataggtgcgg

SEQ ID NO: 839559 - DNA, 75 bp, synthetic construct
  source 1..75: mol_type = other DNA
cgctcaacaacgtcacgattaatgagaactgtcagattaaggggaaactgtcagccaatcagattgaaggcgata

SEQ ID NO: 839560 - DNA, 75 bp, synthetic construct
  source 1..75: mol_type = other DNA
gaaggttcaaaaaacgaaagacggcattccctatgtggccgggattggtgcagggattgaggatactgatggcca

SEQ ID NO: 839561 - DNA, 75 bp, synthetic construct
  source 1..75: mol_type = other DNA
ggattgaggatactgatggccagtcactgagcaacatactgctgctggctgaccgtatcgcgatgataaatccgg

SEQ ID NO: 839562 - DNA, 75 bp, synthetic construct
  source 1..75: mol_type = other DNA
gacgcagattgataacggtcagcttgcgcctgacctggcggaaatcagaacgtccatcacggatgtcagtaatga

SEQ ID NO: 839563 - DNA, 75 bp, synthetic construct
  source 1..75: mol_type = other DNA
gcgcgctgggacacgccgaaggtggtgaagggggtgagctttatgcttcgcctgaccgtggcagcggatgacggc

SEQ ID NO: 839564 - DNA, 75 bp, synthetic construct
  source 1..75: mol_type = other DNA
cggattaagccggggacggatttctggttttatgtgcgcagcgtcaacctggtgggcaagtctgcgtttgtggaa

SEQ ID NO: 839565 - DNA, 75 bp, synthetic construct
  source 1..75: mol_type = other DNA
gtgcaaataactggacgccaacgaccagtatcagcgaccttcttgttgtcgtgatgaagaaatcaacagccggca

SEQ ID NO: 839566 - DNA, 75 bp, synthetic construct
  source 1..75: mol_type = other DNA
ccctgacggcatgcagagtcaggtgctgctggcggcggacaggattgcgatgattaatcctgcgaatggcaatac

SEQ ID NO: 839567 - DNA, 75 bp, synthetic construct
  source 1..75: mol_type = other DNA
tctgctgcaggccgatcgcattgcgatgattaccccggagaacggtaacaccacgccgctgtttgtggcgcaggg

SEQ ID NO: 839568 - DNA, 75 bp, synthetic construct
  source 1..75: mol_type = other DNA
cgctgatttacagtggcgttattgatatgcctgccggtcacggtcacatgacactggagttttcggtgtcagcat

SEQ ID NO: 839569 - DNA, 75 bp, synthetic construct
  source 1..75: mol_type = other DNA
ctgacgccggggtattttcagataacggcggtaccggtgctggcggtgtatgacccgacggtgcagtttgagttc

SEQ ID NO: 839570 - DNA, 75 bp, synthetic construct
  source 1..75: mol_type = other DNA
ggtgctgaaatttataaccgtaccgcgctggataatacgctgatttacagtggcgttattgatatgcctgccggt

SEQ ID NO: 839571 - DNA, 75 bp, synthetic construct
  source 1..75: mol_type = other DNA
aaggttcaggttgatacaaataataacctgaacagcatgtgggcagtgaagctgcagcagatgcaggacggacgc

SEQ ID NO: 839572 - DNA, 75 bp, synthetic construct
  source 1..75: mol_type = other DNA
ggctgcgtcacacacccggtgacattattgaaatctgtgataacgactatgccgggaccatgaccggcggacgta

SEQ ID NO: 839573 - DNA, 75 bp, synthetic construct
  source 1..75: mol_type = other DNA
ggcaccggagcggtggccatcagggaccattaccgtcaggatttatgacgatcagccttttgacaggcaaattgt

SEQ ID NO: 839574 - DNA, 75 bp, synthetic construct
  source 1..75: mol_type = other DNA
acgagaactgtcgggttctgggaaaattgtccgccaaccagattgaaggcgatctcgttaaaacagtgggcaaag

SEQ ID NO: 839575 - DNA, 75 bp, synthetic construct
  source 1..75: mol_type = other DNA
gccatgattattatttttacatccgcagtgtgaacaccgttggcaaatcggcatttgtggaggctgttggccagc

SEQ ID NO: 839576 - DNA, 75 bp, synthetic construct
  source 1..75: mol_type = other DNA
acagcacgccgttatttgtggcgcaggggaatcagctgttcatgaacgacgtgttcctgaaacgactgtttgcgg

SEQ ID NO: 839577 - DNA, 75 bp, synthetic construct
  source 1..75: mol_type = other DNA
acgactacgccgggaccctgaccggcggacgtgtcctgtccatcgacgccgccagccgcacactgacgctggacc

SEQ ID NO: 839578 - DNA, 75 bp, synthetic construct
  source 1..75: mol_type = other DNA
ctggcactgcgataacctgcttcgcgatcagttcacggaacggctggaatcaatggcaacggataactgtgcccg

SEQ ID NO: 839579 - DNA, 75 bp, synthetic construct
  source 1..75: mol_type = other DNA
ttcatcttttgccagtggtgccgttccggcggcatcacaaccgctggcggatgatcctgccattcgggccgtgtt

SEQ ID NO: 839580 - DNA, 75 bp, synthetic construct
  source 1..75: mol_type = other DNA
ccgggatatatgacacgcccggaagcatgtcagatgcacattttgaaatacttgcagcgctttctcccgttaaca

SEQ ID NO: 839581 - DNA, 75 bp, synthetic construct
  source 1..75: mol_type = other DNA
gatagtgcggaaaaacggtgctgaaatttataaccgtactgcgctggataatacgctgatttacagtggcgttat

SEQ ID NO: 839582 - DNA, 75 bp, synthetic construct
  source 1..75: mol_type = other DNA
tcacgattaacaagaactgccgggttctgggaaaactgtccgcgaaccagattgaaggcgatctcgttaaaacag

SEQ ID NO: 839583 - DNA, 75 bp, synthetic construct
  source 1..75: mol_type = other DNA
ccggttcgctgaacagtgtcacaccacctgccgtgcagcacctcacggtggcggtgagtgcctctgacggtcagt

SEQ ID NO: 839584 - DNA, 75 bp, synthetic construct
  source 1..75: mol_type = other DNA
gttcctgaagcgcctgacggccccgaccattaccagtggtggaaatccaccggcattttccctgacatcagacgg

SEQ ID NO: 839585 - DNA, 75 bp, synthetic construct
  source 1..75: mol_type = other DNA
acggaacggctggaatcaatggcaacggataactgtgcccgctgggtgttgtctgttgtgcgtcgggatctcggt

SEQ ID NO: 839586 - DNA, 75 bp, synthetic construct
  source 1..75: mol_type = other DNA
gtggcggacgcgctaccggaagcggtattacgtcgttcgctgggattaccggcggaaaaaatccgctccgtatac

SEQ ID NO: 839587 - DNA, 75 bp, synthetic construct
  source 1..75: mol_type = other DNA
cggcatgcagagtcaggtgctgctggcggcggacaggattgcgatgattaatcctgcgaatggcaacacaaagcc

SEQ ID NO: 839588 - DNA, 75 bp, synthetic construct
  source 1..75: mol_type = other DNA
attcccgaaaaaggctggtacgtggggtaacacggaaacaccaaacgggacggttacagtcaccatttacgatga

SEQ ID NO: 839589 - DNA, 75 bp, synthetic construct
  source 1..75: mol_type = other DNA
cagcggcggtaatcctccggcattttccctgacaccagacgggcgactgacggcgaaaaatgcggatatcagtgg

SEQ ID NO: 839590 - DNA, 75 bp, synthetic construct
  source 1..75: mol_type = other DNA
cgggtaatgcgcgcggtcaggcggtggtgaatatctccaacgcggccttcccgattctgatggcgcgtaatgata

SEQ ID NO: 839591 - DNA, 75 bp, synthetic construct
  source 1..75: mol_type = other DNA
gtggctgattcgtaatgacctggcggatgccttacctgaaagcgcagcccgtaaggcgctgagattaccgaaacc

SEQ ID NO: 839592 - DNA, 75 bp, synthetic construct
  source 1..75: mol_type = other DNA
acaccatgacgaactgcatgcggataccgtggcatttgaagagaagtatggctcccaactggagctgatatttcg

SEQ ID NO: 839593 - DNA, 75 bp, synthetic construct
  source 1..75: mol_type = other DNA
gacgctgtaactgcagctggcgttgaagtggctaagagcgaagttcgtctgccaaacggcgttctgcgtaccact

SEQ ID NO: 839594 - DNA, 75 bp, synthetic construct
  source 1..75: mol_type = other DNA
caatggcaacggataactgtgcccattgggtgttgtctgtagtccgtcgggatctcgattttaatgataaccatg

SEQ ID NO: 839595 - DNA, 75 bp, synthetic construct
  source 1..75: mol_type = other DNA
ggaaagccctgcgattgccggaaataaagcatcaaccagtgatgaaggagagcgatattgtgccggagccagcgg

SEQ ID NO: 839596 - DNA, 75 bp, synthetic construct
  source 1..75: mol_type = other DNA
cggccggtgcgaacaactggacgccgacaacgtacatcagtgatttactggttgtggtcatgaaaaaatccacag

SEQ ID NO: 839597 - DNA, 75 bp, synthetic construct
  source 1..75: mol_type = other DNA
gttcctgaaacgcctgacggctcccaccattaccagcggcggtaatcctccggcattttccctgacaccggacgg

SEQ ID NO: 839598 - DNA, 75 bp, synthetic construct
  source 1..75: mol_type = other DNA
ttttttcaaaggcgagatagggaaaagccatctggctcaggagttgtggacgcagattgataacggtcagcttgc

SEQ ID NO: 839599 - DNA, 75 bp, synthetic construct
  source 1..75: mol_type = other DNA
gctgctggcggcggacaggattgcgatgattaatcctgcgaatggcaatacaaagccgatgtttgttgggcaggg

SEQ ID NO: 839600 - DNA, 75 bp, synthetic construct
  source 1..75: mol_type = other DNA
cctccggcattttccctgacaccggacgggcggctgacggcgaaaaatgccgatatcagcggtaacgtgaatgcg

SEQ ID NO: 839601 - DNA, 75 bp, synthetic construct
  source 1..75: mol_type = other DNA
ttcacttaccgttcatattaaggacgatcatgcctttgacaggcagattataattcaaccaatcatgtacggtgc

SEQ ID NO: 839602 - DNA, 75 bp, synthetic construct
  source 1..75: mol_type = other DNA
taaatgactggtatcccacagcaagtatcagcgatttgctggttgtggtgatgaagaaagccaccgcaggcatca

SEQ ID NO: 839603 - DNA, 75 bp, synthetic construct
  source 1..75: mol_type = other DNA
cattttccctgacatcagacgggagactgacggcgaaaaatgcggatatcagtggcagtgtgaatgcgaactcag

SEQ ID NO: 839604 - DNA, 75 bp, synthetic construct
  source 1..75: mol_type = other DNA
aagctgcaggtgctgaagaacggggttgagattttccatgaaccggcaacggatgtcagccgggtgttctcatcg

SEQ ID NO: 839605 - DNA, 75 bp, synthetic construct
  source 1..75: mol_type = other DNA
agattgaaggcgacctggtgaagacggtggggaaagcctttccccggaataacagttatgccagcgggacggtaa

SEQ ID NO: 839606 - DNA, 75 bp, synthetic construct
  source 1..75: mol_type = other DNA
agtggccgggccagcaatgatgcagaagggtatctggggctgtttcgggaaaaaataggaaaactgcatctggct

SEQ ID NO: 839607 - DNA, 75 bp, synthetic construct
  source 1..75: mol_type = other DNA
gccaggaacgcggatatcagcggagcaattaccgcgaataccggcacgctcaataatgtcaccattaacgagaac

SEQ ID NO: 839608 - DNA, 75 bp, synthetic construct
  source 1..75: mol_type = other DNA
catcagagggaaactgtctgcaaaccagattgaaggcgatctcgttaaaacagtgggtaaggctttccctcgtga

SEQ ID NO: 839609 - DNA, 75 bp, synthetic construct
  source 1..75: mol_type = other DNA
gcacaggtccgccagtacgtggataaaaaagggagtgaaattacctcgaccacggataaaaagctgggtgaccag

SEQ ID NO: 839610 - DNA, 75 bp, synthetic construct
  source 1..75: mol_type = other DNA
aacctggtgggaaaatctgcttttgtggaagccagcgggcagcccagcaatgatggtgaagggtatctggaaatt

SEQ ID NO: 839611 - DNA, 75 bp, synthetic construct
  source 1..75: mol_type = other DNA
agcggcggtaatcctccggcattttccctgacaccagacgggcgactgacggcgaaaaatgcggatatcagtggc

SEQ ID NO: 839612 - DNA, 75 bp, synthetic construct
  source 1..75: mol_type = other DNA
tgttattgatatgcctgccggtcacggtcacatgacactggagttttcggtgtcagcatggctggtaaataactg

SEQ ID NO: 839613 - DNA, 75 bp, synthetic construct
  source 1..75: mol_type = other DNA
aatcagtccacgacggatgctcagggcgtattttcctcagttatagatatgcctgccggacaggggacgctgaca

SEQ ID NO: 839614 - DNA, 75 bp, synthetic construct
  source 1..75: mol_type = other DNA
actgtcagccaaccagattgaaggtgatattgtcaaaacggtcagcaagtctttcccccgcacgagcacttatgc

SEQ ID NO: 839615 - DNA, 75 bp, synthetic construct
  source 1..75: mol_type = other DNA
gtgaccaccgccatcaccgcagacacggagcaccgtttcagtggcctgccactgggggaatacaccctgacggtg

SEQ ID NO: 839616 - DNA, 75 bp, synthetic construct
  source 1..75: mol_type = other DNA
tggtaagggaacggatgccagactggtgaccaccgccatcaccgcagacacggagcaccgtttcagtggcctgcc

SEQ ID NO: 839617 - DNA, 75 bp, synthetic construct
  source 1..75: mol_type = other DNA
ttattatttttacatccgcagtgtgaacaccgttggcaaatcggcatttgtggaggctgttggccagccgagtga

SEQ ID NO: 839618 - DNA, 75 bp, synthetic construct
  source 1..75: mol_type = other DNA
ctgattaaaactgaactgctggagacgcagaccgtggatttcagcgtaggggcggaagggcttcgccatgtaccg

SEQ ID NO: 839619 - DNA, 75 bp, synthetic construct
  source 1..75: mol_type = other DNA
ctgattaaaactgaactgctggagacgcagaccgtggatttcagcgtgggcgcagaagggcttcgccatgtaccg

SEQ ID NO: 839620 - DNA, 75 bp, synthetic construct
  source 1..75: mol_type = other DNA
ctgattaaaactgaactgctggagacgcagaccgtggatttcagcgtgggagccgaagggcttcgccatgtaccg

SEQ ID NO: 839621 - DNA, 75 bp, synthetic construct
  source 1..75: mol_type = other DNA
ctgattaaaactgaactgctggagacgcagaccgtggatttcagcgtcggtgctgaagggcttcgccatgtaccg

SEQ ID NO: 839622 - DNA, 75 bp, synthetic construct
  source 1..75: mol_type = other DNA
ttgttattccagcggtggctttctgcggtgccagacatgagcgggagaatagcgatacttattcgtcatgccgcc

SEQ ID NO: 839623 - DNA, 75 bp, synthetic construct
  source 1..75: mol_type = other DNA
taccacgctgataagcctggttgacggacagggcaatccggtcagcgtggaggtacagtccgtcaccgacggcgt

SEQ ID NO: 839624 - DNA, 75 bp, synthetic construct
  source 1..75: mol_type = other DNA
tgaactaccatatccgcggtcgcatcatccaggtgccgtcaaactatgacccggaaaaacgcacgtatagtggta

SEQ ID NO: 839625 - DNA, 75 bp, synthetic construct
  source 1..75: mol_type = other DNA
gacggcatgcagagtcaggtgctgctggcagcagacaggattgcgatgattaatcctgcgaatggcaacacaaag

SEQ ID NO: 839626 - DNA, 75 bp, synthetic construct
  source 1..75: mol_type = other DNA
ttctggttctcggaaaaacggattgcggatatcaggcaggttgaaaccagcgcgcgttatcttggtacggcactg

SEQ ID NO: 839627 - DNA, 75 bp, synthetic construct
  source 1..75: mol_type = other DNA
cagggcgtattttcttcagttatagatatgcctgccggacaggggacgctgacactgacattcaccgtatcttca

SEQ ID NO: 839628 - DNA, 75 bp, synthetic construct
  source 1..75: mol_type = other DNA
accccgctgacggacacggacggtaaccccgtgatacacggtgtgaccgccgtctggcgtgccggggagcaggag

SEQ ID NO: 839629 - DNA, 75 bp, synthetic construct
  source 1..75: mol_type = other DNA
taccacgctgataagcctggttgacgggcagggtattccggtcagcgtggaggtacagtccgtcaccgacggcgt

SEQ ID NO: 839630 - DNA, 75 bp, synthetic construct
  source 1..75: mol_type = other DNA
taccacgctgataagcctggttgacggccaggggactccggtcagcgtggaggtacagtccgtcaccgacggcgt

SEQ ID NO: 839631 - DNA, 75 bp, synthetic construct
  source 1..75: mol_type = other DNA
taccacgctgataagcctggttgacggtcagggtagtccggtcagcgtggaggtacagtccgtcaccgacggcgt

SEQ ID NO: 839632 - DNA, 75 bp, synthetic construct
  source 1..75: mol_type = other DNA
agccgtgttcctgacggcgttgccgaatacagcgtgtgggggctgaagctgccgacgctgcgccagcgcctgttc

SEQ ID NO: 839633 - DNA, 75 bp, synthetic construct
  source 1..75: mol_type = other DNA
ggaagtgaaatacgacacgccgataacccggaccatcacgtcggcaaacatcgaccgtctgcgcctgaccttcgg

SEQ ID NO: 839634 - DNA, 75 bp, synthetic construct
  source 1..75: mol_type = other DNA
aagcggattaccgatatcaggcaggttgaaaccacagcccgctatcttggcacggcgctgtactggatagctgcc

SEQ ID NO: 839635 - DNA, 75 bp, synthetic construct
  source 1..75: mol_type = other DNA
accgctaaaaatgcggatatcagtggtagtgtgaatgcgaactcaggaacgctcaacaatgtcacgattaaccag

SEQ ID NO: 839636 - DNA, 75 bp, synthetic construct
  source 1..75: mol_type = other DNA
cagtggcgctaagcatgagagagagcatactgatatttactcctcatgccgtctgatagtgcggaaaaacggtgc

SEQ ID NO: 839637 - DNA, 75 bp, synthetic construct
  source 1..75: mol_type = other DNA
aagctttcccccgggactcccgtgcaccggagcggtggccatcagggaccattaccgtcagggtttatgacgatc

SEQ ID NO: 839638 - DNA, 75 bp, synthetic construct
  source 1..75: mol_type = other DNA
ggacgctaacgataaatggaatgccatgtggggcgtcaaaattgagcagaccaaagacggcaaacattatgtcgc

SEQ ID NO: 839639 - DNA, 75 bp, synthetic construct
  source 1..75: mol_type = other DNA
ggtacagtttgagttctggttttcggagacaaaaatcgcagacacatctcaggtggaaacctctgcccgttatct

SEQ ID NO: 839640 - DNA, 75 bp, synthetic construct
  source 1..75: mol_type = other DNA
gctgcagaccgggtggcatttattaacccggcgaatggtaacaccactcctgcactggtcacacagggcggacag

SEQ ID NO: 839641 - DNA, 75 bp, synthetic construct
  source 1..75: mol_type = other DNA
atggtgctaataactggacgccaacgaccagtatcagcgaccttcttgttgttgtgatgaagaaatctacagccg

SEQ ID NO: 839642 - DNA, 75 bp, synthetic construct
  source 1..75: mol_type = other DNA
gaatgcagagtcaggtgctgctggcggcagacaggattgcgatgattaatcctgcgaatggcaacacaaagccga

SEQ ID NO: 839643 - DNA, 75 bp, synthetic construct
  source 1..75: mol_type = other DNA
gcggtgagtatcacgtcatccggcaaccccccgacgttttccctgacgccggaagggaagctgacagccaggaac

SEQ ID NO: 839644 - DNA, 75 bp, synthetic construct
  source 1..75: mol_type = other DNA
gaaagttcaggttgatacaaataataacctgaacagcatgtgggccgtgaaactgcagcagatgcaggacggacg

SEQ ID NO: 839645 - DNA, 75 bp, synthetic construct
  source 1..75: mol_type = other DNA
atgaaatcacacagacggtcagtaaaacgctggaagaccagagcgccaccattcagcagatacagcgcgtgcaga

SEQ ID NO: 839646 - DNA, 75 bp, synthetic construct
  source 1..75: mol_type = other DNA
tcacagtttacgatgaccagggcttcgaccgacagattatcattcccccggtactgtttcgcgggacgaaacacc

SEQ ID NO: 839647 - DNA, 75 bp, synthetic construct
  source 1..75: mol_type = other DNA
atttcacgctcgggtctcaggggctgcggcacacacccggtgacattattgaaatctgtgataatgactatgccg

SEQ ID NO: 839648 - DNA, 75 bp, synthetic construct
  source 1..75: mol_type = other DNA
tttcacaccttgataaagacgcgattctgttaaggctgcaaacccttgtatgggaaaaggttaaagtgtcgtcag

SEQ ID NO: 839649 - DNA, 75 bp, synthetic construct
  source 1..75: mol_type = other DNA
atcgcagatacatctcaggtggaaacctctgcccgttatctggggaccggcagtcagtggactgtccagggaagc

SEQ ID NO: 839650 - DNA, 75 bp, synthetic construct
  source 1..75: mol_type = other DNA
aaggacatcaccattaagggtaaaaccacttcacagtatctggcctcggtggtggtggataacctgccgccgcgc

SEQ ID NO: 839651 - DNA, 75 bp, synthetic construct
  source 1..75: mol_type = other DNA
cggtgcagcacgtaccggaaaaagaagccatcgtggataacggtgcccgctttgagccgcagtcaggttccctga

SEQ ID NO: 839652 - DNA, 75 bp, synthetic construct
  source 1..75: mol_type = other DNA
tattcgtcatgccgcctgatagtgaagaaaaacggggctgaaatttataaccgaacggctctggataatactctg

SEQ ID NO: 839653 - DNA, 75 bp, synthetic construct
  source 1..75: mol_type = other DNA
gatcataactttgaccgccagattattattccgcccattatttttaacggtatagcgtatgacgatccggggagc

SEQ ID NO: 839654 - DNA, 75 bp, synthetic construct
  source 1..75: mol_type = other DNA
cgctcaacaatgtcacgattaatcagaactgccggattctgggaaaactgtcagccaaccagattgaaggcgata

SEQ ID NO: 839655 - DNA, 75 bp, synthetic construct
  source 1..75: mol_type = other DNA
acgtgttcctgaaacgcctgacggcccccaccattaccagtggtggaaatccaccggcattttccctgacaccgg

SEQ ID NO: 839656 - DNA, 75 bp, synthetic construct
  source 1..75: mol_type = other DNA
tcaaagggagaccggaatccgtcggaagttcgcctgctggttcagatacagcgtaatggtggctgggtgacggaa

SEQ ID NO: 839657 - DNA, 75 bp, synthetic construct
  source 1..75: mol_type = other DNA
ggcagtgaagctgcagcagatgcaggacggacgcctttatattgcgggtatcggtgccggtattgagaacacccc

SEQ ID NO: 839658 - DNA, 75 bp, synthetic construct
  source 1..75: mol_type = other DNA
ccgggggatgtcattgaaatctgcgatgatgactatgcgggtatcagcaccggcgggcgcgtgctggcggtgaac

SEQ ID NO: 839659 - DNA, 75 bp, synthetic construct
  source 1..75: mol_type = other DNA
atgataaatccggagaacggcaacagcacgccgttatttgtggcgcaggggaatcagctgttcatgaacgacgtg

SEQ ID NO: 839660 - DNA, 75 bp, synthetic construct
  source 1..75: mol_type = other DNA
ctgatagataacagccagcttgcagatgagatggcggagatgaagaccaccatcaccgaaacccgcaatgaaatc

SEQ ID NO: 839661 - DNA, 75 bp, synthetic construct
  source 1..75: mol_type = other DNA
ggattgaggatactgatggccagccactgagcaacatactgctgctggctgaccgtatcgcgatgataaacccgg

SEQ ID NO: 839662 - DNA, 75 bp, synthetic construct
  source 1..75: mol_type = other DNA
tccggattaacgcgccagcaaaacccgccaccattgaactgacgccggggtattttcagataacggcggtcccgc

SEQ ID NO: 839663 - DNA, 75 bp, synthetic construct
  source 1..75: mol_type = other DNA
gggtttatgacgatcagccgtttgaccggcaaattgttattccggcggtggcattcagcggtgccagacatgagc

SEQ ID NO: 839664 - DNA, 75 bp, synthetic construct
  source 1..75: mol_type = other DNA
tgccgtcactgcgtcgtcgcctgttccgctgtgtctccatccgggaaaacacggacggcacctttgccatcacgg

SEQ ID NO: 839665 - DNA, 75 bp, synthetic construct
  source 1..75: mol_type = other DNA
agaaatgacgccttttttattgcagaaaagcgagaggtaattatgcgtaaattatgtgctgttattctgtccgca

SEQ ID NO: 839666 - DNA, 75 bp, synthetic construct
  source 1..75: mol_type = other DNA
cggtggccatcaggaaccattaccgtcagggtttatgacgatcagccgtttgaccggcagattgttattccggcg

SEQ ID NO: 839667 - DNA, 75 bp, synthetic construct
  source 1..75: mol_type = other DNA
tgcgaatggcaacacaaagccgatgtttgttggtcagggcgatcagatattcatgaacgaagtgttcctgaaata

SEQ ID NO: 839668 - DNA, 75 bp, synthetic construct
  source 1..75: mol_type = other DNA
ccccgggactcccgtgcaccggagcggtggccatcaggaaccattaccgtcagggtttatgacgatcagccgttt

SEQ ID NO: 839669 - DNA, 75 bp, synthetic construct
  source 1..75: mol_type = other DNA
cagcaatgatgcagaagggtatctggactttttcagaggagaaataggaaaaacgcatctggctcaggggttgtg

SEQ ID NO: 839670 - DNA, 75 bp, synthetic construct
  source 1..75: mol_type = other DNA
ttcctgaaacgactgtttgcggtgagcatcacctcgtccggcaatcccccagcattttccctgacgccggaagga

SEQ ID NO: 839671 - DNA, 75 bp, synthetic construct
  source 1..75: mol_type = other DNA
ggaacggtggccatcagggaccattaccgtcagggtttatgacgatcagccgtttgaccggcaaattgttattcc

SEQ ID NO: 839672 - DNA, 75 bp, synthetic construct
  source 1..75: mol_type = other DNA
gataaacagctacggccagcagggcgaacctgccaccaccacgttccggattaacgccccggcagcaccggacag

SEQ ID NO: 839673 - DNA, 75 bp, synthetic construct
  source 1..75: mol_type = other DNA
aacggggcccgctttgagccgctctccggttcactgaacagcgtcatcccgccggcagtgcagcacctcacggtg

SEQ ID NO: 839674 - DNA, 75 bp, synthetic construct
  source 1..75: mol_type = other DNA
cggcgtcagaacgggagttttggcagttcacgtatcagtaaccttcaggcgatagtggtgaagaaaaacagcgcg

SEQ ID NO: 839675 - DNA, 75 bp, synthetic construct
  source 1..75: mol_type = other DNA
aacggggccagctttgagccgcagtcaggcaccctgaacagcgtcatccctccggcagtgcagcacctgacggtg

SEQ ID NO: 839676 - DNA, 75 bp, synthetic construct
  source 1..75: mol_type = other DNA
tgaactaccatatccgcggtcgcatcatccaggtgccgtcaaactatgacccggaaaaacgcacgtacagcggta

SEQ ID NO: 839677 - DNA, 75 bp, synthetic construct
  source 1..75: mol_type = other DNA
gcacaggggatgtgggagctgattgataacagccagcttgatgatgagatggcggagatgaagaccaccatcacc

SEQ ID NO: 839678 - DNA, 75 bp, synthetic construct
  source 1..75: mol_type = other DNA
gctggcgctgggaaattacaggctgacagtccgggcggtaaatgcatggggacagccggtgcacatacccattcg

SEQ ID NO: 839679 - DNA, 75 bp, synthetic construct
  source 1..75: mol_type = other DNA
ccgtatgttgccggtattggtgcggggattgaggatgcagatggccagccactgagcaatattctgctgcaggct

SEQ ID NO: 839680 - DNA, 75 bp, synthetic construct
  source 1..75: mol_type = other DNA
ccacctcacagttcctggcctcggtgattctggataatctgcctccccgcccctttaacatccggatggtcaggg

SEQ ID NO: 839681 - DNA, 75 bp, synthetic construct
  source 1..75: mol_type = other DNA
agaaactaattaaagaaatcagggagcgaatcggcagcctggacgtgcgagacaatattgagcgccgggcttatg

SEQ ID NO: 839682 - DNA, 75 bp, synthetic construct
  source 1..75: mol_type = other DNA
cggagagcggcaacagcacgccgttatttgtggcgcaggggaatcagctgttcatgaacgacgtgttcctgaagc

SEQ ID NO: 839683 - DNA, 75 bp, synthetic construct
  source 1..75: mol_type = other DNA
ctgttccgctgtgtggccatccgggaaaacacggacggcacctttgccatcacggcggtgcagcacgtaccggaa

SEQ ID NO: 839684 - DNA, 75 bp, synthetic construct
  source 1..75: mol_type = other DNA
gagttctggttttcggaggcaaaaattgcagacgccgcacaggtggaaacgtctgcccgttatcttgggacaggc

SEQ ID NO: 839685 - DNA, 75 bp, synthetic construct
  source 1..75: mol_type = other DNA
gggaccattaccgtcagggtttatgacgatcagccgtttgaccggcagattgttattccggcggtggcattcagt

SEQ ID NO: 839686 - DNA, 75 bp, synthetic construct
  source 1..75: mol_type = other DNA
gaaggtaaaagtgagccgtgttcctgacggcgttgccggatacagcgtgtgggggctgaagccgggcgttacagt

SEQ ID NO: 839687 - DNA, 75 bp, synthetic construct
  source 1..75: mol_type = other DNA
ggattttttcaaaggcgagatagggaaaacccatctggctcaggagctgtggacgcagattgataacggtcagct

SEQ ID NO: 839688 - DNA, 75 bp, synthetic construct
  source 1..75: mol_type = other DNA
tgacggcccccaccattaccagcggcggtaatcctccggcattttccctgacatcagacgggagactgacggcga

SEQ ID NO: 839689 - DNA, 75 bp, synthetic construct
  source 1..75: mol_type = other DNA
atgaattaattgatacaactcaggcaaggccaattcagtattgcattaatgggacgtggtataacgcggggagta

SEQ ID NO: 839690 - DNA, 75 bp, synthetic construct
  source 1..75: mol_type = other DNA
gacggtgaagaagcactggcgataaagcaacagacggatccggttattgagttttgccagtttctgaattttctg

SEQ ID NO: 839691 - DNA, 75 bp, synthetic construct
  source 1..75: mol_type = other DNA
ccagtagcaggggaaaacatccgcgataatgcgccaaatttccataaatggcttgaacatgctgcaagaaaagac

SEQ ID NO: 839692 - DNA, 75 bp, synthetic construct
  source 1..75: mol_type = other DNA
gctgatcggcacctgccgactgaacgatatcgatccggaagcgtatctgcgccatatcctgagcgtactgccgga

SEQ ID NO: 839693 - DNA, 75 bp, synthetic construct
  source 1..75: mol_type = other DNA
gcccgccagggtgtcgaactgagccgggccttactctccaactgggttgacgcgtgctgccagttaatgacaccg

SEQ ID NO: 839694 - DNA, 75 bp, synthetic construct
  source 1..75: mol_type = other DNA
cctacggcacctccgcaggcagtgctggctactggtttttacagctgctcgataaagtcacgccctcacagtggg

SEQ ID NO: 839695 - DNA, 75 bp, synthetic construct
  source 1..75: mol_type = other DNA
ggcctgctgacgtacctgacaaacctttatttcaagattaaagaagataagcgtaaggctgcgagaggtgaataa

SEQ ID NO: 839696 - DNA, 75 bp, synthetic construct
  source 1..75: mol_type = other DNA
ggggagtctggttctgggcttgctgacgtatctgacaaacctttatttcaagattaaagaagataagcgtaaggc

SEQ ID NO: 839697 - DNA, 75 bp, synthetic construct
  source 1..75: mol_type = other DNA
tggacaaagtctctccgtcccagtgggtggcaataggtgtgctggggagtctgctgtttggcctgctgacgtatc

SEQ ID NO: 839698 - DNA, 75 bp, synthetic construct
  source 1..75: mol_type = other DNA
cctatggcacatcggcaggtaatgccggcttctgggcactgcagttactcgataaagtaactccgtcacagtggg

SEQ ID NO: 839699 - DNA, 75 bp, synthetic construct
  source 1..75: mol_type = other DNA
ggggagtctgctgtttgggctgctgacatatctgacgaacctgtatttcaggattaaagaagaccggcgtaaggc

SEQ ID NO: 839700 - DNA, 75 bp, synthetic construct
  source 1..75: mol_type = other DNA
ggggagtctgctgtttggtctgctgacatatctgacgaacctgtatttcaaaatcagagaggaccggcgtaaggc

SEQ ID NO: 839701 - DNA, 75 bp, synthetic construct
  source 1..75: mol_type = other DNA
ggtttttggcctgctgacatatctgacaaacctttatttcaagattaaagaagacaggcgtaaggttgcgagaag

SEQ ID NO: 839702 - DNA, 75 bp, synthetic construct
  source 1..75: mol_type = other DNA
gaagccgcgtgtatggctcatgcccggagaaaaatccacgatgtgcatgcaagagcgcccacctacatcaccacg

SEQ ID NO: 839703 - DNA, 75 bp, synthetic construct
  source 1..75: mol_type = other DNA
cagtaaccatactgccaggctgaataacgagcaacggtcagcagtacgcgaacgtctctctgagcgcggagcaag

SEQ ID NO: 839704 - DNA, 75 bp, synthetic construct
  source 1..75: mol_type = other DNA
tattcagtccgcgtcgcctgagcagcgccaggcggttcgcgagaaaatgcagactaacccgcagaatcaacagca

SEQ ID NO: 839705 - DNA, 75 bp, synthetic construct
  source 1..75: mol_type = other DNA
cgtagttattgcaggtgctattggtgcatttatcgatgataaatttgttgatgagttgaatcacaagatcataaa

SEQ ID NO: 839706 - DNA, 75 bp, synthetic construct
  source 1..75: mol_type = other DNA
aaagaaaatgtatttatcagttgggtgatgcgattgctgattatcgtcagtctcgcctggacggggtgggccatt

SEQ ID NO: 839707 - DNA, 75 bp, synthetic construct
  source 1..75: mol_type = other DNA
accctggtcttttatctgctgaccgttattgccttctggatgacccgtaatcagattgcgcaacaggtatcagca

SEQ ID NO: 839708 - DNA, 75 bp, synthetic construct
  source 1..75: mol_type = other DNA
ctggtcttttatctgctgaccgttatttccttctggatgatccgtaatcagattgcgcaacaggtagcagcatga

SEQ ID NO: 839709 - DNA, 75 bp, synthetic construct
  source 1..75: mol_type = other DNA
ttatggcgcccgaaccggatgatgatgacgaaacatgggtgctgttcaatgccatgaacggtaaccgcgctgaaa

SEQ ID NO: 839710 - DNA, 75 bp, synthetic construct
  source 1..75: mol_type = other DNA
ctggcagagcactacttcggtgcaagccaggattgcgaagactcaattctggtgcgtgtgcatcgcggaaccgga

SEQ ID NO: 839711 - DNA, 75 bp, synthetic construct
  source 1..75: mol_type = other DNA
caaaatgcgaagttgcaggccgatgctgcgcactctgcgctaaaacagaccgatgacctgaaaccggtctttgat

SEQ ID NO: 839712 - DNA, 75 bp, synthetic construct
  source 1..75: mol_type = other DNA
tggcgcagagcttaccagtgaagctgcagggatggtcgcctgcctgatggcttacagccaccacgcctgccgcac

SEQ ID NO: 839713 - DNA, 75 bp, synthetic construct
  source 1..75: mol_type = other DNA
caaaatgcgaagttgcaggcagatgccgcgcactctgcgctaaaacaagctgacgatctgaaaccggtctttgat

SEQ ID NO: 839714 - DNA, 75 bp, synthetic construct
  source 1..75: mol_type = other DNA
tttcgctttgacaatatcgttagcgaggcagaaaaggacaaggatttgccggagaaggtcgcggctgaaatccct

SEQ ID NO: 839715 - DNA, 75 bp, synthetic construct
  source 1..75: mol_type = other DNA
ttccccgcacacgccggagaactggatcaccacgcacaacggcattgagtacacgccaccagcacccggggagaa

SEQ ID NO: 839716 - DNA, 75 bp, synthetic construct
  source 1..75: mol_type = other DNA
gtgagagcattgttgactcctgaaattgccccgcgaatggggatcgtactgttcagaccaggttcagagctgatg

SEQ ID NO: 839717 - DNA, 75 bp, synthetic construct
  source 1..75: mol_type = other DNA
gctggaatcaatggcaacggataactgtgcccgctgggtgttgtctgttgtgcgtcgggatctcggttttgatga

SEQ ID NO: 839718 - DNA, 75 bp, synthetic construct
  source 1..75: mol_type = other DNA
ggtgatgaagcactggcgataaagcagcagacggatccggttattgagttttgccagttccttaactttctggaa

SEQ ID NO: 839719 - DNA, 75 bp, synthetic construct
  source 1..75: mol_type = other DNA
cagctcctcgataaagtctccccatctcaatgggcggccattggtgtgctcggtagcctcatgtttggtttgctg

SEQ ID NO: 839720 - DNA, 75 bp, synthetic construct
  source 1..75: mol_type = other DNA
ctggggagtctgctgtttgggctgctgacatatctgactaacctgtatttcaaaatcagagaggaccgtcgtaag

SEQ ID NO: 839721 - DNA, 75 bp, synthetic construct
  source 1..75: mol_type = other DNA
ctgccagtggccgcatggtgactaccatcacagtgaaactgtcatacatcgttacggcaccggcgcgatggtgtt

SEQ ID NO: 839722 - DNA, 75 bp, synthetic construct
  source 1..75: mol_type = other DNA
gtgcgggtattacttcgacctgttccggtaccggaactcggtctggttatcgttaagccaggccgtgaatccatg

SEQ ID NO: 839723 - DNA, 75 bp, synthetic construct
  source 1..75: mol_type = other DNA
gaaaaacacggcagccagctgttgttgctgattcgttttttaatgcacgcgagaaattcgggtgtcctgaagtgg

SEQ ID NO: 839724 - DNA, 75 bp, synthetic construct
  source 1..75: mol_type = other DNA
gcccgtaagctggcagacctgattgaggcatgggagccacctgaacactggttcagcggcatcggcaaagacgaa

SEQ ID NO: 839725 - DNA, 75 bp, synthetic construct
  source 1..75: mol_type = other DNA
atctctggctgaattatcctggtgggcggtccgcaatcaggtggcggacgcgctaccggaagcggtattacgtcg

SEQ ID NO: 839726 - DNA, 75 bp, synthetic construct
  source 1..75: mol_type = other DNA
taagcggtacgcaggagcgtgaattatctctggctgaattatcctggtgggcggtccgcaatcaggtggcggacg

SEQ ID NO: 839727 - DNA, 75 bp, synthetic construct
  source 1..75: mol_type = other DNA
gtgtggcttgggccaaatcagcttgccgaacttgatgcactgaaaattgttccggatgggaaaaagcgcgtaagg

SEQ ID NO: 839728 - DNA, 75 bp, synthetic construct
  source 1..75: mol_type = other DNA
cacagtgggctgcaatcggtgtgctgggtagcttggtatttggcctgctgacgtacctgacaaacctttatttca

SEQ ID NO: 839729 - DNA, 75 bp, synthetic construct
  source 1..75: mol_type = other DNA
ggggagtctgctgtttggtctgctgacgtacctgacgaacctgtattttaaaatcagagaggatcggcgcagggc

SEQ ID NO: 839730 - DNA, 75 bp, synthetic construct
  source 1..75: mol_type = other DNA
ggggagtctgctgtttggcctgctgacgtatctgactaacctgtatttcaaaatcagagaggaccgccgtaaggc

SEQ ID NO: 839731 - DNA, 75 bp, synthetic construct
  source 1..75: mol_type = other DNA
tggcaataggtgtgctggggagtctgctgtttggcctgctgacgtatctgactaacctgtatttcaaaatcagag

SEQ ID NO: 839732 - DNA, 75 bp, synthetic construct
  source 1..75: mol_type = other DNA
ctgctgtttggtctgctgacgtacctgacgaacctgtatttcaaaatcagagaggacaggcgtaaggcggcacgg

SEQ ID NO: 839733 - DNA, 75 bp, synthetic construct
  source 1..75: mol_type = other DNA
gccgcaaaagtttacggacatgaatatattacgcggaaagttaagggggtaacgcagactaacgcaataacaaca

SEQ ID NO: 839734 - DNA, 75 bp, synthetic construct
  source 1..75: mol_type = other DNA
gggaagtctggcgctgggctttctgacttatctgacaaatctgtacttcaagataaaagaggaccggcgcaaggc

SEQ ID NO: 839735 - DNA, 75 bp, synthetic construct
  source 1..75: mol_type = other DNA
atgaaatccatggataagttaacaacgggcatcgcctacagcacctctgcaggcagtgctggctactggttttta

SEQ ID NO: 839736 - DNA, 75 bp, synthetic construct
  source 1..75: mol_type = other DNA
tttggcttgctgacgtatctgacaaacctttatttcaagattaaagaagacaagcgtaaggctgcacggggagag

SEQ ID NO: 839737 - DNA, 75 bp, synthetic construct
  source 1..75: mol_type = other DNA
accggagaaggtcgcggctgaaatccccgtgattatccgcagattgctggcaaactttgctgatccagaaaaggc

SEQ ID NO: 839738 - DNA, 75 bp, synthetic construct
  source 1..75: mol_type = other DNA
ataggcgtgctggggagtctgctgtttgggctgctgacatatctgactaacctgtatttcaaaatcagagaggac

SEQ ID NO: 839739 - DNA, 75 bp, synthetic construct
  source 1..75: mol_type = other DNA
gtgtgtcctatggttcatcggcggtgggaacgggttactggctgtttcagttgctggataaggtgacgccttcac

SEQ ID NO: 839740 - DNA, 75 bp, synthetic construct
  source 1..75: mol_type = other DNA
atgaaaacattgtctcagaacaccacctcttcagcctgtgcaccggagactggcctgcaacaactggttgccacc

SEQ ID NO: 839741 - DNA, 75 bp, synthetic construct
  source 1..75: mol_type = other DNA
taccgcctgcctgatgacgtacagccatcacgcctgtcgtacagaaaattatgccatgacggtccactattaccg

SEQ ID NO: 839742 - DNA, 75 bp, synthetic construct
  source 1..75: mol_type = other DNA
tcagggcgtggaactgagccgcgccacgctggggcgctggaccagtgccgttgctgaactgctggagccgctgta

SEQ ID NO: 839743 - DNA, 75 bp, synthetic construct
  source 1..75: mol_type = other DNA
atacatgaaaacattgtctcagaacactacctcttcggcctgtgcaccggagactggcctgcaacaactggttgc

SEQ ID NO: 839744 - DNA, 75 bp, synthetic construct
  source 1..75: mol_type = other DNA
tgatgcgattgctgattgtcgtaagtctcgcctggacggggtgggctattaccctagtcttttatctactgaccg

SEQ ID NO: 839745 - DNA, 75 bp, synthetic construct
  source 1..75: mol_type = other DNA
tcaccctgaccgtcgcgggcgtaaccctgacctttgagccgaacaagacggcatttaacaacctcatcaacgaaa

SEQ ID NO: 839746 - DNA, 75 bp, synthetic construct
  source 1..75: mol_type = other DNA
aatcgacaacaacattgcagagaacgccttacggggagtggccgtaggccggaaaaactggctctgtgtgtcacg

SEQ ID NO: 839747 - DNA, 75 bp, synthetic construct
  source 1..75: mol_type = other DNA
ccccgtatcttcggctggatggaccgtctgtgtgaagactactgcgggggtatctggaatctgtacaccctgaac

SEQ ID NO: 839748 - DNA, 75 bp, synthetic construct
  source 1..75: mol_type = other DNA
tgggcggcgtggatattacttttgagccgaaccagaccgcttataacaaattcattaacgaaatggcgatggata

SEQ ID NO: 839749 - DNA, 75 bp, synthetic construct
  source 1..75: mol_type = other DNA
ctgaaacagtggggtggcctgaacgtgtactgcagtaatggctgggtggaaatcgacaacaacatcgcagagaac

SEQ ID NO: 839750 - DNA, 75 bp, synthetic construct
  source 1..75: mol_type = other DNA
ataataatgctgcggaaagagcgcttcgtgcagtctgtctcggaaagaaaaactttatgttctttggcagcgatc

SEQ ID NO: 839751 - DNA, 75 bp, synthetic construct
  source 1..75: mol_type = other DNA
ggtccaggatatcagtggcgtgctcgccgtcttcgcagagcatcgtcaggaccgcaacggcccgtatgtcgtatt

SEQ ID NO: 839752 - DNA, 75 bp, synthetic construct
  source 1..75: mol_type = other DNA
cgtacggagtgttatgccatgacggttcattattaccggctgcgggattatgccctgcagcatccggaatgcagc

SEQ ID NO: 839753 - DNA, 75 bp, synthetic construct
  source 1..75: mol_type = other DNA
ctggccgtgtttgctgaacgccgtaaggacagttttggtccgtatgtccggctgatgaacgtcactctgaactga

SEQ ID NO: 839754 - DNA, 75 bp, synthetic construct
  source 1..75: mol_type = other DNA
cgtccggcgtttgggtagccggtttgctgacatgggcggtaattccggtagcactggctgcgttaattaagaatg

SEQ ID NO: 839755 - DNA, 75 bp, synthetic construct
  source 1..75: mol_type = other DNA
atgagtcagaaatacctcattcgcatcgcagagctggaaaggttgcactctgagcaggctgaagccctccgtcag

SEQ ID NO: 839756 - DNA, 75 bp, synthetic construct
  source 1..75: mol_type = other DNA
gcactttggcctcattccacagtgggtgcccctggagccccgtatcttcggctggatggaccgtctgtgtgaaga

SEQ ID NO: 839757 - DNA, 75 bp, synthetic construct
  source 1..75: mol_type = other DNA
agtacaggatattcccggtgtgctggccgtgtttgctgaacgccttaaggacagttttggtccgtatgtccggct

SEQ ID NO: 839758 - DNA, 75 bp, synthetic construct
  source 1..75: mol_type = other DNA
ggcatcccgtctttttccgttctgtaccggcaaataccgctggcacggcagtgctgaagcgtataccagtcgtga

SEQ ID NO: 839759 - DNA, 75 bp, synthetic construct
  source 1..75: mol_type = other DNA
ccacaccttctgtttccgtggccgctgcatcagggaataaccagtctcaactggttgccactcccgtccctgatg

SEQ ID NO: 839760 - DNA, 75 bp, synthetic construct
  source 1..75: mol_type = other DNA
atgtgatgtgtcagagcaactggagcttatcagcagcgcctttaaggttatcgaaacacaacatccgaaactggc

SEQ ID NO: 839761 - DNA, 75 bp, synthetic construct
  source 1..75: mol_type = other DNA
ccccggcggtctggttcgcgtacagtccggaccggaaaggtatccatccacaaaatcacctggccggttacagcg

SEQ ID NO: 839762 - DNA, 75 bp, synthetic construct
  source 1..75: mol_type = other DNA
accctggtcttttatctgctgaccgttattgccttctggatgatccgtaatcagattgcacaacaggtagcagca

SEQ ID NO: 839763 - DNA, 75 bp, synthetic construct
  source 1..75: mol_type = other DNA
ccgtgtcttcggctggatggaccgtctgtgcgaagactactgcggtggtatctggaatctgtacaccctgaacaa

SEQ ID NO: 839764 - DNA, 75 bp, synthetic construct
  source 1..75: mol_type = other DNA
cgattgctgattgtcgtaagtctcgcctggacggggtgggctattaccctggtcttttatctacttatctactga

SEQ ID NO: 839765 - DNA, 75 bp, synthetic construct
  source 1..75: mol_type = other DNA
gttgacgcgtgctgccagttaatgacaccggtgaatgatgccctgtaccgttatgtaatgaacacccgcaaggtt

SEQ ID NO: 839766 - DNA, 75 bp, synthetic construct
  source 1..75: mol_type = other DNA
attaccgttgctgcttcagcttaatgaaacgcatagatccgccatgctttttcagcaaatacgctgccatttgcg

SEQ ID NO: 839767 - DNA, 75 bp, synthetic construct
  source 1..75: mol_type = other DNA
gagccccgtgtcttcggctggatggaccgtctgtgcgaagactactgcggtggtatctggaatctgtacaccctg

SEQ ID NO: 839768 - DNA, 75 bp, synthetic construct
  source 1..75: mol_type = other DNA
gcatcagcttctggccgcagcactttggcctcattccacagtgggtcaccctggatccccgtgtcttcggctgga

SEQ ID NO: 839769 - DNA, 75 bp, synthetic construct
  source 1..75: mol_type = other DNA
ccatccgccctgcgccagtcttcagcccgtaaaccgttaccggcctcacttccacgtgaaagccgggttatccgg

SEQ ID NO: 839770 - DNA, 75 bp, synthetic construct
  source 1..75: mol_type = other DNA
gctggatggaccgtctgtgtgaagactactgcggtggtatctggagtctgtataccctgaacaacggtggcgcat

SEQ ID NO: 839771 - DNA, 75 bp, synthetic construct
  source 1..75: mol_type = other DNA
catgcctgtcgtacagagaattatgccatgacggttcattattatcggctgcgggattatgccctgcagcatccg

SEQ ID NO: 839772 - DNA, 75 bp, synthetic construct
  source 1..75: mol_type = other DNA
tggaccgtctgtgcgaagactactgcggaggcatctggaatctgtacaccctgaacaacggtggggcatttatgg

SEQ ID NO: 839773 - DNA, 75 bp, synthetic construct
  source 1..75: mol_type = other DNA
tggaccgtctgtgcgaagactactgcggaggcatctggaatctgtacaccctgaacaacggaggtgcatttatgg

SEQ ID NO: 839774 - DNA, 75 bp, synthetic construct
  source 1..75: mol_type = other DNA
tggaccgtctgtgcgaagactactgcggaggtatctggaatctgtacaccctgaacaacgggggagcatttatgg

SEQ ID NO: 839775 - DNA, 75 bp, synthetic construct
  source 1..75: mol_type = other DNA
gcatcagcttctggccgcagcaatttggcctcattccacagtgggttaccctggacccccgtgtcttcggctgga

SEQ ID NO: 839776 - DNA, 75 bp, synthetic construct
  source 1..75: mol_type = other DNA
agagaataatccgcctcagttggttgccagcctcgtccctgatgaacagcgcatcagcttctggccgcaagcatt

SEQ ID NO: 839777 - DNA, 75 bp, synthetic construct
  source 1..75: mol_type = other DNA
tggaccgtctgtgcgaagactactgcggagggatctggaatctgtacaccctgaacaacggtggcgcatttatgg

SEQ ID NO: 839778 - DNA, 75 bp, synthetic construct
  source 1..75: mol_type = other DNA
caggcaccggtgccttcaaaacccattgcacgcagttatgccggagaggggcttctggcccatgttgtcaccggg

SEQ ID NO: 839779 - DNA, 75 bp, synthetic construct
  source 1..75: mol_type = other DNA
atatccccgttccggtccaggagccgggcagtggtaaaacaaggactgcccggctgtgggtctacgtccgtgatg

SEQ ID NO: 839780 - DNA, 75 bp, synthetic construct
  source 1..75: mol_type = other DNA
caggcaccggtgccttcaaaacccattgcacgcagttatgccggcgcggggcttctggcccatgttgtcaccggg

SEQ ID NO: 839781 - DNA, 75 bp, synthetic construct
  source 1..75: mol_type = other DNA
aagcaggatgctgggctcatgcgcggcgcaaaatccacgatgtatatatcagtaccaaaagcgcgacggcggaag

SEQ ID NO: 839782 - DNA, 75 bp, synthetic construct
  source 1..75: mol_type = other DNA
tgcccggagtgtggcggtgagctggattatctgggggaagtcagcgctgaacagctggaactggtgagcagtgcc

SEQ ID NO: 839783 - DNA, 75 bp, synthetic construct
  source 1..75: mol_type = other DNA
tgtggttcgcttacagcccggacaggaaaggcatccatccgcagactcatcttgcttgcttcagcggtgtgctgc

SEQ ID NO: 839784 - DNA, 75 bp, synthetic construct
  source 1..75: mol_type = other DNA
ttgaaatccctggaaagctggttgcgtgaaaagatgaagaccctgttcttcggctctggccatggtggtgagcgg

SEQ ID NO: 839785 - DNA, 75 bp, synthetic construct
  source 1..75: mol_type = other DNA
ggttcacactgacgacataccagtaaaagtgctggcaccgggcagaaaaaaggcaaaaacaggacgcatctggac

SEQ ID NO: 839786 - DNA, 75 bp, synthetic construct
  source 1..75: mol_type = other DNA
atgctgggctcatgcgcggcgcaaaatccacgatgtatatatcagtactaaaagcgcgacggcggaagaagcact

SEQ ID NO: 839787 - DNA, 75 bp, synthetic construct
  source 1..75: mol_type = other DNA
cgcgacgcaaaatccacgatgtatatatcagtaccaaaagcgcgacagcggaagaagccctgaaactaatcggtg

SEQ ID NO: 839788 - DNA, 75 bp, synthetic construct
  source 1..75: mol_type = other DNA
cagggcgtatctggacgtatgtccgggatgatcgcaatgtgggttcgtcatctcctccggcggtctggttcgcgt

SEQ ID NO: 839789 - DNA, 75 bp, synthetic construct
  source 1..75: mol_type = other DNA
tgcaggcggatgcattcagcggttacgatcggctgttcagtgccgaacgtgaaggtggtgcactgacagaagttg

SEQ ID NO: 839790 - DNA, 75 bp, synthetic construct
  source 1..75: mol_type = other DNA
gtgaaatacaccgtctggagtctgaagaaagctgttgcccggagtgtggcggtgagctggattatctgggggaag

SEQ ID NO: 839791 - DNA, 75 bp, synthetic construct
  source 1..75: mol_type = other DNA
ggagagcagaccgccaccagcatattgaaacagcgcacaaaaaatcttgcaccgttgcctcacgcccaccagcaa

SEQ ID NO: 839792 - DNA, 75 bp, synthetic construct
  source 1..75: mol_type = other DNA
gcgaccccgtggaaattaacccgaaatatgaaaagcgtttcacggcggtaatcagggcggtggtgctggcgacca

SEQ ID NO: 839793 - DNA, 75 bp, synthetic construct
  source 1..75: mol_type = other DNA
tgttacgcccaaaacgtcgccgctgggttaacgaaaagtacacgtgctgggttaagaggcagccgtgtgcatgtt

SEQ ID NO: 839794 - DNA, 75 bp, synthetic construct
  source 1..75: mol_type = other DNA
tgcatgcggataccgtggcatttgaagagaagtatggctcccagctggagctgatatttcgttttatcgatcgtg

SEQ ID NO: 839795 - DNA, 75 bp, synthetic construct
  source 1..75: mol_type = other DNA
gtggaaagtctgctgatgatcctcaccacctgataggtcacggtcagggaggaatggggacaaaaacgcatgacc

SEQ ID NO: 839796 - DNA, 75 bp, synthetic construct
  source 1..75: mol_type = other DNA
cctgtggtatttgaatcgaaatacggtgaccagctggtcctggtgtttcgggttatagatcgtgcgctggcaatc

SEQ ID NO: 839797 - DNA, 75 bp, synthetic construct
  source 1..75: mol_type = other DNA
caccacaggaaaagacggtggtcagcattgccgttgatcctgagactccggaatctttcatgaaacgacctaaac

SEQ ID NO: 839798 - DNA, 75 bp, synthetic construct
  source 1..75: mol_type = other DNA
caccacaggaaaagacggtggtcagcattgccgttgatccagagtctccggaatctttcatgaaacgacctaaac

SEQ ID NO: 839799 - DNA, 75 bp, synthetic construct
  source 1..75: mol_type = other DNA
tcatgaaacgacctaaacgtcgccgctgggtaaatgagaaatacacacgctgggtaaagacacagccgtgtgcgt

SEQ ID NO: 839800 - DNA, 75 bp, synthetic construct
  source 1..75: mol_type = other DNA
agcatcatccaggataaggcgaaaaaggtgctggcgctgaaagtggatccggagtcgccggagtcttttatgtta

SEQ ID NO: 839801 - DNA, 75 bp, synthetic construct
  source 1..75: mol_type = other DNA
ttgtgacaatgccggaactgtgctggtggctggttcgtaatgacttggcggatgccttaccggaaagtgcagccc

SEQ ID NO: 839802 - DNA, 75 bp, synthetic construct
  source 1..75: mol_type = other DNA
gcagcccgtaaggcactgagattaccaagcctgttgtgccgtctgtcacccgggaaagtgaccttgtgccttcgg

SEQ ID NO: 839803 - DNA, 75 bp, synthetic construct
  source 1..75: mol_type = other DNA
catcacagcgaaaccgtcattcaccgttacggtaccggcgcgatggtgttgtgctggcactgcgacaaccagctg

SEQ ID NO: 839804 - DNA, 75 bp, synthetic construct
  source 1..75: mol_type = other DNA
ggcaacttgctcatcaaaacctgtcagcatggatgattgacgtcatcggtcacgcaataagcggtacgcaggagc

SEQ ID NO: 839805 - DNA, 75 bp, synthetic construct
  source 1..75: mol_type = other DNA
gtgcgggtattgcttcgaccggttccggtaccggaacttgggctggtggtgctaaaaccgggtcgtgaatccatg

SEQ ID NO: 839806 - DNA, 75 bp, synthetic construct
  source 1..75: mol_type = other DNA
taatctgccgtccggggtcgttcctgccgttcgccagccgctggaggacgataaagcatttctgccatttttcag

SEQ ID NO: 839807 - DNA, 75 bp, synthetic construct
  source 1..75: mol_type = other DNA
atgtcagcattccataacggcagaatactggtggagccggaatcaaaaagcatgcgtaatctgccgtccggggtc

SEQ ID NO: 839808 - DNA, 75 bp, synthetic construct
  source 1..75: mol_type = other DNA
gtgcgggtattacttcgacctgttctggtgccggaacttggggtggttatcgttaagccaggtcgtgaatccatg

SEQ ID NO: 839809 - DNA, 75 bp, synthetic construct
  source 1..75: mol_type = other DNA
gggaattatcgctggctgaattatcctggtgggcgctctgcaatcaggtagcggacgcactaccggaggcagtat

SEQ ID NO: 839810 - DNA, 75 bp, synthetic construct
  source 1..75: mol_type = other DNA
tggtggagcctgaaccgaaaagcatgcgcggtctgccgtccggagtcgtccctgccgttcgccagccgctggcgg

SEQ ID NO: 839811 - DNA, 75 bp, synthetic construct
  source 1..75: mol_type = other DNA
cgtgaccagacatccgaatcactcgggcaacttgctcatcaaaacctgtcagcatggatgattgacgtcatcggt

SEQ ID NO: 839812 - DNA, 75 bp, synthetic construct
  source 1..75: mol_type = other DNA
tactcgccattgcccttacaggctgtgataacaaaaaagatgagatcggttgttcttcggaaataacccagtcag

SEQ ID NO: 839813 - DNA, 75 bp, synthetic construct
  source 1..75: mol_type = other DNA
taatctgccgtccggggtcgttcctgccgttcgccagccgctggaggatgataaagcattcctgccatttttcag

SEQ ID NO: 839814 - DNA, 75 bp, synthetic construct
  source 1..75: mol_type = other DNA
taatctgccgtccggggtcgttcctgccgttcgccagccgctggaggaagataaagcattactgccttttttcag

SEQ ID NO: 839815 - DNA, 75 bp, synthetic construct
  source 1..75: mol_type = other DNA
gagaaatacacacgctgggtgaagacacagccgtgtgcgtgttgtggtaagccagccgacgatccccatcacctg

SEQ ID NO: 839816 - DNA, 75 bp, synthetic construct
  source 1..75: mol_type = other DNA
tcatgaagcggcctaaacgtcgccgctgggtgaatgagaaatacacgcgctgggtaaagacacagccgtgtacat

SEQ ID NO: 839817 - DNA, 75 bp, synthetic construct
  source 1..75: mol_type = other DNA
taatctgccgtccggggtcgttcctgccgttcgccagccgctgggggatgagaaagcatttctgccctttttcag

SEQ ID NO: 839818 - DNA, 75 bp, synthetic construct
  source 1..75: mol_type = other DNA
taatctgccgtccggggtcgttcctgccgttcgccagccgctgggggatgaaaaaacatttctgccgtttttcag

SEQ ID NO: 839819 - DNA, 75 bp, synthetic construct
  source 1..75: mol_type = other DNA
actttaccgaccctgagaaggcacgggctttactactggaacagcgtgacggagatgaagcactggcgataaagc

SEQ ID NO: 839820 - DNA, 75 bp, synthetic construct
  source 1..75: mol_type = other DNA
actgcgacaaccagctgcgtgaccagacatccgaatcactcgagcaacttgctcatcaaaacctgtcagcatgga

SEQ ID NO: 839821 - DNA, 75 bp, synthetic construct
  source 1..75: mol_type = other DNA
agcgacatcgtaccgggagagcagaccgccaccagcatactgaaacagcgcacaaaaaatcttgcgccgctgcct

SEQ ID NO: 839822 - DNA, 75 bp, synthetic construct
  source 1..75: mol_type = other DNA
cctaaacgtcgccgttgggttaatgagaaatacacgcgctgggtaaagacacagccgtgtgcgtgttgtggtaag

SEQ ID NO: 839823 - DNA, 75 bp, synthetic construct
  source 1..75: mol_type = other DNA
tccgtcacgcaataagcggtacgcaggagcgggaattatctttggctgaattatcctggtgggcggtctgcaatc

SEQ ID NO: 839824 - DNA, 75 bp, synthetic construct
  source 1..75: mol_type = other DNA
tggctgaattatcctggtgggcggtccgcaatcaggtggcggacgcgctaccggaagcggtattacgtcgttcgc

SEQ ID NO: 839825 - DNA, 75 bp, synthetic construct
  source 1..75: mol_type = other DNA
aaacacggcagccagctgttgttgctgattcgttttttaatgcacgcgagaaattcgggtgttttgaagtggaaa

SEQ ID NO: 839826 - DNA, 75 bp, synthetic construct
  source 1..75: mol_type = other DNA
cctgccgtgcgccagccgctcgcggaagataaatcattactgccatttttcagcgatgagcgggtgattcgtgct

SEQ ID NO: 839827 - DNA, 75 bp, synthetic construct
  source 1..75: mol_type = other DNA
ccacctgataggccacggtcagggtggaatgggtacaaaagcgcatgacctttttgtgttgcctttgtgcagaaa

SEQ ID NO: 839828 - DNA, 75 bp, synthetic construct
  source 1..75: mol_type = other DNA
gatcagttcacggagcggctggaatcaatggcaacggataactgtgcccgttgggtgttgtctgtagtccgtcgg

SEQ ID NO: 839829 - DNA, 75 bp, synthetic construct
  source 1..75: mol_type = other DNA
gcggtctgccgtccggagtcgttcctgccgttcgccagccgctggcagaggataaaacattactgccatttttca

SEQ ID NO: 839830 - DNA, 75 bp, synthetic construct
  source 1..75: mol_type = other DNA
ggacctgactgaaatcaggacgtccattacgaatgtcagcaatgaaatcacgcaaaccgtcaataaaaaactgga

SEQ ID NO: 839831 - DNA, 75 bp, synthetic construct
  source 1..75: mol_type = other DNA
aaaaagcgtgctgctgaacggtacgccggtcctggacagcgaggggaagacaaacttttccggtgttacggtggt

SEQ ID NO: 839832 - DNA, 75 bp, synthetic construct
  source 1..75: mol_type = other DNA
gtgtggcttgggccaaatcagcttgccgaacttgatgcactgaaaattgttccggatggaaaaaaacgcgtaagg

SEQ ID NO: 839833 - DNA, 75 bp, synthetic construct
  source 1..75: mol_type = other DNA
acgctcaacaatgtcacgattaacgagaactgtcgggttctgggaaaactgtccgcgaaccagattgaaggcgat

SEQ ID NO: 839834 - DNA, 75 bp, synthetic construct
  source 1..75: mol_type = other DNA
gtgattgatgccatcagcgaagggccggtttatggtccggtggacggattaaaaagcgtgtttctgaacggtacg

SEQ ID NO: 839835 - DNA, 75 bp, synthetic construct
  source 1..75: mol_type = other DNA
ccagtgctggacagtgaggggaataccaatatctccggcgtcacggtggtgttccgggccggtgagcaggagcag

SEQ ID NO: 839836 - DNA, 75 bp, synthetic construct
  source 1..75: mol_type = other DNA
tgccgttcgccagccgctggcagaggataaaacattactgccatttttcagcgatgagcgggttattcgtgcagc

SEQ ID NO: 839837 - DNA, 75 bp, synthetic construct
  source 1..75: mol_type = other DNA
tctgtatcggcatggttgacaaatggttggtatcccaccgcaagtatcagcgatttgctggttgtggtgatgaaa

SEQ ID NO: 839838 - DNA, 75 bp, synthetic construct
  source 1..75: mol_type = other DNA
gagttatcgctggccgaattatcctggtgggcggcctgcaatcaggtggtggatgcactacctgaggcagtagcg

SEQ ID NO: 839839 - DNA, 75 bp, synthetic construct
  source 1..75: mol_type = other DNA
gaatctttcatgaaacgacctaaacgtcgccgctgggtaaatgagaaatacacacgctgggtaaagacacagccg

SEQ ID NO: 839840 - DNA, 75 bp, synthetic construct
  source 1..75: mol_type = other DNA
cggtagcggaacttggactggtggtgctaaagccgggccgtgaatccatgaaggtatttcataaccctcgagtac

SEQ ID NO: 839841 - DNA, 75 bp, synthetic construct
  source 1..75: mol_type = other DNA
tgtgcgtgttgtggtcaaccagccgacgacccccatcacctgattggtcacggtcagggtggaatgggaacaaag

SEQ ID NO: 839842 - DNA, 75 bp, synthetic construct
  source 1..75: mol_type = other DNA
cgcttccggagtctgtattgcgtcgttcgctgggattaccagcggaaaaaatccgctccgtataccgtgagagtg

SEQ ID NO: 839843 - DNA, 75 bp, synthetic construct
  source 1..75: mol_type = other DNA
caccacaggaaaagacggtagtaagcatcgccgttgatccggagtccccggaatctttcatgaaacggcctaaac

SEQ ID NO: 839844 - DNA, 75 bp, synthetic construct
  source 1..75: mol_type = other DNA
gtgagggtattagtgactcctgaaattgctcaccgtctggggattgtacttttcaggcccggtcctgatgcgatg

SEQ ID NO: 839845 - DNA, 75 bp, synthetic construct
  source 1..75: mol_type = other DNA
tgtgcgtgttgtggtaagccagcggacgatcctcatcatctgattggtcatggtcagggtggaatgggaacaaaa

SEQ ID NO: 839846 - DNA, 75 bp, synthetic construct
  source 1..75: mol_type = other DNA
ggaaaaaatccgctctgtgtaccgcgagagcgacatcataccgggagagcagacagccaccagcatactgaagca

SEQ ID NO: 839847 - DNA, 75 bp, synthetic construct
  source 1..75: mol_type = other DNA
gctggcggcgctggcgcactgtctgactggctcctgcgtcatgttaaatcctgccagtggcctcatggagactat

SEQ ID NO: 839848 - DNA, 75 bp, synthetic construct
  source 1..75: mol_type = other DNA
ccgcctccagcatcctgaagcagcggacaaaaaacatagcaccaccgcctcacgcccaccagcaacaaaccacgc

SEQ ID NO: 839849 - DNA, 75 bp, synthetic construct
  source 1..75: mol_type = other DNA
tgtgcgtgttgtggtcagccagccaacgatccccatcacctgattggtcatggtcagggtggaatgggaacaaaa

SEQ ID NO: 839850 - DNA, 75 bp, synthetic construct
  source 1..75: mol_type = other DNA
catgcaatgaatggcacgcaggagcgggaactgtcgctggcagagttatgctggtgggcggtttgtcatcaggtg

SEQ ID NO: 839851 - DNA, 75 bp, synthetic construct
  source 1..75: mol_type = other DNA
attttcacgctaccgttgtgccgggagcatcacaacgaacttcatgctgatccgctggcatttgaagaaaagcat

SEQ ID NO: 839852 - DNA, 75 bp, synthetic construct
  source 1..75: mol_type = other DNA
gaaaccgtcattcaccgttatggtaccggcgcaatggtgttgtgctggcactgcgacaaccagttgcgtgaccag

SEQ ID NO: 839853 - DNA, 75 bp, synthetic construct
  source 1..75: mol_type = other DNA
gcgcacaaaaaatatgtgctacgctcacgccacagcaacagaactcaccacaggaaaagacgtgtcagtattgcc

SEQ ID NO: 839854 - DNA, 75 bp, synthetic construct
  source 1..75: mol_type = other DNA
atgttacgccccaaacgtcgccgctgggttaatgaaaagtacacgcgctgggttaagacgcagccgtgcgcatgt

SEQ ID NO: 839855 - DNA, 75 bp, synthetic construct
  source 1..75: mol_type = other DNA
catccgaatcactcgagcaacttgctcatcaaaacctgtcagcatggatgattgacgtcatcggtcacgcaataa

SEQ ID NO: 839856 - DNA, 75 bp, synthetic construct
  source 1..75: mol_type = other DNA
tgttacgaccaaaacgtcgccgctgggttaatgaaaagtacacgcgctgggttaagacacagccgtgtgcatgtt

SEQ ID NO: 839857 - DNA, 75 bp, synthetic construct
  source 1..75: mol_type = other DNA
aatggtggcgctggtgcactgtctgactggctgttgcgtcatgtcaaatcctgccagtggcctcatggtgactac

SEQ ID NO: 839858 - DNA, 75 bp, synthetic construct
  source 1..75: mol_type = other DNA
ttgtaccggagctcggtctggttatcgttaagccaggccgggaatcaatgtcggtattccataacggcagggtac

SEQ ID NO: 839859 - DNA, 75 bp, synthetic construct
  source 1..75: mol_type = other DNA
ggaaaaaatccgctccgtataccgtgaaagcgacatcgtaccgggagagcagaccgccaccagcatactgaagca

SEQ ID NO: 839860 - DNA, 75 bp, synthetic construct
  source 1..75: mol_type = other DNA
gctggcggtgctggtgcgctgtctgactggctgttacgccacgttaaatcctgccagtggccacacggcgattat

SEQ ID NO: 839861 - DNA, 75 bp, synthetic construct
  source 1..75: mol_type = other DNA
agcctggatgattgatgtcatccgccatgcaataagcggtgcgcaggagcgcgaattatctctggctgaattatc

SEQ ID NO: 839862 - DNA, 75 bp, synthetic construct
  source 1..75: mol_type = other DNA
cactcgagcaacttgctcatcaaaacttgtcagcatggatgattgacgtcatccgtcacgcaatcagcggtacgc

SEQ ID NO: 839863 - DNA, 75 bp, synthetic construct
  source 1..75: mol_type = other DNA
gatgatttgtttgttattccgctgtgccgtaaatgtcatcacgaactgcacgccggggtaaaagattttgaagaa

SEQ ID NO: 839864 - DNA, 75 bp, synthetic construct
  source 1..75: mol_type = other DNA
gaatctttcatgaaacgacctaaacgtcgccgctgggttaacgagaaatacacgcgctgggtaaagacacagccg

SEQ ID NO: 839865 - DNA, 75 bp, synthetic construct
  source 1..75: mol_type = other DNA
cctgccgttctccagccgcttgtggatgataaatcatttctgccttttttcagttacgtacgtgtgattcgtgct

SEQ ID NO: 839866 - DNA, 75 bp, synthetic construct
  source 1..75: mol_type = other DNA
tggtggagccggaaccgaaaaacatgcgcggtctgccgtccggagtcgttcctgccgttcgccagccgctggcag

SEQ ID NO: 839867 - DNA, 75 bp, synthetic construct
  source 1..75: mol_type = other DNA
ttgccccgcgtatggggatcgtcttgttcagacccggttcagagctgatgcccctgtttatgcaggggcgtgtcc

SEQ ID NO: 839868 - DNA, 75 bp, synthetic construct
  source 1..75: mol_type = other DNA
tctccggaatctttcatgaaacgacctaaacgtcgccgctgggttaacgagaaatacacacgctgggtgaagaca

SEQ ID NO: 839869 - DNA, 75 bp, synthetic construct
  source 1..75: mol_type = other DNA
agacagccaccagcatactgaagcagcgcacaaaaaatattgcgctaccgcctcacgtccaccagcaacaaaact

SEQ ID NO: 839870 - DNA, 75 bp, synthetic construct
  source 1..75: mol_type = other DNA
ccttaagccaggtcgtgaatccatgcaggtattccataacggcagagtgctggttgaaccggagccaaaaagcat

SEQ ID NO: 839871 - DNA, 75 bp, synthetic construct
  source 1..75: mol_type = other DNA
gtgcgggtattacttcgacctgttctgataccggaactcgggctggtgctccttaaaccaggtcgtgaatccatg

SEQ ID NO: 839872 - DNA, 75 bp, synthetic construct
  source 1..75: mol_type = other DNA
catcacagcgaaaccgtcatacatcgttacggtgctggcgcgatggtgttgtgctggcactgcgacaaccagtta

SEQ ID NO: 839873 - DNA, 75 bp, synthetic construct
  source 1..75: mol_type = other DNA
ttctggtgccggaacttggcctggtggtccttaagccgggacgcgaatcacggcctgtttttcatagcggcaggg

SEQ ID NO: 839874 - DNA, 75 bp, synthetic construct
  source 1..75: mol_type = other DNA
gtgaccgtcgagattgaagataaaggcggaaactgtggttcgattggtatggggaatggcacgtggtttaccctc

SEQ ID NO: 839875 - DNA, 75 bp, synthetic construct
  source 1..75: mol_type = other DNA
cctgccgttcgccagccgctggcagaagacaaatctctgctgccatttttcagcgatgagcgggtgattcgtgct

SEQ ID NO: 839876 - DNA, 75 bp, synthetic construct
  source 1..75: mol_type = other DNA
gaaaaaggtgctggcgctgaaagtggatccggagtcgccggagtcttttatgttacgccccaaacgtcgtcgctg

SEQ ID NO: 839877 - DNA, 75 bp, synthetic construct
  source 1..75: mol_type = other DNA
ttattcatcttttgccagtggtgccgttccggcggcatcacaaccgctggcggatgatcctgccgttcgggccgt

SEQ ID NO: 839878 - DNA, 75 bp, synthetic construct
  source 1..75: mol_type = other DNA
caggtattccataacggcagagtactggtggaaccggaaccgaaaagtatgcgcggtctgccgtccggagtcgtt

SEQ ID NO: 839879 - DNA, 75 bp, synthetic construct
  source 1..75: mol_type = other DNA
gtgctggcactgcgacaaccagctgcgcgaccagacctccgaatcacttgagcaacttactcaacaaaatctgac

SEQ ID NO: 839880 - DNA, 75 bp, synthetic construct
  source 1..75: mol_type = other DNA
ccttaaaccaggccgtgaatccatgcaggtatttcataaccctcgagtgctggtggagccggaaccgaaaagcat

SEQ ID NO: 839881 - DNA, 75 bp, synthetic construct
  source 1..75: mol_type = other DNA
gggaacatcacaacgaacttcatgcggatccgctggcgttcgaagaaaagcatggttcccaggttgatttaattt

SEQ ID NO: 839882 - DNA, 75 bp, synthetic construct
  source 1..75: mol_type = other DNA
gcatcacaaccgctggcggatgatcctgccgttcgggccgtgttccgcaatgaggcagtgatccgtcgtgctggt

SEQ ID NO: 839883 - DNA, 75 bp, synthetic construct
  source 1..75: mol_type = other DNA
cgtgaccagacctccgaatcactggaacatctggctcaacaaaacctggcagcatggatgattgacgtcatcggt

SEQ ID NO: 839884 - DNA, 75 bp, synthetic construct
  source 1..75: mol_type = other DNA
ggcactgcgacaaccagctgcgcgaccagacctccgaatcactcgggcaacttgctcaccaaaacctgtttgcat

SEQ ID NO: 839885 - DNA, 75 bp, synthetic construct
  source 1..75: mol_type = other DNA
gtggtaagccagccgacgatccacatcacctgattggccatggtcagggtggaatgggtacaaaagcgcatgacc

SEQ ID NO: 839886 - DNA, 75 bp, synthetic construct
  source 1..75: mol_type = other DNA
ctcgctgggattaccagcggaaaaaatctgctcggtgtaccgcgaaagcgacatcgtaccgggagagcagaccgc

SEQ ID NO: 839887 - DNA, 75 bp, synthetic construct
  source 1..75: mol_type = other DNA
cctgccgttcgccagccgctggctgaggataaatcattactgccatttttcagcgatgagcgggtgattcgtgct

SEQ ID NO: 839888 - DNA, 75 bp, synthetic construct
  source 1..75: mol_type = other DNA
ttcatgcggatcctctggcgttcgaagaaaagcatggttctcaggttgatttaatttttcgttttcttgatcacg

SEQ ID NO: 839889 - DNA, 75 bp, synthetic construct
  source 1..75: mol_type = other DNA
gtgttcctgaagcgactgtttgcagtgagcatcacctcgtccggcaatcccccgacgttctccctgacgccggag

SEQ ID NO: 839890 - DNA, 75 bp, synthetic construct
  source 1..75: mol_type = other DNA
acccgacaaaaatccccactcttccggccttttatcagccatcgctctggaaccgcccggtattaaaagcaagcg

SEQ ID NO: 839891 - DNA, 75 bp, synthetic construct
  source 1..75: mol_type = other DNA
ggacgcctttatattgcgggtatcggtgtcggtattgagaatacgccagcaggaatgcagagtcaggtgctgctg

SEQ ID NO: 839892 - DNA, 75 bp, synthetic construct
  source 1..75: mol_type = other DNA
tctgtttcgcggtggtaagcatgaaaacttcaacagcaacaaccaacagtcatactggtattcaacctgtaagct

SEQ ID NO: 839893 - DNA, 75 bp, synthetic construct
  source 1..75: mol_type = other DNA
ataaaggctggttgcgtggcgaaccgcaggatgcaggctggatcggctggatgatcaaacctcttggtcgctggt

SEQ ID NO: 839894 - DNA, 75 bp, synthetic construct
  source 1..75: mol_type = other DNA
gcggtcaggacagccgtctggtgaccaccgccatcactgcggatacagagcatcgtttcagtggtctgccgctcg

SEQ ID NO: 839895 - DNA, 75 bp, synthetic construct
  source 1..75: mol_type = other DNA
aaatcgatgaaggttttgcggtgggtatgtcaccagccgaactgagtgccgagcaaatcttaagcaagctgtggc

SEQ ID NO: 839896 - DNA, 75 bp, synthetic construct
  source 1..75: mol_type = other DNA
tgccgccacggtgaacctgattaacggcagtggtaagccggtgagtgtggacatcaccgaacaccccgcgccgga

SEQ ID NO: 839897 - DNA, 75 bp, synthetic construct
  source 1..75: mol_type = other DNA
aacggggccagctttgagccgcagtcaggcagcctgaacagcgttatcccaccggcagtgcagcacctgacggtg

SEQ ID NO: 839898 - DNA, 75 bp, synthetic construct
  source 1..75: mol_type = other DNA
ctgtgggacatgctgactcacccgcgctacggcatgggaaaacgtctgggggcggcagacgtggacaaatgggcg

SEQ ID NO: 839899 - DNA, 75 bp, synthetic construct
  source 1..75: mol_type = other DNA
cggcgaaaaatgcggatatcagtggcagtgtgaatgcgaacgccgggacgctcaacaatgtcacgattaatgaaa

SEQ ID NO: 839900 - DNA, 75 bp, synthetic construct
  source 1..75: mol_type = other DNA
tgaaatcacgcagaccgtcaataagaaactggaagaccagagtgcagcgatccagcagatacagaaggttcaggt

SEQ ID NO: 839901 - DNA, 75 bp, synthetic construct
  source 1..75: mol_type = other DNA
ggttaagagtgacccgcaatggtcaggagatttttaatcagtccacgacggatgctcagggcgtattttcttcag

SEQ ID NO: 839902 - DNA, 75 bp, synthetic construct
  source 1..75: mol_type = other DNA
gagcaactcttaagcaagctgtggctatgggaaggcaaagcggaaagctatggctgggggagtaattcaacacag

SEQ ID NO: 839903 - DNA, 75 bp, synthetic construct
  source 1..75: mol_type = other DNA
atcagtggcagtgtgaatgcgaacgccgggacgctcaacaatgtcacaattaatgagaactgtcagattaagggg

SEQ ID NO: 839904 - DNA, 75 bp, synthetic construct
  source 1..75: mol_type = other DNA
ggttttacgtgcgcagcgtcaacctggtggggaaatctgcgtttgtggaagtcagcgggcagcccagcaatgatg

SEQ ID NO: 839905 - DNA, 75 bp, synthetic construct
  source 1..75: mol_type = other DNA
acagtttgaattctggttctccgaaaaacgcatcacgaacacggcacaggtggaaaaatctgcccgttatctggg

SEQ ID NO: 839906 - DNA, 75 bp, synthetic construct
  source 1..75: mol_type = other DNA
tcagtaaaacgctggaagaccagagcgccaccattcagcagatacagcgcgtgcagaaggacacaaatgatgacc

SEQ ID NO: 839907 - DNA, 75 bp, synthetic construct
  source 1..75: mol_type = other DNA
acgcgcaccattacgtctgcgaacattgaccgcctgcgggttaccttcggggtgcagtcactggtgcagaccacg

SEQ ID NO: 839908 - DNA, 75 bp, synthetic construct
  source 1..75: mol_type = other DNA
atccggagagcggcaacagcactccgttatttgtggcgcaggggaatcagctgttcatgaacgacgtgttcctga

SEQ ID NO: 839909 - DNA, 75 bp, synthetic construct
  source 1..75: mol_type = other DNA
ataacagccagcttgcagatgagatggcggagatgaagaccaccatcaccgaaacccgcaatgaaatcacacaga

SEQ ID NO: 839910 - DNA, 75 bp, synthetic construct
  source 1..75: mol_type = other DNA
gaaacccgcaatgaaatcacacagacggtcagtaaaacgctggaagaccagagcgccaccatacagcagatacag

SEQ ID NO: 839911 - DNA, 75 bp, synthetic construct
  source 1..75: mol_type = other DNA
agcaaaaggcgatgttaatcgccctgatcgtcatctgtttaaccgtcatagtgacggcactggtaacgaggaaag

SEQ ID NO: 839912 - DNA, 75 bp, synthetic construct
  source 1..75: mol_type = other DNA
atgaagcagcaaaaggcgatgctaatcgccctgatcgtcatctgtttaaccgtcatagtgacggcactggtaacg

SEQ ID NO: 839913 - DNA, 75 bp, synthetic construct
  source 1..75: mol_type = other DNA
atgaagcagcaaaaggcgatgttaatcgtcctgatcgtcatctgtttaaccgtcatagtgacggcactggtaacg

SEQ ID NO: 839914 - DNA, 75 bp, synthetic construct
  source 1..75: mol_type = other DNA
ttgccatcacggcggtgcagcacgtaccggaaaaagaagccatcgtggataacggagcgcactttgacggcgacc

SEQ ID NO: 839915 - DNA, 75 bp, synthetic construct
  source 1..75: mol_type = other DNA
cgcccggctacgcaagcgcaacctgaaaaatgcctttcgccttgaattgcctgtgcaaggtcgccatatggtgat

SEQ ID NO: 839916 - DNA, 75 bp, synthetic construct
  source 1..75: mol_type = other DNA
atgaagcagcaaaaggcgatgttagtcgcactgattgtcatctgtttaaccgtcatagtgacggcactggtaacg

SEQ ID NO: 839917 - DNA, 75 bp, synthetic construct
  source 1..75: mol_type = other DNA
gtttaaccgtcattgttacggcactgataatgaggaaagacctctgcgaggtacgaatccgaaccggccagacgg

SEQ ID NO: 839918 - DNA, 75 bp, synthetic construct
  source 1..75: mol_type = other DNA
ataaggttatagctaccgagattgatttttctgattctaagtgtctggggaaaatatcaggtattgattgtttag

SEQ ID NO: 839919 - DNA, 75 bp, synthetic construct
  source 1..75: mol_type = other DNA
atgattttaaataatttttatagtttactatttttattgatgcttgcgctgtcaatattttccttcacagtgcta

SEQ ID NO: 839920 - DNA, 75 bp, synthetic construct
  source 1..75: mol_type = other DNA
atgaagcagcaaaaagcgatgttaatcgctctgatcgtcatctgtttaaccgtcattgcgacggcactggtaacg

SEQ ID NO: 839921 - DNA, 75 bp, synthetic construct
  source 1..75: mol_type = other DNA
gacctctgcgaggtacgaatccgaaccggccagacggagttcgctgtcttcacagtttacgaacctgagaagtaa

SEQ ID NO: 839922 - DNA, 75 bp, synthetic construct
  source 1..75: mol_type = other DNA
tgtttaaccgtcatagtgacggcactggtaacgaggaaagacctctgcgaggtacgaatccgaaccggccagacg

SEQ ID NO: 839923 - DNA, 75 bp, synthetic construct
  source 1..75: mol_type = other DNA
ccagcgaactgacccgctgggcaggcagaaaatgcccaagcggtcgggtaatggggctggcgaataaaggctgga

SEQ ID NO: 839924 - DNA, 75 bp, synthetic construct
  source 1..75: mol_type = other DNA
tcaatcgctggaataatggccactctatgaaagcgtctgatgctgttgtagaactctggcagaggggagattatt

SEQ ID NO: 839925 - DNA, 75 bp, synthetic construct
  source 1..75: mol_type = other DNA
acccgacaaaaatccccactcttccggccttttatcagccatcgctctggacgcgcccggtattaaaagcaaacg

SEQ ID NO: 839926 - DNA, 75 bp, synthetic construct
  source 1..75: mol_type = other DNA
aatatcaaaccgggccatgattattatttttatatccgcagtgtgaatactgttggcaaatcggcatttgtggag

SEQ ID NO: 839927 - DNA, 75 bp, synthetic construct
  source 1..75: mol_type = other DNA
aacggggccagctttgagccgcagtcaggcaccctgaacagtgttatccctccggcagtgcagcacctgacggtg

SEQ ID NO: 839928 - DNA, 75 bp, synthetic construct
  source 1..75: mol_type = other DNA
caggatattcataatctatcaggaaaattaacaacatacgatttcagtgcatgttctgctaactggcagcagaat

SEQ ID NO: 839929 - DNA, 75 bp, synthetic construct
  source 1..75: mol_type = other DNA
cggacgcatcctgtccatcgatgccgccagccgcacactgacgctggaccgagaggtgacactgccggaagcagg

SEQ ID NO: 839930 - DNA, 75 bp, synthetic construct
  source 1..75: mol_type = other DNA
aaaactgggtgaccaggccgtgaccatacagcaaatccagcgggttcagtcagacacgcgcaatgagctgaatgc

SEQ ID NO: 839931 - DNA, 75 bp, synthetic construct
  source 1..75: mol_type = other DNA
acgggcaaagtcaggtaaaaagctttgcagatgctgcggcggcggaaaaagcggagctgaagctgattgcggaga

SEQ ID NO: 839932 - DNA, 75 bp, synthetic construct
  source 1..75: mol_type = other DNA
accggaaaaagaagccatcgtggataacggggccagctttgagccgcagtcaggcagcctgaacagcgttatccc

SEQ ID NO: 839933 - DNA, 75 bp, synthetic construct
  source 1..75: mol_type = other DNA
atccgccatgtgcctgcgccgccgctggtcaccagaaaacttccagctcttcctggttgagcatccgttggttcg

SEQ ID NO: 839934 - DNA, 75 bp, synthetic construct
  source 1..75: mol_type = other DNA
atgaaaacctatatttatcaggacgaaaaatcacataaattctgggcggtggagcagcaagacaacgaactgcat

SEQ ID NO: 839935 - DNA, 75 bp, synthetic construct
  source 1..75: mol_type = other DNA
tatcagtggagccatcacggcgaataccggcacgctcaataatgtcaccattaacgagaactgtgtcatcagagg

SEQ ID NO: 839936 - DNA, 75 bp, synthetic construct
  source 1..75: mol_type = other DNA
ccagcagatacagaaggttcaggttgatacaaataataacctgaacagcatgtgggctgtgaagctgcagcagat

SEQ ID NO: 839937 - DNA, 75 bp, synthetic construct
  source 1..75: mol_type = other DNA
gtggccatcagggaccattaccgtcaggatttatgacgatcagccttttgacaggcaaattgttattccggcggt

SEQ ID NO: 839938 - DNA, 75 bp, synthetic construct
  source 1..75: mol_type = other DNA
aaccgtaccgcgctggataatacgctgatttacagtggcgttattgatatgcctgccggtcacggtcacatgacg

SEQ ID NO: 839939 - DNA, 75 bp, synthetic construct
  source 1..75: mol_type = other DNA
ggagttttcggtgtcagcatggctggtaaatgactggtatcccacagcaagtatcagcgatttgctggttgtggt

SEQ ID NO: 839940 - DNA, 75 bp, synthetic construct
  source 1..75: mol_type = other DNA
tttttgccgactacgaactgctaccaccgttccgtcagcttgaccgtaacagttacgccctgacagaagccgaac

SEQ ID NO: 839941 - DNA, 75 bp, synthetic construct
  source 1..75: mol_type = other DNA
cggacgtgtcctgtccatcgatgctgccacccgcaccctgacgctggaccgtgaagtgacacttccggggacagg

SEQ ID NO: 839942 - DNA, 75 bp, synthetic construct
  source 1..75: mol_type = other DNA
ctgtatgccatcgggcagtactgcgaccagacggtcccggatggtttcgggggaacagagccgcggatgactttc

SEQ ID NO: 839943 - DNA, 75 bp, synthetic construct
  source 1..75: mol_type = other DNA
cccaggtcagaggagatttcgttaaagctgtatcaaaagccttcccgaaaaaagtcggtacgtggggtaacacgg

SEQ ID NO: 839944 - DNA, 75 bp, synthetic construct
  source 1..75: mol_type = other DNA
tcttccggccttttatcagccatcgctctggacgcgcccggtattaaaagcaaacgcccaatcgctgccagatag

SEQ ID NO: 839945 - DNA, 75 bp, synthetic construct
  source 1..75: mol_type = other DNA
gctttgatgaaaccttaaaaccgtttgtgcgcgatgtttccggcagccgcctgaaagacttacctaaacccaata

SEQ ID NO: 839946 - DNA, 75 bp, synthetic construct
  source 1..75: mol_type = other DNA
gcggcagacaggattgcgttcattaatccggagaacggtaacaccactccagcactggtcacgcaagggggacag

SEQ ID NO: 839947 - DNA, 75 bp, synthetic construct
  source 1..75: mol_type = other DNA
cgaatttaaaaccttctggcactcctatcaacgggaatggcagctttacatgttagccgccctgcctatcgaaaa

SEQ ID NO: 839948 - DNA, 75 bp, synthetic construct
  source 1..75: mol_type = other DNA
gacgatcagccttttgacaggcaaattgttattccggcggtggcattcagcggcgctaaacatgagcgggagaat

SEQ ID NO: 839949 - DNA, 75 bp, synthetic construct
  source 1..75: mol_type = other DNA
aacgatatttattcgtcatgccgtctgatagtgcggaaaaacggtgctgaaatttataactgtaccgcgcgggat

SEQ ID NO: 839950 - DNA, 75 bp, synthetic construct
  source 1..75: mol_type = other DNA
ccatcagggaccattaccgtcaggatttatgacgatcagccgtttgaccggcagattgttattccggcggtggca

SEQ ID NO: 839951 - DNA, 75 bp, synthetic construct
  source 1..75: mol_type = other DNA
acgactatgccggaaccctgaccggcggacgtgtcctgtccattgatgctgccacccgcaccctgacgctggacc

SEQ ID NO: 839952 - DNA, 75 bp, synthetic construct
  source 1..75: mol_type = other DNA
ttataaccgtaccgcgctggataatacgctgatttacagtggtgttattgatatgcctgctggtcgcggccacat

SEQ ID NO: 839953 - DNA, 75 bp, synthetic construct
  source 1..75: mol_type = other DNA
tcctggttgagcatccgctggttcgccacttaacccgccgtctgatttggggcgtttatagcaccgaaaacgagc

SEQ ID NO: 839954 - DNA, 75 bp, synthetic construct
  source 1..75: mol_type = other DNA
tggctgggggagtaattcaacacaggaagcgcagttctccgtactcgatgccatcaccgccagcgagctaattaa

SEQ ID NO: 839955 - DNA, 75 bp, synthetic construct
  source 1..75: mol_type = other DNA
gaaccggccaccaccaccttccggattaacgcgcctgcaaaacccgccaccattgagctgacgccggggtatttt

SEQ ID NO: 839956 - DNA, 75 bp, synthetic construct
  source 1..75: mol_type = other DNA
tcatgccagcaacaactgacacagccctcaaaccatgccagcgctgatatgctgcctgccgtattagtctcaccg

SEQ ID NO: 839957 - DNA, 75 bp, synthetic construct
  source 1..75: mol_type = other DNA
ggaaagttcagaaagccagcgattatggcgtaattattctgacagaagaacaatttatcaattttattgatactg

SEQ ID NO: 839958 - DNA, 75 bp, synthetic construct
  source 1..75: mol_type = other DNA
ctgctggcagcagacaggattgcgatgattaatcctgcgaatggcaacacaaagccgatgtttgttggtcagggc

SEQ ID NO: 839959 - DNA, 75 bp, synthetic construct
  source 1..75: mol_type = other DNA
acggcacctttgccatcacggcggtgcagcatgtgccggaaaaagaagccatcgtggataacggggcccgctttg

SEQ ID NO: 839960 - DNA, 75 bp, synthetic construct
  source 1..75: mol_type = other DNA
ctcccctggctggcagacgacgcccaaatcattttaccgacagaggttgcgccaaccacactaagtcatcgacgc

SEQ ID NO: 839961 - DNA, 75 bp, synthetic construct
  source 1..75: mol_type = other DNA
cggtcacatgacgctggagttttcggtatcagcgtggctggtaaatgactggtatcccacagccagtatcagtga

SEQ ID NO: 839962 - DNA, 75 bp, synthetic construct
  source 1..75: mol_type = other DNA
agtggtaataacccgggaggtacaagatacacgggttatggttttgaagttcgcaaaaacggtgtattaatcgca

SEQ ID NO: 839963 - DNA, 75 bp, synthetic construct
  source 1..75: mol_type = other DNA
gattgagctgacaccgggctattttcagataacggcggtcccgcgtcttgcggtgtatgacccgacggtacagtt

SEQ ID NO: 839964 - DNA, 75 bp, synthetic construct
  source 1..75: mol_type = other DNA
aacttaccccagtaaaaacagagttttttaattatgaaatttggacgcaaggggattcctttcagtttaatcgtg

SEQ ID NO: 839965 - DNA, 75 bp, synthetic construct
  source 1..75: mol_type = other DNA
caaaattctcatattctttatgaaacgacagtgccagcggggccatttactattaatgatttatatccgagcggg

SEQ ID NO: 839966 - DNA, 75 bp, synthetic construct
  source 1..75: mol_type = other DNA
cgttccggattaacgccccggcagcaccggccagcattgagctgacgccggggtattatcagataacagcagtac

SEQ ID NO: 839967 - DNA, 75 bp, synthetic construct
  source 1..75: mol_type = other DNA
cggatgcaggtgccggaagatgccccctgcgatgagaaaaagcgtatcagtgacgagggctgggcgacccgttgc

SEQ ID NO: 839968 - DNA, 75 bp, synthetic construct
  source 1..75: mol_type = other DNA
gttgaggtgaactggattgacccggataacggctgggagacggcaacagagcttgtggaggacacgcaggccatt

SEQ ID NO: 839969 - DNA, 75 bp, synthetic construct
  source 1..75: mol_type = other DNA
aagtcgatcgcaccattcgtcataccaaaatgaacgtgggcgatgtgcaacgtctgtcagtcgcggtagtggtga

SEQ ID NO: 839970 - DNA, 75 bp, synthetic construct
  source 1..75: mol_type = other DNA
caccgtttcagaggcctgccgcccggggaatacaccctgacggtcagggcgataaacagctacggccagcagggc

SEQ ID NO: 839971 - DNA, 75 bp, synthetic construct
  source 1..75: mol_type = other DNA
attgcactgcaattcatccgcttcgactgggattatgatgcccatcttattacgttcaccccggatgacaggcag

SEQ ID NO: 839972 - DNA, 75 bp, synthetic construct
  source 1..75: mol_type = other DNA
atgagacttttcatcgccgaaaagcctcaggtggccatggccatcgctgaggcactctccgatatcaacaacacg

SEQ ID NO: 839973 - DNA, 75 bp, synthetic construct
  source 1..75: mol_type = other DNA
catctgcccgttatcttggtacggcgctgtactggagtaccgccagtaatatcaggccggggtatgattattatt

SEQ ID NO: 839974 - DNA, 75 bp, synthetic construct
  source 1..75: mol_type = other DNA
gtggaggcagtcggtcgggcgagtaatgatcctgccggttaccttaattttttcaggggggcgataaataaaacg

SEQ ID NO: 839975 - DNA, 75 bp, synthetic construct
  source 1..75: mol_type = other DNA
accacataccgcttcaggcagctggcgccggggaactacaggctgacagtccgggcagtaaatgcccgggggcag

SEQ ID NO: 839976 - DNA, 75 bp, synthetic construct
  source 1..75: mol_type = other DNA
caccgccatcactgccgatacggagcaccgtttcagtggtctgcctcccggggaatacaccctgacggtcagggc

SEQ ID NO: 839977 - DNA, 75 bp, synthetic construct
  source 1..75: mol_type = other DNA
gcagccagattaaacccgggaaagttttctggttttatgtgcgcagcgtcaacctggtgggtaaatccgcgtttg

SEQ ID NO: 839978 - DNA, 75 bp, synthetic construct
  source 1..75: mol_type = other DNA
tcaggtatgaagcagatgtgcttttttacatgggtggttcaatacttcatgataagagtaaaattcggatccatg

SEQ ID NO: 839979 - DNA, 75 bp, synthetic construct
  source 1..75: mol_type = other DNA
tgccgttgcgacacgcagaacccgggatacggcattgctaaagtcgtttgacgctttccgcgagtgggtaaccat

SEQ ID NO: 839980 - DNA, 75 bp, synthetic construct
  source 1..75: mol_type = other DNA
tttgatgcgtgtacctcgttcaatctcgtttgctgcgatggacgatcttgagttcggtcaactgtattcagccgt

SEQ ID NO: 839981 - DNA, 75 bp, synthetic construct
  source 1..75: mol_type = other DNA
gtcgaataggtgggcgtcggcctaaataccagaaagaaacatggcagcaaatgcggcgattgctggagaagggca

SEQ ID NO: 839982 - DNA, 75 bp, synthetic construct
  source 1..75: mol_type = other DNA
cgacagaccggggcttaaaaaactgctcaggacactatcggcaggagacactctggttgtctggaagctggacag

SEQ ID NO: 839983 - DNA, 75 bp, synthetic construct
  source 1..75: mol_type = other DNA
tacaaccgaggttaatatttttatggttggctcgattcttattcatcataatgatcatacatcggctttatcgtt

SEQ ID NO: 839984 - DNA, 75 bp, synthetic construct
  source 1..75: mol_type = other DNA
tagatatgattttaaatgatttttttttattaatgcttgcactgtcaatgttttcatttacagcgttatttgctt

SEQ ID NO: 839985 - DNA, 75 bp, synthetic construct
  source 1..75: mol_type = other DNA
gcgtagtatgcggcatcttgtcgtgctggtggaggagttgcgcgaacgaggcatcaactttcgtagtctgacgga

SEQ ID NO: 839986 - DNA, 75 bp, synthetic construct
  source 1..75: mol_type = other DNA
ctggtggaggagttgtgcgaacaaggtgttaattttagtagttatgttattacaggtgggggatttctccccctt

SEQ ID NO: 839987 - DNA, 75 bp, synthetic construct
  source 1..75: mol_type = other DNA
agagttatcaaaacgtactgattcccgcagagccgggaaccagcgaatacctgcaacttatcccggtagggcagc

SEQ ID NO: 839988 - DNA, 75 bp, synthetic construct
  source 1..75: mol_type = other DNA
atgctttccagaggtgataccctggtcgtatggaagttagatcgtcttgggcgcagcatgcgtcacttagttgtg

SEQ ID NO: 839989 - DNA, 75 bp, synthetic construct
  source 1..75: mol_type = other DNA
cgtcttcaaaaaggtgacacactggttgtctggaaactggatcgcctcgggcgaagcatgaaacatctgatttct

SEQ ID NO: 839990 - DNA, 75 bp, synthetic construct
  source 1..75: mol_type = other DNA
gcaacgaaatgcccttgaaagcgcaggatgtgagctaatttttgaggataaggcgagcggcaaaaagactgaacg

SEQ ID NO: 839991 - DNA, 75 bp, synthetic construct
  source 1..75: mol_type = other DNA
tggtagtcgtctggatttttggggaaatggtattgttccttatgttacaccctatgagaaaaatcaaattagcat

SEQ ID NO: 839992 - DNA, 75 bp, synthetic construct
  source 1..75: mol_type = other DNA
gagaatatctggattgcgcgtaatattcgccatgcaatggaaattggcgaactattcctcgtctatcaaccgatc

SEQ ID NO: 839993 - DNA, 75 bp, synthetic construct
  source 1..75: mol_type = other DNA
atgcttattggctatgttcgcgtatcaacaaatgaccagaacaccgatctacaacgtaatgcgttgaactgtgta

SEQ ID NO: 839994 - DNA, 75 bp, synthetic construct
  source 1..75: mol_type = other DNA
ttttgatgtaggcgtttctaccatttatagaaaatttccggcaaataagatcaatgaatcccctgaatcagcatt

SEQ ID NO: 839995 - DNA, 75 bp, synthetic construct
  source 1..75: mol_type = other DNA
caggaaattgtgtcagcgaattgccgagaaatatgcgcaatgctgcgatatcgtgacattcaatgccgatctcta

SEQ ID NO: 839996 - DNA, 75 bp, synthetic construct
  source 1..75: mol_type = other DNA
tcgtgacatttaattccaatacctatcttttgctgtgccgggaaaatgtacagacatttacccagaaaatatcca

SEQ ID NO: 839997 - DNA, 75 bp, synthetic construct
  source 1..75: mol_type = other DNA
caacaataatcagtatctggctgtggggatcatcaaactgtgtggtctggaagccgtggaagcggtgtttggtgt

SEQ ID NO: 839998 - DNA, 75 bp, synthetic construct
  source 1..75: mol_type = other DNA
cagaagcatgaaacacctcatcactcttattgaggaactgcgggaaaaaggggttaacttccgtagtcttacaga

SEQ ID NO: 839999 - DNA, 75 bp, synthetic construct
  source 1..75: mol_type = other DNA
gcgtgtcaacaaatgaccagaacaccgatttgcaacgtaatgcactgaactgcgcgggatgtgagcagatttttg

SEQ ID NO: 840000 - DNA, 75 bp, synthetic construct
  source 1..75: mol_type = other DNA
aggacaaaatcagtggcactaagtccaacagaccggggctgaaaaaactgctcaggacactatcggcaggagaca

SEQ ID NO: 840001 - DNA, 75 bp, synthetic construct
  source 1..75: mol_type = other DNA
acaacgaaatgctcttgaaagcgcaggatgtgagctaatttttgaggacaaggcgagcggcaaaaaggctgaacg

SEQ ID NO: 840002 - DNA, 75 bp, synthetic construct
  source 1..75: mol_type = other DNA
caacaaatgaacaaaacactgctttacaacgaaatgctcttgaaagcgcaggatgtgagctaatttttgaggaca

SEQ ID NO: 840003 - DNA, 75 bp, synthetic construct
  source 1..75: mol_type = other DNA
gttatagtctgcactcaagttatagcatcaatattccagcctcaaacacaaatataactctggcggcttatcgtt

SEQ ID NO: 840004 - DNA, 75 bp, synthetic construct
  source 1..75: mol_type = other DNA
cgcactgctggatgcggctgagcaataccttgaccgcattgccgataagcgtactggtagcatctgcgcctgtaa

SEQ ID NO: 840005 - DNA, 75 bp, synthetic construct
  source 1..75: mol_type = other DNA
gaagtggaactggccacactcacgtggtggactggtataacaatcgacgattgctgggaaggctgggtcatattc

SEQ ID NO: 840006 - DNA, 75 bp, synthetic construct
  source 1..75: mol_type = other DNA
ggtggcaaagcgacgcgctgaaatggtcagtgttaggtctgctcggcctgctggtgggttaccttgttgttttaa

SEQ ID NO: 840007 - DNA, 75 bp, synthetic construct
  source 1..75: mol_type = other DNA
cgcacgatgctgattatcgtcaacacctggctgggttatccgtacatgatgatcctctgcatgggcttgctgaaa

SEQ ID NO: 840008 - DNA, 75 bp, synthetic construct
  source 1..75: mol_type = other DNA
cgggaaggtatcagagtggccagacgcactgtggcacgtctcatggcagttatgggacttgccggtgttctccgg

SEQ ID NO: 840009 - DNA, 75 bp, synthetic construct
  source 1..75: mol_type = other DNA
gtactggtgactcgtatgacaacgcgatggcggagagcatcaatggcctttacaaagcggaggtaatacaccgta

SEQ ID NO: 840010 - DNA, 75 bp, synthetic construct
  source 1..75: mol_type = other DNA
gtacaggcgactcgtatgacaacgcgatggctgagagcatcaatggtctttacaaagcggaggtaatacaccgta

SEQ ID NO: 840011 - DNA, 75 bp, synthetic construct
  source 1..75: mol_type = other DNA
cgacattcgtgctggatgcactggagcaggcgttatgggcccgtcgaccgtccggcacggtccatcacagtgata

SEQ ID NO: 840012 - DNA, 75 bp, synthetic construct
  source 1..75: mol_type = other DNA
gttatgggacttgccggtgtaaagtctggcgccagttgttacgcgaaggtatcagggtggccagatgtacagtgg

SEQ ID NO: 840013 - DNA, 75 bp, synthetic construct
  source 1..75: mol_type = other DNA
gccggatacatcgtggggtggtgggtctcatcgtctatggaaacgacattcgtgctggatgcgctggagcaggcg

SEQ ID NO: 840014 - DNA, 75 bp, synthetic construct
  source 1..75: mol_type = other DNA
tgatgatcctctgcatgggcttgctgaaagcgattccggacgatttgtatgaagcctcagcaatggatggcgcag

SEQ ID NO: 840015 - DNA, 75 bp, synthetic construct
  source 1..75: mol_type = other DNA
tgaaagaaacgaccgcccagcccgaaggcgaacgcgcgaatctgcgcgtgattacccagaatcgtcaggcgctga

SEQ ID NO: 840016 - DNA, 75 bp, synthetic construct
  source 1..75: mol_type = other DNA
tctgcaccatcgccattgccttcaccaactacagcagcactaaccagctgacttttgaacgtgcgcaggaagtgt

SEQ ID NO: 840017 - DNA, 75 bp, synthetic construct
  source 1..75: mol_type = other DNA
acgtattaccactgtcagcaacagagacatcattcagataaacgcagcgcccgtgcgcagcgcgatgactggctg

SEQ ID NO: 840018 - DNA, 75 bp, synthetic construct
  source 1..75: mol_type = other DNA
ttcctcgccagaaggtggcgatcatctatgatgttggcgtatcgactttgtataagaagtttccggtcggagata

SEQ ID NO: 840019 - DNA, 75 bp, synthetic construct
  source 1..75: mol_type = other DNA
acattatcggaaggtgacactctggtagtctggaagctggaccggctggggcgtagtatgcggcatctggtcatt

SEQ ID NO: 840020 - DNA, 75 bp, synthetic construct
  source 1..75: mol_type = other DNA
ggcgacgccggagagttgcgattttctgcatcaaatcaaaataggcgagtggatacacgctgattttaagcgtgt

SEQ ID NO: 840021 - DNA, 75 bp, synthetic construct
  source 1..75: mol_type = other DNA
agcagttacacatagcgaaatctgtaaaaatcctcccaccgcaacatagaggaggagaattgatggccgtcattg

SEQ ID NO: 840022 - DNA, 75 bp, synthetic construct
  source 1..75: mol_type = other DNA
ggatacacgctgattttaagcgcgttcgtaactacgcatttcacaagcgttttttcaaactcctgcaactcggat

SEQ ID NO: 840023 - DNA, 75 bp, synthetic construct
  source 1..75: mol_type = other DNA
cttattgaggaactgcggggaaaaggggttaatttccgtagtcttacagacagcattgatacgtcaacacccatg

SEQ ID NO: 840024 - DNA, 75 bp, synthetic construct
  source 1..75: mol_type = other DNA
gcgtcagttgttacgggaaggtatcagagtggccagatgcactgtggcacgtctcatggcggttatgggacttgc

SEQ ID NO: 840025 - DNA, 75 bp, synthetic construct
  source 1..75: mol_type = other DNA
atacaccgtaagagctggaaaaaccgtgcagaagtggaactggccacactcacgtgggtggactggtataacaat

SEQ ID NO: 840026 - DNA, 75 bp, synthetic construct
  source 1..75: mol_type = other DNA
gtgcgtaaagtctggcgtcagttgttatgggaaggaatcagggtagccagatgtacagtggcgcgcctcatggcg

SEQ ID NO: 840027 - DNA, 75 bp, synthetic construct
  source 1..75: mol_type = other DNA
agataagcggtacaaagtccgacagaccaggactgaaaaagctgctcaggacattatcggcaggtgacacgctgg

SEQ ID NO: 840028 - DNA, 75 bp, synthetic construct
  source 1..75: mol_type = other DNA
gcaggatcggagggcgaagaccaaaactgacgccagaacaatgggcgcaggcaggcaggttaattgctgcaggtg

SEQ ID NO: 840029 - DNA, 75 bp, synthetic construct
  source 1..75: mol_type = other DNA
cgcctttctccagaagatacgcttgttgtctggaagctggatcgtcttgggcggagtatgcggaacttggtcatt

SEQ ID NO: 840030 - DNA, 75 bp, synthetic construct
  source 1..75: mol_type = other DNA
gtgccctggctgaaatggagcgagaactcattgtcgagcggacacgcgccggactggaagcggccagagccaaag

SEQ ID NO: 840031 - DNA, 75 bp, synthetic construct
  source 1..75: mol_type = other DNA
gggctggctgcagcagctcgtgccaaaggcagaataggtggacgccgtcctaagttgaccaccgaacagtgggca

SEQ ID NO: 840032 - DNA, 75 bp, synthetic construct
  source 1..75: mol_type = other DNA
ggctgggggtattccttaccggctcggacacttcctctaacgccctgtttggttcactgcaatcgaccacggcgc

SEQ ID NO: 840033 - DNA, 75 bp, synthetic construct
  source 1..75: mol_type = other DNA
taagttgaccaccgaacagtgggcacagattgggcgtttactcgaggccggagaatcaagacagcgtattgcact

SEQ ID NO: 840034 - DNA, 75 bp, synthetic construct
  source 1..75: mol_type = other DNA
ggcgcgtgggaggtcgaagacctaagttaacacctgaacagtgggcgcaggctggaagattgttagcggctggcg

SEQ ID NO: 840035 - DNA, 75 bp, synthetic construct
  source 1..75: mol_type = other DNA
aggggcgcatcggtggaagacccaacgcattaaagccgcatgagcgggaacagattgggcggctattggctaagg

SEQ ID NO: 840036 - DNA, 75 bp, synthetic construct
  source 1..75: mol_type = other DNA
ggctgggggtattccttaccggctcggacacttcttcaaacgccctgtttggttcactgcaatcgaccacggcac

SEQ ID NO: 840037 - DNA, 75 bp, synthetic construct
  source 1..75: mol_type = other DNA
ttcctgtcggttcttgtgccgttctggctggtagcaatgatggacggctggaaaggggtgaaagagacgtggcca

SEQ ID NO: 840038 - DNA, 75 bp, synthetic construct
  source 1..75: mol_type = other DNA
ttctttcatgtgatgggtgccctggctgaaatggaacgagaactgattgttgaacgaacaaaagctggactggaa

SEQ ID NO: 840039 - DNA, 75 bp, synthetic construct
  source 1..75: mol_type = other DNA
ttcgccttcgtcaccaactattccggcatgtccaccacgctggcgctggtactggcaggtacaggcgtgatgttc

SEQ ID NO: 840040 - DNA, 75 bp, synthetic construct
  source 1..75: mol_type = other DNA
tgccgatgggagggctggggctatccgctctggttgccctgatcccgataatattcttcttcgttgcgcttgcga

SEQ ID NO: 840041 - DNA, 75 bp, synthetic construct
  source 1..75: mol_type = other DNA
cgcgacgggcatggtgggccgagaatctgaactgttccgctacaccgtgaagcacagtctgatttttgccagcgt

SEQ ID NO: 840042 - DNA, 75 bp, synthetic construct
  source 1..75: mol_type = other DNA
ttgtctggaagctggacaggttggggcgcagtatgcggcatcttgttacgctgatagaagagttgcgccagcgtg

SEQ ID NO: 840043 - DNA, 75 bp, synthetic construct
  source 1..75: mol_type = other DNA
cagcatagatacatcttctccaatggggcgttttttcttccacgtgattggtgccctggctgaaatggaacgtga

SEQ ID NO: 840044 - DNA, 75 bp, synthetic construct
  source 1..75: mol_type = other DNA
atagcaaggctgatcaaaaacgggcacgacagaaaacaactggcaataatttacggcattggtatatcgacgatt

SEQ ID NO: 840045 - DNA, 75 bp, synthetic construct
  source 1..75: mol_type = other DNA
acattatcggagggggatacactggtagtctggaagctggaccggctggggcgtagtatgcggcatctggttatt

SEQ ID NO: 840046 - DNA, 75 bp, synthetic construct
  source 1..75: mol_type = other DNA
tgctattgataccagcacaccaatggggcgctttttctttcatgtgatgggtgccctggctgaaatggagcgaga

SEQ ID NO: 840047 - DNA, 75 bp, synthetic construct
  source 1..75: mol_type = other DNA
gggctggctgcagctcgtgctaaaggcagagtaggtggacgccgtcctaagttgaccagcgaacagtggtcacag

SEQ ID NO: 840048 - DNA, 75 bp, synthetic construct
  source 1..75: mol_type = other DNA
gctgatttttgatattggcctgtccacgctctataaaaaattcccctcatcagcggcaaagaataaattgtgtca

SEQ ID NO: 840049 - DNA, 75 bp, synthetic construct
  source 1..75: mol_type = other DNA
gcaaagaaacgcgctcgagtgtgcaggatgtgaactgattttcgaagataagatcagcggtaaggtgtccgacag

SEQ ID NO: 840050 - DNA, 75 bp, synthetic construct
  source 1..75: mol_type = other DNA
ttcaattgataccagtaccccaatggggcgctttttctttcatgtgatgggggccctggctgaaatggaacgaga

SEQ ID NO: 840051 - DNA, 75 bp, synthetic construct
  source 1..75: mol_type = other DNA
gcaacgtaatgcactgaactgcgcgggatgtgagcagatttttgaggacaaaatcagtggcactaagtccgacag

SEQ ID NO: 840052 - DNA, 75 bp, synthetic construct
  source 1..75: mol_type = other DNA
gctaactgatgaacagtgggcgcaggcaggaaggttggttgcagcaggtgaatcacgacagcgtgtggcattaat

SEQ ID NO: 840053 - DNA, 75 bp, synthetic construct
  source 1..75: mol_type = other DNA
actgattgttgaacgaacaaaagctggactggaagctgctcgcgcacagggacgaattggtggacgacgtcccaa

SEQ ID NO: 840054 - DNA, 75 bp, synthetic construct
  source 1..75: mol_type = other DNA
caacaaatgaccagaacacagcattgcaaagaaacgcgctcgagtgtgcaggatgtgagctgattttcgaagaca

SEQ ID NO: 840055 - DNA, 75 bp, synthetic construct
  source 1..75: mol_type = other DNA
gccggacgattaattgcagcaggaattcctcgccagaaggtagcgatcatctatgatattggtgtatcgactttg

SEQ ID NO: 840056 - DNA, 75 bp, synthetic construct
  source 1..75: mol_type = other DNA
acattatcggcaggtgacactttggttgtctggaagctggacaggttggggcgcagtatgcggcatcttgttacg

SEQ ID NO: 840057 - DNA, 75 bp, synthetic construct
  source 1..75: mol_type = other DNA
aaatcagtggcactaagcccgacagaccggggcttaaaaaactgctcaggacactatcggttggagacactctgg

SEQ ID NO: 840058 - DNA, 75 bp, synthetic construct
  source 1..75: mol_type = other DNA
ttcatcgccagaatgtggcgatcatttatgatgttggcgtatcgactttgtataagaagtttccggtcggagata

SEQ ID NO: 840059 - DNA, 75 bp, synthetic construct
  source 1..75: mol_type = other DNA
ggagagtcggcggccgccgccgggtaatgactgaagaagtggtggagcggtgccgcagaatgctggagaacggcg

SEQ ID NO: 840060 - DNA, 75 bp, synthetic construct
  source 1..75: mol_type = other DNA
ctggttgaggagttgcgcgaacgtggcgttaattttcgcagcctgacggatgctattgataccagcacgccgatg

SEQ ID NO: 840061 - DNA, 75 bp, synthetic construct
  source 1..75: mol_type = other DNA
gatttttgatattggcctgtccacgctctataaaaaattccccgcctcagtgacaaaaaataaattgtgtcatcc

SEQ ID NO: 840062 - DNA, 75 bp, synthetic construct
  source 1..75: mol_type = other DNA
cggaagatatcgcttttatcaatgaactgggttaccaaattattaaaacggcgatggctgaattccgccatttta

SEQ ID NO: 840063 - DNA, 75 bp, synthetic construct
  source 1..75: mol_type = other DNA
ccctggcagttaaacgaaccacactttcatgagcgttttaccaccatcatgaaagaaaatggcctgaaggcgaac

SEQ ID NO: 840064 - DNA, 75 bp, synthetic construct
  source 1..75: mol_type = other DNA
ttcatgcgcgttttacagctattatggaagaacatgagctgaaagcgaatagcatctgtattgagatcactgaaa

SEQ ID NO: 840065 - DNA, 75 bp, synthetic construct
  source 1..75: mol_type = other DNA
aaaacggcaatgggtgaattcagacattttagtcagcgtgcgtcgctgaaggatgatttcttactgcatattaat

SEQ ID NO: 840066 - DNA, 75 bp, synthetic construct
  source 1..75: mol_type = other DNA
gagttacgcagaaaaactgaaactggcgatttccagtatccgtgaccatatgttctccgagtttatttttgtgat

SEQ ID NO: 840067 - DNA, 75 bp, synthetic construct
  source 1..75: mol_type = other DNA
caggacactatcggcaggagacacgctggttgtctggaagctggacagactggggcgcagtatgcggcatcttgt

SEQ ID NO: 840068 - DNA, 75 bp, synthetic construct
  source 1..75: mol_type = other DNA
tttgccgttggcgaatgttcttctgttggtctgcacggtgcaaaccgtctgggttccaactcgctggcagaactg

SEQ ID NO: 840069 - DNA, 75 bp, synthetic construct
  source 1..75: mol_type = other DNA
aaccggcggtgcgggtcgtgtatatcgctacaacaccaatggcggtatcgtaactggtgacggtatgggtatggc

SEQ ID NO: 840070 - DNA, 75 bp, synthetic construct
  source 1..75: mol_type = other DNA
gggcgtttcttttttcatgtcatgggtgctttagcagaaatggaacgtgaattaattgttgagagaacactggcc

SEQ ID NO: 840071 - DNA, 75 bp, synthetic construct
  source 1..75: mol_type = other DNA
ttccgctgcgtgacatggaattcgttcagtatcacccaaccggtctaccaggttccggtatcctgatgaccgaag

SEQ ID NO: 840072 - DNA, 75 bp, synthetic construct
  source 1..75: mol_type = other DNA
tggatattctggttgatgatggtcatgttcgcggcctggtagcaatgaacatgatggaaggcacgttggtgcaga

SEQ ID NO: 840073 - DNA, 75 bp, synthetic construct
  source 1..75: mol_type = other DNA
aacaagcgacggaacgtgccgccacggccggtaacggcaacgaagcggcaatcgaagcacaagccgcagccgttg

SEQ ID NO: 840074 - DNA, 75 bp, synthetic construct
  source 1..75: mol_type = other DNA
caacaaatgaccagaacacagatctacagcgtaatgcgctgaactgtgcaggatgcgagctgatttttgaagaca

SEQ ID NO: 840075 - DNA, 75 bp, synthetic construct
  source 1..75: mol_type = other DNA
ggcttaatgtccgagaggccgctacacggctcaaggtgagcaagacggccctgtacaccgcgctgcaatccacca

SEQ ID NO: 840076 - DNA, 75 bp, synthetic construct
  source 1..75: mol_type = other DNA
atggcactgatcggctatgcgcgggtatcgacggcggaacaggacaccgccttgcagacggatgcgctacgcaag

SEQ ID NO: 840077 - DNA, 75 bp, synthetic construct
  source 1..75: mol_type = other DNA
caacaaatgaccaaaacatagatttgcaacgcaatgcattaatgtgcgcaggatgtgaacagatttttgaggaca

SEQ ID NO: 840078 - DNA, 75 bp, synthetic construct
  source 1..75: mol_type = other DNA
agataagcggtacaaagtccgaaaggctgggactgaaaaaactgctcaggacattatcggcaggtgacactctgg

SEQ ID NO: 840079 - DNA, 75 bp, synthetic construct
  source 1..75: mol_type = other DNA
gggccctggctgaaatggaacgtgaattaattgttgaacgtacactggccggactggcggcagcgcgcgcacggg

SEQ ID NO: 840080 - DNA, 75 bp, synthetic construct
  source 1..75: mol_type = other DNA
gagaacggcaacaccacgccgctgtttgtggcgcaggggaatcagctgtttatgaacgacgtgttcctgaagcga

SEQ ID NO: 840081 - DNA, 75 bp, synthetic construct
  source 1..75: mol_type = other DNA
aggtgcagaaaacgaaaaacggcattccgtatgttgccggtataggtgcggggattgaggatgctgatggccagc

SEQ ID NO: 840082 - DNA, 75 bp, synthetic construct
  source 1..75: mol_type = other DNA
gatttacagtggcgttattgatatgcctgccggtcacggtcacatgacgctggagttttcggtgtcagcatggct

SEQ ID NO: 840083 - DNA, 75 bp, synthetic construct
  source 1..75: mol_type = other DNA
caggaccgcccgtcggatgtggtgtggccgtacaccaactgcgatgtggtggtggatgataacggcgtggggttt

SEQ ID NO: 840084 - DNA, 75 bp, synthetic construct
  source 1..75: mol_type = other DNA
ctgtatgccatcgggcagtactgtgaccagacggtcccggatggtttcgggggaacagagccgcggatgaccttc

SEQ ID NO: 840085 - DNA, 75 bp, synthetic construct
  source 1..75: mol_type = other DNA
gcccgcaatgcggatatcagcggacatatcagtgcgaactcgggcacgctgaataatgtcgtgatagcggagaac

SEQ ID NO: 840086 - DNA, 75 bp, synthetic construct
  source 1..75: mol_type = other DNA
tgtcactgggtatatcacaggtgagccagagagtggataacgtcagcagcgaactcacgcagacggtcagtcaga

SEQ ID NO: 840087 - DNA, 75 bp, synthetic construct
  source 1..75: mol_type = other DNA
gcgatctcgttaaaacagtgggcaaagctttcccccgggattcccgtgcaccggagcggtggccatcagggacca

SEQ ID NO: 840088 - DNA, 75 bp, synthetic construct
  source 1..75: mol_type = other DNA
cgcagcgtcaacctggtggggaaatctgcttttgtggaagccagtggccgggccagcaatgatgcagaagggtat

SEQ ID NO: 840089 - DNA, 75 bp, synthetic construct
  source 1..75: mol_type = other DNA
tcgggcgagcgatgatgcggaaggttatctgaatttttataaagggttgatcaataaaacgcatctcggcaagga

SEQ ID NO: 840090 - DNA, 75 bp, synthetic construct
  source 1..75: mol_type = other DNA
ccgccagattattattccgcccattatttttaacggtatagcgtatgacgatccggggagcggaaataacccagg

SEQ ID NO: 840091 - DNA, 75 bp, synthetic construct
  source 1..75: mol_type = other DNA
tgcgattgctggatatcgccctgatcgcttttattgccatttccctcgcctttccggtgtttatctggatgcgtc

SEQ ID NO: 840092 - DNA, 75 bp, synthetic construct
  source 1..75: mol_type = other DNA
atatgcctgctggtcgcggccacatgacgctggagttttctgtatcagcatggtgggtaaatggctggtatccca

SEQ ID NO: 840093 - DNA, 75 bp, synthetic construct
  source 1..75: mol_type = other DNA
caagatcatactgatatctactcctcatgccgtctgatagtacgaaaaaacggtgctgaaatttataaccgaacg

SEQ ID NO: 840094 - DNA, 75 bp, synthetic construct
  source 1..75: mol_type = other DNA
gtcagattattattccgcccattatttttaacggtatagcgtataccgatccgggaagtggtaataatccgggag

SEQ ID NO: 840095 - DNA, 75 bp, synthetic construct
  source 1..75: mol_type = other DNA
cattaccgtcagggtttatgacgatcagccgtttgaccggcagattgttattccggcggtggcattcagtggcgc

SEQ ID NO: 840096 - DNA, 75 bp, synthetic construct
  source 1..75: mol_type = other DNA
atctgagccgggaactgaactgcttcagggtcgatgatgaaaacaatgtcattcgggtgagaatgggcaggttac

SEQ ID NO: 840097 - DNA, 75 bp, synthetic construct
  source 1..75: mol_type = other DNA
ggtgcagaaaacaaaaaacggtattccctatgtggccgggattggtgcggggattgaggatgttgatggtcagac

SEQ ID NO: 840098 - DNA, 75 bp, synthetic construct
  source 1..75: mol_type = other DNA
cggttgaaggtccggtggacggattaaaaagtgtgctgctgaacagtacgccagtgctggacagtgaggggaata

SEQ ID NO: 840099 - DNA, 75 bp, synthetic construct
  source 1..75: mol_type = other DNA
ggaagtgacgaaagcaaagccggtgacgcgcaccattacgtccgcgaacattgaccgcctgcgggtcaccttcgg

SEQ ID NO: 840100 - DNA, 75 bp, synthetic construct
  source 1..75: mol_type = other DNA
gtgcgcttcagtctgcgcctgaccagtggaagcggtcaggacagccgtctggtgaccaccgccatcaccgcggat

SEQ ID NO: 840101 - DNA, 75 bp, synthetic construct
  source 1..75: mol_type = other DNA
ggttgtgggaactgatagataacagccagcttgcagatgatatggcggagatgaagaccagcatcacggaaaccc

SEQ ID NO: 840102 - DNA, 75 bp, synthetic construct
  source 1..75: mol_type = other DNA
tgtggctgattaaaacggaactgctggagacgcagaccgtggatttcagcgtgggtgctgaagggcttcgccatg

SEQ ID NO: 840103 - DNA, 75 bp, synthetic construct
  source 1..75: mol_type = other DNA
attattccgcccattatttttaacggtgtggcgtatgacgatccggggagcggtaataacccgggaggtacgcga

SEQ ID NO: 840104 - DNA, 75 bp, synthetic construct
  source 1..75: mol_type = other DNA
cagtcatactggtattcaacctgtaagctgcaggtgctgaagaacggacaggaaatctttcagcaacccgcgacg

SEQ ID NO: 840105 - DNA, 75 bp, synthetic construct
  source 1..75: mol_type = other DNA
atttacacgggtgttattgatatgcctgcaggcagtggtgtaatgacactggagttttctgtatcagcatggtgg

SEQ ID NO: 840106 - DNA, 75 bp, synthetic construct
  source 1..75: mol_type = other DNA
cggtattgagaacacccccgacggtatgcagagtcaggtgctgctggcggcagacaggattgcgatgattaatcc

SEQ ID NO: 840107 - DNA, 75 bp, synthetic construct
  source 1..75: mol_type = other DNA
tgagcgggagaatagcgatacttattcgtcatgccgtctgatagtgaagaaaaacggtgctgaaatttataaccg

SEQ ID NO: 840108 - DNA, 75 bp, synthetic construct
  source 1..75: mol_type = other DNA
tttcggtgtcagcatggctggtaaataactggtatcccacagcaagtatcagcgatttgctggttgtggtgatga

SEQ ID NO: 840109 - DNA, 75 bp, synthetic construct
  source 1..75: mol_type = other DNA
gtacgatgaccaggcttttgaccgtcagatagtcgtcccccccgttctgtttcgcggtggtaagcatgaaaactt

SEQ ID NO: 840110 - DNA, 75 bp, synthetic construct
  source 1..75: mol_type = other DNA
gtcacagattgagctgacgccaggctattttcagataacggcggtcccgaaactggctgtatatgacccgacagt

SEQ ID NO: 840111 - DNA, 75 bp, synthetic construct
  source 1..75: mol_type = other DNA
gttggtcagggcgatcagatattcatgaatgaagtgttcctgaaatatctgacggctcccaccattaccagcggc

SEQ ID NO: 840112 - DNA, 75 bp, synthetic construct
  source 1..75: mol_type = other DNA
gagcgaataactggacaccaacaaccagtatcagcgatctgctggttgttgtgatgaagaaagccaccgcaggca

SEQ ID NO: 840113 - DNA, 75 bp, synthetic construct
  source 1..75: mol_type = other DNA
gccgcgggtggtgaaaggtgtgagcttcagtctgcgtctgaccagcggaaggggggatgacagccgcctggtgac

SEQ ID NO: 840114 - DNA, 75 bp, synthetic construct
  source 1..75: mol_type = other DNA
gtgcggcggatgtggacaaatgggcgctgtatgtcatcggccagaattgcgaccagtcggtgccggatggctttg

SEQ ID NO: 840115 - DNA, 75 bp, synthetic construct
  source 1..75: mol_type = other DNA
gtgataaagaccgaactgctggaaacgcagacggtggatttcacgctcggatcacaggggctgcgccacacgccc

SEQ ID NO: 840116 - DNA, 75 bp, synthetic construct
  source 1..75: mol_type = other DNA
atgttgcacttgatctcgcagacaaggccattattcgcaatatggggattagagcggtcattacgtcaggccggc

SEQ ID NO: 840117 - DNA, 75 bp, synthetic construct
  source 1..75: mol_type = other DNA
attacaccgacccgcagaacggctggcagacctccacggaactggtggaagacccggaagccatactgcgctacg

SEQ ID NO: 840118 - DNA, 75 bp, synthetic construct
  source 1..75: mol_type = other DNA
cagacggacaccagtaataacctgaacagtatgtgggccgtgaaactgcagcagatgcaggatggtcgcctttat

SEQ ID NO: 840119 - DNA, 75 bp, synthetic construct
  source 1..75: mol_type = other DNA
agctacggccagcagggcgaacctgccaccaccacattccggattaatgcaccggcggcaccggccagcattgaa

SEQ ID NO: 840120 - DNA, 75 bp, synthetic construct
  source 1..75: mol_type = other DNA
atattccgccggatacgtttgccagtgatgtacaggttcttgtgatgaaaaagggggcatcaggtatcagtatca

SEQ ID NO: 840121 - DNA, 75 bp, synthetic construct
  source 1..75: mol_type = other DNA
agccgcagtcaggcaccctgaacagcgttattccaccggcagtgcagcacctgacggtggaggtgagcgcggctg

SEQ ID NO: 840122 - DNA, 75 bp, synthetic construct
  source 1..75: mol_type = other DNA
tctgggacggcagcctgaaaccggcatacagcaataacccggcctggtgcctgtgggacatgctgacccacccgc

SEQ ID NO: 840123 - DNA, 75 bp, synthetic construct
  source 1..75: mol_type = other DNA
tgtggggttgcaggtggatgcggagcagttcggcggccagcagatgacggtgaactaccatatccgcggtcgcat

SEQ ID NO: 840124 - DNA, 75 bp, synthetic construct
  source 1..75: mol_type = other DNA
ccacggcagggatcagtatcagctgacggtttattaacccggacgggcacctcaggaggtgccttttttattgac

SEQ ID NO: 840125 - DNA, 75 bp, synthetic construct
  source 1..75: mol_type = other DNA
atacagcaataacccggcctggtgcctgtgggacatgctgacccacccgcgctacggcatgggaaaacgcctggg

SEQ ID NO: 840126 - DNA, 75 bp, synthetic construct
  source 1..75: mol_type = other DNA
gtttcagtggtctgccgctcggggaatacaccctgacagtcagggcaattaacagttatggccagcagggggaac

SEQ ID NO: 840127 - DNA, 75 bp, synthetic construct
  source 1..75: mol_type = other DNA
cgtcaacctggtggggaaatctgcgtttgtggaggccagcgggcaggccagcaatgatggtgaagggtatctgga

SEQ ID NO: 840128 - DNA, 75 bp, synthetic construct
  source 1..75: mol_type = other DNA
gattaacagctatggccagcagggcgaacccgccaccaccacgttccggattaacgcaccggcagcgcctgccgg

SEQ ID NO: 840129 - DNA, 75 bp, synthetic construct
  source 1..75: mol_type = other DNA
caccgccatcactgccgatacggagcaccgtttcagtggcctgcctctcggggaatacaccctgacggtcagggc

SEQ ID NO: 840130 - DNA, 75 bp, synthetic construct
  source 1..75: mol_type = other DNA
ataccggggtattttcagataacggtggtcccgaaactggctgtatatgacccgacggtgcagtttgagttctag

SEQ ID NO: 840131 - DNA, 75 bp, synthetic construct
  source 1..75: mol_type = other DNA
ggttcaaaaaacgaaagacggcattccctatgtggccgggattggtgcagggattgaggatactgatggccagcc

SEQ ID NO: 840132 - DNA, 75 bp, synthetic construct
  source 1..75: mol_type = other DNA
tgcctcgaccacggataaaaaactgggtgaccaggccgtgaccatacagcaaatccagcgggttcagtcagacac

SEQ ID NO: 840133 - DNA, 75 bp, synthetic construct
  source 1..75: mol_type = other DNA
gccatcagggaccattaccgtcagggtttatgacgatcagccgtttgaccggcagattgttattccggcggtggc

SEQ ID NO: 840134 - DNA, 75 bp, synthetic construct
  source 1..75: mol_type = other DNA
gaagctgcaacagatgaaggacggacgcctttatattgcgggtatcggtgccggtattgagaatacgccagcagg

SEQ ID NO: 840135 - DNA, 75 bp, synthetic construct
  source 1..75: mol_type = other DNA
acacgccggttgaggcaaaggacaatcttaagtccacgcagatgatgagcgtgattgacgccatcggtgagggac

SEQ ID NO: 840136 - DNA, 75 bp, synthetic construct
  source 1..75: mol_type = other DNA
gagtggaaagacgccagtgataaatggaatgccatgtggggcgtcaaaattgagcagaccagagacggcagacat

SEQ ID NO: 840137 - DNA, 75 bp, synthetic construct
  source 1..75: mol_type = other DNA
ccggacgggcggctgacggcgaaaaatgccgatatcagcggtaacgtgaatgcgaactcagggacgctcaacaac

SEQ ID NO: 840138 - DNA, 75 bp, synthetic construct
  source 1..75: mol_type = other DNA
cgtcagggtttatgacgatcagccgtttgaccggcagattgttattccggcggtggcattcagcggcgctaaaca

SEQ ID NO: 840139 - DNA, 75 bp, synthetic construct
  source 1..75: mol_type = other DNA
gtcaaatcattattccgcccattatctttaacggaatagcgtatagcgatccgggaagtggtaataacccgggag

SEQ ID NO: 840140 - DNA, 75 bp, synthetic construct
  source 1..75: mol_type = other DNA
ggtcagaggtgacttcgttaaagctgtatccaaatcattcccgaaacaggctggtacgtggggtaatacggaaac

SEQ ID NO: 840141 - DNA, 75 bp, synthetic construct
  source 1..75: mol_type = other DNA
gtgaaatcacgctgccatcctccggcaccacgctgataagcctggttgacgggcaggggagtccggtcagcgtgg

SEQ ID NO: 840142 - DNA, 75 bp, synthetic construct
  source 1..75: mol_type = other DNA
cctgttccgctgtgtgagtatccgtgagaacgacgacggtacgtatgccatcactgcagtgcagcatgtaccgga

SEQ ID NO: 840143 - DNA, 75 bp, synthetic construct
  source 1..75: mol_type = other DNA
gcagggcgaacctgccaccaccacattccggattaatgcaccggcggcaccggccagcattgaactgacgccggg

SEQ ID NO: 840144 - DNA, 75 bp, synthetic construct
  source 1..75: mol_type = other DNA
ggtatcccacagcaagtatcagcgatttgctggttgttgtgatgaagaaagccactgcaggcatcacgattagct

SEQ ID NO: 840145 - DNA, 75 bp, synthetic construct
  source 1..75: mol_type = other DNA
caccgccatcactgccgatacggagcaccgtttcagcggtctgccgccgggggaatacaccctgacggtcagggc

SEQ ID NO: 840146 - DNA, 75 bp, synthetic construct
  source 1..75: mol_type = other DNA
tcattgtgacccgaacggcttggctgcttcgccgtctgtgccgccactgaatactgcaccgtatgagttccgccc

SEQ ID NO: 840147 - DNA, 75 bp, synthetic construct
  source 1..75: mol_type = other DNA
atgccaatcaatctacaccgcctgcttacgcaggctgccaatgctgactcgctcaataccgcaaacgcagatgta

SEQ ID NO: 840148 - DNA, 75 bp, synthetic construct
  source 1..75: mol_type = other DNA
atcggagcaagatcagacttttgctaaattcgcaaaagactttgcacattttgctaatttcaccgtaccgctctg

SEQ ID NO: 840149 - DNA, 75 bp, synthetic construct
  source 1..75: mol_type = other DNA
tcttcatatggtgctaataactggacgccaacgaccagtatcagcgaccttcttgttgttgtgatgaagaaatct

SEQ ID NO: 840150 - DNA, 75 bp, synthetic construct
  source 1..75: mol_type = other DNA
gcggtttacgggctggatgtgttagccagtatcggtagcgacattgcgcttatgttgcttaatggcattgcgcaa

SEQ ID NO: 840151 - DNA, 75 bp, synthetic construct
  source 1..75: mol_type = other DNA
gaccggattgcgatgattaatcctgcgaatggcaacacaaagccgatgtttgttggtcagggcgatcagatattc

SEQ ID NO: 840152 - DNA, 75 bp, synthetic construct
  source 1..75: mol_type = other DNA
cggtgtatgacccgacggtacagtttgaattctggttctcagaaaaacgcatcacgaacacggcacaggtggaaa

SEQ ID NO: 840153 - DNA, 75 bp, synthetic construct
  source 1..75: mol_type = other DNA
gtgattgatgccattggtgaagggccgattgaaggtccggtgaagggactgcagagtattctggtgaacaaaacc

SEQ ID NO: 840154 - DNA, 75 bp, synthetic construct
  source 1..75: mol_type = other DNA
cagataacagcggtcccgcgtcttgcggtgtatgacccgacggtacagtttgagttctggttttcggagacaaaa

SEQ ID NO: 840155 - DNA, 75 bp, synthetic construct
  source 1..75: mol_type = other DNA
ggaagtgaagcatgacgcgccggtcacccggaccatcacgtcggcaaatatcgaccgtctgcgctttaccctggg

SEQ ID NO: 840156 - DNA, 75 bp, synthetic construct
  source 1..75: mol_type = other DNA
actgtcagattaaggggaaactgtcagccaaccagattgaaggcgatatagtcaaaacagtgggtaaggcttttc

SEQ ID NO: 840157 - DNA, 75 bp, synthetic construct
  source 1..75: mol_type = other DNA
tgatagtgaagaaaaacggtgctgaaatttataaccgtaccgcgctggataatacgctggtttatacaggtgtta

SEQ ID NO: 840158 - DNA, 75 bp, synthetic construct
  source 1..75: mol_type = other DNA
atccagagaaactaaaggggccattcccggtagctacagtgcggttattgatatgccgagtggcaggggaagcgt

SEQ ID NO: 840159 - DNA, 75 bp, synthetic construct
  source 1..75: mol_type = other DNA
atcttcatcaggagcgaataactggacaccaacaaccagtatcagcgatctgctggttgtggtgatgaaaaaatc

SEQ ID NO: 840160 - DNA, 75 bp, synthetic construct
  source 1..75: mol_type = other DNA
gctcccaccattaccagcggtggcaatcccccaacgttttcactgacacctgacgggcgactgacggcgaaaaat

SEQ ID NO: 840161 - DNA, 75 bp, synthetic construct
  source 1..75: mol_type = other DNA
gcttcagaacaaaacggtctggtcgtcatacaccgaaatcatcgatgtggagcagcgctacccgaacacggcact

SEQ ID NO: 840162 - DNA, 75 bp, synthetic construct
  source 1..75: mol_type = other DNA
ctgctggttgtggtgatagaaaaaatccacagcaggtatcagtatcagctgaattttataacccagaacgggcgt

SEQ ID NO: 840163 - DNA, 75 bp, synthetic construct
  source 1..75: mol_type = other DNA
ataccccgcgtgaagcgaaggacaacctgaaatcaacgcagttgctgagtgtgattgatgccattagtgaaggcc

SEQ ID NO: 840164 - DNA, 75 bp, synthetic construct
  source 1..75: mol_type = other DNA
agttgagcaactggaggatgaggtcaatcagcgactggagagtgatattgccggggtgacccaaaaaatcgggga

SEQ ID NO: 840165 - DNA, 75 bp, synthetic construct
  source 1..75: mol_type = other DNA
ttcagtctgcgcctgaccagcggaagcggagaagacagccgtctggtgaccaccgctatcactgccgacacggag

SEQ ID NO: 840166 - DNA, 75 bp, synthetic construct
  source 1..75: mol_type = other DNA
agaagtttgaccggcaggtcatgataccgccagtgttattccgcggtggtaagcatgagaatttcaacagtaata

SEQ ID NO: 840167 - DNA, 75 bp, synthetic construct
  source 1..75: mol_type = other DNA
atcacggtaagaatcagtgatgatcagaagtttgaccggcaggtcatgataccgccagtgttattccgcggtggt

SEQ ID NO: 840168 - DNA, 75 bp, synthetic construct
  source 1..75: mol_type = other DNA
gataaacagctatggccagcagggggaacctgccaccaccacgttccggattaacgcaccggcagcacctgccac

SEQ ID NO: 840169 - DNA, 75 bp, synthetic construct
  source 1..75: mol_type = other DNA
cacattaagccggggaaggatttctggttttatgtgcgcagcgtcaacctggtggggaaatctgcgtttgtggag

SEQ ID NO: 840170 - DNA, 75 bp, synthetic construct
  source 1..75: mol_type = other DNA
ataactggtatcccacagcaagtatcagcgatttgctggttgtggtgatgaagaaagccaccgcaggcatcagta

SEQ ID NO: 840171 - DNA, 75 bp, synthetic construct
  source 1..75: mol_type = other DNA
agagatcaatcacccacaagcattaatgctacttatacgtgtgtctggcaaaactaaacgctgccatgaacgaat

SEQ ID NO: 840172 - DNA, 75 bp, synthetic construct
  source 1..75: mol_type = other DNA
gaaacccgcaatgaaatcacgcagacggtcagtaaaactctggaagaccagagtgccaccatacagcagatacag

SEQ ID NO: 840173 - DNA, 75 bp, synthetic construct
  source 1..75: mol_type = other DNA
cagataacggcggtcccgcgtcttgcggtgtatgatccgacggtacagtttgagttctggttctcggaaaagcgg

SEQ ID NO: 840174 - DNA, 75 bp, synthetic construct
  source 1..75: mol_type = other DNA
gtcaatcagcgactggagagtgatattgccggggtgacccaaaaaatcggggaaactgaaaacagcctcacgcag

SEQ ID NO: 840175 - DNA, 75 bp, synthetic construct
  source 1..75: mol_type = other DNA
cagtgtgaatgcgaactccgggacgctcaacaacgtcacgattaatgagaactgtcagattaaggggaaactgtc

SEQ ID NO: 840176 - DNA, 75 bp, synthetic construct
  source 1..75: mol_type = other DNA
atgaacgacgtgttcctgaagcgactgtttgcggtgagcatcacgtcatccggcaatcctcctacgttttccctg

SEQ ID NO: 840177 - DNA, 75 bp, synthetic construct
  source 1..75: mol_type = other DNA
ccagattgaaggcgatctcgttaaaacagtgggtaaggctttccctcgtgactcccgtgcaccgaagcgttggcc

SEQ ID NO: 840178 - DNA, 75 bp, synthetic construct
  source 1..75: mol_type = other DNA
atatcagtggcagtgtgaatgcgaacgccgggacgctcaacaacgtcacgattaatgagaactgtcagattaagg

SEQ ID NO: 840179 - DNA, 75 bp, synthetic construct
  source 1..75: mol_type = other DNA
ggaaagctgaccgctaaaaatgcggatatcagtggcagtgtgaatgcgaacgccgggacgctcaacaacgtcacg

SEQ ID NO: 840180 - DNA, 75 bp, synthetic construct
  source 1..75: mol_type = other DNA
aggtcagaggagatttcgttaaagctgtatcaaaagccttcccgaaaaaagtcggtacgtggggtaacacggaaa

SEQ ID NO: 840181 - DNA, 75 bp, synthetic construct
  source 1..75: mol_type = other DNA
gtgtgaacaccgttggcaaatcggcattcgtggaggctgttggtcagccgagtgatgatgcatccggctatctgg

SEQ ID NO: 840182 - DNA, 75 bp, synthetic construct
  source 1..75: mol_type = other DNA
acgcgtaccattacgtccgcgaacattgaccgcctgcgggttaccttcggggtgcagtcactggtgcagaccacg

SEQ ID NO: 840183 - DNA, 75 bp, synthetic construct
  source 1..75: mol_type = other DNA
tgaagacggtggggaaagcctttccccggaataacagttatgccagcgggacggtaaccgtcacagtttacgatg

SEQ ID NO: 840184 - DNA, 75 bp, synthetic construct
  source 1..75: mol_type = other DNA
agccaggaacgcggatatcagcggagcaattaccgcgaataccggcacgctcaataatgtcaccattaacgagaa

SEQ ID NO: 840185 - DNA, 75 bp, synthetic construct
  source 1..75: mol_type = other DNA
cacgcagaccgtcaataagaaactggaagaccagagtgcagcgatccagcagatacagaaggttcaggttgatac

SEQ ID NO: 840186 - DNA, 75 bp, synthetic construct
  source 1..75: mol_type = other DNA
gacacgccgaaggtggtgaagggcgtgagcttcctgctccgtctgaccgtggcagcggacgacggcagtgagcgg

SEQ ID NO: 840187 - DNA, 75 bp, synthetic construct
  source 1..75: mol_type = other DNA
actgggcgtggaagtgacgaaggcaaagccggtgacgcgcaccattacgtccgcgaacattgaccgcctgcgggt

SEQ ID NO: 840188 - DNA, 75 bp, synthetic construct
  source 1..75: mol_type = other DNA
ttcttcatatggtgcaaataactggacgccaacgaccagtatcagcgaccttcttgttgtcgtgatgaagaaatc

SEQ ID NO: 840189 - DNA, 75 bp, synthetic construct
  source 1..75: mol_type = other DNA
atgggtaaaggtggcagtaaggggcataccccgcgcgaagtgaaggacaacctgaaatcatcccagctgctgagc

SEQ ID NO: 840190 - DNA, 75 bp, synthetic construct
  source 1..75: mol_type = other DNA
gcctacaacacaaagaccgaagagttttattacaatgcagatggctccgcgatgaccctgcgggagtggcgagcg

SEQ ID NO: 840191 - DNA, 75 bp, synthetic construct
  source 1..75: mol_type = other DNA
aataactggacgccaacgaccagtatcagcgaccttcttgttgtcgtgatgaagaaatcaacagccggtatcagt

SEQ ID NO: 840192 - DNA, 75 bp, synthetic construct
  source 1..75: mol_type = other DNA
ggtaacgtgaatgcgaactccgggacgctcaacaatgtcacgattaatcagaactgccggattctgggaaaactg

SEQ ID NO: 840193 - DNA, 75 bp, synthetic construct
  source 1..75: mol_type = other DNA
agccggtgagcgtggccatcactgcacaccccgcgccggaccggatacaggtcagcaccctgcctgatggtgtgg

SEQ ID NO: 840194 - DNA, 75 bp, synthetic construct
  source 1..75: mol_type = other DNA
gctcaggggctgtgggagctgatagacaacagccagcttgcggatgagatggcggagatgaagaccaccatcacc

SEQ ID NO: 840195 - DNA, 75 bp, synthetic construct
  source 1..75: mol_type = other DNA
gtggtgaaaacagccgcctggtgaccaccgccatcactgccgacacggagcaccgtttcagtggcctgcctctgg

SEQ ID NO: 840196 - DNA, 75 bp, synthetic construct
  source 1..75: mol_type = other DNA
gtgacactgccggagacaggtgccgccacggtgaacctgattaacggcagcggtaagccggtgagcgtggccatc

SEQ ID NO: 840197 - DNA, 75 bp, synthetic construct
  source 1..75: mol_type = other DNA
gcctgaccgtggtcgcggatgacggcagtgagcggctggtcagcacggcccggacgacggaaaccacataccgct

SEQ ID NO: 840198 - DNA, 75 bp, synthetic construct
  source 1..75: mol_type = other DNA
ggcaccgcccggtgtcgcggaatatgtgaacaacggaggaaaacatcatgcagtatgcgaaacctgtcactctga

SEQ ID NO: 840199 - DNA, 75 bp, synthetic construct
  source 1..75: mol_type = other DNA
gtcagggcaattaacagttatggccagcagggcgaaccggccaccaccacgttcaggattaatgcacctgcggta

SEQ ID NO: 840200 - DNA, 75 bp, synthetic construct
  source 1..75: mol_type = other DNA
gttcaggttgatacaaataataacctgaacagcatgtgggccgtgaaactgcagcagatgcaggacggacgcctt

SEQ ID NO: 840201 - DNA, 75 bp, synthetic construct
  source 1..75: mol_type = other DNA
atgcgttcggctgtaccagtcgcggtcaggctcaccgtgccgggctgtgggtgataaagaccggactgctggaaa

SEQ ID NO: 840202 - DNA, 75 bp, synthetic construct
  source 1..75: mol_type = other DNA
catctgtatcaactcttgaagaactcgaatcaaacctaaaagacatcgacgccgttttggatctggttaacgttg

SEQ ID NO: 840203 - DNA, 75 bp, synthetic construct
  source 1..75: mol_type = other DNA
atctggcgcaggcgaaatgggacacgccgcgggtggtgaagggtgtgcgcttcagtctgcgcctgaaccgtggaa

SEQ ID NO: 840204 - DNA, 75 bp, synthetic construct
  source 1..75: mol_type = other DNA
agtaaaacgctggaggaccagagcgccaccatacagcagatacagcgcgtgcagaaggacacaaatgatgacctt

SEQ ID NO: 840205 - DNA, 75 bp, synthetic construct
  source 1..75: mol_type = other DNA
ccgaagacggcaggcattatgtcgcggggcttggccttagtatggaggatacggaggaaggcaaactgagccagt

SEQ ID NO: 840206 - DNA, 75 bp, synthetic construct
  source 1..75: mol_type = other DNA
tgacctggcggaaatcagaacgtccatcacggatgtcagtaatgaaatcacgcagaccgtcaataagaaactgga

SEQ ID NO: 840207 - DNA, 75 bp, synthetic construct
  source 1..75: mol_type = other DNA
aaaccacggggacctggctggggcgggggcttttctgcactcgggaaaacctgacggacagcagccatgattact

SEQ ID NO: 840208 - DNA, 75 bp, synthetic construct
  source 1..75: mol_type = other DNA
gacggcgtggcagaatacagcgtgtgggggctgaagctgccggtgctgcgtcagcgcctgttccgctgtgtgagc

SEQ ID NO: 840209 - DNA, 75 bp, synthetic construct
  source 1..75: mol_type = other DNA
ggtcatcgctggcgcttgatgctgcacctgatgagcttgcttacttctaccgtgctgaaaactgcaactggcagt

SEQ ID NO: 840210 - DNA, 75 bp, synthetic construct
  source 1..75: mol_type = other DNA
tttctgcgaaaaatgcggatatcagcggtaacgtgaacgcgaactccgggacgctcaacaacgtcacgattaatc

SEQ ID NO: 840211 - DNA, 75 bp, synthetic construct
  source 1..75: mol_type = other DNA
cgctgtgtctccatccgggaaaacacggacggcacctttgccatcacggcggtgcagcacgtaccggaaaaagaa

SEQ ID NO: 840212 - DNA, 75 bp, synthetic construct
  source 1..75: mol_type = other DNA
agcggagcaattaccgcgaataccggcacgctcaataatgtcaccattaacgagaactgtgtcatcagagggaaa

SEQ ID NO: 840213 - DNA, 75 bp, synthetic construct
  source 1..75: mol_type = other DNA
ttattcgacgttccaagatatgccctgtaaagcgtaaacccgttaaggcggcatacaacacaaagaccgaagagt

SEQ ID NO: 840214 - DNA, 75 bp, synthetic construct
  source 1..75: mol_type = other DNA
agcggtagcgtgaatgcgaactccgggacgctcaacaacgtcacgattaacgagaactgtcgggttctgggaaaa

SEQ ID NO: 840215 - DNA, 75 bp, synthetic construct
  source 1..75: mol_type = other DNA
tactgcgaccagagtgttccggatggtttcgggggaacagagccgcggatgacctttaatgcgtacctgtcacaa

SEQ ID NO: 840216 - DNA, 75 bp, synthetic construct
  source 1..75: mol_type = other DNA
ttttccagaaaggcaatcagggggcaggcaatatcaccgactgtacggtgattgtgaccaaaaaagcggcttccg

SEQ ID NO: 840217 - DNA, 75 bp, synthetic construct
  source 1..75: mol_type = other DNA
tcaccatcagcgatgatcataactttgaccgtcaaatcattattccgcccattatctttaacggaatagcgtata

SEQ ID NO: 840218 - DNA, 75 bp, synthetic construct
  source 1..75: mol_type = other DNA
tcacgctcgggtcacagggactgcgtcacacgcccggtgacatcattgaaatctgtgataacgactatgccggga

SEQ ID NO: 840219 - DNA, 75 bp, synthetic construct
  source 1..75: mol_type = other DNA
gccaccctcatccctgatgaacaacgcatcagcttctggccgcagcattttggcctcattccacagtgggtgacc

SEQ ID NO: 840220 - DNA, 75 bp, synthetic construct
  source 1..75: mol_type = other DNA
cgttggaagagaatctggccgccctgcgtcggctgaaggaagattacccggacaaagtattgatcgcttcgatca

SEQ ID NO: 840221 - DNA, 75 bp, synthetic construct
  source 1..75: mol_type = other DNA
tacgaagctctactcgcgctgtaatgatcaagtttctggaaatttttcttcagcaaccagtcgtgttagagtcaa

SEQ ID NO: 840222 - DNA, 75 bp, synthetic construct
  source 1..75: mol_type = other DNA
caaaatatgcgagcgcgcgttactccagggggaatgggggtagtgactccaacttactgatagtgttttatgttc

SEQ ID NO: 840223 - DNA, 75 bp, synthetic construct
  source 1..75: mol_type = other DNA
tgctgaaaatgactctgggccgaagcgcttctgctgtgatcggtgtagttcataccgtaaacgaccccgaaagtg

SEQ ID NO: 840224 - DNA, 75 bp, synthetic construct
  source 1..75: mol_type = other DNA
ttgaaactcatgcagtgtggctctggaatgagtttatgaaggaacacggccagaaacttattcagatccttgggc

SEQ ID NO: 840225 - DNA, 75 bp, synthetic construct
  source 1..75: mol_type = other DNA
cagtacatggaacccctgctttatacatcgctatgagcaagggtaataaagacgtcatgttatcttatatatcga

SEQ ID NO: 840226 - DNA, 75 bp, synthetic construct
  source 1..75: mol_type = other DNA
ctgaacctgctccgacaaggaaaacagtaccgcctgcctaaagggattctggggcaacgcagcaacacggatttg

SEQ ID NO: 840227 - DNA, 75 bp, synthetic construct
  source 1..75: mol_type = other DNA
tccgacttggactaatactgacgcgcctcaacaatggtgagtcactgaccgtcaggggccttgctgacgaattta

SEQ ID NO: 840228 - DNA, 75 bp, synthetic construct
  source 1..75: mol_type = other DNA
cagatggaacagagtttttttgccgtcgacctgccactgcttgcccggctataccgggcctgtgaagcgggcgat

SEQ ID NO: 840229 - DNA, 75 bp, synthetic construct
  source 1..75: mol_type = other DNA
taattcgcaggagttaaataattcgcaggagttaaataatccacaggagctaaataatccgcaggagctaaataa

SEQ ID NO: 840230 - DNA, 75 bp, synthetic construct
  source 1..75: mol_type = other DNA
tattattaacggaattaattagctttatgattttacttgtagttaatttaaaattgcataccttcaaatatatat

SEQ ID NO: 840231 - DNA, 75 bp, synthetic construct
  source 1..75: mol_type = other DNA
catgttgctccatggtttacccaccgtcatctattgccaggacaggaaataattcatacttcccggtctggcgat

SEQ ID NO: 840232 - DNA, 75 bp, synthetic construct
  source 1..75: mol_type = other DNA
cctgggacgcgaaacgctggatgagttcgaagatttgcttgcagctcacgccgcagaaaatgaattcctgccctg

SEQ ID NO: 840233 - DNA, 75 bp, synthetic construct
  source 1..75: mol_type = other DNA
ttaagaaagctctaaaacagctagaagaaattgggtatctggaatatcaggaaatgaagaatggcagggatatag

SEQ ID NO: 840234 - DNA, 75 bp, synthetic construct
  source 1..75: mol_type = other DNA
cagaatatttccagtggtggcagtgctaccagcaccattattaatgccggattccaggaggtttccagtggtggc

SEQ ID NO: 840235 - DNA, 75 bp, synthetic construct
  source 1..75: mol_type = other DNA
ggtgttgcacaaacgaatgcaaaggtcactgtctcacagaacaaccgtattatttatcaagaaaatgttcctcct

SEQ ID NO: 840236 - DNA, 75 bp, synthetic construct
  source 1..75: mol_type = other DNA
cgatccgcattaccacaccgaccacctccactggtggtggaacaactaacgcccagtttacctatattaatagac

SEQ ID NO: 840237 - DNA, 75 bp, synthetic construct
  source 1..75: mol_type = other DNA
caatcgcagcggcgctgccgtttatcagttacgcgcctaatcgtttagtttcgggtgaggggcgtcatctctggc

SEQ ID NO: 840238 - DNA, 75 bp, synthetic construct
  source 1..75: mol_type = other DNA
cagggcctgacaataaaagggaacagcctgaacaacgccagcgggaaggtgttcagcggcggtgatatgcttgct

SEQ ID NO: 840239 - DNA, 75 bp, synthetic construct
  source 1..75: mol_type = other DNA
atccgtaaacgccgtgtagaaacggaaacggaggcaaaggcgcaaaatgaagaatggcgtcagatgtttcatgaa

SEQ ID NO: 840240 - DNA, 75 bp, synthetic construct
  source 1..75: mol_type = other DNA
ggccctggctgatttccgcaaactcccatcaccagcagcccttcataaaatgaaggtccttcaggaggttgcgga

SEQ ID NO: 840241 - DNA, 75 bp, synthetic construct
  source 1..75: mol_type = other DNA
aacgtatcttcaacggattatattaccctgccggggatcagcatttatgcggacgataaagccatccaggatgcc

SEQ ID NO: 840242 - DNA, 75 bp, synthetic construct
  source 1..75: mol_type = other DNA
gttgtcactgctggcctgtagcgatgctatccgccggatcactacgtatcctctatggcgctggttgctgcatat

SEQ ID NO: 840243 - DNA, 75 bp, synthetic construct
  source 1..75: mol_type = other DNA
ttctcattcagaaattaatggaaattgacaaaactgtgccattcgatgcggacgtagtgaccggtgaggaatggt

SEQ ID NO: 840244 - DNA, 75 bp, synthetic construct
  source 1..75: mol_type = other DNA
tgataatagtgcctatcaggatattcagaacgcccccagcccggcggcgcaaatccgcatacaaaaacagcgtga

SEQ ID NO: 840245 - DNA, 75 bp, synthetic construct
  source 1..75: mol_type = other DNA
tcagattatcgttcctcctgcaaccgaggataattgtgttgttctctcaattcgtaaaccatcactaacgcgttt

SEQ ID NO: 840246 - DNA, 75 bp, synthetic construct
  source 1..75: mol_type = other DNA
ctgtcgtgacaggaccggcaggcgaggaaatcttctgcgacgaacatggtcgcgtgcgggtgaggttcaactggg

SEQ ID NO: 840247 - DNA, 75 bp, synthetic construct
  source 1..75: mol_type = other DNA
tgaaagggtctttatctgaggatgtctttcaggacagaggcacgattgccggttcggtgcatgttgacgctgtaa

SEQ ID NO: 840248 - DNA, 75 bp, synthetic construct
  source 1..75: mol_type = other DNA
ctgaaaaacaccgatatcatgacccttgacctgggcgcattgcaggccggggcatcggtgaagggtgagtttgaa

SEQ ID NO: 840249 - DNA, 75 bp, synthetic construct
  source 1..75: mol_type = other DNA
caccagaggactttattgtatctgttttaaacttgaatttaagcgagagtttttgcgctcaaaacatatatgaca

SEQ ID NO: 840250 - DNA, 75 bp, synthetic construct
  source 1..75: mol_type = other DNA
tttcgctggtattggctggaggtgtcgttgccgctctgcttggcccgtttctggcaagcttcggaagcgcatttt

SEQ ID NO: 840251 - DNA, 75 bp, synthetic construct
  source 1..75: mol_type = other DNA
actcccacagatcgctgtggttatccagcttcacattctggggcgtttcgttccctcctttttcaccggaagact

SEQ ID NO: 840252 - DNA, 75 bp, synthetic construct
  source 1..75: mol_type = other DNA
atgcgtgatgatcgtttttattccctgaaacaagaattttccggcgtatctgatgatgcggctgatgcgctttcg

SEQ ID NO: 840253 - DNA, 75 bp, synthetic construct
  source 1..75: mol_type = other DNA
gggcagatagccggtgagaaagcgaagcgggacccggcagcactgaatcaggcccgcgcagagcttgaggcagca

SEQ ID NO: 840254 - DNA, 75 bp, synthetic construct
  source 1..75: mol_type = other DNA
agactgtttcgacactggcaacggttgctgccggtctggccggtggtctggtgggagactcaggtgcttcagcgg

SEQ ID NO: 840255 - DNA, 75 bp, synthetic construct
  source 1..75: mol_type = other DNA
gggatattcaaaaatcacaaactggttaggtctacaggataaaaaggattttttagacccaaatttaaatgaaga

SEQ ID NO: 840256 - DNA, 75 bp, synthetic construct
  source 1..75: mol_type = other DNA
tgattacctgccacagacaaattggccaacaactcaattaccaccaggatatacttgtgcagaaccctatttatt

SEQ ID NO: 840257 - DNA, 75 bp, synthetic construct
  source 1..75: mol_type = other DNA
gtagaaatattgactttgtatttggtaatttatcagaagagctttatcaaagacttaaaaataataataatacgc

SEQ ID NO: 840258 - DNA, 75 bp, synthetic construct
  source 1..75: mol_type = other DNA
ggcgacatgctaccgccgctctcgctgctgctgttgcagaaaatggcggctaacacggcgattgcccggattcgg

SEQ ID NO: 840259 - DNA, 75 bp, synthetic construct
  source 1..75: mol_type = other DNA
gctggtggagtggggaccggttatcccgggagggaaggtcgagatcactatcagtaagtacgagaaaacggcggg

SEQ ID NO: 840260 - DNA, 75 bp, synthetic construct
  source 1..75: mol_type = other DNA
aaaactcgatccggtactgtgccgcgaccacgaaatcgatttgatgatcgacattctctgccgccgtcgtaaaaa

SEQ ID NO: 840261 - DNA, 75 bp, synthetic construct
  source 1..75: mol_type = other DNA
cggctgatgaagctggcagcgaacagccggaagagaccgctgaaacagtttccccggtacaacggctggcacagc

SEQ ID NO: 840262 - DNA, 75 bp, synthetic construct
  source 1..75: mol_type = other DNA
aatcctcatgccataaccgctggacttaactatacccccttcccgctgatgaccttcagcgcggagcaacgctag

SEQ ID NO: 840263 - DNA, 75 bp, synthetic construct
  source 1..75: mol_type = other DNA
tgaacacaccacacgtcacaattgagcgttatagcgaacttactggtctttctatcgacacaatcaacgatatgc

SEQ ID NO: 840264 - DNA, 75 bp, synthetic construct
  source 1..75: mol_type = other DNA
gatgtcaaaggcaatttgtcgaatcgtgaacagagcatggtggtcgttcaggcacctacgctaagccagaaagat

SEQ ID NO: 840265 - DNA, 75 bp, synthetic construct
  source 1..75: mol_type = other DNA
ggtacagcttatccgtgacagcctgcctgagcagagaaaggacgaagccgtggggatcattctgagtaatgaccc

SEQ ID NO: 840266 - DNA, 75 bp, synthetic construct
  source 1..75: mol_type = other DNA
caattgccgatttcattcaatatttagaacagcaaccaccgcatggattacaggggttggtatggtttcggctac

SEQ ID NO: 840267 - DNA, 75 bp, synthetic construct
  source 1..75: mol_type = other DNA
attcggcataaaccactgacgccacgctggtcgttaataattactcaacatgcagacgagcaactttttgatctg

SEQ ID NO: 840268 - DNA, 75 bp, synthetic construct
  source 1..75: mol_type = other DNA
ttgcaggagctgagtgtggcgccacaaacgttggctgattttacccaacagctggagcaaaaaccgccctcaggg

SEQ ID NO: 840269 - DNA, 75 bp, synthetic construct
  source 1..75: mol_type = other DNA
agtcagagtcagagtcagaacaggataataccggtgccgtaccggctgatgaggccgacagagaacaaccggaag

SEQ ID NO: 840270 - DNA, 75 bp, synthetic construct
  source 1..75: mol_type = other DNA
cgggaatatggcgagaataaccccagactttaccgcgcaggtacggaacccctggtggatctcgccctggaagag

SEQ ID NO: 840271 - DNA, 75 bp, synthetic construct
  source 1..75: mol_type = other DNA
tcgataattttgacaatcatgtagtggtcatgagcgaagtcgttcgactgctcaagtcatatcgccaaatgcaat

SEQ ID NO: 840272 - DNA, 75 bp, synthetic construct
  source 1..75: mol_type = other DNA
cgcacatgcccagtcaacggctgaccatgccagcgctaacgccaacaccgctctgatgaacggcgtcaaactttc

SEQ ID NO: 840273 - DNA, 75 bp, synthetic construct
  source 1..75: mol_type = other DNA
cagcctgtcacaagacgtaacccaaacgcagcaacagttaaccaacacccaaaaccgggtcgctgataacagcca

SEQ ID NO: 840274 - DNA, 75 bp, synthetic construct
  source 1..75: mol_type = other DNA
ttatctgcccgacgcggttctgccacgctggaagaactttttgccgctgcatacctgcgttactgtcgctatatc

SEQ ID NO: 840275 - DNA, 75 bp, synthetic construct
  source 1..75: mol_type = other DNA
aataattgttcagaaaatatcagaagcgattgatgatttgcgtggcaccaagggctgggaagaaaaagcccgaaa

SEQ ID NO: 840276 - DNA, 75 bp, synthetic construct
  source 1..75: mol_type = other DNA
tatctgatgtacaaaaccgatcaggtccgtgaatccctcggtcattccaacttccgagtcattgttggtaagtaa

SEQ ID NO: 840277 - DNA, 75 bp, synthetic construct
  source 1..75: mol_type = other DNA
agtatcgtgtacgatttgactagaaatacagatgtagaaaatatagataaactaaaaaaaaatctaatagagaaa

SEQ ID NO: 840278 - DNA, 75 bp, synthetic construct
  source 1..75: mol_type = other DNA
ccataaaggaatagcaaaagccacattcctagaaaaaatctcacgggctttattagctgtccacgatctcgacta

SEQ ID NO: 840279 - DNA, 75 bp, synthetic construct
  source 1..75: mol_type = other DNA
gccagaacgatgatagcccgtgctatctggttgcatagcggcaggaaagcgggaaaggatgagccatacagagca

SEQ ID NO: 840280 - DNA, 75 bp, synthetic construct
  source 1..75: mol_type = other DNA
gaccgccgcccgttatcaaagcatggtaaacgcccgtcaggacgctgcggataacgcacagcagcaacaagccga

SEQ ID NO: 840281 - DNA, 75 bp, synthetic construct
  source 1..75: mol_type = other DNA
tggaggcaatccaaccagggatgtcacatgaagaagttgaccagaaaattggacgcttcatgattcgtactggaa

SEQ ID NO: 840282 - DNA, 75 bp, synthetic construct
  source 1..75: mol_type = other DNA
ctttttttggcgttatataattaaattgggatttctagacggcaaacctggtttaatatggcactttttacaagg

SEQ ID NO: 840283 - DNA, 75 bp, synthetic construct
  source 1..75: mol_type = other DNA
ggatgctggcttgttatggctcccttaaagagcctgaggcatggactccaccaccagaatctgtggcggtatctt

SEQ ID NO: 840284 - DNA, 75 bp, synthetic construct
  source 1..75: mol_type = other DNA
gctacggcggatcaccattcgtgatcattcagaacgagttacgcggtcagctacatcttatgatcgctccagacg

SEQ ID NO: 840285 - DNA, 75 bp, synthetic construct
  source 1..75: mol_type = other DNA
atgcagaacttgccggaattgggcgcacgtcattccggttagaagacaccacctggacggcgctcgatatgcttg

SEQ ID NO: 840286 - DNA, 75 bp, synthetic construct
  source 1..75: mol_type = other DNA
gacacccccgtacagccgcgcgcccagcccacgaacacccgtactacacgcgccagcccactgagttgcgcacga

SEQ ID NO: 840287 - DNA, 75 bp, synthetic construct
  source 1..75: mol_type = other DNA
aggggaacgtgataccggaaacagaggttacggtgtcacgcgtgtctcgttatatccaggaacaggtgcgttttg

SEQ ID NO: 840288 - DNA, 75 bp, synthetic construct
  source 1..75: mol_type = other DNA
gcgatggcgggtgtggcttacagccgtgtgtcgactttttccggggattatctctgcgtaactgacagcaagggg

SEQ ID NO: 840289 - DNA, 75 bp, synthetic construct
  source 1..75: mol_type = other DNA
tatccagcggatcaagaaaattcgttggatatttttttgcatggataaaattatcgcctctaaagtatgtaataa

SEQ ID NO: 840290 - DNA, 75 bp, synthetic construct
  source 1..75: mol_type = other DNA
taaagcccttatgcgtaaaatgctgatatcgtgcaaagagtctcatttttcggcattatatctttggtcgtcaaa

SEQ ID NO: 840291 - DNA, 75 bp, synthetic construct
  source 1..75: mol_type = other DNA
gccagacagccaacggcctgacggctgaatcccttacggtgcgaagcagtttaccagaggtaaacacctccggtg

SEQ ID NO: 840292 - DNA, 75 bp, synthetic construct
  source 1..75: mol_type = other DNA
ggaattccatttcgctggtggtttcgaggatgaacaagcaaaaaaaatttttttagaggctattaatttaaagaa

SEQ ID NO: 840293 - DNA, 75 bp, synthetic construct
  source 1..75: mol_type = other DNA
aaaaaagacggaagaaaacgctgacaaaagcgcagatcacgcgggttgtgcttattctgcagcaattttcggaag

SEQ ID NO: 840294 - DNA, 75 bp, synthetic construct
  source 1..75: mol_type = other DNA
ctcacgcgggcacctaatggtgatcttgctgttcgcgcagtagggatgccgcaggtctctggcggcgtgccttca

SEQ ID NO: 840295 - DNA, 75 bp, synthetic construct
  source 1..75: mol_type = other DNA
acctatggttttccgacaatcggtaatgattttattgatgagatggaatgcgattatcgccagcttgtcgggtga

SEQ ID NO: 840296 - DNA, 75 bp, synthetic construct
  source 1..75: mol_type = other DNA
ttgctgtattccggcacgcttaacgatctctcgctaatgaaagaatacgccaaccgtcaggatgtgtttgatgac

SEQ ID NO: 840297 - DNA, 75 bp, synthetic construct
  source 1..75: mol_type = other DNA
gtaatgtttacgactccccatccctgagcgcatacagcaatggcgtttttcagacgcctcagctgtttgcttttg

SEQ ID NO: 840298 - DNA, 75 bp, synthetic construct
  source 1..75: mol_type = other DNA
tgcgcgaccaggagggatattacgcagcttctgatgcgcagcgtgacgactggatgacgggcttgtctgaaggct

SEQ ID NO: 840299 - DNA, 75 bp, synthetic construct
  source 1..75: mol_type = other DNA
gcagatggctggttatcagtcagtgatcagtaatcccggtccaacgaccagtggtggtttcatgattaaccacct

SEQ ID NO: 840300 - DNA, 75 bp, synthetic construct
  source 1..75: mol_type = other DNA
cagtccattcaggatgtgcttgccgggctggaagaccgtcgtgtggcgttaattcgtcagcaggcggcagagcag

SEQ ID NO: 840301 - DNA, 75 bp, synthetic construct
  source 1..75: mol_type = other DNA
cgatgtgctaaatcagttacatattgattttagagcccttagcggtgtcatggctgctggctccaggcaaatatt

SEQ ID NO: 840302 - DNA, 75 bp, synthetic construct
  source 1..75: mol_type = other DNA
ctcttatcattagtgctgcgctatttagcgccagtacattggctgatgtgagtgtcgactttaacgcaaaagtgc

SEQ ID NO: 840303 - DNA, 75 bp, synthetic construct
  source 1..75: mol_type = other DNA
ataatgaggcgaataaacccaaatcccggggcggaaaatctgagacggaaaaagcggaagacagtttttcccgtc

SEQ ID NO: 840304 - DNA, 75 bp, synthetic construct
  source 1..75: mol_type = other DNA
aacgcagattgccactgcgcgggcaagggcagccgtgtaccgggctcagcaggctgtggcggcagcccgcgggac

SEQ ID NO: 840305 - DNA, 75 bp, synthetic construct
  source 1..75: mol_type = other DNA
gcgcaggcggttttggtgcgctggtttttcaggggctgttaagcagtgccattgatttagtgttgctgggggtga

SEQ ID NO: 840306 - DNA, 75 bp, synthetic construct
  source 1..75: mol_type = other DNA
aacacaaaggcttataaagcaattcgacgtgatattgaatatacatggactgaaaattataatactttgcatctc

SEQ ID NO: 840307 - DNA, 75 bp, synthetic construct
  source 1..75: mol_type = other DNA
ctgattggactattgaataataatcatgatgaatcagaagagtcgcgtatcgtgcaattcaactaccagatagaa

SEQ ID NO: 840308 - DNA, 75 bp, synthetic construct
  source 1..75: mol_type = other DNA
cgtcgtggtcatgcgcaacatgcgttggtgtttacgccagaaaatcaaaagattactgaaaccaatctcaaaact

SEQ ID NO: 840309 - DNA, 75 bp, synthetic construct
  source 1..75: mol_type = other DNA
tagaacaaaaaggcatcaaacttgccgctgttggtccccgaccgtttgatttatttgaaaacaaaaaaatgaaag

SEQ ID NO: 840310 - DNA, 75 bp, synthetic construct
  source 1..75: mol_type = other DNA
cgatgggccagcaacagcagggatagatgatttgggtgaaattttagctaaaatgaaacagagaacatcgagagg

SEQ ID NO: 840311 - DNA, 75 bp, synthetic construct
  source 1..75: mol_type = other DNA
cttcggctagagcagttgttcctcttgatgcaggatggagtgacgtcggttcttgggattcgatttggcatttag

SEQ ID NO: 840312 - DNA, 75 bp, synthetic construct
  source 1..75: mol_type = other DNA
gcttcacgcagattgtgctggcgcgagagctgaatcttgagcagatccgcgcgattcaccaggctacggacgcga

SEQ ID NO: 840313 - DNA, 75 bp, synthetic construct
  source 1..75: mol_type = other DNA
tcgctcagttgtgcttacccaggccatgattttccctccgttggtcgtgatgcaaaatgcgttttatgccagcaa

SEQ ID NO: 840314 - DNA, 75 bp, synthetic construct
  source 1..75: mol_type = other DNA
ccgctgaatatctttggtaacgatcgtgcgattaacggtgcggcagaggttttgccgggctatagcgcagagcgc

SEQ ID NO: 840315 - DNA, 75 bp, synthetic construct
  source 1..75: mol_type = other DNA
aatcttactcttgattttatgtataataaaaaccaaaagactggaacagttgcactgagtggcacatggaaacaa

SEQ ID NO: 840316 - DNA, 75 bp, synthetic construct
  source 1..75: mol_type = other DNA
aggcgaggctgcttatttacctcgtggtctcgatattcttgaagaatttgcaaatataataattcctaaattagc

SEQ ID NO: 840317 - DNA, 75 bp, synthetic construct
  source 1..75: mol_type = other DNA
taagtatcaagaagatattatcaatacaaagactgcgatgctttcaatgattgatagtaagaacttcgcgaatat

SEQ ID NO: 840318 - DNA, 75 bp, synthetic construct
  source 1..75: mol_type = other DNA
tgatgatatatctaaattattagatgaaagaaaatcttctctaaaaacagctagagaaaaaatatatactgctac

SEQ ID NO: 840319 - DNA, 75 bp, synthetic construct
  source 1..75: mol_type = other DNA
aacccgtattacctgcaccagccataccgtctgccggggcagcagcatgatgaggaatcagggctgtactataac

SEQ ID NO: 840320 - DNA, 75 bp, synthetic construct
  source 1..75: mol_type = other DNA
ggtggatgtcgctgtcgcgtaaaccggagatgacgtggtacgggtgggacggcgaccggctgacgacggtacaga

SEQ ID NO: 840321 - DNA, 75 bp, synthetic construct
  source 1..75: mol_type = other DNA
gagtatggcatattgctggatggaattaccccatatcttatgaatgtgaagaaaatgtgtatttatggcgaatga

SEQ ID NO: 840322 - DNA, 75 bp, synthetic construct
  source 1..75: mol_type = other DNA
ccgattgcactacggcgcaggccgacgaactgatggctacgtaccgggcccgcggcgtggccgttgaacggagcc

SEQ ID NO: 840323 - DNA, 75 bp, synthetic construct
  source 1..75: mol_type = other DNA
ctggaccgtcagcgcccggcttcctgaaggcaataaaccaccgcgtataaatcgccagtggcaaaaccggatatg

SEQ ID NO: 840324 - DNA, 75 bp, synthetic construct
  source 1..75: mol_type = other DNA
atcctgttcttacctacccgtcgcgctacagccgcaaagctgtaatgaaatggcttgaggatggtggtattaacc

SEQ ID NO: 840325 - DNA, 75 bp, synthetic construct
  source 1..75: mol_type = other DNA
ttgcggttgctcagtccactctgaaccttcagcttgcactctcaaacgccatggcctcgggtccattcccctgga

SEQ ID NO: 840326 - DNA, 75 bp, synthetic construct
  source 1..75: mol_type = other DNA
gctcactcggtaacacgatgctgaatagcgtggtaaatgcgctagtccaggttggggttgaggctctcaaaaact

SEQ ID NO: 840327 - DNA, 75 bp, synthetic construct
  source 1..75: mol_type = other DNA
caaaaagggaaaataaattacgatcagttcgttgctgcaaaggcagctaccgatgcccagtaccttgccttaaag

SEQ ID NO: 840328 - DNA, 75 bp, synthetic construct
  source 1..75: mol_type = other DNA
tacgccagtggcccgaaccagaagtgggcgggagacatcacgtactattacagctcaccgactgcggggaaacac

SEQ ID NO: 840329 - DNA, 75 bp, synthetic construct
  source 1..75: mol_type = other DNA
atctgggtgcgcggtcagtccggccgggaaatcacggcagcgtcacgacttcatgtgctgagtggtccctggcgt

SEQ ID NO: 840330 - DNA, 75 bp, synthetic construct
  source 1..75: mol_type = other DNA
gttgtcaccagaaggacaatttctgtcgagtttgccttcaggcttcacatggttttatgtctatgttacggcagg

SEQ ID NO: 840331 - DNA, 75 bp, synthetic construct
  source 1..75: mol_type = other DNA
acactattttatgtccagcatccaacaaaggaatttcacttgaagtgtatggcgcaggttctatttcagacctta

SEQ ID NO: 840332 - DNA, 75 bp, synthetic construct
  source 1..75: mol_type = other DNA
cataattgttatataaattcttcggatcgattaatttctgcaataggtatcagtaatctggcaattgtcgatacg

SEQ ID NO: 840333 - DNA, 75 bp, synthetic construct
  source 1..75: mol_type = other DNA
tggggatgggcatttgaatggtatatggtggtgatgcttttcggttggttctggctggtgtttggcccgtatgcc

SEQ ID NO: 840334 - DNA, 75 bp, synthetic construct
  source 1..75: mol_type = other DNA
taacgctgctggttaccctgtatataacggacagattgccaaattcgtaactgtacaaggccattctatggctgt

SEQ ID NO: 840335 - DNA, 75 bp, synthetic construct
  source 1..75: mol_type = other DNA
atgacagacattacagccaatgtgattgtatctatgccttcgcaactcttcactatggcgcgttcttttaaagcc

SEQ ID NO: 840336 - DNA, 75 bp, synthetic construct
  source 1..75: mol_type = other DNA
ccagctgccacgggatgggatatgttaaccaaaaataccaggtttgatctgtctggagttcaaaatggcactcag

SEQ ID NO: 840337 - DNA, 75 bp, synthetic construct
  source 1..75: mol_type = other DNA
ttgcagaggctttggtcatggtgcatacgctgaacataatgacgaaggtaggtatgccagaaagtgttcatactg

SEQ ID NO: 840338 - DNA, 75 bp, synthetic construct
  source 1..75: mol_type = other DNA
acatcaaagtaacgctaacctgtcaaataatactcttaatattaagtcctttgataaaattaagtctgagaatat

SEQ ID NO: 840339 - DNA, 75 bp, synthetic construct
  source 1..75: mol_type = other DNA
ttttctcaagggaccagtttcaaatcactaaatctttctattgaagcgccatctggagcacggtcatcatttcgg

SEQ ID NO: 840340 - DNA, 75 bp, synthetic construct
  source 1..75: mol_type = other DNA
gcgctggatgaactggaagcggcctggcatcagcagcaggcgctggtccgggagattatcgcgctgcgccagcag

SEQ ID NO: 840341 - DNA, 75 bp, synthetic construct
  source 1..75: mol_type = other DNA
ctatcggctattgatgtcgccgtgataatcgttgacgcggcaggagaatcattactggaaccccagcgagaaaaa

SEQ ID NO: 840342 - DNA, 75 bp, synthetic construct
  source 1..75: mol_type = other DNA
tctccagaatcgatcgtaaatctaaccacagaaactaaacaaaaaaaacgttttataagtggtaagtatcatttc

SEQ ID NO: 840343 - DNA, 75 bp, synthetic construct
  source 1..75: mol_type = other DNA
cagattaaagaggctggagaatacgccgccaaagcatgggatgcagcagcggcagccagaggggtaactgaagca

SEQ ID NO: 840344 - DNA, 75 bp, synthetic construct
  source 1..75: mol_type = other DNA
cacctggactttatatctccatgttgtatggattcgatgaaataatcgatatctttctgaaggtaatgactccaa

SEQ ID NO: 840345 - DNA, 75 bp, synthetic construct
  source 1..75: mol_type = other DNA
acctacaaagcggtacagcgttctgccgatctgatctccatcgggccgatgctgcaaggtatgcgcaaaccggtt

SEQ ID NO: 840346 - DNA, 75 bp, synthetic construct
  source 1..75: mol_type = other DNA
atgctctcctactccaccggtacttctggtgctggtagcgacgtagaaaaagttcgcgaagcaactcgtctggcg

SEQ ID NO: 840347 - DNA, 75 bp, synthetic construct
  source 1..75: mol_type = other DNA
agtttcaatgactctttactcaagaataaatcagttcacactttcttactttgatggcagctatgaacttggtat

SEQ ID NO: 840348 - DNA, 75 bp, synthetic construct
  source 1..75: mol_type = other DNA
caatgtggatgatgtctgaaaaggtgattactttatttggtctcttttttgtaacgtcatttgttgcaaaatata

SEQ ID NO: 840349 - DNA, 75 bp, synthetic construct
  source 1..75: mol_type = other DNA
cgtaagattttccggatataattacctgtcaaaaaagacaatggtgattttatttatcagcatacctttgtcttc

SEQ ID NO: 840350 - DNA, 75 bp, synthetic construct
  source 1..75: mol_type = other DNA
gatgcgccattgtctgaacaggtgcctcagcccgaaaaagtgacgttattgttacgccagcacatcggtgccagc

SEQ ID NO: 840351 - DNA, 75 bp, synthetic construct
  source 1..75: mol_type = other DNA
cgtttgattataatgactcggttaaatataaactaaattatcatccccaagtttactcattggaatttagtcgtc

SEQ ID NO: 840352 - DNA, 75 bp, synthetic construct
  source 1..75: mol_type = other DNA
ttttctttatcacagacagagtattttaagtgtctgatgaaagaaaaatttatggcattttttattaccgctgcg

SEQ ID NO: 840353 - DNA, 75 bp, synthetic construct
  source 1..75: mol_type = other DNA
gggcaaacctgtttatctcacggtggatgttaactcatggtcgacaggctctgaacgtcatggtgtctggtatcg

SEQ ID NO: 840354 - DNA, 75 bp, synthetic construct
  source 1..75: mol_type = other DNA
ccccgaaatcaccgccacttatatccacaaagttgcaactagtttgcataattacggtgaagggttgccgcaaag

SEQ ID NO: 840355 - DNA, 75 bp, synthetic construct
  source 1..75: mol_type = other DNA
caaccctgtacgctggaaggcattgtcagccgaaatcatgatgcgttttctgtcgctgacttttcgcataacgtc

SEQ ID NO: 840356 - DNA, 75 bp, synthetic construct
  source 1..75: mol_type = other DNA
caccccatcaggccgaaatcgggcgtgatgtggaaagttttgcggcaggacttcgctctgccgttcgccgtaacc

SEQ ID NO: 840357 - DNA, 75 bp, synthetic construct
  source 1..75: mol_type = other DNA
cctcaacgctattcagaagcaaaccggatcagtcaacgctgagttcgagaaactcccgcgtacgctttcacaggc

SEQ ID NO: 840358 - DNA, 75 bp, synthetic construct
  source 1..75: mol_type = other DNA
ttacgcaatactgatatcaaagaacagattgaacaagagcgactaaagaaactcaaggctgaagcaagcctagca

SEQ ID NO: 840359 - DNA, 75 bp, synthetic construct
  source 1..75: mol_type = other DNA
ctttactccagcttggaagcatggaatttgagttacccacggatgaagaactaaatggacaacaagaagaaacta

SEQ ID NO: 840360 - DNA, 75 bp, synthetic construct
  source 1..75: mol_type = other DNA
gccagatcattcagctcaccgagacgcttcagaaaatcggtcgcattggcggatcctcatcagaggaaatggcga

SEQ ID NO: 840361 - DNA, 75 bp, synthetic construct
  source 1..75: mol_type = other DNA
atcaaccgcgtggccggcgctattgcggcttcactcgttgttgactggggtaaggcgtttctcgttgctgctgac

SEQ ID NO: 840362 - DNA, 75 bp, synthetic construct
  source 1..75: mol_type = other DNA
tatcaggtcggcgaagggggcatgcctgagatttaccaggccagcaccggtaagcagtacatgattcctggtgat

SEQ ID NO: 840363 - DNA, 75 bp, synthetic construct
  source 1..75: mol_type = other DNA
taaacgctgccggatagttgcccgtgatattcattgccagcttgcaagcgtaaacgccgacatcgacgctgatat

SEQ ID NO: 840364 - DNA, 75 bp, synthetic construct
  source 1..75: mol_type = other DNA
aaacctggatgccttatcgcgtagcggtgtaaaggtcaacccggatgtcttaatgctcgcacggaagaaaaatga

SEQ ID NO: 840365 - DNA, 75 bp, synthetic construct
  source 1..75: mol_type = other DNA
ccggtgacagcatcattgacgtgtgggtgtggatcgacgggctgtgtccagatatcaccgttgcacagttgcagg

SEQ ID NO: 840366 - DNA, 75 bp, synthetic construct
  source 1..75: mol_type = other DNA
cgaaacaatacggttacgatgaatctacagtacgtacttggattgagaaaggtatgcctacagataccgaacaaa

SEQ ID NO: 840367 - DNA, 75 bp, synthetic construct
  source 1..75: mol_type = other DNA
cttagaacaaatcctgacggcatatctgcaacaattaaaagccagtatcaggacaatccccaattcctgttacct

SEQ ID NO: 840368 - DNA, 75 bp, synthetic construct
  source 1..75: mol_type = other DNA
tacgtaatacggatacgaaagaacaaatagaacaagaaagattaaagaagttaaaagcagaagcggcattagctg

SEQ ID NO: 840369 - DNA, 75 bp, synthetic construct
  source 1..75: mol_type = other DNA
aaggttgtatattgagcacagtaaaaatgaaaacaggatgaaagtctttgctggaaccaactttattgatttcaa

SEQ ID NO: 840370 - DNA, 75 bp, synthetic construct
  source 1..75: mol_type = other DNA
gctgacaccctgcttgcccgctacgccaaaaacatgaccgcagacgcccgtaacggcaggcttgacccggtactg

SEQ ID NO: 840371 - DNA, 75 bp, synthetic construct
  source 1..75: mol_type = other DNA
gattgaaggtctaggtaatgccttcacttattataagggaaagcagaccacaaaaactaaaatgataaagtggat

SEQ ID NO: 840372 - DNA, 75 bp, synthetic construct
  source 1..75: mol_type = other DNA
aatgttaaaacaccagacacaccgatgtggccttgtgataatcgggaagaacaacaacccattaattccacattc

SEQ ID NO: 840373 - DNA, 75 bp, synthetic construct
  source 1..75: mol_type = other DNA
aatgttaaaacgccagacacaccgaagtggccttgtgataattgggaagaacaacaacccattaattccacattc

SEQ ID NO: 840374 - DNA, 75 bp, synthetic construct
  source 1..75: mol_type = other DNA
tcaaacatgggcagaaatgtctgaatatcaattcgaagtatttcaatacgagacgcttaacccaaaaaaaatgtc

SEQ ID NO: 840375 - DNA, 75 bp, synthetic construct
  source 1..75: mol_type = other DNA
gatcgctggggagatattctttccagcggcgaaaaacaacgtatcgccctggcacgattaattttacgacgtccg

SEQ ID NO: 840376 - DNA, 75 bp, synthetic construct
  source 1..75: mol_type = other DNA
acctgataggtctggttgtgacatcgaccttaatatttatcttctcggaagaaaaagtaacatatcggttgtttg

SEQ ID NO: 840377 - DNA, 75 bp, synthetic construct
  source 1..75: mol_type = other DNA
gagttcataagctcttctgatgacaaaaaattttcaaaggcaaaaaattttgcatctacatctctaaaagataaa

SEQ ID NO: 840378 - DNA, 75 bp, synthetic construct
  source 1..75: mol_type = other DNA
caaaacaacagatataatgaagaaaataaacgacagaaattaatgccaacaccgtctgaagatgcattaaaacag

SEQ ID NO: 840379 - DNA, 75 bp, synthetic construct
  source 1..75: mol_type = other DNA
acgtgggcacaggagcagatacacgatggcatatttgcgatcccggcggtcaacgtttaggtggccagggggcta

SEQ ID NO: 840380 - DNA, 75 bp, synthetic construct
  source 1..75: mol_type = other DNA
atgactagccgccgcattgcttatgcttatttcgatcctgtttgggataaaagcgtacacagtacagcacagtta

SEQ ID NO: 840381 - DNA, 75 bp, synthetic construct
  source 1..75: mol_type = other DNA
tgttataaacaacttcaagatttacaacaccctctctatacaataaaattcaaaaatgggcaacaatgtctaaaa

SEQ ID NO: 840382 - DNA, 75 bp, synthetic construct
  source 1..75: mol_type = other DNA
gcgatggtgggattcttctttaccggcagcgctgtcattggggttctggtgagtcagtttctcgccgggcgctct

SEQ ID NO: 840383 - DNA, 75 bp, synthetic construct
  source 1..75: mol_type = other DNA
ccgtgaaccaggttggcggacaggcacccggcacgcctgaaaccggcgacagcgggcttgcccgctacgccaaaa

SEQ ID NO: 840384 - DNA, 75 bp, synthetic construct
  source 1..75: mol_type = other DNA
agcgacttaagggtgatctctgagcgggccgacatcgacctgaatgagcttcgccgggcgctgacggtggagaac

SEQ ID NO: 840385 - DNA, 75 bp, synthetic construct
  source 1..75: mol_type = other DNA
cgcccgtgtggccatcaacctgtcgtcgccgccgaagcaaatctcggcgctgaccactctgagccaccagcagga

SEQ ID NO: 840386 - DNA, 75 bp, synthetic construct
  source 1..75: mol_type = other DNA
ggcatgaaagagcaaattgttgaccttgcaatgaacaatgcgggcatccgtgacaccgcacgggcgctgcatatc

SEQ ID NO: 840387 - DNA, 75 bp, synthetic construct
  source 1..75: mol_type = other DNA
ctgcctgatgcgctacgcttatcaggccttgtattatccctccagtgcagagaaaatcggccagttttctctgcc

SEQ ID NO: 840388 - DNA, 75 bp, synthetic construct
  source 1..75: mol_type = other DNA
tctgcacatttttacgtatgctgccggggatctgaaatacctgcatcatgccacccgtgaacaacgcaaacacat

SEQ ID NO: 840389 - DNA, 75 bp, synthetic construct
  source 1..75: mol_type = other DNA
acaggataataccggtgccgtactggctgatgaagctggcagcgtacagccggaagagactgttgaaacagtttc

SEQ ID NO: 840390 - DNA, 75 bp, synthetic construct
  source 1..75: mol_type = other DNA
atataagcaagagttcaaaaaaatatgttataaacaacttcaagagtttacaacaccctctctatacaataaaat

SEQ ID NO: 840391 - DNA, 75 bp, synthetic construct
  source 1..75: mol_type = other DNA
aaacgcttcaaggggctgatggcggaagtcatatcgtccccggagccggtcattctgtttattgacgaagcgcac

SEQ ID NO: 840392 - DNA, 75 bp, synthetic construct
  source 1..75: mol_type = other DNA
gcgctggacgaactggaagccgcctggcatcaacaacaggcattggtacaggagattatcgcgctgcgccagcag

SEQ ID NO: 840393 - DNA, 75 bp, synthetic construct
  source 1..75: mol_type = other DNA
agacttcggcgaatcagaatggatactttacaccggctcgggctacctgctccgcctgggggcgtggtcgtttcc

SEQ ID NO: 840394 - DNA, 75 bp, synthetic construct
  source 1..75: mol_type = other DNA
taaaatcccggtaaccagcagcgccaccagcttacgcaaacgggtattgagcaagttttcaaaactggaggcact

SEQ ID NO: 840395 - DNA, 75 bp, synthetic construct
  source 1..75: mol_type = other DNA
cttttcggaaaccgttctcagaatgatataaaagttatgacggtaaatggagatagtatgtccccaactcttgtt

SEQ ID NO: 840396 - DNA, 75 bp, synthetic construct
  source 1..75: mol_type = other DNA
ggatggttatagtgcaggagagttgatttttgatgacggagatagctgtaatgtagaaggggtctactctcctgt

SEQ ID NO: 840397 - DNA, 75 bp, synthetic construct
  source 1..75: mol_type = other DNA
atgtttttcaaaattgttagaaactttaaagccaagattggaccgttcttattaaccttgtttttggctccaggt

SEQ ID NO: 840398 - DNA, 75 bp, synthetic construct
  source 1..75: mol_type = other DNA
cctgacatttagcgcggggccaggttctttcatgatttctgagtttgttgaggttctacacgccattgagttcac

SEQ ID NO: 840399 - DNA, 75 bp, synthetic construct
  source 1..75: mol_type = other DNA
atcctgaacgtacgccctgagtggctatcatacggcgttggccctatgaactcagaagaaagcacatcctgcaat

SEQ ID NO: 840400 - DNA, 75 bp, synthetic construct
  source 1..75: mol_type = other DNA
gttcttggtgtgcgtcctgaatggctttcaacaggacaaggtgaaatgtttgaatctggcattcgcgaagtaaac

SEQ ID NO: 840401 - DNA, 75 bp, synthetic construct
  source 1..75: mol_type = other DNA
atctgtccgcgataccggtaccggatgcggtggaggtgccggacactgctgtgctggtcactcagatagtggcga

SEQ ID NO: 840402 - DNA, 75 bp, synthetic construct
  source 1..75: mol_type = other DNA
atgcaacggagaatttagtggatgctttattacttggcagcttttttggttatgaagatatagtccgcttttctg

SEQ ID NO: 840403 - DNA, 75 bp, synthetic construct
  source 1..75: mol_type = other DNA
aaagtgtacaagaacatattgtcggcaggtcagtatggaacagaagcatttcatataggaaaccatgcggatgag

SEQ ID NO: 840404 - DNA, 75 bp, synthetic construct
  source 1..75: mol_type = other DNA
gattgggctatcgaacaagatgacttcgagcaacttcacattgacggaaaagtaatcgtaagttggcctatgacg

SEQ ID NO: 840405 - DNA, 75 bp, synthetic construct
  source 1..75: mol_type = other DNA
aaagcggaaaccttatgccactgaatgctatggggaatgataacacggtttatcagatcccagcggactccaatg

SEQ ID NO: 840406 - DNA, 75 bp, synthetic construct
  source 1..75: mol_type = other DNA
actccggcagatgacagcactatcccgcccacaccggcggtgtatgaaggggatgatgcctttcgtgagcgtatt

SEQ ID NO: 840407 - DNA, 75 bp, synthetic construct
  source 1..75: mol_type = other DNA
ctgcaccgatcattctcataggctccttgcccctgttttttctccgctggcgcatgaatttactcacactttccg

SEQ ID NO: 840408 - DNA, 75 bp, synthetic construct
  source 1..75: mol_type = other DNA
ccgtgggtatttatcgacaaaatcttcaagggcaaatttttctggtggcactaagcgcggcgctggtggtggtat

SEQ ID NO: 840409 - DNA, 75 bp, synthetic construct
  source 1..75: mol_type = other DNA
ttccaactgaagcgggcgagcatcttttgtctgttcttggccctatgttgcatgacatagattcagcctggcatc

SEQ ID NO: 840410 - DNA, 75 bp, synthetic construct
  source 1..75: mol_type = other DNA
aatatttattactctgagcgccctttctctctacatgctgcacggtttgtggggatttcagaaagcaataaacaa

SEQ ID NO: 840411 - DNA, 75 bp, synthetic construct
  source 1..75: mol_type = other DNA
gctggcggcgtttgatttcgccgcgcatggctgcgtttataaactgccccgtgctttcaccttcttctttcacgt

SEQ ID NO: 840412 - DNA, 75 bp, synthetic construct
  source 1..75: mol_type = other DNA
aagcaatgcgccgtagtacctcacaccacggcgctgatagtgattattctgattctttggccttgcggcgctggc

SEQ ID NO: 840413 - DNA, 75 bp, synthetic construct
  source 1..75: mol_type = other DNA
cttttatcgcgtttgattgttgacaagtggtcacctattgaattagcctttctattgttaggtgaccaccttaac

SEQ ID NO: 840414 - DNA, 75 bp, synthetic construct
  source 1..75: mol_type = other DNA
tattgcacagcttcaatttagtggcactgtgccaatgattgacattgatgcctatggaaaatggttagctaactg

SEQ ID NO: 840415 - DNA, 75 bp, synthetic construct
  source 1..75: mol_type = other DNA
atctttggttttttttgaaaaatgaaaagccagatgttattatttctactgatcttggttatgcaataacatata

SEQ ID NO: 840416 - DNA, 75 bp, synthetic construct
  source 1..75: mol_type = other DNA
ggtcacggtgtggtgttcccggctgaactggtggggctgctggacaggctggagggggaaatccgggcaaactgc

SEQ ID NO: 840417 - DNA, 75 bp, synthetic construct
  source 1..75: mol_type = other DNA
atggtaaggatttatgtgataaacgttttttaattacatcatatgatgtaattctcgattatctgggaggatggt

SEQ ID NO: 840418 - DNA, 75 bp, synthetic construct
  source 1..75: mol_type = other DNA
aaaagcaattatacatatcaagttaatttaaatgactactacgttttttaccaggcaagcatcgctataacgttg

SEQ ID NO: 840419 - DNA, 75 bp, synthetic construct
  source 1..75: mol_type = other DNA
atgtcagattggtcactttctcaactatttgcttcgttacatgaagatattcaacttcgactgggaactgcacgt

SEQ ID NO: 840420 - DNA, 75 bp, synthetic construct
  source 1..75: mol_type = other DNA
gcgccgctgccgccgtaccgggtactgaccgggctggtggaccgcttcgggcgcacacagacgttccaccacgaa

SEQ ID NO: 840421 - DNA, 75 bp, synthetic construct
  source 1..75: mol_type = other DNA
acgcatccgcgatattcgcgccagcatgcgccgtgtttatttgcaggtgatttgcccccctgctgactctcagcc

SEQ ID NO: 840422 - DNA, 75 bp, synthetic construct
  source 1..75: mol_type = other DNA
cttaggcattccattaaaaccacatgataataaagagaaatattattttatctttgctatttttgataactggaa

SEQ ID NO: 840423 - DNA, 75 bp, synthetic construct
  source 1..75: mol_type = other DNA
ggctacagcaacttcaatatattaaaatagatgatcattatatattgaatactcaatatactccaattgctaatt

SEQ ID NO: 840424 - DNA, 75 bp, synthetic construct
  source 1..75: mol_type = other DNA
attcatcggcccttttaaatttgagaagtgattatccagagtgtaaatttatatcttataagttagattgtaatg

SEQ ID NO: 840425 - DNA, 75 bp, synthetic construct
  source 1..75: mol_type = other DNA
acgcatccgcgatattcgcgccagcatgcgccgtgtttatttgcaggtgatttgccccctgctgactctcagcca

SEQ ID NO: 840426 - DNA, 75 bp, synthetic construct
  source 1..75: mol_type = other DNA
cttgaccgtgaagaaagcgcaaccgggtttaccgatcccagtaacggcgcaataaccctgaatgagacgcagtac

SEQ ID NO: 840427 - DNA, 75 bp, synthetic construct
  source 1..75: mol_type = other DNA
agataacgccagttggaacggggttacggacggtaatggcatcatcacgttaaccgctacgcaggataacacctg

SEQ ID NO: 840428 - DNA, 75 bp, synthetic construct
  source 1..75: mol_type = other DNA
ggtgctatccgcaacgaaagcacaacatcgacggcgggcaatttaatgctctgcctggttgacccgcacactgag

SEQ ID NO: 840429 - DNA, 75 bp, synthetic construct
  source 1..75: mol_type = other DNA
aatgttataatttagacaatacaggtttgcgtggtattacgcgagaaaatttaatggaaaaaatttttgaccatt

SEQ ID NO: 840430 - DNA, 75 bp, synthetic construct
  source 1..75: mol_type = other DNA
tgatgttgatgttttcagtgagattgttcatctcgcagggaacgctataacgagtggtgttcaagtatacccaag

SEQ ID NO: 840431 - DNA, 75 bp, synthetic construct
  source 1..75: mol_type = other DNA
ttccaataacgtatttgctgacgaaggtcacggcattgttaaatttaaaggtgaagttatctctgctccatgttc

SEQ ID NO: 840432 - DNA, 75 bp, synthetic construct
  source 1..75: mol_type = other DNA
tatccttcgcgttctaaatatttttaaaggagaggtgatttgtagattcataaataatcctgacaatgaaatagg

SEQ ID NO: 840433 - DNA, 75 bp, synthetic construct
  source 1..75: mol_type = other DNA
ccaacgatccggctaatgtgtggggaaatcttctgccctggcctgcacatccggcaacgctggttccaacgcgtc

SEQ ID NO: 840434 - DNA, 75 bp, synthetic construct
  source 1..75: mol_type = other DNA
gctttacccccaaagtgcgctgctgcttagcagcgcactgcttggtggcgtggggatcggcatcattcaggcggt

SEQ ID NO: 840435 - DNA, 75 bp, synthetic construct
  source 1..75: mol_type = other DNA
atgcagggaatcaacgcttaaagattttaacgatcgcttattgtaaaaataatagcaaagaaaattgtaagatac

SEQ ID NO: 840436 - DNA, 75 bp, synthetic construct
  source 1..75: mol_type = other DNA
ttgattctatttttgtaaaaaaaggggacgtgctaaaaaaaggaaatataatagctattattgatagtgcacata

SEQ ID NO: 840437 - DNA, 75 bp, synthetic construct
  source 1..75: mol_type = other DNA
agaactacaacggtgctattgctcaagcaactgaaagacgcgggccatattaaaatcattcgccacggcccgcat

SEQ ID NO: 840438 - DNA, 75 bp, synthetic construct
  source 1..75: mol_type = other DNA
atttcgagtcacttaatgtcaaatggtcgccagaacaacaaaaatcttttaaatttcttgcatcattactggaag

SEQ ID NO: 840439 - DNA, 75 bp, synthetic construct
  source 1..75: mol_type = other DNA
atattccgggtgttctgcagaagatgttcagtggcgaaggccccggctggctgcagacaatgaccatcagtggtt

SEQ ID NO: 840440 - DNA, 75 bp, synthetic construct
  source 1..75: mol_type = other DNA
gcaggctcccgttacctggatgccgtttattccggaacatcatccggtggggagagggtgatatctgtacctgtg

SEQ ID NO: 840441 - DNA, 75 bp, synthetic construct
  source 1..75: mol_type = other DNA
gcgccatgtgcagggcggacaaccggtgtatgttggtatgtatgacgacctgaatacgaatggtttgccaggtga

SEQ ID NO: 840442 - DNA, 75 bp, synthetic construct
  source 1..75: mol_type = other DNA
ggcatcatcctgataaacgcagtgccgttgtcaacgccacgatgtttgaccgttatttgccattttcatgcccgc

SEQ ID NO: 840443 - DNA, 75 bp, synthetic construct
  source 1..75: mol_type = other DNA
acgtgaaggactggctccccgaattacattcgggaaaggtcttgaggatttttctctggtgtgggctgcaccagg

SEQ ID NO: 840444 - DNA, 75 bp, synthetic construct
  source 1..75: mol_type = other DNA
agtacccgtaatccttgggtgtggaagataggagaagggaagtcaaacctgaatgtcaaacattctccggtttca

SEQ ID NO: 840445 - DNA, 75 bp, synthetic construct
  source 1..75: mol_type = other DNA
tatatgtccgtggatattagcaaaggcaccagcaaaagccttgcatcggcagacctggggtatttaacctgtcag

SEQ ID NO: 840446 - DNA, 75 bp, synthetic construct
  source 1..75: mol_type = other DNA
aagatgtagcaaaagcggctgagtctgctggaattgatataaacgcattaacaccaggaatgcgatctggaagtc

SEQ ID NO: 840447 - DNA, 75 bp, synthetic construct
  source 1..75: mol_type = other DNA
ggtggtatcaatattggtgctcaggggatactttctggggctggaaggatcttaacctctaaatcacctcaagct

SEQ ID NO: 840448 - DNA, 75 bp, synthetic construct
  source 1..75: mol_type = other DNA
aacataccatttgacgtattgcagggtggcgcaagtctgattaatgcaatcagtcaggggcttggtggccccaag

SEQ ID NO: 840449 - DNA, 75 bp, synthetic construct
  source 1..75: mol_type = other DNA
aaaatcaatataagaagcagcataaacccaatgcaccgctgcaaggatctggttcaggaacacgcaagcagaaga

SEQ ID NO: 840450 - DNA, 75 bp, synthetic construct
  source 1..75: mol_type = other DNA
ataacagaattgaattgttacagcggcgattacattcatgttcatttttagttaatattgaagaaatgtcttaca

SEQ ID NO: 840451 - DNA, 75 bp, synthetic construct
  source 1..75: mol_type = other DNA
caggatgcacatactagggcttttagtgaaatacagtcgaaattccactcagcacttgatgaacttggtgctgag

SEQ ID NO: 840452 - DNA, 75 bp, synthetic construct
  source 1..75: mol_type = other DNA
agtaaataatgtgacatcaattattcgaccagataataacgtttacttcaatgaacttgattctaaattcaaaac

SEQ ID NO: 840453 - DNA, 75 bp, synthetic construct
  source 1..75: mol_type = other DNA
tgagacggccaaagtactggcatcgatcgattctctggatgtcagggtacaaacaatagaggactctcttgttta

SEQ ID NO: 840454 - DNA, 75 bp, synthetic construct
  source 1..75: mol_type = other DNA
gagccgagaactataaattatttgcaatcaataattacggacttgtctcaactgagtcacaatcgagaatttcct

SEQ ID NO: 840455 - DNA, 75 bp, synthetic construct
  source 1..75: mol_type = other DNA
accaggaatgcgatctggaagtcgtggaattgcacaagccgaaggcgcattggcatcaacaccaggaattgttca

SEQ ID NO: 840456 - DNA, 75 bp, synthetic construct
  source 1..75: mol_type = other DNA
gagcgaccgacagacccttacgcgcaagccggtgaaacaattggtgggtatctcctgccaattggcacagcggca

SEQ ID NO: 840457 - DNA, 75 bp, synthetic construct
  source 1..75: mol_type = other DNA
tcattggtgggctcatcagcattgaaggtggcctgagtatttacatgatactggccacggccggtatcagtggcg

SEQ ID NO: 840458 - DNA, 75 bp, synthetic construct
  source 1..75: mol_type = other DNA
ttttataccataaaaagaattatatttgtgataagttaaaagaaatctttcctgatgaacctattgaattctcaa

SEQ ID NO: 840459 - DNA, 75 bp, synthetic construct
  source 1..75: mol_type = other DNA
ggtggcgaatgagacaacgattaacgacggcggaatacaaacagtttcagctaacggagaggcaataaaaacaaa

SEQ ID NO: 840460 - DNA, 75 bp, synthetic construct
  source 1..75: mol_type = other DNA
ggttatggcagcagagcagggaggtttttctggcccatcggcaacgcaaagtcaggccggaggattccaggggcc

SEQ ID NO: 840461 - DNA, 75 bp, synthetic construct
  source 1..75: mol_type = other DNA
cgaccgttttcatctggtcaacggtgaaaactggtttgaccgcacggtcagcgccgatgccgcaggcatcattct

SEQ ID NO: 840462 - DNA, 75 bp, synthetic construct
  source 1..75: mol_type = other DNA
ggcctgacggcacgttaacgtttaccatttatcaaaattatcaggggattggcgggcgtattccattgacggcga

SEQ ID NO: 840463 - DNA, 75 bp, synthetic construct
  source 1..75: mol_type = other DNA
atcgtcaaaacaaaagccactgcgacaggcacgacgctcaccggcggcgaacaaatcgtcgagggggtggcgaat

SEQ ID NO: 840464 - DNA, 75 bp, synthetic construct
  source 1..75: mol_type = other DNA
aagctgattgtccagaaggaggctaaaacagataccaccagacttaataatggtggcgttctggaggttcaggac

SEQ ID NO: 840465 - DNA, 75 bp, synthetic construct
  source 1..75: mol_type = other DNA
tgaatcgttctcaggcttatttggattttgttgatatacctctagatactgatataccagtatttctagatcccg

SEQ ID NO: 840466 - DNA, 75 bp, synthetic construct
  source 1..75: mol_type = other DNA
ttattcagacagcgttgtcttgacacggcaaatgatggcagaggttttatcctgtcaatagacgatgatgatctt

SEQ ID NO: 840467 - DNA, 75 bp, synthetic construct
  source 1..75: mol_type = other DNA
atcatagaacattctccctctgtgccttgtggagatgaatatatcgccttacaagaaatcttatcttcaacacct

SEQ ID NO: 840468 - DNA, 75 bp, synthetic construct
  source 1..75: mol_type = other DNA
agggtggaaccacttattcaaaagcgaaggttactttcaccacagcgaatactatgacggtaatgactccaactt

SEQ ID NO: 840469 - DNA, 75 bp, synthetic construct
  source 1..75: mol_type = other DNA
gagaatttattgaacatggttatacaaatccaggtaaagctatgcgaatatatagtgaaggtggcaactatatat

SEQ ID NO: 840470 - DNA, 75 bp, synthetic construct
  source 1..75: mol_type = other DNA
atgttgaatgtaaaaactacacgtctgaaattgcaaatcctgagttagatcagttatctggacggttctcaagga

SEQ ID NO: 840471 - DNA, 75 bp, synthetic construct
  source 1..75: mol_type = other DNA
gaaacagaaccagcttgagtcatggataaacagtttttgtgacacggacggcgccatcaataccggttctgaaaa

SEQ ID NO: 840472 - DNA, 75 bp, synthetic construct
  source 1..75: mol_type = other DNA
gcagttggcatcatacatctgatttgaaaactaaaagtccgaattataatccaggagctgcaaatgatactcata

SEQ ID NO: 840473 - DNA, 75 bp, synthetic construct
  source 1..75: mol_type = other DNA
tgaagatgcgcggccccggcggtcagtcagtgcggttacagtggcagcagcaccataaactgagcggccttgagc

SEQ ID NO: 840474 - DNA, 75 bp, synthetic construct
  source 1..75: mol_type = other DNA
ccggattttttccggaagaagccacatggagcgggctggttccgtcactggtacgggagtaccgttacgacagcg

SEQ ID NO: 840475 - DNA, 75 bp, synthetic construct
  source 1..75: mol_type = other DNA
actcagggcagacgggccattgaattcagtaacggtgaacacttcaacttatttatctcaaatggtaaatgctgg

SEQ ID NO: 840476 - DNA, 75 bp, synthetic construct
  source 1..75: mol_type = other DNA
gacgttgggttctggcctcgcgtccgcatggcgcaccggttccggagaatttccgtcttgaagaagatgatgtcg

SEQ ID NO: 840477 - DNA, 75 bp, synthetic construct
  source 1..75: mol_type = other DNA
aaaagcatgagcttccctgttcccgcattgaccgtatatcagatgtgactgcgggacaaatattgcggtctgcgt

SEQ ID NO: 840478 - DNA, 75 bp, synthetic construct
  source 1..75: mol_type = other DNA
ttatgacgcctttccgggaatgcgtctgcgccacccggtgactgacgataccagcgatgaccgcctggcacacag

SEQ ID NO: 840479 - DNA, 75 bp, synthetic construct
  source 1..75: mol_type = other DNA
aatacgcctgggtgcgtgaacagggaaatcgggtggatatcatcagccagggagccacgctgaacttcgccttcg

SEQ ID NO: 840480 - DNA, 75 bp, synthetic construct
  source 1..75: mol_type = other DNA
caatgggtaaaagagggaaaaattcactatcgcgagcacatgaccgatggtttagagaatgccccgcagaccttt

SEQ ID NO: 840481 - DNA, 75 bp, synthetic construct
  source 1..75: mol_type = other DNA
gggcggctgacagaagcggatgcgcggctggactaccacctgttttatgagtacgacgctgcggaccggatcatc

SEQ ID NO: 840482 - DNA, 75 bp, synthetic construct
  source 1..75: mol_type = other DNA
caggtgtcagtcacaccgacgggatccggcttaaactgacgtaccacgccagcggctacctgaaagccattcacc

SEQ ID NO: 840483 - DNA, 75 bp, synthetic construct
  source 1..75: mol_type = other DNA
ttacgacagcgcgggtaatgtgtcaggcgtcaccagccgggaagattacggacgggaaacacggcgggagtaccg

SEQ ID NO: 840484 - DNA, 75 bp, synthetic construct
  source 1..75: mol_type = other DNA
ttattgttgaaacaaataccaaatagtacggctaacttactgagagccttgttagtaaacgcctcttctcatcct

SEQ ID NO: 840485 - DNA, 75 bp, synthetic construct
  source 1..75: mol_type = other DNA
actgcgcacagtttatctgtcgctggacccatatatgcgcgggcgcatgagcgatgagccatcctattcaccacc

SEQ ID NO: 840486 - DNA, 75 bp, synthetic construct
  source 1..75: mol_type = other DNA
tattgactggcattattagtgtttttattacatttattcttcagagaaaaagcatacacactcatctgaagtcac

SEQ ID NO: 840487 - DNA, 75 bp, synthetic construct
  source 1..75: mol_type = other DNA
ggaaaacccgtatgcctacgcagacgctaacctgatggggtatctgaacattctggaaggctgccgtcatgccta

SEQ ID NO: 840488 - DNA, 75 bp, synthetic construct
  source 1..75: mol_type = other DNA
ttgctattatggtgttcagacacttcgtggtgaggataatttccatattactgaaatgccaatgagtcaggagcc

SEQ ID NO: 840489 - DNA, 75 bp, synthetic construct
  source 1..75: mol_type = other DNA
tcagactgcgtctgtcacctatgaccgtgctatgcaaaattacggagattcatattatttagttgtaagatgcca

SEQ ID NO: 840490 - DNA, 75 bp, synthetic construct
  source 1..75: mol_type = other DNA
gtcacggcggtgacagcctcaggcaccgggctgggctatggcgaaggcgacgagtcctatggctatgacagttgt

SEQ ID NO: 840491 - DNA, 75 bp, synthetic construct
  source 1..75: mol_type = other DNA
cgtggacacagcagtgtgatgaacgcggcctgccggtaagcctggtgtcgccacagggcgaagagacccggctgg

SEQ ID NO: 840492 - DNA, 75 bp, synthetic construct
  source 1..75: mol_type = other DNA
gacgtctttattgggggtgagcaggtcacctatctggatatccagccggagttcccgccgtggcagagaatgatc

SEQ ID NO: 840493 - DNA, 75 bp, synthetic construct
  source 1..75: mol_type = other DNA
ttaggaattccggatagtccaggtgtttaccatattatattggataataaagtgtacactggttcaggaaaaagt

SEQ ID NO: 840494 - DNA, 75 bp, synthetic construct
  source 1..75: mol_type = other DNA
ttccggtattacgagccggaaaccgggatgtacctggtgagtgacccgctggggttgctggggggtgagcagact

SEQ ID NO: 840495 - DNA, 75 bp, synthetic construct
  source 1..75: mol_type = other DNA
agaaatgatgaatgttggcggctgggaactagtatttagtcaagctaaatctgactcggctttatcagttattaa

SEQ ID NO: 840496 - DNA, 75 bp, synthetic construct
  source 1..75: mol_type = other DNA
gatagagatagaatatttctttttgggatcaataagaaactatctgcaaacatagcagaattcccatggcagaag

SEQ ID NO: 840497 - DNA, 75 bp, synthetic construct
  source 1..75: mol_type = other DNA
ttttacgcccgtcgctggtacgctcggtgcaacaaaccaacaggttttcgctaatcagacgactaatggcgctaa

SEQ ID NO: 840498 - DNA, 75 bp, synthetic construct
  source 1..75: mol_type = other DNA
accatttttatgcacggatgcagaagatcgacctgacgcaagccgcgaccggtggtgtcgtgcgggccagtgtgt

SEQ ID NO: 840499 - DNA, 75 bp, synthetic construct
  source 1..75: mol_type = other DNA
tcgcactgtggttttcatacaatgccattgccgccagcaccaatattaatatgaccgccaatattgtcagcacca

SEQ ID NO: 840500 - DNA, 75 bp, synthetic construct
  source 1..75: mol_type = other DNA
ggtgtgtttctgtttatactggcgttcgccctggtgagctgtgtgcacttggatgggaggacatagatctgaaaa

SEQ ID NO: 840501 - DNA, 75 bp, synthetic construct
  source 1..75: mol_type = other DNA
tgtatgcgtaagcagatgacgcgtgatgagcttaaagaaacgctcattacaacttttcttactggtgttgaggaa

SEQ ID NO: 840502 - DNA, 75 bp, synthetic construct
  source 1..75: mol_type = other DNA
gggggggtttggtcccggctggaaagcccccttcgatatccgcttacagatacgcgatgaaggcctgatactcaa

SEQ ID NO: 840503 - DNA, 75 bp, synthetic construct
  source 1..75: mol_type = other DNA
tgctattggctggggttaaccagagctaaactcagaggggtaaacatttcaattataagtatattatgcatatat

SEQ ID NO: 840504 - DNA, 75 bp, synthetic construct
  source 1..75: mol_type = other DNA
catctcatgttctaaaaaaagctgtgtgctgcgtagagaattattgtcttaaccttgaaaaggaagaggtaagaa

SEQ ID NO: 840505 - DNA, 75 bp, synthetic construct
  source 1..75: mol_type = other DNA
ttgcttcctttattaggtggtaaggagaacatcgccagtgcagcacattgcgccactcgcctacggctggtactg

SEQ ID NO: 840506 - DNA, 75 bp, synthetic construct
  source 1..75: mol_type = other DNA
agttattttgtgcttattcaagagctacaactgcttttattgcaatttatgattcggagaaattagcatggagag

SEQ ID NO: 840507 - DNA, 75 bp, synthetic construct
  source 1..75: mol_type = other DNA
aacagtgaattgcagattgtcctgaaaacggatgattaccgcataaccatcgattatctccgaacccgtcctgtt

SEQ ID NO: 840508 - DNA, 75 bp, synthetic construct
  source 1..75: mol_type = other DNA
ctgaatacgtggttttcatatgttgtttgtatatgctggtatatagagttttatcacccttattgattcagaaaa

SEQ ID NO: 840509 - DNA, 75 bp, synthetic construct
  source 1..75: mol_type = other DNA
atggcactaacgagactgagcaaagagcatatcatcgatgttcacctcagagaattcggcagaacagagaaacaa

SEQ ID NO: 840510 - DNA, 75 bp, synthetic construct
  source 1..75: mol_type = other DNA
atagagctttcacgtatttatcaggatatatcttggatgacgtaactcactggatgccgctaccagaaccgccgc

SEQ ID NO: 840511 - DNA, 75 bp, synthetic construct
  source 1..75: mol_type = other DNA
cgaatgccggaagacaccaaaatgttactggcatttagtcaaggtgaaatcgtggccgcatattggaactgggtt

SEQ ID NO: 840512 - DNA, 75 bp, synthetic construct
  source 1..75: mol_type = other DNA
acaaacaaactgcggcgcacttccacctactttacgcgctttgctacctggcaagctacgaaaacaaagatgaag

SEQ ID NO: 840513 - DNA, 75 bp, synthetic construct
  source 1..75: mol_type = other DNA
gaggttacaagctgaacaggcccaaaaagaacgaaataaagttagattcattcatcgaatgcgtaaaggtgcagt

SEQ ID NO: 840514 - DNA, 75 bp, synthetic construct
  source 1..75: mol_type = other DNA
atagttatttataaaagattaattgaatctgcatatttgttttctcaatctgagtcagatgaagataagaattta

SEQ ID NO: 840515 - DNA, 75 bp, synthetic construct
  source 1..75: mol_type = other DNA
atgaataatctacatcgcgaacttgcgcctgtttccgatgcggcgtgggaacagattgaagaggaagcaacccgt

SEQ ID NO: 840516 - DNA, 75 bp, synthetic construct
  source 1..75: mol_type = other DNA
tagggctgcttgggggattaaacctctatagttatgttccaaacccgttatcatggatagatcctcttggattat

SEQ ID NO: 840517 - DNA, 75 bp, synthetic construct
  source 1..75: mol_type = other DNA
gcacctttgtttttcaacctgaagtgtcagcgagagtaaaaaattatggtgaccattttaccgttgactcaataa

SEQ ID NO: 840518 - DNA, 75 bp, synthetic construct
  source 1..75: mol_type = other DNA
ggatgtcagaaaataataatgcgcaggtaacgctgttaaatacacagttaagcgagtttgccccaaccatgcccc

SEQ ID NO: 840519 - DNA, 75 bp, synthetic construct
  source 1..75: mol_type = other DNA
atgttacttgcagtctttcagatttgaaaaaatttaatttaaagagcggcgatgtactctttaaccgctcatcac

SEQ ID NO: 840520 - DNA, 75 bp, synthetic construct
  source 1..75: mol_type = other DNA
atccggtcaagatttatgacttagccaaacgcatgatccggttaagtggcttgagtgtacgggatgataaaaatc

SEQ ID NO: 840521 - DNA, 75 bp, synthetic construct
  source 1..75: mol_type = other DNA
atgggcttattcacagacttataaatgacccgtcatatataaatcacgttgaacctattagaaaagttagaatgc

SEQ ID NO: 840522 - DNA, 75 bp, synthetic construct
  source 1..75: mol_type = other DNA
gtactgaccccagaaagttggacagttaaacacgaggcatataggtctgattccgatattcaattggagtcagac

SEQ ID NO: 840523 - DNA, 75 bp, synthetic construct
  source 1..75: mol_type = other DNA
ggcgctgctatattatgctattttccaccgagatcgtccgttatgagctttcaggcccacaaggcatcgaacaag

SEQ ID NO: 840524 - DNA, 75 bp, synthetic construct
  source 1..75: mol_type = other DNA
tgtgctgaaaacgcagttaccattcgacgctgaacacaaccaacaaagttattataaaacaacatgttattcaac

SEQ ID NO: 840525 - DNA, 75 bp, synthetic construct
  source 1..75: mol_type = other DNA
aaagaactcgtaagtggtctcgatggttatgagattgataaaactcaagttataccttcgggaaataacaatgag

SEQ ID NO: 840526 - DNA, 75 bp, synthetic construct
  source 1..75: mol_type = other DNA
agataaaattcatgcttattgcatgaaaaaatcaaaatcggggaaagatatatctttaggtgatgttgtttatgt

SEQ ID NO: 840527 - DNA, 75 bp, synthetic construct
  source 1..75: mol_type = other DNA
ttgtccagagcacaattaatgctaccggaaaggcaattgtgctgactggtccaccaggacgcggaaagagtactt

SEQ ID NO: 840528 - DNA, 75 bp, synthetic construct
  source 1..75: mol_type = other DNA
tgattgcgcaaagctatcatcagtctgagaaatcggcctccgagttcgatgccattgttgcgcaaacggagcagt

SEQ ID NO: 840529 - DNA, 75 bp, synthetic construct
  source 1..75: mol_type = other DNA
gcatccaaaaaactgacgaaaacagccattaatgaagccttgcgcagaatgaaaaaagcgggaatagagaaagct

SEQ ID NO: 840530 - DNA, 75 bp, synthetic construct
  source 1..75: mol_type = other DNA
ggaacattttactgatgaaattatccgttcttggaaaaacggccatattgataaaataaatgcaacctttggtgt

SEQ ID NO: 840531 - DNA, 75 bp, synthetic construct
  source 1..75: mol_type = other DNA
atagatttacaatataagcgttccaaagtacgaaagaatgacattcttgtaacaattgttggggctataggtaga

SEQ ID NO: 840532 - DNA, 75 bp, synthetic construct
  source 1..75: mol_type = other DNA
ttgttcgcaccttccttagggatgattggctatgtaccgaatgttgaacagtctacgcaagccctattaggtatg

SEQ ID NO: 840533 - DNA, 75 bp, synthetic construct
  source 1..75: mol_type = other DNA
gcagtgaaaccactcaaatttgccaaccagatgtatatcgatactggcgcagtgttctgcggaaacctcacattg

SEQ ID NO: 840534 - DNA, 75 bp, synthetic construct
  source 1..75: mol_type = other DNA
acgaacagtcacgacgtcacccggacgcctcgctgaccgcaaaaggttttactcagttaagcagtgcgaccaaca

SEQ ID NO: 840535 - DNA, 75 bp, synthetic construct
  source 1..75: mol_type = other DNA
cggcggtggcggagggggcggatgcaaagcagcatccagtaacgaaacgttttttggtgcaggcggtggagcagg

SEQ ID NO: 840536 - DNA, 75 bp, synthetic construct
  source 1..75: mol_type = other DNA
catggtgtacaataaacaccccgccagcgagtcaggggctatccctgtatgtgaaacctgttattctgaaaagaa

SEQ ID NO: 840537 - DNA, 75 bp, synthetic construct
  source 1..75: mol_type = other DNA
tgccagcgccaccgcgctcggtgtgccgctaaaaattacccatatggcggtgggcgatggcggcggagtattgcc

SEQ ID NO: 840538 - DNA, 75 bp, synthetic construct
  source 1..75: mol_type = other DNA
cgctgtataaagtggcgaccgaaggcaagagcggcgaaacctacaatattggcggtcataacgagcgtaaaaata

SEQ ID NO: 840539 - DNA, 75 bp, synthetic construct
  source 1..75: mol_type = other DNA
gcttggggacgcgcagaagcaggccttccgcttccaccatatttccaccgatgaggtgtacggcgacctgcacgg

SEQ ID NO: 840540 - DNA, 75 bp, synthetic construct
  source 1..75: mol_type = other DNA
cacaaacacaaacggtggtaacggaggtgtgccgagtactggcgatatcaacatcattggtggatgtggaggcga

SEQ ID NO: 840541 - DNA, 75 bp, synthetic construct
  source 1..75: mol_type = other DNA
gcgatggcggcggagcattgccgacgccggacgcaaagcagacggcattggtaaatgagaaacgccgggctgcgc

SEQ ID NO: 840542 - DNA, 75 bp, synthetic construct
  source 1..75: mol_type = other DNA
ctctggtggtggatgattgtggcatttactacgatgccagcaagccttcagcactggagaaactggtacaggata

SEQ ID NO: 840543 - DNA, 75 bp, synthetic construct
  source 1..75: mol_type = other DNA
taaaaggcaccgtgcaactcagcagtgccactaacagcacgtcagaaacgcaggctgccacaccaaaggcagtga

SEQ ID NO: 840544 - DNA, 75 bp, synthetic construct
  source 1..75: mol_type = other DNA
tcagtccggaaatatcggcgtcagcggtgaaggcggaacatcgtactggggtggcggtggacgcgcaggcgctgg

SEQ ID NO: 840545 - DNA, 75 bp, synthetic construct
  source 1..75: mol_type = other DNA
gccgaaagcggtaaagatcgcgtatgaccttgctaatgggaaatataccgcacaggacgcgaccacagcacgaaa

SEQ ID NO: 840546 - DNA, 75 bp, synthetic construct
  source 1..75: mol_type = other DNA
tatgtggatgacaaaatctcagagcacgaacagtcacgacgtcacccggacgcctcgctgaccgcaaaaggtttt

SEQ ID NO: 840547 - DNA, 75 bp, synthetic construct
  source 1..75: mol_type = other DNA
attagatataatgatagtcttatgaatacgcaagattattatttgtggattgatttattatctaaaaaatataaa

SEQ ID NO: 840548 - DNA, 75 bp, synthetic construct
  source 1..75: mol_type = other DNA
ctagtgattcagttatttgcctgggggtttatgatgattatcaatggttcagcaaagaactcaaaacccagaaac

SEQ ID NO: 840549 - DNA, 75 bp, synthetic construct
  source 1..75: mol_type = other DNA
acttcatcgcatagatcactattctggcagaccgttaactcggctggcggttgaactcactttattggttttcat

SEQ ID NO: 840550 - DNA, 75 bp, synthetic construct
  source 1..75: mol_type = other DNA
gatgaaagaaaacagaaaagaattcagtagtaatttcaatgaattagcaagattagttgctgcattggcaaattg

SEQ ID NO: 840551 - DNA, 75 bp, synthetic construct
  source 1..75: mol_type = other DNA
acgacacccctataagtgagcgctggagagatctcttgtttgctgaacatctcgcattaaaagttctgggggtag

SEQ ID NO: 840552 - DNA, 75 bp, synthetic construct
  source 1..75: mol_type = other DNA
atatcctgtattagctttagccgctggtgaaggtgatgtgccaggttcatctgctggaggtgaacaacccaaatt

SEQ ID NO: 840553 - DNA, 75 bp, synthetic construct
  source 1..75: mol_type = other DNA
aaccattttggcattgcggtggtgccgttgatttccagttatcagccttccaccgtggcggtgaacatgaatgac

SEQ ID NO: 840554 - DNA, 75 bp, synthetic construct
  source 1..75: mol_type = other DNA
tctgtcaccttcagagataagccagaaactgcagtttaccagaactaatattacccgcattacagattttttaga

SEQ ID NO: 840555 - DNA, 75 bp, synthetic construct
  source 1..75: mol_type = other DNA
aaggaagggttcccggtgaagaggttttgcgcacatctgaagctcttgaatggcgcgtgaccccccatgatctta

SEQ ID NO: 840556 - DNA, 75 bp, synthetic construct
  source 1..75: mol_type = other DNA
aatacggcaggctgacggagaagacggaccgcatcccggcgggtgtgatacggacggacgacgagcggacccacc

SEQ ID NO: 840557 - DNA, 75 bp, synthetic construct
  source 1..75: mol_type = other DNA
tcgggctgagtggcgggtggaatttataccaatatcctctcaatccggttcataaagtggatcctttggggttat

SEQ ID NO: 840558 - DNA, 75 bp, synthetic construct
  source 1..75: mol_type = other DNA
caggtgatcgtaaatggttcattgactggattgctcctttcggggataacggtgccctgtacaaatatatgcgaa

SEQ ID NO: 840559 - DNA, 75 bp, synthetic construct
  source 1..75: mol_type = other DNA
ttgtcaagataacctcacctttaaaaattagcgcactgaaaggctctgaagtggtggtacagcagattctggact

SEQ ID NO: 840560 - DNA, 75 bp, synthetic construct
  source 1..75: mol_type = other DNA
cttaatttctttcctggtttcggatcgttcttcctacattaccggttccgtgatcaatatcaccggcggtaaatc

SEQ ID NO: 840561 - DNA, 75 bp, synthetic construct
  source 1..75: mol_type = other DNA
tgatttcaagacaagaatggatgctaacgctcttcctacaacttggtgggataagaaagaatacgcttcagcaaa

SEQ ID NO: 840562 - DNA, 75 bp, synthetic construct
  source 1..75: mol_type = other DNA
gtggtgcatttccgcctagtggccgccgacaccgctaaagacaaccgaaaagataatgacaaagagcgtcgcttt

SEQ ID NO: 840563 - DNA, 75 bp, synthetic construct
  source 1..75: mol_type = other DNA
cgaagcgcagcgaaaatcactgccgttatggcgaatggaagatggttttctgcgttcatccggacttggctctga

SEQ ID NO: 840564 - DNA, 75 bp, synthetic construct
  source 1..75: mol_type = other DNA
tgactattacgctcacgggaaaatctcgaaacgtgagttcctcaaccttgcggcgaagtgcagtaggcgggatga

SEQ ID NO: 840565 - DNA, 75 bp, synthetic construct
  source 1..75: mol_type = other DNA
ataaaaaacttactggaggtgaacaagcttacaaatatatcgatgagaaaggtcgagtgtaccagagtgtcagcc

SEQ ID NO: 840566 - DNA, 75 bp, synthetic construct
  source 1..75: mol_type = other DNA
acatattcttaaaacaattaaactagaaagctatgaagattgcttaaataatatagtactgaaaaaatctcccat

SEQ ID NO: 840567 - DNA, 75 bp, synthetic construct
  source 1..75: mol_type = other DNA
cgggaataccgcgatgatgaactgtacagcgtacggcacctggtgtttaacggctttgagctgataagccagcag

SEQ ID NO: 840568 - DNA, 75 bp, synthetic construct
  source 1..75: mol_type = other DNA
aaatgatgaatgttggcggctgggaactagtatttagtcaagctaaatctgactcggctttatcagttattaaac

SEQ ID NO: 840569 - DNA, 75 bp, synthetic construct
  source 1..75: mol_type = other DNA
atcctcaagccgaaatttgggtgaaggtgcacccagatgtactggaaggaaagaaaacaggttatttcgctgatc

SEQ ID NO: 840570 - DNA, 75 bp, synthetic construct
  source 1..75: mol_type = other DNA
atttctggcgcaaccgtgccagaaactttctctgctgcgccctgttccgcaagaagttgatgctatcgccgtgtg

SEQ ID NO: 840571 - DNA, 75 bp, synthetic construct
  source 1..75: mol_type = other DNA
tagcagacttgatctatcaggcgttgattgtttatccaacctatatccacccaacacggctacaacctattacgg

SEQ ID NO: 840572 - DNA, 75 bp, synthetic construct
  source 1..75: mol_type = other DNA
gaaaccggaatgtacctggtgagtgatccactggggttgctggggggtgagcagacttaccggtatgtgcctaat

SEQ ID NO: 840573 - DNA, 75 bp, synthetic construct
  source 1..75: mol_type = other DNA
agtgggtgctgttgtcaacattatggtgggtgtggcgaagtttgtctggacaggactgcggctggtctggctggc

SEQ ID NO: 840574 - DNA, 75 bp, synthetic construct
  source 1..75: mol_type = other DNA
cagcaaccaaatccagcagccagaccattaccgcctacatgggcaccatgtacggcatctttaaagaccaggctg

SEQ ID NO: 840575 - DNA, 75 bp, synthetic construct
  source 1..75: mol_type = other DNA
cactatggaatacggcggggctgcgcaggattttgtgcgtgcttcttacgacatccagtcagccattgccgggtt

SEQ ID NO: 840576 - DNA, 75 bp, synthetic construct
  source 1..75: mol_type = other DNA
atggcagtggagacaggcaaacgaaaagcccagaaaggtgaaagagaagaaataaccatgatgaaagagcctcat

SEQ ID NO: 840577 - DNA, 75 bp, synthetic construct
  source 1..75: mol_type = other DNA
cgctgatatcgaaagtcaccgatgccgtaatcgaccaggttgttgaatggcaaaaccgtcctctggatgctgttt

SEQ ID NO: 840578 - DNA, 75 bp, synthetic construct
  source 1..75: mol_type = other DNA
gtccaccatgagcggtagtgaagcaggtaccaaatataaagcgttccttgccagtgtagggcgtgcacaaaaaac

SEQ ID NO: 840579 - DNA, 75 bp, synthetic construct
  source 1..75: mol_type = other DNA
caggcgatctggtccatgtattcaacgatcgcggtgtggtggagatcccctgcaaggtgactcagcgcattctcc

SEQ ID NO: 840580 - DNA, 75 bp, synthetic construct
  source 1..75: mol_type = other DNA
gatgagtggttttcacacgaaaggtcacacccactcaacatatgccagtgtactgatgttgcatgaagcggtacc

SEQ ID NO: 840581 - DNA, 75 bp, synthetic construct
  source 1..75: mol_type = other DNA
tgatacggtatttggccaacaccagattcgcccctgcttacgtgggcgatccaatcgctggcgcgtgtacagtcc

SEQ ID NO: 840582 - DNA, 75 bp, synthetic construct
  source 1..75: mol_type = other DNA
gggtgaaacaagcaaccgttctggcgatcggcgaaaaagaaaaacgctggcggcatacgttgttcctcaaggcga

SEQ ID NO: 840583 - DNA, 75 bp, synthetic construct
  source 1..75: mol_type = other DNA
aaagcgcctggcaaaagccgttcgcagatatgatgcccgccagccagcgcgcgatacgcgaacgggtcaacgcca

SEQ ID NO: 840584 - DNA, 75 bp, synthetic construct
  source 1..75: mol_type = other DNA
gctcaaaactttaccgccacatcttacacgtatggtgctacaggagtacagtttgccagtcattttagccagatt

SEQ ID NO: 840585 - DNA, 75 bp, synthetic construct
  source 1..75: mol_type = other DNA
atatcatactgataaaggacacagtctacgatggttgtttttttgatttgagcagcattgtgattatgccaatct

SEQ ID NO: 840586 - DNA, 75 bp, synthetic construct
  source 1..75: mol_type = other DNA
agcgggcgcgtcgcgctgggcggagtagcacataagccctggcgcattgaggctgcggatgctcagctatcccag

SEQ ID NO: 840587 - DNA, 75 bp, synthetic construct
  source 1..75: mol_type = other DNA
tgaacaccccagccgaggcggcacttagcgctcagcgcgtacccggcgcaaaatttatcgcgggcgggaccaatc

SEQ ID NO: 840588 - DNA, 75 bp, synthetic construct
  source 1..75: mol_type = other DNA
aacggctttgagctgataagccagcagtgcagccgggtacggcagccgcacccgtccgtggccccgcaacgaatc

SEQ ID NO: 840589 - DNA, 75 bp, synthetic construct
  source 1..75: mol_type = other DNA
acgataatagatgctattgattttcaacaggtagaatttacaaagcctcgttttagttcggtagagattggttgg

SEQ ID NO: 840590 - DNA, 75 bp, synthetic construct
  source 1..75: mol_type = other DNA
ttatcggcggtcgccataaagacgatcacgggctttatgtcagtacggggggctttacgaaagatgctcgctatg

SEQ ID NO: 840591 - DNA, 75 bp, synthetic construct
  source 1..75: mol_type = other DNA
gcaaaaagctttgctgagaaaacaatatgtgagaaccctaagctttcaaaggatgatgatgacttaaaatattta

SEQ ID NO: 840592 - DNA, 75 bp, synthetic construct
  source 1..75: mol_type = other DNA
gtgatgaggttgcagccggctccacgacgttgcggctgcagtgtgatgcaggagtgacggtatgggcaacactga

SEQ ID NO: 840593 - DNA, 75 bp, synthetic construct
  source 1..75: mol_type = other DNA
ctgtcagccacgctaattacgccatcttacgccagggatttcataaccagattatcggtgccaacatcaccaact

SEQ ID NO: 840594 - DNA, 75 bp, synthetic construct
  source 1..75: mol_type = other DNA
gctaattggctatggtgttatcaaagggaaatatctgtcgataccgcagaatttcaggataaataatgtgcggat

SEQ ID NO: 840595 - DNA, 75 bp, synthetic construct
  source 1..75: mol_type = other DNA
gtgaatggtgtcacgccgccagcagttcagcacctgaccgcagaagtcaccgcagacagcggggaataccaggtg

SEQ ID NO: 840596 - DNA, 75 bp, synthetic construct
  source 1..75: mol_type = other DNA
aaagataaagataaagataaagataaagataaagatatttttaaaattgttatggttggacgattatgtgaccaa

SEQ ID NO: 840597 - DNA, 75 bp, synthetic construct
  source 1..75: mol_type = other DNA
atgactgtcgcactgcgtgaaacaagtgtagggcaaggtgttccaggcaagtttcgcgcactggcaacttttaac

SEQ ID NO: 840598 - DNA, 75 bp, synthetic construct
  source 1..75: mol_type = other DNA
accaattcgccctacaaccgatgctgcactggtagcagctattgcacacacgttgataaaagaaaatctgatcga

SEQ ID NO: 840599 - DNA, 75 bp, synthetic construct
  source 1..75: mol_type = other DNA
aatgtcttttccggatggtgtgtcggagctaatactgcatcaacccagggactgtctgttcgtgtaacacctgta

SEQ ID NO: 840600 - DNA, 75 bp, synthetic construct
  source 1..75: mol_type = other DNA
aggggaccgtaggcgggagctcttcgggtattaacggcaatcgtgatgccgatgactcagaagaccatcaggcat

SEQ ID NO: 840601 - DNA, 75 bp, synthetic construct
  source 1..75: mol_type = other DNA
ccgcttccggcgctgacgctggcaaaccgattataccaggatgccacccgtgcagatgaactggtacaggaagcg

SEQ ID NO: 840602 - DNA, 75 bp, synthetic construct
  source 1..75: mol_type = other DNA
gctggatcttacgctaaagggcagttcacttctggatttagtggggttcaggttactgttggcggcaagggtttg

SEQ ID NO: 840603 - DNA, 75 bp, synthetic construct
  source 1..75: mol_type = other DNA
agtggcagttatcgtcagggacggaaacgttgccctcagttaccctgaatgtaaagtatgttaataccggtgagg

SEQ ID NO: 840604 - DNA, 75 bp, synthetic construct
  source 1..75: mol_type = other DNA
atgacaaatttttataaggtctttctggctgtattcattctggtttgctgcaatatcagccatgcggcagtttca

SEQ ID NO: 840605 - DNA, 75 bp, synthetic construct
  source 1..75: mol_type = other DNA
tcgtgcagattactgacaccttccgcagtcaatgtcagcctggctgcaatttctgccggacaactaccatcatcc

SEQ ID NO: 840606 - DNA, 75 bp, synthetic construct
  source 1..75: mol_type = other DNA
ctaactgctccaacaactatggtccgtatcactttcccgaaaaattgatcccgctgaccatcctcaacgccctgg

SEQ ID NO: 840607 - DNA, 75 bp, synthetic construct
  source 1..75: mol_type = other DNA
cgctactcgttttcccagactgatatcaccgatgccgctgccgtggcggtccagttcagcgaattccgcccggat

SEQ ID NO: 840608 - DNA, 75 bp, synthetic construct
  source 1..75: mol_type = other DNA
ggcgagtatttgaatttactctgatggcaattgaatcagggcttaaagtgtttgctgtcacgggcagtaccgttg

SEQ ID NO: 840609 - DNA, 75 bp, synthetic construct
  source 1..75: mol_type = other DNA
gctgattgttgtgctatgtactggtgccatgaccagtgccgctgcggactccagaccagccagtacagacgaggc

SEQ ID NO: 840610 - DNA, 75 bp, synthetic construct
  source 1..75: mol_type = other DNA
catgaatatccctaccgtgatacagcctggatagaggatatcgggcgggcaacacggcgatttgttattcgcggt

SEQ ID NO: 840611 - DNA, 75 bp, synthetic construct
  source 1..75: mol_type = other DNA
tacggtggagcgacgcagcagcgtgccggaggtagcggaatggctggtattgcaatcatttgggagtatgcgtga

SEQ ID NO: 840612 - DNA, 75 bp, synthetic construct
  source 1..75: mol_type = other DNA
gtcacggaagtggtgttcaccggggaccggggcggtgaaatccgccaccggctggcgcgtgatgcggcgggccgg

SEQ ID NO: 840613 - DNA, 75 bp, synthetic construct
  source 1..75: mol_type = other DNA
ttttgatgatgtcgacggtaatgactccaacttattgatagtgttttatgttcagataatgcccgatgactttgt

SEQ ID NO: 840614 - DNA, 75 bp, synthetic construct
  source 1..75: mol_type = other DNA
catcgatttcgccgcaggcattgcggtgctgaataccgggcatcgccaccctgaactggtcgcggcggtggagca

SEQ ID NO: 840615 - DNA, 75 bp, synthetic construct
  source 1..75: mol_type = other DNA
tgctcctcagaggggcaacactcgcaagtaagtttttacttgttatttttttagctaagtttgccacgtacaaaa

SEQ ID NO: 840616 - DNA, 75 bp, synthetic construct
  source 1..75: mol_type = other DNA
gtgacgggaaaatcgtgtgggagacggggtatcaggtctggggtaacacgatacaggagaaggaccacggcgggg

SEQ ID NO: 840617 - DNA, 75 bp, synthetic construct
  source 1..75: mol_type = other DNA
ggcgcgccggaagagatgacggacagtgacgggaaaatcgtgtgggagacggggtatcaggtctggggtaacacg

SEQ ID NO: 840618 - DNA, 75 bp, synthetic construct
  source 1..75: mol_type = other DNA
ccggcgcggaagcggttgagaacgcggtgaaaattgctcgcgcccataccggacgccctggcgtgattgcattta

SEQ ID NO: 840619 - DNA, 75 bp, synthetic construct
  source 1..75: mol_type = other DNA
tatgaccatggcgctgaccggaaaggtcgcgccgtacaaaatcggcttcggcccgttccccggttcggtgtatca

SEQ ID NO: 840620 - DNA, 75 bp, synthetic construct
  source 1..75: mol_type = other DNA
tcgggcgtggtcggtaacgcgaatattatggacgcgcccgcgccgggcgggttgggtggcacctacgccgggaac

SEQ ID NO: 840621 - DNA, 75 bp, synthetic construct
  source 1..75: mol_type = other DNA
ggccatcgcggcggtacgcggtctggggtctatgattgcggcagagtttaacgatccgcaaacgggcgagccgtc

SEQ ID NO: 840622 - DNA, 75 bp, synthetic construct
  source 1..75: mol_type = other DNA
cgctggcggtggctgccgcgcacgcggtgctcaacattatcgacaaagaatcactctgcgaacgcgcgaatcaac

SEQ ID NO: 840623 - DNA, 75 bp, synthetic construct
  source 1..75: mol_type = other DNA
aagcctcgcgggcggcatgccgctttcgggcgtggtcggtaacgcgaatattatggacgcgcccgcgccgggcgg

SEQ ID NO: 840624 - DNA, 75 bp, synthetic construct
  source 1..75: mol_type = other DNA
cagagccgcgccactgatgcagtcactgtatgactggatacagcaacagatgaaaacactgtcgcgtcactcgga

SEQ ID NO: 840625 - DNA, 75 bp, synthetic construct
  source 1..75: mol_type = other DNA
atgcggatatcagcggtaatgtgaatgcaaattcagggacgctcaacaatgtcacgattaatgaaaactgtcaga

SEQ ID NO: 840626 - DNA, 75 bp, synthetic construct
  source 1..75: mol_type = other DNA
atccggtcagcgtggaggtccagtccgtcaccgacggcgtgaaggtgaaagtgagccgtgttcctgacggcgttg

SEQ ID NO: 840627 - DNA, 75 bp, synthetic construct
  source 1..75: mol_type = other DNA
cagcaaaagtgcgacggcagaagaagccctgaagcgaatcagtgaactgtacgccatcgaggatgaaatacgggg

SEQ ID NO: 840628 - DNA, 75 bp, synthetic construct
  source 1..75: mol_type = other DNA
cagggtgtcgaactgagccgggccttactctccaactgggttgacgcgtgctgccagttaatgacaccggtgaat

SEQ ID NO: 840629 - DNA, 75 bp, synthetic construct
  source 1..75: mol_type = other DNA
gacgccctctgttattacagtgatgacggtctggcggaggtggacaataacacagcggaaagagcgcttcgtgca

SEQ ID NO: 840630 - DNA, 75 bp, synthetic construct
  source 1..75: mol_type = other DNA
gaaacaccaaacgggacggttacagtcaccatcagcgatgatcataactttgaccgtcagattattattccgccc

SEQ ID NO: 840631 - DNA, 75 bp, synthetic construct
  source 1..75: mol_type = other DNA
cccgttctgaaaaactgcgtcgtgaagttgaactggctgaggctctgctgaaacaacgtgaacaggacagcgatc

SEQ ID NO: 840632 - DNA, 75 bp, synthetic construct
  source 1..75: mol_type = other DNA
atgaaaatcatcacccgtggcgaagccatgcgtattcaccgtcagcatcctgcatctcgtctttttccgttctgt

SEQ ID NO: 840633 - DNA, 75 bp, synthetic construct
  source 1..75: mol_type = other DNA
cggaagaagcactgaaactaatcggcgaactgtacgccattgagcacgaaatacgcgggttgccggtgtctgaac

SEQ ID NO: 840634 - DNA, 75 bp, synthetic construct
  source 1..75: mol_type = other DNA
gggctgggtggatgcatgctgccggctgctgtctccgctggaagaggcgcttcatggcgatgtcatgactgacgg

SEQ ID NO: 840635 - DNA, 75 bp, synthetic construct
  source 1..75: mol_type = other DNA
aacatctgcgggctcagatagaaaaactgcgccggatgctgttcggtacccgttctgaaaaactgcgccggatgc

SEQ ID NO: 840636 - DNA, 75 bp, synthetic construct
  source 1..75: mol_type = other DNA
ccgtattgatatttactgagagctcagatcaactttccagggcaacagatcgcgtacccggtttgccggccagtc

SEQ ID NO: 840637 - DNA, 75 bp, synthetic construct
  source 1..75: mol_type = other DNA
agaaagttaccttcgccatgtgcttggcgtcatagcagactggccggtcaaccgggtcagcgaactgcttccgtg

SEQ ID NO: 840638 - DNA, 75 bp, synthetic construct
  source 1..75: mol_type = other DNA
aacatgcggcggtgttgtactcgctgatcggcacatgccgtctgaacaatgtggaaccagaaaaatggctgcgtt

SEQ ID NO: 840639 - DNA, 75 bp, synthetic construct
  source 1..75: mol_type = other DNA
aacgtcatgaacggtaaccgcgctgaaatgagcccggaagccgccggcattgccgcctgtctgatgacgtacagt

SEQ ID NO: 840640 - DNA, 75 bp, synthetic construct
  source 1..75: mol_type = other DNA
gtgactgcatcgttgaagcaccggcaccatcccgtccgatagagcgtggtatcgcgggcccggggttacttgccc

SEQ ID NO: 840641 - DNA, 75 bp, synthetic construct
  source 1..75: mol_type = other DNA
atgtgatgtgtcagagcaactggagcttatcagcagtgcctttaaggttatcgaaacacaacgtccgaaacaggc

SEQ ID NO: 840642 - DNA, 75 bp, synthetic construct
  source 1..75: mol_type = other DNA
tataccgccagtcagaaatataccgtcgtcagggagtggagctgagccgtgccacactggggcgctggacaggtg

SEQ ID NO: 840643 - DNA, 75 bp, synthetic construct
  source 1..75: mol_type = other DNA
agtgcaggatattcccggtgtgctggctgtgtttgcagaacgccgtaaggacagtttcggtccgtatgtccggct

SEQ ID NO: 840644 - DNA, 75 bp, synthetic construct
  source 1..75: mol_type = other DNA
gcttctggccgcagcattttggcctcattccacagtgggtaaccctggacccccgtgtcttcggctggatggacc

SEQ ID NO: 840645 - DNA, 75 bp, synthetic construct
  source 1..75: mol_type = other DNA
agtgcaggatatccccggtgtgcttgccgtgtttgccgaacgccggaaggacagttttggcccgtatgtccggct

SEQ ID NO: 840646 - DNA, 75 bp, synthetic construct
  source 1..75: mol_type = other DNA
ccatgcgcgttcaccgtcagtatccgtcatcccgtctttttccgttctgtaccggtaaataccgctggcacggca

SEQ ID NO: 840647 - DNA, 75 bp, synthetic construct
  source 1..75: mol_type = other DNA
cattccacagtgggtaaccctggagccccgtgtcttcggctggatggaccgtctgtgcgaaaactactgcggtgg

SEQ ID NO: 840648 - DNA, 75 bp, synthetic construct
  source 1..75: mol_type = other DNA
cattccacagtgggtaaccctggacccccgtgtcttcggctggatggaccgtctctgcgaaaactactgcggtgg

SEQ ID NO: 840649 - DNA, 75 bp, synthetic construct
  source 1..75: mol_type = other DNA
cattccacagtgggtaaccctggaaccccgtgtcttcggctggatggaccgtctatgcgaaaactactgcggtgg

SEQ ID NO: 840650 - DNA, 75 bp, synthetic construct
  source 1..75: mol_type = other DNA
gataataatgctgcggaaagagcgcttcgtgcagtctgtctcggaaagaaaaactttatgttctttggcagcgat

SEQ ID NO: 840651 - DNA, 75 bp, synthetic construct
  source 1..75: mol_type = other DNA
cacagcgggtggcggcttatgcttccgaaatcaaccggctgaaggcgctggttgcaaaactgcagtgcatgcagt

SEQ ID NO: 840652 - DNA, 75 bp, synthetic construct
  source 1..75: mol_type = other DNA
ccgcttcggcctgtgcaccggagactgacctgcaacaaccggttgccaccctcgtccctgatgaacagcgcatca

SEQ ID NO: 840653 - DNA, 75 bp, synthetic construct
  source 1..75: mol_type = other DNA
ccacatcttctgtttccgtaaccgctgcatcagggaatgaccagcctcagctggttgccaccctcgtccctgatg

SEQ ID NO: 840654 - DNA, 75 bp, synthetic construct
  source 1..75: mol_type = other DNA
accgctggagccgctgtatgacgtcctgcgccagtatgtgcagatgcccggtaaagtccatgctgatgatatccc

SEQ ID NO: 840655 - DNA, 75 bp, synthetic construct
  source 1..75: mol_type = other DNA
gtgtcagagcaactggagcttatcagcagcgcctttaaggttatcgaaacacaacgtccgaaactggcctgttgc

SEQ ID NO: 840656 - DNA, 75 bp, synthetic construct
  source 1..75: mol_type = other DNA
cattccacagtgggttaccctggaaccccgtgtcttcggctggatggaccgtctttgcgaaaactactgcggtgg

SEQ ID NO: 840657 - DNA, 75 bp, synthetic construct
  source 1..75: mol_type = other DNA
cagcggacgatggcagtgagcggctggtcagtacggcaagggcgacggaaaccacataccggcttcacgcaactg

SEQ ID NO: 840658 - DNA, 75 bp, synthetic construct
  source 1..75: mol_type = other DNA
agaagacgaagaccgggcggttgtgggcgtatgttcgtgatgaccgcaatgccgggtcagcgttggtacctgcag

SEQ ID NO: 840659 - DNA, 75 bp, synthetic construct
  source 1..75: mol_type = other DNA
agtgttatgccatgacggtccactattaccggctgcgggattacgccctgcaacatccggaatgcaacgccatta

SEQ ID NO: 840660 - DNA, 75 bp, synthetic construct
  source 1..75: mol_type = other DNA
agtcctccggtattttccctgacatcagacgggagactgacggcgaaaaatgcggatatcagtggcagtgtgaat

SEQ ID NO: 840661 - DNA, 75 bp, synthetic construct
  source 1..75: mol_type = other DNA
gcatggtgggtaaatggttggtatcccacagcaagtatcagcgatttgctggttgttgtgatgaagaaagccact

SEQ ID NO: 840662 - DNA, 75 bp, synthetic construct
  source 1..75: mol_type = other DNA
aatgacactggagttttctgtatcagcatggtgggtaaatggttggtatcccacagcaagtatcagcgatttgct

SEQ ID NO: 840663 - DNA, 75 bp, synthetic construct
  source 1..75: mol_type = other DNA
catcatgcctgtcgtacggagtgttatgccatgacggtccactattaccggctgcgggattacgccctgcagcat

SEQ ID NO: 840664 - DNA, 75 bp, synthetic construct
  source 1..75: mol_type = other DNA
cattccacagtgggtgaccctggaaccccgtgtcttcggctggatggaccgtctgtgcgaaaactactgcggtgg

SEQ ID NO: 840665 - DNA, 75 bp, synthetic construct
  source 1..75: mol_type = other DNA
cattccacagtgggtcaccctggaaccccgtgtcttcggctggatggaccgtctctgcgaaaactactgcggtgg

SEQ ID NO: 840666 - DNA, 75 bp, synthetic construct
  source 1..75: mol_type = other DNA
gccatgaacggtaaccgcgcagaaatgagcccggaagccgccggtattgccgcctgtctgatgacgtacagtcat

SEQ ID NO: 840667 - DNA, 75 bp, synthetic construct
  source 1..75: mol_type = other DNA
ccacaccttctgtttccgtaacaactgcatcagggaataaccagtctcaactggttgccaccctcatccctgatg

SEQ ID NO: 840668 - DNA, 75 bp, synthetic construct
  source 1..75: mol_type = other DNA
atgaacggtaaccgcgctgaaatgagcccggaagccgccggcattgccgcctgtctgatggcgtacagccatcat

SEQ ID NO: 840669 - DNA, 75 bp, synthetic construct
  source 1..75: mol_type = other DNA
gcaagcgttacactcagcgcattgagcgacataacctgaatctgagacaacatctggcaaggctgggacggaagt

SEQ ID NO: 840670 - DNA, 75 bp, synthetic construct
  source 1..75: mol_type = other DNA
ccgctgcgatcgaggcctcaagtctcagccgaattctggcgattaccactgcagagcctgagacggtaaacgcga

SEQ ID NO: 840671 - DNA, 75 bp, synthetic construct
  source 1..75: mol_type = other DNA
tgttttacgcgtatgacaggatacggaggactgttgtggcgcacgtcttcggtgaacgcactctggccacactgg

SEQ ID NO: 840672 - DNA, 75 bp, synthetic construct
  source 1..75: mol_type = other DNA
gcaatcgtcatggtaatatctcttttcacgttatcttcaacatccagcatagaacaacacttttacattataaag

SEQ ID NO: 840673 - DNA, 75 bp, synthetic construct
  source 1..75: mol_type = other DNA
gtggtatggatgacggatggctggtcgctgtatgaatcacgcctgaagggaaagctgcacgttatcagcaagcgt

SEQ ID NO: 840674 - DNA, 75 bp, synthetic construct
  source 1..75: mol_type = other DNA
gcgacataacctgaatctgagacaacatctggcaaggctgggacggaagtcactgtcgttctcaaaatcggtgga

SEQ ID NO: 840675 - DNA, 75 bp, synthetic construct
  source 1..75: mol_type = other DNA
tggccacactggagcgtcttctaagcctgctgtcggcctttgaggtcgtggtatggatgacggatggctggccgc

SEQ ID NO: 840676 - DNA, 75 bp, synthetic construct
  source 1..75: mol_type = other DNA
gaagctacagtatcagcgctcaacgatcctgggatgagtacagccaaacagaaaacagtatttacctcagctttt

SEQ ID NO: 840677 - DNA, 75 bp, synthetic construct
  source 1..75: mol_type = other DNA
gctgtatgaatcacgcctgaagggaaagctgcacgttatcagcaagcgttacactcagcgcattgagcgacataa

SEQ ID NO: 840678 - DNA, 75 bp, synthetic construct
  source 1..75: mol_type = other DNA
gataacgctcgcgtcagttatagcgtgaatactggctatacgatgaataaagccagcaaagatttgagttatgtt

SEQ ID NO: 840679 - DNA, 75 bp, synthetic construct
  source 1..75: mol_type = other DNA
ttgatgaacgccacggcctggactggttacagaattatgtgcagaccaacctctataacctgctttataccagca

SEQ ID NO: 840680 - DNA, 75 bp, synthetic construct
  source 1..75: mol_type = other DNA
atgacgcgacagaaaaactacgcacttacttttcaaatgtatgtgctgattttgaagctgaacgggttgaaatgg

SEQ ID NO: 840681 - DNA, 75 bp, synthetic construct
  source 1..75: mol_type = other DNA
cgcctgaagggaaagctgcacgttatcagcaagcgttacactcagcgcattgagcgacataatctgaatctgaga

SEQ ID NO: 840682 - DNA, 75 bp, synthetic construct
  source 1..75: mol_type = other DNA
cgtggttgggacgtaaaagaaagtgccgtaatggcgattactgccaacgaactggataccgctcgtcgccgtacc

SEQ ID NO: 840683 - DNA, 75 bp, synthetic construct
  source 1..75: mol_type = other DNA
tattcacaagccattttgggtaatgactccaacttactgatagtgttttatgttcagataatgcccgatgacctt

SEQ ID NO: 840684 - DNA, 75 bp, synthetic construct
  source 1..75: mol_type = other DNA
ctggttgctactctcgtccctgatgaacagcgcatcagcttctggccgcagcattttggcctcattccacagtgg

SEQ ID NO: 840685 - DNA, 75 bp, synthetic construct
  source 1..75: mol_type = other DNA
aaagtggctgcgttacgtcattgaacatatccaggattggccggcaaaccgggtacgcgatctgttgccctggaa

SEQ ID NO: 840686 - DNA, 75 bp, synthetic construct
  source 1..75: mol_type = other DNA
ctgaaacagtgggatagcctgaacgtgtactgcagtaatggctgggtggaaatcgacaacaacatcgcagagaac

SEQ ID NO: 840687 - DNA, 75 bp, synthetic construct
  source 1..75: mol_type = other DNA
tgacgacacaccggtaaaggtactggcaccgggcaggaagaaggcgaaaacaggatatatctggacgtatgtccg

SEQ ID NO: 840688 - DNA, 75 bp, synthetic construct
  source 1..75: mol_type = other DNA
atgaagaaatacctcgttcgcatcgcagagctggaaaggttgctctctgagcagactgaagccctccgtcagaaa

SEQ ID NO: 840689 - DNA, 75 bp, synthetic construct
  source 1..75: mol_type = other DNA
actcccgtccctgatgaacagcgcatcagcttctggcctcagcattttggcctcattccacagtgggtgaccctg

SEQ ID NO: 840690 - DNA, 75 bp, synthetic construct
  source 1..75: mol_type = other DNA
cgaattgagcggcataacctgaatctgaggcagcacctggcacggctgggacggcagggacggaagtcgctgtcg

SEQ ID NO: 840691 - DNA, 75 bp, synthetic construct
  source 1..75: mol_type = other DNA
ctggtctttgtcaccaaataccgacgtcagatttttgaccatgacgcgacagaaaaactacgcacttacttttca

SEQ ID NO: 840692 - DNA, 75 bp, synthetic construct
  source 1..75: mol_type = other DNA
cctgaagggaaagctgcacgtaatcagcaagcgatatacggggtctgacgctcagtggaacgaaaactcacgtta

SEQ ID NO: 840693 - DNA, 75 bp, synthetic construct
  source 1..75: mol_type = other DNA
gcagaaagagcgcttcgtgcagtctgtctcgggaagaaaaattatgtgttcttcgacagcgatcacggtggcgag

SEQ ID NO: 840694 - DNA, 75 bp, synthetic construct
  source 1..75: mol_type = other DNA
gtgagcagcgccctgaaagtgatccgcacagaacgggtaaaaaaagcctgtacaaaatgtgactgcatcgttgaa

SEQ ID NO: 840695 - DNA, 75 bp, synthetic construct
  source 1..75: mol_type = other DNA
aagccatgcgtattcaccaacaacatccgacatcccgtctttttccgttctgtaccggtaaataccgctggcacg

SEQ ID NO: 840696 - DNA, 75 bp, synthetic construct
  source 1..75: mol_type = other DNA
cgctgaaatgagtccggaagccgccggcattgcggcctgtctgatgacgtacagtcatcacgcctgtcgtacgga

SEQ ID NO: 840697 - DNA, 75 bp, synthetic construct
  source 1..75: mol_type = other DNA
ccatgcgtattcatcaacaacatcctgcatcccgtcttttcccgttctgtaccggcaaataccgctggcacggca

SEQ ID NO: 840698 - DNA, 75 bp, synthetic construct
  source 1..75: mol_type = other DNA
aaaatccacgatgtatatatcagtaccaaaagcgcgacagcggaagaagccctgaaactaatcggtgaactgtac

SEQ ID NO: 840699 - DNA, 75 bp, synthetic construct
  source 1..75: mol_type = other DNA
aataccatgaacggtaaccgcgctgaaatgagcccggaagccgccggcattgccgcctgtctgatgacgtacagt

SEQ ID NO: 840700 - DNA, 75 bp, synthetic construct
  source 1..75: mol_type = other DNA
tgaaatctttgcccgccagggtgtcgaactgagccgtgccttactctccaactgggttgatgcgtgctgccagtt

SEQ ID NO: 840701 - DNA, 75 bp, synthetic construct
  source 1..75: mol_type = other DNA
aaggttcacactgatgacacaccggtaaaggtactggcaccgggtcagaaaaaggcgaaaacagggcgtatctgg

SEQ ID NO: 840702 - DNA, 75 bp, synthetic construct
  source 1..75: mol_type = other DNA
tttctcctttgccgaacacggtctgctttaacccgtcaccgtcacaaccacatcacacctgttttcgcttttatc

SEQ ID NO: 840703 - DNA, 75 bp, synthetic construct
  source 1..75: mol_type = other DNA
atgatctggcagcctgagttcacagataaaacactctccaggaaacccggggcggttcaaacagtacagattgat

SEQ ID NO: 840704 - DNA, 75 bp, synthetic construct
  source 1..75: mol_type = other DNA
tagtaaatgatatttttttgaaggattttttcatgaagcaacctgattttgcgaagtggtacttctatcaattac

SEQ ID NO: 840705 - DNA, 75 bp, synthetic construct
  source 1..75: mol_type = other DNA
tgttatgccatgacggtccattattaccggctgcgggattacgccctgcagcatccggaatgcagcgccattatg

SEQ ID NO: 840706 - DNA, 75 bp, synthetic construct
  source 1..75: mol_type = other DNA
tctgaaatgtacggccgccagggcgtggagctgagtcgttcactgctatcgggctgggtggatgcatgctgccgg

SEQ ID NO: 840707 - DNA, 75 bp, synthetic construct
  source 1..75: mol_type = other DNA
cccggagaaaaaatccacgatgtatacatcagcagcaaaagtgcgacggcagaagaagccctgaagcgaatcagt

SEQ ID NO: 840708 - DNA, 75 bp, synthetic construct
  source 1..75: mol_type = other DNA
gcgtactcaccgaaccggcaggggaaacacccggagcaacacctccgccccttccggggtatcctgcaggcggat

SEQ ID NO: 840709 - DNA, 75 bp, synthetic construct
  source 1..75: mol_type = other DNA
tacagctttagctggttctttatggtcaccaaccgtaattctgggagtggcgagtgcagtagcaataggtgttca

SEQ ID NO: 840710 - DNA, 75 bp, synthetic construct
  source 1..75: mol_type = other DNA
aaagcctgtacaaaatgtgactgtattgttgaagcaccggcgccgtcccgtccgatagagcgtggtatcgcaggt

SEQ ID NO: 840711 - DNA, 75 bp, synthetic construct
  source 1..75: mol_type = other DNA
cggctgtgggtttacgtccgtgatgaccgtaacgccggttcacagatgcccccggcggtctggttcgcgtacagc

SEQ ID NO: 840712 - DNA, 75 bp, synthetic construct
  source 1..75: mol_type = other DNA
gcgagagtgcggcagtgatgtacagcctgatcggtagctgcaaacttaacggaatcgagccggaaacgtggctac

SEQ ID NO: 840713 - DNA, 75 bp, synthetic construct
  source 1..75: mol_type = other DNA
ttgtctaattcgtcagattctgaccagacggttcaggctgtacgcttacacatgttcttcggcaacgatcatgga

SEQ ID NO: 840714 - DNA, 75 bp, synthetic construct
  source 1..75: mol_type = other DNA
agtgttatgccatgacggtccactattaccggctgcgggattacgccctgcagcatccggaatgcagcgccatta

SEQ ID NO: 840715 - DNA, 75 bp, synthetic construct
  source 1..75: mol_type = other DNA
gccgctgaatgatgctctgtaccgttatgtgatgaatacccgcaagcttcacactgacgacacaccggtaaaggt

SEQ ID NO: 840716 - DNA, 75 bp, synthetic construct
  source 1..75: mol_type = other DNA
tgagcagctggaactggtgagtagcgccctgaaagtgatccgcactgttcgggtaaaaaaagcctgtacaaaatg

SEQ ID NO: 840717 - DNA, 75 bp, synthetic construct
  source 1..75: mol_type = other DNA
gcctactcaccggaccatcagggtaaacatccggagcagcaccttcgccccttccggggtatcctgcaggcagat

SEQ ID NO: 840718 - DNA, 75 bp, synthetic construct
  source 1..75: mol_type = other DNA
tctgagcgtactgccggaatggccctccaaccgggttgatgaactcctgccatggaacgtgtcaacgacggatga

SEQ ID NO: 840719 - DNA, 75 bp, synthetic construct
  source 1..75: mol_type = other DNA
cgaaatcaaccggctgaaggcgctggttgcaaaactgcagcgcatgcagttcggtaaaagctcagaaaaacttcg

SEQ ID NO: 840720 - DNA, 75 bp, synthetic construct
  source 1..75: mol_type = other DNA
gtacggagtgttatgccatgacggtccattattaccggctgcgggattacgccctgcagcatccggaatgcagcg

SEQ ID NO: 840721 - DNA, 75 bp, synthetic construct
  source 1..75: mol_type = other DNA
aaaatattaagctcattcaaacgctgggctgatgaggcgatcctcgtcaaggaggggttagtctcagttgctgac

SEQ ID NO: 840722 - DNA, 75 bp, synthetic construct
  source 1..75: mol_type = other DNA
gccatatcctgagcgtactgccggaatggccttccaaccgagttgatgaactgctgccatggaacgtagtactca

SEQ ID NO: 840723 - DNA, 75 bp, synthetic construct
  source 1..75: mol_type = other DNA
ggctcatgcccggagaaaaaatccacgatgtgcatgcaagagcgcccacctacatcaccacggaagccctgcagc

SEQ ID NO: 840724 - DNA, 75 bp, synthetic construct
  source 1..75: mol_type = other DNA
ggtaaaacaagaactgcccggctgtgggtctatgtccgtgatgaccgtaacgccggttcggaaatgcctccggcg

SEQ ID NO: 840725 - DNA, 75 bp, synthetic construct
  source 1..75: mol_type = other DNA
gtatctggaatctgtacacactgaacaacggcggggcatttatggctcccgaaccggatgacgatgatgccgaaa

SEQ ID NO: 840726 - DNA, 75 bp, synthetic construct
  source 1..75: mol_type = other DNA
acagtccggaccggaaaggtatccatccacagaatcatctggccggttacagcggagtgcttcaggccgatgctt

SEQ ID NO: 840727 - DNA, 75 bp, synthetic construct
  source 1..75: mol_type = other DNA
ggccgatttgatgcaggcctttgctctgaagatgggttacggtctggcacctgacccgtattatcaccatgtgaa

SEQ ID NO: 840728 - DNA, 75 bp, synthetic construct
  source 1..75: mol_type = other DNA
gtatctggaatctgtacacgctgaacaacggcggggcatttatggcacccgaaccggatgacgatgatgtcgaaa

SEQ ID NO: 840729 - DNA, 75 bp, synthetic construct
  source 1..75: mol_type = other DNA
gtatctggaatctgtacactctgaacaacggcggggcatttatggcgcccgaaccggatgacgatgatgccgaaa

SEQ ID NO: 840730 - DNA, 75 bp, synthetic construct
  source 1..75: mol_type = other DNA
gtatctggaatctgtacactctgaacaacggcggggcatttatggcccccgaaccggatgacgatgatggcgaaa

SEQ ID NO: 840731 - DNA, 75 bp, synthetic construct
  source 1..75: mol_type = other DNA
ggcatcccgtctttttccgttctgtaccggcaaataccgctggcacggcagtgctgaggcgtataccggtcgtga

SEQ ID NO: 840732 - DNA, 75 bp, synthetic construct
  source 1..75: mol_type = other DNA
gccaggcaataagaagacgaagaccgggcgcttatggacgtacgttcgagacgaccgcaacgccggatcagcgct

SEQ ID NO: 840733 - DNA, 75 bp, synthetic construct
  source 1..75: mol_type = other DNA
tggagccagaagaaagctgttgcccggagtgtggcggtgagctggattatctgggggaagtcagcgctgaacagt

SEQ ID NO: 840734 - DNA, 75 bp, synthetic construct
  source 1..75: mol_type = other DNA
ccggagcaacacctccgctccttccggggtatcctgcaggcggatgcgttcacaggttacgacaggttgttcagt

SEQ ID NO: 840735 - DNA, 75 bp, synthetic construct
  source 1..75: mol_type = other DNA
agcgtactgccggaatggccctccaaccgagttgatgaactcctgccatggaacgtagtactcaccaataaataa

SEQ ID NO: 840736 - DNA, 75 bp, synthetic construct
  source 1..75: mol_type = other DNA
cagcagtcttgctgatgtgacgttactgggtgaaggggagagcacgacaggctgggtgcttgagcgtgcaggacg

SEQ ID NO: 840737 - DNA, 75 bp, synthetic construct
  source 1..75: mol_type = other DNA
gccttctcaccggaccgacaggggaaacaccctcagcaacatcttcggcactatcatggcgtgctgcaggcagat

SEQ ID NO: 840738 - DNA, 75 bp, synthetic construct
  source 1..75: mol_type = other DNA
ccatccgccctgcgccagtcttcagcccgtaaaccgttaccggcctcacttccccgtgaaaccagggttatccgg

SEQ ID NO: 840739 - DNA, 75 bp, synthetic construct
  source 1..75: mol_type = other DNA
agcgcgtggatgttgctgaacaggccgcgctggagaaaacgattaatcataacgatgcgctgtcgccaacagaaa

SEQ ID NO: 840740 - DNA, 75 bp, synthetic construct
  source 1..75: mol_type = other DNA
ccttggtagaaaaggcacttcagcaaatgataccgttgcaattttgttgctgccttcagaaatcgttaacgaaag

SEQ ID NO: 840741 - DNA, 75 bp, synthetic construct
  source 1..75: mol_type = other DNA
acacaagaagtcagaaattacaaagtatgcttgctgcatttgatcaagctattgatgaggaaaataaaattgaag

SEQ ID NO: 840742 - DNA, 75 bp, synthetic construct
  source 1..75: mol_type = other DNA
atctttataacgatgactccgacgcttcgctggttaatgacgcttttcccatcgagcctggttcacggcattatt

SEQ ID NO: 840743 - DNA, 75 bp, synthetic construct
  source 1..75: mol_type = other DNA
ggtgccatgattgcacaaatggacaagcgcgtggatgttgctgaacaggccgcgctggagaaaacgattaatcat

SEQ ID NO: 840744 - DNA, 75 bp, synthetic construct
  source 1..75: mol_type = other DNA
atatccccgttccggtccaggagccgggcagcggtaaaacaaggactgcccggctgtgggtctacgttcgtgatg

SEQ ID NO: 840745 - DNA, 75 bp, synthetic construct
  source 1..75: mol_type = other DNA
ttgcacgcagttatgccggagcggggcttctggcccatgttgtcgctggaaaatatgcagactatctgccgttat

SEQ ID NO: 840746 - DNA, 75 bp, synthetic construct
  source 1..75: mol_type = other DNA
aaagtggctgcgttacgtcattgaacatatcctggactggccggcaaaccgggtacgcgacctgttgccttggaa

SEQ ID NO: 840747 - DNA, 75 bp, synthetic construct
  source 1..75: mol_type = other DNA
ggcattgctgcctgtctgatgacgtacagtcatcatgcctgtcgtactgcgtattaccgtgaaggagatcggtga

SEQ ID NO: 840748 - DNA, 75 bp, synthetic construct
  source 1..75: mol_type = other DNA
atacggcaaaagcgttcgcatacctgctgaaacagtgggaggccctgaacgtgtactgcagtaatggctgggtgg

SEQ ID NO: 840749 - DNA, 75 bp, synthetic construct
  source 1..75: mol_type = other DNA
accgcccggctgtgggtctacgtccgtgatgaccgtaacgccggttcggaaatgcccccggcggtctggttcgcg

SEQ ID NO: 840750 - DNA, 75 bp, synthetic construct
  source 1..75: mol_type = other DNA
gcactgaagagtataccggtcgtgaagtgcaggatattcccggtgtgctggccgtgtttgcagaacgccgtaagg

SEQ ID NO: 840751 - DNA, 75 bp, synthetic construct
  source 1..75: mol_type = other DNA
tttttccgttctgtaccggtaaataccgctggcacggtagcacggatacatataccggccgtgaagtacaggata

SEQ ID NO: 840752 - DNA, 75 bp, synthetic construct
  source 1..75: mol_type = other DNA
gagcgtactgccggaatggccctccaaccgtgttgacgaactcctgccatggaacgtagtactcaccaataaata

SEQ ID NO: 840753 - DNA, 75 bp, synthetic construct
  source 1..75: mol_type = other DNA
gtatgagtggctccaggggcagatgagcacgctgtcgcgccactcggatacagcgaaagcgttcacctatctgct

SEQ ID NO: 840754 - DNA, 75 bp, synthetic construct
  source 1..75: mol_type = other DNA
gccgaaaacatcagactctcccgtccgcaaagcacttccggcaacacttccccatgacaggcaggttatctcccc

SEQ ID NO: 840755 - DNA, 75 bp, synthetic construct
  source 1..75: mol_type = other DNA
gccatgaacggtaaccgcgctgaaatgagcccggaagccgccggtattgccgcctgtctgatggcgtacagccat

SEQ ID NO: 840756 - DNA, 75 bp, synthetic construct
  source 1..75: mol_type = other DNA
tacacactgaacaacggtggcgcatttatggcccccgaaccagatgacgatgatggcgaaaactgggtactgttc

SEQ ID NO: 840757 - DNA, 75 bp, synthetic construct
  source 1..75: mol_type = other DNA
cacagcgggtggcggcttatgcttccgaaatcaaccggctgaaggcgctggttgcgaaactgcagcgtatgcagt

SEQ ID NO: 840758 - DNA, 75 bp, synthetic construct
  source 1..75: mol_type = other DNA
catcacgcctgtcgtacggagtgttatgccatgacggtccattattaccggctgcgggattacgccctgcagcat

SEQ ID NO: 840759 - DNA, 75 bp, synthetic construct
  source 1..75: mol_type = other DNA
tcgagcaactgaaggccctgctgatcgcacagcaggctgttatcgtccgtctgcctggtgaaataaccggctatg

SEQ ID NO: 840760 - DNA, 75 bp, synthetic construct
  source 1..75: mol_type = other DNA
ggcgctggacaggtgctgttgctgaactgctggagccgttgtatgacgtcctgcgccagtatgtgctgatgcccg

SEQ ID NO: 840761 - DNA, 75 bp, synthetic construct
  source 1..75: mol_type = other DNA
agccagagctgcgccactgatgcagtcactgtatgactggatacagactcagatgaaaacactgtcgcgtcactc

SEQ ID NO: 840762 - DNA, 75 bp, synthetic construct
  source 1..75: mol_type = other DNA
tatggctcatgcccggagaaaaatccacgatgtgcatgcaagagtgcccaccgacatcaccacggaagccctgca

SEQ ID NO: 840763 - DNA, 75 bp, synthetic construct
  source 1..75: mol_type = other DNA
actgcatcgttgaagcaccggcgccgtcccgcccgatagagcgtggtatcgcgggccccggattacttgcccgcg

SEQ ID NO: 840764 - DNA, 75 bp, synthetic construct
  source 1..75: mol_type = other DNA
cgcatcagcttctggccgcagcattttggcctcattccacagtgggtgaccctggagccccgtgtcttcggctgg

SEQ ID NO: 840765 - DNA, 75 bp, synthetic construct
  source 1..75: mol_type = other DNA
gcgtgcagctatgtactgaatcagtgggatgccctctgttattacagtgatgacggtctggcggaggcggacaat

SEQ ID NO: 840766 - DNA, 75 bp, synthetic construct
  source 1..75: mol_type = other DNA
aagccgccggtattgccgcctgtctgatgacgtacagtcatcatgcctgtcgtactgcgtattaccgtgaaggag

SEQ ID NO: 840767 - DNA, 75 bp, synthetic construct
  source 1..75: mol_type = other DNA
atgggtactgttcaatgccatgaacggtaaccgcgcagaaatgagcccggaagccgccggtattgccgcctgtct

SEQ ID NO: 840768 - DNA, 75 bp, synthetic construct
  source 1..75: mol_type = other DNA
aagctgccggtattgccgcctgtctgatgacgtacagccatcacgcctgccatacggagtgttatgccatgacgg

SEQ ID NO: 840769 - DNA, 75 bp, synthetic construct
  source 1..75: mol_type = other DNA
accaaaagcgcgacggcggaagaagcactgaaactaatcggtgaactgtacgccattgagtgcgtattaccgtga

SEQ ID NO: 840770 - DNA, 75 bp, synthetic construct
  source 1..75: mol_type = other DNA
ccatgcgtattcaccgtcagcatcctgcatcccgtcttttcccgttctgtaccggcaaataccgctggcacggca

SEQ ID NO: 840771 - DNA, 75 bp, synthetic construct
  source 1..75: mol_type = other DNA
ccggtgtggcggtcgccgtcgccaccacgaccccgccggatgcgacagccacgttacaggccatgcagtcctgtc

SEQ ID NO: 840772 - DNA, 75 bp, synthetic construct
  source 1..75: mol_type = other DNA
cacagcgggtggcggcttatgcttccgaaatcaaccgactgaaggcgctggttgcgaaactgcaacgtatgcagt

SEQ ID NO: 840773 - DNA, 75 bp, synthetic construct
  source 1..75: mol_type = other DNA
ccatgcgtattcaccgtcagcatcctgcatcccgtctttttccgttctgtaccggcaaataccgctggcacggta

SEQ ID NO: 840774 - DNA, 75 bp, synthetic construct
  source 1..75: mol_type = other DNA
gcgagcgtggagcactgttgtacgggctgatcggcacctgccgtttgaacggtatcgatccggaagcgtatctgg

SEQ ID NO: 840775 - DNA, 75 bp, synthetic construct
  source 1..75: mol_type = other DNA
gttgcgtcagacccgcgcccgtaagccgttccctgaatcactaccccgtgacgaaaagcgactgttgccagcggc

SEQ ID NO: 840776 - DNA, 75 bp, synthetic construct
  source 1..75: mol_type = other DNA
tatacatcagcagcaaaagtgcgaaggcagaagaagccctgaagcgaatcagtgaactgtacgccatcgaggatg

SEQ ID NO: 840777 - DNA, 75 bp, synthetic construct
  source 1..75: mol_type = other DNA
gcagtctgtctcggaaagaaaaactttatgttctttggcagcgatcacggcggcgagcgtggagcactgttgtac

SEQ ID NO: 840778 - DNA, 75 bp, synthetic construct
  source 1..75: mol_type = other DNA
agagaataatccgcctcagttggttgccagcctcgtccctgatgaacagcgcatcagcttctggtcgcagcattt

SEQ ID NO: 840779 - DNA, 75 bp, synthetic construct
  source 1..75: mol_type = other DNA
gccttacggggagtggccgtaggccggaaaaactggctcttcgcgggttccgacagcggtggcgaacatgcggtg

SEQ ID NO: 840780 - DNA, 75 bp, synthetic construct
  source 1..75: mol_type = other DNA
tcacggcggcgagcgtggagcactgctgtacgggctgatcggcacctgccgtctgaacggtatcgatccggaagc

SEQ ID NO: 840781 - DNA, 75 bp, synthetic construct
  source 1..75: mol_type = other DNA
tgacgtcctgcgccagtatgtgctgatgcccggtaaagtccatgctgatgatatccccgtccggtccaggagccg

SEQ ID NO: 840782 - DNA, 75 bp, synthetic construct
  source 1..75: mol_type = other DNA
ctactgcggtggtatctggaatctgtacaccctgaacaacggcggggcatttatggcaccctgtagtggtcaagt

SEQ ID NO: 840783 - DNA, 75 bp, synthetic construct
  source 1..75: mol_type = other DNA
agactgggcgaagcgttcagctatgtactgaatcagtgggacgccctctgttattacagtgatgacggtctggcg

SEQ ID NO: 840784 - DNA, 75 bp, synthetic construct
  source 1..75: mol_type = other DNA
atgcagagtaaaccgctactgacttccctgtataagctgatgcaggagaaagaacacacgttatcgaaaaaatgc

SEQ ID NO: 840785 - DNA, 75 bp, synthetic construct
  source 1..75: mol_type = other DNA
gttatacgaatccggcagaataacggaagccgcgtgtatggcccatgcccggagaaaaatccacgatgtgcatgc

SEQ ID NO: 840786 - DNA, 75 bp, synthetic construct
  source 1..75: mol_type = other DNA
gcgctctgcactggcacgtgccgaagaaaagatcgaagaagatgaacgggaaatagaacatctgcgggctcagat

SEQ ID NO: 840787 - DNA, 75 bp, synthetic construct
  source 1..75: mol_type = other DNA
cagaaagctacctccgctatgtccttgacgtcatagccgactggccgataaaccgggtcggcgaactgctcccct

SEQ ID NO: 840788 - DNA, 75 bp, synthetic construct
  source 1..75: mol_type = other DNA
aaaagtggctgcgctacgtcattgaacatatccaggactggccggcaaaccgggtacgcgatctgttgccctgga

SEQ ID NO: 840789 - DNA, 75 bp, synthetic construct
  source 1..75: mol_type = other DNA
atgaaaaccatttcacataattccaccacgccttctgtttccgtgaccactgcatcagggaataaccagtctcaa

SEQ ID NO: 840790 - DNA, 75 bp, synthetic construct
  source 1..75: mol_type = other DNA
ctggttgccactcccgtccctgatgaacagcgcatcagcttctggccgcagcattttggcctcattccacagtgg

SEQ ID NO: 840791 - DNA, 75 bp, synthetic construct
  source 1..75: mol_type = other DNA
tgatggagaaacctgggtactgttcaatgccatgaacggtaaccgcgctgaaatgagcccggaagccgccggcat

SEQ ID NO: 840792 - DNA, 75 bp, synthetic construct
  source 1..75: mol_type = other DNA
taacaaggttctggcgtgttaccaacgcgaagctaacaaggaaatagctcgtctattaaataatcatcagaagtt

SEQ ID NO: 840793 - DNA, 75 bp, synthetic construct
  source 1..75: mol_type = other DNA
tcatatcctgagcgtactgccggaatggtcttccagccgagttgacgaacttctgccatggaatgtggttctcac

SEQ ID NO: 840794 - DNA, 75 bp, synthetic construct
  source 1..75: mol_type = other DNA
gcatcagcttctggccgcagcattttggcctcattccacagtgggtgcccctggagccccgtgtcttcggctgga

SEQ ID NO: 840795 - DNA, 75 bp, synthetic construct
  source 1..75: mol_type = other DNA
cctgaagggaaagctgcacgttatcagcaagcgttacactcagcgcattgagcgacataatctgagacaacatct

SEQ ID NO: 840796 - DNA, 75 bp, synthetic construct
  source 1..75: mol_type = other DNA
aggcatggcgcagcatgtgtggatgaacgctgacggccagtccgtccatgacggcatatgcgcggataatctgcc

SEQ ID NO: 840797 - DNA, 75 bp, synthetic construct
  source 1..75: mol_type = other DNA
gagaagatctccaccgcttgtcattgttggatgcgacgctcaagcgtcgcatcaggcataaagcagattactttt

SEQ ID NO: 840798 - DNA, 75 bp, synthetic construct
  source 1..75: mol_type = other DNA
ctgcatgtcctcgaagcaatgcgcgatttgaaagcaatttgccccaccagcttccgtaacgtagaggctctctga

SEQ ID NO: 840799 - DNA, 75 bp, synthetic construct
  source 1..75: mol_type = other DNA
gcgggtaaatcagcagctggccgctgcggcaaatgaagtatggttggtggtttcgggtattggagtaaaaatcaa

SEQ ID NO: 840800 - DNA, 75 bp, synthetic construct
  source 1..75: mol_type = other DNA
atttataaaaaagatacccacagctaataaatctctatttgagaggtttgtttttttattaagtacaagatacta

SEQ ID NO: 840801 - DNA, 75 bp, synthetic construct
  source 1..75: mol_type = other DNA
ccatgaaccgcgtgcggtgccagcacatagccaaaaatactttccagagaggcattggcgaaaccaaaccagcca

SEQ ID NO: 840802 - DNA, 75 bp, synthetic construct
  source 1..75: mol_type = other DNA
ccagcggctggatttacgttgagtatgtgacgggcgcggaatccggtgagaacctgtgttctgtgcttatcaacg

SEQ ID NO: 840803 - DNA, 75 bp, synthetic construct
  source 1..75: mol_type = other DNA
accgcacagcaattcacagccgccactgtatgtcgcgtacagatgcgtggttgagaattaccgaagagcaactgg

SEQ ID NO: 840804 - DNA, 75 bp, synthetic construct
  source 1..75: mol_type = other DNA
gtattacctcaaaaatccggctaaaaaggctaagggggacaccggactgcgcgtcatgagcgcagcagagttcaa

SEQ ID NO: 840805 - DNA, 75 bp, synthetic construct
  source 1..75: mol_type = other DNA
tatatgacactagtgcattacagcaccttataaatattcaggctgaccaccctcttagccgggagccgataaccg

SEQ ID NO: 840806 - DNA, 75 bp, synthetic construct
  source 1..75: mol_type = other DNA
ctgctatcagtcaggcaatttctacgtccgcatgcgatacatgtttttccattcttgagtgtttaaaaaatacag

SEQ ID NO: 840807 - DNA, 75 bp, synthetic construct
  source 1..75: mol_type = other DNA
atgaacatgttgattttgttctctatatatcagaactacgtagatcaacacataatataattgatatgtcagcaa

SEQ ID NO: 840808 - DNA, 75 bp, synthetic construct
  source 1..75: mol_type = other DNA
tcaagattactctaccttctgttactctaataaaaacatagtaacacttccattttatgccattgagaacccatt

SEQ ID NO: 840809 - DNA, 75 bp, synthetic construct
  source 1..75: mol_type = other DNA
tggctggaataacgcagaaagcgattgagtgggggctgacagatgatccgcgtcaggaccggcgagaagtactgg

SEQ ID NO: 840810 - DNA, 75 bp, synthetic construct
  source 1..75: mol_type = other DNA
cctgacgaaacaggttgtacaggcctataaagacacccgcggtcatctcccctggaatcacgacaataaaaaatt

SEQ ID NO: 840811 - DNA, 75 bp, synthetic construct
  source 1..75: mol_type = other DNA
tatgaaacctacgcggcgtgggattcactggcccggctgatgggactgaacggcgaaaacattggtgatctgttt

SEQ ID NO: 840812 - DNA, 75 bp, synthetic construct
  source 1..75: mol_type = other DNA
cagccgggatggcagatgcgttgtttggtggtgaggccaataaaattctgacctggatgcgtctgtcaggaaaaa

SEQ ID NO: 840813 - DNA, 75 bp, synthetic construct
  source 1..75: mol_type = other DNA
cacatattcaacaggtgacggatgaccttgcggcctggtttaagaatggtgggctggaaaaaatccgggcattta

SEQ ID NO: 840814 - DNA, 75 bp, synthetic construct
  source 1..75: mol_type = other DNA
atgcgataaaagaaaaatcccgcgcttacattgacggacttcctgcggcaggtcaggggagggaaaacacggatc

SEQ ID NO: 840815 - DNA, 75 bp, synthetic construct
  source 1..75: mol_type = other DNA
acgaattcgcgggaagatggttggtagcttgcaacagatttacggttacattaatcacgggaacgctatcaccgc

SEQ ID NO: 840816 - DNA, 75 bp, synthetic construct
  source 1..75: mol_type = other DNA
ggaacgcttccggggaactggtactgacaaacgaatccatcattctgacagaccttaaaaccattgggacagccg

SEQ ID NO: 840817 - DNA, 75 bp, synthetic construct
  source 1..75: mol_type = other DNA
ttttaagtaacggcaatgtatttgtcacgcccgacgctacgcctatgtgcctttacacaagacagcaaatatctt

SEQ ID NO: 840818 - DNA, 75 bp, synthetic construct
  source 1..75: mol_type = other DNA
agggtaacgaaaaatctgggagatattaattttggccatcaggccagtatgactgattcatacgcattctggggg

SEQ ID NO: 840819 - DNA, 75 bp, synthetic construct
  source 1..75: mol_type = other DNA
tgaaaaccggagccgggctttcagtggggaccggactgacactggccgccggtaccaccgccgtgctgaaccgga

SEQ ID NO: 840820 - DNA, 75 bp, synthetic construct
  source 1..75: mol_type = other DNA
agggtgatgaaaaatctgggggatattaattttggccagcgttcccgtatgactgatggttatgaatcctggggg

SEQ ID NO: 840821 - DNA, 75 bp, synthetic construct
  source 1..75: mol_type = other DNA
agctgccggaaactgttacccagacaaaccgcgatcaagtggaacaacatacctacggcaccgccagccaggaag

SEQ ID NO: 840822 - DNA, 75 bp, synthetic construct
  source 1..75: mol_type = other DNA
gagcggggcttctggcccatgttgttaccggaaagtatgcagaccatctgccattataccgccaaagtgatctac

SEQ ID NO: 840823 - DNA, 75 bp, synthetic construct
  source 1..75: mol_type = other DNA
catccggccggaagaggaatgctgtccggcctgtggtggtgaactcagtccactgggatgtgatgtgtcagagca

SEQ ID NO: 840824 - DNA, 75 bp, synthetic construct
  source 1..75: mol_type = other DNA
cgcggcggtatatcatcgaagctatccatttatgggatgcgggagaaactcatcagttccagcctgcgcggttgt

SEQ ID NO: 840825 - DNA, 75 bp, synthetic construct
  source 1..75: mol_type = other DNA
gatgccaatgcattaataaatactttgcatgaatctggcaatgatatggtgcaggatgaaaaacatttgagtgat

SEQ ID NO: 840826 - DNA, 75 bp, synthetic construct
  source 1..75: mol_type = other DNA
gatctcggaacaaacagttccattaaaaccagtggcgataatgcacacggcctctggagctttggccaggttagc

SEQ ID NO: 840827 - DNA, 75 bp, synthetic construct
  source 1..75: mol_type = other DNA
ggcggtagaataaccggagacagtttggctatcaccggcgcggcaggagccagggggatttatgccatgaccaac

SEQ ID NO: 840828 - DNA, 75 bp, synthetic construct
  source 1..75: mol_type = other DNA
gcccggcactcgaccgatagtcaatgaggattatgtcagcgaaagcggattttttggtgatgctgccaacttact

SEQ ID NO: 840829 - DNA, 75 bp, synthetic construct
  source 1..75: mol_type = other DNA
aacgcccgtgcaggtcatgctgtcgatgaacgcctataacatgatttccgaaggggtgaacatcaaactggcgat

SEQ ID NO: 840830 - DNA, 75 bp, synthetic construct
  source 1..75: mol_type = other DNA
tcgccagcgaaatggcgtatgtgaatgcggtgcaggagatcgcacacctgactgaagaggttgccccgtccacta

SEQ ID NO: 840831 - DNA, 75 bp, synthetic construct
  source 1..75: mol_type = other DNA
tggatctatcgcgatggtgcgagtaccacttgatgcaatggagcctgtcgaggcagatgacgagtaacagagctc

SEQ ID NO: 840832 - DNA, 75 bp, synthetic construct
  source 1..75: mol_type = other DNA
ctgatgccatcaacgttctggccctcaacatggggcgtatcgcagtggatgtcgatggtattgaattgtccgaac

SEQ ID NO: 840833 - DNA, 75 bp, synthetic construct
  source 1..75: mol_type = other DNA
tgataacgcttatccgtcgctacgccgttggcattgttcatctggatgcctttggcgaagtgctgcccggctttg

SEQ ID NO: 840834 - DNA, 75 bp, synthetic construct
  source 1..75: mol_type = other DNA
cgaccaacacgcccgagctggataaatactcgcgcgacctcaccaagatggcgcgcgagggcaaactcgatccag

SEQ ID NO: 840835 - DNA, 75 bp, synthetic construct
  source 1..75: mol_type = other DNA
catctgagatcgtcaggctcgcaggcttgagcgagatcaaccatatcgttgaacgattagagcaagctggctctt

SEQ ID NO: 840836 - DNA, 75 bp, synthetic construct
  source 1..75: mol_type = other DNA
atcaaaaacctatgataaacctttgcttgaatactactcatcatcacctttccttgaaaaaccattaataaaaaa

SEQ ID NO: 840837 - DNA, 75 bp, synthetic construct
  source 1..75: mol_type = other DNA
aaccttgaacattattcctatcggtcttgagaggaagaatggcatgcatttcttcattagaaataatctatacca

SEQ ID NO: 840838 - DNA, 75 bp, synthetic construct
  source 1..75: mol_type = other DNA
tgaatctgaccgctgacattccctgtgctcagaatgaacttatcactatcggagtgctgacatggcccacagtgt

SEQ ID NO: 840839 - DNA, 75 bp, synthetic construct
  source 1..75: mol_type = other DNA
agttttcctttttgcacatcatatccgtgactcattccccaaaatacgttcatctgagatcgtcaggctcgcagg

SEQ ID NO: 840840 - DNA, 75 bp, synthetic construct
  source 1..75: mol_type = other DNA
ttttcttgttttcttccttagatgacaacaatagaatcaagcgtagattcaaagaacttactgatgttgatataa

SEQ ID NO: 840841 - DNA, 75 bp, synthetic construct
  source 1..75: mol_type = other DNA
ttatttcagtgggctggactgtacatgaatacgccaaggggaaatgggagattaggcggccagggactaaccatg

SEQ ID NO: 840842 - DNA, 75 bp, synthetic construct
  source 1..75: mol_type = other DNA
gcgtctcttgctagacctgaagtgggacgcggttgagaaggatgcaatggttgccaagggcagcttccgacaact

SEQ ID NO: 840843 - DNA, 75 bp, synthetic construct
  source 1..75: mol_type = other DNA
gacaagcccttcgagggcgagatcggcgtgtcgccgcgcgtgaaggatgcgctcagccgcgccttcgtagcctcc

SEQ ID NO: 840844 - DNA, 75 bp, synthetic construct
  source 1..75: mol_type = other DNA
tatttttattctcacaactcgaaaacactcataaaataaagacatcgtttttcaagttaacaaacatttcaattg

SEQ ID NO: 840845 - DNA, 75 bp, synthetic construct
  source 1..75: mol_type = other DNA
cttttgtgatatgcattacatataaaaacttatttttaggtaatggtacattccttgccagtacatatgcagaaa

SEQ ID NO: 840846 - DNA, 75 bp, synthetic construct
  source 1..75: mol_type = other DNA
tgatagttataccgatggcgatatttttgatagtgtgaactttcgtggcctcaaaataaattcaacagaagcgat

SEQ ID NO: 840847 - DNA, 75 bp, synthetic construct
  source 1..75: mol_type = other DNA
cattaatactgaattgtcatcatcatgcatcgcgagttgccagaattgtacctgatgagtttccttctatgtgcc

SEQ ID NO: 840848 - DNA, 75 bp, synthetic construct
  source 1..75: mol_type = other DNA
atgaaaaaatacgcagcagtaatcgcagtaatggccctgtgcagtgcaccggttatggcagcagagcagggaggt

SEQ ID NO: 840849 - DNA, 75 bp, synthetic construct
  source 1..75: mol_type = other DNA
tgctatccccagcgatggtaaaaaaggtgataaaatctggcaaagcagtgaatattttatgaatgtcttctgtaa

SEQ ID NO: 840850 - DNA, 75 bp, synthetic construct
  source 1..75: mol_type = other DNA
atccgtcaacaaccggatttattttgctgctgctgtcgatgattgtttatggctgtgcattcgatttcttcaata

SEQ ID NO: 840851 - DNA, 75 bp, synthetic construct
  source 1..75: mol_type = other DNA
aaaaccgtcatgctgatgagtatggtggcctggacgctgcgctttggcttcttcgcctatggcgatccgtcaaca

SEQ ID NO: 840852 - DNA, 75 bp, synthetic construct
  source 1..75: mol_type = other DNA
aaatgatgctgcactgatccgctctcagggatttgttaatatccgtgtactgaaagatgaaaaccatttcgtaga

SEQ ID NO: 840853 - DNA, 75 bp, synthetic construct
  source 1..75: mol_type = other DNA
atgtaccggcagtggatgaaaacggcaacggcaagccggatgcaatagatcggattggaaccgttatctatacag

SEQ ID NO: 840854 - DNA, 75 bp, synthetic construct
  source 1..75: mol_type = other DNA
gtgaagcaatctgacctcagtgaagagcagaagcagacgataagtacgctggcaaccgtttcagcagggctggcc

SEQ ID NO: 840855 - DNA, 75 bp, synthetic construct
  source 1..75: mol_type = other DNA
gaaggaagccaagccatgctgaccagtcttcaaagtgcggttaaagatgcattttcgcagggattaaaatttaac

SEQ ID NO: 840856 - DNA, 75 bp, synthetic construct
  source 1..75: mol_type = other DNA
acactatcaataagttggagtcattaccgagctgacttaccaactaatataaaagatattcaaagcctgtatcaa

SEQ ID NO: 840857 - DNA, 75 bp, synthetic construct
  source 1..75: mol_type = other DNA
cttgtcaaggttttatttcgaagatctacttaatataaatttcactgacgcaaatttaggtgacactattttttt

SEQ ID NO: 840858 - DNA, 75 bp, synthetic construct
  source 1..75: mol_type = other DNA
cttgttccttatggccttgatccgtgcagtacgaaacgggtcgaacgtcagccagcaccacttcattcagatgtc

SEQ ID NO: 840859 - DNA, 75 bp, synthetic construct
  source 1..75: mol_type = other DNA
ccacgctggtactggaatatgccggtaaaaaattccttatcgatcctatgctggccgaaaaagaagcctgggacg

SEQ ID NO: 840860 - DNA, 75 bp, synthetic construct
  source 1..75: mol_type = other DNA
ccaactttcttttgttgtcagtggtggtctttttttaatgatgcagacatacgtaagctgcatgacatattttat

SEQ ID NO: 840861 - DNA, 75 bp, synthetic construct
  source 1..75: mol_type = other DNA
atatttttaaatataaaacaacggaacgaaaaaaatcatgcaataaatatgttacgtgaagtctcaattagtaat

SEQ ID NO: 840862 - DNA, 75 bp, synthetic construct
  source 1..75: mol_type = other DNA
aggggtaaacctgcagtacaggtatgaatgggactccccggtcagtattatgggcagtttctcctggatgaaagg

SEQ ID NO: 840863 - DNA, 75 bp, synthetic construct
  source 1..75: mol_type = other DNA
ctgctttaatgctggcatcaaaaaatgaactcgttattattgaaaatcctgaggctcatctacatccaagaggtc

SEQ ID NO: 840864 - DNA, 75 bp, synthetic construct
  source 1..75: mol_type = other DNA
gaagggaaactttccgaatggcctagagggttctttgatcaacaatcacaggatatgtatacgataatgacaggc

SEQ ID NO: 840865 - DNA, 75 bp, synthetic construct
  source 1..75: mol_type = other DNA
cgtaaaggtaaaaaacggcatctggcaggcagtagagggagttggaagcaaaacagatattgattcagttcaacc

SEQ ID NO: 840866 - DNA, 75 bp, synthetic construct
  source 1..75: mol_type = other DNA
ctctctggaaaagatacttttgattacgctgaatacctcttagcatatgaacaacttgaaactcatattagttcc

SEQ ID NO: 840867 - DNA, 75 bp, synthetic construct
  source 1..75: mol_type = other DNA
gagctcaacttagcctatgtagcccgaaggctctcaaaagaaaattcagaaaaatccaccctaatccttagtgaa

SEQ ID NO: 840868 - DNA, 75 bp, synthetic construct
  source 1..75: mol_type = other DNA
acgctgatgcccagtggggtgagctactcggtgatgcatgtgggctggtcttcactcaccatgatgaaaaaacgt

SEQ ID NO: 840869 - DNA, 75 bp, synthetic construct
  source 1..75: mol_type = other DNA
aatctccttacactagcaaaatttcgtgggcagcaggctggatgtaaattaagtgaagcgtttgttatacataag

SEQ ID NO: 840870 - DNA, 75 bp, synthetic construct
  source 1..75: mol_type = other DNA
catgttgttactgttgtaatgactaagggaactgcaggttgtgatgataatattaatcgacatgatgaatccaga

SEQ ID NO: 840871 - DNA, 75 bp, synthetic construct
  source 1..75: mol_type = other DNA
gtatcctgatgtgactaaagcaacctataatctgcaaacactgctggatatttccgcacaacccggtgtttttgc

SEQ ID NO: 840872 - DNA, 75 bp, synthetic construct
  source 1..75: mol_type = other DNA
acgccattctgggcggtgcagcagcggcaatgcagggtaataatgttgctgccggtgcagcaggcgccgcaacag

SEQ ID NO: 840873 - DNA, 75 bp, synthetic construct
  source 1..75: mol_type = other DNA
atgttgccaggaaaaactatcaagaaaattatctttaaaatacttaaagatgacttaacctcaggaaaagtggtg

SEQ ID NO: 840874 - DNA, 75 bp, synthetic construct
  source 1..75: mol_type = other DNA
atgttattttcagccagattgccaggggtattgaggcaggcgaggaacaatcacaagagaacatcagaggagaga

SEQ ID NO: 840875 - DNA, 75 bp, synthetic construct
  source 1..75: mol_type = other DNA
agcgtgacctgacggggtggatgtctctgtcgcgtaaaccggaggagacatggtacggctgggacggcgacaggc

SEQ ID NO: 840876 - DNA, 75 bp, synthetic construct
  source 1..75: mol_type = other DNA
agttctggctgaatgtactgacggaactgaaaaatcgcggcctgaactatatccttatcgcctgcgtggagggcc

SEQ ID NO: 840877 - DNA, 75 bp, synthetic construct
  source 1..75: mol_type = other DNA
gtgtggtgacggtaaactactacatgaccacgatcgcgggtatgtttcagtttgctgttgataatggctatgtga

SEQ ID NO: 840878 - DNA, 75 bp, synthetic construct
  source 1..75: mol_type = other DNA
gatgatcgctttgcgcataatgcaacaggttaaggccaccggaagtccggttctggatgtggcgcataactttgt

SEQ ID NO: 840879 - DNA, 75 bp, synthetic construct
  source 1..75: mol_type = other DNA
cgatctcttctttagatctcaatgcgctgggtaatcttcccgcagccaaaagcgttgacgccgagcaatccgcac

SEQ ID NO: 840880 - DNA, 75 bp, synthetic construct
  source 1..75: mol_type = other DNA
gtgagctacctaacggcgtacatgcacgtccggcaagccacgttgaaacgctgtgtaatactttttcatcacaaa

SEQ ID NO: 840881 - DNA, 75 bp, synthetic construct
  source 1..75: mol_type = other DNA
aatattgaataatccgggactagcattagatataacaatgatagcttctcgtggaaatgttgcagacacagggat

SEQ ID NO: 840882 - DNA, 75 bp, synthetic construct
  source 1..75: mol_type = other DNA
tgccccgaaccactgaaatctgtcgtcaagtttgcgctggcaactggtctgagaaagtcgaacatcataaatctg

SEQ ID NO: 840883 - DNA, 75 bp, synthetic construct
  source 1..75: mol_type = other DNA
aacaagactttcttattattactgataactcaagactggattttctgggttcattttgtaatggctatgatgatg

SEQ ID NO: 840884 - DNA, 75 bp, synthetic construct
  source 1..75: mol_type = other DNA
taaaaaagaagttgtaatgactatagagcttgaaaataaaagccaccattcattctatcttcctgatatttttct

SEQ ID NO: 840885 - DNA, 75 bp, synthetic construct
  source 1..75: mol_type = other DNA
tgagctggaattcgaagatgtccccgacaccatgctcaacagcctgaccgacaaggtcaaatcgattttcagtcg

SEQ ID NO: 840886 - DNA, 75 bp, synthetic construct
  source 1..75: mol_type = other DNA
atgacacagcacaagtggtttaatcaggcctgcggaatggcgatgtattcaaccgatgcacacagtgccagtgat

SEQ ID NO: 840887 - DNA, 75 bp, synthetic construct
  source 1..75: mol_type = other DNA
aaatggcttcctggctggttgagtggaaaaatgccactgaaacgcaatggcttaaagattctccctcacagccat

SEQ ID NO: 840888 - DNA, 75 bp, synthetic construct
  source 1..75: mol_type = other DNA
aaaggtaataataaatgtgaaatttattttgatgcttttggtgaatgtggaagtgtgaatggcattaacgtgtgt

SEQ ID NO: 840889 - DNA, 75 bp, synthetic construct
  source 1..75: mol_type = other DNA
tgcaactggtaaccttatcaagataccaatggacaaggttctttaccctgtatcaaagcaatatgagtgggtccc

SEQ ID NO: 840890 - DNA, 75 bp, synthetic construct
  source 1..75: mol_type = other DNA
acactaaagaacagcttatagctgtgggtgttggtgttggattaggggccggtattcaatacggaacgacgggag

SEQ ID NO: 840891 - DNA, 75 bp, synthetic construct
  source 1..75: mol_type = other DNA
gcgcggacgcagggggaactgaatgcattgaaggctgcgcaggataaatatgggcctgttccggcggatgcgacg

SEQ ID NO: 840892 - DNA, 75 bp, synthetic construct
  source 1..75: mol_type = other DNA
acgctggaacggcgtgacagttacgccgaaagatacggttgagattcagggggaagtggataaagactggaactc

SEQ ID NO: 840893 - DNA, 75 bp, synthetic construct
  source 1..75: mol_type = other DNA
aacactattctgattcaaaacaaagcggctgaacgtctccgccagaatgttggatcactggaagtcttcggactg

SEQ ID NO: 840894 - DNA, 75 bp, synthetic construct
  source 1..75: mol_type = other DNA
gtattctggaagaagaacaaaaagcaactctgaatcttcctaagccgaacaacactattctgattcaaaacaaag

SEQ ID NO: 840895 - DNA, 75 bp, synthetic construct
  source 1..75: mol_type = other DNA
gatctacacctgtcagccctggcaccctcagttaaaaaccatcgcctggtcactcaccagtcacaaaaatggcaa

SEQ ID NO: 840896 - DNA, 75 bp, synthetic construct
  source 1..75: mol_type = other DNA
gcgagatccttctgcgcgattacagcgaattaaacgtggcgaaaggtcaggagatgatagcctctcgcggtatgg

SEQ ID NO: 840897 - DNA, 75 bp, synthetic construct
  source 1..75: mol_type = other DNA
tctttttttggtagtgttggcataaataaccttattgatagatatgtaagcaaggaagatcataaaaaacgcagg

SEQ ID NO: 840898 - DNA, 75 bp, synthetic construct
  source 1..75: mol_type = other DNA
gcatgcagcgctttcgtgctgctggttcaaccgtggcagcagtaaccggtggattaaccgctgcaggtatgatca

SEQ ID NO: 840899 - DNA, 75 bp, synthetic construct
  source 1..75: mol_type = other DNA
gtcaaaagaggataatcacaacagattaacaagtaattacctgtatgctgagagaggtctaaatagcatcaaaag

SEQ ID NO: 840900 - DNA, 75 bp, synthetic construct
  source 1..75: mol_type = other DNA
ctatctatgcaggcttggtatgattctggtgtcgatgagaagcaactgagtccttttttaaactctatttctcac

SEQ ID NO: 840901 - DNA, 75 bp, synthetic construct
  source 1..75: mol_type = other DNA
agcatgcgccgtgtttatttgcaggtgatttgcccccctgctgactctcagccaactgtatcgccattaaggtga

SEQ ID NO: 840902 - DNA, 75 bp, synthetic construct
  source 1..75: mol_type = other DNA
attcgctcagagcgcgaaatacagcgcgaaatacagcagaccatggcggcctataatcgccttacccgcacaggt

SEQ ID NO: 840903 - DNA, 75 bp, synthetic construct
  source 1..75: mol_type = other DNA
ttggttaacccgccgctggaaaactcgcgtaatgaagatcagaactggcgcgataacctggtgcgccaggtgcag

SEQ ID NO: 840904 - DNA, 75 bp, synthetic construct
  source 1..75: mol_type = other DNA
gtggagctgcatgacaaggtcatcgggcattatctgaacataaaacacggtgatgctgccaacttactgatttag

SEQ ID NO: 840905 - DNA, 75 bp, synthetic construct
  source 1..75: mol_type = other DNA
gcctgaagggaaagctgcacggtatcagcaagcgttatactcagcgcattgagcggcataatctgaatctgaggc

SEQ ID NO: 840906 - DNA, 75 bp, synthetic construct
  source 1..75: mol_type = other DNA
agcattgaaagccgggcgttctctcgatgagtttctaatcccaaaaagtgcgtccatctttgttggtaaaccgta

SEQ ID NO: 840907 - DNA, 75 bp, synthetic construct
  source 1..75: mol_type = other DNA
tggggtatggctcggtatttaacagtcgttcagaacctctgtggggatttcgtgaaatcatcaagccgggggctt

SEQ ID NO: 840908 - DNA, 75 bp, synthetic construct
  source 1..75: mol_type = other DNA
gacaatactattcttggttctgatgaaacgatcaaactggatggtaacgtcactatcagcgttcagtatttataa

SEQ ID NO: 840909 - DNA, 75 bp, synthetic construct
  source 1..75: mol_type = other DNA
ctgtctgaactctctcagatacagctgaaatactctgacctggcctctactgccgggtatctttcagccatgatc

SEQ ID NO: 840910 - DNA, 75 bp, synthetic construct
  source 1..75: mol_type = other DNA
tctatcgttttacttcttccactacgatctttggccttaataagtcggttatttgtatcttcatcgagatacacc

SEQ ID NO: 840911 - DNA, 75 bp, synthetic construct
  source 1..75: mol_type = other DNA
ggctgggccggacgttttgatcaggaaggccagcaccaggattaccagcgcacacagtatgaagtgtatgactac

SEQ ID NO: 840912 - DNA, 75 bp, synthetic construct
  source 1..75: mol_type = other DNA
ggaaatccacgtaaggcagcgcaccatgaagaaggagctggaaaagctgagcagtgcggatgagatactggcata

SEQ ID NO: 840913 - DNA, 75 bp, synthetic construct
  source 1..75: mol_type = other DNA
cctttcactatggcgtcgatgcccatagtggcctgattgatatggatgaggtcgagatgatcgcgctacgcgagc

SEQ ID NO: 840914 - DNA, 75 bp, synthetic construct
  source 1..75: mol_type = other DNA
gtttggttctaaccgggggagcagtgattctgtcaccggtggtgctgacagtacgatgagcgcacaggactccat

SEQ ID NO: 840915 - DNA, 75 bp, synthetic construct
  source 1..75: mol_type = other DNA
acgactgactcagtgtgtatgcagggtataaatgaaggaaaagtgaaaggtgtccatatttatgatgggcatcat

SEQ ID NO: 840916 - DNA, 75 bp, synthetic construct
  source 1..75: mol_type = other DNA
gcagagaaaaaactggcagaagtcatacagcaacttgggtttgatatcaccgcagcagaactgtcagcgtatctt

SEQ ID NO: 840917 - DNA, 75 bp, synthetic construct
  source 1..75: mol_type = other DNA
gcagaattaatccagcaactcgagtttgatataactgcagcagaactgtcagcatatctttttaaaccgggccat

SEQ ID NO: 840918 - DNA, 75 bp, synthetic construct
  source 1..75: mol_type = other DNA
gtttgccgacctagtgagcgtcgccggacatctctacaaatttggtctcaacgaaggactacccggcaacagtga

SEQ ID NO: 840919 - DNA, 75 bp, synthetic construct
  source 1..75: mol_type = other DNA
cagcaccgtcactgctggctgtggcgcattaatctgcctgacgcaggccccgctgctgatgctcacgccgttaca

SEQ ID NO: 840920 - DNA, 75 bp, synthetic construct
  source 1..75: mol_type = other DNA
gacggcgagaagttttcatttgatccattaagtgctgatgctgtcgttacgactgaaacacgctatcagtacagt

SEQ ID NO: 840921 - DNA, 75 bp, synthetic construct
  source 1..75: mol_type = other DNA
tgtgattgtctgcgctgaaatggacgaacagtggggctacgtcggtgctaaatcacgtcagcgctggctgtttta

SEQ ID NO: 840922 - DNA, 75 bp, synthetic construct
  source 1..75: mol_type = other DNA
cgttatcagcaagcgttacactcagcgcattgagcgacataatctgaatctgagacaacatctggcaaggccggg

SEQ ID NO: 840923 - DNA, 75 bp, synthetic construct
  source 1..75: mol_type = other DNA
actcagcgcattgagcgacataatctgagacaacatctggcaaggctgggacggaagtcactgtcgttctcaaaa

SEQ ID NO: 840924 - DNA, 75 bp, synthetic construct
  source 1..75: mol_type = other DNA
cgcattgagcgacataatctgaatctgagacaacatctggcaaggctgggacggaagtcacactcgttctacttc

SEQ ID NO: 840925 - DNA, 75 bp, synthetic construct
  source 1..75: mol_type = other DNA
atcgcagcgacattgatgacggggacgcaatttacccctgcggatttcaccggcggaataaaatctaaatgtgtc

SEQ ID NO: 840926 - DNA, 75 bp, synthetic construct
  source 1..75: mol_type = other DNA
aaatcggtggagctgcatgacaaagtcatcgggcattatctgaacataaaacactatcaaggaaggtgcgaataa

SEQ ID NO: 840927 - DNA, 75 bp, synthetic construct
  source 1..75: mol_type = other DNA
ggctgggaaggaagtcactgtcgttctcaaaatcggtggaactgcatgaaaaggtcatcgggcattatctgaaca

SEQ ID NO: 840928 - DNA, 75 bp, synthetic construct
  source 1..75: mol_type = other DNA
ctatggcgacgctggggcgtcttccgggcctgctgtcgacctttgaggtcgtggtatggatgacggatggctggc

SEQ ID NO: 840929 - DNA, 75 bp, synthetic construct
  source 1..75: mol_type = other DNA
gccacactggagcgtcttctgagcctgctgtcggcctttgaggtcgtggtatggatgacggatggctggccgctg

SEQ ID NO: 840930 - DNA, 75 bp, synthetic construct
  source 1..75: mol_type = other DNA
tcggacccattcaggcgctcgatgcacagaacatgaacgttctttctgtccagatctctctgaacggaaccacct

SEQ ID NO: 840931 - DNA, 75 bp, synthetic construct
  source 1..75: mol_type = other DNA
aataacgcgaatagtcaatcgttatgataaccactatgaagatagatataataatttaataagattttttcaaga

SEQ ID NO: 840932 - DNA, 75 bp, synthetic construct
  source 1..75: mol_type = other DNA
tatctgagtcgggaagatgtgttgcacaataaaaaggcgggcaggctgacagcaggttttccgctctcttacgaa

SEQ ID NO: 840933 - DNA, 75 bp, synthetic construct
  source 1..75: mol_type = other DNA
attgctttaatgtgcatcctctttaataataaaaataatttcatatttattattgcattatttttttaccttatc

SEQ ID NO: 840934 - DNA, 75 bp, synthetic construct
  source 1..75: mol_type = other DNA
aaaaagcggttactgacgttgcggaactgaacggtgaattacgtaatcggcagtatcttgtcgagcaattaacaa

SEQ ID NO: 840935 - DNA, 75 bp, synthetic construct
  source 1..75: mol_type = other DNA
agatatatgatgactacaccattgacagaaaaccaatgggtcttgcagaggtttcacgtgaggtttttgttaaga

SEQ ID NO: 840936 - DNA, 75 bp, synthetic construct
  source 1..75: mol_type = other DNA
agcgaagggacgctgaatacctggtacgtccagccacaggcgcaaatcacctggatgggtgtgaaagattccgac

SEQ ID NO: 840937 - DNA, 75 bp, synthetic construct
  source 1..75: mol_type = other DNA
cgtgagttccagccttacattgaagcgaattggatcaacaacagcaaagtctacgccgtgaagatgaatggtcaa

SEQ ID NO: 840938 - DNA, 75 bp, synthetic construct
  source 1..75: mol_type = other DNA
tcccgccaagacggttgaagatgcagtaaaagagatgctggagcatatggctcgactcttgcgcagggcgagcgt

SEQ ID NO: 840939 - DNA, 75 bp, synthetic construct
  source 1..75: mol_type = other DNA
aacgcatggttactctttcttcctaccgatatcctcggcgtcctggcgataaatagcctgatggcgttggtcttg

SEQ ID NO: 840940 - DNA, 75 bp, synthetic construct
  source 1..75: mol_type = other DNA
tatgtcccaactgccatgcgatgctgcaccggcgagatccgccgtttacccccgaagagctgaaggcccggctgc

SEQ ID NO: 840941 - DNA, 75 bp, synthetic construct
  source 1..75: mol_type = other DNA
agatgaatggtcaaaccgtaggccgtgaaggtgcgcgtaatctcggtgaagtacgtaccggggttgaggcgaaag

SEQ ID NO: 840942 - DNA, 75 bp, synthetic construct
  source 1..75: mol_type = other DNA
gaagtgctgcgctacggcagccgcccgtatatttttaccgcctctccttctccgtcctgcattgcgaccgtgcgc

SEQ ID NO: 840943 - DNA, 75 bp, synthetic construct
  source 1..75: mol_type = other DNA
ttcctgtgtgccctaattgccatgcgatgctgcaccgacgcaaaccaccgtttacgccggaggagttaaaagcgt

SEQ ID NO: 840944 - DNA, 75 bp, synthetic construct
  source 1..75: mol_type = other DNA
ccagggaatgcatcatcgccgccattcgcgcttacgatgcaggcgttgcgcatcagtttaaaagcgcgcgtctgt

SEQ ID NO: 840945 - DNA, 75 bp, synthetic construct
  source 1..75: mol_type = other DNA
ccgggaaattggtgtgtttgatgagaacggcgatttgatcgcggtgggcaatactgccgaaagttacaagccaat

SEQ ID NO: 840946 - DNA, 75 bp, synthetic construct
  source 1..75: mol_type = other DNA
actgaagaggttgacccgtccaccacgatgcaggagcagctccgcccgatgctgcgcctgattctcgacaacgaa

SEQ ID NO: 840947 - DNA, 75 bp, synthetic construct
  source 1..75: mol_type = other DNA
ttaaagatggcacaggaaaaccagtacagaactgcaccattgtgctgaaggccagacgaaccagcagcacgatgg

SEQ ID NO: 840948 - DNA, 75 bp, synthetic construct
  source 1..75: mol_type = other DNA
gtctgtccttgttaaagcccttttcagcagtgaagtaaaaatatcgacagtcaatgcactgaggatatttaattc

SEQ ID NO: 840949 - DNA, 75 bp, synthetic construct
  source 1..75: mol_type = other DNA
aggacgtcgcacgccatgcgggcgtctcctatcagaccgtgtccagggtactgaataaatctgccaatgtatccg

SEQ ID NO: 840950 - DNA, 75 bp, synthetic construct
  source 1..75: mol_type = other DNA
gcaacgcttgtagaatggcggatttggtttgaagcctattttttactctgctatgtaccgtgcttaatttactat

SEQ ID NO: 840951 - DNA, 75 bp, synthetic construct
  source 1..75: mol_type = other DNA
aaccagagctgcggcaaaagctgatggataatgccaaccatctgtatgacggtctgcaaaaactgggttatgagt

SEQ ID NO: 840952 - DNA, 75 bp, synthetic construct
  source 1..75: mol_type = other DNA
gctggagtccaaaagaagtattcgaaaaggcttatcgtccggtatcaggactaagtttcggccttgctgtcaatg

SEQ ID NO: 840953 - DNA, 75 bp, synthetic construct
  source 1..75: mol_type = other DNA
ccgtgctggctggaatggtaagggcatgtggctggcatacgttaaaccgtacactgaggctgttcatactggcag

SEQ ID NO: 840954 - DNA, 75 bp, synthetic construct
  source 1..75: mol_type = other DNA
atgaacatgaaaaagaaaccgttaacccctgaacaactggaagatgctaagcgtctgaaaagtatttttaacgcg

SEQ ID NO: 840955 - DNA, 75 bp, synthetic construct
  source 1..75: mol_type = other DNA
atgtggattcttcacatcactctatttatacgctattgaatctggaagattttaatttttttgatgatgctactt

SEQ ID NO: 840956 - DNA, 75 bp, synthetic construct
  source 1..75: mol_type = other DNA
gatcttcctccagtacggtcaaatcgacgtactggacggcgctttcgtgctgatcgacaaaaccgggatccgcac

SEQ ID NO: 840957 - DNA, 75 bp, synthetic construct
  source 1..75: mol_type = other DNA
gtctctgacccgtggtgacaccagtttgcgaaacaaagtatttggcgatgaatggtcctggctggaggtgaccag

SEQ ID NO: 840958 - DNA, 75 bp, synthetic construct
  source 1..75: mol_type = other DNA
atgcttcggattacctacacttctccgcgaacgatgcactggattaccaaagttcttcgctggctatccgttaaa

SEQ ID NO: 840959 - DNA, 75 bp, synthetic construct
  source 1..75: mol_type = other DNA
gacccgtcaggagccggacggtctgccgccggtggagtggctgacgtatggcagcggttatcttgcggggatgaa

SEQ ID NO: 840960 - DNA, 75 bp, synthetic construct
  source 1..75: mol_type = other DNA
aagatccggagatggcaaacgtgattttagtcaccgatgacgaaagttgcgggtattcggctatggaaggattga

SEQ ID NO: 840961 - DNA, 75 bp, synthetic construct
  source 1..75: mol_type = other DNA
gaatattttttcacggatattaaggttgatatatccaaaagtccctctgatttgtacggcgcacaatacaaatga

SEQ ID NO: 840962 - DNA, 75 bp, synthetic construct
  source 1..75: mol_type = other DNA
aacctacttttgaggtgttcgaaagtggcggcagtaaagcacaaacaccgaatgtggatttgaaaacaattaatc

SEQ ID NO: 840963 - DNA, 75 bp, synthetic construct
  source 1..75: mol_type = other DNA
ttttttttcttgagaattatattaaacagagagtaaaacaaagaagaacggggcattcgaaacttccgccacatt

SEQ ID NO: 840964 - DNA, 75 bp, synthetic construct
  source 1..75: mol_type = other DNA
tatggcccatgcccggagaaaaatccacgatgtgcatgcaagagtgccaaccgacatcaccacggaagccctgca

SEQ ID NO: 840965 - DNA, 75 bp, synthetic construct
  source 1..75: mol_type = other DNA
ctcgcgctcgtaagcgtcagcgcgaactcaaaattcagcaatagccttcccagagcgaaggccgaaaacttcaag

SEQ ID NO: 840966 - DNA, 75 bp, synthetic construct
  source 1..75: mol_type = other DNA
cagcaactcaagcaggttgatattgttaaggctcgcctgatgagcaaactgcccaatcaatatgaacgcgaatgc

SEQ ID NO: 840967 - DNA, 75 bp, synthetic construct
  source 1..75: mol_type = other DNA
caatcaaaccggaaaaccagtaagcaaggtgtaataaccccctccttctttggacttgggggtggcattaacagc

SEQ ID NO: 840968 - DNA, 75 bp, synthetic construct
  source 1..75: mol_type = other DNA
gtatgggtgggggaagcgggcattcgtgtttatgcttctggtcagcctggtggtgcgcgttcagataagctgctc

SEQ ID NO: 840969 - DNA, 75 bp, synthetic construct
  source 1..75: mol_type = other DNA
gtatttttaggatcattctatgttgataggatcttaagcttttcttcatttccatcaatcctccttatcacaacg

SEQ ID NO: 840970 - DNA, 75 bp, synthetic construct
  source 1..75: mol_type = other DNA
ttgaagtggtcaacaaaaactggccaccgagttagagtttttccagtatcgattttccgattcgtttgggggtaa

SEQ ID NO: 840971 - DNA, 75 bp, synthetic construct
  source 1..75: mol_type = other DNA
aagcatagtctggaaatgtggcgtgaaggttttcctctgacattaatattttgtggatttgtgaagtatgaagtt

SEQ ID NO: 840972 - DNA, 75 bp, synthetic construct
  source 1..75: mol_type = other DNA
gctgtgtctgatgtcggctatcgaaacaggggtcattttcctgattaatgatggtatcgaccgtggtctgtggga

SEQ ID NO: 840973 - DNA, 75 bp, synthetic construct
  source 1..75: mol_type = other DNA
atgaaagcaacgttaaatcgggcggtgttggggcaagatattttgggatcggtgcagacacgcaataccagctcg

SEQ ID NO: 840974 - DNA, 75 bp, synthetic construct
  source 1..75: mol_type = other DNA
gagttgattaggaatatagcggcagaaaaagaagggttaacacaaacagaaatagatgaaattctaagaatcagc

SEQ ID NO: 840975 - DNA, 75 bp, synthetic construct
  source 1..75: mol_type = other DNA
cacgttccggtatgacccggtggacaggctgactgaacagcgcggttttgacggccggacgcaacgttaccagta

SEQ ID NO: 840976 - DNA, 75 bp, synthetic construct
  source 1..75: mol_type = other DNA
ggggcgggcagtacagcggggtacgaacaggccacggcgtacaccctcacagggcagctacagagcaggcacctg

SEQ ID NO: 840977 - DNA, 75 bp, synthetic construct
  source 1..75: mol_type = other DNA
tcgctgtccactacggctacgacgataagggccgcctgacgggcgaacggcagacggtggagaacccggagacgg

SEQ ID NO: 840978 - DNA, 75 bp, synthetic construct
  source 1..75: mol_type = other DNA
attgcaatgggcatataaactcaaagcgagtaaacagccgcttgatgcagatcgactaattgaagaattaacgaa

SEQ ID NO: 840979 - DNA, 75 bp, synthetic construct
  source 1..75: mol_type = other DNA
gtccaattatgatgaagaaaaaagtagtcagtggttaaaaatagcggctaataatggtcatgcgacagctcagta

SEQ ID NO: 840980 - DNA, 75 bp, synthetic construct
  source 1..75: mol_type = other DNA
atgaatgacaatttttttacgttcagaaaaataaaggtaaccggattcaataaattagatgctataattgaattt

SEQ ID NO: 840981 - DNA, 75 bp, synthetic construct
  source 1..75: mol_type = other DNA
caattttccgcgagttccagccggaaggttgggtagagttcttccatgaattgatctgtaaagagatggaaagcc

SEQ ID NO: 840982 - DNA, 75 bp, synthetic construct
  source 1..75: mol_type = other DNA
gttacctgatgatgagttccgggcttttcaggaactactcattcaagatcccactgccggtgacattatcgcagg

SEQ ID NO: 840983 - DNA, 75 bp, synthetic construct
  source 1..75: mol_type = other DNA
caccaatagcggcttcccgactggcgcattacaacggaggagcgagcctgagcttccgttacctggaccacaata

SEQ ID NO: 840984 - DNA, 75 bp, synthetic construct
  source 1..75: mol_type = other DNA
ccacaaatagcggcttcccgactggcgcattacaacggaggagcgagtctgagcttccgttacctggaccacaaa

SEQ ID NO: 840985 - DNA, 75 bp, synthetic construct
  source 1..75: mol_type = other DNA
cggttcctgcatttgcaggcgcggtaatgggcggcttctggcaaatctttgtgatgttcggtctgcattggggtt

SEQ ID NO: 840986 - DNA, 75 bp, synthetic construct
  source 1..75: mol_type = other DNA
cgggagagattgtgccgctcattcacgtcgctgataccacgtttgccagcggcctgttgggtaaaggtattgcca

SEQ ID NO: 840987 - DNA, 75 bp, synthetic construct
  source 1..75: mol_type = other DNA
ttcatgcagaccatcccgtcaacggggattgatttcaccgtctgggccgcgttattggcggtgtcattgccatcg

SEQ ID NO: 840988 - DNA, 75 bp, synthetic construct
  source 1..75: mol_type = other DNA
tcgcggcggcgctcaatcgggcgttgagcatgtcgctggcggaacgtatttcccgccatgcagaaatgctggaag

SEQ ID NO: 840989 - DNA, 75 bp, synthetic construct
  source 1..75: mol_type = other DNA
ggtttcagacagaaaacgatcgtctggcgttcctggattgcctttccaacttgacgcgggtcacgacacgtagct

SEQ ID NO: 840990 - DNA, 75 bp, synthetic construct
  source 1..75: mol_type = other DNA
tgccttcactttatgccagcttcggtaagctgggtgagacaccgactcatgaagatatcattaataacaatcgat

SEQ ID NO: 840991 - DNA, 75 bp, synthetic construct
  source 1..75: mol_type = other DNA
ggtctgaaccggactattccagccatcttgaacaggcgcgaacggtcgggcatgacatcggggaatggctggaca

SEQ ID NO: 840992 - DNA, 75 bp, synthetic construct
  source 1..75: mol_type = other DNA
aatttggaggcaagggacaggctgcaaaccacgccgattacatcgagcgcaaaggggagtatgcgaaacggaaag

SEQ ID NO: 840993 - DNA, 75 bp, synthetic construct
  source 1..75: mol_type = other DNA
ggcacctatcatgtctcatggcctggcaaccaattcaattggctatctggtcaccgacgacaatgcaatggtgtg

SEQ ID NO: 840994 - DNA, 75 bp, synthetic construct
  source 1..75: mol_type = other DNA
gcagaagatctcaagctgctcgccccgttagcaaaagatgggctggtggatgtggatgagaaggggattcaggta

SEQ ID NO: 840995 - DNA, 75 bp, synthetic construct
  source 1..75: mol_type = other DNA
acagcgaaaggtcgtttgctgatccgcaacatttgcatgtgctttgatacttatttgcgccagaaagcgcgaatg

SEQ ID NO: 840996 - DNA, 75 bp, synthetic construct
  source 1..75: mol_type = other DNA
ctataacgccaggtatcccgaccggggaggtgcgaaaaaggattccggaaacctgacccccactcagcaaaaaga

SEQ ID NO: 840997 - DNA, 75 bp, synthetic construct
  source 1..75: mol_type = other DNA
tgaatttcaggaccgcagaacggttcgggctgattcaggtggtgaacaaaccggttgtgttctggtttgagcagt

SEQ ID NO: 840998 - DNA, 75 bp, synthetic construct
  source 1..75: mol_type = other DNA
cctgcatcgcgtctggtcgaaaaccagcgataaaccggtgtggatggatcaggccgaaaaggcaactggtgattt

SEQ ID NO: 840999 - DNA, 75 bp, synthetic construct
  source 1..75: mol_type = other DNA
attacgcacaacagctggcaggcgatacaccgctgaaagaggtaaaatcgggaatctacacgtctaaactatcag

SEQ ID NO: 841000 - DNA, 75 bp, synthetic construct
  source 1..75: mol_type = other DNA
ccgccagctggctgaccgcgttgcagctcagctctactggcagggtgaagtcattccaggcgagatttccttccg

SEQ ID NO: 841001 - DNA, 75 bp, synthetic construct
  source 1..75: mol_type = other DNA
atgaaaacgcttccgaccgttaacaccctacagcctatcttgcataaccagatccccgttattacaactgaactt

SEQ ID NO: 841002 - DNA, 75 bp, synthetic construct
  source 1..75: mol_type = other DNA
gaaactaaccaagcgtgggatgtgttcgaacggctggaagacagctatttcaaccagaacgcgcaaacggccgcg

SEQ ID NO: 841003 - DNA, 75 bp, synthetic construct
  source 1..75: mol_type = other DNA
gtggtgtcattgccatcggttgcgcatttgtcggtacggtgatgcttcatttcatcaccgctaaacgtcagccag

SEQ ID NO: 841004 - DNA, 75 bp, synthetic construct
  source 1..75: mol_type = other DNA
cggcgctcgattatctgcgtctgtctaacctaccgccgacgccggaaatgctggcttctacccgcaccatgctgg

SEQ ID NO: 841005 - DNA, 75 bp, synthetic construct
  source 1..75: mol_type = other DNA
cggtgatgtcacactgaaactgattgctgccctcacgaatcatggtaccctggccgcagggaaaaccctttccgt

SEQ ID NO: 841006 - DNA, 75 bp, synthetic construct
  source 1..75: mol_type = other DNA
agttccaccatctggtgcgtatcgttccggggcagggccgtattatctggccggaaaatgacatcaacctgaaac

SEQ ID NO: 841007 - DNA, 75 bp, synthetic construct
  source 1..75: mol_type = other DNA
gtggccgaaaaatgtccacagcggctatcgggtactccaggaatatttctgctatcccgaagccttcttcttttt

SEQ ID NO: 841008 - DNA, 75 bp, synthetic construct
  source 1..75: mol_type = other DNA
gtggccgaaaaatgtccacagcggctaccgcgtgcttcaggagtatttctgctatcccgaagccttcttcttttt

SEQ ID NO: 841009 - DNA, 75 bp, synthetic construct
  source 1..75: mol_type = other DNA
tccataaacagcctcatggtcaacggtatgggtatatccatgcaactccaggggattgatattgccgaaaggcca

SEQ ID NO: 841010 - DNA, 75 bp, synthetic construct
  source 1..75: mol_type = other DNA
cataaaaggctgttcgatatttctatgatacccggatgggatattgatcagaatataacatgcacaaacgaaggg

SEQ ID NO: 841011 - DNA, 75 bp, synthetic construct
  source 1..75: mol_type = other DNA
gacgttttatggctgcggggccctgacagcgataccggcagggctgtttgacaactgcgtctctgtgacgacgtt

SEQ ID NO: 841012 - DNA, 75 bp, synthetic construct
  source 1..75: mol_type = other DNA
catcagccaggacaaaattaaaagcaattacgattctgtccgggaacagagtggtatctacgccggaaaagacgg

SEQ ID NO: 841013 - DNA, 75 bp, synthetic construct
  source 1..75: mol_type = other DNA
ggcgctgcgcggtaaagtcggtggtacggcgcgtattattgccgtgctggaaccgcgctcaaacaccatgaagat

SEQ ID NO: 841014 - DNA, 75 bp, synthetic construct
  source 1..75: mol_type = other DNA
tggcggggctggcgtcctgttgggtagacggtatgtcgtttatcgattctgtccgatttgcgcagggatgttcgt

SEQ ID NO: 841015 - DNA, 75 bp, synthetic construct
  source 1..75: mol_type = other DNA
gccgacttggcacgcatggaggccgtgctgtctgaactggtgtgcgcctgccatgcgcggaaagggaacgtttcc

SEQ ID NO: 841016 - DNA, 75 bp, synthetic construct
  source 1..75: mol_type = other DNA
acccaaagccagtcagttaaaagttcctgttcaggtctgtcgtaatgagctgataagttcagatacaacccgtac

SEQ ID NO: 841017 - DNA, 75 bp, synthetic construct
  source 1..75: mol_type = other DNA
gctggaatccggcatacaattgctttgatcgtccgggtaaaaaatgtatctcttttacgctacacatcaacggca

SEQ ID NO: 841018 - DNA, 75 bp, synthetic construct
  source 1..75: mol_type = other DNA
ccacgccgaacgatatttgcgtggcgattcgtagcgaagcggcggatgcagggatcgcgcaggcgattatgcggc

SEQ ID NO: 841019 - DNA, 75 bp, synthetic construct
  source 1..75: mol_type = other DNA
tggtgatggggccggactgcggtacgtcgatgattgccggcacgccgctggcttttgctaacgtgatgccggaag

SEQ ID NO: 841020 - DNA, 75 bp, synthetic construct
  source 1..75: mol_type = other DNA
cacactgaggaaagttttgtgtttacgttattcggtacggcatccacgccgccaccggaggggaaatcgctggag

SEQ ID NO: 841021 - DNA, 75 bp, synthetic construct
  source 1..75: mol_type = other DNA
aaacttaatggctatcggctgaatccggtaaggatagtaaattattctatcatgtcggattacaggatgacgatt

SEQ ID NO: 841022 - DNA, 75 bp, synthetic construct
  source 1..75: mol_type = other DNA
atcgtccgggtaaaaaatgtatctcttttacgctacacatcaacggcaaagatcacgatttgttagcggtggata

SEQ ID NO: 841023 - DNA, 75 bp, synthetic construct
  source 1..75: mol_type = other DNA
gcaggtgagggaattacccacgcgattggtcttggcgggcgcgacctcagccgtgaagtgggcggcatcagtgcg

SEQ ID NO: 841024 - DNA, 75 bp, synthetic construct
  source 1..75: mol_type = other DNA
tgcaccgcgtcttacagccgcgtgtttgcaaaccgcgcagaagcagaacaaacgctggcggcgctgactgaaaaa

SEQ ID NO: 841025 - DNA, 75 bp, synthetic construct
  source 1..75: mol_type = other DNA
tggcaccattatggacaactccgactgcaccgcgtcttacagccgcgtgtttgcaaaccgcgcagaagcagaaca

SEQ ID NO: 841026 - DNA, 75 bp, synthetic construct
  source 1..75: mol_type = other DNA
cctggcaaaaagcctgtgccgcgcgttcagacaatcaaccactgtatgccattgccacggtgacaggcactgaac

SEQ ID NO: 841027 - DNA, 75 bp, synthetic construct
  source 1..75: mol_type = other DNA
cgctggctttcgctaatgtgatgccggaaggcaatattggtgtcattggcgcttctggtacagggatccaggaat

SEQ ID NO: 841028 - DNA, 75 bp, synthetic construct
  source 1..75: mol_type = other DNA
aagccacattactggcggcggcactgattcgcccgctttcgcctgccacactgcaacacacaccgtcattactgg

SEQ ID NO: 841029 - DNA, 75 bp, synthetic construct
  source 1..75: mol_type = other DNA
tggcgaaaccattaattgataccgggcaatatcgcagagctattacccatgtagtgagggataaagatgccgact

SEQ ID NO: 841030 - DNA, 75 bp, synthetic construct
  source 1..75: mol_type = other DNA
cgtgaagatgtggcaaaagttgctgcctggttccatcaacatggcctgaaccgactggtattgagcatgggcggc

SEQ ID NO: 841031 - DNA, 75 bp, synthetic construct
  source 1..75: mol_type = other DNA
ttataggttcggctaatattgatgtcgccggatattcacatggatcattaaattatgcggattcaaatcctggga

SEQ ID NO: 841032 - DNA, 75 bp, synthetic construct
  source 1..75: mol_type = other DNA
aacactggaacttgcccggcgtgttgctggcgagctccccggaaccgatctggtgaaaccattaattgacaccgg

SEQ ID NO: 841033 - DNA, 75 bp, synthetic construct
  source 1..75: mol_type = other DNA
gcacctgatccccggcgttaaatcggtagaggaacagacgttgccgcagctcaaaacagcggcgcaggctgcgct

SEQ ID NO: 841034 - DNA, 75 bp, synthetic construct
  source 1..75: mol_type = other DNA
ttaaagccgcggcgcaggctgcacttgatggtaatgctacgggagcggaaagcgcactcaaccgtgccggaacgc

SEQ ID NO: 841035 - DNA, 75 bp, synthetic construct
  source 1..75: mol_type = other DNA
tctgcggcttaaacgcctagggctgtcaaaaacgttccgtcgtctggttatcacacttacccgacgttatggcgt

SEQ ID NO: 841036 - DNA, 75 bp, synthetic construct
  source 1..75: mol_type = other DNA
ttcatgataaaagtgattatgcaaataatttccagcgttattgcatcattgagcaccgtgattctctgcaggtgg

SEQ ID NO: 841037 - DNA, 75 bp, synthetic construct
  source 1..75: mol_type = other DNA
ctgactagattagaaaaatatggacttataaacaaggggacatatgtacaagaaaatttgaaagaaataatatct

SEQ ID NO: 841038 - DNA, 75 bp, synthetic construct
  source 1..75: mol_type = other DNA
gccgtttgccgaatctgttcgtttcgcacagggatgttcgtcaatggcgctctcctgtgaatacaccaataaccc

SEQ ID NO: 841039 - DNA, 75 bp, synthetic construct
  source 1..75: mol_type = other DNA
cggcatcgctcagtccggttggtgattttggttggtttggcgattgatcagatcgcacaatccgggctgagttcc

SEQ ID NO: 841040 - DNA, 75 bp, synthetic construct
  source 1..75: mol_type = other DNA
tgtcaaagtgcgcgaccgtctaaatcagatccacactctcaagccaaaccgccttgaagcggaaaccctgagtgg

SEQ ID NO: 841041 - DNA, 75 bp, synthetic construct
  source 1..75: mol_type = other DNA
ggtccggttgcgcaatcttgacggttgcgagcactgttataaaggcgtaacgggaaggacggttatagcagaagt

SEQ ID NO: 841042 - DNA, 75 bp, synthetic construct
  source 1..75: mol_type = other DNA
gaactgtttgatctctgcgcccgaaccgacaccaaaaagttaaaccggcgggtgctggaaaaactgatcatgtcc

SEQ ID NO: 841043 - DNA, 75 bp, synthetic construct
  source 1..75: mol_type = other DNA
ccgcgcggcgctgatgaactcgctgggtgatgcgttaaaagcggcagatcaacacgcgaaagcggaagctatcgg

SEQ ID NO: 841044 - DNA, 75 bp, synthetic construct
  source 1..75: mol_type = other DNA
cgtaataaaggcggctacttccgcgaactgtttgatctctgcgcccgtaccgacaccaaaaagttaaaccggcgg

SEQ ID NO: 841045 - DNA, 75 bp, synthetic construct
  source 1..75: mol_type = other DNA
tcgccgccactaattcatacggaccagaacctgaccatacatcaacaggaacagatccgaaaaatgcttgaatca

SEQ ID NO: 841046 - DNA, 75 bp, synthetic construct
  source 1..75: mol_type = other DNA
tacgcgaactaacgttactgccgctcaacattaagcatatgtcggtaaaggtatttttgcagacaggcgctccgc

SEQ ID NO: 841047 - DNA, 75 bp, synthetic construct
  source 1..75: mol_type = other DNA
aatttcaggtagcgcaggaaattggacgccactggcagcgtcgggcgctccagcctgtaccacctgatgagccac

SEQ ID NO: 841048 - DNA, 75 bp, synthetic construct
  source 1..75: mol_type = other DNA
ctgctgagccagcgtctggttcagctgatatgtccgcactgccgtcgcccctggcatgaggtggccaccgaccgc

SEQ ID NO: 841049 - DNA, 75 bp, synthetic construct
  source 1..75: mol_type = other DNA
gacagtcagcatataccgacattcagtatgctggggtatcaccctgagcaggagcgcgctgtccgaaggatgctg

SEQ ID NO: 841050 - DNA, 75 bp, synthetic construct
  source 1..75: mol_type = other DNA
cctggcatgaggtggagagctcccggacggatgaagaacgacgcctggtggaaaacttctgccagcccgatgccg

SEQ ID NO: 841051 - DNA, 75 bp, synthetic construct
  source 1..75: mol_type = other DNA
tattcctcggtgggcttatgagaaaactcaaagagatgttaaccaaggctttactaagtataatattgacaagga

SEQ ID NO: 841052 - DNA, 75 bp, synthetic construct
  source 1..75: mol_type = other DNA
cactgggatacgctgaagcgttgacacgttcatctgatcccaacgacaaccgcctcggcggcgaactgctgcgcc

SEQ ID NO: 841053 - DNA, 75 bp, synthetic construct
  source 1..75: mol_type = other DNA
catatctccgaccagtacgcgccgttcagcacccgcgtggtgaatgtcggcgtccgcgattccacctatgtgctc

SEQ ID NO: 841054 - DNA, 75 bp, synthetic construct
  source 1..75: mol_type = other DNA
aacaagcccggtccttttttacgcagattgtccgccattttccccacgcattttctgcaatgaccgcgtggcaaa

SEQ ID NO: 841055 - DNA, 75 bp, synthetic construct
  source 1..75: mol_type = other DNA
gcagcaggggcagattggttacccggatttgataaaggcatttcagcctgacatagccatgcgccgtatcgtcgc

SEQ ID NO: 841056 - DNA, 75 bp, synthetic construct
  source 1..75: mol_type = other DNA
atggacactcgttttgttcaggcccataaagaggcgcgctgggcgctggggctgacccttttgtatctgcttgtt

SEQ ID NO: 841057 - DNA, 75 bp, synthetic construct
  source 1..75: mol_type = other DNA
gtcaccaacctgtttggtttgacggctgaaggtctggttcagggtggtgcagaaactgcacgtctgaacgccatc

SEQ ID NO: 841058 - DNA, 75 bp, synthetic construct
  source 1..75: mol_type = other DNA
ctgggcgttggtgaaccgttgatttacggcgtcaccctgccccgcatgaaaccgtttattaccgcctgtttaggc

SEQ ID NO: 841059 - DNA, 75 bp, synthetic construct
  source 1..75: mol_type = other DNA
ggttactacgccggatttcacgatttctttggtctgcccatcgatccgcgcggcaatattatcggcgtgttgatt

SEQ ID NO: 841060 - DNA, 75 bp, synthetic construct
  source 1..75: mol_type = other DNA
cctgtccggtgcggtgggcagtgccatcaataatgctgtcaccatggcccgggaggcgaaagaaaccagcgacag

SEQ ID NO: 841061 - DNA, 75 bp, synthetic construct
  source 1..75: mol_type = other DNA
ttttggccttgccctgcataccatttatggttctgacagccaggtacttaaagattctgtacagtggtttaacat

SEQ ID NO: 841062 - DNA, 75 bp, synthetic construct
  source 1..75: mol_type = other DNA
aattgaaagcattagcaaaatgctatgacttagatatgtctggaatcattgtggaaattaacacagaaaatcttt

SEQ ID NO: 841063 - DNA, 75 bp, synthetic construct
  source 1..75: mol_type = other DNA
ggttcctttcatgttaacgccaccagtggcaaaaataggggcaaattccgggcagcaagtaaaaatcaaaattat

SEQ ID NO: 841064 - DNA, 75 bp, synthetic construct
  source 1..75: mol_type = other DNA
tgaaccgcttatcgacatgggtcgtacggcgctaaacgttagtggctcgatgaccgctggcacgctgaccagcca

SEQ ID NO: 841065 - DNA, 75 bp, synthetic construct
  source 1..75: mol_type = other DNA
tcagaacggctgcgccggtttgtatccggcaatgctggcggtgatggttgcgcctacggttggcattaacccgct

SEQ ID NO: 841066 - DNA, 75 bp, synthetic construct
  source 1..75: mol_type = other DNA
atgaactttccattaattgcgaacatcgtagtgttcgttgttctgctgtttgtgctggctcaggcccgccacaaa

SEQ ID NO: 841067 - DNA, 75 bp, synthetic construct
  source 1..75: mol_type = other DNA
accgtttgttaccgcctgtttaggcggcgcggcgggcggtttgtttatcgggctggttgcatggtggggtctgcc

SEQ ID NO: 841068 - DNA, 75 bp, synthetic construct
  source 1..75: mol_type = other DNA
cgctgtggcccgcccggaacggcaatactgcgcatctggtcatgtgccctttcgctggcggcagcagtagcgcgt

SEQ ID NO: 841069 - DNA, 75 bp, synthetic construct
  source 1..75: mol_type = other DNA
cgacctgagtctgaatgcagtcagggaaagcaaaaacagtcgcaacggcaggtcagaaagtcatgaaagccacgc

SEQ ID NO: 841070 - DNA, 75 bp, synthetic construct
  source 1..75: mol_type = other DNA
ttcgcttctggctcggcaatgacgacaactatacccgtgaccagctttatttatggttctgcgaatacttgcagg

SEQ ID NO: 841071 - DNA, 75 bp, synthetic construct
  source 1..75: mol_type = other DNA
cacgatcgcgaagcctcctggcagcaggtcgatgcctggcgtcagtggctgagccacgttacaggcccggtggtg

SEQ ID NO: 841072 - DNA, 75 bp, synthetic construct
  source 1..75: mol_type = other DNA
aggtcgttgcctggcgtcagtggctgagccacgttacaggcccggtggtgattgacggcaatcatttctatccca

SEQ ID NO: 841073 - DNA, 75 bp, synthetic construct
  source 1..75: mol_type = other DNA
tttgaaacctgccgacttctggagcaacgggggcttgcgccacaaggactgattatttccgggtgccatgccccg

SEQ ID NO: 841074 - DNA, 75 bp, synthetic construct
  source 1..75: mol_type = other DNA
cgcggaaatatcatcggcgtactaattgccgcctgggcctgcgcccgcattgaaggtatggtgcgtcaatttatg

SEQ ID NO: 841075 - DNA, 75 bp, synthetic construct
  source 1..75: mol_type = other DNA
tagcctggtggggtctgccgatgggcttaaacagcgcctttgggccgtctggtctggtggcgctgccgctgatga

SEQ ID NO: 841076 - DNA, 75 bp, synthetic construct
  source 1..75: mol_type = other DNA
gcgcgggccaggtgggcgcggcgctggcactctactggcgggcgcaaccgcacagtgcgctacgcagtcaggtac

SEQ ID NO: 841077 - DNA, 75 bp, synthetic construct
  source 1..75: mol_type = other DNA
ctggcgctctactggcgggcgcaaccgcacagtgcattacgcagtcaggtccgcggggcgattattcccggtctg

SEQ ID NO: 841078 - DNA, 75 bp, synthetic construct
  source 1..75: mol_type = other DNA
acggtgtaaccctgccccgcatgaaaccgtttgttaccgcttgtttaggcggcgcggcgggtggattgtttatcg

SEQ ID NO: 841079 - DNA, 75 bp, synthetic construct
  source 1..75: mol_type = other DNA
ctggtgggctataacgcggcccaggcatttggtggcacgggcgtaaatggcgcaattatcgccgcgctctttttg

SEQ ID NO: 841080 - DNA, 75 bp, synthetic construct
  source 1..75: mol_type = other DNA
ttgatgcgttaagtcctgatggcaacgtgaataattggctaatgaatggcggtcaatggttcttcatgctggacg

SEQ ID NO: 841081 - DNA, 75 bp, synthetic construct
  source 1..75: mol_type = other DNA
gtggcgaaccgatccttgcatcgctggcggcagcatgtgcggtcagccgcgggactgccgcattattgatgtatc

SEQ ID NO: 841082 - DNA, 75 bp, synthetic construct
  source 1..75: mol_type = other DNA
gatttcgagcattattctcgcggtattattacttttcctttaattggattattgcttggcgcgattagcgggctg

SEQ ID NO: 841083 - DNA, 75 bp, synthetic construct
  source 1..75: mol_type = other DNA
tcttccctatggctcaattaatggggatatggctcgtatggcgaactttggccagtggggagggtattatccgtc

SEQ ID NO: 841084 - DNA, 75 bp, synthetic construct
  source 1..75: mol_type = other DNA
tgtctgggttgttggtgatctgcatggttgctacaccagactgatgtccgaactccatcgtgtggattttgaccc

SEQ ID NO: 841085 - DNA, 75 bp, synthetic construct
  source 1..75: mol_type = other DNA
ggtgatctgcatggttgctacaccagactgatgtccgaactccatcgtgtggattttgacccggcgcaggattta

SEQ ID NO: 841086 - DNA, 75 bp, synthetic construct
  source 1..75: mol_type = other DNA
tattcacagggctggttcctgtacatcccgacacagtcaggctctgcacgcattgagcgcgacctgaaaggtgtc

SEQ ID NO: 841087 - DNA, 75 bp, synthetic construct
  source 1..75: mol_type = other DNA
agcaaactaacgacgcagcaaccgttgctgatccacgtaaaactgccgttgaagcagctatcgcccgcgccaaag

SEQ ID NO: 841088 - DNA, 75 bp, synthetic construct
  source 1..75: mol_type = other DNA
atgtcaattgagcatattttaatcgggaagcatcatgggggttctgattactggagaactccatttttgttattt

SEQ ID NO: 841089 - DNA, 75 bp, synthetic construct
  source 1..75: mol_type = other DNA
gccaggaagacctgaacctttaccgcgcggaagtggagcgcgaccaggcctatggcaactggcgcgatttcttcc

SEQ ID NO: 841090 - DNA, 75 bp, synthetic construct
  source 1..75: mol_type = other DNA
atggtgtacgaacgcgcttctggttatgctgtcaacgccacgatgtttgaccgttatttgccattttcatgcccg

SEQ ID NO: 841091 - DNA, 75 bp, synthetic construct
  source 1..75: mol_type = other DNA
aaaggtgtcattttttattatgtcgatgggcaaattattcagtccatcacaatgtcctcaaccgcgattttataa

SEQ ID NO: 841092 - DNA, 75 bp, synthetic construct
  source 1..75: mol_type = other DNA
acacgctgggtgagatgacactgtgggccgttcatgatccaaatacgtcttccagcgtcgtacccggggtttcta

SEQ ID NO: 841093 - DNA, 75 bp, synthetic construct
  source 1..75: mol_type = other DNA
atttcagagatatctcgcatgagtggtgggaagctaaatctaattgcaaggattccggccgatagagagcttgaa

SEQ ID NO: 841094 - DNA, 75 bp, synthetic construct
  source 1..75: mol_type = other DNA
ttacggtcagatcattactgggtgatgcatctcgttaccttatccccatgtaccagcgtaattatgcctggggag

SEQ ID NO: 841095 - DNA, 75 bp, synthetic construct
  source 1..75: mol_type = other DNA
catgtgcagatctctcgtatcgaagtacccaaggacaccgatctcaatcacttcttcgaggcgatgaacaatcgc

SEQ ID NO: 841096 - DNA, 75 bp, synthetic construct
  source 1..75: mol_type = other DNA
tattggcgcggcgattcaggcggatattctggtgggtaacaagccggacagcgaaatgctgctgcttgatgtgat

SEQ ID NO: 841097 - DNA, 75 bp, synthetic construct
  source 1..75: mol_type = other DNA
aacgaaccttattggcttgtcgtcgcgcgctgaaagacgcgggtgtagaagctgatgaagtgctggaagtggtga

SEQ ID NO: 841098 - DNA, 75 bp, synthetic construct
  source 1..75: mol_type = other DNA
tcccgcgtaataccactattccggtggctcgcgcacaggatttcaccacctttaaagatggccagaccgcgatgt

SEQ ID NO: 841099 - DNA, 75 bp, synthetic construct
  source 1..75: mol_type = other DNA
gataaaggtacgctgagctataaaggtacgctgagctataaaggaacgcgctttgtcagctttgtaggcgaacaa

SEQ ID NO: 841100 - DNA, 75 bp, synthetic construct
  source 1..75: mol_type = other DNA
ttgttatcattggcttaattatcgtcgccgcatcgtttcgttttatgcaacagcgacgggaaaaagctgataatg

SEQ ID NO: 841101 - DNA, 75 bp, synthetic construct
  source 1..75: mol_type = other DNA
atgagtaaaccacctcttttctttattgttatcattggcttaattattgtcgctgcatcgtttcgctttatgcag

SEQ ID NO: 841102 - DNA, 75 bp, synthetic construct
  source 1..75: mol_type = other DNA
ttggtcagtggtaaggggccgcaaacctactatatcggcaccctggtggtgtttgcccgggacgatggcagtttc

SEQ ID NO: 841103 - DNA, 75 bp, synthetic construct
  source 1..75: mol_type = other DNA
gcatgttttacgagtgttaacaaaacaggatatcgcgttggacgataagcgtttgttagagcagttcgacgccta

SEQ ID NO: 841104 - DNA, 75 bp, synthetic construct
  source 1..75: mol_type = other DNA
agcaggaagtgactccggcaggcaccagtatgcgctatgaggcaagcttcaaaccgcaaagcggaggaatggagc

SEQ ID NO: 841105 - DNA, 75 bp, synthetic construct
  source 1..75: mol_type = other DNA
caggcaaggaaaacccattaagtacattgcagatgttctcagaatgcctctgagcacgtcatacaggattgctca

SEQ ID NO: 841106 - DNA, 75 bp, synthetic construct
  source 1..75: mol_type = other DNA
tgacgtttatttctgccagaggatatgtcaaaacgctgggagtgatttgctttgctgccataatactggcctggt

SEQ ID NO: 841107 - DNA, 75 bp, synthetic construct
  source 1..75: mol_type = other DNA
tgccacaatacatcatttccgcaagattcttcatctgcacctattagaacccattcctttcacagccggtcattc

SEQ ID NO: 841108 - DNA, 75 bp, synthetic construct
  source 1..75: mol_type = other DNA
gatggggttcactgatacgcatcttcgctgttatatcatgcatgacgatgccgacgggcagcatatccatataat

SEQ ID NO: 841109 - DNA, 75 bp, synthetic construct
  source 1..75: mol_type = other DNA
attcgcaacagtattattccggcatttaaaaaaggcgacctggctggcggtttacaaaaggggatcagcgatatt

SEQ ID NO: 841110 - DNA, 75 bp, synthetic construct
  source 1..75: mol_type = other DNA
aaaatatgccgacattctgctgccagacctgatgaccgttgagcaggaagatattattcctaacgactacgccgg

SEQ ID NO: 841111 - DNA, 75 bp, synthetic construct
  source 1..75: mol_type = other DNA
tttatcattagctgccggtggttcttaccagacaggaaaggggatagcccaggtatctgatggtaaaattgctga

SEQ ID NO: 841112 - DNA, 75 bp, synthetic construct
  source 1..75: mol_type = other DNA
gtcattgagagcttcgcagaagcgttaagtgcagagttcaatgcgacgaagcttctacgttcagatgtcagtaaa

SEQ ID NO: 841113 - DNA, 75 bp, synthetic construct
  source 1..75: mol_type = other DNA
ggaagctatagatacactgatcacgagcaagatttcagaacacgagtttgtgcagcagctcgcagctcagaagat

SEQ ID NO: 841114 - DNA, 75 bp, synthetic construct
  source 1..75: mol_type = other DNA
agggcattgcctttaaagcgtctcagcttggaaaaaagtatggctggtcttctctgcaaacacagattgatttta

SEQ ID NO: 841115 - DNA, 75 bp, synthetic construct
  source 1..75: mol_type = other DNA
atgaacggcttttcatttcagtaccagggcattgcctttaaagcgtctcagcttggaaaaaagtatggctggtct

SEQ ID NO: 841116 - DNA, 75 bp, synthetic construct
  source 1..75: mol_type = other DNA
agacacaatagtcatcaccctcaaaaaactacgtaatccattgttaagggcgtttaaacagcctccgaagatttt

SEQ ID NO: 841117 - DNA, 75 bp, synthetic construct
  source 1..75: mol_type = other DNA
aacgctacgaagctcctgcgctccgatgtcagtaaacctgtatggcacaattctctgcgtctgcctgctggtgag

SEQ ID NO: 841118 - DNA, 75 bp, synthetic construct
  source 1..75: mol_type = other DNA
tatcaactataacaccgaccgatcacttcttaccttttagcggctggtgggctttgttggtctgggcaatagtat

SEQ ID NO: 841119 - DNA, 75 bp, synthetic construct
  source 1..75: mol_type = other DNA
cccgccgtttagcatggctgaacagttcctcctaaaagcccctgaagctgatgtgtgtgtatgtctggttccgca

SEQ ID NO: 841120 - DNA, 75 bp, synthetic construct
  source 1..75: mol_type = other DNA
cgtaacctacaccgtgaatttggtttttcgatggatggtgctgcaactgagcatgacgcattgttgccacggttc

SEQ ID NO: 841121 - DNA, 75 bp, synthetic construct
  source 1..75: mol_type = other DNA
gagccgacctggaacggtcgcatcctgcatacccactatgccaccggtcagcaggccgaagccctggttgaacac

SEQ ID NO: 841122 - DNA, 75 bp, synthetic construct
  source 1..75: mol_type = other DNA
agacccaccatttacccacctgagacgctcgacagcttcataaaactatacaggcaaggaaaacccattaagtgc

SEQ ID NO: 841123 - DNA, 75 bp, synthetic construct
  source 1..75: mol_type = other DNA
caccatttgcaagctgtgttttgatatacaggaacgtaccccgcaaacctaaagttgaaattacccagacaatct

SEQ ID NO: 841124 - DNA, 75 bp, synthetic construct
  source 1..75: mol_type = other DNA
cggtgtgtatatacaaaccccttcctgcatgagattcgaacattacaccgagcggttaaatacctcccaccagca

SEQ ID NO: 841125 - DNA, 75 bp, synthetic construct
  source 1..75: mol_type = other DNA
gtacgccgtctgcgtttctccggccctaagacatcaatcatctgttctccaatgactagtctaaaaactagtatt

SEQ ID NO: 841126 - DNA, 75 bp, synthetic construct
  source 1..75: mol_type = other DNA
ctaaaaactagtattaagactatcacttatttaagtgatattggttgtctggagattcagggggccagtctaatc

SEQ ID NO: 841127 - DNA, 75 bp, synthetic construct
  source 1..75: mol_type = other DNA
cttgcaaaagggactcagcgatattgaaaaccgtttggcagggaataatttagcgacgatagcaccggccgatca

SEQ ID NO: 841128 - DNA, 75 bp, synthetic construct
  source 1..75: mol_type = other DNA
atgacagtcagcagcacgatttccgttttttgccgagacggggtgttccgtaccgtttactgccacctgcacggt

SEQ ID NO: 841129 - DNA, 75 bp, synthetic construct
  source 1..75: mol_type = other DNA
ggtattgcgggcgggcttgcaggcaacagtacggcgtctgccggtacgggggcacaggcaggcaggaacgcggtt

SEQ ID NO: 841130 - DNA, 75 bp, synthetic construct
  source 1..75: mol_type = other DNA
aaactagtattaagactatcacttatttaagtgatattggttgtctggagattcagggggccagtctaaattccg

SEQ ID NO: 841131 - DNA, 75 bp, synthetic construct
  source 1..75: mol_type = other DNA
gacgggcaagtcgcctttttggggcgcaacgatacccaagtgaaggtgaatggttaccgtatcgaactgggggaa

SEQ ID NO: 841132 - DNA, 75 bp, synthetic construct
  source 1..75: mol_type = other DNA
cgcgacccacatctaccatgaatttgacgtagaacactttaatgttacgcgttttacccatgcggtgaatgcgct

SEQ ID NO: 841133 - DNA, 75 bp, synthetic construct
  source 1..75: mol_type = other DNA
caatcaggcgtgtcgcccagccgcattcccatcatcaaagcggatccggcgcaggcaatcccgctgtcgtttaat

SEQ ID NO: 841134 - DNA, 75 bp, synthetic construct
  source 1..75: mol_type = other DNA
gccgatcgggcggcattcacgctgtttatggtggctgatatggcggtgatctcgccattctatgggcaagaggca

SEQ ID NO: 841135 - DNA, 75 bp, synthetic construct
  source 1..75: mol_type = other DNA
tatcgccaactgtcgacggcggcggatcatgtggcccgcgccctgttagcgctgggcgtgcagcatggcgaccgc

SEQ ID NO: 841136 - DNA, 75 bp, synthetic construct
  source 1..75: mol_type = other DNA
aggaaacaacgccgttcgtgctgatgctgactgccttccaactggtgctgatgcgttacgctcagcaacagcgat

SEQ ID NO: 841137 - DNA, 75 bp, synthetic construct
  source 1..75: mol_type = other DNA
catctggtggcgttttcatctttattcgataccaatgctgttgtgggcggcgctggtgggatacgttttattcgt

SEQ ID NO: 841138 - DNA, 75 bp, synthetic construct
  source 1..75: mol_type = other DNA
cccggatcgctggcaaatttgattgcgctacgtatggcgaacgatcgccgcatctggtggcgtttccatctctat

SEQ ID NO: 841139 - DNA, 75 bp, synthetic construct
  source 1..75: mol_type = other DNA
gaatcacttatcgcagtaaagtcaaagaccaaaattactattctgttgcagtcaatgcaggttattacgtaacac

SEQ ID NO: 841140 - DNA, 75 bp, synthetic construct
  source 1..75: mol_type = other DNA
ttcaaccgccacaaaatcaaccggcaactgagcaggctcgaccttgcatctccggtactggagcctgaagttatc

SEQ ID NO: 841141 - DNA, 75 bp, synthetic construct
  source 1..75: mol_type = other DNA
ggtgcaaacgccggagtggaaaccgcggctggtgtggagttgtctggggctgtatatcgtctttctgacggcgct

SEQ ID NO: 841142 - DNA, 75 bp, synthetic construct
  source 1..75: mol_type = other DNA
tggcgcaatgatgctgacactcctgctgttgtgctggtgttgtttccctggaaaggcgctgcaataccatacggg

SEQ ID NO: 841143 - DNA, 75 bp, synthetic construct
  source 1..75: mol_type = other DNA
accccgaaaggagtgatgatcgaccaccgtgcggccatgaacacgctggaagacatcaacgaacgctttggcctc

SEQ ID NO: 841144 - DNA, 75 bp, synthetic construct
  source 1..75: mol_type = other DNA
tggatgcatacggacacaacgtttcccgcgatgtggttcgcggccagattgactggctggcagagcagcaactgg

SEQ ID NO: 841145 - DNA, 75 bp, synthetic construct
  source 1..75: mol_type = other DNA
gggggggcttctggctcagcggacgggtttccagctactgggaccgttccggcacagagaagcagtaccagatga

SEQ ID NO: 841146 - DNA, 75 bp, synthetic construct
  source 1..75: mol_type = other DNA
tgagcctaatgcgaccactgattatgatagtcataaccttaatattgcaagcggctctggtaatgcaacaaatgt

SEQ ID NO: 841147 - DNA, 75 bp, synthetic construct
  source 1..75: mol_type = other DNA
tatccgtaataaggagagtcagaagcaggatattgccgggctcagccgggaccctgaaaacgccaacggcagcat

SEQ ID NO: 841148 - DNA, 75 bp, synthetic construct
  source 1..75: mol_type = other DNA
agcgactggtcattctgcgctcactggtggagtgcggagacagtgcaaacgaatccattctacagacctgccttc

SEQ ID NO: 841149 - DNA, 75 bp, synthetic construct
  source 1..75: mol_type = other DNA
tcaccgtggaaaacctgcgcggcttttatgtcgtaacgctgacctcccgaggtcaggatgtggcggaaggtcgtg

SEQ ID NO: 841150 - DNA, 75 bp, synthetic construct
  source 1..75: mol_type = other DNA
aatatctaaatgaatggcctttaaaatattcccgcatcgttcaagctgatgactctattttttatggtgtttttg

SEQ ID NO: 841151 - DNA, 75 bp, synthetic construct
  source 1..75: mol_type = other DNA
ttcagcgcagaaaactgaaatggaaaaaggcaatgtgtttgatatttctcgcgctgtatacgccaaagaaaaaag

SEQ ID NO: 841152 - DNA, 75 bp, synthetic construct
  source 1..75: mol_type = other DNA
ccgcaaggcgttgacggcgagctttacatcgccggggatggtgtggcgcaagggtatgatgggcagcctgagttg

SEQ ID NO: 841153 - DNA, 75 bp, synthetic construct
  source 1..75: mol_type = other DNA
tgccgataacaactcattgcaacatccctgtaatgactacagaaatgcttgctgatttgtatgacacagaaccca

SEQ ID NO: 841154 - DNA, 75 bp, synthetic construct
  source 1..75: mol_type = other DNA
tttataaaattgcgctgggcattgagtacgacggtagtaagtattacggctggcaacggcaaaacgaagtacgca

SEQ ID NO: 841155 - DNA, 75 bp, synthetic construct
  source 1..75: mol_type = other DNA
gcaggtagtgcatttcgaaacgaccgcgcagcgcaaagacgcggcgtggaccttgggcgtaaatgcgaatttacc

SEQ ID NO: 841156 - DNA, 75 bp, synthetic construct
  source 1..75: mol_type = other DNA
ttatgttgaaggcgcatggaatcgggttacgaataaaaaaggtaatacttcactttatgatcacaatgataacac

SEQ ID NO: 841157 - DNA, 75 bp, synthetic construct
  source 1..75: mol_type = other DNA
atgtttttccaggggctttttcaacgcaaaaataatacccccgtcacagcgcccgggatgcttgcggaagaagtt

SEQ ID NO: 841158 - DNA, 75 bp, synthetic construct
  source 1..75: mol_type = other DNA
tacattgttcttgaaacataatgcaaaattctttttaaggaaaattgtgagttattattcaacaattcaaagaac

SEQ ID NO: 841159 - DNA, 75 bp, synthetic construct
  source 1..75: mol_type = other DNA
aggggcagagaagccgtttaccgtcaatggtaggcaatggctttactgttatcacccggctagtggaaagcactg

SEQ ID NO: 841160 - DNA, 75 bp, synthetic construct
  source 1..75: mol_type = other DNA
ctgcaggggcattcagcggtgaacttgcagcccggtatatcattgataactactatggtggtcgtaccgataacc

SEQ ID NO: 841161 - DNA, 75 bp, synthetic construct
  source 1..75: mol_type = other DNA
gctatctggacgctggttgtgacgatattgtggttgatgtctacaatacggaacagcagtgcctctattcaatgg

SEQ ID NO: 841162 - DNA, 75 bp, synthetic construct
  source 1..75: mol_type = other DNA
ccatggcggttgttttccgattgaggattttatagatggtttctggcaaccagcacaggagtatggtgattttta

SEQ ID NO: 841163 - DNA, 75 bp, synthetic construct
  source 1..75: mol_type = other DNA
ctgatcgtagcgataaccgcgttcagcgtgaactgctggatgccgccattgcagccaaaatcgcgctgagcgatg

SEQ ID NO: 841164 - DNA, 75 bp, synthetic construct
  source 1..75: mol_type = other DNA
aacgttagccgaccatgaaggccgtcacctgctgccgtctgttgttcactatcaacagcaagggcattcggtggg

SEQ ID NO: 841165 - DNA, 75 bp, synthetic construct
  source 1..75: mol_type = other DNA
cgattaaaaacgtagacaaacaaacccaggatttcgctgctcgccgcatggaccagtcggttcgtcgtgcgctga

SEQ ID NO: 841166 - DNA, 75 bp, synthetic construct
  source 1..75: mol_type = other DNA
cagataaccttgtaccggcatgtggaggggcagagaagccgtttaccgtcaatggtaggcaatggctttactgtt

SEQ ID NO: 841167 - DNA, 75 bp, synthetic construct
  source 1..75: mol_type = other DNA
ccatctgctggcggattacattcgcgagcaggcgggcattcctgatcgtagcgataaccgcgttcagcgtgaact

SEQ ID NO: 841168 - DNA, 75 bp, synthetic construct
  source 1..75: mol_type = other DNA
tgaggcatctattcaggtcaaaccgtcctacggtctgaccgacagcgaaatcgcctcgatgattaaagactcaat

SEQ ID NO: 841169 - DNA, 75 bp, synthetic construct
  source 1..75: mol_type = other DNA
acgccaaatttaacgccggggcgttactgcgcggggatatgaaatcccgttttgaagcctacgccacggggatca

SEQ ID NO: 841170 - DNA, 75 bp, synthetic construct
  source 1..75: mol_type = other DNA
attctgcgcaatgcctcgctgccgatgatcactgccgtggggatgcacattggcgaactgattggcgggacgatg

SEQ ID NO: 841171 - DNA, 75 bp, synthetic construct
  source 1..75: mol_type = other DNA
ttctgacaacccctattgcgatctgctcttttgcctctaccgagactttatcgtttacacctgacaacataaatg

SEQ ID NO: 841172 - DNA, 75 bp, synthetic construct
  source 1..75: mol_type = other DNA
atgaacgagttttctatcctgtgtcgtgtactgggttcgctctattaccgccaaccgcaggaccctttactggtt

SEQ ID NO: 841173 - DNA, 75 bp, synthetic construct
  source 1..75: mol_type = other DNA
gtttccatctctattcaataccgatgctgttgtgggcggcgctggtgggatacgttttgttggttatgatcccgg

SEQ ID NO: 841174 - DNA, 75 bp, synthetic construct
  source 1..75: mol_type = other DNA
ttattgcccaaatggcaccgctggctggcgcaatgatgctgacgctcctgctcctgtgctggtgttgtttccctg

SEQ ID NO: 841175 - DNA, 75 bp, synthetic construct
  source 1..75: mol_type = other DNA
cgatatgctgaatttcctgcccgccacgctggaacttgcaggtgcggcgctggtattaattctgctcacctccgt

SEQ ID NO: 841176 - DNA, 75 bp, synthetic construct
  source 1..75: mol_type = other DNA
cctcttacagcaccaacaatctgccgatgatcccgttctacatctattactcgatgttcggcttccagcgtattg

SEQ ID NO: 841177 - DNA, 75 bp, synthetic construct
  source 1..75: mol_type = other DNA
acatggtgcagaacaccgatcgtgccaccttcaacaatatcgaagagctggggctgggatttatcaactattcac

SEQ ID NO: 841178 - DNA, 75 bp, synthetic construct
  source 1..75: mol_type = other DNA
ttccgtatatgacccgcatagagcagcgaatcaacatcgggctggtgaaggaatcaaagcagggtgtgtactacg

SEQ ID NO: 841179 - DNA, 75 bp, synthetic construct
  source 1..75: mol_type = other DNA
tctggcgcaccatggcaccgctaacccgtgatgccattagtgcaatgtgggacgagctggaagaagattctgaag

SEQ ID NO: 841180 - DNA, 75 bp, synthetic construct
  source 1..75: mol_type = other DNA
tgggtcatgtcaccctgcgcttcgatggtttaaacgaagcggaatttccgggcactgtccatgtggcaggccctg

SEQ ID NO: 841181 - DNA, 75 bp, synthetic construct
  source 1..75: mol_type = other DNA
gaaaaagtgacgcaccggtgaccacgccagcagagctggcagatgctatcgggctgtcatacgacacctataccg

SEQ ID NO: 841182 - DNA, 75 bp, synthetic construct
  source 1..75: mol_type = other DNA
tcgccgccgctgattcatacgaatcagatcctgaccgcacaccaacaggagcagatccgtaaaatgctggaataa

SEQ ID NO: 841183 - DNA, 75 bp, synthetic construct
  source 1..75: mol_type = other DNA
cacacaagacgcccttgaagcgttgcgcaatggcgtaaccttaaatgatggccctaccctgcccgcaggtgcaga

SEQ ID NO: 841184 - DNA, 75 bp, synthetic construct
  source 1..75: mol_type = other DNA
ctcaccattccttaacagcatcaccatggttcctgacaccacgaaatacggacgggcaattatccgtttgcttgg

SEQ ID NO: 841185 - DNA, 75 bp, synthetic construct
  source 1..75: mol_type = other DNA
ctgtgcgattacaggcctttcttaacgatcctggcaataccgaaaatattgttgagccggggcacacgtactaca

SEQ ID NO: 841186 - DNA, 75 bp, synthetic construct
  source 1..75: mol_type = other DNA
cggtgcgattacaggcctttcttaacgagcctggcaataccgaaaatattgttgagccggggcacacgtactaca

SEQ ID NO: 841187 - DNA, 75 bp, synthetic construct
  source 1..75: mol_type = other DNA
tcaagcctgatgcggtatacctcggcatctacgaaggactgatgctagtcggagtgcatgaagtgcgtaacttct

SEQ ID NO: 841188 - DNA, 75 bp, synthetic construct
  source 1..75: mol_type = other DNA
gctgaagatcaccttatatgagggacgtaatcgccaggtgcgccgcatgaccgcccatgttggtttccccacgct

SEQ ID NO: 841189 - DNA, 75 bp, synthetic construct
  source 1..75: mol_type = other DNA
taaagagctgaccgaggggctgattgaagatgacaaagttctcctgcaacagctgatttcgaccatctccaactg

SEQ ID NO: 841190 - DNA, 75 bp, synthetic construct
  source 1..75: mol_type = other DNA
gctgaaaaagctgggcgagtgggcgatgacccgcaataaaagtatgcttaccgccagttttgatatgggattgag

SEQ ID NO: 841191 - DNA, 75 bp, synthetic construct
  source 1..75: mol_type = other DNA
gcggcggtgacctttaccaataaggcggcacgcgagatgaaagagcgtgtcgggcagacgctggggcgcaaagag

SEQ ID NO: 841192 - DNA, 75 bp, synthetic construct
  source 1..75: mol_type = other DNA
ctgaaaaccagcccacgcgtgtgatcctgttcaataaaccctacgatgttcttccgcagttcaccgatgaagcag

SEQ ID NO: 841193 - DNA, 75 bp, synthetic construct
  source 1..75: mol_type = other DNA
gcggcggctggcctatgtcggcatcacccgcgcccagaaagagttgacctttacgctgtgtaaagagcgtcgtca

SEQ ID NO: 841194 - DNA, 75 bp, synthetic construct
  source 1..75: mol_type = other DNA
acccagcccgaaagccgccgaaatgcgcatgaagaacgttaaccagttatttagctggatgacggagatgctgga

SEQ ID NO: 841195 - DNA, 75 bp, synthetic construct
  source 1..75: mol_type = other DNA
accatgcagccacacaaccgctgctcactaacccaggtattgatgaaaccgcgctgaagagcctgaaccctgaac

SEQ ID NO: 841196 - DNA, 75 bp, synthetic construct
  source 1..75: mol_type = other DNA
acgtaatctctgtctggaaagttatgaccgtatagaacaaacgttaaaacattgtattgaagcgaaaatgttgcc

SEQ ID NO: 841197 - DNA, 75 bp, synthetic construct
  source 1..75: mol_type = other DNA
attaattcatgttcttgaatccacggtgacagaagaacggcgtcgattattgatggagattatattccacaaatg

SEQ ID NO: 841198 - DNA, 75 bp, synthetic construct
  source 1..75: mol_type = other DNA
tcagatccgcactgttaatctgattaaatctgcccgtgttggctatacaaagatgttgctgggggtggtcgggta

SEQ ID NO: 841199 - DNA, 75 bp, synthetic construct
  source 1..75: mol_type = other DNA
gaaaaaggaaagatgcgtctgctgtgggataacaaaaagcggcgtaacgaagcgctggactgcctggtgtatgcc

SEQ ID NO: 841200 - DNA, 75 bp, synthetic construct
  source 1..75: mol_type = other DNA
agggtaaaggccctggaaaagcggtgaagcaagtcataccttttgaaggcaatgaaaagtcttttgaaacaatat

SEQ ID NO: 841201 - DNA, 75 bp, synthetic construct
  source 1..75: mol_type = other DNA
gatggcgatatcaccctggatgccagtggcagactgactgtcaacaacagtctcgccacgggggccgtcactgca

SEQ ID NO: 841202 - DNA, 75 bp, synthetic construct
  source 1..75: mol_type = other DNA
aaatcaacagcaggtgaaagatgcgatggtgagttacttcatggcaacgctgggggttgaccagaaaacagcaca

SEQ ID NO: 841203 - DNA, 75 bp, synthetic construct
  source 1..75: mol_type = other DNA
cagcggttcggatgtgattgcgaaccgggatatcagcattaccggtgacagtgtggtggttgacccggggcatga

SEQ ID NO: 841204 - DNA, 75 bp, synthetic construct
  source 1..75: mol_type = other DNA
aaggtattcccacggaagacgcccttgaagcgttgcgcaatggcgtaaccttaaatgatggccctaccctgcccg

SEQ ID NO: 841205 - DNA, 75 bp, synthetic construct
  source 1..75: mol_type = other DNA
tgggcggcgctgccgccaaaaactaccgtgaaaaatccgtggacgtggtctgctatgacgagctttcctcgttcg

SEQ ID NO: 841206 - DNA, 75 bp, synthetic construct
  source 1..75: mol_type = other DNA
gttccactgacgacggttcagtgggctgatcaacattattatctgccgaaagaatcttcatatacccccgggcaa

SEQ ID NO: 841207 - DNA, 75 bp, synthetic construct
  source 1..75: mol_type = other DNA
taacggccgccgggtcagtcattaacaccgcactgttgtatgcgggcaataacctctcgctgtttgccagcacca

SEQ ID NO: 841208 - DNA, 75 bp, synthetic construct
  source 1..75: mol_type = other DNA
acgataccgatcagcttgctttgcttaaagagttgaccgaggggctgattgaagatgacaaagttctcctgcaac

SEQ ID NO: 841209 - DNA, 75 bp, synthetic construct
  source 1..75: mol_type = other DNA
ttgctgggcataatggtatggttggttcagcaatcgtaagacaattgaaaaacagagacgacattgagctcgtac

SEQ ID NO: 841210 - DNA, 75 bp, synthetic construct
  source 1..75: mol_type = other DNA
tatggcgaccgccagcattcacgttatggagcttgatgacgaagtgtggcaggaaaataccgaaccgatgctttc

SEQ ID NO: 841211 - DNA, 75 bp, synthetic construct
  source 1..75: mol_type = other DNA
aaaactgggctggcaccatgaaatcgaactggaaaaaggactgaccaatacctaccgctggtttgtagataatca

SEQ ID NO: 841212 - DNA, 75 bp, synthetic construct
  source 1..75: mol_type = other DNA
tgctggatgtgacgcgcctgcatcagcttggctggtatcacgaaatctcacaggaagcggggcttgccagcactt

SEQ ID NO: 841213 - DNA, 75 bp, synthetic construct
  source 1..75: mol_type = other DNA
gctcggtcatgccgaccaacctgtacgggccgcatgacaacttccacccgagtaattcgcatgtgatcccagcat

SEQ ID NO: 841214 - DNA, 75 bp, synthetic construct
  source 1..75: mol_type = other DNA
agccttatgctatttccaaaatagcaggtataaagctatgtgaatcttataatcgccaatatggatgtgattatc

SEQ ID NO: 841215 - DNA, 75 bp, synthetic construct
  source 1..75: mol_type = other DNA
tttatcttgctgcggctaaagttggtggcatttatgccaacaatacatttccggcagaattcatctatcagaatc

SEQ ID NO: 841216 - DNA, 75 bp, synthetic construct
  source 1..75: mol_type = other DNA
attatgccgcgtgcaaaaggtcgtgcagatcgcatcctgaagcgcaccagccacatcactgtggttgtgtccgat

SEQ ID NO: 841217 - DNA, 75 bp, synthetic construct
  source 1..75: mol_type = other DNA
agctgcctgaaggcgttgcgaactggcgacacactggtcgtgtggaaactggatcggctcggacgcgacctgcga

SEQ ID NO: 841218 - DNA, 75 bp, synthetic construct
  source 1..75: mol_type = other DNA
gtgagtttttatatgttgatgatatggctgctgcctcggttcatgtgatggagttagaggacacaatttatcaac

SEQ ID NO: 841219 - DNA, 75 bp, synthetic construct
  source 1..75: mol_type = other DNA
tttgagagagagagggttgatcaggtttatcttgctgcggcaaaagtaggtggtatttatgccaataatacattt

SEQ ID NO: 841220 - DNA, 75 bp, synthetic construct
  source 1..75: mol_type = other DNA
cttgggctggcaatatcgctataatttacatgaaggcttatcattaacatataaatggtttattgagaatattaa

SEQ ID NO: 841221 - DNA, 75 bp, synthetic construct
  source 1..75: mol_type = other DNA
gtattccgaccgcagtattttattttttaccgctggcaatcggtaaatttaatgagctgtatcccaatattaaag

SEQ ID NO: 841222 - DNA, 75 bp, synthetic construct
  source 1..75: mol_type = other DNA
cgcatgaagaacgtcaaccaactgtttagctggatgacggagatgctggaaggcagcgaactggatgagccgatg

SEQ ID NO: 841223 - DNA, 75 bp, synthetic construct
  source 1..75: mol_type = other DNA
atgacgcgcaataaaagcatgtttaccgccagctttgatatgggcctgagtcagacgcttagcggacgtggttat

SEQ ID NO: 841224 - DNA, 75 bp, synthetic construct
  source 1..75: mol_type = other DNA
atcacttcgtcaataaaacgcagtacaaagattacgccattctttatcgcggtaaccatcagtcgcgggtgtttg

SEQ ID NO: 841225 - DNA, 75 bp, synthetic construct
  source 1..75: mol_type = other DNA
ccgccagctttgatatgggcctgagtcagacgcttagcggacgtggttatgaagcattgacccgcttcactcact

SEQ ID NO: 841226 - DNA, 75 bp, synthetic construct
  source 1..75: mol_type = other DNA
acccgcgcccagaaggaattgacctttacgctgtgtaaagagcgtcgtcagtacggtgagctggtgcgtccggag

SEQ ID NO: 841227 - DNA, 75 bp, synthetic construct
  source 1..75: mol_type = other DNA
aagatttgctggcttatctgcgcgtgttaaccaatccagacgatgacagcgcatttctacgtatcgtcaatacac

SEQ ID NO: 841228 - DNA, 75 bp, synthetic construct
  source 1..75: mol_type = other DNA
ggcaaccgactattaatagaacaaaagctggctgacaagccctggaagctggactggttttatgaagtgcgtcat

SEQ ID NO: 841229 - DNA, 75 bp, synthetic construct
  source 1..75: mol_type = other DNA
atgaagcatgaattatcaagtatgaaggcatttgtcatactggcagagtccagttcgtttaacaatgccgctaaa

SEQ ID NO: 841230 - DNA, 75 bp, synthetic construct
  source 1..75: mol_type = other DNA
ccctattcttcgattattggtatcccgctggtggaaccggttatacgtcggacattggggattattcgccgcaaa

SEQ ID NO: 841231 - DNA, 75 bp, synthetic construct
  source 1..75: mol_type = other DNA
ttatataagcagcccaacattgtgcacgggtgcaaatgtctagaaaaaggagttttgcttgatatatttacacct

SEQ ID NO: 841232 - DNA, 75 bp, synthetic construct
  source 1..75: mol_type = other DNA
acaagatatcaatattgagaaccatttattccatttcaagatcaccaattttcacttcaagttcaatactggtcg

SEQ ID NO: 841233 - DNA, 75 bp, synthetic construct
  source 1..75: mol_type = other DNA
aacgcttttttgctttgctgattaatctatggactgacgataaagacaatctgtggaccaatatcgtcgaacgcc

SEQ ID NO: 841234 - DNA, 75 bp, synthetic construct
  source 1..75: mol_type = other DNA
ccgtcataatagctttgggtgcttttatttggaatctcattagagataaattcgcagactttaaaacacttgaat

SEQ ID NO: 841235 - DNA, 75 bp, synthetic construct
  source 1..75: mol_type = other DNA
atctagagttcgcacttaatgatttacgttctcagattcattcaatggatctaaagattgaacgtgtgatagcaa

SEQ ID NO: 841236 - DNA, 75 bp, synthetic construct
  source 1..75: mol_type = other DNA
atccgacaaatatcggcgtcagcaccaccagcagtagttcgattacgggcagcaattctgcggatttacaaagca

SEQ ID NO: 841237 - DNA, 75 bp, synthetic construct
  source 1..75: mol_type = other DNA
ctaatgcagccggtgcaatagctacagggcttttatctctcattattcctgttccactgacgacagttcagtggg

SEQ ID NO: 841238 - DNA, 75 bp, synthetic construct
  source 1..75: mol_type = other DNA
ctgccgctgaagattttatgaagtctcacgtggaggcgacgattcgcgatgttccctgcctgaaaaaactttctc

SEQ ID NO: 841239 - DNA, 75 bp, synthetic construct
  source 1..75: mol_type = other DNA
gatgaagccacgtcgtatgccatccgttttcctgatgatccggagattttttcgcagacagaggcgcagcaactg

SEQ ID NO: 841240 - DNA, 75 bp, synthetic construct
  source 1..75: mol_type = other DNA
aggtcagacggatttttgctggcgagtacgaaatccgttacgaacttactggccagattatttatgtattggggg

SEQ ID NO: 841241 - DNA, 75 bp, synthetic construct
  source 1..75: mol_type = other DNA
gttaactcatccacgtatgggagaacagttgtttcagtttgagcccagggagatcagacggatttttgctggcga

SEQ ID NO: 841242 - DNA, 75 bp, synthetic construct
  source 1..75: mol_type = other DNA
gtacgaaatccgttacgaacttactggccagactatctatgtattacgtctgtggcatacacgggaaaacagata

SEQ ID NO: 841243 - DNA, 75 bp, synthetic construct
  source 1..75: mol_type = other DNA
cagtaacctgatcggtcacggcgtgatgatccccggcaccactgttcttgcgggaaccggcagtgaagaaggggc

SEQ ID NO: 841244 - DNA, 75 bp, synthetic construct
  source 1..75: mol_type = other DNA
acgctcggatctatttccggacagattgataacagccagtcgttacaggccagtaacctgatcggtcacggcgtg

SEQ ID NO: 841245 - DNA, 75 bp, synthetic construct
  source 1..75: mol_type = other DNA
gttttctgactttgctggtggcgcagctgaaaaaccaggacccgaccaatccaatggaaaacaacgagctgacgt

SEQ ID NO: 841246 - DNA, 75 bp, synthetic construct
  source 1..75: mol_type = other DNA
gcattgactcgcagcgaaaccgttttgagatgtatgtctggggatgggctccgggagaggaagcctttctggtgg

SEQ ID NO: 841247 - DNA, 75 bp, synthetic construct
  source 1..75: mol_type = other DNA
ggttttactcgatcttgcaccgtggtttgggcgtaaacatcgtgataataccctcacgctgaaacgtttttcatc

SEQ ID NO: 841248 - DNA, 75 bp, synthetic construct
  source 1..75: mol_type = other DNA
gtggtgtgtttttgtgtgaggtgggctcagataccgtcaaggaaatgctgtacgcccgttttgccctgccagtgg

SEQ ID NO: 841249 - DNA, 75 bp, synthetic construct
  source 1..75: mol_type = other DNA
atgtgtccacgctggatgttgacgcaatggtagtacgcgaaaccacccaccgtttcagccggttatcctttcacc

SEQ ID NO: 841250 - DNA, 75 bp, synthetic construct
  source 1..75: mol_type = other DNA
gctgtactggcaaaatcccgggaagaagagacgacccggccaacccttaaagaactggcagcgaagctgtccgga

SEQ ID NO: 841251 - DNA, 75 bp, synthetic construct
  source 1..75: mol_type = other DNA
tggctgcgtgatccatcagtctgagcttgaccagagcaacgggcggtggatctgtgaaaacacggggatgtggac

SEQ ID NO: 841252 - DNA, 75 bp, synthetic construct
  source 1..75: mol_type = other DNA
tcagatccgcactgttaatctgattaaatctgcccgtgttggctatacaaagatgttgctggggggtggtcgggt

SEQ ID NO: 841253 - DNA, 75 bp, synthetic construct
  source 1..75: mol_type = other DNA
tcgtatgccatccgttttcctgatgatccggagattttttcgcagacagaggcgcagcaactggtcgcggaagag

SEQ ID NO: 841254 - DNA, 75 bp, synthetic construct
  source 1..75: mol_type = other DNA
tttttgtgcttcccataaaaggggcatcggtgtacggcaagccggtgatcaccatgcccaaaaagcgcaaccagc

SEQ ID NO: 841255 - DNA, 75 bp, synthetic construct
  source 1..75: mol_type = other DNA
aaatcggcgcgtgtgggttacaccaaaatgctgctgggcgtggttgggtattttattgagcataaatcccgtaac

SEQ ID NO: 841256 - DNA, 75 bp, synthetic construct
  source 1..75: mol_type = other DNA
atgaatatatccgaattacagctgaataatatgatgatcgccgtcacaaccgcattgcagccactaataagggca

SEQ ID NO: 841257 - DNA, 75 bp, synthetic construct
  source 1..75: mol_type = other DNA
tcggcgcgtgcctgcgtagcgcggacgctgctggcgttcatgcggtgattgtgccgaaagatcgctccgcacagc

SEQ ID NO: 841258 - DNA, 75 bp, synthetic construct
  source 1..75: mol_type = other DNA
gcatgtggaggcaacgctacgggatgtcccctgccttaaagcgttatcgccatggctgggaagaaagcaccgcga

SEQ ID NO: 841259 - DNA, 75 bp, synthetic construct
  source 1..75: mol_type = other DNA
aaccggatgtggaaaaagaaggttcaccaactctgcttggcgataagcgtatcgaaggttcggtatggcctaaat

SEQ ID NO: 841260 - DNA, 75 bp, synthetic construct
  source 1..75: mol_type = other DNA
gttccctgtctgaaaattcttttcccctggctgggacgtaagcaccgggataatacgctgacattaaaaagattc

SEQ ID NO: 841261 - DNA, 75 bp, synthetic construct
  source 1..75: mol_type = other DNA
ccgtgctgaccaatgacggcaccattcagggcaacggtaaaaccacgctcagcgcggcaacgcaggcccacaaca

SEQ ID NO: 841262 - DNA, 75 bp, synthetic construct
  source 1..75: mol_type = other DNA
gtcgtatgccatccgttttcctgatgatccggagattttttcgcagacagaggcgcagcaactggtcgcggaaga

SEQ ID NO: 841263 - DNA, 75 bp, synthetic construct
  source 1..75: mol_type = other DNA
gatgaaccgctgatttttgccattgtcgggcagggcggcggcaaagcgcggctggaaaaaatggcgcagcagcgt

SEQ ID NO: 841264 - DNA, 75 bp, synthetic construct
  source 1..75: mol_type = other DNA
tgatgaataaagccatcgaaaaaggcgtggcggcagaaaacgtcatcttcttccccaactggtcggaaattgccc

SEQ ID NO: 841265 - DNA, 75 bp, synthetic construct
  source 1..75: mol_type = other DNA
gtggacgtggtctgctatgacgaactttcctcgttcgagccggatgtcgaaaaagagggctcgccaaccctgctg

SEQ ID NO: 841266 - DNA, 75 bp, synthetic construct
  source 1..75: mol_type = other DNA
accatgcccaaaaagcgcaaccagcgtggtgtgtttctgtgtgaggttggctccgataccgtcaaggaaatgctg

SEQ ID NO: 841267 - DNA, 75 bp, synthetic construct
  source 1..75: mol_type = other DNA
caagctggtggagctttccggtcatgcgttaagcaagatggatctccgggaactggctcgaccgcgtttgacgca

SEQ ID NO: 841268 - DNA, 75 bp, synthetic construct
  source 1..75: mol_type = other DNA
caatactctcacgctgaaacgcttttcatctggcgtcggtttctggtgcctgggcggcgctgccgccaaaaaact

SEQ ID NO: 841269 - DNA, 75 bp, synthetic construct
  source 1..75: mol_type = other DNA
tggtagtgatatccagcgtggcattcaggcggcaacggccgcgcttcagggcctggcgggggacaatattgctgg

SEQ ID NO: 841270 - DNA, 75 bp, synthetic construct
  source 1..75: mol_type = other DNA
gctggttgacgaaccagcgtggttatggccgcggaatccaccaattcgtgaacgcaaaagtattcccaccagctg

SEQ ID NO: 841271 - DNA, 75 bp, synthetic construct
  source 1..75: mol_type = other DNA
gttccttgcctgaaaaaactttctccctggctgggccggaaacaccgggataatacgctcacactgaagcgtttt

SEQ ID NO: 841272 - DNA, 75 bp, synthetic construct
  source 1..75: mol_type = other DNA
tggaaaacgctgccgtttcaggtcgccatcatgaactgcatgggcaatgacgagattcgtacagttaacctgatt

SEQ ID NO: 841273 - DNA, 75 bp, synthetic construct
  source 1..75: mol_type = other DNA
tcagggcattatcgcccgcgtgaagccaggacgtcagtatcaggaaaatgatctgccggatctgatcgcttcgct

SEQ ID NO: 841274 - DNA, 75 bp, synthetic construct
  source 1..75: mol_type = other DNA
agagcaaaatgaccggacgcctggcgctggtgatgggcgcggaaggtgaaggtatgcgtcgcctgacccgtgaac

SEQ ID NO: 841275 - DNA, 75 bp, synthetic construct
  source 1..75: mol_type = other DNA
gtgctgaccaataacggcgcgttgcaggcgcgtttaacccagccgggtaaacgcaccgggaaaatctattatgtg

SEQ ID NO: 841276 - DNA, 75 bp, synthetic construct
  source 1..75: mol_type = other DNA
tctggacatccgggcagataaaaacatttcggtcacaggggcagaaatcagcgccggaggtcgcgcagcacttat

SEQ ID NO: 841277 - DNA, 75 bp, synthetic construct
  source 1..75: mol_type = other DNA
cttgcctcaaagcgctctcgccatggctgggacgtaagcacagggataatacgctgacattaaagagattcagtt

SEQ ID NO: 841278 - DNA, 75 bp, synthetic construct
  source 1..75: mol_type = other DNA
ggcctgacaataaaagggaacagcctgaacaacgccggcgggaaggtattcagcggcggtgatatgcttgctgat

SEQ ID NO: 841279 - DNA, 75 bp, synthetic construct
  source 1..75: mol_type = other DNA
ccacgctgggcgagacctgggaagaggctgtgggcgaaaaactcgatcaccaggtactgatggataaggttgtgc

SEQ ID NO: 841280 - DNA, 75 bp, synthetic construct
  source 1..75: mol_type = other DNA
gactctcagaaaaaccgttatgagatttatgtctggggctgggctcctggcgaagaagcttttctgattgacaag

SEQ ID NO: 841281 - DNA, 75 bp, synthetic construct
  source 1..75: mol_type = other DNA
ataatatgatggctgccgtttcggttgcgctgcagcctctggtcagagttgtaccgatgacggcagttgaatggg

SEQ ID NO: 841282 - DNA, 75 bp, synthetic construct
  source 1..75: mol_type = other DNA
aaatcaaacgtccggtgaaggtgcagccgattgcccgcgtctggtacaagggagatcaaaaacaagtacaacacg

SEQ ID NO: 841283 - DNA, 75 bp, synthetic construct
  source 1..75: mol_type = other DNA
ggcgtgttgtgttaccaggtcgataacctttcgcaagcagcgttggtcagtcatattcagcgcatcaatcaactc

SEQ ID NO: 841284 - DNA, 75 bp, synthetic construct
  source 1..75: mol_type = other DNA
atggcgcgttacgatctcgtagaccgactcaacactacctttcgccagatggaacaagagctggctacatttgcc

SEQ ID NO: 841285 - DNA, 75 bp, synthetic construct
  source 1..75: mol_type = other DNA
accgtcagtcgcaatctttttacggtgatcaggctgagcaatcgctgcaaaattaccacttcgatatgctgtttc

SEQ ID NO: 841286 - DNA, 75 bp, synthetic construct
  source 1..75: mol_type = other DNA
taacgtgccagacgagcgccagagcaccgaaacgccgaagtcttacgaaatggatgccgacgtaagaaaacgcat

SEQ ID NO: 841287 - DNA, 75 bp, synthetic construct
  source 1..75: mol_type = other DNA
gccggacaatatgccagaagcgcgtcagagcactgaaacgcctaagagctatgaaatggacgccgacgtgagaaa

SEQ ID NO: 841288 - DNA, 75 bp, synthetic construct
  source 1..75: mol_type = other DNA
caaccggcgatccatgacttactgcgcgcgctgatactgcctattcaggccgattatttgctggccgttggcacg

SEQ ID NO: 841289 - DNA, 75 bp, synthetic construct
  source 1..75: mol_type = other DNA
gggtgaccacgctggatggcgatggcctgttgcagggcgccggtgcactggcgcttgcaggcgacaccctctcac

SEQ ID NO: 841290 - DNA, 75 bp, synthetic construct
  source 1..75: mol_type = other DNA
tgttgctcagtaatgaatattttcatgttggacagcatgatcttctgttgctgaaaaatcaagcatcttcaatga

SEQ ID NO: 841291 - DNA, 75 bp, synthetic construct
  source 1..75: mol_type = other DNA
atgtacagcaccgctataaaccccaggcgcaaccgcttcgattaatcattccacggctgcacctgtatgttgcag

SEQ ID NO: 841292 - DNA, 75 bp, synthetic construct
  source 1..75: mol_type = other DNA
cgtacagcccggacggtgccgtttcagttaaccgcgattgaacagcggggcggtcgtcttcttgccgctctggcc

SEQ ID NO: 841293 - DNA, 75 bp, synthetic construct
  source 1..75: mol_type = other DNA
cagctgaagattttcccctggcgcttgcgacggccaagatcctgccgtggccgtgggatgaatcaagctaccgga

SEQ ID NO: 841294 - DNA, 75 bp, synthetic construct
  source 1..75: mol_type = other DNA
cgtcgctcagcctcagtgcaccggaactgaccagcagcggcgtacttgttggttccgccctgaatacacagtcac

SEQ ID NO: 841295 - DNA, 75 bp, synthetic construct
  source 1..75: mol_type = other DNA
catttttactaaacggtttggcggcaagtgaccttattctcacccctactccgccggcgcaagtcgatttccatt

SEQ ID NO: 841296 - DNA, 75 bp, synthetic construct
  source 1..75: mol_type = other DNA
agcaacgggagagctggcagccagagcgattgccggaatgctgtatccgggcgtgaaacagtcagacctcagtga

SEQ ID NO: 841297 - DNA, 75 bp, synthetic construct
  source 1..75: mol_type = other DNA
atgctgtggccgaaatggaagccggtggctacattttcaaaaagaaaccttctggtaatacgatgaaatacgcga

SEQ ID NO: 841298 - DNA, 75 bp, synthetic construct
  source 1..75: mol_type = other DNA
tattggtacagtccttgaaactgccgcccaggcaatgctaaataatctcgatgctgaaacactgcgagaagcggt

SEQ ID NO: 841299 - DNA, 75 bp, synthetic construct
  source 1..75: mol_type = other DNA
ttgaaggccgctaaggaagcaatcggcgaagtacttcctgctaatgcgacagagaaacaacgtcaggaatatctt

SEQ ID NO: 841300 - DNA, 75 bp, synthetic construct
  source 1..75: mol_type = other DNA
aagtatagggatatccataaagaaccttatgtgatttttgtcgttaatcttaaaggtggtgtatcaaaaacagtc

SEQ ID NO: 841301 - DNA, 75 bp, synthetic construct
  source 1..75: mol_type = other DNA
cgcaatatcaattcgacttcggcttgcgcccatcactcgcttacctgaaatcgaaaggcagagatctgggccgct

SEQ ID NO: 841302 - DNA, 75 bp, synthetic construct
  source 1..75: mol_type = other DNA
gcgcctgaaggcgaagagccggagcctggacacagcgcagaaggttgttgtgggtgctgcattgctggcaaaggt

SEQ ID NO: 841303 - DNA, 75 bp, synthetic construct
  source 1..75: mol_type = other DNA
tacgctaacgtcgcgtcatcattttttggtgccaagttccagcgtaatattgaagagctgctggttgcacccgta

SEQ ID NO: 841304 - DNA, 75 bp, synthetic construct
  source 1..75: mol_type = other DNA
ggtgcaaacagataccattaaaaatagtctgacgctcggctcgcatattctgaagaagattaagccggtgcataa

SEQ ID NO: 841305 - DNA, 75 bp, synthetic construct
  source 1..75: mol_type = other DNA
tggactgcagtaagaaatataattgatgacactaatgaagtgaccattgaattatcttataacctggcaatcaca

SEQ ID NO: 841306 - DNA, 75 bp, synthetic construct
  source 1..75: mol_type = other DNA
cacaaagtggcggatgttggtaagtacaacgccgggcaaaagatgatgttctggtcaatcatgagcatgattttc

SEQ ID NO: 841307 - DNA, 75 bp, synthetic construct
  source 1..75: mol_type = other DNA
atgaaaaccgtattcgcggtgcttcaacgatttctcagcagacagccaaaaatctctttttatgggatgggcgta

SEQ ID NO: 841308 - DNA, 75 bp, synthetic construct
  source 1..75: mol_type = other DNA
agcgccgggaccggtggcggtaatacttttgatggtgagtaccagcgaaaggatgatgaccgcgaccgccttgat

SEQ ID NO: 841309 - DNA, 75 bp, synthetic construct
  source 1..75: mol_type = other DNA
ttaccgccggtgcaaaagcatctgacagtgaagctgatgccgcatttgcgtttctcccggatgccgggcggcggt

SEQ ID NO: 841310 - DNA, 75 bp, synthetic construct
  source 1..75: mol_type = other DNA
gcggttaatggttgtcctcgccgttttctggggcgggggcatcgcgttgtttagcgttgcgcctgttcctttctc

SEQ ID NO: 841311 - DNA, 75 bp, synthetic construct
  source 1..75: mol_type = other DNA
atgaaaaccgtattcgcggtgcgtcgacgatttctcagcagacagccaaaaatctctttttatgggatgggcgca

SEQ ID NO: 841312 - DNA, 75 bp, synthetic construct
  source 1..75: mol_type = other DNA
tcggtttcgttcgtcgctttcttctgcggttagtggttgtcctcgccgttttatggggcgggggcatcgcgttgt

SEQ ID NO: 841313 - DNA, 75 bp, synthetic construct
  source 1..75: mol_type = other DNA
gtgttcctgctctctgacgcttccgtgtatatgaccggctccaccgtcaccgtggatggaggctggaccgcatgg

SEQ ID NO: 841314 - DNA, 75 bp, synthetic construct
  source 1..75: mol_type = other DNA
aatatatgcgcgtgcatcgcaccatcggttctacgcgtatggatatcaaaattgcccacgcgcgtattgaaaata

SEQ ID NO: 841315 - DNA, 75 bp, synthetic construct
  source 1..75: mol_type = other DNA
gcggcgctggccggatttgaaagtgaatacggcgtccatctttctgatgaggaaagcggtctggtcgcggtgatt

SEQ ID NO: 841316 - DNA, 75 bp, synthetic construct
  source 1..75: mol_type = other DNA
tgcttttattaccaggcttttttaccgatttcctcggtcttcttcttttattaccgccattgcaaaagcacctga

SEQ ID NO: 841317 - DNA, 75 bp, synthetic construct
  source 1..75: mol_type = other DNA
tccgaacgggacaaggttgatatcaataaaaacaacttcaacagcgtcatggctgagttttcgcctgcggttaat

SEQ ID NO: 841318 - DNA, 75 bp, synthetic construct
  source 1..75: mol_type = other DNA
cggcggatatgttggcaataaagttgttggtaagccaagtggtggaattatttcgcctgaatctaaagtaattca

SEQ ID NO: 841319 - DNA, 75 bp, synthetic construct
  source 1..75: mol_type = other DNA
gggccagcgccagttcgccaaccgcgaaaaatatcgtgaatattatcagggcaaatactcgctcaccgatgcgca

SEQ ID NO: 841320 - DNA, 75 bp, synthetic construct
  source 1..75: mol_type = other DNA
tcaatgttgcgaacaaagacaccttccctgtcttcccccacatgatgtgggggtttttttatcaatcacttacat

SEQ ID NO: 841321 - DNA, 75 bp, synthetic construct
  source 1..75: mol_type = other DNA
caatcgccggactcggtgtccgcgacatcatgggctactgcatcactgccctgctcttctccggtgtcattttcg

SEQ ID NO: 841322 - DNA, 75 bp, synthetic construct
  source 1..75: mol_type = other DNA
cgttcggtatgcagatggcgcttatcatcgttaccggtcatgcccttgccagctctgctccggtgaaaagcttgc

SEQ ID NO: 841323 - DNA, 75 bp, synthetic construct
  source 1..75: mol_type = other DNA
acgcctggtatgcgccgttctatgatctgattcaaaccgcgctaagttcgccgcataaagtcactatcgaacaat

SEQ ID NO: 841324 - DNA, 75 bp, synthetic construct
  source 1..75: mol_type = other DNA
tatgggcgtcagttttatcaacgccatcatgacgttgatcgccttcctgccggtgctggtaacgctctccgcgca

SEQ ID NO: 841325 - DNA, 75 bp, synthetic construct
  source 1..75: mol_type = other DNA
aaaatactgaataccgcagggaccacgcagggacagaatctcaccgtgcaggcggacagatgggcgaacagtggt

SEQ ID NO: 841326 - DNA, 75 bp, synthetic construct
  source 1..75: mol_type = other DNA
tgatcctcggtcaggatccttatcacggaccgggacaggcgcatggtctggcattttccgttcgccccggcattg

SEQ ID NO: 841327 - DNA, 75 bp, synthetic construct
  source 1..75: mol_type = other DNA
acgtgctggctgaagagaagcagcaaccctattttcttaatacccttcagaccgtcgccagcgagcggcagtccg

SEQ ID NO: 841328 - DNA, 75 bp, synthetic construct
  source 1..75: mol_type = other DNA
gaaagttgactggcccgcccactcggcgatgagcagccacgatgcgctgatggtggcgagcggcatcaccaccgt

SEQ ID NO: 841329 - DNA, 75 bp, synthetic construct
  source 1..75: mol_type = other DNA
atgagtaaaagcaaaatgattctgcgcaccaaattcatcgaccgtgcttgtcactggacggtggtaataagcttc

SEQ ID NO: 841330 - DNA, 75 bp, synthetic construct
  source 1..75: mol_type = other DNA
agcctgctgatccacgcggctgcgggtatcatcctgatccacgccatcctgatccatatgtatatggcattttgg

SEQ ID NO: 841331 - DNA, 75 bp, synthetic construct
  source 1..75: mol_type = other DNA
gtataaagagctggaaaatactattccgggcttcacccgccctaatcatggttatcttgaaagctgggcgcgtca

SEQ ID NO: 841332 - DNA, 75 bp, synthetic construct
  source 1..75: mol_type = other DNA
ggcgtttctggcggtactgaactgactgcgtctggctcggctaaccagatgatcaccagcatttctaccgcgatg

SEQ ID NO: 841333 - DNA, 75 bp, synthetic construct
  source 1..75: mol_type = other DNA
ctggaagaacctcacctatggtggcggttttacgatgacagacagtcagtggatacgcgcagtcaataacaaagg

SEQ ID NO: 841334 - DNA, 75 bp, synthetic construct
  source 1..75: mol_type = other DNA
tgtaagttacccgatctgcgcggtgtttttatccgtggctgggataacgggaagggacttgatggtgatcggaac

SEQ ID NO: 841335 - DNA, 75 bp, synthetic construct
  source 1..75: mol_type = other DNA
gccatactgggcacaggggagtaccacagaaatgcgtcccaaaaacattgcatttaactacattgttaaagccag

SEQ ID NO: 841336 - DNA, 75 bp, synthetic construct
  source 1..75: mol_type = other DNA
tgacgccgcaggcaaacaaattgctaaccgtctgacagcacagtccagcggtatgggtgtggcgctgagcaacat

SEQ ID NO: 841337 - DNA, 75 bp, synthetic construct
  source 1..75: mol_type = other DNA
atgaccaaacagcaggtgctgatgcagaccggcatcaccatgctgaaacagtccaacagcatgtccagcatggtt

SEQ ID NO: 841338 - DNA, 75 bp, synthetic construct
  source 1..75: mol_type = other DNA
ctttacccgtttctttgaccatcaggaacaggcagcgagagcgttcggatatatcactacagcaggaaatcttgg

SEQ ID NO: 841339 - DNA, 75 bp, synthetic construct
  source 1..75: mol_type = other DNA
tctccggtattctgtatggtttcgatccgacctggatttactggattggttcggcgctggcgttactgctggtgg

SEQ ID NO: 841340 - DNA, 75 bp, synthetic construct
  source 1..75: mol_type = other DNA
tactggtcgcaatacaggaagtggtacgctgtttgtttacgcctctggagggaatggtggttccgccgggggaga

SEQ ID NO: 841341 - DNA, 75 bp, synthetic construct
  source 1..75: mol_type = other DNA
tcccctaacgggcttgtaggccgcgacagtacaggggcgatactttcgtgccaatccggtcggtggtctggtggc

SEQ ID NO: 841342 - DNA, 75 bp, synthetic construct
  source 1..75: mol_type = other DNA
ggtatcctcagcttgcccgtgcttatcctggctgtaaattgcccgatctgcgcggtgtttttatccgtggctggg

SEQ ID NO: 841343 - DNA, 75 bp, synthetic construct
  source 1..75: mol_type = other DNA
aataatgcctggtatggctattgcgatacgacagaacacatcattggaaaaataactgtacatgccatttgccaa

SEQ ID NO: 841344 - DNA, 75 bp, synthetic construct
  source 1..75: mol_type = other DNA
gaactgccggaaggctcaatgttattaacgaaagaacccttttcttctaatgcgctatgggccagcacgggagcc

SEQ ID NO: 841345 - DNA, 75 bp, synthetic construct
  source 1..75: mol_type = other DNA
tatcaatggtcagagtgccacactgaaaagtgatattacgagtgaagacggctggctaatcaccagaaacaataa

SEQ ID NO: 841346 - DNA, 75 bp, synthetic construct
  source 1..75: mol_type = other DNA
ggtatgtcaataattatgcgtggggtaattatgagtcaggtggaacgatatctgttacgtgtctcaatatacctg

SEQ ID NO: 841347 - DNA, 75 bp, synthetic construct
  source 1..75: mol_type = other DNA
ctgtcgatggccgcctgtaaagcaatgatggatgccgccgccaatgtaccgttcagttcaatggttacggtgatg

SEQ ID NO: 841348 - DNA, 75 bp, synthetic construct
  source 1..75: mol_type = other DNA
atatgatcagtggtttccgctacggcttcctcggcattaatgatgtgccgctggtcactacttttggcgtactgg

SEQ ID NO: 841349 - DNA, 75 bp, synthetic construct
  source 1..75: mol_type = other DNA
atttcactgttttttgtgccgtttcaggtgcattcgtgggtattcgttgccttaaccctggtgctcacggcggtg

SEQ ID NO: 841350 - DNA, 75 bp, synthetic construct
  source 1..75: mol_type = other DNA
atactttcgtgccaatccggtatgtgggcaggttttgaatcctaccctgtcggaagccctataccgtggccatca

SEQ ID NO: 841351 - DNA, 75 bp, synthetic construct
  source 1..75: mol_type = other DNA
tcgtctttccacaggtgagtatttacagctggaaaaaacagccaccgcaggtacttcctgctcaccggacggact

SEQ ID NO: 841352 - DNA, 75 bp, synthetic construct
  source 1..75: mol_type = other DNA
ggcggtgattgcgccaacacatcaaatcttcagggctatgtgaacggcgctttcattggtatgaatgccagcaat

SEQ ID NO: 841353 - DNA, 75 bp, synthetic construct
  source 1..75: mol_type = other DNA
ctataacatcggaaaaaatattcgtaatttcagacttggtgtccatgcatattgtgcatggacgtatcttaatgg

SEQ ID NO: 841354 - DNA, 75 bp, synthetic construct
  source 1..75: mol_type = other DNA
gtcatgacaggtacaagaatgtacggcatcggagatggtgttgatgaagagcacgtcgatgcttactgttgccct

SEQ ID NO: 841355 - DNA, 75 bp, synthetic construct
  source 1..75: mol_type = other DNA
acctccgcacattttatcggtggcagaagtggaggttctatttattacaagccgattcagtgccctgccgggtac

SEQ ID NO: 841356 - DNA, 75 bp, synthetic construct
  source 1..75: mol_type = other DNA
taagatgttatcaaaagaatcttcaacagatagtgttctcgaaaagccagtcagagaattttctgagctaaatcc

SEQ ID NO: 841357 - DNA, 75 bp, synthetic construct
  source 1..75: mol_type = other DNA
aagtacgccctgaatggcttagctcaggtattggtgaaatgagggatggtgcacatgaagagccatcgaatgtgc

SEQ ID NO: 841358 - DNA, 75 bp, synthetic construct
  source 1..75: mol_type = other DNA
tggttcgaaatgggattgccatcgcggtactatttatcgctaccctgatcgttggtgctatcgtgaacttcgtga

SEQ ID NO: 841359 - DNA, 75 bp, synthetic construct
  source 1..75: mol_type = other DNA
aacagcattgccgattccaactcgatgattgccaccgacctgcgccagaaagtgtatgaactgatgcaggaaggt

SEQ ID NO: 841360 - DNA, 75 bp, synthetic construct
  source 1..75: mol_type = other DNA
gaagaagagatgtcgcgccttgcgctggggatgcgtactcaactgcaaaaaaatccgggagatatagaaggctgg

SEQ ID NO: 841361 - DNA, 75 bp, synthetic construct
  source 1..75: mol_type = other DNA
gctcaggcaatgctgaatgatctcgatgttgaaacattgcgagaagcagttattcgccccaccattattcctggt

SEQ ID NO: 841362 - DNA, 75 bp, synthetic construct
  source 1..75: mol_type = other DNA
gaagaaggcgttgagccccgcctgagtgcgagcatagggtttatgtccaaaatgaccagtaagcgcgatcacgaa

SEQ ID NO: 841363 - DNA, 75 bp, synthetic construct
  source 1..75: mol_type = other DNA
atgacggcttcgtagcaagccaatgggagtctttggttgctgaacaccttcctggttttaagccttctgaagtac

SEQ ID NO: 841364 - DNA, 75 bp, synthetic construct
  source 1..75: mol_type = other DNA
tttgccaagctgatttgttaagggtaaaaacgctcatagccacgccaacatcggtaattatcagatcgataaacc

SEQ ID NO: 841365 - DNA, 75 bp, synthetic construct
  source 1..75: mol_type = other DNA
gagttcgccctgaatggctaagctctggtatagggtcaatgagaccacagagcgcagaagagccatctaatgctc

SEQ ID NO: 841366 - DNA, 75 bp, synthetic construct
  source 1..75: mol_type = other DNA
gaagaaggtgtagagccaagactaagtgcaagtattggctttatgtctaaaatgaccagtaaacgcgatcatgaa

SEQ ID NO: 841367 - DNA, 75 bp, synthetic construct
  source 1..75: mol_type = other DNA
gggctgtatggatgggaaagatatatacccaaaatgatccaaccaaaaagtgttacaaaactattaaaaataact

SEQ ID NO: 841368 - DNA, 75 bp, synthetic construct
  source 1..75: mol_type = other DNA
ctgaaacgggatatcatcaaagccatgaacaaagcagccgcgctggatgaactgacagcatcgtttaactttacc

SEQ ID NO: 841369 - DNA, 75 bp, synthetic construct
  source 1..75: mol_type = other DNA
gctacgcgaagaaacgcgctatcttaatgttgactacgccgccgtgacgggcttacttgttcagttcgcccgtga

SEQ ID NO: 841370 - DNA, 75 bp, synthetic construct
  source 1..75: mol_type = other DNA
tctctggcgttggcgacatgatgttgcatccgttccatattcacggcacccagttccgtatcttgtcggaaaatg

SEQ ID NO: 841371 - DNA, 75 bp, synthetic construct
  source 1..75: mol_type = other DNA
atgcaacgtcgtgatttcttgaaatattccattgcgctgggcgtagcttcagccttgccgctgtggagccgcgca

SEQ ID NO: 841372 - DNA, 75 bp, synthetic construct
  source 1..75: mol_type = other DNA
ggtgaaggtgagcgagctgccggtgctgatgggcgagcgttttgaagtgctggtggaggttaacgacaacaaacc

SEQ ID NO: 841373 - DNA, 75 bp, synthetic construct
  source 1..75: mol_type = other DNA
agcaaatgccggtacaggcagatgatcgtgaaacattgcgtgatctgcttgcaactcgcgatgctggcggcatta

SEQ ID NO: 841374 - DNA, 75 bp, synthetic construct
  source 1..75: mol_type = other DNA
ggttgtatcccgtattactcgtgctgaaagcccggatctgattgccagtaacaaagccttccatcactggctgct

SEQ ID NO: 841375 - DNA, 75 bp, synthetic construct
  source 1..75: mol_type = other DNA
aatgtccgtgaatcaggcgggattatttttaccaccgtacaaaaatttgccccgcttgatggcgaacagactcac

SEQ ID NO: 841376 - DNA, 75 bp, synthetic construct
  source 1..75: mol_type = other DNA
ggaagaaaggattttcattgttagagttgttgttggtttttggtgttatagcagcaatcatagtagcggttttta

SEQ ID NO: 841377 - DNA, 75 bp, synthetic construct
  source 1..75: mol_type = other DNA
gacatcatgtggcaagttgagttttttgccgacgaaggggaagaaggtgaatgtttacctatgcttagcggtgaa

SEQ ID NO: 841378 - DNA, 75 bp, synthetic construct
  source 1..75: mol_type = other DNA
cgagaaaaacgaagtgcgtgatgccgcactgattgccgctgcacagaaagtcgagcactatgagatcgccagtta

SEQ ID NO: 841379 - DNA, 75 bp, synthetic construct
  source 1..75: mol_type = other DNA
aagacacacgcggaattcaccctgcagaaatcacgctggcgtccggtcgtcagcacggaaggagcccccgatgaa

SEQ ID NO: 841380 - DNA, 75 bp, synthetic construct
  source 1..75: mol_type = other DNA
ctggcgaacctggctgttcaccggtctgtcggacaaagtcacgccgcctgacggcagcgttatcccggaggaccg

SEQ ID NO: 841381 - DNA, 75 bp, synthetic construct
  source 1..75: mol_type = other DNA
caccttccagaacgaaatcaccgatcgcaacgtgatgggcgttccggcagtgttcgtaaacgggaaagagtttgg

SEQ ID NO: 841382 - DNA, 75 bp, synthetic construct
  source 1..75: mol_type = other DNA
actcgatccgaaggccaaatttagccagtcagaaaaaaattcgctgctgagtaaaattcttgataatgcggtcgt

SEQ ID NO: 841383 - DNA, 75 bp, synthetic construct
  source 1..75: mol_type = other DNA
tcattcatgggatgtttgcccgttcggcgggtaagccgggatttgattacacgggcttctcccgcgatccgctgg

SEQ ID NO: 841384 - DNA, 75 bp, synthetic construct
  source 1..75: mol_type = other DNA
ccggatgcgaaaaccgcgtctggctgggatataccgtggctgaaaacggtaaaatgcacttctttggcgacagcg

SEQ ID NO: 841385 - DNA, 75 bp, synthetic construct
  source 1..75: mol_type = other DNA
tctgttagagaaagcggaagatccacagaaactggttcgtctgatgatccaggagatggaagatacactggttga

SEQ ID NO: 841386 - DNA, 75 bp, synthetic construct
  source 1..75: mol_type = other DNA
tttaatagtattacttggggtaatggctttttcctgccaggataaatttgatgttcagcttaaaaatgggagaac

SEQ ID NO: 841387 - DNA, 75 bp, synthetic construct
  source 1..75: mol_type = other DNA
atgtctaaaaaaaacagttcaacgcaaaataaagaatttgtactaaacttccagacgcttcccacttttgcacag

SEQ ID NO: 841388 - DNA, 75 bp, synthetic construct
  source 1..75: mol_type = other DNA
atgacgaacccgcaattcgccggacatccgttcggcacaaccgtaacggcagagtcgttacacaacactttcgcg

SEQ ID NO: 841389 - DNA, 75 bp, synthetic construct
  source 1..75: mol_type = other DNA
gtgcatccttttgatatggctaaagcatcaaacatacctttaatttcatctggatctgttgcttttaataaacta

SEQ ID NO: 841390 - DNA, 75 bp, synthetic construct
  source 1..75: mol_type = other DNA
ggaaaaaaattaagaaactcagggttcttagcccgtttattattaattgatctggagcaagtacctgaaccatgc

SEQ ID NO: 841391 - DNA, 75 bp, synthetic construct
  source 1..75: mol_type = other DNA
atcttgggatacggaattaaaagaacttaaaaagcaatttagcaaagctgttcgccagaaggttgatgtagctga

SEQ ID NO: 841392 - DNA, 75 bp, synthetic construct
  source 1..75: mol_type = other DNA
ctggcagaaaagaaacagctgactcgccgtattgaacaagcgtcggcgcgtgaagttgaatggcaggaaaaagcc

SEQ ID NO: 841393 - DNA, 75 bp, synthetic construct
  source 1..75: mol_type = other DNA
gatcagatggaagccgaggctgaaagccataacttcggtaaacagaaatccctggatcagcaatttgctgacctg

SEQ ID NO: 841394 - DNA, 75 bp, synthetic construct
  source 1..75: mol_type = other DNA
ctggcagaaaagaaacaattatctcgccgtattgaacaggccagcgcgcaacaggcagagtggcaggaaaaagca

SEQ ID NO: 841395 - DNA, 75 bp, synthetic construct
  source 1..75: mol_type = other DNA
ttattgtcatttaataaataatgacattctttcatcattagactggccccctgaatctccagacaaccaatatca

SEQ ID NO: 841396 - DNA, 75 bp, synthetic construct
  source 1..75: mol_type = other DNA
acatcgtgaatgccaacatcaacgctctgttagagaaagcggaagatccgcagaaactggtgcgtctgatgatcc

SEQ ID NO: 841397 - DNA, 75 bp, synthetic construct
  source 1..75: mol_type = other DNA
gaaaacaaattgagcgaaactcgcgctcgccagcaggcattgatgttgcgtcaccaggcagcaaactcgtcgcgt

SEQ ID NO: 841398 - DNA, 75 bp, synthetic construct
  source 1..75: mol_type = other DNA
cgaccaggttctgcaggacaaactgcgcagcctgaaaaacgtcgacattattctgaatgcgcaaaccacggaagt

SEQ ID NO: 841399 - DNA, 75 bp, synthetic construct
  source 1..75: mol_type = other DNA
aatacagcaaagaacacgaatggctgcgtaaagaagacgacggcacttataccgttggtattaccgaacatgccc

SEQ ID NO: 841400 - DNA, 75 bp, synthetic construct
  source 1..75: mol_type = other DNA
ttctcagtgcggcataccgctgtttgccccctttgaaggcaacgcctccgcttctgtttccagcttcttcccaca

SEQ ID NO: 841401 - DNA, 75 bp, synthetic construct
  source 1..75: mol_type = other DNA
caggggcaacttggcgggaaacaaacagtgcagcatgtcgataagccagaatggaaaggtaaaacggcatttaag

SEQ ID NO: 841402 - DNA, 75 bp, synthetic construct
  source 1..75: mol_type = other DNA
attctgacccgtagcatgatgatcttcggtcaggggcgattcgttgccatccgtacgtgctggaagagatggaag

SEQ ID NO: 841403 - DNA, 75 bp, synthetic construct
  source 1..75: mol_type = other DNA
cagatggttcaaccatgctggataaacgttatgtcatcactaacggtaatcagctggcgattcaaaatgatttgc

SEQ ID NO: 841404 - DNA, 75 bp, synthetic construct
  source 1..75: mol_type = other DNA
tttgctcaatccacgcgatattgacattaatatggttaataagagttgtaacagctggagttctccgtatcagct

SEQ ID NO: 841405 - DNA, 75 bp, synthetic construct
  source 1..75: mol_type = other DNA
agtttgatctggtgatcaccgctaaagcgtacggcaacaacgccagccgaccgattccggtacgagtaggaaaag

SEQ ID NO: 841406 - DNA, 75 bp, synthetic construct
  source 1..75: mol_type = other DNA
gagacgctggcagtgaagcgtaatacgatggataacggcgcgacggtgctggacattctcggtggcgataactat

SEQ ID NO: 841407 - DNA, 75 bp, synthetic construct
  source 1..75: mol_type = other DNA
acaggatcgtaataacctgtttttcgtcattcgcggcgacaaaccacagcaagagacgctggcagtaaagcgtaa

SEQ ID NO: 841408 - DNA, 75 bp, synthetic construct
  source 1..75: mol_type = other DNA
aaatattaccctgtttgccagcgactattttactggcgatggtattaacgacgcggtgctctataccttaaccaa

SEQ ID NO: 841409 - DNA, 75 bp, synthetic construct
  source 1..75: mol_type = other DNA
gtggtttgcagccacgttaacggtgctggggctatttgtcgttttaaatatcaccctgtttgccagcgactattt

SEQ ID NO: 841410 - DNA, 75 bp, synthetic construct
  source 1..75: mol_type = other DNA
ttcgataacccaaccgatgccgatacgctggtcattgtgccgccagaaccagtctcaactaacgaaggaaacatt

SEQ ID NO: 841411 - DNA, 75 bp, synthetic construct
  source 1..75: mol_type = other DNA
ttacctacggcattatgctcggtgaaaaacccgccgtgctgtcggctatcgttaagtatcactgtacccaccgcg

SEQ ID NO: 841412 - DNA, 75 bp, synthetic construct
  source 1..75: mol_type = other DNA
tactgtatctgagcccgggatctggaaatggcttaacgcatcagcgataccagaccaaaccaatatccttgccct

SEQ ID NO: 841413 - DNA, 75 bp, synthetic construct
  source 1..75: mol_type = other DNA
gaaatatcaaaagtgcttggagttcgtacggaatggctttcagatggaactgggccaatgcgtgatgagggagtt

SEQ ID NO: 841414 - DNA, 75 bp, synthetic construct
  source 1..75: mol_type = other DNA
aagcctgccggatggcgaatgatttccagatcacccatgagctggctgatttgccgccggagttgtgggcgtacc

SEQ ID NO: 841415 - DNA, 75 bp, synthetic construct
  source 1..75: mol_type = other DNA
ttggtctgctgccgaacaccaactggctcgaaggcgcagtcgaacgtaaccgcatgggtgagattatcattgatg

SEQ ID NO: 841416 - DNA, 75 bp, synthetic construct
  source 1..75: mol_type = other DNA
ttgtcgtcaaacgacgcaaagccaaaagccacggagcagcacatggatcgtggaagattgcttatgccgacttta

SEQ ID NO: 841417 - DNA, 75 bp, synthetic construct
  source 1..75: mol_type = other DNA
cgctgcgtccacatctcaaaatcgatctggtgcaggaaggtttacgcattcagattatcgacagccagaatcgcc

SEQ ID NO: 841418 - DNA, 75 bp, synthetic construct
  source 1..75: mol_type = other DNA
gcgtttctcgacggtccggtagaagaagcctgccggatggcgaatgatttccagattactcatgagctggcggac

SEQ ID NO: 841419 - DNA, 75 bp, synthetic construct
  source 1..75: mol_type = other DNA
ctggccattatcctcgtgccatttaactttgcgcctatgcgtaagtcgatgatttccgcaccggtatttcgcggt

SEQ ID NO: 841420 - DNA, 75 bp, synthetic construct
  source 1..75: mol_type = other DNA
ggatatcactggtggcaaaggcattatgctcgggcaaagcaacttcctggcccgtgcttaccagggcgcaccgat

SEQ ID NO: 841421 - DNA, 75 bp, synthetic construct
  source 1..75: mol_type = other DNA
tatcagcacctgaaccgcctgagcgccaacctcgccctgctttctgatgtctcgatggctgtgctgggcggcagc

SEQ ID NO: 841422 - DNA, 75 bp, synthetic construct
  source 1..75: mol_type = other DNA
gtgatggatgctgcggcatcgctgattacctacggcattatgctcggcgaaaaaacctgccgtgctgtcggctat

SEQ ID NO: 841423 - DNA, 75 bp, synthetic construct
  source 1..75: mol_type = other DNA
ggatatcaccgggggtaaaggcattatgctcggtcagagcaacttcctggcacgtgcttaccagggggcaccgat

SEQ ID NO: 841424 - DNA, 75 bp, synthetic construct
  source 1..75: mol_type = other DNA
agaaacgagtgactggcaccagcgaacgacgagagcagatcattcagcgcctgcgtcagcaagggagtgtgcagg

SEQ ID NO: 841425 - DNA, 75 bp, synthetic construct
  source 1..75: mol_type = other DNA
acggtgccaaccagacgcttgccaatgaagtggaaggagctgctgatgctgatggtactggcgaagcgggagcta

SEQ ID NO: 841426 - DNA, 75 bp, synthetic construct
  source 1..75: mol_type = other DNA
gtaacaaacccctcggtctatggaacgtcgtttccatcggcattggggcaatggtgggggcggggatcttcgcgc

SEQ ID NO: 841427 - DNA, 75 bp, synthetic construct
  source 1..75: mol_type = other DNA
atgaaattcaatttatctaatttatccgcagtattactggcatcaggtatgctgatgtctactgcggtaaccgca

SEQ ID NO: 841428 - DNA, 75 bp, synthetic construct
  source 1..75: mol_type = other DNA
gttgagttgattcagcctggtcatcgggtgatcctcgattccgggactaccacttttgagattgctcgtctgatg

SEQ ID NO: 841429 - DNA, 75 bp, synthetic construct
  source 1..75: mol_type = other DNA
tcatcgatactcagcggatcgatatgatcattgtcgatgaaggcattcctgcggatagtctggaaggactgcgaa

SEQ ID NO: 841430 - DNA, 75 bp, synthetic construct
  source 1..75: mol_type = other DNA
cagccgattaaagacgccgtagaaaccgtttatcaacgacttgaaggctgggaagggaatggtggatttgcgcag

SEQ ID NO: 841431 - DNA, 75 bp, synthetic construct
  source 1..75: mol_type = other DNA
cgcgaactgcgcccgacacgactgctgattgtcgacgccacggatatggggctaaaccccggcgagatccgcatc

SEQ ID NO: 841432 - DNA, 75 bp, synthetic construct
  source 1..75: mol_type = other DNA
ttttccttggcatccagccggatatcgtcggcttttactacccgatgactcagcagattaaagatgcggtggaaa

SEQ ID NO: 841433 - DNA, 75 bp, synthetic construct
  source 1..75: mol_type = other DNA
acttcggacaggatttcacattttttgaagccttaagaacggcagacagattaatcaacggcctgtgttttcaat

SEQ ID NO: 841434 - DNA, 75 bp, synthetic construct
  source 1..75: mol_type = other DNA
aaggtagtgaaagctggttcattcgctaaatacactattctgcgcaaaattgacgactatccaacggatgttgat

SEQ ID NO: 841435 - DNA, 75 bp, synthetic construct
  source 1..75: mol_type = other DNA
aacgatatcatcggtagcaacgccagatgctttcgtgaaatcgctcttatcaatcaggttgattttgtaatcaac

SEQ ID NO: 841436 - DNA, 75 bp, synthetic construct
  source 1..75: mol_type = other DNA
gcaaccgattcaaaacagattgaagttgtcctgccggttgtgccttccaaccttttcactggtatcgacatagaa

SEQ ID NO: 841437 - DNA, 75 bp, synthetic construct
  source 1..75: mol_type = other DNA
gccgctgctgagtcatcaactgaacgttcagcaggtcatgctgaaaggggcggtgatccaactgacgccgcagac

SEQ ID NO: 841438 - DNA, 75 bp, synthetic construct
  source 1..75: mol_type = other DNA
agcaaggtattcaggggcaggggagcttccaggctcagtggcaagagccacataaacgcctttcatttaatcaaa

SEQ ID NO: 841439 - DNA, 75 bp, synthetic construct
  source 1..75: mol_type = other DNA
tgccggatctgtcagaaaatcgcggctggtcgtttgatatctccagtctgaaagtggcggacagtctgctggtgt

SEQ ID NO: 841440 - DNA, 75 bp, synthetic construct
  source 1..75: mol_type = other DNA
accgctactgagccatcaactgagcgttaagcaggtgatgctgaaaggcgcagtcattcaactgacgccgcagac

SEQ ID NO: 841441 - DNA, 75 bp, synthetic construct
  source 1..75: mol_type = other DNA
gatttcctcaaagaaacgccagtaccgctgcgggtttatggcaactggcagcaactcaattacagtctgcaagtg

SEQ ID NO: 841442 - DNA, 75 bp, synthetic construct
  source 1..75: mol_type = other DNA
cgcattccgccacaactggcaagggcaagcgcatgttgaaatgaccgacacgcgcatggaagggatgaacttcca

SEQ ID NO: 841443 - DNA, 75 bp, synthetic construct
  source 1..75: mol_type = other DNA
cgcaacggcaggtcagaaagtcatgaaagccacgcagctgtgtccacggtgacagcgggcgataacttcctcctt

SEQ ID NO: 841444 - DNA, 75 bp, synthetic construct
  source 1..75: mol_type = other DNA
cgtatgacagccgggaattatgtaaaacaggcgcaactattgttttgtatgaaactatcaagtttaaaatggaac

SEQ ID NO: 841445 - DNA, 75 bp, synthetic construct
  source 1..75: mol_type = other DNA
catcgtggtcaccgattccagtaagttcaatcgttccagtttacataagatcattgatactaaacgtatcgacat

SEQ ID NO: 841446 - DNA, 75 bp, synthetic construct
  source 1..75: mol_type = other DNA
atggagcaggatccacaacatcgtggttcgtttgagttctccgggcgcgttaatcgcgatcagcgcgatcttagc

SEQ ID NO: 841447 - DNA, 75 bp, synthetic construct
  source 1..75: mol_type = other DNA
cgccagtaccgctgcgggtttatggcaactggcagcaactcaattacagtctgcaagtggatcagttactgcgca

SEQ ID NO: 841448 - DNA, 75 bp, synthetic construct
  source 1..75: mol_type = other DNA
tgatactcctggtcgtgctggtggccgggttatctgcgttagtgttgctggtgaatccgaatgatttccgcgact

SEQ ID NO: 841449 - DNA, 75 bp, synthetic construct
  source 1..75: mol_type = other DNA
gggcagaagctggcaggcgcactgaaagttcacgttgatgaatacgacgttgatgtgatcgacagccagagcgcc

SEQ ID NO: 841450 - DNA, 75 bp, synthetic construct
  source 1..75: mol_type = other DNA
aatgcgggatactatcgaccgccgtatcgctaaacagaaagaacgcccactaaccagcaaaacgcggaaaatcgc

SEQ ID NO: 841451 - DNA, 75 bp, synthetic construct
  source 1..75: mol_type = other DNA
caaggagcgattcgttgccatccgtacgtgctggaagagatggaagcggcgaagaacaatgacgtcaacgcgttc

SEQ ID NO: 841452 - DNA, 75 bp, synthetic construct
  source 1..75: mol_type = other DNA
ttacatcatcggcgggccgaaaatggccgggcaaggctggcggatgctggtggagtgcctctcggtaggccgcgg

SEQ ID NO: 841453 - DNA, 75 bp, synthetic construct
  source 1..75: mol_type = other DNA
tggaagagaaaaaactatctagattaaaaggagcaaagatacatttaacctctatgttctcaaaagggttaattt

SEQ ID NO: 841454 - DNA, 75 bp, synthetic construct
  source 1..75: mol_type = other DNA
aatagggaaaatagcgtcagattttgagtttcatgccgagtggcttgaagatggcatgggcatcgcccgtaaagt

SEQ ID NO: 841455 - DNA, 75 bp, synthetic construct
  source 1..75: mol_type = other DNA
gcggcgatggcggcaagctctatgacgattttcgcgataagcaaattgtaggcatcggttggtctcagctggctc

SEQ ID NO: 841456 - DNA, 75 bp, synthetic construct
  source 1..75: mol_type = other DNA
gtgctttttgactgtgaaatacacgatttactgcaaaaggttccagcttcgcagaatcgtacagagaaaaattaa

SEQ ID NO: 841457 - DNA, 75 bp, synthetic construct
  source 1..75: mol_type = other DNA
tgacgcttattggtgcagttctcctgcctctgacaaacagttttcagaatgtgatggctatatcagatccagacg

SEQ ID NO: 841458 - DNA, 75 bp, synthetic construct
  source 1..75: mol_type = other DNA
gctccattctggcggtgtgcgccatgaccgcggcgtacgtgattaaaggcgacaactttaccaccgtcgacccga

SEQ ID NO: 841459 - DNA, 75 bp, synthetic construct
  source 1..75: mol_type = other DNA
gaagaggcgttggtggatgtgattgccgccgacccgattcatcagcggatctgtaaagagctgggtaaaaatctg

SEQ ID NO: 841460 - DNA, 75 bp, synthetic construct
  source 1..75: mol_type = other DNA
cagctttacctcgcctccgccgttctgaaacgttatgacgacgaaggccgcaatgaagccaacctgccgctggtg

SEQ ID NO: 841461 - DNA, 75 bp, synthetic construct
  source 1..75: mol_type = other DNA
tgcccgaaatgccatacgaacgtgtggggaaagccgggcctgatcctgtactgtggtggcgaacactgcggaaag

SEQ ID NO: 841462 - DNA, 75 bp, synthetic construct
  source 1..75: mol_type = other DNA
aggtatcgttctttggttaattctctaatggggtctgcaacagtagtcaaaaatatccgtgccagtggagaatca

SEQ ID NO: 841463 - DNA, 75 bp, synthetic construct
  source 1..75: mol_type = other DNA
tcgtgcgccattctcaacatcctttagatgaaaaacaattagggaaggtgcgaataagcggggaaattcttctcg

SEQ ID NO: 841464 - DNA, 75 bp, synthetic construct
  source 1..75: mol_type = other DNA
aatcaactacaacattgatgaaccgagcagttccggtaaaacattatctattgcctttgttaatcagcgccaata

SEQ ID NO: 841465 - DNA, 75 bp, synthetic construct
  source 1..75: mol_type = other DNA
ataaatactggcattgatcttgaaatgtcctggctaaattatgtgttgcttggcaaggtttatgaaatgaagggg

SEQ ID NO: 841466 - DNA, 75 bp, synthetic construct
  source 1..75: mol_type = other DNA
atggcccgctgtttaaaggcaaacgtgtggcggtgattggcggcggtaactccggtgtggaagcggcaatcgacc

SEQ ID NO: 841467 - DNA, 75 bp, synthetic construct
  source 1..75: mol_type = other DNA
cgtaacgtgatgggcgttccggcagtgttcgtaaacgggaaagagtttggtcagggccgcatgacgttgactgaa

SEQ ID NO: 841468 - DNA, 75 bp, synthetic construct
  source 1..75: mol_type = other DNA
atgtattcagaaacgcgtaacatgaccccgtttggcgacagcgattatgcagttgcgaacaaaacccagaacttt

SEQ ID NO: 841469 - DNA, 75 bp, synthetic construct
  source 1..75: mol_type = other DNA
aagctggccaccctgcgtcttggttttgacattcttacccggtcaatgaatgtcgtcagggtgttacctgcgcta

SEQ ID NO: 841470 - DNA, 75 bp, synthetic construct
  source 1..75: mol_type = other DNA
gcccgcagtaaaaaaacgccgcgtgcgctgtattttttatcgttttccataccggaagacggtctgattcgcatg

SEQ ID NO: 841471 - DNA, 75 bp, synthetic construct
  source 1..75: mol_type = other DNA
aagactaatatcacttggtgacgaggataaagatcctgaagggatgcttgagccattccgtgtatttattgatta

SEQ ID NO: 841472 - DNA, 75 bp, synthetic construct
  source 1..75: mol_type = other DNA
gatgataaatcattgaatcgtgccagtgagttattaggtgagattcttgaatcatcgcctgattttatctatgcg

SEQ ID NO: 841473 - DNA, 75 bp, synthetic construct
  source 1..75: mol_type = other DNA
cagcccgaaaccgcgccagcgggttcggcggagactggcaggtgcgccagcaactgcctgtcggagtcgggcctg

SEQ ID NO: 841474 - DNA, 75 bp, synthetic construct
  source 1..75: mol_type = other DNA
tgggggtgtcagttgctgaggccagaggcaaaatgcgcccgatggaggatgtgctgcttgatctctataaggcga

SEQ ID NO: 841475 - DNA, 75 bp, synthetic construct
  source 1..75: mol_type = other DNA
gtttgaacgggcagcttatatccgtggctgaagaatctgttttctgtttgggtgattttattttgcccttcaatg

SEQ ID NO: 841476 - DNA, 75 bp, synthetic construct
  source 1..75: mol_type = other DNA
atgaaaaactggtcagctgagcatacgagagaggtgaagaagtggctgaatatagatacatatcgaggattcgaa

SEQ ID NO: 841477 - DNA, 75 bp, synthetic construct
  source 1..75: mol_type = other DNA
cttcaaaccttaccatgaagaatttgaagcgaaggccgtaagcctctacatcgacaggatcttcaatggaaatcc

SEQ ID NO: 841478 - DNA, 75 bp, synthetic construct
  source 1..75: mol_type = other DNA
ctgccttcaagtcgtacctggtcgcaggagctgggggtgtctcgatccactgtcgaaaatgcgtatgctgagctg

SEQ ID NO: 841479 - DNA, 75 bp, synthetic construct
  source 1..75: mol_type = other DNA
gacgggcgggatccctgatgtcattcagaagaatgtgacagggacgctgttacccgtgggggatgtgtctgcatg

SEQ ID NO: 841480 - DNA, 75 bp, synthetic construct
  source 1..75: mol_type = other DNA
atatgctgtcaccgcttcagtattgtcagacaaaaaacctacatcacccgtaagaccagaacgttttccctgaat

SEQ ID NO: 841481 - DNA, 75 bp, synthetic construct
  source 1..75: mol_type = other DNA
aaattaaatctgaatgtttcagattttcttactaaggaaatgaaatttacatggaatgaggcgaaatcttatctt

SEQ ID NO: 841482 - DNA, 75 bp, synthetic construct
  source 1..75: mol_type = other DNA
tttttatgtctatgtgctattttaattttaatatattgttttggattgttttacgaacaaagagatgttatatta

SEQ ID NO: 841483 - DNA, 75 bp, synthetic construct
  source 1..75: mol_type = other DNA
ccctgaaagccgcactacctcagtggcgtaaggtcagaggtatcgaggctgacactactgactcgatccgcttcg

SEQ ID NO: 841484 - DNA, 75 bp, synthetic construct
  source 1..75: mol_type = other DNA
agcttgaacaaggttatgcggaaggagaggttagtattccggctgtaaccattaacgaaaatgggcgtagcgtca

SEQ ID NO: 841485 - DNA, 75 bp, synthetic construct
  source 1..75: mol_type = other DNA
gaactcaaacagcagttcgcccaggagcgagcagaacgtagcggcgcaactcaggaacaggccaacagcagcggc

SEQ ID NO: 841486 - DNA, 75 bp, synthetic construct
  source 1..75: mol_type = other DNA
gtttgaacggtcagcttatttcagtctctgaagaatctgttttctgtttaggggattttattttgcccttcaatg

SEQ ID NO: 841487 - DNA, 75 bp, synthetic construct
  source 1..75: mol_type = other DNA
acggctgtttgatacggggattgcaccacttctacaaaaagagatgggcgctgtcctgtggaccccggagaaggg

SEQ ID NO: 841488 - DNA, 75 bp, synthetic construct
  source 1..75: mol_type = other DNA
gaaagatttcgatcgcacaatggtcatcgacgaacgaacggaagtggttgccagaaccattactcactacctgaa

SEQ ID NO: 841489 - DNA, 75 bp, synthetic construct
  source 1..75: mol_type = other DNA
gacggggatatggatcctatcattatccattcccactctaatattcaggacggggtggttattcactcaaaaagc

SEQ ID NO: 841490 - DNA, 75 bp, synthetic construct
  source 1..75: mol_type = other DNA
cagtttctgggtgggcacctggtggctttaccggaagattgttgaccggaagggtaacgtatttgaagggattgc

SEQ ID NO: 841491 - DNA, 75 bp, synthetic construct
  source 1..75: mol_type = other DNA
ttcagccgtaataaaaatggcacttatgatattgggcctatgcagatcaattcgtccaacctgccggaaatacgc

SEQ ID NO: 841492 - DNA, 75 bp, synthetic construct
  source 1..75: mol_type = other DNA
ccaaattggcttaaccgccacgccaaaagagacgcatgaagtctccagcacggattacttcggcgatccggttta

SEQ ID NO: 841493 - DNA, 75 bp, synthetic construct
  source 1..75: mol_type = other DNA
ttaaaaatgattacggggtgagtatcgtaaaaaagcggcccggcaagtcctcgcgcaaagtccggcccccaaaat

SEQ ID NO: 841494 - DNA, 75 bp, synthetic construct
  source 1..75: mol_type = other DNA
atgacacaaacaagttacagcaaactatcccagcgtgacgttgatcgcgcagaaacagatttactcatcaacctg

SEQ ID NO: 841495 - DNA, 75 bp, synthetic construct
  source 1..75: mol_type = other DNA
tgtcacagcgcgatatcgatcgcgctgaaacggatttacttatcaacctgtcagctctgacgcaaaggggactgg

SEQ ID NO: 841496 - DNA, 75 bp, synthetic construct
  source 1..75: mol_type = other DNA
caggggcgcgtggcggaagcgatttttgcgaactgcgcggaactggataacgaccagcttaacgagatcatcgag

SEQ ID NO: 841497 - DNA, 75 bp, synthetic construct
  source 1..75: mol_type = other DNA
ttagtcaagcggaggccgaaagactggagccggttcccggtgcggccatgatctccataactgacccagacaagt

SEQ ID NO: 841498 - DNA, 75 bp, synthetic construct
  source 1..75: mol_type = other DNA
tgcatacccactatgccaccgggcagcaggccgaagccctggttgaacacggagatatccgttgccttgtagtgg

SEQ ID NO: 841499 - DNA, 75 bp, synthetic construct
  source 1..75: mol_type = other DNA
cgccatcgataaaaatactggcgttaacctttttattatttgtcggcgtattgttggttgccgatagcctcaata

SEQ ID NO: 841500 - DNA, 75 bp, synthetic construct
  source 1..75: mol_type = other DNA
ttggcttttatgagttttcctgatccggatgtcagtatgaatcgctattatagctggctgatgaatgtgttaatt

SEQ ID NO: 841501 - DNA, 75 bp, synthetic construct
  source 1..75: mol_type = other DNA
tcacgtcgctttataaccagggatgtttaggggagtttgtcaatgcgcttgtggaaaaggaggacatttatctga

SEQ ID NO: 841502 - DNA, 75 bp, synthetic construct
  source 1..75: mol_type = other DNA
atgagtttttataaaaagtgtttgattatatttggtgttgtggctgttttgctgacctcatgggcttttatgcgt

SEQ ID NO: 841503 - DNA, 75 bp, synthetic construct
  source 1..75: mol_type = other DNA
ctggaaaaacaaggcagtaataagtcgcgcattctggatgccacgattttcctggccgataaaaatgattttgca

SEQ ID NO: 841504 - DNA, 75 bp, synthetic construct
  source 1..75: mol_type = other DNA
acgctggctggtctctggtgtgtgctttcttctgtgcttgcagaccaggtggcacggcttaccgggcagggataa

SEQ ID NO: 841505 - DNA, 75 bp, synthetic construct
  source 1..75: mol_type = other DNA
tgcgccggtggtggtgcgtgcaccgggttaccgtgctggcagaacgatgtactggttgtcatgggggcgggtatt

SEQ ID NO: 841506 - DNA, 75 bp, synthetic construct
  source 1..75: mol_type = other DNA
cgcaatccatcctggcaaaagcgttccgtggtgagctcaccgcccagtggcgggccgaaaacccggatttgatca

SEQ ID NO: 841507 - DNA, 75 bp, synthetic construct
  source 1..75: mol_type = other DNA
atcgatcttggtgctgatccgcatagctgtgatgacggtatccacgctgccgcaactggcgcaatctggttgggg

SEQ ID NO: 841508 - DNA, 75 bp, synthetic construct
  source 1..75: mol_type = other DNA
cagccgcagtatcagcagccacaacagccagttgcgccacagccgcaggataccctgcttcatccgctgttgatg

SEQ ID NO: 841509 - DNA, 75 bp, synthetic construct
  source 1..75: mol_type = other DNA
atgcgtgtttataaaaagtgtttgattatatttggtgttgtggttgttttgctgacctcatgggcttttatgcgt

SEQ ID NO: 841510 - DNA, 75 bp, synthetic construct
  source 1..75: mol_type = other DNA
tgtgtatatgctcaggtattatgattatattctgataacgtctggttgttatgttattctgttttttttgtgggt

SEQ ID NO: 841511 - DNA, 75 bp, synthetic construct
  source 1..75: mol_type = other DNA
gctgccgcggtgagtggcaacctaacggaagcatggcgcagaaaaaacaattttaatttcgataactgggagaat

SEQ ID NO: 841512 - DNA, 75 bp, synthetic construct
  source 1..75: mol_type = other DNA
aggaggccctgaagctggcccaccagtggcgcttcgggcgtaaaagcgagcgcctcccggccagccagaaaccac

SEQ ID NO: 841513 - DNA, 75 bp, synthetic construct
  source 1..75: mol_type = other DNA
gaaggggcaagatttccgccacgtaggcggtgatgagctggataaactgctggcagaaaaagaaccgaaaaagta

SEQ ID NO: 841514 - DNA, 75 bp, synthetic construct
  source 1..75: mol_type = other DNA
atggacagtctcaatcttaataaacatatttccggccagttcaatgccgaactggaaagcatccgcacgcaggtg

SEQ ID NO: 841515 - DNA, 75 bp, synthetic construct
  source 1..75: mol_type = other DNA
gcaagtgagtatgaaaccggtgaacagtgggataaacccaacggctgggcgccattacaatggatggcgattcag

SEQ ID NO: 841516 - DNA, 75 bp, synthetic construct
  source 1..75: mol_type = other DNA
tctgcgcggactgtggcggagagatccccgccgcacgtcttgttgctgtgccggatgccatccgttgtgtgaact

SEQ ID NO: 841517 - DNA, 75 bp, synthetic construct
  source 1..75: mol_type = other DNA
gatcgatgaagcctgcgtgcgcattatcgccaaacgtcagccgacggcgagcgacctgcgactggttatggtgat

SEQ ID NO: 841518 - DNA, 75 bp, synthetic construct
  source 1..75: mol_type = other DNA
gaaaggtcaggatttccgtcacgtcggtggcgatgagctggataaactgctggcagaaaaagatagcgataaata

SEQ ID NO: 841519 - DNA, 75 bp, synthetic construct
  source 1..75: mol_type = other DNA
gccagcctttctggtgtgccggatacattccggtatcatctgtctcaccgtattcgtcgcgtggttgggaatgaa

SEQ ID NO: 841520 - DNA, 75 bp, synthetic construct
  source 1..75: mol_type = other DNA
ttttgccctcgtcaccgccaaaaatacgtcctttatcacatttcttcgatttatcctgatattttaccggattac

SEQ ID NO: 841521 - DNA, 75 bp, synthetic construct
  source 1..75: mol_type = other DNA
ctggagacaggattgcaggtgagcgcactggacggtctgttctggttcggcagtcagcgcattgcggcagatatc

SEQ ID NO: 841522 - DNA, 75 bp, synthetic construct
  source 1..75: mol_type = other DNA
ccagcccgcaccgtgctgcgcgcgctggatattgtaaagcgtgattatgaaaagaagttacagagcgatgatgag

SEQ ID NO: 841523 - DNA, 75 bp, synthetic construct
  source 1..75: mol_type = other DNA
atgactaagaaaataaaatgtgattatcacctttgcaataaagaaattgaagaaagcaaaatcattacaagacca

SEQ ID NO: 841524 - DNA, 75 bp, synthetic construct
  source 1..75: mol_type = other DNA
cttcatttcatgcgtggagttatcccaacgacggaaatgaaaaaatattgtagtgaaatatgtgccgaaaaagac

SEQ ID NO: 841525 - DNA, 75 bp, synthetic construct
  source 1..75: mol_type = other DNA
agcccaccgacgctgttgcttaacccgccagcgtcggtggcacagcaggcgttaagccgctggcaggcgctcagc

SEQ ID NO: 841526 - DNA, 75 bp, synthetic construct
  source 1..75: mol_type = other DNA
aagaagctgaagagtgggcgcaacagttgcgtttgcaggggtatcagcgtttggcaacatttaccggtgatacac

SEQ ID NO: 841527 - DNA, 75 bp, synthetic construct
  source 1..75: mol_type = other DNA
tcaccacttcgccgctatcgccggtgctggtccgctggtgggtccggttctcgccgcgcagatgggctacctgcc

SEQ ID NO: 841528 - DNA, 75 bp, synthetic construct
  source 1..75: mol_type = other DNA
gcgtaaaagcactatcctgccgcgtgtagcgcaactcgcagaaagattgcatcagaaagcgcaggccggtgaacg

SEQ ID NO: 841529 - DNA, 75 bp, synthetic construct
  source 1..75: mol_type = other DNA
ccgccgacccgattcatcagcggatctgtaaagagctgggcaaaaacctgccgtttacccgtctggatgaactgg

SEQ ID NO: 841530 - DNA, 75 bp, synthetic construct
  source 1..75: mol_type = other DNA
gcattacctgtgcgctgatcccgaccaccacgccgggcgtggaaattggtcgtcgccacttcccgctgaacgtac

SEQ ID NO: 841531 - DNA, 75 bp, synthetic construct
  source 1..75: mol_type = other DNA
ggtggcagaaagtggcgaagagctggatgatatatttgcatggcaggaatcgtgcaagctatcgaaaacactgac

SEQ ID NO: 841532 - DNA, 75 bp, synthetic construct
  source 1..75: mol_type = other DNA
actatccagatggcacgctggcattcaaatacggttaccattcactcaaatatcaggtgttcgacaaactggaat

SEQ ID NO: 841533 - DNA, 75 bp, synthetic construct
  source 1..75: mol_type = other DNA
ggtgctgaaggacttgtcagccgcaaacgcggccagcccagcaaccgccggttgaccgaatctctcaaactacga

SEQ ID NO: 841534 - DNA, 75 bp, synthetic construct
  source 1..75: mol_type = other DNA
gctgtttatgggtatctacatgcgctttatccgtccggggcgtgtgggtgaagtctctgtcattggtatcgtgct

SEQ ID NO: 841535 - DNA, 75 bp, synthetic construct
  source 1..75: mol_type = other DNA
ggaagcaaatctggaactcaatttggtcgagtcctgcacgatattggtgttgagcttatctgtgcgaacagccct

SEQ ID NO: 841536 - DNA, 75 bp, synthetic construct
  source 1..75: mol_type = other DNA
cttactcacgtcgcaggccccgtgttcatcagcccagatattggcgtgactgcttgggagaacttgttcagattg

SEQ ID NO: 841537 - DNA, 75 bp, synthetic construct
  source 1..75: mol_type = other DNA
agcggtcccagctcaacagcggacattgagcttatcaaagtcgttggagttcacggcccggtgaaggcggtgtac

SEQ ID NO: 841538 - DNA, 75 bp, synthetic construct
  source 1..75: mol_type = other DNA
tccgtacgtgctggaagagatggaagcggcgaagaacaatgacgttaacgcgttcgataaactgctgttcaaaca

SEQ ID NO: 841539 - DNA, 75 bp, synthetic construct
  source 1..75: mol_type = other DNA
agcagtctgattttgctcgcctggacagccgccctcggcgttgctggtctgtggtcggcgtgggtactggtgcct

SEQ ID NO: 841540 - DNA, 75 bp, synthetic construct
  source 1..75: mol_type = other DNA
tggccggaatgctgttggtttctgcatcggtcaatgcaatgagcatcagcggtcaggcgggtaaagaatacacca

SEQ ID NO: 841541 - DNA, 75 bp, synthetic construct
  source 1..75: mol_type = other DNA
ttcagcatgttgacaaaacaacatggcagggcaaaacggcatttaaagatacggtcatcgacatggcgcgttaca

SEQ ID NO: 841542 - DNA, 75 bp, synthetic construct
  source 1..75: mol_type = other DNA
tgcgctgggctggatcctgcgccgtcgtcgccatcatccgcaccattttggttacagcctgctggcgctcttact

SEQ ID NO: 841543 - DNA, 75 bp, synthetic construct
  source 1..75: mol_type = other DNA
agaaagatcactatctgccgcgtctggcgcgtggtcaggaaatcccttgctttgcactgaccagcccggaagcgg

SEQ ID NO: 841544 - DNA, 75 bp, synthetic construct
  source 1..75: mol_type = other DNA
gctggaacaggcgttaggaaatttactggataacgccatcgattttactcccggtaatggctgcattacgcttag

SEQ ID NO: 841545 - DNA, 75 bp, synthetic construct
  source 1..75: mol_type = other DNA
acaacattgctcaggctctgggtcgcccgttgcgactcgaaccgcaagcagaagatgtgccgcttaacaactatg

SEQ ID NO: 841546 - DNA, 75 bp, synthetic construct
  source 1..75: mol_type = other DNA
tgtcgagaatatcgctctggcggagcaggcgaaagttggcgttgtgtatgctgaatatggcttaacagagtcggg

SEQ ID NO: 841547 - DNA, 75 bp, synthetic construct
  source 1..75: mol_type = other DNA
atgaaaaaaattgcgctagcaggtctggccggaatgctgttggtttctgcatcggtcaatgcaatgagcatcagc

SEQ ID NO: 841548 - DNA, 75 bp, synthetic construct
  source 1..75: mol_type = other DNA
ggtcgcccgtttgtttaacggcgaagtcacgctgcgcaacgtgcaggaaggtggcgtgctggcctcgcttcgact

SEQ ID NO: 841549 - DNA, 75 bp, synthetic construct
  source 1..75: mol_type = other DNA
tttgtcaaagaagttaaaccgggcgtgcgaagagcaacggaggggacgttgatcgacaccgcaacgttgctggcg

SEQ ID NO: 841550 - DNA, 75 bp, synthetic construct
  source 1..75: mol_type = other DNA
ggctggagagtttaagcattccgaaatagcaactatctcattccctctaaaacttaaaaaggtctatcaaattga

SEQ ID NO: 841551 - DNA, 75 bp, synthetic construct
  source 1..75: mol_type = other DNA
attctctggaacctattgatgccccccccctattctttttcagtggtttgaagcaaggccagagcgatacgaaaa

SEQ ID NO: 841552 - DNA, 75 bp, synthetic construct
  source 1..75: mol_type = other DNA
gacgcgacccatgcactgccaattcaggtactccgtaatgatatccgcgtaattgctgcgggtaacggttgtact

SEQ ID NO: 841553 - DNA, 75 bp, synthetic construct
  source 1..75: mol_type = other DNA
attattgccgacagtcgcctggggatgtttagtcaaatccgtacctatatggataccgccgtcagtcctttctac

SEQ ID NO: 841554 - DNA, 75 bp, synthetic construct
  source 1..75: mol_type = other DNA
atccagtttgccagcgatgttatgttgacgcgctgtgaactgaccagcgaggcgcaggccgcagaagctgcaata

SEQ ID NO: 841555 - DNA, 75 bp, synthetic construct
  source 1..75: mol_type = other DNA
cgtatgtccacgaaacaaatccagccctggtaaaccgcaccactctttggggtacagcaatcaacgatgtgcatc

SEQ ID NO: 841556 - DNA, 75 bp, synthetic construct
  source 1..75: mol_type = other DNA
cgcgcaacggtgagaactatttcactcgccttcgcctgacacgttcgaaagaaggtgcgattgacatgttgagcg

SEQ ID NO: 841557 - DNA, 75 bp, synthetic construct
  source 1..75: mol_type = other DNA
ggctgcggcaggcgatttagcgtatcgctgtatcaaacgtgcaacggctctggccttatcaggcgaggttaaagc

SEQ ID NO: 841558 - DNA, 75 bp, synthetic construct
  source 1..75: mol_type = other DNA
atcacgccgcaggcagagttacgcgtcattcaaaaggtgtgcgacgcccattttgctcccggcgtgattaacgtg

SEQ ID NO: 841559 - DNA, 75 bp, synthetic construct
  source 1..75: mol_type = other DNA
tcatgatcaaatacaatcgccggattcagcgccgaaatggaatggacgaattatatcagtggacgcaacctaagc

SEQ ID NO: 841560 - DNA, 75 bp, synthetic construct
  source 1..75: mol_type = other DNA
gtgattcaggcgcgtccgactgcagggctgcaacgtttgcgttatctgctgctgctgtgggggcagatcgtaacg

SEQ ID NO: 841561 - DNA, 75 bp, synthetic construct
  source 1..75: mol_type = other DNA
cgcctgctgcgccgacacagcccgctgctaatcgctctccacaaagggctacgccgccgcaaagtggtgctcaac

SEQ ID NO: 841562 - DNA, 75 bp, synthetic construct
  source 1..75: mol_type = other DNA
aagtttctgggttggaacatggtggctctatagaaaaattgttgatcgcaagggcaatgtgtttgaagggattgc

SEQ ID NO: 841563 - DNA, 75 bp, synthetic construct
  source 1..75: mol_type = other DNA
cgccagcagcggaacaacctgtgcaacaaccttactacgctcctgcggcggaacaacctgttcagcagccgtatt

SEQ ID NO: 841564 - DNA, 75 bp, synthetic construct
  source 1..75: mol_type = other DNA
tcttcatccacttattatcggatacatacagtgctgagaaacaactaacaaaggcactgtctaaacttagtcgct

SEQ ID NO: 841565 - DNA, 75 bp, synthetic construct
  source 1..75: mol_type = other DNA
atgataatttctaaaaaacagcttattggggtggtagcgatcggtattattttgactggcgttgtcttttttatc

SEQ ID NO: 841566 - DNA, 75 bp, synthetic construct
  source 1..75: mol_type = other DNA
acagataagttaccgctggaattttcttcatgggtcgtgagaatgcgtacgccagaagcgttagtagacgctatt

SEQ ID NO: 841567 - DNA, 75 bp, synthetic construct
  source 1..75: mol_type = other DNA
ttttgataaaaatcattaggggattcatcagtgttctgcttcagtttcaaaatgctatgaaagaaaaaacattag

SEQ ID NO: 841568 - DNA, 75 bp, synthetic construct
  source 1..75: mol_type = other DNA
ggaaaaagctactgatgtcaaattaacagatctggcatttaataacgttaataaaaaagctcaggataactcctg

SEQ ID NO: 841569 - DNA, 75 bp, synthetic construct
  source 1..75: mol_type = other DNA
aactcctgaaagaaacactggaagaggaaaaagctactgatgtcaaattaacagatctggcatttaataacgtta

SEQ ID NO: 841570 - DNA, 75 bp, synthetic construct
  source 1..75: mol_type = other DNA
ctgatagcacgtctggcgcaaaaagcccgtgccgcgggtatccacctcgtactggcaactcagcgtccatcggtt

SEQ ID NO: 841571 - DNA, 75 bp, synthetic construct
  source 1..75: mol_type = other DNA
ccgcagccgcaacagccagttgcgccacagccgcaggataccctgcttcatccgctgttgatgcgtaatggcgac

SEQ ID NO: 841572 - DNA, 75 bp, synthetic construct
  source 1..75: mol_type = other DNA
tacaacgatgatgaaatcgatgcgatgcagcaggatgaactggcacgtcagttcgcccagacacagcagcaacgc

SEQ ID NO: 841573 - DNA, 75 bp, synthetic construct
  source 1..75: mol_type = other DNA
ccgttattctgcccatcactggcatgatgttggtgcagcactgcgagaagtgaataggatattgaaacctggcgg

SEQ ID NO: 841574 - DNA, 75 bp, synthetic construct
  source 1..75: mol_type = other DNA
atgtcaggtctgccacagggcagaccaacgtttggcgctgcgcaaaacgtgagcgcggtggtggcgtatgactta

SEQ ID NO: 841575 - DNA, 75 bp, synthetic construct
  source 1..75: mol_type = other DNA
atatcctgaagcttgcgtgcttgatatgggctgtggagcaggacatgccagctttgtcgcggcgcaaaatgtgca

SEQ ID NO: 841576 - DNA, 75 bp, synthetic construct
  source 1..75: mol_type = other DNA
cagcaatgatggctggtgcggtttttttattgttaaatggatacgaattaaccgcaccaggcgatgaagttgtgg

SEQ ID NO: 841577 - DNA, 75 bp, synthetic construct
  source 1..75: mol_type = other DNA
ctggtacgacgaatcggttaagcgtaagtcgacctttggcctgtccgagcgtgtattcatcgcatgtgactcgct

SEQ ID NO: 841578 - DNA, 75 bp, synthetic construct
  source 1..75: mol_type = other DNA
atgatgttgataaacacatgcgtcagatcggtaaagtcatggaactcggtctgggttatggaggtggtgtatcgg

SEQ ID NO: 841579 - DNA, 75 bp, synthetic construct
  source 1..75: mol_type = other DNA
cggacatgcagcgcagcacgctggagcgccgtatggcggatcctgatttgccgtctgcggtgaaagagttgctgg

SEQ ID NO: 841580 - DNA, 75 bp, synthetic construct
  source 1..75: mol_type = other DNA
acaagtcgatcaaagatcgtctggtaccgatcatcgccgacgaagcgcgtacgttcggtatggaaggtctgttcc

SEQ ID NO: 841581 - DNA, 75 bp, synthetic construct
  source 1..75: mol_type = other DNA
ctggaactggaacgccgtattcgttcagctatccgctggaacgccatcatgacggttctgcgtgcgtcgaaaaaa

SEQ ID NO: 841582 - DNA, 75 bp, synthetic construct
  source 1..75: mol_type = other DNA
tcgcacgcgctgcgatcgacgcggtagaccaggaacaaaagcgcctggcaaagcgtacacaggaaatgactgatg

SEQ ID NO: 841583 - DNA, 75 bp, synthetic construct
  source 1..75: mol_type = other DNA
gaccgcaccgttctgcgttatgcaatgccgcgactggcaccgccagtcgaacgttggcgcgacacgatggtgcag

SEQ ID NO: 841584 - DNA, 75 bp, synthetic construct
  source 1..75: mol_type = other DNA
ccttatgtatttcagggggaattaatttggggtttaccctgggatattacggcttatggtggggcacaattctct

SEQ ID NO: 841585 - DNA, 75 bp, synthetic construct
  source 1..75: mol_type = other DNA
atctgacgaaaatatgttgcccgatagtcaaagtggtttcgctcccacggtgcgcggaattgcgaaaagtcgcgc

SEQ ID NO: 841586 - DNA, 75 bp, synthetic construct
  source 1..75: mol_type = other DNA
aagcaatcgcagaccctgaaaccctgctttatttccataactctcacttcgaccgcaccgtcctgcgttatgcaa

SEQ ID NO: 841587 - DNA, 75 bp, synthetic construct
  source 1..75: mol_type = other DNA
tataaacgtctgccgaagtggaattatcaggggacagagctggcgctctggcatcgtgatcagcagatcaacgac

SEQ ID NO: 841588 - DNA, 75 bp, synthetic construct
  source 1..75: mol_type = other DNA
ctcaaaacctacggcggaaagctggtggagaacgtcacccaggcggccgcccgcgacgttctggccggaaacatg

SEQ ID NO: 841589 - DNA, 75 bp, synthetic construct
  source 1..75: mol_type = other DNA
gatgatgaagaaatttatcatatcttgctgtgcattcgagctcatggttggacgcgtaatttaccgaaaaaaaat

SEQ ID NO: 841590 - DNA, 75 bp, synthetic construct
  source 1..75: mol_type = other DNA
gggcgcgtcgccgttcggttataagattgccgaacaatttggcctcaacgtgttgccgacgcgcgctggtctggt

SEQ ID NO: 841591 - DNA, 75 bp, synthetic construct
  source 1..75: mol_type = other DNA
cctcatgtctggtggtgggcgctgcaactttaccaacctttatgtcgagcctggtgcctatctgagccagaatcc

SEQ ID NO: 841592 - DNA, 75 bp, synthetic construct
  source 1..75: mol_type = other DNA
atggtaaaaaaccagggcgcaaaatcctcatgtctggcggtgggcgctgcaactttaccaacctttatgtcgaac

SEQ ID NO: 841593 - DNA, 75 bp, synthetic construct
  source 1..75: mol_type = other DNA
tcagatagtcaatctcctcgatatcaccagtgttgatgcacagaatcagcagcaggtgaaaaacgccatgattaa

SEQ ID NO: 841594 - DNA, 75 bp, synthetic construct
  source 1..75: mol_type = other DNA
ccggagcggcatcgtcacaccccacgcctgtcggcatctggcagtccctgctgtcgcatctgctgcaacagcatt

SEQ ID NO: 841595 - DNA, 75 bp, synthetic construct
  source 1..75: mol_type = other DNA
gggggctataacttccagtgggcgtggtcgagtgcgtgggcttgtgcgcaggatttgattgctgtccgaggacaa

SEQ ID NO: 841596 - DNA, 75 bp, synthetic construct
  source 1..75: mol_type = other DNA
gtgatattactaatggcgccacattgcagggcaacggtatcacgctgaatgctgcgggcaggctgaccaacaatg

SEQ ID NO: 841597 - DNA, 75 bp, synthetic construct
  source 1..75: mol_type = other DNA
agattatcgcttcctgggggatgctgcttttgatacccgctatgtatcgaactatatgctgaatcagatcggggg

SEQ ID NO: 841598 - DNA, 75 bp, synthetic construct
  source 1..75: mol_type = other DNA
cttcaacttgtcaaccatgtatcttttagcgtaattggtgatgatctattaaacataataaattgccaaaacaaa

SEQ ID NO: 841599 - DNA, 75 bp, synthetic construct
  source 1..75: mol_type = other DNA
gggggctataacttccagtgggcgtggtcgagtgcgtgggcttgtgcgcaggatttgattgcatgtgcagcgaca

SEQ ID NO: 841600 - DNA, 75 bp, synthetic construct
  source 1..75: mol_type = other DNA
cgatattctccgcgcccgcaaagccaccgggctgatgacccgcaacggctacaaagtggtgaccgatatcaccac

SEQ ID NO: 841601 - DNA, 75 bp, synthetic construct
  source 1..75: mol_type = other DNA
gaccgtcgcggtttgaacgcagaaacacagtcccctcttctcagcagtatcgatattctccgcgcccgcaaagcc

SEQ ID NO: 841602 - DNA, 75 bp, synthetic construct
  source 1..75: mol_type = other DNA
taacttttaaagcagacgatgagaatcaactgattccctgcctttcacttgctgacttattaagccttggaatta

SEQ ID NO: 841603 - DNA, 75 bp, synthetic construct
  source 1..75: mol_type = other DNA
ttccgcgaaaccgatttgaaaaacattcatgctggtacgcctgcaaccattcgcctgatgagcgacagcggcaaa

SEQ ID NO: 841604 - DNA, 75 bp, synthetic construct
  source 1..75: mol_type = other DNA
ctcggttaatgccacggtagaaaaagcccgtgccgccgcgaaacaggccagcgatacattacgccgcaccgagcc

SEQ ID NO: 841605 - DNA, 75 bp, synthetic construct
  source 1..75: mol_type = other DNA
atctggaaatggcgaccgttcgcgcgccgtttgatggccgggtcatttccctcaaaacctccgtcgggcaatttg

SEQ ID NO: 841606 - DNA, 75 bp, synthetic construct
  source 1..75: mol_type = other DNA
gggctccggttctatcctgcgtcacgtccgtgaagcggcagagatcctggcgaaagattacggcgtaggttctga

SEQ ID NO: 841607 - DNA, 75 bp, synthetic construct
  source 1..75: mol_type = other DNA
tatctgcacgctcaacgtcagaaactgcacggttatctgccaagccgccagccgaacttcaccgagaagctggag

SEQ ID NO: 841608 - DNA, 75 bp, synthetic construct
  source 1..75: mol_type = other DNA
ttccgcgaaaccgatctgaaaaatattcgctcgggtacacccgcaacgattcgcctgatgagcgacagcggcaaa

SEQ ID NO: 841609 - DNA, 75 bp, synthetic construct
  source 1..75: mol_type = other DNA
cgagtcatttggttataccgatgaagaaatagtctcttccgatatcattggtagccatttcggttcggtgtttga

SEQ ID NO: 841610 - DNA, 75 bp, synthetic construct
  source 1..75: mol_type = other DNA
agatctacgcgcttcacgtgcagcggcagaaaatatcattccccacactacaggtgcggcaaaagccattggtct

SEQ ID NO: 841611 - DNA, 75 bp, synthetic construct
  source 1..75: mol_type = other DNA
actcctccgttattttccatgcaggggaagaaagagaataccctgagaattattgatgccacaaacggacagatg

SEQ ID NO: 841612 - DNA, 75 bp, synthetic construct
  source 1..75: mol_type = other DNA
gggtccgcgttgcccagcgttttccggtcaaaatcatggtcgataaacctgacacggaaatgttccgcatcggcg

SEQ ID NO: 841613 - DNA, 75 bp, synthetic construct
  source 1..75: mol_type = other DNA
aatatagatgttgtcgccattaatgatctcacatccccgaaaattctcgcctacttgctaaaacacgattcaaac

SEQ ID NO: 841614 - DNA, 75 bp, synthetic construct
  source 1..75: mol_type = other DNA
gcagaaaatatcattccccacactacgggggcggcaaatgtcacgaacggtgcaatagtgatccacacccaacgc

SEQ ID NO: 841615 - DNA, 75 bp, synthetic construct
  source 1..75: mol_type = other DNA
accagcgaagtgtggtggccggaagatgcagatcatattgcttttattcgcgggcgtattggttttgaactgcct

SEQ ID NO: 841616 - DNA, 75 bp, synthetic construct
  source 1..75: mol_type = other DNA
atgattatcaaacgcacacctcaagccgcgtcgcctttggcttcgtggctttcttatctggaaaacctgcacagt

SEQ ID NO: 841617 - DNA, 75 bp, synthetic construct
  source 1..75: mol_type = other DNA
gttcgcaagtggtggatttactgcaacagagctggcaggtgataagtgctggcggacaatgccgggtggaaaagc

SEQ ID NO: 841618 - DNA, 75 bp, synthetic construct
  source 1..75: mol_type = other DNA
atacgatgcctgttgctgttcagccaggagcttttctgccatccgcgagccagtgtgacagttgatgaagcatgt

SEQ ID NO: 841619 - DNA, 75 bp, synthetic construct
  source 1..75: mol_type = other DNA
atgattatcaaacgcactcctcaagcctcgtcgcctctggcttcgtggctttcttatttggaaaacctgcacagt

SEQ ID NO: 841620 - DNA, 75 bp, synthetic construct
  source 1..75: mol_type = other DNA
ataaagatattgccggaactctggcctggttgaaaagcgtggttgatgactggtattgtgcgccactggaagggc

SEQ ID NO: 841621 - DNA, 75 bp, synthetic construct
  source 1..75: mol_type = other DNA
ggagtcgattctgatggcggcagggtacaaagtgggcgtctacagttcgccgcatctggtgcgttataccgagcg

SEQ ID NO: 841622 - DNA, 75 bp, synthetic construct
  source 1..75: mol_type = other DNA
cgatgaaaacatgctacccgatagccaaagtggttttgcccccactgtgcgcggtattgctaaaagcaatgctca

SEQ ID NO: 841623 - DNA, 75 bp, synthetic construct
  source 1..75: mol_type = other DNA
gtggttatattccacctgaggaatgggataatggtatcccggccattcttattaattatgatttttctggcaaca

SEQ ID NO: 841624 - DNA, 75 bp, synthetic construct
  source 1..75: mol_type = other DNA
cagtgtatttatcagattatagccgccgaacgcaagaaaaataaaatacagcgcgatgcgaaatatggggtaatt

SEQ ID NO: 841625 - DNA, 75 bp, synthetic construct
  source 1..75: mol_type = other DNA
agttggagcattagccgctacgccaggcgttgaagcccagttactgtcacatacgcgagcaagtctgcgagtcgg

SEQ ID NO: 841626 - DNA, 75 bp, synthetic construct
  source 1..75: mol_type = other DNA
cacgctctttaatatgggctacaggcgaattccagttcccagaccggcagatttttcctggagcagatatttgtt

SEQ ID NO: 841627 - DNA, 75 bp, synthetic construct
  source 1..75: mol_type = other DNA
ggtggttgccagaattacatgccaatagaatgtgaagacgcccctaaagcaacatcttttctgcatgagcttaca

SEQ ID NO: 841628 - DNA, 75 bp, synthetic construct
  source 1..75: mol_type = other DNA
gctatcaacttcaacaccagctctgatcgtgcgcgtttatgttacccacacgtcaaagtttacgatggcatcact

SEQ ID NO: 841629 - DNA, 75 bp, synthetic construct
  source 1..75: mol_type = other DNA
cggggatgaaactgctacaggacacctataacctgtatggtttctacgccaaaatcctgcttgctcccgtgttct

SEQ ID NO: 841630 - DNA, 75 bp, synthetic construct
  source 1..75: mol_type = other DNA
gctgagctataaattcaccccgccgccgccgctggaacgtctgacgtttgaaactgaaattacttctgaatattt

SEQ ID NO: 841631 - DNA, 75 bp, synthetic construct
  source 1..75: mol_type = other DNA
ccacggacaaccggggcagtctgctttcggccggcacgctctcccttgatggaaactcactggataacagcggca

SEQ ID NO: 841632 - DNA, 75 bp, synthetic construct
  source 1..75: mol_type = other DNA
gctatccgcacgttaaagtttacgatgcggccaccgacagtgaacgactggagccgctctcctcccgtgccgctg

SEQ ID NO: 841633 - DNA, 75 bp, synthetic construct
  source 1..75: mol_type = other DNA
ggcctaccgtgacccatatgcgtaactttgaaaacgttcgccggacaggcgatgtaattaatgagtcaatccgtt

SEQ ID NO: 841634 - DNA, 75 bp, synthetic construct
  source 1..75: mol_type = other DNA
tattctttttacttcccgccaaatgattatcgaaacctttatttgtccggtaagtagtatcagcaatccagatga

SEQ ID NO: 841635 - DNA, 75 bp, synthetic construct
  source 1..75: mol_type = other DNA
tgctcgtgaagcggcgggtggtatgccggacccgacgctgccggaggtgtccggaggtagtgacagagcggacga

SEQ ID NO: 841636 - DNA, 75 bp, synthetic construct
  source 1..75: mol_type = other DNA
tcttctgaaccagcgggagggattttctgccacaacaacaacccggactaacccctcatccattcagggaatggg

SEQ ID NO: 841637 - DNA, 75 bp, synthetic construct
  source 1..75: mol_type = other DNA
tgtaccgaatgccatcgacaaaagtctgctcgtgaagcggcgggtggtatgccggacccgacgctgccggaggtg

SEQ ID NO: 841638 - DNA, 75 bp, synthetic construct
  source 1..75: mol_type = other DNA
atggctgtgcttcgtacgttaccgggcagaatcaaaactctgaacacccggcggataaatatactgaagggagaa

SEQ ID NO: 841639 - DNA, 75 bp, synthetic construct
  source 1..75: mol_type = other DNA
tcaaggatatggatggtaagccagttcctaaagagaatggaggatattgggatcatatgcaggaaatgcaaaata

SEQ ID NO: 841640 - DNA, 75 bp, synthetic construct
  source 1..75: mol_type = other DNA
gacccgcagagcgaggtgaacctgctcaacgaacagggcatcaccacggtcttcagcagctacggcagcggcctg

SEQ ID NO: 841641 - DNA, 75 bp, synthetic construct
  source 1..75: mol_type = other DNA
acaaccaaaaccacttagaagttcttcgagcgacaaaggaagctatccccatccctgttcctgttcctgttcctg

SEQ ID NO: 841642 - DNA, 75 bp, synthetic construct
  source 1..75: mol_type = other DNA
gatgccctttccaaacgcctggtcagcagtgttctggatgccgcagttgtagaagacgagcagatccatctacgc

SEQ ID NO: 841643 - DNA, 75 bp, synthetic construct
  source 1..75: mol_type = other DNA
tttacctcacgggctgcaggtggagctggccggacattccgaccaccaccaccgtgcagaccgtccagctatggg

SEQ ID NO: 841644 - DNA, 75 bp, synthetic construct
  source 1..75: mol_type = other DNA
gatggggttcagtgatactcacctccgttgctatgtgcttcataacgacgaaggccagcatatacacattattgc

SEQ ID NO: 841645 - DNA, 75 bp, synthetic construct
  source 1..75: mol_type = other DNA
ggaacaccggggggatggggaccggataatgaagaaaaagcccgtcatcaggaggttcagcaacaacgatttgat

SEQ ID NO: 841646 - DNA, 75 bp, synthetic construct
  source 1..75: mol_type = other DNA
gcttgggaaaaagtatgcctggtcaaatcttcagacacttattgataactcgccgggacatgtaaaattacttaa

SEQ ID NO: 841647 - DNA, 75 bp, synthetic construct
  source 1..75: mol_type = other DNA
atagacataatagaaataatatacattaagagaccttcaaaagacttagctaacttacgaaaggagtttaataaa

SEQ ID NO: 841648 - DNA, 75 bp, synthetic construct
  source 1..75: mol_type = other DNA
taacgggagaacaacaaggaagcatctccgcatctgagtctacaggtaatcgttggcagagcgggcatgaggatg

SEQ ID NO: 841649 - DNA, 75 bp, synthetic construct
  source 1..75: mol_type = other DNA
ctccgcaggttgtgggacttctgagtctacaggtaatcgttggcagagcgggcatgaggatgaaatatttacatt

SEQ ID NO: 841650 - DNA, 75 bp, synthetic construct
  source 1..75: mol_type = other DNA
tcattacggacgcacgcagggcgtcacggaacaggtactgcaggcaaatccggggctggctgaatatggcccatt

SEQ ID NO: 841651 - DNA, 75 bp, synthetic construct
  source 1..75: mol_type = other DNA
atgcgcgcgatcggtaaattgcctaaaagcgtgttgatactggaatttatcggaatgatgttgctggcggtggcg

SEQ ID NO: 841652 - DNA, 75 bp, synthetic construct
  source 1..75: mol_type = other DNA
cctcgaggcccagcagtaccacgccctgacagtgggcgataaaggtacgctgagctataaaggaacgcgctttgt

SEQ ID NO: 841653 - DNA, 75 bp, synthetic construct
  source 1..75: mol_type = other DNA
atccggcgaaaaaaacgatcgtcccggacaccgccccccgtctcacgcagagaaaaaattcccgtttcagggctg

SEQ ID NO: 841654 - DNA, 75 bp, synthetic construct
  source 1..75: mol_type = other DNA
atttgtaatatgccgatcccggcaaacaaagccattgttggcagcggcgcattcgcacactcctccggtatccac

SEQ ID NO: 841655 - DNA, 75 bp, synthetic construct
  source 1..75: mol_type = other DNA
gtcttgagcgtatgggggttgacgtgatggaagtcggtttccccgtctcttcgccgggcgattttgaatcagtgc

SEQ ID NO: 841656 - DNA, 75 bp, synthetic construct
  source 1..75: mol_type = other DNA
tctggattacttcagcgtgcagtctggctctaacgatatcgccaccgccgccgtcaaactggcctgtggcgaaga

SEQ ID NO: 841657 - DNA, 75 bp, synthetic construct
  source 1..75: mol_type = other DNA
tgcgtggaaaaagatatcgacgtggcggccgaatctctgaaagtcgccgaagccttccggattcatacctttatt

SEQ ID NO: 841658 - DNA, 75 bp, synthetic construct
  source 1..75: mol_type = other DNA
tggcggtcggcaactcactggcggcggtacatgccggagcgcggcaggtagaaggcgcgatgaacgggatcggcg

SEQ ID NO: 841659 - DNA, 75 bp, synthetic construct
  source 1..75: mol_type = other DNA
agtcaaagcagaagccgccaacggtaacggtccggtcgatgccgtctatcaggcgattaaccgcatcactgacta

SEQ ID NO: 841660 - DNA, 75 bp, synthetic construct
  source 1..75: mol_type = other DNA
gatcgcaaggggtttacgtggcaggagcagacaccatttgtaaccgctacagatattctcagagccagaagagct

SEQ ID NO: 841661 - DNA, 75 bp, synthetic construct
  source 1..75: mol_type = other DNA
gaacatatcaacgcaggcgttactcttgccgatgccgtgaactttctggtggaaaaatacgaactcgttcgcatc

SEQ ID NO: 841662 - DNA, 75 bp, synthetic construct
  source 1..75: mol_type = other DNA
aacaatcgccttatctgcgggctgtagacattttgcgggcgcgacaggcaatggggttgttacgacaaggccata

SEQ ID NO: 841663 - DNA, 75 bp, synthetic construct
  source 1..75: mol_type = other DNA
gtgaaacgtgcacgcaattacaccgatgatgttgaattttcttgcgaagacgccggacgcacaccgattgccgat

SEQ ID NO: 841664 - DNA, 75 bp, synthetic construct
  source 1..75: mol_type = other DNA
gatatccctattgctattggcggcagccgcgaacgacgggggggaatcagcaccgccaattatcccgcgcgtaaa

SEQ ID NO: 841665 - DNA, 75 bp, synthetic construct
  source 1..75: mol_type = other DNA
aattagccaaagagtttagcaaagttgtcgatgagatagaaaggctgtattcccgactaaatctccgatattcat

SEQ ID NO: 841666 - DNA, 75 bp, synthetic construct
  source 1..75: mol_type = other DNA
ccaccacctcacagggcagcagcatcagcgccggcggtaacctggcgatggctgcaggccataatctggatgtca

SEQ ID NO: 841667 - DNA, 75 bp, synthetic construct
  source 1..75: mol_type = other DNA
atccgctcagtttgtcgctgaatctcgaagctaacgtcatcatctacgatcgtaattttaaccagacgctacgcg

SEQ ID NO: 841668 - DNA, 75 bp, synthetic construct
  source 1..75: mol_type = other DNA
ataagatccagttgctggagaacggcgagcaatattatcccgctgtatttaaagcgattggtgaggcgcaagaac

SEQ ID NO: 841669 - DNA, 75 bp, synthetic construct
  source 1..75: mol_type = other DNA
gccaacgcctacttcttccccggctatcgatttttacacgccttgcgtaaagcggcacggcgcggggtgcggatc

SEQ ID NO: 841670 - DNA, 75 bp, synthetic construct
  source 1..75: mol_type = other DNA
gcggataaatgtcctgaggggggaacagcgtcgtgtcagtggcagtgcccgggtttccctcaagcgtcgtatctg

SEQ ID NO: 841671 - DNA, 75 bp, synthetic construct
  source 1..75: mol_type = other DNA
ttcaggcgggcggggatgttaagacccgttttaccagcagtatcaataacggaacaaccactgcacatgcaggta

SEQ ID NO: 841672 - DNA, 75 bp, synthetic construct
  source 1..75: mol_type = other DNA
tccacggcgacggcagataaaaacagcctcgataccgggacgctcggcttcagcgatattcacaacgaagcggat

SEQ ID NO: 841673 - DNA, 75 bp, synthetic construct
  source 1..75: mol_type = other DNA
cgttaggcggaaatgccaaagctgggctggaagtgctgaaagatgcgacagcacaggcgattgccgatgccaaag

SEQ ID NO: 841674 - DNA, 75 bp, synthetic construct
  source 1..75: mol_type = other DNA
tgatttgcgatggtgcgtcgaacagctgcgcgatgaaggtttcgaccagtgcttcggctgcgtggaaagcggtgt

SEQ ID NO: 841675 - DNA, 75 bp, synthetic construct
  source 1..75: mol_type = other DNA
ggctctgcggtaaattcgaaccgctctccagcgaaccgggcgcgctggccccgctgatggataaaggcgagcagc

SEQ ID NO: 841676 - DNA, 75 bp, synthetic construct
  source 1..75: mol_type = other DNA
ataagatccagttgctggaaaacggcgagcaatattatcccgcggtgtttaaggcgattggcgaggcacaagaac

SEQ ID NO: 841677 - DNA, 75 bp, synthetic construct
  source 1..75: mol_type = other DNA
gggtttccctcaagcgtcgtatctggctcagggatgccgggcagtgctgtctctgtggtcgtgtggttgacctct

SEQ ID NO: 841678 - DNA, 75 bp, synthetic construct
  source 1..75: mol_type = other DNA
atcagcagtatgatcggcgatgtcagcggtatgatttgtgatggtgcgtcgaacagttgtgcgatgaaggtgtcg

SEQ ID NO: 841679 - DNA, 75 bp, synthetic construct
  source 1..75: mol_type = other DNA
gcctgagctggaaaaaacgtctctcgcgcctgatgaattatccgggcacgcgttacactaaacagatgatggaga

SEQ ID NO: 841680 - DNA, 75 bp, synthetic construct
  source 1..75: mol_type = other DNA
cttgcttatgaaggttccggcagtggcgactggcgcactgacggtttcatcgtgggtgtcggttataagttctga

SEQ ID NO: 841681 - DNA, 75 bp, synthetic construct
  source 1..75: mol_type = other DNA
cttgcttatgaaggctccggcagtggtgactggcgcactgacggtttcatcgtgggtgtcggttataagttctga

SEQ ID NO: 841682 - DNA, 75 bp, synthetic construct
  source 1..75: mol_type = other DNA
gagatgcttgcacaccttaacacccggttggtgatgcctttaacgccaaaagataattcaaactcgcaggtaaag

SEQ ID NO: 841683 - DNA, 75 bp, synthetic construct
  source 1..75: mol_type = other DNA
tgcccgtgggatgaatatctggcatggattgccactctggaggcgggcagcgaagcccgccgtaaaatggaaggc

SEQ ID NO: 841684 - DNA, 75 bp, synthetic construct
  source 1..75: mol_type = other DNA
gaccaacgggatatccgcgctgcaaaacaccacggtaatcatggggctgccgttcagctttgtgatcttcttcgt

SEQ ID NO: 841685 - DNA, 75 bp, synthetic construct
  source 1..75: mol_type = other DNA
aacggcctcagcgttccgcccgtacggcggcaactggcggcaccaaaacgtccgtcggggccaacaccaattgag

SEQ ID NO: 841686 - DNA, 75 bp, synthetic construct
  source 1..75: mol_type = other DNA
tgtcccggatgtgctggaaacctgccaattgagtatggggctgacggagctggctccaggtaacttgtggaacac

SEQ ID NO: 841687 - DNA, 75 bp, synthetic construct
  source 1..75: mol_type = other DNA
agccacgcaagcaccttaaaatcaccatcatacactaaatcagtaagttggcagcattcccccgccactccggcg

SEQ ID NO: 841688 - DNA, 75 bp, synthetic construct
  source 1..75: mol_type = other DNA
gacgacaactggaaggggcgaaacacccgaaagggccaacgccaattgaatggttgaaacaggaatacgaacgcc

SEQ ID NO: 841689 - DNA, 75 bp, synthetic construct
  source 1..75: mol_type = other DNA
gtaccagagggattgagcgccagatgacgcagggtgagttaaaacgacttgcagaacggcaactgacgaaatggg

SEQ ID NO: 841690 - DNA, 75 bp, synthetic construct
  source 1..75: mol_type = other DNA
ccgggcgggtgaaacatggcctccggacctggctgagtttgtggcgctgatttcggagagtggggcaaatccatt

SEQ ID NO: 841691 - DNA, 75 bp, synthetic construct
  source 1..75: mol_type = other DNA
caactgctagggacagaattactcttagagctctctgtgaatgccttacggaaatatatcctaactccagattaa

SEQ ID NO: 841692 - DNA, 75 bp, synthetic construct
  source 1..75: mol_type = other DNA
ggcgaatgctgcaactctggataatacatcttccgtaaaagctgactttgaggttgtcggtggttgcactgtctc

SEQ ID NO: 841693 - DNA, 75 bp, synthetic construct
  source 1..75: mol_type = other DNA
tcgtactgcatgggagaatgcacagatcccaaccaattttggcggcattcgcgcactgatgtctaatgggcttgc

SEQ ID NO: 841694 - DNA, 75 bp, synthetic construct
  source 1..75: mol_type = other DNA
ctctccgccccgctgctgcttggcgtttcagcaattggttggttaacgataattctggtggcatttatggcctgg

SEQ ID NO: 841695 - DNA, 75 bp, synthetic construct
  source 1..75: mol_type = other DNA
aatatccggcccaaaaaatcaccatcaacctggctccagccgatctaccaaaagaagggggacgatatgatttac

SEQ ID NO: 841696 - DNA, 75 bp, synthetic construct
  source 1..75: mol_type = other DNA
cccaatcactgttgaggtacatatcagtaaaggtctaccaggcttaacgatggtgggcttaccagaaacaacggt

SEQ ID NO: 841697 - DNA, 75 bp, synthetic construct
  source 1..75: mol_type = other DNA
cacttttgagattgctcgtctgatgcgcaagcacactgacgtaattgcgatgaccaatggtatgaacgtagccaa

SEQ ID NO: 841698 - DNA, 75 bp, synthetic construct
  source 1..75: mol_type = other DNA
tgcaatactgaatatccaacgccctttgaggatgtaaaccttaatgctattaatgatttgaaaaacacttcccta

SEQ ID NO: 841699 - DNA, 75 bp, synthetic construct
  source 1..75: mol_type = other DNA
agctgcagtgccctatgggattacctttattgagaaacattttacgctggacaagaattttgaagggccagatca

SEQ ID NO: 841700 - DNA, 75 bp, synthetic construct
  source 1..75: mol_type = other DNA
ctatatgctgaatatgcaaaaatagatcttaaaagtttctatccttcaattgaacataaattgatatttaatgca

SEQ ID NO: 841701 - DNA, 75 bp, synthetic construct
  source 1..75: mol_type = other DNA
tcactgaaattccaggggcgttatactgacagtaactatatttccactctgtataaacaaggattgttaccatcc

SEQ ID NO: 841702 - DNA, 75 bp, synthetic construct
  source 1..75: mol_type = other DNA
tattggttgttggtgttattgttgtacttgcagcaagtgcatataaactctattcaatggtgcaatccaacattc

SEQ ID NO: 841703 - DNA, 75 bp, synthetic construct
  source 1..75: mol_type = other DNA
tgcggcggtgccttatggaataacttttattgaaaaacatttcactttagataaatctatgtctggcccagatca

SEQ ID NO: 841704 - DNA, 75 bp, synthetic construct
  source 1..75: mol_type = other DNA
atggaccgttgtcgggcgggtgaaacatggcctccggacctggctgagtttgtggcgttgatttcagaaagtggg

SEQ ID NO: 841705 - DNA, 75 bp, synthetic construct
  source 1..75: mol_type = other DNA
tgaacggtattcccaaccgtattagcctttcaggtcataccgatgatttcccctacgccagcggtgagaaaggat

SEQ ID NO: 841706 - DNA, 75 bp, synthetic construct
  source 1..75: mol_type = other DNA
aatggaatcagcttggccttcttgctcaaaaattttactcagattacagtgagttaagttatgagttgttagtag

SEQ ID NO: 841707 - DNA, 75 bp, synthetic construct
  source 1..75: mol_type = other DNA
agaaatgctgctggttcaaatgtatgctctctatatgacacgagtgcattgcagcgccttataaatactcaggcc

SEQ ID NO: 841708 - DNA, 75 bp, synthetic construct
  source 1..75: mol_type = other DNA
agatcccgcgattcatcaacacggataaagcgcccgcctatggtcgcgcgcttgctctgctcaaacgcgaaggcc

SEQ ID NO: 841709 - DNA, 75 bp, synthetic construct
  source 1..75: mol_type = other DNA
cgcaaaacgctctattccagcgaacgtccgtcgtttattgaactggaagagcatgtgcgtgcggtgaaaaaatcc

SEQ ID NO: 841710 - DNA, 75 bp, synthetic construct
  source 1..75: mol_type = other DNA
acttgcaaaggcaagactaccagcgagcgatacagacgcgttaaagctatttaaaattgtaaaaggactaatagg

SEQ ID NO: 841711 - DNA, 75 bp, synthetic construct
  source 1..75: mol_type = other DNA
gatacatatcaagtttatgggataatattaggggtagttttactccttttcataataatactgtaaacatcgccc

SEQ ID NO: 841712 - DNA, 75 bp, synthetic construct
  source 1..75: mol_type = other DNA
tgatatttactgagagctcagatcaactttccagggcaacagatcgcgtacccggtttgccggccagtcctggat

SEQ ID NO: 841713 - DNA, 75 bp, synthetic construct
  source 1..75: mol_type = other DNA
ggtacggacaccggtccggttgcgaccattaaaggcactgattcactttcgctggatgcagggaaaaacattgat

SEQ ID NO: 841714 - DNA, 75 bp, synthetic construct
  source 1..75: mol_type = other DNA
cgtttgccgaaacccaggccggaaaaggggggttagtaagtgaccacccacttaatatgggcggggtgggcgtga

SEQ ID NO: 841715 - DNA, 75 bp, synthetic construct
  source 1..75: mol_type = other DNA
gcggcagcgacggccacggcgaaccgcattccactgctgctactgccaggggatatctacgcctgccgccagcct

SEQ ID NO: 841716 - DNA, 75 bp, synthetic construct
  source 1..75: mol_type = other DNA
atggggccaacggcctccggtaaaacggcgctggctattgagctgcgtaaaattttaccagtagagttgataagc

SEQ ID NO: 841717 - DNA, 75 bp, synthetic construct
  source 1..75: mol_type = other DNA
tacccgccgaactgaaacagctctccgcaccgctgctgtttggcgtttccgcgattggttggttgacgataattc

SEQ ID NO: 841718 - DNA, 75 bp, synthetic construct
  source 1..75: mol_type = other DNA
aacacgtcagaaatcgtaccgcgtggagcgtggtatagctgttctgccggttaccgggacactggttcataaatt

SEQ ID NO: 841719 - DNA, 75 bp, synthetic construct
  source 1..75: mol_type = other DNA
cgatgagctgggacggcagcgagcgaccgcgccagaaagcgtaccgcgtggagcgtggtatagccgtgctgccgg

SEQ ID NO: 841720 - DNA, 75 bp, synthetic construct
  source 1..75: mol_type = other DNA
gcagcacgtgagcagtgggaacgtgaaaacggatttatcagcgacggaaacggtctggaagctgtgggaactcat

SEQ ID NO: 841721 - DNA, 75 bp, synthetic construct
  source 1..75: mol_type = other DNA
gccgggcgggtgaaacatggcctccggacctggctgagtttgtggcgctgatttcggaaagcggggccaatccat

SEQ ID NO: 841722 - DNA, 75 bp, synthetic construct
  source 1..75: mol_type = other DNA
atgttgctgtggactggcggtaaatggattgagggattacccgccgaactgaaacaactctccgccccgctgctg

SEQ ID NO: 841723 - DNA, 75 bp, synthetic construct
  source 1..75: mol_type = other DNA
ggtcgctccccagtgactggcgcggcaaaaacaccgcctggaaaatgattgctgggctggcgattgctttatatg

SEQ ID NO: 841724 - DNA, 75 bp, synthetic construct
  source 1..75: mol_type = other DNA
aaaaatttcagatcgtgtcagagaagttgaaaagttacaaatgagctttgaaaaagtgaataatatgagtaatat

SEQ ID NO: 841725 - DNA, 75 bp, synthetic construct
  source 1..75: mol_type = other DNA
ttgaatgtttaggtttcggctctgttggatacaatgttctaatttccccaaaggcatctttttacggagcagaaa

SEQ ID NO: 841726 - DNA, 75 bp, synthetic construct
  source 1..75: mol_type = other DNA
gggttatatcaacccagttagcgggatgagcggttacaacggaatcgcaaaacgcctgcagcaggcgatttctga

SEQ ID NO: 841727 - DNA, 75 bp, synthetic construct
  source 1..75: mol_type = other DNA
ccgagcttgtgaacttcttcccagaactggatatatgcaatgttgattgcactcttgttagcgactcacagctaa

SEQ ID NO: 841728 - DNA, 75 bp, synthetic construct
  source 1..75: mol_type = other DNA
tgcgagaaagcagcaaacaacatcgcaaagtacagtgaagaatacaatgatgctggcatgaccatggataatcta

SEQ ID NO: 841729 - DNA, 75 bp, synthetic construct
  source 1..75: mol_type = other DNA
atggataatgccgcccgtgcacctgtactggatgccccgtccaccacaaccggcacagccagcggggccagcagc

SEQ ID NO: 841730 - DNA, 75 bp, synthetic construct
  source 1..75: mol_type = other DNA
gacagacagcgttcagcttacgcaactgcgtctgctggttgttgccgacctggaaaaacgcgggctgcaactggc

SEQ ID NO: 841731 - DNA, 75 bp, synthetic construct
  source 1..75: mol_type = other DNA
attctgaacagcaacgcagagactgccagagatgaagcgggtgcgctgatggatgctcttgatgctccgggtagc

SEQ ID NO: 841732 - DNA, 75 bp, synthetic construct
  source 1..75: mol_type = other DNA
agtaaggcagacacaaagccggctaagagcggtaatgagctaactctggagtcattccgagctaagtatattgag

SEQ ID NO: 841733 - DNA, 75 bp, synthetic construct
  source 1..75: mol_type = other DNA
gtgactgctgaagaggtgaataacgcacttaaaaaagcaacaaccgataacgaatcgtttggttataccgacgaa

SEQ ID NO: 841734 - DNA, 75 bp, synthetic construct
  source 1..75: mol_type = other DNA
agaattctataaattagttctggaaagtcaaaaaataacactaaggaaggtgcgaataagcggggaaattcttct

SEQ ID NO: 841735 - DNA, 75 bp, synthetic construct
  source 1..75: mol_type = other DNA
acctgactaaaagcgtgctggcgttccactttctacgccacttcccggcgctggtgggctggcttccggcgcaca

SEQ ID NO: 841736 - DNA, 75 bp, synthetic construct
  source 1..75: mol_type = other DNA
cgtcatgcaaacagtgaatctcaccagcgcagcgccgggcttacgaccattactgccggtgacagtgtgatgctg

SEQ ID NO: 841737 - DNA, 75 bp, synthetic construct
  source 1..75: mol_type = other DNA
catggatgaaagacaacaatcacgaacagatagaactccttaacaaaagactatctgaaagtgtcccatgtatgc

SEQ ID NO: 841738 - DNA, 75 bp, synthetic construct
  source 1..75: mol_type = other DNA
atggcgaaaaaaccaggtgaaaacacagggaaaaacggcggaatataccaggaagttggtccacgcggtggtaag

SEQ ID NO: 841739 - DNA, 75 bp, synthetic construct
  source 1..75: mol_type = other DNA
cgactgcttgcaccggagattgaactgtcactctccacgcgggaatcaccgtggtttcgcgatcgcgttattccg

SEQ ID NO: 841740 - DNA, 75 bp, synthetic construct
  source 1..75: mol_type = other DNA
tgcaacagcattactggcaaagccgttactctgtctcctttccgcgcctgcgcccgtgtactggcggcattgagc

SEQ ID NO: 841741 - DNA, 75 bp, synthetic construct
  source 1..75: mol_type = other DNA
ctcggtgtggggacttacgggatgatgcgtgcagatctgccgcatgaagacgctcccggtgtcattcaggcgcta

SEQ ID NO: 841742 - DNA, 75 bp, synthetic construct
  source 1..75: mol_type = other DNA
cggtcgcctggtacgataacgaatatggcttcgtcacgcagcttattcgcaccctcgaaaaattcgctaaactct

SEQ ID NO: 841743 - DNA, 75 bp, synthetic construct
  source 1..75: mol_type = other DNA
gccagtgtgacctgtgcttatcggcgtgatgaagtcagtatgcccggctcgcgaaaagaggtggttaatgcgcga

SEQ ID NO: 841744 - DNA, 75 bp, synthetic construct
  source 1..75: mol_type = other DNA
agagtatccgctgacggatgtagaaggtaagcgagttgtcgtattggggggcggcgatacaacaatggattgcct

SEQ ID NO: 841745 - DNA, 75 bp, synthetic construct
  source 1..75: mol_type = other DNA
gcagtaggctgggcgcccttgccgccagaggaatctactcagcaacaaaatcaggcacaggcagaacaacaatga

SEQ ID NO: 841746 - DNA, 75 bp, synthetic construct
  source 1..75: mol_type = other DNA
ctgaaaggtcatgcgcaacgcgtgccggtgaaaacaggttcggtcactgagctggtgtccattctcggaaaaaaa

SEQ ID NO: 841747 - DNA, 75 bp, synthetic construct
  source 1..75: mol_type = other DNA
attttacggaagattcacttatcgttgatgggaaaagtatcgcggtttacgccgaaaaagaggctaaaaatattc

SEQ ID NO: 841748 - DNA, 75 bp, synthetic construct
  source 1..75: mol_type = other DNA
gatcactctggcgcagtctctatcggtaatctggaacgctacatcaccgataccgcgctggcgatgggctggcgt

SEQ ID NO: 841749 - DNA, 75 bp, synthetic construct
  source 1..75: mol_type = other DNA
cataacgctattccggattacatccgtctggtacaggaaggaaagattattgaagcggcagaactttgccaccag

SEQ ID NO: 841750 - DNA, 75 bp, synthetic construct
  source 1..75: mol_type = other DNA
cgtaaaggcgcagataaaatttcagcgagtgaacggaaaacccactttggcgaaatctattgcgggctggatcca

SEQ ID NO: 841751 - DNA, 75 bp, synthetic construct
  source 1..75: mol_type = other DNA
gccagcgtgacctgtgcgtatcgtcgtgatgaagtcagtatgccgggctcgcgcaaagaggtggtcaatgcccgc

SEQ ID NO: 841752 - DNA, 75 bp, synthetic construct
  source 1..75: mol_type = other DNA
ccgttccttactgcgcatacccgtcagttaatggggctgcctgaatctgaagaatatccgctgactgatgtcgct

SEQ ID NO: 841753 - DNA, 75 bp, synthetic construct
  source 1..75: mol_type = other DNA
gtgagccggggccggatggtcgccgtcgtcctcgtccggttgcgggttcagagtttgaattgcccgccgatgttc

SEQ ID NO: 841754 - DNA, 75 bp, synthetic construct
  source 1..75: mol_type = other DNA
agacgcactgaccaccgcggaaaaatcggtcacaaacagtgacggtaacctcatgctgaacagcgcgtcttccac

SEQ ID NO: 841755 - DNA, 75 bp, synthetic construct
  source 1..75: mol_type = other DNA
tgacagaatcgctgcggggtaagaataatctgttgttggttgattttactgagcgttctgacgggcagaaggcgc

SEQ ID NO: 841756 - DNA, 75 bp, synthetic construct
  source 1..75: mol_type = other DNA
atggtggtgtgacactggatggaggaacccttctggttgacgggggaagtgtcaggaatgatgtgtatgaacgtc

SEQ ID NO: 841757 - DNA, 75 bp, synthetic construct
  source 1..75: mol_type = other DNA
cctgttgcagggcgccggtgcactggcgcttgctggcgacaccctctcacagggccgtaacgggcgctggctgac

SEQ ID NO: 841758 - DNA, 75 bp, synthetic construct
  source 1..75: mol_type = other DNA
ttggtctggagtttgagaaatcagcctttggtaagtacaacgttgataatgctgtcaacgccgggttccgttatt

SEQ ID NO: 841759 - DNA, 75 bp, synthetic construct
  source 1..75: mol_type = other DNA
gcgttcatcattaatattctgctgacgctgcttggctatattcctggtttgattcatgctttctgggtgcaaacc

SEQ ID NO: 841760 - DNA, 75 bp, synthetic construct
  source 1..75: mol_type = other DNA
cggcttcactgtcacacacactgacagcagtgcctctgctgatgctttcaaaggtaaaacaaaatctgtgggggc

SEQ ID NO: 841761 - DNA, 75 bp, synthetic construct
  source 1..75: mol_type = other DNA
caattgaggaaagcgaagccggactgcaaattaccggagaaggcgatggtctacctgaagcgaaacggactgata

SEQ ID NO: 841762 - DNA, 75 bp, synthetic construct
  source 1..75: mol_type = other DNA
cgcgttagcaaagaaggtgcggactgcaaagttgttcttgagatggttgaacgagatctagaactggcacgaatc

SEQ ID NO: 841763 - DNA, 75 bp, synthetic construct
  source 1..75: mol_type = other DNA
gactaaaagtttcttctttagcgatatacaaagtaaaagaagctttgaggtggggtataaaaatatatttgcacg

SEQ ID NO: 841764 - DNA, 75 bp, synthetic construct
  source 1..75: mol_type = other DNA
gcgatcatcggtgcggtactcggcgcatggttcctgacgcagatcgatagcgtactggtgctgttgcgcattccg

SEQ ID NO: 841765 - DNA, 75 bp, synthetic construct
  source 1..75: mol_type = other DNA
ttgcgttcccgaaaggtagcgacgagctgcgtgacaaagtcaacggcgcgttgaaaaccctgcgcgagaacggaa

SEQ ID NO: 841766 - DNA, 75 bp, synthetic construct
  source 1..75: mol_type = other DNA
gctgaccagcacaatagtcattatgttgcagcggctctgcgcgagctacaggagcgccgcaaggctgatagtgtg

SEQ ID NO: 841767 - DNA, 75 bp, synthetic construct
  source 1..75: mol_type = other DNA
gatgctgataatgccaccatggtgctgggaagtgactcgctgtatctggatatgaaggacggcacggggagcagc

SEQ ID NO: 841768 - DNA, 75 bp, synthetic construct
  source 1..75: mol_type = other DNA
tggatctgaaacgaatggaaatctctgcaaatgcattcaatcgctatgaatccgttgcaagaacgatggttccga

SEQ ID NO: 841769 - DNA, 75 bp, synthetic construct
  source 1..75: mol_type = other DNA
gccccggcaaaagggcgaagcgttgttactgtgaactattacatgacgacaatggccggaatgtttcagtttgct

SEQ ID NO: 841770 - DNA, 75 bp, synthetic construct
  source 1..75: mol_type = other DNA
aactgaagcaagtacaaacagggttgtgcatcttatccagcccgctatcagtgtcctgaaaaatcaggctgaaat

SEQ ID NO: 841771 - DNA, 75 bp, synthetic construct
  source 1..75: mol_type = other DNA
caggtagaggtgaaactgcgtgagtttggtcgcacagaagtgcatccgtgcacattcgtgtttaacccacaaaaa

SEQ ID NO: 841772 - DNA, 75 bp, synthetic construct
  source 1..75: mol_type = other DNA
tttaacggcatcaagccgctaaagagggctaggatagaaccagatccgctcacacgtgatgaattcgttcgcttc

SEQ ID NO: 841773 - DNA, 75 bp, synthetic construct
  source 1..75: mol_type = other DNA
gaaaaaagccagggcagaaccagatcctctgtctcgtgatgaatttattcgcctgatagatgcatgccggcatca

SEQ ID NO: 841774 - DNA, 75 bp, synthetic construct
  source 1..75: mol_type = other DNA
tgcggacgatacgacatatcgccttgttgaccgtaatgagcactggcgtgattttcatactccccggctgaacaa

SEQ ID NO: 841775 - DNA, 75 bp, synthetic construct
  source 1..75: mol_type = other DNA
gtttgattccggggcctatatcgacctgattggtaagtatgttcaccatgataatgagtatacggcgtcctttgc

SEQ ID NO: 841776 - DNA, 75 bp, synthetic construct
  source 1..75: mol_type = other DNA
ccgttgtcgggaatactctgccatggcagacctacagggattttgctgaaaacaaaggggcgtttcatgccgggg

SEQ ID NO: 841777 - DNA, 75 bp, synthetic construct
  source 1..75: mol_type = other DNA
gtgcgcatgcaaaaacgctggatacccaggggctgcgcaatgaatttttagttgaaaaggtatttgtcgccgatg

SEQ ID NO: 841778 - DNA, 75 bp, synthetic construct
  source 1..75: mol_type = other DNA
ccaggggatgagcctgtccatgaaggacaaggactacaatccgctgattggccgtaccggtgtggatgtgggtaa

SEQ ID NO: 841779 - DNA, 75 bp, synthetic construct
  source 1..75: mol_type = other DNA
tgcctgggatgcggtgaagaagcagtgggtccttgttgctgtacttaatggttatgccggtgagaaagggaagac

SEQ ID NO: 841780 - DNA, 75 bp, synthetic construct
  source 1..75: mol_type = other DNA
ttccggcgctacaacgggtagcaaaacagatcgaagaaggggttgaatcgcaggctattctggtggccggacggc

SEQ ID NO: 841781 - DNA, 75 bp, synthetic construct
  source 1..75: mol_type = other DNA
accagtatgatcccaagttcgagcgcggaatgtatctgtatgagcatcgtcgctgtttcaataacatcatcggct

SEQ ID NO: 841782 - DNA, 75 bp, synthetic construct
  source 1..75: mol_type = other DNA
aacagaatatcaactttgcgcaggacatagcccgacgtgaagtggaagcagcaaaacaatggcacgagttgactt

SEQ ID NO: 841783 - DNA, 75 bp, synthetic construct
  source 1..75: mol_type = other DNA
ctagccagcatgtaggggccagcgttcatatcctgcctatgtatgaccatcttctgatgagccaggttaaggttc

SEQ ID NO: 841784 - DNA, 75 bp, synthetic construct
  source 1..75: mol_type = other DNA
tgccgccggtgggaggaaatcctgccctgcatggtattgagccggatgagcaggatgtgacgctggcactgggtg

SEQ ID NO: 841785 - DNA, 75 bp, synthetic construct
  source 1..75: mol_type = other DNA
tggcaaaatttctgtttgcttcagataataatgcgttgcaatttgagtttcagaaacgacaggatttaatttccg

SEQ ID NO: 841786 - DNA, 75 bp, synthetic construct
  source 1..75: mol_type = other DNA
cgctgtttcaataacatcatcggctactgtaactcactttgctatcacggtaagttgcagcctaaaagagggatg

SEQ ID NO: 841787 - DNA, 75 bp, synthetic construct
  source 1..75: mol_type = other DNA
gcaactggctactgcgcctgttgatggcccgtgttgccgaacagacaggaaaaaatgaccttgccctgcacctgc

SEQ ID NO: 841788 - DNA, 75 bp, synthetic construct
  source 1..75: mol_type = other DNA
agccgtgattcaggcaggcaaaaatgtcactgccgttttttccagtgatatcagtaatacatccacaacctcaaa

SEQ ID NO: 841789 - DNA, 75 bp, synthetic construct
  source 1..75: mol_type = other DNA
ggataccggaacgctgggtttcagtgaccttcacaacgaagcggattataaagtcagtcacagtggaatcagtct

SEQ ID NO: 841790 - DNA, 75 bp, synthetic construct
  source 1..75: mol_type = other DNA
atcgcacaatcattttctatcgcgtcggctcaagggcctttttcgtatatgcatacgcaaaaaatgaacgtgaaa

SEQ ID NO: 841791 - DNA, 75 bp, synthetic construct
  source 1..75: mol_type = other DNA
atactctaaaaatagagtgttttttgagccgccattccttagcaagtcctctgtatggatattgcctgccctatt

SEQ ID NO: 841792 - DNA, 75 bp, synthetic construct
  source 1..75: mol_type = other DNA
gtactcaatctaacagatgaacaactggcacaactgattctacagggtcagtttacggaggtaccaaatgagtaa

SEQ ID NO: 841793 - DNA, 75 bp, synthetic construct
  source 1..75: mol_type = other DNA
ctctgctgcgtccggctgtggaactgaataccgccgtggtggcagcaacggcggccggtgtctgtgtgacagcgc

SEQ ID NO: 841794 - DNA, 75 bp, synthetic construct
  source 1..75: mol_type = other DNA
actgatcgcaccgtttatctgcaaatcaaaaacacctccgataaggatatgagtggccttcagggaaaaattaac

SEQ ID NO: 841795 - DNA, 75 bp, synthetic construct
  source 1..75: mol_type = other DNA
gagcgcacctccgggcaggtgacgactgataatgtggctgcgctgaaacagggaacgtcgggttataaagtgcag

SEQ ID NO: 841796 - DNA, 75 bp, synthetic construct
  source 1..75: mol_type = other DNA
ttatcgcagccgttgttctgggggcgtttctcctttctggctgtggtgcgatgggcaccgcaattaaaaagcgta

SEQ ID NO: 841797 - DNA, 75 bp, synthetic construct
  source 1..75: mol_type = other DNA
tgacttctccggataaagcctggtactggattcaggcgaatgtgctgaaggccgataagatggacctgcgggagt

SEQ ID NO: 841798 - DNA, 75 bp, synthetic construct
  source 1..75: mol_type = other DNA
tgatcaactcactgacggattattttgttgaggtcggtaagctatttcaggagatgcacgggcgcgggaaagaga

SEQ ID NO: 841799 - DNA, 75 bp, synthetic construct
  source 1..75: mol_type = other DNA
cgatggtggaagatatcaactacaccatggtaactgatgtgcagatcgcagagcgcacctccgcgcaggtgacga

SEQ ID NO: 841800 - DNA, 75 bp, synthetic construct
  source 1..75: mol_type = other DNA
gtcggcaactcgatgtttgccgatctggtcagcgtcgccgggcatatctacaagcacggcgtgatggatggcctg

SEQ ID NO: 841801 - DNA, 75 bp, synthetic construct
  source 1..75: mol_type = other DNA
ggtggccaagcctttactgttaccggcggatattattcagttaccgaaagggcaggcgtttgccctgctggaggg

SEQ ID NO: 841802 - DNA, 75 bp, synthetic construct
  source 1..75: mol_type = other DNA
ttatgtcaccaatatcggggaactctatcagacgtattcgatgcaggtgatcaaagcacagctgccggatttatt

SEQ ID NO: 841803 - DNA, 75 bp, synthetic construct
  source 1..75: mol_type = other DNA
aaagacgtcacccttgccctgggggagcgtgttggccatacggtggtttatggcaccacacgcgtcggtaagacc

SEQ ID NO: 841804 - DNA, 75 bp, synthetic construct
  source 1..75: mol_type = other DNA
ctgctggctcccgactatcttgatatggatgactcacggcccatatttgactgggagcaaatcatccgtaaaaaa

SEQ ID NO: 841805 - DNA, 75 bp, synthetic construct
  source 1..75: mol_type = other DNA
aatagcggaagagatgcggcgcagctatcacagcggcgaatcctggtggcgggacggtccggccctgaatgtgcc

SEQ ID NO: 841806 - DNA, 75 bp, synthetic construct
  source 1..75: mol_type = other DNA
tgggaattgatgtttcgaaagctacactggacattgctgccagcactgatattactccgtttacggtcagtaatg

SEQ ID NO: 841807 - DNA, 75 bp, synthetic construct
  source 1..75: mol_type = other DNA
ttacggctatttaattactgtctgcttgccgcattattatgcgctattgtcgggggcgattggttcggtcagtat

SEQ ID NO: 841808 - DNA, 75 bp, synthetic construct
  source 1..75: mol_type = other DNA
tgcgttaagccctgctttttcccgtttcgtactgtatatcttccatccagcgggtatactgatcccttcctttaa

SEQ ID NO: 841809 - DNA, 75 bp, synthetic construct
  source 1..75: mol_type = other DNA
gttatgcaaggatcaggcggcaaaacgttataacaccggcgagcaaaaaatcgacgtcaccgccttcgaacagtt

SEQ ID NO: 841810 - DNA, 75 bp, synthetic construct
  source 1..75: mol_type = other DNA
ttgcatccgaccttgacgatgcaacacgtaagcagcttgaccacggtcagaaagtaaccgaactgctgaaacaga

SEQ ID NO: 841811 - DNA, 75 bp, synthetic construct
  source 1..75: mol_type = other DNA
acgggcgttccgcgaccgtctggcggctaatggcaagaaaggaaaggtgattctcggcgcgatgatgcgcaagct

SEQ ID NO: 841812 - DNA, 75 bp, synthetic construct
  source 1..75: mol_type = other DNA
tttgcaggtatgttcggctccaaaggaatcgacctggatctgggggcctttgttgagcttcaggacgggtataaa

SEQ ID NO: 841813 - DNA, 75 bp, synthetic construct
  source 1..75: mol_type = other DNA
gacagaactggtccgcgcctttagtggttttgaatactgctgggaaattgagctacagctaaagccccacgccgc

SEQ ID NO: 841814 - DNA, 75 bp, synthetic construct
  source 1..75: mol_type = other DNA
ccagtaagtgccttacggctatttaattactgtctgattgccgcattattatgcgctattgtcggggcgatttga

SEQ ID NO: 841815 - DNA, 75 bp, synthetic construct
  source 1..75: mol_type = other DNA
aataaaaagcgattcctacaaagatttatggttaacgtggcaaacaacctgcgaaccaagcgaaaagtttttctt

SEQ ID NO: 841816 - DNA, 75 bp, synthetic construct
  source 1..75: mol_type = other DNA
aaaaaacgctttatctcacggtaagtattggcgtcggtagtggtcgcgcatcgtaccgaacgctgaccgatgatt

SEQ ID NO: 841817 - DNA, 75 bp, synthetic construct
  source 1..75: mol_type = other DNA
acagcccgttgccggatcacgctcgcctggcggcatcggcccatctggtgcgtgagtcccgcaatccggacggtc

SEQ ID NO: 841818 - DNA, 75 bp, synthetic construct
  source 1..75: mol_type = other DNA
atgagcgacgatttcactcaggcgcaggaaaccccctggcgttacggttttctgaacctgatgcgccgcgtggat

SEQ ID NO: 841819 - DNA, 75 bp, synthetic construct
  source 1..75: mol_type = other DNA
agccggatgagtaaggccggacatgtgtcgcttcgcagggcgttgtatatgcccgcaatggtagccaccagtaag

SEQ ID NO: 841820 - DNA, 75 bp, synthetic construct
  source 1..75: mol_type = other DNA
tattccgctttaataaaacataccagataaagaccggacaactgcgccgcacctggccgatcgccgcagtgttga

SEQ ID NO: 841821 - DNA, 75 bp, synthetic construct
  source 1..75: mol_type = other DNA
ctgcgggtgattattccaccgttaaccagccagtatctcaacatcgtcaaaaactcctctcttgccgccgctatt

SEQ ID NO: 841822 - DNA, 75 bp, synthetic construct
  source 1..75: mol_type = other DNA
ccgcagtgttgatcattggtttgcctttactggcgcaatggctttttggcgcagcactacactgggatgtcccag

SEQ ID NO: 841823 - DNA, 75 bp, synthetic construct
  source 1..75: mol_type = other DNA
ctgcgctttatatggctgcgcttgtcgcgaccagatttaatcccgtaataaaagatttttatacacgactcatta

SEQ ID NO: 841824 - DNA, 75 bp, synthetic construct
  source 1..75: mol_type = other DNA
tggttgcgggtgtcaggcaggaattcagacctgagtcagcccagacctgggctgctgtcggttttcagggacttg

SEQ ID NO: 841825 - DNA, 75 bp, synthetic construct
  source 1..75: mol_type = other DNA
atttatattgagatcttccgtaatattccgccgctgctgcaaatcttcttctggtactttgccgtgttgcgcaat

SEQ ID NO: 841826 - DNA, 75 bp, synthetic construct
  source 1..75: mol_type = other DNA
atatgcccgcaatggtagccaccagtaagactgagtggggacgggcgttccgcgaccgtctggcggctaatggca

SEQ ID NO: 841827 - DNA, 75 bp, synthetic construct
  source 1..75: mol_type = other DNA
gatttcaggcgttgggtgtggatcactattgcaccgttcgtgacagccggacatgtgtcgcttcgcaggccgttg

SEQ ID NO: 841828 - DNA, 75 bp, synthetic construct
  source 1..75: mol_type = other DNA
tcgcttcgcagggcgttgtatatgcccgcaatggtagccaccagtaagactgagtggggacgggcgttccgcgac

SEQ ID NO: 841829 - DNA, 75 bp, synthetic construct
  source 1..75: mol_type = other DNA
tatcccggcgctacaagggtttaacttccgtggcggtatggttctcatacccgaactggcagccttaacgctggc

SEQ ID NO: 841830 - DNA, 75 bp, synthetic construct
  source 1..75: mol_type = other DNA
ccgcagctgggagatgggtttcttgcatttatcctggctgttgttatggctatagccctttctgttaggctattc

SEQ ID NO: 841831 - DNA, 75 bp, synthetic construct
  source 1..75: mol_type = other DNA
actggtttcagcattgtgtattgtgttcgcttctgttctgggcttctttatcggtctggcgagactttcggataa

SEQ ID NO: 841832 - DNA, 75 bp, synthetic construct
  source 1..75: mol_type = other DNA
gtcactactgtcgacaccgctaagtctggcaatctggtgaactggaaagccggggcgctgtatcacctgacagac

SEQ ID NO: 841833 - DNA, 75 bp, synthetic construct
  source 1..75: mol_type = other DNA
cgccatgcttcaggctggaaactttcgggaaaaaagggttcgtcaaccaataattttcgggaaatctcggaaacg

SEQ ID NO: 841834 - DNA, 75 bp, synthetic construct
  source 1..75: mol_type = other DNA
ttgcaaacggggatgcgttcatacagtactgttatgaccactattaccagagaaaacgcggagattaaatcattc

SEQ ID NO: 841835 - DNA, 75 bp, synthetic construct
  source 1..75: mol_type = other DNA
tatttatcatcctgacagcagcattcatcccggcggcctgacgcgcaacggcgcaaacgccaatggtcagacgga

SEQ ID NO: 841836 - DNA, 75 bp, synthetic construct
  source 1..75: mol_type = other DNA
tcacgcacggcgaataccaaagatgtgagtaataaaattctcaccaaccagaccaacctgacctcgacgttctat

SEQ ID NO: 841837 - DNA, 75 bp, synthetic construct
  source 1..75: mol_type = other DNA
tgattggcggctatacccagcaaaaagcaactatcaaaaacggcaaagatgttgcccaggatggttcctcatcgc

SEQ ID NO: 841838 - DNA, 75 bp, synthetic construct
  source 1..75: mol_type = other DNA
attggaaagtaagtagtatgcgtcgcgataacatgcgtttattactggataacgaccttatagaaaggaagatgt

SEQ ID NO: 841839 - DNA, 75 bp, synthetic construct
  source 1..75: mol_type = other DNA
atgaacgagatcgaagacggtatctatttgcacatgttatttaatatcgcctatttggttaaaggtgataaggtg

SEQ ID NO: 841840 - DNA, 75 bp, synthetic construct
  source 1..75: mol_type = other DNA
cattggtatcaacataatatcccaagtatgggttcttcattagaagatagcgttgacgcaataaaatccattact

SEQ ID NO: 841841 - DNA, 75 bp, synthetic construct
  source 1..75: mol_type = other DNA
gtgatggcgcattcgttctttatgcgcaatatcgagacggtgagttttttgatgtagtccgtgatggtgatgaat

SEQ ID NO: 841842 - DNA, 75 bp, synthetic construct
  source 1..75: mol_type = other DNA
accaatgattttttatttatgccctgaaaacaatctgcctaaaacagatgatgaatatgcacaagctactgacgc

SEQ ID NO: 841843 - DNA, 75 bp, synthetic construct
  source 1..75: mol_type = other DNA
caaccgccgcaagcggcccacgcgcaggaaatcccgctcatccatcgcgcagtgcatagccgcacgctggcaatt

SEQ ID NO: 841844 - DNA, 75 bp, synthetic construct
  source 1..75: mol_type = other DNA
tattgaaaatgaagttgagcaaaatgatgatgggacctactcgcaatacggaaagaaacgcgtcgaaggctatga

SEQ ID NO: 841845 - DNA, 75 bp, synthetic construct
  source 1..75: mol_type = other DNA
aagcaaactaaacttttatctatcaggaatagatcaggaaggaaaggtgggataaaaaaatctgaaatgtatcga

SEQ ID NO: 841846 - DNA, 75 bp, synthetic construct
  source 1..75: mol_type = other DNA
gtaatcatgggcgtctacacccctgacgaattacaggaaacggcaccgcgcgttgagcgagacattactccgcaa

SEQ ID NO: 841847 - DNA, 75 bp, synthetic construct
  source 1..75: mol_type = other DNA
tttctgcagatcaaaaacacgtctgataaagacatgagtgggctgcagggcaaaattgctgatgctgtgaaagca

SEQ ID NO: 841848 - DNA, 75 bp, synthetic construct
  source 1..75: mol_type = other DNA
gagcaaacgcgtaaagcggatagccgtgatccagaagaaatgctgatggcctttaccagcgcagcgatgaattac

SEQ ID NO: 841849 - DNA, 75 bp, synthetic construct
  source 1..75: mol_type = other DNA
ccaacaaaagatcgcatcaactacgagtggttcgggccgtgggaacgcgtgatcggtaagtttgttgagaaaaca

SEQ ID NO: 841850 - DNA, 75 bp, synthetic construct
  source 1..75: mol_type = other DNA
gtgatccagaagaaatgctgatggcctttaccagcgcagcgatgaattacagcaccgtctccgaactggataagg

SEQ ID NO: 841851 - DNA, 75 bp, synthetic construct
  source 1..75: mol_type = other DNA
agggcaaaattgctgatgctgtgaaagcaaaagggtatcaggtggtgacttctccggataaagcctactactgga

SEQ ID NO: 841852 - DNA, 75 bp, synthetic construct
  source 1..75: mol_type = other DNA
gatgctgtgaaagtgaaaggttatcagattgtgacctcaccggataaagccttttactggattcaggctaacgtg

SEQ ID NO: 841853 - DNA, 75 bp, synthetic construct
  source 1..75: mol_type = other DNA
gatgacgggacttactcgcaatacggtaagaaacgcgtcgaaggctatgagatatccgtggccgggaatatcact

SEQ ID NO: 841854 - DNA, 75 bp, synthetic construct
  source 1..75: mol_type = other DNA
atccccggctataacgcgaatccggacgagacaaaatactacggtggcgtgactgccggcggggatggcggcctg

SEQ ID NO: 841855 - DNA, 75 bp, synthetic construct
  source 1..75: mol_type = other DNA
cagtgcaaacaaggtcaatctgaaatttgaagaagcgaaacctgtaccggaagaccagatggcaaagtcaattgc

SEQ ID NO: 841856 - DNA, 75 bp, synthetic construct
  source 1..75: mol_type = other DNA
ggtctggtgggtatggctgcagatgcgatggtggaagatgtgaactataccatgatcacggatgtgcagattgca

SEQ ID NO: 841857 - DNA, 75 bp, synthetic construct
  source 1..75: mol_type = other DNA
gctgcggcaaaaccactattttgcgcctggttgccgggctggaaaaaccgagcgaagggcaaattttcattgatg

SEQ ID NO: 841858 - DNA, 75 bp, synthetic construct
  source 1..75: mol_type = other DNA
ttgcctgtatcccatattttatgtggtaataacatttgctttcgttattggttttacctccgctggaggcgttgt

SEQ ID NO: 841859 - DNA, 75 bp, synthetic construct
  source 1..75: mol_type = other DNA
cattcaccgggtacagccaatattttaattaaagcgtttgtttcctgcggacaatttttattgccgttaatcatt

SEQ ID NO: 841860 - DNA, 75 bp, synthetic construct
  source 1..75: mol_type = other DNA
ctgtttatcggcttacgcagccgcaaagaaacgcagcatcactcgctaaaggaaaatgtcgctccgggtgggtaa

SEQ ID NO: 841861 - DNA, 75 bp, synthetic construct
  source 1..75: mol_type = other DNA
cggtgtaggccttgctgctggtctggtgggtatggctgcagatgcgatggtggaagatgtgaactataccatgat

SEQ ID NO: 841862 - DNA, 75 bp, synthetic construct
  source 1..75: mol_type = other DNA
tactcagtatctacaccgtgggttcgctgctttgtgtatttattaccgctccactcattcgtaataccgttcgcc

SEQ ID NO: 841863 - DNA, 75 bp, synthetic construct
  source 1..75: mol_type = other DNA
tacagtgcgggcagtattgcgacctttactattccgttgattacggctcatctgtcccaaagaagtattgccgat

SEQ ID NO: 841864 - DNA, 75 bp, synthetic construct
  source 1..75: mol_type = other DNA
ctggattcaggcaaacgtgctgaaagccgagaaaatggatctgcgcgatgcccagggcttcctcaagaccggcta

SEQ ID NO: 841865 - DNA, 75 bp, synthetic construct
  source 1..75: mol_type = other DNA
ggccctttcagggtgtggtgcgatgagcacagcaatcaagaagcgtaaccttgaggtgaagactcagatgagtga

SEQ ID NO: 841866 - DNA, 75 bp, synthetic construct
  source 1..75: mol_type = other DNA
taccgatgtgcagatagctgaacggacaaaatccagcgtcagaacggataatgttgccgccctgcgtcagggaac

SEQ ID NO: 841867 - DNA, 75 bp, synthetic construct
  source 1..75: mol_type = other DNA
caccccatccgggtcgtcgcttacctgtcataaagaaaaccaccagctctacggaacatcgctgttcaattatcg

SEQ ID NO: 841868 - DNA, 75 bp, synthetic construct
  source 1..75: mol_type = other DNA
catggtcacagatattcagatttctgaaaaaacggatgccagcgtccagaccgataatgtagcggccctgaagca

SEQ ID NO: 841869 - DNA, 75 bp, synthetic construct
  source 1..75: mol_type = other DNA
agcaaagcggccgtcacgaccgacaatattgccgccctgaagcagggaacgtccggcattaagctgcagaccagc

SEQ ID NO: 841870 - DNA, 75 bp, synthetic construct
  source 1..75: mol_type = other DNA
tgacctcacctgacaaggcatactactggatccaggccaatgtcctgaaggcagacaaaatggatttgcgggagt

SEQ ID NO: 841871 - DNA, 75 bp, synthetic construct
  source 1..75: mol_type = other DNA
ttgagccggggcaaaaactgcatgttctgctacgcccggaagacttacgcgttgacgaaatcaacgacgacaacc

SEQ ID NO: 841872 - DNA, 75 bp, synthetic construct
  source 1..75: mol_type = other DNA
tggcccttgatgccggggtgagcgtgcatatcgtgcgcgactacctgctgcgcggattgctgcggccagtcgcct

SEQ ID NO: 841873 - DNA, 75 bp, synthetic construct
  source 1..75: mol_type = other DNA
tgcagggattaagtctcgacccgacatctcaccgagtgatggcgggcgaagagccgctggagatggggccgacag

SEQ ID NO: 841874 - DNA, 75 bp, synthetic construct
  source 1..75: mol_type = other DNA
ttcgtcttcgttacccacgaccaggaagaggcactcactatgtctgaccggattgtggtgatgcgcgatggtcgc

SEQ ID NO: 841875 - DNA, 75 bp, synthetic construct
  source 1..75: mol_type = other DNA
atgtggcctttggcttgcgtatgcaaaaaacccccgctgctgaaattacgcctcgcgtgatggaagccctgcgga

SEQ ID NO: 841876 - DNA, 75 bp, synthetic construct
  source 1..75: mol_type = other DNA
acgtcgaagggctgattggttacgttcgcgagcgtaactacaaaggcatgacgctggagtcggttgtcgaactgg

SEQ ID NO: 841877 - DNA, 75 bp, synthetic construct
  source 1..75: mol_type = other DNA
acaaaggccagcgtcagaacggataacattgcagccctgcgtcagggcacctctggagcaaaagtccagaccagc

SEQ ID NO: 841878 - DNA, 75 bp, synthetic construct
  source 1..75: mol_type = other DNA
gccatatttatttctcgtcgtggaagccgactttctcgccagcaggcctatcgcatcattcgtgatgctggtatt

SEQ ID NO: 841879 - DNA, 75 bp, synthetic construct
  source 1..75: mol_type = other DNA
tggtggaagatgtgaactataccatgatcacggatgtacagattgcagagcgtactaaggcaacggtgacaacgg

SEQ ID NO: 841880 - DNA, 75 bp, synthetic construct
  source 1..75: mol_type = other DNA
gtttaagggccacattaataccgggctggcacgttgggcgatcgccagtctgttgaccctggcgacctgcgtcgg

SEQ ID NO: 841881 - DNA, 75 bp, synthetic construct
  source 1..75: mol_type = other DNA
ttgccctggtcgccggagaaacctccggcgatattctgggcgccggtttaatccgtgccctgaaagaacgtgtgc

SEQ ID NO: 841882 - DNA, 75 bp, synthetic construct
  source 1..75: mol_type = other DNA
agtgctcggtcgtttgcgtcgcttactgcatattcgagccgatctgacgaaacgttttggtgagctaaagccaga

SEQ ID NO: 841883 - DNA, 75 bp, synthetic construct
  source 1..75: mol_type = other DNA
caaccgcttcctgaagaagaagccgatggagtttggttcgtggaccacacgagaaatcctgatcgcgtctttcgc

SEQ ID NO: 841884 - DNA, 75 bp, synthetic construct
  source 1..75: mol_type = other DNA
cgtcgatggaacaggcaattggtctgctttccggtggcaatcagcaaaaagtggcgattgcccgcggtctgatga

SEQ ID NO: 841885 - DNA, 75 bp, synthetic construct
  source 1..75: mol_type = other DNA
attggagataagaaacaagcattatattacagaagtcgcaacagtgccgtagccacattcaaattaaagggtctg

SEQ ID NO: 841886 - DNA, 75 bp, synthetic construct
  source 1..75: mol_type = other DNA
tgatcgcgtctttcgccggggtgcgtggggcgatcactctggccggtgtgctctctatcccgctgctcttgccgg

SEQ ID NO: 841887 - DNA, 75 bp, synthetic construct
  source 1..75: mol_type = other DNA
ccacctgcgcgccacgcgggagatcagcaacgaaacgctgcaaaaattactgcacgatctcgatttgcttgaagc

SEQ ID NO: 841888 - DNA, 75 bp, synthetic construct
  source 1..75: mol_type = other DNA
cggataccgaagagaatatcgataaccagctgctcacggaggtcagttctcgcgtcattggtaacctgcgtcgtc

SEQ ID NO: 841889 - DNA, 75 bp, synthetic construct
  source 1..75: mol_type = other DNA
acgtagcgggccttaaacaggcaatcaaaacgccatcggaagagtacgcgaagattggcattgagaaagacggta

SEQ ID NO: 841890 - DNA, 75 bp, synthetic construct
  source 1..75: mol_type = other DNA
tacgtttgagcgatctgggctataccaataaatcgcaaagtaatcttggtattacctttaatgatctctacgagt

SEQ ID NO: 841891 - DNA, 75 bp, synthetic construct
  source 1..75: mol_type = other DNA
gcgaagaggattttgtagccgagcgcgaggcatctgaacgccgtcagcaggaaatggaagccgctgataccgaac

SEQ ID NO: 841892 - DNA, 75 bp, synthetic construct
  source 1..75: mol_type = other DNA
gccatcttgcatttgtcacattttcttgagctggtgttgaagttatatattgttacagtagatgaaaatttactg

SEQ ID NO: 841893 - DNA, 75 bp, synthetic construct
  source 1..75: mol_type = other DNA
ttcgggcgctgatgctaaagagaaaatctctgcgggctatttccgcgttattcgcaactactatcgcttcggttg

SEQ ID NO: 841894 - DNA, 75 bp, synthetic construct
  source 1..75: mol_type = other DNA
aattggctgtgaaactgcgcaattcccgttgccgcaggtgggcaaagatctgttccgggatctgaaacgcgtcgc

SEQ ID NO: 841895 - DNA, 75 bp, synthetic construct
  source 1..75: mol_type = other DNA
tggctgtatggtcgctcgttgcgtttcctcagccgctggggcggcgatgaacccgcgacgcagatcgtattgctg

SEQ ID NO: 841896 - DNA, 75 bp, synthetic construct
  source 1..75: mol_type = other DNA
cgttctgtcgggcagatcccggtttattacagccatctgaacacggggcgtccgtataacgccgacaagccaaac

SEQ ID NO: 841897 - DNA, 75 bp, synthetic construct
  source 1..75: mol_type = other DNA
agcacattcgcgtgttgccggtgattatccgcgcgattggtttcctgctttccaaagtcaatggcatgggcaaac

SEQ ID NO: 841898 - DNA, 75 bp, synthetic construct
  source 1..75: mol_type = other DNA
atggaagataaatgcagacaacttttcgcgctggttgaggcgatgaacgaagccctcgacaagcaacgctggcga

SEQ ID NO: 841899 - DNA, 75 bp, synthetic construct
  source 1..75: mol_type = other DNA
aacgttaaatatgatatggggttgtttaacgacccatacagccatttggggccgaaagagtctgacccggtggat

SEQ ID NO: 841900 - DNA, 75 bp, synthetic construct
  source 1..75: mol_type = other DNA
tccattaacgcccgaagcgcgggatgctttcgtcaccgaactgcttaagaaaatgacagttgatgagaaaattgg

SEQ ID NO: 841901 - DNA, 75 bp, synthetic construct
  source 1..75: mol_type = other DNA
accgaaagagtctgacccggtggataccaatgctgaaagccgcctgcaccgcaaagaagcgcgtgaagtggcgcg

SEQ ID NO: 841902 - DNA, 75 bp, synthetic construct
  source 1..75: mol_type = other DNA
atggaaaaacaacgcaggcaacttttcgcactggtcgaggcgatgaatgaagccctcgacaagcaacgctggcga

SEQ ID NO: 841903 - DNA, 75 bp, synthetic construct
  source 1..75: mol_type = other DNA
aggagcgtattgcgcgagcggcaacggcagaagtggcgattgtggcaatccagaaaatggaggagcgtctggcgg

SEQ ID NO: 841904 - DNA, 75 bp, synthetic construct
  source 1..75: mol_type = other DNA
gtcattctcttctcgctgtttgtcggcgtggtgatgttgcctattctgctacaacacattgaagtcgcggatcat

SEQ ID NO: 841905 - DNA, 75 bp, synthetic construct
  source 1..75: mol_type = other DNA
atggaaaaacaacgcaggcaacttttcgcgctggttgaagcgatgaacgaagccctcgacaagcaacgctggcga

SEQ ID NO: 841906 - DNA, 75 bp, synthetic construct
  source 1..75: mol_type = other DNA
acggcgcgtttaatgccctgattaaacggcgcgagcagcgcgcagaagtgttgaaggcgcgtatggaacagcatc

SEQ ID NO: 841907 - DNA, 75 bp, synthetic construct
  source 1..75: mol_type = other DNA
gcgtttaatgccctgattaaacggcgcgagcagcgcgcagaagtgttgaaagcgcgtatggaacagcatcagcgg

SEQ ID NO: 841908 - DNA, 75 bp, synthetic construct
  source 1..75: mol_type = other DNA
atgagctggtagcctgctttgataatcccgatctgactttctctgcccgtatcttacggtctatgattgatactg

SEQ ID NO: 841909 - DNA, 75 bp, synthetic construct
  source 1..75: mol_type = other DNA
catttgaattgctggtcatcaacatctgctcactctcctggtcggacattgaagctgccgggttaatgtcgcatc

SEQ ID NO: 841910 - DNA, 75 bp, synthetic construct
  source 1..75: mol_type = other DNA
taccgccgtacttaaccgctggctggaagttactgaaaaagataaaaactcccgtagcgccacgttctacaacac

SEQ ID NO: 841911 - DNA, 75 bp, synthetic construct
  source 1..75: mol_type = other DNA
acacggcggcgcgctgaagggcgacagaatgcaggtatctggcctacgtgatatccctagcccgtctatcacaga

SEQ ID NO: 841912 - DNA, 75 bp, synthetic construct
  source 1..75: mol_type = other DNA
gtgagcggaaaaagaatgactaacagagagcttgtcgatgccgcgattaagcttgctggtgatttttattcaatg

SEQ ID NO: 841913 - DNA, 75 bp, synthetic construct
  source 1..75: mol_type = other DNA
atgtcgcatccactgtggtcgcatttcgatattgagttcaagaactttaactccgccacctcctacagtggcccg

SEQ ID NO: 841914 - DNA, 75 bp, synthetic construct
  source 1..75: mol_type = other DNA
cgttatggtcgcatttcgatattgagttcaagaatttcaactctgcgacctcatacagcggcccggcggcgattc

SEQ ID NO: 841915 - DNA, 75 bp, synthetic construct
  source 1..75: mol_type = other DNA
tgtttttattcagaataacgattgtctggccatccgtgctgacaggatgcgtgatgatgctgtatttcgcgaagg

SEQ ID NO: 841916 - DNA, 75 bp, synthetic construct
  source 1..75: mol_type = other DNA
atcgtgaagccgggagaagtccacgccgtaaggccgcacccgttaccgtcagggcagcaaattatgtggatgtaa

SEQ ID NO: 841917 - DNA, 75 bp, synthetic construct
  source 1..75: mol_type = other DNA
attgcagcgccacgttcatcacttatgagtcggtacagcgatacatcgtgaagccgggagaagtccacgccgtga

SEQ ID NO: 841918 - DNA, 75 bp, synthetic construct
  source 1..75: mol_type = other DNA
tatccgggcgtcagcaaaacagcggattacaaagcgcgggcgcagaaattctttgatgaactggacgccttcttt

SEQ ID NO: 841919 - DNA, 75 bp, synthetic construct
  source 1..75: mol_type = other DNA
atggtctccagcggatagggccgtcggccattgcccgctttgggataaaacggctcgatgacagcggtcatattc

SEQ ID NO: 841920 - DNA, 75 bp, synthetic construct
  source 1..75: mol_type = other DNA
cgccttctttactgaactggagaaatcgggtcgtaaagtgatggtggtagtggtgccggaacacggcggcgcgct

SEQ ID NO: 841921 - DNA, 75 bp, synthetic construct
  source 1..75: mol_type = other DNA
aagctttgcggcttcataaagaatattatggtgatgaatgttttggcactattgtaaaaaattatgattattatc

SEQ ID NO: 841922 - DNA, 75 bp, synthetic construct
  source 1..75: mol_type = other DNA
gtggcggccctgtttggctcctacgatgcgcagaccggtgttcgccatatcaaggaagtgtttatccttatcccc

SEQ ID NO: 841923 - DNA, 75 bp, synthetic construct
  source 1..75: mol_type = other DNA
acacatatccggaccatcacccatcgggtgacggacaccaccctgaaggtggtggcagccgatccgaatacggtg

SEQ ID NO: 841924 - DNA, 75 bp, synthetic construct
  source 1..75: mol_type = other DNA
tcattacaattttactgttactgcctttatcagttacgaaagcagatatattatatccgtggccaagtgatactg

SEQ ID NO: 841925 - DNA, 75 bp, synthetic construct
  source 1..75: mol_type = other DNA
tgcaaggaaaaccaacatcgctgccgtttgagaaaaccgagtgcggtatgtattacctgccgtatgcgacctctc

SEQ ID NO: 841926 - DNA, 75 bp, synthetic construct
  source 1..75: mol_type = other DNA
cttcccgtcctgagacagaaattcagttccacgcccctaccgtgaaggatgcgctgaaatattctgacctgaacc

SEQ ID NO: 841927 - DNA, 75 bp, synthetic construct
  source 1..75: mol_type = other DNA
gtgcataagaacaaagataaatttgtgactgactggttttatgtgccttgcgcatcacaaaaaaagctacagcga

SEQ ID NO: 841928 - DNA, 75 bp, synthetic construct
  source 1..75: mol_type = other DNA
tgatgggttttccacattcccgcatcggggcaataaacgcgatgatattcgacagggaatgcgggtaactcactt

SEQ ID NO: 841929 - DNA, 75 bp, synthetic construct
  source 1..75: mol_type = other DNA
ggccgaggaggatatagaacaacgggaagaactctatacaacaaacggggcacagcccgactattcaacttacct

SEQ ID NO: 841930 - DNA, 75 bp, synthetic construct
  source 1..75: mol_type = other DNA
tggcgcggtacttgacagaactacacctgctgaaattaaagaaataataaatatatcaattggaatgattcgcgg

SEQ ID NO: 841931 - DNA, 75 bp, synthetic construct
  source 1..75: mol_type = other DNA
ggcaccagtctgggcagcggtgactgccggatattgacaggcgtggatcatataaagtgcaagggaaagccggta

SEQ ID NO: 841932 - DNA, 75 bp, synthetic construct
  source 1..75: mol_type = other DNA
tccttattgggggctggtggatatggagatggcacggttcattcaggacaaccttcattattgcttggatctgta

SEQ ID NO: 841933 - DNA, 75 bp, synthetic construct
  source 1..75: mol_type = other DNA
atgacatatgaagtcatcattacccccgaggccgaacagcagataataaacctgcacagatatataacggagaaa

SEQ ID NO: 841934 - DNA, 75 bp, synthetic construct
  source 1..75: mol_type = other DNA
cattcgtaataccgttcgcccaacaacattactgatgctgtacacttttatctcatttattgctctgtttaccgt

SEQ ID NO: 841935 - DNA, 75 bp, synthetic construct
  source 1..75: mol_type = other DNA
aagcaacggggatctattacagtgcgggcagcattgcaacatttaccattccgttgattacggctcatctttcgc

SEQ ID NO: 841936 - DNA, 75 bp, synthetic construct
  source 1..75: mol_type = other DNA
acaaattggcctgacgttaatggcggaacgttttccctacgctaaaggtaaagctacggggatctattacagtgc

SEQ ID NO: 841937 - DNA, 75 bp, synthetic construct
  source 1..75: mol_type = other DNA
ctatatctcaatggcaacgttttatctggttagccagtggctggcacaatacggacaatttgttgcaggcatgtc

SEQ ID NO: 841938 - DNA, 75 bp, synthetic construct
  source 1..75: mol_type = other DNA
cgctagggttgtatttcaattacctggtgcatggtatgggcgtcattttgatgagcctgaatatggcctcgctgg

SEQ ID NO: 841939 - DNA, 75 bp, synthetic construct
  source 1..75: mol_type = other DNA
tgtgtgtatttattactgctccactcattcgtaaaaccgttcactcaacaacattgttgatgctgtacactttta

SEQ ID NO: 841940 - DNA, 75 bp, synthetic construct
  source 1..75: mol_type = other DNA
gttcaatcatggtcagggtgccgtgtttatcgctgctacgaagctgagaacacgcaaagaacctttcattgatat

SEQ ID NO: 841941 - DNA, 75 bp, synthetic construct
  source 1..75: mol_type = other DNA
aaaaaatcgcgtaaggggctggtgattattatcgctgcatttcttctgctggccgccggggtgtcggtctactat

SEQ ID NO: 841942 - DNA, 75 bp, synthetic construct
  source 1..75: mol_type = other DNA
aaaactcaaactggttgccgaccctctactcttcgaacgatttgatgaaatcgccttcaatgcaggcatgctgga

SEQ ID NO: 841943 - DNA, 75 bp, synthetic construct
  source 1..75: mol_type = other DNA
gccatttcatctaatgcaattgtcctgactacttttaaagacggtatcgcactaaccacaacacgaaaaaatgac

SEQ ID NO: 841944 - DNA, 75 bp, synthetic construct
  source 1..75: mol_type = other DNA
tacagtgccccgctgaagcccggctaccgcagcctgattcattctccgtctggtgttctcggcctgacggagaac

SEQ ID NO: 841945 - DNA, 75 bp, synthetic construct
  source 1..75: mol_type = other DNA
aagcaaccgcacaggctacagaatctgcgccactggcgaaaataacgaaacttccatatgacccaaatttgttta

SEQ ID NO: 841946 - DNA, 75 bp, synthetic construct
  source 1..75: mol_type = other DNA
ccgttgttatacctgaagggttttcatgccttgcaggcctatcgcatcggtcactggttgtggaatcaggggcgt

SEQ ID NO: 841947 - DNA, 75 bp, synthetic construct
  source 1..75: mol_type = other DNA
caaagtcaaaaaagaagcgccgtttgtcttccgcattaccctggtgcaggggctgaaccgtcagatccggcgcat

SEQ ID NO: 841948 - DNA, 75 bp, synthetic construct
  source 1..75: mol_type = other DNA
gctgggtgagtggcgcgatttaactgatgatgagttaatcgacctctttaagctcatcgaaaattcctcttccga

SEQ ID NO: 841949 - DNA, 75 bp, synthetic construct
  source 1..75: mol_type = other DNA
cttgtggttatgaactggcggaacgtggtgcagatacccgtttaattcaggattatctcgggcatcgaaatattc

SEQ ID NO: 841950 - DNA, 75 bp, synthetic construct
  source 1..75: mol_type = other DNA
agctgtaccgcgaaatgtgcagagtggtagggaaggtggttctggagatgcgcgatttgggtcaggagccaaagc

SEQ ID NO: 841951 - DNA, 75 bp, synthetic construct
  source 1..75: mol_type = other DNA
tcgagccgcgggaagccgaagatttagtgcttatcgccctgaataagcccgtgggcattgtcagcactacggaag

SEQ ID NO: 841952 - DNA, 75 bp, synthetic construct
  source 1..75: mol_type = other DNA
tcctcgggacggtgacgaaaaagtgcaaagtcaaaaagaagcgccgtttgtcttccgcattaccctggtgcaggg

SEQ ID NO: 841953 - DNA, 75 bp, synthetic construct
  source 1..75: mol_type = other DNA
gataaaccatcaatggatatggaccagcatttcaatggtattaaccatacatttgagtatggggatgggatctaa

SEQ ID NO: 841954 - DNA, 75 bp, synthetic construct
  source 1..75: mol_type = other DNA
ggtcgcggtatcatgctcgaccacgcgacgggcattgtggtgggtgaaactgcggtgattgaaaatgacgtgtcg

SEQ ID NO: 841955 - DNA, 75 bp, synthetic construct
  source 1..75: mol_type = other DNA
ctgctattgctattcgtgaagtcgttgaagaagcctacgccgccgaccctgaaatgatcgcttctgcggcctgcg

SEQ ID NO: 841956 - DNA, 75 bp, synthetic construct
  source 1..75: mol_type = other DNA
cattgtcggtaaaccagacagcgataaaccatcaatggatatggatcaacatttcaacggtattaaccatacctt

SEQ ID NO: 841957 - DNA, 75 bp, synthetic construct
  source 1..75: mol_type = other DNA
atattcaggcggtgcgtacccgcgacccggcggtggataaatactcaaccccgttgttatacctgaagggttttc

SEQ ID NO: 841958 - DNA, 75 bp, synthetic construct
  source 1..75: mol_type = other DNA
tctggaacaatattaaagcggaagccagaacgctggcggactgtgagccaatgctggccagtttttaccacgcaa

SEQ ID NO: 841959 - DNA, 75 bp, synthetic construct
  source 1..75: mol_type = other DNA
ctactctttgagcgattcgatgagattgccttcaacgcaggcatgctggataaatctgtaattctgaacaccaca

SEQ ID NO: 841960 - DNA, 75 bp, synthetic construct
  source 1..75: mol_type = other DNA
gtgttccattttccggtcaacaaaatagtgttgcacaaactgtccgctcaatggacagatgggtcgacttgtcag

SEQ ID NO: 841961 - DNA, 75 bp, synthetic construct
  source 1..75: mol_type = other DNA
tgatcgaagtcccggttgagtacatcgcaggtaaagtggttgctaaagactatattgatgagtctaccggcgagc

SEQ ID NO: 841962 - DNA, 75 bp, synthetic construct
  source 1..75: mol_type = other DNA
cgtatccgagcgtgttgttcaggaagaccgtttcaccaccatccacatccaggagctggcgtgtgtgtctcgtga

SEQ ID NO: 841963 - DNA, 75 bp, synthetic construct
  source 1..75: mol_type = other DNA
tggacggcaaccatcagatggagccgggcatgccagaatccttcaacgtattgttgaaagagattcgttcgctgg

SEQ ID NO: 841964 - DNA, 75 bp, synthetic construct
  source 1..75: mol_type = other DNA
cgttaaagactcttctctgcgcgtaccaaacggtgtatccggtacggttatcgatgttcaggtctttactcgcga

SEQ ID NO: 841965 - DNA, 75 bp, synthetic construct
  source 1..75: mol_type = other DNA
tcaaagttaacgaagacgagatgtatccgggtgaagcaggtatcgacatctacaacctgaccaaatacacccgtt

SEQ ID NO: 841966 - DNA, 75 bp, synthetic construct
  source 1..75: mol_type = other DNA
gactcagccctgaaactggggcaggcgcgcggcgtggcgattgtggcggcggtgaatcaggaattgccggtattt

SEQ ID NO: 841967 - DNA, 75 bp, synthetic construct
  source 1..75: mol_type = other DNA
tacgccattgctggttttatcgcctttctgatcatgcgtcagctaggtgaaatggtggtcgaagaacctgtcgca

SEQ ID NO: 841968 - DNA, 75 bp, synthetic construct
  source 1..75: mol_type = other DNA
gctggtgaggaaacacaatgggttatcccaggtcaaacagagtcaatttattatcagcaggatgggagctggctg

SEQ ID NO: 841969 - DNA, 75 bp, synthetic construct
  source 1..75: mol_type = other DNA
acgcttagtagatgcaggtgccgattacatttccgttgtgacaccatactacctggtgcctaaccaggaagattt

SEQ ID NO: 841970 - DNA, 75 bp, synthetic construct
  source 1..75: mol_type = other DNA
ctggaaatcgctaaacataaaaactttaaggtattaaacggctctgactcgttaatgctggatgcatttaaagaa

SEQ ID NO: 841971 - DNA, 75 bp, synthetic construct
  source 1..75: mol_type = other DNA
gaatatgctgctcgccaggtgaagcaaacggtggtgggtattggtagtgctgaaaaaagtcaggtgcaacatatg

SEQ ID NO: 841972 - DNA, 75 bp, synthetic construct
  source 1..75: mol_type = other DNA
aacgtattcgtaaggattttggtaaacgtttacaagttctggatgtaccttatctcctttctatccagcttgact

SEQ ID NO: 841973 - DNA, 75 bp, synthetic construct
  source 1..75: mol_type = other DNA
ggtgctgccttcgctgatggcggcaattgtcacccagcatcgccacatctcccgcgacgtattgatggagcacgt

SEQ ID NO: 841974 - DNA, 75 bp, synthetic construct
  source 1..75: mol_type = other DNA
cagatgctgcgcggtttaagcaagctgcgtaatctcggtcagggttacgtcaacttcggtgaaccaatgccgttg

SEQ ID NO: 841975 - DNA, 75 bp, synthetic construct
  source 1..75: mol_type = other DNA
tcggtcgcgacagttttgtgcgtttctcgccgtcagtttcgctgcgccgcatggccgatgaacacggcacggata

SEQ ID NO: 841976 - DNA, 75 bp, synthetic construct
  source 1..75: mol_type = other DNA
atgactgaaatggctaaaggaagcgtgacgcatcagcggttaatcgctttattatcacaagaaggtgctaacttc

SEQ ID NO: 841977 - DNA, 75 bp, synthetic construct
  source 1..75: mol_type = other DNA
cgtggcgcgtatgcactttgcccgccagcgtctggctgccgtgggcccgcgcttacccgcccgtcaggatctgtt

SEQ ID NO: 841978 - DNA, 75 bp, synthetic construct
  source 1..75: mol_type = other DNA
gcggatttgctgacgttgcgcgcccagtgcctggcgcatgatctgcctgatccattagagccgctggaggtagac

SEQ ID NO: 841979 - DNA, 75 bp, synthetic construct
  source 1..75: mol_type = other DNA
cgggcgttatcgaacgtcagtccgtagatcagccggtacagaccggttataaagctgttgactccatgatcccaa

SEQ ID NO: 841980 - DNA, 75 bp, synthetic construct
  source 1..75: mol_type = other DNA
ttccgcaccgctgcgcgttaaactgcgtctggtgatctatgagcgcgaagcgccggaaggcactgtaaaagacat

SEQ ID NO: 841981 - DNA, 75 bp, synthetic construct
  source 1..75: mol_type = other DNA
tcatacatggaggatcgaagacgatgattacttgaaaaattgtaaaattattaaaaaaggatttagtaaagaaat

SEQ ID NO: 841982 - DNA, 75 bp, synthetic construct
  source 1..75: mol_type = other DNA
aaatgcgctataaaaatactgccgcgcacacatggcaaatccaagatgaagattatcttaaaaattgtcaagtgg

SEQ ID NO: 841983 - DNA, 75 bp, synthetic construct
  source 1..75: mol_type = other DNA
taattgccaaagccatgaggaaattatacgacactttgaagtgaaagcaaaaacgctgacaaaagctttcgagac

SEQ ID NO: 841984 - DNA, 75 bp, synthetic construct
  source 1..75: mol_type = other DNA
gtgacagatattgagctgactggtaaatccatcacactgacggataagtatggcagttgcgttcaccagaatatc

SEQ ID NO: 841985 - DNA, 75 bp, synthetic construct
  source 1..75: mol_type = other DNA
tttcgacatcgcagcaggatactgagaaccagcgtttggaacttgagcaagctggatggactttcgacttttggt

SEQ ID NO: 841986 - DNA, 75 bp, synthetic construct
  source 1..75: mol_type = other DNA
agcagcgaccgatgccggtgctgcggcggcacagcgtattggcgagctggtatccgtacacgtgatcccgcgtcc

SEQ ID NO: 841987 - DNA, 75 bp, synthetic construct
  source 1..75: mol_type = other DNA
atggaagcattaggaatgatcgaaacccggggcctggttgcactgatagaggcttctgacgcgatggttaaagct

SEQ ID NO: 841988 - DNA, 75 bp, synthetic construct
  source 1..75: mol_type = other DNA
accgtgcccgggatgctgctcagcttcctgttgccatcgattatccggcagcgctggcactccgccagatgtcga

SEQ ID NO: 841989 - DNA, 75 bp, synthetic construct
  source 1..75: mol_type = other DNA
gatagtccaccagcttgggaacactgatctcacctccgctgccgggaagctgttattgtcaatgctggcggctgt

SEQ ID NO: 841990 - DNA, 75 bp, synthetic construct
  source 1..75: mol_type = other DNA
tctgaaatgctcagcaaaatccgcgatggtgaaacgttggtagttgcaaaactagaccgtctggggcgtgatgcg

SEQ ID NO: 841991 - DNA, 75 bp, synthetic construct
  source 1..75: mol_type = other DNA
ggccgggcgatgaaatcgtttttgtcggcgtcaccagcgcgcatcgtagcagcgcgtttgaagccgggcagttta

SEQ ID NO: 841992 - DNA, 75 bp, synthetic construct
  source 1..75: mol_type = other DNA
aaaagcattaaccctcgaacactatccggggatgacggaaaaggcactggcggaaatcgtggatgaggcgcgtaa

SEQ ID NO: 841993 - DNA, 75 bp, synthetic construct
  source 1..75: mol_type = other DNA
gtatgttgctcatctggcgaccattcccgcgggcaaactgccacttcgcaacagtggagagggatgagttgatga

SEQ ID NO: 841994 - DNA, 75 bp, synthetic construct
  source 1..75: mol_type = other DNA
cccctgctggaaaaccaggccagcagcgtctggtcgatgggcaaggatggccgctcctactggcccgtcaagcgc

SEQ ID NO: 841995 - DNA, 75 bp, synthetic construct
  source 1..75: mol_type = other DNA
gcaaggctacacctgaggatgtaacaaaactcgtttttagccaaaacccatcagaacgttctcagctttacaggc

SEQ ID NO: 841996 - DNA, 75 bp, synthetic construct
  source 1..75: mol_type = other DNA
aaattcttcgccagtacaaagcgctgatcaatacccgccgccgtgagaacggacagtcggcactcagaaccgaac

SEQ ID NO: 841997 - DNA, 75 bp, synthetic construct
  source 1..75: mol_type = other DNA
atgaactttaaaattggtcgtcgtgcggcgttacgtgagatcgaggatgtgaaacacgatacgcgtgaagcggaa

SEQ ID NO: 841998 - DNA, 75 bp, synthetic construct
  source 1..75: mol_type = other DNA
ctcactatttatggggtaatggcgctgaaaggagcgttaatatcgccaacattggtcttaaaatttcccctatga

SEQ ID NO: 841999 - DNA, 75 bp, synthetic construct
  source 1..75: mol_type = other DNA
tgttcctgcgtaaagtaggtaatgactccaacttactgatagtgttttatgttcagataatgcccgatgactttg

SEQ ID NO: 842000 - DNA, 75 bp, synthetic construct
  source 1..75: mol_type = other DNA
ctatcaccaggaagtgctgacgctaaaacaacagcttgaacagcaggtgcgagaaaaagcgcagactcaggcaga

SEQ ID NO: 842001 - DNA, 75 bp, synthetic construct
  source 1..75: mol_type = other DNA
gatatcgtgctcaacagtacgcaggcgtctttctgtaccgaataccgcgtcgtgaccggaggctcggatgagtga

SEQ ID NO: 842002 - DNA, 75 bp, synthetic construct
  source 1..75: mol_type = other DNA
gctgacgagaggagttttgatattcgcacctctcttcgtcaacgcgatccgaagtttcgccagatggtgctacat

SEQ ID NO: 842003 - DNA, 75 bp, synthetic construct
  source 1..75: mol_type = other DNA
gcttacaattatcagtgcgctatctgcggctttaacatgcgccacgacaatgcgccgattgctctggaagccgct

SEQ ID NO: 842004 - DNA, 75 bp, synthetic construct
  source 1..75: mol_type = other DNA
aatgttgtatgcaatatatttattttctttaaaacatcaaaactccaaaattacagttagatatttaaatgattt

SEQ ID NO: 842005 - DNA, 75 bp, synthetic construct
  source 1..75: mol_type = other DNA
tatcgagtggcgcagttgatagccacacaccgcaaactgccgttgcggccatcctgtgtgtcgcgatgattgggc

SEQ ID NO: 842006 - DNA, 75 bp, synthetic construct
  source 1..75: mol_type = other DNA
tatcgagtggcgcagttgacagccacacaccgcaaactgctgttgctgccgtgctgtgtgccgcgatgattgggc

SEQ ID NO: 842007 - DNA, 75 bp, synthetic construct
  source 1..75: mol_type = other DNA
atgcccatgccgatatggtggtggaagagctgcgtaccgcgttcaagaaaaagtatccgcaactggagcacgacg

SEQ ID NO: 842008 - DNA, 75 bp, synthetic construct
  source 1..75: mol_type = other DNA
agatatcgccgcccggctgattggacatattcgccgcgctgcggtgggcgatgcgctgaaaccgtttgaggaacg

SEQ ID NO: 842009 - DNA, 75 bp, synthetic construct
  source 1..75: mol_type = other DNA
gattatcaccatcactgaaggcatcccgacgctggatatgctgattgtgaaagtgaaactggatgaagcaggcgt

SEQ ID NO: 842010 - DNA, 75 bp, synthetic construct
  source 1..75: mol_type = other DNA
gtccccagaagctgctcgcgaatggatgagacaggacactggagggaaaaatgcgatagctgtgaaatcagcatt

SEQ ID NO: 842011 - DNA, 75 bp, synthetic construct
  source 1..75: mol_type = other DNA
ccctggctactgcaatcacaatcccgaaacgtctgtgctggcgcattaccgactggcgggaacgtgcggaacagc

SEQ ID NO: 842012 - DNA, 75 bp, synthetic construct
  source 1..75: mol_type = other DNA
tcctggctactgcaatcacaatcccgaaacgtccgtgctggcgcattacaggctggcggggacgtgcggaacagc

SEQ ID NO: 842013 - DNA, 75 bp, synthetic construct
  source 1..75: mol_type = other DNA
ggcagttcgctggatgtaccggaaaatatcgttcatagcggtaaaacctggtttgtggaagcgaaactgaaacag

SEQ ID NO: 842014 - DNA, 75 bp, synthetic construct
  source 1..75: mol_type = other DNA
atgattgctacttatcatatgaaactcaattgtaaggacacgcaattactgtctgttaataatctggtttctgaa

SEQ ID NO: 842015 - DNA, 75 bp, synthetic construct
  source 1..75: mol_type = other DNA
tatatgggattcgttaacacccttgatgctcccgcaagtgatgttctccgaacgctgcatctttacgctggctgg

SEQ ID NO: 842016 - DNA, 75 bp, synthetic construct
  source 1..75: mol_type = other DNA
gtggtcgggaatgccaggtaagaatccctggcgtatgtaatggcaattctgaaacgtctgtactggcacatatcc

SEQ ID NO: 842017 - DNA, 75 bp, synthetic construct
  source 1..75: mol_type = other DNA
aacattcccgtgttcttgcctacaacaccgactgcggctggctggttcgtaacacggcggagttagtggatgact

SEQ ID NO: 842018 - DNA, 75 bp, synthetic construct
  source 1..75: mol_type = other DNA
attaattagttgggctaatcactgtgctgaatacatagaaatttttgatgagtctattgcttttacatgtctctc

SEQ ID NO: 842019 - DNA, 75 bp, synthetic construct
  source 1..75: mol_type = other DNA
gtagatgttgaagagaaaacagttaatgatttctttaaaagcaacacactctcacctttttctgtaagaaggttt

SEQ ID NO: 842020 - DNA, 75 bp, synthetic construct
  source 1..75: mol_type = other DNA
caaactgaaagtgcaggcgcaaattcagggcgatgagatccgcgtaacgggtaaatctcgtgatgatttgcaggc

SEQ ID NO: 842021 - DNA, 75 bp, synthetic construct
  source 1..75: mol_type = other DNA
gcaatgttattctttacccgccaataaaccaccacatgcgttacatggtatggcgtgctattcaacatgggaaat

SEQ ID NO: 842022 - DNA, 75 bp, synthetic construct
  source 1..75: mol_type = other DNA
gagagaggttcatctgtacttgtcgactctagctctagagattttttcctgacatatcctgaaagagtgatagtg

SEQ ID NO: 842023 - DNA, 75 bp, synthetic construct
  source 1..75: mol_type = other DNA
tatcagatttctatatcacgagagctaccagttacgcaggaaactgatctgcgaaatcagggaaagtttttcgct

SEQ ID NO: 842024 - DNA, 75 bp, synthetic construct
  source 1..75: mol_type = other DNA
cgaggcaagccaggatgctgcctgtaaacaagccagtgatgcgcttaaacaatcaatgaacgctgccggaattaa

SEQ ID NO: 842025 - DNA, 75 bp, synthetic construct
  source 1..75: mol_type = other DNA
atggtgccgtgggcagggcgactggggaatgcgacgctgaatgctggtgggcaatgctattctttccccgccaat

SEQ ID NO: 842026 - DNA, 75 bp, synthetic construct
  source 1..75: mol_type = other DNA
tcgaaacgctggaagcggaaggtttcccgatcttcgcttatgacggttcgcttggcggccagtatccggtgattt

SEQ ID NO: 842027 - DNA, 75 bp, synthetic construct
  source 1..75: mol_type = other DNA
atgtgtggacgtttcgttcaatcaatgacgcgtgaagattatcttgccctgctcgctaatgaatcagaacgcgac

SEQ ID NO: 842028 - DNA, 75 bp, synthetic construct
  source 1..75: mol_type = other DNA
atatggcatgccgtaacgcgtgccgtcgggaatgtgaaaaatcaggaagcagatttaattaagcctgttacttaa

SEQ ID NO: 842029 - DNA, 75 bp, synthetic construct
  source 1..75: mol_type = other DNA
gccgacaggatgacctccgatgaactggagcatctgattaccctgcaaatgatgggtaatgatgagatcactact

SEQ ID NO: 842030 - DNA, 75 bp, synthetic construct
  source 1..75: mol_type = other DNA
gctgttatgcaatttagtgctgatatggcgctgaatgaggacggcaaaattcttaccgcagatattcagggagtg

SEQ ID NO: 842031 - DNA, 75 bp, synthetic construct
  source 1..75: mol_type = other DNA
atggtcgtaacagtctttacctggcagccaatggttatgatgttgacgcatgggaataaaaatgccatgagtatc

SEQ ID NO: 842032 - DNA, 75 bp, synthetic construct
  source 1..75: mol_type = other DNA
atgatcattcgtgacgaaaactactttactaacaaatacgaactcacccgcacacactccgaagttctggaagct

SEQ ID NO: 842033 - DNA, 75 bp, synthetic construct
  source 1..75: mol_type = other DNA
tgaaactatcgccaatggtccgttcgtgcattatcccaacgaaaaatggttcccactgacagaaagcgatgacgt

SEQ ID NO: 842034 - DNA, 75 bp, synthetic construct
  source 1..75: mol_type = other DNA
ccgctggcaatacccgcaacgaggcgcgcgttcaggggttgtccgaagttttcgaacgctacgtgaaaaaccgca

SEQ ID NO: 842035 - DNA, 75 bp, synthetic construct
  source 1..75: mol_type = other DNA
gcacgcgctgattgatatttctgttattgctgacagggcgcataagcacgccaccagtgaaacagaatatgccgg

SEQ ID NO: 842036 - DNA, 75 bp, synthetic construct
  source 1..75: mol_type = other DNA
tattcagcattttaccggacgcactgcactgaaatttttgctggcgaccttgttagttacacctctggcacgtta

SEQ ID NO: 842037 - DNA, 75 bp, synthetic construct
  source 1..75: mol_type = other DNA
attatggtgacccatgacctgcaactggcggcacgctgtgaccgctgtttacggctggtgaacgggcagttgcag

SEQ ID NO: 842038 - DNA, 75 bp, synthetic construct
  source 1..75: mol_type = other DNA
agcttccggcgctgctgcgcggtgagagtagcgcagaaagtcgtaacggggcgaaagcgttgctcgaacagttag

SEQ ID NO: 842039 - DNA, 75 bp, synthetic construct
  source 1..75: mol_type = other DNA
aggtgacgcctatttcagcgcacgaatgggccgccgttatgccgcttcaggcagcgcctgccgagcgcctgcaga

SEQ ID NO: 842040 - DNA, 75 bp, synthetic construct
  source 1..75: mol_type = other DNA
gcaggtgacggaagatactggccccgaagctgcccgccttgctggcgtgccgtgggaccgagataaatggttgaa

SEQ ID NO: 842041 - DNA, 75 bp, synthetic construct
  source 1..75: mol_type = other DNA
acggccagagtcaggaagagatcgaacagaactgggtttcgtggcgcgagaatgccgcgaacggtgcggcggagg

SEQ ID NO: 842042 - DNA, 75 bp, synthetic construct
  source 1..75: mol_type = other DNA
gattaagtgccgatccggtgaaagatattcagcattttaccggtcggactgcgctgaaattcttgctggcgacct

SEQ ID NO: 842043 - DNA, 75 bp, synthetic construct
  source 1..75: mol_type = other DNA
tcggtatatcgtatcgaacctgattttgttgccgcccaactcgattccgtgctcagcgatgttcgtattgatacc

SEQ ID NO: 842044 - DNA, 75 bp, synthetic construct
  source 1..75: mol_type = other DNA
aaaggacgcaaatcagtatgtcgttcgtaaagatgaaggacgtactttttaacgtgctggctatcggtactgttt

SEQ ID NO: 842045 - DNA, 75 bp, synthetic construct
  source 1..75: mol_type = other DNA
gaacagcaacgagtggcgctggcgcgagcctttaacggtcgacctgatgtgctgtttgccgacgaacccaccggc

SEQ ID NO: 842046 - DNA, 75 bp, synthetic construct
  source 1..75: mol_type = other DNA
gcactgaaatttttgcttgcggccttgttaatcacacctctggcacgctacgcaaaacagccgttattgataggc

SEQ ID NO: 842047 - DNA, 75 bp, synthetic construct
  source 1..75: mol_type = other DNA
actcgccgcctgttgggtttatggtgtttcgcctgggcaacgctgcacttaaccagttatgccttgctggagctg

SEQ ID NO: 842048 - DNA, 75 bp, synthetic construct
  source 1..75: mol_type = other DNA
cgaaacagggcttacgctgatgatgaatggtctgttgatcaacaatgcgcaggggcagccgattacagtttcgtt

SEQ ID NO: 842049 - DNA, 75 bp, synthetic construct
  source 1..75: mol_type = other DNA
gagtttgaacgctggctggaaagcatgggcattatggcaaacggtcgcctgaccaaacgggcgggcgatccgtca

SEQ ID NO: 842050 - DNA, 75 bp, synthetic construct
  source 1..75: mol_type = other DNA
ctgcattccacttttctggtcatactggcgttgccgatcttgatgaggcttatctgacattgcaacctctgttaa

SEQ ID NO: 842051 - DNA, 75 bp, synthetic construct
  source 1..75: mol_type = other DNA
attagatccgacacggattctggttatgagtcaggtgctgttaagttttggtatcgccctggcgctggttccact

SEQ ID NO: 842052 - DNA, 75 bp, synthetic construct
  source 1..75: mol_type = other DNA
tgctgcgcggtgagagtagcgcggaaagtcgtaacggagcgaaagcgttgctcgaacagttagggctgggtaaac

SEQ ID NO: 842053 - DNA, 75 bp, synthetic construct
  source 1..75: mol_type = other DNA
tttctcaacctcaccatctgtattgctgtctggcgggcacgagggaatatttcaaaaataacaggagacaggtaa

SEQ ID NO: 842054 - DNA, 75 bp, synthetic construct
  source 1..75: mol_type = other DNA
gaagcggcaaagcgggatgtggggacaggggaaaatcagataccggacatggcctcttttgccagtggtgatgga

SEQ ID NO: 842055 - DNA, 75 bp, synthetic construct
  source 1..75: mol_type = other DNA
ctgtgcctgttcaccaaacgccttgaggaaggtcagtttatctggcctgcggtgcgtgacggtaagatatccatt

SEQ ID NO: 842056 - DNA, 75 bp, synthetic construct
  source 1..75: mol_type = other DNA
ctcagcaagcgatctacgccgctattagcaaacagctaccagcttggtcctatctttaccttgctccaaaatcag

SEQ ID NO: 842057 - DNA, 75 bp, synthetic construct
  source 1..75: mol_type = other DNA
gacggttggggatatgaccattcagaaattggtaaagtgattgcagatttaccagaaggccaaagacttattcgc

SEQ ID NO: 842058 - DNA, 75 bp, synthetic construct
  source 1..75: mol_type = other DNA
cggcgttccacttttctggtcatactggtgttgccgatcttgatgaggcttatctgacgctgcaaccgctgttaa

SEQ ID NO: 842059 - DNA, 75 bp, synthetic construct
  source 1..75: mol_type = other DNA
gatggctggtttgagtggaaaaaagaggcgacaaaaagcagccttattttatctatcgtgctgatggacaacctg

SEQ ID NO: 842060 - DNA, 75 bp, synthetic construct
  source 1..75: mol_type = other DNA
gctgatgctgatggtctgtgcctgttcaccaaacgcctgggaggaaggccagtttatctggcctgcggtacgtga

SEQ ID NO: 842061 - DNA, 75 bp, synthetic construct
  source 1..75: mol_type = other DNA
atggacagaaaaagtaacagtgattcataccaacgctggttgatagagaagactgacaaaagggaaagggcgcaa

SEQ ID NO: 842062 - DNA, 75 bp, synthetic construct
  source 1..75: mol_type = other DNA
ggcgttatcactccgggtgaatgcaaaatcggtatccagcctggtcacattcacaaaccgggtaaagtgggtatc

SEQ ID NO: 842063 - DNA, 75 bp, synthetic construct
  source 1..75: mol_type = other DNA
agtgatccgcacgctggaactggaatctgaacccgttaccaaattgttgcaggagaatgcttaccgtgagttgct

SEQ ID NO: 842064 - DNA, 75 bp, synthetic construct
  source 1..75: mol_type = other DNA
gccggactttgagacgctgcttgctgaacgcaaggcagaatttgtggcacttcatccgaaagatgagcaggaagc

SEQ ID NO: 842065 - DNA, 75 bp, synthetic construct
  source 1..75: mol_type = other DNA
tgacgcgacgctctacgtttaccccggccccgagtctgagcccatcaggcaggcatcagaacaaaagctgcagag

SEQ ID NO: 842066 - DNA, 75 bp, synthetic construct
  source 1..75: mol_type = other DNA
ggtggtgctgactgtccttagccgcgaaggcgatggaactgcagaaaaagacctgctggacgtggtgaaaaaagc

SEQ ID NO: 842067 - DNA, 75 bp, synthetic construct
  source 1..75: mol_type = other DNA
taaaggcggcaccacccacctcggcctgccggtgttcaacaccgtgcgtgaagctgttgctgctactggcgctac

SEQ ID NO: 842068 - DNA, 75 bp, synthetic construct
  source 1..75: mol_type = other DNA
ggtcgggatattcgccgtagcgccatttttgccgccctgcatgttgagggggtgcagcgtgtggagctggcttct

SEQ ID NO: 842069 - DNA, 75 bp, synthetic construct
  source 1..75: mol_type = other DNA
gcctgattttgaagcaattctggctgacacaaaggccatgatgattgcggcttatcccgccgaacagcgtgaagc

SEQ ID NO: 842070 - DNA, 75 bp, synthetic construct
  source 1..75: mol_type = other DNA
gttacgccagcgggtcaatgagggtgcacgcgcctgcatgttaagccacagcaccgggacagacctggacaacct

SEQ ID NO: 842071 - DNA, 75 bp, synthetic construct
  source 1..75: mol_type = other DNA
gccggactttgagacgctgcttgccgaacgcaaggcagaatttgtgtcgcttcatccgaaagatgagcaggaagc

SEQ ID NO: 842072 - DNA, 75 bp, synthetic construct
  source 1..75: mol_type = other DNA
tcgtatgatcggcccgaactgcccaggcgttatcaccccgggtgaatgcaaaatcggtatccagccgggtcacat

SEQ ID NO: 842073 - DNA, 75 bp, synthetic construct
  source 1..75: mol_type = other DNA
cgatgggcggagaccttgaccaaatcgctgccaactacaacgtgaaacgcctgacggtgacgcctgctgataatg

SEQ ID NO: 842074 - DNA, 75 bp, synthetic construct
  source 1..75: mol_type = other DNA
gtggccgaccgtgtgaccgtgcagtctgccgtcatcgttgaataccagataaatgccacgctttacctttatcct

SEQ ID NO: 842075 - DNA, 75 bp, synthetic construct
  source 1..75: mol_type = other DNA
ctgacggtgacgcctgctgatgatgacgctgtgccgcccgttgcggcagtgatggaaagcgatgaagcgttacgc

SEQ ID NO: 842076 - DNA, 75 bp, synthetic construct
  source 1..75: mol_type = other DNA
gtgatccgcacgctggaactggaatctgaacccgtcactaaattgttgcaggagaacgcttaccgtgagttgctt

SEQ ID NO: 842077 - DNA, 75 bp, synthetic construct
  source 1..75: mol_type = other DNA
gccgacgggcgggtggctgatgccagcgcaaccagtccggcaccggcagaggtggtgcttaccgtgctgagccgt

SEQ ID NO: 842078 - DNA, 75 bp, synthetic construct
  source 1..75: mol_type = other DNA
tgttgttgttgacgatggtgcgaaaaagcgagctgacgaatgctacctggagtgagatcaacttcagcgaagcgc

SEQ ID NO: 842079 - DNA, 75 bp, synthetic construct
  source 1..75: mol_type = other DNA
tgtgcagcgtgtggagctggcttcgccgctggcggatgtggtcctgaacaaaacgcaggcggcatcatgtacgca

SEQ ID NO: 842080 - DNA, 75 bp, synthetic construct
  source 1..75: mol_type = other DNA
gaaggcgacggaactgcagaaaaagacttactggacgtggtggagaaagccctgaacagtgagaacgtccgcccg

SEQ ID NO: 842081 - DNA, 75 bp, synthetic construct
  source 1..75: mol_type = other DNA
ctggcgtcagcgtgtgaatgaggctgcacgggcggtgatgctggcctgtgctgccggtaatgaccttgatgtgat

SEQ ID NO: 842082 - DNA, 75 bp, synthetic construct
  source 1..75: mol_type = other DNA
ccgctggacgatatcgtgcttaacagcacgcaggcgtctttctgtactgagtaccgcgtcgtgaccggaggctcg

SEQ ID NO: 842083 - DNA, 75 bp, synthetic construct
  source 1..75: mol_type = other DNA
ccgggtcagtgggagcctatcagtatcatggtcgcagtgctgacgggcgtgtcgcggatatttctgtcaccagtc

SEQ ID NO: 842084 - DNA, 75 bp, synthetic construct
  source 1..75: mol_type = other DNA
gaacgcaaggccgcctttgtggccctccatccggctgatgaacaggaggctgttatgcgcacgttagcgctggag

SEQ ID NO: 842085 - DNA, 75 bp, synthetic construct
  source 1..75: mol_type = other DNA
gaacctattctggcggcggctgaatcgtcgttcaggaagtggctggctgagcaggggcttatcggtcaggacgtg

SEQ ID NO: 842086 - DNA, 75 bp, synthetic construct
  source 1..75: mol_type = other DNA
taaaggcggtactacccaccttggtctgccggtgttcaacaccgtgcgtgaagccgttgctgccactggcgctac

SEQ ID NO: 842087 - DNA, 75 bp, synthetic construct
  source 1..75: mol_type = other DNA
aaatcttgcgccgctgcctcacgcccaccagcaaaacccgccacaggaaaagacggtggtcagcattgccgttga

SEQ ID NO: 842088 - DNA, 75 bp, synthetic construct
  source 1..75: mol_type = other DNA
cgggtggcacaaaagcctgtccaacgtgggcgtgaacggtgtcaccggaatttctgctgatgtgttctgggatct

SEQ ID NO: 842089 - DNA, 75 bp, synthetic construct
  source 1..75: mol_type = other DNA
cgctggcagtaccaggatgaaatgcggaaatgcgaattttacgagaacgaactggaagatttgtggttgccgctg

SEQ ID NO: 842090 - DNA, 75 bp, synthetic construct
  source 1..75: mol_type = other DNA
agccagcgcgaagggatgctgatctggcctgactttactggctgggacacggtactgaatgccgaagcaacggca

SEQ ID NO: 842091 - DNA, 75 bp, synthetic construct
  source 1..75: mol_type = other DNA
gaaagcgacatcgtaccgggagagcagaccgccaccatcatactgaagcagcgcacaaaaaaatcttgcgccgct

SEQ ID NO: 842092 - DNA, 75 bp, synthetic construct
  source 1..75: mol_type = other DNA
ttggtggtgattgctggctggacgagtcggtgaacgacaaagacactctgaaagccgggaaactcacgatcgact

SEQ ID NO: 842093 - DNA, 75 bp, synthetic construct
  source 1..75: mol_type = other DNA
tatcgcggagatttctggtgtactggcggtatatgcagaacgtcgttgtgacaatcatggcccgtatacacgcct

SEQ ID NO: 842094 - DNA, 75 bp, synthetic construct
  source 1..75: mol_type = other DNA
cgcctgcgtaaagcactggaacctggcgggcatgaccgcatggtacagaccgtgcgcggtacaggatatcgtttt

SEQ ID NO: 842095 - DNA, 75 bp, synthetic construct
  source 1..75: mol_type = other DNA
agcggtaatgcgccgtatatcgccgatggcggtggaagaggtgattgagatgcaggggctaagtctcgatccgac

SEQ ID NO: 842096 - DNA, 75 bp, synthetic construct
  source 1..75: mol_type = other DNA
gtggggggatgacggaatttgtcaaagaaaatactacgggattccatttaaaagaacctatgactgcagactcca

SEQ ID NO: 842097 - DNA, 75 bp, synthetic construct
  source 1..75: mol_type = other DNA
atgaatcagagtttttaggcattctttcacgtaatattatacctgattattccgtttttcccaaaatacggctca

SEQ ID NO: 842098 - DNA, 75 bp, synthetic construct
  source 1..75: mol_type = other DNA
cagctttgataaccaatgcttttacagctattggggaggttgattgttttactaaagtacccttactctcaaata

SEQ ID NO: 842099 - DNA, 75 bp, synthetic construct
  source 1..75: mol_type = other DNA
atggtgttaccggcatcagcgcctctgtattctgggatttgcagaagtccggcactgatgctgacctgcttaacg

SEQ ID NO: 842100 - DNA, 75 bp, synthetic construct
  source 1..75: mol_type = other DNA
gtgaaactttacgtgagttcaagcacagagtagcttttaactactctgtgaaaatcgcccgtaacgttcgctccc

SEQ ID NO: 842101 - DNA, 75 bp, synthetic construct
  source 1..75: mol_type = other DNA
accgatcgggcgtgggaagtgttcgaaaaactggaagactgctatttcagccagggaaaaacaacacaaaccgaa

SEQ ID NO: 842102 - DNA, 75 bp, synthetic construct
  source 1..75: mol_type = other DNA
tttgagaccatctacatggtgacgaagaacagagacgcgctactgcgggaggcggcacggcttgaccagtcaagt

SEQ ID NO: 842103 - DNA, 75 bp, synthetic construct
  source 1..75: mol_type = other DNA
cccagaacaacttcagcttccagaatcaacgctatctatcaactaccctctctcgtggttctcagataaccatcc

SEQ ID NO: 842104 - DNA, 75 bp, synthetic construct
  source 1..75: mol_type = other DNA
acgtcgtcgaaattaacgacggaacacgcacaatctcgaccgtatcaacggcggttgtcggcatggtctgtacgg

SEQ ID NO: 842105 - DNA, 75 bp, synthetic construct
  source 1..75: mol_type = other DNA
ggcatcgttgcaggccatcgccgaccagtcaaaaccggtcaccgttgtcgtgcgcgtggaagacggcaccggcga

SEQ ID NO: 842106 - DNA, 75 bp, synthetic construct
  source 1..75: mol_type = other DNA
cggtaccggaacttgggttggaggtccttaaaccaggccgtgaatccatgcaggtattccataaccctcgagtgc

SEQ ID NO: 842107 - DNA, 75 bp, synthetic construct
  source 1..75: mol_type = other DNA
ggcgatcacttaccgtgaaaacttcagccagcgcgaagggatgctgatctggcctgactttacgggctgggacac

SEQ ID NO: 842108 - DNA, 75 bp, synthetic construct
  source 1..75: mol_type = other DNA
cagtcaaaaccggtcaccgttgtcgtgcgtgtggaagacggcaccggcgacgacgaggaaacgaaactcgcgcag

SEQ ID NO: 842109 - DNA, 75 bp, synthetic construct
  source 1..75: mol_type = other DNA
gattcacgacatcgttgacggcatcaatgccaaatttcgtgagctgaaaacaaacggctatatcgtggatgcgac

SEQ ID NO: 842110 - DNA, 75 bp, synthetic construct
  source 1..75: mol_type = other DNA
aaaaagtttgaaagtcataagtcatttatcaatacagggcccgtaaaatgggttgatagtgaatccaaatttggc

SEQ ID NO: 842111 - DNA, 75 bp, synthetic construct
  source 1..75: mol_type = other DNA
ctcacgcccaccagcaacagaacccaccacaggaagagacggtggtcagcattgccgttgatcctgagtctccgg

SEQ ID NO: 842112 - DNA, 75 bp, synthetic construct
  source 1..75: mol_type = other DNA
cctcaagcgcgagtcgatgacccgggatattccagtggtgatgttgaccgccagaggggaagaagaagatcgcgt

SEQ ID NO: 842113 - DNA, 75 bp, synthetic construct
  source 1..75: mol_type = other DNA
tacaaatgatgacttttatcatttagcgattaccatactaggcattgatttgaatgccactatagatcctagtat

SEQ ID NO: 842114 - DNA, 75 bp, synthetic construct
  source 1..75: mol_type = other DNA
aagagaaaattggttatggcaggggagacgccgccagccacattattttcgataacgtaatgttatatatgatgt

SEQ ID NO: 842115 - DNA, 75 bp, synthetic construct
  source 1..75: mol_type = other DNA
tcacgattgttccggcgatctgttatttgctgagcgcgattatcgctaaacgctactactcactcacgacgcaca

SEQ ID NO: 842116 - DNA, 75 bp, synthetic construct
  source 1..75: mol_type = other DNA
ataaattgctggctaaacttaacctgcgctttaaaagcgacaagctggtgggcgatctttccatcggtgaccagc

SEQ ID NO: 842117 - DNA, 75 bp, synthetic construct
  source 1..75: mol_type = other DNA
cgatttccgatccttgcatggggttgttggccgatcgaacgcgctctcgctggggtaaatttcggccgtgggtac

SEQ ID NO: 842118 - DNA, 75 bp, synthetic construct
  source 1..75: mol_type = other DNA
cttgctgagcgcgattatcgctaaacgctactactcactcacgacgcacaatctgaaaaccgttatggaacagct

SEQ ID NO: 842119 - DNA, 75 bp, synthetic construct
  source 1..75: mol_type = other DNA
aaaactaaccgaaggatttaaggagttgaatcgcagatcatcagtaaatcaggcattttcaagtgcagtgcctta

SEQ ID NO: 842120 - DNA, 75 bp, synthetic construct
  source 1..75: mol_type = other DNA
gtatattgaccaggtttctaagtctatgggcgttggtgccaatgataagctaaacctctcagatccagaggttat

SEQ ID NO: 842121 - DNA, 75 bp, synthetic construct
  source 1..75: mol_type = other DNA
ggttggataagctgtagtgagcgaatgccgccagttggtgttgatgtacaactgtttgtgtccagcacgggtgaa

SEQ ID NO: 842122 - DNA, 75 bp, synthetic construct
  source 1..75: mol_type = other DNA
tgataccgtgttattatttgcaggaaggatatcaccagataaaggttgcctgatgcttatggaggcttttaatca

SEQ ID NO: 842123 - DNA, 75 bp, synthetic construct
  source 1..75: mol_type = other DNA
aaacagcagctcgttgctgcctcctgtgaacccgggatatccatctcaaaacttgctcttgaaaatggcattaac

SEQ ID NO: 842124 - DNA, 75 bp, synthetic construct
  source 1..75: mol_type = other DNA
ctgttgtccaaatggagacaacaatggcgcgagggaaagctgctattacattcttcagagaaccctcagccactt

SEQ ID NO: 842125 - DNA, 75 bp, synthetic construct
  source 1..75: mol_type = other DNA
tcaccctggatgggcatgaagttgttacccgttcaccgcaggatggcctggcaaacggcattgtgtatatctccg

SEQ ID NO: 842126 - DNA, 75 bp, synthetic construct
  source 1..75: mol_type = other DNA
gtgatactggttgtctggagattcagggggccagtctatgcggcagatgatgtaaagctgaaagcaactaaaaca

SEQ ID NO: 842127 - DNA, 75 bp, synthetic construct
  source 1..75: mol_type = other DNA
cgccaatccgcaggtcgttaaagagatgcaaggcgtggtaagagagtttatcgacaacagccagccaccgcttag

SEQ ID NO: 842128 - DNA, 75 bp, synthetic construct
  source 1..75: mol_type = other DNA
tcgtgccaaaacacttgaccagccttttatgctttacctggcttataatgctccgcatctgccaaatgataatcc

SEQ ID NO: 842129 - DNA, 75 bp, synthetic construct
  source 1..75: mol_type = other DNA
aaaaggctataagagtcagacctatcctggcggtactcacaccccaatgtttatgtggtggaaaggaaaacttca

SEQ ID NO: 842130 - DNA, 75 bp, synthetic construct
  source 1..75: mol_type = other DNA
ttattctcactggtttgatgaggaaaatattccattctgggataattaccacaaatttgtccgccatcagtcaga

SEQ ID NO: 842131 - DNA, 75 bp, synthetic construct
  source 1..75: mol_type = other DNA
gcaaaatcgcggcttcgattattttatggggttccatgccgcgggaaccgcttactataactccccttcactgtt

SEQ ID NO: 842132 - DNA, 75 bp, synthetic construct
  source 1..75: mol_type = other DNA
cctaccgcatttttcgatactccaccggtaagtaccagtggcacggcagtgtctgtcattacagcggtaaggtcg

SEQ ID NO: 842133 - DNA, 75 bp, synthetic construct
  source 1..75: mol_type = other DNA
cctggatgggcatgaagtcgttacccgttcaccgcaggatggcctggcaaacggcattgtgtatatctccgaaga

SEQ ID NO: 842134 - DNA, 75 bp, synthetic construct
  source 1..75: mol_type = other DNA
tcaagacgccgtcgatggaacaggcaattggcctgctttctgggggaaatcagcaaaaagtggcgattgcccgtg

SEQ ID NO: 842135 - DNA, 75 bp, synthetic construct
  source 1..75: mol_type = other DNA
gcgtcattagcgccgctggtgacggcttttcagacacagagtgaagagactcacgcccaggcctggcagcgtttg

SEQ ID NO: 842136 - DNA, 75 bp, synthetic construct
  source 1..75: mol_type = other DNA
ggaaactcagtggcctctaccagaagcgtcattagcgccgctggtgactgcttttcagacacagagtgaagagac

SEQ ID NO: 842137 - DNA, 75 bp, synthetic construct
  source 1..75: mol_type = other DNA
cgtgcactgggtgaactggctcgcttaacgctggcgcaatggcaatcacaactgttgattcctgtcgcggttaaa

SEQ ID NO: 842138 - DNA, 75 bp, synthetic construct
  source 1..75: mol_type = other DNA
cgcaaagacggcgagtggcgttttccgccgcttgcagccgaacaggctttacattacctctcacaactgattgag

SEQ ID NO: 842139 - DNA, 75 bp, synthetic construct
  source 1..75: mol_type = other DNA
cttgtggaaggcgctggtggaatatacccatgaactggggcaaccgcgctggcaccgtgccaatctctatcaacg

SEQ ID NO: 842140 - DNA, 75 bp, synthetic construct
  source 1..75: mol_type = other DNA
ttaacatttgtacgctgatgccaatgcgttcaatcccgttcaaagtggtttgcctgctgggaatgaacgatggtg

SEQ ID NO: 842141 - DNA, 75 bp, synthetic construct
  source 1..75: mol_type = other DNA
gacaaggtaatccagtatcaggaagagtgtgacgatgtgctctacgagtactggactaaaggccatgtggttaac

SEQ ID NO: 842142 - DNA, 75 bp, synthetic construct
  source 1..75: mol_type = other DNA
gttatggttatccgctgaagcccggctaccgcagcctgattcactcgccgtctggtgttctcggcctgacggaga

SEQ ID NO: 842143 - DNA, 75 bp, synthetic construct
  source 1..75: mol_type = other DNA
gggaacgtgaggaagctgcaaggcgacgggatttttgtatcagtaaaacccgtcgtatgcctgaacaactggtta

SEQ ID NO: 842144 - DNA, 75 bp, synthetic construct
  source 1..75: mol_type = other DNA
tttggcctgacgcgtatgttgctgggctacgcgatggagagcgcgcagggcgagtggcaatcggttctaccttat

SEQ ID NO: 842145 - DNA, 75 bp, synthetic construct
  source 1..75: mol_type = other DNA
agccgttatcaaatcaatcagcagttattaaatgcgttggtggatcaggatgatgcagaacgtttgttccgccgc

SEQ ID NO: 842146 - DNA, 75 bp, synthetic construct
  source 1..75: mol_type = other DNA
ttgcggtactcaccagtgacggctgggaaactcagtggcctctaccagaagcgtcattagcgccgctggtgacgg

SEQ ID NO: 842147 - DNA, 75 bp, synthetic construct
  source 1..75: mol_type = other DNA
atacccgaatgccgtttgatccacaaaactaccagccaggcgaacgacaaagttatgctcgtgaatggctacctg

SEQ ID NO: 842148 - DNA, 75 bp, synthetic construct
  source 1..75: mol_type = other DNA
ctttatcgaaacgctggagtctgcaaccacttgtccgtcagggctaccttcgcgcgtctttatatgcggcatttc

SEQ ID NO: 842149 - DNA, 75 bp, synthetic construct
  source 1..75: mol_type = other DNA
atgcgtttgcaggtgaacttccgtaccgaagacagcgaaattcctgacaccgaaccttttattcttgaagggctt

SEQ ID NO: 842150 - DNA, 75 bp, synthetic construct
  source 1..75: mol_type = other DNA
atgacgagtatagcaacagcggtatctactatcaacgtgccattccacggcgcagagctttatgttgtcaatcac

SEQ ID NO: 842151 - DNA, 75 bp, synthetic construct
  source 1..75: mol_type = other DNA
aagagtcacggcagaagcagccgaaattatcgcaaaacaggatgctgaactggcggttctcagaacacaaccagt

SEQ ID NO: 842152 - DNA, 75 bp, synthetic construct
  source 1..75: mol_type = other DNA
agaatgcattggctgagcgaataaacggtatcctgaaaaatgagtttttactctcgcgtccagccgatctggcac

SEQ ID NO: 842153 - DNA, 75 bp, synthetic construct
  source 1..75: mol_type = other DNA
atacaatgaagacgtcggtgaactgcaccgcaccgacgccaacggtaatcgtattaaactgcgttttgcgactat

SEQ ID NO: 842154 - DNA, 75 bp, synthetic construct
  source 1..75: mol_type = other DNA
tgctgcaccagcagaagatcaatcaaccactgagagacgacgcgctatctaacagcgccatctcttcgctgttca

SEQ ID NO: 842155 - DNA, 75 bp, synthetic construct
  source 1..75: mol_type = other DNA
aagcattctaagcagtttcatggctcacagggcagtaatggaatgaatctccgcaagaaggaactcaaagttctg

SEQ ID NO: 842156 - DNA, 75 bp, synthetic construct
  source 1..75: mol_type = other DNA
ggcagggattcgctcaccctgttgccagtaaaagcgatattagcgtgcagcttaaacagtttcctgccgtcgaat

SEQ ID NO: 842157 - DNA, 75 bp, synthetic construct
  source 1..75: mol_type = other DNA
agtccgccctgaaatccgcgacaaggtaatccagtatcaggaagagtgtgacgatgtgctctacgagtactggac

SEQ ID NO: 842158 - DNA, 75 bp, synthetic construct
  source 1..75: mol_type = other DNA
gcacttcgccatttaattgctgagcaaagctgggcacttaaagagatagcttcattcgcagcgatacgtgataga

SEQ ID NO: 842159 - DNA, 75 bp, synthetic construct
  source 1..75: mol_type = other DNA
ttccaaaacgtcaattgattgatagtagagatgagatattagcacttcttcctgaagaagttgattattactcgg

SEQ ID NO: 842160 - DNA, 75 bp, synthetic construct
  source 1..75: mol_type = other DNA
cggcaatatgcagcgttgcacaaaaccgggggggtataacctgattgtggcggcgatggataccgcggatttccc

SEQ ID NO: 842161 - DNA, 75 bp, synthetic construct
  source 1..75: mol_type = other DNA
cgctggatctgggctgtggcaatggtcgtaacagtctttacctggcagccaatggttatgatgttgacgcatggg

SEQ ID NO: 842162 - DNA, 75 bp, synthetic construct
  source 1..75: mol_type = other DNA
cctggcaaggtacatcgatgcgcactatggcattccgtatgtggatgccggtgttggcaagctgatgagcagtct

SEQ ID NO: 842163 - DNA, 75 bp, synthetic construct
  source 1..75: mol_type = other DNA
gcgcacatgtgggcggtcgacaagcccatcaccgcatcgcttatccgtgacattgtcgacggtattaacgccaaa

SEQ ID NO: 842164 - DNA, 75 bp, synthetic construct
  source 1..75: mol_type = other DNA
gccattgtcggcatggtctgcacggccagcgatgcggatgcggaaaccttccccctcaataaacctgtgctgatt

SEQ ID NO: 842165 - DNA, 75 bp, synthetic construct
  source 1..75: mol_type = other DNA
agccagcgcgaagggatgctgatctggcccgactttactggctgggacacggtgctgaatgccgaagcaacggct

SEQ ID NO: 842166 - DNA, 75 bp, synthetic construct
  source 1..75: mol_type = other DNA
gtcaaaaggatccgtcagcgccagttgcatgccagaaaagttacgacacgcgagttctctgttatcagcgaggcg

SEQ ID NO: 842167 - DNA, 75 bp, synthetic construct
  source 1..75: mol_type = other DNA
tcgactacgactatacaccggttccaccactggaaagcctaaccctgcgccagcgtatcaccgataaatatctgg

SEQ ID NO: 842168 - DNA, 75 bp, synthetic construct
  source 1..75: mol_type = other DNA
tcccctcaacgagccggtactgattaccaatgtgcaaagcgccattgcgaaagccggtaaaaaaggcactctggc

SEQ ID NO: 842169 - DNA, 75 bp, synthetic construct
  source 1..75: mol_type = other DNA
tgcggactggcaagaagaagcgggtagtgatgaactgccaactggaaatcgcatctctcctcaagtcggtccctg

SEQ ID NO: 842170 - DNA, 75 bp, synthetic construct
  source 1..75: mol_type = other DNA
ggtgctgaatgccgacgcaacggcatatgccaccgcccgtgcgctcggtctgcgtgccaaaattgatgagcagac

SEQ ID NO: 842171 - DNA, 75 bp, synthetic construct
  source 1..75: mol_type = other DNA
aaaaaacaggcatgaaagccctgctatctgcccagtcacagctcggcgttaaaccgcgcattctcggcgtgccag

SEQ ID NO: 842172 - DNA, 75 bp, synthetic construct
  source 1..75: mol_type = other DNA
ggaagacgaaaccacgaccaacatcatcggcgcagtgactgctgaaggtaaaaaaacaggtatgaaagccctgtt

SEQ ID NO: 842173 - DNA, 75 bp, synthetic construct
  source 1..75: mol_type = other DNA
aaactcgcgcagaccgtttccaatatcatcggcaccaccgacgaaaacggtcagtacaccggactgaaagccctg

SEQ ID NO: 842174 - DNA, 75 bp, synthetic construct
  source 1..75: mol_type = other DNA
accaatgtgcagagcgcaattgcaaaggccggtaaaaaaggcacgctggcggcatcgttgcaggctatcgccgac

SEQ ID NO: 842175 - DNA, 75 bp, synthetic construct
  source 1..75: mol_type = other DNA
accaatgtgcagagcgcaattgcaaaggctggtaaaaaaggcacgctggcggcatcgttgcaggccatcgccgac

SEQ ID NO: 842176 - DNA, 75 bp, synthetic construct
  source 1..75: mol_type = other DNA
aggtgcttgagattaacgacggcacccgcgtcatttccactgtagcaaccgcaatcgttggcatggtctgcacgg

SEQ ID NO: 842177 - DNA, 75 bp, synthetic construct
  source 1..75: mol_type = other DNA
ccgcgtcatttccaccgtatccacggccattgtcggcatggtctgcacggccagcgatgcggatgcggaaatctt

SEQ ID NO: 842178 - DNA, 75 bp, synthetic construct
  source 1..75: mol_type = other DNA
gatggacacgattgcagaagcacacatgtgggcggtggataaacctcttaacccgtcgctggcccgcgacattat

SEQ ID NO: 842179 - DNA, 75 bp, synthetic construct
  source 1..75: mol_type = other DNA
aaggatggttttcgcttctggggttcccgctgtctgagcgatgatccgctctttgccttcgaaaacttcacccgc

SEQ ID NO: 842180 - DNA, 75 bp, synthetic construct
  source 1..75: mol_type = other DNA
ttatctggcctgacttcctcgcatgggacaccaccgcgaacgccaccgcaacggcctacgccaccgctcgcgcac

SEQ ID NO: 842181 - DNA, 75 bp, synthetic construct
  source 1..75: mol_type = other DNA
cgtatggctgcaagacggtgcaggaggcgctcacttaccgtgaaaacttcagccagcgagaagggatgctgattt

SEQ ID NO: 842182 - DNA, 75 bp, synthetic construct
  source 1..75: mol_type = other DNA
atctgcccagtcacagctcggggtgaaaccgcgcattctgggtgtaccaggtcacgacaccaaggcggtagctac

SEQ ID NO: 842183 - DNA, 75 bp, synthetic construct
  source 1..75: mol_type = other DNA
aaaacgctgtccaacgtcggggtaaatggtgttaccggcatcagcgcctctgtattctgggatttgcagaagtcc

SEQ ID NO: 842184 - DNA, 75 bp, synthetic construct
  source 1..75: mol_type = other DNA
taaaaccatttccgaggtgaaagcttaccgccagaatttcagccagcgtgagctgatggtcatctggccggattt

SEQ ID NO: 842185 - DNA, 75 bp, synthetic construct
  source 1..75: mol_type = other DNA
ggcatcgttgcaggccatcgctgaccagtcaaaaccggtcaccgttgtcgtgcgcgtggaagacggcaccggtga

SEQ ID NO: 842186 - DNA, 75 bp, synthetic construct
  source 1..75: mol_type = other DNA
tggcacaaaaccctgtctaacgttggcgttaacggagtgaccggcgtcagcgcctccgtgtcgtgggatttgcag

SEQ ID NO: 842187 - DNA, 75 bp, synthetic construct
  source 1..75: mol_type = other DNA
tgccaaaattgaccagaccgtcggctggcataaaaccctgtcaaacgtcggcgtgaatggcgtcaccggcgtcag

SEQ ID NO: 842188 - DNA, 75 bp, synthetic construct
  source 1..75: mol_type = other DNA
acatcgtggacggtgaatgctggttcgacgaggaatcgaacgataaggaaaccctcaaggccgggaaactgtata

SEQ ID NO: 842189 - DNA, 75 bp, synthetic construct
  source 1..75: mol_type = other DNA
catcggcaccaccgatgtggaatacaaaggcgatccaaaagcagtgaagattgaagagagtgaaatcaattacct

SEQ ID NO: 842190 - DNA, 75 bp, synthetic construct
  source 1..75: mol_type = other DNA
aaaactgacgccgtattatcagggcattggtccggcgtggacgaaagagagcgtgctgccgggtggtgccattga

SEQ ID NO: 842191 - DNA, 75 bp, synthetic construct
  source 1..75: mol_type = other DNA
ttactcaggacgctttagatactttgaagggacttaacggctttaaaattgatattgcccgtctattgagtctta

SEQ ID NO: 842192 - DNA, 75 bp, synthetic construct
  source 1..75: mol_type = other DNA
acacccttgatatccatgatgaagacggcaaagccccgctgctgtcggtattcggcggtaagctgaccacctacc

SEQ ID NO: 842193 - DNA, 75 bp, synthetic construct
  source 1..75: mol_type = other DNA
gggtccgccgcgccgacgatgccctgtggcgtcgcacgaaacaaggcatgtggctaaatgcggaacaacaatctc

SEQ ID NO: 842194 - DNA, 75 bp, synthetic construct
  source 1..75: mol_type = other DNA
tccgctatgtgatgatgagtccgactcgccgcaggccattacccgtgattacacccttgatatccatgatgaaaa

SEQ ID NO: 842195 - DNA, 75 bp, synthetic construct
  source 1..75: mol_type = other DNA
ttttaacgtccacacacactattgcgctggtgggggcaagcgacaaacccgatcgtcctagctatcgcgtgatga

SEQ ID NO: 842196 - DNA, 75 bp, synthetic construct
  source 1..75: mol_type = other DNA
cggctgtactggcacgtgatgccgggttacaggtagtcatggatcgctgcccggcaattgagatccctcgcctgg

SEQ ID NO: 842197 - DNA, 75 bp, synthetic construct
  source 1..75: mol_type = other DNA
ttccggtgtcaggtcatctacaacgccaactggcgctgatgccggaattccatcgcccggagatgccagatttca

SEQ ID NO: 842198 - DNA, 75 bp, synthetic construct
  source 1..75: mol_type = other DNA
atgatcgaagataaagaagttgacggagaaattcctgacggcgctgatgagcttatcactttcggcggcgggctg

SEQ ID NO: 842199 - DNA, 75 bp, synthetic construct
  source 1..75: mol_type = other DNA
ccaacgccatcgtcatccagtatcagggcaagccttatgtccagctgaatggcggtagctgggtgccttatccgc

SEQ ID NO: 842200 - DNA, 75 bp, synthetic construct
  source 1..75: mol_type = other DNA
gaacatttaaagtactctataaaaataatcttttttatagtgtcctggcactatcactcattcttttatatgcta

SEQ ID NO: 842201 - DNA, 75 bp, synthetic construct
  source 1..75: mol_type = other DNA
tttggctttatccctatgcaggacggttcacccgcgccgggcttaagcaacatcaccgccgagggctggttcccg

SEQ ID NO: 842202 - DNA, 75 bp, synthetic construct
  source 1..75: mol_type = other DNA
ctaaccccgctaagattcaggccattctgcaggcatttcacgagatcttcgacgaaggatcctgccatattgaat

SEQ ID NO: 842203 - DNA, 75 bp, synthetic construct
  source 1..75: mol_type = other DNA
atgcaccaagttgtctgtgcgaccaccaatcccgctaaaattcaggccattctgcaggcatttcacgagatcttc

SEQ ID NO: 842204 - DNA, 75 bp, synthetic construct
  source 1..75: mol_type = other DNA
tgggatacttctgttcatcaggatagcggcggccaatacgcgattattttccggcactccttcagcaaaaaacag

SEQ ID NO: 842205 - DNA, 75 bp, synthetic construct
  source 1..75: mol_type = other DNA
atgcatgaaccggacattctgtttctcgacgaaccgacgtccggcgttgatcccctcacccgccgtgaattttgg

SEQ ID NO: 842206 - DNA, 75 bp, synthetic construct
  source 1..75: mol_type = other DNA
atttaccgccgggaagctcactcgcgccagcgtctatcaccaggcggtgatcctggcgctgagtccgtttcataa

SEQ ID NO: 842207 - DNA, 75 bp, synthetic construct
  source 1..75: mol_type = other DNA
gtttaccgccgggaaactcactcgcgccagcgtctatcaccaggcggtgatcctggcgctgagtccgtttcataa

SEQ ID NO: 842208 - DNA, 75 bp, synthetic construct
  source 1..75: mol_type = other DNA
aacattgacgtagcgccgttagtcgcgcggctcgatcagatgatggccagcgtctcccagttgttacaactggcg

SEQ ID NO: 842209 - DNA, 75 bp, synthetic construct
  source 1..75: mol_type = other DNA
gctgacgtcgcgcacgaactgcgaacgccactggcgggggtgcgtttgcatctggaactgctggcgaaaacgcat

SEQ ID NO: 842210 - DNA, 75 bp, synthetic construct
  source 1..75: mol_type = other DNA
ggcggtcgccagcctgattgtccccggcgtctttatggtcagcctgacgctatttatctgctatcaggcggtacg

SEQ ID NO: 842211 - DNA, 75 bp, synthetic construct
  source 1..75: mol_type = other DNA
ccgcctggcaattgccagatcggttaatgcttttggaactgttaatgttcgattaccgtaattccgatcaggagc

SEQ ID NO: 842212 - DNA, 75 bp, synthetic construct
  source 1..75: mol_type = other DNA
tttactaccgggcagatcctgatgtggatcgccaccatggtgctgattgccgttgtggtttatctcctgcgttac

SEQ ID NO: 842213 - DNA, 75 bp, synthetic construct
  source 1..75: mol_type = other DNA
aaaccgggaagaggcttccggtacgcgcgcctgggtacggctgaagaaagatcaatacgtggcaaaccagatata

SEQ ID NO: 842214 - DNA, 75 bp, synthetic construct
  source 1..75: mol_type = other DNA
actgtagaagccacgctaaccaactgcattacctgcttagccaggaacttgatactgaaaccattcgcaaggcca

SEQ ID NO: 842215 - DNA, 75 bp, synthetic construct
  source 1..75: mol_type = other DNA
tgcccatcttgcgccggattacttgcaggatgcggtgaaatttaatcctcttggagaaaccgtatatgaagcctc

SEQ ID NO: 842216 - DNA, 75 bp, synthetic construct
  source 1..75: mol_type = other DNA
agatcaaaaaacggggcgggaaactggtgtttccgacgctggattatccattggttcgcgatgtcatcaaaacgg

SEQ ID NO: 842217 - DNA, 75 bp, synthetic construct
  source 1..75: mol_type = other DNA
aaaaaatttaaaacgaaatcggatgcagttttatatgagcggtgggtgctggcgcaacagcataacaatgagtgg

SEQ ID NO: 842218 - DNA, 75 bp, synthetic construct
  source 1..75: mol_type = other DNA
gcggagcaaagcagagcgttattataatgccttccgtgaacaacagatagtgatagaacgtttgccagcagaaac

SEQ ID NO: 842219 - DNA, 75 bp, synthetic construct
  source 1..75: mol_type = other DNA
agaaataatcacaggctatcgtcgggtaattgattttgttcttagtcctataaagggaacaattcatgagagcat

SEQ ID NO: 842220 - DNA, 75 bp, synthetic construct
  source 1..75: mol_type = other DNA
gtggatcacttttcatccgtcgttgacagaaatggcgagaaggtcaaaaaggggcagttgttgatctctctttct

SEQ ID NO: 842221 - DNA, 75 bp, synthetic construct
  source 1..75: mol_type = other DNA
ggcatcagacccgatcgggacaacgactttgcagacgtggccagacagacgatttccgcttcggttgatcatgaa

SEQ ID NO: 842222 - DNA, 75 bp, synthetic construct
  source 1..75: mol_type = other DNA
tttattcccggcgacagcgtcacggctatcacagcccagaacggcatgctggctgataaacgactgacgtctgcc

SEQ ID NO: 842223 - DNA, 75 bp, synthetic construct
  source 1..75: mol_type = other DNA
ttttttgtaccgccatgatggtttctgccccctggactgtacatgcacagtctcctgccactctcagctttcccc

SEQ ID NO: 842224 - DNA, 75 bp, synthetic construct
  source 1..75: mol_type = other DNA
ggttaacgagcgtgaaatgggatatctgagtaagtctgaatgtgttcagttgctggatgcactggctgaaaatcc

SEQ ID NO: 842225 - DNA, 75 bp, synthetic construct
  source 1..75: mol_type = other DNA
ggtggcaatattaccaacagcggcggcagcatcaacgcacagaatgacctcctgctcgacagcacaggcagtatc

SEQ ID NO: 842226 - DNA, 75 bp, synthetic construct
  source 1..75: mol_type = other DNA
tatttttgttaaggatcttggtctggttgccgataccgccaaagccctgcacttcccgctgccattggcctcaac

SEQ ID NO: 842227 - DNA, 75 bp, synthetic construct
  source 1..75: mol_type = other DNA
tcgatttattaataacgaactagttaatgatttagggttggaatatggttccgttatcataaatatcggttataa

SEQ ID NO: 842228 - DNA, 75 bp, synthetic construct
  source 1..75: mol_type = other DNA
gagcctggcatggtcatctgttgccagacggcccgaacactatgggcggctttcctggcgttgcgctgctgacgg

SEQ ID NO: 842229 - DNA, 75 bp, synthetic construct
  source 1..75: mol_type = other DNA
aagcaggcgtttgcgatggcgcatttcaatccggacatcgccaaagagaatatccgcgcggtcttctcctggtag

SEQ ID NO: 842230 - DNA, 75 bp, synthetic construct
  source 1..75: mol_type = other DNA
cggggagctggaacgactagaccagacgctgaacctgccactagtggggtacacctggacccgcgatatccaact

SEQ ID NO: 842231 - DNA, 75 bp, synthetic construct
  source 1..75: mol_type = other DNA
ttagttgccgaacaatccagcggcgaacaagaggaaaagaatttaatccgcctggatacgcggcatcttttcgat

SEQ ID NO: 842232 - DNA, 75 bp, synthetic construct
  source 1..75: mol_type = other DNA
tgctaattcaacggaagaagattcactggctgtcggtgaagactcgctggcaatgggggcgaaaactgtcgttaa

SEQ ID NO: 842233 - DNA, 75 bp, synthetic construct
  source 1..75: mol_type = other DNA
tttttgctaccggcccattaactggatctggtgccccctgtagttctcgcgtaaatatcacctcactttctactt

SEQ ID NO: 842234 - DNA, 75 bp, synthetic construct
  source 1..75: mol_type = other DNA
ctactacggtcgtttgggccaggttgaaaccccgtacggcaacaccatcgcctacatggacgttcctgtagcgta

SEQ ID NO: 842235 - DNA, 75 bp, synthetic construct
  source 1..75: mol_type = other DNA
tgatcgcctacaccaacgacaagaaatacgtgcgctatccgctggtgccgttgcagagcgttcctgtccagtatc

SEQ ID NO: 842236 - DNA, 75 bp, synthetic construct
  source 1..75: mol_type = other DNA
gagagattctctcaggacttaggttttgttatcgccgacaacgaccctgtagctgaagggcggaaagggagcgat

SEQ ID NO: 842237 - DNA, 75 bp, synthetic construct
  source 1..75: mol_type = other DNA
agctggcagctgctcagcaggtaggccgcccgattgatacccagaagtacgacgggatgcagctcaaatggcaga

SEQ ID NO: 842238 - DNA, 75 bp, synthetic construct
  source 1..75: mol_type = other DNA
acgctgaacctgcctctggtggggtacacctggacccgagatattcaactgcgtgaagacgtgtctatcgcagat

SEQ ID NO: 842239 - DNA, 75 bp, synthetic construct
  source 1..75: mol_type = other DNA
ggcaacctcaacaccggacgaaatccgcgcaagtattaaccaggtgctgtctgatgcgtgggccgcttccggtta

SEQ ID NO: 842240 - DNA, 75 bp, synthetic construct
  source 1..75: mol_type = other DNA
aagcgcaccggataattaaagcccgccgttcagccaatgacttcttaggttttttctctcaatggacagggatta

SEQ ID NO: 842241 - DNA, 75 bp, synthetic construct
  source 1..75: mol_type = other DNA
ggacaataccccgtttgccagcagcgttaacggtttgatatttgctgactacattgccgccagtggctccacgca

SEQ ID NO: 842242 - DNA, 75 bp, synthetic construct
  source 1..75: mol_type = other DNA
ttgatatttgctgactacattgccgccagtggctccacgcagaaatcgcttggcttaacgctcaatcgcgtagtc

SEQ ID NO: 842243 - DNA, 75 bp, synthetic construct
  source 1..75: mol_type = other DNA
tggagaaaaccaccgttgccgataccaataccgagtggagcaagttgcaggccactgcgtggatgaagaaaggcg

SEQ ID NO: 842244 - DNA, 75 bp, synthetic construct
  source 1..75: mol_type = other DNA
gaattttcgcccgatctgaaagcattaccgcccggtgagcatggcttccatgttcatgccaaaggaagctgccag

SEQ ID NO: 842245 - DNA, 75 bp, synthetic construct
  source 1..75: mol_type = other DNA
ccgctcagccaatgacttcttaggctttttctcgcagtggacgggaattaaagcgaaggaaattaacatcaaata

SEQ ID NO: 842246 - DNA, 75 bp, synthetic construct
  source 1..75: mol_type = other DNA
atggctgaacacgatattacgccagaagtcaccatttccaaaacacagcgccgctgtaccgtgggttatcttccc

SEQ ID NO: 842247 - DNA, 75 bp, synthetic construct
  source 1..75: mol_type = other DNA
gaaatgaccaatgctgtttttaccatatcccacccaggaataggggtattgcttggcgggaatgcatcaaaccct

SEQ ID NO: 842248 - DNA, 75 bp, synthetic construct
  source 1..75: mol_type = other DNA
accggttatacggtaactggggcgggcacttatagtggcggttcagtggttctgccgtctccgcttgctgctggc

SEQ ID NO: 842249 - DNA, 75 bp, synthetic construct
  source 1..75: mol_type = other DNA
aagcgcatcgggtaattaaagcacgccgttcagccaatgacttcttaggctttttctcacagtggacggggataa

SEQ ID NO: 842250 - DNA, 75 bp, synthetic construct
  source 1..75: mol_type = other DNA
attgcactccaccaatatggaagagtcgaccgaaatcctgacgatttttccgtggtacagctacctggtcggcat

SEQ ID NO: 842251 - DNA, 75 bp, synthetic construct
  source 1..75: mol_type = other DNA
atcaaaatcagcgccaaatggctgagagaagcgggatttgagatcggcacgggcgttaccgtgaagatctcggaa

SEQ ID NO: 842252 - DNA, 75 bp, synthetic construct
  source 1..75: mol_type = other DNA
ccagaacctcacgccagagtgaagttcttgatgtactcagctccttgttggtagcggagatcgctcagcccagcg

SEQ ID NO: 842253 - DNA, 75 bp, synthetic construct
  source 1..75: mol_type = other DNA
aactggcaaaacacagaaaaggcgatctgattctggtgcacggaaacttgcaggtaaacaggtatcaggacaagt

SEQ ID NO: 842254 - DNA, 75 bp, synthetic construct
  source 1..75: mol_type = other DNA
ggtatcaggacaagttcggacaacagaaagagggctggcaactgctggcacaaagcattatcagctcaagaaccg

SEQ ID NO: 842255 - DNA, 75 bp, synthetic construct
  source 1..75: mol_type = other DNA
atgacaacgcagattgcaacacggggaagactggcggtatcactgccctgccatggcgcagaacagccaaccaca

SEQ ID NO: 842256 - DNA, 75 bp, synthetic construct
  source 1..75: mol_type = other DNA
gatcaggggatcgatgtaattagcgaagtcatggctgaagtgatttttaggctgacaagagacgaatcactgtaa

SEQ ID NO: 842257 - DNA, 75 bp, synthetic construct
  source 1..75: mol_type = other DNA
accgcgcagccgcacgtttacgcggtgggcgacgtgattggttatccaagcctggcgtcggcggcctacgaccag

SEQ ID NO: 842258 - DNA, 75 bp, synthetic construct
  source 1..75: mol_type = other DNA
tctgattctggtgcacggaaacttgcaggtaaacaggtatcaggacaagtacgggcaacagaaagagggctggca

SEQ ID NO: 842259 - DNA, 75 bp, synthetic construct
  source 1..75: mol_type = other DNA
ttctcaatccgccgtacaagaagatcaacagccaatccgctcaccggcttgcattgcgtagtgtcggtatagaga

SEQ ID NO: 842260 - DNA, 75 bp, synthetic construct
  source 1..75: mol_type = other DNA
acagcgtacgccgcgagttagccccccgtaccgcgcagaaacataaagccgaatttgggcagttcatgacgcctt

SEQ ID NO: 842261 - DNA, 75 bp, synthetic construct
  source 1..75: mol_type = other DNA
tcgcttcacgcagctggcgctgggaaattacaggctgacagtccgggcggtaaatgcatggggacagccggtgca

SEQ ID NO: 842262 - DNA, 75 bp, synthetic construct
  source 1..75: mol_type = other DNA
gttggatacaccaccacactggtatttgatgaagatgaaacagttatcagtgccagaactggttttccgcaggga

SEQ ID NO: 842263 - DNA, 75 bp, synthetic construct
  source 1..75: mol_type = other DNA
caaaacgaaactatagcatggagcttaacgcccgaacgttcaaaaaccccgataaaattgcttttgtcataaact

SEQ ID NO: 842264 - DNA, 75 bp, synthetic construct
  source 1..75: mol_type = other DNA
cggttcggtatttcatgttcccggtcacagtgagtttcatctgcaagttgccgaacctacctcttatctgtgccg

SEQ ID NO: 842265 - DNA, 75 bp, synthetic construct
  source 1..75: mol_type = other DNA
ccttcctctatcagtcgctgcgtgaactcatcatggaataccaggtaaatgcggatgttatcggttttggctacg

SEQ ID NO: 842266 - DNA, 75 bp, synthetic construct
  source 1..75: mol_type = other DNA
atgacgctcgcgcagtttgccatgactttctggcacgacctggcggcaccgatcctggcgggaattattaccgca

SEQ ID NO: 842267 - DNA, 75 bp, synthetic construct
  source 1..75: mol_type = other DNA
ccatgattttctggcacgacctggcggcaccgatcctggcggggattattaccgcagtgattgtcagctggtggc

SEQ ID NO: 842268 - DNA, 75 bp, synthetic construct
  source 1..75: mol_type = other DNA
agcattgaatatgttcaccagcgccagtaacgcgggttacgggaaagaagacgatagcgcagttatcaagatttt

SEQ ID NO: 842269 - DNA, 75 bp, synthetic construct
  source 1..75: mol_type = other DNA
ctggcatccaggctgccacacagtattttgcttacagctttaattatcaggaactgctggggccaaacttcaatc

SEQ ID NO: 842270 - DNA, 75 bp, synthetic construct
  source 1..75: mol_type = other DNA
acctcatctgccaggatattaatcagttgcgtagccgtgaaacaggttatgggccggatgaaacaataacctcga

SEQ ID NO: 842271 - DNA, 75 bp, synthetic construct
  source 1..75: mol_type = other DNA
attgaggctgcacagcagtcgccagtttataaaatggcgatggaatggaaactggcgctgccgctgcatccggaa

SEQ ID NO: 842272 - DNA, 75 bp, synthetic construct
  source 1..75: mol_type = other DNA
aaaagtatcgcttcccacgcgaccgatgaactgcccttaggttttaaacagcgtctggcgctggcctgttcgctg

SEQ ID NO: 842273 - DNA, 75 bp, synthetic construct
  source 1..75: mol_type = other DNA
gaactgtggcagatggtgcatgagctggcgggcgaagggatgttaattctctggagcacctcgtatctcgacgaa

SEQ ID NO: 842274 - DNA, 75 bp, synthetic construct
  source 1..75: mol_type = other DNA
tgccggaaatcaacatcaacgaaactacgccgcgttttgaagatgcgtttattgatttgctgggcggtgccggaa

SEQ ID NO: 842275 - DNA, 75 bp, synthetic construct
  source 1..75: mol_type = other DNA
aatggccgttgaagcaatgcgcaatggggcatttgattttattgagaaacccagcagttcagataaattacttag

SEQ ID NO: 842276 - DNA, 75 bp, synthetic construct
  source 1..75: mol_type = other DNA
cagctgccgcgcaagactttatatgacaaactcaacaaacatcagattcaaccgcaagtttatcgaccagaatca

SEQ ID NO: 842277 - DNA, 75 bp, synthetic construct
  source 1..75: mol_type = other DNA
ggcgataatatgtccgatcaacccaaaccgctgggcggtggcggtgaacgctatgcctgtggtgtaattaagtaa

SEQ ID NO: 842278 - DNA, 75 bp, synthetic construct
  source 1..75: mol_type = other DNA
gaactgctggggccaaacttcaatcacatctacgcgccgtggtcctatttcaaatggtattcagcatggcatgac

SEQ ID NO: 842279 - DNA, 75 bp, synthetic construct
  source 1..75: mol_type = other DNA
ggctgtttgaaccggcgctggtggtgatgatggcgggcgtggtgctgtttattgtcatcgccatcctcgagccga

SEQ ID NO: 842280 - DNA, 75 bp, synthetic construct
  source 1..75: mol_type = other DNA
gcagtctgcgcgccgcgctggcggagttgcgcctgttcccgccgatgatgctgtacatgatcgcctccggcgaac

SEQ ID NO: 842281 - DNA, 75 bp, synthetic construct
  source 1..75: mol_type = other DNA
tgaatacggcgcgtttttcccgcaccttaagcatcctcaccgccagcagtgttccgctactggaaggtattcaga

SEQ ID NO: 842282 - DNA, 75 bp, synthetic construct
  source 1..75: mol_type = other DNA
aaaatacctgctctcgtctgttgcaatgcctgcagcatgcggcggcaatgcgccttgcttttactaaccatcttt

SEQ ID NO: 842283 - DNA, 75 bp, synthetic construct
  source 1..75: mol_type = other DNA
gctgttgtcagccaggtggatttgttaatggaacgctttgttgacttaaatcgtcgtttgatgaagttggagact

SEQ ID NO: 842284 - DNA, 75 bp, synthetic construct
  source 1..75: mol_type = other DNA
ccgttccccggtgaatccatcttactggacgcctacagcatatggaacggcggctgcaacgaaatatgatgccac

SEQ ID NO: 842285 - DNA, 75 bp, synthetic construct
  source 1..75: mol_type = other DNA
gaactgttggggccaaacttcaatcacatctatgcgccatggtcctatttcaaatggtattcagcatggaatgac

SEQ ID NO: 842286 - DNA, 75 bp, synthetic construct
  source 1..75: mol_type = other DNA
tcttcgggcatctgtagccgagccaaaaactaccgaccgtattcgcgcagcggcggcgaatgatgacgccagtga

SEQ ID NO: 842287 - DNA, 75 bp, synthetic construct
  source 1..75: mol_type = other DNA
ttggtttatcggtagaaggcacgaaacgggtacagaccaaaaaaacctacaaacatcgtctgctggcgatgatcg

SEQ ID NO: 842288 - DNA, 75 bp, synthetic construct
  source 1..75: mol_type = other DNA
tggactggttcaatacccgcaccgggaatatcctgcgccagcaggtgtccttttccgaaaatgatctgccgttgc

SEQ ID NO: 842289 - DNA, 75 bp, synthetic construct
  source 1..75: mol_type = other DNA
actgcctctcgataccgcaaaggcgctggcggcagcagttgaaaagatcggcttcgatttactgatctttggtga

SEQ ID NO: 842290 - DNA, 75 bp, synthetic construct
  source 1..75: mol_type = other DNA
gtattccttcgatgaaagccatcctcggcgcgggtaaaaaaccggtaaatcagtggcaggcaagtgatattggct

SEQ ID NO: 842291 - DNA, 75 bp, synthetic construct
  source 1..75: mol_type = other DNA
ccgctggcgaagcgcacatggtggatgtctccgccaaagcggaaaccgtgcgtgaagcacgggcggaagcctttg

SEQ ID NO: 842292 - DNA, 75 bp, synthetic construct
  source 1..75: mol_type = other DNA
gcgctttgttacagcttcacactgtgacaatttctgtgaaatccttggttgtcaaggccatcaggaaaatgcata

SEQ ID NO: 842293 - DNA, 75 bp, synthetic construct
  source 1..75: mol_type = other DNA
tcatgcaatgtaatgtattagtaggtaaacttgggttaggggatattgagcaaggggaaattaaaggtactttaa

SEQ ID NO: 842294 - DNA, 75 bp, synthetic construct
  source 1..75: mol_type = other DNA
attgtggtggtgggggtgattctgctggttgcggtgatctggctgctgaccaaatcggcttccatcattctgtaa

SEQ ID NO: 842295 - DNA, 75 bp, synthetic construct
  source 1..75: mol_type = other DNA
tatttacctaagtttttccaaaaaaccaatcgtcatggaatggggcaccatctaatgtttgtacaaggtataatt

SEQ ID NO: 842296 - DNA, 75 bp, synthetic construct
  source 1..75: mol_type = other DNA
ggcggcctccgtggcggcgctgaccatttacgatatgtgcaaagcagtgcaaaaagatatggtgattggtccggt

SEQ ID NO: 842297 - DNA, 75 bp, synthetic construct
  source 1..75: mol_type = other DNA
tcatcaggatttccgggggaagcaggccatgctgtccccacggtataccactcgctggaatgagttacttgtcgt

SEQ ID NO: 842298 - DNA, 75 bp, synthetic construct
  source 1..75: mol_type = other DNA
gtgatacagagcgtgatgccattaaccactgaaacagcgctggatatcctcattgcgtggctgcaggacaatatc

SEQ ID NO: 842299 - DNA, 75 bp, synthetic construct
  source 1..75: mol_type = other DNA
gccggaggtcacagcggacatgcggaaggaacgactcaggccgcagtggcagaaggcactatcaccatccgggac

SEQ ID NO: 842300 - DNA, 75 bp, synthetic construct
  source 1..75: mol_type = other DNA
acctgttattgtttgtctgcttccttgtgatgtctctgctggttgggttggtgtacaaatttaccgccgaacgcg

SEQ ID NO: 842301 - DNA, 75 bp, synthetic construct
  source 1..75: mol_type = other DNA
ggaattattttcgacaacgatgaggataaaatggattcggcagcactgctgccctgtattgaacaggccagggag

SEQ ID NO: 842302 - DNA, 75 bp, synthetic construct
  source 1..75: mol_type = other DNA
atgtgcggtttttacgaaaggcgttcggcgtggaaatggaacgcacctggcgtgaactccatggcgagccctgct

SEQ ID NO: 842303 - DNA, 75 bp, synthetic construct
  source 1..75: mol_type = other DNA
ctgttacgacccggcgcagtttgccatgagcggcgtgcgcgatgccaacgtgcgcgtgggtgattttgtggtggt

SEQ ID NO: 842304 - DNA, 75 bp, synthetic construct
  source 1..75: mol_type = other DNA
cagcgcccgcaatgccacactgtccggtgatgccggtgcaaaagacagtgccctcgttaccgtcagcggtacact

SEQ ID NO: 842305 - DNA, 75 bp, synthetic construct
  source 1..75: mol_type = other DNA
tggttttgatgcgtttgcctctccaaaccttcctccgttactggaagcaggtatccatattcgtcgtttgaatac

SEQ ID NO: 842306 - DNA, 75 bp, synthetic construct
  source 1..75: mol_type = other DNA
tccgccgcgcttatctgaacacgcctgatgatgcggaattgctgggcaagctggtcaatgcgttaaacgcctgca

SEQ ID NO: 842307 - DNA, 75 bp, synthetic construct
  source 1..75: mol_type = other DNA
gttgctgtattcgctgcaaaaatcggtaatgactccaacttattgatagtgttttatgttcagataatgcccgat

SEQ ID NO: 842308 - DNA, 75 bp, synthetic construct
  source 1..75: mol_type = other DNA
cacctgcctatcgaggggatgcaaaaggtattgttgaacgctatttcggaacattacaggcagaattcaaacctt

SEQ ID NO: 842309 - DNA, 75 bp, synthetic construct
  source 1..75: mol_type = other DNA
agctatgccccggagccgccactgccggagcctgtcacccgtccgaccgagctctatatcaatggcgagctggtg

SEQ ID NO: 842310 - DNA, 75 bp, synthetic construct
  source 1..75: mol_type = other DNA
taattgagtttgattgcacccaggcaactgaagcaatcccacagtgggcggcagaagaaggacatgccatcaccg

SEQ ID NO: 842311 - DNA, 75 bp, synthetic construct
  source 1..75: mol_type = other DNA
gcagaagaaggacatgccatcaccgattatcagcagattggcgatgctgcgtggagcatcaccgttcaaaaagcc

SEQ ID NO: 842312 - DNA, 75 bp, synthetic construct
  source 1..75: mol_type = other DNA
atgaaaaagttagtagccacagcacctcgcgttgctgcgctagttgaatatgaagatcgggcgattttagccaat

SEQ ID NO: 842313 - DNA, 75 bp, synthetic construct
  source 1..75: mol_type = other DNA
tccgccgcgcttatctgaacacaccagacgatgcagagttactgggcaaactggtcaatgcgttaaatgcctgta

SEQ ID NO: 842314 - DNA, 75 bp, synthetic construct
  source 1..75: mol_type = other DNA
agcgcatcgggaagaggcgaaagattgcccgcaatctatctgcgttacccaggatttatcagcctgctacgaaaa

SEQ ID NO: 842315 - DNA, 75 bp, synthetic construct
  source 1..75: mol_type = other DNA
gtgattcagaacaaagttgatccgcaaaccggggaagtgattgatcagggtacgctggaccacctgaccgggcaa

SEQ ID NO: 842316 - DNA, 75 bp, synthetic construct
  source 1..75: mol_type = other DNA
tccacgctggcgggtgaaaccagtgcgggcagcacggtgtctgtaaaaggcaacagtctgaagaccacggccact

SEQ ID NO: 842317 - DNA, 75 bp, synthetic construct
  source 1..75: mol_type = other DNA
gtggtcgggtattttattgagcataaatcccgaaacagtctgctttttcagcccacggattctgccgctgaagat

SEQ ID NO: 842318 - DNA, 75 bp, synthetic construct
  source 1..75: mol_type = other DNA
atgcgctcaataaaaaaagtaaccatgctcttggggggcctcgcactcacctgctcgatcgcatttcaggcaagt

SEQ ID NO: 842319 - DNA, 75 bp, synthetic construct
  source 1..75: mol_type = other DNA
ccggcgcgcactacggcggtgtactctatgtcgattccctgagcacagaaaacggcccggtacctacgtatatcg

SEQ ID NO: 842320 - DNA, 75 bp, synthetic construct
  source 1..75: mol_type = other DNA
cctttatatgagcagctacaccagatccgcgcgcgctggaaatcgatcatcaccatctgttttatcggcagcgtg

SEQ ID NO: 842321 - DNA, 75 bp, synthetic construct
  source 1..75: mol_type = other DNA
ctgatgatccggagattttttcgcagacagaggcgcagcaactggtggcggaagagcttgtggagaagtgggaaa

SEQ ID NO: 842322 - DNA, 75 bp, synthetic construct
  source 1..75: mol_type = other DNA
ctgagcttgaccagagcaacgggcggtggatctgtgaaaacacggggatgtggacccgcgacggtctgacgtttt

SEQ ID NO: 842323 - DNA, 75 bp, synthetic construct
  source 1..75: mol_type = other DNA
tgggtggtgcggcagcaaaaaactaccgtgaaaaatccgtggacgtggtctgttatgacgagctttcctcgttcg

SEQ ID NO: 842324 - DNA, 75 bp, synthetic construct
  source 1..75: mol_type = other DNA
gctgcaggaagagggatatgtccgccgtagcccctccgatgatagttttcgactgaccatcaaagtgcggcaatt

SEQ ID NO: 842325 - DNA, 75 bp, synthetic construct
  source 1..75: mol_type = other DNA
ggtgtatatggcgagcgcaatgaccatcgaacaggcagcggaaaagcatcttccggcgctacaacgggtagcaaa

SEQ ID NO: 842326 - DNA, 75 bp, synthetic construct
  source 1..75: mol_type = other DNA
gtccattatgaaaaaaacaatggtattgccaataaaacagttcttgaatttattatggttgcacgtttttgtgcg

SEQ ID NO: 842327 - DNA, 75 bp, synthetic construct
  source 1..75: mol_type = other DNA
tgccggtaaaaggcgcatctgtctatggcaagccggtgatcaccatgccaaaaacccgcaatcagcggggcgtgt

SEQ ID NO: 842328 - DNA, 75 bp, synthetic construct
  source 1..75: mol_type = other DNA
tttggcgatgatgcgacgccgtctggcctgaaatgggagaagggtaaaccggaaacggtgtattacctgtgtgaa

SEQ ID NO: 842329 - DNA, 75 bp, synthetic construct
  source 1..75: mol_type = other DNA
caccatttgctttatcggcagcgtggtcgcgatggtgacaggcacgtccgtggcattgctgatgggcgcttcacc

SEQ ID NO: 842330 - DNA, 75 bp, synthetic construct
  source 1..75: mol_type = other DNA
tctgggtggtatggtatggcgtgcagacactaaatccaacgtttatggtaaaaaccacgacaccggcgtttctcc

SEQ ID NO: 842331 - DNA, 75 bp, synthetic construct
  source 1..75: mol_type = other DNA
ggcaaacagacatctcgcaggagctgaaaacaattcagggctttatcagcgatcacatagcagtatcaacccgtt

SEQ ID NO: 842332 - DNA, 75 bp, synthetic construct
  source 1..75: mol_type = other DNA
gcgatggatggtcaccagtgaaggggctttttcttatctcgcacgcgatttggggctaaaagagctttatctgtg

SEQ ID NO: 842333 - DNA, 75 bp, synthetic construct
  source 1..75: mol_type = other DNA
tattttgtcccgtccacggacccggacagtccgtatctgattacggtgaatccgaaactggatggtctcggaaag

SEQ ID NO: 842334 - DNA, 75 bp, synthetic construct
  source 1..75: mol_type = other DNA
cgaattgtcgttgacattgatggtgttaatctcgctgaactgattaataaggccgctgaaaacggtgattcactc

SEQ ID NO: 842335 - DNA, 75 bp, synthetic construct
  source 1..75: mol_type = other DNA
aagaaattaagcaactgttaaactttttagaggagttttcctttatttcaaaaaaattatcaagaatcaacttta

SEQ ID NO: 842336 - DNA, 75 bp, synthetic construct
  source 1..75: mol_type = other DNA
gcgctcggtctgaagtttggtgtggcactgacagcagaccaggtggcggctctcgaccaaagtattctgtggtat

SEQ ID NO: 842337 - DNA, 75 bp, synthetic construct
  source 1..75: mol_type = other DNA
ttgaccagtaccggcgatatcatgagccagggtgacaccacgctgaaagcagccaccacggacaaccggggcagt

SEQ ID NO: 842338 - DNA, 75 bp, synthetic construct
  source 1..75: mol_type = other DNA
ttggcgcaggtgcaaatgcaggaattggttccatggtagatagttcagttgatcctgaaaatgcaatcattgcag

SEQ ID NO: 842339 - DNA, 75 bp, synthetic construct
  source 1..75: mol_type = other DNA
agggaaacgcagacccggaccgcagaataaagcgaggttacagctatcctgggtcacgtctgagtgcggttgaat

SEQ ID NO: 842340 - DNA, 75 bp, synthetic construct
  source 1..75: mol_type = other DNA
atccgggcgacatctgccgtcacggtggccgacgttgccgccgccatatccgttacagcctggggaaaaatccca

SEQ ID NO: 842341 - DNA, 75 bp, synthetic construct
  source 1..75: mol_type = other DNA
gttctgccgggcgtgtacagcgttcgcctgacgcagagtgtacagcgcctttcagaaatcggtgtcatccgcgtt

SEQ ID NO: 842342 - DNA, 75 bp, synthetic construct
  source 1..75: mol_type = other DNA
ccggtatatcattgataactactacggtggtcgtaccgataacctgagtgaacaggaacgtcagcaaatcagcat

SEQ ID NO: 842343 - DNA, 75 bp, synthetic construct
  source 1..75: mol_type = other DNA
acgcgtcgatgttggtgcaacagggggggatgccagaatttcggccgggaataatctgctgattgacgcggacaa

SEQ ID NO: 842344 - DNA, 75 bp, synthetic construct
  source 1..75: mol_type = other DNA
ggcgggaaaatactttggttcattcacaaatggaatgattaccggcacggtgccgattctggcggtgtggttttt

SEQ ID NO: 842345 - DNA, 75 bp, synthetic construct
  source 1..75: mol_type = other DNA
acgtcaggttaatggcgataaaccctacctcgaaattatctgcatggattcagaagctgaaattcagaaggcaga

SEQ ID NO: 842346 - DNA, 75 bp, synthetic construct
  source 1..75: mol_type = other DNA
aaaaaaaaagcagttactcacgtttatgcgaacaacgcacaactgatcgtggagcttccgtaccagaccgttcgc

SEQ ID NO: 842347 - DNA, 75 bp, synthetic construct
  source 1..75: mol_type = other DNA
gcactttcagcatgaagacggttcatgattcggtccggcagcagggaacagacatgaccagtggcggtgacatta

SEQ ID NO: 842348 - DNA, 75 bp, synthetic construct
  source 1..75: mol_type = other DNA
gtcttacggatgatgaagctcgcgttcttgctggcatatttggtactgatgaggacttttggagtaaccttcaaa

SEQ ID NO: 842349 - DNA, 75 bp, synthetic construct
  source 1..75: mol_type = other DNA
cagagcatcagcggtggcgtgcgttatttgcaggatatgatgagtaaagtgccggaaagtgtgccggagaacgag

SEQ ID NO: 842350 - DNA, 75 bp, synthetic construct
  source 1..75: mol_type = other DNA
ttgaccgcctgcgggtcaccttcggggtgcagtcactgttggagaccacctcaaagggcgaccgtaatcctcttc

SEQ ID NO: 842351 - DNA, 75 bp, synthetic construct
  source 1..75: mol_type = other DNA
agaatttttcagcaaagcggtgcagacgctgattccattctttgccttcgcgctgggcaataccattgatttgac

SEQ ID NO: 842352 - DNA, 75 bp, synthetic construct
  source 1..75: mol_type = other DNA
cttcgattctggtgccaattcttacctctatctggtcacgtaaagtcaaagccagagcggcgaaaatcgaaattt

SEQ ID NO: 842353 - DNA, 75 bp, synthetic construct
  source 1..75: mol_type = other DNA
ttgcaactagtgatggagaaccctcacttttcgaaaggttatagtgcagattgtcgacaggagcgagaccctatg

SEQ ID NO: 842354 - DNA, 75 bp, synthetic construct
  source 1..75: mol_type = other DNA
ttccgatacgtcaagcctgtcgctgcacaacatccttgataaagatggtaaggcaacagctgattatgttgttca

SEQ ID NO: 842355 - DNA, 75 bp, synthetic construct
  source 1..75: mol_type = other DNA
ggagcaggcgaacccggatatgggcgatagcgcgattaccgaaacctttggtattggcggagccgcaatgatcgc

SEQ ID NO: 842356 - DNA, 75 bp, synthetic construct
  source 1..75: mol_type = other DNA
cccataaagaggcggggatcgggcagattggcgcaggcaccgtgcgggcaccgctggcgtgttttgaacaggcgc

SEQ ID NO: 842357 - DNA, 75 bp, synthetic construct
  source 1..75: mol_type = other DNA
gcttcacgccgggccgccaatgcgctggcaggagatgaccgggccaatgaaaggggcgtgcgtgggcgcatgtct

SEQ ID NO: 842358 - DNA, 75 bp, synthetic construct
  source 1..75: mol_type = other DNA
ggcagataaacgactgacgtctgccggcggggtgctgttcacctccgtggcgacccgggccttcacgttgtatgt

SEQ ID NO: 842359 - DNA, 75 bp, synthetic construct
  source 1..75: mol_type = other DNA
tctcctgccacactcagctttccgcagggggggcagttccggctcagtatcagtaataccgatcccaatatgatt

SEQ ID NO: 842360 - DNA, 75 bp, synthetic construct
  source 1..75: mol_type = other DNA
gattaccgaaacctttggtattggcggagcggcaatgatcgcagcgcctggcgtaacgcgctttgtcggtgcggg

SEQ ID NO: 842361 - DNA, 75 bp, synthetic construct
  source 1..75: mol_type = other DNA
ttactttcaccaacaaaggcactggtgcatttgatggcagtggtaacggcactctaatcgctaatattgatggca

SEQ ID NO: 842362 - DNA, 75 bp, synthetic construct
  source 1..75: mol_type = other DNA
aatgatgggcagactattagcattgatttgcagaagattgactcttctacattaggactgaacggtttctccgtt

SEQ ID NO: 842363 - DNA, 75 bp, synthetic construct
  source 1..75: mol_type = other DNA
tactgcggcaaaagcaacagataataaagttgttgttgaattatcaacagcaaaaccgactgcacagttctcagg

SEQ ID NO: 842364 - DNA, 75 bp, synthetic construct
  source 1..75: mol_type = other DNA
tgccgatgctggtggtcgagaacgtgaccgacggcaaccgggcgtactgcaacctcaacgaaggtatcggcaaag

SEQ ID NO: 842365 - DNA, 75 bp, synthetic construct
  source 1..75: mol_type = other DNA
atgggcggcattacttctgccagtatgccgatgctggtggtcgagaacgtgaccgacggcaaccgggcgtactgc

SEQ ID NO: 842366 - DNA, 75 bp, synthetic construct
  source 1..75: mol_type = other DNA
gaagatgctgactacgcgaccgaagtgtctaacatgtctcgtgcacagatcctgcaacaagcgggtacctctgtt

SEQ ID NO: 842367 - DNA, 75 bp, synthetic construct
  source 1..75: mol_type = other DNA
gtgattgatgcgattggtgagggaccgatagaaggtccggtgaagggactgcagagtatcctggtgaacaaaacc

SEQ ID NO: 842368 - DNA, 75 bp, synthetic construct
  source 1..75: mol_type = other DNA
cgatccggataaatatgcccgaatcgataccggagccattattgaccagcggccggtgagcgtgatcccgccggg

SEQ ID NO: 842369 - DNA, 75 bp, synthetic construct
  source 1..75: mol_type = other DNA
taaagtgggcaatccaccgaagccggttggcttcatcgcttctgaaaatgtggatttcggcatcgagctgaactg

SEQ ID NO: 842370 - DNA, 75 bp, synthetic construct
  source 1..75: mol_type = other DNA
aggagtatacgaacgtctatgggagctacttgcgcccgtctgtaatattaatgactcgcggaactggtagttggt

SEQ ID NO: 842371 - DNA, 75 bp, synthetic construct
  source 1..75: mol_type = other DNA
tacagcgataccgttgagggggtttacgattcggcgcttgtagaacgttacgacgtccggcagacgtccctgacc

SEQ ID NO: 842372 - DNA, 75 bp, synthetic construct
  source 1..75: mol_type = other DNA
ctcaaaataacaggggtgcgtcaatttcttcgcctactatcatagtatcacacggatctggttcattcacaggtt

SEQ ID NO: 842373 - DNA, 75 bp, synthetic construct
  source 1..75: mol_type = other DNA
aagacatggagagacttatcatgcattctgcggttgtaacaggtccaaacgtaacagtgcgtattaaagtgtccg

SEQ ID NO: 842374 - DNA, 75 bp, synthetic construct
  source 1..75: mol_type = other DNA
gtatgcgaacatctgcatattcctgtgccggaaaaattatgtgtgattggcatcgataacgaagaactgacccgc

SEQ ID NO: 842375 - DNA, 75 bp, synthetic construct
  source 1..75: mol_type = other DNA
gtgggtgaaactattcacgccatgattcatgccgaaaagctggagaaagcgcgcagcctgctgatttctactacc

SEQ ID NO: 842376 - DNA, 75 bp, synthetic construct
  source 1..75: mol_type = other DNA
tatctgtcgcgtgtcgccctttcttcggtcgctcagggcgcgcggcaaatgggctatcaggcggcaaaactgttg

SEQ ID NO: 842377 - DNA, 75 bp, synthetic construct
  source 1..75: mol_type = other DNA
cagtaaggctgtcgctgagtcgttgcgtaccctagattccagtgccggtggaaacatagcgaatgtcactgactt

SEQ ID NO: 842378 - DNA, 75 bp, synthetic construct
  source 1..75: mol_type = other DNA
aatcggtgtggattgtcgagtctgaagagctttacgcgcagcaatatcgcgttatcagcgttacggataataatg

SEQ ID NO: 842379 - DNA, 75 bp, synthetic construct
  source 1..75: mol_type = other DNA
cgcatcagcgcggttaacggtcgcgttatcacgcttgatcgtgattcggcagccgctcccggaagccgtctgatg

SEQ ID NO: 842380 - DNA, 75 bp, synthetic construct
  source 1..75: mol_type = other DNA
cagtggtaccgcgcgcgcctgattgaccgtatcggtaacgccggggactggaccgactggatcatgggcacgtcc

SEQ ID NO: 842381 - DNA, 75 bp, synthetic construct
  source 1..75: mol_type = other DNA
aactacgacaagctcgagttcgtcgaaacggtcgaagagctggcagcaatgcacaatcttgaagtgccatttgaa

SEQ ID NO: 842382 - DNA, 75 bp, synthetic construct
  source 1..75: mol_type = other DNA
aaaactatcgatgtgggacgatatagcagataagaatattgctgagcaaaccttcaccgactcactcaaccatat

SEQ ID NO: 842383 - DNA, 75 bp, synthetic construct
  source 1..75: mol_type = other DNA
gaagagttgatagctcttgatcgcacaaatcgtataagcactgaagaacgcagggaattctgggaaatcagacaa

SEQ ID NO: 842384 - DNA, 75 bp, synthetic construct
  source 1..75: mol_type = other DNA
gagtcctccggctctgaaaccggactgggcgtggaagtgacgaaggcaaagccggtaacgcgcaccattacatcc

SEQ ID NO: 842385 - DNA, 75 bp, synthetic construct
  source 1..75: mol_type = other DNA
atgggggaggccggacctgaagccattatgcctctgacgcgggcggcggatggctcgctgggtgtgcgagcggtg

SEQ ID NO: 842386 - DNA, 75 bp, synthetic construct
  source 1..75: mol_type = other DNA
atgaacggcagtgcgggtctggtgtattccccggtctaccatatcgccattcagaatgacgggactaatggccag

SEQ ID NO: 842387 - DNA, 75 bp, synthetic construct
  source 1..75: mol_type = other DNA
tcattaatgatctgctggcacgcactgacatcgtcgatctgatcgatgcccgtgtgaagctgaaaaagcagggca

SEQ ID NO: 842388 - DNA, 75 bp, synthetic construct
  source 1..75: mol_type = other DNA
ttcgaacaggagctggtggcgcgctatggtttcaaccagcttgagatcaccgccatcggttgcaccagacagtct

SEQ ID NO: 842389 - DNA, 75 bp, synthetic construct
  source 1..75: mol_type = other DNA
ggatcggaatgacgcttacaccgtcctgcgtgattttgctgcaatcttccgtgggatgacctactggggcgacga

SEQ ID NO: 842390 - DNA, 75 bp, synthetic construct
  source 1..75: mol_type = other DNA
caggaagagttaattgctcgcgagcgcactcacggtttaagtaacgaagaacggctggaactctggacattaaac

SEQ ID NO: 842391 - DNA, 75 bp, synthetic construct
  source 1..75: mol_type = other DNA
gttttgcgccccccggctgggacaacgtcctgaaacggtttggcggcaatccagaaaatcgccagtcattgattg

SEQ ID NO: 842392 - DNA, 75 bp, synthetic construct
  source 1..75: mol_type = other DNA
tcagttgatggacggtctgaatacgttttaccaacaatctttacaacaacctgttgccacgtctgcgcgccagta

SEQ ID NO: 842393 - DNA, 75 bp, synthetic construct
  source 1..75: mol_type = other DNA
tccgactggctcaaaacctgtcacattacgaccattgccatggagtccactggcgtttactggttgcctgctttt

SEQ ID NO: 842394 - DNA, 75 bp, synthetic construct
  source 1..75: mol_type = other DNA
ctgctggaagaagacgatcgtgatgagaactccagccacgactttggcaaagatttgattcccaagatcaccgaa

SEQ ID NO: 842395 - DNA, 75 bp, synthetic construct
  source 1..75: mol_type = other DNA
cacgggatgacccttaactcactggtctctggcggctgtgtgatttccggttcggtcgtagtgcagtccgttctg

SEQ ID NO: 842396 - DNA, 75 bp, synthetic construct
  source 1..75: mol_type = other DNA
aaggcgcacgttgcactgttgcttgtatgccagtaccgattgaagaagcctccgcatttggcgttatggcggttg

SEQ ID NO: 842397 - DNA, 75 bp, synthetic construct
  source 1..75: mol_type = other DNA
cgtggaggtgctcaagcagcgccacaaaaaaaactatgaggctggcgtagcgagttcagataaaagaaatccccg

SEQ ID NO: 842398 - DNA, 75 bp, synthetic construct
  source 1..75: mol_type = other DNA
acttaatgttggcgcgccagctgccattgaagtctgttgccctgattctggcggggggacgcggtactcgcctga

SEQ ID NO: 842399 - DNA, 75 bp, synthetic construct
  source 1..75: mol_type = other DNA
gttaccagaagtttgggtaggtcgctcgtgccgcttgcgccgctgcgtcattgaccgtgcttgcgtcattccaga

SEQ ID NO: 842400 - DNA, 75 bp, synthetic construct
  source 1..75: mol_type = other DNA
aaaaaagtatttaagaaccattcttatcaccgtattcgtgatgctcagagagcatatgatgatgcccggaacaaa

SEQ ID NO: 842401 - DNA, 75 bp, synthetic construct
  source 1..75: mol_type = other DNA
caggcaaaacttgaaaaacacacgcagcgttataatgccaggatgaaagagacagaagatgctcgttgcaaccaa

SEQ ID NO: 842402 - DNA, 75 bp, synthetic construct
  source 1..75: mol_type = other DNA
gtgctgtaagaatgattactggcggttacaaatatctgcagcgtatatcagtctcaggtactccgcgttatggtc

SEQ ID NO: 842403 - DNA, 75 bp, synthetic construct
  source 1..75: mol_type = other DNA
tatcgtagttgcctggagtgcggcacctgccgtttgttatgcgatgaaaaaacactacaacagtggcgctatccg

SEQ ID NO: 842404 - DNA, 75 bp, synthetic construct
  source 1..75: mol_type = other DNA
ggcatgctgtggcgaaggacagctggaccggggctggtccggtgaataccgggctggttaataacgccatcaaaa

SEQ ID NO: 842405 - DNA, 75 bp, synthetic construct
  source 1..75: mol_type = other DNA
aaagcatttgatgcagaggatatggggaataagtttgccgcgctgggtaagacatttaaagccgcagattatgtg

SEQ ID NO: 842406 - DNA, 75 bp, synthetic construct
  source 1..75: mol_type = other DNA
aaatattattaatgatgccgattaaatttattatattttctaccgtttcaccccgtgtatctcgatttcgattta

SEQ ID NO: 842407 - DNA, 75 bp, synthetic construct
  source 1..75: mol_type = other DNA
aagacttgcaggtactggtagaaatcgtccacagcgggagttttagtgctgcagcggcgacgcttgggcaaacgc

SEQ ID NO: 842408 - DNA, 75 bp, synthetic construct
  source 1..75: mol_type = other DNA
atttgttcaatcgatttacttgatgattgcaatcttattgcacgtttttccgttgaaagaaatagcttgaaaggg

SEQ ID NO: 842409 - DNA, 75 bp, synthetic construct
  source 1..75: mol_type = other DNA
gctcttgctgttcatagagtcatggctgaattccctccaactgaatatcgtgctgacatcaacggtgcatctggt

SEQ ID NO: 842410 - DNA, 75 bp, synthetic construct
  source 1..75: mol_type = other DNA
atcggcaaattgatttagtgcaggataatattgatctggatattcggattaacgatgaaattcctgattattata

SEQ ID NO: 842411 - DNA, 75 bp, synthetic construct
  source 1..75: mol_type = other DNA
aatccttgaaaatacgctggcaacaacgctgctgaaccgctccgctcgcggcgtggcgctgactgaaagtggcca

SEQ ID NO: 842412 - DNA, 75 bp, synthetic construct
  source 1..75: mol_type = other DNA
ctgcatttgtcaccaagcggatccaaatccttgaaaatacgctggcaacaacgctgctgaaccgctccgctcgcg

SEQ ID NO: 842413 - DNA, 75 bp, synthetic construct
  source 1..75: mol_type = other DNA
ccacaaccgggcgtaccgatgaaagtgatctgtgccgggcaaagcgatgctggtatggcgttctccgcccagtat

SEQ ID NO: 842414 - DNA, 75 bp, synthetic construct
  source 1..75: mol_type = other DNA
atagttttgtattgttatattggtgtagctctcttttgtggatttcattggtgtttcgaaaagatcaatgactct

SEQ ID NO: 842415 - DNA, 75 bp, synthetic construct
  source 1..75: mol_type = other DNA
tgagttcgtctgctgccgtaactgttctgaccggcgtaaccgtttttgttgttggtcaactcatcgcaaaaagat

SEQ ID NO: 842416 - DNA, 75 bp, synthetic construct
  source 1..75: mol_type = other DNA
agaatagtggagagttcaaaacagttcttcttccggatgagctcgccgttatagtctgttctacactaaaggggg

SEQ ID NO: 842417 - DNA, 75 bp, synthetic construct
  source 1..75: mol_type = other DNA
ttctgctgggtgtcgaaaccttcggcgagcgtattcagccgctaatgcagtgccgcgcccatctccctgcactta

SEQ ID NO: 842418 - DNA, 75 bp, synthetic construct
  source 1..75: mol_type = other DNA
gcgggcgttttggcgtcaacctggtgactggctggcaaaaacccgagtatgagcagatgggcatctggcctggcg

SEQ ID NO: 842419 - DNA, 75 bp, synthetic construct
  source 1..75: mol_type = other DNA
aacggaagaagcagcgctgcatgcgcaggctaaacttgaaaaacacacgcagcgttataacgccaggatgaaaga

SEQ ID NO: 842420 - DNA, 75 bp, synthetic construct
  source 1..75: mol_type = other DNA
ttgaagagtctgcgcgtaaatatcctaacgacgctctggctcttcaggcattgtatcgggttattaaggaaacgg

SEQ ID NO: 842421 - DNA, 75 bp, synthetic construct
  source 1..75: mol_type = other DNA
caaagcggtaaaagtcaatacggttataccggtagaaagccttcttgctccgcatttgatcatggaattacacaa

SEQ ID NO: 842422 - DNA, 75 bp, synthetic construct
  source 1..75: mol_type = other DNA
agatagagcatgaactccagttaatgttgattgaagggtttgataaatcgcctatttcagctaaaaacttacatg

SEQ ID NO: 842423 - DNA, 75 bp, synthetic construct
  source 1..75: mol_type = other DNA
cctgtatccgatattgaaggaactgaactcatcatacgcgagcaagctgtatgacatcgcgtttgagactttcta

SEQ ID NO: 842424 - DNA, 75 bp, synthetic construct
  source 1..75: mol_type = other DNA
tcaacggcactatcgccaacgaaaccactcttctcgttaatgcccgtgatttacatacttttcttggggtaggta

SEQ ID NO: 842425 - DNA, 75 bp, synthetic construct
  source 1..75: mol_type = other DNA
gttaataagcggttctttgtgaagcacataacgaatcacgccgagtatgacaaactgacacgttactacagagag

SEQ ID NO: 842426 - DNA, 75 bp, synthetic construct
  source 1..75: mol_type = other DNA
aaaatgtacctccgcgcttacgaggcagattagccatctggttgctggaagtccgtgcaggagtatatgtaggtg

SEQ ID NO: 842427 - DNA, 75 bp, synthetic construct
  source 1..75: mol_type = other DNA
aaggacagcaacagcgttatattcgcaaatataatcctgatactgatgaagattcattagtgatggaaatgccgg

SEQ ID NO: 842428 - DNA, 75 bp, synthetic construct
  source 1..75: mol_type = other DNA
ggtaacccagacagcgaaacaactcactgaaggagctggagataacacctttggtggcttcctgtcccctgatga

SEQ ID NO: 842429 - DNA, 75 bp, synthetic construct
  source 1..75: mol_type = other DNA
atggatctttttgtctatttcgctactctgctgtttttgactatcgtcgctggtgttaaattaatttttatatcg

SEQ ID NO: 842430 - DNA, 75 bp, synthetic construct
  source 1..75: mol_type = other DNA
aaaaggtgaaatccatttttggccgcaaacaggccagcgatgacgcccgtctgaatgatgtgcatgaagcggtga

SEQ ID NO: 842431 - DNA, 75 bp, synthetic construct
  source 1..75: mol_type = other DNA
ctgaatgatgtgcatgaagcggtgaccaccgtcagcgagcatgtgcagaccaacctcactgcgcaggatcagcgt

SEQ ID NO: 842432 - DNA, 75 bp, synthetic construct
  source 1..75: mol_type = other DNA
caaaacttgatcccgccaactatatggtgcatagggccagaagtatgctggcgcaactaagagcaagacaatttg

SEQ ID NO: 842433 - DNA, 75 bp, synthetic construct
  source 1..75: mol_type = other DNA
tcctgaaacaggtgtttttgtcagaaatgctcgaagttcagaagtatgtgcattatatgctcaggaagcattgac

SEQ ID NO: 842434 - DNA, 75 bp, synthetic construct
  source 1..75: mol_type = other DNA
gcaacaattcacagacgaggaaatcatcctcctctgctacatgcaactctggatggaaaaagcccaggacctcag

SEQ ID NO: 842435 - DNA, 75 bp, synthetic construct
  source 1..75: mol_type = other DNA
aaaaggccgccagatacgccgctacttcatcgagtgcgaaaagaaacttcgcaacattcagccagtacaagcaga

SEQ ID NO: 842436 - DNA, 75 bp, synthetic construct
  source 1..75: mol_type = other DNA
ctacttatagagatggtaatgatgacaaaattgagcttatagagcttcttgaaggcattgtttcattagtcgatt

SEQ ID NO: 842437 - DNA, 75 bp, synthetic construct
  source 1..75: mol_type = other DNA
cagcggaatggccgaagccgtaatgccaatgatgatgctcaataacctggtcgcgcaaacgcgtttaagcattca

SEQ ID NO: 842438 - DNA, 75 bp, synthetic construct
  source 1..75: mol_type = other DNA
acacttttctgcaggcatacagcttatatctggagcagaggcaagctgccccgcttgtgcaggaaagcgtcataa

SEQ ID NO: 842439 - DNA, 75 bp, synthetic construct
  source 1..75: mol_type = other DNA
tgattgaagggtttgacacgccgcccagtgcaatgatgcctcacggtaaaccgtggtatgccttgcatattgagc

SEQ ID NO: 842440 - DNA, 75 bp, synthetic construct
  source 1..75: mol_type = other DNA
catatcatctggcaggcgtgggtggcgaaaaaagcggggcgtgtcgtagggcgtattaccgcgcaaattgatacc

SEQ ID NO: 842441 - DNA, 75 bp, synthetic construct
  source 1..75: mol_type = other DNA
atggtgttgattattaagatgccgttcgttgctgttgcaacctgtttttcatcgttaattatttgttatccacag

SEQ ID NO: 842442 - DNA, 75 bp, synthetic construct
  source 1..75: mol_type = other DNA
atgaaagagctgaactcctcatacacgaacaagctgtatgacattgcgtttgagaccatctacatggtgacgaag

SEQ ID NO: 842443 - DNA, 75 bp, synthetic construct
  source 1..75: mol_type = other DNA
cgccattgatgatccgcaggtttttgccgctttatttggcgcagcggaagcgtggttgaagtcacaaggcgcgcg

SEQ ID NO: 842444 - DNA, 75 bp, synthetic construct
  source 1..75: mol_type = other DNA
gtgccggacgatatgatctacatcgctgagattgattctgcaccctgcgcgtttattgtggcttgcctaacatca

SEQ ID NO: 842445 - DNA, 75 bp, synthetic construct
  source 1..75: mol_type = other DNA
acgctactgactaacgacgctggcgaaatgctgtttgccgagcaccatttttcggccggtcctttgcagatcacc

SEQ ID NO: 842446 - DNA, 75 bp, synthetic construct
  source 1..75: mol_type = other DNA
aaacacaagcccaaccacccgcgctactgggatgccattgccgccgaggttcagacgtttggggcgaacagcttt

SEQ ID NO: 842447 - DNA, 75 bp, synthetic construct
  source 1..75: mol_type = other DNA
atggctacctaccgacacgaccccgaccttgagtttctgcgccactgtcatcgtgacgatctggatttactggtt

SEQ ID NO: 842448 - DNA, 75 bp, synthetic construct
  source 1..75: mol_type = other DNA
cgcgtaatattgattatggcctgccggtgaccattccgtttttactcttccctaagcaggaggagtggatccact

SEQ ID NO: 842449 - DNA, 75 bp, synthetic construct
  source 1..75: mol_type = other DNA
caaaatcgccgaacctcgccgacgccgtgatgattaactacgcgccgatggattcctctcttgataattgggcca

SEQ ID NO: 842450 - DNA, 75 bp, synthetic construct
  source 1..75: mol_type = other DNA
gataacggtaaagcggcgcgcctgaataaagacttcttcgcgaacgcgaaagcacagagctggtggcatcttcgc

SEQ ID NO: 842451 - DNA, 75 bp, synthetic construct
  source 1..75: mol_type = other DNA
gggcaaatggtttctgattggcaccgggatgctggtttcggcgttcatcctgctggtgccgatgatttacatctt

SEQ ID NO: 842452 - DNA, 75 bp, synthetic construct
  source 1..75: mol_type = other DNA
ggctggatgaacataatctgcaaattatgttctcctggccgggaatggtgctggtcaccatctttgtgacgtgtc

SEQ ID NO: 842453 - DNA, 75 bp, synthetic construct
  source 1..75: mol_type = other DNA
gttatgacgcgcgcccgattaactggggcaaatggtttctgattggcaccgggatgctggtttcggcgttcatcc

SEQ ID NO: 842454 - DNA, 75 bp, synthetic construct
  source 1..75: mol_type = other DNA
cggtctggtgtatctgctgttctacggctctaacggcccgctcggtggctggctggatgaacataatctgcaaat

SEQ ID NO: 842455 - DNA, 75 bp, synthetic construct
  source 1..75: mol_type = other DNA
ggtgatgttaagccagggcagccaggaagacgaagcggcgattttgcttggcgcatccggctggcagatgttccg

SEQ ID NO: 842456 - DNA, 75 bp, synthetic construct
  source 1..75: mol_type = other DNA
atgccggttttacagaatctggccgatccggacatgctgcacgcgatttggctgacggtgatgattgcgctgatt

SEQ ID NO: 842457 - DNA, 75 bp, synthetic construct
  source 1..75: mol_type = other DNA
gtcatgaagccatcagccgatttttcgaacttggtacattgaatgtcattgaagttgccgctatttcaggccacc

SEQ ID NO: 842458 - DNA, 75 bp, synthetic construct
  source 1..75: mol_type = other DNA
gcgatgattgggcaatccgttattaacgtaaaatccggtggccgtggacggctttcaaccctcacggcgggcgtg

SEQ ID NO: 842459 - DNA, 75 bp, synthetic construct
  source 1..75: mol_type = other DNA
cagccatccactgtcaaccagtgtcgtcatgctggccaccgtggtggtagtggtcgccacgcataatctggcgta

SEQ ID NO: 842460 - DNA, 75 bp, synthetic construct
  source 1..75: mol_type = other DNA
tctggcgattgccgggaagccagagactctgcccggcgcggtggcgttttcgatgctggagaatctggcagtggt

SEQ ID NO: 842461 - DNA, 75 bp, synthetic construct
  source 1..75: mol_type = other DNA
atcgtgaagccgggagaagtccacgccgtaaggccgcacccgttgccgtcagggcagcaaattatgtggatgtga

SEQ ID NO: 842462 - DNA, 75 bp, synthetic construct
  source 1..75: mol_type = other DNA
atcgtgaagccgggagaagtccacgccgtgaggccgcacccgttgccgtcagggcagcaaattatgtggatgtaa

SEQ ID NO: 842463 - DNA, 75 bp, synthetic construct
  source 1..75: mol_type = other DNA
ccactttgatttccgtgaagctggtgatagacgtttcacatgcccatttctgggacattacgtctgtcagcgccc

SEQ ID NO: 842464 - DNA, 75 bp, synthetic construct
  source 1..75: mol_type = other DNA
ttttggccgcagcgcgcgggcgatgcacgttagtccatccacgctttcccgacagattcagcgcctggaagaaga

SEQ ID NO: 842465 - DNA, 75 bp, synthetic construct
  source 1..75: mol_type = other DNA
cccgtcggtggagattaaactcactactggtgatgcggcagatgcaatggaaaaagtggtcacgggagaagcgga

SEQ ID NO: 842466 - DNA, 75 bp, synthetic construct
  source 1..75: mol_type = other DNA
tctggcgattgccgggaaaccggagacgctacccggcgctgtggcgttttcgatgctggagaatctggcagtagt

SEQ ID NO: 842467 - DNA, 75 bp, synthetic construct
  source 1..75: mol_type = other DNA
cagggaccggtgcgccgccgcattgaactgtggtttcgacgcaacaaaatcagcaacccgatgatttacgccacg

SEQ ID NO: 842468 - DNA, 75 bp, synthetic construct
  source 1..75: mol_type = other DNA
acgttacccggtgcagtggcattttcgatgctggagaatctggcggtagtgctgatcgcacctgcgctgccctgc

SEQ ID NO: 842469 - DNA, 75 bp, synthetic construct
  source 1..75: mol_type = other DNA
ttggatttacgcgatctgaaacccttcctgcatctggcggaaagccgccattttggccgcagcgcgcgggcgatg

SEQ ID NO: 842470 - DNA, 75 bp, synthetic construct
  source 1..75: mol_type = other DNA
cagcccgcgtattcttaaactgatgaagcgtccgggttcagtagatcgccagttggctcgcatcaaacaatggcg

SEQ ID NO: 842471 - DNA, 75 bp, synthetic construct
  source 1..75: mol_type = other DNA
tcgccatgccgggttcgaccaaagcgtgccgtaccgcatgggaaaatatcatcgcgccgcaactggatgcccgta

SEQ ID NO: 842472 - DNA, 75 bp, synthetic construct
  source 1..75: mol_type = other DNA
tctcgtttgaagagattggcactgcaacgttgcaatcccgtgcggtagcgggcgtcgctaacaagacactgattt

SEQ ID NO: 842473 - DNA, 75 bp, synthetic construct
  source 1..75: mol_type = other DNA
tgtcgtttgaagagattggcaccgcaacgttgcaatcccgtgcggtagccggcgtcgctaacaagacgttgattt

SEQ ID NO: 842474 - DNA, 75 bp, synthetic construct
  source 1..75: mol_type = other DNA
gactgaatgttgtcccctgcgctcgcgcaacgaaattaacgatgaatcgcgagggtatccgtcgcctggcggcag

SEQ ID NO: 842475 - DNA, 75 bp, synthetic construct
  source 1..75: mol_type = other DNA
ggcaaccacagcaaatgagcccgcttgcccttgaacgtgcgcaggagattgcccgtaaagtggtgctggcactgg

SEQ ID NO: 842476 - DNA, 75 bp, synthetic construct
  source 1..75: mol_type = other DNA
atggcagccgtcgtctgggtgttgcgctggcgaccgctgagagtgttgatgaagcgattgagcgcgcaaagcacg

SEQ ID NO: 842477 - DNA, 75 bp, synthetic construct
  source 1..75: mol_type = other DNA
aataacaggcctgctggtaatcgcaggcctttttatttgggggagagggaagtgaacgatagctaccgacagttt

SEQ ID NO: 842478 - DNA, 75 bp, synthetic construct
  source 1..75: mol_type = other DNA
tgggttatgaggatgggcgtgacaaaacggtaattgcagtaatgaaagccatcagggccgcaggaatcaaagaaa

SEQ ID NO: 842479 - DNA, 75 bp, synthetic construct
  source 1..75: mol_type = other DNA
cgggagccgctctatcgcagcatgaaattacgtgtctgcgtggaatttctggcggcatggtgccagcagcggctg

SEQ ID NO: 842480 - DNA, 75 bp, synthetic construct
  source 1..75: mol_type = other DNA
gtgctaaagctgaaggggtacatatggggagacctgtaaaagcttcttcagaggctgtacagacgcttatttcac

SEQ ID NO: 842481 - DNA, 75 bp, synthetic construct
  source 1..75: mol_type = other DNA
ggcacagcttgaaagaagcttgatagcagagcgtagaaaagctggtattgaacgtgctaaagctgaaggggttca

SEQ ID NO: 842482 - DNA, 75 bp, synthetic construct
  source 1..75: mol_type = other DNA
caatgttaggcattatgtcaacgttggcacagcttgaaagaagcttgatagcagagcgtagaaaggctggtattg

SEQ ID NO: 842483 - DNA, 75 bp, synthetic construct
  source 1..75: mol_type = other DNA
aagctattgccaccgatatgctgatccagcttgaaaaggaagggttgaatgttgtcccctgcgctcgtgcgactc

SEQ ID NO: 842484 - DNA, 75 bp, synthetic construct
  source 1..75: mol_type = other DNA
aagcaaaaggcgctgcactggctgaacctgagctgtatggaagggtttgataccggttgtgaagagtttgagaaa

SEQ ID NO: 842485 - DNA, 75 bp, synthetic construct
  source 1..75: mol_type = other DNA
tgccctgacgttcctgtcagagctggggctgattagctaccagacggaatatgacccgcttattggctgcaacat

SEQ ID NO: 842486 - DNA, 75 bp, synthetic construct
  source 1..75: mol_type = other DNA
ggcgcatgccaccggtgctgcgtcgacgggctattgatgcgctgctgcaggggctgtgtttccactatgacccgc

SEQ ID NO: 842487 - DNA, 75 bp, synthetic construct
  source 1..75: mol_type = other DNA
ctggcgtaaaagagattctggttatctcccaggatacctccgcgtatggcgtagatgtcaaacaccgtactggat

SEQ ID NO: 842488 - DNA, 75 bp, synthetic construct
  source 1..75: mol_type = other DNA
cgctcaacctttattgtcggcttccctggcgagacggaagaagatttccagatgctactcgacttcctgaaagaa

SEQ ID NO: 842489 - DNA, 75 bp, synthetic construct
  source 1..75: mol_type = other DNA
atgaaaaaaattatcgcattgatgttgtttttgacattctttgcccatgcgaacggctccgagcctggcagtcag

SEQ ID NO: 842490 - DNA, 75 bp, synthetic construct
  source 1..75: mol_type = other DNA
actggctacagcggagagcattggtgaggcgattgaacgcgcgaagcacgccgccgcacaggtgaaagtacaagg

SEQ ID NO: 842491 - DNA, 75 bp, synthetic construct
  source 1..75: mol_type = other DNA
aatttctcaggatctctcggagtttgccctgcatgtgcgagcctttctcggacttccggttggcgggatccgtca

SEQ ID NO: 842492 - DNA, 75 bp, synthetic construct
  source 1..75: mol_type = other DNA
gactttgagattaccctactaaccgtcagtgcggtggatggcgtccatttctgtgcaccaataggtcatcgtcag

SEQ ID NO: 842493 - DNA, 75 bp, synthetic construct
  source 1..75: mol_type = other DNA
gtcacccgtgagaagggttctctgctgtcggggaatcgcgtgaccgttaacgccggcgataacctgacggtagag

SEQ ID NO: 842494 - DNA, 75 bp, synthetic construct
  source 1..75: mol_type = other DNA
gccctgcacgtatgcgcttttctcggtcttccggttggcgctattcgccagtatggtccggccgcttcagccgtt

SEQ ID NO: 842495 - DNA, 75 bp, synthetic construct
  source 1..75: mol_type = other DNA
gcgccgcgtggttgaactggaaaagccgcactatatcgtgccggagattgaagctattgccaccgatatgctgct

SEQ ID NO: 842496 - DNA, 75 bp, synthetic construct
  source 1..75: mol_type = other DNA
aataccggcaacctgcccgccatcaaactgggggaggcccgcgttcgactttcccgcagaaaacggagaaagaaa

SEQ ID NO: 842497 - DNA, 75 bp, synthetic construct
  source 1..75: mol_type = other DNA
accgggaaaaactaccggaacagatgatgaaagccatgacgcatcagttacgtcttgttctgaaacgaaaactgt

SEQ ID NO: 842498 - DNA, 75 bp, synthetic construct
  source 1..75: mol_type = other DNA
atgtgatgcagcgtatgccgtgggcatcatcgtccaccggcgctgacagcaaagggaggccgaaacgccaccgtc

SEQ ID NO: 842499 - DNA, 75 bp, synthetic construct
  source 1..75: mol_type = other DNA
gattacctcggcgtaaaactgaaagtcaccgtacggcagaacatcagccagttgtttgacgatctcgataacggt

SEQ ID NO: 842500 - DNA, 75 bp, synthetic construct
  source 1..75: mol_type = other DNA
gaaatgaatgaagacggtacgctggcacgcattgaagagaaatacctggggcatggcgatgattttgattacgtc

SEQ ID NO: 842501 - DNA, 75 bp, synthetic construct
  source 1..75: mol_type = other DNA
gtcgtcgtcaaccggtgttgaccgtaagggcaggccagcgcgttatcgtctgccgattgaggtggtgaaaatacc

SEQ ID NO: 842502 - DNA, 75 bp, synthetic construct
  source 1..75: mol_type = other DNA
gaaagaattgctcgaggcgaactggtatcgctatgacgatttgccgttactcccgccgcccggcaccgtagcgcg

SEQ ID NO: 842503 - DNA, 75 bp, synthetic construct
  source 1..75: mol_type = other DNA
tgcaatggctggctaacatttctggccgcgatgacattgacgatatagacggcggtgaaattcgtgagctggctc

SEQ ID NO: 842504 - DNA, 75 bp, synthetic construct
  source 1..75: mol_type = other DNA
ccggcgacagtcctttcgcagcgaatgcgttgggtaaactggcggcgcaggaaatgctggcagcttacgcgagtt

SEQ ID NO: 842505 - DNA, 75 bp, synthetic construct
  source 1..75: mol_type = other DNA
atgactgttcaaacaagtaaaaacccgcaggtcgatattgctgaagataatgcgttcttcccttcagaatattcg

SEQ ID NO: 842506 - DNA, 75 bp, synthetic construct
  source 1..75: mol_type = other DNA
ccacaggcagacctgtgatgaatgccgacggcagcctgcaggcgctggaggtgactgaaggcagtatcaccatca

SEQ ID NO: 842507 - DNA, 75 bp, synthetic construct
  source 1..75: mol_type = other DNA
gcgcctgtctggctggtatgattttaatgataactggcgtattggttcgcaactggaacgcctctctcaccgcgt

SEQ ID NO: 842508 - DNA, 75 bp, synthetic construct
  source 1..75: mol_type = other DNA
gatgggcgtatttctaacgttgagctttctaaacgtgtgggactttccccaacgccgtgccttgagcgtgtgcgt

SEQ ID NO: 842509 - DNA, 75 bp, synthetic construct
  source 1..75: mol_type = other DNA
tgcctggcgtcaatgacacacggacatacgttgttatggaagaagtcaagcagagtaatcgtctggttattaaga

SEQ ID NO: 842510 - DNA, 75 bp, synthetic construct
  source 1..75: mol_type = other DNA
ccgcgccatgtacttatctatggtgctggagtgatcggctgtgaatatgcgtcgatcttccgcggtatggatgta

SEQ ID NO: 842511 - DNA, 75 bp, synthetic construct
  source 1..75: mol_type = other DNA
cgatcaacaactgaaagatcgtggctacaaactggtagcagtaggcaatacctttgtttatccgattgccggcta

SEQ ID NO: 842512 - DNA, 75 bp, synthetic construct
  source 1..75: mol_type = other DNA
cggcttctctggatgagcttaaccgggcgatcaatgatgcggagtcggtactggggacaacccggcgtcgccgtc

SEQ ID NO: 842513 - DNA, 75 bp, synthetic construct
  source 1..75: mol_type = other DNA
gggaaaccctgctgcgtctgcctggcgtcaatgacacacggacatacgttgttatggaagaagtcaagcagagta

SEQ ID NO: 842514 - DNA, 75 bp, synthetic construct
  source 1..75: mol_type = other DNA
ccaatgatgcagcagccagctcaatctaacgcagccgctccggcgaccgttccttccatggaagcgccagcagca

SEQ ID NO: 842515 - DNA, 75 bp, synthetic construct
  source 1..75: mol_type = other DNA
ggcgaagagtcagtacgcatcagccgtgcagctcctgccgcaagtttccctgtgatgcaacaagcttacgctgca

SEQ ID NO: 842516 - DNA, 75 bp, synthetic construct
  source 1..75: mol_type = other DNA
tctctgcggaaagcgaagagatgcgtcagcactttttctccgtcgccactctggcctctttcattgctgcgcaac

SEQ ID NO: 842517 - DNA, 75 bp, synthetic construct
  source 1..75: mol_type = other DNA
ttatcgagcgttatcaaaatgttggcggcggttgcccccactggggcaccatcccgtcgaaagctctccgtcacg

SEQ ID NO: 842518 - DNA, 75 bp, synthetic construct
  source 1..75: mol_type = other DNA
tcgaaacactaaccgctgaaaaatttgttattgcctgcggctctcgtccatatcatccaacagatgttgatttca

SEQ ID NO: 842519 - DNA, 75 bp, synthetic construct
  source 1..75: mol_type = other DNA
gattcgctggcgttacagaacattgggctggaaactgacagtcgcggacagctgaaggtcaacagcatgtatcag

SEQ ID NO: 842520 - DNA, 75 bp, synthetic construct
  source 1..75: mol_type = other DNA
tggtggaaatatatgaccgacgttatgcctgctaatccggataacagcccggtcagcagcgagctacaagaagtg

SEQ ID NO: 842521 - DNA, 75 bp, synthetic construct
  source 1..75: mol_type = other DNA
ttaccgcttaccgggcaatacactcactatgcgctgaataaaaaaaccggaaaaccggactacgtcaccgactcg

SEQ ID NO: 842522 - DNA, 75 bp, synthetic construct
  source 1..75: mol_type = other DNA
gcatcagcaaccgcctggtcaactggcgtcaaaacttataacggcgcgctgggcgtcgatattcatgaaaaagat

SEQ ID NO: 842523 - DNA, 75 bp, synthetic construct
  source 1..75: mol_type = other DNA
caaaaccacgtttgccgctgcggcgaaagagttctcccaggatcccggctctgctaaccagggcggcgatctcgg

SEQ ID NO: 842524 - DNA, 75 bp, synthetic construct
  source 1..75: mol_type = other DNA
ggggattcggaaataactgccgcacgaaattatgccgaaggtgcgggcggtttttttaaaggaatcgatgcctta

SEQ ID NO: 842525 - DNA, 75 bp, synthetic construct
  source 1..75: mol_type = other DNA
cgatgaagccgtacaacgggcgctggaattcgctaaaaaggatggcaacacgctggtcatagtcaccgctgatca

SEQ ID NO: 842526 - DNA, 75 bp, synthetic construct
  source 1..75: mol_type = other DNA
cgcttatggtccacatgccgcgaatgtggttggcctgaccgatcagaccgatctcttctacactatgaaagctgc

SEQ ID NO: 842527 - DNA, 75 bp, synthetic construct
  source 1..75: mol_type = other DNA
cgagccacggatttgaagatgctcctgtagatcgcttttcttataacagcccgtccctgttggtgcctggggtgt

SEQ ID NO: 842528 - DNA, 75 bp, synthetic construct
  source 1..75: mol_type = other DNA
gctggtaaaaccagaattactgggcgagctggattccccagaaaaacatcgcgccctgatggaagatctggggcg

SEQ ID NO: 842529 - DNA, 75 bp, synthetic construct
  source 1..75: mol_type = other DNA
gaaaacacggcgttcatccagtcgaattgctgctgcactaagactggcagccacaacaattggccggagcgatac

SEQ ID NO: 842530 - DNA, 75 bp, synthetic construct
  source 1..75: mol_type = other DNA
ccggccttccgtgacgcgctgacccgcctgaacaaaggccaaatgagcgctccggttcactcttcattcggctgg

SEQ ID NO: 842531 - DNA, 75 bp, synthetic construct
  source 1..75: mol_type = other DNA
aaaaaaggcgatattgttggcccgatccgttccggcgtcggcttccatattctgaaagttaacgacctgcgcggt

SEQ ID NO: 842532 - DNA, 75 bp, synthetic construct
  source 1..75: mol_type = other DNA
cactgccagaagaggacagtcaggcctatcaggtcagcgttaccggccaacataacatccactgtgaagttgtta

SEQ ID NO: 842533 - DNA, 75 bp, synthetic construct
  source 1..75: mol_type = other DNA
agcttgctaagccgcccgttaaaactcattcgctcgccgtatattattctgtcggcaacttacgtcatcggccaa

SEQ ID NO: 842534 - DNA, 75 bp, synthetic construct
  source 1..75: mol_type = other DNA
gcgtattacctggtggagccatcgaaggcgaccgcgacgactacgcagcccgcctgcgccgccgctatccgtacc

SEQ ID NO: 842535 - DNA, 75 bp, synthetic construct
  source 1..75: mol_type = other DNA
atgtggctaaatgcggatcaacaatctcgtgtgagtcagtggctggtggagtatacgcagcagaggttatcgctg

SEQ ID NO: 842536 - DNA, 75 bp, synthetic construct
  source 1..75: mol_type = other DNA
atgaattccgcctggtcagcgaggcgctggctgaacgtgaagtgctgctgaaaatggctccgcatatcgccttcc

SEQ ID NO: 842537 - DNA, 75 bp, synthetic construct
  source 1..75: mol_type = other DNA
gaaaggaaaaacgctgggcgaactggtgcgcgaccggatggcggcgtttccggcaagcggtgagatcaacagcaa

SEQ ID NO: 842538 - DNA, 75 bp, synthetic construct
  source 1..75: mol_type = other DNA
tcgccgcaggctatcactcgtgattacacgcttgatatccatgatgaaaacggcaaagccccgctgctgtcggta

SEQ ID NO: 842539 - DNA, 75 bp, synthetic construct
  source 1..75: mol_type = other DNA
tggctaagtgcggaacaacaatctcgtgtgagtcagtggttggtggagtatacgcagcagaagctgtcgctggcg

SEQ ID NO: 842540 - DNA, 75 bp, synthetic construct
  source 1..75: mol_type = other DNA
aactgaagtagcagatttaattggtgtaactcctcaagcaattagagatgctgagaagagcgggcgtttacctgc

SEQ ID NO: 842541 - DNA, 75 bp, synthetic construct
  source 1..75: mol_type = other DNA
aatcacgaacaggcagagcaaaaagctctcgataatgtcccgccgctctattacgccattttacctgtgatgccg

SEQ ID NO: 842542 - DNA, 75 bp, synthetic construct
  source 1..75: mol_type = other DNA
cttcttccactaccagcttccggtcgcctcttgcgtcattatctcggtggcgatctcccactttttcgtgcaacg

SEQ ID NO: 842543 - DNA, 75 bp, synthetic construct
  source 1..75: mol_type = other DNA
acagacaaccgggaagaacagcagcaaaggtggcggcgtgggcgtcagctttggtggtggaaccaatggcggagg

SEQ ID NO: 842544 - DNA, 75 bp, synthetic construct
  source 1..75: mol_type = other DNA
atgatccgcaaagcctttgtcatgcaggttaaccccgacgcccacgaagagtatcagcgtcggcataatcccatc

SEQ ID NO: 842545 - DNA, 75 bp, synthetic construct
  source 1..75: mol_type = other DNA
gtaagcagctatcccctgccatccggtaacaatggttattttgtcccgtccacggacccggacagtccgtatctg

SEQ ID NO: 842546 - DNA, 75 bp, synthetic construct
  source 1..75: mol_type = other DNA
cagtacgaccccaacgtttatgacgaatatcgtaaggcaaagcgagcagggaaggtgattcatgaaaatcaggca

SEQ ID NO: 842547 - DNA, 75 bp, synthetic construct
  source 1..75: mol_type = other DNA
atgcttaaaactgacgctcttttgtatttcggttcaaaaacaaaacttgcacaagcagctggtattcgtttggct

SEQ ID NO: 842548 - DNA, 75 bp, synthetic construct
  source 1..75: mol_type = other DNA
taaagtgctcgcactggagctccaggctgcaccgttagcaacgaatcctaatgttatgcaggcgacggacgcttt

SEQ ID NO: 842549 - DNA, 75 bp, synthetic construct
  source 1..75: mol_type = other DNA
tcaggctaataagcaattgcgctttattttgacgctgaaaagtgaaacagaggggataaagcacagcgtaaaagt

SEQ ID NO: 842550 - DNA, 75 bp, synthetic construct
  source 1..75: mol_type = other DNA
cagcagtatcaataacggaacaaccactgcacatgcaggtagtgtcagtccggtggtctctgcaccggtactgaa

SEQ ID NO: 842551 - DNA, 75 bp, synthetic construct
  source 1..75: mol_type = other DNA
gcggccagacaacagaaaggactgggattagagtttggtgtggcgctgacagctgaacagattgctcagcttgac

SEQ ID NO: 842552 - DNA, 75 bp, synthetic construct
  source 1..75: mol_type = other DNA
gttgatccatctgctgtttctcaatggggggaactggttcctgaaggtcgcgcgatgcgcctgcaagaggcatcc

SEQ ID NO: 842553 - DNA, 75 bp, synthetic construct
  source 1..75: mol_type = other DNA
atgatttatatttccgccgtcggcatgatcaacgccctgggaaataaccttgacgatatcgcagccaacctgact

SEQ ID NO: 842554 - DNA, 75 bp, synthetic construct
  source 1..75: mol_type = other DNA
gccgcgaacgctattttcgatcgcgtaaaaatgacctggccgcaggcgcgtatccacggtctgttggtgcaaagt

SEQ ID NO: 842555 - DNA, 75 bp, synthetic construct
  source 1..75: mol_type = other DNA
tgcccgctcgttgaaagaaatcgccagctgggactggccgtgcaaactggtgctggaacactgcgacgccatgac

SEQ ID NO: 842556 - DNA, 75 bp, synthetic construct
  source 1..75: mol_type = other DNA
aaattcatgctacagcaagtgttcagcatcgcatcaaaatattacgcaatggcattcattcaatggatgaatcct

SEQ ID NO: 842557 - DNA, 75 bp, synthetic construct
  source 1..75: mol_type = other DNA
tgcgcctgcaagaggcatccggcggggaacttcagtacgaccccaaagtttatgacgaatatcgtaaggcaaagc

SEQ ID NO: 842558 - DNA, 75 bp, synthetic construct
  source 1..75: mol_type = other DNA
tcgtgccggaaagcgtgacgatatatcagcgcattttatcggttcggttgtttatattgagcaggggttgtatca

SEQ ID NO: 842559 - DNA, 75 bp, synthetic construct
  source 1..75: mol_type = other DNA
gttcctggtggtcatggcgcacttattggtttacctgaaagccaggacgtggctaacgctttgcagtgggcaatc

SEQ ID NO: 842560 - DNA, 75 bp, synthetic construct
  source 1..75: mol_type = other DNA
accatccgattgaaacgttgctgccgttgtatcatctccatgctgcaggtttcgaattcgaagtggcgaccattt

SEQ ID NO: 842561 - DNA, 75 bp, synthetic construct
  source 1..75: mol_type = other DNA
aactgaagaaaatgggaatgaacatcatcaatgatgacattactggccgggtacataaggatcgtaaacttctca

SEQ ID NO: 842562 - DNA, 75 bp, synthetic construct
  source 1..75: mol_type = other DNA
gtagctaaccttcctgaaaatctgtgctttgctaccgaattaatgcaggagcaaatggatgaaattgtctcatct

SEQ ID NO: 842563 - DNA, 75 bp, synthetic construct
  source 1..75: mol_type = other DNA
ctttttgcccaaccctactgccggatcgaaaaccttgtcgaacgcaacatagccaaacgacagacagcatcatct

SEQ ID NO: 842564 - DNA, 75 bp, synthetic construct
  source 1..75: mol_type = other DNA
gctttcgctaccaatcctgtatttatcccgctttatcttggagagacgcgatgattactacacgctccttcgtag

SEQ ID NO: 842565 - DNA, 75 bp, synthetic construct
  source 1..75: mol_type = other DNA
gatgcgacgcttaacgcgtcttatcaggcctaccgctcgtaccatttgtccagggcggataaggcgtttatgccc

SEQ ID NO: 842566 - DNA, 75 bp, synthetic construct
  source 1..75: mol_type = other DNA
aaagatcgctaatgttcagaagagctttgaaccaggaatgacggtctccctcgttgcccggcaacatggtgtagc

SEQ ID NO: 842567 - DNA, 75 bp, synthetic construct
  source 1..75: mol_type = other DNA
agaccagcgtggctgccggcggcagttttacctttggctccatgaccggctcaggttacatcgctgcctcccggg

SEQ ID NO: 842568 - DNA, 75 bp, synthetic construct
  source 1..75: mol_type = other DNA
cgaatatgcagcaatctttgttcctggtggtcatggcgcacttattggtttaccagaaagccaggacgtggctgc

SEQ ID NO: 842569 - DNA, 75 bp, synthetic construct
  source 1..75: mol_type = other DNA
tggcccaatggagggaacgtctcgccttgcggaaatcgaaacgttcatccagcgccatgacatgtccattcggga

SEQ ID NO: 842570 - DNA, 75 bp, synthetic construct
  source 1..75: mol_type = other DNA
ttttgtgacgtatcataagtcaggcgaccgtgattttatttttaacattaagaatgccgcgtgcggtaaattatc

SEQ ID NO: 842571 - DNA, 75 bp, synthetic construct
  source 1..75: mol_type = other DNA
atgaagttcagcccatcctgcaagcgtacggcatgaacacgctccccacctggattgctactgacagcaccgaag

SEQ ID NO: 842572 - DNA, 75 bp, synthetic construct
  source 1..75: mol_type = other DNA
agcttaaaactctggttgcaggtaaacaggtgacagtctcttattcacataaagaccgctacggacgcattatcg

SEQ ID NO: 842573 - DNA, 75 bp, synthetic construct
  source 1..75: mol_type = other DNA
ggcactgaggctaaccgccagcaagtgctaaaaggggctgcatgggtttatgacaggtacaacaccgataactca

SEQ ID NO: 842574 - DNA, 75 bp, synthetic construct
  source 1..75: mol_type = other DNA
ggaaacgaagaaaaaaagcggaggttttctcagtaagaaaaccacccgcaccatcagtgaggacagtgccacccg

SEQ ID NO: 842575 - DNA, 75 bp, synthetic construct
  source 1..75: mol_type = other DNA
cagtgtgctgaccgacaccattgctgatatgtctcaggacaccagcatccacgaatttatcaagcagaacgcacg

SEQ ID NO: 842576 - DNA, 75 bp, synthetic construct
  source 1..75: mol_type = other DNA
ggcgctgcatgggtatatgaacgttacaacgaggatgagtcattaccggctctgcaacgggaagcgcaggaacaa

SEQ ID NO: 842577 - DNA, 75 bp, synthetic construct
  source 1..75: mol_type = other DNA
atgaggatttttttaagcgtaattttattcctgtttactgcttttcagtctgcaaatgcaggtggaatacctggt

SEQ ID NO: 842578 - DNA, 75 bp, synthetic construct
  source 1..75: mol_type = other DNA
acaggtgacagtctcttatacacagagagaccgttatgggcgcattgtcggtcgcgtatttacgacgaacggcac

SEQ ID NO: 842579 - DNA, 75 bp, synthetic construct
  source 1..75: mol_type = other DNA
cccgcgaaaattgttgtgtatgaagttccgattcgggtccgattgataaatatcgatgcccctgaaaagaaacaa

SEQ ID NO: 842580 - DNA, 75 bp, synthetic construct
  source 1..75: mol_type = other DNA
attaaccggtaaacgggtggtgtctgtccagaaagatggacgaagaattgaatatacggcggcctctctggatga

SEQ ID NO: 842581 - DNA, 75 bp, synthetic construct
  source 1..75: mol_type = other DNA
gctgcaaaatggtacagggcggctgtacagtgcaggcaacctgctgcttgacgctcaggacttcagtggtcaggg

SEQ ID NO: 842582 - DNA, 75 bp, synthetic construct
  source 1..75: mol_type = other DNA
tgcaaatgcaggtggaatacctgatgctttagcaggaatactttctacatttaaccaggaaatccaggggaaagt

SEQ ID NO: 842583 - DNA, 75 bp, synthetic construct
  source 1..75: mol_type = other DNA
agagaccgttatgggcgcattgtcggtcgcgtatttacgacgaacggcacggaggccagccgctttatggttcag

SEQ ID NO: 842584 - DNA, 75 bp, synthetic construct
  source 1..75: mol_type = other DNA
gcgacaccatagaagttaaaacactacccgcaaaaattgttgtgtatgaagttccgattcgagtccgattgataa

SEQ ID NO: 842585 - DNA, 75 bp, synthetic construct
  source 1..75: mol_type = other DNA
ttatccggtggcgctgaaattgcgttcgccggatattccacataaatcggaagttcagggcgtcatgctctacct

SEQ ID NO: 842586 - DNA, 75 bp, synthetic construct
  source 1..75: mol_type = other DNA
cgcaataaaccgattctggtgattaaaagcggacgtagcccggcggctcaacgtctgttgaacaccacggcagga

SEQ ID NO: 842587 - DNA, 75 bp, synthetic construct
  source 1..75: mol_type = other DNA
cccggaaattcagcgtctggatattcatcctttgctggcttctggcagtgaatttaccgcgctggatgtcacgct

SEQ ID NO: 842588 - DNA, 75 bp, synthetic construct
  source 1..75: mol_type = other DNA
atgaagttcagcccatcctgcaagcgtatggcatgaacacgctccccacctggattgccagcgatagcaccgaag

SEQ ID NO: 842589 - DNA, 75 bp, synthetic construct
  source 1..75: mol_type = other DNA
gctaagcgaagaaacctgccagaaactgcgcgatgcactgccaggacatgtggcaatctctaacccgctcgatct

SEQ ID NO: 842590 - DNA, 75 bp, synthetic construct
  source 1..75: mol_type = other DNA
atgagtcagcgaggactggaagcactactgcgaccaaaatcgatagcggtaattggcgcgtcgatgaaacccaat

SEQ ID NO: 842591 - DNA, 75 bp, synthetic construct
  source 1..75: mol_type = other DNA
ggctatatcaacctgcacggtaccgccacacaactcaacgaccagattgaatcgatggtggttaacgccctgttt

SEQ ID NO: 842592 - DNA, 75 bp, synthetic construct
  source 1..75: mol_type = other DNA
tttgcaacgggaagcgcaggaacaaaagagtggtttatgggctgatacaaatccggttccaccgtgggaatggcg

SEQ ID NO: 842593 - DNA, 75 bp, synthetic construct
  source 1..75: mol_type = other DNA
gctttagcaggaatactttctacattaaaccaggaaatccaggggaaagttattcgtgttctcgatggcgatacc

SEQ ID NO: 842594 - DNA, 75 bp, synthetic construct
  source 1..75: mol_type = other DNA
gtacggcatgaacacacttcccacctggattgccactgacagcaccgaggctgtgcatattgccgaacagattgg

SEQ ID NO: 842595 - DNA, 75 bp, synthetic construct
  source 1..75: mol_type = other DNA
acaggatacccacgagctgttttcggcagtcgaaacccttagccatatgcgcccgctacgtggagagcggctgat

SEQ ID NO: 842596 - DNA, 75 bp, synthetic construct
  source 1..75: mol_type = other DNA
tgtaccgattaaacgcggcaaactggcgtttatttcgcagtctgccgccgtctccaataccatcctcgactgggc

SEQ ID NO: 842597 - DNA, 75 bp, synthetic construct
  source 1..75: mol_type = other DNA
ggtgaaatgcgcgtggggtcccgggtggtatctcaggagatcagcactgcagaagaaggcgatggtggtcaggtt

SEQ ID NO: 842598 - DNA, 75 bp, synthetic construct
  source 1..75: mol_type = other DNA
ggtgaaatgcgcgtgggctcccgcgtggtatctcaggagatcagcactgcagaagaaggcgatggtggtcaggtt

SEQ ID NO: 842599 - DNA, 75 bp, synthetic construct
  source 1..75: mol_type = other DNA
gtgcgctggccacacagatcccggcgtttcgtcagaaactgaatgagggctggtatcaggtgcgcattgccgggc

SEQ ID NO: 842600 - DNA, 75 bp, synthetic construct
  source 1..75: mol_type = other DNA
atgatttacccaacaaatacaggcaaaagcggggaacaccttcgtctcaccacactggaaagtgtctggattcag

SEQ ID NO: 842601 - DNA, 75 bp, synthetic construct
  source 1..75: mol_type = other DNA
ggtgaaatgcgcgtgggatcccgagtggtatctcaggagatcagcactgcagaagaaggcgatggtggtcaggtt

SEQ ID NO: 842602 - DNA, 75 bp, synthetic construct
  source 1..75: mol_type = other DNA
attccgccgtcagatgaccgaaggctggtaccggatacgtattgccggtgaggatactgcgccggaccagatatc

SEQ ID NO: 842603 - DNA, 75 bp, synthetic construct
  source 1..75: mol_type = other DNA
tctgtacggtgaaatgcgcgtgggatcacgtgtggtatctcaggagatcagcacagcagatgaaggtgatggtgg

SEQ ID NO: 842604 - DNA, 75 bp, synthetic construct
  source 1..75: mol_type = other DNA
ggtgaaatgcgcgtgggttcccgggtggtatctcaggagatcagcactgcagatgaaggcgatggtggtcaggtt

SEQ ID NO: 842605 - DNA, 75 bp, synthetic construct
  source 1..75: mol_type = other DNA
ggtgaaatgcgcgtgggatcccgggtggtatctcaggagatcagcactgcagaggaaggcgatggtggtcaggtt

SEQ ID NO: 842606 - DNA, 75 bp, synthetic construct
  source 1..75: mol_type = other DNA
ggtgaaatgcgcgtgggatcccgcgtggtatctcaggagatcagcactgcagacgaaggcgatggtggtcaggtt

SEQ ID NO: 842607 - DNA, 75 bp, synthetic construct
  source 1..75: mol_type = other DNA
ccggtggagctggtctccatgttccagaccggcagcgtggccatccgtgcggagcgctggatcaactggcgtcgt

SEQ ID NO: 842608 - DNA, 75 bp, synthetic construct
  source 1..75: mol_type = other DNA
ccggtgcggtctggctgatgtccagcaccaatgccctggcgctgtccatgcgtaaaaatgcgctgggtcagaaag

SEQ ID NO: 842609 - DNA, 75 bp, synthetic construct
  source 1..75: mol_type = other DNA
gcggtggcttctgcgccggtgatccgtgtggagcagaaactggataaggggattggcttcgcccgctttgccaaa

SEQ ID NO: 842610 - DNA, 75 bp, synthetic construct
  source 1..75: mol_type = other DNA
cggggatgccctcccagatggcagcccggctggatgaggtctgggcggccattaagaccgggctggtcagggggc

SEQ ID NO: 842611 - DNA, 75 bp, synthetic construct
  source 1..75: mol_type = other DNA
tttgtggcagcaaacctgcagcccaccggtgcggtctggctgatgtccagcaccaatgctctggcgctgtccatg

SEQ ID NO: 842612 - DNA, 75 bp, synthetic construct
  source 1..75: mol_type = other DNA
tgcattttctgcgctgggagctgatggaggtgtctgccgtcaccgtgcccgcgaatgcggaatgcaccatccgga

SEQ ID NO: 842613 - DNA, 75 bp, synthetic construct
  source 1..75: mol_type = other DNA
atactgggcggtgtggcccagatgctggcaccgaaggcaaaaacaccggattaccgcgcaacggataacggcaga

SEQ ID NO: 842614 - DNA, 75 bp, synthetic construct
  source 1..75: mol_type = other DNA
tcagtcatgcgaaggtgtcggccattgcggtactgacggaagaattgatccgtttttccagtccggctgctgatg

SEQ ID NO: 842615 - DNA, 75 bp, synthetic construct
  source 1..75: mol_type = other DNA
aaatgcgcgtggggtcacgtgtggcatctcaggagatcagcacggcagatgaaggggatggtggtcaggttgtgg

SEQ ID NO: 842616 - DNA, 75 bp, synthetic construct
  source 1..75: mol_type = other DNA
atgctggttggctcccgccgtatatcccaggacatcagcacccgtgatgaaggcgggggcggaacggtcgtggtt

SEQ ID NO: 842617 - DNA, 75 bp, synthetic construct
  source 1..75: mol_type = other DNA
gaacttgaggcttttttgcgggatatgatgaacggaaataaaaaaagctggctggcgcattgtactgatgcagag

SEQ ID NO: 842618 - DNA, 75 bp, synthetic construct
  source 1..75: mol_type = other DNA
tgttggctctggcgttgaacatctgttacgtgctgctgcgtcgaattactggcattcgtaccatcatgctgactg

SEQ ID NO: 842619 - DNA, 75 bp, synthetic construct
  source 1..75: mol_type = other DNA
gtttatggcattaacggtgcgatttcagatacctatgcctcaatgatggcgaccatcgaacgtatgggtgatgcc

SEQ ID NO: 842620 - DNA, 75 bp, synthetic construct
  source 1..75: mol_type = other DNA
tcatcatcgttattgccctggcgtatatgttcttcgctggtcgcgcgctgcgtgcagaagaagaggcagaaaaac

SEQ ID NO: 842621 - DNA, 75 bp, synthetic construct
  source 1..75: mol_type = other DNA
aatactcccgcatcgcggtcgctatattgcggtctgggcggtgatttacccactgattgtctggtggctgatgta

SEQ ID NO: 842622 - DNA, 75 bp, synthetic construct
  source 1..75: mol_type = other DNA
atggttgcccagggcaatgttctgcccgttctgtacggtgaaatgcgcgtggggtcgcgggtggtctctcaggag

SEQ ID NO: 842623 - DNA, 75 bp, synthetic construct
  source 1..75: mol_type = other DNA
acttgcagaaatcgcattgacgcatggttgagtgttgctgagcacattctgtatataccaatgaaattagcgtta

SEQ ID NO: 842624 - DNA, 75 bp, synthetic construct
  source 1..75: mol_type = other DNA
ttatctgcaccgcagttttggtttcactctactgggggattacctccaacatgatgtacaagccgactcaggaag

SEQ ID NO: 842625 - DNA, 75 bp, synthetic construct
  source 1..75: mol_type = other DNA
tcctgggcaaaaaagaggagagcgttgaagatctcaaactgcctggctggctgaacattttccacgacaacatcg

SEQ ID NO: 842626 - DNA, 75 bp, synthetic construct
  source 1..75: mol_type = other DNA
gctgattgccgtcacgctgttcatctttggctactccatgtggacgaccattatctgcaccgcgattctggtttc

SEQ ID NO: 842627 - DNA, 75 bp, synthetic construct
  source 1..75: mol_type = other DNA
ctatcgggcagctaattgcggtcggtatcctggtcgcttgcggctcttccattctgattattcctggctttatcc

SEQ ID NO: 842628 - DNA, 75 bp, synthetic construct
  source 1..75: mol_type = other DNA
ttcggtattgataccgttcaggcgatggcaggcaaagtgcactggactatctatatcctgcaaacgggtttctcc

SEQ ID NO: 842629 - DNA, 75 bp, synthetic construct
  source 1..75: mol_type = other DNA
tttctttggcgccatcctgctctcgttcggtattgataccgttcaggcgatggcaggcaaagtgcactggactat

SEQ ID NO: 842630 - DNA, 75 bp, synthetic construct
  source 1..75: mol_type = other DNA
ccccgcgcccggcgagccataactcaagccgcgctatggtgtgggtgcgaaaaaatctgttctccagctggggca

SEQ ID NO: 842631 - DNA, 75 bp, synthetic construct
  source 1..75: mol_type = other DNA
gtgaaaacgggggccgaagccatccgggcgctggccactcagctcccggcgtttcgtcagaaactgaataagggc

SEQ ID NO: 842632 - DNA, 75 bp, synthetic construct
  source 1..75: mol_type = other DNA
attgattgatatcctgcggcaaagatacgaagggcgggggatgagtaaacgcaaaatggctgaattgttgaatga

SEQ ID NO: 842633 - DNA, 75 bp, synthetic construct
  source 1..75: mol_type = other DNA
tcagtggttatgtttctggtggcctcggcacaagtttccgcctggctgattaccatggtaatgactccaacttat

SEQ ID NO: 842634 - DNA, 75 bp, synthetic construct
  source 1..75: mol_type = other DNA
ccctggcatgatgatgggcgcaacgctgatgcttacctggtggtggcaggccagtcgccttaatttaccccgcca

SEQ ID NO: 842635 - DNA, 75 bp, synthetic construct
  source 1..75: mol_type = other DNA
cccccttccattccgtttattatcttcggcgtttccagcggattatccatcagcaagctgtttatggcgggtatt

SEQ ID NO: 842636 - DNA, 75 bp, synthetic construct
  source 1..75: mol_type = other DNA
tgtacggtgaaatgcgcgtggggtcacgtgtggtatctcaggagatcagcacggcagatgaaggggacggtggtc

SEQ ID NO: 842637 - DNA, 75 bp, synthetic construct
  source 1..75: mol_type = other DNA
cactgattgtctggtggctgatgtatggcggtttttttgctcttgagcgggttgaaacccggcaatggggcgggc

SEQ ID NO: 842638 - DNA, 75 bp, synthetic construct
  source 1..75: mol_type = other DNA
tggggaaatagtggagcaagctgcacctgatgaattttttacgcatcctaaatcagagcgtacgagggcattttt

SEQ ID NO: 842639 - DNA, 75 bp, synthetic construct
  source 1..75: mol_type = other DNA
gtgaaaacgggggccgaagccatccgggcgctggccacacagctcccggcgtttcgccagaaactgaatgacggc

SEQ ID NO: 842640 - DNA, 75 bp, synthetic construct
  source 1..75: mol_type = other DNA
aatggtgccgtgatccatatcgtgccgcgtctgccggggccaaaagtggcggtgtgtttcaggttgtgctggggg

SEQ ID NO: 842641 - DNA, 75 bp, synthetic construct
  source 1..75: mol_type = other DNA
tggtatcaggtacgcattgccgggcatgatgcaggcgaaaacgaattatcatcccgtcttagtgagccgctggca

SEQ ID NO: 842642 - DNA, 75 bp, synthetic construct
  source 1..75: mol_type = other DNA
tgcacaccctgagtggtgttttagcacatgcgaaaagcgaattgctaattggttggctgttgctgagtatgcgct

SEQ ID NO: 842643 - DNA, 75 bp, synthetic construct
  source 1..75: mol_type = other DNA
ggccatgcagatcccggcgtttcgtcagaagctgagcgacggctggtatcaggtacgcattgccgggcgtgatac

SEQ ID NO: 842644 - DNA, 75 bp, synthetic construct
  source 1..75: mol_type = other DNA
taccagatacgtattcgcggtgaggacacggcaccggaggcggtgtacgcccgtcttcacgaacagctgggtgag

SEQ ID NO: 842645 - DNA, 75 bp, synthetic construct
  source 1..75: mol_type = other DNA
ctgcctttacggggatttccaacgatttggccgccgcatcgaacttcgtgtgaaaacgggggcagaagctatccg

SEQ ID NO: 842646 - DNA, 75 bp, synthetic construct
  source 1..75: mol_type = other DNA
gtgccctgtcgctgcaggtgccgggattccgccgtcagatgaacgaaggctggtatcagatacgtattgccggtg

SEQ ID NO: 842647 - DNA, 75 bp, synthetic construct
  source 1..75: mol_type = other DNA
ttactgacccgccatatctcgtcggtttgcgtgaccgttccgggcgcaccatcgccggcgataaaaccgatgaat

SEQ ID NO: 842648 - DNA, 75 bp, synthetic construct
  source 1..75: mol_type = other DNA
taacggacccgccatatctcgtcggtttacgtgaccgttccgggcgcaccatcgccggcgataaaaccgatgaat

SEQ ID NO: 842649 - DNA, 75 bp, synthetic construct
  source 1..75: mol_type = other DNA
taactgacccgccatatctcgtcggttttcgtgaccgttccgggcgcaccatcgccggcgataaaaccgatgaat

SEQ ID NO: 842650 - DNA, 75 bp, synthetic construct
  source 1..75: mol_type = other DNA
tcacggacccgccatatctcgtcggtttccgtgaccgttccgggcgcaccatcgccggcgataaaaccgatgaat

SEQ ID NO: 842651 - DNA, 75 bp, synthetic construct
  source 1..75: mol_type = other DNA
tcaccgacccgccatatctcgtcggtttgcgtgaccgttccgggcgcaccatcgccggcgataaaaccgatgaat

SEQ ID NO: 842652 - DNA, 75 bp, synthetic construct
  source 1..75: mol_type = other DNA
ttacggacccgccatatctcgtcggttttcgtgaccgttccgggcgcaccatcgccggcgataaaaccgatgaat

SEQ ID NO: 842653 - DNA, 75 bp, synthetic construct
  source 1..75: mol_type = other DNA
ctgcaacctgccagtaatgagatgtaccgcgtactcaaaaaagacgcgctgatggtgagtttctatggctggaac

SEQ ID NO: 842654 - DNA, 75 bp, synthetic construct
  source 1..75: mol_type = other DNA
taacagacccgccatatctcgtcggtttgcgtgaccgttccgggcgcaccatcgccggcgataaaaccgatgaat

SEQ ID NO: 842655 - DNA, 75 bp, synthetic construct
  source 1..75: mol_type = other DNA
ggatgccgggggtaggaattatggcgagtaatctgctgttttctctcggtgccagtatggtgctcggtggtgtgg

SEQ ID NO: 842656 - DNA, 75 bp, synthetic construct
  source 1..75: mol_type = other DNA
ggggccggaaagggtggactgcagattgtgctgggggcggcagccatcgtgggctctttcctcactgccggtgcc

SEQ ID NO: 842657 - DNA, 75 bp, synthetic construct
  source 1..75: mol_type = other DNA
gtgaaatgcgcgtggggtcacgtgtggcatctcaggagatcagcacggcagatgaaggggatggtggtcaggttg

SEQ ID NO: 842658 - DNA, 75 bp, synthetic construct
  source 1..75: mol_type = other DNA
gggatttacaacgatttggccgccgtctcagcctgtatgtgaacacggcagcggaagccatccgcgccctgtcgc

SEQ ID NO: 842659 - DNA, 75 bp, synthetic construct
  source 1..75: mol_type = other DNA
gtgtggggtcgcgggtggtatctcaggagatcagcacagcagatgaaggtgatggtggtcaggttgtggtgattg

SEQ ID NO: 842660 - DNA, 75 bp, synthetic construct
  source 1..75: mol_type = other DNA
caggtacggattgccgggcgggatgcaggagaaaccgaattatcatcccgtcttaatgagccgctggcaaatggt

SEQ ID NO: 842661 - DNA, 75 bp, synthetic construct
  source 1..75: mol_type = other DNA
tggcagcctcccttgaggagatcatgagcaaggccgcagaagaaggccgcacgctggatgtggaggaagaggagc

SEQ ID NO: 842662 - DNA, 75 bp, synthetic construct
  source 1..75: mol_type = other DNA
cggtgattgtctcccagtatgtgggtgaccagctggtactggtgaatgcaccggatatttatctggcggatgacg

SEQ ID NO: 842663 - DNA, 75 bp, synthetic construct
  source 1..75: mol_type = other DNA
accggtggtgaaaatcgcatcttctgccggcgctgcggcacagtcaataacctcttttcataaggaaaagtcagc

SEQ ID NO: 842664 - DNA, 75 bp, synthetic construct
  source 1..75: mol_type = other DNA
gtgaaaacgggggctgaagccatccgcgcactggccacgcagcttccggcgtttcgccagaaactgaatgagggc

SEQ ID NO: 842665 - DNA, 75 bp, synthetic construct
  source 1..75: mol_type = other DNA
tcaatatccgcgtgcatgcccaggtgtccggcggtgctgccggctgggtgggggagggtaaggccagacccctga

SEQ ID NO: 842666 - DNA, 75 bp, synthetic construct
  source 1..75: mol_type = other DNA
cgtttgtttacccacgcaacgatctctcctacgccggtaatttcttgaatatgatgttctccacgccgtgcgaac

SEQ ID NO: 842667 - DNA, 75 bp, synthetic construct
  source 1..75: mol_type = other DNA
agtgatggcatgaagattgcccgtccacgtcagctgtataccggctatgaaaaacgcgattttaaaagcgacatc

SEQ ID NO: 842668 - DNA, 75 bp, synthetic construct
  source 1..75: mol_type = other DNA
acagatgctggcccctaaacccagaaccccccgtacacagacaacggataacggcaaacagaatacgtatttctc

SEQ ID NO: 842669 - DNA, 75 bp, synthetic construct
  source 1..75: mol_type = other DNA
gcgcctggcgggtgccaaaagtggcggtgtgtttcaggcagtgctgggtgcggcgctgattgcggtggcatggtg

SEQ ID NO: 842670 - DNA, 75 bp, synthetic construct
  source 1..75: mol_type = other DNA
gtgatgcaggtgaaaccgaattgtctgcccgtcttaatgagccgctggcaaatggtgccgtgatccatatcgtgc

SEQ ID NO: 842671 - DNA, 75 bp, synthetic construct
  source 1..75: mol_type = other DNA
tcgccatggcgcgtactgtcggctggattgctcactggagcgaaatgcataacgaaggcatgaaaatcgcccgtc

SEQ ID NO: 842672 - DNA, 75 bp, synthetic construct
  source 1..75: mol_type = other DNA
gtatgcggcaggggccagtatgatcctgggtggtgtggcccagatgctggcaccgaaagcccggacgcccacagc

SEQ ID NO: 842673 - DNA, 75 bp, synthetic construct
  source 1..75: mol_type = other DNA
gcaatgttctgcctgttctgtacggtgaaatgcgtgtggggtcacgggtaatttcgcaggaaatcagcacggcag

SEQ ID NO: 842674 - DNA, 75 bp, synthetic construct
  source 1..75: mol_type = other DNA
cctgcacgctgaccatgaacagaacgcctctacctccaccgtgcgtaccgctggctcttcgggtgcgaacccgtt

SEQ ID NO: 842675 - DNA, 75 bp, synthetic construct
  source 1..75: mol_type = other DNA
gcctgtatcgccgcaggtattgcttcgctgtgggggcccgctcatggcggcgctaacgaagcagccctgaaaatg

SEQ ID NO: 842676 - DNA, 75 bp, synthetic construct
  source 1..75: mol_type = other DNA
aaattgccgcgttccgcctgctgtcgaaaatgccgaccatggccgcgatgtgttacaagtattccattggtcagc

SEQ ID NO: 842677 - DNA, 75 bp, synthetic construct
  source 1..75: mol_type = other DNA
cgcaccctccggccagcaggatatttcagcgctgtataccgggctgaaggttacgcgcggcatctgggaggcaga

SEQ ID NO: 842678 - DNA, 75 bp, synthetic construct
  source 1..75: mol_type = other DNA
catatggccttcgttcacgtttctctgtcggtagtaatgggctgggacgcagcggaatgatcgcccttggtggaa

SEQ ID NO: 842679 - DNA, 75 bp, synthetic construct
  source 1..75: mol_type = other DNA
cctaaagggcaatatgaagcggcagagtcgctggcattgggttattggaaaactcaggggcttgttattctgccc

SEQ ID NO: 842680 - DNA, 75 bp, synthetic construct
  source 1..75: mol_type = other DNA
taaaaccatatctgatattatcagaaatcaggagcacacaaatcatgcaggatattatttttacctgtcagaaca

SEQ ID NO: 842681 - DNA, 75 bp, synthetic construct
  source 1..75: mol_type = other DNA
atgccaaaacgctatgaccaggatccggcaaatcagggcatcgttgatgcgctgaaagccgacaagaaagatccg

SEQ ID NO: 842682 - DNA, 75 bp, synthetic construct
  source 1..75: mol_type = other DNA
tttcaatctcaactacacacgtaacaggatcacagggtacaagcccgcctgcgattcacgcgttatctgcgtgcc

SEQ ID NO: 842683 - DNA, 75 bp, synthetic construct
  source 1..75: mol_type = other DNA
aggaaatcaacaaggaagcgattttactggaaccgaaagcggtcgcaggtgttgccggaattacagttaaatcag

SEQ ID NO: 842684 - DNA, 75 bp, synthetic construct
  source 1..75: mol_type = other DNA
gtcgatgtctcctggctcagcccacaaagtgaatatcgccctacagaatatctccagcaatgggtttctttctgg

SEQ ID NO: 842685 - DNA, 75 bp, synthetic construct
  source 1..75: mol_type = other DNA
cccgtcgcggcggcctcgtttttgaccttaccgatctgattaaagatgcccttgttatgccacaagcatttatcg

SEQ ID NO: 842686 - DNA, 75 bp, synthetic construct
  source 1..75: mol_type = other DNA
aacaaaagagctaatgaagcagtacccggaggatgaaaaattccgtatgcgcgtacacggctttagcgaaacaat

SEQ ID NO: 842687 - DNA, 75 bp, synthetic construct
  source 1..75: mol_type = other DNA
tcactccttgaaatgaaaaaagcctcttttaaggaatggtacggcatattacttgaacagcataatagattactt

SEQ ID NO: 842688 - DNA, 75 bp, synthetic construct
  source 1..75: mol_type = other DNA
ggcgaatcttgtcaccggtgatgtgtcatggcgtcaacgcccgccatcagtgagtattcgcggtgtggatgcggt

SEQ ID NO: 842689 - DNA, 75 bp, synthetic construct
  source 1..75: mol_type = other DNA
tggcgacactgtgacgcttaaggaagcgactgatgcgctgctgcactgtgcggaacagcttcgcgctccagaata

SEQ ID NO: 842690 - DNA, 75 bp, synthetic construct
  source 1..75: mol_type = other DNA
atgaaaagaaaaattattcccgtgctaatcggttgtacgctctctttctctgccctggcggcacaacctacggct

SEQ ID NO: 842691 - DNA, 75 bp, synthetic construct
  source 1..75: mol_type = other DNA
gtctctctcctttcgatgacagggtcagagcacaagttggcatgttatatgaagatcttgccggacatgctgctt

SEQ ID NO: 842692 - DNA, 75 bp, synthetic construct
  source 1..75: mol_type = other DNA
ctatttcgattttgaagcctgggcgcgtgacctgttcagcagcggttatgtgttccatgacggctatgtcttcag

SEQ ID NO: 842693 - DNA, 75 bp, synthetic construct
  source 1..75: mol_type = other DNA
actcgaacgtattagggataacagacgaaggaataaaagctaaagtctggagcacaacagatggtgcttgtgtag

SEQ ID NO: 842694 - DNA, 75 bp, synthetic construct
  source 1..75: mol_type = other DNA
ggaaggcaaaaaagccaaagtctggagcacaagagacggtgcctgtgttggtcgtcgtgctgttgacgagattaa

SEQ ID NO: 842695 - DNA, 75 bp, synthetic construct
  source 1..75: mol_type = other DNA
gtcgatctctggcaacgtcttgatgctgccctggggcagcatcaaatcaaatgggaatgggttaaaggccatgcc

SEQ ID NO: 842696 - DNA, 75 bp, synthetic construct
  source 1..75: mol_type = other DNA
agcggcgatacttgcagctggttatgcaccagctattgggtttgtgcatacaggaaagcctctttcctttgttta

SEQ ID NO: 842697 - DNA, 75 bp, synthetic construct
  source 1..75: mol_type = other DNA
gtgctgacttttgatgacggctaccagagtttttatacccgcgtcttcccaattcttcaggccttccagtggcct

SEQ ID NO: 842698 - DNA, 75 bp, synthetic construct
  source 1..75: mol_type = other DNA
ggtctggcaatcaccactgtcgaacctgttcgtggttcctgtcagtttactgtttacgattattacggtgcatta

SEQ ID NO: 842699 - DNA, 75 bp, synthetic construct
  source 1..75: mol_type = other DNA
ctatttcgattttgaagcttatgcgcgggacctgttcagcagcggctatgtgttccatgacggctatgtcttcag

SEQ ID NO: 842700 - DNA, 75 bp, synthetic construct
  source 1..75: mol_type = other DNA
atgcgcactacaaccaccacaccggctgtttacgtgggcacgtatcacaaatacaactgcggcagcattttcggc

SEQ ID NO: 842701 - DNA, 75 bp, synthetic construct
  source 1..75: mol_type = other DNA
gtgcttgctgctggagaaatacaaccgccggccccacctgaagatgcacagcctgttgccattccgcttcccgtt

SEQ ID NO: 842702 - DNA, 75 bp, synthetic construct
  source 1..75: mol_type = other DNA
gggtggcggagttgatatggccaaccgcttccttgatcagggtaattatctggcgtatggcctggcggcagtggc

SEQ ID NO: 842703 - DNA, 75 bp, synthetic construct
  source 1..75: mol_type = other DNA
gatcgcttgttggcgcaaactcaggaagcgctatcccgtcaggagatgttgggtgcgccgccggtattgttggtg

SEQ ID NO: 842704 - DNA, 75 bp, synthetic construct
  source 1..75: mol_type = other DNA
cattaacgttgttggcggattgctggttggggggttgcaacatggcatgagtatgggtcatgcagcggaaagtta

SEQ ID NO: 842705 - DNA, 75 bp, synthetic construct
  source 1..75: mol_type = other DNA
ctatcgtatcttgatgaaaggtgtcgaaatggggagtggtgatgcttatccggggcgctggctggcaattaatcc

SEQ ID NO: 842706 - DNA, 75 bp, synthetic construct
  source 1..75: mol_type = other DNA
gcgaaaggagaatacgccaaagcggtcgaaagcctgcaacgcgtcatttcccaggacagagaactggtcagcgaa

SEQ ID NO: 842707 - DNA, 75 bp, synthetic construct
  source 1..75: mol_type = other DNA
ggaaacctgttccgttcgcgtggcgaagttgatcgcgctattcgcatccatcagaccctaatggaaagcgcctcg

SEQ ID NO: 842708 - DNA, 75 bp, synthetic construct
  source 1..75: mol_type = other DNA
aggtggtcgaagcgtttggtcacttccttgtgggtggcaatttcgctatcggtattgtggtgttcgttatccttg

SEQ ID NO: 842709 - DNA, 75 bp, synthetic construct
  source 1..75: mol_type = other DNA
gacgggcgattacccagcagtggtttcctggcaaagatgaagtccatgttattggcctcgatacaccgctggaac

SEQ ID NO: 842710 - DNA, 75 bp, synthetic construct
  source 1..75: mol_type = other DNA
cattaacgttgtcggcgggttgctggtcggtgtgctgcaacatggcatgagcatgggacacgcggcggaaagtta

SEQ ID NO: 842711 - DNA, 75 bp, synthetic construct
  source 1..75: mol_type = other DNA
atgagtaatctggccgcgatgctgcgcctgcccgcaaacctgaaatcgacacaatggcagatccttgccggaccg

SEQ ID NO: 842712 - DNA, 75 bp, synthetic construct
  source 1..75: mol_type = other DNA
gatcgtttactggcgcaaactcaggaagcgctatcccgtcaggagatgttgggtgcgccgccagtattgttggtg

SEQ ID NO: 842713 - DNA, 75 bp, synthetic construct
  source 1..75: mol_type = other DNA
cgcctgccgaacccaaaccggtaaaaatggcagagaataataccgttgtcgaagcgacgtggaacgatgtacaac

SEQ ID NO: 842714 - DNA, 75 bp, synthetic construct
  source 1..75: mol_type = other DNA
gttatacgctattgaccattggcgacggtctggtggcacaaattccggcgctggtgatttctaccgccgcggggg

SEQ ID NO: 842715 - DNA, 75 bp, synthetic construct
  source 1..75: mol_type = other DNA
gcgcaggtctatattacacgccagctacaacgtcatccgacgatgcgcgtattccataaattgatggattaccat

SEQ ID NO: 842716 - DNA, 75 bp, synthetic construct
  source 1..75: mol_type = other DNA
accgcgccgccggacttatcggttctggcggaatcattgcggccattatccctccttccattccgctcatcatct

SEQ ID NO: 842717 - DNA, 75 bp, synthetic construct
  source 1..75: mol_type = other DNA
gctgattaacgcggcaaaaaccacatccgtggtgatgttcctggtggcctctgctgcggtatctgcatggcttat

SEQ ID NO: 842718 - DNA, 75 bp, synthetic construct
  source 1..75: mol_type = other DNA
gtttgttaggggctatcgctcttggtgttcccatcgcctgggcattattactgtgcggcatctcattgatgttct

SEQ ID NO: 842719 - DNA, 75 bp, synthetic construct
  source 1..75: mol_type = other DNA
cgtgaagaaatagacatggcagaaagccatacgcagcttatgctcgtagaggcgaaattgaccaaagcactctac

SEQ ID NO: 842720 - DNA, 75 bp, synthetic construct
  source 1..75: mol_type = other DNA
cacgtcgcggtgggcttgtttttgaccttgccgatctgattaaagatgcccttgttatgccacaagcatttatcg

SEQ ID NO: 842721 - DNA, 75 bp, synthetic construct
  source 1..75: mol_type = other DNA
atggcgatttcacccgcgcaaaacggggcggtgggattgatatggccaaccgtttcctcgatcaagggaattatc

SEQ ID NO: 842722 - DNA, 75 bp, synthetic construct
  source 1..75: mol_type = other DNA
acttcgttttgctcgcttgtactggcggaaaagtggctagtgatggtttttattttgtcccagacttgtcttcta

SEQ ID NO: 842723 - DNA, 75 bp, synthetic construct
  source 1..75: mol_type = other DNA
ggaagcatgccagcaatctcctgatggctgcgtgatggtatttgccgcccgtattcgtcagggggtgtgccatgc

SEQ ID NO: 842724 - DNA, 75 bp, synthetic construct
  source 1..75: mol_type = other DNA
gcaaaaggggagtacgcaaaagcggtcgagagcctgcaacgcgttatctcccaggacagagagctggtcagcgaa

SEQ ID NO: 842725 - DNA, 75 bp, synthetic construct
  source 1..75: mol_type = other DNA
tctggggctggcctggggcgctatagaaaaaaacagcgcaagactggagcaacttatcacccattcttggcgtcc

SEQ ID NO: 842726 - DNA, 75 bp, synthetic construct
  source 1..75: mol_type = other DNA
gtacagggaagactcgactgtcgatggcgtttaaagatgcaggtaaaaaaacgattcaccgccctttttcggttg

SEQ ID NO: 842727 - DNA, 75 bp, synthetic construct
  source 1..75: mol_type = other DNA
atatgtcaacaaggcattgtgcgccgcattacgtgatctaagtaaaaaccatgatgtcagtggagtggtcgtacg

SEQ ID NO: 842728 - DNA, 75 bp, synthetic construct
  source 1..75: mol_type = other DNA
gctggtctggttgtgctggtatgacttaatgatcggcaacagcctgaaagactggacagagaatctgaagcgcaa

SEQ ID NO: 842729 - DNA, 75 bp, synthetic construct
  source 1..75: mol_type = other DNA
actgttaatgaagacctgagcgtcagtttatttacccaggagcatctgctggctcaccatcccatgctggagggg

SEQ ID NO: 842730 - DNA, 75 bp, synthetic construct
  source 1..75: mol_type = other DNA
gctggaaaacatcgcgctgaacgacccgtactttatcgagaaaaaactgtacccgaacgtcgatttctactctgg

SEQ ID NO: 842731 - DNA, 75 bp, synthetic construct
  source 1..75: mol_type = other DNA
acgagctactccacgaaagctaccagaaatggctgaccggcttcacccggcacgccgtatcctggggcgtgtgtc

SEQ ID NO: 842732 - DNA, 75 bp, synthetic construct
  source 1..75: mol_type = other DNA
gcagaacgcagcactgacggatctgatggatcagtacgtgctcctggcataccgcacaacggttgacgataaccg

SEQ ID NO: 842733 - DNA, 75 bp, synthetic construct
  source 1..75: mol_type = other DNA
cttgtgcatcatccgatgctggaaggtgttctgttatctgaatgtgagcgcctgggacagcactctctggcaaac

SEQ ID NO: 842734 - DNA, 75 bp, synthetic construct
  source 1..75: mol_type = other DNA
tccccgtccctggatgatgatctggtggtgaatttatgcaccagcgaacacctgctgattcatcatccgatgctg

SEQ ID NO: 842735 - DNA, 75 bp, synthetic construct
  source 1..75: mol_type = other DNA
ggtctggttcccaaatcgtttgctaccggtgaaagcagatatttttagtcgggttgcctggcaattacgtacccg

SEQ ID NO: 842736 - DNA, 75 bp, synthetic construct
  source 1..75: mol_type = other DNA
cgtcagaagcagaacgcagcactgacggatctgatggatcagtacgtgctcctggcataccgcacaacggttgac

SEQ ID NO: 842737 - DNA, 75 bp, synthetic construct
  source 1..75: mol_type = other DNA
gcaacagggtattctggtacgccgctcccgtgagcaactggagatggagatcgataaattcaccattattcagcg

SEQ ID NO: 842738 - DNA, 75 bp, synthetic construct
  source 1..75: mol_type = other DNA
ggacgaattcggcggattgatgaagaagctatccatcgccaactggacaacggcgcgattgtactactgggtccg

SEQ ID NO: 842739 - DNA, 75 bp, synthetic construct
  source 1..75: mol_type = other DNA
ttattgcccagccgctgggcgtcgatgacggcgtggattactgccatagcgggcgtatccggcggattgatgaag

SEQ ID NO: 842740 - DNA, 75 bp, synthetic construct
  source 1..75: mol_type = other DNA
cgtcagaggcagagcgcagcactgacggatctgatggatcagtacgtgctcctggcataccgcacaacggttgac

SEQ ID NO: 842741 - DNA, 75 bp, synthetic construct
  source 1..75: mol_type = other DNA
atgaaacaacagtatcagacccgttacgaatggctccatgaaaactaccagaaatggctgaccggcttcacccgg

SEQ ID NO: 842742 - DNA, 75 bp, synthetic construct
  source 1..75: mol_type = other DNA
acaacggttgacgataagcgcacctgatgccagttgtttcagggaagctggtatccgggcagggtgccagggctg

SEQ ID NO: 842743 - DNA, 75 bp, synthetic construct
  source 1..75: mol_type = other DNA
aaatgaacccctgacgtatctgatggatcagtatgtgcttctggcataccgcacaacggttgatacggctcacta

SEQ ID NO: 842744 - DNA, 75 bp, synthetic construct
  source 1..75: mol_type = other DNA
ctgaacattttccacgacaacatcgtctccacggcgattgtgatgaccatcttctttggcgccattctgctctcc

SEQ ID NO: 842745 - DNA, 75 bp, synthetic construct
  source 1..75: mol_type = other DNA
cggaaccgatgacgcgcctgaatacgatgggtatgccttctatcgccatgtggatgcagtgtgggctggttactg

SEQ ID NO: 842746 - DNA, 75 bp, synthetic construct
  source 1..75: mol_type = other DNA
gtatcgggcatgtatgcggcaggggccagtatgatcctgggcggtgtggcgcagatgctggcaccgaaagccagg

SEQ ID NO: 842747 - DNA, 75 bp, synthetic construct
  source 1..75: mol_type = other DNA
agcacatcatcccatgctggaagggattttgctgtctgagtgcgtgcgattaaaacagcgccctctggcaaacaa

SEQ ID NO: 842748 - DNA, 75 bp, synthetic construct
  source 1..75: mol_type = other DNA
ggcacggagttgcgcctcaaactggtctggctttgctggcttgatttaatgaccggaaacagccttgacgactgg

SEQ ID NO: 842749 - DNA, 75 bp, synthetic construct
  source 1..75: mol_type = other DNA
tctgctggttcatcatccgatgctggaaggcattctcctgtctgaatgtgaacgtctgaggcgtaagcgtacagc

SEQ ID NO: 842750 - DNA, 75 bp, synthetic construct
  source 1..75: mol_type = other DNA
cgaatatctactacttccataatctgacgcccgggtgggtgtcattcaatggtgaaaaaccggagattgccatcg

SEQ ID NO: 842751 - DNA, 75 bp, synthetic construct
  source 1..75: mol_type = other DNA
gtcagaagcagagcgcagcactgacggatctgatggatcagtacgtgctcctggcataccgcacaacggttgacg

SEQ ID NO: 842752 - DNA, 75 bp, synthetic construct
  source 1..75: mol_type = other DNA
tcccggcactgtggaagagactcactcagcctgcaggatattctttccggcatccgggaatgtccgcctgaatgc

SEQ ID NO: 842753 - DNA, 75 bp, synthetic construct
  source 1..75: mol_type = other DNA
gctgacctgcttactctctcttctgctgaattaaaagaagaaatctacttcgcctggcgtctgggcgtgcattga

SEQ ID NO: 842754 - DNA, 75 bp, synthetic construct
  source 1..75: mol_type = other DNA
tatcgcgatatcgtcactgacaacgcagatgattaccgatttgcccagtggcaactggcggttatcgcgctggtg

SEQ ID NO: 842755 - DNA, 75 bp, synthetic construct
  source 1..75: mol_type = other DNA
cgtggaacatttactgacgcgcccggaagtggaaattattgcctgcggaaaaaatagcgcctataccctcaaaaa

SEQ ID NO: 842756 - DNA, 75 bp, synthetic construct
  source 1..75: mol_type = other DNA
gtccacaccggcaacggcagcatcgatctgattatccccggcgtacataaagccaatggccttcgccaactgcag

SEQ ID NO: 842757 - DNA, 75 bp, synthetic construct
  source 1..75: mol_type = other DNA
taaaggtgtccgctctgaagccctggaagtggcccgtcgtcagtatccggatgacagtcgtctgcatcatgtcct

SEQ ID NO: 842758 - DNA, 75 bp, synthetic construct
  source 1..75: mol_type = other DNA
atgcagcatattgtttcgtgggacgataaaagtgaattaatcattggtcaattgcataacattcagggccgacaa

SEQ ID NO: 842759 - DNA, 75 bp, synthetic construct
  source 1..75: mol_type = other DNA
cggttatgtcaaaggcgcatttactggcgcttctgccaatggtaaaaccgggttgattcaggcggcgaacacggg

SEQ ID NO: 842760 - DNA, 75 bp, synthetic construct
  source 1..75: mol_type = other DNA
caaattttgctgcaggcttcagcggcgtccactttttcaggattaatcggtaacgccattctcgccggaggcgta

SEQ ID NO: 842761 - DNA, 75 bp, synthetic construct
  source 1..75: mol_type = other DNA
tcttgcgcgaaggtgagtttgtcacttcattacaggcactgaaagagatcggaataaaagctggcttttctgctt

SEQ ID NO: 842762 - DNA, 75 bp, synthetic construct
  source 1..75: mol_type = other DNA
aaggaacaggcaacatccagttcctgaaagacaatggtgtcaaaatctgggatgcctgggccgatgaaaatggcg

SEQ ID NO: 842763 - DNA, 75 bp, synthetic construct
  source 1..75: mol_type = other DNA
taaagactgggaaaaaggcgatgttgtgaatcgctgcatcagtgctgccacatcatgcctgtacggtatatctga

SEQ ID NO: 842764 - DNA, 75 bp, synthetic construct
  source 1..75: mol_type = other DNA
aaatagcggcaagacacccggcagaacctgataaagaagtgagactggcctgccgtgatattttccgtagtagta

SEQ ID NO: 842765 - DNA, 75 bp, synthetic construct
  source 1..75: mol_type = other DNA
gtgacgtttgtaccactgagtccgatcccgttaaaagatcgcacatctatgatcttcctccagtacggtcaggtc

SEQ ID NO: 842766 - DNA, 75 bp, synthetic construct
  source 1..75: mol_type = other DNA
taccaggaatatgcgcaggactttatcgagtacctgcgtccgcagaccattatcgggcgatttggtcagggcggg

SEQ ID NO: 842767 - DNA, 75 bp, synthetic construct
  source 1..75: mol_type = other DNA
gctggtggcaccgatgaatcgcctgatcgacagcattcgccatattgctggcggtgatctggtgaaatcaattga

SEQ ID NO: 842768 - DNA, 75 bp, synthetic construct
  source 1..75: mol_type = other DNA
tttctctggcagcatgaccattcccgccctgtaggccagtgtacggtgcgtcggatcagggaagggctggaaatc

SEQ ID NO: 842769 - DNA, 75 bp, synthetic construct
  source 1..75: mol_type = other DNA
ctgcatcatgtcctgaaatcggcggtgggggcagggaccaccacggacccgcagtgggcaggcagcctgtctgaa

SEQ ID NO: 842770 - DNA, 75 bp, synthetic construct
  source 1..75: mol_type = other DNA
tagaacttgaatttgctgacctgcttactctctcttctgctgaattaaaagaagaaatctacttcgcctggcgtc

SEQ ID NO: 842771 - DNA, 75 bp, synthetic construct
  source 1..75: mol_type = other DNA
ttgttcccggcagtctgcaccggctgatttatggtcatgacaaacgggccatgccgcccctggatgatgatctgg

SEQ ID NO: 842772 - DNA, 75 bp, synthetic construct
  source 1..75: mol_type = other DNA
aatattctggccttgaatgcggcggtcgaagcggcacgcgcgggtgaacaaggtcgcggttttgcggtagttgcg

SEQ ID NO: 842773 - DNA, 75 bp, synthetic construct
  source 1..75: mol_type = other DNA
ccgggtcagcgaagggctggaaatcacggcaacactggtgaaacccgtaccggatatgccgtcgcaactggctgc

SEQ ID NO: 842774 - DNA, 75 bp, synthetic construct
  source 1..75: mol_type = other DNA
catgttccagaccggcagcgtggccatccgtgcggagcgctggatcaactggcgtcgtcgccgtaccgcggcggt

SEQ ID NO: 842775 - DNA, 75 bp, synthetic construct
  source 1..75: mol_type = other DNA
tcgtcagtatccggatgacagccgtctgcatcatgtcctgaagtcggcggtgggggcagggaccaccacggaccc

SEQ ID NO: 842776 - DNA, 75 bp, synthetic construct
  source 1..75: mol_type = other DNA
atcgataactttgaatttatcgacggtgtcattgacgccatgcgtgagcttaaaaaaatgggctttgcgctggtg

SEQ ID NO: 842777 - DNA, 75 bp, synthetic construct
  source 1..75: mol_type = other DNA
gctctggcgatgcattaccttgagcgggtgagaattgccgaacatgcacagaagtttcccggacagatctccggt

SEQ ID NO: 842778 - DNA, 75 bp, synthetic construct
  source 1..75: mol_type = other DNA
gaagtttccaggacagatttctggtggtcagcagcaacgtgttgccattgcgcgctcgctgtgtatgaagccgaa

SEQ ID NO: 842779 - DNA, 75 bp, synthetic construct
  source 1..75: mol_type = other DNA
tgacggacccgccatatctcgtcggtttgcgtgaccgttccgggcgcaccatcgccggcgataaaaccgatgaat

SEQ ID NO: 842780 - DNA, 75 bp, synthetic construct
  source 1..75: mol_type = other DNA
tttctgattatggatgattatcgccaggggtggcgacacggttactccattcttcgtgcaatcatgcgtggcgaa

SEQ ID NO: 842781 - DNA, 75 bp, synthetic construct
  source 1..75: mol_type = other DNA
tatctggcaaccgcgtttttgggagcacgccatccgcaataccaaagattatcgccatcatgttgattatattta

SEQ ID NO: 842782 - DNA, 75 bp, synthetic construct
  source 1..75: mol_type = other DNA
tctcaacgttccatcgcgatgtagcgcgagggttatatcccattgattgggcgggagacataacggattttagtg

SEQ ID NO: 842783 - DNA, 75 bp, synthetic construct
  source 1..75: mol_type = other DNA
atgtgtatccaccttaacttaatgatttttaccaaaatcattaggggattcatcagcacccagtaccagatgctc

SEQ ID NO: 842784 - DNA, 75 bp, synthetic construct
  source 1..75: mol_type = other DNA
cgctccgtaacgccattattaaagttaagcgagccagaccttttgaaattaatgcctgggtagttttgccggagc

SEQ ID NO: 842785 - DNA, 75 bp, synthetic construct
  source 1..75: mol_type = other DNA
aggttaatcgcggcctcctgttagagatagcagcggcgcacatgaatccattactgatacaaccggagtttactt

SEQ ID NO: 842786 - DNA, 75 bp, synthetic construct
  source 1..75: mol_type = other DNA
ttcggcacctccaccacatccccgccacgcttcaacctgctgcgtatcgaggaagaactgtcagcggcacacctg

SEQ ID NO: 842787 - DNA, 75 bp, synthetic construct
  source 1..75: mol_type = other DNA
ccgcgactggatcagaacgtccggcgatcgctttgtcctcgacccgggcatccctgaggttcaggactggatcac

SEQ ID NO: 842788 - DNA, 75 bp, synthetic construct
  source 1..75: mol_type = other DNA
aagcgtgggatgaaagtacacgcctggtttaacccctatcgcgtatcggttaatacgaagcccggtactatcagg

SEQ ID NO: 842789 - DNA, 75 bp, synthetic construct
  source 1..75: mol_type = other DNA
cattaatcgctcatgatttcaaaaaagagcatgagacagaactgacgggattctacattcgtgaattcggttctg

SEQ ID NO: 842790 - DNA, 75 bp, synthetic construct
  source 1..75: mol_type = other DNA
tatccctgaaatgcgacagatatttaacggcctgaatattcacagtgtagagattaattacagtcttgcagcgaa

SEQ ID NO: 842791 - DNA, 75 bp, synthetic construct
  source 1..75: mol_type = other DNA
gcaggataccccggaagaaacactcactgacattcagcgggcggcaaggttctactatctgcagaagcaggcgtt

SEQ ID NO: 842792 - DNA, 75 bp, synthetic construct
  source 1..75: mol_type = other DNA
catcatgttgattatatttatataaatccagtaaagcatggttgggtaaagcaagtgagtgattggccattctca

SEQ ID NO: 842793 - DNA, 75 bp, synthetic construct
  source 1..75: mol_type = other DNA
cacaaaccattcgtcgtgcccatgcagtacaaccagtcaccgccctgcaaagcgaatattccatgtggtggcgtg

SEQ ID NO: 842794 - DNA, 75 bp, synthetic construct
  source 1..75: mol_type = other DNA
gttttaccttcggcgatgataataagcagcagattttaaacagccgtccggaacatatccgtgaagccgttgaag

SEQ ID NO: 842795 - DNA, 75 bp, synthetic construct
  source 1..75: mol_type = other DNA
atgcaaaaacgttatctgggtaaatccgggctagatgtctccgctcttgggctaggttgtatgggcttaagccac

SEQ ID NO: 842796 - DNA, 75 bp, synthetic construct
  source 1..75: mol_type = other DNA
ccggactcgaagtctccgcccttggactcggttgcatgggcttgagctacggctacggtccggcaacaaataccc

SEQ ID NO: 842797 - DNA, 75 bp, synthetic construct
  source 1..75: mol_type = other DNA
atgcaaaaacgttatctgggcaaatctcgactcgaagtctccgcacttgggctcggctgcatgggcttaagccac

SEQ ID NO: 842798 - DNA, 75 bp, synthetic construct
  source 1..75: mol_type = other DNA
gtggatcacttttcatccgtcgttgacagcgaagccttaaaaccgtttcgtgaccgcgtggtaattgccactaaa

SEQ ID NO: 842799 - DNA, 75 bp, synthetic construct
  source 1..75: mol_type = other DNA
aagggctggattatcagttgttaacgttagcggatttgctgaggctacagcagcagtttttgcggcgaatggggg

SEQ ID NO: 842800 - DNA, 75 bp, synthetic construct
  source 1..75: mol_type = other DNA
atttcttagccggaaaactggcgcattgtgtgctgtgcctgatacttccctggcttctgtctgaatttggtttta

SEQ ID NO: 842801 - DNA, 75 bp, synthetic construct
  source 1..75: mol_type = other DNA
ttgcgtggttttactggctgggggtattttttaggcggcaaactggcgcatttcgccatgtgcctgctgcttcct

SEQ ID NO: 842802 - DNA, 75 bp, synthetic construct
  source 1..75: mol_type = other DNA
taatcacttttcctgccgatgatccacaactggtgaaacaactgcaaagcggtacgaaagtttatctggcgaaat

SEQ ID NO: 842803 - DNA, 75 bp, synthetic construct
  source 1..75: mol_type = other DNA
cgtcgccacaatgtcggggccacaccacgcgatatggcctggatcgacgtaacaccgccgagtatgagcattctg

SEQ ID NO: 842804 - DNA, 75 bp, synthetic construct
  source 1..75: mol_type = other DNA
ggcacagcggaaaaaaagtaacatcggaacccaaatgggcaacttctcattcttcagcgaagaaatggcagacca

SEQ ID NO: 842805 - DNA, 75 bp, synthetic construct
  source 1..75: mol_type = other DNA
ttccatggattggcggcaaacgtcgtctggctaagcatattctgccgctgttcccggcccatacctgctatgtgg

SEQ ID NO: 842806 - DNA, 75 bp, synthetic construct
  source 1..75: mol_type = other DNA
gctgtcccgggcaagcgtaaactcgggaagctggaagtttctgccgtcggtctgggcgtgcagaacatgagtcgc

SEQ ID NO: 842807 - DNA, 75 bp, synthetic construct
  source 1..75: mol_type = other DNA
taggtaaaggcttccttactggtgcaatcacgtccgggacgacgtttggtaaagacgatttccgcagtattgtgc

SEQ ID NO: 842808 - DNA, 75 bp, synthetic construct
  source 1..75: mol_type = other DNA
ctgtcagcagccgactcaccggtataaacgtggtggtcatgaacatgttgctatccctaaaagcaacagcaaaca

SEQ ID NO: 842809 - DNA, 75 bp, synthetic construct
  source 1..75: mol_type = other DNA
acatccatgcaagtgcatttattgactatgcaaaaatgcagatactaaaatataaaaaagcaaactctcaggaga

SEQ ID NO: 842810 - DNA, 75 bp, synthetic construct
  source 1..75: mol_type = other DNA
tctaatgaagtagatggtgatgatttctttgagaattatttggttagcttaaaaaccgctcagagctatgcaatt

SEQ ID NO: 842811 - DNA, 75 bp, synthetic construct
  source 1..75: mol_type = other DNA
aactgccaataacataatacaatccttagcacctttagatgaatccatggacataaatgcaagtgcatttattga

SEQ ID NO: 842812 - DNA, 75 bp, synthetic construct
  source 1..75: mol_type = other DNA
accgaaaaagagaatatccgtaaccagcttgccggcatcaatcagaagatagcggaagagaaaagaaaacaggat

SEQ ID NO: 842813 - DNA, 75 bp, synthetic construct
  source 1..75: mol_type = other DNA
catttgggggcggcatccctgttactccaactgctgtaatgtattgttgcgatgaagcatatagaaattgggtcg

SEQ ID NO: 842814 - DNA, 75 bp, synthetic construct
  source 1..75: mol_type = other DNA
atgcgaaaaaaccggtgaattatgagagcgcgcgcttcctcatgaaagagctggatatccgtggttcccgcaacg

SEQ ID NO: 842815 - DNA, 75 bp, synthetic construct
  source 1..75: mol_type = other DNA
acgatatcaacgatctgcaacaaactaaagatctctctgcatcccatcctgatgtagttaagaatatgaaggctg

SEQ ID NO: 842816 - DNA, 75 bp, synthetic construct
  source 1..75: mol_type = other DNA
cagaaaggagctgataagaaatctgcagctggagaacctcacaaatatctgtcctggattacctcttattctcac

SEQ ID NO: 842817 - DNA, 75 bp, synthetic construct
  source 1..75: mol_type = other DNA
cacctctgataacggtgctgtaattgatggtccactgccactgaatggtgcgcaggctggttacaaaggccaacc

SEQ ID NO: 842818 - DNA, 75 bp, synthetic construct
  source 1..75: mol_type = other DNA
accggcgcagatttttctctactgcctgctattgccgtgttagccgtaacttatctgctgagtgttgtgttttac

SEQ ID NO: 842819 - DNA, 75 bp, synthetic construct
  source 1..75: mol_type = other DNA
cgaacgttataaacaacaactcagcacttgaggtggcgtttatgacattcgataattcaaccgtttcgatagtcg

SEQ ID NO: 842820 - DNA, 75 bp, synthetic construct
  source 1..75: mol_type = other DNA
agatgtaacctcgcaggttgatgcagataactgccggttccaggctccggccggaggaactccaaccatctctac

SEQ ID NO: 842821 - DNA, 75 bp, synthetic construct
  source 1..75: mol_type = other DNA
atgaaatcgcggtcaggcagtggaaggaaaaatcgcgccagctttccggacgggaagaccttacccccgccgact

SEQ ID NO: 842822 - DNA, 75 bp, synthetic construct
  source 1..75: mol_type = other DNA
gtgccgatgaaggcaaactgccgctggcgctggattcacgcccgccgtcagaagcactggaagaaacgttacttc

SEQ ID NO: 842823 - DNA, 75 bp, synthetic construct
  source 1..75: mol_type = other DNA
actggactgaacatacagacagtgaatatcaactacagtctggcgggtaaacccacgccgcgccgtgaactgcta

SEQ ID NO: 842824 - DNA, 75 bp, synthetic construct
  source 1..75: mol_type = other DNA
atgaaaattaataacgtagcgttaccaatatctctggctgtaatcctaactggttgcgtgccacatgcttctaac

SEQ ID NO: 842825 - DNA, 75 bp, synthetic construct
  source 1..75: mol_type = other DNA
tctacgctaaatggcagttgggttgcgttgttgcagacgcgtaacaccctcaaccgtgcgggtatccgctacatg

SEQ ID NO: 842826 - DNA, 75 bp, synthetic construct
  source 1..75: mol_type = other DNA
atcgtcgtactggcggtcatcttcgccgtctggttcggtattaaagcctcgctggtagcgccaatgaatcgcctg

SEQ ID NO: 842827 - DNA, 75 bp, synthetic construct
  source 1..75: mol_type = other DNA
tggctgaaacaggctgtggcatccggtgttatcaggctaccccgcgatcttgacctttcttcactgtataccgcg

SEQ ID NO: 842828 - DNA, 75 bp, synthetic construct
  source 1..75: mol_type = other DNA
gcagtggcgggaaaaatcgcggcagcttgcggaacggggtgacctgactcccgccgactggagcaatctggaact

SEQ ID NO: 842829 - DNA, 75 bp, synthetic construct
  source 1..75: mol_type = other DNA
tgacgcctgcctgtgaaaaaggccatttaagtattgtaaaagagcttttggcgcatacggatattaacgttaacc

SEQ ID NO: 842830 - DNA, 75 bp, synthetic construct
  source 1..75: mol_type = other DNA
cagcctcctttagaagtggttgaagatgaagaagagaactcagggtcttctgttttagaaggtgagttatgccca

SEQ ID NO: 842831 - DNA, 75 bp, synthetic construct
  source 1..75: mol_type = other DNA
cgtgatgtgctgcgatatgtagcgattatcaagattgctcaacgtattggcattccattggcgacaattggtgaa

SEQ ID NO: 842832 - DNA, 75 bp, synthetic construct
  source 1..75: mol_type = other DNA
ttatcaaaattgctcagcgtattggcattccgctcgcaaccattcgtgaagcgtttggcgtgttgccagaagggc

SEQ ID NO: 842833 - DNA, 75 bp, synthetic construct
  source 1..75: mol_type = other DNA
tctggtgcaggggggactacgtcgatacggtggataagaatacggcgaagatacaggattacataaagcaccagc

SEQ ID NO: 842834 - DNA, 75 bp, synthetic construct
  source 1..75: mol_type = other DNA
gtgagtaagcgtaacgcagtaacgacgtttttcactaaccgggtgacaaaagcactgggaatgacgctggcgctg

SEQ ID NO: 842835 - DNA, 75 bp, synthetic construct
  source 1..75: mol_type = other DNA
catcaagttattgatcattttctggttatgcgtatctgtctggagccgcaagcctgcttattggcagcaacggtg

SEQ ID NO: 842836 - DNA, 75 bp, synthetic construct
  source 1..75: mol_type = other DNA
gagtgctaacccgtttttgacctctttcgcctcgttatttcattcggtttatcacacctactttacatcgataac

SEQ ID NO: 842837 - DNA, 75 bp, synthetic construct
  source 1..75: mol_type = other DNA
agacaggtgttctacagagagaagcgtagagcagtaggcagtattttgagaaagctgtgtgagtggaaaagtgta

SEQ ID NO: 842838 - DNA, 75 bp, synthetic construct
  source 1..75: mol_type = other DNA
catagtttttgcgccaaaatatcgaagacaagtgttctacagagagaaacgtagagcaataggcagtattttgag

SEQ ID NO: 842839 - DNA, 75 bp, synthetic construct
  source 1..75: mol_type = other DNA
tcgcggtaatgccattgcgttaattaccgcagggcttatgtctctggcctttatgggctttagtggtttggtgaa

SEQ ID NO: 842840 - DNA, 75 bp, synthetic construct
  source 1..75: mol_type = other DNA
cgatacgcatcagtgcctcgctgggggtaagtagcagcgaggaaaccggtgattatgattttgaacaactccagt

SEQ ID NO: 842841 - DNA, 75 bp, synthetic construct
  source 1..75: mol_type = other DNA
cgcctgctacggcaaaaaaagcgtcgtctacgcaatctcgtccggtgaatgctggtgcgaagaaacgccctaaag

SEQ ID NO: 842842 - DNA, 75 bp, synthetic construct
  source 1..75: mol_type = other DNA
aggaacagggcgttctggtgcaggggggactacgtcgatacggtggataagaatacggcgaagatacaggattac

SEQ ID NO: 842843 - DNA, 75 bp, synthetic construct
  source 1..75: mol_type = other DNA
tcgtggtaatgccattgcgctgattactgcgggtcttatgtctctggcctttatgggctttagtggtttggtgaa

SEQ ID NO: 842844 - DNA, 75 bp, synthetic construct
  source 1..75: mol_type = other DNA
caacccatcctctttttgctattgcccatcgtgctttttatccgtatgacgctcaatgcgctggatggcatgttg

SEQ ID NO: 842845 - DNA, 75 bp, synthetic construct
  source 1..75: mol_type = other DNA
gctgtcgatactgatacagaagaaggcaacccaataatgattgccgaacagcgtgcaacaactttcggttcagac

SEQ ID NO: 842846 - DNA, 75 bp, synthetic construct
  source 1..75: mol_type = other DNA
tcagggcagtagcacaaggcgagtggagagcaacccgtgaaagtgaagtagcaggattctggatcagccgtctgt

SEQ ID NO: 842847 - DNA, 75 bp, synthetic construct
  source 1..75: mol_type = other DNA
gaaagaattgatctatatttgcgtttattaatcaactcaacagaaaattatattacctctaacgggtatttatcc

SEQ ID NO: 842848 - DNA, 75 bp, synthetic construct
  source 1..75: mol_type = other DNA
taagtcgaccaccctgcgcatgattgccgggcttgaggagatcagcggcggcgatctgttgattgaagtggtcaa

SEQ ID NO: 842849 - DNA, 75 bp, synthetic construct
  source 1..75: mol_type = other DNA
tttggttcgtaagaactttgcgcttgctatgccttatctggtcgagcagggattctctcgcggtgatttaggttt

SEQ ID NO: 842850 - DNA, 75 bp, synthetic construct
  source 1..75: mol_type = other DNA
tcaggcctgggtggacaatatcgtggagaaggacacccgtccgacttttgtggtgacaccgtccttcttcaaggt

SEQ ID NO: 842851 - DNA, 75 bp, synthetic construct
  source 1..75: mol_type = other DNA
gcagcctgctggacggaaacgggaagaaaattgccacggataacgagacggcacagaaactgctgatgttcatgc

SEQ ID NO: 842852 - DNA, 75 bp, synthetic construct
  source 1..75: mol_type = other DNA
ggaccattaaccagaaaaaggctgcagccccttccgggcagaaggcatctgattcgccggttaatccgtctgata

SEQ ID NO: 842853 - DNA, 75 bp, synthetic construct
  source 1..75: mol_type = other DNA
ttctcgctacgtcctttcaaaaatgtcatgggataaactcatcgcaatgaaagacagcttaaaccgtgttgtcga

SEQ ID NO: 842854 - DNA, 75 bp, synthetic construct
  source 1..75: mol_type = other DNA
tatcaaaggtagttctgctggtaacgctccgatcattccggttaaacctacccgcacaggtggtcatgaattgct

SEQ ID NO: 842855 - DNA, 75 bp, synthetic construct
  source 1..75: mol_type = other DNA
cctgatgattatctcgatcagcttttgagtgaatccatcaagcgtactactactggtgttcgttgggtgaaaaat

SEQ ID NO: 842856 - DNA, 75 bp, synthetic construct
  source 1..75: mol_type = other DNA
gcaatctgtaccaaaaactcggcgtcgcccaccgtcaggctgccgtgcagcacgcgcagaaactgctgaagatga

SEQ ID NO: 842857 - DNA, 75 bp, synthetic construct
  source 1..75: mol_type = other DNA
aaagtggacgcggtgaagcgcggtacattcgatcgacagatccccattgcggtacgccagcagtggcgtggtgcg

SEQ ID NO: 842858 - DNA, 75 bp, synthetic construct
  source 1..75: mol_type = other DNA
cagcaaccgggcaacgctcggtgggatgatcaataccgatgcatccggtcagggatcgctggtctatggcaaaac

SEQ ID NO: 842859 - DNA, 75 bp, synthetic construct
  source 1..75: mol_type = other DNA
gcggacgttaattgcccgtacgcgtaatagctggcatgcgaataaaggcgaatatgatttctcgcacgaagtgaa

SEQ ID NO: 842860 - DNA, 75 bp, synthetic construct
  source 1..75: mol_type = other DNA
aaagtggacgcggtgaaacgcggtacgtttgaccggcagatccctatcgcagttcgtcagcagtggcgcggggca

SEQ ID NO: 842861 - DNA, 75 bp, synthetic construct
  source 1..75: mol_type = other DNA
ttcctgccgtagccaggtaaaacgggtcgaaggcacgggggtacgccatcctgtgcaggctttactggagattat

SEQ ID NO: 842862 - DNA, 75 bp, synthetic construct
  source 1..75: mol_type = other DNA
gggctgggtgcgcgttgaagcgggggtaattaaagaccaactgaatcagtatctgaaaccatttggctacttttt

SEQ ID NO: 842863 - DNA, 75 bp, synthetic construct
  source 1..75: mol_type = other DNA
tcgttcctcaccaggccagtcatctatcccttgaacatatgcgaaaacggctgcaagtgccgggacccgcgctcg

SEQ ID NO: 842864 - DNA, 75 bp, synthetic construct
  source 1..75: mol_type = other DNA
ttgtcccgcatcaggccagtcatctttcccttgaacatatgcgtaaacggctgcgagtgccggagtctgcgctca

SEQ ID NO: 842865 - DNA, 75 bp, synthetic construct
  source 1..75: mol_type = other DNA
aagatgttgcgggaacagtgaaggacctgatcgctgaaggcaaagttaaacatttcggtctgtccgaagcgggcg

SEQ ID NO: 842866 - DNA, 75 bp, synthetic construct
  source 1..75: mol_type = other DNA
attgccagccaacaggcaggtgtgattggctggcaggtgtgccgcgagctggcgggtgttgaacgtatctatgcg

SEQ ID NO: 842867 - DNA, 75 bp, synthetic construct
  source 1..75: mol_type = other DNA
agaaagcgcgtactgtgctggtggtgcaggatccttttaccagctattacgatgcgcaggtggtagcggattttg

SEQ ID NO: 842868 - DNA, 75 bp, synthetic construct
  source 1..75: mol_type = other DNA
tcttagaaagaccatctgaaattttaggttcttttggtgggtattttaacagagcaaaatttttactaagtgata

SEQ ID NO: 842869 - DNA, 75 bp, synthetic construct
  source 1..75: mol_type = other DNA
ggatatgtgcgatccacaacaagagattttgatgaagcaaatctctgatgacgtggtggcgttgactgcgaaata

SEQ ID NO: 842870 - DNA, 75 bp, synthetic construct
  source 1..75: mol_type = other DNA
atgcctcttgccttgtcgaatgctgcagaaattgaatccctaggtattggtgaggtaattaaagttttatttgtt

SEQ ID NO: 842871 - DNA, 75 bp, synthetic construct
  source 1..75: mol_type = other DNA
aaacctttaagcctagtaagaagatcggagatgcagggaaatcttttttaaaaacaagtgtttttattaacccta

SEQ ID NO: 842872 - DNA, 75 bp, synthetic construct
  source 1..75: mol_type = other DNA
tcaccgtcaaacctctttaccggatatattgaaagagtatggttataaaagttattttatagcatccaccgaaaa

SEQ ID NO: 842873 - DNA, 75 bp, synthetic construct
  source 1..75: mol_type = other DNA
atgttgattcaatgctcgctggcccgtggtgatttagataacgcccgtagccagctgaaccgtctggaaaacctg

SEQ ID NO: 842874 - DNA, 75 bp, synthetic construct
  source 1..75: mol_type = other DNA
atggcaatacgttgttgataattacatcggatcattctacatttccttcgacagaatataagaaatcatttaaca

SEQ ID NO: 842875 - DNA, 75 bp, synthetic construct
  source 1..75: mol_type = other DNA
attattataaccatacggctgcaacctttcgagggttaagaggccagttaacttcgggttatcaatttcgggatg

SEQ ID NO: 842876 - DNA, 75 bp, synthetic construct
  source 1..75: mol_type = other DNA
gcggcgagtttaacgttctgctggcgaatgaatggctggcaagcgtacttgagtcacagccagtggctgcggtca

SEQ ID NO: 842877 - DNA, 75 bp, synthetic construct
  source 1..75: mol_type = other DNA
atggaatgtaatggtaacggtctttgttttaactttgatgcccgcagcccaatgtgcccgtcgatgaaaatcagt

SEQ ID NO: 842878 - DNA, 75 bp, synthetic construct
  source 1..75: mol_type = other DNA
tgtaaagcttgttcgacccagtgcccaatcaaaattgacgtgcctgagtttcgttctcgctttctgcaactctat

SEQ ID NO: 842879 - DNA, 75 bp, synthetic construct
  source 1..75: mol_type = other DNA
cagcacggaagattccgttttccacataacaattaatggtgataaatcatcggtttacgaatcaatcactggcgt

SEQ ID NO: 842880 - DNA, 75 bp, synthetic construct
  source 1..75: mol_type = other DNA
aaattgttgcgaagcgtgggtgtgggattattccggacaagcatggactgaccagtgatttggtaaatcgccttc

SEQ ID NO: 842881 - DNA, 75 bp, synthetic construct
  source 1..75: mol_type = other DNA
aatgaccgtactggaggggaagtctgtcaccttcaacggacagcaactgacgctggaaagcctttctcagatccg

SEQ ID NO: 842882 - DNA, 75 bp, synthetic construct
  source 1..75: mol_type = other DNA
cgtcatatagcagtacttggtaatactggtagtggtaagtcttgttctgtcgcaggattaatccaatggtcactc

SEQ ID NO: 842883 - DNA, 75 bp, synthetic construct
  source 1..75: mol_type = other DNA
gctaataatgtcaaagtcaattatgaaactattatgattgcccccttagaaagtcagagtgttaatgtcaaaagt

SEQ ID NO: 842884 - DNA, 75 bp, synthetic construct
  source 1..75: mol_type = other DNA
tcccctggaaatacacgggcaaccgacaccacccgacggagaagccggtgcagagcctgcgaccgctgattgaat

SEQ ID NO: 842885 - DNA, 75 bp, synthetic construct
  source 1..75: mol_type = other DNA
ggctactgtccggactgcggcacggtgacgggagatacaacttacagcgcgatgtttacctcttacaccacagaa

SEQ ID NO: 842886 - DNA, 75 bp, synthetic construct
  source 1..75: mol_type = other DNA
acagtgcgacgcctgcggtcaccatggcggtggctactgcccggactgcggacctgtaacgggagatgcaactta

SEQ ID NO: 842887 - DNA, 75 bp, synthetic construct
  source 1..75: mol_type = other DNA
tcctgaaccacaacaacaggggtaactatctcatcattcgcgaaacctttaacgcagagaatcatgccttcctga

SEQ ID NO: 842888 - DNA, 75 bp, synthetic construct
  source 1..75: mol_type = other DNA
accgacccgccgtatctcgtcggtttccgtgaccgttccgggcgcaccattgccggtgacgttaacgatgactgg

SEQ ID NO: 842889 - DNA, 75 bp, synthetic construct
  source 1..75: mol_type = other DNA
tctgcgaccgttccggccgtactcttgccggtgacagaactgacgagtggcttcaaccagcctgcaatgaaatgt

SEQ ID NO: 842890 - DNA, 75 bp, synthetic construct
  source 1..75: mol_type = other DNA
gcatcgatgttatggcccgtattcctgataacgccattgatttcatcctcaccgacccgccgtatctcgtcggtt

SEQ ID NO: 842891 - DNA, 75 bp, synthetic construct
  source 1..75: mol_type = other DNA
ctccagcccgcctgtcatgaaatgtaccgcgtgctgaaaaacgacagccttatggtgagcttctatgcctggaac

SEQ ID NO: 842892 - DNA, 75 bp, synthetic construct
  source 1..75: mol_type = other DNA
cgccggagataaaaccgatgaatggctgcaaccggcctgtaatgagatgtaccgcgtgctgaaaaaagacgcgtt

SEQ ID NO: 842893 - DNA, 75 bp, synthetic construct
  source 1..75: mol_type = other DNA
tgggcacctcgtgttcaccaaaaactacacatccaaatctgcgtatgtcgcgtaccgccacgaatgcgcttacat

SEQ ID NO: 842894 - DNA, 75 bp, synthetic construct
  source 1..75: mol_type = other DNA
atggccgggacaatttcaccgcctacggaaaaccattcaatgaaggcgaacacattcgcctgagagcaacgcttg

SEQ ID NO: 842895 - DNA, 75 bp, synthetic construct
  source 1..75: mol_type = other DNA
ttatattacccataagcattattattagtcttattgttaaacaactaaattctagcaaccttgttcaatctgttg

SEQ ID NO: 842896 - DNA, 75 bp, synthetic construct
  source 1..75: mol_type = other DNA
ttacttcaataatcaaaaacgttggcgtaataagatctttaaatcatatttgagcaaacgtactgagttggcaag

SEQ ID NO: 842897 - DNA, 75 bp, synthetic construct
  source 1..75: mol_type = other DNA
accaaaggcgcttcaggctttgtctgacgtggtgaccgggcaggtaaacggtgataatgatttacagcatgtgct

SEQ ID NO: 842898 - DNA, 75 bp, synthetic construct
  source 1..75: mol_type = other DNA
attatggagcataagtccggggtagcccgttctgtatggacggcccgtcttaatggttgccagattatctggaga

SEQ ID NO: 842899 - DNA, 75 bp, synthetic construct
  source 1..75: mol_type = other DNA
attatggagcataaatcaggggttgcccgttccgtatggacggcccgccttaatggttgccagattatctggcgt

SEQ ID NO: 842900 - DNA, 75 bp, synthetic construct
  source 1..75: mol_type = other DNA
cggctgccgcgcttctgcctccgtttgccttgttagccatattgcaactggcatttggtaaaaaagtagcggcaa

SEQ ID NO: 842901 - DNA, 75 bp, synthetic construct
  source 1..75: mol_type = other DNA
agatagccatgtcatctcagtaactgagagttttagttttggggttctttctcctgcgccgggtgggcgcatgtc

SEQ ID NO: 842902 - DNA, 75 bp, synthetic construct
  source 1..75: mol_type = other DNA
cacaggctaacgcgtttgtaaatgccctgcgcagtggtgaacgcgcccgtgttccggccttgaagctgaaatact

SEQ ID NO: 842903 - DNA, 75 bp, synthetic construct
  source 1..75: mol_type = other DNA
gcagcgcttgaccgcctttcacaggaaacgggcggcatgaccagcatcaccatctccaattccgacacaccggaa

SEQ ID NO: 842904 - DNA, 75 bp, synthetic construct
  source 1..75: mol_type = other DNA
gtcagttcagtgcctggaatgtgtgcgtgttttataccgggctgttttactggttgccgttaaccgcacagtttg

SEQ ID NO: 842905 - DNA, 75 bp, synthetic construct
  source 1..75: mol_type = other DNA
ccgcagcggcaaaactggttacagcaaatcagccgggtggtggcgttaccggataaccagtaccgggcactttgc

SEQ ID NO: 842906 - DNA, 75 bp, synthetic construct
  source 1..75: mol_type = other DNA
atacagagcaaagcatctacctggtttagatcgagcgttattgattccggtttctatgaggggatgtaccaaacg

SEQ ID NO: 842907 - DNA, 75 bp, synthetic construct
  source 1..75: mol_type = other DNA
ccggacgccggtatatcggtatatcggtatcgagctgcttgaagggggccgcgaatgataactggtttgaaccgg

SEQ ID NO: 842908 - DNA, 75 bp, synthetic construct
  source 1..75: mol_type = other DNA
cggacatctggtcttcaccaaaaattactcgtccaaatccgcgtatgtcggctaccgccatgaatgcgcttacgt

SEQ ID NO: 842909 - DNA, 75 bp, synthetic construct
  source 1..75: mol_type = other DNA
gtgtcgatattatgtccggctttccggaccgcgccgtcgatttcattctgaccgacccgccttaccttgtcggat

SEQ ID NO: 842910 - DNA, 75 bp, synthetic construct
  source 1..75: mol_type = other DNA
tcaacctgcgtcgctgccctccagtccggacgccggtatatcggtatcgagctgcttgagcagtatcaccgtgcc

SEQ ID NO: 842911 - DNA, 75 bp, synthetic construct
  source 1..75: mol_type = other DNA
ttacatcctggcaaaagggcgtccggcgctgcctcagaagccattgcccgacgtgctgggctggaaatattcagg

SEQ ID NO: 842912 - DNA, 75 bp, synthetic construct
  source 1..75: mol_type = other DNA
gggctggaaatattcaggcaatcgtcatcacccgacggaaaagcccgttaccagcctgcaaccgctcattgagag

SEQ ID NO: 842913 - DNA, 75 bp, synthetic construct
  source 1..75: mol_type = other DNA
tgccggcgataaaaccgatgaatggctgcaaccggcctgtaatgagatgtaccgcgtgctgaaaaaagacgcgct

SEQ ID NO: 842914 - DNA, 75 bp, synthetic construct
  source 1..75: mol_type = other DNA
tgatcaatggcaagcaaaagacctggctggcgcattgtactgatgcagaggcgttatgtattgatagagtcataa

SEQ ID NO: 842915 - DNA, 75 bp, synthetic construct
  source 1..75: mol_type = other DNA
gcttcacacacccgaacgcaattgtgctggacccgtttgcaggcagcggctcaacctgcgttgccgccctccagt

SEQ ID NO: 842916 - DNA, 75 bp, synthetic construct
  source 1..75: mol_type = other DNA
acttgcagaaatcgcattgacgcatggttgggtgttgctgaacacattctgtatataccaatgaaattagcgtta

SEQ ID NO: 842917 - DNA, 75 bp, synthetic construct
  source 1..75: mol_type = other DNA
aagtaagaggtgggcacgcaggtgctaagcctgttcgtcgttcaaaacttgaacaaagtgttaatcgttccctgc

SEQ ID NO: 842918 - DNA, 75 bp, synthetic construct
  source 1..75: mol_type = other DNA
tctgaaatctttaaatgcttttggactggatttagcaaggttgctaagcatcaaaattcacaagttatctcaaga

SEQ ID NO: 842919 - DNA, 75 bp, synthetic construct
  source 1..75: mol_type = other DNA
accgacccgccatatctcgtcggtttccgtgaccgtcaggggcgtaccatcgctggcgataaaaccgatgaatgg

SEQ ID NO: 842920 - DNA, 75 bp, synthetic construct
  source 1..75: mol_type = other DNA
gcaatcgtcatcacccgacggaaaagcccgttaccagcctgcaaccgctgattgagagcttcacacacccgaacg

SEQ ID NO: 842921 - DNA, 75 bp, synthetic construct
  source 1..75: mol_type = other DNA
ggacagcaacgactggccgccgtgcaacgggccatgcagcagggggccgcaaatgatgactgttttatgccggag

SEQ ID NO: 842922 - DNA, 75 bp, synthetic construct
  source 1..75: mol_type = other DNA
ccacaaaacccgcagccggacgtgctgggctggaaatattcaggcaatcgtcatcacccgacggaaaagcccgtt

SEQ ID NO: 842923 - DNA, 75 bp, synthetic construct
  source 1..75: mol_type = other DNA
atgtcccgttttatcctgggtgactgcgtgcgtgttatggccacgattcctgataacgccattgatttcatatta

SEQ ID NO: 842924 - DNA, 75 bp, synthetic construct
  source 1..75: mol_type = other DNA
ccttcacacatcccggcgcgattgtgctcgacccctttgccggcagtggctccacctgcgtggccgccctccggg

SEQ ID NO: 842925 - DNA, 75 bp, synthetic construct
  source 1..75: mol_type = other DNA
gctggacccgtttgcaggcagcggctcaacctgtgtggccgccctccagtccggacgccggtatatcggtatcga

SEQ ID NO: 842926 - DNA, 75 bp, synthetic construct
  source 1..75: mol_type = other DNA
tccgtgaccgttccgggcgcaccattgccggcgataaaaccgatgaatggctgcaaccggcctgtaatgaaatgt

SEQ ID NO: 842927 - DNA, 75 bp, synthetic construct
  source 1..75: mol_type = other DNA
tctgaaatctttaaatgcttttggactggatttagcaaggttactaagtatcaaaattcacaaactgtctcagga

SEQ ID NO: 842928 - DNA, 75 bp, synthetic construct
  source 1..75: mol_type = other DNA
accttgtgttcaccaaaagctacacatccaaatctgcgtatgtcgcgtaccgtcacgaatgcgcctatatcctgg

SEQ ID NO: 842929 - DNA, 75 bp, synthetic construct
  source 1..75: mol_type = other DNA
ccattgcccgacgtgctgggctggaaatattcgggcaaccgtcatcacccgacggaaaagcccgttaccagcctg

SEQ ID NO: 842930 - DNA, 75 bp, synthetic construct
  source 1..75: mol_type = other DNA
tgggctggaaatattcaggcaatcgtcatcacccgacggaaaagcctgttaccagcctgcaaccactgattgaga

SEQ ID NO: 842931 - DNA, 75 bp, synthetic construct
  source 1..75: mol_type = other DNA
gcatcaatgttatggcccgtatccctgataacgccattgatctcatacttaccgacccgccttacctggtggggt

SEQ ID NO: 842932 - DNA, 75 bp, synthetic construct
  source 1..75: mol_type = other DNA
tacacatccaaatctgcgtatgtcgcgtaccgtcacgaatgcgcctacatcctggcaaaaggccgtccggcgctg

SEQ ID NO: 842933 - DNA, 75 bp, synthetic construct
  source 1..75: mol_type = other DNA
ctcatcagttacagcgaagtcagcataaaaaatcccgacaacagcggccaggcgctctcgctcacgtatgtctgt

SEQ ID NO: 842934 - DNA, 75 bp, synthetic construct
  source 1..75: mol_type = other DNA
cacgctgaatgtgatgcaaaaaggcgggcgggcagcccgccaggcccggatgttcatcagttacagcgaagtcag

SEQ ID NO: 842935 - DNA, 75 bp, synthetic construct
  source 1..75: mol_type = other DNA
cgacgaaaaacgacaacggagccacgccgcgtttttctcagcgccagttacaggcgctttgttctgatattgaca

SEQ ID NO: 842936 - DNA, 75 bp, synthetic construct
  source 1..75: mol_type = other DNA
tcgagctcccgcccgctttggtgtctattccaataccgatgctcaggatggtattccgctaacagaaactttcgg

SEQ ID NO: 842937 - DNA, 75 bp, synthetic construct
  source 1..75: mol_type = other DNA
gataagggatcttttgacccaaaaacaatggaaaatcgtgaagttgtcgataccggtgatgctgccaacttactg

SEQ ID NO: 842938 - DNA, 75 bp, synthetic construct
  source 1..75: mol_type = other DNA
cctacaaaaatattcccagcgttactcttgggcgtctggcaattgatcgttcattacaggggcagggatggggag

SEQ ID NO: 842939 - DNA, 75 bp, synthetic construct
  source 1..75: mol_type = other DNA
gtgtgtcactgtgccgtggaaaccggtcagtccgcctttttcgggggaattatgtttagcggaaaaccgctggat

SEQ ID NO: 842940 - DNA, 75 bp, synthetic construct
  source 1..75: mol_type = other DNA
ttactcatgccggcggtacaggtgcacagacactcaatggtattgaactgattcatgtcgacggtaacgccgaca

SEQ ID NO: 842941 - DNA, 75 bp, synthetic construct
  source 1..75: mol_type = other DNA
gactacacgggtgtgacagatattcgcggcggcaatgttctcatgaacagcaacaatgctctgggacagaccagt

SEQ ID NO: 842942 - DNA, 75 bp, synthetic construct
  source 1..75: mol_type = other DNA
gatgcgcgacgtatcgtcagccattacgagcaacgctggctgatagaggaataccacaaagcgtggaaaagtggt

SEQ ID NO: 842943 - DNA, 75 bp, synthetic construct
  source 1..75: mol_type = other DNA
agccacacgctgaatgtgatgcaaaaaggcgggcgggcagcccgccaggcccggatgctcatcagttacagcgaa

SEQ ID NO: 842944 - DNA, 75 bp, synthetic construct
  source 1..75: mol_type = other DNA
gaaggattttcaggcgcagcggtcactaccgccagatattgacgctgacaccatcagccaggcgttgcttgcggc

SEQ ID NO: 842945 - DNA, 75 bp, synthetic construct
  source 1..75: mol_type = other DNA
acgatgattaccaaacggtaatggcatacaaagtttctgaggtcatcgctgcaatccgcgccgctggcattcgca

SEQ ID NO: 842946 - DNA, 75 bp, synthetic construct
  source 1..75: mol_type = other DNA
agtaagcagaactcagacagcggcgacattaaactttttcgtatcgccgccgcagccggtaaaggagaggaatca

SEQ ID NO: 842947 - DNA, 75 bp, synthetic construct
  source 1..75: mol_type = other DNA
aattacgctggcaagcttgcaccagcaatatacttgtgtgcaggcgttaattgatgctggagcagatattaataa

SEQ ID NO: 842948 - DNA, 75 bp, synthetic construct
  source 1..75: mol_type = other DNA
gtgagcgaaattaattaccaggcactgcgtgaaaaggcagaaaaagcaacgagtggtgtgtggtcgctcgaatat

SEQ ID NO: 842949 - DNA, 75 bp, synthetic construct
  source 1..75: mol_type = other DNA
cgcactacccgattgatactgccgatcgggcgttcagcgactgggccgccgatcccggcgcattcaccaaaattt

SEQ ID NO: 842950 - DNA, 75 bp, synthetic construct
  source 1..75: mol_type = other DNA
taactgtcgatgagttagcgttggtggaaccgctggctgtgggattacacgccgccagacgcgcacaaattaatg

SEQ ID NO: 842951 - DNA, 75 bp, synthetic construct
  source 1..75: mol_type = other DNA
tggtcgaggagtgcgaaattcctgctggcggttctctggtcgagtacgttgacgatatgcgcgagaagctggaat

SEQ ID NO: 842952 - DNA, 75 bp, synthetic construct
  source 1..75: mol_type = other DNA
agacgaattggttgcagcgctggaatccgcagagaagcgcatagcagaactgtctgctagccacagcaaattgcg

SEQ ID NO: 842953 - DNA, 75 bp, synthetic construct
  source 1..75: mol_type = other DNA
tgaacaggattttcaggttgccagccagcagtttcaggtcatgcaggagtcggaaaaacttatccaggacacgat

SEQ ID NO: 842954 - DNA, 75 bp, synthetic construct
  source 1..75: mol_type = other DNA
tgcgcgaggcggcggagaaggctacgaaaggtaagtgggctgttgaattcgacgatgagatttactccactgacg

SEQ ID NO: 842955 - DNA, 75 bp, synthetic construct
  source 1..75: mol_type = other DNA
atgcgcgagaagctggaagccgcagagaagcgcattgcagaactggaaagcaacgaagtccgtgaagtcggaaat

SEQ ID NO: 842956 - DNA, 75 bp, synthetic construct
  source 1..75: mol_type = other DNA
cgccactggcagcaatccttaacgctgctaaacgcgcatatgaagaatcagcaagcgcagctggcattcgcatca

SEQ ID NO: 842957 - DNA, 75 bp, synthetic construct
  source 1..75: mol_type = other DNA
aatgcctccattcagttggtttctgtttccggaagcggaaaagtgaccggctctgctggcggtctgcagttacag

SEQ ID NO: 842958 - DNA, 75 bp, synthetic construct
  source 1..75: mol_type = other DNA
tcgtgcggctgctgaatccagcattcaggtgaaaaataaaggtagcatcaagctcagcaacgtgaagtcggttgt

SEQ ID NO: 842959 - DNA, 75 bp, synthetic construct
  source 1..75: mol_type = other DNA
cgctgcgcgatcgcgtactgggtcgtgtcactgcagaagacgttctgaagccgggtactgccgacattcttgttc

SEQ ID NO: 842960 - DNA, 75 bp, synthetic construct
  source 1..75: mol_type = other DNA
gaaatcgctgccgtcccgtatcggcctgctgctcgatatgccgctgcgcgatattgaacgcgtactgtacttcga

SEQ ID NO: 842961 - DNA, 75 bp, synthetic construct
  source 1..75: mol_type = other DNA
cccgtatctttgggccggtaaaagattacgagtgcctgtgtggtaagtacaagcgcctgaaacaccgtggcgtca

SEQ ID NO: 842962 - DNA, 75 bp, synthetic construct
  source 1..75: mol_type = other DNA
acttcccgtaacaccgaactgaaactgatcgacgagttcggtcgtaccaaagaaagctacaaagtgccttacggt

SEQ ID NO: 842963 - DNA, 75 bp, synthetic construct
  source 1..75: mol_type = other DNA
cgttatttttgcggaccagatcatgtacaccggctttgcatatgcagcgcgttctggtgcatctgttggtatcga

SEQ ID NO: 842964 - DNA, 75 bp, synthetic construct
  source 1..75: mol_type = other DNA
tatcgccgatgtttatgtgcgtgcccatgctttccggtttactggttgcacacggttttttaccgccgcaccccg

SEQ ID NO: 842965 - DNA, 75 bp, synthetic construct
  source 1..75: mol_type = other DNA
ggggaaattatgaggggatctctcagcgttatgccactaattatcgttgtggcagggattgctttactcctgctt

SEQ ID NO: 842966 - DNA, 75 bp, synthetic construct
  source 1..75: mol_type = other DNA
ggctaccggtgccggatcctgtatttgttctcacgttaacgatgccagtttctggatgattaaagacttttttgg

SEQ ID NO: 842967 - DNA, 75 bp, synthetic construct
  source 1..75: mol_type = other DNA
cgtatgggccacatcgaactggcttccccgactgcgcacatctggttcctgaaatcactgccgtcccgtatcggc

SEQ ID NO: 842968 - DNA, 75 bp, synthetic construct
  source 1..75: mol_type = other DNA
aacgtctgtatcgctctggtctggcttctctgcatgcgcgcgttaaagtgcgtatcgccgagtatgaaaaagatg

SEQ ID NO: 842969 - DNA, 75 bp, synthetic construct
  source 1..75: mol_type = other DNA
ccgtcggttcagcgaaagcgaaatgcctggctttgggatcagttttctcaccgcgatgctgccggttatcctgat

SEQ ID NO: 842970 - DNA, 75 bp, synthetic construct
  source 1..75: mol_type = other DNA
cgaactgcgcggcctgaaagagaacgttatcgtgggtcgtctgatcccggcaggtaccggttatgcgtaccacca

SEQ ID NO: 842971 - DNA, 75 bp, synthetic construct
  source 1..75: mol_type = other DNA
catttggctgtatccacggctgataatctggggacagcctttgttgataactatggcacattaactctgaacagt

SEQ ID NO: 842972 - DNA, 75 bp, synthetic construct
  source 1..75: mol_type = other DNA
gactgagtatttatatttatcccgtggcgcagaactggatatgaatgggtatcctcagacaataagcaaactact

SEQ ID NO: 842973 - DNA, 75 bp, synthetic construct
  source 1..75: mol_type = other DNA
cttaccagcaaaaacggtaaaaatacgcggtatgcggttccgttcagaccatttgtggaggcacactggttgcac

SEQ ID NO: 842974 - DNA, 75 bp, synthetic construct
  source 1..75: mol_type = other DNA
gtaccacaacctgaagctgtaccacaacctgaagctgtaccggaaaaccatgataataatttgcgtcctgaggca

SEQ ID NO: 842975 - DNA, 75 bp, synthetic construct
  source 1..75: mol_type = other DNA
aataatcatggtaatctttcaggattatataatagccaaaaagatgcttataatacatcaataattttttctggc

SEQ ID NO: 842976 - DNA, 75 bp, synthetic construct
  source 1..75: mol_type = other DNA
aaccggtagcaatattacagtgcataattccggaggaatattgggcggtaatggcgtaaacggtggtgatggtat

SEQ ID NO: 842977 - DNA, 75 bp, synthetic construct
  source 1..75: mol_type = other DNA
ttgcaattgctaaagaggtcactgagtcggatttacttaaatatccagtctctaaaggtcgtaagcacatccgaa

SEQ ID NO: 842978 - DNA, 75 bp, synthetic construct
  source 1..75: mol_type = other DNA
ttcacctttattatatgatggctgggacggcaaaagtctgaaaaaatcaggtaatggtactcttatactttctgc

SEQ ID NO: 842979 - DNA, 75 bp, synthetic construct
  source 1..75: mol_type = other DNA
gcaccgactctgcaccgtctgggtatccaggcatttgaaccggttctgatcgaaggtaaagctatccagctgcac

SEQ ID NO: 842980 - DNA, 75 bp, synthetic construct
  source 1..75: mol_type = other DNA
attatggagcataaatcaggggttgcccgttcagtctggacggcccgccttaatggttgccagattatctggcgt

SEQ ID NO: 842981 - DNA, 75 bp, synthetic construct
  source 1..75: mol_type = other DNA
aggattatggagcataaatcaggtattgcccgttctgtatggacgacacgtcttaatggttgccagattatctgg

SEQ ID NO: 842982 - DNA, 75 bp, synthetic construct
  source 1..75: mol_type = other DNA
atgagtataaaaaatctacctgccgactatttattggctgccctacaaggtgatatcgataaattaaaaacctgc

SEQ ID NO: 842983 - DNA, 75 bp, synthetic construct
  source 1..75: mol_type = other DNA
atgctgcagctatatgtgaggcaatcagtagtcgctggagtaatggtgttgtcgaaggtcatgtaaatcgcctga

SEQ ID NO: 842984 - DNA, 75 bp, synthetic construct
  source 1..75: mol_type = other DNA
cgcaccttatgatgcggtgatcctggatttaaccttaccaggcatggatggtcgcgatattttgcgcgaatggcg

SEQ ID NO: 842985 - DNA, 75 bp, synthetic construct
  source 1..75: mol_type = other DNA
ctgatcctgaccgcgcgcgatgcgctggaggaacgtgtagaagggctgcgtctgggagctgacgattatctgtgt

SEQ ID NO: 842986 - DNA, 75 bp, synthetic construct
  source 1..75: mol_type = other DNA
aaatggcttcctggctggttgagtggaaaaacgccgctgaaacgcaatggcttaaagattcgccctcacagcctt

SEQ ID NO: 842987 - DNA, 75 bp, synthetic construct
  source 1..75: mol_type = other DNA
gggattaatagctggaggtgaggctggaaaacgggctgcaacggcagtgggtctccgttgcagtgctgatactct

SEQ ID NO: 842988 - DNA, 75 bp, synthetic construct
  source 1..75: mol_type = other DNA
tggcgatgcgcttgaacgaatgatgtacagacatatacctctgatacgtcttgttgccagtgtgcaaaatggcat

SEQ ID NO: 842989 - DNA, 75 bp, synthetic construct
  source 1..75: mol_type = other DNA
ctgccgtctgggcaagaaaatcattattgaaaacctgctgtaccgctggagtaacggccatgtgacgctggactg

SEQ ID NO: 842990 - DNA, 75 bp, synthetic construct
  source 1..75: mol_type = other DNA
ccacgtttggttactcttcggtatttcttgccggggcgatctctgcggtgctgggaattattgtcacgatactgt

SEQ ID NO: 842991 - DNA, 75 bp, synthetic construct
  source 1..75: mol_type = other DNA
tcatcatgaactgggctatggcaataccatggtcggcattgccgtcgggattcagtttctggctacggtgctgac

SEQ ID NO: 842992 - DNA, 75 bp, synthetic construct
  source 1..75: mol_type = other DNA
atgacagatacgggcatgtacaccttcatgagttcatgccagcgtgatgagtggaacagccagctgatgagcgac

SEQ ID NO: 842993 - DNA, 75 bp, synthetic construct
  source 1..75: mol_type = other DNA
caacttttcgccatctgaatgccagtaagatgcagacatttgaacagggactgattgatgtctaccggaaattgt

SEQ ID NO: 842994 - DNA, 75 bp, synthetic construct
  source 1..75: mol_type = other DNA
gccggaatgcactgaatgtcagcacaacgaccctgagtaaccagggcacaatacagggtggtggcggagcttccc

SEQ ID NO: 842995 - DNA, 75 bp, synthetic construct
  source 1..75: mol_type = other DNA
tctggcagaaaacgcagtcggatcgctcgccgcaaacagtgagaaaaatgatgcgggaaaactggcaacagatat

SEQ ID NO: 842996 - DNA, 75 bp, synthetic construct
  source 1..75: mol_type = other DNA
ccgcacgacgcgctcccgcgcggcgggtgggggcggcgaagccgacccttggacttgtgacaataactgtccctg

SEQ ID NO: 842997 - DNA, 75 bp, synthetic construct
  source 1..75: mol_type = other DNA
aaggacgattggcgcaactgcgactcttggcgtatcaatggggcttgaggctggctttggtgcaatgatgcgttt

SEQ ID NO: 842998 - DNA, 75 bp, synthetic construct
  source 1..75: mol_type = other DNA
tttcctcgccgaaacgggcgacatccgcgcggctgtgcggcagtatatggctgaagtggagtccggcgtttatcc

SEQ ID NO: 842999 - DNA, 75 bp, synthetic construct
  source 1..75: mol_type = other DNA
cgtcggtctgttctgtactgattctgaactggcggttgcggctgacagtattgtgcatgattgtctgtgttcttc

SEQ ID NO: 843000 - DNA, 75 bp, synthetic construct
  source 1..75: mol_type = other DNA
ttcagttataccgttgcttatgctttttcgcgtctggtttatcagtgcggagtgagtaacgctgttgccgttctt

SEQ ID NO: 843001 - DNA, 75 bp, synthetic construct
  source 1..75: mol_type = other DNA
tttcttccggcacacgtccgccccgtgacacacctgtagaccgtcttgtgtggtcgctggctgtacctgatttta

SEQ ID NO: 843002 - DNA, 75 bp, synthetic construct
  source 1..75: mol_type = other DNA
aagctaacaggataaggacgattggcgcaactgcgactcttggggcaacactggcgcttgaatctggtttcggtg

SEQ ID NO: 843003 - DNA, 75 bp, synthetic construct
  source 1..75: mol_type = other DNA
atcagttgttgttgacgatctgtatggttctctgaagtcaaggaaggattcagccggaagcgttattgaagacat

SEQ ID NO: 843004 - DNA, 75 bp, synthetic construct
  source 1..75: mol_type = other DNA
tgctatggtcttccccaaccaggcaaaagcagaaaccaatatggtagagaatgcaatgtcaaaagaccttcgtaa

SEQ ID NO: 843005 - DNA, 75 bp, synthetic construct
  source 1..75: mol_type = other DNA
cggttgagctggcaaaacgcattaccgaagcactggcaatcccggttatcggtattggcgcaggcaacgtcactg

SEQ ID NO: 843006 - DNA, 75 bp, synthetic construct
  source 1..75: mol_type = other DNA
ggtgggtgattcgctgggcatgaccgttcagggccacgtctccactctgccggtaaccgttgccgatattgccta

SEQ ID NO: 843007 - DNA, 75 bp, synthetic construct
  source 1..75: mol_type = other DNA
acctgccatttatggcgtatgccacgccggaacaagcctttgaaaacgccgcaacggtaatgcgtgccggagcca

SEQ ID NO: 843008 - DNA, 75 bp, synthetic construct
  source 1..75: mol_type = other DNA
tggcttgttgattcatagccattacggttttgccgcactggcgcttacgacaatggcattacctttactggcgtg

SEQ ID NO: 843009 - DNA, 75 bp, synthetic construct
  source 1..75: mol_type = other DNA
agctggaataaacagcagatcatcattcgactagaggatgagcagtttgctgtgcactggcagataaaagaaaaa

SEQ ID NO: 843010 - DNA, 75 bp, synthetic construct
  source 1..75: mol_type = other DNA
gggaatacagttcagaaaaatgaagtggctggtaacttcgtaaatgaggtattgaacaataatgaaactgttaga

SEQ ID NO: 843011 - DNA, 75 bp, synthetic construct
  source 1..75: mol_type = other DNA
gcctgaagatgctgaaacgccagatgtatggtcgagcaggatttgaactactcaggcagagagtaatgagtccac

SEQ ID NO: 843012 - DNA, 75 bp, synthetic construct
  source 1..75: mol_type = other DNA
cctacaaaaatcttgccaattcaatatattgcaggatagtgtaggcctgataagcgtagcgcatcaggcagtttt

SEQ ID NO: 843013 - DNA, 75 bp, synthetic construct
  source 1..75: mol_type = other DNA
ttcgtcgagaggatgagacgtttgctgtgcactggcagataaaagaaaagagagtcatcacgctgtgccgaaacg

SEQ ID NO: 843014 - DNA, 75 bp, synthetic construct
  source 1..75: mol_type = other DNA
cctccctcccctttgccggacatacgctgcattttgttgagtttgagccggcaagtttttgtgagcaggatttgc

SEQ ID NO: 843015 - DNA, 75 bp, synthetic construct
  source 1..75: mol_type = other DNA
atatgcctctgatacgtcttgttgccagtgagttgtcaccaaagaaatcacctgatccagaaccatctgtgcctg

SEQ ID NO: 843016 - DNA, 75 bp, synthetic construct
  source 1..75: mol_type = other DNA
agttgtcgtcggcgccggatacagcatctaccctgctcagggcaaacgctatggcttgtattttccgtccgccac

SEQ ID NO: 843017 - DNA, 75 bp, synthetic construct
  source 1..75: mol_type = other DNA
ttcagaaaatatccggaaatacaggttgtctcgcgtgatcgcagtggagtctatgcgacagcagcacgtgaaggt

SEQ ID NO: 843018 - DNA, 75 bp, synthetic construct
  source 1..75: mol_type = other DNA
atgtcctgaatgctctaagcgtagcgactctgttcatagttctcgtcggcgccggatacagcatctaccctgctc

SEQ ID NO: 843019 - DNA, 75 bp, synthetic construct
  source 1..75: mol_type = other DNA
gaaaattatgcttcccgatttattagtctgatgtgtgaaaaagaaccggagctgaaaatagcgcagcaactggta

SEQ ID NO: 843020 - DNA, 75 bp, synthetic construct
  source 1..75: mol_type = other DNA
gctttaagcgtagcgattctgttcatagttgtccccggcgccggatacagcatctaccctgcacaggccagacgc

SEQ ID NO: 843021 - DNA, 75 bp, synthetic construct
  source 1..75: mol_type = other DNA
acaaaccgcaagagaattgacagacaacattattacaccagcggaacacgagcgactcgcagactgcggtttagc

SEQ ID NO: 843022 - DNA, 75 bp, synthetic construct
  source 1..75: mol_type = other DNA
atgttctgcatcctcatcgtcagcagaatcttatctcagtggaaagtgcctcacataaatccccgctgtggtatt

SEQ ID NO: 843023 - DNA, 75 bp, synthetic construct
  source 1..75: mol_type = other DNA
atacttcctcaaagaaggcgataaaaaaacacttcaagcaattactcgaaaagctgcccccttattacgccagaa

SEQ ID NO: 843024 - DNA, 75 bp, synthetic construct
  source 1..75: mol_type = other DNA
tgccgagtcacttgctcccttcgccggttcacaccaacactcttcacaggcgttacaaaatttacaacgtcaact

SEQ ID NO: 843025 - DNA, 75 bp, synthetic construct
  source 1..75: mol_type = other DNA
cacgatcttctgccaatttttcgctttttcgcatcgcttttgcggtttttttgacctacatgaccgtagggttac

SEQ ID NO: 843026 - DNA, 75 bp, synthetic construct
  source 1..75: mol_type = other DNA
catcgctgtggagcgttgtcgggtttatctggaaaccagggttagggctggcactacaaggcgttggttttgcgg

SEQ ID NO: 843027 - DNA, 75 bp, synthetic construct
  source 1..75: mol_type = other DNA
gtctgatgtgtgaaaaagaaccggagttgaaaatagcgcagcaactggtactcgagttctatcgtattctgaaaa

SEQ ID NO: 843028 - DNA, 75 bp, synthetic construct
  source 1..75: mol_type = other DNA
accttctggaagctgctggatgaacgtctggtgctggcacgtaaggcgctgatgacccgtatcgcccgtctggaa

SEQ ID NO: 843029 - DNA, 75 bp, synthetic construct
  source 1..75: mol_type = other DNA
cgtttgtcaccgccagctacaacaaacatcgcaagaccgcagaagagtggagcatcccggacgccgaaggctacg

SEQ ID NO: 843030 - DNA, 75 bp, synthetic construct
  source 1..75: mol_type = other DNA
cggaacgcctaaaacaacaaacccgcaaaaaacggcatcagcgttggacagaggttatggccctgcataacaagg

SEQ ID NO: 843031 - DNA, 75 bp, synthetic construct
  source 1..75: mol_type = other DNA
gggattaatagccggaggtgaggccgggaaacgggcagcaacggcactgggtctccgttgcagtgcagatactct

SEQ ID NO: 843032 - DNA, 75 bp, synthetic construct
  source 1..75: mol_type = other DNA
ctacgacgcgttccagtcgctggaatatgaagtgaataccctgcacacagccaacggtcagacgccgtttgtcac

SEQ ID NO: 843033 - DNA, 75 bp, synthetic construct
  source 1..75: mol_type = other DNA
aaccgtatcgatgaagtgctggcgccgtttgttaccgccagctacaacaaacaccgtaaaacagccgaagagtgg

SEQ ID NO: 843034 - DNA, 75 bp, synthetic construct
  source 1..75: mol_type = other DNA
tgcgtgcgctgcgctattttacagagatccctgccctggatccgcaactgctcgactggctgttgctggaagatt

SEQ ID NO: 843035 - DNA, 75 bp, synthetic construct
  source 1..75: mol_type = other DNA
ctcgactggttgttgctggaagattccatgacgaaacgttttgagcagcagggaaaaacagtgagcgtgacgatg

SEQ ID NO: 843036 - DNA, 75 bp, synthetic construct
  source 1..75: mol_type = other DNA
cgttcccgcctgcgattaagcggtaaaccgctgttgctaacagaactgtttttaccggcgtcaccgttgtactaa

SEQ ID NO: 843037 - DNA, 75 bp, synthetic construct
  source 1..75: mol_type = other DNA
tcatgctatcacataaaggtagtgaagtgattgatgctgttatcgcaggccagaatcaggcttacagggaactaa

SEQ ID NO: 843038 - DNA, 75 bp, synthetic construct
  source 1..75: mol_type = other DNA
agacgggctcacgttatattaacggcacaggctctgacctggcgcagatgaaatacctgatggacaacgcggcag

SEQ ID NO: 843039 - DNA, 75 bp, synthetic construct
  source 1..75: mol_type = other DNA
atgagctactacgacgacctccgggccggcgacgaggagacgattcgtgagtggggacggccagtcaaattacgc

SEQ ID NO: 843040 - DNA, 75 bp, synthetic construct
  source 1..75: mol_type = other DNA
atcccatactgtactgacacaaaaacaggcagataatataagaaaaattctgcatactcagggactacatagcga

SEQ ID NO: 843041 - DNA, 75 bp, synthetic construct
  source 1..75: mol_type = other DNA
cgtttctttgataaaatggtgttgaaagaaaactctgcagatgatgttgttgctattggggcgatgattcagaaa

SEQ ID NO: 843042 - DNA, 75 bp, synthetic construct
  source 1..75: mol_type = other DNA
tcttcccgtaactggcgtcctccactggaagtccttaacagccagtgcacagtgatagccggagagcgtaaaaca

SEQ ID NO: 843043 - DNA, 75 bp, synthetic construct
  source 1..75: mol_type = other DNA
attacactgaaaccgaattcaaaaaaattattgaagacatcatcaattgtgaaggtgatgaaaaaaaacaggatg

SEQ ID NO: 843044 - DNA, 75 bp, synthetic construct
  source 1..75: mol_type = other DNA
aagatagctggtaacaataacgagctgttgatggaaataaaaaaggaatcccaaagcgaccatcaaatccccctg

SEQ ID NO: 843045 - DNA, 75 bp, synthetic construct
  source 1..75: mol_type = other DNA
ttgactttcaaagtctttttgaaatagaccaaatgcttcatctatttatgttagaaataaatgacgatatagcaa

SEQ ID NO: 843046 - DNA, 75 bp, synthetic construct
  source 1..75: mol_type = other DNA
attacaggttcatactgaaaggggggaccggaggcctgactgttcaggtcggtggcgcgggatattatgatattg

SEQ ID NO: 843047 - DNA, 75 bp, synthetic construct
  source 1..75: mol_type = other DNA
tacattattacggggccggatacagcacagatatcaccggcacaaatcatactggccggtgataatgaccatccg

SEQ ID NO: 843048 - DNA, 75 bp, synthetic construct
  source 1..75: mol_type = other DNA
cgagttctggtggcggtactgtcatctctggtggagggaataaccgctatattatcccccgcgatttaaaaactc

SEQ ID NO: 843049 - DNA, 75 bp, synthetic construct
  source 1..75: mol_type = other DNA
gggttcagactggaaagcgccgtcgctgaaggtatgcgctcagtagcaacccgtaccggaggcacaatggggaaa

SEQ ID NO: 843050 - DNA, 75 bp, synthetic construct
  source 1..75: mol_type = other DNA
ttaatcctctggggatgggctactcatccaataacggaaaaattacagagcaggtgatggtcagtgctgctgatg

SEQ ID NO: 843051 - DNA, 75 bp, synthetic construct
  source 1..75: mol_type = other DNA
gctgaaaacgccagacgatgaggtgccggtaatgaccattacccagaagggaataaacaccctggtaggtacagc

SEQ ID NO: 843052 - DNA, 75 bp, synthetic construct
  source 1..75: mol_type = other DNA
acctactgttccggtaaatatctcagatctaagtatcccaccctattcacgtctgtatctgatttttgaagggaa

SEQ ID NO: 843053 - DNA, 75 bp, synthetic construct
  source 1..75: mol_type = other DNA
gtgtattaccggattgacggaatggctggtgcggatatagcggataatgcccccggggaaacccgctgtatcctc

SEQ ID NO: 843054 - DNA, 75 bp, synthetic construct
  source 1..75: mol_type = other DNA
taggagagggagttctgaatctggcggagattgttgcggaatacgcccgtattcaaaaggaagaaacgtcaaaaa

SEQ ID NO: 843055 - DNA, 75 bp, synthetic construct
  source 1..75: mol_type = other DNA
ttttttcacagaagtgatggatacaactgacagggaaattctgaagaaagaactgagactgattctgataggaga

SEQ ID NO: 843056 - DNA, 75 bp, synthetic construct
  source 1..75: mol_type = other DNA
agatgattcgtgggacgcaggatgacctagtttcgtcacagactcgtctgcaaaggcaagcaacacgggttaaac

SEQ ID NO: 843057 - DNA, 75 bp, synthetic construct
  source 1..75: mol_type = other DNA
gaggaatatcatttatgtcacactgaagacctgtggctggagccggaatggacaaagcaaaacgccgactggcga

SEQ ID NO: 843058 - DNA, 75 bp, synthetic construct
  source 1..75: mol_type = other DNA
tccacatttgtactcccttataatttcaaaggtattggttttaacgataacattatatcctctgcacctgtagtc

SEQ ID NO: 843059 - DNA, 75 bp, synthetic construct
  source 1..75: mol_type = other DNA
attacgtgatatccgcaatagctggacggaatcggtatcaggtaataaaaccctgacgcgttatcaggatttgaa

SEQ ID NO: 843060 - DNA, 75 bp, synthetic construct
  source 1..75: mol_type = other DNA
aacgtattgtgccgtttcgttttccataaatttacaaatttattaccattgaagcgttttcccattcttaacctg

SEQ ID NO: 843061 - DNA, 75 bp, synthetic construct
  source 1..75: mol_type = other DNA
gatttaagtagtgtgcaaaacgtggaagtgctacgaggccccttctctgccctgtatggcaatgcgtctggcggc

SEQ ID NO: 843062 - DNA, 75 bp, synthetic construct
  source 1..75: mol_type = other DNA
tcgataggttatgtaccggaagatggctggtatgcaggcacggaagcgcgttatatgggcgatattatggcagat

SEQ ID NO: 843063 - DNA, 75 bp, synthetic construct
  source 1..75: mol_type = other DNA
gtggtcactcgttcgccgttgacgcgctttaaaaatatgagcgatggcatcaatgatctggtgaccgagctaagc

SEQ ID NO: 843064 - DNA, 75 bp, synthetic construct
  source 1..75: mol_type = other DNA
cggcgcacagaaaaatttagccaatgccagactgggcgtacacattgatgacgccagtaagttaaacctgatttt

SEQ ID NO: 843065 - DNA, 75 bp, synthetic construct
  source 1..75: mol_type = other DNA
cgaatccgcaacaagcgcctcgtgctgaacagtacgacacgcgtaaaaccatcaaacaaactcaggctggattac

SEQ ID NO: 843066 - DNA, 75 bp, synthetic construct
  source 1..75: mol_type = other DNA
gtgattactctgcaacgccattatcaggggatagacagccgctggacacaccgtggcgagctgggcgttccgctc

SEQ ID NO: 843067 - DNA, 75 bp, synthetic construct
  source 1..75: mol_type = other DNA
acgttcactaccggcctgaactacgaaaacatgagtgaaaaccgcaagggctacaataacttccgcctgaatagc

SEQ ID NO: 843068 - DNA, 75 bp, synthetic construct
  source 1..75: mol_type = other DNA
tgactgatgccctttgtggcatgcttgcggcggatatctcattatcccgtccggtttcgtcttctgatgattacg

SEQ ID NO: 843069 - DNA, 75 bp, synthetic construct
  source 1..75: mol_type = other DNA
gttctgtcattgtcaatgagtcaaacgggcgatattacgaacctgcgcccgggcgaaattatggtgtcggcatga

SEQ ID NO: 843070 - DNA, 75 bp, synthetic construct
  source 1..75: mol_type = other DNA
atgaagattgttttcgttcgacagaccgttttgcccgccctgcttgtcctttcccccgttgtttttgccgctgat

SEQ ID NO: 843071 - DNA, 75 bp, synthetic construct
  source 1..75: mol_type = other DNA
cctctatggcaacgcttccggtggggtgatgaatgtcaccacacaaacggggcaacaaccgtcaggcattgaagc

SEQ ID NO: 843072 - DNA, 75 bp, synthetic construct
  source 1..75: mol_type = other DNA
atggcgctagttgttatcgacgataaccagcgcgtctttcgcagttatggcgaaacgcgacctggcaataacgtt

SEQ ID NO: 843073 - DNA, 75 bp, synthetic construct
  source 1..75: mol_type = other DNA
ccccacgctttatggctgaatgggacatctttgctgatcaaacctcaatgattaccgctggttacaaccgctact

SEQ ID NO: 843074 - DNA, 75 bp, synthetic construct
  source 1..75: mol_type = other DNA
atggattcaacgcaaagtacctcgttgaaccagggagatattcgcccggagaaaatctctattcacggtgcgtcg

SEQ ID NO: 843075 - DNA, 75 bp, synthetic construct
  source 1..75: mol_type = other DNA
cgcgcggattatgtttcgaatgacagtactaccgccggtcgggcacagtataaaaacgttatcgataccgcagta

SEQ ID NO: 843076 - DNA, 75 bp, synthetic construct
  source 1..75: mol_type = other DNA
ttctcccgactttaaaaagaacttttacaccttgtcatttaatcaggaactcactgataactttggcgtgactgc

SEQ ID NO: 843077 - DNA, 75 bp, synthetic construct
  source 1..75: mol_type = other DNA
ttgtcgtttaatcaggaactcgctgataactttggcgttaccgccggtttatcgcgccgccagtctgatatcacc

SEQ ID NO: 843078 - DNA, 75 bp, synthetic construct
  source 1..75: mol_type = other DNA
tacaccagtgaaagcatcgagcgtttaccgacaggtaatggcaatatcagcgatttattaaaaacaaacccagcg

SEQ ID NO: 843079 - DNA, 75 bp, synthetic construct
  source 1..75: mol_type = other DNA
agaaggtgttccacgcggttttaccctgaactccaacgaaatcctcgaagcactgcaggaaccgctgaccggtat

SEQ ID NO: 843080 - DNA, 75 bp, synthetic construct
  source 1..75: mol_type = other DNA
ccggttctatggtggttgatatcggtggtggtaccactgaagttgctgttatctccttgaacggcgtggtttact

SEQ ID NO: 843081 - DNA, 75 bp, synthetic construct
  source 1..75: mol_type = other DNA
gcgttctggtttgtgtaccggttggcgcgacccaggttgaacgccgcgcaattcgtgaatccgcgcagggcgctg

SEQ ID NO: 843082 - DNA, 75 bp, synthetic construct
  source 1..75: mol_type = other DNA
gaaagtctattaattgaggcaagtaacagaagcggaagaagtcgatcgtttgaggcagtaataagacttaaagat

SEQ ID NO: 843083 - DNA, 75 bp, synthetic construct
  source 1..75: mol_type = other DNA
aagaaaccggcattccagttgttgttgctgaagacccgctgacctgtgtggcacgcggtggcggcaaagcactgg

SEQ ID NO: 843084 - DNA, 75 bp, synthetic construct
  source 1..75: mol_type = other DNA
gaacagtgcccgccggaactggcttccgacatctccgagcgcggcatggtgctcaccggtggtggcgcactgctg

SEQ ID NO: 843085 - DNA, 75 bp, synthetic construct
  source 1..75: mol_type = other DNA
tgcgacatcagcataccagaatgcaactcattgagcagcggcttgaaagtcttcagacaccggaagcgctggcag

SEQ ID NO: 843086 - DNA, 75 bp, synthetic construct
  source 1..75: mol_type = other DNA
aaggcgtctcagggggggatgggtgcccctgatattgcacgtcagtaccttcagcgttttcgccgtacgctcata

SEQ ID NO: 843087 - DNA, 75 bp, synthetic construct
  source 1..75: mol_type = other DNA
caatattcgcaaagagatgctgagtattcctgaaatggcgcaggctctcgattatttgattgaatatacagatat

SEQ ID NO: 843088 - DNA, 75 bp, synthetic construct
  source 1..75: mol_type = other DNA
atgctggaacagcagctaaacgcgctgccttgcgagctgggtcagcggattctggacgatctggctggccgcatg

SEQ ID NO: 843089 - DNA, 75 bp, synthetic construct
  source 1..75: mol_type = other DNA
gtaaaacaccggatttgaaaatcgaactcagggaaaaaaatgatgaaaaaaaaccgggtacgaaaatcgaactga

SEQ ID NO: 843090 - DNA, 75 bp, synthetic construct
  source 1..75: mol_type = other DNA
tgacacagggggtgaggacagggagtgtgcgtaatccggtggggtatgccttgcagctattaaaggccgcccgtg

SEQ ID NO: 843091 - DNA, 75 bp, synthetic construct
  source 1..75: mol_type = other DNA
tgtacatggatttaactgttaatgaagtcccaattatgcagggcgttccatgcctgtatgaaccgccccgggttt

SEQ ID NO: 843092 - DNA, 75 bp, synthetic construct
  source 1..75: mol_type = other DNA
tgtaaattatctgatgacaacgtgatttggaaagaatcaggtcaaagttctaaccgttggcggggcactggtaat

SEQ ID NO: 843093 - DNA, 75 bp, synthetic construct
  source 1..75: mol_type = other DNA
gttgccagcagtaatgcaccaacaagccagcctttcatttcaccggacgttgctaaattaaaaagggcatcgcct

SEQ ID NO: 843094 - DNA, 75 bp, synthetic construct
  source 1..75: mol_type = other DNA
gcaggccacgatagcgaaatcatcgatccaaccggtgctggcgactgctttggcgctacttttgtcactcttttc

SEQ ID NO: 843095 - DNA, 75 bp, synthetic construct
  source 1..75: mol_type = other DNA
ggagtacacccagcagttcgatgctcaggcagagcagatcgcgatgacactgccggaaggtgccagggctggttt

SEQ ID NO: 843096 - DNA, 75 bp, synthetic construct
  source 1..75: mol_type = other DNA
ggtattgatactgtaaacgacatcattaatcgctgggcaccgccgtctgacaataacaacactgacgcctatatt

SEQ ID NO: 843097 - DNA, 75 bp, synthetic construct
  source 1..75: mol_type = other DNA
acgggcaagggaagggcagttcaattctggtgacgtggggatggtacatccgcctacaaagcaaaaaccggttag

SEQ ID NO: 843098 - DNA, 75 bp, synthetic construct
  source 1..75: mol_type = other DNA
cggcacgcgcagctctttatgacaacgttgtttcggctgcaaatcaggtgataaagcagcggcagtcggatcctg

SEQ ID NO: 843099 - DNA, 75 bp, synthetic construct
  source 1..75: mol_type = other DNA
ccttggaatattcgataaccctgaggatgcgaccgcctatgctgagaaacttcacgaacagcaggatcagtatta

SEQ ID NO: 843100 - DNA, 75 bp, synthetic construct
  source 1..75: mol_type = other DNA
gcacggaagctggagaagttctcattcccaccgtcagtgatgatggaaaattgctttccgatgacgaagctattg

SEQ ID NO: 843101 - DNA, 75 bp, synthetic construct
  source 1..75: mol_type = other DNA
ttaatgagagtaaaaacgaccacggaaattactaccgccagtttttgtatccaaccaaatacgactggaactgga

SEQ ID NO: 843102 - DNA, 75 bp, synthetic construct
  source 1..75: mol_type = other DNA
cgtgccaatatcgctctggctcaggaggcatctcttaacctcagtcagataagcagcgatctgctgaataatcct

SEQ ID NO: 843103 - DNA, 75 bp, synthetic construct
  source 1..75: mol_type = other DNA
ctggttatctgctgaaagatgatggttctcccgttgttcttaatctgacacagaaacgtcagagattctccggag

SEQ ID NO: 843104 - DNA, 75 bp, synthetic construct
  source 1..75: mol_type = other DNA
atcgaaaatcagtttctgaacagactgattcagatcatcaccgatgcctcggcaggtcatggtgacatttttgcc

SEQ ID NO: 843105 - DNA, 75 bp, synthetic construct
  source 1..75: mol_type = other DNA
acaacgaatacaccggtaacggtgttacaacggcattcccttataccttcaggattttccagaaatctgatttag

SEQ ID NO: 843106 - DNA, 75 bp, synthetic construct
  source 1..75: mol_type = other DNA
aagattgccatgtaggtatcattggtgattctataacggatggagcctatagttcaggatggaccccgaacccga

SEQ ID NO: 843107 - DNA, 75 bp, synthetic construct
  source 1..75: mol_type = other DNA
acgcaccgagattatctctcaggctgacggtacaggcgagaccatgaatgttggcttcactgaccgctcaggccg

SEQ ID NO: 843108 - DNA, 75 bp, synthetic construct
  source 1..75: mol_type = other DNA
gcacagatgcggaaatgtggtctgcccgtctgaacgaactgggctactggcgaatcggcatattccacggtcaaa

SEQ ID NO: 843109 - DNA, 75 bp, synthetic construct
  source 1..75: mol_type = other DNA
acaaattcaactggctgaagagtcggacctggcgctgaccagagccacctatcagcgtaagatacgcaggaactt

SEQ ID NO: 843110 - DNA, 75 bp, synthetic construct
  source 1..75: mol_type = other DNA
atgcagaatgattacaatgaccttaagccaattgccgaaatgatgtacccgaatcaagctgtagaggaattaaaa

SEQ ID NO: 843111 - DNA, 75 bp, synthetic construct
  source 1..75: mol_type = other DNA
ctgcatgggcgatttgtgatgttttttattccagtgattctgaaacttactctgagatattaccggtactcactg

SEQ ID NO: 843112 - DNA, 75 bp, synthetic construct
  source 1..75: mol_type = other DNA
ttttcttgaagctgttaagcaaggtctgataccgtcagattctgtcttgctggttgaatcgttagaccgtgtaag

SEQ ID NO: 843113 - DNA, 75 bp, synthetic construct
  source 1..75: mol_type = other DNA
actgaagaaaaagcttcaggaagagctgacgaccttcagtgagcttcttctgaaagagagaatgcagtatgccgc

SEQ ID NO: 843114 - DNA, 75 bp, synthetic construct
  source 1..75: mol_type = other DNA
gtaccgcattaggcggtgtgatgaccatggtgggcgaaccgcaaaacctgattatcgccaaagctgctggctggc

SEQ ID NO: 843115 - DNA, 75 bp, synthetic construct
  source 1..75: mol_type = other DNA
tggtgagtttattcgtggctgggatgatgggcgcggcgttgattcaaggcgtgcggtgctgtcaacacaagagcc

SEQ ID NO: 843116 - DNA, 75 bp, synthetic construct
  source 1..75: mol_type = other DNA
tgcatggtatccggctaacagcacagcggaacaggtgacaaccatcaacgttaaaaacggagagcatacagcatg

SEQ ID NO: 843117 - DNA, 75 bp, synthetic construct
  source 1..75: mol_type = other DNA
tgatgagtctgcaggatggcgctatcagcgcttatgatctgcttgatttgctgcgcgaagctgaaccgcaagcca

SEQ ID NO: 843118 - DNA, 75 bp, synthetic construct
  source 1..75: mol_type = other DNA
ctgtgcggcatgcgtggaagtggaagcgtgtcgtcatcctgaacagtgccagcatgatcactctgtgcaggtgaa

SEQ ID NO: 843119 - DNA, 75 bp, synthetic construct
  source 1..75: mol_type = other DNA
agactgggcaaagccgtcctggacatcatgaccgacggaaaactttcacatgtgaaagttcctgaacgacaagac

SEQ ID NO: 843120 - DNA, 75 bp, synthetic construct
  source 1..75: mol_type = other DNA
ggatatcgtagactggaacaatttgacgtacgggatgttgcatcgaaacttatggatgtcatctctcaaaggaat

SEQ ID NO: 843121 - DNA, 75 bp, synthetic construct
  source 1..75: mol_type = other DNA
acagacaaagttttccctaatcccgttaattccagtctggggttaatgactgctttttttcgaagcatacctgga

SEQ ID NO: 843122 - DNA, 75 bp, synthetic construct
  source 1..75: mol_type = other DNA
cgattttctgcttgaacaaggttttgtgcataaagttgagtccaccaacagctatgtgctctgtcacctgttcga

SEQ ID NO: 843123 - DNA, 75 bp, synthetic construct
  source 1..75: mol_type = other DNA
tattgatcagcaactgttctcaccaattattcattttgtcctacaggcatcggagcacgcccagctgtcgttgtt

SEQ ID NO: 843124 - DNA, 75 bp, synthetic construct
  source 1..75: mol_type = other DNA
atactgggatagatccgcgtatagctaaggcagaaaaaattgctgaagcggaatcacagcaggatgaatctcgta

SEQ ID NO: 843125 - DNA, 75 bp, synthetic construct
  source 1..75: mol_type = other DNA
taaggcggaaaaaattgctgaagcggaatcacagcaggctgaatctcgtaaaacgaaggcaaccttttcaagcgc

SEQ ID NO: 843126 - DNA, 75 bp, synthetic construct
  source 1..75: mol_type = other DNA
ctgaataacagtggcgccgttcagggggcttccctgatgctcggcagtacaacgctcagcaacagtggctccctg

SEQ ID NO: 843127 - DNA, 75 bp, synthetic construct
  source 1..75: mol_type = other DNA
gaaaagttgattttagtggttttgaaataatactcaacacttttaaagatgtttttgaacattataaaaaaatat

SEQ ID NO: 843128 - DNA, 75 bp, synthetic construct
  source 1..75: mol_type = other DNA
gatttgttggttgtgaatcgcaaccagtggccttaatggcaggaggaatcgcctccctaaaatccttgattcaga

SEQ ID NO: 843129 - DNA, 75 bp, synthetic construct
  source 1..75: mol_type = other DNA
tttacctgaagggaaaaaccaagttttcctttgggatacggacgtaacaagcttggcatgtcgagcaactcgtgg

SEQ ID NO: 843130 - DNA, 75 bp, synthetic construct
  source 1..75: mol_type = other DNA
ggcggaagttggcttgattggtttgtcagtcattattctggcgacatcattgaccggtgtcaccgatgaacatgc

SEQ ID NO: 843131 - DNA, 75 bp, synthetic construct
  source 1..75: mol_type = other DNA
ctacggtgaaacgctgccggagaaagtccgcgaagtgctgcagcagtttgacgatcaaagccgccaccagcgtac

SEQ ID NO: 843132 - DNA, 75 bp, synthetic construct
  source 1..75: mol_type = other DNA
gaacgatctatatcaacgaagcaaaggcagccatggagagtggcgttatcacactgaagcaatatgaacttctgg

SEQ ID NO: 843133 - DNA, 75 bp, synthetic construct
  source 1..75: mol_type = other DNA
atcaggaaagcggattactgattgaaggttttgacactccgccctgtgcgatgatgccacacggcaaaccgtggt

SEQ ID NO: 843134 - DNA, 75 bp, synthetic construct
  source 1..75: mol_type = other DNA
tactgaccctcgtcggattactctgcgtagagtttactcttgcccctgtaactgaatggtttatgcaaatggggt

SEQ ID NO: 843135 - DNA, 75 bp, synthetic construct
  source 1..75: mol_type = other DNA
cgcgttcctggatgccttaaccgtagtggccgtggtgatcagcgttgcggtgggtttttatggtatttatcaccg

SEQ ID NO: 843136 - DNA, 75 bp, synthetic construct
  source 1..75: mol_type = other DNA
cagctggaagcagaagaagtcaggcggcacatggggtgcaatcattcgtcaaccgctgggcattgccagcatgat

SEQ ID NO: 843137 - DNA, 75 bp, synthetic construct
  source 1..75: mol_type = other DNA
ttcactgaaaaaatgcgcgcccatgcggtagtggcagatacgtcttcctggaaacagaaaaaatccgctggtacc

SEQ ID NO: 843138 - DNA, 75 bp, synthetic construct
  source 1..75: mol_type = other DNA
cgacggcaagtcgcgactacgggattattcttcccggagcacaggcttatttgccgaaggagtacgctgccgatt

SEQ ID NO: 843139 - DNA, 75 bp, synthetic construct
  source 1..75: mol_type = other DNA
tttttacggcagcggtgccacggggatggcgctggttgttatcgacggtaaccagcgcgtctttcgcagttatgg

SEQ ID NO: 843140 - DNA, 75 bp, synthetic construct
  source 1..75: mol_type = other DNA
tgtctgacctgctgaagaaaaacttccctaacctgcgtgttgaaactgcagttgagtattcaactgatgcgggtg

SEQ ID NO: 843141 - DNA, 75 bp, synthetic construct
  source 1..75: mol_type = other DNA
ggggtgaacgtgagctggatatgtacggcgctgcgcgtatcggttacgcagcagagcttaacgtagcatctgctc

SEQ ID NO: 843142 - DNA, 75 bp, synthetic construct
  source 1..75: mol_type = other DNA
tcgcactgacggtcaggtcgcctatggtaagagcaaattcaatgcctccggcaaaaatgcggaagtatgggctgc

SEQ ID NO: 843143 - DNA, 75 bp, synthetic construct
  source 1..75: mol_type = other DNA
acttatgagtatgaaggattcggcgtgggtgcaacctatgctaaatcagatcgcactgacggtcaggtcgcctat

SEQ ID NO: 843144 - DNA, 75 bp, synthetic construct
  source 1..75: mol_type = other DNA
tgtttctataatttttgtcatttgtggtttgtattttttggggatgggaggagattttttctcattgctattttg

SEQ ID NO: 843145 - DNA, 75 bp, synthetic construct
  source 1..75: mol_type = other DNA
gcccgtggcttactgactccccacactattgggtacaatatgctatgtgtagactttcaataggagatttagact

SEQ ID NO: 843146 - DNA, 75 bp, synthetic construct
  source 1..75: mol_type = other DNA
aggtgtatctgatagaagagcccatggcagcagccataggggcaggacttccggtgactgaacctgtggccaaca

SEQ ID NO: 843147 - DNA, 75 bp, synthetic construct
  source 1..75: mol_type = other DNA
tattcagaaagtgcacaataggggatattttgtaaaaccaaggattatcataagtgtaccttctgggactaccca

SEQ ID NO: 843148 - DNA, 75 bp, synthetic construct
  source 1..75: mol_type = other DNA
gttgacgcgctttaaaaatatgagcgatggcatcaatgacctggtgaccgagctaagcgggaataaaccgttggt

SEQ ID NO: 843149 - DNA, 75 bp, synthetic construct
  source 1..75: mol_type = other DNA
gaaaatctgccggttgccggggagtatatgcatcgggatatctacgatatcgcagagaaatacggcaaagatacc

SEQ ID NO: 843150 - DNA, 75 bp, synthetic construct
  source 1..75: mol_type = other DNA
gaagttttatcgcgagaacgatccgaccaacagtatgaatccggggatcggtaaaaccagtaagcgaaaaaactg

SEQ ID NO: 843151 - DNA, 75 bp, synthetic construct
  source 1..75: mol_type = other DNA
acatcgaagccgacacccccgcacgttataacgctgacccggatcgactgtttgaagcctccggctgcgccggta

SEQ ID NO: 843152 - DNA, 75 bp, synthetic construct
  source 1..75: mol_type = other DNA
ggttcacaccaacagtcttcacaggcgttacaaaatttacaacgtcaactgggattaatcgccggaggtgaggct

SEQ ID NO: 843153 - DNA, 75 bp, synthetic construct
  source 1..75: mol_type = other DNA
ttgtctcgcgtgatcgcagtggggtctgtgcgacagcagcacgtgaaggtgtaccacaggccagacaggtggtcg

SEQ ID NO: 843154 - DNA, 75 bp, synthetic construct
  source 1..75: mol_type = other DNA
tccgtccgccactggtactgcagtaacccggcttgttcacgaaaaatttttgccgagtcgtgtgttcccttcggt

SEQ ID NO: 843155 - DNA, 75 bp, synthetic construct
  source 1..75: mol_type = other DNA
ccgacatgcactttatgttgcaaaaagaggtggtgaatcgtctggttgcaggaccgaacagcaaggcgtatggtc

SEQ ID NO: 843156 - DNA, 75 bp, synthetic construct
  source 1..75: mol_type = other DNA
atgagagggaaactgatatccgctattcatgtggcaaagcgcgagcttgccctggatgatgagacctacacattc

SEQ ID NO: 843157 - DNA, 75 bp, synthetic construct
  source 1..75: mol_type = other DNA
tgagttatcccgcgtgctggatgttttcaaaaaacgcggttttaaagtgcgtcagaacccggttaaccgggcctt

SEQ ID NO: 843158 - DNA, 75 bp, synthetic construct
  source 1..75: mol_type = other DNA
gtttcgcggcagcaggcgcggcaattcgttatcaggccgtgcattccgatgaggtcgaagacattctggcgctgg

SEQ ID NO: 843159 - DNA, 75 bp, synthetic construct
  source 1..75: mol_type = other DNA
acatgctgattggcgacggcatcaaaacgggccttagtaaaatgggttttagcgtcgactggtttacacaaggtc

SEQ ID NO: 843160 - DNA, 75 bp, synthetic construct
  source 1..75: mol_type = other DNA
cttgatactcaccgtcccctcgtcctgcttcccggccgtgatcagcgtacgctggcgacctggttcagaaaatat

SEQ ID NO: 843161 - DNA, 75 bp, synthetic construct
  source 1..75: mol_type = other DNA
gttatcggtatttcactccgtacaatcgcaaggaagcggaaatgttcagatggcacaattaggaaggaactgcaa

SEQ ID NO: 843162 - DNA, 75 bp, synthetic construct
  source 1..75: mol_type = other DNA
tgatggcgctggcgctgtataccatctggttgctggcgacgatgggcaacatccctcgtccggagtttatcggca

SEQ ID NO: 843163 - DNA, 75 bp, synthetic construct
  source 1..75: mol_type = other DNA
atgagtatggagctgatggttaaagcgatgaaaattcgagtgggtattggtggttcaggtatggcgatgtttgcc

SEQ ID NO: 843164 - DNA, 75 bp, synthetic construct
  source 1..75: mol_type = other DNA
ttatgcccctgacccgggcggcggatggctcgctgggcgtacgcgcggtgggcagtatgaacggcagtgccggtc

SEQ ID NO: 843165 - DNA, 75 bp, synthetic construct
  source 1..75: mol_type = other DNA
gtgaaatgcctggtgtacggtacgctgatggcgctggcgctgtataccatctggttgctggcgacgatgggtaac

SEQ ID NO: 843166 - DNA, 75 bp, synthetic construct
  source 1..75: mol_type = other DNA
atggcaacactaaccaccacccaaacgtcaccgtcgctgcttggcggcgtggtgatcatcggcggcaccattatt

SEQ ID NO: 843167 - DNA, 75 bp, synthetic construct
  source 1..75: mol_type = other DNA
tgtctggcatcgtttggttatcacggtaacgtgccaagcctgatgaagtattacggcaaagatccgaaaaccatc

SEQ ID NO: 843168 - DNA, 75 bp, synthetic construct
  source 1..75: mol_type = other DNA
cctgactatcctttttttctgcaaaatgattgtctgaaaaaatttgctgttgcgcatgataaattttggttgaat

SEQ ID NO: 843169 - DNA, 75 bp, synthetic construct
  source 1..75: mol_type = other DNA
caatattagtgactgttctaatggggagagtatttgaaccgttagttgaactgtatatcgatatagtgtggaccc

SEQ ID NO: 843170 - DNA, 75 bp, synthetic construct
  source 1..75: mol_type = other DNA
aaaggcgagccgagcgaacacctcattaaagatttgttcgcggatggcgttattgttgcggttaatccaatcgga

SEQ ID NO: 843171 - DNA, 75 bp, synthetic construct
  source 1..75: mol_type = other DNA
gcggtgtatgacatggcccgcaagggggcgcaggatgagattcaggcgcagatgcgtgatggcggcgtattttcc

SEQ ID NO: 843172 - DNA, 75 bp, synthetic construct
  source 1..75: mol_type = other DNA
ttcttggacatggctctgcattttgtcgttgttttaattttcatggcgaaatctatcagataaggatggagaatg

SEQ ID NO: 843173 - DNA, 75 bp, synthetic construct
  source 1..75: mol_type = other DNA
cctgactatcatttttttctgaaaaatgattatatgaaaaaaattgctgttgcgcatgataatttttggttgaat

SEQ ID NO: 843174 - DNA, 75 bp, synthetic construct
  source 1..75: mol_type = other DNA
gtctctttcggaaagattgcgcttcagaaagtggatggacggaattatgcacagcccacaaccgtggaagtcaat

SEQ ID NO: 843175 - DNA, 75 bp, synthetic construct
  source 1..75: mol_type = other DNA
cagcgggaacaacgtgcagcttgcgggtggcaatatcaccagcagcggcagcagcatcaacgcacagaatgacct

SEQ ID NO: 843176 - DNA, 75 bp, synthetic construct
  source 1..75: mol_type = other DNA
tctccagtgtgatgatgatgaaggcatcatgatagacggttgtgtggctcggttgcgaaagtataaaccagagga

SEQ ID NO: 843177 - DNA, 75 bp, synthetic construct
  source 1..75: mol_type = other DNA
ccggacgggttcacgttatctcaacggactgggttcagacacggaacagatgcggtatctgatggataacgcggc

SEQ ID NO: 843178 - DNA, 75 bp, synthetic construct
  source 1..75: mol_type = other DNA
ttttacctcatggcaaaaagtcccggattcagtgtgatgatgacgaaggcattatgatagatagttgtgtggctc

SEQ ID NO: 843179 - DNA, 75 bp, synthetic construct
  source 1..75: mol_type = other DNA
atggggcgtgatatgtatgaggttttagatcgctggggggcatgggctgcagcagaaaatagcggtgtcgattgg

SEQ ID NO: 843180 - DNA, 75 bp, synthetic construct
  source 1..75: mol_type = other DNA
atgccgaatgtcgagactcatctggtgatgtcgaagtgggcgaaaaccaccattgaactggaaacgccttacagc

SEQ ID NO: 843181 - DNA, 75 bp, synthetic construct
  source 1..75: mol_type = other DNA
agtacggttaatgctgctctctatgttgtgcgatatggtcaacaacaaaccgcagcaagataaaccttccgataa

SEQ ID NO: 843182 - DNA, 75 bp, synthetic construct
  source 1..75: mol_type = other DNA
atgaatgagttcaagaggtgtatgcgcgtgtttagtcattctccctttaaagtacggttaatgctgctctctatg

SEQ ID NO: 843183 - DNA, 75 bp, synthetic construct
  source 1..75: mol_type = other DNA
atgcaagagctaaattaagttgtgcttcagcttcatctttaagaccgatgattttgttgagattgctacgggggg

SEQ ID NO: 843184 - DNA, 75 bp, synthetic construct
  source 1..75: mol_type = other DNA
aacggattcaggtagacgagccttacatcctgatcgtgccctcttacggcggcggcggtacggctggcgcagtgc

SEQ ID NO: 843185 - DNA, 75 bp, synthetic construct
  source 1..75: mol_type = other DNA
catactgtggtgggagtcagtcaccatcaacggacaaacagtcatggtcccgaaactgtatctgtcgccggaaga

SEQ ID NO: 843186 - DNA, 75 bp, synthetic construct
  source 1..75: mol_type = other DNA
aaatggaaaagaaaaaacgggagtttattaaaaaactggaatcgataacgccaagagaattcttccgttttttaa

SEQ ID NO: 843187 - DNA, 75 bp, synthetic construct
  source 1..75: mol_type = other DNA
agaaaaaagaccttatcagtctttaacagaaatacatcagcatctctctggattaccaactcttgctgatgcagt

SEQ ID NO: 843188 - DNA, 75 bp, synthetic construct
  source 1..75: mol_type = other DNA
ggggacgacatatacgccaatagaagtgagttgctgtagtccaacggctaaagccattgagaaacccgtcgttaa

SEQ ID NO: 843189 - DNA, 75 bp, synthetic construct
  source 1..75: mol_type = other DNA
cccgttctgtagttgctcgacaatacccatgttacgtggattgttgtcagcgaaagccgggtttggtccgactct

SEQ ID NO: 843190 - DNA, 75 bp, synthetic construct
  source 1..75: mol_type = other DNA
gctcttcaggatgaaataaaagaaaaagcggatgaaacagttcaggtttcccgggcttatacagataaaagtgta

SEQ ID NO: 843191 - DNA, 75 bp, synthetic construct
  source 1..75: mol_type = other DNA
tatgccgggcagattaaatctgctatcgaaagtaagttctatgacgcatcgtcctatgcaggcaaaacctgtacg

SEQ ID NO: 843192 - DNA, 75 bp, synthetic construct
  source 1..75: mol_type = other DNA
ttgatgagcaagtgtatattgagttttccggattaccgccgaaaggaaaaatccgtatcgctggagaaaatggtt

SEQ ID NO: 843193 - DNA, 75 bp, synthetic construct
  source 1..75: mol_type = other DNA
tcataaaatagaaggtgttgattactccacatcagaaacaacagtcacgcactatttcacggaaggccgcacaaa

SEQ ID NO: 843194 - DNA, 75 bp, synthetic construct
  source 1..75: mol_type = other DNA
gtgcgcatgggggtaagtctggacatacgttcaaccgggataaagcagaaaggtgatggacccgccatgattttt

SEQ ID NO: 843195 - DNA, 75 bp, synthetic construct
  source 1..75: mol_type = other DNA
caaccgggataaagcagaaaggtgatggacccgccatgatttttggggtggttatgctcgcggaaagcagagact

SEQ ID NO: 843196 - DNA, 75 bp, synthetic construct
  source 1..75: mol_type = other DNA
atggcttccggggttattaacggtaatgaatttaatcagcagggggaattccatgagcaaagtacgcgttatttt

SEQ ID NO: 843197 - DNA, 75 bp, synthetic construct
  source 1..75: mol_type = other DNA
gatattattgcaggcacatcggcagcggtgacgtatacagatgtaacagcgcttgcacttcaggatgagataaag

SEQ ID NO: 843198 - DNA, 75 bp, synthetic construct
  source 1..75: mol_type = other DNA
tcaaatacagcagcgataaggaataacagtcatcgtctggatttgacggaagcctggcagaagatggcgacagag

SEQ ID NO: 843199 - DNA, 75 bp, synthetic construct
  source 1..75: mol_type = other DNA
gctgcccaatatgaccgttgcggaaaacatgtttctcggacgcgaaccgcgtaaacgtaacctgatcgtcgacga

SEQ ID NO: 843200 - DNA, 75 bp, synthetic construct
  source 1..75: mol_type = other DNA
tatccagaatctggcgtggagattgcccaccgttcgttgtttgcacagcaccctgaattacgtccgacaggaaat

SEQ ID NO: 843201 - DNA, 75 bp, synthetic construct
  source 1..75: mol_type = other DNA
aacgacgccagtgcgtttgaattacagctcacctatcggtctatggaagagagtgccagtgagctttccgcacgc

SEQ ID NO: 843202 - DNA, 75 bp, synthetic construct
  source 1..75: mol_type = other DNA
gatgcgatagtaaaccagataattttgagcaccctcacgctcccggatttaaccccagagctttcactgtatgcc

SEQ ID NO: 843203 - DNA, 75 bp, synthetic construct
  source 1..75: mol_type = other DNA
ttcgccagagcctggcattgaccgatattgaaagttgcaaagcggtgctcaacgatgccagggcctttgatttac

SEQ ID NO: 843204 - DNA, 75 bp, synthetic construct
  source 1..75: mol_type = other DNA
gaagcgcatccctgctggctccaccttaattatgtacaccatgatagcgcccaatggctggcgacaacaccgctg

SEQ ID NO: 843205 - DNA, 75 bp, synthetic construct
  source 1..75: mol_type = other DNA
cggcgtacacgccttatctgaccgacaaacgaattatccacaatccgctgatggatatttttccagcaattacac

SEQ ID NO: 843206 - DNA, 75 bp, synthetic construct
  source 1..75: mol_type = other DNA
acatccaaaaaattgacaaaaacagccatcaatgaagccctgcgcagattgaaaaaagcgggaattgataaacca

SEQ ID NO: 843207 - DNA, 75 bp, synthetic construct
  source 1..75: mol_type = other DNA
agcggggatctttctcccgccttcatgatcgatctcgcccataaggatcttggtatcgcccttgatgtcgccaac

SEQ ID NO: 843208 - DNA, 75 bp, synthetic construct
  source 1..75: mol_type = other DNA
tctcgggcatgagctttggctttcgttcccgtaaggatgtatgggatacgacagtcgatccatgtgtgcgtactg

SEQ ID NO: 843209 - DNA, 75 bp, synthetic construct
  source 1..75: mol_type = other DNA
atccatgcgtgcgcaccgtgctggtggcggaactgtacgaaattaccgttacatccgtaccggcttaccctgatt

SEQ ID NO: 843210 - DNA, 75 bp, synthetic construct
  source 1..75: mol_type = other DNA
cgcacgttaatcagtttatggacgctggatggttctccgctgcgacaggaggatattttcgccctctttgccatg

SEQ ID NO: 843211 - DNA, 75 bp, synthetic construct
  source 1..75: mol_type = other DNA
atccgcaaggtgtggaaaaacgagattcgccagagcctgatgctgacagagccagccagctgcgaagcggtgctc

SEQ ID NO: 843212 - DNA, 75 bp, synthetic construct
  source 1..75: mol_type = other DNA
taggacaaatgggttcgccaatggcgagcaatttattgcagcaagggcaccaacttcgcgtctttgatgtgaatg

SEQ ID NO: 843213 - DNA, 75 bp, synthetic construct
  source 1..75: mol_type = other DNA
atgaagttgcttcatggttcggctctgtcatcaggtcagacgccgggtcagttatccgaacaaaacgagagccag

SEQ ID NO: 843214 - DNA, 75 bp, synthetic construct
  source 1..75: mol_type = other DNA
cggacatcctgctgtatcaaactaatctggtaccggtgggtgaagaccagaaacagcacctggaactgagccgcg

SEQ ID NO: 843215 - DNA, 75 bp, synthetic construct
  source 1..75: mol_type = other DNA
gaccaagaagatgtccaagtctgacgataaccgcaataacgttatcggcctgctggaagatccgaaatcggtagt

SEQ ID NO: 843216 - DNA, 75 bp, synthetic construct
  source 1..75: mol_type = other DNA
tatcatctgaacaaccagctgttagctgttgcagcagcgagaatctgggcaatgtgaatctcacaacgaatacca

SEQ ID NO: 843217 - DNA, 75 bp, synthetic construct
  source 1..75: mol_type = other DNA
tgttactggattttgttggcttcgaacgatacgtcataccggcgaaggggagcaacgcgagctgctgcaaaccgg

SEQ ID NO: 843218 - DNA, 75 bp, synthetic construct
  source 1..75: mol_type = other DNA
gcgacgccgccgggatgttcctgttcttagccgtagagctatcgttactttttcttcttatcagtgctggtgtca

SEQ ID NO: 843219 - DNA, 75 bp, synthetic construct
  source 1..75: mol_type = other DNA
cattggtaactacatgggtgcgctgcgtcagtgggtaaacatgcaggatgactaccattgtatttactgtatcgt

SEQ ID NO: 843220 - DNA, 75 bp, synthetic construct
  source 1..75: mol_type = other DNA
atggtgtgacaattggtgatggagcagttattggagctggggcggttgttaccaaagatgttcaaccttatacta

SEQ ID NO: 843221 - DNA, 75 bp, synthetic construct
  source 1..75: mol_type = other DNA
ctgtcattgcgggcggcatcattacacctctggcagcgtcatgccgccgaagacgtcggttcatttgacgatctc

SEQ ID NO: 843222 - DNA, 75 bp, synthetic construct
  source 1..75: mol_type = other DNA
ggcaactaacaatgattgtgatgtcgaagagttatttgttaaacaaaatcgtcatctcaaagtgatcaatgtcat

SEQ ID NO: 843223 - DNA, 75 bp, synthetic construct
  source 1..75: mol_type = other DNA
gatcacccatgagctggcggatctgccgccggagttgtgggcgtaccttaaagagcatcgtttcttcgcgatgat

SEQ ID NO: 843224 - DNA, 75 bp, synthetic construct
  source 1..75: mol_type = other DNA
ggctgcagggaatggagtggtttgctatccagggacattactggcgggaagtcagtattgaacaactggtcgccg

SEQ ID NO: 843225 - DNA, 75 bp, synthetic construct
  source 1..75: mol_type = other DNA
cttcttctggcatttaatgcaaaaagattctggccgaccattgatggatgcgctgatcacctttctttcccgtaa

SEQ ID NO: 843226 - DNA, 75 bp, synthetic construct
  source 1..75: mol_type = other DNA
atacagaataaaggctggtttaaatcttttcttaaattatgctgcgaatctaatccgtggaacgatgtagttatt

SEQ ID NO: 843227 - DNA, 75 bp, synthetic construct
  source 1..75: mol_type = other DNA
ggaagataacgggaacggtatttatctgttatttcaccccgattgccctctgaagggtattgatttattaatttc

SEQ ID NO: 843228 - DNA, 75 bp, synthetic construct
  source 1..75: mol_type = other DNA
aactgaaacagaaaaactcgtcaatctatataattcattttttactgataaagtggttatctgggatgaatcagt

SEQ ID NO: 843229 - DNA, 75 bp, synthetic construct
  source 1..75: mol_type = other DNA
cgtttttcgttatgtgttgataaggttttataatgtttttaaggggaatttgttttttgttgagattgtctcgtg

SEQ ID NO: 843230 - DNA, 75 bp, synthetic construct
  source 1..75: mol_type = other DNA
gatcgtagtggtcatcgcgccaaatttacccgtaccggtagaatgttgttagagaaagggcgagagattctccat

SEQ ID NO: 843231 - DNA, 75 bp, synthetic construct
  source 1..75: mol_type = other DNA
ctgatgacggaaaatcagccattcaaagaaaaattattatgacaagcctctcattctcttgtcatttccccccca

SEQ ID NO: 843232 - DNA, 75 bp, synthetic construct
  source 1..75: mol_type = other DNA
atgaaatttatctcgaactggcaagacctgccgtcgctccttcttcccgattcagttatgtctgttttgagaaaa

SEQ ID NO: 843233 - DNA, 75 bp, synthetic construct
  source 1..75: mol_type = other DNA
cgtcggtaagaatgcagcagagattgcagcagcaaaagctgaggttacagcggtgaattctgcgaaacccggctg

SEQ ID NO: 843234 - DNA, 75 bp, synthetic construct
  source 1..75: mol_type = other DNA
acgatggtggatgccgtcgctgacctttatcaacaatttgtgaaacactacacaggtggagactacgccattttt

SEQ ID NO: 843235 - DNA, 75 bp, synthetic construct
  source 1..75: mol_type = other DNA
atattccaagaatctacaaacatgccgggtgggaatgaattcttacagagattccttactacagagcaagcaagg

SEQ ID NO: 843236 - DNA, 75 bp, synthetic construct
  source 1..75: mol_type = other DNA
ctgttttcttgttgagctttttcatgatattgattcgttttttataaatcaacgattaagtaagctggaaagttt

SEQ ID NO: 843237 - DNA, 75 bp, synthetic construct
  source 1..75: mol_type = other DNA
atggcaaccattgcatttctcgggctggggcagatgggtagcccaatggctaacaatctattgcaaaaagggcat

SEQ ID NO: 843238 - DNA, 75 bp, synthetic construct
  source 1..75: mol_type = other DNA
actgaaacgtctggttgagcgttatgctgagtttgatcaggtggcatttctggctttccatcgttttgactgtgt

SEQ ID NO: 843239 - DNA, 75 bp, synthetic construct
  source 1..75: mol_type = other DNA
ctcacgtcatgacacttcatggcgacacacgcatcgacaattactattggctgcgggatgacacgcgctcgcagc

SEQ ID NO: 843240 - DNA, 75 bp, synthetic construct
  source 1..75: mol_type = other DNA
aagaaaaatacgtttaatgattatcttgatgcctgcgatgcattgttaaaactgggctatggctctccttcgctc

SEQ ID NO: 843241 - DNA, 75 bp, synthetic construct
  source 1..75: mol_type = other DNA
gtttgaccgccacggtttgctggctttgctggctggccgttttcttgcatttgtccgcacgctgctaccaaccat

SEQ ID NO: 843242 - DNA, 75 bp, synthetic construct
  source 1..75: mol_type = other DNA
ttgatgcctgcgacgcattgttaacgctgggatatggctctccttcactctgttatgcgatgggcggtagtgcag

SEQ ID NO: 843243 - DNA, 75 bp, synthetic construct
  source 1..75: mol_type = other DNA
ggtgtcgaagttccggtttcgctggtttatcatcgcaagcatttccagaaaggacataatccactgttggtgtac

SEQ ID NO: 843244 - DNA, 75 bp, synthetic construct
  source 1..75: mol_type = other DNA
atggcttcacagcaggctttgcaggatagaatattaaaagagatcatcgatcgtataccgcaaaaagaaatttct

SEQ ID NO: 843245 - DNA, 75 bp, synthetic construct
  source 1..75: mol_type = other DNA
ggttcaccctgagtggtgctatgcaacatgccgcaatcgtatagatatgtggctgagaatagctgagtttattct

SEQ ID NO: 843246 - DNA, 75 bp, synthetic construct
  source 1..75: mol_type = other DNA
gcaaaatggctacgcgtttaaacgaaatatatcctgaatggtgtatgagtacttgtgaaaagcgtatctctaatt

SEQ ID NO: 843247 - DNA, 75 bp, synthetic construct
  source 1..75: mol_type = other DNA
tcgtcccaaagaacctaactggacagcctgggcaaatgaaattcgcctgatgtgtgtgcaggatggtcgtactca

SEQ ID NO: 843248 - DNA, 75 bp, synthetic construct
  source 1..75: mol_type = other DNA
cgttcctgatgatcctgccaattgccttgttaaccgctggcttgttaggcacgctgtttgtggtgattaaaaaaa

SEQ ID NO: 843249 - DNA, 75 bp, synthetic construct
  source 1..75: mol_type = other DNA
ggctgctggctaagttatattcaggggcgctggttagggaataccaaaacggtgaaaggctggctggcacagctt

SEQ ID NO: 843250 - DNA, 75 bp, synthetic construct
  source 1..75: mol_type = other DNA
actcaaagtcagtgagggatggcaaaatggatggtgggcaagtcttgaaagtaatacctggaacactattcatga

SEQ ID NO: 843251 - DNA, 75 bp, synthetic construct
  source 1..75: mol_type = other DNA
cagtgaatatgccatttatcaacgccagtctgcattcactgaagagtgggacgaatgggaaacgttgcttgatgc

SEQ ID NO: 843252 - DNA, 75 bp, synthetic construct
  source 1..75: mol_type = other DNA
gctcaccgtaaatatccatatctgctcaaaggattggctattcagcgcagtaatcaagtgtggtctacggatata

SEQ ID NO: 843253 - DNA, 75 bp, synthetic construct
  source 1..75: mol_type = other DNA
tcacatggattagctttctctcctacgcactgaccggtgcgttggttattgtcaccgggatggtgatgggaaata

SEQ ID NO: 843254 - DNA, 75 bp, synthetic construct
  source 1..75: mol_type = other DNA
gtacgctgtggtattcgtgatgtgcttcctgctgggttttgtcagccgtcaccgtcagcataacaccctgacctc

SEQ ID NO: 843255 - DNA, 75 bp, synthetic construct
  source 1..75: mol_type = other DNA
tgaccgggaagcggatatctggcattacctgcattataaagtcagccacggacagcgcttcgtggtgcgtgctgc

SEQ ID NO: 843256 - DNA, 75 bp, synthetic construct
  source 1..75: mol_type = other DNA
gctatgcaaaccataagaaatgggcgacggaaaatgcatttgttctacaataccatatgacgcccgatattacgc

SEQ ID NO: 843257 - DNA, 75 bp, synthetic construct
  source 1..75: mol_type = other DNA
gaggtctggttcccaaatcgtttgctaccaatgaaagcagatatttttagtcgggttgcctggcaattacgtacc

SEQ ID NO: 843258 - DNA, 75 bp, synthetic construct
  source 1..75: mol_type = other DNA
atgccgattcagcaacttccgcttatgaaaggtgtcggcaaagacttccgaaacgctgactatatcgactatctg

SEQ ID NO: 843259 - DNA, 75 bp, synthetic construct
  source 1..75: mol_type = other DNA
tgaaaggtgtcggcaaagatttccgaaacgccgactacatcgactatctgccagtgaatatgctggcaattttga

SEQ ID NO: 843260 - DNA, 75 bp, synthetic construct
  source 1..75: mol_type = other DNA
gggcatggcggcaaatccggtcgctttaaatcttacgaaggtgtggcaatggaatatgcttttctggtcgcgctg

SEQ ID NO: 843261 - DNA, 75 bp, synthetic construct
  source 1..75: mol_type = other DNA
actgtgtccgaggcacgcgctggcatcgcccgatatctgaacttctacaacaccagacgcccacattggcactgt

SEQ ID NO: 843262 - DNA, 75 bp, synthetic construct
  source 1..75: mol_type = other DNA
tacaacaccagacgcccacattggcactgttgcaaagttagcgatgaggcagccttttgtcttattcaaaggcct

SEQ ID NO: 843263 - DNA, 75 bp, synthetic construct
  source 1..75: mol_type = other DNA
tcttcgctcattcccggggaagaaatctaccagcaacgcatggctgttcgtcgcatctttgtccatcgcccacgc

SEQ ID NO: 843264 - DNA, 75 bp, synthetic construct
  source 1..75: mol_type = other DNA
cactctggaaagtgtctggattcagggaaaactacgtatgtgggggcgctggtcgtatattggcggcggtagatc

SEQ ID NO: 843265 - DNA, 75 bp, synthetic construct
  source 1..75: mol_type = other DNA
tttggcttcggactggtaaatccacttgataaatcagttgtttgcagaacactcagcgcacggtactatcgtgat

SEQ ID NO: 843266 - DNA, 75 bp, synthetic construct
  source 1..75: mol_type = other DNA
ggctttgggcaattaagccgcgcacagcaggtgctgggaattggctatttgtatgttgaggcgcagttacggcag

SEQ ID NO: 843267 - DNA, 75 bp, synthetic construct
  source 1..75: mol_type = other DNA
gctcgtcgttcgtgattaacgagcaaatttatcgcggcagtttgtatggtagcggacagattggtcacaccatcg

SEQ ID NO: 843268 - DNA, 75 bp, synthetic construct
  source 1..75: mol_type = other DNA
attaaataacgtgtgtaaggttatggaaccacttcttttaggccatcaactagtgggtcaaataagaaaaaaaat

SEQ ID NO: 843269 - DNA, 75 bp, synthetic construct
  source 1..75: mol_type = other DNA
ggtttcgagtgcgacactcagggtacgctcttctttgatgtggccaggatcatccgggcaaaacaacctgcaatt

SEQ ID NO: 843270 - DNA, 75 bp, synthetic construct
  source 1..75: mol_type = other DNA
ttcagacctcagcaccgggaacgtatcgtgctggtcggtttccgccgtgatctgaaactcaatgatggcttttcg

SEQ ID NO: 843271 - DNA, 75 bp, synthetic construct
  source 1..75: mol_type = other DNA
gcggtttcctggcgctactgcgtaaacaattaattgttatgcgtcgctatatggcgcctcaacgtgatgtttatg

SEQ ID NO: 843272 - DNA, 75 bp, synthetic construct
  source 1..75: mol_type = other DNA
acaattaattgtgatgcgtcgctatatggcaccgcaacgtgatgtttatgctcgtcttgccagtgagcgtctgcc

SEQ ID NO: 843273 - DNA, 75 bp, synthetic construct
  source 1..75: mol_type = other DNA
cattaatggtagtacggatgaacgccccgatcagttagtcgctatgcgggtttacatggacggacggttaattgt

SEQ ID NO: 843274 - DNA, 75 bp, synthetic construct
  source 1..75: mol_type = other DNA
tacgacgtctcggtggtgaccaacaccggggaagaagaggtgccgattgaagtctccggcgaagtggaagatgtg

SEQ ID NO: 843275 - DNA, 75 bp, synthetic construct
  source 1..75: mol_type = other DNA
gggcatcagctattgcggcatttgggtcagcaatagctgcttttattagtttgcgcacaagtaaaaagcttggat

SEQ ID NO: 843276 - DNA, 75 bp, synthetic construct
  source 1..75: mol_type = other DNA
tttacgaaaaaccaaatggttaaaatcgagcgtcaggtaattactgaggcttggcaagaatgggaggcctatcaa

SEQ ID NO: 843277 - DNA, 75 bp, synthetic construct
  source 1..75: mol_type = other DNA
aaacgaagtgggtaaggtgacgtccgtcactctgcccaaactgacgcgcaaaaccgacagctaccgggggggcgc

SEQ ID NO: 843278 - DNA, 75 bp, synthetic construct
  source 1..75: mol_type = other DNA
gatattacagaattatttagctcatctatatcaactagtgacacaagagaagatatagagtttgtggatgtattc

SEQ ID NO: 843279 - DNA, 75 bp, synthetic construct
  source 1..75: mol_type = other DNA
acctcatgaaagataacccagaatctaacttggctaaatttactaaaaatatcccgggtaacgcagagaatcata

SEQ ID NO: 843280 - DNA, 75 bp, synthetic construct
  source 1..75: mol_type = other DNA
ttagataagtgcgtgttttctggtgatctgaataaagatattattgaaccatgcaagtcagttcctgttaaggct

SEQ ID NO: 843281 - DNA, 75 bp, synthetic construct
  source 1..75: mol_type = other DNA
actcaagcgaacaatacgtagtttccctggcaacaggtgatcaaagcgtatttgaaaagcttgggtttgcttatg

SEQ ID NO: 843282 - DNA, 75 bp, synthetic construct
  source 1..75: mol_type = other DNA
acctccgtcacgctaagcagcaccagcgttgaaacggatgatcaggttttcgctgaaattcttgtgacaagcacc

SEQ ID NO: 843283 - DNA, 75 bp, synthetic construct
  source 1..75: mol_type = other DNA
gtcatcactgaaaggggactttaccgatagtgctgagctacatcttgttctgcacgatatatcaggcaatccgat

SEQ ID NO: 843284 - DNA, 75 bp, synthetic construct
  source 1..75: mol_type = other DNA
tatcgcattttgcatcgcagtaacgacatcaccgctctgcgcccctacctgagcgacaaactggcaaccctgctt

SEQ ID NO: 843285 - DNA, 75 bp, synthetic construct
  source 1..75: mol_type = other DNA
ttggaaacccaaaaacatatgtatcaaacacagcagtggggtgaagatgagctcacatcagttattattgctttt

SEQ ID NO: 843286 - DNA, 75 bp, synthetic construct
  source 1..75: mol_type = other DNA
agaaatcgctgtctaattatgatggctttcattcacggttttagggccagtgaacttcttgatttacgtttatcc

SEQ ID NO: 843287 - DNA, 75 bp, synthetic construct
  source 1..75: mol_type = other DNA
gtgaagatttatattccccttcaacagcatacccctctatcgaattgccaccagctggagcaggcgcaggggctg

SEQ ID NO: 843288 - DNA, 75 bp, synthetic construct
  source 1..75: mol_type = other DNA
ctgttggtgtaccggttccatggcccaccgccacaccgccagcaggctggttacagtgcaacggagctacgttca

SEQ ID NO: 843289 - DNA, 75 bp, synthetic construct
  source 1..75: mol_type = other DNA
aagataactaaccaccacggcaatggcggtaacgctgatgatatttcggctggtgtctccggttcacctcccaaa

SEQ ID NO: 843290 - DNA, 75 bp, synthetic construct
  source 1..75: mol_type = other DNA
gacaatctggctctggcagaaagcttactggggcacccgtttgccatctccgggcgtgtagtccacggtgatgaa

SEQ ID NO: 843291 - DNA, 75 bp, synthetic construct
  source 1..75: mol_type = other DNA
cggaaacctgtcgcattgaagcaggtgacaggcaaatgaccgtcaatatgggacaaattagcagtaaccggtttc

SEQ ID NO: 843292 - DNA, 75 bp, synthetic construct
  source 1..75: mol_type = other DNA
tcatgcccaatgaatacatcactcatctggaagcaacgccaggaatgctggtgcacattggcttatcgctctttt

SEQ ID NO: 843293 - DNA, 75 bp, synthetic construct
  source 1..75: mol_type = other DNA
gtgggtgcagtcaaagcagccacagatgcgggttgtgcctctgctcgtcagatcggcgatgtcatcgctacccat

SEQ ID NO: 843294 - DNA, 75 bp, synthetic construct
  source 1..75: mol_type = other DNA
atggtgatgctttttgaacctcaaccactggaactgtttgctactgataaagccccggcacggctcacccggctg

SEQ ID NO: 843295 - DNA, 75 bp, synthetic construct
  source 1..75: mol_type = other DNA
atggtcttccccgacagatgacgatgagctgccggaagtcaccggacctgcgtggatagtcgacaaggtggcgca

SEQ ID NO: 843296 - DNA, 75 bp, synthetic construct
  source 1..75: mol_type = other DNA
gcccgtatcgcgtttgaatctgcccgcaagcgtcgtcgcaaagtcacctcaatcgacaaagccaatgtgctgcaa

SEQ ID NO: 843297 - DNA, 75 bp, synthetic construct
  source 1..75: mol_type = other DNA
aaaaagcgtttgataccgaggtgtatcaccgttttgagatcgagcgcattgcccgtatcgcgtttgaatctgccc

SEQ ID NO: 843298 - DNA, 75 bp, synthetic construct
  source 1..75: mol_type = other DNA
ggaagcattctgtccgctgcgtgctgatattgctgctaacggcttcgacatcctgtgcgtgcgtgagttaaccgg

SEQ ID NO: 843299 - DNA, 75 bp, synthetic construct
  source 1..75: mol_type = other DNA
agttggcgtttaatcaggaaatgcctccactgatgagtattgaacgtaaaatgttccacatcacgcaaattggtg

SEQ ID NO: 843300 - DNA, 75 bp, synthetic construct
  source 1..75: mol_type = other DNA
tactggggcacccgtttgccatctccgggcgtgtggtccacggtgatgaattagggcgcactataggtttcccga

SEQ ID NO: 843301 - DNA, 75 bp, synthetic construct
  source 1..75: mol_type = other DNA
tcgccttggcgaattttatcttcatggtagcgacggtaaaccactggattatacacaggcgagatactggtatga

SEQ ID NO: 843302 - DNA, 75 bp, synthetic construct
  source 1..75: mol_type = other DNA
tggcgaagtgaaatcctgccatgtcatcccacggccgcacagcgatgttgaggccattttaccaaaatctgcata

SEQ ID NO: 843303 - DNA, 75 bp, synthetic construct
  source 1..75: mol_type = other DNA
tgcccatcgtcgaactgtggaaagtgttcaacgtcacgggcgcgaaaactgaagcgactcagggaattgtggtga

SEQ ID NO: 843304 - DNA, 75 bp, synthetic construct
  source 1..75: mol_type = other DNA
gacgtcgttaaacgtaatatccaggagatgggcggtcatgtcgaaatccagtcgaagcagggtactggcactacg

SEQ ID NO: 843305 - DNA, 75 bp, synthetic construct
  source 1..75: mol_type = other DNA
tttccacggcggagcaggttaccgatgtttccgggcgtggcgtcggcatggatgtcgttaaacgtaatatccagg

SEQ ID NO: 843306 - DNA, 75 bp, synthetic construct
  source 1..75: mol_type = other DNA
cggcatgtccgtacgcgttgcggatgaagttttcattctgccgctgaatgctgttatggaatcactgcaaccccg

SEQ ID NO: 843307 - DNA, 75 bp, synthetic construct
  source 1..75: mol_type = other DNA
ggcgtcggcatggacgtcgttaaacgtaatatccaggagatgggcggtcatgtcgaaatccagtcgaagcagggt

SEQ ID NO: 843308 - DNA, 75 bp, synthetic construct
  source 1..75: mol_type = other DNA
tgtggttgccaaaagtgaaccgcaagatgagcagagtcgctgtcagtcaccgcgtcgaattatcctctcgcgcct

SEQ ID NO: 843309 - DNA, 75 bp, synthetic construct
  source 1..75: mol_type = other DNA
aaccggaaacagcaccgcatcagcagcagtgggagcacagagcgggaagaatgctgttgagaataactacctcag

SEQ ID NO: 843310 - DNA, 75 bp, synthetic construct
  source 1..75: mol_type = other DNA
atgcctcaggtttttgaatccgttaaagaagaatatttcacagtcaaacttgctgcattaaaaaaacataaaagc

SEQ ID NO: 843311 - DNA, 75 bp, synthetic construct
  source 1..75: mol_type = other DNA
aaacaaaagggttagttggcgcaattgaagctgcagatgccatggttaaatccgccaacgtgcaactggttggct

SEQ ID NO: 843312 - DNA, 75 bp, synthetic construct
  source 1..75: mol_type = other DNA
agcatggcgctgatgttctctcctgtagtgataatccttccggtgaagcctgtaagcgggggcaggctgaaaata

SEQ ID NO: 843313 - DNA, 75 bp, synthetic construct
  source 1..75: mol_type = other DNA
ctgtcataaccgcttaccgcaatgtgtttatccaggatgatccgggaatgcatttccgtcgggttatccgcaacg

SEQ ID NO: 843314 - DNA, 75 bp, synthetic construct
  source 1..75: mol_type = other DNA
agtggcgacacactgaacaatcagggctggcaggaggggaccaccggaaaggaaacggtctggcggcttgcctca

SEQ ID NO: 843315 - DNA, 75 bp, synthetic construct
  source 1..75: mol_type = other DNA
gataaccacgggcagccactgccgcctgcgacagttgaaggttgtgagcaagccgatgccgtgctgtttggctcg

SEQ ID NO: 843316 - DNA, 75 bp, synthetic construct
  source 1..75: mol_type = other DNA
ccggtaatgaccattacccagaagggaataaacaccctggtaggtacagccgctggtaaagaccgactaatcggt

SEQ ID NO: 843317 - DNA, 75 bp, synthetic construct
  source 1..75: mol_type = other DNA
atttcgtcgtttcactatttcatcggataaaaaattttctttaaaactgatgtgccatcaggggatggtccgcat

SEQ ID NO: 843318 - DNA, 75 bp, synthetic construct
  source 1..75: mol_type = other DNA
ctctggtggagggaataaccgctatattatcccccgcgatttaaaaactccgctgacactgacgctgtctaatag

SEQ ID NO: 843319 - DNA, 75 bp, synthetic construct
  source 1..75: mol_type = other DNA
gggcgattacaaatggagcgggggccgggtttggatatggggttggcaattatgtggtgaagcctgttgcaaata

SEQ ID NO: 843320 - DNA, 75 bp, synthetic construct
  source 1..75: mol_type = other DNA
ttgtcgccgttgcggcgtttaacattattacctcactagggctgatggtaatggagaagcagggcgaagtagcga

SEQ ID NO: 843321 - DNA, 75 bp, synthetic construct
  source 1..75: mol_type = other DNA
ggcggttggggaaacggaatctcactgatggcttcggcatcgacgaaatcgtttttgttgcttttaacgaatgta

SEQ ID NO: 843322 - DNA, 75 bp, synthetic construct
  source 1..75: mol_type = other DNA
tcactcgagtccacgaaagcggatcagcagaatttcggcgcgtggcagcggggatggaagctgatgctgccgcta

SEQ ID NO: 843323 - DNA, 75 bp, synthetic construct
  source 1..75: mol_type = other DNA
tcactcgagtccacgaaagcggatcagcagaatttcggagcgtggccgcggggatggaagctgatgctgccgcta

SEQ ID NO: 843324 - DNA, 75 bp, synthetic construct
  source 1..75: mol_type = other DNA
aaatagcgcagcaactggcactcgagttctaccgtattctgaaaacccaaaataaatcacagctaagcagctcgt

SEQ ID NO: 843325 - DNA, 75 bp, synthetic construct
  source 1..75: mol_type = other DNA
aagatttgaaactacgtcgtgcaatatctgatggtgtattaagatatgttaataaccaaaatattgatgaagtta

SEQ ID NO: 843326 - DNA, 75 bp, synthetic construct
  source 1..75: mol_type = other DNA
ccagctttccagggatttcaacagcggtttcgtttttcgctgacaccatggagggagtggttaaaagagcaacga

SEQ ID NO: 843327 - DNA, 75 bp, synthetic construct
  source 1..75: mol_type = other DNA
tcactcgagtccacgaaagcggatcagcagaatttcggcgcgtggccgcggggatggaagctgatgctgcagcta

SEQ ID NO: 843328 - DNA, 75 bp, synthetic construct
  source 1..75: mol_type = other DNA
acatccggtactaccttgatggttatcctgatgctgtacctcttcggtggcccggtactggaaggcttctcgctg

SEQ ID NO: 843329 - DNA, 75 bp, synthetic construct
  source 1..75: mol_type = other DNA
cggcatctatttcggtcagccaaaaggccgcgaaggtagcggacaatatgaaaaagcgtttgataccgaggtgta

SEQ ID NO: 843330 - DNA, 75 bp, synthetic construct
  source 1..75: mol_type = other DNA
tattgccgggggacggtattggtccggaagtgatgacccaggcgctgaaagtgctggatgccgtgcgcaaccgct

SEQ ID NO: 843331 - DNA, 75 bp, synthetic construct
  source 1..75: mol_type = other DNA
aatcattgcaggatgggtcaatgtaatcaccatggggcagggctggaaaggaaccgttggatggaatgctgccgg

SEQ ID NO: 843332 - DNA, 75 bp, synthetic construct
  source 1..75: mol_type = other DNA
ggatgtcgaactggcgcatatgtacatcgacaacgccaccatgcagctgattaaagatccatcacagtttgacgt

SEQ ID NO: 843333 - DNA, 75 bp, synthetic construct
  source 1..75: mol_type = other DNA
gataaccacgggcagccgctgccgcctgcgacggttgaaggttgtgagcaagccgatgccgtgctgtttggctcg

SEQ ID NO: 843334 - DNA, 75 bp, synthetic construct
  source 1..75: mol_type = other DNA
tgatcactggctcgatgggcatgttgccttccgccagcctgaacgagcaaggttttggtctgtatgaaccggcgg

SEQ ID NO: 843335 - DNA, 75 bp, synthetic construct
  source 1..75: mol_type = other DNA
gaagccatcatcatgctggaggttgaaggttatgtcgaagtgcgcaaaggctccggcattcatgtgatttcaaac

SEQ ID NO: 843336 - DNA, 75 bp, synthetic construct
  source 1..75: mol_type = other DNA
ctggataaatgtgataaccatggggcagggctggaaagggacaatagcctggaatgcggcaggtggagcattaac

SEQ ID NO: 843337 - DNA, 75 bp, synthetic construct
  source 1..75: mol_type = other DNA
gggtcaatgtaatcaccatggggcagggctggaaaggaaccgttggatggaatgctgccggaggggcactgggta

SEQ ID NO: 843338 - DNA, 75 bp, synthetic construct
  source 1..75: mol_type = other DNA
agcgacgacttcgagttcaatgccgaccgctatctattcgccgaaaacccggtggtgcatctcgatacagccacc

SEQ ID NO: 843339 - DNA, 75 bp, synthetic construct
  source 1..75: mol_type = other DNA
agttcaatgccgaccgctatctattcgccgaaaacccggtggtgcatctcgatacagccaccagcggcagtaaat

SEQ ID NO: 843340 - DNA, 75 bp, synthetic construct
  source 1..75: mol_type = other DNA
agttcaatgccgaccgctatctgttcgccgaaaatcccgttgtgcatcttgatacggccaccagcggcagcaaat

SEQ ID NO: 843341 - DNA, 75 bp, synthetic construct
  source 1..75: mol_type = other DNA
ggcaagcctggaggtgagttaggctataacgcttctaaagcgcgtaaatacgcgattgagcagatgatagcccgg

SEQ ID NO: 843342 - DNA, 75 bp, synthetic construct
  source 1..75: mol_type = other DNA
actttggctggtaagctatctacgcctatggaagacacgatgtgggacatcatgaggatggcgatcatcctgtcc

SEQ ID NO: 843343 - DNA, 75 bp, synthetic construct
  source 1..75: mol_type = other DNA
cgtgcttatgagaacagcttctctggcaatcaggacgttatggtcatgagtccggacagcgatttcttccgctac

SEQ ID NO: 843344 - DNA, 75 bp, synthetic construct
  source 1..75: mol_type = other DNA
tccgcaatgtgcaccatgtacatgtatggatggtaggcgagaagccggtgatgacgctgcatgtgcaggtgatcc

SEQ ID NO: 843345 - DNA, 75 bp, synthetic construct
  source 1..75: mol_type = other DNA
acctgccagaagataataatgctcgtcgcttgttgtatgctttcggcgtgactgccgggtttatgctggtagaag

SEQ ID NO: 843346 - DNA, 75 bp, synthetic construct
  source 1..75: mol_type = other DNA
gcttctggttctgcgtagcgcgtggcgactgttgaaagatagcgtgaatgaattacttgaaggtgcaccggtatc

SEQ ID NO: 843347 - DNA, 75 bp, synthetic construct
  source 1..75: mol_type = other DNA
gcacgtttcgtcttagcgacacaaaaacgctgcaattgcatcagctaaatttaaacgcgggtgatagttgggcgt

SEQ ID NO: 843348 - DNA, 75 bp, synthetic construct
  source 1..75: mol_type = other DNA
caaaaaacggcgataacgaatacatggcatgggatatgactctcggttggatcgtctggcagcaacgagctggta

SEQ ID NO: 843349 - DNA, 75 bp, synthetic construct
  source 1..75: mol_type = other DNA
tgcagcactggaaaacaaagtaataccagtgtcagctgaactgccgccagcgaacgaaagtattctgttatttga

SEQ ID NO: 843350 - DNA, 75 bp, synthetic construct
  source 1..75: mol_type = other DNA
atgcgtaagtcagttatcgcgattatcatcatcgtgctggtagtgctttacatgtctgtctttgtcgtcaaagaa

SEQ ID NO: 843351 - DNA, 75 bp, synthetic construct
  source 1..75: mol_type = other DNA
atgtcggagcctgacttgctgattttagatgaaccgttcgatggtcttgatgttgcctcacgtcagcaactggca

SEQ ID NO: 843352 - DNA, 75 bp, synthetic construct
  source 1..75: mol_type = other DNA
ggtgaaacgcaattgttgtttgtttcgcaccatgctgaagatgcacccgcttgtattacccatcgactggagttc

SEQ ID NO: 843353 - DNA, 75 bp, synthetic construct
  source 1..75: mol_type = other DNA
caacgctaccagcggtctaatgatgtcttattcttctatgatgatgggactggcgacagcgtcagtcaccatcta

SEQ ID NO: 843354 - DNA, 75 bp, synthetic construct
  source 1..75: mol_type = other DNA
ctggcattactgcgtgaaagtgggctattgctggaccgcaagcaaggaaagtgggttcattaccgtttatcgccg

SEQ ID NO: 843355 - DNA, 75 bp, synthetic construct
  source 1..75: mol_type = other DNA
ctggcgatgctacgtgaaagcggattgttgctggatcgcaagaatgggaaatgggttcactaccgcttatctccg

SEQ ID NO: 843356 - DNA, 75 bp, synthetic construct
  source 1..75: mol_type = other DNA
aaaaaaccttgttaaacttatttatggagtgtctattgacaagtcagaacaagatgaaatgttcttagatttcaa

SEQ ID NO: 843357 - DNA, 75 bp, synthetic construct
  source 1..75: mol_type = other DNA
atttcgacaacgtctctaataccctgattccgatgggaaccaaagaggacccgttctggcagggttccggtcgca

SEQ ID NO: 843358 - DNA, 75 bp, synthetic construct
  source 1..75: mol_type = other DNA
ggagcaaatactcaaggataaatacactatctggtgtggggagcagttgtggaccgggtttgtctttgccggaac

SEQ ID NO: 843359 - DNA, 75 bp, synthetic construct
  source 1..75: mol_type = other DNA
ggatatgcagcggcgtgaggaagtcaatatcaaccacagccaccgtcacgatgagcaggatgatgtcgagattgg

SEQ ID NO: 843360 - DNA, 75 bp, synthetic construct
  source 1..75: mol_type = other DNA
tactcaggataagccgattacgatttgttgtggtaatgacaagcttttttctgcgttatgccaggcactggagct

SEQ ID NO: 843361 - DNA, 75 bp, synthetic construct
  source 1..75: mol_type = other DNA
tttcgcccaggtacaatggaaaaactggggttttcatgggaaacgctacaagaaatcaacccgcgcctcatatat

SEQ ID NO: 843362 - DNA, 75 bp, synthetic construct
  source 1..75: mol_type = other DNA
tgcagaacctcagaagttgctgaacatttaggggtaagtgcttatcaggccagacattacctgcagtgtctggag

SEQ ID NO: 843363 - DNA, 75 bp, synthetic construct
  source 1..75: mol_type = other DNA
ctatctatggtatggcgacccaagctaatagagcacaaattgaagcactagaatctgatgtttcaacagtagtca

SEQ ID NO: 843364 - DNA, 75 bp, synthetic construct
  source 1..75: mol_type = other DNA
cactccagtgatataaaatcttggttaatggaaaacatttctgcggagatagctgatttaagggacaaacaaagc

SEQ ID NO: 843365 - DNA, 75 bp, synthetic construct
  source 1..75: mol_type = other DNA
gtgcccgtcgcgccgttattaagtgtggctgaggccattaatttgccacaaactcaggcgagaaatatgttgatt

SEQ ID NO: 843366 - DNA, 75 bp, synthetic construct
  source 1..75: mol_type = other DNA
aattcgatgcgcttgaagctaaatgtgcagcactggaaaacaaagtaataccagtgtcaactgaactgccaccag

SEQ ID NO: 843367 - DNA, 75 bp, synthetic construct
  source 1..75: mol_type = other DNA
atgagcgaatatttcagaatacttcaggggctgcctgacggctcctttacccgcaaacatgccgaagccgttgcc

SEQ ID NO: 843368 - DNA, 75 bp, synthetic construct
  source 1..75: mol_type = other DNA
atggtctggcgtacctggaattttgaggacgatgccgggtactggatgaaccatgccatccgtgatttcggcatt

SEQ ID NO: 843369 - DNA, 75 bp, synthetic construct
  source 1..75: mol_type = other DNA
ttgatctggcgctcctggaattttgaggactgtgccgggtactggatgaaccatgtcatccggaatttcggcatt

SEQ ID NO: 843370 - DNA, 75 bp, synthetic construct
  source 1..75: mol_type = other DNA
caccggtaacactggctcaggcacgcactgtcgccgctgggtaccagaacgtctttatcgaaaacctccagccag

SEQ ID NO: 843371 - DNA, 75 bp, synthetic construct
  source 1..75: mol_type = other DNA
gaagcaaagcgactgcgagagcaggaaattcaaagtgtaattgagtcgattcagaagcagattacttattacaat

SEQ ID NO: 843372 - DNA, 75 bp, synthetic construct
  source 1..75: mol_type = other DNA
cctggtcgggcgtaggccgacagccacgctggcttaaagaagcactgttgaatggaatgaagaaagaagattttc

SEQ ID NO: 843373 - DNA, 75 bp, synthetic construct
  source 1..75: mol_type = other DNA
agcgggcgcggaatacggcttcgacattaccagtacgcaaactttttgcgaaggcggcgtgcgtatcagcagtac

SEQ ID NO: 843374 - DNA, 75 bp, synthetic construct
  source 1..75: mol_type = other DNA
cgggaaaaactgcgttatcttgccgagtgcggcgtagattacgtgctgtgcgtgcgttttgacaggcgctttgcg

SEQ ID NO: 843375 - DNA, 75 bp, synthetic construct
  source 1..75: mol_type = other DNA
aaggtggtgtgcgtatcagcagcaccgccgtgcgtcaggcactgacggatgacaatctggtcctggccgaaagtt

SEQ ID NO: 843376 - DNA, 75 bp, synthetic construct
  source 1..75: mol_type = other DNA
cgtacctggaattttgaggacggtgccgggtactggatgaatcatgccatcagggatttcgggattcttaagtaa

SEQ ID NO: 843377 - DNA, 75 bp, synthetic construct
  source 1..75: mol_type = other DNA
atgagcgaatatttcagaatgcttcagggactgcctgacggctcctttacccgcgaacaggccgaagccgttgtc

SEQ ID NO: 843378 - DNA, 75 bp, synthetic construct
  source 1..75: mol_type = other DNA
catcggcacgcgcccaacggtagcaggcattcgccagcaactggaagtgcatgttctggatgttgcaatggacct

SEQ ID NO: 843379 - DNA, 75 bp, synthetic construct
  source 1..75: mol_type = other DNA
ggctatacatttatgctgaagagaaatcatgctttagtcgagagggctggagaggttaagaaatctattgatagc

SEQ ID NO: 843380 - DNA, 75 bp, synthetic construct
  source 1..75: mol_type = other DNA
aaacctttggcccaatgggcggcttgctggtgacttatctgatgctctttgccgcgctgatgttgattatcggct

SEQ ID NO: 843381 - DNA, 75 bp, synthetic construct
  source 1..75: mol_type = other DNA
gctgctctaatgttgattattggctgggaaaaacgcttcttccgccgtgcggcaccgcagactgctaaggagatc

SEQ ID NO: 843382 - DNA, 75 bp, synthetic construct
  source 1..75: mol_type = other DNA
atgaccacctttacccaaaaagaactgattaaagaaatgaaagatcgcatcagcagcctcgacgtccgagacgat

SEQ ID NO: 843383 - DNA, 75 bp, synthetic construct
  source 1..75: mol_type = other DNA
gctggtgacatatttgatgctgttcgctgcgttaatgttggttatcggctgggagaaacgcttcttccgccgtgc

SEQ ID NO: 843384 - DNA, 75 bp, synthetic construct
  source 1..75: mol_type = other DNA
gtacagttaggcgtagaaccgaaaataatgtgggcaggtccgaacgctgtcattggtgggttactgtttggtttt

SEQ ID NO: 843385 - DNA, 75 bp, synthetic construct
  source 1..75: mol_type = other DNA
tgattgaacgcgcgcaaatctgctttacctcggcgttccgcgatatgtggatcaccggacgaacccatatggcga

SEQ ID NO: 843386 - DNA, 75 bp, synthetic construct
  source 1..75: mol_type = other DNA
gagttctgttagtgttactgctgcgaacagaatatcgctgacagctcaaacaatcagtgcgtgggctccgggtgg

SEQ ID NO: 843387 - DNA, 75 bp, synthetic construct
  source 1..75: mol_type = other DNA
gcagtggacacttcaggtcggggaccttgaaaacgtcaatatcactcactgggcagtaatgccaaaagcaccgga

SEQ ID NO: 843388 - DNA, 75 bp, synthetic construct
  source 1..75: mol_type = other DNA
ttttgacgcgcagctgcgggcgcagtttggtggttcgctggcgcagaaagtgattgacgcgacaggtaatcaaca

SEQ ID NO: 843389 - DNA, 75 bp, synthetic construct
  source 1..75: mol_type = other DNA
atgaccacctttacccaaaaagaactgattaaagaaatcaaagatcgcatcagcagcctcgacgtgcgagacgat

SEQ ID NO: 843390 - DNA, 75 bp, synthetic construct
  source 1..75: mol_type = other DNA
atgaccacctttacccaaaaagaactgattaaagaaatcaaagaacgcatcagcagcctcgacgttcgagacgat

SEQ ID NO: 843391 - DNA, 75 bp, synthetic construct
  source 1..75: mol_type = other DNA
atgaccacctttacccaaaaagaactgattaaagaaattaaagagcgcatcagcagcctcgacgtacgagacgat

SEQ ID NO: 843392 - DNA, 75 bp, synthetic construct
  source 1..75: mol_type = other DNA
aatacgaagaaagagcaagagatattatggaattgctttctcttgcgtcatctttagaggctcagactcagcagt

SEQ ID NO: 843393 - DNA, 75 bp, synthetic construct
  source 1..75: mol_type = other DNA
ctcattcaatgatgaaaaacaactaaagcaaatgctttggggactaagaaatattctcattgagttatatgtttt

SEQ ID NO: 843394 - DNA, 75 bp, synthetic construct
  source 1..75: mol_type = other DNA
ggcgatagtgaaatgaaagacattgaaatggctcaaaatgccaatgttagcgatgtattcgccaagtacggtaca

SEQ ID NO: 843395 - DNA, 75 bp, synthetic construct
  source 1..75: mol_type = other DNA
ttaaatataatcttgtacataccaaacaagaatatactcccaaagatgaaatcaagccaaaccctcaactacttt

SEQ ID NO: 843396 - DNA, 75 bp, synthetic construct
  source 1..75: mol_type = other DNA
atcactgtctccatgacgttgaagacatgagtgccaaaaatcaccccaacgcggacctttcccgtggtcagtatg

SEQ ID NO: 843397 - DNA, 75 bp, synthetic construct
  source 1..75: mol_type = other DNA
tcagggctgcgtcgccttcagaccttgcggagcgactgacacaaaaactgaaggaaggctggcagccgtttggca

SEQ ID NO: 843398 - DNA, 75 bp, synthetic construct
  source 1..75: mol_type = other DNA
gtcagaaggctttaatcaattcttagatatctctaaattaccattgttaattttagcttcttctgttcctcttgc

SEQ ID NO: 843399 - DNA, 75 bp, synthetic construct
  source 1..75: mol_type = other DNA
acgcattggtctgggtgtgggctggtctacgctggtagcggcggagctgattgccgcgacgcgcggtttaggatt

SEQ ID NO: 843400 - DNA, 75 bp, synthetic construct
  source 1..75: mol_type = other DNA
gcttggtctgcaactggctggcgtagagaaagcgcagcgccaggaaatcgcgcgccagatgctgaaaaaagtggg

SEQ ID NO: 843401 - DNA, 75 bp, synthetic construct
  source 1..75: mol_type = other DNA
gtgccttatcagcatggcagcattcaactggcgggtaagtgcattgagggaccgggagcagagcggggcgtggtt

SEQ ID NO: 843402 - DNA, 75 bp, synthetic construct
  source 1..75: mol_type = other DNA
tcgagtcgcagcattaagtctgatccacagtttatcgccatgcgcgaatatgtcttaagccgcgtatttgagcaa

SEQ ID NO: 843403 - DNA, 75 bp, synthetic construct
  source 1..75: mol_type = other DNA
cttgctgaatctgattgccggttttgtgccttatcagcatggcagcattcaactggcgggtaagcgtattgaggg

SEQ ID NO: 843404 - DNA, 75 bp, synthetic construct
  source 1..75: mol_type = other DNA
gtcaacgtcagcgggtgggcattgctcgcgcgctggcggcaaatccccagctgttattactcgacgaaccgtttg

SEQ ID NO: 843405 - DNA, 75 bp, synthetic construct
  source 1..75: mol_type = other DNA
caggttacacgggacatccggcgttgtttacggccatggtgaagcagttccgtaccgatctggcggcatatgccg

SEQ ID NO: 843406 - DNA, 75 bp, synthetic construct
  source 1..75: mol_type = other DNA
catcagcataaaggaaccaccagtgccgtgcggcgggtggtggaaccgttcggattcctgatctgcattattgag

SEQ ID NO: 843407 - DNA, 75 bp, synthetic construct
  source 1..75: mol_type = other DNA
ttacggtagagaaaagctgggggctgggacgtattgtcacggagatctttgatgaagtggcagaagcacatctga

SEQ ID NO: 843408 - DNA, 75 bp, synthetic construct
  source 1..75: mol_type = other DNA
ttagcagcctggcaaagggcgaaaccaccaaagctgcgtttaatcagatggtacaagggcataagctgccagcct

SEQ ID NO: 843409 - DNA, 75 bp, synthetic construct
  source 1..75: mol_type = other DNA
aatcttaacgcaattagtattagaatatagcaatagtaatgctgatgttacattgacgccaacaacacgaaatat

SEQ ID NO: 843410 - DNA, 75 bp, synthetic construct
  source 1..75: mol_type = other DNA
gcgccagccgaatggagcgcgtcgccgcgcgcgtctgtgcgtcgttgggtgaagtgcccgtgccgctgcgccagt

SEQ ID NO: 843411 - DNA, 75 bp, synthetic construct
  source 1..75: mol_type = other DNA
ttactggggtacggttgccggagcgggttcattgttaacatcatcagccacgctgactgaaaaatttgtcagtgc

SEQ ID NO: 843412 - DNA, 75 bp, synthetic construct
  source 1..75: mol_type = other DNA
ctgagacgattacggcccgtttcggatcaggaggctgagattgtgattctaccttcgtccggcagagaaaacggc

SEQ ID NO: 843413 - DNA, 75 bp, synthetic construct
  source 1..75: mol_type = other DNA
ttctagcaatgccttatgtatttttagtgatagcgaaaacaaatacacacaggttaaaggtctgagaatacacaa

SEQ ID NO: 843414 - DNA, 75 bp, synthetic construct
  source 1..75: mol_type = other DNA
cgccgctggtggtacgtgcaccgtatttttagctacggcacacagcatgttggttcgctttactactgcatacct

SEQ ID NO: 843415 - DNA, 75 bp, synthetic construct
  source 1..75: mol_type = other DNA
ggggagatcaggatgatcatcttaccatagaggttgaaaaaaatggggcaggaagtcgactttatattacctata

SEQ ID NO: 843416 - DNA, 75 bp, synthetic construct
  source 1..75: mol_type = other DNA
tgctgcgctaaatctacagattgatacccctgtccggggtgtccacggactgcccgtcaggatcaataactgtct

SEQ ID NO: 843417 - DNA, 75 bp, synthetic construct
  source 1..75: mol_type = other DNA
gccgacaatgtgtcgtctgcaagacatgcgcatgatgtgctgtgtctatggaatgagaaaagtcgcttctcccgg

SEQ ID NO: 843418 - DNA, 75 bp, synthetic construct
  source 1..75: mol_type = other DNA
tgctggagcggctgccgctcaactttgctcgccgctttgttgcgggagagtcgagccgcagcatcaagtccgatc

SEQ ID NO: 843419 - DNA, 75 bp, synthetic construct
  source 1..75: mol_type = other DNA
ttttgatggaaaaaacgtagcggagctggcgcagcgttacaaagtgacatacaaaacggtatatcaggccatcaa

SEQ ID NO: 843420 - DNA, 75 bp, synthetic construct
  source 1..75: mol_type = other DNA
agcagccttgcaaagggcgaaaccaccaaagctgcgtttaatcagatggtgcaagggcataagctgcctgcctgg

SEQ ID NO: 843421 - DNA, 75 bp, synthetic construct
  source 1..75: mol_type = other DNA
ccgctctggtcatcgccaccagtgcaatggcgcaggatgatttaaccattagcagtcttgcaaagggcgaaacca

SEQ ID NO: 843422 - DNA, 75 bp, synthetic construct
  source 1..75: mol_type = other DNA
aaacccgcttccggcagtggcggtggtgatcccgaaactcgattttcaggggacggaatcactgaatacgctgcg

SEQ ID NO: 843423 - DNA, 75 bp, synthetic construct
  source 1..75: mol_type = other DNA
cggcagtgttcctggtcatcggcaacagtgtgcgtctgagcatttttgcccgccgcgattctattaacgtgcaga

SEQ ID NO: 843424 - DNA, 75 bp, synthetic construct
  source 1..75: mol_type = other DNA
cgatcgcatcatgcagattaacggaattgatgaagtgcgaatggacgatagctggtttgcccgcctgacggcgct

SEQ ID NO: 843425 - DNA, 75 bp, synthetic construct
  source 1..75: mol_type = other DNA
tgcgcgcctggcgggggcatcctggcgaagagaaagtctggcacacgcgcgacgcgatccttttatgcatcgggc

SEQ ID NO: 843426 - DNA, 75 bp, synthetic construct
  source 1..75: mol_type = other DNA
ggtcaggcagaaatcttaacgctcgatctggcaagcgaaggatcgccccacgcccgccaggccagcgagattcgt

SEQ ID NO: 843427 - DNA, 75 bp, synthetic construct
  source 1..75: mol_type = other DNA
gcagtggctgatggccttcgatgccgctaacctggtgatgctgtatctgttgggtgtggtggtggtggcactttt

SEQ ID NO: 843428 - DNA, 75 bp, synthetic construct
  source 1..75: mol_type = other DNA
ccttactgaactatctgtaagaatgagaacaggaaagagaattgagagacttacaccatctgagttggtattgtt

SEQ ID NO: 843429 - DNA, 75 bp, synthetic construct
  source 1..75: mol_type = other DNA
tcgggctggtgatcgggaaccttactgctggcgtgcgttatcaggcgcgggtagcccgttaccgcgagcaacgca

SEQ ID NO: 843430 - DNA, 75 bp, synthetic construct
  source 1..75: mol_type = other DNA
caagggctggatattgtggttggcgtggtagaaacccacgggcggaaagataccgccgcaatgctggaagggctg

SEQ ID NO: 843431 - DNA, 75 bp, synthetic construct
  source 1..75: mol_type = other DNA
cagtgtgcgcctgagtatctttgctcgccgtgactccattaacgtacagaaactgattggtgcgacagatggatt

SEQ ID NO: 843432 - DNA, 75 bp, synthetic construct
  source 1..75: mol_type = other DNA
cggtgggattcaggtatatgttcctaaagggaaaatactggaaaatcttatcagagacatgcgcatctggcgtga

SEQ ID NO: 843433 - DNA, 75 bp, synthetic construct
  source 1..75: mol_type = other DNA
aaaagtgacatgcagcattacgcccaactgttctggcattgttcactcagtgacgccgactatcaaaaattggtg

SEQ ID NO: 843434 - DNA, 75 bp, synthetic construct
  source 1..75: mol_type = other DNA
aggtctgcacaatgttgcacaaattgccgatcgtcatgggctggcgcaagtatccatggaaaacctgctgcgctg

SEQ ID NO: 843435 - DNA, 75 bp, synthetic construct
  source 1..75: mol_type = other DNA
ttgggaaaggtgattcatgtaaaaatttaattgagttttcatatcatgattataatttaaaaaaacaattaattg

SEQ ID NO: 843436 - DNA, 75 bp, synthetic construct
  source 1..75: mol_type = other DNA
ggtcagtggcgagaaagtcactgcagatgtcggcaacaacctgaccatttcgagccttcaggacagtgaccgtta

SEQ ID NO: 843437 - DNA, 75 bp, synthetic construct
  source 1..75: mol_type = other DNA
tcgggatttccatctttactggctgagctgaatgctctgttgcgacaggagctgataaggcttggagttaaccct

SEQ ID NO: 843438 - DNA, 75 bp, synthetic construct
  source 1..75: mol_type = other DNA
gctggctggatgccccgccgggaatcaaccgtcttctgggattacgcagacttcacgcctggctggatcccgcca

SEQ ID NO: 843439 - DNA, 75 bp, synthetic construct
  source 1..75: mol_type = other DNA
ggacggagtcgctgaatacgttgcgtgatcgcatcacgcaaattaacggcatcgatgaagtacgaatggacgata

SEQ ID NO: 843440 - DNA, 75 bp, synthetic construct
  source 1..75: mol_type = other DNA
cgccgtgactccatcaacgtgcagaaactgattggtgcgacggatggtttcatcctgcgcccgttcctgtacggt

SEQ ID NO: 843441 - DNA, 75 bp, synthetic construct
  source 1..75: mol_type = other DNA
gttcgtgaagctcaggcgttcgccgcctcgcccgctgccaacattcgcttttatgccgcgcgtggtgcccggggg

SEQ ID NO: 843442 - DNA, 75 bp, synthetic construct
  source 1..75: mol_type = other DNA
tacacgcatcgtcagcgcaggcgcgcccgccgatttgctattgctggctgtcgcgccagaaaaaatggtcggttt

SEQ ID NO: 843443 - DNA, 75 bp, synthetic construct
  source 1..75: mol_type = other DNA
ctccatgcctggcttgatcccgcagttaacagccagtttaaaaatgacatgcaacattacgccaggctgttctgg

SEQ ID NO: 843444 - DNA, 75 bp, synthetic construct
  source 1..75: mol_type = other DNA
gggcaatcccagcatcagataacaaaccatcaccagaaaataccaaccagaaatctccatcggttgactgcgaac

SEQ ID NO: 843445 - DNA, 75 bp, synthetic construct
  source 1..75: mol_type = other DNA
tgccggatacatcgtggggtggcgggtctcatcgtctatggaaacgcctggacgatgtttgcggcaaagcaggat

SEQ ID NO: 843446 - DNA, 75 bp, synthetic construct
  source 1..75: mol_type = other DNA
gtttcgcacaaacatctctcgataaaaagcaggggtggcacagggcaaaactgaaggatggaacaggattttact

SEQ ID NO: 843447 - DNA, 75 bp, synthetic construct
  source 1..75: mol_type = other DNA
tgtgcgtggaagatgttaccgtttggccgcattctggcggcaactgttgacggtaagccaattgagaaatttgcc

SEQ ID NO: 843448 - DNA, 75 bp, synthetic construct
  source 1..75: mol_type = other DNA
cttgtgctaatatgttcaatgtcaagcccataattctagtttcattcccaacgccttctgggatgaatattatag

SEQ ID NO: 843449 - DNA, 75 bp, synthetic construct
  source 1..75: mol_type = other DNA
tagatcagttgagcacaatccttgcaccttatggtgcaaggaagctttctacgaatgaattatcaaaattcaacg

SEQ ID NO: 843450 - DNA, 75 bp, synthetic construct
  source 1..75: mol_type = other DNA
tccggactgtgagggaattatcagtacaggtaagaagaaagcagcgaagcgtaaaaaaacatcggttaaagctaa

SEQ ID NO: 843451 - DNA, 75 bp, synthetic construct
  source 1..75: mol_type = other DNA
gcaaatgatgtgctcgccattgcccagtccctttacgaaacccacaaagcgaccacctacccccgtacagactgc

SEQ ID NO: 843452 - DNA, 75 bp, synthetic construct
  source 1..75: mol_type = other DNA
ttgacctcagctcactgaacggtgatgaactgaaggtatatcaactgattcgtcagcactatctggcacagtttc

SEQ ID NO: 843453 - DNA, 75 bp, synthetic construct
  source 1..75: mol_type = other DNA
catcgtctatggaaacgcctggacgatgtttgcggcaaagcaggatggcgcaatgaataccgcgatattcccaac

SEQ ID NO: 843454 - DNA, 75 bp, synthetic construct
  source 1..75: mol_type = other DNA
gagcgttatcagcgtgactggcaattaatggctggcaatgaggatgcgcaggctaaatgcgttcaggtaatgaac

SEQ ID NO: 843455 - DNA, 75 bp, synthetic construct
  source 1..75: mol_type = other DNA
ggctgaagaaagtgctgcgtgataacgccggtctgggcacagaggcgacgcgtgcggccgtgcttgaaaccctct

SEQ ID NO: 843456 - DNA, 75 bp, synthetic construct
  source 1..75: mol_type = other DNA
gaatgattgttggataaataaatttggcaatccaaataaaggcgatcgaatcatttctttgatttatgaaaactc

SEQ ID NO: 843457 - DNA, 75 bp, synthetic construct
  source 1..75: mol_type = other DNA
gtcgtaaagctatgctgcaggatatcgcaaccctgactggcggtaccgtaatctctgaagagatcggtatggagc

SEQ ID NO: 843458 - DNA, 75 bp, synthetic construct
  source 1..75: mol_type = other DNA
gtcgtaaagctatgctgcaggatatcgcaaccctgactggcggtaccgtgatctctgaagagatcggtatggaac

SEQ ID NO: 843459 - DNA, 75 bp, synthetic construct
  source 1..75: mol_type = other DNA
tgccggttctggaagccgttgccaaagcaggtaaaccgctgctgatcatcgctgaagatgttgaaggcgaagcgc

SEQ ID NO: 843460 - DNA, 75 bp, synthetic construct
  source 1..75: mol_type = other DNA
tgtccgtaccgtgctctgactctaaagctattgctcaggttggtactatctccgctaactccgacgaaaccgtag

SEQ ID NO: 843461 - DNA, 75 bp, synthetic construct
  source 1..75: mol_type = other DNA
acgcgtagcgaaactggcaggcggcgttgcagttatcaaagtaggcgctgctaccgaagttgaaatgaaagagaa

SEQ ID NO: 843462 - DNA, 75 bp, synthetic construct
  source 1..75: mol_type = other DNA
caacaagccggaaactggcgcagtagaactggaaagcccgttcatcctgctggctgacaagaaaatctctaacat

SEQ ID NO: 843463 - DNA, 75 bp, synthetic construct
  source 1..75: mol_type = other DNA
acaacatggcacgatcgccgcatcgttcctggtcaggagttcgaacgtcagatcgaccactatttttcgcaagca

SEQ ID NO: 843464 - DNA, 75 bp, synthetic construct
  source 1..75: mol_type = other DNA
aatctggcattacaaatataatgctctgggatgaagactctatgaaatcagaaaattcttcacgacatctcctgg

SEQ ID NO: 843465 - DNA, 75 bp, synthetic construct
  source 1..75: mol_type = other DNA
acgtaacgataactcatggataatgggtagagatcataatcctacttataaaaaaatatctgagcatacagtagc

SEQ ID NO: 843466 - DNA, 75 bp, synthetic construct
  source 1..75: mol_type = other DNA
gcagtgaaagttaccctcggtccgaaaggccgtaacgtagttctagataaatctttcggtgcaccgaccatcacc

SEQ ID NO: 843467 - DNA, 75 bp, synthetic construct
  source 1..75: mol_type = other DNA
aaagaccgtgatgcctgggcaaaagatcttgcgaccacttttgagagccagggactggcgccgacgatggagaat

SEQ ID NO: 843468 - DNA, 75 bp, synthetic construct
  source 1..75: mol_type = other DNA
acgagacgaactattgaccaatgaaggtatgtcggaacatctctgggaaatgttcttcgggctaatcaagcaaag

SEQ ID NO: 843469 - DNA, 75 bp, synthetic construct
  source 1..75: mol_type = other DNA
tacgggaaagcagtaaaggccgtttctggagttgtcagcattatccggattgtaaagggagtgtaccattaccgg

SEQ ID NO: 843470 - DNA, 75 bp, synthetic construct
  source 1..75: mol_type = other DNA
ctggaacttgagcgactgataagcgatgccaaaccatgtagccgccacatgatcggcatgtccatcaatctgcag

SEQ ID NO: 843471 - DNA, 75 bp, synthetic construct
  source 1..75: mol_type = other DNA
gctggacagaaagcgtcaaacgccaggtggtgaaggatgctttttatatacatcagcataaaggaaccaccagtg

SEQ ID NO: 843472 - DNA, 75 bp, synthetic construct
  source 1..75: mol_type = other DNA
atgaatagtctgctgccaccgggttcaacttcactggagcgccgactggcgcaagcgtgcagcgggatttctgat

SEQ ID NO: 843473 - DNA, 75 bp, synthetic construct
  source 1..75: mol_type = other DNA
ccgaatggctggacgtgatggcagacaccgtcacgatactttatgccgtgctgttcccgctggggctgctgctgt

SEQ ID NO: 843474 - DNA, 75 bp, synthetic construct
  source 1..75: mol_type = other DNA
gtgttgcccattactctggtgttgtctttactggtcgccattctggcggcgattgttccggtgcgacgcgcggta

SEQ ID NO: 843475 - DNA, 75 bp, synthetic construct
  source 1..75: mol_type = other DNA
atggccgctaaacgtaccatgctctggctgctggtgtggcgggcgctgcgtctgcgttttcagcgggtcagcgtg

SEQ ID NO: 843476 - DNA, 75 bp, synthetic construct
  source 1..75: mol_type = other DNA
acagacagggaatggctgaagcagcaggagaacctcagcgaacagctgcgccagcatccggataaacagctgcag

SEQ ID NO: 843477 - DNA, 75 bp, synthetic construct
  source 1..75: mol_type = other DNA
atgaaattaatgaatctgtttatggtcatgcttttgctgaccggacgagcagtgttggctgaaacttcctctgtt

SEQ ID NO: 843478 - DNA, 75 bp, synthetic construct
  source 1..75: mol_type = other DNA
atagaacatctggcgagagacaatcgcgattaaaaaagaaagatgtttataatttgattatcgaagcattcttca

SEQ ID NO: 843479 - DNA, 75 bp, synthetic construct
  source 1..75: mol_type = other DNA
gacgaatcccatcagggacaggggatcatttctcaggcgctacaggcattgattcaccattacgcccagtctggt

SEQ ID NO: 843480 - DNA, 75 bp, synthetic construct
  source 1..75: mol_type = other DNA
aaccgctgaaatcggctactggctggacgaatctcatcaggggcaggggatcatttctcaggcgctgcaggcact

SEQ ID NO: 843481 - DNA, 75 bp, synthetic construct
  source 1..75: mol_type = other DNA
cgacgctgccgggtaaagcctggctggaacacgcgctgccgctgattgctgaacagttgcagggtcgccgttctg

SEQ ID NO: 843482 - DNA, 75 bp, synthetic construct
  source 1..75: mol_type = other DNA
gccaccggcacttactacaaagtggactactccgccggagtggacatttctcgctataaaaatgtgcccgttcca

SEQ ID NO: 843483 - DNA, 75 bp, synthetic construct
  source 1..75: mol_type = other DNA
tgactgcaacgggattgtgaatgtcggggcgaagaagcctggtcgtcggcggaaaagtccggcaaagaaaagtgt

SEQ ID NO: 843484 - DNA, 75 bp, synthetic construct
  source 1..75: mol_type = other DNA
agcccttcagtatgacggtgccggtgacgccgccgtgcccgctttgtcaggggccgacccggcagcgaaagggaa

SEQ ID NO: 843485 - DNA, 75 bp, synthetic construct
  source 1..75: mol_type = other DNA
ttgatatcagggcactgagtgaggatgaactgaaggtgtatcagctcatccgtcagcattatctggctcagttcc

SEQ ID NO: 843486 - DNA, 75 bp, synthetic construct
  source 1..75: mol_type = other DNA
cttgtcacaaagtgatccgtccttacagaatgtgctggcgcaattgcagccggcgcgtatttcacgggtctggaa

SEQ ID NO: 843487 - DNA, 75 bp, synthetic construct
  source 1..75: mol_type = other DNA
gcgggtaaccgcgtctttacagcatcaggggattgtttttcaggctcactggcgacctgctttgcaatattgtga

SEQ ID NO: 843488 - DNA, 75 bp, synthetic construct
  source 1..75: mol_type = other DNA
tcaggcgacggaagtggtgattgccacggatgcggacagggaaggggaagtgattgcccgtgaattactggaggc

SEQ ID NO: 843489 - DNA, 75 bp, synthetic construct
  source 1..75: mol_type = other DNA
ctggttctctactggatgatgcagtaatgagtccggcaatcagtttaatcatgccacaaggcgttatcgatgcgc

SEQ ID NO: 843490 - DNA, 75 bp, synthetic construct
  source 1..75: mol_type = other DNA
ccgatttcccgcaagcggtggcgtatgccactcaggctctgggtaatgactccaacttattgatagtgttttatg

SEQ ID NO: 843491 - DNA, 75 bp, synthetic construct
  source 1..75: mol_type = other DNA
catcagagcgttttcccaccggatgtgactgcggtgtttgatcacggcaaacgggccgtctccgctttccccatc

SEQ ID NO: 843492 - DNA, 75 bp, synthetic construct
  source 1..75: mol_type = other DNA
ttaatattggggcgctgagtgataatgagcttaaggtgtaccggttaattcgtcagcattatctggctcagtttt

SEQ ID NO: 843493 - DNA, 75 bp, synthetic construct
  source 1..75: mol_type = other DNA
gtaaactgtcgctggcgtcatttatggagaagcagaaacagtggctgaatcacctcgtctcgggcgcccgacggc

SEQ ID NO: 843494 - DNA, 75 bp, synthetic construct
  source 1..75: mol_type = other DNA
gccacgttgctggcaagggaactgatagcggcgttgcctgaaacgctgaccagccccggtatgaccgcgctgtgg

SEQ ID NO: 843495 - DNA, 75 bp, synthetic construct
  source 1..75: mol_type = other DNA
atctatctgtctagcattgagcgttctatagagagcctagaggataaagttaatcgtataaagaatgaggatatt

SEQ ID NO: 843496 - DNA, 75 bp, synthetic construct
  source 1..75: mol_type = other DNA
ggtgagtgcagaatcgctggataacctggtggcaacctccaccgcgccgtttatcacgcatgaaacggcgcgagc

SEQ ID NO: 843497 - DNA, 75 bp, synthetic construct
  source 1..75: mol_type = other DNA
gccatgcatattgggtggttgagtacgagggtgaagtggtcggcggcggcgggattgcgccattaacaggtagtg

SEQ ID NO: 843498 - DNA, 75 bp, synthetic construct
  source 1..75: mol_type = other DNA
ttacaaaaatttagaccagagaatgagaatgacttccttccggttgtgaaaatcgcgcagttgaagaaaggtttt

SEQ ID NO: 843499 - DNA, 75 bp, synthetic construct
  source 1..75: mol_type = other DNA
ccgaatcactgaaaaagtttcgtcatgaagggagcaaaatcggctgcatcgtgatgaatgccaatccctttacca

SEQ ID NO: 843500 - DNA, 75 bp, synthetic construct
  source 1..75: mol_type = other DNA
acgtaaaacgttcagaaaataaaagaatggcggaaatcacgcaatttctacatgaaaatgatttgagcgttgaca

SEQ ID NO: 843501 - DNA, 75 bp, synthetic construct
  source 1..75: mol_type = other DNA
acccacgttgggctgggatcgttgttgatccacgcaatggcggcggtaagtcgaatgaatgcactaccgacgagc

SEQ ID NO: 843502 - DNA, 75 bp, synthetic construct
  source 1..75: mol_type = other DNA
actttacctggtcgcccaaaatgcaggcgctggtaaaaataacacgattgaagcctactgctttcctggtggcgt

SEQ ID NO: 843503 - DNA, 75 bp, synthetic construct
  source 1..75: mol_type = other DNA
agagttttatgatgatgtcagggacaggttgcaaggacggaataatgcattttcatgcactgcggttttagctga

SEQ ID NO: 843504 - DNA, 75 bp, synthetic construct
  source 1..75: mol_type = other DNA
ggataaacagctaacctgttcatggcagccaggcgtgcgtcaccgcattacgcccgaggcgttagagaccgccgt

SEQ ID NO: 843505 - DNA, 75 bp, synthetic construct
  source 1..75: mol_type = other DNA
tttccaccgctaatacctgaaacggcagcacaacagaatgaatttaatgatgttattgcgccactggtggagtgg

SEQ ID NO: 843506 - DNA, 75 bp, synthetic construct
  source 1..75: mol_type = other DNA
gcaggtaagactatcagtattgctcttgatactccggcagaaggaaactcttctgttaagtggaaggcatctctc

SEQ ID NO: 843507 - DNA, 75 bp, synthetic construct
  source 1..75: mol_type = other DNA
atgtaataaagttcttccccctgagtttgttcttcagtgggcgactcactccatgcaagaaattacaataagatc

SEQ ID NO: 843508 - DNA, 75 bp, synthetic construct
  source 1..75: mol_type = other DNA
ctctctggcgggcacgctgaagctgggcaaactgattgcgttctacgatgacaacgggatttctatcgatggtca

SEQ ID NO: 843509 - DNA, 75 bp, synthetic construct
  source 1..75: mol_type = other DNA
cctacggcgagtccgccccggcggaacagctttatcaggagtttggcattaccgttgaggtggtgttgcagcagg

SEQ ID NO: 843510 - DNA, 75 bp, synthetic construct
  source 1..75: mol_type = other DNA
gatgaggaatatcgggagtcggtgttgccttctaacgttgcggctcgcgtggcggtggaagcaggtattgccgat

SEQ ID NO: 843511 - DNA, 75 bp, synthetic construct
  source 1..75: mol_type = other DNA
agtccgaagaccacattgcgagacaggctgaaaaagactcgtgaaggattctgggcattgttgctacctgttatt

SEQ ID NO: 843512 - DNA, 75 bp, synthetic construct
  source 1..75: mol_type = other DNA
aaaaggattattggtatagccatggcctgggttggtcatgtgcgaggaggtatgggatatgttgctgtttttgcc

SEQ ID NO: 843513 - DNA, 75 bp, synthetic construct
  source 1..75: mol_type = other DNA
tccccgaacaaagccggtacgcatgactcccacggcgcgccgctgggcgatgcggaaattgcactgactcgtgag

SEQ ID NO: 843514 - DNA, 75 bp, synthetic construct
  source 1..75: mol_type = other DNA
ttgatttaatttggtattctatatttaaagtagataactcgccatttcgtgctacttaccatagttatttaaata

SEQ ID NO: 843515 - DNA, 75 bp, synthetic construct
  source 1..75: mol_type = other DNA
aatagttgcgcggtgctttatgttctggcactaacacaaaccagagcagccctactgctcttccctgtgatttgt

SEQ ID NO: 843516 - DNA, 75 bp, synthetic construct
  source 1..75: mol_type = other DNA
agcggtttttgagcgtgaacatcctgagcagtatgccgaattaaaagccacggcagagctgtttccgttggcgat

SEQ ID NO: 843517 - DNA, 75 bp, synthetic construct
  source 1..75: mol_type = other DNA
atgatcgcatttcttttggtataggaacggcaacaggagcggcatattcaactatgttaataggcatagttagtg

SEQ ID NO: 843518 - DNA, 75 bp, synthetic construct
  source 1..75: mol_type = other DNA
taaaatagataattcgccatttcgtgctacttaccatagttatttaaatactgccaaaatttttatatttggttc

SEQ ID NO: 843519 - DNA, 75 bp, synthetic construct
  source 1..75: mol_type = other DNA
atgccaaccttcattaaactccaatcatggaaaccttatgctctaaaatcatctacgattttagagataatgact

SEQ ID NO: 843520 - DNA, 75 bp, synthetic construct
  source 1..75: mol_type = other DNA
ctgagattctacgtcgatatgcaaatggattgattgagcaagcttataaaatagattcgaaggtatttggctcac

SEQ ID NO: 843521 - DNA, 75 bp, synthetic construct
  source 1..75: mol_type = other DNA
atgaatcgcattattgctcatggtatcgagattcacacgctacaggacggtttaatctacacaagggatgctcta

SEQ ID NO: 843522 - DNA, 75 bp, synthetic construct
  source 1..75: mol_type = other DNA
agtagcgtctttcagtgatgaagggttgagtggttacaaaggtaagcatcttactggtcagtttggtgacatgtt

SEQ ID NO: 843523 - DNA, 75 bp, synthetic construct
  source 1..75: mol_type = other DNA
cagcatcacaacgtaatgaccgccccgctataccgaactactacgaagccgctatagatgcttcaacgttcaata

SEQ ID NO: 843524 - DNA, 75 bp, synthetic construct
  source 1..75: mol_type = other DNA
tctctgaccggagatcataaagtcatttatgtagcagcggatcgacatgtaacttcagaagaaattctggaagca

SEQ ID NO: 843525 - DNA, 75 bp, synthetic construct
  source 1..75: mol_type = other DNA
tatcagggcaatttggggatatgctctcccgcattgaatcaggggagtttccagaagggacaattttactagtcg

SEQ ID NO: 843526 - DNA, 75 bp, synthetic construct
  source 1..75: mol_type = other DNA
aagatattgaccttatgactaaagcgggtcgtgtcgagtgtcagttgattttgtccaagcatctaaaagggctta

SEQ ID NO: 843527 - DNA, 75 bp, synthetic construct
  source 1..75: mol_type = other DNA
gtcgctgtgatgttccaccgttgaagcgtaaaccgtttgaccgatggatgattgataattttctggggatgattg

SEQ ID NO: 843528 - DNA, 75 bp, synthetic construct
  source 1..75: mol_type = other DNA
gttgcacagccatctggatgacagtctgtatcgcaaagagtggttgggcgatcacaaacagatcctcgccgcgtt

SEQ ID NO: 843529 - DNA, 75 bp, synthetic construct
  source 1..75: mol_type = other DNA
gccgccggagcgtgaaattgcagaaatgcttgatgtcacgcggacggtggtacgtgaagcgctgatcatgctgga

SEQ ID NO: 843530 - DNA, 75 bp, synthetic construct
  source 1..75: mol_type = other DNA
aaggccgtacacctgcaagtgataatccattaacgattaacatcttcaaaggtctgtttaggtgtcagtgtgggg

SEQ ID NO: 843531 - DNA, 75 bp, synthetic construct
  source 1..75: mol_type = other DNA
atgaatcgcattattgctcatggtatcgagattcacactctacaggatgggctaatctacacaagggatgctcta

SEQ ID NO: 843532 - DNA, 75 bp, synthetic construct
  source 1..75: mol_type = other DNA
aatgaacacgctgagactgtaagactgattttcaagctgctgttagatggtgaaagtctgcataacattgcacgt

SEQ ID NO: 843533 - DNA, 75 bp, synthetic construct
  source 1..75: mol_type = other DNA
aaaatgtaagtagaatattacagcaccaatattcgcatagcccaacactcagaagattagttaactattacatag

SEQ ID NO: 843534 - DNA, 75 bp, synthetic construct
  source 1..75: mol_type = other DNA
cagattgtaaacttattgctgatgaccagcaaaggaaacttgctcatgtttgggcgccatttcttgatggctggg

SEQ ID NO: 843535 - DNA, 75 bp, synthetic construct
  source 1..75: mol_type = other DNA
tctgttctggaggagtgtgatttatctttcgctgatttggcaaacagcacaatcagcgcatcgtttgatagagct

SEQ ID NO: 843536 - DNA, 75 bp, synthetic construct
  source 1..75: mol_type = other DNA
cgtataccacggagactctatcaaaaattaaagaaatcagaacatgggacacagacaactacttaatgaaactat

SEQ ID NO: 843537 - DNA, 75 bp, synthetic construct
  source 1..75: mol_type = other DNA
atggatgtattatgcccttgcctctttcataaaaagagactaacagtaaatatgaacaacattaatcaatcggaa

SEQ ID NO: 843538 - DNA, 75 bp, synthetic construct
  source 1..75: mol_type = other DNA
atgaacaacattaatcaatcggaaaacattaatattcaattaaataaagcgccccaaacaaatttcgttgatgag

SEQ ID NO: 843539 - DNA, 75 bp, synthetic construct
  source 1..75: mol_type = other DNA
tttatcatcagtaattttttctgattccagatttgataatactgatcttagtggctgtaacctgtcaggtgcgtc

SEQ ID NO: 843540 - DNA, 75 bp, synthetic construct
  source 1..75: mol_type = other DNA
cgacggaaatcggtcagggtgccgacaccgtcttctcgcaaatggtggcagaaaccgtggggttccggtcagcga

SEQ ID NO: 843541 - DNA, 75 bp, synthetic construct
  source 1..75: mol_type = other DNA
cctgatatcccattcgctacagctgggcatgcctggacacttgacgaaaacaagcgcgataccgccgatcgcgca

SEQ ID NO: 843542 - DNA, 75 bp, synthetic construct
  source 1..75: mol_type = other DNA
tatatgcaggatgtaatacgtattggtatggaagcaattccagcagccgaatctaaattcacacaaagatcctca

SEQ ID NO: 843543 - DNA, 75 bp, synthetic construct
  source 1..75: mol_type = other DNA
aaaattaataaaaatataatcgagccccctttacaacgaggatcttcctttaaagtaatagagtcaatagaaaac

SEQ ID NO: 843544 - DNA, 75 bp, synthetic construct
  source 1..75: mol_type = other DNA
cagatgtctgtggctatatacaggatgcaatacgtataggcatggaagcgctacctgtggctgaggctaaattca

SEQ ID NO: 843545 - DNA, 75 bp, synthetic construct
  source 1..75: mol_type = other DNA
atataacgaaccactacattttgacgacatgtacggaaaagaatcaatatcagtatcaattgaattagataatct

SEQ ID NO: 843546 - DNA, 75 bp, synthetic construct
  source 1..75: mol_type = other DNA
agctacgcaaacactagtggtactttgaataacaatatgaacatcactgtaaatggcattcagccagcagagaat

SEQ ID NO: 843547 - DNA, 75 bp, synthetic construct
  source 1..75: mol_type = other DNA
agttaacgcgactgcggttggtttgctgccgaaagaatttatgatttctgtaaattgtgaagcaggtaagtcaga

SEQ ID NO: 843548 - DNA, 75 bp, synthetic construct
  source 1..75: mol_type = other DNA
tctgaaatagacagactcaatcgacgaggtgggcttaaccttgcaatcggaacaataattgcgttgacagggata

SEQ ID NO: 843549 - DNA, 75 bp, synthetic construct
  source 1..75: mol_type = other DNA
cagcaacgagcaggcaagccacgttattgaaaaactgaagaagtggcagcacagagccacggggaggaagccatg

SEQ ID NO: 843550 - DNA, 75 bp, synthetic construct
  source 1..75: mol_type = other DNA
gattatctaactgctcgtatttgctttaaaaacaatcttccattccaatttttatggatgtctcaacaagcaatt

SEQ ID NO: 843551 - DNA, 75 bp, synthetic construct
  source 1..75: mol_type = other DNA
gatggcgtagtatcactgactaccgcgcaggttactgatacatttcctgcagttagcgagacttctgttggtctc

SEQ ID NO: 843552 - DNA, 75 bp, synthetic construct
  source 1..75: mol_type = other DNA
tctgaaatagacagactcaatcgacgtggtgggcttaaccttgcaattggaacaataattgcgctaacaggtata

SEQ ID NO: 843553 - DNA, 75 bp, synthetic construct
  source 1..75: mol_type = other DNA
acagtcgggcgagttgaagactatttctggcggcactgcgcgcagcgtcaaaattgcacccgattatcagtcgct

SEQ ID NO: 843554 - DNA, 75 bp, synthetic construct
  source 1..75: mol_type = other DNA
tactgccgtatctaataaaggcgatttaagtttccctgcgcagcaaaaatcacttatcgcgctggcaaataaagc

SEQ ID NO: 843555 - DNA, 75 bp, synthetic construct
  source 1..75: mol_type = other DNA
actacagtttctattgagaaagataggctgcagaatttaactgactcgaagataacaactatgatatcggaaatt

SEQ ID NO: 843556 - DNA, 75 bp, synthetic construct
  source 1..75: mol_type = other DNA
attatattaccaaaaaaaacagaatcatgatgatttttatcacattcatgattacattagtgatgattcctgtgc

SEQ ID NO: 843557 - DNA, 75 bp, synthetic construct
  source 1..75: mol_type = other DNA
actggaatcatcatcaatagtaaatttaataaacgagaagaaagagtttattttatttacagcaactgccctagt

SEQ ID NO: 843558 - DNA, 75 bp, synthetic construct
  source 1..75: mol_type = other DNA
attgagaaactgaagaagtggcagcgcagagctgcgggagtcaaacatgagcgacctgaatcagtttcgaagtaa

SEQ ID NO: 843559 - DNA, 75 bp, synthetic construct
  source 1..75: mol_type = other DNA
gctggtaaaagcgcaggtttctgaagcggatgttatccacctgaaaccagggcaaaaagcctggtttaccgtgct

SEQ ID NO: 843560 - DNA, 75 bp, synthetic construct
  source 1..75: mol_type = other DNA
ggcagatatgagcaccatgctggtaaaagcgcaggtttctgaagcggatgtaatccacctgaagccggggcaaaa

SEQ ID NO: 843561 - DNA, 75 bp, synthetic construct
  source 1..75: mol_type = other DNA
accggcgatgcgatctctggttttgaaggcagcgtaccaaacccgtatgttaaagcgtctgactggggctggcag

SEQ ID NO: 843562 - DNA, 75 bp, synthetic construct
  source 1..75: mol_type = other DNA
ttgcccgatgacaacggtaaattgcagccgttaacacatccgcaaggaatgacgccgtgggacgatgccatcgcg

SEQ ID NO: 843563 - DNA, 75 bp, synthetic construct
  source 1..75: mol_type = other DNA
ggtatcgatgcccacgttgagggcgaaaatctacaactggatgtctgggataacggccccggtcttccgccaggc

SEQ ID NO: 843564 - DNA, 75 bp, synthetic construct
  source 1..75: mol_type = other DNA
atctacaactggatgtctgggataacggccccggacttccgcaaggccaggagcagtcgatttttgataagtttg

SEQ ID NO: 843565 - DNA, 75 bp, synthetic construct
  source 1..75: mol_type = other DNA
cgtcacccgccacaattttgaaggcggtaaatccgtatttgaactgacacagcaacatcaccacgatcatctgat

SEQ ID NO: 843566 - DNA, 75 bp, synthetic construct
  source 1..75: mol_type = other DNA
tgcggctcacggaaaccgagtttgccagcgatccgaaaactccagtaatgagtgcgcgaattgcggacattatcc

SEQ ID NO: 843567 - DNA, 75 bp, synthetic construct
  source 1..75: mol_type = other DNA
gcctgaacgtgatgattaaacgtgaagtcgtcggttttcgtgccaatacggtagagaaaaccggagaaaatcagt

SEQ ID NO: 843568 - DNA, 75 bp, synthetic construct
  source 1..75: mol_type = other DNA
tgtatcaggtgctgcatcaccagtttgtcgccagcgccctggcggtgaaagccgcgcgtcgcattaacccggaga

SEQ ID NO: 843569 - DNA, 75 bp, synthetic construct
  source 1..75: mol_type = other DNA
aaagaagttgtgcctggcaaatactatccaaaccatgaagccgttgatttttatggtcactacaaggaggacatc

SEQ ID NO: 843570 - DNA, 75 bp, synthetic construct
  source 1..75: mol_type = other DNA
tgaaagtcggctgtatgctggcgatggtgccgctctatccttactcctgtaacccggacgatgtgatgttcgccc

SEQ ID NO: 843571 - DNA, 75 bp, synthetic construct
  source 1..75: mol_type = other DNA
tggctgccgatcgccagttgttttcatctccagcggatatcacgtttgtcattgtcggtaatgtcgcagaagaca

SEQ ID NO: 843572 - DNA, 75 bp, synthetic construct
  source 1..75: mol_type = other DNA
ttttggcccgctcttagggacactactctcattaattgccgccacgctggcctcctcgtgctcattcctgctggc

SEQ ID NO: 843573 - DNA, 75 bp, synthetic construct
  source 1..75: mol_type = other DNA
tatattctgttattcatcattgccaccctcttgctgttaccaggaagcatactggtgatcgcgggaggaatagtt

SEQ ID NO: 843574 - DNA, 75 bp, synthetic construct
  source 1..75: mol_type = other DNA
ctgtatcaaatgtacagtcagcctggccatgcgtattgggtggttgaataccacggcgaagtggtcggcggcggc

SEQ ID NO: 843575 - DNA, 75 bp, synthetic construct
  source 1..75: mol_type = other DNA
ccaccgaatccggcgtttattctcacggcgttaatcgtttccctcgtttcattcaacaactggaaaacggcgata

SEQ ID NO: 843576 - DNA, 75 bp, synthetic construct
  source 1..75: mol_type = other DNA
cgcttacccggccacgaatttaccaccctgctggcagaaaaccgccgtaacggtattaccgttgatgacagcgta

SEQ ID NO: 843577 - DNA, 75 bp, synthetic construct
  source 1..75: mol_type = other DNA
gcgatatcattcctgatgccgaagccaaacgtataaccactcttggcgctatcgagcaatgggacgctcagcgtt

SEQ ID NO: 843578 - DNA, 75 bp, synthetic construct
  source 1..75: mol_type = other DNA
attcggcctgcaactggcaggcgtagagaaaatgcagcgactggaaatcgcgcaccagatgctgaaaaaagtggg

SEQ ID NO: 843579 - DNA, 75 bp, synthetic construct
  source 1..75: mol_type = other DNA
gcggaagagtacgatatttactggtatgctggtgaagatgacgcgagcaaaagctatgcttgtctgacaccggaa

SEQ ID NO: 843580 - DNA, 75 bp, synthetic construct
  source 1..75: mol_type = other DNA
gatcaggaagaggagacgaacaaatttgcgatccagatcccttacgcactgggcatcattgcaacgcgttccgtg

SEQ ID NO: 843581 - DNA, 75 bp, synthetic construct
  source 1..75: mol_type = other DNA
atgaataacattgcgccgcaatcacctgtaatgcgtcgcctgacgctgcaggataatcctgctatcgcccgcgtc

SEQ ID NO: 843582 - DNA, 75 bp, synthetic construct
  source 1..75: mol_type = other DNA
ggcaaagggctggcaaaaaaactggccttaatggcgatggagcaggcgcgagagatgggtttcaaacgctgctat

SEQ ID NO: 843583 - DNA, 75 bp, synthetic construct
  source 1..75: mol_type = other DNA
ctgtaatgcgtcgcctgacgctgcaggataatcccgctatcgcccgcgtcattcgtcaggtatccgccgaatacg

SEQ ID NO: 843584 - DNA, 75 bp, synthetic construct
  source 1..75: mol_type = other DNA
gtatacagacaaatacatatccaccgggcatattcacatgctatgcaatcagggatataaaggatacaccattcc

SEQ ID NO: 843585 - DNA, 75 bp, synthetic construct
  source 1..75: mol_type = other DNA
cttgctaagtttgcataacgcgcaattttatttgctacaacgcacgccagaggttgcccgcagccgcgccacccc

SEQ ID NO: 843586 - DNA, 75 bp, synthetic construct
  source 1..75: mol_type = other DNA
ttgactgcgcatggcctgaaaaaacagagccatggcgcaatgcttccgacgtcactgttgtttattgtcggacac

SEQ ID NO: 843587 - DNA, 75 bp, synthetic construct
  source 1..75: mol_type = other DNA
cgacggattgctggcgaaaaagggctgcccgcagcctggtcaggtcgcgattattgctgatgtcgacgagcgtac

SEQ ID NO: 843588 - DNA, 75 bp, synthetic construct
  source 1..75: mol_type = other DNA
gttcaacaattagcgaacaccattgtaaatagtcttattcaatatgacgatcctgcagcatggactgagcaggag

SEQ ID NO: 843589 - DNA, 75 bp, synthetic construct
  source 1..75: mol_type = other DNA
tgagcaaagctttatcgaacaagctgaatggagcatgttggttcagctgttcaatcaacgtctgcaggaacgcat

SEQ ID NO: 843590 - DNA, 75 bp, synthetic construct
  source 1..75: mol_type = other DNA
ttatcaacgctggtatcaaccaaataatatgacctttatcgtggtcggcgatatcgacagtaaagaagcgctggc

SEQ ID NO: 843591 - DNA, 75 bp, synthetic construct
  source 1..75: mol_type = other DNA
ggccaacctggccggtaaaactgggttggctgacaccgcgcggtggtgagctaatcgcctatctcggacattacc

SEQ ID NO: 843592 - DNA, 75 bp, synthetic construct
  source 1..75: mol_type = other DNA
cacctcaccggttacgatctgccgatggaagaactgaaaaacttccgtcagctgcactctaaaactccgggtcac

SEQ ID NO: 843593 - DNA, 75 bp, synthetic construct
  source 1..75: mol_type = other DNA
tgatgcgcttcttgattatactgaagaattggataaactgtacgacatagctttcttgattatccggaaagtgag

SEQ ID NO: 843594 - DNA, 75 bp, synthetic construct
  source 1..75: mol_type = other DNA
cgcagggcatgtgttcactggcggattttacgcaaatcgtgaatgaagcgcgtattccggcctgcagtttatatc

SEQ ID NO: 843595 - DNA, 75 bp, synthetic construct
  source 1..75: mol_type = other DNA
gaaaaaacatggcttttaagatcatgggtttcagcttataataatgatgaaaaagttaaaaactttataatcaca

SEQ ID NO: 843596 - DNA, 75 bp, synthetic construct
  source 1..75: mol_type = other DNA
atttctcctgcaacaggcacagggaatgccggagccggggtggggaaggatcaccgattcacaccagtggaacac

SEQ ID NO: 843597 - DNA, 75 bp, synthetic construct
  source 1..75: mol_type = other DNA
gcagtgaaagttaccctcggtccaaaaggccgtaacgtagttctggataaatctttcggtgcaccgaccatcacc

SEQ ID NO: 843598 - DNA, 75 bp, synthetic construct
  source 1..75: mol_type = other DNA
atgcgtcccgcgactatcgccccattagcgccatacgataaatgggatggtgagaaatgggtgacggatactgaa

SEQ ID NO: 843599 - DNA, 75 bp, synthetic construct
  source 1..75: mol_type = other DNA
atgcgtcccgcgactatcgccccattaccgccatacgataaatgggatggtgagaaatgggtgaccgatactgaa

SEQ ID NO: 843600 - DNA, 75 bp, synthetic construct
  source 1..75: mol_type = other DNA
atgcgtcccgcgactatcgccccattaacgccatacgataaatgggatggtgagaaatgggtgacagatactgaa

SEQ ID NO: 843601 - DNA, 75 bp, synthetic construct
  source 1..75: mol_type = other DNA
atgcgtcccgcgactatcgccccgttaacgccatacgataaatgggatggtgagaaatgggtgacggatactgaa

SEQ ID NO: 843602 - DNA, 75 bp, synthetic construct
  source 1..75: mol_type = other DNA
atgcgtcccgcgactatcgcccccttaacgccatacgataaatgggatggtgagaaatgggtgaccgatactgaa

SEQ ID NO: 843603 - DNA, 75 bp, synthetic construct
  source 1..75: mol_type = other DNA
atgcgtcccgcgactatcgcccctttatcgccatacgataaatgggatggtgagaaatgggtgacggatactgaa

SEQ ID NO: 843604 - DNA, 75 bp, synthetic construct
  source 1..75: mol_type = other DNA
gagtacaggcgttcccgctgatggtggttataccgttatccccgaactgaacaccgaaatcatgcgaatgctgac

SEQ ID NO: 843605 - DNA, 75 bp, synthetic construct
  source 1..75: mol_type = other DNA
tcagcggggtatccaggccgcgacggccgcgcttcaggggctggcggggggtaatttagcgggtgctctggccgg

SEQ ID NO: 843606 - DNA, 75 bp, synthetic construct
  source 1..75: mol_type = other DNA
gcacgtaaccagacggcaaccccaaaactgaatgaagtcagtatccgcctgtatccgatctacgcttacccgaaa

SEQ ID NO: 843607 - DNA, 75 bp, synthetic construct
  source 1..75: mol_type = other DNA
tgcgcagctgtcgcaaatcagctggcagcttcagggcgccgatcttccggctcagggcattaacggtaacggtag

SEQ ID NO: 843608 - DNA, 75 bp, synthetic construct
  source 1..75: mol_type = other DNA
tccattctcgaagccgaggcggtaagaacaggacagaataaaacaacagttctcaaagcggcgttggcggcattc

SEQ ID NO: 843609 - DNA, 75 bp, synthetic construct
  source 1..75: mol_type = other DNA
aatttccggctaaccgaagcctatgaagaaatcctagaagctgaagctatcaggactggtcagagcaaaacaacc

SEQ ID NO: 843610 - DNA, 75 bp, synthetic construct
  source 1..75: mol_type = other DNA
tgagaaatgggtgacggatacagatgcacagcatagcggcgcagtagaagccgcagaagcacagcgccagtcact

SEQ ID NO: 843611 - DNA, 75 bp, synthetic construct
  source 1..75: mol_type = other DNA
agcgtcttctgagcctgctgtcggcctttgaggtcgtggtatggatgacggatggtggatttgcccctatatttc

SEQ ID NO: 843612 - DNA, 75 bp, synthetic construct
  source 1..75: mol_type = other DNA
gtcttcggtgaacgcactctggccacactggaacgtcttctgagcctgctgtcggcctttgaggtcgtggtatag

SEQ ID NO: 843613 - DNA, 75 bp, synthetic construct
  source 1..75: mol_type = other DNA
cccgacttaacactgtgctggattacattgacgcggtgacggcaacagataccagcaccgcgccggatgtcatct

SEQ ID NO: 843614 - DNA, 75 bp, synthetic construct
  source 1..75: mol_type = other DNA
gaggcgattgtcgacgttcagcacagcctgatacagcgttttgaaagaggctttctgctgcgtggcgtggatatt

SEQ ID NO: 843615 - DNA, 75 bp, synthetic construct
  source 1..75: mol_type = other DNA
tgttggcgagcgcagaacccgctgcgtctacagtgccacgcgtgatatcacgctgcatccgctggcgttgccgga

SEQ ID NO: 843616 - DNA, 75 bp, synthetic construct
  source 1..75: mol_type = other DNA
gctttgagattgacgtggtgctgaacgagaactggcctcacgacctgccgtttgacagcgataatatccgtctgc

SEQ ID NO: 843617 - DNA, 75 bp, synthetic construct
  source 1..75: mol_type = other DNA
cagcagaagcacagcgccagtcgctgattgatgctgcaatggcttccattagtctgattcaactgaaatttcagg

SEQ ID NO: 843618 - DNA, 75 bp, synthetic construct
  source 1..75: mol_type = other DNA
tgagaaatgggtgacggatacggatgcacagcatagcgacgcagtagaagccgcagaagcacagcgccagtcact

SEQ ID NO: 843619 - DNA, 75 bp, synthetic construct
  source 1..75: mol_type = other DNA
tgagaaatgggtgacggataccgatgcacagcatagcgccgcagtagaagcagcagaagcacagcgccagtcact

SEQ ID NO: 843620 - DNA, 75 bp, synthetic construct
  source 1..75: mol_type = other DNA
cggcagaagcacagcgccagtcgctgattgattctgcaatggcttccattagtctgattcaactgaaattccagg

SEQ ID NO: 843621 - DNA, 75 bp, synthetic construct
  source 1..75: mol_type = other DNA
ccgcagaagcacagcgccagtcgctgattgattctgcaatggcttccattagtctgattcaactgaaattgcagg

SEQ ID NO: 843622 - DNA, 75 bp, synthetic construct
  source 1..75: mol_type = other DNA
ctgcagaagcacagcgccagtcgctgattgatactgcaatggcttccattagtctgattcaactgaaattccagg

SEQ ID NO: 843623 - DNA, 75 bp, synthetic construct
  source 1..75: mol_type = other DNA
ctgtggctgatgaagaacgtaaccagcctggtgttcccgtcgaagataaaatcaccaaaaatgagctacgctctt

SEQ ID NO: 843624 - DNA, 75 bp, synthetic construct
  source 1..75: mol_type = other DNA
gcgttataaaaacgtgcctgttcctacctcatatatggctgaaaaatcgcagtacgattttgttggcgcgtggtg

SEQ ID NO: 843625 - DNA, 75 bp, synthetic construct
  source 1..75: mol_type = other DNA
tagcgatccatgcgtggaataagcaacacgattatgagctggccgcgcgttatcttgataatgcttatcagcttg

SEQ ID NO: 843626 - DNA, 75 bp, synthetic construct
  source 1..75: mol_type = other DNA
tggataagttaagcggagccacaccggagaaacgactggcgcgtctggaaaataatctggaaattgcactgaaac

SEQ ID NO: 843627 - DNA, 75 bp, synthetic construct
  source 1..75: mol_type = other DNA
acttcgatgcagggctggatttttgccaacagagtctgcgcgcctgcccaaccaatcagcaagtgctgtgcctcc

SEQ ID NO: 843628 - DNA, 75 bp, synthetic construct
  source 1..75: mol_type = other DNA
ggcgagcggtctggagcggcaacagtaaagcggggggctattacggtctggcacggctggcggcgcgtaatggca

SEQ ID NO: 843629 - DNA, 75 bp, synthetic construct
  source 1..75: mol_type = other DNA
gcgtgttgcacggtatcaatcctgaaaggctgaccattgagctctccgatgccgacggcaatatcatactgagtt

SEQ ID NO: 843630 - DNA, 75 bp, synthetic construct
  source 1..75: mol_type = other DNA
tttacctggctggatgcttatgaagagaaacgtttcgagcaatatttcctgccttaccattctctgggcatggtg

SEQ ID NO: 843631 - DNA, 75 bp, synthetic construct
  source 1..75: mol_type = other DNA
tcacctccgacagtgaaagcgaaggtggcgtgggcggtttcgatggcgctgaagaactggatccgttgttcgatc

SEQ ID NO: 843632 - DNA, 75 bp, synthetic construct
  source 1..75: mol_type = other DNA
tgatcgtggttaaagccctggccgaaagtccgtggggtgtcttcaccgtttgctcaaccgtaccgattgcgctgt

SEQ ID NO: 843633 - DNA, 75 bp, synthetic construct
  source 1..75: mol_type = other DNA
tgccgataaccagcctgattttacctggcttgatgcttacgaagagaagcgtttcgagcagtatttcctgcctta

SEQ ID NO: 843634 - DNA, 75 bp, synthetic construct
  source 1..75: mol_type = other DNA
cgcgagaaactgctgcgcgattacccgctgaacgccaccctgtggtggctgaactggttcgatggtcgtaccgag

SEQ ID NO: 843635 - DNA, 75 bp, synthetic construct
  source 1..75: mol_type = other DNA
ctgctggtgttaagtggtcgtcaggacaacgcgcgtttgcagcgcgagaaactgctgcgcgattatccgctgaac

SEQ ID NO: 843636 - DNA, 75 bp, synthetic construct
  source 1..75: mol_type = other DNA
gtgtttgatcacggcaaacgggccgtctccgctttccccatcgccaccggcacttactacaaagtggactactcc

SEQ ID NO: 843637 - DNA, 75 bp, synthetic construct
  source 1..75: mol_type = other DNA
ttcatggcttacacccgtgcggcgaccagtgacaaaacccgcgcttttggcaccattgaaaaagtggtagcggca

SEQ ID NO: 843638 - DNA, 75 bp, synthetic construct
  source 1..75: mol_type = other DNA
aagccaaatggttatcggacggtcggaacatttcgtacagcctttacgttcagtgagttagctggcctggatgta

SEQ ID NO: 843639 - DNA, 75 bp, synthetic construct
  source 1..75: mol_type = other DNA
ggcgtgggaaaatttccgttttccaagcggacccctatatgaacttccaagcggcatcctattatttcattagct

SEQ ID NO: 843640 - DNA, 75 bp, synthetic construct
  source 1..75: mol_type = other DNA
aaaccaacgaataccagaagctggtgtcagtgggcggcactaccgttaagcgcggcaccgaaggcgaagcgcgta

SEQ ID NO: 843641 - DNA, 75 bp, synthetic construct
  source 1..75: mol_type = other DNA
aggaaattctcgacttctctgaggtggatattctgggctggctgtcttctgaaattgccgacaccttcaccgcta

SEQ ID NO: 843642 - DNA, 75 bp, synthetic construct
  source 1..75: mol_type = other DNA
cgagatctattgcgctgttatcatacatattaaggtcatggcttcctcagtgttgtttgaaaacattctttctgg

SEQ ID NO: 843643 - DNA, 75 bp, synthetic construct
  source 1..75: mol_type = other DNA
cagagatgctgaacgcactggactgtcagcgcacgctaccgctttacctgcaagccagtttgctgccaaaagctg

SEQ ID NO: 843644 - DNA, 75 bp, synthetic construct
  source 1..75: mol_type = other DNA
cgtggatctccggcgggattgagtttaactggccgcaacaccatcgcccgaccacctttatgcccgttgatttca

SEQ ID NO: 843645 - DNA, 75 bp, synthetic construct
  source 1..75: mol_type = other DNA
ggcgtgcggtctggagcggcaatagtaaagcaggcggctattatggtctggcacggctggcggcgcgtaatggta

SEQ ID NO: 843646 - DNA, 75 bp, synthetic construct
  source 1..75: mol_type = other DNA
ttactttttgttttgtagctagcagtaatgcgtcaactgactcattagcgggagttacgcttggtcagctattgt

SEQ ID NO: 843647 - DNA, 75 bp, synthetic construct
  source 1..75: mol_type = other DNA
caacctgacttgttgtcgctgtatggcgatttacaacagcagcataaagaaaaatgcctgatggtggcgatgctg

SEQ ID NO: 843648 - DNA, 75 bp, synthetic construct
  source 1..75: mol_type = other DNA
tcgctataaaaatgtgcctgttccaacctcatatatggccgaaaaatcgcagtacgattttgtcggcgcgtggtg

SEQ ID NO: 843649 - DNA, 75 bp, synthetic construct
  source 1..75: mol_type = other DNA
gtctgattgcactggggctgttgtccggaaatgtgcaggccgaagacaaggacaagatgtgtgacgggaactttg

SEQ ID NO: 843650 - DNA, 75 bp, synthetic construct
  source 1..75: mol_type = other DNA
tgttcgattgccagagaaaaaatgaattctgtgatggggaatatatcggaaagcgtttcttttgatgttccgggt

SEQ ID NO: 843651 - DNA, 75 bp, synthetic construct
  source 1..75: mol_type = other DNA
acgcaaagcgtcaatttctggcgtacagcgtcagttccgcattggttataaccgtgcagcgcgtattatcgaaca

SEQ ID NO: 843652 - DNA, 75 bp, synthetic construct
  source 1..75: mol_type = other DNA
tcccgcagcgtcagcggacgctgcctgtgaagggcggtttgttaacccgatcacggatatctgctggaactgcat

SEQ ID NO: 843653 - DNA, 75 bp, synthetic construct
  source 1..75: mol_type = other DNA
gatgcgattaaaacggtgaaggggaaacccatcaatgcgttgttctggtgtgccggttctcacggcagtctgtac

SEQ ID NO: 843654 - DNA, 75 bp, synthetic construct
  source 1..75: mol_type = other DNA
ttgacggtgatgcaccggatacggataacccgtccatgcccctgcagatttgtcctctggtgccggtgggttacc

SEQ ID NO: 843655 - DNA, 75 bp, synthetic construct
  source 1..75: mol_type = other DNA
aaactgtttctgcatcgcagagtgactgggagaacagggagttctcactcaacaatctgaatcttaataatgcgg

SEQ ID NO: 843656 - DNA, 75 bp, synthetic construct
  source 1..75: mol_type = other DNA
tggcctggggttatgccggtaatgcgggcaatattaccaacccattttgtcggataagcgataaatattgccatc

SEQ ID NO: 843657 - DNA, 75 bp, synthetic construct
  source 1..75: mol_type = other DNA
ccgcggactctaccctgccccgcgtgcgcacgcatatccgtgactacgttcgcaatgacgtttatctcaacaact

SEQ ID NO: 843658 - DNA, 75 bp, synthetic construct
  source 1..75: mol_type = other DNA
aacaacctgcgcaacaaccttactacgctcctgcggcggaacaacctgttcagcaaccgtattacgcaactgcgc

SEQ ID NO: 843659 - DNA, 75 bp, synthetic construct
  source 1..75: mol_type = other DNA
agcctgcagtgcaatataatgagccgctgcaacaaccagtacagccgcagcagccgtattatgcacctgcagctg

SEQ ID NO: 843660 - DNA, 75 bp, synthetic construct
  source 1..75: mol_type = other DNA
cgcattcatggtatgccggtgctgaagcaggctaccgctgtcatgtcactgaggatacctggattgagccacagg

SEQ ID NO: 843661 - DNA, 75 bp, synthetic construct
  source 1..75: mol_type = other DNA
tgaccctacctggacagacagcagtctgaccaccattctcaacccggaagcggtcatctttgcaaatccgatagc

SEQ ID NO: 843662 - DNA, 75 bp, synthetic construct
  source 1..75: mol_type = other DNA
ttcccggagaaaccagctgaataccgactgaatcatccggccggggcgctgctggtgagctatgccgggtcgcgc

SEQ ID NO: 843663 - DNA, 75 bp, synthetic construct
  source 1..75: mol_type = other DNA
tgttttcattttatttttcagtaaaatacacatagcatcatttctttttgggctcctggcatttttgctaaataa

SEQ ID NO: 843664 - DNA, 75 bp, synthetic construct
  source 1..75: mol_type = other DNA
ggcagattctggattcactggcggaagccgggatccccgacggaattgtggtggggataagccagggctggaaac

SEQ ID NO: 843665 - DNA, 75 bp, synthetic construct
  source 1..75: mol_type = other DNA
cgcgtgccaactcgtcgtgaactggcgtcatatggcattaagctgccctcacagcgtgcagcagaagaaaaagcc

SEQ ID NO: 843666 - DNA, 75 bp, synthetic construct
  source 1..75: mol_type = other DNA
gcgacctactttgtccgggccattggtgattcgatgaaagatatggggttgcactccggggatttaatggttgtc

SEQ ID NO: 843667 - DNA, 75 bp, synthetic construct
  source 1..75: mol_type = other DNA
gacaaagctgaaaaacccatgcagggggatattgtcatcgcggaaacagatggcgagttcaccgttaaacgcctg

SEQ ID NO: 843668 - DNA, 75 bp, synthetic construct
  source 1..75: mol_type = other DNA
gcaagcatggtgctgcgtcttgatcaagcaggcagaccttataacgaaggtgagcaggtggttattggtggtaat

SEQ ID NO: 843669 - DNA, 75 bp, synthetic construct
  source 1..75: mol_type = other DNA
gtgtggtggtttctgctgtccgggcatgtttccggcgcatccgctgatgcggcctgtgaggggcgttttgtcaac

SEQ ID NO: 843670 - DNA, 75 bp, synthetic construct
  source 1..75: mol_type = other DNA
tcccgtagcgtcagcggacgctgcctgtgaggggcggtttgttaacccgatcacggatatttgctggagctgcat

SEQ ID NO: 843671 - DNA, 75 bp, synthetic construct
  source 1..75: mol_type = other DNA
actggcggcaggcggcgggttacacgattctggccccgacagtggaggtggcagccaacgccttcaaccctgcca

SEQ ID NO: 843672 - DNA, 75 bp, synthetic construct
  source 1..75: mol_type = other DNA
ctcgaagtccacgctggccgcggggatcatgatgacggcgctgttactgaactggcggcaggcggcgggttacac

SEQ ID NO: 843673 - DNA, 75 bp, synthetic construct
  source 1..75: mol_type = other DNA
ctcttatcccgttcggtggtatcaaaatgatcgagggttcctgcaaagcgtacaaccgcgaactggacccggaat

SEQ ID NO: 843674 - DNA, 75 bp, synthetic construct
  source 1..75: mol_type = other DNA
acgtaaaggtgatattggcgcatttgattcgccgaaatttatcggcctgccggtgggcgaagtgctgaacgtggc

SEQ ID NO: 843675 - DNA, 75 bp, synthetic construct
  source 1..75: mol_type = other DNA
acaagttgatcaaatcatcgacgctgaactgtttgcactggcaggtctggatgcgcagcatctgcaactgctggt

SEQ ID NO: 843676 - DNA, 75 bp, synthetic construct
  source 1..75: mol_type = other DNA
tacacaccacggcaaatttacccaacatgcagcgcgtagtggggatgccagatttacatcccggacgcggctacc

SEQ ID NO: 843677 - DNA, 75 bp, synthetic construct
  source 1..75: mol_type = other DNA
ggtaatttgtcgcgataaacaactcatctttgaagaagcgccacaagcctataaatcggctgaaagcgtggtgca

SEQ ID NO: 843678 - DNA, 75 bp, synthetic construct
  source 1..75: mol_type = other DNA
cgggaggcagaaaagtcatatttgatggtagtgtaaacctgccggaaggtaccctgaatcaggacagtggcactc

SEQ ID NO: 843679 - DNA, 75 bp, synthetic construct
  source 1..75: mol_type = other DNA
cggacgcccgactgtggttctcggggatgcacgccaggtcaatccggataatatttcatggggataccggggagg

SEQ ID NO: 843680 - DNA, 75 bp, synthetic construct
  source 1..75: mol_type = other DNA
gaacgctacgtttctgtatgccgtaaacactataaagaggcgttagaagtcggctcattaacggctattcaggaa

SEQ ID NO: 843681 - DNA, 75 bp, synthetic construct
  source 1..75: mol_type = other DNA
ttgatctcacctggacattggtggcaaacggctaccgtattcggcaggcgaatcgctgcatcgtatacccacagg

SEQ ID NO: 843682 - DNA, 75 bp, synthetic construct
  source 1..75: mol_type = other DNA
atggacgacctgacccaacgctactttgaggccgaaatgcgctacctgcgtgaagcggggaaagaatttgcgcag

SEQ ID NO: 843683 - DNA, 75 bp, synthetic construct
  source 1..75: mol_type = other DNA
gccagcagaacgcgccgctgggcagtaccgacagccccgccaccgatgcggtgcgctttcgtcctcatcccggta

SEQ ID NO: 843684 - DNA, 75 bp, synthetic construct
  source 1..75: mol_type = other DNA
gtcacttaaaaaactcaggccgtagtcggtaacctcgcgcatacaaccgggcagtgatgtgattgtctgcgctga

SEQ ID NO: 843685 - DNA, 75 bp, synthetic construct
  source 1..75: mol_type = other DNA
gaggacggttgtggcgcacgtctgcactctggccacactggagcgtattctgagcctgctgtcggcctttgaggt

SEQ ID NO: 843686 - DNA, 75 bp, synthetic construct
  source 1..75: mol_type = other DNA
gggcgaacagtggttccgtgctggcaaccggtaaccttactgcttcggcaaccggtcagttgaccagtaccggcg

SEQ ID NO: 843687 - DNA, 75 bp, synthetic construct
  source 1..75: mol_type = other DNA
agaacccgtctccgggacagtccctgaatatcccgctggtcagtgcaccggccggaacatcaggggatatcttta

SEQ ID NO: 843688 - DNA, 75 bp, synthetic construct
  source 1..75: mol_type = other DNA
attgccgagctggtgccgtttgcccatcgttatggtgcaaaaattttcgtcacgcttaacaccattttgcatgat

SEQ ID NO: 843689 - DNA, 75 bp, synthetic construct
  source 1..75: mol_type = other DNA
tccgtcaggggccggtagaatggctctggcgtcagttaactttgcgtgccgccggatctgcattatccaaaacat

SEQ ID NO: 843690 - DNA, 75 bp, synthetic construct
  source 1..75: mol_type = other DNA
aagtcgctttaaattggtgctggcgattgcttgcgtcgggcggatggcgctgagcaactacctgctgcaaacgct

SEQ ID NO: 843691 - DNA, 75 bp, synthetic construct
  source 1..75: mol_type = other DNA
cgccgattgaactacacgccagcacgcagtgtgatattcgcactgtagagaaagcgaagtttctttcggacgtcg

SEQ ID NO: 843692 - DNA, 75 bp, synthetic construct
  source 1..75: mol_type = other DNA
tcatcaggtcgtactgaacatttctttgttccatcgacggaaaagactttccaccgtggtagcacagattatttt

SEQ ID NO: 843693 - DNA, 75 bp, synthetic construct
  source 1..75: mol_type = other DNA
gaaagatcatctcgatgttgccgttaccgagccactggcaaatggcgatggcctgaacgtgatgattaaacgtga

SEQ ID NO: 843694 - DNA, 75 bp, synthetic construct
  source 1..75: mol_type = other DNA
tgaaattcctcacgctttttgcgctgctgtttggtgctggcctgcaaatgttgctgccccgtggcagacgctgga

SEQ ID NO: 843695 - DNA, 75 bp, synthetic construct
  source 1..75: mol_type = other DNA
atcgctggtgtgccttcttacttcaaatgccgcgggaactgagtgcgccgtttcaggcgattggctatgcgtcgc

SEQ ID NO: 843696 - DNA, 75 bp, synthetic construct
  source 1..75: mol_type = other DNA
cattttgtatgaaaaatactggaaacttcacggcggcgttgaagccatcagtaaccgcgccgacggggtagggaa

SEQ ID NO: 843697 - DNA, 75 bp, synthetic construct
  source 1..75: mol_type = other DNA
tctggtggggcttggcgttttgctgttattggggctgatttccgacagccagaccagccgcgcctggacgccgga

SEQ ID NO: 843698 - DNA, 75 bp, synthetic construct
  source 1..75: mol_type = other DNA
atggacctgggcattcttgatctcatcggccaggtgaaattcctcacgctttttgcgctgctgtttggtgctgga

SEQ ID NO: 843699 - DNA, 75 bp, synthetic construct
  source 1..75: mol_type = other DNA
cagtttactggcactgggtgcgcagtatggctggcaactggcggggatgatgttaattggcgcggcattgatgcg

SEQ ID NO: 843700 - DNA, 75 bp, synthetic construct
  source 1..75: mol_type = other DNA
taataagacctttgaccgtctggaagctagagcaaaaaatactaaagttttccgtttcacaagtcaggttaatga

SEQ ID NO: 843701 - DNA, 75 bp, synthetic construct
  source 1..75: mol_type = other DNA
gaaaccagctttatgacctttagcagtaatatctacgaccgatattcagaaactatgttattaagttcatcattc

SEQ ID NO: 843702 - DNA, 75 bp, synthetic construct
  source 1..75: mol_type = other DNA
cgctattaatcctccaagacagccaagagtaaatactggtgacagagcagtaagagcagcttatcaagctaacat

SEQ ID NO: 843703 - DNA, 75 bp, synthetic construct
  source 1..75: mol_type = other DNA
tcttcgatgaggtgacattagcttaccgttcactaaatgacactcagaggaaaattgttgatggtttatctgatg

SEQ ID NO: 843704 - DNA, 75 bp, synthetic construct
  source 1..75: mol_type = other DNA
cgcagacaatgctagggaacttgaagaatacttggaacaactcactaacggatatcttcagaggttctgaagatg

SEQ ID NO: 843705 - DNA, 75 bp, synthetic construct
  source 1..75: mol_type = other DNA
attagtgagctatcacgcaaggtagacgctttaacagcagaagccaagaagcccttggcagttaatatcactggt

SEQ ID NO: 843706 - DNA, 75 bp, synthetic construct
  source 1..75: mol_type = other DNA
gaccatggtggtgaacgccagtgacaagctcacccacagcgggaaaagcagcgccccgtcgctcagcctcagtgc

SEQ ID NO: 843707 - DNA, 75 bp, synthetic construct
  source 1..75: mol_type = other DNA
agacgtatggctgcggtgagtaatgatattgctgagcattttaccaaccatgttatgccgaaaaagatgaaaggc

SEQ ID NO: 843708 - DNA, 75 bp, synthetic construct
  source 1..75: mol_type = other DNA
aacaagcgcaggatatcttcgttgatgagtggctaaaagacgcgctttgttcgttaaaccctgatatcggcagac

SEQ ID NO: 843709 - DNA, 75 bp, synthetic construct
  source 1..75: mol_type = other DNA
accgatgcggaaaaagtagaactgggcggttccggctcaggaaccggtacaccaccaccatcggaaaatgatcct

SEQ ID NO: 843710 - DNA, 75 bp, synthetic construct
  source 1..75: mol_type = other DNA
tttgtgcaactgagcagtgccaccgacagtgacagcgaagaaacagccgcaacctctaaggccatcaaaacgctg

SEQ ID NO: 843711 - DNA, 75 bp, synthetic construct
  source 1..75: mol_type = other DNA
ccggaccacaagggccaaccggaaggctggtacccggggaaatttacagcatcggaacatacattattgccgcac

SEQ ID NO: 843712 - DNA, 75 bp, synthetic construct
  source 1..75: mol_type = other DNA
agagcttaaggggcaactggctgaagctgttcctggtatggttcaggtattcgctaaagcaaccggaaagagtga

SEQ ID NO: 843713 - DNA, 75 bp, synthetic construct
  source 1..75: mol_type = other DNA
caaactgaaaggtcttaacccaattgtcgagaaatacattaagagccagttttacgcattaagtagtaaagctgg

SEQ ID NO: 843714 - DNA, 75 bp, synthetic construct
  source 1..75: mol_type = other DNA
atagtttaaaagtcttggctggtgttattgctgtaaataaagttgttggtgtaactagaagtatttacgggctta

SEQ ID NO: 843715 - DNA, 75 bp, synthetic construct
  source 1..75: mol_type = other DNA
atgagcaaatttacagttgatagttttattgttgagctaggcttcagtgaaaacgttgttaagggcttgcaaaga

SEQ ID NO: 843716 - DNA, 75 bp, synthetic construct
  source 1..75: mol_type = other DNA
ctggtgaagcaactgttagaccggatgcaccatctttctttagcttcaatcaatcagctaatgaccaattcacgc

SEQ ID NO: 843717 - DNA, 75 bp, synthetic construct
  source 1..75: mol_type = other DNA
agaggttctgaaaatggtctgcaagatttcacaagaagcttaacaacgcttttaaacagtttaggtgggagtggt

SEQ ID NO: 843718 - DNA, 75 bp, synthetic construct
  source 1..75: mol_type = other DNA
aaagccgagaaacaaacgatgcaaatcgcatcaagaattgaaaaacgactaaataaagcttttaaagttaatcct

SEQ ID NO: 843719 - DNA, 75 bp, synthetic construct
  source 1..75: mol_type = other DNA
caatgctcaacttgctatggctgtatcagagttaggaagaaaggtagacgctttaacagtagaagctaagaagcc

SEQ ID NO: 843720 - DNA, 75 bp, synthetic construct
  source 1..75: mol_type = other DNA
ctttagggcagcttgaaaggaagtttaacaaggcctttgacaagattgaacagagagcaagaaatactaaagctt

SEQ ID NO: 843721 - DNA, 75 bp, synthetic construct
  source 1..75: mol_type = other DNA
tcttcgatgaggtgacattagcttatcgtggtttaaccgatgagcaaaagaaagtagttgatgctttaggttctg

SEQ ID NO: 843722 - DNA, 75 bp, synthetic construct
  source 1..75: mol_type = other DNA
tttacgcattaagtagtaaagctggtcagatggataacaccaagtttaatgaagcccttgctaaactaaattcaa

SEQ ID NO: 843723 - DNA, 75 bp, synthetic construct
  source 1..75: mol_type = other DNA
ttatcgttgaactaggcttcaatgaaaacgttattaaaggtctgcaaagagttgaaaaggcagctttgcagtcag

SEQ ID NO: 843724 - DNA, 75 bp, synthetic construct
  source 1..75: mol_type = other DNA
ggaagtggtaaaagtcttggtgaatctcttggtagtctcatgacttctatgtcacatggtgtcgattcattgact

SEQ ID NO: 843725 - DNA, 75 bp, synthetic construct
  source 1..75: mol_type = other DNA
atgtttaacgaacaaaccgttacagaaaatggaattatcgaccgtttaaaaggtttaagcggagtcaagtggact

SEQ ID NO: 843726 - DNA, 75 bp, synthetic construct
  source 1..75: mol_type = other DNA
aaaatcaggctgacacggagatgttgaaagaacaacaaagggctgaatataagcaacaacagatgaacgcaccaa

SEQ ID NO: 843727 - DNA, 75 bp, synthetic construct
  source 1..75: mol_type = other DNA
gaaaatatgagccttatcttctcaatgataattccatactctccagaacccttcttgacattttcggagggcagc

SEQ ID NO: 843728 - DNA, 75 bp, synthetic construct
  source 1..75: mol_type = other DNA
ttgacccggggcatgaccgtcgtactgtggacgaaaaatttgagcagaagaaaagcgggctgacggttgccctgt

SEQ ID NO: 843729 - DNA, 75 bp, synthetic construct
  source 1..75: mol_type = other DNA
atgccttcgatgatagcgataattttactcatcatccttcacatctggctctgtagacaggatggtgatcacttc

SEQ ID NO: 843730 - DNA, 75 bp, synthetic construct
  source 1..75: mol_type = other DNA
gactggatattgagctggcggcaagcgatctggcaaagattctggatgctaagtttgccgatattgcacgccgtg

SEQ ID NO: 843731 - DNA, 75 bp, synthetic construct
  source 1..75: mol_type = other DNA
tggcggtggccgttacgccggtcgccggtcaactggatcttaaaaaggtggcaaaggcgctgggtgccaaaaagg

SEQ ID NO: 843732 - DNA, 75 bp, synthetic construct
  source 1..75: mol_type = other DNA
aagaacagcagcaaaggtggcggcgtgggtgtcagctttggtggtggaaccaatggcggaggcctcagtatcttc

SEQ ID NO: 843733 - DNA, 75 bp, synthetic construct
  source 1..75: mol_type = other DNA
caattaaatgacgttttacgtaaagcgttaactcaatctccattgcgcatggcctgggcggagaatgctcggtat

SEQ ID NO: 843734 - DNA, 75 bp, synthetic construct
  source 1..75: mol_type = other DNA
ctgaacgttttcaaattcttcctcccggtatttatccggacagaaaatacagtgagcaaatcccaaacagccgtg

SEQ ID NO: 843735 - DNA, 75 bp, synthetic construct
  source 1..75: mol_type = other DNA
atattgtcgatattgccaaccgcgatggtcaattgcagttgaacgtgacagatcgtaaaaccggacaaacctcga

SEQ ID NO: 843736 - DNA, 75 bp, synthetic construct
  source 1..75: mol_type = other DNA
gtcaattgcagttgaatgtgacggatcgcaagacaggacaaacctcgaccatccaggtttcgggtttacaaaata

SEQ ID NO: 843737 - DNA, 75 bp, synthetic construct
  source 1..75: mol_type = other DNA
tcgtaaaaccggacaaacctccaggtttcgggtttacaaaataactcaaccgatttttaagccccagcttcataa

SEQ ID NO: 843738 - DNA, 75 bp, synthetic construct
  source 1..75: mol_type = other DNA
tggagtgaatccggattaaatatctcattgctgatgcttgatattgagcatctggcgcgcggtaaggggctgtgt

SEQ ID NO: 843739 - DNA, 75 bp, synthetic construct
  source 1..75: mol_type = other DNA
gtgccgacttctaattctaatacgtctgttcagaatatggggaatacagattctgttgtatatagcaccattcaa

SEQ ID NO: 843740 - DNA, 75 bp, synthetic construct
  source 1..75: mol_type = other DNA
acctcaacttccagccttcgttcagatcctaaactttggttggcgttggggactgttgctacaggtctgataggg

SEQ ID NO: 843741 - DNA, 75 bp, synthetic construct
  source 1..75: mol_type = other DNA
ggcgcagcagcgatatgatgatcagcatgccagacgtcaggaggaattacagctttcatcgggtattggttacgg

SEQ ID NO: 843742 - DNA, 75 bp, synthetic construct
  source 1..75: mol_type = other DNA
ctctttagtctcgaaagccaaacagatagggaatgcagtccctcccaagatggctgaagctcttggaagggctat

SEQ ID NO: 843743 - DNA, 75 bp, synthetic construct
  source 1..75: mol_type = other DNA
actcgttgtattagctattcaaatggacgttttggacatccaacacaaaatcgagcaatatcggttcgtgaagca

SEQ ID NO: 843744 - DNA, 75 bp, synthetic construct
  source 1..75: mol_type = other DNA
atggtcacggttgcttcagatatcgccgaagcccgtcagaggataatagataaattagaaccaaaggatacaaag

SEQ ID NO: 843745 - DNA, 75 bp, synthetic construct
  source 1..75: mol_type = other DNA
tcagggcggactcgatactcttaacaagcaaattggctcttcggtatttagtgttgaaaccctggaaaatggtca

SEQ ID NO: 843746 - DNA, 75 bp, synthetic construct
  source 1..75: mol_type = other DNA
tgctgggcgctttgtttatggaaggtgtctcgtcagtcattctgtttcgtggttgtggttctgcagccgtatccg

SEQ ID NO: 843747 - DNA, 75 bp, synthetic construct
  source 1..75: mol_type = other DNA
cgcgaatacccgtatttgccacggtgccgttattcagggtccggtagtgattggcgcaaactgcctaataggtaa

SEQ ID NO: 843748 - DNA, 75 bp, synthetic construct
  source 1..75: mol_type = other DNA
actggtattacacaggcgttggctttgacaccggaaccggatgatcctacaaccaccgatcctgagcaggctgca

SEQ ID NO: 843749 - DNA, 75 bp, synthetic construct
  source 1..75: mol_type = other DNA
aagtctacacaaataaaaaaagcttctgatttgaaggagcatctaaaaaggttcgatataattcattctagtgga

SEQ ID NO: 843750 - DNA, 75 bp, synthetic construct
  source 1..75: mol_type = other DNA
ggttattgtcgcatcagtgcccgcatggcttttgctttgcattttgtatacggggtttacaggaacatccacaca

SEQ ID NO: 843751 - DNA, 75 bp, synthetic construct
  source 1..75: mol_type = other DNA
tggtgcagtgccctgggggtggatgccggatgccatgccacgctggtgcattttccggcctggccggcggtgtgg

SEQ ID NO: 843752 - DNA, 75 bp, synthetic construct
  source 1..75: mol_type = other DNA
cgcctgggcccgggagttcggggagcttaaaggcaaaaaacactatcacctgctgctgctggtcaaccgggatac

SEQ ID NO: 843753 - DNA, 75 bp, synthetic construct
  source 1..75: mol_type = other DNA
caacggacgcagctgtgatatcccgcttcatcaatgccctgaaagcccgaatccacgcttaccagaagcgtaagc

SEQ ID NO: 843754 - DNA, 75 bp, synthetic construct
  source 1..75: mol_type = other DNA
acaaccctgcattacgtctgggcccgggagtttggggagtgcaaaggtaaaaaacactatcacctgatgttgctg

SEQ ID NO: 843755 - DNA, 75 bp, synthetic construct
  source 1..75: mol_type = other DNA
ggaacgtgctgactatctggcgaaggaacataccaaagctcactgcaccggtgagcgcaattttggctgtagccg

SEQ ID NO: 843756 - DNA, 75 bp, synthetic construct
  source 1..75: mol_type = other DNA
gggaattcggtgtgctcaggggtaaaaaacactatcacctgctgctgctggttaaccgggatacctggtgtcgtg

SEQ ID NO: 843757 - DNA, 75 bp, synthetic construct
  source 1..75: mol_type = other DNA
tccggggtcactggccgggatgattcaacaggcctggtgcagtgccctgggggtggatgccgggccttatgccac

SEQ ID NO: 843758 - DNA, 75 bp, synthetic construct
  source 1..75: mol_type = other DNA
tccggggtcactggccggcatgattgaacaggcctggtgcagtgccctgggggtggatgccgggccttatgccac

SEQ ID NO: 843759 - DNA, 75 bp, synthetic construct
  source 1..75: mol_type = other DNA
tccgggctcactggccgggatgattgaacaggcctggtgcagtgccctgggggtggatgccgggccttatgccac

SEQ ID NO: 843760 - DNA, 75 bp, synthetic construct
  source 1..75: mol_type = other DNA
aacggacgcagctgtgatatcccgcttcatcaatgccctgaaagcccgaatccacgcttaccagaagcgtaagcg

SEQ ID NO: 843761 - DNA, 75 bp, synthetic construct
  source 1..75: mol_type = other DNA
aacggacgcagctgtgatatcccgcttcatcaatgccctgaaagcccgaatctacgcttaccagaaccgtaagct

SEQ ID NO: 843762 - DNA, 75 bp, synthetic construct
  source 1..75: mol_type = other DNA
aacggacgcagctgtgatatcccgcttcatcaatgccctgaaagcccgaatctacgcttaccagaatcgtaagcc

SEQ ID NO: 843763 - DNA, 75 bp, synthetic construct
  source 1..75: mol_type = other DNA
ccgtgaaggtaaacgcgtacatcccacgaccctgcattacgcctgggcccgggaattcggggagcttaaatgcaa

SEQ ID NO: 843764 - DNA, 75 bp, synthetic construct
  source 1..75: mol_type = other DNA
tgaccattgctgaaaaactcggcggctggattttaaacattctcaccttcgctagtaatcgtacccgtcgcgatg

SEQ ID NO: 843765 - DNA, 75 bp, synthetic construct
  source 1..75: mol_type = other DNA
gcagccgcaacagccggttgcaccgcagcagcaatatcagcagccacaacaaccggttgcgccgcagcagcaata

SEQ ID NO: 843766 - DNA, 75 bp, synthetic construct
  source 1..75: mol_type = other DNA
cggaagatgtgcgtttcatcatgatcgacccgaaaatgctggagctttcggtatatgaaggtattccgcatctgc

SEQ ID NO: 843767 - DNA, 75 bp, synthetic construct
  source 1..75: mol_type = other DNA
gcattccgcatctgttaacggaagtcgttactgatatgaaagatgccgccaacgcgctgcgctggtgtgttaacg

SEQ ID NO: 843768 - DNA, 75 bp, synthetic construct
  source 1..75: mol_type = other DNA
tttggcccaagttggggttggagtgcaactgaaattaaaggcgttgacgttaatggcacttcaacaagtgaggtt

SEQ ID NO: 843769 - DNA, 75 bp, synthetic construct
  source 1..75: mol_type = other DNA
cgttgctggatgatggtccacacgaaccgttgtttacgccaattgttgaacctgtacagcagccgcaacaaccgg

SEQ ID NO: 843770 - DNA, 75 bp, synthetic construct
  source 1..75: mol_type = other DNA
gtaccgttgtactgattaagatgaagcgcacccaatacatctgggttaccgttatcccggcggtatggctgctta

SEQ ID NO: 843771 - DNA, 75 bp, synthetic construct
  source 1..75: mol_type = other DNA
ttcagcaggtgctggagcgtgctgactatctggcgaaggagagtaccaaagtttacggcaccggtgagcgcaact

SEQ ID NO: 843772 - DNA, 75 bp, synthetic construct
  source 1..75: mol_type = other DNA
tcgacgcttaccagaaacgtaagcatcgggaaggtaaacgcgtgcatcccacaaccctgcattacgtctgggccc

SEQ ID NO: 843773 - DNA, 75 bp, synthetic construct
  source 1..75: mol_type = other DNA
attgccaacatgaaccacatcgttgtgaacaactacaccaacgcaggcctgagcattctgttcctgattgtggtg

SEQ ID NO: 843774 - DNA, 75 bp, synthetic construct
  source 1..75: mol_type = other DNA
gttgtccggcatgatggtgtggaatatctggcagtgtactggggggagggtgccacggtacctgatgaataccgt

SEQ ID NO: 843775 - DNA, 75 bp, synthetic construct
  source 1..75: mol_type = other DNA
aagcggtaccgggataaccggccctgtatggaatgacgcgctgccggatacgctgaaggatatcccgggtgcgct

SEQ ID NO: 843776 - DNA, 75 bp, synthetic construct
  source 1..75: mol_type = other DNA
tccgggttcactggccggaatgatttaacaggcctggtgcagtgccctgggggtggatgccgggccttatgccac

SEQ ID NO: 843777 - DNA, 75 bp, synthetic construct
  source 1..75: mol_type = other DNA
ccgtggcggtgatgatgttgatggcgctgtcgttcatctttggcccactgcgtagcgtaccgatgggcgtgcgtg

SEQ ID NO: 843778 - DNA, 75 bp, synthetic construct
  source 1..75: mol_type = other DNA
accagtggcggtgacatcacggttactgccggacgggatatcacctcagttgcgaccgctgtaacggcaaagggc

SEQ ID NO: 843779 - DNA, 75 bp, synthetic construct
  source 1..75: mol_type = other DNA
acaaagtgctgaaagggactgttgatagtgttgccgcaggggtcaccaacgccagcagcacgcgtgacgacaaag

SEQ ID NO: 843780 - DNA, 75 bp, synthetic construct
  source 1..75: mol_type = other DNA
cgccggacgttatcagctcaacatgtggagcaaaatcttccagccgctatccgtggcggtgatgatgctgatggc

SEQ ID NO: 843781 - DNA, 75 bp, synthetic construct
  source 1..75: mol_type = other DNA
gaacaatacaataacattttcaatgcaattaattataactcctattctgcaatagaaccaacatttatattgcta

SEQ ID NO: 843782 - DNA, 75 bp, synthetic construct
  source 1..75: mol_type = other DNA
cgttggatattaaaagggttcctttagaacatgaggaactaaagaaatatacattatacaaatgcccatttattc

SEQ ID NO: 843783 - DNA, 75 bp, synthetic construct
  source 1..75: mol_type = other DNA
ttgcagaaatacatcaaatctcagttttacgggctatctgctaaagccgggtcaatggattcttcaaaattcaat

SEQ ID NO: 843784 - DNA, 75 bp, synthetic construct
  source 1..75: mol_type = other DNA
tagatgtactagcttcaagtgcaattaaagcgggtacggctatttacacttttcaaagtgctttggcagcttatc

SEQ ID NO: 843785 - DNA, 75 bp, synthetic construct
  source 1..75: mol_type = other DNA
gtgacatggttaatagtaatgctcaattagctatggctgtatcagagttaggaagaaaggtagacgctttaacag

SEQ ID NO: 843786 - DNA, 75 bp, synthetic construct
  source 1..75: mol_type = other DNA
gtgcattcctcgaccctgcattacgcctgggcccgggagttcggggagcttaaaggcaaaaaacactatcacctg

SEQ ID NO: 843787 - DNA, 75 bp, synthetic construct
  source 1..75: mol_type = other DNA
tactatttaagccgctcgcaaccgcccttctttgccctgatggtagagttactggcgcagcatgaaggcgatgcc

SEQ ID NO: 843788 - DNA, 75 bp, synthetic construct
  source 1..75: mol_type = other DNA
tggtcagatggataactctaagtttaacgagaagttagctcagttaaatgcaagtgtacgagaagcgattattaa

SEQ ID NO: 843789 - DNA, 75 bp, synthetic construct
  source 1..75: mol_type = other DNA
ggcagcaacgtatccatgagacggtgctgcacgcgcttgatacccatccccgtctgacggcattgcgggttgacc

SEQ ID NO: 843790 - DNA, 75 bp, synthetic construct
  source 1..75: mol_type = other DNA
acactggctttcagcaggtgctggaacgtgctgactatctggcgaaggaacataccaaagctcactgcaccggtg

SEQ ID NO: 843791 - DNA, 75 bp, synthetic construct
  source 1..75: mol_type = other DNA
gcaggtactggaacgtgctggctatctggcgaaggagcataccaaagctcgcggcaccggtgagcgcaactttgg

SEQ ID NO: 843792 - DNA, 75 bp, synthetic construct
  source 1..75: mol_type = other DNA
ggcaaaccgctctctgtaccacaaggcatcatcggtctgatgacccgcttcggtatggatgtcaccctggcccat

SEQ ID NO: 843793 - DNA, 75 bp, synthetic construct
  source 1..75: mol_type = other DNA
tccgggatcactggccggtatgatttaacaggcctggtgcagtgccctgggggtggatgccgggccttatgccac

SEQ ID NO: 843794 - DNA, 75 bp, synthetic construct
  source 1..75: mol_type = other DNA
ccgtgaaggcaaacgcgtacatcccacaaccctgcattacgcctgggcccgggaattcggggagcttaaaggcaa

SEQ ID NO: 843795 - DNA, 75 bp, synthetic construct
  source 1..75: mol_type = other DNA
acgcgatgatgatgctggtttacgggatatgctgaagcgtgctgactatctcgcgaaagagtacaccaaagtcaa

SEQ ID NO: 843796 - DNA, 75 bp, synthetic construct
  source 1..75: mol_type = other DNA
ggggatttatcctgatcgtaaatatagccagcagccagccaatagccgtgaaatcttccgtaagaagaatggaat

SEQ ID NO: 843797 - DNA, 75 bp, synthetic construct
  source 1..75: mol_type = other DNA
ttgggcaggataaaccgcgaaaatttgaggcgctggcagaaaaacgcggcgtgcgcagtaatgttcacttcttct

SEQ ID NO: 843798 - DNA, 75 bp, synthetic construct
  source 1..75: mol_type = other DNA
catcctgcctaccaggaagcggcgggaattgtgctgctggaagcgattactgcaggattaccggttctaacaact

SEQ ID NO: 843799 - DNA, 75 bp, synthetic construct
  source 1..75: mol_type = other DNA
cgccgcgatgatcctttctcgtaaatattcaaaaccaggcgtactgctcgaacaactgctgaaagaagcgcaaga

SEQ ID NO: 843800 - DNA, 75 bp, synthetic construct
  source 1..75: mol_type = other DNA
tacgggatgtgctgaaccgtgctgactatctcgcgaaagagtataccaaagtcaacggtaccggtgagcgtaatt

SEQ ID NO: 843801 - DNA, 75 bp, synthetic construct
  source 1..75: mol_type = other DNA
catttgcaacgccacggggccagcaaaaaagccattaacgatgaaaccatgcaggagattaacactctgctgatc

SEQ ID NO: 843802 - DNA, 75 bp, synthetic construct
  source 1..75: mol_type = other DNA
ggaaatatccgataagaagacggatttacttctggagatcatcagtgatgaagaaaaagaaaagctgaaagcctg

SEQ ID NO: 843803 - DNA, 75 bp, synthetic construct
  source 1..75: mol_type = other DNA
tgacggcattcagtatttccgtagtgaagacgggcaggatttttatgaatcactggataaattcacgaagaaata

SEQ ID NO: 843804 - DNA, 75 bp, synthetic construct
  source 1..75: mol_type = other DNA
cataaatgatcacaacggactttctcagcaggaaattgccgacattctcaatctatacccggacaatctcaccgc

SEQ ID NO: 843805 - DNA, 75 bp, synthetic construct
  source 1..75: mol_type = other DNA
gctcaaaaaatcagcaatcagcaatgatggtaccattctttgctgtagttgtgtgccgaagactgcgcttaaact

SEQ ID NO: 843806 - DNA, 75 bp, synthetic construct
  source 1..75: mol_type = other DNA
atgacaaagcccgtcttacgcagtggatggcatatatcaaagcggtaaaggcgctggatttaagtcaggtcagtg

SEQ ID NO: 843807 - DNA, 75 bp, synthetic construct
  source 1..75: mol_type = other DNA
gcgatggatttcagcactattgcggataagacagcttacgacaatattgtctggcctgaatcaccacaaaatatc

SEQ ID NO: 843808 - DNA, 75 bp, synthetic construct
  source 1..75: mol_type = other DNA
ttattcatatctcttctccctccctgtacttcgattatcaccaccatcgcgatattaaagaagattttcgccctc

SEQ ID NO: 843809 - DNA, 75 bp, synthetic construct
  source 1..75: mol_type = other DNA
atgagtatcgtggttgcacgcttggctggaggcttaggaaatcagatgttccagtatgcgaaaggttatgctgag

SEQ ID NO: 843810 - DNA, 75 bp, synthetic construct
  source 1..75: mol_type = other DNA
gtgaggtggcaaacaggtttattcagcagaacccaggccagcttaaaaagccgctaaacagcttaaccaatggag

SEQ ID NO: 843811 - DNA, 75 bp, synthetic construct
  source 1..75: mol_type = other DNA
atcaacgtttcacattacagaatcaatatcatctataaaaaagatgagtaataaaggagaaaacccttttttacc

SEQ ID NO: 843812 - DNA, 75 bp, synthetic construct
  source 1..75: mol_type = other DNA
taattaaattaatagcttttatttcatcaaacggtttttattctttatatattaacggtaataaaatatcgggtg

SEQ ID NO: 843813 - DNA, 75 bp, synthetic construct
  source 1..75: mol_type = other DNA
ttttccttgtttcgtggttgtttagagataaattcattgaatccaaagcatgcaatttactgtctgaaatgactt

SEQ ID NO: 843814 - DNA, 75 bp, synthetic construct
  source 1..75: mol_type = other DNA
aagaagatagctggaaagtgattcgtattggtgatgtggtgtttgatgtggttaaaccttgtagccgctgtattt

SEQ ID NO: 843815 - DNA, 75 bp, synthetic construct
  source 1..75: mol_type = other DNA
atgaaagcgttctttctgaccggatctgccgcgctattgctggcctgtggcgtgaccgttttcccggcaatggcg

SEQ ID NO: 843816 - DNA, 75 bp, synthetic construct
  source 1..75: mol_type = other DNA
ttccgaagcgcttgagtatctccgtagtatggagacggcaaaatggcgtaggcccaatgccagtggcaactgggg

SEQ ID NO: 843817 - DNA, 75 bp, synthetic construct
  source 1..75: mol_type = other DNA
cacgtagttatatgagcagaattgaacgtggtggctctaatgcgtctctggatgcgattgaggtgctggctaacg

SEQ ID NO: 843818 - DNA, 75 bp, synthetic construct
  source 1..75: mol_type = other DNA
tcgataaccaaccaacgcttgaagctgtacccgtgaagcagaatggggtatcgctggtatcttctgcattcagtg

SEQ ID NO: 843819 - DNA, 75 bp, synthetic construct
  source 1..75: mol_type = other DNA
gtgaagcagagcggtgtggaactgatggcatcggagtttaacgcgaccatgaccatggtggtggactaccaatga

SEQ ID NO: 843820 - DNA, 75 bp, synthetic construct
  source 1..75: mol_type = other DNA
gcattcgtattcagaatgccgctgaccattcgctggtggcagtgggtaacagtagctggctgccgttcaacatca

SEQ ID NO: 843821 - DNA, 75 bp, synthetic construct
  source 1..75: mol_type = other DNA
acgcggtggttctaatgcgtctctggatgcgattgaggtgctggctgacgctctgagtgttgagccgtggctgtt

SEQ ID NO: 843822 - DNA, 75 bp, synthetic construct
  source 1..75: mol_type = other DNA
cggcaaagtggcgtaggcccaatgctagtggcaattggggtattgtgacagcggtgcgttgggacaagctgagaa

SEQ ID NO: 843823 - DNA, 75 bp, synthetic construct
  source 1..75: mol_type = other DNA
ggaatgagccaggaagcttttgctgatttatgcggatttgcgagaagctatctgagtagaattgaacgtggtggc

SEQ ID NO: 843824 - DNA, 75 bp, synthetic construct
  source 1..75: mol_type = other DNA
cggggttgctggtgctggccggatgggggggcagcgatgttgccgttgccagtgacattaagcaggtggatatga

SEQ ID NO: 843825 - DNA, 75 bp, synthetic construct
  source 1..75: mol_type = other DNA
gatgcgattgaggtattggctgaagctttaagtgttgagccttggcaattgttagcgtccgattcttccgaagat

SEQ ID NO: 843826 - DNA, 75 bp, synthetic construct
  source 1..75: mol_type = other DNA
agcatggagacagcaaaatggcgtaggcccaatcctagcggcaactggggtattgtatcggcggttcgttgggac

SEQ ID NO: 843827 - DNA, 75 bp, synthetic construct
  source 1..75: mol_type = other DNA
cgctgttcaacaaaaacaatccttctccctttgtggaaatactgaaaaatctggatgtgccggtggtgagaaaac

SEQ ID NO: 843828 - DNA, 75 bp, synthetic construct
  source 1..75: mol_type = other DNA
gtgtttctggtgcgcgttggctggtctgccgattacgccgaagcattaaaacagccggttgatgccccctccccc

SEQ ID NO: 843829 - DNA, 75 bp, synthetic construct
  source 1..75: mol_type = other DNA
tttttaggcgaccccgaagacattacggataaagtgaataaggagacagaagacacgggcagctaccaacagaga

SEQ ID NO: 843830 - DNA, 75 bp, synthetic construct
  source 1..75: mol_type = other DNA
actgagggtggtggcagaaaacgaatgggcaaactgtacggcgatcacacttaacatgactggagtgtctgatga

SEQ ID NO: 843831 - DNA, 75 bp, synthetic construct
  source 1..75: mol_type = other DNA
attgccgaagacgcctgcagcgccgccagcgccgagcagcacaataacagcatcaaccatatctacccacgcatc

SEQ ID NO: 843832 - DNA, 75 bp, synthetic construct
  source 1..75: mol_type = other DNA
ggcaacatcctgctgcattaggtgcaaccgacagcgatatcgaaatcatcaaacgtcaatggggtgcgttttacg

SEQ ID NO: 843833 - DNA, 75 bp, synthetic construct
  source 1..75: mol_type = other DNA
gccgattacgctgaagcattaaaacagccggtcgatgcgccctcaccggctaaagtgttgcccgaaaattggtgg

SEQ ID NO: 843834 - DNA, 75 bp, synthetic construct
  source 1..75: mol_type = other DNA
acatcactatctatcgtgatcaggatgccaactcgataaaggacaacgccaacagcgccatacagaactgggtgg

SEQ ID NO: 843835 - DNA, 75 bp, synthetic construct
  source 1..75: mol_type = other DNA
atcaggcgttgaatcgttctattgggttaatccaagaggcaagcagattgtagttgtatgtgacagtcatacggt

SEQ ID NO: 843836 - DNA, 75 bp, synthetic construct
  source 1..75: mol_type = other DNA
taaagaagaatggtcgttaacctttaccagatcatacaacgaaattaatgcaatcgatgacttcctgactgagcg

SEQ ID NO: 843837 - DNA, 75 bp, synthetic construct
  source 1..75: mol_type = other DNA
aaggtggattacaccattgaagccaggattacgatctatcgtgatcaggatgccgggtctgtaaaagatgccgcc

SEQ ID NO: 843838 - DNA, 75 bp, synthetic construct
  source 1..75: mol_type = other DNA
actgcgggtggttgcagaaaacgaatgggcaaactgtacggcgatcactcttaacatgacaggggtgtccgatgg

SEQ ID NO: 843839 - DNA, 75 bp, synthetic construct
  source 1..75: mol_type = other DNA
acggccagcactggcggttcagagcaggaagacaatgaccgactccgggagcgtatcaggctggccccggagtca

SEQ ID NO: 843840 - DNA, 75 bp, synthetic construct
  source 1..75: mol_type = other DNA
tatatttctgctcggtggtctgcgcgttatatctggtgagtggtggctacaaagctatccgaaattatgtccgcc

SEQ ID NO: 843841 - DNA, 75 bp, synthetic construct
  source 1..75: mol_type = other DNA
tgactggcaggcgatttaccgattcagcggtgcgcaaatgtcgctcaccaccgctttccatgaaaactttggtga

SEQ ID NO: 843842 - DNA, 75 bp, synthetic construct
  source 1..75: mol_type = other DNA
gggcggtggttaatggtgagcattccctgttagtgctggcgggcgcaggaagcggaaaaacgtctgtgctggtgg

SEQ ID NO: 843843 - DNA, 75 bp, synthetic construct
  source 1..75: mol_type = other DNA
gctgcccgtcatgaactctttattgctgagtggcgcaagcaatgcagcgaaaagaaagcgcaggcgaagggctgg

SEQ ID NO: 843844 - DNA, 75 bp, synthetic construct
  source 1..75: mol_type = other DNA
agcacgcccgaagaaatccgtgatctgttcagcaaacgaatcaagttaatggctccgttgctgaaagcctggaaa

SEQ ID NO: 843845 - DNA, 75 bp, synthetic construct
  source 1..75: mol_type = other DNA
tgcgtaaacaaaatagtcagacaacgttgtttgccgttggcgatgactggcaggctatttaccgcttcagcggcg

SEQ ID NO: 843846 - DNA, 75 bp, synthetic construct
  source 1..75: mol_type = other DNA
ggttaatggaagaactgcagtggtcggtaccagaaggcaacttctgggatgatgaaaaattacagcgtcgtctcg

SEQ ID NO: 843847 - DNA, 75 bp, synthetic construct
  source 1..75: mol_type = other DNA
tcgtcaggagctgaaccagaaaggtatctcccgagaggccacagaaaaagcgatgcgtgaatgtgatatcgactg

SEQ ID NO: 843848 - DNA, 75 bp, synthetic construct
  source 1..75: mol_type = other DNA
cttcctcatcaggtacaaagcgagcataccgaaaaggtaatcctctgacgcttgcagaacgtcagcaggcatctc

SEQ ID NO: 843849 - DNA, 75 bp, synthetic construct
  source 1..75: mol_type = other DNA
atgacatttttacagctgatattactgtatttctgcacggcggtatgtgtcttatacctggtgagtggtggctat

SEQ ID NO: 843850 - DNA, 75 bp, synthetic construct
  source 1..75: mol_type = other DNA
ggttaaccgactggaagaattcgataactgccgtgaggcgtggcgtaaatgtcaggcctggttgaaagacattga

SEQ ID NO: 843851 - DNA, 75 bp, synthetic construct
  source 1..75: mol_type = other DNA
gggattaaagtctccggcgatcgccacgaataccttattcctttcaatcaattactggcgattcactgtaagcgc

SEQ ID NO: 843852 - DNA, 75 bp, synthetic construct
  source 1..75: mol_type = other DNA
tcgtcaggaactgagccagaaagggatctcccgagaggcgacagaaaaagcgatgcgtgaatgtgacatcgactg

SEQ ID NO: 843853 - DNA, 75 bp, synthetic construct
  source 1..75: mol_type = other DNA
ggattcgtcgatagtagtaatggcaacgcaaccagtaccgtatatcgttattgcagtaactctactatctttaaa

SEQ ID NO: 843854 - DNA, 75 bp, synthetic construct
  source 1..75: mol_type = other DNA
tgtggctgcggaaaataacgtggtcatccggggcggacgtgatgtgaacctggtggcagagtctgccggtgcagg

SEQ ID NO: 843855 - DNA, 75 bp, synthetic construct
  source 1..75: mol_type = other DNA
atgaattcactgatcctgactgcccttactgccatgcttatgacgaatggatgcagggttactctaaagatcacc

SEQ ID NO: 843856 - DNA, 75 bp, synthetic construct
  source 1..75: mol_type = other DNA
gataagctcattgcaaatgaaaaactgaaggagcggggacgtttcatgcgcgcgatgttagttactggtgcggcg

SEQ ID NO: 843857 - DNA, 75 bp, synthetic construct
  source 1..75: mol_type = other DNA
agatagtgaaattgatattgaaaatataccagatgatgtactagggatcgtaatgggcgtggaccagcagcttga

SEQ ID NO: 843858 - DNA, 75 bp, synthetic construct
  source 1..75: mol_type = other DNA
aaaaggttagtagtgcgaggaatgaaactctcgattgtcttaattactcgcttatatgtttccagtggtatctat

SEQ ID NO: 843859 - DNA, 75 bp, synthetic construct
  source 1..75: mol_type = other DNA
gccgtgcgaaaacgcgccaatgatatcgcgctcaaatgcaaatactgtgaaaaagagttttcccataatgtggtg

SEQ ID NO: 843860 - DNA, 75 bp, synthetic construct
  source 1..75: mol_type = other DNA
ctgaccaaagatcaggtgcatgcgtcgctggagaacatggcgaaagtggtggatcagcaaaatgctggcgatccg

SEQ ID NO: 843861 - DNA, 75 bp, synthetic construct
  source 1..75: mol_type = other DNA
tctccagccagcatatcgccaactggttacgtcacggtattctgaccaaagaacaggtgcaggcgtcgctggaga

SEQ ID NO: 843862 - DNA, 75 bp, synthetic construct
  source 1..75: mol_type = other DNA
tgggtggtcaactgaaggatggtgacaacctgctttatgccgagggatatgcgacagcagccagtatcagcgaag

SEQ ID NO: 843863 - DNA, 75 bp, synthetic construct
  source 1..75: mol_type = other DNA
atgaaaaatccctattaccctaccgcacttgggttgtattttaattacctggtgcatggtatgggcgtcattttg

SEQ ID NO: 843864 - DNA, 75 bp, synthetic construct
  source 1..75: mol_type = other DNA
tggcatcctgcagaccaataacatcattatcgcttatgttttggctttctggcgggaatggcaaacagttttctc

SEQ ID NO: 843865 - DNA, 75 bp, synthetic construct
  source 1..75: mol_type = other DNA
tctggtctccatacgtctgtggattgcagtactcctcttacagagcagagtctgtcgataaatgacggtgaagac

SEQ ID NO: 843866 - DNA, 75 bp, synthetic construct
  source 1..75: mol_type = other DNA
tgatggctatccgtatctactcgcgaatgaatcctcattacgtgatgtacagcaacgctgtccggcaagcgtcag

SEQ ID NO: 843867 - DNA, 75 bp, synthetic construct
  source 1..75: mol_type = other DNA
cattggcgatgtggtgtttgatgtggtgaagccctgcagccgctgtattttcactactgtcagcccggaaaaagg

SEQ ID NO: 843868 - DNA, 75 bp, synthetic construct
  source 1..75: mol_type = other DNA
agggcggcatgaacgggttcagtaccgaccagatgctcaaccagctgggcaggcttaaccagagccagtttatgc

SEQ ID NO: 843869 - DNA, 75 bp, synthetic construct
  source 1..75: mol_type = other DNA
gattggtgcgggcaacgaagtgaccgtggtgttccaggacggcttccagctgaaaactgtagaagagatggcgct

SEQ ID NO: 843870 - DNA, 75 bp, synthetic construct
  source 1..75: mol_type = other DNA
gaagataatccggaaagtccggttcctttccgccatcagctgaaagtcatcttaacggctttaatactgaccaga

SEQ ID NO: 843871 - DNA, 75 bp, synthetic construct
  source 1..75: mol_type = other DNA
tacgcacccgcaatatcagttgcctgaaggacggcaaaactattgatatgccgattaaggggcatgtcagcttcc

SEQ ID NO: 843872 - DNA, 75 bp, synthetic construct
  source 1..75: mol_type = other DNA
gccccccccgcccgcacgcttaataacgcgccggatagccgctcttttaaagacaagtggcgggtacagattcag

SEQ ID NO: 843873 - DNA, 75 bp, synthetic construct
  source 1..75: mol_type = other DNA
tgcagtactcctcttacagagcagagtctgtcgagaaatgacggtgaagaccagaccagaagaaacgctgaaaat

SEQ ID NO: 843874 - DNA, 75 bp, synthetic construct
  source 1..75: mol_type = other DNA
ttttcggttgaaaagaaattgcttgaattactggaaaaacaatctggtctccatacgtctgtggattgcagtact

SEQ ID NO: 843875 - DNA, 75 bp, synthetic construct
  source 1..75: mol_type = other DNA
tggatttcctccggcagttttgccgaagccattgtggtggaaggtgctgatgccaatgcctctgtcaccggcgat

SEQ ID NO: 843876 - DNA, 75 bp, synthetic construct
  source 1..75: mol_type = other DNA
ctacatcaaacgtgctgaacagtaccacccggttattccgattggtgcgggcaatgaagtcaccctggttttcca

SEQ ID NO: 843877 - DNA, 75 bp, synthetic construct
  source 1..75: mol_type = other DNA
tgatgaaccacccgcccgcacgattaacaacgcgccggatagccgctcttttaaagacaagtggcgggtacagat

SEQ ID NO: 843878 - DNA, 75 bp, synthetic construct
  source 1..75: mol_type = other DNA
gctatcaggatgtggtggcgtttaaggtggttgataaacaattacgcatccagttgaaaaatggtaaagaaacca

SEQ ID NO: 843879 - DNA, 75 bp, synthetic construct
  source 1..75: mol_type = other DNA
agccacagttgaaggctgtacctgtgaaggcaagcggggcgcaacttgctgcgggcgagtttaacgccagcctga

SEQ ID NO: 843880 - DNA, 75 bp, synthetic construct
  source 1..75: mol_type = other DNA
tgcttttgatggcgtcgtgaatgacccaatgaagatgggcggtgtcgatttacggcttaaattttctggcgattc

SEQ ID NO: 843881 - DNA, 75 bp, synthetic construct
  source 1..75: mol_type = other DNA
cgtttaaaaatccgcaggctggggtgaaagccgggccgttgattgcccgtggtgctgttgctgcggcactggcaa

SEQ ID NO: 843882 - DNA, 75 bp, synthetic construct
  source 1..75: mol_type = other DNA
atgaaaataatttatctggcggtgtcgggcattgcgctgctggcctggaatgtcgccagtgcagaaacgaaaccc

SEQ ID NO: 843883 - DNA, 75 bp, synthetic construct
  source 1..75: mol_type = other DNA
atgagtcacaagtttgtagcgggcgcagggttgctggtgctggccggatggggcatcagcggtttggctagtgat

SEQ ID NO: 843884 - DNA, 75 bp, synthetic construct
  source 1..75: mol_type = other DNA
cggggctactggtactggccggatggggtgtcagcggtttagccgttgctggcagcgatatcaaacaggtggatc

SEQ ID NO: 843885 - DNA, 75 bp, synthetic construct
  source 1..75: mol_type = other DNA
ttcttggcaacccaccagatattcccgaagtcacaatggtgcatttgccacgcgtagaagcgacgctggcaccgc

SEQ ID NO: 843886 - DNA, 75 bp, synthetic construct
  source 1..75: mol_type = other DNA
gataccccgccgtttgaaaccgatggtcggctggtcgcgaaaatcgacactgaaaaatcgtcggtatttgattat

SEQ ID NO: 843887 - DNA, 75 bp, synthetic construct
  source 1..75: mol_type = other DNA
gtcggctggtagcgaaaatcgacactgaaaaatcgtcggtctttgattatcgcggttttaatgggcgaattggcg

SEQ ID NO: 843888 - DNA, 75 bp, synthetic construct
  source 1..75: mol_type = other DNA
tggcgctgctgaccaaaacggtctggttgccgtggatcaaactggaaaagcccgacgcacgcctgattcgcctct

SEQ ID NO: 843889 - DNA, 75 bp, synthetic construct
  source 1..75: mol_type = other DNA
aaactggaaggtgatgtcgagtcgcggcaattgcggctggcggacctgggaccgttgattggcgttgattccggg

SEQ ID NO: 843890 - DNA, 75 bp, synthetic construct
  source 1..75: mol_type = other DNA
ggtgtggcgcgtccgcaggtttttgctttcgatactgagaacgcgttgattaacgttaccggcacggcaagtttt

SEQ ID NO: 843891 - DNA, 75 bp, synthetic construct
  source 1..75: mol_type = other DNA
agctcaaggcggtgccggtaaaacaaagcggcgtgcaactcgcgcccacggaatttaccgccagtatgaccatgg

SEQ ID NO: 843892 - DNA, 75 bp, synthetic construct
  source 1..75: mol_type = other DNA
tggcagatgaagccgtcgagcaaatgcgtgaaatgggcgtaaccccgacacacgttctgctgcaagccggtgtcg

SEQ ID NO: 843893 - DNA, 75 bp, synthetic construct
  source 1..75: mol_type = other DNA
caaaatctgcacagcattattgttgaacctgacaaagctgactgtatttatcgctccggcgtcaaaggcgacatc

SEQ ID NO: 843894 - DNA, 75 bp, synthetic construct
  source 1..75: mol_type = other DNA
gtggaatttggcgatatgattggtaataacgttaatggcaccaactaccgacaagatgcgaaatacaccctgaac

SEQ ID NO: 843895 - DNA, 75 bp, synthetic construct
  source 1..75: mol_type = other DNA
caaaatctgcacagcattattgttgaacctgacaaagctgactgtatctatcgttctggtgtcaaaggcgacatc

SEQ ID NO: 843896 - DNA, 75 bp, synthetic construct
  source 1..75: mol_type = other DNA
tcggtcagaatgcggtgatttatatgccgaaaggttccgctcaggagcgcgtcgacgccattctgaacctgggag

SEQ ID NO: 843897 - DNA, 75 bp, synthetic construct
  source 1..75: mol_type = other DNA
atatcatcttgatatcgaaacactgtcatttgagcacctgaaaaatgccatcggtgaaaaaatgacattcgccac

SEQ ID NO: 843898 - DNA, 75 bp, synthetic construct
  source 1..75: mol_type = other DNA
gccttgatgatctgcggatgcagtttaaaggccctaccaccgtgattaacggggaaactgtcattgcgacggaaa

SEQ ID NO: 843899 - DNA, 75 bp, synthetic construct
  source 1..75: mol_type = other DNA
aaaaggcagtaacgtcgattttggtgatgtgatcatcaaaaaaatcaacggtactgaatatcgcaaagatgcggg

SEQ ID NO: 843900 - DNA, 75 bp, synthetic construct
  source 1..75: mol_type = other DNA
ccagtattgatggcaacaactaccgccagaacgcgggctacaccctcgactgttcggggcgtctggaagatgacc

SEQ ID NO: 843901 - DNA, 75 bp, synthetic construct
  source 1..75: mol_type = other DNA
tccggtgaagcagagcggtgtgcaactgatggcgtcagagtttaacgcgaccatgaccatggtggtggactacca

SEQ ID NO: 843902 - DNA, 75 bp, synthetic construct
  source 1..75: mol_type = other DNA
ctgaactgcggaaataaggcatcaggtgttgatgatctgcggatgcagcttaaaggctccaccaccgtgattaac

SEQ ID NO: 843903 - DNA, 75 bp, synthetic construct
  source 1..75: mol_type = other DNA
cgggcattttgctcctgagcggctggctgacgggcaacgttgcttttgcgggagaaagtaaaccggtgtcattaa

SEQ ID NO: 843904 - DNA, 75 bp, synthetic construct
  source 1..75: mol_type = other DNA
gtggaacatactggacgaactggatcaggcatggctgcccgttgagaaatcctggaaactcaacgaacgtcatta

SEQ ID NO: 843905 - DNA, 75 bp, synthetic construct
  source 1..75: mol_type = other DNA
acgagcaggtgaaacagtggcgtcgtggttttgcagtgactccgccggaactgactaaagatgatgagcgttatc

SEQ ID NO: 843906 - DNA, 75 bp, synthetic construct
  source 1..75: mol_type = other DNA
aaatcgaaccatttgatgagaaccgtgtgaaaatcaaacacaaactctcatatgttcgcccgactaaccgcggga

SEQ ID NO: 843907 - DNA, 75 bp, synthetic construct
  source 1..75: mol_type = other DNA
gcgtgttatcgcctgcatgtttggtttatgggtgctgatgggcattggctttatcgcctctatgctccatcttgg

SEQ ID NO: 843908 - DNA, 75 bp, synthetic construct
  source 1..75: mol_type = other DNA
atgtctagacagaacgaaatgcctggttacaacgaaatgaaccagtatctgaaccaacaagggacgggtctgacc

SEQ ID NO: 843909 - DNA, 75 bp, synthetic construct
  source 1..75: mol_type = other DNA
gtgggatgatatgtggcggtaacgatgacagctcatggctaccgctacttcacgacctgacgaacgaaggcatgg

SEQ ID NO: 843910 - DNA, 75 bp, synthetic construct
  source 1..75: mol_type = other DNA
cagttaaaggaagaaaactgtaattcgctcttctacccgacaaaatctattgaagagttgtttgaagtaaaagat

SEQ ID NO: 843911 - DNA, 75 bp, synthetic construct
  source 1..75: mol_type = other DNA
gattttacggggttatctgctcgtgacgagagaggatagaccacgtgttatggggtactacaccctgtcaggcag

SEQ ID NO: 843912 - DNA, 75 bp, synthetic construct
  source 1..75: mol_type = other DNA
aggcgttaaatgacaaagccaaggcgttttataaaagtttaggctttatccagctggttggtaacaacgagcgtt

SEQ ID NO: 843913 - DNA, 75 bp, synthetic construct
  source 1..75: mol_type = other DNA
aatcacatggtcaaagtcttattaatgcgagggcatatgattttatttatacttcggtttatttaatgatattca

SEQ ID NO: 843914 - DNA, 75 bp, synthetic construct
  source 1..75: mol_type = other DNA
tcctgttctgttcacgatcaccgtcatcgtaaatggcgtcatcttgatatctgccagttcaccactattgtcgaa

SEQ ID NO: 843915 - DNA, 75 bp, synthetic construct
  source 1..75: mol_type = other DNA
acgagagaggataaaccacgtgtcatggggtactacactctgtctggcagttgttttgagaaaacacttctaccc

SEQ ID NO: 843916 - DNA, 75 bp, synthetic construct
  source 1..75: mol_type = other DNA
cgttgatgatcttcacggtcttcgggcagtgcgtcgtgggcggttttatcgttctggcatttgccttgttgaaag

SEQ ID NO: 843917 - DNA, 75 bp, synthetic construct
  source 1..75: mol_type = other DNA
ccgaggtggtcgcggcacagttggtgaaagaggtgaaacgctacctggcaagcccggcggcggtgggggaatatc

SEQ ID NO: 843918 - DNA, 75 bp, synthetic construct
  source 1..75: mol_type = other DNA
gggggaatatctcgccgaccagctggtactgccgatggcgctggcgggcgcgggagaatttacggtcgcccatcc

SEQ ID NO: 843919 - DNA, 75 bp, synthetic construct
  source 1..75: mol_type = other DNA
tcgtttaacaccttgcaacttggcgagcgcgggaacattgtgcagatgcgtggagaggtgctactggctggtgtg

SEQ ID NO: 843920 - DNA, 75 bp, synthetic construct
  source 1..75: mol_type = other DNA
tggttgtctggagattcagggggccagtctagcagatcatatccatatgcttgtggagatcccgcccaaaatgag

SEQ ID NO: 843921 - DNA, 75 bp, synthetic construct
  source 1..75: mol_type = other DNA
acacccgatggaactgtaaatatcacattgtttttgcgccaaaataccgaagacaagtgttctacagagagaagc

SEQ ID NO: 843922 - DNA, 75 bp, synthetic construct
  source 1..75: mol_type = other DNA
catctgaccgcggttaaggcggcgacggaaatttgccgagcaacggtggaaggcgcggagctggggtcgcagcgt

SEQ ID NO: 843923 - DNA, 75 bp, synthetic construct
  source 1..75: mol_type = other DNA
ccgcggcatgtcgctgagcgtgaaatcgctacgctggcgggtagtttttccctgcatgagcagaatattcataac

SEQ ID NO: 843924 - DNA, 75 bp, synthetic construct
  source 1..75: mol_type = other DNA
aacccgtcggccccgcctgcggattttatccgccgggtgctggagccgctgctggcgaaaataggaattcatcag

SEQ ID NO: 843925 - DNA, 75 bp, synthetic construct
  source 1..75: mol_type = other DNA
aaagctgtgtgagtggaaaagcgtacggattcttgaagctgaatgctgtgcagatcatgtccatatgattgtgga

SEQ ID NO: 843926 - DNA, 75 bp, synthetic construct
  source 1..75: mol_type = other DNA
ccggaggcggcgtggtggcaacggaagtctcgcccgtggcatcgtttaacaccttgcaacttggcgagcgcggga

SEQ ID NO: 843927 - DNA, 75 bp, synthetic construct
  source 1..75: mol_type = other DNA
gtggtggagcgtttcttgccggtgcggtttagtttgatagaaacagatggcgtaacgcgggtgagcattgaatga

SEQ ID NO: 843928 - DNA, 75 bp, synthetic construct
  source 1..75: mol_type = other DNA
gcgtttcttgccggtgcggtttactctggctgaaacagatggcgtaacgcgggtgatgataaccaaactcactga

SEQ ID NO: 843929 - DNA, 75 bp, synthetic construct
  source 1..75: mol_type = other DNA
taaatgcccgcgttgttgccgaacgcggctgcgggattatccctggcgacgtcggcctgtcgagtaacatgatca

SEQ ID NO: 843930 - DNA, 75 bp, synthetic construct
  source 1..75: mol_type = other DNA
tacgaacaggcgatgctggatgcaggcttggtgccatatagcgtgatggttgaacaatcttcttcttactcttca

SEQ ID NO: 843931 - DNA, 75 bp, synthetic construct
  source 1..75: mol_type = other DNA
tcgctctacgcggcaagattgccgccgctcttgatgaactgggttatattcccaatcgtgcgcccgatatcctct

SEQ ID NO: 843932 - DNA, 75 bp, synthetic construct
  source 1..75: mol_type = other DNA
gccgcgtgagcggatgggcagtattggcgctgaacgcctgctggcgcgtattcgtggcgaatctgtgacaccgaa

SEQ ID NO: 843933 - DNA, 75 bp, synthetic construct
  source 1..75: mol_type = other DNA
gcagctggtgacgccaaatattacgcttatcaataccatgacgaataccatcctcggaccggaagaggtggtgaa

SEQ ID NO: 843934 - DNA, 75 bp, synthetic construct
  source 1..75: mol_type = other DNA
gtacagcatctggacaccgatgggcttcttcctgacgatgtttatgggcggcccgttactgggttacctgttgct

SEQ ID NO: 843935 - DNA, 75 bp, synthetic construct
  source 1..75: mol_type = other DNA
ctggaatatcgacggacttattctcaccgaacgtacccacacgccccgcaccttaaagatgattgaagtagcggg

SEQ ID NO: 843936 - DNA, 75 bp, synthetic construct
  source 1..75: mol_type = other DNA
gtggttttatcgttctggctttggcgctgctcaaaggcgacctgcgagcagaagcccagcagcgtgttattgcct

SEQ ID NO: 843937 - DNA, 75 bp, synthetic construct
  source 1..75: mol_type = other DNA
tgtcggagtgattgtgctgcaaggtttgtctctggcatccattcactcatctgtacaacaagccagcacgttggt

SEQ ID NO: 843938 - DNA, 75 bp, synthetic construct
  source 1..75: mol_type = other DNA
gaattgtggatcttctcgataaagctgagggtatacgccaaaaacgcgaacaagccatcaaactggctgatgatt

SEQ ID NO: 843939 - DNA, 75 bp, synthetic construct
  source 1..75: mol_type = other DNA
gagcgtgctgacgccgcgtgagcggatgggcagtattggcgctgaacgcctgctggcgcgtattcgtggcgaatc

SEQ ID NO: 843940 - DNA, 75 bp, synthetic construct
  source 1..75: mol_type = other DNA
atgcagggcgcagagctggcgactattcatagctctgtgcagcaggctgcagcgctggtgccggactatggtgcg

SEQ ID NO: 843941 - DNA, 75 bp, synthetic construct
  source 1..75: mol_type = other DNA
gtggctggtggtgacgatggttcttggcgtagtctttgtctggatgatggtgcgcgtttataacagcatcgatac

SEQ ID NO: 843942 - DNA, 75 bp, synthetic construct
  source 1..75: mol_type = other DNA
cgggcaaaacctgaaatacgatcgcggtattctggcgaattacggcattgagctgcgtgggattgcgtttgatac

SEQ ID NO: 843943 - DNA, 75 bp, synthetic construct
  source 1..75: mol_type = other DNA
aaaagatattcaaaaacagtttaatgatatgctcaaaaaggcatttaaaggaagtaaaaatataaggattaaata

SEQ ID NO: 843944 - DNA, 75 bp, synthetic construct
  source 1..75: mol_type = other DNA
tccaacagggacccagccatactcggcgcttcggccttgtccgtacggcgtagttggcgaccgcattacggtccg

SEQ ID NO: 843945 - DNA, 75 bp, synthetic construct
  source 1..75: mol_type = other DNA
ccgcattatcaattattgattcgatcccacgggttggcagtaatccctatctgttcgccataaaggacaatggaa

SEQ ID NO: 843946 - DNA, 75 bp, synthetic construct
  source 1..75: mol_type = other DNA
cgtgtggcgtaaccgatcacacgatccgctcggttccgatacccgaggcgcggcagcctatgacgaatcctacgc

SEQ ID NO: 843947 - DNA, 75 bp, synthetic construct
  source 1..75: mol_type = other DNA
caatattgttgcggaagtcgtttctcgttacccgatagatggcgtgcaattcgacgactatttctacacagaatc

SEQ ID NO: 843948 - DNA, 75 bp, synthetic construct
  source 1..75: mol_type = other DNA
aaaagacattcaaaaacagtttaacgacatgctcaaaaaggcatttaagggaagtaagaatataaggatcaaata

SEQ ID NO: 843949 - DNA, 75 bp, synthetic construct
  source 1..75: mol_type = other DNA
atgccaacgcttagtgagttttttcaccagacctatgttccgttcatcaaacgccataaaaagtcctgggataag

SEQ ID NO: 843950 - DNA, 75 bp, synthetic construct
  source 1..75: mol_type = other DNA
aaaacagggaattaagccgctgaagaaaacgccgggtggcgcgccgtcaacgtcggaagaagtgctggaagagct

SEQ ID NO: 843951 - DNA, 75 bp, synthetic construct
  source 1..75: mol_type = other DNA
ctgatcaataccatgacgaataccatcctcggcccggatgaagttgtgaacaaatacggcgtaccgccagaattg

SEQ ID NO: 843952 - DNA, 75 bp, synthetic construct
  source 1..75: mol_type = other DNA
agcggacgcgcttttttgatgctgatgagatcaggcgcattcttgacgctgctacccaatatcccaacaaagctg

SEQ ID NO: 843953 - DNA, 75 bp, synthetic construct
  source 1..75: mol_type = other DNA
atgcaaaaatccttccggttcaccaattcatccatcaaagcccttccggcaaacacagatacccgatctacagag

SEQ ID NO: 843954 - DNA, 75 bp, synthetic construct
  source 1..75: mol_type = other DNA
atccctttgctgaaggagaataatcaccggacgcgcttttttgacgctgatgagatcaggagaatccttgatgct

SEQ ID NO: 843955 - DNA, 75 bp, synthetic construct
  source 1..75: mol_type = other DNA
cgggcgaaactggcggaaatgatgaaaaaacgccgcggcgaagtgttctacgcgcgtccggaattttgtactgat

SEQ ID NO: 843956 - DNA, 75 bp, synthetic construct
  source 1..75: mol_type = other DNA
atggcggctcagggtactgccgggcgctttgtcttcccgcgtccgatgaccgaccgtccggggctggatttcagc

SEQ ID NO: 843957 - DNA, 75 bp, synthetic construct
  source 1..75: mol_type = other DNA
tacgagctgctcggcgagtctatcgatgatgccgccggtgaagcctttgataaaaccgcgaaactgttagggctc

SEQ ID NO: 843958 - DNA, 75 bp, synthetic construct
  source 1..75: mol_type = other DNA
aaccatctacaatcaaataatagcgatgttgttgccgctgcagctataagtattgcagcgacagaaatgaaaacc

SEQ ID NO: 843959 - DNA, 75 bp, synthetic construct
  source 1..75: mol_type = other DNA
cattgttcaacataatcttcatgagattgatgatatcagattaacatcctgtaactcagccaacatattaaaaaa

SEQ ID NO: 843960 - DNA, 75 bp, synthetic construct
  source 1..75: mol_type = other DNA
gtttataactcctggagcaaacaaaagtcatctacaatcaagtgatagcgatgttgttgccactgtagctataag

SEQ ID NO: 843961 - DNA, 75 bp, synthetic construct
  source 1..75: mol_type = other DNA
ctggaaaaactcggctgtcgcgtaaatttcccggagaaacagggatgctgcggtcagcctgcgatcaatagcggt

SEQ ID NO: 843962 - DNA, 75 bp, synthetic construct
  source 1..75: mol_type = other DNA
tcaggctggcggtgatgttagctttatccggggttatactttaagcggaactatagatgacaatcatatttcagt

SEQ ID NO: 843963 - DNA, 75 bp, synthetic construct
  source 1..75: mol_type = other DNA
ttctgattatttcggtgaccagtgccattggaattatgcgaattattcattcagtgaaaaagattgagcgttttt

SEQ ID NO: 843964 - DNA, 75 bp, synthetic construct
  source 1..75: mol_type = other DNA
gctttaagcgactggtcatggcaggcggcgtgagtgctaaccgcacgttacgggcgaagctggctgaaatgatga

SEQ ID NO: 843965 - DNA, 75 bp, synthetic construct
  source 1..75: mol_type = other DNA
gtgggatgaaggtccgtactatcagaccaaacgttttgatcgctataacgcagttatcgatcagatgctggaaga

SEQ ID NO: 843966 - DNA, 75 bp, synthetic construct
  source 1..75: mol_type = other DNA
acaggatacctgctgcggatttggcggcacattctcggtcaaaatggccgaaatatccggcgagatggtgaaaga

SEQ ID NO: 843967 - DNA, 75 bp, synthetic construct
  source 1..75: mol_type = other DNA
aacacctgaacatactgtaagaagaagcgactacagagccactttgggtagaactcaacccatagatattgacta

SEQ ID NO: 843968 - DNA, 75 bp, synthetic construct
  source 1..75: mol_type = other DNA
ttgaagagcatccgcatctgctgaaagggctggcatctacaccattcgacagcgaaggtgtgcgcaccgagcgcc

SEQ ID NO: 843969 - DNA, 75 bp, synthetic construct
  source 1..75: mol_type = other DNA
cggggtaaaagtatttggtaacagccacggcatgttgcagggctactgttcaacgcgccattcactctccagttg

SEQ ID NO: 843970 - DNA, 75 bp, synthetic construct
  source 1..75: mol_type = other DNA
tgtgattgccgaagaaaatggcgatatggaacgtgattacgcctacaccattggccgtgcgatgagcgatctaca

SEQ ID NO: 843971 - DNA, 75 bp, synthetic construct
  source 1..75: mol_type = other DNA
ggtgatgctcaatgcggtagatattccacttgccgatccgcacttctggacgctttccggtgcagtccgtgtggc

SEQ ID NO: 843972 - DNA, 75 bp, synthetic construct
  source 1..75: mol_type = other DNA
aacggggaaaaaaccgtatgatttattattcctgaataatgctacaaaacaagattttgataaaaggaaaatgga

SEQ ID NO: 843973 - DNA, 75 bp, synthetic construct
  source 1..75: mol_type = other DNA
tgtgctcgtcgtactttatcgcgcctgtcaccgcgtaaactttccaccatgaaagcgccggtaatttttgccaat

SEQ ID NO: 843974 - DNA, 75 bp, synthetic construct
  source 1..75: mol_type = other DNA
taagcccgcaggccattgcccgcaccgtacaggcggcgctggatattgcccgttatacctcgccagatccctgtg

SEQ ID NO: 843975 - DNA, 75 bp, synthetic construct
  source 1..75: mol_type = other DNA
aagaaactactagaatcgatgggaaatgtgtcacccagggtctttattaaattttataacgggaatcatgtcatt

SEQ ID NO: 843976 - DNA, 75 bp, synthetic construct
  source 1..75: mol_type = other DNA
ctattagcgctagcgtatcagttccgacaaaacaatctcaatccatcgccacaatactaggagggagaacaatag

SEQ ID NO: 843977 - DNA, 75 bp, synthetic construct
  source 1..75: mol_type = other DNA
ttgttccaccctgcggaagtctctccggatgaagccattgaactggcggcccgtgctgaacaggctgcgttaaag

SEQ ID NO: 843978 - DNA, 75 bp, synthetic construct
  source 1..75: mol_type = other DNA
atggagcgtgattacgcctacaccattggtcgcgcgatgagcgatttacaaacgccagagtgggttggggcagag

SEQ ID NO: 843979 - DNA, 75 bp, synthetic construct
  source 1..75: mol_type = other DNA
cgttatggtgaagtggagaatgtcgagttcaatagcgatggtgcgctggggattaccgtgtatcaccagaaccgt

SEQ ID NO: 843980 - DNA, 75 bp, synthetic construct
  source 1..75: mol_type = other DNA
ctcgggcaaaaacctgcttatttctgggtctggctggttatgctgatactggtgttatttacgatctgatattct

SEQ ID NO: 843981 - DNA, 75 bp, synthetic construct
  source 1..75: mol_type = other DNA
cggcggcgtatttgaaaccaaaatcggcgcagttctcagtgaagtcgcttcaggtgtgatgaacacgaaaaccaa

SEQ ID NO: 843982 - DNA, 75 bp, synthetic construct
  source 1..75: mol_type = other DNA
taatgctgtggcgtcatgggtggtcgggcatcacggcggtgattgtacgccaacgcgtgaggaactactcctcgc

SEQ ID NO: 843983 - DNA, 75 bp, synthetic construct
  source 1..75: mol_type = other DNA
caatgcggtggcgtcgtgggttgtcgggcatcggggcggagattgcgcgccgacgcgcgaagaactactcctcgc

SEQ ID NO: 843984 - DNA, 75 bp, synthetic construct
  source 1..75: mol_type = other DNA
cctgccgggtcatgcacttacacgataaaaaattacgctcgctatctcagtgaagaacctgagtgggcggcacga

SEQ ID NO: 843985 - DNA, 75 bp, synthetic construct
  source 1..75: mol_type = other DNA
gcaggggctgctggaagtacgctctgaaatcagcgacaaaaatctctacctgactcgcccggacatggggcgtcg

SEQ ID NO: 843986 - DNA, 75 bp, synthetic construct
  source 1..75: mol_type = other DNA
ttgaagatcagattggcgaacttcttggcgcgaaagtggtgatcctgctggtgggggaacgcccaggattagggc

SEQ ID NO: 843987 - DNA, 75 bp, synthetic construct
  source 1..75: mol_type = other DNA
atatctgaaagggaaaagcagtctgatgctttacgagcagtttggtgatttgaaattcaaatacaggaacaggga

SEQ ID NO: 843988 - DNA, 75 bp, synthetic construct
  source 1..75: mol_type = other DNA
tggaactgtaaatatcacatagtttttgcgccaaaataccgaagacaggtgttctacagagagaagcgtagagca

SEQ ID NO: 843989 - DNA, 75 bp, synthetic construct
  source 1..75: mol_type = other DNA
acgccagccggatatggcgggaaatggtggcccggggggttacaggcagtgaaaacatcgtcagggatgctgttg

SEQ ID NO: 843990 - DNA, 75 bp, synthetic construct
  source 1..75: mol_type = other DNA
cgcatggtattttggcgacaacgcttctggctgcgttccggcatatccaacgcaagttgtagacaccattggggc

SEQ ID NO: 843991 - DNA, 75 bp, synthetic construct
  source 1..75: mol_type = other DNA
tgggttgtcgggcatcgcggcggtgattgcgcgccaacccgcgaggaactactcctcgcacacaaaaacgtatag

SEQ ID NO: 843992 - DNA, 75 bp, synthetic construct
  source 1..75: mol_type = other DNA
agagagaagcgtagagcaataggcagtattttgagaaagctgtgtgagtggaaaagtgtacggattctggaagct

SEQ ID NO: 843993 - DNA, 75 bp, synthetic construct
  source 1..75: mol_type = other DNA
gacttgagctgctgccgtttcacgctcaggaaacgtgctgcgggtttggcggcacgttctctgtaaaaatggcgg

SEQ ID NO: 843994 - DNA, 75 bp, synthetic construct
  source 1..75: mol_type = other DNA
agcagtacggggtcgaccggtatgcagcgaactgcatattgccccgtcaacgtattaccattgtcagcaacagcg

SEQ ID NO: 843995 - DNA, 75 bp, synthetic construct
  source 1..75: mol_type = other DNA
agcaggtacggggtcggaccggtatgcagcgaactgcatattcgccccgtcaacgtattaccattgtcagcaaca

SEQ ID NO: 843996 - DNA, 75 bp, synthetic construct
  source 1..75: mol_type = other DNA
gttacgatccacgtattcgcaggatgctgagtttccgcattgccgatcccgtttctgatgcagaacgtttcactc

SEQ ID NO: 843997 - DNA, 75 bp, synthetic construct
  source 1..75: mol_type = other DNA
gctggtatggctgatcccggtttatctgtggcgtcgggcaaagatcctcgggcaaaaacctgcttatttctgggg

SEQ ID NO: 843998 - DNA, 75 bp, synthetic construct
  source 1..75: mol_type = other DNA
tgaaaggtaaactaattgtctcctgccaggcgctggaaaatgaacccctgcacagcccgtttattatgtcgcgta

SEQ ID NO: 843999 - DNA, 75 bp, synthetic construct
  source 1..75: mol_type = other DNA
atcaataccatcattatatttcggaattgatatcaaaaaaggtactgcgttatatattcggctttaccccaataa

SEQ ID NO: 844000 - DNA, 75 bp, synthetic construct
  source 1..75: mol_type = other DNA
tgtcactgaacccgctttacaaacccattgaactgaatgtcggttacactattaaaggtaaagtttcacaaatac

SEQ ID NO: 844001 - DNA, 75 bp, synthetic construct
  source 1..75: mol_type = other DNA
ggatgattttaccgccgctaaccatgcgcgcgtgtcacaatcgcagggtgatgatattcagatgcggttgggttt

SEQ ID NO: 844002 - DNA, 75 bp, synthetic construct
  source 1..75: mol_type = other DNA
gtccctgcgcggcagcgtggcgtggcagaaagggagtgatgattttgcccagacggcagggtttttgtcgatgac

SEQ ID NO: 844003 - DNA, 75 bp, synthetic construct
  source 1..75: mol_type = other DNA
tggtggttatatagaaaagataagatggtatagtcaggatgattatgctggatcagtacttacgttttcattagt

SEQ ID NO: 844004 - DNA, 75 bp, synthetic construct
  source 1..75: mol_type = other DNA
ttctgattatttcggtggcctgcgccattgggattatgcgaattattcattcagtaaaaaagattgaacgttttt

SEQ ID NO: 844005 - DNA, 75 bp, synthetic construct
  source 1..75: mol_type = other DNA
tcctgattatttcggtggtctgcgccattgggattatgcaaattattcattcagtaaaaaagattgaacgcattt

SEQ ID NO: 844006 - DNA, 75 bp, synthetic construct
  source 1..75: mol_type = other DNA
atcttaacggctttaatactgaccagatgctgaagcagctgggcaacctgaatccgcagacatttatgtctggca

SEQ ID NO: 844007 - DNA, 75 bp, synthetic construct
  source 1..75: mol_type = other DNA
tttgtggtgctgacctctgcggcgtcttccgctaacagcggcgtcttctctaccagccgtatgctgtttggtctg

SEQ ID NO: 844008 - DNA, 75 bp, synthetic construct
  source 1..75: mol_type = other DNA
gcgcaggaaggtgttgcgccgaaagcgttcgctaaactctctaagcgcgcagtacccgcgaaagggctgaccttc

SEQ ID NO: 844009 - DNA, 75 bp, synthetic construct
  source 1..75: mol_type = other DNA
acaatcccgatctggagttttacctggtcaccgtccccgatggcaaattaagcccgcgactggcggcgctaaaac

SEQ ID NO: 844010 - DNA, 75 bp, synthetic construct
  source 1..75: mol_type = other DNA
tccgtcaataacctgtttgatacgaaatatgcctacagcgaagggtttattgaagaagggcgtaatttctgggca

SEQ ID NO: 844011 - DNA, 75 bp, synthetic construct
  source 1..75: mol_type = other DNA
tttgtggtgctgacgtctgcggcttcttccgctaacagtggcgtcttctctaccagtcgcatgctgtttggtctg
